United States Patent Application Publication US 2006/0107345 A1 - sequence listing, part 2

SEQ ID NO: 4010 - DNA, 2305 bp, Arabidopsis thaliana
gatatatagagagacgaatcctcgtggaattcaccggcccaagggttttcgtaacgcttgttttttctaactgttccactccactagtggctaataaccagagtggcgcacaatagaataaccgacttgtgtcattagtcaaagaagcgcataatagaacaattaactcgtgcctctgtgggtcccatattttaattataggcgcgtcccttaacttttttgtactatgtcaatgggctgaaagcccacaacttaatttaggctgcggcaattgttactgcgtaaaaggctatacataatgggcctaagcccatatgtatagaaggtgggataaaataattacactcccgccgaggctcttcccttgtcccgcctctctcgctcaaacacttttgactagagaaatcggaagaacaaaaatttcccgataatcttccccaactttttttgttacgatctttgcttagatttcgtctggaataattcgataggcgaggaaattatgagggaagaagaaattgagaagatccgaggcgtggttcgagactgcgtcagtaagcatttgtactcgtcggccatcttcttcgccgacaaagtagcagctcttaccaatgacccatctgacatatatatgcaagctcaagctcttttcctcggccgccattaccgtcgcgcttttcaccttcttaacgcttctaagattgtcctccgagatcttcgattccgttacctcgccgcaaagtgcctcgaggaattgaaggaatgggatcagtgtctattgatgcttggtgatgcgaaggttgatgatgatggaattgtgtatgatgctaaagacgggaacgtgatagattttgataaagatggagaggaccgagagattaatatatcatcggcgatatgctttctaagaggaaaagcatacggagccttacaaaaccggtctcaggctcgacaatggtacaaagctgctatcaaggctgatcctctgtgctatgaggctttggaatgccttattgagagccatatgcttacatctgaagaatcgagtctgctttcttcactacaatttagtccagaagacggatggctctcttctttctattcatgcttgattaagaagtatgacaaagagagcacagtagaactcaagtttaagaagcttgagaatgagactagtggtagtgtctctggctcatctatgatcacattggctaataacactgatctgttggcctgtaaagctgagtactaccatcaatgctgtgaatatcagaagtgttttgaactaactgccgcactccttgagaaagatccttttcatctgaagtgtacgttggtacatttggccgctgccatggaacttggtaattcaaatgagctctatctgatggcgtgcaatttggttaaagactacccttcgaaggcgttgtcttggtttgcggtgggttgttactactattgtatcaaaaagtatgctgaagctcggcggtactttagcaaagctacgggtattgatggctcattctcaccagctcggataggttatggtaattcctttgccgcccaggaggagggtgaccaagccatgtctgcctatcgcactgccgctagactatttccagggtgtcatttgccaactctgtacattggaatggagtatatgcgaactcacagctacaagcttgcggaccagtttttcatgcaagcaaaggcgatatgcccttcggatccacttgtttataatgaactcggagttgttgcatatcatatgaaagagtatggtaaagctgtgcggtggtttgagaagacattggcccatataccatctgcattaactgaatcctgggaaccaactgtggtcaatcttgctcatgcatatagaaagctaagaaaggaccgtgaagctatctcctattatgaaagagcacttacactatcaactaaaagcttaagcacttattccggcttggcttacacttaccatttgcaggggaatttctcagctgccatctcatattatcacaaggccttgtggttgaaacctgatgatcaattttgtacggaaatgttgaacgtggctctcatggatgaatgtcagaacggggttgattcaaaggttgagctctgctaggaattggtcagttaaaattaaccgccttattctagttcttgttgtaatttatctgtactatcatcattgtgacgcctaacataacttataatttattccatgcatcaataaccaagagactgttacaatatattctttaaagggtcaaatacacttctacttttcttattatct

SEQ ID NO: 4011 - protein, 542 aa, Arabidopsis thaliana
MREEEIEKIRGVVRDCVSKHLYSSAIFFADKVAALTNDPSDIYMQAQALFLGRHYRRAFHLLNASKIVLRDLRFRYLAAKCLEELKEWDQCLLMLGDAKVDDDGIVYDAKDGNVIDFDKDGEDREINISSAICFLRGKAYGALQNRSQARQWYKAAIKADPLCYEALECLIESHMLTSEESSLLSSLQFSPEDGWLSSFYSCLIKKYDKESTVELKFKKLENETSGSVSGSSMITLANNTDLLACKAEYYHQCCEYQKCFELTAALLEKDPFHLKCTLVHLAAAMELGNSNELYLMACNLVKDYPSKALSWFAVGCYYYCIKKYAEARRYFSKATGIDGSFSPARIGYGNSFAAQEEGDQAMSAYRTAARLFPGCHLPTLYIGMEYMRTHSYKLADQFFMQAKAICPSDPLVYNELGVVAYHMKEYGKAVRWFEKTLAHIPSALTESWEPTVVNLAHAYRKLRKDREAISYYERALTLSTKSLSTYSGLAYTYHLQGNFSAAISYYHKALWLKPDDQFCTEMLNVALMDECQNGVDSKVELC

SEQ ID NO: 4012 - protein, 499 aa, Arabidopsis thaliana
MQAQALFLGRHYRRAFHLLNASKIVLRDLRFRYLAAKCLEELKEWDQCLLMLGDAKVDDDGIVYDAKDGNVIDFDKDGEDREINISSAICFLRGKAYGALQNRSQARQWYKAAIKADPLCYEALECLIESHMLTSEESSLLSSLQFSPEDGWLSSFYSCLIKKYDKESTVELKFKKLENETSGSVSGSSMITLANNTDLLACKAEYYHQCCEYQKCFELTAALLEKDPFHLKCTLVHLAAAMELGNSNELYLMACNLVKDYPSKALSWFAVGCYYYCIKKYAEARRYFSKATGIDGSFSPARIGYGNSFAAQEEGDQAMSAYRTAARLFPGCHLPTLYIGMEYMRTHSYKLADQFFMQAKAICPSDPLVYNELGVVAYHMKEYGKAVRWFEKTLAHIPSALTESWEPTVVNLAHAYRKLRKDREAISYYERALTLSTKSLSTYSGLAYTYHLQGNFSAAISYYHKALWLKPDDQFCTEMLNVALMDECQNGVDSKVELC

SEQ ID NO: 4013 - protein, 449 aa, Arabidopsis thaliana
MLGDAKVDDDGIVYDAKDGNVIDFDKDGEDREINISSAICFLRGKAYGALQNRSQARQWYKAAIKADPLCYEALECLIESHMLTSEESSLLSSLQFSPEDGWLSSFYSCLIKKYDKESTVELKFKKLENETSGSVSGSSMITLANNTDLLACKAEYYHQCCEYQKCFELTAALLEKDPFHLKCTLVHLAAAMELGNSNELYLMACNLVKDYPSKALSWFAVGCYYYCIKKYAEARRYFSKATGIDGSFSPARIGYGNSFAAQEEGDQAMSAYRTAARLFPGCHLPTLYIGMEYMRTHSYKLADQFFMQAKAICPSDPLVYNELGVVAYHMKEYGKAVRWFEKTLAHIPSALTESWEPTVVNLAHAYRKLRKDREAISYYERALTLSTKSLSTYSGLAYTYHLQGNFSAAISYYHKALWLKPDDQFCTEMLNVALMDECQNGVDSKVELC

SEQ ID NO: 4014 - DNA, 1085 bp, Arabidopsis thaliana
agagcttgaaggcaatgccttgtgtcggtaactgacgaatcacaaccgttgattcgatcgaattgatccggtacttctgaagctccgattctacgtcgactactttttctccgatgttaacatcgtcgtcgtcttctcggagagccattgattgtgaccaatcctcacgacggccccgctactatttattagggcactcaaatttggttacacgtggagggttgttattggtgatgacgtcatcaaatgtaattgaagaagcctctaagatagagagagggtttgaaaatgtgagattcagagtttgtcagcgagagagacgaagaaagaaagagaggagaggtggaagatgattaaggcagtgatgatgatgaacacacaaggcaaaccacgtctagctaaattctacgattacttgcctgtggagaagcagcaggagcttattcgcggcgtgttttcagtattgtgcagtagacctgagaacgtaagcaattttctggagatcgaatcattgtttggaccggactcgcggcttgtatacaagcattatgctacactctattttgttcttgtatttgatggttcagaaaatgagcttgctatgcttgatctcattcaagttcttgttgaaacactggacaaatgcttcagcaatgtctgcgaactcgacattgtgttcaactacagcaagatgcacgcggtgttagatgagattgtatttggaggacaagtactggaaactagttctgctgaagtcatgaaggctgttgaagaaatatcaaaattagaagctgcctcaaattcgatttcacttgtccccaagtctgtttccgggtggcgtggccgttagcttcgaaaaaacttgcctgaataagtcagagaacatgtaacaaaagcttatccaagtcttgatccaaacatgtttgtttaatgagcgtggaatgttgcgtggatgggctcagtagtctaacgtgggcctgtgaattgtaattgggtaacggacggaactgcttgctatttttgagaatgtaacaaaaacgacgagaagttaagatctataaatgataaatgatgtccaaattcag

SEQ ID NO: 4015 - protein, 166 aa, Arabidopsis thaliana
MIKAVMMMNTQGKPRLAKFYDYLPVEKQQELIRGVFSVLCSRPENVSNFLEIESLFGPDSRLVYKHYATLYFVLVFDGSENELAMLDLIQVLVETLDKCFSNVCELDIVFNYSKMHAVLDEIVFGGQVLETSSAEVMKAVEEISKLEAASNSISLVPKSVSGWRGR

SEQ ID NO: 4016 - protein, 161 aa, Arabidopsis thaliana
MMMNTQGKPRLAKFYDYLPVEKQQELIRGVFSVLCSRPENVSNFLEIESLFGPDSRLVYKHYATLYFVLVFDGSENELAMLDLIQVLVETLDKCFSNVCELDIVFNYSKMHAVLDEIVFGGQVLETSSAEVMKAVEEISKLEAASNSISLVPKSVSGWRGR

SEQ ID NO: 4017 - protein, 160 aa, Arabidopsis thaliana
MMNTQGKPRLAKFYDYLPVEKQQELIRGVFSVLCSRPENVSNFLEIESLFGPDSRLVYKHYATLYFVLVFDGSENELAMLDLIQVLVETLDKCFSNVCELDIVFNYSKMHAVLDEIVFGGQVLETSSAEVMKAVEEISKLEAASNSISLVPKSVSGWRGR

SEQ ID NO: 4018 - DNA, 443 bp, Arabidopsis thaliana
ctctgctgaagaaactaaatttcgcagtgaaatggagaaagtgacggagaatcccaattccgagacgcaaccttctcctgctcctccgcccgaatcatcaaatggatgcagacgacgatgacgagaatgtgaaacagctcaaggagtgttcttctctctatttatctttacaggattgtcttgttgatagtaatagggactggaaatcttgccaaaaacatgttcaagctttgaaggaatgtcatgaaaggagaatgaagaaatgatagagattaagaaaagccaatacttgattagttactgcttatagaggaaccatataagtatgacatttttgtcgtcttgcaaaattgattaataaaacggtgtcttgtgattgtgttcttgttgtggggattgcaaaatttacaagctttcattcaatgtaatcttggttttatttc

SEQ ID NO: 4019 - protein, 54 aa, Arabidopsis thaliana
MDADDDDENVKQLKECSSLYLSLQDCLVDSNRDWKSCQKHVQALKECHERRMKK

SEQ ID NO: 4020 - protein, 39 aa, Arabidopsis thaliana
SAEETKFRSEMEKVTENPNSETQPSPAPPPESSNGCRRR

SEQ ID NO: 4021 - DNA, 1131 bp, Arabidopsis thaliana
agtagtagtcgcctgttactggaattattttcaatttctgaaatcaaatccgattgagagaaaacactaacttcaaattcgagatctgaattagggattctagaggatgacgaaggattttccaattccaccggttgttttccccaccagtggatcatctccggccaccgcaaatgttcagcaacgctgagttcccacagctccttaccaaccaccacgtcaatcctccgcttcatcttcaatccctttcattccatttgaaatcggatccgccgccgtttcaatgccggcgggaccattcgacggaacaatcgcttcatctgcatctttcggtagaggagtctctgcttcgtttgaggatgaggagcctttactcgacgaactcggtatccatccagatcaaatctggaagaaaactagatcgattctcaatccttttcgaatcaatcagactgttcacaaagattcagatctctctggtccgatcttcttataccttgcgctttgcttatttcaattgctcgctgggaagatacagtttggtgttatacttggttgggttgttgtttcttctatcttcttgtacattgtcttcaatatgcttgctggtagaaatgggaatcttaatcttcatacttgtacgagtttagttggttactctctgcttcccgttgtgattttgtccgcggtgtccttgtttgtgccacaaggtgctggtcccgttcggtttgtgctcggtgcggctttcgtgttgtgggctactagagcttgttctaatctggtggtgtctcttgctgatggaggagaagagcaccgtggattgatttcgtacgcctgtttcttaatctatactctgttttcgcttctcgttatcttttgattccttgctttcgaatattgatagattgttgaactttccggtgccattactgagtagcttaatgtgatatcttataagtgtttgtggtgaaatagctgagacattgtaaaggtttttgataactttagaggaagttgttattgatgtggtttaagtaattgaagatgatgttctaagatctcttactattggaaatctcgaaacgtttatgccatatacatccttttgtggttctgtttgacagtttcttg

SEQ ID NO: 4022 - protein, 198 aa, Arabidopsis thaliana
MPAGPFDGTIASSASFGRGVSASFEDEEPLLDELGIHPDQIWKKTRSILNPFRINQTVHKDSDLSGPIFLYLALCLFQLLAGKIQFGVILGWVVVSSIFLYIVFNMLAGRNGNLNLHTCTSLVGYSLLPVVILSAVSLFVPQGAGPVRFVLGAAFVLWATRACSNLVVSLADGGEEHRGLISYACFLIYTLFSLLVIF

SEQ ID NO: 4023 - protein, 158 aa, Arabidopsis thaliana
MFSNAEFPQLLTNHHVNPPLHLQSLSFHLKSDPPPFQCRRDHSTEQSLHLHLSVEESLLRLRMRSLYSTNSVSIQIKSGRKLDRFSILFESIRLFTKIQISLVRSSYTLRFAYFNCSLGRYSLVLYLVGLLFLLSSCTLSSICLLVEMGILIFILVRV

SEQ ID NO: 4024 - DNA, 1471 bp, Arabidopsis thaliana
aaaacacaaaccctatcttttcttcttcttcttcttcgttcagtcttcactttcttttcttttctccgccaccacacaaatacattcttcattctttgtaactttcacgctattcttcctcaatatattcattcgacctcctctcttcattcttaatttctcaaaaatcttatctttctccctcatttttcccgtcgagggttccttaatctccttcctaggaacgtttcatcgatttcatatttgctttccttaatccacaacgtttcttccttcgtttttttctgcaattttgttttcctttacaccaaattcatctcttagtcttgtccaattttcgattttttttccgacaatcctgattgtttgtttttttatctgtcgggatttcgaatggcgcttgcgtatgatcctctcttcattacatcggacaaatctttgtccgcctttgatgttgcctcttcaccgcctcagcccatgaatttaacacaagacgagctcaaacgtatcgccgcttacaaagccgtggaattcgtcgagtccggcatggttctcggtctcggaaccggctccaccgccaaacacgccgtcgaccgaatcggcgagcttctccgtcaaggcaaactcgagaacatcgttggtataccaacgtctaagaagacgcaggagcaggctctgtctctcggcatccctctctctgatctcgacgcacaccctgtcatcgatctctccatcgacggcgcagacgaggtcgacccttttctcaacctggtaaaaggcagaggagggtctctgcttcgagagaagatgatcgaaggagcttctaagaagtttgtggtgattgttgacgactccaagatggtgaagcatattggtggaagcaagcttgctcttccggtggagatagtgcccttttgctggaagttcacggcggagaagctccggagtctgctggaaggatacgggtgtgaagcgaatcttcggttgggagagaaagggaaggcctttgtgacagacaatgggaattacatagtggatatgcatgtggaagaggatatgggagatttgggagcagtgagtgatgcgattctgaggctaccgggagtagtggaacatgggatgtttctggatatggcttctactgttatcattgcaggtgagcttggtgttaagatcaagaacaaacactgaaacacacaccacacctcttctcgttgattttggcctttatgtattaggagacagaggattatggtttgctctatggtttagatgatatgagattaggttttggatgatgtcactgtgaggaggatgaatgactttcttttgacagagttttggatgcattgacatcgtcgtcatcatcatcaatcaatcttgtaaacagcattttgcttcttcattgcctttgttgtgtttgaatgctcttcttttactactgggcctgtgttgggctttgctccttgtt

SEQ ID NO: 4025 - protein, 265 aa, Arabidopsis thaliana
MALAYDPLFITSDKSLSAFDVASSPPQPMNLTQDELKRIAAYKAVEFVESGMVLGLGTGSTAKHAVDRIGELLRQGKLENIVGIPTSKKTQEQALSLGIPLSDLDAHPVIDLSIDGADEVDPFLNLVKGRGGSLLREKMIEGASKKFVVIVDDSKMVKHIGGSKLALPVEIVPFCWKFTAEKLRSLLEGYGCEANLRLGEKGKAFVTDNGNYIVDMHVEEDMGDLGAVSDAILRLPGVVEHGMFLDMASTVIIAGELGVKIKNKH

SEQ ID NO: 4026 - protein, 237 aa, Arabidopsis thaliana
MNLTQDELKRIAAYKAVEFVESGMVLGLGTGSTAKHAVDRIGELLRQGKLENIVGIPTSKKTQEQALSLGIPLSDLDAHPVIDLSIDGADEVDPFLNLVKGRGGSLLREKMIEGASKKFVVIVDDSKMVKHIGGSKLALPVEIVPFCWKFTAEKLRSLLEGYGCEANLRLGEKGKAFVTDNGNYIVDMHVEEDMGDLGAVSDAILRLPGVVEHGMFLDMASTVIIAGELGVKIKNKH

SEQ ID NO: 4027 - protein, 214 aa, Arabidopsis thaliana
MVLGLGTGSTAKHAVDRIGELLRQGKLENIVGIPTSKKTQEQALSLGIPLSDLDAHPVIDLSIDGADEVDPFLNLVKGRGGSLLREKMIEGASKKFVVIVDDSKMVKHIGGSKLALPVEIVPFCWKFTAEKLRSLLEGYGCEANLRLGEKGKAFVTDNGNYIVDMHVEEDMGDLGAVSDAILRLPGVVEHGMFLDMASTVIIAGELGVKIKNKH

SEQ ID NO: 4028 - DNA, 1127 bp, Arabidopsis thaliana
atcaaccgtaaacttattgctttcttccttctggtagttccccaaaactcaaagtactctttttctgtgtaaacaaaaaaaaaatcaacggtactctttctcttctaagttgttgttccatggagaagagtttccagaaatcagctctccttgtgaccttgactctcttcttcttcattccagtttcaatctcggttccattcattctgtttcatgggattagagatcaatgctccaatggtggagtgagcagcttcgtacagctccttagcaacctctctagctcccatggatcttgcttagaaataggaaatggagagcaagattcggtgactatgccgcttacgcaacaagcgagtgtagcgtgtgagaaagttaaacagatgaaggatttgagtcaaggctacaacattgttgcacagtctcaaggaaacttggtagctagaggtctaatcgagttttgtgacaatgctcctccggtcttcaactatatatctttaggaggtcctcatgctggcatatccgacattcccaagtgtaattctacactttgcgagttgctgaaaacagcggtctacaccgacttcgtacaagatcatattgctccaagtggttatatcaagattcctacagatataaaagattacctggaacactccaagtatctgccaaagatcaacaacgagagacctaacgaaaggaacaccacttttaaagaccggttcactagcttgcacaacttggtccttgtcatgtttgagggtgatgcagtagtgattcctaaagaaagttcttggttcggatattacccggatggagcttccacacctcttttgtctcctcaacagacaaagctctatactgaggattggattggtctgaaaacattggatgctgccagaaaagttaagtttgtcagtgtccctggcgagcacctaagaatagcgcaagacgacgttgtaaaacacgtcgtgccttacctcaagaaccagcctgcgtctatgagtgaagatttggagatactgcatctatgattgagacttcattgttatgctctcttagaatcaaatttaaaagtgaagaactttagaggctcctttttcttaatcataaatccaaataatttc

SEQ ID NO: 4029 - protein, 304 aa, Arabidopsis thaliana
MEKSFQKSALLVTLTLFFFIPVSISVPFILFHGIRDQCSNGGVSSFVQLLSNLSSSHGSCLEIGNGEQDSVTMPLTQQASVACEKVKQMKDLSQGYNIVAQSQGNLVARGLIEFCDNAPPVFNYISLGGPHAGISDIPKCNSTLCELLKTAVYTDFVQDHIAPSGYIKIPTDIKDYLEHSKYLPKINNERPNERNTTFKDRFTSLHNLVLVMFEGDAVVIPKESSWFGYYPDGASTPLLSPQQTKLYTEDWIGLKTLDAARKVKFVSVPGEHLRIAQDDVVKHVVPYLKNQPASMSEDLEILHL

SEQ ID NO: 4030 - protein, 232 aa, Arabidopsis thaliana
MPLTQQASVACEKVKQMKDLSQGYNIVAQSQGNLVARGLIEFCDNAPPVFNYISLGGPHAGISDIPKCNSTLCELLKTAVYTDFVQDHIAPSGYIKIPTDIKDYLEHSKYLPKINNERPNERNTTFKDRFTSLHNLVLVMFEGDAVVIPKESSWFGYYPDGASTPLLSPQQTKLYTEDWIGLKTLDAARKVKFVSVPGEHLRIAQDDVVKHVVPYLKNQPASMSEDLEILHL

SEQ ID NO: 4031 - protein, 216 aa, Arabidopsis thaliana
MKDLSQGYNIVAQSQGNLVARGLIEFCDNAPPVFNYISLGGPHAGISDIPKCNSTLCELLKTAVYTDFVQDHIAPSGYIKIPTDIKDYLEHSKYLPKINNERPNERNTTFKDRFTSLHNLVLVMFEGDAVVIPKESSWFGYYPDGASTPLLSPQQTKLYTEDWIGLKTLDAARKVKFVSVPGEHLRIAQDDVVKHVVPYLKNQPASMSEDLEILHL

SEQ ID NO: 4032 - DNA, 1045 bp, Arabidopsis thaliana
gttttttttttggtggatccaattttcatcttcccttttaggttggaattttgagttttatcttcccatttctggattttgtttctctctagtctattccttcaaaaccaagaacccaactttgttttatattcaaaagttgtttgctttcatcgcgtttggtgttcatcttcatctggtttgagattataataacatggaaggaatcattgtgagaagagttataccatctgataacagttgtctcttcaatgcaatcggttatgtcatggacaaggacaaaaacaaagctcctgagctcagacaggtgatagcagcagcagttgcaagcaacaaggagaaatataatgaagcatttctagggaagctcaatgaagaatattgtgcttggattctcaatccagacaagtggggaggtgcgattgagctttcgatattagcagattattatggtcgagaaattgcagcttacgacattcaaactagtcgatgtgacttgtatggacagacgagaaactacgacgaaagagttatgctgatctatgacggtcttcattacgatgctcttgctctgtctccatttgaaggggccgaggaagattttgatatgactatatatccagttggtaaagatagatccataggatcaattgaagggcttgctttgaatctagtgaaggaccaacaaaggaaaaggagttacacagatactgcaaacttcactctacgttgcggtgtttgccaaattggagttattggacaaaaggaagctgtggaacatgctcaagcaactggtcatgttaattttcaagaatacaaataagagaatgattgatttgattcttttatacagttccaagaaacaagaaagtaaaccacgaaaatgatgtgcttaattttaattttatgttgtcaacaatacaaattcagtctgttgtgcaattatcttgtgttgtgttctttactctagtgatgacctctttatgaggaggatcattgttgtctcaccaataatgccatgaaaaaaatgaacttctttggattc

SEQ ID NO: 4033 - protein, 208 aa, Arabidopsis thaliana
MEGIIVRRVIPSDNSCLFNAIGYVMDKDKNKAPELRQVIAAAVASNKEKYNEAFLGKLNEEYCAWILNPDKWGGAIELSILADYYGREIAAYDIQTSRCDLYGQTRNYDERVMLIYDGLHYDALALSPFEGAEEDFDMTIYPVGKDRSIGSIEGLALNLVKDQQRKRSYTDTANFTLRCGVCQIGVIGQKEAVEHAQATGHVNFQEYK

SEQ ID NO: 4034 - protein, 184 aa, Arabidopsis thaliana
MDKDKNKAPELRQVIAAAVASNKEKYNEAFLGKLNEEYCAWILNPDKWGGAIELSILADYYGREIAAYDIQTSRCDLYGQTRNYDERVMLIYDGLHYDALALSPFEGAEEDFDMTIYPVGKDRSIGSIEGLALNLVKDQQRKRSYTDTANFTLRCGVCQIGVIGQKEAVEHAQATGHVNFQEYK

SEQ ID NO: 4035 - DNA, 1854 bp, Arabidopsis thaliana
attaccgaagagaaccaatacaaattcaaggagtgatttagattaacgcctaaatgcatcatttgcgattacaaaatcaaattttgctccagatggattttaattacttttcgtcgcttttttactttagagtttagaccttgaaatcgatggaaagcaatcgaacccgaaattctctcatttctcaatcaaaactatcttctttcacttctgggcaagaagctctgttgtggaacatcggaaatcagaactgaaacagaaacagaaaccatggagaagagagaagacgaacaacaaaagcgcgacgattctagattcaatcaaacactcaagaacgtccaagggtttcttaaaggtagaagtattcctggtaaggtattgttgactaggagatcagatcctcctccatacccaatctctccaacatatcaacggagcttatctgagaatgacgccggaagaaatgagctattcgaaagtcctgttgaggtggaggatcacaattcaagcaagaaacatgataatacatatgctggtaagctacgatcaaactctagtgctgaaaggagtgtgaaagaagttcaaaacttgaagataggtgttcgatcaagtgactctgctagagttatgaagttcaacaaagtgctttcagaaacaactgtcatattagagaaactgcgcgagctagcatggaatggtgtaccacactatatgcggcctgatgtctggcggcttctcttgggatatgcaccacctaattcagatagaagggaggctgttctgagaagaaaacgtcttgaatatctggaatctgttggccaattttatgaccttccagattccgaacgttctgatgatgagatcaatatgcttcgccagattgctgttgactgtccgaggactgtaccagatgtcagtttctttcagcaagaacaggtgcagaaatcactggagcgtattctttacacgtgggccattagacatccagcaagcggatatgttcagggaataaatgacctggtcacgcccttcctagtgattttcttgtcagaatatctagatggcggtgtagacagttggtcaatggatgatctatctgctgaaaaagtctcagatgtagaagcggattgctactggtgcttaacaaagctccttgacggtatgcaagatcattacacgtttgctcaacctggaatccagagacttgtgtttaagctgaaggaactggtcaggcgtatcgatgaacctgtttcaagacacatggaagagcatgggctagagtttcttcaatttgctttccggtggtataattgtcttctgattcgtgagatcccattcaatctcatcaatcgactatgggacacttatcttgctgaaggagatgcgttgccagacttcctggtgtatatatatgctagctttctcttgacgtggtctgatgagctgaagaagctagattttcaagaaatggtaatgttcctgcaacaccttccgacacataactggtcagaccaagagctcgaaatggttttgtcaagagcttacatgtggcatagtatgttcaataattccccaaaccatttggctagctgaaatgacttttcctccatggtgcttgctgctgtttttccctttgttatattatcttcttcttcttgttgtctaaatcagctttcgttttgttttgggttatggtaaatgctaacattcttgtcttgttaattgttattagtttatgtatggtttcacttgttgaatctgtcaccagtttgtgtgtttgtaatatttgtagctttcactaatttggctctctcaatatttttttttttttgggaattcatgaaatttggggag

SEQ ID NO: 4036 - protein, 440 aa, Arabidopsis thaliana
MEKREDEQQKRDDSRFNQTLKNVQGFLKGRSIPGKVLLTRRSDPPPYPISPTYQRSLSENDAGRNELFESPVEVEDHNSSKKHDNTYAGKLRSNSSAERSVKEVQNLKIGVRSSDSARVMKFNKVLSETTVILEKLRELAWNGVPHYMRPDVWRLLLGYAPPNSDRREAVLRRKRLEYLESVGQFYDLPDSERSDDEINMLRQIAVDCPRTVPDVSFFQQEQVQKSLERILYTWAIRHPASGYVQGINDLVTPFLVIFLSEYLDGGVDSWSMDDLSAEKVSDVEADCYWCLTKLLDGMQDHYTFAQPGIQRLVFKLKELVRRIDEPVSRHMEEHGLEFLQFAFRWYNCLLIREIPFNLINRLWDTYLAEGDALPDFLVYIYASFLLTWSDELKKLDFQEMVMFLQHLPTHNWSDQELEMVLSRAYMWHSMFNNSPNHLAS

SEQ ID NO: 4037 - protein, 321 aa, Arabidopsis thaliana
MKFNKVLSETTVILEKLRELAWNGVPHYMRPDVWRLLLGYAPPNSDRREAVLRRKRLEYLESVGQFYDLPDSERSDDEINMLRQIAVDCPRTVPDVSFFQQEQVQKSLERILYTWAIRHPASGYVQGINDLVTPFLVIFLSEYLDGGVDSWSMDDLSAEKVSDVEADCYWCLTKLLDGMQDHYTFAQPGIQRLVFKLKELVRRIDEPVSRHMEEHGLEFLQFAFRWYNCLLIREIPFNLINRLWDTYLAEGDALPDFLVYIYASFLLTWSDELKKLDFQEMVMFLQHLPTHNWSDQELEMVLSRAYMWHSMFNNSPNHLAS

SEQ ID NO: 4038 - protein, 293 aa, Arabidopsis thaliana
MRPDVWRLLLGYAPPNSDRREAVLRRKRLEYLESVGQFYDLPDSERSDDEINMLRQIAVDCPRTVPDVSFFQQEQVQKSLERILYTWAIRHPASGYVQGINDLVTPFLVIFLSEYLDGGVDSWSMDDLSAEKVSDVEADCYWCLTKLLDGMQDHYTFAQPGIQRLVFKLKELVRRIDEPVSRHMEEHGLEFLQFAFRWYNCLLIREIPFNLINRLWDTYLAEGDALPDFLVYIYASFLLTWSDELKKLDFQEMVMFLQHLPTHNWSDQELEMVLSRAYMWHSMFNNSPNHLAS

SEQ ID NO: 4039 - DNA, 1369 bp, Arabidopsis thaliana
agcaaaccgaagtgggaacgaaaccccatgctccaagtccaattaaataacatatgtccacagaaatgttttcaaaattcgaataagccacagcaacgtgtcttgttcatatatccactataacccaaagctgcttcaatggtcggatatggacacgtgtcagttaatcagaccatctccaagaaaaaatatcccaaatctttcttccctattcagtcccccaatcaacaatcctcttcacatttctattttctcctccgaggtcgtctctcgaccaaaccacaaaaaccagaacaaaaataactaaaaaacaatcagatctgagatcgaacaaaacaacatgaacacgttaatcccatcggagaaaagatggatcatcaccggcgttttactagccggtttagttggcggtgctttgcttttcacaagcttcatacgagccgctgacgaaacgctcttcctctgttccacagcaagcgccaaaagcagagcggtggctgcggcagctgattacgaagcgactccgattcagcttcaagcgatcgtccactacgcgacatctaacgttgtcccacaacagaatcttgctgagatctcgatctctttcaacatcttgaaaaagctagctccggctaactttctcgtgttcggtctcggtcgtgactcgctcatgtgggcttctttaaatccacgtggcaaaaccttgttcttggaagaagatcttgaatggtttcagaaagtgaccaaagactctcctttcttacgtgcgcatcacgtgcgttacaggacgcagcttcaacaagccgattcgcttctacgttcgtacaaaacggagcctaagtgttttccggcgaaatcttatctccggggaaacgagaagtgtaagctagctctcacgggactgcccgatgagttctacgatacagagtgggatctgctgatggtcgatgctcctaaaggttacttcgcagaagctccgggaagaatggcggcgattttctcggcggctgttatggctaggaaccggaagaaaccgggagttacgcacgtgttcttgcacgatgttaatcggagggtggagaagacttttgccgaggagtttttatgccggaagtatagagtcaacgccgccgggaggttatggcattttgctattcctccggcggctgcgaacgctacgattgactctggtgattataggttttgctaagattgcgacacgatttatcttcttatttcctcttttgcccttttattttacttttttgaggaattttattacagcattgggttcacttactatctgatttagtgccgacagttttggatctgcatctcgtgtttcgttatttttagttacaggctttcc

SEQ ID NO: 4040 - protein, 289 aa, Arabidopsis thaliana
MNTLIPSEKRWIITGVLLAGLVGGALLFTSFIRAADETLFLCSTASAKSRAVAAAADYEATPIQLQAIVHYATSNVVPQQNLAEISISFNILKKLAPANFLVFGLGRDSLMWASLNPRGKTLFLEEDLEWFQKVTKDSPFLRAHHVRYRTQLQQADSLLRSYKTEPKCFPAKSYLRGNEKCKLALTGLPDEFYDTEWDLLMVDAPKGYFAEAPGRMAAIFSAAVMARNRKKPGVTHVFLHDVNRRVEKTFAEEFLCRKYRVNAAGRLWHFAIPPAAANATIDSGDYRFC

SEQ ID NO: 4041 - protein, 179 aa, Arabidopsis thaliana
MWASLNPRGKTLFLEEDLEWFQKVTKDSPFLRAHHVRYRTQLQQADSLLRSYKTEPKCFPAKSYLRGNEKCKLALTGLPDEFYDTEWDLLMVDAPKGYFAEAPGRMAAIFSAAVMARNRKKPGVTHVFLHDVNRRVEKTFAEEFLCRKYRVNAAGRLWHFAIPPAAANATIDSGDYRFC

SEQ ID NO: 4042 - DNA, 840 bp, Arabidopsis thaliana
acgtggcagaatctctacagagtaaatgccacaagtctttcttcttcttcttcttcccttcaccaataaggcaataatccttcttcttctttctaaaatccctaaattacaaattgttaagaacttggacaattctatttctagggtttgtgagattcgttcggactctaatggggaagaaacgaaaatccgaggctacgcggctcgatgaggttgatcgaaccatgtatggcgcgtttcgaggcgctgctaattcgctctcgcagctctatacacatgccatgaatcaccaacgcgtttctttcctcgccggtgaacgtcgcggaatggagaagctttaccaatggattgtgagacaagaagaacaaggaactagagtatccacagctgatattactacctacttacagaatgcgcttgaatatgaacctgaggagacgtcgataccactccccatgcaagagttttatcagcaccaattcgctccaccaaacgtaaatacatcagtagctcatgttccttcaagtcacatagcacaacaacaacattatgattgtaaccaagagaaactcttgattccaccaaatggtctctcaagtccggttcgaagaacccttcaggacttcaacttgtgtgaggctgagtctggtaataataactacaatcccaactctacaggtgaacacttatcttactgaataaaatcttgtttcatttgccgaaagatgaaaaacataaatcattccattgtaaagtctcaattgtttgtggtaaagtattgtctcatgtaatacacaaaacactttttcctaatctttcaaagaagctggatgaatgtgc

SEQ ID NO: 4043 - protein, 175 aa, Arabidopsis thaliana
MGKKRKSEATRLDEVDRTMYGAFRGAANSLSQLYTHAMNHQRVSFLAGERRGMEKLYQWIVRQEEQGTRVSTADITTYLQNALEYEPEETSIPLPMQEFYQHQFAPPNVNTSVAHVPSSHIAQQQHYDCNQEKLLIPPNGLSSPVRRTLQDFNLCEAESGNNNYNPNSTGEHLSY

SEQ ID NO: 4044 - protein, 157 aa, Arabidopsis thaliana
MYGAFRGAANSLSQLYTHAMNHQRVSFLAGERRGMEKLYQWIVRQEEQGTRVSTADITTYLQNALEYEPEETSIPLPMQEFYQHQFAPPNVNTSVAHVPSSHIAQQQHYDCNQEKLLIPPNGLSSPVRRTLQDFNLCEAESGNNNYNPNSTGEHLSY

SEQ ID NO: 4045 - protein, 138 aa, Arabidopsis thaliana
MNHQRVSFLAGERRGMEKLYQWIVRQEEQGTRVSTADITTYLQNALEYEPEETSIPLPMQEFYQHQFAPPNVNTSVAHVPSSHIAQQQHYDCNQEKLLIPPNGLSSPVRRTLQDFNLCEAESGNNNYNPNSTGEHLSY

SEQ ID NO: 4046 - DNA, 2276 bp, Arabidopsis thaliana
gtgagagagagagagagacagataggaatctttgagcgattcgtcttcctcctctatcgccctctactcttcaccggaactgtgatctcaccggaatatccctcctttatttatcctctactcatccgttttactctctccctccgtcgatcttctctttctcttgatcgcctccgtccattctttatcatttcttaattcagaattgtgatcgatggatgattattttagcgcggaggaagaggcttgctattactcctccgatcaagattctttggatggaattgataatgaagagtctgaattgcagcctctgtcctctaaaagatcaaacactcaggtcatcactcaggaatcgcttctagcagcacagagagaagatttgctaagggtgatggaattgttatcaataaaggagcaccatgcacggactcttcttattcattaccagtgggatgtggagaagttgtttgctgtgtttgttgagaaaggaaaagatagcttgttttctggagctggtgtcactgtcttcgattatcaatatggcaactcttcctttcctcagtcttcacagatgagttgtgatgtttgcatggaggatttaccaggtgatcacatgacaagaatggactgtggccattgcttttgcaataattgttggacggagcattttactgtgcagataaatgaaggtcagagcaaaaggattagatgcatggctcatcaatgtaatgctatttgtgatgaagatattgtcaggagtctagtcagtaaaaagcgtccagatctagctgcgaagtttgatcgttaccttcttgagtcgtacatcgaagataacagaatggtcaagtggtgtcctagcactccgcattgtgggaatgctatacgagctgaggatgacaagttgtgcgaagttgaatgttcttgtggtcttcagttctgtttcagttgtctgtgtcaagcccactccccttgctcttgtttgatgtgggagttatggagaaagaagtgtcgagatgagtctgagacaatcaactggataaccgttcacacaaagctgtgtcccaaatgttacaaacctgtggaaaagaatggtggatgcaatctcgtgaggtgtatttgtgggcagtgtttttgttggctatgtggtggagctactggaagtgatcacacttataggagtatcgctggtcacagttgtggtcggtaccaagatgacaaagagaagcagatggaaagagcgaagagagatttaaacaggtatacgcattatcatcaccgatacaaagctcatacagattcatcaaagctagaagataaacttagggatactatccatgagaaagtgtcgaaatcagaaaagagggagttgaagcttaaagacttcagctgggtcaccaatggactcgaccggttattcagatcaaggcgagttctttcatattcgtatgcttttgcatattatatgtttggtgaagagatgtttaaagatgagatgacccctgaggagagagagataaagaagaatttgtttgaggatcagcagcaacaacttgaaagtaatgtggagaaactttcgcagttccttgaggagccctttgatgaatttagtaatgataaagttatggcgataaggattcaaatcatcaatttgtctgtcgccgtcgatacactctgcaagaaaatgtacgagtgcattgagaatgacttactcggatctctccaacttggcatccacaacatctcaccttacagatcgaagggaatcgaacaagcagctcagttttatgcttcctggaattccaaagatgctgacaaattccaacctttggatagtggtacaagcggagtgacatcgaggcctgagcaagcttcaggatcaaggagctcggaagacaccatttgctcatcttcacagaaacgtcccaaaaaagaaggaagtttcttaaacaacaaagtcactttattggatttgaacttgccagctgatttcgtcgaccagaactgaactcaaatcctctcttgcttagtccaaatgagatatgatgacatagcaaaaggtgtttgactatatatctatcaccttcaagactcgtgactctggactgattaatttgtctttcttatagtttttctggttttcgtacaactataattatgactaccccttacttttgcttctttagttatagatctttaattcagcctctttaaactctgctgcttctcaatgtctatgatgtcaaaagagttattttattagtaactaatttaat

SEQ ID NO: 4047 - protein, 597 aa, Arabidopsis thaliana
MDDYFSAEEEACYYSSDQDSLDGIDNEESELQPLSSKRSNTQVITQESLLAAQREDLLRVMELLSIKEHHARTLLIHYQWDVEKLFAVFVEKGKDSLFSGAGVTVFDYQYGNSSFPQSSQMSCDVCMEDLPGDHMTRMDCGHCFCNNCWTEHFTVQINEGQSKRIRCMAHQCNAICDEDIVRSLVSKKRPDLAAKFDRYLLESYIEDNRMVKWCPSTPHCGNAIRAEDDKLCEVECSCGLQFCFSCLCQAHSPCSCLMWELWRKKCRDESETINWITVHTKLCPKCYKPVEKNGGCNLVRCICGQCFCWLCGGATGSDHTYRSIAGHSCGRYQDDKEKQMERAKRDLNRYTHYHHRYKAHTDSSKLEDKLRDTIHEKVSKSEKRELKLKDFSWVTNGLDRLFRSRRVLSYSYAFAYYMFGEEMFKDEMTPEEREIKKNLFEDQQQQLESNVEKLSQFLEEPFDEFSNDKVMAIRIQIINLSVAVDTLCKKMYECIENDLLGSLQLGIHNISPYRSKGIEQAAQFYASWNSKDADKFQPLDSGTSGVTSRPEQASGSRSSEDTICSSSQKRPKKEGSFLNNKVTLLDLNLPADFVDQN

SEQ ID NO: 4048 - protein, 537 aa, Arabidopsis thaliana
MELLSIKEHHARTLLIHYQWDVEKLFAVFVEKGKDSLFSGAGVTVFDYQYGNSSFPQSSQMSCDVCMEDLPGDHMTRMDCGHCFCNNCWTEHFTVQINEGQSKRIRCMAHQCNAICDEDIVRSLVSKKRPDLAAKFDRYLLESYIEDNRMVKWCPSTPHCGNAIRAEDDKLCEVECSCGLQFCFSCLCQAHSPCSCLMWELWRKKCRDESETINWITVHTKLCPKCYKPVEKNGGCNLVRCICGQCFCWLCGGATGSDHTYRSIAGHSCGRYQDDKEKQMERAKRDLNRYTHYHHRYKAHTDSSKLEDKLRDTIHEKVSKSEKRELKLKDFSWVTNGLDRLFRSRRVLSYSYAFAYYMFGEEMFKDEMTPEEREIKKNLFEDQQQQLESNVEKLSQFLEEPFDEFSNDKVMAIRIQIINLSVAVDTLCKKMYECIENDLLGSLQLGIHNISPYRSKGIEQAAQFYASWNSKDADKFQPLDSGTSGVTSRPEQASGSRSSEDTICSSSQKRPKKEGSFLNNKVTLLDLNLPADFVDQN

SEQ ID NO: 4049 - protein, 477 aa, Arabidopsis thaliana
MSCDVCMEDLPGDHMTRMDCGHCFCNNCWTEHFTVQINEGQSKRIRCMAHQCNAICDEDIVRSLVSKKRPDLAAKFDRYLLESYIEDNRMVKWCPSTPHCGNAIRAEDDKLCEVECSCGLQFCFSCLCQAHSPCSCLMWELWRKKCRDESETINWITVHTKLCPKCYKPVEKNGGCNLVRCICGQCFCWLCGGATGSDHTYRSIAGHSCGRYQDDKEKQMERAKRDLNRYTHYHHRYKAHTDSSKLEDKLRDTIHEKVSKSEKRELKLKDFSWVTNGLDRLFRSRRVLSYSYAFAYYMFGEEMFKDEMTPEEREIKKNLFEDQQQQLESNVEKLSQFLEEPFDEFSNDKVMAIRIQIINLSVAVDTLCKKMYECIENDLLGSLQLGIHNISPYRSKGIEQAAQFYASWNSKDADKFQPLDSGTSGVTSRPEQASGSRSSEDTICSSSQKRPKKEGSFLNNKVTLLDLNLPADFVDQN

SEQ ID NO: 4050 - DNA, 448 bp, Arabidopsis thaliana
aacaacaacaacaacaacaaacaagaactcaaacacttcataactaaaacatcctttaaagccttttcaaaaactcaatcatgtcaagcaactgcggaagctgcgactgtgctgacaagacccagtgcgtaaagaagggaaccagctacaccttcgacatcgtcgagactcaggagagctacaaggaggccatgatcatggacgttggtgccgaggagaacaacgcaaattgcaagtgcaagtgcggctcctcttgcagctgcgtcaactgcacttgctgccccaactaatgaagcttctttaatcaaaatgtaatatgaataaaagttgatgtgggctcatctattgagctcatgtctctcttattactactctctagtatggtgtgatgtaatgggttatgacccttctttcccttccctataaaactaaagaaacttgcaagatg

SEQ ID NO: 4051 - protein, 69 aa, Arabidopsis thaliana
MSSNCGSCDCADKTQCVKKGTSYTFDIVETQESYKEAMIMDVGAEENNANCKCKCGSSCSCVNCTCCPN

SEQ ID NO: 4052 - protein, 43 aa, Arabidopsis thaliana
NNNNNNKQELKHFITKTSFKAFSKTQSCQATAEAATVLTRPSA

SEQ ID NO: 4053 - DNA, 747 bp, Arabidopsis thaliana
aaaaaaatcctttctctctcgcttctcttcttctctgcccctccttaacactcttctcgccgccgttcctctctctgcctcttgagcctccggagctggtgaaaaaaatcgtcttttctatctcctttgaagatggcgagcaatattatcatgttcgaggatatcttcgtggtcgataagctagaccctgatggcaaaaagttcgataaagttacgcgtgttgaagcaaggagccacaacttggaaatgtttatgcatttagatgttaacactgaggtttatccattggctgttggtgataagttcacgctggctatggctcccacgcttaatctcgatggaactcctgataccggatactttactccgggagcaaagaaaacacttgcagataagtatgaatacatcatgcacgggaagctttacaagatctctgagcgtgacggcaaaactccaaaagcagagttatatgtttcgttcggggggctcctgatgttgcttcagggagatccagctcatatttctcacttcgaacttgaccagaggctctttctactcatgaggaagctttgagatgccattgtctaatcactttccgagaatattcgcataaaaaccgaattaacagagagctttcttataaaagctttatcttatgttaaactttgctattataaatactattttcatgaagcaactcttgtacatccaatatttaactgtccaattgaattatgcttgtagctg

SEQ ID NO: 4054 - protein, 146 aa, Arabidopsis thaliana
MASNIIMFEDIFVVDKLDPDGKKFDKVTRVEARSHNLEMFMHLDVNTEVYPLAVGDKFTLAMAPTLNLDGTPDTGYFTPGAKKTLADKYEYIMHGKLYKISERDGKTPKAELYVSFGGLLMLLQGDPAHISHFELDQRLFLLMRKL

SEQ ID NO: 4055 - protein, 140 aa, Arabidopsis thaliana
MFEDIFVVDKLDPDGKKFDKVTRVEARSHNLEMFMHLDVNTEVYPLAVGDKFTLAMAPTLNLDGTPDTGYFTPGAKKTLADKYEYIMHGKLYKISERDGKTPKAELYVSFGGLLMLLQGDPAHISHFELDQRLFLLMRKL

SEQ ID NO: 4056 - protein, 108 aa, Arabidopsis thaliana
MFMHLDVNTEVYPLAVGDKFTLAMAPTLNLDGTPDTGYFTPGAKKTLADKYEYIMHGKLYKISERDGKTPKAELYVSFGGLLMLLQGDPAHISHFELDQRLFLLMRKL

SEQ ID NO: 4057 - DNA, 1798 bp, Arabidopsis thaliana
agaagagatcaagagagagatatggagagaactttgcttcaatggagactattgcctcttctcgcactcatcgttgctcttttctccttcttcttcgcttctcctcgctctttacaggggaataataagtgtagtcttcttcctcatgatcattactggatctcaagtaaacgcatcgtcacacctaatggtctcatctctggttctgtggaggtgaagggaggaattattgtgtcggtggtgaaggaagttgattggcataagagtcaaaggagtcgagtgaaagtgattgattatggagaagctgtcctcatgcctggtctcattgatgtgcatgttcatcttgatgatcctggaagaagtgaatgggaaggttttccttctggaactaaggctgctgctgctgggggaataactacattggttgacatgcccttaaacagtttcccttcaactgtatctcctgaaactttgaaactcaagattgaagctgcgaaaaacagaatacatgttgatgttgggttctggggaggtctggtacctgacaatgcactcaactcaagtgctcttgagtctctcttagatgctggagttcttggtctcaagtcctttatgtgcccttcaggaatcaacgattttccaatgacaaacatcactcatataaaggaaggactatctgtattagctaaatacaaacgaccattgcttgtacacgcagagatcgagagagacttagagattgaagatggtagtgaaaatgatcctcgttcttatctgacttatttaaaaaccaggcctacttcatgggaggagggagcaatcagaaacctattatcggttactgaaaacacaagaattggtggttctgcagaaggagctcatcttcatattgtacatttatctgatgccagttcttccttggatttgataaaggaagcaaaaggcaaaggagacagtgttactgttgaaacatgtccacattacctagctttctcagccgaagagattccagaaggtgatactcgtttcaaatgctcccctcctatacgtgatgcggcaaatagagaaaaattgtgggaagctttgatggaaggagacattgatatgctgagctctgatcattcacctacaaagcctgaactcaaacttatgagtgatggcaacttcttgaaagcttggggtgggatatcttctttacagtttgttcttcctatcacatggtcttatggaaaaaagtatggagtaacgctcgagcaggtaacttcttggtggagtgataggccttccaaactcgctggactacactctaagggagcggttacggttggaaaacacgcagatcttgttgtgtgggaacctgaagccgaatttgatgtagatgaagatcatccaattcacttcaaacaccctagtatctcagcttatttgggaagaagattatcaggcaaagtggtttcgacatttgtgagagggaacttggtttttggagaaggcaagcatgcttctgatgcttgcgggtctctgcaacttgcaactacttaacttaaaaagggatttaaaagatcttgatctgcaccatttaaacaaatgtaaatatgcgattaagagttgctctcatgttgcaagatggttgatgtaatgagtgagtcttttttgccaattgtaagtttaagactctctaaatcttgttgttggctttaaggttagtggactcatgtatatattgttgatgcaaataatttatatcgcttaagtaaatgatgtatatattgttgatgcaaataatttaaaagtatac

SEQ ID NO: 4058 - protein, 513 aa, Arabidopsis thaliana
RRDQERDMERTLLQWRLLPLLALIVALFSFFFASPRSLQGNNKCSLLPHDHYWISSKRIVTPNGLISGSVEVKGGIIVSVVKEVDWHKSQRSRVKVIDYGEAVLMPGLIDVHVHLDDPGRSEWEGFPSGTKAAAAGGITTLVDMPLNSFPSTVSPETLKLKIEAAKNRIHVDVGFWGGLVPDNALNSSALESLLDAGVLGLKSFMCPSGINDFPMTNITHIKEGLSVLAKYKRPLLVHAEIERDLEIEDGSENDPRSYLTYLKTRPTSWEEGAIRNLLSVTENTRIGGSAEGAHLHIVHLSDASSSLDLIKEAKGKGDSVTVETCPHYLAFSAEEIPEGDTRFKCSPPIRDAANREKLWEALMEGDIDMLSSDHSPTKPELKLMSDGNFLKAWGGISSLQFVLPITWSYGKKYGVTLEQVTSWWSDRPSKLAGLHSKGAVTVGKHADLVVWEPEAEFDVDEDHPIHFKHPSISAYLGRRLSGKVVSTFVRGNLVFGEGKHASDACGSLQLATT

SEQ ID NO: 4059 - protein, 506 aa, Arabidopsis thaliana
MERTLLQWRLLPLLALIVALFSFFFASPRSLQGNNKCSLLPHDHYWISSKRIVTPNGLISGSVEVKGGIIVSVVKEVDWHKSQRSRVKVIDYGEAVLMPGLIDVHVHLDDPGRSEWEGFPSGTKAAAAGGITTLVDMPLNSFPSTVSPETLKLKIEAAKNRIHVDVGFWGGLVPDNALNSSALESLLDAGVLGLKSFMCPSGINDFPMTNITHIKEGLSVLAKYKRPLLVHAEIERDLEIEDGSENDPRSYLTYLKTRPTSWEEGAIRNLLSVTENTRIGGSAEGAHLHIVHLSDASSSLDLIKEAKGKGDSVTVETCPHYLAFSAEEIPEGDTRFKCSPPIRDAANREKLWEALMEGDIDMLSSDHSPTKPELKLMSDGNFLKAWGGISSLQFVLPITWSYGKKYGVTLEQVTSWWSDRPSKLAGLHSKGAVTVGKHADLVVWEPEAEFDVDEDHPIHFKHPSISAYLGRRLSGKVVSTFVRGNLVFGEGKHASDACGSLQLATT

SEQ ID NO: 4060 - protein, 409 aa, Arabidopsis thaliana
MPGLIDVHVHLDDPGRSEWEGFPSGTKAAAAGGITTLVDMPLNSFPSTVSPETLKLKIEAAKNRIHVDVGFWGGLVPDNALNSSALESLLDAGVLGLKSFMCPSGINDFPMTNITHIKEGLSVLAKYKRPLLVHAEIERDLEIEDGSENDPRSYLTYLKTRPTSWEEGAIRNLLSVTENTRIGGSAEGAHLHIVHLSDASSSLDLIKEAKGKGDSVTVETCPHYLAFSAEEIPEGDTRFKCSPPIRDAANREKLWEALMEGDIDMLSSDHSPTKPELKLMSDGNFLKAWGGISSLQFVLPITWSYGKKYGVTLEQVTSWWSDRPSKLAGLHSKGAVTVGKHADLVVWEPEAEFDVDEDHPIHFKHPSISAYLGRRLSGKVVSTFVRGNLVFGEGKHASDACGSLQLATT

SEQ ID NO: 4061 - DNA, 640 bp, Arabidopsis thaliana
tgcttctcaaagaaacgaaattaagagaaggagaaggttttacgccggagttggagactgatctagatccgccggcgaaaaagcagagccgtcacattcatcgtcggaaatcaagaaagggtaattctctgtaggatagagagacatggaagccaagtttttccggttcttgaagattgttggagttggatacaaagctagagctgaggaagcagggcgtttcttatacctcaaattgggttacagtcacgaagtcgaacttgcggttcctccagcggttcgagtcttttgtttcaagaacaatgtggtttgctgcactggaatcgacaagcaaagagtgcatcagtttgctgcaacggtaaggagttgcaaaccccctgaaccttataagggcaaaggcataatgtacactgatgaagtcgtcaagaagaaacaaggaaagaagtccaaatgatctctctttgtatgcttcttcttccttcttactctgcagagacaactttcatctatctgtggtagattatggttggatttttatcaataagttttatttggttgtatgagacatcattttgttgttaagtctctttcaatgaaacaaaatgagaagagttcgtcttggaaatatttatgttttgtc

SEQ ID NO: 4062 - protein, 102 aa, Arabidopsis thaliana
MEAKFFRFLKIVGVGYKARAEEAGRFLYLKLGYSHEVELAVPPAVRVFCFKNNVVCCTGIDKQRVHQFAATVRSCKPPEPYKGKGIMYTDEVVKKKQGKKSK

SEQ ID NO: 4063 - DNA, 3474 bp, Arabidopsis thaliana
tcgtttgttcggagttagagagagagagaaagatatagagagaacacagagaggcgagagcgacgtagggttggtgtttcgtacggattttctcggtcaatcctagtttctccggcgagagattgcttttcaggaatcatcatggtgagaaagagaagaacggatgctccatctgaaggaggtgaaggctctgggtctcgtgaagctggtccagtctcaggtggtggacgtggttcacagcgaggtggtttccagcagggaggaggacaacaccaaggtggaaggggttatactcctcaacctcaacagggaggtcgtggtggtcgtggatatgggcaaccaccacaacagcaacaacagtatggaggaccacaagagtaccaaggaagaggaagaggaggacctcctcatcaaggaggtcgaggagggtatggcggtggccgtggaggtggaccttcttctggaccaccgcagagacaatcagttcccgagctgcatcaagctacctcacctacttatcaagcggtgtcttctcagcctacactgtctgaggtgagtcctacccaggtaccagaacctactgttctggctcagcaatttgaacaactctctgttgaacaaggagctcccagtcaggcaatccagcctataccttcttctagcaaggctttcaagtttccaatgaggcctggtaaaggacagagtggaaagcgttgcattgtgaaggctaaccatttctttgctgaactgcctgataaggatttgcaccattatgatgttaccattactccggaagttacatcaaggggtgtcaatcgtgctgtgatgaaacaacttgttgataattatcgtgattctcaccttggaagtcgtcttccagcgtatgatggtcgaaaaagtctttacactgctggtccacttccctttaactccaaggagttcagaatcaatcttcttgacgaagaagtaggggctggaggtcaaagacgagaaagggaatttaaagttgtgatcaagctagttgcacgtgctgatctgcatcacctaggaatgtttttggaggggaaacaatcagatgccccacaggaagctctgcaggttcttgacattgttcttcgtgagctgccgacctctagaatcaggtatattccggtgggccggtccttttattcccctgatataggaaaaaaacaatcattgggggatggcttggagagctggcgtggattctaccaaagcattcgtcctacacagatgggcttatcactcaatattgatatgtcatcgacagccttcatagaggcaaaccctgtgattcagtttgtctgtgatttgcttaaccgggatatttcttctcgacctttatctgatgctgatcgtgttaagataaaaaaggctcttagaggtgtcaaagttgaagtgactcatcgaggaaacatgcgccggaagtaccgcatttccggtttgactgctgtggccactcgggaattgacattcccagtagatgaaagaaatactcagaaatctgttgtagaatacttccacgaaacatatggttttcgcattcagcacactcaactaccatgcttgcaagttgggaattctaataggcctaattacttaccaatggaggtatgcaagattgttgaaggccagcggtattccaaaagattgaatgagagacagatcactgctttgctgaaggttacctgtcagcgcccgatagatcgagaaaaagatatcttacagacggtgcaactcaatgattatgctaaagataattatgctcaagagtttggcatcaaaataagtacttctctggcttctgttgaggctcgtatactgcctcctccatggcttaagtaccacgagtctggaagggaagggacttgtctgccacaagttggtcaatggaacatgatgaataagaaaatgatcaatggtggaacggtgaataattggatctgcatcaacttttctaggcaagtgcaggacaatctagcgcgtacattttgtcaggaacttgctcaaatgtgttacgtatctggcatggcatttaatccggaaccagtcctcccaccagtcagtgctcgccctgagcaagtagagaaggtcttgaagactagatatcatgatgccacatcaaaactctcccaaggaaaagaaattgatctgcttattgtcattctgcccgataataatggatcattatacggtgatttgaaacgcatatgtgagactgaactcggcatagtctctcaatgttgcctgacaaagcatgtctttaagatgagcaaacaatacatggctaatgttgcgctgaagattaatgtgaaggttggaggaagaaacacagtgcttgttgatgctctatctaggcggattcctctagtcagtgatcgacccaccattatatttggtgctgatgttacccaccctcaccctggagaggattcaagcccatctattgctgctgttgtggcatctcaggattggcctgaaatcactaaatatgctggattagtttgcgctcaagcgcataggcaggagctcattcaggatctgttcaaagagtggaaggatcctcagaaaggtgtggtgactggtggcatgataaaggagttgctcatagccttccgtagatcaactgggcataaaccactaaggatcatcttctacagggatggagtcagtgagggacaattttaccaagttttgctctatgaacttgatgccatccgcaaggcctgtgcttcgctggaagcaggttatcaaccaccagtgacatttgtggtggtgcagaagcgtcatcacacgaggctgtttgctcagaaccacaatgatcgccattcggtggacagaagtgggaatattttacctggcactgttgtggactctaaaatctgccaccctacagagtttgacttttacctctgtagtcatgctggtattcagggcacttctcgacctgctcattaccacgttctttgggatgagaacaactttactgcagatggacttcaatctctgaccaataacttatgttacacgtatgcaagatgcacacgctcagtttcaattgttccccctgcatattatgcacatctagcagcttttagggctcgattctacatggagccagagacatcagacagtggctcaatggctagtgggagcatggcacgtggaggtggaatggctggtagaagcacacgcgggcctaatgtcaatgctgcagtgaggccactcccagctctgaaagagaatgtgaagcgtgtcatgttctactgctgagttgattcaccctctatctatctttatgacctaaattaatgaagaatatcatgtatgctttctaagacttatcgtgtgtttggatatttcatcactctttctctatgagtatgagatgctttatgactcttgtttgacaactactaaaatttattattcaaaacagactttgatcctttc

SEQ ID NO: 4064 - protein, 1050 aa, Arabidopsis thaliana
MVRKRRTDAPSEGGEGSGSREAGPVSGGGRGSQRGGFQQGGGQHQGGRGYTPQPQQGGRGGRGYGQPPQQQQQYGGPQEYQGRGRGGPPHQGGRGGYGGGRGGGPSSGPPQRQSVPELHQATSPTYQAVSSQPTLSEVSPTQVPEPTVLAQQFEQLSVEQGAPSQAIQPIPSSSKAFKFPMRPGKGQSGKRCIVKANHFFAELPDKDLHHYDVTITPEVTSRGVNRAVMKQLVDNYRDSHLGSRLPAYDGRKSLYTAGPLPFNSKEFRINLLDEEVGAGGQRREREFKVVIKLVARADLHHLGMFLEGKQSDAPQEALQVLDIVLRELPTSRIRYIPVGRSFYSPDIGKKQSLGDGLESWRGFYQSIRPTQMGLSLNIDMSSTAFIEANPVIQFVCDLLNRDISSRPLSDADRVKIKKALRGVKVEVTHRGNMRRKYRISGLTAVATRELTFPVDERNTQKSVVEYFHETYGFRIQHTQLPCLQVGNSNRPNYLPMEVCKIVEGQRYSKRLNERQITALLKVTCQRPIDREKDILQTVQLNDYAKDNYAQEFGIKISTSLASVEARILPPPWLKYHESGREGTCLPQVGQWNMMNKKMINGGTVNNWICINFSRQVQDNLARTFCQELAQMCYVSGMAFNPEPVLPPVSARPEQVEKVLKTRYHDATSKLSQGKEIDLLIVILPDNNGSLYGDLKRICETELGIVSQCCLTKHVFKMSKQYMANVALKINVKVGGRNTVLVDALSRRIPLVSDRPTIIFGADVTHPHPGEDSSPSIAAVVASQDWPEITKYAGLVCAQAHRQELIQDLFKEWKDPQKGVVTGGMIKELLIAFRRSTGHKPLRIIFYRDGVSEGQFYQVLLYELDAIRKACASLEAGYQPPVTFVVVQKRHHTRLFAQNHNDRHSVDRSGNILPGTVVDSKICHPTEFDFYLCSHAGIQGTSRPAHYHVLWDENNFTADGLQSLTNNLCYTYARCTRSVSIVPPAYYAHLAAFRARFYMEPETSDSGSMASGSMARGGGMAGRSTRGPNVNAAVRPLPALKENVKRVMFYC

SEQ ID NO: 4065 - protein, 870 aa, Arabidopsis thaliana
MRPGKGQSGKRCIVKANHFFAELPDKDLHHYDVTITPEVTSRGVNRAVMKQLVDNYRDSHLGSRLPAYDGRKSLYTAGPLPFNSKEFRINLLDEEVGAGGQRREREFKVVIKLVARADLHHLGMFLEGKQSDAPQEALQVLDIVLRELPTSRIRYIPVGRSFYSPDIGKKQSLGDGLESWRGFYQSIRPTQMGLSLNIDMSSTAFIEANPVIQFVCDLLNRDISSRPLSDADRVKIKKALRGVKVEVTHRGNMRRKYRISGLTAVATRELTFPVDERNTQKSVVEYFHETYGFRIQHTQLPCLQVGNSNRPNYLPMEVCKIVEGQRYSKRLNERQITALLKVTCQRPIDREKDILQTVQLNDYAKDNYAQEFGIKISTSLASVEARILPPPWLKYHESGREGTCLPQVGQWNMMNKKMINGGTVNNWICINFSRQVQDNLARTFCQELAQMCYVSGMAFNPEPVLPPVSARPEQVEKVLKTRYHDATSKLSQGKEIDLLIVILPDNNGSLYGDLKRICETELGIVSQCCLTKHVFKMSKQYMANVALKINVKVGGRNTVLVDALSRRIPLVSDRPTIIFGADVTHPHPGEDSSPSIAAVVASQDWPEITKYAGLVCAQAHRQELIQDLFKEWKDPQKGVVTGGMIKELLIAFRRSTGHKPLRIIFYRDGVSEGQFYQVLLYELDAIRKACASLEAGYQPPVTFVVVQKRHHTRLFAQNHNDRHSVDRSGNILPGTVVDSKICHPTEFDFYLCSHAGIQGTSRPAHYHVLWDENNFTADGLQSLTNNLCYTYARCTRSVSIVPPAYYAHLAAFRARFYMEPETSDSGSMASGSMARGGGMAGRSTRGPNVNAAVRPLPALKENVKRVMFYC

SEQ ID NO: 4066 - protein, 822 aa, Arabidopsis thaliana
MKQLVDNYRDSHLGSRLPAYDGRKSLYTAGPLPFNSKEFRINLLDEEVGAGGQRREREFKVVIKLVARADLHHLGMFLEGKQSDAPQEALQVLDIVLRELPTSRIRYIPVGRSFYSPDIGKKQSLGDGLESWRGFYQSIRPTQMGLSLNIDMSSTAFIEANPVIQFVCDLLNRDISSRPLSDADRVKIKKALRGVKVEVTHRGNMRRKYRISGLTAVATRELTFPVDERNTQKSVVEYFHETYGFRIQHTQLPCLQVGNSNRPNYLPMEVCKIVEGQRYSKRLNERQITALLKVTCQRPIDREKDILQTVQLNDYAKDNYAQEFGIKISTSLASVEARILPPPWLKYHESGREGTCLPQVGQWNMMNKKMINGGTVNNWICINFSRQVQDNLARTFCQELAQMCYVSGMAFNPEPVLPPVSARPEQVEKVLKTRYHDATSKLSQGKEIDLLIVILPDNNGSLYGDLKRICETELGIVSQCCLTKHVFKMSKQYMANVALKINVKVGGRNTVLVDALSRRIPLVSDRPTIIFGADVTHPHPGEDSSPSIAAVVASQDWPEITKYAGLVCAQAHRQELIQDLFKEWKDPQKGVVTGGMIKELLIAFRRSTGHKPLRIIFYRDGVSEGQFYQVLLYELDAIRKACASLEAGYQPPVTFVVVQKRHHTRLFAQNHNDRHSVDRSGNILPGTVVDSKICHPTEFDFYLCSHAGIQGTSRPAHYHVLWDENNFTADGLQSLTNNLCYTYARCTRSVSIVPPAYYAHLAAFRARFYMEPETSDSGSMASGSMARGGGMAGRSTRGPNVNAAVRPLPALKENVKRVMFYC

SEQ ID NO: 4067 - DNA, 1900 bp, Arabidopsis thaliana
ctctttctatcgctctttgattttgtttctcattgttttgcttcaaattacgcattcgaatctgatcttcgttgatctctgtggaagaaacagataagagaaaatcgcatgaatttttttagaaaactaggttttaatccttcgattgcaagctacttcactaatacgagtcttctgatctcaattcttagtttttctcctcaattgccgatttctctctttcttttcgagcagaaatcgttagatcctttatcgctgtgtaatagtagtactaattttaataatcttgagagtaattactccgttcattgttgaatcatggagtccggaggcaaaactaatcgtcagctgcgtaaagctatttgcgtctcaacagacgagaagatgaagaagaagagatcaccttcagtgatagtgattggaggtggtatggctggaatttcagccgctcgcactcttcaggatgcttcctttcaggttgttgtattggagtctcgtgacagaattggtggacgagttcacactgattactcatttggttttccagttgatctcggtgcatcttggttgcatggtgtctgtaaagagaatcctttggctgcagtaattggtagattaggattacctctttatcgtactagcggtgacaattcggttttgtatgatcacgatcttgagagttatgctctgttcgacaaggctggtaaccaagtttctcaagagttggtgacaaaagttggcgaaaattttgagcacattctggaagagatctgtaaagtcagggatgagcaggacgaagacatgtcaatagctcaagccttttctattgtatttaagaggaaccctgaattgaggttggagggacttgcccataatgtgcttcagtggtacttgtgccgcatggaaggatggtttgctgctgatgctgaaaccatctcggcaaagtgttgggatcaggaagaactgttgcccggtggacatggtcttatggttagagggtatcgccctgtaatcaacactctctcgaaaggtcttgatatacgactaagtcacagaattaccaagatttcaaggcgctacagtggtgtgaaggtgactacagagaaaggagacacgtttgttgcggatgctgcagtcattgctcttcctctaggagtcttaaagtcaggaatgataacattcgaaccaaagcttccacagtggaaacaagaagctatcaacgatctcggtgttggaatcgagaacaagatcatattgaattttgacaacgtcttttggccaaacgtagagtttttaggagtcgttgcagaaacttcctacggatgcagttatttcttgaacctgcataaagccacaagccatcctgtccttgtttacatgccggctggtcagctcgctagagacatcgagaaaaagtccgatgaagcagctgcaaattttgccttttcgcaactacagaaaattcttccagatgcctcttcaccgataaattatttggtatcaaggtggggatcagacatcaattcattgggatcatatagctatgacattgtgaacaaacctcacgacctctatgagagactgagagtgccattggataatctattctttgcgggggaagccactagctcaagctacccgggatcagtgcacggtgcttattcaaccggagtgctggcagctgaagactgcaggatgcgtgtgcttgagcgctatggagagctcgaacatgagatggaagaggaagctcctgcttctgtccctcttctgatctcccgtatgtaatttaaacctcaggtgttttatatcacctccatatgggaacattgttagatttgattttatgagatttcactagttggaactcttgtgcctattcaataccactcttttttccttc

SEQ ID NO: 4068 - protein, 488 aa, Arabidopsis thaliana
MESGGKTNRQLRKAICVSTDEKMKKKRSPSVIVIGGGMAGISAARTLQDASFQVVVLESRDRIGGRVHTDYSFGFPVDLGASWLHGVCKENPLAAVIGRLGLPLYRTSGDNSVLYDHDLESYALFDKAGNQVSQELVTKVGENFEHILEEICKVRDEQDEDMSIAQAFSIVFKRNPELRLEGLAHNVLQWYLCRMEGWFAADAETISAKCWDQEELLPGGHGLMVRGYRPVINTLSKGLDIRLSHRITKISRRYSGVKVTTEKGDTFVADAAVIALPLGVLKSGMITFEPKLPQWKQEAINDLGVGIENKIILNFDNVFWPNVEFLGVVAETSYGCSYFLNLHKATSHPVLVYMPAGQLARDIEKKSDEAAANFAFSQLQKILPDASSPINYLVSRWGSDINSLGSYSYDIVNKPHDLYERLRVPLDNLFFAGEATSSSYPGSVHGAYSTGVLAAEDCRMRVLERYGELEHEMEEEAPASVPLLISRM

SEQ ID NO: 4069 - protein, 466 aa, Arabidopsis thaliana
MKKKRSPSVIVIGGGMAGISAARTLQDASFQVVVLESRDRIGGRVHTDYSFGFPVDLGASWLHGVCKENPLAAVIGRLGLPLYRTSGDNSVLYDHDLESYALFDKAGNQVSQELVTKVGENFEHILEEICKVRDEQDEDMSIAQAFSIVFKRNPELRLEGLAHNVLQWYLCRMEGWFAADAETISAKCWDQEELLPGGHGLMVRGYRPVINTLSKGLDIRLSHRITKISRRYSGVKVTTEKGDTFVADAAVIALPLGVLKSGMITFEPKLPQWKQEAINDLGVGIENKIILNFDNVFWPNVEFLGVVAETSYGCSYFLNLHKATSHPVLVYMPAGQLARDIEKKSDEAAANFAFSQLQKILPDASSPINYLVSRWGSDINSLGSYSYDIVNKPHDLYERLRVPLDNLFFAGEATSSSYPGSVHGAYSTGVLAAEDCRMRVLERYGELEHEMEEEAPASVPLLISRM

SEQ ID NO: 4070 - protein, 451 aa, Arabidopsis thaliana
MAGISAARTLQDASFQVVVLESRDRIGGRVHTDYSFGFPVDLGASWLHGVCKENPLAAVIGRLGLPLYRTSGDNSVLYDHDLESYALFDKAGNQVSQELVTKVGENFEHILEEICKVRDEQDEDMSIAQAFSIVFKRNPELRLEGLAHNVLQWYLCRMEGWFAADAETISAKCWDQEELLPGGHGLMVRGYRPVINTLSKGLDIRLSHRITKISRRYSGVKVTTEKGDTFVADAAVIALPLGVLKSGMITFEPKLPQWKQEAINDLGVGIENKIILNFDNVFWPNVEFLGVVAETSYGCSYFLNLHKATSHPVLVYMPAGQLARDIEKKSDEAAANFAFSQLQKILPDASSPINYLVSRWGSDINSLGSYSYDIVNKPHDLYERLRVPLDNLFFAGEATSSSYPGSVHGAYSTGVLAAEDCRMRVLERYGELEHEMEEEAPASVPLLISRM

SEQ ID NO: 4071 - DNA, 938 bp, Arabidopsis thaliana
aaaaaaaaaaaaaaaacgtctatacacaaaaaaacaaatgggagagaaagaggaagtgaaactattaggagtatggtacagtccatacgccataagacctaagatcgctcttcgtctcaaatcagtggattatgattacgttgaggaaaatctgtttggatccaagagtgagcttcttctcaaatcaaacccggttcacaagaaagtccctgttctcctccacaacaacaaaccgattgtcgagtctctcaacatcgttgaatacattgatgagacgtggaactcatctgcaccgtccattcttccttcacatccttatgatcgtgctcttgctcgcttttggtctgacttcgttgataacaagtggtttccggcgttgagaatggcggcgatcactaaatcggaagacgcaaaagcgaaagccatggaagaagtggaagaagggttgttgcaactcgaggatgcgtttgtttctataagcaaagggaaaccctttttcggcggtgaagcaatcgggtttatggatatttgctttggaagctttgtggttctcttgaaagctagagaaaagtttaaagcagaaaagcttttagtcgaatcaaaaactccttctctttgtaaatgggccgaccggttcttgtccgatgaaacggtgaagaatgtggcaccggagatcgaaaaagtagctgagtttctacaagaacttgaggttagagctcaatccgcagcttcaagatcttgagatcatcttagaaatgtattgcaatgcaattgtgttttgtgtacatgtaaaacgaaaataagttgaagttttaaagtgttgtgttcagtctatgctaggatttatgacgcggtgtatgggctacggactattttcagtttatgtttatcgaaaatataagggtcagcccaagattattaggggtcgtccccccttt

SEQ ID NO: 4072 - protein, 246 aa, Arabidopsis thaliana
KKKKKRLYTKKQMGEKEEVKLLGVWYSPYAIRPKIALRLKSVDYDYVEENLFGSKSELLLKSNPVHKKVPVLLHNNKPIVESLNIVEYIDETWNSSAPSILPSHPYDRALARFWSDFVDNKWFPALRMAAITKSEDAKAKAMEEVEEGLLQLEDAFVSISKGKPFFGGEAIGFMDICFGSFVVLLKAREKFKAEKLLVESKTPSLCKWADRFLSDETVKNVAPEIEKVAEFLQELEVRAQSAASRS

SEQ ID NO: 4073 - protein, 234 aa, Arabidopsis thaliana
MGEKEEVKLLGVWYSPYAIRPKIALRLKSVDYDYVEENLFGSKSELLLKSNPVHKKVPVLLHNNKPIVESLNIVEYIDETWNSSAPSILPSHPYDRALARFWSDFVDNKWFPALRMAAITKSEDAKAKAMEEVEEGLLQLEDAFVSISKGKPFFGGEAIGFMDICFGSFVVLLKAREKFKAEKLLVESKTPSLCKWADRFLSDETVKNVAPEIEKVAEFLQELEVRAQSAASRS

SEQ ID NO: 4074 - DNA, 1249 bp, Arabidopsis thaliana
aaaagtcaaagttgttcactttacctataaaaacgctctctcactttcttttcaatggcttcttcttcttgtttccttcgctcgattctcttctcttctcctactaaccttcgttcaaatcaccatctccccactttcttccccaagaattatctcatttgctctcattccacttcttctcgcttcgaatcgctctcggtttcatcgatcggaactggatctaccaagaaatcatccgatactcggagaaaggtaaagagcatggctacgacaaatataggaaaggaggagaagaaaagagtcgagatttatgatctcgaagagaatttagtgattgatttggctaaattcacagcagatctctccgataagttttgtaaagagagaggcgctttcaccgtcgttgtctccggtggctctctcatcaaatcactccggaaattagtagaatctccttacgttgattctatagattgggcaaggtggcattttttctgggttgacgagagagttgttcccaagaatcacgatgatagcaactataaactcgcttatgatagttttctatccaaggtaccaattccgcctggaaatgtatatgcaatcaacgaagccctctccgctgaggctgcagcggatgattacgagacctgcctcaaacatttggtcaacaccaacattctccgtgtatctgaatcaactggctttcccaaatttgatctcatgcttctaggtatgggacctgatggtcatgtggcatcattattccctgggcatggtctctgcaacgagagcaagaaatgggtagtttcaatctctgactctccaaaaccaccgtctgagagaatcaccttcacgttcccggtcatcaactcatctgcacatgtagctctagttgtttgcggttctgggaaagctgaagctgtggaggcagctttaaagaagactgggaatgtaccacctgctggttctgtttctgctgaagacgagttggtttggttcctggacaaaccagcatcttccaagctctaaaaacaggtggtatgcttcccattccagtgaacttaccaatgtgactagtccggtttagtttttggattttgactctttggttctctccatttatgttgtgggaagagactgttgtgataaaagcgtgtactttacatggaaataatgaactaatcaatggtttctctgatttgttttggtgtattttggttaaaatctatcggaaccaacactctcc

SEQ ID NO: 4075 - protein, 325 aa, Arabidopsis thaliana
MASSSCFLRSILFSSPTNLRSNHHLPTFFPKNYLICSHSTSSRFESLSVSSIGTGSTKKSSDTRRKVKSMATTNIGKEEKKRVEIYDLEENLVIDLAKFTADLSDKFCKERGAFTVVVSGGSLIKSLRKLVESPYVDSIDWARWHFFWVDERVVPKNHDDSNYKLAYDSFLSKVPIPPGNVYAINEALSAEAAADDYETCLKHLVNTNILRVSESTGFPKFDLMLLGMGPDGHVASLFPGHGLCNESKKWVVSISDSPKPPSERITFTFPVINSSAHVALVVCGSGKAEAVEAALKKTGNVPPAGSVSAEDELVWFLDKPASSKL

SEQ ID NO: 4076 - protein, 256 aa, Arabidopsis thaliana
MATTNIGKEEKKRVEIYDLEENLVIDLAKFTADLSDKFCKERGAFTVVVSGGSLIKSLRKLVESPYVDSIDWARWHFFWVDERVVPKNHDDSNYKLAYDSFLSKVPIPPGNVYAINEALSAEAAADDYETCLKHLVNTNILRVSESTGFPKFDLMLLGMGPDGHVASLFPGHGLCNESKKWVVSISDSPKPPSERITFTFPVINSSAHVALVVCGSGKAEAVEAALKKTGNVPPAGSVSAEDELVWFLDKPASSKL

SEQ ID NO: 4077 - DNA, 1659 bp, Arabidopsis thaliana
aatttctcaataacgctctcagagagaccatttgatgaagcttctcgcttctggaatttgaaaaggaacttgttatggagataatctcactgaacgttgtgccccagtgctctgtggttacttggagtagtaaattagcaacgaaaagattggtcccaaatcggtcaagtttgttattctcaggggtcaaaaaatccagacttgtgattcgaagtggaaattccgatggttatgttgttggtgagaatgatgacttgggtcgtatagccagaagaggagaatcaacgtcaaaggttttgattcctggtttgcctgatgaatcaaatggtgaaattgctgctcgaatcagtcattctcactgcgagtggaagcccaagcttagagtacattatgagaaaagccggttgtgacaatctcgatgctcctgcggtgttgtttcttcctgggctttggcgttggttcatttcactatgagaagcagcttaccgatttgggaagggattatcgagtatgggctattgattttcttggacagggtttatctctccctactgaagatcctactaccatgactgaagaaaccagttcctcggaagataaggaaccattttggggatttggtgacaaaactgaaccgtgggctgatcaacttgtattctctctggatctctggagggatcaagttcagtattttgtagaagaggttatcggtgagcctgtgtacattgctgggaactcacttggagggtatgtagctctctactttgcagcaacccatcctcacctggttaagggtgttaccttgcttaatgcaacacctttctggggtttcttccctaatccagtaagatccccaaagctagcacgtctctttccatggcccggagcattccctctgccggaaagagtgaaaaaaatcacagaattggtgtggcaaaagataagtgatcctgaaagcatagctgagatacttaaacaggtctacacagaccattctaccaatgtggataaagtattctcacgtattgtggaggtcacacagcatccggctgctgcagcatcgtttgcttcaattatgcttgctcctggtggagagctatctttctccgaagctttatctaggtgtaaggaaaacaatgttcagatatgtctcatgtatggaagagaagatccatgggtgagaccgttatggggaaagaagataaagaaggaaatccccaacgctccatactacgagatcagcccagcgggtcactgcccacacgatgaagtccctgaggtggtgaactatctgatgcgcgggtggatcaagcacctggagtctggtggttttgaagcgctcccgcttttggaggacactgaagaagattgggaggagtccaggattggtagagaaattgagttcccgagagatggttggaaaaaagcagtgaatctgtggttatatgggtcaaactatacgtactggagaggagttagagaatctttcagatccagttttataagggtgtttggagggaagtctgcatagaagaagcatggaacagtcgtctagtgtaaattaattgtaatctatgttgcatccgatgctagctatataatgttgtctgtagaatcaagtttctaaaatgttcaaaaggaaaagttagaaaaatatcc

SEQ ID NO: 4078 - protein, 370 aa, Arabidopsis thaliana
MLLRCCFFLGFGVGSFHYEKQLTDLGRDYRVWAIDFLGQGLSLPTEDPTTMTEETSSSEDKEPFWGFGDKTEPWADQLVFSLDLWRDQVQYFVEEVIGEPVYIAGNSLGGYVALYFAATHPHLVKGVTLLNATPFWGFFPNPVRSPKLARLFPWPGAFPLPERVKKITELVWQKISDPESIAEILKQVYTDHSTNVDKVFSRIVEVTQHPAAAASFASIMLAPGGELSFSEALSRCKENNVQICLMYGREDPWVRPLWGKKIKKEIPNAPYYEISPAGHCPHDEVPEVVNYLMRGWIKHLESGGFEALPLLEDTEEDWEESRIGREIEFPRDGWKKAVNLWLYGSNYTYWRGVRESFRSSFIRVFGGKSA

SEQ ID NO: 4079 - protein, 320 aa, Arabidopsis thaliana
MTEETSSSEDKEPFWGFGDKTEPWADQLVFSLDLWRDQVQYFVEEVIGEPVYIAGNSLGGYVALYFAATHPHLVKGVTLLNATPFWGFFPNPVRSPKLARLFPWPGAFPLPERVKKITELVWQKISDPESIAEILKQVYTDHSTNVDKVFSRIVEVTQHPAAAASFASIMLAPGGELSFSEALSRCKENNVQICLMYGREDPWVRPLWGKKIKKEIPNAPYYEISPAGHCPHDEVPEVVNYLMRGWIKHLESGGFEALPLLEDTEEDWEESRIGREIEFPRDGWKKAVNLWLYGSNYTYWRGVRESFRSSFIRVFGGKSA

SEQ ID NO: 4080 - DNA, 2393 bp, Arabidopsis thaliana
gtgatcagtcaaagatgattacatagatttaggaagaaggaatctcttaccctaactagatccaggggtattttagtaaattatcataggtacccctaaaagtctctcgattccgttacactctcaatatctctccaatggctatggttactactacactcttcttcttcttcttcttcttcttctccttcttctcactgtaaaaaagaaaaaaaaatggcggaaactgagagaccccaccggtcttcaagtattaacagtagtagcaacaacaacagtggttcatcaaccgatctattcatttgtttcacatctcgtttctcttcttcttcctctatgcgtctctcttctaaatccatccatagcccagctcgttccgcttgtctcaccacttctcttagccgtcgtctccgtactagcggtagcttgaagaacgcttcagctggagttttgaactctcccatgtttggtgctaatggaggacggaagagatctggatctggctacgagaatagtaacaacaacaacaataataacatagagccgtcgtctccgaaggtgacgtgtattggtcaagttagagtgaagactaggaagcatgtgaagaagaagatgagagctagatctagaaggaaaggaggtgagaatagtttcaggagatccgttgatcaaaacgacggtggtggtggatgtcgttttaaagcgagtgagaatcgtttggtgcatcttccggtgactatctgcgagtcgttgagatcgtttgggtctgagctcaactgcttcttcccgtgtcgatcttcctgtacggagaatagtcatggagatgggaggagagctgagagtaacaacgacggttgcggcggcggcggaggaggaagtaattcgtgtggtgcggtgtttacgaggtggtttgtggcggtggaggagacttcgggagggaagagaagagagattgagcttgttgttggtggagaagacgaagttgaggaggataggcggaggagtcgtcggagacatgttttcgaggggcttgatttaagtgagatagagatgaagacggagaagaaagagagaggagaagaagttggacggatgagtatttgttctccgccgaagaatgctttgttgttgatgcggtgtagatctgatccggttaaggttgcggcgttagctaaccgggttcgtgaaagacagttgtcgttaaacgacggcgtatacacagaggaggaagaagatgagagaagaagaaggtttgagctggaaattgaagataagaaacggatcgacttgtgtgagaaatggatctctggtgagactactgtggaaacagaagaagtttcagtagcagttgcagaagcagaagcagaagcagaagcagaagctcctttgccttcaaatccagctacagaggaagaagaaagagtcaaagttgtggaagattcgattgttgaagaagaacaagaagcttcgaaaattctggattcgtttgaggaagaaatagaagctacgatcatgaaaaaaattgaagacgaaatcagaaacgctatagaagaagaggagaaacttgctgagatggaagaattagcggttgtggcggtggctgagacggaggaggtagaagaaagcaaagaggttgttcctgattgtatacctcaaaatgaggaaagatccgaacaaggaaaccgggaacccgacccgagtccggaagtggtgatgagaagaagtctacaagaggaaacaacggagaaagagaagacgacggcgacgccgtataaggtgttaccggattgtttgctgcttatgatgtgtgaaccaaagctctcaatggaagtctctaaggagacttgggtttgcagtacagatttcgtcagatgtttaccaggaagacctccggcgaagaagataccaccagaagccgtcggagacaatcatcatcatcatcaacccaagaagcgaatcgtcacagccgttgattccaacgcatcctctcgccggcggtcaatcgatagaccaccacttcacctacagccgccacggtcatcgtgctcatacccagcagctccaccgataataacggcagctgcggcggttggggaacagagggtagccggagctaataaggtacagccaccagtgctgccacgttgcaaatcggaaccgaggaagtcagcgtcgaagctagcgccggaagcttgtttctggaaaaataggaagcttgagccacaccctccggcaaccgtcggtgtcggcggcgccggagtagggttctagaagaaggagacgtgagtgggaataaaggaaactatttgggtgtaatagtaatttcagaatactatttgtccttgtttgtaaatttgttttgttagtcataattcattttctatcactgtgcc

SEQ ID NO: 4081 - protein, 684 aa, Arabidopsis thaliana
MAETERPHRSSSINSSSNNNSGSSTDLFICFTSRFSSSSSMRLSSKSIHSPARSACLTTSLSRRLRTSGSLKNASAGVLNSPMFGANGGRKRSGSGYENSNNNNNNNIEPSSPKVTCIGQVRVKTRKHVKKKMRARSRRKGGENSFRRSVDQNDGGGGCRFKASENRLVHLPVTICESLRSFGSELNCFFPCRSSCTENSHGDGRRAESNNDGCGGGGGGSNSCGAVFTRWFVAVEETSGGKRREIELVVGGEDEVEEDRRRSRRRHVFEGLDLSEIEMKTEKKERGEEVGRMSICSPPKNALLLMRCRSDPVKVAALANRVRERQLSLNDGVYTEEEEDERRRRFELEIEDKKRIDLCEKWISGETTVETEEVSVAVAEAEAEAEAEAPLPSNPATEEEERVKVVEDSIVEEEQEASKILDSFEEEIEATIMKKIEDEIRNAIEEEEKLAEMEELAVVAVAETEEVEESKEVVPDCIPQNEERSEQGNREPDPSPEVVMRRSLQEETTEKEKTTATPYKVLPDCLLLMMCEPKLSMEVSKETWVCSTDFVRCLPGRPPAKKIPPEAVGDNHHHHQPKKRIVTAVDSNASSRRRSIDRPPLHLQPPRSSCSYPAAPPIITAAAAVGEQRVAGANKVQPPVLPRCKSEPRKSASKLAPEACFWKNRKLEPHPPATVGVGGAGVGF

SEQ ID NO: 4082 - protein, 644 aa, Arabidopsis thaliana
MRLSSKSIHSPARSACLTTSLSRRLRTSGSLKNASAGVLNSPMFGANGGRKRSGSGYENSNNNNNNNIEPSSPKVTCIGQVRVKTRKHVKKKMRARSRRKGGENSFRRSVDQNDGGGGCRFKASENRLVHLPVTICESLRSFGSELNCFFPCRSSCTENSHGDGRRAESNNDGCGGGGGGSNSCGAVFTRWFVAVEETSGGKRREIELVVGGEDEVEEDRRRSRRRHVFEGLDLSEIEMKTEKKERGEEVGRMSICSPPKNALLLMRCRSDPVKVAALANRVRERQLSLNDGVYTEEEEDERRRRFELEIEDKKRIDLCEKWISGETTVETEEVSVAVAEAEAEAEAEAPLPSNPATEEEERVKVVEDSIVEEEQEASKILDSFEEEIEATIMKKIEDEIRNAIEEEEKLAEMEELAVVAVAETEEVEESKEVVPDCIPQNEERSEQGNREPDPSPEVVMRRSLQEETTEKEKTTATPYKVLPDCLLLMMCEPKLSMEVSKETWVCSTDFVRCLPGRPPAKKIPPEAVGDNHHHHQPKKRIVTAVDSNASSRRRSIDRPPLHLQPPRSSCSYPAAPPIITAAAAVGEQRVAGANKVQPPVLPRCKSEPRKSASKLAPEACFWKNRKLEPHPPATVGVGGAGVGF

SEQ ID NO: 4083 - protein, 602 aa, Arabidopsis thaliana
MFGANGGRKRSGSGYENSNNNNNNNIEPSSPKVTCIGQVRVKTRKHVKKKMRARSRRKGGENSFRRSVDQNDGGGGCRFKASENRLVHLPVTICESLRSFGSELNCFFPCRSSCTENSHGDGRRAESNNDGCGGGGGGSNSCGAVFTRWFVAVEETSGGKRREIELVVGGEDEVEEDRRRSRRRHVFEGLDLSEIEMKTEKKERGEEVGRMSICSPPKNALLLMRCRSDPVKVAALANRVRERQLSLNDGVYTEEEEDERRRRFELEIEDKKRIDLCEKWISGETTVETEEVSVAVAEAEAEAEAEAPLPSNPATEEEERVKVVEDSIVEEEQEASKILDSFEEEIEATIMKKIEDEIRNAIEEEEKLAEMEELAVVAVAETEEVEESKEVVPDCIPQNEERSEQGNREPDPSPEVVMRRSLQEETTEKEKTTATPYKVLPDCLLLMMCEPKLSMEVSKETWVCSTDFVRCLPGRPPAKKIPPEAVGDNHHHHQPKKRIVTAVDSNASSRRRSIDRPPLHLQPPRSSCSYPAAPPIITAAAAVGEQRVAGANKVQPPVLPRCKSEPRKSASKLAPEACFWKNRKLEPHPPATVGVGGAGVGF

SEQ ID NO: 4084 - DNA, 1261 bp, Arabidopsis thaliana
acgctctctcactgatcattcacaatctctctctttttttcaccggcgataattttccgatctcgattataagatggcgaaggaaccagttcgtgttcttgttaccggagctgcaggacaaatcggatatgctcttgttcctatgattgcaagggggataatgcttggtgctgatcagcctgtgatcctccacatgcttgacatcccttttgcagcagaagctttgaacggtgtgaagatggaattggtcgatgctgctttccctcttctaaagggtgtggtggctacaactgatgctgttgaagcgtgtaccggtgttaatgttgctgtcatggttggtggtttcccgaggaaggaaggaatggagaggaaggatgttatgtccaagaacgtttccatttacaagtctcaagcttctgccttggagaagcatgctgcaccaaactgcaaggttctggttgttgcaaaccctgcaaacaccaatgcattgatcctgaaggaatttgcaccatcgatcccagagaagaacattacttgcttgaccaggcttgaccacaacagggcattgggacaagtgtctgagaggttaagcgtaccagtgtctgatgtgaagaacgtgattatctggggaaaccactcatcaacccaatacccagatgtcaaccacgctaccgttaagacttccgttggagagaagccagtgcgtgagctagtcaagaatgacgagtggttgaatggagagttcatctctaccgttcaacaacgtggtgctgccattatcaaggccaggaagctgtctagtgcactttctgcagctagctcagcttgtgaccatatccgtgattgggttgttggaacacctgagggcacatttgtttcaatgggagtatactcagatggatcctacaatgttccagctggacttatctactccttccccgtaacctgccgtaatggagagtggaccattgttcaaggtttaccgattgatgacgcatcgaggaagaagatggatttgacagcagaggagttgaaggaagagaaggacctcgcttactcatgcctctcttaaaccggtcttttctcagctggtttaatcagtgaaagctttgtttcgaataaagaagttttgttataaaatgaacttttaataacctcatgagcttgaggtttagttttcctaatgttcccatgatgtgtcggtactgatttgctgaccatatataaacaatcattttgataattgacctcttttggtttc

SEQ ID NO: 4085 - protein, 332 aa, Arabidopsis thaliana
MAKEPVRVLVTGAAGQIGYALVPMIARGIMLGADQPVILHMLDIPFAAEALNGVKMELVDAAFPLLKGVVATTDAVEACTGVNVAVMVGGFPRKEGMERKDVMSKNVSIYKSQASALEKHAAPNCKVLVVANPANTNALILKEFAPSIPEKNITCLTRLDHNRALGQVSERLSVPVSDVKNVIIWGNHSSTQYPDVNHATVKTSVGEKPVRELVKNDEWLNGEFISTVQQRGAAIIKARKLSSALSAASSACDHIRDWVVGTPEGTFVSMGVYSDGSYNVPAGLIYSFPVTCRNGEWTIVQGLPIDDASRKKMDLTAEELKEEKDLAYSCLS

SEQ ID NO: 4086 - protein, 309 aa, Arabidopsis thaliana
MIARGIMLGADQPVILHMLDIPFAAEALNGVKMELVDAAFPLLKGVVATTDAVEACTGVNVAVMVGGFPRKEGMERKDVMSKNVSIYKSQASALEKHAAPNCKVLVVANPANTNALILKEFAPSIPEKNITCLTRLDHNRALGQVSERLSVPVSDVKNVIIWGNHSSTQYPDVNHATVKTSVGEKPVRELVKNDEWLNGEFISTVQQRGAAIIKARKLSSALSAASSACDHIRDWVVGTPEGTFVSMGVYSDGSYNVPAGLIYSFPVTCRNGEWTIVQGLPIDDASRKKMDLTAEELKEEKDLAYSCLS

SEQ ID NO: 4087 - protein, 303 aa, Arabidopsis thaliana
MLGADQPVILHMLDIPFAAEALNGVKMELVDAAFPLLKGVVATTDAVEACTGVNVAVMVGGFPRKEGMERKDVMSKNVSIYKSQASALEKHAAPNCKVLVVANPANTNALILKEFAPSIPEKNITCLTRLDHNRALGQVSERLSVPVSDVKNVIIWGNHSSTQYPDVNHATVKTSVGEKPVRELVKNDEWLNGEFISTVQQRGAAIIKARKLSSALSAASSACDHIRDWVVGTPEGTFVSMGVYSDGSYNVPAGLIYSFPVTCRNGEWTIVQGLPIDDASRKKMDLTAEELKEEKDLAYSCLS

SEQ ID NO: 4088 - DNA, 1544 bp, Arabidopsis thaliana
aggaaaactaaaccaaagtctgtttaccagtaatatcaatcgatcgccattctcgacatttctctctctcaagctagtctaaagtttcttcttatctccttcctccgaccaaaacttcgacttctctcttattttcaccctcagagagtaaccatggatgccttgacctcgagtttggttcgatctcccatcgtaccatcgagaacttccgacaacggttctggatctatgttccttaccgccagtggccctggattcacgcgttctggttcttcaagacttcaacttcgtttaaggcaaaacgcgtctgctagatcctcaagatcattacagagcttaacaacgactgctaaaactcggagaagttttgtggttagagcttcttcagcgtctaatgatgcttcatctggttcttcccccaaaccgatcgctccgctccagctgcaatcgcctgctggtcagtttctgtctcagattttggtgagccatcctcatcttgtgcctgcagctgttgaacagcagcttgagcagcttcaaactgatcgggactctcagggacagaacaaagattcagcgtctgtacctggaaccgacatcgttctctacaggagaattgcggagttgaaggaaaacgagagaagaagaacattggaagagattttgtatgcattggtggttcaaaagttcatggaagctaacgtatcacttgtaccttcagtaagcccatcttcagatccgtctggtcgggttgatacttggccgaccaaagtggagaaactcgagcggcttcactcgcccgagatgtacgagatgattcacaaccatcttgccttgattcttggaagcagaatgggtgatctgaactctgttgcacagataagcaagctcagagttggccaagtttacgctgcttctgtgatgtatggatatttcttgaagagggtggaccaaaggtttcagcttgagaagacgatgaagattcttccgggtgggtcggatgaaagtaaaacaagcgttgagcaagccgaggggacggcaacatatcaggcggctgtatcgtctcacccagaggttggtgcatttgcgggcggagttagtgctaagggcttcggcagcgagattaaaccatcccgattaaggtcatatgtgatgtcatttgatgcggagacgctgcagagatacgccactataagatcaagagaagcagttggaatcatcgagaagcacacagaggcattgtttggtaagcctgagattgtaataacaccggagggcacagtcgattcatcgaaggacgaacagataaagatcagcttcggtggaatgaagaggctcgtcttggaggcagttactttcgggtcgttcctttgggatgttgagagccatgtagatgcgaggtaccactttgtattgaactaaaaacatggtctgtaatgcagttgactaacttatgtagcattaagaagatacccattaagggtatcattacacttgtatcaaaaatttgaggaaaagatcgtacattatatatgttattgtgatgc

SEQ ID NO: 4089 - protein, 421 aa, Arabidopsis thaliana
MDALTSSLVRSPIVPSRTSDNGSGSMFLTASGPGFTRSGSSRLQLRLRQNASARSSRSLQSLTTTAKTRRSFVVRASSASNDASSGSSPKPIAPLQLQSPAGQFLSQILVSHPHLVPAAVEQQLEQLQTDRDSQGQNKDSASVPGTDIVLYRRIAELKENERRRTLEEILYALVVQKFMEANVSLVPSVSPSSDPSGRVDTWPTKVEKLERLHSPEMYEMIHNHLALILGSRMGDLNSVAQISKLRVGQVYAASVMYGYFLKRVDQRFQLEKTMKILPGGSDESKTSVEQAEGTATYQAAVSSHPEVGAFAGGVSAKGFGSEIKPSRLRSYVMSFDAETLQRYATIRSREAVGIIEKHTEALFGKPEIVITPEGTVDSSKDEQIKISFGGMKRLVLEAVTFGSFLWDVESHVDARYHFVLN

SEQ ID NO: 4090 - protein, 396 aa, Arabidopsis thaliana
MFLTASGPGFTRSGSSRLQLRLRQNASARSSRSLQSLTTTAKTRRSFVVRASSASNDASSGSSPKPIAPLQLQSPAGQFLSQILVSHPHLVPAAVEQQLEQLQTDRDSQGQNKDSASVPGTDIVLYRRIAELKENERRRTLEEILYALVVQKFMEANVSLVPSVSPSSDPSGRVDTWPTKVEKLERLHSPEMYEMIHNHLALILGSRMGDLNSVAQISKLRVGQVYAASVMYGYFLKRVDQRFQLEKTMKILPGGSDESKTSVEQAEGTATYQAAVSSHPEVGAFAGGVSAKGFGSEIKPSRLRSYVMSFDAETLQRYATIRSREAVGIIEKHTEALFGKPEIVITPEGTVDSSKDEQIKISFGGMKRLVLEAVTFGSFLWDVESHVDARYHFVLN

SEQ ID NO: 4091 - protein, 243 aa, Arabidopsis thaliana
MEANVSLVPSVSPSSDPSGRVDTWPTKVEKLERLHSPEMYEMIHNHLALILGSRMGDLNSVAQISKLRVGQVYAASVMYGYFLKRVDQRFQLEKTMKILPGGSDESKTSVEQAEGTATYQAAVSSHPEVGAFAGGVSAKGFGSEIKPSRLRSYVMSFDAETLQRYATIRSREAVGIIEKHTEALFGKPEIVITPEGTVDSSKDEQIKISFGGMKRLVLEAVTFGSFLWDVESHVDARYHFVLN

SEQ ID NO: 4092 - DNA, 1969 bp, Arabidopsis thaliana
ttttaaccaatcaaaaaattacttcttctttttttttttacttatttgtgaaaaaaagcttcttcttcaccaaacagtttgtctagttgtctgtgtctcatttaccatattttctctctaaatttttcccattactggatttgaagatcgtgtctggcagattttatctgattttctgatcagagagaagtaaaaggaaacaacttttttgttagctttctctctctacaagttttgggtttttaagagaaagagataaaggagacagctttctctctctgtctctctctaaaagttctgggtttagaaagagatctttcttatatgttgaatttgtgatcagaggtgagagagatgggaggttgcgtgtcaacgcctaagagctgtgtaggaggtaaaataaggtcaagcaaaaggagaaagactcggacaagacgaaagattcagaagaagagagttgtttcttcttctcgcttatctgacggatctttcgataataatcccactttcagagcaagtgttgatgaagcatggtttgattccaatctcgcctttgaaaccgattgtgatgatgactttcatagtgttcaggaagatacgttgtcagtgaacggatgtgagcgtatctcagtatcgagtatgtcatctgttaaagactctaaccttggtggttccgctcggaattctctaagcgatgtcatctcacaatcaaaatcagagagtgctttgattgacactaagcaggctgttttcatcgacgagatatcttcaaatgctgatggtagctctaataaagatgaagggttgttggaaaactgcgggattcttccgagtaattgtttgccttgtcttaattcaactgttccttctattgaaaagagaaggtctttaagctctagccctccaagtacgaggaaaaaagctgcggttaaactatctttcaagtggagagaagggcaccctactggtcctttattttctacaacaatgcagttgcagagaccgatggcaggttctcaggttccgttttgtccactcgaaaagaaaatgtttgattcttggtcaattattgagcctggtagtttccgggttcgtagcaaaacttatttcagagataagaagaaagagcttgcaccaaactatgctgcatataatccatttggtgtcgatgtatttttatctcaacgtaaagtaaaccatatagcgcaatacgtggagcttcctgttgttactaccaccccgactaagctcccatcaatccttgttgtaaatgttcagattccattgtatccagctgcaatttttcatggtgaaactgatggagaaggaatgaatttcgttttatactttaaactttcggataactatttaaaggagcttccaccacattttcaagaaagcattcagagattactagatgatgaggttgagaaagttagaggctacactactgacacgaatgtaccctttagagaacggttaaagatattgggtcgtgttgcgaatgtagacgatcttcagttgaatggtgcagagaaaaaactcatgaatgcttataacgaaaaacctgtgctttcacgtccacagcacgagttctactcgggtgaaaattactttgagattgatattgatatgcatagattcagttatatatcgcggaaaggatttgaagcatttttagacaggctaaagaactgtgttcttgatgttggactcacaattcaggggaataaaccggaggagttaccggagcagattttgtgttgcatccggttaaatgggattgattacatgaattatcatcagttagctcttagtcaagaagtcctatgatactaaacaaaagatatgacctttttttttgttgttgttctttatcttcttttcttttgttcctcaagaacacaaaatctaagagatacatcgttttgaagaagaagtcaataatggaagcatgagtatatacatg

SEQ ID NO: 4093 - protein, 492 aa, Arabidopsis thaliana
MGGCVSTPKSCVGGKIRSSKRRKTRTRRKIQKKRVVSSSRLSDGSFDNNPTFRASVDEAWFDSNLAFETDCDDDFHSVQEDTLSVNGCERISVSSMSSVKDSNLGGSARNSLSDVISQSKSESALIDTKQAVFIDEISSNADGSSNKDEGLLENCGILPSNCLPCLNSTVPSIEKRRSLSSSPPSTRKKAAVKLSFKWREGHPTGPLFSTTMQLQRPMAGSQVPFCPLEKKMFDSWSIIEPGSFRVRSKTYFRDKKKELAPNYAAYNPFGVDVFLSQRKVNHIAQYVELPVVTTTPTKLPSILVVNVQIPLYPAAIFHGETDGEGMNFVLYFKLSDNYLKELPPHFQESIQRLLDDEVEKVRGYTTDTNVPFRERLKILGRVANVDDLQLNGAEKKLMNAYNEKPVLSRPQHEFYSGENYFEIDIDMHRFSYISRKGFEAFLDRLKNCVLDVGLTIQGNKPEELPEQILCCIRLNGIDYMNYHQLALSQEVL

SEQ ID NO: 4094 - protein, 397 aa, Arabidopsis thaliana
MSSVKDSNLGGSARNSLSDVISQSKSESALIDTKQAVFIDEISSNADGSSNKDEGLLENCGILPSNCLPCLNSTVPSIEKRRSLSSSPPSTRKKAAVKLSFKWREGHPTGPLFSTTMQLQRPMAGSQVPFCPLEKKMFDSWSIIEPGSFRVRSKTYFRDKKKELAPNYAAYNPFGVDVFLSQRKVNHIAQYVELPVVTTTPTKLPSILVVNVQIPLYPAAIFHGETDGEGMNFVLYFKLSDNYLKELPPHFQESIQRLLDDEVEKVRGYTTDTNVPFRERLKILGRVANVDDLQLNGAEKKLMNAYNEKPVLSRPQHEFYSGENYFEIDIDMHRFSYISRKGFEAFLDRLKNCVLDVGLTIQGNKPEELPEQILCCIRLNGIDYMNYHQLALSQEVL

SEQ ID NO: 4095 - protein, 281 aa, Arabidopsis thaliana
MQLQRPMAGSQVPFCPLEKKMFDSWSIIEPGSFRVRSKTYFRDKKKELAPNYAAYNPFGVDVFLSQRKVNHIAQYVELPVVTTTPTKLPSILVVNVQIPLYPAAIFHGETDGEGMNFVLYFKLSDNYLKELPPHFQESIQRLLDDEVEKVRGYTTDTNVPFRERLKILGRVANVDDLQLNGAEKKLMNAYNEKPVLSRPQHEFYSGENYFEIDIDMHRFSYISRKGFEAFLDRLKNCVLDVGLTIQGNKPEELPEQILCCIRLNGIDYMNYHQLALSQEVL

SEQ ID NO: 4096 - DNA, 562 bp, Arabidopsis thaliana
gttactatcctctcactctccgaagcgattcagaaagttttaacccaaaaaagcaaaaaaaaaaaacttttgttcactcgatggcggcgaagagaatcggagccggtaaatctggcggcggagatccaaacatattagcgaggatttcaaactccgagatcgtgtcccaaggaagacgcgcagcaggagatgccgtcgaagtatcgaagaaactgctccggagcaccggaaaagcagcgtggatcgctgggacaacttttctcatacttgttgttccattgatcatcgagatggatcgagaggcacaaatcaacgaaattgagcttcaacaggccagtctcctcggagctccaccatctccaatgcaaaggggattgtaagaatcccttattatggattagggtcctctgttttacgagtttttttggttatatgttgttgtttgaatttgaatttcgtataagagtggtttaattcacatcgttggattcataaagttcaggctttgttgttttatatattatcttgagattgatttggcaatcaataattctggtttctc

SEQ ID NO: 4097 - protein, 125 aa, Arabidopsis thaliana
YYPLTLRSDSESFNPKKQKKKTFVHSMAAKRIGAGKSGGGDPNILARISNSEIVSQGRRAAGDAVEVSKKLLRSTGKAAWIAGTTFLILVVPLIIEMDREAQINEIELQQASLLGAPPSPMQRGL

SEQ ID NO: 4098 - protein, 99 aa, Arabidopsis thaliana
MAAKRIGAGKSGGGDPNILARISNSEIVSQGRRAAGDAVEVSKKLLRSTGKAAWIAGTTFLILVVPLIIEMDREAQINEIELQQASLLGAPPSPMQRGL

SEQ ID NO: 4099 - DNA, 1110 bp, Arabidopsis thaliana
agatttctccgaggaaaaaaatggcgtctggtttgatcggaagattggttggaacgaaaccgtcgaaattagccacggcggcgaggttaattccggcgagatggacctctacaggagcggaggcggaaacaaaagcttcctctggcggcggaagaggatcgaacttgaagacttttcagatctatcgatggaatccagataatccagggaagccagagcttcaaaattaccagatcgatctcaaagattgtggtccaatggtattagatgctttgattaagatcaaaaacgaaatggatccatctcttactttccgtagatcatgccgtgaagggatctgtggttcatgtgctatgaacattgatggatgtaacggacttgcttgtttgacaaagattcaagatgaagcatcggagacgacgattacaccgttgcctcatatgtttgtgattaaggatttggttgttgatatgactaatttttataatcagtataagagtattgagccgtggttgaagaggaagactccagcgtctgttcctgctaaggagattttgcagagtaagaaggatagagctaagcttgatgggatgtatgaatgtattctttgtgcttgttgtagcacatcttgtcctagttactggtggaatcctgagtcttaccttggtccagctgctttgctacacgctaataggtggataagcgacagtcgtgatgagtacactaaggaaagacttgaggctattgacgacgagttcaagctttaccgttgccatacaatcttgaattgtgctcgtgcctgtccaaagggtttgaacccaggaaaacagattactcacatcaagcaacttcagcgttgaaacagctaagtttgtgtgcgggatccgttgggaaactcatcagtcttaacgtttgaagctaataatcttcacaaaacctcttcggattttcaattcattcttgtattgttgttgccaaatattagcgccttaaaaaaactcgtttgcaagtcttcccaagtagatgagctttgtggttgtatcttgctgaaaatctcctctttaagtaataaaactcgagtaaacttaaacctcatctacttatcatctg

SEQ ID NO: 4100 - protein, 285 aa, Arabidopsis thaliana
ISPRKKMASGLIGRLVGTKPSKLATAARLIPARWTSTGAEAETKASSGGGRGSNLKTFQIYRWNPDNPGKPELQNYQIDLKDCGPMVLDALIKIKNEMDPSLTFRRSCREGICGSCAMNIDGCNGLACLTKIQDEASETTITPLPHMFVIKDLVVDMTNFYNQYKSIEPWLKRKTPASVPAKEILQSKKDRAKLDGMYECILCACCSTSCPSYWWNPESYLGPAALLHANRWISDSRDEYTKERLEAIDDEFKLYRCHTILNCARACPKGLNPGKQITHIKQLQR

SEQ ID NO: 4101 - protein, 279 aa, Arabidopsis thaliana
MASGLIGRLVGTKPSKLATAARLIPARWTSTGAEAETKASSGGGRGSNLKTFQIYRWNPDNPGKPELQNYQIDLKDCGPMVLDALIKIKNEMDPSLTFRRSCREGICGSCAMNIDGCNGLACLTKIQDEASETTITPLPHMFVIKDLVVDMTNFYNQYKSIEPWLKRKTPASVPAKEILQSKKDRAKLDGMYECILCACCSTSCPSYWWNPESYLGPAALLHANRWISDSRDEYTKERLEAIDDEFKLYRCHTILNCARACPKGLNPGKQITHIKQLQR

SEQ ID NO: 4102 - protein, 200 aa, Arabidopsis thaliana
MVLDALIKIKNEMDPSLTFRRSCREGICGSCAMNIDGCNGLACLTKIQDEASETTITPLPHMFVIKDLVVDMTNFYNQYKSIEPWLKRKTPASVPAKEILQSKKDRAKLDGMYECILCACCSTSCPSYWWNPESYLGPAALLHANRWISDSRDEYTKERLEAIDDEFKLYRCHTILNCARACPKGLNPGKQITHIKQLQR

SEQ ID NO: 4103 - DNA, 908 bp, Arabidopsis thaliana
atggtaacgtgtctttttcattaggcgagactagccaatctaagcaaacagagtcgtctttatatctaaacgaacattttgtgaaagaaagagagactaaggtgaatccatggcgtccaagattgtctcagccatagtatttgtgtttaacctcattgcctttggtttagccgttgctgctgaacaaagaagaagcactgcaagggttgtgcaggacactgaggtgcaatataactactgtgtgtatgactcggacagagctacagggtatggagttggagcctttttgttctcagtggctagtcaaatccttatcatgctcgttagccgttgcttctgttgtggaaagcctctcaagcctggcggttcacgcgctcttgccctcattctcttcattgttagctggatgttcttcttgatagcggagatatgtctattagctggatcggtagagaatgcataccacacaaagtacaggacaatgttcatggacaatcctcctgattgtcaaactctacgtaaaggcgtctttgcagcaggcgcctcattcgtcttcttcaacgccattgtctctcagttctactatttcttctatttctctgctgctgaggcctctctttcaccttactagaggttcttaaccaacaaataagttttattttttttctctctaaatgtgctatttgatatgctaatatcatattttgaggtgggttttctatgtacaactatgatgaaatgttacaactatgacaaaattatttgaaagtgatggtacacatgagatttgtagatttatttgtatggttattagatcgagttgaaatgttgttttaaaaagagtggatgtaatttgacgattttgtgacatatgacataatgctcttattcattgaataaggtttgag

SEQ ID NO: 4104 - protein, 173 aa, Arabidopsis thaliana
MASKIVSAIVFVFNLIAFGLAVAAEQRRSTARVVQDTEVQYNYCVYDSDRATGYGVGAFLFSVASQILIMLVSRCFCCGKPLKPGGSRALALILFIVSWMFFLIAEICLLAGSVENAYHTKYRTMFMDNPPDCQTLRKGVFAAGASFVFFNAIVSQFYYFFYFSAAEASLSPY

SEQ ID NO: 4105 - protein, 104 aa, Arabidopsis thaliana
MLVSRCFCCGKPLKPGGSRALALILFIVSWMFFLIAEICLLAGSVENAYHTKYRTMFMDNPPDCQTLRKGVFAAGASFVFFNAIVSQFYYFFYFSAAEASLSPY

SEQ ID NO: 4106 - DNA, 1429 bp, Arabidopsis thaliana
ctttaaaaaaaaaaaataccaaaagaagcggaaacagagaaaaagagagaaaaatgctgagtagatcagttgcttctgctgttacaccggtctcatcttcttctctcttaccaaactcaaagcctatcttctgtctgaaaaccctctccggttatcgttcttcttctttctgtggcggctgtattcgtaaaatcaaccataagcctcttcgaatgacgagttccaatattacaccaagagctatggccacacaacagcttgagaacgctgatcagctcattgattctgtcgaaacttttatcttcgattgtgatggtgtgatttggaagggagataaattgatagagggagttcctgaaactcttgatatgcttcgtgccaagggaaagagattggtttttgtgacaaacaactcaacaaaatctaggaaacagtatggaaaaaagttcgagactcttggcctgaatgttaacgaggaggagatatttgcttcatcttttgctgctgctgcatacttgcagtctattaatttcccaaaagataagaaggtctatgtgattggtgaggaaggtatcttgaaagagctagagcttgctggttttcaataccttggaggtccggatgatggtaaaagacagattgaattgaagccaggttttctaatggagcatgatcatgatgttggagctgttgtggttggatttgatcgctatttcaactactacaaaattcagtatggaacactctgtatccgtgaaaacccggggtgtcttttcatcgctacaaaccgagatgctgtcactcaccttactgatgctcaagaatgggcaggtggtggctctatggttggtgctcttgttggatccactcaacgtgagcctcttgttgttggaaaaccctcaacttttatgatggactatttagcagacaaatttggaatccaaaagtcacagatatgcatggttggtgatagattggacactgacattttattcgggcagaatggcggttgtaagactctactcgtcctctcgggtgttacttcaatctctatgttggaaagccctgagaacaagatacaaccagatttctacaccagcaagatctccgattttctgtctccgaaagccgcaactgtataatctagtaagccccgcgtcaatcactctgtagaactcagggtactgaatctatttatgggtatacaactacagtctattcatttttctttgtgactatgtgtataataataagaactttcttgcttgtttttggcaagcttattttatttgcagtgcctttgtgtgcatagcaaattagggagccaatgtgtttttttttaggaagagtttacagaattgaaccaagctctaatctgtaagggtttctctcttcattgcctttaaattatttgtttgtggtcatgtat

SEQ ID NO: 4107 - protein, 379 aa, Arabidopsis thaliana
LKKKNTKRSGNREKERKMLSRSVASAVTPVSSSSLLPNSKPIFCLKTLSGYRSSSFCGGCIRKINHKPLRMTSSNITPRAMATQQLENADQLIDSVETFIFDCDGVIWKGDKLIEGVPETLDMLRAKGKRLVFVTNNSTKSRKQYGKKFETLGLNVNEEEIFASSFAAAAYLQSINFPKDKKVYVIGEEGILKELELAGFQYLGGPDDGKRQIELKPGFLMEHDHDVGAVVVGFDRYFNYYKIQYGTLCIRENPGCLFIATNRDAVTHLTDAQEWAGGGSMVGALVGSTQREPLVVGKPSTFMMDYLADKFGIQKSQICMVGDRLDTDILFGQNGGCKTLLVLSGVTSISMLESPENKIQPDFYTSKISDFLSPKAATV

SEQ ID NO: 4108 - protein, 362 aa, Arabidopsis thaliana
MLSRSVASAVTPVSSSSLLPNSKPIFCLKTLSGYRSSSFCGGCIRKINHKPLRMTSSNITPRAMATQQLENADQLIDSVETFIFDCDGVIWKGDKLIEGVPETLDMLRAKGKRLVFVTNNSTKSRKQYGKKFETLGLNVNEEEIFASSFAAAAYLQSINFPKDKKVYVIGEEGILKELELAGFQYLGGPDDGKRQIELKPGFLMEHDHDVGAVVVGFDRYFNYYKIQYGTLCIRENPGCLFIATNRDAVTHLTDAQEWAGGGSMVGALVGSTQREPLVVGKPSTFMMDYLADKFGIQKSQICMVGDRLDTDILFGQNGGCKTLLVLSGVTSISMLESPENKIQPDFYTSKISDFLSPKAATV

SEQ ID NO: 4109 - protein, 309 aa, Arabidopsis thaliana
MTSSNITPRAMATQQLENADQLIDSVETFIFDCDGVIWKGDKLIEGVPETLDMLRAKGKRLVFVTNNSTKSRKQYGKKFETLGLNVNEEEIFASSFAAAAYLQSINFPKDKKVYVIGEEGILKELELAGFQYLGGPDDGKRQIELKPGFLMEHDHDVGAVVVGFDRYFNYYKIQYGTLCIRENPGCLFIATNRDAVTHLTDAQEWAGGGSMVGALVGSTQREPLVVGKPSTFMMDYLADKFGIQKSQICMVGDRLDTDILFGQNGGCKTLLVLSGVTSISMLESPENKIQPDFYTSKISDFLSPKAATV

SEQ ID NO: 4110 - DNA, 1779 bp, Arabidopsis thaliana
gctctgattcattcacaaataacaatcctctcttcgtttttgtttttcttttggatccaaagctctcttaaatctgtaaatcaacaatggccgccaccactgagaatctccctcaactcaaatccgccgtcgatggccttactgagatgagtgagagtgagaagagcggattcatcagcctggtttcacgttacctgagcggtgaggcacaacacattgagtggagtaagatccagactcctaccgatgaaatcgttgttccctacgagaaaatgacccctgtctcccaagatgttgccgagaccaagaatctgttggacaaacttgttgtgttgaagcttaatggaggtcttggaacaacaatgggatgcactggcccgaagtccgttatcgaagttcgtgatggtttgacatttcttgatctgattgttatccagattgagaatctcaacaacaagtatggctgcaaggttccgttagttctcatgaactcgtttaatacacatgatgacacacataagattgtggaaaagtacaccaactcaaatgttgacattcacacttttaaccagagcaaatatccccgtgttgtggcagatgagtttgtgccatggcccagcaagggaaagaccgacaaggagggctggtatcctcccggtcatggtgatgtattcccagccctcatgaacagtggaaagctcgatactttcttatcacagggtaaggaatatgtgtttgttgccaattcagacaacttgggtgccatcgttgacttaacaatcctgaagcatttgatccagaacaagaacgaatactgcatggaggttacacccaaaaccttagctgatgtaaaggggggaactctcatttcttatgaaggcaaagtccagcttctggagattgctcaggttcctgatgaacatgtcaatgagttcaaatcaattgagaagttcaagatattcaacacaaacaacctatgggttaacttgaaggccatcaaaaagcttgtggaagctgatgcacttaaaatggagatcattccaaacccaaaggaagttgatggagtcaaagttcttcaactggaaactgcagccggtgctgcgataaggttctttgacaacgctatcggtgttaatgtacctcgctcacggttcttgccagtgaaggcaagttcagacttgctgctcgtccagtctgatctctacaccttagttgatggctttgtcactcgaaacaaagctagaactaacccctcgaacccgtcaattgaattgggacccgagttcaagaaggtggctactttcttgagccggtttaagtccattcctagtatagtcgagctcgacagccttaaggtgtctggtgatgtctggtttggctcttccattgttctcaagggcaaggtgactgtggcggcaaaatccggtgtgaagcttgaaattccggacagggccgtggtcgagaacaagaacatcaatggtccagaagacctctgaataaaacaaattcaagtcttcttccctctctcatggaagacacatcttgatactcctttaattggtgtgaaaagatcacaagtggcacagcaaagcaagtttatgaagaaagaataaataatgtttctttttctttttgcagcttagcaaagtcttttcctctttggactttattttaattttgctctttgaattttcccaaaacatcacatttatatgttcgattatatttgggttctatccacaatcatttttctttttgataatccactctttctttccg

SEQ ID NO: 4111 - protein, 469 aa, Arabidopsis thaliana
MAATTENLPQLKSAVDGLTEMSESEKSGFISLVSRYLSGEAQHIEWSKIQTPTDEIVVPYEKMTPVSQDVAETKNLLDKLVVLKLNGGLGTTMGCTGPKSVIEVRDGLTFLDLIVIQIENLNNKYGCKVPLVLMNSFNTHDDTHKIVEKYTNSNVDIHTFNQSKYPRVVADEFVPWPSKGKTDKEGWYPPGHGDVFPALMNSGKLDTFLSQGKEYVFVANSDNLGAIVDLTILKHLIQNKNEYCMEVTPKTLADVKGGTLISYEGKVQLLEIAQVPDEHVNEFKSIEKFKIFNTNNLWVNLKAIKKLVEADALKMEIIPNPKEVDGVKVLQLETAAGAAIRFFDNAIGVNVPRSRFLPVKASSDLLLVQSDLYTLVDGFVTRNKARTNPSNPSIELGPEFKKVATFLSRFKSIPSIVELDSLKVSGDVWFGSSIVLKGKVTVAAKSGVKLEIPDRAVVENKNINGPEDL

SEQ ID NO: 4112 - protein, 449 aa, Arabidopsis thaliana
MSESEKSGFISLVSRYLSGEAQHIEWSKIQTPTDEIVVPYEKMTPVSQDVAETKNLLDKLVVLKLNGGLGTTMGCTGPKSVIEVRDGLTFLDLIVIQIENLNNKYGCKVPLVLMNSFNTHDDTHKIVEKYTNSNVDIHTFNQSKYPRVVADEFVPWPSKGKTDKEGWYPPGHGDVFPALMNSGKLDTFLSQGKEYVFVANSDNLGAIVDLTILKHLIQNKNEYCMEVTPKTLADVKGGTLISYEGKVQLLEIAQVPDEHVNEFKSIEKFKIFNTNNLWVNLKAIKKLVEADALKMEIIPNPKEVDGVKVLQLETAAGAAIRFFDNAIGVNVPRSRFLPVKASSDLLLVQSDLYTLVDGFVTRNKARTNPSNPSIELGPEFKKVATFLSRFKSIPSIVELDSLKVSGDVWFGSSIVLKGKVTVAAKSGVKLEIPDRAVVENKNINGPEDL

SEQ ID NO: 4113 - protein, 407 aa, Arabidopsis thaliana
MTPVSQDVAETKNLLDKLVVLKLNGGLGTTMGCTGPKSVIEVRDGLTFLDLIVIQIENLNNKYGCKVPLVLMNSFNTHDDTHKIVEKYTNSNVDIHTFNQSKYPRVVADEFVPWPSKGKTDKEGWYPPGHGDVFPALMNSGKLDTFLSQGKEYVFVANSDNLGAIVDLTILKHLIQNKNEYCMEVTPKTLADVKGGTLISYEGKVQLLEIAQVPDEHVNEFKSIEKFKIFNTNNLWVNLKAIKKLVEADALKMEIIPNPKEVDGVKVLQLETAAGAAIRFFDNAIGVNVPRSRFLPVKASSDLLLVQSDLYTLVDGFVTRNKARTNPSNPSIELGPEFKKVATFLSRFKSIPSIVELDSLKVSGDVWFGSSIVLKGKVTVAAKSGVKLEIPDRAVVENKNINGPEDL

SEQ ID NO: 4114 - DNA, 690 bp, Arabidopsis thaliana
atccacacaacatttacacaatacccttattctccacgtagaatcaagagtacttcttttccttaaatctctacaaaaaaaaaatcgatctatatactaagagatcataaatatagattcatagacctatttaagaaacgacttaagaagctgttggatcatataccatataaaatagcaatggatatgataacgaagatggtgatggagagaccggtggtgatttacagcaagagctcttgctgtatgtctcacacgatcaagactttgctctgcgatttcggagcaaatccagcggtttacgagctggatgagatatctagagggagggagatcgagcaggcgttgttgcggctcgggtgtagccccgcagttccgggcgttttcattggtggagagttggtcggtggagccaacgaggtcatgagtctacatcttaacggatccttgattcccatgcttaagcgggctggtgcattgtgggtttgacttatcatgtttttaactagtttacttaacactaagttaagtacgcagaataattttaacacatctatgatcttggcatggtgatatgatgagtccacgtcggatcaataatcagtgtgttgtctttttttttttggttgtcttactttaagatatgtatcgactgatacgaacttctatgaaataaaaatatattgacct

SEQ ID NO: 4115 - protein, 102 aa, Arabidopsis thaliana
MDMITKMVMERPVVIYSKSSCCMSHTIKTLLCDFGANPAVYELDEISRGREIEQALLRLGCSPAVPGVFIGGELVGGANEVMSLHLNGSLIPMLKRAGALWV

SEQ ID NO: 4116 - protein, 100 aa, Arabidopsis thaliana
MITKMVMERPVVIYSKSSCCMSHTIKTLLCDFGANPAVYELDEISRGREIEQALLRLGCSPAVPGVFIGGELVGGANEVMSLHLNGSLIPMLKRAGALWV

SEQ ID NO: 4117 - protein, 96 aa, Arabidopsis thaliana
MVMERPVVIYSKSSCCMSHTIKTLLCDFGANPAVYELDEISRGREIEQALLRLGCSPAVPGVFIGGELVGGANEVMSLHLNGSLIPMLKRAGALWV

SEQ ID NO: 4118 - DNA, 1544 bp, Arabidopsis thaliana
gaaatatttcgtctttgttctcgtcaccagagtgcttatctgaaagaaatgaagtcagagaagctctaaaagacctctaatggaggacaagaaagcaaacataatcgctactatattaatcttagcccttgtcgtagtgataatcgccgcccgagtttctctaaaactctccaaaacattctatctcatagccggcgtcgacatttccttgatcctcgccgtgatctgtttcctcataatccgtagccgttacaacaaagaaagaaagctcttggtatcaagattcgcctccgaaggcagagagctacgaatcgagtacagtttcttgagaaaagtcgccggagttccaaccaaattcaagctcgaagatcttgaagaagccaccgatggattcagatctttgatcggaaaaggcggttccggttcggtgtttaaaggagttttgaaagacggaagtcaagtagctgtgaagagaatcgaaggagaagagaaaggagaaagagagttcagatccgaagtagctgccatagcttccgttcagcacaagaatctagttcgtctttacggttattcgtcttcgactagcgcgaatcgtccgagattcctcgtttacgattatatcgtaaactcgtctctcgatatctggatttttccggatagaggaaacagaggaagatccggaggaggatgcttgtcttgggaacaaaggtaccaagttgctattgatgtagctaaagctcttgcttatcttcatcatgattgtcgatctaagatcttgcatctcgatgttaaacccgaaaacattctactagacgagaatttccgagcggtggtaaccgatttcggactctctaagctgattgctagagatgagagcagagtactaacggatatccgtggtactcgggggtatttagcccccgagtggcttcttgaacacggtatttcggagaaatccgatgtgtatagctacgggattgtgttactagagatgatcggaggacggagaagcatttcaagggtagaagttaaggaaacaaaaaagaagaaattagagtatttcccaaggattgtgaaccaaaagatgagagaaagaaagataatggagattgttgatcaaaggctgattgaagttaatgaggtagatgaagaggaagtgatgaaattggtgtgtgtggctttgtggtgtatacaagagaagtctaagaaaaggcctgatatgactatggttattgagatgcttgaagggagagttccggtgaacgagccaccggattcagatgttgttgtggtcgatcttttggcggctgatgatgatgatgcaagtaccggtgttcgacgggtagtaaatatcccgaaattgcaaatccatagggagaggaattttcgtttatcatccatttgctctagtatcatatctcccatctctccacgctagttatttttgtgtgttcatattggttttgtttcaatcaaaaactgagtatgtttggtgtgttactattaatcaacctttgatacgtataataaacacaatttatacc

SEQ ID NO: 4119 - protein, 452 aa, Arabidopsis thaliana
MEDKKANIIATILILALVVVIIAARVSLKLSKTFYLIAGVDISLILAVICFLIIRSRYNKERKLLVSRFASEGRELRIEYSFLRKVAGVPTKFKLEDLEEATDGFRSLIGKGGSGSVFKGVLKDGSQVAVKRIEGEEKGEREFRSEVAAIASVQHKNLVRLYGYSSSTSANRPRFLVYDYIVNSSLDIWIFPDRGNRGRSGGGCLSWEQRYQVAIDVAKALAYLHHDCRSKILHLDVKPENILLDENFRAVVTDFGLSKLIARDESRVLTDIRGTRGYLAPEWLLEHGISEKSDVYSYGIVLLEMIGGRRSISRVEVKETKKKKLEYFPRIVNQKMRERKIMEIVDQRLIEVNEVDEEEVMKLVCVALWCIQEKSKKRPDMTMVIEMLEGRVPVNEPPDSDVVVVDLLAADDDDASTGVRRVVNIPKLQIHRERNFRLSSICSSIISPISPR

SEQ ID NO: 4120 - DNA, 1851 bp, Arabidopsis thaliana
ggggtcatacaataaaaattgtgtttcttttttgccctaaaccaaaaatttcatctctcttttccctcttcccgtctctatctctctgagaagcgttttttcggtggagagaaagagagatttgactctgtcaagttattagtacattgaggtcgggctgtcaaaacttgacagcccgagtttgaagcttccaggactctttttctattaatgagattggtatgctagatttggagtgtattggattagattgtggcgatcatgggttctttgtctgggatcattcaacggccacttgttgctgctgctgctgtgattacagcttctgtgtctgcagatgtctctgagaggttctcatctcttagatcactagttcgaggttctgaatcagagcagattgctccttcagtgtctggtttagttcaggaagaaaggtccttgtgggtttctcaagtctcggcctccaagcttgcagatttatcttttgtgtcgaggatttgtgttcctgtaccaaatgttgatctcctagcttctaatcctagctgtagtctcgctacttctgttacttctctgtccgctcttcgtagtgtttatcagtctgcagagttggctaaagcatcgaaaccggttgcattcacaatcggtgcctcacttgtggttcctgatatttcctacagatggcatttacctgagcctagtgcagtcgatatgtctggttcttcgagttgtgtgtctgaaaagaatagaactgttgtggttttgcttggatggcttggatcaaagcagaagcatctgaagaaatatgctgattggtacacttcaaagggttaccatgtcattacatttactcttccgatgaatgagattatgagttatcaagttggagggaaagcagagaagaacatcgagtcgctggttaatcacttggctgattggttggatgaagagcaaaagaaaaatctcgtctttcacaccttcagcaacaccgggtggttaacatatggagccattttggaaaagtttcagaagcaagattcatcattgatgggaagagttaaaggttgcatagtggactcagctcctgttgctgctgcagatcctacggtatgggcatcaggtttctcagctgcgttcttgaagaaaagcagtgtagccactaaaggatctgcgagctcatcatatgagtcaaacggtataaacatctcccagcctaaacccgctgcaacagaaacagctttgcttttggttcttgaaaagttctttgcggtgattctaaatcttcccaaagtaaacaggagacttgccgatgttcttgacacattatcaacagcacaaccaagttgtccacagttatacatttacagctctgcagacagagttataccggtggaacaagttgaatcattcattgtagagcagaggaaagcaggacatgaggtccgtgcttgcaacttcatatcttcacctcatgtagaccatttccggagtaacccagaactgtatacagctgagctcaaccatttcatgaacaactttgtcctttcttgctgccaccattcttcatagcgacttccacaagtgttgttgttgctaaccatttttggggtccttttaactcttatacaagaaagagaaaaatagttactgattgatgattctttttggtttggattggtttatagattcaaattcattattcctttgtaaattgttggatattgtacatttaggagaatgaagattcaagaaagtgacgtccttgtcctttgtagtggagatttggatcttatggttgtcttttgttatttgttcaaagagggttgttaagaacccaatcataaagtttttgcc

SEQ ID NO: 4121 - protein, 434 aa, Arabidopsis thaliana
MGSLSGIIQRPLVAAAAVITASVSADVSERFSSLRSLVRGSESEQIAPSVSGLVQEERSLWVSQVSASKLADLSFVSRICVPVPNVDLLASNPSCSLATSVTSLSALRSVYQSAELAKASKPVAFTIGASLVVPDISYRWHLPEPSAVDMSGSSSCVSEKNRTVVVLLGWLGSKQKHLKKYADWYTSKGYHVITFTLPMNEIMSYQVGGKAEKNIESLVNHLADWLDEEQKKNLVFHTFSNTGWLTYGAILEKFQKQDSSLMGRVKGCIVDSAPVAAADPTVWASGFSAAFLKKSSVATKGSASSSYESNGINISQPKPAATETALLLVLEKFFAVILNLPKVNRRLADVLDTLSTAQPSCPQLYIYSSADRVIPVEQVESFIVEQRKAGHEVRACNFISSPHVDHFRSNPELYTAELNHFMNNFVLSCCHHSS

SEQ ID NO: 4122 - protein, 285 aa, Arabidopsis thaliana
MSGSSSCVSEKNRTVVVLLGWLGSKQKHLKKYADWYTSKGYHVITFTLPMNEIMSYQVGGKAEKNIESLVNHLADWLDEEQKKNLVFHTFSNTGWLTYGAILEKFQKQDSSLMGRVKGCIVDSAPVAAADPTVWASGFSAAFLKKSSVATKGSASSSYESNGINISQPKPAATETALLLVLEKFFAVILNLPKVNRRLADVLDTLSTAQPSCPQLYIYSSADRVIPVEQVESFIVEQRKAGHEVRACNFISSPHVDHFRSNPELYTAELNHFMNNFVLSCCHHSS

SEQ ID NO: 4123 - protein, 236 aa, Arabidopsis thaliana
MNEIMSYQVGGKAEKNIESLVNHLADWLDEEQKKNLVFHTFSNTGWLTYGAILEKFQKQDSSLMGRVKGCIVDSAPVAAADPTVWASGFSAAFLKKSSVATKGSASSSYESNGINISQPKPAATETALLLVLEKFFAVILNLPKVNRRLADVLDTLSTAQPSCPQLYIYSSADRVIPVEQVESFIVEQRKAGHEVRACNFISSPHVDHFRSNPELYTAELNHFMNNFVLSCCHHSS

SEQ ID NO: 4124 - DNA, 1659 bp, Arabidopsis thaliana
ttcactcaccaaaatagatctaaaacatggaaaccaaaaccctaattttctcaattctcttcgttgttctctctctcatttacttaattggaaaactcaagcgaaagccaaatctacctccgagtccggcatggtcattaccggtgattggtcatctccgccttctcaaaccaccgattcatcgcacattcctctccctctctcaatccctaaacaatgctccgatcttctccctccgactcggtaaccgactcgttttcgtgaactcgtcacactcgatcgccgaggaatgtttcaccaaaaacgacgtcgtactggcgaacagaccaaacttcatcctcgctaaacacgttgcgtacgattacacaaccatgatcgcagcttcctacggtgaccactggcgtaacctccgccgcatcggctccgtcgagatattctccaatcaccgtctcaatagctttttgtctattcgtaaagacgagatccgacgacttgtgtttcgtctttctcggaacttttcacaagagtttgtgaaagtggatatgaaatcaatgttatctgacttaacattcaacaacattttaagaatggtggccggaaaacgttactacggagacggtgttgaggatgatccggaggctaaacgtgtccggcagcttatagcggatgtggtggcttgtgctggtgctggaaacgctgttgattacttaccggttttgcggttggtttcagattacgagacacgggttaagaagttggcgggtaggctcgacgagttcttgcaaggattggttgatgagaaacgagaagctaaggagaaaggaaacactatgatcgatcacttgcttactctgcaagaatcccaaccggattacttcacggatcgtatcattaaaggaaacatgctcgctttgatactagcagggaccgacacatcagcggttacgttagaatgggcattgtcgaacgtgttgaaccatccggatgtattgaacaaggcgagagatgaaatcgatagaaagataggtttagacaggcttatggatgaatcagatatctcaaacctgccttatctccaaaacattgtgtctgaaacgttgcgcctttatcctgcggctcccatgcttcttcctcacgttgcctcggaagattgtaaagttgcaggatacgatatgccgcgtggcacgatactattgaccaatgtgtgggctatacacagagatcctcagctatgggatgatccaatgagcttcaagccagagaggtttgagaaagaaggagaagctcagaagctaatgccgtttgggttaggaagaagggcgtgtcctggttctggactggctcatcggcttataaacctgactcttggatcattgattcagtgtttggaatgggagaagattggagaagaagtggatatgagtgaaggcaaaggtgttacaatgcctaaagccaagcctttggaagccatgtgcagagcacgtccctctgttgttaaaatcttcaacgagtccgtttgacgtttagacttttggtaatggctatgtatacattagataactagttatgtttgtatgttttctttttttttggtgaaaatattatgtttgtatgttatatgagaatattttaccaatattcctagatgatattttgggc

SEQ ID NO: 4125 - protein, 497 aa, Arabidopsis thaliana
METKTLIFSILFVVLSLIYLIGKLKRKPNLPPSPAWSLPVIGHLRLLKPPIHRTFLSLSQSLNNAPIFSLRLGNRLVFVNSSHSIAEECFTKNDVVLANRPNFILAKHVAYDYTTMIAASYGDHWRNLRRIGSVEIFSNHRLNSFLSIRKDEIRRLVFRLSRNFSQEFVKVDMKSMLSDLTFNNILRMVAGKRYYGDGVEDDPEAKRVRQLIADVVACAGAGNAVDYLPVLRLVSDYETRVKKLAGRLDEFLQGLVDEKREAKEKGNTMIDHLLTLQESQPDYFTDRIIKGNMLALILAGTDTSAVTLEWALSNVLNHPDVLNKARDEIDRKIGLDRLMDESDISNLPYLQNIVSETLRLYPAAPMLLPHVASEDCKVAGYDMPRGTILLTNVWAIHRDPQLWDDPMSFKPERFEKEGEAQKLMPFGLGRRACPGSGLAHRLINLTLGSLIQCLEWEKIGEEVDMSEGKGVTMPKAKPLEAMCRARPSVVKIFNESV

SEQ ID NO: 4126 - protein, 382 aa, Arabidopsis thaliana
MIAASYGDHWRNLRRIGSVEIFSNHRLNSFLSIRKDEIRRLVFRLSRNFSQEFVKVDMKSMLSDLTFNNILRMVAGKRYYGDGVEDDPEAKRVRQLIADVVACAGAGNAVDYLPVLRLVSDYETRVKKLAGRLDEFLQGLVDEKREAKEKGNTMIDHLLTLQESQPDYFTDRIIKGNMLALILAGTDTSAVTLEWALSNVLNHPDVLNKARDEIDRKIGLDRLMDESDISNLPYLQNIVSETLRLYPAAPMLLPHVASEDCKVAGYDMPRGTILLTNVWAIHRDPQLWDDPMSFKPERFEKEGEAQKLMPFGLGRRACPGSGLAHRLINLTLGSLIQCLEWEKIGEEVDMSEGKGVTMPKAKPLEAMCRARPSVVKIFNESV

SEQ ID NO: 4127 - protein, 325 aa, Arabidopsis thaliana
MKSMLSDLTFNNILRMVAGKRYYGDGVEDDPEAKRVRQLIADVVACAGAGNAVDYLPVLRLVSDYETRVKKLAGRLDEFLQGLVDEKREAKEKGNTMIDHLLTLQESQPDYFTDRIIKGNMLALILAGTDTSAVTLEWALSNVLNHPDVLNKARDEIDRKIGLDRLMDESDISNLPYLQNIVSETLRLYPAAPMLLPHVASEDCKVAGYDMPRGTILLTNVWAIHRDPQLWDDPMSFKPERFEKEGEAQKLMPFGLGRRACPGSGLAHRLINLTLGSLIQCLEWEKIGEEVDMSEGKGVTMPKAKPLEAMCRARPSVVKIFNESV

SEQ ID NO: 4128 - DNA, 1244 bp, Arabidopsis thaliana
gctcagtttcctggtcaaatggctacctcagagactcgagtcttgttcttatctttgtgtctcatccttggcaaagtagttttgtctcagtttgatgagttatggctagtaggggacgatgatccactcaacgccttgcagacgaggcgtgaaagaagagaggagaggtgtgattactcggtggggaaatggacgttcgatgaaacgtatccgctctatgattcaagctgtccatatctgagttctgcactaagttgccaaagaaatggaagacccgactcttattaccagaaatggagatggatccctaaggcttgttcactaccaaggtttgacgcattgaaatttcttgggaaaatgagaggaaaaagaataatgctggttggagattcaatgatgagaaaccagtgggaatctcttgtctgcttagtacagtctgttcttcccactcatcgtaagaagctcacttacaatggtcctacgatgtctttccattctctggattttgagacatcaattgagttttgttgggctcctctgcttgtggaactcaagagaggagttgaccgtaaaagggtgttacatttggactcaatcgaagacaatgctagatattggcgtggtgtagatgttcttgtattcgattccgctcactggtggactcactctcagagatggagttcgtgggattattacatggatgggaataagatcttcaaagctatggacccaatggttgcttatgagagaggactaaccacatgggctaaatgggttgagataaatcttgatccatccaaaacaaaagtcattttccgcactgtctcaccgagagagagtggtcagatgtgctacaaccagaaacatcccttgccttctttatcttcttccaccaaaccccacgtgcctcaacagtcaagagtgttgaacaaagtgctaaggacaatgaaataccgagtgtatttatacgatatcacaacaatgtctgcgtatagaagagacggtcatccttcggtgttcaagagagcaatgcacgaggaagagaagcaccatcgtatcgctggaccttcatcagattgcagtcattggtgcttgcccggtgtcccggatatttggaatgagatgctttcttcaattatcttaaccaatgctgtatgagctataataagagtctgtttttactcatgaacaatggtgttacttatatgaatcagtggtttatatattacatatcctttcccagc

SEQ ID NO: 4129 - protein, 385 aa, Arabidopsis thaliana
AQFPGQMATSETRVLFLSLCLILGKVVLSQFDELWLVGDDDPLNALQTRRERREERCDYSVGKWTFDETYPLYDSSCPYLSSALSCQRNGRPDSYYQKWRWIPKACSLPRFDALKFLGKMRGKRIMLVGDSMMRNQWESLVCLVQSVLPTHRKKLTYNGPTMSFHSLDFETSIEFCWAPLLVELKRGVDRKRVLHLDSIEDNARYWRGVDVLVFDSAHWWTHSQRWSSWDYYMDGNKIFKAMDPMVAYERGLTTWAKWVEINLDPSKTKVIFRTVSPRESGQMCYNQKHPLPSLSSSTKPHVPQQSRVLNKVLRTMKYRVYLYDITTMSAYRRDGHPSVFKRAMHEEEKHHRIAGPSSDCSHWCLPGVPDIWNEMLSSIILTNAV

SEQ ID NO: 4130 - protein, 379 aa, Arabidopsis thaliana
MATSETRVLFLSLCLILGKVVLSQFDELWLVGDDDPLNALQTRRERREERCDYSVGKWTFDETYPLYDSSCPYLSSALSCQRNGRPDSYYQKWRWIPKACSLPRFDALKFLGKMRGKRIMLVGDSMMRNQWESLVCLVQSVLPTHRKKLTYNGPTMSFHSLDFETSIEFCWAPLLVELKRGVDRKRVLHLDSIEDNARYWRGVDVLVFDSAHWWTHSQRWSSWDYYMDGNKIFKAMDPMVAYERGLTTWAKWVEINLDPSKTKVIFRTVSPRESGQMCYNQKHPLPSLSSSTKPHVPQQSRVLNKVLRTMKYRVYLYDITTMSAYRRDGHPSVFKRAMHEEEKHHRIAGPSSDCSHWCLPGVPDIWNEMLSSIILTNAV

SEQ ID NO: 4131 - protein, 266 aa, Arabidopsis thaliana
MRGKRIMLVGDSMMRNQWESLVCLVQSVLPTHRKKLTYNGPTMSFHSLDFETSIEFCWAPLLVELKRGVDRKRVLHLDSIEDNARYWRGVDVLVFDSAHWWTHSQRWSSWDYYMDGNKIFKAMDPMVAYERGLTTWAKWVEINLDPSKTKVIFRTVSPRESGQMCYNQKHPLPSLSSSTKPHVPQQSRVLNKVLRTMKYRVYLYDITTMSAYRRDGHPSVFKRAMHEEEKHHRIAGPSSDCSHWCLPGVPDIWNEMLSSIILTNAV

SEQ ID NO: 4132 - DNA, 1278 bp, Arabidopsis thaliana
ctcccaaacctatcttcttcttcctctcttgtctctctcgctctctctcttctacattgtttcttgaggtcaatctattaaaaatgggattatattcactaatcacaggaagaagaggaccaagtggacttggttcagcttcaacagctgaagaggttactcaagggattgatgcaactaatctcactgcaattatcacaggagggacaggaggaatagggatggagacagcgagagtgctgtcgaagagaggtgctcatgtggtgatcggtgcccgaaacatgggagctgcagaaaacgccaaaacagagattctcagacaaaacgcaaacgcacgtgtcactcttcttcaattagatctctcttccatcaaatccatcaaagcctttgttcgtgaatttcatgccctccatcttcctctcaatctcctcataaacaatgcaggagtaatgttctgtccataccaactctctgaagatggaatcgaattgcagtttgctacaaatcacattggtcactttctgttgacaaacttgctcttggacacaatgaagaacacagctaaaaccagtggtgttgaaggaagaattttgaatgtatcatctgtagctcatatctatacttaccaagaaggaatccaattcgacagcatcaatgacatttgcagttactcggataagcgagcttacggacaatcgaaactagccaatatattgcatgctaatgagctctcccgtcagcttcaggaagaaggagtaaacataacagcaaattcagttcaccctggtcttattctcaccaatctcttccaacacactgctcttttaatgaggttcctgaagttcttcagcttctacttgtggaaaaatatacctcagggagcagcaacaacatgttatgttgctctgcatccaagtgtgaagggagtaacaggaaagtactttgctgattgcaacgaagtcactccaagcaaacttgctagagatgagactttggcacagaaactctgggatttcagtgttaagctcattaactcggtttctaaaaagaactacctcggtttcgatgacaccacttgaatctctacggtgttcttgttgaatgttacctaaagagtgaaaaaaaagtaagaacaagtagagattgtgatgtttctttccacattatcgtatggtaactcatgagatgcattgttgtatgcttaaatattttatcgagtgaatatgtaaccgcgtcaatcttttcatagtatggacaataaaaagaagggttgttcat

SEQ ID NO: 4133 - protein, 358 aa, Arabidopsis thaliana
PKPIFFFLSCLSRSLSSTLFLEVNLLKMGLYSLITGRRGPSGLGSASTAEEVTQGIDATNLTAIITGGTGGIGMETARVLSKRGAHVVIGARNMGAAENAKTEILRQNANARVTLLQLDLSSIKSIKAFVREFHALHLPLNLLINNAGVMFCPYQLSEDGIELQFATNHIGHFLLTNLLLDTMKNTAKTSGVEGRILNVSSVAHIYTYQEGIQFDSINDICSYSDKRAYGQSKLANILHANELSRQLQEEGVNITANSVHPGLILTNLFQHTALLMRFLKFFSFYLWKNIPQGAATTCYVALHPSVKGVTGKYFADCNEVTPSKLARDETLAQKLWDFSVKLINSVSKKNYLGFDDTT

SEQ ID NO: 4134 - protein, 331 aa, Arabidopsis thaliana
MGLYSLITGRRGPSGLGSASTAEEVTQGIDATNLTAIITGGTGGIGMETARVLSKRGAHVVIGARNMGAAENAKTEILRQNANARVTLLQLDLSSIKSIKAFVREFHALHLPLNLLINNAGVMFCPYQLSEDGIELQFATNHIGHFLLTNLLLDTMKNTAKTSGVEGRILNVSSVAHIYTYQEGIQFDSINDICSYSDKRAYGQSKLANILHANELSRQLQEEGVNITANSVHPGLILTNLFQHTALLMRFLKFFSFYLWKNIPQGAATTCYVALHPSVKGVTGKYFADCNEVTPSKLARDETLAQKLWDFSVKLINSVSKKNYLGFDDTT

SEQ ID NO: 4135 - protein, 285 aa, Arabidopsis thaliana
METARVLSKRGAHVVIGARNMGAAENAKTEILRQNANARVTLLQLDLSSIKSIKAFVREFHALHLPLNLLINNAGVMFCPYQLSEDGIELQFATNHIGHFLLTNLLLDTMKNTAKTSGVEGRILNVSSVAHIYTYQEGIQFDSINDICSYSDKRAYGQSKLANILHANELSRQLQEEGVNITANSVHPGLILTNLFQHTALLMRFLKFFSFYLWKNIPQGAATTCYVALHPSVKGVTGKYFADCNEVTPSKLARDETLAQKLWDFSVKLINSVSKKNYLGFDDTT

SEQ ID NO: 4136 - DNA, 3084 bp, Arabidopsis thaliana
gttcactcactactctcttcactcgcccaaactctgcaaaacctctttcgatttcaaaaatcaaattcaccaaaaaaacttcgaagaacaaaaaaaatccaaaaaaaggtgaaatcgaagaagaagaaaaaaaaggcaaaagcttgaattgattatggaagacgacgatcagcagaaggctgcagatctagtacaagagcttgttcttcgtctcgtctcacaaaaccctcaaacccctaatctcgatcccaattctcccgccttcctcaaaacccttcgttacgcttttcgtatcctctctagtcgtcttactccttccgtcctccctgacgccaccgctatcgctgagtctctcaaacgccgtctcgctactcagggtaagtcctccgacgcactcgcttttgccgatctctacactaagttcgcttccaaaactggacctggcagtgtcaataacaaatgggctcttgtttatttgcttaaaattgtttctgacgatcgtaaatcggctataaatggtcttgattcctcggttttgttacctaatttggggattggtgatactggtaatggggttttgagccgtggagaggctaagaagaaggattggagtaatggggttttgttggttagtaaagatcctgagaatttgagggatattgcgtttagagagtatgccattttggttaaggaagagaatgaagtgacggaggaggttctagtgagggatgttttgtatgctagccaaggaattgatgggaaatatgtcaaatttaacagtgaaatcgacggttatgccgtgcaggagtctgttaaggtgcctcgagctacgaggattatggttcgtatgctctctgagcttggttggttgtttagaaaggttaagacttttataactgagagtatggatcggtttccagctgaggatgtgggaactgttgggcaagcgttttgtgcggcgttgcaagatgagctttctgattattataagttgttagctgtgctagaagcgcaggccatgaatcctattcctttggtttctgaatcagcaagctcaaacaattacctttctttgaggaggttgtcggtatggtttgcggagcctatggtgaaaatgagactgatggctgttttggttgacaagtgtaaggttttgagaggtggggcgatggctggggctatccatttgcacgcacagcatggtgatccgcttgttcatgattttatgatgagtttgcttcgatgtgtgtgttctccgctatttgaaatggtgagaagttgggttctagaaggggagttggaagatacttttggtgaattctttgtcgtaggtcagccggttaaagtcgatttgctttggagagaaggctataagctccacccagcaatgcttccatcttttatttcaccaagtctagctcagagaattctgagaactgggaaatctataaactttcttcgtgtttgctgtgatgaccacgggtgggctgatgcagcttcagaagcagcagctgcctctgggacaacaactaggcgaggaggtctcgggtatggtgaaacagatgcacttgaacatcttgtaaccgaggcagcaaagagaatcgacaagcatctgttggatgttctatataagagatataaatttaaggagcattgtcttgcgattaagcgttatttactacttggtcaaggtgattttgtccagtacttgatggatattgtaggacccaagctttctgagccagccaataatattagttcatttgagctagctgggtttcttgaggctgcaatacgagcatcaaatgcacagtatgatgaccgtgacatgctagacagattgagagtgaagatgatgcctcatggcagtggagacagaggctgggatgtattctcattggaatacgaggcaagggttccattagataccgtgtttactgagtctgttttgtctaaatacctgagagtgttcaattttctctggaagttgaaacgggtagagcatgctcttatcggaatttggaagaccatgaaaccaaattgcatcacttcgaactcatttgttaagcttcaaagttcggtgaagttgcaattactctcagccctgaggcggtgccaggtcctttggaatgaaatgaaccattttgttactaactttcagtattacatcatgtttgaggtattggaggtatcatggtctaatttctcaaaagagatggaagctgctaaagacctcgatgatctcttggcagcgcatgagaagtacctcaacgccattgttggaaaatctcttctgggtgaacagtcacagaccatccgcgaatcacttttcgtcctgtttgagcttatattacggttcaggagtcatgcagatcgtttgtatgaaggaattcacgagttgcaaataagatctaaagaatcaggacgagaaaaaaacaaatcgcaagagcccggttcatggatcagtgagggtaggaagggcttaacacagcgtgctggagaatttctacaaagcatgagtcaagatatggacagtattgcaaaggaatacacatcgtcacttgatggattcctatctctcttgcctctgcaacaatctgtagatctcaagtttctctttttccggcttgacttcactgagttctacagccgattgcattccaaaggataagaaagttgaaagagtatcaggtttagttgaaaagcatattgcacaatcgcaagagaagaagacattatctacgtctttcactaaccgctgactgcagcatgggctctcctgaaccagggatgcagaggttcttttcttaaaatctaggtgcgtgggagaatctgtttcttatttagagactgcctcatagattttctgtcttttgcatagattgttttttcaatggcttgtttcaaagtttaggattgggaaacagattctttgtgttggtaaattggggaaggtttgtgtttgagtttgtgctataagtctgatgatctccagctttagttttttttcttcttctgtggttcactgatttgtatgatttgttttatgacttggttgatataagaaggaatcagttgcttctt

SEQ ID NO: 4137 - protein, 838 aa, Arabidopsis thaliana
MEDDDQQKAADLVQELVLRLVSQNPQTPNLDPNSPAFLKTLRYAFRILSSRLTPSVLPDATAIAESLKRRLATQGKSSDALAFADLYTKFASKTGPGSVNNKWALVYLLKIVSDDRKSAINGLDSSVLLPNLGIGDTGNGVLSRGEAKKKDWSNGVLLVSKDPENLRDIAFREYAILVKEENEVTEEVLVRDVLYASQGIDGKYVKFNSEIDGYAVQESVKVPRATRIMVRMLSELGWLFRKVKTFITESMDRFPAEDVGTVGQAFCAALQDELSDYYKLLAVLEAQAMNPIPLVSESASSNNYLSLRRLSVWFAEPMVKMRLMAVLVDKCKVLRGGAMAGAIHLHAQHGDPLVHDFMMSLLRCVCSPLFEMVRSWVLEGELEDTFGEFFVVGQPVKVDLLWREGYKLHPAMLPSFISPSLAQRILRTGKSINFLRVCCDDHGWADAASEAAAASGTTTRRGGLGYGETDALEHLVTEAAKRIDKHLLDVLYKRYKFKEHCLAIKRYLLLGQGDFVQYLMDIVGPKLSEPANNISSFELAGFLEAAIRASNAQYDDRDMLDRLRVKMMPHGSGDRGWDVFSLEYEARVPLDTVFTESVLSKYLRVFNFLWKLKRVEHALIGIWKTMKPNCITSNSFVKLQSSVKLQLLSALRRCQVLWNEMNHFVTNFQYYIMFEVLEVSWSNFSKEMEAAKDLDDLLAAHEKYLNAIVGKSLLGEQSQTIRESLFVLFELILRFRSHADRLYEGIHELQIRSKESGREKNKSQEPGSWISEGRKGLTQRAGEFLQSMSQDMDSIAKEYTSSLDGFLSLLPLQQSVDLKFLFFRLDFTEFYSRLHSKG

SEQ ID NO: 4138 - protein, 610 aa, Arabidopsis thaliana
MVRMLSELGWLFRKVKTFITESMDRFPAEDVGTVGQAFCAALQDELSDYYKLLAVLEAQAMNPIPLVSESASSNNYLSLRRLSVWFAEPMVKMRLMAVLVDKCKVLRGGAMAGAIHLHAQHGDPLVHDFMMSLLRCVCSPLFEMVRSWVLEGELEDTFGEFFVVGQPVKVDLLWREGYKLHPAMLPSFISPSLAQRILRTGKSINFLRVCCDDHGWADAASEAAAASGTTTRRGGLGYGETDALEHLVTEAAKRIDKHLLDVLYKRYKFKEHCLAIKRYLLLGQGDFVQYLMDIVGPKLSEPANNISSFELAGFLEAAIRASNAQYDDRDMLDRLRVKMMPHGSGDRGWDVFSLEYEARVPLDTVFTESVLSKYLRVFNFLWKLKRVEHALIGIWKTMKPNCITSNSFVKLQSSVKLQLLSALRRCQVLWNEMNHFVTNFQYYIMFEVLEVSWSNFSKEMEAAKDLDDLLAAHEKYLNAIVGKSLLGEQSQTIRESLFVLFELILRFRSHADRLYEGIHELQIRSKESGREKNKSQEPGSWISEGRKGLTQRAGEFLQSMSQDMDSIAKEYTSSLDGFLSLLPLQQSVDLKFLFFRLDFTEFYSRLHSKG

SEQ ID NO: 4139 - protein, 607 aa, Arabidopsis thaliana
MLSELGWLFRKVKTFITESMDRFPAEDVGTVGQAFCAALQDELSDYYKLLAVLEAQAMNPIPLVSESASSNNYLSLRRLSVWFAEPMVKMRLMAVLVDKCKVLRGGAMAGAIHLHAQHGDPLVHDFMMSLLRCVCSPLFEMVRSWVLEGELEDTFGEFFVVGQPVKVDLLWREGYKLHPAMLPSFISPSLAQRILRTGKSINFLRVCCDDHGWADAASEAAAASGTTTRRGGLGYGETDALEHLVTEAAKRIDKHLLDVLYKRYKFKEHCLAIKRYLLLGQGDFVQYLMDIVGPKLSEPANNISSFELAGFLEAAIRASNAQYDDRDMLDRLRVKMMPHGSGDRGWDVFSLEYEARVPLDTVFTESVLSKYLRVFNFLWKLKRVEHALIGIWKTMKPNCITSNSFVKLQSSVKLQLLSALRRCQVLWNEMNHFVTNFQYYIMFEVLEVSWSNFSKEMEAAKDLDDLLAAHEKYLNAIVGKSLLGEQSQTIRESLFVLFELILRFRSHADRLYEGIHELQIRSKESGREKNKSQEPGSWISEGRKGLTQRAGEFLQSMSQDMDSIAKEYTSSLDGFLSLLPLQQSVDLKFLFFRLDFTEFYSRLHSKG

SEQ ID NO: 4140 - DNA, 883 bp, Arabidopsis thaliana
ctcccgacacaacacaaagttcatataataagaaaaacagagagaaacacacagagagctagaggagagtgagtgtcatgggttgtgttcgctgcaaatcatcagatccatggcaaacatctgccaatgcctttgaatccgtcgatgaatccggaatcaacgaagcctgggttgagatctccagccgcagatgttgtcgccggcgaaggtagttggaagaagctagagaggaagaagagccaagtgttactggaaggttacgttgagactgcttcttcttcctcggtggatgatcaaaaggacgatctgacgagatccaagagtttgacggatgacgacctcgaagatcttagaggttgtttagatctagggtttggttttagctacgacgagatccctgagctctgcaacactttacctgctttggagctttgctattcaatgagccagaagttcttagacgataagcaaaataaatcaccggaaacttcgtcggtggaagattgtccgtcgcctccactggtcaccgccactccgattgccaattggaagatctctagtcccggtgataatccggatgatgtgaaagctaggctcaaatactgggcacaagccgttgcctgtactgtccaattgtgcagctgaatgaatcattgtcacgtctgaaccaggaatactagcgaatgagcaatatctcaagcattggtagcggaggaggagatttcagaaagtggcattggaaggtctaaaattgaactgaatatcaacaatggttctcacttaattccatgtatgtgtactagtagttagtagtatctagtctaatgattttatgaacggaaataaaagatatcacttgaataaaaccatcaaattctttccc

SEQ ID NO: 4141 - protein, 172 aa, Arabidopsis thaliana
MPLNPSMNPESTKPGLRSPAADVVAGEGSWKKLERKKSQVLLEGYVETASSSSVDDQKDDLTRSKSLTDDDLEDLRGCLDLGFGFSYDEIPELCNTLPALELCYSMSQKFLDDKQNKSPETSSVEDCPSPPLVTATPIANWKISSPGDNPDDVKARLKYWAQAVACTVQLCS

SEQ ID NO: 4142 - protein, 166 aa, Arabidopsis thaliana
MNPESTKPGLRSPAADVVAGEGSWKKLERKKSQVLLEGYVETASSSSVDDQKDDLTRSKSLTDDDLEDLRGCLDLGFGFSYDEIPELCNTLPALELCYSMSQKFLDDKQNKSPETSSVEDCPSPPLVTATPIANWKISSPGDNPDDVKARLKYWAQAVACTVQLCS

SEQ ID NO: 4143 - DNA, 606 bp, Arabidopsis thaliana
atgttggaattaactcaaaataaatatgaagaaaataaaataagaattgggcttagctcagcttttcttctttgtttcaactttcaagtctctgtttttgactcttttactctctctcacgagtcacgccaccgctttatcgaaaaaaggcgtctgcttttacgttttctacttcacagcaatggcggattgggctccagttctcgtcggagttgtattattcgttatcctttctccgggacttcttttctcgttgcccggacatcaccatactctccaattcggcggcatgaaaaccaacggcaaagccatcgccgttcacacactcatcttcttcgctgcttacaccatcttgatcctcgctgtcaatctccacatcactaccggctaatttatgggccgaaataaaggtaacccttttgctgaatctgagctctctccctctcaggaatcttctgagatctggaactctgtttttagggatttgtatactttactctgttctctagtttgtgttgtgcattgagttaatactgaaaaatgtaataatcattaagcttgtattgatgtcattaagttataatgcaaaatttgatgtttgattcc

SEQ ID NO: 4144 - protein, 135 aa, Arabidopsis thaliana
MLELTQNKYEENKIRIGLSSAFLLCFNFQVSVFDSFTLSHESRHRFIEKRRLLLRFLLHSNGGLGSSSRRSCIIRYPFSGTSFLVARTSPYSPIRRHENQRQSHRRSHTHLLRCLHHLDPRCQSPHHYRLIYGPK

SEQ ID NO: 4145 - protein, 69 aa, Arabidopsis thaliana
MADWAPVLVGVVLFVILSPGLLFSLPGHHHTLQFGGMKTNGKAIAVHTLIFFAAYTILILAVNLHITTG

SEQ ID NO: 4146 - DNA, 2062 bp, Arabidopsis thaliana
atgcggtctgggagaagaccacaaggaagaagaatagctataaggaacgaaacagagacggaattgagatcgagaatcggagagaaatcgggatcggagaagcggaatctgatcggatctgatgttgggatgcagcttcacatatcgccgagtatgagaagcattacgatttcgagcagcaatgagtttattgacttgatgaagatcaaggtcgcagctcgtcacatctcttaccgaactctcttccacaccatcttaatcctcgctttcttgttgccttttgttttcattctcaccgctgttgttacccttgagggtgtcaacaaatgctcctccattgggaggcggataggtccacgtcttcttggtagggtagatgattcagagagactagctagagacttttataaaattctaaacgaagtaagcactcaagaaattccagatggtttgaagcttccaaattcttttagtcaacttgtttccgatatgaagaataaccactatgatgcaaaaacatttgctcttgtgctgcgagccatgatggagaagtttgaacgtgatatgagggaatcgaaatttgcagaacttatgaacaagcactttgcagcaagttccattcccaaaggcattcattgtctctctctaagactgacagatgaatattcctccaatgctcatgctcgaagacagcttccttcaccagagtttctccctgttctttcagataatgcttaccaccactttattttgtccacggacaatattttggctgcctcagttgtggtctcatccgctgttcagtcatcttcaaaacccgagaaaattgtctttcacatcattacagacaagaaaacctatgcgggtatgcattcatggtttgcgcttaattctgttgcaccagcaattgttgaggttaaaggtgttcatcagtttgactggttgacgagagagaatgttccggttttggaagctgtggaaagccataatggtgtcagggactattatcatgggaatcatgtcgctggggcaaacctcaccgaaacaactcctcgaacatttgcttcaaaattgcagtctagaagtccaaaatacatatctttgctcaaccatcttagaatatatataccagagcttttcccgaacttggacaaggtggttttcttagacgatgatatagttgtccagggagacttaactccactttgggatgttgacctcggtggtaaggtcaatggggcagtagagacttgcaggggtgaagatgaatgggtgatgtcaaagcgtttaaggaactacttcaatttctctcacccgctcatcgcaaagcatttagatcctgaagaatgtgcttgggcatatggtatgaatatcttcgatctacaagcttggaggaaaacaaatatcagagaaacgtatcactcttggcttagagagaatctaaagtcaaatctgacaatgtggaaacttggaaccttgcctcctgctcttatcgcgttcaagggtcacgtacacataatagactcgtcatggcatatgctaggattaggctaccagagcaagaccaacatagaaaatgtgaagaaagcagcagtgatccactacaatgggcagtcaaagccatggctggagattggtttcgagcatctgcggccattctggaccaaatacgtcaactactcaaatgatttcatcaagaactgtcacatattggagtaggaaaaccgaaactttgagatgatcatgaaggtaagagttacaggtgtatgatcatgaaggtagttacaggtgtaaaagaggagaagtagtaaaaaagacaaggcagtctgcagatattacactcagtctaaagaaggaagaatcagaaatttagtttgccacatacataagagaaacttggttgcagcgaagggaaggttgcataacagaaagagagagagagagataaagattcattctttctgtaaaatagaaggttaccctttttttgaaattcttttggagaatccaattcttgaatctttttataagaatggggaaagaaagattgggtttataattc

SEQ ID NO: 4147 - protein, 572 aa, Arabidopsis thaliana
MRSGRRPQGRRIAIRNETETELRSRIGEKSGSEKRNLIGSDVGMQLHISPSMRSITISSSNEFIDLMKIKVAARHISYRTLFHTILILAFLLPFVFILTAVVTLEGVNKCSSIGRRIGPRLLGRVDDSERLARDFYKILNEVSTQEIPDGLKLPNSFSQLVSDMKNNHYDAKTFALVLRAMMEKFERDMRESKFAELMNKHFAASSIPKGIHCLSLRLTDEYSSNAHARRQLPSPEFLPVLSDNAYHHFILSTDNILAASVVVSSAVQSSSKPEKIVFHIITDKKTYAGMHSWFALNSVAPAIVEVKGVHQFDWLTRENVPVLEAVESHNGVRDYYHGNHVAGANLTETTPRTFASKLQSRSPKYISLLNHLRIYIPELFPNLDKVVFLDDDIVVQGDLTPLWDVDLGGKVNGAVETCRGEDEWVMSKRLRNYFNFSHPLIAKHLDPEECAWAYGMNIFDLQAWRKTNIRETYHSWLRENLKSNLTMWKLGTLPPALIAFKGHVHIIDSSWHMLGLGYQSKTNIENVKKAAVIHYNGQSKPWLEIGFEHLRPFWTKYVNYSNDFIKNCHILE

SEQ ID NO: 4148 - protein, 529 aa, Arabidopsis thaliana
MQLHISPSMRSITISSSNEFIDLMKIKVAARHISYRTLFHTILILAFLLPFVFILTAVVTLEGVNKCSSIGRRIGPRLLGRVDDSERLARDFYKILNEVSTQEIPDGLKLPNSFSQLVSDMKNNHYDAKTFALVLRAMMEKFERDMRESKFAELMNKHFAASSIPKGIHCLSLRLTDEYSSNAHARRQLPSPEFLPVLSDNAYHHFILSTDNILAASVVVSSAVQSSSKPEKIVFHIITDKKTYAGMHSWFALNSVAPAIVEVKGVHQFDWLTRENVPVLEAVESHNGVRDYYHGNHVAGANLTETTPRTFASKLQSRSPKYISLLNHLRIYIPELFPNLDKVVFLDDDIVVQGDLTPLWDVDLGGKVNGAVETCRGEDEWVMSKRLRNYFNFSHPLIAKHLDPEECAWAYGMNIFDLQAWRKTNIRETYHSWLRENLKSNLTMWKLGTLPPALIAFKGHVHIIDSSWHMLGLGYQSKTNIENVKKAAVIHYNGQSKPWLEIGFEHLRPFWTKYVNYSNDFIKNCHILE

SEQ ID NO: 4149 - protein, 521 aa, Arabidopsis thaliana
MRSITISSSNEFIDLMKIKVAARHISYRTLFHTILILAFLLPFVFILTAVVTLEGVNKCSSIGRRIGPRLLGRVDDSERLARDFYKILNEVSTQEIPDGLKLPNSFSQLVSDMKNNHYDAKTFALVLRAMMEKFERDMRESKFAELMNKHFAASSIPKGIHCLSLRLTDEYSSNAHARRQLPSPEFLPVLSDNAYHHFILSTDNILAASVVVSSAVQSSSKPEKIVFHIITDKKTYAGMHSWFALNSVAPAIVEVKGVHQFDWLTRENVPVLEAVESHNGVRDYYHGNHVAGANLTETTPRTFASKLQSRSPKYISLLNHLRIYIPELFPNLDKVVFLDDDIVVQGDLTPLWDVDLGGKVNGAVETCRGEDEWVMSKRLRNYFNFSHPLIAKHLDPEECAWAYGMNIFDLQAWRKTNIRETYHSWLRENLKSNLTMWKLGTLPPALIAFKGHVHIIDSSWHMLGLGYQSKTNIENVKKAAVIHYNGQSKPWLEIGFEHLRPFWTKYVNYSNDFIKNCHILE

SEQ ID NO: 4150 - DNA, 1855 bp, Arabidopsis thaliana
aactggtttcgcttcttcttctacagagcttccctcgtttcctccgccggagagacactccattaaaatcccttcttcatcgatccttcattagatttacaacaacaacaatgccaagcgtcaagctcacacaccattctccacctgacactattgcctccgactccgtccgtctcctttcccgtgaaactctccgaatcagcgcctctctcgcttctcctcccgttgatgatctccctcctcactctcctccacctccagattctcaatttcttcattcgactctgagattgatctgttgcgaagaaatcgatggccgtcggtttaagtatgtcgctgagagcgatggttctgggagattcaagaagaattcagttcgtgctattagcttggagtctcctcagactccttttgatgaagtgggttcgtttcttagatcttacgttgtacctgaaggctttcctgggagtgttaatgagtcttatgttccttatatgacttggagagctttgaaacatttctttggtggagctatgggtgtgtttactactcaaactcttcttaattctgttggagcttcaagaaacagttctgcttctgctgctgttgccatcaattggattctcaaggatggtgctgggcgtgttgggaaaatgctttttgcgaggcagggaaagaaatttgattatgatttgaaacagttacggtttgctggtgatctattgatggagctcggtgctggtgtagagttggcgacggctgcagttccacatctttttcttccactggcttgtgctgctaatgttgttaagaatgttgcagcagtaacatcaacgtctactcgtacaccgatctataaagcctttgctaaaggagaaaacataggagacgtaactgctaaaggagagtgtgttggtaatattgcagatctgatgggaactgggtttagcatcctgatatcaaaaagaaatccttcgttggtcacaacatttggtcttctatcatgtggctatctcatgagctcgtaccaagaggttagatctgtagtattgcatacactaaaccgtgctagatttacagtagcagtggagtcctttcttaagacggggcgggttccctcattgcaggaaggtaatatccaagaaaagatattcacttttccatgggtggatgatcggccagtgatgcttggagccagatttaaggatgcattccaagaccccagcacgtatatggctgtaaagccttttttcgataaagaaagatacatggtaacgtacagccctaccaagggtaaagtctatgcactgctcaaacatcaggctaactcagatgacattctcaaagcagcatttcatgcacatgtgcttcttcatttcatgaatcaatcaaaagatggtaacccaagatcggtggagcaattagatcctgcgtttgctcctacggaatatgagctcgagtctcgtattgctgagtcgtgtgaaatggtttccacatcatatggcgtcttcaaaagcagggctgcagaacagggttggagaatgtcagaatctctgcttaatcctggccgggctaggttatgtcatgtgaaggagggggagtaaacatcgcctgttgagactggtcatcgacctgaatcggcttttatagttatttcactgtcacactctaaattttgctgtcttggtttcatgaagaaaaaaacaggttttggttggtacacgttttattaaccaggctgtaaaaaatagaacgatatgtagcttttgtaaattgtgagaatgccactggtgtaatttaacagatgaatcttctttgtgtaccaattctcacatcatgattgttacacaggttc

SEQ ID NO: 4151 - protein, 533 aa, Arabidopsis thaliana
LVSLLLLQSFPRFLRRRDTPLKSLLHRSFIRFTTTTMPSVKLTHHSPPDTIASDSVRLLSRETLRISASLASPPVDDLPPHSPPPPDSQFLHSTLRLICCEEIDGRRFKYVAESDGSGRFKKNSVRAISLESPQTPFDEVGSFLRSYVVPEGFPGSVNESYVPYMTWRALKHFFGGAMGVFTTQTLLNSVGASRNSSASAAVAINWILKDGAGRVGKMLFARQGKKFDYDLKQLRFAGDLLMELGAGVELATAAVPHLFLPLACAANVVKNVAAVTSTSTRTPIYKAFAKGENIGDVTAKGECVGNIADLMGTGFSILISKRNPSLVTTFGLLSCGYLMSSYQEVRSVVLHTLNRARFTVAVESFLKTGRVPSLQEGNIQEKIFTFPWVDDRPVMLGARFKDAFQDPSTYMAVKPFFDKERYMVTYSPTKGKVYALLKHQANSDDILKAAFHAHVLLHFMNQSKDGNPRSVEQLDPAFAPTEYELESRIAESCEMVSTSYGVFKSRAAEQGWRMSESLLNPGRARLCHVKEGE

SEQ ID NO: 4152 - protein, 497 aa, Arabidopsis thaliana
MPSVKLTHHSPPDTIASDSVRLLSRETLRISASLASPPVDDLPPHSPPPPDSQFLHSTLRLICCEEIDGRRFKYVAESDGSGRFKKNSVRAISLESPQTPFDEVGSFLRSYVVPEGFPGSVNESYVPYMTWRALKHFFGGAMGVFTTQTLLNSVGASRNSSASAAVAINWILKDGAGRVGKMLFARQGKKFDYDLKQLRFAGDLLMELGAGVELATAAVPHLFLPLACAANVVKNVAAVTSTSTRTPIYKAFAKGENIGDVTAKGECVGNIADLMGTGFSILISKRNPSLVTTFGLLSCGYLMSSYQEVRSVVLHTLNRARFTVAVESFLKTGRVPSLQEGNIQEKIFTFPWVDDRPVMLGARFKDAFQDPSTYMAVKPFFDKERYMVTYSPTKGKVYALLKHQANSDDILKAAFHAHVLLHFMNQSKDGNPRSVEQLDPAFAPTEYELESRIAESCEMVSTSYGVFKSRAAEQGWRMSESLLNPGRARLCHVKEGE

SEQ ID NO: 4153 - protein, 369 aa, Arabidopsis thaliana
MTWRALKHFFGGAMGVFTTQTLLNSVGASRNSSASAAVAINWILKDGAGRVGKMLFARQGKKFDYDLKQLRFAGDLLMELGAGVELATAAVPHLFLPLACAANVVKNVAAVTSTSTRTPIYKAFAKGENIGDVTAKGECVGNIADLMGTGFSILISKRNPSLVTTFGLLSCGYLMSSYQEVRSVVLHTLNRARFTVAVESFLKTGRVPSLQEGNIQEKIFTFPWVDDRPVMLGARFKDAFQDPSTYMAVKPFFDKERYMVTYSPTKGKVYALLKHQANSDDILKAAFHAHVLLHFMNQSKDGNPRSVEQLDPAFAPTEYELESRIAESCEMVSTSYGVFKSRAAEQGWRMSESLLNPGRARLCHVKEGE

SEQ ID NO: 4154 - DNA, 1683 bp, Arabidopsis thaliana
atggctggaggagagaaaagaagaggacttagtaaatcttgtgctcttctcatagtgattgctgggatagagagatatgcattcaaaggagttgcatcaaacttagtgacatatctaactgatgtagtgaagatgagcaattcaagagcagccacgactgtgaacacttggagtggcttcactttcatgttgcctctcttctctgctccttttgccgattcttattgggacagattcttcaccatccttgcttcttcttctctctactttgtgggtctagtgggattgacatttacggcatttgctgggtcacgttcgactacaaaaacaatctctctttacttcctctacacttcactttccctcgtcgctctaggccttggcgtcttaaacccatctctacaagcctttggtgctgaccagctcgactacgaccttgaccatgacaatgaccacgagccatcctcagagaacaaagaagtcaaatcgaaccgcaagactcagtttttccaatggtggtattttggtgtctgcgccggtagtcttctaggagtcaccgtcatggcttacatccaagacacgtttggatgggttatcggttttgcaatcccaaccgcttcgatgttgttgttgatcttcttgttcttgtgtggctgcggggtctatgtttatgctgatccagacctcaaagctaaaccatttcaaaggatattagagattatcaaagaaagagtgtgtggaagaaataagatcactcttgttaacgaccacgatttaaatgccatggaactagagctgcaagatcagaagcctctatgtaactgtagcaacactgaagctaatactactaccaagagcttacctgatgatcataaaagctgcaaaaccggtttttcggggcttgaaaccgtcaagctattgcttcgacttttacctatatggacgatgcttcttatgtttgcagttatattccaacaacccgcgacctttttcacaaagcaaggtatgactatgaagagaaacatcggaccaaacttcaagatcccaccagcaacactacaaagcactatcactttatccataatccttcttatgcccttctacgacaaaatcttgataccgatcgccaaaaaactaacgaaaaacgaaaagggtatttctgtgaaggaaagaatggggattgggatgttcctgtccatcatcgccattgttattgccgcgttagtcgaaagaaaaagactaaagataagcaaaatgatgaagactacacctaatttggaccccgtaagcatattgtggctcctacctcagtacattctattgggaatctcggacattttcacagttgttggaatgcaagagttcttctacagcgaggttcctgttagcatgagaacaatgggatttgctttgtacacaagcgttttcggtgtggggagttttgtgagtgctgcgttgatttcgataatagagacttacacgagctcaagaggtggaaaacataactggtttgcagatgatatgtcggaagctagacttgataactattattggcttttggctttcacaagtgctattagcttcttgatgtatattgttatttgcaagcatttcaagagtagaagtgatgatgatgatcaatgtgatacaaattgttaataaactaaagaaacacctcttttt

SEQ ID NO: 4155 - protein, 552 aa, Arabidopsis thaliana
MAGGEKRRGLSKSCALLIVIAGIERYAFKGVASNLVTYLTDVVKMSNSRAATTVNTWSGFTFMLPLFSAPFADSYWDRFFTILASSSLYFVGLVGLTFTAFAGSRSTTKTISLYFLYTSLSLVALGLGVLNPSLQAFGADQLDYDLDHDNDHEPSSENKEVKSNRKTQFFQWWYFGVCAGSLLGVTVMAYIQDTFGWVIGFAIPTASMLLLIFLFLCGCGVYVYADPDLKAKPFQRILEIIKERVCGRNKITLVNDHDLNAMELELQDQKPLCNCSNTEANTTTKSLPDDHKSCKTGFSGLETVKLLLRLLPIWTMLLMFAVIFQQPATFFTKQGMTMKRNIGPNFKIPPATLQSTITLSIILLMPFYDKILIPIAKKLTKNEKGISVKERMGIGMFLSIIAIVIAALVERKRLKISKMMKTTPNLDPVSILWLLPQYILLGISDIFTVVGMQEFFYSEVPVSMRTMGFALYTSVFGVGSFVSAALISIIETYTSSRGGKHNWFADDMSEARLDNYYWLLAFTSAISFLMYIVICKHFKSRSDDDDQCDTNC

SEQ ID NO: 4156 - protein, 508 aa, Arabidopsis thaliana
MSNSRAATTVNTWSGFTFMLPLFSAPFADSYWDRFFTILASSSLYFVGLVGLTFTAFAGSRSTTKTISLYFLYTSLSLVALGLGVLNPSLQAFGADQLDYDLDHDNDHEPSSENKEVKSNRKTQFFQWWYFGVCAGSLLGVTVMAYIQDTFGWVIGFAIPTASMLLLIFLFLCGCGVYVYADPDLKAKPFQRILEIIKERVCGRNKITLVNDHDLNAMELELQDQKPLCNCSNTEANTTTKSLPDDHKSCKTGFSGLETVKLLLRLLPIWTMLLMFAVIFQQPATFFTKQGMTMKRNIGPNFKIPPATLQSTITLSIILLMPFYDKILIPIAKKLTKNEKGISVKERMGIGMFLSIIAIVIAALVERKRLKISKMMKTTPNLDPVSILWLLPQYILLGISDIFTVVGMQEFFYSEVPVSMRTMGFALYTSVFGVGSFVSAALISIIETYTSSRGGKHNWFADDMSEARLDNYYWLLAFTSAISFLMYIVICKHFKSRSDDDDQCDTNC

SEQ ID NO: 4157 - protein, 490 aa, Arabidopsis thaliana
MLPLFSAPFADSYWDRFFTILASSSLYFVGLVGLTFTAFAGSRSTTKTISLYFLYTSLSLVALGLGVLNPSLQAFGADQLDYDLDHDNDHEPSSENKEVKSNRKTQFFQWWYFGVCAGSLLGVTVMAYIQDTFGWVIGFAIPTASMLLLIFLFLCGCGVYVYADPDLKAKPFQRILEIIKERVCGRNKITLVNDHDLNAMELELQDQKPLCNCSNTEANTTTKSLPDDHKSCKTGFSGLETVKLLLRLLPIWTMLLMFAVIFQQPATFFTKQGMTMKRNIGPNFKIPPATLQSTITLSIILLMPFYDKILIPIAKKLTKNEKGISVKERMGIGMFLSIIAIVIAALVERKRLKISKMMKTTPNLDPVSILWLLPQYILLGISDIFTVVGMQEFFYSEVPVSMRTMGFALYTSVFGVGSFVSAALISIIETYTSSRGGKHNWFADDMSEARLDNYYWLLAFTSAISFLMYIVICKHFKSRSDDDDQCDTNC

SEQ ID NO: 4158 - DNA, 3030 bp, Arabidopsis thaliana
agatcgaaaaaaaaaaaagtttggcaaaaaagaagactctttgagactgagaggacttagcgtgcatgggaacatttatagacagacgaaattctccgaattgaagaagagcttctctatcttcaacgaagaagacgacttatcaacctttgcttaatctaggggtttcttcttccttttgtttcttcttctccagttttcaaggagattcttaagctccatctcttgacaggggtggatcattggtgaattcttgaggtccaggagaatctgtcattttcaacacattgtgtggaatcatctgagaggtttggtaaatagatagaacaaggatctatgaagatctgagttgaagaatgggctattgttccatgaagtcctcttggattggtgtatctttaatgtaattaaaactcaagaaattgtttaattatatcatgtgctcatatgatggattgatgagcgtggtaaggtatcaaatgtaagattgaaatcagcagatagatccttgtcaagatggaaacaaggcctgcagagagagtattctcaaatggtgatgtttattctggtcaactcaaaggaacacttcctcatgggaagggaaagtatgcatggcctgatggtatcatttatgagggtgattgggaagaagggaagatatccgggagaggaaagcttatgtggtcatctggagctaaatatgagggagatttctccgggggataccttcatggctttggtacattgacttcgcctgatggatctgtctacgctggagcatggaggatgaatgttaggcacggtctaggaaggaaagagtattgtaactcagatgtatatgatggctcatggagagaaggattacaagatggtagtggtagttattcttggtacaatggaaataggttcattgggaactggaaaaaaggtaaaatgtctggcagaggggttatgagctgggcaaatggtgatctctttaatgggttttggttgaatggtcttagacatggatctggagtttataagtatgcggatggtggtttttattttggaacctggtcacgtggcctaaaagatgggagtggagtcttttatcctgctggaagtaaacacccttctctaaagaagtggcatcggcattttgggtacgatgacaccggcaacttcctcctctctcataattcaacaataaatattgatgatttacggacttcaaaagctgtatcacgaagtctttctgagttaaccacaacaagcggactgacaagaacttcggagaggtatcctgatgattactggagcaccagtgatccccctagagactttatgcatcatgggccttcatccaaatctgcacggtctgttgactctggtcaaagcgagatccgggataagaaccctattgtttttgaaagggaatacatgcaaggagttttgattaaagaacgaattatgagttctatcgacatgtcacacagggctagacctttgaatcttactaaagaagtcacagttagcgcttgtgtgagctttctaggggggaaatggaaccattatctaatgcttaacctccaactcggtatcaggtatactgttgggaaaatcacaccagtgcctccgcgggaagttcgtgcttctgactttagtgaaagagccagaatcatgatgttcttccctagaaacggttcccagtatacacctccacacaagtctattgatttcgattggaaagactattgtcctatggttttcaggaatttaagggagatgttcaagttagatgctgcagactacatgatgtctatatgtggcgatgatggcttgagggaaatttcttcccctgggaaaagtggcagtatcttctacctttctcatgacgacagatttgtgataaagacattaaaaagatctgagttgaaggttcttcttaggatgttgcctaggtactatgaacatgtaggagactatgaaaatacgctcataacgaaattttttggagttcacagaataaaactcaagtggggtaaaaaggtacgctttgtggtcatggggaatatgttttgcacagaattgaagattcatcgtcgctatgacctaaagggctcaacacaagggagatatacagaaaagaataaaattggagaaaagactacattgaaagatcttgatctagcttatgaatttcatatggacaagctgctgcgagaggctctcttcaagcaaattattttagactgttcgttcttggaatctcttcaaatccttgattacagtcttctgttgggattacattttagagcccccgatccacttactgatatcctggagcctcccaatgaaatgtcagatcaagaaagtgatagtgttggttcggttgacgtcaatttgcctcgtgaaccctccattcctccaaaagggctattaatggttacccatgaacccaattccgttaataccgccccgggtcctcacatcagaggaagcacactacgagcattctctgttggcgagaaagaagttgatcttattctacctggaactgcaaggctccgggtacagttaggagtgaacatgccagctcaagcccaccacaaactcggccaagacaacgaggaatcaggaacggtcgagctctttgaagtatatgatgtggttgtatacatgggcatcattgacatcctccaagagtacaacatgaagaagaaagtggaacatacttgcaaatctatgaaatatgatccaatgacaatttcagccatcgagcctacactttactctaaacgattcatcgatttcctccttaaggtattcccagaaaaagcatagagagagagagatatcaacggaccattgatcttcctaaagatgaaaggttccatgatttgactcgaccgataatattctttcctgttcataagccataaaaagactctgagggatttggctcgtaatcttctttcgcccttatgtacactaacatttaggatcttatatacttgaaaaagttttcgtatattattattattgagt

SEQ ID NO: 4159 - protein, 769 aa, Arabidopsis thaliana
METRPAERVFSNGDVYSGQLKGTLPHGKGKYAWPDGIIYEGDWEEGKISGRGKLMWSSGAKYEGDFSGGYLHGFGTLTSPDGSVYAGAWRMNVRHGLGRKEYCNSDVYDGSWREGLQDGSGSYSWYNGNRFIGNWKKGKMSGRGVMSWANGDLFNGFWLNGLRHGSGVYKYADGGFYFGTWSRGLKDGSGVFYPAGSKHPSLKKWHRHFGYDDTGNFLLSHNSTINIDDLRTSKAVSRSLSELTTTSGLTRTSERYPDDYWSTSDPPRDFMHHGPSSKSARSVDSGQSEIRDKNPIVFEREYMQGVLIKERIMSSIDMSHRARPLNLTKEVTVSACVSFLGGKWNHYLMLNLQLGIRYTVGKITPVPPREVRASDFSERARIMMFFPRNGSQYTPPHKSIDFDWKDYCPMVFRNLREMFKLDAADYMMSICGDDGLREISSPGKSGSIFYLSHDDRFVIKTLKRSELKVLLRMLPRYYEHVGDYENTLITKFFGVHRIKLKWGKKVRFVVMGNMFCTELKIHRRYDLKGSTQGRYTEKNKIGEKTTLKDLDLAYEFHMDKLLREALFKQIILDCSFLESLQILDYSLLLGLHFRAPDPLTDILEPPNEMSDQESDSVGSVDVNLPREPSIPPKGLLMVTHEPNSVNTAPGPHIRGSTLRAFSVGEKEVDLILPGTARLRVQLGVNMPAQAHHKLGQDNEESGTVELFEVYDVVVYMGIIDILQEYNMKKKVEHTCKSMKYDPMTISAIEPTLYSKRFIDFLLKVFPEKA

SEQ ID NO: 4160 - protein, 715 aa, Arabidopsis thaliana
MWSSGAKYEGDFSGGYLHGFGTLTSPDGSVYAGAWRMNVRHGLGRKEYCNSDVYDGSWREGLQDGSGSYSWYNGNRFIGNWKKGKMSGRGVMSWANGDLFNGFWLNGLRHGSGVYKYADGGFYFGTWSRGLKDGSGVFYPAGSKHPSLKKWHRHFGYDDTGNFLLSHNSTINIDDLRTSKAVSRSLSELTTTSGLTRTSERYPDDYWSTSDPPRDFMHHGPSSKSARSVDSGQSEIRDKNPIVFEREYMQGVLIKERIMSSIDMSHRARPLNLTKEVTVSACVSFLGGKWNHYLMLNLQLGIRYTVGKITPVPPREVRASDFSERARIMMFFPRNGSQYTPPHKSIDFDWKDYCPMVFRNLREMFKLDAADYMMSICGDDGLREISSPGKSGSIFYLSHDDRFVIKTLKRSELKVLLRMLPRYYEHVGDYENTLITKFFGVHRIKLKWGKKVRFVVMGNMFCTELKIHRRYDLKGSTQGRYTEKNKIGEKTTLKDLDLAYEFHMDKLLREALFKQIILDCSFLESLQILDYSLLLGLHFRAPDPLTDILEPPNEMSDQESDSVGSVDVNLPREPSIPPKGLLMVTHEPNSVNTAPGPHIRGSTLRAFSVGEKEVDLILPGTARLRVQLGVNMPAQAHHKLGQDNEESGTVELFEVYDVVVYMGIIDILQEYNMKKKVEHTCKSMKYDPMTISAIEPTLYSKRFIDFLLKVFPEKA

SEQ ID NO: 4161 - protein, 679 aa, Arabidopsis thaliana
MNVRHGLGRKEYCNSDVYDGSWREGLQDGSGSYSWYNGNRFIGNWKKGKMSGRGVMSWANGDLFNGFWLNGLRHGSGVYKYADGGFYFGTWSRGLKDGSGVFYPAGSKHPSLKKWHRHFGYDDTGNFLLSHNSTINIDDLRTSKAVSRSLSELTTTSGLTRTSERYPDDYWSTSDPPRDFMHHGPSSKSARSVDSGQSEIRDKNPIVFEREYMQGVLIKERIMSSIDMSHRARPLNLTKEVTVSACVSFLGGKWNHYLMLNLQLGIRYTVGKITPVPPREVRASDFSERARIMMFFPRNGSQYTPPHKSIDFDWKDYCPMVFRNLREMFKLDAADYMMSICGDDGLREISSPGKSGSIFYLSHDDRFVIKTLKRSELKVLLRMLPRYYEHVGDYENTLITKFFGVHRIKLKWGKKVRFVVMGNMFCTELKIHRRYDLKGSTQGRYTEKNKIGEKTTLKDLDLAYEFHMDKLLREALFKQIILDCSFLESLQILDYSLLLGLHFRAPDPLTDILEPPNEMSDQESDSVGSVDVNLPREPSIPPKGLLMVTHEPNSVNTAPGPHIRGSTLRAFSVGEKEVDLILPGTARLRVQLGVNMPAQAHHKLGQDNEESGTVELFEVYDVVVYMGIIDILQEYNMKKKVEHTCKSMKYDPMTISAIEPTLYSKRFIDFLLKVFPEKA

SEQ ID NO: 4162 - DNA, 1454 bp, Arabidopsis thaliana
tcctcgttgattgttctttcgcataaggaaaaagaaatgacaaatgctttggaaggagctggtgcgcaaccaacagatgctgaggttgctcatgaagtggctttgatgtctcagactaatatgtatagacctggaatcgatgtaactcaagctgagctggtttctcatttgaattggagacggcaagagagaaccgagatggttgggaattggaaagcaaaagtttacgatatgcttcatgtgatggtgagtgtcaaatctagacgggttcccggtgcaatgactgatgaagagctctttgcggttgatgaagagcgaactgctgtaacaaatggtgcagagaccgacggctttgaagacgtactaacacctgaggaaagactccaattgaattccgcgcttcagactggaaattccgatgccattgaagatgaagagtgtgaagttactgatcaacaggaaaacggagctctcaaggataagaagggctggtttggttggaataagaaaggctcaaacactgaagatacaaagctcaagaaaggctcaaagtctgcgccagaagacgggaaccagaaagggaaaagccagaaatcttcgatggtatctgatcatgcaaatgaggatcatggagacgcaaagaaaggaaaggagaagaagaagaagaagaaaggtgttgccggagatgaggttaagcgtgagagtgaatacaagaaaggactaagaccggtcttgtggttaacaccggactttcctcttacgacagacgagcttttaccgctccttgacatattagctaacaaggttaaagccgttaggagactcagagagcttctcacaactaaacttccgctaggcacattccctgtaaagctcgccattcccattattcctacggttcgagttgttgttactttcaccaaatttgaagaacttcaggcagctgaggaggagttctcaacacctccttctagtccggtatttcatgatgcaaagtcgtcttcttcagagaactcatcaccatcatggatctcatggatgagaagtggcaaatcaagtgacaatgatagtaaccgttacaaagacgaggctgaccctttcttgataccttcagattacaaatggatcgattcagctgagaagaaacgtcgaatgaaagctaagaaagctaagagcaggaggaagaaacaagcggctacaaaagccgctggtgctagtgactcgggtacccgttcaaatcatgtagccgaagaatgatgagtccggagtaactgaatcattgcattcaggttttgctttggctggattcaaagatgttcactttttgagccatcattgtggccttgagaaaaggcttttggtagtgttgtttattgctcttgtatgtcatgttatttctgaaattcctttaacaaacatctttgttctctcttaatgattaatcctttttttcc

SEQ ID NO: 4163 - protein, 418 aa, Arabidopsis thaliana
SSLIVLSHKEKEMTNALEGAGAQPTDAEVAHEVALMSQTNMYRPGIDVTQAELVSHLNWRRQERTEMVGNWKAKVYDMLHVMVSVKSRRVPGAMTDEELFAVDEERTAVTNGAETDGFEDVLTPEERLQLNSALQTGNSDAIEDEECEVTDQQENGALKDKKGWFGWNKKGSNTEDTKLKKGSKSAPEDGNQKGKSQKSSMVSDHANEDHGDAKKGKEKKKKKKGVAGDEVKRESEYKKGLRPVLWLTPDFPLTTDELLPLLDILANKVKAVRRLRELLTTKLPLGTFPVKLAIPIIPTVRVVVTFTKFEELQAAEEEFSTPPSSPVFHDAKSSSSENSSPSWISWMRSGKSSDNDSNRYKDEADPFLIPSDYKWIDSAEKKRRMKAKKAKSRRKKQAATKAAGASDSGTRSNHVAEE

SEQ ID NO: 4164 - protein, 406 aa, Arabidopsis thaliana
MTNALEGAGAQPTDAEVAHEVALMSQTNMYRPGIDVTQAELVSHLNWRRQERTEMVGNWKAKVYDMLHVMVSVKSRRVPGAMTDEELFAVDEERTAVTNGAETDGFEDVLTPEERLQLNSALQTGNSDAIEDEECEVTDQQENGALKDKKGWFGWNKKGSNTEDTKLKKGSKSAPEDGNQKGKSQKSSMVSDHANEDHGDAKKGKEKKKKKKGVAGDEVKRESEYKKGLRPVLWLTPDFPLTTDELLPLLDILANKVKAVRRLRELLTTKLPLGTFPVKLAIPIIPTVRVVVTFTKFEELQAAEEEFSTPPSSPVFHDAKSSSSENSSPSWISWMRSGKSSDNDSNRYKDEADPFLIPSDYKWIDSAEKKRRMKAKKAKSRRKKQAATKAAGASDSGTRSNHVAEE

SEQ ID NO: 4165 - protein, 383 aa, Arabidopsis thaliana
MSQTNMYRPGIDVTQAELVSHLNWRRQERTEMVGNWKAKVYDMLHVMVSVKSRRVPGAMTDEELFAVDEERTAVTNGAETDGFEDVLTPEERLQLNSALQTGNSDAIEDEECEVTDQQENGALKDKKGWFGWNKKGSNTEDTKLKKGSKSAPEDGNQKGKSQKSSMVSDHANEDHGDAKKGKEKKKKKKGVAGDEVKRESEYKKGLRPVLWLTPDFPLTTDELLPLLDILANKVKAVRRLRELLTTKLPLGTFPVKLAIPIIPTVRVVVTFTKFEELQAAEEEFSTPPSSPVFHDAKSSSSENSSPSWISWMRSGKSSDNDSNRYKDEADPFLIPSDYKWIDSAEKKRRMKAKKAKSRRKKQAATKAAGASDSGTRSNHVAEE

SEQ ID NO: 4166 - DNA, 1912 bp, Arabidopsis thaliana
atggaaacggatctgaatgattatactgttatcaaggaaggagaagctgagattctcatgcacaagaagaatcaagtcttcttcaataaagctcaggtgaacaatagagacatgtccattgctgttctaagggaatttctatcgaaacgcaagcaagagcatgaggctaagtcatctaaaagaactagaccagcttccaaagtgattgagaaggatgcttctgaagcttccaaggaagaaactcctagcgagaacggtatgaataatggtgatcacgaagtagcatctgaagatggaccaagctctgtatcaaaagaccctgctaagacaacagaacgatttgcacctagagaacccaagccaccaaaagttcttgaggctttgtcagcttctgggttacgggctctaagatatgcacgcgaaatagaaggaattggtcaggttgtggcgttggataatgatttagcatcggtcgaagcttgccagagaaacataaagttcaatggctcagtggctatttcaaaggtggagtcacatcataccgatgctcgtgtccatatgcttacccaccctaaagaatttgatgtggttgatcttgatccatatggatcaccatctattttccttgactcggctattcaatcagtcacggatggtggattgctaatgtgtacagcaactgacatggcagtgttatgtggtggtaacggtgaagtttgctattccaaatatggttcttacccattgagagcgaagtattgtcatgagatggctttgcggatcctccttgccagcatcgagagccatgcaaaccgctacaagcggtatattgttccggtgctatctgtgcaaatggatttctatgttcgtgtttttgtccgcgtttacacctcggcgagtgcaatgaagaacactccattgaagctctcttacgtatatcaatgcattggctgtgattcatttcatcttcaacctgttggaagatctctccctaagaacaacagtgtgaggtatctaccagcaattggtccggttgtgaagcaggattgcaaccactgtgggaagaaatataacatgggtggaccaatatggtctgctccaatgcatgatccagaatgggtgacttcgatattaaacagtgtgaaatccatgaaagacagatatcctgcttatgaccggatctctgctgtacttactacagtctccgaggaattgctggatgttcctctgtttttgagtctgcataatctttgtgcgacactaaagtgtatttcaccatcagctgcaatgtttcgatcagcggttattaatgctaattaccgtatctctgggactcatgtgaatccgctcggcatgaaaactgatgctcctatggaggttatctgggacattatgcgctgctgggtgaagaatcatcccataaaggcgcaatcgcctgaacaacccggtagtgtgatcttgtccaaagaaccatcacatgaggttgatttttcgcgtcacattggttcgctgagcaaggcacaggcaaagaaagtagctcgttttctgccaaatccagagaagcattggggtccaaagcttagggctggtcgccagattacgagcaaacatgtatctcttattggtcatgaagcagtcaatggtcatcttagccaacaccatgaagaacttaaagaagaagatgaagaagcagagccagaagataatgtccaagacaaggttgatccaaaacgccagaagacagcaacagataatattacctcaacataataagacaaatcacaaaaagttttacaaaatagatcagattttgtctacagtcagatttgcctcctgatgaagaactctgttttgtctgttgtttcctatataatcatttttggtaatacttgagacttatgacccatttttg

SEQ ID NO: 4167 - protein, 589 aa, Arabidopsis thaliana
METDLNDYTVIKEGEAEILMHKKNQVFFNKAQVNNRDMSIAVLREFLSKRKQEHEAKSSKRTRPASKVIEKDASEASKEETPSENGMNNGDHEVASEDGPSSVSKDPAKTTERFAPREPKPPKVLEALSASGLRALRYAREIEGIGQVVALDNDLASVEACQRNIKFNGSVAISKVESHHTDARVHMLTHPKEFDVVDLDPYGSPSIFLDSAIQSVTDGGLLMCTATDMAVLCGGNGEVCYSKYGSYPLRAKYCHEMALRILLASIESHANRYKRYIVPVLSVQMDFYVRVFVRVYTSASAMKNTPLKLSYVYQCIGCDSFHLQPVGRSLPKNNSVRYLPAIGPVVKQDCNHCGKKYNMGGPIWSAPMHDPEWVTSILNSVKSMKDRYPAYDRISAVLTTVSEELLDVPLFLSLHNLCATLKCISPSAAMFRSAVINANYRISGTHVNPLGMKTDAPMEVIWDIMRCWVKNHPIKAQSPEQPGSVILSKEPSHEVDFSRHIGSLSKAQAKKVARFLPNPEKHWGPKLRAGRQITSKHVSLIGHEAVNGHLSQHHEELKEEDEEAEPEDNVQDKVDPKRQKTATDNITST

SEQ ID NO: 4168 - protein, 570 aa, Arabidopsis thaliana
MHKKNQVFFNKAQVNNRDMSIAVLREFLSKRKQEHEAKSSKRTRPASKVIEKDASEASKEETPSENGMNNGDHEVASEDGPSSVSKDPAKTTERFAPREPKPPKVLEALSASGLRALRYAREIEGIGQVVALDNDLASVEACQRNIKFNGSVAISKVESHHTDARVHMLTHPKEFDVVDLDPYGSPSIFLDSAIQSVTDGGLLMCTATDMAVLCGGNGEVCYSKYGSYPLRAKYCHEMALRILLASIESHANRYKRYIVPVLSVQMDFYVRVFVRVYTSASAMKNTPLKLSYVYQCIGCDSFHLQPVGRSLPKNNSVRYLPAIGPVVKQDCNHCGKKYNMGGPIWSAPMHDPEWVTSILNSVKSMKDRYPAYDRISAVLTTVSEELLDVPLFLSLHNLCATLKCISPSAAMFRSAVINANYRISGTHVNPLGMKTDAPMEVIWDIMRCWVKNHPIKAQSPEQPGSVILSKEPSHEVDFSRHIGSLSKAQAKKVARFLPNPEKHWGPKLRAGRQITSKHVSLIGHEAVNGHLSQHHEELKEEDEEAEPEDNVQDKVDPKRQKTATDNITST

SEQ ID NO: 4169 - protein, 552 aa, Arabidopsis thaliana
MSIAVLREFLSKRKQEHEAKSSKRTRPASKVIEKDASEASKEETPSENGMNNGDHEVASEDGPSSVSKDPAKTTERFAPREPKPPKVLEALSASGLRALRYAREIEGIGQVVALDNDLASVEACQRNIKFNGSVAISKVESHHTDARVHMLTHPKEFDVVDLDPYGSPSIFLDSAIQSVTDGGLLMCTATDMAVLCGGNGEVCYSKYGSYPLRAKYCHEMALRILLASIESHANRYKRYIVPVLSVQMDFYVRVFVRVYTSASAMKNTPLKLSYVYQCIGCDSFHLQPVGRSLPKNNSVRYLPAIGPVVKQDCNHCGKKYNMGGPIWSAPMHDPEWVTSILNSVKSMKDRYPAYDRISAVLTTVSEELLDVPLFLSLHNLCATLKCISPSAAMFRSAVINANYRISGTHVNPLGMKTDAPMEVIWDIMRCWVKNHPIKAQSPEQPGSVILSKEPSHEVDFSRHIGSLSKAQAKKVARFLPNPEKHWGPKLRAGRQITSKHVSLIGHEAVNGHLSQHHEELKEEDEEAEPEDNVQDKVDPKRQKTATDNITST

SEQ ID NO: 4170 - DNA, 1630 bp, Arabidopsis thaliana
aatgaaatcgaatcaaaaaaaacaaaaatccccaaattaccaaaatcctcggcgacaaagaggagagatagagagagagaaagaggcgaaaataatggcgtcgatccctccgccggagcttgacaacgactcactggcgtcatcgccgagatcggagtacgatagtcagccacgcgtacggttcatgtgtacttttggaggaaggatcttgccacgtccgccggataatcagctctgttacgtcggcggcgataatcgcatggtcgctgttcatcgtcacactactttcgcctctctccttagtaaacttgctaaactctccggtaaaagcaacataagcgtgaagtaccagctaccaaacgaagatcttgacgcgttgatttccgtatcaacggacgaagatgtagagaacatgatggacgaatacgaccgcgtcgcacagaatcaaaacccacgcgcctctcgtcttcgtctttttctcttcaccaaaaacgtcgccggagaagaagataacgatagtcgagctagcagtatcagctctctcctcgatagctctgttaatcgggagcaatggttcctcgacgctcttaacctcggttcttccgccgccgcaaccgcggtatctaacggtgggtccggtagagtctttgagcgagttagatctgaagtctcgtcgattgtttctgaagttcctgattatctctttggattggataatttcgatgaaactgctccgccgcatgagcttcgtgatcgtgatccgagagctaagatccaacgagaagtctcgacgctttcggatcctggttcgcctcgtcgcgatgttccttcgccgtatggttcgacgtcttcggctcctgtgatgcgaatatctacaccggaacttccaccaccagtttttattaaaccggaaagtccagaaccggtttcgactccgaaatccaatcctcaaccggaacaagtaatgcaacagagtaatctcccggttaactcgcaatggcaatatgcccctggcccaggccaacaggttcattaccagggtcataccattcaccaatcaccggtttattacgttcctggttcggttccgggtaatcatatggtccagcaaggaaatcatatggttcaaccgggtaatcatatggtacaaccggttcaaatgccgggtcagtatcttcaacaataccatcatgtaccaatgggataccaccaacctcagactcatcagatggctggtccgggtcaagtatatggtggaacggttaggccggttatgatggcagttgatggaatgaaccggacgggttattatggaatgaaaacacccggtccggttcaaatgtatcagcatcacactggtatggttgttcctggtgtagaagaacaacaacaatacagaaccgaaacggattcggatacgggtcgggcttcttagctgtttgaagaagaaatatgaaaaattatcacatccggggttttcgtcttttcattggagtcgttcttattcgttactgtgtgaactgtgtattattttttgttttacttttgtaaaatttatttttgtgtgtaataattttgtattacaaaatataatgaacagtaaaacccaataataataacattataatct

SEQ ID NO: 4171 - protein, 477 aa, Arabidopsis thaliana
MKSNQKKQKSPNYQNPRRQRGEIEREKEAKIMASIPPPELDNDSLASSPRSEYDSQPRVRFMCTFGGRILPRPPDNQLCYVGGDNRMVAVHRHTTFASLLSKLAKLSGKSNISVKYQLPNEDLDALISVSTDEDVENMMDEYDRVAQNQNPRASRLRLFLFTKNVAGEEDNDSRASSISSLLDSSVNREQWFLDALNLGSSAAATAVSNGGSGRVFERVRSEVSSIVSEVPDYLFGLDNFDETAPPHELRDRDPRAKIQREVSTLSDPGSPRRDVPSPYGSTSSAPVMRISTPELPPPVFIKPESPEPVSTPKSNPQPEQVMQQSNLPVNSQWQYAPGPGQQVHYQGHTIHQSPVYYVPGSVPGNHMVQQGNHMVQPGNHMVQPVQMPGQYLQQYHHVPMGYHQPQTHQMAGPGQVYGGTVRPVMMAVDGMNRTGYYGMKTPGPVQMYQHHTGMVVPGVEEQQQYRTETDSDTGRAS

SEQ ID NO: 4172 - protein, 446 aa, Arabidopsis thaliana
MASIPPPELDNDSLASSPRSEYDSQPRVRFMCTFGGRILPRPPDNQLCYVGGDNRMVAVHRHTTFASLLSKLAKLSGKSNISVKYQLPNEDLDALISVSTDEDVENMMDEYDRVAQNQNPRASRLRLFLFTKNVAGEEDNDSRASSISSLLDSSVNREQWFLDALNLGSSAAATAVSNGGSGRVFERVRSEVSSIVSEVPDYLFGLDNFDETAPPHELRDRDPRAKIQREVSTLSDPGSPRRDVPSPYGSTSSAPVMRISTPELPPPVFIKPESPEPVSTPKSNPQPEQVMQQSNLPVNSQWQYAPGPGQQVHYQGHTIHQSPVYYVPGSVPGNHMVQQGNHMVQPGNHMVQPVQMPGQYLQQYHHVPMGYHQPQTHQMAGPGQVYGGTVRPVMMAVDGMNRTGYYGMKTPGPVQMYQHHTGMVVPGVEEQQQYRTETDSDTGRAS

SEQ ID NO: 4173 - protein, 416 aa, Arabidopsis thaliana
MCTFGGRILPRPPDNQLCYVGGDNRMVAVHRHTTFASLLSKLAKLSGKSNISVKYQLPNEDLDALISVSTDEDVENMMDEYDRVAQNQNPRASRLRLFLFTKNVAGEEDNDSRASSISSLLDSSVNREQWFLDALNLGSSAAATAVSNGGSGRVFERVRSEVSSIVSEVPDYLFGLDNFDETAPPHELRDRDPRAKIQREVSTLSDPGSPRRDVPSPYGSTSSAPVMRISTPELPPPVFIKPESPEPVSTPKSNPQPEQVMQQSNLPVNSQWQYAPGPGQQVHYQGHTIHQSPVYYVPGSVPGNHMVQQGNHMVQPGNHMVQPVQMPGQYLQQYHHVPMGYHQPQTHQMAGPGQVYGGTVRPVMMAVDGMNRTGYYGMKTPGPVQMYQHHTGMVVPGVEEQQQYRTETDSDTGRAS

SEQ ID NO: 4174 - DNA, 991 bp, Arabidopsis thaliana
catttactttaccattttgatctgttgctctgtttcactgtgcgtgatcgggaagaagaagaaaatgttggcgattttcgacaagaacgtggcgaaaacacccgaggctcttcagggtcaagagggtggatcggtttgtgctcttaaagataggttcttgccgaaccatttctcctctgtttatcctggtgctgtcaccatcaatctcggatcttctggtttcattgcttgctctctcgagaaacagaaccctcttcttcccagattgtttgctgtggtggatgatatgttctgcatattccaaggacatatagagaacgttccaattcttaagcaacaatatggactaaccaaaacagctacagaggttaccattgtgattgaagcctacagaactctaagagatcgtggtccgtattcagctgaacaagttgttagagattttcaaggcaaattcgggtttatgctctatgactgctccacacaaaatgtcttccttgccggggatgtagatgggagtgttcctctctactggggaaccgatgctgaaggacatcttgttgtttctgatgatgttgagactgtcaagaagggttgtggtaaatcctttgcgccattccctaaaggatgtttctttacctcatctggaggtttgaggagctatgagcatccatcaaatgagttaaagccggtaccaagggtagacagttcgggtgaggtttgcggtgtaacgtttaaagtggattctgaggccaagaaagaagcgatgcctagggttgggagtgttcagaattggtctaaacaaatctgaactagctgaaaaaggcttgttttattttttacttgttggactcctgtggctgtgttccacagatttactcttttcctgatattctcactgtagccattctaaggactaatggtgctcttattgctattgtacctgtacttggtaacaaggaagctaagaataaaatattttataaacgtc

SEQ ID NO: 4175 - protein, 269 aa, Arabidopsis thaliana
IYFTILICCSVSLCVIGKKKKMLAIFDKNVAKTPEALQGQEGGSVCALKDRFLPNHFSSVYPGAVTINLGSSGFIACSLEKQNPLLPRLFAVVDDMFCIFQGHIENVPILKQQYGLTKTATEVTIVIEAYRTLRDRGPYSAEQVVRDFQGKFGFMLYDCSTQNVFLAGDVDGSVPLYWGTDAEGHLVVSDDVETVKKGCGKSFAPFPKGCFFTSSGGLRSYEHPSNELKPVPRVDSSGEVCGVTFKVDSEAKKEAMPRVGSVQNWSKQI

SEQ ID NO: 4176 - protein, 248 aa, Arabidopsis thaliana
MLAIFDKNVAKTPEALQGQEGGSVCALKDRFLPNHFSSVYPGAVTINLGSSGFIACSLEKQNPLLPRLFAVVDDMFCIFQGHIENVPILKQQYGLTKTATEVTIVIEAYRTLRDRGPYSAEQVVRDFQGKFGFMLYDCSTQNVFLAGDVDGSVPLYWGTDAEGHLVVSDDVETVKKGCGKSFAPFPKGCFFTSSGGLRSYEHPSNELKPVPRVDSSGEVCGVTFKVDSEAKKEAMPRVGSVQNWSKQI

SEQ ID NO: 4177 - protein, 174 aa, Arabidopsis thaliana
MFCIFQGHIENVPILKQQYGLTKTATEVTIVIEAYRTLRDRGPYSAEQVVRDFQGKFGFMLYDCSTQNVFLAGDVDGSVPLYWGTDAEGHLVVSDDVETVKKGCGKSFAPFPKGCFFTSSGGLRSYEHPSNELKPVPRVDSSGEVCGVTFKVDSEAKKEAMPRVGSVQNWSKQI

SEQ ID NO: 4178 - DNA, 1787 bp, Arabidopsis thaliana
atccttacaacaaaaatgaatttccgtaatctgattgcttccggttctcgcctcggcaagaggttctgtgcaacggtatttgctccggcgtcggcgactggcatcgtcgaagcctctgtttcttctccagcggcggcgaatgtcgtcgaagcctctgtttcttctccggcggcggagaatggcgtcagaacctctgttgctgctccgacggtggcttcaaggcagcgagagttgtacaagaaactttctatgcttagtgtgacgggaggaacagtggcagagacgttaaatcagttcatcatggagggtattactgtcagaaaagacgatctctttcgctgtgctaaaacccttcgcaaattccgtcgacctcaacacgcttttgagatctttgattggatggagaagaggaaaatgacattttctgtgtctgatcatgcaatttgtttggatctaattggaaagactaaaggtttagaagcagctgagaactactttaacaacttagatccttctgcaaagaatcatcagtcgacttatggggcgctcatgaactgttactgtgttgaacttgaggaagagaaagcaaaggctcattttgagataatggatgagcttaactttgttaacaattcgttaccgtttaataacatgatgtctatgtacatgcggttgagtcaaccggagaaggtacctgtgttggttgatgcgataaaacagaggggtatatctccttgtggtgtcacttactctatatggatgcagagctgtggaagtttgaatgacttagatggattagagaagattatagatgagatggggaaagacagtgaagctaaaaccacttggaatactttctctaatctggctgcaatctacactaaagctggtctttacgagaaggcggattctgcactgaaatctatggaggagaaaatgaatcctaacaaccgtgattcccaccattttctcatgagtttgtacgctggaatctcgaaaggtcctgaggtttatagggtttgggaatcgctgaagaaggctcgtcctgaggtcaacaacttgagctatctagtcatgttacaagcgatgagtaaactaggcgacttagatgggattaagaagattttcacagagtgggaatcgaaatgctgggcttacgatatgaggctggctaatatcgcgattaacacgtatttgaaagggaatatgtatgaagaagcagagaagattcttgatggtgccatgaaaaagtctaaaggtcctttctccaaagcgagacagcttctgatgatccatctgttggagaacgataaagcggatttggctatgaagcatttggaagcagcggtttctgattctgcagagaacaaagacgaatggggctggagctcagagctggtcagcttgtttttccttcactttgagaaagctaaagatgttgatggagcggaagatttctgcaagattttgtcgaattggaaacctcttgattctgaaactatgacatttctcataaagacttatgcagcagcagagaagactagtcctgatatgcgagagagattgtctcaacagcagatcgaagtaagcgaggagatccaagacttgcttaaaacagtttgtccctaaactaagtaataaatgtgattagcacgttatgtttaaacttgtgtcccgtttagagtttccagttccagaaaacaaagcttagttctttttttaagtctttgacatatgtgtcggttacatagtggaagatctcataaacaattaagtgtttctttcat

SEQ ID NO: 4179 - protein, 542 aa, Arabidopsis thaliana
ILTTKMNFRNLIASGSRLGKRFCATVFAPASATGIVEASVSSPAAANVVEASVSSPAAENGVRTSVAAPTVASRQRELYKKLSMLSVTGGTVAETLNQFIMEGITVRKDDLFRCAKTLRKFRRPQHAFEIFDWMEKRKMTFSVSDHAICLDLIGKTKGLEAAENYFNNLDPSAKNHQSTYGALMNCYCVELEEEKAKAHFEIMDELNFVNNSLPFNNMMSMYMRLSQPEKVPVLVDAIKQRGISPCGVTYSIWMQSCGSLNDLDGLEKIIDEMGKDSEAKTTWNTFSNLAAIYTKAGLYEKADSALKSMEEKMNPNNRDSHHFLMSLYAGISKGPEVYRVWESLKKARPEVNNLSYLVMLQAMSKLGDLDGIKKIFTEWESKCWAYDMRLANIAINTYLKGNMYEEAEKILDGAMKKSKGPFSKARQLLMIHLLENDKADLAMKHLEAAVSDSAENKDEWGWSSELVSLFFLHFEKAKDVDGAEDFCKILSNWKPLDSETMTFLIKTYAAAEKTSPDMRERLSQQQIEVSEEIQDLLKTVCP

SEQ ID NO: 4180 - protein, 537 aa, Arabidopsis thaliana
MNFRNLIASGSRLGKRFCATVFAPASATGIVEASVSSPAAANVVEASVSSPAAENGVRTSVAAPTVASRQRELYKKLSMLSVTGGTVAETLNQFIMEGITVRKDDLFRCAKTLRKFRRPQHAFEIFDWMEKRKMTFSVSDHAICLDLIGKTKGLEAAENYFNNLDPSAKNHQSTYGALMNCYCVELEEEKAKAHFEIMDELNFVNNSLPFNNMMSMYMRLSQPEKVPVLVDAIKQRGISPCGVTYSIWMQSCGSLNDLDGLEKIIDEMGKDSEAKTTWNTFSNLAAIYTKAGLYEKADSALKSMEEKMNPNNRDSHHFLMSLYAGISKGPEVYRVWESLKKARPEVNNLSYLVMLQAMSKLGDLDGIKKIFTEWESKCWAYDMRLANIAINTYLKGNMYEEAEKILDGAMKKSKGPFSKARQLLMIHLLENDKADLAMKHLEAAVSDSAENKDEWGWSSELVSLFFLHFEKAKDVDGAEDFCKILSNWKPLDSETMTFLIKTYAAAEKTSPDMRERLSQQQIEVSEEIQDLLKTVCP

SEQ ID NO: 4181 - protein, 459 aa, Arabidopsis thaliana
MLSVTGGTVAETLNQFIMEGITVRKDDLFRCAKTLRKFRRPQHAFEIFDWMEKRKMTFSVSDHAICLDLIGKTKGLEAAENYFNNLDPSAKNHQSTYGALMNCYCVELEEEKAKAHFEIMDELNFVNNSLPFNNMMSMYMRLSQPEKVPVLVDAIKQRGISPCGVTYSIWMQSCGSLNDLDGLEKIIDEMGKDSEAKTTWNTFSNLAAIYTKAGLYEKADSALKSMEEKMNPNNRDSHHFLMSLYAGISKGPEVYRVWESLKKARPEVNNLSYLVMLQAMSKLGDLDGIKKIFTEWESKCWAYDMRLANIAINTYLKGNMYEEAEKILDGAMKKSKGPFSKARQLLMIHLLENDKADLAMKHLEAAVSDSAENKDEWGWSSELVSLFFLHFEKAKDVDGAEDFCKILSNWKPLDSETMTFLIKTYAAAEKTSPDMRERLSQQQIEVSEEIQDLLKTVCP

SEQ ID NO: 4182 - DNA, 1172 bp, Arabidopsis thaliana
cagaaaaattttggacttattttcgatatgtttaggggaaaaatatttgtgttatcattattttctatttacgtcctctcatcagcggctgaaaaaaatacatcattttctgcgctttttgcttttggtgattcagtcttagatacgggaaacaataattttcttcttactcttctcaaaggaaattattggccatatggtttgagttttgactataaatttccgacgggaagattcggaaatggaagagttttcaccgatatagttgccgaaggtttacagatcaaaagacttgtaccagcttatagcaagattcgtcgcatcagttctgaagaccttaagactggcgtttgttttgcatcaggtggttcaggaattgacgatcttacatcccgaacactgagagttttatcggcaggtgaccaagtaaaagactttaaagactatttgaagaaactaagaagagtagtgaaacgtaagaaaaaagtaaaagaaatagtttcaaacgctgtgtttcttatttctgaaggaaataatgatcttggatactttgtcgctcccgctcttcttcgattacagtccacaacaacatacaccagtaaaatggttgtttggaccagaaagtttctaaaagatttatatgatcttggagcgagaaaatttgcggtgatgggagtgatgcctgtgggatgtttgcctatccatcgagcctcattcggtggggtattcggatggtgtaacttcctctttaatagagttacggaggacttcaacatgaaattgcagaaaggtcttacaagttacgcagtagaatatgatttcaaagatgcaaagtttgtttacgtcgacatatacggtactcttatggatcttgtcaaaaatcctatggcctatgggtttacagaagcgaaaaaagcttgttgttgtatgccgaatgcaataataccatgcttccatccagataaatacgtcttctatgactttgctcacccttcccagaaagcctacgaagtaatatctaaacctattgtctatcagatagcgaaaggccttgcctagctaattccttatttcctacaatgttttattataatctttgaaaattatcaccatatcgataaatatatgtaaatgtataagattcatgacaatctattcgtttttcttattgc

SEQ ID NO: 4183 - protein, 352 aa, Arabidopsis thaliana
QKNFGLIFDMFRGKIFVLSLFSIYVLSSAAEKNTSFSALFAFGDSVLDTGNNNFLLTLLKGNYWPYGLSFDYKFPTGRFGNGRVFTDIVAEGLQIKRLVPAYSKIRRISSEDLKTGVCFASGGSGIDDLTSRTLRVLSAGDQVKDFKDYLKKLRRVVKRKKKVKEIVSNAVFLISEGNNDLGYFVAPALLRLQSTTTYTSKMVVWTRKFLKDLYDLGARKFAVMGVMPVGCLPIHRASFGGVFGWCNFLFNRVTEDFNMKLQKGLTSYAVEYDFKDAKFVYVDIYGTLMDLVKNPMAYGFTEAKKACCCMPNAIIPCFHPDKYVFYDFAHPSQKAYEVISKPIVYQIAKGLA

SEQ ID NO: 4184 - protein, 343 aa, Arabidopsis thaliana
MFRGKIFVLSLFSIYVLSSAAEKNTSFSALFAFGDSVLDTGNNNFLLTLLKGNYWPYGLSFDYKFPTGRFGNGRVFTDIVAEGLQIKRLVPAYSKIRRISSEDLKTGVCFASGGSGIDDLTSRTLRVLSAGDQVKDFKDYLKKLRRVVKRKKKVKEIVSNAVFLISEGNNDLGYFVAPALLRLQSTTTYTSKMVVWTRKFLKDLYDLGARKFAVMGVMPVGCLPIHRASFGGVFGWCNFLFNRVTEDFNMKLQKGLTSYAVEYDFKDAKFVYVDIYGTLMDLVKNPMAYGFTEAKKACCCMPNAIIPCFHPDKYVFYDFAHPSQKAYEVISKPIVYQIAKGLA

SEQ ID NO: 4185 - DNA, 956 bp, Arabidopsis thaliana
aatataaaccacatatcctctcctccatatcttaacaatttcatagcaaaccctaaaattgagaaagagatagagagagaaagatgggtagaggaaagatcgagataaagaggatagagaacgcaaacaacagagtggtgacgttctcaaagaggaggaatggattggtgaagaaggctaaagagatcacagttctttgtgatgcaaaagttgccctcataatctttgcaagtaatggtaagatgattgattactgttgtccttccatggatcttggtgctatgttggaccaataccagaagttatctggcaagaaactatgggatgctaagcatgagaaccttagcaatgagattgataggatcaagaaagagaatgatagcttacaactggagctcaggcatttgaagggagaagatatacagtctctcaacttgaaaaatctgatggctgtcgagcacgccattgaacatggcctcgacaaagtccgagaccaccagatggagatccttatatcaaagaggagaaatgagaagatgatggcggaggagcaacggcaactcactttccagctgcaacaacaggagatggctatagcaagcaacgcaagaggaatgatgatgagagatcatgatgggcagtttggatatagagtgcaaccgattcagccaaatcttcaggaaaagattatgtctttggtcatcgattgatcatcgagattttataatctcatcctgatcaactcctatctataatatcgtggtctttagtttgtctttatcaatctgtgtgtcttaatctcgagcaacatatatactcgctatcagactttttacttaagctatatgtgtgttgtttgcttatgacctctatgtattggttgtgttgtgtgcttaaacgtttcgaactaattgatctgtgtgaaacttattattctgtgataagctatttgtgat

SEQ ID NO: 4186 - protein, 208 aa, Arabidopsis thaliana
MGRGKIEIKRIENANNRVVTFSKRRNGLVKKAKEITVLCDAKVALIIFASNGKMIDYCCPSMDLGAMLDQYQKLSGKKLWDAKHENLSNEIDRIKKENDSLQLELRHLKGEDIQSLNLKNLMAVEHAIEHGLDKVRDHQMEILISKRRNEKMMAEEQRQLTFQLQQQEMAIASNARGMMMRDHDGQFGYRVQPIQPNLQEKIMSLVID

SEQ ID NO: 4187 - protein, 155 aa, Arabidopsis thaliana
MIDYCCPSMDLGAMLDQYQKLSGKKLWDAKHENLSNEIDRIKKENDSLQLELRHLKGEDIQSLNLKNLMAVEHAIEHGLDKVRDHQMEILISKRRNEKMMAEEQRQLTFQLQQQEMAIASNARGMMMRDHDGQFGYRVQPIQPNLQEKIMSLVID

SEQ ID NO: 4188 - protein, 147 aa, Arabidopsis thaliana
MDLGAMLDQYQKLSGKKLWDAKHENLSNEIDRIKKENDSLQLELRHLKGEDIQSLNLKNLMAVEHAIEHGLDKVRDHQMEILISKRRNEKMMAEEQRQLTFQLQQQEMAIASNARGMMMRDHDGQFGYRVQPIQPNLQEKIMSLVID

SEQ ID NO: 4189 - DNA, 1737 bp, Arabidopsis thaliana
aaagctccgttattcaagattattccgataatgcagtcactctccaccccacacaccatctctcttcttctccccagaacctctccgtctcgtctttctccctctcttcactcccttgctttccccactcgattacggtctctttcctattcttctcaaacgtcgatcctccccgatgccggcgatgatttcattgtcggtgactgtctcgtctacgaggacggcgtcttcgaagacccttaccttgataaggaggtcactcaggttgcgaagcaggagcgcaagaagaatcggcgtggcggggctaagagattagatgaatccgagattgagcccgagaacctcgtgccagaggaatggagggatattcaggcggaggtgaatctgacgaagaaggacaagcgcaaaatagcgcaggagatggagttcggggttcgggtggagaagaagaggcaagggctaattccgctgaggaaagttgacttgaatgactttctcacgtacaaggaagccaagttggctcaattgaggcctgtcattctcgataaaccgggaaatttctccgacgacagtggagcgtcaagcgatggagagaccgctgtatcatctcccagcgagcgagtggctcctaagaaccctagatgggcagtttacggaaagggattcgaccacgttgccaagttcttcaatagcgacaagtacgatcccagcgacaagaaatccgacggccctcgaaagctgctttcaaaagaagagaagtttatgctcaatagccggaatcctgacctagccgttgccacatcaaaaaaatggcttcctcttcacacagttaattaaattaatccccccccccccccgctccacacttcacccaaaactccagaaccctagaattcgaaatctccaaagaacccgacaaagcgccatgtcgctcactatcccggcgaatctcgttctcaacccgagatctaacaaatctctcactcaatccgtacctaaatcctccgcaagattcgtctgctccgatgacaaatcctcctcctccacacctcaatccatgaaagctttctccgccgccgtcgccctctcttccatcctcctctctgctcctatgccagctgtcgctgatatctcaggtttgactccttgcaaggactcaaaacagttcgctaaaagagagaagcaacagatcaagaagcttgaatcttctcttaagctctacgctcctgaatctgcccctgctcttgctctcaatgctcagatcgagaaaaccaaacgcaggttcgacaactacgggaagtacggattgttatgcgggtcagacggtttaccgcacttgatagtgaacggagaccagcggcattggggagagttcattactccagggattcttttcctctacattgctggatggatcgggtgggttggaagaagctacttaatagctattagtggtgagaagaaacccgcgatgaaagagatcatcatcgatgttcctttggctagtcggatcatcttccgtggtttcatttggcccgttgctgcctacagagagtttctcaatggtgatctcattgctaaggatgtttaaaaagggaacttgttttctgcttttgtgttactctctctaatctctttgttttccattgtacttattgaaaaacaatgcattgtcgaaaaccttataaaatttggattgcgcaagtagaaagaattatggctaaaatggtgattgac

SEQ ID NO: 4190 - protein, 278 aa, Arabidopsis thaliana
KAPLFKIIPIMQSLSTPHTISLLLPRTSPSRLSPSLHSLAFPTRLRSLSYSSQTSILPDAGDDFIVGDCLVYEDGVFEDPYLDKEVTQVAKQERKKNRRGGAKRLDESEIEPENLVPEEWRDIQAEVNLTKKDKRKIAQEMEFGVRVEKKRQGLIPLRKVDLNDFLTYKEAKLAQLRPVILDKPGNFSDDSGASSDGETAVSSPSERVAPKNPRWAVYGKGFDHVAKFFNSDKYDPSDKKSDGPRKLLSKEEKFMLNSRNPDLAVATSKKWLPLHTVN

SEQ ID NO: 4191 - protein, 268 aa, Arabidopsis thaliana
MQSLSTPHTISLLLPRTSPSRLSPSLHSLAFPTRLRSLSYSSQTSILPDAGDDFIVGDCLVYEDGVFEDPYLDKEVTQVAKQERKKNRRGGAKRLDESEIEPENLVPEEWRDIQAEVNLTKKDKRKIAQEMEFGVRVEKKRQGLIPLRKVDLNDFLTYKEAKLAQLRPVILDKPGNFSDDSGASSDGETAVSSPSERVAPKNPRWAVYGKGFDHVAKFFNSDKYDPSDKKSDGPRKLLSKEEKFMLNSRNPDLAVATSKKWLPLHTVN

SEQ ID NO: 4192 - protein, 221 aa, Arabidopsis thaliana
MSLTIPANLVLNPRSNKSLTQSVPKSSARFVCSDDKSSSSTPQSMKAFSAAVALSSILLSAPMPAVADISGLTPCKDSKQFAKREKQQIKKLESSLKLYAPESAPALALNAQIEKTKRRFDNYGKYGLLCGSDGLPHLIVNGDQRHWGEFITPGILFLYIAGWIGWVGRSYLIAISGEKKPAMKEIIIDVPLASRIIFRGFIWPVAAYREFLNGDLIAKDV

SEQ ID NO: 4193 - DNA, 1067 bp, Arabidopsis thaliana
cgggaagaaagttgactagaaacggagaatttccaaatgttgaatttgttggatgcatgtgaaagccaattctatttggttcctccttgataatccacccaatcgctgtcattctcccatcaatctagctgctttcacaaaccattgtactgagatcgtatctttaaggtaaatttcaaatcggagtcggcgagatcgaaataggaacctggaagtcggagaatttgtgtaaattcggtttttttttttttaattctccgatggatagtttaagtgatatcgatggtgatttcgatggaagaaatgaaggaggatcgtcatcggattatcgattgttgggtcggcagattacggttcatcagttcatgggtggtggcaaagctgctgacttgctcttatggaggaggcgacatctttctttgggggttatcattatatcaactgtagcctggcttatattcgagttttccgggttgcctttcttatctgtttcttcggatgtcttactcatcgtgatcatgatatcattcgttcatgcccgggtttctgcttttaggaatagacagttgcattcgttgccagagcttgttctatcagaggaaatggtgaatagtgctgcagcttctttccgtataaaactcaatcacttgcttgtaatggctcatgatgtcacagttggcaacgattttcgactcttcttcaaggtggtgatttgtctgtggcttctctctgccattggtagctatatatctctctgcactcttctttacatcgggaccatcctatctgtaacaataccggctttgtacagtaaatatcaaagcaaagtagacaagtgttgcgggacgattcacaggcggttgtctcaccactacaaaatagtagacgaaaatgttataagcagactctcatggagcttatccaaggataaagattcatgagcttaactttggtgattctgagaatgcttttacttgtttttgtttagcttttcttgttattcaccatttgtagtataactaaacgccatatccagaatgaatataagatggtttctttgttcaact

SEQ ID NO: 4194 - protein, 226 aa, Arabidopsis thaliana
MDSLSDIDGDFDGRNEGGSSSDYRLLGRQITVHQFMGGGKAADLLLWRRRHLSLGVIIISTVAWLIFEFSGLPFLSVSSDVLLIVIMISFVHARVSAFRNRQLHSLPELVLSEEMVNSAAASFRIKLNHLLVMAHDVTVGNDFRLFFKVVICLWLLSAIGSYISLCTLLYIGTILSVTIPALYSKYQSKVDKCCGTIHRRLSHHYKIVDENVISRLSWSLSKDKDS

SEQ ID NO: 4195 - protein, 191 aa, Arabidopsis thaliana
MGGGKAADLLLWRRRHLSLGVIIISTVAWLIFEFSGLPFLSVSSDVLLIVIMISFVHARVSAFRNRQLHSLPELVLSEEMVNSAAASFRIKLNHLLVMAHDVTVGNDFRLFFKVVICLWLLSAIGSYISLCTLLYIGTILSVTIPALYSKYQSKVDKCCGTIHRRLSHHYKIVDENVISRLSWSLSKDKDS

SEQ ID NO: 4196 - protein, 140 aa, Arabidopsis thaliana
MISFVHARVSAFRNRQLHSLPELVLSEEMVNSAAASFRIKLNHLLVMAHDVTVGNDFRLFFKVVICLWLLSAIGSYISLCTLLYIGTILSVTIPALYSKYQSKVDKCCGTIHRRLSHHYKIVDENVISRLSWSLSKDKDS

SEQ ID NO: 4197 - DNA, 960 bp, Arabidopsis thaliana
atttttgtttctctctttctctctgatatttttcattttcttcttcttctctctctctctccacaaagataagccaacaatggttggtgattacagaggacgctttagtagccgtcgtttctccgatgactctgacgattcttccgacgatgcttcttccgtggagggagagaccacttcttccatgtactctgcggggaaagagtatatggaaacagaatggactaatgagaagcatagtttatatcttaaatctatggaagcttcattcgtagatcagttatataactcgctcggagctctcgggaagaacgagaatgtatccgaatcaacgaggttcggtagcggtagaaaaccgtctcaagaacagttcaaggttcttcatgatggtttctggcagaagattaatgtgaaacaacctgaacatcggattaacggaaggcacggtggtaattctcatgagtttcttaggagtccatggattaagcattataaacctttagtaaagacacaaatcccggtaacggatgagcccgaaaatcaagttgttagcagctctaatgggaagaagggaatatgcagctctggctcagcctctagtctcaagcagctaagctctcattcgcgtgaccacgaccaaatcagcgttggagaagcagaggtatcggatcagaactttgttaacgaaggaataaaaggcgaaaacggaagctcgaagaagatgaagacggtgatgatgagtgaatcgtcgagtaccgatcaggttgttccactcaataaactcttgcaacatgacgtaaatttgaagtctgtttcttgagaggtcagatggtgaagctttatatgaggagagaattttgtaatgtatatatatttgcataacttataagtcaaatttactatccttagttacaagtttcttcatcatatatccctaactataaatatatttatatgccc

SEQ ID NO: 4198 - protein, 272 aa, Arabidopsis thaliana
FLFLSFSLIFFIFFFFSLSLHKDKPTMVGDYRGRFSSRRFSDDSDDSSDDASSVEGETTSSMYSAGKEYMETEWTNEKHSLYLKSMEASFVDQLYNSLGALGKNENVSESTRFGSGRKPSQEQFKVLHDGFWQKINVKQPEHRINGRHGGNSHEFLRSPWIKHYKPLVKTQIPVTDEPENQVVSSSNGKKGICSSGSASSLKQLSSHSRDHDQISVGEAEVSDQNFVNEGIKGENGSSKKMKTVMMSESSSTDQVVPLNKLLQHDVNLKSVS

SEQ ID NO: 4199 - protein, 246 aa, Arabidopsis thaliana
MVGDYRGRFSSRRFSDDSDDSSDDASSVEGETTSSMYSAGKEYMETEWTNEKHSLYLKSMEASFVDQLYNSLGALGKNENVSESTRFGSGRKPSQEQFKVLHDGFWQKINVKQPEHRINGRHGGNSHEFLRSPWIKHYKPLVKTQIPVTDEPENQVVSSSNGKKGICSSGSASSLKQLSSHSRDHDQISVGEAEVSDQNFVNEGIKGENGSSKKMKTVMMSESSSTDQVVPLNKLLQHDVNLKSVS

SEQ ID NO: 4200 - protein, 211 aa, Arabidopsis thaliana
MYSAGKEYMETEWTNEKHSLYLKSMEASFVDQLYNSLGALGKNENVSESTRFGSGRKPSQEQFKVLHDGFWQKINVKQPEHRINGRHGGNSHEFLRSPWIKHYKPLVKTQIPVTDEPENQVVSSSNGKKGICSSGSASSLKQLSSHSRDHDQISVGEAEVSDQNFVNEGIKGENGSSKKMKTVMMSESSSTDQVVPLNKLLQHDVNLKSVS

SEQ ID NO: 4201 - DNA, 1564 bp, Arabidopsis thaliana
attctcacaaatctctcttccacccattgttatctctgtagaagcgtgagagagatcacgcgtgttcaccgacacaatcaaaatatggcgaacggagccgatagattggatctggacggtaaaccgattaagccgatgacgatatgcatgatcggtgccggaggtttcattggctctcatctctgcgagaagcttatgacggagactcctcacaaggttcttgcgcttgatgtttacaatgataagatcaagcacttgcttgagcctgataccgttcaatgggctggtcggatccagtttcatcgtatcaacattaagcatgattctagacttgaaggactgatcaagatggcagatctgacgataaatctagctgcgatctgtactccagcagattacaatacgcgtcctcttgacactatctacagcaatttcattgatgctctcccagtggttaaatactgctcagagaacaacaagcgtctgattcacttttccacttgtgaagtgtatggaaaaactataggaagctttcttccaaaggatcatcctctgcgtcaggatcctgaattttatgtactcaaagaagatatatccccttgcatctttggttcaattgagaagcagaggtggtcatatgcttgtgcaaagcaacttattgagagacttgtttacgctgagggtgctgagaatggactcgagttcaccattgtaagaccattcaactggattggacctaggatggatttcatccctggcattgatggtcctagcgagggtgtcccacgggttctagcgtgctttagtaacaatcttctgcgacgggagcctctcaagcttgtggatggtggagaatcacagagaaccttcatctacatcaaagatgctatcgaagctgtccttttgatgatcgaaaatccagagagagccaatgggcatatcttcaatgtaggcaacccaaacaatgaagtgacagtgagacaacttgctgaaatgatgactgaggtctacgccaaagtgagtggagagacagctatcgagagtccaacgatcgacgtgagctccaaagagttttatggagaaggttatgatgacagcgacaagagaatcccagacatgaccatcatcaaccgtcaacttggatggaacccgaagacgtcgctttgggacttgcttgaatcgaccttaacataccagcacacgacttatgcggaagccattaagaaggccacttcaaaaccagtcgcatcttagaggtcgtctctctttacaaacacctcaaatcatgtggtggctacgattccattctttctttttaaaaaaaaaattctcccaacagaaaccttctcttcccttattttaggccattctaaacaaatgatatatcatggtggttgattctagtttacgttttccttgttatatagtattactgttaatgtttttgaattcctttgttttgaagctttatatcttgtatttgtccgaaactaaaaagggaatggtttgtgcaaactataacattggggctttctttatatgttacatatctttggcggattcc

SEQ ID NO: 4202 - protein, 417 aa, Arabidopsis thaliana
ILTNLSSTHCYLCRSVREITRVHRHNQNMANGADRLDLDGKPIKPMTICMIGAGGFIGSHLCEKLMTETPHKVLALDVYNDKIKHLLEPDTVQWAGRIQFHRINIKHDSRLEGLIKMADLTINLAAICTPADYNTRPLDTIYSNFIDALPVVKYCSENNKRLIHFSTCEVYGKTIGSFLPKDHPLRQDPEFYVLKEDISPCIFGSIEKQRWSYACAKQLIERLVYAEGAENGLEFTIVRPFNWIGPRMDFIPGIDGPSEGVPRVLACFSNNLLRREPLKLVDGGESQRTFIYIKDAIEAVLLMIENPERANGHIFNVGNPNNEVTVRQLAEMMTEVYAKVSGETAIESPTIDVSSKEFYGEGYDDSDKRIPDMTIINRQLGWNPKTSLWDLLESTLTYQHTTYAEAIKKATSKPVAS

SEQ ID NO: 4203 - protein, 389 aa, Arabidopsis thaliana
MANGADRLDLDGKPIKPMTICMIGAGGFIGSHLCEKLMTETPHKVLALDVYNDKIKHLLEPDTVQWAGRIQFHRINIKHDSRLEGLIKMADLTINLAAICTPADYNTRPLDTIYSNFIDALPVVKYCSENNKRLIHFSTCEVYGKTIGSFLPKDHPLRQDPEFYVLKEDISPCIFGSIEKQRWSYACAKQLIERLVYAEGAENGLEFTIVRPFNWIGPRMDFIPGIDGPSEGVPRVLACFSNNLLRREPLKLVDGGESQRTFIYIKDAIEAVLLMIENPERANGHIFNVGNPNNEVTVRQLAEMMTEVYAKVSGETAIESPTIDVSSKEFYGEGYDDSDKRIPDMTIINRQLGWNPKTSLWDLLESTLTYQHTTYAEAIKKATSKPVAS

SEQ ID NO: 4204 - protein, 372 aa, Arabidopsis thaliana
MTICMIGAGGFIGSHLCEKLMTETPHKVLALDVYNDKIKHLLEPDTVQWAGRIQFHRINIKHDSRLEGLIKMADLTINLAAICTPADYNTRPLDTIYSNFIDALPVVKYCSENNKRLIHFSTCEVYGKTIGSFLPKDHPLRQDPEFYVLKEDISPCIFGSIEKQRWSYACAKQLIERLVYAEGAENGLEFTIVRPFNWIGPRMDFIPGIDGPSEGVPRVLACFSNNLLRREPLKLVDGGESQRTFIYIKDAIEAVLLMIENPERANGHIFNVGNPNNEVTVRQLAEMMTEVYAKVSGETAIESPTIDVSSKEFYGEGYDDSDKRIPDMTIINRQLGWNPKTSLWDLLESTLTYQHTTYAEAIKKATSKPVAS

SEQ ID NO: 4205 - DNA, 1311 bp, Arabidopsis thaliana
aaccatatgaatctcacgatcaaagataatatctcatcatctatatagtatttgtctcgatattagagacgtacacactttgtttatactcaaatcaatatgggatctttcgtgaaagaagaaacgtcgtcgttgatgacagattttttggagaagtgcggtggttatgcggtggtggatggagggtttgcgacggagctacagcgccacggagctgatatcaatgatccactttggagtgctaagtgccttattacttctcctcaccttgttacaaaggtgcacttggattaccttgaatctggagcaaatatcatcataacagcatcttaccaggcgacgatacaaggttttgtggcaaaaggtctatcggtgggagaagcagaaaatttacttagaaggagcgttgaaatcacgtacgaggcacgtgagattttctacaacagatgcaccaagggttcatgggatttcgcctacgctggaaaagcttcccggagaccaattcttgtcgcagcttccgttggtagctatggagcttatctcgctgacggctccgaatacagtgggatatatggagattctgtgagtaaggagacattaaaggatttccatagaagaagagttcaaatcttagcaaaatctggagccgacctaatagcattcgagactattccaaataagctcgaagcagaggcttatgcggatcttcttgaggaggaagatatcgatattccggcatggttctcgttcacttccaaggacggagtcagtgtgccacgaggagattcagttgtagaatgtgcgaaagtggcagattcatgcaagaacgtggtggccattggaatcaattgtactgcaccaagatacattcatgctttaattatctccttgcgccagatgacacgcaaaccaatcgttgtatacccaaacagcggggaagtctacgacggtctgaacaagaaatggattaagtcagagggagagtcagaggaggattttgtgtcgtacgtgagtaaatggagagatgcaggagcttctctgtttggaggatgttgtcggactactccaaacaccatcagagccattgctaaagttctctccgacgaaccttctgcagcatcaaaacccaaattcgggcaatagacttgtcaacggtgaatttctatgcttgtgatgtcaggaaggagtttaaaatgtacaataacgcaagcgtagttctgtaatctactaatatgttgaaactataaataatggtaaactatgttagagacaactgtgtaattagcgtatgataataatggagtttaaacg

SEQ ID NO: 4206 - protein, 347 aa, Arabidopsis thaliana
MGSFVKEETSSLMTDFLEKCGGYAVVDGGFATELQRHGADINDPLWSAKCLITSPHLVTKVHLDYLESGANIIITASYQATIQGFVAKGLSVGEAENLLRRSVEITYEAREIFYNRCTKGSWDFAYAGKASRRPILVAASVGSYGAYLADGSEYSGIYGDSVSKETLKDFHRRRVQILAKSGADLIAFETIPNKLEAEAYADLLEEEDIDIPAWFSFTSKDGVSVPRGDSVVECAKVADSCKNVVAIGINCTAPRYIHALIISLRQMTRKPIVVYPNSGEVYDGLNKKWIKSEGESEEDFVSYVSKWRDAGASLFGGCCRTTPNTIRAIAKVLSDEPSAASKPKFGQ

SEQ ID NO: 4207 - protein, 335 aa, Arabidopsis thaliana
MTDFLEKCGGYAVVDGGFATELQRHGADINDPLWSAKCLITSPHLVTKVHLDYLESGANIIITASYQATIQGFVAKGLSVGEAENLLRRSVEITYEAREIFYNRCTKGSWDFAYAGKASRRPILVAASVGSYGAYLADGSEYSGIYGDSVSKETLKDFHRRRVQILAKSGADLIAFETIPNKLEAEAYADLLEEEDIDIPAWFSFTSKDGVSVPRGDSVVECAKVADSCKNVVAIGINCTAPRYIHALIISLRQMTRKPIVVYPNSGEVYDGLNKKWIKSEGESEEDFVSYVSKWRDAGASLFGGCCRTTPNTIRAIAKVLSDEPSAASKPKFGQ

SEQ ID NO: 4208 - DNA, 1150 bp, Arabidopsis thaliana
aacatcttaaaaagtaaaaacacattcatctatccaacaaaaaaaaaaaaaaaaaggagaaatggaaggaatcgatcatagaatggtgagtgtcaatggcataactatgcacattgccgagaaaggtcccaaagaaggacctgtggtgcttctcctccatggattccctgatctctggtacacgtggcgtcaccagattagtgggttatcatctctaggttaccgcgctgtagctccagacctccgaggctacggagactctgattcgccagagtctttctccgagtacacgtgtcttaacgtcgttggggacctcgtagctcttctggacagtgttgctggaaatcaagagaaggtgtttctggtcggtcatgattggggagccattatcggatggtttctctgtttgtttcgacctgaaaagattaacggctttgtgtgtttgagtgtgccgtatagatcaagaaaccctaaagtcaagcccgttcaagggttcaaggctgtatttggagatgattactacatttgtagatttcaggaaccggggaagattgaaggagagattgcaagtgcagatccaagaatatttctgaggaacctcttcacagggaggacactcggtccgccgattttacctaaggataatccctttggggaaaaacctaaccctaatagcgaaaacattgaattgcctgaatggttttctaagaagatctcgatttctatgtctccaaattcgagaaggcaggatttaccggtggattgaactactacagagccatggatctgaattgggagctcactgcaccatggaccggagctaagattcaagttccagtgaagttcatgacaggtgacttcgacatggtttacaccacaccagggatgaaagagtacattcacggtggtggatttgctgcagatgttccaactcttcaagagatagtggtgattgaagatgctggtcacttcgttaaccaagagaaacctcaagaggtcactgctcacatcaatgacttcttcaccaagcttcgggacaacaacaaaagcttttagagttctcgtttggttctattatgttggctctcaaaacaagttggttcttgcatgtgttgtttcgacaagattttgaataagacttggcattatg

SEQ ID NO: 4209 - protein, 234 aa, Arabidopsis thaliana
MEGIDHRMVSVNGITMHIAEKGPKEGPVVLLLHGFPDLWYTWRHQISGLSSLGYRAVAPDLRGYGDSDSPESFSEYTCLNVVGDLVALLDSVAGNQEKVFLVGHDWGAIIGWFLCLFRPEKINGFVCLSVPYRSRNPKVKPVQGFKAVFGDDYYICRFQEPGKIEGEIASADPRIFLRNLFTGRTLGPPILPKDNPFGEKPNPNSENIELPEWFSKKISISMSPNSRRQDLPVD

SEQ ID NO: 4210 - protein, 227 aa, Arabidopsis thaliana
MVSVNGITMHIAEKGPKEGPVVLLLHGFPDLWYTWRHQISGLSSLGYRAVAPDLRGYGDSDSPESFSEYTCLNVVGDLVALLDSVAGNQEKVFLVGHDWGAIIGWFLCLFRPEKINGFVCLSVPYRSRNPKVKPVQGFKAVFGDDYYICRFQEPGKIEGEIASADPRIFLRNLFTGRTLGPPILPKDNPFGEKPNPNSENIELPEWFSKKISISMSPNSRRQDLPVD

SEQ ID NO: 4211 - protein, 219 aa, Arabidopsis thaliana
MHIAEKGPKEGPVVLLLHGFPDLWYTWRHQISGLSSLGYRAVAPDLRGYGDSDSPESFSEYTCLNVVGDLVALLDSVAGNQEKVFLVGHDWGAIIGWFLCLFRPEKINGFVCLSVPYRSRNPKVKPVQGFKAVFGDDYYICRFQEPGKIEGEIASADPRIFLRNLFTGRTLGPPILPKDNPFGEKPNPNSENIELPEWFSKKISISMSPNSRRQDLPVD

SEQ ID NO: 4212 - DNA, 2134 bp, Arabidopsis thaliana
atgatgggtatggcacttgaattatctgttctgggtcgatctgtcattgactctaaaaccttaaatttgaagagatatggtcaaaaatcgaagctttcaggaagatttctgcccagagctgagctgcactgccctgtggcgttgagttcttctaaacactccaatttgagttttagattccgacgaagttgtgaatttagctacagaagtcgctttatgctgtttagctccagtcaatgtcacgagggcagtcaacgaaagtccgattctggtgaaaaggagctggagtcgattaaggttttgctgaaacgtggaattgtgataggagctctagtctgtggagttttcttgtatggatgtcagaaagtgttggcatcggctggtgtggtcgaagcaggctatgaggtgtttggtcagagcgtagtgttgtttaagaatgctttgcctaaaatttaccaggttcttacggttcttagagagcaaggtctaattttggctgcgctgctcagcctctcagcattcttctctatggcagagacgtccattaccactctgtggccgtggaaggtgcgtgagttggctgagaaagaaccagagaatggtgtattcagaatgctccggagtgatgtcaccagattcttgacgactatacttattggaacaactgttgtgaatattgcggcaactgcactggtcactgaagcagcaacagctatatttggggaagctggtgttagtgctgccactggattgatgacagtggctattttactcctgactgagattactccaaaaagtgttgctgtgcacaatgctcaagaagttgcaaggattgtggtcaggccagtggcgtggctttccttagtattatatcctgtcggaagaattgtcacatatctgtcaatgggaatactgaaaattcttggtttgaaaggacggagtgaaccatatgttactgaagatgagttgaaactgatgctaagaggtgcagaattgagtggtgccattgaagaagaggagcaggatatgattgaaaatgtgctagagattaaggatacccatgttcgagaggtgatgactccccttgttgatgtagtcgcaattgacgccagcgccagtctagttgatttccatagtatgtgggtgacccatcagtactcaagggtgcctgtttttgagcagcgtattgataatatagtgggaattgcatatgctatggatcttctagattatgttcagaagggtgatctgttagaaagtacttctgtgggggacatggcacataaacctgcatatttcgtccctgattcaatgtctgtttggaatcttcttagagaattccgaataagaaaggttcacatggcagttgtccttaacgaatatggtggaacgatcggaatagtaactcttgaagatgtggtcgaagagattgttggtgaaatttttgatgaaaacgattccaaagaggagattcagaagaaaacaggatatattgtcatgagagatgagggcatatatgatgttgatgctaatacatcaattgaccagctatctgaagaactgaatatgaaaatgccagagggcattcagtacgagacagtctcaggctttgtgtgtgaggcctttgggtatatcccaaaaactggagaaagtgtgaaggttgttcttgaaaaggaaagctgggaagaggatggtgaggaggaggaaggtaaacaggagaggcaagagccaaaggaaaagaaccaaatctatagagtagagatactagcagggaatgcaagaaaagttagtgctgtccggtttgagagagtgaacgatatggatcaagtgtcggaggcaagtgatgtaaaaagcatggttcccaaatttgtaaggaaatggagcagcgaagaagatgatgggaacttgtccaacgaagaagaccaatccgagaatgctgtcttagatgaacatgtactggctgataatagcaagaaacaacaatgacactgagatacagttccttttttctttattctgcatttttcaattcttctttgaaaaggaaagaagtaagctcacaaatacaagaagctttcttctttagatttaatgtaataatcaggatggataaattaagaaattcgtgttaggc

SEQ ID NO: 4213 - protein, 661 aa, Arabidopsis thaliana
MMGMALELSVLGRSVIDSKTLNLKRYGQKSKLSGRFLPRAELHCPVALSSSKHSNLSFRFRRSCEFSYRSRFMLFSSSQCHEGSQRKSDSGEKELESIKVLLKRGIVIGALVCGVFLYGCQKVLASAGVVEAGYEVFGQSVVLFKNALPKIYQVLTVLREQGLILAALLSLSAFFSMAETSITTLWPWKVRELAEKEPENGVFRMLRSDVTRFLTTILIGTTVVNIAATALVTEAATAIFGEAGVSAATGLMTVAILLLTEITPKSVAVHNAQEVARIVVRPVAWLSLVLYPVGRIVTYLSMGILKILGLKGRSEPYVTEDELKLMLRGAELSGAIEEEEQDMIENVLEIKDTHVREVMTPLVDVVAIDASASLVDFHSMWVTHQYSRVPVFEQRIDNIVGIAYAMDLLDYVQKGDLLESTSVGDMAHKPAYFVPDSMSVWNLLREFRIRKVHMAVVLNEYGGTIGIVTLEDVVEEIVGEIFDENDSKEEIQKKTGYIVMRDEGIYDVDANTSIDQLSEELNMKMPEGIQYETVSGFVCEAFGYIPKTGESVKVVLEKESWEEDGEEEEGKQERQEPKEKNQIYRVEILAGNARKVSAVRFERVNDMDQVSEASDVKSMVPKFVRKWSSEEDDGNLSNEEDQSENAVLDEHVLADNSKKQQ

SEQ ID NO: 4214 - protein, 660 aa, Arabidopsis thaliana
MGMALELSVLGRSVIDSKTLNLKRYGQKSKLSGRFLPRAELHCPVALSSSKHSNLSFRFRRSCEFSYRSRFMLFSSSQCHEGSQRKSDSGEKELESIKVLLKRGIVIGALVCGVFLYGCQKVLASAGVVEAGYEVFGQSVVLFKNALPKIYQVLTVLREQGLILAALLSLSAFFSMAETSITTLWPWKVRELAEKEPENGVFRMLRSDVTRFLTTILIGTTVVNIAATALVTEAATAIFGEAGVSAATGLMTVAILLLTEITPKSVAVHNAQEVARIVVRPVAWLSLVLYPVGRIVTYLSMGILKILGLKGRSEPYVTEDELKLMLRGAELSGAIEEEEQDMIENVLEIKDTHVREVMTPLVDVVAIDASASLVDFHSMWVTHQYSRVPVFEQRIDNIVGIAYAMDLLDYVQKGDLLESTSVGDMAHKPAYFVPDSMSVWNLLREFRIRKVHMAVVLNEYGGTIGIVTLEDVVEEIVGEIFDENDSKEEIQKKTGYIVMRDEGIYDVDANTSIDQLSEELNMKMPEGIQYETVSGFVCEAFGYIPKTGESVKVVLEKESWEEDGEEEEGKQERQEPKEKNQIYRVEILAGNARKVSAVRFERVNDMDQVSEASDVKSMVPKFVRKWSSEEDDGNLSNEEDQSENAVLDEHVLADNSKKQQ

SEQ ID NO: 4215 - protein, 658 aa, Arabidopsis thaliana
MALELSVLGRSVIDSKTLNLKRYGQKSKLSGRFLPRAELHCPVALSSSKHSNLSFRFRRSCEFSYRSRFMLFSSSQCHEGSQRKSDSGEKELESIKVLLKRGIVIGALVCGVFLYGCQKVLASAGVVEAGYEVFGQSVVLFKNALPKIYQVLTVLREQGLILAALLSLSAFFSMAETSITTLWPWKVRELAEKEPENGVFRMLRSDVTRFLTTILIGTTVVNIAATALVTEAATAIFGEAGVSAATGLMTVAILLLTEITPKSVAVHNAQEVARIVVRPVAWLSLVLYPVGRIVTYLSMGILKILGLKGRSEPYVTEDELKLMLRGAELSGAIEEEEQDMIENVLEIKDTHVREVMTPLVDVVAIDASASLVDFHSMWVTHQYSRVPVFEQRIDNIVGIAYAMDLLDYVQKGDLLESTSVGDMAHKPAYFVPDSMSVWNLLREFRIRKVHMAVVLNEYGGTIGIVTLEDVVEEIVGEIFDENDSKEEIQKKTGYIVMRDEGIYDVDANTSIDQLSEELNMKMPEGIQYETVSGFVCEAFGYIPKTGESVKVVLEKESWEEDGEEEEGKQERQEPKEKNQIYRVEILAGNARKVSAVRFERVNDMDQVSEASDVKSMVPKFVRKWSSEEDDGNLSNEEDQSENAVLDEHVLADNSKKQQ

SEQ ID NO: 4216 - DNA, 2536 bp, Arabidopsis thaliana
aaaagattttgtgtatcctcgttcttgtaatggaaatctacaccatgaaaacgaattttcttgtactggctttgtctttgtgtatccttctttcaagcttccatgaggtttcttgtcaggatgatggtagtggtttgagtaatttggatctaatagaacgtgattatcaagatagtgtcaatgctcttcaaggcaaggacgatgaagatcagtctgcaaagatacagagtgaaaaccagaataacactacagtgactgataagaacactatttctctatctctatcagatgaatctgaggttggatctgttagtgatgaaagcgttggacgttcgagtctgttggatcaaatcaaacttgaattcgaagctcatcacaatagtattaaccaagctggatctgatggtgtcaaggctgaatccaaggatgatgatgaagaattatctgctcatagacagaaaatgttggaagaaatcgaacatgagtttgaagctgcttcagatagtctgaaacaactaaagactgatgatgtaaacgaaggaaatgatgaagaacattctgcaaagaggcaaagtttgttggaagagatcgaacgtgagtttgaagctgctacaaaagaacttgaacgactaaaggttaatgacttcaccggggacaaagatgacgaagaacactctgcaaagagaaaaagtatgcttgaagctattgaacgcgagtttgaagctgctatggaaggcattgaagcacttaaggtttctgattccacaggaagcggagatgatgaagaacaatctgcaaagagactaagtatgcttgaagagatcgaacgggaatttgaaggtcttgaacaactaagggctagcgattcaaccgcggacaataacgaagaagaacacgctgcaaagggacaaagtttgttagaagagatcgaacgagagttcgaagctgctacagagagccttaagcaacttcaagttgatgattctactgaagacaaagaacactttacagctgcaaagaggcaaagtctgctggaagagattgaacgtgaatttgaagctgcaacaaaagatcttaaacaactaaatgatttcactgaaggcagtgctgatgatgaacaatctgcaaagagaaacaaaatgttggaagatatcgaacgcgaatttgaagctgctacaataggtcttgaacaactaaaggctaatgatttctctgaaggcaataataatgaagaacaatctgcaaagagaaagagtatgcttgaagagatcgaacgcgagttcgaagctgctattggaggtcttaaacagatcaaagttgatgattccagaaatcttgaagaagaatctgctaagagaaagataattttggaagagatggaacgtgaatttgaagaagcacacagtggtattaatgcaaaggctgacaaagaagaatctgcaaagaaacagagtggctctgctataccagaggttcttggactaggacagtcaggtggttgtagctgttctaaacaagacgaagattcctcgattgttataccaacaaaatatagcatagaagatatcctctctgaagaatctgcagtccagggaacagagacttctagtctcaccgcgtctttgactcaactcgttgagaatcacaggaaagaaaaggaatctctactcggacacagagttctcacttctccttctatagcttcttccacaagcgaatcatctgctacatcagagactgtagaaaccctaagggctaaactgaatgagcttcgcggcttaaccgctcgtgagcttgtgacacgtaaagatttcggtcagattctcattacggctgcgagttttgaagagctaagttcagctccaatcagttacatttctaggttagctaaatacagaaacgtcatcaaagaaggacttgaagcttctgagagagttcacatcgcgcaggtacgagcaaaaatgctcaaagaagttgccacggagaagcaaaccgccgtggacactcatttcgcaaccgctaaaaagcttgctcaagaaggagacgcgttgttcgttaaaatcttcgcaatcaagaaactgttggcgaaacttgaagcagagaaagaatctgttgatggaaagtttaaggagactgtgaaagaactttctcatcttctggctgatgcttctgaggcttacgaagagtatcatggcgcggtgaggaaggcgaaagacgagcaagcggctgaggaatttgcgaaagaggcgacgcaaagtgcagagatcatttgggttaagtttcttagttctctttagagaacaattgagattcttggttgtgttaagagcaaatctagagctcttgttggttcttgttatgtattttgtgatgatgttctgtttcagagtttgtgtgttggttgtatcaggagaaagaggctgggagatagagagaaagagagtctctgcgaaaactaataatgttttttcagatatctaaataataagctttttgcatacattgtattgtaaatttgtaacattcttctcctccc

SEQ ID NO: 4217 - protein, 764 aa, Arabidopsis thaliana
KILCILVLVMEIYTMKTNFLVLALSLCILLSSFHEVSCQDDGSGLSNLDLIERDYQDSVNALQGKDDEDQSAKIQSENQNNTTVTDKNTISLSLSDESEVGSVSDESVGRSSLLDQIKLEFEAHHNSINQAGSDGVKAESKDDDEELSAHRQKMLEEIEHEFEAASDSLKQLKTDDVNEGNDEEHSAKRQSLLEEIEREFEAATKELERLKVNDFTGDKDDEEHSAKRKSMLEAIEREFEAAMEGIEALKVSDSTGSGDDEEQSAKRLSMLEEIEREFEGLEQLRASDSTADNNEEEHAAKGQSLLEEIEREFEAATESLKQLQVDDSTEDKEHFTAAKRQSLLEEIEREFEAATKDLKQLNDFTEGSADDEQSAKRNKMLEDIEREFEAATIGLEQLKANDFSEGNNNEEQSAKRKSMLEEIEREFEAAIGGLKQIKVDDSRNLEEESAKRKIILEEMEREFEEAHSGINAKADKEESAKKQSGSAIPEVLGLGQSGGCSCSKQDEDSSIVIPTKYSIEDILSEESAVQGTETSSLTASLTQLVENHRKEKESLLGHRVLTSPSIASSTSESSATSETVETLRAKLNELRGLTARELVTRKDFGQILITAASFEELSSAPISYISRLAKYRNVIKEGLEASERVHIAQVRAKMLKEVATEKQTAVDTHFATAKKLAQEGDALFVKIFAIKKLLAKLEAEKESVDGKFKETVKELSHLLADASEAYEEYHGAVRKAKDEQAAEEFAKEATQSAEIIWVKFLSSL

SEQ ID NO: 4218 - protein, 755 aa, Arabidopsis thaliana
MEIYTMKTNFLVLALSLCILLSSFHEVSCQDDGSGLSNLDLIERDYQDSVNALQGKDDEDQSAKIQSENQNNTTVTDKNTISLSLSDESEVGSVSDESVGRSSLLDQIKLEFEAHHNSINQAGSDGVKAESKDDDEELSAHRQKMLEEIEHEFEAASDSLKQLKTDDVNEGNDEEHSAKRQSLLEEIEREFEAATKELERLKVNDFTGDKDDEEHSAKRKSMLEAIEREFEAAMEGIEALKVSDSTGSGDDEEQSAKRLSMLEEIEREFEGLEQLRASDSTADNNEEEHAAKGQSLLEEIEREFEAATESLKQLQVDDSTEDKEHFTAAKRQSLLEEIEREFEAATKDLKQLNDFTEGSADDEQSAKRNKMLEDIEREFEAATIGLEQLKANDFSEGNNNEEQSAKRKSMLEEIEREFEAAIGGLKQIKVDDSRNLEEESAKRKIILEEMEREFEEAHSGINAKADKEESAKKQSGSAIPEVLGLGQSGGCSCSKQDEDSSIVIPTKYSIEDILSEESAVQGTETSSLTASLTQLVENHRKEKESLLGHRVLTSPSIASSTSESSATSETVETLRAKLNELRGLTARELVTRKDFGQILITAASFEELSSAPISYISRLAKYRNVIKEGLEASERVHIAQVRAKMLKEVATEKQTAVDTHFATAKKLAQEGDALFVKIFAIKKLLAKLEAEKESVDGKFKETVKELSHLLADASEAYEEYHGAVRKAKDEQAAEEFAKEATQSAEIIWVKFLSSL

SEQ ID NO: 4219 - protein, 750 aa, Arabidopsis thaliana
MKTNFLVLALSLCILLSSFHEVSCQDDGSGLSNLDLIERDYQDSVNALQGKDDEDQSAKIQSENQNNTTVTDKNTISLSLSDESEVGSVSDESVGRSSLLDQIKLEFEAHHNSINQAGSDGVKAESKDDDEELSAHRQKMLEEIEHEFEAASDSLKQLKTDDVNEGNDEEHSAKRQSLLEEIEREFEAATKELERLKVNDFTGDKDDEEHSAKRKSMLEAIEREFEAAMEGIEALKVSDSTGSGDDEEQSAKRLSMLEEIEREFEGLEQLRASDSTADNNEEEHAAKGQSLLEEIEREFEAATESLKQLQVDDSTEDKEHFTAAKRQSLLEEIEREFEAATKDLKQLNDFTEGSADDEQSAKRNKMLEDIEREFEAATIGLEQLKANDFSEGNNNEEQSAKRKSMLEEIEREFEAAIGGLKQIKVDDSRNLEEESAKRKIILEEMEREFEEAHSGINAKADKEESAKKQSGSAIPEVLGLGQSGGCSCSKQDEDSSIVIPTKYSIEDILSEESAVQGTETSSLTASLTQLVENHRKEKESLLGHRVLTSPSIASSTSESSATSETVETLRAKLNELRGLTARELVTRKDFGQILITAASFEELSSAPISYISRLAKYRNVIKEGLEASERVHIAQVRAKMLKEVATEKQTAVDTHFATAKKLAQEGDALFVKIFAIKKLLAKLEAEKESVDGKFKETVKELSHLLADASEAYEEYHGAVRKAKDEQAAEEFAKEATQSAEIIWVKFLSSL

SEQ ID NO: 4220 - DNA, 1960 bp, Arabidopsis thaliana
ctctctctctcaaacacacacccactcatggcgtctcggagagtcttatcatctcttctccgttcatcttccggtagatctgccgccaaattaggcaaccgtaaccccaggcttccttctccttcacccgcgcgtcacgccgctccatgtagctacctcctcggccgcgtcgccgagtacgcgacctcttcacctgcaagctcagctgcgccatcttctgctcctgctaaggatgaggggaagaagacctatgattacggtggcaaaggtgcgatcgggcgtgtttgccaggtcattggtgccattgtcgatgtgagatttgaggatcaggaaggattgccaccaatcatgacatctctcgaggtgcaggatcaccccacaaggctagtgcttgaggtgtctcatcacttgggtcagaatgtcgtcaggaccattgctatggatggtactgagggtctcgttcgtggaaggaaagtcctcaacactggcgctccaatcactgtacctgtcggaagggctactcttggacgtatcatgaatgttcttggagaacctattgacgaaagaggcgaaattaagaccgaacattacttacctattcacagagatgcaccggctttggttgatctagctactgggcaagagatcctggccactggtattaaggttgttgatcttcttgctccttaccaaagaggaggaaagattggtctctttggcggtgctggtgttgggaaaactgtgcttattatggagctgatcaacaatgttgccaaagctcatggtggtttctctgtgtttgctggtgtgggagaacgaacccgtgaaggcaatgacttgtacagagaaatgattgagagtggtgtcatcaagctaggcgaaaagcagtctgagagcaagtgtgctctagtgtacggacaaatgaatgagcccccgggtgcccgtgcccgtgttggactgactggtttgactgttgccgagtatttccgtgatgctgaaggccaagacgttttgcttttcattgacaacattttccgtttcactcaggccaactctgaagtgtctgctttactcggtcgtatcccgtctgctgtgggataccagccaactctggcttctgatcttggtgctcttcaagagcgaattactaccaccaagaaagggtctatcacctcagtccaagccatctatgtacctgctgatgatttgactgatcctgctcctgctacaacttttgctcacttggacgccacaactgtgctctcaagacagatttctgagcttggtatctaccctgctgtggatcctttggattcaacatcccgtatgctgtcacctcacattctgggagaggagcattacaacacggctcgtggcgtgcagaaagttctacagaactacaagaacttgcaagatattattgcaattttgggtatggatgagctaagtgaagatgacaagttgactgttgcccgtgcccgtaagatccagagattcttgagtcagccgttccacgttgctgagatcttcactggtgcccctggaaaatatgtcgaccttaaagaaaatatcaacagtttccagggtttgttggatggcaagtacgatgatctttccgaacaatcgttttacatggttggaggtatcgatgaggtggttgcaaaggcagagaagatcgctaaagagtcagcagcttaagagattgattcagatctttcatgcttaatacttctcttttttttcctgacaataacgaaaaaaaaaaaccaatgcgtgcgactctccgaccaaacggaatctgagttccgtaattatagtttcttttggttcaaattccatgagagctggcaagatgatactgaacagatccattcactgttaatcaaatttttggttgttttgcttcctttgttgaaataaagatgaaaaatcttgcagattctaattgcaatatgtgttt

SEQ ID NO: 4221 - protein, 565 aa, Arabidopsis thaliana
LSLSNTHPLMASRRVLSSLLRSSSGRSAAKLGNRNPRLPSPSPARHAAPCSYLLGRVAEYATSSPASSAAPSSAPAKDEGKKTYDYGGKGAIGRVCQVIGAIVDVRFEDQEGLPPIMTSLEVQDHPTRLVLEVSHHLGQNVVRTIAMDGTEGLVRGRKVLNTGAPITVPVGRATLGRIMNVLGEPIDERGEIKTEHYLPIHRDAPALVDLATGQEILATGIKVVDLLAPYQRGGKIGLFGGAGVGKTVLIMELINNVAKAHGGFSVFAGVGERTREGNDLYREMIESGVIKLGEKQSESKCALVYGQMNEPPGARARVGLTGLTVAEYFRDAEGQDVLLFIDNIFRFTQANSEVSALLGRIPSAVGYQPTLASDLGALQERITTTKKGSITSVQAIYVPADDLTDPAPATTFAHLDATTVLSRQISELGIYPAVDPLDSTSRMLSPHILGEEHYNTARGVQKVLQNYKNLQDIIAILGMDELSEDDKLTVARARKIQRFLSQPFHVAEIFTGAPGKYVDLKENINSFQGLLDGKYDDLSEQSFYMVGGIDEVVAKAEKIAKESAA

SEQ ID NO: 4222 - protein, 556 aa, Arabidopsis thaliana
MASRRVLSSLLRSSSGRSAAKLGNRNPRLPSPSPARHAAPCSYLLGRVAEYATSSPASSAAPSSAPAKDEGKKTYDYGGKGAIGRVCQVIGAIVDVRFEDQEGLPPIMTSLEVQDHPTRLVLEVSHHLGQNVVRTIAMDGTEGLVRGRKVLNTGAPITVPVGRATLGRIMNVLGEPIDERGEIKTEHYLPIHRDAPALVDLATGQEILATGIKVVDLLAPYQRGGKIGLFGGAGVGKTVLIMELINNVAKAHGGFSVFAGVGERTREGNDLYREMIESGVIKLGEKQSESKCALVYGQMNEPPGARARVGLTGLTVAEYFRDAEGQDVLLFIDNIFRFTQANSEVSALLGRIPSAVGYQPTLASDLGALQERITTTKKGSITSVQAIYVPADDLTDPAPATTFAHLDATTVLSRQISELGIYPAVDPLDSTSRMLSPHILGEEHYNTARGVQKVLQNYKNLQDIIAILGMDELSEDDKLTVARARKIQRFLSQPFHVAEIFTGAPGKYVDLKENINSFQGLLDGKYDDLSEQSFYMVGGIDEVVAKAEKIAKESAA

SEQ ID NO: 4223 - protein, 449 aa, Arabidopsis thaliana; identical to SEQ ID NO: 1209

SEQ ID NO: 4224 - DNA, 2351 bp, Arabidopsis thaliana
gtcctcttttgtcgtctctccctgctttcgcacttcatagcctcaatctctcaacaagcagaagagattcgattctccattatcttccttctaaatgccttccctaatgttatctgataagaaagaggagaagaagatgaagaagaagatggctttggataccccagagcttgattctaagaaggggaagaaggagcagaagctgaaactatctgattcggatgaagaagagtcggagaagaagaagagtaagaagaaggataagaagcgtaaggcttccgaggaggaggatgaagtgaagagcgattcaagctcggagaagaagaagagcagcaagaaggttaagttgggcgttgaggatgttgaagttgataaccctaatgctgtttctaagtttcggatttctgcgcctttgagggagaagcttaaggcgaatggtattgaagctcttttcccgattcaggcttccacgtttgatatggttctcgatggtgctgatttagttggacgggctcgtactggtcagggtaaaacattggcttttgtgttgcctatattggaatctttggttaatggacctgccaaaagcaaaaggaagatgggatatggcaggtcaccaagtgttttggtccttttaccgaccagagaattggccaagcaggtggctgctgactttgatgcatatggaggatcacttgggttaagttcatgttgtctctatggaggtgatagctatccagttcaggagggtaaattaaagagaggtgttgacattgtagttggaacccctggtcgtattaaggatcatattgaaagacaaaaccttgatttcagctatttacaattccgtgttcttgatgaagctgatgaaatgttgaggatgggatttgttgaggatgttgaacttattttagggaaagtggaggattctactaaagtccagactcttctcttcagtgctactttgccatcatgggtgaaaaatatctctaacaggtttcttaaaagagaccagaagactattgatcttgttggtaatgataaaatgaaggccagtaatagtgttcgacacattgctattccttgtaataaggcagccatggctcggttgattcctgatattatcagttgctatagcagtggaggccaaactattattttcgctgaaactaaagttcaagtttctgagctttctggtttgttggatggatcaagagccttgcatggtgaaatacctcaatcacaacgtgaggttactcttgctggatttaggaatggcaagtttgcaacattggtggctacaaatgttgctgctcgtggtctagatatcaatgatgtgcagttaattatccagtgtgagcctccacgtgaagttgaagcatatattcatcgttcaggccgaacaggaagagctggcaacacaggagttgcggttacactctacgattctagaaagtcgagtgtatccaggatcgaaaaagaagctggtatcaaatttgagcaccttgctgcacctcaacctgatgaaattgccagatctggtggtatggaagctgctgagaaagttaaacaagtgtgtgacagtgtggttcctgcattccttgaagctgccaaggaattattagaaacttctggtttatcagctgaagtactcctcgcaaaagctcttgcaaaaactgcgggcttcactgagataaagaaaaggtcacttcttacatcaatggagaactatgtgacactacatcttgaagcagggaaaccaatatactcgccatcatttgtttatggactgctaaggagagttttaccggatgacaaggtggaaatgattgaagggttatctctaacagcagataaaacaggagctgtgttcgatgttaagcaatcagatctagacttgttcattgcaggagcacaaaagagtgctggaagtatgagtttggaagtggttaaggtgatgcctaaactccaggagagagaaccattgccacaaaaaagattcggtggtggtggcagaggaaatcggtttggtggtggtggaggaaatcggtttggcggtggtggtggcagaggaagaggaggcagtggtggtagaggccagagatattgaaaactggaacccaacttctcctttctatataaaaagaaactaaactccgtcttataatttcattactatcttcttccgctgatgttttctacactataataggtggcttttctgtgttttccattttctttccttgaacaaacttatggaggctctcttgtaccctcttatcaattttgtgtaatgttggatgataatgatgattaaattataacttcgtcactcattggaattgttttgc

SEQ ID NO: 4225 - protein, 671 aa, Arabidopsis thaliana
MPSLMLSDKKEEKKMKKKMALDTPELDSKKGKKEQKLKLSDSDEEESEKKKSKKKDKKRKASEEEDEVKSDSSSEKKKSSKKVKLGVEDVEVDNPNAVSKFRISAPLREKLKANGIEALFPIQASTFDMVLDGADLVGRARTGQGKTLAFVLPILESLVNGPAKSKRKMGYGRSPSVLVLLPTRELAKQVAADFDAYGGSLGLSSCCLYGGDSYPVQEGKLKRGVDIVVGTPGRIKDHIERQNLDFSYLQFRVLDEADEMLRMGFVEDVELILGKVEDSTKVQTLLFSATLPSWVKNISNRFLKRDQKTIDLVGNDKMKASNSVRHIAIPCNKAAMARLIPDIISCYSSGGQTIIFAETKVQVSELSGLLDGSRALHGEIPQSQREVTLAGFRNGKFATLVATNVAARGLDINDVQLIIQCEPPREVEAYIHRSGRTGRAGNTGVAVTLYDSRKSSVSRIEKEAGIKFEHLAAPQPDEIARSGGMEAAEKVKQVCDSVVPAFLEAAKELLETSGLSAEVLLAKALAKTAGFTEIKKRSLLTSMENYVTLHLEAGKPIYSPSFVYGLLRRVLPDDKVEMIEGLSLTADKTGAVFDVKQSDLDLFIAGAQKSAGSMSLEVVKVMPKLQEREPLPQKRFGGGGRGNRFGGGGGNRFGGGGGRGRGGSGGRGQRY

SEQ ID NO: 4226 - protein, 667 aa, Arabidopsis thaliana
MLSDKKEEKKMKKKMALDTPELDSKKGKKEQKLKLSDSDEEESEKKKSKKKDKKRKASEEEDEVKSDSSSEKKKSSKKVKLGVEDVEVDNPNAVSKFRISAPLREKLKANGIEALFPIQASTFDMVLDGADLVGRARTGQGKTLAFVLPILESLVNGPAKSKRKMGYGRSPSVLVLLPTRELAKQVAADFDAYGGSLGLSSCCLYGGDSYPVQEGKLKRGVDIVVGTPGRIKDHIERQNLDFSYLQFRVLDEADEMLRMGFVEDVELILGKVEDSTKVQTLLFSATLPSWVKNISNRFLKRDQKTIDLVGNDKMKASNSVRHIAIPCNKAAMARLIPDIISCYSSGGQTIIFAETKVQVSELSGLLDGSRALHGEIPQSQREVTLAGFRNGKFATLVATNVAARGLDINDVQLIIQCEPPREVEAYIHRSGRTGRAGNTGVAVTLYDSRKSSVSRIEKEAGIKFEHLAAPQPDEIARSGGMEAAEKVKQVCDSVVPAFLEAAKELLETSGLSAEVLLAKALAKTAGFTEIKKRSLLTSMENYVTLHLEAGKPIYSPSFVYGLLRRVLPDDKVEMIEGLSLTADKTGAVFDVKQSDLDLFIAGAQKSAGSMSLEVVKVMPKLQEREPLPQKRFGGGGRGNRFGGGGGNRFGGGGGRGRGGSGGRGQRY

SEQ ID NO: 4227 - protein, 657 aa, Arabidopsis thaliana
MKKKMALDTPELDSKKGKKEQKLKLSDSDEEESEKKKSKKKDKKRKASEEEDEVKSDSSSEKKKSSKKVKLGVEDVEVDNPNAVSKFRISAPLREKLKANGIEALFPIQASTFDMVLDGADLVGRARTGQGKTLAFVLPILESLVNGPAKSKRKMGYGRSPSVLVLLPTRELAKQVAADFDAYGGSLGLSSCCLYGGDSYPVQEGKLKRGVDIVVGTPGRIKDHIERQNLDFSYLQFRVLDEADEMLRMGFVEDVELILGKVEDSTKVQTLLFSATLPSWVKNISNRFLKRDQKTIDLVGNDKMKASNSVRHIAIPCNKAAMARLIPDIISCYSSGGQTIIFAETKVQVSELSGLLDGSRALHGEIPQSQREVTLAGFRNGKFATLVATNVAARGLDINDVQLIIQCEPPREVEAYIHRSGRTGRAGNTGVAVTLYDSRKSSVSRIEKEAGIKFEHLAAPQPDEIARSGGMEAAEKVKQVCDSVVPAFLEAAKELLETSGLSAEVLLAKALAKTAGFTEIKKRSLLTSMENYVTLHLEAGKPIYSPSFVYGLLRRVLPDDKVEMIEGLSLTADKTGAVFDVKQSDLDLFIAGAQKSAGSMSLEVVKVMPKLQEREPLPQKRFGGGGRGNRFGGGGGNRFGGGGGRGRGGSGGRGQRY

SEQ ID NO: 4228 - DNA, 1694 bp, Arabidopsis thaliana
gcatacatacataactccgtcatcttcgtctttactccaaaattccagacatttgaagcttttaagcatctgggtatttgatcttctatccacagatcatagaaacccaagaggcaaatgtctatttccctaaaaatttcccacatttcaagtttctccaacgatgggttcaatagtgtaaagcaatgcagagtgagtcaaaggtttgaaattagatcggtttgtttccgtagaagccctggtgttgaatctagacggatccatttaaattcggacttgtcttctcggaatttgagaaaccgatgtgtaggatcggatgtggttacgggtgaaatatccggtagatcgataccggattgggcttatagtggcgtaaaagatgagactttaagcgatttggagccggaacttgatgatggtgatggcggcgatgagaatgggaacaacgacggtggtggaaatggtggtaatggagacggaggaggaggaggtggagatggagaaggagatgatggagaggatgaagcagataaagctgaggagaaggagtttggtccgattttgaagtttgaagaagttatgaaagagacagaacgtagagggattacgttaccggaggatatgttggaagcggctaaatccgtggggattcgaaaactgttccttcttcgttaccttgatctacagggttctgtttggccgcttgggtttctgatgagatcatgtgcgatgcttcgaaatagaatgcttgcagatccttcatttctcttcaaagttggaaccgaggtagccatagactcttgctgtgcaacttttgcagaagtacagaagagaggggaagatttctggtcagagtttgagttatatgctgctgatcttttagttggtcttgtggttgatgttgccttggttggacttttggctccttatgcacgtatcgggaagccgtctgtggcatcaacaggtttattcaaggatcttaaacgtgcttgtgcatcccttcctagcagtgtttttgaagcagaaagaccgggttgtaaattctcagttaaccagcggattgcaacattcttctacaagggcctcttgtatgggtcggttggattcggctgcggcctcattggtcagggaattgcaaatctgatcatgacagcaaaacggagtgtgaagaaatcagaggaagacgtccctattccacctcttttcgaaagcgctgctctctggggtgtgttcctcggcttatcttccaatgcgcgttaccaaatcatcaacggcctcgaacgcgtcgtggaaggttctacagcggccaaacgtatccctgtggtcgctatggcattcacggtgggagtccggtttgctaacaatgtgtatggcggtatgcaatttgtagattgggctaaattgtccggcgttcagtaatcaaccggttcggttttgttacaaaccggatagtaaactagcctagatgtcaatcctcaggagtatgagagtatctctaatctgatggggaagtttagttatctgagtttcattagtgtgattaggttatttaccgagagctacagaaagagaatctggttcatgatacggaccggattcttctaaccggaatactactcgatacaacattttcaatttggttttggaagttgagtttctcatggtatccttgtctctcttattcatttttctgc

SEQ ID NO: 4229 - protein, 433 aa, Arabidopsis thaliana
MSISLKISHISSFSNDGFNSVKQCRVSQRFEIRSVCFRRSPGVESRRIHLNSDLSSRNLRNRCVGSDVVTGEISGRSIPDWAYSGVKDETLSDLEPELDDGDGGDENGNNDGGGNGGNGDGGGGGGDGEGDDGEDEADKAEEKEFGPILKFEEVMKETERRGITLPEDMLEAAKSVGIRKLFLLRYLDLQGSVWPLGFLMRSCAMLRNRMLADPSFLFKVGTEVAIDSCCATFAEVQKRGEDFWSEFELYAADLLVGLVVDVALVGLLAPYARIGKPSVASTGLFKDLKRACASLPSSVFEAERPGCKFSVNQRIATFFYKGLLYGSVGFGCGLIGQGIANLIMTAKRSVKKSEEDVPIPPLFESAALWGVFLGLSSNARYQIINGLERVVEGSTAAKRIPVVAMAFTVGVRFANNVYGGMQFVDWAKLSGVQ

SEQ ID NO: 4230 - protein, 279 aa, Arabidopsis thaliana
MKETERRGITLPEDMLEAAKSVGIRKLFLLRYLDLQGSVWPLGFLMRSCAMLRNRMLADPSFLFKVGTEVAIDSCCATFAEVQKRGEDFWSEFELYAADLLVGLVVDVALVGLLAPYARIGKPSVASTGLFKDLKRACASLPSSVFEAERPGCKFSVNQRIATFFYKGLLYGSVGFGCGLIGQGIANLIMTAKRSVKKSEEDVPIPPLFESAALWGVFLGLSSNARYQIINGLERVVEGSTAAKRIPVVAMAFTVGVRFANNVYGGMQFVDWAKLSGVQ

SEQ ID NO: 4231 - protein, 265 aa, Arabidopsis thaliana
MLEAAKSVGIRKLFLLRYLDLQGSVWPLGFLMRSCAMLRNRMLADPSFLFKVGTEVAIDSCCATFAEVQKRGEDFWSEFELYAADLLVGLVVDVALVGLLAPYARIGKPSVASTGLFKDLKRACASLPSSVFEAERPGCKFSVNQRIATFFYKGLLYGSVGFGCGLIGQGIANLIMTAKRSVKKSEEDVPIPPLFESAALWGVFLGLSSNARYQIINGLERVVEGSTAAKRIPVVAMAFTVGVRFANNVYGGMQFVDWAKLSGVQ

SEQ ID NO: 4232 - DNA, 1424 bp, Arabidopsis thaliana
atattcgtttcttcgatctgtgttttttagatctgtaagagttcaaaatggttgatcaagttcagcaccccactattgcgcagaaagctgccgggcagttcatgcgttcaagtgtttccaaggacgttcaagtgggttaccagaggccttctatgtatcaaagacatgcaacctacggaaactactccaatgctgcatttcaatttcctccgacatcccggatgttggcaacaactgcttctcccgtgtttgtccaaaccccaggagagaaggggttcactaactttgcccttgactttctgatgggtggtgtttctgctgccgtctccaagactgctgctgctcctattgaacgtgttaagcttttgatccagaaccaggatgagatgattaaagctggcaggctttctgaaccctacaagggtattggtgactgtttcggcaggacgattaaggatgaaggttttggttctctatggagaggaaacactgccaatgttatccgttatttccccactcaggccttgaactttgccttcaaagattacttcaaaagacttttcaactttaagaaggacagagatggttactggaagtggtttgctggtaacttggcatctggaggagcagctggtgcctcttcccttctgtttgtgtactcccttgactatgcccgtacccgtctagctaatgatgccaaggctgcaaagaaaggaggtggtggaagacagtttgatggtcttgttgatgtctacagaaagacacttaagactgatggtattgctggtctgtaccgtggattcaacatctcatgtgttggtatcattgtctaccgtggtctgtactttggactctatgactctgtgaagcctgttctcctcactggtgacttacaggacagtttcttcgctagtttcgctcttggatgggttattaccaatggtgcgggtcttgcatcctaccccattgacactgtccgcagaagaatgatgatgacgtctaatgaagctgtcaagtacaagagttctttggacgccttcaagcagatcctcaagaatgaaggagccaagtcactcttcaagggagctggtgccaacattctgcgtgctgttgcaggtgctggtgtgctttccggttacgacaaattgactctgattgtcttcggtaagaagtacggatcaggaggtgcctaagcatgcttcttcctccttttcgatttaattgcggtttaaggcccgcaataaactgagatgttgatgaaattttttttgcttaagacttagggaggcatgtgccctaaaccaaattttatatcgttctgacgccaactttttttacttatggaataattcatgtttgagagagtttgttagactcttcgattttaaagaattttggatttatgaaataaattcttctttttt

SEQ ID NO: 4233 - protein, 381 aa, Arabidopsis thaliana
MVDQVQHPTIAQKAAGQFMRSSVSKDVQVGYQRPSMYQRHATYGNYSNAAFQFPPTSRMLATTASPVFVQTPGEKGFTNFALDFLMGGVSAAVSKTAAAPIERVKLLIQNQDEMIKAGRLSEPYKGIGDCFGRTIKDEGFGSLWRGNTANVIRYFPTQALNFAFKDYFKRLFNFKKDRDGYWKWFAGNLASGGAAGASSLLFVYSLDYARTRLANDAKAAKKGGGGRQFDGLVDVYRKTLKTDGIAGLYRGFNISCVGIIVYRGLYFGLYDSVKPVLLTGDLQDSFFASFALGWVITNGAGLASYPIDTVRRRMMMTSNEAVKYKSSLDAFKQILKNEGAKSLFKGAGANILRAVAGAGVLSGYDKLTLIVFGKKYGSGGA

SEQ ID NO: 4234 - protein, 363 aa, Arabidopsis thaliana
MRSSVSKDVQVGYQRPSMYQRHATYGNYSNAAFQFPPTSRMLATTASPVFVQTPGEKGFTNFALDFLMGGVSAAVSKTAAAPIERVKLLIQNQDEMIKAGRLSEPYKGIGDCFGRTIKDEGFGSLWRGNTANVIRYFPTQALNFAFKDYFKRLFNFKKDRDGYWKWFAGNLASGGAAGASSLLFVYSLDYARTRLANDAKAAKKGGGGRQFDGLVDVYRKTLKTDGIAGLYRGFNISCVGIIVYRGLYFGLYDSVKPVLLTGDLQDSFFASFALGWVITNGAGLASYPIDTVRRRMMMTSNEAVKYKSSLDAFKQILKNEGAKSLFKGAGANILRAVAGAGVLSGYDKLTLIVFGKKYGSGGA

SEQ ID NO: 4235 - protein, 346 aa, Arabidopsis thaliana
MYQRHATYGNYSNAAFQFPPTSRMLATTASPVFVQTPGEKGFTNFALDFLMGGVSAAVSKTAAAPIERVKLLIQNQDEMIKAGRLSEPYKGIGDCFGRTIKDEGFGSLWRGNTANVIRYFPTQALNFAFKDYFKRLFNFKKDRDGYWKWFAGNLASGGAAGASSLLFVYSLDYARTRLANDAKAAKKGGGGRQFDGLVDVYRKTLKTDGIAGLYRGFNISCVGIIVYRGLYFGLYDSVKPVLLTGDLQDSFFASFALGWVITNGAGLASYPIDTVRRRMMMTSNEAVKYKSSLDAFKQILKNEGAKSLFKGAGANILRAVAGAGVLSGYDKLTLIVFGKKYGSGGA

SEQ ID NO: 4236 - DNA, 1044 bp, Arabidopsis thaliana
atcaacaagtctttctctctctctagacaaccacaagaacacaaaacacacaaaaacaaagaggttctttctttgaagaagaaatggaaaaagttgatgtttatgatgagcttgttaacctaaaggcaacagagctgagattgggattaccagggacagaagaaactgtttcttgtggaaaaagcaacaaaagagttttacctgaagctactgagaaagagattgaatccactggaaaaactgaaaccgcttctcctccaaaggctcagattgttggatggccaccagttagatcttacagaaagaacaatgttcagacaaagaagagtgaatctgaaggtcaaggaaactatgtgaaagtaagtatggatggtgctccatatctaaggaagatagatctaacgatgtataaacaatatccagagttgatgaaatcacttgaaaacatgtttaaattctctgtgggagaatattttgagagagaaggatataaaggctcagactttgtacctacttatgaagacaaagatggtgattggatgcttgttggtgatgttccttgggagatgtttgtttcgtcttgtaagaggctaaggatcatgaaaggatctgaagttaaaggtttaggttgtggtggtctttaacaaacctaattgagagataaagatcaaagagaaagattcaaaaacagagttttttgttctgtttcttgaaacagagtaaatatagctctgaaactgctcgggttcttggggagagatgtttcatacaatcatactttgtgaatgtttacctcatcggtaaaaagagagatgcttaaaatggtcttaagcataaaagtgtgagaaagatctaaatctaaactttagctgtaactctgtctccattaaagagaaaggttttgtggtattagaaagatctaatctgaagattatctttgtgtttttcactttttataatgttcttatcgaacagctttgatgtttttgatgtaattacccatttttctgttctgtttctcttcaaattaagatctgtctttgc

SEQ ID NO: 4237 - protein, 186 aa, Arabidopsis thaliana
MEKVDVYDELVNLKATELRLGLPGTEETVSCGKSNKRVLPEATEKEIESTGKTETASPPKAQIVGWPPVRSYRKNNVQTKKSESEGQGNYVKVSMDGAPYLRKIDLTMYKQYPELMKSLENMFKFSVGEYFEREGYKGSDFVPTYEDKDGDWMLVGDVPWEMFVSSCKRLRIMKGSEVKGLGCGGL

SEQ ID NO: 4238 - DNA, 2019 bp, Arabidopsis thaliana
aaaatcaaaagagaactaaaccaagaaacaaaatgggatacgaaaggctcggaccatccggagcaactggttcggtcaccacctccactactacagctccaatccttaaccaagtctccacgtcagagcaaccggagaacaacaaccgaagaagcaaaaagaagcttgtcgtatcatcaatcgtcttagccatctcacttatcctcgccgccgcgatcttcgccggagtcagatcacgtctcaagttaaaccaatcagtcccaggcctagctcgtaaaccgagtcaagcaatctctaaagcttgtgagttaactcgtttccccgagttatgcgttgactcactcatggactttcccggctcactcgccgcttcctcctctaaagatctcatccacgtgactgtgaacatgacgctccaccacttcagccacgctctctactcctctgcttccctctccttcgtcgacatgccgccacgtgctcgctcagcttacgactcttgcgtcgagctacttgacgattccgttgacgcgctatcacgcgctctttcctccgtcgtatcctcctccgctaagccgcaagatgttacaacgtggcttagcgcggctttaacaaaccatgacacgtgtactgaaggattcgacggcgtcgacgacggtggagtgaaggatcatatgacggcggcgttacagaatctttctgagcttgttagtaactgtcttgctatattctcggcgagtcacgacggtgacgatttcgccggagttccaatacagaacaggaggctgctgggagtggaggaacgagaagagaaattcccgagatggatgagaccaaaagaacgcgagatactggaaatgccggtatctcagatacaagctgatattatcgtatcgaaagacggtaacggcacgtgcaaaactatatcggaagctatcaagaaagctcctcagaacagtactcgccggataattatctacgtcaaggccggaagatatgaagagaacaacctcaaggtcggtaggaaaaaaattaatttgatgttcgttggagatggcaagggtaaaactgttatttcgggaggcaaaagtatatttgacaacatcactactttccacacggcgtcatttgctgcgaccggagctggatttattgcaagggacatcacattcgaaaactgggccggtccagcgaagcaccaagccgtggctctccgcatcggagctgaccacgcagtgatctaccgatgcaatataatcggttaccaagacacactctacgtccattcaaaccgccaattctttcgtgaatgcgatatctacggtacagtcgattttatctttggtaacgcagccgtcgtactacaaaactgtagcatctacgcacggaagccaatggattttcagaaaaatacaatcacggctcaaaacagaaaagatccgaaccaaaacaccggaatatcaatacatgcgtctagggttcttgcagcatccgatctccaagcgacaaacggtagtacacagacgtatctaggccgaccttggaagctattctctaggacagtgtatatgatgtcgtatatcggtggtcatgtacacacgagaggttggctcgagtggaacacaacatttgctttagatactttgtattatggagagtatttgaacagtggacctgggtcgggtctcgggcaacgtgtgagctggccgggttatcgggtcatcaattcgacggccgaggcaaaccggttcactgtggcagaatttatatacggttcctcgtggttgccatcgaccggagtttcgttcttggccggattaagcatataggtagagaaaaaattgaaatgcttatttttccgatgaattgtttcattcttacggtccttatattaatggacatatcagtattccaatatatatgagtatattttaacttttaattgtaatgtctccactctccagaggtattatttaataatagatgaacactcgaggataattttcccttgttttcttg

SEQ ID NO: 4239 - protein, 608 aa, Arabidopsis thaliana
NQKRTKPRNKMGYERLGPSGATGSVTTSTTTAPILNQVSTSEQPENNNRRSKKKLVVSSIVLAISLILAAAIFAGVRSRLKLNQSVPGLARKPSQAISKACELTRFPELCVDSLMDFPGSLAASSSKDLIHVTVNMTLHHFSHALYSSASLSFVDMPPRARSAYDSCVELLDDSVDALSRALSSVVSSSAKPQDVTTWLSAALTNHDTCTEGFDGVDDGGVKDHMTAALQNLSELVSNCLAIFSASHDGDDFAGVPIQNRRLLGVEEREEKFPRWMRPKEREILEMPVSQIQADIIVSKDGNGTCKTISEAIKKAPQNSTRRIIIYVKAGRYEENNLKVGRKKINLMFVGDGKGKTVISGGKSIFDNITTFHTASFAATGAGFIARDITFENWAGPAKHQAVALRIGADHAVIYRCNIIGYQDTLYVHSNRQFFRECDIYGTVDFIFGNAAVVLQNCSIYARKPMDFQKNTITAQNRKDPNQNTGISIHASRVLAASDLQATNGSTQTYLGRPWKLFSRTVYMMSYIGGHVHTRGWLEWNTTFALDTLYYGEYLNSGPGSGLGQRVSWPGYRVINSTAEANRFTVAEFIYGSSWLPSTGVSFLAGLSI

SEQ ID NO: 4240 - protein, 598 aa, Arabidopsis thaliana
MGYERLGPSGATGSVTTSTTTAPILNQVSTSEQPENNNRRSKKKLVVSSIVLAISLILAAAIFAGVRSRLKLNQSVPGLARKPSQAISKACELTRFPELCVDSLMDFPGSLAASSSKDLIHVTVNMTLHHFSHALYSSASLSFVDMPPRARSAYDSCVELLDDSVDALSRALSSVVSSSAKPQDVTTWLSAALTNHDTCTEGFDGVDDGGVKDHMTAALQNLSELVSNCLAIFSASHDGDDFAGVPIQNRRLLGVEEREEKFPRWMRPKEREILEMPVSQIQADIIVSKDGNGTCKTISEAIKKAPQNSTRRIIIYVKAGRYEENNLKVGRKKINLMFVGDGKGKTVISGGKSIFDNITTFHTASFAATGAGFIARDITFENWAGPAKHQAVALRIGADHAVIYRCNIIGYQDTLYVHSNRQFFRECDIYGTVDFIFGNAAVVLQNCSIYARKPMDFQKNTITAQNRKDPNQNTGISIHASRVLAASDLQATNGSTQTYLGRPWKLFSRTVYMMSYIGGHVHTRGWLEWNTTFALDTLYYGEYLNSGPGSGLGQRVSWPGYRVINSTAEANRFTVAEFIYGSSWLPSTGVSFLAGLSI

SEQ ID NO: 4241 - protein, 494 aa, Arabidopsis thaliana
MDFPGSLAASSSKDLIHVTVNMTLHHFSHALYSSASLSFVDMPPRARSAYDSCVELLDDSVDALSRALSSVVSSSAKPQDVTTWLSAALTNHDTCTEGFDGVDDGGVKDHMTAALQNLSELVSNCLAIFSASHDGDDFAGVPIQNRRLLGVEEREEKFPRWMRPKEREILEMPVSQIQADIIVSKDGNGTCKTISEAIKKAPQNSTRRIIIYVKAGRYEENNLKVGRKKINLMFVGDGKGKTVISGGKSIFDNITTFHTASFAATGAGFIARDITFENWAGPAKHQAVALRIGADHAVIYRCNIIGYQDTLYVHSNRQFFRECDIYGTVDFIFGNAAVVLQNCSIYARKPMDFQKNTITAQNRKDPNQNTGISIHASRVLAASDLQATNGSTQTYLGRPWKLFSRTVYMMSYIGGHVHTRGWLEWNTTFALDTLYYGEYLNSGPGSGLGQRVSWPGYRVINSTAEANRFTVAEFIYGSSWLPSTGVSFLAGLSI

SEQ ID NO: 4242 - DNA, 2145 bp, Arabidopsis thaliana
gagccgctgagaatttggtccccttggcacgtataaaccctagcagagacattaaaccctgaaagtaattagggatcactgttctccggctccggcgaaaaaatccctcgaaatcgatcctaacctcaattgattgaaggaagttatgtattcgctttcgaggattctccaaaggagtcaaagatataactttgcaccttcttcgtttggtgcggtcagtaaattagaagtatcaagtggtggtgataaagaacgggtctttaaatcatttggattgatttatagcaaacctcaaggtttagtcagactttattccgcaagagatgtgttttcacggttctttggcatccacaagctttcttctatagctgatgctaaagataaaggagatgaggtagttagggaagaggagctgtctgaatcagaggaggcggttcctgtttctggggatgtaccagagggagttgttgatgatgattctttgttcgagcctgaacttggtagtgacaatgatgatcttgaaattgaagagaagcattcgaaagatggtgggaaaccaactaagaaaagaggtcaatctgagctgtacgaatccattgttgcttataaatcagtgaaacatgttcttgaaaaatgggtcaaagaaggaaaagatttgagtcaagctgaggttactcttgctatacacaatctgcgtaaacgcaaatcctatgctatgtgtttgcagttgtgggagtggttgggagctaatacgcagtttgagttcacagaggcaaattatgcttctcagttggatttggtggccaaggtacatagtttacaaaaagctgaaatctttttgaaagatattccagaatcttctaggggagaagtagtatacagaaccctgctggcaaattgtgtacttaagcatcatgtaaataaagctgaagacattttcaacaaaatgaaagagctaaaatttccaacaagtgtgtttgcttgcaaccagctgcttctcctctacagtatgcatgatagaaagaagataagtgatgttttgttgctaatggagagagaaaacatcaagccgagtcgtgctacctatcattttttaatcaatagtaaaggtttagccggagacataactggaatggagaagatcgtggagacaattaaggaagaaggcatcgaactagatcctgaactgcagtctattctggctaagtactacataagagcggggcttaaagaaagagcacaagaccttatgaaggagatagaagggaaaggtttgcaacaaactccatgggtgtgccggtcattactcccactttatgcagacataggagacagtgacaatgtgagaagactgagtaggtttgttgatcaaaatccgagatacgataattgcatttctgccattaaagcatggggaaagctgaaggaagtcgaagaagcagaggcagtgtttgagagacttgtggagaaatacaaaattttccctatgatgccatattttgccctcatggagatatacacagagaacaagatgctagcaaaaggcagagatctggttaaaagaatgggaaatgcagggattgcgattgggccgtcgacatggcacgcgcttgtgaagctatacatcaaagcaggagaagttggaaaagctgagttgatattgaacagagctacaaaggataataagatgagacctatgttcactacttacatggcgattcttgaagaatatgcaaaaagaggcgatgttcataacacagagaaggtattcatgaaaatgaaaagggcaagctatgcagctcagcttatgcagtatgaaaccgtgctcctggcttatatcaacgccaaaactcctgcttacgggatgattgagaggatgaaggcagacaatgtgttcccgaacaagagtctagctgcgaaactggctcaggttaatccgtttaaaaagtgtccagtgtctgttttacttgacatataacgataatcatcttatgtattgagctgttaagtgtttgttctggttgcttccaagctaggaaataataaacagaggattcgtttttcttccaaagtttctcatttttgagtttgtgttcctgtggttttttgtaagtgacataaactggaataaaattgaactggatt

SEQ ID NO: 4243 - protein, 610 aa, Arabidopsis thaliana
MYSLSRILQRSQRYNFAPSSFGAVSKLEVSSGGDKERVFKSFGLIYSKPQGLVRLYSARDVFSRFFGIHKLSSIADAKDKGDEVVREEELSESEEAVPVSGDVPEGVVDDDSLFEPELGSDNDDLEIEEKHSKDGGKPTKKRGQSELYESIVAYKSVKHVLEKWVKEGKDLSQAEVTLAIHNLRKRKSYAMCLQLWEWLGANTQFEFTEANYASQLDLVAKVHSLQKAEIFLKDIPESSRGEVVYRTLLANCVLKHHVNKAEDIFNKMKELKFPTSVFACNQLLLLYSMHDRKKISDVLLLMERENIKPSRATYHFLINSKGLAGDITGMEKIVETIKEEGIELDPELQSILAKYYIRAGLKERAQDLMKEIEGKGLQQTPWVCRSLLPLYADIGDSDNVRRLSRFVDQNPRYDNCISAIKAWGKLKEVEEAEAVFERLVEKYKIFPMMPYFALMEIYTENKMLAKGRDLVKRMGNAGIAIGPSTWHALVKLYIKAGEVGKAELILNRATKDNKMRPMFTTYMAILEEYAKRGDVHNTEKVFMKMKRASYAAQLMQYETVLLAYINAKTPAYGMIERMKADNVFPNKSLAAKLAQVNPFKKCPVSVLLDI

SEQ ID NO: 4244 - protein, 420 aa, Arabidopsis thaliana
MCLQLWEWLGANTQFEFTEANYASQLDLVAKVHSLQKAEIFLKDIPESSRGEVVYRTLLANCVLKHHVNKAEDIFNKMKELKFPTSVFACNQLLLLYSMHDRKKISDVLLLMERENIKPSRATYHFLINSKGLAGDITGMEKIVETIKEEGIELDPELQSILAKYYIRAGLKERAQDLMKEIEGKGLQQTPWVCRSLLPLYADIGDSDNVRRLSRFVDQNPRYDNCISAIKAWGKLKEVEEAEAVFERLVEKYKIFPMMPYFALMEIYTENKMLAKGRDLVKRMGNAGIAIGPSTWHALVKLYIKAGEVGKAELILNRATKDNKMRPMFTTYMAILEEYAKRGDVHNTEKVFMKMKRASYAAQLMQYETVLLAYINAKTPAYGMIERMKADNVFPNKSLAAKLAQVNPFKKCPVSVLLDI

SEQ ID NO: 4245 - protein, 343 aa, Arabidopsis thaliana
MKELKFPTSVFACNQLLLLYSMHDRKKISDVLLLMERENIKPSRATYHFLINSKGLAGDITGMEKIVETIKEEGIELDPELQSILAKYYIRAGLKERAQDLMKEIEGKGLQQTPWVCRSLLPLYADIGDSDNVRRLSRFVDQNPRYDNCISAIKAWGKLKEVEEAEAVFERLVEKYKIFPMMPYFALMEIYTENKMLAKGRDLVKRMGNAGIAIGPSTWHALVKLYIKAGEVGKAELILNRATKDNKMRPMFTTYMAILEEYAKRGDVHNTEKVFMKMKRASYAAQLMQYETVLLAYINAKTPAYGMIERMKADNVFPNKSLAAKLAQVNPFKKCPVSVLLDI

SEQ ID NO: 4246 - DNA, 1049 bp, Arabidopsis thaliana
gttttcttctccgtttctcgctcatcgcttactgaaaccagaaacaagtttagggtttttgcggaggtttcaaagttaacaatggcggaagagcacaagcacgaggaatcgatcatggagaagatctctgagaagatccatggtcacgatgactcttcttcttcttcttccgattcggatgacgataagaactctgcgtctctcaaaaccaagatttatcgtcttttcggaagagaacagcctcttcacaagcttttcggtggcggaaaacctgccgacattttcctgtggaggaacaagaaggtatcaggaggagtattgggtgctgcaactgtttcctggatcttattcgagttacttgagtacaatcttctcacactcttcggccacatttcaattcttgctctcgcagtattgttcttgtggtctagtgctagtaccttcattcacaagtcacctcttcatatccctgaagttcacatccccgaggatgttgttcttcagcttgcttctggattaaggattgaaatcaatcgtggatttactgttcttagggacattgcatcaggaagagatcttaagaagtttctgttggtgattgctggtttatgggttttgtccaaagttggtagctcctgcaacttcttgaccttaatctacatcgcaactgtacttctcttcacgattcccgtgctttacgagaagtatgaagataaagtagatgactttggtgaaaaggcgatgagggagatcaagaagcaatacgtggagttcgacgtgaaggttttgagtaaggtgatgagcaaaattcctaaaggagcctttgcctttatcaagaagaaagattagagagtgtgtaagtttctctcatcatcattatccgagattattcaagattgatatataaatctcgaagcattgtttttttggctgttggttaataaccctttattctctcaaatatctgctatatggattttattcgggttttaaccaaattttatagcaatattgaatctgattgaaatttgaattgatccttttttcgt

SEQ ID NO: 4247 - protein, 282 aa, Arabidopsis thaliana
VFFSVSRSSLTETRNKFRVFAEVSKLTMAEEHKHEESIMEKISEKIHGHDDSSSSSSDSDDDKNSASLKTKIYRLFGREQPLHKLFGGGKPADIFLWRNKKVSGGVLGAATVSWILFELLEYNLLTLFGHISILALAVLFLWSSASTFIHKSPLHIPEVHIPEDVVLQLASGLRIEINRGFTVLRDIASGRDLKKFLLVIAGLWVLSKVGSSCNFLTLIYIATVLLFTIPVLYEKYEDKVDDFGEKAMREIKKQYVEFDVKVLSKVMSKIPKGAFAFIKKKD

SEQ ID NO: 4248 - protein, 255 aa, Arabidopsis thaliana
MAEEHKHEESIMEKISEKIHGHDDSSSSSSDSDDDKNSASLKTKIYRLFGREQPLHKLFGGGKPADIFLWRNKKVSGGVLGAATVSWILFELLEYNLLTLFGHISILALAVLFLWSSASTFIHKSPLHIPEVHIPEDVVLQLASGLRIEINRGFTVLRDIASGRDLKKFLLVIAGLWVLSKVGSSCNFLTLIYIATVLLFTIPVLYEKYEDKVDDFGEKAMREIKKQYVEFDVKVLSKVMSKIPKGAFAFIKKKD

SEQ ID NO: 4249 - protein, 244 aa, Arabidopsis thaliana
MEKISEKIHGHDDSSSSSSDSDDDKNSASLKTKIYRLFGREQPLHKLFGGGKPADIFLWRNKKVSGGVLGAATVSWILFELLEYNLLTLFGHISILALAVLFLWSSASTFIHKSPLHIPEVHIPEDVVLQLASGLRIEINRGFTVLRDIASGRDLKKFLLVIAGLWVLSKVGSSCNFLTLIYIATVLLFTIPVLYEKYEDKVDDFGEKAMREIKKQYVEFDVKVLSKVMSKIPKGAFAFIKKKD

SEQ ID NO: 4250 - DNA, 1272 bp, Arabidopsis thaliana
caagcaattactctctctctctctctttcttctgccatcgccaaaaacttgtcttttgcttctgggttttgcttcttatttttggtaagattgaatttttctttcaccccatttattatttcgtgcttttagatcgttgattgatctgtatcctgcagtgatcattctttaatttacgaaattgtttttttgtgtgtgtgtgtgtgtgtgtgtgtgtgattgataatgttgttggggactttaggtgccatttttgtcgattttgtggtttaatttacctattgtatattgtgattgaatcgattgggagggtattgagaggtggttgtttcaatctaacaaaatcaagtgcaaatccattttatagccacttatcttctgctagtagatctacttgagttttaagagatgtgtcttctttaataccattgtggttccttttttaatttcatggcttaagtgaatgttttttggcttctttggttgctatagcttatctctgatttgattaagtagaatcctttgtactgaagtgactttttttgtatggatctaatgtagaatatagtcattggagatggctccggttggtcctcgatccggtgatgcgatcttctctagcattgatcgtgtgaatgcggagttgttcacgttgacgtatggtgctattgtgcgtcaattgcttactgacctggaagaagtagaggaagttaacaaacagcttgatcaaatgggatacaacattggaatccgacttatcgatgagtttctagccaaatctggtgtttccagatgcgttgactttaaggaaactgctgaaatgattgccaaggtgggtttcaagatgttcttaggagtcactgcatcagtgacaagctgggactcggacgggacttgctgcagtataatcttagaggacaatcccctagttgatttcgtcgagcttcccgatacttgccaaggtctttactactgcaatgtcttaagtggagtcattagaggagctttggaaatggtctcaatgaagacagaagtgacatggacgcgtgatgttcttcgaggagatgatgcttatgagttgcaagtaaagctactgaaacaagtcgctgaggaatatccttacaaggatgatgaataaatatcaatctcttatcttccctcttcctcaaagagaaactaattactgttttgtagtctctttctctgcattcttagctttgttttttttatccgcaaacacaaaactataagctatgaaactaaatactgttt

SEQ ID NO: 4251 - protein, 186 aa, Arabidopsis thaliana
MAPVGPRSGDAIFSSIDRVNAELFTLTYGAIVRQLLTDLEEVEEVNKQLDQMGYNIGIRLIDEFLAKSGVSRCVDFKETAEMIAKVGFKMFLGVTASVTSWDSDGTCCSIILEDNPLVDFVELPDTCQGLYYCNVLSGVIRGALEMVSMKTEVTWTRDVLRGDDAYELQVKLLKQVAEEYPYKDDE

SEQ ID NO: 4252 - protein, 135 aa, Arabidopsis thaliana
MGYNIGIRLIDEFLAKSGVSRCVDFKETAEMIAKVGFKMFLGVTASVTSWDSDGTCCSIILEDNPLVDFVELPDTCQGLYYCNVLSGVIRGALEMVSMKTEVTWTRDVLRGDDAYELQVKLLKQVAEEYPYKDDE

SEQ ID NO: 4253 - protein, 105 aa, Arabidopsis thaliana
MIAKVGFKMFLGVTASVTSWDSDGTCCSIILEDNPLVDFVELPDTCQGLYYCNVLSGVIRGALEMVSMKTEVTWTRDVLRGDDAYELQVKLLKQVAEEYPYKDDE

SEQ ID NO: 4254 - DNA, 1408 bp, Arabidopsis thaliana
aaaaacaacaacagttttgatcactctgtctctcttactctatcttcttcccaagttcttgtcttttgatggccgaaaccctagaaccctccctcgtcggggaaatcgacacttctgcgcctttcgagtccgtgagagaagccgccactcgctttggtggatttggtttctggaaaccttcttcccttaacatctccgaagcttctcagaacgaagttggtatggttttgaaagcgagtgagttagagaaggaactgattgagaaagaaggagaaactttgaaggtgttgaagtcacttgagtcgaccaaagccattgttgaagagctcaaatcaaagatacagaacaaggaggataaagaaaattgtgacatgaatgttttcaaggaattgaaccaagcaaagatgaatctgtgcaagacgacaaaagatttggctgctattcgcgtgtctgttgggttactaaacaagagattggaagaggaaagagctgcacttgagaagacacgagagagactaaactctgagaatgcagctgaaatgtccatggagattcagagactaagttatgaagctaaggaatttagtagaacaggagagaatgttcggtatgcggttaataaagctgtggctgagattgaacaaacgagaaacaagattgaagctgctgagatgcgtttgatcgctgctagaaagatgaaggaagctgctagagcggctgaagcagttgcaatcgctgaaatcaaggcggttacaagaagaggaagaaggagaagaagaggaggaaatggtgaggagactatgcaggaggagattcttgagacgattgatgaaacagcaagagaaatcagaagcagtaggaggacacttgaagaaggtttggccaaaatggaagcagaagaaggaaattggtggtggacagaacagaggaggagatcatcatgttcggctaagttcaagaaccctccttatatgatggatgtaaaaggtctgaatatgatgatgaatggtgatgggacatcatcctcagttgctgtcttgaaaccaacaatgtctattgggcagatacttagtaggaaactacttcttgctgatgagtcagcgatgatgatgaatgggagagtttcgttgggtcagattcttggaaagactaactttggagatagagagaaggaaaaaaggttcaatgggaagaggaagcggttcggattcgcaaacttgtctgtgatgttaaataaagagagtaagaagaagaataagaagaagaagatagctttgaacttaagttgttaaaagagtgattgaaatggtctaatctttacattaggacttgttgtttgtgtgttatctatttgttttcgatgtgtttattggtgtatgctaaatattgaaatgagatgtgatttgct

SEQ ID NO: 4255 - protein, 407 aa, Arabidopsis thaliana
MAETLEPSLVGEIDTSAPFESVREAATRFGGFGFWKPSSLNISEASQNEVGMVLKASELEKELIEKEGETLKVLKSLESTKAIVEELKSKIQNKEDKENCDMNVFKELNQAKMNLCKTTKDLAAIRVSVGLLNKRLEEERAALEKTRERLNSENAAEMSMEIQRLSYEAKEFSRTGENVRYAVNKAVAEIEQTRNKIEAAEMRLIAARKMKEAARAAEAVAIAEIKAVTRRGRRRRRGGNGEETMQEEILETIDETAREIRSSRRTLEEGLAKMEAEEGNWWWTEQRRRSSCSAKFKNPPYMMDVKGLNMMMNGDGTSSSVAVLKPTMSIGQILSRKLLLADESAMMMNGRVSLGQILGKTNFGDREKEKRFNGKRKRFGFANLSVMLNKESKKKNKKKKIALNLSC

SEQ ID NO: 4256 - protein, 356 aa, Arabidopsis thaliana
MVLKASELEKELIEKEGETLKVLKSLESTKAIVEELKSKIQNKEDKENCDMNVFKELNQAKMNLCKTTKDLAAIRVSVGLLNKRLEEERAALEKTRERLNSENAAEMSMEIQRLSYEAKEFSRTGENVRYAVNKAVAEIEQTRNKIEAAEMRLIAARKMKEAARAAEAVAIAEIKAVTRRGRRRRRGGNGEETMQEEILETIDETAREIRSSRRTLEEGLAKMEAEEGNWWWTEQRRRSSCSAKFKNPPYMMDVKGLNMMMNGDGTSSSVAVLKPTMSIGQILSRKLLLADESAMMMNGRVSLGQILGKTNFGDREKEKRFNGKRKRFGFANLSVMLNKESKKKNKKKKIALNLSC

SEQ ID NO: 4257 - protein, 306 aa, Arabidopsis thaliana
MNVFKELNQAKMNLCKTTKDLAAIRVSVGLLNKRLEEERAALEKTRERLNSENAAEMSMEIQRLSYEAKEFSRTGENVRYAVNKAVAEIEQTRNKIEAAEMRLIAARKMKEAARAAEAVAIAEIKAVTRRGRRRRRGGNGEETMQEEILETIDETAREIRSSRRTLEEGLAKMEAEEGNWWWTEQRRRSSCSAKFKNPPYMMDVKGLNMMMNGDGTSSSVAVLKPTMSIGQILSRKLLLADESAMMMNGRVSLGQILGKTNFGDREKEKRFNGKRKRFGFANLSVMLNKESKKKNKKKKIALNLSC

SEQ ID NO: 4258 - DNA, 849 bp, Arabidopsis thaliana
accctaaaactcagcaacaatggccgttaccttttcagatctacacacagaggagggtgtcaaatccgtggaggagcacctcgccggaaaaacctacatctccggagatcaattgtctgtggatgatgtcaaggtttacgctgccgttccagtgaaacccagcgatgccttccccaatgctagcaagtggtacgagtccgtggcttcccaacttgctaaaagtttccctggccgttggagtacaattcggtggctctgctgctgctgctccagctgttgaagctgaggcacctgcagctgcagctgatgatgatgatgacatggatctctttggtgacgagaccgaagaagaaaagaaagctgcagaggagagggaggctgctaagaaggacaccaagaagcctaaagagagtggaaagtcttctgtgctcatggatgttaagccatgggatgatgaaaccgacatgaagaaactggaagaggctgttcgtggtgttgagatgcctggtcttttctggggagcctcaaaacttgtaccagttggttatgggatcaagaaactcacaattatgttcacgattgttgatgacctcgtgtccccggacaacctcattgaagacttcctcacctcagagcctaacaacgagtacatccagagttgtgacattgtcgctttcaacaagatttagagacttcaaatttctccttaccgaaacatatcagaatttcaagttttgttttcgtttgtgttgtttaccgaaatgtttctttcctagttgcaagaccgctttcatgttacaataacactaaattttcaatggttactattccgttgcatcattgttaagg

SEQ ID NO: 4259 - protein, 174 aa, Arabidopsis thaliana
MPSPMLASGTSPWLPNLLKVSLAVGVQFGGSAAAAPAVEAEAPAAAADDDDDMDLFGDETEEEKKAAEEREAAKKDTKKPKESGKSSVLMDVKPWDDETDMKKLEEAVRGVEMPGLFWGASKLVPVGYGIKKLTIMFTIVDDLVSPDNLIEDFLTSEPNNEYIQSCDIVAFNKI

SEQ ID NO: 4260 - protein, 170 aa, Arabidopsis thaliana
MLASGTSPWLPNLLKVSLAVGVQFGGSAAAAPAVEAEAPAAAADDDDDMDLFGDETEEEKKAAEEREAAKKDTKKPKESGKSSVLMDVKPWDDETDMKKLEEAVRGVEMPGLFWGASKLVPVGYGIKKLTIMFTIVDDLVSPDNLIEDFLTSEPNNEYIQSCDIVAFNKI

SEQ ID NO: 4261 - protein, 122 aa, Arabidopsis thaliana
MDLFGDETEEEKKAAEEREAAKKDTKKPKESGKSSVLMDVKPWDDETDMKKLEEAVRGVEMPGLFWGASKLVPVGYGIKKLTIMFTIVDDLVSPDNLIEDFLTSEPNNEYIQSCDIVAFNKI

SEQ ID NO: 4262 - DNA, 1282 bp, Arabidopsis thaliana
aataattgtgatttcgaaaaacgcgagtccaaaaaaagaaaatcgagatcggaaactccgcacggttcccgcctcaaccaaatcaaaaaccctaatttccccaccaatcagatcctccacaattatcccaccgacgaatcctatcaatctctctagatgactgaagatagcagcaaatcagtgtcggaacaaacccgacccgttttgagtgatttgacgaatcttccaaagaaaagagggatttcatcgattttgggtgatttgcttgatgaatctggtaagaccgttgctcatgaagtttcaaaagagaagttttcaaagaggttgtgtttagtcgtagatgatttggttaaggaaaatgctacacctttggatacaattcaagggtcttgttcgtttgataagaatacttctggtgatgctgttgacaaagaagagtatcatgatgctgtaatggaattctccagtggagattgcaaagcattgaaggaaagcaagtctatacagatctattttgaacctggtgatagagacggtgcacgagagttaaacgcagctgctaatgcggatcaaaccgatgttactggtggagaaggcttggctttatctttgttaactagcgataccgagagccggaatctactgaagactgggaaggagttgtctgattgtcagaatttgagatcatttgaaatgagtagatgctccaatgttaagaataaggagcatgtgaatctgaatacaggagatgacttgcttagatcatgctgttgttcattctgtctcacagcttcgtatatttggtcagatcttaattaccaggatagcaaaggacgattatccgccatgaagaagagtcagaaagcagctagcaacttgattcaagggaatgttaaagaaagatctacagattttcatgccacgggaaactcagtttctgcaaaacaagaatccaagctcatggcccagtggaggtcgctctttcttagcatgggcgatatcctcagtgaagagagtagccaccttcaaaacagctttgtgagaatgaaaaaattgcgagacgattgcaagatggatttagagagagcaatgaaaaaacctcaacaacacaacacccagtaagtactcttacacatactgttatgaatccaacttctctttctggaaatttttataagtatctggatgcaatgtatagatgcttaaaatcgtaaatgattatggatgtgtgcaactattgttggggttgttaagttcttctatcaaactccttgtgttcttc

SEQ ID NO: 4263 - protein, 321 aa, Arabidopsis thaliana
MTEDSSKSVSEQTRPVLSDLTNLPKKRGISSILGDLLDESGKTVAHEVSKEKFSKRLCLVVDDLVKENATPLDTIQGSCSFDKNTSGDAVDKEEYHDAVMEFSSGDCKALKESKSIQIYFEPGDRDGARELNAAANADQTDVTGGEGLALSLLTSDTESRNLLKTGKELSDCQNLRSFEMSRCSNVKNKEHVNLNTGDDLLRSCCCSFCLTASYIWSDLNYQDSKGRLSAMKKSQKAASNLIQGNVKERSTDFHATGNSVSAKQESKLMAQWRSLFLSMGDILSEESSHLQNSFVRMKKLRDDCKMDLERAMKKPQQHNTQ

SEQ ID NO: 4264 - protein, 222 aa, Arabidopsis thaliana
MEFSSGDCKALKESKSIQIYFEPGDRDGARELNAAANADQTDVTGGEGLALSLLTSDTESRNLLKTGKELSDCQNLRSFEMSRCSNVKNKEHVNLNTGDDLLRSCCCSFCLTASYIWSDLNYQDSKGRLSAMKKSQKAASNLIQGNVKERSTDFHATGNSVSAKQESKLMAQWRSLFLSMGDILSEESSHLQNSFVRMKKLRDDCKMDLERAMKKPQQHNTQ

SEQ ID NO: 4265 - DNA, 832 bp, Arabidopsis thaliana
aatcattcatccgtctctgcaaacaaaggaagaagaatcaagatggctctggaaatctgtgtgaaagctgctgttggtgctcctgatcatctcggcgactgtccgttcagccaacgggctcttctcacactcgaggagaagagtcttacctacaaaatccatctgattaacctctctgacaaaccccagtggttcttggacattagtcctcaagggaaagtaccagtgcttaagatcgacgacaagtgggtgactgattccgacgtcatcgttggtatactcgaggagaagtatcctgatccaccactcaagactcctgctgaatttgcctctgttggatccaacatttttggtacttttgggacattcttgaagagcaaagactccaatgacggatctgaacatgccttgcttgttgagctagaagctttggaaaaccatcttaagagtcacgatggcccttttatcgccggagaaagagtttccgcagtggatctaagcttagcaccaaagctttaccaccttcaagttgctcttggccatttcaaaagctggtctgtccctgagagctttccccatgtccataactacatgaagactctgttctcgctcgactcttttgagaaaactaagaccgaggaaaagtatgtgatctctggatgggctcccaaggttaacccttgaaactatgcaccgttatgagatcgttggtgtggtaatgttgttcaaggtctctctcttatatcagtcaaataatgtacttggacctttttatgtaatgtactgtatcaatcaaataagaagcctattttgaaataagatttgcctccat

SEQ ID NO: 4266 - protein, 227 aa, Arabidopsis thaliana
NHSSVSANKGRRIKMALEICVKAAVGAPDHLGDCPFSQRALLTLEEKSLTYKIHLINLSDKPQWFLDISPQGKVPVLKIDDKWVTDSDVIVGILEEKYPDPPLKTPAEFASVGSNIFGTFGTFLKSKDSNDGSEHALLVELEALENHLKSHDGPFIAGERVSAVDLSLAPKLYHLQVALGHFKSWSVPESFPHVHNYMKTLFSLDSFEKTKTEEKYVISGWAPKVNP

SEQ ID NO: 4267 - protein, 213 aa, Arabidopsis thaliana
MALEICVKAAVGAPDHLGDCPFSQRALLTLEEKSLTYKIHLINLSDKPQWFLDISPQGKVPVLKIDDKWVTDSDVIVGILEEKYPDPPLKTPAEFASVGSNIFGTFGTFLKSKDSNDGSEHALLVELEALENHLKSHDGPFIAGERVSAVDLSLAPKLYHLQVALGHFKSWSVPESFPHVHNYMKTLFSLDSFEKTKTEEKYVISGWAPKVNP

SEQ ID NO: 4268 - DNA, 1274 bp, Arabidopsis thaliana
gatcgtcttctctttccctaaacacactgattattttctctccgacgccgccatgtctctgctctcagatctcgttaacctcaacctcaccgatgccaccgggaaaatcatcgccgaatacatatggatcggtggatctggaatggatatcagaagcaaagccaggacactaccaggaccagtgactgatccatcaaagcttcccaagtggaactacgacggatccagcaccggtcaggctgctggagaagacagtgaagtcattctataccctcaggcaatattcaaggatcccttcaggaaagacaacaacatcctggtgatgtgtgatgcttacacaccagctggtgatcctattccaaccaacaagaggcacaacgctgctaagatcttcagccaccccgacgttgccaaggaggagccttggtatgggattgagcaagaatacactttgatgcaaaaggatgtgaactggccaattggttggcctgttggtggctaccctggccctcagggaccttactactgtggtgtgggagctgacaaagccattggtcgtgacattgtggatgctcactacaaggcctgtctttacgccggtattggtatttctggtatcaatggagaagtcatgccaggccagtgggagttccaagtcggccctgttgagggtattagttctggtgatcaagtctgggttgctcgataccttctcgagaggatcactgagatctctggtgtaattgtcagcttcgacccgaaaccagtcccgggtgactggaatggagctggagctcactgcaactacagcactaagacaatgagaaacgatggaggattagaagtgatcaagaaagcgatagggaagcttcagctgaaacacaaagaacacattgctgcttacggtgaaggaaacgagcgtcgtctcactggaaagcacgaaaccgcagacatcaacacattctcttggggagtcgcgaaccgtggagcgtcagtgagagtgggacgtgacacagagaaggaaggtaaagggtacttcgaagacagaaggccagcttctaacatggatccttacgttgtcacctccatgatcgctgagacgaccatactcggttgatgacacatttcatgatttgatttctctccaatttggttttttttttttcccttttgattgcacttttcgataataaaaaaataattcttattatgggcgtattgttgtgacattttgtgttttgtttcgaataattaaataagcgcttcttaaggtg

SEQ ID NO: 4269 - protein, 371 aa, Arabidopsis thaliana
IVFSFPKHTDYFLSDAAMSLLSDLVNLNLTDATGKIIAEYIWIGGSGMDIRSKARTLPGPVTDPSKLPKWNYDGSSTGQAAGEDSEVILYPQAIFKDPFRKDNNILVMCDAYTPAGDPIPTNKRHNAAKIFSHPDVAKEEPWYGIEQEYTLMQKDVNWPIGWPVGGYPGPQGPYYCGVGADKAIGRDIVDAHYKACLYAGIGISGINGEVMPGQWEFQVGPVEGISSGDQVWVARYLLERITEISGVIVSFDPKPVPGDWNGAGAHCNYSTKTMRNDGGLEVIKKAIGKLQLKHKEHIAAYGEGNERRLTGKHETADINTFSWGVANRGASVRVGRDTEKEGKGYFEDRRPASNMDPYVVTSMIAETTILG

SEQ ID NO: 4270 - protein, 354 aa, Arabidopsis thaliana
MSLLSDLVNLNLTDATGKIIAEYIWIGGSGMDIRSKARTLPGPVTDPSKLPKWNYDGSSTGQAAGEDSEVILYPQAIFKDPFRKDNNILVMCDAYTPAGDPIPTNKRHNAAKIFSHPDVAKEEPWYGIEQEYTLMQKDVNWPIGWPVGGYPGPQGPYYCGVGADKAIGRDIVDAHYKACLYAGIGISGINGEVMPGQWEFQVGPVEGISSGDQVWVARYLLERITEISGVIVSFDPKPVPGDWNGAGAHCNYSTKTMRNDGGLEVIKKAIGKLQLKHKEHIAAYGEGNERRLTGKHETADINTFSWGVANRGASVRVGRDTEKEGKGYFEDRRPASNMDPYVVTSMIAETTILG

SEQ ID NO: 4271 - protein, 324 aa, Arabidopsis thaliana
MDIRSKARTLPGPVTDPSKLPKWNYDGSSTGQAAGEDSEVILYPQAIFKDPFRKDNNILVMCDAYTPAGDPIPTNKRHNAAKIFSHPDVAKEEPWYGIEQEYTLMQKDVNWPIGWPVGGYPGPQGPYYCGVGADKAIGRDIVDAHYKACLYAGIGISGINGEVMPGQWEFQVGPVEGISSGDQVWVARYLLERITEISGVIVSFDPKPVPGDWNGAGAHCNYSTKTMRNDGGLEVIKKAIGKLQLKHKEHIAAYGEGNERRLTGKHETADINTFSWGVANRGASVRVGRDTEKEGKGYFEDRRPASNMDPYVVTSMIAETTILG

SEQ ID NO: 4272 - DNA, 1135 bp, Arabidopsis thaliana
agaaccaaggaaaaggaaagagtcggcgaaaaagatataaaaaagccagcgagagagacaaagggtttttgagtatctcgcgaggttttacatagatttctccattatggattcgatgatgaatcagaagactgttttggctgtgacggatgatgtggtgttacctgttagctctgttttagctataatgaaagagcttggaaaggaagtgattgagagttttgatcctctgattattactcaagcatccacaataaatcagtttcctttggatgcttcctctgtggaggcggtattagccatttccaaaacatctgatttcccaagtgataaaatatgtggtgagttctcaagaatcttgaagcctggcggcacggtttctgtgtgcaaagttttggagggtgaaacgggagaaattcaacagaccattcaaaggagagtgacattggctggttttcttgagccacagtgtcttgatttgaaatcaattaaattgtctacgttcagtttatcctttgggattaaggcaaagaaaccttcttggaagattggttcatcatttgctctcaaaaagcctgtaacaaatctctttaagattgatctagatgacgacgtggatcttattgatgaagattctcttttaacagaggaggacttgatgaagccacagcttcctgttgccagcggttgtgagaccactaaaaaagcttgcaagaactgcgtctgtggtagagctgaaattgaggagaaagctgtgaagctgggcctcacagaggatcaaatcgagaatccacaatcatcatgcggcagctgtgggctcggtgatgccttccgctgcggtacatgcccttacaagggtctgccacccttcaaattaggcgagaaggtaaccctatctcaaaacttccttgaagctgacatataagcatgtgaaaggcatcttcatacatgggtgtttctcgccgaggccaaaaccttttgctaatcgcagagtagtttcatcatttactttgtgccttttcgtataatttgtttgttggtacttcttttattttgtggctctaaaagcttgtagaatattgtttgggttgcccacaaagcacacaccttagtatcaatgaagaacggttttgcc

SEQ ID NO: 4273 - protein, 272 aa, Arabidopsis thaliana; identical to SEQ ID NO: 3200

SEQ ID NO: 4274 - protein, 269 aa, Arabidopsis thaliana; identical to SEQ ID NO: 3201

SEQ ID NO: 4275 - protein, 268 aa, Arabidopsis thaliana
MNQKTVLAVTDDVVLPVSSVLAIMKELGKEVIESFDPLIITQASTINQFPLDASSVEAVLAISKTSDFPSDKICGEFSRILKPGGTVSVCKVLEGETGEIQQTIQRRVTLAGFLEPQCLDLKSIKLSTFSLSFGIKAKKPSWKIGSSFALKKPVTNLFKIDLDDDVDLIDEDSLLTEEDLMKPQLPVASGCETTKKACKNCVCGRAEIEEKAVKLGLTEDQIENPQSSCGSCGLGDAFRCGTCPYKGLPPFKLGEKVTLSQNFLEADI

SEQ ID NO: 4276 - DNA, 514 bp, Arabidopsis thaliana
acgtctctcttcttcaatttcttcacgattctacttttgcgttatccccaaaattggcaaccaaaaccaaacctctctctcttattgaaaccaacaatgagtccgatcgtcataacccagttagctacaggaatcagcgttttagccggtgcggtctttatcaaatcagtcatggaccaaaagcctatggctggtcaattccctcgttgtccgacttgtaacggtactggacgagtcacgtgtttctgttctcgatggtccgatggtgacgttggatgtcgtaggtgttctggttcaggtcgtgcggcttgtagcaattgtggtggttctggaactggtagacccttaccggctcagattacggttcagccaccgaatcgtccttattgatgattctcaagaaatttgtatactttgtaaacgattcttctctcttgaactctctcactctctgtcttgtaagttgattatatatatatacacatagatgagaacagatttgatagcttctgtc

SEQ ID NO: 4277 - protein, 129 aa, Arabidopsis thaliana
TSLFFNFFTILLLRYPQNWQPKPNLSLLLKPTMSPIVITQLATGISVLAGAVFIKSVMDQKPMAGQFPRCPTCNGTGRVTCFCSRWSDGDVGCRRCSGSGRAACSNCGGSGTGRPLPAQITVQPPNRPY

SEQ ID NO: 4278 - protein, 97 aa, Arabidopsis thaliana
MSPIVITQLATGISVLAGAVFIKSVMDQKPMAGQFPRCPTCNGTGRVTCFCSRWSDGDVGCRRCSGSGRAACSNCGGSGTGRPLPAQITVQPPNRPY

SEQ ID NO: 4279 - protein, 74 aa, Arabidopsis thaliana
MVTLDVVGVLVQVVRLVAIVVVLELVDPYRLRLRFSHRIVLIDDSQEICILCKRFFSLELSHSLSCKLIIYIYT

SEQ ID NO: 4280 - DNA, 1096 bp, Arabidopsis thaliana
atgagtagccgatggaatcgtacgatctacgttgggaatttgcctggagatattcgcaagtgtgaggttgaagatctcttctacaagtatggaccaattgtggacattgatttgaagattccaccgagacctcctggttatgcctttgtcgagtttgaagatcctcgtgatgcagacgatgcaatttatggacgtgatggttatgattttgatgggtgtcgacttcgggttgagattgcacatggtggtcgtagattttcaccatcagttgataggtacagcagcagctacagtgcgagccgtgcaccttcaagacgctctgactaccgcgtgcttgtgaccggattaccgccttctgcttcgtggcaggaccttaaggatcacatgcgcaaagctggagatgtctgcttctctgaagttttccctgaccgtaaaggcatgtctggggttgtggattatagcaactatgatgatatgaagtacgcaataaggaaacttgatgccactgaatttcgaaatgctttctctagtgcttatatacgggtgagggaatatgagtcgaggagtgtgagtcgaagcccagatgattctaaaagctatagaagcaggagtcggagccgtggtccaagctgtagctatagtagcaagagcaggagtgtgtcacctgctagatccatttccccgcgttcacggccccttagtcgttctcgctcgctatacagctctgtctcaaggtcccaatcaagatcaaaatcaagatcaagatcaagatcgaattctccagtttcacctgtgatatctggttgaaaatgaaaactggccactggctgtacccgaatcgtctcaagcttctcaggctccactgctaatagaatttgattccgatttgggattattatactggtcttcttgtatgggacgaccaatatgtctttctagttttagttgtgaacctggaattggtctgttattgtgtcattaaaaagccggaaactctgtctcggctgcataataaagttcatcagacattgtgttgggtgtggtgaggtttttccatacatatacatttacattacaactactggtgtcttttatg

SEQ ID NO: 4281 - protein, 268 aa, Arabidopsis thaliana
MSSRWNRTIYVGNLPGDIRKCEVEDLFYKYGPIVDIDLKIPPRPPGYAFVEFEDPRDADDAIYGRDGYDFDGCRLRVEIAHGGRRFSPSVDRYSSSYSASRAPSRRSDYRVLVTGLPPSASWQDLKDHMRKAGDVCFSEVFPDRKGMSGVVDYSNYDDMKYAIRKLDATEFRNAFSSAYIRVREYESRSVSRSPDDSKSYRSRSRSRGPSCSYSSKSRSVSPARSISPRSRPLSRSRSLYSSVSRSQSRSKSRSRSRSNSPVSPVISG

SEQ ID NO: 4282 - protein, 140 aa, Arabidopsis thaliana
MRKAGDVCFSEVFPDRKGMSGVVDYSNYDDMKYAIRKLDATEFRNAFSSAYIRVREYESRSVSRSPDDSKSYRSRSRSRGPSCSYSSKSRSVSPARSISPRSRPLSRSRSLYSSVSRSQSRSKSRSRSRSNSPVSPVISG

SEQ ID NO: 4283 - DNA, 1226 bp, Arabidopsis thaliana
tttctttcgtttggcctttgatcctatcataagctttttttcgtttatcaatcttctcgattcagccacaattcttgtttctcagataattcatctcctttctttgattcgtttccttctcttctgtcactcagatctagatctagatctaggtttttttctttctcatcggaaatttggcttagaggcttgttttgatctagggtttggtttttgggaattttgaaaaaaaaaaaaacaaaattaggaatgaatctatgagctactcaatcctgtttcgtcggattcgaattctacactctttctccgtcgtttacctctactacacctacgttttctcatgaagtaatcgttctcgatctcagttttcgtttttgatctaacttattctttgatagatttagaaatcggggattttcagattgtgtttttgagaggtttttataggaaaatatctctagaagaagaagaataatattatattgattttaattttggtgagaagaagtcaaaaagtcaacgagaaatggggtcgttgcaaatgcaaacaagtcctgaatccgataatgatccgaggtacgccacggtgacggatgagaggaagaggaagagaatgatctctaacagagaatctgctcggaggtcaaggatgaggaaacagaagcaacttggtgatttgatcaacgaagtcactcttctcaagaatgataacgctaaaatcactgagcaggttgatgaagcttcaaagaaatacattgaaatggagtctaagaacaatgtcttgagggcacaggcttcggagttgacggataggttgagatcattgaactctgtgcttgagatggttgaagaaattagtggtcaggctttggatattcctgagattcctgaatctatgcagaacccttggcagatgccttgtccaatgcaaccaatcagagcttctgctgatatgtttgattgctgaagatggatgattcatatctgaaggatcaaaaatgaagcattgagttcgagtctttggtctgttttacttactgtccttgttgtaacaattagtgtgtcattggtgaattgagtcttgtgttgtcaatggacaacgcaatctttatgcaatttcaatttgttcgtgtctttgtatggttttgtagcctcagtcctctagtcttgtgtctcatgtaattggtgtctaatgtgtttcttattgaattcaagctttcttattg

SEQ ID NO: 4284 - protein, 146 aa, Arabidopsis thaliana
MGSLQMQTSPESDNDPRYATVTDERKRKRMISNRESARRSRMRKQKQLGDLINEVTLLKNDNAKITEQVDEASKKYIEMESKNNVLRAQASELTDRLRSLNSVLEMVEEISGQALDIPEIPESMQNPWQMPCPMQPIRASADMFDC

SEQ ID NO: 4285 - protein, 141 aa, Arabidopsis thaliana
MQTSPESDNDPRYATVTDERKRKRMISNRESARRSRMRKQKQLGDLINEVTLLKNDNAKITEQVDEASKKYIEMESKNNVLRAQASELTDRLRSLNSVLEMVEEISGQALDIPEIPESMQNPWQMPCPMQPIRASADMFDC

SEQ ID NO: 4286 - protein, 117 aa, Arabidopsis thaliana
MISNRESARRSRMRKQKQLGDLINEVTLLKNDNAKITEQVDEASKKYIEMESKNNVLRAQASELTDRLRSLNSVLEMVEEISGQALDIPEIPESMQNPWQMPCPMQPIRASADMFDC

SEQ ID NO: 4287 - DNA, 983 bp, Arabidopsis thaliana
agcgggtacacataacttagctcgttaatgttaagccatggctcgtcttatcccaatttctcaacctttcttctcttcaaacactaaacctccaccaccaccaccaatcgccgccgcacaaatctccgaccacctgccacagattatctctcgccgagacgccaccgttcttctctcctccgccacttctcttctcctcactctctcccccaccaatcccgctttcgccttctccttaggaatctgacctaaagagtggcttaaagatcagaagaagaagtcttcaagattcttacttgctcccattgatgcaactcgtcaagctcttcaatctgcttatctttcgttaactagtgaatctgattatacagagaaagatttggagaatctgcagaatctgtttaagtcttctgcaagagattgtgttcctaaagaaagaagctctcttgttgattttcaatctaaatccggagttgaggtttgtacatttaagcttgttgtgaagaatgctgcttcattacttgatgataaggatccagttaaattagaagcagagaatatacttgatgatcttgttaggtctttcggttcccttatcgtgttgacgaatggggttgatatgaatcttccttctgatagaaaaaaagttgcagatggggttacagagactatctcttatcttgacaaatttgagaagggtgtcaaagactgtcttgagatttgagatgaagtctagttctctcttccttttcttcttgtgaaatcattatggctgaataggtgtaccaactttttttacaactgtctaagtgagagacgatatctcgttctatatgaatatactcttatgcttgatgctgagcttcattcatcgtttgagttacagtaaggaaggacgatcatgctagttatcgaaaggcatgacaagcgttctttcttagttgtaattttcaagcagatagaaatatagaactttagagttt

SEQ ID NO: 4288 - protein, 69 aa, Arabidopsis thaliana
MARLIPISQPFFSSNTKPPPPPPIAAAQISDHLPQIISRRDATVLLSSATSLLLTLSPTNPAFAFSLGI

SEQ ID NO: 4289 - protein, 35 aa, Arabidopsis thaliana
MGLQRLSLILTNLRRVSKTVLRFEMKSSSLFLFFL

SEQ ID NO: 4290 - protein, 34 aa, Arabidopsis thaliana
MNLPSDRKKVADGVTETISYLDKFEKGVKDCLEI

SEQ ID NO: 4291 - DNA, 1891 bp, Arabidopsis thaliana
aaaaaaaagcttccattgatttcgcatcagatcttgctctctcttctatctctgcgattcttctggatcttctcaaatccatgaaggaatcagatctaaccaccgaaccaatcgcacaaaatctaatcaagctaataagcaatgtctgtttctcagtcttcgttttcacagttctcatcttcacagtaatcgcagtaacttaccaaccaccagatccatggcttgaatctgctccagcactcaccaaactcctaaccgaaaccgaaaacgcaactttcaaaatcgacggttcgattctcaaaaccggcgaagatctcgcttcatctccgtcatcatcacctccgtcgaactccacagagcaagtcacggaggcgacgattgagaaatccgaggcgaaaatcggtaatatgactgtgaagaactctatagattgtgatgaggatttgaagattgtgaattgttctgatccgagagttttagttgctgttgagaggtttaatttgaaggtttttaaatctattgtgttcttagagtacgaaactccggttaacggatcgaaactagacgaatgcgatgtttcttggaggtttaggaataagaaggagaagtcatggaggagatacagagatttcaggaggtttaggtttggatttggtgagaattgtacttataaagtgtttcatactagtggttggcattctggtgttaatgctcgtaggcctaggattagtagaccgagctcgagtcgaggagctcgcggtggtgattcggagattaatgatacgattccgactcttggttcgcagacgagtttccggagagggaagtatttgtattattcgcggggtggtgattattgtaagggtatgaatcagtatatgtggagtttcttgtgtggtttaggtgaagcaatgtatttgaataggacttttgtgatggatttgagtttgtgtttgtcttcgagttatagttctaaggggaaagatgaggaaggtaaggattttcggtattattttgatttcgagcatcttaaggagacggcttcgattgttgaagagggtgagttcttgagagattggaagaaatggaatcggttgcataaacggaaagttcctgttaggaaggttaagacgcatagagtgtcgcctttgcagcttagtaaagataagagtacgattatatggaggcagtttgatactcctgagcctgaaaactattggtatagagtttgtgaagggcaagcatcgaagtatgttgagaggccgtggcatgcgttgtggaagtcgaagaggttgatgaatattgtctctgagattagtgggaaaatggactgggattttgatgctgttcatgtggttagaggcgagaaagcgaagaacaagaagctatggccacatttggatgcagacacatggcctgatgcgatattgaccaaacttaaaggattggttcaggtgtggaggaatttgtacgttgcaactaatgaaccgttttataattactttgacaagttgaggtctcagtacaaggttcacttgcttgatgactatagctacttgtggggaaataagagtgaatggtacaatgagactagtctcttgaacaatgggaaaccagttgagtttgatgggtacatgagagtagctgttgatacagaggtgttttatagaggaaagactcgcgtcgagacgttctataaccttaccacggactgcaaagacgggatcaatacatgctaaattgatcattcaggttgtgatatgttttcattgttttatttgtttgtgtatcaaattcagttatgcttgtgttgtttaccttgtgttctactagctattgaagagtgtacgtaacgtttacattttttgattcatatccttaattctgtaag

SEQ ID NO: 4292 - protein, 578 aa, Arabidopsis thaliana
KKASIDFASDLALSSISAILLDLLKSMKESDLTTEPIAQNLIKLISNVCFSVFVFTVLIFTVIAVTYQPPDPWLESAPALTKLLTETENATFKIDGSILKTGEDLASSPSSSPPSNSTEQVTEATIEKSEAKIGNMTVKNSIDCDEDLKIVNCSDPRVLVAVERFNLKVFKSIVFLEYETPVNGSKLDECDVSWRFRNKKEKSWRRYRDFRRFRFGFGENCTYKVFHTSGWHSGVNARRPRISRPSSSRGARGGDSEINDTIPTLGSQTSFRRGKYLYYSRGGDYCKGMNQYMWSFLCGLGEAMYLNRTFVMDLSLCLSSSYSSKGKDEEGKDFRYYFDFEHLKETASIVEEGEFLRDWKKWNRLHKRKVPVRKVKTHRVSPLQLSKDKSTIIWRQFDTPEPENYWYRVCEGQASKYVERPWHALWKSKRLMNIVSEISGKMDWDFDAVHVVRGEKAKNKKLWPHLDADTWPDAILTKLKGLVQVWRNLYVATNEPFYNYFDKLRSQYKVHLLDDYSYLWGNKSEWYNETSLLNNGKPVEFDGYMRVAVDTEVFYRGKTRVETFYNLTTDCKDGINTC

SEQ ID NO: 4293 - protein, 552 aa, Arabidopsis thaliana
MKESDLTTEPIAQNLIKLISNVCFSVFVFTVLIFTVIAVTYQPPDPWLESAPALTKLLTETENATFKIDGSILKTGEDLASSPSSSPPSNSTEQVTEATIEKSEAKIGNMTVKNSIDCDEDLKIVNCSDPRVLVAVERFNLKVFKSIVFLEYETPVNGSKLDECDVSWRFRNKKEKSWRRYRDFRRFRFGFGENCTYKVFHTSGWHSGVNARRPRISRPSSSRGARGGDSEINDTIPTLGSQTSFRRGKYLYYSRGGDYCKGMNQYMWSFLCGLGEAMYLNRTFVMDLSLCLSSSYSSKGKDEEGKDFRYYFDFEHLKETASIVEEGEFLRDWKKWNRLHKRKVPVRKVKTHRVSPLQLSKDKSTIIWRQFDTPEPENYWYRVCEGQASKYVERPWHALWKSKRLMNIVSEISGKMDWDFDAVHVVRGEKAKNKKLWPHLDADTWPDAILTKLKGLVQVWRNLYVATNEPFYNYFDKLRSQYKVHLLDDYSYLWGNKSEWYNETSLLNNGKPVEFDGYMRVAVDTEVFYRGKTRVETFYNLTTDCKDGINTC

SEQ ID NO: 4294 - protein, 443 aa, Arabidopsis thaliana
MTVKNSIDCDEDLKIVNCSDPRVLVAVERFNLKVFKSIVFLEYETPVNGSKLDECDVSWRFRNKKEKSWRRYRDFRRFRFGFGENCTYKVFHTSGWHSGVNARRPRISRPSSSRGARGGDSEINDTIPTLGSQTSFRRGKYLYYSRGGDYCKGMNQYMWSFLCGLGEAMYLNRTFVMDLSLCLSSSYSSKGKDEEGKDFRYYFDFEHLKETASIVEEGEFLRDWKKWNRLHKRKVPVRKVKTHRVSPLQLSKDKSTIIWRQFDTPEPENYWYRVCEGQASKYVERPWHALWKSKRLMNIVSEISGKMDWDFDAVHVVRGEKAKNKKLWPHLDADTWPDAILTKLKGLVQVWRNLYVATNEPFYNYFDKLRSQYKVHLLDDYSYLWGNKSEWYNETSLLNNGKPVEFDGYMRVAVDTEVFYRGKTRVETFYNLTTDCKDGINTC

SEQ ID NO: 4295 - DNA, 648 bp, Arabidopsis thaliana
acatctgaattttgtctgatccaggaaaaagaagaaaatggcgtttgtgacaactgcggaagtttgtgacgcgaatcaagagctgattcggagtggtcagctacgagctttgcaacccattttccagatttatggccgtcgacaaatattctcaggaccagttgtcactgtcaaagtttttgaagacaatggcttaatccgtcaattcatcgaggagaaaggaaacggtagagttcttgtggtggatggtggagggagtcaacgatgtgcaatactcggaggtaaccccgttgttcaagctcagaacaacggatgggcaggaatcgttgtgaacggatgcatcagagacgtcgatgagatcaacggttgtgatatcggagtgagagctttggcctctcatccgataaaagcgagtaagaaaggacttggagaacaacgagttccggtaaatatcgcagggactcggatttgtgatggtgaatggctttatgcagatactgatgggattcttgtctcccaaattgagttatccgtttaataaaaaaggctttgatcagttaccaaaaaaaaaaacagaacgtggtttgtgttcatcttcttgtacttaagagattgttgaattataatggaaaataaatttttgttttg

SEQ ID NO: 4296 - protein, 166 aa, Arabidopsis thaliana
MAFVTTAEVCDANQELIRSGQLRALQPIFQIYGRRQIFSGPVVTVKVFEDNGLIRQFIEEKGNGRVLVVDGGGSQRCAILGGNPVVQAQNNGWAGIVVNGCIRDVDEINGCDIGVRALASHPIKASKKGLGEQRVPVNIAGTRICDGEWLYADTDGILVSQIELSV

SEQ ID NO: 4297 - DNA, 895 bp, Arabidopsis thaliana
gatcgagaaatggagaataatccaagaagctcatcgtctctccctctagccgggcgtgtagctatagtgaccggagccaccagaggcatgggccgtgaaatcgcgattcacctccactctcttggtgcaagagtcaccatcaattatgtctcgagctcatcaaaagctgaactcttggtttcagaactaaacgactcatctcaattaaagtcagcgatcgcagttaaagcagatgtgtcagacccggaccagatcaacaacttgtttgatcaaacagaacaagagttcggatctaaagttcacatcgtcgtgaattgtgcaggtgttttggatccaaagtatccatctttatccgagacgacactagaagatttcgataacacattcacaataaacacaagagggtctttcttgtgttgcaaggaagcagctaaaagggttatgagaggaggtggtggaagaatcattatgatgtctacatcaatggttggtggtctcgccccgggttatggagtttacgcagcatcaaaggccgccgttgagacaatggtgaaagtgttggcgaaggagcttaagggaagccggataaccgcgaattgcgtggcgccagggccggttgcgacggagatgttttatgctggaaagagtgatgaaacggtgaaaatgcttgcaggggcttgtcctatggggaggatcggtgagtcaaaggatataaccgagattgtagggtttttggccggtgatggtggtgaatggattaacggtcaagttattagagccaatggaggctttgttgtctaataaatgaagaactaacattggaatttgatgttgtcttcttcttttcgtgtgttgatctacttttatgtcaatgatgatgagttgtttattgggc

SEQ ID NO: 4298 - protein, 266 aa, Arabidopsis thaliana
DREMENNPRSSSSLPLAGRVAIVTGATRGMGREIAIHLHSLGARVTINYVSSSSKAELLVSELNDSSQLKSAIAVKADVSDPDQINNLFDQTEQEFGSKVHIVVNCAGVLDPKYPSLSETTLEDFDNTFTINTRGSFLCCKEAAKRVMRGGGGRIIMMSTSMVGGLAPGYGVYAASKAAVETMVKVLAKELKGSRITANCVAPGPVATEMFYAGKSDETVKMLAGACPMGRIGESKDITEIVGFLAGDGGEWINGQVIRANGGFVV

SEQ ID NO: 4299 - protein, 263 aa, Arabidopsis thaliana
MENNPRSSSSLPLAGRVAIVTGATRGMGREIAIHLHSLGARVTINYVSSSSKAELLVSELNDSSQLKSAIAVKADVSDPDQINNLFDQTEQEFGSKVHIVVNCAGVLDPKYPSLSETTLEDFDNTFTINTRGSFLCCKEAAKRVMRGGGGRIIMMSTSMVGGLAPGYGVYAASKAAVETMVKVLAKELKGSRITANCVAPGPVATEMFYAGKSDETVKMLAGACPMGRIGESKDITEIVGFLAGDGGEWINGQVIRANGGFVV

SEQ ID NO: 4300 - protein, 237 aa, Arabidopsis thaliana
MGREIAIHLHSLGARVTINYVSSSSKAELLVSELNDSSQLKSAIAVKADVSDPDQINNLFDQTEQEFGSKVHIVVNCAGVLDPKYPSLSETTLEDFDNTFTINTRGSFLCCKEAAKRVMRGGGGRIIMMSTSMVGGLAPGYGVYAASKAAVETMVKVLAKELKGSRITANCVAPGPVATEMFYAGKSDETVKMLAGACPMGRIGESKDITEIVGFLAGDGGEWINGQVIRANGGFVV

SEQ ID NO: 4301 - DNA, 683 bp, Arabidopsis thaliana
aacaacttaaacagatatttcataaggaaaatgaagggtgagtttttcacattgatggcaataatgtctctcctcttagccttctcgttagtccatggaggaggagagtctggaacaccttctaatgcagccgctaccccgactagcccaaccgaaggatccagtggttcaagtggttcagctcatggacctaattggggatatagttggggatggggttcagccccgggaggtggttatggctatggttctggttcgggttcgtcaccagatggaggaggaaaaggggctggattcgggtttggttcggggtcaggttcaggaactggatttgggtctggctcgggaggaggaggagccacagacggtggttctggccatggaagtgggaccggacacgctggttaaggcggtggctcaggaagtggaaatggtgaaggatctcctggtcgtagagagaggagccaacaccgctaaaagaagttttcttgttattattactaccttaacacaatcacacatgcgtaagatgataagactaaaagaaggaaaaagaaaaatactatagtagcatcttaattaattaatgcataaataaggaccaaaggaataagtagttgggctttaattaccgctgtactttgtaatataactaaacctataatatattgtgttcttgcgcc

SEQ ID NO: 4302 - protein, 157 aa, Arabidopsis thaliana
MEEESLEHLLMQPLPRLAQPKDPVVQVVQLMDLIGDIVGDGVQPREVVMAMVLVRVRHQMEEEKGLDSGLVRGQVQELDLGLAREEEEPQTVVLAMEVGPDTLVKAVAQEVEMVKDLLVVERGANTAKRSFLVIITTLTQSHMRKMIRLKEGKRKIL

SEQ ID NO: 4303 - protein, 147 aa, Arabidopsis thaliana
MQPLPRLAQPKDPVVQVVQLMDLIGDIVGDGVQPREVVMAMVLVRVRHQMEEEKGLDSGLVRGQVQELDLGLAREEEEPQTVVLAMEVGPDTLVKAVAQEVEMVKDLLVVERGANTAKRSFLVIITTLTQSHMRKMIRLKEGKRKIL

SEQ ID NO: 4304 - protein, 135 aa, Arabidopsis thaliana
NNLNRYFIRKMKGEFFTLMAIMSLLLAFSLVHGGGESGTPSNAAATPTSPTEGSSGSSGSAHGPNWGYSWGWGSAPGGGYGYGSGSGSSPDGGGKGAGFGFGSGSGSGTGFGSGSGGGGATDGGSGHGSGTGHAG

SEQ ID NO: 4305 - DNA, 1218 bp, Arabidopsis thaliana
aaactttatgccaaactaaatttattctccttggcgtcttgttgtgttaatcctcaagcaaacgacccgtttctgtcgccaagtcaacccgacccgacttcgttcccatcggttgatcggccgggacctgattgcgtttagcctcccgaaatctacgggcaaagttgatccctctggtatggctgaaaaggaagtggtttctgcctcaactttagaatctaagatcactgaggatcatcatgacatctggatccgaggagcgatggaaaagagccgctcctccaacatcagtgttctgaaggatagattcatagctgctgaggattctgctctagtttccaaggatgttgcacaaaaggatattgagattctcttgagacgagtgaaaactgctacagctttattgacttacctgaaatctaaagcgacaactgtggctgctgccgatttggccaatctttcacttgaaactgaccagctccaagatacaatagacgaacatgatgggacttatgtcactgagatgcttcagcatgtagagaccgttacaggcgtcatggagtctctggctaggcgtgcttttatcgccgaatcagaagccgctatcgagaaaggaaaggttgtgctaagccaagaggaaattcaaagaaaggttggccaactcgagaacatgtccgtgaagttagaggacatggaaaagtttgctcttgggaccagtagtattctctgtgaaatgcggcagagggttgatgatttggttgaagagacctctagacagaagcaaagagctactgaaaatgagctggaactcagtcgcgtcaggagagactttgagtctcttaaatcgtatgttacaagtctcattagcgtcagagaaactctcgtctcatccgagaagcagttccaaacaatcgagaggctttttgaacggcttgttgcaaagacaacgcagttggaaagcaagaaagtgcagaaagaagcagaggttcagaaactaatggaagagaatgtaagactgacggctcttgtggataagaaagaggcacagcttctggccatgaatgagcagtgcaaaatgatggccctaagctctatatgatgcttagagatgaatattgctctacttaatctttcttccacttgtaacataaagaaactcttatttgatacaacttccatgtttgttgatatcctaaaggcaacaaaatatttgtcccg

SEQ ID NO: 4306 - protein, 306 aa, Arabidopsis thaliana
MAEKEVVSASTLESKITEDHHDIWIRGAMEKSRSSNISVLKDRFIAAEDSALVSKDVAQKDIEILLRRVKTATALLTYLKSKATTVAAADLANLSLETDQLQDTIDEHDGTYVTEMLQHVETVTGVMESLARRAFIAESEAAIEKGKVVLSQEEIQRKVGQLENMSVKLEDMEKFALGTSSILCEMRQRVDDLVEETSRQKQRATENELELSRVRRDFESLKSYVTSLISVRETLVSSEKQFQTIERLFERLVAKTTQLESKKVQKEAEVQKLMEENVRLTALVDKKEAQLLAMNEQCKMMALSSI

SEQ ID NO: 4307 - protein, 278 aa, Arabidopsis thaliana
MEKSRSSNISVLKDRFIAAEDSALVSKDVAQKDIEILLRRVKTATALLTYLKSKATTVAAADLANLSLETDQLQDTIDEHDGTYVTEMLQHVETVTGVMESLARRAFIAESEAAIEKGKVVLSQEEIQRKVGQLENMSVKLEDMEKFALGTSSILCEMRQRVDDLVEETSRQKQRATENELELSRVRRDFESLKSYVTSLISVRETLVSSEKQFQTIERLFERLVAKTTQLESKKVQKEAEVQKLMEENVRLTALVDKKEAQLLAMNEQCKMMALSSI

SEQ ID NO: 4308 - protein, 191 aa, Arabidopsis thaliana
MLQHVETVTGVMESLARRAFIAESEAAIEKGKVVLSQEEIQRKVGQLENMSVKLEDMEKFALGTSSILCEMRQRVDDLVEETSRQKQRATENELELSRVRRDFESLKSYVTSLISVRETLVSSEKQFQTIERLFERLVAKTTQLESKKVQKEAEVQKLMEENVRLTALVDKKEAQLLAMNEQCKMMALSSI

SEQ ID NO: 4309 - DNA, 1277 bp, Arabidopsis thaliana
tgagctactagtactaagctacaccacggggtttaatttgtgaaatccgaaactagggagactaaatccgaatagatatagatagcctaagggattcggggctgcaacaaaatcactcccactcactgcgaacgtcgactatggcggcgacgtcgctggttctgacgtgcgcatcccctctattcagcagccctcgggttatttctgctacgaagaagctgactacagagttgtcgatttctacagctaaattccgaagaagatgctcgggaaacaatgatgaagtgcttctagaaggaatgccaccggagtattacgatgatgaatggcaagctcgacagagagagaagaccaaagaactgcggcggatgcagcgggaggaagaagaagaagaggagagaaagattgaagaataccgtgaaattggcacgaggttgaaggaatttcccgagcaagacttaaggaaagccagaaagctcgtctccagcttcatcagagctgccgaggaagtcgaagagagaattgaagaagcagccgagaaaggagaacttgacgagcttgtcctcatgatcatatggaaccggcttgaccttgctaggcgcgatgatgagaaggacgccatcagaagtcttgatcttttgtatagaagagtcgagacagagatcttaaaacggcaagcaagtcctgcaatgaaactgctgaatgatcttctaaatatgcatgatggctttgaagacgatgcttggctcaaggactgcagaaaacgaatggctgagaccttcccccgagaagaccccttcagcattctaatgccaccgggattcgacattgatatgcatcaaggacagttgcgaccgcccattgagactgagacagacaacacccttctgagagtagactttgtaagagaagtggatgcactgctacaggaagtgaggatagaggaagacgctacaactggtagcaaaggagaagggcttgatcctgaagctatagcacttaagtttaagcaacaggagaagcaacgaaccatccgccaaattgaagccattcttgatttagccctcaacttgaagtggtaggcagttaactagaatatcaatctatacgccataataatttttttaagatagaccctagagttagattgattcaggcgtttttgtttagaaatgaatggagtctaaataataggttttggctaaaaattccaaatccaaatgttgctgactatctctctgctcatagtctccaccacaatcatctcttcctctttc

SEQ ID NO: 4310 - protein, 313 aa, Arabidopsis thaliana
MAATSLVLTCASPLFSSPRVISATKKLTTELSISTAKFRRRCSGNNDEVLLEGMPPEYYDDEWQARQREKTKELRRMQREEEEEEERKIEEYREIGTRLKEFPEQDLRKARKLVSSFIRAAEEVEERIEEAAEKGELDELVLMIIWNRLDLARRDDEKDAIRSLDLLYRRVETEILKRQASPAMKLLNDLLNMHDGFEDDAWLKDCRKRMAETFPREDPFSILMPPGFDIDMHQGQLRPPIETETDNTLLRVDFVREVDALLQEVRIEEDATTGSKGEGLDPEAIALKFKQQEKQRTIRQIEAILDLALNLKW

SEQ ID NO: 4311 - protein, 260 aa, Arabidopsis thaliana
MPPEYYDDEWQARQREKTKELRRMQREEEEEEERKIEEYREIGTRLKEFPEQDLRKARKLVSSFIRAAEEVEERIEEAAEKGELDELVLMIIWNRLDLARRDDEKDAIRSLDLLYRRVETEILKRQASPAMKLLNDLLNMHDGFEDDAWLKDCRKRMAETFPREDPFSILMPPGFDIDMHQGQLRPPIETETDNTLLRVDFVREVDALLQEVRIEEDATTGSKGEGLDPEAIALKFKQQEKQRTIRQIEAILDLALNLKW

SEQ ID NO: 4312 - protein, 237 aa, Arabidopsis thaliana
MQREEEEEEERKIEEYREIGTRLKEFPEQDLRKARKLVSSFIRAAEEVEERIEEAAEKGELDELVLMIIWNRLDLARRDDEKDAIRSLDLLYRRVETEILKRQASPAMKLLNDLLNMHDGFEDDAWLKDCRKRMAETFPREDPFSILMPPGFDIDMHQGQLRPPIETETDNTLLRVDFVREVDALLQEVRIEEDATTGSKGEGLDPEAIALKFKQQEKQRTIRQIEAILDLALNLKW

SEQ ID NO: 4313 - DNA, 1224 bp, Arabidopsis thaliana
cgagagaggagaacaatggaagagaagaagaagacgatggagatggaagcaacaacaatgaaaggcacggcggcggaagatataacggagagactctcttctctcgacaatctctattttccacgcgccgtccaattaaccgctgcatcttccgaccaacgcaaatccatcctcctcgacctcctccgtcgtgatcccgccgtttttctagagagatatggatcggagctactagtagatgaattgcttgagtttgatgctatgaaacatgactacgaggttgattggcatttgaaaaacctgcggaagaagataagtccgacttcagaagagattaaatcgaggtctgtagctgtgaggaataggagattggcttatttgaataagcttgtatccgagggacagtatttctcagaggatgctatgagagatagagagccgtatctacatcatgagtatgttgggaagtttcaggatgtgatgggaaggaacatggctaggcctggagaacgttggtctgagactttgatgagacgggctgaggaagcggtgttggttactcgtattagagaggagcagcagaggttaggtgtttcagagagtgattgggttggtaatgagaagatggaggaatcagaagaagaggaagaggaggaatcagaagaggaggaagaagaagaagatgaagaagcgaagaatcctacagaagctagctcttcaagtctgaatggtaaagaacagaaagagaaggcaacaacagtcttaccgccagaggagatgcaagatatgatggatcagttcacatcaatcatggaacagaagttcttatcgggagaagatcatcaacatttggattacgcaaagatagacaatgacgagactcttgatgatcattggcttcgagagattggccgtgacgctgaagataagtactttgatgaagactaattggatatgtaagatatgatctctcctctctctctctctcgttacctgcagagttatatatatcatatgatagagagtgctatcatcggattacaagtccaaacaccaacacaacgtcatgttaagttttggttgagagattattcatcaaatctctatgtacactaatagaattggttcaaattatatggcccagaatagtaaagcggtgcgatgataagaattgttttttgggcaaatataatcatgaaatagtaaagggaaaaccaaaattcc

SEQ ID NO: 4314 - protein, 315 aa, Arabidopsis thaliana
RERRTMEEKKKTMEMEATTMKGTAAEDITERLSSLDNLYFPRAVQLTAASSDQRKSILLDLLRRDPAVFLERYGSELLVDELLEFDAMKHDYEVDWHLKNLRKKISPTSEEIKSRSVAVRNRRLAYLNKLVSEGQYFSEDAMRDREPYLHHEYVGKFQDVMGRNMARPGERWSETLMRRAEEAVLVTRIREEQQRLGVSESDWVGNEKMEESEEEEEEESEEEEEEEDEEAKNPTEASSSSLNGKEQKEKATTVLPPEEMQDMMDQFTSIMEQKFLSGEDHQHLDYAKIDNDETLDDHWLREIGRDAEDKYFDED

SEQ ID NO: 4315 - protein, 310 aa, Arabidopsis thaliana
MEEKKKTMEMEATTMKGTAAEDITERLSSLDNLYFPRAVQLTAASSDQRKSILLDLLRRDPAVFLERYGSELLVDELLEFDAMKHDYEVDWHLKNLRKKISPTSEEIKSRSVAVRNRRLAYLNKLVSEGQYFSEDAMRDREPYLHHEYVGKFQDVMGRNMARPGERWSETLMRRAEEAVLVTRIREEQQRLGVSESDWVGNEKMEESEEEEEEESEEEEEEEDEEAKNPTEASSSSLNGKEQKEKATTVLPPEEMQDMMDQFTSIMEQKFLSGEDHQHLDYAKIDNDETLDDHWLREIGRDAEDKYFDED

SEQ ID NO: 4316 - protein, 303 aa, Arabidopsis thaliana
MEMEATTMKGTAAEDITERLSSLDNLYFPRAVQLTAASSDQRKSILLDLLRRDPAVFLERYGSELLVDELLEFDAMKHDYEVDWHLKNLRKKISPTSEEIKSRSVAVRNRRLAYLNKLVSEGQYFSEDAMRDREPYLHHEYVGKFQDVMGRNMARPGERWSETLMRRAEEAVLVTRIREEQQRLGVSESDWVGNEKMEESEEEEEEESEEEEEEEDEEAKNPTEASSSSLNGKEQKEKATTVLPPEEMQDMMDQFTSIMEQKFLSGEDHQHLDYAKIDNDETLDDHWLREIGRDAEDKYFDED

SEQ ID NO: 4317 - DNA, 1269 bp, Arabidopsis thaliana
accattccaaaatagtcaccgcccaaaaaaaaaaaaatcctttttttctcttcttgagagagagaaagagagagggagacaagtttgttctggataaaaagacaattcatttctattttaattgtctgcaaaattctcacgggccatcggagagaggagacagaggtggtgctgcacaagaatccttcctcctatatcctacaagactttggaatgggaagagaagttgttgaggtgcttatggaccgaaacgccgacgtttcaagcgctagagttcatgttgctcctaagatagctgcagaggagactgatgaggaatttgaagtcaaagaatgcacagaggagaagtctctttctgagaatgcaccaaatgttggatctgctgagagagttggagctcagaaatcacctaaaacccgtaatggaaatgctaaagtttcaaagcaggatgctcctcttctcgcggtgaggaagccattgcaacccgagaacaagaagcatattgatgacgaagataattgctccattgcttcttccgttgcaacttccatgaggatgggtaagtctggattgacttatggaagtgctccaacgtttaggagtgctcaacgtgctgagaaacgcaaggagtattaccaaaagctcgaggagaaaaaccaagcgcttgaagctgagaggaacgagcttgaacagaggcaaaaggatgaacaagaagcagccttgaagcaacttagaaagaatctcaagttcaaggctaaacccgtccccaacttctactacgaggcacctcctgcgaaacctgagctcaagaagcttcctttgacacgtcccaagtcgccaaaactgatcctttctcggagaaaaagcttcagcgacgcagtcagctcgtcttcccgtgaagagattctgaagacagtctctaaccggaaccgacacagcactggaacagttcagaacaaagacgatgatcacaggaacaagaacaccaatgctgcgcacgacagccctcgtgtcagatcaggcaaaggtaaatccggattgaaaccagtgaacgagtcctcagaagaagcttgaaatttcaaaagatgatgctttgttggtctaacttgatcttgccggagaaaatgtaaaatcaaagactctttgtttttcggttatttccggtatacgtttggttcactatgtaactgtctttttttcgattttaagttttaacatgaaaaactttatgttgattgttgaacaactcctcctaatgttgaaatttgt

SEQ ID NO: 4318 - protein, 286 aa, Arabidopsis thaliana
MGREVVEVLMDRNADVSSARVHVAPKIAAEETDEEFEVKECTEEKSLSENAPNVGSAERVGAQKSPKTRNGNAKVSKQDAPLLAVRKPLQPENKKHIDDEDNCSIASSVATSMRMGKSGLTYGSAPTFRSAQRAEKRKEYYQKLEEKNQALEAERNELEQRQKDEQEAALKQLRKNLKFKAKPVPNFYYEAPPAKPELKKLPLTRPKSPKLILSRRKSFSDAVSSSSREEILKTVSNRNRHSTGTVQNKDDDHRNKNTNAAHDSPRVRSGKGKSGLKPVNESSEEA

SEQ ID NO: 4319 - protein, 277 aa, Arabidopsis thaliana
MDRNADVSSARVHVAPKIAAEETDEEFEVKECTEEKSLSENAPNVGSAERVGAQKSPKTRNGNAKVSKQDAPLLAVRKPLQPENKKHIDDEDNCSIASSVATSMRMGKSGLTYGSAPTFRSAQRAEKRKEYYQKLEEKNQALEAERNELEQRQKDEQEAALKQLRKNLKFKAKPVPNFYYEAPPAKPELKKLPLTRPKSPKLILSRRKSFSDAVSSSSREEILKTVSNRNRHSTGTVQNKDDDHRNKNTNAAHDSPRVRSGKGKSGLKPVNESSEEA

SEQ ID NO: 4320 - protein, 174 aa, Arabidopsis thaliana
MRMGKSGLTYGSAPTFRSAQRAEKRKEYYQKLEEKNQALEAERNELEQRQKDEQEAALKQLRKNLKFKAKPVPNFYYEAPPAKPELKKLPLTRPKSPKLILSRRKSFSDAVSSSSREEILKTVSNRNRHSTGTVQNKDDDHRNKNTNAAHDSPRVRSGKGKSGLKPVNESSEEA

SEQ ID NO: 4321 - DNA, 1148 bp, Arabidopsis thaliana
aaaaatctctcccccttcttctctcttcctcacattcctcaccaaaccctctccaaaacacacccacacgtacgcacacacacaaagacaatgtctcctttcaaaatattcttcttcacgactcttctcgtggcggcgttttcagtgtcggctgctgatttcaacactgacgtcaacgtagcttggggaaatggccgtgggaagatactcaacaacggccagcttcttactctctccttagacaaatcctctggttccggttttcaatccaaaacagagtatttgtttggaaagattgatatgcagattaagcttgttcctggtaactctgcaggaacagtcacaactttttacctaaaatccgaaggatccacttgggatgagattgattttgagttcttgggtaatatgagtggagatccttatactttacacactaatgtttacactcaaggtaaaggtgacaaagagcaacaattccatctctggttcgacccaaccgccaatttccacacttactcaatcctctggaaccctcaaagaatcatattgaccgtcgatgacacacccattagagagtttaaaaactatgagtctctcggtgtcttgtttccaaagaacaagccgatgaggatgtacgcgagtttatggaacgcagacgattgggcaacaagaggcggtcttgttaaaactgattggtctaaagctccattcatggcttcttacagaaacattaagattgactcgaaaccaaactccaattggtacactcaagaaatggattcaacaagccaagctagactcaaatgggttcagaagaattacatgatctacaattattgtactgaccataggaggtttccacagggagctcctaaggaatgcacaacaagctcatagaatctcaaattatattctatttatttatctacacttcctctctttcttttatgtgaaaattgtgaatgctctgtttctagcttgtctattatgtccgagaatttctttttctgtttttgattcttttcgttgtatatctttgtccaataaaggaaatgatgtgtctttactcttatagatatgtataaaaagatgtccctgttttatttgttaaaaaaaattgtttatgataatgatagttctttctc

SEQ ID NO: 4322 - protein, 299 aa, Arabidopsis thaliana
KNLSPFFSLPHIPHQTLSKTHPHVRTHTKTMSPFKIFFFTTLLVAAFSVSAADFNTDVNVAWGNGRGKILNNGQLLTLSLDKSSGSGFQSKTEYLFGKIDMQIKLVPGNSAGTVTTFYLKSEGSTWDEIDFEFLGNMSGDPYTLHTNVYTQGKGDKEQQFHLWFDPTANFHTYSILWNPQRIILTVDDTPIREFKNYESLGVLFPKNKPMRMYASLWNADDWATRGGLVKTDWSKAPFMASYRNIKIDSKPNSNWYTQEMDSTSQARLKWVQKNYMIYNYCTDHRRFPQGAPKECTTSS

SEQ ID NO: 4323 - protein, 269 aa, Arabidopsis thaliana
MSPFKIFFFTTLLVAAFSVSAADFNTDVNVAWGNGRGKILNNGQLLTLSLDKSSGSGFQSKTEYLFGKIDMQIKLVPGNSAGTVTTFYLKSEGSTWDEIDFEFLGNMSGDPYTLHTNVYTQGKGDKEQQFHLWFDPTANFHTYSILWNPQRIILTVDDTPIREFKNYESLGVLFPKNKPMRMYASLWNADDWATRGGLVKTDWSKAPFMASYRNIKIDSKPNSNWYTQEMDSTSQARLKWVQKNYMIYNYCTDHRRFPQGAPKECTTSS

SEQ ID NO: 4324 - protein, 199 aa, Arabidopsis thaliana
MQIKLVPGNSAGTVTTFYLKSEGSTWDEIDFEFLGNMSGDPYTLHTNVYTQGKGDKEQQFHLWFDPTANFHTYSILWNPQRIILTVDDTPIREFKNYESLGVLFPKNKPMRMYASLWNADDWATRGGLVKTDWSKAPFMASYRNIKIDSKPNSNWYTQEMDSTSQARLKWVQKNYMIYNYCTDHRRFPQGAPKECTTSS

SEQ ID NO: 4325 - DNA, 1139 bp, Arabidopsis thaliana
aaaacgttactgtcactaaatgaaatctatttttctttcttaaattttgctctgacaaatatttttgattgcgtcattttctactttggaaatgtctttgatttagcatttcagttcgctcaaaacatcaaatcttaccttctttagctttcacattagattctggtaattattagcacaaaaaaaagataagccagaatacgaaacaaccaaaaaaagaggagaattctttttttttttttctttccgatgcctccgaccaataattaccgaatctccggcgaaccaccgtctactacgccgtctcatccaccgccaaaaccgaaaacaaggattctctctctattcctcgttggtgtaatcatgttttcaatcttctttctcttcctcgttcttatcggtatcgcctctgttcttatcctccctctcctcctctcttctctccatcgtcaccaccgacgtcgtcgtcgtaatcgccgacaagaatcctcagatgggttatcttcaagattcgtgaaaaagcttcctcaattcaaattctccgaacctagcacatacacacggtacgagagcgattgtgtggtttgttttgatggattcagacaaggacaatggtgtcggaatcttcctggttgtggacacgtgtttcatcgaaagtgtgtggacacttggttgctcaaagcctcgacgtgtcctatttgcagagctagggttagattgtgggaggaagatccacaagaaggagaattatggagatgttttggtcatagaagaagtagtttgctagatttgtaatattgtgtggttatgtagacgtggactcagtctaatggatgataagaatctccaaaactgaagctacgaagaggtacaatacaagccaaggactctttcctccatagagaagtagcgggtcgatcttatggtaatatataagcactaagcagatgggcgtttgatcatataaaccctcactaccattaccaaaaagcaatagccaagagctttttttttcattttctttttgaaagccatggatcggttttcgttcttgaatgttataatggaggttgcgggtattctaaatgaatcccgcaaactctcctcaagaacaaaaagttgatgttctcagtcttggt

SEQ ID NO: 4326 - protein, 181 aa, Arabidopsis thaliana
MPPTNNYRISGEPPSTTPSHPPPKPKTRILSLFLVGVIMFSIFFLFLVLIGIASVLILPLLLSSLHRHHRRRRRNRRQESSDGLSSRFVKKLPQFKFSEPSTYTRYESDCVVCFDGFRQGQWCRNLPGCGHVFHRKCVDTWLLKASTCPICRARVRLWEEDPQEGELWRCFGHRRSSLLDL

SEQ ID NO: 4327 - protein, 143 aa, Arabidopsis thaliana
MFSIFFLFLVLIGIASVLILPLLLSSLHRHHRRRRRNRRQESSDGLSSRFVKKLPQFKFSEPSTYTRYESDCVVCFDGFRQGQWCRNLPGCGHVFHRKCVDTWLLKASTCPICRARVRLWEEDPQEGELWRCFGHRRSSLLDL

SEQ ID NO: 4328 - DNA, 1240 bp, Arabidopsis thaliana
ataatcagtgggctaaactctaaagtctctctacctttctccatctccttcttcttcttctatcagattctttctttcctattacctttgccttcttcttcttcctttcctctttctctatcttcctctcaattcttttactgtttattttctttgtaatcaacaacagtttaactcttcttcttcttttctttatcaagaacagtagtttctcaattcttgattatgatactaagcaagagacctcatctaatgatccgtaaattgtctgagatgttggttccaagaagcagatctgctgctattaaaccggaggagtacacggccagtccgagaagtccgttggatttgaacttcccctccccggttcactcgaagcggttcggttctggtggtgtcggtttgggtattgttgctgcgttggaggaaactagcaacgggattaaccggcatgatccggttcgttactccgggagattcaggtgcccggagattgatctgtcggatgaggaatacacttatgttacgagcccaaacgggccgaccaaagtgtattacaacgacgacgggtttgaattgtctgaaaatgattatcggagagttcataaaccgatggttaccgtcgatgaaccaccggttattgaaagacagagtgttaggggtccaacagagtttctgagttcgtgttgcttgtgtaagaagaaacttcaaggcaaagacatatacatgtacaaaggagagatgggattttgtagtgccgaatgcagatcagtgcaaataatgaatgacgaacgacaagagcaatgtaaaacgcaagtttcaagaaacgccgacgttttgagctctccttacgccgccggacagagattatctgccggagtattcgtattttaggatgatcacaattcacaataatacgaagagaagtatattttatttatatataaaaaaaaaagtgatcatcattccattttaccttaatagaagaaaaaaggttagaaaataacaaaaaaaaaaaaagtgaaatttttggttaggttaaaaagcacattgtatagaagtttgctttttgttaacttttaataccgagtaatgtttatggcttttcctcggaatcacataaatcaataatcatttcgtgaaatagctttgtagaacaagtatgtatgtatatatgccaatttctcaattccctgtatccaaaatattgaatcaatcaattgaaaatgtaagattgtgc

SEQ ID NO: 4329 - protein, 222 aa, Arabidopsis thaliana
MILSKRPHLMIRKLSEMLVPRSRSAAIKPEEYTASPRSPLDLNFPSPVHSKRFGSGGVGLGIVAALEETSNGINRHDPVRYSGRFRCPEIDLSDEEYTYVTSPNGPTKVYYNDDGFELSENDYRRVHKPMVTVDEPPVIERQSVRGPTEFLSSCCLCKKKLQGKDIYMYKGEMGFCSAECRSVQIMNDERQEQCKTQVSRNADVLSSPYAAGQRLSAGVFVF

SEQ ID NO: 4330 - protein, 213 aa, Arabidopsis thaliana
MIRKLSEMLVPRSRSAAIKPEEYTASPRSPLDLNFPSPVHSKRFGSGGVGLGIVAALEETSNGINRHDPVRYSGRFRCPEIDLSDEEYTYVTSPNGPTKVYYNDDGFELSENDYRRVHKPMVTVDEPPVIERQSVRGPTEFLSSCCLCKKKLQGKDIYMYKGEMGFCSAECRSVQIMNDERQEQCKTQVSRNADVLSSPYAAGQRLSAGVFVF

SEQ ID NO: 4331 - protein, 206 aa, Arabidopsis thaliana
MLVPRSRSAAIKPEEYTASPRSPLDLNFPSPVHSKRFGSGGVGLGIVAALEETSNGINRHDPVRYSGRFRCPEIDLSDEEYTYVTSPNGPTKVYYNDDGFELSENDYRRVHKPMVTVDEPPVIERQSVRGPTEFLSSCCLCKKKLQGKDIYMYKGEMGFCSAECRSVQIMNDERQEQCKTQVSRNADVLSSPYAAGQRLSAGVFVF

SEQ ID NO: 4332 - DNA, 1130 bp, Arabidopsis thaliana
actgtactcttccaccaaatccattaatcatcatcttttcttcacagagaggaaaaaaaaaaaatggcgacagattctcaaccaaaccaaaagctaacgcttccgttaaaaacaagaatcgctctcaccgttatctccaccatgaccgataacgctcaacgtcctgacggaactatcaaccgccgtttcctccgcctcttcgatttccgtgctcctcccaatcctaaacccgtcaacatcgtctccacctccgatttcgtcgtggatcaatcccgtgatctctggttccgattgtacactccacatgtctccggcgataaaatccccgtcgttgttttcttccacggcggtggtttcgctttccttagtcctaatgcgtatccttacgataatgtatgccggagattcgctaggaaattacctgcttatgtcatctccgttaactaccgtctcgctccggagcatcgttatcctgctcaatacgacgacggtttcgatgctttgaagtacatcgaggagaatcacggttcgattcttccggcgaacgctgatctctcgagatgcttcttcgccggagacagtgcaggtggaaacatcgcgcacaacgtcgcgattcgaatttgtcgcgagccgcggtcatctttcaccgccgtgaaactcatcggacttatctcgattcaacctttcttcggcggagaagagagaacggaagcggagaaacaactcgtcggagctcctttggtttcaccggaccgaacagattggtgctggaaagcgatgggattaaaccgggatcatgaagcggttaacgtaggcggaccaaacgcggttgatatatcgggtctggattatccggagacgatggtggtagtagctgggtttgatccgttaaaagattggcagagaagttactacgagtggttaaagttatgcggtaaaaaagcaacgttaatcgaatattcaaacatgtttcatgcgttttacattttccctgaattgcctgaggcgggtcagttaattatgcggattaaggattttgttgatgagcgcgtggcttcactctccgcttaatcaccttcgctaatgatggatttttaaattagctcaatgaataataatgtattaagctt

SEQ ID NO: 4333 - protein, 335 aa, Arabidopsis thaliana
MATDSQPNQKLTLPLKTRIALTVISTMTDNAQRPDGTINRRFLRLFDFRAPPNPKPVNIVSTSDFVVDQSRDLWFRLYTPHVSGDKIPVVVFFHGGGFAFLSPNAYPYDNVCRRFARKLPAYVISVNYRLAPEHRYPAQYDDGFDALKYIEENHGSILPANADLSRCFFAGDSAGGNIAHNVAIRICREPRSSFTAVKLIGLISIQPFFGGEERTEAEKQLVGAPLVSPDRTDWCWKAMGLNRDHEAVNVGGPNAVDISGLDYPETMVVVAGFDPLKDWQRSYYEWLKLCGKKATLIEYSNMFHAFYIFPELPEAGQLIMRIKDFVDERVASLSA

SEQ ID NO: 4334 - protein, 309 aa, Arabidopsis thaliana
MTDNAQRPDGTINRRFLRLFDFRAPPNPKPVNIVSTSDFVVDQSRDLWFRLYTPHVSGDKIPVVVFFHGGGFAFLSPNAYPYDNVCRRFARKLPAYVISVNYRLAPEHRYPAQYDDGFDALKYIEENHGSILPANADLSRCFFAGDSAGGNIAHNVAIRICREPRSSFTAVKLIGLISIQPFFGGEERTEAEKQLVGAPLVSPDRTDWCWKAMGLNRDHEAVNVGGPNAVDISGLDYPETMVVVAGFDPLKDWQRSYYEWLKLCGKKATLIEYSNMFHAFYIFPELPEAGQLIMRIKDFVDERVASLSA

SEQ ID NO: 4335 - DNA, 1429 bp, Arabidopsis thaliana
atggcttccatttccagaatcttaccaacagatggcagattaagtcaatgcagaatcaacacctcgtgggttccttctacaaccagaactcaaactcacttagattttcccaagttagtttctgttagtaactctgggataagtttgaggattcagaatagtaaacctattagccctgtctttgctcttgaagcaacttcctccaggagggttgtttgcaaagctgctgctggtgtgtcaggtgacttacctgagagtactcctaaggaacttagtcagtatgagaagattattgagcttttgacaaccctttttccactttgggttattttgggaacacttgttggcatcttcaagccatccttggttacatggttggaaacagatctctttactctaggtcttggatttcttatgctttccatgggtttgactcttacgtttgaagatttcagaagatgtttacgtaatccatggacggtgggtgttggttttcttgctcaatatatgatcaagccaattctaggttttctcattgcaatgactcttaagctttcggcacctcttgcgactggccttatcctagtctcatgctgccctggaggacaggcgtcaaacgttgctacttacatttccaaggggaatgtagcgctctctgtactcatgacaacgtgttcaaccattggggctattataatgactcctcttcttactaagcttcttgctggtcagcttgttcccgttgacgctgctggacttgctcttagtacgttccaagtagtgttggttcctaccataattggagttctggcaaatgagttctttcctaaatttacgtctaagatcataacagtgacgcctctaatcggagtcattctgactactctgctctgtgccagccctattggacaagttgcagatgttttgaaaacccaaggagctcaacttatactcccggtggcactccttcatgctgcagcctttgctattggctattggatttcaaagttttctttcggcgagtccacttcgcgtaccatttctatagaatgtggaatgcaaagttcagcgctcgggttcttgcttgcacaaaagcatttcacaaaccctctagttgctgttccttctgcagtcagtgttgtctgtatggcgcttggcgggagcggcctggccgtgttctggagaaacctaccgattccggcagatgacaaggatgacttcaaagagtaaatgaagtaggaaaggctgtttgcatcttctccaaacgatgtgattgttttgttgtaatgttagtaaacattacaaaatttgtgttgaaaaacatgaaacaaaatgtgtttaagagacatagaaacaagggcgtgcatgatgacaactttgtggtcaaccttttttttatttctcaattaatggacaaatcttttttggc

SEQ ID NO: 4336 - protein, 409 aa, Arabidopsis thaliana
MASISRILPTDGRLSQCRINTSWVPSTTRTQTHLDFPKLVSVSNSGISLRIQNSKPISPVFALEATSSRRVVCKAAAGVSGDLPESTPKELSQYEKIIELLTTLFPLWVILGTLVGIFKPSLVTWLETDLFTLGLGFLMLSMGLTLTFEDFRRCLRNPWTVGVGFLAQYMIKPILGFLIAMTLKLSAPLATGLILVSCCPGGQASNVATYISKGNVALSVLMTTCSTIGAIIMTPLLTKLLAGQLVPVDAAGLALSTFQVVLVPTIIGVLANEFFPKFTSKIITVTPLIGVILTTLLCASPIGQVADVLKTQGAQLILPVALLHAAAFAIGYWISKFSFGESTSRTISIECGMQSSALGFLLAQKHFTNPLVAVPSAVSVVCMALGGSGLAVFWRNLPIPADDKDDFKE

SEQ ID NO: 4337 - protein, 271 aa, Arabidopsis thaliana
MLSMGLTLTFEDFRRCLRNPWTVGVGFLAQYMIKPILGFLIAMTLKLSAPLATGLILVSCCPGGQASNVATYISKGNVALSVLMTTCSTIGAIIMTPLLTKLLAGQLVPVDAAGLALSTFQVVLVPTIIGVLANEFFPKFTSKIITVTPLIGVILTTLLCASPIGQVADVLKTQGAQLILPVALLHAAAFAIGYWISKFSFGESTSRTISIECGMQSSALGFLLAQKHFTNPLVAVPSAVSVVCMALGGSGLAVFWRNLPIPADDKDDFKE

SEQ ID NO: 4338 - protein, 268 aa, Arabidopsis thaliana
MGLTLTFEDFRRCLRNPWTVGVGFLAQYMIKPILGFLIAMTLKLSAPLATGLILVSCCPGGQASNVATYISKGNVALSVLMTTCSTIGAIIMTPLLTKLLAGQLVPVDAAGLALSTFQVVLVPTIIGVLANEFFPKFTSKIITVTPLIGVILTTLLCASPIGQVADVLKTQGAQLILPVALLHAAAFAIGYWISKFSFGESTSRTISIECGMQSSALGFLLAQKHFTNPLVAVPSAVSVVCMALGGSGLAVFWRNLPIPADDKDDFKE

SEQ ID NO: 4339 - DNA, 1561 bp, Arabidopsis thaliana
aaactaatacgcattgagtttcgttgctttctcggggaaaatctctttgtaactaaacttttatgtacctaccaaaaatcttatgatgagattcttcaagaccgaccatagattgttacatcgaatcattgggtacacaagaccattccacggtctagctaaaacccaaaacggtgagatcgctagaccaggtttggttgatccaagctcgcacccgtggcccgagtggctagatttaatggggatgctagcgaaaaaaggttactttgaagaaagcttgattccattgatgagttccaaggaatctaatcatattcgtacagcttgtctcaatttcgcccgccatcgtttcactctcgttagaaacctgtcaaagaaagatatcaaagtgattgctgggtgtggttgtccaagcactgataggaaggtcgtgaactcaggaaagcgtctaagagcttatgttggcattgatgaaagaaatgtgtgtggctcttgcaacttgagagggaaatgtgaaagggcgtatgcacaagcacgagatgatgaaggtgctcgaactatagatgtcatgcgtttactgctaacttacgggcttgattccatttctcctactgtggagaatcgtgcctgtcaaaccaaacttgttgaagattctgtgaggaagttgctcagagaaagtgtagcgtatagcttaacagattttgaatctgctgagactgagacagctggagatgagctccagccaaattcacaggacattgatgaaagagatccacgaaaaaggccaggggattggtattgtacagaatgcaagtttctaaattttgcgaaaaacataagatgcttgcgatgtgatgttttttctgaggaaaggcttaaacagttgaaggaagaacaaaaagatcatctcccactgaagaaaggagattggatttgtcaaacatgtaatttcctgaacttttcgaaaaacacgagatgcttaagatgcaaagacaagcctacattgcgtcaaatcaatcccggagagtgggaatgcgagtcgtgcaattacatcaattttagaagaaactctatatgtttgaagtgtgatcacaagagacaaaaggctgcaaacgtcactccggattcaaagacagttgctgatcgtcaaagcggagttacaaagacgtggagctttgtagaagaagagagtgtaaaacgatgcaatggcgaagaagaggaagaagaagatggtttcatgggatttccagtagagggagggagaagcaatgtttcaaagagcgcagaaaagagagagcaatggaagttggagatgacacagagaattagaagcaatgggactaaagcgaaaaaagatgataatacgaagaacgaaacagagtcaaaatgttatgatcggagaagaaatgaacttcttggtaacattagtgatgatggagagatggatgattggtttgtttcaaaacaagatagatcgacttaaattgaatttataaatttgtaaccacatccatctgtttgtttcttctagtgttttattattggttcattggttggtttg

SEQ ID NO: 4340 - protein, 466 aa, Arabidopsis thaliana
MMRFFKTDHRLLHRIIGYTRPFHGLAKTQNGEIARPGLVDPSSHPWPEWLDLMGMLAKKGYFEESLIPLMSSKESNHIRTACLNFARHRFTLVRNLSKKDIKVIAGCGCPSTDRKVVNSGKRLRAYVGIDERNVCGSCNLRGKCERAYAQARDDEGARTIDVMRLLLTYGLDSISPTVENRACQTKLVEDSVRKLLRESVAYSLTDFESAETETAGDELQPNSQDIDERDPRKRPGDWYCTECKFLNFAKNIRCLRCDVFSEERLKQLKEEQKDHLPLKKGDWICQTCNFLNFSKNTRCLRCKDKPTLRQINPGEWECESCNYINFRRNSICLKCDHKRQKAANVTPDSKTVADRQSGVTKTWSFVEEESVKRCNGEEEEEEDGFMGFPVEGGRSNVSKSAEKREQWKLEMTQRIRSNGTKAKKDDNTKNETESKCYDRRRNELLGNISDDGEMDDWFVSKQDRST

SEQ ID NO: 4341 - protein, 465 aa, Arabidopsis thaliana
MRFFKTDHRLLHRIIGYTRPFHGLAKTQNGEIARPGLVDPSSHPWPEWLDLMGMLAKKGYFEESLIPLMSSKESNHIRTACLNFARHRFTLVRNLSKKDIKVIAGCGCPSTDRKVVNSGKRLRAYVGIDERNVCGSCNLRGKCERAYAQARDDEGARTIDVMRLLLTYGLDSISPTVENRACQTKLVEDSVRKLLRESVAYSLTDFESAETETAGDELQPNSQDIDERDPRKRPGDWYCTECKFLNFAKNIRCLRCDVFSEERLKQLKEEQKDHLPLKKGDWICQTCNFLNFSKNTRCLRCKDKPTLRQINPGEWECESCNYINFRRNSICLKCDHKRQKAANVTPDSKTVADRQSGVTKTWSFVEEESVKRCNGEEEEEEDGFMGFPVEGGRSNVSKSAEKREQWKLEMTQRIRSNGTKAKKDDNTKNETESKCYDRRRNELLGNISDDGEMDDWFVSKQDRST

SEQ ID NO: 4342 - protein, 414 aa, Arabidopsis thaliana
MGMLAKKGYFEESLIPLMSSKESNHIRTACLNFARHRFTLVRNLSKKDIKVIAGCGCPSTDRKVVNSGKRLRAYVGIDERNVCGSCNLRGKCERAYAQARDDEGARTIDVMRLLLTYGLDSISPTVENRACQTKLVEDSVRKLLRESVAYSLTDFESAETETAGDELQPNSQDIDERDPRKRPGDWYCTECKFLNFAKNIRCLRCDVFSEERLKQLKEEQKDHLPLKKGDWICQTCNFLNFSKNTRCLRCKDKPTLRQINPGEWECESCNYINFRRNSICLKCDHKRQKAANVTPDSKTVADRQSGVTKTWSFVEEESVKRCNGEEEEEEDGFMGFPVEGGRSNVSKSAEKREQWKLEMTQRIRSNGTKAKKDDNTKNETESKCYDRRRNELLGNISDDGEMDDWFVSKQDRST

SEQ ID NO: 4343 - DNA, 1250 bp, Arabidopsis thaliana
gtatcatacattgaacataattctcagtatgatcctgtagagtttactcgttcattcacttgtattctctttcatagaggaagagagagggagagagtttctaattaattagaagatttttctttctttattttctaaacaagtattagactactttgagagagatataaaaatggcaatttcacaagccgtcttggctactgtctttggcatcctagggaatatcatctcctttttcgtctgccttgccccaataccgacgttcgttcgtatatacaagaggaagtcatctgaagggtatcagtcgatcccttacgtgatttctctgttcagcgcgatgctatggatgtactacgcaatgatcaagaaagatgctatgatgttgatcactatcaactcctttgcctttgtcgtacaaatcgtctacatctccttattcttcttctacgctcctaagaaggaaaagactctaacggtgaagttcgtcctctttgtggatgttttgggtttcggcgcaatcttcgtgttgacatactttataattcatgccaataaacgtgttcaagttcttggatacatttgtatggtctttgctctatctgtttttgttgctccccttggcataattaggaaagtgatcaaaacgaagagcgccgagttcatgccattcggtctctccttcttcctcaccttatcggctgtcatgtggtttttctacggacttctccttaaagacatgaacattgccctgccaaatgttttgggtttcatctttggagtacttcagatgattcttttcttgatctacaagaaaccagggactaaagtcttggagccaccagggattaagcttcaggacatatctgagcatgtagtcgatgttgtgaggctaagtacgatggtttgcaactcacagatgagaactttggtgccacaagacagtgccgatatggaagcaaccattgatatagatgagaagatcaaaggagatattgagaagaataaggatgaaaaagaagtatttctcatttctaagaattaattagcttttaactatcaaatgtcgatgtgtgtgggtgtgtgtctcagtttgcttgcatgttaagatagggtttaatgtttttatttgggtctgatcagcgtcatcgtggatctctccctcttatctgtgatctttgtctctccctctctcatctcgaatgtaagatatgtgttgttaaattaataaatgattatgtcgtttgtctatt

SEQ ID NO: 4344 - protein, 289 aa, Arabidopsis thaliana
MAISQAVLATVFGILGNIISFFVCLAPIPTFVRIYKRKSSEGYQSIPYVISLFSAMLWMYYAMIKKDAMMLITINSFAFVVQIVYISLFFFYAPKKEKTLTVKFVLFVDVLGFGAIFVLTYFIIHANKRVQVLGYICMVFALSVFVAPLGIIRKVIKTKSAEFMPFGLSFFLTLSAVMWFFYGLLLKDMNIALPNVLGFIFGVLQMILFLIYKKPGTKVLEPPGIKLQDISEHVVDVVRLSTMVCNSQMRTLVPQDSADMEATIDIDEKIKGDIEKNKDEKEVFLISKN

SEQ ID NO: 4345 - protein, 234 aa, Arabidopsis thaliana
MLWMYYAMIKKDAMMLITINSFAFVVQIVYISLFFFYAPKKEKTLTVKFVLFVDVLGFGAIFVLTYFIIHANKRVQVLGYICMVFALSVFVAPLGIIRKVIKTKSAEFMPFGLSFFLTLSAVMWFFYGLLLKDMNIALPNVLGFIFGVLQMILFLIYKKPGTKVLEPPGIKLQDISEHVVDVVRLSTMVCNSQMRTLVPQDSADMEATIDIDEKIKGDIEKNKDEKEVFLISKN

SEQ ID NO: 4346 - protein, 231 aa, Arabidopsis thaliana
MYYAMIKKDAMMLITINSFAFVVQIVYISLFFFYAPKKEKTLTVKFVLFVDVLGFGAIFVLTYFIIHANKRVQVLGYICMVFALSVFVAPLGIIRKVIKTKSAEFMPFGLSFFLTLSAVMWFFYGLLLKDMNIALPNVLGFIFGVLQMILFLIYKKPGTKVLEPPGIKLQDISEHVVDVVRLSTMVCNSQMRTLVPQDSADMEATIDIDEKIKGDIEKNKDEKEVFLISKN

SEQ ID NO: 4347 - DNA, 1662 bp, Arabidopsis thaliana
ctcccgacgccattatccttcaccctcggagcttttcttgaagcagggattcttctaatcattaatccctacttctttctttcttttttgtttgttctcctttgagatctatctagtactagtagtaaaaccccctcccctccattgaatttgaattgaattgaatctctgggaatcaaatctttgatgtcgcatctggacgacattccttctacgcctgggaaattcaagatgatggataaatcccccttcttcctccaccgtactcgttggcaatcctccgtcgccaagcttgccttttggtcccttgtctttttcggattgctcttcatcttcttctaccgatctcccatctccaatcccgattcctctcgccgctctcttcgcacctactcttggggcggtcccgcctgggagaaacgcgtccgatcctccgctcgtgtccgcacccgcaacggcgtctccgttctcgtcaccggggccgccggtttcgtcgggactcacgtctctgccgctcttaaacgacgcggcgacggcgttctaggcctcgacaacttcaacgattactacgacacctctctcaagagatctcgacaagccctcctcgagagaagcggagtgttcatcgttgaaggagacatcaacgatctgtctctcctcaagaagctcttcgaggtcgtccctttcactcacgtcatgcatcttgccgctcaagctggtgtcagatacgccatggagaaccccggctcctacgttcacagcaacatcgctggtttcgttaacctcctcgaggtctgtaaatccgctaatcctcagccggcgatcgtgtgggcatcgtctagctccgtctacggtttaaacaccaaagtccccttctctgagaaagacagaacagatcagcctgcgagtctctacgctgcgaccaagaaagctggagaagagattgcccacacttacaaccacatctacgggctctctctcaccggcttgaggtttttcacggtgtacgggccgtggggaagacctgacatggcttacttcttcttcaccagagacatcctcaaagggaaagctatttcgatcttcgaaggagccaatcacggaacagtggctagggatttcacatacatcgatgacatagtgaaaggatgtttgggggctctggacacggcggagaagagcacagggagtggtggcaagaagcggggagcggctcagctaagggtattcaacctggggaacacatctccggtgccggtgactgatcttgtgagtatattggagagattgttgaaagtgaaagccaagaggaacatgatgaagctgccgaggaatggtgatgtgcccttcacacatgctaatatcagttcggcacagagagagtttgggtacaaaccaagcacggatttgcagactggtctaaagaagtttgtgagatggtatcttggttactacaagcaggggggaaagaaagttgctgctgctgcttgaatattgataattcacaagattctttagtgtatagtgagtgagtggattgatacacaccataaagaagagacatgattcattcgagattatatattctttacatttgtgttctgctttgtaatttcgatctcttgagtcgaatctctgatatttatttcataggaagttcac

SEQ ID NO: 4348 - protein, 434 aa, Arabidopsis thaliana
MSHLDDIPSTPGKFKMMDKSPFFLHRTRWQSSVAKLAFWSLVFFGLLFIFFYRSPISNPDSSRRSLRTYSWGGPAWEKRVRSSARVRTRNGVSVLVTGAAGFVGTHVSAALKRRGDGVLGLDNFNDYYDTSLKRSRQALLERSGVFIVEGDINDLSLLKKLFEVVPFTHVMHLAAQAGVRYAMENPGSYVHSNIAGFVNLLEVCKSANPQPAIVWASSSSVYGLNTKVPFSEKDRTDQPASLYAATKKAGEEIAHTYNHIYGLSLTGLRFFTVYGPWGRPDMAYFFFTRDILKGKAISIFEGANHGTVARDFTYIDDIVKGCLGALDTAEKSTGSGGKKRGAAQLRVFNLGNTSPVPVTDLVSILERLLKVKAKRNMMKLPRNGDVPFTHANISSAQREFGYKPSTDLQTGLKKFVRWYLGYYKQGGKKVAAAA

SEQ ID NO: 4349 - protein, 419 aa, Arabidopsis thaliana
MMDKSPFFLHRTRWQSSVAKLAFWSLVFFGLLFIFFYRSPISNPDSSRRSLRTYSWGGPAWEKRVRSSARVRTRNGVSVLVTGAAGFVGTHVSAALKRRGDGVLGLDNFNDYYDTSLKRSRQALLERSGVFIVEGDINDLSLLKKLFEVVPFTHVMHLAAQAGVRYAMENPGSYVHSNIAGFVNLLEVCKSANPQPAIVWASSSSVYGLNTKVPFSEKDRTDQPASLYAATKKAGEEIAHTYNHIYGLSLTGLRFFTVYGPWGRPDMAYFFFTRDILKGKAISIFEGANHGTVARDFTYIDDIVKGCLGALDTAEKSTGSGGKKRGAAQLRVFNLGNTSPVPVTDLVSILERLLKVKAKRNMMKLPRNGDVPFTHANISSAQREFGYKPSTDLQTGLKKFVRWYLGYYKQGGKKVAAAA

SEQ ID NO: 4350 - protein, 418 aa, Arabidopsis thaliana
MDKSPFFLHRTRWQSSVAKLAFWSLVFFGLLFIFFYRSPISNPDSSRRSLRTYSWGGPAWEKRVRSSARVRTRNGVSVLVTGAAGFVGTHVSAALKRRGDGVLGLDNFNDYYDTSLKRSRQALLERSGVFIVEGDINDLSLLKKLFEVVPFTHVMHLAAQAGVRYAMENPGSYVHSNIAGFVNLLEVCKSANPQPAIVWASSSSVYGLNTKVPFSEKDRTDQPASLYAATKKAGEEIAHTYNHIYGLSLTGLRFFTVYGPWGRPDMAYFFFTRDILKGKAISIFEGANHGTVARDFTYIDDIVKGCLGALDTAEKSTGSGGKKRGAAQLRVFNLGNTSPVPVTDLVSILERLLKVKAKRNMMKLPRNGDVPFTHANISSAQREFGYKPSTDLQTGLKKFVRWYLGYYKQGGKKVAAAA

SEQ ID NO: 4351 - DNA, 889 bp, Arabidopsis thaliana
aagcaaaaaaaaaaaaaaacagagcaaaatggccgtagttttacgtggaggcatcaccggaggatttcttcaccatcgtcgtgacgcttcatccgtcatcacaagaagaatctcatccgtcaaagccgcaggaggaggcatcaacccaacggtggctgttgaacgtgccacgtggctacctggactaaaccctcctccttatcttgatggaaatttagctggagattacgggtttgacccactcgggttaggagaggatccggaaagcttgaagtggtatgttcaagcagagcttgttcactctcgtttcgctatgctcggtgttgcaggaatactcttcactgatctccttcggaccacagggattcgtaatttaccggtttggtatgaagctggagctgtgaaatttgattttgctagtacaaaaactctcatagttgtacagtttctacttatggggtttgctgagactaaaaggtatatggattttgtctctccgggatcacaagccaaagaaggatcgtttttctttggacttgaagcagcactcgaggggctcgagcctggatatcccggaggaccgcttttaaacccattaggccttgctaaggatgttcaaaatgctcatgactggaagcttaaggagatcaagaacggtcgtctagcgatgatggcgatgctcgggttctttgttcaagcctctgtgactcacactggccctattgataaccttgttgagcatctctctaatccatggcataagaccatcattcaaaccctcttcacctctacatcttaggtacattcttttgtaatgaaaaattcgattattcgacaagtgtatcaatacctttatttcatttaagagtacaacaaatctgttctaatc

SEQ ID NO: 4352 - protein, 265 aa, Arabidopsis thaliana
SKKKKKQSKMAVVLRGGITGGFLHHRRDASSVITRRISSVKAAGGGINPTVAVERATWLPGLNPPPYLDGNLAGDYGFDPLGLGEDPESLKWYVQAELVHSRFAMLGVAGILFTDLLRTTGIRNLPVWYEAGAVKFDFASTKTLIVVQFLLMGFAETKRYMDFVSPGSQAKEGSFFFGLEAALEGLEPGYPGGPLLNPLGLAKDVQNAHDWKLKEIKNGRLAMMAMLGFFVQASVTHTGPIDNLVEHLSNPWHKTIIQTLFTSTS

SEQ ID NO: 4353 - protein, 256 aa, Arabidopsis thaliana
MAVVLRGGITGGFLHHRRDASSVITRRISSVKAAGGGINPTVAVERATWLPGLNPPPYLDGNLAGDYGFDPLGLGEDPESLKWYVQAELVHSRFAMLGVAGILFTDLLRTTGIRNLPVWYEAGAVKFDFASTKTLIVVQFLLMGFAETKRYMDFVSPGSQAKEGSFFFGLEAALEGLEPGYPGGPLLNPLGLAKDVQNAHDWKLKEIKNGRLAMMAMLGFFVQASVTHTGPIDNLVEHLSNPWHKTIIQTLFTSTS

SEQ ID NO: 4354 - protein, 161 aa, Arabidopsis thaliana
MLGVAGILFTDLLRTTGIRNLPVWYEAGAVKFDFASTKTLIVVQFLLMGFAETKRYMDFVSPGSQAKEGSFFFGLEAALEGLEPGYPGGPLLNPLGLAKDVQNAHDWKLKEIKNGRLAMMAMLGFFVQASVTHTGPIDNLVEHLSNPWHKTIIQTLFTSTS

SEQ ID NO: 4355 - DNA, 1411 bp, Arabidopsis thaliana
agctctctctctctctctcgttaacgcttcggcgaaaaatccacgagtcagcttttactgatttgtacaaaaaatggatggatcaaagcatccatcagtctttcagaagctacatggacaatcttacttgatcaatagactttctccgagtgtgcaagctcgtggttactgtgtctctggtgcttatgtcaatggaggtttgcagagtctattgcagccaactagccatggcgttggctcgtctcttatacctcatggttcatttcctgtattagctcacgctcctagtgagaaaactggtactggtttcttgatcgatttccttatgggaggagtctcagctgctgtttcgaagacggcagccgcgcctatagagcgtgtgaagctcttgattcagaatcaagatgaaatgatcaaagctgggcgtctctctgagccatataaaggaatcagtgattgttttgctcgaacggtcaaagacgaaggaatgcttgctctttggagaggaaacactgccaatgttatcagatacttccccactcaggctttaaactttgcgttcaaagactacttcaagaggctgtttaacttcaagaaagaaaaagatggctactggaagtggtttgcagggaacctggcgtctggtggtgcagctggtgcatcatctctgctttttgtgtactctttggattacgctcgtacccgtttagccaatgatgcgaaggcggccaagaaaggtggtcagcggcagtttaatggcatggtcgacgtgtacaagaagactatagcctctgatggcattgtcgggctttaccgtggtttcaacatctcatgcgttggaattgtcgtgtaccgggggctttactttggattgtatgattccttgaagcctgtggttctagttgatggtctccaggatagcttccttgctagtttcttactgggatggggaatcaccattggagctggattggcgtcttacccaattgacacggttcgcagaagaatgatgatgacgtcaggtgaagcagtgaagtacaagagctctcttcaggccttctctcagatcgtcaagaacgaaggggccaagtcactcttcaagggtgcaggtgccaacatccttcgtgcggttgcaggcgctggtgtactggccggctatgacaagctccagctcattgtgttgggtaagaagtatggctctggtggtggctaaacgatgaggatgatgaaagaatagcccttgaggtctgtgaatgaataaagcagtgtgtccgttcgtataaatgttgcttttagaatatagagtgtctctgtcaagttgtggccctttgtcttagttctatacttctatgacttttgttgacaaaagaataaatacaaagaaaaccaataccatgtttatgttttttgt

SEQ ID NO: 4356 - protein, 379 aa, Arabidopsis thaliana
MDGSKHPSVFQKLHGQSYLINRLSPSVQARGYCVSGAYVNGGLQSLLQPTSHGVGSSLIPHGSFPVLAHAPSEKTGTGFLIDFLMGGVSAAVSKTAAAPIERVKLLIQNQDEMIKAGRLSEPYKGISDCFARTVKDEGMLALWRGNTANVIRYFPTQALNFAFKDYFKRLFNFKKEKDGYWKWFAGNLASGGAAGASSLLFVYSLDYARTRLANDAKAAKKGGQRQFNGMVDVYKKTIASDGIVGLYRGFNISCVGIVVYRGLYFGLYDSLKPVVLVDGLQDSFLASFLLGWGITIGAGLASYPIDTVRRRMMMTSGEAVKYKSSLQAFSQIVKNEGAKSLFKGAGANILRAVAGAGVLAGYDKLQLIVLGKKYGSGGG

SEQ ID NO: 4357 - protein, 295 aa, Arabidopsis thaliana
MGGVSAAVSKTAAAPIERVKLLIQNQDEMIKAGRLSEPYKGISDCFARTVKDEGMLALWRGNTANVIRYFPTQALNFAFKDYFKRLFNFKKEKDGYWKWFAGNLASGGAAGASSLLFVYSLDYARTRLANDAKAAKKGGQRQFNGMVDVYKKTIASDGIVGLYRGFNISCVGIVVYRGLYFGLYDSLKPVVLVDGLQDSFLASFLLGWGITIGAGLASYPIDTVRRRMMMTSGEAVKYKSSLQAFSQIVKNEGAKSLFKGAGANILRAVAGAGVLAGYDKLQLIVLGKKYGSGGG

SEQ ID NO: 4358 - protein, 267 aa, Arabidopsis thaliana
MIKAGRLSEPYKGISDCFARTVKDEGMLALWRGNTANVIRYFPTQALNFAFKDYFKRLFNFKKEKDGYWKWFAGNLASGGAAGASSLLFVYSLDYARTRLANDAKAAKKGGQRQFNGMVDVYKKTIASDGIVGLYRGFNISCVGIVVYRGLYFGLYDSLKPVVLVDGLQDSFLASFLLGWGITIGAGLASYPIDTVRRRMMMTSGEAVKYKSSLQAFSQIVKNEGAKSLFKGAGANILRAVAGAGVLAGYDKLQLIVLGKKYGSGGG

SEQ ID NO: 4359 - DNA, 964 bp, Arabidopsis thaliana
tccaaacttcgtctcccccaattgaacgagcaaaagttgcagagcacacacacacactttcaagtttcaatacagagatggcgaggcactgagccagagcgtgagaaccgtgaagatgaaaccgaagtcaacgaagatgaagataccggagctcaggtagctccgatcgttaggcttgaagaggttgcagtcaccaccggcgaagaagatgaagacgccgtcctcgatctgaaatcgaagatgtatcgatttgataaagaagggaaccaatggaagagaggagctggaactgtgaaattattgaagcataaggaaactggaaaagttcgtcttgttatgagacaatctaaaaccctaaagatctgtgccaatcacctcatttcgtctgggatgagtgttcaggaacatagtgggaatgaaaagtcttgtttatggcacgctactgatttctccgacggcgagttgaaagatgagcttttctgcattcgatttgcttccattgagaattgcaaaacatttatggagaagttcactgaaatagctgaaagccagcaagtagggaaagagagcacagagggcgatgaggcagctggtttaatagagaatctatcggttgaagaaaagaaaagtgtggagcaagccaaggaagcagaagagaaagagcctgcaaaggaagataaagaaacaaaaaaggagaaggtagaagaagagaagaaaacagagacaagcacttaaatgatcaaattaaaattggtttttggtaacacaaagtgtgctttgctttgttttaatatattatacttggcactgaacatgatggtagcttcaaaagtttgagtcttgcgctgtgttagagaaagttgaatcttaagtttttttatgttcttgtaagtgtttgactattgtgtggtctatttactgtgtcgttttggtttaagataatagtatttggcctcaaattagt

SEQ ID NO: 4360 - protein, 244 aa, Arabidopsis thaliana
SKLRLPQLNEQKLQSTHTHFQVSIQRWRGTEPERENREDETEVNEDEDTGAQVAPIVRLEEVAVTTGEEDEDAVLDLKSKMYRFDKEGNQWKRGAGTVKLLKHKETGKVRLVMRQSKTLKICANHLISSGMSVQEHSGNEKSCLWHATDFSDGELKDELFCIRFASIENCKTFMEKFTEIAESQQVGKESTEGDEAAGLIENLSVEEKKSVEQAKEAEEKEPAKEDKETKKEKVEEEKKTETST

SEQ ID NO: 4361 - protein, 164 aa, Arabidopsis thaliana
MYRFDKEGNQWKRGAGTVKLLKHKETGKVRLVMRQSKTLKICANHLISSGMSVQEHSGNEKSCLWHATDFSDGELKDELFCIRFASIENCKTFMEKFTEIAESQQVGKESTEGDEAAGLIENLSVEEKKSVEQAKEAEEKEPAKEDKETKKEKVEEEKKTETST

SEQ ID NO: 4362 - protein, 132 aa, Arabidopsis thaliana
MRQSKTLKICANHLISSGMSVQEHSGNEKSCLWHATDFSDGELKDELFCIRFASIENCKTFMEKFTEIAESQQVGKESTEGDEAAGLIENLSVEEKKSVEQAKEAEEKEPAKEDKETKKEKVEEEKKTETST

SEQ ID NO: 4363 - DNA, 1900 bp, Arabidopsis thaliana
aaggggcaaaactgaaaatcacacaaaaacaaacaaaactttgcttacgtcacatcattatctgtgactaattcttaatcatcatcatcatcatcacttacttaaatctaaaaaaatctctgtttgtatatatattatctttgcgatttttatccaaatcttccaaagcttagtttttttttttttcaatttctctcttgcgttttcgattttattacaagaactttgttttgggcttcatccatcgttcaaggttcgttgaaaactatgaagaaagttgagttttttatgctccttctctgcttcatcgcagcgtcatctctagtgtctgctgatccaccaacatgtcctgctgatttgggaggcaagtgtagtgattctgatgactggcaaggtgatttcttccctgaaatccccaagattaagtatgagggaccttcgagtaagaacccacttgcttacaggtggtataacgctgaagaagagattcttgggaagaaaatgaaggattggtttagattcagtgttgcgttttggcatactttccgtgggactggaggtgatccatttggtgctgctactaagtattggccttgggaagatggtactaactctgtgtctatggctaagagaagaatgagagctaactttgagttcttgaagaaacttggagttgattggtggtgttttcatgacagagacatagcacctgatggcactacacttgaggaatctaacaaaaacttggatgaagttatcgaactcgccaaagaactccaaaaggggagcaaaatcaaaccattgtggggaacagctcagcttttcttgcatcctcgttatatgcacggaggagcgaccagctctgaagttggagtgtatgcttacgctgctgctcaggtgaagaaagccatggaggtaacacattacttaggtggtgaaaactacgttttttggggtggtcgtgaaggttatcagacactcttgaacactgatatgggaagagagcttgatcatctagccaggttctttgaagctgctgttgcttacaagaagaagattggattcaaaggcacgcttttaatcgagcccaagcctcaagaacccaccaagcaccagtatgactgggatgctgcaacagctgccaatttcttgaggaaatatggtcttattgatgagtttaagctcaacattgagtgtaaccatgccacgctctctggtcacacttgtcatcacgagcttgaaactgcaagaattaatggtttacttggcaacattgatgcaaacactggcgatgctcaaactggatgggatacagatcagtttcttacagatgttggagaagcaaccatggttatgatgagtgtcatcaaaaatggtgggattgctccaggcggcttcaactttgacgctaaactgcgaagagagagtacagacgtggaagacttattcattgctcatattagtggaatggatacaatggctcgtggactgagaaatgcagtcaaaatcttggaggagggaagtctaagtgaattggtacgcaagcgatatgcaacttgggactctgagcttgggaagcaaatagaagaaggaaaagctgattttgagtatcttgagaagaaagctaaagagtttggagaaccaaaggtttcttctgctaaacaggaactcgctgagatgattttccaatctgcaatgtaagaagaagaacaagaaggctttttatgtttattaaaagtatcgtcttttttagtttccctcgcatctttgagaagtttgaaaaccaaaacattggaaaataagatgattagagaggttggtttcattatttcagttgatgtactatggtttcacactctaattactttaaattgaataacaaaagactgtttaggccttc

SEQ ID NO: 4364 - protein, 477 aa, Arabidopsis thaliana
MKKVEFFMLLLCFIAASSLVSADPPTCPADLGGKCSDSDDWQGDFFPEIPKIKYEGPSSKNPLAYRWYNAEEEILGKKMKDWFRFSVAFWHTFRGTGGDPFGAATKYWPWEDGTNSVSMAKRRMRANFEFLKKLGVDWWCFHDRDIAPDGTTLEESNKNLDEVIELAKELQKGSKIKPLWGTAQLFLHPRYMHGGATSSEVGVYAYAAAQVKKAMEVTHYLGGENYVFWGGREGYQTLLNTDMGRELDHLARFFEAAVAYKKKIGFKGTLLIEPKPQEPTKHQYDWDAATAANFLRKYGLIDEFKLNIECNHATLSGHTCHHELETARINGLLGNIDANTGDAQTGWDTDQFLTDVGEATMVMMSVIKNGGIAPGGFNFDAKLRRESTDVEDLFIAHISGMDTMARGLRNAVKILEEGSLSELVRKRYATWDSELGKQIEEGKADFEYLEKKAKEFGEPKVSSAKQELAEMIFQSAM

SEQ ID NO: 4365 - protein, 470 aa, Arabidopsis thaliana
MLLLCFIAASSLVSADPPTCPADLGGKCSDSDDWQGDFFPEIPKIKYEGPSSKNPLAYRWYNAEEEILGKKMKDWFRFSVAFWHTFRGTGGDPFGAATKYWPWEDGTNSVSMAKRRMRANFEFLKKLGVDWWCFHDRDIAPDGTTLEESNKNLDEVIELAKELQKGSKIKPLWGTAQLFLHPRYMHGGATSSEVGVYAYAAAQVKKAMEVTHYLGGENYVFWGGREGYQTLLNTDMGRELDHLARFFEAAVAYKKKIGFKGTLLIEPKPQEPTKHQYDWDAATAANFLRKYGLIDEFKLNIECNHATLSGHTCHHELETARINGLLGNIDANTGDAQTGWDTDQFLTDVGEATMVMMSVIKNGGIAPGGFNFDAKLRRESTDVEDLFIAHISGMDTMARGLRNAVKILEEGSLSELVRKRYATWDSELGKQIEEGKADFEYLEKKAKEFGEPKVSSAKQELAEMIFQSAM

SEQ ID NO: 4366 - protein, 399 aa, Arabidopsis thaliana
MKDWFRFSVAFWHTFRGTGGDPFGAATKYWPWEDGTNSVSMAKRRMRANFEFLKKLGVDWWCFHDRDIAPDGTTLEESNKNLDEVIELAKELQKGSKIKPLWGTAQLFLHPRYMHGGATSSEVGVYAYAAAQVKKAMEVTHYLGGENYVFWGGREGYQTLLNTDMGRELDHLARFFEAAVAYKKKIGFKGTLLIEPKPQEPTKHQYDWDAATAANFLRKYGLIDEFKLNIECNHATLSGHTCHHELETARINGLLGNIDANTGDAQTGWDTDQFLTDVGEATMVMMSVIKNGGIAPGGFNFDAKLRRESTDVEDLFIAHISGMDTMARGLRNAVKILEEGSLSELVRKRYATWDSELGKQIEEGKADFEYLEKKAKEFGEPKVSSAKQELAEMIFQSAM

SEQ ID NO: 4367 - DNA, 1294 bp, Arabidopsis thaliana
cctttcccaattgcttccacgacgacggaggaggagaagcaaacccagaaaccttaaaaattcagaaaaagggacgaccttttttccgatcttatcgatttttgaatgagattagaagaacctatcttctaagtttttctttgatatctttttctctttgatcgatggatgagtcgttcgctaatctacaatcaagccatttgcttggttcagttccggctgtgatcagcgacgacaagagaagcacaaatgtaccaatagcaagcgtcaatgaaggcccttctgcaagcatgcaaatatttccaccgaatctaggaaacaatacaaagggttatcaaactcttgagagcccaacagaaggaccagcacaacagccatcaaacaactggaagggcttttttaatgtctactcatatacccaatacttcgacgtggacacggacgttgttttgaacagattaatgagctctttatatcctactagtggagattttttcaacaagattgatgcaaaccctgatttgtatggacttgtctggatctgcactacgcttgtgtttgtgcttgcttctctcggaaattgtgctacatatctcgtgaagaaacgaaccgacagtaatgctccttggatctttgatgtgaactatatgaatttggcagcatctataatatatggatatgcaataattgtgcctctgggattttattttgcactccgttatatggggtccaaagctgatcttctaagattctggtgcctttggggatactctctcttcattttcgttccaacctctcttccattgcttattccagtagagtttctgagatgggtgattatactcttagctggtagtgcatcatcgtgttttgttgccctgaatctacggtcttacctcgagacgaacaatgatatcacggttgtaatggctgcagcatttggtctgcaaatggttctttcaatcttcatcaaggtctggttctttccttaatctccatgagacggtcaacaccagacaaaacatatatatgtaaaaacctttagattttgatgtgctgcggtagaactaagaatgtcgttaccagaaaatgaaacccacaaagtagaagaaggaacatatccgctaaatcattcggtttcgtttttactggcggattttcatcgttgcttgtaacgattgtgttttttcattttttggttttgtttgctaccacttattttgcttatggagtaaaaatatataaaagaaaaaaaggaagttttcaagatttattgcaatttactctcttttgc

SEQ ID NO: 4368 - protein, 275 aa, Arabidopsis thaliana
MDESFANLQSSHLLGSVPAVISDDKRSTNVPIASVNEGPSASMQIFPPNLGNNTKGYQTLESPTEGPAQQPSNNWKGFFNVYSYTQYFDVDTDVVLNRLMSSLYPTSGDFFNKIDANPDLYGLVWICTTLVFVLASLGNCATYLVKKRTDSNAPWIFDVNYMNLAASIIYGYAIIVPLGFYFALRYMGSKADLLRFWCLWGYSLFIFVPTSLPLLIPVEFLRWVIILLAGSASSCFVALNLRSYLETNNDITVVMAAAFGLQMVLSIFIKVWFFP

SEQ ID NO: 4369 - protein, 233 aa, Arabidopsis thaliana
MQIFPPNLGNNTKGYQTLESPTEGPAQQPSNNWKGFFNVYSYTQYFDVDTDVVLNRLMSSLYPTSGDFFNKIDANPDLYGLVWICTTLVFVLASLGNCATYLVKKRTDSNAPWIFDVNYMNLAASIIYGYAIIVPLGFYFALRYMGSKADLLRFWCLWGYSLFIFVPTSLPLLIPVEFLRWVIILLAGSASSCFVALNLRSYLETNNDITVVMAAAFGLQMVLSIFIKVWFFP

SEQ ID NO: 4370 - protein, 176 aa, Arabidopsis thaliana
MSSLYPTSGDFFNKIDANPDLYGLVWICTTLVFVLASLGNCATYLVKKRTDSNAPWIFDVNYMNLAASIIYGYAIIVPLGFYFALRYMGSKADLLRFWCLWGYSLFIFVPTSLPLLIPVEFLRWVIILLAGSASSCFVALNLRSYLETNNDITVVMAAAFGLQMVLSIFIKVWFFP

SEQ ID NO: 4371 - DNA, 1006 bp, Arabidopsis thaliana
tcgtatttcaagaaatgacgaccgatgggactccaccgagacgaagcgacggccatggaaacccttttcagagtctcacttcgtctacttccggtttccgccgccgtgacatgtcgctcgatccgattccccgtttcaagacccggttcctcacacttactgaaccgtaagctgtataatttgcctacttcttcttcctcctctttgtcgacaaaagccggttggttattgggtcttggtgagaagaaaaagaaagtggatttaccggagatagtggcatctggtgacccggttctgcacgagaaggcccgagaagttgacccgggagaaatcgggtcggagcgtattcagaagataattgatgatatgattaaagttatgagattggctcctggagttggcctcgctgctcctcaaattggtgttcccttaaggattattgtattggaagatacaaaagagtatataagttacgcaccaaaggaagagattcttgctcaagaaagacgtcattttgatctcatggtgatggtgaatccggttctcaaggagagaagcaacaagaaagctcttttctttgaaggatgcttgagtgttgatggattcagagctgcggtggagagataccttgaggtggtagtgacgggctacgatcgtcaaggaaagaggattgaagtgaatgcttcaggttggcaagctaggattttgcaacatgagtgtgatcatttggatggtaatctttacgttgataagatggtaccacgcacttttaggacagtcgacaacttggacttgcctttagctgagggctgccctaagctcggacctcaatgacagattcttcaacaaaagttgtaatcttctgttttgattctttactaaaactcttctagattgagcttgactcaaataatttcaaagatgaaactttgtcggaaagagggttcttttttcgggtttggtaatggattgaaagattttcatttaataaaatattataacttaa

SEQ ID NO: 4372 - protein, 269 aa, Arabidopsis thaliana
MGLHRDEATAMETLFRVSLRLLPVSAAVTCRSIRFPVSRPGSSHLLNRKLYNLPTSSSSSLSTKAGWLLGLGEKKKKVDLPEIVASGDPVLHEKAREVDPGEIGSERIQKIIDDMIKVMRLAPGVGLAAPQIGVPLRIIVLEDTKEYISYAPKEEILAQERRHFDLMVMVNPVLKERSNKKALFFEGCLSVDGFRAAVERYLEVVVTGYDRQGKRIEVNASGWQARILQHECDHLDGNLYVDKMVPRTFRTVDNLDLPLAEGCPKLGPQ

SEQ ID NO: 4373 - protein, 259 aa, Arabidopsis thaliana
METLFRVSLRLLPVSAAVTCRSIRFPVSRPGSSHLLNRKLYNLPTSSSSSLSTKAGWLLGLGEKKKKVDLPEIVASGDPVLHEKAREVDPGEIGSERIQKIIDDMIKVMRLAPGVGLAAPQIGVPLRIIVLEDTKEYISYAPKEEILAQERRHFDLMVMVNPVLKERSNKKALFFEGCLSVDGFRAAVERYLEVVVTGYDRQGKRIEVNASGWQARILQHECDHLDGNLYVDKMVPRTFRTVDNLDLPLAEGCPKLGPQ

SEQ ID NO: 4374 - protein, 155 aa, Arabidopsis thaliana
MIKVMRLAPGVGLAAPQIGVPLRIIVLEDTKEYISYAPKEEILAQERRHFDLMVMVNPVLKERSNKKALFFEGCLSVDGFRAAVERYLEVVVTGYDRQGKRIEVNASGWQARILQHECDHLDGNLYVDKMVPRTFRTVDNLDLPLAEGCPKLGPQ

SEQ ID NO: 4375 - DNA, 1396 bp, Arabidopsis thaliana
aagaacaagaagaaaaaggtttgtgaaaaaaaaacaaaggcaaacatggtggagggcataccaaagagatggaaggtgctaagtggccaaaacaaatggaaaggcctgcttgatccacttgacccggatcttcgccgctacatcattcactacggcgagatgtctcaggttggttacgatgcctttaactgggaccgtaagtccagatacgccggtgattgttattactccaagaaccgactgtttgctcgaaccggcttccttaaagccaaccctttcaggtacaaagtgactaagtacatctacgcaacagcttccataaagttaccaatctctttcatcgtaaagtctttgtcaaaggatgcatctcacgtgcagactaactggatgggttacattgcggtagctacagaccagggaaaagcgatgttagggaggagagacattgttgttgcatggagaggaactctacagccatatgaatgggctaatgatttcgattttccgcttgagccagctatctcggttttcccagtaactgaccccaaagataaccctcgtattggaagtggctggctcgacatctataccgcttctgattctcgctcaccttatgacacgactagtgcacaagaacaggtacaaggagagctcaagaggttgctagaactttacaaggatgaagaaataagcatcaccttcacaggccatagcttgggcgcagttatgtcagttctatcagctgcagatcttgtctatggcaaaaagaataatatcaatataaatcttcaaaaaaagcaagttcctatcacagtttttgctttcgggagtcctcggattggagaccataacttcaaaaacgtagtcgactcactccaaccactaaacattctaagaatagtaaatgttccagatgtcgcaccacattatccactcttactgtactcagaaattggcgaggtgttagagatcaatactttgaactcaacatacctgaaacggtctctgaacttcaggaactaccataacctggagatatacctgcacggcatggcagggatgcaagatacagacggggtattcaagctggagattggccgggatatttcgttggtcaataaaggattggatgctctaaaggacgagtacttagtgccaagtacctggaggtgtctggcaaacaaagggatgcttcaaatggatgatgggacatggaagctggatgtccacaggagagatcatgatgatgatgttgatgctgatgacaatgatgactcctcaactagtaaccaactacaagagctaaatacagattagttacaaaaacttatataagattctgcacaatatgtttgtacacaaaaaaaaattcatttagaagaacaaagaatctggg

SEQ ID NO: 4376 - protein, 438 aa, Arabidopsis thaliana
KNKKKKVCEKKTKANMVEGIPKRWKVLSGQNKWKGLLDPLDPDLRRYIIHYGEMSQVGYDAFNWDRKSRYAGDCYYSKNRLFARTGFLKANPFRYKVTKYIYATASIKLPISFIVKSLSKDASHVQTNWMGYIAVATDQGKAMLGRRDIVVAWRGTLQPYEWANDFDFPLEPAISVFPVTDPKDNPRIGSGWLDIYTASDSRSPYDTTSAQEQVQGELKRLLELYKDEEISITFTGHSLGAVMSVLSAADLVYGKKNNININLQKKQVPITVFAFGSPRIGDHNFKNVVDSLQPLNILRIVNVPDVAPHYPLLLYSEIGEVLEINTLNSTYLKRSLNFRNYHNLEIYLHGMAGMQDTDGVFKLEIGRDISLVNKGLDALKDEYLVPSTWRCLANKGMLQMDDGTWKLDVHRRDHDDDVDADDNDDSSTSNQLQELNTD

SEQ ID NO: 4377 - protein, 423 aa, Arabidopsis thaliana
MVEGIPKRWKVLSGQNKWKGLLDPLDPDLRRYIIHYGEMSQVGYDAFNWDRKSRYAGDCYYSKNRLFARTGFLKANPFRYKVTKYIYATASIKLPISFIVKSLSKDASHVQTNWMGYIAVATDQGKAMLGRRDIVVAWRGTLQPYEWANDFDFPLEPAISVFPVTDPKDNPRIGSGWLDIYTASDSRSPYDTTSAQEQVQGELKRLLELYKDEEISITFTGHSLGAVMSVLSAADLVYGKKNNININLQKKQVPITVFAFGSPRIGDHNFKNVVDSLQPLNILRIVNVPDVAPHYPLLLYSEIGEVLEINTLNSTYLKRSLNFRNYHNLEIYLHGMAGMQDTDGVFKLEIGRDISLVNKGLDALKDEYLVPSTWRCLANKGMLQMDDGTWKLDVHRRDHDDDVDADDNDDSSTSNQLQELNTD

SEQ ID NO: 4378 - protein, 385 aa, Arabidopsis thaliana
MSQVGYDAFNWDRKSRYAGDCYYSKNRLFARTGFLKANPFRYKVTKYIYATASIKLPISFIVKSLSKDASHVQTNWMGYIAVATDQGKAMLGRRDIVVAWRGTLQPYEWANDFDFPLEPAISVFPVTDPKDNPRIGSGWLDIYTASDSRSPYDTTSAQEQVQGELKRLLELYKDEEISITFTGHSLGAVMSVLSAADLVYGKKNNININLQKKQVPITVFAFGSPRIGDHNFKNVVDSLQPLNILRIVNVPDVAPHYPLLLYSEIGEVLEINTLNSTYLKRSLNFRNYHNLEIYLHGMAGMQDTDGVFKLEIGRDISLVNKGLDALKDEYLVPSTWRCLANKGMLQMDDGTWKLDVHRRDHDDDVDADDNDDSSTSNQLQELNTD

SEQ ID NO: 4379 - DNA, 1301 bp, Arabidopsis thaliana
aatatccaaaataacaaaacatctcttcacttctcatcacaccatgcatcatcatcatcatccatgcaatcgcaaacccttcacaaccatcttctccttcttccttctctatctcaatctccataaccaacaaattatcgaagctcgaaatccatctcaatttacgaccaacccatcccctgacgtctctataccggaaatcaaacgtcacctccaacagtacggttacctcccacaaaacaaagaatccgacgacgtttcgttcgaacaagctctcgttcgttaccagaaaaatctcggtctaccaataaccggtaaaccggattccgacacgttgtcacagattctattaccaagatgtgggttccctgatgacgtggaacccaaaacggcaccgtttcacacaggaaaaaaatacgtgtacttccccggacggcccaggtggacaagagacgtcccactgaaactcacgtacgccttctcgcaggagaacctaactccttacttagcaccaactgacatacggcgcgtgttccgacgcgctttcggcaagtgggcttcggtgatcccagtatccttcatcgaaacagaggattacgtcatcgccgacatcaagatcggattcttcaacggagatcacggcgacggagaaccgttcgacggcgttttaggtgttttagcacacactttctctccggaaaacggtaggcttcatctagacaaagcagagacgtgggccgtagatttcgatgaggaaaaatctagtgtggccgtcgatttggaatctgtggcggtgcacgagatcggtcacgtgcttggattaggacatagctcggtgaaagacgcggctatgtatccaactttaaagccaagaagtaagaaagtgaatttgaatatggacgacgtcgttggagtacagtctttgtacggaacaaaccctaatttcacgttaaatagtttacttgcgtcggaaacttcgacaaatctagccgatggttcgaggatacggtctcaaggaatgatctattcgactttgagtactgttatcgctctctgttttcttaattggtagttcgtagacttagataattttctttatacaagaaatccgaaaacgtatagaatcatacagacgcatgaatttgttgttcaaagtagtagtctaatcctatgtttctgtttagaataataccatgttcttttttagtttatattagattgggcttcaagttatacggcccaatagaatgctaatgtattaaacgaagaacccagttcagagcaacacaattcgttggcct

SEQ ID NO: 4380 - protein, 356 aa, Arabidopsis thaliana
ISKITKHLFTSHHTMHHHHHPCNRKPFTTIFSFFLLYLNLHNQQIIEARNPSQFTTNPSPDVSIPEIKRHLQQYGYLPQNKESDDVSFEQALVRYQKNLGLPITGKPDSDTLSQILLPRCGFPDDVEPKTAPFHTGKKYVYFPGRPRWTRDVPLKLTYAFSQENLTPYLAPTDIRRVFRRAFGKWASVIPVSFIETEDYVIADIKIGFFNGDHGDGEPFDGVLGVLAHTFSPENGRLHLDKAETWAVDFDEEKSSVAVDLESVAVHEIGHVLGLGHSSVKDAAMYPTLKPRSKKVNLNMDDVVGVQSLYGTNPNFTLNSLLASETSTNLADGSRIRSQGMIYSTLSTVIALCFLNW

SEQ ID NO: 4381 - protein, 342 aa, Arabidopsis thaliana
MHHHHHPCNRKPFTTIFSFFLLYLNLHNQQIIEARNPSQFTTNPSPDVSIPEIKRHLQQYGYLPQNKESDDVSFEQALVRYQKNLGLPITGKPDSDTLSQILLPRCGFPDDVEPKTAPFHTGKKYVYFPGRPRWTRDVPLKLTYAFSQENLTPYLAPTDIRRVFRRAFGKWASVIPVSFIETEDYVIADIKIGFFNGDHGDGEPFDGVLGVLAHTFSPENGRLHLDKAETWAVDFDEEKSSVAVDLESVAVHEIGHVLGLGHSSVKDAAMYPTLKPRSKKVNLNMDDVVGVQSLYGTNPNFTLNSLLASETSTNLADGSRIRSQGMIYSTLSTVIALCFLNW

SEQ ID NO: 4382 - DNA, 978 bp, Arabidopsis thaliana
actttggattctaagcttcttttttaaatgattgcagatttgcagaaagaaagcttcttcttttattaagttgtggacaaatggctggtactagcatggctgaacctgaaggtgtcaagatgtcccatgactgttcagaggaagacgcaagaaaggaattaaaggttttgttagatagggtcaaatcagctgcaacaagcttgagctatttgagatcaaaagctagaatcttggccgttcctggtctgtcactcggtgctcaacagctacaacttaaagatgatactacattggctggaaccaacaagaaccaggattccttggttatagaggatggagtctatactttgaatacgctccaatccatagaaatggttattactgatgcgctggagtctcttttgaggagggtcacagcggcagaatctgaaacgtgttctcataaggagaaggtgattatatgtgaggaagaaattacaaggaagacagtccaaatccagaatctgtccttgagattagaacagacggaacggattgtaatgacagagtgtgagtcgcttaaaaatgccctcactgcttccaacaatgttttagatacacttctttcttcctccagacggcaattccaaaccatggaagcccggttggttgctaagtcgacacaattggaaggcgagaaagcgcagaaagaggtacaagtgcaaaagctgatggaggagaacatgaagctgaccactcttcttgataagaaagaagctcagcttctggccttaaatgaacaatgcaaagtcatggctctgaatgcttcaaacatctgattctgaatctttcatctcttggcaaaagagaagatattctaggtgtaatccttggacgacatagcatttttctatcggattcttttctgttttttttaagatttgaaaattctggtaaactatctgtagaacatggctttgaataaagcaagcatagttg

SEQ ID NO: 4383 - protein, 245 aa, Arabidopsis thaliana
MAGTSMAEPEGVKMSHDCSEEDARKELKVLLDRVKSAATSLSYLRSKARILAVPGLSLGAQQLQLKDDTTLAGTNKNQDSLVIEDGVYTLNTLQSIEMVITDALESLLRRVTAAESETCSHKEKVIICEEEITRKTVQIQNLSLRLEQTERIVMTECESLKNALTASNNVLDTLLSSSRRQFQTMEARLVAKSTQLEGEKAQKEVQVQKLMEENMKLTTLLDKKEAQLLALNEQCKVMALNASNI

SEQ ID NO: 4384 - protein, 240 aa, Arabidopsis thaliana
MAEPEGVKMSHDCSEEDARKELKVLLDRVKSAATSLSYLRSKARILAVPGLSLGAQQLQLKDDTTLAGTNKNQDSLVIEDGVYTLNTLQSIEMVITDALESLLRRVTAAESETCSHKEKVIICEEEITRKTVQIQNLSLRLEQTERIVMTECESLKNALTASNNVLDTLLSSSRRQFQTMEARLVAKSTQLEGEKAQKEVQVQKLMEENMKLTTLLDKKEAQLLALNEQCKVMALNASNI

SEQ ID NO: 4385 - protein, 232 aa, Arabidopsis thaliana
MSHDCSEEDARKELKVLLDRVKSAATSLSYLRSKARILAVPGLSLGAQQLQLKDDTTLAGTNKNQDSLVIEDGVYTLNTLQSIEMVITDALESLLRRVTAAESETCSHKEKVIICEEEITRKTVQIQNLSLRLEQTERIVMTECESLKNALTASNNVLDTLLSSSRRQFQTMEARLVAKSTQLEGEKAQKEVQVQKLMEENMKLTTLLDKKEAQLLALNEQCKVMALNASNI

SEQ ID NO: 4386 - DNA, 1109 bp, Arabidopsis thaliana
  misc_feature (69)..(69): n is a, c, g, or t
tcattgctatgataagcactatgtgcctcaatgtaagcagagttaattgctcgttgagcttcttcaacngcagtatcaaacccaaattgctaagaaatagaacctcaatggcggcgacagaggaagaggtgacgacgacgaaggaaggcgccgacctattggggaagccaaagtataagaaactcgagaacgggagatttaaatgcgtgcagacgggtcacgagctactcgagaaagacaagaaggtctattcacagagtaaacgatgccgtttagggcttattgattatgccttatctcatagcaagcctcctcttaacttgttcgaacaagatcctaacgctcgctcaaaactgaaatgtaagctaacgggcgatacggtaaacaagactgaggaacatatttggaagcatatcactggacggcgcttcctcaacagattagaggagaaggaacgagagaaagagtctggatctattccagcggaaggtggagaaacaccggcgaaggaaaatggcgtagaggatgaagataagaaaaagaagaagaagaagaagaataataagaagaagaaaaacaagaagtcagtttaaaagaaaaagaatggagaggatgttgctgatgaaatcgaacatgaaaatgatgaagctgttgaggaggagcttgagttttggatgcctccagatggagagaggtgggactttgatgatggaagagaccggtggggctcagattcagactcagatgtggaaatgaatgaggaaacagatcccataggtgaatttgatgaagatggagagattagtatggaagagtccatactaataggtgaagttgatgaagatggcaagattgttttggatgacactcatgccagcagcaacaagaggaaacatgaagaactcggttccagtgaccttccttcgaagaagaagaataagaagaagaaaaagaagaagaatgtcgaagcaacatcgtcgtcatattaagtctgatatgttttgtatttcactttgtacttgctctatttcagcttgtgtgctcagttttgttataattggtgatggaaaatggtgatttacatattaatgaagcaatttatttttctc

SEQ ID NO: 4387 - protein, 196 aa, Arabidopsis thaliana
  misc_feature (23)..(23): Xaa can be any naturally occurring amino acid
IAMISTMCLNVSRVNCSLSFFNXSIKPKLLRNRTSMAATEEEVTTTKEGADLLGKPKYKKLENGRFKCVQTGHELLEKDKKVYSQSKRCRLGLIDYALSHSKPPLNLFEQDPNARSKLKCKLTGDTVNKTEEHIWKHITGRRFLNRLEEKEREKESGSIPAEGGETPAKENGVEDEDKKKKKKKKNNKKKKNKKSV

SEQ ID NO: 4388 - protein, 194 aa, Arabidopsis thaliana
  misc_feature (21)..(21): Xaa can be any naturally occurring amino acid
MISTMCLNVSRVNCSLSFFNXSIKPKLLRNRTSMAATEEEVTTTKEGADLLGKPKYKKLENGRFKCVQTGHELLEKDKKVYSQSKRCRLGLIDYALSHSKPPLNLFEQDPNARSKLKCKLTGDTVNKTEEHIWKHITGRRFLNRLEEKEREKESGSIPAEGGETPAKENGVEDEDKKKKKKKKNNKKKKNKKSV

SEQ ID NO: 4389 - protein, 190 aa, Arabidopsis thaliana
  misc_feature (17)..(17): Xaa can be any naturally occurring amino acid
MCLNVSRVNCSLSFFNXSIKPKLLRNRTSMAATEEEVTTTKEGADLLGKPKYKKLENGRFKCVQTGHELLEKDKKVYSQSKRCRLGLIDYALSHSKPPLNLFEQDPNARSKLKCKLTGDTVNKTEEHIWKHITGRRFLNRLEEKEREKESGSIPAEGGETPAKENGVEDEDKKKKKKKKNNKKKKNKKSV

SEQ ID NO: 4390 - DNA, 602 bp, Arabidopsis thaliana
ctccctttctttcgacaagcacaaacaaagccatcaagagaagaaagccttttcttggattcacatatatataagaatattttttcaaatcaaacatgtcttctagcagaaggtcgagacaagcaagctcatcatcaagaattagcgatgaccagatcactgatctcatctcaaagctccgacagtccattccggagattcgccagaaccgtcgttccaacacggtatcagcgtcgaaagtgttacaagagacttgcaactacataagaaacttgaacaaggaagccgatgacctcagtgatcgattgactcagcttctggaatccattgatcctaatagcccacaagccgcagttattaggagcttgattaatggataattaagatataaattgattagttgtgctttatatatataagcttaaaatctcgttgggaggttgatccatcagggtgttgcataattatatatctattttatgtttcttatatattatttacaatcctatctagttagggttcatattttgacccttttttggtttaacgtcatgcatgcaattccattaagcttaaaaattataataaataagatttcgagc

SEQ ID NO: 4391 - protein, 94 aa, Arabidopsis thaliana
MSSSRRSRQASSSSRISDDQITDLISKLRQSIPEIRQNRRSNTVSASKVLQETCNYIRNLNKEADDLSDRLTQLLESIDPNSPQAAVIRSLING

SEQ ID NO: 4392 - protein, 88 aa, Arabidopsis thaliana
LPFFRQAQTKPSREESLFLDSHIYKNIFSNQTCLLAEGRDKQAHHQELAMTRSLISSQSSDSPFRRFARTVVPTRYQRRKCYKRLATT

SEQ ID NO: 4393 - DNA, 2001 bp, Arabidopsis thaliana
atcttcttcctcatctttcttctctcttcaacattttcttctcttcttcacacaaacacacacagatctcttcttcatcacattacttctggctttacatcttttttcttctccatgaggaaagggagaggctcttccgtcgttggacccgcccttccagtaaccgccggtggatctgtgaaggagccgaggtatagaggcgttaggaagagaccttggggtcgattcgcagctgagatccgtgatccattaaaaaaatctcgtgtctggctcggtactttcgattccgccgtagatgctgcacgcgcttacgataccgccgcacgtaacctccgtggtccaaaggccaagaccaatttcccgatcgattgttctccttcttctcctctccaacctctcacctacctccacaatcaaaacctctgttctcctccggtgattcagaaccagatcgatccgtttatggaccatcggttatacggcggaggtaatttccaggagcagcagcagcagcagattattagtcggccggcgagtagcagcatgagcagcaccgttaaatcttgtagcggaccgagaccgatggaagccgcggcggcgtcttcgtcggtggcgaaaccgttacatgcgattaagagatatccgagaactccaccggtagctccggaggattgtcatagcgactgcgattcttcgtcgtctgttattgacgacggagatgatatcgcatcttcgtcttcccgccggaaaacgccgtttcagtttgatcttaatttcccgccgttggatggcgttgacttattcgctggcgggatagatgatctccactgtaccgatctacgtctctgatttgctgctttacaaaaaaaatccgttgattacacacaaaaaaaattctcaaattttacaaaatgataactttatgctcttttgtttttccattttcctttgatatcatattgaaagagaaaaaaaggaagaacaaaaaaaaaagattgagcgtgatgattttatcatcaacgaagatgatgacgattaaaaagagagagagattgtgttaagatctgttactgtaagaaccagatctgggtttcatttttatctgtttcttcttataaaagatccaacaaccctttgttacatatatataacattctgaagctggtgatgatttctgaatgattcaaatccattatctttagatttctacttattcatagagtgtcccctgatgtaagtaggaagctgcatttacatagtatgtaacagaaccacacagggcacaagtatttgtttgtgttttgtctcttggcttgatcttgatcaattcagggtttcttctattcaacaagtaaagcttagtggttctctgagatggaagcaataaaaagatgaaaggaagaaagacggtgaagctcctttgctatctaattgggtgattcgaagaggaagttagaatactcattgtcattgttaagcctcaagttttcattcatcagcgaggagacaagaaaggctttcccttttgtgtacccaatgaatattttggatggtgaagaacatagagattaagggcatggtcaatgggcggtgagtggttttgttgtgatcgataaagctcaatgagcacaggccaaatctttaggttaaagtttggtggctgagatgattgttttgatctttaagagctgtgggttgaggtggcagaattcgttgtgtgtttgacctttttgatttgaatttgctggtagagagttttcccaattttggtatctactttgcttctatgccacggattcagacagtgaatctttgtgtctgaagcaaaaaccgagtatttttttaccgttttggggtaggcttcttcttaacttaaagtggaagtcaaaagcaatgtcttgttattttcactgtaacgatttaagacaactgatctcaagtcgcttttcctgtttcggttcgtactcttaataatcttctattattctggagttgagattg

SEQ ID NO: 4394 - protein, 282 aa, Arabidopsis thaliana
IFFLIFLLSSTFSSLLHTNTHRSLLHHITSGFTSFFFSMRKGRGSSVVGPALPVTAGGSVKEPRYRGVRKRPWGRFAAEIRDPLKKSRVWLGTFDSAVDAARAYDTAARNLRGPKAKTNFPIDCSPSSPLQPLTYLHNQNLCSPPVIQNQIDPFMDHRLYGGGNFQEQQQQQIISRPASSSMSSTVKSCSGPRPMEAAAASSSVAKPLHAIKRYPRTPPVAPEDCHSDCDSSSSVIDDGDDIASSSSRRKTPFQFDLNFPPLDGVDLFAGGIDDLHCTDLRL

SEQ ID NO: 4395 - protein, 244 aa, Arabidopsis thaliana
MRKGRGSSVVGPALPVTAGGSVKEPRYRGVRKRPWGRFAAEIRDPLKKSRVWLGTFDSAVDAARAYDTAARNLRGPKAKTNFPIDCSPSSPLQPLTYLHNQNLCSPPVIQNQIDPFMDHRLYGGGNFQEQQQQQIISRPASSSMSSTVKSCSGPRPMEAAAASSSVAKPLHAIKRYPRTPPVAPEDCHSDCDSSSSVIDDGDDIASSSSRRKTPFQFDLNFPPLDGVDLFAGGIDDLHCTDLRL

SEQ ID NO: 4396 - DNA, 1369 bp, Arabidopsis thaliana
aactactagtatataagttaagggtttaagcctcttctcttccttctttctcttagccatcacatcgataatggcttctcttctaacaaaacccaaacccgttttcctctgttcaccatcgttatctccaagaactttgaacacagcaacaccgtcattgaatttcaccagaatttcattcacccatcaccaaaagcttgctcctttcaagcctcctagtctcgttgttgcattctctgaaaagggtttgaagagagatgtcaccacagctgctgcagcgacggagggagattacagaaggataatgttatctgatgtgttggtgaagaagaaggaaaaagtagtttggtgggagagagaatggaaagctatggactttggagctgttgctgtcgttttgtctatgcatttgcttagtcttttggctccgtttcaattcaattggagagctgtttcggttgcttttgggctttatatcgttacaggtcttctggggattactctgtctttccataggaatctttctcataaagccttcaagctacctaaatggcttgagtacttgtttgcttattgtggagctcaagctcttcagggaaacccaattgattgggtgagtacacataggtaccatcatcagttttgtgattcagacagagaccctcatagcccacttgatgggttttggttcagtcacatgaattggatgtttgataccaatacaatcacccaaaggtgtggagagcctaataatgttggggacttggagaagcagccattctatcgattccttcgaaccacctacattttgcatccgctggctctagcggttgctttatacgcaatgggtggctttccattcatcgtttggggaatgggtgtaagaatagtatgggtatatcatataacttggctagtgaactcagcttgtcatgtatggggaaaacaagcatggaacacaggcgatttgtctaagaacaactggtgggtagcagctctagcattcggggaaggatggcacaacaatcaccatgcttttgagttctcagctcgacacggcttagaatggtggcaacttgatatgacttggtacgtcgttaagttccttcaagccatcggtttagcaactgatgtcaagctcccatcggaagctcagaaacaaagaatggcattcaccagcgactgatcttaaaaaactacatggttatgcctaaagtcaaaactgtcggttcgattgaagctatgaaggttttaaaaaaggattttgttctgcttttttgtgtttacttaaaggtatatatctgtgcaagagattgtatgtgacaaactgattatgaataatatctataattacattcaatacaaaagg

SEQ ID NO: 4397 - protein, 371 aa, Arabidopsis thaliana
MASLLTKPKPVFLCSPSLSPRTLNTATPSLNFTRISFTHHQKLAPFKPPSLVVAFSEKGLKRDVTTAAAATEGDYRRIMLSDVLVKKKEKVVWWEREWKAMDFGAVAVVLSMHLLSLLAPFQFNWRAVSVAFGLYIVTGLLGITLSFHRNLSHKAFKLPKWLEYLFAYCGAQALQGNPIDWVSTHRYHHQFCDSDRDPHSPLDGFWFSHMNWMFDTNTITQRCGEPNNVGDLEKQPFYRFLRTTYILHPLALAVALYAMGGFPFIVWGMGVRIVWVYHITWLVNSACHVWGKQAWNTGDLSKNNWWVAALAFGEGWHNNHHAFEFSARHGLEWWQLDMTWYVVKFLQAIGLATDVKLPSEAQKQRMAFTSD

SEQ ID NO: 4398 - protein, 293 aa, Arabidopsis thaliana
MLSDVLVKKKEKVVWWEREWKAMDFGAVAVVLSMHLLSLLAPFQFNWRAVSVAFGLYIVTGLLGITLSFHRNLSHKAFKLPKWLEYLFAYCGAQALQGNPIDWVSTHRYHHQFCDSDRDPHSPLDGFWFSHMNWMFDTNTITQRCGEPNNVGDLEKQPFYRFLRTTYILHPLALAVALYAMGGFPFIVWGMGVRIVWVYHITWLVNSACHVWGKQAWNTGDLSKNNWWVAALAFGEGWHNNHHAFEFSARHGLEWWQLDMTWYVVKFLQAIGLATDVKLPSEAQKQRMAFTSD

SEQ ID NO: 4399 - protein, 271 aa, Arabidopsis thaliana
MDFGAVAVVLSMHLLSLLAPFQFNWRAVSVAFGLYIVTGLLGITLSFHRNLSHKAFKLPKWLEYLFAYCGAQALQGNPIDWVSTHRYHHQFCDSDRDPHSPLDGFWFSHMNWMFDTNTITQRCGEPNNVGDLEKQPFYRFLRTTYILHPLALAVALYAMGGFPFIVWGMGVRIVWVYHITWLVNSACHVWGKQAWNTGDLSKNNWWVAALAFGEGWHNNHHAFEFSARHGLEWWQLDMTWYVVKFLQAIGLATDVKLPSEAQKQRMAFTSD

SEQ ID NO: 4400 - DNA, 1609 bp, Arabidopsis thaliana
aacttttgcttcttcttcgcattcactcaaaccaaagtagaagacggaatccggccaagtcacttccgcaatcctttcgaaatttagattttagggttacttcgtcggagattgttaatttgtagtatctggagattggcaacaatgtctgaactcaaagagcgtttgcttcctccaagacctgcttcggctattaaccttagaggtgatgcaggctctcgtccttctccttcagggagacaaccactccttggagttgatgttttgggtctcaagaagcgtggacaaggccttaagtcgtggattcgtgttgatacttctgccaattctcaggtcattgaggttgataagttcactatgatgcgtagatgtgatttaccagcacgggatttaaggctgctcgatcctttgtttgtgtatccgtcaactattcttggtagagagaaggctattgttgttaacttagagcagatccgttgtattattactgcggatgaggttttgctcttgaattcccttgacaactatgtccttcgctatgttgttgagctgcagcagagactaaaggcaagttctgttactgaggtttggaatcaggacagtctcgaattgagcaggaggaggagtaggagtttagacaatgtgtttcagaactcatcccctgattatttacctttcgagttcagggctcttgaagttgcccttgaagctgcttgtaccttccttgattcccaggcttcagagttagagattgaggcatacccattattggatgagcttacctcaaagatcagtactctaaacttggagcgtgctcgtagactaaagagcagacttgtagcattgacgagacgagttcagaaggttcgggatgagattgaacagctaatggacgatgatggggatatggcagaaatgtatctaacagagaagaagaagagaatggaaggatctttatatggtgatcaatctttacctgtttatcgaacaaatgattgtttttctctgtctgcgccagtttctcctgtttcttctccccctgagtcccgtagacttgagaaaagcttgagcattgtaaggagccggcatgacagtgctaggagctcagaagacgcaaccgagaatatagaggagctagagatgttgctggaagcatactttgttgtcattgatagcactctcaacaagctaacctcgttaaaggagtacatcgatgataccgaagatttcatcaacattcaattggataacgtacggaatcagctgatccaattcgagctgctgctaactactgccacattcgttgtagccatcttcggggttgtagccgggatctttgggatgaattttgagatagacttctttgaaaagcctggtgctttcaaatgggttttagccattactggagtgtgtggccttgttgtatttttggcattcctctggttctacaaacgtagaagactcatgcctctgtgaagacataactaccctgacacgtagacgattgttttactgtttatgttgcttaaatctatacattaatcgcctgtgacctttacaagataaaaccccgtgtatttttttttgggttactgaaagattattaagc

SEQ ID NO: 4401 - protein, 443 aa, Arabidopsis thaliana
MSELKERLLPPRPASAINLRGDAGSRPSPSGRQPLLGVDVLGLKKRGQGLKSWIRVDTSANSQVIEVDKFTMMRRCDLPARDLRLLDPLFVYPSTILGREKAIVVNLEQIRCIITADEVLLLNSLDNYVLRYVVELQQRLKASSVTEVWNQDSLELSRRRSRSLDNVFQNSSPDYLPFEFRALEVALEAACTFLDSQASELEIEAYPLLDELTSKISTLNLERARRLKSRLVALTRRVQKVRDEIEQLMDDDGDMAEMYLTEKKKRMEGSLYGDQSLPVYRTNDCFSLSAPVSPVSSPPESRRLEKSLSIVRSRHDSARSSEDATENIEELEMLLEAYFVVIDSTLNKLTSLKEYIDDTEDFINIQLDNVRNQLIQFELLLTTATFVVAIFGVVAGIFGMNFEIDFFEKPGAFKWVLAITGVCGLVVFLAFLWFYKRRRLMPL

SEQ ID NO: 4402 - protein, 372 aa, Arabidopsis thaliana
MMRRCDLPARDLRLLDPLFVYPSTILGREKAIVVNLEQIRCIITADEVLLLNSLDNYVLRYVVELQQRLKASSVTEVWNQDSLELSRRRSRSLDNVFQNSSPDYLPFEFRALEVALEAACTFLDSQASELEIEAYPLLDELTSKISTLNLERARRLKSRLVALTRRVQKVRDEIEQLMDDDGDMAEMYLTEKKKRMEGSLYGDQSLPVYRTNDCFSLSAPVSPVSSPPESRRLEKSLSIVRSRHDSARSSEDATENIEELEMLLEAYFVVIDSTLNKLTSLKEYIDDTEDFINIQLDNVRNQLIQFELLLTTATFVVAIFGVVAGIFGMNFEIDFFEKPGAFKWVLAITGVCGLVVFLAFLWFYKRRRLMPL

SEQ ID NO: 4403 - protein, 371 aa, Arabidopsis thaliana
MRRCDLPARDLRLLDPLFVYPSTILGREKAIVVNLEQIRCIITADEVLLLNSLDNYVLRYVVELQQRLKASSVTEVWNQDSLELSRRRSRSLDNVFQNSSPDYLPFEFRALEVALEAACTFLDSQASELEIEAYPLLDELTSKISTLNLERARRLKSRLVALTRRVQKVRDEIEQLMDDDGDMAEMYLTEKKKRMEGSLYGDQSLPVYRTNDCFSLSAPVSPVSSPPESRRLEKSLSIVRSRHDSARSSEDATENIEELEMLLEAYFVVIDSTLNKLTSLKEYIDDTEDFINIQLDNVRNQLIQFELLLTTATFVVAIFGVVAGIFGMNFEIDFFEKPGAFKWVLAITGVCGLVVFLAFLWFYKRRRLMPL

SEQ ID NO: 4404 - DNA, 687 bp, Arabidopsis thaliana
aataccttcttctccactctcattctctctttctgacacattaactacttatccttcttgcattcttctctctctctacacccaaacaaacacacttataatatatcaagaaagaagatgtctagcagaagatcatcacgttcaagacagtcaggaagctcaagaatctctgacgatcagatttccgatcttgtttctaagctccaacacctcatccctgaacttcgccgccgccgttctgacaaggtgtcagcatctaaggtactacaagagacttgcaactacatcaggaacttacacagagaggttgatgacctcagtgaccgtttgtcggaactcttggcttcgacggacgacaacagcgccgaagcagccatcattaggagcttgcttaattattaaatccgcattacttaatctgagagctattaatcgtccgtttccggccaccaaatttatcttattatgggtatcgtctgtttacttctacatcatatattatgagatatagctagggtttcgggtcattgttaggccaactcatatatttatatttaatatatggttatgtatgtatgtatgcatgttaattgtatctgagggtccagacctggcgtatagtagcctgtgtatcatgagatcctctaatatttatgattaatgacacggtccgtttccttttttacc

SEQ ID NO: 4405 - protein, 169 aa, Arabidopsis thaliana
IPSSPLSFSLSDTLTTYPSCILLSLYTQTNTLIIYQERRCLAEDHHVQDSQEAQESLTIRFPILFLSSNTSSLNFAAAVLTRCQHLRYYKRLATTSGTYTERLMTSVTVCRNSWLRRTTTAPKQPSLGACLIIKSALLNLRAINRPFPATKFILLWVSSVYFYIIYYEI

SEQ ID NO: 4406 - protein, 94 aa, Arabidopsis thaliana
MSSRRSSRSRQSGSSRISDDQISDLVSKLQHLIPELRRRRSDKVSASKVLQETCNYIRNLHREVDDLSDRLSELLASTDDNSAEAAIIRSLLNY

SEQ ID NO: 4407 - DNA, 1263 bp, Arabidopsis thaliana
atggactttgctctcttctcctcgatttcaatctttgagataaaccacaaagatcctccgattcgaaggtttataaaaactcaaaatcgaatcttatccacaagaaaacaacaaggtacttttccaaaaatgaaggcggagttgaatttgccggcgggattccgatttcatccgacggacgaagagcttgtcaagttctatctttgccggagatgtgcgtcagaaccgattaacgttccggttatcgcagagattgacttgtacaaattcaatccatgggagcttccagaaatggcgttgtacggtgagaaagaatggtacttcttctcgcatagagaccggaaatacccaaacgggtcgagaccaaaccgggcagctggaaccggttattggaaagcgactggagctgataaaccgatcggaaaaccgaagacgttagggattaagaaagcactcgtcttctacgcaggaaaagctccgaaagggattaaaacgaattggattatgcacgagtatcgtctcgctaatgtcgatcgatctgcttctaccaacaagaagaacaacttaagacttgatgattgggttttgtgtcggatatacaataagaaaggaacaatggagaagtatttaccggcggcggctgagaaaccgacggaaaagatgagtacgtcggactcaagatgctcaagtcacgtgatttcaccggacgtcacgtgttctgataactgggaggttgagagtgagcccaaatggattaatctggaagacgcgttagaggcatttaatgatgacacgtccatgtttagttccattggtttgttgcaaaatgacgcctttgttcctcagtttcagtaccagtcctccgatttcgtcgattcgtttcaggacccgttcgagcagaaaccgttcttgaattggaattttgctcctcaagggtaaaaataatcggcaaaaagttgaagcttttcagagtcttcgatcaccggcattgtgtcggatcctgacccggagaccaagtcgggtcatacgattacataatcgggttattgagatttccacatttggatttccgagactaaccaacttaacggattctggggtaattggggggttttgcacaggtgaatcacactgagtcagcaagtttcgattttttggttttgttttgtaatgattgattaaatgtctaaagatatcacgaagtagatacagaagaactgtaaaagcaattgtgaccaaccattatgaatcatatatatattc

SEQ ID NO: 4408 - protein, 312 aa, Arabidopsis thaliana
MDFALFSSISIFEINHKDPPIRRFIKTQNRILSTRKQQGTFPKMKAELNLPAGFRFHPTDEELVKFYLCRRCASEPINVPVIAEIDLYKFNPWELPEMALYGEKEWYFFSHRDRKYPNGSRPNRAAGTGYWKATGADKPIGKPKTLGIKKALVFYAGKAPKGIKTNWIMHEYRLANVDRSASTNKKNNLRLDDWVLCRIYNKKGTMEKYLPAAAEKPTEKMSTSDSRCSSHVISPDVTCSDNWEVESEPKWINLEDALEAFNDDTSMFSSIGLLQNDAFVPQFQYQSSDFVDSFQDPFEQKPFLNWNFAPQG

SEQ ID NO: 4409 - protein, 269 aa, Arabidopsis thaliana
MKAELNLPAGFRFHPTDEELVKFYLCRRCASEPINVPVIAEIDLYKFNPWELPEMALYGEKEWYFFSHRDRKYPNGSRPNRAAGTGYWKATGADKPIGKPKTLGIKKALVFYAGKAPKGIKTNWIMHEYRLANVDRSASTNKKNNLRLDDWVLCRIYNKKGTMEKYLPAAAEKPTEKMSTSDSRCSSHVISPDVTCSDNWEVESEPKWINLEDALEAFNDDTSMFSSIGLLQNDAFVPQFQYQSSDFVDSFQDPFEQKPFLNWNFAPQG

SEQ ID NO: 4410 - protein, 215 aa, Arabidopsis thaliana
MALYGEKEWYFFSHRDRKYPNGSRPNRAAGTGYWKATGADKPIGKPKTLGIKKALVFYAGKAPKGIKTNWIMHEYRLANVDRSASTNKKNNLRLDDWVLCRIYNKKGTMEKYLPAAAEKPTEKMSTSDSRCSSHVISPDVTCSDNWEVESEPKWINLEDALEAFNDDTSMFSSIGLLQNDAFVPQFQYQSSDFVDSFQDPFEQKPFLNWNFAPQG

SEQ ID NO: 4411 - DNA, 2120 bp, Arabidopsis thaliana
gtcgcagaaaacagagattcctcgctgtctgaactgaaaaataagatcgcattaactcaaaactctcacaaagacaaagatcttctcctccttctcttctctttttcacttttctctcttcccctctctcgaagcttgaaaggtaacaacaatggagaaccctccggatcaaacagagtcaaaggagactcttcaacaacccattacaagaagaagaacaaagggtggtcttctcactatgcccttcatcattgcaaacgaggggttcgagaaagtggcgagctatggattattacagaacatgattctttatctgatgagtgattacagattgggacttgttaaaggacaaactgtcttgttcatgtgggttgctgctactaatttcatgcctctcgttggagcttttctctcagattcatatttgggtcgctttctcaccattgtcattgcttctctctccagtctcctggggatggtggttctatggctaacggcgatgttgccgcaagtaaaaccatcaccgtgtgtagcaacagccggaaccaactgcagttccgcgacatcttctcaattggctctcttgtataccgcattcgcattaatatcgattggatcaggaggaatcaggccatgttctttagcctttggtgctgatcaattggacaacaaagagaatcctaagaacgagagagttcttgagagtttctttggttggtactacgcttcttcatcagttgctgtcttgatcgctttcaccgtcattgtttacattcaagatcatctaggatggaaaatcgggtttggaatacccgcgattctcatgctgctcgcgggtttcttgtttgttttcgcgtctcctctctacgttaagcgcgatgtgagcaagagtctgttcactggtttagctcaagtggttgctgcagcttacgtgaagagaaacttaactttgccggatcatcatgactccagagattgttattaccgtttgaaagattctgaactcaaagctccaagtgacaaattgaggtttttaaacaaagcttgtgccataagtaaccgcgatgaagaccttggttctgatggtttggccttaaaccagtggaggctatgcacaacggaccaagttgagaaactcaaggcgttggtcaaggtgataccggtatggtccacggggataatgatgtcgataaacgttagccagaactcttttcagttgcttcaagctaaatcaatggacagacgtttaagcagcaattcgaccttccaaatcccagctggatcgtttggtatgttcacaatcatagccttaatctcatgggttgttctgtacgaccgcgcaattctccctttagcttcaaagatccgaggcagaccagttagagtcaatgtcaagattcgaatgggattagggctattcatatcattcttagcaatggcggtttccgcaactgttgaacattacagaaggaaaaccgcgataagccaaggactcgcaaacgatgccaactcaacagtgagcatctcagcaatgtggcttgtaccacagtatgtactacacggtttagcagaggccttgaccgggataggacagaccgagtttttctataccgagtttcctaaaagcatgtcgagtatcgcagcttcgttgttcggtctaggaatggcagtggctaatatcttggctagtgtgatcctaaatgcggtaaagaatagctcaaagcagggcaatgtgagctggattgaagataacatcaacaagggtcactatgactattactattgggttttagcgatcttgagcttcgttaatgtcatctactacgttgtgtgtagctggtcctatggtcctacggtggatcaggtgaggaatgataaggttaatggtatgagaaaagaagaagaggaagttattaaattaaactaagaccaattggttgatcataattaaatggtgtacgtgtgttataaaatctatatatttgtatgtaattagattatcatatattatggatttgggttttcttaggatgtagcgaatgatgttaattattgggtgtgtttatttcttactacaaaaaagccattgtgtgtatttgattgaagagaatcaaattttc

SEQ ID NO: 4412 - protein, 591 aa, Arabidopsis thaliana
MENPPDQTESKETLQQPITRRRTKGGLLTMPFIIANEGFEKVASYGLLQNMILYLMSDYRLGLVKGQTVLFMWVAATNFMPLVGAFLSDSYLGRFLTIVIASLSSLLGMVVLWLTAMLPQVKPSPCVATAGTNCSSATSSQLALLYTAFALISIGSGGIRPCSLAFGADQLDNKENPKNERVLESFFGWYYASSSVAVLIAFTVIVYIQDHLGWKIGFGIPAILMLLAGFLFVFASPLYVKRDVSKSLFTGLAQVVAAAYVKRNLTLPDHHDSRDCYYRLKDSELKAPSDKLRFLNKACAISNRDEDLGSDGLALNQWRLCTTDQVEKLKALVKVIPVWSTGIMMSINVSQNSFQLLQAKSMDRRLSSNSTFQIPAGSFGMFTIIALISWVVLYDRAILPLASKIRGRPVRVNVKIRMGLGLFISFLAMAVSATVEHYRRKTAISQGLANDANSTVSISAMWLVPQYVLHGLAEALTGIGQTEFFYTEFPKSMSSIAASLFGLGMAVANILASVILNAVKNSSKQGNVSWIEDNINKGHYDYYYWVLAILSFVNVIYYVVCSWSYGPTVDQVRNDKVNGMRKEEEEVIKLN

SEQ ID NO: 4413 - protein, 562 aa, Arabidopsis thaliana
MPFIIANEGFEKVASYGLLQNMILYLMSDYRLGLVKGQTVLFMWVAATNFMPLVGAFLSDSYLGRFLTIVIASLSSLLGMVVLWLTAMLPQVKPSPCVATAGTNCSSATSSQLALLYTAFALISIGSGGIRPCSLAFGADQLDNKENPKNERVLESFFGWYYASSSVAVLIAFTVIVYIQDHLGWKIGFGIPAILMLLAGFLFVFASPLYVKRDVSKSLFTGLAQVVAAAYVKRNLTLPDHHDSRDCYYRLKDSELKAPSDKLRFLNKACAISNRDEDLGSDGLALNQWRLCTTDQVEKLKALVKVIPVWSTGIMMSINVSQNSFQLLQAKSMDRRLSSNSTFQIPAGSFGMFTIIALISWVVLYDRAILPLASKIRGRPVRVNVKIRMGLGLFISFLAMAVSATVEHYRRKTAISQGLANDANSTVSISAMWLVPQYVLHGLAEALTGIGQTEFFYTEFPKSMSSIAASLFGLGMAVANILASVILNAVKNSSKQGNVSWIEDNINKGHYDYYYWVLAILSFVNVIYYVVCSWSYGPTVDQVRNDKVNGMRKEEEEVIKLN

SEQ ID NO: 4414 - protein, 541 aa, Arabidopsis thaliana
MILYLMSDYRLGLVKGQTVLFMWVAATNFMPLVGAFLSDSYLGRFLTIVIASLSSLLGMVVLWLTAMLPQVKPSPCVATAGTNCSSATSSQLALLYTAFALISIGSGGIRPCSLAFGADQLDNKENPKNERVLESFFGWYYASSSVAVLIAFTVIVYIQDHLGWKIGFGIPAILMLLAGFLFVFASPLYVKRDVSKSLFTGLAQVVAAAYVKRNLTLPDHHDSRDCYYRLKDSELKAPSDKLRFLNKACAISNRDEDLGSDGLALNQWRLCTTDQVEKLKALVKVIPVWSTGIMMSINVSQNSFQLLQAKSMDRRLSSNSTFQIPAGSFGMFTIIALISWVVLYDRAILPLASKIRGRPVRVNVKIRMGLGLFISFLAMAVSATVEHYRRKTAISQGLANDANSTVSISAMWLVPQYVLHGLAEALTGIGQTEFFYTEFPKSMSSIAASLFGLGMAVANILASVILNAVKNSSKQGNVSWIEDNINKGHYDYYYWVLAILSFVNVIYYVVCSWSYGPTVDQVRNDKVNGMRKEEEEVIKLN

SEQ ID NO: 4415 - DNA, 2042 bp, Arabidopsis thaliana
actgtttctgttttattattgttattgacacgaaaagacagagaaacaaatagaggcagagagcagaagaaagacgaaacagaggattttcatagagaatcctctttcttcctcctttcttcgccttcttctgttcttcttcttctcctgggtcttgaagatacatgaaacaacatctcattgttatgaatgttgatgcattcttttatgtaaacttaactttttacaggtgacctctctgaaagattgtaaggttccttacaaaaatttgatttcgtttggtgaatgaaatagttagaaattctccaaaacaaaatatgggtggctgtgtttcttctcagagaaaactcagtaacaagcttcaacagaagaagcagaaacgcggcagatctggcaaatgtcggtccaaaatatcggcttctatgcccgatgttcctatgaaacgcatgagtaatgcgagtgttagggattttgcggtgagcgaatatgttcatcttgatttcgacaattgtgcagccaagatgatgtgtaagagagctgagatgtctaatgctaacttccatttaactcagcttcaatggaactgcagccaaatcgatggaaaccgaatttcacatgaggaggcttggtatgattcctttagctacatcgattctgattctgatgatggttcaaatagtagtgtcttcgaagatgcaaatgcttctgcaatgggacaagtgattcagtatgaagaattctacgaaagttacctgaaaatagatggaaacaaaggtgagacttactcgagcaagaatgaggttagtataaagagaaaccaagtggctgatgaatctcaccatgaaaccttcaagactactacttgtgaagatcatcaagatcacagaaagaaatcatcaaaagttgttatggtttctgtgagaagaacatctattgatagcaaatcaacaccatctgaattctcttcagctgagaagctcttgtaccgtccaaaagccggttctatgattcaacgttctttaggagagaagatgaccagtcaaggaagttggtcagaagtttctccgtcgagtttcaagctccgtggattgaatttcttcagagacaagcaaaagtgtcctgcaccaaattgtagtccttacataccaattggagtcgacctttttgcatgtcctaaaaagatcaaccacattgctcaacacattgagcttcctaatttgaaaccggcatcatcacaagtctgcgatatccccaatcttttgatagtgaacatccagcttccaatgtatccaacctctatgtttggtgactatgatggtgaaggacttagcttagtattgtacttcaaacgcaatgagaactatcacaaagaaatctcatctcactttaaagaaaccatcaagagattcatggaagatgaaatggagaaagtaaaaggattcacaagagaatcaacagttccattcagagagaggttaaagatcatggcaggtttggtaaatcctgaggatttccagctaagttctactgagagaaaacttatcacagcttacaacgatagaccggttctttctcgtccgcaacacgatttctttcagggaccaaactactttgagatagatttggatatacacagattcagttacatttcgaggaaaggactcgaatctttcagggatcgtatcaagaacgggattcttgatttgggattaacaattcaggctcaatcaccagaggaacttccagagcaagtactgtgttgtgtcaggctgaacaagattgatttcgtgaatcacggacaaattccaacgcttttaactaacaaacaatgaagtgatcactacataataacacagagagagagacaaagatcaatcaatcaatcaatggggagagcaaaaaaagacaaaaagcaaaaacagagaacgttttcacatatttgtattgttgagagacaaaagaagaagataaaattcaattgtcttttttggaaacaagatttgctcgggaatttattaatctcatgaaaaagattcatttgt

SEQ ID NO: 4416 - protein, 504 aa, Arabidopsis thaliana
MGGCVSSQRKLSNKLQQKKQKRGRSGKCRSKISASMPDVPMKRMSNASVRDFAVSEYVHLDFDNCAAKMMCKRAEMSNANFHLTQLQWNCSQIDGNRISHEEAWYDSFSYIDSDSDDGSNSSVFEDANASAMGQVIQYEEFYESYLKIDGNKGETYSSKNEVSIKRNQVADESHHETFKTTTCEDHQDHRKKSSKVVMVSVRRTSIDSKSTPSEFSSAEKLLYRPKAGSMIQRSLGEKMTSQGSWSEVSPSSFKLRGLNFFRDKQKCPAPNCSPYIPIGVDLFACPKKINHIAQHIELPNLKPASSQVCDIPNLLIVNIQLPMYPTSMFGDYDGEGLSLVLYFKRNENYHKEISSHFKETIKRFMEDEMEKVKGFTRESTVPFRERLKIMAGLVNPEDFQLSSTERKLITAYNDRPVLSRPQHDFFQGPNYFEIDLDIHRFSYISRKGLESFRDRIKNGILDLGLTIQAQSPEELPEQVLCCVRLNKIDFVNHGQIPTLLTNKQ

SEQ ID NO: 4417 - protein, 469 aa, Arabidopsis thaliana
MPDVPMKRMSNASVRDFAVSEYVHLDFDNCAAKMMCKRAEMSNANFHLTQLQWNCSQIDGNRISHEEAWYDSFSYIDSDSDDGSNSSVFEDANASAMGQVIQYEEFYESYLKIDGNKGETYSSKNEVSIKRNQVADESHHETFKTTTCEDHQDHRKKSSKVVMVSVRRTSIDSKSTPSEFSSAEKLLYRPKAGSMIQRSLGEKMTSQGSWSEVSPSSFKLRGLNFFRDKQKCPAPNCSPYIPIGVDLFACPKKINHIAQHIELPNLKPASSQVCDIPNLLIVNIQLPMYPTSMFGDYDGEGLSLVLYFKRNENYHKEISSHFKETIKRFMEDEMEKVKGFTRESTVPFRERLKIMAGLVNPEDFQLSSTERKLITAYNDRPVLSRPQHDFFQGPNYFEIDLDIHRFSYISRKGLESFRDRIKNGILDLGLTIQAQSPEELPEQVLCCVRLNKIDFVNHGQIPTLLTNKQ

SEQ ID NO: 4418 - protein, 464 aa, Arabidopsis thaliana
MKRMSNASVRDFAVSEYVHLDFDNCAAKMMCKRAEMSNANFHLTQLQWNCSQIDGNRISHEEAWYDSFSYIDSDSDDGSNSSVFEDANASAMGQVIQYEEFYESYLKIDGNKGETYSSKNEVSIKRNQVADESHHETFKTTTCEDHQDHRKKSSKVVMVSVRRTSIDSKSTPSEFSSAEKLLYRPKAGSMIQRSLGEKMTSQGSWSEVSPSSFKLRGLNFFRDKQKCPAPNCSPYIPIGVDLFACPKKINHIAQHIELPNLKPASSQVCDIPNLLIVNIQLPMYPTSMFGDYDGEGLSLVLYFKRNENYHKEISSHFKETIKRFMEDEMEKVKGFTRESTVPFRERLKIMAGLVNPEDFQLSSTERKLITAYNDRPVLSRPQHDFFQGPNYFEIDLDIHRFSYISRKGLESFRDRIKNGILDLGLTIQAQSPEELPEQVLCCVRLNKIDFVNHGQIPTLLTNKQ

SEQ ID NO: 4419 - DNA, 559 bp, Arabidopsis thaliana
actaatttcttaaaccctctcaacaatacgtaacaatggcctccaaatccgtcgtcgttttcctcttcctcgctctcgtggcttcctctgtcgttgctcaagctcccggaccagctccgaccatatctcccttgccagccactcctacaccgtctcaatcgcctagagccaccgcaccggcaccttcaccatcagccaatcctcctccctcagctcctaccactgctcctccggttagtcagccgcctactgaatctccaccagctcctccgacgtctacttccccatccggagctccgggcacaaatgttccgtctggagaagctggacctgctcagtctcccctaagtggctctccaaacgcagctgcagttagcagagtctccctcgtcggaactttcgccggagtggccgtgatcgccgctttgttgctgtagaggctattgacccatcgaatagattcactaggaattatttttgggttcattgtttgtccttttgttactatttaattatgtagtttatagtgttttatatgatgctttattatcgtgttaag

SEQ ID NO: 4420 - protein, 133 aa, Arabidopsis thaliana
MASKSVVVFLFLALVASSVVAQAPGPAPTISPLPATPTPSQSPRATAPAPSPSANPPPSAPTTAPPVSQPPTESPPAPPTSTSPSGAPGTNVPSGEAGPAQSPLSGSPNAAAVSRVSLVGTFAGVAVIAALLL

SEQ ID NO: 4421 - DNA, 555 bp, Arabidopsis thaliana
aaaaatcaaatcgcctgcttttacttttcttgcaatttcagttccaaatcgaatcatcatcaaagtcaagcaattgtcagagaagagatccagaagaaccttagaccagttcgtatagttgggcatcaatcaatggctagcagctggagaagatcaattggaaacgtgagatctttcatcggtaattccatgggaggtcttagaggtggtcagagtgccgcttcttgggtcgtcgccggaactattgcttactttctctggattaagccagaacaagatcttaaaaaggaacaagaggctagggcagctcttgcaatggctgatactaatcaatacgttgagaagaggaaaccaatcgctgaccctcaggttactggtttgatatatggaaacaagaacggaactgataagtcagaagattgaattttctgttaagtttgaacatttggttgtaagttagcttctacagttttgttccttatagctaatgatcatgtatagacactatagttgtaacttacaacgaataaaagatggaaactttttttgttaccg

SEQ ID NO: 4422 - protein, 140 aa, Arabidopsis thaliana
KNQIACFYFSCNFSSKSNHHQSQAIVREEIQKNLRPVRIVGHQSMASSWRRSIGNVRSFIGNSMGGLRGGQSAASWVVAGTIAYFLWIKPEQDLKKEQEARAALAMADTNQYVEKRKPIADPQVTGLIYGNKNGTDKSED

SEQ ID NO: 4423 - protein, 96 aa, Arabidopsis thaliana
MASSWRRSIGNVRSFIGNSMGGLRGGQSAASWVVAGTIAYFLWIKPEQDLKKEQEARAALAMADTNQYVEKRKPIADPQVTGLIYGNKNGTDKSED

SEQ ID NO: 4424 - protein, 77 aa, Arabidopsis thaliana
MGGLRGGQSAASWVVAGTIAYFLWIKPEQDLKKEQEARAALAMADTNQYVEKRKPIADPQVTGLIYGNKNGTDKSED

SEQ ID NO: 4425 - DNA, 1951 bp, Arabidopsis thaliana
atcagttaatcaacgcaacgccgagaagctttttcaggggtttggtgcgttgaatttgtggatcaagaaacaatgcaaattcaatgcaaaaccctaacttttacagtttcttcgattccttgtaacccaaagctaccattcccatcttccctcactttacggtcatggaatccttcattcccgagtttcaggagctccgctgtttccggaccaaagtcatcactgaagctgaacaggtttttaagaaactgtgcaagtacgaatcaggagcttgttgttgatggagaaaccggaaatgggtcgatttcggagctccaaggagatgcagcaaatggttcgatttcgccggtggaagtggaagcagaagtagaagaagtgaaggtagatgatttggcgactcagagcatttggggacagatgaaagagatcgtcatgtttaccggacctgccgcgggattgtggctatgtgggccgttgatgagtctcattgatacggcggtgattggtcaaggaagctcactcgaactcgctgctttaggtcctgctaccgtcatctgtgattatttgtgttatacgttcatgttcctctcagttgcgacttcaaatcttgttgctacctctcttgctcggcaggataaagatgaagtacaacatcagatatcgatcttgcttttcattgggttggcttgtggagtcacgatgatggtgttgacaagactgtttggttcctgggcactaactgcttttacaggggtaaagaatgccgacattgttccagcagctaataaatatgttcagattcgtggtttagcatggccagctgttctcattggatgggttgctcaaagtgcaagtcttggtatgaaagactcatggggacctcttaaggctttggcggttgctagtgcaataaacggtgttggtgatgtggtcttatgcacctttctaggatatggtatagcaggtgcagcttgggcaactatggtgtcacaagttgttgctgcttatatgatgatggacgcattgaacaagaaaggatacagcgcattctcattctgtgttccttctccaagtgaacttttgacgatttttggactcgctgcccctgtctttataactatgatgtcaaaggttttgttctatacgctccttgtgtactttgctacatcaatgggtacaaatatcatagctgctcatcaggttatgcttcagatatataccatgagtacggtttggggggagcctctctctcaaactgcacagtcctttatgcctgagcttttattcggaatcaatcgtaatttgcctaaagctagggtgcttctgaagtcactagttatcatcggagctacgctaggaatagtagtcggaaccattggcacagcagttccatggctgttccctggcatcttcacacgtgacaaggttgtcacatccgagatgcacaaggtcataataccgtattttcttgctttatccatcactccaagtactcacagtcttgaaggcaccttactggctggaagagatcttagatatatcagcttgtcaatgactggatgcttagcggtcgctgggcttctacttatgcttctgagcaatggaggatttggtttgagaggctgctggtatgctctcgtgggattccaatgggctcggttttctctatctcttttccgccttctatcgcgggatggtgtactgtactccgaagatacaagccgatacgctgagaaagtgaaagctgcgtagctcagtaagtcaccgtatacctcacaagaaaaagtataatgaacagagaacagcttcattcagttgtagatcaatgggttactctgtttcaagattgtattctttaagaacatgaaaatgtattcgactgaatagaaaagtcttggcattaataggccctgcttcaactcctgtgattcccctgtatataaaagatgat

SEQ ID NO: 4426 - protein, 559 aa, Arabidopsis thaliana
MQIQCKTLTFTVSSIPCNPKLPFPSSLTLRSWNPSFPSFRSSAVSGPKSSLKLNRFLRNCASTNQELVVDGETGNGSISELQGDAANGSISPVEVEAEVEEVKVDDLATQSIWGQMKEIVMFTGPAAGLWLCGPLMSLIDTAVIGQGSSLELAALGPATVICDYLCYTFMFLSVATSNLVATSLARQDKDEVQHQISILLFIGLACGVTMMVLTRLFGSWALTAFTGVKNADIVPAANKYVQIRGLAWPAVLIGWVAQSASLGMKDSWGPLKALAVASAINGVGDVVLCTFLGYGIAGAAWATMVSQVVAAYMMMDALNKKGYSAFSFCVPSPSELLTIFGLAAPVFITMMSKVLFYTLLVYFATSMGTNIIAAHQVMLQIYTMSTVWGEPLSQTAQSFMPELLFGINRNLPKARVLLKSLVIIGATLGIVVGTIGTAVPWLFPGIFTRDKVVTSEMHKVIIPYFLALSITPSTHSLEGTLLAGRDLRYISLSMTGCLAVAGLLLMLLSNGGFGLRGCWYALVGFQWARFSLSLFRLLSRDGVLYSEDTSRYAEKVKAA

SEQ ID NO: 4427 - protein, 444 aa, Arabidopsis thaliana
MKEIVMFTGPAAGLWLCGPLMSLIDTAVIGQGSSLELAALGPATVICDYLCYTFMFLSVATSNLVATSLARQDKDEVQHQISILLFIGLACGVTMMVLTRLFGSWALTAFTGVKNADIVPAANKYVQIRGLAWPAVLIGWVAQSASLGMKDSWGPLKALAVASAINGVGDVVLCTFLGYGIAGAAWATMVSQVVAAYMMMDALNKKGYSAFSFCVPSPSELLTIFGLAAPVFITMMSKVLFYTLLVYFATSMGTNIIAAHQVMLQIYTMSTVWGEPLSQTAQSFMPELLFGINRNLPKARVLLKSLVIIGATLGIVVGTIGTAVPWLFPGIFTRDKVVTSEMHKVIIPYFLALSITPSTHSLEGTLLAGRDLRYISLSMTGCLAVAGLLLMLLSNGGFGLRGCWYALVGFQWARFSLSLFRLLSRDGVLYSEDTSRYAEKVKAA

SEQ ID NO: 4428 - protein, 439 aa, Arabidopsis thaliana
MFTGPAAGLWLCGPLMSLIDTAVIGQGSSLELAALGPATVICDYLCYTFMFLSVATSNLVATSLARQDKDEVQHQISILLFIGLACGVTMMVLTRLFGSWALTAFTGVKNADIVPAANKYVQIRGLAWPAVLIGWVAQSASLGMKDSWGPLKALAVASAINGVGDVVLCTFLGYGIAGAAWATMVSQVVAAYMMMDALNKKGYSAFSFCVPSPSELLTIFGLAAPVFITMMSKVLFYTLLVYFATSMGTNIIAAHQVMLQIYTMSTVWGEPLSQTAQSFMPELLFGINRNLPKARVLLKSLVIIGATLGIVVGTIGTAVPWLFPGIFTRDKVVTSEMHKVIIPYFLALSITPSTHSLEGTLLAGRDLRYISLSMTGCLAVAGLLLMLLSNGGFGLRGCWYALVGFQWARFSLSLFRLLSRDGVLYSEDTSRYAEKVKAA

SEQ ID NO: 4429 - DNA, 1581 bp, Arabidopsis thaliana
gaaattatagttaaatttccaatttgtgaatctgggcgctgtttttctccgtcggagaatttgatcccgccggagatcggccggtttccgcagtcgcattcgtttctttcgcgcgattttcgatgctttgtctatgatgaaaccgcgatcctgtttagatctatagctttcgatcggaagggaagctaaaatccatctagacgccgagatcttggttagctatcactgagattcttatagggtttatatttgagctgttatggcgactaggaatcgtacgctgttgtttaggaagtacagaaactctctcaggagcgttcgtgctccaatggggtcgtcttcgtcgtcgacattgacggagcacaattcgttgaccggagctaaatccggattaggcccggtgatcgagatggcgagcacgtctctattgaatccaaatcggtcttatgctccagtcagtaccgaggatcctgggaattcgagtagaggtacaataacagtgggcttaccaccagattgggttgatgtatctgaggagatttcagtttacattcaacgtgcaagaaccaaaatggctgaattgggaaaggctcatgcgaaagcgttgatgccttcgtttggggatggtaaagaagatcaacatcaaatcgagactttgacacaagaggttaccttcctattgaagaaatctgagaagcaacttcagaggctttctgcagctggaccttctgaagattcaaatgtcaggaaaaacgtccagcgatctcttgctacggatctccaaaacctttctatggagttacgcaagaaacagtctacatatttgaaacgtttgagactacaaaaagaggatggagcggatttagagatgaatctgaacggaagcagatataaagcagaagatgatgactttgatgatatggtatttagtgagcatcaaatgagcaagataaaaaagagtgaggaaatatcaatagagagggagaaagagattcaacaggttgttgaatccgtaagcgagcttgctcagatcatgaaggatctgtcagcgcttgtgatagaccagggtacaatagttgatcggattgactataatatccagaacgttgctagtacagtcgacgatggtctcaaacagctgcaaaaggcggaacgtacacagagacaaggaggtatggtgatgtgtgcgtctgttcttgtcattctctgcttcatcatgctggtactcttaatcctcaaggagattctgttgtgacacaaggagatccctcattttttaattcttttgaaacgcgaacaccacaatttttgcgttgcggagtgttctgtccacaaaatgtcctgaagagaaaaacgaactgtgttgtctatctcgctcagtggcttttactgcagcctcttctgctttcttttttatttcttatggcgtttacataggaaaacattatcacttttgtattgagtgtttgtaagttggcttcttacgagtttataatggatttatttactgtaaagaatatattaaccatgattttaagaatctgtggagaagagatcatatagaactgtaacgtttgttcc

SEQ ID NO: 4430 - protein, 331 aa, Arabidopsis thaliana
MATRNRTLLFRKYRNSLRSVRAPMGSSSSSTLTEHNSLTGAKSGLGPVIEMASTSLLNPNRSYAPVSTEDPGNSSRGTITVGLPPDWVDVSEEISVYIQRARTKMAELGKAHAKALMPSFGDGKEDQHQIETLTQEVTFLLKKSEKQLQRLSAAGPSEDSNVRKNVQRSLATDLQNLSMELRKKQSTYLKRLRLQKEDGADLEMNLNGSRYKAEDDDFDDMVFSEHQMSKIKKSEEISIEREKEIQQVVESVSELAQIMKDLSALVIDQGTIVDRIDYNIQNVASTVDDGLKQLQKAERTQRQGGMVMCASVLVILCFIMLVLLILKEILL

SEQ ID NO: 4431 - protein, 308 aa, Arabidopsis thaliana
MGSSSSSTLTEHNSLTGAKSGLGPVIEMASTSLLNPNRSYAPVSTEDPGNSSRGTITVGLPPDWVDVSEEISVYIQRARTKMAELGKAHAKALMPSFGDGKEDQHQIETLTQEVTFLLKKSEKQLQRLSAAGPSEDSNVRKNVQRSLATDLQNLSMELRKKQSTYLKRLRLQKEDGADLEMNLNGSRYKAEDDDFDDMVFSEHQMSKIKKSEEISIEREKEIQQVVESVSELAQIMKDLSALVIDQGTIVDRIDYNIQNVASTVDDGLKQLQKAERTQRQGGMVMCASVLVILCFIMLVLLILKEILL

SEQ ID NO: 4432 - protein, 281 aa, Arabidopsis thaliana
MASTSLLNPNRSYAPVSTEDPGNSSRGTITVGLPPDWVDVSEEISVYIQRARTKMAELGKAHAKALMPSFGDGKEDQHQIETLTQEVTFLLKKSEKQLQRLSAAGPSEDSNVRKNVQRSLATDLQNLSMELRKKQSTYLKRLRLQKEDGADLEMNLNGSRYKAEDDDFDDMVFSEHQMSKIKKSEEISIEREKEIQQVVESVSELAQIMKDLSALVIDQGTIVDRIDYNIQNVASTVDDGLKQLQKAERTQRQGGMVMCASVLVILCFIMLVLLILKEILL

SEQ ID NO: 4433 - DNA, 2042 bp, Arabidopsis thaliana
gatgcgtcaatcttaggtctccgaggtctcaattatttcatcttcttcggtgatttctggggaagatcctctggatttgggaaagcaactctgtcgatggatgaatctcttttcgaaacttctgggtgatatgctcaatgttgattatctgtggaaaatgatggtcttcttagcatgatcaaggtgtctgacttgcgaagtttgttagatgacggatgatgatttctgagaaaccgttgggagaagaatctatacggcaggatctggaggttttaaccgtttcgaggaggcttgtgaaaagtgttagccagaagttgaagaaaaaaaattcataaaactgaggtggtggaagatgaagaggttgcaaggggagcggtgaattgtttaagcatcagtgttggttgcagagttgctgatacgggtgaggattttgaggaggatttaagtaataagagatggtctagtgctagtgaggagggtaagggattgatgaccatttgtggaactgaagaaattaggttagattgtttttcttatggggttagagagaggttctggaagaataataatagaagataccttgcggacttgggccaggattaccgcaagcacgtttatcttcccgatgatattctggaaatgtgtttgatgaggcttcctttgaccagcttattgaatgcacaccttgtttgcaagaaatggcaatccatggccaacactcagcggtttctccagatgagacgagaaggctcctttcaaacaccgtggttgtttctgtttgctgctcttaaagatggatgctcctctggtgatattcacgggtatgatgtttctcaggacaaatggcataggattgaaactgatctacttaaaggccggtttatgtactccgtgacaagcatccatgaggagatttatatagttggaggtcgttctatggacagaaactctttcaagtcccacagagggatcttggtattcagcccttcgatcaaagcatggcgtaaaatcgcgtctatgagacatgctagatcacttcccattgttggtgccactgaagttacttcagagttttcgaccatgcagaccaaacagaatcgccaagatagacgctttcacctgtcaagagttggcggagagtcagacgtttatgaagaccctcacaggctatcggtaagacgacagaacagaaactcggctgatcaaaatggaaccaaatcccacagattaataagacaaaagcttgatcggcttaaccgaaacagctccaagagatttgtgctcattgccataggaggcactggcttattcgatgagccactggattcaggtgaaatatacgactcagcaacaaacacatggtcagaaatgcagagactcccgatgggtttcggggttgtaagttgtgggattatatgcaatggaatcttctatgcttattctgagaatgataagctatcagggtatgacattgagagaggcttctggattacaatccaaacatctccaatccctcctcgggttcatgagttctaccctaaacttgtctcctgcaaccatcggttgttcatgctctctgtttcatggtgcgatgaaggagatgggcaaattgggaggagaaacaaggcagtgagaaagctgtgggagttggatcttgtgtacctcacatggaccgaggtttcagtacacccggacgcaccaatggattggaacgccacatatgtctcagaccagaacatactaatgggaattgagatgttcaagatctttgggcaggtattaagtttcttcactgtctgcgatgtattaactgaagaagcctcttggagacatgtttcgaggaaccaaaggagtcaaaaacttaatctatcttgtacgaacaagaccattgcattgcttcatctctgatcttcttcattctttttgttaactttcaggactcgtcgaaattgattgattcatgtattgaaaagaaatgcaatgtgctagttcctagattgatttgaaatgtaatatttatattttaatattttcgggatgtt

SEQ ID NO: 4434 - protein, 472 aa, Arabidopsis thaliana
MTICGTEEIRLDCFSYGVRERFWKNNNRRYLADLGQDYRKHVYLPDDILEMCLMRLPLTSLLNAHLVCKKWQSMANTQRFLQMRREGSFQTPWLFLFAALKDGCSSGDIHGYDVSQDKWHRIETDLLKGRFMYSVTSIHEEIYIVGGRSMDRNSFKSHRGILVFSPSIKAWRKIASMRHARSLPIVGATEVTSEFSTMQTKQNRQDRRFHLSRVGGESDVYEDPHRLSVRRQNRNSADQNGTKSHRLIRQKLDRLNRNSSKRFVLIAIGGTGLFDEPLDSGEIYDSATNTWSEMQRLPMGFGVVSCGIICNGIFYAYSENDKLSGYDIERGFWITIQTSPIPPRVHEFYPKLVSCNHRLFMLSVSWCDEGDGQIGRRNKAVRKLWELDLVYLTWTEVSVHPDAPMDWNATYVSDQNILMGIEMFKIFGQVLSFFTVCDVLTEEASWRHVSRNQRSQKLNLSCTNKTIALLHL

SEQ ID NO: 4435 - protein, 422 aa, Arabidopsis thaliana
MCLMRLPLTSLLNAHLVCKKWQSMANTQRFLQMRREGSFQTPWLFLFAALKDGCSSGDIHGYDVSQDKWHRIETDLLKGRFMYSVTSIHEEIYIVGGRSMDRNSFKSHRGILVFSPSIKAWRKIASMRHARSLPIVGATEVTSEFSTMQTKQNRQDRRFHLSRVGGESDVYEDPHRLSVRRQNRNSADQNGTKSHRLIRQKLDRLNRNSSKRFVLIAIGGTGLFDEPLDSGEIYDSATNTWSEMQRLPMGFGVVSCGIICNGIFYAYSENDKLSGYDIERGFWITIQTSPIPPRVHEFYPKLVSCNHRLFMLSVSWCDEGDGQIGRRNKAVRKLWELDLVYLTWTEVSVHPDAPMDWNATYVSDQNILMGIEMFKIFGQVLSFFTVCDVLTEEASWRHVSRNQRSQKLNLSCTNKTIALLHL

SEQ ID NO: 4436 - protein, 419 aa, Arabidopsis thaliana
MRLPLTSLLNAHLVCKKWQSMANTQRFLQMRREGSFQTPWLFLFAALKDGCSSGDIHGYDVSQDKWHRIETDLLKGRFMYSVTSIHEEIYIVGGRSMDRNSFKSHRGILVFSPSIKAWRKIASMRHARSLPIVGATEVTSEFSTMQTKQNRQDRRFHLSRVGGESDVYEDPHRLSVRRQNRNSADQNGTKSHRLIRQKLDRLNRNSSKRFVLIAIGGTGLFDEPLDSGEIYDSATNTWSEMQRLPMGFGVVSCGIICNGIFYAYSENDKLSGYDIERGFWITIQTSPIPPRVHEFYPKLVSCNHRLFMLSVSWCDEGDGQIGRRNKAVRKLWELDLVYLTWTEVSVHPDAPMDWNATYVSDQNILMGIEMFKIFGQVLSFFTVCDVLTEEASWRHVSRNQRSQKLNLSCTNKTIALLHL

SEQ ID NO: 4437 - DNA, 1218 bp, Arabidopsis thaliana
ttctttacttgattgcttattcatctgttgattctgtggttagataagggtatatgagtttgttggacatgggtggagatatgatggaagatgattgggaatttgcgtcatcatcaaaccctaaaagaaccctagttcttgtgggccgtactggaaacggaaagagtgcgacaggtaacagtatccttgggaggaaagcttttaggtcaagagctagaactgtaggagtgacaagcacgtgcgagtcacagagagttgttcaagaagatggtgatatcattaatgttgttgatactcctggtttgtttgatttgtctactgcagctgattttattggtaaagagattgtgaggtgtataagtttggcagaagatgggattcatgcgatcttgttggtattctctgtgaggcggcttgctgaagaggagcaaactgtgcttagtttcttgcaagcgctattcggcagtaagatcgctgactatatgatcgttgtttttaccggtggcgatgagttggaagagaatgaggagacattggaggagtatttggctgactattgccctgagtttcttaaagaaattcttgggatatgtgacaatcggttggtgttgtttaataacaagactactgataaggtgaagaaagctgagcaagttcagaagcttctctcacttgttgaatctgttgttaaacataacaatggaaaaccgtattcagatgagttgttccatgagctacaggaagaggctatcaagctaagggaccagaaaaaggaggttgagttacttcagggttactctaataatgagatagatgagttcaagaagcaaatcgatatgtcctatgataggcagcttagccgcatcaccgagatggtggagactaagctgagagacactgctaagagactagagcagcaactaggtgaagagcaagctgcaagacttgaagcggagaagagggcaaacgaagttcagaagcggtcgagcgatgagattaagaagctcagagagaatctggagagggcggaaaaagagacgaaggaacttcagaaaaaactgggaaagtgcatcaatctatgatatgttgagatgttgtagctccagtgaaatctgataagatcattcatgtcaagtttttttatgtagtcttttgttttcttttggttttttaacaatatggttttatcattaatggcagtgtgttataagtttgctt

SEQ ID NO: 4438 - protein, 342 aa, Arabidopsis thaliana
MSLLDMGGDMMEDDWEFASSSNPKRTLVLVGRTGNGKSATGNSILGRKAFRSRARTVGVTSTCESQRVVQEDGDIINVVDTPGLFDLSTAADFIGKEIVRCISLAEDGIHAILLVFSVRRLAEEEQTVLSFLQALFGSKIADYMIVVFTGGDELEENEETLEEYLADYCPEFLKEILGICDNRLVLFNNKTTDKVKKAEQVQKLLSLVESVVKHNNGKPYSDELFHELQEEAIKLRDQKKEVELLQGYSNNEIDEFKKQIDMSYDRQLSRITEMVETKLRDTAKRLEQQLGEEQAARLEAEKRANEVQKRSSDEIKKLRENLERAEKETKELQKKLGKCINL

SEQ ID NO: 4439 - protein, 337 aa, Arabidopsis thaliana
MGGDMMEDDWEFASSSNPKRTLVLVGRTGNGKSATGNSILGRKAFRSRARTVGVTSTCESQRVVQEDGDIINVVDTPGLFDLSTAADFIGKEIVRCISLAEDGIHAILLVFSVRRLAEEEQTVLSFLQALFGSKIADYMIVVFTGGDELEENEETLEEYLADYCPEFLKEILGICDNRLVLFNNKTTDKVKKAEQVQKLLSLVESVVKHNNGKPYSDELFHELQEEAIKLRDQKKEVELLQGYSNNEIDEFKKQIDMSYDRQLSRITEMVETKLRDTAKRLEQQLGEEQAARLEAEKRANEVQKRSSDEIKKLRENLERAEKETKELQKKLGKCINL

SEQ ID NO: 4440 - protein, 333 aa, Arabidopsis thaliana
MMEDDWEFASSSNPKRTLVLVGRTGNGKSATGNSILGRKAFRSRARTVGVTSTCESQRVVQEDGDIINVVDTPGLFDLSTAADFIGKEIVRCISLAEDGIHAILLVFSVRRLAEEEQTVLSFLQALFGSKIADYMIVVFTGGDELEENEETLEEYLADYCPEFLKEILGICDNRLVLFNNKTTDKVKKAEQVQKLLSLVESVVKHNNGKPYSDELFHELQEEAIKLRDQKKEVELLQGYSNNEIDEFKKQIDMSYDRQLSRITEMVETKLRDTAKRLEQQLGEEQAARLEAEKRANEVQKRSSDEIKKLRENLERAEKETKELQKKLGKCINL

SEQ ID NO: 4441 - DNA, 1369 bp, Arabidopsis thaliana
tggatttgagaaatctttttcatcatcatcactcttcctccttccccattgcttagtgttggttcccaagtcccaacctgcttcaatttaggtcgcaaacgatctcaattattcacaatccaatcttttcttcaatcgatcttcgtttctgatcaagctaataataagctaggaagagagtttagtgaagtagtgaagatgcagaatcagattgatatggtgaaggatgaagcggaagtagctgcatcgatttcagcaattaagggtgaagaatggggaaattgttcatcagtggaagatcaaccatcttttcaagaagaagaagctgctaaagttccttatgttggtgataaggaacctctgtctagtttagctgcagagtatcaatcagggagtcccattttgctggagaagattaagatactggacagtcaatatatcggaatccggcgaacaagaggagatggaaattgcttcttccgaagttttatgttctcttaccttgagcatatattggaatcacaagatcgtgctgaagtcgatcgtatcaaggtcaatgttgagaaatgtagaaagactctgcaaaacttaggttatacagattttacatttgaggacttctttgcgttgttccttgagcaactagatgacattctccaaggaactgaagagtctataagctacgatgagctggttaacagaagtagagatcagtcagtctcagattacattgtaatgttctttaggtttgttactgctggtgatatacgaacgcgtgccgattttttcgagccttttataacaggcttatcaaatgcaacagtggatcagttttgcaagtcctcggtcgaaccaatgggggaagagagtgaccatattcacataactgctttgtcggacgcacttggtgttgcaatccgtgttgtgtatcttgaccgtagctcatgtgatagtgggggcgtcactgtgaatcatcatgactttgttcctgtgggcattaccaatgagaaagatgaagaagcttctgctccatttataaccttgctgtatcgtccaggccattacgatatcctctaccccaagccatcttgtaaggtatcagacaatgtggggaaatgatcatttgacatatcgtaaatcgcattaggagacgtttacaaaaaactgtggtaatatggattcatgtggatgaaaccatggaacaatcaacaattaccccatcgatttgcattttgattatgataaaagaaccctttttgcaacactatagaatggaccgtctctttactttgatattgccttgtatttttcatgaatcatgataatatcctttatgatatttctgatgagcaagtggaatcaaagggtt

SEQ ID NO: 4442 - protein, 306 aa, Arabidopsis thaliana
MQNQIDMVKDEAEVAASISAIKGEEWGNCSSVEDQPSFQEEEAAKVPYVGDKEPLSSLAAEYQSGSPILLEKIKILDSQYIGIRRTRGDGNCFFRSFMFSYLEHILESQDRAEVDRIKVNVEKCRKTLQNLGYTDFTFEDFFALFLEQLDDILQGTEESISYDELVNRSRDQSVSDYIVMFFRFVTAGDIRTRADFFEPFITGLSNATVDQFCKSSVEPMGEESDHIHITALSDALGVAIRVVYLDRSSCDSGGVTVNHHDFVPVGITNEKDEEASAPFITLLYRPGHYDILYPKPSCKVSDNVGK

SEQ ID NO: 4443 - protein, 300 aa, Arabidopsis thaliana
MVKDEAEVAASISAIKGEEWGNCSSVEDQPSFQEEEAAKVPYVGDKEPLSSLAAEYQSGSPILLEKIKILDSQYIGIRRTRGDGNCFFRSFMFSYLEHILESQDRAEVDRIKVNVEKCRKTLQNLGYTDFTFEDFFALFLEQLDDILQGTEESISYDELVNRSRDQSVSDYIVMFFRFVTAGDIRTRADFFEPFITGLSNATVDQFCKSSVEPMGEESDHIHITALSDALGVAIRVVYLDRSSCDSGGVTVNHHDFVPVGITNEKDEEASAPFITLLYRPGHYDILYPKPSCKVSDNVGK

SEQ ID NO: 4444 - protein, 209 aa, Arabidopsis thaliana
MFSYLEHILESQDRAEVDRIKVNVEKCRKTLQNLGYTDFTFEDFFALFLEQLDDILQGTEESISYDELVNRSRDQSVSDYIVMFFRFVTAGDIRTRADFFEPFITGLSNATVDQFCKSSVEPMGEESDHIHITALSDALGVAIRVVYLDRSSCDSGGVTVNHHDFVPVGITNEKDEEASAPFITLLYRPGHYDILYPKPSCKVSDNVGK

SEQ ID NO: 4445 - DNA, 2407 bp, Arabidopsis thaliana
cttctgtctcatctggttttcgagagagatagagaaagtgagacaaggttaaggaggaagaagatgactgagaatcgggtggttttggctctgcttatactctgcattgttgggtttgagccaagtttcatccatggagctacggattcatcagatacttcggcgttaaacatcatgttcagctccatgaattctccaggacagctctcacaatggacagcatcaggaggtgatccttgtggccaaaactggaaaggcataacttgctctggctctcgagttacacaaataaagttaccaagtcttggactttctggatcacttggattcatgcttgataaattgacttctgttactgagtttgatatgagcaacaataaccttggaggcgatttgccttatcagcttcctccaaacttggagcgattgaatcttgctaataaccagttcactggatctgctcaatattccatttctatgatggctcctcttaagtacctcaaccttgctcacaaccagttgaagcagctagctattgacttcacaaaactcacctctctctctatattggacctctcttccaatgcttttatagggtctctcccaaacacttgtagctctcttacgagtgcaaaatcaatttatcttcagaacaatcagttctcaggcaccattgatattctagccacccttcctctcgaaaatctgaatattgcaaacaatcggttcacaggctggatccctgattctttgaaaggcattaacttgcaaaaagatggcaatttattaaattccgggcctgcacctccaccacctcctggtacaccaccgatcagtaaatcatcacctactccgaaatccgggaaccgtggaaaccgttccaatggtgattccagcaatagcaaagactccagcaaatcagggcttggagctggtggagtagcaggaatagtcatttctttgatagttgtaacagcagtcatagctttcttcttgatcaagagaaaaagatcaaagcggtcatcatccacggacattgaaaagactgataataacattaaccaacccattatactagcgtccaatgactttcatcaagagaataagtctgtacagaatccaccattggttgagacaaagaaactggatacgtcattgtcgatgaatctacgtcctccaccatctgagcgacataagtcgtttgatgacgatgattcaacaatgagaaaacctattgttgcaaagaaagctgctgttgttgttccttcaaatgtgaacacatatacggtttcagatcttcaagtagctaccaacagtttcagcgtagataatcttctcggtgaaggaacatttggaagagtatacagagctcagtttgaagatggaaaggtacttgctgtgaagaaaatcgactcatctgcgcttcccacggatactgctgatgattttaccgaaattgtatcgaaaatagcgcatttggatcacgaaaatgtcacaaagcttgatggttactgttctgaacacgggcaacacttggtggtctatgagttccatagaaacggctcattgcatgactttttacatcttgcagaagaggaaagcaaaccgttgatatggaatccccgtgtcaagatcgctcttggcactgcacgtgcattggagtacttgcatgaagtttgctcaccatctatagtccacaagaacattaaatcagcaaatattttacttgactcagagctgaatccacacctctcagactcaggtctcgctagcttccttcccactgcaaacgagctactaaaccaaaacgatgaaggatacagcgcaccagaaacttcaatgtcaggccaatactctttgaagagcgatgtttacagttttggagtagtgatgctcgagcttttaaccggaagaaaaccattcgacagcacaaggtcaagatcggaacaatcattggtaagatgggcaacacctcagcttcacgacattgatgctttgggcaaaatggttgatccagctctcaaagggctatacccggttaaatccctctcccgatttgcagatgttatcgccctttgcgtccagccggagccagagtttagaccacccatgtctgaagtggtgcaagcattggttgtattggtgcagagagctaacatgagcaagagaactgttggagtcggctccggtagctccggcgtcaatgattacatgtaaattctttacctgatgagaaccaacaaaaaaaaacataaaaatttgccctttttctcttgtctgctcggaatctggatgggacgacaacaagtgacaaccgaggacagacaaaacaaaacaaaatcctttttttctttcggtttcataaaactgatgatgagagaataacaacaacaacaacccttcacgc

SEQ ID NO: 4446 - protein, 738 aa, Arabidopsis thaliana
LLSHLVFERDRESETRLRRKKMTENRVVLALLILCIVGFEPSFIHGATDSSDTSALNIMFSSMNSPGQLSQWTASGGDPCGQNWKGITCSGSRVTQIKLPSLGLSGSLGFMLDKLTSVTEFDMSNNNLGGDLPYQLPPNLERLNLANNQFTGSAQYSISMMAPLKYLNLAHNQLKQLAIDFTKLTSLSILDLSSNAFIGSLPNTCSSLTSAKSIYLQNNQFSGTIDILATLPLENLNIANNRFTGWIPDSLKGINLQKDGNLLNSGPAPPPPPGTPPISKSSPTPKSGNRGNRSNGDSSNSKDSSKSGLGAGGVAGIVISLIVVTAVIAFFLIKRKRSKRSSSTDIEKTDNNINQPIILASNDFHQENKSVQNPPLVETKKLDTSLSMNLRPPPSERHKSFDDDDSTMRKPIVAKKAAVVVPSNVNTYTVSDLQVATNSFSVDNLLGEGTFGRVYRAQFEDGKVLAVKKIDSSALPTDTADDFTEIVSKIAHLDHENVTKLDGYCSEHGQHLVVYEFHRNGSLHDFLHLAEEESKPLIWNPRVKIALGTARALEYLHEVCSPSIVHKNIKSANILLDSELNPHLSDSGLASFLPTANELLNQNDEGYSAPETSMSGQYSLKSDVYSFGVVMLELLTGRKPFDSTRSRSEQSLVRWATPQLHDIDALGKMVDPALKGLYPVKSLSRFADVIALCVQPEPEFRPPMSEVVQALVVLVQRANMSKRTVGVGSGSSGVNDYM

SEQ ID NO: 4447 - protein, 717 aa, Arabidopsis thaliana
MTENRVVLALLILCIVGFEPSFIHGATDSSDTSALNIMFSSMNSPGQLSQWTASGGDPCGQNWKGITCSGSRVTQIKLPSLGLSGSLGFMLDKLTSVTEFDMSNNNLGGDLPYQLPPNLERLNLANNQFTGSAQYSISMMAPLKYLNLAHNQLKQLAIDFTKLTSLSILDLSSNAFIGSLPNTCSSLTSAKSIYLQNNQFSGTIDILATLPLENLNIANNRFTGWIPDSLKGINLQKDGNLLNSGPAPPPPPGTPPISKSSPTPKSGNRGNRSNGDSSNSKDSSKSGLGAGGVAGIVISLIVVTAVIAFFLIKRKRSKRSSSTDIEKTDNNINQPIILASNDFHQENKSVQNPPLVETKKLDTSLSMNLRPPPSERHKSFDDDDSTMRKPIVAKKAAVVVPSNVNTYTVSDLQVATNSFSVDNLLGEGTFGRVYRAQFEDGKVLAVKKIDSSALPTDTADDFTEIVSKIAHLDHENVTKLDGYCSEHGQHLVVYEFHRNGSLHDFLHLAEEESKPLIWNPRVKIALGTARALEYLHEVCSPSIVHKNIKSANILLDSELNPHLSDSGLASFLPTANELLNQNDEGYSAPETSMSGQYSLKSDVYSFGVVMLELLTGRKPFDSTRSRSEQSLVRWATPQLHDIDALGKMVDPALKGLYPVKSLSRFADVIALCVQPEPEFRPPMSEVVQALVVLVQRANMSKRTVGVGSGSSGVNDYM

SEQ ID NO: 4448 - protein, 680 aa, Arabidopsis thaliana
MFSSMNSPGQLSQWTASGGDPCGQNWKGITCSGSRVTQIKLPSLGLSGSLGFMLDKLTSVTEFDMSNNNLGGDLPYQLPPNLERLNLANNQFTGSAQYSISMMAPLKYLNLAHNQLKQLAIDFTKLTSLSILDLSSNAFIGSLPNTCSSLTSAKSIYLQNNQFSGTIDILATLPLENLNIANNRFTGWIPDSLKGINLQKDGNLLNSGPAPPPPPGTPPISKSSPTPKSGNRGNRSNGDSSNSKDSSKSGLGAGGVAGIVISLIVVTAVIAFFLIKRKRSKRSSSTDIEKTDNNINQPIILASNDFHQENKSVQNPPLVETKKLDTSLSMNLRPPPSERHKSFDDDDSTMRKPIVAKKAAVVVPSNVNTYTVSDLQVATNSFSVDNLLGEGTFGRVYRAQFEDGKVLAVKKIDSSALPTDTADDFTEIVSKIAHLDHENVTKLDGYCSEHGQHLVVYEFHRNGSLHDFLHLAEEESKPLIWNPRVKIALGTARALEYLHEVCSPSIVHKNIKSANILLDSELNPHLSDSGLASFLPTANELLNQNDEGYSAPETSMSGQYSLKSDVYSFGVVMLELLTGRKPFDSTRSRSEQSLVRWATPQLHDIDALGKMVDPALKGLYPVKSLSRFADVIALCVQPEPEFRPPMSEVVQALVVLVQRANMSKRTVGVGSGSSGVNDYM

SEQ ID NO: 4449 - DNA, 1489 bp, Arabidopsis thaliana
agaagccgcaaagaaagcggcggtggaagctgagacatgcaacaatggcgttcgtgtcattctcttcttctccttctctctctcttacactcgcgattcaacattaatttcgttcttcttcatacacatatatagatagtgtcttcattttccaaccatgaccggtagagaaatcctccacaagatgaaggaatccgtcaaggagaaagttgggcttggtgcatctgcttcatctgcagattcagggaaaggtaagagcaagatgttgaagcagatcacacatggttttcatttggtgaaagggaaagcttttcacgagatggaagattatgtggttgccaaattcaaggaagttgatgataatgagcttggtctgtttgctatcttcgatggccatcttagccacgagattccggactacttgtgctcccatttgtttgagaacatcttgaaagagccgaatttctggcaagaacctgagaaagcgataaagaaagcttactatataacggatacaacgattctagacaaggcagatgatttgggaaaaggaggttctactgctgtgactgcgatattgatcaattgccagaagctggtggttgctaatgttggtgactctcgagctgttatttgccaaaatggtgttgcgaagccactctcagttgatcatgagccgaacatggagaaggatgaaatcgagaacagaggaggattcgtttctaactttcctggggatgttcctcgagttgatggtcaactggctgtggcaagggcatttggtgataagagtttaaagatgcatttgagttcagaaccatatgttacggtggagataattgatgatgatgcagaatttcttatcctagcaagtgatggactatggaaggtcatgtcaaaccaagaagccgttgactcaatcaagggaataaaagatgcgaaggctgcagcaaagcaccttgcagaggaggctgttgcaaggaaaagctcagacgatatctcagtcgtcgtcgtgaaatttcagtgacattagctttcggagaagagacctctgcagactgcagatccctttcatcgcaagtcttactggtcacttaaacaagtaaagagtctttgagattggaccagctaaagaaagaatcacaagtatgggcgtttcctctgtaagatgcaattatcacctctatgttactcttttctttttttccttttcaactctgtgattatctctaagtctgtttctttctgggaataaaattttaacagtgaaaaactttctttgcttctccttttttttgttgtaaatgttttttgttatacaatagggcagtgtaagaaagatgaaatagttagaattagtgggtagtgaaagagacaggacataaaaggtttcacatgccaaactgtactcatgtctcgagtctatgacctaagcttttgggattgttatttacaataacagaataaataagtgttgtcccttttttcc

SEQ ID NO: 4450 - protein, 289 aa, Arabidopsis thaliana
MTGREILHKMKESVKEKVGLGASASSADSGKGKSKMLKQITHGFHLVKGKAFHEMEDYVVAKFKEVDDNELGLFAIFDGHLSHEIPDYLCSHLFENILKEPNFWQEPEKAIKKAYYITDTTILDKADDLGKGGSTAVTAILINCQKLVVANVGDSRAVICQNGVAKPLSVDHEPNMEKDEIENRGGFVSNFPGDVPRVDGQLAVARAFGDKSLKMHLSSEPYVTVEIIDDDAEFLILASDGLWKVMSNQEAVDSIKGIKDAKAAAKHLAEEAVARKSSDDISVVVVKFQ

SEQ ID NO: 4451 - protein, 280 aa, Arabidopsis thaliana
MKESVKEKVGLGASASSADSGKGKSKMLKQITHGFHLVKGKAFHEMEDYVVAKFKEVDDNELGLFAIFDGHLSHEIPDYLCSHLFENILKEPNFWQEPEKAIKKAYYITDTTILDKADDLGKGGSTAVTAILINCQKLVVANVGDSRAVICQNGVAKPLSVDHEPNMEKDEIENRGGFVSNFPGDVPRVDGQLAVARAFGDKSLKMHLSSEPYVTVEIIDDDAEFLILASDGLWKVMSNQEAVDSIKGIKDAKAAAKHLAEEAVARKSSDDISVVVVKFQ

SEQ ID NO: 4452 - protein, 254 aa, Arabidopsis thaliana
MLKQITHGFHLVKGKAFHEMEDYVVAKFKEVDDNELGLFAIFDGHLSHEIPDYLCSHLFENILKEPNFWQEPEKAIKKAYYITDTTILDKADDLGKGGSTAVTAILINCQKLVVANVGDSRAVICQNGVAKPLSVDHEPNMEKDEIENRGGFVSNFPGDVPRVDGQLAVARAFGDKSLKMHLSSEPYVTVEIIDDDAEFLILASDGLWKVMSNQEAVDSIKGIKDAKAAAKHLAEEAVARKSSDDISVVVVKFQ

SEQ ID NO: 4453 - DNA, 963 bp, Arabidopsis thaliana
atcaatttttctttattttattcactaataataattttgagtctctcttctctctctcttatatctcaaaatccgagaaaacgaagttcaaagatccgtggttgaattcgtgattctgaaatttcgtttcttcaggtctctgatcgtcctggttctcctctgatctgttatttgcttcgaaatagaagtttgtttctcgtttgacgatggagactgcgactggagaaatcaccatcgtctgcaaccactgtgacagagacattccatcactgaatatcgatctgcatcgtgtacattgtgctcggaatttagaaaaatgtaagatttgtggtgatatggtacccaaaaagcatgctgaggaacactacttgaacacacatgctccgatagcatgctcgatgtgcaaagagaccatagaacgtgagattttcgatagtcataaaggagaaatttgccccaagaggattgtaacatgcgagttctgtgagtttccattgcctgcggttgatcttgccgagcatcaggaagtatgtggcaacaggacagaactctgttatcaatgcaacagctatgttagattgagagaaagatataaccatgaaaccaaatgccctggcactgttgaatcatccagaaggatcccgagagcagcagaaggagatggaaacgggagaagacgaagagatgggaacggtgtttcgaacaaaaggcttttcttcacgatagcaataacgggaatagctgtgataataggatccttgttcttccagaggaagcctgagtagaggaggcgtagcttatctgtaattctgtaaatttgcctcaaatccttcagacagattctaaggaagggtttatacattttaaagcttacccagacaagagaaaccccaaaagattgtttgagctgatcaccatgagacttgcttttatatttgatttcaataaaagagatttcagatt

SEQ ID NO: 4454 - protein, 192 aa, Arabidopsis thaliana
METATGEITIVCNHCDRDIPSLNIDLHRVHCARNLEKCKICGDMVPKKHAEEHYLNTHAPIACSMCKETIEREIFDSHKGEICPKRIVTCEFCEFPLPAVDLAEHQEVCGNRTELCYQCNSYVRLRERYNHETKCPGTVESSRRIPRAAEGDGNGRRRRDGNGVSNKRLFFTIAITGIAVIIGSLFFQRKPE

SEQ ID NO: 4455 - protein, 149 aa, Arabidopsis thaliana
MVPKKHAEEHYLNTHAPIACSMCKETIEREIFDSHKGEICPKRIVTCEFCEFPLPAVDLAEHQEVCGNRTELCYQCNSYVRLRERYNHETKCPGTVESSRRIPRAAEGDGNGRRRRDGNGVSNKRLFFTIAITGIAVIIGSLFFQRKPE

SEQ ID NO: 4456 - protein, 128 aa, Arabidopsis thaliana
MCKETIEREIFDSHKGEICPKRIVTCEFCEFPLPAVDLAEHQEVCGNRTELCYQCNSYVRLRERYNHETKCPGTVESSRRIPRAAEGDGNGRRRRDGNGVSNKRLFFTIAITGIAVIIGSLFFQRKPE

SEQ ID NO: 4457 - DNA, 699 bp, Arabidopsis thaliana
aatcgcattctccgatcgaatagccgacggagaaatgaccaagttcaggaagctcggccgcccagcaggtcaccgtatgtccatgctcaggactatggtttctcaattggtgcaacacgagcgaattgagaccactgttacaaaggctaaagaagttcgtcgtcttgctgataatatgattcaactcggaaaagagggttcactagctgcagcaagaagagctgctgggtttgttagaggagatgatgtacttcacaagatttttacagaattggctcatcgatacaaagatagagctggtggatacacaagaatgcttcgtactcgcattcgtgttggtgatgctgccccaatggcctatatcgagtttatcgatagagagaacgagctaaggcaatcaaaaccagctactcctcaacctccacctcgagtgccacttgatccatgggctagatcccgtctcaccaggcagtatgctccaccaaaggaggaaaaaacttctgattctgacctataaatagaagaagatctctctcgctctctcacaccagaagatcatgttttttttccccttgcccatgttgtttctccttcaacccatagctttgtatgtctggcaccttattcatcactgtcattcacaatgtgtttaaaacagtttaaatgtagtttccttgaagcatcaaagcatttttaccc

SEQ ID NO: 4458 - protein, 171 aa, Arabidopsis thaliana
IAFSDRIADGEMTKFRKLGRPAGHRMSMLRTMVSQLVQHERIETTVTKAKEVRRLADNMIQLGKEGSLAAARRAAGFVRGDDVLHKIFTELAHRYKDRAGGYTRMLRTRIRVGDAAPMAYIEFIDRENELRQSKPATPQPPPRVPLDPWARSRLTRQYAPPKEEKTSDSDL

SEQ ID NO: 4459 - protein, 160 aa, Arabidopsis thaliana
MTKFRKLGRPAGHRMSMLRTMVSQLVQHERIETTVTKAKEVRRLADNMIQLGKEGSLAAARRAAGFVRGDDVLHKIFTELAHRYKDRAGGYTRMLRTRIRVGDAAPMAYIEFIDRENELRQSKPATPQPPPRVPLDPWARSRLTRQYAPPKEEKTSDSDL

SEQ ID NO: 4460 - protein, 146 aa, Arabidopsis thaliana
MSMLRTMVSQLVQHERIETTVTKAKEVRRLADNMIQLGKEGSLAAARRAAGFVRGDDVLHKIFTELAHRYKDRAGGYTRMLRTRIRVGDAAPMAYIEFIDRENELRQSKPATPQPPPRVPLDPWARSRLTRQYAPPKEEKTSDSDL

SEQ ID NO: 4461 - DNA, 1405 bp, Arabidopsis thaliana
aaacaaaattgttgttaccttcccattagtcatcttgtaaattcttcgaatctgaaatccgatcgggctcgcttgttctgatttcgtgagggtgaacatggatggaaacaaagacgatgcgttgaagtgcttgaaaatctgcaaaagtgctatggaagctggagatcgacctcgcgctttgaaattcctggctaaagctcgtcgtcttgatccaaatctcccgatcgatgatctcgtatctgagcttaacaacaacaaatcagacgaaccaggatctgcaaaatcgcctggatctgcagcagcaaaggattcttccaattcttcagatcggccttctttacgtcaacgtggatcgtcaacaacgtcatcgtcttcttcgatgtcctacactgaagaacagatctcaatcgtgagaaagataaaatctaaaaaggattattacgagatcttaggtcttgaatccaactgttcagtggatgatgtgagaaaagcttaccggaaactctcattgaaagttcatccagataagaatcaagctcctggttcagaagaagctttcaaatccgtctccaaggcatttcaatgcttgagcaatgacgaagctaggaaaaaatacgatgtaagtggctccgatgaaccaatctatcaaccacgtcgatctgctagaagtaatggattcaatggtggatactattacgaagacgaattcgatcccaacgagattttccgaagcttcttcggtggaggaggattcggtggtggaggaatgcctcctgcgactgctcaattccgatcatttaatttcggagctactcgtcagagaacagctaataacaatcaagcacctgatgcaggtttcaatgctcgtatacttctccagcttcttcctgttgtcttcatacttctgctcaacttcatgccttcttctcaaccagtttaccaactctctgcaacttatccttaccagtacaagttcactacacagaaaggtgtcaattactttgtgaaatcgtctaaattcgagcaggattatccacgagatagcaacgatcgacacacgctggaagaacaagttgagagagattatgtgtctatacttagtcagaattgtaggtatgagatgcagaggaaacaatggggatttgttcgtgaaacgcctcattgtgacatgatgaggagatttgatacagctcctgcttgaaacaactgaagctagtaccaacaatgaggcacacattggtaatgaatcatcagcttataaaacttttataatgtcaatgccttcacgagtcaaactggtatatgtttttgtttttttttgttttggattataatgctttagaacctaacatacgatctttggattttgtgtgattatctctatgttaagattttgcttttgctt

SEQ ID NO: 4462 - protein, 367 aa, Arabidopsis thaliana
MDGNKDDALKCLKICKSAMEAGDRPRALKFLAKARRLDPNLPIDDLVSELNNNKSDEPGSAKSPGSAAAKDSSNSSDRPSLRQRGSSTTSSSSSMSYTEEQISIVRKIKSKKDYYEILGLESNCSVDDVRKAYRKLSLKVHPDKNQAPGSEEAFKSVSKAFQCLSNDEARKKYDVSGSDEPIYQPRRSARSNGFNGGYYYEDEFDPNEIFRSFFGGGGFGGGGMPPATAQFRSFNFGATRQRTANNNQAPDAGFNARILLQLLPVVFILLLNFMPSSQPVYQLSATYPYQYKFTTQKGVNYFVKSSKFEQDYPRDSNDRHTLEEQVERDYVSILSQNCRYEMQRKQWGFVRETPHCDMMRRFDTAPA

SEQ ID NO: 4463 - protein, 349 aa, Arabidopsis thaliana
MEAGDRPRALKFLAKARRLDPNLPIDDLVSELNNNKSDEPGSAKSPGSAAAKDSSNSSDRPSLRQRGSSTTSSSSSMSYTEEQISIVRKIKSKKDYYEILGLESNCSVDDVRKAYRKLSLKVHPDKNQAPGSEEAFKSVSKAFQCLSNDEARKKYDVSGSDEPIYQPRRSARSNGFNGGYYYEDEFDPNEIFRSFFGGGGFGGGGMPPATAQFRSFNFGATRQRTANNNQAPDAGFNARILLQLLPVVFILLLNFMPSSQPVYQLSATYPYQYKFTTQKGVNYFVKSSKFEQDYPRDSNDRHTLEEQVERDYVSILSQNCRYEMQRKQWGFVRETPHCDMMRRFDTAPA

SEQ ID NO: 4464 - protein, 273 aa, Arabidopsis thaliana
MSYTEEQISIVRKIKSKKDYYEILGLESNCSVDDVRKAYRKLSLKVHPDKNQAPGSEEAFKSVSKAFQCLSNDEARKKYDVSGSDEPIYQPRRSARSNGFNGGYYYEDEFDPNEIFRSFFGGGGFGGGGMPPATAQFRSFNFGATRQRTANNNQAPDAGFNARILLQLLPVVFILLLNFMPSSQPVYQLSATYPYQYKFTTQKGVNYFVKSSKFEQDYPRDSNDRHTLEEQVERDYVSILSQNCRYEMQRKQWGFVRETPHCDMMRRFDTAPA

SEQ ID NO: 4465 - DNA, 1170 bp, Arabidopsis thaliana
aagttagaagacgatatccgctctgaagcagaagaaaaggtaattctgaatgtctggaagaaaccggattcacagagatatccgagacagctatcatgatcatcgtgatttacctccggagagaccttttctccgaggccctccattgttacaacctccaccaccatctttgttagaagatcttcagatacaggagggtgaaatcagaaggcaggatgctgaaatcagaaggcttttgagtgataatcatggactagctgacgaccgaatggttctggagagagaactcgttgctgctaaagaagagcttcaccgaatgaatctgatgatttctgatcttcgtgctgagcaagatctgcaattgagggagtttagtgagaaaaggcataaacttgagggggatgttcgcgctatggagtcgtataagaaggaggcttcacagttgcgtggtgaagttcagaagctggatgagattaaacgtgaattaagtggaaatgttcagttgcttaggaaagatttggctaaattgcaatcagataacaagcagattcctggtatgagagctgaggttaaagacctgcagaaggagcttatgcatgctagagatgcaattgaatatgagaagaaggaaaagtttgagcttatggagcagcggcagacaatggaaaagaacatggtttctatggcgcgtgaagttgaaaagctacgcgcagaacttgctactgttgatagtaggccgtggggttttggtggatcgtatgggatgaattacaacaatatggacggcactttccgtggctcgtatggcgaaaacgatacttatttgggatcttcggaaaggagtcaatattacagccatgggtctggctcgcagaagaaacctcgtttggatcgtcattgaaatctaaaatgatctgtggaaaaagaatgaggtgacgactaaatagcccacttctcaatactcctctggttgtttgtgggtatgcatctactctaaatctaaatgttagttcttctgcttttttaataaggcgttatagttatgtaacttagatggctttttttctttctttctttttagccaagcttagatggctaatctatttcgtatgtttcaataatttgacgatttggttcttcttgcttgctattaattgtgttctattatcc

SEQ ID NO: 4466 - protein, 283 aa, Arabidopsis thaliana
MSGRNRIHRDIRDSYHDHRDLPPERPFLRGPPLLQPPPPSLLEDLQIQEGEIRRQDAEIRRLLSDNHGLADDRMVLERELVAAKEELHRMNLMISDLRAEQDLQLREFSEKRHKLEGDVRAMESYKKEASQLRGEVQKLDEIKRELSGNVQLLRKDLAKLQSDNKQIPGMRAEVKDLQKELMHARDAIEYEKKEKFELMEQRQTMEKNMVSMAREVEKLRAELATVDSRPWGFGGSYGMNYNNMDGTFRGSYGENDTYLGSSERSQYYSHGSGSQKKPRLDRH

SEQ ID NO: 4467 - protein, 210 aa, Arabidopsis thaliana
MVLERELVAAKEELHRMNLMISDLRAEQDLQLREFSEKRHKLEGDVRAMESYKKEASQLRGEVQKLDEIKRELSGNVQLLRKDLAKLQSDNKQIPGMRAEVKDLQKELMHARDAIEYEKKEKFELMEQRQTMEKNMVSMAREVEKLRAELATVDSRPWGFGGSYGMNYNNMDGTFRGSYGENDTYLGSSERSQYYSHGSGSQKKPRLDRH

SEQ ID NO: 4468 - protein, 194 aa, Arabidopsis thaliana
MNLMISDLRAEQDLQLREFSEKRHKLEGDVRAMESYKKEASQLRGEVQKLDEIKRELSGNVQLLRKDLAKLQSDNKQIPGMRAEVKDLQKELMHARDAIEYEKKEKFELMEQRQTMEKNMVSMAREVEKLRAELATVDSRPWGFGGSYGMNYNNMDGTFRGSYGENDTYLGSSERSQYYSHGSGSQKKPRLDRH

SEQ ID NO: 4469 - DNA, 1289 bp, Arabidopsis thaliana
atgcaaaaataaacatagtaacaatactttaaactatttacaccactttaatcttattctccactctttgaacgtaatggagaagaaccatagtagtggagagtgggagaagatgaagaacgagatcaacgagctaatgatagaaggaagagactatgcacaccagtttggatcagcttcatctcaagaaacacgtgaacatttagccaaaaagattcttcaatcttaccacaagtctctcaccatcatgaactactccggcgaacttgaccaagtttctcagggtggaggaagccccaagagcgatgattccgatcaagaaccacttgtcatcaagagttcgaagaagtcaatgccaaggtggagttcaaaagtcagaattgcccctggagctggtgttgatagaacgctggacgatggattcagttggagaaagtacggccagaaggatattctcggagccaaatttccaagaggatactatagatgcacgtatagaaagtctcaaggatgtgaagccactaaacaagtccaaagatctgatgaaaatcagatgctccttgagatcagttaccgaggaatacattcttgctctcaagctgcaaatgtcggtacaacaatgccgatacaaaacctcgaaccgaaccagacccaagaacacggaaatcttgacatggtaaaggaaagtgtagacaactacaatcaccaagcacatttgcatcacaaccttcactatccattgtcatctaccccaaatctagagaataacaatgcctatatgcttcaaatgcgagatcaaaacatcgaatattttggatctacgagcttctctagtgatctaggaactagtatcaactacaattttccagcatctggctcggcttctcactcagcatcaaactctccgtccaccgtccctttggaatccccgtttgaaagctatgatccaaatcatccatatggaggatttggtgggttctattcttagttatctacttaagggagggacggaactttttacatgacctcttgattaaagagagagttttcataatagctaatcaatttcctattcaaatatccgagttttttttctaatcatgtttatcaattgtcttattacagaaggcttattttcaggtctatgttgaaataaatggatttgtactcgtaggtatgatccttgttatctagcttatagtccatggtttttactttttgccttatgttgttgtaacacattcgagttcttatattgcaaatttgagtcttcttttagctatacaatt

SEQ ID NO: 4470 - protein, 328 aa, Arabidopsis thaliana
CKNKHSNNTLNYLHHFNLILHSLNVMEKNHSSGEWEKMKNEINELMIEGRDYAHQFGSASSQETREHLAKKILQSYHKSLTIMNYSGELDQVSQGGGSPKSDDSDQEPLVIKSSKKSMPRWSSKVRIAPGAGVDRTLDDGFSWRKYGQKDILGAKFPRGYYRCTYRKSQGCEATKQVQRSDENQMLLEISYRGIHSCSQAANVGTTMPIQNLEPNQTQEHGNLDMVKESVDNYNHQAHLHHNLHYPLSSTPNLENNNAYMLQMRDQNIEYFGSTSFSSDLGTSINYNFPASGSASHSASNSPSTVPLESPFESYDPNHPYGGFGGFYS

SEQ ID NO: 4471 - protein, 303 aa, Arabidopsis thaliana
MEKNHSSGEWEKMKNEINELMIEGRDYAHQFGSASSQETREHLAKKILQSYHKSLTIMNYSGELDQVSQGGGSPKSDDSDQEPLVIKSSKKSMPRWSSKVRIAPGAGVDRTLDDGFSWRKYGQKDILGAKFPRGYYRCTYRKSQGCEATKQVQRSDENQMLLEISYRGIHSCSQAANVGTTMPIQNLEPNQTQEHGNLDMVKESVDNYNHQAHLHHNLHYPLSSTPNLENNNAYMLQMRDQNIEYFGSTSFSSDLGTSINYNFPASGSASHSASNSPSTVPLESPFESYDPNHPYGGFGGFYS

SEQ ID NO: 4472 - protein, 291 aa, Arabidopsis thaliana
MKNEINELMIEGRDYAHQFGSASSQETREHLAKKILQSYHKSLTIMNYSGELDQVSQGGGSPKSDDSDQEPLVIKSSKKSMPRWSSKVRIAPGAGVDRTLDDGFSWRKYGQKDILGAKFPRGYYRCTYRKSQGCEATKQVQRSDENQMLLEISYRGIHSCSQAANVGTTMPIQNLEPNQTQEHGNLDMVKESVDNYNHQAHLHHNLHYPLSSTPNLENNNAYMLQMRDQNIEYFGSTSFSSDLGTSINYNFPASGSASHSASNSPSTVPLESPFESYDPNHPYGGFGGFYS

SEQ ID NO: 4473 - DNA, 1353 bp, Arabidopsis thaliana
attgggatttagggtttaagaaatcttccgagaaaacagagagacagaaaaatggtgatgatgaagaagatgaagggaagccaaagctttagacaaagacttcttctttcaacactttcttcaacacctatctcgattgatgagattcgtgccgacgaaacgattcctggtctccgacctcacgaggttaatcttctccgcctcttagaaattgtcaccgacgacgccgtcgttgatattaacgagaccgggactcgattaaagtacaagcctggaactatagtgggagggaagaacttggttcacagctgctcgctgagtcgatccattggctattatcttgagccattgcttttgttgggattgtttggaaagaagcctctttcgattaggctcaaaggaattacaaatgatccaagagacgctagcgttgacacattccgttccactaccttgaatatcataaagcgttttggagtccctgcagaagatttggagctgaaaatcgaagcccgtggagtagctccgaatggaggtggagaagttctcttaacagttccaaatattaagactctaagtgcggttcattgggtagaagaaggaatggtgaagaagatacgtggtacaactttctctacaagagtgactagtgactttgaacattccatgagattcgcagctcgtggtatctttaacaatctcttgcctgatgttcacattttccaagatcacagagctggcgctcaggctggaaaatctcctggatacggaatatcattggcagcagaaacaactacaggatgtttcatctctgcagatacaacagtgtcttgtgaaagaccagacgaaactggagagctcgatgtagagaagaaagagagatcgccagcagaagacacaggagttgaagtagcttcatggcttcttcaagagattgaaaaaggtggagttgttgattcaacacaccagggattgttgtttctactgtgtgcgttatctgaacaagacgtgtcaaaggttcgagttggaacattatctccatatgcagtggagacgttgaggaacattaaggagtttctgggagttaagtttgccatcaaacctgatccattgactgggactgttatactcaagtgtactggaagtggcttaattaacctctccagaaagctctcttgatttctcactcacagtcaccttttacaattttgtctgaatgaaagcgcttttctataatttgagtggatgtgtatttttgacctaatcataatggcaatttgcatttaaatttatgcattttttactttagatcgacccttgtctgatataaatttatgactattatttgtttac

SEQ ID NO: 4474 - protein, 375 aa, Arabidopsis thaliana
MVMMKKMKGSQSFRQRLLLSTLSSTPISIDEIRADETIPGLRPHEVNLLRLLEIVTDDAVVDINETGTRLKYKPGTIVGGKNLVHSCSLSRSIGYYLEPLLLLGLFGKKPLSIRLKGITNDPRDASVDTFRSTTLNIIKRFGVPAEDLELKIEARGVAPNGGGEVLLTVPNIKTLSAVHWVEEGMVKKIRGTTFSTRVTSDFEHSMRFAARGIFNNLLPDVHIFQDHRAGAQAGKSPGYGISLAAETTTGCFISADTTVSCERPDETGELDVEKKERSPAEDTGVEVASWLLQEIEKGGVVDSTHQGLLFLLCALSEQDVSKVRVGTLSPYAVETLRNIKEFLGVKFAIKPDPLTGTVILKCTGSGLINLSRKLS

SEQ ID NO: 4475 - protein, 373 aa, Arabidopsis thaliana
MMKKMKGSQSFRQRLLLSTLSSTPISIDEIRADETIPGLRPHEVNLLRLLEIVTDDAVVDINETGTRLKYKPGTIVGGKNLVHSCSLSRSIGYYLEPLLLLGLFGKKPLSIRLKGITNDPRDASVDTFRSTTLNIIKRFGVPAEDLELKIEARGVAPNGGGEVLLTVPNIKTLSAVHWVEEGMVKKIRGTTFSTRVTSDFEHSMRFAARGIFNNLLPDVHIFQDHRAGAQAGKSPGYGISLAAETTTGCFISADTTVSCERPDETGELDVEKKERSPAEDTGVEVASWLLQEIEKGGVVDSTHQGLLFLLCALSEQDVSKVRVGTLSPYAVETLRNIKEFLGVKFAIKPDPLTGTVILKCTGSGLINLSRKLS

SEQ ID NO: 4476 - protein, 372 aa, Arabidopsis thaliana
MKKMKGSQSFRQRLLLSTLSSTPISIDEIRADETIPGLRPHEVNLLRLLEIVTDDAVVDINETGTRLKYKPGTIVGGKNLVHSCSLSRSIGYYLEPLLLLGLFGKKPLSIRLKGITNDPRDASVDTFRSTTLNIIKRFGVPAEDLELKIEARGVAPNGGGEVLLTVPNIKTLSAVHWVEEGMVKKIRGTTFSTRVTSDFEHSMRFAARGIFNNLLPDVHIFQDHRAGAQAGKSPGYGISLAAETTTGCFISADTTVSCERPDETGELDVEKKERSPAEDTGVEVASWLLQEIEKGGVVDSTHQGLLFLLCALSEQDVSKVRVGTLSPYAVETLRNIKEFLGVKFAIKPDPLTGTVILKCTGSGLINLSRKLS

SEQ ID NO: 4477 - DNA, 1597 bp, Arabidopsis thaliana
aagcaaagagagaggaaaaattagactttactcattgttcagtggttgagagagaaaagagtaaaaaagcacatggcctcattaccattggggcctcagcctcatgctcttgctccgccgctgcagcttcacgacggcgacgctttgaaacgccgtcctgaattggattctgataaggaaatgtctgcagctgttattgagggaaatgacgctgttactggtcatatcatttccactactataggaggcaaaaacggcgaaccaaagcagaccattagttacatggctgagcgggttgttggaacaggttcattcgggattgtttttcaggcgaaatgcttggaaactggagaatcagtagccattaaaaaggtcttgcaagatcgacgctataaaaaccgtgagttgcaactaatgcgaccaatggatcacccaaatgtcatctccttgaagcactgtttcttctctacaacgagtagagatgagctcttcctcaaccttgttatggagtatgtacctgagactttataccgggttttgaggcactatactagttctaatcagaggatgccaattttctatgtcaagctttacacatatcaaatctttagaggtttggcttacatccatactgttcccggtgtttgccacagagatgtgaaaccacaaaatctcttggttgatcccttgacccatcaggttaagctgtgtgattttggaagtgcaaaagtattggtcaaaggtgaaccaaacatatcatatatctgctcccgttattatcgtgctccagaactcatctttggcgccacagagtatacagcatccatagatatatggtctgctggttgtgtactggcagagcttcttcttggccagccgttatttccaggagaaaattcagttgatcagcttgtggagatcataaaggttcttggtactccaactcgtgaagaaattcgatgtatgaacccgaactacacagattttaggttcccacaaatcaaagctcacccttggcacaaggtttttcataaacggatgcctccagaagcaatagaccttgcatctcggcttcttcaatattcaccaagtctacgctgcactgcgctcgaagcatgtgctcatccgtttttcaatgaactccgagagccaaacgcccgtcttccaaatggtcgtccattaccgccattgttcaatttcaaacaagagttaggtggagcttcaatggagctaatcaacaggctaatacctgagcatgtgagacgacaaatgagcacaggattacaaaacagttaaaaactgtgcatgtctgaagagaaagaggagaaaagcaggtttactacttttatttgatagttgacaggttcaacagtatattaaccacgactattatcagcttctatacccgtagtaaagtcatattcagctttttgagaaatcagatgctgataattgcgtctattttttttttattccttagcctggagagtggagagagacactgttcctcgtgtatttttgtatatgtttttgtctgtaaaacaattctgacagatacgtagagacaaaagaaaaacgaggtgataatattaaaccg

SEQ ID NO: 4478 - protein, 407 aa, Arabidopsis thaliana
MASLPLGPQPHALAPPLQLHDGDALKRRPELDSDKEMSAAVIEGNDAVTGHIISTTIGGKNGEPKQTISYMAERVVGTGSFGIVFQAKCLETGESVAIKKVLQDRRYKNRELQLMRPMDHPNVISLKHCFFSTTSRDELFLNLVMEYVPETLYRVLRHYTSSNQRMPIFYVKLYTYQIFRGLAYIHTVPGVCHRDVKPQNLLVDPLTHQVKLCDFGSAKVLVKGEPNISYICSRYYRAPELIFGATEYTASIDIWSAGCVLAELLLGQPLFPGENSVDQLVEIIKVLGTPTREEIRCMNPNYTDFRFPQIKAHPWHKVFHKRMPPEAIDLASRLLQYSPSLRCTALEACAHPFFNELREPNARLPNGRPLPPLFNFKQELGGASMELINRLIPEHVRRQMSTGLQNS

SEQ ID NO: 4479 - protein, 371 aa, Arabidopsis thaliana
MSAAVIEGNDAVTGHIISTTIGGKNGEPKQTISYMAERVVGTGSFGIVFQAKCLETGESVAIKKVLQDRRYKNRELQLMRPMDHPNVISLKHCFFSTTSRDELFLNLVMEYVPETLYRVLRHYTSSNQRMPIFYVKLYTYQIFRGLAYIHTVPGVCHRDVKPQNLLVDPLTHQVKLCDFGSAKVLVKGEPNISYICSRYYRAPELIFGATEYTASIDIWSAGCVLAELLLGQPLFPGENSVDQLVEIIKVLGTPTREEIRCMNPNYTDFRFPQIKAHPWHKVFHKRMPPEAIDLASRLLQYSPSLRCTALEACAHPFFNELREPNARLPNGRPLPPLFNFKQELGGASMELINRLIPEHVRRQMSTGLQNS

SEQ ID NO: 4480 - protein, 337 aa, Arabidopsis thaliana
MAERVVGTGSFGIVFQAKCLETGESVAIKKVLQDRRYKNRELQLMRPMDHPNVISLKHCFFSTTSRDELFLNLVMEYVPETLYRVLRHYTSSNQRMPIFYVKLYTYQIFRGLAYIHTVPGVCHRDVKPQNLLVDPLTHQVKLCDFGSAKVLVKGEPNISYICSRYYRAPELIFGATEYTASIDIWSAGCVLAELLLGQPLFPGENSVDQLVEIIKVLGTPTREEIRCMNPNYTDFRFPQIKAHPWHKVFHKRMPPEAIDLASRLLQYSPSLRCTALEACAHPFFNELREPNARLPNGRPLPPLFNFKQELGGASMELINRLIPEHVRRQMSTGLQNS

SEQ ID NO: 4481 - DNA, 1396 bp, Arabidopsis thaliana
gtttccgaaacgttgggctttgcttagctgcgacattttcagtgaacgaagaaaaccacggtagtagactagtagttgtagaaaaaaacaaaacgaaatcgaagaagaagagaggaaggatgaagaagatcccggtgcttctcatgggctgcggaggcgttggccgccaccttcttcaacacatcgtctcttgccgatcgcttcacgccaaaatgggagttcatatacgggtgattggagtatgtgatagtaaatccttagttgctccaatggatgtgctcaaagaggaactgaatgatgaactcttgtcagaagtttgccttatcaaatcaactggttctgcattatcgaagttgggtgctttgggtggatatcgagtcgtccatgattccgagttaagcacggaaacagaagagattgcaaaacttcttggtaaatctacaggcttagctgtggtggattgctcagccagcatggagacgattgaaatattgatgaaggcagttgacttgggttgctgtattgtcctggcaaataagaagcctgttacttcaacgctggaacattacgacaaattggctttgcatccgcgattcatccgccatgaatctactgttggtgctggtcttcctgtcatcgcatccttgaaccgcataatttcgtctggagatcctgttcataggattgtcggtagtttgagcggtaccttgggatatgtaatgagtgagcttgaagatggcaagcctctaagccaagttgttcaagctgccaaaaagctggggtacactgaaccagatccacgtgacgacctcggtggcatggatgttgctagaaagggtttgattcttgctcgacttcttgggaagaggataattatggacagcattaagatagagagcttgtatccagaagagatgggacctggactcatgtctgtggatgatttcctccataatggaatagtaaaacttgatcagaatatagaggagagagttaaaaaagcttcatcaaaagggtgtgtgcttcgttatgtctgtgtgattgagggttcaagcgttcaagttggcattcgagaagtttcaaaagattcaccattgggacggctaagaggcagtgacaatatagtagagatatatagccgttgctacaaggagcagcctttggtgattcaaggtgccggagccgggaacgacacaactgcagccggtgttcttgcagacatcatcgacttgcaggatctttttcactgagaggaggctgtggtatttagtttttatcaaaataataataacacaattcataattgatctcttctctgatcttgtcaaggcagaaaattagccaacaagaacgtggcctctccttaacattaccaaaaagagattttttttttttc

SEQ ID NO: 4482 - protein, 415 aa, Arabidopsis thaliana
FRNVGLCLAATFSVNEENHGSRLVVVEKNKTKSKKKRGRMKKIPVLLMGCGGVGRHLLQHIVSCRSLHAKMGVHIRVIGVCDSKSLVAPMDVLKEELNDELLSEVCLIKSTGSALSKLGALGGYRVVHDSELSTETEEIAKLLGKSTGLAVVDCSASMETIEILMKAVDLGCCIVLANKKPVTSTLEHYDKLALHPRFIRHESTVGAGLPVIASLNRIISSGDPVHRIVGSLSGTLGYVMSELEDGKPLSQVVQAAKKLGYTEPDPRDDLGGMDVARKGLILARLLGKRIIMDSIKIESLYPEEMGPGLMSVDDFLHNGIVKLDQNIEERVKKASSKGCVLRYVCVIEGSSVQVGIREVSKDSPLGRLRGSDNIVEIYSRCYKEQPLVIQGAGAGNDTTAAGVLADIIDLQDLFH

SEQ ID NO: 4483 - protein, 376 aa, Arabidopsis thaliana
MKKIPVLLMGCGGVGRHLLQHIVSCRSLHAKMGVHIRVIGVCDSKSLVAPMDVLKEELNDELLSEVCLIKSTGSALSKLGALGGYRVVHDSELSTETEEIAKLLGKSTGLAVVDCSASMETIEILMKAVDLGCCIVLANKKPVTSTLEHYDKLALHPRFIRHESTVGAGLPVIASLNRIISSGDPVHRIVGSLSGTLGYVMSELEDGKPLSQVVQAAKKLGYTEPDPRDDLGGMDVARKGLILARLLGKRIIMDSIKIESLYPEEMGPGLMSVDDFLHNGIVKLDQNIEERVKKASSKGCVLRYVCVIEGSSVQVGIREVSKDSPLGRLRGSDNIVEIYSRCYKEQPLVIQGAGAGNDTTAAGVLADIIDLQDLFH

SEQ ID NO: 4484 - protein, 368 aa, Arabidopsis thaliana
MGCGGVGRHLLQHIVSCRSLHAKMGVHIRVIGVCDSKSLVAPMDVLKEELNDELLSEVCLIKSTGSALSKLGALGGYRVVHDSELSTETEEIAKLLGKSTGLAVVDCSASMETIEILMKAVDLGCCIVLANKKPVTSTLEHYDKLALHPRFIRHESTVGAGLPVIASLNRIISSGDPVHRIVGSLSGTLGYVMSELEDGKPLSQVVQAAKKLGYTEPDPRDDLGGMDVARKGLILARLLGKRIIMDSIKIESLYPEEMGPGLMSVDDFLHNGIVKLDQNIEERVKKASSKGCVLRYVCVIEGSSVQVGIREVSKDSPLGRLRGSDNIVEIYSRCYKEQPLVIQGAGAGNDTTAAGVLADIIDLQDLFH

SEQ ID NO: 4485 - DNA, 1810 bp, Arabidopsis thaliana
aattctctttgtagagggaagtctgaaaacgccgagaagaagacgaagaagaagaagaagaagaaagcttgagactttctctctgtgtgcaatttcgaaatcgataaagacttcaactttcggttctaacaatgacaatttccgtatagtttgattttgtccacctctttcaccgattacctgatttcatcgctggcgttagtcatcaaatgggagctcgttgctcaaagttctcattctgcttgttcccttctcacttcaaatccgcttcagttctcgagtctcctgatatcgagaatggaggaaaagtgtggccgacttttaaggaattcaaattggagcagctgaaatctgcgaccggaggtttctcttcagacaacattgtatcagaacacggcgagaaagctccaaacgttgtctacagaggaaggcttgatgatggtcgtttgattgctgtcaaacgattcaatcgccttgcttgggctgatcatcgacagttcctggatgaagctaaagctgttgggagcttgaggagtgatagattagcgaatctgattggatgttgctttgaaggagaagagagattactagttgctgagtttatgcctcatgaaacgcttgcaaagcatcttttccactgggagaataatccgatgaaatgggcgatgagattaagagttgcattgtgtttagcacaagcattggaatattgtagtaataaagggagagctttgtatcatgatctcaatgcttacagggttttgtttgacaaggatgggaatcccaggttgtcttgttttggactcatgaaaaatagcagagatgggaagagttatagcacaaacttggcatttactcctccagagtatttgcgaacgggtagagttacaccagagagtgttgtattcagttttggaaccgttttgctcgatctcatgagtggaaaacatattccaccgagtcatgcgcttgacctaatcagaggcaagaactgtgcaatgttaatggattctgctctcgagggtcatttctcaaacgaagacggaactgagctagtacgcttagccacacgttgtctgcagtatgaagctcgagaaagaccaaatgtgaaatctctcgtgacttcacttgtcacactccagaaggaatctgatgtagcttcctacgttcttatgggtataccccatgaaaccgaggctgaagaagagtctccgctttctttgacaccctttggtgatgcatgcttaagagtggatcttacagccatacaggaaatactcagtaagattggatacaaggatgatgaaggaattgccaatgagctctcgtttcaaatgtggaccaatcagatgcaggaatctctcaattcgaagaagcaaggcgacttagctttccgttccaaagattttacaaccgcggtcgattgctacactcagttcatagatgggggaacaatggtgtcaccaacagtacacgcacggcggtgcttgtcatatctgatgaacgacaacgcacaagaggctctgacagatgcattgcaggcacaggttgtgtctccggattggccaaccgccttgtatctgcaagcggcttgcttgttcaagctgggtatggaagccgatgctcagcaagctcttaaggatgggactacattggaagctaagaagagtaacaagcgctgataaaatagcgttttcaaaagcttttgtatatgctttattttgtttcctttctctctatttccatctatatgcgcatacatacacatatgcgggtgtatttattatatatgtgcatatacttttgatgc

SEQ ID NO: 4486 - protein, 490 aa, Arabidopsis thaliana
MGARCSKFSFCLFPSHFKSASVLESPDIENGGKVWPTFKEFKLEQLKSATGGFSSDNIVSEHGEKAPNVVYRGRLDDGRLIAVKRFNRLAWADHRQFLDEAKAVGSLRSDRLANLIGCCFEGEERLLVAEFMPHETLAKHLFHWENNPMKWAMRLRVALCLAQALEYCSNKGRALYHDLNAYRVLFDKDGNPRLSCFGLMKNSRDGKSYSTNLAFTPPEYLRTGRVTPESVVFSFGTVLLDLMSGKHIPPSHALDLIRGKNCAMLMDSALEGHFSNEDGTELVRLATRCLQYEARERPNVKSLVTSLVTLQKESDVASYVLMGIPHETEAEEESPLSLTPFGDACLRVDLTAIQEILSKIGYKDDEGIANELSFQMWTNQMQESLNSKKQGDLAFRSKDFTTAVDCYTQFIDGGTMVSPTVHARRCLSYLMNDNAQEALTDALQAQVVSPDWPTALYLQAACLFKLGMEADAQQALKDGTTLEAKKSNKR

SEQ ID NO: 4487 - protein, 359 aa, Arabidopsis thaliana
MPHETLAKHLFHWENNPMKWAMRLRVALCLAQALEYCSNKGRALYHDLNAYRVLFDKDGNPRLSCFGLMKNSRDGKSYSTNLAFTPPEYLRTGRVTPESVVFSFGTVLLDLMSGKHIPPSHALDLIRGKNCAMLMDSALEGHFSNEDGTELVRLATRCLQYEARERPNVKSLVTSLVTLQKESDVASYVLMGIPHETEAEEESPLSLTPFGDACLRVDLTAIQEILSKIGYKDDEGIANELSFQMWTNQMQESLNSKKQGDLAFRSKDFTTAVDCYTQFIDGGTMVSPTVHARRCLSYLMNDNAQEALTDALQAQVVSPDWPTALYLQAACLFKLGMEADAQQALKDGTTLEAKKSNKR

SEQ ID NO: 4488 - protein, 342 aa, Arabidopsis thaliana
MKWAMRLRVALCLAQALEYCSNKGRALYHDLNAYRVLFDKDGNPRLSCFGLMKNSRDGKSYSTNLAFTPPEYLRTGRVTPESVVFSFGTVLLDLMSGKHIPPSHALDLIRGKNCAMLMDSALEGHFSNEDGTELVRLATRCLQYEARERPNVKSLVTSLVTLQKESDVASYVLMGIPHETEAEEESPLSLTPFGDACLRVDLTAIQEILSKIGYKDDEGIANELSFQMWTNQMQESLNSKKQGDLAFRSKDFTTAVDCYTQFIDGGTMVSPTVHARRCLSYLMNDNAQEALTDALQAQVVSPDWPTALYLQAACLFKLGMEADAQQALKDGTTLEAKKSNKR

SEQ ID NO: 4489 - DNA, 814 bp, Arabidopsis thaliana
aagaaaagggaaaacaaaggatcttccatgggcgatcgctgagaagatccgcaagaacaaacacatcaaattccttgaaatcaggaatcttattcgatagtctatttgagcccttgatctggttttatatttggtggaagttttgaaatggtgctggtattggcattgggggatctccatgtaccccatagagcggctgatctacctcctaagttcaaatcaatgcttgttcctgggaagattcaacacatcatctgcactggaaatctctgcatcaaagaaatccatgactacttgaagactatctgccctgatttgcatatagttcgaggggagtttgacgaagatgcgcgataccctgagaataaaaccttgactattgggcaattcaagctgggattgtgtcatggccaccaggtgatcccatggggtgatctagactcactcgccatgcttcagagacaactgggcgtcgacattctcgtaacaggccatacccaccagttcacagcgtacaaacacgagggaggagtggtgataaacccgggctctgcaaccggagcttacagcagcataaaccaagacgttaacccaagctttgtccttatggacatcgatggtttccgagctgtagtctatgtctatgagctaatcgatggagaagttaaagtcgacaagatcgagttcaagaagccccctactaccagctctggtccgtagttccttaaaaaaaaacttaaaccgttttatgttttcgtcctaaacatttagaactttcttgtgaaaaataatcttgttaacaattttcaaatcc

SEQ ID NO: 4490 - protein, 190 aa, Arabidopsis thaliana
MVLVLALGDLHVPHRAADLPPKFKSMLVPGKIQHIICTGNLCIKEIHDYLKTICPDLHIVRGEFDEDARYPENKTLTIGQFKLGLCHGHQVIPWGDLDSLAMLQRQLGVDILVTGHTHQFTAYKHEGGVVINPGSATGAYSSINQDVNPSFVLMDIDGFRAVVYVYELIDGEVKVDKIEFKKPPTTSSGP

SEQ ID NO: 4491 - protein, 165 aa, Arabidopsis thaliana
MLVPGKIQHIICTGNLCIKEIHDYLKTICPDLHIVRGEFDEDARYPENKTLTIGQFKLGLCHGHQVIPWGDLDSLAMLQRQLGVDILVTGHTHQFTAYKHEGGVVINPGSATGAYSSINQDVNPSFVLMDIDGFRAVVYVYELIDGEVKVDKIEFKKPPTTSSGP

SEQ ID NO: 4492 - DNA, 893 bp, Arabidopsis thaliana
tggccgacagtttgaagtaaagccagcaaatcgtgaaagccatttacttttagatctctctctgcactctctgactttgtccgcaaagtagatctgctgcaatggcttctcctcttctcccaacttcgactactcctgatcaacttcccggcggcgatccacagttgctgagctctctacgcgtcctcttgtcccgcgttctagccaccgtccgtcacgcttctgcagatgccagaccctgggcagagctcgttgaccggtcagcgttttcccggccaccatcgctctcggaggcaacgtcacgagtaaggaagaacttttcctatttccgagccaattacataaccttagtggcaatcttactcgccgcgtctctgctcacgcaccctttcgctctcttcctcctcgcatcgctggccgcttcttggcttttcctctactttttccgtccggcggatcagccgttggtcattggaggacgcacgttctccgatcttgagacgctagggatactctgcctgtccactgtggtggtgatgttcatgaccagcgttggatcgctcttgatgtccactctagcagttgggatcatgggcgtggccatccacggagcgtttcgtgctcccgaagacctgtttcttgaagaacaagaagccattggatctggacttttcgcattcttcaacaacaatgcctctaatgcagctgccgctgccatagccacctcagcaatgtcacgcgttcgagtctgagattgttgaagagactacattcctacaccgcatttccaaagtgtgatatttattcatattgaattgttgtaacttgtaaccattcttttgtcatttctgttttgtttactttgttgctggaattttgaaacacaattcatc

SEQ ID NO: 4493 - protein, 216 aa, Arabidopsis thaliana
MASPLLPTSTTPDQLPGGDPQLLSSLRVLLSRVLATVRHASADARPWAELVDRSAFSRPPSLSEATSRVRKNFSYFRANYITLVAILLAASLLTHPFALFLLASLAASWLFLYFFRPADQPLVIGGRTFSDLETLGILCLSTVVVMFMTSVGSLLMSTLAVGIMGVAIHGAFRAPEDLFLEEQEAIGSGLFAFFNNNASNAAAAAIATSAMSRVRV

SEQ ID NO: 4494 - DNA, 1270 bp, Arabidopsis thaliana
ttttctttattggacgaacaaaaaactttatctttccttcctttgaaatctcccggagaaaaactatagagattttccgtttcccgctttaatacagtgccccaattcgcgcgacacatagagtgtagagacgctttcacgagcgtttccgacgtcggactttcagctcatcatctccacatctttaacggtaaagattaatcatgcctgaaattcatttgggtgctcatacaataagatcccatggagtaacagtcgcgaggttccacatgcatgactggctcattcttctgctgctaatagtcattgaaattgttcttaatgtcatcgaaccctttcatcgttttgttggagaagatatgctcactgatctcagataccctctgcaggacaacacaattcctttctgggctgtcccgttgatagctgttgtgctaccttttgctgtcatttgtgtttactacttcattagaaatgatgtttatgacctgcatcatgcaatactagggcttttgttctctgtacttataaccggtgtcataaccgatgctataaaggacgctgttggtcgacctcgtcctgatttcttttggcgttgtttccctgacggtatagggatctttcacaatgtcacgaagaatgttctatgtactggagctaaggatgtggtcaaagagggacacaagagcttccccagcggccacacatcttggtcgtttgctggtctaggatttctatcgttatacttgtctgggaaaatcagggtgtttgaccagagagggcatgttgcaaagctctgcattgtgattttacctctactggttgcagcattggttggtgtatccagagttgatgactattggcatcactggcaagatgtttttggaggagctatcataggattgactgtggccacattttgttatctgcaatttttccctcctccatacgatccagacggttggggacctcatgcctacttccagatgctggcagactcaagaaatgatgtccaagattcagcaggaatgaatcatctaagcgtgaggcaaacagagctagagagcgtacgttgatggagaagagacgtccatggaaatatcaagaagcaacacgcgggacaccacccgtatgcttcagaaccgctaagtgaagtctttgtactcgttatctatcaatcttaggcattgtcgcattgatatgtattggcttaatcacaaggcccaatattggttggaagcccattcgctaaaaatagagccctataaag

SEQ ID NO: 4495 - protein, 290 aa, Arabidopsis thaliana
MPEIHLGAHTIRSHGVTVARFHMHDWLILLLLIVIEIVLNVIEPFHRFVGEDMLTDLRYPLQDNTIPFWAVPLIAVVLPFAVICVYYFIRNDVYDLHHAILGLLFSVLITGVITDAIKDAVGRPRPDFFWRCFPDGIGIFHNVTKNVLCTGAKDVVKEGHKSFPSGHTSWSFAGLGFLSLYLSGKIRVFDQRGHVAKLCIVILPLLVAALVGVSRVDDYWHHWQDVFGGAIIGLTVATFCYLQFFPPPYDPDGWGPHAYFQMLADSRNDVQDSAGMNHLSVRQTELESVR

SEQ ID NO: 4496 - protein, 268 aa, Arabidopsis thaliana
MHDWLILLLLIVIEIVLNVIEPFHRFVGEDMLTDLRYPLQDNTIPFWAVPLIAVVLPFAVICVYYFIRNDVYDLHHAILGLLFSVLITGVITDAIKDAVGRPRPDFFWRCFPDGIGIFHNVTKNVLCTGAKDVVKEGHKSFPSGHTSWSFAGLGFLSLYLSGKIRVFDQRGHVAKLCIVILPLLVAALVGVSRVDDYWHHWQDVFGGAIIGLTVATFCYLQFFPPPYDPDGWGPHAYFQMLADSRNDVQDSAGMNHLSVRQTELESVR

SEQ ID NO: 4497 - protein, 238 aa, Arabidopsis thaliana
MLTDLRYPLQDNTIPFWAVPLIAVVLPFAVICVYYFIRNDVYDLHHAILGLLFSVLITGVITDAIKDAVGRPRPDFFWRCFPDGIGIFHNVTKNVLCTGAKDVVKEGHKSFPSGHTSWSFAGLGFLSLYLSGKIRVFDQRGHVAKLCIVILPLLVAALVGVSRVDDYWHHWQDVFGGAIIGLTVATFCYLQFFPPPYDPDGWGPHAYFQMLADSRNDVQDSAGMNHLSVRQTELESVR

SEQ ID NO: 4498 - DNA, 1319 bp, Arabidopsis thaliana
ccctctcccccaatttcctcacttctctctctctctcttcataatcttttcattgatcatcgaccaaccaaaaacaaaaaaaactcaaaaaaatccaaaaaaatcagatctttgaaagcttttcttttgtaacactcgaaaaatggatccgtcctgtgcaaactcagtgaacggattctactcatttctaaacagatcaatggaagatctcgaaagagtttatctttcaaacaatttcatgtccgtacacttcttacagagagctctctgtcttctccgtacctctcactctcatctcactctcttagttcaaaaacttcaacttcccgtcggtgacaaatggctcgatgagtatatggacgaaagctccaaactttgggaagcttgtctcgtcatcaaatccgccgtctcctccgtcgaaaacttctcctccgccggaatttcgatcgcttccaccctcgaccgtcgtctctctcctcagctttctcgtcaggtgataagggcgatatcaggatgtagaagagaagcgatagggatagaggaagaaaacagagcattaatggagaacagagttcaaaggtttccgttttggtcggaacaaacgtcggcgacggcgatggagtcgtcgacgaagttacaaaacgggttcagtggttttcgcggcgtgctttacgcgacgaggaacatgagttcgcttctccttatggttttaatgaacggtctcgtctactgttttcccggagacgcggcaacgcaaacgcagacgcagataacgcaaacgcagagtcaagtcggaggtttcgccggagcaatggggaggttgcagcagagagtggcggctgaggttgggaggatggggataaggaaaggaatattgatgcacgagtatcgccggagcaaagcggcgttggaggagcttaaagcggagctggagcggcggttctgcggtggcggtggtggtgggggagagagggaggaggaggaggaggacgagagggagctgagagagagagttgagaatctgaaagggtattttggtaatttaaggaatgggacagagagtatagtggcgcaaatcgatgatttcttcgatgagattgttgaaggaaggaaaaagcttttggatttctgcagccatagatgatgaaatatcaaaagctgacattttgttttttatgtttacatgaaaaaaaaaaaaaaaagttgggttaggctttaggctctagatgaatcagttggtagggagttgttgtaattttttcttttttactttgttgttatgaaaaaaaataatttgaaatttgagaatttttgtcaag

SEQ ID NO: 4499 - protein, 333 aa, Arabidopsis thaliana
MDPSCANSVNGFYSFLNRSMEDLERVYLSNNFMSVHFLQRALCLLRTSHSHLTLLVQKLQLPVGDKWLDEYMDESSKLWEACLVIKSAVSSVENFSSAGISIASTLDRRLSPQLSRQVIRAISGCRREAIGIEEENRALMENRVQRFPFWSEQTSATAMESSTKLQNGFSGFRGVLYATRNMSSLLLMVLMNGLVYCFPGDAATQTQTQITQTQSQVGGFAGAMGRLQQRVAAEVGRMGIRKGILMHEYRRSKAALEELKAELERRFCGGGGGGGEREEEEEDERELRERVENLKGYFGNLRNGTESIVAQIDDFFDEIVEGRKKLLDFCSHR

SEQ ID NO: 4500 - protein, 314 aa, Arabidopsis thaliana
MEDLERVYLSNNFMSVHFLQRALCLLRTSHSHLTLLVQKLQLPVGDKWLDEYMDESSKLWEACLVIKSAVSSVENFSSAGISIASTLDRRLSPQLSRQVIRAISGCRREAIGIEEENRALMENRVQRFPFWSEQTSATAMESSTKLQNGFSGFRGVLYATRNMSSLLLMVLMNGLVYCFPGDAATQTQTQITQTQSQVGGFAGAMGRLQQRVAAEVGRMGIRKGILMHEYRRSKAALEELKAELERRFCGGGGGGGEREEEEEDERELRERVENLKGYFGNLRNGTESIVAQIDDFFDEIVEGRKKLLDFCSHR

SEQ ID NO: 4501 - protein, 301 aa, Arabidopsis thaliana
MSVHFLQRALCLLRTSHSHLTLLVQKLQLPVGDKWLDEYMDESSKLWEACLVIKSAVSSVENFSSAGISIASTLDRRLSPQLSRQVIRAISGCRREAIGIEEENRALMENRVQRFPFWSEQTSATAMESSTKLQNGFSGFRGVLYATRNMSSLLLMVLMNGLVYCFPGDAATQTQTQITQTQSQVGGFAGAMGRLQQRVAAEVGRMGIRKGILMHEYRRSKAALEELKAELERRFCGGGGGGGEREEEEEDERELRERVENLKGYFGNLRNGTESIVAQIDDFFDEIVEGRKKLLDFCSHR

SEQ ID NO: 4502 - DNA, 721 bp, Arabidopsis thaliana
atttttctcaccgtcgagagaacaaaacacaagttgcagactttatccaaatttagggttttctttttcttcttactcagattatcatcagatcttcgaaaccccaaatttacaaatcagatcagcttcccggttagtactaccctcaaatcaactaagtttcatgtctgaacttgactcccaggttcccactgcctttgatccgtttgctgatgcgaatgttgaggactcaggtgccggaacaaaagaatacgttcatatccgtgtccagcagcgaaatggtaggaaaagcttgacaaccgtccagggcctgaagaaagagtacagctataccaagatacttaaggacctcaaaaaagagttttgctgcaacggcactgtggttcaggattcagaactcggacaggttatacagcttcaaggtgaccaacgtaagaacgtctccacattccttgtccaggctggtttggtgaagaaggataacatcaagatccatggtttctaagctatctagtggatcatattattaataaaaccatatctttctcttctttcatctcttgttgcgaattttgggtttgattcatcaaaatcgtcttcttcctagtgttcttcttctgtttggtattcgaattttaatggcttatgtccaccatacttcttcccctgttttcgtgttactctgtttcacatcttacttatcttataatatcagtttgtt

SEQ ID NO: 4503 - protein, 167 aa, Arabidopsis thaliana
FFSPSREQNTSCRLYPNLGFSFSSYSDYHQIFETPNLQIRSASRLVLPSNQLSFMSELDSQVPTAFDPFADANVEDSGAGTKEYVHIRVQQRNGRKSLTTVQGLKKEYSYTKILKDLKKEFCCNGTVVQDSELGQVIQLQGDQRKNVSTFLVQAGLVKKDNIKIHGF

SEQ ID NO: 4504 - protein, 113 aa, Arabidopsis thaliana
MSELDSQVPTAFDPFADANVEDSGAGTKEYVHIRVQQRNGRKSLTTVQGLKKEYSYTKILKDLKKEFCCNGTVVQDSELGQVIQLQGDQRKNVSTFLVQAGLVKKDNIKIHGF

SEQ ID NO: 4505 - DNA, 1489 bp, Arabidopsis thaliana
aaacttcagcgaaaaaaatgccactctcgttgcaatctccgccttgtgcaactctctctgcttcaatccgaaagggacgatggaagacgctcgccgccggattctccgttactcctcttcccgccgttaacttcagtcttcggcgatcgattcctcggattcttgcttccgctagttcctcctcctctcctgcgtcttcgtctctcgaagctggtgagaacaatgagctaaatgctgtttcagcttttagtgagattgttcctgatactgtcgttttcgatgactttgagaggtttccgccgactgcagctactgttagctctgctcttcttctgggtatctgtggtctacctgataccattttccgcaatgctgtggatatggctttggcggattcttcttgtgcagggcttgaaaccacagaatctcgactctcttgctttttcaataaggctattgtcaacgtaggtggcgatcttgtcaaactcgttccaggtcgagtttctactgaagtggatgcacgtcttgcttatgacacaaatggcattatccgcaaggttcatgatctgctgagactatacaatgaaatcgatgtaccacacgaccggctcctattcaaaatccctgcaacttggcaaggtattgaagctgcaagattgttggaatcagagggaatccaaacgcatatgacctttgtttacagctttgcacaagctgcagcagcttctcaagccggtgcttctgtcattcagattttcgtcggtcgcctcagggattgggcgcgtaatcattcgggagataccgagattgaatctgctattaaatcgggagaagatcctggtttggccttggtcaaaagatcatataactacattcacaagtatggttacaagtccaagctgatggctgctgctgtccggaacaaacaagacttgttcagtcttctcggggtcgattatgtcattgcaccattaaaggtactgcaatctcttaaagattcacccgccattcccgatgatgaaaaatactcatttgttcggaaacttactcctgaaactgcaacacattaccacttcaccaacaaagagctggtcaaatgggaccagctaagcttggcttcatctatgggtcctgcatcagtggagcttttatcagccggtgttgaaggttatgcgaaccaagcgaaacgtgttgaagagcttttcgggaagatttggccacctcctaatgtctaaatacacagcttttctcttcatcaataaggatctgtatcaataagagaactaagtgtccatgttacttgaacactaccctgtttatcttcctgccctctttatctttttcgtggcttgttgttcatcatgtctgagacttgggctacaagataagagactttagttttaagactaaaagtctaaaaccaaatccttttcatgttgtttcgtctgaacttcggtcttttttctctgtaattgacttagtcggttct

SEQ ID NO: 4506 - protein, 410 aa, Arabidopsis thaliana
TSAKKMPLSLQSPPCATLSASIRKGRWKTLAAGFSVTPLPAVNFSLRRSIPRILASASSSSSPASSSLEAGENNELNAVSAFSEIVPDTVVFDDFERFPPTAATVSSALLLGICGLPDTIFRNAVDMALADSSCAGLETTESRLSCFFNKAIVNVGGDLVKLVPGRVSTEVDARLAYDTNGIIRKVHDLLRLYNEIDVPHDRLLFKIPATWQGIEAARLLESEGIQTHMTFVYSFAQAAAASQAGASVIQIFVGRLRDWARNHSGDTEIESAIKSGEDPGLALVKRSYNYIHKYGYKSKLMAAAVRNKQDLFSLLGVDYVIAPLKVLQSLKDSPAIPDDEKYSFVRKLTPETATHYHFTNKELVKWDQLSLASSMGPASVELLSAGVEGYANQAKRVEELFGKIWPPPNV

SEQ ID NO: 4507 - protein, 405 aa, Arabidopsis thaliana
MPLSLQSPPCATLSASIRKGRWKTLAAGFSVTPLPAVNFSLRRSIPRILASASSSSSPASSSLEAGENNELNAVSAFSEIVPDTVVFDDFERFPPTAATVSSALLLGICGLPDTIFRNAVDMALADSSCAGLETTESRLSCFFNKAIVNVGGDLVKLVPGRVSTEVDARLAYDTNGIIRKVHDLLRLYNEIDVPHDRLLFKIPATWQGIEAARLLESEGIQTHMTFVYSFAQAAAASQAGASVIQIFVGRLRDWARNHSGDTEIESAIKSGEDPGLALVKRSYNYIHKYGYKSKLMAAAVRNKQDLFSLLGVDYVIAPLKVLQSLKDSPAIPDDEKYSFVRKLTPETATHYHFTNKELVKWDQLSLASSMGPASVELLSAGVEGYANQAKRVEELFGKIWPPPNV

SEQ ID NO: 4508 - protein, 284 aa, Arabidopsis thaliana
MALADSSCAGLETTESRLSCFFNKAIVNVGGDLVKLVPGRVSTEVDARLAYDTNGIIRKVHDLLRLYNEIDVPHDRLLFKIPATWQGIEAARLLESEGIQTHMTFVYSFAQAAAASQAGASVIQIFVGRLRDWARNHSGDTEIESAIKSGEDPGLALVKRSYNYIHKYGYKSKLMAAAVRNKQDLFSLLGVDYVIAPLKVLQSLKDSPAIPDDEKYSFVRKLTPETATHYHFTNKELVKWDQLSLASSMGPASVELLSAGVEGYANQAKRVEELFGKIWPPPNV

SEQ ID NO: 4509 - DNA, 1275 bp, Arabidopsis thaliana
atatgattacacacctggtcctgtttctttgaatattctctttggtgcccttttggatggaaaagccgtgaaagctgcgaagagttttctcgataccactggctttaaacctgagcctacgttattagagcaatacgtgaagtgtcttagtgaagaagggttggtagaggaagctattgaagtgtataatgtactgaaagatatgggaattagttcttcagttgtgacttgcaattctgttttattaggttgcttgaaagcgaggaaactcgatcggttttgggaacttcataaggaaatggtagaatctgagtttgattcagagaggattcggtgtttgattcaagctttgtgtgatggtggggatgtttcagaaggctatgagcttttgaagcagggattgaaacaagggcttgatccaggacagtatgtgtatgctaaactgatatctggattctgtgagattgggatctatgcttgtatgtcggaggttcttcatacgatgatagcgtggaaccatttcccgagtatgtatatataccagaagattataaaggggttgtgtatgaataagaagcagcttgaggcttattgtatattcaagaatctgaaagataaaggctatgcacctgatagagttgtgtatactacgatgattcgaggattctgtgagaagggatggttagggagcgcgaggaagctttggtttgagatgataaagaaagggatgcgaccaaacgagttcgcttacaatgtgataatacacgggcattttaaaagaggcgaaatttcgcttgttgaagcattctacaatgagatgttgagaaatggctatggaggaacaatgttaagctgcaatacgatgataaagggtttctgctcacatggaaaatcagacgaggccttcgagattttcaagaatatgtctgaaaccggggttacaccgaatgcaatcacgtataacgctttgataaaaggattttgcaaagaaaacaaggttgagaaaggcttgaaactatacaaggagcttaaggccttaggtttgaagccttctggtatggcatatgctgcactagtgagaaatctgaagatgtctgattctgttgcaacttctttaaatctagagattgtctgaaagaaacttatttttgttgggagtcttgtctgactctagaactgtataacattaggttgattcatcatccacaaaaaggccaattcctttttttagcatctgtattttttttggttaataaaacgaaaacggtttcatcg

SEQ ID NO: 4510 - protein, 377 aa, Arabidopsis thaliana
YDYTPGPVSLNILFGALLDGKAVKAAKSFLDTTGFKPEPTLLEQYVKCLSEEGLVEEAIEVYNVLKDMGISSSVVTCNSVLLGCLKARKLDRFWELHKEMVESEFDSERIRCLIQALCDGGDVSEGYELLKQGLKQGLDPGQYVYAKLISGFCEIGIYACMSEVLHTMIAWNHFPSMYIYQKIIKGLCMNKKQLEAYCIFKNLKDKGYAPDRVVYTTMIRGFCEKGWLGSARKLWFEMIKKGMRPNEFAYNVIIHGHFKRGEISLVEAFYNEMLRNGYGGTMLSCNTMIKGFCSHGKSDEAFEIFKNMSETGVTPNAITYNALIKGFCKENKVEKGLKLYKELKALGLKPSGMAYAALVRNLKMSDSVATSLNLEIV

SEQ ID NO: 4511 - protein, 310 aa, Arabidopsis thaliana
MGISSSVVTCNSVLLGCLKARKLDRFWELHKEMVESEFDSERIRCLIQALCDGGDVSEGYELLKQGLKQGLDPGQYVYAKLISGFCEIGIYACMSEVLHTMIAWNHFPSMYIYQKIIKGLCMNKKQLEAYCIFKNLKDKGYAPDRVVYTTMIRGFCEKGWLGSARKLWFEMIKKGMRPNEFAYNVIIHGHFKRGEISLVEAFYNEMLRNGYGGTMLSCNTMIKGFCSHGKSDEAFEIFKNMSETGVTPNAITYNALIKGFCKENKVEKGLKLYKELKALGLKPSGMAYAALVRNLKMSDSVATSLNLEIV

SEQ ID NO: 4512 - protein, 278 aa, Arabidopsis thaliana
MVESEFDSERIRCLIQALCDGGDVSEGYELLKQGLKQGLDPGQYVYAKLISGFCEIGIYACMSEVLHTMIAWNHFPSMYIYQKIIKGLCMNKKQLEAYCIFKNLKDKGYAPDRVVYTTMIRGFCEKGWLGSARKLWFEMIKKGMRPNEFAYNVIIHGHFKRGEISLVEAFYNEMLRNGYGGTMLSCNTMIKGFCSHGKSDEAFEIFKNMSETGVTPNAITYNALIKGFCKENKVEKGLKLYKELKALGLKPSGMAYAALVRNLKMSDSVATSLNLEIV

SEQ ID NO: 4513 - DNA, 1370 bp, Arabidopsis thaliana
aattaaccgtcacgagctacatgctctgtatcttcagatttcctaaatacttacaattcccattccaattctgatttggttaatccaaaacaaaaaaaaaggaaactttcttttaccctaaatctataaaaacgaaacccttcttcacaaatctttgttcttcgtaatctctcttaaaagcttttgtttcaatttcaatggagtgggttcgaggagaaacaattgggttcggaaccttctctactgtcagtacagcgacaaagtctagaaactccggcgactttcctgcacttatcgctgtgaagtcgacgggttcttacggcgccgcttcactctccaacgagaaatcggtgttggattcactccgtgattgtcctgagatcatacggtgttacggcgaggattcaactgtggagaacggagaagagatgcataacttgttcttagagtacgcttcgagaggaagcttagcgaggtacatgaagaaacttggcggtgagggtttaccggagtccaccgtacgtcgctacacaggatcggtgcttcgagggttacgtcatattcacgctaaagggtttgcacactgcgatataaaactcgggaatattctgttattcaacgacggctctgttaaaattgccgattttggtttggcgatgagagttcacggagatttaacggcgttaagaaaaagtgaggagattagagggactccgttatacatggcaccggaatctgttaatgataatgagtatggatcagcggctgacgtgtgggctttaggatgtgctgtagttgagatgttgagtggcaaaacggcatggagtgttaaagaaggatcacacttcatgtcgcttttgatacgtatcggtgttggtgatgagttaccgaagattccagagatgttgtccgaagaaggcaaggatttcttgtcgaagtgttttgttaaagatcaagcgaaaagatggacggctgagatgcttttaaaccattcattcgtagccattgatcttgaagatgatcaccgagaagacttcgttgtgaaggttaaggaagaggataaagtattgatgtctccaaagtgtccctttgagtttgatgattgggattcttttacattggattcaaacccatcgttggattctccggtggagagacttgggagtttggttagtggttcgatccctgattggtctgtcggtgagagttgggtttcagtccggtgatgaaagtgatatgaaaacagaggaaaaacagagtgtttggaaggctaggttttttttagcacctagttagacccattctacgattcttgttcgtattctttaggtgtaattgatttgttaatacaattcattctagtgttcctc

SEQ ID NO: 4514 - protein, 342 aa, Arabidopsis thaliana
MEWVRGETIGFGTFSTVSTATKSRNSGDFPALIAVKSTGSYGAASLSNEKSVLDSLRDCPEIIRCYGEDSTVENGEEMHNLFLEYASRGSLARYMKKLGGEGLPESTVRRYTGSVLRGLRHIHAKGFAHCDIKLGNILLFNDGSVKIADFGLAMRVHGDLTALRKSEEIRGTPLYMAPESVNDNEYGSAADVWALGCAVVEMLSGKTAWSVKEGSHFMSLLIRIGVGDELPKIPEMLSEEGKDFLSKCFVKDQAKRWTAEMLLNHSFVAIDLEDDHREDFVVKVKEEDKVLMSPKCPFEFDDWDSFTLDSNPSLDSPVERLGSLVSGSIPDWSVGESWVSVR

SEQ ID NO: 4515 - protein, 265 aa, Arabidopsis thaliana
MHNLFLEYASRGSLARYMKKLGGEGLPESTVRRYTGSVLRGLRHIHAKGFAHCDIKLGNILLFNDGSVKIADFGLAMRVHGDLTALRKSEEIRGTPLYMAPESVNDNEYGSAADVWALGCAVVEMLSGKTAWSVKEGSHFMSLLIRIGVGDELPKIPEMLSEEGKDFLSKCFVKDQAKRWTAEMLLNHSFVAIDLEDDHREDFVVKVKEEDKVLMSPKCPFEFDDWDSFTLDSNPSLDSPVERLGSLVSGSIPDWSVGESWVSVR

SEQ ID NO: 4516 - protein, 248 aa, Arabidopsis thaliana
MKKLGGEGLPESTVRRYTGSVLRGLRHIHAKGFAHCDIKLGNILLFNDGSVKIADFGLAMRVHGDLTALRKSEEIRGTPLYMAPESVNDNEYGSAADVWALGCAVVEMLSGKTAWSVKEGSHFMSLLIRIGVGDELPKIPEMLSEEGKDFLSKCFVKDQAKRWTAEMLLNHSFVAIDLEDDHREDFVVKVKEEDKVLMSPKCPFEFDDWDSFTLDSNPSLDSPVERLGSLVSGSIPDWSVGESWVSVR

SEQ ID NO: 4517 - DNA, 1565 bp, Arabidopsis thaliana
cttcatcatcatcgtattcaccgttgtcctttctttcattgacacttgccagtttacatcgacaaacaaaagaaatcagaatggatttctcagggagcttctttgtcatcttcgttaccttcttctttctccctcctctgtcttcagctgggagctacgattctggttcgggtctcgagtcactcgctcgcgggatgcttcattcagccaaggatcctgagttcttcgagtggatgagaggaattaggagaaagattcatgagaacccagagacagggtttcaggagttcaaaacgagtcaactcgttcgagacgagcttgactcgcttggagtgaagtataagtatcctgtggcgaagactggcgtcgtcgcttggatcggatcctgttcgaaacctgttttcggacttagagccgacatggacgcacttccgttacaggaattagtggaatgggaatcgaaaagtaaagtagatggaaagatgcatgcttgtggtcatgatactcatgttgctatgcttcttggtgctgctaagcttcttcaaaccacaaaacacctcatcaaggggacagtaaaacttgtgtttcaaccaggcgaggaaggttatgcaggtgcttatgaaatgctaaaagacgagattctagacgacttagatgggatactcagtgttcatgtctttccatcgatcccatcaggtggtattggttctaggcctgggaccgttcttgcaggtgcaggattgtttacagtcacggttcacggtcaaggtagccacgcagctacaccgcacttctctaaagacccggttcttgcagcttcttccgctgttgttgccttgcaacagattgtttcgcgggaactggatccactcgaagctggtgtggttacagttggatatattgaaggaggtcatgctcaaaacgtaataccgcagagtgcgaaatttggaggtactttcagaagcttaagcaacgatgggcttctatttatccaaagacggatcaaagagatttcagaggcacaagcatcggtataccgatgcaaagcagaagtaaacttcgaagagaaaaagccgtcgcttcacccggtaatgaataacgacgagggcttatacgagcacggtaaaaaagtagcggaagcgatgattggaaagaataacttccatgatttcccggtgacaatgggaggagaggatttcagcttcttcactcaaaagactaaggctgcgattttcgtgctgggggtaaagaatgagacgctaggcgctggtaagccgcttcactcgccttacttctttgttgatgaagaagctcttcctgttggggctgctcttcacgcagctatggccgtttcttatttggacgaacatggtcatagccatgaagaagaggttaagagtgaattatagaaggtgttgggagaaaatcagcttatattagtcatcatctatttgtatttgaacttgaaagttaggtgaggttaggtttcgggttgggaagaatgtttgttaatagtcacgagaaaccaaccacttctattaaaataaatttgatgtaagagtttt

SEQ ID NO: 4518 - protein, 468 aa, Arabidopsis thaliana
SSSSYSPLSFLSLTLASLHRQTKEIRMDFSGSFFVIFVTFFFLPPLSSAGSYDSGSGLESLARGMLHSAKDPEFFEWMRGIRRKIHENPETGFQEFKTSQLVRDELDSLGVKYKYPVAKTGVVAWIGSCSKPVFGLRADMDALPLQELVEWESKSKVDGKMHACGHDTHVAMLLGAAKLLQTTKHLIKGTVKLVFQPGEEGYAGAYEMLKDEILDDLDGILSVHVFPSIPSGGIGSRPGTVLAGAGLFTVTVHGQGSHAATPHFSKDPVLAASSAVVALQQIVSRELDPLEAGVVTVGYIEGGHAQNVIPQSAKFGGTFRSLSNDGLLFIQRRIKEISEAQASVYRCKAEVNFEEKKPSLHPVMNNDEGLYEHGKKVAEAMIGKNNFHDFPVTMGGEDFSFFTQKTKAAIFVLGVKNETLGAGKPLHSPYFFVDEEALPVGAALHAAMAVSYLDEHGHSHEEEVKSEL

SEQ ID NO: 4519 - protein, 442 aa, Arabidopsis thaliana
MDFSGSFFVIFVTFFFLPPLSSAGSYDSGSGLESLARGMLHSAKDPEFFEWMRGIRRKIHENPETGFQEFKTSQLVRDELDSLGVKYKYPVAKTGVVAWIGSCSKPVFGLRADMDALPLQELVEWESKSKVDGKMHACGHDTHVAMLLGAAKLLQTTKHLIKGTVKLVFQPGEEGYAGAYEMLKDEILDDLDGILSVHVFPSIPSGGIGSRPGTVLAGAGLFTVTVHGQGSHAATPHFSKDPVLAASSAVVALQQIVSRELDPLEAGVVTVGYIEGGHAQNVIPQSAKFGGTFRSLSNDGLLFIQRRIKEISEAQASVYRCKAEVNFEEKKPSLHPVMNNDEGLYEHGKKVAEAMIGKNNFHDFPVTMGGEDFSFFTQKTKAAIFVLGVKNETLGAGKPLHSPYFFVDEEALPVGAALHAAMAVSYLDEHGHSHEEEVKSEL

SEQ ID NO: 4520 - protein, 404 aa, Arabidopsis thaliana
MLHSAKDPEFFEWMRGIRRKIHENPETGFQEFKTSQLVRDELDSLGVKYKYPVAKTGVVAWIGSCSKPVFGLRADMDALPLQELVEWESKSKVDGKMHACGHDTHVAMLLGAAKLLQTTKHLIKGTVKLVFQPGEEGYAGAYEMLKDEILDDLDGILSVHVFPSIPSGGIGSRPGTVLAGAGLFTVTVHGQGSHAATPHFSKDPVLAASSAVVALQQIVSRELDPLEAGVVTVGYIEGGHAQNVIPQSAKFGGTFRSLSNDGLLFIQRRIKEISEAQASVYRCKAEVNFEEKKPSLHPVMNNDEGLYEHGKKVAEAMIGKNNFHDFPVTMGGEDFSFFTQKTKAAIFVLGVKNETLGAGKPLHSPYFFVDEEALPVGAALHAAMAVSYLDEHGHSHEEEVKSEL

SEQ ID NO: 4521 - DNA, 1705 bp, Arabidopsis thaliana
ctcttcttcttcgtttccttcttcctcatcatatctttcatcttctccaccagaatttgttttaggctctccttcttctgtttctttttctcccaaagaaacaattagatatggagaaccttaccctagtttcttgctcagcttcttctccaaagctgttaattggatgcaatttcacttcctcgctgaaaaaccctactgggttttctcgtcggactcctaatattgtcctccggtgttccaaaatatctgcctctgctcaatctcaatctccctcttcgcgtccggagaacactggagaaatcgtggttgtgaaacagagaagcaaagcttttgcaagtatattttcttcgagtcgtgatcaacagacaacttctgttgcttcccctagtgtgcctgtgccaccaccatcttcatcaaccataggatcaccacttttctggattggtgttggtgttggtctatcagctttgttctcatatgtaacttcaaatttaaagaaatatgcaatgcaaacagctatgaagacgatgatgaaccaaatgaatacgcaaaatagccagtttaataattctggattcccatcaggatcaccttttccgtttccatttcctcctcaaacaagtcctgcttcctcgccattccaatctcaatcccagtcttcaggtgctaccgttgatgtgacagcgacaaaagtagagacacctccttcaactaaaccgaaacctacacctgcaaaggatatagaggtggataagccaagtgttgtcttagaggcaagcaaagagaagaaagaagaaaagaactatgcctttgaagacatttcacccgaggaaaccacaaaagaaagcccatttagcaactatgcagaagtctctgaaactaattcccccaaagaaactcgcttgtttgaggatgtcttgcaaaatggagctggtccggcaaatggtgccactgcttcagaggtttttcaatctttgggtggtgggaaaggagggccgggtttatctgtagaagctttagagaaaatgatggaagatccaacagtccagaagatggtttacccatacttgcctgaggagatgaggaacccagaaactttcaaatggatgcttaaaaatcctcagtaccgtcaacaactacaggacatgttgaataatatgagtgggagtggtgaatgggacaagcgaatgacagatacattgaagaattttgacctgaatagtcctgaagtgaagcaacaattcaatcaaataggactaactccagaagaagtcatatctaagatcatggagaaccctgatgttgccatggcattccagaatcctagagtccaagcagcgttaatggaatgctcagagaacccaatgaacatcatgaagtaccaaaacgacaaagaggtaatggatgtgttcaacaagatatcgcagctcttcccaggaatgacgggttgaaaaagctcacgtctttggttctatcaaaaatgtcacattgtctttagctttttgtagggagaaaaaaatgtttttttttttttgcaaagagtcttcagttttggtcagatcagagaattgtgtaccatgttaatcttaaacgcggtcgggaattggagtcgtgtgaaaacgccgctgctgttgtttggtatgaatattatacaatagaatttgttgtcttaccaaaaaaagtctatgaagacactgaagag

SEQ ID NO: 4522 - protein, 447 aa, Arabidopsis thaliana
MENLTLVSCSASSPKLLIGCNFTSSLKNPTGFSRRTPNIVLRCSKISASAQSQSPSSRPENTGEIVVVKQRSKAFASIFSSSRDQQTTSVASPSVPVPPPSSSTIGSPLFWIGVGVGLSALFSYVTSNLKKYAMQTAMKTMMNQMNTQNSQFNNSGFPSGSPFPFPFPPQTSPASSPFQSQSQSSGATVDVTATKVETPPSTKPKPTPAKDIEVDKPSVVLEASKEKKEEKNYAFEDISPEETTKESPFSNYAEVSETNSPKETRLFEDVLQNGAGPANGATASEVFQSLGGGKGGPGLSVEALEKMMEDPTVQKMVYPYLPEEMRNPETFKWMLKNPQYRQQLQDMLNNMSGSGEWDKRMTDTLKNFDLNSPEVKQQFNQIGLTPEEVISKIMENPDVAMAFQNPRVQAALMECSENPMNIMKYQNDKEVMDVFNKISQLFPGMTG

SEQ ID NO: 4523 - protein, 314 aa, Arabidopsis thaliana
MQTAMKTMMNQMNTQNSQFNNSGFPSGSPFPFPFPPQTSPASSPFQSQSQSSGATVDVTATKVETPPSTKPKPTPAKDIEVDKPSVVLEASKEKKEEKNYAFEDISPEETTKESPFSNYAEVSETNSPKETRLFEDVLQNGAGPANGATASEVFQSLGGGKGGPGLSVEALEKMMEDPTVQKMVYPYLPEEMRNPETFKWMLKNPQYRQQLQDMLNNMSGSGEWDKRMTDTLKNFDLNSPEVKQQFNQIGLTPEEVISKIMENPDVAMAFQNPRVQAALMECSENPMNIMKYQNDKEVMDVFNKISQLFPGMTG

SEQ ID NO: 4524 - protein, 310 aa, Arabidopsis thaliana
MKTMMNQMNTQNSQFNNSGFPSGSPFPFPFPPQTSPASSPFQSQSQSSGATVDVTATKVETPPSTKPKPTPAKDIEVDKPSVVLEASKEKKEEKNYAFEDISPEETTKESPFSNYAEVSETNSPKETRLFEDVLQNGAGPANGATASEVFQSLGGGKGGPGLSVEALEKMMEDPTVQKMVYPYLPEEMRNPETFKWMLKNPQYRQQLQDMLNNMSGSGEWDKRMTDTLKNFDLNSPEVKQQFNQIGLTPEEVISKIMENPDVAMAFQNPRVQAALMECSENPMNIMKYQNDKEVMDVFNKISQLFPGMTG

SEQ ID NO: 4525 - DNA, 529 bp, Arabidopsis thaliana
  misc_feature (491)..(491): n is a, c, g, or t
  misc_feature (504)..(504): n is a, c, g, or t
ataacacaaatacaccaaaaaaaaaaaaacagaaagtaacatgagatctctcttattagccgtgtgcctggttcttgctttacactgcggtgaagcagccgtgtcttgcaacacggtgattgcggatctttacccttgcttatcctacgtgactcagggcggaccggtcccaaccctctgctgcaacggtctcacaacactcaagagtcaggctcaaacttctgtggaccgtcagggggtctgtcgttgcatcaaatctgctattggaggactcactctctctcctagaaccatccaaaatgctttggaattgccttctaaatgtggtgtcgatctcccttacaagttcagcccttccactgactgcgacagtatccagtgagacaagcagaaaatcttaaaggaagctactacaagaactataataacctaataattaataaatgagggcattggtttgctagttgctaaattgatcagtgatgtattgncattttgaatgtnctaatctcagcaggcacttatctcc

SEQ ID NO: 4526 - protein, 113 aa, Arabidopsis thaliana
MRSLLLAVCLVLALHCGEAAVSCNTVIADLYPCLSYVTQGGPVPTLCCNGLTTLKSQAQTSVDRQGVCRCIKSAIGGLTLSPRTIQNALELPSKCGVDLPYKFSPSTDCDSIQ

SEQ ID NO: 4527 - DNA, 612 bp, Arabidopsis thaliana
atatccaacaacaaaaacataagctaagaaaacgaaactcaactaattttgttatcacccaaaaagaagttcaaacacaatggctttcgctttgaggttcttcacatgccttgttttaacggtgtgcatagttgcatcagtcgatgctgcaatctcatgtggcacagtggcaggtagcttggctccatgtgcaacctatctatcaaaaggtgggttggtgccaccttcatgttgtgcaggagtcaaaactttgaacagtatggctaaaaccacaccagaccgccaacaagcttgcagatgcatccagtccactgcgaagagcatttctggtctcaacccaagtctagcctctggccttcctggaaagtgcggtgttagcattccatatccaatctccatgagcactaactgcaacaacatcaagtgaaatggaagcttacgtcgccgttttggcgttaagagtatggtttaccagaagtactagaataaaatacggctatatatcttagctgatattaccatgtatttgtttttgtctcaatgctttgtcttattttcatatcatatgttgtattgatgtgctaaaactatgataatagtaccttattagtc

SEQ ID NO: 4528 - protein, 115 aa, Arabidopsis thaliana
MAFALRFFTCLVLTVCIVASVDAAISCGTVAGSLAPCATYLSKGGLVPPSCCAGVKTLNSMAKTTPDRQQACRCIQSTAKSISGLNPSLASGLPGKCGVSIPYPISMSTNCNNIK

SEQ ID NO: 4529 - DNA, 801 bp, Arabidopsis thaliana
agtccgtcgggaaataatggtaagcgaacggagctccaaggagaagaagagaagcagagctcggagcgaagattcttcatcttccgattacgaagagaaagttaagaggcatcgaggaacagagaaagatgatgaaaggagaagtaggagaagtgataagaaggataagaaatctcacaagcaccacaaatccagtacatcaaagaagtccaaggatgataagccgaaaaagaaacatacggaaagcgaccacaagctaaaagagggaattccagagctatcaatggaagactacttctcgaaaaacaacgagtttgctacatggctgaaagaagaaaaacgtacttactttaatgatctcacgaccgaagctgcacgaggactgttctcacgatttgtcaagagatggaacagaggaaaactcgagtctcgatactacgagggaatctccactgccccacgaacagctcacgactggatgatcaagcgtaggtgaaaaaaagcaaaagcaataccttcctcttctgtggttcgccggttacctctcttcttgcttcttgtacacgtgaaggttgattgcatcagagatatatttctatgtagtttctctacttagaacttcttgttgctgaactagttagatagattgtcgtggagagatatgtagtcggttttcagagtaagacaaactttacatatccaaggtcttaaccaaagttgccgaagaactatctgatgaatccttatgtaacattgagaatttgatatccggttaagggagaaatagaccgttttgattgc

SEQ ID NO: 4530 - protein, 164 aa, Arabidopsis thaliana
VRREIMVSERSSKEKKRSRARSEDSSSSDYEEKVKRHRGTEKDDERRSRRSDKKDKKSHKHHKSSTSKKSKDDKPKKKHTESDHKLKEGIPELSMEDYFSKNNEFATWLKEEKRTYFNDLTTEAARGLFSRFVKRWNRGKLESRYYEGISTAPRTAHDWMIKRR

SEQ ID NO: 4531 - protein, 159 aa, Arabidopsis thaliana
MVSERSSKEKKRSRARSEDSSSSDYEEKVKRHRGTEKDDERRSRRSDKKDKKSHKHHKSSTSKKSKDDKPKKKHTESDHKLKEGIPELSMEDYFSKNNEFATWLKEEKRTYFNDLTTEAARGLFSRFVKRWNRGKLESRYYEGISTAPRTAHDWMIKRR

SEQ ID NO: 4532 - DNA, 2516 bp, Arabidopsis thaliana
gtttccatagaatatgtattcctatgattttttttttatagaattaattgtgttagttaatgccaaattaagattctcttttttttaaaatcactttttgaagaagcacttacaagagagttgtgttaagaatagattccagatggaaaagttggcaagaaaagatgttttaagtttttgccttgtcgtctaatccaacggtcgatcttcgttcatatcaagaatccttatgacgtggaccattctcttccctccatctgtacctcttcccaacctctattttttaatttacatcgaaaataaataagaaggattgcaaaagaaaaaatagaaaaaaaactctctgttcttctttcttcttcttcttcgtcgtaagccattaccatttcttctccctctctctgtttttctttgttgcgtatctgtacttagttttcaaacataaaaataaaacatatctttagctgatgttgtcttcttcttgataaacagattttctacagctttttttctttctaatttaataattcttgagactttttaaaaccctctgcgaaacagatgattcgagttttggtttcttcatctgtgttttgattttttcgtcttttattcttagtcaaacacataaatttcttttactactcttcgtagatgacttctcatgttccaaaacatcctcgtaaatcctttgaagatatggtgaagaatcttaaagtggatcctcttgctaaggtcactgcctccaccacttccatggtttctgcaaaagagaataagaatcagtcagaggcagagccatcatattatgaaactcttgagacatatcaaggcctgccttgtccttatggtggctactatggatactactatccaggtcttgatggttcagttggagaagcaaaggataatggatactatggttatggaacagaagttcagtacccggtaatgcaaggggaaaatgggtctgtgatctacttgatgccagggtttcagtcttatgatgcaagccaaacttatatgcctataaacccggttggtgtatcgagtcaagcacttcattcgccgatgtatgctgctcagggttattatcagaaccaatttggttatgcagatgtttcatcgcccacatatttatgggaccctgttggagacaggtatgtgtatggtgttgcttcatataccccacccttgaaacagaacatatcttcttcaagtcataaccacaacaattattattcaaagagcaagaactccttcacgggtcacggcatgggagatcgtcctaaaacaccgcgaaaagcatcacagaacagctatgccccacccccactgcttaaccaagaaaaaggtcgcattgcttacccgatggacccagtaaagaaaaagtctggagctttaaatcgggatgaaacagagaaggcgaaagcgaggacaaaagaaaatggtacaagtatgaatgacttagcaaacggtcaagatcatattaccaatggagaatgtgagtcatgttcgttggatgctgaagggaatgaaagaagcaacggtgttggttctgtgatcagaagggatcaatataacctccctagctttcagaccaaatacgaggaagcaatcttttttgtgataaaatcgtatagcgaagacgacatacacaagagcatcaagtacaatgtctggtctagtactctcaatgggaacaagaagttagacagtgcatatcaagaatctcagaagaaggctgcagacaaaagtggaaagtgcccggttttcctgttcttctcggtgaatgcaagtggccaattctgcggtgtagctgagatgattggacgagttgattatgagaaaagcatggagttctggcaacaagataagtggactggctattttccggtgaagtggcacatcatcaaagatgttccaaatccgcaactacgacatatcatactagagaacaatgagaacaagcctgtaaccaatagcagagacacacaagaggtgaggttgcctcaagggaatgaagtgttgaacatctttaagaactacgcagctaagacatctattttagatgattttgatttttatgaaaacagagagaaggttatggtacagaagaagctaaggttccctccggtattaaagaagaaagaagaagacttggttgctgattttaaaacaatggagatgtctaatacagtcgaagagggaaacacagagttaaccgggacagtgagctaactagaagaacatgtagtgtttttggtttggttttttaaggatcaatataaaccgtccgattgtttcggattgctttgattttattacaagcgagatggcttcttcttctattgtttcgttgtatggtgtaatgttgggttttttcttcactttttttttttggttttgtgttgtgtttatgatatgttttgcaatttgtaatcattggcaaaaatgataggtttgattttatagtgatataagaaaaccgggatacaaaaagaaaagaggtttag

SEQ ID NO: 4533 - protein, 528 aa, Arabidopsis thaliana
MTSHVPKHPRKSFEDMVKNLKVDPLAKVTASTTSMVSAKENKNQSEAEPSYYETLETYQGLPCPYGGYYGYYYPGLDGSVGEAKDNGYYGYGTEVQYPVMQGENGSVIYLMPGFQSYDASQTYMPINPVGVSSQALHSPMYAAQGYYQNQFGYADVSSPTYLWDPVGDRYVYGVASYTPPLKQNISSSSHNHNNYYSKSKNSFTGHGMGDRPKTPRKASQNSYAPPPLLNQEKGRIAYPMDPVKKKSGALNRDETEKAKARTKENGTSMNDLANGQDHITNGECESCSLDAEGNERSNGVGSVIRRDQYNLPSFQTKYEEAIFFVIKSYSEDDIHKSIKYNVWSSTLNGNKKLDSAYQESQKKAADKSGKCPVFLFFSVNASGQFCGVAEMIGRVDYEKSMEFWQQDKWTGYFPVKWHIIKDVPNPQLRHIILENNENKPVTNSRDTQEVRLPQGNEVLNIFKNYAAKTSILDDFDFYENREKVMVQKKLRFPPVLKKKEEDLVADFKTMEMSNTVEEGNTELTGTVS

SEQ ID NO: 4534 - protein, 513 aa, Arabidopsis thaliana
MVKNLKVDPLAKVTASTTSMVSAKENKNQSEAEPSYYETLETYQGLPCPYGGYYGYYYPGLDGSVGEAKDNGYYGYGTEVQYPVMQGENGSVIYLMPGFQSYDASQTYMPINPVGVSSQALHSPMYAAQGYYQNQFGYADVSSPTYLWDPVGDRYVYGVASYTPPLKQNISSSSHNHNNYYSKSKNSFTGHGMGDRPKTPRKASQNSYAPPPLLNQEKGRIAYPMDPVKKKSGALNRDETEKAKARTKENGTSMNDLANGQDHITNGECESCSLDAEGNERSNGVGSVIRRDQYNLPSFQTKYEEAIFFVIKSYSEDDIHKSIKYNVWSSTLNGNKKLDSAYQESQKKAADKSGKCPVFLFFSVNASGQFCGVAEMIGRVDYEKSMEFWQQDKWTGYFPVKWHIIKDVPNPQLRHIILENNENKPVTNSRDTQEVRLPQGNEVLNIFKNYAAKTSILDDFDFYENREKVMVQKKLRFPPVLKKKEEDLVADFKTMEMSNTVEEGNTELTGTVS

SEQ ID NO: 4535 - protein, 494 aa, Arabidopsis thaliana
MVSAKENKNQSEAEPSYYETLETYQGLPCPYGGYYGYYYPGLDGSVGEAKDNGYYGYGTEVQYPVMQGENGSVIYLMPGFQSYDASQTYMPINPVGVSSQALHSPMYAAQGYYQNQFGYADVSSPTYLWDPVGDRYVYGVASYTPPLKQNISSSSHNHNNYYSKSKNSFTGHGMGDRPKTPRKASQNSYAPPPLLNQEKGRIAYPMDPVKKKSGALNRDETEKAKARTKENGTSMNDLANGQDHITNGECESCSLDAEGNERSNGVGSVIRRDQYNLPSFQTKYEEAIFFVIKSYSEDDIHKSIKYNVWSSTLNGNKKLDSAYQESQKKAADKSGKCPVFLFFSVNASGQFCGVAEMIGRVDYEKSMEFWQQDKWTGYFPVKWHIIKDVPNPQLRHIILENNENKPVTNSRDTQEVRLPQGNEVLNIFKNYAAKTSILDDFDFYENREKVMVQKKLRFPPVLKKKEEDLVADFKTMEMSNTVEEGNTELTGTVS

SEQ ID NO: 4536 - DNA, 2764 bp, Arabidopsis thaliana
actctctcttcccaaagttctctgtaaaactctctctccgtcttcaatggtttacacgatttcaggcgtacgttttcctcatcttccatcgattaagaagaagaattcgtctcttcacagtttcaatgaagatctcaggagaagcaacgctgtctcattctctctgaggaaggactctcgttcttctgggaaggtttttgctcggaagccatcgtatgattctgattcgtcttccttagctaccactgcatctgagaagctccgtggccatcagagtgatagctcttcatctgcctctgatcaagtacaatctcgggatactgtctctgacgatactcaggtgctcggcaatgtagacgttcagaaaactgaagaagcccaggaaacagagacactagatcaaacttctgcactctcaacatctggaagcataagttataaagaagattttgcaaagatgtcacactctgtcgaccaagaagttgggcagaggaagattccacctcctggagatgggaagagaatatatgacattgatcctatgttgaacagtcatcgtaatcatcttgattaccgatatgggcagtacagaaaactgcgtgaagaaattgacaagaatgaaggtggtttggaggcattttctcgtggttatgaaatatttggcttcactcgaagcgccactggtatcacttaccgggaatgggcaccgggagctaaggcagcatcactgatcggagattttaataactggaatgcgaaatctgatgttatggctcggaacgactttggtgtgtgggaaatatttctgccaaataatgctgatggctcaccagcaattccccatggctcccgtgtgaagatccgcatggataccccatctggtattaaagactccattccagcttggatcaagtattctgtccagccacctggcgagatcccatataatggagtatattatgaccctcctgaggaggataaatatgcgttcaaacatcctcgtccaaagaaacccacatcgctgcgtatatatgaatcacatgttggaatgagtagtacggaaccaaagataaatacatatgccaactttagagatgatgtacttccccgtataaaaaagctaggctataatgctgtgcagataatggccattcaagagcatgcctactatgccagctttgggtatcatgtgacaaattttttcgcacctagcagccgctttggaacacctgatgaccttaaatctttgatagacaaagctcatgagctaggtctggttgttctgatggatattgtgcacagccatgcatcaaaaaacacactggatggcctggacatgtttgatggtactgatggtcaatatttccactctggatcgcgtggttatcattggatgtgggattctcgtcttttcaattacggaagctgggaagtgcttaggtatcttctttccaacgcgagatggtggctggaagaatacaagtttgatgggttcagatttgatggtgtgacttccatgatgtacactcatcatggactgcaggtcgaatttactgggaattacaatgagtactttggatattctactgatgttgacgctgtggtctatctaatgctggtgaacgatttgattcatgggctataccctgaggctattgttgtcggcgaagatgttagcgggatgccagctttttgcgttcctgtcgaagacggtggtgtgggttttgactaccgtctacacatggcagtggcagataaatggattgagcttcttaagaagagagacgaggactggcaggttggtgatataactttcacgcttaccaacaggaggtggggagaaaaatgtgtcgtctatgcagagagtcatgatcaagcccttgttggagacaaaacgatagctttctggctaatggataaggacatgtatgatttcatggccgttgatagacaggccactccgcgtgtagaccgtgggattgctttacacaaaatgatccgtctcattacgatgggattgggtggagaaggatacctcaatttcatgggaaacgaatttggacacccagaatggatcgacttcccaaggaccgaccagcaccttcctgatggcagagtcatcgctgggaataatggtagttatgataaatgccgacgtaggtttgatctgggagatgcagaatatcttagataccatggactacaagagtttgatcgagcaatgcaaaatctagaggagacgtatggtttcatgacttcagagcaccagtacatatcccgcaaggatgaaggagacagagtcattgtattcgagagaggtaacttgctcttcgtcttcaacttccactggaccaacagttactctgactaccgtatcggttgctctgttcccggaaagtacaaaatcgttttggactctgataactctttatttggaggcttcaaccggctagatgactccgcggagtttttcacctctgatggaaggcacgacgataggccttgctccttcatggtgtatgcaccgtgcagaaccgctgtagtttacgctgcagtagatgatgatgatgatgatgaacgttcttctcttgtccccataggcctgttacccgaagatgtttaggagcaaagacagttgtccgagtttacctactgtaagcttctttgtactacaaaaatttactcgttgatcttcttctcctttagttttcgcttgcagcatcattataacttaaaaatgaaataaaaagtcgttgcacttctg

SEQ ID NO: 4537 - protein, 873 aa, Arabidopsis thaliana
LSLPKVLCKTLSPSSMVYTISGVRFPHLPSIKKKNSSLHSFNEDLRRSNAVSFSLRKDSRSSGKVFARKPSYDSDSSSLATTASEKLRGHQSDSSSSASDQVQSRDTVSDDTQVLGNVDVQKTEEAQETETLDQTSALSTSGSISYKEDFAKMSHSVDQEVGQRKIPPPGDGKRIYDIDPMLNSHRNHLDYRYGQYRKLREEIDKNEGGLEAFSRGYEIFGFTRSATGITYREWAPGAKAASLIGDFNNWNAKSDVMARNDFGVWEIFLPNNADGSPAIPHGSRVKIRMDTPSGIKDSIPAWIKYSVQPPGEIPYNGVYYDPPEEDKYAFKHPRPKKPTSLRIYESHVGMSSTEPKINTYANFRDDVLPRIKKLGYNAVQIMAIQEHAYYASFGYHVTNFFAPSSRFGTPDDLKSLIDKAHELGLVVLMDIVHSHASKNTLDGLDMFDGTDGQYFHSGSRGYHWMWDSRLFNYGSWEVLRYLLSNARWWLEEYKFDGFRFDGVTSMMYTHHGLQVEFTGNYNEYFGYSTDVDAVVYLMLVNDLIHGLYPEAIVVGEDVSGMPAFCVPVEDGGVGFDYRLHMAVADKWIELLKKRDEDWQVGDITFTLTNRRWGEKCVVYAESHDQALVGDKTIAFWLMDKDMYDFMAVDRQATPRVDRGIALHKMIRLITMGLGGEGYLNFMGNEFGHPEWIDFPRTDQHLPDGRVIAGNNGSYDKCRRRFDLGDAEYLRYHGLQEFDRAMQNLEETYGFMTSEHQYISRKDEGDRVIVFERGNLLFVFNFHWTNSYSDYRIGCSVPGKYKIVLDSDNSLFGGFNRLDDSAEFFTSDGRHDDRPCSFMVYAPCRTAVVYAAVDDDDDDERSSLVPIGLLPEDV

SEQ ID NO: 4538 - protein, 858 aa, Arabidopsis thaliana
MVYTISGVRFPHLPSIKKKNSSLHSFNEDLRRSNAVSFSLRKDSRSSGKVFARKPSYDSDSSSLATTASEKLRGHQSDSSSSASDQVQSRDTVSDDTQVLGNVDVQKTEEAQETETLDQTSALSTSGSISYKEDFAKMSHSVDQEVGQRKIPPPGDGKRIYDIDPMLNSHRNHLDYRYGQYRKLREEIDKNEGGLEAFSRGYEIFGFTRSATGITYREWAPGAKAASLIGDFNNWNAKSDVMARNDFGVWEIFLPNNADGSPAIPHGSRVKIRMDTPSGIKDSIPAWIKYSVQPPGEIPYNGVYYDPPEEDKYAFKHPRPKKPTSLRIYESHVGMSSTEPKINTYANFRDDVLPRIKKLGYNAVQIMAIQEHAYYASFGYHVTNFFAPSSRFGTPDDLKSLIDKAHELGLVVLMDIVHSHASKNTLDGLDMFDGTDGQYFHSGSRGYHWMWDSRLFNYGSWEVLRYLLSNARWWLEEYKFDGFRFDGVTSMMYTHHGLQVEFTGNYNEYFGYSTDVDAVVYLMLVNDLIHGLYPEAIVVGEDVSGMPAFCVPVEDGGVGFDYRLHMAVADKWIELLKKRDEDWQVGDITFTLTNRRWGEKCVVYAESHDQALVGDKTIAFWLMDKDMYDFMAVDRQATPRVDRGIALHKMIRLITMGLGGEGYLNFMGNEFGHPEWIDFPRTDQHLPDGRVIAGNNGSYDKCRRRFDLGDAEYLRYHGLQEFDRAMQNLEETYGFMTSEHQYISRKDEGDRVIVFERGNLLFVFNFHWTNSYSDYRIGCSVPGKYKIVLDSDNSLFGGFNRLDDSAEFFTSDGRHDDRPCSFMVYAPCRTAVVYAAVDDDDDDERSSLVPIGLLPEDV

SEQ ID NO: 4539 - protein, 721 aa, Arabidopsis thaliana
MSHSVDQEVGQRKIPPPGDGKRIYDIDPMLNSHRNHLDYRYGQYRKLREEIDKNEGGLEAFSRGYEIFGFTRSATGITYREWAPGAKAASLIGDFNNWNAKSDVMARNDFGVWEIFLPNNADGSPAIPHGSRVKIRMDTPSGIKDSIPAWIKYSVQPPGEIPYNGVYYDPPEEDKYAFKHPRPKKPTSLRIYESHVGMSSTEPKINTYANFRDDVLPRIKKLGYNAVQIMAIQEHAYYASFGYHVTNFFAPSSRFGTPDDLKSLIDKAHELGLVVLMDIVHSHASKNTLDGLDMFDGTDGQYFHSGSRGYHWMWDSRLFNYGSWEVLRYLLSNARWWLEEYKFDGFRFDGVTSMMYTHHGLQVEFTGNYNEYFGYSTDVDAVVYLMLVNDLIHGLYPEAIVVGEDVSGMPAFCVPVEDGGVGFDYRLHMAVADKWIELLKKRDEDWQVGDITFTLTNRRWGEKCVVYAESHDQALVGDKTIAFWLMDKDMYDFMAVDRQATPRVDRGIALHKMIRLITMGLGGEGYLNFMGNEFGHPEWIDFPRTDQHLPDGRVIAGNNGSYDKCRRRFDLGDAEYLRYHGLQEFDRAMQNLEETYGFMTSEHQYISRKDEGDRVIVFERGNLLFVFNFHWTNSYSDYRIGCSVPGKYKIVLDSDNSLFGGFNRLDDSAEFFTSDGRHDDRPCSFMVYAPCRTAVVYAAVDDDDDDERSSLVPIGLLPEDV

SEQ ID NO: 4540 - DNA, 2500 bp, Arabidopsis thaliana
aggaacaaatacaattccttaaccaacaatattacaaataagctcctatcttctttctttcttttagagatcttgtaatctcctcttagttaatcttctattgtaaaactaagatcaaaagtctaaatggagattaacggggcacacaagagcaacggaggaggagtggacgctatgttatgcggcggagacatcaagacaaagaacatggtgatcaacgcggaggatcctctcaactggggagctgcagcggagcaaatgaaaggtagccatttggatgaagtgaagagaatggttgctgagtttaggaagccagttgtgaatcttggtggtgagactctgaccattggacaagtggctgcgatctcaactattggtaacagtgtgaaggtggagctatcggagacagctagagccggtgtgaatgctagtagtgattgggttatggagagtatgaacaaaggcactgatagttatggtgttactactggttttggtgctacttctcatcggagaaccaaaaacggtgtcgcacttcagaaggaacttattagattccttaacgccggaatattcggaagcacgaaagaaacaagccacacattgccacactccgccacaagagccgccatgcttgtacgaatcaacactctcctccaaggattttccggtatccgatttgagattctcgaagcaattaccagtttcctcaacaacaacatcactccatctctccccctccgtggtacaatcaccgcctccggagatctcgttcctctctcctacatcgccggacttctcaccggtcgtcccaattccaaagctactggtcccaacggtgaagctttaacagcagaggaagctttcaaattagcaggaatcagctccggattctttgatctccagcctaaggaaggtctcgcgctagtcaatggcacggcggttggatctggaatggcgtcaatggtgttattcgaaacgaatgttctctctgttttggctgagattttgtcggcggttttcgcagaggtgatgagtggtaagcctgagttcaccgatcatctcactcacagacttaaacatcatcccggtcaaatcgaagcggcggcgataatggagcatatcctcgacggaagctcgtacatgaaattagctcagaagcttcacgagatggatccgttacagaaacctaaacaagatcgttacgctcttcgtacttctcctcaatggttaggtcctcaaatcgaagtgatccgttacgcaacgaaatcgatcgagcgtgagattaactccgtcaacgataatccgttgatcgatgtttcgaggaacaaggcgattcacggtggtaacttccaaggaacaccaatcggagtttcaatggataacacgagattggcgatagcagcgattggtaaactcatgtttgctcaattctcagagcttgtgaatgatttctacaacaatggtttaccctcgaatctaaccgcttcgaggaatccaagtttggattatggattcaagggagctgagattgcaatggcttcttattgttcagagcttcaatacttagctaatcctgtgactagccatgttcaatcagcagagcaacataaccaagatgtcaactctttgggactaatctcgtctcgcaaaacttctgaagctgttgatattctcaagcttatgtcaacaacgttcctcgttgcgatttgtcaagctgtggatttgagacatttggaggagaatttgagacagactgtgaagaacactgtctctcaagtggcgaagaaagttcttactactggagtcaatggtgagcttcatccttctcgcttctgcgaaaaggatttactcaaagttgtagaccgtgaacaagtctacacatacgcggatgatccttgtagcgcaacgtacccgttgattcagaagctgagacaagttattgttgaccatgctttgatcaatggtgagagtgagaagaatgcagtgacttcaatcttccataagattggagctttcgaggaggagcttaaggcagtgctaccgaaagaagtggaagcagcaagagcagcctacgataacggaacatcggctatcccgaacaggatcaaggaatgtaggtcgtatccattgtatagattcgtgagggaagagcttggaacagagcttttgaccggagagaaagtgacgtcgcctggagaagagttcgacaaggttttcacggcgatttgtgaaggtaaaatcattgatccgatgatggaatgtctcaacgagtggaacggagctcccattccaatatgttaagagtatagtcctctgtttttttcttaccataaagtcttttttttttttacatgtctgaataattttaccaaatgattgtctgtgaagtggttttatgtctgtctaatttaaatttgtgtgtaaaactcattgtaagttctcaaatgaacaatttttcttttacaaattaatgtgtgaatcataccttcttcttttt

SEQ ID NO: 4541 - protein, 725 aa, Arabidopsis thaliana
MEINGAHKSNGGGVDAMLCGGDIKTKNMVINAEDPLNWGAAAEQMKGSHLDEVKRMVAEFRKPVVNLGGETLTIGQVAAISTIGNSVKVELSETARAGVNASSDWVMESMNKGTDSYGVTTGFGATSHRRTKNGVALQKELIRFLNAGIFGSTKETSHTLPHSATRAAMLVRINTLLQGFSGIRFEILEAITSFLNNNITPSLPLRGTITASGDLVPLSYIAGLLTGRPNSKATGPNGEALTAEEAFKLAGISSGFFDLQPKEGLALVNGTAVGSGMASMVLFETNVLSVLAEILSAVFAEVMSGKPEFTDHLTHRLKHHPGQIEAAAIMEHILDGSSYMKLAQKLHEMDPLQKPKQDRYALRTSPQWLGPQIEVIRYATKSIEREINSVNDNPLIDVSRNKAIHGGNFQGTPIGVSMDNTRLAIAAIGKLMFAQFSELVNDFYNNGLPSNLTASRNPSLDYGFKGAEIAMASYCSELQYLANPVTSHVQSAEQHNQDVNSLGLISSRKTSEAVDILKLMSTTFLVAICQAVDLRHLEENLRQTVKNTVSQVAKKVLTTGVNGELHPSRFCEKDLLKVVDREQVYTYADDPCSATYPLIQKLRQVIVDHALINGESEKNAVTSIFHKIGAFEEELKAVLPKEVEAARAAYDNGTSAIPNRIKECRSYPLYRFVREELGTELLTGEKVTSPGEEFDKVFTAICEGKIIDPMMECLNEWNGAPIPIC

SEQ ID NO: 4542 - protein, 709 aa, Arabidopsis thaliana
MLCGGDIKTKNMVINAEDPLNWGAAAEQMKGSHLDEVKRMVAEFRKPVVNLGGETLTIGQVAAISTIGNSVKVELSETARAGVNASSDWVMESMNKGTDSYGVTTGFGATSHRRTKNGVALQKELIRFLNAGIFGSTKETSHTLPHSATRAAMLVRINTLLQGFSGIRFEILEAITSFLNNNITPSLPLRGTITASGDLVPLSYIAGLLTGRPNSKATGPNGEALTAEEAFKLAGISSGFFDLQPKEGLALVNGTAVGSGMASMVLFETNVLSVLAEILSAVFAEVMSGKPEFTDHLTHRLKHHPGQIEAAAIMEHILDGSSYMKLAQKLHEMDPLQKPKQDRYALRTSPQWLGPQIEVIRYATKSIEREINSVNDNPLIDVSRNKAIHGGNFQGTPIGVSMDNTRLAIAAIGKLMFAQFSELVNDFYNNGLPSNLTASRNPSLDYGFKGAEIAMASYCSELQYLANPVTSHVQSAEQHNQDVNSLGLISSRKTSEAVDILKLMSTTFLVAICQAVDLRHLEENLRQTVKNTVSQVAKKVLTTGVNGELHPSRFCEKDLLKVVDREQVYTYADDPCSATYPLIQKLRQVIVDHALINGESEKNAVTSIFHKIGAFEEELKAVLPKEVEAARAAYDNGTSAIPNRIKECRSYPLYRFVREELGTELLTGEKVTSPGEEFDKVFTAICEGKIIDPMMECLNEWNGAPIPIC

SEQ ID NO: 4543 - protein, 698 aa, Arabidopsis thaliana
MVINAEDPLNWGAAAEQMKGSHLDEVKRMVAEFRKPVVNLGGETLTIGQVAAISTIGNSVKVELSETARAGVNASSDWVMESMNKGTDSYGVTTGFGATSHRRTKNGVALQKELIRFLNAGIFGSTKETSHTLPHSATRAAMLVRINTLLQGFSGIRFEILEAITSFLNNNITPSLPLRGTITASGDLVPLSYIAGLLTGRPNSKATGPNGEALTAEEAFKLAGISSGFFDLQPKEGLALVNGTAVGSGMASMVLFETNVLSVLAEILSAVFAEVMSGKPEFTDHLTHRLKHHPGQIEAAAIMEHILDGSSYMKLAQKLHEMDPLQKPKQDRYALRTSPQWLGPQIEVIRYATKSIEREINSVNDNPLIDVSRNKAIHGGNFQGTPIGVSMDNTRLAIAAIGKLMFAQFSELVNDFYNNGLPSNLTASRNPSLDYGFKGAEIAMASYCSELQYLANPVTSHVQSAEQHNQDVNSLGLISSRKTSEAVDILKLMSTTFLVAICQAVDLRHLEENLRQTVKNTVSQVAKKVLTTGVNGELHPSRFCEKDLLKVVDREQVYTYADDPCSATYPLIQKLRQVIVDHALINGESEKNAVTSIFHKIGAFEEELKAVLPKEVEAARAAYDNGTSAIPNRIKECRSYPLYRFVREELGTELLTGEKVTSPGEEFDKVFTAICEGKIIDPMMECLNEWNGAPIPIC

SEQ ID NO: 4544 - DNA, 4277 bp, Arabidopsis thaliana
gtcccaacaatctgatcagaaaaaagtagacgaagaagaagaaattaagtcacttgaacaatggcgttggtccgaaatgcaaggccttgagcttctccctcataacaccaacaacaactcacgaagctccagagaaactcaccggaaatggataatgacggtggtgctcctcctcctccgccgacactagtggtggaagagcctaagaaagcagagattcgtggagttgcttttaaagagctattcagattcgccgacggattagattatgtattgatgggaattggctctgttggtgcttttgtccatggctgctctttacctctgtttcttcgattcttcgccgatcttgttaattcctttggttctaattctaataacgttgaaaagatgatggaagaagttctcaagtatgcgctttactttttagtggttggtgctgcaatctgggcttcctcttgggcagagatttcgtgttggatgtggagtggagagagacaaacaacgaagatgaggattaagtatttagaagcagctttgaatcaagacattcagttctttgatacagaagttcgaacttcagatgttgtcttcgccattaacaccgacgctgttatggttcaagacgccattagtgagaaacttggtaatttcatccattacatggcgacttttgtttctggattcatcgtgggtttcactgcggtgtggcaactagctttagtgactctcgcggtggttccgttgattgctgtgatcggaggaattcacaccactactctctctaaactatctaataagagtcaagagtctctttcacaagctggtaatatcgtcgaacagacagtggtacaaatcagggtagtgatggctttcgttggagaatcaagagcttcacaagcttattcatcagctttgaagattgctcagaagcttggttacaaaacaggtttagctaaaggaatgggacttggtgctacatacttcgttgtcttttgttgttacgctctcttgctttggtacgatggttatctagttcgccaccatttgaccaacggtggtctcgctattgccacaatgttcgccgttatgattggtggattggcattgggacaatcagcaccgagcatggctgcatttgccaaagcaaaggttgctgctgcaaagatctttagaatcattgatcacaaaccaacgatagagcgtaacagcgagtccggtgtggagttagactcagtcacgggtcttgtcgagcttaaaaatgtggacttttcgtatccgtcaaggccagatgttaagattcttaacaacttctgcctctctgttcctgctgggaagaccattgctttggttgggagcagtggttcaggaaaaagcacagtcgtttcgcttatagagcggttttacgacccgaactcaggacaagttttactagatgggcaagacctgaagacgctgaaactgagatggttaaggcaacagatagggctagtgagtcaagaacctgcattattcgccacttctatcaaggagaatatactcttaggccgtcctgacgcagatcaagtcgagatagaggaggctgctcgagtcgcaaatgctcattcctttatcatcaaactacctgatggcttcgacacacaggttggggagagaggattgcagctgtctggtgggcagaagcaaagaatagcgatagcaagagcgatgttgaagaacccggcgatacttctattagatgaggcgacgagtgcattggattctgaatcagagaagcttgtacaagaggctttggatcgtttcatgattggaaggactactctcatcattgctcatcgcctttctaccattcgaaaagctgaccttgttgctgtgctacagcaaggaagtgtctctgagattggaacgcatgatgagcttttttccaagggagaaaatggagtctatgctaagctaattaaaatgcaagaagcagctcacgaaaccgccatgagcaatgcaagaaagagtagcgcaagaccgtcgagtgctagaaactcggttagctcgccaataatgactcggaattcgtcgtatggaagatcaccttattcacggagactatccgatttctcaacttctgattttagcctctccattgacgcttcgtcctacccaaactatagaaacgagaagctggccttcaaggatcaagccaattcattctggcgactagctaaaatgaactctccagagtggaaatacgctttgctcggttcagtaggctctgtcatttgtggctcccttagtgcattcttcgcatatgtcctcagtgcagtcttaagcgtctactacaacccggaccacgaatacatgatcaaacagattgataagtactgttatctcttaatcggtctctcttccgcagcacttgtcttcaacacgctccagcattctttctgggacattgtgggtgagaatctgaccaagagagtccgtgagaagatgctgagcgctgtactcaagaatgagatggcttggtttgatcaagaggagaacgaaagtgcgagaatcgcagcaagattagctcttgatgctaataatgtgagatctgcgataggagatagaatatcggttattgtgcagaacacagcactgatgcttgttgcttgcactgccgggtttgttctacaatggagactcgcacttgtccttgtcgcagtcttccccgtagttgttgctgcaactgtcttacagaaaatgttcatgactggtttctcgggagacctggaagcggcacatgccaagggaacgcagcttgctggtgaagccatagctaatgtcaggacagttgctgcatttaactcggaggcaaagattgtccgtctctacactgcaaacctcgaaccaccattgaaacgatgcttctggaaaggacagatcgctggaagtggttatggtgtagctcagttctgtctttatgcatcttatgctctcgggctatggtacgcatcatggcttgtgaaacacggcatctctgacttctccaaaaccataagagtcttcatggttctgatggtctcagccaatggtgcagcagagacactcacactggctcctgatttcatcaaaggtggtcaagctatgcggtctgttttcgaacttcttgaccggaaaaccgagattgaacctgatgatcctgataccaccccggtcccagaccggttacgtggtgaagtcgagctcaaacatatcgatttctcttacccttcaaggccagacatccagattttccgtgaccttagccttcgtgctagagctggcaaaaccctagctcttgtgggtccaagcgggtgcggaaaaagctcagttatctccctcatccagagattctacgaaccttcctcaggccgagtcatgatcgacgggaaagacataaggaaatacaacctgaaagccataaggaaacacatagccatagtccctcaagagccgtgcttgttcggaactaccatttacgaaaacattgcatatggacatgaatgtgcgaccgaagcagagatcatacaagccgcgactctagccagtgcgcacaaattcatatccgcgctaccagaaggttacaaaacgtatgttggcgagagaggcgttcagctctcgggaggacagaaacagaggatcgcgatcgcacgtgccctcgtgaggaaagcagagatcatgctgcttgacggggctacaagcgctcttgatgcagagtccgagagatcagtccaagaagcattagaccaggcttgctctggtagaacatcaatagtcgtggctcataggctatctacaatcaggaacgcacacgtgatcgctgtcatcgatgatggaaaagtggctgaacaaggatcgcattcgcatcttctcaagaaccatcctgatggaatctacgcgcgaatgatacagttgcaaagatttacgcatacacaagtgattggtatgacgtcaggttcaagttctagggttaaggaagatgatgcttagtacttactactttggtcatatagaagaaaaaagaaggagagtaaaaaacaacaaacaccagaagatgtttctgataaaaaactctacgaactcatcattttctctttttttctttctgttttgattttggggttacttatttttggaactacgtttcagatttgatggtatagtattattattgtgtattatcataattaatctaatttttcacctctgtaatatccatttatatgccatatcaatctatgagcctctgcctttctagc

SEQ ID NO: 4545 - protein, 1286 aa, Arabidopsis thaliana
MDNDGGAPPPPPTLVVEEPKKAEIRGVAFKELFRFADGLDYVLMGIGSVGAFVHGCSLPLFLRFFADLVNSFGSNSNNVEKMMEEVLKYALYFLVVGAAIWASSWAEISCWMWSGERQTTKMRIKYLEAALNQDIQFFDTEVRTSDVVFAINTDAVMVQDAISEKLGNFIHYMATFVSGFIVGFTAVWQLALVTLAVVPLIAVIGGIHTTTLSKLSNKSQESLSQAGNIVEQTVVQIRVVMAFVGESRASQAYSSALKIAQKLGYKTGLAKGMGLGATYFVVFCCYALLLWYDGYLVRHHLTNGGLAIATMFAVMIGGLALGQSAPSMAAFAKAKVAAAKIFRIIDHKPTIERNSESGVELDSVTGLVELKNVDFSYPSRPDVKILNNFCLSVPAGKTIALVGSSGSGKSTVVSLIERFYDPNSGQVLLDGQDLKTLKLRWLRQQIGLVSQEPALFATSIKENILLGRPDADQVEIEEAARVANAHSFIIKLPDGFDTQVGERGLQLSGGQKQRIAIARAMLKNPAILLLDEATSALDSESEKLVQEALDRFMIGRTTLIIAHRLSTIRKADLVAVLQQGSVSEIGTHDELFSKGENGVYAKLIKMQEAAHETAMSNARKSSARPSSARNSVSSPIMTRNSSYGRSPYSRRLSDFSTSDFSLSIDASSYPNYRNEKLAFKDQANSFWRLAKMNSPEWKYALLGSVGSVICGSLSAFFAYVLSAVLSVYYNPDHEYMIKQIDKYCYLLIGLSSAALVFNTLQHSFWDIVGENLTKRVREKMLSAVLKNEMAWFDQEENESARIAARLALDANNVRSAIGDRISVIVQNTALMLVACTAGFVLQWRLALVLVAVFPVVVAATVLQKMFMTGFSGDLEAAHAKGTQLAGEAIANVRTVAAFNSEAKIVRLYTANLEPPLKRCFWKGQIAGSGYGVAQFCLYASYALGLWYASWLVKHGISDFSKTIRVFMVLMVSANGAAETLTLAPDFIKGGQAMRSVFELLDRKTEIEPDDPDTTPVPDRLRGEVELKHIDFSYPSRPDIQIFRDLSLRARAGKTLALVGPSGCGKSSVISLIQRFYEPSSGRVMIDGKDIRKYNLKAIRKHIAIVPQEPCLFGTTIYENIAYGHECATEAEIIQAATLASAHKFISALPEGYKTYVGERGVQLSGGQKQRIAIARALVRKAEIMLLDGATSALDAESERSVQEALDQACSGRTSIVVAHRLSTIRNAHVIAVIDDGKVAEQGSHSHLLKNHPDGIYARMIQLQRFTHTQVIGMTSGSSSRVKEDDA

SEQ ID NO: 4546 - protein, 1243 aa, Arabidopsis thaliana
MGIGSVGAFVHGCSLPLFLRFFADLVNSFGSNSNNVEKMMEEVLKYALYFLVVGAAIWASSWAEISCWMWSGERQTTKMRIKYLEAALNQDIQFFDTEVRTSDVVFAINTDAVMVQDAISEKLGNFIHYMATFVSGFIVGFTAVWQLALVTLAVVPLIAVIGGIHTTTLSKLSNKSQESLSQAGNIVEQTVVQIRVVMAFVGESRASQAYSSALKIAQKLGYKTGLAKGMGLGATYFVVFCCYALLLWYDGYLVRHHLTNGGLAIATMFAVMIGGLALGQSAPSMAAFAKAKVAAAKIFRIIDHKPTIERNSESGVELDSVTGLVELKNVDFSYPSRPDVKILNNFCLSVPAGKTIALVGSSGSGKSTVVSLIERFYDPNSGQVLLDGQDLKTLKLRWLRQQIGLVSQEPALFATSIKENILLGRPDADQVEIEEAARVANAHSFIIKLPDGFDTQVGERGLQLSGGQKQRIAIARAMLKNPAILLLDEATSALDSESEKLVQEALDRFMIGRTTLIIAHRLSTIRKADLVAVLQQGSVSEIGTHDELFSKGENGVYAKLIKMQEAAHETAMSNARKSSARPSSARNSVSSPIMTRNSSYGRSPYSRRLSDFSTSDFSLSIDASSYPNYRNEKLAFKDQANSFWRLAKMNSPEWKYALLGSVGSVICGSLSAFFAYVLSAVLSVYYNPDHEYMIKQIDKYCYLLIGLSSAALVFNTLQHSFWDIVGENLTKRVREKMLSAVLKNEMAWFDQEENESARIAARLALDANNVRSAIGDRISVIVQNTALMLVACTAGFVLQWRLALVLVAVFPVVVAATVLQKMFMTGFSGDLEAAHAKGTQLAGEAIANVRTVAAFNSEAKIVRLYTANLEPPLKRCFWKGQIAGSGYGVAQFCLYASYALGLWYASWLVKHGISDFSKTIRVFMVLMVSANGAAETLTLAPDFIKGGQAMRSVFELLDRKTEIEPDDPDTTPVPDRLRGEVELKHIDFSYPSRPDIQIFRDLSLRARAGKTLALVGPSGCGKSSVISLIQRFYEPSSGRVMIDGKDIRKYNLKAIRKHIAIVPQEPCLFGTTIYENIAYGHECATEAEIIQAATLASAHKFISALPEGYKTYVGERGVQLSGGQKQRIAIARALVRKAEIMLLDGATSALDAESERSVQEALDQACSGRTSIVVAHRLSTIRNAHVIAVIDDGKVAEQGSHSHLLKNHPDGIYARMIQLQRFTHTQVIGMTSGSSSRVKEDDA

SEQ ID NO: 4547 - protein, 1205 aa, Arabidopsis thaliana
MMEEVLKYALYFLVVGAAIWASSWAEISCWMWSGERQTTKMRIKYLEAALNQDIQFFDTEVRTSDVVFAINTDAVMVQDAISEKLGNFIHYMATFVSGFIVGFTAVWQLALVTLAVVPLIAVIGGIHTTTLSKLSNKSQESLSQAGNIVEQTVVQIRVVMAFVGESRASQAYSSALKIAQKLGYKTGLAKGMGLGATYFVVFCCYALLLWYDGYLVRHHLTNGGLAIATMFAVMIGGLALGQSAPSMAAFAKAKVAAAKIFRIIDHKPTIERNSESGVELDSVTGLVELKNVDFSYPSRPDVKILNNFCLSVPAGKTIALVGSSGSGKSTVVSLIERFYDPNSGQVLLDGQDLKTLKLRWLRQQIGLVSQEPALFATSIKENILLGRPDADQVEIEEAARVANAHSFIIKLPDGFDTQVGERGLQLSGGQKQRIAIARAMLKNPAILLLDEATSALDSESEKLVQEALDRFMIGRTTLIIAHRLSTIRKADLVAVLQQGSVSEIGTHDELFSKGENGVYAKLIKMQEAAHETAMSNARKSSARPSSARNSVSSPIMTRNSSYGRSPYSRRLSDFSTSDFSLSIDASSYPNYRNEKLAFKDQANSFWRLAKMNSPEWKYALLGSVGSVICGSLSAFFAYVLSAVLSVYYNPDHEYMIKQIDKYCYLLIGLSSAALVFNTLQHSFWDIVGENLTKRVREKMLSAVLKNEMAWFDQEENESARIAARLALDANNVRSAIGDRISVIVQNTALMLVACTAGFVLQWRLALVLVAVFPVVVAATVLQKMFMTGFSGDLEAAHAKGTQLAGEAIANVRTVAAFNSEAKIVRLYTANLEPPLKRCFWKGQIAGSGYGVAQFCLYASYALGLWYASWLVKHGISDFSKTIRVFMVLMVSANGAAETLTLAPDFIKGGQAMRSVFELLDRKTEIEPDDPDTTPVPDRLRGEVELKHIDFSYPSRPDIQIFRDLSLRARAGKTLALVGPSGCGKSSVISLIQRFYEPSSGRVMIDGKDIRKYNLKAIRKHIAIVPQEPCLFGTTIYENIAYGHECATEAEIIQAATLASAHKFISALPEGYKTYVGERGVQLSGGQKQRIAIARALVRKAEIMLLDGATSALDAESERSVQEALDQACSGRTSIVVAHRLSTIRNAHVIAVIDDGKVAEQGSHSHLLKNHPDGIYARMIQLQRFTHTQVIGMTSGSSSRVKEDDA

SEQ ID NO: 4548 - DNA, 3325 bp, Arabidopsis thaliana
aaatgcaaatacaagatttctccattgagaccttttcgaccgtaaaccgattgcgatcaaattagctgatctgatcggaaaatcacaagaaaaccctagaaaactcctccggattcgaattctcgactcgattcaatgtatcaattgagaaaatttgacttcttcgaggagaaatacggaggcaagatacctgaggatgtaaccggagatatacaatgttgttccagtggccgtggcaaagtcgtcatcggctctaacgacggatccgtcagcttcctcgatcgcggtgtaaagttcgattccggtttccaagctcactcttcctccgtcctcttccttcaacacctcaagcaaaggaactttctcgtcaccgtcggagaagatgaacaaatatcgccgcaacagtcagggatgtgtcttaaggtttttgatcttgacaaagttcaggaggaaggtactagttcctcggctcctgaatgcattggtattcttagaattttcaccaatcagtttcctgaagctaagattacttcttttctagtcttggaggaagttccaccaatattgcttatagccattggcttagataatggctgcatttattgtgtcaaaggagacattgcacgagagcgtatcactcggtttaagcttcaagtggatggacggtccgctattacaggcttggggttcaggatggatggccaagcgcttctgttgtttgcagtcactccagagtcagtcaacttgtttagtatgcaggcgcagccaccgaaattgcagactttggatcatattgggggcagtgtgaatactgttacaatgagtgaccgctcggaattaatagttggtcgacctgaggctgtttacttctatgaagttgatggacgtggtccttgctgggcttttgaaggagagaaaaaattcatggggtggttccgtggctaccttttatgtgtcattgatgattctaaaactgggaacactgtttttaatgtctacgacctcaggaatcggcttatagcatatagcattgtcgttgataaagtctccaacatgctctgcgaatggggaaacataatacttataaaggctgacaaatccttattgtgcattaccgagaaggatatggaaagcaagttagatatgctgttcaagaaaaacctgtacacagtagctattaatcttgtccagagtcaacatgccgatgctgctgctactgccaatgtgatgaggaagtatggagatcatttatatggcaaacaggactttgacgaagctatgttacagtacattaacacaattggttatcttgaaccatcatttgtgatacaaaagtttctggatgcacagaggatctacaatcttactaattacctggagaagttgcatgagaagggtctagcatcaaaagaccacacaactcttttgctaaactgttacactaagttgaaggatgtagaaaagctgaacacgttcattagaaaagaagatggcatcggtgagctcaagtttgatgtggaaacagccattagggtctgtcgtgcagctaattaccatgagcatgcaatgtacgttgcaaaaaaggcaggaaaacatgagtggtatttgaaaattttgcttgaagatcttggaaactacgatgaagccctgcaatatgtttcaagtcttgaacccagtcaagctggggtaacaattgaacagtatggtaagattcttatagagcacaagccaaaagagactattgatatactcatgcgactttgcactgagcaagggattcctaatggtgtgttcctgtccatgttgccatcacctgtggacttcatcactgtgtttgttcagcatccacattcattaatgcattttctcgagagatatgctgaaatagttcaggattctcctgctcaagcagaaatcaataacacactcttggaattatacttgtctagggacttgaattttccatcaatctctctatcagaaaatggtctagataaggacttaatagatcattcggtagcagctgcggtgtctaaagccgatcctgaaaagaagacaaatgctgattcgaaggatgcaatggagaaggattgtacggaaagacaacagaagggactggagttacttaaaatggcatggccgtcagacctagagcaacccctctatgatgttgaccttgctgtaattctttgcgagatgaattcgttcaaggatggacttctgtatctgtatgaaaaaatgaaattttacaaggaggttattgcttgctacatgcagaatcatgatcacgagggactgattgcatgctgcaaaagattaggtgattctagcaagggaggggatccatctctttgggcagatcttctcaagtatttcggtgaaattggagaggactgcaccaaagaggtgaaggaggttctcacttatattgaacgggatgatattttacctcctatcattgttcttcagaccctggcaaagaatccatgcctcacactttctgtcatcaaagactacatagctcggaaacttgagcaagagtcaaaaataattgaagaggaccggcgagctgtagagaagtatcaggaaacgactaaaaacatgagaaaagagattgaagatctcaggaccaatgccagaatatttcaacttagcaagtgtactgcttgcactttcacattggatatcccagctgtccatttcatgtgtatgcattcattccatcaacgctgcctcggtgacaacgaaaaagaatgccccgagtgtgctcccgagtacagatctgtgatggaaatgaagagaagtttggagcagaactcgaaagaccaagatctgttcttccagcaagtgaaaggctcgaaggacgggttttctgtgattgcagagtactttgggaaaggaatcatcagcaaaactagagatgcaacatcttaattctcttcacgcctgaagggaaggcggctgaaacatctccaactcaagtgaggccggcataaactttgtggcatctgtgtattctgtgaatgtgaggtatcctttgaatctactttatcggcttagatattgtgtaagagtgagttgtgctagtgaagttgggactggctctatgcttcttcttgtatacatttctgagaatctgtgccatcactcaggaaaagatgcatagatgtcgacaagttattatgtttgtttttttggtgtatgttatggttttttttttggaacacttagaggagaacgtttgcagtaaatatgttgtggttttgatttgcattcattctggtaaaagtcttgctcatttggaacaatttctaaataattgctc

SEQ ID NO: 4549 - protein, 932 aa, Arabidopsis thaliana
MYQLRKFDFFEEKYGGKIPEDVTGDIQCCSSGRGKVVIGSNDGSVSFLDRGVKFDSGFQAHSSSVLFLQHLKQRNFLVTVGEDEQISPQQSGMCLKVFDLDKVQEEGTSSSAPECIGILRIFTNQFPEAKITSFLVLEEVPPILLIAIGLDNGCIYCVKGDIARERITRFKLQVDGRSAITGLGFRMDGQALLLFAVTPESVNLFSMQAQPPKLQTLDHIGGSVNTVTMSDRSELIVGRPEAVYFYEVDGRGPCWAFEGEKKFMGWFRGYLLCVIDDSKTGNTVFNVYDLRNRLIAYSIVVDKVSNMLCEWGNIILIKADKSLLCITEKDMESKLDMLFKKNLYTVAINLVQSQHADAAATANVMRKYGDHLYGKQDFDEAMLQYINTIGYLEPSFVIQKFLDAQRIYNLTNYLEKLHEKGLASKDHTTLLLNCYTKLKDVEKLNTFIRKEDGIGELKFDVETAIRVCRAANYHEHAMYVAKKAGKHEWYLKILLEDLGNYDEALQYVSSLEPSQAGVTIEQYGKILIEHKPKETIDILMRLCTEQGIPNGVFLSMLPSPVDFITVFVQHPHSLMHFLERYAEIVQDSPAQAEINNTLLELYLSRDLNFPSISLSENGLDKDLIDHSVAAAVSKADPEKKTNADSKDAMEKDCTERQQKGLELLKMAWPSDLEQPLYDVDLAVILCEMNSFKDGLLYLYEKMKFYKEVIACYMQNHDHEGLIACCKRLGDSSKGGDPSLWADLLKYFGEIGEDCTKEVKEVLTYIERDDILPPIIVLQTLAKNPCLTLSVIKDYIARKLEQESKIIEEDRRAVEKYQETTKNMRKEIEDLRTNARIFQLSKCTACTFTLDIPAVHFMCMHSFHQRCLGDNEKECPECAPEYRSVMEMKRSLEQNSKDQDLFFQQVKGSKDGFSVIAEYFGKGIISKTRDATS

SEQ ID NO: 4550 - protein, 840 aa, Arabidopsis thaliana
MCLKVFDLDKVQEEGTSSSAPECIGILRIFTNQFPEAKITSFLVLEEVPPILLIAIGLDNGCIYCVKGDIARERITRFKLQVDGRSAITGLGFRMDGQALLLFAVTPESVNLFSMQAQPPKLQTLDHIGGSVNTVTMSDRSELIVGRPEAVYFYEVDGRGPCWAFEGEKKFMGWFRGYLLCVIDDSKTGNTVFNVYDLRNRLIAYSIVVDKVSNMLCEWGNIILIKADKSLLCITEKDMESKLDMLFKKNLYTVAINLVQSQHADAAATANVMRKYGDHLYGKQDFDEAMLQYINTIGYLEPSFVIQKFLDAQRIYNLTNYLEKLHEKGLASKDHTTLLLNCYTKLKDVEKLNTFIRKEDGIGELKFDVETAIRVCRAANYHEHAMYVAKKAGKHEWYLKILLEDLGNYDEALQYVSSLEPSQAGVTIEQYGKILIEHKPKETIDILMRLCTEQGIPNGVFLSMLPSPVDFITVFVQHPHSLMHFLERYAEIVQDSPAQAEINNTLLELYLSRDLNFPSISLSENGLDKDLIDHSVAAAVSKADPEKKTNADSKDAMEKDCTERQQKGLELLKMAWPSDLEQPLYDVDLAVILCEMNSFKDGLLYLYEKMKFYKEVIACYMQNHDHEGLIACCKRLGDSSKGGDPSLWADLLKYFGEIGEDCTKEVKEVLTYIERDDILPPIIVLQTLAKNPCLTLSVIKDYIARKLEQESKIIEEDRRAVEKYQETTKNMRKEIEDLRTNARIFQLSKCTACTFTLDIPAVHFMCMHSFHQRCLGDNEKECPECAPEYRSVMEMKRSLEQNSKDQDLFFQQVKGSKDGFSVIAEYFGKGIISKTRDATS

SEQ ID NO: 4551 - protein, 746 aa, Arabidopsis thaliana
MDGQALLLFAVTPESVNLFSMQAQPPKLQTLDHIGGSVNTVTMSDRSELIVGRPEAVYFYEVDGRGPCWAFEGEKKFMGWFRGYLLCVIDDSKTGNTVFNVYDLRNRLIAYSIVVDKVSNMLCEWGNIILIKADKSLLCITEKDMESKLDMLFKKNLYTVAINLVQSQHADAAATANVMRKYGDHLYGKQDFDEAMLQYINTIGYLEPSFVIQKFLDAQRIYNLTNYLEKLHEKGLASKDHTTLLLNCYTKLKDVEKLNTFIRKEDGIGELKFDVETAIRVCRAANYHEHAMYVAKKAGKHEWYLKILLEDLGNYDEALQYVSSLEPSQAGVTIEQYGKILIEHKPKETIDILMRLCTEQGIPNGVFLSMLPSPVDFITVFVQHPHSLMHFLERYAEIVQDSPAQAEINNTLLELYLSRDLNFPSISLSENGLDKDLIDHSVAAAVSKADPEKKTNADSKDAMEKDCTERQQKGLELLKMAWPSDLEQPLYDVDLAVILCEMNSFKDGLLYLYEKMKFYKEVIACYMQNHDHEGLIACCKRLGDSSKGGDPSLWADLLKYFGEIGEDCTKEVKEVLTYIERDDILPPIIVLQTLAKNPCLTLSVIKDYIARKLEQESKIIEEDRRAVEKYQETTKNMRKEIEDLRTNARIFQLSKCTACTFTLDIPAVHFMCMHSFHQRCLGDNEKECPECAPEYRSVMEMKRSLEQNSKDQDLFFQQVKGSKDGFSVIAEYFGKGIISKTRDATS

SEQ ID NO: 4552 - DNA, 3040 bp, Arabidopsis thaliana
atcttctccgattccaatatttagattcttcttcatatattattgtgctttgattagagagttgcagaagagttttttttgttttaattcctgcaatcagagagttttcgatagcacaagcacaagcttctcgattcgtttgagtgttcaaatttcaagctttttacaaggggttccttagattgatctgttactgtagagatggctccaactcaggatcccaacagtgtcggaggcggtgcgaagaaagatgaagctaccttgaaggttccgtctaaggatcccaagaagaaggacgagaaaaaggatgaggatttgtctgaagaggacttggaactaaagcagaaccttgagctctatgttgagagggttcaggatcctaatccggaattgcagaaggctgcccttgagagcatgaggcaggaaatccgagcttcaacaagttccatgacttcagttcccaaaccactaaagtttctgcgtccccattatggaactcttaaagcgtttcatgaaacaatggctgattctgatctcaaaaagtacctgtccgatatcctgtctgtcctggcccttaccatgtctgcagatggtgaaagggaaagcttaaggtttagattgattggaacagagggtgacattggatcgtggggtcatgaatatgtcaggaatttagctggagagattgcacaagagtatacaaagcgtcagagtgaggaggcctctattgacgatttaatggagcttgtgcaacaaattgttgcttttcacatgaagcataatgcagaaaccgaagctgttgatcttttaatggatgttgaggatcttgatctcttacttgagcatgtagacaaaacaaatttcaagaggacatgcaactatctcacaagtgcagctaggtaccttcctggaccagatgacatgttggttctagatatttcctacatgatttacatgaagtttgaagagtatccaaacgctctgcagattgcactatttcttgataacacgcagtatgttaaacaagtatttacctcatgtacggatctgctgaagaagaaacagttctgctacatgattgctcgtcatggtataacctttgaacttgacgatgagatggttgcagatgatgatgaccgggaagccctacaggatattgttaacaacactaagttaagtgaaggatatctgacccttgcaagggatattgaggtcatggaggccaaaacgcctgaagacatctacaaggctcacttactcgacggcagggctagctccggtgcaagcgtggattctgctagacagaatttggctgctacctttgtcaatgcattcgtaaatgctggttttggtcaggacaaactaatgacagtaccttcagactcaaccaccggatcttctggaaactggctcttcaaaaataaagaacatggcaagactagtgcagctgctagtctgggtatgattcaactgtgggatgtggactctggactttcccaactcgacaaatatttccatagtaatgataatcctatcattgctggagcactgctgggagttgggattgtaaattgtggcattaagaacgattgtgatcctgcattggcacttcttggagactatatagacaaagaggattcatctgtcagaatcggtgctatcatgggtcttggaatttcatacgcaggttcccaaaatgaccagattcgaaacaaattgtccccgatactgaatgatgcaaaagcgcctcttgatgtgattgcatttgcttcactttctttgggaatgatatatgttggttcctgtaacgaagaagtagcccagtctattatatttgctttgatggatcgaagtgaggcagaactgggtgatgccctcactcgtttcttgccacttggtcttggacttctatacctgggcaaacaggaaagtgtagaggctacagctgaagtttcgaagaccttcaatgagaagattagaaagtattgtgatatgacacttctttcttgtgcttatgctggaactggaaatgtcctaaaggtacaagaccttcttgctcagtgtggcgagcatcttgagaaaggtgacatccaccagggtccagctgtgcttgggttagcaatggttgctatgtctgaagaactgggagttgatatggagatccgttctctggagcggatgctacaatacggagaacaaaacattcggcgtgctgtgcctttggcccttggtctcctttgtatatccaatccaaaggtgactgtaatggacaccttgagccggcttagccatgacacagattcggaagttgccatgtcagcaattatatcattgggactgattggcgctggaactaataacgcaaggatagccgggatgcttcggaacctctccagctattattacaaagacatgagtcttctcttctgtgtgcgtattgctcaagggcttgtgcacatgggaaagggtctcttgacactcagccccttccactctgaacggttcttgctatcgccaaccgcacttgctggtatagtgacacttttgcatgcatgccttgacatgaaaccaatcatactcgggaagtaccattatgtgctgtacttcctcgttttggcgatgcaaccaaggatgatgttgacagtggatgaaaacctgaagccactgtcagtgccagtgcgggtaggacaagcagttgatgtggttgggcaagcgggtcggcccaagaccataaccggtttccagacacactccacacctgttctcctggctgctggagagagagccgaactagccacggacaaatacattcctctgtcgccaatactagaaggattcatcatcttaaaggagaacccagactacagagaggagtgaagagagagagcttctgcttccagccagttgtcactagttttactatttcgtctattatctcatggtttttctactctccgtttaagctttgtttcattatcttgggatctttgtatgacctgacgcttttagttatataaactttagtctctttttttttttt

SEQ ID NO: 4553 - protein, 891 aa, Arabidopsis thaliana
MAPTQDPNSVGGGAKKDEATLKVPSKDPKKKDEKKDEDLSEEDLELKQNLELYVERVQDPNPELQKAALESMRQEIRASTSSMTSVPKPLKFLRPHYGTLKAFHETMADSDLKKYLSDILSVLALTMSADGERESLRFRLIGTEGDIGSWGHEYVRNLAGEIAQEYTKRQSEEASIDDLMELVQQIVAFHMKHNAETEAVDLLMDVEDLDLLLEHVDKTNFKRTCNYLTSAARYLPGPDDMLVLDISYMIYMKFEEYPNALQIALFLDNTQYVKQVFTSCTDLLKKKQFCYMIARHGITFELDDEMVADDDDREALQDIVNNTKLSEGYLTLARDIEVMEAKTPEDIYKAHLLDGRASSGASVDSARQNLAATFVNAFVNAGFGQDKLMTVPSDSTTGSSGNWLFKNKEHGKTSAAASLGMIQLWDVDSGLSQLDKYFHSNDNPIIAGALLGVGIVNCGIKNDCDPALALLGDYIDKEDSSVRIGAIMGLGISYAGSQNDQIRNKLSPILNDAKAPLDVIAFASLSLGMIYVGSCNEEVAQSIIFALMDRSEAELGDALTRFLPLGLGLLYLGKQESVEATAEVSKTFNEKIRKYCDMTLLSCAYAGTGNVLKVQDLLAQCGEHLEKGDIHQGPAVLGLAMVAMSEELGVDMEIRSLERMLQYGEQNIRRAVPLALGLLCISNPKVTVMDTLSRLSHDTDSEVAMSAIISLGLIGAGTNNARIAGMLRNLSSYYYKDMSLLFCVRIAQGLVHMGKGLLTLSPFHSERFLLSPTALAGIVTLLHACLDMKPIILGKYHYVLYFLVLAMQPRMMLTVDENLKPLSVPVRVGQAVDVVGQAGRPKTITGFQTHSTPVLLAAGERAELATDKYIPLSPILEGFIILKENPDYREE

SEQ ID NO: 4554 - protein, 820 aa, Arabidopsis thaliana
MRQEIRASTSSMTSVPKPLKFLRPHYGTLKAFHETMADSDLKKYLSDILSVLALTMSADGERESLRFRLIGTEGDIGSWGHEYVRNLAGEIAQEYTKRQSEEASIDDLMELVQQIVAFHMKHNAETEAVDLLMDVEDLDLLLEHVDKTNFKRTCNYLTSAARYLPGPDDMLVLDISYMIYMKFEEYPNALQIALFLDNTQYVKQVFTSCTDLLKKKQFCYMIARHGITFELDDEMVADDDDREALQDIVNNTKLSEGYLTLARDIEVMEAKTPEDIYKAHLLDGRASSGASVDSARQNLAATFVNAFVNAGFGQDKLMTVPSDSTTGSSGNWLFKNKEHGKTSAAASLGMIQLWDVDSGLSQLDKYFHSNDNPIIAGALLGVGIVNCGIKNDCDPALALLGDYIDKEDSSVRIGAIMGLGISYAGSQNDQIRNKLSPILNDAKAPLDVIAFASLSLGMIYVGSCNEEVAQSIIFALMDRSEAELGDALTRFLPLGLGLLYLGKQESVEATAEVSKTFNEKIRKYCDMTLLSCAYAGTGNVLKVQDLLAQCGEHLEKGDIHQGPAVLGLAMVAMSEELGVDMEIRSLERMLQYGEQNIRRAVPLALGLLCISNPKVTVMDTLSRLSHDTDSEVAMSAIISLGLIGAGTNNARIAGMLRNLSSYYYKDMSLLFCVRIAQGLVHMGKGLLTLSPFHSERFLLSPTALAGIVTLLHACLDMKPIILGKYHYVLYFLVLAMQPRMMLTVDENLKPLSVPVRVGQAVDVVGQAGRPKTITGFQTHSTPVLLAAGERAELATDKYIPLSPILEGFIILKENPDYREE

SEQ ID NO: 4555 - protein, 809 aa, Arabidopsis thaliana
MTSVPKPLKFLRPHYGTLKAFHETMADSDLKKYLSDILSVLALTMSADGERESLRFRLIGTEGDIGSWGHEYVRNLAGEIAQEYTKRQSEEASIDDLMELVQQIVAFHMKHNAETEAVDLLMDVEDLDLLLEHVDKTNFKRTCNYLTSAARYLPGPDDMLVLDISYMIYMKFEEYPNALQIALFLDNTQYVKQVFTSCTDLLKKKQFCYMIARHGITFELDDEMVADDDDREALQDIVNNTKLSEGYLTLARDIEVMEAKTPEDIYKAHLLDGRASSGASVDSARQNLAATFVNAFVNAGFGQDKLMTVPSDSTTGSSGNWLFKNKEHGKTSAAASLGMIQLWDVDSGLSQLDKYFHSNDNPIIAGALLGVGIVNCGIKNDCDPALALLGDYIDKEDSSVRIGAIMGLGISYAGSQNDQIRNKLSPILNDAKAPLDVIAFASLSLGMIYVGSCNEEVAQSIIFALMDRSEAELGDALTRFLPLGLGLLYLGKQESVEATAEVSKTFNEKIRKYCDMTLLSCAYAGTGNVLKVQDLLAQCGEHLEKGDIHQGPAVLGLAMVAMSEELGVDMEIRSLERMLQYGEQNIRRAVPLALGLLCISNPKVTVMDTLSRLSHDTDSEVAMSAIISLGLIGAGTNNARIAGMLRNLSSYYYKDMSLLFCVRIAQGLVHMGKGLLTLSPFHSERFLLSPTALAGIVTLLHACLDMKPIILGKYHYVLYFLVLAMQPRMMLTVDENLKPLSVPVRVGQAVDVVGQAGRPKTITGFQTHSTPVLLAAGERAELATDKYIPLSPILEGFIILKENPDYREE

SEQ ID NO: 4556 - DNA, 3435 bp, Arabidopsis thaliana
agatgcttccttcttcactttaatcacccttttcgattttcgttttccagctttttgattcctctgtttcaccaagtagacgaagtagaagaagaagaagaagaagaaagttttcacctttactctaaaagtttcactttttatgtctgctttgaagctctgagatcggagaaagcaatatctatggcggaagcaagacgattcagcccagttcatgaattagatgttggacaaatactctcagaagcacgacatcgatggcttcgtcctcctgaaatctgtgaaattttacagaattaccaaagatttcaaatttctactgagccacctactacaccatcaagtgggtctgtttttatgtttgatcgaaaggtgctcagatacttcaggaaagacggtcacaattggaggaagaaaaaagatggaaagactgtgaaggaagctcatgagaggttgaaggcgggaagcgttgatgttctacattgttactatgcgcatggacaggacaatgaaaactttcaaagacgcagttactggttgcttcaggaagaactttcccacatagtttttgttcactacctcgaagttaagggtagtagagtttctacttcttttaaccggatgcaaaggactgaagacgcggctcggtctcctcaagaaactggggacgccttgaccagtgaacatgatggttatgcttcttgcagcttcaatcaaaatgatcatagcaatcattcacaaactactgactcagcaagtgtcaatggttttcactctccagaacttgaagatgctgaatcagcatacaatcagcatggaagttccacagcttactctcatcaagaacttcagcagcctgcaacaggaggaaaccttactggttttgatccttactatcaaatctctttgacgcccagggatagttatcaaaaagagcttcgcacaatccccgtaactgattcttcaattatggtagacaaaagcaaaactatcaacagtcctggagtaacaaatgggttaaaaaacagaaaatccattgattcccaaacctgggaagagattctgggaaattgtggttctggagttgaagccttacctttgcagcctaacagtgagcatgaagtgctggaccaaatactcgaaagctcttttacaatgcaagattttgctagtctacaagagtccatggtcaaaagccagaatcaggagttaaattcaggacttacatctgatcgtaccgtgtggttccaaggacaagatatggagctaaatgctataagcaatctagcttcgaatgaaaaagctccatatctatctacgatgaaacaacatctgttacacggtgcattgggcgaagaaggtctgaaaaagatggacagtttcaatcgctggatgagcaaagaacttggagatgttggtgttatagctgatgcaaacgagtcctttactcaatcaagttcaagaacctactgggaagaagttgagagtgaggatgggtccaatggtcacaactctaggagggacatggatggatatgttatgagtccttccctctcaaaggaacagctctttagcatcaatgacttctctccaagctgggcttatgtgggttgtgaagtggtggtttttgtcactggaaaattcttaaagactcgggaggagactgaaattggcgagtggtcttgcatgtttgggcaaacagaagttccagcagatgttatatctaatggtattctccaatgtgttgctcctatgcatgaggctggaagagttcccttttatgtaacatgttccaacagattggcatgcagtgaagtgcgtgaattcgagtataaggttgccgagtctcaagtttttgatagagaagcagatgatgagtctactattgacattcttgaggcaagatttgttaaactgttgtgctcgaaatctgaaaatacaagccctgtttctgggaatgacagtgatttgtcacaattgagcgagaagattagtttactacttttcgagaacgatgaccagttggatcagatgctcatgaatgaaatctcccaagaaaatatgaaaaacaaccttttgcaggaatttctgaaagaaagcttacactcatggcttttacaaaagatagcagaaggtggaaaaggtccaagtgttttggatgaaggtggccaaggtgtattacattttgcagcttctcttggttacaactgggccttagaaccaacaataatcgctggtgtaagcgttgattttcgcgatgtaaatggttggaccgcacttcattgggcagctttctttggcagggagaggataattggttcactcatagctcttggtgctgctcctggaactttaactgacccaaatccagatttcccatcaggaagcacaccttctgatctagcctatgctaatggtcacaaaggaattgctggttatctctcagaatatgccttaagagctcatgtttctttgctcagtctaaatgataaaaatgccgaaactgttgagatggctcctagcccatccagctcatcattgacagactcgttgacagctgtacgtaacgctactcaggcagcagctcggattcatcaggttttcagggctcagtctttccagaagaagcaactaaaagaatttggagataaaaagcttggaatgtcggaggagcgtgctctttcgatgcttgctcctaaaacacacaaatcaggaagggcacatagtgatgattccgtgcaagccgctgctattcggattcagaacaagttccgaggttacaagggaagaaaagactatttgattaccagacaaagaatcatcaaaatacaggctcatgtgagaggttatcagtttaggaaaaactacagaaagataatttggtcagtgggggtattagagaaggtgatattacgttggagacggaaaggagctggtttgcgcgggtttaagtcagaagcacttgttgagaagatgcaagacggaacagagaaagaagaagatgatgattttttcaaacaaggaagaaagcaaacagaggataggctacaaaaagctcttgcaagagtgaaatccatggttcaatatcctgaagctagagatcaataccgtagattgctaaatgttgtcaacgacatccaagaaagcaaggttgaaaaagctcttgaaaattcagaagcaacttgttttgatgatgatgatgatctgatagatattgaagcattgttggaagatgatgacacattgatgttgcctatgtcctcatctttgtggaccagttaaatcactctcaagctttgttgtgatattgtgtcacagtattattgactcattaaacttgtaaattcttgtgtaatcactcttctcatatactgtaactgcattcatgactctaatttaaatgatatatatttgaaacataaatcaaacttatgt

SEQ ID NO: 4557 - protein, 1093 aa, Arabidopsis thaliana
RCFLLHFNHPFRFSFSSFLIPLFHQVDEVEEEEEEESFHLYSKSFTFYVCFEALRSEKAISMAEARRFSPVHELDVGQILSEARHRWLRPPEICEILQNYQRFQISTEPPTTPSSGSVFMFDRKVLRYFRKDGHNWRKKKDGKTVKEAHERLKAGSVDVLHCYYAHGQDNENFQRRSYWLLQEELSHIVFVHYLEVKGSRVSTSFNRMQRTEDAARSPQETGDALTSEHDGYASCSFNQNDHSNHSQTTDSASVNGFHSPELEDAESAYNQHGSSTAYSHQELQQPATGGNLTGFDPYYQISLTPRDSYQKELRTIPVTDSSIMVDKSKTINSPGVTNGLKNRKSIDSQTWEEILGNCGSGVEALPLQPNSEHEVLDQILESSFTMQDFASLQESMVKSQNQELNSGLTSDRTVWFQGQDMELNAISNLASNEKAPYLSTMKQHLLHGALGEEGLKKMDSFNRWMSKELGDVGVIADANESFTQSSSRTYWEEVESEDGSNGHNSRRDMDGYVMSPSLSKEQLFSINDFSPSWAYVGCEVVVFVTGKFLKTREETEIGEWSCMFGQTEVPADVISNGILQCVAPMHEAGRVPFYVTCSNRLACSEVREFEYKVAESQVFDREADDESTIDILEARFVKLLCSKSENTSPVSGNDSDLSQLSEKISLLLFENDDQLDQMLMNEISQENMKNNLLQEFLKESLHSWLLQKIAEGGKGPSVLDEGGQGVLHFAASLGYNWALEPTIIAGVSVDFRDVNGWTALHWAAFFGRERIIGSLIALGAAPGTLTDPNPDFPSGSTPSDLAYANGHKGIAGYLSEYALRAHVSLLSLNDKNAETVEMAPSPSSSSLTDSLTAVRNATQAAARIHQVFRAQSFQKKQLKEFGDKKLGMSEERALSMLAPKTHKSGRAHSDDSVQAAAIRIQNKFRGYKGRKDYLITRQRIIKIQAHVRGYQFRKNYRKIIWSVGVLEKVILRWRRKGAGLRGFKSEALVEKMQDGTEKEEDDDFFKQGRKQTEDRLQKALARVKSMVQYPEARDQYRRLLNVVNDIQESKVEKALENSEATCFDDDDDLIDIEALLEDDDTLMLPMSSSLWTS

SEQ ID NO: 4558 - protein, 1032 aa, Arabidopsis thaliana
MAEARRFSPVHELDVGQILSEARHRWLRPPEICEILQNYQRFQISTEPPTTPSSGSVFMFDRKVLRYFRKDGHNWRKKKDGKTVKEAHERLKAGSVDVLHCYYAHGQDNENFQRRSYWLLQEELSHIVFVHYLEVKGSRVSTSFNRMQRTEDAARSPQETGDALTSEHDGYASCSFNQNDHSNHSQTTDSASVNGFHSPELEDAESAYNQHGSSTAYSHQELQQPATGGNLTGFDPYYQISLTPRDSYQKELRTIPVTDSSIMVDKSKTINSPGVTNGLKNRKSIDSQTWEEILGNCGSGVEALPLQPNSEHEVLDQILESSFTMQDFASLQESMVKSQNQELNSGLTSDRTVWFQGQDMELNAISNLASNEKAPYLSTMKQHLLHGALGEEGLKKMDSFNRWMSKELGDVGVIADANESFTQSSSRTYWEEVESEDGSNGHNSRRDMDGYVMSPSLSKEQLFSINDFSPSWAYVGCEVVVFVTGKFLKTREETEIGEWSCMFGQTEVPADVISNGILQCVAPMHEAGRVPFYVTCSNRLACSEVREFEYKVAESQVFDREADDESTIDILEARFVKLLCSKSENTSPVSGNDSDLSQLSEKISLLLFENDDQLDQMLMNEISQENMKNNLLQEFLKESLHSWLLQKIAEGGKGPSVLDEGGQGVLHFAASLGYNWALEPTIIAGVSVDFRDVNGWTALHWAAFFGRERIIGSLIALGAAPGTLTDPNPDFPSGSTPSDLAYANGHKGIAGYLSEYALRAHVSLLSLNDKNAETVEMAPSPSSSSLTDSLTAVRNATQAAARIHQVFRAQSFQKKQLKEFGDKKLGMSEERALSMLAPKTHKSGRAHSDDSVQAAAIRIQNKFRGYKGRKDYLITRQRIIKIQAHVRGYQFRKNYRKIIWSVGVLEKVILRWRRKGAGLRGFKSEALVEKMQDGTEKEEDDDFFKQGRKQTEDRLQKALARVKSMVQYPEARDQYRRLLNVVNDIQESKVEKALENSEATCFDDDDDLIDIEALLEDDDTLMLPMSSSLWTS

SEQ ID NO: 4559 - protein, 974 aa, Arabidopsis thaliana
MFDRKVLRYFRKDGHNWRKKKDGKTVKEAHERLKAGSVDVLHCYYAHGQDNENFQRRSYWLLQEELSHIVFVHYLEVKGSRVSTSFNRMQRTEDAARSPQETGDALTSEHDGYASCSFNQNDHSNHSQTTDSASVNGFHSPELEDAESAYNQHGSSTAYSHQELQQPATGGNLTGFDPYYQISLTPRDSYQKELRTIPVTDSSIMVDKSKTINSPGVTNGLKNRKSIDSQTWEEILGNCGSGVEALPLQPNSEHEVLDQILESSFTMQDFASLQESMVKSQNQELNSGLTSDRTVWFQGQDMELNAISNLASNEKAPYLSTMKQHLLHGALGEEGLKKMDSFNRWMSKELGDVGVIADANESFTQSSSRTYWEEVESEDGSNGHNSRRDMDGYVMSPSLSKEQLFSINDFSPSWAYVGCEVVVFVTGKFLKTREETEIGEWSCMFGQTEVPADVISNGILQCVAPMHEAGRVPFYVTCSNRLACSEVREFEYKVAESQVFDREADDESTIDILEARFVKLLCSKSENTSPVSGNDSDLSQLSEKISLLLFENDDQLDQMLMNEISQENMKNNLLQEFLKESLHSWLLQKIAEGGKGPSVLDEGGQGVLHFAASLGYNWALEPTIIAGVSVDFRDVNGWTALHWAAFFGRERIIGSLIALGAAPGTLTDPNPDFPSGSTPSDLAYANGHKGIAGYLSEYALRAHVSLLSLNDKNAETVEMAPSPSSSSLTDSLTAVRNATQAAARIHQVFRAQSFQKKQLKEFGDKKLGMSEERALSMLAPKTHKSGRAHSDDSVQAAAIRIQNKFRGYKGRKDYLITRQRIIKIQAHVRGYQFRKNYRKIIWSVGVLEKVILRWRRKGAGLRGFKSEALVEKMQDGTEKEEDDDFFKQGRKQTEDRLQKALARVKSMVQYPEARDQYRRLLNVVNDIQESKVEKALENSEATCFDDDDDLIDIEALLEDDDTLMLPMSSSLWTS

SEQ ID NO: 4560 - DNA, 2021 bp, Arabidopsis thaliana
aagcaaattcactgatggatacacaaatcctccagggtaactagaggtgggtcatcagatctctagggtcttctcattcttcattcccagatccgtagaatagaaaatgtttggccgatctgcgattcgtggaggaggattccgtgcagagaatctaggtcaaaacgcacttaccttaatcggtaacataggcttctcactcttcgtcttcggagtactaatcttcaccataatcgccgcaacttacgaaccagaagatcctctcttccacccatctgacaaaatcacaactttcctcacttccacatcaaacgctacacttagatccgatgactccgttgttaaaaccggtgaagatttcatgctcgctaaccaaaccgcatttgcagagtttatcaacataaacgatgttgaagccagcaccaatgagactactacagaggaagagggtaacaagttggaatgtgatgtgaatactccaattgattgcaaagatcagcaagtgtttcatcttatgatgagagctactattgacaagtttaaagatattcacttttataagtttggtaagcctgttactggcgaagaaggtgtgaattcttgtgatatggcgtggcgttataggcctagagatgggaagagtgctgctttttataaggattataggaggtttgttgttgctaagtctgagaattgtagtgtgagtgttgttgggattggtgagtatcattcgggtttgaatgcgaggaagaggaagaagaatcagaaagctgggtttgagaaaactggtgggaagaaagatgatttctctttgcctgttgttggtgaacttgtgaatgattctcttcctatggttgagtctgatagtgtgtttaagactggcaagtatttggtttatgttggtggtggagataggtgtaagagtatgaatcattttctgtggagtttcttgtgtgctcttggggaagctcagtatttgaataggactctagtgatggatttgaccttgtgtttgtcttctatctatacttcgtctggtcagaatgaggaaggcaaggatttcaggttttactttgatttcgagcatttgaaagaagctgcttctgtgttggatgaagctcagttttgggctcagtgggggaaattgcgtaagaagagaagaaatagattgaaccttcatctcgtggaggattttagggtcactcccatgaagctcgcggctgtcaaagatacgttgataatgaggaagtttggatctgtagaaccagacaattattggtacagggtttgtgaaggagatgcagaatctgttgttaaacgaccgtggcatctgttatggaaatcaagaaggttgatggaaatcgtctctgctattgcatcaaggttaaactgggactacgatgctgtacacattgagagaggagagaaagcaagaaacaaggaggtttggcctaatcttgaagcggatacttccccgagcgctctcttgtcgaccttgcaggacaaagttgaagaaggaaggcatctctacatcgcaacaaatgaaggagaattatccttcttcaaccctttgaaagataagtacgccactcatttcctttacgactacaaagatctttgggatgagagcagtgagtggtattcagagactactaagcttaatggaggcaacccggtcgaatttgatggttacatgagagcatctgttgacacagaagtattcttgagagggaagaagcagattgaaacattcaacgatcttacaaacgattgtaaagatggagttgggacctgcaatgctgcaacttcctgatctctgtcatattcctcatttatttgttgtttgaatcgtcttgtaccacttgtttccagttttgtattgtagaatagctttgtattttccattactgttgttttgtctcagtgacttttagactaatatatgtcctagtttggttctatttctttggaatgcaaaatcttgggaagaagatgatattgatacacaaaaattgattcgg

SEQ ID NO: 4561 - protein, 568 aa, Arabidopsis thaliana
MFGRSAIRGGGFRAENLGQNALTLIGNIGFSLFVFGVLIFTIIAATYEPEDPLFHPSDKITTFLTSTSNATLRSDDSVVKTGEDFMLANQTAFAEFININDVEASTNETTTEEEGNKLECDVNTPIDCKDQQVFHLMMRATIDKFKDIHFYKFGKPVTGEEGVNSCDMAWRYRPRDGKSAAFYKDYRRFVVAKSENCSVSVVGIGEYHSGLNARKRKKNQKAGFEKTGGKKDDFSLPVVGELVNDSLPMVESDSVFKTGKYLVYVGGGDRCKSMNHFLWSFLCALGEAQYLNRTLVMDLTLCLSSIYTSSGQNEEGKDFRFYFDFEHLKEAASVLDEAQFWAQWGKLRKKRRNRLNLHLVEDFRVTPMKLAAVKDTLIMRKFGSVEPDNYWYRVCEGDAESVVKRPWHLLWKSRRLMEIVSAIASRLNWDYDAVHIERGEKARNKEVWPNLEADTSPSALLSTLQDKVEEGRHLYIATNEGELSFFNPLKDKYATHFLYDYKDLWDESSEWYSETTKLNGGNPVEFDGYMRASVDTEVFLRGKKQIETFNDLTNDCKDGVGTCNAATS

SEQ ID NO: 4562 - protein, 483 aa, Arabidopsis thaliana
MLANQTAFAEFININDVEASTNETTTEEEGNKLECDVNTPIDCKDQQVFHLMMRATIDKFKDIHFYKFGKPVTGEEGVNSCDMAWRYRPRDGKSAAFYKDYRRFVVAKSENCSVSVVGIGEYHSGLNARKRKKNQKAGFEKTGGKKDDFSLPVVGELVNDSLPMVESDSVFKTGKYLVYVGGGDRCKSMNHFLWSFLCALGEAQYLNRTLVMDLTLCLSSIYTSSGQNEEGKDFRFYFDFEHLKEAASVLDEAQFWAQWGKLRKKRRNRLNLHLVEDFRVTPMKLAAVKDTLIMRKFGSVEPDNYWYRVCEGDAESVVKRPWHLLWKSRRLMEIVSAIASRLNWDYDAVHIERGEKARNKEVWPNLEADTSPSALLSTLQDKVEEGRHLYIATNEGELSFFNPLKDKYATHFLYDYKDLWDESSEWYSETTKLNGGNPVEFDGYMRASVDTEVFLRGKKQIETFNDLTNDCKDGVGTCNAATS

SEQ ID NO: 4563 - protein, 432 aa, Arabidopsis thaliana
MMRATIDKFKDIHFYKFGKPVTGEEGVNSCDMAWRYRPRDGKSAAFYKDYRRFVVAKSENCSVSVVGIGEYHSGLNARKRKKNQKAGFEKTGGKKDDFSLPVVGELVNDSLPMVESDSVFKTGKYLVYVGGGDRCKSMNHFLWSFLCALGEAQYLNRTLVMDLTLCLSSIYTSSGQNEEGKDFRFYFDFEHLKEAASVLDEAQFWAQWGKLRKKRRNRLNLHLVEDFRVTPMKLAAVKDTLIMRKFGSVEPDNYWYRVCEGDAESVVKRPWHLLWKSRRLMEIVSAIASRLNWDYDAVHIERGEKARNKEVWPNLEADTSPSALLSTLQDKVEEGRHLYIATNEGELSFFNPLKDKYATHFLYDYKDLWDESSEWYSETTKLNGGNPVEFDGYMRASVDTEVFLRGKKQIETFNDLTNDCKDGVGTCNAATS

SEQ ID NO: 4564 - DNA, 2071 bp, Arabidopsis thaliana
gcctcttcttcttcttcttcttcttcatcttcttctatatattggtgtttcatttgttctgctttaaaagtacacaaagattcatcttttttcggtcctctgattgggcaaaagactagctcggtcgtgttttgaacaagagatacatgttttgaaaaattcctcgcaaaagaagagaaagaaagactcaaacttttgtttgaatttgataccattttttatatatataccaaaagtccaagactggtttcatttttgggtttggtctgaaacctctcttcgtgttgtttgttcatggtatgtcttaattagggtaaaaaaatacttgattgttttctctcaatcatcgtgcatagagtacgcaataaaccggttaaatccaccgctactgcttccgtcaagcatttaatcaaacagagaggcggcgacggagctacggcggcttccaagtcggcgaatgattataataataatgatagtctcttgacggatatgcaggaaccaagcatcgatacagataaactcagctacgagattttctctattcttgagagcaaatttcttttcgggtacgacgactcgaaacccgaacccgcgaattcggttgttgctgggtcgattaagaaccagagaggtaaaatctgtattctgagtatcgatggaggtggaatgagagggatcttacccggtaaggctttggcttatctagaacacgctctgaaatctaaatcgggtgacccgaatgcccgaatcgccgattactttgacgtagccgccgggtccggtataggtgggatttacacagccatgttgttcgggtcaagagacggtaaccgccccatcttcaaagcagatgacacgtggcagttcttaacgagaaacgccaagggtctttacggaggagcaggaatcttgaaacgggtcttgagaaccgggtcgggttgttgttccgggacggctaagttaaagaaagtgatgaaagagtctttctcggagctaaccttaaaggacacgcttaaaccggtgcttataccttgctacgacctcaaaagctctggcccgtttctgttctcacgggccgatgcgcttgagacggacggctatgattttaggctctcggaggtttgtagagcgacttgggctgagccgggtgtgtttgagcccgtggagatgaagtcggttgatgggcagaccaagtgtgtggctgttggtggaggattagccatgagcaatcccacagcggctgcaatcacgcatgtcctgcacaacaagcaggagtttccgtttgtgcgaggtgttgaggatttgcttgtgttgtctcttggtatgggtcagttgcttgatgttagctatgagtatgatcggattatcaagtggaaggctaagcattgggctcgccccgcagctcttatttctaatgacggtgctgctgacactgtcgatcaagctgtggccatggcttttggtcactgccgcagtagtaactatgtccggattcaggcgaatgggtcgaacttaggaccttggagtcctaacatggacacagaccctagtgggagcaatgtgaatatgctgatgggagtagcagaggagatgcttaaacaaaagaatgttgaatctgttttgtttggaggtaaaagaatcgatgaacagagcaacttcgagaagcttgactggttagctggggaacttgttctcgagcatcaaaggagaaatagcagaatcgctccaaccgtagcgttcaagcaatccgtgcatagagcagatcaaaagacaagtgataaagatatcggtgtgaccgcaagagaacgatgaaataagaaatggtttgcttagatgatttttttaagataaggtttttatttctttcttcttaggttatgatttgttgtatagatttgtgtttttgagattgagtttctgagacatgatgagaaaaggggaaacacctatcatcttgcaaagagggctcaagctccttaatccatgctgcccaaaaaaaaaaaaaaaaatatgattcctgtaatttcggtttgtctttgttttcctatgtagtcatcatgatttcttc

SEQ ID NO: 4565 - protein, 440 aa, Arabidopsis thaliana
MQEPSIDTDKLSYEIFSILESKFLFGYDDSKPEPANSVVAGSIKNQRGKICILSIDGGGMRGILPGKALAYLEHALKSKSGDPNARIADYFDVAAGSGIGGIYTAMLFGSRDGNRPIFKADDTWQFLTRNAKGLYGGAGILKRVLRTGSGCCSGTAKLKKVMKESFSELTLKDTLKPVLIPCYDLKSSGPFLFSRADALETDGYDFRLSEVCRATWAEPGVFEPVEMKSVDGQTKCVAVGGGLAMSNPTAAAITHVLHNKQEFPFVRGVEDLLVLSLGMGQLLDVSYEYDRIIKWKAKHWARPAALISNDGAADTVDQAVAMAFGHCRSSNYVRIQANGSNLGPWSPNMDTDPSGSNVNMLMGVAEEMLKQKNVESVLFGGKRIDEQSNFEKLDWLAGELVLEHQRRNSRIAPTVAFKQSVHRADQKTSDKDIGVTARER

SEQ ID NO: 4566 - protein, 381 aa, Arabidopsis thaliana
MRGILPGKALAYLEHALKSKSGDPNARIADYFDVAAGSGIGGIYTAMLFGSRDGNRPIFKADDTWQFLTRNAKGLYGGAGILKRVLRTGSGCCSGTAKLKKVMKESFSELTLKDTLKPVLIPCYDLKSSGPFLFSRADALETDGYDFRLSEVCRATWAEPGVFEPVEMKSVDGQTKCVAVGGGLAMSNPTAAAITHVLHNKQEFPFVRGVEDLLVLSLGMGQLLDVSYEYDRIIKWKAKHWARPAALISNDGAADTVDQAVAMAFGHCRSSNYVRIQANGSNLGPWSPNMDTDPSGSNVNMLMGVAEEMLKQKNVESVLFGGKRIDEQSNFEKLDWLAGELVLEHQRRNSRIAPTVAFKQSVHRADQKTSDKDIGVTARER

SEQ ID NO: 4567 - protein, 335 aa, Arabidopsis thaliana
MLFGSRDGNRPIFKADDTWQFLTRNAKGLYGGAGILKRVLRTGSGCCSGTAKLKKVMKESFSELTLKDTLKPVLIPCYDLKSSGPFLFSRADALETDGYDFRLSEVCRATWAEPGVFEPVEMKSVDGQTKCVAVGGGLAMSNPTAAAITHVLHNKQEFPFVRGVEDLLVLSLGMGQLLDVSYEYDRIIKWKAKHWARPAALISNDGAADTVDQAVAMAFGHCRSSNYVRIQANGSNLGPWSPNMDTDPSGSNVNMLMGVAEEMLKQKNVESVLFGGKRIDEQSNFEKLDWLAGELVLEHQRRNSRIAPTVAFKQSVHRADQKTSDKDIGVTARER

SEQ ID NO: 4568 - DNA, 747 bp, Arabidopsis thaliana
atggcttcgtctctcaccactagattatcggcggtaatcggatctcgacggagttttccgatcgtcggagcgttttgcgttctgtcaactctctcaatctcttctctttcttcttcatctcccttcaaatcgggttgtgcacagtctttctctgttgttcctctcttaaggtctaagtttagcagtaaggctttttcttcgtcgatcagaatggaggagagcagcaaaactgtgcccagcattgttgtctatgtcactgttcctaacagagaagcagggaagaagttggctaacagcattgtccaggaaaagcttgcagcgtgtgtgaacattgtgcctggcattgaatcggtgtacgagtgggaggggaaggttcagagtgattcagaggagctcctgataatcaaaacaaggcaatcccttctagaacctctaaccgagcatgtcaatgcaaatcacgaatacgatgtgccagaagtaattgcgttgcccatcactggtgggagcgacaagtatttagaatggttgaaaaacagtacaaggaactgagatctcgacatctcgtagctgcccatcgtcaatggctttctagtattagtttcttttacatttcagtaacctctgtattaaagataaaacgtgtgaagtgtaatactggaccagttcgtcaaatgaaataaacaatgacattgttccatataatggatggacatttgcttaaaagatttcagatcaagtctttgattc

SEQ ID NO: 4569 - protein, 182 aa, Arabidopsis thaliana
MASSLTTRLSAVIGSRRSFPIVGAFCVLSTLSISSLSSSSPFKSGCAQSFSVVPLLRSKFSSKAFSSSIRMEESSKTVPSIVVYVTVPNREAGKKLANSIVQEKLAACVNIVPGIESVYEWEGKVQSDSEELLIIKTRQSLLEPLTEHVNANHEYDVPEVIALPITGGSDKYLEWLKNSTRN

SEQ ID NO: 4570 - protein, 112 aa, Arabidopsis thaliana
MEESSKTVPSIVVYVTVPNREAGKKLANSIVQEKLAACVNIVPGIESVYEWEGKVQSDSEELLIIKTRQSLLEPLTEHVNANHEYDVPEVIALPITGGSDKYLEWLKNSTRN

SEQ ID NO: 4571 - DNA, 1991 bp, Arabidopsis thaliana
acagactctttcttaatctctctctctttcaaccaaacccctaaacaaaaaaaaaatacattttctgatctctctaaaaatctttctccttcgttaatctcgtgatctctttctttttctatatatggacagaggatggtctggtctcactcttgattcatcttctcttgatcttttaaaccctaatcgtatttctcataagaatcaccgacgtttctcaaatcctttggcgatgtctagaattgacgaagaagatgatcagaagacgagaatatcaaccaacggtagtgaatttaggtttccggtgagtctctcaggtattcgtgatcgtgaagatgaagatttttcatctggcgttgctggagataatgaccgtgaagttcccggcgaagtggatttcttctccgacaagaaatctagggtttgtcgtgaagacgacgaaggatttcgtgtgaagaaggaagaacaagatgatcgaacggacgtaaataccggtttgaatcttcgaacaactggtaatacaaagagtgatgagtcaatgatcgatgatggagaatcttccgaaatggaagataagcgtgcgaaaaatgagttggtgaaattacaagatgagttgaagaaaatgacaatggataatcaaaagcttagagaattgcttacacaagttagcaacagttacacttcacttcagatgcatcttgtttcactaatgcagcaacagcaacaacagaacaataaggtaatagaagctgctgagaagcctgaggagacgatagtaccaaggcaatttattgatttaggccctacgagagcagtaggtgaggccgaggatgtgtcaaattcttcatccgaagatagaactcgttcggggggttcttctgcagccgagaggcgtagtaacgggaagagacttgggcgtgaagaaagccccgaaactgagtccaacaaaattcagaaggtgaattctactaccccgacgacatttgatcaaaccgctgaagctacgatgaggaaagcccgtgtctccgttcgtgcccgatcggaagctccgatgataagcgatggatgtcaatggagaaaatatggccagaagatggccaaagggaatccttgtccgcgggcatattaccgctgcacgatggccacgggctgtcccgttcgcaaacaagttcaacgttgcgcggaagacagatcaattctgattacaacctacgagggaaaccataaccatccgttgccgccagccgcggtagccatggcttctaccaccacggcggcggctaacatgttgctatccgggtcaatgtctagtcacgacgggatgatgaaccctacaaatttactagctagggctgttcttccttgctccacaagcatggcaacaatctcagcctccgcgccgtttccaaccgtcacattagacctcacccactcacctccgcctcctaatggttccaatccttcctcttccgcggctaccaacaacaaccacaactcactgatgcagcggccgcaacaacaacaacagcaaatgacgaacttacctccgggaatgctacctcatgtaataggccaggcattgtataaccaatccaagttctcggggctgcagttctctggtggctctccctcgacggcagcgttttctcagtcacacgcggtggctgatacaataacggcactcacagctgacccgaatttcacggcggctcttgcagccgttatttcttctatgatcaatggtacgaaccaccacgacggcgaaggaaacaacaaaaatcaatagaaaaatattacattttttttttgggtatctacattttttttccaactgggttataggaaacagagagtttatttcattgattcacatttgttctgtttcgtaccaaaatcccagtaaatatacaaaagcaaactatactcaagttcatattcgtaaacactataaaatagttacgtaacttaattagcattgcctttaaagcttt

SEQ ID NO: 4572 - protein, 553 aa, Arabidopsis thaliana
MDRGWSGLTLDSSSLDLLNPNRISHKNHRRFSNPLAMSRIDEEDDQKTRISTNGSEFRFPVSLSGIRDREDEDFSSGVAGDNDREVPGEVDFFSDKKSRVCREDDEGFRVKKEEQDDRTDVNTGLNLRTTGNTKSDESMIDDGESSEMEDKRAKNELVKLQDELKKMTMDNQKLRELLTQVSNSYTSLQMHLVSLMQQQQQQNNKVIEAAEKPEETIVPRQFIDLGPTRAVGEAEDVSNSSSEDRTRSGGSSAAERRSNGKRLGREESPETESNKIQKVNSTTPTTFDQTAEATMRKARVSVRARSEAPMISDGCQWRKYGQKMAKGNPCPRAYYRCTMATGCPVRKQVQRCAEDRSILITTYEGNHNHPLPPAAVAMASTTTAAANMLLSGSMSSHDGMMNPTNLLARAVLPCSTSMATISASAPFPTVTLDLTHSPPPPNGSNPSSSAATNNNHNSLMQRPQQQQQQMTNLPPGMLPHVIGQALYNQSKFSGLQFSGGSPSTAAFSQSHAVADTITALTADPNFTAALAAVISSMINGTNHHDGEGNNKNQ

SEQ ID NO: 4573 - protein, 517 aa, Arabidopsis thaliana
MSRIDEEDDQKTRISTNGSEFRFPVSLSGIRDREDEDFSSGVAGDNDREVPGEVDFFSDKKSRVCREDDEGFRVKKEEQDDRTDVNTGLNLRTTGNTKSDESMIDDGESSEMEDKRAKNELVKLQDELKKMTMDNQKLRELLTQVSNSYTSLQMHLVSLMQQQQQQNNKVIEAAEKPEETIVPRQFIDLGPTRAVGEAEDVSNSSSEDRTRSGGSSAAERRSNGKRLGREESPETESNKIQKVNSTTPTTFDQTAEATMRKARVSVRARSEAPMISDGCQWRKYGQKMAKGNPCPRAYYRCTMATGCPVRKQVQRCAEDRSILITTYEGNHNHPLPPAAVAMASTTTAAANMLLSGSMSSHDGMMNPTNLLARAVLPCSTSMATISASAPFPTVTLDLTHSPPPPNGSNPSSSAATNNNHNSLMQRPQQQQQQMTNLPPGMLPHVIGQALYNQSKFSGLQFSGGSPSTAAFSQSHAVADTITALTADPNFTAALAAVISSMINGTNHHDGEGNNKNQ

SEQ ID NO: 4574 - protein, 415 aa, Arabidopsis thaliana
MIDDGESSEMEDKRAKNELVKLQDELKKMTMDNQKLRELLTQVSNSYTSLQMHLVSLMQQQQQQNNKVIEAAEKPEETIVPRQFIDLGPTRAVGEAEDVSNSSSEDRTRSGGSSAAERRSNGKRLGREESPETESNKIQKVNSTTPTTFDQTAEATMRKARVSVRARSEAPMISDGCQWRKYGQKMAKGNPCPRAYYRCTMATGCPVRKQVQRCAEDRSILITTYEGNHNHPLPPAAVAMASTTTAAANMLLSGSMSSHDGMMNPTNLLARAVLPCSTSMATISASAPFPTVTLDLTHSPPPPNGSNPSSSAATNNNHNSLMQRPQQQQQQMTNLPPGMLPHVIGQALYNQSKFSGLQFSGGSPSTAAFSQSHAVADTITALTADPNFTAALAAVISSMINGTNHHDGEGNNKNQ

SEQ ID NO: 4575 - DNA, 1643 bp, Arabidopsis thaliana
aaaatcgataaaaactaattagggtaaatgtcaacaacaatccgatttctgagaattgtcacaagtcgagcaatgtcgtcgtcttggtcctgcaacaaatgtactttcctcaattctgcgtctcagaaactcaattgcatgatctgcttggctcctgtatctctcccttctttgtctcctcctccaccttctctctcaatttccgcgaacgatgaagctaaatgggcttgcaaggcctgtacttttttgaacacgtacaagaactcaatctgtgacgtctgtggaacacgatcgccaacgtcttctctcttgggatttcaggatttgactgattcgggtctcgagagtaacgacgctgattcctccgtcgggtctgttttctttcctctgcggcggtgtatcaagcgtaaagctatggatgatgacgtcgtcgaggtcgatggtgcttctgttgtttgctctgaatcgcaaggtgtcatgaagaagaacaaagagattgaaacgaaaggggtagcttctgattcaggaacacctttaacttgcttgaagatcttgagctacaatgtttggtttcgtgaagaccttgagttgaatctaaggatgagagcgattggtcatcttattcagcttcattctcctcatctcatatgttttcaggaagtcactcctgagatatatgatattttccgcaagtcgaattggtggaaagcgtattcttgttctgtctcagttgatgtggcagtttcgagaggctactactgcatgctgttgagcaagttgggagtgaaatctttcagcagcaaaagctttgggaactcgataatgggaagagaactatctatcgcagaagttgaagttccagggagaaagccacttgtttttgcaactagccatcttgagagtccctgtccaggtcctccaaaatgggaccaaatgttcagtcgagaacgcgttgaacaagccaaggaggcaattgagattctcagacctaatgccaatgtgatattcgggggagacatgaactggtgcgacaagctagatgggaagtttcctttgccagacaaatgggtggatgtttgggaggttttgaaaccaggtgatttgggttttacatatgacacaaaagcaaacccaatgttgtccggtaaccgggcattgcagaaacggttagaccggattttgtgtcgtctggatgattacaagcttggtggaatcgagatggttgggaaagaggccattcctggtttatcatatgtaaaagagaagaaagtgaggggtgacattaagaagttagagcttccggtgttgcctagtgatcatttcggtctgcttgtaaccctttcgccaaaatgagatcaaactattcagagctcgaagttagtcttccttagtgaagcttttgtgactaggttaaaaaactgtatgaaacaccaaatttggtgcgtagggtttctctgtttcgaactgatgataaacagttcttggtttaagttttttttgttttttggtttgggaacggccttatttcctgattcgaactgaaagatcagtcttattgttcaacaatgcccccaccttttgtaatgaagattctgaaactaatcacatattaatatgatcgttaaaaaccagagagattttgg

SEQ ID NO: 4576 - protein, 441 aa, Arabidopsis thaliana
MSTTIRFLRIVTSRAMSSSWSCNKCTFLNSASQKLNCMICLAPVSLPSLSPPPPSLSISANDEAKWACKACTFLNTYKNSICDVCGTRSPTSSLLGFQDLTDSGLESNDADSSVGSVFFPLRRCIKRKAMDDDVVEVDGASVVCSESQGVMKKNKEIETKGVASDSGTPLTCLKILSYNVWFREDLELNLRMRAIGHLIQLHSPHLICFQEVTPEIYDIFRKSNWWKAYSCSVSVDVAVSRGYYCMLLSKLGVKSFSSKSFGNSIMGRELSIAEVEVPGRKPLVFATSHLESPCPGPPKWDQMFSRERVEQAKEAIEILRPNANVIFGGDMNWCDKLDGKFPLPDKWVDVWEVLKPGDLGFTYDTKANPMLSGNRALQKRLDRILCRLDDYKLGGIEMVGKEAIPGLSYVKEKKVRGDIKKLELPVLPSDHFGLLVTLSPK

SEQ ID NO: 4577 - protein, 426 aa, Arabidopsis thaliana
MSSSWSCNKCTFLNSASQKLNCMICLAPVSLPSLSPPPPSLSISANDEAKWACKACTFLNTYKNSICDVCGTRSPTSSLLGFQDLTDSGLESNDADSSVGSVFFPLRRCIKRKAMDDDVVEVDGASVVCSESQGVMKKNKEIETKGVASDSGTPLTCLKILSYNVWFREDLELNLRMRAIGHLIQLHSPHLICFQEVTPEIYDIFRKSNWWKAYSCSVSVDVAVSRGYYCMLLSKLGVKSFSSKSFGNSIMGRELSIAEVEVPGRKPLVFATSHLESPCPGPPKWDQMFSRERVEQAKEAIEILRPNANVIFGGDMNWCDKLDGKFPLPDKWVDVWEVLKPGDLGFTYDTKANPMLSGNRALQKRLDRILCRLDDYKLGGIEMVGKEAIPGLSYVKEKKVRGDIKKLELPVLPSDHFGLLVTLSPK

SEQ ID NO: 4578 - protein, 404 aa, Arabidopsis thaliana
MICLAPVSLPSLSPPPPSLSISANDEAKWACKACTFLNTYKNSICDVCGTRSPTSSLLGFQDLTDSGLESNDADSSVGSVFFPLRRCIKRKAMDDDVVEVDGASVVCSESQGVMKKNKEIETKGVASDSGTPLTCLKILSYNVWFREDLELNLRMRAIGHLIQLHSPHLICFQEVTPEIYDIFRKSNWWKAYSCSVSVDVAVSRGYYCMLLSKLGVKSFSSKSFGNSIMGRELSIAEVEVPGRKPLVFATSHLESPCPGPPKWDQMFSRERVEQAKEAIEILRPNANVIFGGDMNWCDKLDGKFPLPDKWVDVWEVLKPGDLGFTYDTKANPMLSGNRALQKRLDRILCRLDDYKLGGIEMVGKEAIPGLSYVKEKKVRGDIKKLELPVLPSDHFGLLVTLSPK

SEQ ID NO: 4579 - DNA, 1226 bp, Arabidopsis thaliana
atggaggtcccaaaatcctcattgctaatgataatttttgtggtagcttcatgtttcttgcatgtcaaggcttggcatggtcagacttattgtggtggcaatgcgactccccgatgccagctccggtacatcgactgtcctgaagagtgccctaccgaaatgttccccaactctcagaacaaaatttgttgggttgattgctttaaacccctttgcgaggccgtgtgtcgggcggtaaaacccaactgcgaatcctatggatcaatttgtctagatccgaggttcataggtggtgatggaattgtgttctacttccatggaaagagcaatgaacattttagcattgtctcggaccctgactttcagatcaatgctaggttcactggtcatagacctgctggccgcactagagactttacatggatccaagctctcggcttcctctttaactcccacaaattctcccttgagaccaccaaagtcgccacttgggacagcaaccttgatcacctcaagttcactatcgacggccaagatttaattatccctcaagaaactttatccacttggtactcatccgacaaagacatcaagattgaaaggttgacagagaagaacagtgtgatcgtgactatcaaagacaaagctgagatcatggtcaacgtggttccagtgaccaaagaagatgatagaatccacaactacaaattacctgtagatgactgttttgcccattttgaggtccagttcaagtttattaatctgtccccaaaagtcgatggaatcttgggacgcacttatagacccgattttaagaatccggctaaaccaggagtcgtaatgccagtggtgggaggtgaagatagctttaggacatcttctctgctctctcatgtttgcaaaacttgtttgttctctgaagatcccgccgttgcgagtggctctgtcaagcccaaaagtacatacgcattgttagattgcagccgtggtgcgtcttccggctatggactcgtctgcagaaagtagttaccaatacaaactcagtttgctaagaattacagatattaaaagtatattgttatgttttgtgtacgtataaaatttatatgtttgtcaaaataaaacagaggaataaggtaattaagaaccaaattctaaagaaagtaattgtaactcagttatttacatgtaccagattatctaatccttaagaaaaccattatatt

SEQ ID NO: 4580 - protein, 341 aa, Arabidopsis thaliana
MEVPKSSLLMIIFVVASCFLHVKAWHGQTYCGGNATPRCQLRYIDCPEECPTEMFPNSQNKICWVDCFKPLCEAVCRAVKPNCESYGSICLDPRFIGGDGIVFYFHGKSNEHFSIVSDPDFQINARFTGHRPAGRTRDFTWIQALGFLFNSHKFSLETTKVATWDSNLDHLKFTIDGQDLIIPQETLSTWYSSDKDIKIERLTEKNSVIVTIKDKAEIMVNVVPVTKEDDRIHNYKLPVDDCFAHFEVQFKFINLSPKVDGILGRTYRPDFKNPAKPGVVMPVVGGEDSFRTSSLLSHVCKTCLFSEDPAVASGSVKPKSTYALLDCSRGASSGYGLVCRK

SEQ ID NO: 4581 - protein, 332 aa, Arabidopsis thaliana
MIIFVVASCFLHVKAWHGQTYCGGNATPRCQLRYIDCPEECPTEMFPNSQNKICWVDCFKPLCEAVCRAVKPNCESYGSICLDPRFIGGDGIVFYFHGKSNEHFSIVSDPDFQINARFTGHRPAGRTRDFTWIQALGFLFNSHKFSLETTKVATWDSNLDHLKFTIDGQDLIIPQETLSTWYSSDKDIKIERLTEKNSVIVTIKDKAEIMVNVVPVTKEDDRIHNYKLPVDDCFAHFEVQFKFINLSPKVDGILGRTYRPDFKNPAKPGVVMPVVGGEDSFRTSSLLSHVCKTCLFSEDPAVASGSVKPKSTYALLDCSRGASSGYGLVCRK

SEQ ID NO: 4582 - protein, 288 aa, Arabidopsis thaliana
MFPNSQNKICWVDCFKPLCEAVCRAVKPNCESYGSICLDPRFIGGDGIVFYFHGKSNEHFSIVSDPDFQINARFTGHRPAGRTRDFTWIQALGFLFNSHKFSLETTKVATWDSNLDHLKFTIDGQDLIIPQETLSTWYSSDKDIKIERLTEKNSVIVTIKDKAEIMVNVVPVTKEDDRIHNYKLPVDDCFAHFEVQFKFINLSPKVDGILGRTYRPDFKNPAKPGVVMPVVGGEDSFRTSSLLSHVCKTCLFSEDPAVASGSVKPKSTYALLDCSRGASSGYGLVCRK

SEQ ID NO: 4583 - DNA, 2811 bp, Arabidopsis thaliana
ctgcaggcttcgatagagatagagctaagcacgaaaatcccgagtaattgaccttctcttcttcccagtgttgtcttctcttctccacgaacttaattttttcaaaaccctagcaactttgattcattcaaaatccgatccaacgatgactattgaagaagtttccggtgagactcctccgtctacgcctccttcttcttctacgccttctccgtcttcctccaccaccaacgccgcgccgttgggatcctctgtgattccgattgtaaacaagctacaagacatattcgctcagctcggaagccagtctacgatcgcgcttcctcaggttgttgttgttggaagccaaagcagtggcaagtctagcgtccttgaagcactcgtcggccgtgactttctccctcgtggtaatgatatctgcacgcgtcgtcctcttgttctccagctcctccagactaaaagccgcgctaatggcggatccgatgatgagtggggggagtttcgtcaccttcctgaaactcgtttctatgatttctctgagattcgtcgagaaattgaggctgagacgaatagattagttggagagaacaaaggtgtagcagatacacagattcgtcttaaaatttcttcacctaatgtattgaacatcacgcttgtggatctgcctggtattaccaaggtgccagttggtgaccagccatccgacattgaagcacgtataagaacgatgatcttgtcttacatcaagcaagatacttgcttgatattggctgttacccctgctaataccgatctagcaaactctgatgcccttcaaattgctagcattgtagatcctgatggtcacagaacgataggtgtaatcacaaagttggatattatggacaaaggtactgatgctcgaaaactccttcttggaaatgttgttcctcttcgacttggatacgtgggagttgtaaatcgttgccaggaggatattttgctaaaccgcacagtcaaggaagcacttctcgcagaggagaagttcttccggagtcacccggtttaccatggtcttgccgatcgtttgggtgttcctcagctagcaaagaagttaaatcagatccttgttcaacatatcaaggtcttgcttccggatttgaagtcgcggataagtaatgctttggttgctacagcaaaagagcatcagagctatggtgaattaacagaatcaagggctgggcaaggagctcttctcctcaactttctctccaaatactgtgaagcatactcttcattgctggaagggaaaagtgaagaaatgtctacgtcagagctctctggaggagcaagaattcactatattttccagtcaatctttgttaagagtttggaggaggttgatccatgcgaggacttgacagatgatgatattcggactgcaattcagaatgcaactggtccaagatctgcattatttgttccagatgttccatttgaagttcttgttaggaggcagatatctcgtttgttagatcctagccttcagtgtgcccggttcatttttgaagagctaataaagattagccatagatgtatgatgaatgagttacaacgatttccagtcctacgaaagcgcatggatgaggttatcggggatttcctgcgagaaggtcttgaaccctcagaagcaatgatcggggatatcattgatatggagatggattacataaacacttcacatccaaattttattggtggaaccaaggccgtggaagctgcaatgcatcaagtgaagtcttcgaggattccccatcctgtggcacgaccaaaggacactgtggagcctgatagaacatcttcttccacgagtcaagtgaaatctagatcgtttctcggcaggcaagctaatggaattgttactgatcagggagttgtatctgcagatgctgaaaaagctcaacctgctgcaaatgcgagtgatacaaggtggggtatcccttcaattttccgagggggtgatactagagcagttactaaagatagcttattaaacaaaccattcagtgaagctgttgaggatatgtctcacaacttatccatgatctatctaaaggagcccccagctgtcttgaggccaaccgaaacccattcagaacaggaagcagttgagattcagataacaaagctgttactaagatcatactatgacattgtaaggaagaatattgaggactcggtaccaaaagcaatcatgcatttcctggtaaaccacacaaaacgtgagctgcataacgtcttcatcaagaagctttacagggagaacttgtttgaagaaatgttgcaagagccagatgagatagcagttaagaggaaacgcacacaagagactctccacgttcttcagcaagcttacaggacactagatgagttgccactggaagcagattcggtgtcagcaggaatgtcaaaacatcaggagttactgacatcttcaaagtattcgacaagcagctcatactcggcatctccaagtacgacaagaagatcgagaagagcaggagatcaacaccaaaatggatacggattctaacatgatccaaatatctcgaatatctctcgactgtgataacgcatttcattcatttaatggctctttcaggttttggtattaaattatgtgttggtcatatgaagaatttatataggaaaccagtacacagtgtgggttttggtccttttggactctgcattggttgacttgataagggagtgaaaggtgatatagtttttttttccaaaaaaaaaaaaaaaaaactcgagggggggccc

SEQ ID NO: 4584 - protein, 808 aa, Arabidopsis thaliana
MTIEEVSGETPPSTPPSSSTPSPSSSTTNAAPLGSSVIPIVNKLQDIFAQLGSQSTIALPQVVVVGSQSSGKSSVLEALVGRDFLPRGNDICTRRPLVLQLLQTKSRANGGSDDEWGEFRHLPETRFYDFSEIRREIEAETNRLVGENKGVADTQIRLKISSPNVLNITLVDLPGITKVPVGDQPSDIEARIRTMILSYIKQDTCLILAVTPANTDLANSDALQIASIVDPDGHRTIGVITKLDIMDKGTDARKLLLGNVVPLRLGYVGVVNRCQEDILLNRTVKEALLAEEKFFRSHPVYHGLADRLGVPQLAKKLNQILVQHIKVLLPDLKSRISNALVATAKEHQSYGELTESRAGQGALLLNFLSKYCEAYSSLLEGKSEEMSTSELSGGARIHYIFQSIFVKSLEEVDPCEDLTDDDIRTAIQNATGPRSALFVPDVPFEVLVRRQISRLLDPSLQCARFIFEELIKISHRCMMNELQRFPVLRKRMDEVIGDFLREGLEPSEAMIGDIIDMEMDYINTSHPNFIGGTKAVEAAMHQVKSSRIPHPVARPKDTVEPDRTSSSTSQVKSRSFLGRQANGIVTDQGVVSADAEKAQPAANASDTRWGIPSIFRGGDTRAVTKDSLLNKPFSEAVEDMSHNLSMIYLKEPPAVLRPTETHSEQEAVEIQITKLLLRSYYDIVRKNIEDSVPKAIMHFLVNHTKRELHNVFIKKLYRENLFEEMLQEPDEIAVKRKRTQETLHVLQQAYRTLDELPLEADSVSAGMSKHQELLTSSKYSTSSSYSASPSTTRRSRRAGDQHQNGYGF

SEQ ID NO: 4585 - protein, 614 aa, Arabidopsis thaliana
MILSYIKQDTCLILAVTPANTDLANSDALQIASIVDPDGHRTIGVITKLDIMDKGTDARKLLLGNVVPLRLGYVGVVNRCQEDILLNRTVKEALLAEEKFFRSHPVYHGLADRLGVPQLAKKLNQILVQHIKVLLPDLKSRISNALVATAKEHQSYGELTESRAGQGALLLNFLSKYCEAYSSLLEGKSEEMSTSELSGGARIHYIFQSIFVKSLEEVDPCEDLTDDDIRTAIQNATGPRSALFVPDVPFEVLVRRQISRLLDPSLQCARFIFEELIKISHRCMMNELQRFPVLRKRMDEVIGDFLREGLEPSEAMIGDIIDMEMDYINTSHPNFIGGTKAVEAAMHQVKSSRIPHPVARPKDTVEPDRTSSSTSQVKSRSFLGRQANGIVTDQGVVSADAEKAQPAANASDTRWGIPSIFRGGDTRAVTKDSLLNKPFSEAVEDMSHNLSMIYLKEPPAVLRPTETHSEQEAVEIQITKLLLRSYYDIVRKNIEDSVPKAIMHFLVNHTKRELHNVFIKKLYRENLFEEMLQEPDEIAVKRKRTQETLHVLQQAYRTLDELPLEADSVSAGMSKHQELLTSSKYSTSSSYSASPSTTRRSRRAGDQHQNGYGF

SEQ ID NO: 4586 - protein, 563 aa, Arabidopsis thaliana
MDKGTDARKLLLGNVVPLRLGYVGVVNRCQEDILLNRTVKEALLAEEKFFRSHPVYHGLADRLGVPQLAKKLNQILVQHIKVLLPDLKSRISNALVATAKEHQSYGELTESRAGQGALLLNFLSKYCEAYSSLLEGKSEEMSTSELSGGARIHYIFQSIFVKSLEEVDPCEDLTDDDIRTAIQNATGPRSALFVPDVPFEVLVRRQISRLLDPSLQCARFIFEELIKISHRCMMNELQRFPVLRKRMDEVIGDFLREGLEPSEAMIGDIIDMEMDYINTSHPNFIGGTKAVEAAMHQVKSSRIPHPVARPKDTVEPDRTSSSTSQVKSRSFLGRQANGIVTDQGVVSADAEKAQPAANASDTRWGIPSIFRGGDTRAVTKDSLLNKPFSEAVEDMSHNLSMIYLKEPPAVLRPTETHSEQEAVEIQITKLLLRSYYDIVRKNIEDSVPKAIMHFLVNHTKRELHNVFIKKLYRENLFEEMLQEPDEIAVKRKRTQETLHVLQQAYRTLDELPLEADSVSAGMSKHQELLTSSKYSTSSSYSASPSTTRRSRRAGDQHQNGYGF

SEQ ID NO: 4587 - DNA, 2096 bp, Arabidopsis thaliana
tggagaagaaagtccactaaagaaaagagaatagatatagatcaatggcgtttgaagctcttaccggaatcaatggtgatctaatcaccagatcatggtcagcctcgaagcaagcttacctaaccgagcgctatcacaaggaagaagcaggagcagtcgtaatcttcgctttccaaccatctttctcagagaaagatttcttcgatccggacaataaatcttcctttggagaaatcaagttgaaccgtgttcagtttccttgtatgaggaaaatcggtaaaggtgatgtagctactgttaacgaagctttcctcaagaatcttgaagctatcattgatccaagaacctcatttcaagcttctgtggaaatggctgtgaggagtagaaaacagatagtgttcacaggacattcctcaggaggtgcaactgcaatcttagcaacagtttggtatttggagaaatacttcatacgcaatccaaatgtttaccttgagcctcgttgtgtgacatttggagctcctttggttggtgactctatcttcagtcacgcacttgggagagaaaaatggagccggttctttgtgaactttgtctcaagattcgatattgtccctcggattatgcttgctcgaaaggcgtctgtagaggaaactttgcctcatgttcttgcccaattggatcccagaaagtcttccgtccaagagagtgaacagagaataacagagttttacacaagggtgatgcgagacacatcaactgttgcaaaccaagctgtttgtgaattgactggaagcgcagaggcgtttttagagaccctttctagtttccttgagctaagtccttatagacccgccggtacttttgttttctctacagagaagagattggttgcagtgaacaactcggacgccattcttcaaatgctgttttacacttctcaagccagcgatgaacaagaatggtctctaattccatttcgaagtatcagagatcatcatagctatgaggaactggtacagtcgatgggaaagaagttgtttaatcatttggatggagaaaactcaatagagtctacgctcaatgaccttggagtgagcacaagaggcagacagtacgttcaagctgcattagaggaagagaagaaacgagtagagaatcagaagaagattattcaggtgatcgagcaagagaggtttttaaagaaactagcatggatagaagatgaatacaagccaaagtgtcaagcccataaaaatgggtattatgattccttcaaagtttcaaatgaagagaatgacttcaaagcaaacgtcaagagagctgagttagccggtgtttttgacgaggtgcttggtttaatgaagaaatgtcaacttccagatgagttcgaaggggacatagattggatcaagttagcaactcgataccgcagattagttgagcctcttgatattgcaaactaccatcgacatttaaagaacgaagacacagggccgtacatgaaaagaggaagaccaacccgctacatatatgctcagagaggctacgaacattatatactgaagccaaacggaatgattgcagaagatgtattttggaacaaggtaaatggtcttaacttagggttacagctagaagaaattcaagagactctaaagaattcgggatccgagtgcggatcatgcttttgggctgaggttgaagaactcaaaggaaagccatacgaggaagttgaggtaagagttaagacattagaagggatgcttggagaatggatcacagacggggaggtagatgataaggaaatatttctggagggttcaacgtttagaaagtggtggattacgcttcccaaaaatcacaaatcgcattctcctctgcgagactatatgatggatgaaataacagatacctgaaccttaggtggtggagtatttaagctattagaacacttgcttctcttaatttgtgcaataagaaatgtttatcaatctggtttccacttcatgatgatcttagaataagaaacatgttgtatgatcattgtgaagtaatgtaatagctctctattctaatgtcaaatttggtttccactt

SEQ ID NO: 4588 - protein, 623 aa, Arabidopsis thaliana
MAFEALTGINGDLITRSWSASKQAYLTERYHKEEAGAVVIFAFQPSFSEKDFFDPDNKSSFGEIKLNRVQFPCMRKIGKGDVATVNEAFLKNLEAIIDPRTSFQASVEMAVRSRKQIVFTGHSSGGATAILATVWYLEKYFIRNPNVYLEPRCVTFGAPLVGDSIFSHALGREKWSRFFVNFVSRFDIVPRIMLARKASVEETLPHVLAQLDPRKSSVQESEQRITEFYTRVMRDTSTVANQAVCELTGSAEAFLETLSSFLELSPYRPAGTFVFSTEKRLVAVNNSDAILQMLFYTSQASDEQEWSLIPFRSIRDHHSYEELVQSMGKKLFNHLDGENSIESTLNDLGVSTRGRQYVQAALEEEKKRVENQKKIIQVIEQERFLKKLAWIEDEYKPKCQAHKNGYYDSFKVSNEENDFKANVKRAELAGVFDEVLGLMKKCQLPDEFEGDIDWIKLATRYRRLVEPLDIANYHRHLKNEDTGPYMKRGRPTRYIYAQRGYEHYILKPNGMIAEDVFWNKVNGLNLGLQLEEIQETLKNSGSECGSCFWAEVEELKGKPYEEVEVRVKTLEGMLGEWITDGEVDDKEIFLEGSTFRKWWITLPKNHKSHSPLRDYMMDEITDT

SEQ ID NO: 4589 - protein, 550 aa, Arabidopsis thaliana
MRKIGKGDVATVNEAFLKNLEAIIDPRTSFQASVEMAVRSRKQIVFTGHSSGGATAILATVWYLEKYFIRNPNVYLEPRCVTFGAPLVGDSIFSHALGREKWSRFFVNFVSRFDIVPRIMLARKASVEETLPHVLAQLDPRKSSVQESEQRITEFYTRVMRDTSTVANQAVCELTGSAEAFLETLSSFLELSPYRPAGTFVFSTEKRLVAVNNSDAILQMLFYTSQASDEQEWSLIPFRSIRDHHSYEELVQSMGKKLFNHLDGENSIESTLNDLGVSTRGRQYVQAALEEEKKRVENQKKIIQVIEQERFLKKLAWIEDEYKPKCQAHKNGYYDSFKVSNEENDFKANVKRAELAGVFDEVLGLMKKCQLPDEFEGDIDWIKLATRYRRLVEPLDIANYHRHLKNEDTGPYMKRGRPTRYIYAQRGYEHYILKPNGMIAEDVFWNKVNGLNLGLQLEEIQETLKNSGSECGSCFWAEVEELKGKPYEEVEVRVKTLEGMLGEWITDGEVDDKEIFLEGSTFRKWWITLPKNHKSHSPLRDYMMDEITDT

SEQ ID NO: 4590 - protein, 515 aa, Arabidopsis thaliana
MAVRSRKQIVFTGHSSGGATAILATVWYLEKYFIRNPNVYLEPRCVTFGAPLVGDSIFSHALGREKWSRFFVNFVSRFDIVPRIMLARKASVEETLPHVLAQLDPRKSSVQESEQRITEFYTRVMRDTSTVANQAVCELTGSAEAFLETLSSFLELSPYRPAGTFVFSTEKRLVAVNNSDAILQMLFYTSQASDEQEWSLIPFRSIRDHHSYEELVQSMGKKLFNHLDGENSIESTLNDLGVSTRGRQYVQAALEEEKKRVENQKKIIQVIEQERFLKKLAWIEDEYKPKCQAHKNGYYDSFKVSNEENDFKANVKRAELAGVFDEVLGLMKKCQLPDEFEGDIDWIKLATRYRRLVEPLDIANYHRHLKNEDTGPYMKRGRPTRYIYAQRGYEHYILKPNGMIAEDVFWNKVNGLNLGLQLEEIQETLKNSGSECGSCFWAEVEELKGKPYEEVEVRVKTLEGMLGEWITDGEVDDKEIFLEGSTFRKWWITLPKNHKSHSPLRDYMMDEITDT

SEQ ID NO: 4591 - DNA, 2336 bp, Arabidopsis thaliana
aaagtctctctctctctctctctgcaaacactgattcaacaaagaagaatcaaaatctccagaaattcgatcgtcgttgaagattcgtctcagtttgtgtagtttctagcttagtgttttggaatcgaaaatggcgggtcgagttaaagaagacgagaagaacgagaagattattaggagtcttcttaaacttcctgagaataagaggtgtataaactgtaacagccttggaccacaatatgtttgcactactttctggacttttgtttgtaccaactgcagtggaatacatcgtgagtttacacatcgtgttaaatcgatatcaatggcgaaatttacctcacaagaagttactgctttgaaagaaggtggaaatcagcatgctaaggatatttattttaaaggattggatcaacagcggcaatcagtgcctgacggaagtaatgttgagcggttaagggacttcatcagacatgtgtatgtaaataaaaggtatacgaatgagaagaatgatgataagtctccaagtgagacacgtagttctagtggttctcggagtccaccttatgaagatggatatgaccgtcgttacggcgacagatcaagtcctggtgggagaagtccagggttcgagacgggtagtaggaatgctgttaataacagaaaaagccctgctcgtcctgagatcctgaatgattggcgcagagaggataggtttgggggtagaaaaacatcagaagagggctcccagtcacctgagcaagtaaaagacttgggttcagctagccctcctgtagctcgacctgttagggaaattttgggtgacagtgttattcctcttcgtgtgggagagcctccaaaaccccctgtcagtagaaataccgatgcttcagcacatgcaaagtcaggtacatcattgagtagtttaatgtccacaaatgagaagccaccagaagtgaagctggagactgctttaagcctgattgattttgatactgattttgaaactcctgctccatctgttgcaattcaagcaccactatcgaccacatctcagcctgctccacagccaacaacttcatctaatgataactgggcatctttcgatgctgcacccagtgcccctagtttaaatgtatcgcaaccaccacccagtggaaacacactggattcacttctctcccagttggcagtgacttcttctgtgccaggtcaggcgtctacaccatctaacggacctgtgaatcttggtcattccacgtcacaaatctttgcaccctttcagaatgagcattcgagtgaacagccatggaacacagcacttgcatctaatgtacagaggtcaatgagtgcaccgtcattgcaacctcttcaaggagtcccttctggtggcctgcagtcttctgaagttaaaccttcgggaagatcagaattacctgcggatttattcgctgtaaactacccatcataccatgcaccagtgcctggatggcaagctggtccacctcatgctatgcactatggcatgcagcagtataataaccccgtgccgtatcagaatgttccgcagccaggcaagtcaatgaacccttttgacttcagccctgggccgccatcacaaacacaaacggaaaatatgttcccttccatggctcctctgcaaggtgcattacctccttcaggcatgatgccttctcaaggagtacacaatcaattcaatataccttctcaaggctcagcccatccatctgcaatgccaccaaggtacatgccttctcaaataccaggaagcatgccacctagcaatgtaaacccaattggcgacataaacacgtcatatgacactcaacaaacatatcaaaattttggaagctcgtttgctgctgcagttcctttgaacccaccttctttccaatcaggaggaaacccatttgggtaagaaagagcgagaatattagctcacgagagctatgttatgcatgaggattgcgtttgtgttctaaggtgtagtataagactataaggaggtattaaatcgaatacaaacatgggttaaatagggtgaacgagggaaggtacgggccatgaacctgaagaagaattgggttttgtgagagtgttagattactgtattttttataagcatcaaaatgatttgaaataggtttgatatttattctttggtgtttctatattccatttccattttgttgtttgtccttcagaaaatcttcaggctcctcctgtgttgtatgattttgtataacagtttacacattgaccataaagtcttgtcaaaattgaataaggtaatttagaattgcttttatgagact

SEQ ID NO: 4592 - protein, 602 aa, Arabidopsis thaliana
MAGRVKEDEKNEKIIRSLLKLPENKRCINCNSLGPQYVCTTFWTFVCTNCSGIHREFTHRVKSISMAKFTSQEVTALKEGGNQHAKDIYFKGLDQQRQSVPDGSNVERLRDFIRHVYVNKRYTNEKNDDKSPSETRSSSGSRSPPYEDGYDRRYGDRSSPGGRSPGFETGSRNAVNNRKSPARPEILNDWRREDRFGGRKTSEEGSQSPEQVKDLGSASPPVARPVREILGDSVIPLRVGEPPKPPVSRNTDASAHAKSGTSLSSLMSTNEKPPEVKLETALSLIDFDTDFETPAPSVAIQAPLSTTSQPAPQPTTSSNDNWASFDAAPSAPSLNVSQPPPSGNTLDSLLSQLAVTSSVPGQASTPSNGPVNLGHSTSQIFAPFQNEHSSEQPWNTALASNVQRSMSAPSLQPLQGVPSGGLQSSEVKPSGRSELPADLFAVNYPSYHAPVPGWQAGPPHAMHYGMQQYNNPVPYQNVPQPGKSMNPFDFSPGPPSQTQTENMFPSMAPLQGALPPSGMMPSQGVHNQFNIPSQGSAHPSAMPPRYMPSQIPGSMPPSNVNPIGDINTSYDTQQTYQNFGSSFAAAVPLNPPSFQSGGNPFG

SEQ ID NO: 4593 - protein, 537 aa, Arabidopsis thaliana
MAKFTSQEVTALKEGGNQHAKDIYFKGLDQQRQSVPDGSNVERLRDFIRHVYVNKRYTNEKNDDKSPSETRSSSGSRSPPYEDGYDRRYGDRSSPGGRSPGFETGSRNAVNNRKSPARPEILNDWRREDRFGGRKTSEEGSQSPEQVKDLGSASPPVARPVREILGDSVIPLRVGEPPKPPVSRNTDASAHAKSGTSLSSLMSTNEKPPEVKLETALSLIDFDTDFETPAPSVAIQAPLSTTSQPAPQPTTSSNDNWASFDAAPSAPSLNVSQPPPSGNTLDSLLSQLAVTSSVPGQASTPSNGPVNLGHSTSQIFAPFQNEHSSEQPWNTALASNVQRSMSAPSLQPLQGVPSGGLQSSEVKPSGRSELPADLFAVNYPSYHAPVPGWQAGPPHAMHYGMQQYNNPVPYQNVPQPGKSMNPFDFSPGPPSQTQTENMFPSMAPLQGALPPSGMMPSQGVHNQFNIPSQGSAHPSAMPPRYMPSQIPGSMPPSNVNPIGDINTSYDTQQTYQNFGSSFAAAVPLNPPSFQSGGNPFG

SEQ ID NO: 4594 - protein, 336 aa, Arabidopsis thaliana
MSTNEKPPEVKLETALSLIDFDTDFETPAPSVAIQAPLSTTSQPAPQPTTSSNDNWASFDAAPSAPSLNVSQPPPSGNTLDSLLSQLAVTSSVPGQASTPSNGPVNLGHSTSQIFAPFQNEHSSEQPWNTALASNVQRSMSAPSLQPLQGVPSGGLQSSEVKPSGRSELPADLFAVNYPSYHAPVPGWQAGPPHAMHYGMQQYNNPVPYQNVPQPGKSMNPFDFSPGPPSQTQTENMFPSMAPLQGALPPSGMMPSQGVHNQFNIPSQGSAHPSAMPPRYMPSQIPGSMPPSNVNPIGDINTSYDTQQTYQNFGSSFAAAVPLNPPSFQSGGNPFG

SEQ ID NO: 4595 - DNA, 1198 bp, Arabidopsis thaliana
atatcagtcacaccaccaacaaagtagttccctttttcttcaatcactagctcctccccaaggaactaagaacaaagttgcttcttcttcttctccttcctcttgtgctcctgcctattctctaatggagatccatcataacgaaatcgttgcaggaggaatcaacccttgctcctcttcctcttcttcagcctctgtcaaggccaagatcatggctcatcctcactaccaccgcctcttggccgcttatgtcaattgtcagaaggttggagcaccaccggaggttgtggcgaggctagaggaggcatgctcgtctgccgcagccgctgccgcatctatgggaccaacaggatgtctaggtgaagatccagggcttgatcaattcatggaagcttactgtgaaatgctcgttaagtatgagcaagagctctccaaacctttcaaggaagctatggtcttccttcaacgtgtcgagtgtcaattcaaatccctctctctatcctcaccttcctctttctccggttatggagagacagcaattgataggaacaataatgggtcatccgaggaagaagtcgatatgaacaatgaatttgtagatccacaagctgaggatagagagcttaaaggacagctcttgcgcaagtacagtggttacttagggagcctcaagcaagagttcatgaagaagaggaagaaaggaaagctccctaaagaagctcgtcaacaactgcttgattggtggagccgtcactacaaatggccttacccttcggagcaacaaaagctcgcccttgcggaatcaacggggctggaccagaaacagataaacaattggttcataaaccagaggaaacggcattggaagccgtcggaggacatgcagtttgtagtaatggacgcaacacatcctcaccattacttcatggataatgtcttgggcaatcctttcccaatggatcacatctcctccaccatgctttgatcgatcctttaaaacgtttatttcattatatttataatcgttaaacagcttataatatgtataatctatggttctcggtatacttggaacatatgaaacatgttccgattgatgaacaagcgtttgatgttgtggtgtgtatccttttgtgttgttctattgttatgcgaaattcctattcctattataatgatagtaaagcttttttgatct

SEQ ID NO: 4596 - protein, 327 aa, Arabidopsis thaliana
YQSHHQQSSSLFLQSLAPPQGTKNKVASSSSPSSCAPAYSLMEIHHNEIVAGGINPCSSSSSSASVKAKIMAHPHYHRLLAAYVNCQKVGAPPEVVARLEEACSSAAAAAASMGPTGCLGEDPGLDQFMEAYCEMLVKYEQELSKPFKEAMVFLQRVECQFKSLSLSSPSSFSGYGETAIDRNNNGSSEEEVDMNNEFVDPQAEDRELKGQLLRKYSGYLGSLKQEFMKKRKKGKLPKEARQQLLDWWSRHYKWPYPSEQQKLALAESTGLDQKQINNWFINQRKRHWKPSEDMQFVVMDATHPHHYFMDNVLGNPFPMDHISSTML

SEQ ID NO: 4597 - protein, 286 aa, Arabidopsis thaliana
MEIHHNEIVAGGINPCSSSSSSASVKAKIMAHPHYHRLLAAYVNCQKVGAPPEVVARLEEACSSAAAAAASMGPTGCLGEDPGLDQFMEAYCEMLVKYEQELSKPFKEAMVFLQRVECQFKSLSLSSPSSFSGYGETAIDRNNNGSSEEEVDMNNEFVDPQAEDRELKGQLLRKYSGYLGSLKQEFMKKRKKGKLPKEARQQLLDWWSRHYKWPYPSEQQKLALAESTGLDQKQINNWFINQRKRHWKPSEDMQFVVMDATHPHHYFMDNVLGNPFPMDHISSTML

SEQ ID NO: 4598 - protein, 257 aa, Arabidopsis thaliana
MAHPHYHRLLAAYVNCQKVGAPPEVVARLEEACSSAAAAAASMGPTGCLGEDPGLDQFMEAYCEMLVKYEQELSKPFKEAMVFLQRVECQFKSLSLSSPSSFSGYGETAIDRNNNGSSEEEVDMNNEFVDPQAEDRELKGQLLRKYSGYLGSLKQEFMKKRKKGKLPKEARQQLLDWWSRHYKWPYPSEQQKLALAESTGLDQKQINNWFINQRKRHWKPSEDMQFVVMDATHPHHYFMDNVLGNPFPMDHISSTML

SEQ ID NO: 4599 - DNA, 1185 bp, Arabidopsis thaliana
caccgatgtggatgttgaggttatccttgataaagtgatgatgctgttccgttatttacaagagaaagatgtctttgagaagtactacaagcagcatttggctaaaaggcttctctcaggcaaaactgtgtcagatgacgcagaaaggagtttaatagtgaaactaaagacagaatgtggctatcagttcacttcaaaattggaaggcatgttcactgacatgaagacttcagaggacacaatgcgtgggttttatggcagtcaccccgagctttcagaaggacctacacttattgttcaggtacttacaactggttcttggccaacacagcctgcagtaccttgtaatctcccagctgaagtttcagttctctgtgagaagttccgttcttactaccttgggacacataccggtagaagattgtcctggcaaacaaacatgggcacagcagatatcaaagccatctttggaaagggtcagaaacatgaactgaacgtgtcgactttccagatgtgtgttctcatgttgttcaacaattctgatcgactcagctacaaagagatcgaacaggctacagaaatcccggcagcagatcttaaacgctgtttgcagtcgctagcttgtgtaaagggcaaaaacgtgataaagaaagaacccatgagcaaagacataggagaggaggatttgttcgttgtgaacgacaagttcactagcaagttttacaaagtgaagatcggaactgtggttgcccaaaaggaaacagaaccggagaagcaagagacgagacagagagtggaggaagacagaaaacctcagattgaagcagccatcgtaaggatcatgaagtccaggaaaatactagaccacaacaacataatcgccgaggtgacgaaacagttgcagccacggttcctagctaatcccacggagataaagaagagaatcgagtcgctcattgaacgagatttcttggaaagggatagtacagaccggaaactttaccgctatctagcctaaataagttgaataccacaacccaaaaaaaaaaggctttactctgtttctttctttgctttatttccttatgtttgatgtaaaatcttttgaactgtacggtagtcggtaagaacgaaccaacacagcgtcactaccggtttaatcgaatatacatttgtttcctttcc

SEQ ID NO: 4600 - protein, 338 aa, Arabidopsis thaliana
TDVDVEVILDKVMMLFRYLQEKDVFEKYYKQHLAKRLLSGKTVSDDAERSLIVKLKTECGYQFTSKLEGMFTDMKTSEDTMRGFYGSHPELSEGPTLIVQVLTTGSWPTQPAVPCNLPAEVSVLCEKFRSYYLGTHTGRRLSWQTNMGTADIKAIFGKGQKHELNVSTFQMCVLMLFNNSDRLSYKEIEQATEIPAADLKRCLQSLACVKGKNVIKKEPMSKDIGEEDLFVVNDKFTSKFYKVKIGTVVAQKETEPEKQETRQRVEEDRKPQIEAAIVRIMKSRKILDHNNIIAEVTKQLQPRFLANPTEIKKRIESLIERDFLERDSTDRKLYRYLA

SEQ ID NO: 4601 - protein, 326 aa, Arabidopsis thaliana
MMLFRYLQEKDVFEKYYKQHLAKRLLSGKTVSDDAERSLIVKLKTECGYQFTSKLEGMFTDMKTSEDTMRGFYGSHPELSEGPTLIVQVLTTGSWPTQPAVPCNLPAEVSVLCEKFRSYYLGTHTGRRLSWQTNMGTADIKAIFGKGQKHELNVSTFQMCVLMLFNNSDRLSYKEIEQATEIPAADLKRCLQSLACVKGKNVIKKEPMSKDIGEEDLFVVNDKFTSKFYKVKIGTVVAQKETEPEKQETRQRVEEDRKPQIEAAIVRIMKSRKILDHNNIIAEVTKQLQPRFLANPTEIKKRIESLIERDFLERDSTDRKLYRYLA

SEQ ID NO: 4602 - protein, 325 aa, Arabidopsis thaliana
MLFRYLQEKDVFEKYYKQHLAKRLLSGKTVSDDAERSLIVKLKTECGYQFTSKLEGMFTDMKTSEDTMRGFYGSHPELSEGPTLIVQVLTTGSWPTQPAVPCNLPAEVSVLCEKFRSYYLGTHTGRRLSWQTNMGTADIKAIFGKGQKHELNVSTFQMCVLMLFNNSDRLSYKEIEQATEIPAADLKRCLQSLACVKGKNVIKKEPMSKDIGEEDLFVVNDKFTSKFYKVKIGTVVAQKETEPEKQETRQRVEEDRKPQIEAAIVRIMKSRKILDHNNIIAEVTKQLQPRFLANPTEIKKRIESLIERDFLERDSTDRKLYRYLA

SEQ ID NO: 4603 - DNA, 1428 bp, Arabidopsis thaliana
aagtgcctcagatatagtcttgacagagccaggtcttagtgtcattgtcagcgctgtgctcaccagtcgagctatctttcaaagaatgaagaactacacaatctacgcagtctccatcacaatccgtatagtcctcggcttcatgcttgtggctcttatttgggaatttgacttttctcccttcatggtcctcattattgcaatcctaaacgacggaaccatcatgaccatttccaaagatagagtcaagccttccccaattcctgattcatggaagcttaaagagattttcgctactggagttgttcttggaacctacatggctctcgtcactgttgtcttcttctggctagcccatgacacaaccttcttctcggataaatttggagtaaggtcgttacaaggcaaagacgaggaattaatagcagtattgtatttgcaagtcagtataattagtcaggctctcatctttgtcactcgatcaaggagctggtcctttgtcgaacgcccgggacttcttcttcttattgctttctttgttgcccaattgattgcaaccttaatagctacttatgcgcattgggaatttgcgagaatcaaaggttgtggatggggatggtgtggagtcatctggatctacagtatcgtcacatacattcctcttgatatcctcaagtttatcactcgctatacccttagtggcaaagcttggaacaacatgattgaaaataggactgcattcacgaccaagaaagactacggtaggggagaaagggaggctcaatgggctctagctcaacgtacgctccatggacttaaaccgccggagtcaatgttcgaagacacggcaacctacaccgagctctctgagatcgctgaacaggctaagaaacgtgcagaagttgctaggctaagagaagtgcacactctcaaaggccacgttgagtcggtagtgaagctcaagggtcttgacattgataatcttaaccaacactacaccgtctaagccaaactactatgacatttcaattattcgaatgggacacatgacaacgttctaagcaataaaagttggagaaaatggaatcataaagataaaaagaagaaaaagaaagttccggtttggattctccttcggttttgatttcgtttttcttggtaaaaacatgatataatcagcggaatgctgcaaaaaaaaagcaaaaaagaataagaagaagatggtaggatgaatgaatgagatggaataaaggacaagaagagacatgtcgtcatgtgatacactcgtattcattacttactattagtaatcccatattttttggttataagctttttctctatgttctttcttttttatgagaaattgaatttgataaatgataggaataaaaaaaaattcaagaaaaatatatgattttattcggc

SEQ ID NO: 4604 - protein, 334 aa, Arabidopsis thaliana
SASDIVLTEPGLSVIVSAVLTSRAIFQRMKNYTIYAVSITIRIVLGFMLVALIWEFDFSPFMVLIIAILNDGTIMTISKDRVKPSPIPDSWKLKEIFATGVVLGTYMALVTVVFFWLAHDTTFFSDKFGVRSLQGKDEELIAVLYLQVSIISQALIFVTRSRSWSFVERPGLLLLIAFFVAQLIATLIATYAHWEFARIKGCGWGWCGVIWIYSIVTYIPLDILKFITRYTLSGKAWNNMIENRTAFTTKKDYGRGEREAQWALAQRTLHGLKPPESMFEDTATYTELSEIAEQAKKRAEVARLREVHTLKGHVESVVKLKGLDIDNLNQHYTV

SEQ ID NO: 4605 - protein, 306 aa, Arabidopsis thaliana
MKNYTIYAVSITIRIVLGFMLVALIWEFDFSPFMVLIIAILNDGTIMTISKDRVKPSPIPDSWKLKEIFATGVVLGTYMALVTVVFFWLAHDTTFFSDKFGVRSLQGKDEELIAVLYLQVSIISQALIFVTRSRSWSFVERPGLLLLIAFFVAQLIATLIATYAHWEFARIKGCGWGWCGVIWIYSIVTYIPLDILKFITRYTLSGKAWNNMIENRTAFTTKKDYGRGEREAQWALAQRTLHGLKPPESMFEDTATYTELSEIAEQAKKRAEVARLREVHTLKGHVESVVKLKGLDIDNLNQHYTV

SEQ ID NO: 4606 - protein, 287 aa, Arabidopsis thaliana
MLVALIWEFDFSPFMVLIIAILNDGTIMTISKDRVKPSPIPDSWKLKEIFATGVVLGTYMALVTVVFFWLAHDTTFFSDKFGVRSLQGKDEELIAVLYLQVSIISQALIFVTRSRSWSFVERPGLLLLIAFFVAQLIATLIATYAHWEFARIKGCGWGWCGVIWIYSIVTYIPLDILKFITRYTLSGKAWNNMIENRTAFTTKKDYGRGEREAQWALAQRTLHGLKPPESMFEDTATYTELSEIAEQAKKRAEVARLREVHTLKGHVESVVKLKGLDIDNLNQHYTV

SEQ ID NO: 4607 - DNA, 2269 bp, Arabidopsis thaliana
atgtggaagtttaaaccttttgctcaaaaagaacctgcgggtctcgaaggtcgatttctcgagataggaaatctgaaagttcaagttagaaatgtcattgcggaaggaggtttctccagtgtttacttagctcaagatgtaaatcacgcgtcaaagcaatatgctttgaagcacatgatatgcaatgacgaggagtcacttgaactcgtaatgaaagagatctcggttctgaaatccctcaagggacatccaaatgttgtcacgctctacgcacatggtatcttggatatggggaggaataaaaaagaagctcttttggctatggatttttgtggtaaatctcttgtggatgtgcttgagaatagaggtgctggttactttgaagagaaacaagctcttacgatttttagagatgtgtgtaatgctgtctttgcaatgcattgtcaatccccacgcattgctcacagagacttgaaggctgagaatcttctattgagctcagatggacaatggaaattgtgtgattttggaagcgtttcgacaaatcacaagatttttgaaagagcagaagagatgggaattgaagaagataatattagaaaatacacaacaccaacatatagagctcctgagatgtgggatctctttcgaagggagatgataagcgagaaggtcgatatatgggctcttggatgtctcttgtttcggatatgctatttcaagaatgcatttgatggagaatcaaagctgcaaatcttaaacgggaattatcgtattccagaatcgcctaaatacagtgtatttattacggatctcatcaaagaaatgctccaagcttcacccgatgaacgaccagatattacacagatttggtttcgtgtcaatgagcagcttcctgctaatttacagaaatcattaccggatcgaccacctgaaatgcaatctactggagtccatgatggctcatcaaaatcagcaactaaaccttctccagcacctcgtagaagtccgccaccgccgccaccatcttctggagaatcagatagtggaggaccgctcggtgccttttgggcgactcagcatgctaaaacctcagttgtatcagaagataacaaaaacatgcctaaatttgatgaaccaaacagtaacacatctaaatctgaaagagttcgtgtggatagtcatcaacccaaaaaaccaagtcctgtgagaggagaggctcgtggtattcaaagaaataaagatcttgaaactacgatttctcagaagaatacaactcctgctgcagccaataacatgacaagagtgtccaaggatgatgccttcaactcgtttgttgctgactttgataccacaaagttcgataatggtaataaacctggcaaagaagaggcattggaagctgagatacagaggttaaaagacgagttgaagcaaacaaaatcagagaaggcagaaataactgctaagtttgaaaagctttctgctatctgcagatcgcaaaggcaagagttgcaggatctcaaacaaacacttgcctctaaaagtgcctcaccgtcaccgagcagagactcttcacaaaatcaaccctctccagggatgcattccatgtcatcaactccatcgagagataagatggaaggaacaatgtgggaacttcaacaggacagatctaactggtcaactggcagctctgatacaaattcatggcaaccttttagtgatgaagcgaaacccgtgatggaatctgcatcaaagggtaacaataatacgattaatcagtctgtgagaaccagaagtaaaccagcttctgctgcaggtactcaaggttttgagccatggggtttcgagacagaatcctttagagccgctgcaacgtctgcagctgctacttctgcatctggaacacaaagatctatgggctctggaaacagcacttcacagagatatgggaactcaaagatgagagaaaaccagaaaacagctcaacctgctggatgggccggcttctaaaactcactcagatgcgcattgctatttcttcctcatgcaacaacaacagcttcatgttgctgccattacagaatcttgaatctttttgtagatgatgatcatcccctgtttttgtgctgctgctaaatataccccacccatatccattatgttttatgtagagtcttaaactttacacattctctgagctgtggccagatatctcagcttatggattattattggaaaaataaataattcaagattcagacagctt

SEQ ID NO: 4608 - protein, 670 aa, Arabidopsis thaliana
MWKFKPFAQKEPAGLEGRFLEIGNLKVQVRNVIAEGGFSSVYLAQDVNHASKQYALKHMICNDEESLELVMKEISVLKSLKGHPNVVTLYAHGILDMGRNKKEALLAMDFCGKSLVDVLENRGAGYFEEKQALTIFRDVCNAVFAMHCQSPRIAHRDLKAENLLLSSDGQWKLCDFGSVSTNHKIFERAEEMGIEEDNIRKYTTPTYRAPEMWDLFRREMISEKVDIWALGCLLFRICYFKNAFDGESKLQILNGNYRIPESPKYSVFITDLIKEMLQASPDERPDITQIWFRVNEQLPANLQKSLPDRPPEMQSTGVHDGSSKSATKPSPAPRRSPPPPPPSSGESDSGGPLGAFWATQHAKTSVVSEDNKNMPKFDEPNSNTSKSERVRVDSHQPKKPSPVRGEARGIQRNKDLETTISQKNTTPAAANNMTRVSKDDAFNSFVADFDTTKFDNGNKPGKEEALEAEIQRLKDELKQTKSEKAEITAKFEKLSAICRSQRQELQDLKQTLASKSASPSPSRDSSQNQPSPGMHSMSSTPSRDKMEGTMWELQQDRSNWSTGSSDTNSWQPFSDEAKPVMESASKGNNNTINQSVRTRSKPASAAGTQGFEPWGFETESFRAAATSAAATSASGTQRSMGSGNSTSQRYGNSKMRENQKTAQPAGWAGF

SEQ ID NO: 4609 - protein, 612 aa, Arabidopsis thaliana
MICNDEESLELVMKEISVLKSLKGHPNVVTLYAHGILDMGRNKKEALLAMDFCGKSLVDVLENRGAGYFEEKQALTIFRDVCNAVFAMHCQSPRIAHRDLKAENLLLSSDGQWKLCDFGSVSTNHKIFERAEEMGIEEDNIRKYTTPTYRAPEMWDLFRREMISEKVDIWALGCLLFRICYFKNAFDGESKLQILNGNYRIPESPKYSVFITDLIKEMLQASPDERPDITQIWFRVNEQLPANLQKSLPDRPPEMQSTGVHDGSSKSATKPSPAPRRSPPPPPPSSGESDSGGPLGAFWATQHAKTSVVSEDNKNMPKFDEPNSNTSKSERVRVDSHQPKKPSPVRGEARGIQRNKDLETTISQKNTTPAAANNMTRVSKDDAFNSFVADFDTTKFDNGNKPGKEEALEAEIQRLKDELKQTKSEKAEITAKFEKLSAICRSQRQELQDLKQTLASKSASPSPSRDSSQNQPSPGMHSMSSTPSRDKMEGTMWELQQDRSNWSTGSSDTNSWQPFSDEAKPVMESASKGNNNTINQSVRTRSKPASAAGTQGFEPWGFETESFRAAATSAAATSASGTQRSMGSGNSTSQRYGNSKMRENQKTAQPAGWAGF

SEQ ID NO: 4610 - protein, 600 aa, Arabidopsis thaliana
MKEISVLKSLKGHPNVVTLYAHGILDMGRNKKEALLAMDFCGKSLVDVLENRGAGYFEEKQALTIFRDVCNAVFAMHCQSPRIAHRDLKAENLLLSSDGQWKLCDFGSVSTNHKIFERAEEMGIEEDNIRKYTTPTYRAPEMWDLFRREMISEKVDIWALGCLLFRICYFKNAFDGESKLQILNGNYRIPESPKYSVFITDLIKEMLQASPDERPDITQIWFRVNEQLPANLQKSLPDRPPEMQSTGVHDGSSKSATKPSPAPRRSPPPPPPSSGESDSGGPLGAFWATQHAKTSVVSEDNKNMPKFDEPNSNTSKSERVRVDSHQPKKPSPVRGEARGIQRNKDLETTISQKNTTPAAANNMTRVSKDDAFNSFVADFDTTKFDNGNKPGKEEALEAEIQRLKDELKQTKSEKAEITAKFEKLSAICRSQRQELQDLKQTLASKSASPSPSRDSSQNQPSPGMHSMSSTPSRDKMEGTMWELQQDRSNWSTGSSDTNSWQPFSDEAKPVMESASKGNNNTINQSVRTRSKPASAAGTQGFEPWGFETESFRAAATSAAATSASGTQRSMGSGNSTSQRYGNSKMRENQKTAQPAGWAGF

SEQ ID NO: 4611 - DNA, 1509 bp, Arabidopsis thaliana
tctcgctatcaatcacacacatgcaacagtacaagatttgtcagagtccacagaaatcgatcttttcgagtcaagattttcagctctgttcaggactccggcggagatgaagagtgtgttgcgtattgcggcggcgatattctggctttggctgtttatcgtgttaggtgtgattgggagtgggaatgtgagagatacagacgatgagatctcgttactcgaaagtcaattggtggtgacatctccgtcgcagcttcttatggtgcctctcactttgattcaggctgctgcctccaaaggagctgtgtgcctggatggaacactacctggttatcatctacaccctggttctggatcaggagctaaccggtggctcatccaactcgagggtggaggatggtgcaacacacgtaggagctgtatcttccggaaaaccactcgccgtggttcatcaaatcatatggagaaagttttggccttcactggaatattgagcaataaatctaatgagaatcctgacttcttcaactggaacagagtcaaattgcgttactgcgatggtgcctctttcaccggcgatagtcaggatgagagctcacaactttactatagaggacaacgaatctggcattcagctatggaagaactactctctaaaggcatgcaaaaagcagaacaggctctactttctggatgttcagctgggggattagcttccatcctacactgcgatcagttcaaggaactatttccgggcactacgacagtgaaatgcttaagtgatgctggaatgtttatggatgcagtggatgtctctgggggccactcgctccggaaaatgttccaaggtgttgttacagtacagaacctccaaaaggaactgtccactgcttgtacaaagcatttggatccaacttcgtgcttctttccccagaacttggtttcaggcattaagactccaatgtttcttctcaatgcagcatatgacgcttggcaggtacaagagagtttagctccaccatcagttgacctaagcggctcttggaaggcatgcaaatctgatcactcgcattgtaattcatctcagatccagttcttccaagacttcaggactcatatggtagatgctgtaaagtctttcgcgacatcgacacataacggtgtgttcataaactcatgcttcgctcactgccaatctgaaagacaggacacttggtatgcaccagattctcctactcttcatggcaagaccgttgctgaatctgttggtgattggtactttgacagaacaacagtgaaagccattgactgtccttacccctgtgacaaaacatgtcacaatctcatcttcaagtgagatgacaaatgacatatactcttcaaactcaaacagcttacttgattcttataccatactaccattagtaacaacaattcctgaaaaaccgcatttcatcttttacataatatgtgctattttgactcaaataaagttagtttttcgtgtgt

SEQ ID NO: 4612 - protein, 451 aa, Arabidopsis thaliana
LAINHTHATVQDLSESTEIDLFESRFSALFRTPAEMKSVLRIAAAIFWLWLFIVLGVIGSGNVRDTDDEISLLESQLVVTSPSQLLMVPLTLIQAAASKGAVCLDGTLPGYHLHPGSGSGANRWLIQLEGGGWCNTRRSCIFRKTTRRGSSNHMEKVLAFTGILSNKSNENPDFFNWNRVKLRYCDGASFTGDSQDESSQLYYRGQRIWHSAMEELLSKGMQKAEQALLSGCSAGGLASILHCDQFKELFPGTTTVKCLSDAGMFMDAVDVSGGHSLRKMFQGVVTVQNLQKELSTACTKHLDPTSCFFPQNLVSGIKTPMFLLNAAYDAWQVQESLAPPSVDLSGSWKACKSDHSHCNSSQIQFFQDFRTHMVDAVKSFATSTHNGVFINSCFAHCQSERQDTWYAPDSPTLHGKTVAESVGDWYFDRTTVKAIDCPYPCDKTCHNLIFK

SEQ ID NO: 4613 - protein, 416 aa, Arabidopsis thaliana
MKSVLRIAAAIFWLWLFIVLGVIGSGNVRDTDDEISLLESQLVVTSPSQLLMVPLTLIQAAASKGAVCLDGTLPGYHLHPGSGSGANRWLIQLEGGGWCNTRRSCIFRKTTRRGSSNHMEKVLAFTGILSNKSNENPDFFNWNRVKLRYCDGASFTGDSQDESSQLYYRGQRIWHSAMEELLSKGMQKAEQALLSGCSAGGLASILHCDQFKELFPGTTTVKCLSDAGMFMDAVDVSGGHSLRKMFQGVVTVQNLQKELSTACTKHLDPTSCFFPQNLVSGIKTPMFLLNAAYDAWQVQESLAPPSVDLSGSWKACKSDHSHCNSSQIQFFQDFRTHMVDAVKSFATSTHNGVFINSCFAHCQSERQDTWYAPDSPTLHGKTVAESVGDWYFDRTTVKAIDCPYPCDKTCHNLIFK

SEQ ID NO: 4614 - protein, 365 aa, Arabidopsis thaliana
MVPLTLIQAAASKGAVCLDGTLPGYHLHPGSGSGANRWLIQLEGGGWCNTRRSCIFRKTTRRGSSNHMEKVLAFTGILSNKSNENPDFFNWNRVKLRYCDGASFTGDSQDESSQLYYRGQRIWHSAMEELLSKGMQKAEQALLSGCSAGGLASILHCDQFKELFPGTTTVKCLSDAGMFMDAVDVSGGHSLRKMFQGVVTVQNLQKELSTACTKHLDPTSCFFPQNLVSGIKTPMFLLNAAYDAWQVQESLAPPSVDLSGSWKACKSDHSHCNSSQIQFFQDFRTHMVDAVKSFATSTHNGVFINSCFAHCQSERQDTWYAPDSPTLHGKTVAESVGDWYFDRTTVKAIDCPYPCDKTCHNLIFK

SEQ ID NO: 4615 - DNA, 2480 bp, Arabidopsis thaliana
gtgggtcatttagtcatagatctctctctatcttccttcctcctcctcttactaggctcctcaactaaacgtcttcaatgctctctctctctctctctccattcttttacgacctcatagacttgaaaatttaccattctatttttcaaaacctttatattgatgagattaatatataaagtctccaaccacctagctaccagcctagagcaggaacattaatggtggtgcacaccatctcatgcttcacataccctaaagttcttcactccaagtttatgaggagatctagagagataatcatatagagaaagagagatctccagagaaaatccattgaagggaaaaaaacagtctgtctttcataattgctctttctataaatcttctctcttgtgttcttacctttcttctaaaaccattctctctctctttaacacttcatcactctttacggaaaatttcttattttcaccacctgagccatctctattttcgtcaaaacttctcaacttttgtgccaaaacgtcatttcttctgagggaataaacacaaaagaacaattttcccggaaaatcatggagatttccactgctctaatgattctttcggccatcacggcgtatttcttatggctcacattcatatctcgttgtcttaaaggtccacgtgtttggcccatattgggtagtctccctggtcttatagagaactgcgagcgaatgcacgactggatctccgacaacctccgtgcttgctccggtacgtatcagacatgcatctgcgccattccgtttctagctaagaaacaaggtctcgtcactgtcacttgcgatccaagaaacctcgagcatattctcaagaatcgttttgataattaccctaaaggtccaacgtggcaagccgttttccatgatcttctcggccaaggtatctttaactccgacggtgacacgtggctttttcagcgtaagaccgccgccttggagtttaccacaaggacactccgtcaagccatggctcgttgggttaatagagcgatcaaacttaggtttctgcctattcttgaaaatgctcggctcggctctgagccgattgatcttcaagatttgcttcttcggcttacatttgataatatctgcggcttaactttcgggaaagacccgcggacttgtgcaccgggtctaccggtgaacacattcgcggtggctttcgatcgagccacggaggcttcgctacaaaggtttatattgccggagatattatggaagttcaagagatggctccgactcggcttagaagtcagcttaacaagaagcttggtccaggtagataattatttgtctgagattattacgacacgtaaggaagaaatgatgactcagcataataatgggaaacaccacgacgatctcttatcgcggttcatcaagaagaaggagtcttactccgacgagaccctccagcgcgtggcgctcaacttcatcctagctggacgtgacacgtcatcagtcgcgctgagctggttcttctggttgattacgcagcatccggccatagaggataaaatcctccgtgagatctgtaccgttctggttgagacacgtggcgatgatgtggcgttatggacggacgagccgctttcgtgcgaagagcttgatcgattggtttttctcaaggcagcgttatcggagactttgaggctttatccttcggtgccggaggattcaaaacgcgccgtgaaagacgatgtgttaccggacgggacatttgtgccggcgggatcttcgattacttattcgatttactctgcggggaggatgaaatcgacttggggagaggattgtttggaattcaaaccagagagatggatttcgcaatcggacggtgggagattcatcaatcatgatccgtttaaattcgttgcgttcaatgctggccctaggatctgtctgggtaaggatctggcgtatctacaaatgaaatcaattgcatcggcggttttgctccgccaccggttgacggtggtgacggggcataaggtggaacagaagatgtcgttaactttattcatgaagtacggtcttttagttaacgtccacgaacgggatttaacggcaatcgcggcggatctacgagagtgtaaatctaacgtcgtcaatgacggggttggtaacggcgtttcaagttaggtagggtaggtgaatcaatcgcatctatcatttactgtctattagagagtggcactcgccttttgggcgcgtgttaaatacgccgttctttggccaactcagcaaggcacgcccagttgtcgtcggttggttggctgcataattcaatagaggtaattttgcaaagtgcgtttgttctgttcctttttttttactcatatgccttggtaattcagacagtaaaatttgatttcattattttgtaagcatctctcaatttgatttaataaatcttattctaaaggttcc

SEQ ID NO: 4616 - protein, 537 aa, Arabidopsis thaliana
MEISTALMILSAITAYFLWLTFISRCLKGPRVWPILGSLPGLIENCERMHDWISDNLRACSGTYQTCICAIPFLAKKQGLVTVTCDPRNLEHILKNRFDNYPKGPTWQAVFHDLLGQGIFNSDGDTWLFQRKTAALEFTTRTLRQAMARWVNRAIKLRFLPILENARLGSEPIDLQDLLLRLTFDNICGLTFGKDPRTCAPGLPVNTFAVAFDRATEASLQRFILPEILWKFKRWLRLGLEVSLTRSLVQVDNYLSEIITTRKEEMMTQHNNGKHHDDLLSRFIKKKESYSDETLQRVALNFILAGRDTSSVALSWFFWLITQHPAIEDKILREICTVLVETRGDDVALWTDEPLSCEELDRLVFLKAALSETLRLYPSVPEDSKRAVKDDVLPDGTFVPAGSSITYSIYSAGRMKSTWGEDCLEFKPERWISQSDGGRFINHDPFKFVAFNAGPRICLGKDLAYLQMKSIASAVLLRHRLTVVTGHKVEQKMSLTLFMKYGLLVNVHERDLTAIAADLRECKSNVVNDGVGNGVSS

SEQ ID NO: 4617 - protein, 530 aa, Arabidopsis thaliana
MILSAITAYFLWLTFISRCLKGPRVWPILGSLPGLIENCERMHDWISDNLRACSGTYQTCICAIPFLAKKQGLVTVTCDPRNLEHILKNRFDNYPKGPTWQAVFHDLLGQGIFNSDGDTWLFQRKTAALEFTTRTLRQAMARWVNRAIKLRFLPILENARLGSEPIDLQDLLLRLTFDNICGLTFGKDPRTCAPGLPVNTFAVAFDRATEASLQRFILPEILWKFKRWLRLGLEVSLTRSLVQVDNYLSEIITTRKEEMMTQHNNGKHHDDLLSRFIKKKESYSDETLQRVALNFILAGRDTSSVALSWFFWLITQHPAIEDKILREICTVLVETRGDDVALWTDEPLSCEELDRLVFLKAALSETLRLYPSVPEDSKRAVKDDVLPDGTFVPAGSSITYSIYSAGRMKSTWGEDCLEFKPERWISQSDGGRFINHDPFKFVAFNAGPRICLGKDLAYLQMKSIASAVLLRHRLTVVTGHKVEQKMSLTLFMKYGLLVNVHERDLTAIAADLRECKSNVVNDGVGNGVSS

SEQ ID NO: 4618 - protein, 489 aa, Arabidopsis thaliana
MHDWISDNLRACSGTYQTCICAIPFLAKKQGLVTVTCDPRNLEHILKNRFDNYPKGPTWQAVFHDLLGQGIFNSDGDTWLFQRKTAALEFTTRTLRQAMARWVNRAIKLRFLPILENARLGSEPIDLQDLLLRLTFDNICGLTFGKDPRTCAPGLPVNTFAVAFDRATEASLQRFILPEILWKFKRWLRLGLEVSLTRSLVQVDNYLSEIITTRKEEMMTQHNNGKHHDDLLSRFIKKKESYSDETLQRVALNFILAGRDTSSVALSWFFWLITQHPAIEDKILREICTVLVETRGDDVALWTDEPLSCEELDRLVFLKAALSETLRLYPSVPEDSKRAVKDDVLPDGTFVPAGSSITYSIYSAGRMKSTWGEDCLEFKPERWISQSDGGRFINHDPFKFVAFNAGPRICLGKDLAYLQMKSIASAVLLRHRLTVVTGHKVEQKMSLTLFMKYGLLVNVHERDLTAIAADLRECKSNVVNDGVGNGVSS

SEQ ID NO: 4619 - DNA, 1161 bp, Arabidopsis thaliana
atcataaacccaccgagacgatgtctctcatcatcgtcttcttcttcttctcactcttgctcacatccaatggacagttcttcgacgagagcaagaactatgaaggctcctccgatctcgttgaccttcaataccacttgggtccggtcatatcctcgccggtgacgagtctctacatcatttggtacggccgatggaacccaactcaccaatctataatccgagactttctctactctgtctctgcaccggcaccggctcagtacccgtcagtatccaactggtggaagacagtgaggctatacagagaccagacaggttccaacatcaccgacactcttgtcttatccggagagttccacgactcaacgtactctcatggatctcatctcactcgcttctctgttcagtctgtgatcagaactgccttgacttccaagttaccactaaacgctgtaaacggcttgtacttagtcttgacctcggatgatgtagagatgcaagagttctgcagagcgatttgcgggtttcattacttcactttcccaagcgttgtgggtgcaaccgtaccgtatgcttgggtgggcaacagtgagagacagtgtccagaaatgtgtgcgtacccatttgcacagcctaagccatttccggggagcgggtttgtagccagagagaagatgaaaccgccaaatggagaggtaggaatcgatgggatgatcagtgtgatagctcatgagctggcagaagtgtcgagtaacccgatgttaaacggatggtatggaggagaggacgcgacagcaccgacagagatagcggatttatgtttgggagtgtatgggtcaggaggaggaggaggctatatgggaagtgtgtataaggataggtggaggaatgtgtataatgtgaagggcgttaaaggaagaaagtatctaattcaatgggtttgggatcttaataggaacagatgctttggaccaaacgctatgaattagagactatcatgtttgttacctcttttcaccaaagccttgagcttgaagcttggggaaacctgtatatggtttatcttttccttgcctagtcgattctatgcatttgattgtttaagactacgaaatctaggtattactagctgtcaagattcacttgacaaagtttctg

SEQ ID NO: 4620 - protein, 329 aa, Arabidopsis thaliana
HKPTETMSLIIVFFFFSLLLTSNGQFFDESKNYEGSSDLVDLQYHLGPVISSPVTSLYIIWYGRWNPTHQSIIRDFLYSVSAPAPAQYPSVSNWWKTVRLYRDQTGSNITDTLVLSGEFHDSTYSHGSHLTRFSVQSVIRTALTSKLPLNAVNGLYLVLTSDDVEMQEFCRAICGFHYFTFPSVVGATVPYAWVGNSERQCPEMCAYPFAQPKPFPGSGFVAREKMKPPNGEVGIDGMISVIAHELAEVSSNPMLNGWYGGEDATAPTEIADLCLGVYGSGGGGGYMGSVYKDRWRNVYNVKGVKGRKYLIQWVWDLNRNRCFGPNAMN

SEQ ID NO: 4621 - protein, 323 aa, Arabidopsis thaliana
MSLIIVFFFFSLLLTSNGQFFDESKNYEGSSDLVDLQYHLGPVISSPVTSLYIIWYGRWNPTHQSIIRDFLYSVSAPAPAQYPSVSNWWKTVRLYRDQTGSNITDTLVLSGEFHDSTYSHGSHLTRFSVQSVIRTALTSKLPLNAVNGLYLVLTSDDVEMQEFCRAICGFHYFTFPSVVGATVPYAWVGNSERQCPEMCAYPFAQPKPFPGSGFVAREKMKPPNGEVGIDGMISVIAHELAEVSSNPMLNGWYGGEDATAPTEIADLCLGVYGSGGGGGYMGSVYKDRWRNVYNVKGVKGRKYLIQWVWDLNRNRCFGPNAMN

SEQ ID NO: 4622 - protein, 164 aa, Arabidopsis thaliana
MQEFCRAICGFHYFTFPSVVGATVPYAWVGNSERQCPEMCAYPFAQPKPFPGSGFVAREKMKPPNGEVGIDGMISVIAHELAEVSSNPMLNGWYGGEDATAPTEIADLCLGVYGSGGGGGYMGSVYKDRWRNVYNVKGVKGRKYLIQWVWDLNRNRCFGPNAMN

SEQ ID NO: 4623 - DNA, 747 bp, Arabidopsis thaliana
acaaaaacaacatagaacattaaatccatactctcttagaaaaagaaaaaaagaaatggcggatcatcaacaacatcagcaacaacaacaaccaataatgaggagtctccatgaatcatcaccatcgactcggcagatagtgagattcgtaacggcagctacgatcggcctatcactcctcgtgctctcaggactaacactaaccggaacggtgatcggtttgatcgtagcgacgccgttgatggttctgttcagcccggtgttggtaccggcagtgataacgatagggcttttgacgatgggattcctattctccggtggttgtggggtggcagcagctacggcgttaacgtggatttataagtacgttaccggaaaacacccgatgggagcggataaggtggattacgcgaggatgaggatagcggagaaagccaaagagttgggacattatacgcactcgcagccacaacaaacacaccaaaccacaacaactactcattagagtttaataattatatggatctatatgttgtattaagttttatgattatcctacgtatgtttttttaatactgttcttacctttttgaaaagatctatctaaaattttattttctattttccatacaattttttgtgtgtttaattgctgatcggtattttctgttttatgattgtgaaatagctagtgtaaggaaagatgataacgaattaagtaaattaatagatgccaattacttggcc

SEQ ID NO: 4624 - protein, 167 aa, Arabidopsis thaliana
QKQHRTLNPYSLRKRKKEMADHQQHQQQQQPIMRSLHESSPSTRQIVRFVTAATIGLSLLVLSGLTLTGTVIGLIVATPLMVLFSPVLVPAVITIGLLTMGFLFSGGCGVAAATALTWIYKYVTGKHPMGADKVDYARMRIAEKAKELGHYTHSQPQQTHQTTTTTH

SEQ ID NO: 4625 - protein, 149 aa, Arabidopsis thaliana
MADHQQHQQQQQPIMRSLHESSPSTRQIVRFVTAATIGLSLLVLSGLTLTGTVIGLIVATPLMVLFSPVLVPAVITIGLLTMGFLFSGGCGVAAATALTWIYKYVTGKHPMGADKVDYARMRIAEKAKELGHYTHSQPQQTHQTTTTTH

SEQ ID NO: 4626 - protein, 135 aa, Arabidopsis thaliana
MRSLHESSPSTRQIVRFVTAATIGLSLLVLSGLTLTGTVIGLIVATPLMVLFSPVLVPAVITIGLLTMGFLFSGGCGVAAATALTWIYKYVTGKHPMGADKVDYARMRIAEKAKELGHYTHSQPQQTHQTTTTTH

SEQ ID NO: 4627 - DNA, 2811 bp, Arabidopsis thaliana
acaatacaaaccagaggattaagtagcttctctcaacaaagcttcgaaattgatccgtaattagtgttcaatttcgtgttttttcctacattggattctcacttttagattttgtggggagggaaagataaaaggttggatttttatttttccggtgaggaaaaaatgacgacgagaggaagcagatcggagaaagtcaagagaattttccagcaattcgacgggaatctcgacggaggattaagccgtgaagagatgtcagctctcgtcgtagctgtgaaccctagggttaaattcagcgacgaacagataagcgcaattctcgatgaagtgtttcgaacctacgctgaattcatcgacggagataaaggtttgacctttgacggtcttctccgaacttacgacgacggtgctggagatgttgatcgtgatttcgacgctttagggattgagtttaacgaagagacaaagggtgcctctgaagcttcgtcatcttcgattactgatgagagagctgttgaagcgcagaagcagcagagaacggcagcttgggcggtttcgccgaaccatggtattgttttcgatgagacgtggaagcttgttgatgatttggagattttggttaagagattgaagtctaagcaggagaaagatgggaaattgaaagtggataataataatgttgatgcgttttctgaagctggatggtctagagagttaggaccgtcttcggatatttcggataagagaatctattgggaagaatcgagtcatgattatggagtgtttgtgaaggaattaggtgtgttgagaagtaaagcagatggtgctagatcaagagaagaagcttttgatggacatatggcgattggtaaggttttgtatgagcaccagttgtttaaagaagctcttgttagttttaagagagcttgtgagttgcaaccgactgatgtgagacctcatttcaaagctgggaattgtctttatgtattggggaagtataaagagtcgaaagacgagttcttgttggcgttggaagctgcggagtctggtgggaatcaatgggcttacttgcttcctcagatttatgtcaatcttggtatctctcttgaaggtgaaggtatggttttgagtgcttgtgagtattatagagaggctgcgattctttgtccaacgcattacagagccttgaagcttctaggtagtgctctgtttggtgtaggagagtatagagctgctgtgaaggctttagaggaagctatatatttgaaaccggattatgctgatgcgcattgtgatttggcttcgtcgcttcatgcaatgggggaggatgagagggctattgaggttttccagagagctatagatttgaaacctggtcatgttgatgctctttataacctcggtgggctttacatggatttgggtaggtttcaaagagcttcagagatgtacactagagttttagcggtgtggcctaaccattggcgtgcacaactcaacaaggctgtgtccttgttgggtgctggagagaccgaagaagctaaaagggctttaaaggaggccctgaaaatgactaaccgagttgagttgcacgatgcggtatctcatctgaaacagttgcagaagaagaaaaaggtcaaaaaaggaaatagtgctaacgaagaaggtccgtttattgttgtggaatcttccaaattcaagacggtaggcgagaagactactttaaggccagatttagccatagctcttcaagttagagccttccagagagtcacaaggctgtggaaatgcgatgttgaagcattaagaagagagatgagagacaacaatgttcctgtatcctattccggcaatggaattcccacaaaatctataaggagaccaaacttagaagagattctccggcgtctgcttaatgtcctgaaacctgaaactttccaaggagctattaaggccataaacgagaaaatcctctcggttcttgatgattcagggtcgggaagagtcgatttgggaatgttttacgcagtgattgctcctttatgcggtggccatccagacaaaaggaaaagagttgcatttgatgcgctactttggaaaccggtaaacgaaggaagctctcagattacaaaaatggaagccgtcaaatacatcaaactcttgagagctatctacataccatcacaaggaatgagtgaaatgttagaagttcatggagaaagcgatgatacttcgacggtaacattcaaccagtttctagagatgtacgatgattcagagtggggatttggtatcatgtcgactgtttttaaactcgaaacaagagataggaatcgacacgggaaccaggtttgttcagtttgccgatatccgattatcgggtctcggtttaaggaagtgaaaacagggtttagcctctgtaaccaatgttacagcgaagggaagattcctccaacgtttaaacagcaggaggaatataaattcagagagtatgcgagtgaagtggaagccatgaaagctaagtgtgtttgtttttcaatgcaatctcataaaaaaacaatagccacttgaaaaatatccataagtttttttttttggtggtataattcaatttccacagttcttgtttcttaaatcttaatctgtagtctttttttcttaagttgtgtgtatagttttgatgtagtgtgtgttggtgagcaagtatgattgatgatttcttgttgtattttttttattttccactcaatttcagattaatatgattttgtcgatggtcgtgaatggaataaactgtattcagtttcc

SEQ ID NO: 4628 - protein, 802 aa, Arabidopsis thaliana
MTTRGSRSEKVKRIFQQFDGNLDGGLSREEMSALVVAVNPRVKFSDEQISAILDEVFRTYAEFIDGDKGLTFDGLLRTYDDGAGDVDRDFDALGIEFNEETKGASEASSSSITDERAVEAQKQQRTAAWAVSPNHGIVFDETWKLVDDLEILVKRLKSKQEKDGKLKVDNNNVDAFSEAGWSRELGPSSDISDKRIYWEESSHDYGVFVKELGVLRSKADGARSREEAFDGHMAIGKVLYEHQLFKEALVSFKRACELQPTDVRPHFKAGNCLYVLGKYKESKDEFLLALEAAESGGNQWAYLLPQIYVNLGISLEGEGMVLSACEYYREAAILCPTHYRALKLLGSALFGVGEYRAAVKALEEAIYLKPDYADAHCDLASSLHAMGEDERAIEVFQRAIDLKPGHVDALYNLGGLYMDLGRFQRASEMYTRVLAVWPNHWRAQLNKAVSLLGAGETEEAKRALKEALKMTNRVELHDAVSHLKQLQKKKKVKKGNSANEEGPFIVVESSKFKTVGEKTTLRPDLAIALQVRAFQRVTRLWKCDVEALRREMRDNNVPVSYSGNGIPTKSIRRPNLEEILRRLLNVLKPETFQGAIKAINEKILSVLDDSGSGRVDLGMFYAVIAPLCGGHPDKRKRVAFDALLWKPVNEGSSQITKMEAVKYIKLLRAIYIPSQGMSEMLEVHGESDDTSTVTFNQFLEMYDDSEWGFGIMSTVFKLETRDRNRHGNQVCSVCRYPIIGSRFKEVKTGFSLCNQCYSEGKIPPTFKQQEEYKFREYASEVEAMKAKCVCFSMQSHKKTIAT

SEQ ID NO: 4629 - protein, 772 aa, Arabidopsis thaliana
MSALVVAVNPRVKFSDEQISAILDEVFRTYAEFIDGDKGLTFDGLLRTYDDGAGDVDRDFDALGIEFNEETKGASEASSSSITDERAVEAQKQQRTAAWAVSPNHGIVFDETWKLVDDLEILVKRLKSKQEKDGKLKVDNNNVDAFSEAGWSRELGPSSDISDKRIYWEESSHDYGVFVKELGVLRSKADGARSREEAFDGHMAIGKVLYEHQLFKEALVSFKRACELQPTDVRPHFKAGNCLYVLGKYKESKDEFLLALEAAESGGNQWAYLLPQIYVNLGISLEGEGMVLSACEYYREAAILCPTHYRALKLLGSALFGVGEYRAAVKALEEAIYLKPDYADAHCDLASSLHAMGEDERAIEVFQRAIDLKPGHVDALYNLGGLYMDLGRFQRASEMYTRVLAVWPNHWRAQLNKAVSLLGAGETEEAKRALKEALKMTNRVELHDAVSHLKQLQKKKKVKKGNSANEEGPFIVVESSKFKTVGEKTTLRPDLAIALQVRAFQRVTRLWKCDVEALRREMRDNNVPVSYSGNGIPTKSIRRPNLEEILRRLLNVLKPETFQGAIKAINEKILSVLDDSGSGRVDLGMFYAVIAPLCGGHPDKRKRVAFDALLWKPVNEGSSQITKMEAVKYIKLLRAIYIPSQGMSEMLEVHGESDDTSTVTFNQFLEMYDDSEWGFGIMSTVFKLETRDRNRHGNQVCSVCRYPIIGSRFKEVKTGFSLCNQCYSEGKIPPTFKQQEEYKFREYASEVEAMKAKCVCFSMQSHKKTIAT

SEQ ID NO: 4630 - protein, 570 aa, Arabidopsis thaliana
MAIGKVLYEHQLFKEALVSFKRACELQPTDVRPHFKAGNCLYVLGKYKESKDEFLLALEAAESGGNQWAYLLPQIYVNLGISLEGEGMVLSACEYYREAAILCPTHYRALKLLGSALFGVGEYRAAVKALEEAIYLKPDYADAHCDLASSLHAMGEDERAIEVFQRAIDLKPGHVDALYNLGGLYMDLGRFQRASEMYTRVLAVWPNHWRAQLNKAVSLLGAGETEEAKRALKEALKMTNRVELHDAVSHLKQLQKKKKVKKGNSANEEGPFIVVESSKFKTVGEKTTLRPDLAIALQVRAFQRVTRLWKCDVEALRREMRDNNVPVSYSGNGIPTKSIRRPNLEEILRRLLNVLKPETFQGAIKAINEKILSVLDDSGSGRVDLGMFYAVIAPLCGGHPDKRKRVAFDALLWKPVNEGSSQITKMEAVKYIKLLRAIYIPSQGMSEMLEVHGESDDTSTVTFNQFLEMYDDSEWGFGIMSTVFKLETRDRNRHGNQVCSVCRYPIIGSRFKEVKTGFSLCNQCYSEGKIPPTFKQQEEYKFREYASEVEAMKAKCVCFSMQSHKKTIAT

SEQ ID NO: 4631 - DNA, 1694 bp, Arabidopsis thaliana
ggagaatctcactgatttcccagatatctgatctgctctgcctttcccgtggctcttcttcaaccttgaagactctgaccccattctgctttaccctctccaggtctcccttccaccaatccgggggcgatgatgatgcttcgggattgaaaaaccaattgttgcgcttccgtaatgattccggtaaagttgcctccgttttggagaggaacaaaatccaaggagctgcgtttgttgagctccttaggcagttacgtccatggcccgttttgtcccaactggtgttcgactggagaagaaacaaggcactatgcgatgggttgcctatgactgctgatgaatacgctaagggcattaccatttctggtagactgaagaatgtcgatttggccctttccttgtttcacgagtctgcaaacaagaccacctccgtctacaatgctttgatgggtgcttacctctgcaacggtttgtctcatcattgcgagcagctcttccttgacttcaattctcaacaagacggaccctcctcttctactccatctgtctctacttacaacatcctcatttctctttatggccgtttgattatggttgagcggatggaatcagtattcctacagcttcaacaactcaatatccttcccgattccagcacctacaacaacttgattgctgggtacatctatgcttgggattgggataagatggaagcaactttccactccatgaagaacggccttgttaagcctacgcttgccacctatttgctgatgctcagagggtatgcaaactcgggaaatctgctacggatggaggacatgtatcaagccgtcaagcgtcacgttgacaggaatgagattaagttaatcgagtccatgatttgcgcatactacaggagttgtcacaaggataggatcagaaaaatcaagactttatccaaacttatccccaagaaaagttacaagccttggttgtatttgctcttgatgcaggtctatgctaaggatgataatctacatgccatggagaatttcatagaccaggctattacaaaaggactccagatagagacagatggtattatgagatcaatagtggctagttacttcaggtgcaatgcggttgataagcttgccaaattcgtgcagcgtgcaaactctgctggatggaaaatgagcaggtctatgttccatggcttaatgatcatgtatggatctcaaaagcgttttaaagagatggaaaacgtcctctctgaaatggaaagctttaaaataagccggtccaagaagacgctttgtattctgcttagagtatacgcagcaacgcatggacaggagcataaggttaatcaagtcgcaggaatgatgttaaagcatggacatgatttccaacgacctgaagcgagtaaaagagttatgggaaaataggatactagagagagagatatgaataaatacaagcagcatattttgttgggaaggattgtatgcatccagggattcgatttgaaccctatagcatcaaggaatcaaaccattgaagcagaaatgtctccgttggcgtatagcatccatgtgtctttgattgtaacattgtaagttgctcttttgcgcattacttctggatatacatgatgaatagtttcgtactctgtggttctttcagtatacaaaacttcttccttacttgac

SEQ ID NO: 4632 - protein, 475 aa, Arabidopsis thaliana
RISLISQISDLLCLSRGSSSTLKTLTPFCFTLSRSPFHQSGGDDDASGLKNQLLRFRNDSGKVASVLERNKIQGAAFVELLRQLRPWPVLSQLVFDWRRNKALCDGLPMTADEYAKGITISGRLKNVDLALSLFHESANKTTSVYNALMGAYLCNGLSHHCEQLFLDFNSQQDGPSSSTPSVSTYNILISLYGRLIMVERMESVFLQLQQLNILPDSSTYNNLIAGYIYAWDWDKMEATFHSMKNGLVKPTLATYLLMLRGYANSGNLLRMEDMYQAVKRHVDRNEIKLIESMICAYYRSCHKDRIRKIKTLSKLIPKKSYKPWLYLLLMQVYAKDDNLHAMENFIDQAITKGLQIETDGIMRSIVASYFRCNAVDKLAKFVQRANSAGWKMSRSMFHGLMIMYGSQKRFKEMENVLSEMESFKISRSKKTLCILLRVYAATHGQEHKVNQVAGMMLKHGHDFQRPEASKRVMGK

SEQ ID NO: 4633 - protein, 367 aa, Arabidopsis thaliana
MTADEYAKGITISGRLKNVDLALSLFHESANKTTSVYNALMGAYLCNGLSHHCEQLFLDFNSQQDGPSSSTPSVSTYNILISLYGRLIMVERMESVFLQLQQLNILPDSSTYNNLIAGYIYAWDWDKMEATFHSMKNGLVKPTLATYLLMLRGYANSGNLLRMEDMYQAVKRHVDRNEIKLIESMICAYYRSCHKDRIRKIKTLSKLIPKKSYKPWLYLLLMQVYAKDDNLHAMENFIDQAITKGLQIETDGIMRSIVASYFRCNAVDKLAKFVQRANSAGWKMSRSMFHGLMIMYGSQKRFKEMENVLSEMESFKISRSKKTLCILLRVYAATHGQEHKVNQVAGMMLKHGHDFQRPEASKRVMGK

SEQ ID NO: 4634 - protein, 327 aa, Arabidopsis thaliana
MGAYLCNGLSHHCEQLFLDFNSQQDGPSSSTPSVSTYNILISLYGRLIMVERMESVFLQLQQLNILPDSSTYNNLIAGYIYAWDWDKMEATFHSMKNGLVKPTLATYLLMLRGYANSGNLLRMEDMYQAVKRHVDRNEIKLIESMICAYYRSCHKDRIRKIKTLSKLIPKKSYKPWLYLLLMQVYAKDDNLHAMENFIDQAITKGLQIETDGIMRSIVASYFRCNAVDKLAKFVQRANSAGWKMSRSMFHGLMIMYGSQKRFKEMENVLSEMESFKISRSKKTLCILLRVYAATHGQEHKVNQVAGMMLKHGHDFQRPEASKRVMGK

SEQ ID NO: 4635 - DNA, 1512 bp, Arabidopsis thaliana
attctgaataagatcaagaatttacaggttctctcttctctctctctcaagttctgttttgtttatacaaattacaactttagtttcgtaaataggtactcattagttgatcattgctctctatgtcttgctatgcaattcaataggctagtgtatcaccaatcacagatccgggatcccggcttagtaaacattataaagcttgcatatacactttatttggatttggatttagtaaaaaaattcattttacagtatttgaaaaaatacaaaatggcgaaaatctaccggaagttgacaggctacggtggtgaaggagggcgtgaatgggacgatgatgtatatgagggtgtaagaaaagtgtatgtaggacaagatatcaatcgtatcacttacgtcaaattcgagtatgtgaaggaagacggccaagtagtaacaactgaatatgggaaaatcattcaacaacccaaagagtttgtacttcaatatccggacgaacatatcatagcggtggaaggaaactatcgcggagtggctctatgtgccacagaggtgatcacaaacctcgtcttcaagacctcaaagggtagaaagtcaccactgtttggtccaaacttgcttggaattacgaccggtacaaagttcgttattgaggatggaggaaagaagatcgtagggtttcatggacggtcgggtaatgctctcgacgcgcttggagtttactttgtacatggctctctaacaacgtctccgcctgtttacaagctggatgcccaaggtggtacagacgggcgtgtttgggatgatggttcttacgacggcgttaaatcgctgcgtattggtcaagataattctcgtattacttatttagagttcgagtacgagaaaggcggtaagttagagacatgtcgccatggggtgaaacaagaaagatcactgaagtttgagcttaacccggatgaatacatcaaatcggtggaagcaacctatgataaaccggacattttccgcaatgtcgtcattacatcgcttacatttgaaacatcgaaggggagaacgtcattctctgggtataagggaggtaagaagtttaagctagagcaaaagggtcgtaggcttgtcgggttccatggaaaggaaggttcagctattgatgcccttggagcatattttgcacctattcctactccgactcctataattccagaagaaactaccagcaataggcggcagcggaggagttgcatgggatgatggtgtctacgatggtgtaaggaagatacttgtaggacaaggtaacgatggtgtagcctttgtcaagtttgaatacaataaaggaaaagatcttgtatctggagatgaccatgggaagatgacattactcggaactgaagagtttgtgcttgaagatggtgaatatctcacggccatagatggctattacgataagattttcggagtcgagacaccaatgattatctgtcttcagtttaagacgaacaaaagggagtc

SEQ ID NO: 4636 - protein, 417 aa, Arabidopsis thaliana
ILNKIKNLQVLSSLSLKFCFVYTNYNFSFVNRYSLVDHCSLCLAMQFNRLVYHQSQIRDPGLVNIIKLAYTLYLDLDLVKKFILQYLKKYKMAKIYRKLTGYGGEGGREWDDDVYEGVRKVYVGQDINRITYVKFEYVKEDGQVVTTEYGKIIQQPKEFVLQYPDEHIIAVEGNYRGVALCATEVITNLVFKTSKGRKSPLFGPNLLGITTGTKFVIEDGGKKIVGFHGRSGNALDALGVYFVHGSLTTSPPVYKLDAQGGTDGRVWDDGSYDGVKSLRIGQDNSRITYLEFEYEKGGKLETCRHGVKQERSLKFELNPDEYIKSVEATYDKPDIFRNVVITSLTFETSKGRTSFSGYKGGKKFKLEQKGRRLVGFHGKEGSAIDALGAYFAPIPTPTPIIPEETTSNRRQRRSCMG

SEQ ID NO: 4637 - protein, 373 aa, Arabidopsis thaliana
MQFNRLVYHQSQIRDPGLVNIIKLAYTLYLDLDLVKKFILQYLKKYKMAKIYRKLTGYGGEGGREWDDDVYEGVRKVYVGQDINRITYVKFEYVKEDGQVVTTEYGKIIQQPKEFVLQYPDEHIIAVEGNYRGVALCATEVITNLVFKTSKGRKSPLFGPNLLGITTGTKFVIEDGGKKIVGFHGRSGNALDALGVYFVHGSLTTSPPVYKLDAQGGTDGRVWDDGSYDGVKSLRIGQDNSRITYLEFEYEKGGKLETCRHGVKQERSLKFELNPDEYIKSVEATYDKPDIFRNVVITSLTFETSKGRTSFSGYKGGKKFKLEQKGRRLVGFHGKEGSAIDALGAYFAPIPTPTPIIPEETTSNRRQRRSCMG

SEQ ID NO: 4638 - protein, 326 aa, Arabidopsis thaliana
MAKIYRKLTGYGGEGGREWDDDVYEGVRKVYVGQDINRITYVKFEYVKEDGQVVTTEYGKIIQQPKEFVLQYPDEHIIAVEGNYRGVALCATEVITNLVFKTSKGRKSPLFGPNLLGITTGTKFVIEDGGKKIVGFHGRSGNALDALGVYFVHGSLTTSPPVYKLDAQGGTDGRVWDDGSYDGVKSLRIGQDNSRITYLEFEYEKGGKLETCRHGVKQERSLKFELNPDEYIKSVEATYDKPDIFRNVVITSLTFETSKGRTSFSGYKGGKKFKLEQKGRRLVGFHGKEGSAIDALGAYFAPIPTPTPIIPEETTSNRRQRRSCMG

SEQ ID NO: 4639 - DNA, 1601 bp, Arabidopsis thaliana
gttttgtaattgagacgaaaacttctgatatcacttaaaaacttcacagaaacaacacctcgatctcatcgaagctcctctctcttacatatcatcacttcacatcaaccaaacctacttctgtctctctctctcgctctctatctctcacgctctcacagtagaagaaaaaattagaaaggttgtgagaatggcggctacagcagcttcaagcttacaaattgctacacgaaggccgagcatgtcttcgcctagcaaaattcttaaagcaggaacctacattgttggtgccaatcctggaaacgcttcatgggataaactttcatgcactcgccaattatcaaaccttggatgtttgagaaaccacagtgctgttccaacttgtaagagacccttttctttttccacaagggcaatgtctgaatccagtgaaaacaaggctccttcagggcttccaattgatttgagagggaaaagagctttcattgctggtatagctgatgataatggctatggttgggccatagcaaaatctcttgctgctgctggagctgaaatattggttgggacttgggttcctgcacttaatatatttgagacaagcttgagacgtggaaaattcgaccagtcacgagtgttgcctgacgggtcattgatggagattaagaaggtttatgctttggatgctgtgtttgacaatcctgaagatgtgcctgaagatgtgaaaacgaataagcgatatgcaggatcgtcaaactggaccgtacaggaagctgctgaatgtgtgaaaaaagattttggaagcattgacattcttgtccattcccttgcaaatggcccagaggttagcaaacctcttctggagacatcaaggaaaggctatctcgctgctatctctgcttcgagttactcctttgtttccttgctgaggcattttctgccaattatgaacccaggaggtgcttcaatatctcttacttacattgcctctgaaagaatcattcctgggtatggtggaggtatgagttctgccaaagctgcactagagagtgacacacgggtgcttgcatatgaagctggaaggaaatcaaacattagggtcaacaccatctctgcgggtcctttgggaagccgagcagcaaaagccattgggttcatagacaccatgattgagtattcctacaataatgggcctattcagaaaacactgaccgcagatgaagttgggaatgcagcagccttcttggcatctccattggcctctgccataaccggtgcaaccatatatgtggacaatggtttgaatgcaatggggcgttgcactggacagcccggtgttcaaagaccttaacagcaagaattagagtcttgatcgacgactggactcgagaaattccgtgttttcgtgagcttgcttgtttctttatgagttagtatgtacggcatatgttccccatcggctgtctttttttttctttctttaagagaataaattatggttctaggttgggtcatttagcaactatatatgtagtgatggattattattcctcttatgattgaaaatttgcaagtgagaaaaactatcatgtttcttgtaa

SEQ ID NO: 4640 - protein, 386 aa, Arabidopsis thaliana
MAATAASSLQIATRRPSMSSPSKILKAGTYIVGANPGNASWDKLSCTRQLSNLGCLRNHSAVPTCKRPFSFSTRAMSESSENKAPSGLPIDLRGKRAFIAGIADDNGYGWAIAKSLAAAGAEILVGTWVPALNIFETSLRRGKFDQSRVLPDGSLMEIKKVYALDAVFDNPEDVPEDVKTNKRYAGSSNWTVQEAAECVKKDFGSIDILVHSLANGPEVSKPLLETSRKGYLAAISASSYSFVSLLRHFLPIMNPGGASISLTYIASERIIPGYGGGMSSAKAALESDTRVLAYEAGRKSNIRVNTISAGPLGSRAAKAIGFIDTMIEYSYNNGPIQKTLTADEVGNAAAFLASPLASAITGATIYVDNGLNAMGRCTGQPGVQRP

SEQ ID NO: 4641 - protein, 369 aa, Arabidopsis thaliana
MSSPSKILKAGTYIVGANPGNASWDKLSCTRQLSNLGCLRNHSAVPTCKRPFSFSTRAMSESSENKAPSGLPIDLRGKRAFIAGIADDNGYGWAIAKSLAAAGAEILVGTWVPALNIFETSLRRGKFDQSRVLPDGSLMEIKKVYALDAVFDNPEDVPEDVKTNKRYAGSSNWTVQEAAECVKKDFGSIDILVHSLANGPEVSKPLLETSRKGYLAAISASSYSFVSLLRHFLPIMNPGGASISLTYIASERIIPGYGGGMSSAKAALESDTRVLAYEAGRKSNIRVNTISAGPLGSRAAKAIGFIDTMIEYSYNNGPIQKTLTADEVGNAAAFLASPLASAITGATIYVDNGLNAMGRCTGQPGVQRP

SEQ ID NO: 4642 - protein, 311 aa, Arabidopsis thaliana
MSESSENKAPSGLPIDLRGKRAFIAGIADDNGYGWAIAKSLAAAGAEILVGTWVPALNIFETSLRRGKFDQSRVLPDGSLMEIKKVYALDAVFDNPEDVPEDVKTNKRYAGSSNWTVQEAAECVKKDFGSIDILVHSLANGPEVSKPLLETSRKGYLAAISASSYSFVSLLRHFLPIMNPGGASISLTYIASERIIPGYGGGMSSAKAALESDTRVLAYEAGRKSNIRVNTISAGPLGSRAAKAIGFIDTMIEYSYNNGPIQKTLTADEVGNAAAFLASPLASAITGATIYVDNGLNAMGRCTGQPGVQRP

SEQ ID NO: 4643 - DNA, 567 bp, Arabidopsis thaliana
aacattctcagagaagccgtcttcttcctccttcaatctctctcgttcgtatcatctgctctgcgatttcaatggcgagccgttggttgagacctgaggtgtatcctttgttcgctgctaccggagttgccgttgggatctgtgcgttttccttgatcagaaacatcaccggaaaccctgaagtcagatgcaccaaggagaacagggctgctggaattttggataaccatgcagagggagagaagtataaggaaaatttcctgaggaagtttgttcgcaacaagaaacctgaaatcatgcctggactcaacaagttcttcactgatcctacatactgaaaccatctttgcacaccgctttgtcgtattgtttctggaattgaatctctttgtgatataaaaccgcatttgtcaatttcacattgttgatgtatcctccagctgatgacacttgttaatgctgggcttatgttgtcacttttaagcagaaaattgtatgacttgcttatggcagcatactcttttaatgaccatctcatctgagagtaataagcacttgatatcttcg

SEQ ID NO: 4644 - protein, 111 aa, Arabidopsis thaliana
HSQRSRLLPPSISLVRIICSAISMASRWLRPEVYPLFAATGVAVGICAFSLIRNITGNPEVRCTKENRAAGILDNHAEGEKYKENFLRKFVRNKKPEIMPGLNKFFTDPTY

SEQ ID NO: 4645 - protein, 88 aa, Arabidopsis thaliana
MASRWLRPEVYPLFAATGVAVGICAFSLIRNITGNPEVRCTKENRAAGILDNHAEGEKYKENFLRKFVRNKKPEIMPGLNKFFTDPTY

SEQ ID NO: 4646 - DNA, 763 bp, Arabidopsis thaliana
ataccaataagcaatttgctcattagagaacagagaaaaaaaaaacaatggcaactcaagccgccgggatcttcaactccgccataacaaccgccgcaacctccggcgtcaagaaactccactttttctcaacaacccaccgtcccaaatccctctccttcaccaaaaccgcaatccgcgccgagaaaacagattcctccgccgccgctgctgcatcccccgccacgaaagaagctcccgtgggattcacgccaccgcagctagacccaaacacaccgtctccgatcttcgctggaagcaccggtggtcttctacgtaaagcgcaagtggaagagttctacgttatcacgtggaactcaccgaaagaacagatctttgagatgccgacaggaggagcagcgatcatgagagaaggtccgaatcttctgaagctagcgaggaaagagcagtgtttagctttggggacaaggcttagatccaagtacaagatcacttaccagttttacagagtgtttcctaacggtgaggttcaatatcttcatcctaaagatggtgtttatccagagaaggcgaatccaggaagagaaggtgttggtctcaacatgagatctattgggaaaaatgttagtcccattgaagttaagtttactggcaaacaaagttatgatttgtaagatctgtaaactaaaaaaaccaaaaactatgtgcatgtggtgatgattatgactatgtttcatgttaatttttaatggattttgttttg

SEQ ID NO: 4647 - protein, 208 aa, Arabidopsis thaliana
MATQAAGIFNSAITTAATSGVKKLHFFSTTHRPKSLSFTKTAIRAEKTDSSAAAAASPATKEAPVGFTPPQLDPNTPSPIFAGSTGGLLRKAQVEEFYVITWNSPKEQIFEMPTGGAAIMREGPNLLKLARKEQCLALGTRLRSKYKITYQFYRVFPNGEVQYLHPKDGVYPEKANPGREGVGLNMRSIGKNVSPIEVKFTGKQSYDL

SEQ ID NO: 4648 - DNA, 1275 bp, Arabidopsis thaliana
caaaatcgtgaaagttcatttctcctccattgatctttctttactcagatctttcctcttcctctgagatgtggagctacgtttggttaccgttggtagctctatctctctttaaggatagcatcataatggccaaggctgcgacgattctcctccctagtcaaaccggatttgatatttctcggagtccggtatgctctgctccggatccgaacctaaattacagaccggttattggtattctgagccatcctggcgacggtgcgtcaggtcgtttgagcaatgctacagacgcgtcctccattgcggcttcgtatgtgaaattagctgagtctggtggagcacgtgtgatcccactcatctttaacgagcctgaagaaattctctttcagaagctagaattggtcaacggtgtgatactaactggtggttgggctaaagaaggattgtattttgaaatcgtcaagaaaatcttcaataaagttttggaaagaaatgatgctggagagcattttcctatatacgctatttgcctcggatttgagctcttgacaatgatcataagccagaacagagacatttttgaaaaaatggatgcaagaaattctgcatcaagtcttcagttcgttgaaaatgttaatatccaaggaaccatattccaaagatttcctccagagctgttgaaaaaactcggtacagattgtctggttatgcagaatcatcggtttggtatctcaccacaaagctttgaaggaaatattgctctgtctaatttctttaaaattgtcacaacatgcgttgatgacaacggcaaggtttatgtttcaacagttcaatcaacaaaatatccagtgaccggcttccagtggcatcctgagaaaaatgcattcgagtggggatcatctaaaattccacactctgaggacgcgatccaggtgactcagcacgccgcaaatcatctagtcagtgaagctaggaagtcactgaacagaccagagtctaagaaagtgctgagcaatctcatttacaactataagcctacttactgtggatacgcagggattggttacgacgaggtttacatcttcacacaacaacgatcccttctctaataactataacctctcctgtgtatcctctcgtgtgtatagtgaaatatgtaccttcgactctgttattatctgtgaacttgttgtaactttgaacgtcagcctatggcttgtgtttgacattaaactagataatgtacgcttttctatctttagtctaattcat

SEQ ID NO: 4649 - protein, 347 aa, Arabidopsis thaliana
MWSYVWLPLVALSLFKDSIIMAKAATILLPSQTGFDISRSPVCSAPDPNLNYRPVIGILSHPGDGASGRLSNATDASSIAASYVKLAESGGARVIPLIFNEPEEILFQKLELVNGVILTGGWAKEGLYFEIVKKIFNKVLERNDAGEHFPIYAICLGFELLTMIISQNRDIFEKMDARNSASSLQFVENVNIQGTIFQRFPPELLKKLGTDCLVMQNHRFGISPQSFEGNIALSNFFKIVTTCVDDNGKVYVSTVQSTKYPVTGFQWHPEKNAFEWGSSKIPHSEDAIQVTQHAANHLVSEARKSLNRPESKKVLSNLIYNYKPTYCGYAGIGYDEVYIFTQQRSLL

SEQ ID NO: 4650 - protein, 327 aa, Arabidopsis thaliana
MAKAATILLPSQTGFDISRSPVCSAPDPNLNYRPVIGILSHPGDGASGRLSNATDASSIAASYVKLAESGGARVIPLIFNEPEEILFQKLELVNGVILTGGWAKEGLYFEIVKKIFNKVLERNDAGEHFPIYAICLGFELLTMIISQNRDIFEKMDARNSASSLQFVENVNIQGTIFQRFPPELLKKLGTDCLVMQNHRFGISPQSFEGNIALSNFFKIVTTCVDDNGKVYVSTVQSTKYPVTGFQWHPEKNAFEWGSSKIPHSEDAIQVTQHAANHLVSEARKSLNRPESKKVLSNLIYNYKPTYCGYAGIGYDEVYIFTQQRSLL

SEQ ID NO: 4651 - protein, 185 aa, Arabidopsis thaliana
MIISQNRDIFEKMDARNSASSLQFVENVNIQGTIFQRFPPELLKKLGTDCLVMQNHRFGISPQSFEGNIALSNFFKIVTTCVDDNGKVYVSTVQSTKYPVTGFQWHPEKNAFEWGSSKIPHSEDAIQVTQHAANHLVSEARKSLNRPESKKVLSNLIYNYKPTYCGYAGIGYDEVYIFTQQRSLL

SEQ ID NO: 4652 - DNA, 965 bp, Arabidopsis thaliana
cgttacgttttaggcgtttaacacaattattattttctaaaacgagagccgtttaacgagaaagagaaatttctaactccagagagcgaagaacacaatcccagagtagcagaatctgatccatcccacctttttcaattctcaggcaaagtgtttgatctcatattcggataagtcaaacttgaaaaaatggaagggactgtgttcacgccttgtttggaaggaatgaagcatgtcaaatctgatcaaggcgagatgcttactaagccatttttagagctttgcaagaccatcttgcctgttatagataaatttggagctgctatgactctcgtgaaatctgacattggtggcaacataacgaggttggagaagaactacttatctgatcccgacaagttcaagtacttgtacacctttgttcaagtcgaaattgagtctaagatagcaaaaggatcgtctagctgtacaaacggtcttctctggttaaccagagcaatggatttcttagtggagctgttccgaaacttggtagcacatcaagactggtcaatgccacaagcttgtgctgactcataccaaaaaacactcaagaaatggcacggatggctcgccagctctaccttctctatggctttaaagctagctccggacaggaagaagttcatggatgtcatatctggttctggtaacatccaagccgacatggaaaggttttgtgctgagtttggtccgtttcttcatgataatcataagtttctggctagcgtcggtatggatgacatgaaagcttcttaagtcatcatatgattatcgccggtatcaaatcttctttgccggaatctttgtctgttttaacttttctccttccaattatagaacctccaaaaagaaacagaataatgtgttggtttctatctgaatgttcactttatattacaagttataacatacgaatcaatctt

SEQ ID NO: 4653 - protein, 202 aa, Arabidopsis thaliana
MEGTVFTPCLEGMKHVKSDQGEMLTKPFLELCKTILPVIDKFGAAMTLVKSDIGGNITRLEKNYLSDPDKFKYLYTFVQVEIESKIAKGSSSCTNGLLWLTRAMDFLVELFRNLVAHQDWSMPQACADSYQKTLKKWHGWLASSTFSMALKLAPDRKKFMDVISGSGNIQADMERFCAEFGPFLHDNHKFLASVGMDDMKAS

SEQ ID NO: 4654 - protein, 190 aa, Arabidopsis thaliana
MKHVKSDQGEMLTKPFLELCKTILPVIDKFGAAMTLVKSDIGGNITRLEKNYLSDPDKFKYLYTFVQVEIESKIAKGSSSCTNGLLWLTRAMDFLVELFRNLVAHQDWSMPQACADSYQKTLKKWHGWLASSTFSMALKLAPDRKKFMDVISGSGNIQADMERFCAEFGPFLHDNHKFLASVGMDDMKAS

SEQ ID NO: 4655 - protein, 180 aa, Arabidopsis thaliana
MLTKPFLELCKTILPVIDKFGAAMTLVKSDIGGNITRLEKNYLSDPDKFKYLYTFVQVEIESKIAKGSSSCTNGLLWLTRAMDFLVELFRNLVAHQDWSMPQACADSYQKTLKKWHGWLASSTFSMALKLAPDRKKFMDVISGSGNIQADMERFCAEFGPFLHDNHKFLASVGMDDMKAS

SEQ ID NO: 4656 - DNA, 425 bp, Arabidopsis thaliana
aatattaatctacacctctacatacgattttcattaaacacttttcaaaaacaaatcataatctgttcgaagatgagccaatacagccaaaaccaatcttcaggagcttatcctacgccgccagtgtctaccggcccttatatgacaccgccaccgctcggttacccgacgagcgacatcagtcatgccacggtggctccggtggagacaaagtccaagggtgatggattcttgaaaggctgtcttgcggccatgtgttgctgttgtgtcctcgacgcctgcttctgaatttgagaaattcgattgtttatttgatgtttcatgcaaattatttatcattgtattttgctttacccaaattatattttgggatttgtatgacatttggaacttctaatatttcttaattcatttatttattactc

SEQ ID NO: 4657 - protein, 95 aa, Arabidopsis thaliana
NINLHLYIRFSLNTFQKQIIICSKMSQYSQNQSSGAYPTPPVSTGPYMTPPPLGYPTSDISHATVAPVETKSKGDGFLKGCLAAMCCCCVLDACF

SEQ ID NO: 4658 - protein, 71 aa, Arabidopsis thaliana
MSQYSQNQSSGAYPTPPVSTGPYMTPPPLGYPTSDISHATVAPVETKSKGDGFLKGCLAAMCCCCVLDACF

SEQ ID NO: 4659 - protein, 48 aa, Arabidopsis thaliana
MTPPPLGYPTSDISHATVAPVETKSKGDGFLKGCLAAMCCCCVLDACF

SEQ ID NO: 4660 - DNA, 1302 bp, Arabidopsis thaliana
gtcttggcatcctcgtcctcttcagcaaaactcgtctctcttgcactccaaaaagcaaccatgtctgcttttgtcggcaaatacgcagatgagctgataaagacggctaagtacattgccacaccgggaaagggcattttggcagcagacgagagcacgggaactattgggaaacgattcgccagcatcaatgttgagaacattgagtccaaccgccaagctctccgtgagctcctcttcacgtcccctggcactttcccttgcctctccggtgttatcctcttcgaggaaaccctctaccagaaaaccacggatggcaaacccttcgttgagctcctcatggaaaacggagttatccctggaatcaaagtggacaagggtgtggttgatctagcaggaaccaatggcgagaccactactcagggtctagattcacttggtgcacgttgccaggagtattacaaggcaggagctcggtttgcaaaatggcgtgcagtcctcaagattggggccaccgagccaagcgagctctctatccaagagaacgccaaggggctagcccgctatgccatcatctgccaggagaatggactcgtcccaatcgtcgagccagaggtactgaccgacgggagccatgacatcaagaaatgtgcagcggtgaccgagaccgttcttgctgccgtgtacaaggccttgaacgaccaccatgtcctcctcgaaggcactctgcttaaaccgaacatggtcactcccggctctgacagcccaaaggttgcaccggaagtgatagcggaatacacagtgactgctctgcgccgcacagtcccacctgcagttccaggaatcgtgttcctctcaggcggacagagtgaagaggaagcaacactaaatctgaacgcaatgaacaagctcgatgtgttgaagccatggactctcactttctcatttggccgagccctccaacaaagcactctcaaggcttgggcaggtaagacagagaatgtagccaaagctcaggccactttcctgaccaggtgcaagggtaactcggacgctaccctcgggaaatacaccggcggggcttctggtgactcggccgcctctgagagcttgtatgaggaaggatacaagtattaggagcgtttaaatacgggtgtcgccttttatacgatttgaatatatgtcaaatgtttcgtaggcgtttaactgtttaaatttttatcgatttggtttagcgtctgtgtaatgttcttaaactgtgttgtgttttttgtgatggtttctataatattttcgcgccat

SEQ ID NO: 4661 - protein, 378 aa, Arabidopsis thaliana
VLASSSSSAKLVSLALQKATMSAFVGKYADELIKTAKYIATPGKGILAADESTGTIGKRFASINVENIESNRQALRELLFTSPGTFPCLSGVILFEETLYQKTTDGKPFVELLMENGVIPGIKVDKGVVDLAGTNGETTTQGLDSLGARCQEYYKAGARFAKWRAVLKIGATEPSELSIQENAKGLARYAIICQENGLVPIVEPEVLTDGSHDIKKCAAVTETVLAAVYKALNDHHVLLEGTLLKPNMVTPGSDSPKVAPEVIAEYTVTALRRTVPPAVPGIVFLSGGQSEEEATLNLNAMNKLDVLKPWTLTFSFGRALQQSTLKAWAGKTENVAKAQATFLTRCKGNSDATLGKYTGGASGDSAASESLYEEGYKY

SEQ ID NO: 4662 - protein, 358 aa, Arabidopsis thaliana
MSAFVGKYADELIKTAKYIATPGKGILAADESTGTIGKRFASINVENIESNRQALRELLFTSPGTFPCLSGVILFEETLYQKTTDGKPFVELLMENGVIPGIKVDKGVVDLAGTNGETTTQGLDSLGARCQEYYKAGARFAKWRAVLKIGATEPSELSIQENAKGLARYAIICQENGLVPIVEPEVLTDGSHDIKKCAAVTETVLAAVYKALNDHHVLLEGTLLKPNMVTPGSDSPKVAPEVIAEYTVTALRRTVPPAVPGIVFLSGGQSEEEATLNLNAMNKLDVLKPWTLTFSFGRALQQSTLKAWAGKTENVAKAQATFLTRCKGNSDATLGKYTGGASGDSAASESLYEEGYKY

SEQ ID NO: 4663 - protein, 265 aa, Arabidopsis thaliana
MENGVIPGIKVDKGVVDLAGTNGETTTQGLDSLGARCQEYYKAGARFAKWRAVLKIGATEPSELSIQENAKGLARYAIICQENGLVPIVEPEVLTDGSHDIKKCAAVTETVLAAVYKALNDHHVLLEGTLLKPNMVTPGSDSPKVAPEVIAEYTVTALRRTVPPAVPGIVFLSGGQSEEEATLNLNAMNKLDVLKPWTLTFSFGRALQQSTLKAWAGKTENVAKAQATFLTRCKGNSDATLGKYTGGASGDSAASESLYEEGYKY

SEQ ID NO: 4664 - DNA, 673 bp, Arabidopsis thaliana
atccaaaaaaaacaaaacaaaaaattatattcaagagaaaaaggaaaaaatgaatttcatctccgatcaggtaaagaaactctcaagctcaacaccagaggagccagaccacaacaagccagtcgaaggaaccgaaacagctacaagaccagctaccaacgccgagctcatggcaagtgccaaggttgtagctgaagctgctcaagccgcagctcgtaacgaatcagacaaactcgacaagggtaaagtcgccggagcctctgctgatatcttagacgcttccgagaaatacggtaagttcgatgaaaagagtagcactggtcactacctcgacaaggctgagaagtatctcaacgactacgagtcgtcacactccaccggtgctggtggtcctcctcctccgacgagtcaggctgagccagcaagtcagcctgagccggcggctaagaaagacgatgaagagtctggtggtgggcttggaggttatgccaagatggctcaaggtttcttgaagtgatttgatctttaattgttgttcatcattttcgtaataataaattaaataactagtatcgtttgtgactagtttatgttgcttcgtttatgtttatggggagtgacgagtgagtgtaataacttctggtgatcatgaatctaatccatctttgttgtg

SEQ ID NO: 4665 - protein, 171 aa, Arabidopsis thaliana
SKKNKTKNYIQEKKEKMNFISDQVKKLSSSTPEEPDHNKPVEGTETATRPATNAELMASAKVVAEAAQAAARNESDKLDKGKVAGASADILDASEKYGKFDEKSSTGHYLDKAEKYLNDYESSHSTGAGGPPPPTSQAEPASQPEPAAKKDDEESGGGLGGYAKMAQGFLK

SEQ ID NO: 4666 - protein, 155 aa, Arabidopsis thaliana
MNFISDQVKKLSSSTPEEPDHNKPVEGTETATRPATNAELMASAKVVAEAAQAAARNESDKLDKGKVAGASADILDASEKYGKFDEKSSTGHYLDKAEKYLNDYESSHSTGAGGPPPPTSQAEPASQPEPAAKKDDEESGGGLGGYAKMAQGFLK

SEQ ID NO: 4667 - protein, 115 aa, Arabidopsis thaliana
MASAKVVAEAAQAAARNESDKLDKGKVAGASADILDASEKYGKFDEKSSTGHYLDKAEKYLNDYESSHSTGAGGPPPPTSQAEPASQPEPAAKKDDEESGGGLGGYAKMAQGFLK

SEQ ID NO: 4668 - DNA, 685 bp, Arabidopsis thaliana
ttgatccaaaaaaaacaaaacaaaaaattatattcaagagaaaaaggaaaaaatgaatttcatctccgatcaggtaaagaaactctcaagctcaacaccagaggagccagaccacaacaagccagtcgaaggaaccgaaacagctacaagaccagctaccaacgccgagctcatggcaagtgccaaggttgtagctgaagctgctcaagccgcagctcgtaacgaatcagacaaactcgacaagggtaaagtcgccggagcctctgctgatatcttagacgctgccgagaaatacggtaagttcgatgaaaagagtagcactggtcagtacctcgacaaggctgagaagtatctcaacgactacgagtcgtcacactccaccggtgctggtggtcctcctcctccgacgagtcaggctgagccagcaagtcagcctgagccggcggctaagaaagacgatgaagagtctggtggtgggcttggaggttatgccaagatggctcaaggtttcttgaagtgatttgatctttaattgttgttcatcattttcgtaataataaattaaataactagtatcgtttgtgactagtttatgttgcttcgtttatgtttatggggagtgacgagtgagtgtaataacttctggtgatcatgaatctaatccatctttgttgtgattatgctc

SEQ ID NO: 4669 - protein, 155 aa, Arabidopsis thaliana
MNFISDQVKKLSSSTPEEPDHNKPVEGTETATRPATNAELMASAKVVAEAAQAAARNESDKLDKGKVAGASADILDAAEKYGKFDEKSSTGQYLDKAEKYLNDYESSHSTGAGGPPPPTSQAEPASQPEPAAKKDDEESGGGLGGYAKMAQGFLK

SEQ ID NO: 4670 - protein, 115 aa, Arabidopsis thaliana
MASAKVVAEAAQAAARNESDKLDKGKVAGASADILDAAEKYGKFDEKSSTGQYLDKAEKYLNDYESSHSTGAGGPPPPTSQAEPASQPEPAAKKDDEESGGGLGGYAKMAQGFLK

SEQ ID NO: 4671 - DNA, 1355 bp, Arabidopsis thaliana
gacacaacaacaacacatccactcgaattttctatttccgaataacaaaaccgatcggcggagacatgacggcggcacaagggaactctaacgagactctgttttcttcttacaagatgggaagattcgatctctctcatcgagtggttctggcgccgatgacgcggtgcagggcgttgaacggagtaccaaacgcggcgttggcagagtattatgctcaacggaccactcccggcggttttctcatctccgaaggcaccatggtctctcccggatccgcagggttcccacatgtgcctggaatctattcagatgaacaagtagaagcatggaagcaagttgtggaagcagttcacgctaagggaggtttcatcttttgtcaattatggcatgttggacgtgcttctcatgcagtgtatcaacctaatggaggatcaccaatatcgtcaacgaacaaaccaatctcggaaaacaggtggcgagttttgttgcccgatggttcccacgtgaagtacccgaaacctcgggctttagaagcttccgagatacctcgggtggtggaggattattgcctttctgctttgaatgcgattcgagctggtttcgatgggattgagatccacggggcgcatggttacctcattgatcagtttttgaaagacgggatcaatgaccgtactgaccaatacggaggatccattgcaaaccgttgtagattcttgaaacaagtagtggaaggtgtagtttcagccataggagctagtaaagttggtgtgagggtatctccagctatagatcacttggacgcaactgattctaacccattatcactcgggctagccgtggttgatatgctcaataagttacaagatgttaatggcttgaagctcgcttaccttcacgttacacaacctcgctaccacgcctatgggcaaacagagtcgggaaggcaagggagtgatgaggaagaagctaagctaatgaagagcttgagaatggcttataaaggaacctttatgtctagtggaggattcaataaggaactaggcatgcaagctgttcaacaaggtgatgctgatttggtttcatatggcaggctttttatcgcaaacccggatttggtttcgcggttcaagattgatggagagttgaataaatataatcggaagacgttttacactcaagatccagttgttggctacacggattatcctttcttggctccttcttcccgcctctgagtttgataatcggaggagaaaatgtattgatgttgtataaagacaatatattaatatgtaaaatgacaatgttattgttatccacttaatgaatagtcatgtatcttattgttt

SEQ ID NO: 4672 - protein, 412 aa, Arabidopsis thaliana
HNNNTSTRIFYFRITKPIGGDMTAAQGNSNETLFSSYKMGRFDLSHRVVLAPMTRCRALNGVPNAALAEYYAQRTTPGGFLISEGTMVSPGSAGFPHVPGIYSDEQVEAWKQVVEAVHAKGGFIFCQLWHVGRASHAVYQPNGGSPISSTNKPISENRWRVLLPDGSHVKYPKPRALEASEIPRVVEDYCLSALNAIRAGFDGIEIHGAHGYLIDQFLKDGINDRTDQYGGSIANRCRFLKQVVEGVVSAIGASKVGVRVSPAIDHLDATDSNPLSLGLAVVDMLNKLQDVNGLKLAYLHVTQPRYHAYGQTESGRQGSDEEEAKLMKSLRMAYKGTFMSSGGFNKELGMQAVQQGDADLVSYGRLFIANPDLVSRFKIDGELNKYNRKTFYTQDPVVGYTDYPFLAPSSRL

SEQ ID NO: 4673 - protein, 391 aa, Arabidopsis thaliana
MTAAQGNSNETLFSSYKMGRFDLSHRVVLAPMTRCRALNGVPNAALAEYYAQRTTPGGFLISEGTMVSPGSAGFPHVPGIYSDEQVEAWKQVVEAVHAKGGFIFCQLWHVGRASHAVYQPNGGSPISSTNKPISENRWRVLLPDGSHVKYPKPRALEASEIPRVVEDYCLSALNAIRAGFDGIEIHGAHGYLIDQFLKDGINDRTDQYGGSIANRCRFLKQVVEGVVSAIGASKVGVRVSPAIDHLDATDSNPLSLGLAVVDMLNKLQDVNGLKLAYLHVTQPRYHAYGQTESGRQGSDEEEAKLMKSLRMAYKGTFMSSGGFNKELGMQAVQQGDADLVSYGRLFIANPDLVSRFKIDGELNKYNRKTFYTQDPVVGYTDYPFLAPSSRL

SEQ ID NO: 4674 - protein, 374 aa, Arabidopsis thaliana
MGRFDLSHRVVLAPMTRCRALNGVPNAALAEYYAQRTTPGGFLISEGTMVSPGSAGFPHVPGIYSDEQVEAWKQVVEAVHAKGGFIFCQLWHVGRASHAVYQPNGGSPISSTNKPISENRWRVLLPDGSHVKYPKPRALEASEIPRVVEDYCLSALNAIRAGFDGIEIHGAHGYLIDQFLKDGINDRTDQYGGSIANRCRFLKQVVEGVVSAIGASKVGVRVSPAIDHLDATDSNPLSLGLAVVDMLNKLQDVNGLKLAYLHVTQPRYHAYGQTESGRQGSDEEEAKLMKSLRMAYKGTFMSSGGFNKELGMQAVQQGDADLVSYGRLFIANPDLVSRFKIDGELNKYNRKTFYTQDPVVGYTDYPFLAPSSRL

SEQ ID NO: 4675 - DNA, 1094 bp, Arabidopsis thaliana
atcaataactcgttccctctctcctcagatggctcaaaaagtggaagcagggggtggcgccggaggagcttcatgggatgatggtatccacgatggcgttagaaaggtgcatgtagggcaaggccaagatggtgtgtcatctatcaaagtcgtgtatgcgaaggactctcaggatattgaaggaagtgaacatggaaagaaaacgttacttggatttgaaacgtttgaggttgatgcagacgactacatagtagcagtgcaagtgacctacgacaacgtgtttggccaagactctgacatcatcacatctattaccttcaatacattcaagggaaaaacatctccaccctatggattggaaacgcaaaagaagtttgtactcaaggacaaaaacggtggtaaacttgttggcttccatggacgcgctggtgaagctttatatgctcttggagcatattttgctacaaccacaactcctgtgactcctgccaaaaaactatctgcaattggtggtgatgaaggaactgcatgggacgacggtgcgtacgatggtgtcaagaaggtgtacgtaggacaaggccaagatgggatatcagccgttaagtttgagtacaacaaaggcgcggagaatatcgtagtaggtgaacatggaaagcctactttactcggattcgaggagtttgagattgactatccaagtgaatacatcaccgcagttgaaggcacctacgataaaatctttgggagtgatggcctaatcataactatgcttaggttcaagactaataaacaaacgtctactccctttggacttgaagctggcacagccttcgaacttaaagaggaaggccacaagatcgttggcttccatggaaaagccagcgatttgcttcatcagtttggagtccatgtcatgccaatcaccgaatgatcacatttcagctacctccttcgcttccatcgaacttgttaatgtgatctcttgaaaataacttgttatacctatgatggttatgcctatctatgtttaaatgtttttaagcgttctcttttgtgatgttggtctttatataatgttacgtatgatagatttg

SEQ ID NO: 4676 - protein, 309 aa, Arabidopsis thaliana
SITRSLSPQMAQKVEAGGGAGGASWDDGIHDGVRKVHVGQGQDGVSSIKVVYAKDSQDIEGSEHGKKTLLGFETFEVDADDYIVAVQVTYDNVFGQDSDIITSITFNTFKGKTSPPYGLETQKKFVLKDKNGGKLVGFHGRAGEALYALGAYFATTTTPVTPAKKLSAIGGDEGTAWDDGAYDGVKKVYVGQGQDGISAVKFEYNKGAENIVVGEHGKPTLLGFEEFEIDYPSEYITAVEGTYDKIFGSDGLIITMLRFKTNKQTSTPFGLEAGTAFELKEEGHKIVGFHGKASDLLHQFGVHVMPITE

SEQ ID NO: 4677 - protein, 300 aa, Arabidopsis thaliana
MAQKVEAGGGAGGASWDDGIHDGVRKVHVGQGQDGVSSIKVVYAKDSQDIEGSEHGKKTLLGFETFEVDADDYIVAVQVTYDNVFGQDSDIITSITFNTFKGKTSPPYGLETQKKFVLKDKNGGKLVGFHGRAGEALYALGAYFATTTTPVTPAKKLSAIGGDEGTAWDDGAYDGVKKVYVGQGQDGISAVKFEYNKGAENIVVGEHGKPTLLGFEEFEIDYPSEYITAVEGTYDKIFGSDGLIITMLRFKTNKQTSTPFGLEAGTAFELKEEGHKIVGFHGKASDLLHQFGVHVMPITE

SEQ ID NO: 4678 - DNA, 1140 bp, Arabidopsis thaliana
gaaacacaaaaatggcgacggtaccattgttcacccagtttccctgcaaaaccctaaatccaagctcatcaaacactaaacaccaatcgaaatctccgatcctactaccgattaactcaataaatcggcgatcggagattggagtctctgttcatcggccagatttcaaaatccgagcgacggacatcgacgacgaatggggtcaagatggagtggagagagtatttgcctcatcttcaaccgtatcggtagcagataaagcaatcgaatccgtggaggagacggagaggctaaagagatcactagcggattcgttgtacggaacagatcgaggtttaagcgtatcgagtgatacgagagctgagatcagcgagctcatcacacagctcgagtctaagaaccctactccagctcctaacgaagctctgtttctcctcaacggcaaatggatcctcgcctacacgtcgttcgtggggttgttcccattgctctcacgaagaattgaaccgttggttaaagtggatgagatctcacaaaccattgattccgatagcttcaccgttcaaaactctgtccggttcgctggtccgttttccacaacgtcgtttagcaccaacgctaagtttgaaatccgaagtcctaaacgtgtccagattaagttcgagcaaggtgttatagggactcctcagctaacggattcgattgaaataccggaatccgtggaggttcttggtcagaaaatcgatctcaatcccattaaaggtttacttacatcagtccaagacactgcttcttcagtggctagaaccatttcaaaccaaccaccattgaagttttctctgcctagtgacaacacgcagtcgtggctgctcacaacttatctcgacaaggaccttcggatctcgagaggcgatggtggaagcgtctatgtgctcatcaaagaaggaagctctctcttaaacccttaaatcatcataactctcatcacatccatagtaacatatatacaagtatagacccatctgtctatgtttactagtgttgtaactgttatatagcttctttacctgttggagagttataaacttataatggatgttactcttggtatactgtactacaatacatatacataactac

SEQ ID NO: 4679 - protein, 321 aa, Arabidopsis thaliana
NTKMATVPLFTQFPCKTLNPSSSNTKHQSKSPILLPINSINRRSEIGVSVHRPDFKIRATDIDDEWGQDGVERVFASSSTVSVADKAIESVEETERLKRSLADSLYGTDRGLSVSSDTRAEISELITQLESKNPTPAPNEALFLLNGKWILAYTSFVGLFPLLSRRIEPLVKVDEISQTIDSDSFTVQNSVRFAGPFSTTSFSTNAKFEIRSPKRVQIKFEQGVIGTPQLTDSIEIPESVEVLGQKIDLNPIKGLLTSVQDTASSVARTISNQPPLKFSLPSDNTQSWLLTTYLDKDLRISRGDGGSVYVLIKEGSSLLNP

SEQ ID NO: 4680 - protein, 318 aa, Arabidopsis thaliana
MATVPLFTQFPCKTLNPSSSNTKHQSKSPILLPINSINRRSEIGVSVHRPDFKIRATDIDDEWGQDGVERVFASSSTVSVADKAIESVEETERLKRSLADSLYGTDRGLSVSSDTRAEISELITQLESKNPTPAPNEALFLLNGKWILAYTSFVGLFPLLSRRIEPLVKVDEISQTIDSDSFTVQNSVRFAGPFSTTSFSTNAKFEIRSPKRVQIKFEQGVIGTPQLTDSIEIPESVEVLGQKIDLNPIKGLLTSVQDTASSVARTISNQPPLKFSLPSDNTQSWLLTTYLDKDLRISRGDGGSVYVLIKEGSSLLNP

SEQ ID NO: 4681 - DNA, 1445 bp, Arabidopsis thaliana
aaggtgaaaaaagccaatcagaagctgagtaaactctaagctcacacaaaaatggcgtctcttcttggaacatcttcttctgcaatctgggcttctccttcactctcttctccttcctcaaaaccttcctcctcccccatttgcttcaggccaggaaaattgtttggaagcaagttaaatgcaggaatccaaataaggccaaagaagaacaggtctcgttaccatgtttcggttatgaatgtagccactgaaatcaactctactgaacaagtagtagggaagtttgattcaaagaagagtgcgagaccggtttatccatttgcagctatagtagggcaagatgagatgaagttatgtcttttgttgaatgttattgatccaaagattggtggtgttatgattatgggagatagaggaactggaaaatctacaactgttagatcattagttgatctgttacctgagattaatgtagttgcaggtgacccgtataactcggatccgatagatcctgagtttatgggtgttgaagtaagagagagagttgagaaaggagagcaagttcctgttattgcgactaagattaatatggttgatcttcctttgggtgcaacagaagatagagtttgtggaaccatcgatatcgaaaaggctttgacagaaggtgtaaaagcctttgagcctggtttgttggctaaagctaatagagggattctttatgttgatgaagttaatctcttggatgatcatttggttgatgttcttttggattcagctgcttctggttggaatacggttgagagagaagggatttcgatttctcacccggcgaggtttatcttgatcggttcaggaaatccggaagaaggagagcttaggccacagcttcttgatcggtttggtatgcatgcacaagtagggacggttagagatgctgatttacgggtcaagattgttgaagagagagctcgtttcgatagtaacccaaaggatttccgtgacacttacaaaaccgagcaggacaagcttcaagaccagatttcaactgctagggcaaacctttcctcggttcagattgatagggaattgaaggtgaagatctctagagtttgttcagagctcaatgttgatgggttgagaggagacatagtgactaacagagcagcaaaagcacttgcagctctcaaaggaaaagatcgagtaactccagatgatgttgcaaccgttatccctaactgcttaaggcaccgtctgaggaaagatccactggaatctattgattcaggagttctagtttccgagaagttcgccgagattttcagctgaataggagattcgattctgtgatcatttttctttaactttttctactctgtaaacggtgagaagaaccaaaactataaacaggcaaatctgattgaatatagagtctatgctttattcat

SEQ ID NO: 4682 - protein, 424 aa, Arabidopsis thaliana
MASLLGTSSSAIWASPSLSSPSSKPSSSPICFRPGKLFGSKLNAGIQIRPKKNRSRYHVSVMNVATEINSTEQVVGKFDSKKSARPVYPFAAIVGQDEMKLCLLLNVIDPKIGGVMIMGDRGTGKSTTVRSLVDLLPEINVVAGDPYNSDPIDPEFMGVEVRERVEKGEQVPVIATKINMVDLPLGATEDRVCGTIDIEKALTEGVKAFEPGLLAKANRGILYVDEVNLLDDHLVDVLLDSAASGWNTVEREGISISHPARFILIGSGNPEEGELRPQLLDRFGMHAQVGTVRDADLRVKIVEERARFDSNPKDFRDTYKTEQDKLQDQISTARANLSSVQIDRELKVKISRVCSELNVDGLRGDIVTNRAAKALAALKGKDRVTPDDVATVIPNCLRHRLRKDPLESIDSGVLVSEKFAEIFS

SEQ ID NO: 4683 - protein, 363 aa, Arabidopsis thaliana
MNVATEINSTEQVVGKFDSKKSARPVYPFAAIVGQDEMKLCLLLNVIDPKIGGVMIMGDRGTGKSTTVRSLVDLLPEINVVAGDPYNSDPIDPEFMGVEVRERVEKGEQVPVIATKINMVDLPLGATEDRVCGTIDIEKALTEGVKAFEPGLLAKANRGILYVDEVNLLDDHLVDVLLDSAASGWNTVEREGISISHPARFILIGSGNPEEGELRPQLLDRFGMHAQVGTVRDADLRVKIVEERARFDSNPKDFRDTYKTEQDKLQDQISTARANLSSVQIDRELKVKISRVCSELNVDGLRGDIVTNRAAKALAALKGKDRVTPDDVATVIPNCLRHRLRKDPLESIDSGVLVSEKFAEIFS

SEQ ID NO: 4684 - protein, 326 aa, Arabidopsis thaliana
MKLCLLLNVIDPKIGGVMIMGDRGTGKSTTVRSLVDLLPEINVVAGDPYNSDPIDPEFMGVEVRERVEKGEQVPVIATKINMVDLPLGATEDRVCGTIDIEKALTEGVKAFEPGLLAKANRGILYVDEVNLLDDHLVDVLLDSAASGWNTVEREGISISHPARFILIGSGNPEEGELRPQLLDRFGMHAQVGTVRDADLRVKIVEERARFDSNPKDFRDTYKTEQDKLQDQISTARANLSSVQIDRELKVKISRVCSELNVDGLRGDIVTNRAAKALAALKGKDRVTPDDVATVIPNCLRHRLRKDPLESIDSGVLVSEKFAEIFS

SEQ ID NO: 4685 - DNA, 1909 bp, Arabidopsis thaliana
atctttgagctttcttttcttctacagaaccctaatttcatgttctaggtgtctctcgaatggttctcatctcattgattactcaatctctagggtttagtggttcatccaaattcgtaccctaatgggtgccgtagcgatcaatcgtaaacgcagcgacgaatccttcaatttcattaatcaacaatcaaccaaccctttacgaaattcaccgtatttccaagcttccaagaaacgaagattctcattcgctatgtctgaagattctggtaagccagcgtcttcaaacccaacaatttcgaggatttcaaggtaccctgatgctaaagctcctcttagacgagagattcatgctcctagtagaggaattcttagatatggaaaggcaaaatctaatgattactgcgaaaaggacgcaaatttctttgttcgtaagtatgatgatgcaaagagatcagctttggaagctttgagattcgttaataaaggtaaagactttgttgatttgggtgatgaggttgaaaaggaggaagttgtttctgatgattcaagtgttcaagcaattgaagttattgattgtgatgatgatgaggagaagaagaatcttcagccttcgttttcttctggtgttactgatgttaagaaaggggagaactttagagttgaggatactagtatgatgctggattcgttgtcgttagatagagatgtcgataatgatgcttcgagcctcgaagcttatagaaagcttatgcaaagtgcggagaagaggaattcaaagttggaagctttgggttttgagattgtgttgaatgagaagaagttgtcactgctgcgtcagtctcgcccaaagactgtggaaaagcgtgttgaggtgcctcgtgaaccttttattcctctcacagaagatgaagaggctgaagtctaccgtgccttttctgggagaaatagaaggaaggtcttggctactcatgaaaactcaaacattgatattactggagaagttctgcaatgccttacaccatctgcatggctaaacgacgaggttatcaatgtctaccttgaactactcaaagaaagagaaactagagagcccaaaaagtatttgaagtgtcactacttcaatacctttttctacaaaaagctggtaagcgattctggttataattttaaagctgtcaggagatggactacgcagagaaagttgggatatgctcttattgactgtgacatgatatttgttcccatccacaggggtgtgcattggaccttggcagtaattaacaacagggaaagcaagctcttgtatcttgattcactgaatggagttgatcctatgattctgaatgctctggcaaaatacatgggtgatgaagcaaatgaaaaaagtggaaaaaagattgatgctaattcgtgggacatggaatttgtggaagaccttccccaacaaaagaatgggtatgactgtggaatgtttatgcttaagtacatcgattttttcagcagaggcctggggctatgtttcagccaggaacacatgccatacttccgactcagaacagctaaagagattctgaggctacgagctgattgaagttgcttgtgctaatgttttttcggctattaggaatactatttttggttgccattgttgatttgttcaaactttaaatcccactccttttaggcagtgaagcactcggctttaaaagcagaggtaaaaactgagtcaagcccagagctcttagctcgttccgttattgtatttttttccttcttcttgttttaaaatgtagatgaagcgttttggatctctatgttggttagtctagctgaagatatatgagatgttgaaaaccttatttatttctctccggtcttgaccagtgcgaacgcaatttaaagtttt

SEQ ID NO: 4686 - protein, 489 aa, Arabidopsis thaliana
MGAVAINRKRSDESFNFINQQSTNPLRNSPYFQASKKRRFSFAMSEDSGKPASSNPTISRISRYPDAKAPLRREIHAPSRGILRYGKAKSNDYCEKDANFFVRKYDDAKRSALEALRFVNKGKDFVDLGDEVEKEEVVSDDSSVQAIEVIDCDDDEEKKNLQPSFSSGVTDVKKGENFRVEDTSMMLDSLSLDRDVDNDASSLEAYRKLMQSAEKRNSKLEALGFEIVLNEKKLSLLRQSRPKTVEKRVEVPREPFIPLTEDEEAEVYRAFSGRNRRKVLATHENSNIDITGEVLQCLTPSAWLNDEVINVYLELLKERETREPKKYLKCHYFNTFFYKKLVSDSGYNFKAVRRWTTQRKLGYALIDCDMIFVPIHRGVHWTLAVINNRESKLLYLDSLNGVDPMILNALAKYMGDEANEKSGKKIDANSWDMEFVEDLPQQKNGYDCGMFMLKYIDFFSRGLGLCFSQEHMPYFRLRTAKEILRLRAD

SEQ ID NO: 4687 - protein, 446 aa, Arabidopsis thaliana
MSEDSGKPASSNPTISRISRYPDAKAPLRREIHAPSRGILRYGKAKSNDYCEKDANFFVRKYDDAKRSALEALRFVNKGKDFVDLGDEVEKEEVVSDDSSVQAIEVIDCDDDEEKKNLQPSFSSGVTDVKKGENFRVEDTSMMLDSLSLDRDVDNDASSLEAYRKLMQSAEKRNSKLEALGFEIVLNEKKLSLLRQSRPKTVEKRVEVPREPFIPLTEDEEAEVYRAFSGRNRRKVLATHENSNIDITGEVLQCLTPSAWLNDEVINVYLELLKERETREPKKYLKCHYFNTFFYKKLVSDSGYNFKAVRRWTTQRKLGYALIDCDMIFVPIHRGVHWTLAVINNRESKLLYLDSLNGVDPMILNALAKYMGDEANEKSGKKIDANSWDMEFVEDLPQQKNGYDCGMFMLKYIDFFSRGLGLCFSQEHMPYFRLRTAKEILRLRAD

SEQ ID NO: 4688 - protein, 305 aa, Arabidopsis thaliana
MMLDSLSLDRDVDNDASSLEAYRKLMQSAEKRNSKLEALGFEIVLNEKKLSLLRQSRPKTVEKRVEVPREPFIPLTEDEEAEVYRAFSGRNRRKVLATHENSNIDITGEVLQCLTPSAWLNDEVINVYLELLKERETREPKKYLKCHYFNTFFYKKLVSDSGYNFKAVRRWTTQRKLGYALIDCDMIFVPIHRGVHWTLAVINNRESKLLYLDSLNGVDPMILNALAKYMGDEANEKSGKKIDANSWDMEFVEDLPQQKNGYDCGMFMLKYIDFFSRGLGLCFSQEHMPYFRLRTAKEILRLRAD

SEQ ID NO: 4689 - DNA, 1626 bp, Arabidopsis thaliana
aatctttagaaactaagagagaatggaattaacactaaaattgctggttctgcttctgtttatcttaaatcatcatgttggttctggctctatcgtcaagtttcttcccggttttgaaggccctcttcctttcgaacttgaaaccgggtacattggtattggtgaggaagaggaagtgcaattgttctattatttcatcaaatctgagagaaatccaaaagaagaccctcttcttctctggttaagtggaggacctggatgttcttctatcactggccttcttttccagaatggacctttggctttgaagtccgaggtttacaatggaagtgttccttctttggtctctactacatattcgtggactaagacggcgaacataatattcttggatcaacctgttggagctggcttctcctactcaagagctccacttattgatacacctactgacacaggagaagttaagaggattcatgagtttctccaaaagtggctaagcaagcatccacagttttcttccaaccatttttatgctggcggagattcttattccggtatgattgttccggccctcgttcaagaaatctcgaaaggaaattatatatgttgcaaccctcctataaatctaaagggttatgtactcgggaacccgataacgcacgaagacgacccaaactatcgcattccattttctcatggaatggcactaatttcagatgaactatacgagtcaattagggaagcctgcaaaggaaattatttcaatgtggatccacgaaacacaaaatgtttgaaacttgtcgaggaatttcataagtgtaccgacaaactaaatgaattccatatactatcaccagattgcgacacggcatctcctgattgctatttatatccattttatctcattagcttttgggccaatgacgagagcgtccgcgatgctcttcatgttaataagaggagtattggaaaatgggagcgatgtaactatctgagtaaaccatacaacaaagacatcaagagcagcgtaccataccatatgaataacagtgttagtggctaccgatctctcatctacagtggtgatcatgatttggtggttcctttccttgcaacacaagcctggataaaatctctaaattactctatcattgatgaatggagaccttggatgattagagatcaaatcactggatacacgagaacttattccaataagatgacatttgctactgtcaaaggaagtgggcacacagcggagaataaaccacaagagagttttatcatgtttcgaaggtggattaatggccaacctttgtaaaaattacaattatgaattatctactatgtgagctatttgttcctgaggaggtttagaactctaccactagttcgacatgctatagttaccaataaatgaggtcttatttgggtctagggagactacaggccaaagacttggaacttcttggtttattgttatatgttgttaggtaacatttttgtgttattcatagattttaccttttggtacttttatcttctcacagattatattgttctgtgttgtgctgttattttttacaattaaacttagatttttaataaattcttttttgtccc

SEQ ID NO: 4690 - protein, 433 aa, Arabidopsis thaliana
MELTLKLLVLLLFILNHHVGSGSIVKFLPGFEGPLPFELETGYIGIGEEEEVQLFYYFIKSERNPKEDPLLLWLSGGPGCSSITGLLFQNGPLALKSEVYNGSVPSLVSTTYSWTKTANIIFLDQPVGAGFSYSRAPLIDTPTDTGEVKRIHEFLQKWLSKHPQFSSNHFYAGGDSYSGMIVPALVQEISKGNYICCNPPINLKGYVLGNPITHEDDPNYRIPFSHGMALISDELYESIREACKGNYFNVDPRNTKCLKLVEEFHKCTDKLNEFHILSPDCDTASPDCYLYPFYLISFWANDESVRDALHVNKRSIGKWERCNYLSKPYNKDIKSSVPYHMNNSVSGYRSLIYSGDHDLVVPFLATQAWIKSLNYSIIDEWRPWMIRDQITGYTRTYSNKMTFATVKGSGHTAENKPQESFIMFRRWINGQPL

SEQ ID NO: 4691 - protein, 254 aa, Arabidopsis thaliana
MIVPALVQEISKGNYICCNPPINLKGYVLGNPITHEDDPNYRIPFSHGMALISDELYESIREACKGNYFNVDPRNTKCLKLVEEFHKCTDKLNEFHILSPDCDTASPDCYLYPFYLISFWANDESVRDALHVNKRSIGKWERCNYLSKPYNKDIKSSVPYHMNNSVSGYRSLIYSGDHDLVVPFLATQAWIKSLNYSIIDEWRPWMIRDQITGYTRTYSNKMTFATVKGSGHTAENKPQESFIMFRRWINGQPL

SEQ ID NO: 4692 - DNA, 1369 bp, Arabidopsis thaliana
atcatccgcggttcacttccttcgtttcgaaattattagggttactgcgtatttgcactctccttcttcgtctctccagcttgacaatgcctcgctatgatgatcgctatggaaacactcgcctctatgttggtcgcttatcatctagaactcgtaccagagaccttgagcgtctctttagcagatacggaaggtttctgggggtttgcctaacctggagatgtttgatgaatgggtggactgtggtgtaattggtggaaattctcgtctggtgtatagagggtgcatcggcgattttgtttgttgatttattgcatgtttttattggaaatggcctcaaatctcaaaaactggtgtttggaagttccttaagtaatgatggccttgattttctggcaacaatttacgcagagtacgagatgtggatatgaagcgtgattatgcctttgttgaatttagtgatcctcgtgatgctgatgacgcaagatattacttggatggacgggatttcgatggaagtcgcatcactgtggaggcatcaagaggggctcctcgtggttcgcgggacaatggtagcagaggcccacctcctggttctggtcgctgttttaattgtggtgtcgatggccactgggcccgagactgcacagcaggagactggaagaataaatgttaccgctgtggtgaaagaggacacattgagagaaactgcaaaaacagtcctagtccaaagaaggccaggcagggtggaagctattccaggtcaccagtcaaatcccgctcccctcgtcgccgaaggagcccaagccgtagccgtagttacagtcgaggtcgcagctacagtcgatcgcgatccccagtgagaagagagaaaagcgtggaggacagatcacgcagtcctaaggcaatggagcgatctgtatctcccaaaggtagggaccaaagcctgagtccagaccgaaaagtgatagatgcaagcccaaagcgtggatcagactatgatggtagcccaaaagagaatggtaatggcaggaactctgcgagtcccattgttggaggtggtgaaagtcctgttggacttaatggtcaagacaggagcccgattgatgatgaggctgagcttagccgtccttcccctaaaggcagtgagtcaccttgatggttcacaggttaaaagctctatgtagcattctgtactgaaggatgttgtttcctttccctttctttctgcgtgatacttttcttttcgttgcgtgacaatcctggatgttactttgccttctctcttgatgactcttggtttgttttccgacaactttcaaactctgcgatgttacttttcattgtttagtaagaatcatgcatttat

SEQ ID NO: 4693 - protein, 243 aa, Arabidopsis thaliana
MKRDYAFVEFSDPRDADDARYYLDGRDFDGSRITVEASRGAPRGSRDNGSRGPPPGSGRCFNCGVDGHWARDCTAGDWKNKCYRCGERGHIERNCKNSPSPKKARQGGSYSRSPVKSRSPRRRRSPSRSRSYSRGRSYSRSRSPVRREKSVEDRSRSPKAMERSVSPKGRDQSLSPDRKVIDASPKRGSDYDGSPKENGNGRNSASPIVGGGESPVGLNGQDRSPIDDEAELSRPSPKGSESP

SEQ ID NO: 4694 - protein, 140 aa, Arabidopsis thaliana
MPLLNLVILVMLMTQDITWMDGISMEVASLWRHQEGLLVVRGTMVAEAHLLVLVAVLIVVSMATGPETAQQETGRINVTAVVKEDTLRETAKTVLVQRRPGRVEAIPGHQSNPAPLVAEGAQAVAVVTVEVAATVDRDPQ

SEQ ID NO: 4695 - protein, 130 aa, Arabidopsis thaliana
MLMTQDITWMDGISMEVASLWRHQEGLLVVRGTMVAEAHLLVLVAVLIVVSMATGPETAQQETGRINVTAVVKEDTLRETAKTVLVQRRPGRVEAIPGHQSNPAPLVAEGAQAVAVVTVEVAATVDRDPQ

SEQ ID NO: 4696 - DNA, 1153 bp, Arabidopsis thaliana
attgaagatatgggggaactaaacggagtcatcattccgactatagacttggaagaggtttctgataagattctgaatcagaaaatccgtgaagccagtgagagatggggatgtttcagggtgataaaccatggagtttcattgtctttgatggctgagatgaagaagactgttattgatctctttcaacgtccatacgaggtgaaagtgcgtaacaccgatgtgctcctagggagtggttacagagctccaaacgaaatcaatccttactatgaagcattaggtctctatgacatggcttctcctcatgctgtcaataccttttgtgaccaactcgaagcttctgcagatcaaagggagattatggtgaagtatgcgaaggctatcaatggacttgcaacggatttagcgaggaaattagcagagagttacgggctggttgagaccgactttttcaaagaatggccgagccagtttcggattaacaaatatcattttaaacccgaaacagtcgggaaactcggtgtgcaactacacacggattcagggttcttgacgattcttcaagatgatgaaaatgttggtggacttgaagctatggacaattcttcaggaacctttttccccatagacccgttgccaaacacgcttgctatcaacctcggggacatggctacgatatggagcaacggaagattgtgcaatgtgaagcatagagtgcaatgcaaagaagcaacaatgaggtattccatcgcctcgttcttattaggaccaatggatacagatttggaacctccaagtgagtttgtggatgcagaacatccgcgactatacaagcctattagtcacgaaggggtacgaaatattagaatgactaaaaaattgcatgatggagaagctctcaagcttataacccatgcaggactagataaatgacctaaatggcattttaagatggtagcgctatggaaccagaaaactgcaatttcttacctaagaatgagaaataattatgtattacctattggattgttgcaatatatgaaaaaaaaaaaattaccttgagatctttgtggatgcaatagtactacgattgatcctctgtttgttggtagtacttgtagagaagaaagaaattatcaaaatcatattt

SEQ ID NO: 4697 - protein, 311 aa, Arabidopsis thaliana
IEDMGELNGVIIPTIDLEEVSDKILNQKIREASERWGCFRVINHGVSLSLMAEMKKTVIDLFQRPYEVKVRNTDVLLGSGYRAPNEINPYYEALGLYDMASPHAVNTFCDQLEASADQREIMVKYAKAINGLATDLARKLAESYGLVETDFFKEWPSQFRINKYHFKPETVGKLGVQLHTDSGFLTILQDDENVGGLEAMDNSSGTFFPIDPLPNTLAINLGDMATIWSNGRLCNVKHRVQCKEATMRYSIASFLLGPMDTDLEPPSEFVDAEHPRLYKPISHEGVRNIRMTKKLHDGEALKLITHAGLDK

SEQ ID NO: 4698 - protein, 308 aa, Arabidopsis thaliana
MGELNGVIIPTIDLEEVSDKILNQKIREASERWGCFRVINHGVSLSLMAEMKKTVIDLFQRPYEVKVRNTDVLLGSGYRAPNEINPYYEALGLYDMASPHAVNTFCDQLEASADQREIMVKYAKAINGLATDLARKLAESYGLVETDFFKEWPSQFRINKYHFKPETVGKLGVQLHTDSGFLTILQDDENVGGLEAMDNSSGTFFPIDPLPNTLAINLGDMATIWSNGRLCNVKHRVQCKEATMRYSIASFLLGPMDTDLEPPSEFVDAEHPRLYKPISHEGVRNIRMTKKLHDGEALKLITHAGLDK

SEQ ID NO: 4699 - protein, 261 aa, Arabidopsis thaliana
MAEMKKTVIDLFQRPYEVKVRNTDVLLGSGYRAPNEINPYYEALGLYDMASPHAVNTFCDQLEASADQREIMVKYAKAINGLATDLARKLAESYGLVETDFFKEWPSQFRINKYHFKPETVGKLGVQLHTDSGFLTILQDDENVGGLEAMDNSSGTFFPIDPLPNTLAINLGDMATIWSNGRLCNVKHRVQCKEATMRYSIASFLLGPMDTDLEPPSEFVDAEHPRLYKPISHEGVRNIRMTKKLHDGEALKLITHAGLDK

SEQ ID NO: 4700 - DNA, 665 bp, Arabidopsis thaliana
attattgttatttttgacagagagaaatttctcagttacgcttcatcctcctctaagagatcttttttctatcttgggtagtagagagaaatggcgggtcggggaaaacaacttggatctggtgcagcgaagaagtctacttctcgtagtagcaaggctgggcttcaattccctgttggtcgtatcgctcgatttttgaaagccggtaagtacgccgagcgtgttggtgccggagctccggtctatctcgccgccgttcttgaatacctcgccgctgaggtacttgagcttgctgggaacgcagcgagagacaacaagaagacccgtatagttccacgacacattcagcttgctgtgaggaatgatgaggagctaagcaagttgcttggagatgtgacaattgctaatggaggagtgatgcctaacatccacaatctccttctccccaagaaggctggttcatctaagcctactgaagaagattaggttcattacgaagatagggaaagctggaaactggttgatatcagataatgcttaggattgtttgttttttttgtcatttgcttttcctctgcagcaatggaagctgtgtggttgtactagttgttaaggttacccttgtttcactttatgtgaatatatgaagaaattgttctatttcg

SEQ ID NO: 4701 - protein, 131 aa, Arabidopsis thaliana
MAGRGKQLGSGAAKKSTSRSSKAGLQFPVGRIARFLKAGKYAERVGAGAPVYLAAVLEYLAAEVLELAGNAARDNKKTRIVPRHIQLAVRNDEELSKLLGDVTIANGGVMPNIHNLLLPKKAGSSKPTEED

SEQ ID NO: 4702 - protein, 65 aa, Arabidopsis thaliana
LLLFLTERNFSVTLHPPLRDLFSILGSREKWRVGENNLDLVQRRSLLLVVARLGFNSLLVVSLDF

SEQ ID NO: 4703 - DNA, 626 bp, Arabidopsis thaliana
aaaataaaaacctttacttatcttctttcttctcacttctcagacctcaatttccaagcagagatgacggtgaagataaggctcgcgcgtcttggttgtaaacaccgacccttctatcgtgtagttgtcgccgatgaaaaatcgcgcagggacggtaaacaaatcgaggtgttaggcttttatgatccactccaaggcaaagaagatgcggatagagtgagcctcaaattcgacagaatcaagtactggttatctgttggagctcaaccaacagacacagtggaaagcatgcttttcagggccggtttgataccaccaaagcctatggtagtggtcggttcgaaaaatgggcagaagtctacgagccaacatgtttcacccattacaggtgaaatcttgaactaagagtgttgatgcgttgagcaagaaagagccttttgtgtctgtgtgaaaggagtttatgtaatgttgtttaagacttttctgtttatgtgaaaggagttaatgtaatgttgtttaagacttttgctttctatgtgaaagcagtttaatgttatgttggttaagacttttctgcaacagagtttggtgaatttttattctttaatatgagcatgcctttttgc

SEQ ID NO: 4704 - protein, 134 aa, Arabidopsis thaliana
KIKTFTYLLSSHFSDLNFQAEMTVKIRLARLGCKHRPFYRVVVADEKSRRDGKQIEVLGFYDPLQGKEDADRVSLKFDRIKYWLSVGAQPTDTVESMLFRAGLIPPKPMVVVGSKNGQKSTSQHVSPITGEILN

SEQ ID NO: 4705 - protein, 113 aa, Arabidopsis thaliana
MTVKIRLARLGCKHRPFYRVVVADEKSRRDGKQIEVLGFYDPLQGKEDADRVSLKFDRIKYWLSVGAQPTDTVESMLFRAGLIPPKPMVVVGSKNGQKSTSQHVSPITGEILN

SEQ ID NO: 4706 - DNA, 1110 bp, Arabidopsis thaliana
aattatttccggccatcactttcttctctacttctttctttctctctctagttgttgttctctctctctctcgcatcctccaattcatcgtcctcacgttcccttttgtttattcatcttccttccttcttcacatttctgattttctctatttggggggtttgtttccacattatacatatctagggttttgagatggttaattgaaagataatggtcgaagtttcggaggaattggcttcacattgtgggtgtttctggcttcctcaggtttaaatctgaggttgatctcttttgttttttggtaaattgtgacatattttggctcgaagaagaagaagaagaggcaatgagcgcatcaaggttcataaagtgcgtcaccgttggtgatggagctgttggtaaaacctgtttgctgatttcttataccagcaacacctttcccacggattatgttccgactgttttcgataactttagtgcaaatgtggttgttaatggagccacggtgaatcttggattgtgggatactgcagggcaagaggactataacagattaagacctttgagttaccgtggtgctgatgttttcattcttgccttctctctcattagtaaggctagttatgagaatgtttccaagaagtggattcctgagttgaagcactatgctcctggtgtcccaattgtccttgttggaaccaaactagatcttcgagatgacaaacagtttttcatcgaccatcctggtgctgtccctattaccactgttcagggagaggagctgaagaagctaattggagcgccagcttacatcgagtgcagttcaaaatcacaagagaacgtgaagggcgtgtttgatgcagcgatcagagtggtccttcaacctccaaagcagaagaaaaagaagaacaaagcacaaaaggcctgctccatcttgtaatagcactcatggaagtcaagaagctctttgagatgaggatgacagggtggtttaaaaaagtatcgctttttcatttttgttgttgttttccgttttcatttgtgatctcttagttccgtacaaaacgaattgtgaggttaattcaacttctattttaactgatagcc

SEQ ID NO: 4707 - protein, 197 aa, Arabidopsis thaliana
MSASRFIKCVTVGDGAVGKTCLLISYTSNTFPTDYVPTVFDNFSANVVVNGATVNLGLWDTAGQEDYNRLRPLSYRGADVFILAFSLISKASYENVSKKWIPELKHYAPGVPIVLVGTKLDLRDDKQFFIDHPGAVPITTVQGEELKKLIGAPAYIECSSKSQENVKGVFDAAIRVVLQPPKQKKKKNKAQKACSIL

SEQ ID NO: 4708 - DNA, 1907 bp, Arabidopsis thaliana
gtctcctcttcggataatcctatccttctcttcctataaatacctctccactcttcctcttcctccaccactacaaccaccgcaacaaccaccaaaaaccctctcaaagaaatttcttttttttcttactttcttggtttgtcaaatatggtcagccatccaatggagaaagctgcaaatggtgcgtctgcgttggaaacgcagacgggtgagttagatcagccggaacggcttcgtaagatcatatcggtgtcttccattgccgccggtgtacagttcggttgggctttacagttatctctgttgactccttacgtgcagctactcggaatcccacataaatgggcttctctgatttggctctgtggtccaatctccggtatgcttgttcagcctatcgtcggttaccacagtgaccgttgcacctcaagattcggccgtcgtcgtcccttcatcgtcgctggagctggtttagtcaccgttgctgttttccttatcggttacgctgccgatataggtcacagcatgggcgatcagcttgacaaaccgccgaaaacgcgagccatagcgatattcgctctcgggttttggattcttgacgtggctaacaacaccttacaaggaccctgcagagctttcttggctgatttatcagcagggaacgctaagaaaacgcgaaccgcaaacgcgtttttctcgtttttcatggcggttggaaacgttttgggttacgctgcgggatcttacagaaatctctacaaagttgtgcctttcacgatgactgagtcatgcgatctctactgcgcaaacctcaaaacgtgttttttcctatccataacgcttctcctcatagtcactttcgtatctctctgttacgtgaaggagaagccatggacgccagagccaacagccgatggaaaagcctccaacgttccgtttttcggagaaatcttcggagctttcaaggaactaaaaagacccatgtggatgcttcttatagtcactgcactaaactggatcgcttggttccctttccttctcttcgacactgattggatgggccgtgaggtgtacggaggaaactcagacgcaaccgcaaccgcagcctctaagaagctttacaacgacggagtcagagctggtgctttggggcttatgcttaacgctattgttcttggtttcatgtctcttggtgttgaatggattggtcggaaattgggaggagctaaaaggctttggggtattgttaacttcatcctcgccatttgcttggccatgacggttgtggttacgaaacaagctgagaatcaccgacgagatcacggcggcgctaaaacaggtccacctggtaacgtcacagctggtgctttaactctcttcgccatcctcggtatcccccaagccattacgtttagcattccttttgcactagcttccatattttcaaccaattccggtgccggccaaggactttccctaggtgttctgaatctagccattgtcgtccctcagatggtaatatctgtgggaggtggaccattcgacgaactattcggtggtggaaacattccagcatttgtgttaggagcgattgcggcagcggtaagtggtgtattggcgttgacggtgttgccttcaccgcctccggatgctcctgccttcaaagctactatgggatttcattgaattttagcagtggttgtttggctctctttctctcataaaacagtagtgttgtgcaaatcctacataaagaaaaaagaaaaggaaattaaactcattgggttggtttgtattttacctaaacccacgaagttcctttttctttttgtaactcaatttaaatttggagtatattttactttttgttaccttcaaggcttcaatattacgacttcattgttcgg

SEQ ID NO: 4709 - protein, 512 aa, Arabidopsis thaliana
MVSHPMEKAANGASALETQTGELDQPERLRKIISVSSIAAGVQFGWALQLSLLTPYVQLLGIPHKWASLIWLCGPISGMLVQPIVGYHSDRCTSRFGRRRPFIVAGAGLVTVAVFLIGYAADIGHSMGDQLDKPPKTRAIAIFALGFWILDVANNTLQGPCRAFLADLSAGNAKKTRTANAFFSFFMAVGNVLGYAAGSYRNLYKVVPFTMTESCDLYCANLKTCFFLSITLLLIVTFVSLCYVKEKPWTPEPTADGKASNVPFFGEIFGAFKELKRPMWMLLIVTALNWIAWFPFLLFDTDWMGREVYGGNSDATATAASKKLYNDGVRAGALGLMLNAIVLGFMSLGVEWIGRKLGGAKRLWGIVNFILAICLAMTVVVTKQAENHRRDHGGAKTGPPGNVTAGALTLFAILGIPQAITFSIPFALASIFSTNSGAGQGLSLGVLNLAIVVPQMVISVGGGPFDELFGGGNIPAFVLGAIAAAVSGVLALTVLPSPPPDAPAFKATMGFH

SEQ ID NO: 4710 - protein, 507 aa, Arabidopsis thaliana
MEKAANGASALETQTGELDQPERLRKIISVSSIAAGVQFGWALQLSLLTPYVQLLGIPHKWASLIWLCGPISGMLVQPIVGYHSDRCTSRFGRRRPFIVAGAGLVTVAVFLIGYAADIGHSMGDQLDKPPKTRAIAIFALGFWILDVANNTLQGPCRAFLADLSAGNAKKTRTANAFFSFFMAVGNVLGYAAGSYRNLYKVVPFTMTESCDLYCANLKTCFFLSITLLLIVTFVSLCYVKEKPWTPEPTADGKASNVPFFGEIFGAFKELKRPMWMLLIVTALNWIAWFPFLLFDTDWMGREVYGGNSDATATAASKKLYNDGVRAGALGLMLNAIVLGFMSLGVEWIGRKLGGAKRLWGIVNFILAICLAMTVVVTKQAENHRRDHGGAKTGPPGNVTAGALTLFAILGIPQAITFSIPFALASIFSTNSGAGQGLSLGVLNLAIVVPQMVISVGGGPFDELFGGGNIPAFVLGAIAAAVSGVLALTVLPSPPPDAPAFKATMGFH

SEQ ID NO: 4711 - protein, 434 aa, Arabidopsis thaliana
MLVQPIVGYHSDRCTSRFGRRRPFIVAGAGLVTVAVFLIGYAADIGHSMGDQLDKPPKTRAIAIFALGFWILDVANNTLQGPCRAFLADLSAGNAKKTRTANAFFSFFMAVGNVLGYAAGSYRNLYKVVPFTMTESCDLYCANLKTCFFLSITLLLIVTFVSLCYVKEKPWTPEPTADGKASNVPFFGEIFGAFKELKRPMWMLLIVTALNWIAWFPFLLFDTDWMGREVYGGNSDATATAASKKLYNDGVRAGALGLMLNAIVLGFMSLGVEWIGRKLGGAKRLWGIVNFILAICLAMTVVVTKQAENHRRDHGGAKTGPPGNVTAGALTLFAILGIPQAITFSIPFALASIFSTNSGAGQGLSLGVLNLAIVVPQMVISVGGGPFDELFGGGNIPAFVLGAIAAAVSGVLALTVLPSPPPDAPAFKATMGFH

SEQ ID NO: 4712 - DNA, 718 bp, Arabidopsis thaliana
aacactcttctcgccgccgttcctctctctgcctcttgagcctcttgagcctccggagctggtgaaataaatcgtcttttctatctcctttgaagatggcgagcaatattatcatgttcgaggatatcttcgtggtcgataagctagaccctgatggcaaaaagttcgataaagttacgcgtgttgaagcaaggagccacaacttggaaatgtttatgcatttagatgttaacactgaggtttatccattggctgttggtgataagttcacgctggctatggctcccacgcttaatctcgatggaactcctgataccggatactttactccgggagcaaagaaaacacttgcagataagtatgaatacatcatgcacgggaagctttacaagatctctgagcgtgacggcaaaactccaaaagcagagttatatgtttcgttcggggggctcctgatgttgcttcagggagatccagctcatatttctcacttcgaacttgaccagaggctctttctactcatgaggaagctttgagatgccattgtctaatcactttccgagaattttcgcataaaaaccgaattaacagagagctttcttataaaagctttatcttaagttaaactttgctattataacttaatactattttcatgaagcaactcttgtacatccaatatttaactgtccaattgaattattcttgtagctctgtc

SEQ ID NO: 4713 - protein, 146 aa, Arabidopsis thaliana; identical to SEQ ID NO: 4054

SEQ ID NO: 4714 - protein, 140 aa, Arabidopsis thaliana; identical to SEQ ID NO: 4055

SEQ ID NO: 4715 - protein, 108 aa, Arabidopsis thaliana; identical to SEQ ID NO: 4056

SEQ ID NO: 4716 - DNA, 627 bp, Arabidopsis thaliana
atcatcatccaacatggcatcatcatcaatcctcatccctccgattctcacccgtcgtaatctcctcctctccaccacaatcgccaccgtaactccaccaccaccagctaaaccaccttcccccgacatcacaataaccgatcgagtcttcctcgacttctccctctgccccacctacttccggtcatcggagtatcatacgcctctcctccaccaccgccgttctattgattcttttggaaaacacgagactgaaacgatgacgtggcacgaacagatcaaaacactatacgacgtcgttggtcaattcttacacagaaaaactattttgcgaagtttcttggagacgagagagctcaaaacgcgagatctttgtggaatagacctttgaagacggttttcattagtggctgtggagagcttaaggtcactaatccttcactctctccaactttgccttaattatcgtatcttcgtatatatatatatgtgtgtgtgtcaaatcttgtttataatcatgcttctgcttcttctactatatgaaaatgaaattgtaatttaatcctactctggtggttgctaaagattagtatagagaagagcttatataatcataacattgagggc

SEQ ID NO: 4717 - protein, 129 aa, Arabidopsis thaliana
SSSNMASSSILIPPILTRRNLLLSTTIATVTPPPPAKPPSPDITITDRVFLDFSLCPTYFRSSEYHTPLLHHRRSIDSFGKHETETMTWHEQIKTLYDVVGQFLHRKTILRSFLETRELKTRDLCGIDL

SEQ ID NO: 4718 - protein, 125 aa, Arabidopsis thaliana
MASSSILIPPILTRRNLLLSTTIATVTPPPPAKPPSPDITITDRVFLDFSLCPTYFRSSEYHTPLLHHRRSIDSFGKHETETMTWHEQIKTLYDVVGQFLHRKTILRSFLETRELKTRDLCGIDL

SEQ ID NO: 4719 - DNA, 1206 bp, Arabidopsis thaliana
aaataaaacaataaacagtcgaaattctccggcgaagatgagaaccggaaaaggaaatcaagaggaagaagattacggagaagaagactttaactctaaacgtgaaggtccttcttccaacactactgttcatagcaacagagattcaaaggaaaatgataaagctagtgcgatacgttctaaacattcggtcactgagcaacgtagaagaagcaaaatcaatgaaagatttcagatattgagagaactaattcccaacagtgaacaaaaacgtgacactgcttcattccttttagaggtgatagattatgttcagtatttacaagagaaggtgcaaaagtatgaaggatcgtatccaggttggagtcaggaaccaacaaagttgacgccatggaggaataatcattggcgagttcaaagtttggggaaccacccagtagctataaataatggatctggtccagggataccttttcctggaaagtttgaagacaacactgtgacttcgacacctgcaattattgcagaaccgcaaatcccgattgaatctgacaaagcaagagctataaccggcatatcgattgaaagtcaacctgagttagacgacaaaggattaccaccactacaaccaattcttccaatggtacaaggcgaacaagctaatgaatgtcctgcaactagtgatgggctaggccaaagtaatgacctggttattgaaggtggaaccattagcatctctagtgcctactcgcatgagttattgagctcattaacacaagcactccagaatgcaggcattgatctgtcgcaagcaaagctttctgtgcagatcgatcttgggaagcgagccaatcaaggtctaactcatgaagagccatcaagtaagaatccattatcatatgatacgcaaggaagggattcaagcgttgaggaagaatctgaacattctcacaagcggatgaaaacactgtgacatttctctctcaggctccacggcgctggaatatataaatgtattgacagattccttgtatcgtgtacattgttcggcttctaggggttcctatagtactcgttaagataaactttggttagtagattctgcgtttttttgtggttctgagtttgtatcatcttctgcatcattcatgtaacctatcaaatatgatctcttgtggtttcaagttattgcatcatttttttccg

SEQ ID NO: 4720 - protein, 323 aa, Arabidopsis thaliana
NKTINSRNSPAKMRTGKGNQEEEDYGEEDFNSKREGPSSNTTVHSNRDSKENDKASAIRSKHSVTEQRRRSKINERFQILRELIPNSEQKRDTASFLLEVIDYVQYLQEKVQKYEGSYPGWSQEPTKLTPWRNNHWRVQSLGNHPVAINNGSGPGIPFPGKFEDNTVTSTPAIIAEPQIPIESDKARAITGISIESQPELDDKGLPPLQPILPMVQGEQANECPATSDGLGQSNDLVIEGGTISISSAYSHELLSSLTQALQNAGIDLSQAKLSVQIDLGKRANQGLTHEEPSSKNPLSYDTQGRDSSVEEESEHSHKRMKTL

SEQ ID NO: 4721 - protein, 311 aa, Arabidopsis thaliana
MRTGKGNQEEEDYGEEDFNSKREGPSSNTTVHSNRDSKENDKASAIRSKHSVTEQRRRSKINERFQILRELIPNSEQKRDTASFLLEVIDYVQYLQEKVQKYEGSYPGWSQEPTKLTPWRNNHWRVQSLGNHPVAINNGSGPGIPFPGKFEDNTVTSTPAIIAEPQIPIESDKARAITGISIESQPELDDKGLPPLQPILPMVQGEQANECPATSDGLGQSNDLVIEGGTISISSAYSHELLSSLTQALQNAGIDLSQAKLSVQIDLGKRANQGLTHEEPSSKNPLSYDTQGRDSSVEEESEHSHKRMKTL

SEQ ID NO: 4722 - DNA, 997 bp, Arabidopsis thaliana
aaatttgggaaagaagcagaagtgtgacaagacgattctggattctggatacagctggaagagaattaaaagaaaaagaaaaacacttccaacgaagaagatcgatttgcttcgagtctctgaaagaagaagaaaaaataatggggcgtatggattatctagcgatgaagaccgacgacgtcgatacggtggcgttagtcaattccgatatggaagagctcaaggtcgctgcgaagaaactgtttagcgatgtttcgaagcttggtggattaggcttcggtgtttcttttctcaaattcctcgcttctttcgctgccatttacttgttaattttggatcgtaccaattggaaaaccaagatgcttacatcactcctaataccatacatcttccttagccttcctagtgtcattttcaactttctcagtggagatgttgggaaatggattgctttcgttgcggttgttctcagacttttcttccctaagcatttcccagattggcttgagatgccaggttctctgatcctgctactggtagtttctccacacttccttgctcaccatatacgtggaacctggataggcactgtaatcagccttttcattggatgttaccttcttcaagaacatattcgagcatcgggtggattcaggaactcattcacacagccccgtggagtatcaaacactttagggatcattcttcttttggtctaccctgtctgggctctaatcgtccgtgtcatgtaatccacattcctctttcatcgacaagttgtttcttgctcggctgctccaataaactgcgtgaaacatcgagcagagcaagtctctatggtgttcctttcttctgattatgttgcatacccaaatactacctcaagctcaatcaatgttctatgtataaaaaaatctcatttttcaactatttgtttgtcctactataagaaaaagttctttattgaatgattgtaaaaactagccttcatgagtcg

SEQ ID NO: 4723 - protein, 249 aa, Arabidopsis thaliana
IWERSRSVTRRFWILDTAGRELKEKEKHFQRRRSICFESLKEEEKIMGRMDYLAMKTDDVDTVALVNSDMEELKVAAKKLFSDVSKLGGLGFGVSFLKFLASFAAIYLLILDRTNWKTKMLTSLLIPYIFLSLPSVIFNFLSGDVGKWIAFVAVVLRLFFPKHFPDWLEMPGSLILLLVVSPHFLAHHIRGTWIGTVISLFIGCYLLQEHIRASGGFRNSFTQPRGVSNTLGIILLLVYPVWALIVRVM

SEQ ID NO: 4724 - protein, 203 aa, Arabidopsis thaliana
MGRMDYLAMKTDDVDTVALVNSDMEELKVAAKKLFSDVSKLGGLGFGVSFLKFLASFAAIYLLILDRTNWKTKMLTSLLIPYIFLSLPSVIFNFLSGDVGKWIAFVAVVLRLFFPKHFPDWLEMPGSLILLLVVSPHFLAHHIRGTWIGTVISLFIGCYLLQEHIRASGGFRNSFTQPRGVSNTLGIILLLVYPVWALIVRVM

SEQ ID NO: 4725 - protein, 200 aa, Arabidopsis thaliana
MDYLAMKTDDVDTVALVNSDMEELKVAAKKLFSDVSKLGGLGFGVSFLKFLASFAAIYLLILDRTNWKTKMLTSLLIPYIFLSLPSVIFNFLSGDVGKWIAFVAVVLRLFFPKHFPDWLEMPGSLILLLVVSPHFLAHHIRGTWIGTVISLFIGCYLLQEHIRASGGFRNSFTQPRGVSNTLGIILLLVYPVWALIVRVM

SEQ ID NO: 4726 - DNA, 1467 bp, Arabidopsis thaliana
gataagccacatttcttctctctttctctcctacacaacacagctttttaaacccaacagagcaaaaaagcaaaagattcaacaaaaatctcctcaaattctattcatggtctctagaaattctgacggatatttcttggatccgaccggtatgactgttcctggtctcggaccttcctttacagccgccgtttcttcttcttcttcaccaacgacttcttctacggccgtggctgtggcggatgtgacggcgatggtttcttcttcggaggaggatttgagtaagaagattaggaagccttatactattactaagtctagagagagctggacggagcctgagcatgataaattccttgaagctcttcaattgtttgatagagactggaagaagattgaagcttttattggttcaaagacagtgattcagatacgaagtcatgctcagaagtattttcttaaggtacaaaagagtgggaccggtgaacatctccctcctcctcgacctaaaaggaaagccgctcatccatatcctcagaaggctcacaagaatgtgcaactgcaagtaccagggtcattcaagtcaacatctgaaccaaatgacccaagttttatgtttaggcctgagtcttcttcaatgctgatgacttcgccaaccactgctgctgcggctccatggacaaataatgcgcaaacaattagcttcactcccctcccaaaagcaggagcaggagctaataacaattgttctagtagttctgaaaatactccaagaccacgatccaacagggacgcaagagaccatggaaatgttggccattcattaagagttttaccggactttgcccaagtatacggcttcattggaagtgtgtttgacccatatgcaagtaatcatctacaaaagctgaagaagatggaccccatagatgttgaaacagtgttactattgatgagaaatctatccatcaacttgtctagtcctgactttgaggatcatagacggcttctttcgtcttatgatatcggatctgagacagcaactgatcatggtggagtgaataaaaccttaaacaaagacccacctgaaatctctacttaatgtttaatagaagaggagaactgtgaaaagtgtctcaggtgagccagccaacaaccagatggctacaaaatacagagattctgttgtggttttttgtttgtacataggaagaagatgaagctgatgttactcggtttagttgttgttactgttataaatagtctgttgggttaaggatggtatatgtacagtgtattatcataagttagatctcaagtttaaacatatgtatcagtctctttgatgggagaccaaaatctcttaatagagttgtctttgctttcgttttcattcgtttatagaggaagaaataaggtgactgtgaccatttgtataacaatatggataaactatttttagtggcc

SEQ ID NO: 4727 - protein, 366 aa, Arabidopsis thaliana
ISHISSLFLSYTTQLFKPNRAKKQKIQQKSPQILFMVSRNSDGYFLDPTGMTVPGLGPSFTAAVSSSSSPTTSSTAVAVADVTAMVSSSEEDLSKKIRKPYTITKSRESWTEPEHDKFLEALQLFDRDWKKIEAFIGSKTVIQIRSHAQKYFLKVQKSGTGEHLPPPRPKRKAAHPYPQKAHKNVQLQVPGSFKSTSEPNDPSFMFRPESSSMLMTSPTTAAAAPWTNNAQTISFTPLPKAGAGANNNCSSSSENTPRPRSNRDARDHGNVGHSLRVLPDFAQVYGFIGSVFDPYASNHLQKLKKMDPIDVETVLLLMRNLSINLSSPDFEDHRRLLSSYDIGSETATDHGGVNKTLNKDPPEIST

SEQ ID NO: 4728 - protein, 331 aa, Arabidopsis thaliana
MVSRNSDGYFLDPTGMTVPGLGPSFTAAVSSSSSPTTSSTAVAVADVTAMVSSSEEDLSKKIRKPYTITKSRESWTEPEHDKFLEALQLFDRDWKKIEAFIGSKTVIQIRSHAQKYFLKVQKSGTGEHLPPPRPKRKAAHPYPQKAHKNVQLQVPGSFKSTSEPNDPSFMFRPESSSMLMTSPTTAAAAPWTNNAQTISFTPLPKAGAGANNNCSSSSENTPRPRSNRDARDHGNVGHSLRVLPDFAQVYGFIGSVFDPYASNHLQKLKKMDPIDVETVLLLMRNLSINLSSPDFEDHRRLLSSYDIGSETATDHGGVNKTLNKDPPEIST

SEQ ID NO: 4729 - protein, 316 aa, Arabidopsis thaliana
MTVPGLGPSFTAAVSSSSSPTTSSTAVAVADVTAMVSSSEEDLSKKIRKPYTITKSRESWTEPEHDKFLEALQLFDRDWKKIEAFIGSKTVIQIRSHAQKYFLKVQKSGTGEHLPPPRPKRKAAHPYPQKAHKNVQLQVPGSFKSTSEPNDPSFMFRPESSSMLMTSPTTAAAAPWTNNAQTISFTPLPKAGAGANNNCSSSSENTPRPRSNRDARDHGNVGHSLRVLPDFAQVYGFIGSVFDPYASNHLQKLKKMDPIDVETVLLLMRNLSINLSSPDFEDHRRLLSSYDIGSETATDHGGVNKTLNKDPPEIST

SEQ ID NO: 4730 - DNA, 1336 bp, Arabidopsis thaliana
aaaagtcatctatcaaccgccaaatcaacctccttcttcttcttttccttctctcttcgattctttttcgaatttgggtgattctcagattcacaagcttttagagctcgaatttgattggcgagctagaaatgtcgaggttttgaggaagaagcaaccacaaaagaggattgattttaagggcttttttgtttctttccgatcttgcggcagagatggcgtcaaggtttataaagtgtgtgaccgtcggagatggtgccgtcggaaaaacttgcatgctcatttcttacactagcaatacttttcctactgattatgtgccaactgttttcgacaacttcagtgctaatgtggttgttgatggcaacactgtcaatcttggattgtgggatactgctggtcaagaggactacaacaggttacgacctttgagttaccgtggtgctgatgttttcattcttgctttctctcttattagcaaggctagctatgagaatatagccaagaagtggattcctgagctcaggcattatgctcctggtgttcccattatccttgttgggacaaaactcgatcttcgagatgacaagcaattctttatagatcatcctggtgctgtgccaattactacaaaccagggagaggaactgaagaaactgattggatctgctgtctacattgaatgtagttcaaagacacagcagaacgtgaaggcagtgtttgatgcagctataaaagtggtgcttcagccaccaaagcagaagaagaagaaaaagaataagaaccgttgcgcgttcttgtgataagaaaaacctctaagactaggtaaaaccaactaaagaaagaagcagaagatgatttcaactatttgattcggcccattttaatatgataatttcgacgtgaagggagacatttctagtagcttttttgtatagttgctaaaacgagctttgttgttgttgtgtcttttactctttgctggtgaatctttcgagtccacagactaagagaccgtgtgttgtactcttgctatgtagactaatctgagaactaagcatcaacaacaagaacaatgagagcgaagtggaagaagaagcgcatgaggagattaaagaggaagcgtcgaaagatgagacagcgatccaagtagactccaagttcctcccccgaataactatcggctctctgtgattctctttttagttttgtcttgaaactttttctttcttctagcaaaccttttttattttgattatggaagttttgaacattctgtgatgtatgtaaaacttgctcttgtgctcttatctatctaatcacagatcctttatcc

SEQ ID NO: 4731 - protein, 195 aa, Arabidopsis thaliana
MASRFIKCVTVGDGAVGKTCMLISYTSNTFPTDYVPTVFDNFSANVVVDGNTVNLGLWDTAGQEDYNRLRPLSYRGADVFILAFSLISKASYENIAKKWIPELRHYAPGVPIILVGTKLDLRDDKQFFIDHPGAVPITTNQGEELKKLIGSAVYIECSSKTQQNVKAVFDAAIKVVLQPPKQKKKKKNKNRCAFL

SEQ ID NO: 4732 - protein, 175 aa, Arabidopsis thaliana
MLISYTSNTFPTDYVPTVFDNFSANVVVDGNTVNLGLWDTAGQEDYNRLRPLSYRGADVFILAFSLISKASYENIAKKWIPELRHYAPGVPIILVGTKLDLRDDKQFFIDHPGAVPITTNQGEELKKLIGSAVYIECSSKTQQNVKAVFDAAIKVVLQPPKQKKKKKNKNRCAFL

SEQ ID NO: 4733 - protein, 97 aa, Arabidopsis thaliana
KVIYQPPNQPPSSSFPSLFDSFSNLGDSQIHKLLELEFDWRARNVEVLRKKQPQKRIDFKGFFVSFRSCGRDGVKVYKVCDRRRWCRRKNLHAHFLH

SEQ ID NO: 4734 - DNA, 1450 bp, Arabidopsis thaliana
agcttttcatctttacctgtctctgcccttaacctcacacagatatcgagtctcggcgattgaagtgaactctcatccttataatttcatccgaaagattttggataaagttttgatttttttggttcgcaatgacgctgctcgaagctatctccaacgccgtagcgaatcaggacaaggtcgactcgcaatccgattatccaatccctcttagccacgatggtatctttgcgaatctgaaaccaaagctagaaaaccctaatcttggtacccttgtcaatccaatttccgggtggggaatctctgaaagtgatgttgaagtcatcgatttgggtaaaaagttttcatctaagctgaaaaggaagcttaaggatactaacgggtttgtcaaagatgagtttgtcaagatgttaaagcagtttcttgagaaaattggtgagaaagttgggatttcagaggctgagtctgagatggttttgggagatcaagctggttctgagatacagatactggtggagaaaaatgggtttttgatgggtagagatgtatctggtttagtgttgaaaggttgtattagtctagagatgtgggagctagtggaaattttgatttcaaactccttggttgatcattcttcatactcttatttagttagcaatcttgttgagaagcaaaggtcagatttgctttgcgtagtgatcaaagaagcttcagatcttggggcaactgagctactttcaatcttgaagtattttttatgcccatcaaaggaagcaattagcactatggctaaggtaagagaagaatgggagagtcaggctatgttggctattgaaaaggtgagcaacacagagctatcaaagaagtctaaagttgcagaagaggcttctatcttgttaatggttgctcatgacgggttttcaacctcagagctttgcctgcattacttgttagcttcacggaatgttgacgaagtcatgtttgcatctgcagtcagtaagttgaatggcaatgagatgggtagctttattcgatacctctctaaatggatgaagaagtatgagatgttcccacaagctggtccatgccctaaagccgcctccaagcttggtttgaaactatgcaactgggttcctgaactcacagacattaccaaatgtttgggacttcttatcgatgagaacttctccactctggttctgtactcggatttgcatgaagagctaaagtctattgcaagagtagccgatgggttagcttcagaatcaaaactttcctgttttgtggctaatgtggttgaaagtttgaagcttggagctgcccgaaactagattttcacaattgttggagcttaatgcaaccctgttttcactttttattatggtctccagtgacatttgtattttctagtttcagttcatctcttaactaaagtataattttgttcgct

SEQ ID NO: 4735 - protein, 399 aa, Arabidopsis thaliana
MTLLEAISNAVANQDKVDSQSDYPIPLSHDGIFANLKPKLENPNLGTLVNPISGWGISESDVEVIDLGKKFSSKLKRKLKDTNGFVKDEFVKMLKQFLEKIGEKVGISEAESEMVLGDQAGSEIQILVEKNGFLMGRDVSGLVLKGCISLEMWELVEILISNSLVDHSSYSYLVSNLVEKQRSDLLCVVIKEASDLGATELLSILKYFLCPSKEAISTMAKVREEWESQAMLAIEKVSNTELSKKSKVAEEASILLMVAHDGFSTSELCLHYLLASRNVDEVMFASAVSKLNGNEMGSFIRYLSKWMKKYEMFPQAGPCPKAASKLGLKLCNWVPELTDITKCLGLLIDENFSTLVLYSDLHEELKSIARVADGLASESKLSCFVANVVESLKLGAARN

SEQ ID NO: 4736 - protein, 307 aa, Arabidopsis thaliana
MLKQFLEKIGEKVGISEAESEMVLGDQAGSEIQILVEKNGFLMGRDVSGLVLKGCISLEMWELVEILISNSLVDHSSYSYLVSNLVEKQRSDLLCVVIKEASDLGATELLSILKYFLCPSKEAISTMAKVREEWESQAMLAIEKVSNTELSKKSKVAEEASILLMVAHDGFSTSELCLHYLLASRNVDEVMFASAVSKLNGNEMGSFIRYLSKWMKKYEMFPQAGPCPKAASKLGLKLCNWVPELTDITKCLGLLIDENFSTLVLYSDLHEELKSIARVADGLASESKLSCFVANVVESLKLGAARN

SEQ ID NO: 4737 - protein, 286 aa, Arabidopsis thaliana
MVLGDQAGSEIQILVEKNGFLMGRDVSGLVLKGCISLEMWELVEILISNSLVDHSSYSYLVSNLVEKQRSDLLCVVIKEASDLGATELLSILKYFLCPSKEAISTMAKVREEWESQAMLAIEKVSNTELSKKSKVAEEASILLMVAHDGFSTSELCLHYLLASRNVDEVMFASAVSKLNGNEMGSFIRYLSKWMKKYEMFPQAGPCPKAASKLGLKLCNWVPELTDITKCLGLLIDENFSTLVLYSDLHEELKSIARVADGLASESKLSCFVANVVESLKLGAARN

SEQ ID NO: 4738 - DNA, 583 bp, Arabidopsis thaliana
gtgaattcgctcggcggcataaaagagagtaagaagaggaagacgagagttacaaggattgaaaatgaagggacgtcaaggagagagagttagattgtatgttcgtggaacagtcctcggctacaagaggtccaagtcgaaccaatatcccaacacttctctcatccagattgaaggtgtgaacactcaagaggaggtcaattggtacaagggtaagcgtttggcttacatctacaaggcaaagacaaagaagaacggttctcactaccgttgcatttggggcaaagtcactaggcctcatggtaacagcggtgttgtccgttctaagttcacttcaaacctaccacccaagtcaatgggagctagagtcagagtcttcatgtaccctagcaacatatgaggaggatagatttcaagaagtatcggaaggaatcgccattatcatttctcaggagctgtagtttatctattcacttttgttctaaactctctgttggttttgattttatctttagacgaagtaaaacatttttcttcttgagataatattaatggaacttcagaaaacctatgatcccggtct

SEQ ID NO: 4739 - protein, 111 aa, Arabidopsis thaliana
MKGRQGERVRLYVRGTVLGYKRSKSNQYPNTSLIQIEGVNTQEEVNWYKGKRLAYIYKAKTKKNGSHYRCIWGKVTRPHGNSGVVRSKFTSNLPPKSMGARVRVFMYPSNI

SEQ ID NO: 4740 - DNA, 948 bp, Arabidopsis thaliana
ggggtctgtctgagtggatttgtatactatattgtgatgagagtcaccacaacaaattcgttgacatgagcctttcatatatttttgaattatactgaactaaaacccatttaaaagcccatttaaagacccattataagagtagagatactcagcccatttaaagataaaattacgtcatagcgatttttccattaaaagagtgaggaagagacaaaagtgattgattggtcagaaaaaatggaagcggcgaagaaacagagtgttacaaatcagcttctcgccgtgaaatcagcttccggcaagacttttagccagttagccgcggagacaggtctaaccaacgtatacgtagctcagcttctccgtcgtcaagctcagctcaaaccggacacagtcccaaagcttaaggaagctttaccagctctgaccgatgaactaatcggagatatgatgtctcctccgtggagatcctatgatcctaatctcatccaagaacccactatctacaggttgaatgaagcagtgatgcattttggtgagagtataaaggagattatcaatgaagattttggagatggcatcatgtcggcgatagatttctattgctctgtcgacaaaatcaaaggagtggatggtaacaatcgcgtggttgtgacgcttgatggaaagtatctttcgcattccgaacagaggacggagaatatggtctcaaggctaaatctcaagggaggtacaagcgaatgataagaaagcctttacgtatccatgaaggccttattgtaagtggtaacgttgtaatacctatgtgtttgtttatctgtaatatatgcaacttcagcatctagattaaaagctgtttcaggttgaataacagtgaataaacaaatcttataaaacctttctatgtttacttttaacatcgtaatcgagttccgattcatgctt

SEQ ID NO: 4741 - protein, 168 aa, Arabidopsis thaliana
MEAAKKQSVTNQLLAVKSASGKTFSQLAAETGLTNVYVAQLLRRQAQLKPDTVPKLKEALPALTDELIGDMMSPPWRSYDPNLIQEPTIYRLNEAVMHFGESIKEIINEDFGDGIMSAIDFYCSVDKIKGVDGNNRVVVTLDGKYLSHSEQRTENMVSRLNLKGGTSE

SEQ ID NO: 4742 - protein, 98 aa, Arabidopsis thaliana
MMSPPWRSYDPNLIQEPTIYRLNEAVMHFGESIKEIINEDFGDGIMSAIDFYCSVDKIKGVDGNNRVVVTLDGKYLSHSEQRTENMVSRLNLKGGTSE

SEQ ID NO: 4743 - protein, 97 aa, Arabidopsis thaliana
MSPPWRSYDPNLIQEPTIYRLNEAVMHFGESIKEIINEDFGDGIMSAIDFYCSVDKIKGVDGNNRVVVTLDGKYLSHSEQRTENMVSRLNLKGGTSE

SEQ ID NO: 4744 - DNA, 1586 bp, Arabidopsis thaliana
aatgaaatctgtcattttcacagaggaaaaaaacttacaaagacaaaatccattgcaaaagagcgagcaacaacgacgaaatttcgaaatgccatcgccaccgacgacgacttctctctcggtgacacagaccataaacggatcacacagcttcacaatcaaaggctattctttggctaaaggaatcgggatcggaaaacacatcgccagcgatactttcaccgtcgggggttatcaatgggctatctatttctatcctgatggcaagaatcctgaggataattcggcttatgtctccgttttcattgctttagctagcgatggtaccgatgttagggctctttttgagctttctttgcttgatcagagtggtaaagggaagcataaggttcatagccacttcgatcgtgctcttgagagcggtccttatactctcaagtatcgtggcagcatgtggggctacaagcgcttttttcgaagacttatgctggaaacatctgattttctgaaggatgattgtctgaaaattaattgcaccgtgggagttgtggtctcagaaatagattgcccacggttacattctattcatgtccctgcatctgatattggatctcatttcgggatgcttctagagaacgaggacggttcagatataacttttaacgtctctggtgaaaagttccgtgctcacaggttagtattggctgctcgatctcctgtctttgaaagcgagttcctcgatgttacgggagaagaagatcgtgatatcgaagttactgacatggagcctaaggttttcaaggctttgctccactacatatacaaggatgctctcattgaagatgcagagtcatcatcatcttccggttcatctgttggtccatctgcctcagacacattagctgcaaagctactaggagccgctgataaatacaagttgcctagattaagtctaatgtgcgagtcagtgctctgcaaggatatatcagtagattccgttgcaaatattttggcgcttgctgaccgttacaatgcttccgccttgaaatccgtttgtctgaaattcgcagcagaaaatctcatcgctgttatgaggtcagatgggtttgattatctaagggaacactgcccgtcacttcagtctgagcttctgaaaacagttgcgggttgcgaagaggagttaagcggaggaggagggaagacgagaagcgtatggggccaattctcagacggtggagctgagacaaacggaagacaagcacagacttggggagatatcaatggaggagcagagagaagccagagtgtttgggtcgaagttgtgaacgctaatggaagcggtagaaacaataatgacaacaataacagtgatgacccaatggcagaactagaagattgagcaaataaaaggtaataaaaaagccaaaggacaatccgagtaagctgaagttaggatcagacatcatgaagcggagatcttgtaacttagtgtttccactgtcgaatactatgtggatcataggagacgatttagtattgttgttgtaatacgctttccgtgtaataattggagttactagtatgat

SEQ ID NO: 4745 - protein, 465 aa, Arabidopsis thaliana
MKSVIFTEEKNLQRQNPLQKSEQQRRNFEMPSPPTTTSLSVTQTINGSHSFTIKGYSLAKGIGIGKHIASDTFTVGGYQWAIYFYPDGKNPEDNSAYVSVFIALASDGTDVRALFELSLLDQSGKGKHKVHSHFDRALESGPYTLKYRGSMWGYKRFFRRLMLETSDFLKDDCLKINCTVGVVVSEIDCPRLHSIHVPASDIGSHFGMLLENEDGSDITFNVSGEKFRAHRLVLAARSPVFESEFLDVTGEEDRDIEVTDMEPKVFKALLHYIYKDALIEDAESSSSSGSSVGPSASDTLAAKLLGAADKYKLPRLSLMCESVLCKDISVDSVANILALADRYNASALKSVCLKFAAENLIAVMRSDGFDYLREHCPSLQSELLKTVAGCEEELSGGGGKTRSVWGQFSDGGAETNGRQAQTWGDINGGAERSQSVWVEVVNANGSGRNNNDNNNSDDPMAELED

SEQ ID NO: 4746 - protein, 436 aa, Arabidopsis thaliana
MPSPPTTTSLSVTQTINGSHSFTIKGYSLAKGIGIGKHIASDTFTVGGYQWAIYFYPDGKNPEDNSAYVSVFIALASDGTDVRALFELSLLDQSGKGKHKVHSHFDRALESGPYTLKYRGSMWGYKRFFRRLMLETSDFLKDDCLKINCTVGVVVSEIDCPRLHSIHVPASDIGSHFGMLLENEDGSDITFNVSGEKFRAHRLVLAARSPVFESEFLDVTGEEDRDIEVTDMEPKVFKALLHYIYKDALIEDAESSSSSGSSVGPSASDTLAAKLLGAADKYKLPRLSLMCESVLCKDISVDSVANILALADRYNASALKSVCLKFAAENLIAVMRSDGFDYLREHCPSLQSELLKTVAGCEEELSGGGGKTRSVWGQFSDGGAETNGRQAQTWGDINGGAERSQSVWVEVVNANGSGRNNNDNNNSDDPMAELED

SEQ ID NO: 4747 - protein, 315 aa, Arabidopsis thaliana
MWGYKRFFRRLMLETSDFLKDDCLKINCTVGVVVSEIDCPRLHSIHVPASDIGSHFGMLLENEDGSDITFNVSGEKFRAHRLVLAARSPVFESEFLDVTGEEDRDIEVTDMEPKVFKALLHYIYKDALIEDAESSSSSGSSVGPSASDTLAAKLLGAADKYKLPRLSLMCESVLCKDISVDSVANILALADRYNASALKSVCLKFAAENLIAVMRSDGFDYLREHCPSLQSELLKTVAGCEEELSGGGGKTRSVWGQFSDGGAETNGRQAQTWGDINGGAERSQSVWVEVVNANGSGRNNNDNNNSDDPMAELED

SEQ ID NO: 4748 - DNA, 3754 bp, Arabidopsis thaliana
catcgctgtctggaacagcgatgactcgatacccatcaatcaagtcttgtcctttttctccttctctctctcatacgagcttctttcctgctgatgaggcttgagctttaaattttcaatcttgattgagattctgcatgtttctcgatctttaaactcagatgaagaatcttggggggttgttcaaaattcttctgcttttcttctgtctctttctatcgacccacataatttccgtttcttgtttaaactcagatgggctaactctactctctcttctgaagcatttggatagagtaccaccacaagttacttcgacatggaaaataaacgcatctgaagcaactccatgtaactggttcggtatcacttgtgacgattctaagaatgttgcgtctctcaacttcactcgttctagggtttcaggtcaattgggtccggaaattggggagctcaaaagcttgcagattttggatctgagtactaacaatttctccgggactataccttccactttaggaaactgtaccaaactcgctactctagatttgtctgaaaatggattctctgataagatcccagatactctcgatagcttgaagaggttggaggtgctttatctttacataaacttcctcactggtgagttacctgaatccttgtttcgaattccgaagctgcaggttttatatcttgactataacaatctcaccggtccgattcctcaaagtattggtgatgctaaggagcttgtggagctgagtatgtatgcgaatcagttctctggtaacatccctgagtcgattgggaatagcagtagtctgcagattctttatttgcacaggaacaagttagttggttcattacctgaaagtctcaatcttttggggaatctcactactctgtttgttggtaacaacagtctacaagggccggttcgtttcggatcacctaattgcaagaatttgttgactttagatttgtcatacaatgaattcgaaggcggtgttccacctgcattgggaaattgcagtagccttgacgctttagtcattgtgagtggtaacttgtcaggtacaatcccttcctcattgggtatgttgaagaatctcacaattcttaacctttccgagaatcgtctctctgggagtatccccgcagagctcgggaactgcagtagcttgaacttgttgaagctgaacgataaccagcttgtaggcggaataccgagtgcattaggtaagctgaggaagctagaaagtctggagcttttcgaaaaccggttttcgggtgagattcctattgagatatggaagagtcagagtcttacgcagttgctagtttatcaaaacaatctcactggtgaactacctgtggaaatgactgagatgaagaagctaaagatcgctacgctgttcaacaacagcttttatggagcgataccaccgggtttaggtgtgaacagcagcttagaagaggttgactttattggtaacaaacttacaggagagataccgccaaatctatgccatggaaggaagttgagaatactcaacttgggttctaatctgcttcatggtacaataccagcttctattggtcactgtaagaccatcaggagattcatccttagagaaaataacctttcaggtcttcttcctgagttttctcaggatcatagtctttcttttcttgatttcaatagcaacaacttcgaaggaccaatcccgggcagcctcggaagctgtaagaatctctcgagtattaacctatctcgaaacagattcacggggcagatacctccacaacttgggaatctacaaaaccttggttacatgaatctttctcgtaatcttcttgaagggtctctaccagctcagctatctaactgtgtgagtttagagcgttttgatgttggcttcaactcattaaacggttcagttccttcaaactttagtaactggaaaggcttgacgactttagttctcagcgagaaccggttttcaggaggtattccacagttcttgcctgagcttaagaagctgtcaactctgcagattgctagaaatgcttttggtggtgagattccttcgtcgattgggttgatagaggatctgatctatgacttggaccttagtggaaacggattgacaggtgaaattccagccaagttgggagatctcatcaagttaacaagactcaacatatctaacaacaatttgacaggatctttatcggttctcaaaggtcttacctcattgctacatgttgatgtctccaacaatcagttcacaggtccaataccagataacttggagggtcagttgttatctgagccgtcgtcgttttcaggaaatccaaacctctgcattccacattccttctctgctagcaacaatagccgcagcgcgttaaagtactgtaaagatcaatctaaaagcaggaagagtggccttagcacctggcaaatcgtgctaatagcggtcttatcgtctttattagtcttggttgtggtccttgctcttgttttcatttgcctacgtcgtcgcaaaggaagaccagagaaagatgcttatgtcttcactcaggaggaaggcccatctttgttgttgaacaaagttcttgcagcaactgacaatctaaatgaaaagtacaccattggaagaggagctcatggaattgtgtacagagcttctttaggctccggaaaggtctacgctgtgaagagacttgtattcgcgtctcacatccgcgctaaccagagtatgatgagggagattgatacaatcggtaaagtcaggcacaggaatctgattaagttagaagggttttggctgaggaaagacgacggtttaatgctgtatagatacatgccaaaaggaagtctttacgacgttctccacggtgttagcccgaaagaaaatgtgctagactggtctgcacggtacaatgtagcacttggtgtcgctcatggactagcctatctacactatgactgccatcccccgattgttcaccgtgacatcaaaccagagaacatactcatggactcagatttggagcctcacattggggatttcggtttggctcgccttcttgatgactcaacggtttcaactgcaactgttacaggcaccaccggctacattgcaccagaaaacgctttcaaaaccgtgaggggaagagaatcagacgtttacagttatggagtcgtgttacttgagctggttacgaggaagagagcggtggacaaatctttcccggaaagtacagatatagtaagctgggtgagatctgccttgagcagcagcaacaacaatgtggaggatatggtaacaacaatcgtcgatccgattctcgtggacgagcttctggattcgagtcttagggagcaggtgatgcaagtgacggaactggcactgagttgtacacagcaagatccggcaatgagaccaacgatgagagatgcggtgaaactgttggaagatgtgaaacatctggcaagaagctgctcctctgattcagttcggtaatctcgttactttgtgcagagcagaaggaggaaactaaaggactgttatcagtggtaacgtaactgggcttaccggtaatgtaactgggccaataatgtaaaatatggcttattgaaggcccaaatatgacggccctttaattgtaaccgtgtttgtttgtgaaataaaatctcgtttatcaaatttctgtttcctattttatttttaaaaaaagtgttggg

SEQ ID NO: 4749 - protein, 1123 aa, Arabidopsis thaliana
MKNLGGLFKILLLFFCLFLSTHIISVSCLNSDGLTLLSLLKHLDRVPPQVTSTWKINASEATPCNWFGITCDDSKNVASLNFTRSRVSGQLGPEIGELKSLQILDLSTNNFSGTIPSTLGNCTKLATLDLSENGFSDKIPDTLDSLKRLEVLYLYINFLTGELPESLFRIPKLQVLYLDYNNLTGPIPQSIGDAKELVELSMYANQFSGNIPESIGNSSSLQILYLHRNKLVGSLPESLNLLGNLTTLFVGNNSLQGPVRFGSPNCKNLLTLDLSYNEFEGGVPPALGNCSSLDALVIVSGNLSGTIPSSLGMLKNLTILNLSENRLSGSIPAELGNCSSLNLLKLNDNQLVGGIPSALGKLRKLESLELFENRFSGEIPIEIWKSQSLTQLLVYQNNLTGELPVEMTEMKKLKIATLFNNSFYGAIPPGLGVNSSLEEVDFIGNKLTGEIPPNLCHGRKLRILNLGSNLLHGTIPASIGHCKTIRRFILRENNLSGLLPEFSQDHSLSFLDFNSNNFEGPIPGSLGSCKNLSSINLSRNRFTGQIPPQLGNLQNLGYMNLSRNLLEGSLPAQLSNCVSLERFDVGFNSLNGSVPSNFSNWKGLTTLVLSENRFSGGIPQFLPELKKLSTLQIARNAFGGEIPSSIGLIEDLIYDLDLSGNGLTGEIPAKLGDLIKLTRLNISNNNLTGSLSVLKGLTSLLHVDVSNNQFTGPIPDNLEGQLLSEPSSFSGNPNLCIPHSFSASNNSRSALKYCKDQSKSRKSGLSTWQIVLIAVLSSLLVLVVVLALVFICLRRRKGRPEKDAYVFTQEEGPSLLLNKVLAATDNLNEKYTIGRGAHGIVYRASLGSGKVYAVKRLVFASHIRANQSMMREIDTIGKVRHRNLIKLEGFWLRKDDGLMLYRYMPKGSLYDVLHGVSPKENVLDWSARYNVALGVAHGLAYLHYDCHPPIVHRDIKPENILMDSDLEPHIGDFGLARLLDDSTVSTATVTGTTGYIAPENAFKTVRGRESDVYSYGVVLLELVTRKRAVDKSFPESTDIVSWVRSALSSSNNNVEDMVTTIVDPILVDELLDSSLREQVMQVTELALSCTQQDPAMRPTMRDAVKLLEDVKHLARSCSSDSVR

SEQ ID NO: 4750 - protein, 922 aa, Arabidopsis thaliana
MYANQFSGNIPESIGNSSSLQILYLHRNKLVGSLPESLNLLGNLTTLFVGNNSLQGPVRFGSPNCKNLLTLDLSYNEFEGGVPPALGNCSSLDALVIVSGNLSGTIPSSLGMLKNLTILNLSENRLSGSIPAELGNCSSLNLLKLNDNQLVGGIPSALGKLRKLESLELFENRFSGEIPIEIWKSQSLTQLLVYQNNLTGELPVEMTEMKKLKIATLFNNSFYGAIPPGLGVNSSLEEVDFIGNKLTGEIPPNLCHGRKLRILNLGSNLLHGTIPASIGHCKTIRRFILRENNLSGLLPEFSQDHSLSFLDFNSNNFEGPIPGSLGSCKNLSSINLSRNRFTGQIPPQLGNLQNLGYMNLSRNLLEGSLPAQLSNCVSLERFDVGFNSLNGSVPSNFSNWKGLTTLVLSENRFSGGIPQFLPELKKLSTLQIARNAFGGEIPSSIGLIEDLIYDLDLSGNGLTGEIPAKLGDLIKLTRLNISNNNLTGSLSVLKGLTSLLHVDVSNNQFTGPIPDNLEGQLLSEPSSFSGNPNLCIPHSFSASNNSRSALKYCKDQSKSRKSGLSTWQIVLIAVLSSLLVLVVVLALVFICLRRRKGRPEKDAYVFTQEEGPSLLLNKVLAATDNLNEKYTIGRGAHGIVYRASLGSGKVYAVKRLVFASHIRANQSMMREIDTIGKVRHRNLIKLEGFWLRKDDGLMLYRYMPKGSLYDVLHGVSPKENVLDWSARYNVALGVAHGLAYLHYDCHPPIVHRDIKPENILMDSDLEPHIGDFGLARLLDDSTVSTATVTGTTGYIAPENAFKTVRGRESDVYSYGVVLLELVTRKRAVDKSFPESTDIVSWVRSALSSSNNNVEDMVTTIVDPILVDELLDSSLREQVMQVTELALSCTQQDPAMRPTMRDAVKLLEDVKHLARSCSSDSVR

SEQ ID NO: 4751 - protein, 811 aa, Arabidopsis thaliana
MLKNLTILNLSENRLSGSIPAELGNCSSLNLLKLNDNQLVGGIPSALGKLRKLESLELFENRFSGEIPIEIWKSQSLTQLLVYQNNLTGELPVEMTEMKKLKIATLFNNSFYGAIPPGLGVNSSLEEVDFIGNKLTGEIPPNLCHGRKLRILNLGSNLLHGTIPASIGHCKTIRRFILRENNLSGLLPEFSQDHSLSFLDFNSNNFEGPIPGSLGSCKNLSSINLSRNRFTGQIPPQLGNLQNLGYMNLSRNLLEGSLPAQLSNCVSLERFDVGFNSLNGSVPSNFSNWKGLTTLVLSENRFSGGIPQFLPELKKLSTLQIARNAFGGEIPSSIGLIEDLIYDLDLSGNGLTGEIPAKLGDLIKLTRLNISNNNLTGSLSVLKGLTSLLHVDVSNNQFTGPIPDNLEGQLLSEPSSFSGNPNLCIPHSFSASNNSRSALKYCKDQSKSRKSGLSTWQIVLIAVLSSLLVLVVVLALVFICLRRRKGRPEKDAYVFTQEEGPSLLLNKVLAATDNLNEKYTIGRGAHGIVYRASLGSGKVYAVKRLVFASHIRANQSMMREIDTIGKVRHRNLIKLEGFWLRKDDGLMLYRYMPKGSLYDVLHGVSPKENVLDWSARYNVALGVAHGLAYLHYDCHPPIVHRDIKPENILMDSDLEPHIGDFGLARLLDDSTVSTATVTGTTGYIAPENAFKTVRGRESDVYSYGVVLLELVTRKRAVDKSFPESTDIVSWVRSALSSSNNNVEDMVTTIVDPILVDELLDSSLREQVMQVTELALSCTQQDPAMRPTMRDAVKLLEDVKHLARSCSSDSVR

SEQ ID NO: 4752 - DNA, 1726 bp, Arabidopsis thaliana
aatcaatatcatcaaactcttcactttactctctctctcttactcataatggcctcattctctcttccccactccgccacctactttccttcccactctgaaacctcacttaaacctcactccgccgcttcattcaccgtccgttgcacctccgcctctcccgccgttcctccacaaactccacagaaaccccgtcgttcacccgatgagaacattcgagacgaagctcgtcgccgtcctcatcaactccaaaacctctccgcacgttacgtccctttcaacgctccaccttcttcaacagaatcctactccctcgacgagatcgtctaccgttcacaatccggtgctctcctcgacgtccagcatgatttcgccgccttgaaacgctacgacggagaattctggcgtaaccttttcgattctcgcgtcggtaaaacaaattggccgtacggatcaggcgtgtggtcgaagaaagagtgggtactccccgagatcgacgatgacgacatcgtctctgcttttgaaggaaactcaaatctcttctgggctgagagatttggtaaacagtatctgcaaatgaacgatctttgggtgaaacattgtggaatcagccacactggctcctttaaagatctgggcatgagtgttctcgtttctcaggtgaatcgtctccggaaaatgaacaaaccagtcatcggagttggttgcgcttctactggagatacctccgctgctctctctgcttactgtgcttccgctggaatcccctcgattgtcttcttacctgcggataaaatctccatggctcagcttgtgcagccgattgcaaacggagcgtttgtgcttagtattgacactgattttgacggatgtatgcatttgatcagagaagttacggcggagcttcctatttacttggcgaactctctcaacagcctccgtctcgaaggtcaaaagacggcggcgattgagattctgcagcagtttaattggcaagttcctgattgggtcattgttcctggaggcaatcttggtaacatctatgcgttttacaaagggtttcatatgtgtaaagagttaggtcttgttgatcgtatccctaggcttgtttgtgctcaagctgctaatgcaaatccactttacttgcattacaaatctgggtttaaagaagatttcaatccattgaaagcaaacactacatttgcttctgctattcagattggtgaccctgtttcgattgatagagctgtgtatgcgttgaagaaatctaatgggattgttgaggaagctacagaggaagagttgatggatgcaacagctcttgctgattctactggtatgtttatatgtccacatactggtgttgcattgacggcgttgatgaagctgagaaagtcaggagttattggagcgaatgatcggactgtggtggtgagtacagctcatggattgaagtttacacaaagtaagattgattatcattctaagaacataaaggagatggcttgtagattggcgaatccaccagtgaaggttaaggcaaagtttggttcagttatggatgttctcaaggagtatttgaagagcaatgataaataagctttgtgtgtttgtttcttctaaagctcttcacgtcctatgatgatattgttggctttgttattagaggaagtaatgaaatttcgtttctttggacttgtggaataaaacgactggttggttccgt

SEQ ID NO: 4753 - protein, 532 aa, Arabidopsis thaliana
NQYHQTLHFTLSLLLIMASFSLPHSATYFPSHSETSLKPHSAASFTVRCTSASPAVPPQTPQKPRRSPDENIRDEARRRPHQLQNLSARYVPFNAPPSSTESYSLDEIVYRSQSGALLDVQHDFAALKRYDGEFWRNLFDSRVGKTNWPYGSGVWSKKEWVLPEIDDDDIVSAFEGNSNLFWAERFGKQYLQMNDLWVKHCGISHTGSFKDLGMSVLVSQVNRLRKMNKPVIGVGCASTGDTSAALSAYCASAGIPSIVFLPADKISMAQLVQPIANGAFVLSIDTDFDGCMHLIREVTAELPIYLANSLNSLRLEGQKTAAIEILQQFNWQVPDWVIVPGGNLGNIYAFYKGFHMCKELGLVDRIPRLVCAQAANANPLYLHYKSGFKEDFNPLKANTTFASAIQIGDPVSIDRAVYALKKSNGIVEEATEEELMDATALADSTGMFICPHTGVALTALMKLRKSGVIGANDRTVVVSTAHGLKFTQSKIDYHSKNIKEMACRLANPPVKVKAKFGSVMDVLKEYLKSNDK

SEQ ID NO: 4754 - protein, 516 aa, Arabidopsis thaliana
MASFSLPHSATYFPSHSETSLKPHSAASFTVRCTSASPAVPPQTPQKPRRSPDENIRDEARRRPHQLQNLSARYVPFNAPPSSTESYSLDEIVYRSQSGALLDVQHDFAALKRYDGEFWRNLFDSRVGKTNWPYGSGVWSKKEWVLPEIDDDDIVSAFEGNSNLFWAERFGKQYLQMNDLWVKHCGISHTGSFKDLGMSVLVSQVNRLRKMNKPVIGVGCASTGDTSAALSAYCASAGIPSIVFLPADKISMAQLVQPIANGAFVLSIDTDFDGCMHLIREVTAELPIYLANSLNSLRLEGQKTAAIEILQQFNWQVPDWVIVPGGNLGNIYAFYKGFHMCKELGLVDRIPRLVCAQAANANPLYLHYKSGFKEDFNPLKANTTFASAIQIGDPVSIDRAVYALKKSNGIVEEATEEELMDATALADSTGMFICPHTGVALTALMKLRKSGVIGANDRTVVVSTAHGLKFTQSKIDYHSKNIKEMACRLANPPVKVKAKFGSVMDVLKEYLKSNDK

SEQ ID NO: 4755 - protein, 340 aa, Arabidopsis thaliana
MNDLWVKHCGISHTGSFKDLGMSVLVSQVNRLRKMNKPVIGVGCASTGDTSAALSAYCASAGIPSIVFLPADKISMAQLVQPIANGAFVLSIDTDFDGCMHLIREVTAELPIYLANSLNSLRLEGQKTAAIEILQQFNWQVPDWVIVPGGNLGNIYAFYKGFHMCKELGLVDRIPRLVCAQAANANPLYLHYKSGFKEDFNPLKANTTFASAIQIGDPVSIDRAVYALKKSNGIVEEATEEELMDATALADSTGMFICPHTGVALTALMKLRKSGVIGANDRTVVVSTAHGLKFTQSKIDYHSKNIKEMACRLANPPVKVKAKFGSVMDVLKEYLKSNDK

SEQ ID NO: 4756 - DNA, 2876 bp, Arabidopsis thaliana
aaagataacggcagaggtgaagaagagaaccaattagtgaacccccaagatttgccacaacatgagagcttctatgaagatgatgtctctagtgagtatttctctgctgcggactctcatcagagcatattggtctcattttcaagccgttgtgttttgaaagaatcagtatgtgaacgttcacgactcttgcggattaagttctatggatcctttgataaacctctcggaagatatttgaaagatgatcttttcgataagacttctagttgtagatcctgtaaagagctggttgatgcgcatgtactctgctattctcatcagaatggaaaccttactatcaatgttagacgtctcccttccatgaagcttcctggtgaacaagatgggaagatatggatgtggcatcgttgcttaagatgtgcacatgtagatggagtcccacctgctactcgtagagtagttatgtctgatgcagcatggggattgtcttttggaaagtttctggaacttagcttttcgaatcatgcaactgcgaatcgtgttgcatcttgcggtcattcgcttcaaagagactgccttcgattctatggatttggtaacatggtggcattctttagatattctcccatcaatatacttactgtactcctcccaccgtcgatgcttgagttcaatagccatcctcaacaggagtggatacgaacagaggcagctgagcttgttggtaaaatgaggactatgtatacggagatatctgatatgctcaaccgcatggaagaaaaaagcagtttgcttgaacctgaacaatctgaagcatgtgatctacatagtcgcatcatcggattaatagatcaacttgtgaaagaaaaagatgaatacgatgatgcactgcaacctatttttgaggagaatctgcaaattcagggaagtttggatatcctagagctgaatcgattgagacgagcactcatgattggtgctcatgcttgggatcatcagctttacttgttaaactctcaactcaagaaagcatcagtctttaaaactggtgatgacaatgctcctcggaatccagagatgcatgatcctccaaagattgaccgtagaatgcaggaaggttcagatgagagggatgaacaatcccatactgattcagaagctaatggtgataacaaagatccggaaaacattccctcccctggcacttctctatctgagaggatagattcggcgtggttgggctcgtttcaaaatctagagaaagccgagactattgctgagacggaaggcttttcagctgttaattcttctctccggaggcttgccaggccaattcgagtccagtcttttgattcagcgatacggtttcaagaacgtatccaaaaaggtttgccaccatcttctttgtatctctcgaccctcagatctttccacgcttctggcgagtataggaatatggtgagggaccctgtttcaaatgtgatgaggacttactcacagatgttgccactggaagtacagaaattggatctgattgttggttcagcgccaacatacatctcttctgcatctcaaatggctgatggggcacggatgttgattcctcaacggggccttaacgatatcgtggttcctgtatacgatgatgatccagctagtgttgtatcatatgctatcaattcaaaggaatataaggagtggatcgttaacaaaggtcttgcttctagtagtagtagcagcaatttgaataacagagagtctgaaccttccgccttctcgacttggcgttctctgtcgatggatgttgattacattcaacacgcggtgtatggatcttctcaagacgatagaaagtctccgcatttgaccatttctttcagcgaccgcgcttcttcttcctctactgccactgaaggtaaagtgaagttctctgtgacgtgttattttgcaacgcagtttgacactctgagaaagacttgctgtccgagtgaagtggactttgtgagatccttgagccgttgtcagagatggtctgcacagggagggaaaagcaatgtttactttgccaagtcattggacgagaggttcatcataaaacaagtcgtcaaaaccgagctggattctttcgaggattttgcacctgagtacttcaaatatttgaaggaatcactcagttccgggagccctacttgtcttgctaagattctcggtatctaccaggtctcaattaaacatccgaaaggtggaaaagagacaaagatggatttgatggtgatggagaatctcttctacaacagaagaatatctaggatctatgatctcaagggatctgcacggtcaaggtacaatccaaacacatccggagcagacaaagttttgttagacatgaatctgctagagacactgcgcacagaaccaatattcctaggaagcaaggccaagagaagcttggaaagagcgatatggaacgacaccaatttcttggcttctgtggatgtaatggactactcattgctggttggattcgacgaagagcggaaagaactagttctcgggatcatcgacttcatgagacagtacacatgggacaagcacctagagacttgggttaaagcttcaggcattttgggtggacccaagaatgcttctccaactatagtctcaccaaaacagtacaagaggaggtttagaaaggccatgaccacttattttctcactgttcctgagccatggacctcttgagtgaaagaaaagaaaccatttttcatcattcttttgttcactgattccaatttgttcttctcaaataaaaagggaaattggttaacagacacatataatataatacaggttcgaacctgactgattgattt

SEQ ID NO: 4757 - protein, 914 aa, Arabidopsis thaliana
KDNGRGEEENQLVNPQDLPQHESFYEDDVSSEYFSAADSHQSILVSFSSRCVLKESVCERSRLLRIKFYGSFDKPLGRYLKDDLFDKTSSCRSCKELVDAHVLCYSHQNGNLTINVRRLPSMKLPGEQDGKIWMWHRCLRCAHVDGVPPATRRVVMSDAAWGLSFGKFLELSFSNHATANRVASCGHSLQRDCLRFYGFGNMVAFFRYSPINILTVLLPPSMLEFNSHPQQEWIRTEAAELVGKMRTMYTEISDMLNRMEEKSSLLEPEQSEACDLHSRIIGLIDQLVKEKDEYDDALQPIFEENLQIQGSLDILELNRLRRALMIGAHAWDHQLYLLNSQLKKASVFKTGDDNAPRNPEMHDPPKIDRRMQEGSDERDEQSHTDSEANGDNKDPENIPSPGTSLSERIDSAWLGSFQNLEKAETIAETEGFSAVNSSLRRLARPIRVQSFDSAIRFQERIQKGLPPSSLYLSTLRSFHASGEYRNMVRDPVSNVMRTYSQMLPLEVQKLDLIVGSAPTYISSASQMADGARMLIPQRGLNDIVVPVYDDDPASVVSYAINSKEYKEWIVNKGLASSSSSSNLNNRESEPSAFSTWRSLSMDVDYIQHAVYGSSQDDRKSPHLTISFSDRASSSSTATEGKVKFSVTCYFATQFDTLRKTCCPSEVDFVRSLSRCQRWSAQGGKSNVYFAKSLDERFIIKQVVKTELDSFEDFAPEYFKYLKESLSSGSPTCLAKILGIYQVSIKHPKGGKETKMDLMVMENLFYNRRISRIYDLKGSARSRYNPNTSGADKVLLDMNLLETLRTEPIFLGSKAKRSLERAIWNDTNFLASVDVMDYSLLVGFDEERKELVLGIIDFMRQYTWDKHLETWVKASGILGGPKNASPTIVSPKQYKRRFRKAMTTYFLTVPEPWTS

SEQ ID NO: 4758 - protein, 793 aa, Arabidopsis thaliana
MKLPGEQDGKIWMWHRCLRCAHVDGVPPATRRVVMSDAAWGLSFGKFLELSFSNHATANRVASCGHSLQRDCLRFYGFGNMVAFFRYSPINILTVLLPPSMLEFNSHPQQEWIRTEAAELVGKMRTMYTEISDMLNRMEEKSSLLEPEQSEACDLHSRIIGLIDQLVKEKDEYDDALQPIFEENLQIQGSLDILELNRLRRALMIGAHAWDHQLYLLNSQLKKASVFKTGDDNAPRNPEMHDPPKIDRRMQEGSDERDEQSHTDSEANGDNKDPENIPSPGTSLSERIDSAWLGSFQNLEKAETIAETEGFSAVNSSLRRLARPIRVQSFDSAIRFQERIQKGLPPSSLYLSTLRSFHASGEYRNMVRDPVSNVMRTYSQMLPLEVQKLDLIVGSAPTYISSASQMADGARMLIPQRGLNDIVVPVYDDDPASVVSYAINSKEYKEWIVNKGLASSSSSSNLNNRESEPSAFSTWRSLSMDVDYIQHAVYGSSQDDRKSPHLTISFSDRASSSSTATEGKVKFSVTCYFATQFDTLRKTCCPSEVDFVRSLSRCQRWSAQGGKSNVYFAKSLDERFIIKQVVKTELDSFEDFAPEYFKYLKESLSSGSPTCLAKILGIYQVSIKHPKGGKETKMDLMVMENLFYNRRISRIYDLKGSARSRYNPNTSGADKVLLDMNLLETLRTEPIFLGSKAKRSLERAIWNDTNFLASVDVMDYSLLVGFDEERKELVLGIIDFMRQYTWDKHLETWVKASGILGGPKNASPTIVSPKQYKRRFRKAMTTYFLTVPEPWTS

SEQ ID NO: 4759 - protein, 781 aa, Arabidopsis thaliana
MWHRCLRCAHVDGVPPATRRVVMSDAAWGLSFGKFLELSFSNHATANRVASCGHSLQRDCLRFYGFGNMVAFFRYSPINILTVLLPPSMLEFNSHPQQEWIRTEAAELVGKMRTMYTEISDMLNRMEEKSSLLEPEQSEACDLHSRIIGLIDQLVKEKDEYDDALQPIFEENLQIQGSLDILELNRLRRALMIGAHAWDHQLYLLNSQLKKASVFKTGDDNAPRNPEMHDPPKIDRRMQEGSDERDEQSHTDSEANGDNKDPENIPSPGTSLSERIDSAWLGSFQNLEKAETIAETEGFSAVNSSLRRLARPIRVQSFDSAIRFQERIQKGLPPSSLYLSTLRSFHASGEYRNMVRDPVSNVMRTYSQMLPLEVQKLDLIVGSAPTYISSASQMADGARMLIPQRGLNDIVVPVYDDDPASVVSYAINSKEYKEWIVNKGLASSSSSSNLNNRESEPSAFSTWRSLSMDVDYIQHAVYGSSQDDRKSPHLTISFSDRASSSSTATEGKVKFSVTCYFATQFDTLRKTCCPSEVDFVRSLSRCQRWSAQGGKSNVYFAKSLDERFIIKQVVKTELDSFEDFAPEYFKYLKESLSSGSPTCLAKILGIYQVSIKHPKGGKETKMDLMVMENLFYNRRISRIYDLKGSARSRYNPNTSGADKVLLDMNLLETLRTEPIFLGSKAKRSLERAIWNDTNFLASVDVMDYSLLVGFDEERKELVLGIIDFMRQYTWDKHLETWVKASGILGGPKNASPTIVSPKQYKRRFRKAMTTYFLTVPEPWTS

SEQ ID NO: 4760 - DNA, 1657 bp, Arabidopsis thaliana
gatcttctcaaaaacttcacctttttttgtttttccagtttctcagaggagatcttccttcaaagctcaaatccttttgtctgaattgtgatactgctgtccccatttttctgcaagttgggaaatttctgtcaaagttttgtgggtctgttaaaaagatctgagctttgaacatggggagctcaatggaggagaaagtggtggctgtgatcatggtcggtggtccaaccaaaggcactcgatttcggccattgtcgctgaatattccaaagcctctgtttcctattgcgggacaaccaatggtgcatcatccaatttcagcttgtaaaagaattccaaatttagctcaaatatatcttgttggcttctatgaggaaagggaatttgcactttatgtttcagccatctctaatgaacttaaagttcctgttagatatctgcgagaagacaaaccacatggttcagctggtgggctgtatcactttagaaatcttattatggaagatagtccgtctcatatcttcctgcttaactgtgatgtttgctgcagtttccccttgcccaaaatgctcgaggctcacaggggatatggtggaattggaactcttcttgtgatcaaggtctctcctgaatcagccagccaatttggagaattggttgcagatccagttactaatgagctgcttcattacaccgagaaacccgaaacttttgtcagtgatcgaattaactgtggtgtttatgtatttacacctgaaatttttaatgccataggagatgtttctactcagaggaaagatagagcaactctaaaacgtgtttccagcttcgaagctcttcaaccggcaacaaggatcccgacagattttgtaagactggatcaagacatcctttcacctctagctgggaagaaacggctatatacttatgagactatggatttctgggagcaaatcaaatctcctgggatgtcgttgaggtgttcaggactctatctttcccaattccgcttgacatctccccaactgttggctagtggtgatggaacaaggagtgccattgtgattggtgatgtttacatacatccttctgcaaaagttcacccaactgcaaagattggtcccaacgtctcaatctctgcaaatgctcgtgttggaccgggcgtcaggcttatgagctgcatcatccttgacgatgttgagatcatggaaaatgcagtggtgactaacgcaattgttgggtggaaatcttctatcgggagatggtcccgcgtccaggctgagggagtctacaattcgaaactcggagttacaattctcggagactcggttgcagttgaagacgaggttgtggtgaccagcagtattgttcttccaaacaagacactgaacgtcagtgttcaagacgagatcattttgtaactgaaaaacggaagttgaaaaatggaaccaacccagtggggagcagccacactatctccctctgattcaatatctactggagaaccacataagcaaatatttgggaactaattcacatgtatcatttatttacaccaagaattttccaacattgtatcaattccattttctatactcacaacacagctactgtaaaaggcactgaatttttgcccagaataataaagcacttgtgc

SEQ ID NO: 4761 - protein, 415 aa, Arabidopsis thaliana
MGSSMEEKVVAVIMVGGPTKGTRFRPLSLNIPKPLFPIAGQPMVHHPISACKRIPNLAQIYLVGFYEEREFALYVSAISNELKVPVRYLREDKPHGSAGGLYHFRNLIMEDSPSHIFLLNCDVCCSFPLPKMLEAHRGYGGIGTLLVIKVSPESASQFGELVADPVTNELLHYTEKPETFVSDRINCGVYVFTPEIFNAIGDVSTQRKDRATLKRVSSFEALQPATRIPTDFVRLDQDILSPLAGKKRLYTYETMDFWEQIKSPGMSLRCSGLYLSQFRLTSPQLLASGDGTRSAIVIGDVYIHPSAKVHPTAKIGPNVSISANARVGPGVRLMSCIILDDVEIMENAVVTNAIVGWKSSIGRWSRVQAEGVYNSKLGVTILGDSVAVEDEVVVTSSIVLPNKTLNVSVQDEIIL

SEQ ID NO: 4762 - protein, 411 aa, Arabidopsis thaliana
MEEKVVAVIMVGGPTKGTRFRPLSLNIPKPLFPIAGQPMVHHPISACKRIPNLAQIYLVGFYEEREFALYVSAISNELKVPVRYLREDKPHGSAGGLYHFRNLIMEDSPSHIFLLNCDVCCSFPLPKMLEAHRGYGGIGTLLVIKVSPESASQFGELVADPVTNELLHYTEKPETFVSDRINCGVYVFTPEIFNAIGDVSTQRKDRATLKRVSSFEALQPATRIPTDFVRLDQDILSPLAGKKRLYTYETMDFWEQIKSPGMSLRCSGLYLSQFRLTSPQLLASGDGTRSAIVIGDVYIHPSAKVHPTAKIGPNVSISANARVGPGVRLMSCIILDDVEIMENAVVTNAIVGWKSSIGRWSRVQAEGVYNSKLGVTILGDSVAVEDEVVVTSSIVLPNKTLNVSVQDEIIL

SEQ ID NO: 4763 - protein, 402 aa, Arabidopsis thaliana
MVGGPTKGTRFRPLSLNIPKPLFPIAGQPMVHHPISACKRIPNLAQIYLVGFYEEREFALYVSAISNELKVPVRYLREDKPHGSAGGLYHFRNLIMEDSPSHIFLLNCDVCCSFPLPKMLEAHRGYGGIGTLLVIKVSPESASQFGELVADPVTNELLHYTEKPETFVSDRINCGVYVFTPEIFNAIGDVSTQRKDRATLKRVSSFEALQPATRIPTDFVRLDQDILSPLAGKKRLYTYETMDFWEQIKSPGMSLRCSGLYLSQFRLTSPQLLASGDGTRSAIVIGDVYIHPSAKVHPTAKIGPNVSISANARVGPGVRLMSCIILDDVEIMENAVVTNAIVGWKSSIGRWSRVQAEGVYNSKLGVTILGDSVAVEDEVVVTSSIVLPNKTLNVSVQDEIIL

SEQ ID NO: 4764 - DNA, 533 bp, Arabidopsis thaliana
acatattgctttgttctataattaaacaaaactcataagaagaagaaaaacgatggctctctctggttcgcaaaagaaggttttcctacttgttatagccattgcacgtctctcctcttctcttgcagaggcgtggagctggagttctagtgacggcaacggctggggatggggatctgatggctctagcacctctacctcaggcccaggttcaactcctggtgattcaaactctggcggttcaaaccctggaggtccgaattctggtggttttagctccccttggggatcttgggggtggggttggggatcccacggctctgggagcccggccccatccaatgctttatttcttttagtgataataaagaagaagaatttgagtgattttctattctactatataatgtagaaagaacttttctactagaaaaataaaaattgctttcgtaataaatatgaggtggcagttagattgagtgtaatatttgcaatacccaaacttatgaaaaaataaaataaatattttaggt

SEQ ID NO: 4765 - protein, 119 aa, Arabidopsis thaliana
MALSGSQKKVFLLVIAIARLSSSLAEAWSWSSSDGNGWGWGSDGSSTSTSGPGSTPGDSNSGGSNPGGPNSGGFSSPWGSWGWGWGSHGSGSPAPSNALFLLVIIKKKNLSDFLFYYIM

SEQ ID NO: 4766 - protein, 59 aa, Arabidopsis thaliana
MALAPLPQAQVQLLVIQTLAVQTLEVRILVVLAPLGDLGGGVGDPTALGARPHPMLYFF

SEQ ID NO: 4767 - DNA, 885 bp, Arabidopsis thaliana
aaaaaaaaaataatatcgagacgagacgggtttgtttcttctctctatctctatatctaccaaaatcctttgccccccgaatctagttctctcgatcgaccctgtgacgatggctaataaccaagcaagccttcttctgcagaaacagcttaaagatctgtgtaagaaacctgttgatggtttctctgctggcctcgttgatgagaagaacgttttccaatggagcgtctctattatgggtcctcctgatactttgtatgaaggtggcttttttaatgcaattatgtcgtttccggagaattatccagtttcaccaccaactgtgacgtttacctcggagatgtggcatcctaatgtttattctgatggaaaagtttgcatttctattcttcatcctcctggtgatgatcctcatggatacgagcttgcctctgaacgttggacccctgtccatacggtagaaagcattgtgttgagtatcatatcgatgctctcaggtcccaacgatgagtcaccagcgaatgtggaagctgcaaaggaatggagagacaacagagcagagtttaggaagaaagtgagtcgctgtgtgagaagatcgcaagagatgctatgaacatctctccagcgtttttttcgtgttgtagaaatatcgattctaatcttatgagaaagcctaagcagaaccaaccatcttcaagcagcagccagatgaatctgactttgcaaaagcttctctttctttttcctttttgggttttgttctctaaggtttggtttggaatattggtgtggaatcaaatccgctccatattttaggattatattattgcactcgttaatggattcgtttgatctggctttttaactttattctggttttgggtt

SEQ ID NO: 4768 - protein, 167 aa, Arabidopsis thaliana
MANNQASLLLQKQLKDLCKKPVDGFSAGLVDEKNVFQWSVSIMGPPDTLYEGGFFNAIMSFPENYPVSPPTVTFTSEMWHPNVYSDGKVCISILHPPGDDPHGYELASERWTPVHTVESIVLSIISMLSGPNDESPANVEAAKEWRDNRAEFRKKVSRCVRRSQEML

SEQ ID NO: 4769 - protein, 125 aa, Arabidopsis thaliana
MGPPDTLYEGGFFNAIMSFPENYPVSPPTVTFTSEMWHPNVYSDGKVCISILHPPGDDPHGYELASERWTPVHTVESIVLSIISMLSGPNDESPANVEAAKEWRDNRAEFRKKVSRCVRRSQEML

SEQ ID NO: 4770 - protein, 109 aa, Arabidopsis thaliana
MSFPENYPVSPPTVTFTSEMWHPNVYSDGKVCISILHPPGDDPHGYELASERWTPVHTVESIVLSIISMLSGPNDESPANVEAAKEWRDNRAEFRKKVSRCVRRSQEML

SEQ ID NO: 4771 - DNA, 696 bp, Arabidopsis thaliana
caatatatatcactttctctggcatcttcgctaccgtgtacgtctctctttctctccctcccctccttggcttttttcaagttcccaccataaacgcagagggagttaagaaatggaggataggaggtgtgatgtgttgtttccatgttcatcatcggttgatcctcgcttgacagagtttcatggggtcgacaactctgctcagccgacaacatcatccgaagagaagccaaggagtaagaagaagaagaaagagagagaagcgaggtacgcgttccagacaagaagccaggttgatatactggatgatggatacaggtggaggaagtacggccaaaaagcagtcaagaacaatccattccccaggagctattataagtgcacagaagaaggatgcagagtgaagaagcaagtgcagaggcaatggggagacgaaggagtggtggtgacgacataccaaggtgttcatacacatgccgttgataaaccctctgataatttccaccacatcttgacacaaatgcacatcttccctcccttttgcttgaaggaatgattagaggaattggattgtaatatttactttcccaaaaacgttgggctcacaccatcagacctttacttttaaactagcagcaactcacatatctcaaaaatactaatccttatctttgtctttatgggacctttgaatcc

SEQ ID NO: 4772 - protein, 147 aa, Arabidopsis thaliana
MEDRRCDVLFPCSSSVDPRLTEFHGVDNSAQPTTSSEEKPRSKKKKKEREARYAFQTRSQVDILDDGYRWRKYGQKAVKNNPFPRSYYKCTEEGCRVKKQVQRQWGDEGVVVTTYQGVHTHAVDKPSDNFHHILTQMHIFPPFCLKE

SEQ ID NO: 4773 - protein, 73 aa, Arabidopsis thaliana
MGSTTLLSRQHHPKRSQGVRRRRKREKRGTRSRQEARLIYWMMDTGGGSTAKKQSRTIHSPGAIISAQKKDAE

SEQ ID NO: 4774 - DNA, 1280 bp, Arabidopsis thaliana
acaattcagggaaaatcttcaaagtgtttgcagagaaatctaaattcatcaacagttttttacaaaagaaatggaaaacggagaagcaaaacagagtgtacctcttctcactccctataagatgggaagattcaatctttcccatagggttgttctagcaccattgacgagacagagatcgtacggaaacgttcctcagcctcacgctgccatatattactctcagagaacgactccaggaggttttctcatcactgaagccactggagtttcagatacagctcaaggatatcaagatactcctgggatatggactaaagagcatgtggaggcatggaagccaatcgttgatgctgtacatgccaaaggtggtatcttcttctgtcagatctggcatgttggccgcgtttctaatagcgggtttcagccaaatggaaaagctcctatctcttgttcggataagccattgatgcctcaaattcgctctaatggcatcgatgaagctctctttacccctccaagacggcttggtatcgaagaaatccccggcattgtcaatgattttaggcttgctgcaagaaatgctatggaagctggttttgatggagttgagattcatggagctaatggctatctgattgaccagttcatgaaggatacggtgaatgatagaactgatgaatacggtggatcattgcaaaaccgttgcaaatttcctctagaaatagtcgatgcagttgctaaggagatcggaccagaccgtgttggaatcaggctctctccatttgctgactacatggaatctggagacactaatccaggagcattagggctttatatggcggaatctttgaacaaatacggaatcctctactgtcatgtgattgaagcgagaatgaaaacaatgggagaagtacatgcttgtcctcacacactaatgccgatgaggaaagcgtttaaggggacttttatctccgcaggaggtttcacgagggaagatgggaatgaggctgtgtcaaagggaagaactgatttggtggcttatggtcgatggtttctagccaacccggacctgccaaagaggttccaagtggatgcaccgctgaataagtacgatagaccaacgttttacacttctgatccagtcgtcggttacaccgattaccctttcctcgaatcaacagcttaaaattgttatcaataatgtaatgtagtgtgtttcccttatataagatgtaataagtttctggcttttcatttatactttttaagtttaagcc

SEQ ID NO: 4775 - protein, 372 aa, Arabidopsis thaliana
MENGEAKQSVPLLTPYKMGRFNLSHRVVLAPLTRQRSYGNVPQPHAAIYYSQRTTPGGFLITEATGVSDTAQGYQDTPGIWTKEHVEAWKPIVDAVHAKGGIFFCQIWHVGRVSNSGFQPNGKAPISCSDKPLMPQIRSNGIDEALFTPPRRLGIEEIPGIVNDFRLAARNAMEAGFDGVEIHGANGYLIDQFMKDTVNDRTDEYGGSLQNRCKFPLEIVDAVAKEIGPDRVGIRLSPFADYMESGDTNPGALGLYMAESLNKYGILYCHVIEARMKTMGEVHACPHTLMPMRKAFKGTFISAGGFTREDGNEAVSKGRTDLVAYGRWFLANPDLPKRFQVDAPLNKYDRPTFYTSDPVVGYTDYPFLESTA

SEQ ID NO: 4776 - protein, 355 aa, Arabidopsis thaliana
MGRFNLSHRVVLAPLTRQRSYGNVPQPHAAIYYSQRTTPGGFLITEATGVSDTAQGYQDTPGIWTKEHVEAWKPIVDAVHAKGGIFFCQIWHVGRVSNSGFQPNGKAPISCSDKPLMPQIRSNGIDEALFTPPRRLGIEEIPGIVNDFRLAARNAMEAGFDGVEIHGANGYLIDQFMKDTVNDRTDEYGGSLQNRCKFPLEIVDAVAKEIGPDRVGIRLSPFADYMESGDTNPGALGLYMAESLNKYGILYCHVIEARMKTMGEVHACPHTLMPMRKAFKGTFISAGGFTREDGNEAVSKGRTDLVAYGRWFLANPDLPKRFQVDAPLNKYDRPTFYTSDPVVGYTDYPFLESTA

SEQ ID NO: 4777 - protein, 239 aa, Arabidopsis thaliana
MPQIRSNGIDEALFTPPRRLGIEEIPGIVNDFRLAARNAMEAGFDGVEIHGANGYLIDQFMKDTVNDRTDEYGGSLQNRCKFPLEIVDAVAKEIGPDRVGIRLSPFADYMESGDTNPGALGLYMAESLNKYGILYCHVIEARMKTMGEVHACPHTLMPMRKAFKGTFISAGGFTREDGNEAVSKGRTDLVAYGRWFLANPDLPKRFQVDAPLNKYDRPTFYTSDPVVGYTDYPFLESTA

SEQ ID NO: 4778 - DNA, 1726 bp, Arabidopsis thaliana
actataaactctataaaaaccaattttcacttccaattgaattgggaacaaaccaaatctctatctctctccattagagcttgaagcagccatagcctaacaaaaccttcaacaatggcttcaatggctgccgtcttaagcaaaactccattcctctctcaaccactaaccaaatcatctccaaactccgatctccccttcgccgcggtttccttcccttccaaatccctacgccgccgcgtaggatcaatccgagccggattaatcgctcccgacggtggtaagcttgtagagctcatcgtggaagagccaaagcggcgagagaagaaacacgaggcggcggatttgccacgtgttgagctgacggcgattgacttgcaatggatgcatgtattaagcgaaggctgggcaagtccactcggaggtttcatgagagaatccgagttcctccaaactcttcattttaactcgctacgtcttgacgacggctccgtcgttaacatgtccgtgcctattgttctcgctattgacgatgaacaaaaagcacgtatcggcgagtctacacgtgtcgctcttttcaattccgatggtaaccccgtcgctatcctcagcgatattgagatttataagcatccaaaggaagaaaggatagctagaacatggggtacgacggctccaggtttgccttacgtagacgaggcgataactaatgctggaaactggctcattgggggtgatcttgaggttcttgagccagtgaagtacaatgatgggcttgatcgtttcaggctttcgcctgctgagttacgtaaagagttggagaagcgtaatgcggatgcggtgtttgctttccagctgaggaatcctgttcataatggtcatgctcttcttatgactgatactcgtaggagacttcttgagatgggttacaaaaaccctattcttttgcttcatccgttaggtgggtttacaaaggctgatgatgttcctttagattggaggatgaagcaacacgagaaggttctagaggatggtgttctcgatccggagactacagtggtttcgatattcccgtcacctatgcattacgctggtccaaccgaagtgcagtggcacgcaaaggctagaatcaatgctggtgctaacttttacattgtgggtcgtgatcctgctgggatgggtcatccagtagagaaacgtgatctttacgatgctgatcatggaaagaaagtactaagcatggcaccaggactcgaacgactcaacatccttcctttcagggttgctgcatatgacaagacgcaaggcaagatggctttcttcgatccctcgaggcctcaagatttcttgttcatctccggcactaagatgcgcacattggcaaagaacaacgaaaacccgccagacggttttatgtgcccaggtggatggaaagttctggtggattactatgagagcttgactccggcgggtaatggtagactaccagaagtggttccggtgtaagacaaaactgttcgtttcaaattgtaacgtttgtgttgtgaagccttgtagcaacaatcattgttgtattgggagagaagcctatgtataatctggcttgacctttttccaaataaaatacagaagaaaaaaagactgtttttcgtttgcaagataatttacgaaacttgtaatatttgggcctcaaactttgtaccatattaatgaaacgattgttttt

SEQ ID NO: 4779 - protein, 463 aa, Arabidopsis thaliana
MASMAAVLSKTPFLSQPLTKSSPNSDLPFAAVSFPSKSLRRRVGSIRAGLIAPDGGKLVELIVEEPKRREKKHEAADLPRVELTAIDLQWMHVLSEGWASPLGGFMRESEFLQTLHFNSLRLDDGSVVNMSVPIVLAIDDEQKARIGESTRVALFNSDGNPVAILSDIEIYKHPKEERIARTWGTTAPGLPYVDEAITNAGNWLIGGDLEVLEPVKYNDGLDRFRLSPAELRKELEKRNADAVFAFQLRNPVHNGHALLMTDTRRRLLEMGYKNPILLLHPLGGFTKADDVPLDWRMKQHEKVLEDGVLDPETTVVSIFPSPMHYAGPTEVQWHAKARINAGANFYIVGRDPAGMGHPVEKRDLYDADHGKKVLSMAPGLERLNILPFRVAAYDKTQGKMAFFDPSRPQDFLFISGTKMRTLAKNNENPPDGFMCPGGWKVLVDYYESLTPAGNGRLPEVVPV

SEQ ID NO: 4780 - protein, 460 aa, Arabidopsis thaliana
MAAVLSKTPFLSQPLTKSSPNSDLPFAAVSFPSKSLRRRVGSIRAGLIAPDGGKLVELIVEEPKRREKKHEAADLPRVELTAIDLQWMHVLSEGWASPLGGFMRESEFLQTLHFNSLRLDDGSVVNMSVPIVLAIDDEQKARIGESTRVALFNSDGNPVAILSDIEIYKHPKEERIARTWGTTAPGLPYVDEAITNAGNWLIGGDLEVLEPVKYNDGLDRFRLSPAELRKELEKRNADAVFAFQLRNPVHNGHALLMTDTRRRLLEMGYKNPILLLHPLGGFTKADDVPLDWRMKQHEKVLEDGVLDPETTVVSIFPSPMHYAGPTEVQWHAKARINAGANFYIVGRDPAGMGHPVEKRDLYDADHGKKVLSMAPGLERLNILPFRVAAYDKTQGKMAFFDPSRPQDFLFISGTKMRTLAKNNENPPDGFMCPGGWKVLVDYYESLTPAGNGRLPEVVPV

SEQ ID NO: 4781 - protein, 373 aa, Arabidopsis thaliana
MHVLSEGWASPLGGFMRESEFLQTLHFNSLRLDDGSVVNMSVPIVLAIDDEQKARIGESTRVALFNSDGNPVAILSDIEIYKHPKEERIARTWGTTAPGLPYVDEAITNAGNWLIGGDLEVLEPVKYNDGLDRFRLSPAELRKELEKRNADAVFAFQLRNPVHNGHALLMTDTRRRLLEMGYKNPILLLHPLGGFTKADDVPLDWRMKQHEKVLEDGVLDPETTVVSIFPSPMHYAGPTEVQWHAKARINAGANFYIVGRDPAGMGHPVEKRDLYDADHGKKVLSMAPGLERLNILPFRVAAYDKTQGKMAFFDPSRPQDFLFISGTKMRTLAKNNENPPDGFMCPGGWKVLVDYYESLTPAGNGRLPEVVPV

SEQ ID NO: 4782 - DNA, 2414 bp, Arabidopsis thaliana
gctctcagtggaaccgttggggaagactatttgttcacagtgagctaccactatgcctttaagccttttaggtcattgatcttgtttccgacttttagaaggaaggacaacattcgaagaacaaccacagtttctacgtttagcaactcattatttttaggcgccatcaagaatgggaaagactcctggtaaatggatcaagactttgcttctcgggaagaagtcgcctaagtcgaattcggataaccgaagccagaaactgaaatctgctaagaaagaagagctggtggaatcggtgacagaagatttgtcaaacttaacagttgatcctccggtggtttcatcacaaccagttccagcttctactgctcaaaatgtggtttctccaatcaatggtgatgagtccaaggataatctcgagtcaaggaatgacttgggagaagtcgagcttgaacaagctgcaattaaggttcaagctaccttcagagctcatcaggcacgtagagcatttcgaactcttaaaggtatcatcaggctgcaggcagttatccgtggtcacttggtgagaagacaagccattgctacatattcatgtatatggggaattgtgaagtttcaggctcttgttcgtggccagaaagctagatcttcagatattgcgattcagtttcagaaaaaacatatggaagcaagtgattcagaagttttgcaatcgagcacgtgtagttggatggataatcccacaaagttcgtctttgttgataagcttctagcttcttcaccaactgcattgcctctgaagatccagtatggtcctgaggaacctaactcagccaaggtttggcttgaacgctggacacaattacaagtttggtcttctggttcacgagtacctaggattgagattccaaaatctcagtcaaagaagcgaaactaccaagcagtggttgaagcagaaaagaaaaggccaaagcgaagtatcaagaaaccatctggcacaactagtggaactggccctagccgttttacagctgaaagaaataaacctaaacgaaatgtgaggaaggcttccacgcttagtaaagatcccctgagaaatgagagtgacaaagcaaatcacaattcgagaaaaagtagaagcggctcaaaggaggggtcgcctttggagattaaagatgagaagcccagtcctagtctcaaaaggtcttctctttcgaacgggtcaaagaaagccacccttagatctgctgagaagaagaagaaagatattccagattcttctgtgcaaatacagcctgaagggaaagtttcagagaatgttcttgaaggaggagacaatattgagtttgctgaaaaggagaaagatactacagattctgtgcagatagagtctgaagggaaggtttcagggaatgttcttgaaggaggagaaggagaaaatattgtgtttactgaaaaggagaaagatactgcagatcctgtgcagatagagcctgaaaggaaggttcttgaagaaggagacaatatcgagtcttctggaaaagaaaaagatactggagattctgtgcagatagagtctgaaggaaaggttcttgaaggaggagacaatattgaatttggtgaaaaagagaaagataaagctgatgcagttcccatcgaatttgatattgtaaaagatgagaagtcaccagttttggataggacggaggaagatgaactgaaaactgcagagaccagtgacaaagccgaagcccttaaatgtgcagatgtgaaggtaagctctgagaatggtaatgttggttctgataacacaaagcaaagtgaaaaacgagcattgctgcctgcaaatattgacaaacaagatgatgggcttacccttagcggacggaaaatccccagctacatggccccgactgcatctgcaaaggccagagtcaaaggagaagcctctccgaggtttgcccaagcgaagactgagataaatggggcattacggcgccattcactgccttctccagccaatggtaagctgagtactactactatgtctccaagggctcaaaaacttctcttagcctctgccaaaggatctatgaacggcgacaaatcttttacttcttccaaggacataactcacaagtcaaccagaaccgactggaaacggtgaaggctcaggcaaaagagagtgtcatctactcatcttacatggtcgaattcaattacttagtgtgtttcctctgcattttggtttggtttggtgagtttagagagtgtttggtcagtgttcatgtctagtctattacatcattttcatatcttgcttcaatttactctgatatgtttgaagacacaaaatagttgaagtaaatagttaatctctgtataaacctttgcaatcactcctctctaattac

SEQ ID NO: 4783 - protein, 664 aa, Arabidopsis thaliana
MGKTPGKWIKTLLLGKKSPKSNSDNRSQKLKSAKKEELVESVTEDLSNLTVDPPVVSSQPVPASTAQNVVSPINGDESKDNLESRNDLGEVELEQAAIKVQATFRAHQARRAFRTLKGIIRLQAVIRGHLVRRQAIATYSCIWGIVKFQALVRGQKARSSDIAIQFQKKHMEASDSEVLQSSTCSWMDNPTKFVFVDKLLASSPTALPLKIQYGPEEPNSAKVWLERWTQLQVWSSGSRVPRIEIPKSQSKKRNYQAVVEAEKKRPKRSIKKPSGTTSGTGPSRFTAERNKPKRNVRKASTLSKDPLRNESDKANHNSRKSRSGSKEGSPLEIKDEKPSPSLKRSSLSNGSKKATLRSAEKKKKDIPDSSVQIQPEGKVSENVLEGGDNIEFAEKEKDTTDSVQIESEGKVSGNVLEGGEGENIVFTEKEKDTADPVQIEPERKVLEEGDNIESSGKEKDTGDSVQIESEGKVLEGGDNIEFGEKEKDKADAVPIEFDIVKDEKSPVLDRTEEDELKTAETSDKAEALKCADVKVSSENGNVGSDNTKQSEKRALLPANIDKQDDGLTLSGRKIPSYMAPTASAKARVKGEASPRFAQAKTEINGALRRHSLPSPANGKLSTTTMSPRAQKLLLASAKGSMNGDKSFTSSKDITHKSTRTDWKR

SEQ ID NO: 4784 - protein, 494 aa, Arabidopsis thaliana
MEASDSEVLQSSTCSWMDNPTKFVFVDKLLASSPTALPLKIQYGPEEPNSAKVWLERWTQLQVWSSGSRVPRIEIPKSQSKKRNYQAVVEAEKKRPKRSIKKPSGTTSGTGPSRFTAERNKPKRNVRKASTLSKDPLRNESDKANHNSRKSRSGSKEGSPLEIKDEKPSPSLKRSSLSNGSKKATLRSAEKKKKDIPDSSVQIQPEGKVSENVLEGGDNIEFAEKEKDTTDSVQIESEGKVSGNVLEGGEGENIVFTEKEKDTADPVQIEPERKVLEEGDNIESSGKEKDTGDSVQIESEGKVLEGGDNIEFGEKEKDKADAVPIEFDIVKDEKSPVLDRTEEDELKTAETSDKAEALKCADVKVSSENGNVGSDNTKQSEKRALLPANIDKQDDGLTLSGRKIPSYMAPTASAKARVKGEASPRFAQAKTEINGALRRHSLPSPANGKLSTTTMSPRAQKLLLASAKGSMNGDKSFTSSKDITHKSTRTDWKR

SEQ ID NO: 4785 - protein, 478 aa, Arabidopsis thaliana
MDNPTKFVFVDKLLASSPTALPLKIQYGPEEPNSAKVWLERWTQLQVWSSGSRVPRIEIPKSQSKKRNYQAVVEAEKKRPKRSIKKPSGTTSGTGPSRFTAERNKPKRNVRKASTLSKDPLRNESDKANHNSRKSRSGSKEGSPLEIKDEKPSPSLKRSSLSNGSKKATLRSAEKKKKDIPDSSVQIQPEGKVSENVLEGGDNIEFAEKEKDTTDSVQIESEGKVSGNVLEGGEGENIVFTEKEKDTADPVQIEPERKVLEEGDNIESSGKEKDTGDSVQIESEGKVLEGGDNIEFGEKEKDKADAVPIEFDIVKDEKSPVLDRTEEDELKTAETSDKAEALKCADVKVSSENGNVGSDNTKQSEKRALLPANIDKQDDGLTLSGRKIPSYMAPTASAKARVKGEASPRFAQAKTEINGALRRHSLPSPANGKLSTTTMSPRAQKLLLASAKGSMNGDKSFTSSKDITHKSTRTDWKR

SEQ ID NO: 4786 - DNA, 1584 bp, Arabidopsis thaliana
cattgtcggcagtaaaactaaaaataaaaggagttccacttttcaatttttctccactccaaaaccagaaagaaagaaaaaaacatcaatcatgacaacaacaacaacgaagaagccgcacgttctggtgataccgtttccacaatccggtcacatggttccacatcttgacctcacgcatcagattcttctccgtggagccaccgtcactgtcctcgtcacacccaaaaactcttcctatctcgatgctctccgttctcttcactccccggaacacttcaaaaccctaatccttccttttccttctcacccttgtataccttccggtgtcgaatctctccagcaacttcctctcgaagctatagttcacatgtttgatgctctctctcgtctccacgaccctctcgttgactttctcagccgtcaaccaccgtcggatctccccgacgccatcctaggaagctcatttctcagcccttggattaacaaagtagctgatgctttctctattaagtccattagtttcttacccatcaatgctcattcgatctccgtcatgtgggctcaagaagatagaagcttcttcaacgatctcgagactgccacaacggaaagctacgggctcgtcatcaacagtttctacgacctcgagcctgagtttgtagaaactgttaaaacacgtttcctgaatcaccaccgtatatggaccgtcggaccgttgctcccctttaaagctggcgttgaccgtggcggacaaagctcaatcccgccggcgaaagtctcggcttggttagattcgtgccccgaggataactccgtcgtatacgtcggttttggaagccagatccggctcacggcggagcaaacagctgctttagcggcggcgttggagaaaagcagtgtgcgtttcatatgggcggtgagagacgcagctaagaaggtgaactccagcgataactccgttgaggaagatgtgatcccggcgggatttgaagagagagtgaaggagaaaggactcgtgataagaggatgggccccacaaactatgattcttgagcatcgagccgttggatcttacctaactcatttgggttggggttcggttctggaaggaatggtcggaggagttatgttgctagcgtggccgatgcaagcagaccatttctttaacacgacgctcatcgttgataaactaagagccgcagtgcgagttggagagaacagagactcggttcctgactcggacaagctcgctaggattttggctgagtcggcgagagaggacttgccggagagagttacgttgatgaagctgagggagaaagctatggaggccattaaagaaggtgggagctcttacaagaacttggatgagctcgttgcagagatgtgtttgtaataaatatcctcttctcttgctttttaagatttgtttgtttaagagagtcaataagcaaatggggtaagaaaattgttgtttattttccatttatttttctttcttaatttgatatgacaacgattaactcgatttagagttcgttagtcaatgttttctagtatgatgatggcaataatactaag

SEQ ID NO: 4787 - protein, 465 aa, Arabidopsis thaliana
IVGSKTKNKRSSTFQFFSTPKPERKKKTSIMTTTTTKKPHVLVIPFPQSGHMVPHLDLTHQILLRGATVTVLVTPKNSSYLDALRSLHSPEHFKTLILPFPSHPCIPSGVESLQQLPLEAIVHMFDALSRLHDPLVDFLSRQPPSDLPDAILGSSFLSPWINKVADAFSIKSISFLPINAHSISVMWAQEDRSFFNDLETATTESYGLVINSFYDLEPEFVETVKTRFLNHHRIWTVGPLLPFKAGVDRGGQSSIPPAKVSAWLDSCPEDNSVVYVGFGSQIRLTAEQTAALAAALEKSSVRFIWAVRDAAKKVNSSDNSVEEDVIPAGFEERVKEKGLVIRGWAPQTMILEHRAVGSYLTHLGWGSVLEGMVGGVMLLAWPMQADHFFNTTLIVDKLRAAVRVGENRDSVPDSDKLARILAESAREDLPERVTLMKLREKAMEAIKEGGSSYKNLDELVAEMCL

SEQ ID NO: 4788 - protein, 435 aa, Arabidopsis thaliana
MTTTTTKKPHVLVIPFPQSGHMVPHLDLTHQILLRGATVTVLVTPKNSSYLDALRSLHSPEHFKTLILPFPSHPCIPSGVESLQQLPLEAIVHMFDALSRLHDPLVDFLSRQPPSDLPDAILGSSFLSPWINKVADAFSIKSISFLPINAHSISVMWAQEDRSFFNDLETATTESYGLVINSFYDLEPEFVETVKTRFLNHHRIWTVGPLLPFKAGVDRGGQSSIPPAKVSAWLDSCPEDNSVVYVGFGSQIRLTAEQTAALAAALEKSSVRFIWAVRDAAKKVNSSDNSVEEDVIPAGFEERVKEKGLVIRGWAPQTMILEHRAVGSYLTHLGWGSVLEGMVGGVMLLAWPMQADHFFNTTLIVDKLRAAVRVGENRDSVPDSDKLARILAESAREDLPERVTLMKLREKAMEAIKEGGSSYKNLDELVAEMCL

SEQ ID NO: 4789 - protein, 414 aa, Arabidopsis thaliana
MVPHLDLTHQILLRGATVTVLVTPKNSSYLDALRSLHSPEHFKTLILPFPSHPCIPSGVESLQQLPLEAIVHMFDALSRLHDPLVDFLSRQPPSDLPDAILGSSFLSPWINKVADAFSIKSISFLPINAHSISVMWAQEDRSFFNDLETATTESYGLVINSFYDLEPEFVETVKTRFLNHHRIWTVGPLLPFKAGVDRGGQSSIPPAKVSAWLDSCPEDNSVVYVGFGSQIRLTAEQTAALAAALEKSSVRFIWAVRDAAKKVNSSDNSVEEDVIPAGFEERVKEKGLVIRGWAPQTMILEHRAVGSYLTHLGWGSVLEGMVGGVMLLAWPMQADHFFNTTLIVDKLRAAVRVGENRDSVPDSDKLARILAESAREDLPERVTLMKLREKAMEAIKEGGSSYKNLDELVAEMCL

SEQ ID NO: 4790 - DNA, 1522 bp, Arabidopsis thaliana
gtctctatttctctaccaccgttgatgttagggtttcggctgtattctcaccgctgctgacggagacggcccgaatccgcaatttaatcttcgaggttcgattttagtgaagaacaagattcaatagtgatatgcagatctcatgtctcccaatttcgattccttcgatcactcctcgaacctcaattccactcttaccatcactctcctcaaatcctcgccgcattttcaacctcacttcacttcagagcccaaatcactgtttcttcaaaagattacataaatctcagactggtttcagcaatccagttttggctgccatgagaagagaagaagatgttgaagtcgatgattcgttttatatgagaaagtgtgtggagctagcaaaaagagcaattgggtgtacaagtcctaatcctatggtaggttgtgtcattgtcaaagatggtgacattgttggccaagggtttcatcccaaagctggtcagcctcatgctgaggtgtttgctcttagagatgctggagagttagctgagaatgctactgcttatgttagtttggaaccatgtaatcattacggaagaacaccgccgtgtacagaagcattgattaaggctaaggtgagaagagttgttattgggatggttgatccgaatccaattgttttttcttcgggtattagtcggttgaaagatgctggaatcgatgttactgtgagtgttgaagaagagttatgcaagaagatgaatgagggattcatccatcgaatgttaacagggaagccttttctcgccctcaggtattctatgtctgtcaatggttgtttgctagacaagattgggcaaggggcttcggatagtggtggatactactcgaagctattgcaggaatatgatgcgataatactttcttcctcgttatcggatgaactctcgagcatttcttcacaagaagctattaatgtttcgatccaacctattcagatcatagtagctagcaatgcacaacagtctcatatccttgcttcttcccacactgtggaagaatcgggtccaaaagttgtagttttcaccgcaaaggaatcggttgcagaatccggaatcagtagtagcggggtcgaaaccgtagtattggaaaagataaacttggattccattttggattattgttacaaccgtggactatgcagtgtcttgttagatttgagggggaacgtcaaagaccttgaagttcttctgagagatggatttgagcagaaactattgcagaaagtaattattgaggtcttgccggaatggagcacaaaagatgagagacagatcgcgtcgatgaagtggttagaatcaaagcatgtgaaagatttgcagtctaagcaattaggtggaagcgttttgctagagggctatttttgatgttttcatgtatgaatgaatacaagtcatgatatttaccttttttaaagcatagtattattaaggttttacagatcctattattaatagattgataacagatttttgag

SEQ ID NO: 4791 - protein, 426 aa, Arabidopsis thaliana
MQISCLPISIPSITPRTSIPLLPSLSSNPRRIFNLTSLQSPNHCFFKRLHKSQTGFSNPVLAAMRREEDVEVDDSFYMRKCVELAKRAIGCTSPNPMVGCVIVKDGDIVGQGFHPKAGQPHAEVFALRDAGELAENATAYVSLEPCNHYGRTPPCTEALIKAKVRRVVIGMVDPNPIVFSSGISRLKDAGIDVTVSVEEELCKKMNEGFIHRMLTGKPFLALRYSMSVNGCLLDKIGQGASDSGGYYSKLLQEYDAIILSSSLSDELSSISSQEAINVSIQPIQIIVASNAQQSHILASSHTVEESGPKVVVFTAKESVAESGISSSGVETVVLEKINLDSILDYCYNRGLCSVLLDLRGNVKDLEVLLRDGFEQKLLQKVIIEVLPEWSTKDERQIASMKWLESKHVKDLQSKQLGGSVLLEGYF

SEQ ID NO: 4792 - protein, 363 aa, Arabidopsis thaliana
MRREEDVEVDDSFYMRKCVELAKRAIGCTSPNPMVGCVIVKDGDIVGQGFHPKAGQPHAEVFALRDAGELAENATAYVSLEPCNHYGRTPPCTEALIKAKVRRVVIGMVDPNPIVFSSGISRLKDAGIDVTVSVEEELCKKMNEGFIHRMLTGKPFLALRYSMSVNGCLLDKIGQGASDSGGYYSKLLQEYDAIILSSSLSDELSSISSQEAINVSIQPIQIIVASNAQQSHILASSHTVEESGPKVVVFTAKESVAESGISSSGVETVVLEKINLDSILDYCYNRGLCSVLLDLRGNVKDLEVLLRDGFEQKLLQKVIIEVLPEWSTKDERQIASMKWLESKHVKDLQSKQLGGSVLLEGYF

SEQ ID NO: 4793 - protein, 349 aa, Arabidopsis thaliana
MRKCVELAKRAIGCTSPNPMVGCVIVKDGDIVGQGFHPKAGQPHAEVFALRDAGELAENATAYVSLEPCNHYGRTPPCTEALIKAKVRRVVIGMVDPNPIVFSSGISRLKDAGIDVTVSVEEELCKKMNEGFIHRMLTGKPFLALRYSMSVNGCLLDKIGQGASDSGGYYSKLLQEYDAIILSSSLSDELSSISSQEAINVSIQPIQIIVASNAQQSHILASSHTVEESGPKVVVFTAKESVAESGISSSGVETVVLEKINLDSILDYCYNRGLCSVLLDLRGNVKDLEVLLRDGFEQKLLQKVIIEVLPEWSTKDERQIASMKWLESKHVKDLQSKQLGGSVLLEGYF

SEQ ID NO: 4794 - DNA, 1495 bp, Arabidopsis thaliana
ctggtagttgaaaactttgtcgtcgtcgtcgtcgtcgtagcacgtgttgcacgtgagaaatttcccgcacaaaatcttactcttttcgtcttcttccccaatctgggattgaatctccagaatccatggatcgtgctttaactccgcgttttgatactccagctactctctcccctttccgataccgatatgggagctctctggccatcactcgacgattcgcgccggcgattgtttgcgcgaaacgatctccgatcgatggagtgagcgacgagctgaatctgattgcttcacagaacttagatcaagctcccgcacgaagactagcccgttccgcttttgttgacttgcagcttcagctggatcactgcttgttcaagaaagctccgagtgggatcagaacagaggagtggtatgagagaaattcgaaaggggaagatattttctgcaagagttggttgccgaaatccggcgacgaaatcaaagctgctgtatgtttctgtcatggctatggaagcacttgcactttcttcttcgatggtatagcaaagcaaatagcaggttttggttatggggtttatgctatagaccatcctggttttggtttatcagatggtttacatggtcacattccaagttttgatgacttagcagacaatgctattgaacagttcaccaaaatgaaagggagatcggaattgagaaatttgccccggtttttgctgggacagtcaatgggaggagcagttgccttaaaaattcatcttaaagaacctcaagcttgggatggtcttatccttgtcgctccaatgtgtaagatttcagaagatgtaaaacctcctccactagtcttgaagacgttaatcttgatgtcgacactatttcccaaagcaaagctctttccaaagagagacttgagcgacttcttcttcagggacctgagtaaaagaaaattgtgtgagtacgatgtgatatgctacgatgatcaaacacgtctcaaaactgctgttgaacttctaaatgcaacaagagacattgagatgcaagttgacaaggtctcgttgccactgttgatacttcatggagacactgataaagtcacagatcccactgtgagtaaattccttcacaaacatgcagtcagccaagacaagactctaaaactctatccaggtggctaccattgcattctagaaggtgatacagacgaaaatattttcactgtaatcaatgacatcgttgcttggctcgatgcccgcgttgatcccaagtaaagtgagatcatctctccacaaacctatacttattattgtcttctgaatactgtcgagtctctgtgattaaacatccggataagaagaaaaaatagatatgtggcttacaatgaatacacaaccttagccgttgtttgcttagctagtgcttctagtgctacatcagccgcatctttcgaagtgtagttagtattgtttgggtgcacataagtcaggctcag

SEQ ID NO: 4795 - protein, 382 aa, Arabidopsis thaliana
MDRALTPRFDTPATLSPFRYRYGSSLAITRRFAPAIVCAKRSPIDGVSDELNLIASQNLDQAPARRLARSAFVDLQLQLDHCLFKKAPSGIRTEEWYERNSKGEDIFCKSWLPKSGDEIKAAVCFCHGYGSTCTFFFDGIAKQIAGFGYGVYAIDHPGFGLSDGLHGHIPSFDDLADNAIEQFTKMKGRSELRNLPRFLLGQSMGGAVALKIHLKEPQAWDGLILVAPMCKISEDVKPPPLVLKTLILMSTLFPKAKLFPKRDLSDFFFRDLSKRKLCEYDVICYDDQTRLKTAVELLNATRDIEMQVDKVSLPLLILHGDTDKVTDPTVSKFLHKHAVSQDKTLKLYPGGYHCILEGDTDENIFTVINDIVAWLDARVDPK

SEQ ID NO: 4796 - protein, 197 aa, Arabidopsis thaliana
MKGRSELRNLPRFLLGQSMGGAVALKIHLKEPQAWDGLILVAPMCKISEDVKPPPLVLKTLILMSTLFPKAKLFPKRDLSDFFFRDLSKRKLCEYDVICYDDQTRLKTAVELLNATRDIEMQVDKVSLPLLILHGDTDKVTDPTVSKFLHKHAVSQDKTLKLYPGGYHCILEGDTDENIFTVINDIVAWLDARVDPK

SEQ ID NO: 4797 - DNA, 1488 bp, Arabidopsis thaliana
gaagaaagcaaagaaatatcgaagaatttaaggaataaaaaataaaaacagaaagctggaggaagaaaaaataaaaattccttctttcctcctgaaggcaaaaaaggaagagaagagaagagaagagaaggaagcagaatctaattttggattataatcggagagagaatctattccgacgaatcttttcgggttgattttttggtctttaatttgaagggtttaggtgtggtttcgaagatgatggtagcgaatagtttcgatctatggcaaaaggatgtttttttctctgcagctgaggaggttcaagaatctgctgatataatggaatctgcgtataggttgtggtttaaagagaagagagacggtcgagtatccgtagaatcagacgagctctgcaaagaactccaagctgctttgagcactgctaaatggcagttggaagagtttgagagggcagtgagcttaagccatggaaattgtcgagatgacactaccttaactaggcataaacagtttgttaccgctattgaaaaccagatttatcaagtggaatctactctgctagagtcgttaagcgagaatgggaaacaacctttgcgttgggtggatcttaacaaagaagagcgtgatgatctcgccatgtttctatctggatcttctcagacgtcagagagtttaaacagtgatagcatcaacttgagagattcctcaacgagttctgtagctgagaatccacgtgggatcaatggcagaagagagggtagatgttatggcgacagtcctgattgtgtgatagacattgacgacataggaagtccggaaagtgcagataaaaaaggcggtacaagaagaacatggagttcaccaaatgtaccaaatatcagtgcgttgaggattaatgtccctgttaatgcaaaagaagaagagagggagaagttcctatcacatattgaagacactcctaaagagaaaggagctaaacctatgttttggctgcagagatgtcgtgattataaccagctctttgacagagtcaaggtttatcaaagacgatttcgcgttccattgagccgccctattaagctcattctttccttaacgctaatcttgattcttctattattcatcttgagaacttaaaaccgcggtttcagaaactctcaagaaacattgacaggttttttcacagattcttgcgtattgggttacacactcgttagatgctacatgattcaacatccttcgagggaaggaggagagattaaaagactttgtcaagattcaaatgaaggacaaagcctgatttattactctctcttaatcctcagggaacatataggaacctgtaaatttgtaagatcaatttgtaaaacttgaagctacgacgtttcgttaaactttagacgtgtacctaaaggaaaccaatgcgtgtttgtgctcaatgatatctccagtgtttgtttgtctctcagatatttgttttgg

SEQ ID NO: 4798 - protein, 300 aa, Arabidopsis thaliana
MMVANSFDLWQKDVFFSAAEEVQESADIMESAYRLWFKEKRDGRVSVESDELCKELQAALSTAKWQLEEFERAVSLSHGNCRDDTTLTRHKQFVTAIENQIYQVESTLLESLSENGKQPLRWVDLNKEERDDLAMFLSGSSQTSESLNSDSINLRDSSTSSVAENPRGINGRREGRCYGDSPDCVIDIDDIGSPESADKKGGTRRTWSSPNVPNISALRINVPVNAKEEEREKFLSHIEDTPKEKGAKPMFWLQRCRDYNQLFDRVKVYQRRFRVPLSRPIKLILSLTLILILLLFILRT

SEQ ID NO: 4799 - protein, 299 aa, Arabidopsis thaliana
MVANSFDLWQKDVFFSAAEEVQESADIMESAYRLWFKEKRDGRVSVESDELCKELQAALSTAKWQLEEFERAVSLSHGNCRDDTTLTRHKQFVTAIENQIYQVESTLLESLSENGKQPLRWVDLNKEERDDLAMFLSGSSQTSESLNSDSINLRDSSTSSVAENPRGINGRREGRCYGDSPDCVIDIDDIGSPESADKKGGTRRTWSSPNVPNISALRINVPVNAKEEEREKFLSHIEDTPKEKGAKPMFWLQRCRDYNQLFDRVKVYQRRFRVPLSRPIKLILSLTLILILLLFILRT

SEQ ID NO: 4800 - protein, 272 aa, Arabidopsis thaliana
MESAYRLWFKEKRDGRVSVESDELCKELQAALSTAKWQLEEFERAVSLSHGNCRDDTTLTRHKQFVTAIENQIYQVESTLLESLSENGKQPLRWVDLNKEERDDLAMFLSGSSQTSESLNSDSINLRDSSTSSVAENPRGINGRREGRCYGDSPDCVIDIDDIGSPESADKKGGTRRTWSSPNVPNISALRINVPVNAKEEEREKFLSHIEDTPKEKGAKPMFWLQRCRDYNQLFDRVKVYQRRFRVPLSRPIKLILSLTLILILLLFILRT

SEQ ID NO: 4801 - DNA, 1392 bp, Arabidopsis thaliana
agaatcaatcagtaaaacgaaaagctaatccaaaactctttaattatttgcaacaactgatcaatggctgtaacaagctcttcttctacttgtgatggtttcttcatcatcagccttattgttatcgtttcttcattgtttgggacatcatctgcgcagttaaacgcaacgttttactcaggcacatgccctaacgcctctgccatcgttcgcagcactattcagcaagctcttcaatccgatgcaagaatcggaggcagcctaatccgccttcattttcacgactgttttgttaatggttgcgatgggtcgctcttgcttgacgacacttcaagcatccagagcgagaagaacgctcctgccaatgcaaactcaactagaggattcaatgttgtcgatagtatcaagacagccctcgagaatgcttgtccgggcattgtttcttgctctgacattttagctcttgcctcagaggcctctgtgtctttggcaggaggaccttcatggactgtgttattaggaagaagagatggtctcaccgcaaacttgtctggagccaattcgtctcttccctctcccttcgaaggccttaacaacatcacatcaaaatttgtagctgtcgggctaaagacaaccgatgtagtatccttgtctggagcgcatacgtttgggcgtggtcaatgcgtaacgttcaacaatagactattcaacttcaacgggacaggaaaccccgacccgactctgaactcaacacttctcagcagtcttcaacagctatgtcctcaaaacggcagcaatacagggatcaccaatctcgatctgagcacacctgatgcgttcgataacaattacttcacgaaccttcagagtaacaatgggcttctccagtcagaccaggaactgttctcaaacaccggttcagccaccgtcccgattgttaattcctttgcaagtaaccagaccctgttttttgaggcgtttgttcagtctatgatcaagatggggaacattagtcccttgactgggagtagtggagagattagacaagactgtaaggtggttaatggacagtcatcagccactgaagcaggggacattcagttacaatctgacggaccagtgagtgtagcagatatgtgaacaacgatgagatcagtttcaccgtttgtttatcatatatgaataataactcctaggccgaatcatttttgtgaaaaaaataagtttggttgaggagaaaataagtgagtggtagggttgtgttttacacttttgaaaattttaatattctaaaacattattatgcctaaatacatgcatgcatgtataacgtctatcgttttgatacattttgtggatttgaatctaaattgtgtcacaacgacaaaattt

SEQ ID NO: 4802 - protein, 358 aa, Arabidopsis thaliana
MAVTSSSSTCDGFFIISLIVIVSSLFGTSSAQLNATFYSGTCPNASAIVRSTIQQALQSDARIGGSLIRLHFHDCFVNGCDGSLLLDDTSSIQSEKNAPANANSTRGFNVVDSIKTALENACPGIVSCSDILALASEASVSLAGGPSWTVLLGRRDGLTANLSGANSSLPSPFEGLNNITSKFVAVGLKTTDVVSLSGAHTFGRGQCVTFNNRLFNFNGTGNPDPTLNSTLLSSLQQLCPQNGSNTGITNLDLSTPDAFDNNYFTNLQSNNGLLQSDQELFSNTGSATVPIVNSFASNQTLFFEAFVQSMIKMGNISPLTGSSGEIRQDCKVVNGQSSATEAGDIQLQSDGPVSVADM

SEQ ID NO: 4803 - DNA, 895 bp, Arabidopsis thaliana
cattgagccgttatataaatccttcactcgctccttgagaagacgaatttgagattgcctctgcaaagagtaaaatggcgaatcctaaagtcttcttcgacatcttgattggtaagatgaaggcagggcgtgttgtaatggagttatttgcagatgtgactccgagaacagctaataatttccgtgctttgtgcactggggagaatggtattgggaaagcagggaaggctttacactacaaaggctcagcctttcaccgtataatcccagggttcatgtgtcaaggtggagatttcactcgtgggaatggaactggaggagaatctatttacgggtctaaatttgaagatgagaacttcaagttgaagcacactggtccagggattttgtctatggctaactctggtcccaacactaatggttctcagttcttcatctgcacagagaagacttcgtggcttgatgggaaacatgttgttttcgggaaagttgttgatggatacaatgtggtcaaggcaatggaggatgttggctctgacatgggaaatccttctgaacgagttgtgattgaagattgtggtgagctcaagaacccaagttcataagttcttaaaacattgggtgggttgatcttgacaggttattctatcatatgctgtgaagcagagacagcatcttagcgttaaggtcaatctagtctgtgatgcactactttggttttgactatatcatatgaaccttaggaagtggtccatccttgtaagttgttttcttaaaactcttgtgtgagaataggatggatgataataatggttagtttctttatgaagacatttggttttgtagctttcttattttggtgtagttaatatgaatgaaccaaactcttcttagg

SEQ ID NO: 4804 - protein, 176 aa, Arabidopsis thaliana
MANPKVFFDILIGKMKAGRVVMELFADVTPRTANNFRALCTGENGIGKAGKALHYKGSAFHRIIPGFMCQGGDFTRGNGTGGESIYGSKFEDENFKLKHTGPGILSMANSGPNTNGSQFFICTEKTSWLDGKHVVFGKVVDGYNVVKAMEDVGSDMGNPSERVVIEDCGELKNPSS

SEQ ID NO: 4805 - protein, 162 aa, Arabidopsis thaliana
MKAGRVVMELFADVTPRTANNFRALCTGENGIGKAGKALHYKGSAFHRIIPGFMCQGGDFTRGNGTGGESIYGSKFEDENFKLKHTGPGILSMANSGPNTNGSQFFICTEKTSWLDGKHVVFGKVVDGYNVVKAMEDVGSDMGNPSERVVIEDCGELKNPSS

SEQ ID NO: 4806 - protein, 155 aa, Arabidopsis thaliana
MELFADVTPRTANNFRALCTGENGIGKAGKALHYKGSAFHRIIPGFMCQGGDFTRGNGTGGESIYGSKFEDENFKLKHTGPGILSMANSGPNTNGSQFFICTEKTSWLDGKHVVFGKVVDGYNVVKAMEDVGSDMGNPSERVVIEDCGELKNPSS

SEQ ID NO: 4807 - DNA, 2289 bp, Arabidopsis thaliana
tcccccgacgggacactagagaagggagggcagagagcgattttgttctctctctacttctcggtcgtcttcttcgtctccactctagggttttactctatcttcttcttcatcatcatcttctacaccaatctctagcgttaatctgtttctgctggagaagatttacgcttgttcctcggttctcttacttctgctccggttcgatcgcttgctaagtgtttcgagttggttcgcacttcggtgggcgatatcatgactgtgaggaacggtggtttcccaggagattataatcgtaacagttttgactctcccggcggctgtgatgatagccccaatgcttccaaggatgatgaaacttttggtgtcccgagaatagttttacccttgtctgacttgtcatcatcagaaaggagaaagtggattcatacgcttcgtcaggagctggaacaactacggtcctttcagaagagtgttggggaccttcttcctatatctaagattgttactagtacacctgcaagtaatgtgtctcgccccaagagttttggaatgtcacgatgctctactggccctggaaaaagggtgctccccttcacagcaaccaaaccagagccagtcaccacttccactatgcttcggatgaagcaatgtgagagcctccttaaacgattgatgtcgcagcagcattgttggctctttaatacccctgtggacgtcgtcaagctcaacattcctgattatttcaccattatcaaacatcctatggatttaggaactgttaaaagcaagttaacttccggcacgtattcaagcccttcagagttttctgctgatgtccgtcttactttccgcaatgctatgacttataacccgtcagataataatgtgtatcgcttcgctgatactctcagcaagttttttgaagtgagatggaaaactatcgagaagaagtcatccggaaccaaatctgaaccaagtaacttggctactcttgctcacaaagatattgcgatacctgagcctgtggctaagaagagaaagatgaatgctgtgaaacgtaacagcctcttagagcctgctaagcgggttatgacagatgaggatagagtaaagcttggcagagatttggggtccttgacagaattccctgtacagataataaatttcctgagagatcacagctccaaggaagagagatctggagatgatgagatagagattgacatcaatgatctcagtcatgatgccttgttccagttgcgggatctctttgatgagtttctgcgagaaaatcaaaagaaagattcaaacggtgaaccctgtgtgttagagcttttacatgggtcagggccaggaaattcattgacgcaacactgtgatgggagtgaattggaggacgaggatgttgacattggtaattatgagcaccctatatctcacatctcaactgtcagaacagaaaaagattccgtcggtggattgaatcagatggaagatgcatccagagggaagctaagtcttattgagggggcagatggtcatcaagatggaaatagtgctccaaaagagaaggaactacctccagaaaagcgttacagggctgctctattgaaaaatcgatttgcggatataatcttgaaggctcaagagataactcttaatcagaatgagaaacgagacccagagacactgcaacgtgagaaggaagaactggaattgcaaaagaagaaagaaaaagcacggttacaagcagaagccaaggaagctgaagaagctcgtagaaaagctgaggcacaagaggctaagaggaaactggaacttgaaagagaagcagcccggcaggcattgcttgagatggagaagtcggttgaaataaatgagaacacaaggtttctcaaggacctagaactgctcaaaacggttaacacggaccagttacgaaatctaagagatgttggctctgagtctgatgggttggctgtatttgggtttggaggaagtaatcctctagagcagctggggctatttatgaaacatgaggaggatgaagatgaatccgacatgcttgcgtttccagatcccggcaatgaagtagaagagggtgaaatcgactgagattcatgagtgttgtgtcttggataacagcagtcaagtgtacatgagttgttgtaaaaaatgatagttagattgatatttaaccaatgcgatggcattttatccgagtaaacaatcaataacactttgtgtagtgagtaaaattttggttaattcaataaaccaatgacc

SEQ ID NO: 4808 - protein, 620 aa, Arabidopsis thaliana
MTVRNGGFPGDYNRNSFDSPGGCDDSPNASKDDETFGVPRIVLPLSDLSSSERRKWIHTLRQELEQLRSFQKSVGDLLPISKIVTSTPASNVSRPKSFGMSRCSTGPGKRVLPFTATKPEPVTTSTMLRMKQCESLLKRLMSQQHCWLFNTPVDVVKLNIPDYFTIIKHPMDLGTVKSKLTSGTYSSPSEFSADVRLTFRNAMTYNPSDNNVYRFADTLSKFFEVRWKTIEKKSSGTKSEPSNLATLAHKDIAIPEPVAKKRKMNAVKRNSLLEPAKRVMTDEDRVKLGRDLGSLTEFPVQIINFLRDHSSKEERSGDDEIEIDINDLSHDALFQLRDLFDEFLRENQKKDSNGEPCVLELLHGSGPGNSLTQHCDGSELEDEDVDIGNYEHPISHISTVRTEKDSVGGLNQMEDASRGKLSLIEGADGHQDGNSAPKEKELPPEKRYRAALLKNRFADIILKAQEITLNQNEKRDPETLQREKEELELQKKKEKARLQAEAKEAEEARRKAEAQEAKRKLELEREAARQALLEMEKSVEINENTRFLKDLELLKTVNTDQLRNLRDVGSESDGLAVFGFGGSNPLEQLGLFMKHEEDEDESDMLAFPDPGNEVEEGEID

SEQ ID NO: 4809 - protein, 521 aa, Arabidopsis thaliana
MSRCSTGPGKRVLPFTATKPEPVTTSTMLRMKQCESLLKRLMSQQHCWLFNTPVDVVKLNIPDYFTIIKHPMDLGTVKSKLTSGTYSSPSEFSADVRLTFRNAMTYNPSDNNVYRFADTLSKFFEVRWKTIEKKSSGTKSEPSNLATLAHKDIAIPEPVAKKRKMNAVKRNSLLEPAKRVMTDEDRVKLGRDLGSLTEFPVQIINFLRDHSSKEERSGDDEIEIDINDLSHDALFQLRDLFDEFLRENQKKDSNGEPCVLELLHGSGPGNSLTQHCDGSELEDEDVDIGNYEHPISHISTVRTEKDSVGGLNQMEDASRGKLSLIEGADGHQDGNSAPKEKELPPEKRYRAALLKNRFADIILKAQEITLNQNEKRDPETLQREKEELELQKKKEKARLQAEAKEAEEARRKAEAQEAKRKLELEREAARQALLEMEKSVEINENTRFLKDLELLKTVNTDQLRNLRDVGSESDGLAVFGFGGSNPLEQLGLFMKHEEDEDESDMLAFPDPGNEVEEGEID

SEQ ID NO: 4810 - protein, 494 aa, Arabidopsis thaliana
MLRMKQCESLLKRLMSQQHCWLFNTPVDVVKLNIPDYFTIIKHPMDLGTVKSKLTSGTYSSPSEFSADVRLTFRNAMTYNPSDNNVYRFADTLSKFFEVRWKTIEKKSSGTKSEPSNLATLAHKDIAIPEPVAKKRKMNAVKRNSLLEPAKRVMTDEDRVKLGRDLGSLTEFPVQIINFLRDHSSKEERSGDDEIEIDINDLSHDALFQLRDLFDEFLRENQKKDSNGEPCVLELLHGSGPGNSLTQHCDGSELEDEDVDIGNYEHPISHISTVRTEKDSVGGLNQMEDASRGKLSLIEGADGHQDGNSAPKEKELPPEKRYRAALLKNRFADIILKAQEITLNQNEKRDPETLQREKEELELQKKKEKARLQAEAKEAEEARRKAEAQEAKRKLELEREAARQALLEMEKSVEINENTRFLKDLELLKTVNTDQLRNLRDVGSESDGLAVFGFGGSNPLEQLGLFMKHEEDEDESDMLAFPDPGNEVEEGEID

SEQ ID NO: 4811 - DNA, 1931 bp, Arabidopsis thaliana
cttcttaaactcgtttttaactctccatctctaaaaagaccatcaacgctcttctctttattgcagcagaaacagaacccagttcaataaagctttttggtaagaaaatttgaaaggaaaagatatttgaaaactcgtagagagaaagtggcacagaatctgaaattctgacactttttaccacgaataatgattctcttttgaaaaacatgactcaatgttttctttatctttttctctgaattgaggtttgtttgtacttaaagtatgctcctttatctaccgttgactgattctactcttttattctcaacttttctctgatttgctcgtgtgtttacttcaattcctcagttcttgtgtagaaagttgagtttcatgtgatcaaaattggggctttactacttttaagagaatgagtgacaaagacgagtttgccgcaaagaagaaggatttggtcaatacgccagtggatttgtatcctccggagaatccaatgttgggtccttctccgatgatggattcattcagagaaactctttggcatgatggtggtttcaatgtccacacagatgcagacacttcctttagaggtaataataatattgatatacctcttgaaatgggttggaatatggctcagttccctgcagattcaggattcattgagcgtgctgcaaagttttctttttttggatgtggtgaaatgatgatgaaccaacaacaatcatctcttggagttccagattcaactggcttgtttcttcaagatacacagattcctagtggatccaaactagataatggtcctcttactgatgcatctaagttagtgaaagagagatcgattaataatgtatcagaggattctcaatctagtggaggtaatggtcatgatgatgctaagtgtgggcaaacatcttccaaggggtttagtagtaagaagaggaaaagaattgggaaggattgtgaagaagaagaagataaaaagcaaaaggatgagcaaagtccaacttcaaatgcgaacaagacaaacagtgagaagcaaccttctgattctttaaaggatgggtatattcacatgagggcacgaagaggccaggctactaatagtcacagtcttgctgaaagagtaagaagagaaaaaatcagtgaaaggatgaagttcttgcaagatcttgtgccaggttgcgacaaggtgactggtaaggcagttatgctcgatgaaatcattaactatgtgcaatcacttcaatgccaaatcgagtttttatcgatgaaactttcggctgtgaatcctgtgctcgattttaacctcgaaagcctccttgcaaaagatgctcttcaatcatctgcaccgacatttccccacaacatgtcgatgctttatcctcctgtatcgtatctctctcaaacaggattcatgcaaccgaacatttcctcaatgtcgctattgagtggaggattaaaacggcaggaaacacatggatatgaaagtgatcaccacaatcttgtccacatgaaccatgaaaccggcactgcacctgatcatgaagatacaacagctgacatgaaggtggagccgtagatgtttcttcttcactttgtactcagctttagctgctgatatagtgcgccgcggtcgagaattttattaacttcgaacagaagagtgaaaacgaaacagaggaggaagcagattttgtctttgaaatattgacagctcccggagaaagagtcgagagtaagaatcaacaatgttgtgtaatgaatagctactgtctgcttcttttgtagctattgtctgcttcttttttgtacatataaatccatgcaagggaagaggaatgttaattcaacacatgtgcacaacatgatcatcacatatgtacttcaacttgatcaatcggaattagctctacttggcaacc

SEQ ID NO: 4812 - protein, 390 aa, Arabidopsis thaliana
MSDKDEFAAKKKDLVNTPVDLYPPENPMLGPSPMMDSFRETLWHDGGFNVHTDADTSFRGNNNIDIPLEMGWNMAQFPADSGFIERAAKFSFFGCGEMMMNQQQSSLGVPDSTGLFLQDTQIPSGSKLDNGPLTDASKLVKERSINNVSEDSQSSGGNGHDDAKCGQTSSKGFSSKKRKRIGKDCEEEEDKKQKDEQSPTSNANKTNSEKQPSDSLKDGYIHMRARRGQATNSHSLAERVRREKISERMKFLQDLVPGCDKVTGKAVMLDEIINYVQSLQCQIEFLSMKLSAVNPVLDFNLESLLAKDALQSSAPTFPHNMSMLYPPVSYLSQTGFMQPNISSMSLLSGGLKRQETHGYESDHHNLVHMNHETGTAPDHEDTTADMKVEP

SEQ ID NO: 4813 - protein, 363 aa, Arabidopsis thaliana
MLGPSPMMDSFRETLWHDGGFNVHTDADTSFRGNNNIDIPLEMGWNMAQFPADSGFIERAAKFSFFGCGEMMMNQQQSSLGVPDSTGLFLQDTQIPSGSKLDNGPLTDASKLVKERSINNVSEDSQSSGGNGHDDAKCGQTSSKGFSSKKRKRIGKDCEEEEDKKQKDEQSPTSNANKTNSEKQPSDSLKDGYIHMRARRGQATNSHSLAERVRREKISERMKFLQDLVPGCDKVTGKAVMLDEIINYVQSLQCQIEFLSMKLSAVNPVLDFNLESLLAKDALQSSAPTFPHNMSMLYPPVSYLSQTGFMQPNISSMSLLSGGLKRQETHGYESDHHNLVHMNHETGTAPDHEDTTADMKVEP

SEQ ID NO: 4814 - protein, 357 aa, Arabidopsis thaliana
MMDSFRETLWHDGGFNVHTDADTSFRGNNNIDIPLEMGWNMAQFPADSGFIERAAKFSFFGCGEMMMNQQQSSLGVPDSTGLFLQDTQIPSGSKLDNGPLTDASKLVKERSINNVSEDSQSSGGNGHDDAKCGQTSSKGFSSKKRKRIGKDCEEEEDKKQKDEQSPTSNANKTNSEKQPSDSLKDGYIHMRARRGQATNSHSLAERVRREKISERMKFLQDLVPGCDKVTGKAVMLDEIINYVQSLQCQIEFLSMKLSAVNPVLDFNLESLLAKDALQSSAPTFPHNMSMLYPPVSYLSQTGFMQPNISSMSLLSGGLKRQETHGYESDHHNLVHMNHETGTAPDHEDTTADMKVEP

SEQ ID NO: 4815 - DNA, 1349 bp, Arabidopsis thaliana
acaccaacacacaaagattccattacaaataaacaattttcatatatatctataacaaaaaaaaacaatggctacctcaagcatgaagagcattccaatggcgatcccaagtttctccatgtgtcacaagctcgagctccttaaagaaggcaaaactcgcgacgtcccgaaagccgaagaagatgaagggctaagctgcgagttccaagagatgttggattctcttcctaaggagagaggatggagaactcgttacctttacctattccaagggttttggtgccaagccaaagagattcaagccatcatgtctttccaaaaacatttccaatccctcgaaaacgacgtcgttctcgccaccatacctaaatccggtacaacctggctaaaagctttaactttcaccatccttaaccgtcaccggtttgatccggttgcctcgagtaccaaccaccctcttttcacttccaaccctcatgaccttgtacctttcttcgagtacaagctttacgccaacggagatgttcccgatctctcgggtctagccagtccaagaacgttcgcaacccacttaccgttcggttccctaaaggaaacgatcgagaaacccggtgtgaaggtcgtgtacttgtgccggaacccgtttgacacattcatctcttcgtggcattacaccaacaacatcaaatccgagtcagtgagcccagtcttgctagaccaagcttttgatctgtattgccggggagtgatcgggtttggcccgttttgggaacacatgttgggatactggagagagagcttgaagagaccagagaaagtcttctttttaaggtacgaggatctcaaagacgacatcgagaccaacttgaagaggcttgcaactttcttagagcttcctttcaccgaagaagaggaacgaaagggagttgtgaaggctatcgccgagctgtgtagcttcgagaatctgaagaagttggaggtgaacaagtcaaacaagtcgatcaagaactttgagaatcgattcttgtttcggaaaggagaagtgagtgattgggttaactatttgtcaccttcacaagtggaaagattgtcagccttagtggatgacaagttaggtggatctggtctcactttcaggttgagctaaatataaggccacgtgcccccatttctactcttgttctgagggcctactatatacgttaagctaagttaaggcagttgtattgttgttacagatagacatcgaagcaacgtaacgtccataattaagttaatttgtcgtttttatttttgtcaacaccgaagtttgtcgaatttttattttattaaatatcgcttgtttttgc

SEQ ID NO: 4816 - protein, 359 aa, Arabidopsis thaliana
MATSSMKSIPMAIPSFSMCHKLELLKEGKTRDVPKAEEDEGLSCEFQEMLDSLPKERGWRTRYLYLFQGFWCQAKEIQAIMSFQKHFQSLENDVVLATIPKSGTTWLKALTFTILNRHRFDPVASSTNHPLFTSNPHDLVPFFEYKLYANGDVPDLSGLASPRTFATHLPFGSLKETIEKPGVKVVYLCRNPFDTFISSWHYTNNIKSESVSPVLLDQAFDLYCRGVIGFGPFWEHMLGYWRESLKRPEKVFFLRYEDLKDDIETNLKRLATFLELPFTEEEERKGVVKAIAELCSFENLKKLEVNKSNKSIKNFENRFLFRKGEVSDWVNYLSPSQVERLSALVDDKLGGSGLTFRLS

SEQ ID NO: 4817 - protein, 354 aa, Arabidopsis thaliana
MKSIPMAIPSFSMCHKLELLKEGKTRDVPKAEEDEGLSCEFQEMLDSLPKERGWRTRYLYLFQGFWCQAKEIQAIMSFQKHFQSLENDVVLATIPKSGTTWLKALTFTILNRHRFDPVASSTNHPLFTSNPHDLVPFFEYKLYANGDVPDLSGLASPRTFATHLPFGSLKETIEKPGVKVVYLCRNPFDTFISSWHYTNNIKSESVSPVLLDQAFDLYCRGVIGFGPFWEHMLGYWRESLKRPEKVFFLRYEDLKDDIETNLKRLATFLELPFTEEEERKGVVKAIAELCSFENLKKLEVNKSNKSIKNFENRFLFRKGEVSDWVNYLSPSQVERLSALVDDKLGGSGLTFRLS

SEQ ID NO: 4818 - protein, 349 aa, Arabidopsis thaliana
MAIPSFSMCHKLELLKEGKTRDVPKAEEDEGLSCEFQEMLDSLPKERGWRTRYLYLFQGFWCQAKEIQAIMSFQKHFQSLENDVVLATIPKSGTTWLKALTFTILNRHRFDPVASSTNHPLFTSNPHDLVPFFEYKLYANGDVPDLSGLASPRTFATHLPFGSLKETIEKPGVKVVYLCRNPFDTFISSWHYTNNIKSESVSPVLLDQAFDLYCRGVIGFGPFWEHMLGYWRESLKRPEKVFFLRYEDLKDDIETNLKRLATFLELPFTEEEERKGVVKAIAELCSFENLKKLEVNKSNKSIKNFENRFLFRKGEVSDWVNYLSPSQVERLSALVDDKLGGSGLTFRLS

SEQ ID NO: 4819 - DNA, 1840 bp, Arabidopsis thaliana
gtagctactgtgtcacgcttttctctagcgaatactttgatgcttcttcatgactctttaacaagattattctgagcttttcctctggccttctaattattaaagtcttcctttttatctattgttaagtgatggctactgaagagaagcctcttaattctcttgatttaagccatgatgattcttcccctgcttcaaatcaggctgaaggatcatctgctataactgaagacacttctgcgaatgttcaacaatggaggcgaaagaatctctctttacagataccctctagagcagctggtctctctcctgaagattcggttgttatcaaaatgcctccaacgcctagtccaactccaagaagagtcaactttgctttgacttcgagttctccaggtcctactcctacttcttcttctgttcttcctcgtggcaaatcgtccctgaagaatctattgccaaaagctgggtgtaaaccaaaaacctctaacactgatatcgagaagggacaagggaatgcctgttctcctcctgcatcgcaggagaaggcttcgatatcgaggtcattatcactttcaaagctatttacacctaggatcaagagaacttcgtccctacctgtgactcctgttattctttcaaactcagagtcagctcacggaggaaccagtgttgctcctcaaactccaaacagaaaagggagtgtacacatagctcgctctcgctctgtgccccttaacgacaaggaattaagcctgaagggaatggattcatttttcagagtaattccttcgactcctcgtgttaaggaaggagacgttttctcaaatgcatcagaggctggtaatactgaaacaggtgatgctgatggagaagacatacctgaggatgaagcagtttgtaggatttgtttggtagagctctgtgaaggaggagaaaccttaaaaatggagtgtagttgcaaaggcgaacttgctcttgcccacaaagattgtgctcttaaatggttcaccataaagggtaacaagacttgtgaggtgtgtaaacaagaagttaagaacttacctgtaacactcttacgcatccaaagccttcgaaattctggtgttcctcagctagatgtctctggctatagggtgtggcaggaggtaccggttctagtaatcatcagcatgctcgcttacttctgcttcctcgagcagctcctggttgagaatatgggtacaggtgccatcgctatatcactgccgttttcttgtattcttggtcttcttgcatccatgaccgcatcaaccatggtaatgagaagatttgtctggatttacgcatctgtccagtttgcgttggtcgttctcttcgcccatatattttactctgtggtgaagttgcaaccagttctgtcagttcttctgtcaacatttgctggatttggtgtatgcatatgcggaagttcagtgatggttgagtttgtgagatggagacgaagatggcgagccagaaggctagagcaacagctgaaccatgctttgactctgtcacaaccgccgcaaccactggatccaacaacctctctgcatcattcaaatacctcatagagagccaagaagtggacagatgattttacatttatacagtgtagtttggttaatgtttatgtaatgatttgtataaaagaaaaagagaaagtgatccaaggaatgcttaaagattgttccttttgtttgttttacatacacatttgtattgttgtaagtttgtaactttgatttgctcaatctctgcaaatgaaatgtttgtagcagtattggtttctctgtataataaaaagatttaaaattgt

SEQ ID NO: 4820 - protein, 487 aa, Arabidopsis thaliana
MATEEKPLNSLDLSHDDSSPASNQAEGSSAITEDTSANVQQWRRKNLSLQIPSRAAGLSPEDSVVIKMPPTPSPTPRRVNFALTSSSPGPTPTSSSVLPRGKSSLKNLLPKAGCKPKTSNTDIEKGQGNACSPPASQEKASISRSLSLSKLFTPRIKRTSSLPVTPVILSNSESAHGGTSVAPQTPNRKGSVHIARSRSVPLNDKELSLKGMDSFFRVIPSTPRVKEGDVFSNASEAGNTETGDADGEDIPEDEAVCRICLVELCEGGETLKMECSCKGELALAHKDCALKWFTIKGNKTCEVCKQEVKNLPVTLLRIQSLRNSGVPQLDVSGYRVWQEVPVLVIISMLAYFCFLEQLLVENMGTGAIAISLPFSCILGLLASMTASTMVMRRFVWIYASVQFALVVLFAHIFYSVVKLQPVLSVLLSTFAGFGVCICGSSVMVEFVRWRRRWRARRLEQQLNHALTLSQPPQPLDPTTSLHHSNTS

SEQ ID NO: 4821 - protein, 420 aa, Arabidopsis thaliana
MPPTPSPTPRRVNFALTSSSPGPTPTSSSVLPRGKSSLKNLLPKAGCKPKTSNTDIEKGQGNACSPPASQEKASISRSLSLSKLFTPRIKRTSSLPVTPVILSNSESAHGGTSVAPQTPNRKGSVHIARSRSVPLNDKELSLKGMDSFFRVIPSTPRVKEGDVFSNASEAGNTETGDADGEDIPEDEAVCRICLVELCEGGETLKMECSCKGELALAHKDCALKWFTIKGNKTCEVCKQEVKNLPVTLLRIQSLRNSGVPQLDVSGYRVWQEVPVLVIISMLAYFCFLEQLLVENMGTGAIAISLPFSCILGLLASMTASTMVMRRFVWIYASVQFALVVLFAHIFYSVVKLQPVLSVLLSTFAGFGVCICGSSVMVEFVRWRRRWRARRLEQQLNHALTLSQPPQPLDPTTSLHHSNTS

SEQ ID NO: 4822 - protein, 276 aa, Arabidopsis thaliana
MDSFFRVIPSTPRVKEGDVFSNASEAGNTETGDADGEDIPEDEAVCRICLVELCEGGETLKMECSCKGELALAHKDCALKWFTIKGNKTCEVCKQEVKNLPVTLLRIQSLRNSGVPQLDVSGYRVWQEVPVLVIISMLAYFCFLEQLLVENMGTGAIAISLPFSCILGLLASMTASTMVMRRFVWIYASVQFALVVLFAHIFYSVVKLQPVLSVLLSTFAGFGVCICGSSVMVEFVRWRRRWRARRLEQQLNHALTLSQPPQPLDPTTSLHHSNTS

SEQ ID NO: 4823 - DNA, 1276 bp, Arabidopsis thaliana
acttatacctcactgacttactacaaatcagatatgtggaagattgggcagagaggagttccctatttccagagactcattgctgcgccgttcacgaccttgcggtccttgccaacttctttggtcgagacagggcagaaccgtgtcattgatgcttcgttaactctcatccgtgaaagggcaaaactcaaaggagagttagtgcgactcataggaggagcaaaagctacaacagctcttcttggagtaccacttggtcacaactcttcttttcttgaaggcccagccttggctcctcctcatgtaagggaagctatttggtgtggtagtacaaactccaccactgaagaagggaaggagctaaaagatccacgtgttctaagtgatgttggtgatattccggtacaagagattagagaaatgggggttgatgatgatagacttatgaaagtagtaagtgaatctgtgaagctggtgatggaagaggaaccattgcgcccgctggtcataggtggagaccattccatatcttatcctgttgtgagagctgtttcggagaaacttggaggacccgtggatattcttcatcttgatgcacatcccgatatatatgaccgttttgaaggcaattattactctcatgcatcttcttttgctcgtatcatggaaggtggctatgcgcggcggcttttacaggttgggatcagatccataaacaaagaaggacgggaacaaggcaagaggtttggagtagaacagtatgagatgcgaaccttctcaaaagatcgccaaatgttggaaaacttgaaactaggggaaggagtgaagggcgtgtatatctcgatcgatgttgactgtctcgatccgggattcgcgcacggagtgtcccacttcgaaccaggaggtctttctttccgagacgtccttaacatattacacaaccttcagggagatttggtgggggctgatgttgttgagtacaatccacagcgtgataccgctgatgacatgacggcaatggtcgcggctaagtttgttagagagctagccgcaaaaatgtcaaaatgaatttaaatggtactttggagtttaatcgttgaagcttgtaatatgcaataagtgtggtctcatagacatggtatcgaataagcttaatatcaattgggtttttaggcccaaatatcaatgtataatttattaaattatgataagatgcattgtaataagttgtaaaaataatttatcatattgcaatatatgtaaacattaatttagc

SEQ ID NO: 4824 - protein, 355 aa, Arabidopsis thaliana
TYTSLTYYKSDMWKIGQRGVPYFQRLIAAPFTTLRSLPTSLVETGQNRVIDASLTLIRERAKLKGELVRLIGGAKATTALLGVPLGHNSSFLEGPALAPPHVREAIWCGSTNSTTEEGKELKDPRVLSDVGDIPVQEIREMGVDDDRLMKVVSESVKLVMEEEPLRPLVIGGDHSISYPVVRAVSEKLGGPVDILHLDAHPDIYDRFEGNYYSHASSFARIMEGGYARRLLQVGIRSINKEGREQGKRFGVEQYEMRTFSKDRQMLENLKLGEGVKGVYISIDVDCLDPGFAHGVSHFEPGGLSFRDVLNILHNLQGDLVGADVVEYNPQRDTADDMTAMVAAKFVRELAAKMSK

SEQ ID NO: 4825 - protein, 344 aa, Arabidopsis thaliana
MWKIGQRGVPYFQRLIAAPFTTLRSLPTSLVETGQNRVIDASLTLIRERAKLKGELVRLIGGAKATTALLGVPLGHNSSFLEGPALAPPHVREAIWCGSTNSTTEEGKELKDPRVLSDVGDIPVQEIREMGVDDDRLMKVVSESVKLVMEEEPLRPLVIGGDHSISYPVVRAVSEKLGGPVDILHLDAHPDIYDRFEGNYYSHASSFARIMEGGYARRLLQVGIRSINKEGREQGKRFGVEQYEMRTFSKDRQMLENLKLGEGVKGVYISIDVDCLDPGFAHGVSHFEPGGLSFRDVLNILHNLQGDLVGADVVEYNPQRDTADDMTAMVAAKFVRELAAKMSK

SEQ ID NO: 4826 - protein, 215 aa, Arabidopsis thaliana
MGVDDDRLMKVVSESVKLVMEEEPLRPLVIGGDHSISYPVVRAVSEKLGGPVDILHLDAHPDIYDRFEGNYYSHASSFARIMEGGYARRLLQVGIRSINKEGREQGKRFGVEQYEMRTFSKDRQMLENLKLGEGVKGVYISIDVDCLDPGFAHGVSHFEPGGLSFRDVLNILHNLQGDLVGADVVEYNPQRDTADDMTAMVAAKFVRELAAKMSK

SEQ ID NO: 4827 - DNA, 2279 bp, Arabidopsis thaliana
atggaaaacatcaaaaaccctaaaaacgcagatgattgttccgatagcatatcaaaaaacagtcatcaaggcgttgatgattccctgaaccagtcaagatcttacgtatgcagtttctgcataaggggcttctcgaatgctcaagcactaggagggcatatgaacatccacagaagagacagggctaaactcagacaaaagcttatggaagataataaggatgatgtcgtcgccgagagtgatgcatccgaagttgtgtctctagaccttaatgaacaacaacaacaacaaggagaagctttgacatgtgatgatcacgatcaatatgttgataacgatataagtcctaaacagaaattagagttttgggttcaagaaagcaagcttgatactaatgatcatggaaaggtcacggaggctagcatagatggttcgagttcgagtcatcatcgtgatattgaagtattggatctcgagcttcgtgacaacgaagaccagcaggtccagcacacgatcctaaatcctgtgagcatcgtctccatcgctggtcttccattattgacgaatctctttgcctttttttcttccttcttaaacaaacccaattcgatttcaacgaacgcctcttctctctcactctctttcgatttgttctttgccggagctcgtagtgtaagcgtgatccgcggcggagagatggctcctaatgatcctaaaaaagccgttggtggcggcggaagtggtttcttcgcctctcttgcttcgtcgatctccaatttgggatctgctatgaccaaatcagttaatggtttggttccctatgagggacttgaagttatcaatcctgaaggaagtacagatgatgctgaggaggaagcaagcagaggaagatggaagcaagaggatcgagatggctattggaagatgatgcagaagtacataggatctgatgttacatcaatggtgacccttcctgtgattatttttgaaccaatgacaatgcttcagaaaatggcggagttgatggaatactcgcatctgctagacatggcagacaaaaccgaggacccttatttgcgcatggtgtatgcatcatcgtgggctatatccgtgtattatgctttccaacgtacctggaaaccattcaatccaatccttggtgagacttatgagatggctaattacaatggtgttaacttcatatctgaacaggtcagccatcacccaccaatgagtgctggtcatgctgaaaatgagcattttacgtatgattgtacttcaaaactgaaaacaaaatttttgggcaattccattgacgtttacccagtaggaaggacacgggtgacacttaaaagagatggagttgttcttgacttggtacctcctctgaccaaagttcacaacctaatctttggacgaacttgggtcgattcgcctggggaaatgatcatgacaaatcagaccaccggtgacaaagtcgtgctttactttcaaccatgtggctggttcggatctggtcgatatgaagtggatggatatgtctataacgcctctgaggagcctaagatactcatgactggcaaatggaacgagtccatgagttatcagccgtgtgatggtgaaggtgaacctctcccaggcaccgaactgaaagaggtatggaaactcgctgatgtgccaaaggatgacaaatatcaatacactcactttgctcacaagattaatagcttcgacactgccccgaaaaagctgttgccctctgattcacggttacgacctgatagatacgcacttgagatgggcgacatgtccaaatcaggctatgagaagagcagcatggaagagagacagagagctgaaaagagaacccgcgaagagaaaggccaagcctttactccaaaatggttcgatgtaacggaagaagtcactgctacaccatggggtgatctggaagtttaccaattcaatggaaagtactcggaacatcgtgcagctgcggataactctgaagataacaccgaccctaagtcgatccaattcaacccatggcaattccaagatctgtctacttaaatgtatcgctccaaaagacagaaaagatcaaatctttttggaaacaaatgtattcttattctctcgtagttacaaaaaactttgttctacatctgctagctttcccattgctttctctagtattagtgtacaacttctactgttttgtcttaaattcattcaaatctttctttgatcttcgtcgtcatagttatcttcttcttctt

SEQ ID NO: 4828 - protein, 690 aa, Arabidopsis thaliana
MENIKNPKNADDCSDSISKNSHQGVDDSLNQSRSYVCSFCIRGFSNAQALGGHMNIHRRDRAKLRQKLMEDNKDDVVAESDASEVVSLDLNEQQQQQGEALTCDDHDQYVDNDISPKQKLEFWVQESKLDTNDHGKVTEASIDGSSSSHHRDIEVLDLELRDNEDQQVQHTILNPVSIVSIAGLPLLTNLFAFFSSFLNKPNSISTNASSLSLSFDLFFAGARSVSVIRGGEMAPNDPKKAVGGGGSGFFASLASSISNLGSAMTKSVNGLVPYEGLEVINPEGSTDDAEEEASRGRWKQEDRDGYWKMMQKYIGSDVTSMVTLPVIIFEPMTMLQKMAELMEYSHLLDMADKTEDPYLRMVYASSWAISVYYAFQRTWKPFNPILGETYEMANYNGVNFISEQVSHHPPMSAGHAENEHFTYDCTSKLKTKFLGNSIDVYPVGRTRVTLKRDGVVLDLVPPLTKVHNLIFGRTWVDSPGEMIMTNQTTGDKVVLYFQPCGWFGSGRYEVDGYVYNASEEPKILMTGKWNESMSYQPCDGEGEPLPGTELKEVWKLADVPKDDKYQYTHFAHKINSFDTAPKKLLPSDSRLRPDRYALEMGDMSKSGYEKSSMEERQRAEKRTREEKGQAFTPKWFDVTEEVTATPWGDLEVYQFNGKYSEHRAAADNSEDNTDPKSIQFNPWQFQDLST

SEQ ID NO: 4829 - protein, 637 aa, Arabidopsis thaliana
MNIHRRDRAKLRQKLMEDNKDDVVAESDASEVVSLDLNEQQQQQGEALTCDDHDQYVDNDISPKQKLEFWVQESKLDTNDHGKVTEASIDGSSSSHHRDIEVLDLELRDNEDQQVQHTILNPVSIVSIAGLPLLTNLFAFFSSFLNKPNSISTNASSLSLSFDLFFAGARSVSVIRGGEMAPNDPKKAVGGGGSGFFASLASSISNLGSAMTKSVNGLVPYEGLEVINPEGSTDDAEEEASRGRWKQEDRDGYWKMMQKYIGSDVTSMVTLPVIIFEPMTMLQKMAELMEYSHLLDMADKTEDPYLRMVYASSWAISVYYAFQRTWKPFNPILGETYEMANYNGVNFISEQVSHHPPMSAGHAENEHFTYDCTSKLKTKFLGNSIDVYPVGRTRVTLKRDGVVLDLVPPLTKVHNLIFGRTWVDSPGEMIMTNQTTGDKVVLYFQPCGWFGSGRYEVDGYVYNASEEPKILMTGKWNESMSYQPCDGEGEPLPGTELKEVWKLADVPKDDKYQYTHFAHKINSFDTAPKKLLPSDSRLRPDRYALEMGDMSKSGYEKSSMEERQRAEKRTREEKGQAFTPKWFDVTEEVTATPWGDLEVYQFNGKYSEHRAAADNSEDNTDPKSIQFNPWQFQDLST

SEQ ID NO: 4830 - protein, 622 aa, Arabidopsis thaliana
MEDNKDDVVAESDASEVVSLDLNEQQQQQGEALTCDDHDQYVDNDISPKQKLEFWVQESKLDTNDHGKVTEASIDGSSSSHHRDIEVLDLELRDNEDQQVQHTILNPVSIVSIAGLPLLTNLFAFFSSFLNKPNSISTNASSLSLSFDLFFAGARSVSVIRGGEMAPNDPKKAVGGGGSGFFASLASSISNLGSAMTKSVNGLVPYEGLEVINPEGSTDDAEEEASRGRWKQEDRDGYWKMMQKYIGSDVTSMVTLPVIIFEPMTMLQKMAELMEYSHLLDMADKTEDPYLRMVYASSWAISVYYAFQRTWKPFNPILGETYEMANYNGVNFISEQVSHHPPMSAGHAENEHFTYDCTSKLKTKFLGNSIDVYPVGRTRVTLKRDGVVLDLVPPLTKVHNLIFGRTWVDSPGEMIMTNQTTGDKVVLYFQPCGWFGSGRYEVDGYVYNASEEPKILMTGKWNESMSYQPCDGEGEPLPGTELKEVWKLADVPKDDKYQYTHFAHKINSFDTAPKKLLPSDSRLRPDRYALEMGDMSKSGYEKSSMEERQRAEKRTREEKGQAFTPKWFDVTEEVTATPWGDLEVYQFNGKYSEHRAAADNSEDNTDPKSIQFNPWQFQDLST

SEQ ID NO: 4831 - DNA, 806 bp, Arabidopsis thaliana
agaaagatcactccgtcaatctttccaccactgtgactaaatctaaacaatttcatggcgagtctctgtctctcatcgtcccggatcgtttctcttcaccaccagaaaccattcctctctcttaaactccggtctcgtccttcagatctctccggtctaggtcgccacacgagtcctgtttgcttcaatccgcttaggttatcgggtgatcgtcagcgaaccgctacggtatcaacgagggtggagaagcggcgaaagagaggatcgagtgtggtctgttatgctgctccgatttctgccaatagtctacaatggatctccaccatttcttgccttgcattgatgcttgcaaggggtactggtatacataagtcagttgttgttccactattcgctctccacgcaccatcgagcatcgtcgcctggattaagggagagtatggtgtatgggcagcattcttggcgcttattgctcgacttttcttcacttttccaggtgaacttgagcttccattcatcgcattactcttggtgattgtggcgccatatcaagtcatgaacataagagggaagcaagaaggggcaatcatagcaatagcaatatctggttttctggctttccaacatttctcacgagcagggagcttggagaaagcatatgagaagggttcagttcttgccactgtagccattattggtgtcacagttgtatcgctccttttgttgctataactatatgctcctgaccaaaaatgttaatcagtgtaagaatgtgtgtgaaggaaaaaaaagaaagatgtgcttgc

SEQ ID NO: 4832 - protein, 225 aa, Arabidopsis thaliana
MASLCLSSSRIVSLHHQKPFLSLKLRSRPSDLSGLGRHTSPVCFNPLRLSGDRQRTATVSTRVEKRRKRGSSVVCYAAPISANSLQWISTISCLALMLARGTGIHKSVVVPLFALHAPSSIVAWIKGEYGVWAAFLALIARLFFTFPGELELPFIALLLVIVAPYQVMNIRGKQEGAIIAIAISGFLAFQHFSRAGSLEKAYEKGSVLATVAIIGVTVVSLLLLL

SEQ ID NO: 4833 - protein, 129 aa, Arabidopsis thaliana
MLARGTGIHKSVVVPLFALHAPSSIVAWIKGEYGVWAAFLALIARLFFTFPGELELPFIALLLVIVAPYQVMNIRGKQEGAIIAIAISGFLAFQHFSRAGSLEKAYEKGSVLATVAIIGVTVVSLLLLL

SEQ ID NO: 4834 - DNA, 906 bp, Arabidopsis thaliana
aatttgcgccaaaagaaaaatggatatgtcgcttgcgttatcgacggcaccaatgagtaggacgattatctctgccacgaggcggtcccaagtttcacaacctaaagctaagaaagtcaagccggcgaataagcggccaacgatgtcgacaagcggtttctccggcggaacgacaaaggagttgacttggaagtgcgtagaaggttgtggagcttgctgtaagattgcaaaggacttttcctttgcaacacctgacgaaatcttcgacaaccctgatgatgttgagctgtatcgaagcatgatcggagatgatggatggtgtctaaactacgacaaagctacacgcaaatgctctatttatgctgatcgtccatatttttgtcgggttgagccagaggttttcaagtcactctacgggattgaagaaaagaaattcaacaaggaagctgtcagctgctgcattgacacaattaagacgatatacggccctgattccaaagaattggatagcttcaaccgtgccatcagaagtaatccgagctcgagttgattagtcagataaactcaaaggaaggaaacagaaataaggaaattagttattactcaccggagtggaacttggcgcaaccgtggcagacaaaagtagcattaatctccttttctttaaaatgcatataaacttggctagcagagaaatcagtgggacaaacttcccatacatcgaactctttgtctgaaacgaggctgccttgctcatagattccgcatcgtttacacttttcgccaccaattccagtcataggctgtaacaggcaatagagtgaagaacatatatgtatttatccatgttattaatagattgtagtaatgaacggatgtaaaagagatttgggactagcctgccat

SEQ ID NO: 4835 - protein, 182 aa, Arabidopsis thaliana
ICAKRKMDMSLALSTAPMSRTIISATRRSQVSQPKAKKVKPANKRPTMSTSGFSGGTTKELTWKCVEGCGACCKIAKDFSFATPDEIFDNPDDVELYRSMIGDDGWCLNYDKATRKCSIYADRPYFCRVEPEVFKSLYGIEEKKFNKEAVSCCIDTIKTIYGPDSKELDSFNRAIRSNPSSS

SEQ ID NO: 4836 - protein, 176 aa, Arabidopsis thaliana
MDMSLALSTAPMSRTIISATRRSQVSQPKAKKVKPANKRPTMSTSGFSGGTTKELTWKCVEGCGACCKIAKDFSFATPDEIFDNPDDVELYRSMIGDDGWCLNYDKATRKCSIYADRPYFCRVEPEVFKSLYGIEEKKFNKEAVSCCIDTIKTIYGPDSKELDSFNRAIRSNPSSS

SEQ ID NO: 4837 - protein, 174 aa, Arabidopsis thaliana
MSLALSTAPMSRTIISATRRSQVSQPKAKKVKPANKRPTMSTSGFSGGTTKELTWKCVEGCGACCKIAKDFSFATPDEIFDNPDDVELYRSMIGDDGWCLNYDKATRKCSIYADRPYFCRVEPEVFKSLYGIEEKKFNKEAVSCCIDTIKTIYGPDSKELDSFNRAIRSNPSSS

SEQ ID NO: 4838 - DNA, 1110 bp, Arabidopsis thaliana
gtctctctctctctctcagtcactttaaattatttgagcagccgcagcgagaggaagttttcttcaactgcgacggagcgtgaagttcacgctccggcggtactacctaagaactgatccagctttgaaaagaaaaatgttgcctaagaatgctattgagaagatccaagcaaatgtgagcaagccttgcttctggaagtctctctctccaggacaaacttggaaatctaaatccatgaggataattccggaagactttgtgagaagaacgcgtggtgcttttgagcacagagtggtgcttagtgttcgttgggaaaactcctggcaactctggctggagcgagagaagaacgagctgtttatgatagaagaagattggaatgagtttgtagacgacaatcatttaggtccaaatgataatctgttcatcaaacacgatgagacgatgaatcttgaagtgcaaatctttaagaataatggggttgagatcattgatgtacctcttggagttgaacccgaaactgaaccatttcatcctacgcccaagaaacctcacaaggagacaacccctgcctcttcctttgcctctggctctggctgctctgcaaatggagggacaaatggccgaggaaaacaacgttctagtgatgtcaaaaaccctgagcgatacctcttgaatcctgaaaacccttactttgtgcaagcggtgacaaaaaggaacgacgttctggtatgtgagccgaccggtggttcagagctatcgcttgaagtttggtcccgttaagtccaccattacctatcttcttcccggggagaaaaaagaggaaggcgagaatagaatctataacgggaaaccttgtttcagtggctggtcggttctatgtcggaggcacaatctgaatatcggagactccgtggtttgtgaacttgaacgctccggtggtgtggttaccgctgtaagagtgcatttcgtcaagaaagactagaccaatcctctctagtaacaacaatatgttatttacaactttctgtaacaatgctaaatgtgtcaattatgtgttagtttaaaaaacttgtcaattcacttgcaatcgaatcgattctagagtc

SEQ ID NO: 4839 - protein, 215 aa, Arabidopsis thaliana
MLPKNAIEKIQANVSKPCFWKSLSPGQTWKSKSMRIIPEDFVRRTRGAFEHRVVLSVRWENSWQLWLEREKNELFMIEEDWNEFVDDNHLGPNDNLFIKHDETMNLEVQIFKNNGVEIIDVPLGVEPETEPFHPTPKKPHKETTPASSFASGSGCSANGGTNGRGKQRSSDVKNPERYLLNPENPYFVQAVTKRNDVLVCEPTGGSELSLEVWSR

SEQ ID NO: 4840 - protein, 182 aa, Arabidopsis thaliana
MRIIPEDFVRRTRGAFEHRVVLSVRWENSWQLWLEREKNELFMIEEDWNEFVDDNHLGPNDNLFIKHDETMNLEVQIFKNNGVEIIDVPLGVEPETEPFHPTPKKPHKETTPASSFASGSGCSANGGTNGRGKQRSSDVKNPERYLLNPENPYFVQAVTKRNDVLVCEPTGGSELSLEVWSR

SEQ ID NO: 4841 - protein, 140 aa, Arabidopsis thaliana
MIEEDWNEFVDDNHLGPNDNLFIKHDETMNLEVQIFKNNGVEIIDVPLGVEPETEPFHPTPKKPHKETTPASSFASGSGCSANGGTNGRGKQRSSDVKNPERYLLNPENPYFVQAVTKRNDVLVCEPTGGSELSLEVWSR

SEQ ID NO: 4842 - DNA, 1122 bp, Arabidopsis thaliana
atggaattgctctttctcctctgttcaatcatctacacttcaatcacttccatcttcttctctcttctcctcccgtttcgcttccttctccaccgtctccttccttcacgcgccgccgtcgatcctaatgtctctttctacgaaggcacagtctggcacgaccgtctccgtcctgtccgccactctttccgttattccgttcgttacgcactctttgacctcgacaaagctattaacacaccgccggatcatttctccgccgacgaagctcgccgtgtttctcgtaccaccgggccaatatttctattgacaataccaccaagcgttggatatgaacaaaacccattgagtttatactattgctatgacttggaagggtcaagtaagcgcttaagtaaatgcattgctcaggttacaaatacgccgtggggggaacgagtgacatttgtatttgaccctgaatctgacttggttgctaaatcattacaagtcagtcctttcatggatatgcttgggaattggaaaatcagagctaatgaacctggagatgatttatctgtctccattgcatctcaacatcctcatttcggtaactatttctctgcgacattaaaggcgaaaaggatacccctatcgcgggtgtctgatcccgctgttttcttctggttgatgcctcataaggttgcgatatggatctattggcatgcacttcaactctggtggaagagtgtacctttcattcaacacccgagatactcgaacccatcatacagggaggaagcagcgaaacgcgatcaagaacttcgttgccccgggttagatgggtctgattctgataaaaccaacaaatttgatgggttaaaaggagatggttgtagtagtagttttggaggatgtcgctttgcgtggcgagatgcgaactggccttggtcatgaatacatacactctcaagggggtagcagatcatcaagagtttcggaatttacggtcattgtccaatgatatgattggtataaatcatttgaaaatctcgtctcaaatttagttggcttgtttaaaatttggcttgaacacaagtgaaccttgttgattaatagaaaaatcaactttgcattttgatt

SEQ ID NO: 4843 - protein, 311 aa, Arabidopsis thaliana
MELLFLLCSIIYTSITSIFFSLLLPFRFLLHRLLPSRAAVDPNVSFYEGTVWHDRLRPVRHSFRYSVRYALFDLDKAINTPPDHFSADEARRVSRTTGPIFLLTIPPSVGYEQNPLSLYYCYDLEGSSKRLSKCIAQVTNTPWGERVTFVFDPESDLVAKSLQVSPFMDMLGNWKIRANEPGDDLSVSIASQHPHFGNYFSATLKAKRIPLSRVSDPAVFFWLMPHKVAIWIYWHALQLWWKSVPFIQHPRYSNPSYREEAAKRDQELRCPGLDGSDSDKTNKFDGLKGDGCSSSFGGCRFAWRDANWPWS

SEQ ID NO: 4844 - DNA, 1040 bp, Arabidopsis thaliana
aaacattgaaacactttgtcccactctctctctttctctttcttgtaccaaaagctttttgaatctccaagattatagcaaaaccaaagataaaatactaacttaaaaagatttctgaaaataatgagttgcaatggttgtcgagttctacgaaaaggttgcagtgagaattgcatcctccgtccatgtattcaatggatcgaatcacctgaagctcaaggccacgccaccgtcttcgtcgctaagttcttcggccgtgccggtttaatgtctttcatctccgccgtaccggaatctcaatgccctgctttgtttcagtctttgctatacgaagcttgtgggagaactgtgaatccggtgaacggagccgtcggattgttgtggacggggaattggaatgtttgtcaagcggcggttgagacggtgcttcgtggtggttctttaaaaccaataccggagcttcttaacggcggtggattcgccgggtttccgtctcctacttccgacgaagcttcggagatctgtacggaaatgttgaatctacgaaaagctgatgattccggtgatcggaacatttatcatcactgccgattctcaagctctagatctagatcaagatcaacagcttctccgccgaaacggaaacgattatcgtcggaacaacaaccttcgtcggagcttgatctctctcttattcctatttatccgattaaaaccttgccgtttaaggaagatacaccgtcgatgtactcggaggagtctgttaccacggtttcgtttcaaaacaacaacgccggtgatcggtacgtacgctgcggcggaggaggaggaggagcaacgacaaagttgctcaatctcttcgcttgaacggcgtcgtttttgttatgagggttaaaaatgtaatttcgagtaactttttgttgtggccttttttggattaatagcccttaatattttgtgaaatgtagcaaattacgtgatttatttctctctttaattatgagaaattatccaaagtaatagagaataatgatataatt

SEQ ID NO: 4845 - protein, 247 aa, Arabidopsis thaliana
MSCNGCRVLRKGCSENCILRPCIQWIESPEAQGHATVFVAKFFGRAGLMSFISAVPESQCPALFQSLLYEACGRTVNPVNGAVGLLWTGNWNVCQAAVETVLRGGSLKPIPELLNGGGFAGFPSPTSDEASEICTEMLNLRKADDSGDRNIYHHCRFSSSRSRSRSTASPPKRKRLSSEQQPSSELDLSLIPIYPIKTLPFKEDTPSMYSEESVTTVSFQNNNAGDRYVRCGGGGGGATTKLLNLFA

SEQ ID NO: 4846 - protein, 199 aa, Arabidopsis thaliana
MSFISAVPESQCPALFQSLLYEACGRTVNPVNGAVGLLWTGNWNVCQAAVETVLRGGSLKPIPELLNGGGFAGFPSPTSDEASEICTEMLNLRKADDSGDRNIYHHCRFSSSRSRSRSTASPPKRKRLSSEQQPSSELDLSLIPIYPIKTLPFKEDTPSMYSEESVTTVSFQNNNAGDRYVRCGGGGGGATTKLLNLFA

SEQ ID NO: 4847 - DNA, 1586 bp, Arabidopsis thaliana
aaaaaagaagacggaacaaaaaacaaaaacagagccaggaataatgtcagtcttcctctgtttcctctgcctcttaccccttatcttaatcttcttgaaaaatctcaaaccatcgaaatggaagcttcctccaggcccaaagaagcttccgatcatcgggaacttacaccaacgccgggaattacatcccaggaacagtcggaatctttccgaaaagtacggaccaatcgtgtttctccgatacggattcgtccccgtggtcgtgatctcgtcaaaagaagcagcagaggaagttctcaagacccacgatcttgagtgttgtagccgaccagagacggttgggaccagagcaatctcttacaactttaaagacatcggattcgcaccgtacggtgaagattggagaacgatgcggaagctctcggtggtcgagctcttcagctcgaaaaagcttcaatctttcaggtatatcagagaggaagagaacgacttgtgtgtcaagaaactctctgatttagcttcgagacgatctttggtgaatcttgagaaaaccctttttactttagtcggaagtatagtgtgtaggatagggtttgggataaatctccgtgagtgtgagttcgttgatgaagatagcatcgatgatcttgtgcacaagtctgaagatgtcataaggaattctatcttctctgatttctttcccggattaatgggtaggctcatcgagtggatcttcagtgagaggaagagattgaatagactttactcggaagtagacactttctttcagaatattcttgatgatcatctcaagcctggaagagagagctctgatatcatcgatgtgatgattgatatgatgaagaagcaagagaaagagggagactctttcaagttcaccactgatcatctcaaagggatgatctcggacatatttctagcaggagttggaacaagctccactacattgatatgggcgatgaccgagctgatcagaaacccgagagtgatgaagaaagttcaagacgagattcggacaacacttggggacaagaaggagagaatcacagaagaagatttaaaccagcttcactacttcaagctcatggtcaaagagatattcaggttacatccagcagctccacttttgctcccaagagagacattgtctcatgtcaagatccaaggctacgatattcctgctaaaacacagatcatgatcaacgcttacgcgattgcacgtgatccaaaactatggacaaaccctgatgagtttaaccctgataggttccttgacagctccatagattacagaggactgaactttgagctattaccgtttggatctggtaggaggatatgtccagggatgacaatggggatcgccattgttgaattgggactattgaatttgctttacttcttcgactgggggctaccagagaaggaagaagccaaggagatcatcaccgggaatgaagttgctcttgaccttgttcaagtttttctccactgaatgtgttttggttatggaatgtttgtactacactaagcttgattctaaattaataacatcttacaagtac

SEQ ID NO: 4848 - protein, 504 aa, Arabidopsis thaliana
KKKTEQKTKTEPGIMSVFLCFLCLLPLILIFLKNLKPSKWKLPPGPKKLPIIGNLHQRRELHPRNSRNLSEKYGPIVFLRYGFVPVVVISSKEAAEEVLKTHDLECCSRPETVGTRAISYNFKDIGFAPYGEDWRTMRKLSVVELFSSKKLQSFRYIREEENDLCVKKLSDLASRRSLVNLEKTLFTLVGSIVCRIGFGINLRECEFVDEDSIDDLVHKSEDVIRNSIFSDFFPGLMGRLIEWIFSERKRLNRLYSEVDTFFQNILDDHLKPGRESSDIIDVMIDMMKKQEKEGDSFKFTTDHLKGMISDIFLAGVGTSSTTLIWAMTELIRNPRVMKKVQDEIRTTLGDKKERITEEDLNQLHYFKLMVKEIFRLHPAAPLLLPRETLSHVKIQGYDIPAKTQIMINAYAIARDPKLWTNPDEFNPDRFLDSSIDYRGLNFELLPFGSGRRICPGMTMGIAIVELGLLNLLYFFDWGLPEKEEAKEIITGNEVALDLVQVFLH

SEQ ID NO: 4849 - protein, 490 aa, Arabidopsis thaliana
MSVFLCFLCLLPLILIFLKNLKPSKWKLPPGPKKLPIIGNLHQRRELHPRNSRNLSEKYGPIVFLRYGFVPVVVISSKEAAEEVLKTHDLECCSRPETVGTRAISYNFKDIGFAPYGEDWRTMRKLSVVELFSSKKLQSFRYIREEENDLCVKKLSDLASRRSLVNLEKTLFTLVGSIVCRIGFGINLRECEFVDEDSIDDLVHKSEDVIRNSIFSDFFPGLMGRLIEWIFSERKRLNRLYSEVDTFFQNILDDHLKPGRESSDIIDVMIDMMKKQEKEGDSFKFTTDHLKGMISDIFLAGVGTSSTTLIWAMTELIRNPRVMKKVQDEIRTTLGDKKERITEEDLNQLHYFKLMVKEIFRLHPAAPLLLPRETLSHVKIQGYDIPAKTQIMINAYAIARDPKLWTNPDEFNPDRFLDSSIDYRGLNFELLPFGSGRRICPGMTMGIAIVELGLLNLLYFFDWGLPEKEEAKEIITGNEVALDLVQVFLH

SEQ ID NO: 4850 - protein, 368 aa, Arabidopsis thaliana
MRKLSVVELFSSKKLQSFRYIREEENDLCVKKLSDLASRRSLVNLEKTLFTLVGSIVCRIGFGINLRECEFVDEDSIDDLVHKSEDVIRNSIFSDFFPGLMGRLIEWIFSERKRLNRLYSEVDTFFQNILDDHLKPGRESSDIIDVMIDMMKKQEKEGDSFKFTTDHLKGMISDIFLAGVGTSSTTLIWAMTELIRNPRVMKKVQDEIRTTLGDKKERITEEDLNQLHYFKLMVKEIFRLHPAAPLLLPRETLSHVKIQGYDIPAKTQIMINAYAIARDPKLWTNPDEFNPDRFLDSSIDYRGLNFELLPFGSGRRICPGMTMGIAIVELGLLNLLYFFDWGLPEKEEAKEIITGNEVALDLVQVFLH

SEQ ID NO: 4851 - DNA, 746 bp, Arabidopsis thaliana
actgtctacaaaatcattgaagatctacccaaaaaaaaaaaaaaaagagatggttctgctagagaagctttgggatgatgttgtggctggacctcagcctgaccgtggccttggccgcctccgtaagatcaccacccaacccattaatatccgagatataggagaagggagcagcagtaaggtggtgatgcataggtcgttgaccatgccggcggcagtgagccctggaactccaacgactccaaccactccgacgacgccacgtaaggataacgtgtggaggagcgtctttaatccgggaagcaacctcgccactagagccatcggctccaacatctttgataaacccacccatccaaattctccctccgtctacgactggttgtacagcggtgactcaaggagtcagcaccgttagggatggtccgatggagtgtgacatgcgggtgatgtaaatatggtgacctgatcttccgccaccttactttgttttttttatattgtttttgtgtactttatcagagtggataaagtgacggggaatgtttttcttttgtacaaaaaactgtcttcccacctaagcaatgtgtgttagtttctgttttgggctgtgttttgcaagtttttgtatttcagagttgtgtagtgtagttgcaagtggcggttggatctttcactatcttgttggattttgatgatggttgatgcttttgctttaatgttaaataaataagcatacttttgct

SEQ ID NO: 4852 - protein, 138 aa, Arabidopsis thaliana
LSTKSLKIYPKKKKKEMVLLEKLWDDVVAGPQPDRGLGRLRKITTQPINIRDIGEGSSSKVVMHRSLTMPAAVSPGTPTTPTTPTTPRKDNVWRSVFNPGSNLATRAIGSNIFDKPTHPNSPSVYDWLYSGDSRSQHR

SEQ ID NO: 4853 - protein, 122 aa, Arabidopsis thaliana
MVLLEKLWDDVVAGPQPDRGLGRLRKITTQPINIRDIGEGSSSKVVMHRSLTMPAAVSPGTPTTPTTPTTPRKDNVWRSVFNPGSNLATRAIGSNIFDKPTHPNSPSVYDWLYSGDSRSQHR

SEQ ID NO: 4854 - protein, 76 aa, Arabidopsis thaliana
MHRSLTMPAAVSPGTPTTPTTPTTPRKDNVWRSVFNPGSNLATRAIGSNIFDKPTHPNSPSVYDWLYSGDSRSQHR

SEQ ID NO: 4855 - DNA, 1534 bp, Arabidopsis thaliana
gctcaattttctttctttctttctttctttctctgggagtttgggattttcttaagggtctttttcaatctcgctccattttgtacgcatagaactgggtttgtgtttacacacataaagctcttatcttttttcttctttcaatcgagaagattatagagctgagtgactgattggtggtttcttggagttttaatgggaggttgtttcagcaatcggattaaaacagatattgcttccagtacatggctaagttcgaaattcttgagtagagatgggagcaagggctcgtcgaccgcttccttctcttatatgcctcgaacagaaggcgagatcttgcaaaatgctaatctcaagaactttagtctcagtgaactgaaatctgcaactaggaatttccggcctgatagtgtggttggtgaaggtggatttggttgcgttttcaaaggctggatcgatgagtcctctctcgctccttctaaaccggggaccgggattgtcattgctgtgaaaagacttaaccaagaagggtttcaaggtcatcgagagtggctggctgagatcaattatttaggccagctggatcatcctaaccttgtgaaactgattggatactgcttggaagaggagcacaggcttcttgtttacgagtttatgactcgtggtagtcttgagaatcacttattcagaagaggaacattctatcagccactttcatggaacacgcgggttcgtatggctcttggtgcagctagaggacttgcttttcttcacaatgctcaaccgcaagttatataccgagacttcaaagcatctaacatcttgctagattcgaactacaacgcaaagctttcggatttcggtttggctagagatggtccaatgggtgacaacagccatgtttctaccagagtcatgggaactcagggatacgctgctccagaatatctagctacaggtcatttatcggtgaagagcgatgtatacagttttggggttgtgttactggagttgttatcaggaagacgagcaattgacaagaatcaaccagtaggagaacacaatctcgtggattgggcaagaccctacttaacaaacaagagaagacttctgcgagtgatggatcctcgtctccaaggtcaatactcactaacccgagctttgaaaattgcagttcttgcactcgattgcatatctatagatgccaagagtagaccgaccatgaacgaaatcgtcaagacaatggaagaacttcatatccagaaggaagcatcaaaagagcagcagaatcctcaaatcagcattgacaacatcatcaacaaatctccacaagctgtgaattatcctaggccttcaattatgtaacaatcctaggcgagctatttacccgggttttagagatgtatagactctttaccttctgtctgtttagatatgttgtttggtagtaacaaaagagctggcaatgtaagggagagaaggaaacttactagttgtaaacttaggttctcttacaacgttcacatgttatctc

SEQ ID NO: 4856 - protein, 389 aa, Arabidopsis thaliana
MGGCFSNRIKTDIASSTWLSSKFLSRDGSKGSSTASFSYMPRTEGEILQNANLKNFSLSELKSATRNFRPDSVVGEGGFGCVFKGWIDESSLAPSKPGTGIVIAVKRLNQEGFQGHREWLAEINYLGQLDHPNLVKLIGYCLEEEHRLLVYEFMTRGSLENHLFRRGTFYQPLSWNTRVRMALGAARGLAFLHNAQPQVIYRDFKASNILLDSNYNAKLSDFGLARDGPMGDNSHVSTRVMGTQGYAAPEYLATGHLSVKSDVYSFGVVLLELLSGRRAIDKNQPVGEHNLVDWARPYLTNKRRLLRVMDPRLQGQYSLTRALKIAVLALDCISIDAKSRPTMNEIVKTMEELHIQKEASKEQQNPQISIDNIINKSPQAVNYPRPSIM

SEQ ID NO: 4857 - protein, 350 aa, Arabidopsis thaliana
MPRTEGEILQNANLKNFSLSELKSATRNFRPDSVVGEGGFGCVFKGWIDESSLAPSKPGTGIVIAVKRLNQEGFQGHREWLAEINYLGQLDHPNLVKLIGYCLEEEHRLLVYEFMTRGSLENHLFRRGTFYQPLSWNTRVRMALGAARGLAFLHNAQPQVIYRDFKASNILLDSNYNAKLSDFGLARDGPMGDNSHVSTRVMGTQGYAAPEYLATGHLSVKSDVYSFGVVLLELLSGRRAIDKNQPVGEHNLVDWARPYLTNKRRLLRVMDPRLQGQYSLTRALKIAVLALDCISIDAKSRPTMNEIVKTMEELHIQKEASKEQQNPQISIDNIINKSPQAVNYPRPSIM

SEQ ID NO: 4858 - protein, 236 aa, Arabidopsis thaliana
MTRGSLENHLFRRGTFYQPLSWNTRVRMALGAARGLAFLHNAQPQVIYRDFKASNILLDSNYNAKLSDFGLARDGPMGDNSHVSTRVMGTQGYAAPEYLATGHLSVKSDVYSFGVVLLELLSGRRAIDKNQPVGEHNLVDWARPYLTNKRRLLRVMDPRLQGQYSLTRALKIAVLALDCISIDAKSRPTMNEIVKTMEELHIQKEASKEQQNPQISIDNIINKSPQAVNYPRPSIM

SEQ ID NO: 4859 - DNA, 1550 bp, Arabidopsis thaliana
actttcttcttcgattagccacttttttttcttttgtaattttcctttcttttttttttcttttgaattttcgggaagcagcatttccactggagctgcaaaatcttcctatcaaaattatagatcgatccaagttttagattcgagaatcattttctccaaattagatttatatatcaaaaggaatcgaaaatagacagcaatttttgttttgtcggatcgtattgaatcagctgtgaattttagcgccaatttaaccactgaatcgtttgattagaagctaagatttggtcttacgatcgatctaagtagggttcttcttcttaagtgtgtgttttgttaaaattagtaaagagagatggagaagaagaaagtcgcgactccgctagtgtgccatggccattcgagacctgttgtggatttgttctacagtccaatcactcctgatggtttcttcctcatcagcgcaagtaaagattctcaaccaatgttgagaaatggggaaactggagattggattggtacatttgaaggtcataaaggtgctgtgtggagttcttgtcttgataacaatgctttacgtgcagcttctgcatctgctgatttttcagcgaagctttgggatgctttgactggggatgtcttgcattcttttgagcacaagcatattgttcgagcatgcgccttctctcaggatacgaaatatctaatcacaggaggatttgagaaaattcttcgtgttttcgacttgaatcgcttggatgcacctcctacagaaattgataaatctcctggttctatcagaacactaacatggcttcacggtgatcaaacaatattaagttcttgcactgatattggtggtgtgaggttatgggatgtgaggagtggcaaaatagtgcaaactctagaaaccaagtctcctgtcaccagtgctgaagtgagtcaagatggacggtatataacaactgccgatgggtcaactgttaaattttgggatgcaaatcattttggactagtgaaaagttacgacatgccctgcaatatcgaatctgcatcgcttgagccaaaatctggcaacaaattcgttgctggtggagaagatatgtgggttcgactctttgatttccacaccggaaaggagattggatgcaacaagggacatcatggtccggttcactgtgtgagatttgcaccaacaggtgagtcttatgcttcagggtctgaagatggtacaatcagaatttggcaaactggaccggtgaatcctgaagagatcagcgagtcaaagccgaagcagagtgtggatgaggttgctcgtaagattgaaggctttcacattaacaaggaaggaaaaaccgcagagaaaccatctgatgcttaaaccaagaaaagaaccaagaaaaatggctgcttctctttgtcttcttactgtgtttttacttccagactgaatatacggaaattcaaaacaagtgtttgaaaaacagtcgttgtcaatcttcattcgagtcaagtttatggatgtggctgaaaatttacgaattaat

SEQ ID NO: 4860 - protein, 341 aa, Arabidopsis thaliana
MEKKKVATPLVCHGHSRPVVDLFYSPITPDGFFLISASKDSQPMLRNGETGDWIGTFEGHKGAVWSSCLDNNALRAASASADFSAKLWDALTGDVLHSFEHKHIVRACAFSQDTKYLITGGFEKILRVFDLNRLDAPPTEIDKSPGSIRTLTWLHGDQTILSSCTDIGGVRLWDVRSGKIVQTLETKSPVTSAEVSQDGRYITTADGSTVKFWDANHFGLVKSYDMPCNIESASLEPKSGNKFVAGGEDMWVRLFDFHTGKEIGCNKGHHGPVHCVRFAPTGESYASGSEDGTIRIWQTGPVNPEEISESKPKQSVDEVARKIEGFHINKEGKTAEKPSDA

SEQ ID NO: 4861 - protein, 298 aa, Arabidopsis thaliana
MLRNGETGDWIGTFEGHKGAVWSSCLDNNALRAASASADFSAKLWDALTGDVLHSFEHKHIVRACAFSQDTKYLITGGFEKILRVFDLNRLDAPPTEIDKSPGSIRTLTWLHGDQTILSSCTDIGGVRLWDVRSGKIVQTLETKSPVTSAEVSQDGRYITTADGSTVKFWDANHFGLVKSYDMPCNIESASLEPKSGNKFVAGGEDMWVRLFDFHTGKEIGCNKGHHGPVHCVRFAPTGESYASGSEDGTIRIWQTGPVNPEEISESKPKQSVDEVARKIEGFHINKEGKTAEKPSDA

SEQ ID NO: 4862 - DNA, 1145 bp, Arabidopsis thaliana
actaataattcgtttaaacgcaaagaccaacatggaagatcggtgcttgatcaagaacgatgtcactgaattgattggtaacacaccaatggtgtatctgaacaatgttgttgatggttgcgtggctcgtatcgctgcaaagcttgagatgatggagccttgttctagcgtcaaagacagaatcgcgtatagtatgatcaaagatgcagaagaaaaaggattgattactcccggaaagagtacattgatagagccaactgctggtaacaccgggattggtttagcttgcatgggagctgcaagaggctataaagtgatccttgtgatgccttcaactatgagcttagagagaagaatcattctgagggcactaggtgcagagcttcatctctcggaccagcgcataggccttaaaggaatgttggagaaaactgaagcgattttaagcaaaactcctggtggttacattccacaacaatttgaaaatcctgcaaaccccgagattcattaccgaaccacgggaccggaaatatggagagattcagccgggaaagtagatatattggtcgctggcgtagggactggtggaactgctactggagtagggaagttcctcaaggagcagaacaaagacatcaaggtttgtgtggtggaaccagtagaaagtccggtacttagcggaggtcaaccaggtccacatttgattcagggaattggctctggtatcgtcccattcaatttggacttaaccattgttgatgaaattattcaagtggcaggtgaagaggctattgaaacagccaagcttcttgccctcaaagaaggattactggtgggaatatcctctggagccgcagcagcggctgcgttaaaggttgcaaagcggccagaaaacgcggggaaactcattgtggtggtttttcctagtggaggagaacgttatttatcgactaaactgttcgattcgattagatatgaagcagagaatttgcctattgaatgaatgttggacgtgtgccggtttcgtgtgtaataagagacgttcgttccaagagtccaagatttcaatttgcttattactggtcaatgtgaaatgtataaaaagttgcatattcgattatgaataattttagttgactacttcc

SEQ ID NO: 4863 - protein, 333 aa, Arabidopsis thaliana
LIIRLNAKTNMEDRCLIKNDVTELIGNTPMVYLNNVVDGCVARIAAKLEMMEPCSSVKDRIAYSMIKDAEEKGLITPGKSTLIEPTAGNTGIGLACMGAARGYKVILVMPSTMSLERRIILRALGAELHLSDQRIGLKGMLEKTEAILSKTPGGYIPQQFENPANPEIHYRTTGPEIWRDSAGKVDILVAGVGTGGTATGVGKFLKEQNKDIKVCVVEPVESPVLSGGQPGPHLIQGIGSGIVPFNLDLTIVDEIIQVAGEEAIETAKLLALKEGLLVGISSGAAAAAALKVAKRPENAGKLIVVVFPSGGERYLSTKLFDSIRYEAENLPIE

SEQ ID NO: 4864 - protein, 323 aa, Arabidopsis thaliana
MEDRCLIKNDVTELIGNTPMVYLNNVVDGCVARIAAKLEMMEPCSSVKDRIAYSMIKDAEEKGLITPGKSTLIEPTAGNTGIGLACMGAARGYKVILVMPSTMSLERRIILRALGAELHLSDQRIGLKGMLEKTEAILSKTPGGYIPQQFENPANPEIHYRTTGPEIWRDSAGKVDILVAGVGTGGTATGVGKFLKEQNKDIKVCVVEPVESPVLSGGQPGPHLIQGIGSGIVPFNLDLTIVDEIIQVAGEEAIETAKLLALKEGLLVGISSGAAAAAALKVAKRPENAGKLIVVVFPSGGERYLSTKLFDSIRYEAENLPIE

SEQ ID NO: 4865 - protein, 304 aa, Arabidopsis thaliana
MVYLNNVVDGCVARIAAKLEMMEPCSSVKDRIAYSMIKDAEEKGLITPGKSTLIEPTAGNTGIGLACMGAARGYKVILVMPSTMSLERRIILRALGAELHLSDQRIGLKGMLEKTEAILSKTPGGYIPQQFENPANPEIHYRTTGPEIWRDSAGKVDILVAGVGTGGTATGVGKFLKEQNKDIKVCVVEPVESPVLSGGQPGPHLIQGIGSGIVPFNLDLTIVDEIIQVAGEEAIETAKLLALKEGLLVGISSGAAAAAALKVAKRPENAGKLIVVVFPSGGERYLSTKLFDSIRYEAENLPIE

SEQ ID NO: 4866 - DNA, 2753 bp, Arabidopsis thaliana
gacttttctcggacttgggagacaatggagactgaatacgaccaagttcttcgatccgttgctcaggtgaacatcgccgaccaaatcggagaatccgacgacgtagaaagagacggaaacggcgtaaaagtttcgtgcttcactgaagttttcgatgatgttactatccagttccagatcatccgtctcgcgaaacagatttacgtatgggtcggttgcaattccgccaaatttgggagtttgtacgcagccgcttcaacacgaccgagcaatacagtgagtgttacatcggtacttggtggaacatctgataacactggatctggcattgcgcgtagattagtgttgaagactggtctcaatataatactggcttgcaacatccctaaaaacaatcccttgcttgaggcaaaagctgagaaagtgttgattagaaagctgattgatcttggttacacaatgtcaaaacctgtaagagcaacataacccaatttagctgtttcttgaggttgtttctccttcattgtgtcctaccctttttatacggaaatttgtgactgattctactaaggtatcttgatcgattggcatgaaatgatcactttttttttggttttcgataagttttcttggcattgtatcttgaagatactatcttctccccatttcgtagctgcattcatctgcataatgctcgatgagaaatgtttaaagcgtttattacttcgaccacaaaacaaagagagagttggttccttgttcatgactttcaaatgtgtttgttttcttattcttcttgccgatttggcgtgatttcttcacctaatttggaatatagttatggtgatgcaatatttgcatgtttgatcttttgttcggtaaaaaggcaaatcctttggacataccaaagtgtcaaactatatgatgaaaccattcttctttccctctatatttgtcacttgatgatctgtactattgaattgatacagagttaccaccaagaattagatgatgtgtgtatattgacgtctatataaaaatcagaagttgttttggcatctaacctttaaatttgtgaactctctgaccaaatgtaaataaaaagaattgatttttttggtttggttcggtttggccttacacacggaaactaattggacccgaataaaccgaaattgaacaaaaccctaaattatgttttacttcactcttcaataaatcatgattttcttttaaactttttatatccataaacgacgacgttttggctggcatatggtttgggtttttcacaaaatttaggattgatatttttagttttttattctcagagacgattgtgaggaagcttgttgatcgttgcggtctgagtaagcgagtagatcattggtttgtctcttctttcttacttcgattctttgcttcatccagaataatcacagttccaattctattacctttctttttggtgtttgtgactcttatgttcatagctcttctgttgaattcacaagcattgttttctttttgatctgattcatccctgagagcataatgtgattagttgtattcctgacactcctctgttacgtgtattttactatttagtttcagtcttggtagacacatataaactgagaacattgcaagtaaaaaaaaaagagttttctttgagaaatttctctttagaatggatatgccaaagagtatcctgatcctctacttagctatataactagggatttttgaatctttgctatcaggttttgttatttactttctctggccaagccaactataaaagttaatggaagaggaccattgtgaggattctcataattatatgggttttgctctgcatcaggtaaaactagtattggttctataatactgcaaaagttagtttgttgcttttgagttgatttccctatgcctgcaggctaaacttgctctggaggctcttgaagttcccgtggggtctctatttttttgctttggcttcataccaatttgtgtttcgtaccagtgtatcaattaatgtcatataggataactaatgcgttttctttctggtttgtgtggaccagatgtgtttttcttgaggacggtaaggtcattgcttcagggcgaaaccgaacaaatgagacacgcaatgccacaagacatgcagagatggaagcaattgatcagcttgtcggacagtggcagaaagatggactctcaccttcacaagtcgctgagaaattctcgaaatgtgttctttatgtaacatgtgaaccttgcataatgtgtgcatcggccttatcgtttctcggtatcaaggaagtgtattatggatgtccaaatgataaatttgggggatgtggttccattttgtcgcttcacttaggtagtgaggaagctcaaagaggaaaaggatacaagtgcagaggaggaataatggcagaagaagctgtctctcttttcaaatgtttctatgagcaaggcaatcccaacgctccaaagccacaccgccctgttgttcaaagagagaggacttgaggtgaacgtatcgttaaaactgaagttcttcggcttctgcaacaacaacaatcagacctgaagattacactcacagtccagttcaaacaacaacaatccagagcagaagccataatttgggactccaaaagcttatttattagttttggattttattcacatatatgacaatcaaaataacatgttttgttatcaaatcatggctacttcct

SEQ ID NO: 4867 - protein, 167 aa, Arabidopsis thaliana
MSYRITNAFSFWFVWTRCVFLEDGKVIASGRNRTNETRNATRHAEMEAIDQLVGQWQKDGLSPSQVAEKFSKCVLYVTCEPCIMCASALSFLGIKEVYYGCPNDKFGGCGSILSLHLGSEEAQRGKGYKCRGGIMAEEAVSLFKCFYEQGNPNAPKPHRPVVQRERT

SEQ ID NO: 4868 - protein, 161 aa, Arabidopsis thaliana
DFSRTWETMETEYDQVLRSVAQVNIADQIGESDDVERDGNGVKVSCFTEVFDDVTIQFQIIRLAKQIYVWVGCNSAKFGSLYAAASTRPSNTVSVTSVLGGTSDNTGSGIARRLVLKTGLNIILACNIPKNNPLLEAKAEKVLIRKLIDLGYTMSKPVRAT

SEQ ID NO: 4869 - protein, 153 aa, Arabidopsis thaliana
METEYDQVLRSVAQVNIADQIGESDDVERDGNGVKVSCFTEVFDDVTIQFQIIRLAKQIYVWVGCNSAKFGSLYAAASTRPSNTVSVTSVLGGTSDNTGSGIARRLVLKTGLNIILACNIPKNNPLLEAKAEKVLIRKLIDLGYTMSKPVRAT

SEQ ID NO: 4870 - DNA, 988 bp, Arabidopsis thaliana
gaattctcgaacacgaaaaatattcacagatattttcgatcttaaccgagaaaaaggaagaaatggctggaccatcgacaacttcaaacgcaccaaagcagaggaagagagtcgaagccgagactagcagcaacacttctactaccttacgtcgcgctaaagacggaagcgctttcgctctctgtgaaggatgtaacaagagtgtagctgtagcgcttataagcatgcacaattgcagtctcgatgctaagatcagagtgaatctcgaagcacaagttgtggagacacaagcagaggctaagaagaagcctgcagagaagaagaagacaacatctgatggacctaagccaaagagacttaagaaaaccaatgatgagaagaagagctcgtctacttcaaacaagcccaagcgacctcttaccgctttctttatcttcatgagtgacttccgtaaaacgtttaagtcagagcataatggttcgttagctaaggatgctgcaaagatcggtggtgagaagtggaagtctttgactgaggaagagaagaaagtttatctggataaagctgctgaacttaaggcagagtataacaagtcactggaaagtaatgatgctgatgaggaagaggaagatgaggagaagcaatctgatgatgttgatgatgctgaggagaaacaagttgacgatgatgatgaagttgaggagaaagaagttgagaacacagatgatgacaagaaagaagctgagggtaaagaagaggaggaagaagagattttggatgactactagaaatgatatgctcgtttttgtggttctagtcttactgaaatcggtttatctctaatcgttgcgatgcattgtaaatgaagcctttattagtgaaagtagtttatttgaagttaagttgtgagcaagtggtttttttgtagttcactgaaatggtaatgccttttgtttaaacaagtaatgaagcttatgtttttcgtttt

SEQ ID NO: 4871 - protein, 261 aa, Arabidopsis thaliana
ILEHEKYSQIFSILTEKKEEMAGPSTTSNAPKQRKRVEAETSSNTSTTLRRAKDGSAFALCEGCNKSVAVALISMHNCSLDAKIRVNLEAQVVETQAEAKKKPAEKKKTTSDGPKPKRLKKTNDEKKSSSTSNKPKRPLTAFFIFMSDFRKTFKSEHNGSLAKDAAKIGGEKWKSLTEEEKKVYLDKAAELKAEYNKSLESNDADEEEEDEEKQSDDVDDAEEKQVDDDDEVEEKEVENTDDDKKEAEGKEEEEEEILDDY

SEQ ID NO: 4872 - protein, 241 aa, Arabidopsis thaliana
MAGPSTTSNAPKQRKRVEAETSSNTSTTLRRAKDGSAFALCEGCNKSVAVALISMHNCSLDAKIRVNLEAQVVETQAEAKKKPAEKKKTTSDGPKPKRLKKTNDEKKSSSTSNKPKRPLTAFFIFMSDFRKTFKSEHNGSLAKDAAKIGGEKWKSLTEEEKKVYLDKAAELKAEYNKSLESNDADEEEEDEEKQSDDVDDAEEKQVDDDDEVEEKEVENTDDDKKEAEGKEEEEEEILDDY

SEQ ID NO: 4873 - protein, 187 aa, Arabidopsis thaliana
MHNCSLDAKIRVNLEAQVVETQAEAKKKPAEKKKTTSDGPKPKRLKKTNDEKKSSSTSNKPKRPLTAFFIFMSDFRKTFKSEHNGSLAKDAAKIGGEKWKSLTEEEKKVYLDKAAELKAEYNKSLESNDADEEEEDEEKQSDDVDDAEEKQVDDDDEVEEKEVENTDDDKKEAEGKEEEEEEILDDY

SEQ ID NO: 4874 - DNA, 1168 bp, Arabidopsis thaliana
aaatgcatttccctccattctcttacgctttctctcactctcgtcaatggcgaccaccgcatcttcatctctcccccgtaattactccttcacaactccgcgaccttcatcattcatccgaggaccgccattagctagaacgctgcctctctatctccgccgtaaccgtcgagtagctctcacttaccgattggaccagaattcgaagcagagaagtggtggaaacgtaagatgcgaggcgacggaggtatcttcttcttcttctgtatccacacctggaaggaattgggtgccggtggtgccgttatcggcgcttccgaaaggtgaacggcgagtggttattcaagacgatgagacgatattgttgctttggtataagaacgatgtttttgcaattgagaatcgttcaccagctgaaggagcttatagcgaaggacttctcaacgctaggctcactcaggatggttgcattgtgtgtccatcgacggatagtacgtttgatcttagaactggagagatccgggaatggtacccgaaaaacccggttctcagagtcttgacacctgcactgaggaaactatttgtataccctgtcaaatatgatgaggaaaacatctatatcagcattagagacagcgggaaaacagaggcagctgctgagatcgtcttcagtggaaaagctcagcctgggctcacagcaacaaacgtcaatgtagacgaggtgagaatgattgtggacgagggttctgaaggatttggtttcacgaagaagaacgaagtgataaacgggaaggcggcagtgataggattcttgctgctgttagatttcgagctattgacaggtaaaggtctattgaaaggaacagggttcttggacttcctttactctgcttcagatgctttcaagtagaggtaatatctttgttggtctggttttgcttgcctcctttgtgcagtttgccgagaaacaaaaaaaaaaaaaccatgtaatagtatatagagatggctttgctctgtctttctttgtgtttaccccttatacgagatattctttcttctccttgagttcaaattataatcttcaagctttcccactatcttttgtatttgacatacaacacctcatatttgattgggtgaaacaaaaacgagagaaaatttcaataac

SEQ ID NO: 4875 - protein, 302 aa, Arabidopsis thaliana
NAFPSILLRFLSLSSMATTASSSLPRNYSFTTPRPSSFIRGPPLARTLPLYLRRNRRVALTYRLDQNSKQRSGGNVRCEATEVSSSSSVSTPGRNWVPVVPLSALPKGERRVVIQDDETILLLWYKNDVFAIENRSPAEGAYSEGLLNARLTQDGCIVCPSTDSTFDLRTGEIREWYPKNPVLRVLTPALRKLFVYPVKYDEENIYISIRDSGKTEAAAEIVFSGKAQPGLTATNVNVDEVRMIVDEGSEGFGFTKKNEVINGKAAVIGFLLLLDFELLTGKGLLKGTGFLDFLYSASDAFK

SEQ ID NO: 4876 - protein, 287 aa, Arabidopsis thaliana
MATTASSSLPRNYSFTTPRPSSFIRGPPLARTLPLYLRRNRRVALTYRLDQNSKQRSGGNVRCEATEVSSSSSVSTPGRNWVPVVPLSALPKGERRVVIQDDETILLLWYKNDVFAIENRSPAEGAYSEGLLNARLTQDGCIVCPSTDSTFDLRTGEIREWYPKNPVLRVLTPALRKLFVYPVKYDEENIYISIRDSGKTEAAAEIVFSGKAQPGLTATNVNVDEVRMIVDEGSEGFGFTKKNEVINGKAAVIGFLLLLDFELLTGKGLLKGTGFLDFLYSASDAFK

SEQ ID NO: 4877 - DNA, 1593 bp, Arabidopsis thaliana
atctctaattcaaatatccgacgcagacattttagacaaagttactctctttctttctcatgttcttttcggacagaacaaaactccctaatccaaatgtcaattcctttggtctctctctgaataatcatctctcttcaaaccctattcaattttaactatcgatcttcggctaagtctccaatggcggcggcgtttgcctctcttcccacatttagtgtcgtcaattcctccagatttcccagaagaagaatcggtttttcttgctccaaaaagcccctcgaagttcgttgttcttccggcaatactcgttacactaagcagagaggggcatttacatcactgaaagaatgtgcgatttcattagctttatcggttggtttaatggtttcagtaccttcgattgctttgcctcccaatgctcacgcagtggcgaatccagtgattccagatgtttcagtgttgatctccggtcctccgattaaagatccggaagctttactaagatatgcattgcctattgacaacaaagccatcagggaagtgcagaagcctcttgaggatatcactgatagcctcaagattgctggcgttaaggctctagattctgttgaacggaatgtgaggcaggcaagtagaacattgcagcaagggaaaagtataattgtggcaggttttgctgaatcgaagaaggatcatggtaatgaaatgattgaaaagttggaagctgggatgcaagatatgcttaagatagtggaagatcgaaaaagagacgcagttgctccaaaacagaaagaaattctcaaatatgttggcggaatagaagaggatatggttgatggctttccatatgaagtgccggaagagtatcggaacatgcctctcctcaagggaagagctagtgtggacatgaaggtcaagatcaaggacaatcccaacatcgaggactgtgtgttccgcattgttcttgatggttataacgcccctgttaccgccggaaactttgtggacttggtagagaggcatttctacgatggcatggagatccagagatctgatggatttgtggtacaaacgggagatccagagggtcctgcggaaggatttatcgatccaagcacagagaaaacgaggacggttcctctagagattatggtgactggagagaaaacgcctttttacggctcaactcttgaagaacttggtctttacaaggctcaggttgtgattcctttcaacgcttttgggacaatggcaatggcaagagaagagtttgagaatgactcaggatcaagccaagtgttttggctgctaaaagagagtgagctgacaccaagcaattccaacatcttggatggtcgttacgctgtctttggttacgttactgataacgaagattttctagctgatcttaaagttggtgatgttatcgaatccattcaagttgtctccggtttagagaacctcgctaacccgagttacaaaatcgccggttaactcctcttatctttttccttttcttggttcgtaattaatactctgtttattttaattttgtgagagtatattaaaggtgcatgtctttttcctacg

SEQ ID NO: 4878 - protein, 437 aa, Arabidopsis thaliana
MAAAFASLPTFSVVNSSRFPRRRIGFSCSKKPLEVRCSSGNTRYTKQRGAFTSLKECAISLALSVGLMVSVPSIALPPNAHAVANPVIPDVSVLISGPPIKDPEALLRYALPIDNKAIREVQKPLEDITDSLKIAGVKALDSVERNVRQASRTLQQGKSIIVAGFAESKKDHGNEMIEKLEAGMQDMLKIVEDRKRDAVAPKQKEILKYVGGIEEDMVDGFPYEVPEEYRNMPLLKGRASVDMKVKIKDNPNIEDCVFRIVLDGYNAPVTAGNFVDLVERHFYDGMEIQRSDGFVVQTGDPEGPAEGFIDPSTEKTRTVPLEIMVTGEKTPFYGSTLEELGLYKAQVVIPFNAFGTMAMAREEFENDSGSSQVFWLLKESELTPSNSNILDGRYAVFGYVTDNEDFLADLKVGDVIESIQVVSGLENLANPSYKIAG

SEQ ID NO: 4879 - protein, 370 aa, Arabidopsis thaliana
MVSVPSIALPPNAHAVANPVIPDVSVLISGPPIKDPEALLRYALPIDNKAIREVQKPLEDITDSLKIAGVKALDSVERNVRQASRTLQQGKSIIVAGFAESKKDHGNEMIEKLEAGMQDMLKIVEDRKRDAVAPKQKEILKYVGGIEEDMVDGFPYEVPEEYRNMPLLKGRASVDMKVKIKDNPNIEDCVFRIVLDGYNAPVTAGNFVDLVERHFYDGMEIQRSDGFVVQTGDPEGPAEGFIDPSTEKTRTVPLEIMVTGEKTPFYGSTLEELGLYKAQVVIPFNAFGTMAMAREEFENDSGSSQVFWLLKESELTPSNSNILDGRYAVFGYVTDNEDFLADLKVGDVIESIQVVSGLENLANPSYKIAG

SEQ ID NO: 4880 - protein, 262 aa, Arabidopsis thaliana
MIEKLEAGMQDMLKIVEDRKRDAVAPKQKEILKYVGGIEEDMVDGFPYEVPEEYRNMPLLKGRASVDMKVKIKDNPNIEDCVFRIVLDGYNAPVTAGNFVDLVERHFYDGMEIQRSDGFVVQTGDPEGPAEGFIDPSTEKTRTVPLEIMVTGEKTPFYGSTLEELGLYKAQVVIPFNAFGTMAMAREEFENDSGSSQVFWLLKESELTPSNSNILDGRYAVFGYVTDNEDFLADLKVGDVIESIQVVSGLENLANPSYKIAG

SEQ ID NO: 4881 - DNA, 1187 bp, Arabidopsis thaliana
acaaattcagattccaaatttctcaaactctgaaatcgttctttcaaatctctcaatcgggatcaagatgcagatctttgttaagactctcaccggaaagactatcaccctcgaggtggaaagctctgacaccatcgacaacgttaaggccaagatccaggataaggaaggcattcctccggatcagcagaggcttattttcgccggaaaacagctagaggatggccgtacgttggctgattacaatatccagaaggaatccaccctccacttggttctcaggctccgtggtggtatgcagattttcgtcaagaccttaacgggaaagacgattactcttgaggtggagagttctgacaccatcgacaacgtcaaggccaagatccaagacaaggagggtattcctccggaccagcagaggttgatcttcgctggaaagcagttggaggatggcagaactcttgctgactacaacatccagaaggagtccacacttcatcttgttctcaggctccgtggtggtatgcagatctttgtcaagacgttgactggaaagactatcactttggaggtggagagctctgacactatcgacaatgtcaaagccaagatccaggacaaagagggtatcccaccggaccagcagagattgatcttcgccggaaaacaacttgaagatggtagaactttggctgactacaacattcagaaggagtctacacttcacttggtgttgcgtctccgtggaggtatgcagattttcgtgaagactctcactggaaagaccattactcttgaagttgagagctccgacaccattgacaacgtgaaggctaagatccaggacaaggaaggtatccctccggaccagcagcgtctcatcttcgctggaaaacagcttgaggatggtcgtactttggccgactacaacatccagaaggagtctacccttcacttggtgctaaggctccgtggtggtttctaaaaacttatctctgttatgaatcagaagaagttcatgtctcgtttcatttaaaactttggtggtttgtgttttggggccttgtaaagcccctgatgaataattgttcaactatgtttccgttcctgtgttatacctttctttctaatgagtaatgacatcaaacttcttctgtattggaattatgtccttgtgagtctcttta

SEQ ID NO: 4882 - protein, 327 aa, Arabidopsis thaliana
QIQIPNFSNSEIVLSNLSIGIKMQIFVKTLTGKTITLEVESSDTIDNVKAKIQDKEGIPPDQQRLIFAGKQLEDGRTLADYNIQKESTLHLVLRLRGGMQIFVKTLTGKTITLEVESSDTIDNVKAKIQDKEGIPPDQQRLIFAGKQLEDGRTLADYNIQKESTLHLVLRLRGGMQIFVKTLTGKTITLEVESSDTIDNVKAKIQDKEGIPPDQQRLIFAGKQLEDGRTLADYNIQKESTLHLVLRLRGGMQIFVKTLTGKTITLEVESSDTIDNVKAKIQDKEGIPPDQQRLIFAGKQLEDGRTLADYNIQKESTLHLVLRLRGGF

SEQ ID NO: 4883 - protein, 305 aa, Arabidopsis thaliana
MQIFVKTLTGKTITLEVESSDTIDNVKAKIQDKEGIPPDQQRLIFAGKQLEDGRTLADYNIQKESTLHLVLRLRGGMQIFVKTLTGKTITLEVESSDTIDNVKAKIQDKEGIPPDQQRLIFAGKQLEDGRTLADYNIQKESTLHLVLRLRGGMQIFVKTLTGKTITLEVESSDTIDNVKAKIQDKEGIPPDQQRLIFAGKQLEDGRTLADYNIQKESTLHLVLRLRGGMQIFVKTLTGKTITLEVESSDTIDNVKAKIQDKEGIPPDQQRLIFAGKQLEDGRTLADYNIQKESTLHLVLRLRGGF

SEQ ID NO: 4884 - protein, 229 aa, Arabidopsis thaliana
MQIFVKTLTGKTITLEVESSDTIDNVKAKIQDKEGIPPDQQRLIFAGKQLEDGRTLADYNIQKESTLHLVLRLRGGMQIFVKTLTGKTITLEVESSDTIDNVKAKIQDKEGIPPDQQRLIFAGKQLEDGRTLADYNIQKESTLHLVLRLRGGMQIFVKTLTGKTITLEVESSDTIDNVKAKIQDKEGIPPDQQRLIFAGKQLEDGRTLADYNIQKESTLHLVLRLRGGF

SEQ ID NO: 4885 - DNA, 2024 bp, Arabidopsis thaliana
gccaacacaactccttataagatatacacttcatcaacctatagatctcactcacataatcaacctacaaaacaaaaacaagaatgggtagatccaacgagcaagatctgctctctaccgagatcgttaatcgtgggatcgaaccatccggtcctaacgccggctcaccaacgttctcggttagggtcaggagacgtttgcctgattttcttcagtcggtgaacttgaagtacgtgaaacttggttaccactacctcataaaccatgcggtttatttggcgaccataccggttcttgtgctggtttttagtgctgaggttgggagtttaagcagagaagagatttggaagaagctttgggactatgatcttgcaactgttatcggattcttcggtgtctttgttttaaccgcttgtgtctacttcatgtctcgtcctcgctctgtttatcttattgatttcgcttgttacaagccctccgatgaacacaaggtgacaaaagaagagttcatagaactagcgagaaaatcagggaagttcgacgaagagacactcggtttcaagaagaggatcttacaagcctcaggcataggcgacgagacatacgtcccaagatccatctcttcatcagaaaacataacaacgatgaaagaaggtcgtgaagaagcctctacagtgatctttggagcactagacgaactcttcgagaagacacgtgtaaaacctaaagacgttggtgtccttgtggttaactgtagcattttcaacccgacaccgtcgttgtccgcaatggtgataaaccattacaagatgagagggaacatacttagttacaaccttggagggatgggatgttcggctggaatcatagctattgatcttgctcgtgacatgcttcagtctaaccctaatagttatgctgttgttgtgagtactgagatggttgggtataattggtacgtgggaagtgacaagtcaatggttatacctaattgtttctttaggatgggttgttctgccgttatgctctctaaccgtcgtcgtgactttcgccatgctaagtaccgtctcgagcacattgtccgaactcataaggctgctgacgaccgtagcttcaggagtgtgtaccaggaagaagatgaacaaggattcaaggggttgaagataagtagagacttaatggaagttggaggtgaagctctcaagacaaacatcactaccttaggtcctcttgtcctacctttctccgagcagcttctcttctttgctgctttgctccgccgaacattctcacctgctgccaaaacgtccacaaccacttccttctctacttccgccaccgcaaaaaccaatggaatcaagtcttcctcttccgatctgtccaagccatacatcccggactacaagctcgccttcgagcatttttgcttccacgcggcaagcaaagtagtgcttgaagagcttcaaaagaatctaggcttgagtgaagagaatatggaggcttctaggatgacacttcacaggtttggaaacacttctagcagtggaatctggtatgagttggcttacatggaggccaaggaaagtgttcgtagaggcgatagggtttggcagatcgctttcggttctggttttaagtgtaacagtgtggtgtggaaggcaatgaggaaggtgaagaagccaaccaggaacaatccttgggtggattgcatcaaccgttaccctgtgcctctctaaattatcattcttctaaattaaatcaagtaagatctctaattactccaaccaaaagatacagtttggttggatgataggagttatttactgatcattcgtatctaagtctgttataagaatggatgtggctagagtcctgttcagcttcaacttgttttattttttgtttgttctctattggatcttcataaactttgagagattaaagaaaaaaactcttctttagtttgatagaacagatggtcattgtaatttctttaatatgtcaaagtaaaacaatttcttttt

SEQ ID NO: 4886 - protein, 550 aa, Arabidopsis thaliana
MGRSNEQDLLSTEIVNRGIEPSGPNAGSPTFSVRVRRRLPDFLQSVNLKYVKLGYHYLINHAVYLATIPVLVLVFSAEVGSLSREEIWKKLWDYDLATVIGFFGVFVLTACVYFMSRPRSVYLIDFACYKPSDEHKVTKEEFIELARKSGKFDEETLGFKKRILQASGIGDETYVPRSISSSENITTMKEGREEASTVIFGALDELFEKTRVKPKDVGVLVVNCSIFNPTPSLSAMVINHYKMRGNILSYNLGGMGCSAGIIAIDLARDMLQSNPNSYAVVVSTEMVGYNWYVGSDKSMVIPNCFFRMGCSAVMLSNRRRDFRHAKYRLEHIVRTHKAADDRSFRSVYQEEDEQGFKGLKISRDLMEVGGEALKTNITTLGPLVLPFSEQLLFFAALLRRTFSPAAKTSTTTSFSTSATAKTNGIKSSSSDLSKPYIPDYKLAFEHFCFHAASKVVLEELQKNLGLSEENMEASRMTLHRFGNTSSSGIWYELAYMEAKESVRRGDRVWQIAFGSGFKCNSVVWKAMRKVKKPTRNNPWVDCINRYPVPL

SEQ ID NO: 4887 - protein, 436 aa, Arabidopsis thaliana
MSRPRSVYLIDFACYKPSDEHKVTKEEFIELARKSGKFDEETLGFKKRILQASGIGDETYVPRSISSSENITTMKEGREEASTVIFGALDELFEKTRVKPKDVGVLVVNCSIFNPTPSLSAMVINHYKMRGNILSYNLGGMGCSAGIIAIDLARDMLQSNPNSYAVVVSTEMVGYNWYVGSDKSMVIPNCFFRMGCSAVMLSNRRRDFRHAKYRLEHIVRTHKAADDRSFRSVYQEEDEQGFKGLKISRDLMEVGGEALKTNITTLGPLVLPFSEQLLFFAALLRRTFSPAAKTSTTTSFSTSATAKTNGIKSSSSDLSKPYIPDYKLAFEHFCFHAASKVVLEELQKNLGLSEENMEASRMTLHRFGNTSSSGIWYELAYMEAKESVRRGDRVWQIAFGSGFKCNSVVWKAMRKVKKPTRNNPWVDCINRYPVPL

SEQ ID NO: 4888 - protein, 363 aa, Arabidopsis thaliana
MKEGREEASTVIFGALDELFEKTRVKPKDVGVLVVNCSIFNPTPSLSAMVINHYKMRGNILSYNLGGMGCSAGIIAIDLARDMLQSNPNSYAVVVSTEMVGYNWYVGSDKSMVIPNCFFRMGCSAVMLSNRRRDFRHAKYRLEHIVRTHKAADDRSFRSVYQEEDEQGFKGLKISRDLMEVGGEALKTNITTLGPLVLPFSEQLLFFAALLRRTFSPAAKTSTTTSFSTSATAKTNGIKSSSSDLSKPYIPDYKLAFEHFCFHAASKVVLEELQKNLGLSEENMEASRMTLHRFGNTSSSGIWYELAYMEAKESVRRGDRVWQIAFGSGFKCNSVVWKAMRKVKKPTRNNPWVDCINRYPVPL

SEQ ID NO: 4889 - DNA, 664 bp, Arabidopsis thaliana
gttaatttcgtcaagaaaaaaattcgatttttttgcgctctttgtgggttgttgttgttgaaaatggctggtcgtggaaaaactcttggatccggtggggcgaagaaagctacatctcggagtagcaaagccggtcttcaattcccggtgggtcgtatcgctcgtttcttaaaagccggtaaatacgccgaacgtgttggtgccggtgctccggtttatctcgccgccgttctcgaatatttggccgccgaggttcttgaattagctggaaacgcagcaagagacaacaagaagacacgtattgttcctcgtcacattcagcttgcggtcagaaacgatgaggagctaagcaagcttcttggagatgtgacgattgctaatggaggagtgatgcctaacatccacaatctccttctccctaagaaggctggtgcttcaaagcctcaggaagattaggtcttttaacacaatgatatagaacacgtctctcttttggctttagatctaataacctaataactagctagatgttttcactttttgtatctttgctttttttaattcctttagggatttgtttctttccgtttctgtttcgacatgttgtttctgtttttgtgaatatatgaaagtattttgcgaaaaatgaatgataatgtctttc

SEQ ID NO: 4890 - protein, 151 aa, Arabidopsis thaliana
VNFVKKKIRFFCALCGLLLLKMAGRGKTLGSGGAKKATSRSSKAGLQFPVGRIARFLKAGKYAERVGAGAPVYLAAVLEYLAAEVLELAGNAARDNKKTRIVPRHIQLAVRNDEELSKLLGDVTIANGGVMPNIHNLLLPKKAGASKPQED

SEQ ID NO: 4891 - protein, 130 aa, Arabidopsis thaliana
MAGRGKTLGSGGAKKATSRSSKAGLQFPVGRIARFLKAGKYAERVGAGAPVYLAAVLEYLAAEVLELAGNAARDNKKTRIVPRHIQLAVRNDEELSKLLGDVTIANGGVMPNIHNLLLPKKAGASKPQED

SEQ ID NO: 4892 - DNA, 1566 bp, Arabidopsis thaliana
agatattgatttagacggagatttcattatctatctctcaagtttgatttgcttctgctgtaacaaaaagatcacgatcgcaacttgtgtgtatgtgtgtgtgagagagagattcagatatggcttggttagctagatccatagcgaactcactcaagctcgatgaggaagatgaagatgatgataagcatctgaatcaacagccgtcggaatctgtatcggattcacagtctccacgaggcgttaaggaagacattagcgaacttaccaagaccttgagaacccaattttggggtgtagcttcgttcctctcgcaaccttcttcatctccggatcttcaggagagaaatcaaactcccgatcatccggaggaagatgaggatctaatcgctgggattaagaacgatttcgctgagattggtgggagattcaggactgggatttcgaaactatctgggaacttacctgtgtctgagttcacaaagatcgcttcgaatttcttacaattgagttcagaagatgtggatccgaaagattacgacgtaatcggagttacagaggaattagttgcgtttgtgaaggatcttgcgatgcatcctgagacttggttggattttcctttacctgatgacgacgatagctttgatgactttgaattggccgatgctcaatacgagcacgctttagctgtagaaaggctagcaccgagcttggcttctttgaggattgagctttgccctgaatatatgactgagaattgcttctggaggatttactttgttcttgtgcatcctaaactcagtaaagaccatgccttgcttctctccactcctcaggtactcgaagcaagatcaatgttatctcaggaactacagaaacgaagcaaattacctgtagaagcagggagttctgaagctaatactgtcattgtggaacctcttactgtgcctccttcaccagaaacagcagctgttaaaatcgtaaatccagtcgagtcatctgacgttgaaacagacaagcaccctattgagagcaaagagatacaaattgttgacaaatctgtcattgaagaaagaagcacatccactgcttcttcatctagatttattaatgtgcaagtggatgatgaagacgacgacgatgcagatgattggttgaatgatgaagagacttcatcagttagcgccattggaggaagatcaaccacaaatcatccttttggtgaagacgaagaagatgtatcattcagtgatctagaagaagaagacgataacgaaggagacgtgaaagtgagttacaagaaccttactaactctggttctgattcttcagacaaaaaatcaccagattgggttcagctaaaagaggtaaaagagaagaaaaaatcaaacgactggcttgatgttgatgcagtgtgatgtgatctccaatgtttcttttggcaatatataacatttaaatctacgtcttgcaaatatctgatgctaccgaaatttgttgtgaataatttttatattccattttatcaaaacctatatagccgtagtaaaaaaaactgcaatgttt

SEQ ID NO: 4893 - protein, 432 aa, Arabidopsis thaliana
MAWLARSIANSLKLDEEDEDDDKHLNQQPSESVSDSQSPRGVKEDISELTKTLRTQFWGVASFLSQPSSSPDLQERNQTPDHPEEDEDLIAGIKNDFAEIGGRFRTGISKLSGNLPVSEFTKIASNFLQLSSEDVDPKDYDVIGVTEELVAFVKDLAMHPETWLDFPLPDDDDSFDDFELADAQYEHALAVERLAPSLASLRIELCPEYMTENCFWRIYFVLVHPKLSKDHALLLSTPQVLEARSMLSQELQKRSKLPVEAGSSEANTVIVEPLTVPPSPETAAVKIVNPVESSDVETDKHPIESKEIQIVDKSVIEERSTSTASSSRFINVQVDDEDDDDADDWLNDEETSSVSAIGGRSTTNHPFGEDEEDVSFSDLEEEDDNEGDVKVSYKNLTNSGSDSSDKKSPDWVQLKEVKEKKKSNDWLDVDAV

SEQ ID NO: 4894 - protein, 275 aa, Arabidopsis thaliana
MHPETWLDFPLPDDDDSFDDFELADAQYEHALAVERLAPSLASLRIELCPEYMTENCFWRIYFVLVHPKLSKDHALLLSTPQVLEARSMLSQELQKRSKLPVEAGSSEANTVIVEPLTVPPSPETAAVKIVNPVESSDVETDKHPIESKEIQIVDKSVIEERSTSTASSSRFINVQVDDEDDDDADDWLNDEETSSVSAIGGRSTTNHPFGEDEEDVSFSDLEEEDDNEGDVKVSYKNLTNSGSDSSDKKSPDWVQLKEVKEKKKSNDWLDVDAV

SEQ ID NO: 4895 - protein, 223 aa, Arabidopsis thaliana
MTENCFWRIYFVLVHPKLSKDHALLLSTPQVLEARSMLSQELQKRSKLPVEAGSSEANTVIVEPLTVPPSPETAAVKIVNPVESSDVETDKHPIESKEIQIVDKSVIEERSTSTASSSRFINVQVDDEDDDDADDWLNDEETSSVSAIGGRSTTNHPFGEDEEDVSFSDLEEEDDNEGDVKVSYKNLTNSGSDSSDKKSPDWVQLKEVKEKKKSNDWLDVDAV

SEQ ID NO: 4896 - DNA, 1129 bp, Arabidopsis thaliana
aaacacctgaaagattttaattacttatccctatcaaagaaactaacacaagtataaatttacagaaaaatgcttgataagcttaccagagggatcggaggtctccggcgcggacatgggcatttccaggcaagcgcaggcttcgggttcgaggagcacaaggagttttcgagtcgtgtggagtcatcaggaggcttcgttgaccgtcaagcccgctacaaccaccgtacgggcaaccatggccgtccacccatgcatgtctgggatgaagaagactcagactcagacgtggaggagttctttgagagcagccggacccaacacactactgcgttgccgcaaccacttcatatgaacttcaggcctccacctccagtgactcagcctcaccacaacggaaaaatgggaaagataggtaatggattgcagcagggacacgagatacatgggatgaagcaccagggcggacatgggatccagcaccacgacatacacgggatgcagcaccagggcgggcacgggatgcagcaccagggcatgcacgggatgcagcaccagggggggcacggaatgcagcaccagggcgggcacggaatgcagcaccagggcatgcatgggatgcagcaccagggggggcacggaatggagcaccagggcgggcacggaatgcagcaccaggacatgcatgggatgcagcaccagggcaggcacggaatgcagcaccagggcgggcacgaaatgcagcatcagggcatgcatgggatgcagcaccagggcgggcacagaatacagcatcagggcatgcatgggatgcagcacccgggtggagtagtggtaaacgctactgagaattggcgggtcagcaaaatcaccggccagaaactcgggtggggaggtaagggactctagactccacctaaatactatgccggttcaaataagaaagtaatgattatgtacccaaataatacatttataagatgtatgtgtgtgatggacatgtttctgtatcgtaccaaaactaaataggtggcttttatcccaaaaaagtgctttcgtttgatgaccttatgatttctaaagagtgttgttgttgctgcttatgtttaataaaagtgatgtatattat

SEQ ID NO: 4897 - protein, 279 aa, Arabidopsis thaliana
MLDKLTRGIGGLRRGHGHFQASAGFGFEEHKEFSSRVESSGGFVDRQARYNHRTGNHGRPPMHVWDEEDSDSDVEEFFESSRTQHTTALPQPLHMNFRPPPPVTQPHHNGKMGKIGNGLQQGHEIHGMKHQGGHGIQHHDIHGMQHQGGHGMQHQGMHGMQHQGGHGMQHQGGHGMQHQGMHGMQHQGGHGMEHQGGHGMQHQDMHGMQHQGRHGMQHQGGHEMQHQGMHGMQHQGGHRIQHQGMHGMQHPGGVVVNATENWRVSKITGQKLGWGGKGL

SEQ ID NO: 4898 - protein, 218 aa, Arabidopsis thaliana
MHVWDEEDSDSDVEEFFESSRTQHTTALPQPLHMNFRPPPPVTQPHHNGKMGKIGNGLQQGHEIHGMKHQGGHGIQHHDIHGMQHQGGHGMQHQGMHGMQHQGGHGMQHQGGHGMQHQGMHGMQHQGGHGMEHQGGHGMQHQDMHGMQHQGRHGMQHQGGHEMQHQGMHGMQHQGGHRIQHQGMHGMQHPGGVVVNATENWRVSKITGQKLGWGGKGL

SEQ ID NO: 4899 - protein, 185 aa, Arabidopsis thaliana
MNFRPPPPVTQPHHNGKMGKIGNGLQQGHEIHGMKHQGGHGIQHHDIHGMQHQGGHGMQHQGMHGMQHQGGHGMQHQGGHGMQHQGMHGMQHQGGHGMEHQGGHGMQHQDMHGMQHQGRHGMQHQGGHEMQHQGMHGMQHQGGHRIQHQGMHGMQHPGGVVVNATENWRVSKITGQKLGWGGKGL

SEQ ID NO: 4900 - DNA, 1216 bp, Arabidopsis thaliana
tatatcatctccttcagatccacacactctctcttatatctctccggcgaaaactttccgatcaccgacaaaaaaaaaaaatggttgcagacgcaaacggttcatcatcaagctcatttaacttcctaatctacggtaaaaccggatggatcggtggtttactcggtaaactctgcgaagctcaaggaatcacttacacttacggctccggtcgtcttcaagatcgtcaatcgatcgtcgccgacatcgaatccgtgaaacctagccacgtgttcaacgctgctggagtcaccggtcgtcctaatgttgattggtgcgaatctcacaaagttgagacgattcgtactaatgtcgccggaaccctaactctcgctgacatttgcagagagaaaggacttgttctgatcaattacgctacgggttgtatatttgagtatgattcgggtcatcatctcgggtcgggtattggattcaaggaggaggatactcctaatttcaccggatctttctactctaaaaccaaagctatggtggaggagctgctcaagaactatgaaaatgtatgcacgctaagagtgcgaatgccgatttcatcggatctaacaaacccgagaaacttcatcacgaagattgctcggtatgagaaagttgtggacatcccaaactcgatgacaatcctcgatgagcttctcccgatatcaatcgaaatggcgaagaggaacttaaccgggatctacaatttcactaacccgggtgttgtgagccacaacgagatcttggagatgtacagagactacattgacccgagttttacttggaagaacttcacattggaggaacaagctaaagtgattgtggcgccaaggagtaacaatgagcttgatgcaactaagttgaagactgagttccctgagttgatgtctatcaaagagtctctgatcaagttcgtgtttgagcccaacaagaagactgaagttaaagcttgaaatgtggttttgtaaggtaaacggttcttaaccccaaaaaaacaaatcaaatgaaagacaaaaaaagtttgggtttttaaaagaagtatctttttttttttttgggtttatgggctgaaaaaattgttgtgttttttgtattttatttttttgtttttctttttcccaatgttgttgtattgttaaaataaacttttgtttcattacaaataagaaatgtactattttgc

SEQ ID NO: 4901 - protein, 327 aa, Arabidopsis thaliana
YHLLQIHTLSLISLRRKLSDHRQKKKMVADANGSSSSSFNFLIYGKTGWIGGLLGKLCEAQGITYTYGSGRLQDRQSIVADIESVKPSHVFNAAGVTGRPNVDWCESHKVETIRTNVAGTLTLADICREKGLVLINYATGCIFEYDSGHHLGSGIGFKEEDTPNFTGSFYSKTKAMVEELLKNYENVCTLRVRMPISSDLTNPRNFITKIARYEKVVDIPNSMTILDELLPISIEMAKRNLTGIYNFTNPGVVSHNEILEMYRDYIDPSFTWKNFTLEEQAKVIVAPRSNNELDATKLKTEFPELMSIKESLIKFVFEPNKKTEVKA

SEQ ID NO: 4902 - protein, 301 aa, Arabidopsis thaliana
MVADANGSSSSSFNFLIYGKTGWIGGLLGKLCEAQGITYTYGSGRLQDRQSIVADIESVKPSHVFNAAGVTGRPNVDWCESHKVETIRTNVAGTLTLADICREKGLVLINYATGCIFEYDSGHHLGSGIGFKEEDTPNFTGSFYSKTKAMVEELLKNYENVCTLRVRMPISSDLTNPRNFITKIARYEKVVDIPNSMTILDELLPISIEMAKRNLTGIYNFTNPGVVSHNEILEMYRDYIDPSFTWKNFTLEEQAKVIVAPRSNNELDATKLKTEFPELMSIKESLIKFVFEPNKKTEVKA

SEQ ID NO: 4903 - DNA, 815 bp, Arabidopsis thaliana
gtacatttgtttttaaccagttagcaacttcttcttccggaatctttaaaccaacaaaaaaaagttatcattcgggttaagatggagaaaccgggtcatgaaacggatattgcgggttcaagacgaacccatctgaagaaatcattcaaatccactcttcgacatcttctcactgcttgctccaaacaggattttgttgatattttctcgaaattcagtggggctgagcaagaactgctttttcagttgtatactcgggttgttgtgaatttgcatcagacaatagaggaagagtttgatgaacaatgtcacgaaactcaggtcggaccaattcttgatacagtcgaggagctggtcgaagaacagagtttggatcccttgttttctgataagactgatgtaatggcaatagcatatgatcttacaacatctaagaagaacgagatacaaaagttaacagttttgctccaaagggctgaagaacagaatcgccagaaggaagcccggatcagcatgctcaaaaaacaaacacaagatctctcaggcacagcggacagaatcgaaaagctgaatgccggggtctccggctactttgaaggaaaagacaagctacctccaatatagtttcgagaaaattgcaatgaagaagcgtgtcatttccattccctgcatttgtatatactttattatagagtcttaacaatctagtcagtagtcacaataacttgcttcatgtgtaaaccactgagaatctgaatgagtttgtactttggtattggtttgacgacaattcatgcaaaatattttccaaggtt

SEQ ID NO: 4904 - protein, 180 aa, Arabidopsis thaliana
MEKPGHETDIAGSRRTHLKKSFKSTLRHLLTACSKQDFVDIFSKFSGAEQELLFQLYTRVVVNLHQTIEEEFDEQCHETQVGPILDTVEELVEEQSLDPLFSDKTDVMAIAYDLTTSKKNEIQKLTVLLQRAEEQNRQKEARISMLKKQTQDLSGTADRIEKLNAGVSGYFEGKDKLPPI

SEQ ID NO: 4905 - DNA, 1760 bp, Arabidopsis thaliana
aaaaaacttaagaagaccgacttatttattttttatttttcttgatttcttcaaacgactattacgagaatacccctccttcctcatggaatatcgaaaattcgggtttctcagaaaaccgagcttgccatggatgttgacggagaaggtgatcgtggtcaaaaccctagaattatggagagggactcagattctatcaaagatccgatctcagagccttcatggtttacccccaaaaagcttctctttgtgttttgtgttgtcaacttaatcaattatatagatcgaggagctatagcaagtaatggtatcaatgggagtcgtggttcttgcacttcgagtggtacatgttcatctggcagcggaatacagggagatttcaacttgagcaattttgaagatggagttctgtcatctgctttcatggttgggcttcttgttgcctctcctatatttgcttccttagctaagagtgttaatccgtttagacttatcggagttgggttgtcaatctggactctcgctgtgattggctgcggtctttcgtttgatttttggtccatcacaatctgtcgcatgtttgttggtgttggtgaggcatcatttgtaagtcttgctgccccattcatcgacgataatgccccacatgatcagaaatcagcgtggcttgctgtattctacatgtgcattccgacaggctatgcttttggctacgtatatggtggagtggtggggagtgtccttccttggcgtgcagcattttggggagaagcaatacttatgcttccttttgctgttctaggttttgtcatcaaacccttgcatctgaaaggttttgctccagatgatacaggaaagccccggacagataacttaaacgttttgccagttggttatgggttctcagctgttatgaaagatttgaaattgcttttggtagataaggtttatgttacaaacattcttgggtatattgcttacaactttgttttaggcgcctattcatattggggaccaaaggctggttataacatatacaagatggaaaacgctgatatgatatttggaggggtcacagttgtatgcggaattgttggcacattatcaggaggagtgattctagattacatggatgccacaatttcaaatgcttttaaggttctttcagtttcaacgtttataggagcaatattttgctttgctgctttctgtttcaagagcatgtatgcatttttagctctttttgctgttggtgaacttcttgtctttgccacacagggtcctgtgaatttcatagttctccattgtgtcaaaccaagtctgagaccacttgcaatggcgatgtctactgtctctatccatatctttggagatgtaccttcctcaccactcgttggagttcttcaggactacgtgaacaattggagagtgacttctcttgttcttacattcgttctctttccagctgctgcaatttggtccatagggattttcctgaatagtgtggatcgatataacgaagattccgagcctgatgcagtaaccagagaatcaaccgctgcgcctcttctccaggaagcatgagacaaaaaaactcaaaaggtcactgtgagaattttatggtttattctcagttctttatctactttcttgtacaaatagaattgtggctgaaacataaacaaatgtcaaattaccttcatttgtatattcttgtttcactgtttgcaaaattatgaaaggaccatccctatttctct

SEQ ID NO: 4906 - protein, 484 aa, Arabidopsis thaliana
MDVDGEGDRGQNPRIMERDSDSIKDPISEPSWFTPKKLLFVFCVVNLINYIDRGAIASNGINGSRGSCTSSGTCSSGSGIQGDFNLSNFEDGVLSSAFMVGLLVASPIFASLAKSVNPFRLIGVGLSIWTLAVIGCGLSFDFWSITICRMFVGVGEASFVSLAAPFIDDNAPHDQKSAWLAVFYMCIPTGYAFGYVYGGVVGSVLPWRAAFWGEAILMLPFAVLGFVIKPLHLKGFAPDDTGKPRTDNLNVLPVGYGFSAVMKDLKLLLVDKVYVTNILGYIAYNFVLGAYSYWGPKAGYNIYKMENADMIFGGVTVVCGIVGTLSGGVILDYMDATISNAFKVLSVSTFIGAIFCFAAFCFKSMYAFLALFAVGELLVFATQGPVNFIVLHCVKPSLRPLAMAMSTVSIHIFGDVPSSPLVGVLQDYVNNWRVTSLVLTFVLFPAAAIWSIGIFLNSVDRYNEDSEPDAVTRESTAAPLLQEA

SEQ ID NO: 4907 - protein, 469 aa, Arabidopsis thaliana
MERDSDSIKDPISEPSWFTPKKLLFVFCVVNLINYIDRGAIASNGINGSRGSCTSSGTCSSGSGIQGDFNLSNFEDGVLSSAFMVGLLVASPIFASLAKSVNPFRLIGVGLSIWTLAVIGCGLSFDFWSITICRMFVGVGEASFVSLAAPFIDDNAPHDQKSAWLAVFYMCIPTGYAFGYVYGGVVGSVLPWRAAFWGEAILMLPFAVLGFVIKPLHLKGFAPDDTGKPRTDNLNVLPVGYGFSAVMKDLKLLLVDKVYVTNILGYIAYNFVLGAYSYWGPKAGYNIYKMENADMIFGGVTVVCGIVGTLSGGVILDYMDATISNAFKVLSVSTFIGAIFCFAAFCFKSMYAFLALFAVGELLVFATQGPVNFIVLHCVKPSLRPLAMAMSTVSIHIFGDVPSSPLVGVLQDYVNNWRVTSLVLTFVLFPAAAIWSIGIFLNSVDRYNEDSEPDAVTRESTAAPLLQEA

SEQ ID NO: 4908 - protein, 386 aa, Arabidopsis thaliana
MVGLLVASPIFASLAKSVNPFRLIGVGLSIWTLAVIGCGLSFDFWSITICRMFVGVGEASFVSLAAPFIDDNAPHDQKSAWLAVFYMCIPTGYAFGYVYGGVVGSVLPWRAAFWGEAILMLPFAVLGFVIKPLHLKGFAPDDTGKPRTDNLNVLPVGYGFSAVMKDLKLLLVDKVYVTNILGYIAYNFVLGAYSYWGPKAGYNIYKMENADMIFGGVTVVCGIVGTLSGGVILDYMDATISNAFKVLSVSTFIGAIFCFAAFCFKSMYAFLALFAVGELLVFATQGPVNFIVLHCVKPSLRPLAMAMSTVSIHIFGDVPSSPLVGVLQDYVNNWRVTSLVLTFVLFPAAAIWSIGIFLNSVDRYNEDSEPDAVTRESTAAPLLQEA

SEQ ID NO: 4909 - DNA, 1448 bp, Arabidopsis thaliana
atctctatgttgtagttcttgaacagttggctctcttttcaagaatcgtcgccgttgacctccgtgcctctccgatcaacttcccattcttttaaatgacgagagattcatcaaggaacagctcattaaagccatggcctcgaaaaaaatttctttttccttctgttgtgattgtcattgttgggataatcgtggcgtttacttatcagtccaagttgaaaccacctccgccgaagctatgtggctcctccggtggtccaccgatcacagcgccgcggataaagcttcaagatgggaggtatttggcttacaaagagcatggacttccaagagagaaagctaaccgcaaaatcgtcttcatccatggatccgattgttgtagacacgatgccgttttcgccactctgctttctccggatttagtagaggaactaggtgtatatatggtttcattcgacagaccgggctattgtgagagtgatccgcatccaagtcgtacaccgcgaagcttggtttcggatattgaagagctagctgatcagttgagtctaggatcgaaattttatgtgctcgggtactcgatgggaggacaagcagcatggggatgtcttaaatacattcctcataggttagccggagtaacactagttgctccagtggttaactattattggaagaacttacctttgaacgtttccactgaaggttttaactttcaacaaaagagagatcaattggcagttcgtgttgctcactatactccttggcttatctattggtggaacacacaaaaatggttccctggttcgagtattgcaaaccgagatcacagtctcttggcacagccggataaagatatcatttcgaagcttggttcttcgaggaaaccacattgggcagaggtaaggcagcaaggaatacatgagagtattaaccgtgacatgatcgttggttttgggaactgggaatttggtcctttagacctcgagaatccgtttttgaataaggaaggctctgtgcatttgtggcaaggagatgaggacatgttagtacctgcgaagctgcagcgttaccttgctcatcagcttccatgggttcactatcatgaggttccgagaagtggccacttcttccactacactaaaggtgtagttgatgacattgtaaagtcgctcttaacctccgatgtaagagcatctagagtttgtatttgatcatttgtagcttccaaaaactctgaaaaaaaatcccaaaaaaatacacggatacaatagagttatgtactagttacatttgtcagtatcgtagtttatttttatttggttacacgtgtaatttaatcgaccaagccttcatcaattgtcttgtcaagcttatcatgttctttaatttgatcttttagcaacatgtgtttggtctttttgttttatattctatgttagtctttt

SEQ ID NO: 4910 - protein, 372 aa, Arabidopsis thaliana
MTRDSSRNSSLKPWPRKKFLFPSVVIVIVGIIVAFTYQSKLKPPPPKLCGSSGGPPITAPRIKLQDGRYLAYKEHGLPREKANRKIVFIHGSDCCRHDAVFATLLSPDLVEELGVYMVSFDRPGYCESDPHPSRTPRSLVSDIEELADQLSLGSKFYVLGYSMGGQAAWGCLKYIPHRLAGVTLVAPVVNYYWKNLPLNVSTEGFNFQQKRDQLAVRVAHYTPWLIYWWNTQKWFPGSSIANRDHSLLAQPDKDIISKLGSSRKPHWAEVRQQGIHESINRDMIVGFGNWEFGPLDLENPFLNKEGSVHLWQGDEDMLVPAKLQRYLAHQLPWVHYHEVPRSGHFFHYTKGVVDDIVKSLLTSDVRASRVCI

SEQ ID NO: 4911 - protein, 256 aa, Arabidopsis thaliana
MVSFDRPGYCESDPHPSRTPRSLVSDIEELADQLSLGSKFYVLGYSMGGQAAWGCLKYIPHRLAGVTLVAPVVNYYWKNLPLNVSTEGFNFQQKRDQLAVRVAHYTPWLIYWWNTQKWFPGSSIANRDHSLLAQPDKDIISKLGSSRKPHWAEVRQQGIHESINRDMIVGFGNWEFGPLDLENPFLNKEGSVHLWQGDEDMLVPAKLQRYLAHQLPWVHYHEVPRSGHFFHYTKGVVDDIVKSLLTSDVRASRVCI

SEQ ID NO: 4912 - protein, 210 aa, Arabidopsis thaliana
MGGQAAWGCLKYIPHRLAGVTLVAPVVNYYWKNLPLNVSTEGFNFQQKRDQLAVRVAHYTPWLIYWWNTQKWFPGSSIANRDHSLLAQPDKDIISKLGSSRKPHWAEVRQQGIHESINRDMIVGFGNWEFGPLDLENPFLNKEGSVHLWQGDEDMLVPAKLQRYLAHQLPWVHYHEVPRSGHFFHYTKGVVDDIVKSLLTSDVRASRVCI

SEQ ID NO: 4913 - DNA, 1138 bp, Arabidopsis thaliana
tcattcttcaaataaattaaaatcttcgttggcgttgttgttggttgcgttacagattttggactaatcattattttcgtgcctgcaaagtcagcacgacgatcgcgtttcgatcttcaaagtagaagaagacccgccacaatcacaaatcgcggtgcatatagtctaaagggtcaatggcctcttcttcggatccatggatgagagagtacaatgaggctttgaaactctctgaggatattaatggcatgatgtctgaaaggaatgcctccgggttaaccgggcctgatgctcaacgtcgtgcctctgcaattcgaagaaagatcaccattttggggactcgattagacagtctgcaatcccttcttgtcaaggttcctggcaagcagcatgtttcggagaaagagatgaatcgtcgcaaggatatggttgggaatttgagatcaaaaacaaatcaggtggcctctgctttgaatatgtcaaactttgcaaacagagacagcttgtttggaacagatttaaagccggatgatgcgataaatagagtctctggcatggacaaccaaggaattgttgtatttcaacggcaagttatgagagaacaagacgagggacttgagaagttggaggaaacagtcatgagtaccaaacacattgctctcgctgttaacgaggagctcaccctgcagacaaggcttattgatgacttagattacgatgtggatatcactgactctcgcttacggcgtgttcaaaagagccttgccttgatgaacaagagcatgaaaagtggttgctcatgcatgtctatgctcttgtctgtgcttggaatcgttggtcttgctcttgtaatttggctgctggttaagtacctgtaataatgccaatgtggtggcaacttgtgaaagctcatccttttctctcagcctatcctctgtgcttaatggttgttttctattccttctatcgattgattcgtgtctgtgaggcaaagaagaataccactgcgtgtaagaaaccctcagaagtacataatctgtattaccttcgtatcaaccacgaattgtaaactaagttgacatttgtctatatatggtatggctcctacttggttcaataaagagaactagtggcttgg

SEQ ID NO: 4914 - protein, 233 aa, Arabidopsis thaliana
MASSSDPWMREYNEALKLSEDINGMMSERNASGLTGPDAQRRASAIRRKITILGTRLDSLQSLLVKVPGKQHVSEKEMNRRKDMVGNLRSKTNQVASALNMSNFANRDSLFGTDLKPDDAINRVSGMDNQGIVVFQRQVMREQDEGLEKLEETVMSTKHIALAVNEELTLQTRLIDDLDYDVDITDSRLRRVQKSLALMNKSMKSGCSCMSMLLSVLGIVGLALVIWLLVKYL

SEQ ID NO: 4915 - protein, 225 aa, Arabidopsis thaliana
MREYNEALKLSEDINGMMSERNASGLTGPDAQRRASAIRRKITILGTRLDSLQSLLVKVPGKQHVSEKEMNRRKDMVGNLRSKTNQVASALNMSNFANRDSLFGTDLKPDDAINRVSGMDNQGIVVFQRQVMREQDEGLEKLEETVMSTKHIALAVNEELTLQTRLIDDLDYDVDITDSRLRRVQKSLALMNKSMKSGCSCMSMLLSVLGIVGLALVIWLLVKYL

SEQ ID NO: 4916 - protein, 209 aa, Arabidopsis thaliana
MMSERNASGLTGPDAQRRASAIRRKITILGTRLDSLQSLLVKVPGKQHVSEKEMNRRKDMVGNLRSKTNQVASALNMSNFANRDSLFGTDLKPDDAINRVSGMDNQGIVVFQRQVMREQDEGLEKLEETVMSTKHIALAVNEELTLQTRLIDDLDYDVDITDSRLRRVQKSLALMNKSMKSGCSCMSMLLSVLGIVGLALVIWLLVKYL

SEQ ID NO: 4917 - DNA, 1779 bp, Arabidopsis thaliana
acttgcactcctctttttctttctttctttcttgttggtctctcttacttctttcttattcatctaaaacaatttcgatccatttacacataaatatatgtaactggccgtagaagaaacacattgaaggaagagatggctcataggagattaatcatgacgatgacaaagatgatgatgatggtgaccatgatgatgatgatgatgatggataaaacatgcatatgtgcggacatttccagaggcagttttccaaagggctttgtctttggaactgcttcttcggcttttcagcatgaaggagcggtgaaggcagaaggcagaggtcctacgatatgggacacattttcccacacttttggtaaaatcaccgattttagcaatgctgatgtcgctgttgatcagtatcatcgttacgaggaagatgtacaacttatgaagaatatgggaatggacgcttacagattttccatttcttggacccgcatctttccaaatggtgttggacatataaatgaagccggaatcgatcactacaacaaactcataaatgctttacttgctaaagggatcgagccgtacgtgacactgtaccactgggatcttccacaagcacttcatgatcgatacctcggttggctaaacccacaaatcataaatgattttgcagcgtatgcggaggtttgtttccagagatttggagatagagtgaagcactggatcacgttcaacgagccacacacgttcgcgatacaaggctatgatgttggcctacaagctccaggccgttgcactattctttttaagctcacttgtcgcgaaggaaactcatcgaccgagccttacattgttggtcacaatgttattttaactcacgccacagtatccgatatctataggaaaaagtataaggcaaagcaaggaggttcgttagggattgcgtttgatgtaatgtggtttgaaccagagtcgaacaagacagaggacattgaagctgcacaaagagctcaagactttcaacttggctggtttttggatccgttgatgtttggggattacccaagctcgatgagaagcagagtcggaagcagattaccggtgtttacaggatctcaatcttctctggtgaagggttctttagattttgtagggattaatcactacacaacgtactacgcaaggaacaatgccaccaatctcattggcactcttctacacgacgccgtttctgattctggaaccgtcactctaccgtttaagggtttaagcacgattggagatagggcaagttcgatatggttgtacatagtgcctagagggatgagaagcttgatgaattacattaaacatagatatggaaaccctccagtcttcatcactgaaaatggaatggacgacccaaacagcattctgatctcaagaaaagacgctctcaaagatgcaaagaggatcaaataccatcatgattacctttctagcttacaagcttcgataaaagaggatggatgtaatgtcaaagggtacttcgtatggtcgctattggacaattgggaatgggcagcaggttatagttcaagatttggtctctacttcgttgattacagagacaacctcaagagatatcctaaagactctgttcattggttcacttctttcttaaactccacttcttgatttttccttcccattttattggtttagcgtaatgtatacaaaagtttatgattagttatggatttcggtttagataaatatatttaaatcaagatatgttgatat

SEQ ID NO: 4918 - protein, 512 aa, Arabidopsis thaliana
MAHRRLIMTMTKMMMMVTMMMMMMMDKTCICADISRGSFPKGFVFGTASSAFQHEGAVKAEGRGPTIWDTFSHTFGKITDFSNADVAVDQYHRYEEDVQLMKNMGMDAYRFSISWTRIFPNGVGHINEAGIDHYNKLINALLAKGIEPYVTLYHWDLPQALHDRYLGWLNPQIINDFAAYAEVCFQRFGDRVKHWITFNEPHTFAIQGYDVGLQAPGRCTILFKLTCREGNSSTEPYIVGHNVILTHATVSDIYRKKYKAKQGGSLGIAFDVMWFEPESNKTEDIEAAQRAQDFQLGWFLDPLMFGDYPSSMRSRVGSRLPVFTGSQSSLVKGSLDFVGINHYTTYYARNNATNLIGTLLHDAVSDSGTVTLPFKGLSTIGDRASSIWLYIVPRGMRSLMNYIKHRYGNPPVFITENGMDDPNSILISRKDALKDAKRIKYHHDYLSSLQASIKEDGCNVKGYFVWSLLDNWEWAAGYSSRFGLYFVDYRDNLKRYPKDSVHWFTSFLNSTS

SEQ ID NO: 4919 - protein, 505 aa, Arabidopsis thaliana
MTMTKMMMMVTMMMMMMMDKTCICADISRGSFPKGFVFGTASSAFQHEGAVKAEGRGPTIWDTFSHTFGKITDFSNADVAVDQYHRYEEDVQLMKNMGMDAYRFSISWTRIFPNGVGHINEAGIDHYNKLINALLAKGIEPYVTLYHWDLPQALHDRYLGWLNPQIINDFAAYAEVCFQRFGDRVKHWITFNEPHTFAIQGYDVGLQAPGRCTILFKLTCREGNSSTEPYIVGHNVILTHATVSDIYRKKYKAKQGGSLGIAFDVMWFEPESNKTEDIEAAQRAQDFQLGWFLDPLMFGDYPSSMRSRVGSRLPVFTGSQSSLVKGSLDFVGINHYTTYYARNNATNLIGTLLHDAVSDSGTVTLPFKGLSTIGDRASSIWLYIVPRGMRSLMNYIKHRYGNPPVFITENGMDDPNSILISRKDALKDAKRIKYHHDYLSSLQASIKEDGCNVKGYFVWSLLDNWEWAAGYSSRFGLYFVDYRDNLKRYPKDSVHWFTSFLNSTS

SEQ ID NO: 4920 - protein, 503 aa, Arabidopsis thaliana
MTKMMMMVTMMMMMMMDKTCICADISRGSFPKGFVFGTASSAFQHEGAVKAEGRGPTIWDTFSHTFGKITDFSNADVAVDQYHRYEEDVQLMKNMGMDAYRFSISWTRIFPNGVGHINEAGIDHYNKLINALLAKGIEPYVTLYHWDLPQALHDRYLGWLNPQIINDFAAYAEVCFQRFGDRVKHWITFNEPHTFAIQGYDVGLQAPGRCTILFKLTCREGNSSTEPYIVGHNVILTHATVSDIYRKKYKAKQGGSLGIAFDVMWFEPESNKTEDIEAAQRAQDFQLGWFLDPLMFGDYPSSMRSRVGSRLPVFTGSQSSLVKGSLDFVGINHYTTYYARNNATNLIGTLLHDAVSDSGTVTLPFKGLSTIGDRASSIWLYIVPRGMRSLMNYIKHRYGNPPVFITENGMDDPNSILISRKDALKDAKRIKYHHDYLSSLQASIKEDGCNVKGYFVWSLLDNWEWAAGYSSRFGLYFVDYRDNLKRYPKDSVHWFTSFLNSTS

SEQ ID NO: 4921 - DNA, 1267 bp, Arabidopsis thaliana
tgaagcacaaagtgagagaaagaaagaacccaaaagaaagaaagagagagagagagaatgcagagattagctccattgatggaagaaccaatagatgaagaagatcaagaagaagaaagaggaggaagaaaaggatcaacaagatccaaatcatggaagaaatggataaagacacaattgcagttcatcgtcttccccaagaaaccagacatgaagcttcttcttagtgttatgggatgtcctctcttccctgtccctcctctctccaaaatctctcttcaacaggtatcatcatcagcacaatacataatacaacagtttgccgcagcaaccggatgcaagaaacttgcgggcgaaatcaaaaacactttcgtgaccggaaaaatcacaatgactatggtgagtgatattaatagctcaaccgcggtcagtagtgcctcgtctgtgtctcataagggatgctttgtcatgtggcaaatgctacctgaaaaatggcttatcgagttggttggtggcggccataaggtttcagccggtagtgatggagaaattacttggcgttatacaccatggctcggtgatcatgcagctaaaggtgccataaggcctttgcgacgtgctctacaagggttggatcctctaaccatttcatcagttttctcatcggcacaattcgttggagagaaagaaatcaatgggaaggattgtttcattctcaagttatcaaccgaccaaatcgatttatcaaaacgcagtgactctaccgctgagatgatcaaacacgtcgcattcggttacttcagccaaaaaagtggcctcttaatttgccttgaagactcttccttaaccaggattcagataccaggaactgtgccaacatattgggagacctcaatgtcgtcgtggatggaagactaccgagcaatagaaggtagtgaagtggtaatagcacactcaggtaagacagatgtgttaatctcaagatttggagaaactctcaaaggaggaatctctgtgactcgaatggaagagaaatggactatagacgatgttgcattcgacgtgcctggtctctccgttgattgttttattcctcctaaagagatgaagatggattttcaccaccaagatgctcaaaaacatttaccaaactacaatacatgatcgaggcaaaactgtaaaattagaaaaatgtaacagagtggggtgtttttgactcaatttaaaagttgtggggttattttaaaactatatatatagttctacc

SEQ ID NO: 4922 - protein, 368 aa, Arabidopsis thaliana
MQRLAPLMEEPIDEEDQEEERGGRKGSTRSKSWKKWIKTQLQFIVFPKKPDMKLLLSVMGCPLFPVPPLSKISLQQVSSSAQYIIQQFAAATGCKKLAGEIKNTFVTGKITMTMVSDINSSTAVSSASSVSHKGCFVMWQMLPEKWLIELVGGGHKVSAGSDGEITWRYTPWLGDHAAKGAIRPLRRALQGLDPLTISSVFSSAQFVGEKEINGKDCFILKLSTDQIDLSKRSDSTAEMIKHVAFGYFSQKSGLLICLEDSSLTRIQIPGTVPTYWETSMSSWMEDYRAIEGSEVVIAHSGKTDVLISRFGETLKGGISVTRMEEKWTIDDVAFDVPGLSVDCFIPPKEMKMDFHHQDAQKHLPNYNT

SEQ ID NO: 4923 - protein, 361 aa, Arabidopsis thaliana
MEEPIDEEDQEEERGGRKGSTRSKSWKKWIKTQLQFIVFPKKPDMKLLLSVMGCPLFPVPPLSKISLQQVSSSAQYIIQQFAAATGCKKLAGEIKNTFVTGKITMTMVSDINSSTAVSSASSVSHKGCFVMWQMLPEKWLIELVGGGHKVSAGSDGEITWRYTPWLGDHAAKGAIRPLRRALQGLDPLTISSVFSSAQFVGEKEINGKDCFILKLSTDQIDLSKRSDSTAEMIKHVAFGYFSQKSGLLICLEDSSLTRIQIPGTVPTYWETSMSSWMEDYRAIEGSEVVIAHSGKTDVLISRFGETLKGGISVTRMEEKWTIDDVAFDVPGLSVDCFIPPKEMKMDFHHQDAQKHLPNYNT

SEQ ID NO: 4924 - protein, 317 aa, Arabidopsis thaliana
MKLLLSVMGCPLFPVPPLSKISLQQVSSSAQYIIQQFAAATGCKKLAGEIKNTFVTGKITMTMVSDINSSTAVSSASSVSHKGCFVMWQMLPEKWLIELVGGGHKVSAGSDGEITWRYTPWLGDHAAKGAIRPLRRALQGLDPLTISSVFSSAQFVGEKEINGKDCFILKLSTDQIDLSKRSDSTAEMIKHVAFGYFSQKSGLLICLEDSSLTRIQIPGTVPTYWETSMSSWMEDYRAIEGSEVVIAHSGKTDVLISRFGETLKGGISVTRMEEKWTIDDVAFDVPGLSVDCFIPPKEMKMDFHHQDAQKHLPNYNT

SEQ ID NO: 4925 - DNA, 1359 bp, Arabidopsis thaliana
aaaaaaaaagaaagattactaacgccgactctctaaaactctctcaaaccataaaaaatattctccgatcatcattttaatggagagtacagattcttccggtggtcctccgccgccgcaaccaaacctccctccaggattccggtttcatccaacagacgaagaacttgtaattcattacctcaaacgcaaagcagattctgttcctttaccagtcgcgatcatcgccgacgttgatctttacaaatttgatccatgggaacttcccgcgaaagcttcgtttggagaacaagaatggtattttttcagtccaagagatcggaaatatcccaacggagctagacctaaccgagctgcgacttccggttattggaaagcgactggtacagataaaccggtgatttcaaccggcggtggtggtagtaaaaaagtgggagttaaaaaggctctagtgttttacagtggtaaaccaccaaaaggagttaaatcagattggattatgcatgaatatcggttaactgataataaacctactcatatttgtgacttcggcaacaagaaaaactctctcaggcttgatgattgggtgttgtgtcgtatctacaagaaaaacaatagtacagcatctagacatcatcatcatcttcatcatattcatctagataatgatcatcatcgtcatgatatgatgattgatgatgatcgattccgtcatgttcctcctggtcttcacttcccggcgattttttctgacaataatgatccgacggctatatatgatggtggcggcggcggatacggaggtggaagttactcgatgaatcattgtttcgcatctggatcaaagcaggagcagttgtttccaccggtgatgatgatgactagtctaaatcaagattccggtattggatcgtcgtcgtcacctagcaagagatttaacggcggcggcgttggagattgttcgacttctatggcggcgacgccgttaatgcagaaccaaggtgggatttaccaattgcctggtttgaattggtattcttgaaaacaatttacgatgaagaatttttaaaatttgtgtatatatatacggtttgagtgattagggggcattgggggatttatttacggttgattattattgtagtgttatagaactaaggagattaaattaaatagattggaggagaggtataaggtaacatatagaaattatacaacaatagtttaaatattcttttcttttctttttcatgttattatttttactaatgtataggtgatgattatacttagatgtttgtagcttgtataaattaatgcatgcatatatataaaaatatattaacagttatagaaact

SEQ ID NO: 4926 - protein, 320 aa, Arabidopsis thaliana
MESTDSSGGPPPPQPNLPPGFRFHPTDEELVIHYLKRKADSVPLPVAIIADVDLYKFDPWELPAKASFGEQEWYFFSPRDRKYPNGARPNRAATSGYWKATGTDKPVISTGGGGSKKVGVKKALVFYSGKPPKGVKSDWIMHEYRLTDNKPTHICDFGNKKNSLRLDDWVLCRIYKKNNSTASRHHHHLHHIHLDNDHHRHDMMIDDDRFRHVPPGLHFPAIFSDNNDPTAIYDGGGGGYGGGSYSMNHCFASGSKQEQLFPPVMMMTSLNQDSGIGSSSSPSKRFNGGGVGDCSTSMAATPLMQNQGGIYQLPGLNWYS

SEQ ID NO: 4927 - protein, 180 aa, Arabidopsis thaliana
MHEYRLTDNKPTHICDFGNKKNSLRLDDWVLCRIYKKNNSTASRHHHHLHHIHLDNDHHRHDMMIDDDRFRHVPPGLHFPAIFSDNNDPTAIYDGGGGGYGGGSYSMNHCFASGSKQEQLFPPVMMMTSLNQDSGIGSSSSPSKRFNGGGVGDCSTSMAATPLMQNQGGIYQLPGLNWYS

SEQ ID NO: 4928 - DNA, 2167 bp, Arabidopsis thaliana
tggacatcaaaaacacgaatatcgatagtacacttctacgtgcaattttctcctttctcttcctggacatctgtctgtttattacattttcttgtaatctctttttggggttttacaatatctatcccctaaagtttcggaaaattctgtttttctgttctcattcttcgtgatctttttcactttcttcaaaaaaaaaacatgtgtggaatacttgccgtgttaggatgttccgatgattctcaggccaagagagttcgtgttcttgagctttctcgcagattgaggcacagaggacctgactggagtggtttatatcagaacggagataattacttggcccatcaacgtcttgccgtcatcgatcctgcttccggtgatcaacctcttttcaacgaggacaagaccattgttgtcacggtgaacggagagatttataaccatgaggagctgagaaaacgtctgaagaatcacaagttccgtactggtagtgattgtgaagtcattgctcacttgtacgaggagtatggtgtggattttgttgatatgttggatggaatattctcctttgtgttgctcgacacacgagataactctttcatggtggctcgtgatgcgattggtgtcacttcgctctacattggttggggactagacggatctgtgtggatatcttcagagatgaaaggcctaaacgatgactgtgagcatttcgaaacgtttcctccaggtcatttttattcaagcaaattaggagggtttaagcaatggtataatcctccttggttcaatgaatctgttccttcaacgccttatgagcctcttgcgataagacgcgcctttgaaaacgctgtgattaagcggttgatgactgatgttccatttggagttttgctctctggtggtcttgattcttcccttgttgcctccatcactgcacgtcacttggccggtactaaggcggctaagcaatggggtcctcagctccattccttttgcgttggtcttgagggctcaccggacttgaaggcagggaaagaggtggcggaatatttggggacggtgcaccacgagttccacttctcggtgcaggacgggattgatgcgatagaggatgtgatttaccatgttgagacctatgatgtgacgactatcagagcgagcacaccgatgttcttgatgtcccggaaaatcaagtctctaggggtcaagatggttctctccggcgaaggtgcggacgagatctttggagggtacctctatttccacaaggcacctaacaagaaagagtttcaccaagaaacttgtcgcaagatcaaggctcttcacaagtatgactgtctaagagccaacaaatctacctctgcctttggactagaggcacgtgttcctttccttgacaaagacttcatcaacacagctatgtctctcgaccctgaatccaagatgatcaagccagaggaaggaaggatcgagaaatgggttctaaggagagcctttgacgacgaagaacgtccttatctaccaaaacacattctctacagacagaaagaacagttcagtgatggtgttggctacagttggatcgatggcctgaaagatcacgctgctcaaaatgtcaatgacaagatgatgtcgaacgcggggcatatcttccctcacaacactccaaacactaaagaagcttactactacagaatgatctttgaaaggttcttcccgcagaactctgcgagactaacggttcctggaggtgccaccgtggcttgttcgactgcaaaggcagtggagtgggatgcaagctggtccaacaatatggatccatcaggaagagccgctatcggagttcacctttcggcctacgatggcaagaacgtggcattgaccataccaccacttaaggcaattgacaacatgccgatgatgatgggtcaaggagttgtgattcagtcataacttcgaaggagaaatggatgaaatatgtgttatatcttcccaatgggtgaagtgttttgtatgattttaaaaataagaatgtgatcctttttttttcctatgaagatctgaatgtataatctatcttgtaaaaatttgtttctttgtaagatttgaatgtaccgcttttacgtagatcgatgtacatcaatcttataagtttcaattatgg

SEQ ID NO: 4929 - protein, 584 aa, Arabidopsis thaliana
MCGILAVLGCSDDSQAKRVRVLELSRRLRHRGPDWSGLYQNGDNYLAHQRLAVIDPASGDQPLFNEDKTIVVTVNGEIYNHEELRKRLKNHKFRTGSDCEVIAHLYEEYGVDFVDMLDGIFSFVLLDTRDNSFMVARDAIGVTSLYIGWGLDGSVWISSEMKGLNDDCEHFETFPPGHFYSSKLGGFKQWYNPPWFNESVPSTPYEPLAIRRAFENAVIKRLMTDVPFGVLLSGGLDSSLVASITARHLAGTKAAKQWGPQLHSFCVGLEGSPDLKAGKEVAEYLGTVHHEFHFSVQDGIDAIEDVIYHVETYDVTTIRASTPMFLMSRKIKSLGVKMVLSGEGADEIFGGYLYFHKAPNKKEFHQETCRKIKALHKYDCLRANKSTSAFGLEARVPFLDKDFINTAMSLDPESKMIKPEEGRIEKWVLRRAFDDEERPYLPKHILYRQKEQFSDGVGYSWIDGLKDHAAQNVNDKMMSNAGHIFPHNTPNTKEAYYYRMIFERFFPQNSARLTVPGGATVACSTAKAVEWDASWSNNMDPSGRAAIGVHLSAYDGKNVALTIPPLKAIDNMPMMMGQGVVIQS

SEQ ID NO: 4930 - protein, 469 aa, Arabidopsis thaliana
MLDGIFSFVLLDTRDNSFMVARDAIGVTSLYIGWGLDGSVWISSEMKGLNDDCEHFETFPPGHFYSSKLGGFKQWYNPPWFNESVPSTPYEPLAIRRAFENAVIKRLMTDVPFGVLLSGGLDSSLVASITARHLAGTKAAKQWGPQLHSFCVGLEGSPDLKAGKEVAEYLGTVHHEFHFSVQDGIDAIEDVIYHVETYDVTTIRASTPMFLMSRKIKSLGVKMVLSGEGADEIFGGYLYFHKAPNKKEFHQETCRKIKALHKYDCLRANKSTSAFGLEARVPFLDKDFINTAMSLDPESKMIKPEEGRIEKWVLRRAFDDEERPYLPKHILYRQKEQFSDGVGYSWIDGLKDHAAQNVNDKMMSNAGHIFPHNTPNTKEAYYYRMIFERFFPQNSARLTVPGGATVACSTAKAVEWDASWSNNMDPSGRAAIGVHLSAYDGKNVALTIPPLKAIDNMPMMMGQGVVIQS

SEQ ID NO: 4931 - protein, 451 aa, Arabidopsis thaliana
MVARDAIGVTSLYIGWGLDGSVWISSEMKGLNDDCEHFETFPPGHFYSSKLGGFKQWYNPPWFNESVPSTPYEPLAIRRAFENAVIKRLMTDVPFGVLLSGGLDSSLVASITARHLAGTKAAKQWGPQLHSFCVGLEGSPDLKAGKEVAEYLGTVHHEFHFSVQDGIDAIEDVIYHVETYDVTTIRASTPMFLMSRKIKSLGVKMVLSGEGADEIFGGYLYFHKAPNKKEFHQETCRKIKALHKYDCLRANKSTSAFGLEARVPFLDKDFINTAMSLDPESKMIKPEEGRIEKWVLRRAFDDEERPYLPKHILYRQKEQFSDGVGYSWIDGLKDHAAQNVNDKMMSNAGHIFPHNTPNTKEAYYYRMIFERFFPQNSARLTVPGGATVACSTAKAVEWDASWSNNMDPSGRAAIGVHLSAYDGKNVALTIPPLKAIDNMPMMMGQGVVIQS

SEQ ID NO: 4932 - DNA, 1545 bp, Arabidopsis thaliana
aaaaaaaaaaatctgaaattctcaggcgagattccggaagcaaaacattcctaaatttcgccaagtgatccgccatgggagaagagaagtctctgcttcagttccgtagttttccttcactcaagacctctgatttcgctctcaccgaagaaccttcatggaggctggagaacaacgtgtcgtcgaatcgccggagaggaaacaagagaagcggtggcgtttttaccaattttgcgtccctttccgtagcgattaggagagatcggagagaatctacatttaacggtcgtaatggcggcggaggcggagcgttcgcatcggtttcggtggtgattccgaaggaagaggatgaattcgcgcctacctcggcccagctgttgaaaaaccccattgctttactgtcgatagtaccgaaagacgccgcactattcttcgccggagcgttcgccggagccgccgcaaagtcagtgacggcaccgcttgaccgaataaagctcctaatgcagacacatggtgttcgagctgggcaacaaagtgctaagaaggctattggtttcattgaggccattactcttatcggaaaggaagaaggtattaaaggttattggaaaggaaatctacctcaggtgataaggattgtaccttatagcgcagtccagttgtttgcatatgaaacatacaagaaactcttcagggggaaagacggtcaattgtcagtcctcggaaggctcggtgctggtgcttgtgctggcatgacgtctactctgattacataccctttagatgtgctgagattgaggttagctgttgaaccaggttatcgaaccatgtcccaggttgccttgaacatgctgcgggaggaaggagttgcatcattctacaacggtctaggtccttcgcttttaagtatagctccttacattgccatcaacttctgcgtctttgatctggtaaagaaatctctgccagagaagtatcaacaaaagacacaatcatctttgttaacagcagtagtagctgctgctattgctaccggtacttgctatccattggataccattagaaggcagatgcaattgaagggtactccatataaatcggtattagacgctttctcaggtatcattgcgcgtgaaggagttgttggcttgtaccgtggctttgtccccaatgcactcaaaagcatgccaaacagcagtattaagcttacaacattcgacatcgtcaagaaactcatagcagcgagtgagaaggagatccaaagaatcgcggatgataaccgcaagaaagcaagtcctaacacaatcgatgaacaaacctgaagacgcaattttggatttccacaaggtcatttttgcccgttatcttatgacctttgtttgtgtgttttgtaatttggaatgtaataagttgtatgttctcctcataattcaaaatgtgcttgaattgaatcctgaagccagagagggtaataaatggctgtttgtgttacgtttggtcgcgctggttttgtataaaccgaatttaaccgggttgctacactcg

SEQ ID NO: 4933 - protein, 415 aa, Arabidopsis thaliana
MGEEKSLLQFRSFPSLKTSDFALTEEPSWRLENNVSSNRRRGNKRSGGVFTNFASLSVAIRRDRRESTFNGRNGGGGGAFASVSVVIPKEEDEFAPTSAQLLKNPIALLSIVPKDAALFFAGAFAGAAAKSVTAPLDRIKLLMQTHGVRAGQQSAKKAIGFIEAITLIGKEEGIKGYWKGNLPQVIRIVPYSAVQLFAYETYKKLFRGKDGQLSVLGRLGAGACAGMTSTLITYPLDVLRLRLAVEPGYRTMSQVALNMLREEGVASFYNGLGPSLLSIAPYIAINFCVFDLVKKSLPEKYQQKTQSSLLTAVVAAAIATGTCYPLDTIRRQMQLKGTPYKSVLDAFSGIIAREGVVGLYRGFVPNALKSMPNSSIKLTTFDIVKKLIAASEKEIQRIADDNRKKASPNTIDEQT

SEQ ID NO: 4934 - protein, 273 aa, Arabidopsis thaliana
MQTHGVRAGQQSAKKAIGFIEAITLIGKEEGIKGYWKGNLPQVIRIVPYSAVQLFAYETYKKLFRGKDGQLSVLGRLGAGACAGMTSTLITYPLDVLRLRLAVEPGYRTMSQVALNMLREEGVASFYNGLGPSLLSIAPYIAINFCVFDLVKKSLPEKYQQKTQSSLLTAVVAAAIATGTCYPLDTIRRQMQLKGTPYKSVLDAFSGIIAREGVVGLYRGFVPNALKSMPNSSIKLTTFDIVKKLIAASEKEIQRIADDNRKKASPNTIDEQT

SEQ ID NO: 4935 - DNA, 2663 bp, Arabidopsis thaliana
gggtctaaatcgcgagttttcgcgtaggtttgagcaaaaaaaaaaagagagagagtgcacagtgcgcttttggtagagagaaagggttgttattatttaggattgatgtcttcttcttcctcttcgtgattctctcacacaattttcacccattttcatgtctcttcctaccaaacgctctactttctccgccgcttctgcctccgacgactcttcttactcttctcctccgatgaaaaaggccaaaaacgacctccaccattcccctcaacaccctaataccgccgacaaggttgttggctttcatatggaggaagatccaactcccgccgccgctaatctctctcggaagaaagctacacttccgcaacctactaagaagtttgtaatcaagctcaataaagccaaaccaactctaccaacaaactttgaggagaatacatgggagaagttgcagtcagctatcagagctatattcctcaaaaaaaaaatttcgtttgacctcgagagcctttaccaggctgttgataacctttgcttgcataagttggatggaaagctttatgaccagattgagaaggagtgtgaagaacacatctctgcagctttgcaatctttagttgggcagaacactgatctgactgttttcttgtcacgtgttgagaaatgctggcaagacttttgtgaccagatgctcatgattcgtagtatagccttgactctggataggaagtatgtgatacagaatccaaatgtacgttcattatgggagatgggtttgcagcttttccggaagcatctttctctggcccctgaagttgagcagaggacggttaaaggtctcttaagtatgattgaaaaagaaaggttagcagaagctgttaataggactctactaagccatcttttgaagatgtttactgcactgggaatttatatggaaagctttgagaaacctttccttgaagggacctctgaattttatgccgctgaaggaatgaaatacatgcagcagtctgacgttccggagtacctgaagcatgttgagggaaggttgcatgaagagaatgagagatgcatactctacatagatgcagtaaccaggaaaccattgatcacaactgttgaaaggcaacttctcgaacgtcatatacttgttgttcttgaaaagggttttacaacattaatggatggacgtcgtacggaggaccttcagaggatgcaaaccttgttttctagggtcaatgcacttgagtctctgaggcaggcgctaagttcatatgttcggaaaactgggcagaagattgttatggatgaagagaaagacaaagatatggtacaatcactgttggacttcaaggcttctcttgacataatatgggaagagagcttttacaagaacgaatcatttggtaacacaatcaaagattcgtttgagcatctgattaatcttcgacagaaccggccagctgagcttattgccaagtttttggacgagaaactccgtgctgggaataagggtacttctgaagaagaattggagagtgttcttgaaaaagtcttggttttgttcagatttatccagggtaaagatgtgttcgaagcattttacaaaaaggatcttgcgaagagactcctgttgggaaagagtgcttcaatcgatgctgagaaatccatgatctctaagcttaagactgagtgtggtagccagtttacaaacaagctcgaagggatgttcaaggatattgaattgtcaaaggaaatcaacgagtcattcaaacaatcttcccaggccagaacaaaactgccatcgggaattgagatgagtgtccacgttttaacaacagggtactggccaacatatccgcctatggatgttaagcttcctcatgaactaaatgtctatcaggatatcttcaaagagttctatttaagcaagtacagtggtaggaggttaatgtggcaaaattcattaggccactgtgttttaaaggcagatttctccaaaggtaaaaaggagctggctgtttccctgtttcaggctgttgtgttaatgttatttaacgatgcaatgaaacttagctttgaagacattaaagattccaccagcatagaggacaaggagctgaggaggactttgcagtcgcttgcttgtgggaaagtccgtgtcctgcagaagaatcctaagggaagagatgtagaagacggtgatgaatttgaatttaatgatgagtttgcagctccgctgtatcgcattaaggtaaatgcgatccagatgaaagagacagtagaggagaacacaagtacaacggaaagagtattccaggaccgacaataccagatcgatgcagccattgttcgtattatgaagacaagaaaagtcttgagccatactcttctaatcactgagctcttccaacagctcaaattcccgataaagcctgctgatctgaagaagaggattgagagcttgatcgatcgagaatatttggagagggaaaaaagcaaccctcagatatacaattatcttgcttagaatctctttggtaaacacaccttttgaatattttcctttttgtatatttattgacaaacaaacgatgaccgaaattttcttatcagtttgaaaaaaaaaaagaactctcgatattccaatcatctct

SEQ ID NO: 4936 - protein, 792 aa, Arabidopsis thaliana
MSLPTKRSTFSAASASDDSSYSSPPMKKAKNDLHHSPQHPNTADKVVGFHMEEDPTPAAANLSRKKATLPQPTKKFVIKLNKAKPTLPTNFEENTWEKLQSAIRAIFLKKKISFDLESLYQAVDNLCLHKLDGKLYDQIEKECEEHISAALQSLVGQNTDLTVFLSRVEKCWQDFCDQMLMIRSIALTLDRKYVIQNPNVRSLWEMGLQLFRKHLSLAPEVEQRTVKGLLSMIEKERLAEAVNRTLLSHLLKMFTALGIYMESFEKPFLEGTSEFYAAEGMKYMQQSDVPEYLKHVEGRLHEENERCILYIDAVTRKPLITTVERQLLERHILVVLEKGFTTLMDGRRTEDLQRMQTLFSRVNALESLRQALSSYVRKTGQKIVMDEEKDKDMVQSLLDFKASLDIIWEESFYKNESFGNTIKDSFEHLINLRQNRPAELIAKFLDEKLRAGNKGTSEEELESVLEKVLVLFRFIQGKDVFEAFYKKDLAKRLLLGKSASIDAEKSMISKLKTECGSQFTNKLEGMFKDIELSKEINESFKQSSQARTKLPSGIEMSVHVLTTGYWPTYPPMDVKLPHELNVYQDIFKEFYLSKYSGRRLMWQNSLGHCVLKADFSKGKKELAVSLFQAVVLMLFNDAMKLSFEDIKDSTSIEDKELRRTLQSLACGKVRVLQKNPKGRDVEDGDEFEFNDEFAAPLYRIKVNAIQMKETVEENTSTTERVFQDRQYQIDAAIVRIMKTRKVLSHTLLITELFQQLKFPIKPADLKKRIESLIDREYLEREKSNPQIYNYLA

SEQ ID NO: 4937 - protein, 767 aa, Arabidopsis thaliana
MKKAKNDLHHSPQHPNTADKVVGFHMEEDPTPAAANLSRKKATLPQPTKKFVIKLNKAKPTLPTNFEENTWEKLQSAIRAIFLKKKISFDLESLYQAVDNLCLHKLDGKLYDQIEKECEEHISAALQSLVGQNTDLTVFLSRVEKCWQDFCDQMLMIRSIALTLDRKYVIQNPNVRSLWEMGLQLFRKHLSLAPEVEQRTVKGLLSMIEKERLAEAVNRTLLSHLLKMFTALGIYMESFEKPFLEGTSEFYAAEGMKYMQQSDVPEYLKHVEGRLHEENERCILYIDAVTRKPLITTVERQLLERHILVVLEKGFTTLMDGRRTEDLQRMQTLFSRVNALESLRQALSSYVRKTGQKIVMDEEKDKDMVQSLLDFKASLDIIWEESFYKNESFGNTIKDSFEHLINLRQNRPAELIAKFLDEKLRAGNKGTSEEELESVLEKVLVLFRFIQGKDVFEAFYKKDLAKRLLLGKSASIDAEKSMISKLKTECGSQFTNKLEGMFKDIELSKEINESFKQSSQARTKLPSGIEMSVHVLTTGYWPTYPPMDVKLPHELNVYQDIFKEFYLSKYSGRRLMWQNSLGHCVLKADFSKGKKELAVSLFQAVVLMLFNDAMKLSFEDIKDSTSIEDKELRRTLQSLACGKVRVLQKNPKGRDVEDGDEFEFNDEFAAPLYRIKVNAIQMKETVEENTSTTERVFQDRQYQIDAAIVRIMKTRKVLSHTLLITELFQQLKFPIKPADLKKRIESLIDREYLEREKSNPQIYNYLA

SEQ ID NO: 4938 - protein, 742 aa, Arabidopsis thaliana
MEEDPTPAAANLSRKKATLPQPTKKFVIKLNKAKPTLPTNFEENTWEKLQSAIRAIFLKKKISFDLESLYQAVDNLCLHKLDGKLYDQIEKECEEHISAALQSLVGQNTDLTVFLSRVEKCWQDFCDQMLMIRSIALTLDRKYVIQNPNVRSLWEMGLQLFRKHLSLAPEVEQRTVKGLLSMIEKERLAEAVNRTLLSHLLKMFTALGIYMESFEKPFLEGTSEFYAAEGMKYMQQSDVPEYLKHVEGRLHEENERCILYIDAVTRKPLITTVERQLLERHILVVLEKGFTTLMDGRRTEDLQRMQTLFSRVNALESLRQALSSYVRKTGQKIVMDEEKDKDMVQSLLDFKASLDIIWEESFYKNESFGNTIKDSFEHLINLRQNRPAELIAKFLDEKLRAGNKGTSEEELESVLEKVLVLFRFIQGKDVFEAFYKKDLAKRLLLGKSASIDAEKSMISKLKTECGSQFTNKLEGMFKDIELSKEINESFKQSSQARTKLPSGIEMSVHVLTTGYWPTYPPMDVKLPHELNVYQDIFKEFYLSKYSGRRLMWQNSLGHCVLKADFSKGKKELAVSLFQAVVLMLFNDAMKLSFEDIKDSTSIEDKELRRTLQSLACGKVRVLQKNPKGRDVEDGDEFEFNDEFAAPLYRIKVNAIQMKETVEENTSTTERVFQDRQYQIDAAIVRIMKTRKVLSHTLLITELFQQLKFPIKPADLKKRIESLIDREYLEREKSNPQIYNYLA

SEQ ID NO: 4939 - DNA, 1647 bp, Arabidopsis thaliana
aattctacaaagaaaaagcctcctttttgttgccctgtgtcaaaaaagaaacctttttggtgggatttggtttcgctttcttgggggccaaaaagaggagatgatgaatccgaataagcagcaaagaagaaacctttacttcttcttcgtcttcgtcttctatgtcttcatcctctgtgctcgctttcaaacctctgaagctactaaagactcgtcggctcaagtgaagttacagaatcgtcgacttagctccaccgtcgtgtttcctgtctccgggaatgtgtatcctcttgggtactattatgtgttgcttaacattggcaacccacctaagctctttgacttggacattgacactggcagtgacctcacttgggttcagtgtgatgcaccttgcaacggttgcacaaagcctcgtgctaagcagtacaagcccaatcacaacactttgccttgttcacacatcttgtgttctggtcttgaccttccccaggacagaccttgtgctgaccctgaggatcaatgtgactatgaaatcggatactccgatcatgcatcatctattggtgcacttgtaactgatgaggttcctctaaaactcgcaaatggctccattatgaatcttcgtttgacatttggatgtgggtatgatcagcagaatcctggtccacatcctcctcctccaacagcgggaatacttggccttggaagagggaaagtaggcctctcaactcagctaaagtccttggggataacgaagaatgtgattgtgcattgcttaagtcatactggtaaaggctttctctctattggagatgagcttgttccttcttctggagttacatggacttcattggctactaattcacctagtaaaaactacatggctggaccagcagagcttctctttaacgacaagaccacaggtgtcaaaggcattaacgtagttttcgatagtggaagctcgtacacttacttcaatgcagaagcataccaagctattctcgatcttataagaaaagacttgaatgggaagcctttgacggacacaaaagatgataaaagcttaccagtctgctggaaaggcaaaaaacctttgaaatcacttgatgaggttaagaaatacttcaagacgattactttacgatttgggaatcaaaagaatggtcagctatttcaggttccacctgagtcgtatctcataatcaccgaaaaaggaagagtatgtttgggtattctgaatggaactgaaatcggtctcgagggctacaatatcattggagacatatctttccaagggataatggtgatctatgacaatgagaagcagaggattggatggatttcttcagactgtgacaaacttcccaatgtgaatcacgactatggaggagatctgtcggaggaagcttatccaataggatttggtttgataaaagagcttttctcaggaagtgattcttcaaagaacaagaacttggtctcagatggagagctttgacacaagagaagagtcttttttaaagtggtgtagtaaaaagattttgaggtttttggtttttggttttgttgttatcatagaaacaaggaaaatattttgtgaatatatatatcatcatataatagcaaaatgcaacagagtttaag

SEQ ID NO: 4940 - protein, 499 aa, Arabidopsis thaliana
ILQRKSLLFVALCQKRNLFGGIWFRFLGGQKEEMMNPNKQQRRNLYFFFVFVFYVFILCARFQTSEATKDSSAQVKLQNRRLSSTVVFPVSGNVYPLGYYYVLLNIGNPPKLFDLDIDTGSDLTWVQCDAPCNGCTKPRAKQYKPNHNTLPCSHILCSGLDLPQDRPCADPEDQCDYEIGYSDHASSIGALVTDEVPLKLANGSIMNLRLTFGCGYDQQNPGPHPPPPTAGILGLGRGKVGLSTQLKSLGITKNVIVHCLSHTGKGFLSIGDELVPSSGVTWTSLATNSPSKNYMAGPAELLFNDKTTGVKGINVVFDSGSSYTYFNAEAYQAILDLIRKDLNGKPLTDTKDDKSLPVCWKGKKPLKSLDEVKKYFKTITLRFGNQKNGQLFQVPPESYLIITEKGRVCLGILNGTEIGLEGYNIIGDISFQGIMVIYDNEKQRIGWISSDCDKLPNVNHDYGGDLSEEAYPIGFGLIKELFSGSDSSKNKNLVSDGEL

SEQ ID NO: 4941 - protein, 466 aa, Arabidopsis thaliana
MMNPNKQQRRNLYFFFVFVFYVFILCARFQTSEATKDSSAQVKLQNRRLSSTVVFPVSGNVYPLGYYYVLLNIGNPPKLFDLDIDTGSDLTWVQCDAPCNGCTKPRAKQYKPNHNTLPCSHILCSGLDLPQDRPCADPEDQCDYEIGYSDHASSIGALVTDEVPLKLANGSIMNLRLTFGCGYDQQNPGPHPPPPTAGILGLGRGKVGLSTQLKSLGITKNVIVHCLSHTGKGFLSIGDELVPSSGVTWTSLATNSPSKNYMAGPAELLFNDKTTGVKGINVVFDSGSSYTYFNAEAYQAILDLIRKDLNGKPLTDTKDDKSLPVCWKGKKPLKSLDEVKKYFKTITLRFGNQKNGQLFQVPPESYLIITEKGRVCLGILNGTEIGLEGYNIIGDISFQGIMVIYDNEKQRIGWISSDCDKLPNVNHDYGGDLSEEAYPIGFGLIKELFSGSDSSKNKNLVSDGEL

SEQ ID NO: 4942 - protein, 465 aa, Arabidopsis thaliana
MNPNKQQRRNLYFFFVFVFYVFILCARFQTSEATKDSSAQVKLQNRRLSSTVVFPVSGNVYPLGYYYVLLNIGNPPKLFDLDIDTGSDLTWVQCDAPCNGCTKPRAKQYKPNHNTLPCSHILCSGLDLPQDRPCADPEDQCDYEIGYSDHASSIGALVTDEVPLKLANGSIMNLRLTFGCGYDQQNPGPHPPPPTAGILGLGRGKVGLSTQLKSLGITKNVIVHCLSHTGKGFLSIGDELVPSSGVTWTSLATNSPSKNYMAGPAELLFNDKTTGVKGINVVFDSGSSYTYFNAEAYQAILDLIRKDLNGKPLTDTKDDKSLPVCWKGKKPLKSLDEVKKYFKTITLRFGNQKNGQLFQVPPESYLIITEKGRVCLGILNGTEIGLEGYNIIGDISFQGIMVIYDNEKQRIGWISSDCDKLPNVNHDYGGDLSEEAYPIGFGLIKELFSGSDSSKNKNLVSDGEL

SEQ ID NO: 4943 - DNA, 878 bp, Arabidopsis thaliana
gcaaacgctagttaccggaagacacgtcttgagtttcgcagcatctctctcctctcctctgttcatatctctctttagaaatttctcaatgaacatactcaacagattgggtttgggatcaagtgggcaaaccaatatggatccttctccgatcgctcagggaaatgacgatgacacaccggcgccggggaatcagtttgcccaattcggagctggatgtttctggggtgtcgagctggcgtttcagagagtcccaggggtgactcagaccgaggctggatacacccaagggaccgtagacaatccttcatacggagatgtttgttctggtaccacaggccattcggaggttgttagggttcaatatgatcttaacgattgcacctatgagtctctgcttgatttgttctggtctaggcatgatcccaccactttgaatcgccagggaaatgacgtgggaacccaatacagatctggaatatacttctacacacccgagcaggagaaactagcccgtgagtcacttgaacgtcaccagcaacaaatggagagaaagatcatgactgaaatcttgccagctaagaaattctacagagctgaagagcatcatcaacagtatctgtcaaaaggtgggcggtttggccaagggcaatccactgccaaaggctgcaacgacccaatccgctgttacggctaataagctgctttcctctgtccctctccgaaaacagaggacttagcatcaaaggacttgtgtgtcaaatagattgtgtaaaacttgactaagttgttcacacgctatgtaactacttctttggaatttcattcgcaatgttgtaatattgatgttatactctataaacataaaccaaataatc

SEQ ID NO: 4944 - protein, 231 aa, Arabidopsis thaliana
QTLVTGRHVLSFAASLSSPLFISLFRNFSMNILNRLGLGSSGQTNMDPSPIAQGNDDDTPAPGNQFAQFGAGCFWGVELAFQRVPGVTQTEAGYTQGTVDNPSYGDVCSGTTGHSEVVRVQYDLNDCTYESLLDLFWSRHDPTTLNRQGNDVGTQYRSGIYFYTPEQEKLARESLERHQQQMERKIMTEILPAKKFYRAEEHHQQYLSKGGRFGQGQSTAKGCNDPIRCYG

SEQ ID NO: 4945 - protein, 202 aa, Arabidopsis thaliana
MNILNRLGLGSSGQTNMDPSPIAQGNDDDTPAPGNQFAQFGAGCFWGVELAFQRVPGVTQTEAGYTQGTVDNPSYGDVCSGTTGHSEVVRVQYDLNDCTYESLLDLFWSRHDPTTLNRQGNDVGTQYRSGIYFYTPEQEKLARESLERHQQQMERKIMTEILPAKKFYRAEEHHQQYLSKGGRFGQGQSTAKGCNDPIRCYG

SEQ ID NO: 4946 - protein, 186 aa, Arabidopsis thaliana
MDPSPIAQGNDDDTPAPGNQFAQFGAGCFWGVELAFQRVPGVTQTEAGYTQGTVDNPSYGDVCSGTTGHSEVVRVQYDLNDCTYESLLDLFWSRHDPTTLNRQGNDVGTQYRSGIYFYTPEQEKLARESLERHQQQMERKIMTEILPAKKFYRAEEHHQQYLSKGGRFGQGQSTAKGCNDPIRCYG

SEQ ID NO: 4947 - DNA, 1618 bp, Arabidopsis thaliana
atcccaaacaaacaaacacattcaaatctcataaacacattgataagtaaaaatcctctcgagagacaagaatgagaatgacacttgttcacttgtctctctccctcttctcatgtctcctccttgtcctttctccgaccttcattgcctccactcccgtctccgaacccgaactcgtagttcaagaagttaacgaaaagattaatgcgtctaggaggaatctaggcgtgctctcatgtgggaccggaaatccaattgacgactgttggagatgcgacccgaaatgggagaaaaaccgacaacggttagccgattgcgcgatcgggtttggcaaacacgcaatcggtggtcgtgacggtaaaatctacgtggtgactgactcgagtgacaaagacgtggttaaccctaaacccggaacccttagacacgcggtgatccaagacgagccactatggatcatcttcgcgcgtgacatggtcataaaactaaaagaagagctgattatgaactctttcaagactatagacggccgtggagcgagcgtccacattgctggtggcgcgtgtatcaccgtccagtacgtgaccaacatcatcatccacggtgttaacatccatgactgtaaaagaaaggggaatgcttacgttagagactctccgtcgcattatgggtggaggacagcgtctgacggtgacgccgtctcgatttttggtggctcccacgtgtgggtagaccattgctcgttgtccaactgcgctgacggtctgatagacgccattcatggatcaacggccattactatctctaataactatttgagtcaccacaataaagtcatgcttttgggacacagtgattcgtacacgagagacaagaacatgcaagtcaccattgcctttaatcactttggagaaggtcttgttcagagaatgccaagatgtagacatggatattttcatgtggtgaataatgattatacacattggcaaatgtatgcaattggtggaagtgcagctccaacgattaacagtcaaggcaataggtttcttgctccaaacgaccatgtctttaaagaggtgactaaatacgaagatgcaccacgaagcaaatggaagaaatggaattggagatcggaaggtgatttgttcctaaacggtgcgttttttacgccttcgggtggaggagcctcttcaagctatgctaaggcttcgagtttgtcggctagaccgtcctcattggtggcttcagtcacgtccaatgctggtgcactcttttgtagaaaaggatcacgatgttaatccaatccatcttttcaaaattatatatataatccatccaatctaattaattaaaaagataaagaagaggatgcatgttgtccctggtatgtcaatttttcgttaccctttagtttttttttattgtggggagggttaaagtagtaagatggattcgatgtgtatactaaagttatgtgtggattccctttggaccaatgggtttctttaaaactttttggagtagggaccaatgtttatgttgtggtggggataatgtctgtacaattgctaagcgattattgttgatttcttatatattgtatcaacatcttaattat

SEQ ID NO: 4948 - protein, 408 aa, Arabidopsis thaliana
MRMTLVHLSLSLFSCLLLVLSPTFIASTPVSEPELVVQEVNEKINASRRNLGVLSCGTGNPIDDCWRCDPKWEKNRQRLADCAIGFGKHAIGGRDGKIYVVTDSSDKDVVNPKPGTLRHAVIQDEPLWIIFARDMVIKLKEELIMNSFKTIDGRGASVHIAGGACITVQYVTNIIIHGVNIHDCKRKGNAYVRDSPSHYGWRTASDGDAVSIFGGSHVWVDHCSLSNCADGLIDAIHGSTAITISNNYLSHHNKVMLLGHSDSYTRDKNMQVTIAFNHFGEGLVQRMPRCRHGYFHVVNNDYTHWQMYAIGGSAAPTINSQGNRFLAPNDHVFKEVTKYEDAPRSKWKKWNWRSEGDLFLNGAFFTPSGGGASSSYAKASSLSARPSSLVASVTSNAGALFCRKGSRC

SEQ ID NO: 4949 - protein, 406 aa, Arabidopsis thaliana
MTLVHLSLSLFSCLLLVLSPTFIASTPVSEPELVVQEVNEKINASRRNLGVLSCGTGNPIDDCWRCDPKWEKNRQRLADCAIGFGKHAIGGRDGKIYVVTDSSDKDVVNPKPGTLRHAVIQDEPLWIIFARDMVIKLKEELIMNSFKTIDGRGASVHIAGGACITVQYVTNIIIHGVNIHDCKRKGNAYVRDSPSHYGWRTASDGDAVSIFGGSHVWVDHCSLSNCADGLIDAIHGSTAITISNNYLSHHNKVMLLGHSDSYTRDKNMQVTIAFNHFGEGLVQRMPRCRHGYFHVVNNDYTHWQMYAIGGSAAPTINSQGNRFLAPNDHVFKEVTKYEDAPRSKWKKWNWRSEGDLFLNGAFFTPSGGGASSSYAKASSLSARPSSLVASVTSNAGALFCRKGSRC

SEQ ID NO: 4950 - protein, 274 aa, Arabidopsis thaliana
MVIKLKEELIMNSFKTIDGRGASVHIAGGACITVQYVTNIIIHGVNIHDCKRKGNAYVRDSPSHYGWRTASDGDAVSIFGGSHVWVDHCSLSNCADGLIDAIHGSTAITISNNYLSHHNKVMLLGHSDSYTRDKNMQVTIAFNHFGEGLVQRMPRCRHGYFHVVNNDYTHWQMYAIGGSAAPTINSQGNRFLAPNDHVFKEVTKYEDAPRSKWKKWNWRSEGDLFLNGAFFTPSGGGASSSYAKASSLSARPSSLVASVTSNAGALFCRKGSRC

SEQ ID NO: 4951 - DNA, 2028 bp, Arabidopsis thaliana
  misc_feature (1291)..(1291): n is a, c, g, or t
atttttgtaatctggctctataattgtctctgtttgctgctactctcgagcttggttgacgcggatcaggccaacatagattgcttaaggacctttaaatctcaagtagaggatccaaatagatatttatcgacttgggtttttggcaacgagactgctggttatatctgcaagttcagtggtgtgacttgttggcatgatgatgagaatagggttttgagtattaagctatctggttatggtcttagaggagtgtttcctcctgcggttaagctatgtgctgatctcactggtttagatctttctagaaacaacttctctggacctttaccagccaacattagcaccttgattccacttgttacgattctagacctctcctacaatagcttctctggtgaaatccctatgttgatctccaacattacctttttgaacactcttatgcttcagcataaccagttcacgggtactcttcctccccagctagcgcaacttggacggctcaaaacattctctgtgtctgacaatcgtctcgttggtcctatcccaaatttcaaccaaaccttgcagtttaagcaggaattgtttgctaataacctggatctgtgtggtaagcctctagatgactgtaagagtgcttctagctctcgtggtaaagttgttattatagcggcagttggtggactgactgcagcagcattagtcgttggggttgttttgttcttctatttccgtaaattgggtgctgttcggaagaagcaggatgatcctgaaggaaacagatgggcaaagagcttgaaaggacagaaaggtgttaaggttttcatgtttaagaaatcggtttcaaagatgaaattaagcgatcttatgaaggcaacagaggaattcaagaaagataatatcattgcaacaggaagaacaggaactatgtacaaaggtaggcttgaagacgggtctctacttatgataaagaggttgcaggattctcaacgctctgagaaagagtttgatgcagagatgaagactttgggctctgttaaaaacagaaacttagtccctctcttgggctattgtgttgccaataaggagaggcttctaatgtatgagtacatggcaaacggttacctttatgatcagttacatcctgcagatgaagaatccttcaagcccttggattggccttcaaggctgaaaatcgcgattgggacggcaaaaggattggcatggcttcatcatagctgcaacccgagaatcatccatcgcaacataagctcgaaatgcatattgntgactgcagagtttgagccaaagatctcggatttcggtctagctaggctgatgaacccaattgatacccatttaagcacattcgtcaatggagaatttggggatttcggttatgttgctcccgagtattcaagaaccatggttgcaactccaaaaggagatgtctacagcttcggtgttgtgcttctagagctagtaacgggccaaaaagcaacgagtgtaacaaaagtatctgaagaaaaagctgaggaagaaaacttcaagggtaacctcgtggaatggattacaaagctatcaagtgaatcaaaactgcaggaagcaatcgacaggtccttacttgggaacggtgtggatgatgaaatcttcaaagtactcaaagtagcatgcaactgcgttctaccggaaatagcaaagcagaggccaaccatgtttgaagtttatcagcttctaagagccattggagagagctacaacttcaccgccgatgatgatatcttaatcccatctgaatcaggtgaaggcgatttcattgaagagctcatagttgctcgttgatcaagaggaagggtaagaattgtgaaacaaacatctctagtcgtagcagtccaaagatatatataatgtataagtattgtttttattttatttttgggttctcgtcgtcgatggtgtgttgtaatatgatatattgttagatgcactctcttattactatgtactaagctttgggtgtgtggc

SEQ ID NO: 4952 - protein, 614 aa, Arabidopsis thaliana
  misc_feature (431)..(431): Xaa can be any naturally occurring amino acid
IFVIWLYNCLCLLLLSSLVDADQANIDCLRTFKSQVEDPNRYLSTWVFGNETAGYICKFSGVTCWHDDENRVLSIKLSGYGLRGVFPPAVKLCADLTGLDLSRNNFSGPLPANISTLIPLVTILDLSYNSFSGEIPMLISNITFLNTLMLQHNQFTGTLPPQLAQLGRLKTFSVSDNRLVGPIPNFNQTLQFKQELFANNLDLCGKPLDDCKSASSSRGKVVIIAAVGGLTAAALVVGVVLFFYFRKLGAVRKKQDDPEGNRWAKSLKGQKGVKVFMFKKSVSKMKLSDLMKATEEFKKDNIIATGRTGTMYKGRLEDGSLLMIKRLQDSQRSEKEFDAEMKTLGSVKNRNLVPLLGYCVANKERLLMYEYMANGYLYDQLHPADEESFKPLDWPSRLKIAIGTAKGLAWLHHSCNPRIIHRNISSKCILXTAEFEPKISDFGLARLMNPIDTHLSTFVNGEFGDFGYVAPEYSRTMVATPKGDVYSFGVVLLELVTGQKATSVTKVSEEKAEEENFKGNLVEWITKLSSESKLQEAIDRSLLGNGVDDEIFKVLKVACNCVLPEIAKQRPTMFEVYQLLRAIGESYNFTADDDILIPSESGEGDFIEELIVAR

SEQ ID NO: 4953 - protein, 478 aa, Arabidopsis thaliana
  misc_feature (295)..(295): Xaa can be any naturally occurring amino acid
MLISNITFLNTLMLQHNQFTGTLPPQLAQLGRLKTFSVSDNRLVGPIPNFNQTLQFKQELFANNLDLCGKPLDDCKSASSSRGKVVIIAAVGGLTAAALVVGVVLFFYFRKLGAVRKKQDDPEGNRWAKSLKGQKGVKVFMFKKSVSKMKLSDLMKATEEFKKDNIIATGRTGTMYKGRLEDGSLLMIKRLQDSQRSEKEFDAEMKTLGSVKNRNLVPLLGYCVANKERLLMYEYMANGYLYDQLHPADEESFKPLDWPSRLKIAIGTAKGLAWLHHSCNPRIIHRNISSKCILXTAEFEPKISDFGLARLMNPIDTHLSTFVNGEFGDFGYVAPEYSRTMVATPKGDVYSFGVVLLELVTGQKATSVTKVSEEKAEEENFKGNLVEWITKLSSESKLQEAIDRSLLGNGVDDEIFKVLKVACNCVLPEIAKQRPTMFEVYQLLRAIGESYNFTADDDILIPSESGEGDFIEELIVAR

SEQ ID NO: 4954 - protein, 466 aa, Arabidopsis thaliana
  misc_feature (283)..(283): Xaa can be any naturally occurring amino acid
MLQHNQFTGTLPPQLAQLGRLKTFSVSDNRLVGPIPNFNQTLQFKQELFANNLDLCGKPLDDCKSASSSRGKVVIIAAVGGLTAAALVVGVVLFFYFRKLGAVRKKQDDPEGNRWAKSLKGQKGVKVFMFKKSVSKMKLSDLMKATEEFKKDNIIATGRTGTMYKGRLEDGSLLMIKRLQDSQRSEKEFDAEMKTLGSVKNRNLVPLLGYCVANKERLLMYEYMANGYLYDQLHPADEESFKPLDWPSRLKIAIGTAKGLAWLHHSCNPRIIHRNISSKCILXTAEFEPKISDFGLARLMNPIDTHLSTFVNGEFGDFGYVAPEYSRTMVATPKGDVYSFGVVLLELVTGQKATSVTKVSEEKAEEENFKGNLVEWITKLSSESKLQEAIDRSLLGNGVDDEIFKVLKVACNCVLPEIAKQRPTMFEVYQLLRAIGESYNFTADDDILIPSESGEGDFIEELIVAR

SEQ ID NO: 4955 - DNA, 1248 bp, Arabidopsis thaliana
accaactcctctaataagcttcttctttctatccctcacttttacaaacaaagggagaccaaaaatgggtctaagcaaaactattcccttagtgttactcccgattttgatgtttggggttttgagtaacgctcagcttacctctgatttttactccacgacatgccctaacgtcacagccattgctcggggactgatcgagcgagcaagccgtaacgacgtcagactcactgctaaagtcatgcgtcttcactttcatgactgtttcgtgaacgggtgcgatggttcggtactattggacgctgctccagcggatggggtagagggtgaaaaggaggctttccaaaacgcgggttctcttgatggattcgaagtgatcgatgatatcaaaaccgccctcgagaatgtttgtcccggagttgtctcttgtgctgatatcctcgctatcgcagctgaaatctctgttgcactggcgggagggccgtcattggacgtattgctaggaaggagagatggccggacagcgatccgtgcggacgcagtggctgcacttccactaggacctgattctctcgagattcttacttccaaattctccgtacataatcttgacactaccgatctcgtcgctttatctggtgctcataccttcgggagggttcagtgtggagtgataaacaatcgtctacacaactttagtggtaacagcggacagtccgacccaagtatcgaaccggagttcttgcaaacgttacgacgacaatgcccgcaaggcggagatctcaccgcaagggcgaatcttgatcctacgagccccgactcatttgataacgactatttcaagaaccttcaaaacaaccgcggagtgattgaatcagatcaaatcttgttctcttcgacaggagcgcctactgtgtctttggtgaatcgttttgctgagaaccaaaatgagttctttacaaattttgcgagatcaatgatcaagatgggaaatgtgaggattctcacaggacgtgagggagagatacgtagagactacagacgcgtcaattaataagttttgcatggttaaatgatcaaacgtaacttattgttattcatgaaataagtgttctttagtttgtgcttctccacaattaattgtttttcttcttttgattttatttactgttaagcatgccattgttacttgtaattgtaaatcttatataatatttttctttttgaaaaaatccactatcatgtctg

SEQ ID NO: 4956 - protein, 350 aa, Arabidopsis thaliana
PTPLISFFFLSLTFTNKGRPKMGLSKTIPLVLLPILMFGVLSNAQLTSDFYSTTCPNVTAIARGLIERASRNDVRLTAKVMRLHFHDCFVNGCDGSVLLDAAPADGVEGEKEAFQNAGSLDGFEVIDDIKTALENVCPGVVSCADILAIAAEISVALAGGPSLDVLLGRRDGRTAIRADAVAALPLGPDSLEILTSKFSVHNLDTTDLVALSGAHTFGRVQCGVINNRLHNFSGNSGQSDPSIEPEFLQTLRRQCPQGGDLTARANLDPTSPDSFDNDYFKNLQNNRGVIESDQILFSSTGAPTVSLVNRFAENQNEFFTNFARSMIKMGNVRILTGREGEIRRDYRRVN

SEQ ID NO: 4957 - protein, 329 aa, Arabidopsis thaliana
MGLSKTIPLVLLPILMFGVLSNAQLTSDFYSTTCPNVTAIARGLIERASRNDVRLTAKVMRLHFHDCFVNGCDGSVLLDAAPADGVEGEKEAFQNAGSLDGFEVIDDIKTALENVCPGVVSCADILAIAAEISVALAGGPSLDVLLGRRDGRTAIRADAVAALPLGPDSLEILTSKFSVHNLDTTDLVALSGAHTFGRVQCGVINNRLHNFSGNSGQSDPSIEPEFLQTLRRQCPQGGDLTARANLDPTSPDSFDNDYFKNLQNNRGVIESDQILFSSTGAPTVSLVNRFAENQNEFFTNFARSMIKMGNVRILTGREGEIRRDYRRVN

SEQ ID NO: 4958 - protein, 314 aa, Arabidopsis thaliana
MFGVLSNAQLTSDFYSTTCPNVTAIARGLIERASRNDVRLTAKVMRLHFHDCFVNGCDGSVLLDAAPADGVEGEKEAFQNAGSLDGFEVIDDIKTALENVCPGVVSCADILAIAAEISVALAGGPSLDVLLGRRDGRTAIRADAVAALPLGPDSLEILTSKFSVHNLDTTDLVALSGAHTFGRVQCGVINNRLHNFSGNSGQSDPSIEPEFLQTLRRQCPQGGDLTARANLDPTSPDSFDNDYFKNLQNNRGVIESDQILFSSTGAPTVSLVNRFAENQNEFFTNFARSMIKMGNVRILTGREGEIRRDYRRVN

SEQ ID NO: 4959 - DNA, 1502 bp, Arabidopsis thaliana
aaaacaattttgaaagaagaagaagaaaggaggagacatggatgaatctctgtgggtgtgagtgtgagacaaagagagaaaacaaacaacgtagctgtagattggaaaagacggtaagaccctcgtcgggcttcatcaataaacaactttgccttgttgtctatcgccggaattacaaaccctagccctgctacaccgccaatgacgccgtctacgcctgcagacgatgcttggatccgctcttaccagcgcttgcttcctgaatcgcagtctcttctcgcttcccgccggtcagttataccggttgcaatctctagagtgaatcagttcgacgcagcacgactagatgtggaaatgtcagccatgttgaaggaacagctcgttaaggttttcactctgatgaagccaggaatgctctttcaatacgaaccagagcttgatgctttccttgagtttctcatttggagattctctatttgggttgacaaacccacccccggaaacgctctcatgaatcttagatacagagatgaacgaggagtcgttgctcagcacttggggaaagtcagaacaggactggaaggacccggacttacttctccccaaaagatttggtactgcgttgcctccgttggtggtcagtacctcttctcccgtttgcagtcattttctgctttccgtagatggggtgattctgagcagagaccattggcaaggcgactttggaccctcgtacaacgaatcgaaggcatctacaaagctgcttcttttcttaacctattgtcatttctttatacgggaaggtataggaacctcattgaaaaagctttaaaagctaggcttgtctataggagtccccatatgaaccgatctgtcagcttcgagtacatgaatcggcaacttgtgtggaatgaattttcggaaatgcttttgttgcttctcccgctgctcaactcttcagctgttaagaatattcttagtccatttgccaaggacaagtcctcaagcactaaagaggatacagtgacttgccctatttgccaagtggatcctgcaattccgtttatagctctgccttgtcagcacaggtactgttactactgcataaggacccgctgcgcttcagcagcatcgttccggtgtcttagatgtaacgagcctgtggttgccatacaacgggaaggtgtttcaagtggcaaatgaatggaggtgacaaattgttgagtcatgccaccaagtcttgaagaataagcagatgcaatagtggaagtgtaaaaagccaaggcaagcagccgaaagcagagaagaatctgataggtgtttgtttgcagacagactatacaataagggaacatcatgaatgtgatgcaacaaaaaaattagataggtgcacttctgtacatgagttgagaacctaccattgttgaatgaagtttggtcttatgtttattacaaaatcagttgaaacgttggctatactcgaatgaataatatccatttcc

SEQ ID NO: 4960 - protein, 333 aa, Arabidopsis thaliana [sequence omitted]

SEQ ID NO: 4961 - protein, 282 aa, Arabidopsis thaliana
MSAMLKEQLVKVFTLMKPGMLFQYEPELDAFLEFLIWRFSIWVDKPTPGNALMNLRYRDERGVVAQHLGKVRTGLEGPGLTSPQKIWYCVASVGGQYLFSRLQSFSAFRRWGDSEQRPLARRLWTLVQRIEGIYKAASFLNLLSFLYTGRYRNLIEKALKARLVYRSPHMNRSVSFEYMNRQLVWNEFSEMLLLLLPLLNSSAVKNILSPFAKDKSSSTKEDTVTCPICQVDPAIPFIALPCQHRYCYYCIRTRCASAASFRCLRCNEPVVAIQREGVSSGK

SEQ ID NO: 4962 - protein, 279 aa, Arabidopsis thaliana
MLKEQLVKVFTLMKPGMLFQYEPELDAFLEFLIWRFSIWVDKPTPGNALMNLRYRDERGVVAQHLGKVRTGLEGPGLTSPQKIWYCVASVGGQYLFSRLQSFSAFRRWGDSEQRPLARRLWTLVQRIEGIYKAASFLNLLSFLYTGRYRNLIEKALKARLVYRSPHMNRSVSFEYMNRQLVWNEFSEMLLLLLPLLNSSAVKNILSPFAKDKSSSTKEDTVTCPICQVDPAIPFIALPCQHRYCYYCIRTRCASAASFRCLRCNEPVVAIQREGVSSGK

SEQ ID NO: 4963 - DNA, 1782 bp, Arabidopsis thaliana
ggttcttcatctgcattgttctccgcctctctctctcaaactcttcagtttgcaaaacccttaagaaggtgtgaattagtaagtaatggggaagaagaagtttattgataagaaaaaggcggcgactttcgagttgtgtcctcgtgatacgtcagacccaagatacagtgatgcaccaggtggtgataagatcttcttacgagttgatcaaaaccctgttaacatcaatggtttcattgaagaagatgaagaagaagaaggagacagctcacggtttgatgatgctcctgaagagatggattatggttactctagttttggggattcgagtagttctttacctgctcatgtgaggaaggagattttagagttagggtatcctgatgatggttataattacttggagcatttgagagagattaagaatactggtggtggttctaatttctatgtgaatcctaagtatgaggttgctcagttacctcgtgatgttaaggcttatgatgcgtctcgtgtgaagatctctggtatggtgaatgaagaaggtaatgataataagttgatgtatagtgttgcgtccaagactgttaacgtcaaggtgcagaaagctattgatcctgaagttgctgcgttgcttgaaaacagtgatgggtctgagtttggttctgatgttgaggatttggaagaagattttgttgttcaagctaatcttactcaaaagggtgaatcttctggtgtgagcaatggagagctcgagttttctgtaagacgtgaggttagagaaagagaaagtgatgaacctgtggctgaaaacccgagagttcctcgtcaaattgatgagctatttgatcagctcgaactcaatgaatatggaagtgatagtgacggtgatggttacatagctgaagatggagaagaagaagaagaagaagacttcatggctcaagaagttcagaatcttattcatgggaaggcaaaagattatgagcttgaagaaaaatatatgaaccctgcggatatactgaagaacagtgactctgtcagagataaagaggaagtggacactgctgctcatgttatccgccgaactgtagaatatggtgaaaattttgataacgggaatgaagatgaatttgtagagctgactgaagaaagcagcgatgaaagcgagaagcatgattgtgaaaccatagtctcaacatactcgaatctcgataacctccctggtaaaatccttgctgcagagtcagctaggcagaagaagctgagtgaaacattagctaacgcattgagttcaaatggaagaatcattaatctccaagggagagagaggattcctgtcgagtttttacctggtaggagagctgaacaaaccgatgtcaaagcggaaatcccaaaagctgaaccgatcaagaggaagactcatggtcaagagtcgaaagaagagaagaaagagcggaaaaatgctgtaaaagccgaaaagcgagaagcaaggataattaagaaacagacaaagatgctgtattgcggtgaaacgcagcgtgctcaaagagctgttgctacctctggtccatcgtcgagacctctaaaataatatgttactaaggtaaaacaaaacaattctcagactgtttaaaaccagtttttccagccatttcgtgtaatatttgctgtttgtttttttctttttcatcaagatttgaaaatcttgaatcttgttttggatgtggacttttgaatattatttattacttttactagtctaatttcgagaaagtgatg

SEQ ID NO: 4964 - protein, 502 aa, Arabidopsis thaliana
MGKKKFIDKKKAATFELCPRDTSDPRYSDAPGGDKIFLRVDQNPVNINGFIEEDEEEEGDSSRFDDAPEEMDYGYSSFGDSSSSLPAHVRKEILELGYPDDGYNYLEHLREIKNTGGGSNFYVNPKYEVAQLPRDVKAYDASRVKISGMVNEEGNDNKLMYSVASKTVNVKVQKAIDPEVAALLENSDGSEFGSDVEDLEEDFVVQANLTQKGESSGVSNGELEFSVRREVRERESDEPVAENPRVPRQIDELFDQLELNEYGSDSDGDGYIAEDGEEEEEEDFMAQEVQNLIHGKAKDYELEEKYMNPADILKNSDSVRDKEEVDTAAHVIRRTVEYGENFDNGNEDEFVELTEESSDESEKHDCETIVSTYSNLDNLPGKILAAESARQKKLSETLANALSSNGRIINLQGRERIPVEFLPGRRAEQTDVKAEIPKAEPIKRKTHGQESKEEKKERKNAVKAEKREARIIKKQTKMLYCGETQRAQRAVATSGPSSRPLK

SEQ ID NO: 4965 - protein, 432 aa, Arabidopsis thaliana
MDYGYSSFGDSSSSLPAHVRKEILELGYPDDGYNYLEHLREIKNTGGGSNFYVNPKYEVAQLPRDVKAYDASRVKISGMVNEEGNDNKLMYSVASKTVNVKVQKAIDPEVAALLENSDGSEFGSDVEDLEEDFVVQANLTQKGESSGVSNGELEFSVRREVRERESDEPVAENPRVPRQIDELFDQLELNEYGSDSDGDGYIAEDGEEEEEEDFMAQEVQNLIHGKAKDYELEEKYMNPADILKNSDSVRDKEEVDTAAHVIRRTVEYGENFDNGNEDEFVELTEESSDESEKHDCETIVSTYSNLDNLPGKILAAESARQKKLSETLANALSSNGRIINLQGRERIPVEFLPGRRAEQTDVKAEIPKAEPIKRKTHGQESKEEKKERKNAVKAEKREARIIKKQTKMLYCGETQRAQRAVATSGPSSRPLK

SEQ ID NO: 4966 - protein, 354 aa, Arabidopsis thaliana
MVNEEGNDNKLMYSVASKTVNVKVQKAIDPEVAALLENSDGSEFGSDVEDLEEDFVVQANLTQKGESSGVSNGELEFSVRREVRERESDEPVAENPRVPRQIDELFDQLELNEYGSDSDGDGYIAEDGEEEEEEDFMAQEVQNLIHGKAKDYELEEKYMNPADILKNSDSVRDKEEVDTAAHVIRRTVEYGENFDNGNEDEFVELTEESSDESEKHDCETIVSTYSNLDNLPGKILAAESARQKKLSETLANALSSNGRIINLQGRERIPVEFLPGRRAEQTDVKAEIPKAEPIKRKTHGQESKEEKKERKNAVKAEKREARIIKKQTKMLYCGETQRAQRAVATSGPSSRPLK

SEQ ID NO: 4967 - DNA, 1201 bp, Arabidopsis thaliana
accaatcaccactcacatgttatcaataattgcttataagaatttgtattcccactctaatcatcaactctattgattccacgcgatgacgacgttttcaacgagctttcttttccttttgttggttttctgcttgatcggttcactagctgccgatgatctccaacataaatccggtcgggacgtctgctccggtggttctgatcttagaacccccgatattcgtcttaaccggccgacagactctgtcgtcggaaactgcccgacggaggcgagtcctttagttatggctgacgacgagaagtacggtaacaaaatggttatcagtctcactcctcgcctttatgactatgtcctcaacaacgttcgtgagcatgagattttgaagcaacttcgagaagaaactgccattagtcaaattcaggtgtcacctgatcaagcgcaattgcttgcaatgcttgtagagattcttggagctaaacgatgtattgaagttggagtttacacgggatattcatcactggctgtggcgttggttctaccagaatcagggcgtcttgttgcctgtgataaagatgctaacgctcttgaagttgctaagaggtactacgagcttgccggagtgtctcacaaggtcactgtgaaacatggtcttgcagcagaatctttgatgtctatgattcagaacggtgaagagtccagctatgattttgcatttcttgatgctgataaggcgatgtatcaggagtacttcgaatcgctacttcgactcgtcagggttggtggagtcattgtgattgataatgttctttggcatggatgggttgcggattctacggtgaatgatgagaggaccatcagcctaagaaatttcaacaaaaaattaatggatgatcaacgtgtaagcattagtatggtatcaatcggcgatggtatgaccatatgccgcaagaggtaatcatccgtaaaaaccactcagctcgcagtgaacctgtttcaagatagaagaagtctttaaacataaaaggattgatgaagccaagatatccagtctcacaaacactaaagactcatcaacttttcccttttcagtcaaaaataagttgaataattgataaaccaatgtgtgggcctattgggctttgatatgtactgtttctatgtccgtttgaggccttttataaaatcgtcttacgaccct

SEQ ID NO: 4968 - protein, 290 aa, Arabidopsis thaliana
MTTFSTSFLFLLLVFCLIGSLAADDLQHKSGRDVCSGGSDLRTPDIRLNRPTDSVVGNCPTEASPLVMADDEKYGNKMVISLTPRLYDYVLNNVREHEILKQLREETAISQIQVSPDQAQLLAMLVEILGAKRCIEVGVYTGYSSLAVALVLPESGRLVACDKDANALEVAKRYYELAGVSHKVTVKHGLAAESLMSMIQNGEESSYDFAFLDADKAMYQEYFESLLRLVRVGGVIVIDNVLWHGWVADSTVNDERTISLRNFNKKLMDDQRVSISMVSIGDGMTICRKR

SEQ ID NO: 4969 - protein, 223 aa, Arabidopsis thaliana
MADDEKYGNKMVISLTPRLYDYVLNNVREHEILKQLREETAISQIQVSPDQAQLLAMLVEILGAKRCIEVGVYTGYSSLAVALVLPESGRLVACDKDANALEVAKRYYELAGVSHKVTVKHGLAAESLMSMIQNGEESSYDFAFLDADKAMYQEYFESLLRLVRVGGVIVIDNVLWHGWVADSTVNDERTISLRNFNKKLMDDQRVSISMVSIGDGMTICRKR

SEQ ID NO: 4970 - protein, 213 aa, Arabidopsis thaliana
MVISLTPRLYDYVLNNVREHEILKQLREETAISQIQVSPDQAQLLAMLVEILGAKRCIEVGVYTGYSSLAVALVLPESGRLVACDKDANALEVAKRYYELAGVSHKVTVKHGLAAESLMSMIQNGEESSYDFAFLDADKAMYQEYFESLLRLVRVGGVIVIDNVLWHGWVADSTVNDERTISLRNFNKKLMDDQRVSISMVSIGDGMTICRKR

SEQ ID NO: 4971 - DNA, 1142 bp, Arabidopsis thaliana
aagcacttcactctctaatttccttctctctatctctcaccatattcgcgattaaaaactctcaacttttctctcaaatttctgatcctttgatccaacagttagaagaagattcatctgatcatggccctcgaagcgatgaacactccaacttcttctttcaccagaatcgaaacgaaagaagatttgatgaacgacgccgttttcattgagccgtggcttaaacgcaaacgctccaaacgtcagcgttctcacagcccttcttcgtcttcttcctcaccgcctcgatctcgacccaaatcccagaatcaagatcttacggaagaagagtatctcgctctttgtctcctcatgctcgctaaagatcaaccgtcgcaaacgcgatttcatcaacagtcgcaatcgttaacgccgccgccagaatcaaagaaccttccgtacaagtgtaacgtctgtgaaaaagcgtttccttcctatcaggctttaggcggtcacaaagcaagtcaccgaatcaaaccaccaaccgtaatctcaacaactgccgatgattcaacagctccgaccatctccatcgtcgccggagaaaaacatccgattgctgcctccggaaagatccacgagtgttcaatctgtcataaagtgtttccgacgggtcaagctttaggcggtcacaaacgttgtcactacgaaggcaacctcggcggcggaggaggaggaggaagcaaatcaatcagtcacagtggaagcgtgtcgagcacggtatcggaagaaaggagccaccgtggattcatcgatctaaacctaccggcgttacctgaactcagccttcatcacaatccaatcgtcgacgaagagatcttgagtccgttgaccggtaaaaaaccgcttttgttgaccgatcacgaccaagtcatcaagaaagaagatttatctttaaaaatctaatactcgactattaattcttgtgttttcattttcatttttttagttacaaatttttaattgttctgatttggattgaatattggtatattgttagggattgatacaaaaatttgatgattgattaagtcagaatttctttttaattatggtaactaatctcttgatcagtccactctgtataaatattgcgtggcatt

SEQ ID NO: 4972 - protein, 273 aa, Arabidopsis thaliana
MALEAMNTPTSSFTRIETKEDLMNDAVFIEPWLKRKRSKRQRSHSPSSSSSSPPRSRPKSQNQDLTEEEYLALCLLMLAKDQPSQTRFHQQSQSLTPPPESKNLPYKCNVCEKAFPSYQALGGHKASHRIKPPTVISTTADDSTAPTISIVAGEKHPIAASGKIHECSICHKVFPTGQALGGHKRCHYEGNLGGGGGGGSKSISHSGSVSSTVSEERSHRGFIDLNLPALPELSLHHNPIVDEEILSPLTGKKPLLLTDHDQVIKKEDLSLKI

SEQ ID NO: 4973 - protein, 268 aa, Arabidopsis thaliana
MNTPTSSFTRIETKEDLMNDAVFIEPWLKRKRSKRQRSHSPSSSSSSPPRSRPKSQNQDLTEEEYLALCLLMLAKDQPSQTRFHQQSQSLTPPPESKNLPYKCNVCEKAFPSYQALGGHKASHRIKPPTVISTTADDSTAPTISIVAGEKHPIAASGKIHECSICHKVFPTGQALGGHKRCHYEGNLGGGGGGGSKSISHSGSVSSTVSEERSHRGFIDLNLPALPELSLHHNPIVDEEILSPLTGKKPLLLTDHDQVIKKEDLSLKI

SEQ ID NO: 4974 - protein, 251 aa, Arabidopsis thaliana
MNDAVFIEPWLKRKRSKRQRSHSPSSSSSSPPRSRPKSQNQDLTEEEYLALCLLMLAKDQPSQTRFHQQSQSLTPPPESKNLPYKCNVCEKAFPSYQALGGHKASHRIKPPTVISTTADDSTAPTISIVAGEKHPIAASGKIHECSICHKVFPTGQALGGHKRCHYEGNLGGGGGGGSKSISHSGSVSSTVSEERSHRGFIDLNLPALPELSLHHNPIVDEEILSPLTGKKPLLLTDHDQVIKKEDLSLKI

SEQ ID NO: 4975 - DNA, 1185 bp, Arabidopsis thaliana
tcggtcgttcgtttctactctttccaagctctagcccatggtggtgaccttcttcttctaaccgcgaaaaccatctctatctctcttatctttcttctccgccaagtttctctttgtaatttctttcttcttcctccagattcttcaagcttcctttaccatctcgcgaatccttctattaagttgaacaagatctcatggcgaaaacagctcttactcctcccgcgtctggttccgaagttccaagatccggtacacctggagatgcgtctggcaacaaacctcaaacggatgccaccggcgtctcagctactgatactgcttctcagaaacgcggtcgtggtcgaccgccaaaggctaaatctgactcttcccaaatcggtgccgtttctgcgaaggcgagtactaaaccaagtggtcgtccgaaaagaaacgtagctcaggctgttccttctacgtctgtggcggcggctgtgaagaaacgtggtagggcaaagaggtcgactgtaacggcggctgtggttactactgctactggagagggttctagaaaacgagggaggccaaagaaagatgacgtggcggctgcaactgttccagcagaaactgtggtggctccagctaagagacgtggaaggaaacctactgtcgaagtagctgcacagcctgtgcgcaggactaggaagagcacttcagtggcaccggtagctgcaaacgtcggagatctcaagaaaagaaccgcactcttacaaaagaaagtgaaggaagctgcagctaagttgaaacaagcagtaacagcaattgacgaggtccagaagttagcggatggaatgtaaaagaaagctactgatatgactgaatcctacaagggataatgatgatcgagaaagaaatcttcgtatgtgttttagggaatttaattaggagaaaacattcatttggaggaagactgattggttgttaatgtttgattttcactttagggttgtttgtttgtacgtttctaggattttgctaccagaagaggtttaaacagtagtgttaaaatggtctatgtgtagctcggagatgggggaaactttcactcttccttctgaatttgatttgctacgtctttgttatcaagaattgtaacattcttttcctttgaggtttatgaatttggagttataagaagcttagtag

SEQ ID NO: 4976 - protein, 212 aa, Arabidopsis thaliana
MAKTALTPPASGSEVPRSGTPGDASGNKPQTDATGVSATDTASQKRGRGRPPKAKSDSSQIGAVSAKASTKPSGRPKRNVAQAVPSTSVAAAVKKRGRAKRSTVTAAVVTTATGEGSRKRGRPKKDDVAAATVPAETVVAPAKRRGRKPTVEVAAQPVRRTRKSTSVAPVAANVGDLKKRTALLQKKVKEAAAKLKQAVTAIDEVQKLADGM

SEQ ID NO: 4977 - protein, 145 aa, Arabidopsis thaliana
SVVRFYSFQALAHGGDLLLLTAKTISISLIFLLRQVSLCNFFLLPPDSSSFLYHLANPSIKLNKISWRKQLLLLPRLVPKFQDPVHLEMRLATNLKRMPPASQLLILLLRNAVVVDRQRLNLTLPKSVPFLRRRVLNQVVVRKET

SEQ ID NO: 4978 - DNA, 1567 bp, Arabidopsis thaliana
taaaacaacaaagcaaagcgttgaagagagaagaagaagcaaagatataacccccaaaagtatcaattagtttccattttcgccgctaagattctgttttcgaacatttacaccctcaagaatcgccgccatgtgtggaggagctataatatccgatttcattccaccgccgaggtctcgccgtgttactagcgagtttatttggccggatctgaagaagaatttgaaaggatcgaagaaaagctcgaagaatcgttcgaatttcttcgattttgacgctgagttcgaagctgatttccaaggtttcaaagatgattcgtctatcgattgcgatgatgatttcgacgtcggtgatgttttcgccgatgtgaaaccattcgttttcacttcgactccaaaacccgccgtctccgccgctgcggaaggttcagtttttggtaagaaagttactggcttggatggggacgctgagaaatctgcaaataggaagaggaagaatcagtaccgagggattaggcaacgtccttggggaaaatgggctgctgagatacgtgatccaagggaaggtgctagaatctggcttggaacgttcaagacagctgaggaagctgctagagcttacgatgctgcagcgcggagaatccgtggatctaaagctaaggtgaatttccctgaagaaaacatgaaggctaattctcagaaacgctctgtgaaggctaatcttcagaaaccagtggctaaacctaaccctaacccaagtccagctttggttcagaactcgaacatctcctttgaaaatatgtgtttcatggaggagaaacaccaagtgagcaacaacaacaacaaccagtttgggatgacaaactccgttgatgctggatgtaatgggtatcagtatttcagctctgaccagggtagtaattctttcgattgttcggagtttggttggagcgatcaagctccgataactcccgacatctcttctgcggttatcaacaacaacaactcagctctgttctttgaggaagccaatccagctaagaagctcaagtctatggatttcgagacaccttacaacaacactgaatgggacgcttcactggatttcctcaacgaagatgctgtaacgactcaggacaatggtgcaaaccctatggacctatggagtattgatgaaattcattccatgattggaggagtcttctgaagagatccagtttcatgtaaataaggctgcatgtttgtgagtttcccgcatcgttcgtttatcaacctccaaaactttctaatgtctgttacttgcatcttcttctgctgtctctgtctgtctctctcaggagttcctgtttgcattgcgagaagccatgagcctctatcttgagggtagttgtgatgaagttaagtagaggcttatttttaggggttgtggtagtttttgttttagtgaatcttttgaattcgtttgtgttttgtttttgttactttatgccccaaaactcctttaacatttgtcataatgtgtttgaacctctcatctgtttaatcaaataaatcttctttgtatgtt

SEQ ID NO: 4979 - protein, 358 aa, Arabidopsis thaliana
MCGGAIISDFIPPPRSRRVTSEFIWPDLKKNLKGSKKSSKNRSNFFDFDAEFEADFQGFKDDSSIDCDDDFDVGDVFADVKPFVFTSTPKPAVSAAAEGSVFGKKVTGLDGDAEKSANRKRKNQYRGIRQRPWGKWAAEIRDPREGARIWLGTFKTAEEAARAYDAAARRIRGSKAKVNFPEENMKANSQKRSVKANLQKPVAKPNPNPSPALVQNSNISFENMCFMEEKHQVSNNNNNQFGMTNSVDAGCNGYQYFSSDQGSNSFDCSEFGWSDQAPITPDISSAVINNNNSALFFEEANPAKKLKSMDFETPYNNTEWDASLDFLNEDAVTTQDNGANPMDLWSIDEIHSMIGGVF

SEQ ID NO: 4980 - DNA, 701 bp, Arabidopsis thaliana
atggttcctttttggattccagctaacaaaagaaaaggtttgaaaatgtccaactacaaatttaatatggaaacgttcgaaatcgaagtccggtccaatcttgaaaacatcaattatccaacatttttgtgctggaccgaagccaatggcaggccagatattataaccgaaggcctgaaagtaagttacaacgagatagtaagaagatgcttaagtaaatgggcctttgtggcccaatctataaaacctaaccctagcatcgtgtccccatataaaactcacctccatcgctttctacaagtttcttctccagatttagggtttctcagtgtttcggctcggcccagaacaagatcgcaagacttcaagatgccgtcgcacaagtcgttcatgattaagaagaaattggggaagaaaatgaggcaaaacaggcctattcctcactggattcgtcttcgtaccgacaacaccatcaggtacaatgctaagcgtaggcattggcgcagaaccaagcttggattctaagaggtttacttttgcttattgtgagagctttgttcttttgaaaaagactttgttttctttatcagttttgattgttcacatttgtgtaagacgatctttaatcatttatgtttccaaagtttcctgtagtaacattgagtttttcattagtttaaagatttggaaatgacttttgg

SEQ ID NO: 4981 - protein, 174 aa, Arabidopsis thaliana
MVPFWIPANKRKGLKMSNYKFNMETFEIEVRSNLENINYPTFLCWTEANGRPDIITEGLKVSYNEIVRRCLSKWAFVAQSIKPNPSIVSPYKTHLHRFLQVSSPDLGFLSVSARPRTRSQDFKMPSHKSFMIKKKLGKKMRQNRPIPHWIRLRTDNTIRYNAKRRHWRRTKLGF

SEQ ID NO: 4982 - protein, 159 aa, Arabidopsis thaliana
MSNYKFNMETFEIEVRSNLENINYPTFLCWTEANGRPDIITEGLKVSYNEIVRRCLSKWAFVAQSIKPNPSIVSPYKTHLHRFLQVSSPDLGFLSVSARPRTRSQDFKMPSHKSFMIKKKLGKKMRQNRPIPHWIRLRTDNTIRYNAKRRHWRRTKLGF

SEQ ID NO: 4983 - protein, 152 aa, Arabidopsis thaliana
METFEIEVRSNLENINYPTFLCWTEANGRPDIITEGLKVSYNEIVRRCLSKWAFVAQSIKPNPSIVSPYKTHLHRFLQVSSPDLGFLSVSARPRTRSQDFKMPSHKSFMIKKKLGKKMRQNRPIPHWIRLRTDNTIRYNAKRRHWRRTKLGF

SEQ ID NO: 4984 - DNA, 1210 bp, Arabidopsis thaliana
ctcttatttactttagtcctctcgaatcccataaagtccacaactctctccttgtagagagagagattttatggcggtggagctcatgactcggaattacatctccggcgtcggagctgatagcttcgccgttcaagaagcagctgcttcaggactcaaaagtatcgaaaatttcatcggtttaatgtctcgtgatagctttaactctgatcagccatcttcttcttccgcctccgcctccgcctccgcctccgcctccgcctccgccgccgcagatcttgaatcagctcgtaacacaacggcggacgcggctgtttcaaagtttaaaagagtcatatctctcttagatcgaactcgaaccggacacgcccggtttagacgtgctccggttcatgttatttctccggttcttttacaagaagaaccaaaaacgacgccgtttcagtctcctcttcctcctccgccgcaaatgatccgaaaaggttcgttttcttcatcgatgaaaacgattgatttctcatctctctcctctgtaacaacggaatcagacaaccagaagaagattcatcatcatcaacgtccctctgaaacggcgccgtttgcgtctcaaactcaaagcctctccacgacggtctcgtctttctcaaaatcaacaaagagaaaatgtaactctgagaatcttctcaccggaaaatgcgcttccgcttcttcctccggtcgttgtcattgctcgaagaaaagaaagataaaacagaggagaataattagggttccggcgataagtgcaaaaatgtccgatgtaccaccggacgattattcatggaggaaatacggacaaaaaccaattaaaggatctccacatccaagaggatattataagtgtagtagcgtaagaggttgtccagcacgtaaacatgttgagagagcagctgatgattcgtccatgttgattgttacttatgaaggagatcataatcattctctctccgccgctgatctcgccggagccgccgttgctgatcttattttggaatcgtcttgaaaagaacaaatctttatttaaggcttttataatataaatttagatccttacttagtgaagtactcaaactatgaatgaaatcaatgtaatcaaaatcaaaaagcttttgctaaatttcgatttgttagttttttggattgttaaattataaattgtgatatattcacc

SEQ ID NO: 4985 - protein, 323 aa, Arabidopsis thaliana
MAVELMTRNYISGVGADSFAVQEAAASGLKSIENFIGLMSRDSFNSDQPSSSSASASASASASASAAADLESARNTTADAAVSKFKRVISLLDRTRTGHARFRRAPVHVISPVLLQEEPKTTPFQSPLPPPPQMIRKGSFSSSMKTIDFSSLSSVTTESDNQKKIHHHQRPSETAPFASQTQSLSTTVSSFSKSTKRKCNSENLLTGKCASASSSGRCHCSKKRKIKQRRIIRVPAISAKMSDVPPDDYSWRKYGQKPIKGSPHPRGYYKCSSVRGCPARKHVERAADDSSMLIVTYEGDHNHSLSAADLAGAAVADLILESS

SEQ ID NO: 4986 - protein, 318 aa, Arabidopsis thaliana
MTRNYISGVGADSFAVQEAAASGLKSIENFIGLMSRDSFNSDQPSSSSASASASASASASAAADLESARNTTADAAVSKFKRVISLLDRTRTGHARFRRAPVHVISPVLLQEEPKTTPFQSPLPPPPQMIRKGSFSSSMKTIDFSSLSSVTTESDNQKKIHHHQRPSETAPFASQTQSLSTTVSSFSKSTKRKCNSENLLTGKCASASSSGRCHCSKKRKIKQRRIIRVPAISAKMSDVPPDDYSWRKYGQKPIKGSPHPRGYYKCSSVRGCPARKHVERAADDSSMLIVTYEGDHNHSLSAADLAGAAVADLILESS

SEQ ID NO: 4987 - protein, 285 aa, Arabidopsis thaliana
MSRDSFNSDQPSSSSASASASASASASAAADLESARNTTADAAVSKFKRVISLLDRTRTGHARFRRAPVHVISPVLLQEEPKTTPFQSPLPPPPQMIRKGSFSSSMKTIDFSSLSSVTTESDNQKKIHHHQRPSETAPFASQTQSLSTTVSSFSKSTKRKCNSENLLTGKCASASSSGRCHCSKKRKIKQRRIIRVPAISAKMSDVPPDDYSWRKYGQKPIKGSPHPRGYYKCSSVRGCPARKHVERAADDSSMLIVTYEGDHNHSLSAADLAGAAVADLILESS

SEQ ID NO: 4988 - DNA, 1748 bp, Arabidopsis thaliana
atttttttggtaaaagaatttgggagaacaaactccggtcggcgccgtgttttagaaccctacttgttgttcttccttcttaatcgctctccggtcggcgccgtgtttttcgcgtctctctcaaactccaattctctattttccgaccaacagagagtagcgactggttattttctgtaaatttctgatatttatcgctttttctctgggggttttctaaggttttacttggaatccaaatcgatgtttattgtgatgtttagctagttatggaattgttgggtggagttgttcgcagtgacgtagaagtagcatactctcgagtgcagtgatgattctgaagcagctgaaacaatttaccttgtctgctactcgcagaaatgctgttttcaaaactgatgttaaacggcttgcaaggttctatggctctcctgctgtttgcgaatctttaacaacatctaaaattcccaaaagactctcaaaagatgatcggcgagctttggtggagtcctttgtcaacgaatacagagcaactaatgctggtagattcccttcattggatgctactcacaagcaagtgggaggctcttattacattgtcagggacatctttcaagagctgaaactcaaaccaaaagcacatatgccaatcgtagctaaagccctctcagaagtctcttcttctgtaccaggtgatgcttcctcacactcctctccagcacctgtgccaaccgttgaagctaaagccctctcagaagtctctccttctgtaccagctgatgcttcctcacacttgtctccatcacctgtgccaatcgtagaagctaaagccctctcagaagtctctccttccgtaccagctgatacttcctcgcacttctctccagcacctgtgccaatcgtagaagcagaagccctctcagtagtctctccttctgtaccagctgatacttcctcacacttctctccagcacctgtgccaatcgtagaagctaaaaccctctcagaagtctctccctctgtaccagatgatgcttcctcacacttctctcctgtggttgttgaacctgagtttcaagctggcagtgtggatattgagataggaagtgagcagaggccggatataatagatacttctcactctaattctgatgatgaaagtaatttccagggcaacaaccttgtcattactgcaaaagatgacaaaagagaaacagaggcaactcagggaatagaaaactcggagactgatgaagagaggaacttgacgcacttaggcaatcaagagtcaaaagcagaccatcttgaaggagctgatgtttcagcagatgttgtgcctactgagaccagacaaatttcagagacaggagccggtgaggtgaaagagacggaaactggtgaggtgaaagaaaggtcaagttcgtggagcaacataatgtcatttgcgaaagaatttgcgaacttttggagatgagggtagatatagccagggagctttagacacgctcaggaagggtaggtagaggtgtgtaaagtataccagtagaagctgttttgttttgacattttgcgcaaaggtttggaatcgaccaagatgtcttaatctagactattattgtcctgctggctatgagtctagattaaaacacacaacagttttagaggcttgttttgtgatcgaccattttgtacaaaggtatagaatctcccaagatgtttaacatggtaatctatactatcgttgtcct

SEQ ID NO: 4989 - protein, 380 aa, Arabidopsis thaliana
MILKQLKQFTLSATRRNAVFKTDVKRLARFYGSPAVCESLTTSKIPKRLSKDDRRALVESFVNEYRATNAGRFPSLDATHKQVGGSYYIVRDIFQELKLKPKAHMPIVAKALSEVSSSVPGDASSHSSPAPVPTVEAKALSEVSPSVPADASSHLSPSPVPIVEAKALSEVSPSVPADTSSHFSPAPVPIVEAEALSVVSPSVPADTSSHFSPAPVPIVEAKTLSEVSPSVPDDASSHFSPVVVEPEFQAGSVDIEIGSEQRPDIIDTSHSNSDDESNFQGNNLVITAKDDKRETEATQGIENSETDEERNLTHLGNQESKADHLEGADVSADVVPTETRQISETGAGEVKETETGEVKERSSSWSNIMSFAKEFANFWR

SEQ ID NO: 4990 - protein, 276 aa, Arabidopsis thaliana
MPIVAKALSEVSSSVPGDASSHSSPAPVPTVEAKALSEVSPSVPADASSHLSPSPVPIVEAKALSEVSPSVPADTSSHFSPAPVPIVEAEALSVVSPSVPADTSSHFSPAPVPIVEAKTLSEVSPSVPDDASSHFSPVVVEPEFQAGSVDIEIGSEQRPDIIDTSHSNSDDESNFQGNNLVITAKDDKRETEATQGIENSETDEERNLTHLGNQESKADHLEGADVSADVVPTETRQISETGAGEVKETETGEVKERSSSWSNIMSFAKEFANFWR

SEQ ID NO: 4991 - DNA, 1322 bp, Arabidopsis thaliana
aaattaaaacaaaaaaaacttagaagagaaacaatctcatcgctcagtgactgattcagatgaccagtgtctccgtcgccgtcgtagctcctccgcatcgttgcccattctctagtcatctgaatctgaacaagctttctcttcaagtagtaatctttctctctcttctatctatctcactctctcagtgtgtctctccataggtttcatcttcccaaccgtttcgtttttttttgctcttcggttgtgattttgaagattcctagaaccggctggcggaggaaacagctagggtttgctttagcttctaccgcggcttcagaatcgccatcggaagctacatatgatccggagctccgtttagttttcgagctcgctaccgattccgagttatatgagcttgagaaaatcctttttggtcccagctacttcagccctttgctgaaatcaatcccaaacaaaggaggaggtgaccggcttatgataggccaagacattgaagtgcgagatggttttatcgaagctcttgaatcgagattcttgtttctagctgcagatgctcgttcaacactcaggggttggaggccttcatacagaaacgttttacttgcggtgagaaataatttgaatattccctgctccagccaattgccaaccgaagacctagaagcagagatttttctttatcttgtcgacaatttctcgagtgaagcatcaggggtttttccaggcatgtgggaaaattctgaagtctcagaggcagagggaagcttagaactcgggctcagtaaatggaaagttgaactacttgccgcactacaagtgggtgctacagaggtccaatctatgattctgaagggtggtggcatgatcacattcgccaaagtttatcagttgttggctaagaaactatctggaaaagtattccttgaagctgccaactaccagattaggaaagagatgctaaaaaagggtgggcagtttgctgccattaacttggaatctcgagcagctctgttagcagcgaagcatggatttgcaggggctgcatccagatacattggcttaaaaacagcgatgcaattacttggccccatgatgtgggggacattactggctgacttagtgattcagatgctcgagactgactacgctagaatcctaagagcaatttacgcatttgcacagattcggatcaccaggacatacaggctaccttgtaaatgaagtaacagtttgttttctcaatctcagtgtccctacgaactatgtcggtaaacaatgtttttcacactcgtataattcgcttgtggttgaaatcg

SEQ ID NO: 4992 - protein, 248 aa, Arabidopsis thaliana
MIGQDIEVRDGFIEALESRFLFLAADARSTLRGWRPSYRNVLLAVRNNLNIPCSSQLPTEDLEAEIFLYLVDNFSSEASGVFPGMWENSEVSEAEGSLELGLSKWKVELLAALQVGATEVQSMILKGGGMITFAKVYQLLAKKLSGKVFLEAANYQIRKEMLKKGGQFAAINLESRAALLAAKHGFAGAASRYIGLKTAMQLLGPMMWGTLLADLVIQMLETDYARILRAIYAFAQIRITRTYRLPCK

SEQ ID NO: 4993 - protein, 164 aa, Arabidopsis thaliana
MWENSEVSEAEGSLELGLSKWKVELLAALQVGATEVQSMILKGGGMITFAKVYQLLAKKLSGKVFLEAANYQIRKEMLKKGGQFAAINLESRAALLAAKHGFAGAASRYIGLKTAMQLLGPMMWGTLLADLVIQMLETDYARILRAIYAFAQIRITRTYRLPCK

SEQ ID NO: 4994 - protein, 126 aa, Arabidopsis thaliana
MILKGGGMITFAKVYQLLAKKLSGKVFLEAANYQIRKEMLKKGGQFAAINLESRAALLAAKHGFAGAASRYIGLKTAMQLLGPMMWGTLLADLVIQMLETDYARILRAIYAFAQIRITRTYRLPCK

SEQ ID NO: 4995 - DNA, 1541 bp, Arabidopsis thaliana
aaaataaaatattggcatagacgagctgctggtcagaagaagactcagaagtacctctctcctctcgtcttcttcctctagaactcccaaaaatggcgtaagccaaaaaatccaccgaaatcgataacgatggagtctagtatcctcgattccctcggagttgagattatcggcgtgatggctcccgtctccatctgcatgttcctcgtcgtccttctcacctactctctctctgtcacttctgaccctcagatccgtagcgccgctaacctcatttacatcgagaatccctccgactccaccaccgtcaagctcgaaggtagtctcgccaacgccatcgtcttcgtcgtcctcattgccgccgtcactttcatccttgttctcctcttctactataacttcaccaatttccttaagcattacatgcgtttctctgccttctttgtcttaggtacgatgggaggtgcaattttcctatcgataatccagcatttctcaattcctgttgattccatcacctgcttcatattgcttttcaatttcacgatcttggggactttgtctgtgtttgctggtgggataccaattgtgcttagacagtgttatatggttgttatggggatagttgttgcagcttggttcactaagttacctgagtggactacatggtttatcttggtggctttagctttgtatgacttggttgctgttttggcacctggtgggccacttaagttgttggtagagctggcttcgagccgcgatgaggaacttcctgctatggtttatgaagctaggccgactgtttcatcaggcaaccaaaggagaaaccgtggctcgagtttaagggctttggttggtggtgggggggtttcagattctggatcagttgagctgcaagcagttcggaatcatgatgtaaaccaacttggaagggaaaattctcataatatggattataatgctattgcggtgagggatatagacaatgtagatgatggtattggtaacggaagcagaggtggacttgagaggtcacctctagttggaagtcccagtgcgtcagagcactcaacctcagtaggaaccagaggaaatatggaagacagagaaagtgttatggatgaagaaatgtctccactagttgagttgatgggttggggagataatagggaagaagcaagaggtttggaggagtcggataacgttgtggacatttcaaatagaggcataaaacttggtcttggagactttattttctacagtgttcttgttggtagggcagcaatgtatgatctgatgactgtgtatgcctgttaccttgcgatcatctccggacttgggtgcactcttattttgttatctgtgtacaaccgagctctgcctgcccttcccatatccatcatgttgggtgttgttttttacttcttgacgcgactattgatggagccctttgttgttggggtgacaacaaacttgatgatgttctgattaacccaaaattctagtggaccaagtaaatgaaatcctgattatgctgc

SEQ ID NO: 4996 - protein, 453 aa, Arabidopsis thaliana
MESSILDSLGVEIIGVMAPVSICMFLVVLLTYSLSVTSDPQIRSAANLIYIENPSDSTTVKLEGSLANAIVFVVLIAAVTFILVLLFYYNFTNFLKHYMRFSAFFVLGTMGGAIFLSIIQHFSIPVDSITCFILLFNFTILGTLSVFAGGIPIVLRQCYMVVMGIVVAAWFTKLPEWTTWFILVALALYDLVAVLAPGGPLKLLVELASSRDEELPAMVYEARPTVSSGNQRRNRGSSLRALVGGGGVSDSGSVELQAVRNHDVNQLGRENSHNMDYNAIAVRDIDNVDDGIGNGSRGGLERSPLVGSPSASEHSTSVGTRGNMEDRESVMDEEMSPLVELMGWGDNREEARGLEESDNVVDISNRGIKLGLGDFIFYSVLVGRAAMYDLMTVYACYLAIISGLGCTLILLSVYNRALPALPISIMLGVVFYFLTRLLMEPFVVGVTTNLMMF

SEQ ID NO: 4997 - protein, 437 aa, Arabidopsis thaliana
MAPVSICMFLVVLLTYSLSVTSDPQIRSAANLIYIENPSDSTTVKLEGSLANAIVFVVLIAAVTFILVLLFYYNFTNFLKHYMRFSAFFVLGTMGGAIFLSIIQHFSIPVDSITCFILLFNFTILGTLSVFAGGIPIVLRQCYMVVMGIVVAAWFTKLPEWTTWFILVALALYDLVAVLAPGGPLKLLVELASSRDEELPAMVYEARPTVSSGNQRRNRGSSLRALVGGGGVSDSGSVELQAVRNHDVNQLGRENSHNMDYNAIAVRDIDNVDDGIGNGSRGGLERSPLVGSPSASEHSTSVGTRGNMEDRESVMDEEMSPLVELMGWGDNREEARGLEESDNVVDISNRGIKLGLGDFIFYSVLVGRAAMYDLMTVYACYLAIISGLGCTLILLSVYNRALPALPISIMLGVVFYFLTRLLMEPFVVGVTTNLMMF

SEQ ID NO: 4998 - protein, 430 aa, Arabidopsis thaliana
MFLVVLLTYSLSVTSDPQIRSAANLIYIENPSDSTTVKLEGSLANAIVFVVLIAAVTFILVLLFYYNFTNFLKHYMRFSAFFVLGTMGGAIFLSIIQHFSIPVDSITCFILLFNFTILGTLSVFAGGIPIVLRQCYMVVMGIVVAAWFTKLPEWTTWFILVALALYDLVAVLAPGGPLKLLVELASSRDEELPAMVYEARPTVSSGNQRRNRGSSLRALVGGGGVSDSGSVELQAVRNHDVNQLGRENSHNMDYNAIAVRDIDNVDDGIGNGSRGGLERSPLVGSPSASEHSTSVGTRGNMEDRESVMDEEMSPLVELMGWGDNREEARGLEESDNVVDISNRGIKLGLGDFIFYSVLVGRAAMYDLMTVYACYLAIISGLGCTLILLSVYNRALPALPISIMLGVVFYFLTRLLMEPFVVGVTTNLMMF

SEQ ID NO: 4999 - DNA, 1828 bp, Arabidopsis thaliana
gtcgccggtagttgtttccacgaaaaacaagtgatggaggaagtagtagtagtagttgcagagccaccaccgaagattactccctttgtggaatacgaagaagagcttgaagatgatgacgatgatctctcgctttcgtcagattccgatatcgctgaagctcttgattggctagacggtaaagacgatgacgagctaattggtggtggcttttctcttcatgctcgtcgtcctaatgctcacggtggacatggttcacgccctaactctagtgctcttcagcctatttcaaataaggcccagaagcttactagtcacgttcgtgcttctcctttggagggatgggaaggaagagttaaagttgggatgtcgaattctgtgacaactgcgattcgtggaagtcttagagatacagaaattgggagaagtaggaatactgataaagcggaccgggcaactgttgaacaggctcttgatccaaggacgcgtatggtattgtttagaatgcttaataggggtgtgtttaacgatgttaatggctgtatctcgacaggcaaagaagcaaatgtttatcatgccacaaaatctgacggttcggaacttgcaataaaagtgtacaagacatctgttctggttttcaaggatcgagatcgatatgtacaaggagattaccgttttagatatggctactgtcgtcacaatcctcgaaagatggtgaagacatgggctgaaaaagaacagagaaatctcaagaggcttcatgcagcaggaattaggtgtccagctgttatacttctacgccttcatgttctagtcatggagtttatagggagggatggttgggctgcaccgcgtctcaaggatgccgcattgtctctggacaagttgcgcgagtgttacttagagttgataattcaaatgcgagtattatatcagaagtgcaaattagtgcatggggatctcagtgagtataacatactttattttgaagggcacctttatataattgatgtttctcaatctgtggatctggaccatcctcttgcactcaactttctacgggaagattgtgaccatgtctcggattttttcaaaaaacatggtgtggctgttatgacaatacgagagctatttgacttcatagttgacccgacaatttcagacgaaaatgttgatagctatttggaagaggtccaacggaaagttatagagcgaggagagatatccgtagaggatgaaatcgcggattctgtattcatgaagtcatacataccgaaatctctggatgctgtgaacaacccagaggctgatgtagcgaagataacaagcgggcaggacacaggagacatgctgtaccaaacgataacggggcttaaggatgctcttcctaaagtagacgagcagcaaatagaggtgaatgctgaagaggaagaagaagaagaggaagagggaagtggagaagaaagcgaagaagagagtgaagaagaattgggtcctgaagacaagaaagctgcaaggaaagagcacaagaagaaagtgaaagaggagaaacgagagtctaggaagacgaaaacacccaaatctgtcaagaagcgaaaaaagaaagtctctaaaccccacaagactcgttagcatcttttgacacccatacttgtatcttttactatggacccgaaggctcttttgggtctctttatccaaaacagtaagttcttgtaatattcacagtacgattatgatagatcacatgataggtttgctggtgttttgagaggactaaaataatttttgttacttgacaattcgactaatggtagtctctaaattt

SEQ ID NO: 5000 - protein, 543 aa, Arabidopsis thaliana
VAGSCFHEKQVMEEVVVVVAEPPPKITPFVEYEEELEDDDDDLSLSSDSDIAEALDWLDGKDDDELIGGGFSLHARRPNAHGGHGSRPNSSALQPISNKAQKLTSHVRASPLEGWEGRVKVGMSNSVTTAIRGSLRDTEIGRSRNTDKADRATVEQALDPRTRMVLFRMLNRGVFNDVNGCISTGKEANVYHATKSDGSELAIKVYKTSVLVFKDRDRYVQGDYRFRYGYCRHNPRKMVKTWAEKEQRNLKRLHAAGIRCPAVILLRLHVLVMEFIGRDGWAAPRLKDAALSLDKLRECYLELIIQMRVLYQKCKLVHGDLSEYNILYFEGHLYIIDVSQSVDLDHPLALNFLREDCDHVSDFFKKHGVAVMTIRELFDFIVDPTISDENVDSYLEEVQRKVIERGEISVEDEIADSVFMKSYIPKSLDAVNNPEADVAKITSGQDTGDMLYQTITGLKDALPKVDEQQIEVNAEEEEEEEEEGSGEESEEESEEELGPEDKKAARKEHKKKVKEEKRESRKTKTPKSVKKRKKKVSKPHKTR

SEQ ID NO: 5001 - protein, 532 aa, Arabidopsis thaliana
MEEVVVVVAEPPPKITPFVEYEEELEDDDDDLSLSSDSDIAEALDWLDGKDDDELIGGGFSLHARRPNAHGGHGSRPNSSALQPISNKAQKLTSHVRASPLEGWEGRVKVGMSNSVTTAIRGSLRDTEIGRSRNTDKADRATVEQALDPRTRMVLFRMLNRGVFNDVNGCISTGKEANVYHATKSDGSELAIKVYKTSVLVFKDRDRYVQGDYRFRYGYCRHNPRKMVKTWAEKEQRNLKRLHAAGIRCPAVILLRLHVLVMEFIGRDGWAAPRLKDAALSLDKLRECYLELIIQMRVLYQKCKLVHGDLSEYNILYFEGHLYIIDVSQSVDLDHPLALNFLREDCDHVSDFFKKHGVAVMTIRELFDFIVDPTISDENVDSYLEEVQRKVIERGEISVEDEIADSVFMKSYIPKSLDAVNNPEADVAKITSGQDTGDMLYQTITGLKDALPKVDEQQIEVNAEEEEEEEEEGSGEESEEESEEELGPEDKKAARKEHKKKVKEEKRESRKTKTPKSVKKRKKKVSKPHKTR

SEQ ID NO: 5002 - protein, 421 aa, Arabidopsis thaliana
MSNSVTTAIRGSLRDTEIGRSRNTDKADRATVEQALDPRTRMVLFRMLNRGVFNDVNGCISTGKEANVYHATKSDGSELAIKVYKTSVLVFKDRDRYVQGDYRFRYGYCRHNPRKMVKTWAEKEQRNLKRLHAAGIRCPAVILLRLHVLVMEFIGRDGWAAPRLKDAALSLDKLRECYLELIIQMRVLYQKCKLVHGDLSEYNILYFEGHLYIIDVSQSVDLDHPLALNFLREDCDHVSDFFKKHGVAVMTIRELFDFIVDPTISDENVDSYLEEVQRKVIERGEISVEDEIADSVFMKSYIPKSLDAVNNPEADVAKITSGQDTGDMLYQTITGLKDALPKVDEQQIEVNAEEEEEEEEEGSGEESEEESEEELGPEDKKAARKEHKKKVKEEKRESRKTKTPKSVKKRKKKVSKPHKTR

SEQ ID NO: 5003 - DNA, 3080 bp, Arabidopsis thaliana
gaaaataaaattaaaggtagaaaaattaatttaggaaaaaaatattcggaaagttctgtgaaaagtcttcggatttagaacggagacagcgagaggatagagcgcttcttcggctacaacaagctttcgctaatggcggtttccttctgatcactctcaccggagccgtcatcttctctgttttaccgatttttaggaaattttgattgtggtggaaacttgttgtggcaactctactgagaaagtttgaagaagctggaatcaaagatatagctagagttaagagggttcatactaacttgtgctcgttttgtgatgtgctgttgttaacgtttggaggaaaaagttgtagtgtattaaaattcagcgtccgagttctggggcggagttgccccatagcattgactttacgcctctacacatagtccgaagggctaattcagctcaaaacatgatgatggatgaagatgttgagcaggccagtttgatgtctttcaatgacaggcctagggcttttcccaacatgcgtagtaaaacctatagtccactgatattccggattattaggaaattaaatgtccgtgtcctttcgataattctgcttttctgcttcggagcaatcttttacatgggggcaagtacttctcccatcatcgtgttcgtcttcacagtatgcatcatcagcttccttttgtcaatatatctaaccaagtgggttttagcgaaagatgaaggacctccagagatggttgagatatcagatgctatacgtgatggagctgaaggttttttcagaacgcagtatagcactatatccaagatggccattttgctagcttttgtgattctttgcatatatctattccgtagcttaactccccagcaagaggctgctggtttaggaagggcgatgtctgcttatattactgttgctgcatttcttttgggggctctatgctcaggtattgctggatatgttggaatgtgggtgtcagttcgtgctaatgtgcgggtctccagtgctgccagacgatctgcgagagaagcattgcagatagccgttcgtgctggtgggttttcagccctggttgttgttggtatggctgtgattggtatcgccatcctctattctacattttatgtgtggttgggcgtgggttcaccaggctcaatgaatgttactgacctacctcttcttcttgtcggatatggttttggtgcttcgtttgttgccttatttgctcagttgggtggtggaatatatactaagggagctgatgttggggcagatctcgttgggaaagttgagcagggaattcccgaggatgatcctcgaaatcctgctgttattgctgatttggttggagacaatgtgggggactgtgctgctagaggtgctgatttatttgaaagtatagctgcagaaatcatcagtgcaatgatactaggtggaacaatggctaagaagtgcaaaattgaagatccatcaggctttatcctttttcctctagttgttcattcttttgacttgattatatcctcaattggtattctatcaatcaagggaacacgtgatgctagtgtgaaatctccggtagaggatccaatggctgtacttcagaaaggatattctctgacaattatattagctgttataacatttggcgcgtcgactcgctggctgctttacactgaacaagctccatctgcatggttcaatttcgccctatgtgggttggttggcatcatcacagcctatatctttgtctggatatccaaatattatacagactataagcacgagcctgttcggacgttggctcttgctagctcgactggtcatgggactaatatcattgctggagtaagcttgggcctggaatcaactgctcttccagttttgactataagtgtagctattatttctgcgtattggttgggcaatacctcgggtctagtggacgaaaatggtattcccactggaggtctatttggaacagccgttgctacaatgggaatgctaagcactgcagcttatgtccttactatggacatgtttggccccatagctgacaacgctggtgggattgtcgagatgagccagcagccagagagtgtccgtgagatcactgatcttcttgatgctgttgggaacaccacaaaagcaacaacgaaagggtttgccattggatctgctgcacttgcatcattccttctctttagtgcgtatatggacgaggtttcagcgtttgctaatgtgtctttcaaagaggttgatattgctatcccagaagtgttcgttggtggattattgggtgccatgcttattttcctctttagtgcttgggcatgcgcggcagttggtcgaactgcacaagaggttgtcaacgaagtaagaaggcaatttattgagaggcctggcataatggagtacaaggagaagccagattatagtcgctgtgtcgccatagtcgcatctgcagctttaagagaaatgataaagccaggagctttagctattgcatcacccattgtagttggtttggtgtttcgaatcttgggttactacacaggacaacctctgctcggagcaaaagttgtagcttctatgctcatgtttgcaacagtttgtggtatcttaatggcacttttcctaaacacggcgggaggtgcttgggacaatgcaaagaaatacatagagaccggggcacttgggggcaaaggaagtgaagctcacaaagcagctgtgactggtgataccgtgggagatccgttcaaggacacagccggtccatccattcacgtcctcataaaaatgcttgcgactataactctcgtcatggctccggttttcctctgaaagtgaaccgttacttatccatcccggcttatttactctcttgcacatatacaaatagagagggagagaggttggttataaaatgatttacatggattaatggtttttgtgtttcatttcatctgaataaatgagataattctgtttttgagtttagagacactctttaaggaattctagagacattttaatcaaccacatctttgactttgagagtctt

SEQ ID NO: 5004 - protein, 802 aa, Arabidopsis thaliana
MMMDEDVEQASLMSFNDRPRAFPNMRSKTYSPLIFRIIRKLNVRVLSIILLFCFGAIFYMGASTSPIIVFVFTVCIISFLLSIYLTKWVLAKDEGPPEMVEISDAIRDGAEGFFRTQYSTISKMAILLAFVILCIYLFRSLTPQQEAAGLGRAMSAYITVAAFLLGALCSGIAGYVGMWVSVRANVRVSSAARRSAREALQIAVRAGGFSALVVVGMAVIGIAILYSTFYVWLGVGSPGSMNVTDLPLLLVGYGFGASFVALFAQLGGGIYTKGADVGADLVGKVEQGIPEDDPRNPAVIADLVGDNVGDCAARGADLFESIAAEIISAMILGGTMAKKCKIEDPSGFILFPLVVHSFDLIISSIGILSIKGTRDASVKSPVEDPMAVLQKGYSLTIILAVITFGASTRWLLYTEQAPSAWFNFALCGLVGIITAYIFVWISKYYTDYKHEPVRTLALASSTGHGTNIIAGVSLGLESTALPVLTISVAIISAYWLGNTSGLVDENGIPTGGLFGTAVATMGMLSTAAYVLTMDMFGPIADNAGGIVEMSQQPESVREITDLLDAVGNTTKATTKGFAIGSAALASFLLFSAYMDEVSAFANVSFKEVDIAIPEVFVGGLLGAMLIFLFSAWACAAVGRTAQEVVNEVRRQFIERPGIMEYKEKPDYSRCVAIVASAALREMIKPGALAIASPIVVGLVFRILGYYTGQPLLGAKVVASMLMFATVCGILMALFLNTAGGAWDNAKKYIETGALGGKGSEAHKAAVTGDTVGDPFKDTAGPSIHVLIKMLATITLVMAPVFL

SEQ ID NO: 5005 - protein, 801 aa, Arabidopsis thaliana
MMDEDVEQASLMSFNDRPRAFPNMRSKTYSPLIFRIIRKLNVRVLSIILLFCFGAIFYMGASTSPIIVFVFTVCIISFLLSIYLTKWVLAKDEGPPEMVEISDAIRDGAEGFFRTQYSTISKMAILLAFVILCIYLFRSLTPQQEAAGLGRAMSAYITVAAFLLGALCSGIAGYVGMWVSVRANVRVSSAARRSAREALQIAVRAGGFSALVVVGMAVIGIAILYSTFYVWLGVGSPGSMNVTDLPLLLVGYGFGASFVALFAQLGGGIYTKGADVGADLVGKVEQGIPEDDPRNPAVIADLVGDNVGDCAARGADLFESIAAEIISAMILGGTMAKKCKIEDPSGFILFPLVVHSFDLIISSIGILSIKGTRDASVKSPVEDPMAVLQKGYSLTIILAVITFGASTRWLLYTEQAPSAWFNFALCGLVGIITAYIFVWISKYYTDYKHEPVRTLALASSTGHGTNIIAGVSLGLESTALPVLTISVAIISAYWLGNTSGLVDENGIPTGGLFGTAVATMGMLSTAAYVLTMDMFGPIADNAGGIVEMSQQPESVREITDLLDAVGNTTKATTKGFAIGSAALASFLLFSAYMDEVSAFANVSFKEVDIAIPEVFVGGLLGAMLIFLFSAWACAAVGRTAQEVVNEVRRQFIERPGIMEYKEKPDYSRCVAIVASAALREMIKPGALAIASPIVVGLVFRILGYYTGQPLLGAKVVASMLMFATVCGILMALFLNTAGGAWDNAKKYIETGALGGKGSEAHKAAVTGDTVGDPFKDTAGPSIHVLIKMLATITLVMAPVFL

SEQ ID NO: 5006 - protein, 800 aa, Arabidopsis thaliana
MDEDVEQASLMSFNDRPRAFPNMRSKTYSPLIFRIIRKLNVRVLSIILLFCFGAIFYMGASTSPIIVFVFTVCIISFLLSIYLTKWVLAKDEGPPEMVEISDAIRDGAEGFFRTQYSTISKMAILLAFVILCIYLFRSLTPQQEAAGLGRAMSAYITVAAFLLGALCSGIAGYVGMWVSVRANVRVSSAARRSAREALQIAVRAGGFSALVVVGMAVIGIAILYSTFYVWLGVGSPGSMNVTDLPLLLVGYGFGASFVALFAQLGGGIYTKGADVGADLVGKVEQGIPEDDPRNPAVIADLVGDNVGDCAARGADLFESIAAEIISAMILGGTMAKKCKIEDPSGFILFPLVVHSFDLIISSIGILSIKGTRDASVKSPVEDPMAVLQKGYSLTIILAVITFGASTRWLLYTEQAPSAWFNFALCGLVGIITAYIFVWISKYYTDYKHEPVRTLALASSTGHGTNIIAGVSLGLESTALPVLTISVAIISAYWLGNTSGLVDENGIPTGGLFGTAVATMGMLSTAAYVLTMDMFGPIADNAGGIVEMSQQPESVREITDLLDAVGNTTKATTKGFAIGSAALASFLLFSAYMDEVSAFANVSFKEVDIAIPEVFVGGLLGAMLIFLFSAWACAAVGRTAQEVVNEVRRQFIERPGIMEYKEKPDYSRCVAIVASAALREMIKPGALAIASPIVVGLVFRILGYYTGQPLLGAKVVASMLMFATVCGILMALFLNTAGGAWDNAKKYIETGALGGKGSEAHKAAVTGDTVGDPFKDTAGPSIHVLIKMLATITLVMAPVFL

SEQ ID NO: 5007 - DNA, 880 bp, Arabidopsis thaliana
aagccgctccattatttttgtttgtttgaaacaaactctaaaaccctaaattcttcttctcaagcagccacatcttcctctttcactagctatggagttttggggtatcgagattaagccagggaagccatttaaggtgatacaaaaagatggattcatggtccatgcctctcaggttacccttggtgacgttgagaaggttaaaaaagatgagacttttgccgtttatgtgaagattggtgatgatgagaatgggtttatgattggaaatctctcacagaagtttcctcaattttctattgatctctacttagggcacgagtttgagatttctcacaacagtacaagcagtgtctatcttattggttacaggacctttgatgcttttgacgaactggatgaggagattgattctgattctgagttagatgaatatatggaacaacaaattgctgctttgcctcaaaatgagatcaatcctgaagaagatgatgaatccgactcagatgagatgggtttggacgaggatgatgactcttcagatgaagaagatgtagaggctgaagcacctttaaaggtggctcctccgagcaaaaagatgccaaatggtgcatttgagatagctaaaggtggaaagaagaacaagtcatcaggagggaagaagagatgcccattcccttgtggtccctcttgcaaaaagtagaagatatttgcacaccaagtcacatttttccaatagaaatttttacttgactgtattggtgaatcgttgagtgacttatgaggcttttggcatcttaaaatttttggattattataatatatgttatgttgtcattttggagtgttaatgggtttaaatgaaatatgatttttgccc

SEQ ID NO: 5008 - protein, 203 aa, Arabidopsis thaliana
MEFWGIEIKPGKPFKVIQKDGFMVHASQVTLGDVEKVKKDETFAVYVKIGDDENGFMIGNLSQKFPQFSIDLYLGHEFEISHNSTSSVYLIGYRTFDAFDELDEEIDSDSELDEYMEQQIAALPQNEINPEEDDESDSDEMGLDEDDDSSDEEDVEAEAPLKVAPPSKKMPNGAFEIAKGGKKNKSSGGKKRCPFPCGPSCKK

SEQ ID NO: 5009 - protein, 181 aa, Arabidopsis thaliana
MVHASQVTLGDVEKVKKDETFAVYVKIGDDENGFMIGNLSQKFPQFSIDLYLGHEFEISHNSTSSVYLIGYRTFDAFDELDEEIDSDSELDEYMEQQIAALPQNEINPEEDDESDSDEMGLDEDDDSSDEEDVEAEAPLKVAPPSKKMPNGAFEIAKGGKKNKSSGGKKRCPFPCGPSCKK

SEQ ID NO: 5010 - protein, 147 aa, Arabidopsis thaliana
MIGNLSQKFPQFSIDLYLGHEFEISHNSTSSVYLIGYRTFDAFDELDEEIDSDSELDEYMEQQIAALPQNEINPEEDDESDSDEMGLDEDDDSSDEEDVEAEAPLKVAPPSKKMPNGAFEIAKGGKKNKSSGGKKRCPFPCGPSCKK

SEQ ID NO: 5011 - DNA, 936 bp, Arabidopsis thaliana
aacccacaaattgatctcttctctcttctcttacaccatcttcttcattcaccatgggaagatctccttgttgtgaaaaagctcacacaaacaaaggagcttggactaaagaagaagatcaacgtctcgtagattatatccgtaatcacggtgaaggttgttggcgttctcttcctaaatccgctggattgttgcgttgtggtaaaagttgtagattgagatggattaattaccttcgtcctgatcttaaacgtggtaattttactgatgatgaagatcaaatcatcatcaaactccatagcttactcggtaacaaatggtcattgatagctggaagattaccaggaagaacagataacgaaataaagaattattggaacactcatattaagaggaagcttcttagtcacggtattgatccacaaactcatcgtcagattaacgaatccaaaacggtgtcgtctcaagttgttgttcctattcaaaacgatgccgttgagtattctttttccaatttagccgttaaaccgaagacggaaaattcctccgataacggagcttcgactagcggcacgacgacggacgaggatctccggcagaatggggagtgttattatagtgataattcaggacatataaagctgaatttggatttaactcttgggtttggatcctggtcgggtcggatagtcggagtcgggtcatcggctgattctaaaccgtggtgcgacccggtgatggaggcgcgtttgtcactgttgtaataatttgtcaaaaaaatcccaaaaaatgggttttgttacttcattttttttttgcttgagtccttttggataaatatagaaattctttacttcagtttctttggtatttttgttttagtttttgttcatattaccttttgaagaaaaagaaaaaaaacgatacatggtttcc

SEQ ID NO: 5012 - protein, 236 aa, Arabidopsis thaliana
MGRSPCCEKAHTNKGAWTKEEDQRLVDYIRNHGEGCWRSLPKSAGLLRCGKSCRLRWINYLRPDLKRGNFTDDEDQIIIKLHSLLGNKWSLIAGRLPGRTDNEIKNYWNTHIKRKLLSHGIDPQTHRQINESKTVSSQVVVPIQNDAVEYSFSNLAVKPKTENSSDNGASTSGTTTDEDLRQNGECYYSDNSGHIKLNLDLTLGFGSWSGRIVGVGSSADSKPWCDPVMEARLSLL

SEQ ID NO: 5013 - DNA, 1477 bp, Arabidopsis thaliana
acaattctttgcatcatcatcattcatcatggattcttcttaccttagaatctctctttcttttctcttctgggctttactactctcaccggctgtgtcacagtcatcttcttgttcgtcacagacattttccggcgtcaaatcttaccctcactgtctcgacctccctgatcttaaagccattctccattactcttatgacgcatctaacacaactctcgccgttgttttctctgctccaccgtcaaaacctggtggttggatcgcttgggctattaaccctaaatccaccggcatggctggatctcaagccctcgttgcctctaaggaccctagcaccggcgttgcttccgtgacgacccttaacatcgtctcttacagctctctggttccctcgaaactgtcctttgacgtgtgggatgttaaggcggaggaggcggctaatgacggtggagctttacgaatctttgcgaaagtgaaggttccggcggatttagcggcgagtgggaaggttaaccaggtttggcaggttggtccgggagtgtctaatgggaggatacaggctcatgatttcagcggtcccaatcttaactcagtgggatcactcgatttaaccgggaccacccccggagtccctgtctccggaggtggtggtgccggtaattctagaatccacaagagaaatatccatggaatattgaacgcagtgagttggggacttctatttcccattggagcaatgatagctaggtatatgagaatctttgaatcagcagatcctgcttggttttacctccacgtgtcatgccaattctctgcttatgtcatcggtgttgccggatgggccaccggactcaagcttggttcagaatctaaaggtattcagtacaacactcaccggaacatcggcatctgtctcttctctatagccactcttcagatgtttgcgatgctgttgcggccaaggaaggaccacaagtttagattcgtttggaatatttaccaccacggagttggatactctatcctcatccttggaatcatcaatgttttcaaaggtcttagcatcttgaatccaaagcatacttacaagacggcttatatcgctgtgattgggaccttaggaggcatcacgttactcttggaagttgttacttgggtcattgtcctcaagagaaaatctgccaagtctacaaagcctctcaaggcctaatggtgttggtaattcaaaggatttgtattgttttattttcttttttttttgaagttagaaattgcattgtctttctccacaaattatgattcatctcttgacgttgcttgttttgaggatgatgattatgacttgtgtgttttatgtatagtaggagaaacacatatatgtcttagtgtttgttctttgtagctctgccttttatttcgtgtgtttttgtggttcagaatacttgtagggaattataaactaatttttcaatct

SEQ ID NO: 5014 - protein, 403 aa, Arabidopsis thaliana
QFFASSSFIMDSSYLRISLSFLFWALLLSPAVSQSSSCSSQTFSGVKSYPHCLDLPDLKAILHYSYDASNTTLAVVFSAPPSKPGGWIAWAINPKSTGMAGSQALVASKDPSTGVASVTTLNIVSYSSLVPSKLSFDVWDVKAEEAANDGGALRIFAKVKVPADLAASGKVNQVWQVGPGVSNGRIQAHDFSGPNLNSVGSLDLTGTTPGVPVSGGGGAGNSRIHKRNIHGILNAVSWGLLFPIGAMIARYMRIFESADPAWFYLHVSCQFSAYVIGVAGWATGLKLGSESKGIQYNTHRNIGICLFSIATLQMFAMLLRPRKDHKFRFVWNIYHHGVGYSILILGIINVFKGLSILNPKHTYKTAYIAVIGTLGGITLLLEVVTWVIVLKRKSAKSTKPLKA

SEQ ID NO: 5015 - protein, 394 aa, Arabidopsis thaliana
MDSSYLRISLSFLFWALLLSPAVSQSSSCSSQTFSGVKSYPHCLDLPDLKAILHYSYDASNTTLAVVFSAPPSKPGGWIAWAINPKSTGMAGSQALVASKDPSTGVASVTTLNIVSYSSLVPSKLSFDVWDVKAEEAANDGGALRIFAKVKVPADLAASGKVNQVWQVGPGVSNGRIQAHDFSGPNLNSVGSLDLTGTTPGVPVSGGGGAGNSRIHKRNIHGILNAVSWGLLFPIGAMIARYMRIFESADPAWFYLHVSCQFSAYVIGVAGWATGLKLGSESKGIQYNTHRNIGICLFSIATLQMFAMLLRPRKDHKFRFVWNIYHHGVGYSILILGIINVFKGLSILNPKHTYKTAYIAVIGTLGGITLLLEVVTWVIVLKRKSAKSTKPLKA

SEQ ID NO: 5016 - protein, 305 aa, Arabidopsis thaliana
MAGSQALVASKDPSTGVASVTTLNIVSYSSLVPSKLSFDVWDVKAEEAANDGGALRIFAKVKVPADLAASGKVNQVWQVGPGVSNGRIQAHDFSGPNLNSVGSLDLTGTTPGVPVSGGGGAGNSRIHKRNIHGILNAVSWGLLFPIGAMIARYMRIFESADPAWFYLHVSCQFSAYVIGVAGWATGLKLGSESKGIQYNTHRNIGICLFSIATLQMFAMLLRPRKDHKFRFVWNIYHHGVGYSILILGIINVFKGLSILNPKHTYKTAYIAVIGTLGGITLLLEVVTWVIVLKRKSAKSTKPLKA

SEQ ID NO: 5017 - DNA, 853 bp, Arabidopsis thaliana
taatcccccccccccccccgatccacaaaaagccattccctctctcaactctctgaatatttttcttcttacgatttacaaatttccgatgctgtgacattaacgtctgagaacagagaaacacttcaaatctttgaattcgtatgtgcgacggagacggaggagccatcagtttcgaaaatggcgtgcgaaggtggaggatctaacgtcagatctagctactacaccattctcgggattcgtaaagatgcctctgtttccgatatccgcactgcttatcgtaagctagctatgaaatggcatccggatagatatgctcgaaatcctggagtcgccggagaagctaaacgtcggtttcaacaaatccaggaagcctattctgttttgaatgatgagaataagaggtcaatgtacgatgttggactatatgatcctcatgaagatgatgacgatgacttctgtgatttcatgcaagagatgatctcaatgatgaacaatgtcaaagacgcgggagagagcttggaagacttgcaacgaatgttcacggatatggttggtggagatggcgtgagctatgactgtaacaataatccaaagggcaacaaaagaccacgtgtcaatatctcgaggagtagtgctgcgatgcgttaaggcttacttcttttgtgtatgagtgtcgtgttgtatcaaaatttcaattccatgttcaattgtctagaccataaaataaattatctgtgaaaaccaactagaactaggtagaatctttggaatcccacatgccccaatcactaatgtatctctcatgatttggttgattttaaagattcgaaaattattcatgtattgttgc

SEQ ID NO: 5018 - protein, 156 aa, Arabidopsis thaliana
MACEGGGSNVRSSYYTILGIRKDASVSDIRTAYRKLAMKWHPDRYARNPGVAGEAKRRFQQIQEAYSVLNDENKRSMYDVGLYDPHEDDDDDFCDFMQEMISMMNNVKDAGESLEDLQRMFTDMVGGDGVSYDCNNNPKGNKRPRVNISRSSAAMR

SEQ ID NO: 5019 - protein, 119 aa, Arabidopsis thaliana
MKWHPDRYARNPGVAGEAKRRFQQIQEAYSVLNDENKRSMYDVGLYDPHEDDDDDFCDFMQEMISMMNNVKDAGESLEDLQRMFTDMVGGDGVSYDCNNNPKGNKRPRVNISRSSAAMR

SEQ ID NO: 5020 - protein, 80 aa, Arabidopsis thaliana
MYDVGLYDPHEDDDDDFCDFMQEMISMMNNVKDAGESLEDLQRMFTDMVGGDGVSYDCNNNPKGNKRPRVNISRSSAAMR

SEQ ID NO: 5021 - DNA, 1032 bp, Arabidopsis thaliana
aagaataaaccgcgtcgcgtctcttttctggaaaaaacgagaaactgtgatcttggcccttttattacccctatcctcttcttcttcaatctctccgatcaaaatccttttaagctctgtagacccaggttacgcagagaagaagaacagaacaaggaattatataatcattggcttgatcaatctgaattgcagttcatggcgctaaaccctcaattactacccaatgggatgcctgttccctttgttaatgaaatgttcgtcctagtccgagatggtgttgagtttgaagtcgacaagatccctggagggcatggaggtcatgttaaggccaagggggtgatttacttgtctaatatacggatggtctttgtttcaagcaagcctgttgacaactttgttgcttttgacatgcccctgctttacatccatgccgagaaatttaatcagccaatatttcactgcaacaatattgctggacaagtggagcctgtggtgccagaaaatgagcatagagctctatattcaacacacagtttcaagatcctatttaaggaaggtggttgtgggacatttgttcctctcttcttgaatctcatatcatcagtgagacaatacaacagacaaatgcaacaagcagcagaagcagcagcggcagctcctcatgttgatcctcttcaagccgctcagacacctgtggacgaaatgatgagacatgcgtacgtggaccctaatgatccaacgaggatatatctgcaacagccatcaggggaatctcagttgaggcgtagagcttaccattcgggtgcggcggaacattgagatacacggaaaaaaaaaatacaaaggctatgaatacagaaacagcaacagattagtgttgctaataagcaaaacgtgttgtttgtttgtttaaagttgaaaactaaaagtctaaaaccatctgtgtaaagaaagatgagacttgtttggtgtgtggatgtatctggtaaaattggagtcgtaataatcataagtttggtttatatattg

SEQ ID NO: 5022 - protein, 273 aa, Arabidopsis thaliana
KNKPRRVSFLEKTRNCDLGPFITPILFFFNLSDQNPFKLCRPRLRREEEQNKELYNHWLDQSELQFMALNPQLLPNGMPVPFVNEMFVLVRDGVEFEVDKIPGGHGGHVKAKGVIYLSNIRMVFVSSKPVDNFVAFDMPLLYIHAEKFNQPIFHCNNIAGQVEPVVPENEHRALYSTHSFKILFKEGGCGTFVPLFLNLISSVRQYNRQMQQAAEAAAAAPHVDPLQAAQTPVDEMMRHAYVDPNDPTRIYLQQPSGESQLRRRAYHSGAAEH

SEQ ID NO: 5023 - protein, 207 aa, Arabidopsis thaliana
MALNPQLLPNGMPVPFVNEMFVLVRDGVEFEVDKIPGGHGGHVKAKGVIYLSNIRMVFVSSKPVDNFVAFDMPLLYIHAEKFNQPIFHCNNIAGQVEPVVPENEHRALYSTHSFKILFKEGGCGTFVPLFLNLISSVRQYNRQMQQAAEAAAAAPHVDPLQAAQTPVDEMMRHAYVDPNDPTRIYLQQPSGESQLRRRAYHSGAAEH

SEQ ID NO: 5024 - protein, 196 aa, Arabidopsis thaliana
MPVPFVNEMFVLVRDGVEFEVDKIPGGHGGHVKAKGVIYLSNIRMVFVSSKPVDNFVAFDMPLLYIHAEKFNQPIFHCNNIAGQVEPVVPENEHRALYSTHSFKILFKEGGCGTFVPLFLNLISSVRQYNRQMQQAAEAAAAAPHVDPLQAAQTPVDEMMRHAYVDPNDPTRIYLQQPSGESQLRRRAYHSGAAEH

SEQ ID NO: 5025 - DNA, 1336 bp, Arabidopsis thaliana
actctttactctttcttccgtttgctcgaaccatctagtctaagagaaagaaaaaatactaaagagaaagaagaagaggacttgaatacggaagcttgagagaatgaaagcgatcgtgatctcggagccaggtaagccggaggttctgcaactccgtgatgtggcagacccagaagttaaagacgatgaggttctcatcagagttctcgctactgctttgaatcgtgcagatactctccaaagacttggcctttataatccaccacctggctcaagcccttaccttggtctcgaatgttctgggaccattgaatccgtcggtaaaggcgtctctcgatggaaagtcggagaccaggtgtgtgctcttctttctggaggaggttatgcagagaaagtttctgttcctgctggacaaattttcccaattcccgctggtatctctctaaaggatgcagcggctttccctgaagtggcatgcactgtttggtctactgtcttcatgatgggccgtctctctgttggtgaatcattcttgattcatggaggttcaagtgggattgggacatttgctattcagatagctaaacatctgggagtgagagtatttgtcacagctgggagtgatgaaaagctagctgcgtgcaaagaactcggggctgatgtttgtataaattacaaaaccgaggattttgttgcaaaggtaaaagcggaaaccgatgggaaaggagtggatgttatcttggactgcattggggcaccgtatttgcagaaaaatctcgacagcttaaactttgatggaaggttatgtattatcggtttaatgggaggagccaatgcagaaataaaactaagtagtctgcttccaaagcgtctcactgtcttaggagctgcattaagaccaagaagccctgaaaacaaagcagttgttgtaagggaagtcgagaagaatgtctggccagcgatagaagcagggaaggtaaaaccagtgatttacaagtatttaccattgtcacaagcagcagaaggtcatagccttatggagagtagcaaccatattggtaagattctccttgagacttgattctctgcaaagggagaaatgttcagagacaagagtcatggtcaataatcaataaaatctggtcgattctgttcatagatatctctttacaagagttctgtttgttggcttttatgtatctctgatttggtcaaaaagacactgtaactatggaacatatatagtatcaaataagctgttgtataccaaacattgatttcgaagtagaatatgattttgtaagaagtttttatttattttgggcttaaaaagtgc

SEQ ID NO: 5026 - protein, 325 aa, Arabidopsis thaliana
MKAIVISEPGKPEVLQLRDVADPEVKDDEVLIRVLATALNRADTLQRLGLYNPPPGSSPYLGLECSGTIESVGKGVSRWKVGDQVCALLSGGGYAEKVSVPAGQIFPIPAGISLKDAAAFPEVACTVWSTVFMMGRLSVGESFLIHGGSSGIGTFAIQIAKHLGVRVFVTAGSDEKLAACKELGADVCINYKTEDFVAKVKAETDGKGVDVILDCIGAPYLQKNLDSLNFDGRLCIIGLMGGANAEIKLSSLLPKRLTVLGAALRPRSPENKAVVVREVEKNVWPAIEAGKVKPVIYKYLPLSQAAEGHSLMESSNHIGKILLET

SEQ ID NO: 5027 - protein, 193 aa, Arabidopsis thaliana
MMGRLSVGESFLIHGGSSGIGTFAIQIAKHLGVRVFVTAGSDEKLAACKELGADVCINYKTEDFVAKVKAETDGKGVDVILDCIGAPYLQKNLDSLNFDGRLCIIGLMGGANAEIKLSSLLPKRLTVLGAALRPRSPENKAVVVREVEKNVWPAIEAGKVKPVIYKYLPLSQAAEGHSLMESSNHIGKILLET

SEQ ID NO: 5028 - protein, 192 aa, Arabidopsis thaliana
MGRLSVGESFLIHGGSSGIGTFAIQIAKHLGVRVFVTAGSDEKLAACKELGADVCINYKTEDFVAKVKAETDGKGVDVILDCIGAPYLQKNLDSLNFDGRLCIIGLMGGANAEIKLSSLLPKRLTVLGAALRPRSPENKAVVVREVEKNVWPAIEAGKVKPVIYKYLPLSQAAEGHSLMESSNHIGKILLET

SEQ ID NO: 5029 - DNA, 591 bp, Arabidopsis thaliana
aaaaataaaagaaaaatggggatatcgggttcaaagcgagttacgacgattctatctaactcgcccgagtttgactcggcttgtgactcagcatacgacgaatctctctctcttgcacagcatgctttcgccggagttcgtccttaccagctcgtctccgccgccgcccacatccaccggaatctttccgctcttcgtttccctctaatcaccagatggctctcttctcctccgagtcaatcccaagtcgactcagctctccgagtcaccgtctctcgagtcacggcggcggatgaggaggagatcctcgggcaagaggagttcaagaaatgggccgtcgaggttttcgcggaagccgttgtgggaaacgcgaggaagacaatagcgagtcggattccgttaggaatcgtcggaatcggtgggatcggcgccgtgactcggtcgggtcaaaacttgatcggagctgcgattggtgtgtacgcgataggagttgctacttccgtttttctaagcctcactgattagaagaaaagattacgttgttgttcttgatttgctgaaattaataaattttaacaatcttgtttaaac

SEQ ID NO: 5030 - protein, 174 aa, Arabidopsis thaliana
KNKRKMGISGSKRVTTILSNSPEFDSACDSAYDESLSLAQHAFAGVRPYQLVSAAAHIHRNLSALRFPLITRWLSSPPSQSQVDSALRVTVSRVTAADEEEILGQEEFKKWAVEVFAEAVVGNARKTIASRIPLGIVGIGGIGAVTRSGQNLIGAAIGVYAIGVATSVFLSLTD

SEQ ID NO: 5031 - protein, 169 aa, Arabidopsis thaliana
MGISGSKRVTTILSNSPEFDSACDSAYDESLSLAQHAFAGVRPYQLVSAAAHIHRNLSALRFPLITRWLSSPPSQSQVDSALRVTVSRVTAADEEEILGQEEFKKWAVEVFAEAVVGNARKTIASRIPLGIVGIGGIGAVTRSGQNLIGAAIGVYAIGVATSVFLSLTD

SEQ ID NO: 5032 - DNA, 1086 bp, Arabidopsis thaliana
gtagcaccacaacaacaatatccacattcttcttcttttgagtattacatccaacgaaacgtctctttctttctctctgataggcaacaatggcgcagaggaagatgattgtgtttcccaccaagaatgaattgtccgaagcaatggctgagtacactgccaatctctccgccaagttcatcaaagagaaaggccttttcaccgttgttctctccggcggtgacctaatcgattggctctgcaagttggtgcaacctccttatattgattcaatcgaatggccaaaatggcacgtcttttgggtcgatgagagggtttgtgcatgggaagatccagacagtaactacaaactcgccatggagggttttctctctaaggttccgattccggataagaacatctacgcaatcgacaagcacttggcggctgatggtaacgccgagcactgcgcgacgctctacgaggagtgtctaaagaatctggtgaaagaaaagattatcccaatatcgaaaaagacagggtatcctgagtttgatctacaacttctagggatgggtcctgatggccacatggcgtctctcttcccaaaccatccacagatcaatgagaagcagaaatgggtcacttacatcaccgactctccaaaaccaccaccaaagagaatcacattcactttaccggtcatcaactctactttgtacaatcttatggccatttgtgacaaagcaccggccaaatccgtggctgagatcatgaagcacaacaacctctcgttaccttctgctcatcttagtgctcaagtcgaaaatgtttggtaccttgaccaagcagctgcctccgagctctagagaggtagcctaaacacattaatattggtgttttgtttgtagtctctacgttgctttgtgttgaataaccggttaatacatttgcgtacgtttacttcgtacaaaatgtgttgaatattcgagctagttgtttcttgtagttgtgatgtgagtccctggctatgactatatatcattataaaaatatatagtgggcttcatttaatctgtcatttcatgaatggtgtttaattaaact

SEQ ID NO: 5033 - protein, 252 aa, Arabidopsis thaliana
MAQRKMIVFPTKNELSEAMAEYTANLSAKFIKEKGLFTVVLSGGDLIDWLCKLVQPPYIDSIEWPKWHVFWVDERVCAWEDPDSNYKLAMEGFLSKVPIPDKNIYAIDKHLAADGNAEHCATLYEECLKNLVKEKIIPISKKTGYPEFDLQLLGMGPDGHMASLFPNHPQINEKQKWVTYITDSPKPPPKRITFTLPVINSTLYNLMAICDKAPAKSVAEIMKHNNLSLPSAHLSAQVENVWYLDQAAASEL

SEQ ID NO: 5034 - protein, 247 aa, Arabidopsis thaliana
MIVFPTKNELSEAMAEYTANLSAKFIKEKGLFTVVLSGGDLIDWLCKLVQPPYIDSIEWPKWHVFWVDERVCAWEDPDSNYKLAMEGFLSKVPIPDKNIYAIDKHLAADGNAEHCATLYEECLKNLVKEKIIPISKKTGYPEFDLQLLGMGPDGHMASLFPNHPQINEKQKWVTYITDSPKPPPKRITFTLPVINSTLYNLMAICDKAPAKSVAEIMKHNNLSLPSAHLSAQVENVWYLDQAAASEL

SEQ ID NO: 5035 - protein, 234 aa, Arabidopsis thaliana
MAEYTANLSAKFIKEKGLFTVVLSGGDLIDWLCKLVQPPYIDSIEWPKWHVFWVDERVCAWEDPDSNYKLAMEGFLSKVPIPDKNIYAIDKHLAADGNAEHCATLYEECLKNLVKEKIIPISKKTGYPEFDLQLLGMGPDGHMASLFPNHPQINEKQKWVTYITDSPKPPPKRITFTLPVINSTLYNLMAICDKAPAKSVAEIMKHNNLSLPSAHLSAQVENVWYLDQAAASEL

SEQ ID NO: 5036 - DNA, 930 bp, Arabidopsis thaliana
attcctctgagaaaccctaagaaaaaccctgcctgaaaatctctgttttttttgacgattctttctttgtgatcggaaaaaatggtggctggtctaagagatttcacgctcagaaccgaagatggctccgggaaaccggtactggatgaatctaacggcgaggaacttatgcacgttcagacttccgtcgccgtcgctctcggaaaccgtcccattgagtctcccggaactctctacatcacttccaggaaattaatttggctgagcgatgtagacatggctaaaggatacgcagttgatttcttatcaatatcgcttcacgctgtttctagagatcctgaggcttattcatctccttgtatatatactcagattgaagttgaagaagatgaggatgatgagtctgattcagaatccactgaagttttggacttatcaaagatcagagagatgaggcttgttccttctgactctacccagttggagacgctgtttgatgtattctgcgagtgtgctgagctgaatcctgaaccagttcaagaagaagaagaagaaagcggacataattgggtgtttagtgctgatcagatggatgttcgtggaggagatgatgatgcagagtggcaaatatctcagagtccgactagtgtaattggtcattccaatggagatgaaggtcttaatcagcctatgcttgagctccaaatcaatgatcagaggtttgaggatgctgaagagatggttcatgaaagtgagaccaaagatcactagactcttcacaattgtactcgaaaacatagtagttgtgttattttaacgatgaaagagttgtattatgttcaacgataaagtattatgttcgtgatacttagcttttcaatttatggctgattaaactttaatctttctcgtaatagatctctcaatttg

SEQ ID NO: 5037 - protein, 229 aa, Arabidopsis thaliana
MVAGLRDFTLRTEDGSGKPVLDESNGEELMHVQTSVAVALGNRPIESPGTLYITSRKLIWLSDVDMAKGYAVDFLSISLHAVSRDPEAYSSPCIYTQIEVEEDEDDESDSESTEVLDLSKIREMRLVPSDSTQLETLFDVFCECAELNPEPVQEEEEESGHNWVFSADQMDVRGGDDDAEWQISQSPTSVIGHSNGDEGLNQPMLELQINDQRFEDAEEMVHESETKDH

SEQ ID NO: 5038 - protein, 200 aa, Arabidopsis thaliana
MHVQTSVAVALGNRPIESPGTLYITSRKLIWLSDVDMAKGYAVDFLSISLHAVSRDPEAYSSPCIYTQIEVEEDEDDESDSESTEVLDLSKIREMRLVPSDSTQLETLFDVFCECAELNPEPVQEEEEESGHNWVFSADQMDVRGGDDDAEWQISQSPTSVIGHSNGDEGLNQPMLELQINDQRFEDAEEMVHESETKDH

SEQ ID NO: 5039 - protein, 164 aa, Arabidopsis thaliana
MAKGYAVDFLSISLHAVSRDPEAYSSPCIYTQIEVEEDEDDESDSESTEVLDLSKIREMRLVPSDSTQLETLFDVFCECAELNPEPVQEEEEESGHNWVFSADQMDVRGGDDDAEWQISQSPTSVIGHSNGDEGLNQPMLELQINDQRFEDAEEMVHESETKDH

SEQ ID NO: 5040 - DNA, 677 bp, Arabidopsis thaliana
ctaatcaaaaaatcgcgcgattgggggcagttggagagacgaacaagtcgtggtgagattttaggaagacgaagaagatggagagtatctggcgaatcgcgacgggacaagatccgagccgtgaagattacgaagggatcgagttctggtcaaaccctgagcgttctggttggctcacaaagcaaggcgattacatcaaaacctggcgtcgtcgttggttcgttctcaaacgagggaagcttctctggttcaaagatcaagccgctgctggaattcgtggatctacgccgcgtggtgtgatctccgttggtgattgtctcaccgtgaaaggagctgaggatgttgtgaataagccttttgcttttgagctatctagtggtagctataccatgttcttcattgctgataatgagaaggagaaagaagagtggattaattcgattggaagatcgattgtgcaacactcgaggtctgtgacggattctgaggttctcgattatgatcacaggcggtgattactatcattatgtatgattttgttggccttagggttttcgtggaatgtaacactctcttgtcttttaagttatgatgttattgtaccgtgatcgtgatgtatctaatgcctcaagtttcaaaaattgattctctctttgttatgatttttgattccaaac

SEQ ID NO: 5041 - protein, 145 aa, Arabidopsis thaliana
MESIWRIATGQDPSREDYEGIEFWSNPERSGWLTKQGDYIKTWRRRWFVLKRGKLLWFKDQAAAGIRGSTPRGVISVGDCLTVKGAEDVVNKPFAFELSSGSYTMFFIADNEKEKEEWINSIGRSIVQHSRSVTDSEVLDYDHRR

SEQ ID NO: 5042 - protein, 99 aa, Arabidopsis thaliana
LIKKSRDWGQLERRTSRGEILGRRRRWRVSGESRRDKIRAVKITKGSSSGQTLSVLVGSQSKAITSKPGVVVGSFSNEGSFSGSKIKPLLEFVDLRRVV

SEQ ID NO: 5043 - DNA, 1035 bp, Arabidopsis thaliana
gagctaagccctaaaatttcttcggagagagaaacatgtcgacgaggcgagaaagcagagattcagaccctaaacgtcaccgttctagaatcgatcgcgaacccagccccaagagatcaagaagagatggcaaacctgaagctgaacgagttctgagtaagaaggatttggatgttagagatggtactgatactgagaataaaccacgtcagtctttgagagatgctgcgccattggaacttgatgctcatggttcgagaaaagacagtgagaagaagcactctggacatcatgaagtacctcgttctagaccatattctcagcatgatgatcgtcgtagtgatggaaaagttgatagaagaccaacttctgtgagaggatcgtggagaagttcaagagatcagagtaaccgaagagctggagatgatgagaagtcactgcatcgtaaagacgaagacaaaagctcatggcgacatgataggttccgtgagagtgatgacacccaaggagcactctctaggaaacgaccagccttcagggagaagaagattgcagaggaaactgggaacaacaaagacagaacaagaactgaggatggaaaagacactaatctaaacaatcgcagacagaacgagaggaactggaggagcaatacgcattcagaaagacatgagagaccagcaatgggaagagacagagtgtggaacagagatgatgaaagaggcgcgggaagcagacagaattatcgagctgatagagacagattcaacggaaatgggcgaagtgggtttagcggaagctggacaaggaatgtgaagaaatgggaccatgacttacgatgaggcgaacaagagtccagctaaagccaccgaggaagaacagatagctaaagttgaagctttgttggcttcttgaagctgcttatgtcatggtttttggtatgtattcagctctactattagaatgcctgagtttgcaagtgtagaagatgatttctgagtttatacatataatgaaactctcctcttttttttc

SEQ ID NO: 5044 - protein, 268 aa, Arabidopsis thaliana
MSTRRESRDSDPKRHRSRIDREPSPKRSRRDGKPEAERVLSKKDLDVRDGTDTENKPRQSLRDAAPLELDAHGSRKDSEKKHSGHHEVPRSRPYSQHDDRRSDGKVDRRPTSVRGSWRSSRDQSNRRAGDDEKSLHRKDEDKSSWRHDRFRESDDTQGALSRKRPAFREKKIAEETGNNKDRTRTEDGKDTNLNNRRQNERNWRSNTHSERHERPAMGRDRVWNRDDERGAGSRQNYRADRDRFNGNGRSGFSGSWTRNVKKWDHDLR

SEQ ID NO: 5045 - DNA, 848 bp, Arabidopsis thaliana
aaaaaaaacttgtcaaactaattttgagcatcttagcatcgcgcgtcactcgaagaagtgcaatgcttaaagctaccggcacagtggctccggctatgcacgtggtgtttccctgtttttcgagtcgaccgcttatcctacctctccggagcacaaagaccttcaaacctctctcatgtttcaaacagcaaggaggcaaaggaatgaatggagtccatgagattgaacttaaagttcgtgattatgaattagaccaatttggtgttgtgaacaacgctgtttatgcaaactactgccaacacggtcaacacgagtttatggagactatcggtatcaactgtgatgaagtgtcccgttctggtgaagcattggcagtttctgaattgacaataaagtttcttgcacctttacgtagtggatgcaagtttgtggtgaaaacgaggatatcggggacatctatgacgcgcatttactttgaacagttcatctttaaacttccaaatcaagagcctattttggaggcaaaaggaatggctgtgtggcttgacaagaggtaccgtcctgtttgtatcccgtcttacatacgctctaatttcggtcacttccaacgtcaacacgttgtcgaatattgatctagggctcgacaaaatatttgttatatttcgctttggtatgttttctactgcaatttgatacgaaaagatagacatatgtaatgatatggagcaaaagatacactaataaactcaatatccattcatcaaaacgaagcaaattacatatagtcgggagaggtggacagtttttgttttttcttataatgtttttacatgcaatattttataatt

SEQ ID NO: 5046 - protein, 209 aa, Arabidopsis thaliana
KKLVKLILSILASRVTRRSAMLKATGTVAPAMHVVFPCFSSRPLILPLRSTKTFKPLSCFKQQGGKGMNGVHEIELKVRDYELDQFGVVNNAVYANYCQHGQHEFMETIGINCDEVSRSGEALAVSELTIKFLAPLRSGCKFVVKTRISGTSMTRIYFEQFIFKLPNQEPILEAKGMAVWLDKRYRPVCIPSYIRSNFGHFQRQHVVEY

SEQ ID NO: 5047 - protein, 189 aa, Arabidopsis thaliana
MLKATGTVAPAMHVVFPCFSSRPLILPLRSTKTFKPLSCFKQQGGKGMNGVHEIELKVRDYELDQFGVVNNAVYANYCQHGQHEFMETIGINCDEVSRSGEALAVSELTIKFLAPLRSGCKFVVKTRISGTSMTRIYFEQFIFKLPNQEPILEAKGMAVWLDKRYRPVCIPSYIRSNFGHFQRQHVVEY

SEQ ID NO: 5048 - protein, 178 aa, Arabidopsis thaliana
MHVVFPCFSSRPLILPLRSTKTFKPLSCFKQQGGKGMNGVHEIELKVRDYELDQFGVVNNAVYANYCQHGQHEFMETIGINCDEVSRSGEALAVSELTIKFLAPLRSGCKFVVKTRISGTSMTRIYFEQFIFKLPNQEPILEAKGMAVWLDKRYRPVCIPSYIRSNFGHFQRQHVVEY

SEQ ID NO: 5049 - DNA, 2121 bp, Arabidopsis thaliana
ttcttcaaaaaccccaaccacttcttctccccaaaaacctccaaagtttcaatctttacttctctctttttctccaagttatcttcttttctaggaagagatatgtgcggtgcaaagagcaacctttgctcatctaaaaccctaacagaagtcgaattcatgaggcagaaatcagaagacggagcttccgccacgtgtctcctcgaattcgccgcctgtgatgatctttcatcgtttaagagagagatcgaagagaatccatcggtggagattgatgagtcagggttttggtattgcagacgggtcgggtctaagaagatgggttttgaagaaagaacaccacttatggttgctgctatgtatggaagcatggaagtgttgaattacataattgccacaggaagatccgatgtgaacagagtttgcagtgacgagaaagtcactgctcttcactgtgcagtttctggctgttctgtttctatcgttgagatcatcaagatcttgcttgatgcttctgcttcacctaattgtgttgacgctaatgggaacaaaccggttgatttgttggctaaagattctcggtttgttcctaaccagagtagaaaggcggttgaggttttactgaccgggattcatggttcggttatggaagaagaggaggaggaactgaagagtgttgtgactaagtatccagctgatgcatcacttcctgatattaacgaaggtgtttatggaactgatgattttaggatgtttagctttaaggttaagccatgttctagggcttattcacatgattggactgaatgtccttttgttcatcctggtgagaatgcaaggaggagagatcctaggaagtatccttacacttgtgtgccttgtcccgagtttcgtaaagggtcttgtcctaaaggagattcgtgtgagtacgcgcacggtgttttcgagtcttggcttcacccggcgcagtataggacacggctttgcaaagatgagactggttgtgctaggagagtttgtttctttgctcatagacgggatgagttaagaccggttaatgcttctactggttctgcaatggtttcaccaaggtcgtctaatcagtctcctgagatgtctgttatgtctcctttgacgctgggatcatcgccaatgaactctcctatggctaatggtgttcctttgtctccaagaaatggtggtttatggcagaacagagttaatagccttacaccaccaccgttgcagcttaatggtagcagattgaagtcgactttgagtgctagagatatggatatggagatggaacttaggtttcgcggtttggataaccggagacttggtgatctcaagccatccaacctcgaagagactttcggatcatatgactcagcttctgtgatgcaacttcaatcaccaagcaggcattctcagatgaaccactatccgtcttcacctgtgaggcagcctcctcctcatggattcgaatcttcagcagccatggcagctgcagtgatgaatgcaagatcctcagcgtttgcgaaacgcagcttgagtttcaaaccagctccagtagcttctaatgtctccgattggggatcaccaaatgggaagcttgagtggggaatgcaaagagatgagctgaacaagttgaggagaagtgcctccttcggcattcatggaaacaacaacaacagtgtgtcacgccctgctagagactacagtgacgagccagatgtgtcgtgggtgaactcactggtgaaagagaatgcaccagagagagtgaatgagagggttgggaatacggtgaatggtgcagcgagtagagacaagtttaagctgccgtcgtgggcagagcaaatgtatatagaccatgagcagcagattgtggcataagaagcagaaagaaagatgtgggatttatattgcttttgtcttctgggcctctctacacagaatctaacaaatctggcaataattctttgatttgtgtttgacccatagtttggttactagtatatgtttttttatgttctttttttctttgtcattctcttgtccttcgtgacactatgtaatgattaaaagcaaataattgatgcatgagttcaaatgttcttt

SEQ ID NO: 5050 - protein, 631 aa, Arabidopsis thaliana
FFKNPNHFFSPKTSKVSIFTSLFFSKLSSFLGRDMCGAKSNLCSSKTLTEVEFMRQKSEDGASATCLLEFAACDDLSSFKREIEENPSVEIDESGFWYCRRVGSKKMGFEERTPLMVAAMYGSMEVLNYIIATGRSDVNRVCSDEKVTALHCAVSGCSVSIVEIIKILLDASASPNCVDANGNKPVDLLAKDSRFVPNQSRKAVEVLLTGIHGSVMEEEEEELKSVVTKYPADASLPDINEGVYGTDDFRMFSFKVKPCSRAYSHDWTECPFVHPGENARRRDPRKYPYTCVPCPEFRKGSCPKGDSCEYAHGVFESWLHPAQYRTRLCKDETGCARRVCFFAHRRDELRPVNASTGSAMVSPRSSNQSPEMSVMSPLTLGSSPMNSPMANGVPLSPRNGGLWQNRVNSLTPPPLQLNGSRLKSTLSARDMDMEMELRFRGLDNRRLGDLKPSNLEETFGSYDSASVMQLQSPSRHSQMNHYPSSPVRQPPPHGFESSAAMAAAVMNARSSAFAKRSLSFKPAPVASNVSDWGSPNGKLEWGMQRDELNKLRRSASFGIHGNNNNSVSRPARDYSDEPDVSWVNSLVKENAPERVNERVGNTVNGAASRDKFKLPSWAEQMYIDHEQQIVA

SEQ ID NO: 5051 - protein, 597 aa, Arabidopsis thaliana
MCGAKSNLCSSKTLTEVEFMRQKSEDGASATCLLEFAACDDLSSFKREIEENPSVEIDESGFWYCRRVGSKKMGFEERTPLMVAAMYGSMEVLNYIIATGRSDVNRVCSDEKVTALHCAVSGCSVSIVEIIKILLDASASPNCVDANGNKPVDLLAKDSRFVPNQSRKAVEVLLTGIHGSVMEEEEEELKSVVTKYPADASLPDINEGVYGTDDFRMFSFKVKPCSRAYSHDWTECPFVHPGENARRRDPRKYPYTCVPCPEFRKGSCPKGDSCEYAHGVFESWLHPAQYRTRLCKDETGCARRVCFFAHRRDELRPVNASTGSAMVSPRSSNQSPEMSVMSPLTLGSSPMNSPMANGVPLSPRNGGLWQNRVNSLTPPPLQLNGSRLKSTLSARDMDMEMELRFRGLDNRRLGDLKPSNLEETFGSYDSASVMQLQSPSRHSQMNHYPSSPVRQPPPHGFESSAAMAAAVMNARSSAFAKRSLSFKPAPVASNVSDWGSPNGKLEWGMQRDELNKLRRSASFGIHGNNNNSVSRPARDYSDEPDVSWVNSLVKENAPERVNERVGNTVNGAASRDKFKLPSWAEQMYIDHEQQIVA

SEQ ID NO: 5052 - protein, 578 aa, Arabidopsis thaliana
MRQKSEDGASATCLLEFAACDDLSSFKREIEENPSVEIDESGFWYCRRVGSKKMGFEERTPLMVAAMYGSMEVLNYIIATGRSDVNRVCSDEKVTALHCAVSGCSVSIVEIIKILLDASASPNCVDANGNKPVDLLAKDSRFVPNQSRKAVEVLLTGIHGSVMEEEEEELKSVVTKYPADASLPDINEGVYGTDDFRMFSFKVKPCSRAYSHDWTECPFVHPGENARRRDPRKYPYTCVPCPEFRKGSCPKGDSCEYAHGVFESWLHPAQYRTRLCKDETGCARRVCFFAHRRDELRPVNASTGSAMVSPRSSNQSPEMSVMSPLTLGSSPMNSPMANGVPLSPRNGGLWQNRVNSLTPPPLQLNGSRLKSTLSARDMDMEMELRFRGLDNRRLGDLKPSNLEETFGSYDSASVMQLQSPSRHSQMNHYPSSPVRQPPPHGFESSAAMAAAVMNARSSAFAKRSLSFKPAPVASNVSDWGSPNGKLEWGMQRDELNKLRRSASFGIHGNNNNSVSRPARDYSDEPDVSWVNSLVKENAPERVNERVGNTVNGAASRDKFKLPSWAEQMYIDHEQQIVA

SEQ ID NO: 5053 - DNA, 578 bp, Arabidopsis thaliana
ggagatttgcattcgcaggggataaggatcaaaaatggaggaagcaaagggacctgtgaagcacgtattgcttgctagtttcaaagatggggttagtcctgagaaaatcgaagagctcatcaaaggttacgccaatctcgtcaatctcatcgaacctatgaaagctttccactggggaaaagatgtgagcattgagaatctgcatcaaggttacacacacatctttgaatccacatttgagagtaaagaagctgttgcagagtacattgctcatcctgctcacgttgaattcgccaccatcttccttggcagcttggataaagttttggttattgactacaagcctacctctgtctctctctaattatcttgtagcagcattttcatcattgatctttttctcgggtatgcatcttgtatgttgaataaagtatattccttttgagttttcctgcattgttctcatgtttctctgtgaatttctctcttttttgtttgtttgtttgtttccttctgttgtattatacttgatctgtaaaaagatcatgagtttattaagagtgtttgatttcagactc

SEQ ID NO: 5054 - protein, 109 aa, Arabidopsis thaliana
MEEAKGPVKHVLLASFKDGVSPEKIEELIKGYANLVNLIEPMKAFHWGKDVSIENLHQGYTHIFESTFESKEAVAEYIAHPAHVEFATIFLGSLDKVLVIDYKPTSVSL

SEQ ID NO: 5055 - protein, 68 aa, Arabidopsis thaliana
MKAFHWGKDVSIENLHQGYTHIFESTFESKEAVAEYIAHPAHVEFATIFLGSLDKVLVIDYKPTSVSL

SEQ ID NO: 5056 - DNA, 968 bp, Arabidopsis thaliana
aaactgatataggaaaatccaacaatggattcatcggcggacatagcaatattagtggcagatgaatgtaaccaaaaggtgaatacaacggcagagaaagcatcgaatacagcggaggttgggtggttgatgatgtttgggattgaggagaagaagattgaaagtctgatgaggaaatttgaagctaaatctcagtttgctgtggcggtttctagtggcttttttctgcttaactatgtttcatccttgtactataagtcacgtttgaacctcatgctggaaatctagtttaggcatgatgttactttcatttgcttctctaatcaccagagggcatgttgctttaagtttcgagttctacaagctttggttttatactcttttgggttagtttttaagtacagtttcttgtaagttaatggaaacggtgtcgtagtaagaaaaaacaaatcatcgtagtaattaagcctaatccgatgcattaattaatctctgaaatttgttggtttgcacaaaaaaaaaaatttccattgttgttgttccacggaactctaaaatggagagtggcgatgagagtccggtggttctaattacgggatgttctcagggaggaattggtcacgcgctggcccgtgagttcactgagaagggatgtcgagtggtggcgacgagtcgatcacggagtacgatgacggatctggagcaagattcgaggttattcgtgaaggagcttgatgtgcaatcggaccagaatgtgagtaaggttttgtcggaggttattgataagttcggtaagatcgacgttcttgttaataacgccggagttcagtgcgttggacctctggcggagactccaatttccgccatggaaaacacattcaacaccaatgtttttggtaataaagatttgatttttagtttcaattattacattgattggagcttcaacagttctggtttttttgctt

SEQ ID NO: 5057 - protein, 137 aa, Arabidopsis thaliana
MESGDESPVVLITGCSQGGIGHALAREFTEKGCRVVATSRSRSTMTDLEQDSRLFVKELDVQSDQNVSKVLSEVIDKFGKIDVLVNNAGVQCVGPLAETPISAMENTFNTNVFGNKDLIFSFNYYIDWSFNSSGFFA

SEQ ID NO: 5058 - protein, 93 aa, Arabidopsis thaliana
MTDLEQDSRLFVKELDVQSDQNVSKVLSEVIDKFGKIDVLVNNAGVQCVGPLAETPISAMENTFNTNVFGNKDLIFSFNYYIDWSFNSSGFFA

SEQ ID NO: 5059 - protein, 87 aa, Arabidopsis thaliana
MDSSADIAILVADECNQKVNTTAEKASNTAEVGWLMMFGIEEKKIESLMRKFEAKSQFAVAVSSGFFLLNYVSSLYYKSRLNLMLEI

SEQ ID NO: 5060 - DNA, 996 bp, Arabidopsis thaliana
cgatctacttatcttctttcttctcctcctccttctttagagtcttcactcttcaccgaaccctctgattctcgtatagacacacacatacctatacatacacactttaacacttatatctgtagagtatagccatgggagaaggagaagcaaaagcagagcacgcagccaaagcagatcacaagaacgctccctccgcttcttcaacgccagaatcttactctaaagaaggcggaggaggcggtggagatgctcgccgcgcaatctgcggcgcgatcttcaccatccttgtcatactaggtatcatagccttaatcctttggctcgtctaccgtccacataaaccacgtctcaccgtcgtcggagccgccatctacgacctgaatttcacagcgccgccgttaatctcaacctccgttcagttcagcgttttagcaagaaaccctaaccggagagtctccattcactacgacaagctctctatgtacgtaacgtacaaagatcagatcataacaccgccgcttccactaccaccgcttcgtttaggacataaatctacggttgtgatagctccggtgatgggaggcaacggtataccagtctcgccggaagtagctaatggtttaaaaaatgatgaagcttacggcgtcgttttgatgagagtggtgatttttgggaggctacgttggaaagctggtgcgattaagactggacggtatggattttacgccagatgtgatgtgtggttgagatttaatccatcttctaacggacaagttcctcttctcgctccttcaacttgtaaagttgatgtctagtcttaattttacttcgttatgttttcttttttaatctttgtgttttagaattgtaatcttttttttttgtggtcatgttagtgatgagtttcgtcgagtctagtgttaaaataaattaaaaggcataagccaaaaattataagtacaagtatattactaattttatattttacttgtg

SEQ ID NO: 5061 - protein, 227 aa, Arabidopsis thaliana
MGEGEAKAEHAAKADHKNAPSASSTPESYSKEGGGGGGDARRAICGAIFTILVILGIIALILWLVYRPHKPRLTVVGAAIYDLNFTAPPLISTSVQFSVLARNPNRRVSIHYDKLSMYVTYKDQIITPPLPLPPLRLGHKSTVVIAPVMGGNGIPVSPEVANGLKNDEAYGVVLMRVVIFGRLRWKAGAIKTGRYGFYARCDVWLRFNPSSNGQVPLLAPSTCKVDV

SEQ ID NO: 5062 - DNA, 979 bp, Arabidopsis thaliana
gaaccgtctctgaatctgaccgaccaccattcttctcgcgccggcgatttcactgtttacagagaaatctcgagaaccctaacctgggtctctctagatttctttgaaatttcgagaatctagggtttcaaactaaaatcgagtccttgagttttcccaatttaaatcgttatgagctctatcaatatcactaacgtcaccgtcttggacaatcctgctccgtttgtgaatccattccagttcgagatttcttacgaatgcttgacctctctcaaagacgatttggaatggaagcttatatacgtagggtcagctgaagacgaaacgtatgatcaagttttggaaagtgttcttgttggtcctgttaacgttgggaactatcgatttgtgttgcaggctgactctccagatccgttaaagattcgtgaggaagatattattggtgttactgtgttattgttgacttgctcatacatggatcaagagtttataagagttggctattatgtgaacaatgactatgatgatgaacagctcagggaagagcctcctaccaaggttttgattgataaggtccaaaggaacatactcacagacaaacctagagtaactaagttccctatcaactttcatcctgagaatgagcagactcttggtgatgggcctgcacctactgaaccatttgctgattctgttgtaaatggagaagctccggtgtttcttgagcagccacaaaagcttcaggagatagaacaatttgatgattctgatgtaaatggagaagctatagcgttgcttgatcagccacaaaatctccaggagacatgattcttgtttgactcaagcttaactggaaactggattagaactatcatctcaattctaatcgaaagatttgtatttttgtttcttttatctggaacttgaactccagttgtgttactgtttgtagaaatttaagttcttcttgcaacatccc

SEQ ID NO: 5063 - protein, 218 aa, Arabidopsis thaliana
MSSINITNVTVLDNPAPFVNPFQFEISYECLTSLKDDLEWKLIYVGSAEDETYDQVLESVLVGPVNVGNYRFVLQADSPDPLKIREEDIIGVTVLLLTCSYMDQEFIRVGYYVNNDYDDEQLREEPPTKVLIDKVQRNILTDKPRVTKFPINFHPENEQTLGDGPAPTEPFADSVVNGEAPVFLEQPQKLQEIEQFDDSDVNGEAIALLDQPQNLQET

SEQ ID NO: 5064 - protein, 117 aa, Arabidopsis thaliana
MDQEFIRVGYYVNNDYDDEQLREEPPTKVLIDKVQRNILTDKPRVTKFPINFHPENEQTLGDGPAPTEPFADSVVNGEAPVFLEQPQKLQEIEQFDDSDVNGEAIALLDQPQNLQET

SEQ ID NO: 5065 - DNA, 1798 bp, Arabidopsis thaliana
gtctctctcccctcgcgcatcttcggtgctataaaacaaactcacgactagatcatttttggagtgagatttacgtttgatagactactacaatgaaggagccaacgacggagatagagattgaaacttcagctgtcgcaacgatcctgcctcctcctcttcctccgacggcgtcacctcatcaagcgttagtcgagaggctcaaggattatggacaggaagatgttttctctctctgggatgaactctcaccggaagagcgagatctcctcctcagagatatcgagaatttggatcttccaaggatagatcggatcatcagatgctcacttcattcacaagggttgccagtggcggcaatagaaccggtgccggagaattgtgtgtcaacggtggaggaaagaactaaggaagacagagaaaaatggtggaaaatgggattaaaagctatctacgaaggcaaattgggtgtggtgcttttatctggtggacagggaacaagacttggaagttcagatccaaaagggtgttataatatcggactgccatctgggaaatcactttttcagattcaagctgagaggatcttatgtgtccaaaggcttgcttctcaggcaatgagtgaggcaagtccaactcgcccagttacaatacagtggtatataatgaccagtccatttactcatgaaccaacacaaaaattcttcaagagtcacaagtattttggccttgaaccagatcaagtcaccttttttcaacaaggaactctgccttgcatttcaaaggatggcaagtttatcatggagacacctttcagcctatccaaggcgccggatgggaacgggggagtttatacagctttaaaatcttcaaggttattagaagatatggcttcgagggggattaaatatgtggattgctatggtgttgacaatgttctggttcgagtagctgaccctacttttctgggatacttcatcgacaaaagtgcagcttcagctgcaaaagtagtgcgcaaggcatatccacaggaaaaagttggagtatttgtaaggaggggaaaaggtgggcctttgactgtagttgagtacacagagcttgaccagtctatggcttctgcaactaatcaacaaacaggacgtcttcaatattgctggagtaacgtgtgcttacacatgttcactctggatttccttaaccaagttgcgaatgggctggaaaaagacagcgtttaccatttggcggagaagaagataccgtctataaatggcgacatagtgggactaaaactagaacagttcatattcgattgctttccttatgctccttcgactgcactttttgaggtgttgagggaggaagagtttgcaccggtgaagaacgcaaacgggtcgaattacgacacaccggaaagcgcaagactgttggttctacgactgcatacacgttgggtcatagcagctggtggatttctaacacattccgttcctttatatgcgactggtgtggaagtgtcaccattgtgctcgtacgctggagaaaatctagaagcgatttgtcggggaagaacctttcacgcaccatgtgaaatctccctctaatcttcttctttctttttcttatctattcttgtaattttgtcattgtctttgctttttcttttggcttggttcttcttttgtgttggtgtttggtctctatatatgaactgtaactggcggaggtggtcagtagtctcttttcaatgtgttactcttcattattgcaacaatagtgaagtctccgaaattttggtgtt

SEQ ID NO: 5066 - protein, 502 aa, Arabidopsis thaliana
MKEPTTEIEIETSAVATILPPPLPPTASPHQALVERLKDYGQEDVFSLWDELSPEERDLLLRDIENLDLPRIDRIIRCSLHSQGLPVAAIEPVPENCVSTVEERTKEDREKWWKMGLKAIYEGKLGVVLLSGGQGTRLGSSDPKGCYNIGLPSGKSLFQIQAERILCVQRLASQAMSEASPTRPVTIQWYIMTSPFTHEPTQKFFKSHKYFGLEPDQVTFFQQGTLPCISKDGKFIMETPFSLSKAPDGNGGVYTALKSSRLLEDMASRGIKYVDCYGVDNVLVRVADPTFLGYFIDKSAASAAKVVRKAYPQEKVGVFVRRGKGGPLTVVEYTELDQSMASATNQQTGRLQYCWSNVCLHMFTLDFLNQVANGLEKDSVYHLAEKKIPSINGDIVGLKLEQFIFDCFPYAPSTALFEVLREEEFAPVKNANGSNYDTPESARLLVLRLHTRWVIAAGGFLTHSVPLYATGVEVSPLCSYAGENLEAICRGRTFHAPCEISL

SEQ ID NO: 5067 - protein, 388 aa, Arabidopsis thaliana
MGLKAIYEGKLGVVLLSGGQGTRLGSSDPKGCYNIGLPSGKSLFQIQAERILCVQRLASQAMSEASPTRPVTIQWYIMTSPFTHEPTQKFFKSHKYFGLEPDQVTFFQQGTLPCISKDGKFIMETPFSLSKAPDGNGGVYTALKSSRLLEDMASRGIKYVDCYGVDNVLVRVADPTFLGYFIDKSAASAAKVVRKAYPQEKVGVFVRRGKGGPLTVVEYTELDQSMASATNQQTGRLQYCWSNVCLHMFTLDFLNQVANGLEKDSVYHLAEKKIPSINGDIVGLKLEQFIFDCFPYAPSTALFEVLREEEFAPVKNANGSNYDTPESARLLVLRLHTRWVIAAGGFLTHSVPLYATGVEVSPLCSYAGENLEAICRGRTFHAPCEISL

SEQ ID NO: 5068 - protein, 327 aa, Arabidopsis thaliana
MSEASPTRPVTIQWYIMTSPFTHEPTQKFFKSHKYFGLEPDQVTFFQQGTLPCISKDGKFIMETPFSLSKAPDGNGGVYTALKSSRLLEDMASRGIKYVDCYGVDNVLVRVADPTFLGYFIDKSAASAAKVVRKAYPQEKVGVFVRRGKGGPLTVVEYTELDQSMASATNQQTGRLQYCWSNVCLHMFTLDFLNQVANGLEKDSVYHLAEKKIPSINGDIVGLKLEQFIFDCFPYAPSTALFEVLREEEFAPVKNANGSNYDTPESARLLVLRLHTRWVIAAGGFLTHSVPLYATGVEVSPLCSYAGENLEAICRGRTFHAPCEISL

SEQ ID NO: 5069 - DNA, 890 bp, Arabidopsis thaliana
accaagttcatttcaccaaaagaaaagtcattgaaaaccaaaaaaaaagaagaagatcaaaaaaaaaaggatgtcagaagaagaagtggtggtgttgaacttctggccaagcatgttcggagcaagagtgatcatggcattagaggagaaagagatcaagttcgagtacaaagaagaagatgtgtttggtcagaagaccgatctattgctccaaagcaacccggttaacaagaaaattccggttctcatccacaacggtaaaccggtatgcgagtccaatatcatagtcgaatacatcgatgaggtctggaaagacgataagactctccgtctactaccttctgatccttatcagaagtcacagtgtagattttgggctgatttgattgacaaaaaggtttttgacgctggaagaagaacgtggacaaagaggggcaaagaacaagaagaagcgaaacaagagttcatagagatattgaaagtgttagaaagagagcttggagataaggtctacttcggaggaaacgacaacgtttcgatggtggacttggttctcatctcctactacccttggttccacacatgggagactattggtggttttagtgtcgaggaccacactcccaagctaatggactggatccgtaaatgcttaacccgacccgctatctcgaaatctttacctgacccgctgaagatatttgatcgagtcactcagatcataaaggtccatgagtttttctatggttattgatagtctaaatcatatgctctatttatgtaagttaaccaaaataataagaaatgttgtaatgcttaaggaagtagttggtgtgaaaaaatttatttttcatttgatattataattgaaataaaatgggtttgttgtt

SEQ ID NO: 5070 - protein, 227 aa, Arabidopsis thaliana
MSEEEVVVLNFWPSMFGARVIMALEEKEIKFEYKEEDVFGQKTDLLLQSNPVNKKIPVLIHNGKPVCESNIIVEYIDEVWKDDKTLRLLPSDPYQKSQCRFWADLIDKKVFDAGRRTWTKRGKEQEEAKQEFIEILKVLERELGDKVYFGGNDNVSMVDLVLISYYPWFHTWETIGGFSVEDHTPKLMDWIRKCLTRPAISKSLPDPLKIFDRVTQIIKVHEFFYGY

SEQ ID NO: 5071 - protein, 213 aa, Arabidopsis thaliana
MFGARVIMALEEKEIKFEYKEEDVFGQKTDLLLQSNPVNKKIPVLIHNGKPVCESNIIVEYIDEVWKDDKTLRLLPSDPYQKSQCRFWADLIDKKVFDAGRRTWTKRGKEQEEAKQEFIEILKVLERELGDKVYFGGNDNVSMVDLVLISYYPWFHTWETIGGFSVEDHTPKLMDWIRKCLTRPAISKSLPDPLKIFDRVTQIIKVHEFFYGY

SEQ ID NO: 5072 - protein, 206 aa, Arabidopsis thaliana
MALEEKEIKFEYKEEDVFGQKTDLLLQSNPVNKKIPVLIHNGKPVCESNIIVEYIDEVWKDDKTLRLLPSDPYQKSQCRFWADLIDKKVFDAGRRTWTKRGKEQEEAKQEFIEILKVLERELGDKVYFGGNDNVSMVDLVLISYYPWFHTWETIGGFSVEDHTPKLMDWIRKCLTRPAISKSLPDPLKIFDRVTQIIKVHEFFYGY

SEQ ID NO: 5073 - DNA, 2067 bp, Arabidopsis thaliana
gatgagtaggtaaactgtgtgcgcttattaacttctctcacactgactctgcgaccctaatttgtgagctctcttctctttgcgcagtcaatttgctacaacttagaaaatggcggcggctacttcatccatcgctccttctctttcatgcccatctccttcttcttcatccaaaaccctttggtcttccaaagccagaaccttggctctacccaatatcggtttcctctcgtcttcttccaagtctctgaggtcgcttactgccaccgtcgctggaaatggcgccactggatcctcccttgccgctcgcatggtttcttcgtctgcggtcaaagcccctgtttctctcgattttgagacatctgtcttcaaaaaggagaaagtttctcttgctggttacgaagagtacattgtgagaggaggaagagacttgttcaagcatctcccagatgctttcaaggggattaagcagattggtgtgattggctggggatctcagggacctgcccaggctcagaatttaagggattcacttgtggaggcaaagtctgacattgttgtcaagattggtctcagaaaagggtctcgctcatttgaggaggcacgtgctgctggcttcactgaagaaagtggtactttgggtgatatatgggaaactatcgctggcagtgatcttgtattgcttttgatctctgatgctgctcaagctgataactatgagaaaatattctctcacatgaagccaaacagcattcttggtttatcacacgggtttctactagggcatttacagtcctcgggactcgatttcccaaagaacatcagtgtggtcgctgtatgccctaagggaatgggtccttctgtgaggaggctttacgtccaaggaaaagaaattaacggtgctggaatcaacgccagttttgcagtccaccaggatgttgacggtagagccgccgatgttgcattgggatggtcagtagcacttggttctccgtttacttttgctactactcttgaacaggagtacaggagtgacatctttggagaaagaggaattttgcttggtgctgttcacggaatcgtggagtctctgtttagaagatacaccgaaaatgggatgagtgaagacttggcttacaagaacacagtagaatgcatcacaggaacaatttcaaggactatctctacccagggaatgttggctgtgtacaactccttgtctgaagaaggtaaaaaagattttgagactgcatacagcgcatccttctatccttgtatggagattctctatgaatgttacgaggatgtacaaagtggcagcgaaatccgaagtgttgtcttagccggtcgtcgcttctatgaaaaggaaggcttgccagcattccctatgggaaatattgaccagacaagaatgtggaaggtgggtgaacgcgtcaggaagtccagacctgctggtgacttgggtccattgtatcccttcaccgctggagtttatgtagcacttatgatggctcagattgagatcttgaggaagaaaggtcactcttactcagaaatcatcaacgagagtgtgattgaatccgtggactctctaaacccatttatgcacgccaggggagtgtccttcatggttgacaactgctcaaccacagcaagattgggttcgaggaaatgggcgccacggtttgactacatcctgacccaacaagctcttgtggctgtggacagtggtgcagcaatcaacagagacctaatcagtaacttcttctctgatccagtccatggtgccattgaggtctgcgcacagctcaggcctaccgttgatatctctgtgcctgctgatgcagactttgttcgacctgagttgcgtcaatctagcaactgagtgaagggttgaaagtttgtcagtctcttatttgtaatcggagtattaagtcgagagtttgtgatgttttcttaggcgtgactgtttgttttgtttgaaggattatgtctctttgctttggtcttaaaatctacttaaatcaataaaatagtttaacgaaatttcgctttaactattttcgt

SEQ ID NO: 5074 - protein, 591 aa, Arabidopsis thaliana
MAAATSSIAPSLSCPSPSSSSKTLWSSKARTLALPNIGFLSSSSKSLRSLTATVAGNGATGSSLAARMVSSSAVKAPVSLDFETSVFKKEKVSLAGYEEYIVRGGRDLFKHLPDAFKGIKQIGVIGWGSQGPAQAQNLRDSLVEAKSDIVVKIGLRKGSRSFEEARAAGFTEESGTLGDIWETIAGSDLVLLLISDAAQADNYEKIFSHMKPNSILGLSHGFLLGHLQSSGLDFPKNISVVAVCPKGMGPSVRRLYVQGKEINGAGINASFAVHQDVDGRAADVALGWSVALGSPFTFATTLEQEYRSDIFGERGILLGAVHGIVESLFRRYTENGMSEDLAYKNTVECITGTISRTISTQGMLAVYNSLSEEGKKDFETAYSASFYPCMEILYECYEDVQSGSEIRSVVLAGRRFYEKEGLPAFPMGNIDQTRMWKVGERVRKSRPAGDLGPLYPFTAGVYVALMMAQIEILRKKGHSYSEIINESVIESVDSLNPFMHARGVSFMVDNCSTTARLGSRKWAPRFDYILTQQALVAVDSGAAINRDLISNFFSDPVHGAIEVCAQLRPTVDISVPADADFVRPELRQSSN

SEQ ID NO: 5075 - protein, 524 aa, Arabidopsis thaliana
MVSSSAVKAPVSLDFETSVFKKEKVSLAGYEEYIVRGGRDLFKHLPDAFKGIKQIGVIGWGSQGPAQAQNLRDSLVEAKSDIVVKIGLRKGSRSFEEARAAGFTEESGTLGDIWETIAGSDLVLLLISDAAQADNYEKIFSHMKPNSILGLSHGFLLGHLQSSGLDFPKNISVVAVCPKGMGPSVRRLYVQGKEINGAGINASFAVHQDVDGRAADVALGWSVALGSPFTFATTLEQEYRSDIFGERGILLGAVHGIVESLFRRYTENGMSEDLAYKNTVECITGTISRTISTQGMLAVYNSLSEEGKKDFETAYSASFYPCMEILYECYEDVQSGSEIRSVVLAGRRFYEKEGLPAFPMGNIDQTRMWKVGERVRKSRPAGDLGPLYPFTAGVYVALMMAQIEILRKKGHSYSEIINESVIESVDSLNPFMHARGVSFMVDNCSTTARLGSRKWAPRFDYILTQQALVAVDSGAAINRDLISNFFSDPVHGAIEVCAQLRPTVDISVPADADFVRPELRQSSN

SEQ ID NO: 5076 - protein, 382 aa, Arabidopsis thaliana
MKPNSILGLSHGFLLGHLQSSGLDFPKNISVVAVCPKGMGPSVRRLYVQGKEINGAGINASFAVHQDVDGRAADVALGWSVALGSPFTFATTLEQEYRSDIFGERGILLGAVHGIVESLFRRYTENGMSEDLAYKNTVECITGTISRTISTQGMLAVYNSLSEEGKKDFETAYSASFYPCMEILYECYEDVQSGSEIRSVVLAGRRFYEKEGLPAFPMGNIDQTRMWKVGERVRKSRPAGDLGPLYPFTAGVYVALMMAQIEILRKKGHSYSEIINESVIESVDSLNPFMHARGVSFMVDNCSTTARLGSRKWAPRFDYILTQQALVAVDSGAAINRDLISNFFSDPVHGAIEVCAQLRPTVDISVPADADFVRPELRQSSN

SEQ ID NO: 5077 - DNA, 807 bp, Arabidopsis thaliana
aaacatgtggtaattggttcatttgtccttctttctttcttctccaatcggatctcactttctctacctcaccggtaaaaatggcgatgtgggtattcgggtacggatctttaatatggaaaacgggttttcctttcgacgaaagcctccctggtttcatcaaaggctatcgccgtgtcttccatcaaggtagtactgatcatagaggaattccggattttccgggaagaacagtgacattagaagctgctcatggagaagttttgttgtgtagttgcttacaagataactaaagaggaagataaaagagatgctttattgcatttggaagtgagggagaagcaatatgatcagaaagagtatcttgatttcttcactgactataatgcttcggaaccggctgtggcaggagtaatggtgtatatagcttcacctgacaagaagagcaacaacaactacttaggaccagctcctcttgaagatattgccaaacagatagttaaagcgaaaggaccttcagggccaaacagagactatctcttcaacctcgaagaggctcttgctcaactcgggtttaaagataaacatgtcacagatcttgcaaaccaagttaggcacattctttcagaatccgaagagttagacattgatgccaccgccgccaccgccaacaatgtctagattcacagcttcttttcgatttatccgaaaagaacaaaacccaatttttaagagatgcattttgcatcccccaattgaatctgttatcactatcaatcaactctcttctttatcatatttgatcac

SEQ ID NO: 5078 - protein, 142 aa, Arabidopsis thaliana
MEKFCCVVAYKITKEEDKRDALLHLEVREKQYDQKEYLDFFTDYNASEPAVAGVMVYIASPDKKSNNNYLGPAPLEDIAKQIVKAKGPSGPNRDYLFNLEEALAQLGFKDKHVTDLANQVRHILSESEELDIDATAATANNV

SEQ ID NO: 5079 - protein, 96 aa, Arabidopsis thaliana
TCGNWFICPSFFLLQSDLTFSTSPVKMAMWVFGYGSLIWKTGFPFDESLPGFIKGYRRVFHQGSTDHRGIPDFPGRTVTLEAAHGEVLLCSCLQDN

SEQ ID NO: 5080 - protein, 88 aa, Arabidopsis thaliana
MVYIASPDKKSNNNYLGPAPLEDIAKQIVKAKGPSGPNRDYLFNLEEALAQLGFKDKHVTDLANQVRHILSESEELDIDATAATANNV

SEQ ID NO: 5081 - DNA, 670 bp, Arabidopsis thaliana
gtatgtaagaaagttttctagatttaagcactatctaagaaaaacaaaatcaaactcataaagaataatgggagaaacagaagagaaagtgaagaaccatgataacaaagaagaggaacacaacaaggctgagaaagctgagaagaaggagaagaagaaggataaagataaggaggataagaacgaggacgataaaaatggtggaggagaagaaggggaagatcaagagaagaagagcaagaagaaagataagaaagcgaagaaagagaagaaccctgaagataagaaagatccagagaagttgaagatgaagcttcagaagattgaagaaaagattcaagctatggtcttaaagaaagatgagattgtgaagcttattcatgatgctgaacaagctaagcctagtactgctgcagtagatgcaccaccaccaactaactaattcaaatacacaaattatatactacaataagttaactaatatatttgtcaataacaaatgctgctgaatgttattttcagcgtatcttggtataggtctttgttttgttttgtttgataccaatcagagtttgcttgtatactatgtgtttgtaaattgtacaaaaaaaactgttttaatataatacgtttcagcttaatacatattggtaatgctgatgtataccac

SEQ ID NO: 5082 - protein, 124 aa, Arabidopsis thaliana
MGETEEKVKNHDNKEEEHNKAEKAEKKEKKKDKDKEDKNEDDKNGGGEEGEDQEKKSKKKDKKAKKEKNPEDKKDPEKLKMKLQKIEEKIQAMVLKKDEIVKLIHDAEQAKPSTAAVDAPPPTN

SEQ ID NO: 5083 - protein, 68 aa, Arabidopsis thaliana
MITKKRNTTRLRKLRRRRRRRIKIRRIRTRTIKMVEEKKGKIKRRRARRKIRKRRKRRTLKIRKIQRS

SEQ ID NO: 5084 - DNA, 989 bp, Arabidopsis thaliana
acataataaaccaaacccaacaaagaaaatcaaattttcaaaccaaaaaaaaaaaaaatgagaactttagaagaatcgaagatctctattgtcttcttgttgcttcttctcttctcaatcttcatcagttccagtcaccaggcaaatgaggtattaccagctgaaggagataatgagatgatgatggtgccattgggggaggagaagtttatggtaatgaatgaaacaagaaggaaacttggaagttttcagatatgttcagtttgtacttgttgtggtggtgctaaaggtctttgcttgccttctccttgttgctatgctattaactgcaatatccctaatagaccctttggttactgttctttcactcccaaaacttgcaattgctttggttgccatatctgagatcttctacttcattgtaatttgggagagaaacaagtgaatctaaatcttgattcatcttcaagtgtgaaagggaggaaaaaaagaagaatatctgttcttggtttgagtcttctacttattttttgtctataatttatttttcagtcttcattaaatttcattacctactatctcagcaacatcatcatcctcattaattaattgtctttttgcatttgccattttttcataattttctagggttttttttgttttgagaatcttgttcacacttcaagcaagatttgtttcttcttctctgttcaatcaattctctctatctgtctttctctctctcttttttttttttttcattctcttgtttacttcatcattttgtttcttatgtgttttaagaaagttaaaagttagaatttagcatattttggaaaagagtcattgtttggttaagctggcaattggaagagtatttaatatgatgatgatgatggtattgatggtgatggtggtgatagtgaagctgttaaagttaagtctttgtaatgagtgacatgttaagaaaatggatcaagtttagtgcc

SEQ ID NO: 5085 - protein, 115 aa, Arabidopsis thaliana
MRTLEESKISIVFLLLLLFSIFISSSHQANEVLPAEGDNEMMMVPLGEEKFMVMNETRRKLGSFQICSVCTCCGGAKGLCLPSPCCYAINCNIPNRPFGYCSFTPKTCNCFGCHI

SEQ ID NO: 5086 - protein, 75 aa, Arabidopsis thaliana
MMMVPLGEEKFMVMNETRRKLGSFQICSVCTCCGGAKGLCLPSPCCYAINCNIPNRPFGYCSFTPKTCNCFGCHI

SEQ ID NO: 5087 - protein, 74 aa, Arabidopsis thaliana
MMVPLGEEKFMVMNETRRKLGSFQICSVCTCCGGAKGLCLPSPCCYAINCNIPNRPFGYCSFTPKTCNCFGCHI

SEQ ID NO: 5088 - DNA, 952 bp, Arabidopsis thaliana
aaaatcaatcaatcactaaaattagtcgttaaacaaaaagcttgcgaagaagaagacgaagaaaatggcggatttgattttgagttcctcctctgcacaatcctctctccttcacgtcagacctaatcactatctactcaatacctccactgcttcaccgatccgaagtgtcagattccaaaattccaacggttttcatcctctggcgttcgcatctggtcaccgacgacttcctctcggtgcagtagttccctctgactccactaagacgatcaccagtacgattactgctaactgcgttgattcgggagtcaaagctgttgaagtcgagcctacgatcgattacggaggtggtggtggaattggaggtgataaatttggcggcggtggtggaggcggcgatggaaatgacgacggaggggaagacgataaggaggagagtgacgggaagaagagcacgcctctgtctatgtcgcagaagttgactcttggttacgcttttctcgtcggagttggtgggctgatgggttatctgaagagcggtagccagaaatcgttgcttgcaggtggactgtcagctgctgttctgctgtatgtcttcagtcagctcccaacaaaacctgttcttgcatcaaccgttggtgtagtgatggcgggtgcgttaatgtacgtaatgggaacccgatacatgcgttcgaagaagatatttcctgctggagttgtgtcgatcatgtctttcattatgaccggaggatacatacacggtatcatgcgcagcctccactaagcagtagcaaacactctcgagtctgttacaaaagtgtcttgtctctgacctttttctttctttatgtgtgtgtttcacggtgtataaagcagctttgctactttgttttgtctgaaccataagaaaactagcaccaaaacgttctaaaggactttatggattaag

SEQ ID NO: 5089 - protein, 240 aa, Arabidopsis thaliana
MADLILSSSSAQSSLLHVRPNHYLLNTSTASPIRSVRFQNSNGFHPLAFASGHRRLPLGAVVPSDSTKTITSTITANCVDSGVKAVEVEPTIDYGGGGGIGGDKFGGGGGGGDGNDDGGEDDKEESDGKKSTPLSMSQKLTLGYAFLVGVGGLMGYLKSGSQKSLLAGGLSAAVLLYVFSQLPTKPVLASTVGVVMAGALMYVMGTRYMRSKKIFPAGVVSIMSFIMTGGYIHGIMRSLH

SEQ ID NO: 5090 - DNA, 604 bp, Arabidopsis thaliana
aaaatctgattattaactcttagccgtcatcttcttcatttttctctagggtttctaatctcttataacaacaccgcaaaagagtaaagggacgctagagagagctcgaagacgcaatggcgagaatcaaggttcatgagctgagggagaaatcaaaagctgatctttcgggtcagttgaaggaatttaaggcagagcttgctctccttcgtgtcgctaaggtcactggaggtgctcctaataagctctctaagatcaaggtggtgaggaagtcgattgctcaggtgttgacagtgatctcacagaaacaaaagtctgctttgagagaggcatacaagaacaagaagcttttgcctcttgatcttcgtcccaagaagactagagccatcaggaggagactcactaagcatcaggcatcgttgaagacagagagggagaagaagaaagaaatgtactttccaataaggaagtatgctattaaggtgtaagcttttatcttgatcacatcaatttttgtgtttgaatttgagctcgtgtgagtttttgctttgttttccttccttgttaaagatattaaaagctcatcttaatgaaagattgattc

SEQ ID NO: 5091 - protein, 123 aa, Arabidopsis thaliana
MARIKVHELREKSKADLSGQLKEFKAELALLRVAKVTGGAPNKLSKIKVVRKSIAQVLTVISQKQKSALREAYKNKKLLPLDLRPKKTRAIRRRLTKHQASLKTEREKKKEMYFPIRKYAIKV

SEQ ID NO: 5092 - DNA, 641 bp, Arabidopsis thaliana
attgctgcttttcctcctcccgctcttgcttcttgccattgctgtttcgagctctcctcaaagccctaattttctcctcttcttcttcattctctcaccatgaagctcgtcaggtttttgatgaaattgaacaacgaaacagtttcaatcgagcttaagaacggaaccattgttcatggaaccattactggtgtagatgttagcatgaacactcatttaaaagctgtgaaactcactctgaaagggaagaatccagttacattagaccacttaagtgtcaggggaaacaacattcgctattatattcttccggacagtttgaatctggagactttgctggttgaagacactccaagaatcaaacccaaaaagccaactgcaggtaagattccagcaggtcggggacgtggtcgtggaagaggtcgtggacgtggccgtggtggtcgttaagcattttgcagtaatcaaaagtctggtcctttttggtttgtaacagcaggattgtaaaagatctatcttgtagtgagatttggtgtcactaagacaaattcttgttatctctttaagttttcatgaatttgagatttgaaacgttattgccaaacatacatcactcaatatgttttattattgacttgatc

SEQ ID NO: 5093 - protein, 116 aa, Arabidopsis thaliana
MKLVRFLMKLNNETVSIELKNGTIVHGTITGVDVSMNTHLKAVKLTLKGKNPVTLDHLSVRGNNIRYYILPDSLNLETLLVEDTPRIKPKKPTAGKIPAGRGRGRGRGRGRGRGGR

SEQ ID NO: 5094 - protein, 109 aa, Arabidopsis thaliana
MKLNNETVSIELKNGTIVHGTITGVDVSMNTHLKAVKLTLKGKNPVTLDHLSVRGNNIRYYILPDSLNLETLLVEDTPRIKPKKPTAGKIPAGRGRGRGRGRGRGRGGR

SEQ ID NO: 5095 - protein, 81 aa, Arabidopsis thaliana
MNTHLKAVKLTLKGKNPVTLDHLSVRGNNIRYYILPDSLNLETLLVEDTPRIKPKKPTAGKIPAGRGRGRGRGRGRGRGGR

SEQ ID NO: 5096 - DNA, 1278 bp, Arabidopsis thaliana
atcacggcctagtttagttaagctctcgccggtgatttagcggagatgggaagtgaccgcgacggtgctccgccggagaacacaaaacgagaggttgaagatagagatatcagaagaaaatcatcccgggagaaaccgagtggttctggaaaggattccggcgaagagaaagatgtgagtcgccgccgtgaatcgaagaggagaacaaaagacggcaacgattccggctctgaatctggtttggaaagtggaagcgaatcggagaaggaagagagacgtagaagtagaaaggatagagggaagaggaaatcagatcggaaatcatctaggagtaggagaagacgtcgtgattattcgagtagtagctcagattccgaatcagaatcggagtcggaatattctgattctgaggagagtgagagtgaagatgagagaagaaggaggaagaggaagagaaaggagagggaagaggaagagaaagagaggaagagaaggagaagagagaaagataagaagaagaggaacaagtctgataaagatggagataagaagaggaaggagaagaagaagaagaagtctgagaaagtgaagaaaggagctgttactgaatcatggggcaagtatggaatcatcagagaaactgatatgtggaataaacgtccagagttcacagcatggttgcttgaagtaaagaaggttaatttggaaagcttgccaccttgggaagagaagaaaatgtttaaagattttatggaggatcataatactggtacatttacctcgaaaaaatactatgacattgatggttactatagacttaagttggaaaaagagatgaaaaagggtttgaagaaagctgggattagtgaacgtactgtgttcaatgatgaggaacaacgccgactggagatgcaggaattacgtgaaaggcagaaggaagaagaagtgttagctctaaagcgatcaatggaaggtggaatggcgcaagctatgaaagagcaagctcggctaaaggaagaaatggtgtacttatacaagattggggacatggagggtgcagctgctatacagagaaggttggatccggatgttcccatgtgatgtgtagctttttgttaagctacaatatcttctcgattgtgttccaagaatcgaacttttgtaacattaggataagagaaaccaaaattttatgtcctagagccctaagatactacttttttgcttgcttggatatcattattcgccaagaggtctggtcaagttatgaaaattggc

SEQ ID NO: 5097 - protein, 351 aa, Arabidopsis thaliana
MGSDRDGAPPENTKREVEDRDIRRKSSREKPSGSGKDSGEEKDVSRRRESKRRTKDGNDSGSESGLESGSESEKEERRRSRKDRGKRKSDRKSSRSRRRRRDYSSSSSDSESESESEYSDSEESESEDERRRRKRKRKEREEEEKERKRRRREKDKKKRNKSDKDGDKKRKEKKKKKSEKVKKGAVTESWGKYGIIRETDMWNKRPEFTAWLLEVKKVNLESLPPWEEKKMFKDFMEDHNTGTFTSKKYYDIDGYYRLKLEKEMKKGLKKAGISERTVFNDEEQRRLEMQELRERQKEEEVLALKRSMEGGMAQAMKEQARLKEEMVYLYKIGDMEGAAAIQRRLDPDVPM

SEQ ID NO: 5098 - DNA, 2069 bp, Arabidopsis thaliana
aaaaacaaggatctacgatggtaaattatagataggaaaatttaccgttcttgaccagcagtgtcccatatctgagctttgatagttttacgatcgatttcaagtgttcttgtctgaaactcgacaccgatcgttgctttagattcgatactgaactcgtttcttgaaaacctagcgagaagctgagatttaccaacagcagagtcgccgatcaagactaccttgaacacataatctatcttctgattgaaattgctctgaaattttgacatcgttcacaccaaaatcacaagcttatagattttagaggcgatagaaatgacttagttgtaatataagatctctgatgtaataagaagaggagagatctaaaagatgaaagtgggttgcgacttgtgaagcatcgggagacgtgaagggaagaaacgaggagggaacaccaacgaaagtgggtcccgccttttgtttcctttttcttttcattcctttttgacgtcattcttttttttttttttgcaaatctcagcgaccacaaaaaaacacacttaaaatccaatttcaccctctctcgtctacctccggtcgtctcgccgttctcctcctcctccactatagctgcctgtattcgtcttctctatcaccctcgttatctggatctgaaatattaggtgatacgaagccatgacagtttcagaagcttatagtccacctctgttcagtatagccccgatgatgggatggacagacaatcattacagaactctagcgcgtcttataacaaaacacgcatggctctacactgaaatgttagctgctgaaaccattgtctatcaagaagataacctggacagctttttggcattctctccagaccaacatcccatcgttcttcaaattggtggaagaaacttggaaaatttggctaaagcaaccagacttgctaatgcttacgcctatgatgaaattaattttaactgtggatgtcctagcccaaaagtaagtggacgaggttgttttggtgctcttcttatgcttgacccgaagtttgttggtgaggctatgtctgtcattgcagccaataccaatgcagctgtcactgtcaaatgtcgaataggtgttgatgatcatgattcatataatgagctttgtgatttcattcatatagtttcttcattatctcctactaagcatttcatcatacattcgcggaaggcattactgtctggacttagcccgtcagataaccgtcgaattccgcccttaaaatacgagtttttctttgcccttttgcgtgatttcccggacttaaagttcacaataaatggaggcataaactctgtggttgaggcagatgccgcattaaggtctggagctcatggcgttatgcttgggcgtgctgtatactacaatccctggcacattttgggacacgtcgatactgtagtttacggatctccaagcagtggaattacaaggcgacaggttcttgaaaaatataaactatatggagagtctgttctcgggaaatatggaaaaggccgaccaaatcttcgagatatagtgaggccattgatcaatttgttccactcggagtctggaaatggccagtggaaacgtagaaccgatgctgctctcttgcactgcaccaccttacaatcattcttagacgaagtgttaccagcaatacccgactatgtcctcgattcatctgctgtcaaagaggcgactggacgtgaagatctatttgcagatgtacaacgtttgttgcctcctccttacgaaaaagaatctttcaaagcattggaaaggataccaacgagacctgtgattcttgatgaggaatgacaaatctattttttttcttagccatacttgaaacatcacgaggatgaagattcgactttgtgcatgcagctacaaagatgtgatgttattttgaatctattttgatcactggatttgaaagatcaggaaaagaaaaaacgtagaagaaagcaagagatatgtaatatgtttggatcaaatgtagtatcagatgttttgcaagaaaagttttcggaaatccactt

SEQ ID NO: 5099 - protein, 387 aa, Arabidopsis thaliana
MTVSEAYSPPLFSIAPMMGWTDNHYRTLARLITKHAWLYTEMLAAETIVYQEDNLDSFLAFSPDQHPIVLQIGGRNLENLAKATRLANAYAYDEINFNCGCPSPKVSGRGCFGALLMLDPKFVGEAMSVIAANTNAAVTVKCRIGVDDHDSYNELCDFIHIVSSLSPTKHFIIHSRKALLSGLSPSDNRRIPPLKYEFFFALLRDFPDLKFTINGGINSVVEADAALRSGAHGVMLGRAVYYNPWHILGHVDTVVYGSPSSGITRRQVLEKYKLYGESVLGKYGKGRPNLRDIVRPLINLFHSESGNGQWKRRTDAALLHCTTLQSFLDEVLPAIPDYVLDSSAVKEATGREDLFADVQRLLPPPYEKESFKALERIPTRPVILDEE

SEQ ID NO: 5100 - protein, 371 aa, Arabidopsis thaliana
MMGWTDNHYRTLARLITKHAWLYTEMLAAETIVYQEDNLDSFLAFSPDQHPIVLQIGGRNLENLAKATRLANAYAYDEINFNCGCPSPKVSGRGCFGALLMLDPKFVGEAMSVIAANTNAAVTVKCRIGVDDHDSYNELCDFIHIVSSLSPTKHFIIHSRKALLSGLSPSDNRRIPPLKYEFFFALLRDFPDLKFTINGGINSVVEADAALRSGAHGVMLGRAVYYNPWHILGHVDTVVYGSPSSGITRRQVLEKYKLYGESVLGKYGKGRPNLRDIVRPLINLFHSESGNGQWKRRTDAALLHCTTLQSFLDEVLPAIPDYVLDSSAVKEATGREDLFADVQRLLPPPYEKESFKALERIPTRPVILDEE

SEQ ID NO: 5101 - protein, 370 aa, Arabidopsis thaliana
MGWTDNHYRTLARLITKHAWLYTEMLAAETIVYQEDNLDSFLAFSPDQHPIVLQIGGRNLENLAKATRLANAYAYDEINFNCGCPSPKVSGRGCFGALLMLDPKFVGEAMSVIAANTNAAVTVKCRIGVDDHDSYNELCDFIHIVSSLSPTKHFIIHSRKALLSGLSPSDNRRIPPLKYEFFFALLRDFPDLKFTINGGINSVVEADAALRSGAHGVMLGRAVYYNPWHILGHVDTVVYGSPSSGITRRQVLEKYKLYGESVLGKYGKGRPNLRDIVRPLINLFHSESGNGQWKRRTDAALLHCTTLQSFLDEVLPAIPDYVLDSSAVKEATGREDLFADVQRLLPPPYEKESFKALERIPTRPVILDEE

SEQ ID NO: 5102 - DNA, 1531 bp, Arabidopsis thaliana
acctttctatctctctttctctcaaaatccaaaatgttgtaatttgcaattcttcagtttccgtttctctcctgagaaatttattgacttcaaaaaccctaaaaagacttgtgattgttcgtttctctaactcgaatgttgatcgtacgacggtgagtgatcgtagtacaatgacgaagaaatcacagccgcagattccgcctccattgtcccgtcgcggcggcgtcgtgtggctgggatggaaactcgtaatcgctttctccgtcgcgctttgccttcttgctcttcttcgaatccaactacagtacaattccttcacgacattgtcgtttccactctccgtcgcgagatctcagacaccgcttcacaaatactccggtgatcgtcccaagctcgctttccttttcttagctcgccgtgatctcccacttgattttatgtgggatagattcttcaagggagtggatcatgcgaatttctcaatttatatacattcagtacctggtttcgtgttcaatgaagaaactacacgatcacagtatttctataatcgccaattgaacaatagcattaaggtagtatggggagaatcaagcatgattgaagcagaaagattgttgcttgcatctgctttagaggatcactccaatcaaagatttgttcttctctctgacagatgtgctccattatatgactttggctatatatacaaatatcttatctcttcaccgaggagttttgtggatagttttcttcatactaaagagacacggtacagtgtgaaaatgtctcctgtcatacctgaagagaaatggcgaaaaggatcccagtggatagctttgatcagaagtcatgcagaggtcattgtaaatgatggtatcgtattcccagtttttaaggaattctgcaagagatgtccacctttaggtaccaatgaggcatggttgtttcttaaacagaagcgacgcaactgcatccccgatgaacactatgtgcaaacattgcttacgatgcaaggactagagagtgaaatggaacgaagaacagtgacatacactgtatggaacgtttcaggtacaaaatatgaagccaaatcttggcatcccgtcactttcacattggaaaactccggccctgaggaaataaaagaaataaagaaaatagaccatgtctattacgagtctgaatctcgaacggaatggtgtaaggcggattcgaaacccgtcccatgctttctctttgcaaggaagttcacgaatgaagctgctatgcgcattgtgagtgaaggactaataggatcatcagcaaacaaaaccttataactttgcaacagtgtaagcaagtaggtcaagcaacagagcgtatacatagagtaggaatagcattgatacattacaaacatccctcatgaggtttaatggtttatgattatatatgacgcttagtaaaaactaataatcattcttcatggataatcttgtgtttgggtgttaaaatttctatgtgtatatgtctgaagaaactggcttcg

SEQ ID NO: 5103 - protein, 439 aa, Arabidopsis thaliana
LSISLSLKIQNVVICNSSVSVSLLRNLLTSKTLKRLVIVRFSNSNVDRTTVSDRSTMTKKSQPQIPPPLSRRGGVVWLGWKLVIAFSVALCLLALLRIQLQYNSFTTLSFPLSVARSQTPLHKYSGDRPKLAFLFLARRDLPLDFMWDRFFKGVDHANFSIYIHSVPGFVFNEETTRSQYFYNRQLNNSIKVVWGESSMIEAERLLLASALEDHSNQRFVLLSDRCAPLYDFGYIYKYLISSPRSFVDSFLHTKETRYSVKMSPVIPEEKWRKGSQWIALIRSHAEVIVNDGIVFPVFKEFCKRCPPLGTNEAWLFLKQKRRNCIPDEHYVQTLLTMQGLESEMERRTVTYTVWNVSGTKYEAKSWHPVTFTLENSGPEEIKEIKKIDHVYYESESRTEWCKADSKPVPCFLFARKFTNEAAMRIVSEGLIGSSANKTL

SEQ ID NO: 5104 - protein, 383 aa, Arabidopsis thaliana
MTKKSQPQIPPPLSRRGGVVWLGWKLVIAFSVALCLLALLRIQLQYNSFTTLSFPLSVARSQTPLHKYSGDRPKLAFLFLARRDLPLDFMWDRFFKGVDHANFSIYIHSVPGFVFNEETTRSQYFYNRQLNNSIKVVWGESSMIEAERLLLASALEDHSNQRFVLLSDRCAPLYDFGYIYKYLISSPRSFVDSFLHTKETRYSVKMSPVIPEEKWRKGSQWIALIRSHAEVIVNDGIVFPVFKEFCKRCPPLGTNEAWLFLKQKRRNCIPDEHYVQTLLTMQGLESEMERRTVTYTVWNVSGTKYEAKSWHPVTFTLENSGPEEIKEIKKIDHVYYESESRTEWCKADSKPVPCFLFARKFTNEAAMRIVSEGLIGSSANKTL

SEQ ID NO: 5105 - protein, 294 aa, Arabidopsis thaliana
MWDRFFKGVDHANFSIYIHSVPGFVFNEETTRSQYFYNRQLNNSIKVVWGESSMIEAERLLLASALEDHSNQRFVLLSDRCAPLYDFGYIYKYLISSPRSFVDSFLHTKETRYSVKMSPVIPEEKWRKGSQWIALIRSHAEVIVNDGIVFPVFKEFCKRCPPLGTNEAWLFLKQKRRNCIPDEHYVQTLLTMQGLESEMERRTVTYTVWNVSGTKYEAKSWHPVTFTLENSGPEEIKEIKKIDHVYYESESRTEWCKADSKPVPCFLFARKFTNEAAMRIVSEGLIGSSANKTL

SEQ ID NO: 5106 - DNA, 2000 bp, Arabidopsis thaliana
aacgtttatggatttgagtcgttctcaaacaaattttcaattagggtttggttgttcacacgcatcaatgactccaacaccaacaccaagagctccaatcgcagacgattcgattaatctacaagtcgatcaaagtttccgatcattaccaacaactttctctccgattccgttacaattactcgaacaaaaagccgagaagaccaccaccgttgatgagccaaagaaagatggaggaggaggaggagatcaaaaggaagacgagcatttcagaatcttaggtcaccatatgtgtctcaaaaggcaaagagattgtccacttttgttaacgcaatcaaagcatccgaagagaagttccatcggtgattcagatctggaatcgcgacgtgctgctgtacgagcttggggtgatcaaccgattcatttggcggatcctgatattcatgagcttatggagaaagagaagcaacgacaagtaagaggaattgaattgattgcttctgagaatttcgtgtgtagagctgtaatggaagctttaggtagtcatttaacgaataaatactctgaaggtatgcctggagctagatactatactgggaatcaatatattgatcagattgagaatctctgtattgagcgtgctcttactgcgtttggtcttgaatctgataaatggggtgttaatgttcagccttattcttgtacttctgctaacttcgcggtgtataccggacttttattgcccggtgaacggattatggggcttgattcgccttctggtggtcatatgagtcatggttattgtactcctggtgggaagaagatttcggctgcttccatcttctttgagagttttccttataaagtgaatcctcaaactgggtatattgattatgataagcttgaagataaggcgcttgattaccgtcctaagattcttatttgtggtgggagttcttatcctagggattgggattttgcaagggttagacagattgcagataagtgtggagctgttttgatgtgtgatatggctcatattagcggtcttgttgcaactaaggaatgttcaaatccatttgatcactgtgacatagtaacctccactactcacaaaggtctacgtggtcctagaggaggtatcatcttctacaggagaggcccaaagataagaaagcagggccatcactctagccattgtgacacttccacgcattacgatctagaggaaaagatcaactttgctgtttttccatctctacaaggaggtccacacaacaaccatatcgctgctcttgccattgcattgaaacaagtggccactccagagtacaaagcttacatacaacagatgaagaaaaacgcccaagctttagcagcagctcttcttagaagaaaatgcagactggttactggtggtacagacaaccatttgttgctgtgggatctcactcctatgggcttaacagggaaagtctacgagaaagtgtgtgagatgtgccatatcactttaaacaagacggctatattcggggacaatggtacaatatctcctggaggtgtaagaatagggacacctgcaatgacaacccgaggctgtatagagtctgatttcgagacaatggcggattttctgataaaggcggctcagataacaagtgcgttgcagagagagcatggaaagtcacacaaggagtttgtgaaaagtttatgcaccaacaaagacatagctgagcttagaaaccgagtcgaagcatttgctttgcagtatgagatgcctgcttctcttattcgaattgaatgaaagaaaactccacacaacagctttatttacagttgaattttatcttatctctgggtcaatttttttttttttttggagttctatcttgtaaattagagtaaatatatatttatattgggattgatttgcattatttttttccattgtaattctgtaaacattttgataaatgggaatgattactacaaatttactt

SEQ ID NO: 5107 - protein, 600 aa, Arabidopsis thaliana
TFMDLSRSQTNFQLGFGCSHASMTPTPTPRAPIADDSINLQVDQSFRSLPTTFSPIPLQLLEQKAEKTTTVDEPKKDGGGGGDQKEDEHFRILGHHMCLKRQRDCPLLLTQSKHPKRSSIGDSDLESRRAAVRAWGDQPIHLADPDIHELMEKEKQRQVRGIELIASENFVCRAVMEALGSHLTNKYSEGMPGARYYTGNQYIDQIENLCIERALTAFGLESDKWGVNVQPYSCTSANFAVYTGLLLPGERIMGLDSPSGGHMSHGYCTPGGKKISAASIFFESFPYKVNPQTGYIDYDKLEDKALDYRPKILICGGSSYPRDWDFARVRQIADKCGAVLMCDMAHISGLVATKECSNPFDHCDIVTSTTHKGLRGPRGGIIFYRRGPKIRKQGHHSSHCDTSTHYDLEEKINFAVFPSLQGGPHNNHIAALAIALKQVATPEYKAYIQQMKKNAQALAAALLRRKCRLVTGGTDNHLLLWDLTPMGLTGKVYEKVCEMCHITLNKTAIFGDNGTISPGGVRIGTPAMTTRGCIESDFETMADFLIKAAQITSALQREHGKSHKEFVKSLCTNKDIAELRNRVEAFALQYEMPASLIRIE

SEQ ID NO: 5108 - protein, 598 aa, Arabidopsis thaliana
MDLSRSQTNFQLGFGCSHASMTPTPTPRAPIADDSINLQVDQSFRSLPTTFSPIPLQLLEQKAEKTTTVDEPKKDGGGGGDQKEDEHFRILGHHMCLKRQRDCPLLLTQSKHPKRSSIGDSDLESRRAAVRAWGDQPIHLADPDIHELMEKEKQRQVRGIELIASENFVCRAVMEALGSHLTNKYSEGMPGARYYTGNQYIDQIENLCIERALTAFGLESDKWGVNVQPYSCTSANFAVYTGLLLPGERIMGLDSPSGGHMSHGYCTPGGKKISAASIFFESFPYKVNPQTGYIDYDKLEDKALDYRPKILICGGSSYPRDWDFARVRQIADKCGAVLMCDMAHISGLVATKECSNPFDHCDIVTSTTHKGLRGPRGGIIFYRRGPKIRKQGHHSSHCDTSTHYDLEEKINFAVFPSLQGGPHNNHIAALAIALKQVATPEYKAYIQQMKKNAQALAAALLRRKCRLVTGGTDNHLLLWDLTPMGLTGKVYEKVCEMCHITLNKTAIFGDNGTISPGGVRIGTPAMTTRGCIESDFETMADFLIKAAQITSALQREHGKSHKEFVKSLCTNKDIAELRNRVEAFALQYEMPASLIRIE

SEQ ID NO: 5109 - protein, 578 aa, Arabidopsis thaliana
MTPTPTPRAPIADDSINLQVDQSFRSLPTTFSPIPLQLLEQKAEKTTTVDEPKKDGGGGGDQKEDEHFRILGHHMCLKRQRDCPLLLTQSKHPKRSSIGDSDLESRRAAVRAWGDQPIHLADPDIHELMEKEKQRQVRGIELIASENFVCRAVMEALGSHLTNKYSEGMPGARYYTGNQYIDQIENLCIERALTAFGLESDKWGVNVQPYSCTSANFAVYTGLLLPGERIMGLDSPSGGHMSHGYCTPGGKKISAASIFFESFPYKVNPQTGYIDYDKLEDKALDYRPKILICGGSSYPRDWDFARVRQIADKCGAVLMCDMAHISGLVATKECSNPFDHCDIVTSTTHKGLRGPRGGIIFYRRGPKIRKQGHHSSHCDTSTHYDLEEKINFAVFPSLQGGPHNNHIAALAIALKQVATPEYKAYIQQMKKNAQALAAALLRRKCRLVTGGTDNHLLLWDLTPMGLTGKVYEKVCEMCHITLNKTAIFGDNGTISPGGVRIGTPAMTTRGCIESDFETMADFLIKAAQITSALQREHGKSHKEFVKSLCTNKDIAELRNRVEAFALQYEMPASLIRIE

SEQ ID NO: 5110 - DNA, 1616 bp, Arabidopsis thaliana
ccacgcgtccgcatctcttgttctctccgcccatctctgctctcttttattttcccagaaagtttttttttttttttttttccgaattccgttaatctcattggggtttccattgatagcaatggcgacggctttcgctcccactaagctcactgccacggttcctctgcatggatcccatgagaatcgtctcttgctcccgatccgattggctcctccttcttctttcctcggatccacccgttccctctcccttcgcagactcaatcactccaacgccacccgtcgatctcccgtcgtctctgtccaggaagttgtcaaggagaagcaatccaccaataataccagcctgttgataaccaaagaggaaggattggagttgtatgaagatatgatactaggtagatctttcgaagacatgtgtgctcaaatgtattaccgaggcaagatgtttggttttgttcacttgtacaatggccaagaggctgtttctactggctttatcaagctccttaccaagtctgactctgtcgttagtacctaccgtgaccatgtccatgccctcagcaaaggtgtctctgctcgtgctgttatgagcgagctcttcggcaaggttactggatgctgcagaggccaaggtggatccatgcacatgttctccaaagaacacaacatgcttggtggctttgcttttattggtgaaggcattcctgtcgccactggtgctgcctttagctccaagtacaggagggaagtcttgaaacaggattgtgatgatgtcactgtcgcctttttcggagatggaacttgtaacaacggacagttcttcgagtgtctcaacatggctgctctctataaactgcctattatctttgttgtcgagaataacttgtgggccattgggatgtctcacttgagagccacttctgaccccgagatttggaagaaaggtcctgcatttgggatgcctggtgttcatgttgacggtatggatgtcttgaaggtcagggaagtcgctaaagaagctgtcactagagctagaagaggagaaggtccaaccttggttgaatgtgagacttatagattcagaggacactccttggctgatcccgatgagctccgtgatgctgctgagaaagccaaatacgcggctagagacccaatcgcagcattgaagaagtatttgatagagaacaagcttgcaaaggaagcagagctaaagtcaatagagaaaaagatagacgagttggtggaggaagcggttgagtttgcagacgctagtccacagcccggtcgcagtcagttgctagagaatgtgtttgctgatccaaaaggatttggaattggacctgatggacggtacagatgtgaggaccccaagtttaccgaaggcacagctcaagtctgagaagacaagtttaaccataagctgtctactgtctcttcgatgtttctatatatcttattaagttaaatgctacagagaatcagtttgaatcatttgcactttttgctttttgtttggtgttactaaactatcacaaggttcttcttgtagttcgttgggttttcattggttaccacttaccagagaattgtatttttttttttaaagg

SEQ ID NO: 5111 - protein, 468 aa, Arabidopsis thaliana
HASASLVLSAHLCSLLFSQKVFFFFFFRIPLISLGFPLIAMATAFAPTKLTATVPLHGSHENRLLLPIRLAPPSSFLGSTRSLSLRRLNHSNATRRSPVVSVQEVVKEKQSTNNTSLLITKEEGLELYEDMILGRSFEDMCAQMYYRGKMFGFVHLYNGQEAVSTGFIKLLTKSDSVVSTYRDHVHALSKGVSARAVMSELFGKVTGCCRGQGGSMHMFSKEHNMLGGFAFIGEGIPVATGAAFSSKYRREVLKQDCDDVTVAFFGDGTCNNGQFFECLNMAALYKLPIIFVVENNLWAIGMSHLRATSDPEIWKKGPAFGMPGVHVDGMDVLKVREVAKEAVTRARRGEGPTLVECETYRFRGHSLADPDELRDAAEKAKYAARDPIAALKKYLIENKLAKEAELKSIEKKIDELVEEAVEFADASPQPGRSQLLENVFADPKGFGIGPDGRYRCEDPKFTEGTAQV

SEQ ID NO: 5112 - protein, 428 aa, Arabidopsis thaliana
MATAFAPTKLTATVPLHGSHENRLLLPIRLAPPSSFLGSTRSLSLRRLNHSNATRRSPVVSVQEVVKEKQSTNNTSLLITKEEGLELYEDMILGRSFEDMCAQMYYRGKMFGFVHLYNGQEAVSTGFIKLLTKSDSVVSTYRDHVHALSKGVSARAVMSELFGKVTGCCRGQGGSMHMFSKEHNMLGGFAFIGEGIPVATGAAFSSKYRREVLKQDCDDVTVAFFGDGTCNNGQFFECLNMAALYKLPIIFVVENNLWAIGMSHLRATSDPEIWKKGPAFGMPGVHVDGMDVLKVREVAKEAVTRARRGEGPTLVECETYRFRGHSLADPDELRDAAEKAKYAARDPIAALKKYLIENKLAKEAELKSIEKKIDELVEEAVEFADASPQPGRSQLLENVFADPKGFGIGPDGRYRCEDPKFTEGTAQV

SEQ ID NO: 5113 - protein, 338 aa, Arabidopsis thaliana
MILGRSFEDMCAQMYYRGKMFGFVHLYNGQEAVSTGFIKLLTKSDSVVSTYRDHVHALSKGVSARAVMSELFGKVTGCCRGQGGSMHMFSKEHNMLGGFAFIGEGIPVATGAAFSSKYRREVLKQDCDDVTVAFFGDGTCNNGQFFECLNMAALYKLPIIFVVENNLWAIGMSHLRATSDPEIWKKGPAFGMPGVHVDGMDVLKVREVAKEAVTRARRGEGPTLVECETYRFRGHSLADPDELRDAAEKAKYAARDPIAALKKYLIENKLAKEAELKSIEKKIDELVEEAVEFADASPQPGRSQLLENVFADPKGFGIGPDGRYRCEDPKFTEGTAQV

SEQ ID NO: 5114 - DNA, 1333 bp, Arabidopsis thaliana
gatctgccaatcacaaattaacagaaaacacaactaaattgcgatttgaatttattaaatcgtaaaactgagatcttctctgagatttttctcctcctaaagtttgaaactttgaacataaaaattgtattttttttttttttttgaagtttccagcaaaaaaaaaattgaaactttcagtgattggaattttaatttgtgttttagtttggtgggtttctttatcgggatcgttgtcgtggatttttgtttgtagcagcttgaaagacgatgtcgtcgtcgccggacattgccggaatcttagataatacgaaggagcttgatcggttaagaaaagaacaagaggaagttcttgtggagattaataagatgcataagaagcttcaagctacgccggagatagttgagaagcctggtgatatttcattgtcaaagcttaaaaatttgtacattcaagcaaaagagctttcagaaagtgaagtaaccgtttcaaatattctgcttactcagttggattctctgcttccatctggaccaactgggcaacaacgcagaaaattagtggcagaaggcaacgaacagaagagaaagagaatgaaagtagatacagatgtaacaagagtttctccttccatgagaaatcaaatcgaggcatatgctagtctaaagggtgaacaggttgctgcaagagtcacagctgaagatgccgagaaggatgaatggtttgtggtgaaagttattcacttcgacagagaaacaaaagaagttgaagtacttgatgaagaaccaggagatgatgaagaaggaggtggccagaggacgtataaactatcaatgtcatgtattttaccgtttccaaaacggaatgatccttcaagcacacaagagtttataccagggaaacacgtcttagctgtatatccaggaaccacagccctctacaaggcaactgttataagtaccccacgaaagaggaaatctgacgagtacttgctagaatttgatgatgatgaagaagacggagcattacctcaaagaacagtgccattccacaaagtggtagctttaccagaaggccatcgccagtaattttagatggatacaatgaaataagagacgatttctttgggccagagtgtaagttaagagttgttgcctttgtttgtgatgatgactttgaagaataaaaaggtatgttttaactttttattatttcaatttgtggcaaaactactctagcaacatttgtaacatttaaatgtgtatatatgaatggaaccatgggtatgtatatcatattgagacacaatttaaaaaaaaattacatttttct

SEQ ID NO: 5115 - protein, 272 aa, Arabidopsis thaliana
MSSSPDIAGILDNTKELDRLRKEQEEVLVEINKMHKKLQATPEIVEKPGDISLSKLKNLYIQAKELSESEVTVSNILLTQLDSLLPSGPTGQQRRKLVAEGNEQKRKRMKVDTDVTRVSPSMRNQIEAYASLKGEQVAARVTAEDAEKDEWFVVKVIHFDRETKEVEVLDEEPGDDEEGGGQRTYKLSMSCILPFPKRNDPSSTQEFIPGKHVLAVYPGTTALYKATVISTPRKRKSDEYLLEFDDDEEDGALPQRTVPFHKVVALPEGHRQ

SEQ ID NO: 5116 - protein, 239 aa, Arabidopsis thaliana
MHKKLQATPEIVEKPGDISLSKLKNLYIQAKELSESEVTVSNILLTQLDSLLPSGPTGQQRRKLVAEGNEQKRKRMKVDTDVTRVSPSMRNQIEAYASLKGEQVAARVTAEDAEKDEWFVVKVIHFDRETKEVEVLDEEPGDDEEGGGQRTYKLSMSCILPFPKRNDPSSTQEFIPGKHVLAVYPGTTALYKATVISTPRKRKSDEYLLEFDDDEEDGALPQRTVPFHKVVALPEGHRQ

SEQ ID NO: 5117 - protein, 164 aa, Arabidopsis thaliana
MKVDTDVTRVSPSMRNQIEAYASLKGEQVAARVTAEDAEKDEWFVVKVIHFDRETKEVEVLDEEPGDDEEGGGQRTYKLSMSCILPFPKRNDPSSTQEFIPGKHVLAVYPGTTALYKATVISTPRKRKSDEYLLEFDDDEEDGALPQRTVPFHKVVALPEGHRQ

SEQ ID NO: 5118 - DNA, 1427 bp, Arabidopsis thaliana
agttgtttttttctttttctttcttcgatctaaagctctcttcttcttcttcaaacggagctctcttcttcttcttcaacctttgttcttcgatctctgtcttttttttttttatctcttcttcgattgtaagaaaagtttcagctcaaagaaatctgggttaaagtgtgtttgaaattgtggatcgattcatagattctcgataccaataggatgtggtgatacgtttgtaatctcgtgccatatctttggtttgtcaaagagagtgtgttttaatgtcaatttctgggtaaccaagtttgagcttattccttttgattctgcccggctctctgattttttaagtgcaagacgacaagtgatgaaaagatagagacaaagaaaggcttcaagtttgttgataactgctgtctaaagagttcgttcccttgagagattctcactctgacataagagttcccccaaccggaagagaaattcaaagatcagaaaacggtgaaagatgcgacgacgaccaggaattggaggattacaaaaggccgcagctgctagggatcagtaccggttactaggagaaaatgtagccaagttacggactgatatgatgaaagaacagctctccacgttccgttcccagcttgaagagttcgctcgtaaacacaagaatgacattcgtaagaatcctgccttcagggctcagttccatgaaatgtgtgctaacattggtgtggatcctcttgcttctaacaagggtttctgggctgagctccttggtattggtgacttctactatgaacttggagttcagattattgaagtttgcatgcttacaagatcacataatggaggtttgatcagcttgcaagagctctgcaaccatcttcgtcagagaaggaagaaagaccgtgaagctgtgactgaagatgattgtcttcgagctattagcaagctaaaggtattgggtagcggatttgaggttatcactattggcaagaaaaagcttgtccgttcagtacccacagagctgaacaaagaccataaccagattttggagttggctcagggccaaggctttgtgattgtggaagaggtacaaagacgcctctcatggacatctggtcgcgttatagatgctctcgaaactttgttagaggagggccttgccatgatcgacaatggccataaagacggaaagtgtcggtactggtttccctgtgtttcttcggtttactcatccatcggatctgatacttaaatggtacatgctcagttgttttgcttgttttatacagtattaaatacagtcacactcgttacatataaattacgaagaaatcttttcagtatattactgaaattttcttgtacatgtatcactctgtaaaaaaaatatttatgcttggttgttggagatttcggtttcttct

SEQ ID NO: 5119 - protein, 250 aa, Arabidopsis thaliana
MRRRPGIGGLQKAAAARDQYRLLGENVAKLRTDMMKEQLSTFRSQLEEFARKHKNDIRKNPAFRAQFHEMCANIGVDPLASNKGFWAELLGIGDFYYELGVQIIEVCMLTRSHNGGLISLQELCNHLRQRRKKDREAVTEDDCLRAISKLKVLGSGFEVITIGKKKLVRSVPTELNKDHNQILELAQGQGFVIVEEVQRRLSWTSGRVIDALETLLEEGLAMIDNGHKDGKCRYWFPCVSSVYSSIGSDT

SEQ ID NO: 5120 - protein, 217 aa, Arabidopsis thaliana
MMKEQLSTFRSQLEEFARKHKNDIRKNPAFRAQFHEMCANIGVDPLASNKGFWAELLGIGDFYYELGVQIIEVCMLTRSHNGGLISLQELCNHLRQRRKKDREAVTEDDCLRAISKLKVLGSGFEVITIGKKKLVRSVPTELNKDHNQILELAQGQGFVIVEEVQRRLSWTSGRVIDALETLLEEGLAMIDNGHKDGKCRYWFPCVSSVYSSIGSDT

SEQ ID NO: 5121 - protein, 216 aa, Arabidopsis thaliana
MKEQLSTFRSQLEEFARKHKNDIRKNPAFRAQFHEMCANIGVDPLASNKGFWAELLGIGDFYYELGVQIIEVCMLTRSHNGGLISLQELCNHLRQRRKKDREAVTEDDCLRAISKLKVLGSGFEVITIGKKKLVRSVPTELNKDHNQILELAQGQGFVIVEEVQRRLSWTSGRVIDALETLLEEGLAMIDNGHKDGKCRYWFPCVSSVYSSIGSDT

SEQ ID NO: 5122 - DNA, 1840 bp, Arabidopsis thaliana
gtaatttaggtggagttgttgtatactaaacaagaaagagattaggaagagagagacggcgatggcggctacaggatctggacggtctcaattcatttccagttccggcggtaaccgaagcttctccaattctccactcatcgagaactctgattctaatcagattattgtctctgagaagaagagctggaagaatttctttgcttacttaggccctggttttcttgtttcaatcgcatatattgatcctggaaactttgagactgatctgcaagctggagcacactacaagtatgaattactttggatcatattggtggcctcatgtgcggctttggtgattcaatctctggctgctaatcttggtgttgtcacaggaaaacatttggctgagcaatgtagagccgagtactccaaagttccaaactttatgttatgggtcgttgctgaaattgcagtagttgcttgtgacataccggaagttatcggaacagcttttgctctgaacatgctctttagcataccggtgtggatcggtgttcttctgacaggcttaagtacgctgattcttctcgcacttcaaaaatacggggtgagaaagctggagttcttgatagcgtttcttgtgttcacaattgctatatgcttctttgttgagattcattactcaaagccagacccaggagaagtcctacatggtctctttgttcctcaacttaaaggaaatggtgcaactggtctcgcaatctctttgctcggagccatggttatgccgcataatctcttcctccactcggccttggttctctcgaggaaaatccctcgttccgcttctggtatcaaggaagcttgcaggttttacttgatagaaagtggattggctctaatggtggcctttctcataaacgtctctgtaatatcagtaagcggggctgtttgtaatgcccccaacttaagccctgaagatcgagctaattgtgaggatttggacttaaacaaggcttcgtttctgctacggaacgttgtgggaaaatggagctcaaagctatttgcaatcgcgcttcttgcttctggtcagagctcgacgataaccggaacttatgctggacaatatgtaatgcagggctttcttgatctcagactcgagccatggctcagaaacttactaacaagatgtttagctataatcccgagtctaattgttgctctcatcggtggttcagctggagctggaaagttaatcatcattgcctcgatgatcttatcctttgagctcccgtttgcgttggttcctcttctcaaattcacaagttgcaaaaccaagatgggttcacatgtcaacccaatggcgattacagctttgacttgggtcattggtggtttaatcatgggaataaacatatactatctagtaagcagtttcatcaaactgcttatccacagtcatatgaagcttatcctcgtcgtcttctgtggaattcttgggttcgcaggcattgctctctatttagccgccatagcttaccttgtcttccggaaaaacagagtagccacttctcttcttatttcaagagactcacaaaatgtggagacacttccaagacaggacattgtcaacatgcagttaccatgtagagtatctacctccgatgttgactgagtcatcattaagcttaggattccaataaaattagatctaaaccaagttcataaaaacctttcgatagtgtactagaataaaggttatatgaatcggtttgcgtcttttctttaaccagatcttcgtaggaaacaaacttctaataacacatggcataataaaatcattgcttccattatc

SEQ ID NO: 5123 - protein, 532 aa, Arabidopsis thaliana
MAATGSGRSQFISSSGGNRSFSNSPLIENSDSNQIIVSEKKSWKNFFAYLGPGFLVSIAYIDPGNFETDLQAGAHYKYELLWIILVASCAALVIQSLAANLGVVTGKHLAEQCRAEYSKVPNFMLWVVAEIAVVACDIPEVIGTAFALNMLFSIPVWIGVLLTGLSTLILLALQKYGVRKLEFLIAFLVFTIAICFFVEIHYSKPDPGEVLHGLFVPQLKGNGATGLAISLLGAMVMPHNLFLHSALVLSRKIPRSASGIKEACRFYLIESGLALMVAFLINVSVISVSGAVCNAPNLSPEDRANCEDLDLNKASFLLRNVVGKWSSKLFAIALLASGQSSTITGTYAGQYVMQGFLDLRLEPWLRNLLTRCLAIIPSLIVALIGGSAGAGKLIIIASMILSFELPFALVPLLKFTSCKTKMGSHVNPMAITALTWVIGGLIMGINIYYLVSSFIKLLIHSHMKLILVVFCGILGFAGIALYLAAIAYLVFRKNRVATSLLISRDSQNVETLPRQDIVNMQLPCRVSTSDVD

SEQ ID NO: 5124 - protein, 409 aa, Arabidopsis thaliana
MLWVVAEIAVVACDIPEVIGTAFALNMLFSIPVWIGVLLTGLSTLILLALQKYGVRKLEFLIAFLVFTIAICFFVEIHYSKPDPGEVLHGLFVPQLKGNGATGLAISLLGAMVMPHNLFLHSALVLSRKIPRSASGIKEACRFYLIESGLALMVAFLINVSVISVSGAVCNAPNLSPEDRANCEDLDLNKASFLLRNVVGKWSSKLFAIALLASGQSSTITGTYAGQYVMQGFLDLRLEPWLRNLLTRCLAIIPSLIVALIGGSAGAGKLIIIASMILSFELPFALVPLLKFTSCKTKMGSHVNPMAITALTWVIGGLIMGINIYYLVSSFIKLLIHSHMKLILVVFCGILGFAGIALYLAAIAYLVFRKNRVATSLLISRDSQNVETLPRQDIVNMQLPCRVSTSDVD

SEQ ID NO: 5125 - protein, 383 aa, Arabidopsis thaliana
MLFSIPVWIGVLLTGLSTLILLALQKYGVRKLEFLIAFLVFTIAICFFVEIHYSKPDPGEVLHGLFVPQLKGNGATGLAISLLGAMVMPHNLFLHSALVLSRKIPRSASGIKEACRFYLIESGLALMVAFLINVSVISVSGAVCNAPNLSPEDRANCEDLDLNKASFLLRNVVGKWSSKLFAIALLASGQSSTITGTYAGQYVMQGFLDLRLEPWLRNLLTRCLAIIPSLIVALIGGSAGAGKLIIIASMILSFELPFALVPLLKFTSCKTKMGSHVNPMAITALTWVIGGLIMGINIYYLVSSFIKLLIHSHMKLILVVFCGILGFAGIALYLAAIAYLVFRKNRVATSLLISRDSQNVETLPRQDIVNMQLPCRVSTSDVD

SEQ ID NO: 5126 - DNA, 1983 bp, Arabidopsis thaliana
aaaacttaataaagcctcgtactgagagatcaaaacaaaacaaaacaaaacccaaacacttaccaaatcaatcaattatcgagaatcttccttcctttaatcctcaaaaaaaacaaaaacctttcttcacctcctttccttgattcatcctctaggttaatgggtgttttctcgaatcttcgaggacccagagccggagctacccacgatgaatttccggcgaccaatggctctccttcgtcttcttcttctccatcttcatcaatcaagcgaaaattatcgaatttgttaccactctgcgttgctctggtagttatcgctgagatcgggtttctgggtcggctcgataaagtcgctttggttgatacgttgactgatttcttcacccagtctccgtcactctcgcagtctccaccggcgagatccgatcggaagaagatcggattatttactgataggagctgcgaggagtggttgatgagagaagattcagttacttactctagagattttactaaagatccaatttttatctctggtggtgaaaaggactttcaatggtgttctgtggattgtacatttggagatagttcagggaaaacaccagatgctgcgtttggattaggtcagaaacctggaactcttagtataatacgttccatggaatcagcacagtattatccagaaaatgatcttgcacaggcacgacggtgggagaggttatgatatagtgatgaccactagtctatcatcagatgttcctgttggatatttttcgtgggcggagtatgatattatgtctccggtacagccaaaaactgagagagctattgcagctgcttttatttctaattgtggtgctcggaattttcgtctacaagcacttgaggcattgatgaaaactaacattaagattgattcttatggtggttgtcatcgaaaccgggatgggaaagttgacaaggttgaagctcttaagcgatacaaattcagtttggcttttgagaatactaacgaggaagattatgtcaccgagaagttctttcaatccttagttgctgggtccgtccccgtggtagttggtcctccaaatatagaagaatttgcgcctgcttcggactcattccttcacattaagactatggaagatgtagagccagttgcaaagagaatgaagtatctcgcagctaaccctgctgcttataatcagacactaagatggaaatacgagggtccttcagattctttcaaggcacttgttgatatggctgctgtacactcttcttgccgtctctgcattttcctggccacgagggtccgagaacaagaagaggaaagccctaatttcaagaaacgaccgtgcaaatgtagcaggggaggatcagacacagtttatcatgtttttgttagagaaagaggccggtttgaaatggaatcagtctttttgaggggtaaaagtgtgactcaggaagctctagaatctgcagttctcgccaagttcaagtctttaaaacatgaggcagtgtggaagaaggaaaggcctggaaacttaaaaggagacaaagagcttaaaatacatcggatttacccgcttggcctaacgcaacgacaggctttgtacaacttcaaattcgagggaaattcgagtctaagtagtcacattcaaaacaacccttgtgctaaatttgaggttgtcttcgtctagtttcattcctctggatctgtcacaggtatcatctcagctaagaagacatttctctgtgctagaatcgcaaagtgctaaacaaaccgattagatgaaacaaaaggttaatagtcatgagattggtgaactcattttgtttaggcagtgtatctgtaaatcgttctgacattgcagacgatgtgttcttgatagctggatgcataaatgtttgaagatttagagcaatttgatagttttgaatctcttgagagtgtgttaattaatctttaaatttttcc

SEQ ID NO: 5127 - protein, 338 aa, Arabidopsis thaliana
MILHRHDGGRGYDIVMTTSLSSDVPVGYFSWAEYDIMSPVQPKTERAIAAAFISNCGARNFRLQALEALMKTNIKIDSYGGCHRNRDGKVDKVEALKRYKFSLAFENTNEEDYVTEKFFQSLVAGSVPVVVGPPNIEEFAPASDSFLHIKTMEDVEPVAKRMKYLAANPAAYNQTLRWKYEGPSDSFKALVDMAAVHSSCRLCIFLATRVREQEEESPNFKKRPCKCSRGGSDTVYHVFVRERGRFEMESVFLRGKSVTQEALESAVLAKFKSLKHEAVWKKERPGNLKGDKELKIHRIYPLGLTQRQALYNFKFEGNSSLSSHIQNNPCAKFEVVFV

SEQ ID NO: 5128 - protein, 323 aa, Arabidopsis thaliana
MTTSLSSDVPVGYFSWAEYDIMSPVQPKTERAIAAAFISNCGARNFRLQALEALMKTNIKIDSYGGCHRNRDGKVDKVEALKRYKFSLAFENTNEEDYVTEKFFQSLVAGSVPVVVGPPNIEEFAPASDSFLHIKTMEDVEPVAKRMKYLAANPAAYNQTLRWKYEGPSDSFKALVDMAAVHSSCRLCIFLATRVREQEEESPNFKKRPCKCSRGGSDTVYHVFVRERGRFEMESVFLRGKSVTQEALESAVLAKFKSLKHEAVWKKERPGNLKGDKELKIHRIYPLGLTQRQALYNFKFEGNSSLSSHIQNNPCAKFEVVFV

SEQ ID NO: 5129 - protein, 302 aa, Arabidopsis thaliana
MSPVQPKTERAIAAAFISNCGARNFRLQALEALMKTNIKIDSYGGCHRNRDGKVDKVEALKRYKFSLAFENTNEEDYVTEKFFQSLVAGSVPVVVGPPNIEEFAPASDSFLHIKTMEDVEPVAKRMKYLAANPAAYNQTLRWKYEGPSDSFKALVDMAAVHSSCRLCIFLATRVREQEEESPNFKKRPCKCSRGGSDTVYHVFVRERGRFEMESVFLRGKSVTQEALESAVLAKFKSLKHEAVWKKERPGNLKGDKELKIHRIYPLGLTQRQALYNFKFEGNSSLSSHIQNNPCAKFEVVFV

SEQ ID NO: 5130 - DNA, 2637 bp, Arabidopsis thaliana
gtctcgttgtcctcctcactttcatcagccgttttgaatctccggcgacttgacagagaagaacaaggaagaagactaagagagaaagtaagagataatccaggagattcattctccgttttgaatcttcctcaatctcatcttcttccgctctttctttccaagctcataaaaaatggctgaggctgatgatattcaaccaatcgtgtgtgacaatggtaccggtatggtgaaggctggatttgcaggagatgatgctcccagggctgttttttcccagtgttgttggtaggccaagacatcatggtgtcatggttgggatgaaccagaaggatgcatatgttggtgatgaagcacaatccaagagaggtattcttaccttgaagtatcctattgagcatggtgttgttagcaactgggatgatatggaaaagatctggcatcacactttctacaatgagcttcgtattgctcctgaagagcaccctgttcttcttaccgaggctcctcttaacccaaaggccaacagagagaagatgactcaaatcatgtttgagacctttaactctcccgctatgtatgtcgccatccaagctgttctctccttgtacgccagtggtcgtacaaccggtattgtgctggattctggtgatggtgtgtctcacactgtgccaatctacgagggtttctctcttcctcatgccatcctccgtcttgaccttgctggacgtgaccttactgattacctcatgaagatccttacagagagaggttacatgttcaccacaacagcagagcgggaaattgtaagagacatcaaggagaagctctcctttgttgctgttgactacgagcaggagatggaaacctcaaagaccagctcttccatcgagaagaactatgaattacccgatgggcaagtcatcacgattggtgctgagagattcagatgcccagaagtcttgttccagccctcgtttgtgggaatggaagctgctggaatccacgagacaacctataactcaatcatgaagtgtgatgtggatatcaggaaggatctgtacggtaacattgtgctcagtggtggaaccactatgttctcaggtatcgctgaccgtatgagcaaagaaatcacagcacttgcaccaagcagcatgaagattaaggtcgttgcaccacctgaaaggaagtacaggttaattaaattaatcccccccccccccccccgattcgtcgtcttctttctgcaagaaaaacaaaaaaacagttacgagacataatctctctttttcctcctttgtctcttcttctcattcttctttgttatcgatcaaaacatgcataaatccaaaagaaacccgtcattctcctccactctcctcgatgaaatctacaattccatcgatcctaaaacccaaaaaacacaaccttatgtcggctctgttaacactactaccaaaaaacagagcattgtgacaagatcggttcctgaccggaaaatccaccgtgatcgtttctttggctctgtatcttcttcctctgattccaactctagtattttctcatcttcagacaccgaactaactcacggtaagaagacaacttcttctaggccgttatgtttcggtccttctaagacaaaaccaagaaaaacagaggataaaactctgttccaccaaaacagagctacccgagtgtacgacgactacgattacgcctccgacgtcccaaaattcaatagacacgacgagaattgggagaatacgagaaacagaagatcggtgaagagctccggaaaccaaaagaaaccaaaaactccagcttcacctggaggaagaatcgttaacttcttaaattcgttgttcagcaacaattcaaaacaatccaatgcggttaagagttatccaaggaagactagttacgatgattctgcttacgttaggaaaacaagtaatgattatcattcatctactactacgtgttcttcagcttcttctttctcaaggtcgtgtatgaacaaaggctacgagaaatcatctgggcgtatcaaaagaagcgttagattttccccggtcaatgttatcgtccccgagagcttcaccagcaaagaagaagattatttcagtaacggtaacgctagaaagtcggtgaagaagaatgtggaagatggagggaggagatcagtggaggagatagcgagagagttcttaagagattatcacaagaatcatgaaaacagtttggttaagactaatggttttgaggattatgaagatgatgatgaagacgatgatgatgatgatgttgcaagtgattcgagttcagatctgtttgagcttgatttagttggaaatcatcatcatcataatgtgtacggagatgaacttcctgtgtatgaaaccacttttgctggtttgatcttgtgaaactttttctcttttctcttttttgttcatgtttatttgttaatttagattttcgttgtataagttttaatccatgtgattgttgaaaaaaagaaaaaaatcgcatgtgattctccacttttgtgtttgattcagtaactatgttgtgttataaattttgtgtttgtaaaaatttgatccaatcatgttttattagatcattttagctttc

SEQ ID NO: 5131 - protein, 362 aa, Arabidopsis thaliana
MHKSKRNPSFSSTLLDEIYNSIDPKTQKTQPYVGSVNTTTKKQSIVTRSVPDRKIHRDRFFGSVSSSSDSNSSIFSSSDTELTHGKKTTSSRPLCFGPSKTKPRKTEDKTLFHQNRATRVYDDYDYASDVPKFNRHDENWENTRNRRSVKSSGNQKKPKTPASPGGRIVNFLNSLFSNNSKQSNAVKSYPRKTSYDDSAYVRKTSNDYHSSTTTCSSASSFSRSCMNKGYEKSSGRIKRSVRFSPVNVIVPESFTSKEEDYFSNGNARKSVKKNVEDGGRRSVEEIAREFLRDYHKNHENSLVKTNGFEDYEDDDEDDDDDDVASDSSSDLFELDLVGNHHHHNVYGDELPVYETTFAGLIL

SEQ ID NO: 5132 - protein, 342 aa, Arabidopsis thaliana
MMLPGLFFPSVVGRPRHHGVMVGMNQKDAYVGDEAQSKRGILTLKYPIEHGVVSNWDDMEKIWHHTFYNELRIAPEEHPVLLTEAPLNPKANREKMTQIMFETFNSPAMYVAIQAVLSLYASGRTTGIVLDSGDGVSHTVPIYEGFSLPHAILRLDLAGRDLTDYLMKILTERGYMFTTTAEREIVRDIKEKLSFVAVDYEQEMETSKTSSSIEKNYELPDGQVITIGAERFRCPEVLFQPSFVGMEAAGIHETTYNSIMKCDVDIRKDLYGNIVLSGGTTMFSGIADRMSKEITALAPSSMKIKVVAPPERKYRLIKLIPPPPPRFVVFFLQEKQKNSYET

SEQ ID NO: 5133 - protein, 341 aa, Arabidopsis thaliana
MLPGLFFPSVVGRPRHHGVMVGMNQKDAYVGDEAQSKRGILTLKYPIEHGVVSNWDDMEKIWHHTFYNELRIAPEEHPVLLTEAPLNPKANREKMTQIMFETFNSPAMYVAIQAVLSLYASGRTTGIVLDSGDGVSHTVPIYEGFSLPHAILRLDLAGRDLTDYLMKILTERGYMFTTTAEREIVRDIKEKLSFVAVDYEQEMETSKTSSSIEKNYELPDGQVITIGAERFRCPEVLFQPSFVGMEAAGIHETTYNSIMKCDVDIRKDLYGNIVLSGGTTMFSGIADRMSKEITALAPSSMKIKVVAPPERKYRLIKLIPPPPPRFVVFFLQEKQKNSYET

SEQ ID NO: 5134 - DNA, 1637 bp, Arabidopsis thaliana
aaatcttgaaattaaaaaaacagagcaatctttctctctctgttctgagagcttccatgtctgaaaccaacaacaacaaagcttgagtcttcctgttccttttccttttctctctcaaactcatgaaattttctcgggaaaatatgaaatgggttttcccagaaatcaaaacaactcagaatttcctctctccttcatcacttccacaagaaccaccgttatctctccgctccagcgcaaacttcgatctaaacagcaaaatcagtccaagtattctcctcataatcataatcctctcaatcatcttcttcatctccggtctccttcatctcttagtcagattcctcctcacaccaccgagcagagacagagaagattacttcgacaacgtcactgctcttcaaggccagcttcaacagctttttcatctccatgattctggagttgaccaatccttcatcgacacgttacctgttttccattacaaatccataatcggtctcaagaactatccttttgattgtgcagtttgtctttgtgagttcgaaacagaggataagctcaggctcttacctaaatgcagccacgcctttcacatggattgtatcgatacttggcttctatctcactctacttgtcctttgtgtagatccagtctcctctctgatctctcttcgcaccaagatcctcgttcttctttcctccttgtgctcgagtctgcgagtgatcatagctcgagagagattggaggagatagagacagtgcagcttgtgtggctgcaaatgatgatattgatgtgtctagtgctcatcttggtttggtcggaaacaatgatcttggatcaaccaggatagattcgggtcacggagatcagtacctggatggtgaattgggtggttcggttggaaaggttgttcctttttcagttaagctagggaagtttaggaatatagatattggtgaaggaactagtagcaacaacaacattggtaatagtagtagtttagatgagaggaggtgtttctcaatgggatcatatgagtatataatggatgaagaaacgactcttaaggttcatgtttcaaccaagaaacaatcaagcaagaaccgtggcttgcccggtcataggacagcgatgtccgaatgcgggtttgatccaacagggagattgaaattcagtgggagtggatcgatgaggatagtggaagaagcggccgagaagaatgtagtggaaagagagagcttttcggtatcgaaaatatggctaagggggaagaaggagaagcatagtaaagttcaaggaaaagaggatagttcattggtttcttcgtcttcgggaagagcattctctttcaggttatcgaaccagcggaaccatcccgatgcgatgatcgaaagtggttgcgaagaagataatcaaaagtgcgaaaactcggagtctttggagactaaaacaccatcttttgctaggaggactatgctttggcttgcagggagacaaaacaaggttgttcattcttcttcttcaactaatgtctagttactataatttttccattttcaaatttagttttctgttcaattgtttctttgtgttagtcctcataagtgcaaaaagatatatgaatcattgtag

SEQ ID NO: 5135 - protein, 472 aa, Arabidopsis thaliana
MKFSRENMKWVFPEIKTTQNFLSPSSLPQEPPLSLRSSANFDLNSKISPSILLIIIILSIIFFISGLLHLLVRFLLTPPSRDREDYFDNVTALQGQLQQLFHLHDSGVDQSFIDTLPVFHYKSIIGLKNYPFDCAVCLCEFETEDKLRLLPKCSHAFHMDCIDTWLLSHSTCPLCRSSLLSDLSSHQDPRSSFLLVLESASDHSSREIGGDRDSAACVAANDDIDVSSAHLGLVGNNDLGSTRIDSGHGDQYLDGELGGSVGKVVPFSVKLGKFRNIDIGEGTSSNNNIGNSSSLDERRCFSMGSYEYIMDEETTLKVHVSTKKQSSKNRGLPGHRTAMSECGFDPTGRLKFSGSGSMRIVEEAAEKNVVERESFSVSKIWLRGKKEKHSKVQGKEDSSLVSSSSGRAFSFRLSNQRNHPDAMIESGCEEDNQKCENSESLETKTPSFARRTMLWLAGRQNKVVHSSSSTNV

SEQ ID NO: 5136 - protein, 465 aa, Arabidopsis thaliana
MKWVFPEIKTTQNFLSPSSLPQEPPLSLRSSANFDLNSKISPSILLIIIILSIIFFISGLLHLLVRFLLTPPSRDREDYFDNVTALQGQLQQLFHLHDSGVDQSFIDTLPVFHYKSIIGLKNYPFDCAVCLCEFETEDKLRLLPKCSHAFHMDCIDTWLLSHSTCPLCRSSLLSDLSSHQDPRSSFLLVLESASDHSSREIGGDRDSAACVAANDDIDVSSAHLGLVGNNDLGSTRIDSGHGDQYLDGELGGSVGKVVPFSVKLGKFRNIDIGEGTSSNNNIGNSSSLDERRCFSMGSYEYIMDEETTLKVHVSTKKQSSKNRGLPGHRTAMSECGFDPTGRLKFSGSGSMRIVEEAAEKNVVERESFSVSKIWLRGKKEKHSKVQGKEDSSLVSSSSGRAFSFRLSNQRNHPDAMIESGCEEDNQKCENSESLETKTPSFARRTMLWLAGRQNKVVHSSSSTNV

SEQ ID NO: 5137 - protein, 314 aa, Arabidopsis thaliana
MDCIDTWLLSHSTCPLCRSSLLSDLSSHQDPRSSFLLVLESASDHSSREIGGDRDSAACVAANDDIDVSSAHLGLVGNNDLGSTRIDSGHGDQYLDGELGGSVGKVVPFSVKLGKFRNIDIGEGTSSNNNIGNSSSLDERRCFSMGSYEYIMDEETTLKVHVSTKKQSSKNRGLPGHRTAMSECGFDPTGRLKFSGSGSMRIVEEAAEKNVVERESFSVSKIWLRGKKEKHSKVQGKEDSSLVSSSSGRAFSFRLSNQRNHPDAMIESGCEEDNQKCENSESLETKTPSFARRTMLWLAGRQNKVVHSSSSTNV

SEQ ID NO: 5138 - DNA, 873 bp, Arabidopsis thaliana
agaaagaaactgatagtagaaaaaaaaagagagaagaaaaatggtgttgacaatctatgctcctttattcgcttcttcaaagagagctgttgtgacattggtggagaagggagtatcattcgaaactgtcaatgtcgatctcatgaaaggagaacagagacagcctgagtatctcgcgattcagcctttcggtaaaatcccagtcctcgtcgacggagactacaaaatcttcgagtcgcgtgcgatcatgaggtatatagcagagaagtatagatcacaaggacctgatcttttggggaagactattgaagagagaggacaagtagagcaatggttagacgttgaggctacaagttaccatccaccactattggctttaacgctcaacattgtctttgcaccacttatgggtttccctgctgatgagaaagttattaaggagagtgaagagaagcttgcagaagtgcttgatgtctatgaagctcagctttctaagaacgaatacttggctggtgattttgtgagtctagctgatttggctcaccttcctttcaccgagtatcttgttggtcctattgggaaggctcatttgatcaaagataggaagcatgttagcgcttggtgggataagattagtagccgtgctgcgtggaaggaggtttccgctaagtactcactacctgtttaaacaaggagatgttgacttggggggtttgtgtgagctttgtgttctttgagggagttcgttttcgggtcgattgtcttgttgtttcaataagaaacggaactctgtctcatttgttgtctctggtttcttgtattctgtaacttttcaagcttttcaataagagtttaaaatcagagtgactcaat

SEQ ID NO: 5139 - protein, 215 aa, Arabidopsis thaliana
MVLTIYAPLFASSKRAVVTLVEKGVSFETVNVDLMKGEQRQPEYLAIQPFGKIPVLVDGDYKIFESRAIMRYIAEKYRSQGPDLLGKTIEERGQVEQWLDVEATSYHPPLLALTLNIVFAPLMGFPADEKVIKESEEKLAEVLDVYEAQLSKNEYLAGDFVSLADLAHLPFTEYLVGPIGKAHLIKDRKHVSAWWDKISSRAAWKEVSAKYSLPV

SEQ ID NO: 5140 - protein, 181 aa, Arabidopsis thaliana
MKGEQRQPEYLAIQPFGKIPVLVDGDYKIFESRAIMRYIAEKYRSQGPDLLGKTIEERGQVEQWLDVEATSYHPPLLALTLNIVFAPLMGFPADEKVIKESEEKLAEVLDVYEAQLSKNEYLAGDFVSLADLAHLPFTEYLVGPIGKAHLIKDRKHVSAWWDKISSRAAWKEVSAKYSLPV

SEQ ID NO: 5141 - protein, 146 aa, Arabidopsis thaliana
MRYIAEKYRSQGPDLLGKTIEERGQVEQWLDVEATSYHPPLLALTLNIVFAPLMGFPADEKVIKESEEKLAEVLDVYEAQLSKNEYLAGDFVSLADLAHLPFTEYLVGPIGKAHLIKDRKHVSAWWDKISSRAAWKEVSAKYSLPV

SEQ ID NO: 5142 - DNA, 1734 bp, Arabidopsis thaliana
acgtcgccacagccattagtagtagcatcatcaaagcctgcattcttgttcttcgagtctctctcgtgagtgactttcattaccgagaaaaacacaatcatagagaagctctcaatcttgtttgcttctgatcagtaactatgattactgtaaatagatcactctttcattatctttccctttcacttgtacaaaccaattcgttctcgagctaacggaaatggcggagaggcaacagagccctgcggcggagacgattcccggtacacccgtaatccgggaagtgagaaccggaaccgggtccgagaatttcaacccggagaatacaaggagaggatgcttgagagctgaaatcgacatttctccacagttatatggtggtcgtgggttctgggttcccttcaatcttgaagacaattacgactgtgtgggagaatttgacataaagagaatggaagaacagacagtggagcttgagaaggatctgattatgaaagagttagagactctggatcttcttgaagctcttggatcaaccaaaaggatttttgaagatttgaagtggcagcttcagcagcaagcactgagatgcaaggagacccctcaacatttgcgttcacactccaaagagatggtcgatgagcactgccatcgtaatcccctgaagtctccggatctgatgaccatggaaatgaagcaagctggtatgaatctttgtaaaaccatggatgatcttgcgttgatccactcttatgctgaatctctgaatatgaaaacgaaggaagagaaagatgtccttggagtagcgtctctagcggaggaacttaacagtttgaagtttaaaccagcaggtcctgatcaagtagagagattcaataccgagaatttaccagtgaatccacaatgtgaacagattaagatggtagttgaaacctatgatacagctttccataaacagagcaaaacctgcccgagaactgcagatatgagattggttgctgcaagaaaaatggaagaggcagcaagagcagcggaagcacttgcgcttgctgaaatgaccatattatccagcagaagaaaccaagacgctctctgcttccctaagacaccatgttttccattaacacttaaagcacagatgaacaaagaattatccaccaatgtctcaagaatagagatcttgaggaagctggaggaagctaacgaagaagttaaacaaagtaaacaagccttggaagttgcgttaaaccgggtagaaatcgctagtgtgaagcaacttgaagcagaagaggcatttcggcagtggaacatagagtcatggaaagaccagaaagctgttggagcaaaacgctcgatgaaaagagaaagctttcctcagcgctctttcttgagccatatcaatcagcacgagccactgatcgatctccctgagccaatgctgaaacgtaacgtctcaatgggtaatgctcttaaccgaaaagatgagaaacagttggtcacgccgaggagaaagtttaggttcatacaaacacatcaagcttccattagaaaaacagagtaagctaaaaaaatacccaacctttgaaaacatgttttgcacatttcgattcctgtttttttttattcttggtttgatcattgatgggtgttgttgcttccatcaaaagcaaaacacagatgattagagtgagatgtgttgttttgactcaaatgtgacaaaaagaaaaacattat

SEQ ID NO: 5143 - protein, 446 aa, Arabidopsis thaliana
MAERQQSPAAETIPGTPVIREVRTGTGSENFNPENTRRGCLRAEIDISPQLYGGRGFWVPFNLEDNYDCVGEFDIKRMEEQTVELEKDLIMKELETLDLLEALGSTKRIFEDLKWQLQQQALRCKETPQHLRSHSKEMVDEHCHRNPLKSPDLMTMEMKQAGMNLCKTMDDLALIHSYAESLNMKTKEEKDVLGVASLAEELNSLKFKPAGPDQVERFNTENLPVNPQCEQIKMVVETYDTAFHKQSKTCPRTADMRLVAARKMEEAARAAEALALAEMTILSSRRNQDALCFPKTPCFPLTLKAQMNKELSTNVSRIEILRKLEEANEEVKQSKQALEVALNRVEIASVKQLEAEEAFRQWNIESWKDQKAVGAKRSMKRESFPQRSFLSHINQHEPLIDLPEPMLKRNVSMGNALNRKDEKQLVTPRRKFRFIQTHQASIRKTE

SEQ ID NO: 5144 - protein, 369 aa, Arabidopsis thaliana
MEEQTVELEKDLIMKELETLDLLEALGSTKRIFEDLKWQLQQQALRCKETPQHLRSHSKEMVDEHCHRNPLKSPDLMTMEMKQAGMNLCKTMDDLALIHSYAESLNMKTKEEKDVLGVASLAEELNSLKFKPAGPDQVERFNTENLPVNPQCEQIKMVVETYDTAFHKQSKTCPRTADMRLVAARKMEEAARAAEALALAEMTILSSRRNQDALCFPKTPCFPLTLKAQMNKELSTNVSRIEILRKLEEANEEVKQSKQALEVALNRVEIASVKQLEAEEAFRQWNIESWKDQKAVGAKRSMKRESFPQRSFLSHINQHEPLIDLPEPMLKRNVSMGNALNRKDEKQLVTPRRKFRFIQTHQASIRKTE

SEQ ID NO: 5145 - protein, 356 aa, Arabidopsis thaliana
MKELETLDLLEALGSTKRIFEDLKWQLQQQALRCKETPQHLRSHSKEMVDEHCHRNPLKSPDLMTMEMKQAGMNLCKTMDDLALIHSYAESLNMKTKEEKDVLGVASLAEELNSLKFKPAGPDQVERFNTENLPVNPQCEQIKMVVETYDTAFHKQSKTCPRTADMRLVAARKMEEAARAAEALALAEMTILSSRRNQDALCFPKTPCFPLTLKAQMNKELSTNVSRIEILRKLEEANEEVKQSKQALEVALNRVEIASVKQLEAEEAFRQWNIESWKDQKAVGAKRSMKRESFPQRSFLSHINQHEPLIDLPEPMLKRNVSMGNALNRKDEKQLVTPRRKFRFIQTHQASIRKTE

SEQ ID NO: 5146 - DNA, 1134 bp, Arabidopsis thaliana
atccaaaacgtttttccttcccacaggaaaagaagaaaaacagacagcggaggactaaaacaactagccacaacacaacgcttcaaatatatattactctgccactttcttcaatcttccttcaaagattcttattacagcgacacacaactcttttccatttagatttttgattttttttggttctctaaaggaggagagaaatgttggctatcttccacgaggcgtttgctcatccgccggaggaactcaacagtccggcatctgagaaatgctctaaacaaccaaaacttccagaagaaaccctaaatgatttcttattacgttaccctctcaacactttctccatgtctttcggacaagctgctgttcttgcttacgttcgtccctctgcttccttctccatccaccagaggttgttttgtggatttgatgacatctactgtctcttctttgggagcttgaacaatctgtgtcagctaaacaaacagtatggtctcaccaagacaacaaacgaggccatgtttgtgatcgaagcttataggactcttagagacagaggtccttatccagctgatcaggtcgtcaaagacttagacggtagcttttcctttgtggtttatgatagcaaagccggctctgtcttcactgctctgggatctgatggaggggtgaagctatactggggcatagctgctgatggatctgttgttatatcagatgatttggatgttatcaaagagggttgtgctaaatcttttgctccatttcctacagggtgtatgttccatagtgaaggagggttaatgagctttgagcatccaatgaacaagatcaaggcgatgccgagggtagacagtgaaggagttctatgcggtgccaacttcaaggtggatgtgtacaatcgtgttaacagtatccctcgtcgaggaagtgaagccaattggtctctctgaatacttttaataacactttcaatttggtttctttttcgcacttgtgcttcttctccgctttcatcttagttatggactgttcctaagcttgccatgaataaaactgtgaataataaagcttttaatgttctgtttcttactttaagtcagacaataaacttttaacacttgtgatcat

SEQ ID NO: 5147 - protein, 250 aa, Arabidopsis thaliana
MLAIFHEAFAHPPEELNSPASEKCSKQPKLPEETLNDFLLRYPLNTFSMSFGQAAVLAYVRPSASFSIHQRLFCGFDDIYCLFFGSLNNLCQLNKQYGLTKTTNEAMFVIEAYRTLRDRGPYPADQVVKDLDGSFSFVVYDSKAGSVFTALGSDGGVKLYWGIAADGSVVISDDLDVIKEGCAKSFAPFPTGCMFHSEGGLMSFEHPMNKIKAMPRVDSEGVLCGANFKVDVYNRVNSIPRRGSEANWSL

SEQ ID NO: 5148 - protein, 202 aa, Arabidopsis thaliana
MSFGQAAVLAYVRPSASFSIHQRLFCGFDDIYCLFFGSLNNLCQLNKQYGLTKTTNEAMFVIEAYRTLRDRGPYPADQVVKDLDGSFSFVVYDSKAGSVFTALGSDGGVKLYWGIAADGSVVISDDLDVIKEGCAKSFAPFPTGCMFHSEGGLMSFEHPMNKIKAMPRVDSEGVLCGANFKVDVYNRVNSIPRRGSEANWSL

SEQ ID NO: 5149 - protein, 144 aa, Arabidopsis thaliana
MFVIEAYRTLRDRGPYPADQVVKDLDGSFSFVVYDSKAGSVFTALGSDGGVKLYWGIAADGSVVISDDLDVIKEGCAKSFAPFPTGCMFHSEGGLMSFEHPMNKIKAMPRVDSEGVLCGANFKVDVYNRVNSIPRRGSEANWSL

SEQ ID NO: 5150 - DNA, 1396 bp, Arabidopsis thaliana
atcaaagtataaagtaaaaacaaagactcgagttaatatgtctagtactgaagaaatgtcatcagtcaaaaacacaactcaggttattggcgttgacccatcctccaccgtacgagttaccatcgttcaatcttccaccgtctataatgataccccggccactttagacaaggcggagaagtttattgtggaggcggcgagcaaaggagcgaagttggtgttgtttcccgaggcgttcatcggcggttatcctcgaggttttaggtttggtttagcggtgggagttcataacgaagaagggcgtgatgagtttcgtaactaccatgcttctgctattaaagtccctggccctgaagtggaaagattggctgagttggccgggaaaaataatgtgcacttggtaatgggggctatagagaaggatggttatacactctattgcacagctcttttcttcagtccacaaggtcagtttttaggtaagcaccgtaaagtcatgcccacatctttggaacgttgcatatggggtcaaggggacggatcaaccatccccgtttacgacactcctattggcaaaatcggtgctgctatttgctgggagaataggatgcccctctacagaactgcattgtacgctaaaggcattgagatttattgtgcacctactgctgattattcgttggaatggcaagcatcgatgattcacattgcggtagaaggtggatgtttcgtgttgtcagcgcaccagttctgcaagcgtagagagttccctgaacatcctgattacttgtttaatgacatagtagacactaaagaacatgatcctactgtctccggaggtggaagtgtcattatttcacctttgggaaaggttctcgccggaccaaactatgaatcagagggtctcgtcacagctgatcttgatcttggtgatatagcaagagccaagttatacttcgatgtggttggacattactcaaagccagatatttttaacttgaccgtaaatgagcacccgaagaaaccggttacattcatgacgaaggtcgagaaagcagaggatgaatcaaacaaatagtcaagatttgcaattcgtctactgaagttaagtcaagttcgaaatgtttttttttcagttttaaagttgatgttcaagtttatttttctttctcttcaataatgtaagaggactatttcgatatgttaaaataaaaccaattggttctctcctcttgtattcaattgtcgtgtaataatgttttgttcaattcgagtgttgattaagttgtattctttatttttcctttgcatgtcaaacacagattttttgctgtttaaataagttgctagctaagtctagatgtgagtttgaaaagtcactacaaaactacttaat

SEQ ID NO: 5151 - protein, 358 aa, Arabidopsis thaliana
SKYKVKTKTRVNMSSTEEMSSVKNTTQVIGVDPSSTVRVTIVQSSTVYNDTPATLDKAEKFIVEAASKGAKLVLFPEAFIGGYPRGFRFGLAVGVHNEEGRDEFRNYHASAIKVPGPEVERLAELAGKNNVHLVMGAIEKDGYTLYCTALFFSPQGQFLGKHRKVMPTSLERCIWGQGDGSTIPVYDTPIGKIGAAICWENRMPLYRTALYAKGIEIYCAPTADYSLEWQASMIHIAVEGGCFVLSAHQFCKRREFPEHPDYLFNDIVDTKEHDPTVSGGGSVIISPLGKVLAGPNYESEGLVTADLDLGDIARAKLYFDVVGHYSKPDIFNLTVNEHPKKPVTFMTKVEKAEDESNK

SEQ ID NO: 5152 - protein, 346 aa, Arabidopsis thaliana
MSSTEEMSSVKNTTQVIGVDPSSTVRVTIVQSSTVYNDTPATLDKAEKFIVEAASKGAKLVLFPEAFIGGYPRGFRFGLAVGVHNEEGRDEFRNYHASAIKVPGPEVERLAELAGKNNVHLVMGAIEKDGYTLYCTALFFSPQGQFLGKHRKVMPTSLERCIWGQGDGSTIPVYDTPIGKIGAAICWENRMPLYRTALYAKGIEIYCAPTADYSLEWQASMIHIAVEGGCFVLSAHQFCKRREFPEHPDYLFNDIVDTKEHDPTVSGGGSVIISPLGKVLAGPNYESEGLVTADLDLGDIARAKLYFDVVGHYSKPDIFNLTVNEHPKKPVTFMTKVEKAEDESNK

SEQ ID NO: 5153 - protein, 340 aa, Arabidopsis thaliana
MSSVKNTTQVIGVDPSSTVRVTIVQSSTVYNDTPATLDKAEKFIVEAASKGAKLVLFPEAFIGGYPRGFRFGLAVGVHNEEGRDEFRNYHASAIKVPGPEVERLAELAGKNNVHLVMGAIEKDGYTLYCTALFFSPQGQFLGKHRKVMPTSLERCIWGQGDGSTIPVYDTPIGKIGAAICWENRMPLYRTALYAKGIEIYCAPTADYSLEWQASMIHIAVEGGCFVLSAHQFCKRREFPEHPDYLFNDIVDTKEHDPTVSGGGSVIISPLGKVLAGPNYESEGLVTADLDLGDIARAKLYFDVVGHYSKPDIFNLTVNEHPKKPVTFMTKVEKAEDESNK

SEQ ID NO: 5154 - DNA, 1405 bp, Arabidopsis thaliana
aacaaatatctcctgctcttacatctgagtctttttctttctaaccttctgattcatgagtaatcatatgtccattatgaagttcttgaatcaaatcctctgtctctctcttatcctctccatatccatgactactctttcctttgctcagacatgttctaaatacaagttctccagcaacaatgtctttgactcttgcaacgatcttccttttcttgattccttcctccattacacttacgagtcttccaccgggagcctccacattgcttatcgccacactaagctcacctctggtaaatgggttgcttgggctgtgaacccaacgtctacgggaatggtgggagctcaagccatcgttgcttatccacaatcagatggtactgtcagggtttacacttctcccatcagaagctaccagacgagtctactagagggtgatctgagtttcaatgtctctggtttgtctgcaacttaccagaacaatgagatcgttgtgttggcaagtctgaagcttgcacaggatcttgggaatggtggaaccattaacacagtgtggcaagatgggtcaatgtctgggaacagtcttctgcctcatccaacttctggcaacaatgttcgatcagtgtcaactctcaatctggtatccggtgtttcagcagctgcaggaggagctggaggaagttccaagcttcgcaaacgcaatattcatggaatattgaatggagtgagctggggaatcatgatgccactaggggcaatcattgctcgatacttgagagtagccaaatcagcagaccctgcttggttctacattcacgttttctgccaggcttctgcttacatcatcggtgttgccggatgggccactggtctcaaactcggtggcgactcaccagggattcagtacagcacccaccgtgccatcgggatcgctctcttctctctagcgacagttcaggtgtttgcgatgtttctgaggccaaaaccagagcacaagcataggctctactggaacatttaccaccacacgatcggctacacgataatcatcctaggggtggtgaacgttttcaaagggctaggcatattgagtcccaagaagcagtggaaaaatgcctacatcggtatcattgttgttctcgccattgtggccaccctactcgaagccttcacctggtatgtagtcattaaaagaaggaaactggaggctaaaacggctcagcatggagcatctaacggcactcggtctcagtatgcttaagattagcaacagacttgcttccttttctctttgtgcatagagacacagttatttatctgcttatctatctgttcccatatgcaatgatgattttttacattcatgatttaggatttataatgccatttttatttgatcagc

SEQ ID NO: 5155 - protein, 402 aa, Arabidopsis thaliana
MSNHMSIMKFLNQILCLSLILSISMTTLSFAQTCSKYKFSSNNVFDSCNDLPFLDSFLHYTYESSTGSLHIAYRHTKLTSGKWVAWAVNPTSTGMVGAQAIVAYPQSDGTVRVYTSPIRSYQTSLLEGDLSFNVSGLSATYQNNEIVVLASLKLAQDLGNGGTINTVWQDGSMSGNSLLPHPTSGNNVRSVSTLNLVSGVSAAAGGAGGSSKLRKRNIHGILNGVSWGIMMPLGAIIARYLRVAKSADPAWFYIHVFCQASAYIIGVAGWATGLKLGGDSPGIQYSTHRAIGIALFSLATVQVFAMFLRPKPEHKHRLYWNIYHHTIGYTIIILGVVNVFKGLGILSPKKQWKNAYIGIIVVLAIVATLLEAFTWYVVIKRRKLEAKTAQHGASNGTRSQYA

SEQ ID NO: 5156 - protein, 398 aa, Arabidopsis thaliana
MSIMKFLNQILCLSLILSISMTTLSFAQTCSKYKFSSNNVFDSCNDLPFLDSFLHYTYESSTGSLHIAYRHTKLTSGKWVAWAVNPTSTGMVGAQAIVAYPQSDGTVRVYTSPIRSYQTSLLEGDLSFNVSGLSATYQNNEIVVLASLKLAQDLGNGGTINTVWQDGSMSGNSLLPHPTSGNNVRSVSTLNLVSGVSAAAGGAGGSSKLRKRNIHGILNGVSWGIMMPLGAIIARYLRVAKSADPAWFYIHVFCQASAYIIGVAGWATGLKLGGDSPGIQYSTHRAIGIALFSLATVQVFAMFLRPKPEHKHRLYWNIYHHTIGYTIIILGVVNVFKGLGILSPKKQWKNAYIGIIVVLAIVATLLEAFTWYVVIKRRKLEAKTAQHGASNGTRSQYA

SEQ ID NO: 5157 - protein, 395 aa, Arabidopsis thaliana
MKFLNQILCLSLILSISMTTLSFAQTCSKYKFSSNNVFDSCNDLPFLDSFLHYTYESSTGSLHIAYRHTKLTSGKWVAWAVNPTSTGMVGAQAIVAYPQSDGTVRVYTSPIRSYQTSLLEGDLSFNVSGLSATYQNNEIVVLASLKLAQDLGNGGTINTVWQDGSMSGNSLLPHPTSGNNVRSVSTLNLVSGVSAAAGGAGGSSKLRKRNIHGILNGVSWGIMMPLGAIIARYLRVAKSADPAWFYIHVFCQASAYIIGVAGWATGLKLGGDSPGIQYSTHRAIGIALFSLATVQVFAMFLRPKPEHKHRLYWNIYHHTIGYTIIILGVVNVFKGLGILSPKKQWKNAYIGIIVVLAIVATLLEAFTWYVVIKRRKLEAKTAQHGASNGTRSQYA

SEQ ID NO: 5158 - DNA, 1348 bp, Arabidopsis thaliana
aagtaaaaaacgcgtcagggaagagaagatggatccgaattccacggtttccggcgatggtcaggcgacggcggcgatagagcatcggtccttcgctcggatcggatttctcggaaacccgagcgatgtatacttcgggcgaaccatatcattgaccatcggaaacttctgggcatccgtgaagctggagccatcggagcatctcgtaatcaagcctcatccattccatgatctcgtccagttcacctctctcgaccatctcctgaatcgtttgcaaaatgaaggatactacggtggggtaaggttgctaatggcgatatttaaagtattccgtaactattgcaaagagaatgacattcaacttcaccaagccaacttctctctttcttatgataccaatatccctaggcagacagggctttcgggttctagtgccatcgtatccgctgcccttaactgccttctcgacttctacaatgtcaggcatttgatcaaagtacaagtccgccccaacattgttctcagtgcagagaaagaacttggcattgttgctggtcttcaggacagggttgctcaggtctatggtggtcttgttcacatggattttagcaaggagcacatggataaattggggcatgggatttatactcctatggatatcagtctcctccctcctctgcatctcatctatgctgagaatccgagcgactcagggaaggtacatagtatggttcggcaaagatggttagacggtgatgagtttataatctcatcaatgacaagtcggaagtctagcagaagaaggtcgaactgcattactcaacaaggaccattccaaacttgtggaactcatgaaccttaatttcgacattcggaggcggatgtttggggatgaatgcttaggagcaatgaacatagagatggtggaagtagcaaggagggttggtgcagcttcaaagttcactggaagtggaggagcagtggtggttttctgccctgaaggtccatctcaggtgaagcttctggaagaagaatgcaggaaagcgggatttatgcttcagccggtaaaaattgcgccttcatgtttgaatgattctgacattcagaccttatgaaagccttgatcaagtcttcttattcacacgatagagtcattttacagagaattaaacatgtgagctttagtgtctcagttgtttgggtggttgttcttttctttttcttgccgatttttattgtttgttccttggcttataatcagtatgtttgttttgtttcttttccacaataagatccaattttttatatattaaaagaaggtacaattgataataaaatcgttaagacc

SEQ ID NO: 5159 - protein, 286 aa, Arabidopsis thaliana
SKKRVREEKMDPNSTVSGDGQATAAIEHRSFARIGFLGNPSDVYFGRTISLTIGNFWASVKLEPSEHLVIKPHPFHDLVQFTSLDHLLNRLQNEGYYGGVRLLMAIFKVFRNYCKENDIQLHQANFSLSYDTNIPRQTGLSGSSAIVSAALNCLLDFYNVRHLIKVQVRPNIVLSAEKELGIVAGLQDRVAQVYGGLVHMDFSKEHMDKLGHGIYTPMDISLLPPLHLIYAENPSDSGKVHSMVRQRWLDGDEFIISSMTSRKSSRRRSNCITQQGPFQTCGTHEP

SEQ ID NO: 5160 - protein, 277 aa, Arabidopsis thaliana
MDPNSTVSGDGQATAAIEHRSFARIGFLGNPSDVYFGRTISLTIGNFWASVKLEPSEHLVIKPHPFHDLVQFTSLDHLLNRLQNEGYYGGVRLLMAIFKVFRNYCKENDIQLHQANFSLSYDTNIPRQTGLSGSSAIVSAALNCLLDFYNVRHLIKVQVRPNIVLSAEKELGIVAGLQDRVAQVYGGLVHMDFSKEHMDKLGHGIYTPMDISLLPPLHLIYAENPSDSGKVHSMVRQRWLDGDEFIISSMTSRKSSRRRSNCITQQGPFQTCGTHEP

SEQ ID NO: 5161 - protein, 183 aa, Arabidopsis thaliana
MAIFKVFRNYCKENDIQLHQANFSLSYDTNIPRQTGLSGSSAIVSAALNCLLDFYNVRHLIKVQVRPNIVLSAEKELGIVAGLQDRVAQVYGGLVHMDFSKEHMDKLGHGIYTPMDISLLPPLHLIYAENPSDSGKVHSMVRQRWLDGDEFIISSMTSRKSSRRRSNCITQQGPFQTCGTHEP

SEQ ID NO: 5162 - DNA, 1383 bp, Arabidopsis thaliana
gaattgacggaggtccgttactctgaatccttgtattcgcattaaccctaactttttctgcttctcaagcgtctcgaaatctgaatccagagattaaacaaaaattgaacggacttgctttgacacagcagaccgtaaatcgggatgggtgctcctaagcagaaatggactcaagaagaagaatcagctttaaagtctggagttataaagcatggacctggtaaatggcgcacaattctcaaagatcctgaatttagcggagtcttgtacctgcgttccaatgttgatcttaaggataaatggagaaacatgagtgtcatggcaaatggctggggatcgcgcgaaaagtctaggttagctgttaaaaggacgttctcccttcctaaacaggaagagaactcactagccctaaccaattctttgcaaagtgatgaagaaaatgtggatgcgacctctggactccaagtttcttctaatcctcctccaaggagacctaatgtaaggttggatagccttataatggaagcaatagctaccctgaaagagcctggtggctgtaacaaaacaacaattggtgcctacattgaggatcaatatcatgctccaccagacttcaaacggttgttgtctaccaagctaaagtacttgacatcttgcgggaaacttgtgaaggttaaacgtaagtacagaattccaaactccactcccttgtcttcccacaggagaaaaggtctgggggtgtttggaggaaaacagaggacttcttctttgccttcacctaaaacagacatagatgaagtgaattttcagacaaggtcacagattgatacagagatagccagaatgaagagtatgaacgtacatgaggcggcagcagttgcagcacaggcagtagcagaggcagaagctgccatggcagaggctgaggaagctgcaaaggaagcggaggcagcagaagccgaagcagaagtagctcaagctttcgctgaggaagcttcaaagacattgaaaggaagaaacatctgcaaaatgatgatccgtgcctgaggtaatggaaagcgagagaagaaggagactaaatgtgaagagagagtagagagaagcctagtgtttgtgttgatcattctctttacttgggaagttgttttttagtagtaagcaatcaaatatgtttgtcagtatgtcgtcgctctgactcttttgattcctgcacaacttttgggaaaaaatgttttatttggctcttctcactctccaatatacatacaattatcgttagtaatgtgtataatttatagaccgatctatctatgcactatcatgcttatcgccaatgagcattttgattatgtatgtattatcaattaatagtagtactgtttt

SEQ ID NO: 5163 - protein, 300 aa, Arabidopsis thaliana
MGAPKQKWTQEEESALKSGVIKHGPGKWRTILKDPEFSGVLYLRSNVDLKDKWRNMSVMANGWGSREKSRLAVKRTFSLPKQEENSLALTNSLQSDEENVDATSGLQVSSNPPPRRPNVRLDSLIMEAIATLKEPGGCNKTTIGAYIEDQYHAPPDFKRLLSTKLKYLTSCGKLVKVKRKYRIPNSTPLSSHRRKGLGVFGGKQRTSSLPSPKTDIDEVNFQTRSQIDTEIARMKSMNVHEAAAVAAQAVAEAEAAMAEAEEAAKEAEAAEAEAEVAQAFAEEASKTLKGRNICKMMIRA

SEQ ID NO: 5164 - protein, 245 aa, Arabidopsis thaliana
MSVMANGWGSREKSRLAVKRTFSLPKQEENSLALTNSLQSDEENVDATSGLQVSSNPPPRRPNVRLDSLIMEAIATLKEPGGCNKTTIGAYIEDQYHAPPDFKRLLSTKLKYLTSCGKLVKVKRKYRIPNSTPLSSHRRKGLGVFGGKQRTSSLPSPKTDIDEVNFQTRSQIDTEIARMKSMNVHEAAAVAAQAVAEAEAAMAEAEEAAKEAEAAEAEAEVAQAFAEEASKTLKGRNICKMMIRA

SEQ ID NO: 5165 - protein, 242 aa, Arabidopsis thaliana
MANGWGSREKSRLAVKRTFSLPKQEENSLALTNSLQSDEENVDATSGLQVSSNPPPRRPNVRLDSLIMEAIATLKEPGGCNKTTIGAYIEDQYHAPPDFKRLLSTKLKYLTSCGKLVKVKRKYRIPNSTPLSSHRRKGLGVFGGKQRTSSLPSPKTDIDEVNFQTRSQIDTEIARMKSMNVHEAAAVAAQAVAEAEAAMAEAEEAAKEAEAAEAEAEVAQAFAEEASKTLKGRNICKMMIRA

SEQ ID NO: 5166 - DNA, 1528 bp, Arabidopsis thaliana
agttcgcaacaccgcaatagatcttttccccaagtttcagacaaacataaagcagcagagaaaattttcaagtttcaaagagcttttccctcaccaagcaaaatttggatatttgtcagcgaaatctgcagctaaattgggacttgtcttgttagttcaaagattgaaacttttttggttaattgtttggcggaagaagatttacaatgggagaggagcatccgagaaagcggtctagacaacattttgaagcggaggcgagaaacgtatcgttgtttgaatcccctcaatgcgaaacctccaagtggtatttcagcagggaagagattgagcgtttctctccatccagaaaagatgggattgatcttgtgaaggagtcgtttttacggtcttcgtattgcaccttcctgcaaagacttggcatgaagcttcatgtgtcccaggttacaatatcatgtgcaatggtgatgtgccacaggttttacatgcgccaatctcatgcaaaaaatgactggcagacaatagcgacttccagtctgttcctcgcttgcaaagctgaagatgagccatgtcaactgtccagtgtcgttgtagcgtcttatgaaataatttatgagtgggatccttctgcctcaattagaatccatcaaactgagtgttatcatgaatttaaagaaattattttgtccggggaaagtcttctgctgagcacaagtgctttccatttagacattgaacttccctacaaacctctggctgcggctttgaatagactgaacgcttggcctgaccttgcaacagctgcatggaattttgtgcatgactggattcgaaccacactatgcttgcagtacaaaccccatgttattgcaacagccactgtgcacctagctgctacgtttcagaatgcgaaagtaggcagcaggagagattggtggttggagtttggagttacaactaagctattaaaagaggtaatccaggagatgtgcacactgatagaagtggacagaaggaggaatatgccacctccacctccacctccaagaagagagttaagttgggcaatacctgcagccgtaaagccggtccatatggctagagcttatccgtttcacagctaccctttgcagtcctatagacaggctggcatctggtgagccattgttgagcagcatgaagatgtaatctctcttagagtcttgagttggtttagcaataaaagatttccgtagagactcatgagagaggcagtgtagcattatatagagatccgagtgaggtgcttctgtctaagttaagcgtctcatgtatgaccaaagtggattctctcgagattcttggtctctgttctcgatagagagagattatgtatagaagtgtcccattcacatgttataatactagctgactttatatcgtttgtatatctggaatctatgtttttggtttctttaaaaagtttaaagttgttttgattttgactaattctctcattgttaagtaatttggtttttgatgaagtgcc

SEQ ID NO: 5167 - protein, 317 aa, Arabidopsis thaliana
MGEEHPRKRSRQHFEAEARNVSLFESPQCETSKWYFSREEIERFSPSRKDGIDLVKESFLRSSYCTFLQRLGMKLHVSQVTISCAMVMCHRFYMRQSHAKNDWQTIATSSLFLACKAEDEPCQLSSVVVASYEIIYEWDPSASIRIHQTECYHEFKEIILSGESLLLSTSAFHLDIELPYKPLAAALNRLNAWPDLATAAWNFVHDWIRTTLCLQYKPHVIATATVHLAATFQNAKVGSRRDWWLEFGVTTKLLKEVIQEMCTLIEVDRRRNMPPPPPPPRRELSWAIPAAVKPVHMARAYPFHSYPLQSYRQAGIW

SEQ ID NO: 5168 - protein, 245 aa, Arabidopsis thaliana
MKLHVSQVTISCAMVMCHRFYMRQSHAKNDWQTIATSSLFLACKAEDEPCQLSSVVVASYEIIYEWDPSASIRIHQTECYHEFKEIILSGESLLLSTSAFHLDIELPYKPLAAALNRLNAWPDLATAAWNFVHDWIRTTLCLQYKPHVIATATVHLAATFQNAKVGSRRDWWLEFGVTTKLLKEVIQEMCTLIEVDRRRNMPPPPPPPRRELSWAIPAAVKPVHMARAYPFHSYPLQSYRQAGIW

SEQ ID NO: 5169 - protein, 232 aa, Arabidopsis thaliana
MVMCHRFYMRQSHAKNDWQTIATSSLFLACKAEDEPCQLSSVVVASYEIIYEWDPSASIRIHQTECYHEFKEIILSGESLLLSTSAFHLDIELPYKPLAAALNRLNAWPDLATAAWNFVHDWIRTTLCLQYKPHVIATATVHLAATFQNAKVGSRRDWWLEFGVTTKLLKEVIQEMCTLIEVDRRRNMPPPPPPPRRELSWAIPAAVKPVHMARAYPFHSYPLQSYRQAGIW

SEQ ID NO: 5170 - DNA, 740 bp, Arabidopsis thaliana
accctaatttcacaaagtctctcaataaccatgtgtgctccgcagccctccaacgagtttccgctgatttttcgcaaggatggtaagacatgtgtgttttgggatgtggaggattacccaatcccagctgatctccatcctcgttcgatccggcggagaatcgtaaaggatgtgaagaaatatggttgtgatgcggaggtgtcgattcatgcttatgctaatgataatacggtctcggtaacaatgaggcgtcaattttcggctgctggaatcaaattggaagtgttcacccaagcaggggataaatatgcgagacattgttccttgtatggtgacattatgctgtggtcactggaaaatcctccaccatcaaatattattgtcatcgcaaaaataatcgatgacgacttggctgatcgtattggatgtttgactaccgtctggtcatatgggcttctcatatcccaagttaagccagaatggctagaacggctttttcctgttggaagctatccctcgtttttggcagccatatttgatggaggattgccgaaatcatcgaaagcgaacaaggatcgctttcctctcgatgagtccgacgactaacttttgtgtctatgttattgttttgtgcctatagttgatatcaagtttggattgaaatgtttttagtattgtctatctataatatttatgtgattttggacatcgttactgtgattgagtttttgatttgaatc

SEQ ID NO: 5171 - protein, 201 aa, Arabidopsis thaliana
TLISQSLSITMCAPQPSNEFPLIFRKDGKTCVFWDVEDYPIPADLHPRSIRRRIVKDVKKYGCDAEVSIHAYANDNTVSVTMRRQFSAAGIKLEVFTQAGDKYARHCSLYGDIMLWSLENPPPSNIIVIAKIIDDDLADRIGCLTTVWSYGLLISQVKPEWLERLFPVGSYPSFLAAIFDGGLPKSSKANKDRFPLDESDD

SEQ ID NO: 5172 - protein, 191 aa, Arabidopsis thaliana
MCAPQPSNEFPLIFRKDGKTCVFWDVEDYPIPADLHPRSIRRRIVKDVKKYGCDAEVSIHAYANDNTVSVTMRRQFSAAGIKLEVFTQAGDKYARHCSLYGDIMLWSLENPPPSNIIVIAKIIDDDLADRIGCLTTVWSYGLLISQVKPEWLERLFPVGSYPSFLAAIFDGGLPKSSKANKDRFPLDESDD

SEQ ID NO: 5173 - protein, 120 aa, Arabidopsis thaliana
MRRQFSAAGIKLEVFTQAGDKYARHCSLYGDIMLWSLENPPPSNIIVIAKIIDDDLADRIGCLTTVWSYGLLISQVKPEWLERLFPVGSYPSFLAAIFDGGLPKSSKANKDRFPLDESDD

SEQ ID NO: 5174 - DNA, 834 bp, Arabidopsis thaliana
aagaaccttcacttttctctcccactctttcttttactactctcacacatatctctgtctatatatcactttacataaacgactattccacacacaaacacacatagccatggcctcttctttctcttcacaagccttcttcttgctcacattgtctatggttttaattcctttctctttagctcaagctcccatgatggctccttctggctcaatgtccatgccgcctatgtctagcggcggtggaagctcggttcctcctccagtgatgtctccgatgccaatgatgactccaccacctatgcctatgactccaccacccatgcccatgactccaccacctatgcctatggctccaccaccaatgcccatggcttcaccaccaatgatgccaatgactccatctacaagcccaagcccattaacagttccggatatgccttcgccgccgatgccatccggaatggaatcttcaccttctccaggacccatgccaccggcaatggcggcttcgccggattcaggagctttcaatgttagaaacaacgtcgtaacactttcatgcgttgttggagttgttgcagcccattttctcctcgtttgaaatgattattgaattggtcagcctcgatcgttttcttgtaatttaccttcatttttttccctcaaattattagtggtcatcattttataatatttgagtttgtgtttgatgtacgattcagacatttgtttgcattatgtgcttaataagtttatcgttgactctacttgaagagagactttgtatgtgatgtaaatttcttctatctatggaacattgcattcgtagtc

SEQ ID NO: 5175 - protein, 200 aa, Arabidopsis thaliana
RTFTFLSHSFFYYSHTYLCLYITLHKRLFHTQTHIAMASSFSSQAFFLLTLSMVLIPFSLAQAPMMAPSGSMSMPPMSSGGGSSVPPPVMSPMPMMTPPPMPMTPPPMPMTPPPMPMAPPPMPMASPPMMPMTPSTSPSPLTVPDMPSPPMPSGMESSPSPGPMPPAMAASPDSGAFNVRNNVVTLSCVVGVVAAHFLLV

SEQ ID NO: 5176 - protein, 164 aa, Arabidopsis thaliana
MASSFSSQAFFLLTLSMVLIPFSLAQAPMMAPSGSMSMPPMSSGGGSSVPPPVMSPMPMMTPPPMPMTPPPMPMTPPPMPMAPPPMPMASPPMMPMTPSTSPSPLTVPDMPSPPMPSGMESSPSPGPMPPAMAASPDSGAFNVRNNVVTLSCVVGVVAAHFLLV

SEQ ID NO: 5177 - protein, 148 aa, Arabidopsis thaliana
MVLIPFSLAQAPMMAPSGSMSMPPMSSGGGSSVPPPVMSPMPMMTPPPMPMTPPPMPMTPPPMPMAPPPMPMASPPMMPMTPSTSPSPLTVPDMPSPPMPSGMESSPSPGPMPPAMAASPDSGAFNVRNNVVTLSCVVGVVAAHFLLV

SEQ ID NO: 5178 - DNA, 1561 bp, Arabidopsis thaliana
atttgtttttcctttgaattaaaaaaaaatatcaaaggccgaataaaaaacatcattcggcaagttcatcgatccacgaaaaaaaagaaacgatgaggcttaatggggattcgggtccgggtcaggatgaacccggttcgagcgggtttcacggcggaatcagacgattcccgttagcagctcagccggagattatgagagctgctgagaaagacgatcaatacgcttctttcatccacgaagcttgccgcgatgccttccgacaccttttcggtacaagaatcgctcttgcttaccagaaggagatgaagctacttggacagatgctttactatgttcttacgacaggttcagggcaacaaactttaggagaggaatattgtgacattatacaggttgcagggccttatggactctctcctacaccagctagacgtgctttgttcatattgtaccagaccgcagttccatatatcgcagagagaattagcactcgagctgctacgcaagcagtcacctttgatgagtctgatgagttttttggtgatagtcatatccactcaccaagaatgatagatcttccatcttcatctcaagttgaaacttcaacttctgtagtatctaggttaaacgatagacttatgagatcgtggcaccgagctattcagcgatggcctgtggttcttcctgttgcccgcgaagtcttacaactggttttgcgtgccaatctgatgctcttctactttgaaggtttttattatcatatatcgaaacgtgcatccggggttcgttatgttttcataggaaagcaactgaatcagagacctagataccaaattcttggggttttccttctaatccaattgtgcatccttgctgctgagggcttgcgtcggagtaatttgtcatctatcactagctccattcagcaggcttctataggatcttatcaaacttcaggagggagaggtttacctgttttaaatgaagaggggaatttgataacttcggaagctgaaaagggaaactggtctacctccgattcaacttcaacggaggcagtagggaaatgcactctctgcttaagcacccgtcagcacccaacggccactccttgtggtcatgtgttttgttggagctgcattatggaatggtgcaacgagaagcaagaatgccctctttgtcgaacgcccaatacccattcaagtttggtttgtttgtatcattctgatttttaggcacaatgggatcaacaaagacaggcactgcagaaaggcaaagcagctaagacagtgacacctaaggacagtgcatctgctacaggaatggaatctgcttcggcttcagactttttgagtaagatcaacaagttatgagagaagacagaataaatatatttctgacatcattctcgatcccatgcctacctttttctctatgatatttagtgcagaaaccacagaggtttgttgttttacatttcattaaaaagagttggagatgttaggtggtctttcacattctatattacatataataatctcaattggagatctattac

SEQ ID NO: 5179 - protein, 381 aa, Arabidopsis thaliana
MRLNGDSGPGQDEPGSSGFHGGIRRFPLAAQPEIMRAAEKDDQYASFIHEACRDAFRHLFGTRIALAYQKEMKLLGQMLYYVLTTGSGQQTLGEEYCDIIQVAGPYGLSPTPARRALFILYQTAVPYIAERISTRAATQAVTFDESDEFFGDSHIHSPRMIDLPSSSQVETSTSVVSRLNDRLMRSWHRAIQRWPVVLPVAREVLQLVLRANLMLFYFEGFYYHISKRASGVRYVFIGKQLNQRPRYQILGVFLLIQLCILAAEGLRRSNLSSITSSIQQASIGSYQTSGGRGLPVLNEEGNLITSEAEKGNWSTSDSTSTEAVGKCTLCLSTRQHPTATPCGHVFCWSCIMEWCNEKQECPLCRTPNTHSSLVCLYHSDF

SEQ ID NO: 5180 - protein, 347 aa, Arabidopsis thaliana
MRAAEKDDQYASFIHEACRDAFRHLFGTRIALAYQKEMKLLGQMLYYVLTTGSGQQTLGEEYCDIIQVAGPYGLSPTPARRALFILYQTAVPYIAERISTRAATQAVTFDESDEFFGDSHIHSPRMIDLPSSSQVETSTSVVSRLNDRLMRSWHRAIQRWPVVLPVAREVLQLVLRANLMLFYFEGFYYHISKRASGVRYVFIGKQLNQRPRYQILGVFLLIQLCILAAEGLRRSNLSSITSSIQQASIGSYQTSGGRGLPVLNEEGNLITSEAEKGNWSTSDSTSTEAVGKCTLCLSTRQHPTATPCGHVFCWSCIMEWCNEKQECPLCRTPNTHSSLVCLYHSDF

SEQ ID NO: 5181 - protein, 310 aa, Arabidopsis thaliana
MKLLGQMLYYVLTTGSGQQTLGEEYCDIIQVAGPYGLSPTPARRALFILYQTAVPYIAERISTRAATQAVTFDESDEFFGDSHIHSPRMIDLPSSSQVETSTSVVSRLNDRLMRSWHRAIQRWPVVLPVAREVLQLVLRANLMLFYFEGFYYHISKRASGVRYVFIGKQLNQRPRYQILGVFLLIQLCILAAEGLRRSNLSSITSSIQQASIGSYQTSGGRGLPVLNEEGNLITSEAEKGNWSTSDSTSTEAVGKCTLCLSTRQHPTATPCGHVFCWSCIMEWCNEKQECPLCRTPNTHSSLVCLYHSDF

SEQ ID NO: 5182 - DNA, 961 bp, Arabidopsis thaliana
caagatcgtcaagagacagtaaacctaaaatggcgaactcagacaaaagattattcgagaaggtagctataataaccggaggagcaagagggataggagcggccacggcgagattgttcacagagaatggcgcgtatgtgatagtcgcggatatccttgataatgaaggcatccttgtggcggaatcgatcggtgggtgttacgttcattgtgacgtatcgaaggaggctgatgttgaggcggcagtggagctagcaatgagacgtaaaggtagactagatgtgatgttcaacaatgccgggatgtcgcttaacgaaggtagtatcatggggatggacgtggacatggttaacaaacttgtctcggttaatgtcaatggtgttttgcatggtatcaaacatgccgctaaggccatgatcaaagggggacgaggaggctcgataatatgcacatcgagctcatcagggctaatgggaggacttggaggacatgcgtatacgctctccaaaggaggcatcaacggggtggtgaggacaacggagtgcgagcttgggtctcacggcatccgtgtgaatagcatctctcctcatggagttcccactgacatcttggttaatgcgtaccgtaagttccttaacaatgacaaactcaacgtcgctgaggtcaccgacattattgctgagaaagggagtttgctgaccggaagagccggtactgtggaggacgtagctcaagcagctttgtttcttgcaagccaagaatcgtcggggttcattaccggacataacttggttgttgatggtggttacacatctgccactagtactatgagatttatctacaactagttttcgtttggtggtgtttccttttcaaagttgttctttgaaaaaagaaaaaaaaaaagagtttatcttaattgctaacttgtcaatctttcttaattcggttgaataatccg

SEQ ID NO: 5183 - protein, 281 aa, Arabidopsis thaliana
RSSRDSKPKMANSDKRLFEKVAIITGGARGIGAATARLFTENGAYVIVADILDNEGILVAESIGGCYVHCDVSKEADVEAAVELAMRRKGRLDVMFNNAGMSLNEGSIMGMDVDMVNKLVSVNVNGVLHGIKHAAKAMIKGGRGGSIICTSSSSGLMGGLGGHAYTLSKGGINGVVRTTECELGSHGIRVNSISPHGVPTDILVNAYRKFLNNDKLNVAEVTDIIAEKGSLLTGRAGTVEDVAQAALFLASQESSGFITGHNLVVDGGYTSATSTMRFIYN

SEQ ID NO: 5184 - protein, 272 aa, Arabidopsis thaliana
MANSDKRLFEKVAIITGGARGIGAATARLFTENGAYVIVADILDNEGILVAESIGGCYVHCDVSKEADVEAAVELAMRRKGRLDVMFNNAGMSLNEGSIMGMDVDMVNKLVSVNVNGVLHGIKHAAKAMIKGGRGGSIICTSSSSGLMGGLGGHAYTLSKGGINGVVRTTECELGSHGIRVNSISPHGVPTDILVNAYRKFLNNDKLNVAEVTDIIAEKGSLLTGRAGTVEDVAQAALFLASQESSGFITGHNLVVDGGYTSATSTMRFIYN

SEQ ID NO: 5185 - protein, 196 aa, Arabidopsis thaliana
MRRKGRLDVMFNNAGMSLNEGSIMGMDVDMVNKLVSVNVNGVLHGIKHAAKAMIKGGRGGSIICTSSSSGLMGGLGGHAYTLSKGGINGVVRTTECELGSHGIRVNSISPHGVPTDILVNAYRKFLNNDKLNVAEVTDIIAEKGSLLTGRAGTVEDVAQAALFLASQESSGFITGHNLVVDGGYTSATSTMRFIYN

SEQ ID NO: 5186 - DNA, 1307 bp, Arabidopsis thaliana
gaaaagaaactcaactttttttctttatctttaacatcaaaaaactttttcgatatctttacaaccattaaacaaaaaatttggccactacaagttgaaaaagttttgattatatctaatcgctgaaatggattacaaggtatcaagaagtggggagatagtagaaggagaagtagaagattcagaaaagattgatttaccacctggtttcagatttcacccaactgatgaagaacttataacacactatctaagaccaaaggttgtaaactcttttttctctgctatagctattggtgaagttgatctcaacaaagtcgagccttgggacttgccttggaaggctaagcttggggaaaaagagtggtacttcttttgcgtaagagaccgaaaatacccgactggtttaagaacgaatcgtgctactaaagccggttattggaaagctacagggaaagataaagagatcttcaaagggaaatctcttgttggtatgaagaaaacattggttttctacaaaggaagagctcctaaaggagtaaaaacaaattgggtcatgcatgagtatcgattagaaggcaaattcgctatcgataatctctctaaaaccgctaagaacgaatgtgttattagtcgtgtttttcatacacggactgatggtacgaaggagcatatgtccgttggtttacctccgctgatggattcttctccatatctaaagagtagaggacaagactctttagccgggaccacccttggtgggttgttgtctcacgttacctacttctccgaccaaacaaccgatgacaagagtcttgtggccgattttaaaactaccatgtttggttccggatcgactaactttttaccaaacataggttctctactagacttcgatcctctgtttctacaaaacaattcttcagtactgaagatgttgcttgacaatgaagaaacccaatttaagaagaatcttcacaattcaggttcatcagagagtgaactaacagcgagttcttggcaaggtcacaattcttatggttccactggtccagtgaatcttgattgcgtttggaaattctgaatttggaaaatcgaaaatttggatgttaactagggggtatatagggtttttaaaaacagtgtatatatgcgttatgtgttagctttagattctaggatatacaaagatgacactaatagattcttataacattttgtaaaaaaaaatcattgtagtgaatactctcttgccatttgaaatccattgtgtttgcatatttaaggtgttcataaattgtcatgct

SEQ ID NO: 5187 - protein, 318 aa, Arabidopsis thaliana
MDYKVSRSGEIVEGEVEDSEKIDLPPGFRFHPTDEELITHYLRPKVVNSFFSAIAIGEVDLNKVEPWDLPWKAKLGEKEWYFFCVRDRKYPTGLRTNRATKAGYWKATGKDKEIFKGKSLVGMKKTLVFYKGRAPKGVKTNWVMHEYRLEGKFAIDNLSKTAKNECVISRVFHTRTDGTKEHMSVGLPPLMDSSPYLKSRGQDSLAGTTLGGLLSHVTYFSDQTTDDKSLVADFKTTMFGSGSTNFLPNIGSLLDFDPLFLQNNSSVLKMLLDNEETQFKKNLHNSGSSESELTASSWQGHNSYGSTGPVNLDCVWKF

SEQ ID NO: 5188 - protein, 196 aa, Arabidopsis thaliana
MKKTLVFYKGRAPKGVKTNWVMHEYRLEGKFAIDNLSKTAKNECVISRVFHTRTDGTKEHMSVGLPPLMDSSPYLKSRGQDSLAGTTLGGLLSHVTYFSDQTTDDKSLVADFKTTMFGSGSTNFLPNIGSLLDFDPLFLQNNSSVLKMLLDNEETQFKKNLHNSGSSESELTASSWQGHNSYGSTGPVNLDCVWKF

SEQ ID NO: 5189 - protein, 175 aa, Arabidopsis thaliana
MHEYRLEGKFAIDNLSKTAKNECVISRVFHTRTDGTKEHMSVGLPPLMDSSPYLKSRGQDSLAGTTLGGLLSHVTYFSDQTTDDKSLVADFKTTMFGSGSTNFLPNIGSLLDFDPLFLQNNSSVLKMLLDNEETQFKKNLHNSGSSESELTASSWQGHNSYGSTGPVNLDCVWKF

SEQ ID NO: 5190 - DNA, 903 bp, Arabidopsis thaliana
attcacaaattcagattccaaatttctcaaactctgaaatcgttctttcaaatctctcaatcgggatcaagatgcagatctttgttaagactctcaccggaaagactatcaccctcgaggtggaaagctctgacaccatcgacaacgttaaggccaagatccaggataaggaaggcattcctccggatcagcagaggttgatcttcgctggaaagcagttggaggatggcagaactcttgctgactacaacatccagaaggagtccacacttcatcttgttctcaggctccgtggtggtatgcagatctttgtcaagacgttgactggaaagactatcactttggaggtggagagctctgacactatcgacaatgtcaaagccaagatccaggacaaagagggtatcccaccggaccagcagagattgatcttcgccggaaaacaacttgaagatggtagaactttggctgactacaacattcagaaggagtctacacttcacttggtgttgcgtctccgtggaggtatgcagattttcgtgaagactctcactggaaagaccattactcttgaagttgagggctccgacaccattgacaacgtgaaggctaagatccaggacaaggaaggtatccctccggaccagcagcgtctcatcttcgctggaaaacagcttgaggatggtcgtactttggccgactacaacatccagaaggagtctacccttcacttggtgctaaggctccgtggtggtttctaaaaacttatctctgttatgaatcagaagaagttcatgtctcgtttcatttaaaactttggtggtttgtgttttggggccttgtaaagcccctgatgaataattgttcaactatgtttccgttcctgtgttatacctttctttc

SEQ ID NO: 5191 - protein, 252 aa, Arabidopsis thaliana
SQIQIPNFSNSEIVLSNLSIGIKMQIFVKTLTGKTITLEVESSDTIDNVKAKIQDKEGIPPDQQRLIFAGKQLEDGRTLADYNIQKESTLHLVLRLRGGMQIFVKTLTGKTITLEVESSDTIDNVKAKIQDKEGIPPDQQRLIFAGKQLEDGRTLADYNIQKESTLHLVLRLRGGMQIFVKTLTGKTITLEVEGSDTIDNVKAKIQDKEGIPPDQQRLIFAGKQLEDGRTLADYNIQKESTLHLVLRLRGGF

SEQ ID NO: 5192 - protein, 229 aa, Arabidopsis thaliana
MQIFVKTLTGKTITLEVESSDTIDNVKAKIQDKEGIPPDQQRLIFAGKQLEDGRTLADYNIQKESTLHLVLRLRGGMQIFVKTLTGKTITLEVESSDTIDNVKAKIQDKEGIPPDQQRLIFAGKQLEDGRTLADYNIQKESTLHLVLRLRGGMQIFVKTLTGKTITLEVEGSDTIDNVKAKIQDKEGIPPDQQRLIFAGKQLEDGRTLADYNIQKESTLHLVLRLRGGF

SEQ ID NO: 5193 - protein, 153 aa, Arabidopsis thaliana
MQIFVKTLTGKTITLEVESSDTIDNVKAKIQDKEGIPPDQQRLIFAGKQLEDGRTLADYNIQKESTLHLVLRLRGGMQIFVKTLTGKTITLEVEGSDTIDNVKAKIQDKEGIPPDQQRLIFAGKQLEDGRTLADYNIQKESTLHLVLRLRGGF

SEQ ID NO: 5194 - DNA, 1332 bp, Arabidopsis thaliana
tggaagatcatcacaagcaaagaaaatggagagcgattcagagatggttccgtttcctcaactaccgatgccaatagaaaacaactacagagcttgcacaattccttacagatttccttctgatgatcccaagaaagccactccaaatgaaatctcgtggatcaacgtcttcgccaattccattccttctttcaagaaacgtgcagagagcgatatcactgttccagatgctcctgctagagctgaaaaatttgcagaaagatatgctgggattcttgaagacttgaagaaagatccagagagtcatggcggaccaccagatggcattcttctatgccgacttcgtgagcaagtactcagagagttaggatttagggacatattcaagaaagttaaggatgaggagaatgcaaaggctatatcactatttcctcaagttgtcagtctgagtgatgctattgaagatgacggaaaacggttagagaatttggtgagagggatatttgctggaaacatctttgatcttggttctgcacagcttgctgaagttttctcaagggatggtatgtctttcttggctagctgtcaaaacttggttccacgaccatgggtcattgatgacttggaaaacttccaagccaaatggatcaataagtcttggaagaaggcagtgatttttgttgataattctggtgcagacataattttgggtattttgccgtttgcaagagagttgctccgtcgaggagctcaggtggtgctggctgctaatgagctgccatctatcaatgacataacatgtaccgagcttacagaaatcttgtcacagttgaaggatgaaaatggccaattgctaggtgttgatacttcgaagcttctgattgcaaattcggggaatgacttaccagttatcgatctctcaagagtatcacaggagcttgcttacctttcatctgatgccgacttagtcatcgtagaaggcatgggtcgtggaattgagacaaacctttatgctcagttcaagtgtgattctctcaagattggaatggtgaagcatcttgaagtagcagagtttctcggaggacggctctatgactgtgtcttcaaattcaatgaagttcagagctaattagtatttcagtactctccagtctcacttctctcttactgtcatttttaattcaaaacatagggtacaaaaagtaatatttttccatcttgatatggtaaatcaatttgaaacaaaaatatttattcgtttgtgatggactgatggataaaatggaaaccataactaaaccaactatatacactctaataaagggacttgtt

SEQ ID NO: 5195 - protein, 375 aa, Arabidopsis thaliana
GRSSQAKKMESDSEMVPFPQLPMPIENNYRACTIPYRFPSDDPKKATPNEISWINVFANSIPSFKKRAESDITVPDAPARAEKFAERYAGILEDLKKDPESHGGPPDGILLCRLREQVLRELGFRDIFKKVKDEENAKAISLFPQVVSLSDAIEDDGKRLENLVRGIFAGNIFDLGSAQLAEVFSRDGMSFLASCQNLVPRPWVIDDLENFQAKWINKSWKKAVIFVDNSGADIILGILPFARELLRRGAQVVLAANELPSINDITCTELTEILSQLKDENGQLLGVDTSKLLIANSGNDLPVIDLSRVSQELAYLSSDADLVIVEGMGRGIETNLYAQFKCDSLKIGMVKHLEVAEFLGGRLYDCVFKFNEVQS

SEQ ID NO: 5196 - protein, 367 aa, Arabidopsis thaliana
MESDSEMVPFPQLPMPIENNYRACTIPYRFPSDDPKKATPNEISWINVFANSIPSFKKRAESDITVPDAPARAEKFAERYAGILEDLKKDPESHGGPPDGILLCRLREQVLRELGFRDIFKKVKDEENAKAISLFPQVVSLSDAIEDDGKRLENLVRGIFAGNIFDLGSAQLAEVFSRDGMSFLASCQNLVPRPWVIDDLENFQAKWINKSWKKAVIFVDNSGADIILGILPFARELLRRGAQVVLAANELPSINDITCTELTEILSQLKDENGQLLGVDTSKLLIANSGNDLPVIDLSRVSQELAYLSSDADLVIVEGMGRGIETNLYAQFKCDSLKIGMVKHLEVAEFLGGRLYDCVFKFNEVQS

SEQ ID NO: 5197 - protein, 361 aa, Arabidopsis thaliana
MVPFPQLPMPIENNYRACTIPYRFPSDDPKKATPNEISWINVFANSIPSFKKRAESDITVPDAPARAEKFAERYAGILEDLKKDPESHGGPPDGILLCRLREQVLRELGFRDIFKKVKDEENAKAISLFPQVVSLSDAIEDDGKRLENLVRGIFAGNIFDLGSAQLAEVFSRDGMSFLASCQNLVPRPWVIDDLENFQAKWINKSWKKAVIFVDNSGADIILGILPFARELLRRGAQVVLAANELPSINDITCTELTEILSQLKDENGQLLGVDTSKLLIANSGNDLPVIDLSRVSQELAYLSSDADLVIVEGMGRGIETNLYAQFKCDSLKIGMVKHLEVAEFLGGRLYDCVFKFNEVQS

SEQ ID NO: 5198 - DNA, 1895 bp, Arabidopsis thaliana
aaacaaaacttatctcttcgccttgtctgctttttcatccaaaggtccaattagcctctctcccaaatctctctcctcgccggagatcggctcgattcctccgtcaccaccgcatctaaccggagattttccttccgtcttctctactcacaacgcagagcttcaatttctccctcgcagggattcggatcagttcaatttcaagtttctgaaccactcatggatcaggcggagctgagtatagagcaggtattgaaaagggacattccatgggagacttacatgaacactaagctggtttcagctaaaggtctccagctcttaaggcgctatgataaaaaacctgaaagtgctagggcacagttgctcgatgaagatggtccagcttatgttcatctctttgttagcatcttacgtgatatattcaaggaagaaactgtcgaatatgttttggctttgatttatgaaatgctctcagcaaacccaacacgagctcgattattccatgatgaatctttggcaaatgaggatacttatgagcctttcttgaggttgctttggaagggaaattggttcattcaagaaaaaagctgtaagatccttgcctggataataagtgctaggccaaaagctggtaatgctgttattggtaatggaattgatgatgttctcaaggggtgggtggaatggctttgtgctcagttgaagcaaccttctcatcctactcgtggtgttccaattgcaatcagctgcctgtcgtcactgcttaaggaacctgttgtcagatcgtcatttgttcaggcagatggggtgaagttacttgtccctttaatttccccagcatccactcagcagtctatccagcttctgtatgaaacatgtctctgcatctggcttctgtcctattatgaacctgcaatagagtacttggcaacatcgaggacaatgcaaaggctcacggaagtggttaagcactcgactaaggaaaaggttgtcagggtggtcatattgacattcaggaaccttcttccaaaaggtacatttggtgcccagatggttgatcttggactcccacatattatccacagtctaaaaacacaagcatggagtgacgaggacttgctggatgcactgaaccaactagaagaagggctaaaagacaagatcaagaaattgagttcctttgataaatataagcaagaggtgctccttggccatcttgactggaacccaatgcacaaggagaccaatttctggcgtgagaatgtcacatgctttgaggagaacgacttccagatactcagggtcctcctcacaatcctggacacctcaagtgatcccagatcattggcggtggcatgctttgatatctcacagttcatacaataccatgcagcggggagagtgattgtagcagacctcaaggcaaaagagcgagtgatgaagctgataaaccacgagaacgctgaggtgaccaagaacgctatcttgtgcattcagaggcttctcctgggtgccaagtacgctagcttcttgcaagcttgatgggactcttccctgtttctttcagtataatgaaatgcaaccaaaacacacagattgtgtttccttttttcccctgtccaaaacaaaccgtgctcccaactcctgcatatgcttcttttctttcgattctacacattccaagacacatctgtttattatttatcctggagaatctggctattgtatgcttcaataatttctgggtttgtgttttctgtatttacttattcaataaagagtaaaagagaccttgaagaagaatgctattgttgcagacagacacatttgggccagtttgttgtatgatgcgagagtttcagcttatatggagatgagattacttttgattt

SEQ ID NO: 5199 - protein, 441 aa, Arabidopsis thaliana
MDQAELSIEQVLKRDIPWETYMNTKLVSAKGLQLLRRYDKKPESARAQLLDEDGPAYVHLFVSILRDIFKEETVEYVLALIYEMLSANPTRARLFHDESLANEDTYEPFLRLLWKGNWFIQEKSCKILAWIISARPKAGNAVIGNGIDDVLKGWVEWLCAQLKQPSHPTRGVPIAISCLSSLLKEPVVRSSFVQADGVKLLVPLISPASTQQSIQLLYETCLCIWLLSYYEPAIEYLATSRTMQRLTEVVKHSTKEKVVRVVILTFRNLLPKGTFGAQMVDLGLPHIIHSLKTQAWSDEDLLDALNQLEEGLKDKIKKLSSFDKYKQEVLLGHLDWNPMHKETNFWRENVTCFEENDFQILRVLLTILDTSSDPRSLAVACFDISQFIQYHAAGRVIVADLKAKERVMKLINHENAEVTKNAILCIQRLLLGAKYASFLQA

SEQ ID NO: 5200 - protein, 420 aa, Arabidopsis thaliana
MNTKLVSAKGLQLLRRYDKKPESARAQLLDEDGPAYVHLFVSILRDIFKEETVEYVLALIYEMLSANPTRARLFHDESLANEDTYEPFLRLLWKGNWFIQEKSCKILAWIISARPKAGNAVIGNGIDDVLKGWVEWLCAQLKQPSHPTRGVPIAISCLSSLLKEPVVRSSFVQADGVKLLVPLISPASTQQSIQLLYETCLCIWLLSYYEPAIEYLATSRTMQRLTEVVKHSTKEKVVRVVILTFRNLLPKGTFGAQMVDLGLPHIIHSLKTQAWSDEDLLDALNQLEEGLKDKIKKLSSFDKYKQEVLLGHLDWNPMHKETNFWRENVTCFEENDFQILRVLLTILDTSSDPRSLAVACFDISQFIQYHAAGRVIVADLKAKERVMKLINHENAEVTKNAILCIQRLLLGAKYASFLQA

SEQ ID NO: 5201 - protein, 358 aa, Arabidopsis thaliana
MLSANPTRARLFHDESLANEDTYEPFLRLLWKGNWFIQEKSCKILAWIISARPKAGNAVIGNGIDDVLKGWVEWLCAQLKQPSHPTRGVPIAISCLSSLLKEPVVRSSFVQADGVKLLVPLISPASTQQSIQLLYETCLCIWLLSYYEPAIEYLATSRTMQRLTEVVKHSTKEKVVRVVILTFRNLLPKGTFGAQMVDLGLPHIIHSLKTQAWSDEDLLDALNQLEEGLKDKIKKLSSFDKYKQEVLLGHLDWNPMHKETNFWRENVTCFEENDFQILRVLLTILDTSSDPRSLAVACFDISQFIQYHAAGRVIVADLKAKERVMKLINHENAEVTKNAILCIQRLLLGAKYASFLQA

SEQ ID NO: 5202 - DNA, 1430 bp, Arabidopsis thaliana
gatcatctcattaacaaaaataaaacacacaatctcaagattttctacttcttattacaaagattcaatcttcttgtttcttcttgcaaccatgagtcttcttgcagatcttgttaaccttgacatctcagacaacagtgaaaagatcatcgctgaatacatatgggttggtggttctggtatggacatgagaagcaaagccaggactctccctggacctgtgaccgatccatcaaaacttccaaagtggaactatgatggttcaagcactggtcaagctcctggtcaagacagtgaagtgatcttataccctcaagcaattttcaaagatccattccgtagaggcaacaacatccttgttatgtgtgatgcttacactccagcgggagagccaatccctactaacaagcgacatgctgcggctgagatctttgctaaccctgatgttattgctgaagtgccatggtatggaatcgaacaagaatacactttgttgcagaaggatgtgaactggcctcttggatggcccattggtggcttccctggccctcagggaccatactactgcagtattggagctgacaaatcttttggaagagacattgttgatgctcactacaaagcctctttgtatgctggaatcaacatcagtgggatcaatggagaagtcatgccgggacaatgggagttccaagtcggcccatcggtcggtatctcagctgctgatgaaatatggatcgctcgttacattttggagaggatcacagagattgctggtgtggttgtatcttttgacccaaaacctattcctggtgactggaatggagctggtgctcacaccaattacagtactaaatcaatgagggaagaaggaggatacgagataatcaagaaggcgatcgagaagcttggcttgagacacaaggaacacatttccgcttacggtgaaggaaacgagcgtcgtctcacgggacaccatgaaactgctgacatcaacactttcctttggggtgttgcgaaccgtggtgcatcgatccgagtaggacgtgacaccgagaaagaagggaagggatactttgaggataggaggccagcttcaaacatggacccttacgttgttacttccatgattgcagagactacactcctctggaacccttgaaaggatgatccgtaactcttgaagttgcttctgattgggttttttggaagttccaagcttgtcttttctctacagtgtgtattaagcaattgtaccggttgacactgccggagtttgtgatttggggcctttctttctttttcttctttttataatcttttgggttctgtggttagagcaaattcggtttgctctgtttgtttgacctttattgaaacctttggtattggtactaataatacaatctgaaaaggcctcttcatgttcc

SEQ ID NO: 5203 - protein, 386 aa, Arabidopsis thaliana
IISLTKIKHTISRFSTSYYKDSIFLFLLATMSLLADLVNLDISDNSEKIIAEYIWVGGSGMDMRSKARTLPGPVTDPSKLPKWNYDGSSTGQAPGQDSEVILYPQAIFKDPFRRGNNILVMCDAYTPAGEPIPTNKRHAAAEIFANPDVIAEVPWYGIEQEYTLLQKDVNWPLGWPIGGFPGPQGPYYCSIGADKSFGRDIVDAHYKASLYAGINISGINGEVMPGQWEFQVGPSVGISAADEIWIARYILERITEIAGVVVSFDPKPIPGDWNGAGAHTNYSTKSMREEGGYEIIKKAIEKLGLRHKEHISAYGEGNERRLTGHHETADINTFLWGVANRGASIRVGRDTEKEGKGYFEDRRPASNMDPYVVTSMIAETTLLWNP

SEQ ID NO: 5204 - protein, 356 aa, Arabidopsis thaliana
MSLLADLVNLDISDNSEKIIAEYIWVGGSGMDMRSKARTLPGPVTDPSKLPKWNYDGSSTGQAPGQDSEVILYPQAIFKDPFRRGNNILVMCDAYTPAGEPIPTNKRHAAAEIFANPDVIAEVPWYGIEQEYTLLQKDVNWPLGWPIGGFPGPQGPYYCSIGADKSFGRDIVDAHYKASLYAGINISGINGEVMPGQWEFQVGPSVGISAADEIWIARYILERITEIAGVVVSFDPKPIPGDWNGAGAHTNYSTKSMREEGGYEIIKKAIEKLGLRHKEHISAYGEGNERRLTGHHETADINTFLWGVANRGASIRVGRDTEKEGKGYFEDRRPASNMDPYVVTSMIAETTLLWNP

SEQ ID NO: 5205 - protein, 326 aa, Arabidopsis thaliana
MDMRSKARTLPGPVTDPSKLPKWNYDGSSTGQAPGQDSEVILYPQAIFKDPFRRGNNILVMCDAYTPAGEPIPTNKRHAAAEIFANPDVIAEVPWYGIEQEYTLLQKDVNWPLGWPIGGFPGPQGPYYCSIGADKSFGRDIVDAHYKASLYAGINISGINGEVMPGQWEFQVGPSVGISAADEIWIARYILERITEIAGVVVSFDPKPIPGDWNGAGAHTNYSTKSMREEGGYEIIKKAIEKLGLRHKEHISAYGEGNERRLTGHHETADINTFLWGVANRGASIRVGRDTEKEGKGYFEDRRPASNMDPYVVTSMIAETTLLWNP

SEQ ID NO: 5206 - DNA, 1479 bp, Arabidopsis thaliana
tgatagacaaaagtttatgttttgtttttcctctaacacaaaaaacaatctcagatattaaataaagtgttaatcaaccggagaactctccgacaaaacctcgccgacgattttccgacgatgaaagatgggctttttcgggagactgttcgggagtaaaaaaaagtctgataaagctgcttcgtcgagagataaacggaggtggagcttcaccaccagatcttcaaattccagcaagagagctccggcggtgacgtcggcttcggtggttgagcaaaatggtttggatgctgacaaacatgcgatagctgtggctgctgcgacagccgcggtggcggaagcagctcttactgctgctcatgcggcagctgaagtcgtgagactaacaagcggaaacggcgggagaaacgtcggtggcggtggaaactcgtcggtgtttcaaataggaagaagtaaccgtcggtgggctcaggagaatatcgcggcgatgaagattcaatccgcttttcgtggttatctggcgaggagagcattacgagcactaaaggcattagtgaagcttcaagcattagtgagaggacacatagtgagaaaacaaactgcagatatgcttagaaggatgcagactcttgttcgtcttcaatctcaagctcgtgctcgagcctctcgttcttctcactcctctgcttctttccactcctccaccgctcttttgttcccatcttcctcgtcttctccacgttctcttcacacgcgctgcgtttcaaacgctgaagtcagctctcttgaccaccgtggaggctctaagcggttagattggcaggcggaggaaagcgaaaatggagacaagatcctagaagtggatacttggaagcctcattatcatcccaaaccgttacgttcagagagaaacaatgagtctccgaggaaacgacaacaatctttgttgggtccgagaagtacagagaatagtcctcaagttggttctagtgggtcaagaagaagaactccttttacgccgacgtcaagaagcgagtattcttggggatgtaataactattactactcgggttatcacccgaattacatggctaacactgagtcttataaagctaaagttcggtcacaaagtgcgccgaaacagagagttgaggtctctaatgagaccagtggctacaagagatctgttcagggacagtattactactacacagcggtagaagaagagagtttggatgttggaagcgctggttactacggaggaggaggaggcgattctgatcgattgaatcggaaccaaagtgcgaaatcgaggatgcattcttcgtttcttgtttagattgtgattctctttctcttctttttttttggtttgagtttggtaattttccagaagagataagtattaacactggatgtgtaaattgttgttaacaagtttcgattgcttgcaaaagaaggaacaccactctgttctcc

SEQ ID NO: 5207 - protein, 403 aa, Arabidopsis thaliana
MGFFGRLFGSKKKSDKAASSRDKRRWSFTTRSSNSSKRAPAVTSASVVEQNGLDADKHAIAVAAATAAVAEAALTAAHAAAEVVRLTSGNGGRNVGGGGNSSVFQIGRSNRRWAQENIAAMKIQSAFRGYLARRALRALKALVKLQALVRGHIVRKQTADMLRRMQTLVRLQSQARARASRSSHSSASFHSSTALLFPSSSSSPRSLHTRCVSNAEVSSLDHRGGSKRLDWQAEESENGDKILEVDTWKPHYHPKPLRSERNNESPRKRQQSLLGPRSTENSPQVGSSGSRRRTPFTPTSRSEYSWGCNNYYYSGYHPNYMANTESYKAKVRSQSAPKQRVEVSNETSGYKRSVQGQYYYYTAVEEESLDVGSAGYYGGGGGDSDRLNRNQSAKSRMHSSFLV

SEQ ID NO: 5208 - protein, 283 aa, Arabidopsis thaliana
MKIQSAFRGYLARRALRALKALVKLQALVRGHIVRKQTADMLRRMQTLVRLQSQARARASRSSHSSASFHSSTALLFPSSSSSPRSLHTRCVSNAEVSSLDHRGGSKRLDWQAEESENGDKILEVDTWKPHYHPKPLRSERNNESPRKRQQSLLGPRSTENSPQVGSSGSRRRTPFTPTSRSEYSWGCNNYYYSGYHPNYMANTESYKAKVRSQSAPKQRVEVSNETSGYKRSVQGQYYYYTAVEEESLDVGSAGYYGGGGGDSDRLNRNQSAKSRMHSSFLV

SEQ ID NO: 5209 - protein, 243 aa, Arabidopsis thaliana
MLRRMQTLVRLQSQARARASRSSHSSASFHSSTALLFPSSSSSPRSLHTRCVSNAEVSSLDHRGGSKRLDWQAEESENGDKILEVDTWKPHYHPKPLRSERNNESPRKRQQSLLGPRSTENSPQVGSSGSRRRTPFTPTSRSEYSWGCNNYYYSGYHPNYMANTESYKAKVRSQSAPKQRVEVSNETSGYKRSVQGQYYYYTAVEEESLDVGSAGYYGGGGGDSDRLNRNQSAKSRMHSSFLV

SEQ ID NO: 5210 - DNA, 1402 bp, Arabidopsis thaliana
acaataaaaacaatttcaacgtttcgttttcctgtacctcttttaagaataaaaaaaaaaaaaagaaatgggaaaaatttcattagcgatatgtctaacgttgcttgtcacattaagcactgtttatgaaacacaagggacgttctcattacccctttacttgaaaaatttccccaaactgggcaaagactatgaggctttcgcaaacaaaggtatatcggactttttgggtgacctagagggtatgtgtcctaaaaccgcagagttcaaggatttctttgaaaacttgaaggattacatggccttcttcaattcagcagcacccgggtcaaaagacaaccagttcgagatgttcgtaaaatctgaaaagctgttcaaggctttgtctgctttcaacagtagtaaaggcggaacatcagaggattcgtggaagctggtggatggattgttgtcaatgggtaaaggtttggttgagatgaagaagagcggttcgaaggagataacttttgaagagagaagagatctgatcagttctatggtgaaatgggctagagccatcggtctattcgtgaaggcggcctctgaagataaaggacagtctattgatctggcatcttttgggattgactatgacaacaatgtagaatcccctttttcaaaaagagctatgtatgaaacacaaggaacgttctcattacctcattacgtgaagaatacccccaaaatgggcaaagccattgagcctttcgcttacaaaggtatgtcggacttcttgggtagcctagagagcaagtgtcctgcgacaccagagttcaaagatttctttgtaaagttggaggactatatggcctgcttcaagttggtatcacccgaatcaaaattcgagatggcagtgaaatcggataagctcttcacggctatgatttcattggatggtactaaaggcggatcagtggattcgtggaggatgcttgatggtatgttgtcaatgggaaaagttttggttgatatcaagaagagcggttccaaggagataacttttgaacagagaagagatctgatcagctctatggtgaaatgggctagagctatcggcctattcgtgaaggcggcctctgagcgtaaaggaaaatctattgatctagcaccttttggaattgattatgaaaacaatgtcggaaatggaaaaggtaactttagaaccggccctgttctcatagacgacggcagcgagctctaatcttccaacgaaaaaggctcccaagtaaacaagaaatatgtaacaatatatggagacagccctgctttgttaaacagcagcgtgctgtagaacatttttggttattgtaaaaactatattaatcatattactaaaataaaattattacaaatcttaactcgc

SEQ ID NO: 5211 - protein, 390 aa, Arabidopsis thaliana
MGKISLAICLTLLVTLSTVYETQGTFSLPLYLKNFPKLGKDYEAFANKGISDFLGDLEGMCPKTAEFKDFFENLKDYMAFFNSAAPGSKDNQFEMFVKSEKLFKALSAFNSSKGGTSEDSWKLVDGLLSMGKGLVEMKKSGSKEITFEERRDLISSMVKWARAIGLFVKAASEDKGQSIDLASFGIDYDNNVESPFSKRAMYETQGTFSLPHYVKNTPKMGKAIEPFAYKGMSDFLGSLESKCPATPEFKDFFVKLEDYMACFKLVSPESKFEMAVKSDKLFTAMISLDGTKGGSVDSWRMLDGMLSMGKVLVDIKKSGSKEITFEQRRDLISSMVKWARAIGLFVKAASERKGKSIDLAPFGIDYENNVGNGKGNFRTGPVLIDDGSEL

SEQ ID NO: 5212 - protein, 331 aa, Arabidopsis thaliana
MCPKTAEFKDFFENLKDYMAFFNSAAPGSKDNQFEMFVKSEKLFKALSAFNSSKGGTSEDSWKLVDGLLSMGKGLVEMKKSGSKEITFEERRDLISSMVKWARAIGLFVKAASEDKGQSIDLASFGIDYDNNVESPFSKRAMYETQGTFSLPHYVKNTPKMGKAIEPFAYKGMSDFLGSLESKCPATPEFKDFFVKLEDYMACFKLVSPESKFEMAVKSDKLFTAMISLDGTKGGSVDSWRMLDGMLSMGKVLVDIKKSGSKEITFEQRRDLISSMVKWARAIGLFVKAASERKGKSIDLAPFGIDYENNVGNGKGNFRTGPVLIDDGSEL

SEQ ID NO: 5213 - protein, 313 aa, Arabidopsis thaliana
MAFFNSAAPGSKDNQFEMFVKSEKLFKALSAFNSSKGGTSEDSWKLVDGLLSMGKGLVEMKKSGSKEITFEERRDLISSMVKWARAIGLFVKAASEDKGQSIDLASFGIDYDNNVESPFSKRAMYETQGTFSLPHYVKNTPKMGKAIEPFAYKGMSDFLGSLESKCPATPEFKDFFVKLEDYMACFKLVSPESKFEMAVKSDKLFTAMISLDGTKGGSVDSWRMLDGMLSMGKVLVDIKKSGSKEITFEQRRDLISSMVKWARAIGLFVKAASERKGKSIDLAPFGIDYENNVGNGKGNFRTGPVLIDDGSEL

SEQ ID NO: 5214 - DNA, 1336 bp, Arabidopsis thaliana
gctcagaaacatttctgtctctgtggagacagctgaagaagcagcagcactatcaatggcgtctctgagattgttctcaacgaatcatcaatctcttctccttccatcatctctctcacaaaagcctctaatatcttcaccaagattcgtcaataaccctagcagacggagtccaatacgatccgttcttcaatttaatcgcaaaccggaactcgccggagaaacgccgcgtatcgtcgttatcacctccggaaaaggcggtgttggaaagacgacaaccaccgcaaatgtcggtctctctctcgctcgttacggtttctcagttgtcgccattgacgccgaccttggtctccgtaacctcgatctcctcctagggttagagaatcgagtcaattacacttgcgtcgaggttataaacggagattgtcgtctcgatcaagctctggtacgtgataagcgttggtcgaatttcgaattgctatgtatatctaaacctagatcgaaacttccgatgggatttggtggtaaagcattggaatggcttgtggatgcgttgaaaactagaccggaaggttcaccggatttcatcatcatcgattgtcctgcaggaatcgatgccggattcataaccgccattactccggcgaatgaagcagttctggtaacaactccggatataacagcgttaagggatgctgatagggttacgggtttgttagaatgcgatggaatcagagatataaagatgattgtgaacagagtgagaactgatatgattaaaggagaggatatgatgtcagtgttagatgtgcaggagatgttgggattgtcattgcttggtgtaattcctgaagattctgaggttattcgaagcacgaatcgagggtttccgcttgttctgaataagcctcctacgcttgcgggattggcgtttgagcaggcggcttggagactcgttgagcaagatagtatgaaggctgttatggtggaggaagaacctaagaaacgtggcttcttctctttctttggcggctaaatggcaaacggatcgaacggtactgaactgaactgaaacttcttcctcgggtatgtatgcattgaaatcttttgtacaggagctagagatttttgaagattttgtctcttttgctttgagaatttagatttgttcctaggacaatgtggaattctactgctagtttgttgctgagttcaagctctgattcttatgccttttgttcttgaggttcttgatttctgtttctgtaatctgtttatgttaaaattgagagtttccaatatatctcaagttcttatgtcaaatcgttatgatgag

SEQ ID NO: 5215 - protein, 344 aa, Arabidopsis thaliana
LRNISVSVETAEEAAALSMASLRLFSTNHQSLLLPSSLSQKPLISSPRFVNNPSRRSPIRSVLQFNRKPELAGETPRIVVITSGKGGVGKTTTTANVGLSLARYGFSVVAIDADLGLRNLDLLLGLENRVNYTCVEVINGDCRLDQALVRDKRWSNFELLCISKPRSKLPMGFGGKALEWLVDALKTRPEGSPDFIIIDCPAGIDAGFITAITPANEAVLVTTPDITALRDADRVTGLLECDGIRDIKMIVNRVRTDMIKGEDMMSVLDVQEMLGLSLLGVIPEDSEVIRSTNRGFPLVLNKPPTLAGLAFEQAAWRLVEQDSMKAVMVEEEPKKRGFFSFFGG

SEQ ID NO: 5216 - protein, 326 aa, Arabidopsis thaliana
MASLRLFSTNHQSLLLPSSLSQKPLISSPRFVNNPSRRSPIRSVLQFNRKPELAGETPRIVVITSGKGGVGKTTTTANVGLSLARYGFSVVAIDADLGLRNLDLLLGLENRVNYTCVEVINGDCRLDQALVRDKRWSNFELLCISKPRSKLPMGFGGKALEWLVDALKTRPEGSPDFIIIDCPAGIDAGFITAITPANEAVLVTTPDITALRDADRVTGLLECDGIRDIKMIVNRVRTDMIKGEDMMSVLDVQEMLGLSLLGVIPEDSEVIRSTNRGFPLVLNKPPTLAGLAFEQAAWRLVEQDSMKAVMVEEEPKKRGFFSFFGG

SEQ ID NO: 5217 - protein, 174 aa, Arabidopsis thaliana
MGFGGKALEWLVDALKTRPEGSPDFIIIDCPAGIDAGFITAITPANEAVLVTTPDITALRDADRVTGLLECDGIRDIKMIVNRVRTDMIKGEDMMSVLDVQEMLGLSLLGVIPEDSEVIRSTNRGFPLVLNKPPTLAGLAFEQAAWRLVEQDSMKAVMVEEEPKKRGFFSFFGG

SEQ ID NO: 5218 - DNA, 1261 bp, Arabidopsis thaliana
aataacaagaagtgagtctccggtctgaaactaattaaggagacggcaagagaaacaagacatacgtttgctgtcccacgttgatcttgttgtttactctctctctctcctccatcggcgacgaccaccggagatcagcgtcaccgtaccaaaacatcatttaccttcttttagatttgttgttttttaatcagttgaatcggaataaaatatcgcatcagagatgagtaacgagcttctcaccatcgatcctgtcgaccttcaattcccttttgaattgaagaagcagatctcttgttctctctatttgggtaacaagaccgataattatgtcgccttcaaggttaagacgacgaatccaaagaagtactgcgttaggcctaatactggtgttgttcatcccagatcctcttctgaagttttagtgaccatgcaagctcaaaaggaagctcctgctgatctgcagtgtaaagataagttcttgcttcaatgtgtagtcgctagtcccggagccacccccaaggatgttacacatgagatgtttagcaaagaggcagggcatcgagttgaagagactaaattgagagttgtctatgttgctccaccacgaccaccatcaccggttcgagaaggatctgaagagggctcttcaccgagggcttctgtctctgataatgggaatgcttctgattttactgctgctccaagatttagcgcagacagggttgatgctcaggataattcatctgaggcaagagctctggtcacaaaactcaccgaggaaaagaactctgcggttcaactgaacaacaggcttcaacaagaattggaccagttgaggcgcgaaagcaagagaagtaagagtggtggaatccctttcatgtacgttcttctggtcggcctaatcggtttaatcctgggatacattatgaagaggacatgatcagatcccttcaacaaaatactccaaaagtctcaaagtgcttaaaaaagcattgaaaaggaaagaaatcaaattgtgtgaggaggacaatcttctcttctgccttatcgtcgtcatgcacctttggttaaaatctgaacttagtgcgttagaggatttgtattacggtttccataagacttagaattgtcacaaaatctcctttttcctctctcttattacaactttgtgtagtcttaaacacttttgtttcttcgtcttctctcatcttaactttttctctccatctctcatagaataaagggatgaaacatgtcg

SEQ ID NO: 5219 - protein, 239 aa, Arabidopsis thaliana
MSNELLTIDPVDLQFPFELKKQISCSLYLGNKTDNYVAFKVKTTNPKKYCVRPNTGVVHPRSSSEVLVTMQAQKEAPADLQCKDKFLLQCVVASPGATPKDVTHEMFSKEAGHRVEETKLRVVYVAPPRPPSPVREGSEEGSSPRASVSDNGNASDFTAAPRFSADRVDAQDNSSEARALVTKLTEEKNSAVQLNNRLQQELDQLRRESKRSKSGGIPFMYVLLVGLIGLILGYIMKRT

SEQ ID NO: 5220 - protein, 170 aa, Arabidopsis thaliana
MQAQKEAPADLQCKDKFLLQCVVASPGATPKDVTHEMFSKEAGHRVEETKLRVVYVAPPRPPSPVREGSEEGSSPRASVSDNGNASDFTAAPRFSADRVDAQDNSSEARALVTKLTEEKNSAVQLNNRLQQELDQLRRESKRSKSGGIPFMYVLLVGLIGLILGYIMKRT

SEQ ID NO: 5221 - protein, 134 aa, Arabidopsis thaliana
MFSKEAGHRVEETKLRVVYVAPPRPPSPVREGSEEGSSPRASVSDNGNASDFTAAPRFSADRVDAQDNSSEARALVTKLTEEKNSAVQLNNRLQQELDQLRRESKRSKSGGIPFMYVLLVGLIGLILGYIMKRT

SEQ ID NO: 5222 - DNA, 1254 bp, Arabidopsis thaliana
gttttttagtttctccttctctctgcagaaaccgtaattaaaaaccccccacaacttcttcaacataacgtcttcttcttccatctttcgttgcattcacgtttttaaaggttctctgaatcactccattaaaaatagctttgaacaagttttctcaatagtcaacaaaaacaatggccgttgaagctcaccatctaaatcctctgttctcttccaacagagaaatgattcatcccgttgaagcaagcggtgtagtctataacacccagatgagatacggcaccgttccgacgtttaaccccaccgtggaatgtcaaacttctctgtttaacccaatctacaacatctcaccagtcgatcgtttggttcatcaatccatgaaaccaacgatacagtccgttgatagttctctcacattcaacagcgacaacaacgtcgattttcttcgtcctgtgtcgtcgagaaaacgttctagagaagaatccgttgttctaaacccttccgcttatatgcaaattcagaaaaatcccaccgatcctcttatgttccttggccaagacttgtcttctaacgttcaacaacatcatttcgatatcgatcgtttgatctctaatcacgttgagagaatgagaatggagattgaagagaagagaaaaacacaagggagaaggatagtggaagccgtcgaacaaggtttgatgaagacactaagagccaaagacgatgagataaatcacatcgggaaactaaacctctttctcgaagagaaggttaagtctttgtgcgtagagaatcagatatggcgtgacgtggcacagtctaatgaagccaccgtaaacgccctacgttctaacttgcaacaagttctcgcagccgtggagcgtaaccggtgggaggagccgcccacggtggctgacgacgcacagtcttgttgcggtagcaacgacgaaggtgatagcgaggaagaacggtggaagttagcgggagaggcgcaggatacgaaaaagatgtgtagggtagggatgagtatgtgtagaagctgtgggaaaggagaagcaagtgtgttactgttaccgtgcagacacatgtgtctatgttctgtgtgtggctcttcactcaacacttgtcctatatgtaaatctccaaagaccgctagtctacatgttaatctttcctcttagacctaaccaataccagtaaaatgtaaatgcccccaaaaaaagtaaatagtagacaaaagtttcttggttaaag

SEQ ID NO: 5223 - protein, 335 aa, Arabidopsis thaliana
MAVEAHHLNPLFSSNREMIHPVEASGVVYNTQMRYGTVPTFNPTVECQTSLFNPIYNISPVDRLVHQSMKPTIQSVDSSLTFNSDNNVDFLRPVSSRKRSREESVVLNPSAYMQIQKNPTDPLMFLGQDLSSNVQQHHFDIDRLISNHVERMRMEIEEKRKTQGRRIVEAVEQGLMKTLRAKDDEINHIGKLNLFLEEKVKSLCVENQIWRDVAQSNEATVNALRSNLQQVLAAVERNRWEEPPTVADDAQSCCGSNDEGDSEEERWKLAGEAQDTKKMCRVGMSMCRSCGKGEASVLLLPCRHMCLCSVCGSSLNTCPICKSPKTASLHVNLSS

SEQ ID NO: 5224 - protein, 318 aa, Arabidopsis thaliana
MIHPVEASGVVYNTQMRYGTVPTFNPTVECQTSLFNPIYNISPVDRLVHQSMKPTIQSVDSSLTFNSDNNVDFLRPVSSRKRSREESVVLNPSAYMQIQKNPTDPLMFLGQDLSSNVQQHHFDIDRLISNHVERMRMEIEEKRKTQGRRIVEAVEQGLMKTLRAKDDEINHIGKLNLFLEEKVKSLCVENQIWRDVAQSNEATVNALRSNLQQVLAAVERNRWEEPPTVADDAQSCCGSNDEGDSEEERWKLAGEAQDTKKMCRVGMSMCRSCGKGEASVLLLPCRHMCLCSVCGSSLNTCPICKSPKTASLHVNLSS

SEQ ID NO: 5225 - protein, 303 aa, Arabidopsis thaliana
MRYGTVPTFNPTVECQTSLFNPIYNISPVDRLVHQSMKPTIQSVDSSLTFNSDNNVDFLRPVSSRKRSREESVVLNPSAYMQIQKNPTDPLMFLGQDLSSNVQQHHFDIDRLISNHVERMRMEIEEKRKTQGRRIVEAVEQGLMKTLRAKDDEINHIGKLNLFLEEKVKSLCVENQIWRDVAQSNEATVNALRSNLQQVLAAVERNRWEEPPTVADDAQSCCGSNDEGDSEEERWKLAGEAQDTKKMCRVGMSMCRSCGKGEASVLLLPCRHMCLCSVCGSSLNTCPICKSPKTASLHVNLSS

SEQ ID NO: 5226 - DNA, 1255 bp, Arabidopsis thaliana
agcttccttttttcgctctcgtctccgtttacccttttgggatttttccctaaacctttttctctctttgtataatcaaatcctctttatctttcattgtttcgcgtgaattagctctgcaaaggctcttcattcttctcgcttggattcctctgcacaaaagaaaaaagaccatggatgatcttcatggaagaaatggtcgaatgcacattggtgtagcgcaaaatccaatgcatgtgcagtatgaagatcacggtttgcaccatatcgacaatgaaaacagtatgatggatgaccatgctgatggtgggatggatgaaggagtggagacagacattccttctcaccctggaaactcagctgataatcgtggtgaagttgtagaccgtggaattgaaaatggagatcaattgacattgtccttccagggacaagtttatgtttttgaccgtgtctcgcctgagaaggttcaagctgtgcttttgttacttggtggaagggaagtaccacatacactcccaacaaccctaggatcacctcatcagaacaataggggtctatctggtactcctcaacggcttagcgttccgcagcggttagcttctttgctcaggtttagggagaaacgaaaagggaggaactttgataagactattcgctatacagtcaggaaagaagtagccttgagaatgcagcgtaagaaaggtcagttcacgtcggctaaatcaagcaatgatgattctggatccactggatcggattgggggtcaaaccagagctgggccgtagaagggactgagactcagaagccagaggttttatgtcgacactgtggaacaagtgagaagtcaactccaatgatgcgacgtggacctgatgggccaagaacactttgtaatgcgtgtggactgatgtgggcaaacaaggggactcttagagacctatccaaagtccctcctccgcaaacacctcagcatctatctctgaataagaatgaggacgcaaatcttgaggctgatcaaatgatggaagtaactggtgacattagcaacacacagtgagaactgagaaaccattggaagcaagaaaggatctcaaacaaaaacagttgttatcatttcatttgatgatggaatcgaatctgagttgtgtttagggtttctctgggttaatctcagtctatgtgggcacattttagtcttctacaaattataagacactcttcacttatttagaagctcactcatcagaaaag

SEQ ID NO: 5227 - protein, 295 aa, Arabidopsis thaliana
MDDLHGRNGRMHIGVAQNPMHVQYEDHGLHHIDNENSMMDDHADGGMDEGVETDIPSHPGNSADNRGEVVDRGIENGDQLTLSFQGQVYVFDRVSPEKVQAVLLLLGGREVPHTLPTTLGSPHQNNRGLSGTPQRLSVPQRLASLLRFREKRKGRNFDKTIRYTVRKEVALRMQRKKGQFTSAKSSNDDSGSTGSDWGSNQSWAVEGTETQKPEVLCRHCGTSEKSTPMMRRGPDGPRTLCNACGLMWANKGTLRDLSKVPPPQTPQHLSLNKNEDANLEADQMMEVTGDISNTQ

SEQ ID NO: 5228 - protein, 285 aa, Arabidopsis thaliana
MHIGVAQNPMHVQYEDHGLHHIDNENSMMDDHADGGMDEGVETDIPSHPGNSADNRGEVVDRGIENGDQLTLSFQGQVYVFDRVSPEKVQAVLLLLGGREVPHTLPTTLGSPHQNNRGLSGTPQRLSVPQRLASLLRFREKRKGRNFDKTIRYTVRKEVALRMQRKKGQFTSAKSSNDDSGSTGSDWGSNQSWAVEGTETQKPEVLCRHCGTSEKSTPMMRRGPDGPRTLCNACGLMWANKGTLRDLSKVPPPQTPQHLSLNKNEDANLEADQMMEVTGDISNTQ

SEQ ID NO: 5229 - protein, 276 aa, Arabidopsis thaliana
MHVQYEDHGLHHIDNENSMMDDHADGGMDEGVETDIPSHPGNSADNRGEVVDRGIENGDQLTLSFQGQVYVFDRVSPEKVQAVLLLLGGREVPHTLPTTLGSPHQNNRGLSGTPQRLSVPQRLASLLRFREKRKGRNFDKTIRYTVRKEVALRMQRKKGQFTSAKSSNDDSGSTGSDWGSNQSWAVEGTETQKPEVLCRHCGTSEKSTPMMRRGPDGPRTLCNACGLMWANKGTLRDLSKVPPPQTPQHLSLNKNEDANLEADQMMEVTGDISNTQ

SEQ ID NO: 5230 - DNA, 2108 bp, Arabidopsis thaliana
acccccccccactccccccctcgcatcccgcgcacacccaccgaaacaggaccgcgcccggccgcgcgcccccgccctccctcactcacccataccgtgctccctcactcactcatcaaataacccgtgctcacacacacgctacccccgcacccaaccaacctatcaatcgacacacgcaagaccagcatgcaaacagcacaacaagctgccctgtctcactcccaaccccgcgagcgaactatctcacctccgggcggatcaaaagcgcgaactccctcgcaatcttatccacatctaactcccgaagacgcaagcacccgaatccaagaattagagaatataacaatgaaccaccacactacaattaatcccccccccccccccccgacaactaatcataggcttctccatcttcttgtctgcaggatgatgcaatttttcagacaattttcttccaaaatcttttcgtaattctgttttatttttcaacgttttaggtttttaccaatccgccgtagttatatccaacattaatttttttccctcttctcagaaaaaaataaaattcaactcatctctagagtttttaggttcttccaagaaattgaatttggaaggaggctttgatgggtttgaattttccataatcgtcccttgtttacgactcttgttgtttgaaaatgctatggctcgtgaggggatgttgttttgattttgggaaagtcttgtttgaatggtcacggcttttctgaacattcgcgtgttctttcttgtctcggctctgcttcgaaatgtctctcggccaagaaaatgttgatcctgttgaagtttcagggtcgcatgcttgcttatatgaacttttatgttctgagacacccaaatggactcctcttagggttgaagatttgcaaacatcttcttctgatcccagagatcggttggagaagttgctgaagcaacctgggaataaatattgtgctgactgtggctctcctgaaccaaaatgggtatcgttgagtcttggtgtatttatctgcattaagtgttctggtgtacacagaagtcttggagttcatatatcaaaggttctatcagtaaagctagacgagtggacagatgatcaggttgacatgcttgtaggttacggtggaaacacggcagtgaacgaaagattcgaagcttgcaacatcgaccagtcaaagaaaccaaaaccagattctactaatgaggaacgaaatgatttcattagaaaaaaatatgagcagcaccagtttatggatccaaaggatggtgctttgtgcacttatcagcagcctagcagaacaaacacttcaccaccgtctttatgttctgcaagccaccgttctacaaaaaaccgtattggtcatgcatttaggaatagctggggaagaagagaatctgatcacaaaggaccaaagaagagcaattccatggcaggtatggttgagtttgtggggttgattaaggttaacgtggtaaaaggaaccaaccttgcggttcgagacgtgatgaccagcgatccttatgttatccttgctcttggccaacaatcggtaaaaacacgggtgataaagaacaacttgaatcctgtgtggaatgagacgctaatgctttcgatacccgagcccatgcctcctctcaaagtgctagtgtacgacaaggatacattctcgacagatgatttcatgggagaggcagagatagacatacaaccattggtgagtgcagcaaaagcatacgagacatcgagcataaaggaaccgatgcagctgggaagttgggtggcgagcaaagagaacacattggtgagtgatggcataatcttacttgaagacgggaaagtgaaacaagacatttcacttaggctacaaaatgttgaaagaggtgttcttgagatccagcttgaatgtcttcctctcactcaatgatgatactttcttcttcatccctcttctttttttttttctttaaaagatttatttctaaatttatagtgaagaaaagatgctgctactttcttgttgttccacctcaaacaaaacctctgtaaaaaaacaacaccatgatttgatttgatgattctt

SEQ ID NO: 5231 - protein, 385 aa, Arabidopsis thaliana
MSLGQENVDPVEVSGSHACLYELLCSETPKWTPLRVEDLQTSSSDPRDRLEKLLKQPGNKYCADCGSPEPKWVSLSLGVFICIKCSGVHRSLGVHISKVLSVKLDEWTDDQVDMLVGYGGNTAVNERFEACNIDQSKKPKPDSTNEERNDFIRKKYEQHQFMDPKDGALCTYQQPSRTNTSPPSLCSASHRSTKNRIGHAFRNSWGRRESDHKGPKKSNSMAGMVEFVGLIKVNVVKGTNLAVRDVMTSDPYVILALGQQSVKTRVIKNNLNPVWNETLMLSIPEPMPPLKVLVYDKDTFSTDDFMGEAEIDIQPLVSAAKAYETSSIKEPMQLGSWVASKENTLVSDGIILLEDGKVKQDISLRLQNVERGVLEIQLECLPLTQ

SEQ ID NO: 5232 - protein, 272 aa, Arabidopsis thaliana
MLVGYGGNTAVNERFEACNIDQSKKPKPDSTNEERNDFIRKKYEQHQFMDPKDGALCTYQQPSRTNTSPPSLCSASHRSTKNRIGHAFRNSWGRRESDHKGPKKSNSMAGMVEFVGLIKVNVVKGTNLAVRDVMTSDPYVILALGQQSVKTRVIKNNLNPVWNETLMLSIPEPMPPLKVLVYDKDTFSTDDFMGEAEIDIQPLVSAAKAYETSSIKEPMQLGSWVASKENTLVSDGIILLEDGKVKQDISLRLQNVERGVLEIQLECLPLTQ

SEQ ID NO: 5233 - protein, 224 aa, Arabidopsis thaliana
MDPKDGALCTYQQPSRTNTSPPSLCSASHRSTKNRIGHAFRNSWGRRESDHKGPKKSNSMAGMVEFVGLIKVNVVKGTNLAVRDVMTSDPYVILALGQQSVKTRVIKNNLNPVWNETLMLSIPEPMPPLKVLVYDKDTFSTDDFMGEAEIDIQPLVSAAKAYETSSIKEPMQLGSWVASKENTLVSDGIILLEDGKVKQDISLRLQNVERGVLEIQLECLPLTQ

SEQ ID NO: 5234 - DNA, 1283 bp, Arabidopsis thaliana
tgacaaccactttttatatgatataccgcttttaccccttaagcctctccgcgtaaaaccgagaacaaaatcttaagcaccgttgttccgattcagagatcatcgtcgtcgtcgttcagaaaccttcaaaaatggctggaaaactcatgcacgctcttcagtacaactcttacggtggtggcgccgccggattagagcatgttcaagttccggttccaacaccaaagagtaatgaggtttgcctgaaattagaagctactagtctaaaccctgttgattggaaaattcagaaaggaatgatccgcccatttctgccccgcaagttcccctgcattccagctactgatgttgctggagaggtcgttgaggttggatcaggagtaaaaaattttaaggctggtgacaaagttgtagcggttcttagccatctaggtggaggtggacttgctgagttcgctgttgcaaccgagaagctgactgtcaaaagacctcaagaagtgggagcagctgaagcagcagctttacctgtggcgggtctaaccgctctccaagctcttactaatcctgcggggttgaagctggatggtacaggcaagaaggcgaacatcctggtcacagcagcatctggtggggttggtcactatgcagtccagctggcaaaacttgcaaatgctcacgtaaccgctacatgtggtgcccggaacatagagtttgtcaaatcgttgggagcggatgaggttctcgactacaagactcccgagggagccgccctcaagagtccgtcgggtaaaaaatatgacgctgtggtccattgtgcaaacgggattccattttcggtattcgaaccaaatttgtcggaaaacgggaaggtgatagacatcacaccggggcctaatgcaatgtggacttatgcggttaagaaaataaccatgtcaaagaagcagttagtgccactcttgttgatcccaaaagctgagaatttggagtttatggtgaatctagtgaaagaagggaaagtgaagacagtgattgactcaaagcatcctttgagcaaagcggaggatgcttgggccaaaagtatcgatggtcatgctactgggaagatcattgtcgagccataagagcgttgtagccatctttgactgtctgtgaatgtgataatagatgttaaaagtttgcgtaccgtttacagaatgttttatgttgttttgtttaatatacccgagtatgtcgaaagttacatgaaaagaaaatttggatgaaataaataatacttgttaggt

SEQ ID NO: 5235 - protein, 329 aa, Arabidopsis thaliana
MAGKLMHALQYNSYGGGAAGLEHVQVPVPTPKSNEVCLKLEATSLNPVDWKIQKGMIRPFLPRKFPCIPATDVAGEVVEVGSGVKNFKAGDKVVAVLSHLGGGGLAEFAVATEKLTVKRPQEVGAAEAAALPVAGLTALQALTNPAGLKLDGTGKKANILVTAASGGVGHYAVQLAKLANAHVTATCGARNIEFVKSLGADEVLDYKTPEGAALKSPSGKKYDAVVHCANGIPFSVFEPNLSENGKVIDITPGPNAMWTYAVKKITMSKKQLVPLLLIPKAENLEFMVNLVKEGKVKTVIDSKHPLSKAEDAWAKSIDGHATGKIIVEP

SEQ ID NO: 5236 - protein, 324 aa, Arabidopsis thaliana
MHALQYNSYGGGAAGLEHVQVPVPTPKSNEVCLKLEATSLNPVDWKIQKGMIRPFLPRKFPCIPATDVAGEVVEVGSGVKNFKAGDKVVAVLSHLGGGGLAEFAVATEKLTVKRPQEVGAAEAAALPVAGLTALQALTNPAGLKLDGTGKKANILVTAASGGVGHYAVQLAKLANAHVTATCGARNIEFVKSLGADEVLDYKTPEGAALKSPSGKKYDAVVHCANGIPFSVFEPNLSENGKVIDITPGPNAMWTYAVKKITMSKKQLVPLLLIPKAENLEFMVNLVKEGKVKTVIDSKHPLSKAEDAWAKSIDGHATGKIIVEP

SEQ ID NO: 5237 - protein, 274 aa, Arabidopsis thaliana
MIRPFLPRKFPCIPATDVAGEVVEVGSGVKNFKAGDKVVAVLSHLGGGGLAEFAVATEKLTVKRPQEVGAAEAAALPVAGLTALQALTNPAGLKLDGTGKKANILVTAASGGVGHYAVQLAKLANAHVTATCGARNIEFVKSLGADEVLDYKTPEGAALKSPSGKKYDAVVHCANGIPFSVFEPNLSENGKVIDITPGPNAMWTYAVKKITMSKKQLVPLLLIPKAENLEFMVNLVKEGKVKTVIDSKHPLSKAEDAWAKSIDGHATGKIIVEP

SEQ ID NO: 5238 - DNA, 1471 bp, Arabidopsis thaliana
aaatatattcatcaaataaacaaaaatctctgtatttttttttaaaaaagatggctgatttggatttacagaggaagatggtatctccgaagctccacgtcaccattcctgagccgtgtaagctctcctccgtctcttctccaatctcctcctcttcttccgccgcttgctctgcttacgagctttacctccgtttgcctgaacttagaaacctctggtcctctctctatttccctcactggatctccgagcccgttctcaaaccagctcttcaagctcttgagatcactttccggttaatcctcaccgttgcttctgacacacgtccttacatcaaccgccgcgaatggatccgacggttggattccctcactaccagccagataaaaatcgtggcggctatctgcggagatgaagacaactacgaagagaacgtatcggcggctccggtcagcaatggctggagctcgttgagtttgctttcggagatcgccacgtgtcgtacatcggagagtgttggacagaagatcttgtctacgatcgagaatgagatgcgttggtgtaagtatacgctcggtttaggagaaccaaacctcgccggaaaaccgtatcttcaatacgacgccgtttgtctcccggaggagctacatagcctcaagaacaatccttacgcagatcacatcgagaaccaagagaatcaaatgctctacactagtcatcagattcttgaatcgtggatttacgtttctgtgaatcttttatatagaatcgaatcgagaatcgaagagggaaaattcgaaaaagcttcttcagacgtctacttgttggagagaatctggaagcttctatcagagattgaagatttacacattcttatggatcctgaagatttcttgaaggtgaagaaacagttacaaatcaaatcgacgtttccaaacgacgcattttgttttaggtcaaagggcttagtagagatggcgaagatgtccaaagagctgagacagaaagtgccagctgttcttgaggtggaggtggatcccaccggaggtccgaggttgcaagaggcggcgatgaagctttactcgaggaaaacagagtacgagaagatacatttgcttcagggaatgcaggccgtggagtctgcagccaagagattcttcttcggataccagaagttggttgcagcgatgattgggaatgcagaggcgaatgcaaatagaacggtggcgaatcacgagtcctatgattcactgactcaggtgtttatggagccaccgtattacccgagcctagacgccgcaaagacatttctgggagagttctggagccaattgtgatgcaatggaagatattgacacaactacttaacaaacactatcaacagatgtaacactactgaaatttttggaagcatctaacgatcagtgtatgaatatatgtaactcattttttagcacaaaacaatattttc

SEQ ID NO: 5239 - protein, 444 aa, Arabidopsis thaliana
IYSSNKQKSLYFFLKKMADLDLQRKMVSPKLHVTIPEPCKLSSVSSPISSSSSAACSAYELYLRLPELRNLWSSLYFPHWISEPVLKPALQALEITFRLILTVASDTRPYINRREWIRRLDSLTTSQIKIVAAICGDEDNYEENVSAAPVSNGWSSLSLLSEIATCRTSESVGQKILSTIENEMRWCKYTLGLGEPNLAGKPYLQYDAVCLPEELHSLKNNPYADHIENQENQMLYTSHQILESWIYVSVNLLYRIESRIEEGKFEKASSDVYLLERIWKLLSEIEDLHILMDPEDFLKVKKQLQIKSTFPNDAFCFRSKGLVEMAKMSKELRQKVPAVLEVEVDPTGGPRLQEAAMKLYSRKTEYEKIHLLQGMQAVESAAKRFFFGYQKLVAAMIGNAEANANRTVANHESYDSLTQVFMEPPYYPSLDAAKTFLGEFWSQL

SEQ ID NO: 5240 - protein, 428 aa, Arabidopsis thaliana
MADLDLQRKMVSPKLHVTIPEPCKLSSVSSPISSSSSAACSAYELYLRLPELRNLWSSLYFPHWISEPVLKPALQALEITFRLILTVASDTRPYINRREWIRRLDSLTTSQIKIVAAICGDEDNYEENVSAAPVSNGWSSLSLLSEIATCRTSESVGQKILSTIENEMRWCKYTLGLGEPNLAGKPYLQYDAVCLPEELHSLKNNPYADHIENQENQMLYTSHQILESWIYVSVNLLYRIESRIEEGKFEKASSDVYLLERIWKLLSEIEDLHILMDPEDFLKVKKQLQIKSTFPNDAFCFRSKGLVEMAKMSKELRQKVPAVLEVEVDPTGGPRLQEAAMKLYSRKTEYEKIHLLQGMQAVESAAKRFFFGYQKLVAAMIGNAEANANRTVANHESYDSLTQVFMEPPYYPSLDAAKTFLGEFWSQL

SEQ ID NO: 5241 - protein, 419 aa, Arabidopsis thaliana
MVSPKLHVTIPEPCKLSSVSSPISSSSSAACSAYELYLRLPELRNLWSSLYFPHWISEPVLKPALQALEITFRLILTVASDTRPYINRREWIRRLDSLTTSQIKIVAAICGDEDNYEENVSAAPVSNGWSSLSLLSEIATCRTSESVGQKILSTIENEMRWCKYTLGLGEPNLAGKPYLQYDAVCLPEELHSLKNNPYADHIENQENQMLYTSHQILESWIYVSVNLLYRIESRIEEGKFEKASSDVYLLERIWKLLSEIEDLHILMDPEDFLKVKKQLQIKSTFPNDAFCFRSKGLVEMAKMSKELRQKVPAVLEVEVDPTGGPRLQEAAMKLYSRKTEYEKIHLLQGMQAVESAAKRFFFGYQKLVAAMIGNAEANANRTVANHESYDSLTQVFMEPPYYPSLDAAKTFLGEFWSQL

SEQ ID NO: 5242 - DNA, 1365 bp, Arabidopsis thaliana
aagagccattgacgtctcctctctcgctctccatcattcttcttctacttttgtgctctgcttcactttttcttctttccttttttctctctctcaacgaccaccaccatgcccggagttgccttctcctgtgttcctgcctccgatctgggaatcttcatctccgaatccaccaccttctcacgctccatctccgcctccctctcatcttcctccagttcaccctcctcctttcgctgttgcaccccattgaacctcaaatcgctgcgttctcatcgccgtcctaagatttctcatatttgttgcgacggaagctctatttccggatctggcctcggcgatcccgatctcgagtttctccaagcctctgtcctcgttgcagagacaagtatgcattacaaaatgcggcgacatggtttccggcaagattcaatgtggcaaacttctaggcctttgcctcccttttctattagagctagtgaatccagggttggtgttctccctattggacttggctttctccgtcaattcaagcagcccactatttttctcaagatctcctgtgatggtgactacttgcttcctgttattgttggggatgctgctgttgagaaacttttagacgtaccactacaaggccacactgaggaatgccctgatcagttccagttcgtgtctgctgttgtcgacaaacttggatatgaagttaaaatggtgaaacttacaggtagaattgtaaacacttattatgcaagtctatgtcttggcaagcctggggacattgaggctatatgcattgattcacggccatcagatgccatcaatgttgcaagagcatgccaggctccaatatatgtgaacaaagcaatagtgctggaagaggctatcaaaattggttatggaggcagaccgcagagcgcaaagcctgttttcaatgttatccttgacagcgctcccgatggaccagatcctttatcggaagagcttaaattagtgaggaatatggatttggcgtctaaagaggaaaggtacatcgatgcagcgatgtggagggacagactgaagaaccttcagaactcgagctctgttgtatataataagggtgtagaaactcctgagagctatgagtagtgaaagaataggagctaagaaaggaaatggatgtagatataatgtggtggatttcaagggtatggagagagaaatataagaagctcatagattgatggtaccgcatgtacctgagaggaagctcttagattgatgggatcgcaggatgtattcaaagtaaatgaaagatgtatgaataacctgagggaatgtgtaaatgtaaatggaagaagactaaatgaaatgcatttcttt

SEQ ID NO: 5243 - protein, 340 aa, Arabidopsis thaliana
MPGVAFSCVPASDLGIFISESTTFSRSISASLSSSSSSPSSFRCCTPLNLKSLRSHRRPKISHICCDGSSISGSGLGDPDLEFLQASVLVAETSMHYKMRRHGFRQDSMWQTSRPLPPFSIRASESRVGVLPIGLGFLRQFKQPTIFLKISCDGDYLLPVIVGDAAVEKLLDVPLQGHTEECPDQFQFVSAVVDKLGYEVKMVKLTGRIVNTYYASLCLGKPGDIEAICIDSRPSDAINVARACQAPIYVNKAIVLEEAIKIGYGGRPQSAKPVFNVILDSAPDGPDPLSEELKLVRNMDLASKEERYIDAAMWRDRLKNLQNSSSVVYNKGVETPESYE

SEQ ID NO: 5244 - protein, 246 aa, Arabidopsis thaliana
MHYKMRRHGFRQDSMWQTSRPLPPFSIRASESRVGVLPIGLGFLRQFKQPTIFLKISCDGDYLLPVIVGDAAVEKLLDVPLQGHTEECPDQFQFVSAVVDKLGYEVKMVKLTGRIVNTYYASLCLGKPGDIEAICIDSRPSDAINVARACQAPIYVNKAIVLEEAIKIGYGGRPQSAKPVFNVILDSAPDGPDPLSEELKLVRNMDLASKEERYIDAAMWRDRLKNLQNSSSVVYNKGVETPESYE

SEQ ID NO: 5245 - protein, 242 aa, Arabidopsis thaliana
MRRHGFRQDSMWQTSRPLPPFSIRASESRVGVLPIGLGFLRQFKQPTIFLKISCDGDYLLPVIVGDAAVEKLLDVPLQGHTEECPDQFQFVSAVVDKLGYEVKMVKLTGRIVNTYYASLCLGKPGDIEAICIDSRPSDAINVARACQAPIYVNKAIVLEEAIKIGYGGRPQSAKPVFNVILDSAPDGPDPLSEELKLVRNMDLASKEERYIDAAMWRDRLKNLQNSSSVVYNKGVETPESYE

SEQ ID NO: 5246 - DNA, 1442 bp, Arabidopsis thaliana
aaaatcagaattagcatctgtttagattggatcttgatcactggcgggcgaagttggagaagattgatggaaagccgaccgggagttttggtcgtcggatcctctggcgtcggcaagcgcaccctcctctctcgattgctctctgtggaatttgaggattcatcggagtcatcatctcaaacagaagttcatggctggacgattaacactaagtattacactgcggatgtttctgtatgtatatcacatatttgcgatgaatactctctacccaatctccctaactcacatccactggtggcgttagttatggtcttcgacttgagtgagctgtcaacccttgttgctcttcaagactgggtttctcatactgacatcaacagttttgatatattgttgtgcattggtaacaaagtagatcgtgtccctcatcaccttgctcatgatgaatatagacggcgccttttgaaggcatcagacccctctagagatctgtattcggacattgatgactttgggatctccgaaactgaaggaagcagcttgttgggaagtgaagatgcatcactagatatcaggggagcatgtcttgagtggtgctctgagaataacattgagttcattgaggcttgtgcctctaatcctgattttgacaagtgtttatcagtcgatggggattctcaaggggttgaacgtctatttggtgctctttcggctcatatgtggcctgggatgattctgaaatctggtgataggataaatgaacctgtgttacctcaaggggaagagttgtcagaagaagaatctgaatatgaattggagtatgaagtgctatcagcaggctcaggtgatccatgggataatattgaagaaagatgggtttctgcaagtgaaacgcattcacatgccgatgctggcggatccacttcacaggaaaacctccatgtagaaaatagtatggtgaaaccgaataaagttgatgaagagctgctgccgtcagggtcaaggttagagctgcaaaatgacactgacagagcaatagtaacagatgaaaaacctttgggcacagaaaatgaaaaatgttacgagtttgaagatgtggaacagttgatgtcagaaataggaaacatccgggacaacttgcgattgatgcctgatttccagaggagggaaatagctgcaaatttagcgatgaaaatggcttccatgtttggaggtgacactgatgacgaggaagaacctgagtgagtctgtttatatcagatattgtaaaagatcagcgtgagctacggtttaatcctttctttatacaatctttatcaaagtccgtgtcttgttttttgatagattctggcagtaatagtcagttgcacgatgtaatacttatctgggccgacctgttatgtatcgctttactttttctttagatacgtaagagctct

SEQ ID NO: 5247 - protein, 415 aa, Arabidopsis thaliana
KIRISICLDWILITGGRSWRRLMESRPGVLVVGSSGVGKRTLLSRLLSVEFEDSSESSSQTEVHGWTINTKYYTADVSVCISHICDEYSLPNLPNSHPLVALVMVFDLSELSTLVALQDWVSHTDINSFDILLCIGNKVDRVPHHLAHDEYRRRLLKASDPSRDLYSDIDDFGISETEGSSLLGSEDASLDIRGACLEWCSENNIEFIEACASNPDFDKCLSVDGDSQGVERLFGALSAHMWPGMILKSGDRINEPVLPQGEELSEEESEYELEYEVLSAGSGDPWDNIEERWVSASETHSHADAGGSTSQENLHVENSMVKPNKVDEELLPSGSRLELQNDTDRAIVTDEKPLGTENEKCYEFEDVEQLMSEIGNIRDNLRLMPDFQRREIAANLAMKMASMFGGDTDDEEEPE

SEQ ID NO: 5248 - protein, 393 aa, Arabidopsis thaliana
MESRPGVLVVGSSGVGKRTLLSRLLSVEFEDSSESSSQTEVHGWTINTKYYTADVSVCISHICDEYSLPNLPNSHPLVALVMVFDLSELSTLVALQDWVSHTDINSFDILLCIGNKVDRVPHHLAHDEYRRRLLKASDPSRDLYSDIDDFGISETEGSSLLGSEDASLDIRGACLEWCSENNIEFIEACASNPDFDKCLSVDGDSQGVERLFGALSAHMWPGMILKSGDRINEPVLPQGEELSEEESEYELEYEVLSAGSGDPWDNIEERWVSASETHSHADAGGSTSQENLHVENSMVKPNKVDEELLPSGSRLELQNDTDRAIVTDEKPLGTENEKCYEFEDVEQLMSEIGNIRDNLRLMPDFQRREIAANLAMKMASMFGGDTDDEEEPE

SEQ ID NO: 5249 - protein, 312 aa, Arabidopsis thaliana
MVFDLSELSTLVALQDWVSHTDINSFDILLCIGNKVDRVPHHLAHDEYRRRLLKASDPSRDLYSDIDDFGISETEGSSLLGSEDASLDIRGACLEWCSENNIEFIEACASNPDFDKCLSVDGDSQGVERLFGALSAHMWPGMILKSGDRINEPVLPQGEELSEEESEYELEYEVLSAGSGDPWDNIEERWVSASETHSHADAGGSTSQENLHVENSMVKPNKVDEELLPSGSRLELQNDTDRAIVTDEKPLGTENEKCYEFEDVEQLMSEIGNIRDNLRLMPDFQRREIAANLAMKMASMFGGDTDDEEEPE

SEQ ID NO: 5250 - DNA, 2098 bp, Arabidopsis thaliana
gaaatataaaaacgctttggtgtttaattacgtcccttctctctctccagtctccattgaagttcgcatcggcgagctcggataatcaaaaacacagaagctatcatgccagaaaatcaaaacggcgccgttaagttcttcttcacacttgcttttctcactgctaccgccgtttctcgtccttcctcgccggatcgattccttagatcggcttcgacttgtctccggtcaccggtcgagcctcaggagtacgaggagctcaggcggcccctaccgtccgatcagctaacgccgtcatgctcgcatgtcctcttccgccattcattcgccaacaccatcaacagacctccttttaccactccatacactcccccttccagctgcatatcgccgccgtggtcttatgttgtacttgacctacgcgccgcctcgagtggcgatcagtacgatcgtatctccggcttgtggctcggcggagtggagctacttcgcaccagtacggcggagccgagtccatccggaatcttctggaatgttcggaaagacgtctctaggtattcctcgctctttatgagatccgatttaaatgtcacaatgatgcttgagaacatagtcaacgatgtttacacaggcatctatcatatcaatgtcaccctcatcttctacgaattcaatcctattgcgtcaaatttgaagattagtaacagattagggtttgtggattcccagaaaagagatcaaacccctgcggatttgataattccggtatgtgacggagggaacagagggttctggttcatgatcgagaaccccagagaaacttactcaaaaggaattcaaattccgtccaacactcgtcagattgtgctggaactatatgtatcgttccatggaaacgatgagttctggtattcaaacccgccaaattcttatatcagaacgaacaatctaacaaccgggcgtggcaatggtgcataccgggaagtttttgttaagatagatgggagatacgtgggatccgaggtgccatttccggtgatctttactggtggaatcaatcccttgttctgggaaccagttgtagcaatcggtgccttcaatctaccttcctatgacatggacttgacgccatttctcgggttgcttttagatggaaagtctcatgagtttgcgtttggggtcaacgatgggatatcatactggcttgtggacgctaatttgcacctctggttagatcacgggtcttcgaatgttgaagctgggtctagactttatgatagcccgagtcggcatatgatgagacaagaacagcttgaacagcttgatgggtcgtttaaggttgaagcagaggtaagtagtgaatatgatggctgggttagatcaagtaaaggtaatctgaccaccatggtcaagagcatgttcaaggttgacagcttggtgaggttcgagaaaaacggaacatacaagagggttgagcagagagtgaagaccgaacggatcgtggaggtgacttctgaatcgggtaaaccggtgaatcgagtcgtgcaccagcggacatatcctcttacagtgatcacttctactcttagagggttaaccaacgacaaggatacgtatatgctcgtgacgaatgtttcacacgccttgaatgagacacattcagatggagaggctttgatccaagtttatagcagacaagactcagagggttggatggaggttgaagatcacaatgtcttggctggtgaagcgagcacaaaacagagtcttagctatatcgatgaattcagctgttattcccgcaccatcgttgcggctaatggggagattgcccaggacagttcatctgattcttgtacttcgtcttcattctcagagctcaacactattgagcagcttatcataaccaatgttatgaaacacttgtcgtgaataagagatgcttgtactactaaccatgtttggggtcaaacaaaaaatactgtttttgctcaaagggaaacaaaattgtaggatctaaagcagaaacagcagttacaatgcttttgcttttgttcattcaattatcccgctacctccatcgatatcgacttctccc

SEQ ID NO: 5251 - protein, 608 aa, Arabidopsis thaliana
MPENQNGAVKFFFTLAFLTATAVSRPSSPDRFLRSASTCLRSPVEPQEYEELRRPLPSDQLTPSCSHVLFRHSFANTINRPPFTTPYTPPSSCISPPWSYVVLDLRAASSGDQYDRISGLWLGGVELLRTSTAEPSPSGIFWNVRKDVSRYSSLFMRSDLNVTMMLENIVNDVYTGIYHINVTLIFYEFNPIASNLKISNRLGFVDSQKRDQTPADLIIPVCDGGNRGFWFMIENPRETYSKGIQIPSNTRQIVLELYVSFHGNDEFWYSNPPNSYIRTNNLTTGRGNGAYREVFVKIDGRYVGSEVPFPVIFTGGINPLFWEPVVAIGAFNLPSYDMDLTPFLGLLLDGKSHEFAFGVNDGISYWLVDANLHLWLDHGSSNVEAGSRLYDSPSRHMMRQEQLEQLDGSFKVEAEVSSEYDGWVRSSKGNLTTMVKSMFKVDSLVRFEKNGTYKRVEQRVKTERIVEVTSESGKPVNRVVHQRTYPLTVITSTLRGLTNDKDTYMLVTNVSHALNETHSDGEALIQVYSRQDSEGWMEVEDHNVLAGEASTKQSLSYIDEFSCYSRTIVAANGEIAQDSSSDSCTSSSFSELNTIEQLIITNVMKHLS

SEQ ID NO: 5252 - protein, 453 aa, Arabidopsis thaliana
MRSDLNVTMMLENIVNDVYTGIYHINVTLIFYEFNPIASNLKISNRLGFVDSQKRDQTPADLIIPVCDGGNRGFWFMIENPRETYSKGIQIPSNTRQIVLELYVSFHGNDEFWYSNPPNSYIRTNNLTTGRGNGAYREVFVKIDGRYVGSEVPFPVIFTGGINPLFWEPVVAIGAFNLPSYDMDLTPFLGLLLDGKSHEFAFGVNDGISYWLVDANLHLWLDHGSSNVEAGSRLYDSPSRHMMRQEQLEQLDGSFKVEAEVSSEYDGWVRSSKGNLTTMVKSMFKVDSLVRFEKNGTYKRVEQRVKTERIVEVTSESGKPVNRVVHQRTYPLTVITSTLRGLTNDKDTYMLVTNVSHALNETHSDGEALIQVYSRQDSEGWMEVEDHNVLAGEASTKQSLSYIDEFSCYSRTIVAANGEIAQDSSSDSCTSSSFSELNTIEQLIITNVMKHLS

SEQ ID NO: 5253 - protein, 445 aa, Arabidopsis thaliana
MMLENIVNDVYTGIYHINVTLIFYEFNPIASNLKISNRLGFVDSQKRDQTPADLIIPVCDGGNRGFWFMIENPRETYSKGIQIPSNTRQIVLELYVSFHGNDEFWYSNPPNSYIRTNNLTTGRGNGAYREVFVKIDGRYVGSEVPFPVIFTGGINPLFWEPVVAIGAFNLPSYDMDLTPFLGLLLDGKSHEFAFGVNDGISYWLVDANLHLWLDHGSSNVEAGSRLYDSPSRHMMRQEQLEQLDGSFKVEAEVSSEYDGWVRSSKGNLTTMVKSMFKVDSLVRFEKNGTYKRVEQRVKTERIVEVTSESGKPVNRVVHQRTYPLTVITSTLRGLTNDKDTYMLVTNVSHALNETHSDGEALIQVYSRQDSEGWMEVEDHNVLAGEASTKQSLSYIDEFSCYSRTIVAANGEIAQDSSSDSCTSSSFSELNTIEQLIITNVMKHLS

SEQ ID NO: 5254 - DNA, 1177 bp, Arabidopsis thaliana
agccgagaaacaacgcaaactccgattgagaggtgtttgcatgattcctgagcttgtctgtgtcaatagtgaggcactacatcgaggaataagaaagaagatctaaggagctaaagctattatgtcaacgaacactgaatcttcttcttattcttctcttcctagtcaaaggcttttgggtaaagtggcattgatcactggaggagccacagggataggtgagagcattgttcgtctgttccacaagcacggtgccaaagtctgcattgttgatctgcaagatgatctcggaggtgaggtgtgtaaaagtctgcttcgtggtgagtccaaggagacggcttttttcatccatggcgatgttagagtggaagatgacattagcaatgcggttgactttgcagtcaaaaattttgggacgcttgatatacttatcaacaatgcaggattatgtggagcaccgtgccctgatattcgtaattatagtttgagtgagttcgagatgacctttgatgtgaatgtgaaaggagcttttctaagcatgaaacatgcagctcgtgtaatgataccggagaagaaagggtcgatagtttccttatgtagtgtgggaggtgttgtgggaggcgttggtccacattcttatgttggttccaagcatgctgttctaggcttgactaggagtgttgcagcggagcttggacagcacgggatacgtgtgaactgtgtttcgccttacgcggttgcaactaaactcgctttggctcatttgccggaggaagaaagaacggaggatgcatttgttggtttcaggaattttgctgctgcaaacgcgaatctaaaaggggtggaactgacggttgatgatgtagcgaacgctgttctgtttttggctagcgatgactcgcggtacataagcggagataatttgatgattgatggaggattcacttgcactaaccactcctttaaagtcttcagatgatgcattttgctaaagaatgttgtttaatgtttattgtccgccaatttatcatgtctatcaaataatttaactgtggagcttattgtggttttaattgttacttttagcattgtagaaatgtttgatgttaactacatttcttactggtagacattgaacaaaatcagattctcataatgattaaaaagattgagtagc

SEQ ID NO: 5255 - protein, 285 aa, Arabidopsis thaliana
MSTNTESSSYSSLPSQRLLGKVALITGGATGIGESIVRLFHKHGAKVCIVDLQDDLGGEVCKSLLRGESKETAFFIHGDVRVEDDISNAVDFAVKNFGTLDILINNAGLCGAPCPDIRNYSLSEFEMTFDVNVKGAFLSMKHAARVMIPEKKGSIVSLCSVGGVVGGVGPHSYVGSKHAVLGLTRSVAAELGQHGIRVNCVSPYAVATKLALAHLPEEERTEDAFVGFRNFAAANANLKGVELTVDDVANAVLFLASDDSRYISGDNLMIDGGFTCTNHSFKVFR

SEQ ID NO: 5256 - protein, 159 aa, Arabidopsis thaliana
MTFDVNVKGAFLSMKHAARVMIPEKKGSIVSLCSVGGVVGGVGPHSYVGSKHAVLGLTRSVAAELGQHGIRVNCVSPYAVATKLALAHLPEEERTEDAFVGFRNFAAANANLKGVELTVDDVANAVLFLASDDSRYISGDNLMIDGGFTCTNHSFKVFR

SEQ ID NO: 5257 - protein, 146 aa, Arabidopsis thaliana
MKHAARVMIPEKKGSIVSLCSVGGVVGGVGPHSYVGSKHAVLGLTRSVAAELGQHGIRVNCVSPYAVATKLALAHLPEEERTEDAFVGFRNFAAANANLKGVELTVDDVANAVLFLASDDSRYISGDNLMIDGGFTCTNHSFKVFR

SEQ ID NO: 5258 - DNA, 1328 bp, Arabidopsis thaliana
gtgtttcattttcatatctcacacgtacgaacgaagaatggagagcgactccgagatggtagcgttgcctctgttaccgactccgatagaatcgaactacagggcttgcaccattccttatcgattcccttctgataatcctagaaaggctactcccactgagatctcctggatcgatctcttctccaattccatcccttctttcaaggaacgtgcagagagcgatacaaccgttccagatgctcctgttcgagctgaaaagtttgccaaaaggtatgcggagattcttgaggacctgaagaaagatccggagagccatggtggtccaccggattgcattcttctctgcagaattcgtgagctgatactaagagaattgggatttagggacatatttaagaaagttaaggatgaggagaatgcaaaggcaatatcactatttcctgaagttgtccgtttgagtgatgctattaacgatgaaggcaagcgcatagagaatctggtcagagggatatttgctggaaacatctttgatctgggttctgcacagcttgctgaggttttctcaaaagacggcatgtcctttttggctagctgtcagaacttggtttcacgaccatgggtcattgatgacttggataactttcaagctagatggctcaagaagccttggaagaaggctgtgatatttgtcgataattctggtgcagacataattttgggtatcttgccctttgctagagaaatgctacgtctaggaatgcaggttgtactggctgctaatgagcttccgtctatcaacgatgtaacttatatcgagcttgcagagatcttgtctaagctgaatgatgaaaatggacaattgatgggtgttgatacctcaaatcttcttattgcaaattcagggaatgacttaccggttattgatcttgcaagagtatcacaggaggttgcgtacctctcaagcgatgcagacttggtcatcttagaaggcatgggccgtggaatagagacaaacctttatgctcagttcaagtgtgattccctcaagatcggaatggtgaagcatccagaagtagcacagtttctcggaggacggctttatgactgtgtcatcaaatacaatgaagttcagatttaattatatttcacacacatttttactaaaccagccattcagtttattatattaaaaactgttaggctttgtaagttagagatccaatctctatctctgcattcagatgtaagaattgaaaactctttcgacattctttatcaaacacacacaaaaagcaccaatctttctgattggaccttatctggtg

SEQ ID NO: 5259 - protein, 379 aa, Arabidopsis thaliana
CFIFISHTYERRMESDSEMVALPLLPTPIESNYRACTIPYRFPSDNPRKATPTEISWIDLFSNSIPSFKERAESDTTVPDAPVRAEKFAKRYAEILEDLKKDPESHGGPPDCILLCRIRELILRELGFRDIFKKVKDEENAKAISLFPEVVRLSDAINDEGKRIENLVRGIFAGNIFDLGSAQLAEVFSKDGMSFLASCQNLVSRPWVIDDLDNFQARWLKKPWKKAVIFVDNSGADIILGILPFAREMLRLGMQVVLAANELPSINDVTYIELAEILSKLNDENGQLMGVDTSNLLIANSGNDLPVIDLARVSQEVAYLSSDADLVILEGMGRGIETNLYAQFKCDSLKIGMVKHPEVAQFLGGRLYDCVIKYNEVQI

SEQ ID NO: 5260 - protein, 367 aa, Arabidopsis thaliana
MESDSEMVALPLLPTPIESNYRACTIPYRFPSDNPRKATPTEISWIDLFSNSIPSFKERAESDTTVPDAPVRAEKFAKRYAEILEDLKKDPESHGGPPDCILLCRIRELILRELGFRDIFKKVKDEENAKAISLFPEVVRLSDAINDEGKRIENLVRGIFAGNIFDLGSAQLAEVFSKDGMSFLASCQNLVSRPWVIDDLDNFQARWLKKPWKKAVIFVDNSGADIILGILPFAREMLRLGMQVVLAANELPSINDVTYIELAEILSKLNDENGQLMGVDTSNLLIANSGNDLPVIDLARVSQEVAYLSSDADLVILEGMGRGIETNLYAQFKCDSLKIGMVKHPEVAQFLGGRLYDCVIKYNEVQI

SEQ ID NO: 5261 - protein, 361 aa, Arabidopsis thaliana
MVALPLLPTPIESNYRACTIPYRFPSDNPRKATPTEISWIDLFSNSIPSFKERAESDTTVPDAPVRAEKFAKRYAEILEDLKKDPESHGGPPDCILLCRIRELILRELGFRDIFKKVKDEENAKAISLFPEVVRLSDAINDEGKRIENLVRGIFAGNIFDLGSAQLAEVFSKDGMSFLASCQNLVSRPWVIDDLDNFQARWLKKPWKKAVIFVDNSGADIILGILPFAREMLRLGMQVVLAANELPSINDVTYIELAEILSKLNDENGQLMGVDTSNLLIANSGNDLPVIDLARVSQEVAYLSSDADLVILEGMGRGIETNLYAQFKCDSLKIGMVKHPEVAQFLGGRLYDCVIKYNEVQI

SEQ ID NO: 5262 - DNA, 1492 bp, Arabidopsis thaliana
agaacttccaaattgtaaaacttcggctcccacaggggaaacaaagcgaccgttttgctcatcattatttatagccgccggcgaattgatcggtaaaaaaaaaaacttccgacgtttctacaaagttgcgaatcatgatctacctctctagacgctcactctcttctcttctccgatccggtttcaatctccgcggcgatcttacagcagcagctgtctcttgttcctctctcttctccgacgcggacggtgggattaagaagttacactcgcgagctgggaatgcagtgttatggagaaatagtcagctatgtagttctcaaggaagcttttttggacgaggaggacaagtctcaggttctgtgtttcgatgtttctgcagtggtagtgatacttctcctcctagcttggatcggaagtttttggctcagctatgggttgcagataagaaaaagctaaaggctatggaaaagcgatataagaaagcttctaagcataggaactacactgaaaatgatggatttgatgtccattttgaaactgttgagcctacagtggagcaaccaccggttagccagtctatgtctggtcttctgaagcctaaaacttctgatgaggccaaaattgcaactctgcttgcacgatcgaatttgctggttacaagagatattgaatgggcaaatctggttcttggttttgaacaggaaaatcgctatattgtagtagatgtttgctatcctgaggcacctgtggggtctatccgagaacaaagcaatttactggcgcggcagctgcttcgtacccggcgcccatttgttgcttccataactgatgctttgggtaatgagcttttccgggttcgtcgacctttctggtggctcacaagttcaatatatgctgaaattgatggagaggaaattggtgttgttcatcgacgatggcatctatggagaagaatttatgatttatacctggggaacaaccagtttgcagtggtagaaaatcctgggttttggaattggacatttacagtgaaggatgctgatggggaagtcttagcccaaatagatcgtgattggagaggttttggctttgagatattcacagatgctgggcagtacgtgatccgatttggaaaagctgatgctgcagccaagaccggccctgcgacactggtagaagagttagaagtgaaacggccattgactttgtcagaaagagctgttgtccttacgcttgcgatttcactagataatgattacttttcaagacatggtggctggggaatcccattcatggcggtgggtgagtagtaggtaggattcagtttttcacactctctgtttcgggtaatgacttgtgtggctatctgaaaacttgagccttgtgttgtgtttctctgtctcgtttcaactcatacgagtatgcagagtaaatgtaactttaaatcattcgacataaatcggtttatataatgatgattattgtggat

SEQ ID NO: 5263 - protein, 392 aa, Arabidopsis thaliana
MIYLSRRSLSSLLRSGFNLRGDLTAAAVSCSSLFSDADGGIKKLHSRAGNAVLWRNSQLCSSQGSFFGRGGQVSGSVFRCFCSGSDTSPPSLDRKFLAQLWVADKKKLKAMEKRYKKASKHRNYTENDGFDVHFETVEPTVEQPPVSQSMSGLLKPKTSDEAKIATLLARSNLLVTRDIEWANLVLGFEQENRYIVVDVCYPEAPVGSIREQSNLLARQLLRTRRPFVASITDALGNELFRVRRPFWWLTSSIYAEIDGEEIGVVHRRWHLWRRIYDLYLGNNQFAVVENPGFWNWTFTVKDADGEVLAQIDRDWRGFGFEIFTDAGQYVIRFGKADAAAKTGPATLVEELEVKRPLTLSERAVVLTLAISLDNDYFSRHGGWGIPFMAVGE

SEQ ID NO: 5264 - protein, 282 aa, Arabidopsis thaliana
MEKRYKKASKHRNYTENDGFDVHFETVEPTVEQPPVSQSMSGLLKPKTSDEAKIATLLARSNLLVTRDIEWANLVLGFEQENRYIVVDVCYPEAPVGSIREQSNLLARQLLRTRRPFVASITDALGNELFRVRRPFWWLTSSIYAEIDGEEIGVVHRRWHLWRRIYDLYLGNNQFAVVENPGFWNWTFTVKDADGEVLAQIDRDWRGFGFEIFTDAGQYVIRFGKADAAAKTGPATLVEELEVKRPLTLSERAVVLTLAISLDNDYFSRHGGWGIPFMAVGE

SEQ ID NO: 5265 - protein, 243 aa, Arabidopsis thaliana
MSGLLKPKTSDEAKIATLLARSNLLVTRDIEWANLVLGFEQENRYIVVDVCYPEAPVGSIREQSNLLARQLLRTRRPFVASITDALGNELFRVRRPFWWLTSSIYAEIDGEEIGVVHRRWHLWRRIYDLYLGNNQFAVVENPGFWNWTFTVKDADGEVLAQIDRDWRGFGFEIFTDAGQYVIRFGKADAAAKTGPATLVEELEVKRPLTLSERAVVLTLAISLDNDYFSRHGGWGIPFMAVGE

SEQ ID NO: 5266 - DNA, 1809 bp, Arabidopsis thaliana
tttcgcaatacgattcatctaccaaaaaaggctttaggtcaaacagaaataacgacctaaagctatgtttaaagcttagcagttctccacatatatttcaatatataaaaagattacccctttttaaaaaataaaatagatatttgttttccgtaaaagaaaggggtaatcaaataaaatggagacggctaggcttttcaaattagtgtgtgtgatatgtattgccagtttgattccgaccatacgagccaatgttgctgatgagaccgatgagtattgggtaaacaaggccaatgaagctcgtaaacatacccttatggcttatcatcccgacccttatgagatcgtcgaccacttccacgagcgtcattacgacaactcgactgacgtcgaggggaccgaggaagagaaggcggtcgcttccgaggaagaggacgtcattgagatgatttctagtccgacaaacagcacaaggcggagcctaaccggtaggggcaagggaaaaggaaaaggaaaatggagcaagctaacgggaccttgcaccgcaagcaaccccatcgataaatgctggcgttgccagcctgattgggccagacgtcgcaagaagctcgttcactgtgtccgtgggtttggttacaggaccaccggaggcaaacgcggccgcatctatgtagtcacgagccccagagacgatgatatggtgaaccctagacctggaacactacgtcacgctgtgatccagaaagaacctctatggatcgtttttaagcacgatatgagcattcggttaagccaagagctgatgattactagtgacaagacaatcgatgctcgtggcgctaacgtgcacatcgcatatggtgctggtatcacgatgcagtacgtgcacaatatcatcatccatgggcttcacgtccaccacatcgtgaaaagcagtggtggtttgataagagattcgattaaccactttgggcatagaggagaggctgatggagatggtatctctatctttggggcaacaaacatttggcttgaccacatttctatgtctaaatgccaagatggacttatcgacgctataatgggttccaccgcaatcaccatctctaactctcatttcaccaccacaacgatgtgatgttgcttggtgcacaaaacaacaacatggatgacaagaagatgcaagtcacagtggcttacaaccatttcggaaaaggacttgtgcagaggatgcctagggtccgatggggtttcgtccacgttgtcaacaatgactacactcattgggagctttacgcgatcggtggtagccaaggtcctaccattctcagccatggaaaccgtttcatcgctcctcctcacaaacaacactacagagaggtgacaaagagggattatgcttcagaaagcgaatggaaaaactggaactggagatccgagaaagatgttttcatgaacaatgcatatttcagacaatctggaaatcctcatttcaagtgttcgcattctaggcaacagatgataaagcccaaaaatggtatggccgtttctaagcttaccaaatacgccggagcattggattgccgggtcggaaaagcatgctaaaaatataactcactactaaattttttctctttgtatcaaagcctatataagaactgataaaatcatggggtaaaaatggaaattaattattctaatttatgaaaggctctgtgtaaagaatctatgcgaacggcttgatactttgtaactcttaatttgtttgtgtatgtttttttgtgctcgttaatttgtttttttgcaagg

SEQ ID NO: 5267 - protein, 319 aa, Arabidopsis thaliana
METARLFKLVCVICIASLIPTIRANVADETDEYWVNKANEARKHTLMAYHPDPYEIVDHFHERHYDNSTDVEGTEEEKAVASEEEDVIEMISSPTNSTRRSLTGRGKGKGKGKWSKLTGPCTASNPIDKCWRCQPDWARRRKKLVHCVRGFGYRTTGGKRGRIYVVTSPRDDDMVNPRPGTLRHAVIQKEPLWIVFKHDMSIRLSQELMITSDKTIDARGANVHIAYGAGITMQYVHNIIIHGLHVHHIVKSSGGLIRDSINHFGHRGEADGDGISIFGATNIWLDHISMSKCQDGLIDAIMGSTAITISNSHFTTTTM

SEQ ID NO: 5268 - protein, 273 aa, Arabidopsis thaliana
MAYHPDPYEIVDHFHERHYDNSTDVEGTEEEKAVASEEEDVIEMISSPTNSTRRSLTGRGKGKGKGKWSKLTGPCTASNPIDKCWRCQPDWARRRKKLVHCVRGFGYRTTGGKRGRIYVVTSPRDDDMVNPRPGTLRHAVIQKEPLWIVFKHDMSIRLSQELMITSDKTIDARGANVHIAYGAGITMQYVHNIIIHGLHVHHIVKSSGGLIRDSINHFGHRGEADGDGISIFGATNIWLDHISMSKCQDGLIDAIMGSTAITISNSHFTTTTM

SEQ ID NO: 5269 - protein, 230 aa, Arabidopsis thaliana
MISSPTNSTRRSLTGRGKGKGKGKWSKLTGPCTASNPIDKCWRCQPDWARRRKKLVHCVRGFGYRTTGGKRGRIYVVTSPRDDDMVNPRPGTLRHAVIQKEPLWIVFKHDMSIRLSQELMITSDKTIDARGANVHIAYGAGITMQYVHNIIIHGLHVHHIVKSSGGLIRDSINHFGHRGEADGDGISIFGATNIWLDHISMSKCQDGLIDAIMGSTAITISNSHFTTTTM

SEQ ID NO: 5270 - DNA, 1539 bp, Arabidopsis thaliana
atcatcaaagtgaaaatgacaaacttcaaagacaacgatggagatggaaccaaactccacgtggtaatgtttccatggttagcctttggtcacatggttccatacttggagctctctaaactcatagctcaaaagggtcacaaagtctctttcatttccactccacgtaacatcgaccgtctcctcccacggttaccggaaaatctctcctccgtcattaacttcgtcaagctatcacttcccgtcggcgacaacaaactcccggaagacggtgaagctaccacagacgtccctttcgaactcataccttacttaaaaatcgcttacgacgggttaaaagttccggtgacggagtttcttgaatcttcgaaacccgattgggttcttcaagatttcgcggggttttggcttcctccaatctctcgtcgtctcggaatcaaaaccggattctttagcgctttcaacggcgcgacgctcggtattcttaaaccgccggggttcgaagagtaccgtacttcgccggcggattttatgaagccgcctaagtgggttccgtttgaaacttcggtagctttcaagttatttgaatgcaggttcattttcaaaggatttatggcggaaaccaccgaagggaatgttcccgacatccaccgtgtcggcggcgtaattgacggctgtgacgtcatcttcgtacggagctgttacgagtatgaagcggagtggttaggacttacacaagaacttcaccggaaaccggttataccggtcggagttttgcctccaaaaccggacgaaaagtttgaagataccgacacgtggctgtctgttaaaaaatggttggactcacggaaaagtaagtccattgtctacgtagcttttggttcagaagctaaaccgagtcaaacggagctaaatgagatcgctctcggtttagagctttctggtttacctttcttttgggtgttaaagactcgtcgtggtccgtgggataccgaaccggtcgagcttccggaaggattcgaagagcgtacagcggatagagggatggtgtggagaggttgggttgagcaattgcgtacattgagccatgactcgatcggtttggttctgactcatcccggttggggaacgataattgaagctatccggtttgctaaaccgatggcaatgctggtttttgtgtatgaccaaggattgaatgcgagagtcattgaagagaagaaaattgggtatatgatccctcgagacgagacagaaggtttctttactaaagaaagtgttgcgaattcgctaagattggtaatggtggaagaagaaggaaaggtttatagagagaatgtgaaggagatgaaaggagtgtttggagatatggatagacaagatcgttatgtggattcattcttggaatatcttgttactaatcgttaactttgagtcttgatccaatggtcggttaattgagtgaagttgatcaagtgttgcaaggatgatcattgtataatgttatgatattttggaatggtcaagttttcttgaggc

SEQ ID NO: 5271 - protein, 475 aa, Arabidopsis thaliana
IIKVKMTNFKDNDGDGTKLHVVMFPWLAFGHMVPYLELSKLIAQKGHKVSFISTPRNIDRLLPRLPENLSSVINFVKLSLPVGDNKLPEDGEATTDVPFELIPYLKIAYDGLKVPVTEFLESSKPDWVLQDFAGFWLPPISRRLGIKTGFFSAFNGATLGILKPPGFEEYRTSPADFMKPPKWVPFETSVAFKLFECRFIFKGFMAETTEGNVPDIHRVGGVIDGCDVIFVRSCYEYEAEWLGLTQELHRKPVIPVGVLPPKPDEKFEDTDTWLSVKKWLDSRKSKSIVYVAFGSEAKPSQTELNEIALGLELSGLPFFWVLKTRRGPWDTEPVELPEGFEERTADRGMVWRGWVEQLRTLSHDSIGLVLTHPGWGTIIEAIRFAKPMAMLVFVYDQGLNARVIEEKKIGYMIPRDETEGFFTKESVANSLRLVMVEEEGKVYRENVKEMKGVFGDMDRQDRYVDSFLEYLVTNR

SEQ ID NO: 5272 - protein, 470 aa, Arabidopsis thaliana
MTNFKDNDGDGTKLHVVMFPWLAFGHMVPYLELSKLIAQKGHKVSFISTPRNIDRLLPRLPENLSSVINFVKLSLPVGDNKLPEDGEATTDVPFELIPYLKIAYDGLKVPVTEFLESSKPDWVLQDFAGFWLPPISRRLGIKTGFFSAFNGATLGILKPPGFEEYRTSPADFMKPPKWVPFETSVAFKLFECRFIFKGFMAETTEGNVPDIHRVGGVIDGCDVIFVRSCYEYEAEWLGLTQELHRKPVIPVGVLPPKPDEKFEDTDTWLSVKKWLDSRKSKSIVYVAFGSEAKPSQTELNEIALGLELSGLPFFWVLKTRRGPWDTEPVELPEGFEERTADRGMVWRGWVEQLRTLSHDSIGLVLTHPGWGTIIEAIRFAKPMAMLVFVYDQGLNARVIEEKKIGYMIPRDETEGFFTKESVANSLRLVMVEEEGKVYRENVKEMKGVFGDMDRQDRYVDSFLEYLVTNR

SEQ ID NO: 5273 - protein, 453 aa, Arabidopsis thaliana
MFPWLAFGHMVPYLELSKLIAQKGHKVSFISTPRNIDRLLPRLPENLSSVINFVKLSLPVGDNKLPEDGEATTDVPFELIPYLKIAYDGLKVPVTEFLESSKPDWVLQDFAGFWLPPISRRLGIKTGFFSAFNGATLGILKPPGFEEYRTSPADFMKPPKWVPFETSVAFKLFECRFIFKGFMAETTEGNVPDIHRVGGVIDGCDVIFVRSCYEYEAEWLGLTQELHRKPVIPVGVLPPKPDEKFEDTDTWLSVKKWLDSRKSKSIVYVAFGSEAKPSQTELNEIALGLELSGLPFFWVLKTRRGPWDTEPVELPEGFEERTADRGMVWRGWVEQLRTLSHDSIGLVLTHPGWGTIIEAIRFAKPMAMLVFVYDQGLNARVIEEKKIGYMIPRDETEGFFTKESVANSLRLVMVEEEGKVYRENVKEMKGVFGDMDRQDRYVDSFLEYLVTNR

SEQ ID NO: 5274 - DNA, 1261 bp, Arabidopsis thaliana
acatacgcggaaaaaaaaaaaaaaagcgaatcgtttacttacccctctttgaaaccgacggtggtatttttcgccggagaagatgaagcagagaacctggccttgtagatctgaaggatctcgattctcctccttatcgtttttgaaacctcacgacaaggataaacggagtagaatttcatcaatcaacaaagcaacggcgaagtcaaccacaagttcaaggtcttcttcttcctcttcttcttcacgtcctccatcgaatgagttcggagatttctcgatgcttccgtatgatatactgatgaagattgctgcaccgtttagtcatccgaatcttcaagcggcgtctttggtatgtaaatcgtggagagacgcgctaaagccgttgcgagagtcgatgttgttgattcggtgggggaaaaagtacaagcacggaagaggaggtgtgcgagcgaatctcgacaaagctcttgattcgtttctgaaaggagctatgcgtggatccacgctcgctatggtcgacgctgggcttgtgtattgggaaagaggagagaaggagaaagcggtgaatttgtatcggagagcttcggagcttggtgatgctgttggtcaatgtaatttagggattgcttatcttcaagttcaaccttcaaatcccaaggaagcgatgaaatggttgaaacaatctgcagagaatggttatgttcgagcacagtatcagttagctctttgtttacaccatggtcgggtcgtgcaaaccaatctgcttgaagctactaaatggtacctaaaggcagcagaaggtgggtatgtacgagcgatgtataacatttcgctttgttattcggttggagaaggcttaccacaaaaccgcaagctagcaagaaaatggatgaaacgagcagctgatcacggccacagtaaagctcagtttgaacacggccttgctctattttctgaaggggagatgctgaagtcagtgctttacttagaacttgccgaacgtggtggcgaagcagctgctactcccgtcaaagaagttgtacaccaacagctttctgcaacttttggtggtcaggccgtacaccatgccatacaccaagccaataactggcgtcctctaccagttactcgatgactcctatcatttatttcagtgaggtctagtgattggctagttacatgtccataacttaaattccaatttgacaatgtatcaatgacaaaaccttatttcagatttctacttttagttcgtact

SEQ ID NO: 5275 - protein, 351 aa, Arabidopsis thaliana
MKQRTWPCRSEGSRFSSLSFLKPHDKDKRSRISSINKATAKSTTSSRSSSSSSSSRPPSNEFGDFSMLPYDILMKIAAPFSHPNLQAASLVCKSWRDALKPLRESMLLIRWGKKYKHGRGGVRANLDKALDSFLKGAMRGSTLAMVDAGLVYWERGEKEKAVNLYRRASELGDAVGQCNLGIAYLQVQPSNPKEAMKWLKQSAENGYVRAQYQLALCLHHGRVVQTNLLEATKWYLKAAEGGYVRAMYNISLCYSVGEGLPQNRKLARKWMKRAADHGHSKAQFEHGLALFSEGEMLKSVLYLELAERGGEAAATPVKEVVHQQLSATFGGQAVHHAIHQANNWRPLPVTR

SEQ ID NO: 5276 - protein, 285 aa, Arabidopsis thaliana
MLPYDILMKIAAPFSHPNLQAASLVCKSWRDALKPLRESMLLIRWGKKYKHGRGGVRANLDKALDSFLKGAMRGSTLAMVDAGLVYWERGEKEKAVNLYRRASELGDAVGQCNLGIAYLQVQPSNPKEAMKWLKQSAENGYVRAQYQLALCLHHGRVVQTNLLEATKWYLKAAEGGYVRAMYNISLCYSVGEGLPQNRKLARKWMKRAADHGHSKAQFEHGLALFSEGEMLKSVLYLELAERGGEAAATPVKEVVHQQLSATFGGQAVHHAIHQANNWRPLPVTR

SEQ ID NO: 5277 - protein, 278 aa, Arabidopsis thaliana
MKIAAPFSHPNLQAASLVCKSWRDALKPLRESMLLIRWGKKYKHGRGGVRANLDKALDSFLKGAMRGSTLAMVDAGLVYWERGEKEKAVNLYRRASELGDAVGQCNLGIAYLQVQPSNPKEAMKWLKQSAENGYVRAQYQLALCLHHGRVVQTNLLEATKWYLKAAEGGYVRAMYNISLCYSVGEGLPQNRKLARKWMKRAADHGHSKAQFEHGLALFSEGEMLKSVLYLELAERGGEAAATPVKEVVHQQLSATFGGQAVHHAIHQANNWRPLPVTR

SEQ ID NO: 5278 - DNA, 2359 bp, Arabidopsis thaliana
cagcaagtcttgtctccttctctctctctctccctctctaactgtatcttcttcttcttcttcaaccttcagacttttctagttgcaactctcattcaattgttcaatttctctgtaaaaatcaaagctttttggaatctttcttcggcgagatatttcttcaccggcgcaagcttctcttgagcgtgattcatcactgggtttgcattttttcctggtgggtattcttcaaattgttcaaagctccgaccttttcttccttagaatctgattactggaatcttgaagctggagagactcgagtttatatggtttcaagcatcgttgagtcaatcattgagttgtgtagaagaaaggtttggttttcttctccgtttaagtggttttgggtttggtaggatttggtgtaatctgggagataaagaaagatgaatatgagtgatttaggttgggatgatgaagataaatcggtggttagtgctgttttagggcatttagcttctgattttcttcgagcaaactctaattcgaatcagaatctctttcttgttatgggaactgatgatactctgaataagaagctctctagtctcgttgattggccaaactcggagaatttcagctggaactacgctattttctggcaacaaaccatgtctagatccggacaacaagtcttaggttggggagatgggtgttgtcgagagcctaatgaggaagaggaatcaaaagttgttaggtcttataattttaacaacatgggggcagaggaagagacatggcaagatatgaggaagagagtgttgcagaagcttcataggttgtttggtggatctgatgaagacaattatgctttgagcttagagaaagttactgctactgagattttcttcttagcttccatgtatttcttcttcaatcacggtgaaggcggtcctgggaggtgttattcttcagggaaacatgtgtggctctctgatgcagttaactctgagtctgactattgtttcaggtcttttatggcgaaatctgcgggaatcagaacgatcgttatggttcctactgatgctggtgttcttgagcttggttctgtttggtctttgcctgaaaacattggcttggttaagtctgttcaagctttgttcatgaggagagttacgcaaccagtaatggtgacttcaaacactaacatgactggagggattcacaagcttttcgggcaggatttgagtggagctcacgcgtatcctaagaagctcgaagtgagaagaaacttggatgagagattcactcctcaaagttgggaaggctataataacaataaaggtccaacatttggttacacacctcagagggatgatgtgaaagtgctagagaatgtgaatatggttgtagataataacaattacaagacgcagattgagtttgcgggatcatcagttgctgcttcttcgaatccatctacaaacactcagcaagaaaaatcagaatcttgtacagagaaaagaccagtgagcttgttagcaggagcaggaatagtttctgttgttgatgagaagagaccgagaaagagagggagaaagcctgcaaacggaagagaagagccattgaaccatgtggaagttgagaggcagagacgcgagaagcttaaccaaagattctacgctttacgatcagttgttccaaacatttctaaaatggacaaggcttctctacttggagacgcaatttcttacatcaaagagcttcaagagaaagtcaagataatggaagatgaaagagtaggaacagataagagcttatcagaatcaaacacaataacagtagaagaaagtccagaagttgacattcaagctatgaatgaagaggttgttgtaagagtaatctcgcctttggattcacatccagcttcaagaatcatacaagcaatgagaaactcaaatgttagtctaatggaggctaagttatcattagctgaagacacaatgtttcacacttttgtgataaagtctaacaacgggtcggatccattgacgaaagagaagcttatagcagcgttttaccccgagaccagctcgacgcaaccgccattgccttcttctagttcacaggtctctggtgatatataagtttcacatgatggtgaagcttttgtctattcttgtttcagtatagataactttcaggttcaactagaaatagataaaatccttttttcttttctctttcttatagtgaaaggaatccggtttaagtatattcattaactttatttagaccattgattcacatatttgtatcttgggaaaatatttcctatactttagaaaatcaaataaagtatgaaagatatttgacc

SEQ ID NO: 5279 - protein, 566 aa, Arabidopsis thaliana
MNMSDLGWDDEDKSVVSAVLGHLASDFLRANSNSNQNLFLVMGTDDTLNKKLSSLVDWPNSENFSWNYAIFWQQTMSRSGQQVLGWGDGCCREPNEEEESKVVRSYNFNNMGAEEETWQDMRKRVLQKLHRLFGGSDEDNYALSLEKVTATEIFFLASMYFFFNHGEGGPGRCYSSGKHVWLSDAVNSESDYCFRSFMAKSAGIRTIVMVPTDAGVLELGSVWSLPENIGLVKSVQALFMRRVTQPVMVTSNTNMTGGIHKLFGQDLSGAHAYPKKLEVRRNLDERFTPQSWEGYNNNKGPTFGYTPQRDDVKVLENVNMVVDNNNYKTQIEFAGSSVAASSNPSTNTQQEKSESCTEKRPVSLLAGAGIVSVVDEKRPRKRGRKPANGREEPLNHVEVERQRREKLNQRFYALRSVVPNISKMDKASLLGDAISYIKELQEKVKIMEDERVGTDKSLSESNTITVEESPEVDIQAMNEEVVVRVISPLDSHPASRIIQAMRNSNVSLMEAKLSLAEDTMFHTFVIKSNNGSDPLTKEKLIAAFYPETSSTQPPLPSSSSQVSGDI

SEQ ID NO: 5280 - protein, 564 aa, Arabidopsis thaliana
MSDLGWDDEDKSVVSAVLGHLASDFLRANSNSNQNLFLVMGTDDTLNKKLSSLVDWPNSENFSWNYAIFWQQTMSRSGQQVLGWGDGCCREPNEEEESKVVRSYNFNNMGAEEETWQDMRKRVLQKLHRLFGGSDEDNYALSLEKVTATEIFFLASMYFFFNHGEGGPGRCYSSGKHVWLSDAVNSESDYCFRSFMAKSAGIRTIVMVPTDAGVLELGSVWSLPENIGLVKSVQALFMRRVTQPVMVTSNTNMTGGIHKLFGQDLSGAHAYPKKLEVRRNLDERFTPQSWEGYNNNKGPTFGYTPQRDDVKVLENVNMVVDNNNYKTQIEFAGSSVAASSNPSTNTQQEKSESCTEKRPVSLLAGAGIVSVVDEKRPRKRGRKPANGREEPLNHVEVERQRREKLNQRFYALRSVVPNISKMDKASLLGDAISYIKELQEKVKIMEDERVGTDKSLSESNTITVEESPEVDIQAMNEEVVVRVISPLDSHPASRIIQAMRNSNVSLMEAKLSLAEDTMFHTFVIKSNNGSDPLTKEKLIAAFYPETSSTQPPLPSSSSQVSGDI

SEQ ID NO: 5281 - protein, 525 aa, Arabidopsis thaliana
MGTDDTLNKKLSSLVDWPNSENFSWNYAIFWQQTMSRSGQQVLGWGDGCCREPNEEEESKVVRSYNFNNMGAEEETWQDMRKRVLQKLHRLFGGSDEDNYALSLEKVTATEIFFLASMYFFFNHGEGGPGRCYSSGKHVWLSDAVNSESDYCFRSFMAKSAGIRTIVMVPTDAGVLELGSVWSLPENIGLVKSVQALFMRRVTQPVMVTSNTNMTGGIHKLFGQDLSGAHAYPKKLEVRRNLDERFTPQSWEGYNNNKGPTFGYTPQRDDVKVLENVNMVVDNNNYKTQIEFAGSSVAASSNPSTNTQQEKSESCTEKRPVSLLAGAGIVSVVDEKRPRKRGRKPANGREEPLNHVEVERQRREKLNQRFYALRSVVPNISKMDKASLLGDAISYIKELQEKVKIMEDERVGTDKSLSESNTITVEESPEVDIQAMNEEVVVRVISPLDSHPASRIIQAMRNSNVSLMEAKLSLAEDTMFHTFVIKSNNGSDPLTKEKLIAAFYPETSSTQPPLPSSSSQVSGDI

SEQ ID NO: 5282 - DNA, 1892 bp, Arabidopsis thaliana
agagtattcaaaaggctgatgaaatttaagttagggtatctctttatacggttcagagcttaagccggccactacagcgaccgacttctctcgccgtcgattaccggatcgtctccgttattgcgtgcttcatttaggtgtatcaagtaagcaatgagttcttcaccgtcgttggagattttagttagagaagctgaaggcttcactgtgtggaatggtcctccatttactaatggccagcccactctcaagcttgaacgagtttcatgctctaacacgaagttcagtgttgatggatcgaagttaatggcgatgaaatctgatggagttattagtatctatgatgccaccagcttgacagaagtgcggtcattcactatagcaaatgttacagctgctgagctatctccatgtgggacttatcttcagacttttcaaaaacccactactccccaagagaagaatgtctccatttggaatactgagacaggggatctagcacacagtcattaccaaaaatccattactaaagcctcatggccatcaattcgcttctgtcctgatgaatcttctgcgtgccggttagctacaaatgaggtccaattctttgacccgaaagatttctcgaaaggaataacatcccggatcagagttcctgggattgctgcatttgagctttctaaaacgccagcttcccatgttgctgtgtttgttccagaatcaaaggggagtccaggcagtgtccagatttttggatgtggggaagaattgcagagccagccaagtgctcgacgtagctttttccgatgttcctctgtgcagtttagttggaaccatggttccactggactcctagtggttgtacaatcagatgttgacaagaccaaccaaagttactatggggaaacgaagctacactaccttacaatagacggcacacatgagggccttgttccattacgtaaagaaggaccagttcatgatgttcagtggtccttttcgggttcagagtttgctgttgtatatggctttatgcctgcttgtgtgacaatctttgacaagaattgtaaaccattgatggaacttggcgaaggtccttataacactcttcgatggaacccaaaagggagagttttatgtgtggctggattcggtaacttgcctggtgatatggccttctgggatgttgtaaataagaagcagctaggaagtaataaagccgagtggtctgtgacaagtgaatggtctccagacgggcgttatttcttgactgcctcaacagcaccaagacgtcaaattgacaatgggatgaaaatcttcaactacgacggaaagcgttattataagaagatgtttgagaggctgtatcaggctgaatggaaaccagagtctccagagaggttcggtgacatcagtgaacttatcaagtcagttgaatcattgaaactcggcgagggcaaatcgcaaggacaaggatcagctcagaagaaaactattgcccccaatcctattgcacagaaaccggccgcatatcgacctccgcatgctaagcatgcagctgctgttcaagccgagttacttggaataagcacaacaggagagatgagcaagaacgctcttaaaaacaagaagaagagggagaataagaaagcggctgcggctgcggctgctgcttctggatctaacaacgcctgattgaagaaatcacactccgatatcaaattcaatggagatcacagttttgaaattcatttgatggtaataaagattctatagaagacagaaaacattatgtaaacagttgttttttttttgtcaaacatttttgttgtcagttacccgccaaaatcatttgaagcctaagaagaaagaagccgaaattttaccaggct

SEQ ID NO: 5283 - protein, 513 aa, Arabidopsis thaliana
MSSSPSLEILVREAEGFTVWNGPPFTNGQPTLKLERVSCSNTKFSVDGSKLMAMKSDGVISIYDATSLTEVRSFTIANVTAAELSPCGTYLQTFQKPTTPQEKNVSIWNTETGDLAHSHYQKSITKASWPSIRFCPDESSACRLATNEVQFFDPKDFSKGITSRIRVPGIAAFELSKTPASHVAVFVPESKGSPGSVQIFGCGEELQSQPSARRSFFRCSSVQFSWNHGSTGLLVVVQSDVDKTNQSYYGETKLHYLTIDGTHEGLVPLRKEGPVHDVQWSFSGSEFAVVYGFMPACVTIFDKNCKPLMELGEGPYNTLRWNPKGRVLCVAGFGNLPGDMAFWDVVNKKQLGSNKAEWSVTSEWSPDGRYFLTASTAPRRQIDNGMKIFNYDGKRYYKKMFERLYQAEWKPESPERFGDISELIKSVESLKLGEGKSQGQGSAQKKTIAPNPIAQKPAAYRPPHAKHAAAVQAELLGISTTGEMSKNALKNKKKRENKKAAAAAAAASGSNNA

SEQ ID NO: 5284 - protein, 462 aa, Arabidopsis thaliana
MAMKSDGVISIYDATSLTEVRSFTIANVTAAELSPCGTYLQTFQKPTTPQEKNVSIWNTETGDLAHSHYQKSITKASWPSIRFCPDESSACRLATNEVQFFDPKDFSKGITSRIRVPGIAAFELSKTPASHVAVFVPESKGSPGSVQIFGCGEELQSQPSARRSFFRCSSVQFSWNHGSTGLLVVVQSDVDKTNQSYYGETKLHYLTIDGTHEGLVPLRKEGPVHDVQWSFSGSEFAVVYGFMPACVTIFDKNCKPLMELGEGPYNTLRWNPKGRVLCVAGFGNLPGDMAFWDVVNKKQLGSNKAEWSVTSEWSPDGRYFLTASTAPRRQIDNGMKIFNYDGKRYYKKMFERLYQAEWKPESPERFGDISELIKSVESLKLGEGKSQGQGSAQKKTIAPNPIAQKPAAYRPPHAKHAAAVQAELLGISTTGEMSKNALKNKKKRENKKAAAAAAAASGSNNA

SEQ ID NO: 5285 - protein, 460 aa, Arabidopsis thaliana
MKSDGVISIYDATSLTEVRSFTIANVTAAELSPCGTYLQTFQKPTTPQEKNVSIWNTETGDLAHSHYQKSITKASWPSIRFCPDESSACRLATNEVQFFDPKDFSKGITSRIRVPGIAAFELSKTPASHVAVFVPESKGSPGSVQIFGCGEELQSQPSARRSFFRCSSVQFSWNHGSTGLLVVVQSDVDKTNQSYYGETKLHYLTIDGTHEGLVPLRKEGPVHDVQWSFSGSEFAVVYGFMPACVTIFDKNCKPLMELGEGPYNTLRWNPKGRVLCVAGFGNLPGDMAFWDVVNKKQLGSNKAEWSVTSEWSPDGRYFLTASTAPRRQIDNGMKIFNYDGKRYYKKMFERLYQAEWKPESPERFGDISELIKSVESLKLGEGKSQGQGSAQKKTIAPNPIAQKPAAYRPPHAKHAAAVQAELLGISTTGEMSKNALKNKKKRENKKAAAAAAAASGSNNA

SEQ ID NO: 5286 - DNA, 1459 bp, Arabidopsis thaliana
atatttgattccttttctctctcatacgatctgcacaccactactaagaacaacagagctagagagacttgcaataattgtaaaacatgattggaacaagcttccccgaggatcttgattgtggcaacttctttgacaacatggatgatctcatggactttcccggtggagatatcgatgtcggtttcggcataggtgactccgactctttccctaccatctggaccactcatcacgacacgtggcccgccgcttctgatcctctcttctcttccaacaccaactctgattcatcacctgagctctatgttccgtttgaggacattgttaaggtggaaagacctccaacctttgtagaggaaacattggttgagaagaaggaagattcgttttcgacaaacactgattcatcatcttctcatagccaattcaggagctcaagtccagtgtcggttctcgagagcagctcctcctcgtctaaaaccaccaacacaacctcccttgttctccctggaaagcacggtcgtccacgcacaaaacgccctcgtccacctgtccaggataaagatagagtcaaagacaatgtgtgcggtggtgactcgcgcctcatcattagaataccgaaacagtttctctctgatcacaacaagatgatcaacaagaagaagaagaagaaggccaagattacttcttcctcttcttcgtccgggattgatcttgaagtcaatggaaacaacgtcgattcgtattcttcagagcaatatccgcttaggaaatgtatgcactgtgaggtcaccaagactccacagtggaggcttggtccaatgggtccaaagacactttgcaatgcgtgcggtgtacgttacaaatcagggaggcttttcccggagtaccgtccagctgctagtccaacatttactccagctcttcactcaaactcacacaagaaagtggctgaaatgagaaacaagagatgcagtgatggtagctacataaccgaagagaatgatctgcaaggactgattccgaacaatgcctacattggcgtagactaaaacctagagaagatgattcgatttccatgcgttgaagtgattagatatgccaggagtaggaaagagtcagtgagaagaaaagtttttagctttagaagagatgaaggaagagagcaatcaattggagggattaaaagttagatgagaattgattgtgtttgtattattttgtatttgtagtgtgaatgggcaaaaaactcttgaaacagaggaaaagtaagttgaggaagagcagaagattttgaagacattagagaatcattaggtgttgagtattacattaaatcttcctcttcttcttttgttctttcaattctttgtatttttattgtgaggattctcttttttttttttttttttgtagttgatttgtttattgtatctgataaaaagaatgttacttg

SEQ ID NO: 5287 - protein, 322 aa, Arabidopsis thaliana
MIGTSFPEDLDCGNFFDNMDDLMDFPGGDIDVGFGIGDSDSFPTIWTTHHDTWPAASDPLFSSNTNSDSSPELYVPFEDIVKVERPPTFVEETLVEKKEDSFSTNTDSSSSHSQFRSSSPVSVLESSSSSSKTTNTTSLVLPGKHGRPRTKRPRPPVQDKDRVKDNVCGGDSRLIIRIPKQFLSDHNKMINKKKKKKAKITSSSSSSGIDLEVNGNNVDSYSSEQYPLRKCMHCEVTKTPQWRLGPMGPKTLCNACGVRYKSGRLFPEYRPAASPTFTPALHSNSHKKVAEMRNKRCSDGSYITEENDLQGLIPNNAYIGVD

SEQ ID NO: 5288 - protein, 304 aa, Arabidopsis thaliana
MDDLMDFPGGDIDVGFGIGDSDSFPTIWTTHHDTWPAASDPLFSSNTNSDSSPELYVPFEDIVKVERPPTFVEETLVEKKEDSFSTNTDSSSSHSQFRSSSPVSVLESSSSSSKTTNTTSLVLPGKHGRPRTKRPRPPVQDKDRVKDNVCGGDSRLIIRIPKQFLSDHNKMINKKKKKKAKITSSSSSSGIDLEVNGNNVDSYSSEQYPLRKCMHCEVTKTPQWRLGPMGPKTLCNACGVRYKSGRLFPEYRPAASPTFTPALHSNSHKKVAEMRNKRCSDGSYITEENDLQGLIPNNAYIGVD

SEQ ID NO: 5289 - protein, 300 aa, Arabidopsis thaliana
MDFPGGDIDVGFGIGDSDSFPTIWTTHHDTWPAASDPLFSSNTNSDSSPELYVPFEDIVKVERPPTFVEETLVEKKEDSFSTNTDSSSSHSQFRSSSPVSVLESSSSSSKTTNTTSLVLPGKHGRPRTKRPRPPVQDKDRVKDNVCGGDSRLIIRIPKQFLSDHNKMINKKKKKKAKITSSSSSSGIDLEVNGNNVDSYSSEQYPLRKCMHCEVTKTPQWRLGPMGPKTLCNACGVRYKSGRLFPEYRPAASPTFTPALHSNSHKKVAEMRNKRCSDGSYITEENDLQGLIPNNAYIGVD

SEQ ID NO: 5290 - DNA, 1844 bp, Arabidopsis thaliana
aacggcttgaaccaccggcaatagccgcgggattgcggcggaggattaatcaaaaaacgcaccacctgaaatctctctgtgtacgctaatggctccgacgatattcgttgatcactgtatcctcacaacaacgtttgtcgcatccttgttcgcgtttctgcttctatacgtcctgcgtcgccggagcaagacgattcatgggtctgtcaatgtccgtaacggaaccctaacggtgaaatctggaacagacgttgatattatcattgtcggtgctggtgtcgccggcgctgcccttgctcataccctcggcaaggaaggaagaagagttcacgttatagaaagagacttaacggagcctgatcgaattgtcggtgaattacttcagcctggtggttacttgaagttaatcgaactcgggcttgaagattgtgtgaaggatatagatgcgcagagagttcttggttatgctctctttaaagatgggaaacacactaaactctcttacccgttggatcagtttgattccgatgttgcgggtcgtagctttcacaatgggagatttgtgcagaggatgcgagagaaagcttctttacttcccaatgttcgaatggagcaaggaacagtgacatcgttggtggaagaaaacggaataatcaaaggtgttcaatacaaaaccaaagatggccaagagcttaagtcatttgctcctctcactattgtatgtgatggttgtttctccaacttgcgtcgatctctctgcaaacctaaggtggaggtgccatccaatttcgttggtctggtattggagaattgcgaactcccgtttccgaaccacgggcacgttgttcttggcgatccgtcacccattttattctatcctatcagcagctcggaagtccgttgcttggtagatgtaccaggttcaaaacttccttcagttgcaagtggtgaaatggctcaccatctcaaaacaatggttgcaccgcaggtaccacctcagatccgtgatgctttcatttctgcagtcgaaaaaggtaacataagaacaatgccgaacagaagcatgccagctgatccaattcatacacctggagctttgcttttaggtgatgcgttcaacatgcgccatcctcttactggaggtggtatgaccgttgcattgtctgatatagtcatcctccgtgatctattgaacccgctcgtcgacttaaccaacaaagagtccttatccaaatacatagaatcattctacacattgcggaaaccggttgcttcgactatcaatacactcgcaggcgctctttacaaagtctttttagcatctccagacgatgcaagaagcgaaatgcgtcgagcttgcttcgattatcttagcctcggaggggtttgctcatcaggacctgtggctttgctatctggtttgaacccacgacctatgagccttgttcttcatttcttcgcagttgcgattttcggggttggtcgtttgcttgtacctctcccgtccgttaaacggttatggcttggagctagactaatctcgagtgcttcagggatcatatttccaataataaaagcagaaggtgtgaggcaaatgttcttccctcgaactattcctgccatttacagagctcctcctactccttcttcttcttctcctcaatgatgaatcagaaacattgctttgaagatttctcaggtgttgtaagaatagctactttgcgattatggtacgaatgaaccgggtggtttgatttggtttttacgaactttggtttgaaatttgtactcagtccattacagacaaaatcatcaagtaaataagtatctctttgttaattgtt

SEQ ID NO: 5291 - protein, 525 aa, Arabidopsis thaliana
MAPTIFVDHCILTTTFVASLFAFLLLYVLRRRSKTIHGSVNVRNGTLTVKSGTDVDIIIVGAGVAGAALAHTLGKEGRRVHVIERDLTEPDRIVGELLQPGGYLKLIELGLEDCVKDIDAQRVLGYALFKDGKHTKLSYPLDQFDSDVAGRSFHNGRFVQRMREKASLLPNVRMEQGTVTSLVEENGIIKGVQYKTKDGQELKSFAPLTIVCDGCFSNLRRSLCKPKVEVPSNFVGLVLENCELPFPNHGHVVLGDPSPILFYPISSSEVRCLVDVPGSKLPSVASGEMAHHLKTMVAPQVPPQIRDAFISAVEKGNIRTMPNRSMPADPIHTPGALLLGDAFNMRHPLTGGGMTVALSDIVILRDLLNPLVDLTNKESLSKYIESFYTLRKPVASTINTLAGALYKVFLASPDDARSEMRRACFDYLSLGGVCSSGPVALLSGLNPRPMSLVLHFFAVAIFGVGRLLVPLPSVKRLWLGARLISSASGIIFPIIKAEGVRQMFFPRTIPAIYRAPPTPSSSSPQ

SEQ ID NO: 5292 - protein, 364 aa, Arabidopsis thaliana
MREKASLLPNVRMEQGTVTSLVEENGIIKGVQYKTKDGQELKSFAPLTIVCDGCFSNLRRSLCKPKVEVPSNFVGLVLENCELPFPNHGHVVLGDPSPILFYPISSSEVRCLVDVPGSKLPSVASGEMAHHLKTMVAPQVPPQIRDAFISAVEKGNIRTMPNRSMPADPIHTPGALLLGDAFNMRHPLTGGGMTVALSDIVILRDLLNPLVDLTNKESLSKYIESFYTLRKPVASTINTLAGALYKVFLASPDDARSEMRRACFDYLSLGGVCSSGPVALLSGLNPRPMSLVLHFFAVAIFGVGRLLVPLPSVKRLWLGARLISSASGIIFPIIKAEGVRQMFFPRTIPAIYRAPPTPSSSSPQ

SEQ ID NO: 5293 - protein, 352 aa, Arabidopsis thaliana
MEQGTVTSLVEENGIIKGVQYKTKDGQELKSFAPLTIVCDGCFSNLRRSLCKPKVEVPSNFVGLVLENCELPFPNHGHVVLGDPSPILFYPISSSEVRCLVDVPGSKLPSVASGEMAHHLKTMVAPQVPPQIRDAFISAVEKGNIRTMPNRSMPADPIHTPGALLLGDAFNMRHPLTGGGMTVALSDIVILRDLLNPLVDLTNKESLSKYIESFYTLRKPVASTINTLAGALYKVFLASPDDARSEMRRACFDYLSLGGVCSSGPVALLSGLNPRPMSLVLHFFAVAIFGVGRLLVPLPSVKRLWLGARLISSASGIIFPIIKAEGVRQMFFPRTIPAIYRAPPTPSSSSPQ

SEQ ID NO: 5294 - DNA, 1645 bp, Arabidopsis thaliana
aaagaaaaaaaaaagaaagctttttgggaacataaacaccatcgaaggagggtgggaggtgttttatgttcatgggtggagcttcttggccaacctgaccccattcatcatatcattacccactttcttctcctaaattattctctcttatctctctctctctctttttattttctttctttcttaattcatctaaactctctctgcttttgcttttcgtaattccttacatttcactcaatattaatccccagaatctccgatccacccacaaatttagcaattttctgagatttgatcatttgggtcaccaaaaaatcttgtctttttgatctgggtttaacgccaataacatatgggaaacattagcagcagcggtggtgaaggtagacgccgtcgacggcgaaaccatacggcggctccaccaccacctcctcctcctccttcttcttctcttcctccaccacctctacctacagaaatccaagctaatcccatcgttttcgctgccgttactccctatcctaatcctaatcctaatccggtttaccagtaccctgcttcttactaccaccatcctcccccgggagccatgcctcttccgccgtacgaccaccacctccaacatcatccaccgcatccttaccacaaccactcttgggctcccgtggcgatggccagatacccttatgctggtcacatgatggctcaaccgactccttacgttgaacaccagaaagccgtcacgattcgtaacgacgttaatctcaagaaggagtctcttaggcttgaacccgacccggataatccgggtcgctttctcgtctcctttacgtttgatgcaaccgtctccggaaggattagtgtcattttctttgctaaagaatccgaagattgcaaactcacagcgacaaaggaagatatactgccacctatcactctagatttcgagaaaggacttggtcagaagtttaaacaatcatctggttctggtatagacttttcggtctttgaggacgttgagctgttcaaagcggccgcagacacagagatctatccattagcggttaaggcagaagcagctccctcaggtggtgagaatgaagaagaagaaaggtcggggtcgaagaatgcgcagattactcaagcggtttatgagaaggataaaggagagattaagattagagtggtgaagcagatactatgggttaatggaacgagatatgagttgcaggagatttatgggattgggaatacagttgagggggatgatgattcagctgatgatgctaatgatcctggtaaagaatgtgttatatgtttgtctgaaccacgagacaccactgttcttccatgtcgacatatgtgtatgtgtagcggatgtgctaaggtattgaggtttcagacaaatcgatgccccatttgcaggcaacctgttgaaaggcttttggagataaaagttcacggtaacaacggaagcgggaataacaccggacagggagaaacagttgaacaagagtagctaaacacggccgagtatggattgaaatgccatcgaaatattagtagtatatgcatgtttgatccttgtatgttaacaacaaaatgtgtgattgtcaattcataatatagagattacgaaacc

SEQ ID NO: 5295 - protein, 388 aa, Arabidopsis thaliana
MGNISSSGGEGRRRRRRNHTAAPPPPPPPPSSSLPPPPLPTEIQANPIVFAAVTPYPNPNPNPVYQYPASYYHHPPPGAMPLPPYDHHLQHHPPHPYHNHSWAPVAMARYPYAGHMMAQPTPYVEHQKAVTIRNDVNLKKESLRLEPDPDNPGRFLVSFTFDATVSGRISVIFFAKESEDCKLTATKEDILPPITLDFEKGLGQKFKQSSGSGIDFSVFEDVELFKAAADTEIYPLAVKAEAAPSGGENEEEERSGSKNAQITQAVYEKDKGEIKIRVVKQILWVNGTRYELQEIYGIGNTVEGDDDSADDANDPGKECVICLSEPRDTTVLPCRHMCMCSGCAKVLRFQTNRCPICRQPVERLLEIKVHGNNGSGNNTGQGETVEQE

SEQ ID NO: 5296 - protein, 309 aa, Arabidopsis thaliana
MPLPPYDHHLQHHPPHPYHNHSWAPVAMARYPYAGHMMAQPTPYVEHQKAVTIRNDVNLKKESLRLEPDPDNPGRFLVSFTFDATVSGRISVIFFAKESEDCKLTATKEDILPPITLDFEKGLGQKFKQSSGSGIDFSVFEDVELFKAAADTEIYPLAVKAEAAPSGGENEEEERSGSKNAQITQAVYEKDKGEIKIRVVKQILWVNGTRYELQEIYGIGNTVEGDDDSADDANDPGKECVICLSEPRDTTVLPCRHMCMCSGCAKVLRFQTNRCPICRQPVERLLEIKVHGNNGSGNNTGQGETVEQE

SEQ ID NO: 5297 - protein, 282 aa, Arabidopsis thaliana
MARYPYAGHMMAQPTPYVEHQKAVTIRNDVNLKKESLRLEPDPDNPGRFLVSFTFDATVSGRISVIFFAKESEDCKLTATKEDILPPITLDFEKGLGQKFKQSSGSGIDFSVFEDVELFKAAADTEIYPLAVKAEAAPSGGENEEEERSGSKNAQITQAVYEKDKGEIKIRVVKQILWVNGTRYELQEIYGIGNTVEGDDDSADDANDPGKECVICLSEPRDTTVLPCRHMCMCSGCAKVLRFQTNRCPICRQPVERLLEIKVHGNNGSGNNTGQGETVEQE

SEQ ID NO: 5298 - DNA, 1900 bp, Arabidopsis thaliana
cctttcgtcttaaaccccacagcaaaaagccactctcctttctctctctctcttgttcctctgcatccatggccaccaagctcgacaccagtagcttacttttggccctcttgtccaaatgtagcctccttactcaaaccaatcttgctctctctctcctcgtagcctccctagcttctctcgctctttctctcttcttctggtctcatcccggaggacccgcatggggaaagtacttcctccaccgccgccgtcaaaccaccgtgatacccgggccaagaggcttaccttttgtcggaagcatgtctctcatgtcaaacactctggctcaccgttgcatagccgcaaccgcagagaaatttagagccgaacggttaatggcgtttagtttgggagaaactcgcgtgatcgtcacgtgcaatcctgatgtagctaaagagattctaaacagtccggttttcgctgaccgcccggttaaggaatcagcttattccctcatgtttaaccgtgctatcggtttcgctccttacggcgtttactggcgaaccttgagaaaaatcgcgtctaatcatcttttcagcccgaaacagattaaacgttccgaaacgcagagaagcgtgatcgcgaatcaaatcgtgaagtgtctcacaaaacagagtaacaccaaaggtctctgtttcgcacgtgacttgatcaaaacggcatcgcttaataacatgatgtgctctgttttcggaaaagaatacgagcttgaggaagagcatgaagaagtgagtgagctacgtgaattggtggaagaaggttatgatttactcggtacactgaattggaccgatcatctcccatggctctctgaatttgatcctcaaagaatccggtctagatgctctaatctcgtcccaaaagtaaaccggtttgtgaaccggattatctctgaccaccgtgaacaaactcgtgactcaccgagtgacttcgttgacgtattgctctctctcgatggtcctgataaattatccgaccctgatatcatcgccgttctatgggaaatgatattcagaggaactgacacggtggctgttttgatcgagtggattcttgctaggatggtccttcatccagatattcaatcgacggttcacaatgagcttgatcaaatcgtgggacgatcaagggctgtcgaagagtctgacgtggtgtctctagtatatctaacggctgtggtgaaagaagtcttgaggcttcacccgccaggcccactactctcatgggcccgtttagcaatcacagacacgatcatcgacggtcgtcgtgttccggcggggaccaccgcaatggtgaacatgtgggctattgcacacgatccacacgtgtgggagaatccgttggagtttaaacccgaacgttttgtagccaaggaaggtgaggttgagttctcggttcttgggtctgatttgaggcttgcaccgttcgggtccggtcgtcgggtttgccccgggaagaatcttggtttgaccaccgtgacgttttggactgcgacgcttttgcatgagtttgaatggctgacgccgtccgatgagaagaccgttgacttgtccgagaaactgaggctctcgtgtgagatggctaatcctcttgctgctaaattacgccccaggcgcagttttagtgtatgataagggtaaggctatacacagatacagtggtaactaaagcgaaggaaaattagtgtgaatttaaagcaaaagaataaaataaagaacaaagaaagtaaaggaaacaaaaaaaaagaatcatacaaaaaatactaataagaatggtaatgaagcttttatattaaactaacatcttgatacgtgttgtatatatgatgaaaacattaatgtcacaaagaaaagttaat

SEQ ID NO: 5299 - protein, 556 aa, Arabidopsis thaliana
FRLKPHSKKPLSFLSLSCSSASMATKLDTSSLLLALLSKCSLLTQTNLALSLLVASLASLALSLFFWSHPGGPAWGKYFLHRRRQTTVIPGPRGLPFVGSMSLMSNTLAHRCIAATAEKFRAERLMAFSLGETRVIVTCNPDVAKEILNSPVFADRPVKESAYSLMFNRAIGFAPYGVYWRTLRKIASNHLFSPKQIKRSETQRSVIANQIVKCLTKQSNTKGLCFARDLIKTASLNNMMCSVFGKEYELEEEHEEVSELRELVEEGYDLLGTLNWTDHLPWLSEFDPQRIRSRCSNLVPKVNRFVNRIISDHREQTRDSPSDFVDVLLSLDGPDKLSDPDIIAVLWEMIFRGTDTVAVLIEWILARMVLHPDIQSTVHNELDQIVGRSRAVEESDVVSLVYLTAVVKEVLRLHPPGPLLSWARLAITDTIIDGRRVPAGTTAMVNMWAIAHDPHVWENPLEFKPERFVAKEGEVEFSVLGSDLRLAPFGSGRRVCPGKNLGLTTVTFWTATLLHEFEWLTPSDEKTVDLSEKLRLSCEMANPLAAKLRPRRSFSV

SEQ ID NO: 5300 - protein, 534 aa, Arabidopsis thaliana
MATKLDTSSLLLALLSKCSLLTQTNLALSLLVASLASLALSLFFWSHPGGPAWGKYFLHRRRQTTVIPGPRGLPFVGSMSLMSNTLAHRCIAATAEKFRAERLMAFSLGETRVIVTCNPDVAKEILNSPVFADRPVKESAYSLMFNRAIGFAPYGVYWRTLRKIASNHLFSPKQIKRSETQRSVIANQIVKCLTKQSNTKGLCFARDLIKTASLNNMMCSVFGKEYELEEEHEEVSELRELVEEGYDLLGTLNWTDHLPWLSEFDPQRIRSRCSNLVPKVNRFVNRIISDHREQTRDSPSDFVDVLLSLDGPDKLSDPDIIAVLWEMIFRGTDTVAVLIEWILARMVLHPDIQSTVHNELDQIVGRSRAVEESDVVSLVYLTAVVKEVLRLHPPGPLLSWARLAITDTIIDGRRVPAGTTAMVNMWAIAHDPHVWENPLEFKPERFVAKEGEVEFSVLGSDLRLAPFGSGRRVCPGKNLGLTTVTFWTATLLHEFEWLTPSDEKTVDLSEKLRLSCEMANPLAAKLRPRRSFSV

SEQ ID NO: 5301 - protein, 456 aa, Arabidopsis thaliana
MSLMSNTLAHRCIAATAEKFRAERLMAFSLGETRVIVTCNPDVAKEILNSPVFADRPVKESAYSLMFNRAIGFAPYGVYWRTLRKIASNHLFSPKQIKRSETQRSVIANQIVKCLTKQSNTKGLCFARDLIKTASLNNMMCSVFGKEYELEEEHEEVSELRELVEEGYDLLGTLNWTDHLPWLSEFDPQRIRSRCSNLVPKVNRFVNRIISDHREQTRDSPSDFVDVLLSLDGPDKLSDPDIIAVLWEMIFRGTDTVAVLIEWILARMVLHPDIQSTVHNELDQIVGRSRAVEESDVVSLVYLTAVVKEVLRLHPPGPLLSWARLAITDTIIDGRRVPAGTTAMVNMWAIAHDPHVWENPLEFKPERFVAKEGEVEFSVLGSDLRLAPFGSGRRVCPGKNLGLTTVTFWTATLLHEFEWLTPSDEKTVDLSEKLRLSCEMANPLAAKLRPRRSFSV

SEQ ID NO: 5302 - DNA, 1408 bp, Arabidopsis thaliana
gaaaacaacaacagttttgatcactctgtctctcttactctatcttcttcccaagttcttgtcttttgatggccgaaaccctagaaccctccctcgtcggggaaatcgacacttctgcgcctttcgagtccgtgagagaagccgctactcactttggtggatttggtttctggaaaccttcttcccttaacatctccgaagcttctcagaacgaagttggtatggttttgaaagcgagtgagttagagaaggaactgattgagaaagaaggagaaactttgaaggtgttgaagtcacttgagtcgaccaaagccattgttgaagagctcaaatcaaagatacagaacaaggaggataaagaaaattgtgacatgaatgttttcaaggaattgaaccaagcaaagatgaatctgtgcaagacgacaaaagatttggctgctattcgcgtgtctgttgggttactaaacaagagattggaagaggaaagagctgcacttgagaagacacgagagagactaaactctgagaatgcagctgaaatgtccatggagattcagagactaagttatgaagctaaggaatttagtagaacaggagagaatgttcggtatgcggttaataaagctgtggctgagattgaacaaacgagaaacaagattgaagctgctgagatgcgtttgatcgctgctagaaagatgaaggaagctgctagagcggctgaagcagttgcaatcgctgaaatcaaggcggttacaagaagaggaagaaggagaagaagaggaggaaatggtgaggagactatgcaggaggagattcttgagacgattgatgaaacagcaagagaaatcagaagcagtaggaggacacttgaagaaggtttggccaaaatggaagcagaagaaggaaattggtggtggacagaacagaggaggatatcatcatgttcggctaagttcaagaaccctccttatatgatggatgtaaaaggtctgaatatgatgatgaatggtgatgggacatcatcctcagttgctgtcttgaaaccaacaatgtctattgggcagatacttagtaggaaactacttcttgctgatgagtcagcgatgatgatgaatgggagagtttcgttgggtcagattcttggaaagactaactttggagatagagagaaggaaaaaaggttcaatgggaagaggaagcggttcggattcgcaaacttgtctgtgatgttgaataaagagagtaagaagaagaataagaagaagaagatagctttgaacttaagttgttaaaagagtgattgaaatggtctaatctttacattaggacttgttgtttgtgtgttatctatttgttttcgatgtgtttattggtgtatgctaaatattgaaatgagatgtgatttgtt

SEQ ID NO: 5303 - protein, 407 aa, Arabidopsis thaliana
MAETLEPSLVGEIDTSAPFESVREAATHFGGFGFWKPSSLNISEASQNEVGMVLKASELEKELIEKEGETLKVLKSLESTKAIVEELKSKIQNKEDKENCDMNVFKELNQAKMNLCKTTKDLAAIRVSVGLLNKRLEEERAALEKTRERLNSENAAEMSMEIQRLSYEAKEFSRTGENVRYAVNKAVAEIEQTRNKIEAAEMRLIAARKMKEAARAAEAVAIAEIKAVTRRGRRRRRGGNGEETMQEEILETIDETAREIRSSRRTLEEGLAKMEAEEGNWWWTEQRRISSCSAKFKNPPYMMDVKGLNMMMNGDGTSSSVAVLKPTMSIGQILSRKLLLADESAMMMNGRVSLGQILGKTNFGDREKEKRFNGKRKRFGFANLSVMLNKESKKKNKKKKIALNLSC

SEQ ID NO: 5304 - protein, 356 aa, Arabidopsis thaliana
MVLKASELEKELIEKEGETLKVLKSLESTKAIVEELKSKIQNKEDKENCDMNVFKELNQAKMNLCKTTKDLAAIRVSVGLLNKRLEEERAALEKTRERLNSENAAEMSMEIQRLSYEAKEFSRTGENVRYAVNKAVAEIEQTRNKIEAAEMRLIAARKMKEAARAAEAVAIAEIKAVTRRGRRRRRGGNGEETMQEEILETIDETAREIRSSRRTLEEGLAKMEAEEGNWWWTEQRRISSCSAKFKNPPYMMDVKGLNMMMNGDGTSSSVAVLKPTMSIGQILSRKLLLADESAMMMNGRVSLGQILGKTNFGDREKEKRFNGKRKRFGFANLSVMLNKESKKKNKKKKIALNLSC

SEQ ID NO: 5305 - protein, 306 aa, Arabidopsis thaliana
MNVFKELNQAKMNLCKTTKDLAAIRVSVGLLNKRLEEERAALEKTRERLNSENAAEMSMEIQRLSYEAKEFSRTGENVRYAVNKAVAEIEQTRNKIEAAEMRLIAARKMKEAARAAEAVAIAEIKAVTRRGRRRRRGGNGEETMQEEILETIDETAREIRSSRRTLEEGLAKMEAEEGNWWWTEQRRISSCSAKFKNPPYMMDVKGLNMMMNGDGTSSSVAVLKPTMSIGQILSRKLLLADESAMMMNGRVSLGQILGKTNFGDREKEKRFNGKRKRFGFANLSVMLNKESKKKNKKKKIALNLSC

SEQ ID NO: 5306 - DNA, 1599 bp, Arabidopsis thaliana
aaaacaacaccacgaaatcaatcctctaatgtatttcttcaattcagtcttcttcttcttcaccaacccaatttcttttcttcaactctctcttctccccaaacccgacttctgatccgcatcgatttccatggcagccaacaccatttctctttccaacgtcgccgcctccaagaatctcaactcctttcaaagccgtgcctttattgctccaccaactatttttttccctgtggcttctgcaaagtctaaacctggggaactttctttatcttccacgactctttccaggtctcgtgtgcgcgccggtgctagccagctcatgaacgaaccgcttaacgatcaacgctccatctcttctcccactgtcgtcgaggttgatcttggtgaccggagttatccgatctatatcggcgccggcttgcttgatcactcagaacttcttcaaaggcatgttcacggaaagagagtgcttgtggtcaccaatgatcgagttgctcctctctacctggacaagactatagatgctttaaccagaggaaatccaaacgtgacagtggaaagtgtaattttgcctgatggagagaaatacaaagacatggatactctcatgaaagtcttcgacaaggccattgagtctcgcctagatagacgatgtacatttgttgcccttggaggcggtgtgataggcgatatgtgtggatatgctgctgcatcgtacctacgtggtgtcaatttcatccaaattcctaccactgttatggcacaggttgattcttctgtaggtggcaaaacaggcataaatcatcgtcttggaaagaatttgatcggtgcattttaccaaccacagtgtgtgctagtagacactgacacgttgaacacattgccagatagggagatggcatcaggcctagctgaagtgatcaagtacgggcttatcagggatgccgagttctttgaatggcaggagaagaacattgaggcattgctggcaagggatccagctgcattagcttttgctataaagcgatcatgtgaaaacaaggcagacgttgtatcacaagatgagaaagaaagcggcttgcgagcaaccttaaatttgggtcatacctttggccatgccatagaaactggctttggttatggagagtggctccatggagaagctgttgcagctggcacggtaatggcagtggacatgtcatatcgtcttggttggatcgatgaatcgattgttaagagagtgaacaagatcctagtacgggcgaaattgcctacaactccgccagagagcatgaccgtcagcatgttcaagtccataatggcggtggacaagaaagtggcagatggactgctgaggctgattcttctcaaaggcccgctgggaaactgcgtgttcactggagattatgatcgggaagcgttggatgccacgcttcgtgcattctccaaatcctgagcatttcatatttgagataattttggtgttgttttgttcacatacgcatatgtactcatatatactgaccttgtaactagctttgtggaatgtgataataatgagatattaaaagaagaaataccccgttattggacacc

SEQ ID NO: 5307 - protein, 442 aa, Arabidopsis thaliana
MAANTISLSNVAASKNLNSFQSRAFIAPPTIFFPVASAKSKPGELSLSSTTLSRSRVRAGASQLMNEPLNDQRSISSPTVVEVDLGDRSYPIYIGAGLLDHSELLQRHVHGKRVLVVTNDRVAPLYLDKTIDALTRGNPNVTVESVILPDGEKYKDMDTLMKVFDKAIESRLDRRCTFVALGGGVIGDMCGYAAASYLRGVNFIQIPTTVMAQVDSSVGGKTGINHRLGKNLIGAFYQPQCVLVDTDTLNTLPDREMASGLAEVIKYGLIRDAEFFEWQEKNIEALLARDPAALAFAIKRSCENKADVVSQDEKESGLRATLNLGHTFGHAIETGFGYGEWLHGEAVAAGTVMAVDMSYRLGWIDESIVKRVNKILVRAKLPTTPPESMTVSMFKSIMAVDKKVADGLLRLILLKGPLGNCVFTGDYDREALDATLRAFSKS

SEQ ID NO: 5308 - protein, 378 aa, Arabidopsis thaliana
MNEPLNDQRSISSPTVVEVDLGDRSYPIYIGAGLLDHSELLQRHVHGKRVLVVTNDRVAPLYLDKTIDALTRGNPNVTVESVILPDGEKYKDMDTLMKVFDKAIESRLDRRCTFVALGGGVIGDMCGYAAASYLRGVNFIQIPTTVMAQVDSSVGGKTGINHRLGKNLIGAFYQPQCVLVDTDTLNTLPDREMASGLAEVIKYGLIRDAEFFEWQEKNIEALLARDPAALAFAIKRSCENKADVVSQDEKESGLRATLNLGHTFGHAIETGFGYGEWLHGEAVAAGTVMAVDMSYRLGWIDESIVKRVNKILVRAKLPTTPPESMTVSMFKSIMAVDKKVADGLLRLILLKGPLGNCVFTGDYDREALDATLRAFSKS

SEQ ID NO: 5309 - protein, 286 aa, Arabidopsis thaliana
MDTLMKVFDKAIESRLDRRCTFVALGGGVIGDMCGYAAASYLRGVNFIQIPTTVMAQVDSSVGGKTGINHRLGKNLIGAFYQPQCVLVDTDTLNTLPDREMASGLAEVIKYGLIRDAEFFEWQEKNIEALLARDPAALAFAIKRSCENKADVVSQDEKESGLRATLNLGHTFGHAIETGFGYGEWLHGEAVAAGTVMAVDMSYRLGWIDESIVKRVNKILVRAKLPTTPPESMTVSMFKSIMAVDKKVADGLLRLILLKGPLGNCVFTGDYDREALDATLRAFSKS

SEQ ID NO: 5310 - DNA, 1502 bp, Arabidopsis thaliana
agatcacggaccgacgcttgctctgtgctcatcgttctcttcttcactttattcatggtggtttagttcatgattttggatgttttaagaactttttctactagaactcgaaatcttccaagttctggtttttattcgataagtactagtataatgcgagatatcaaagtcaaatctgattctaaggagtttctaacatcatctgatgaagaagaagaatcagtttccattagagtgtcgtcttcttcttccttgagtagtgttaaatcgacgcctgagattgagaaaaagtatgttcatcgagtttacgatgcgattgctcctcattttagctctactaggtttgctaagtggcctaaagttgctgcctttctcgaatcgttaccgtctggatcggtgattctcgatgccggttgcggtaacgggaagtatttggggttgaatcctagttgtttcttcataggttgtgatataagtcatcctttgattaaaatctgttcggataaagggcaagaggttttggttgcagatgctgttaatcttccttatagagaggagtttggcgatgcagcgatttcgatagcggttttgcatcatttgagtacagagaatagaaggaagaaagctattgaagaacttgttcgtgttgttaagcctggtggatttgttctcattactgtttgggctgctgaacaggaggatacatcgttgcttacgaaatggacacctttgtctgctaagtatgttgaggaatgggttggtccaggtagtccgatgaatagtcctcgtgtgaggaacaatccgttctttagtcttgagagtatcccagagactgaggtgagtacaaaggagcaaaaggttgagaacagtcagttcatcggtcttgaaagcattccagagagcgaggagagtacgagagagcagaaaggtgagagtattattccagaaaccaaagctagtatagtagagcaaaaggatgagaaatctgttgaggagtcattggaggctctgaagaagagtcaacaagagtactttgtgccatggcatttaccataccaccgtgctgaagtgagtggtgcatctgcgtctgcacttgcaagtgggcttgcaaagaaagatgatagaaaaggagctgttgtgtacaacagatactaccatgtctttagcgaaggcgaacttgaaaggttggcatctggagtaggcaatgcaatgatagttgatagatttttcgacaagtcgaattggtgtattgttcttcagaaagaagctttaaaccaagattgaactttggtttcaaacttatcaaatctttgtgatattggaactccattgcatatgtaatcggaaattattattgcatttttcatggttgtagtttgagattctgtggcagctcattttccctgcaatttgttgtctttaaggggttttgtattatgtgtaacacaaatcaaagaaagaatcttctctacatgataaacaaaatgtcagaaatatgattt

SEQ ID NO: 5311 - protein, 404 aa, Arabidopsis thaliana
MILDVLRTFSTRTRNLPSSGFYSISTSIMRDIKVKSDSKEFLTSSDEEEESVSIRVSSSSSLSSVKSTPEIEKKYVHRVYDAIAPHFSSTRFAKWPKVAAFLESLPSGSVILDAGCGNGKYLGLNPSCFFIGCDISHPLIKICSDKGQEVLVADAVNLPYREEFGDAAISIAVLHHLSTENRRKKAIEELVRVVKPGGFVLITVWAAEQEDTSLLTKWTPLSAKYVEEWVGPGSPMNSPRVRNNPFFSLESIPETEVSTKEQKVENSQFIGLESIPESEESTREQKGESIIPETKASIVEQKDEKSVEESLEALKKSQQEYFVPWHLPYHRAEVSGASASALASGLAKKDDRKGAVVYNRYYHVFSEGELERLASGVGNAMIVDRFFDKSNWCIVLQKEALNQD

SEQ ID NO: 5312 - protein, 376 aa, Arabidopsis thaliana
MRDIKVKSDSKEFLTSSDEEEESVSIRVSSSSSLSSVKSTPEIEKKYVHRVYDAIAPHFSSTRFAKWPKVAAFLESLPSGSVILDAGCGNGKYLGLNPSCFFIGCDISHPLIKICSDKGQEVLVADAVNLPYREEFGDAAISIAVLHHLSTENRRKKAIEELVRVVKPGGFVLITVWAAEQEDTSLLTKWTPLSAKYVEEWVGPGSPMNSPRVRNNPFFSLESIPETEVSTKEQKVENSQFIGLESIPESEESTREQKGESIIPETKASIVEQKDEKSVEESLEALKKSQQEYFVPWHLPYHRAEVSGASASALASGLAKKDDRKGAVVYNRYYHVFSEGELERLASGVGNAMIVDRFFDKSNWCIVLQKEALNQD

SEQ ID NO: 5313 - DNA, 1577 bp, Arabidopsis thaliana
aaaagctccgttattcaagattattccgataatgcagtcactctccaccccacacaccatctctcttcttctccccagaacctctccgtctcgtctttctccctctcttcactcccttgctttccccactcgattacggtctctttcctattcttctcaaacgtcgatcctccccgatgccggcgatgatttcattgtcggtgactgtctcgtctacgaggacggcgtcttcgaagacccttaccttgataaggaggtcactcaggttgcgaagcaggagcgcaagaagaatcggcgtggcggggctaagagattagatgaatccgagattgagcccgagaacctcgtgccagaggaatggagggatattcaggcggaggtgaatctgacgaagaaggacaagcgcaaaatagcgcaggagatggagttcggggttcgggtggagaagaagaggcaagggctaattccgctgaggaaagttgacttgaatgactttctcacgtacaaggaagccaagttggctcaattgaggcctgtcattctcgataaaccgggaaatttctccgacgacagtggagcgtcaagcgatggagagaccgctgtatcatctcccagcgagcgagtggctcctaagaaccctagatgggcagtttacggaaagggattcgaccacgttgccaagttcttcaatagcgacaagtacgatcccagcgacaagaaatccgacggccctcgaaagctgctttcaaaagaagagaagtttatgctcaatagccggaatcctgacctagccgttgccacatcaaaaaaatggcttcctcttcacacactggcagcatgtggagagttttatctggttgattccttgctaaagcacaatcttgatatcaatgcaaccgatgtgggcggcttgacagtacttcaccgagcaatcattggtaagaagcaggctattactaactacctgctgagggaatcggcaaatccatttgttcttgatgacgaaggtgcgaccttgatgcactatgctgtgcaaacagcatcagctcccacaataaaacttctcctactgtataacgctgatataaacgctcaggacagggacgggtggactccactgcacgttgcagtacaggccagaagaagcgacattgtaaagcttcttttgataaaaggggcggacatagaagtgaagaacaaggatgggttaactccgcttgggctttgcctctaccttggaagagagataaggacgtatgaggtgatgaagctgttgaaagagtttccacttagcagacacaagaagagattggtaacaacagatgaagatattgaatagtcctttcaatttcagcttgaagtacactcacttatgagaacctgagaaaaggagatggaggtaaaggtgatgattagggcattggaacctcggagtcggagtgggtccactgtctcacttccttaaatttggtttgctgttagtcttatccatcgattttggatatttatcacaacttgatccattcttaaagaaaatatctgaaaataaataaaaagtaatacatatatatatatat

SEQ ID NO: 5314 - protein, 445 aa, Arabidopsis thaliana
KAPLFKIIPIMQSLSTPHTISLLLPRTSPSRLSPSLHSLAFPTRLRSLSYSSQTSILPDAGDDFIVGDCLVYEDGVFEDPYLDKEVTQVAKQERKKNRRGGAKRLDESEIEPENLVPEEWRDIQAEVNLTKKDKRKIAQEMEFGVRVEKKRQGLIPLRKVDLNDFLTYKEAKLAQLRPVILDKPGNFSDDSGASSDGETAVSSPSERVAPKNPRWAVYGKGFDHVAKFFNSDKYDPSDKKSDGPRKLLSKEEKFMLNSRNPDLAVATSKKWLPLHTLAACGEFYLVDSLLKHNLDINATDVGGLTVLHRAIIGKKQAITNYLLRESANPFVLDDEGATLMHYAVQTASAPTIKLLLLYNADINAQDRDGWTPLHVAVQARRSDIVKLLLIKGADIEVKNKDGLTPLGLCLYLGREIRTYEVMKLLKEFPLSRHKKRLVTTDEDIE

SEQ ID NO: 5315 - protein, 435 aa, Arabidopsis thaliana
MQSLSTPHTISLLLPRTSPSRLSPSLHSLAFPTRLRSLSYSSQTSILPDAGDDFIVGDCLVYEDGVFEDPYLDKEVTQVAKQERKKNRRGGAKRLDESEIEPENLVPEEWRDIQAEVNLTKKDKRKIAQEMEFGVRVEKKRQGLIPLRKVDLNDFLTYKEAKLAQLRPVILDKPGNFSDDSGASSDGETAVSSPSERVAPKNPRWAVYGKGFDHVAKFFNSDKYDPSDKKSDGPRKLLSKEEKFMLNSRNPDLAVATSKKWLPLHTLAACGEFYLVDSLLKHNLDINATDVGGLTVLHRAIIGKKQAITNYLLRESANPFVLDDEGATLMHYAVQTASAPTIKLLLLYNADINAQDRDGWTPLHVAVQARRSDIVKLLLIKGADIEVKNKDGLTPLGLCLYLGREIRTYEVMKLLKEFPLSRHKKRLVTTDEDIE

SEQ ID NO: 5316 - protein, 305 aa, Arabidopsis thaliana
MEFGVRVEKKRQGLIPLRKVDLNDFLTYKEAKLAQLRPVILDKPGNFSDDSGASSDGETAVSSPSERVAPKNPRWAVYGKGFDHVAKFFNSDKYDPSDKKSDGPRKLLSKEEKFMLNSRNPDLAVATSKKWLPLHTLAACGEFYLVDSLLKHNLDINATDVGGLTVLHRAIIGKKQAITNYLLRESANPFVLDDEGATLMHYAVQTASAPTIKLLLLYNADINAQDRDGWTPLHVAVQARRSDIVKLLLIKGADIEVKNKDGLTPLGLCLYLGREIRTYEVMKLLKEFPLSRHKKRLVTTDEDIE

SEQ ID NO: 5317 - DNA, 1984 bp, Arabidopsis thaliana
aaaaagataaaatctcaaactttcttctaaaattcgttttccatttttcttcactctctttccggtgacgccatgaacgccgccgtgtttagtccttctgctttatctctccctatctccttctctaaaacccgatcctcttttctctccagaaagaagggcgtgaaaggagaatttagggtatttgctgtgtttggtgatgagagtggattagttgagaagaagagtcaatggagacctttgtttgatgtggaggatcctagatcaaaagctcctccttataaaggaaagtttttagatgttaatcaagctattgaagttgctaggtttgatattcaatacttggattggcgtgctcgtcaagatcttcttaccattatgattcttcatgacaaggttgttgatgtacttaatcctctagctcgtgagtacaagtccatcggtacagtgaagaaagaactagctggattgcaggaagaattatcgaaagcacaccaacaggttcatatatctgaagcaagggtttcgactgctttagacaagttagcccacatggaagaattggttaatgataggttgttacctggcagagttgtaacggaattagataaaccctcctcttcaaccactgcttctgctgtcgagttagatagggaaaagacaaacacgggtgcgaaaagcttgaatgtttctggtccggttccgccttatagtccacacttgaagaatttttggtatcccgttgctttcactgcagatctcaagcatgatacaatggtaccaattgaatgctttgaacaaccatgggttatctttaggggtgaagacgggaaaccaggatgtgtacggaatacatgtgcgcatagagcatgtcctcttgatcttggcacagtgaacgagggacgtattcaatgtccgtaccatggatgggaatactcaaccgatggagaatgtaagaagatgccgtctacaaagttactgaaggtgaagatcaaatcattaccttgtcttgaacaagaaggtatgatctggatttggcccggtgatgagccacctgcacctatacttccttctttacagcctccatcagggtttttaattcatgctgagcttgtaatggacctcccggtggaacacggtttacttctagataatctcttggatcttgctcatgccccattcactcatacatccacttttgcaaaaggctggagtgtcccaagtttggtgaagtttttaacacctacctcgggtctccaaggatactgggatccatatccaatcgatatggaatttaaaccaccgtgtattgttttatcgacaatcgggatatcaaaacccgggaaactagaaggcaaaagcacacagcagtgtgcaacacatcttcatcaactccatgtctgtttaccttcttctaaaaacaagacaagacttctataccgaatgtcactagactttgctcctatattaaagaatcttccattcatggaacatctgtggagacatttcgctgaacaggtcttaaacgaagatctacggctagttttaggacaacaagaacggatgttaaacggagcaaacatatggaatttaccagttgcttatgacaagctcggagttcggtatagactatggaggaacgcagtagatcgtggcgatgataaactacctttctccggctaactgttattaaagaaatctaatggaagtttttgcagctccttattcaccagcaacctcagacaagtgtaggttattaatctggtttattctcaccgaagaaagagctttgccgagtaaaagatctggagtttgtggattcatctaaaaaaccgatgaaacaaagaacttttgcgtagataaaaggacaacatccactgtaaatccaaaggagatatattgttattcatttttccctgtgtacagttcactctctatgagaaattgaatatcagttttccccactaaactaatgtcttctaag

SEQ ID NO: 5318 - protein, 536 aa, Arabidopsis thaliana
MNAAVFSPSALSLPISFSKTRSSFLSRKKGVKGEFRVFAVFGDESGLVEKKSQWRPLFDVEDPRSKAPPYKGKFLDVNQAIEVARFDIQYLDWRARQDLLTIMILHDKVVDVLNPLAREYKSIGTVKKELAGLQEELSKAHQQVHISEARVSTALDKLAHMEELVNDRLLPGRVVTELDKPSSSTTASAVELDREKTNTGAKSLNVSGPVPPYSPHLKNFWYPVAFTADLKHDTMVPIECFEQPWVIFRGEDGKPGCVRNTCAHRACPLDLGTVNEGRIQCPYHGWEYSTDGECKKMPSTKLLKVKIKSLPCLEQEGMIWIWPGDEPPAPILPSLQPPSGFLIHAELVMDLPVEHGLLLDNLLDLAHAPFTHTSTFAKGWSVPSLVKFLTPTSGLQGYWDPYPIDMEFKPPCIVLSTIGISKPGKLEGKSTQQCATHLHQLHVCLPSSKNKTRLLYRMSLDFAPILKNLPFMEHLWRHFAEQVLNEDLRLVLGQQERMLNGANIWNLPVAYDKLGVRYRLWRNAVDRGDDKLPFSG

SEQ ID NO: 5319 - protein, 434 aa, Arabidopsis thaliana
MILHDKVVDVLNPLAREYKSIGTVKKELAGLQEELSKAHQQVHISEARVSTALDKLAHMEELVNDRLLPGRVVTELDKPSSSTTASAVELDREKTNTGAKSLNVSGPVPPYSPHLKNFWYPVAFTADLKHDTMVPIECFEQPWVIFRGEDGKPGCVRNTCAHRACPLDLGTVNEGRIQCPYHGWEYSTDGECKKMPSTKLLKVKIKSLPCLEQEGMIWIWPGDEPPAPILPSLQPPSGFLIHAELVMDLPVEHGLLLDNLLDLAHAPFTHTSTFAKGWSVPSLVKFLTPTSGLQGYWDPYPIDMEFKPPCIVLSTIGISKPGKLEGKSTQQCATHLHQLHVCLPSSKNKTRLLYRMSLDFAPILKNLPFMEHLWRHFAEQVLNEDLRLVLGQQERMLNGANIWNLPVAYDKLGVRYRLWRNAVDRGDDKLPFSG

SEQ ID NO: 5320 - protein, 376 aa, Arabidopsis thaliana
MEELVNDRLLPGRVVTELDKPSSSTTASAVELDREKTNTGAKSLNVSGPVPPYSPHLKNFWYPVAFTADLKHDTMVPIECFEQPWVIFRGEDGKPGCVRNTCAHRACPLDLGTVNEGRIQCPYHGWEYSTDGECKKMPSTKLLKVKIKSLPCLEQEGMIWIWPGDEPPAPILPSLQPPSGFLIHAELVMDLPVEHGLLLDNLLDLAHAPFTHTSTFAKGWSVPSLVKFLTPTSGLQGYWDPYPIDMEFKPPCIVLSTIGISKPGKLEGKSTQQCATHLHQLHVCLPSSKNKTRLLYRMSLDFAPILKNLPFMEHLWRHFAEQVLNEDLRLVLGQQERMLNGANIWNLPVAYDKLGVRYRLWRNAVDRGDDKLPFSG

SEQ ID NO: 5321 - DNA, 1813 bp, Arabidopsis thaliana
gtgtctgttacaggtgaatgaacccaacaaaaatcttcgacgagcatcttctgctttcttcatctctgaatgatcaatttctagaatcagatcggatatttcgatgaagaatcgttctttagggttttgggcgatcggggttttgctcatcggaagcttgatcggagctacggaaggctcgattcatgagtacaacaacgaaaagttcactgcaaaattcaatgctcgcttcttccatggtggtagcgaaggtctttacgcttccaaatctcaagatctaaactcttcttcttcttctgataattcttttaaaggcaagtcctttataaggtttgatgatgtaacatttgtgaggacaaaggaatctgctagtaaacagaatgcaatgcagtcaacttcaggattagtggaagcaattatacttgaggtaaaagaccgtgatagaatcggtggtacttttctcaaatccgaagtgatttgttgcacgccggagctagctgatactggatcttgtagtcttggggaagttatcattaagagagagtctaatgatgttgagtggccaagacagatcaagacattctttaaagggaataagactgaagttaacatgtcccctgaaactgtggttatcaataagactgggatgtattatctttatttcatgatatgtgacccggaattggatggtactaggatcaaggggagaacagtttggaagaaccctgatggttatttacctggaaaggttgctcctttaatgaacgtttttggctttatgtcgttagcgtatattttgcttggtctagtttggtttgtgaggtttgttcagttttggaaggatataattcagttgcattatcatatcactttggttattgctcttggtatgtgtgaaatggctgttcgatactttgagtatgttaattttaactccactgggatgaggccaatggatgttaccctatgggcggtgaccttttcttctataaagaagacgctttctaggcttcttcttctggtagtctctatgggttatggtgttgtaaagcctacccttggtggtataacctcgaggatacttctacttggagtcatatattttgttgcaacagaggctcttgagttggttgagcatttgggaaacatcaatgacttttcgggaaagacgatgatagttttggttattcccgtggcattactggatgcttgctttattctgtggattttctcatcattggcaagaacacttgagaaacttcagattaagagaaacatggccaagcttgagctttataggaacttcaccaatgcactcgctatctctgttctgctctctatcgcttggattggttttgagctatacttcaacggaactgaccctctaatcgaactctggcgaatggcgtggatcattccagctttttggaatttactctcttatggtctgttagcagtcatatgcatcctttgggctccatcaaataatcctacaaggtactcatacttagcggaaacaggggatgagtttgaagaggaaggtatctcattgacaggtagtggaattaagagtacagaagatgttgaaaggaatgaacttctatttgggcttccagacgacgttgaagagggcaaacgtgagtaagctccagatagcaagcgttagatagtccatacctcgccgagtagtttttagtgtatgtaaccttatgtcttttatccgttgtacctgagtaagttgtttactgacctttaaggacttgtttaccagatcgaagttcttttagtcttatagaaagatttacagactgct

SEQ ID NO: 5322 - protein, 513 aa, Arabidopsis thaliana
MKNRSLGFWAIGVLLIGSLIGATEGSIHEYNNEKFTAKFNARFFHGGSEGLYASKSQDLNSSSSSDNSFKGKSFIRFDDVTFVRTKESASKQNAMQSTSGLVEAIILEVKDRDRIGGTFLKSEVICCTPELADTGSCSLGEVIIKRESNDVEWPRQIKTFFKGNKTEVNMSPETVVINKTGMYYLYFMICDPELDGTRIKGRTVWKNPDGYLPGKVAPLMNVFGFMSLAYILLGLVWFVRFVQFWKDIIQLHYHITLVIALGMCEMAVRYFEYVNFNSTGMRPMDVTLWAVTFSSIKKTLSRLLLLVVSMGYGVVKPTLGGITSRILLLGVIYFVATEALELVEHLGNINDFSGKTMIVLVIPVALLDACFILWIFSSLARTLEKLQIKRNMAKLELYRNFTNALAISVLLSIAWIGFELYFNGTDPLIELWRMAWIIPAFWNLLSYGLLAVICILWAPSNNPTRYSYLAETGDEFEEEGISLTGSGIKSTEDVERNELLFGLPDDVEEGKRE

SEQ ID NO: 5323 - protein, 419 aa, Arabidopsis thaliana
MQSTSGLVEAIILEVKDRDRIGGTFLKSEVICCTPELADTGSCSLGEVIIKRESNDVEWPRQIKTFFKGNKTEVNMSPETVVINKTGMYYLYFMICDPELDGTRIKGRTVWKNPDGYLPGKVAPLMNVFGFMSLAYILLGLVWFVRFVQFWKDIIQLHYHITLVIALGMCEMAVRYFEYVNFNSTGMRPMDVTLWAVTFSSIKKTLSRLLLLVVSMGYGVVKPTLGGITSRILLLGVIYFVATEALELVEHLGNINDFSGKTMIVLVIPVALLDACFILWIFSSLARTLEKLQIKRNMAKLELYRNFTNALAISVLLSIAWIGFELYFNGTDPLIELWRMAWIIPAFWNLLSYGLLAVICILWAPSNNPTRYSYLAETGDEFEEEGISLTGSGIKSTEDVERNELLFGLPDDVEEGKRE

SEQ ID NO: 5324 - protein, 344 aa, Arabidopsis thaliana
MSPETVVINKTGMYYLYFMICDPELDGTRIKGRTVWKNPDGYLPGKVAPLMNVFGFMSLAYILLGLVWFVRFVQFWKDIIQLHYHITLVIALGMCEMAVRYFEYVNFNSTGMRPMDVTLWAVTFSSIKKTLSRLLLLVVSMGYGVVKPTLGGITSRILLLGVIYFVATEALELVEHLGNINDFSGKTMIVLVIPVALLDACFILWIFSSLARTLEKLQIKRNMAKLELYRNFTNALAISVLLSIAWIGFELYFNGTDPLIELWRMAWIIPAFWNLLSYGLLAVICILWAPSNNPTRYSYLAETGDEFEEEGISLTGSGIKSTEDVERNELLFGLPDDVEEGKRE

SEQ ID NO: 5325 - DNA, 1380 bp, Arabidopsis thaliana
aatcttttgcattccccaacacacactcctgtctctctttctatctctctcttccacttcaaacttcaaagatctcacaacttctttgagttttgtaatggcaacagatgaaatgaaatcagaaactaaaaaaacagaacataagcaaaaacaatctacacaaatcaaacaagaccttcctcctccgaccataccacctcttccacttccttacaagtcatgcaccttgaaagtttctattcactgcgaaggctgcaaaagaaaagtcaaaaaaatacttaccagcattgaaggtgtttttaaagtggacattgatgtgaaacagcataaagtaacggtgataggaatcatctcgccggagattctgttaaagaagcttaacaaagctggtaaaaacgctgaacaactgccggagatacccgacccggttgacaacaaacccaaacccgtcgacccgaaagagaagaacaagaagaagaagaaagaagagaaagtgcaaataaccaatgaagctacttcttccggtatagataatccggaaaaacccggttctggagagtgtgataaaccggaatctgaaaaacccgtcgacgaaaagtgtctttccggtgacggcggtgaaacttccggtcctgtgaaagaggaaaaaaaggacgttcttaaggagaaagattctgggaaggaagaatctccgtcaccaccggcggattcttcggctccggcggcggagaagaaagctgaagacaccggtggagctgtccctgataatggcaaagttggtaaaaagaagaaaaagaaagggcaaagtttggctactactaacaatcctaccgatggacctgcccgtactcaatcacttcctccgcccactgcaacagattatgaccgtccaattaatcagatcaacgaccaccatataacaaccactaataatccgccacgtcacgatctgtatccttatcctgcacaaggctattatgcgccgcaagtcatgtatggcgtaagttataacgttgctcaacctccggtgagtgtagacgctgcgtcgtattatacacctccaccaccgtattcgtatgcgtacatgcacaacggttatcaaccgtccgatcaaaacccttgtcaacctcggccgtcagattcgtttgagttattcagcgatgagaatccaaacggttgtgcgataatgtgatgtcaaattaccaaaaggaccttgaactctgcttatacgccttgtatgacttaaggatggtttcgtaatttgaagttctttcacgtgcaagttagcttaatggtgtttctagttaagtttattttaatgaatgttgtattagttttatattatgattatgattatgttaagataaagattaagctttc

SEQ ID NO: 5326 - protein, 396 aa, Arabidopsis thaliana
IFCIPQHTLLSLFLSLSSTSNFKDLTTSLSFVMATDEMKSETKKTEHKQKQSTQIKQDLPPPTIPPLPLPYKSCTLKVSIHCEGCKRKVKKILTSIEGVFKVDIDVKQHKVTVIGIISPEILLKKLNKAGKNAEQLPEIPDPVDNKPKPVDPKEKNKKKKKEEKVQITNEATSSGIDNPEKPGSGECDKPESEKPVDEKCLSGDGGETSGPVKEEKKDVLKEKDSGKEESPSPPADSSAPAAEKKAEDTGGAVPDNGKVGKKKKKKGQSLATTNNPTDGPARTQSLPPPTATDYDRPINQINDHHITTTNNPPRHDLYPYPAQGYYAPQVMYGVSYNVAQPPVSVDAASYYTPPPPYSYAYMHNGYQPSDQNPCQPRPSDSFELFSDENPNGCAIM

SEQ ID NO: 5327 - protein, 364 aa, Arabidopsis thaliana
MATDEMKSETKKTEHKQKQSTQIKQDLPPPTIPPLPLPYKSCTLKVSIHCEGCKRKVKKILTSIEGVFKVDIDVKQHKVTVIGIISPEILLKKLNKAGKNAEQLPEIPDPVDNKPKPVDPKEKNKKKKKEEKVQITNEATSSGIDNPEKPGSGECDKPESEKPVDEKCLSGDGGETSGPVKEEKKDVLKEKDSGKEESPSPPADSSAPAAEKKAEDTGGAVPDNGKVGKKKKKKGQSLATTNNPTDGPARTQSLPPPTATDYDRPINQINDHHITTTNNPPRHDLYPYPAQGYYAPQVMYGVSYNVAQPPVSVDAASYYTPPPPYSYAYMHNGYQPSDQNPCQPRPSDSFELFSDENPNGCAIM

SEQ ID NO: 5328 - protein, 359 aa, Arabidopsis thaliana
MKSETKKTEHKQKQSTQIKQDLPPPTIPPLPLPYKSCTLKVSIHCEGCKRKVKKILTSIEGVFKVDIDVKQHKVTVIGIISPEILLKKLNKAGKNAEQLPEIPDPVDNKPKPVDPKEKNKKKKKEEKVQITNEATSSGIDNPEKPGSGECDKPESEKPVDEKCLSGDGGETSGPVKEEKKDVLKEKDSGKEESPSPPADSSAPAAEKKAEDTGGAVPDNGKVGKKKKKKGQSLATTNNPTDGPARTQSLPPPTATDYDRPINQINDHHITTTNNPPRHDLYPYPAQGYYAPQVMYGVSYNVAQPPVSVDAASYYTPPPPYSYAYMHNGYQPSDQNPCQPRPSDSFELFSDENPNGCAIM

SEQ ID NO: 5329 - DNA, 1244 bp, Arabidopsis thaliana
agccgccgctttcacttacctcttcctcttccttcttcttcttctaccttcttctcgtaaaggttttgctacacactggagctcgcaaatctggctatcgaaaaccacaatcacaaactcaacttcggggccttcaaggccaatcacaagaaagtcatgggaccaatgataagaacagaggaagaagaagactatacaagtccaccgtggctaatgccaatgctacgagggagttacttcgtcccttgttccatccatgtcgattcaaacaaaaacgaatgcaatttgttctgtcttgattgtgctggaaatgccttttgctcttactgtttagtcaaacataaagaccatcgtgttgttcagatacgaagatcttcgtaccataacgttgtgagagtgaatgagatacagaagttcatagacatcgcttgtgttcagacatatattatcaacagcgcaaagatcgtgttcctcaatgaaagacctcagcctagaatcggtaaaggtgttacaaacacttgtgaaatctgttgcagaagtctccttgattctttcaggttctgctctctcggctgcaagcttggaggaatgaggagaggagatttatctctaaccttctctttgaaaggaaagcatgggagagagtaccttggtgggtcggaatcagatgaagctactacaccgactaagatgcgtaagaccaatgctttcaaccgtctgatgagtggtctctcgatctcaaccgttagattcgatgactacggtcccaatggtgatcaaaggtcttcaagctctggtgatgaaggtggttttagtttctctccgggaacacctccgatctataatcaccggaattcaagcagacgaaagggtgtccctcaccgtgctccgttctaagaaaagataattactaaatttccaaccccatagtaattaattatatatatatatatatagataatggtataatacaatgtataacttggggtgaaatttaggatgtagtcataatgttgtaaatgtgtattatttctttttatagtttttctaaaagataaaggtgaaataattagaacacatacataaatacattttttataagtatagaagaattaggttttatagtggaagtgtttgatgtttagtttgtttaaaaggcatggctttgtcttgtgttgtaatgtaatgtgtacattaaatttttgttcatacaataataatatcaaggtgaatgatatattatg

SEQ ID NO: 5330 - protein, 246 aa, Arabidopsis thaliana
MGPMIRTEEEEDYTSPPWLMPMLRGSYFVPCSIHVDSNKNECNLFCLDCAGNAFCSYCLVKHKDHRVVQIRRSSYHNVVRVNEIQKFIDIACVQTYIINSAKIVFLNERPQPRIGKGVTNTCEICCRSLLDSFRFCSLGCKLGGMRRGDLSLTFSLKGKHGREYLGGSESDEATTPTKMRKTNAFNRLMSGLSISTVRFDDYGPNGDQRSSSSGDEGGFSFSPGTPPIYNHRNSSRRKGVPHRAPF

SEQ ID NO: 5331 - protein, 243 aa, Arabidopsis thaliana
MIRTEEEEDYTSPPWLMPMLRGSYFVPCSIHVDSNKNECNLFCLDCAGNAFCSYCLVKHKDHRVVQIRRSSYHNVVRVNEIQKFIDIACVQTYIINSAKIVFLNERPQPRIGKGVTNTCEICCRSLLDSFRFCSLGCKLGGMRRGDLSLTFSLKGKHGREYLGGSESDEATTPTKMRKTNAFNRLMSGLSISTVRFDDYGPNGDQRSSSSGDEGGFSFSPGTPPIYNHRNSSRRKGVPHRAPF

SEQ ID NO: 5332 - protein, 227 aa, Arabidopsis thaliana
MPMLRGSYFVPCSIHVDSNKNECNLFCLDCAGNAFCSYCLVKHKDHRVVQIRRSSYHNVVRVNEIQKFIDIACVQTYIINSAKIVFLNERPQPRIGKGVTNTCEICCRSLLDSFRFCSLGCKLGGMRRGDLSLTFSLKGKHGREYLGGSESDEATTPTKMRKTNAFNRLMSGLSISTVRFDDYGPNGDQRSSSSGDEGGFSFSPGTPPIYNHRNSSRRKGVPHRAPF

SEQ ID NO: 5333 - DNA, 2502 bp, Arabidopsis thaliana
gttctcgatgaaaacaatgattatagaagacagcttattgaccaagttgtgtctactgctttacctgaaagcaagagcccagagcaagtttctgcagctgttaaagcattcatgactgctgatttgccgcacgagcttattgagcttcttgaaaagattgttctacaaaattctgccttcagtggaaacttcaatctgcaaaatctgcttatattgacagctattaaggcagatccgtctagagttatggattacatcaacaggctggacaactttgatggacctgcagttggagaagtcgcagttgaagcccaattatatgaggaagcatttgctatcttcaagaagttcaacttaaatgttcaggctgtcaatgtattgctggataatgtcaggagcattgagcgtgcagttgagtttgcattccgggtcgaagaagattctgtttggagccaagtcgctaaggcgcaactcagggaaggactagtcagtgatgcaattgagtcctttatccgtgctgatgatgccactcatttcttggaggtcatacgtgtctctgaagatactgatgtctatgatgacttggtcaaataccttctgatggttagacagaaggtgaaggaacccaaggttgatagtgagctcatctatgcatatgcaaagattgatcggttaggtgagattgaagaattcattctgatgccaaacgttgctaatctacaacatgttggtgatcgtctgtatgacgaagctctctatgaggctgcaaaaataatctatgcgttcatatcaaactggggcaagttagccgtcacacttgtgaagttgcaacagttccaaggtgctgttgatgctgcaaggaaagcaaacagtgcaaagacatggaaggaagtctgctttgcttgcgttgatgctgaggaattccggttggctcaaatatgtggtcttaacattatcattcaggtggatgacctggaagaagtcagcgagtactaccagaacagagggtgcttcaatgaattaatctcacttatggagagtggacttgggcttgaacgtgctcacatgggtatcttcaccgagttgggtgtactctatgctagatatcgttatgagaaacttatggaacacatcaagttattttcaactcgcctcaatattcccaagcttatacgggcctgtgatgaacaacagcactggcaggaacttacctatctgtacattcaatatgatgagtttgataatgctgcgaccaccgtcatgaaccattctcctgaagcatgggagcacatgcaattcaaagacattgttgccaaggtagcgaatgttgaactgtactacaaggctgtgcacttctacttgcaagagcatccggatataatcaacgatcttctcaacgtacttgcgttgcggttagaccatactcgtgttgttgatataatgcggaaggctggtcacttgcgtcttatcaagccatacatgattgcagttcagagcaacaatgtctctgctgttaatgaggctctgaatgagatatacgtggaagaagaagactacgataggttgcgagagtctattgatttacatgacagctttgaccagattggcctcgctcagaagatcgagaaacacgaacttgttgaaatgagacgtgtggctgcttatatctacaagaaagcgggcagatggaagcaatcaattgcattatcaaagaaagacaacatgtacaaggactgtatggaaacggcttcacaatcaggcgaacatgaacttgcagaacaactactggtgtatttcattgaacagggcaaaaaggaatgctttgctacatgtctctttgtatgttatgacttaatccgaccagacgtggctctagaacttgcctggatcaacaatatgatggactttgccttcccgtatctcctccagtttatccgagagtactctggcaaagtggatgagctaataaaggacaagcttgaggcacaaaaagaggtgaaggccaaagagcaggaagagaaggatgtcatatcccaacagaacatgtatgcccaaatgttgccacttgctttacctgcaccaccgatgccaggaatgggaggtggtggtgggtatggtcctccaccacaaatgggcggtatgccaggaatgcctcccatgccaccatatggaatgccaccgatgggcggctactaaagcagaccagcttatgctttaatatccgcatttggaaaagtatcagtagcgcatagagtcggcccaatttgctagggcggtgttcatctgctagctagcttatatgtctgaccagaatttgtctgggaataatgtggataataacctcctttcgttgtaatattctgttgggtttaggtgagtaatttttttttaactttttgtcaaaagccatttttgagtatatatactcaactctcttactcatatgagttttgtagttgtactttccttcagcatttcattccattcgactttcgatttatt

SEQ ID NO: 5334 - protein, 731 aa, Arabidopsis thaliana
VLDENNDYRRQLIDQVVSTALPESKSPEQVSAAVKAFMTADLPHELIELLEKIVLQNSAFSGNFNLQNLLILTAIKADPSRVMDYINRLDNFDGPAVGEVAVEAQLYEEAFAIFKKFNLNVQAVNVLLDNVRSIERAVEFAFRVEEDSVWSQVAKAQLREGLVSDAIESFIRADDATHFLEVIRVSEDTDVYDDLVKYLLMVRQKVKEPKVDSELIYAYAKIDRLGEIEEFILMPNVANLQHVGDRLYDEALYEAAKIIYAFISNWGKLAVTLVKLQQFQGAVDAARKANSAKTWKEVCFACVDAEEFRLAQICGLNIIIQVDDLEEVSEYYQNRGCFNELISLMESGLGLERAHMGIFTELGVLYARYRYEKLMEHIKLFSTRLNIPKLIRACDEQQHWQELTYLYIQYDEFDNAATTVMNHSPEAWEHMQFKDIVAKVANVELYYKAVHFYLQEHPDIINDLLNVLALRLDHTRVVDIMRKAGHLRLIKPYMIAVQSNNVSAVNEALNEIYVEEEDYDRLRESIDLHDSFDQIGLAQKIEKHELVEMRRVAAYIYKKAGRWKQSIALSKKDNMYKDCMETASQSGEHELAEQLLVYFIEQGKKECFATCLFVCYDLIRPDVALELAWINNMMDFAFPYLLQFIREYSGKVDELIKDKLEAQKEVKAKEQEEKDVISQQNMYAQMLPLALPAPPMPGMGGGGGYGPPPQMGGMPGMPPMPPYGMPPMGGY

SEQ ID NO: 5335 - protein, 694 aa, Arabidopsis thaliana
MTADLPHELIELLEKIVLQNSAFSGNFNLQNLLILTAIKADPSRVMDYINRLDNFDGPAVGEVAVEAQLYEEAFAIFKKFNLNVQAVNVLLDNVRSIERAVEFAFRVEEDSVWSQVAKAQLREGLVSDAIESFIRADDATHFLEVIRVSEDTDVYDDLVKYLLMVRQKVKEPKVDSELIYAYAKIDRLGEIEEFILMPNVANLQHVGDRLYDEALYEAAKIIYAFISNWGKLAVTLVKLQQFQGAVDAARKANSAKTWKEVCFACVDAEEFRLAQICGLNIIIQVDDLEEVSEYYQNRGCFNELISLMESGLGLERAHMGIFTELGVLYARYRYEKLMEHIKLFSTRLNIPKLIRACDEQQHWQELTYLYIQYDEFDNAATTVMNHSPEAWEHMQFKDIVAKVANVELYYKAVHFYLQEHPDIINDLLNVLALRLDHTRVVDIMRKAGHLRLIKPYMIAVQSNNVSAVNEALNEIYVEEEDYDRLRESIDLHDSFDQIGLAQKIEKHELVEMRRVAAYIYKKAGRWKQSIALSKKDNMYKDCMETASQSGEHELAEQLLVYFIEQGKKECFATCLFVCYDLIRPDVALELAWINNMMDFAFPYLLQFIREYSGKVDELIKDKLEAQKEVKAKEQEEKDVISQQNMYAQMLPLALPAPPMPGMGGGGGYGPPPQMGGMPGMPPMPPYGMPPMGGY

SEQ ID NO: 5336 - protein, 649 aa, Arabidopsis thaliana
MDYINRLDNFDGPAVGEVAVEAQLYEEAFAIFKKFNLNVQAVNVLLDNVRSIERAVEFAFRVEEDSVWSQVAKAQLREGLVSDAIESFIRADDATHFLEVIRVSEDTDVYDDLVKYLLMVRQKVKEPKVDSELIYAYAKIDRLGEIEEFILMPNVANLQHVGDRLYDEALYEAAKIIYAFISNWGKLAVTLVKLQQFQGAVDAARKANSAKTWKEVCFACVDAEEFRLAQICGLNIIIQVDDLEEVSEYYQNRGCFNELISLMESGLGLERAHMGIFTELGVLYARYRYEKLMEHIKLFSTRLNIPKLIRACDEQQHWQELTYLYIQYDEFDNAATTVMNHSPEAWEHMQFKDIVAKVANVELYYKAVHFYLQEHPDIINDLLNVLALRLDHTRVVDIMRKAGHLRLIKPYMIAVQSNNVSAVNEALNEIYVEEEDYDRLRESIDLHDSFDQIGLAQKIEKHELVEMRRVAAYIYKKAGRWKQSIALSKKDNMYKDCMETASQSGEHELAEQLLVYFIEQGKKECFATCLFVCYDLIRPDVALELAWINNMMDFAFPYLLQFIREYSGKVDELIKDKLEAQKEVKAKEQEEKDVISQQNMYAQMLPLALPAPPMPGMGGGGGYGPPPQMGGMPGMPPMPPYGMPPMGGY

SEQ ID NO: 5337 - DNA, 1489 bp, Arabidopsis thaliana
ccccctttttcactctcttcatttattcttcccctcatcatcatcatcatcttcttctttaaccaaaaacacaacttacaagaaaactgttgaatctttgtatttatttacatctcctttgacctttaataagaatctgagtggttggtctctgatttgatgagatgactgttgagctgatgatgagcagctacagcggcggcggaggaggaggtgatggttttcctgcaatcgccgcggcggcgaaaatggaagataccgctttgagagaagctgcttctgcagggattcacggtgtggaggagtttcttaaactgatcggtcaaagtcaacaaccaacggagaagagtcagacggagataaccgcggtgactgacgtcgccgttaacagcttcaagaaggtcatttctctactcggtagatctagaaccggacacgctagattcagacgagctcccgcgtcaacgcaaacgccgtttaagcaaacgccggtggttgaggaggaggtggaggtggaggagaagaagccagaaacaagctccgtgttaacaaaacagaaaacagagcaatatcacggtggtggatctgcgtttagagtttattgtccaacaccaattcatcgtcgtcctcctctatcacacaataacaacaacaatcagaatcaaacaaagaacggttcgtcttcttcatctcctccgatgctcgcaaacggagcaccgtcaacgataaactttgcgccgtcaccaccagtctcagcgacgaactcattcatgtcttctcatagatgtgacaccgatagtactcacatgtcatcaggattcgagttcactaacccatctcagctctctggttcgagaggtaaacctcctttatcatcagcttcgttgaagagaagatgtaattcatctccctcaagccgttgccattgctccaagaaaaggaaatcaagagtaaaaagagtgattagagttccagcagtaagtagcaaaatggctgatataccatcagatgagttttcatggagaaaatatggtcaaaaaccaatcaaaggctctcctcatcctcggggatattacaagtgcagcagtgtaagaggttgtccggcgcgtaagcatgtggagcgtgcactagatgatgcgatgatgctaatcgtgacgtacgaaggagaccacaaccatgctttggttctcgagacgacgacgatgaatcatgacaaaactctttagtttctcgagtttgaggggaactgtctgtgtgtgaccactatccagattagtcaacgacagagtgggcccgcactgcacttttttattcttttctttttgaaaagcttttgctttatctttctttttgattggaggaaatagagggaggggagataaagacgagagaggaacgttgtggatcttgatggaagttgaatcatgtgaatgtccttttctgtttatttatttctaggatattatatatttagtgcactatttttgtc

SEQ ID NO: 5338 - protein, 353 aa, Arabidopsis thaliana
MTVELMMSSYSGGGGGGDGFPAIAAAAKMEDTALREAASAGIHGVEEFLKLIGQSQQPTEKSQTEITAVTDVAVNSFKKVISLLGRSRTGHARFRRAPASTQTPFKQTPVVEEEVEVEEKKPETSSVLTKQKTEQYHGGGSAFRVYCPTPIHRRPPLSHNNNNNQNQTKNGSSSSSPPMLANGAPSTINFAPSPPVSATNSFMSSHRCDTDSTHMSSGFEFTNPSQLSGSRGKPPLSSASLKRRCNSSPSSRCHCSKKRKSRVKRVIRVPAVSSKMADIPSDEFSWRKYGQKPIKGSPHPRGYYKCSSVRGCPARKHVERALDDAMMLIVTYEGDHNHALVLETTTMNHDKTL

SEQ ID NO: 5339 - protein, 348 aa, Arabidopsis thaliana
MMSSYSGGGGGGDGFPAIAAAAKMEDTALREAASAGIHGVEEFLKLIGQSQQPTEKSQTEITAVTDVAVNSFKKVISLLGRSRTGHARFRRAPASTQTPFKQTPVVEEEVEVEEKKPETSSVLTKQKTEQYHGGGSAFRVYCPTPIHRRPPLSHNNNNNQNQTKNGSSSSSPPMLANGAPSTINFAPSPPVSATNSFMSSHRCDTDSTHMSSGFEFTNPSQLSGSRGKPPLSSASLKRRCNSSPSSRCHCSKKRKSRVKRVIRVPAVSSKMADIPSDEFSWRKYGQKPIKGSPHPRGYYKCSSVRGCPARKHVERALDDAMMLIVTYEGDHNHALVLETTTMNHDKTL

SEQ ID NO: 5340 - protein, 347 aa, Arabidopsis thaliana
MSSYSGGGGGGDGFPAIAAAAKMEDTALREAASAGIHGVEEFLKLIGQSQQPTEKSQTEITAVTDVAVNSFKKVISLLGRSRTGHARFRRAPASTQTPFKQTPVVEEEVEVEEKKPETSSVLTKQKTEQYHGGGSAFRVYCPTPIHRRPPLSHNNNNNQNQTKNGSSSSSPPMLANGAPSTINFAPSPPVSATNSFMSSHRCDTDSTHMSSGFEFTNPSQLSGSRGKPPLSSASLKRRCNSSPSSRCHCSKKRKSRVKRVIRVPAVSSKMADIPSDEFSWRKYGQKPIKGSPHPRGYYKCSSVRGCPARKHVERALDDAMMLIVTYEGDHNHALVLETTTMNHDKTL

SEQ ID NO: 5341 - DNA, 2079 bp, Arabidopsis thaliana
aacttctctcctcaacttttaagtattccacacatacaaacacacacacacacttgacttttctcatataatttcgacagctcgtgaaggacaaagacatggagccttctcggaggagaatgaccagagacatgttgcttctaatcgtaacgatggcatggctcgtaaccggagacgaaggaggcataaagcaagaggagcgactgtttaatcttgggaagcttgagatgttcgttgacaagcttcctcatataccaacacttcatggctaccacttcgtcaatggcttcctcaaacccaaatctcttcacataggcatgttcttcaagaaatggaaattccacagagacttgcctgccacgccagtgttcgcatatggtacatcaaagcgttcagcaacagttcctggaccaacaatagaagctgtttatggcgtcgacacctacgtgacgtggcgaaatcacctccctttacatcatatcctcccttgggacccaacaatctctccggcaatccctaaacacggcggcattcccacggtggttcacttgcacggaggtatccacgaaccaactagcgatggaaatgcagattcatggttcaccgctggtttcaaagaaactggttccaaatggaccaaaaagactacacattacgtcaacaagcaacaacctggaaacatgtggtaccatgaccacgcggcagggttgaccagagtcaaccttcttgccggtttgttaggctcttacattctccgtcatagctcagtcgaatcgcctcttcggttacctaccggacgcgaattcgatcgtcctttggtcatctttgaccgatcttttcgtaaagatggttccatttacatgaacgctacagggaacaatccaacgattcatccacaatggcagccagagtatttcggcgacgccatcattgtgaacggtaaagcatggccgagattaaccgtccgccgccggaaatatagatttcgaatcacaaacgctagtaacgcaaggttcttccggttcttcttctccaacggtctcgacttcattgtcgttggttccgattccgcttatctagcgaaaccagtatcgaccaaatctgttctcctagctccgtcggagattgtcgacgtactcgttgacttttcaaagtcaacatcgaaaacggcaattcttgccaacaatgcaccttatccttacccgtcgggagatcccgtcacggaagagaacagcaaagtcatgaagtttataatcaactacaaatcagaagttgacacgtcgattattccgaagaagctaattgaataccctcctgctcatgtatcaacctccacacgtacacgttacattgctatgttcgagtatgtgtcaagcattgacgagccaacacatctatacatcaacggtctgccttacaacgctcccgtaaccgaaactccaaaaatcggcacaagcgaggtgtgggaagtgataaacttaaccgaggataaccatccgttgcacattcacttgggattgtttaaagtattggagcaaacggcattggtgaagagtgaggagttcatagagtgcatgactaaaagaaacgatgccgtcaagtgtgagattagcaaatacgcacgagggaacaagaccgcggttacggtacacgagcggggatggaaaaacgtattcaagatgatgccgggacatgtaacgaagatactcgttagattttcttacattcactcaaacgaatcttactcctttgacgcaactcaagagccaggctatgtttaccactgtcacatattggaccatgaagacaatatgatgatgaggccctttgcaatggtgctataattctaaaacgaaaacaatttacaattacgagtgcagaatacaaacgagttgatatagattgagatttcagattacataaatatcttatacagaaagtgttaaaagataattcgattggattgatgttatatctctatcattgtttttcacttggcctcggagattagaagcagcttgttaatgggcttttaacagttacgggctttaacgggcccaataacaaaactcttttgct

SEQ ID NO: 5342 - protein, 581 aa, Arabidopsis thaliana
MEPSRRRMTRDMLLLIVTMAWLVTGDEGGIKQEERLFNLGKLEMFVDKLPHIPTLHGYHFVNGFLKPKSLHIGMFFKKWKFHRDLPATPVFAYGTSKRSATVPGPTIEAVYGVDTYVTWRNHLPLHHILPWDPTISPAIPKHGGIPTVVHLHGGIHEPTSDGNADSWFTAGFKETGSKWTKKTTHYVNKQQPGNMWYHDHAAGLTRVNLLAGLLGSYILRHSSVESPLRLPTGREFDRPLVIFDRSFRKDGSIYMNATGNNPTIHPQWQPEYFGDAIIVNGKAWPRLTVRRRKYRFRITNASNARFFRFFFSNGLDFIVVGSDSAYLAKPVSTKSVLLAPSEIVDVLVDFSKSTSKTAILANNAPYPYPSGDPVTEENSKVMKFIINYKSEVDTSIIPKKLIEYPPAHVSTSTRTRYIAMFEYVSSIDEPTHLYINGLPYNAPVTETPKIGTSEVWEVINLTEDNHPLHIHLGLFKVLEQTALVKSEEFIECMTKRNDAVKCEISKYARGNKTAVTVHERGWKNVFKMMPGHVTKILVRFSYIHSNESYSFDATQEPGYVYHCHILDHEDNMMMRPFAMVL

SEQ ID NO: 5343 - protein, 574 aa, Arabidopsis thaliana
MTRDMLLLIVTMAWLVTGDEGGIKQEERLFNLGKLEMFVDKLPHIPTLHGYHFVNGFLKPKSLHIGMFFKKWKFHRDLPATPVFAYGTSKRSATVPGPTIEAVYGVDTYVTWRNHLPLHHILPWDPTISPAIPKHGGIPTVVHLHGGIHEPTSDGNADSWFTAGFKETGSKWTKKTTHYVNKQQPGNMWYHDHAAGLTRVNLLAGLLGSYILRHSSVESPLRLPTGREFDRPLVIFDRSFRKDGSIYMNATGNNPTIHPQWQPEYFGDAIIVNGKAWPRLTVRRRKYRFRITNASNARFFRFFFSNGLDFIVVGSDSAYLAKPVSTKSVLLAPSEIVDVLVDFSKSTSKTAILANNAPYPYPSGDPVTEENSKVMKFIINYKSEVDTSIIPKKLIEYPPAHVSTSTRTRYIAMFEYVSSIDEPTHLYINGLPYNAPVTETPKIGTSEVWEVINLTEDNHPLHIHLGLFKVLEQTALVKSEEFIECMTKRNDAVKCEISKYARGNKTAVTVHERGWKNVFKMMPGHVTKILVRFSYIHSNESYSFDATQEPGYVYHCHILDHEDNMMMRPFAMVL

SEQ ID NO: 5344 - protein, 570 aa, Arabidopsis thaliana
MLLLIVTMAWLVTGDEGGIKQEERLFNLGKLEMFVDKLPHIPTLHGYHFVNGFLKPKSLHIGMFFKKWKFHRDLPATPVFAYGTSKRSATVPGPTIEAVYGVDTYVTWRNHLPLHHILPWDPTISPAIPKHGGIPTVVHLHGGIHEPTSDGNADSWFTAGFKETGSKWTKKTTHYVNKQQPGNMWYHDHAAGLTRVNLLAGLLGSYILRHSSVESPLRLPTGREFDRPLVIFDRSFRKDGSIYMNATGNNPTIHPQWQPEYFGDAIIVNGKAWPRLTVRRRKYRFRITNASNARFFRFFFSNGLDFIVVGSDSAYLAKPVSTKSVLLAPSEIVDVLVDFSKSTSKTAILANNAPYPYPSGDPVTEENSKVMKFIINYKSEVDTSIIPKKLIEYPPAHVSTSTRTRYIAMFEYVSSIDEPTHLYINGLPYNAPVTETPKIGTSEVWEVINLTEDNHPLHIHLGLFKVLEQTALVKSEEFIECMTKRNDAVKCEISKYARGNKTAVTVHERGWKNVFKMMPGHVTKILVRFSYIHSNESYSFDATQEPGYVYHCHILDHEDNMMMRPFAMVL

SEQ ID NO: 5345 - DNA, 1147 bp, Arabidopsis thaliana
atttttgcgccatttggtaaaacatttgaaattagtttcgaaatgcatgcgattttctgtcgcagggtcgccgtcggttgctcttccccgcagctaaccaaattggtgacgaagcaggcgagccagagtcgccattccctgagccatcttcttccttttgatctctcttcccgctttgttcctccttatgttgtatcacgatcggcgagagttcatggattcttcgcagggaagttgggaaacaccaatctgaagctgaaattcggaaatgttatggaatctagagctgggttcttcagttctgagcttcctagtcatggattcgagtctggtggttttactgggtttcaaaaacgtggatggaagtcttggattaatggagctaatggtgtagtttttggattggtaatagctaatgctgctgtatttacaatgtggcgggttttaggcaaggacaatatgtggatggtgaagaattttatgttatcaaggtacagttttatgactggacgtatacacacgctgatcacttcgggtttcagtcatgttggagccactcatatcatcttgaatatgatggggctttgctacttcggagccagaattgcaagaagctttgggccgcgctaccttttgaagctctactttgctggagcacttggtggctctgttttcttcttgagtagtcatgctctctcggttatatcactcaagggccaaagagttgtccctaaggatcaattaaaagtccccattgggaagctgggtgctaatggacctgtgtatgccattacgcttctcgatatgctcctttacccaaaagttactacatactttgggttgatgctccgagtgcctgtatttgctggaatctatagcttaggactcaacattataaagatgctagaggggaaaaacaacaataccttgactagtttggatcagttgggaggagttgtagttgcagtcattgcgtgggcaaggataaggaaaggtcgattctgctactgattgattattttactttctccatcaaaccttggacttgctgcaaaagattcatataacttgtcccatcattatactactggagtactggttatgttaaactttgtgacaatgagattattattattactattttttt

SEQ ID NO: 5346 - protein, 336 aa, Arabidopsis thaliana
IFAPFGKTFEISFEMHAIFCRRVAVGCSSPQLTKLVTKQASQSRHSLSHLLPFDLSSRFVPPYVVSRSARVHGFFAGKLGNTNLKLKFGNVMESRAGFFSSELPSHGFESGGFTGFQKRGWKSWINGANGVVFGLVIANAAVFTMWRVLGKDNMWMVKNFMLSRYSFMTGRIHTLITSGFSHVGATHIILNMMGLCYFGARIARSFGPRYLLKLYFAGALGGSVFFLSSHALSVISLKGQRVVPKDQLKVPIGKLGANGPVYAITLLDMLLYPKVTTYFGLMLRVPVFAGIYSLGLNIIKMLEGKNNNTLTSLDQLGGVVVAVIAWARIRKGRFCY

SEQ ID NO: 5347 - protein, 322 aa, Arabidopsis thaliana
MHAIFCRRVAVGCSSPQLTKLVTKQASQSRHSLSHLLPFDLSSRFVPPYVVSRSARVHGFFAGKLGNTNLKLKFGNVMESRAGFFSSELPSHGFESGGFTGFQKRGWKSWINGANGVVFGLVIANAAVFTMWRVLGKDNMWMVKNFMLSRYSFMTGRIHTLITSGFSHVGATHIILNMMGLCYFGARIARSFGPRYLLKLYFAGALGGSVFFLSSHALSVISLKGQRVVPKDQLKVPIGKLGANGPVYAITLLDMLLYPKVTTYFGLMLRVPVFAGIYSLGLNIIKMLEGKNNNTLTSLDQLGGVVVAVIAWARIRKGRFCY

SEQ ID NO: 5348 - protein, 245 aa, Arabidopsis thaliana
MESRAGFFSSELPSHGFESGGFTGFQKRGWKSWINGANGVVFGLVIANAAVFTMWRVLGKDNMWMVKNFMLSRYSFMTGRIHTLITSGFSHVGATHIILNMMGLCYFGARIARSFGPRYLLKLYFAGALGGSVFFLSSHALSVISLKGQRVVPKDQLKVPIGKLGANGPVYAITLLDMLLYPKVTTYFGLMLRVPVFAGIYSLGLNIIKMLEGKNNNTLTSLDQLGGVVVAVIAWARIRKGRFCY

SEQ ID NO: 5349 - DNA, 1357 bp, Arabidopsis thaliana
actctctctttctccttagcttcctcttcaaggtttttttgaaaagctgcaaatttccatagccatggacactgctaaatggcctcaggagtttgttgtgaagccaatgaacgagatcgtgacaaacacatgcctaaaacaacagtcgaatcctccttctcctgctactcctgtggaaaggaaggcaagaccggagaaagaccaggctttgaactgtccaagatgcaactccttaaacaccaagttctgttactacaacaactacagcctgacgcagcccaggtacttttgtaaagactgcaggaggtattggaccgcaggtggttccctcaggaacatccccgtcggtggcggcgtccgcaagaacaagagatcttcttccaattcctcttcctcttcaccctcttcgtcttcttcttcaaagaaacctctttttgccaacaacaacacgcctacgcctcctcttcctcatcttaaccctaagattggtgaagcagccgctactaaagttcaagacttgacgttttctcaagggtttgggaacgcccacgaggttaaagatctcaacttggcgttttctcaagggtttgggatcggtcacaatcatcacagtagtatcccagagtttctgcaagtagtacccagcagcagtatgaagaacaacccactggtctcaacttcctcgtctttggagcttttagggatctctagttcctctgcttcctctaactcacgccctgctttcatgtcttatccaaatgttcatgattcatcggtctacacagcatccgggtttggtctgagttacccacagtttcaagagttcatgagaccagctttgggattctctcttgatggtggggatcctctacgtcaagaagaggggtccagtggcactaataatggaaggccgttgctgccatttgagagcctcctcaaacttccagtttcatcatcaagcaccaatagtggtgggaatggcaatctgaaagagaataatgatgagcatagtgatcatgaacatgagaaagaagaaggagaagctgaccaatctgttgggttttggagtggcatgttaagtgctggtgcttctgctgctgcatctggtggttcatggcaataattttagtcatggaccccatcccatgagagtttttagaacaaatgattacatttttcatccatgttttaaaaagatgagagggttaactatataatctgggtacttactattttagtccttttcctttggtttccttctccttttctaaaaattattattaactttgttgggttggggatggatactgtatgtatttagactctcttttaaatcaatctcagttgttagttacct

SEQ ID NO: 5350 - protein, 352 aa, Arabidopsis thaliana
MDTAKWPQEFVVKPMNEIVTNTCLKQQSNPPSPATPVERKARPEKDQALNCPRCNSLNTKFCYYNNYSLTQPRYFCKDCRRYWTAGGSLRNIPVGGGVRKNKRSSSNSSSSSPSSSSSSKKPLFANNNTPTPPLPHLNPKIGEAAATKVQDLTFSQGFGNAHEVKDLNLAFSQGFGIGHNHHSSIPEFLQVVPSSSMKNNPLVSTSSSLELLGISSSSASSNSRPAFMSYPNVHDSSVYTASGFGLSYPQFQEFMRPALGFSLDGGDPLRQEEGSSGTNNGRPLLPFESLLKLPVSSSSTNSGGNGNLKENNDEHSDHEHEKEEGEADQSVGFWSGMLSAGASAAASGGSWQ

SEQ ID NO: 5351 - protein, 338 aa, Arabidopsis thaliana
MNEIVTNTCLKQQSNPPSPATPVERKARPEKDQALNCPRCNSLNTKFCYYNNYSLTQPRYFCKDCRRYWTAGGSLRNIPVGGGVRKNKRSSSNSSSSSPSSSSSSKKPLFANNNTPTPPLPHLNPKIGEAAATKVQDLTFSQGFGNAHEVKDLNLAFSQGFGIGHNHHSSIPEFLQVVPSSSMKNNPLVSTSSSLELLGISSSSASSNSRPAFMSYPNVHDSSVYTASGFGLSYPQFQEFMRPALGFSLDGGDPLRQEEGSSGTNNGRPLLPFESLLKLPVSSSSTNSGGNGNLKENNDEHSDHEHEKEEGEADQSVGFWSGMLSAGASAAASGGSWQ

SEQ ID NO: 5352 - DNA, 1617 bp, Arabidopsis thaliana
ctagagttagaagtcgaaaaatctcgcttttagattcgttcaggcatttcgtcgagcaccttctctgcattactctcccctacttctctctattcattctttcaatgataagtcctaactaaactccgagagaacactaaaccctaaacccattttgcactctcaattacagatcatccacatttcgcgctttcgtcaaatctctttagatgttcgtcaaatcacaaagctttctcttttcggtgagtaagctgtttcaccagcatcaacaatggcgaggaatgggtgcaatgacaaaggtgagactgaagtgggtgaagaacaagaacctggatcacgtcattgatactgagaccgatctcaaagcagcttgtatcctcaaagacgccataaagcgatctcccactggtttcctcaccgcaaaatccgtcgccgattggcaaaaactccttggtctcaccgtccctgttctccgcttcttgcgcaggtatccgactctgtttcacgaatttcctcatgctcgttacgcaagcttaccatgtttcaagctaacggacacagcactaatgcttgactcacaagaagagattattcatcaaagccacgaggctgatacagtggagagactctgtagagttctgatgatgatgagatcaaaaactgtctctcttagatcactacattctctcaaattcgatctcggtttacccgataactacgaaaagacgctagtcatgaaataccctgatcatttctgcttcgtcaaggcttctaatggtaacccgtgtttaaagcttgtaaaatggcgtgatgagttcgcattctcggcgctgcagaagcgaaacgaggacaatgatgtttccggggaggagtctagataccgcgagttcaagagaggtcagtctacgttgacttttcctatgagtttccctagaggatatggagcacagaagaaggtcaaagcatggatggatgagtttcaaaaacttccctacatatctccttacgatgacccgagtaacattgatccggaaagcgatctcatggagaaacgagctgtggctgttttgcacgagctcttgagcttgactatccacaagaaaaccaagaggaactacttgagaagcatgagagcggagctcaacattccgcacaagttcactcgtctattcacgcgataccccggcattttctacctctcattgaagtgtaagacaacaactgtgatcctcaaagaagggtatcgccgaggaaaactagtggatccgcatcctctcactcgtcttcgagataagttttatcatgtgatgagaacagggtttctttatcgggcgagagggctaggcatggtctctaaagaggaacttttgcttgataggccagaggatgaccttgaggaagaaggctctgaagaagaagagattgtggaaggaagtgagcttgaagaagattctgaagctgaatagcaatagttgttgaatctaattgttgtatgttaattcacacagagcaacaatttatgtacctgcattttatctttttgaagtaacggaacggagtttaaacaatgtaagcacaaagtccttaaaatgatataaagagagattgtatttcacc

SEQ ID NO: 5353 - protein, 418 aa, Arabidopsis thaliana
MFVKSQSFLFSVSKLFHQHQQWRGMGAMTKVRLKWVKNKNLDHVIDTETDLKAACILKDAIKRSPTGFLTAKSVADWQKLLGLTVPVLRFLRRYPTLFHEFPHARYASLPCFKLTDTALMLDSQEEIIHQSHEADTVERLCRVLMMMRSKTVSLRSLHSLKFDLGLPDNYEKTLVMKYPDHFCFVKASNGNPCLKLVKWRDEFAFSALQKRNEDNDVSGEESRYREFKRGQSTLTFPMSFPRGYGAQKKVKAWMDEFQKLPYISPYDDPSNIDPESDLMEKRAVAVLHELLSLTIHKKTKRNYLRSMRAELNIPHKFTRLFTRYPGIFYLSLKCKTTTVILKEGYRRGKLVDPHPLTRLRDKFYHVMRTGFLYRARGLGMVSKEELLLDRPEDDLEEEGSEEEEIVEGSELEEDSEAE

SEQ ID NO: 5354 - protein, 394 aa, Arabidopsis thaliana
MGAMTKVRLKWVKNKNLDHVIDTETDLKAACILKDAIKRSPTGFLTAKSVADWQKLLGLTVPVLRFLRRYPTLFHEFPHARYASLPCFKLTDTALMLDSQEEIIHQSHEADTVERLCRVLMMMRSKTVSLRSLHSLKFDLGLPDNYEKTLVMKYPDHFCFVKASNGNPCLKLVKWRDEFAFSALQKRNEDNDVSGEESRYREFKRGQSTLTFPMSFPRGYGAQKKVKAWMDEFQKLPYISPYDDPSNIDPESDLMEKRAVAVLHELLSLTIHKKTKRNYLRSMRAELNIPHKFTRLFTRYPGIFYLSLKCKTTTVILKEGYRRGKLVDPHPLTRLRDKFYHVMRTGFLYRARGLGMVSKEELLLDRPEDDLEEEGSEEEEIVEGSELEEDSEAE

SEQ ID NO: 5355 - protein, 391 aa, Arabidopsis thaliana
MTKVRLKWVKNKNLDHVIDTETDLKAACILKDAIKRSPTGFLTAKSVADWQKLLGLTVPVLRFLRRYPTLFHEFPHARYASLPCFKLTDTALMLDSQEEIIHQSHEADTVERLCRVLMMMRSKTVSLRSLHSLKFDLGLPDNYEKTLVMKYPDHFCFVKASNGNPCLKLVKWRDEFAFSALQKRNEDNDVSGEESRYREFKRGQSTLTFPMSFPRGYGAQKKVKAWMDEFQKLPYISPYDDPSNIDPESDLMEKRAVAVLHELLSLTIHKKTKRNYLRSMRAELNIPHKFTRLFTRYPGIFYLSLKCKTTTVILKEGYRRGKLVDPHPLTRLRDKFYHVMRTGFLYRARGLGMVSKEELLLDRPEDDLEEEGSEEEEIVEGSELEEDSEAE

SEQ ID NO: 5356 - DNA, 2412 bp, Arabidopsis thaliana
aaaaaaagcgtcgttgagaggttagagacgaaggaaggaggcagaggatagagagatagcgaggctaatggatcagtgactcactgagtcagattttaccgattcattgcctccattgaagcctcttttctcagattctacgcttcactgtctcttctccatgtgcgtctcctcctcctccgtttcttcagatcttgctttccggtgacggttttaatcttcttctctctggtaacacgtataaagcatggcttacctgatgtagacatgtagtgttaggctaaagactcctcttttcacttctgtcttgttgagtttgtgttggtttaaggctttaagccaaaggcgttgttggtctgacaagatggcaatggcggtgtttaaggctcctctaaaaggggaatttcatggggctagaaagatggaagggaagcaatataagcaccatctgcttcagcaacagtctacagggagaagacgtgtgttcgtgcaaaccgatactggctgtgtgttgggagttgagttggatcgtaatgacaatgttcatactgtgaagaaaaggcttcagattgcgtttaactttcctactgaggaaagctctttgacctttggggatatggtgttgaagaatgacttgagtgctgtgaggaatgattctccgcttctcttaaagcgtaacttaatgcacagaagctcttctactccgtgtctttcacctactgggaatgatctgcagaggaaagatcgaagtggtcctattgagatacttagtcactcgccctgttttctgtctttgaagcaaacagcgaatgacattgttaaggcgatgaagatgggtgttgaaccaatccctgttaatggtgggcttggaggggcatactattttagggatgaaaagggtcaaagtgttgctattgtcaagcctacggatgaagagccgtttgcccctaacaatcctaaaggcttcgtagggaaagcgcttgggcagcctggtttaaagccttctgtgcgggttggggaaaccgggtttagagaagttgctgcataccttcttgattatgatcactttgctaatgttcctcctacggctcttgtgaagataacacactctgttttcaatgtcaatgatggaatggatgggaacaaatctcgtgagaagaagaagctggtcagcagcaagattgcttcgttccagaagtttgtacctcatgattttgatgccagtgatcacgggacttcaagcttccctgtcgcttctgtgcaccgcattgggattttggacataaggattctcaacacagaccggcatggtggaaatcttttggtgaagaagcttgatgatggtggtgttgggaggtttggtcaagtggagcttattccaatagatcatggtctttgcttaccagaaacactcgaagatccttacttcgaatggattcattggcctcaggcttcaatacctttctctgaagaagaacttgactacatacaaagtcttgatccagtgaaagattgtgaaatgcttcgaagagagcttccgatgattcgagaggcttgtctcagggttctagttctctgtaccgttttccttaaagaagctgctgtttttggactttgtcttgcagagatcggtgagatgatgactcgagaatttcgtgcaggagaagaggaaccaagtgaactagaaatgttgtgtatcgaagccaagagattaaccactgaacaagacgttttgtctcccaagtcagatggagaaggagagacagagtttcagtttgatatagactacaatgagctagactcggtttatggctctgagacagaaaccgatgagttcttcgccaagaacccattttcaaacggacgttcttcacttggagagctcaaagagagcattgctgaagaagaagaagatgacgaagaggaggcaaaacttactctatctctctcaaagctttccacatcaatgaagaacaatctaagcaacaccatgggatccggatacctgaaacctccgaaagacaaccaaaccgacaaagcattggtaagtcacaagagcgcgaacgtgcagctcccgcttagcgtaaactttgtgaagttagccgacatgaaagaagttgaatgggttgtgttcttggagaggtttcaggagttgctttactcggcttttgcagaacgcaagaccatgacgttgaggaacacacagagacttggtacatcgtgcaagttttgagatcatacgagttcacataagagaagaccaaagatttcacttttacgagttttgaagcaattacttgttagctacgttaagattagtttacttttgtagcgaccacgagcacttgcaatgtgaagaaatgtttattttgcctgtaaatattctttaccatttttttttccctaacttcc

SEQ ID NO: 5357 - protein, 622 aa, Arabidopsis thaliana
MAMAVFKAPLKGEFHGARKMEGKQYKHHLLQQQSTGRRRVFVQTDTGCVLGVELDRNDNVHTVKKRLQIAFNFPTEESSLTFGDMVLKNDLSAVRNDSPLLLKRNLMHRSSSTPCLSPTGNDLQRKDRSGPIEILSHSPCFLSLKQTANDIVKAMKMGVEPIPVNGGLGGAYYFRDEKGQSVAIVKPTDEEPFAPNNPKGFVGKALGQPGLKPSVRVGETGFREVAAYLLDYDHFANVPPTALVKITHSVFNVNDGMDGNKSREKKKLVSSKIASFQKFVPHDFDASDHGTSSFPVASVHRIGILDIRILNTDRHGGNLLVKKLDDGGVGRFGQVELIPIDHGLCLPETLEDPYFEWIHWPQASIPFSEEELDYIQSLDPVKDCEMLRRELPMIREACLRVLVLCTVFLKEAAVFGLCLAEIGEMMTREFRAGEEEPSELEMLCIEAKRLTTEQDVLSPKSDGEGETEFQFDIDYNELDSVYGSETETDEFFAKNPFSNGRSSLGELKESIAEEEEDDEEEAKLTLSLSKLSTSMKNNLSNTMGSGYLKPPKDNQTDKALVSHKSANVQLPLSVNFVKLADMKEVEWVVFLERFQELLYSAFAERKTMTLRNTQRLGTSCKF

SEQ ID NO: 5358 - protein, 620 aa, Arabidopsis thaliana
MAVFKAPLKGEFHGARKMEGKQYKHHLLQQQSTGRRRVFVQTDTGCVLGVELDRNDNVHTVKKRLQIAFNFPTEESSLTFGDMVLKNDLSAVRNDSPLLLKRNLMHRSSSTPCLSPTGNDLQRKDRSGPIEILSHSPCFLSLKQTANDIVKAMKMGVEPIPVNGGLGGAYYFRDEKGQSVAIVKPTDEEPFAPNNPKGFVGKALGQPGLKPSVRVGETGFREVAAYLLDYDHFANVPPTALVKITHSVFNVNDGMDGNKSREKKKLVSSKIASFQKFVPHDFDASDHGTSSFPVASVHRIGILDIRILNTDRHGGNLLVKKLDDGGVGRFGQVELIPIDHGLCLPETLEDPYFEWIHWPQASIPFSEEELDYIQSLDPVKDCEMLRRELPMIREACLRVLVLCTVFLKEAAVFGLCLAEIGEMMTREFRAGEEEPSELEMLCIEAKRLTTEQDVLSPKSDGEGETEFQFDIDYNELDSVYGSETETDEFFAKNPFSNGRSSLGELKESIAEEEEDDEEEAKLTLSLSKLSTSMKNNLSNTMGSGYLKPPKDNQTDKALVSHKSANVQLPLSVNFVKLADMKEVEWVVFLERFQELLYSAFAERKTMTLRNTQRLGTSCKF

SEQ ID NO: 5359 - protein, 603 aa, Arabidopsis thaliana
MEGKQYKHHLLQQQSTGRRRVFVQTDTGCVLGVELDRNDNVHTVKKRLQIAFNFPTEESSLTFGDMVLKNDLSAVRNDSPLLLKRNLMHRSSSTPCLSPTGNDLQRKDRSGPIEILSHSPCFLSLKQTANDIVKAMKMGVEPIPVNGGLGGAYYFRDEKGQSVAIVKPTDEEPFAPNNPKGFVGKALGQPGLKPSVRVGETGFREVAAYLLDYDHFANVPPTALVKITHSVFNVNDGMDGNKSREKKKLVSSKIASFQKFVPHDFDASDHGTSSFPVASVHRIGILDIRILNTDRHGGNLLVKKLDDGGVGRFGQVELIPIDHGLCLPETLEDPYFEWIHWPQASIPFSEEELDYIQSLDPVKDCEMLRRELPMIREACLRVLVLCTVFLKEAAVFGLCLAEIGEMMTREFRAGEEEPSELEMLCIEAKRLTTEQDVLSPKSDGEGETEFQFDIDYNELDSVYGSETETDEFFAKNPFSNGRSSLGELKESIAEEEEDDEEEAKLTLSLSKLSTSMKNNLSNTMGSGYLKPPKDNQTDKALVSHKSANVQLPLSVNFVKLADMKEVEWVVFLERFQELLYSAFAERKTMTLRNTQRLGTSCKF

SEQ ID NO: 5360 - DNA, 2149 bp, Arabidopsis thaliana
cctcttctcccaaataaaaaaagttactcagatctcacgatttgagcagaatacgcaatgaggacaccgacgacgattctccttcttgtcggagctatcctcttctccggcgccggctatgtcagatccgacgcctccgaccaccgttacaaggaaggagacaccgttcctctctacgccaacaaggtcggcccatttcacaatccaagtgagacgtatcgatattttgatcttcccttctgtatcccagagggtgtgaaagagaagaaggaagctcttggcgaggttctaaacggggatcggctagttagcgctccatacaagctcaacttcagagatgaaaaagagtctgaggtatactgcaacaagaagttgagtaaagaagaggtcaaacagttcagaaaagctgttgagaaggactactacttccagatgtactatgatgatctacctatctggggattcattggaaaggttgacaaggatatcaaatctgatccgagtgaattcaaatatttcttgtacaagcacattcagtttgagattctatacaataaggaccgtgtgatcgagatcagtgctagaatggatcctcattcgcttgtggatctcactgaggataaggaagttgatgcagagtttatgtacactgtgaagtggaaggaaactgagactccttttgagaaaagaatggagaagtactctatgtcttcttctcttccacatcatttggaaatccactggttctccattattaactcctgtgtcactgtccttcttttgactggattccttgcaactatcttgatgcgagtcctcaagaacgatttcatgaagtatgctcaagatgaggaagctgctgatgatcaagaggaaactggatggaagtacattcatggcgatgtgtttcggttccctactcacaattctttatttgctgcatcgctcggtagtggcactcaattgttcacgctcaccatatttattttcatgcttgctcttgttggagtgttctacccatacaaccgaggagcactctttaccgctttggtggtcatttacgctctcacttctggaattgccggatacacatctgcctctttctactgtcaacttgaaggaaaaagctgggtgaggaacttgttactcactggatgtctcttctgtggcccattattcctaaccttttgcttccttaacaccgtagccatcacctacactgcaaccgctgcattaccctttggaaccattgtggtgatcgtccttatatggactctagttacctcacctttactcgttttgggtggtatcgcgggtaaaaacagcaaagcagagttccaagcaccatgccgtacaaccaaatatcctcgtgagattccaccactcccttggtacagaagtgctattcctcagatggccatggctggttttcttcctttcagtgccatctacatcgagctttactacattttcgctagtgtctggggtcaccggatctacaccatctacagcatcttattcatcgttttcatcattctcatcatcgtcactgcttttataaccgttgccttgacttacttccaactcgctgctgaagatcaccaatggtggtggagatcattcctatgtggtggatcgaccggtttgtttatctacgcatactgcttatactattactacgcacgatcagacatgtcgggttttatgcaaacctcgtttttcttcggatacatggcttgcatttgctacggattcttcttaatgctcggaacagttggcttccgcgcagccctcctctttgtccgtcacatttaccggtcgatcaaatgcgagtaagaaggtctgtacaccaatcttcttatgttgatttccttcttcttcttctgccttcttacgaattttgcttagaacaaagaagataaagagataggttgttagaaagaagagagacacaaagacaatgtctgattattttctaaagaagcatctcttctcattagaggttttagcgagagtctctcttcttctctctttattttgggctacagaaattaaattacttgtatcctttctatatattttacctattgtaaaagactatcaatacctttgaattcgagtttctttgtatctaataaatttcaaaact

SEQ ID NO: 5361 - protein, 592 aa, Arabidopsis thaliana
MRTPTTILLLVGAILFSGAGYVRSDASDHRYKEGDTVPLYANKVGPFHNPSETYRYFDLPFCIPEGVKEKKEALGEVLNGDRLVSAPYKLNFRDEKESEVYCNKKLSKEEVKQFRKAVEKDYYFQMYYDDLPIWGFIGKVDKDIKSDPSEFKYFLYKHIQFEILYNKDRVIEISARMDPHSLVDLTEDKEVDAEFMYTVKWKETETPFEKRMEKYSMSSSLPHHLEIHWFSIINSCVTVLLLTGFLATILMRVLKNDFMKYAQDEEAADDQEETGWKYIHGDVFRFPTHNSLFAASLGSGTQLFTLTIFIFMLALVGVFYPYNRGALFTALVVIYALTSGIAGYTSASFYCQLEGKSWVRNLLLTGCLFCGPLFLTFCFLNTVAITYTATAALPFGTIVVIVLIWTLVTSPLLVLGGIAGKNSKAEFQAPCRTTKYPREIPPLPWYRSAIPQMAMAGFLPFSAIYIELYYIFASVWGHRIYTIYSILFIVFIILIIVTAFITVALTYFQLAAEDHQWWWRSFLCGGSTGLFIYAYCLYYYYARSDMSGFMQTSFFFGYMACICYGFFLMLGTVGFRAALLFVRHIYRSIKCE

SEQ ID NO: 5362 - protein, 467 aa, Arabidopsis thaliana
MYYDDLPIWGFIGKVDKDIKSDPSEFKYFLYKHIQFEILYNKDRVIEISARMDPHSLVDLTEDKEVDAEFMYTVKWKETETPFEKRMEKYSMSSSLPHHLEIHWFSIINSCVTVLLLTGFLATILMRVLKNDFMKYAQDEEAADDQEETGWKYIHGDVFRFPTHNSLFAASLGSGTQLFTLTIFIFMLALVGVFYPYNRGALFTALVVIYALTSGIAGYTSASFYCQLEGKSWVRNLLLTGCLFCGPLFLTFCFLNTVAITYTATAALPFGTIVVIVLIWTLVTSPLLVLGGIAGKNSKAEFQAPCRTTKYPREIPPLPWYRSAIPQMAMAGFLPFSAIYIELYYIFASVWGHRIYTIYSILFIVFIILIIVTAFITVALTYFQLAAEDHQWWWRSFLCGGSTGLFIYAYCLYYYYARSDMSGFMQTSFFFGYMACICYGFFLMLGTVGFRAALLFVRHIYRSIKCE

SEQ ID NO: 5363 - protein, 416 aa, Arabidopsis thaliana
MDPHSLVDLTEDKEVDAEFMYTVKWKETETPFEKRMEKYSMSSSLPHHLEIHWFSIINSCVTVLLLTGFLATILMRVLKNDFMKYAQDEEAADDQEETGWKYIHGDVFRFPTHNSLFAASLGSGTQLFTLTIFIFMLALVGVFYPYNRGALFTALVVIYALTSGIAGYTSASFYCQLEGKSWVRNLLLTGCLFCGPLFLTFCFLNTVAITYTATAALPFGTIVVIVLIWTLVTSPLLVLGGIAGKNSKAEFQAPCRTTKYPREIPPLPWYRSAIPQMAMAGFLPFSAIYIELYYIFASVWGHRIYTIYSILFIVFIILIIVTAFITVALTYFQLAAEDHQWWWRSFLCGGSTGLFIYAYCLYYYYARSDMSGFMQTSFFFGYMACICYGFFLMLGTVGFRAALLFVRHIYRSIKCE

SEQ ID NO: 5364 - DNA, 1026 bp, Arabidopsis thaliana
gcgggtggcattgattcatctgatcaatgacaaaggataagaaaaactaaaagagagcaaattcagaagctgagaatatgaagacggagcttgaagaagaagaagaagaagaatggagatccgttcacgaggttttattaatcgttcttccttatcttcattctctgttcgagcttctctctatgattcgcgtttcgcgatctctcagagacgcgatcagagacgaaaccgcgttatggacaaaactcgttattgaaccaccgttgagctctcgtctaaccgatgatattctatcggagttcagttccaaatccgccggaaagctgaaaactctgattctccggcaatgtcttatggtcaccaacaagggactccgtcgtgttgtggatgctaatcctctcatcactaagataattgtgcctggatgctctggattgactcctgaaggaatcatggaatgtgttgaaagcttgtctaagaacaatcataaactagagacacttcacatcaatggcgtcaatggctttaccaaacaacatctctcagcactgtatacttacctttcttccgagggaacgattgacctcgaggtctgtcccaaatgcgatgaagtaaggatgattccgtcttgctcaagagaatcatgtaaccagaagcaacgcaagtgccgtggatgctggctttgtatccctagatgtgcagagtgcgcagtgtgccttgttggttcagatactgagagtcaagaagcagcgtgtggtaatgatgatgttctgtgtcttgaatgttggcttgtgcttcccaagtgcagattctgcaataaaccatattgcactaatcacagtagtcgtcgacatgagattgcaatcactgatgctgcatctcggccttcgtttgaatgtgaagcttgttactatagggcaggtacaaacccatatgaagtcgactatcaaatctaaacaaacactttgttgtctgcaactttgtctattttgtatatgacaagcttggattgtgaaatattcagcc

SEQ ID NO: 5365 - protein, 292 aa, Arabidopsis thaliana
MKTELEEEEEEEWRSVHEVLLIVLPYLHSLFELLSMIRVSRSLRDAIRDETALWTKLVIEPPLSSRLTDDILSEFSSKSAGKLKTLILRQCLMVTNKGLRRVVDANPLITKIIVPGCSGLTPEGIMECVESLSKNNHKLETLHINGVNGFTKQHLSALYTYLSSEGTIDLEVCPKCDEVRMIPSCSRESCNQKQRKCRGCWLCIPRCAECAVCLVGSDTESQEAACGNDDVLCLECWLVLPKCRFCNKPYCTNHSSRRHEIAITDAASRPSFECEACYYRAGTNPYEVDYQI

SEQ ID NO: 5366 - protein, 257 aa, Arabidopsis thaliana
MIRVSRSLRDAIRDETALWTKLVIEPPLSSRLTDDILSEFSSKSAGKLKTLILRQCLMVTNKGLRRVVDANPLITKIIVPGCSGLTPEGIMECVESLSKNNHKLETLHINGVNGFTKQHLSALYTYLSSEGTIDLEVCPKCDEVRMIPSCSRESCNQKQRKCRGCWLCIPRCAECAVCLVGSDTESQEAACGNDDVLCLECWLVLPKCRFCNKPYCTNHSSRRHEIAITDAASRPSFECEACYYRAGTNPYEVDYQI

SEQ ID NO: 5367 - protein, 200 aa, Arabidopsis thaliana
MVTNKGLRRVVDANPLITKIIVPGCSGLTPEGIMECVESLSKNNHKLETLHINGVNGFTKQHLSALYTYLSSEGTIDLEVCPKCDEVRMIPSCSRESCNQKQRKCRGCWLCIPRCAECAVCLVGSDTESQEAACGNDDVLCLECWLVLPKCRFCNKPYCTNHSSRRHEIAITDAASRPSFECEACYYRAGTNPYEVDYQI

SEQ ID NO: 5368 - DNA, 1561 bp, Arabidopsis thaliana
gaggaggaagaagacgatggttgacacttgacagagtaagctcagaaatggcgactctggtttcgaattgaacttgtgaggaaggtttttagggttataaggtgataaagaaaatggggaatagtggagatttggagcaggctctgcaagatgggaatatctttagacagctcaatgctcttattgtagctcatctccgtcatcacaatctctcacaagttgcaagtgcggttgcttcagcaacaatgacaccattgaatattgaggttcctccaaaccgtcttttggagcttgttgcaaagggtcttgcagcggagaacaatgggacattgagaggtgtttcttcatcagtcttgttaccttcttcttatggatcaatcactactcctcgaacagcttctatcgactttagtgttaatcatgcgaagggctcatcaaagactatcccaaagcatgaatcaaagacgctatcagagcacaagagcgttgttaggtgtgcaagatttagtcctgatggaatgttttttgctactggtggtgcagacacatctattaagctctttgaggtgccaaaagttaaacagatgatttcaggagatactcaagctcgaccattaatacggactttttatgatcatgctgaaccgataaacgatcttgatttccaccctcggagcacaatcctaatatctagtgccaaagacaactgtataaagttcttcgacttctccaaaaccacggctaaacgagcattcaaagtttttcaggatacccataacgtgcgctctatatcttttcatccgtcaggagagtttcttcttgcaggaaccgatcatccaattccacatctgtacgatgtaaacacatatcagtgctttcttccttcaaacttccctgacagtggagtaagtggagccattaatcaggtgagatattcttccacgggatccatctacattacagcctcaaaggatggagctattcgactctttgacggggttagcgcaaagtgtgttcgctccattggcaatgcacatggaaaatcagaggtcacaagcgcagtgttcactaaagatcaaaggtttgttctctcatccggtaaggattccacagttaagttatgggaaataggctcaggtcgaatggtaaaggaatatcttggagcaaagcgggtaaaactgcggtctcaggcaatttttaacgacactgaagagtttgtaatctccatagatgaagcaagcaatgaggtcgttacatgggatgctagaaccgcagataaagtggcaaagtggccttctaaccataacggtgcaccacggtggatcgagcactcgccggttgaatcagtctttgttacttgtggaatagatagatcaattcggttctggaaggaatccgtttagatgagaatccaatcaatcaaagtagtgtattttattctcttaaaacataaaccatacatgaaaaaaaaaaaaaaatccgttgttcatgttgctttgtagaagacgcaagtaatcttccaggtcactgcaaaagaacgaaatcaaagcaggtgagcttc

SEQ ID NO: 5369 - protein, 429 aa, Arabidopsis thaliana
MGNSGDLEQALQDGNIFRQLNALIVAHLRHHNLSQVASAVASATMTPLNIEVPPNRLLELVAKGLAAENNGTLRGVSSSVLLPSSYGSITTPRTASIDFSVNHAKGSSKTIPKHESKTLSEHKSVVRCARFSPDGMFFATGGADTSIKLFEVPKVKQMISGDTQARPLIRTFYDHAEPINDLDFHPRSTILISSAKDNCIKFFDFSKTTAKRAFKVFQDTHNVRSISFHPSGEFLLAGTDHPIPHLYDVNTYQCFLPSNFPDSGVSGAINQVRYSSTGSIYITASKDGAIRLFDGVSAKCVRSIGNAHGKSEVTSAVFTKDQRFVLSSGKDSTVKLWEIGSGRMVKEYLGAKRVKLRSQAIFNDTEEFVISIDEASNEVVTWDARTADKVAKWPSNHNGAPRWIEHSPVESVFVTCGIDRSIRFWKESV

SEQ ID NO: 5370 - protein, 385 aa, Arabidopsis thaliana
MTPLNIEVPPNRLLELVAKGLAAENNGTLRGVSSSVLLPSSYGSITTPRTASIDFSVNHAKGSSKTIPKHESKTLSEHKSVVRCARFSPDGMFFATGGADTSIKLFEVPKVKQMISGDTQARPLIRTFYDHAEPINDLDFHPRSTILISSAKDNCIKFFDFSKTTAKRAFKVFQDTHNVRSISFHPSGEFLLAGTDHPIPHLYDVNTYQCFLPSNFPDSGVSGAINQVRYSSTGSIYITASKDGAIRLFDGVSAKCVRSIGNAHGKSEVTSAVFTKDQRFVLSSGKDSTVKLWEIGSGRMVKEYLGAKRVKLRSQAIFNDTEEFVISIDEASNEVVTWDARTADKVAKWPSNHNGAPRWIEHSPVESVFVTCGIDRSIRFWKESV

SEQ ID NO: 5371 - protein, 294 aa, Arabidopsis thaliana
MFFATGGADTSIKLFEVPKVKQMISGDTQARPLIRTFYDHAEPINDLDFHPRSTILISSAKDNCIKFFDFSKTTAKRAFKVFQDTHNVRSISFHPSGEFLLAGTDHPIPHLYDVNTYQCFLPSNFPDSGVSGAINQVRYSSTGSIYITASKDGAIRLFDGVSAKCVRSIGNAHGKSEVTSAVFTKDQRFVLSSGKDSTVKLWEIGSGRMVKEYLGAKRVKLRSQAIFNDTEEFVISIDEASNEVVTWDARTADKVAKWPSNHNGAPRWIEHSPVESVFVTCGIDRSIRFWKESV

SEQ ID NO: 5372 - DNA, 1281 bp, Arabidopsis thaliana
aaaattgtaattataatcacaattatcaaaacaccttcattgtagtagaggttaactatcactccgggttattgcgacgtcgtttaggcttggatctgacgatctatgtgatctaaaaccctaagcaaggaggtccccattttcgtcaccggagagggaggattaatggcggcgatgttaatcggaagagcttttaagtcagcgagaaactctaatcttgctattcgtgctagatccttatgtacgacatctgccgctcgtcaacccgattccgatactcagccatcggaatcttcgtcgtcgttcacattcgagaaggaaaatgagaaacccatcttagtgaaagctccgaactctcgccggaaaaacgaatcggattcagtgacgatgccgacgtctttcatgactggttcgatcgtagggaagaggttttacaagaaagtgacgactagagaagctgatgatggaaatggatggactgtgatgcttgattatagaacccttaaaaccccttcgaaaagacctctcaagcttcgttctttggcacttgctaaggccattgctgctgagtgggagtatcagctaacagaagggatcagaccattcacaatgccgcttatgagactagcatgtactgcacttgaaagagttcctcttacgcgttcaaagatcatagaacatttatcgagaaagatacatcaagatctcgtctttttccgagcacctgaagataatgatctaactagtgacgtccatgatattcaggtagagagtattgatcctctacttgagtggatagagtcagagtttcgggtcaaaccgaaagtgtattctagcatcttcgggggtaaacaagacgacaagctagtgaaagcagtagaagaactgctcaagaaaacgaatgatggtgaactcgcaagcattgatgcactccaagcatcagctcactctatagtaatcgccctcggtatcttctgtgggaaactccagatcgatgatgcaatcaaattgattagacttgaagaagatttacaggtggacaaatggggactagtcgaaggcgggcatgacattgatgttgctgatctcaaagttcagatctcatcagctacagtgtttcttgctctatcccgtgaaaactgatcattagtctctcattttcctcaacacattaaaaaacaagcttatctgtttgtagattagttatttactttccaagttgcaagaggtatgtgtaaacatttttctctcttattcaccaataaagcaaaactcgaaatc

SEQ ID NO: 5373 - protein, 325 aa, Arabidopsis thaliana
MAAMLIGRAFKSARNSNLAIRARSLCTTSAARQPDSDTQPSESSSSFTFEKENEKPILVKAPNSRRKNESDSVTMPTSFMTGSIVGKRFYKKVTTREADDGNGWTVMLDYRTLKTPSKRPLKLRSLALAKAIAAEWEYQLTEGIRPFTMPLMRLACTALERVPLTRSKIIEHLSRKIHQDLVFFRAPEDNDLTSDVHDIQVESIDPLLEWIESEFRVKPKVYSSIFGGKQDDKLVKAVEELLKKTNDGELASIDALQASAHSIVIALGIFCGKLQIDDAIKLIRLEEDLQVDKWGLVEGGHDIDVADLKVQISSATVFLALSREN

SEQ ID NO: 5374 - protein, 322 aa, Arabidopsis thaliana
MLIGRAFKSARNSNLAIRARSLCTTSAARQPDSDTQPSESSSSFTFEKENEKPILVKAPNSRRKNESDSVTMPTSFMTGSIVGKRFYKKVTTREADDGNGWTVMLDYRTLKTPSKRPLKLRSLALAKAIAAEWEYQLTEGIRPFTMPLMRLACTALERVPLTRSKIIEHLSRKIHQDLVFFRAPEDNDLTSDVHDIQVESIDPLLEWIESEFRVKPKVYSSIFGGKQDDKLVKAVEELLKKTNDGELASIDALQASAHSIVIALGIFCGKLQIDDAIKLIRLEEDLQVDKWGLVEGGHDIDVADLKVQISSATVFLALSREN

SEQ ID NO: 5375 - protein, 251 aa, Arabidopsis thaliana
MPTSFMTGSIVGKRFYKKVTTREADDGNGWTVMLDYRTLKTPSKRPLKLRSLALAKAIAAEWEYQLTEGIRPFTMPLMRLACTALERVPLTRSKIIEHLSRKIHQDLVFFRAPEDNDLTSDVHDIQVESIDPLLEWIESEFRVKPKVYSSIFGGKQDDKLVKAVEELLKKTNDGELASIDALQASAHSIVIALGIFCGKLQIDDAIKLIRLEEDLQVDKWGLVEGGHDIDVADLKVQISSATVFLALSREN

SEQ ID NO: 5376 - DNA, 1517 bp, Arabidopsis thaliana
aaaaaaatctcacattttttttcttcagtttcatctaaaaagattcaattcatatcgaaaataaaaaaggaacaaactttgctttttgttttcgcaatctccgattcgttaactcgttttctctcttcacctgtttcaagcttttcgatccaacaaatcacgagattcctctttccggtgtggtctccggcgacctaaaataaagagttaattctcgtggtcgtggagagcaaatgagggatgttctcctggttagcgagaatggctcttttttgtttacgacctatgcggcgatacggtcgtatgaacagagatgatgacgatgatgatgatcacgacggtgactcttcttcctccggtgactcccttctttggtctagagaactcgagagacattctttcggagatttctctattgctgttgtgcaagctaacgaggttattgaagatcatagtcaagtcgagactggaaacggtgccgttttcgtcggagtttacgatggtcatggtggtcctgaagcttctagatacatctctgatcatctcttttctcatttgatgagagtttcgagagaaaggagttgtatttcagaggaggctttaagagctgcattttctgctactgaggaagggtttctcacgcttgtgcgaaggacttgcgggttgaaaccgttgattgcagctgttggatcttgttgtttggttggagttatttggaaagggactttgcttatcgctaatgttggtgattctcgtgctgtgcttggttccatgggtagtaataataataggtcaaacaagattgtagctgagcaactgactagtgatcacaatgctgctttggaagaagttagacaagagcttaggtcgttgcatcctgatgattcacatatcgttgtccttaaacatggtgtgtggcgcatcaaaggcatcattcaggtatctagatcaataggggatgcatatttaaagcgcccagagttctcacttgacccttcatttccgcggttccatctcgctgaagaactacaaagacctgttttatcagcagagccttgtgtctacacaagagtcttacaaacaagtgacaagtttgtgatattcgcatcagatggactctgggaacaaatgaccaaccagcaagctgtagagatagtgaataaacacccccgtcctggaatagcgagaaggctggtgagaagagcgataaccatagctgcgaaaaagagagagatgaattacgatgatttgaagaaagtggagagaggagtgaggagattctttcatgatgatataacagtggttgtgatattcatagacaatgagcttcttatggtggagaaagctactgttcctgaattgtccattaaaggtttttctcataccgttggaccttccaagttcagtatcttcctctcttagacatttttgttacatttctttactttactatcacagtcttcacaaatatgataaaaatgaacacggatcgattttgtaccaacacgtttgagttt

SEQ ID NO: 5377 - protein, 393 aa, Arabidopsis thaliana
MFSWLARMALFCLRPMRRYGRMNRDDDDDDDHDGDSSSSGDSLLWSRELERHSFGDFSIAVVQANEVIEDHSQVETGNGAVFVGVYDGHGGPEASRYISDHLFSHLMRVSRERSCISEEALRAAFSATEEGFLTLVRRTCGLKPLIAAVGSCCLVGVIWKGTLLIANVGDSRAVLGSMGSNNNRSNKIVAEQLTSDHNAALEEVRQELRSLHPDDSHIVVLKHGVWRIKGIIQVSRSIGDAYLKRPEFSLDPSFPRFHLAEELQRPVLSAEPCVYTRVLQTSDKFVIFASDGLWEQMTNQQAVEIVNKHPRPGIARRLVRRAITIAAKKREMNYDDLKKVERGVRRFFHDDITVVVIFIDNELLMVEKATVPELSIKGFSHTVGPSKFSIFLS

SEQ ID NO: 5378 - protein, 386 aa, Arabidopsis thaliana
MALFCLRPMRRYGRMNRDDDDDDDHDGDSSSSGDSLLWSRELERHSFGDFSIAVVQANEVIEDHSQVETGNGAVFVGVYDGHGGPEASRYISDHLFSHLMRVSRERSCISEEALRAAFSATEEGFLTLVRRTCGLKPLIAAVGSCCLVGVIWKGTLLIANVGDSRAVLGSMGSNNNRSNKIVAEQLTSDHNAALEEVRQELRSLHPDDSHIVVLKHGVWRIKGIIQVSRSIGDAYLKRPEFSLDPSFPRFHLAEELQRPVLSAEPCVYTRVLQTSDKFVIFASDGLWEQMTNQQAVEIVNKHPRPGIARRLVRRAITIAAKKREMNYDDLKKVERGVRRFFHDDITVVVIFIDNELLMVEKATVPELSIKGFSHTVGPSKFSIFLS

SEQ ID NO: 5379 - protein, 378 aa, Arabidopsis thaliana
MRRYGRMNRDDDDDDDHDGDSSSSGDSLLWSRELERHSFGDFSIAVVQANEVIEDHSQVETGNGAVFVGVYDGHGGPEASRYISDHLFSHLMRVSRERSCISEEALRAAFSATEEGFLTLVRRTCGLKPLIAAVGSCCLVGVIWKGTLLIANVGDSRAVLGSMGSNNNRSNKIVAEQLTSDHNAALEEVRQELRSLHPDDSHIVVLKHGVWRIKGIIQVSRSIGDAYLKRPEFSLDPSFPRFHLAEELQRPVLSAEPCVYTRVLQTSDKFVIFASDGLWEQMTNQQAVEIVNKHPRPGIARRLVRRAITIAAKKREMNYDDLKKVERGVRRFFHDDITVVVIFIDNELLMVEKATVPELSIKGFSHTVGPSKFSIFLS

SEQ ID NO: 5380 - DNA, 1334 bp, Arabidopsis thaliana
acagcaaaaaatcgaaaatggttgcctcagccgccgcacatgagcaccgatcaatccaccaccgtcactttaccagacgtcatgactgctccagttcgacctgacattgtcaacttcgtccacgcccaaatctccaacaacagccgtcagccttacgcagtctccaaaaaggccggtcaccaaacctccgccgagtcctggggaaccggaagagccgtgtcacgtatccctcgtgttcctggtggtggaactcaccgtgccggtcaagcagcgttcggaaacatgtgtcgtggtggtcgtatgtttgctccgactaagatctggagacgctggcaccgtcgtgtcaatgtcaacatgaagaggcacgcgattgtttctgcaatcgctgctactgctgttccagctcttgtgatggctcgtggtcacaagatcgagaatgttcctgagatgcctcttgttgttagcgactcagctgaagctggtggagaagacatcagctgcgatcaaggtattgaagcagatcggtgcttacgacgatgcggagaaagctaagaacagtattggaattcgtcctggtaaaggtaaaatgaggaatcgtcgttacatttctaggaaaggtcctcttgttgtgtttggaactgaaggagccaagattgtgaaagcttttaggaatcttcctggtgttgagctttgtcacgttgagaggcttaacttgttgaaattagcccctggtggtcaccttggtaggtttgtgatttggactaagtctgcttttgagaagcttggatctatctatggctcgtttgagaaaccatcagagaagaagaagggttacgtcttgcctcgtgcgaagatggtgaatgctgatcttgctaggattattaactccgatgaggtacagagtgtggtgaacccgattaaggatggttccaagagagcggttctgaagaagaatccattgaagaaccttaatgtgatgttcaagttgaatccttatgctaagaccgcaaagagaatgtctctgttggctgaagcttcaagggttaaggctaagaaggagaagctcgagaagaagaggaaagtcgtcactaaggaggaggcccaagcgatcaaagcagcaggcaaggcttggtatcagactatgatttcagacagtgactacaccgagttcgataacttcaccaagtggcttggcgctagtcagtaatgatgctctcgtcatcgcaaagtctcttatatctaggcaaagattttggttttctgatttatgttcttcgtttgtattggatttatctgggattttatgttgttgagttggtaagacgatttttaag

SEQ ID NO: 5381 - protein, 256 aa, Arabidopsis thaliana
MFLRCLLLLATQLKLVEKTSAAIKVLKQIGAYDDAEKAKNSIGIRPGKGKMRNRRYISRKGPLVVFGTEGAKIVKAFRNLPGVELCHVERLNLLKLAPGGHLGRFVIWTKSAFEKLGSIYGSFEKPSEKKKGYVLPRAKMVNADLARIINSDEVQSVVNPIKDGSKRAVLKKNPLKNLNVMFKLNPYAKTAKRMSLLAEASRVKAKKEKLEKKRKVVTKEEAQAIKAAGKAWYQTMISDSDYTEFDNFTKWLGASQ

SEQ ID NO: 5382 - protein, 206 aa, Arabidopsis thaliana
MRNRRYISRKGPLVVFGTEGAKIVKAFRNLPGVELCHVERLNLLKLAPGGHLGRFVIWTKSAFEKLGSIYGSFEKPSEKKKGYVLPRAKMVNADLARIINSDEVQSVVNPIKDGSKRAVLKKNPLKNLNVMFKLNPYAKTAKRMSLLAEASRVKAKKEKLEKKRKVVTKEEAQAIKAAGKAWYQTMISDSDYTEFDNFTKWLGASQ

SEQ ID NO: 5383 - protein, 183 aa, Arabidopsis thaliana
TAKNRKWLPQPPHMSTDQSTTVTLPDVMTAPVRPDIVNFVHAQISNNSRQPYAVSKKAGHQTSAESWGTGRAVSRIPRVPGGGTHRAGQAAFGNMCRGGRMFAPTKIWRRWHRRVNVNMKRHAIVSAIAATAVPALVMARGHKIENVPEMPLVVSDSAEAGGEDISCDQGIEADRCLRRCGES

SEQ ID NO: 5384 - DNA, 2054 bp, Arabidopsis thaliana
ccaagcaaaagcataaaagcaaacacattacagcatcgtaagccaaccactcttaaactaaaagttgtctttctaatcaaaagccaaataatagaaagagtatggaagaagatgatggagacgcgtctacgccgttttggcttcaatcacgccgcaataacacttacttccgccgcactgcaagtctcggtggccgtacaaccaccatcgccactcaaatattcttcgccggaacagctgcaatcctcatagtcgtcttcattatccctcctttcttctcctctgtttctcagattttccgacctcatttagtccgtaaaagctgggattatctcaacttcgttctcgtccttttcgccgtcctttgcggcttcctcagccgcaacaccaataatgacgaatccaatcatcacaaagaagaagacattcgtaacaaattctcgacttcaccatcgattattgatcgaagaagtcgtgtatctaacagtggtacaacgccgcgttattggaacgatgatcgcggtggtggcggcggtgatcaaacggtgtacaagaggtttagtagattacgaagtgttagctcgtatccagatctgaggctccgggaatacgaagccgatgaacggtggagattctacgatgatacacgtgtaagtcaatgccgttatgaagatgtagatccgatctatccaaatcaaagttacagaaactggcatgaggaaggtaaaccaccgccggaagatgtagatcaaacagaggacggtgataatggagaaggaagtaaggtccgtaacggcggttcggaaactgagaaagttgaggtggttgcgacggcggaagctgaagtagtagaagagctaaaagtgccttctgctccgccgtatattccgtctcctccgccgtctccgccacgtcctccaccagcgaagcaagcgaagagaaagactaatagagtgtaccaagatgtttctccacaggaagagaagaaagaaagagatgattttgtagcgacgacgacgccgattccacctccggcgactgtgtatcaaaagagcaataaacaggagaagaagaaaggaggagcaacgaaagactttctgattgcgttacggagaaagaagaagaagcagagacaacagagcatcgatggcctcgatctcctcttcggctccgatcctccattggtctattcaccaccaccgccgccgcctcctccaccacctttcttccaagggcttttctcatccaaaaaaggtaaaagcaaaaaaaacaattcaaatccaccgcctcctcctcctccaccaccacctgaacggagatatgaatcacgcgcatcaacctcgaagctccgaaaagctccggtggaatcacggacatccaaaccaaatccgccagctaaagtaactcaatacgtaggcacaggaagcgaatcaccactaatgccgatcccgccgccgcctcctcctccgccgtttaaaatgccggcttggaaattcgtgaagcgtggagattacgtcaggatggctagtgacatcagcataagctccgacgaacctgatgatccggatgtagctcaatcagctggaagtaaggaggccgccgggagtatgttctgtccgagccccgacgtagataccaaagccgatgatttcatcgcaagattcagagccggactcaaattggagaagatgaactctgtgaaaagagggagatccaatttaggacccgaacccggacttcatgaatccggatcttcaacgggttataggcccagcccaagcgtatagaggctatttcttttagattttggatttttggattactactgtgttggttttttttaccttacttttgtttagactttcttatacgtaattttgtggtgtatacaattcctagtatccgtttttacagtttttagcccatcttgggatgaaccaaaaaaaatctctatacaactagtttttcttgtaatactctccatttttattttattttgaactatgtttggatggagaacttatagctttgaaaaatatattcaatatttttat

SEQ ID NO: 5385 - protein, 561 aa, Arabidopsis thaliana
MEEDDGDASTPFWLQSRRNNTYFRRTASLGGRTTTIATQIFFAGTAAILIVVFIIPPFFSSVSQIFRPHLVRKSWDYLNFVLVLFAVLCGFLSRNTNNDESNHHKEEDIRNKFSTSPSIIDRRSRVSNSGTTPRYWNDDRGGGGGDQTVYKRFSRLRSVSSYPDLRLREYEADERWRFYDDTRVSQCRYEDVDPIYPNQSYRNWHEEGKPPPEDVDQTEDGDNGEGSKVRNGGSETEKVEVVATAEAEVVEELKVPSAPPYIPSPPPSPPRPPPAKQAKRKTNRVYQDVSPQEEKKERDDFVATTTPIPPPATVYQKSNKQEKKKGGATKDFLIALRRKKKKQRQQSIDGLDLLFGSDPPLVYSPPPPPPPPPPFFQGLFSSKKGKSKKNNSNPPPPPPPPPPERRYESRASTSKLRKAPVESRTSKPNPPAKVTQYVGTGSESPLMPIPPPPPPPPFKMPAWKFVKRGDYVRMASDISISSDEPDDPDVAQSAGSKEAAGSMFCPSPDVDTKADDFIARFRAGLKLEKMNSVKRGRSNLGPEPGLHESGSSTGYRPSPSV

SEQ ID NO: 5386 - DNA, 2730 bp, Arabidopsis thaliana
agaggagaaaaaaaactcagtgccgagtcttgtgatactctgagccacaagaagtgtttttggtggaaggatctactgaactggtttgtaatatgggggaagatacaaaggcaaccattgagccaaccgcaaacaagactacttctcttgaaaagccatcagaggctatggctggaaaggagaatgctgggggtaaggaaacacaagaactggcgaaagatgaggatatggctgagccagacaatatggagatagatgctcagattaagaaagatgatgaaaaagctgagacggaagataaagagtcagaggttaagaaaaatgaagacaatgctgagactcaaaaaatggaagagaaggttgaggtcaccaaagatgagggacaagcagaggctaccaacatggatgaagatgccgatggaaagaaagagcaaactgatgatggtgtttcagtggaagatactgtaatgaaggaaaacgtggaatctaaagacaataactatgccaaagatgatgaaaaagagaccaaagagacagatattactgaggcagaccacaaaaaagctgggaaggaggacatacaacatgaagctgacaaagcaaatggaacaaaagatggcaatacaggagacatcaaagaggaagggacactggtagatgaagacaaagggacagatatggatgaaaaagtggagaatggggatgaaaataaacaagtggagaatgttgaaggaaaagaaaaggaagataaggaagaaaataaaacaaaggaagttgaggcggcaaaggctgaggtggatgagtcaaaggtagaagatgaaaaagaagggagtgaggatgagaacgacaatgaaaaagtggagagcaaagatgcaaaggaagatgagaaagaggagacaaatgatgataaagaagatgaaaaagaagagagcaagggttctaaaaagcgtgggaaagggacgagttctggaggaaaggttcgcgagaagaataaaaccgaggaagtaaaaaaggatgcagagcctaggactcctttctctgatcgccctgtgcgtgagcggaaatctgttgagaggcttgttgcattgattgataaagactcctcgaaagaattccgtgttgaaaaggggcgaggtgcatatctcaaagatattcccaatgttgctaacaaggtaatgaggaagaggtctgatgaaactttgaagctgcttcacccaattctatttggtgggaggagagggaaggctgctcagatcaagacaaacatattgggcttctctggtttcgtttggcatggagatgagaagaaagcaaaagaaaaagtaaaagaaaagcttgagaaatgcaccaaagagaaactgtgggagttttgtgatgtgttggacatacacattaccaaggctacaacaaagaaggaagatattattacaaaactgtttgagtttttggagaaacctcatgtgacaggtgatgtgaccggtgacactacagtttctgagaaagagaagtcaagtaagggagcaaaacgcaagagaactcccaagaaaacttcacctacagctgggagttcatcctccaaacgatcagcaaagagccaaaaaaagtctgaagaagcaacaaaagttgtcaaaaagagtttagctcattctgatgatgaatctgaagaagagaaagaagaagaagaaaaacaagaggaggagaaggcagaagagaaagaagagaaaaaagaggaggagaatgaaaatggcattcctgataaatctgaggatgaggcgcctcagccttctgaaagcgaggagaaagatgaatctgaggagcattctgaagaagaaactacaaagaagaaacgtggttctagattgtcagctgggaagaaagaatcagcagggagagccagaaacaagaaagcagtggtcgctgcaaaatccagtccaccagagaagattacacagaagcggtcatcagccaaacgaaagaagactgatgatgacagtgatacaagtccaaaggcgtcctctaagaggaagaagtctgaaaaccctatcaaggcctccccggctccttcaaagtctgcatcaaaagagaagccagtaaaaagggctggaaaagggaaagacaagccgagtgataaagtgctgaaaaatgcaatcgttgagatcttgaaaagagtggactttagtacggctacgttcacggacatccttaaagaacttgctaaggagttcacagaagatctcactccaagaaagtcatctataaagatgataatccaagaggagctcaccaaattagcagatgaggaggaggaggaggaaaagaaagaagaggattcagagaaggaggaagcaggagggtctggtggtggtgaggaggtgaaagcctaaactcctttctgatcacatcgcacatattgagtctctctgtcagatactgttgcctaatgcctagtagtcatctggcaaatgtgtaagttaaatctgtggatgtaatattttgttgttggagtctgaactgcgtaaagcagctttacttttggtagagacaagaggaagaagctgcatagccaaaggataggttgcttgtatgtctatagcatttaacataaaagcctccttggattgtctttgatttgtgaggctcccttttcgagacattgtcaaggtttcttttgtttatgtcttttggtttgaaggaggccaatggtaataaatgaataatatgtttctcttg

SEQ ID NO: 5387 - protein, 763 aa, Arabidopsis thaliana
MGEDTKATIEPTANKTTSLEKPSEAMAGKENAGGKETQELAKDEDMAEPDNMEIDAQIKKDDEKAETEDKESEVKKNEDNAETQKMEEKVEVTKDEGQAEATNMDEDADGKKEQTDDGVSVEDTVMKENVESKDNNYAKDDEKETKETDITEADHKKAGKEDIQHEADKANGTKDGNTGDIKEEGTLVDEDKGTDMDEKVENGDENKQVENVEGKEKEDKEENKTKEVEAAKAEVDESKVEDEKEGSEDENDNEKVESKDAKEDEKEETNDDKEDEKEESKGSKKRGKGTSSGGKVREKNKTEEVKKDAEPRTPFSDRPVRERKSVERLVALIDKDSSKEFRVEKGRGAYLKDIPNVANKVMRKRSDETLKLLHPILFGGRRGKAAQIKTNILGFSGFVWHGDEKKAKEKVKEKLEKCTKEKLWEFCDVLDIHITKATTKKEDIITKLFEFLEKPHVTGDVTGDTTVSEKEKSSKGAKRKRTPKKTSPTAGSSSSKRSAKSQKKSEEATKVVKKSLAHSDDESEEEKEEEEKQEEEKAEEKEEKKEEENENGIPDKSEDEAPQPSESEEKDESEEHSEEETTKKKRGSRLSAGKKESAGRARNKKAVVAAKSSPPEKITQKRSSAKRKKTDDDSDTSPKASSKRKKSENPIKASPAPSKSASKEKPVKRAGKGKDKPSDKVLKNAIVEILKRVDFSTATFTDILKELAKEFTEDLTPRKSSIKMIIQEELTKLADEEEEEEKKEEDSEKEEAGGSGGGEEVKA

SEQ ID NO: 5388 - protein, 738 aa, Arabidopsis thaliana
MAGKENAGGKETQELAKDEDMAEPDNMEIDAQIKKDDEKAETEDKESEVKKNEDNAETQKMEEKVEVTKDEGQAEATNMDEDADGKKEQTDDGVSVEDTVMKENVESKDNNYAKDDEKETKETDITEADHKKAGKEDIQHEADKANGTKDGNTGDIKEEGTLVDEDKGTDMDEKVENGDENKQVENVEGKEKEDKEENKTKEVEAAKAEVDESKVEDEKEGSEDENDNEKVESKDAKEDEKEETNDDKEDEKEESKGSKKRGKGTSSGGKVREKNKTEEVKKDAEPRTPFSDRPVRERKSVERLVALIDKDSSKEFRVEKGRGAYLKDIPNVANKVMRKRSDETLKLLHPILFGGRRGKAAQIKTNILGFSGFVWHGDEKKAKEKVKEKLEKCTKEKLWEFCDVLDIHITKATTKKEDIITKLFEFLEKPHVTGDVTGDTTVSEKEKSSKGAKRKRTPKKTSPTAGSSSSKRSAKSQKKSEEATKVVKKSLAHSDDESEEEKEEEEKQEEEKAEEKEEKKEEENENGIPDKSEDEAPQPSESEEKDESEEHSEEETTKKKRGSRLSAGKKESAGRARNKKAVVAAKSSPPEKITQKRSSAKRKKTDDDSDTSPKASSKRKKSENPIKASPAPSKSASKEKPVKRAGKGKDKPSDKVLKNAIVEILKRVDFSTATFTDILKELAKEFTEDLTPRKSSIKMIIQEELTKLADEEEEEEKKEEDSEKEEAGGSGGGEEVKA

SEQ ID NO: 5389 - protein, 718 aa, Arabidopsis thaliana
MAEPDNMEIDAQIKKDDEKAETEDKESEVKKNEDNAETQKMEEKVEVTKDEGQAEATNMDEDADGKKEQTDDGVSVEDTVMKENVESKDNNYAKDDEKETKETDITEADHKKAGKEDIQHEADKANGTKDGNTGDIKEEGTLVDEDKGTDMDEKVENGDENKQVENVEGKEKEDKEENKTKEVEAAKAEVDESKVEDEKEGSEDENDNEKVESKDAKEDEKEETNDDKEDEKEESKGSKKRGKGTSSGGKVREKNKTEEVKKDAEPRTPFSDRPVRERKSVERLVALIDKDSSKEFRVEKGRGAYLKDIPNVANKVMRKRSDETLKLLHPILFGGRRGKAAQIKTNILGFSGFVWHGDEKKAKEKVKEKLEKCTKEKLWEFCDVLDIHITKATTKKEDIITKLFEFLEKPHVTGDVTGDTTVSEKEKSSKGAKRKRTPKKTSPTAGSSSSKRSAKSQKKSEEATKVVKKSLAHSDDESEEEKEEEEKQEEEKAEEKEEKKEEENENGIPDKSEDEAPQPSESEEKDESEEHSEEETTKKKRGSRLSAGKKESAGRARNKKAVVAAKSSPPEKITQKRSSAKRKKTDDDSDTSPKASSKRKKSENPIKASPAPSKSASKEKPVKRAGKGKDKPSDKVLKNAIVEILKRVDFSTATFTDILKELAKEFTEDLTPRKSSIKMIIQEELTKLADEEEEEEKKEEDSEKEEAGGSGGGEEVKA

SEQ ID NO: 5390 - DNA, 1500 bp, Arabidopsis thaliana
acgtgtgattctatcttcaaagtatcaaagtatggaccatcaagtgtctctgccacaatctaccaccactggtctttctttcaaggtgcatcgccagcagcgggagctagtcactccggctaaaccaacgccacgagagctcaagcctctctccgacatagacgaccaacaaggactaagatttcaaattccagttatttttttctatagacctaacctttcaagtgatcttgatccggtccaggtgataaagaaagccctcgccgatgcgctggtttactactatccgttcgctggtaggctccgggaactttcaaaccggaaactcgcggtggactgcaccggtgaaggcgttttgttcatcgaggctgaagctgacgtggcgcttgctgagctggaagaggctgatgctcttcttcctccattccctttcctagaagagcttctctttgatgtggaaggctctagtgatgtgcttaacactcctctgcttctcgtccaggtcacgcgattgaaatgctgtggatttatcttcgcactccgcttcaaccataccatgaccgatggagccggcctgtcgctctttctgaaatcactatgcgagttggcgtgtgggcttcacgcaccctcggttccacccgtatggaaccgacacttgttgactgtgagtgcttcggaggcgcgtgtgacccacacacaccgtgagtacgatgatcaggtgggaatcgatgtggtcgccactggacaccctttggttagccggtctttctttttcagagcagaagagatctccgctataaggaaactccttccgcctgatctacacaatacctcatttgaagctttgtcgtcatttttgtggcgttgtcggactattgcgttgaatcctgaccccaacactgagatgcgtctaacttgcatcatcaactcgcgttccaagcttagaaacccaccgctagagcctggttactacggaaatgtgtttgtcattcccgcagcaatagcgacagcaagagatctaatagagaaaccgcttgagtttgttttgaggttgatacaagaaacgaagtcaagtgtaaccgaggactacgtccgttcagtgaccgccctaatggcgactagaggccggcctatgtttgtggcatcagggaactacataatatcggacttgagacattttgatttaggaaaaattgattttggaccgtggggtaagccagtgtacggtggaaccgctaaggccggtatcgcgcttttcccgggagtgagcttctacgtgccgtttaagaataaaaaaggtgagacaggtacagttgtggcgattagcttgccggtacgggcgatggagacgttcgtagcagagctaaatggagtgctaaatgtgtctaaaggatgagagcttagtcgagactcgagacgttattagtaatgtagtaaatagttccttttcttattcgacatcatagtgtagtaactaatatttatatcattgcatctttc

SEQ ID NO: 5391 - protein, 464 aa, Arabidopsis thaliana
RVILSSKYQSMDHQVSLPQSTTTGLSFKVHRQQRELVTPAKPTPRELKPLSDIDDQQGLRFQIPVIFFYRPNLSSDLDPVQVIKKALADALVYYYPFAGRLRELSNRKLAVDCTGEGVLFIEAEADVALAELEEADALLPPFPFLEELLFDVEGSSDVLNTPLLLVQVTRLKCCGFIFALRFNHTMTDGAGLSLFLKSLCELACGLHAPSVPPVWNRHLLTVSASEARVTHTHREYDDQVGIDVVATGHPLVSRSFFFRAEEISAIRKLLPPDLHNTSFEALSSFLWRCRTIALNPDPNTEMRLTCIINSRSKLRNPPLEPGYYGNVFVIPAAIATARDLIEKPLEFVLRLIQETKSSVTEDYVRSVTALMATRGRPMFVASGNYIISDLRHFDLGKIDFGPWGKPVYGGTAKAGIALFPGVSFYVPFKNKKGETGTVVAISLPVRAMETFVAELNGVLNVSKG

SEQ ID NO: 5392 - protein, 454 aa, Arabidopsis thaliana
MDHQVSLPQSTTTGLSFKVHRQQRELVTPAKPTPRELKPLSDIDDQQGLRFQIPVIFFYRPNLSSDLDPVQVIKKALADALVYYYPFAGRLRELSNRKLAVDCTGEGVLFIEAEADVALAELEEADALLPPFPFLEELLFDVEGSSDVLNTPLLLVQVTRLKCCGFIFALRFNHTMTDGAGLSLFLKSLCELACGLHAPSVPPVWNRHLLTVSASEARVTHTHREYDDQVGIDVVATGHPLVSRSFFFRAEEISAIRKLLPPDLHNTSFEALSSFLWRCRTIALNPDPNTEMRLTCIINSRSKLRNPPLEPGYYGNVFVIPAAIATARDLIEKPLEFVLRLIQETKSSVTEDYVRSVTALMATRGRPMFVASGNYIISDLRHFDLGKIDFGPWGKPVYGGTAKAGIALFPGVSFYVPFKNKKGETGTVVAISLPVRAMETFVAELNGVLNVSKG

SEQ ID NO: 5393 - protein, 279 aa, Arabidopsis thaliana
MTDGAGLSLFLKSLCELACGLHAPSVPPVWNRHLLTVSASEARVTHTHREYDDQVGIDVVATGHPLVSRSFFFRAEEISAIRKLLPPDLHNTSFEALSSFLWRCRTIALNPDPNTEMRLTCIINSRSKLRNPPLEPGYYGNVFVIPAAIATARDLIEKPLEFVLRLIQETKSSVTEDYVRSVTALMATRGRPMFVASGNYIISDLRHFDLGKIDFGPWGKPVYGGTAKAGIALFPGVSFYVPFKNKKGETGTVVAISLPVRAMETFVAELNGVLNVSKG

SEQ ID NO: 5394 - DNA, 1103 bp, Arabidopsis thaliana
gttaaggaaaaatctttgatctttggaaaggaagagagcaggcgcaatcgagtaatccaaaggagttgcgttgttctgcgatcacgaagcggtctctcggcaaatctttcgacgcaagacatcgattcgtgtatttcatttttgctttggaactctatgcggaagaaccctaattgattcgccatgggagattccgtttcttcttcatcccgcgtttctgttcatcaatctcttggtgctggttctgttgctgatttgctgctatggagaaaccggactggtgcagtcattttgctaatctcttctactgggttttggttcttattcgagagagctggatacaatctcttgtctttcgtctccaatgttctgcttcttctcgttgcgatcttcttcttatgggccaagtctgctacagttctcaaccgaccgctacctccagttccgaatatggaaatccctgaggagtttgcaaataaggctgctgatgatcttcgggtttggatcaattatgtactgtcaattgcaagtgatatcaccatagctagaaatccgattcgtctccttcaggtttctcttgtcttgtgggctatatcctatgttgggactttaatcaactccctcactcttgtttacattggagttcttctcagtctttcttttcctattgtgtatgagaagtaccaagaccacattgatgagaaagtgaactcgacttctaaattcgttcgaaatatctcaaggaagtttccattgcccataaacaaagagaagaaacatcagtaggtgaaaaacagtccatttggtcaccagactaattacagctacaagaaggagccattactgtaatgctacaagaggatagtcaaagagcagcggaaaaaagtgaatcacagtacagattttcgttcatttctttctgtttcgcttactaggagttttcttcttgtgtgtttttgttgtgttcaagattcatgagtttctggtttttttggtcttttagtttacacgaatgctttgttgcagtattgttccagtagaaacgagaaagatgaatctaatacaacttgagaggttattcaataattaatttgttgattatt

SEQ ID NO: 5395 - protein, 200 aa, Arabidopsis thaliana
MGDSVSSSSRVSVHQSLGAGSVADLLLWRNRTGAVILLISSTGFWFLFERAGYNLLSFVSNVLLLLVAIFFLWAKSATVLNRPLPPVPNMEIPEEFANKAADDLRVWINYVLSIASDITIARNPIRLLQVSLVLWAISYVGTLINSLTLVYIGVLLSLSFPIVYEKYQDHIDEKVNSTSKFVRNISRKFPLPINKEKKHQ

SEQ ID NO: 5396 - protein, 111 aa, Arabidopsis thaliana
MEIPEEFANKAADDLRVWINYVLSIASDITIARNPIRLLQVSLVLWAISYVGTLINSLTLVYIGVLLSLSFPIVYEKYQDHIDEKVNSTSKFVRNISRKFPLPINKEKKHQ

SEQ ID NO: 5397 - DNA, 2064 bp, Arabidopsis thaliana
agaaacaagaaaaagaaagatgggagatttaatggctcggtctctctcttgatctgacgacgacgatgatggtgaagcttcgcaatcttgttcttttcttcatgctcctcaccgtcgttgctcatatccttctctacaccgatcccgctgcctccttcaagacccccttttctaaacgcgatttcctcgaggacgtaaccgccttgactttcaattccgatgagaatcgtttgaatcttcttcctcgggaatctcccgctgtgctcagaggaggactcgtcggtgctgtctattccgataagaattcacggcggctagaccaattgtctgctcgagttctttccgccaccgacgatgatactcactcacatactgacatttccatcaaacaagtcactcatgatgcagcctcagactcgcatattaatagggaaaatatgcatgttcaattgacccaacaaacctctgaaaaagttgatgagcaaccagagcctaatgcttttggagctaagaaagatactggaaacgtgttgatgcctgatgctcaagtgaggcatcttaaagatcagcttattagggcaaaggtttatctttcccttccatctgcaaaggccaatgctcattttgtgagagagcttcgactccgtattaaagaagttcaacgggcacttgcagatgcctccaaggattcggatctgccaaagactgctatagaaaagctaaaagcaatggagcaaacactggccaaaggcaagcagatccaagatgactgttctacagtggtcaagaagctacgtgctatgctccactccgcagatgagcagctacgggtccataagaagcaaaccatgtttttgactcaattgactgctaagaccattcctaaaggacttcactgccttcctctgcgcctcactacagactattatgctttaaattcatctgaacaacaatttccaaatcaggagaaactagaagatactcagctgtatcactatgcccttttctctgataatgttttggctacgtcagttgttgttaactctaccataaccaatgcaaagcatcccttaaagcatgtcttccacatcgtcacagacagactcaattatgcggcaatgaggatgtggttcctggacaatccacctggcaaagccaccatccaggttcagaatgttgaagaatttacatggctgaattcaagctacagtcccgttctcaaacagcttagttctagatcgatgatagattattacttcagagcccaccatacaaattcagacaccaacttgaagttccggaatccaaaatacttatcgatccttaatcatcttcgtttttacttgcctgagatctttcccaagctcagcaaagtgctcttcttggatgatgatatagttgtgcagaaggacctttctggtctttggtcagttgatctgaaaggtaatgttaacggtgctgtagagacgtgtggggaaagctttcatcgctttgaccgttatctgaacttctcaaatccactcatttccaagaactttgaccctcgagcttgtggttgggcgtatggtatgaatgtctttgatctggatgaatggaagaggcaaaacatcacagaagtttatcatcgatggcaggatctgaatcaagaccgagaattgtggaagctagggacgttgccgcctggtctaatcacattttggagacgaacatatccgctagaccggaaatggcacatactagggcttggatacaacccgagtgtgaaccaaagggatattgagagggcagccgtgatacactataatggcaacctcaaaccatggctagagattgggattccaagatacagaggcttctggtcaaagcatgtagactatgagcacgtttatctcagagaatgcaacatcaatccttagaattagagtctgttgtgagggcaatattatacgtttataatctgacgagatgatcattacatgaaattgtatatgtcacggtaaaaggagttccaataggcacgaccgatgttattattgcaacatatatatcaacaagaggaatgac

SEQ ID NO: 5398 - protein, 616 aa, Arabidopsis thaliana
MMVKLRNLVLFFMLLTVVAHILLYTDPAASFKTPFSKRDFLEDVTALTFNSDENRLNLLPRESPAVLRGGLVGAVYSDKNSRRLDQLSARVLSATDDDTHSHTDISIKQVTHDAASDSHINRENMHVQLTQQTSEKVDEQPEPNAFGAKKDTGNVLMPDAQVRHLKDQLIRAKVYLSLPSAKANAHFVRELRLRIKEVQRALADASKDSDLPKTAIEKLKAMEQTLAKGKQIQDDCSTVVKKLRAMLHSADEQLRVHKKQTMFLTQLTAKTIPKGLHCLPLRLTTDYYALNSSEQQFPNQEKLEDTQLYHYALFSDNVLATSVVVNSTITNAKHPLKHVFHIVTDRLNYAAMRMWFLDNPPGKATIQVQNVEEFTWLNSSYSPVLKQLSSRSMIDYYFRAHHTNSDTNLKFRNPKYLSILNHLRFYLPEIFPKLSKVLFLDDDIVVQKDLSGLWSVDLKGNVNGAVETCGESFHRFDRYLNFSNPLISKNFDPRACGWAYGMNVFDLDEWKRQNITEVYHRWQDLNQDRELWKLGTLPPGLITFWRRTYPLDRKWHILGLGYNPSVNQRDIERAAVIHYNGNLKPWLEIGIPRYRGFWSKHVDYEHVYLRECNINP

SEQ ID NO: 5399 - protein, 615 aa, Arabidopsis thaliana
MVKLRNLVLFFMLLTVVAHILLYTDPAASFKTPFSKRDFLEDVTALTFNSDENRLNLLPRESPAVLRGGLVGAVYSDKNSRRLDQLSARVLSATDDDTHSHTDISIKQVTHDAASDSHINRENMHVQLTQQTSEKVDEQPEPNAFGAKKDTGNVLMPDAQVRHLKDQLIRAKVYLSLPSAKANAHFVRELRLRIKEVQRALADASKDSDLPKTAIEKLKAMEQTLAKGKQIQDDCSTVVKKLRAMLHSADEQLRVHKKQTMFLTQLTAKTIPKGLHCLPLRLTTDYYALNSSEQQFPNQEKLEDTQLYHYALFSDNVLATSVVVNSTITNAKHPLKHVFHIVTDRLNYAAMRMWFLDNPPGKATIQVQNVEEFTWLNSSYSPVLKQLSSRSMIDYYFRAHHTNSDTNLKFRNPKYLSILNHLRFYLPEIFPKLSKVLFLDDDIVVQKDLSGLWSVDLKGNVNGAVETCGESFHRFDRYLNFSNPLISKNFDPRACGWAYGMNVFDLDEWKRQNITEVYHRWQDLNQDRELWKLGTLPPGLITFWRRTYPLDRKWHILGLGYNPSVNQRDIERAAVIHYNGNLKPWLEIGIPRYRGFWSKHVDYEHVYLRECNINP

SEQ ID NO: 5400 - protein, 604 aa, Arabidopsis thaliana
MLLTVVAHILLYTDPAASFKTPFSKRDFLEDVTALTFNSDENRLNLLPRESPAVLRGGLVGAVYSDKNSRRLDQLSARVLSATDDDTHSHTDISIKQVTHDAASDSHINRENMHVQLTQQTSEKVDEQPEPNAFGAKKDTGNVLMPDAQVRHLKDQLIRAKVYLSLPSAKANAHFVRELRLRIKEVQRALADASKDSDLPKTAIEKLKAMEQTLAKGKQIQDDCSTVVKKLRAMLHSADEQLRVHKKQTMFLTQLTAKTIPKGLHCLPLRLTTDYYALNSSEQQFPNQEKLEDTQLYHYALFSDNVLATSVVVNSTITNAKHPLKHVFHIVTDRLNYAAMRMWFLDNPPGKATIQVQNVEEFTWLNSSYSPVLKQLSSRSMIDYYFRAHHTNSDTNLKFRNPKYLSILNHLRFYLPEIFPKLSKVLFLDDDIVVQKDLSGLWSVDLKGNVNGAVETCGESFHRFDRYLNFSNPLISKNFDPRACGWAYGMNVFDLDEWKRQNITEVYHRWQDLNQDRELWKLGTLPPGLITFWRRTYPLDRKWHILGLGYNPSVNQRDIERAAVIHYNGNLKPWLEIGIPRYRGFWSKHVDYEHVYLRECNINP

SEQ ID NO: 5401 - DNA, 1156 bp, Arabidopsis thaliana
aaaaaaggaaacacacaaaagccctaaatctctttttaacctctgaagcaaaaaccaccacatcggagatttctaatccaacgaaaacgcttcaattttcttgcgatttctcttcctctgcgaaaaacccttttggattcagactttcctcggtttaccagttggactcagatagaagcttatatctgtacctgataatttgcagcaaatatggatgactgggaggacgagaaaattgcaccacttccagcaaaagttgagcttaaaagtaactgggatgatgaagatgtggatgagaatgaaattaaggattcatgggaggatgatgatgatgaacctgctcagccgcctgttataaatcctgctccggagaaggctcctaagaaagcagcccccaaaactgttgaaaagaagggtaaagcagtcgaagttccaaaggaagcaccaaaagaaaaacctctagatcctatagcggagaaacttcgccagcagaggcttgttgaggaagccgactaccgggcaactgctgagctctttggagtgaaggatgatgacaaaaaccttgatatgtttatccccaagtctgaaagcgattttttggaatatgctgaaatgatttctcataggattaaaccatatgagaaaagttatcactatatagcgctgctcaaaacaatcatgagactttcattgaccaacatgaaagcagctgatgttaaagatgttgcttcgtccattacaacgatagcaaatgaaaaactaaaggcagagaaagaagctgctgcgggaaaaaagaaaggtggaaagaagaaacaacttattgtagataaggccaatgacgatctagtggctggtccttatgatgccatggatgacttcgacttcatgtagattaaaagagctttttgagcaaatgcaaattggatttgtccagcgtctattttatcatttatctatcactcaaaagaaacacatttttcttaattttggtttgaatagagcaagaagagccaaatttctggttgcggaaatatatagttggaacatgggaagcttttgttttggtttggtctgggaattctctagagtcatgtttttggttctatttgttggttgaaaaagctatacttaaagtgtccgtataaatttattattg

SEQ ID NO: 5402 - protein, 226 aa, Arabidopsis thaliana
MDDWEDEKIAPLPAKVELKSNWDDEDVDENEIKDSWEDDDDEPAQPPVINPAPEKAPKKAAPKTVEKKGKAVEVPKEAPKEKPLDPIAEKLRQQRLVEEADYRATAELFGVKDDDKNLDMFIPKSESDFLEYAEMISHRIKPYEKSYHYIALLKTIMRLSLTNMKAADVKDVASSITTIANEKLKAEKEAAAGKKKGGKKKQLIVDKANDDLVAGPYDAMDDFDFM

SEQ ID NO: 5403 - DNA, 1823 bp, Arabidopsis thaliana
gggcacggagatttccccacttgaccaaccccgtgaggataaactgttgccgacgcttctcgccgataacaccggttttgttgtgacggaaaggaaaaatgggtttgatttctgggattctgttcgggattatcttcggcgtagctctaatggctggctggagtcgtatgatgactcaccgatcgtccaagcgagtcgccaaggcagttgatatgaaactactaggctctcttagcagagacgatttgaagaaaatttgtggtgataatttccctcaatggatatcgtttccagcatttgaacaggtcaaatggctgaataaactactgagcaagatgtggccatatattgcagaggcagcaacaatggtaataagagattctgttgaacctctgcttgaagattacagaccaccaggaattacttccctgaagttcagcaaattgacgttgggtaacgtagcaccaaagattgaaggtattcgtgttcaaagtttcaaggaaggtcaagtcacaatggacgttgatcttcgatggggtggtgatccaaatattgttttaggtgtgacagcacttgttgcctccatacccattcagttgaaggatcttcaagttttcacagttgcacgtgttatctttcaacttgcggatgagattccttgtatatctgctgttgttgttgctctacttgctgagccaaaaccaagaattgattacactctgaaggctgttggtggaagcttaacagcaattcctggactatctgatatgattgatgatactgttgatactatcgtcaaagacatgcttcagtggcctcatagaattgttgttcccattggtggtattcctgttgatttaagtgatttggagcttaagccacagggaaagcttatagtaacagttgtgaaagcaactaacttgaagaataaggaattgattggaaaatctgacccttatgctaccatctacattcgtcctgtattcaagtataaaacaaaggcaatcgagaacaatctgaatcctgtctgggatcaaacattcgaattgattgcagaggacaaagaaacccagtcgctcactgtagaggtatttgataaagacgtaggtcaagatgagcgccttggacttgtgaaacttcccttaagcagtttggaagccggagttacaaaagaactggagctaaatctgttgtcttcacttgatactttgaaagtaaaagataagaaagatagaggaagcataactcttaaggtacattatcatgagttcaacaaagaggagcaaatggctgcgttggaagacgagaagaagatcatggaagaaaggaagagactgaaggaagcaggagtgataggtagcacaatggatgcagtcgggatggtgggaagtgggctcggtgctggtgtaggaatggttgggaccggtattggcacaggagtcggattggttggaagcggtgtgagctcgggtgttgggatggttggtagcggttttggagcggtcggtagtggattgagcaaagcagggagatttatgggaagaacaatcacaggtcagtctagcaaacgtagtggctcctcaacacctgtgaataccgttccagaaaacgatggtgcaaaacagcagtgagtaaactttgggtttaagcaagatttgtgatcatgacttcgtttttactctttattgttctgtttttttcccctttaactctctcgaacttgatttctggattcactgcagtaatttgttttcgttgtgagccttcaaattaaaatcttgtacaaaagtcatttgcttaatcgtcctataaacaaaaatccc

SEQ ID NO: 5404 - protein, 510 aa, Arabidopsis thaliana
MGLISGILFGIIFGVALMAGWSRMMTHRSSKRVAKAVDMKLLGSLSRDDLKKICGDNFPQWISFPAFEQVKWLNKLLSKMWPYIAEAATMVIRDSVEPLLEDYRPPGITSLKFSKLTLGNVAPKIEGIRVQSFKEGQVTMDVDLRWGGDPNIVLGVTALVASIPIQLKDLQVFTVARVIFQLADEIPCISAVVVALLAEPKPRIDYTLKAVGGSLTAIPGLSDMIDDTVDTIVKDMLQWPHRIVVPIGGIPVDLSDLELKPQGKLIVTVVKATNLKNKELIGKSDPYATIYIRPVFKYKTKAIENNLNPVWDQTFELIAEDKETQSLTVEVFDKDVGQDERLGLVKLPLSSLEAGVTKELELNLLSSLDTLKVKDKKDRGSITLKVHYHEFNKEEQMAALEDEKKIMEERKRLKEAGVIGSTMDAVGMVGSGLGAGVGMVGTGIGTGVGLVGSGVSSGVGMVGSGFGAVGSGLSKAGRFMGRTITGQSSKRSGSSTPVNTVPENDGAKQQ

SEQ ID NO: 5405 - protein, 493 aa, Arabidopsis thaliana
MAGWSRMMTHRSSKRVAKAVDMKLLGSLSRDDLKKICGDNFPQWISFPAFEQVKWLNKLLSKMWPYIAEAATMVIRDSVEPLLEDYRPPGITSLKFSKLTLGNVAPKIEGIRVQSFKEGQVTMDVDLRWGGDPNIVLGVTALVASIPIQLKDLQVFTVARVIFQLADEIPCISAVVVALLAEPKPRIDYTLKAVGGSLTAIPGLSDMIDDTVDTIVKDMLQWPHRIVVPIGGIPVDLSDLELKPQGKLIVTVVKATNLKNKELIGKSDPYATIYIRPVFKYKTKAIENNLNPVWDQTFELIAEDKETQSLTVEVFDKDVGQDERLGLVKLPLSSLEAGVTKELELNLLSSLDTLKVKDKKDRGSITLKVHYHEFNKEEQMAALEDEKKIMEERKRLKEAGVIGSTMDAVGMVGSGLGAGVGMVGTGIGTGVGLVGSGVSSGVGMVGSGFGAVGSGLSKAGRFMGRTITGQSSKRSGSSTPVNTVPENDGAKQQ

SEQ ID NO: 5406 - protein, 487 aa, Arabidopsis thaliana
MMTHRSSKRVAKAVDMKLLGSLSRDDLKKICGDNFPQWISFPAFEQVKWLNKLLSKMWPYIAEAATMVIRDSVEPLLEDYRPPGITSLKFSKLTLGNVAPKIEGIRVQSFKEGQVTMDVDLRWGGDPNIVLGVTALVASIPIQLKDLQVFTVARVIFQLADEIPCISAVVVALLAEPKPRIDYTLKAVGGSLTAIPGLSDMIDDTVDTIVKDMLQWPHRIVVPIGGIPVDLSDLELKPQGKLIVTVVKATNLKNKELIGKSDPYATIYIRPVFKYKTKAIENNLNPVWDQTFELIAEDKETQSLTVEVFDKDVGQDERLGLVKLPLSSLEAGVTKELELNLLSSLDTLKVKDKKDRGSITLKVHYHEFNKEEQMAALEDEKKIMEERKRLKEAGVIGSTMDAVGMVGSGLGAGVGMVGTGIGTGVGLVGSGVSSGVGMVGSGFGAVGSGLSKAGRFMGRTITGQSSKRSGSSTPVNTVPENDGAKQQ

SEQ ID NO: 5407 - DNA, 1810 bp, Arabidopsis thaliana
accgtttttgttataacgaacgacaccgtttcaaacaacttccttattagctagctccctcccggcggcaaacaccagaagatccaccggttttgatctggttgtttgtcgtcgatatggcgaggatctcgtgtgacttgagatttcttctcatcccggcagctttcatgttcatctacatccagatgaggcttttccagacgcaatcacagtatgcagatcgcctcagttccgctatcgaatctgagaaccattgcactagtcaaatgcgaggcctcatagatgaagttagcatcaaacagtcgcggattgttgccctcgaagatatgaagaaccgccaggacgaagaacttgtgcagcttaaggatctaatccagacgtttgaaaaaaaaggaatagcaaaactcactcaaggtggacagatgcctgtggctgctgtagtggttatggcctgcagtcgtgcagactatcttgaaaggactgttaaatcagttttaacatatcaaactcccgttgcttcaaaatatcctctatttatatctcaggatggatctgatcaagctgtcaagagcaagtcattgagctataatcaattaacatatatgcagcacttggattttgaaccagtggtcactgaaaggcctggcgaactgactgcgtactacaagattgcacgtcactacaagtgggcactggaccagttgttttacaaacacaaatttagtcgagtgattatactagaagatgatatggaaattgctccagacttctttgattactttgaggctgcagctagtctcatggatagggataaaaccattatggctgcttcatcatggaatgataatggacagaagcagtttgtgcatgatccctatgcgctataccgatcagatttttttcctggccttgggtggatgctcaagagatcgacttgggatgagttatcaccaaagtggccaaaggcttactgggatgattggctgagactaaaggaaaaccataaaggccgccaattcattcgaccggaagtctgtagaacatacaattttggtgaacatgggtctagtttgggacagtttttcagtcagtatctggaacctataaagctaaacgatgtgacggttgactggaaagcaaaggacctgggatacctgacagagggaaactataccaagtacttttctggcttagtgagacaagcacgaccaattcaaggttctgaccttgtcttaaaggctcaaaacataaaggatgatgttcgtatccggtataaagaccaagtagagtttgaacgcattgcaggggaatttggtatatttgaagaatggaaggatggtgtgcctcgaacagcatataaaggagtagtggtgtttcgaatccagacaacaagacgtgtattcctggttgggccagattctgtaatgcagcttggaattcgaaattcctgatgcaaaacatatgaaaggaaaagaagattttggaccgcatgcagcctccttctagcagctgttaggttgtattgttatttatggatgagtttgtcgagcggtggggttaactttaacagcaaggaagctctggtgacctggctgattggcttagaagttatgggaaccccttgaaagggtcagggttaaatatatttcagttgttttattagtgattatcttgtgggtaacttatacgaatgcaaatcattctatgcagtttttcttcgtcccacttgttttggcttctctattgctagtgtacatatctcttcaaacatgtactaaataatgcgtgttgcttcaaagaagtaactttt

SEQ ID NO: 5408 - protein, 444 aa, Arabidopsis thaliana
MARISCDLRFLLIPAAFMFIYIQMRLFQTQSQYADRLSSAIESENHCTSQMRGLIDEVSIKQSRIVALEDMKNRQDEELVQLKDLIQTFEKKGIAKLTQGGQMPVAAVVVMACSRADYLERTVKSVLTYQTPVASKYPLFISQDGSDQAVKSKSLSYNQLTYMQHLDFEPVVTERPGELTAYYKIARHYKWALDQLFYKHKFSRVIILEDDMEIAPDFFDYFEAAASLMDRDKTIMAASSWNDNGQKQFVHDPYALYRSDFFPGLGWMLKRSTWDELSPKWPKAYWDDWLRLKENHKGRQFIRPEVCRTYNFGEHGSSLGQFFSQYLEPIKLNDVTVDWKAKDLGYLTEGNYTKYFSGLVRQARPIQGSDLVLKAQNIKDDVRIRYKDQVEFERIAGEFGIFEEWKDGVPRTAYKGVVVFRIQTTRRVFLVGPDSVMQLGIRNS

SEQ ID NO: 5409 - protein, 427 aa, Arabidopsis thaliana
MFIYIQMRLFQTQSQYADRLSSAIESENHCTSQMRGLIDEVSIKQSRIVALEDMKNRQDEELVQLKDLIQTFEKKGIAKLTQGGQMPVAAVVVMACSRADYLERTVKSVLTYQTPVASKYPLFISQDGSDQAVKSKSLSYNQLTYMQHLDFEPVVTERPGELTAYYKIARHYKWALDQLFYKHKFSRVIILEDDMEIAPDFFDYFEAAASLMDRDKTIMAASSWNDNGQKQFVHDPYALYRSDFFPGLGWMLKRSTWDELSPKWPKAYWDDWLRLKENHKGRQFIRPEVCRTYNFGEHGSSLGQFFSQYLEPIKLNDVTVDWKAKDLGYLTEGNYTKYFSGLVRQARPIQGSDLVLKAQNIKDDVRIRYKDQVEFERIAGEFGIFEEWKDGVPRTAYKGVVVFRIQTTRRVFLVGPDSVMQLGIRNS

SEQ ID NO: 5410 - protein, 421 aa, Arabidopsis thaliana
MRLFQTQSQYADRLSSAIESENHCTSQMRGLIDEVSIKQSRIVALEDMKNRQDEELVQLKDLIQTFEKKGIAKLTQGGQMPVAAVVVMACSRADYLERTVKSVLTYQTPVASKYPLFISQDGSDQAVKSKSLSYNQLTYMQHLDFEPVVTERPGELTAYYKIARHYKWALDQLFYKHKFSRVIILEDDMEIAPDFFDYFEAAASLMDRDKTIMAASSWNDNGQKQFVHDPYALYRSDFFPGLGWMLKRSTWDELSPKWPKAYWDDWLRLKENHKGRQFIRPEVCRTYNFGEHGSSLGQFFSQYLEPIKLNDVTVDWKAKDLGYLTEGNYTKYFSGLVRQARPIQGSDLVLKAQNIKDDVRIRYKDQVEFERIAGEFGIFEEWKDGVPRTAYKGVVVFRIQTTRRVFLVGPDSVMQLGIRNS

SEQ ID NO: 5411 - DNA, 1804 bp, Arabidopsis thaliana
agtcacaaaaacctctgcaagaaccctaaagctaaaacctttttgcgatcaatcgaaagaaaacaaaaaatggggaaagttccgtcgtcgtttcgtagtatgccggcgaacttattggtcagaaaaacaacaccatctcctccagcgccgccgcgagattttcgcaacagaaccgccgtgggaggagattcagccaaacttccccagaatactcaagcccctcgcgagccctccttgaggaatccattcaagtcaccaaatctctcagacgctaaaagcctcttcaattcaatcgccgccacttcacgaatcccactcgatctcaagttccacaactctgttcttcaatcatacggttcaatcgccgtcgtcaacgatacggtgaaactctttcagcatattttgaaatcgcagcctaatttcaggccgggacgttcaacgttccttatcttgctttcacatgcttgtagagctcctgattcgtcgatttcgaatgttcatagagttcttaatctcatggttaataatggtttagagcctgatcaagtaactaccgatatcgcggtgaggtctctttgcgaaacgggtcgggttgatgaagctaaggatttgatgaaggagctcactgagaaacactctcctccggatacatatacttataactttctactgaagcatttgtgcaaatgcaaagatcttcatgttgtttatgagtttgttgatgagatgagagatgatttcgatgttaagccggatcttgttagcttcactatcttgattgataatgtttgtaactctaagaacttgagggaggcaatgtatctagttagtaagttaggtaatgctgggtttaagccggattgtttcctctataacacgattatgaaaggtttttgcacactgagtaaagggagtgaggcggttggtgtgtataagaaaatgaaggaagaaggtgttgagccagatcagattacctacaatactttgatatttggactgtcgaaagctggtagagttgaggaagctaggatgtatttgaaaactatggttgatgcggggtatgagccggatactgctacttacacatcactgatgaatggaatgtgtagaaaaggtgagtctttaggtgcgttgagtttgttagaagaaatggaagcaagagggtgtgctccaaatgattgtacttataatactttgcttcatggattgtgtaaagcaaggttgatggataaagggatggagttatatgaaatgatgaaatcaagtggtgtaaagcttgagagtaatggttatgctacacttgtgaggtctctggttaaaagtggcaaggtcgcagaggcttatgaagtgtttgattatgcagttgatagcaagagtttgtcagatgcttctgcgtactctacacttgaaactaccttgaaatggttgaaaaaagctaaagaacaaggcttggttccataaatggtatcctctagctgagctttaccgactttcttctttatgcaagtccatatttcatttttgaagtagtgttactccaaaagcaatgaatttgtttcgaaatatgctgttcgattcttaagggaccagcagtgatttataatagtaactttgttggtaatattattgtcacttgagatttctaaaggtttccttaacactcgagttattgattgggtgaaagttgttgctgtgtttctatatgaacagtcatattctattattctgtttgtatcagcttcttgccttcagtgtcatgtactctgttcttatgagctattgtgaataccataattggttattg

SEQ ID NO: 5412 - protein, 486 aa, Arabidopsis thaliana
SHKNLCKNPKAKTFLRSIERKQKMGKVPSSFRSMPANLLVRKTTPSPPAPPRDFRNRTAVGGDSAKLPQNTQAPREPSLRNPFKSPNLSDAKSLFNSIAATSRIPLDLKFHNSVLQSYGSIAVVNDTVKLFQHILKSQPNFRPGRSTFLILLSHACRAPDSSISNVHRVLNLMVNNGLEPDQVTTDIAVRSLCETGRVDEAKDLMKELTEKHSPPDTYTYNFLLKHLCKCKDLHVVYEFVDEMRDDFDVKPDLVSFTILIDNVCNSKNLREAMYLVSKLGNAGFKPDCFLYNTIMKGFCTLSKGSEAVGVYKKMKEEGVEPDQITYNTLIFGLSKAGRVEEARMYLKTMVDAGYEPDTATYTSLMNGMCRKGESLGALSLLEEMEARGCAPNDCTYNTLLHGLCKARLMDKGMELYEMMKSSGVKLESNGYATLVRSLVKSGKVAEAYEVFDYAVDSKSLSDASAYSTLETTLKWLKKAKEQGLVP

SEQ ID NO: 5413 - protein, 463 aa, Arabidopsis thaliana
MGKVPSSFRSMPANLLVRKTTPSPPAPPRDFRNRTAVGGDSAKLPQNTQAPREPSLRNPFKSPNLSDAKSLFNSIAATSRIPLDLKFHNSVLQSYGSIAVVNDTVKLFQHILKSQPNFRPGRSTFLILLSHACRAPDSSISNVHRVLNLMVNNGLEPDQVTTDIAVRSLCETGRVDEAKDLMKELTEKHSPPDTYTYNFLLKHLCKCKDLHVVYEFVDEMRDDFDVKPDLVSFTILIDNVCNSKNLREAMYLVSKLGNAGFKPDCFLYNTIMKGFCTLSKGSEAVGVYKKMKEEGVEPDQITYNTLIFGLSKAGRVEEARMYLKTMVDAGYEPDTATYTSLMNGMCRKGESLGALSLLEEMEARGCAPNDCTYNTLLHGLCKARLMDKGMELYEMMKSSGVKLESNGYATLVRSLVKSGKVAEAYEVFDYAVDSKSLSDASAYSTLETTLKWLKKAKEQGLVP

SEQ ID NO: 5414 - protein, 453 aa, Arabidopsis thaliana
MPANLLVRKTTPSPPAPPRDFRNRTAVGGDSAKLPQNTQAPREPSLRNPFKSPNLSDAKSLFNSIAATSRIPLDLKFHNSVLQSYGSIAVVNDTVKLFQHILKSQPNFRPGRSTFLILLSHACRAPDSSISNVHRVLNLMVNNGLEPDQVTTDIAVRSLCETGRVDEAKDLMKELTEKHSPPDTYTYNFLLKHLCKCKDLHVVYEFVDEMRDDFDVKPDLVSFTILIDNVCNSKNLREAMYLVSKLGNAGFKPDCFLYNTIMKGFCTLSKGSEAVGVYKKMKEEGVEPDQITYNTLIFGLSKAGRVEEARMYLKTMVDAGYEPDTATYTSLMNGMCRKGESLGALSLLEEMEARGCAPNDCTYNTLLHGLCKARLMDKGMELYEMMKSSGVKLESNGYATLVRSLVKSGKVAEAYEVFDYAVDSKSLSDASAYSTLETTLKWLKKAKEQGLVP

SEQ ID NO: 5415 - DNA, 1832 bp, Arabidopsis thaliana
actttttttcttcttcttccatttttttgttctcacgtcgctctctctttttttcgagattcagctgtaaaaccctaactagcgccatagccaaggaagctttcctcagatcgtctctccgaaattttccggttaatcgtcagttaaggggaaaattaggctatggcgatgttaggtgcacagcaagttccagcagcagcttgtactccagatatggttgggaatgcttttgtgccccagtattatcacatattgcatcaatcacctgagcatgttcacagattttaccaagagattagcaagttaggtcgtcctgaagagaatggtttaatgagcatcacttctaccttgcaagctattgacaagaagataatggcgcttggttacggtgtaatcagtgcagagatagctactgtggacacacaagaatctcatggaggtggttatattgtactggtgactgggtatttgacgggaaaagacagtgtcaggaggacgtttagtcagaccttcttccttgctccacaggagacaggatactttgtcttgaatgatatgtttcgattcattgatgaaggcactgtcgtacatggaaatcagattccagtgaacaacgtccaagctcctgtcaacacttaccaggacacagctgctgcgaaggaaattccagatgactttgttcaggagaaatatgtccaagagaatcatgctgttaagcaaaccgaggtgttgtccaagagcattaatgagcctgaaaaagtgttcacgccctctgaagatgaacaagtatcagctgcagaagaagctctggtgactgaaacagttaatgaagcaccaattgaagtgcaaaaggttggagaatctgattctaggactggcgaaattccaaagagatcttatgcatcaattgtgaaggttatgaaagaaaatgctgcaccaatgtctgcttcgagaactccaacaaaggtggaaccaaagaaacaagaagatcaagccattcatatccctctaccaacaccattgtctgagaaatcagattcaggagcaaatgttgctgtaaatgagaacaatcaagagaatgaaagagctctaggtccatccatctatctaaagggtttaccccttgatgcaacacctgccttgcttgagaatgagttccagaaatttggacttattaggaccaatggaattcaagtgagaagccagaagggattctgttttggttttgttgagtttgaatccgcaagttccatgcaaagcgctatcgaggcatcacctgtcatgctcaatggacacaaagttgttgtggaggaaaagcgatctaccgcaagagggaactatagaggacgttcgacgtttggtgtaaacacaggctacagaaacgaaggaggaaggggtcgtgggagctttggaggtggaagaggaggatatggccggaccgatttcaacggatatggtaataacaggggaaacaatagaggcggatacgcaaaccgagcaaatggtgatggtggtgggttcccgagggccaatggtaacaatggacgagtaagacgtggtggcggaaatgatgctaacagagctacgaaacccgtggatgatgctccccgtgtgtctgttgctgcgtaaatgtgcttttgaaacaaaaagctctattggttttagagagtttaggcgtagagcaatggcaaaaaaaaacactattattttcttttcactgtgtcgccattttattaattggagtcaaaacttgagagcaagagagagtttcgtcggttcttgcttgtctattttttcttcactgctaatgaaatctctttcttcatgtggcc

SEQ ID NO: 5416 - protein, 488 aa, Arabidopsis thaliana
MAMLGAQQVPAAACTPDMVGNAFVPQYYHILHQSPEHVHRFYQEISKLGRPEENGLMSITSTLQAIDKKIMALGYGVISAEIATVDTQESHGGGYIVLVTGYLTGKDSVRRTFSQTFFLAPQETGYFVLNDMFRFIDEGTVVHGNQIPVNNVQAPVNTYQDTAAAKEIPDDFVQEKYVQENHAVKQTEVLSKSINEPEKVFTPSEDEQVSAAEEALVTETVNEAPIEVQKVGESDSRTGEIPKRSYASIVKVMKENAAPMSASRTPTKVEPKKQEDQAIHIPLPTPLSEKSDSGANVAVNENNQENERALGPSIYLKGLPLDATPALLENEFQKFGLIRTNGIQVRSQKGFCFGFVEFESASSMQSAIEASPVMLNGHKVVVEEKRSTARGNYRGRSTFGVNTGYRNEGGRGRGSFGGGRGGYGRTDFNGYGNNRGNNRGGYANRANGDGGGFPRANGNNGRVRRGGGNDANRATKPVDDAPRVSVAA

SEQ ID NO: 5417 - protein, 486 aa, Arabidopsis thaliana
MLGAQQVPAAACTPDMVGNAFVPQYYHILHQSPEHVHRFYQEISKLGRPEENGLMSITSTLQAIDKKIMALGYGVISAEIATVDTQESHGGGYIVLVTGYLTGKDSVRRTFSQTFFLAPQETGYFVLNDMFRFIDEGTVVHGNQIPVNNVQAPVNTYQDTAAAKEIPDDFVQEKYVQENHAVKQTEVLSKSINEPEKVFTPSEDEQVSAAEEALVTETVNEAPIEVQKVGESDSRTGEIPKRSYASIVKVMKENAAPMSASRTPTKVEPKKQEDQAIHIPLPTPLSEKSDSGANVAVNENNQENERALGPSIYLKGLPLDATPALLENEFQKFGLIRTNGIQVRSQKGFCFGFVEFESASSMQSAIEASPVMLNGHKVVVEEKRSTARGNYRGRSTFGVNTGYRNEGGRGRGSFGGGRGGYGRTDFNGYGNNRGNNRGGYANRANGDGGGFPRANGNNGRVRRGGGNDANRATKPVDDAPRVSVAA

SEQ ID NO: 5418 - protein, 471 aa, Arabidopsis thaliana
MVGNAFVPQYYHILHQSPEHVHRFYQEISKLGRPEENGLMSITSTLQAIDKKIMALGYGVISAEIATVDTQESHGGGYIVLVTGYLTGKDSVRRTFSQTFFLAPQETGYFVLNDMFRFIDEGTVVHGNQIPVNNVQAPVNTYQDTAAAKEIPDDFVQEKYVQENHAVKQTEVLSKSINEPEKVFTPSEDEQVSAAEEALVTETVNEAPIEVQKVGESDSRTGEIPKRSYASIVKVMKENAAPMSASRTPTKVEPKKQEDQAIHIPLPTPLSEKSDSGANVAVNENNQENERALGPSIYLKGLPLDATPALLENEFQKFGLIRTNGIQVRSQKGFCFGFVEFESASSMQSAIEASPVMLNGHKVVVEEKRSTARGNYRGRSTFGVNTGYRNEGGRGRGSFGGGRGGYGRTDFNGYGNNRGNNRGGYANRANGDGGGFPRANGNNGRVRRGGGNDANRATKPVDDAPRVSVAA

SEQ ID NO: 5419 - DNA, 1820 bp, Arabidopsis thaliana
gtaatttccaaaaatgaaggctgagtctagcaacgagtctttcataatcgggcagcgagtccactctctcaacgattcgcgtcgtgtgggcaccgtgaaatacgtcggagatgtggagggatactccggaacttggatcggcgttgattgggatcaagacggtgatggaaaacataacggttccgtcaatggcgttttctactttaacggtcgttctcagagctcagcttcatttgttcgttcccagaatcttagtcgcggtatcacattgcttcaagctttggagcttagatacagaacaatttcaactaaggacgaagaagatgaaatgtatgttctctctgctgggaatagacgtgtttcgattcagcttttaggaggggataagatccaggataagttaagtcggttcgaggagcttacgagtgcttctctttcgtatcttggtgttagttctcttggagtttcatctgatttgggttcaattctaccaaatttgaagctgctggacttaactggaaacttgatttctgactgggaggagattggtgctctttgtgaacagttaccagcacttacaacccttaatttgtcttgcaattctttgtcaagtgatatcaagtctctgccacagttaaaaaatatccgtgttttggttctgaataatagtggtctgagctggactcaggttgaaattcttaggcgctcgttacctggaattgaggagttgcatctgatggggaacatgatatctaccataacatccacgtcctcatcagatgatcaagcatttaactctctgcggctactgaacttggatgataattgtatttccgattggagtgaagtattaaagctatctcaacttccatgcttggagcagctttacctgaataagaataagctttcacgcatctttcagtctgtaaatggcactgaatcatcagagaaaggcagcgacccatttcctagtctgagttgtcttcttctaggagccaacaacattggcgatttggcctcagtagacgcactgaatgggtttcctcagttagtggacatcaggctttcggaaaacccaatatctgatcctgtaagaggtggtgtcccaagatttgttctcgttgcaaggttgacaaaagtacaagtgctgaatgggagtgaggtaagagctcgtgagaagaaggattctgagatccggtatgtccgaatggtgatgtcaaagttaaatgacaagtctggggagattgagctgctccaccctagattttatgaactcaagaaacttcatggaattgaggacgaaagagcatcagctgagaacagcggccctaagaatatagcatctggacttatctccattactctcaaatgcgttggtccatcaatgggtgaaaaacctcacttgacaaagaagttaccgggcagtatcacggttggaaagctgaagatcttatctgagaactttttcaagctcaagtccatcaagccaagattatttctgcaggaagagggctcaccttttccgacagcactcgatgacgagactgcaacattacttgacgttggaatctgcgacggctccacacttcttgttgacgaagagagttaagttaaggtcatcacatactacacactcttcagaatttaaactcgatttattttatggattgtcactgtgaacattaatagtttatccatcttttgcaagtaacttgaacccacgtaaaaacattaatagttccagaaccatcatcatcattgcaaaagtttcatacaaagttaaaaaaaaattgaaattgagaagagacaacatgttttat

SEQ ID NO: 5420 - protein, 531 aa, Arabidopsis thaliana
MKAESSNESFIIGQRVHSLNDSRRVGTVKYVGDVEGYSGTWIGVDWDQDGDGKHNGSVNGVFYFNGRSQSSASFVRSQNLSRGITLLQALELRYRTISTKDEEDEMYVLSAGNRRVSIQLLGGDKIQDKLSRFEELTSASLSYLGVSSLGVSSDLGSILPNLKLLDLTGNLISDWEEIGALCEQLPALTTLNLSCNSLSSDIKSLPQLKNIRVLVLNNSGLSWTQVEILRRSLPGIEELHLMGNMISTITSTSSSDDQAFNSLRLLNLDDNCISDWSEVLKLSQLPCLEQLYLNKNKLSRIFQSVNGTESSEKGSDPFPSLSCLLLGANNIGDLASVDALNGFPQLVDIRLSENPISDPVRGGVPRFVLVARLTKVQVLNGSEVRAREKKDSEIRYVRMVMSKLNDKSGEIELLHPRFYELKKLHGIEDERASAENSGPKNIASGLISITLKCVGPSMGEKPHLTKKLPGSITVGKLKILSENFFKLKSIKPRLFLQEEGSPFPTALDDETATLLDVGICDGSTLLVDEES

SEQ ID NO: 5421 - protein, 426 aa, Arabidopsis thaliana
MYVLSAGNRRVSIQLLGGDKIQDKLSRFEELTSASLSYLGVSSLGVSSDLGSILPNLKLLDLTGNLISDWEEIGALCEQLPALTTLNLSCNSLSSDIKSLPQLKNIRVLVLNNSGLSWTQVEILRRSLPGIEELHLMGNMISTITSTSSSDDQAFNSLRLLNLDDNCISDWSEVLKLSQLPCLEQLYLNKNKLSRIFQSVNGTESSEKGSDPFPSLSCLLLGANNIGDLASVDALNGFPQLVDIRLSENPISDPVRGGVPRFVLVARLTKVQVLNGSEVRAREKKDSEIRYVRMVMSKLNDKSGEIELLHPRFYELKKLHGIEDERASAENSGPKNIASGLISITLKCVGPSMGEKPHLTKKLPGSITVGKLKILSENFFKLKSIKPRLFLQEEGSPFPTALDDETATLLDVGICDGSTLLVDEES

SEQ ID NO: 5422 - protein, 290 aa, Arabidopsis thaliana
MGNMISTITSTSSSDDQAFNSLRLLNLDDNCISDWSEVLKLSQLPCLEQLYLNKNKLSRIFQSVNGTESSEKGSDPFPSLSCLLLGANNIGDLASVDALNGFPQLVDIRLSENPISDPVRGGVPRFVLVARLTKVQVLNGSEVRAREKKDSEIRYVRMVMSKLNDKSGEIELLHPRFYELKKLHGIEDERASAENSGPKNIASGLISITLKCVGPSMGEKPHLTKKLPGSITVGKLKILSENFFKLKSIKPRLFLQEEGSPFPTALDDETATLLDVGICDGSTLLVDEES

SEQ ID NO: 5423 - DNA, 1551 bp, Arabidopsis thaliana
aatcatcatcttttcgataccgaagcagcaaccttcgcgccgccgagagataacgagaaaaaatggggaagaggtcgaaaacatcaaggaaagggaaaaaagcatggagggctaacattagctccgaggacattgaagatttcttcgagaaaactaccagagatgctctctccggtggcaatctctccgctgctcccagcgaagacttgttccacgtcgataaatcccatgaccttccggtgaagcgaaagattgagaaacatagagagagagtgctccgtgttgacagtatcttaaagaagaatccatttgtccagttagtgccatcttcaaagccaaagttgaagaaaagtaagaagacaatcgttatagaagacaaagcacctaaacaagttcaaaaaagtgttggtgacgattctgtaatggccgacttgtggggtgatgatagtaaaggagaacatgagagcaatcctagaaagattttcaaaaatccttcgattatttcagcagtagaaattgaacatccaggatgctcatacaaccctacaactgagagtcaccaggatatgttggctgaagccgtcgctcaagaaatgcagaaagtttacaaaactgagttagggcctgcacctgttcctttgactattgaaggggatacactcagtgaagatgagaggtactttcttgatgtggacaattttagtgaaggcgaagataatgaaaacgttgagaatgaagtgtcagaggctggaattaaattaaaggagaacccatttgtccagttaaagccatcttcaaatacaaacttgaagaaaatagaagacaaaacacctagacaagctcaaaaaagtgttggtgacgattctgtaatggtggacttgttgggtgatgatattaaagaagacctgaagtactttcttgaagtgggcaatgttggtgaaggtgaagataataaagatgttaagattgaagtgtcagaggctgggaacaatgtctcaaggaaaacaaagagggttacccgtgtggaattaaataagcgatgtaggcaaaaggcactgcgaaaaaaagagacaaaggaaaaggctaaagagaagatattaaacgaaattgacagcttgcccaacatcttagaagaaatagccaaagaagatgaggataaacagaataaacatttacgaagggtcatcgccaagcaggaagtgctgaagatacgtcctcctcggttgggaaagtacaaatttgaggctcctccagttcaagtcctcttgacagaagagatgactgggtcacttcgtaagctgaaggcatgttgcactcttgcaagagatcgattcaagagcctcgagaagcgaggaatacttgttccctcaaaacagattagaaggttttaggaactcttctcactgtctgcagcttgtttgagaaaagcttttggaagaaaacaacaacaaagactgtctcaatcgactcatatatcttgtgttttaacataaagtttgttttactgttgtcaaattttgagtttatgaaaaaaatacaaaagattttgct

SEQ ID NO: 5424 - protein, 442 aa, Arabidopsis thaliana
MGKRSKTSRKGKKAWRANISSEDIEDFFEKTTRDALSGGNLSAAPSEDLFHVDKSHDLPVKRKIEKHRERVLRVDSILKKNPFVQLVPSSKPKLKKSKKTIVIEDKAPKQVQKSVGDDSVMADLWGDDSKGEHESNPRKIFKNPSIISAVEIEHPGCSYNPTTESHQDMLAEAVAQEMQKVYKTELGPAPVPLTIEGDTLSEDERYFLDVDNFSEGEDNENVENEVSEAGIKLKENPFVQLKPSSNTNLKKIEDKTPRQAQKSVGDDSVMVDLLGDDIKEDLKYFLEVGNVGEGEDNKDVKIEVSEAGNNVSRKTKRVTRVELNKRCRQKALRKKETKEKAKEKILNEIDSLPNILEEIAKEDEDKQNKHLRRVIAKQEVLKIRPPRLGKYKFEAPPVQVLLTEEMTGSLRKLKACCTLARDRFKSLEKRGILVPSKQIRRF

SEQ ID NO: 5425 - protein, 322 aa, Arabidopsis thaliana
MADLWGDDSKGEHESNPRKIFKNPSIISAVEIEHPGCSYNPTTESHQDMLAEAVAQEMQKVYKTELGPAPVPLTIEGDTLSEDERYFLDVDNFSEGEDNENVENEVSEAGIKLKENPFVQLKPSSNTNLKKIEDKTPRQAQKSVGDDSVMVDLLGDDIKEDLKYFLEVGNVGEGEDNKDVKIEVSEAGNNVSRKTKRVTRVELNKRCRQKALRKKETKEKAKEKILNEIDSLPNILEEIAKEDEDKQNKHLRRVIAKQEVLKIRPPRLGKYKFEAPPVQVLLTEEMTGSLRKLKACCTLARDRFKSLEKRGILVPSKQIRRF

SEQ ID NO: 5426 - protein, 274 aa, Arabidopsis thaliana
MLAEAVAQEMQKVYKTELGPAPVPLTIEGDTLSEDERYFLDVDNFSEGEDNENVENEVSEAGIKLKENPFVQLKPSSNTNLKKIEDKTPRQAQKSVGDDSVMVDLLGDDIKEDLKYFLEVGNVGEGEDNKDVKIEVSEAGNNVSRKTKRVTRVELNKRCRQKALRKKETKEKAKEKILNEIDSLPNILEEIAKEDEDKQNKHLRRVIAKQEVLKIRPPRLGKYKFEAPPVQVLLTEEMTGSLRKLKACCTLARDRFKSLEKRGILVPSKQIRRF

SEQ ID NO: 5427 - DNA, 1176 bp, Arabidopsis thaliana
atcataataatcatagaattttcaacttttaagctctagatagagagatagagagagacaaagtaacaaagagaaagagagagaaatatggaagagacaaaatcgagattcaagaggatctgtgtcttctgtggaagcagttccggcaaaaaaccttcataccaagaagctgccattcaattgggtaacgagttggtggagagaaggattgatttggtatacggaggtggtagcgtggggcttatgggtctcgtctctcaagctgttcatcatggtggtcgccatgttctaggggtcattccaaaaaccttgatgccaagagagataactggtgagaccatcggagaagttaaagccgtggccgatatgcatcaaaggaaagctgaaatggctcgccaagccgacgcattcattgcccttcctggtgggtatggtacgttagaagaattgctggaagtcattacatgggctcaactcggtatccaccgtaagccggtgggtcttcttaacgtggatggttactacaactcgctgttaacgtttattgataaggctgtggacgaaggatttatatccccaatggctcgtcgaatcatcgtctcagctccaaacgctaaagagttggttcgacaactcgaggaatatgaaccggagtttgatgagataacatcaaaattggtttgggatgaagtggaccggataagttatgtaccgggttcggaggtagctaccgctacgtaaggatgtattatggggagtttattttttggtaaaagcagtgtacagcggaaattaagttgtttaacatcagaaggtaagggcggaaagaagacaaaagaaagtattggggtcgttttgataaacattattttgtaggggtggtttaaatgtgtgaagtggataaaccatgtgggtaactgctaaccgcgtatataccaaaccctatcactccccacttgtctttgtacattttggtttaatggaaaaaaaggatagggctattttcaagaaatgacaaaacgatccttttcttttggttattttctgattttatccataacttctagtttttaacttttttctcgtgtcaaaggtatcagatttttatttaaccagaaaattatcatgtacgatattttttaattaatccgagtggagaatattccgagtaatacc

SEQ ID NO: 5428 - protein, 217 aa, Arabidopsis thaliana
MEETKSRFKRICVFCGSSSGKKPSYQEAAIQLGNELVERRIDLVYGGGSVGLMGLVSQAVHHGGRHVLGVIPKTLMPREITGETIGEVKAVADMHQRKAEMARQADAFIALPGGYGTLEELLEVITWAQLGIHRKPVGLLNVDGYYNSLLTFIDKAVDEGFISPMARRIIVSAPNAKELVRQLEEYEPEFDEITSKLVWDEVDRISYVPGSEVATAT

SEQ ID NO: 5429 - protein, 165 aa, Arabidopsis thaliana
MGLVSQAVHHGGRHVLGVIPKTLMPREITGETIGEVKAVADMHQRKAEMARQADAFIALPGGYGTLEELLEVITWAQLGIHRKPVGLLNVDGYYNSLLTFIDKAVDEGFISPMARRIIVSAPNAKELVRQLEEYEPEFDEITSKLVWDEVDRISYVPGSEVATAT

SEQ ID NO: 5430 - protein, 142 aa, Arabidopsis thaliana
MPREITGETIGEVKAVADMHQRKAEMARQADAFIALPGGYGTLEELLEVITWAQLGIHRKPVGLLNVDGYYNSLLTFIDKAVDEGFISPMARRIIVSAPNAKELVRQLEEYEPEFDEITSKLVWDEVDRISYVPGSEVATAT

SEQ ID NO: 5431 - DNA, 1798 bp, Arabidopsis thaliana
aaacttagccaaacgtcacaaatccaaaacccaaaaccgaatcgttttttagcctccaagagagagatctacagatagagaatgatagaaccgtcgatggagagagagaatggtgctttaacggcggcgacaacaacgacgacggcggtgacttctcctcctccgatggcttcttcaccgcgtcaagctttagttgagagattgaaagattatggacaagaagatattttctctctttgggatgaactttcaccagacgagaaagattttctcgttagagatattgagaatttggatcttccaagaatagatcggatcattagatgttcacttcactctcaaggtttaccggttgcggcgattgaaccggtaccggagaattgggtttcgacagtagatggtagaacaatggaagatagagagaaatggtggaaaatgggattaaaaactatctatgaaggcaaattaggtgttgtgcttttatctggtggacagggaacaaggcttggaagctcagatccaaaaggatgtttcaatatcggattaccatcagggaaatcgctctttcagattcaagcagagagaatcttgtgtgttcaaagacttgctgctcaagtagtgagtgaaggtccaattcgtccagttacaatacattggtatattatgactagtccatttactgatgaagcgacacgaaaatatttctcgagtcacaagtactttggtcttgaaccagatcaaatcagttttttccaacaaggtactttgccctgcgttacaaaggatggaaagtttattatggagacacctttcagtctagctaaagctccagatggtaacggcggagtctatgcagcgctaaagtgttcaaggctattagaggatatggcttctagggggattaaatacgtcgattgctatggcgttgacaatgtcctggttcgagtagctgatcctacttttcttggatacttcatcgataaaggggctgcttcggctgcaaaagttgtgcggaaggcatatcctcaagaacaggtaggagtgtttgttagaagaggtaaaggaggaccgttgacagtagttgagtatagtgagcttgatcagtctatggcttctgctattaatcaacgaacaggacgtcttcaatattgctggagtaacgtgtgcttacacatgtttactttagatttccttaatcaagtcgctaccggcctagaaaaagatagcgtgtaccatttggcggagaagaagataccatctatgaatggatacacaatgggactaaaactagaacaattcatttttgattcgtttccttatgctccttcaaccgcactttttgaggttttaagggaagaggagtttgcaccagtgaagaatgttaacgggtcgaatttcgatacaccggaaagtgcgaggcttttggttctaaggttacacacacgttgggttatagcagctggtggatttctaacacattctgtgcctttatatgctactggtgtagaggtttcacctttgtgctcatacgccggagaaaatcttgaagctatttgtcgaggaagaacgtttcatgcaccttgtgaaatttccctctaatggtttttgtgtttttgttttggggttttaaaatcttttcttcatttttatgtgatttgttttctttgtttccggttgtggtttatatatataaactgattatcttcccatgagagagagaaagagagagtcaaagaggtcttggcgttttgtatccattaatgtaacatatctaataaaaattttatgttggtttttg

SEQ ID NO: 5432 - protein, 505 aa, Arabidopsis thaliana
MIEPSMERENGALTAATTTTTAVTSPPPMASSPRQALVERLKDYGQEDIFSLWDELSPDEKDFLVRDIENLDLPRIDRIIRCSLHSQGLPVAAIEPVPENWVSTVDGRTMEDREKWWKMGLKTIYEGKLGVVLLSGGQGTRLGSSDPKGCFNIGLPSGKSLFQIQAERILCVQRLAAQVVSEGPIRPVTIHWYIMTSPFTDEATRKYFSSHKYFGLEPDQISFFQQGTLPCVTKDGKFIMETPFSLAKAPDGNGGVYAALKCSRLLEDMASRGIKYVDCYGVDNVLVRVADPTFLGYFIDKGAASAAKVVRKAYPQEQVGVFVRRGKGGPLTVVEYSELDQSMASAINQRTGRLQYCWSNVCLHMFTLDFLNQVATGLEKDSVYHLAEKKIPSMNGYTMGLKLEQFIFDSFPYAPSTALFEVLREEEFAPVKNVNGSNFDTPESARLLVLRLHTRWVIAAGGFLTHSVPLYATGVEVSPLCSYAGENLEAICRGRTFHAPCEISL

SEQ ID NO: 5433 - protein, 500 aa, Arabidopsis thaliana
MERENGALTAATTTTTAVTSPPPMASSPRQALVERLKDYGQEDIFSLWDELSPDEKDFLVRDIENLDLPRIDRIIRCSLHSQGLPVAAIEPVPENWVSTVDGRTMEDREKWWKMGLKTIYEGKLGVVLLSGGQGTRLGSSDPKGCFNIGLPSGKSLFQIQAERILCVQRLAAQVVSEGPIRPVTIHWYIMTSPFTDEATRKYFSSHKYFGLEPDQISFFQQGTLPCVTKDGKFIMETPFSLAKAPDGNGGVYAALKCSRLLEDMASRGIKYVDCYGVDNVLVRVADPTFLGYFIDKGAASAAKVVRKAYPQEQVGVFVRRGKGGPLTVVEYSELDQSMASAINQRTGRLQYCWSNVCLHMFTLDFLNQVATGLEKDSVYHLAEKKIPSMNGYTMGLKLEQFIFDSFPYAPSTALFEVLREEEFAPVKNVNGSNFDTPESARLLVLRLHTRWVIAAGGFLTHSVPLYATGVEVSPLCSYAGENLEAICRGRTFHAPCEISL

SEQ ID NO: 5434 - protein, 477 aa, Arabidopsis thaliana
MASSPRQALVERLKDYGQEDIFSLWDELSPDEKDFLVRDIENLDLPRIDRIIRCSLHSQGLPVAAIEPVPENWVSTVDGRTMEDREKWWKMGLKTIYEGKLGVVLLSGGQGTRLGSSDPKGCFNIGLPSGKSLFQIQAERILCVQRLAAQVVSEGPIRPVTIHWYIMTSPFTDEATRKYFSSHKYFGLEPDQISFFQQGTLPCVTKDGKFIMETPFSLAKAPDGNGGVYAALKCSRLLEDMASRGIKYVDCYGVDNVLVRVADPTFLGYFIDKGAASAAKVVRKAYPQEQVGVFVRRGKGGPLTVVEYSELDQSMASAINQRTGRLQYCWSNVCLHMFTLDFLNQVATGLEKDSVYHLAEKKIPSMNGYTMGLKLEQFIFDSFPYAPSTALFEVLREEEFAPVKNVNGSNFDTPESARLLVLRLHTRWVIAAGGFLTHSVPLYATGVEVSPLCSYAGENLEAICRGRTFHAPCEISL

SEQ ID NO: 5435 - DNA, 935 bp, Arabidopsis thaliana
agttttctcaattttttctagactcgtatcgatatggcgaatcatgaaacgatatttgatcagctaaagaagcagattccagtagatgaggaagaacctctgattttgaatcgagactcaagcgttggtctcgtcatcgttgacgttgttaatggcttctgcacaattggctccggcaatatggctccaacaaagcataatgaacagatatcgaagatggtggaggaaagtgcaaagcttgctagagagttctgtgatcggaaatggccggttttggcgtttattgactctcatcatccagatattccggagagaccttatcctcctcattgtattataggaactgaagaatcagaacttgttcctgctctgaaatggcttgaaagtgaggattgtgccactcttagacgaaaggattgtattaatgggtttgtgggttcgatggagagtgatggttctaatgtttttgtggattgggttaaggaaaaacagatcaaagttattgtcgttgtaggtatctgtacagacatatgtgtgtttgattttgtggctactgcactttctgcccgaaaccacggtgttctttctcctgtagaagatgtggtagtgtactcccgtggctgtgctacttttgaccttcctcttcatgttgcgaaagacatcaaaggcgctcaggctcatcctcaggagttgatgcaccatgtaggtctatatatggctaaaggaagaggagctcaggtagtctctaaaatttcttttgagacttgaaagactatatctcgtttataaacataacactcttgatatcaaatatttcagtaaattgttgagtttgcctctcttttctttcgtgtaaattgttcatgaagcttgttctctgaatttcaactcttgtgtaactgtttcagaatgacaaataatatgatgggtttctt

SEQ ID NO: 5436 - protein, 244 aa, Arabidopsis thaliana
MANHETIFDQLKKQIPVDEEEPLILNRDSSVGLVIVDVVNGFCTIGSGNMAPTKHNEQISKMVEESAKLAREFCDRKWPVLAFIDSHHPDIPERPYPPHCIIGTEESELVPALKWLESEDCATLRRKDCINGFVGSMESDGSNVFVDWVKEKQIKVIVVVGICTDICVFDFVATALSARNHGVLSPVEDVVVYSRGCATFDLPLHVAKDIKGAQAHPQELMHHVGLYMAKGRGAQVVSKISFET

SEQ ID NO: 5437 - protein, 195 aa, Arabidopsis thaliana
MAPTKHNEQISKMVEESAKLAREFCDRKWPVLAFIDSHHPDIPERPYPPHCIIGTEESELVPALKWLESEDCATLRRKDCINGFVGSMESDGSNVFVDWVKEKQIKVIVVVGICTDICVFDFVATALSARNHGVLSPVEDVVVYSRGCATFDLPLHVAKDIKGAQAHPQELMHHVGLYMAKGRGAQVVSKISFET

SEQ ID NO: 5438 - protein, 183 aa, Arabidopsis thaliana
MVEESAKLAREFCDRKWPVLAFIDSHHPDIPERPYPPHCIIGTEESELVPALKWLESEDCATLRRKDCINGFVGSMESDGSNVFVDWVKEKQIKVIVVVGICTDICVFDFVATALSARNHGVLSPVEDVVVYSRGCATFDLPLHVAKDIKGAQAHPQELMHHVGLYMAKGRGAQVVSKISFET

SEQ ID NO: 5439 - DNA, 1046 bp, Arabidopsis thaliana
gttaaaataaaatagaataaaaataaaggaagaagaagaagaagaagaagaagaaaggattcgtcttccttcttccacaccctttctgacacctcatctcccctcccaccttctccgtcccgttccgtttctccatcagatcctcgattccgatccaacagttcgaattcagtttccgattctgatctgatcgaaccaatactcactgagatttgatcggcgattatggagtctatatctccggtatcgaatcagcttcttcagccgacgacgacgagctctaattccgatcgctctcgtcgtaagcgtaagaagaaatcatcgccatcatcggttgagaaatctccatctccgtcaatatcgttggagaaatggagatcggagaagcagcaacagatctactcaacgaagctagttcatgctttaagagagctacgaatcagccaacaaccatcttcatcatcatcttcttcgattccacgtggaggtagagccgtacgtgaagtcgccgatagagctttagcagttgcggcgagaggtaaaacgttatggagtcgagcgatactttcaaaagctgtaaaactcaaattcaggaaacacaaacgccagagaatctctaatccgacgacgacgacgttaaccaccgggagtatcaggtcaaagaaacagagagcgacggttttgaggcttaaggctaaaggtttgccagctgtacagaggaaagtgaaagtactgagccggttagttcccggttgccgtaaacaatcattaccggtggttttagaagaaaccactgattatatagctgccatggagatgcagattcgtactatgactgcgattctctccgccgttagttcttctcctccgccgccaacgccaggtcacgaagggggacaaacacacatgcttggttagttggccaaactgtccttttatttttttccaattttaaaaaccaaaaaaaaaactgttttttttatcatattattattcttctcactgtattgtttgttgtttgaatattttactattcaactttattt

SEQ ID NO: 5440 - protein, 230 aa, Arabidopsis thaliana
MESISPVSNQLLQPTTTSSNSDRSRRKRKKKSSPSSVEKSPSPSISLEKWRSEKQQQIYSTKLVHALRELRISQQPSSSSSSSIPRGGRAVREVADRALAVAARGKTLWSRAILSKAVKLKFRKHKRQRISNPTTTTLTTGSIRSKKQRATVLRLKAKGLPAVQRKVKVLSRLVPGCRKQSLPVVLEETTDYIAAMEMQIRTMTAILSAVSSSPPPPTPGHEGGQTHMLG

SEQ ID NO: 5441 - DNA, 1301 bp, Arabidopsis thaliana
atcggagaaacgttcaagctgtgacagagaatctcggtcgtcttcgtttgtctccgacgagctctctttcttctccgattagatcccgtgagaagaactcaaaggctctagggtttctctgtgattcagttaactcctttagatatcgtaagaaagtaatcgatgatactattgcagtcacattcaaggtttcttcttcaaacgctattgacgcgagctcaaaatcttgataaagcagtggagctagattatcaatggattgaatttgatgatgttcgttaccatgttcaggtgacaatgaagaatccaaatctgttgttgctttcggtttcgttaccaaatccaccacctgaagcaatgtcctttgatggacttcctttaggagctatagaagctattaaaaccacttacgggacaggttttcaaatacttgatcctcctagagatggttttagtttaaccctcaagctcaatttctctaaagttcgtcctgatgaagagttattaacgaagctagcttccattagagaagtggtgatgggtgcaccgttaaaaatcattttcaagcatttagcttcaaggacggttgctcctgagctggataggcttgtagcaattatgcatagacctaacgagacgtttttcctcgtgcctcaggcggataaagtcactgtggcatttcctatgagatttaaagactccgtagacacgattctggcgacttctttccttaaggaatttgtagaggcgaggcgtgctgctgcgcttaatactgctccttcttgttcttggtctccaaccgcaccgcaggaattagagggagctcctaaagaaacactatccgctaatgccggttttgtaacttttgtcatttttcctcggcatgtggaagggaaaaagctcgatcgtactgtctggaatttatcgacctttcatgcttatgttagttatcacgtcaagttctcagagggatttatgcacaccaggatgcggcgtcgcgtggaatctatgattcaggctctggatcaagctaagccattggagaaaacaagatcgatgaacaacaagtcatttaaacggctaggactcaacgaggtcaatcacaccaactcgaagtagttggatttctcacgaagcaattttgtaaaaacttgtgattagctgagacatgtattttttttactggattaagtctctgtgatatttattttagtacaattctttcagatatttctatacatctgatcttgctaaatatttgaacaaatgtataatgtgaaaattgtaagaaactcaccttg

SEQ ID NO: 5442 - protein, 318 aa, Arabidopsis thaliana
MILLQSHSRFLLQTLLTRAQNLDKAVELDYQWIEFDDVRYHVQVTMKNPNLLLLSVSLPNPPPEAMSFDGLPLGAIEAIKTTYGTGFQILDPPRDGFSLTLKLNFSKVRPDEELLTKLASIREVVMGAPLKIIFKHLASRTVAPELDRLVAIMHRPNETFFLVPQADKVTVAFPMRFKDSVDTILATSFLKEFVEARRAAALNTAPSCSWSPTAPQELEGAPKETLSANAGFVTFVIFPRHVEGKKLDRTVWNLSTFHAYVSYHVKFSEGFMHTRMRRRVESMIQALDQAKPLEKTRSMNNKSFKRLGLNEVNHTNSK

SEQ ID NO: 5443 - protein, 273 aa, Arabidopsis thaliana
MKNPNLLLLSVSLPNPPPEAMSFDGLPLGAIEAIKTTYGTGFQILDPPRDGFSLTLKLNFSKVRPDEELLTKLASIREVVMGAPLKIIFKHLASRTVAPELDRLVAIMHRPNETFFLVPQADKVTVAFPMRFKDSVDTILATSFLKEFVEARRAAALNTAPSCSWSPTAPQELEGAPKETLSANAGFVTFVIFPRHVEGKKLDRTVWNLSTFHAYVSYHVKFSEGFMHTRMRRRVESMIQALDQAKPLEKTRSMNNKSFKRLGLNEVNHTNSK

SEQ ID NO: 5444 - protein, 253 aa, Arabidopsis thaliana
MSFDGLPLGAIEAIKTTYGTGFQILDPPRDGFSLTLKLNFSKVRPDEELLTKLASIREVVMGAPLKIIFKHLASRTVAPELDRLVAIMHRPNETFFLVPQADKVTVAFPMRFKDSVDTILATSFLKEFVEARRAAALNTAPSCSWSPTAPQELEGAPKETLSANAGFVTFVIFPRHVEGKKLDRTVWNLSTFHAYVSYHVKFSEGFMHTRMRRRVESMIQALDQAKPLEKTRSMNNKSFKRLGLNEVNHTNSK

SEQ ID NO: 5445 - DNA, 1792 bp, Arabidopsis thaliana
gccgtctcttagaatcacatccacgtcgtcgtctccatacccatggctactcttttagccactcctatcttctctcctttagcttcttctccagcaaggaaccgtctttcttgctctaagatccgtttcggttccaaaaatgggaaaattctcaattctgatggtgcccagaagttgaatctctcaaaattccgtaaacccgatggccaaagatttctacaaatgggttcttctaaagagatgaactttgagagaaaactctcagtccaagctatggatggtgcaggaacaggaaacacatcaacgatctctcgtaacgtaattgcgataagtcacttgttggtatcacttgggatcattcttgctgcagactatttcttgaagcaggcgtttgtagcagcgtctattaagttcccaagtgctttgtttgggatgttctgtattttctctgttcttatgatatttgattcggttgttcctgctgctgcaaatggtttgatgaatttcttcgagcctgcgtttctgtttatccaaagatggcttcctttgttctatgttccttctcttgttgttcttcctctttctgttagagatattccggctgcttcaggtgtcaaaatctgctacattgtagccggtggatggttggcgtcactttgtgtagcagggtacacagctattgcagtgagaaaaatggtgaaaaccgaaatgacggaagccgagcctatggcaaaaccatcaccattttcaacacttgagctatggagttggagtggaatctttgttgtgtcgtttgttggtgctctgttttaccctaattcattggggacaagtgcaagaacttctctccctttccttctttcttcaactgtgctaggttacattgtaggttctgggttgccatcttctattaagaaagttttccatccgataatctgctgcgcgctatctgcagtacttgctgctctagcttttgggtatgcttcaggatctggacttgatcctgttttaggaaactaccttaccaaagtagcatcagatcctggtgctggtgacatcttaatgggttttcttggctctgtcattctctctttcgctttctccatgttcaaacaaagaaagctcgtgaagaggcacgcagctgagatcttcacatctgtgatagtttcaacggtattctcgctctactccactgctcttgttggacgtttagtcggtttagaaccttctttaacggtttcaatcctacctcgctgcatcacggttgcattggcccttagcattgtatcactctttgaagggaccaattcgtctcttacagcagctgtagtcgttgtgactggtctgattggagctaactttgtacaagttgttcttgacaaactgcgtttacgtgatccaattgctcggggaattgcaactgcttcaagtgctcatggacttggaacagcagctttgtcggctaaggagccagaggctcttcccttttgtgcaatagcttatgctcttaccggaatcttcggatcgttactgtgttctgttcctgccgtccgacagagtttgctagcggtcgtcggctgaggattgatgatgtggcgaaacacgattgatggtctcaaagctggcgagttacttaaaatatgagagcagtttgctttggatgtcaaataagcttgtattaatgaaaaagatgatggaaaatgtttatttattttattttatatatgtaaatgttgtgagatttgtacaacatacataaattttatataggagtaggatgtcccagctttcc

SEQ ID NO: 5446 - protein, 512 aa, Arabidopsis thaliana
MATLLATPIFSPLASSPARNRLSCSKIRFGSKNGKILNSDGAQKLNLSKFRKPDGQRFLQMGSSKEMNFERKLSVQAMDGAGTGNTSTISRNVIAISHLLVSLGIILAADYFLKQAFVAASIKFPSALFGMFCIFSVLMIFDSVVPAAANGLMNFFEPAFLFIQRWLPLFYVPSLVVLPLSVRDIPAASGVKICYIVAGGWLASLCVAGYTAIAVRKMVKTEMTEAEPMAKPSPFSTLELWSWSGIFVVSFVGALFYPNSLGTSARTSLPFLLSSTVLGYIVGSGLPSSIKKVFHPIICCALSAVLAALAFGYASGSGLDPVLGNYLTKVASDPGAGDILMGFLGSVILSFAFSMFKQRKLVKRHAAEIFTSVIVSTVFSLYSTALVGRLVGLEPSLTVSILPRCITVALALSIVSLFEGTNSSLTAAVVVVTGLIGANFVQVVLDKLRLRDPIARGIATASSAHGLGTAALSAKEPEALPFCAIAYALTGIFGSLLCSVPAVRQSLLAVVG

SEQ ID NO: 5447 - protein, 452 aa, Arabidopsis thaliana
MGSSKEMNFERKLSVQAMDGAGTGNTSTISRNVIAISHLLVSLGIILAADYFLKQAFVAASIKFPSALFGMFCIFSVLMIFDSVVPAAANGLMNFFEPAFLFIQRWLPLFYVPSLVVLPLSVRDIPAASGVKICYIVAGGWLASLCVAGYTAIAVRKMVKTEMTEAEPMAKPSPFSTLELWSWSGIFVVSFVGALFYPNSLGTSARTSLPFLLSSTVLGYIVGSGLPSSIKKVFHPIICCALSAVLAALAFGYASGSGLDPVLGNYLTKVASDPGAGDILMGFLGSVILSFAFSMFKQRKLVKRHAAEIFTSVIVSTVFSLYSTALVGRLVGLEPSLTVSILPRCITVALALSIVSLFEGTNSSLTAAVVVVTGLIGANFVQVVLDKLRLRDPIARGIATASSAHGLGTAALSAKEPEALPFCAIAYALTGIFGSLLCSVPAVRQSLLAVVG

SEQ ID NO: 5448 - protein, 446 aa, Arabidopsis thaliana
MNFERKLSVQAMDGAGTGNTSTISRNVIAISHLLVSLGIILAADYFLKQAFVAASIKFPSALFGMFCIFSVLMIFDSVVPAAANGLMNFFEPAFLFIQRWLPLFYVPSLVVLPLSVRDIPAASGVKICYIVAGGWLASLCVAGYTAIAVRKMVKTEMTEAEPMAKPSPFSTLELWSWSGIFVVSFVGALFYPNSLGTSARTSLPFLLSSTVLGYIVGSGLPSSIKKVFHPIICCALSAVLAALAFGYASGSGLDPVLGNYLTKVASDPGAGDILMGFLGSVILSFAFSMFKQRKLVKRHAAEIFTSVIVSTVFSLYSTALVGRLVGLEPSLTVSILPRCITVALALSIVSLFEGTNSSLTAAVVVVTGLIGANFVQVVLDKLRLRDPIARGIATASSAHGLGTAALSAKEPEALPFCAIAYALTGIFGSLLCSVPAVRQSLLAVVG

SEQ ID NO: 5449 - DNA, 2373 bp, Arabidopsis thaliana
tgatcttctacttcttctcttaaaccctggccgcgcgagaaaaccctaattcaaacctgtagccatgcctgccctcactcgtaacaagaagaaggctgcgacgaaatcgataacccctccaacgaagcagcttaccaaatccaaaacccctccaatgaaaccccaaacttcaatgttgaagaaaggagcgaaatctcagaacaaacctccattgaagaagcagaagaaggaagttgtggaggaagagcctctagaagattacgaagttaccgatgattctgatgaagatgacgaagtttccgatggttctgatgaagatgatatttctccagctgtggaatcagaagagattgatgaatctgatgatggagagaacgggtctaatcagttattctctgatgatgaggaagagaacgatgaagagactttgggtgacgattttctagaaggtagcggcgatgaagatgaggaaggatctttagatgcggattcggatgctgactctgacgacgacgatattgtggcgaaatctgatgctattgatagagacttagcaatgcagaagaaagatgctgctgctgaactggaggattttatcaagcaagatgatgtacatgatgaagaacctgaacatgatgcgtttaggctaccaactgaagaggagcttgaagaagaagctcgtggtccaccagatcttcctctacttaagactagaattgaagagattgttagagctcttaaaaattttaaggctttcaggccaaaagacaccacgaggaaagcttgtgttgaacagctcaaagctgatctcggttcttattatggttataacagttttcttattggaactttggttgagatgtttcctcctggtgaacttatggaacttattgaagcttttgaaaagcaaaggcctacgtccatccgaactaacacacttaagactcgaagacgggatcttgctgatgtacttttgaacagaggagtcaatctagacccattaagcaagtggtctaaagttggacttgttatttatgattcacaagtcccaattggtgcaactcctgaatatctggctgggtactacatgcttcaaggtgctagttcgtttttgccagtgatggcccttgcccctcgagagaatgagcggattgtggatgtagctgctgctcctggtggtaaaacaacttatatcgccgctctaatgaaaaatacgggcttaatatatgcgaatgagatgaaagtacctaggcttaagtcgctaactgccaatctgcatcgtatgggggtcacaaataccatagtttgtaactatgatggaagagagctacccaaggttttaggtcagaacacggttgatagagtattgttggatgcgccttgcagtgggactggaattatatcaaaagatgaatcagttaaaataacgaaaaccatggatgagataaagaaatttgctcacttgcaaaagcaacttctactcgctgctattgatatggtggatgccaattccaaaaccggtggatatatagtttattcaacatgttcaattatggttactgagaatgaagccgtcattgactatgccctcaaaaagagggatgttaaactcgttacgtgtggtctcgattttggcagaaaaggatttaccagatttagagaacaccggtttcagccatctttggacaagactagacgtttctatcctcatgtacacaacatggacggatttttttgtggcaaagctgaagaaaatgagcaacgtgaagcaatcttcagaagaaggtgatgatgatgcggtagaaactgtagagcaagctgaagtgtctagtgatgatgatgatgaagctgaggccattgaagagacggagaagccttctgttcccgttaggcaacctaaggaaagaaaagaaaaaaagaacaaggaaaaacttgcaaaatcaaaggaggacaagagaggtaaaaaggataagaaatcaaaatctgaaaatgtggaagagccatctaaaccaaggaagcaaaagaagaagagacgggaatggaagaacgaaatagctcaagctagggaagagaaaagaatagccatgcgggagaaggcgaaggaggagaagtaatgatgattcagtgttttttcatcaaagagaagaaaaaacatttgcgaaaacgttatcatctatggttatagtaggcttgtgccatatattggctttcttgtttttgtttattcacgacgagatttgtgcaacgttaaaagcacccagagtgagcactctgttggactccgtgggcagaccaccttaaatgtccaaaagttttgtttcagaaaaaaatcttttaagagaatcaaagttaagttgtgttcttgagccgacc

SEQ ID NO: 5450 - protein, 574 aa, Arabidopsis thaliana
MPALTRNKKKAATKSITPPTKQLTKSKTPPMKPQTSMLKKGAKSQNKPPLKKQKKEVVEEEPLEDYEVTDDSDEDDEVSDGSDEDDISPAVESEEIDESDDGENGSNQLFSDDEEENDEETLGDDFLEGSGDEDEEGSLDADSDADSDDDDIVAKSDAIDRDLAMQKKDAAAELEDFIKQDDVHDEEPEHDAFRLPTEEELEEEARGPPDLPLLKTRIEEIVRALKNFKAFRPKDTTRKACVEQLKADLGSYYGYNSFLIGTLVEMFPPGELMELIEAFEKQRPTSIRTNTLKTRRRDLADVLLNRGVNLDPLSKWSKVGLVIYDSQVPIGATPEYLAGYYMLQGASSFLPVMALAPRENERIVDVAAAPGGKTTYIAALMKNTGLIYANEMKVPRLKSLTANLHRMGVTNTIVCNYDGRELPKVLGQNTVDRVLLDAPCSGTGIISKDESVKITKTMDEIKKFAHLQKQLLLAAIDMVDANSKTGGYIVYSTCSIMVTENEAVIDYALKKRDVKLVTCGLDFGRKGFTRFREHRFQPSLDKTRRFYPHVHNMDGFFCGKAEENEQREAIFRRR

SEQ ID NO: 5451 - protein, 544 aa, Arabidopsis thaliana
MKPQTSMLKKGAKSQNKPPLKKQKKEVVEEEPLEDYEVTDDSDEDDEVSDGSDEDDISPAVESEEIDESDDGENGSNQLFSDDEEENDEETLGDDFLEGSGDEDEEGSLDADSDADSDDDDIVAKSDAIDRDLAMQKKDAAAELEDFIKQDDVHDEEPEHDAFRLPTEEELEEEARGPPDLPLLKTRIEEIVRALKNFKAFRPKDTTRKACVEQLKADLGSYYGYNSFLIGTLVEMFPPGELMELIEAFEKQRPTSIRTNTLKTRRRDLADVLLNRGVNLDPLSKWSKVGLVIYDSQVPIGATPEYLAGYYMLQGASSFLPVMALAPRENERIVDVAAAPGGKTTYIAALMKNTGLIYANEMKVPRLKSLTANLHRMGVTNTIVCNYDGRELPKVLGQNTVDRVLLDAPCSGTGIISKDESVKITKTMDEIKKFAHLQKQLLLAAIDMVDANSKTGGYIVYSTCSIMVTENEAVIDYALKKRDVKLVTCGLDFGRKGFTRFREHRFQPSLDKTRRFYPHVHNMDGFFCGKAEENEQREAIFRRR

SEQ ID NO: 5452 - protein, 538 aa, Arabidopsis thaliana
MLKKGAKSQNKPPLKKQKKEVVEEEPLEDYEVTDDSDEDDEVSDGSDEDDISPAVESEEIDESDDGENGSNQLFSDDEEENDEETLGDDFLEGSGDEDEEGSLDADSDADSDDDDIVAKSDAIDRDLAMQKKDAAAELEDFIKQDDVHDEEPEHDAFRLPTEEELEEEARGPPDLPLLKTRIEEIVRALKNFKAFRPKDTTRKACVEQLKADLGSYYGYNSFLIGTLVEMFPPGELMELIEAFEKQRPTSIRTNTLKTRRRDLADVLLNRGVNLDPLSKWSKVGLVIYDSQVPIGATPEYLAGYYMLQGASSFLPVMALAPRENERIVDVAAAPGGKTTYIAALMKNTGLIYANEMKVPRLKSLTANLHRMGVTNTIVCNYDGRELPKVLGQNTVDRVLLDAPCSGTGIISKDESVKITKTMDEIKKFAHLQKQLLLAAIDMVDANSKTGGYIVYSTCSIMVTENEAVIDYALKKRDVKLVTCGLDFGRKGFTRFREHRFQPSLDKTRRFYPHVHNMDGFFCGKAEENEQREAIFRRR

SEQ ID NO: 5453 - DNA, 1288 bp, Arabidopsis thaliana
aaaacaaatcgttgaaaaagtaagtaagctcaaggcgcgacgaggaaaaagacgaagaagaagaaagtaacaatctttagtaatcaaagtccaattagtgaaaaggggttttcttgtgagaagagaaagagaagctatgagtgacgcgttttgttcggactgtaagaggcacacggaggttgtgtttgaccattccgccggagatacagtttgttcagagtgtggtctcgtgcttgaatctcactcaatcgatgaaacttctgagtggcgtactttcgctaatgagtccggtgataatgatcctgttcgtgtcggtggtccgacgaatcctcttttagcagatggtggtctcactactgtcatttctaaacctaatggatcctctggcgatttcctctcttcttctcttggtcgatggcagaatcgtggatctaatcctgatcgtggccttattgttgctttcaagactatcgctaccatggctgataggttgggacttgttgcgaccatcaaggaccgagcgaatgagatttataaaagggtagaggatcagaagtcaagtagaggaagaaatcaggatgctcttttggctgcttgtttatacattgcttgccggcaagaagacaaaccacggacggtcaaggaaatatgctctgttgccaatggagctactaagaaggagattggtcgtgcaaaagagtacatagtcaaacagttggggctggaaaccggacaattggttgaaatgggtactatacatgctggagattttatgagacgtttttgctccaatcttggtatgaccaaccaaaccgtgaaagcggctcaagagtctgtgcaaaagtcagaagaatttgatataaggaggagtcccatatcgattgcagcagcggttatatacatcataacacagctctctgatgagaagaagcctcttcgagatatatcagtggcaactggagtcgcggaaggaactataagaaactcttacaaagatctttaccctcacctttccaagatcataccagcttggtacgctaaagaagaagatctcaagaaccttcaaagcccttgagtgtcttcctcttctaatctcttactcgcaaccataccttcaagtttcgattgggattatgggttataaagttgttttgtccagaagtgcgactggaggcacgcttgaacaagagttttacagtagatttgtatcactttttcttcataaggtactatacattgttgaattaatgagatggtatttctagttgatcataccattttcagcacc

SEQ ID NO: 5454 - protein, 312 aa, Arabidopsis thaliana
MSDAFCSDCKRHTEVVFDHSAGDTVCSECGLVLESHSIDETSEWRTFANESGDNDPVRVGGPTNPLLADGGLTTVISKPNGSSGDFLSSSLGRWQNRGSNPDRGLIVAFKTIATMADRLGLVATIKDRANEIYKRVEDQKSSRGRNQDALLAACLYIACRQEDKPRTVKEICSVANGATKKEIGRAKEYIVKQLGLETGQLVEMGTIHAGDFMRRFCSNLGMTNQTVKAAQESVQKSEEFDIRRSPISIAAAVIYIITQLSDEKKPLRDISVATGVAEGTIRNSYKDLYPHLSKIIPAWYAKEEDLKNLQSP

SEQ ID NO: 5455 - protein, 198 aa, Arabidopsis thaliana
MADRLGLVATIKDRANEIYKRVEDQKSSRGRNQDALLAACLYIACRQEDKPRTVKEICSVANGATKKEIGRAKEYIVKQLGLETGQLVEMGTIHAGDFMRRFCSNLGMTNQTVKAAQESVQKSEEFDIRRSPISIAAAVIYIITQLSDEKKPLRDISVATGVAEGTIRNSYKDLYPHLSKIIPAWYAKEEDLKNLQSP

SEQ ID NO: 5456 - DNA, 1292 bp, Arabidopsis thaliana
ctacacgaattcgattctctcttatctcgacgagaaaaccctactgcgaaaaaactccgatctctctggcgagaagtaaattttttatctctgagcttggtttcaccatttctctatctctatctcctcgctgggttacggtttggtaaggtcagtgttctctaaggctgaaatttgggggtttctcagtctcgatgtggtcgtgctccgttaggattcttcacaatcattagggttatatttcttacaaactgatgctcattttctcttccctgtctatggctttatctgtgatccttcaaaagcttagtgtcttcggccctggtttgaatccttctttcccttactgcatcgccaatcactcctttgcctcccgttaattgagttgctctctttcaacttaattacattagtctgcttcctttgctgtctagtctggatagtgttgcaaatcaagtagtatcttctttagacattcttggctgagagatttacactaaaagcatagaataagaaacccctgtttggttagtatctacccgagtctcgtagtcctacacagatccggatcctagtttcgaagctagttcttgtttagctgaagctcagacccaaaatgctccaagaaccgtcggctgcattctccctccggcgtaactcattcagacgccgatctcccagatcaaatgtcgatgacagaggctggaatccgctccatatcaaagccagaaaaggcgatctgaaatctgtcaagcagcttctcgaccaaggaatggatgtgaatgctctagcatggggacccaaatcaaaaggagtgagtgcacttcaccttgcagcagagggaggtcacattgaagtcatggatttactcctagaacgtggggccaacattgatgctaaaacatggggctcatgcgggtggactcctctccacgctgcagccaaagagcggaagagagaagcagtgaagtttctggtggagaacggcgcattcttggcagatgatataactgataccaggtttaatccgccggtgcattactgtcacggccttgaatgggcgtacgaggaaatgaagaagcttaacagcgagtcttcttcttcatctggtggagacacatcttccagttctgacaactgaacttcttcttggttgtttctcggtgtgttttgttttgttttctagttgagactacttatcagaactattatggttggtgtttgatcttatgggctatgtgaaacattgaaactgcggatacattcatgtaatcttcagtgtgttattttac

SEQ ID NO: 5457 - protein, 174 aa, Arabidopsis thaliana
MLQEPSAAFSLRRNSFRRRSPRSNVDDRGWNPLHIKARKGDLKSVKQLLDQGMDVNALAWGPKSKGVSALHLAAEGGHIEVMDLLLERGANIDAKTWGSCGWTPLHAAAKERKREAVKFLVENGAFLADDITDTRFNPPVHYCHGLEWAYEEMKKLNSESSSSSGGDTSSSSDN

SEQ ID NO: 5458 - protein, 122 aa, Arabidopsis thaliana
MDVNALAWGPKSKGVSALHLAAEGGHIEVMDLLLERGANIDAKTWGSCGWTPLHAAAKERKREAVKFLVENGAFLADDITDTRFNPPVHYCHGLEWAYEEMKKLNSESSSSSGGDTSSSSDN

SEQ ID NO: 5459 - protein, 93 aa, Arabidopsis thaliana
MDLLLERGANIDAKTWGSCGWTPLHAAAKERKREAVKFLVENGAFLADDITDTRFNPPVHYCHGLEWAYEEMKKLNSESSSSSGGDTSSSSDN

SEQ ID NO: 5460 - DNA, 1377 bp, Arabidopsis thaliana
aatacttgtgagcatttgctttctttcaccattctctcttagtcttcctctctcagttctgatttttttacgaagaagttttgagtttctttttgacaactcacgactcgttgaggtgatctaccgcaaggactaaacaacaaaacatatatttttttgtcccaacaaaaaaaagtcaatcatcatgaagttctcaatctcatcactgaagcaggtacaaccaatcttgtgcttcaagaacaagctatctaaggtcaacgtcaactcttttctccatcccaaagaaaaagtcgtctttgtgatgggagctaccggatcgggtaagtctcgtctcgccatcgacctagcaactcgttttcaaggagagatcataaactccgacaagattcaactttacaagggcctagacgtcctaacaaacaaagtcacccctaaagaatgccgaggcgtgcctcaccacttgcttggagtattcgactccgaagccggaaacctaacggccacccagtatagccgccttgcgtcacaagcaatctcgaaactctcagcgaacaacaagcttcccatagtagccggtggatcaaactcttacatcgaagcacttgttaatcattcctcggggtttttattaaacaactacgattgttgtttcatttgggtcgacgtttccttacccgtacttaactcctttgtctcaaaacgtgtcgaccgcatgatggaagcaggattactcgaagaagtaagagaagtgttcaatccaaaagcgaattactccgtagggatacgacgagctatcggagtccccgagctccatgaatatttacgtaacgaatctctagtggaccgtgccacaaaaagtaaaatgcttgacgtagccgttaaaaatatcaaaaagaacactgagattttagcttgtcgacagttaaaaaagattcaacggcttcacaagaagtggaagatgtctatgcatcgtgttgacgccactgaggtgttcttgaaacgcaacgtagaagaacaagacgaggcttgggagaatcttgtagcgagaccaagcgagagaatcgtcgataagttttataataataataaccaactgaaaaatgatgatgttgagcactgtttggcggcatcttacggcggaggaagtggaagtagagcccacaatatgatatgaaaagttttgtcattgatcatgtgaagctttttggagtgtgagattaaagatgagtctccaagatttcgtatgtgtggtggtgattccacggaggttttttcaacgtacaggtgtgacatttaccccgagagaaaaaaacaaaaaagttttttctttttaagtgtttgtatagaagaagatattcggttaatattaattgtttg

SEQ ID NO: 5461 - protein, 329 aa, Arabidopsis thaliana
MKFSISSLKQVQPILCFKNKLSKVNVNSFLHPKEKVVFVMGATGSGKSRLAIDLATRFQGEIINSDKIQLYKGLDVLTNKVTPKECRGVPHHLLGVFDSEAGNLTATQYSRLASQAISKLSANNKLPIVAGGSNSYIEALVNHSSGFLLNNYDCCFIWVDVSLPVLNSFVSKRVDRMMEAGLLEEVREVFNPKANYSVGIRRAIGVPELHEYLRNESLVDRATKSKMLDVAVKNIKKNTEILACRQLKKIQRLHKKWKMSMHRVDATEVFLKRNVEEQDEAWENLVARPSERIVDKFYNNNNQLKNDDVEHCLAASYGGGSGSRAHNMI

SEQ ID NO: 5462 - protein, 290 aa, Arabidopsis thaliana
MGATGSGKSRLAIDLATRFQGEIINSDKIQLYKGLDVLTNKVTPKECRGVPHHLLGVFDSEAGNLTATQYSRLASQAISKLSANNKLPIVAGGSNSYIEALVNHSSGFLLNNYDCCFIWVDVSLPVLNSFVSKRVDRMMEAGLLEEVREVFNPKANYSVGIRRAIGVPELHEYLRNESLVDRATKSKMLDVAVKNIKKNTEILACRQLKKIQRLHKKWKMSMHRVDATEVFLKRNVEEQDEAWENLVARPSERIVDKFYNNNNQLKNDDVEHCLAASYGGGSGSRAHNMI

SEQ ID NO: 5463 - DNA, 1516 bp, Arabidopsis thaliana
ctcaaattcaaaatttaacacacaaacacaaacacacacaccaaaaaaaacacagaccttaaaaaaataaaaatggttgatatggattggaagaggaagatggtatcatcagatttaccaaactcacctaagctttcttcaaagcttcacgtaactattccatcaccgttcaaaatcgtccctgtttcatctccgatctcatgttcagcacctgctctttgctctgcttacgagctttaccttcgtctccctgagctaagaaagctctggtcatctcgtgattttcctcaatggacatcagagccgattctcaaaccagctcttcaagctttggagatcagtttcagattagttttcgccgtttgttctgatactagaccgtacatcaaccaccgtgaatggaaccggaggctagattctctcatcacgaagcagatccagcttgtagcagcgatctgcgaagatgaagaagaagaaggtatatcagcggaggctccggtcggcggtggacggagttcgttgagtttgttaccgcagctagctacgtggaggagatcagaggctttggggaagaagatcttatatacgatcgataacgagatgagtcggtgtaagtacacgctcggactcggtgaacaaaacatcgccggaaaaccaaatctccggtacgatgcgatttgccgaccaaacgagatctatagcctcaaggataatccatacgcagatcatatcgataatcacgagaatcaaactctctatatcattcaccagatcctcgaatcgtggatctacgcatctggaaatcttctgaatcgaatcgtctcaagtatcgaagaagagaaattcggaaaagcttcaaacgatgtttacttgctggagaagatctggaaaattttagcggagattgaagatcttcatatgttgatggatccggaagattttttgaaattgaagaaacagttacagatcaaatcgacgggtaaaaacgatgcgttttgtttcagatctaaaggattagtggagatgatgaagatgtcgaaagatctgagacagaaagtaccggcggtcttggcggttgaggtagatccaaccggaggaccaagattacaagaggcggcgatgaagctttacgcgaggaagacagagtgcgataagattcatttgcttcaggggatgcaagcggtggaagcggcggcgaagagtttcttctttgggtataggcagttagtggcggctatgatgggaagtgcggagatgaacgcgacggcgagtcaagagtcgtgtgactcactgagtcagatatttatggagccgacgtatttcccgagccttgacgcggcaaagacgtttctgggagagttttggagtcatttgggatgattaaattttaatttctgctggtataattatttaatataaatttaaattggtggtttggtttaatttagtttgtaagatagtgaaatttttggaacatttgacgatccatatttgaatacaaattcatttttatatg

SEQ ID NO: 5464 - protein, 435 aa, Arabidopsis thaliana
MVDMDWKRKMVSSDLPNSPKLSSKLHVTIPSPFKIVPVSSPISCSAPALCSAYELYLRLPELRKLWSSRDFPQWTSEPILKPALQALEISFRLVFAVCSDTRPYINHREWNRRLDSLITKQIQLVAAICEDEEEEGISAEAPVGGGRSSLSLLPQLATWRRSEALGKKILYTIDNEMSRCKYTLGLGEQNIAGKPNLRYDAICRPNEIYSLKDNPYADHIDNHENQTLYIIHQILESWIYASGNLLNRIVSSIEEEKFGKASNDVYLLEKIWKILAEIEDLHMLMDPEDFLKLKKQLQIKSTGKNDAFCFRSKGLVEMMKMSKDLRQKVPAVLAVEVDPTGGPRLQEAAMKLYARKTECDKIHLLQGMQAVEAAAKSFFFGYRQLVAAMMGSAEMNATASQESCDSLSQIFMEPTYFPSLDAAKTFLGEFWSHLG

SEQ ID NO: 5465 - protein, 432 aa, Arabidopsis thaliana
MDWKRKMVSSDLPNSPKLSSKLHVTIPSPFKIVPVSSPISCSAPALCSAYELYLRLPELRKLWSSRDFPQWTSEPILKPALQALEISFRLVFAVCSDTRPYINHREWNRRLDSLITKQIQLVAAICEDEEEEGISAEAPVGGGRSSLSLLPQLATWRRSEALGKKILYTIDNEMSRCKYTLGLGEQNIAGKPNLRYDAICRPNEIYSLKDNPYADHIDNHENQTLYIIHQILESWIYASGNLLNRIVSSIEEEKFGKASNDVYLLEKIWKILAEIEDLHMLMDPEDFLKLKKQLQIKSTGKNDAFCFRSKGLVEMMKMSKDLRQKVPAVLAVEVDPTGGPRLQEAAMKLYARKTECDKIHLLQGMQAVEAAAKSFFFGYRQLVAAMMGSAEMNATASQESCDSLSQIFMEPTYFPSLDAAKTFLGEFWSHLG

SEQ ID NO: 5466 - protein, 426 aa, Arabidopsis thaliana
MVSSDLPNSPKLSSKLHVTIPSPFKIVPVSSPISCSAPALCSAYELYLRLPELRKLWSSRDFPQWTSEPILKPALQALEISFRLVFAVCSDTRPYINHREWNRRLDSLITKQIQLVAAICEDEEEEGISAEAPVGGGRSSLSLLPQLATWRRSEALGKKILYTIDNEMSRCKYTLGLGEQNIAGKPNLRYDAICRPNEIYSLKDNPYADHIDNHENQTLYIIHQILESWIYASGNLLNRIVSSIEEEKFGKASNDVYLLEKIWKILAEIEDLHMLMDPEDFLKLKKQLQIKSTGKNDAFCFRSKGLVEMMKMSKDLRQKVPAVLAVEVDPTGGPRLQEAAMKLYARKTECDKIHLLQGMQAVEAAAKSFFFGYRQLVAAMMGSAEMNATASQESCDSLSQIFMEPTYFPSLDAAKTFLGEFWSHLG

SEQ ID NO: 5467 - DNA, 1446 bp, Arabidopsis thaliana
atagtttttgtttttccttttgctactctacatgactctcgatcgagggaaaaaactagttctcatgtttatccaaaactctatatcacctttttgatgtttttatataagaagacttgttcatccatactctttcaataaccttgacagaaaaaaaaaataaacacaaaatttcaataaccatggagggtgttagtgcaactatgcataagttaaggccttatttgttaatgatctttttgcaatttggagcagcaggaacatatattgttattatggccactcttaaccaaggccagaaccgttacgtcgtaattgtgtatcgtaatcttgtggctgctcttgtccttgcacattttgcactcatctttgaaaggaaagtgaggccgaagatgacactatcggttttgtggaaaataatggcacttggtttcttagagccagtcttggatcagggttttggttacttggggatgaacatgacatcagcaacatatacatctgcgatcatgaacattcttccttctgtcacatttataatagcttggattttaagaatggagaaagttaacatagcggaggtacgaagcaaagcaaagatcattgggacattggtgggtcttggaggggcactagtaatgacattgtacaaaggtccgcttattcctttaccgtggtctaacccgaatatggatcaacaaaacggacatacaaataattcacaagaccataacaattgggttgttggaaccttgttgattctcctcggttgtgttgcttggtctggtttttatgttttacagtcgataacaataaagacgtaccctgccgatctttcattatcagccttaatatgcctagccggggctgtccaaagcttcgcggtagcgcttgtggtggagagacaccctagcggatgggcggttggttgggatgcaaggctttttgcacctctttatacaggaatagttagctcggggataacgtactatgttcaagggatggttatgaagacgagagggccagtttttgttactgcctttaaccctctctgcatgattcttgtagctctcattgcctcttttattcttcatgaacaaatccatttcggatgtgtaataggaggggcagtgatcgccgcgggtttgtatatggttgtttggggaaaaggaaaagactatgaagtatccggattagatatccttgaaaagaatagcctccaagaattgcctatcacaactaaaagtgaggatgacaacaaattggtttcttctataagcgacaacagcaatgtgaccattcctggtggtgcgcatagtaacacatctggaatataagtgaagaaagcatttctcgagttataaatacatatttgtattcgactaaaataaatacatatgtatttgtatgcatttggtatgaaatacatgaaattatttttatgtt

SEQ ID NO: 5468 - protein, 384 aa, Arabidopsis thaliana
MEGVSATMHKLRPYLLMIFLQFGAAGTYIVIMATLNQGQNRYVVIVYRNLVAALVLAHFALIFERKVRPKMTLSVLWKIMALGFLEPVLDQGFGYLGMNMTSATYTSAIMNILPSVTFIIAWILRMEKVNIAEVRSKAKIIGTLVGLGGALVMTLYKGPLIPLPWSNPNMDQQNGHTNNSQDHNNWVVGTLLILLGCVAWSGFYVLQSITIKTYPADLSLSALICLAGAVQSFAVALVVERHPSGWAVGWDARLFAPLYTGIVSSGITYYVQGMVMKTRGPVFVTAFNPLCMILVALIASFILHEQIHFGCVIGGAVIAAGLYMVVWGKGKDYEVSGLDILEKNSLQELPITTKSEDDNKLVSSISDNSNVTIPGGAHSNTSGI

SEQ ID NO: 5469 - protein, 377 aa, Arabidopsis thaliana
MHKLRPYLLMIFLQFGAAGTYIVIMATLNQGQNRYVVIVYRNLVAALVLAHFALIFERKVRPKMTLSVLWKIMALGFLEPVLDQGFGYLGMNMTSATYTSAIMNILPSVTFIIAWILRMEKVNIAEVRSKAKIIGTLVGLGGALVMTLYKGPLIPLPWSNPNMDQQNGHTNNSQDHNNWVVGTLLILLGCVAWSGFYVLQSITIKTYPADLSLSALICLAGAVQSFAVALVVERHPSGWAVGWDARLFAPLYTGIVSSGITYYVQGMVMKTRGPVFVTAFNPLCMILVALIASFILHEQIHFGCVIGGAVIAAGLYMVVWGKGKDYEVSGLDILEKNSLQELPITTKSEDDNKLVSSISDNSNVTIPGGAHSNTSGI

SEQ ID NO: 5470 - protein, 368 aa, Arabidopsis thaliana
MIFLQFGAAGTYIVIMATLNQGQNRYVVIVYRNLVAALVLAHFALIFERKVRPKMTLSVLWKIMALGFLEPVLDQGFGYLGMNMTSATYTSAIMNILPSVTFIIAWILRMEKVNIAEVRSKAKIIGTLVGLGGALVMTLYKGPLIPLPWSNPNMDQQNGHTNNSQDHNNWVVGTLLILLGCVAWSGFYVLQSITIKTYPADLSLSALICLAGAVQSFAVALVVERHPSGWAVGWDARLFAPLYTGIVSSGITYYVQGMVMKTRGPVFVTAFNPLCMILVALIASFILHEQIHFGCVIGGAVIAAGLYMVVWGKGKDYEVSGLDILEKNSLQELPITTKSEDDNKLVSSISDNSNVTIPGGAHSNTSGI

SEQ ID NO: 5471 - DNA, 1710 bp, Arabidopsis thaliana
tgaaccttgtagatggtatattctttgaggatattttgatttacttttacttgttcttttgagagagacttcaataaagtttaagtttatatcttttttttttctatttatatttccttgtccccatgtgatttcatttatccccttttcttggaatttacaagcttaatcaaccgagaggcatatcatcaataaggattaaacctgtgtggaaattttgttacaatctactctgtattgaaacttgtttcggtatagtttcctcgtatcaaaggttataccaccatctctctggtatcaggtttctgatcagaagcagcttaaagagcatagtggtgttgcagtttagatggcagtatcagctgattaccaagttaagtttcctgaaagtggtgatctctactctatactagcagctgaagggattgagtttcttttgtcgcatagtggagaggtgccgttggaatatattcatggtaagacgatttgtctcttcttctctgcaatctggtgcaggccctgcaaggacttcactccagagctgataaaactctacgaaaatcttcagaaccgaggagaagaactcgagatcatctttgtctcatttgatcatgatatgacttcattctatgaacatttctggtgcatgccatggcttgcagttcccttcaatttaagcctactcaacaaattaagggacaagtacggaatttctcgtatcccgtcactggttcctctatattcagatgaaatctcagtcgctgaagatgtaattggtctaattgaagactatggttctgaagcctttcctttcactaaaaagcgaaaagaagaactcaaagccatcgatgactccaaacgccttggaggacagttggagaaactccttactcacgagtcccgaaattacgttgttgccagaaatggaagcaaggtgctagtttctaaacttgtgggaaagaccatagggttgtactttggtgcacactggtgtccgcctttccgatctttcacttctcaactcgtagatgtgtacaatgagctggcgactacagataaaggctcctttgaagtcatcttaatttcaacagacagagactcaagagagtttaacatcaacatgaccaacatgccatggcttgcaataccttatgaggacagaacaagacaagatctttgtagaatcttcaacgtcaaactcatacctgcattggtcatcataggacccgaagagaaaacagtgaccacaaacgcgagagagatggtatcattgtatggatcaaggagttttccgttcacggaatcaaggattgttgagttaaaagcttgtttgaagaaggaaggtgattcacttccaaggaaagtgaaagataacaagcatgaacacgagctaaaactggatatggcgaaagcttatgtgtgtgatttctgtaagaagcaaggcaggttttgggcgttttcttgcaatgcttgtgattatgatcttcatcctacatgtgtggaagaagaagaagcattattggtttagcaaaagagacggtcgtcgtgatttgtctgaaagattttgtaatattagtagacaaagaatcgtgatatgtaatgttgtcatgtaaaactcaaagttgaggaattaggatcaacattgtaattatatcttctgtttgtacaattaacatgcttatttcattaataaaattatattctgttttt

SEQ ID NO: 5472 - protein, 392 aa, Arabidopsis thaliana
MAVSADYQVKFPESGDLYSILAAEGIEFLLSHSGEVPLEYIHGKTICLFFSAIWCRPCKDFTPELIKLYENLQNRGEELEIIFVSFDHDMTSFYEHFWCMPWLAVPFNLSLLNKLRDKYGISRIPSLVPLYSDEISVAEDVIGLIEDYGSEAFPFTKKRKEELKAIDDSKRLGGQLEKLLTHESRNYVVARNGSKVLVSKLVGKTIGLYFGAHWCPPFRSFTSQLVDVYNELATTDKGSFEVILISTDRDSREFNINMTNMPWLAIPYEDRTRQDLCRIFNVKLIPALVIIGPEEKTVTTNAREMVSLYGSRSFPFTESRIVELKACLKKEGDSLPRKVKDNKHEHELKLDMAKAYVCDFCKKQGRFWAFSCNACDYDLHPTCVEEEEALLV

SEQ ID NO: 5473 - protein, 303 aa, Arabidopsis thaliana
MTSFYEHFWCMPWLAVPFNLSLLNKLRDKYGISRIPSLVPLYSDEISVAEDVIGLIEDYGSEAFPFTKKRKEELKAIDDSKRLGGQLEKLLTHESRNYVVARNGSKVLVSKLVGKTIGLYFGAHWCPPFRSFTSQLVDVYNELATTDKGSFEVILISTDRDSREFNINMTNMPWLAIPYEDRTRQDLCRIFNVKLIPALVIIGPEEKTVTTNAREMVSLYGSRSFPFTESRIVELKACLKKEGDSLPRKVKDNKHEHELKLDMAKAYVCDFCKKQGRFWAFSCNACDYDLHPTCVEEEEALLV

SEQ ID NO: 5474 - protein, 293 aa, Arabidopsis thaliana
MPWLAVPFNLSLLNKLRDKYGISRIPSLVPLYSDEISVAEDVIGLIEDYGSEAFPFTKKRKEELKAIDDSKRLGGQLEKLLTHESRNYVVARNGSKVLVSKLVGKTIGLYFGAHWCPPFRSFTSQLVDVYNELATTDKGSFEVILISTDRDSREFNINMTNMPWLAIPYEDRTRQDLCRIFNVKLIPALVIIGPEEKTVTTNAREMVSLYGSRSFPFTESRIVELKACLKKEGDSLPRKVKDNKHEHELKLDMAKAYVCDFCKKQGRFWAFSCNACDYDLHPTCVEEEEALLV

SEQ ID NO: 5475 - DNA, 1895 bp, Arabidopsis thaliana
gaatctcccatctgttgattctgaggtcagtttaaaatctgaatacaaggattcatcttcactggcaaagatccagggtcagctggagaatttcccaacttcttgaaccaaccaagaactcggtgttcggctgtggggtcatcatgggccacaactacgctaatccattcatcttcagctcctatgttaaatgctactacccatgtctctcgttcttatgttgaagctgattcgaatgcaaatcctcatgctgttcaaagtcaagggaacttgccttcttgttgtccgtcttccaaggtcagcaacatactacatcccaataaggatgccactgcgtctgagatgccagcttcaactaatgatccagaagtaagagtcaaagagacagatacgtccaagcagcaacagatcaccacaggacttgaagctccagtgggatcttccatttatgggagcgacggacaagcgaatcgtcgtctgcctgaggagttgcataccagtgttagctcacagccacaaaaatcagataagcatgaaaaggttgcaagtagcaaagggccatcagcgcctcgtaaaagaaattatgatccagacttgttctttaaagtcaatgggaagctgtatcagaggcttggcaagataggaagtggaggaagcagtgaagtccacaaggttatttcttcagattgtaccatatatgcgctaaaaaagatcaagctcaagggtcgtgactatgctacagcatatggattttgccaggaaattggatatctaaaaaaactgaaagggaaaaccaacatcattcagcttatagactatgaggtcacggataagactttactccaggaggttttgaatggcacaatgagtaacaaagatggaagagttaaggaagatggatttatatatatggtactagaatatggagaaatcgatctggctcacatgttatcccaaaaatggagggaaatcgaaggatctgaccggacaattgatgaaaattggcttcggttctactggcagcaaatacttcaagctgtgaacaccatacatgaggagcgtattgtgcactctgatttaaaacctgcaaatttccttcttgttcgaggctttctaaaacttattgattttggtatcgctaaggccatcaatagcgacactacaaatattcaacgagattcacaggtggggactttgagttacatgtcaccagaagcattcatgtgtaacgaaagcgacgagaatgggaacactataaaatgtggaagaccatcagatatttggtcacttggttgcatactataccaaatggtatatggaagaacaccttttgcagattataagaccttctgggcaaagttcaaagtcataactgatccaaaccacgagattacttacaatcaactctcaaacccgtggcttatcgacctaatgaagaaatgtctagcttgggaccgtaaccaaagatggagaatccctgagcttctccaacatcctttccttgcgccacccatcccacacgagcctcaagtgaaaaccattaaattgttcagtctcatagctgaatcttgtggtagtgatgacgataaagcaaattccatgatttctcagcttgagcaactgctttcaaatcctgctcctcgtccaagaaatgatgtgttagattcaagagatcaaaatcagcaacttctctcgagtttcagaactttgtattcaactccaggatcggttacaaggtcttgaaggagaaaattagtaagcagtgctgatatgattctacggcttttggatcttgtaaattggtatgttaattgttagatttggaaaaacgacgtttgcttataatgtcttgtttgatttcttgtattggaatgtatcattttgggtgctcgtct

SEQ ID NO: 5476 - protein, 519 aa, Arabidopsis thaliana
MLNATTHVSRSYVEADSNANPHAVQSQGNLPSCCPSSKVSNILHPNKDATASEMPASTNDPEVRVKETDTSKQQQITTGLEAPVGSSIYGSDGQANRRLPEELHTSVSSQPQKSDKHEKVASSKGPSAPRKRNYDPDLFFKVNGKLYQRLGKIGSGGSSEVHKVISSDCTIYALKKIKLKGRDYATAYGFCQEIGYLKKLKGKTNIIQLIDYEVTDKTLLQEVLNGTMSNKDGRVKEDGFIYMVLEYGEIDLAHMLSQKWREIEGSDRTIDENWLRFYWQQILQAVNTIHEERIVHSDLKPANFLLVRGFLKLIDFGIAKAINSDTTNIQRDSQVGTLSYMSPEAFMCNESDENGNTIKCGRPSDIWSLGCILYQMVYGRTPFADYKTFWAKFKVITDPNHEITYNQLSNPWLIDLMKKCLAWDRNQRWRIPELLQHPFLAPPIPHEPQVKTIKLFSLIAESCGSDDDKANSMISQLEQLLSNPAPRPRNDVLDSRDQNQQLLSSFRTLYSTPGSVTRS

SEQ ID NO: 5477 - protein, 466 aa, Arabidopsis thaliana
MPASTNDPEVRVKETDTSKQQQITTGLEAPVGSSIYGSDGQANRRLPEELHTSVSSQPQKSDKHEKVASSKGPSAPRKRNYDPDLFFKVNGKLYQRLGKIGSGGSSEVHKVISSDCTIYALKKIKLKGRDYATAYGFCQEIGYLKKLKGKTNIIQLIDYEVTDKTLLQEVLNGTMSNKDGRVKEDGFIYMVLEYGEIDLAHMLSQKWREIEGSDRTIDENWLRFYWQQILQAVNTIHEERIVHSDLKPANFLLVRGFLKLIDFGIAKAINSDTTNIQRDSQVGTLSYMSPEAFMCNESDENGNTIKCGRPSDIWSLGCILYQMVYGRTPFADYKTFWAKFKVITDPNHEITYNQLSNPWLIDLMKKCLAWDRNQRWRIPELLQHPFLAPPIPHEPQVKTIKLFSLIAESCGSDDDKANSMISQLEQLLSNPAPRPRNDVLDSRDQNQQLLSSFRTLYSTPGSVTRS

SEQ ID NO: 5478 - protein, 292 aa, Arabidopsis thaliana
MSNKDGRVKEDGFIYMVLEYGEIDLAHMLSQKWREIEGSDRTIDENWLRFYWQQILQAVNTIHEERIVHSDLKPANFLLVRGFLKLIDFGIAKAINSDTTNIQRDSQVGTLSYMSPEAFMCNESDENGNTIKCGRPSDIWSLGCILYQMVYGRTPFADYKTFWAKFKVITDPNHEITYNQLSNPWLIDLMKKCLAWDRNQRWRIPELLQHPFLAPPIPHEPQVKTIKLFSLIAESCGSDDDKANSMISQLEQLLSNPAPRPRNDVLDSRDQNQQLLSSFRTLYSTPGSVTRS

SEQ ID NO: 5479 - DNA, 1414 bp, Arabidopsis thaliana
atttgctccgtttctctctcaaaaactacacacccgtaccacaccaccaccctcctcgtttcctcagagatcccctctctaacttctaaggatatagaaaatggcagatggtgaagacattcagcctctcgtctgtgacaatggaaccggaatggttaaggctggatttgctggagatgatgcaccaagagctgtattccctagcatcgttggtcgtcctcgacacactggtgtcatggttggtatgggacaaaaagatgcttacgttggtgatgaggctcagtctaagagaggtattttgacattgaaatatcctattgagcatggtattgttagcaactgggatgatatggagaagatttggcatcacactttctacaatgagctccgtgttgcacctgaagaacaccctgttcttctcactgaggctcctctcaaccccaaggccaatcgtgagaaaatgactcagattatgtttgaaactttcaacactcctgccatgtatgtcgctatccaagctgttctttccctctacgctagtggtcgtactactggtattgtgttggactctggagatggtgtgagtcacactgttccaatttatgaaggatatgctcttccacatgctattctgcgtttggaccttgcaggccgtgaccttactgattacctcatgaagatcttaaccgagcgtggttactcattcactacctcagcagagcgtgaaatcgtaagggatgtgaaagagaaacttgcttacatagcacttgactacgagcaagagatggaaacagcaaacacaagctcatccgttgagaagagctatgagttgcctgatggacaggtgatcaccattggaggagagagattccgctgcccggaggttctgttccaaccgtctttggtgggaatggaagctgctggtattcacgagaccacttacaattccatcatgaagtgtgatgtggatatcaggaaggatctgtatggaaacattgtgctcagtggtggaaccaccatgttccctggaattgctgataggatgagcaaagagatcactgctttggctccaagcagcatgaagattaaggtggttgctccaccagagaggaagtacagtgtctggattggaggctccattctagcatcactcagtaccttccaacagatgtggatagcaaaggccgagtatgatgagtcagggccatcaatagtccacaggaagtgcttctaagattaagctcaaatcaaagtgatgaatgattgttctgtattggtaaagccttttgttcatcgactttgttgcaaaatattcttttgttttctatgtttcttcaccactacattacatttctttcttgttgttatcctcttttggtgtttctgctattaatcgaaaaagaaattttctttt

SEQ ID NO: 5480 - protein, 377 aa, Arabidopsis thaliana
MADGEDIQPLVCDNGTGMVKAGFAGDDAPRAVFPSIVGRPRHTGVMVGMGQKDAYVGDEAQSKRGILTLKYPIEHGIVSNWDDMEKIWHHTFYNELRVAPEEHPVLLTEAPLNPKANREKMTQIMFETFNTPAMYVAIQAVLSLYASGRTTGIVLDSGDGVSHTVPIYEGYALPHAILRLDLAGRDLTDYLMKILTERGYSFTTSAEREIVRDVKEKLAYIALDYEQEMETANTSSSVEKSYELPDGQVITIGGERFRCPEVLFQPSLVGMEAAGIHETTYNSIMKCDVDIRKDLYGNIVLSGGTTMFPGIADRMSKEITALAPSSMKIKVVAPPERKYSVWIGGSILASLSTFQQMWIAKAEYDESGPSIVHRKCF

SEQ ID NO: 5481 - protein, 360 aa, Arabidopsis thaliana
MVKAGFAGDDAPRAVFPSIVGRPRHTGVMVGMGQKDAYVGDEAQSKRGILTLKYPIEHGIVSNWDDMEKIWHHTFYNELRVAPEEHPVLLTEAPLNPKANREKMTQIMFETFNTPAMYVAIQAVLSLYASGRTTGIVLDSGDGVSHTVPIYEGYALPHAILRLDLAGRDLTDYLMKILTERGYSFTTSAEREIVRDVKEKLAYIALDYEQEMETANTSSSVEKSYELPDGQVITIGGERFRCPEVLFQPSLVGMEAAGIHETTYNSIMKCDVDIRKDLYGNIVLSGGTTMFPGIADRMSKEITALAPSSMKIKVVAPPERKYSVWIGGSILASLSTFQQMWIAKAEYDESGPSIVHRKCF

SEQ ID NO: 5482 - protein, 332 aa, Arabidopsis thaliana
MVGMGQKDAYVGDEAQSKRGILTLKYPIEHGIVSNWDDMEKIWHHTFYNELRVAPEEHPVLLTEAPLNPKANREKMTQIMFETFNTPAMYVAIQAVLSLYASGRTTGIVLDSGDGVSHTVPIYEGYALPHAILRLDLAGRDLTDYLMKILTERGYSFTTSAEREIVRDVKEKLAYIALDYEQEMETANTSSSVEKSYELPDGQVITIGGERFRCPEVLFQPSLVGMEAAGIHETTYNSIMKCDVDIRKDLYGNIVLSGGTTMFPGIADRMSKEITALAPSSMKIKVVAPPERKYSVWIGGSILASLSTFQQMWIAKAEYDESGPSIVHRKCF

SEQ ID NO: 5483 - DNA, 1527 bp, Arabidopsis thaliana
atctctatgtccgaaccttcacagaataccttgaaccctaataacaatggcgacgctgttgaaactcgacatagccacgactttccttgctttcatcgttccccgagctaatacctccttgaaccatcggttcgcttctgctaggctcagtacagccacagtttccctcagaacgaagtcgtcatcgttctattccgcggcgctttactctgacagccgtcggagattccactccgccgttgcctctgattcctcgctcgccgttgtagatgatgaagatatcttcgatgttgccagtgagattttgcccgacaatcgaattccggccactataatcaccgggttcctgggctctggtaagacaacattgctaaaccatatattgacgggagatcatgggaagcgcatagccgtgattgagaacgagtttggtgaagtcgacattgatggatcacttgtggcagctcaaactgcgggagcggaggatataatgatgcttaacaatggctgtctgtgttgtactgttaggggtgatcttgtgaggatgatttctgaaatggtccagaccaagaaaggaaggttcgaccatatcgttattgagacgacaggattggctaaccctgctccgattattcaaactttctatgctgaggatgaaattttcaatgatgtcaagctggatggggttgtcactctggttgatgctaaacatgctcgtttgcatctagatgaggtcaaacctgaaggctatgtcaatgaggcggttgaacaaatagcttacgcggatcgtatcattgttaacaagactgatcttgttggtgagccagaactagcttcagtgatgcagcggataaagaccataaacagcatggctcacatgaagcggacaaagtatgggaaggttgacttggattatgttcttggaattggagggtttgatctagaaagaattgaaagctctgtgaatgaagaagagaaagaagatcgcgagggtcatgatgatcatcaccatggtcatgactgccatgatcaccacaatgagcatgagcatgagcatgaacacgagcatcaccattctcatgatcacacccatgaccctggtgttggttcagtcagtatagtttgcgaaggagacttagacctcgagaaggctaacatgtggcttggggcgctattgtaccaacgtagtgaggatatctacagaatgaaaggtatcctctccgtacaagacatggacgagagattcgtgtttcagggagttcatgaaatatttgaaggatcacctgaccggttatggagaaaagatgaaacaagaaccaacaagattgttttcatcggcaagaatttgaaccgggaggagttagagatgggtttcagagcttgcttgatttgattataggaccaaatatttaaaatcattccattttgtaatcaactggtcaatagatttttgaacaagaaatatcgtctaaagcttgacactaactacaagagcctgaatcaagaacatattaaagccttcaccgt

SEQ ID NO: 5484 - protein, 448 aa, Arabidopsis thaliana
MATLLKLDIATTFLAFIVPRANTSLNHRFASARLSTATVSLRTKSSSFYSAALYSDSRRRFHSAVASDSSLAVVDDEDIFDVASEILPDNRIPATIITGFLGSGKTTLLNHILTGDHGKRIAVIENEFGEVDIDGSLVAAQTAGAEDIMMLNNGCLCCTVRGDLVRMISEMVQTKKGRFDHIVIETTGLANPAPIIQTFYAEDEIFNDVKLDGVVTLVDAKHARLHLDEVKPEGYVNEAVEQIAYADRIIVNKTDLVGEPELASVMQRIKTINSMAHMKRTKYGKVDLDYVLGIGGFDLERIESSVNEEEKEDREGHDDHHHGHDCHDHHNEHEHEHEHEHHHSHDHTHDPGVGSVSIVCEGDLDLEKANMWLGALLYQRSEDIYRMKGILSVQDMDERFVFQGVHEIFEGSPDRLWRKDETRTNKIVFIGKNLNREELEMGFRACLI

SEQ ID NO: 5485 - protein, 300 aa, Arabidopsis thaliana
MMLNNGCLCCTVRGDLVRMISEMVQTKKGRFDHIVIETTGLANPAPIIQTFYAEDEIFNDVKLDGVVTLVDAKHARLHLDEVKPEGYVNEAVEQIAYADRIIVNKTDLVGEPELASVMQRIKTINSMAHMKRTKYGKVDLDYVLGIGGFDLERIESSVNEEEKEDREGHDDHHHGHDCHDHHNEHEHEHEHEHHHSHDHTHDPGVGSVSIVCEGDLDLEKANMWLGALLYQRSEDIYRMKGILSVQDMDERFVFQGVHEIFEGSPDRLWRKDETRTNKIVFIGKNLNREELEMGFRACLI

SEQ ID NO: 5486 - protein, 299 aa, Arabidopsis thaliana
MLNNGCLCCTVRGDLVRMISEMVQTKKGRFDHIVIETTGLANPAPIIQTFYAEDEIFNDVKLDGVVTLVDAKHARLHLDEVKPEGYVNEAVEQIAYADRIIVNKTDLVGEPELASVMQRIKTINSMAHMKRTKYGKVDLDYVLGIGGFDLERIESSVNEEEKEDREGHDDHHHGHDCHDHHNEHEHEHEHEHHHSHDHTHDPGVGSVSIVCEGDLDLEKANMWLGALLYQRSEDIYRMKGILSVQDMDERFVFQGVHEIFEGSPDRLWRKDETRTNKIVFIGKNLNREELEMGFRACLI

SEQ ID NO: 5487 - DNA, 1401 bp, Arabidopsis thaliana
acaatctatcgagctaaaacactgaagcagacattagcgttgagaaaaaaaaaaaaagtaagaacgagagagagaaagccatgtctgcgaaaacaatcctatcatcagtagttttggtggttctcgtcgccgcatcagcagcggctaatatcggattcgatgagtcaaacccgatccgaatggtctccgatggtctccgggaggtagaagaatctgtttcccagatcttaggtcaatctcgtcacgttctctctttcgctcgcttcactcaccgatatggtaaaaagtatcagaacgtggaggagatgaagcttcgattctcgattttcaaggagaatcttgatttgatcagatccaccaacaagaaaggcttatcttacaaactcggtgttaatcaatttgctgatttgacatggcaagagtttcaaaggaccaagcttggtgctgctcagaactgctctgccactttaaagggcagccacaaggtcacagaagcagctcttcctgaaacaaaagactggagagaagatggtatcgttagtccggtcaaagatcagggaggttgtggatcttgctggacattcagcacaactggagctcttgaggcagcttaccatcaggcatttggaaaaggaatatctctctctgagcaacagcttgtggattgtgctggagctttcaataactatggttgcaatggtggccttccttctcaagcctttgaatacataaaatccaacggtggcctcgacacagagaaagcttatccttataccggtaaagatgaaacctgcaaattttcagctgaaaacgttggtgtacaagtcctcaactcagtcaacattactctgggtgctgaagatgaactgaagcatgcggttggattggtacggccagtaagcatagcatttgaggttatacactcgttccggctttacaagagtggagtttacactgatagtcactgtggaagtactccaatggatgtgaaccacgcggttttggccgttggttatggagttgaagacggtgtaccatattggcttattaagaactcatggggagcggattggggcgacaaaggttacttcaagatggagatggggaagaacatgtgtggtattgctacatgtgcatcataccccgttgtggcttgagatgatcagcgaatgtggttggtcaattatcaaattacgaaatgttcacgtatttattggattaagacattacgtaaaagttgggacttgggaatgcatatggtttatgcttgttgtaacataaaaaggtctgttaatatgtacaaaataaagccaaaactatagacgacaaatttataatattttcatgttaaatttatgaacataaattgatttagatcaaagtagtttcgttcttgatccg

SEQ ID NO: 5488 - protein, 358 aa, Arabidopsis thaliana
MSAKTILSSVVLVVLVAASAAANIGFDESNPIRMVSDGLREVEESVSQILGQSRHVLSFARFTHRYGKKYQNVEEMKLRFSIFKENLDLIRSTNKKGLSYKLGVNQFADLTWQEFQRTKLGAAQNCSATLKGSHKVTEAALPETKDWREDGIVSPVKDQGGCGSCWTFSTTGALEAAYHQAFGKGISLSEQQLVDCAGAFNNYGCNGGLPSQAFEYIKSNGGLDTEKAYPYTGKDETCKFSAENVGVQVLNSVNITLGAEDELKHAVGLVRPVSIAFEVIHSFRLYKSGVYTDSHCGSTPMDVNHAVLAVGYGVEDGVPYWLIKNSWGADWGDKGYFKMEMGKNMCGIATCASYPVVA

SEQ ID NO: 5489 - protein, 325 aa, Arabidopsis thaliana
MVSDGLREVEESVSQILGQSRHVLSFARFTHRYGKKYQNVEEMKLRFSIFKENLDLIRSTNKKGLSYKLGVNQFADLTWQEFQRTKLGAAQNCSATLKGSHKVTEAALPETKDWREDGIVSPVKDQGGCGSCWTFSTTGALEAAYHQAFGKGISLSEQQLVDCAGAFNNYGCNGGLPSQAFEYIKSNGGLDTEKAYPYTGKDETCKFSAENVGVQVLNSVNITLGAEDELKHAVGLVRPVSIAFEVIHSFRLYKSGVYTDSHCGSTPMDVNHAVLAVGYGVEDGVPYWLIKNSWGADWGDKGYFKMEMGKNMCGIATCASYPVVA

SEQ ID NO: 5490 - protein, 283 aa, Arabidopsis thaliana
MKLRFSIFKENLDLIRSTNKKGLSYKLGVNQFADLTWQEFQRTKLGAAQNCSATLKGSHKVTEAALPETKDWREDGIVSPVKDQGGCGSCWTFSTTGALEAAYHQAFGKGISLSEQQLVDCAGAFNNYGCNGGLPSQAFEYIKSNGGLDTEKAYPYTGKDETCKFSAENVGVQVLNSVNITLGAEDELKHAVGLVRPVSIAFEVIHSFRLYKSGVYTDSHCGSTPMDVNHAVLAVGYGVEDGVPYWLIKNSWGADWGDKGYFKMEMGKNMCGIATCASYPVVA

SEQ ID NO: 5491 - DNA, 1517 bp, Arabidopsis thaliana
gaatctaataaagttgggattttttttttggttttaaaaagaaagttgggatttttgaagcgatcttgtttctctaccatggatgctgctatctttacttccgtatacgtttgcaatataccaaagacgaagaaggctttcttcaacccgaatccgcctgctctatcttcgtcttcttgttggctctgcaattcgcaagccaagcaaatcataaaactgagaatcagggaaggctcgaatcaggggcttcttcgtgtacatgctctgtttaacaacgaggaggcatcaagtgaaagtgaagataagaatgggtttggtttgctacctgcggatattttctctttgcctcaggagaagtttggaagtaatgtaagtggtgaaaaggatagtgaaaatataattgatgtagagacatctcttgcggttcctcatggtggaggaactcgagctgggctctttagaactccgatttctggtggtgttcaaagcgcaacctctgctcacggtttacctcgacctgctttagctgttaggaacttgatggagcaggccaggtttgctcatctatgcactgtgatgtctaaaatgcaccatcgtagagaagggtacccatttggatcgttggtagattttgcacctgatccgatggggcacccaatattttcattttcaccgttggctattcacactcggaatatcttagctgaacctagatgcaccctcgttgttcagataccaggatggagttgcttatcgaatgcaagagtaacattattcggcgatgtctacccattgccagaagagcagcaagaatgggcccataagcagtatatgttgaagcatcaccaaggaccttcccaacaatggggaaactttcactattttagaatgcagaacataagtgatatatatttcattggaggttttggcactgtcgcgtggatcaatgtcaatgagtacgagactcttcagccagataagatagctgttgatggaggtgagcaaaatctgaaggaacttaatgcaatcttctcaaagccacttagagagttattgtctagtgaagccgagctagacgatgctgctatcatttctatagatagcaaagggattgatataagggttcgtcaaggtgctcagtttaagatacaaaggctagcctttgaggaaagtcatggtgttgagactttagaagaagccaaatctgcactgtggaaagtgatagagaagggcaagttgcacaatttgcagaaatgacccaaacgtttcatggatttgtggaaatgacacaaagctttgatgaagagagcaccatgcaaaatctcaatttagctttctcgttgattaaatggaatatagactagtagactgtgataagaagtatgtaatgagataatggaaaaaatgtattttcatcacgagaagaaaatgcagttattgaagtgtagggctagaaacaaaggctctcaaaaatatgggggttggtttcaaagtttcgaaaagttttgtgatttgcg

SEQ ID NO: 5492 - protein, 418 aa, Arabidopsis thaliana
ESNKVGIFFLVLKRKLGFLKRSCFSTMDAAIFTSVYVCNIPKTKKAFFNPNPPALSSSSCWLCNSQAKQIIKLRIREGSNQGLLRVHALFNNEEASSESEDKNGFGLLPADIFSLPQEKFGSNVSGEKDSENIIDVETSLAVPHGGGTRAGLFRTPISGGVQSATSAHGLPRPALAVRNLMEQARFAHLCTVMSKMHHRREGYPFGSLVDFAPDPMGHPIFSFSPLAIHTRNILAEPRCTLVVQIPGWSCLSNARVTLFGDVYPLPEEQQEWAHKQYMLKHHQGPSQQWGNFHYFRMQNISDIYFIGGFGTVAWINVNEYETLQPDKIAVDGGEQNLKELNAIFSKPLRELLSSEAELDDAAIISIDSKGIDIRVRQGAQFKIQRLAFEESHGVETLEEAKSALWKVIEKGKLHNLQK

SEQ ID NO: 5493 - protein, 392 aa, Arabidopsis thaliana
MDAAIFTSVYVCNIPKTKKAFFNPNPPALSSSSCWLCNSQAKQIIKLRIREGSNQGLLRVHALFNNEEASSESEDKNGFGLLPADIFSLPQEKFGSNVSGEKDSENIIDVETSLAVPHGGGTRAGLFRTPISGGVQSATSAHGLPRPALAVRNLMEQARFAHLCTVMSKMHHRREGYPFGSLVDFAPDPMGHPIFSFSPLAIHTRNILAEPRCTLVVQIPGWSCLSNARVTLFGDVYPLPEEQQEWAHKQYMLKHHQGPSQQWGNFHYFRMQNISDIYFIGGFGTVAWINVNEYETLQPDKIAVDGGEQNLKELNAIFSKPLRELLSSEAELDDAAIISIDSKGIDIRVRQGAQFKIQRLAFEESHGVETLEEAKSALWKVIEKGKLHNLQK

SEQ ID NO: 5494 - protein, 238 aa, Arabidopsis thaliana
MEQARFAHLCTVMSKMHHRREGYPFGSLVDFAPDPMGHPIFSFSPLAIHTRNILAEPRCTLVVQIPGWSCLSNARVTLFGDVYPLPEEQQEWAHKQYMLKHHQGPSQQWGNFHYFRMQNISDIYFIGGFGTVAWINVNEYETLQPDKIAVDGGEQNLKELNAIFSKPLRELLSSEAELDDAAIISIDSKGIDIRVRQGAQFKIQRLAFEESHGVETLEEAKSALWKVIEKGKLHNLQK

SEQ ID NO: 5495 - DNA, 1429 bp, Arabidopsis thaliana
atggacgctataaggaagcagcttgatgtgctcatgggagctaaccgaaacggcgacgttcaggaggtgaatcgcaaatactacgaccgtgatgtgtgtcgtctttacttgtctggtctctgccctcacgatctcttccaattgacgaaaatggatatgggaccatgcccaaaggtgcactctttgcagcttcggaaagaataccgagaagcaagggcaaaaggtgttgataactacgacagggaattggaagatgccatagacaggcttatcgttgagtgtgataggaagattggtagggcccttaagcgtcttcaagaagaggacgccaaagctgccattgccatttctgtctctgaagtcactcagtcgcctgaaattctcgagttatcggagaaaatcaaagagaagatgaaggaagcagatatccacgatcttgaaggcaaaatggatcttaagattagagctcttgagttagtcgaagagatgaggaccaagagagctgaccaacaggcggtgttgctgttggaagccttcaacaaagatagagcatccttgccacagcccgttccagctcaaccaccatcttccgaattacctccaccggatcctcgcactcaagaaatgataaatgagaaactgaagaaggcagaagatcttggtgaacaaggaatggttgatgaagcccagaaagccctggaagaggctgaagctcttaagaagcttacagttagacgagaacctccagcagattcaacgaagtacaccgctgttgatgtgcgcatcacagaccaaaagttgcgtctatgtgacatatgtggagcattcttgagcgtctatgacagtgatcgccgtttagctgatcattttggggggaagcttcatctaggatacatgctagtccgggacaaattaacagagcttctggatgagaaggccaatatacgcaaggaaagatcaaaggaacggaacagtaaggagagagaatcaagtaaagaccgagagaaagaacaagaaactagtcgtgaacatcgaagagattatgatcgcaggagtagagatcgagataggcaccatgaccgtgatcgtgaacaagacagagactatgatcggtcacactcaagaagcagacgtaggtcacgctcacggtccaggtcaagagatagaccaagggactatgatcgccacaggcgtcacaaccgctactagatcgatcggtcttgctgtctaacagggtttacaagttacaaatggttttaggatctatcaccgaaacttttttctgtctacatgtatgttactcaagtatgttagatgagtttcaaaaaatttcacatctttttcttttaccacaaactaaagacttggaagaaacaagatgtggtttatgtttttaccacatctgagaagcgtgtatgcactatcatcg

SEQ ID NO: 5496 - protein, 402 aa, Arabidopsis thaliana
MDAIRKQLDVLMGANRNGDVQEVNRKYYDRDVCRLYLSGLCPHDLFQLTKMDMGPCPKVHSLQLRKEYREARAKGVDNYDRELEDAIDRLIVECDRKIGRALKRLQEEDAKAAIAISVSEVTQSPEILELSEKIKEKMKEADIHDLEGKMDLKIRALELVEEMRTKRADQQAVLLLEAFNKDRASLPQPVPAQPPSSELPPPDPRTQEMINEKLKKAEDLGEQGMVDEAQKALEEAEALKKLTVRREPPADSTKYTAVDVRITDQKLRLCDICGAFLSVYDSDRRLADHFGGKLHLGYMLVRDKLTELLDEKANIRKERSKERNSKERESSKDREKEQETSREHRRDYDRRSRDRDRHHDRDREQDRDYDRSHSRSRRRSRSRSRSRDRPRDYDRHRRHNRY

SEQ ID NO: 5497 - protein, 391 aa, Arabidopsis thaliana
MGANRNGDVQEVNRKYYDRDVCRLYLSGLCPHDLFQLTKMDMGPCPKVHSLQLRKEYREARAKGVDNYDRELEDAIDRLIVECDRKIGRALKRLQEEDAKAAIAISVSEVTQSPEILELSEKIKEKMKEADIHDLEGKMDLKIRALELVEEMRTKRADQQAVLLLEAFNKDRASLPQPVPAQPPSSELPPPDPRTQEMINEKLKKAEDLGEQGMVDEAQKALEEAEALKKLTVRREPPADSTKYTAVDVRITDQKLRLCDICGAFLSVYDSDRRLADHFGGKLHLGYMLVRDKLTELLDEKANIRKERSKERNSKERESSKDREKEQETSREHRRDYDRRSRDRDRHHDRDREQDRDYDRSHSRSRRRSRSRSRSRDRPRDYDRHRRHNRY

SEQ ID NO: 5498 - protein, 352 aa, Arabidopsis thaliana
MDMGPCPKVHSLQLRKEYREARAKGVDNYDRELEDAIDRLIVECDRKIGRALKRLQEEDAKAAIAISVSEVTQSPEILELSEKIKEKMKEADIHDLEGKMDLKIRALELVEEMRTKRADQQAVLLLEAFNKDRASLPQPVPAQPPSSELPPPDPRTQEMINEKLKKAEDLGEQGMVDEAQKALEEAEALKKLTVRREPPADSTKYTAVDVRITDQKLRLCDICGAFLSVYDSDRRLADHFGGKLHLGYMLVRDKLTELLDEKANIRKERSKERNSKERESSKDREKEQETSREHRRDYDRRSRDRDRHHDRDREQDRDYDRSHSRSRRRSRSRSRSRDRPRDYDRHRRHNRY

SEQ ID NO: 5499 - DNA, 2072 bp, Arabidopsis thaliana
atctctcccgctctgtctctctctctctctttcctccatctctctgtgttcttcttacagacaccgagaatggcggatcctgatctgtcttctcctttgatccaccatcaatcctccgatcaacctgaagttgttatctctatcgccgacgacgacgacgacgagtcaggactcaatcttcttccagccgttgttgaccctcgtgtttcacgaggttttgagtttgaccatcttaatccttatggctttctcagcgagtcagagcctccggttctcggtccgacgacggtggatccattccggaacaatacacctggagttagcggattgtacgaagcgattaagctcgtgatttgtcttccgattgctctgattagacttgttctctttgctgctagcttagctgttggttacttggctacaaaattggcacttgctggctggaaagataaagagaaccctatgcctctttggagatgcagaatcatgtggattactcggatctgtaccagatgtatcctcttctcttttggctatcagtggataagaaggaaagggaaacctgctcggagagagattgctccgattgttgtatcaaatcatgtttcttatattgaaccaatcttctacttctatgaattatcaccgaccattgttgcatcggagtcacatgattcacttccatttgttggaactattatcagggcaatgcaggtgatatatgtgaatagattctcacagacatcaaggaagaatgctgtgcatgaaataaagagaaaagcttcctgcgatagatttcctcgtctgctgttattccccgaaggaaccacgactaatgggaaagttcttatttccttccaactcggtgctttcatccctggttaccctattcaacctgtagtagtccggtatccccatgtacattttgatcaatcctggggaaatatctctttgttgacgctcatgtttagaatgttcactcagtttcacaatttcatggaggttgaatatcttcctgtaatctatcccagtgaaaagcaaaagcagaatgctgtgcgtctctcacagaagactagtcatgcaattgcaacatctttgaatgtcgtccaaacatcccattcttttgcggacttgatgctactcaacaaagcaactgagttaaagctggagaacccctcaaattacatggttgaaatggcaagagttgagtcgctattccatgtaagcagcttagaggcaacgcgatttttggatacatttgtttccatgattccggactcgagtggacgtgttaggctacatgactttcttcggggtcttaaactgaaaccttgccctctttctaaaaggatatttgagttcatcgatgtggagaaggtcggatcaatcactttcaaacagttcttgtttgcctcgggccacgtgttgacacagccgctttttaagcaaacatgcgagctagccttttcccattgcgatgcagatggagatggctatattacaattcaagaactcggagaagctctcaaaaacacaatcccaaacttgaacaaggacgagattcgaggaatgtaccatttgctagacgacgaccaagatcaaagaatcagccaaaatgacttgttgtcctgcttaagaagaaaccctcttctcatagccatctttgcacctgacttggccccaacataacacagagagacaaaatggctggctaagatttgtggtgcgatgattgtaaacttgtctttgtggtatattattataccttttgttttgtcttcatatttgatttcagctagtaaaaagaagggactgctatgtttttagcctatatatataccctcctccaacatggatccatccttttgagtgttggactataactgcgtgtcgttttccaccccaaaaaacgctatggtgtttgctcctctagttctgagcaaactttgctgtatttgtttttttgtcatttttggggttacattacatatgtattattccaaatctcgattgtattcagtggaaattttattttaaaaaaaaaaaaaaaaaaactcgagggggggcccggt

SEQ ID NO: 5500 - protein, 562 aa, Arabidopsis thaliana
ISPALSLSLSFLHLSVFFLQTPRMADPDLSSPLIHHQSSDQPEVVISIADDDDDESGLNLLPAVVDPRVSRGFEFDHLNPYGFLSESEPPVLGPTTVDPFRNNTPGVSGLYEAIKLVICLPIALIRLVLFAASLAVGYLATKLALAGWKDKENPMPLWRCRIMWITRICTRCILFSFGYQWIRRKGKPARREIAPIVVSNHVSYIEPIFYFYELSPTIVASESHDSLPFVGTIIRAMQVIYVNRFSQTSRKNAVHEIKRKASCDRFPRLLLFPEGTTTNGKVLISFQLGAFIPGYPIQPVVVRYPHVHFDQSWGNISLLTLMFRMFTQFHNFMEVEYLPVIYPSEKQKQNAVRLSQKTSHAIATSLNVVQTSHSFADLMLLNKATELKLENPSNYMVEMARVESLFHVSSLEATRFLDTFVSMIPDSSGRVRLHDFLRGLKLKPCPLSKRIFEFIDVEKVGSITFKQFLFASGHVLTQPLFKQTCELAFSHCDADGDGYITIQELGEALKNTIPNLNKDEIRGMYHLLDDDQDQRISQNDLLSCLRRNPLLIAIFAPDLAPT

SEQ ID NO: 5501 - protein, 539 aa, Arabidopsis thaliana
MADPDLSSPLIHHQSSDQPEVVISIADDDDDESGLNLLPAVVDPRVSRGFEFDHLNPYGFLSESEPPVLGPTTVDPFRNNTPGVSGLYEAIKLVICLPIALIRLVLFAASLAVGYLATKLALAGWKDKENPMPLWRCRIMWITRICTRCILFSFGYQWIRRKGKPARREIAPIVVSNHVSYIEPIFYFYELSPTIVASESHDSLPFVGTIIRAMQVIYVNRFSQTSRKNAVHEIKRKASCDRFPRLLLFPEGTTTNGKVLISFQLGAFIPGYPIQPVVVRYPHVHFDQSWGNISLLTLMFRMFTQFHNFMEVEYLPVIYPSEKQKQNAVRLSQKTSHAIATSLNVVQTSHSFADLMLLNKATELKLENPSNYMVEMARVESLFHVSSLEATRFLDTFVSMIPDSSGRVRLHDFLRGLKLKPCPLSKRIFEFIDVEKVGSITFKQFLFASGHVLTQPLFKQTCELAFSHCDADGDGYITIQELGEALKNTIPNLNKDEIRGMYHLLDDDQDQRISQNDLLSCLRRNPLLIAIFAPDLAPT

SEQ ID NO: 5502 - protein, 408 aa, Arabidopsis thaliana
MPLWRCRIMWITRICTRCILFSFGYQWIRRKGKPARREIAPIVVSNHVSYIEPIFYFYELSPTIVASESHDSLPFVGTIIRAMQVIYVNRFSQTSRKNAVHEIKRKASCDRFPRLLLFPEGTTTNGKVLISFQLGAFIPGYPIQPVVVRYPHVHFDQSWGNISLLTLMFRMFTQFHNFMEVEYLPVIYPSEKQKQNAVRLSQKTSHAIATSLNVVQTSHSFADLMLLNKATELKLENPSNYMVEMARVESLFHVSSLEATRFLDTFVSMIPDSSGRVRLHDFLRGLKLKPCPLSKRIFEFIDVEKVGSITFKQFLFASGHVLTQPLFKQTCELAFSHCDADGDGYITIQELGEALKNTIPNLNKDEIRGMYHLLDDDQDQRISQNDLLSCLRRNPLLIAIFAPDLAPT

SEQ ID NO: 5503 - DNA, 1499 bp, Arabidopsis thaliana
aatgccaccaactgttcttttcctgtaatttccagtttagagctttcttcttcctttccctatcctcaaccccaaacgaacgctcttcaagaattagggtttcgttttgaatcttctctgattcccaaatccaaagatatgaagagatcttcagggagaaaggattcaaatttcatagaacaattgatactttacgtcgctagtgctgcattgagtagcttggttctctacgttggtctccgtcaacttgacccgaaccgtgacgccgctaaaaagtctctcgagcacaaaagagaaatcgccaaacgtttgggtcgtcctcttattcaaaccaatcaatacgaggatgtgattgcgtgtgatgtaataaacccattacacatagatgttgaatttggttctattggaggattggagtcaattaagcaagctttgtatgagcttgtgattctaccattgaaaagacctgagctttttgcttatgggaagttactgggtcctcaaaagggtgttttgttgtatggtcctcctggaactgggaagactatgcttgctaaagcgattgcgagagagtctgaagctgtttttattaatgtaaaggtttctaatttgatgagcaagtggtttggtgatgcacagaagcttgtgtctgctgtgtttagcttggcgtataaactccaacctgctattatttttatcgatgaggtggatagctttcttggccagcgacggtcgactgataatgaagcaatgtcgaatatgaagaccgagtttatggctttatgggatggatttactacagaccagaatgcgagggtgatggttcttgctgcaactaacagaccatcagagctcgatgaagcgatattgaggcgttttcctcagtcatttgagatcgggatgcctgattgccaggagagagcgcaaatattgaaagttgttttgaaaggagagagtgttgaatcagatattaactatgatcgtatagctcgtttatgtgaggactataccggatcagatatttttgaactctgcaaaaaagcagcttacttcccaatccgagaaatcctagaggcagagaaagagggcaaacgagtttctgttcctagaccattgacacaactggacttggagaaggttcttgctacctcaaagaagacacaagttgctgcaagcgagtacactggtttaagctctcaatcttctgtctggggaagtccaagcaatgccgatgaggtccaagcagctataaacggcatctccaagctttttgtctcgcagcttagaaacattcagccagattctcaggattcatatcaacaacatccttcagaaggagattcggaatagaagcaaactcttcactagagcttcgtatagtccaaaaagagtacaacccaagaatatacactttttgtaaacctcatatttctctgaataagttggagcattgttgccgtaagatgtttttagaaaatttaattcatgtctcgttagtg

SEQ ID NO: 5504 - protein, 449 aa, Arabidopsis thaliana
NATNCSFPVISSLELSSSFPYPQPQTNALQELGFRFESSLIPKSKDMKRSSGRKDSNFIEQLILYVASAALSSLVLYVGLRQLDPNRDAAKKSLEHKREIAKRLGRPLIQTNQYEDVIACDVINPLHIDVEFGSIGGLESIKQALYELVILPLKRPELFAYGKLLGPQKGVLLYGPPGTGKTMLAKAIARESEAVFINVKVSNLMSKWFGDAQKLVSAVFSLAYKLQPAIIFIDEVDSFLGQRRSTDNEAMSNMKTEFMALWDGFTTDQNARVMVLAATNRPSELDEAILRRFPQSFEIGMPDCQERAQILKVVLKGESVESDINYDRIARLCEDYTGSDIFELCKKAAYFPIREILEAEKEGKRVSVPRPLTQLDLEKVLATSKKTQVAASEYTGLSSQSSVWGSPSNADEVQAAINGISKLFVSQLRNIQPDSQDSYQQHPSEGDSE

SEQ ID NO: 5505 - protein, 403 aa, Arabidopsis thaliana
MKRSSGRKDSNFIEQLILYVASAALSSLVLYVGLRQLDPNRDAAKKSLEHKREIAKRLGRPLIQTNQYEDVIACDVINPLHIDVEFGSIGGLESIKQALYELVILPLKRPELFAYGKLLGPQKGVLLYGPPGTGKTMLAKAIARESEAVFINVKVSNLMSKWFGDAQKLVSAVFSLAYKLQPAIIFIDEVDSFLGQRRSTDNEAMSNMKTEFMALWDGFTTDQNARVMVLAATNRPSELDEAILRRFPQSFEIGMPDCQERAQILKVVLKGESVESDINYDRIARLCEDYTGSDIFELCKKAAYFPIREILEAEKEGKRVSVPRPLTQLDLEKVLATSKKTQVAASEYTGLSSQSSVWGSPSNADEVQAAINGISKLFVSQLRNIQPDSQDSYQQHPSEGDSE

SEQ ID NO: 5506 - protein, 267 aa, Arabidopsis thaliana
MLAKAIARESEAVFINVKVSNLMSKWFGDAQKLVSAVFSLAYKLQPAIIFIDEVDSFLGQRRSTDNEAMSNMKTEFMALWDGFTTDQNARVMVLAATNRPSELDEAILRRFPQSFEIGMPDCQERAQILKVVLKGESVESDINYDRIARLCEDYTGSDIFELCKKAAYFPIREILEAEKEGKRVSVPRPLTQLDLEKVLATSKKTQVAASEYTGLSSQSSVWGSPSNADEVQAAINGISKLFVSQLRNIQPDSQDSYQQHPSEGDSE

SEQ ID NO: 5507 - DNA, 1287 bp, Arabidopsis thaliana
aactataacttaaacacacacttcatcttctctaaaaccctaaaatttaaacacaagatgggtttggttagatcattgtgcttattaataaccttccttaattgtctcatcatctcggttcatggccaagccaccgcaaggcctggtcctgtttccggcactaggattgggttttacttaactacgtgtcctagagctgagactattgtccgaaacgccgtgaatgctggtttcagttctgaccccagaatcgcacccggaatactgagaatgcatttccacgactgttttgtccaaggttgtgacggttcgatccttatatccggagctaacaccgagagaaccgccggtccgaacctcaatctccaaggatttgaagtcatagacaacgccaaaacgcagctcgaagccgcgtgtcctggagttgtctcttgtgctgatattttagcattagccgctcgtgacacagtcattctcactcaaggaacaggctggcaagtaccaacgggacgtagagatggtagagtttctttggcttcgaatgctaacaatctccctggtccccgtgactccgttgccgttcaacaacagaaattctccgccttgggactcaatactcgtgatctcgtcgtcctcgtcggaggacacacgatcggaacagcaggatgtggtgtattcaggaacaggctattcaataccaccggacaaaccgcagatccaaccatcgacccaacatttttggcgcagcttcaaacacaatgtccccaaaacggcgacggttcagtgcgcgtggatctcgacaccggaagcggaagcacttgggacacttcttactacaacaacctaagccgtgggcgtggagttctccaatccgatcaagtcctttggaccgatccagccactagacccatagtgcaacaattgatggctcctagaagcaccttcaacgttgagtttgcgaggtcaatggtcagaatgagtaatatcggtgtggttaccggagctaatggggaaatccgtagggtttgctctgcggttaattaattaaccgattagaatctgtcgtgataaactttcatgacgcaaagtacttgtttcgagtgtggttttaatctgaacaataaataaaccaatagaaaacgacatacaaagaaaaaacccaaaagtgggttgatgaaaattgtatctataaggtgttggtattcgatttcttttggttttagttaaaaaaaactgtaatgtcttcacaaaaatattataatgagtttggtcctagtttggattcct

SEQ ID NO: 5508 - protein, 347 aa, Arabidopsis thaliana
NYNLNTHFIFSKTLKFKHKMGLVRSLCLLITFLNCLIISVHGQATARPGPVSGTRIGFYLTTCPRAETIVRNAVNAGFSSDPRIAPGILRMHFHDCFVQGCDGSILISGANTERTAGPNLNLQGFEVIDNAKTQLEAACPGVVSCADILALAARDTVILTQGTGWQVPTGRRDGRVSLASNANNLPGPRDSVAVQQQKFSALGLNTRDLVVLVGGHTIGTAGCGVFRNRLFNTTGQTADPTIDPTFLAQLQTQCPQNGDGSVRVDLDTGSGSTWDTSYYNNLSRGRGVLQSDQVLWTDPATRPIVQQLMAPRSTFNVEFARSMVRMSNIGVVTGANGEIRRVCSAVN

SEQ ID NO: 5509 - protein, 328 aa, Arabidopsis thaliana
MGLVRSLCLLITFLNCLIISVHGQATARPGPVSGTRIGFYLTTCPRAETIVRNAVNAGFSSDPRIAPGILRMHFHDCFVQGCDGSILISGANTERTAGPNLNLQGFEVIDNAKTQLEAACPGVVSCADILALAARDTVILTQGTGWQVPTGRRDGRVSLASNANNLPGPRDSVAVQQQKFSALGLNTRDLVVLVGGHTIGTAGCGVFRNRLFNTTGQTADPTIDPTFLAQLQTQCPQNGDGSVRVDLDTGSGSTWDTSYYNNLSRGRGVLQSDQVLWTDPATRPIVQQLMAPRSTFNVEFARSMVRMSNIGVVTGANGEIRRVCSAVN

SEQ ID NO: 5510 - protein, 257 aa, Arabidopsis thaliana
MHFHDCFVQGCDGSILISGANTERTAGPNLNLQGFEVIDNAKTQLEAACPGVVSCADILALAARDTVILTQGTGWQVPTGRRDGRVSLASNANNLPGPRDSVAVQQQKFSALGLNTRDLVVLVGGHTIGTAGCGVFRNRLFNTTGQTADPTIDPTFLAQLQTQCPQNGDGSVRVDLDTGSGSTWDTSYYNNLSRGRGVLQSDQVLWTDPATRPIVQQLMAPRSTFNVEFARSMVRMSNIGVVTGANGEIRRVCSAVN

SEQ ID NO: 5511 - DNA, 1394 bp, Arabidopsis thaliana
acataacacaaaatcctcttctcttctttaataacttttagaaacacaaataaaagtttaattacttttaagcccaacaaaaatgggttatgctaaatcagccatgctgatcttcttactagcattggtcatcgcatcttgtgccacggccatggacatgtccgttgtttcctccaacgataaccaccacgtgaccgccggtcccggccgccgtcagggtattttcgacgctgaagccaccttgatgttcgagtcatggatggtcaaacatgggaaagtgtacgactccgttgccgagaaggaacggcgtttaactatttttgaggacaacctccgttttatcactaaccggaacgctgagaatctcagttaccggcttggtttgaatcggtttgcggatttatctctccatgaatacggagaaatttgccatggggctgatccaagacctcctaggaaccacgtcttcatgactagcagcaaccgatacaagactagtgatggtgatgttcttcctaagtccgttgactggagaaacgaaggcgcagtgactgaagtcaaagatcaaggcctttgcaggagttgttgggctttctccactgtgggagcagtggaaggcttaaacaagattgtgactggagagctagtaactttgtctgagcaagatttgatcaattgtaacaaagaaaacaatggttgcggaggaggcaaagtcgagacagcctatgagttcatcatgaacaatggtggtcttggtaccgacaacgattatccttacaaagctctcaatggagtctgcgaaggccgcctcaaggaagacaacaagaatgttatgattgatgggtatgagaatttgcctgcaaacgatgaagccgctctcatgaaagcggttgctcaccagcctgtgactgccgttgtcgattccagcagccgagagtttcagctttatgaatcgggagtgtttgacggaacttgcggaacaaacctaaaccatggtgttgttgtggtcgggtatggaaccgagaatggtcgtgactactggattgtgaaaaactcgaggggcgacacatggggggaggctggctacatgaagatggctcgcaacattgccaatccaagaggcctatgtggcatcgcaatgcgagcttcataccctctcaagaactcgttttctacggataaagtttcggttgcctaataatatgaactaaatgtatgccatggaacggatcggttaagccattatcgttattcgactttgaaggaaactaaaaaataatgtggtcgattggtttggttttgttatatattatgcatttgtatgggggtcagtcaatgtttgaactttgtataatatttctttgggtctagtgataaatattttcccttttgct

SEQ ID NO: 5512 - protein, 371 aa, Arabidopsis thaliana
MGYAKSAMLIFLLALVIASCATAMDMSVVSSNDNHHVTAGPGRRQGIFDAEATLMFESWMVKHGKVYDSVAEKERRLTIFEDNLRFITNRNAENLSYRLGLNRFADLSLHEYGEICHGADPRPPRNHVFMTSSNRYKTSDGDVLPKSVDWRNEGAVTEVKDQGLCRSCWAFSTVGAVEGLNKIVTGELVTLSEQDLINCNKENNGCGGGKVETAYEFIMNNGGLGTDNDYPYKALNGVCEGRLKEDNKNVMIDGYENLPANDEAALMKAVAHQPVTAVVDSSSREFQLYESGVFDGTCGTNLNHGVVVVGYGTENGRDYWIVKNSRGDTWGEAGYMKMARNIANPRGLCGIAMRASYPLKNSFSTDKVSVA

SEQ ID NO: 5513 - protein, 364 aa, Arabidopsis thaliana
MLIFLLALVIASCATAMDMSVVSSNDNHHVTAGPGRRQGIFDAEATLMFESWMVKHGKVYDSVAEKERRLTIFEDNLRFITNRNAENLSYRLGLNRFADLSLHEYGEICHGADPRPPRNHVFMTSSNRYKTSDGDVLPKSVDWRNEGAVTEVKDQGLCRSCWAFSTVGAVEGLNKIVTGELVTLSEQDLINCNKENNGCGGGKVETAYEFIMNNGGLGTDNDYPYKALNGVCEGRLKEDNKNVMIDGYENLPANDEAALMKAVAHQPVTAVVDSSSREFQLYESGVFDGTCGTNLNHGVVVVGYGTENGRDYWIVKNSRGDTWGEAGYMKMARNIANPRGLCGIAMRASYPLKNSFSTDKVSVA

SEQ ID NO: 5514 - protein, 348 aa, Arabidopsis thaliana
MDMSVVSSNDNHHVTAGPGRRQGIFDAEATLMFESWMVKHGKVYDSVAEKERRLTIFEDNLRFITNRNAENLSYRLGLNRFADLSLHEYGEICHGADPRPPRNHVFMTSSNRYKTSDGDVLPKSVDWRNEGAVTEVKDQGLCRSCWAFSTVGAVEGLNKIVTGELVTLSEQDLINCNKENNGCGGGKVETAYEFIMNNGGLGTDNDYPYKALNGVCEGRLKEDNKNVMIDGYENLPANDEAALMKAVAHQPVTAVVDSSSREFQLYESGVFDGTCGTNLNHGVVVVGYGTENGRDYWIVKNSRGDTWGEAGYMKMARNIANPRGLCGIAMRASYPLKNSFSTDKVSVA

SEQ ID NO: 5515 - DNA, 1520 bp, Arabidopsis thaliana
accaaaaccctaaaagctcccggagccgccaagatcagtttccatggcgcttcatctcgccagaccaaaacaaaggttacattcgaatccatctctcattcacctttttcacctcctcctcctcctcctcatcatcacctcaagacgggaacgaatctaatgaacagccctctcaatcatcgtcggattataaaatctcttcctacttcagtggtatcagaagcagtctcaaacagactcagtctcaggacgggaagagacagttcgtcagattcgatgccaaacctcagaattcgctttccggtaaccaggatatcaggaggaatctgaacgagttccgaagtagagcaacagctccgccgccgagggatatgcaggatcttttcaagcagaatgtgttatcaaaatctggagggactcgtagaatcgaaggtgtgccattaacaaacataaaggcgaacttaaggcagatgagaccacaacaagcaaccactgagagcaaatgggccaatttatctgggattcagaacattatgaagacgaacatcaatgataatatccgttcaaatgtaatcggaggagcagcagaaggattgccacattcagtggttgggaaggagttagaagaagaagatgtgacagaggaggagatgaaatcagagtttatcaagagctatgatccaatagaactgggagagaaactaagattgtataggcctgagggaaagaaagaagaaggttggttctcattacaggagctcaatcagaggcttgttaagctcagggccatggaagaggaacaattccagaaaacgagtatagtgcatccctccttcgtcaacaacttgaggtctgagtttcataagttcaccaaggctcagaaatcagatccctttcagaatacgaatatttggggagttttaagtggtaccccaaagtatatgctcgagcctccaaaagatcaactagttgaaacttatttccatccggataacatgtcatctgcggagaagatgaaaatcgagcttgcaaaggtcagagaagagttcaagatgtcagaatcggattgtggttctgcacgtgttcaagtggcgcaactgaccactaagatcaagcatctatcctcggttctacataaaaaggacaagcattcgcggaaaggacttatagcaatggtgcagagacggaagaagctgttgaagtatatgagaagaacggactgggattcttactgcctttcactgtcaaaactcggccttcgtgacaacccggattacaagttttgaaatttttgtgcaagggacatcatagaattgtgatctcagtactctctttttgttctttttcattatggcaaaagagataatgtgggtctctcttatcaatcatcttggggaggaaagttgttctactagagattatgattgcaggctgtttaggcgaaaagagaataaagctgtgggatactttcgttgacattgtctttattactttgaatgtgataataaacttacttctcc

SEQ ID NO: 5516 - protein, 427 aa, Arabidopsis thaliana
QNPKSSRSRQDQFPWRFISPDQNKGYIRIHLSFTFFTSSSSSSSSPQDGNESNEQPSQSSSDYKISSYFSGIRSSLKQTQSQDGKRQFVRFDAKPQNSLSGNQDIRRNLNEFRSRATAPPPRDMQDLFKQNVLSKSGGTRRIEGVPLTNIKANLRQMRPQQATTESKWANLSGIQNIMKTNINDNIRSNVIGGAAEGLPHSVVGKELEEEDVTEEEMKSEFIKSYDPIELGEKLRLYRPEGKKEEGWFSLQELNQRLVKLRAMEEEQFQKTSIVHPSFVNNLRSEFHKFTKAQKSDPFQNTNIWGVLSGTPKYMLEPPKDQLVETYFHPDNMSSAEKMKIELAKVREEFKMSESDCGSARVQVAQLTTKIKHLSSVLHKKDKHSRKGLIAMVQRRKKLLKYMRRTDWDSYCLSLSKLGLRDNPDYKF

SEQ ID NO: 5517 - protein, 304 aa, Arabidopsis thaliana
MQDLFKQNVLSKSGGTRRIEGVPLTNIKANLRQMRPQQATTESKWANLSGIQNIMKTNINDNIRSNVIGGAAEGLPHSVVGKELEEEDVTEEEMKSEFIKSYDPIELGEKLRLYRPEGKKEEGWFSLQELNQRLVKLRAMEEEQFQKTSIVHPSFVNNLRSEFHKFTKAQKSDPFQNTNIWGVLSGTPKYMLEPPKDQLVETYFHPDNMSSAEKMKIELAKVREEFKMSESDCGSARVQVAQLTTKIKHLSSVLHKKDKHSRKGLIAMVQRRKKLLKYMRRTDWDSYCLSLSKLGLRDNPDYKF

SEQ ID NO: 5518 - protein, 271 aa, Arabidopsis thaliana
MRPQQATTESKWANLSGIQNIMKTNINDNIRSNVIGGAAEGLPHSVVGKELEEEDVTEEEMKSEFIKSYDPIELGEKLRLYRPEGKKEEGWFSLQELNQRLVKLRAMEEEQFQKTSIVHPSFVNNLRSEFHKFTKAQKSDPFQNTNIWGVLSGTPKYMLEPPKDQLVETYFHPDNMSSAEKMKIELAKVREEFKMSESDCGSARVQVAQLTTKIKHLSSVLHKKDKHSRKGLIAMVQRRKKLLKYMRRTDWDSYCLSLSKLGLRDNPDYKF

SEQ ID NO: 5519 - DNA, 1405 bp, Arabidopsis thaliana
tggcatcaacgaagaagaagaagaaaaggacgagtagattgatttcttagacgacggagaaatgcgagtgatgagatcattgcgcggtaattccggtgctggattggttttccggccggcgaggttaaattctcttcggagcgtctttaccggttgccgtgctgtgattttgccccgctttggtggtccggaggtttttgagctccgggagaatgttccggtgccgaatctgaatccaaatgaggttcttgtcaaggcgaaagctgtctccgttaatcctcttgattgcagaatacgagctggatatggacgttctgtattccaaccgcatctacctattatagttggacgtgatgtcagtggtgaagttgcggcaattgggacttcagtaaagtcacttaaagtaggacaagaagtttttggtgcgttgcatccgacggcgttaagaggtacttatactgactatggaattctttcggaagacgaactcacggaaaagccatcatcaatttcacatgtggaagcaagtgccattccttttgcagctttgactgcttggcgtgctttgaagagtaatgcaaggataactgaaggacaaagactattagtctttggaggaggaggagcagtaggtttttctgcaatccagcttgcggtagcatctgggtgtcatgttacagcctcttgtgttggtcagactaaagacagaatacttgcagctggggccgagcaagctgttgactacacaaccgaggacattgagttggcggtaaaaggaaaatttgatgccgtgttagatactattggtgggcctgaaacggagagaataggcattaacttcttaaggaagggtggaaactatatgactcttcagggtgaggctgcatcgttgactgataaatacggttttgtggttgggcttccccttgcaacatcgctcttgatgaagaaaaagatacaatatcagtattctcatggaatagactattggtggacgtatatgagggctgatcctgaaggtctagccgagattcagcgtttagttggagctggaaagctaaaaatacctgttgaaaaaacatttccaataaccgatgttgtagcagctcatgaagccaaggagaagaaacagattccgggtaaggtggttctagagttctgaactacatatacatagtagaaataataacacctgcatagttctctagcagttgttctttctagaatttacacgcagagaaacaaatgtttcgcgtctggagttttctgtaaatgagatctatcaggcttagattcagatcaagaacttgaagtgtctgtatagactttccaaagggttcgtttttatttggattttgtctgtgttgcaaactactaagccaagtaatggaaatggtttagaaag

SEQ ID NO: 5520 - protein, 366 aa, Arabidopsis thaliana
MRVMRSLRGNSGAGLVFRPARLNSLRSVFTGCRAVILPRFGGPEVFELRENVPVPNLNPNEVLVKAKAVSVNPLDCRIRAGYGRSVFQPHLPIIVGRDVSGEVAAIGTSVKSLKVGQEVFGALHPTALRGTYTDYGILSEDELTEKPSSISHVEASAIPFAALTAWRALKSNARITEGQRLLVFGGGGAVGFSAIQLAVASGCHVTASCVGQTKDRILAAGAEQAVDYTTEDIELAVKGKFDAVLDTIGGPETERIGINFLRKGGNYMTLQGEAASLTDKYGFVVGLPLATSLLMKKKIQYQYSHGIDYWWTYMRADPEGLAEIQRLVGAGKLKIPVEKTFPITDVVAAHEAKEKKQIPGKVVLEF

SEQ ID NO: 5521 - protein, 363 aa, Arabidopsis thaliana
MRSLRGNSGAGLVFRPARLNSLRSVFTGCRAVILPRFGGPEVFELRENVPVPNLNPNEVLVKAKAVSVNPLDCRIRAGYGRSVFQPHLPIIVGRDVSGEVAAIGTSVKSLKVGQEVFGALHPTALRGTYTDYGILSEDELTEKPSSISHVEASAIPFAALTAWRALKSNARITEGQRLLVFGGGGAVGFSAIQLAVASGCHVTASCVGQTKDRILAAGAEQAVDYTTEDIELAVKGKFDAVLDTIGGPETERIGINFLRKGGNYMTLQGEAASLTDKYGFVVGLPLATSLLMKKKIQYQYSHGIDYWWTYMRADPEGLAEIQRLVGAGKLKIPVEKTFPITDVVAAHEAKEKKQIPGKVVLEF

SEQ ID NO: 5522 - DNA, 1505 bp, Arabidopsis thaliana
gaatttgcttggcttggcggtggcatggagctctggatttgtgtgtgagtgagtagatcgcgcaaagaatctgaaaatggcgtcaacggaaggccttatgcctatcacccgggcttttctcgcttcttactacgacaaatatcctttctctcctctttccgacgacgtttctcggctttcctctgacatggcatctctgattaagctattgaccgtccaatctcccccttcacaaggggaaacttccctgattgacgaagcaaaccgtcagccccctcacaaaattgatgagaatatgtggaaaaatagggagcagatggaggagatactgtttcttctgtcaccatctcgctggcctgttcagcttcgggaaccttccacatccgaagatgctgaattcgcttctattttgcggactctcaaggacagttttgataacgcattcactgctatgatttccttccagacgaagaattccgagcgcatattcagcacagtaatgacctacatgcctcaagatttccggggaacgctcatcagacagcagaaggagaggtcggagaggaacaaacaggcggaggttgatgcgttggtcagctctggagggagcatacgcgacacatatgctcttctttggaagcagcaaatggagaggaggaggcagttggctcagctaggctctgccactggtgtctacaaaaccctggtcaagtacttggtaggggttccacaggtgttgttggattttattcgacaaataaacgatgatgatgggccaatggaagaacagcgagaacgttatggaccccctctatacagtctcacaaaaatggtgatcgcaattcgggttttcctaacacttctgtgggaaagatatgataccttcaaactgagtaaagaccaaatgaatctcctgtctgaagctgctatagtctacacttctgagtttgaaagattcgtcacatttatcagcgatgtattcgccaattcccccttctttatttcagctgatacagctggcatattgtggtcaagggacaatgaggagtacaaggagataatcgttcaagctgggagaacctatgagatctcattgatggtggaatctgaaaattcgtatattgcttgggatttctctttgatgcaaggcaagataagcatggatatcggatttagcgtggagtacataaatgcttcaggggaaaagactctgatattaccttaccgtcggtatgaagctgaccagggcaacttctctacgctaatggctggaaactacaaacttgtttgggataattcatattcaactttcttcaaaaagactcttcgatataaggtggattgcatagcaccagtagtggagccggatccagagccggagccgttaaactgaaagtggaagatgaaggtggattttacagtcatgaacactcatcatttctttgtaaaacgataaaactctgaaccctttgaaatacatcaatggaacttaaatatctgctacc

SEQ ID NO: 5523 - protein, 438 aa, Arabidopsis thaliana
MASTEGLMPITRAFLASYYDKYPFSPLSDDVSRLSSDMASLIKLLTVQSPPSQGETSLIDEANRQPPHKIDENMWKNREQMEEILFLLSPSRWPVQLREPSTSEDAEFASILRTLKDSFDNAFTAMISFQTKNSERIFSTVMTYMPQDFRGTLIRQQKERSERNKQAEVDALVSSGGSIRDTYALLWKQQMERRRQLAQLGSATGVYKTLVKYLVGVPQVLLDFIRQINDDDGPMEEQRERYGPPLYSLTKMVIAIRVFLTLLWERYDTFKLSKDQMNLLSEAAIVYTSEFERFVTFISDVFANSPFFISADTAGILWSRDNEEYKEIIVQAGRTYEISLMVESENSYIAWDFSLMQGKISMDIGFSVEYINASGEKTLILPYRRYEADQGNFSTLMAGNYKLVWDNSYSTFFKKTLRYKVDCIAPVVEPDPEPEPLN

SEQ ID NO: 5524 - protein, 431 aa, Arabidopsis thaliana
MPITRAFLASYYDKYPFSPLSDDVSRLSSDMASLIKLLTVQSPPSQGETSLIDEANRQPPHKIDENMWKNREQMEEILFLLSPSRWPVQLREPSTSEDAEFASILRTLKDSFDNAFTAMISFQTKNSERIFSTVMTYMPQDFRGTLIRQQKERSERNKQAEVDALVSSGGSIRDTYALLWKQQMERRRQLAQLGSATGVYKTLVKYLVGVPQVLLDFIRQINDDDGPMEEQRERYGPPLYSLTKMVIAIRVFLTLLWERYDTFKLSKDQMNLLSEAAIVYTSEFERFVTFISDVFANSPFFISADTAGILWSRDNEEYKEIIVQAGRTYEISLMVESENSYIAWDFSLMQGKISMDIGFSVEYINASGEKTLILPYRRYEADQGNFSTLMAGNYKLVWDNSYSTFFKKTLRYKVDCIAPVVEPDPEPEPLN

SEQ ID NO: 5525 - protein, 401 aa, Arabidopsis thaliana
MASLIKLLTVQSPPSQGETSLIDEANRQPPHKIDENMWKNREQMEEILFLLSPSRWPVQLREPSTSEDAEFASILRTLKDSFDNAFTAMISFQTKNSERIFSTVMTYMPQDFRGTLIRQQKERSERNKQAEVDALVSSGGSIRDTYALLWKQQMERRRQLAQLGSATGVYKTLVKYLVGVPQVLLDFIRQINDDDGPMEEQRERYGPPLYSLTKMVIAIRVFLTLLWERYDTFKLSKDQMNLLSEAAIVYTSEFERFVTFISDVFANSPFFISADTAGILWSRDNEEYKEIIVQAGRTYEISLMVESENSYIAWDFSLMQGKISMDIGFSVEYINASGEKTLILPYRRYEADQGNFSTLMAGNYKLVWDNSYSTFFKKTLRYKVDCIAPVVEPDPEPEPLN

SEQ ID NO: 5526 - DNA, 1705 bp, Arabidopsis thaliana
ggaagaagatagagagaccaaaacaaaaaaagctttgaatatccgccatggatgttggacgatgctttctctttcttctattaccaagtttcttcttcttgccttcacaaacgcagagcaccgattcattcacatcggttctcgtatctcaaaacggactcgatttcgtcaaaaatcttctagttaacaaagctatcgcgtcgattatacctctccagattcccagaattgagaaatctatgaaaatcccgttccttggaggaatcgatgttgttgtctcgaatctcacgatatacgagcttgacgttgcgtcatcttatgttaagcttggtgagacaggtgttgtcatcgtcgcttcagggacgacttgtaatttgagtatgaattggcattattcttacagtacttggcttcctcctattgaaatatctgatcagggtattgcatctgttcaggttcaaggcatggaaatcgggctctctctaggcttgaaaagtgatgaaggaggcttaaaactttctctttcggaatgtggatgccatgtggaagacattaccattgagttggaaggaggagcatcatggttttatcaggggatggttaatgcatttaaagaccaaattgggtcaagtgtggaaagtaccattgccaagaaactcacggaaggagtatcagaccttgattcattcctacaaagccttccaaaggaaatcccagtggatgataatgctgaccttaatgtcactttcaccagtgatcctatattgagaaattcatctatcacttttgagattgatggcttgttcaccaaaggagaaacaaatcaagtcttaaaatccttcttcaaaaagtctgtatctttagttatctgccctggaaattctaaaatgctcggaatttcagttgacgaagctgtttttaactctgctgcagctttgtactataatgcagactttgtgcaatgggttgtggataaaataccagagcagtctcttttaaacactgctaggtggaggttcatcattccacaactatacaagaaatacccgaaccaggatatgaatctgaacatcagtttgtcctcacctccgcttgtaaagatatcagagcaatacgttggagctaatgttaatgcagacctagtaatcaatgttctagatgcaaaccaagtaatacctgtagcttgcatctccttgatgatccggggatctggtgctctcagagtcatgggcaataaccttggaggcagcgtaagtttagaagatttctccatgtctttgaaatggagcaacattggaaatctccatctgcatcttcttcagccaatagtgtggactgttatacaaacagtgtttgtgccatatgcaaatgaccacctagaaaagggattcccgttgcccataatgcacggattcacacttcagaatgcggaaatcatctgctcagaatctgaaatcacagtttgcagcgatgtcgcctacttggattcgtcccaacagcctcaatggctttgaagctaccacgatctacgacttggaaacctaactcgttgtagtttacaattggtggttgtaagtgtcgctactggtttggcatttggaccagactcagcgaccaaaacgaacaaagctttgtataatacttttgtacttaatgttgactaatctgtgaatgatatttctgtctgaaataaaatagtctttgt

SEQ ID NO: 5527 - protein, 488 aa, Arabidopsis thaliana
MDVGRCFLFLLLPSFFFLPSQTQSTDSFTSVLVSQNGLDFVKNLLVNKAIASIIPLQIPRIEKSMKIPFLGGIDVVVSNLTIYELDVASSYVKLGETGVVIVASGTTCNLSMNWHYSYSTWLPPIEISDQGIASVQVQGMEIGLSLGLKSDEGGLKLSLSECGCHVEDITIELEGGASWFYQGMVNAFKDQIGSSVESTIAKKLTEGVSDLDSFLQSLPKEIPVDDNADLNVTFTSDPILRNSSITFEIDGLFTKGETNQVLKSFFKKSVSLVICPGNSKMLGISVDEAVFNSAAALYYNADFVQWVVDKIPEQSLLNTARWRFIIPQLYKKYPNQDMNLNISLSSPPLVKISEQYVGANVNADLVINVLDANQVIPVACISLMIRGSGALRVMGNNLGGSVSLEDFSMSLKWSNIGNLHLHLLQPIVWTVIQTVFVPYANDHLEKGFPLPIMHGFTLQNAEIICSESEITVCSDVAYLDSSQQPQWL

SEQ ID NO: 5528 - protein, 424 aa, Arabidopsis thaliana
MKIPFLGGIDVVVSNLTIYELDVASSYVKLGETGVVIVASGTTCNLSMNWHYSYSTWLPPIEISDQGIASVQVQGMEIGLSLGLKSDEGGLKLSLSECGCHVEDITIELEGGASWFYQGMVNAFKDQIGSSVESTIAKKLTEGVSDLDSFLQSLPKEIPVDDNADLNVTFTSDPILRNSSITFEIDGLFTKGETNQVLKSFFKKSVSLVICPGNSKMLGISVDEAVFNSAAALYYNADFVQWVVDKIPEQSLLNTARWRFIIPQLYKKYPNQDMNLNISLSSPPLVKISEQYVGANVNADLVINVLDANQVIPVACISLMIRGSGALRVMGNNLGGSVSLEDFSMSLKWSNIGNLHLHLLQPIVWTVIQTVFVPYANDHLEKGFPLPIMHGFTLQNAEIICSESEITVCSDVAYLDSSQQPQWL

SEQ ID NO: 5529 - protein, 377 aa, Arabidopsis thaliana
MNWHYSYSTWLPPIEISDQGIASVQVQGMEIGLSLGLKSDEGGLKLSLSECGCHVEDITIELEGGASWFYQGMVNAFKDQIGSSVESTIAKKLTEGVSDLDSFLQSLPKEIPVDDNADLNVTFTSDPILRNSSITFEIDGLFTKGETNQVLKSFFKKSVSLVICPGNSKMLGISVDEAVFNSAAALYYNADFVQWVVDKIPEQSLLNTARWRFIIPQLYKKYPNQDMNLNISLSSPPLVKISEQYVGANVNADLVINVLDANQVIPVACISLMIRGSGALRVMGNNLGGSVSLEDFSMSLKWSNIGNLHLHLLQPIVWTVIQTVFVPYANDHLEKGFPLPIMHGFTLQNAEIICSESEITVCSDVAYLDSSQQPQWL

SEQ ID NO: 5530 - DNA, 1066 bp, Arabidopsis thaliana
atctttcaacgtctttctctcccgacggccaaaaaccccaattttgccaaatccaattttacacccagaaaccctaattttccttactttgatttgattttgtgatggacgattatacaagagagatgatggatctcaagactttggtcactcgaaccctagagaagaaaggtgtcctcgctaagatccgggctgagctccgtgcaagtgtgtttgaagcaattgaagaagaggatagagtgatagagaacaatgaaggaccgcctccagctctgttgggaagctgtaatgatcgtgcaaggaagcttcatgcttctccttcaggaaggttactatctgcgttgatttgtgaatacttggactgggcacaacttaatcacacgctcatagtttatcaacctgaaagcaatttgccaaaagattcgtggaagtctgagttacgcgactttaatagcaacaatggttttgagctcaatagaaatggagatagtggaccactccttctcgatgttcttgaagggttcttgaagtttgagagcatgacgcagggcatgggtagtagttcaaggagagattcagaaacagagtcgtcatcaagccttgagtccagaaatcctcctcgcagatcatctgcttctgatagcttacctcctcaacgaaggccggtttctgcatctcaagcatcggatagaagagccgggttgtctacatctgggtacagaaaagatgaattcaactggagacaaggtaaccaagatacacatgaagaggtaacaagagcttcagcggcgctggaaaatctacagcttgataggaaaactcggaacttaacatcgtcttggaggaatgtgagggatggaacaaatgaagaagaagggagagattgatttaggctttggataaacatttcagcttctggattagtagagtaatggtttgtgtacgtgatatatgtatgtttctcctttatttgcaactgcgttttcaattagccttttttttaacgcacgaacctctgtctccttgagaacaaaaaacatgaaacagtaaaatgttttcttttgag

SEQ ID NO: 5531 - protein, 260 aa, Arabidopsis thaliana
MDDYTREMMDLKTLVTRTLEKKGVLAKIRAELRASVFEAIEEEDRVIENNEGPPPALLGSCNDRARKLHASPSGRLLSALICEYLDWAQLNHTLIVYQPESNLPKDSWKSELRDFNSNNGFELNRNGDSGPLLLDVLEGFLKFESMTQGMGSSSRRDSETESSSSLESRNPPRRSSASDSLPPQRRPVSASQASDRRAGLSTSGYRKDEFNWRQGNQDTHEEVTRASAALENLQLDRKTRNLTSSWRNVRDGTNEEEGRD

SEQ ID NO: 5532 - protein, 253 aa, Arabidopsis thaliana
MMDLKTLVTRTLEKKGVLAKIRAELRASVFEAIEEEDRVIENNEGPPPALLGSCNDRARKLHASPSGRLLSALICEYLDWAQLNHTLIVYQPESNLPKDSWKSELRDFNSNNGFELNRNGDSGPLLLDVLEGFLKFESMTQGMGSSSRRDSETESSSSLESRNPPRRSSASDSLPPQRRPVSASQASDRRAGLSTSGYRKDEFNWRQGNQDTHEEVTRASAALENLQLDRKTRNLTSSWRNVRDGTNEEEGRD

SEQ ID NO: 5533 - protein, 252 aa, Arabidopsis thaliana
MDLKTLVTRTLEKKGVLAKIRAELRASVFEAIEEEDRVIENNEGPPPALLGSCNDRARKLHASPSGRLLSALICEYLDWAQLNHTLIVYQPESNLPKDSWKSELRDFNSNNGFELNRNGDSGPLLLDVLEGFLKFESMTQGMGSSSRRDSETESSSSLESRNPPRRSSASDSLPPQRRPVSASQASDRRAGLSTSGYRKDEFNWRQGNQDTHEEVTRASAALENLQLDRKTRNLTSSWRNVRDGTNEEEGRD

SEQ ID NO: 5534 - DNA, 740 bp, Arabidopsis thaliana
gcggtcttatcccgaaactccaagaacacagaaaaaaaaaattcttggtggcctctccaatggctttctcagctaccctgtctcagctttcttctctttcgtccatctcctcttcattaccaatttcttctagaagacttcctcatcgatctcttcctcaattcacagtcaaagcagaagcagagaaagagaaacagagcgcacaggctaagtctgatggggaagcatcaccagctgcaaccaaaacccctaaaactcttcccaagaaaccggtttactcgatgaaaaagggccaaatagttcgtgtagaaaaagagaagtacctcaacagcatcaattacttatcagttggacatcctcctttctacaaaggacttgattacatatacgaagatcgcggcgaggtcttggaccttcgtgtctttgagacaggagagtatgcacttgttggatgggttggtatccccaccgcaccagcttggctcccaacagatatgctcatcaagtgtgagaaacttgtttacgagcgaatgtagagccaagaaggttccaacaagaatcctttggaatgcaactgatataccaaggattgtgttaagctgagatgaacgataacaatggcgcaccatcatgatcatgtgttcaagagtttgacaaagtatcaacgttacaattagttacaaaaactgttgtggagtgtggaatatgtcatcagactcctataataagaatgcagcttc

SEQ ID NO: 5535 - protein, 177 aa, Arabidopsis thaliana
GLIPKLQEHRKKKFLVASPMAFSATLSQLSSLSSISSSLPISSRRLPHRSLPQFTVKAEAEKEKQSAQAKSDGEASPAATKTPKTLPKKPVYSMKKGQIVRVEKEKYLNSINYLSVGHPPFYKGLDYIYEDRGEVLDLRVFETGEYALVGWVGIPTAPAWLPTDMLIKCEKLVYERM

SEQ ID NO: 5536 - protein, 158 aa, Arabidopsis thaliana
MAFSATLSQLSSLSSISSSLPISSRRLPHRSLPQFTVKAEAEKEKQSAQAKSDGEASPAATKTPKTLPKKPVYSMKKGQIVRVEKEKYLNSINYLSVGHPPFYKGLDYIYEDRGEVLDLRVFETGEYALVGWVGIPTAPAWLPTDMLIKCEKLVYERM

SEQ ID NO: 5537 - protein, 94 aa, Arabidopsis thaliana
AVLSRNSKNTEKKNSWWPLQWLSQLPCLSFLLFRPSPLHYQFLLEDFLIDLFLNSQSKQKQRKRNRAHRLSLMGKHHQLQPKPLKLFPRNRFTR

SEQ ID NO: 5538 - DNA, 2271 bp, Arabidopsis thaliana
taatttagattataataaaagaaataaataaatttataaaaaggctcatttctcttcttctttggttcttacatttctctatatcattttttgtccttccattaaaaacggaataaacagaatgaacggtggtgatgtcaccgtcgccggatccgacgatctgaaatctccgctcttaccggtcgtccataatgatgaaccattcgaacgacaaacggtgggacaacaacttcggacaatattcacgcccaaaaactgttacatcgctcttggtcctcttctttgcgccgtcgtgtgtctatgcgtagatctcgggggagatgaaacgacgacggcgaggaacatgctcggtgttttggtgtggatgttcgcatggtggttgacggaggccgttccgatgccgatcacctccatgacgccgctcttcctcttccctctctttggtatatcggctgcggatgacgtagcaaattcttacatggatgacgtcatctcccttgtactcggcagcttcatacttgctctcgccgtcgaacactacaacatccatcgccggcttgcccttaacataacgttggtgttctgcgtggagccgctaaacgcgccgctacttctgcttggcatctgcgccacaacagcgttcgtaagcatgtggatgcataacgtagcagctgcagtcatgatgatgcctgtcgctacggggatacttcagagactgccctcgtcatcatcgacgacggaagtggtgcatccggccgtggggaagtttagcagggcggtggtgttaggtgtgatatactctgcggcggttggtgggatgagcacactcactggaacaggagtgaatctgattcttgttggaatgtggaaaagctacttccctgaggctgatccgatcagttttagccaatggttcttctttggcttcccattggctttgtgcatattcgtggtgctttggtgtgttctttgtgttatgtattgtcctaaaggagcaggacaagctctctctccttatctccataaatctcatctcaggagagagcttgatttgttagggccaatgaacttcgctgagaagatggtcttagccgtgtttggtgggttggttgtgttgtggatgacaaggaatataactgatgatatccccggctggggtcggatcttcgccggccgagccggggatggaaccgtgagtgtgatgatggcgacattgttgtttatcatcccaagcaatattaaaaaaggagagaagctaatggactggaacaaatgcaagaaactaccatggaacattgtcttgttattgggagctggattcgctatagccgatggagtacgcaccagtggcttagctgaggtcttatccaaaggacttgtcttccttgaaacggctccttactgggccattgctccaacggtttgcctcatcgctgctaccatcacagagttcacttcaaacaacgcaaccactacattgttggttccgttactcatcgaaatcgcaaagaacatggggatccatcctttgctcttgatggttccaggagccattgggggctcagttcgctttcttgcttcccacgggaacaccctctaacgtcgttgggttcacgacagggcatatagagatcaaagacatgatcaagacaggcttgcctctcaagatcgctggaaccatctttctctccatcttgatgcccactcttggggcttacgtttttgcatcaatgggaggagtttagttctacaagccaagcacaagaccatgtacacaattgatttattgtactatattgtttactaccgtaatacatatgtagatatatagtcaatggaatgggaaatttagatgaggtcaaaaatcacaaaatcggcccatttttgtaacccgcccgattatagtttccggtaccattgctttcttttgtgcttccaacgtaccggtaactttggtcccttttttttttatttggtgtgtatatgaaaaagggttaatacagatttgtgtgttcttcttcctaacaatagcaactagtggcaaatccagcgcgcggtccaacctggccataccataccacgtcattgtccagcgtgtcttcttctgttttcggttttctacaaacacaaaaagcaaagaaaacaaaacatcaatgcatggtttataacgtcttgctttttaattagtttttgtcctttacactcatttatgttctttctttgtcctttgctatacactacttgtctattgaataatatgcttataatcgg

SEQ ID NO: 5539 - protein, 492 aa, Arabidopsis thaliana
MNGGDVTVAGSDDLKSPLLPVVHNDEPFERQTVGQQLRTIFTPKNCYIALGPLLCAVVCLCVDLGGDETTTARNMLGVLVWMFAWWLTEAVPMPITSMTPLFLFPLFGISAADDVANSYMDDVISLVLGSFILALAVEHYNIHRRLALNITLVFCVEPLNAPLLLLGICATTAFVSMWMHNVAAAVMMMPVATGILQRLPSSSSTTEVVHPAVGKFSRAVVLGVIYSAAVGGMSTLTGTGVNLILVGMWKSYFPEADPISFSQWFFFGFPLALCIFVVLWCVLCVMYCPKGAGQALSPYLHKSHLRRELDLLGPMNFAEKMVLAVFGGLVVLWMTRNITDDIPGWGRIFAGRAGDGTVSVMMATLLFIIPSNIKKGEKLMDWNKCKKLPWNIVLLLGAGFAIADGVRTSGLAEVLSKGLVFLETAPYWAIAPTVCLIAATITEFTSNNATTTLLVPLLIEIAKNMGIHPLLLMVPGAIGGSVRFLASHGNTL

SEQ ID NO: 5540 - protein, 418 aa, Arabidopsis thaliana
MLGVLVWMFAWWLTEAVPMPITSMTPLFLFPLFGISAADDVANSYMDDVISLVLGSFILALAVEHYNIHRRLALNITLVFCVEPLNAPLLLLGICATTAFVSMWMHNVAAAVMMMPVATGILQRLPSSSSTTEVVHPAVGKFSRAVVLGVIYSAAVGGMSTLTGTGVNLILVGMWKSYFPEADPISFSQWFFFGFPLALCIFVVLWCVLCVMYCPKGAGQALSPYLHKSHLRRELDLLGPMNFAEKMVLAVFGGLVVLWMTRNITDDIPGWGRIFAGRAGDGTVSVMMATLLFIIPSNIKKGEKLMDWNKCKKLPWNIVLLLGAGFAIADGVRTSGLAEVLSKGLVFLETAPYWAIAPTVCLIAATITEFTSNNATTTLLVPLLIEIAKNMGIHPLLLMVPGAIGGSVRFLASHGNTL

SEQ ID NO: 5541 - protein, 411 aa, Arabidopsis thaliana
MFAWWLTEAVPMPITSMTPLFLFPLFGISAADDVANSYMDDVISLVLGSFILALAVEHYNIHRRLALNITLVFCVEPLNAPLLLLGICATTAFVSMWMHNVAAAVMMMPVATGILQRLPSSSSTTEVVHPAVGKFSRAVVLGVIYSAAVGGMSTLTGTGVNLILVGMWKSYFPEADPISFSQWFFFGFPLALCIFVVLWCVLCVMYCPKGAGQALSPYLHKSHLRRELDLLGPMNFAEKMVLAVFGGLVVLWMTRNITDDIPGWGRIFAGRAGDGTVSVMMATLLFIIPSNIKKGEKLMDWNKCKKLPWNIVLLLGAGFAIADGVRTSGLAEVLSKGLVFLETAPYWAIAPTVCLIAATITEFTSNNATTTLLVPLLIEIAKNMGIHPLLLMVPGAIGGSVRFLASHGNTL

SEQ ID NO: 5542 - DNA, 1812 bp, Arabidopsis thaliana
tggagagaaatcagcttcaagcttaagagagcttcgaaagcgaaagcgacgatttcttctccatcgtgagagcaaatctccagagccgttttctcttcttcttcttcctcctcgcgccgtctctgaaactccatcatcgtatcaatcaaattgcttcctcctccaaattgaaaaacaatggaattggattcggagaacaaattgttgaagacgggtttggttatagtggcgacacttgttatagccaaactcatcttctctttcttcacttctgattctaagaagaagcgtcttcctcctactcttaaagcttggcctccattggttggaagtcttatcaaattcttgaaaggacctattattatgcttagagaggaataccctaagcttggaagtgtgtttactgttaatcttgttcacaaaaagattacttttcttattggtcctgaagtctctgctcattttttcaaagcttctgaatctgatcttagtcagcaggaagtgtatcagttcaatgtccctacttttggtcctggagttgttttcgatgttgattattctgttcgtcaggagcagtttcggttcttcactgaggcacttagagttaacaagttgaagggttatgtggatatgatggttactgaagctgaggattacttctctaaatggggagagagtggtgaagttgatattaaggttgagctagagaggctcatcatcttgactgcaagtagatgtttactgggtcgagaagttcgtgatcagctttttgatgatgtctctgctttgttccatgaccttgacaatggaatgcttcccatcagtgttctcttcccatatctcccaattccagctcaccgccgtcgtgaccgtgcccgagaaaagctttcggagattttcgcaaaaatcattgggtcgagaaaacgctctggaaaaacagagaacgacatgctgcagtgtttcatcgaatcaaagtacaaagatggtagacagacaaccgaatctgaagtcactggtttgctcattgctgctctgtttgcaggacaacacacgagctctatcacttccacctggaccggtgcttatctgatgcgatacaaagagtacttctcagctgctcttgatgagcagaagaacctgattgcgaaacatggagacaagatcgatcatgatatcttatccgagatggatgttctctaccgctgcattaaggaagcgttgaggcttcaccctccactcatcatgttaatgagagcctcgcacagtgatttcagcgtgacagctcgggatggaaaaacttacgatatcccaaagggtcacatcgttgcaacctcccctgcatttgccaaccgcttaccgcacatcttcaaagaccccgacacctacgacccagaaagattctcccctggaagagaagaggacaaagccgcaggggcattctcgtacattgcattcggagggggaaggcacgggtgccttggagagccgtttgcttacctgcagatcaaagccatatggagtcatttgttgaggaacttcgagcttgagctagtttcaccgttccctgagattgactggaacgctatggtggttggagttaaaggcaatgtgatggtgcgttacaagaggcgccagctttcttaaagacaagtttaaggttattgcagctttggatttttctctctggtttctgctttgcttttgtccctctctggttttagttttgttgttgaataattcttctgtttttataaactgttgttactctttaattgacatttatttttaagcttctaagtttgttggttctgc

SEQ ID NO: 5543 - protein, 488 aa, Arabidopsis thaliana
MELDSENKLLKTGLVIVATLVIAKLIFSFFTSDSKKKRLPPTLKAWPPLVGSLIKFLKGPIIMLREEYPKLGSVFTVNLVHKKITFLIGPEVSAHFFKASESDLSQQEVYQFNVPTFGPGVVFDVDYSVRQEQFRFFTEALRVNKLKGYVDMMVTEAEDYFSKWGESGEVDIKVELERLIILTASRCLLGREVRDQLFDDVSALFHDLDNGMLPISVLFPYLPIPAHRRRDRAREKLSEIFAKIIGSRKRSGKTENDMLQCFIESKYKDGRQTTESEVTGLLIAALFAGQHTSSITSTWTGAYLMRYKEYFSAALDEQKNLIAKHGDKIDHDILSEMDVLYRCIKEALRLHPPLIMLMRASHSDFSVTARDGKTYDIPKGHIVATSPAFANRLPHIFKDPDTYDPERFSPGREEDKAAGAFSYIAFGGGRHGCLGEPFAYLQIKAIWSHLLRNFELELVSPFPEIDWNAMVVGVKGNVMVRYKRRQLS

SEQ ID NO: 5544 - protein, 426 aa, Arabidopsis thaliana
MLREEYPKLGSVFTVNLVHKKITFLIGPEVSAHFFKASESDLSQQEVYQFNVPTFGPGVVFDVDYSVRQEQFRFFTEALRVNKLKGYVDMMVTEAEDYFSKWGESGEVDIKVELERLIILTASRCLLGREVRDQLFDDVSALFHDLDNGMLPISVLFPYLPIPAHRRRDRAREKLSEIFAKIIGSRKRSGKTENDMLQCFIESKYKDGRQTTESEVTGLLIAALFAGQHTSSITSTWTGAYLMRYKEYFSAALDEQKNLIAKHGDKIDHDILSEMDVLYRCIKEALRLHPPLIMLMRASHSDFSVTARDGKTYDIPKGHIVATSPAFANRLPHIFKDPDTYDPERFSPGREEDKAAGAFSYIAFGGGRHGCLGEPFAYLQIKAIWSHLLRNFELELVSPFPEIDWNAMVVGVKGNVMVRYKRRQLS

SEQ ID NO: 5545 - protein, 337 aa, Arabidopsis thaliana
MMVTEAEDYFSKWGESGEVDIKVELERLIILTASRCLLGREVRDQLFDDVSALFHDLDNGMLPISVLFPYLPIPAHRRRDRAREKLSEIFAKIIGSRKRSGKTENDMLQCFIESKYKDGRQTTESEVTGLLIAALFAGQHTSSITSTWTGAYLMRYKEYFSAALDEQKNLIAKHGDKIDHDILSEMDVLYRCIKEALRLHPPLIMLMRASHSDFSVTARDGKTYDIPKGHIVATSPAFANRLPHIFKDPDTYDPERFSPGREEDKAAGAFSYIAFGGGRHGCLGEPFAYLQIKAIWSHLLRNFELELVSPFPEIDWNAMVVGVKGNVMVRYKRRQLS

SEQ ID NO: 5546 - DNA, 12659 bp, Arabidopsis thaliana
atggtagctgttactggagaagtactgcatctgcttcggaggtatttgggtgaatatgtgcatggactctccacagaggctctgagaattagtgtctggaaaggtgatgttgttcttaaagatttgaagttaaaggcggaagctcttaattcactgaagcttccagtagctgtcaaatctggttttgttggaaccatcactttgaaggtcccttggaaaagtttaggcaaagagccagtcattgttctgatcgatcgtgtcttcgttcttgcttatcctgcccctgatgaccgaacacttaagtttttcactttggttggtactgaatttgcttacactaattacataccaggaggaagacagggaaaagcttctagaaaccaagcttcagcagatcgaggtacttcgtatttctggctgatggagcttcatggatacgaagcagaaacagcaactcttgaagcaagggcaaagtctaagctgggaagtcctccacaagggaattcatggctaggctcaattattgctacaattattggtaatctgaaagtatccatcagcaatgtacatataagatacgaggattctaccagagacagctcagaaatacttgctagctttttttcttatttcaacaatatttgctctagtaatccagggcacccctttgctgcgggcatcaccttggccaagctcgcagctgttacaatggatgaagaaggaaatgaaacctttgacacaagtggcgctttggataaactgcgtaagtcgttgcagcttgagaggctcgctctgtatcatgattctaatagctttccctgggaaatagagaagcaatgggacaatattactcctgaggaatggattgagatgtttgaagatggcataaaggagcagaccgagcataaaataaagtcaaaatgggccttgaatcgtcactatctattgtcccctatcaatggatctcttaaatatcaccggttaggaaatcaggagagaaataatccggagattccatttgaaagggcatcagttatccttaatgatgttaacgtgactatcacagaggagcaatatcatgattggataaagctagtcgaagttgtctccagatacaaaacatatatagagatttcacatttaaggcctatggttcctgtttcagaagctccacgtctgtggtggcggtttgctgctcaagctagtttacaacaaaagagattatggtacacgcgctatattcagctgtatgccaattttctgcagcagtcatcagatgttaattacccagagatgagagaaatcgaaaaggaccttgattccaaagtgattcttttgtggaggttgcttgcacatgcaaaggtagaatctgtaaagtcaaaagaagcagctgagcagagaaagctgaaaaagggtggttggttctcattcaactggcggacagaagctgaagatgaccctgaggtagatagtgtggctggcggatcaaaattgatggaggaaagattgactaaagatgaatggaaggccataaataagttactgagtcatcagccagatgaagagatgaatttgtattcaggaaaagacatgcagaatatgactcactttcttgtaacggtatcaattggtcaaggtgcggctaggattgttgatataaatcagactgaggtgctgtgtggtaggtttgagcagctcgatgtgacgaccaagttcagacatcgaagtactcagtgtgatgtatcactgaggttctatggcttatctgcaccagaaggttctctagcgcagagtgtatccagtgagagaaagaccaatgccttgatggctagttttgtgaacgcaccaattggagagaacattgattggaggctatcagccacgatatccccttgtcatgctacgatatggactgaaagttatgatcgtgtattagagtttgtgaagcgaagtaatgcagttagccctactgttgcgctggaaactgctgctgtgcttcagatgaaactagaggaagtgactcgacgggctcaagagcaacttcaaatagtattggaggagcaaagcagatttgctctcgacattgatattgatgctccaaaggtgagaattcctttgagggcttcaggatcgtccaagtgcagtagccatttcctattggattttggtaattttacgttaaccaccatggatactcggtctgaggagcagaggcaaaacttatattcccggttctgcatttcgggaagagatattgctgctttctttacagactgtggatctgacaaccaaggttgcagtttagtcatggaagatttcactaatcagccaattctgtctcccattctagagaaagcggacaatgtttattcccttattgataggtgtggaatggcagttattgttgatcagatcaaagtacctcacccaagttacccatctactagaatatcgatccaagtgccaaatattggtgttcatttctctccaacaagatatatgaggatcatgcaattgttcgacatcttgtatggtgctatgaaaacctacagtcaagctcctgttgatcacatgccagatggaatccaaccttggagtcctacagatcttgctagtgatgctagaatcttagtttggaagggaattggcaactctgttgctacttggcaatcttgtcgccttgttctatctggtttatatctgtatacatttgaatcagagaagtcacttgattatcaacgttatttatgcatggctggtaggcaagtattcgaggttccacccgcaaatattggtggttctccatactgtcttgctgtcggtgtaaggggaacagatcttaaaaaggccctggaatcttctagcacctggatcatagaatttcagggggaggagaaggcagcttggctgagaggactggtccaagccacctatcaagcttctgctcctttgtcgggggatgtacttggtcaaacgagtgatggtgatggtgacttccatgaacctcagaccaggaatatgaaagctgctgatcttgttattactggtgctttggttgagacgaagttgtacttgtatggaaagatcaagaatgaatgcgatgagcaggttgaagaggttctgcttcttaaagttcttgcttccggaggaaaggtgcacttgataagttccgagagtggcttaactgttagaacaaagttgcactctctgaaaatcaaagatgaactccagcagcagcagtcaggaagtgctcagtatttagcttactcggtcctgaagaacgaagacatacaagaatcattaggaacatgtgattctttcgacaaggagatgcctgtaggacatgcagatgatgaagatgcctacacagatgctttaccagagtttctgtcacctacagaaccaggtactccggatatggatatgattcaatgcagcatgatgatggactccgatgaacatgtgggactcgaggatactgaaggagggtttcatgaaaaagatacatctcagggaaaaagtctttgcgatgaggtattttatgaggtgcagggtggtgaattttctgattttgtgtcagttgttttcttgacgaggagctccagttcccacgattataatggaattgatacacagatgagcattcgcatgtcaaaactggagttcttttgcagcagaccaactgttgttgctctaattggttttggatttgatttgagcactgcatcatatatcgaaaatgataaagatgccaacactttggtacctgagaaatctgatagtgagaaagaaacaaatgatgaaagtgggcgcattgaaggcttacttggatatggcaaggatcgtgtagtgttttacctgaacatgaatgttgataatgtgactgtgtttctcaacaaggaggatggttctcagcttgcgatgtttgtgcaggaacgatttgtgttggacattaaggttcacccgagctctctttcagtagaagggactctgggaaattttaaactctgtgacaagtcgttagactctggaaactgttggagttggctctgtgacatacgagatcctggtgttgagtctcttatcaagttcaaattcagttcatatagtgctggcgacgacgactatgaaggatatgattatagcttatctggtaaactatcggctgttcgcattgtatttctctacagatttgttcaagaggttacagcatatttcatgggacttgctactcctcattctgaagaagtcattaaacttgttgacaaagttggaggctttgagtggctaatccagaaagatgaaatggatggtgctactgcggtgaaactggacctttcgttagacactccaataattgttgtccctagagattctctgagcaaggattacattcaacttgaccttggtcagctggaggtatcaaatgaaataagttggcatgggtgtccggagaaagatgccactgctgtacgtgtagatgttcttcatgcgaagattcttggactaaatatgtcggtaggcataaatggttcaattggtaaaccaatgatacgtgaaggacagggattggacatttttgtccggcgcagcctaagagatgtttttaagaaagtcccaacactttcggttgaggttaagattgatttcttgcatgctgtgatgtctgacaaagaatatgatattattgtaagttgcacatccatgaatttgtttgaggagccaaagctacctccagatttccgtggtagcagttctggtcccaaagctaaaatgcgtctactggctgacaaagtcaacttgaatagtcagatgattatgtcacgtacagttaccatactggctgttgatatcaattatgctcttctcgagttacgtaatagtgttaatgaagagtcatcattagctcatgttgcggtacgtgcttctgagcctaattcttctatttcctggatgacatcactatctgagacagacttgtatgtgtcagttcctaaagtttctgttcttgatatccgccctaacacaaagcctgaaatgcgactgatgctcggctcatcggtcgatgcttccaagcaggcttcttctgaatctcttcccttttcccttaataagggaagctttaagcgagccaactctagggctgttcttgattttgatgcaccatgttcaacgatgttgctgatggattatagatggcgagcatcctctcagtcatgtgttttgcgggtgcaacaacctcgtatccttgctgttcctgacttccttcttgcggttggtgaattttttgttccagctttgcgtgcaataacaggaagagatgaaacattagatccaacaaatgatcctatcaccagaagtagaggcatagttctctctgagccactctataaacagacagaagatgttgtgcacttgtccccacgtagacaattagtagcagattcactgggcattgatgagtatacctatgacggatgcggaaaggtaatctcgttgagtgagcaaggagagaaggatttaaacgtaggaagattagaacccatcataatcgttgggcatggaaagaagctgcgcttcgtcaatgtgaaaattaagaatggatcgcttctgagcaagtgcatttatttgagtaacgatagtagctgtttattttctccggaagatggtgttgacatctcaatgttagaaaatgcctcatctaatccggagaatgtgcttagcaatgcgcacaaatcatcagatgtttcagacacttgtcaatatgattcgaagtctggtcagagttttacctttgaagctcaggttgtatctcctgagttcacgttctttgacggtacaaagtcatctctggatgactcttctgctgtagaaaagcttttgcgagtgaaattggattttaattttatgtatgcctcaaaagaaaaagacatctgggttcgagccttgctaaagaacctggttgttgaaactgggtctggtcttatcattcttgatccagtcgatatctctgggggatacacttctgttaaagagaaaacaaatatgtccttaacctccactgacatatacatgcacctttctttgagtgctctttctctcctactgaatctgcagagccaagtaactggagctttacaatctggaaatgctattcctttagcttcatgcaccaactttgacaggatttgggtctcaccaaaagaaaatggacctaggaacaacctcacaatttggaggccgcaggctccttcaaactatgtcatattgggagactgtgtgacgtcaagggcaattcctcctacacaagctgtaatggcagtaagtaatacatatgggcgtgtgaggaagccgattgggtttaatcgtattggcctgttctctgttattcaaggtttagaaggggataatgttcagcattcccataatagcaatgagtgttccctctggatgcctgtagctcctgtagggtacactgctatgggttgtgttgcaaatataggaagtgagcaaccacctgatcacattgtttattgtctaagcatttggcgtgctgataatgttcttggagcattctatgctcacacttcaactgcagctccttccaaaaaatatagccctggcctcagtcattgtcttctttggaatccccttcagtccaagacatcttcatcctctgacccatcatcgacaagtgggtcccggagtgagcaatcaagtgatcagactggaaattcatcaggatgggacattctcaggtcaatttctaaggcaactagttatcatgtttcaactcctaattttgagagaatctggtgggacaaaggtggtgatcttcgaagacctgtctcaatatggaggcctgttccacgtcctggttttgcaatattgggtgatagcataactgaaggattggagccacctgcactgggaatactcttcaaagcagatgactctgagattgctgcaaaacctgtacagttcaataaagtcgcacatattgtggggaaaggtttcgatgaagttttctgctggtttcctgttgcacctcctggttatgtttctctaggatgtgttctctctaaatttgatgaagcgcctcatgtcgattcgttttgttgtccaaggattgatcttgttaaccaggccaacatttatgaagcgtctgtcacgagatcttcaagttcaaagtcctctcaactctggagcatttggaaagttgacaatcaggcatgtacttttcttgcacgttctgatcttaaaagacctccaagtcgaatggctttcgctgttggagaatctgtaaagccgaagacacaggaaaatgtaaatgcagaaattaagctgagatgcttctccctgacacttctagatggattacatggaatgatgactcctctctttgacacaactgtcaccaatatcaagctagcaactcatggtcgtcctgaggccatgaatgcagtactcatttcctcaattgctgcttcaacatttaacccgcagttggaagcgtgggagccccttctggagccatttgatggaatattcaagttggaaacatatgatactgctttgaaccaatcgtcaaagccaggaaaacggctgcgaattgctgctactaacattttgaacataaatgttagtgctgcaaaccttgaaactcttggcgatgccgttgtttcctggagaaggcaattagaacttgaagaaagagcggccaaaatgaaagaagaatcagctgcctctcgtgagagtggggatctttcagctttttcagctcttgatgaagatgattttcagacgattgtggtagagaataaactcggccgtgacatttatctgaaaaagctggaggagaactcagatgtagttgtgaaattgtgtcacgatgaaaacacttctgtctgggttccccctccaaggttctccaatcggttaaatgttgcagacagttctagagaagcacgcaattacatgactgtacagattcttgaggctaagggtttgcatattattgatgatggtaacagtcacagtttcttttgcaccctacgcctcgttgttgatagtcagggtgcagaaccacaaaagctttttcctcaaagtgctaggacaaagtgtgtcaagccttccactacaattgtcaacgacttgatggagtgcacttccaagtggaatgaactttttatttttgaaattccacggaagggagttgccagattggaggttgaggtcacaaaccttgctgctaaagctggaaaaggggaggtcgtcgggtcactttcgtttcctgttggacatggggaaagtacgcttagaaaggtagcttcagtaaggatgctacatcaatcaagtgatgccgagaatataagttcgtatacgcttcagagaaagaatgctgaagataaacatgacaacgggtgcttgcttatctcaacatcttactttgagaagacgacaatcccgaacacactaagaaatatggaaagtaaggattttgttgacggagacactggtttctggatcggggttcgtcctgatgactcatggcatagcattcgctcactgcttccgctctgtattgctccgaaatcactacaaaatgattttattgcaatggaagtttctatgagaaatgggagaaagcacgcaacattcagatgtttagctacagttgtaaatgattcagatgtcaatttagagatatctatatcttccgatcagaatgtctcttctggagtaagcaatcataatgctgtgattgcctctagatcttcatatgttttgccatggggatgtttatcaaaggataatgaacagtgcctgcatatccggccaaaggttgaaaactctcatcattcttatgcatggggttattgcatcgcagtgagttctggttgcggaaaagatcaaccatttgttgatcaaggtttactgactcggcagaatacaatcaaacaaagcagcagggcatctacattttttttgagattaaaccagcttgagaagaaggatatgcttttctgctgccagccttctactgggagtaagccattatggctcagtgtaggagcagatgcgtcagttcttcatacagacctcaatacaccagtttatgattggaaaatttctattagttctcctttaaagctagaaaatagacttccatgtcctgtcaaattcacagtgtgggaaaagacaaaagaaggcacatatctcgagagacaacatggtgtagtatcctcaaggaagagtgctcatgtatattcagcagatattcagagacctgtatatcttacgttagctgtccatggcggttgggctttggaaaaggatcctattcctgttttagatatatcttcaaacgacagcgtgtcatcattttggttcgtccatcaacagagcaaaaggagattgcgtgtaagtatagaacgtgatgtgggagaaacaggggctgcaccaaagactataaggttctttgtcccatactggattacaaacgattcctatcttccactaagctatagagtggtggagattgaaccttcagaaaatgtggaagctggctccccctgtctgactagggcttccaaatcttttaagaaaaatcctgttttttcgatggagagaagacaccagaagaaaaatgtccgagtgcttgagtctattgaggatactagtcctatgcctagcatgctttctccacaagaatcagctggccggagtggcgttgtactgtttccgtctcagaaggattcttatgtctctccacgaattggtattgctgtcgcagctagggattctgatagttacagtcctggaatttctctccttgagcttgagaagaaggaacgcatagatgtaaaggcattctgcaaagacgcctcatactacatgctctcggcagtattaaacatgacatctgacagaacaaagtgcgattgtcagacagaagaatggattaatccttctgatcctccgaaactctttggatggcagtcttccacccggcttgagttactgaaaggatatagatggagcacgccattcagcgtctttagcgaaggtacaatgcgtgttcctgttccaaaagaagatgggactgatcaattgcagctaagagtacaagtcagaagcgggacaaagaactcacgttatgaagttatcttcaggccgaactctatctctggcccttacaggatcgaaaaccgttccatgtttcttcctattcgctatcgccaagtggaaggtgtcagcgagtcttggcaatttcttcctcctaatgcggctgcttcgttttattgggaaaatcttggtagacgacatctatttgaacttcttgttgatggaaacgatccttctaattcagaaaagttcgatattgataagataggtgattatccaccacgaagtgaaagtggacctaccagacccatacgagttactattttaaaggaagacaaaaagaatattgtcagaatcagtgactggatgccagcaattgagcctacttcaagcataagcagaagacttccagcatcatccctgtcagaattatctggaaatgagtctcagcaatctcatcttttggcctcagaagattctgagtttcatgttattgttgagcttgctgaacttggaatctccgtaatcgaccatgctcctgaggaaatactgtacatgtcagtgcaaaacctctttgtggcatattcaaccggcttgggctctggacttagcaggttcaaactaaggatgcaaggaatacaagttgataaccaattgccattggctccaatgccagttctgttcagaccacagcgaaccggagataaagctgattatattttgaagttttctgttactttgcaatcaaatgctggccttgatctccgtgtctacccgtatatagatttccaaggacgtgaaaatactgcctttctgataaacatccatgaacctattatctggcgcattcatgagatgatccagcaagccaacttgagtagactatccgatcctaactcgacggctgtatcagttgatccattcattcaaatcggagttcttaacttctcggaagttagatttagagtatccatggcgatgtcccccagtcaaaggccgaggggagtgcttggattttggtcatccctgatgactgctcttgggaatacagaaaacatgccagtacgcataagtgagagatttcatgagaacatatccatgcgccaaagtactatgatcaataatgctattaggaacgtaaagaaagacctccttggccagcctcttcagttgctctcaggtgttgatattcttggcaatgcaagcagcgcgcttggacatatgagtcaaggcatagctgcattatcaatggataaaaaattcatccaaagtcgacagagacaggaaaacaaaggtgttgaggactttggcgatattatcagagaaggaggtggagctctagcgaaaggcctgtttagaggagtcacaggcatattgacaaagcctctcgaaggtgcaaagtcttctggtgtcgaaggctttgtctctgggtttgggaaaggaatcattggtgctgctgcccagcctgtgagcggagttctggatcttctgtcaaagaccactgaaggtgcaaatgccatgaggatgaaaatagcagctgccatcacctcagatgaacaacttcttcgccggagacttccaagagcggttggtgctgatagcttgcttcgtccttacaatgattacagggcacaggggcaggtcatattgcagttggcagaatctggatcattcctgggccaggttgatctgtttaaagtacgtgggaagtttgcattaacagatgcctacgaaagtcatttcatcctaccaaaaggaaaagttctgatgatcacacatcgaagagtgatattgctacaacaaccctccaacataatgggccaaagaaagtttattccggcaaaagatgcgtgttctatacagtgggatattctatggaatgatctggtaaccatggaactgagtgacgggaaaaaagacccacctaactctccaccttcgcggcttattctctatctgaaagcaaagccacatgacccgaaggaacaattccgtgttgtcaaatgcattcccaacagcaagcaggcctttgatgtttactcagctatcgatcaagccattaacttgtatgggcagaatgctttaaagggaatggtgaaaaacaaagtgacaagaccatattccccaatttctgagagttcttgggctgaaggagcttctcaacaaatgccagcttcagttacaccatcttcaacctttggcactagccctacgaccagctcaagttaaagtctgaatctttgagctctcattccttccaatgtcccctctcgcctccccggttaggggagattaaacacagcattggcgaaaaaagaaagaacatttgattttgttcaaatttttcttgtgtagggtttttggtaatcagatcgtagaaatataagtgtgtatatatatgataacatctacaaatcgggtactgtacagactcatccaacattagactcgtgtatcgcatcacatgtatacgggtaccatatataattctattaatttttttcatatatttccaaatagtcaagttttgt

SEQ ID NO: 5547 - protein, 4118 aa, Arabidopsis thaliana
MVAVTGEVLHLLRRYLGEYVHGLSTEALRISVWKGDVVLKDLKLKAEALNSLKLPVAVKSGFVGTITLKVPWKSLGKEPVIVLIDRVFVLAYPAPDDRTLKFFTLVGTEFAYTNYIPGGRQGKASRNQASADRGTSYFWLMELHGYEAETATLEARAKSKLGSPPQGNSWLGSIIATIIGNLKVSISNVHIRYEDSTRDSSEILASFFSYFNNICSSNPGHPFAAGITLAKLAAVTMDEEGNETFDTSGALDKLRKSLQLERLALYHDSNSFPWEIEKQWDNITPEEWIEMFEDGIKEQTEHKIKSKWALNRHYLLSPINGSLKYHRLGNQERNNPEIPFERASVILNDVNVTITEEQYHDWIKLVEVVSRYKTYIEISHLRPMVPVSEAPRLWWRFAAQASLQQKRLWYTRYIQLYANFLQQSSDVNYPEMREIEKDLDSKVILLWRLLAHAKVESVKSKEAAEQRKLKKGGWFSFNWRTEAEDDPEVDSVAGGSKLMEERLTKDEWKAINKLLSHQPDEEMNLYSGKDMQNMTHFLVTVSIGQGAARIVDINQTEVLCGRFEQLDVTTKFRHRSTQCDVSLRFYGLSAPEGSLAQSVSSERKTNALMASFVNAPIGENIDWRLSATISPCHATIWTESYDRVLEFVKRSNAVSPTVALETAAVLQMKLEEVTRRAQEQLQIVLEEQSRFALDIDIDAPKVRIPLRASGSSKCSSHFLLDFGNFTLTTMDTRSEEQRQNLYSRFCISGRDIAAFFTDCGSDNQGCSLVMEDFTNQPILSPILEKADNVYSLIDRCGMAVIVDQIKVPHPSYPSTRISIQVPNIGVHFSPTRYMRIMQLFDILYGAMKTYSQAPVDHMPDGIQPWSPTDLASDARILVWKGIGNSVATWQSCRLVLSGLYLYTFESEKSLDYQRYLCMAGRQVFEVPPANIGGSPYCLAVGVRGTDLKKALESSSTWIIEFQGEEKAAWLRGLVQATYQASAPLSGDVLGQTSDGDGDFHEPQTRNMKAADLVITGALVETKLYLYGKIKNECDEQVEEVLLLKVLASGGKVHLISSESGLTVRTKLHSLKIKDELQQQQSGSAQYLAYSVLKNEDIQESLGTCDSFDKEMPVGHADDEDAYTDALPEFLSPTEPGTPDMDMIQCSMMMDSDEHVGLEDTEGGFHEKDTSQGKSLCDEVFYEVQGGEFSDFVSVVFLTRSSSSHDYNGIDTQMSIRMSKLEFFCSRPTVVALIGFGFDLSTASYIENDKDANTLVPEKSDSEKETNDESGRIEGLLGYGKDRVVFYLNMNVDNVTVFLNKEDGSQLAMFVQERFVLDIKVHPSSLSVEGTLGNFKLCDKSLDSGNCWSWLCDIRDPGVESLIKFKFSSYSAGDDDYEGYDYSLSGKLSAVRIVFLYRFVQEVTAYFMGLATPHSEEVIKLVDKVGGFEWLIQKDEMDGATAVKLDLSLDTPIIVVPRDSLSKDYIQLDLGQLEVSNEISWHGCPEKDATAVRVDVLHAKILGLNMSVGINGSIGKPMIREGQGLDIFVRRSLRDVFKKVPTLSVEVKIDFLHAVMSDKEYDIIVSCTSMNLFEEPKLPPDFRGSSSGPKAKMRLLADKVNLNSQMIMSRTVTILAVDINYALLELRNSVNEESSLAHVAVRASEPNSSISWMTSLSETDLYVSVPKVSVLDIRPNTKPEMRLMLGSSVDASKQASSESLPFSLNKGSFKRANSRAVLDFDAPCSTMLLMDYRWRASSQSCVLRVQQPRILAVPDFLLAVGEFFVPALRAITGRDETLDPTNDPITRSRGIVLSEPLYKQTEDVVHLSPRRQLVADSLGIDEYTYDGCGKVISLSEQGEKDLNVGRLEPIIIVGHGKKLRFVNVKIKNGSLLSKCIYLSNDSSCLFSPEDGVDISMLENASSNPENVLSNAHKSSDVSDTCQYDSKSGQSFTFEAQVVSPEFTFFDGTKSSLDDSSAVEKLLRVKLDFNFMYASKEKDIWVRALLKNLVVETGSGLIILDPVDISGGYTSVKEKTNMSLTSTDIYMHLSLSALSLLLNLQSQVTGALQSGNAIPLASCTNFDRIWVSPKENGPRNNLTIWRPQAPSNYVILGDCVTSRAIPPTQAVMAVSNTYGRVRKPIGFNRIGLFSVIQGLEGDNVQHSHNSNECSLWMPVAPVGYTAMGCVANIGSEQPPDHIVYCLSIWRADNVLGAFYAHTSTAAPSKKYSPGLSHCLLWNPLQSKTSSSSDPSSTSGSRSEQSSDQTGNSSGWDILRSISKATSYHVSTPNFERIWWDKGGDLRRPVSIWRPVPRPGFAILGDSITEGLEPPALGILFKADDSEIAAKPVQFNKVAHIVGKGFDEVFCWFPVAPPGYVSLGCVLSKFDEAPHVDSFCCPRIDLVNQANIYEASVTRSSSSKSSQLWSIWKVDNQACTFLARSDLKRPPSRMAFAVGESVKPKTQENVNAEIKLRCFSLTLLDGLHGMMTPLFDTTVTNIKLATHGRPEAMNAVLISSIAASTFNPQLEAWEPLLEPFDGIFKLETYDTALNQSSKPGKRLRIAATNILNINVSAANLETLGDAVVSWRRQLELEERAAKMKEESAASRESGDLSAFSALDEDDFQTIVVENKLGRDIYLKKLEENSDVVVKLCHDENTSVWVPPPRFSNRLNVADSSREARNYMTVQILEAKGLHIIDDGNSHSFFCTLRLVVDSQGAEPQKLFPQSARTKCVKPSTTIVNDLMECTSKWNELFIFEIPRKGVARLEVEVTNLAAKAGKGEVVGSLSFPVGHGESTLRKVASVRMLHQSSDAENISSYTLQRKNAEDKHDNGCLLISTSYFEKTTIPNTLRNMESKDFVDGDTGFWIGVRPDDSWHSIRSLLPLCIAPKSLQNDFIAMEVSMRNGRKHATFRCLATVVNDSDVNLEISISSDQNVSSGVSNHNAVIASRSSYVLPWGCLSKDNEQCLHIRPKVENSHHSYAWGYCIAVSSGCGKDQPFVDQGLLTRQNTIKQSSRASTFFLRLNQLEKKDMLFCCQPSTGSKPLWLSVGADASVLHTDLNTPVYDWKISISSPLKLENRLPCPVKFTVWEKTKEGTYLERQHGVVSSRKSAHVYSADIQRPVYLTLAVHGGWALEKDPIPVLDISSNDSVSSFWFVHQQSKRRLRVSIERDVGETGAAPKTIRFFVPYWITNDSYLPLSYRVVEIEPSENVEAGSPCLTRASKSFKKNPVFSMERRHQKKNVRVLESIEDTSPMPSMLSPQESAGRSGVVLFPSQKDSYVSPRIGIAVAARDSDSYSPGISLLELEKKERIDVKAFCKDASYYMLSAVLNMTSDRTKCDCQTEEWINPSDPPKLFGWQSSTRLELLKGYRWSTPFSVFSEGTMRVPVPKEDGTDQLQLRVQVRSGTKNSRYEVIFRPNSISGPYRIENRSMFLPIRYRQVEGVSESWQFLPPNAAASFYWENLGRRHLFELLVDGNDPSNSEKFDIDKIGDYPPRSESGPTRPIRVTILKEDKKNIVRISDWMPAIEPTSSISRRLPASSLSELSGNESQQSHLLASEDSEFHVIVELAELGISVIDHAPEEILYMSVQNLFVAYSTGLGSGLSRFKLRMQGIQVDNQLPLAPMPVLFRPQRTGDKADYILKFSVTLQSNAGLDLRVYPYIDFQGRENTAFLINIHEPIIWRIHEMIQQANLSRLSDPNSTAVSVDPFIQIGVLNFSEVRFRVSMAMSPSQRPRGVLGFWSSLMTALGNTENMPVRISERFHENISMRQSTMINNAIRNVKKDLLGQPLQLLSGVDILGNASSALGHMSQGIAALSMDKKFIQSRQRQENKGVEDFGDIIREGGGALAKGLFRGVTGILTKPLEGAKSSGVEGFVSGFGKGIIGAAAQPVSGVLDLLSKTTEGANAMRMKIAAAITSDEQLLRRRLPRAVGADSLLRPYNDYRAQGQVILQLAESGSFLGQVDLFKVRGKFALTDAYESHFILPKGKVLMITHRRVILLQQPSNIMGQRKFIPAKDACSIQWDILWNDLVTMELSDGKKDPPNSPPSRLILYLKAKPHDPKEQFRVVKCIPNSKQAFDVYSAIDQAINLYGQNALKGMVKNKVTRPYSPISESSWAEGASQQMPASVTPSSTFGTSPTTSSS

SEQ ID NO: 5548 - protein, 3978 aa, Arabidopsis thaliana
MELHGYEAETATLEARAKSKLGSPPQGNSWLGSIIATIIGNLKVSISNVHIRYEDSTRDSSEILASFFSYFNNICSSNPGHPFAAGITLAKLAAVTMDEEGNETFDTSGALDKLRKSLQLERLALYHDSNSFPWEIEKQWDNITPEEWIEMFEDGIKEQTEHKIKSKWALNRHYLLSPINGSLKYHRLGNQERNNPEIPFERASVILNDVNVTITEEQYHDWIKLVEVVSRYKTYIEISHLRPMVPVSEAPRLWWRFAAQASLQQKRLWYTRYIQLYANFLQQSSDVNYPEMREIEKDLDSKVILLWRLLAHAKVESVKSKEAAEQRKLKKGGWFSFNWRTEAEDDPEVDSVAGGSKLMEERLTKDEWKAINKLLSHQPDEEMNLYSGKDMQNMTHFLVTVSIGQGAARIVDINQTEVLCGRFEQLDVTTKFRHRSTQCDVSLRFYGLSAPEGSLAQSVSSERKTNALMASFVNAPIGENIDWRLSATISPCHATIWTESYDRVLEFVKRSNAVSPTVALETAAVLQMKLEEVTRRAQEQLQIVLEEQSRFALDIDIDAPKVRIPLRASGSSKCSSHFLLDFGNFTLTTMDTRSEEQRQNLYSRFCISGRDIAAFFTDCGSDNQGCSLVMEDFTNQPILSPILEKADNVYSLIDRCGMAVIVDQIKVPHPSYPSTRISIQVPNIGVHFSPTRYMRIMQLFDILYGAMKTYSQAPVDHMPDGIQPWSPTDLASDARILVWKGIGNSVATWQSCRLVLSGLYLYTFESEKSLDYQRYLCMAGRQVFEVPPANIGGSPYCLAVGVRGTDLKKALESSSTWIIEFQGEEKAAWLRGLVQATYQASAPLSGDVLGQTSDGDGDFHEPQTRNMKAADLVITGALVETKLYLYGKIKNECDEQVEEVLLLKVLASGGKVHLISSESGLTVRTKLHSLKIKDELQQQQSGSAQYLAYSVLKNEDIQESLGTCDSFDKEMPVGHADDEDAYTDALPEFLSPTEPGTPDMDMIQCSMMMDSDEHVGLEDTEGGFHEKDTSQGKSLCDEVFYEVQGGEFSDFVSVVFLTRSSSSHDYNGIDTQMSIRMSKLEFFCSRPTVVALIGFGFDLSTASYIENDKDANTLVPEKSDSEKETNDESGRIEGLLGYGKDRVVFYLNMNVDNVTVFLNKEDGSQLAMFVQERFVLDIKVHPSSLSVEGTLGNFKLCDKSLDSGNCWSWLCDIRDPGVESLIKFKFSSYSAGDDDYEGYDYSLSGKLSAVRIVFLYRFVQEVTAYFMGLATPHSEEVIKLVDKVGGFEWLIQKDEMDGATAVKLDLSLDTPIIVVPRDSLSKDYIQLDLGQLEVSNEISWHGCPEKDATAVRVDVLHAKILGLNMSVGINGSIGKPMIREGQGLDIFVRRSLRDVFKKVPTLSVEVKIDFLHAVMSDKEYDIIVSCTSMNLFEEPKLPPDFRGSSSGPKAKMRLLADKVNLNSQMIMSRTVTILAVDINYALLELRNSVNEESSLAHVAVRASEPNSSISWMTSLSETDLYVSVPKVSVLDIRPNTKPEMRLMLGSSVDASKQASSESLPFSLNKGSFKRANSRAVLDFDAPCSTMLLMDYRWRASSQSCVLRVQQPRILAVPDFLLAVGEFFVPALRAITGRDETLDPTNDPITRSRGIVLSEPLYKQTEDVVHLSPRRQLVADSLGIDEYTYDGCGKVISLSEQGEKDLNVGRLEPIIIVGHGKKLRFVNVKIKNGSLLSKCIYLSNDSSCLFSPEDGVDISMLENASSNPENVLSNAHKSSDVSDTCQYDSKSGQSFTFEAQVVSPEFTFFDGTKSSLDDSSAVEKLLRVKLDFNFMYASKEKDIWVRALLKNLVVETGSGLIILDPVDISGGYTSVKEKTNMSLTSTDIYMHLSLSALSLLLNLQSQVTGALQSGNAIPLASCTNFDRIWVSPKENGPRNNLTIWRPQAPSNYVILGDCVTSRAIPPTQAVMAVSNTYGRVRKPIGFNRIGLFSVIQGLEGDNVQHSHNSNECSLWMPVAPVGYTAMGCVANIGSEQPPDHIVYCLSIWRADNVLGAFYAHTSTAAPSKKYSPGLSHCLLWNPLQSKTSSSSDPSSTSGSRSEQSSDQTGNSSGWDILRSISKATSYHVSTPNFERIWWDKGGDLRRPVSIWRPVPRPGFAILGDSITEGLEPPALGILFKADDSEIAAKPVQFNKVAHIVGKGFDEVFCWFPVAPPGYVSLGCVLSKFDEAPHVDSFCCPRIDLVNQANIYEASVTRSSSSKSSQLWSIWKVDNQACTFLARSDLKRPPSRMAFAVGESVKPKTQENVNAEIKLRCFSLTLLDGLHGMMTPLFDTTVTNIKLATHGRPEAMNAVLISSIAASTFNPQLEAWEPLLEPFDGIFKLETYDTALNQSSKPGKRLRIAATNILNINVSAANLETLGDAVVSWRRQLELEERAAKMKEESAASRESGDLSAFSALDEDDFQTIVVENKLGRDIYLKKLEENSDVVVKLCHDENTSVWVPPPRFSNRLNVADSSREARNYMTVQILEAKGLHIIDDGNSHSFFCTLRLVVDSQGAEPQKLFPQSARTKCVKPSTTIVNDLMECTSKWNELFIFEIPRKGVARLEVEVTNLAAKAGKGEVVGSLSFPVGHGESTLRKVASVRMLHQSSDAENISSYTLQRKNAEDKHDNGCLLISTSYFEKTTIPNTLRNMESKDFVDGDTGFWIGVRPDDSWHSIRSLLPLCIAPKSLQNDFIAMEVSMRNGRKHATFRCLATVVNDSDVNLEISISSDQNVSSGVSNHNAVIASRSSYVLPWGCLSKDNEQCLHIRPKVENSHHSYAWGYCIAVSSGCGKDQPFVDQGLLTRQNTIKQSSRASTFFLRLNQLEKKDMLFCCQPSTGSKPLWLSVGADASVLHTDLNTPVYDWKISISSPLKLENRLPCPVKFTVWEKTKEGTYLERQHGVVSSRKSAHVYSADIQRPVYLTLAVHGGWALEKDPIPVLDISSNDSVSSFWFVHQQSKRRLRVSIERDVGETGAAPKTIRFFVPYWITNDSYLPLSYRVVEIEPSENVEAGSPCLTRASKSFKKNPVFSMERRHQKKNVRVLESIEDTSPMPSMLSPQESAGRSGVVLFPSQKDSYVSPRIGIAVAARDSDSYSPGISLLELEKKERIDVKAFCKDASYYMLSAVLNMTSDRTKCDCQTEEWINPSDPPKLFGWQSSTRLELLKGYRWSTPFSVFSEGTMRVPVPKEDGTDQLQLRVQVRSGTKNSRYEVIFRPNSISGPYRIENRSMFLPIRYRQVEGVSESWQFLPPNAAASFYWENLGRRHLFELLVDGNDPSNSEKFDIDKIGDYPPRSESGPTRPIRVTILKEDKKNIVRISDWMPAIEPTSSISRRLPASSLSELSGNESQQSHLLASEDSEFHVIVELAELGISVIDHAPEEILYMSVQNLFVAYSTGLGSGLSRFKLRMQGIQVDNQLPLAPMPVLFRPQRTGDKADYILKFSVTLQSNAGLDLRVYPYIDFQGRENTAFLINIHEPIIWRIHEMIQQANLSRLSDPNSTAVSVDPFIQIGVLNFSEVRFRVSMAMSPSQRPRGVLGFWSSLMTALGNTENMPVRISERFHENISMRQSTMINNAIRNVKKDLLGQPLQLLSGVDILGNASSALGHMSQGIAALSMDKKFIQSRQRQENKGVEDFGDIIREGGGALAKGLFRGVTGILTKPLEGAKSSGVEGFVSGFGKGIIGAAAQPVSGVLDLLSKTTEGANAMRMKIAAAITSDEQLLRRRLPRAVGADSLLRPYNDYRAQGQVILQLAESGSFLGQVDLFKVRGKFALTDAYESHFILPKGKVLMITHRRVILLQQPSNIMGQRKFIPAKDACSIQWDILWNDLVTMELSDGKKDPPNSPPSRLILYLKAKPHDPKEQFRVVKCIPNSKQAFDVYSAIDQAINLYGQNALKGMVKNKVTRPYSPISESSWAEGASQQMPASVTPSSTFGTSPTTSSS

SEQ ID NO: 5549 - protein, 3882 aa, Arabidopsis thaliana
MDEEGNETFDTSGALDKLRKSLQLERLALYHDSNSFPWEIEKQWDNITPEEWIEMFEDGIKEQTEHKIKSKWALNRHYLLSPINGSLKYHRLGNQERNNPEIPFERASVILNDVNVTITEEQYHDWIKLVEVVSRYKTYIEISHLRPMVPVSEAPRLWWRFAAQASLQQKRLWYTRYIQLYANFLQQSSDVNYPEMREIEKDLDSKVILLWRLLAHAKVESVKSKEAAEQRKLKKGGWFSFNWRTEAEDDPEVDSVAGGSKLMEERLTKDEWKAINKLLSHQPDEEMNLYSGKDMQNMTHFLVTVSIGQGAARIVDINQTEVLCGRFEQLDVTTKFRHRSTQCDVSLRFYGLSAPEGSLAQSVSSERKTNALMASFVNAPIGENIDWRLSATISPCHATIWTESYDRVLEFVKRSNAVSPTVALETAAVLQMKLEEVTRRAQEQLQIVLEEQSRFALDIDIDAPKVRIPLRASGSSKCSSHFLLDFGNFTLTTMDTRSEEQRQNLYSRFCISGRDIAAFFTDCGSDNQGCSLVMEDFTNQPILSPILEKADNVYSLIDRCGMAVIVDQIKVPHPSYPSTRISIQVPNIGVHFSPTRYMRIMQLFDILYGAMKTYSQAPVDHMPDGIQPWSPTDLASDARILVWKGIGNSVATWQSCRLVLSGLYLYTFESEKSLDYQRYLCMAGRQVFEVPPANIGGSPYCLAVGVRGTDLKKALESSSTWIIEFQGEEKAAWLRGLVQATYQASAPLSGDVLGQTSDGDGDFHEPQTRNMKAADLVITGALVETKLYLYGKIKNECDEQVEEVLLLKVLASGGKVHLISSESGLTVRTKLHSLKIKDELQQQQSGSAQYLAYSVLKNEDIQESLGTCDSFDKEMPVGHADDEDAYTDALPEFLSPTEPGTPDMDMIQCSMMMDSDEHVGLEDTEGGFHEKDTSQGKSLCDEVFYEVQGGEFSDFVSVVFLTRSSSSHDYNGIDTQMSIRMSKLEFFCSRPTVVALIGFGFDLSTASYIENDKDANTLVPEKSDSEKETNDESGRIEGLLGYGKDRVVFYLNMNVDNVTVFLNKEDGSQLAMFVQERFVLDIKVHPSSLSVEGTLGNFKLCDKSLDSGNCWSWLCDIRDPGVESLIKFKFSSYSAGDDDYEGYDYSLSGKLSAVRIVFLYRFVQEVTAYFMGLATPHSEEVIKLVDKVGGFEWLIQKDEMDGATAVKLDLSLDTPIIVVPRDSLSKDYIQLDLGQLEVSNEISWHGCPEKDATAVRVDVLHAKILGLNMSVGINGSIGKPMIREGQGLDIFVRRSLRDVFKKVPTLSVEVKIDFLHAVMSDKEYDIIVSCTSMNLFEEPKLPPDFRGSSSGPKAKMRLLADKVNLNSQMIMSRTVTILAVDINYALLELRNSVNEESSLAHVAVRASEPNSSISWMTSLSETDLYVSVPKVSVLDIRPNTKPEMRLMLGSSVDASKQASSESLPFSLNKGSFKRANSRAVLDFDAPCSTMLLMDYRWRASSQSCVLRVQQPRILAVPDFLLAVGEFFVPALRAITGRDETLDPTNDPITRSRGIVLSEPLYKQTEDVVHLSPRRQLVADSLGIDEYTYDGCGKVISLSEQGEKDLNVGRLEPIIIVGHGKKLRFVNVKIKNGSLLSKCIYLSNDSSCLFSPEDGVDISMLENASSNPENVLSNAHKSSDVSDTCQYDSKSGQSFTFEAQVVSPEFTFFDGTKSSLDDSSAVEKLLRVKLDFNFMYASKEKDIWVRALLKNLVVETGSGLIILDPVDISGGYTSVKEKTNMSLTSTDIYMHLSLSALSLLLNLQSQVTGALQSGNAIPLASCTNFDRIWVSPKENGPRNNLTIWRPQAPSNYVILGDCVTSRAIPPTQAVMAVSNTYGRVRKPIGFNRIGLFSVIQGLEGDNVQHSHNSNECSLWMPVAPVGYTAMGCVANIGSEQPPDHIVYCLSIWRADNVLGAFYAHTSTAAPSKKYSPGLSHCLLWNPLQSKTSSSSDPSSTSGSRSEQSSDQTGNSSGWDILRSISKATSYHVSTPNFERIWWDKGGDLRRPVSIWRPVPRPGFAILGDSITEGLEPPALGILFKADDSEIAAKPVQFNKVAHIVGKGFDEVFCWFPVAPPGYVSLGCVLSKFDEAPHVDSFCCPRIDLVNQANIYEASVTRSSSSKSSQLWSIWKVDNQACTFLARSDLKRPPSRMAFAVGESVKPKTQENVNAEIKLRCFSLTLLDGLHGMMTPLFDTTVTNIKLATHGRPEAMNAVLISSIAASTFNPQLEAWEPLLEPFDGIFKLETYDTALNQSSKPGKRLRIAATNILNINVSAANLETLGDAVVSWRRQLELEERAAKMKEESAASRESGDLSAFSALDEDDFQTIVVENKLGRDIYLKKLEENSDVVVKLCHDENTSVWVPPPRFSNRLNVADSSREARNYMTVQILEAKGLHIIDDGNSHSFFCTLRLVVDSQGAEPQKLFPQSARTKCVKPSTTIVNDLMECTSKWNELFIFEIPRKGVARLEVEVTNLAAKAGKGEVVGSLSFPVGHGESTLRKVASVRMLHQSSDAENISSYTLQRKNAEDKHDNGCLLISTSYFEKTTIPNTLRNMESKDFVDGDTGFWIGVRPDDSWHSIRSLLPLCIAPKSLQNDFIAMEVSMRNGRKHATFRCLATVVNDSDVNLEISISSDQNVSSGVSNHNAVIASRSSYVLPWGCLSKDNEQCLHIRPKVENSHHSYAWGYCIAVSSGCGKDQPFVDQGLLTRQNTIKQSSRASTFFLRLNQLEKKDMLFCCQPSTGSKPLWLSVGADASVLHTDLNTPVYDWKISISSPLKLENRLPCPVKFTVWEKTKEGTYLERQHGVVSSRKSAHVYSADIQRPVYLTLAVHGGWALEKDPIPVLDISSNDSVSSFWFVHQQSKRRLRVSIERDVGETGAAPKTIRFFVPYWITNDSYLPLSYRVVEIEPSENVEAGSPCLTRASKSFKKNPVFSMERRHQKKNVRVLESIEDTSPMPSMLSPQESAGRSGVVLFPSQKDSYVSPRIGIAVAARDSDSYSPGISLLELEKKERIDVKAFCKDASYYMLSAVLNMTSDRTKCDCQTEEWINPSDPPKLFGWQSSTRLELLKGYRWSTPFSVFSEGTMRVPVPKEDGTDQLQLRVQVRSGTKNSRYEVIFRPNSISGPYRIENRSMFLPIRYRQVEGVSESWQFLPPNAAASFYWENLGRRHLFELLVDGNDPSNSEKFDIDKIGDYPPRSESGPTRPIRVTILKEDKKNIVRISDWMPAIEPTSSISRRLPASSLSELSGNESQQSHLLASEDSEFHVIVELAELGISVIDHAPEEILYMSVQNLFVAYSTGLGSGLSRFKLRMQGIQVDNQLPLAPMPVLFRPQRTGDKADYILKFSVTLQSNAGLDLRVYPYIDFQGRENTAFLINIHEPIIWRIHEMIQQANLSRLSDPNSTAVSVDPFIQIGVLNFSEVRFRVSMAMSPSQRPRGVLGFWSSLMTALGNTENMPVRISERFHENISMRQSTMINNAIRNVKKDLLGQPLQLLSGVDILGNASSALGHMSQGIAALSMDKKFIQSRQRQENKGVEDFGDIIREGGGALAKGLFRGVTGILTKPLEGAKSSGVEGFVSGFGKGIIGAAAQPVSGVLDLLSKTTEGANAMRMKIAAAITSDEQLLRRRLPRAVGADSLLRPYNDYRAQGQVILQLAESGSFLGQVDLFKVRGKFALTDAYESHFILPKGKVLMITHRRVILLQQPSNIMGQRKFIPAKDACSIQWDILWNDLVTMELSDGKKDPPNSPPSRLILYLKAKPHDPKEQFRVVKCIPNSKQAFDVYSAIDQAINLYGQNALKGMVKNKVTRPYSPISESSWAEGASQQMPASVTPSSTFGTSPTTSSS

SEQ ID NO: 5550 - DNA, 2330 bp, Arabidopsis thaliana
tcagatcactcctcctctctcttctcctacctttttcacattctcttcttcttcttctcgtgagaaaaagaaagagagattctttattcattagatcgaagcaaaaatgtccacagcgccgtctccaggcactactccatcaccatctccaccgtctcctcccacaaactcgacaaccaccactcctcctccagcagcctcttctcctcctcccaccacaactccttcttctcctcctccgtcgccgtcaactaattcaacctctcctcctccttcttctcctttacctccttctcttcctcctccatctcctcctggatctttaactcctcctcttcctcaaccttccccctccgctcccatcactccttctccaccgtctcccaccacaccctcaaaccctcgaagccctccatctcctaaccaaggaccaccaaacactccctcaggatctactcctagaactccatcaaacactaaaccgtcgccgccgtctgattcttccgatggattgtctaccggagttgtggtaggaatcgccattggaggagtcgctattcttgttatactgactctgatttgtcttctctgtaagaagaaacgaagaagaagacacgacgatgaagctgcttactatgttcctcctcctcctccatctggtcccaaagctggaggaccttacggtggtcaacaacagtattggcaacaacaaaacgcgtcacggccgtcagataatcatgtagtgacgtcattgccaccacctaagcctccatctccaccacgaaaacctcctccgccacctccaccaccagcattcatgagtagcagtggtggttctgactattcggatcttccggttcttcctccaccatctccagggcttgtgttaggcttttctaaaagcactttcacttatgaggagttgtcgagagctactaatggcttctctgaggctaatttgttaggacaaggagggtttggttatgtgcataaaggtatattgcctagtgggaaagaagttgctgtgaaacagttgaaagctggtagtggtcagggagagagagagtttcaggctgaggttgagatcattagcagagttcatcacaggcatttggtttctcttattggttattgtatggccggtgttcaaagattacttgtctatgagtttgttccaaacaacaatcttgagtttcacctccatggtaagggacggcctacgatggaatggagtactagattgaagattgctcttggatctgctaaaggactttcatatcttcatgaagattgcaatccgaaaatcattcaccgtgatattaaggcgtcaaacatattgattgatttcaaatttgaagctaaggttgctgactttggtcttgccaagattgcttctgatacaaacactcatgtatctacacgcgtgatgggaacctttgggtatttggctccggaatatgctgcaagtggaaagctcacagaaaagtctgacgttttctcatttggcgttgtacttttggaacttattactgggaggcgccctgttgatgcgaacaatgtctatgtagatgacagcttagttgactgggcacgaccattgcttaaccgagcatctgaggaaggagattttgagggtttggctgattcaaagatgggtaatgagtatgacagagaggagatggctcgcatggttgcttgcgctgcggcttgtgttcgccattcagctcgccgcagacctcgcatgagccagatagtacgggcgttagaaggaaatgtatcgctgtctgatcttaacgaagggatgagaccgggtcacagcaacgtatacagctcatatggaggaagcacagactatgacacgagccaatacaacgacgacatgataaagtttaggaaaatggctcttggaactcaagaatacggcacaaccggcgagtacagtaatccaaccagtgactacggactgtacccgtctggttcaagcagtgaaggtcaagccacacgagaaatggagatgggaaagattaagaaaaccggtcaaggttatagtggaccctctctttaaaccataagagtggagaaattgcaggttttttttggattctttttcttattaactgtaaagatttgaggaaattgccttactctctaattgatttactacgatatatgatacgtttaaaattgttttgctttggtttcttctttagatgttgtgatgttgattgattctggtttgaatattattctttcattcttttttctatttttcttctgaagaatttgtttgttatgtcttttgagcttttggcctagtttggttaagttcc

SEQ ID NO: 5551 - protein, 652 aa, Arabidopsis thaliana
MSTAPSPGTTPSPSPPSPPTNSTTTTPPPAASSPPPTTTPSSPPPSPSTNSTSPPPSSPLPPSLPPPSPPGSLTPPLPQPSPSAPITPSPPSPTTPSNPRSPPSPNQGPPNTPSGSTPRTPSNTKPSPPSDSSDGLSTGVVVGIAIGGVAILVILTLICLLCKKKRRRRHDDEAAYYVPPPPPSGPKAGGPYGGQQQYWQQQNASRPSDNHVVTSLPPPKPPSPPRKPPPPPPPPAFMSSSGGSDYSDLPVLPPPSPGLVLGFSKSTFTYEELSRATNGFSEANLLGQGGFGYVHKGILPSGKEVAVKQLKAGSGQGEREFQAEVEIISRVHHRHLVSLIGYCMAGVQRLLVYEFVPNNNLEFHLHGKGRPTMEWSTRLKIALGSAKGLSYLHEDCNPKIIHRDIKASNILIDFKFEAKVADFGLAKIASDTNTHVSTRVMGTFGYLAPEYAASGKLTEKSDVFSFGVVLLELITGRRPVDANNVYVDDSLVDWARPLLNRASEEGDFEGLADSKMGNEYDREEMARMVACAAACVRHSARRRPRMSQIVRALEGNVSLSDLNEGMRPGHSNVYSSYGGSTDYDTSQYNDDMIKFRKMALGTQEYGTTGEYSNPTSDYGLYPSGSSSEGQATREMEMGKIKKTGQGYSGPSL

SEQ ID NO: 5552 - protein, 415 aa, Arabidopsis thaliana
MSSSGGSDYSDLPVLPPPSPGLVLGFSKSTFTYEELSRATNGFSEANLLGQGGFGYVHKGILPSGKEVAVKQLKAGSGQGEREFQAEVEIISRVHHRHLVSLIGYCMAGVQRLLVYEFVPNNNLEFHLHGKGRPTMEWSTRLKIALGSAKGLSYLHEDCNPKIIHRDIKASNILIDFKFEAKVADFGLAKIASDTNTHVSTRVMGTFGYLAPEYAASGKLTEKSDVFSFGVVLLELITGRRPVDANNVYVDDSLVDWARPLLNRASEEGDFEGLADSKMGNEYDREEMARMVACAAACVRHSARRRPRMSQIVRALEGNVSLSDLNEGMRPGHSNVYSSYGGSTDYDTSQYNDDMIKFRKMALGTQEYGTTGEYSNPTSDYGLYPSGSSSEGQATREMEMGKIKKTGQGYSGPSL

SEQ ID NO: 5553 - DNA, 2376 bp, Arabidopsis thaliana
ccccgagccaccaccattctcttttactccttcgccgaatctcacaacgccaaattttggcgtttccacagatctatacatcccggagatctccaacaaatccgacaccgttttctactccgacgaatcctcctccgtagatctagtcaaaaaacgaacctaacgaaattcgaaatcctgatcggagatggctccgagtattcgaaaagcgattggtgcggttaaagaccaaacaagcataggaatcgctaaagtagcaagcaacatggctccagatctagaagtagccatcgtgaaagctacaagtcacgacgacgatcccgcaagcgagaaatacattcgtgagattctaaacctgacctctctctctcgcggctacatcctcgcttgtgttacttccgtttcacggcgattgagtaagacgcgtgattgggttgttgctctcaaggctcttatgcttgtgcatagacttcttaatgaaggagatcctatttttcaagaagagattctttattcaactagacgaggtacgaggatgttaaacatgtctgattttcgcgatgaagcgcattcgagttcgtgggatcattcggctttcgttagaacttatgctggttacttggatcagaggcttgagttagctttgtttgagaggaaaagtggtgtgtcggtgaatagtggtggtaatagtagtcatcatagtaataatgatgatcgatatgggagaggaagagatgatttcaggtctccaccgccgcgttcttatgattatgagaacggtggtggtggtggtagtgactttagaggtgataataatggttatggtggtgtaccgaagagatctcggtcttacggagatatgactgagatgggaggaggaggaggaggaggagggagagatgagaagaaagttgttacgcctttaagggaaatgacgcccgaaaggattttcggaaagatgggtcatcttcaacggttacttgataggtttttgtcattgagacctactggtttagctaagaacagtaggatgatattgatcgcgttgtatcccgttgtgagggagagttttaagctgtatgctgatatttgtgaggttttggctgttttgttggataagtttttcgatatggagtattcggattgtgtcaaggcctttgatgcttatgctagtgcggctaaacagattgatgagcttattgcgttttataattggtgtaaggaaacgggtgtggcgagatcgtctgagtatccggaagttcagaggattacaagcaagttgttggagactttggaagagtttgttagagatagggcaaaaagagggaagagtcccgagaggaaagagatcgaagctcctcctccggtagttgaagaagaggagcctgagcctgatatgaatgagatcaaagctcttcctcctcccgagaattacactcctccacctccgcctgaaccagaacctcagcccgaaaaaccgcaatttaccgaggatttagttaacttgagggaggatgaagtcacagctgatgaccaagggaacaagtttgcgcttgcactctttgctggtccaccgggtaataacggaaaatgggaagctttctcctcgaacggagtgacctctgcttggcagaatcccgctgcagagcccggtaaagcggattgggaattggcattggttgaaacaacgagcaatttagaaaaacagacagccgctttgggtggtgggttcgataacttgttgctcaacgggatgtatgatcaaggaatggtcagacaacacgttagcacctcgcaattgacaggtggtagcgcgagcagcgtagctttacccttacctggtaaaaccaacaatcaagtattagccttacctgcaccagatggaaccgttgagaaagtgaaccaagacccattcgcagcttcactaaccattccaccaccttcgtacgtgcaaatggccgagatggagaagaagcagtatctactgagccaagagcagcagctatggcagcaatatcaacgtgatgggatgagaggtcaagccagtttggcgaagatgaacaccggtccagttccggcttacggaatgccacctgtcaacgggatgggaccgccaccgacggggtattactacaacaatccttactgattcattcttttttgcacccattcatatatgtgtagatgactcgtcttccacctttgatcttgtgtgtgttttattatatcccctcggattgtcgtaaaacgattccatcttcttccttgtctctgctcgagtttgatttatagtttatgtacactttcttgagaatcttgattcccttctgtataacattttgatatcattcatgtttccactgtttaacttaaaac

SEQ ID NO: 5554 - protein, 653 aa, Arabidopsis thaliana
MAPSIRKAIGAVKDQTSIGIAKVASNMAPDLEVAIVKATSHDDDPASEKYIREILNLTSLSRGYILACVTSVSRRLSKTRDWVVALKALMLVHRLLNEGDPIFQEEILYSTRRGTRMLNMSDFRDEAHSSSWDHSAFVRTYAGYLDQRLELALFERKSGVSVNSGGNSSHHSNNDDRYGRGRDDFRSPPPRSYDYENGGGGGSDFRGDNNGYGGVPKRSRSYGDMTEMGGGGGGGGRDEKKVVTPLREMTPERIFGKMGHLQRLLDRFLSLRPTGLAKNSRMILIALYPVVRESFKLYADICEVLAVLLDKFFDMEYSDCVKAFDAYASAAKQIDELIAFYNWCKETGVARSSEYPEVQRITSKLLETLEEFVRDRAKRGKSPERKEIEAPPPVVEEEEPEPDMNEIKALPPPENYTPPPPPEPEPQPEKPQFTEDLVNLREDEVTADDQGNKFALALFAGPPGNNGKWEAFSSNGVTSAWQNPAAEPGKADWELALVETTSNLEKQTAALGGGFDNLLLNGMYDQGMVRQHVSTSQLTGGSASSVALPLPGKTNNQVLALPAPDGTVEKVNQDPFAASLTIPPPSYVQMAEMEKKQYLLSQEQQLWQQYQRDGMRGQASLAKMNTGPVPAYGMPPVNGMGPPPTGYYYNNPY

SEQ ID NO: 5555 - protein, 627 aa, Arabidopsis thaliana
MAPDLEVAIVKATSHDDDPASEKYIREILNLTSLSRGYILACVTSVSRRLSKTRDWVVALKALMLVHRLLNEGDPIFQEEILYSTRRGTRMLNMSDFRDEAHSSSWDHSAFVRTYAGYLDQRLELALFERKSGVSVNSGGNSSHHSNNDDRYGRGRDDFRSPPPRSYDYENGGGGGSDFRGDNNGYGGVPKRSRSYGDMTEMGGGGGGGGRDEKKVVTPLREMTPERIFGKMGHLQRLLDRFLSLRPTGLAKNSRMILIALYPVVRESFKLYADICEVLAVLLDKFFDMEYSDCVKAFDAYASAAKQIDELIAFYNWCKETGVARSSEYPEVQRITSKLLETLEEFVRDRAKRGKSPERKEIEAPPPVVEEEEPEPDMNEIKALPPPENYTPPPPPEPEPQPEKPQFTEDLVNLREDEVTADDQGNKFALALFAGPPGNNGKWEAFSSNGVTSAWQNPAAEPGKADWELALVETTSNLEKQTAALGGGFDNLLLNGMYDQGMVRQHVSTSQLTGGSASSVALPLPGKTNNQVLALPAPDGTVEKVNQDPFAASLTIPPPSYVQMAEMEKKQYLLSQEQQLWQQYQRDGMRGQASLAKMNTGPVPAYGMPPVNGMGPPPTGYYYNNPY

SEQ ID NO: 5556 - protein, 564 aa, Arabidopsis thaliana
MLVHRLLNEGDPIFQEEILYSTRRGTRMLNMSDFRDEAHSSSWDHSAFVRTYAGYLDQRLELALFERKSGVSVNSGGNSSHHSNNDDRYGRGRDDFRSPPPRSYDYENGGGGGSDFRGDNNGYGGVPKRSRSYGDMTEMGGGGGGGGRDEKKVVTPLREMTPERIFGKMGHLQRLLDRFLSLRPTGLAKNSRMILIALYPVVRESFKLYADICEVLAVLLDKFFDMEYSDCVKAFDAYASAAKQIDELIAFYNWCKETGVARSSEYPEVQRITSKLLETLEEFVRDRAKRGKSPERKEIEAPPPVVEEEEPEPDMNEIKALPPPENYTPPPPPEPEPQPEKPQFTEDLVNLREDEVTADDQGNKFALALFAGPPGNNGKWEAFSSNGVTSAWQNPAAEPGKADWELALVETTSNLEKQTAALGGGFDNLLLNGMYDQGMVRQHVSTSQLTGGSASSVALPLPGKTNNQVLALPAPDGTVEKVNQDPFAASLTIPPPSYVQMAEMEKKQYLLSQEQQLWQQYQRDGMRGQASLAKMNTGPVPAYGMPPVNGMGPPPTGYYYNNPY

SEQ ID NO: 5557 - DNA, 1803 bp, Arabidopsis thaliana
acactaatattttaactctccccactctttgccttgcccttggctctagaaccgaacgtgactctccagatagacttttggagtcacaacattgagtttgaagaggagggaagaagtgagctagggattggttcagagtgaacataaatggctctcaaggcattagactacgatactctgaatgaaaacgtcaagaagtgtcagtatgccgtaagaggtgaactttatctccgagcttctgagctgcagaaagaaggcaaaaagattattttcacaaacgttgggaaccctcatgctttaggacagaagccattgacatttcctcgccaggtggttgcgctttgccaagctccgtttctactagatgacccaaatgttggaatgctatttccagctgatgctattgcaagagctaaacattatctttccttgacttcaggcggtttaggtgcttacagtgattcaagaggccttccaggagttaggaaagaggttgctgagttcattcaacggcgtgatgggtatccaagtgacccagaactcatctttctcactgatggagctagcaaaggtgtgatgcaaatcttgaattgtgttatacgcggtaatggagatgggattctagttccggttccacagtatccactttactcagctaccatatcactgttaggtggtactcttgttccttactatcttgatgagtctgaaaactggggacttgatgttgctaaccttcgacaatccgttgctcaggctcgttctcaagggataacagtaagggcaatggtgatcattaaccctgggaacccaactggccagtgtctaagcgaagctaacataagagagatattgaagttctgttataacgagaaactggttcttctgggagacgaggtttatcagcagaacatataccaggatgagcgtccctttatcagctccaagaaggttttgatggaaatgggttcgccgttcagcaaggaagttcagcttgtatcttttcacacagtctctaaaggatattggggtgaatgtggacagcgaggtggatactttgagatgaccaacctccctccaagggttgttgaggagatatacaaggttgcatcaattgccctcagccctaatgtctctgcgcaaatctttatgggtttgatggttaatcctccaaagcctggagacatttcatatgaccagttcgcccgtgaaagcaaggggattcttgaatctttgagaagaagagcaaggctcatgacagatggattcaacagctgcaaaaacgtcgtgtgcaatttcacagaaggtgcaatgtattcgtttcctcaaatacggttaccaacgggagctctccaagctgcaaaacaagctggaaaagtgccagacgttttctactgtctcaagctcttagaagccacaggaatctccacagtacctggctctggatttggacagaaagaaggtgtgttccatctgaggacaacaatcctgccagcagaagatgagatgccggagatcatggatagcttcaagaagttcaacgacgagttcatgactcagtatgataataactttggttattcgaaaatgtgattacttcttcttctgaacgactattgtgttctgctacactctttaaagctaaatctctgtagtacactctttctctttgccctattctataaaccatatctctctctttgtgtctcttttttttgggtgtaaactctctcttgtgtctctatttctattttcaattggaaactgattaagatcttttctcaatgaaatgaagtttaggcc

SEQ ID NO: 5558 - protein, 481 aa, Arabidopsis thaliana
MALKALDYDTLNENVKKCQYAVRGELYLRASELQKEGKKIIFTNVGNPHALGQKPLTFPRQVVALCQAPFLLDDPNVGMLFPADAIARAKHYLSLTSGGLGAYSDSRGLPGVRKEVAEFIQRRDGYPSDPELIFLTDGASKGVMQILNCVIRGNGDGILVPVPQYPLYSATISLLGGTLVPYYLDESENWGLDVANLRQSVAQARSQGITVRAMVIINPGNPTGQCLSEANIREILKFCYNEKLVLLGDEVYQQNIYQDERPFISSKKVLMEMGSPFSKEVQLVSFHTVSKGYWGECGQRGGYFEMTNLPPRVVEEIYKVASIALSPNVSAQIFMGLMVNPPKPGDISYDQFARESKGILESLRRRARLMTDGFNSCKNVVCNFTEGAMYSFPQIRLPTGALQAAKQAGKVPDVFYCLKLLEATGISTVPGSGFGQKEGVFHLRTTILPAEDEMPEIMDSFKKFNDEFMTQYDNNFGYSKM

SEQ ID NO: 5559 - protein, 403 aa, Arabidopsis thaliana
MLFPADAIARAKHYLSLTSGGLGAYSDSRGLPGVRKEVAEFIQRRDGYPSDPELIFLTDGASKGVMQILNCVIRGNGDGILVPVPQYPLYSATISLLGGTLVPYYLDESENWGLDVANLRQSVAQARSQGITVRAMVIINPGNPTGQCLSEANIREILKFCYNEKLVLLGDEVYQQNIYQDERPFISSKKVLMEMGSPFSKEVQLVSFHTVSKGYWGECGQRGGYFEMTNLPPRVVEEIYKVASIALSPNVSAQIFMGLMVNPPKPGDISYDQFARESKGILESLRRRARLMTDGFNSCKNVVCNFTEGAMYSFPQIRLPTGALQAAKQAGKVPDVFYCLKLLEATGISTVPGSGFGQKEGVFHLRTTILPAEDEMPEIMDSFKKFNDEFMTQYDNNFGYSKM

SEQ ID NO: 5560 - protein, 338 aa, Arabidopsis thaliana
MQILNCVIRGNGDGILVPVPQYPLYSATISLLGGTLVPYYLDESENWGLDVANLRQSVAQARSQGITVRAMVIINPGNPTGQCLSEANIREILKFCYNEKLVLLGDEVYQQNIYQDERPFISSKKVLMEMGSPFSKEVQLVSFHTVSKGYWGECGQRGGYFEMTNLPPRVVEEIYKVASIALSPNVSAQIFMGLMVNPPKPGDISYDQFARESKGILESLRRRARLMTDGFNSCKNVVCNFTEGAMYSFPQIRLPTGALQAAKQAGKVPDVFYCLKLLEATGISTVPGSGFGQKEGVFHLRTTILPAEDEMPEIMDSFKKFNDEFMTQYDNNFGYSKM

SEQ ID NO: 5561 - DNA, 2743 bp, Arabidopsis thaliana
atttaattatctcaggatacgttaacataaaagtttttttttctcttggtctcaatgctcactctatccccatgaagttttgctcatactcaagttatcttgcagagaaatagaaaaaagatgggtatggttttatttgcttgcttgcttttactaatcatattcccaacttgtggctatgcagctataaacacatcaagtcctttgtcaataagacaaactctgagttctcctggtggattttatgagttaggcttcttcagtcctaataatactcagaatcagtatgtcgggatctggttcaagaagattgttcctcgtgtagttgtgtgggtggctaacagagatacgccagttactagctctgcagcaaatctcactatcagcagcaatgggagcctgatcttgcttgatgggaaacaagatgttatttggtcaacaggaaaagctttcacatccaacaaatgtcatgcggagctcttagataccggaaattttgttgtaattgatgatgtttcagggaataaattatggcaaagcttcgagcatcttggtaatactatgctgcctcagtcatcattgatgtatgatacttctaatggcaagaagcgtgtgttgactacatggaaaagtaacagcgatccttcgcctggggagttctcactggagattacaccacaaatccccacacaaggccttataagaagaggctcagtaccttactggagatgtggtccttgggcaaaaacaagattctctgggatatctggaattgatgcatcatatgtaagtccattcagcgttgtccaggatacagcagccggcacaggatctttctcttattccacattaagaaactataatctctcatatgttacgctaacaccagaagggaaaatgaagatcctctgggatgatggaaataattggaagcttcacttgtctctcccagagaacccatgtgatctatatggtagatgcgggccttatggtttgtgtgtgagatctgatcccccaaagtgtgaatgcttgaaagggtttgtaccaaagtctgatgaggagtggggaaaaggaaactggacaagtgggtgtgtgagacgtacaaaattatcttgccaagcaaaatcttctatgaaaacacaaggcaaagacacagacatcttctatcgtatgacagatgtaaagactccggatctgcaccaatttgcaagctttctcaatgccgaacagtgctatcaaggttgtctaggcaactgttcttgcacagccttcgcctatattagtggaattggatgtttggtatggaatggggagctagcagacaccgttcaatttttgtctagcggagagtttctcttcattcgtcttgcaagttcagaattggctggaagcagtcgaaggaagattatcgtaggcactactgtcagcctttccattttcttgatcttggtatttgctgcaattatgttgtggagatacagagcgaaacaaaatgatgcatggaagaatggttttgaacgacaagatgtctccggcgtcaatttctttgagatgcatacaatacgaactgccaccaataacttcagtccttcaaataaacttggtcaaggtggatttggtccagtttacaagggaaagttggtagatgggaaggaaataggtgttaaacgccttgctagtagttccggtcagggtacagaggagttcatgaatgaaataacactgatctcaaaattgcaacacagaaacttggttcggcttttgggatactgcatcgacggagaagagaagctactgatctatgagttcatggtgaacaaaagtctcgatatttttatatttgatccatgtctaaagtttgagcttgattggccaaagagatttaatatcattcaaggtattgcgcgtggacttctctatctccaccgtgactcacgcctcagagttattcaccgagacctgaaggtcagcaatattcttctggacgacagaatgaatccaaaaatatcagattttggattggctcggatgttccagggaacccaatatcaagacaacactcgcagagttgtaggaactctaggatatatgtctcccgagtatgcatgggcaggattgttctctgagaagtctgatatctatagcttcggagttctgatgttagaaatcatcagcggaaagagaatttcacggttcatctatggtgatgaaagcaaaggccttcttgcttatacatgggattcttggtgcgagaccgggggatcaaatctacttgacagagatcttactgatacatgccaagcattcgaagttgcgagatgtgttcagattggtctgctctgtgttcaacacgaagccgtcgacagacccaacactcttcaagtactatccatgcttacttcagcaacagatcttccagtaccaaaacagccaatatttgcagtgcatactctaaacgatatgccaatgttacaggctaattctcaagatttcttatctgtaaatgagatgacagaatctatgatccaaggaaggtaagcctaaggatcttgttatctcactacagaagtagtagtatatacttgtaaattcatgaacatttaaagcttaagattttgatatctcactctatttttctaagcatgtgatctcataaagccccaatatgtcgttgacacgtcataatattgggtataatattgttattaaccgtcgcaaagataaagtatgctttttgatgacc

SEQ ID NO: 5562 - protein, 805 aa, Arabidopsis thaliana
MGMVLFACLLLLIIFPTCGYAAINTSSPLSIRQTLSSPGGFYELGFFSPNNTQNQYVGIWFKKIVPRVVVWVANRDTPVTSSAANLTISSNGSLILLDGKQDVIWSTGKAFTSNKCHAELLDTGNFVVIDDVSGNKLWQSFEHLGNTMLPQSSLMYDTSNGKKRVLTTWKSNSDPSPGEFSLEITPQIPTQGLIRRGSVPYWRCGPWAKTRFSGISGIDASYVSPFSVVQDTAAGTGSFSYSTLRNYNLSYVTLTPEGKMKILWDDGNNWKLHLSLPENPCDLYGRCGPYGLCVRSDPPKCECLKGFVPKSDEEWGKGNWTSGCVRRTKLSCQAKSSMKTQGKDTDIFYRMTDVKTPDLHQFASFLNAEQCYQGCLGNCSCTAFAYISGIGCLVWNGELADTVQFLSSGEFLFIRLASSELAGSSRRKIIVGTTVSLSIFLILVFAAIMLWRYRAKQNDAWKNGFERQDVSGVNFFEMHTIRTATNNFSPSNKLGQGGFGPVYKGKLVDGKEIGVKRLASSSGQGTEEFMNEITLISKLQHRNLVRLLGYCIDGEEKLLIYEFMVNKSLDIFIFDPCLKFELDWPKRFNIIQGIARGLLYLHRDSRLRVIHRDLKVSNILLDDRMNPKISDFGLARMFQGTQYQDNTRRVVGTLGYMSPEYAWAGLFSEKSDIYSFGVLMLEIISGKRISRFIYGDESKGLLAYTWDSWCETGGSNLLDRDLTDTCQAFEVARCVQIGLLCVQHEAVDRPNTLQVLSMLTSATDLPVPKQPIFAVHTLNDMPMLQANSQDFLSVNEMTESMIQGR

SEQ ID NO: 5563 - protein, 803 aa, Arabidopsis thaliana
MVLFACLLLLIIFPTCGYAAINTSSPLSIRQTLSSPGGFYELGFFSPNNTQNQYVGIWFKKIVPRVVVWVANRDTPVTSSAANLTISSNGSLILLDGKQDVIWSTGKAFTSNKCHAELLDTGNFVVIDDVSGNKLWQSFEHLGNTMLPQSSLMYDTSNGKKRVLTTWKSNSDPSPGEFSLEITPQIPTQGLIRRGSVPYWRCGPWAKTRFSGISGIDASYVSPFSVVQDTAAGTGSFSYSTLRNYNLSYVTLTPEGKMKILWDDGNNWKLHLSLPENPCDLYGRCGPYGLCVRSDPPKCECLKGFVPKSDEEWGKGNWTSGCVRRTKLSCQAKSSMKTQGKDTDIFYRMTDVKTPDLHQFASFLNAEQCYQGCLGNCSCTAFAYISGIGCLVWNGELADTVQFLSSGEFLFIRLASSELAGSSRRKIIVGTTVSLSIFLILVFAAIMLWRYRAKQNDAWKNGFERQDVSGVNFFEMHTIRTATNNFSPSNKLGQGGFGPVYKGKLVDGKEIGVKRLASSSGQGTEEFMNEITLISKLQHRNLVRLLGYCIDGEEKLLIYEFMVNKSLDIFIFDPCLKFELDWPKRFNIIQGIARGLLYLHRDSRLRVIHRDLKVSNILLDDRMNPKISDFGLARMFQGTQYQDNTRRVVGTLGYMSPEYAWAGLFSEKSDIYSFGVLMLEIISGKRISRFIYGDESKGLLAYTWDSWCETGGSNLLDRDLTDTCQAFEVARCVQIGLLCVQHEAVDRPNTLQVLSMLTSATDLPVPKQPIFAVHTLNDMPMLQANSQDFLSVNEMTESMIQGR

SEQ ID NO: 5564 - protein, 658 aa, Arabidopsis thaliana
MLPQSSLMYDTSNGKKRVLTTWKSNSDPSPGEFSLEITPQIPTQGLIRRGSVPYWRCGPWAKTRFSGISGIDASYVSPFSVVQDTAAGTGSFSYSTLRNYNLSYVTLTPEGKMKILWDDGNNWKLHLSLPENPCDLYGRCGPYGLCVRSDPPKCECLKGFVPKSDEEWGKGNWTSGCVRRTKLSCQAKSSMKTQGKDTDIFYRMTDVKTPDLHQFASFLNAEQCYQGCLGNCSCTAFAYISGIGCLVWNGELADTVQFLSSGEFLFIRLASSELAGSSRRKIIVGTTVSLSIFLILVFAAIMLWRYRAKQNDAWKNGFERQDVSGVNFFEMHTIRTATNNFSPSNKLGQGGFGPVYKGKLVDGKEIGVKRLASSSGQGTEEFMNEITLISKLQHRNLVRLLGYCIDGEEKLLIYEFMVNKSLDIFIFDPCLKFELDWPKRFNIIQGIARGLLYLHRDSRLRVIHRDLKVSNILLDDRMNPKISDFGLARMFQGTQYQDNTRRVVGTLGYMSPEYAWAGLFSEKSDIYSFGVLMLEIISGKRISRFIYGDESKGLLAYTWDSWCETGGSNLLDRDLTDTCQAFEVARCVQIGLLCVQHEAVDRPNTLQVLSMLTSATDLPVPKQPIFAVHTLNDMPMLQANSQDFLSVNEMTESMIQGR

SEQ ID NO: 5565 - DNA, 1928 bp, Arabidopsis thaliana
aataataatggcgagtcgctctcttttctctatctcaatctcaccttctcaatttacagttttgccatccatcaacaacgagagacgacgccttgctatcgccgctcgatctcaccgactatcacgccggaagattcgtaagagacctcctgatagagatatgtcctccatagtttcaatcccggagcttcctcgccggcgggattctgaggaaagcctgcttttagattctcgaatcagtgtagctgaaggagatacatcgaatacagatgtagaaggagacagagatactacttctagtattagaacacagcctccccctcgtaaaggaagaaatcttagtagcagcagaatcaaattctacggtgttgaattatcaccagataatgttgctgtagcaatggtgtattttgttcaaggtgttttaggactcgctaggctcgctgttagtttctatttaaaagatgacttgcatcttgatcctgctgagacagctgtgataacgggtctttcttcattgccgtggcttgttaagcctctctatggttttatcagtgattcagtgcctctatttggttatcgaaggaggtcatatctagttctctcgggacttcttggtgcattttcttggagtttgatggctggttttgttgacagtaaatatagtgctgctttttgtatacttctcggttccctctctgtcgccttttctgatgttgtagtagactcaatggtagtggaacgggctcgtggtgagtcacaaagcgtgtcaggatcgctgcagtctttgtgctggggatcctcagcttttggtggaattgtgagttcctactttagcggctccctggtggagtcatatggtgtgaggtttgtatttggggtgacagctttactacccttgataacttcagcagttgctgttctcgtgaatgaacaacgtgtggtcagaccagcatcagggcagaaagagaatataacgctgctcagtcctggttttcttcagacctcaaagcagaacatgattcagctatggggtgccattaagcaaccgaatgtttttctccccaccttatttatattcttatggcaagccacaccacactcagattctgcaatgttttacttcacaacgaacaaactcggttttaccccggagtttctgggacgagttaaacttgtgacctcaattgcctcattgcttggagtaggactgtacaatggattcctgaagactgttccattgagaaaaatctttctcgtgacgacaatttttggcacgggtcttgggatgactcaggttatcctcgtgtcaggttttaacagacagttggggattagcgacgaatggtttgctataggagactctctaatcctaacagtccttgctcaggcttcattcatgccggttcttgtgttagcagcgagattatgtccagaaggaatggaagcaactctgttcgctacactcatgtcaatctctaacggaggcagtgttctaggtgggcttatgggtgcaggactgactcaagcattcggcattacaagagacagttttggtaacttatcaacacttattatcctctgcaatcttagctcattgctccctctgcctcttctcggtcttttaccgcgagattctccagatactcttactaaagatgacgcagacgttgagatgaagtccaattaaggaagatgatgataattatcaaaagttaaaatgtgatatacctttagaggtgttctgtgtattcagttccaaccctgttattacttgaaaagaatgaagcaggcttttacatggaaactacttttacccaaaatatcatgtaaccaaaatgttgtaattcttaaaacaataaactcttttgttattagattgcagaaaaatacttcaatatgcaaaaatagtcatgatagtaatctct

SEQ ID NO: 5566 - protein, 562 aa, Arabidopsis thaliana
IIMASRSLFSISISPSQFTVLPSINNERRRLAIAARSHRLSRRKIRKRPPDRDMSSIVSIPELPRRRDSEESLLLDSRISVAEGDTSNTDVEGDRDTTSSIRTQPPPRKGRNLSSSRIKFYGVELSPDNVAVAMVYFVQGVLGLARLAVSFYLKDDLHLDPAETAVITGLSSLPWLVKPLYGFISDSVPLFGYRRRSYLVLSGLLGAFSWSLMAGFVDSKYSAAFCILLGSLSVAFSDVVVDSMVVERARGESQSVSGSLQSLCWGSSAFGGIVSSYFSGSLVESYGVRFVFGVTALLPLITSAVAVLVNEQRVVRPASGQKENITLLSPGFLQTSKQNMIQLWGAIKQPNVFLPTLFIFLWQATPHSDSAMFYFTTNKLGFTPEFLGRVKLVTSIASLLGVGLYNGFLKTVPLRKIFLVTTIFGTGLGMTQVILVSGFNRQLGISDEWFAIGDSLILTVLAQASFMPVLVLAARLCPEGMEATLFATLMSISNGGSVLGGLMGAGLTQAFGITRDSFGNLSTLIILCNLSSLLPLPLLGLLPRDSPDTLTKDDADVEMKSN

SEQ ID NO: 5567 - protein, 560 aa, Arabidopsis thaliana
MASRSLFSISISPSQFTVLPSINNERRRLAIAARSHRLSRRKIRKRPPDRDMSSIVSIPELPRRRDSEESLLLDSRISVAEGDTSNTDVEGDRDTTSSIRTQPPPRKGRNLSSSRIKFYGVELSPDNVAVAMVYFVQGVLGLARLAVSFYLKDDLHLDPAETAVITGLSSLPWLVKPLYGFISDSVPLFGYRRRSYLVLSGLLGAFSWSLMAGFVDSKYSAAFCILLGSLSVAFSDVVVDSMVVERARGESQSVSGSLQSLCWGSSAFGGIVSSYFSGSLVESYGVRFVFGVTALLPLITSAVAVLVNEQRVVRPASGQKENITLLSPGFLQTSKQNMIQLWGAIKQPNVFLPTLFIFLWQATPHSDSAMFYFTTNKLGFTPEFLGRVKLVTSIASLLGVGLYNGFLKTVPLRKIFLVTTIFGTGLGMTQVILVSGFNRQLGISDEWFAIGDSLILTVLAQASFMPVLVLAARLCPEGMEATLFATLMSISNGGSVLGGLMGAGLTQAFGITRDSFGNLSTLIILCNLSSLLPLPLLGLLPRDSPDTLTKDDADVEMKSN

SEQ ID NO: 5568 - protein, 509 aa, Arabidopsis thaliana
MSSIVSIPELPRRRDSEESLLLDSRISVAEGDTSNTDVEGDRDTTSSIRTQPPPRKGRNLSSSRIKFYGVELSPDNVAVAMVYFVQGVLGLARLAVSFYLKDDLHLDPAETAVITGLSSLPWLVKPLYGFISDSVPLFGYRRRSYLVLSGLLGAFSWSLMAGFVDSKYSAAFCILLGSLSVAFSDVVVDSMVVERARGESQSVSGSLQSLCWGSSAFGGIVSSYFSGSLVESYGVRFVFGVTALLPLITSAVAVLVNEQRVVRPASGQKENITLLSPGFLQTSKQNMIQLWGAIKQPNVFLPTLFIFLWQATPHSDSAMFYFTTNKLGFTPEFLGRVKLVTSIASLLGVGLYNGFLKTVPLRKIFLVTTIFGTGLGMTQVILVSGFNRQLGISDEWFAIGDSLILTVLAQASFMPVLVLAARLCPEGMEATLFATLMSISNGGSVLGGLMGAGLTQAFGITRDSFGNLSTLIILCNLSSLLPLPLLGLLPRDSPDTLTKDDADVEMKSN

SEQ ID NO: 5569 - DNA, 1265 bp, Arabidopsis thaliana
tggtttcagaaaagctttaacctaatttcacttcgtctctctctcgcgctcccaatttctccgccggcgggaaaaccatgtcgcacttcggaaggtcaggtccaccggatatcagcgacacctactcacttctcgtccttaacatcaccttccgtacgactgctgatgatctctatcctctattcgcaaagtatggaaaggtcgttgatgtgtttattcccagagatcgaaggactggtgattcgcgtggttttgcgtttgttcggtataagtataaagacgaagctcacaaagcagtggaaaggcttgatggaagagttgttgatggcagagaaataactgttcagtttgcgaaatatgggccaaatgctgaaaaaatttccaaaggaagagttgtggaaccaccgccgaagtcacgaagatctagaagccgtagtcctaggcggagtcgtagtcctaggaggagccgtagcccgcctagacgtcgtagtcccagaagaagccgcagtcctcgtaggaggtcccgagatgactatagggaaaaagactaccggaagcggagcaggagcagaagctatgacaggcgtgaaaggcatgaggagaaggatagagatcatcgtcgtcgcactaggtctcgtagtgccagcccagatgaaaaacgcagagtcagaggccgttatgataatgagagccgcagtcacagtcgttccttgagtgcatctcctgctcgccgcagccctagaagttcctccccacagaaaacctctcctgctagagaagtttctcctgataagcgtagcaatgagaggtctccatctcctcgtcgcagcctcagcccaagaagccctgctttgcaaaaggcctctccttctaaggagatgtctcctgaaaggcgtagcaatgagaggtccccatctcctggtagccctgctcctctgcgcaaagttgatgctgcttctcgaagtcaatctccttatgctgcggaatgactgcagccacttgtgaaagtgatacggtgtatgatgaaaaacacgtttgcttgtactgatgatgtttcatcattaagcactggaacgtctaccctctgtagtattacttgctttccgtaggtgccctcaaactactgagtactgactgtatctttgtttcctgttatcgttctggtttagtgttcatgtgcaagaattattactgtttgaacagcctttttagtctctgttttatttgaatcttctctggtttggaattcatagcattctaactct

SEQ ID NO: 5570 - protein, 303 aa, Arabidopsis thaliana
MSHFGRSGPPDISDTYSLLVLNITFRTTADDLYPLFAKYGKVVDVFIPRDRRTGDSRGFAFVRYKYKDEAHKAVERLDGRVVDGREITVQFAKYGPNAEKISKGRVVEPPPKSRRSRSRSPRRSRSPRRSRSPPRRRSPRRSRSPRRRSRDDYREKDYRKRSRSRSYDRRERHEEKDRDHRRRTRSRSASPDEKRRVRGRYDNESRSHSRSLSASPARRSPRSSSPQKTSPAREVSPDKRSNERSPSPRRSLSPRSPALQKASPSKEMSPERRSNERSPSPGSPAPLRKVDAASRSQSPYAAE

SEQ ID NO: 5571 - DNA, 2307 bp, Arabidopsis thaliana
acatttcttcacttccacacacttttacttctttctctcttctcttctcttctccagatctgatcccaaacctttgattcattgttgttgttctctgctgctttatcagagagcatcatcatgtacggaagagatccatggggaggtccattggagataaacactgcagattccgccaccgacgatgatcgtagtcggaatttaaacgatttggatcgtgcggctctttcacgtccactagatgagacgcagcagagttggttacttggtccaacggagcagaagaagaagaagtacgtcgatctcggttgtattatcgttagccgcaagatcttcgtctggactgttggtactcttgttgccgccgcgttactcgccggattcattaccttgatcgttaaaactgtgccgcgtcatcatcctaagactccgccgccggataattatactatagctctacacaaagctcttaagttcttcaatgctcagaaatctgggaaattgccaaagcataataacgtgtcatggagaggtaattctgggcttcaagatgggaaaggtgaaacaggaagcttctataaagatttggtgggaggttattatgatgctggtgatgctatcaagttcaatttccccatggcttatgctatgactatgttgagctggagtgttattgaatatagtgctaaatacgaagctgctggtgagctcactcatgttaaggagcttatcaaatggggaactgattactttctcaagactttcaatagtactgctgattccattgatgatcttgtgtcacaggttggatcagggaatactgatgatggaaatacagatcctaatgaccattactgttggatgcgacctgaggatatggactataaaaggcccgtgactacttgtaatggtggatgttcggatctcgctgcagagatggcagctgctctggcttcagcatctattgtattcaaggataacaaggaatattctaaaaagcttgtccatggtgctaaggtggtgtatcagtttggaaggacgaggagagggagatatagtgcaggcactgcggaatctagcaagttctataattcaagtatgtattgggatgagttcatttggggtggtgcttggatgtattatgctaccggaaatgtaacgtatctcaatctaatcacccaacctactatggccaagcatgctggtgccttctggggtggcccttactatggtgtatttagctgggacaacaagcttgctggtgctcagttgctgttgagccggttgaggttgtttctgagtcctggatatccatatgaagaaattctaaggaccttccacaatcagaccagcatagtcatgtgctcatacttgcctattttcaacaaatttaacagaaccaatggaggtttaatagagttgaatcatggagctccacagccgctgcaatattctgtaaatgcagctttcttagcgactctatacagtgattatctggatgctgctgatactcctggatggtactgtggacctaatttctattcgacaagtgtgctacgtgactttgctagatcccagattgattatatactgggtaaaaaccctcggaaaatgagttatgtcgttggttttggcacaaaatacccaagacatgtgcatcacagaggagcttcgatacccaagaacaaagtcaagtataactgcaaaggaggatggaaatggagagacagcaagaaaccaaacccaaacacgattgaaggagccatggttgctggtcctgacaagcgcgacgggtaccgtgatgtccgtatgaactacaactacactgaaccgactcttgcaggcaatgctggtctagtcgcagctcttgtggcattatcgggtgaagaagaagccaccggtaagatagacaaaaacactattttctcagctgttcctcctttgttccctactccaccacctccaccagcaccatggaaaccttgagaaagctagacttgtgtgattctgtcgctgctgccaaaaaaaatgaatgaggtaagaaggatttgggtgtgagaccagaagattagaagctaaacacaagtcagccataaccaaactactaaggatttcatttggctttactagatacaaacacggggtgggttactttaccacaagcattgtctttcttttctttttttgggttgctgttttgttcttgtgagatatcatatatatctatgcgttttactctgtatatgtttgataccaaacttgtattctttgataaacaatttaatgaactgtattaaacttttaacc

SEQ ID NO: 5572 - protein, 621 aa, Arabidopsis thaliana
MYGRDPWGGPLEINTADSATDDDRSRNLNDLDRAALSRPLDETQQSWLLGPTEQKKKKYVDLGCIIVSRKIFVWTVGTLVAAALLAGFITLIVKTVPRHHPKTPPPDNYTIALHKALKFFNAQKSGKLPKHNNVSWRGNSGLQDGKGETGSFYKDLVGGYYDAGDAIKFNFPMAYAMTMLSWSVIEYSAKYEAAGELTHVKELIKWGTDYFLKTFNSTADSIDDLVSQVGSGNTDDGNTDPNDHYCWMRPEDMDYKRPVTTCNGGCSDLAAEMAAALASASIVFKDNKEYSKKLVHGAKVVYQFGRTRRGRYSAGTAESSKFYNSSMYWDEFIWGGAWMYYATGNVTYLNLITQPTMAKHAGAFWGGPYYGVFSWDNKLAGAQLLLSRLRLFLSPGYPYEEILRTFHNQTSIVMCSYLPIFNKFNRTNGGLIELNHGAPQPLQYSVNAAFLATLYSDYLDAADTPGWYCGPNFYSTSVLRDFARSQIDYILGKNPRKMSYVVGFGTKYPRHVHHRGASIPKNKVKYNCKGGWKWRDSKKPNPNTIEGAMVAGPDKRDGYRDVRMNYNYTEPTLAGNAGLVAALVALSGEEEATGKIDKNTIFSAVPPLFPTPPPPPAPWKP

SEQ ID NO: 5573 - protein, 449 aa, Arabidopsis thaliana
MAYAMTMLSWSVIEYSAKYEAAGELTHVKELIKWGTDYFLKTFNSTADSIDDLVSQVGSGNTDDGNTDPNDHYCWMRPEDMDYKRPVTTCNGGCSDLAAEMAAALASASIVFKDNKEYSKKLVHGAKVVYQFGRTRRGRYSAGTAESSKFYNSSMYWDEFIWGGAWMYYATGNVTYLNLITQPTMAKHAGAFWGGPYYGVFSWDNKLAGAQLLLSRLRLFLSPGYPYEEILRTFHNQTSIVMCSYLPIFNKFNRTNGGLIELNHGAPQPLQYSVNAAFLATLYSDYLDAADTPGWYCGPNFYSTSVLRDFARSQIDYILGKNPRKMSYVVGFGTKYPRHVHHRGASIPKNKVKYNCKGGWKWRDSKKPNPNTIEGAMVAGPDKRDGYRDVRMNYNYTEPTLAGNAGLVAALVALSGEEEATGKIDKNTIFSAVPPLFPTPPPPPAPWKP

SEQ ID NO: 5574 - protein, 445 aa, Arabidopsis thaliana
MTMLSWSVIEYSAKYEAAGELTHVKELIKWGTDYFLKTFNSTADSIDDLVSQVGSGNTDDGNTDPNDHYCWMRPEDMDYKRPVTTCNGGCSDLAAEMAAALASASIVFKDNKEYSKKLVHGAKVVYQFGRTRRGRYSAGTAESSKFYNSSMYWDEFIWGGAWMYYATGNVTYLNLITQPTMAKHAGAFWGGPYYGVFSWDNKLAGAQLLLSRLRLFLSPGYPYEEILRTFHNQTSIVMCSYLPIFNKFNRTNGGLIELNHGAPQPLQYSVNAAFLATLYSDYLDAADTPGWYCGPNFYSTSVLRDFARSQIDYILGKNPRKMSYVVGFGTKYPRHVHHRGASIPKNKVKYNCKGGWKWRDSKKPNPNTIEGAMVAGPDKRDGYRDVRMNYNYTEPTLAGNAGLVAALVALSGEEEATGKIDKNTIFSAVPPLFPTPPPPPAPWKP

SEQ ID NO: 5575 - DNA, 1378 bp, Arabidopsis thaliana
tggtccgtgtgaccgtgtctacgacgttgaaatcgaaattaccacaatgtcctcgccggagcgtgctctcttgaatctattgacggacatcgctctctccttcgacggcgcaatcctcggactgactttagctgttagcgccgtcggttctgctctcaagtatgcttctaccaacgccgcgttgaagaagatcaaagatgcacccgaagtctccatttccgacctccgatcactgcttccggcttctgaagacaaatcagagactaacgataacaggaagagcaatgatcagcgaatcgttgtggttcgcggagtcgtcaaaccgaaaatttccggtgatgagggttacaagaacaacaacgtgttaatctctccggagactggagataaagctcttatcattcagagaacgcaaacttatgtgtatagtggatggaagagattgtttcagtccactggtcaccggtttatgttggagagatcattgcgcaaacacggtgctgattttacgagaacggtcccatttgtcattgttggaaaggatcagcaatcgaactctagttttgtcgctgttaacatggatggctcaaggcaacctcttccgcttaccactgtgtataatcgcttgcagcctattaattcttcgtttcttcaagcctttttgtaccccgattatcctgttggtctgcttgatatagagaagattttaccacctgggaaagatataacagctgttggcatctacagttttaataatggagttcctgaaatcaaatcgtgccaagatcttccttatttcttatcagagatgaccaaggacaagatgattgaggaccttatggaacagaccaactttatattcttgggcagcgttatcttgggcattgtgtctgttggcatccttagctatgctgctgtcaggacctggaataaatggaaacaatggaaccatcagagagaactgccacagagaccgaacgattctgtggtcgatgatgaacccgaagatgcagatgaaatcccagatggagaattgtgtgtgatctgcgtgtcaagaaggagagtacctgcgtttattccctgtggacatgtagtatgttgcaggcgatgtgcttcaaccgtggaacgagagttaaaccctaagtgtccagtttgtcttcagagcattaggggatctatgcgtgtatattactcttagtgaccctgaatcttctctcattgtatgtaatagggtaatgcaatttgtactctcagagaatcggaagttaacaaaatagtttgacaatgatttgaaagttcgtcaagtcactcaatatagagtgagagattgtagaggatatgaaagcaaagtttttaaaaggaagaaattttgtaaccg

SEQ ID NO: 5576 - protein, 398 aa, Arabidopsis thaliana
GPCDRVYDVEIEITTMSSPERALLNLLTDIALSFDGAILGLTLAVSAVGSALKYASTNAALKKIKDAPEVSISDLRSLLPASEDKSETNDNRKSNDQRIVVVRGVVKPKISGDEGYKNNNVLISPETGDKALIIQRTQTYVYSGWKRLFQSTGHRFMLERSLRKHGADFTRTVPFVIVGKDQQSNSSFVAVNMDGSRQPLPLTTVYNRLQPINSSFLQAFLYPDYPVGLLDIEKILPPGKDITAVGIYSFNNGVPEIKSCQDLPYFLSEMTKDKMIEDLMEQTNFIFLGSVILGIVSVGILSYAAVRTWNKWKQWNHQRELPQRPNDSVVDDEPEDADEIPDGELCVICVSRRRVPAFIPCGHVVCCRRCASTVERELNPKCPVCLQSIRGSMRVYYS

SEQ ID NO: 5577 - protein, 383 aa, Arabidopsis thaliana
MSSPERALLNLLTDIALSFDGAILGLTLAVSAVGSALKYASTNAALKKIKDAPEVSISDLRSLLPASEDKSETNDNRKSNDQRIVVVRGVVKPKISGDEGYKNNNVLISPETGDKALIIQRTQTYVYSGWKRLFQSTGHRFMLERSLRKHGADFTRTVPFVIVGKDQQSNSSFVAVNMDGSRQPLPLTTVYNRLQPINSSFLQAFLYPDYPVGLLDIEKILPPGKDITAVGIYSFNNGVPEIKSCQDLPYFLSEMTKDKMIEDLMEQTNFIFLGSVILGIVSVGILSYAAVRTWNKWKQWNHQRELPQRPNDSVVDDEPEDADEIPDGELCVICVSRRRVPAFIPCGHVVCCRRCASTVERELNPKCPVCLQSIRGSMRVYYS

SEQ ID NO: 5578 - protein, 242 aa, Arabidopsis thaliana
MLERSLRKHGADFTRTVPFVIVGKDQQSNSSFVAVNMDGSRQPLPLTTVYNRLQPINSSFLQAFLYPDYPVGLLDIEKILPPGKDITAVGIYSFNNGVPEIKSCQDLPYFLSEMTKDKMIEDLMEQTNFIFLGSVILGIVSVGILSYAAVRTWNKWKQWNHQRELPQRPNDSVVDDEPEDADEIPDGELCVICVSRRRVPAFIPCGHVVCCRRCASTVERELNPKCPVCLQSIRGSMRVYYS

SEQ ID NO: 5579 - DNA, 2160 bp, Arabidopsis thaliana
agacaacaaccaatcatatttattattaaaaaaaagagtcatggcattttcatcttcgtgttcgtccgtcaaagccgtcaactcacggtggacgtctccgtctccgtcaccgtcttctagattcgccgtcctccctgctttccttcaccgccgttacgcaacaagcgtcaaactaacggccataagcgccgccttaaaaaccgtcgagcaaacgacgttaacagaggataacagattctcaaccgtcggatctgactctgatgaatacaatccaactcttccaaagccgaggatcctcgtcaccgagaaactgggagaagccggcgtgaatctcctcagggaattcggcgacgttgactgctcttacgatctttcgccggaagatctgaagaagaaagtggcggagagtgacgctctgatcgtgagaagcggaactaaagtgacgagggaagtgtttgaggcggcgaaggggaggttgaaagtggtcggaagagccggagttgggattgacaatgttgatctgcaggcggcgacggagcacgggtgtttggtggttaatgctccaacggctaatacggtggctgctgccgaacatggaattgctttgcttgcttctatggcacgtaacgttgctcaggccgacgcttctattaaagccggaaaatgggagaggagcaagtacgtcggtgtatctctcgtcggaaaaaccttggccgtgatgggtttcgggaaagttgggacggaggtggcgagaagagccaaaggtctaggcatgaccgttatctcccacgacccttacgcgccagctgacagagccagagctctcggtgtcgatcttgtttcattcgatcaagctatctccaccgccgatttcgtctccctgcacatgcctttaactccggccaccaaaaaggtcttcaacgacgaaactttctctaagatgaagaaaggtgtgcgtctcattaatgtcgctagaggtggcgtcatcgacgaggatgcactcgttagagctctcgatgccggaatcgttgctcaggcagcattagatgtgttctgtgaggaaccaccatcgaaagatagcagactaattcagcatgaaaatgttactgtgacacctcatcttggagctagcacaaaagaagctcaggaaggtgtagccattgagatagcagaggctgtagcaggggcattgaaaggagagttatcagctactgccgtcaatgctccaatggtggctcctgaggtcttgtctgagttgactccttatattgtcttagctgagaagcttgggaggttagctgtgcagttagcatctggaggtaaaggagtacagtccattagggtggtctatcggtcagctcgtgaccgagatgatttggatactagactacttcgtgcaatgatcacaaagggaatcattgaaccgatctcagattcatatgtcaacttggtgaatgctgatttcatagctaaacaaaagggtcttcgtattagtgaggaacgaatggttgttgattcatcaccagagtaccctgttgattccatccaagttcagattttgaatgtggagtcaaatttcgctggtgctgtctctgatgctggtgatataagtattgaagggaaggtgaagtacggagttccgcatttaacttgtgtcggatcatttggtgtggatgtgagccttgaagggaatctgatactgtgcaggcaagtggatcaaccagggatgattggacaggttggtaacatacttggagaacaaaacgtgaatgtgaatttcatgagtgttggaagaacagtgttgaggaaacaagcgataatggcgattggagttgatgaagaaccagacaacaaaacacttgagaggattgggggtgtttctgcgattgaagagtttgtgtttcttaaactataaagtttgagatggagttgcattgtggtgtatggagaataaaactgtgacccggattaaggtgttttatccagtggttgttaagctgtagagaatctgtggtgttgcgagcgagtgtgtgtatcttggtattattacattgttcttgttttgctttcttatggtatgtaatgcctttggttaatgtcatgtttctcttgtaaaatgcttttgcttatattttacgatgaaccgttggacttgaaaat

SEQ ID NO: 5580 - protein, 637 aa, Arabidopsis thaliana
DNNQSYLLLKKRVMAFSSSCSSVKAVNSRWTSPSPSPSSRFAVLPAFLHRRYATSVKLTAISAALKTVEQTTLTEDNRFSTVGSDSDEYNPTLPKPRILVTEKLGEAGVNLLREFGDVDCSYDLSPEDLKKKVAESDALIVRSGTKVTREVFEAAKGRLKVVGRAGVGIDNVDLQAATEHGCLVVNAPTANTVAAAEHGIALLASMARNVAQADASIKAGKWERSKYVGVSLVGKTLAVMGFGKVGTEVARRAKGLGMTVISHDPYAPADRARALGVDLVSFDQAISTADFVSLHMPLTPATKKVFNDETFSKMKKGVRLINVARGGVIDEDALVRALDAGIVAQAALDVFCEEPPSKDSRLIQHENVTVTPHLGASTKEAQEGVAIEIAEAVAGALKGELSATAVNAPMVAPEVLSELTPYIVLAEKLGRLAVQLASGGKGVQSIRVVYRSARDRDDLDTRLLRAMITKGIIEPISDSYVNLVNADFIAKQKGLRISEERMVVDSSPEYPVDSIQVQILNVESNFAGAVSDAGDISIEGKVKYGVPHLTCVGSFGVDVSLEGNLILCRQVDQPGMIGQVGNILGEQNVNVNFMSVGRTVLRKQAIMAIGVDEEPDNKTLERIGGVSAIEEFVFLKL

SEQ ID NO: 5581 - protein, 624 aa, Arabidopsis thaliana
MAFSSSCSSVKAVNSRWTSPSPSPSSRFAVLPAFLHRRYATSVKLTAISAALKTVEQTTLTEDNRFSTVGSDSDEYNPTLPKPRILVTEKLGEAGVNLLREFGDVDCSYDLSPEDLKKKVAESDALIVRSGTKVTREVFEAAKGRLKVVGRAGVGIDNVDLQAATEHGCLVVNAPTANTVAAAEHGIALLASMARNVAQADASIKAGKWERSKYVGVSLVGKTLAVMGFGKVGTEVARRAKGLGMTVISHDPYAPADRARALGVDLVSFDQAISTADFVSLHMPLTPATKKVFNDETFSKMKKGVRLINVARGGVIDEDALVRALDAGIVAQAALDVFCEEPPSKDSRLIQHENVTVTPHLGASTKEAQEGVAIEIAEAVAGALKGELSATAVNAPMVAPEVLSELTPYIVLAEKLGRLAVQLASGGKGVQSIRVVYRSARDRDDLDTRLLRAMITKGIIEPISDSYVNLVNADFIAKQKGLRISEERMVVDSSPEYPVDSIQVQILNVESNFAGAVSDAGDISIEGKVKYGVPHLTCVGSFGVDVSLEGNLILCRQVDQPGMIGQVGNILGEQNVNVNFMSVGRTVLRKQAIMAIGVDEEPDNKTLERIGGVSAIEEFVFLKL

SEQ ID NO: 5582 - protein, 432 aa, Arabidopsis thaliana
MARNVAQADASIKAGKWERSKYVGVSLVGKTLAVMGFGKVGTEVARRAKGLGMTVISHDPYAPADRARALGVDLVSFDQAISTADFVSLHMPLTPATKKVFNDETFSKMKKGVRLINVARGGVIDEDALVRALDAGIVAQAALDVFCEEPPSKDSRLIQHENVTVTPHLGASTKEAQEGVAIEIAEAVAGALKGELSATAVNAPMVAPEVLSELTPYIVLAEKLGRLAVQLASGGKGVQSIRVVYRSARDRDDLDTRLLRAMITKGIIEPISDSYVNLVNADFIAKQKGLRISEERMVVDSSPEYPVDSIQVQILNVESNFAGAVSDAGDISIEGKVKYGVPHLTCVGSFGVDVSLEGNLILCRQVDQPGMIGQVGNILGEQNVNVNFMSVGRTVLRKQAIMAIGVDEEPDNKTLERIGGVSAIEEFVFLKL

SEQ ID NO: 5583 - DNA, 1982 bp, Arabidopsis thaliana
gtcttccgttgcgtgagatattattgaacggtgtttgttattcggagaagaagaagaagaagaactgaagaagcatattcgacggtcaccaccaaacctcttccgtcggattttcactctccgtttatcgaacatctgagatctctctccacttccgtcaccgaagatgcattccagtcatcttcttctcgaggagccgatcaggatggcttcaatcctcgagccttccaaatctagtttcttcccggcattgactaagatcgtcggaactctaggtcctaaatcccgatccgtcgaggctctctccggctgtctcaaagccggcatgtctgtggctcgatttgatttctcgtggggagatgctgattatcaccaggagacacttgataatttgaaagttgctgtgaggagcactaagaagctttgtgctgttatgcttgatactgttggacctgagctacaagttattaacaaatctgagaaagctattactttgaaagctgatggccttgtaactttgacaccgaatcaagatcaagaagcttcttctgaagttcttcccattaatttcaatggacttgccaaggcagtgaagaaaggagacaccatcttcgttgggcaatacctattcactggtagtgaaacaacttcagtttggctcgaggttgatgaagttaaaggagatgatgtcatttgcctttcaaggaatgctgctactctggctggttctttgttcactttacactcctctcaagttcacattgatctcccaacgcttacagagaaggataaggaggttataagcacatggggagttcaaaataaaatcgattttctctcattgtcttattgtcgtcatgctgaggatgttcgccagacccgtgaaatgcttaaaaagttgggcgacctctctcaaacacaaatatttgctaagattgagaacgtagagggactaacccacttcgatgagattctacaagaagctgatggcattattctttctcgtgggaatttgggtatagatttacccccggaaaaggtgtttttgtttcaaaaggctgctctttacaagtgcaacatggctggaaagccagctgttcttacccgtgttgttgacagtatgactgacaacttgcgaccaactcgtgctgaggccacggatgttgctaatgctgttttagatggaagtgatgcaattcttcttggtgctgagacccttcgtggattgtaccctgttgagacaatatcaactgttggtaggatctgtgctgaggcagaaaaggttttcaatcaagatttgtactttaagaagactgtcaagtatgttggagaaccaatgactcacttggaatcgattgcttcttcagctgtacgggcagccattaaggttaaggcatccgtaattatatgcttcacctcttctggaagagcagccagattgattgccaaatacaggccaacgatgccggttatttctgttgtcattccccgggttaagacaaatcaactgaaatggagctttagtggagcttttgaggcgaggcagtcacttattgtcagaggcctcttccctatgcttgctgaccctcgtcaccctgcggaatctacaagtgcgacaaacgagtcagtcctgaaggttgctctagaccatgggaagcatgctggagtaatcaagtcgcatgacagagtagtggtgtgtcagaaagttggtgatgcatctgtggttaagatcattgagcttgaggattaacttttgcctcgcaaaaacattatataattggctgcattttgggttgccttgaattgatgataactcccaatgccggagtgaaaatattatctccgggacttctggtttctttttgtatacttaggagatttgatgtctctaaggtttcagctatatttgattaccttcaaatgtacgcatatgataaaagtatacaatgcctagcaattttataataagctgttacattccc

SEQ ID NO: 5584 - protein, 527 aa, Arabidopsis thaliana
MHSSHLLLEEPIRMASILEPSKSSFFPALTKIVGTLGPKSRSVEALSGCLKAGMSVARFDFSWGDADYHQETLDNLKVAVRSTKKLCAVMLDTVGPELQVINKSEKAITLKADGLVTLTPNQDQEASSEVLPINFNGLAKAVKKGDTIFVGQYLFTGSETTSVWLEVDEVKGDDVICLSRNAATLAGSLFTLHSSQVHIDLPTLTEKDKEVISTWGVQNKIDFLSLSYCRHAEDVRQTREMLKKLGDLSQTQIFAKIENVEGLTHFDEILQEADGIILSRGNLGIDLPPEKVFLFQKAALYKCNMAGKPAVLTRVVDSMTDNLRPTRAEATDVANAVLDGSDAILLGAETLRGLYPVETISTVGRICAEAEKVFNQDLYFKKTVKYVGEPMTHLESIASSAVRAAIKVKASVIICFTSSGRAARLIAKYRPTMPVISVVIPRVKTNQLKWSFSGAFEARQSLIVRGLFPMLADPRHPAESTSATNESVLKVALDHGKHAGVIKSHDRVVVCQKVGDASVVKIIELED

SEQ ID NO: 5585 - protein, 514 aa, Arabidopsis thaliana
MASILEPSKSSFFPALTKIVGTLGPKSRSVEALSGCLKAGMSVARFDFSWGDADYHQETLDNLKVAVRSTKKLCAVMLDTVGPELQVINKSEKAITLKADGLVTLTPNQDQEASSEVLPINFNGLAKAVKKGDTIFVGQYLFTGSETTSVWLEVDEVKGDDVICLSRNAATLAGSLFTLHSSQVHIDLPTLTEKDKEVISTWGVQNKIDFLSLSYCRHAEDVRQTREMLKKLGDLSQTQIFAKIENVEGLTHFDEILQEADGIILSRGNLGIDLPPEKVFLFQKAALYKCNMAGKPAVLTRVVDSMTDNLRPTRAEATDVANAVLDGSDAILLGAETLRGLYPVETISTVGRICAEAEKVFNQDLYFKKTVKYVGEPMTHLESIASSAVRAAIKVKASVIICFTSSGRAARLIAKYRPTMPVISVVIPRVKTNQLKWSFSGAFEARQSLIVRGLFPMLADPRHPAESTSATNESVLKVALDHGKHAGVIKSHDRVVVCQKVGDASVVKIIELED

SEQ ID NO: 5586 - protein, 474 aa, Arabidopsis thaliana
MSVARFDFSWGDADYHQETLDNLKVAVRSTKKLCAVMLDTVGPELQVINKSEKAITLKADGLVTLTPNQDQEASSEVLPINFNGLAKAVKKGDTIFVGQYLFTGSETTSVWLEVDEVKGDDVICLSRNAATLAGSLFTLHSSQVHIDLPTLTEKDKEVISTWGVQNKIDFLSLSYCRHAEDVRQTREMLKKLGDLSQTQIFAKIENVEGLTHFDEILQEADGIILSRGNLGIDLPPEKVFLFQKAALYKCNMAGKPAVLTRVVDSMTDNLRPTRAEATDVANAVLDGSDAILLGAETLRGLYPVETISTVGRICAEAEKVFNQDLYFKKTVKYVGEPMTHLESIASSAVRAAIKVKASVIICFTSSGRAARLIAKYRPTMPVISVVIPRVKTNQLKWSFSGAFEARQSLIVRGLFPMLADPRHPAESTSATNESVLKVALDHGKHAGVIKSHDRVVVCQKVGDASVVKIIELED

SEQ ID NO: 5587 - DNA, 1798 bp, Arabidopsis thaliana
agcatcgttttcataatgagccgatatttctccttcttcttcttagctctcttcctccattatcgtattatcgtagcttctccattcgaaggatttgatgctgaagaagacgacgttaccgacgattcctctcaccttcttcaccactcactccctccgcctcttctcactcagtctcactcatcactctccgatcccgatccggagccggaaccttcttccgccgaatgtaaatccgatctcatcactgaatcagatctcgagcatcaatccgattcgaaaactccctcgtctacaccatttgagtactgggacgaagacgagttcgaaggactaccagttgagatagagacacttgaatctccattgattacagaaaacggaactcatgctgatccaaagacgccagatctcaagacttcatcggaagctcaaggagacactaatgatcaaacgaagaagaagaagtcgtacgcggtggagatcgcttgcgtctgtttcttaatcgcactcgcaatcaactacttcgttggtaaacgtgagaacgagagtctcgcattagcttgggcggcgaaatttgcttctaaggatacaatattccagaagaattttagtatgcttggagttagtgaattagaggattcgccattgttgttaaaagaagccttaaatgtgttcaaattctacgcgagtggtcgtaggtattgccatggattgttagctactatggagcttaagagtagacatgatttgatctctagggtgtttaatttggttgttccttgtaaagatgagatcacttttgaggtttatatgaatgaagaaactatggatcatgttgtgtttgctatgacgaagaagaaggctgcaaaaactatgcaaaaggagatgagggatttgcaaagatttgctgggattgtgtctcctcctgctggaaggaaatgggtgtcggaggagttcgccttgatctctgaatccaaggaagttgctgcggatttgatcactgacactgttcttgatcaggtttttggtgacaaggctgtggataagtatgggaagaatttcatgtcgatgcatatatctgaccaacaccctggcaagcacaagaagatgatgcttttcaagttttctttacctgatgctaaacatatggatgatattgtccggttggtggcgctaattccatattacatcgacttagtaggacgatacagactcagctcgcaggcgcggaacaaaactgagagtggtaggcaaaaggcagcagaggaagcatacaaggaacttcataacgcgaggcaagaggcattgcagaagaagaaagcagaaaagaagaaaatgatggaggaagcggaagcaaagatgagcgcagaagtgataaggaagaaagaggcaaaagagagagcaaggcaggtgaaaaaggcagtaccaaaaatgaagatgagccgtagtcactagctaaaagcttaatcaaagagagccatccagaattaatgcattaaaatcactctccagagttcaaactctaaaaagcttagaaaacatcagcacgtgttttactcgatggctgctttgcttcataatactctcccttaaagtagtaccatgtttgacttgataatggagtttttgatgttgaggtggaaagtcatgcgagagctttgtatagtatggatggcaaatggctaattgtacccatattgtctcatagaagaaagctgatctatgcacactactttgttctttgcatctatatgttgagccctgagagtttgtataacattgacggcaaatagcg

SEQ ID NO: 5588 - protein, 485 aa, Arabidopsis thaliana
SIVFIMSRYFSFFFLALFLHYRIIVASPFEGFDAEEDDVTDDSSHLLHHSLPPPLLTQSHSSLSDPDPEPEPSSAECKSDLITESDLEHQSDSKTPSSTPFEYWDEDEFEGLPVEIETLESPLITENGTHADPKTPDLKTSSEAQGDTNDQTKKKKSYAVEIACVCFLIALAINYFVGKRENESLALAWAAKFASKDTIFQKNFSMLGVSELEDSPLLLKEALNVFKFYASGRRYCHGLLATMELKSRHDLISRVFNLVVPCKDEITFEVYMNEETMDHVVFAMTKKKAAKTMQKEMRDLQRFAGIVSPPAGRKWVSEEFALISESKEVAADLITDTVLDQVFGDKAVDKYGKNFMSMHISDQHPGKHKKMMLFKFSLPDAKHMDDIVRLVALIPYYIDLVGRYRLSSQARNKTESGRQKAAEEAYKELHNARQEALQKKKAEKKKMMEEAEAKMSAEVIRKKEAKERARQVKKAVPKMKMSRSH

SEQ ID NO: 5589 - protein, 480 aa, Arabidopsis thaliana
MSRYFSFFFLALFLHYRIIVASPFEGFDAEEDDVTDDSSHLLHHSLPPPLLTQSHSSLSDPDPEPEPSSAECKSDLITESDLEHQSDSKTPSSTPFEYWDEDEFEGLPVEIETLESPLITENGTHADPKTPDLKTSSEAQGDTNDQTKKKKSYAVEIACVCFLIALAINYFVGKRENESLALAWAAKFASKDTIFQKNFSMLGVSELEDSPLLLKEALNVFKFYASGRRYCHGLLATMELKSRHDLISRVFNLVVPCKDEITFEVYMNEETMDHVVFAMTKKKAAKTMQKEMRDLQRFAGIVSPPAGRKWVSEEFALISESKEVAADLITDTVLDQVFGDKAVDKYGKNFMSMHISDQHPGKHKKMMLFKFSLPDAKHMDDIVRLVALIPYYIDLVGRYRLSSQARNKTESGRQKAAEEAYKELHNARQEALQKKKAEKKKMMEEAEAKMSAEVIRKKEAKERARQVKKAVPKMKMSRSH

SEQ ID NO: 5590 - protein, 280 aa, Arabidopsis thaliana
MLGVSELEDSPLLLKEALNVFKFYASGRRYCHGLLATMELKSRHDLISRVFNLVVPCKDEITFEVYMNEETMDHVVFAMTKKKAAKTMQKEMRDLQRFAGIVSPPAGRKWVSEEFALISESKEVAADLITDTVLDQVFGDKAVDKYGKNFMSMHISDQHPGKHKKMMLFKFSLPDAKHMDDIVRLVALIPYYIDLVGRYRLSSQARNKTESGRQKAAEEAYKELHNARQEALQKKKAEKKKMMEEAEAKMSAEVIRKKEAKERARQVKKAVPKMKMSRSH

SEQ ID NO: 5591 - DNA, 1497 bp, Arabidopsis thaliana
gggagagaaacgagagttgttcgtcttcttccatggtcattgaaattcaaacacacgcaagcatcagagaagaggactgattcgcgacttcgattatgaggccgaacattgttaccgaggctggggttcaaactcgagttggacagtggtggaatgccatacctttcctcacgtcatcggtggtggtagtttgtggggtcatttacctgatatgcctcttaactggatatgacactttttatgaagtatgcttcttaccctcggcaatcatatcgaggttccaagtttataggttttatacagccattattttccatggatcactgcttcatgttctgttcaacatgatggcattggttcctatgggctctgagctggagagaatcatgggatctgtccgtttgctttacctaacagttttgctggcaacgaccaatgccgtattgcatcttcttatagcatccttggcgggatataatcccttctaccaatatgatcatctcatgaatgaatgcgccattggattttctggaatcttgttttctatgattgtcatagagacaagtctcagtggagttacctctagaagtgtgtttggtctcttcaacgttcccgctaaactgtatccgtggatcttactaatagtattccagcttctcatgacaaatgtttcactgcttgggcatctatgcggcatcctgtctggattttcatattcttatggcctcttcaatttcttgatgcctggctcttcattttttaccaccattgagtcagcctcctggatgtctagcttcattaggcgacccaagttcattatgtgtactggcgggaatccttccagctatattcccacttattctgcacaaaacacaacatccagtggtttctctacaggaaatgcttggagatccttgtcttcatggttgccacagagggaagcatctaatcagtcttctgaggacagtagatttccggggagaggtagaactcttagcactgcccgagatcctactgctccagctggagaaacagacccaaacctccatgctagactgctggaagatagcagctctccagaccgcctttctgatgcaactgtcaacaccgtggcagattcaagacaagcgccaatagctaatgcagcagtcctgccccaatcccagggtcgtgttgctgcttccgaagaacaaatccagaaactcgtagccatgggctttgacaggacacaagtggaagtggcgcttgctgctgccgacgatgatctcaccgtagcagtggagatcctaatgagccaacaggcttaacaccaacaactcgcaaagtactgttttggcttgtattgtaacgtttgtttctcattctgtcttttacttgcatttagaaactgtatagcgtctgttttctttaaggaggttctttaaccagacgatcaaaccgattttccggtttagaatctaatacaaacgaaagatcagttgaaattttctttttttg

SEQ ID NO: 5592 - protein, 403 aa, Arabidopsis thaliana
MRPNIVTEAGVQTRVGQWWNAIPFLTSSVVVVCGVIYLICLLTGYDTFYEVCFLPSAIISRFQVYRFYTAIIFHGSLLHVLFNMMALVPMGSELERIMGSVRLLYLTVLLATTNAVLHLLIASLAGYNPFYQYDHLMNECAIGFSGILFSMIVIETSLSGVTSRSVFGLFNVPAKLYPWILLIVFQLLMTNVSLLGHLCGILSGFSYSYGLFNFLMPGSSFFTTIESASWMSSFIRRPKFIMCTGGNPSSYIPTYSAQNTTSSGFSTGNAWRSLSSWLPQREASNQSSEDSRFPGRGRTLSTARDPTAPAGETDPNLHARLLEDSSSPDRLSDATVNTVADSRQAPIANAAVLPQSQGRVAASEEQIQKLVAMGFDRTQVEVALAAADDDLTVAVEILMSQQA

SEQ ID NO: 5593 - protein, 320 aa, Arabidopsis thaliana
MMALVPMGSELERIMGSVRLLYLTVLLATTNAVLHLLIASLAGYNPFYQYDHLMNECAIGFSGILFSMIVIETSLSGVTSRSVFGLFNVPAKLYPWILLIVFQLLMTNVSLLGHLCGILSGFSYSYGLFNFLMPGSSFFTTIESASWMSSFIRRPKFIMCTGGNPSSYIPTYSAQNTTSSGFSTGNAWRSLSSWLPQREASNQSSEDSRFPGRGRTLSTARDPTAPAGETDPNLHARLLEDSSSPDRLSDATVNTVADSRQAPIANAAVLPQSQGRVAASEEQIQKLVAMGFDRTQVEVALAAADDDLTVAVEILMSQQA

SEQ ID NO: 5594 - protein, 319 aa, Arabidopsis thaliana
MALVPMGSELERIMGSVRLLYLTVLLATTNAVLHLLIASLAGYNPFYQYDHLMNECAIGFSGILFSMIVIETSLSGVTSRSVFGLFNVPAKLYPWILLIVFQLLMTNVSLLGHLCGILSGFSYSYGLFNFLMPGSSFFTTIESASWMSSFIRRPKFIMCTGGNPSSYIPTYSAQNTTSSGFSTGNAWRSLSSWLPQREASNQSSEDSRFPGRGRTLSTARDPTAPAGETDPNLHARLLEDSSSPDRLSDATVNTVADSRQAPIANAAVLPQSQGRVAASEEQIQKLVAMGFDRTQVEVALAAADDDLTVAVEILMSQQA

SEQ ID NO: 5595 - DNA, 1053 bp, Arabidopsis thaliana
accttcattcctctcttcttaactaacatccaatctctctcattcgttcccatttttttttgttataaaaaaaaaactaacgagaaaaactgaaagatctcagcaagacaacaacaatcacaaaccctccttcagattctttgttttgctatttttctaaagaacatagaaaaatgtcacttgttgtttgtcaacctcaaataaacgagagtttctatcaaaaagatgacatgggtgggttgagtttcctacaatctatgtccgatatcacttccattgcccaaaccaaagaggataaagcttatgttcacccgatggagaaacgctctgtttctaaactgaacgagaaaagcttggagatgtgcactgagagtctcggaaccgaaacaggaagcgagagtggtgacgagttgtcattgcttgcgtttgaagcaaccactactcctagggctcctcctcgtcaactgaaacctcaagaagatactaacttgccggacaagacaccgccgatgagtcgcaacaacagtttcccaccgccgataaagttcgttgaagactcaaagtataatcgtatggtgagatggttaggagaagatggtcgaattgtagttcaagcaattagggtttcgtctccgcctagttgctttgtatcagaacgtggtgaaggaaggcttcgtctcattttaacgtcggaaagttctcttcttagtcacaatcacgaggaggaggaagaagaagaaacagaggagggcatcgacgaggaaactagtgagaacttggagggtaaaagtggaaataaaaagtttagcagattcagcagaagatgcaaggagaatggtcgtgagcctaaaccaatgctcacttggaagcagcagcagttttgggtcgctacttaaacttaattcggctaattaatgtgggttttattttagtttatctgtataatatgtctatatgttatcttgtcttttctatttttagtacgatttcttgaggagactagtaatgttttatagttctattaaatgtattaatgttaaatggacttattat

SEQ ID NO: 5596 - protein, 240 aa, Arabidopsis thaliana
MSLVVCQPQINESFYQKDDMGGLSFLQSMSDITSIAQTKEDKAYVHPMEKRSVSKLNEKSLEMCTESLGTETGSESGDELSLLAFEATTTPRAPPRQLKPQEDTNLPDKTPPMSRNNSFPPPIKFVEDSKYNRMVRWLGEDGRIVVQAIRVSSPPSCFVSERGEGRLRLILTSESSLLSHNHEEEEEEETEEGIDEETSENLEGKSGNKKFSRFSRRCKENGREPKPMLTWKQQQFWVAT

SEQ ID NO: 5597 - protein, 221 aa, Arabidopsis thaliana
MGGLSFLQSMSDITSIAQTKEDKAYVHPMEKRSVSKLNEKSLEMCTESLGTETGSESGDELSLLAFEATTTPRAPPRQLKPQEDTNLPDKTPPMSRNNSFPPPIKFVEDSKYNRMVRWLGEDGRIVVQAIRVSSPPSCFVSERGEGRLRLILTSESSLLSHNHEEEEEEETEEGIDEETSENLEGKSGNKKFSRFSRRCKENGREPKPMLTWKQQQFWVAT

SEQ ID NO: 5598 - protein, 212 aa, Arabidopsis thaliana
MSDITSIAQTKEDKAYVHPMEKRSVSKLNEKSLEMCTESLGTETGSESGDELSLLAFEATTTPRAPPRQLKPQEDTNLPDKTPPMSRNNSFPPPIKFVEDSKYNRMVRWLGEDGRIVVQAIRVSSPPSCFVSERGEGRLRLILTSESSLLSHNHEEEEEEETEEGIDEETSENLEGKSGNKKFSRFSRRCKENGREPKPMLTWKQQQFWVAT

SEQ ID NO: 5599 - DNA, 1763 bp, Arabidopsis thaliana
aaaaaaaaaaaagataaatccagaaaaaaatttacaaaataaaaaaataaaaatctctatcttcttcttcgtctcttctcatcctcctctcaagctccaatggcgagagttctagtctcgtctccatcttcattcttcggttcaccgttgattaaaccgtcgtcatctctccgtcacagtggagtaggaggaggaggaaccgctcaatttcttccataccggagtaataataacaaactcttcactacttcaaccaccgtacgattcagcttaaacgagattcctcctttccatggcttggattcatctgtagacatcggagcgattttcaccagagctgaatctcttctctatacaatagctgacgccgccgttgttggtgctgattccgtcgtaactactgattcatccgccgtgcagaagagtggtggttggtttggttttatctccgatgctatggaattggttcttaagattttgaaggatggattatcagcggttcatgtaccttatgcttatggatttgcgattatcttgcttacgattatcgtcaaagcagcgacgtatcctttgactaagcaacaggttgaatcaacactagcgatgcaaaatcttcaaccgaaaatcaaagcgattcaacaacgttacgcaggaaatcaggagaggatacaactagagacatcgcgattgtataaacaagctggtgttaatccgttggcaggttgcttaccaactttagcaaccataccagtttggattggtttataccaagctctctctaacgtggccaacgagggattgtttacagaaggtttcttttggattccatctctgggtggaccaacatctatagctgctcggcagagtggatccggcatttcgtggctttttccgtttgtggacgggcatccaccattgggatggtatgacactgtagcttatcttgttctacctgttctacttattgcctcccagtatgtgtcaatggaaattatgaagcctcctcaaactgatgatcctgcacagaagaatacgcttcttgttttcaagtttcttccactcatgatcggttactttgcattgtctgtcccatcaggactatctatttactggctcacaaataatgtacttagtaccgcccaacaagtatatctgcgtaaactaggtggtgcaaagccaaatatggatgaaaacgcaagcaaaataataagtgcgggacgagcaaagagatctattgctcagcctgacgatgctggcgaaagatttagacaattaaaagagcaagagaagcgcagcaagaagaacaaggcggttgcgaaagatacagttgaattggtagaagaatctcagtctgaatcagaagaagggtctgatgatgaggaagaagaggctcgtgaaggagcgttagcttcgagcacaacaagcaagccgcttcctgaggttggccaacgaagaagcaaaagatcgaagcggaaacgcactgtatagaaccaaagcaaacgaaattgcaagtaaggaagagaaaagagagagatttgaatcttgttccttagtttgatcttttgatatatatttgcatacaccatgtccggtaattatctaatattagggcacaaaaaggtcattctaaagttaaaagcagtagttgatcaaagtaaattgtttatgtgattcatcttattataaatgtattaacgtaaatgtgtgtactattatgacttttcaacatgcccgcttcagttttgttagcatttcgttgttgt

SEQ ID NO: 5600 - protein, 462 aa, Arabidopsis thaliana
MARVLVSSPSSFFGSPLIKPSSSLRHSGVGGGGTAQFLPYRSNNNKLFTTSTTVRFSLNEIPPFHGLDSSVDIGAIFTRAESLLYTIADAAVVGADSVVTTDSSAVQKSGGWFGFISDAMELVLKILKDGLSAVHVPYAYGFAIILLTIIVKAATYPLTKQQVESTLAMQNLQPKIKAIQQRYAGNQERIQLETSRLYKQAGVNPLAGCLPTLATIPVWIGLYQALSNVANEGLFTEGFFWIPSLGGPTSIAARQSGSGISWLFPFVDGHPPLGWYDTVAYLVLPVLLIASQYVSMEIMKPPQTDDPAQKNTLLVFKFLPLMIGYFALSVPSGLSIYWLTNNVLSTAQQVYLRKLGGAKPNMDENASKIISAGRAKRSIAQPDDAGERFRQLKEQEKRSKKNKAVAKDTVELVEESQSESEEGSDDEEEEAREGALASSTTSKPLPEVGQRRSKRSKRKRTV

SEQ ID NO: 5601 - protein, 343 aa, Arabidopsis thaliana
MELVLKILKDGLSAVHVPYAYGFAIILLTIIVKAATYPLTKQQVESTLAMQNLQPKIKAIQQRYAGNQERIQLETSRLYKQAGVNPLAGCLPTLATIPVWIGLYQALSNVANEGLFTEGFFWIPSLGGPTSIAARQSGSGISWLFPFVDGHPPLGWYDTVAYLVLPVLLIASQYVSMEIMKPPQTDDPAQKNTLLVFKFLPLMIGYFALSVPSGLSIYWLTNNVLSTAQQVYLRKLGGAKPNMDENASKIISAGRAKRSIAQPDDAGERFRQLKEQEKRSKKNKAVAKDTVELVEESQSESEEGSDDEEEEAREGALASSTTSKPLPEVGQRRSKRSKRKRTV

SEQ ID NO: 5602 - protein, 294 aa, Arabidopsis thaliana
MQNLQPKIKAIQQRYAGNQERIQLETSRLYKQAGVNPLAGCLPTLATIPVWIGLYQALSNVANEGLFTEGFFWIPSLGGPTSIAARQSGSGISWLFPFVDGHPPLGWYDTVAYLVLPVLLIASQYVSMEIMKPPQTDDPAQKNTLLVFKFLPLMIGYFALSVPSGLSIYWLTNNVLSTAQQVYLRKLGGAKPNMDENASKIISAGRAKRSIAQPDDAGERFRQLKEQEKRSKKNKAVAKDTVELVEESQSESEEGSDDEEEEAREGALASSTTSKPLPEVGQRRSKRSKRKRTV

SEQ ID NO: 5603 - DNA, 689 bp, Arabidopsis thaliana
gagagagagagacaaagagagatctgatcctttgaagaaacaacaccaaaaaaaaaaaaaaaagaatggcatcagcggatgaaaaggtggtggaagagaaggcttcggtgatttcaagcttgttggacaaagccaaaggtttctttgcggagaagctggcgaatattccgacgccggaagcaaccgtggacgacgttgatttcaaaggcgtgacacgtgatggagtagattatcacgccaaggtctccgtcaagaatccttactctcaatccatccctatctgccagatctcttacatcctcaagagtgccacaaggacgatcgcgtcaggcacgataccggacccgggttcgttggttgggagcggcacgacggttctggacgtaccggttaaggtggcttatagcatagcggttagtctgatgaaggatatgtgtacggactgggacattgactatcaactagacattgggctaaccttcgacattcctgttgttggtgatatcaccattcctgtctctactcagggagagatcaagctcccttcccttcgcgacttcttttaattaccttatttcaaatatagttttcttaaatcataatctaattttcaataatgtacgatccataaacatagacgatcggagattaatacatttctggaatcctttttttattttgttgattcc

SEQ ID NO: 5604 - protein, 166 aa, Arabidopsis thaliana; identical to SEQ ID NO: 2996

SEQ ID NO: 5605 - DNA, 769 bp, Arabidopsis thaliana
atcaagtaaagaaacaaacaaacaaacaaaaaacacacttcactcgctacacaaggaagagagatggcgacgtcaggaacatatgtgacggaggttccattgaaaggatcggctgagaaacactacaagcggtggaggagtgagaaccacctcttccccgacgccatcggccaccacatccaaggtgtcaccatccacgacggtgaatgggactcccatggagccatcaagatttggaactacacatgcgatgggaaaccggaggtgttcaaggagaggagagagatagacgatgagaatatggcggtaacgttcagaggactcgaaggtcacgtgatggagcagcttaaagtgtatgacgtcatctttcagttcattcaaaagtcacctgatgatatcatctgtaagatcactatgatctgggagaagcaaaacgatgacatgcctgagcccagcaactacatgaagttcgtcaagagcctcgctgctgacatggatgatcacgttctcaaagcctaaatatccctttcacatcaacccatcatcacctaatatcatgatcatcatcaccctcatacgtacattgctccttttgtgtgtgtgtgtgtgtatcgtttttatggtgttttcaatataataaatgggggtttacatgtatggtttcatctactataatatgctttgatgttgtttattatggttgaggtttcatgtatgctcatctacgcatgtatccttgttaattaatgattttcaagagttatcaatc

SEQ ID NO: 5606 - protein, 151 aa, Arabidopsis thaliana
MATSGTYVTEVPLKGSAEKHYKRWRSENHLFPDAIGHHIQGVTIHDGEWDSHGAIKIWNYTCDGKPEVFKERREIDDENMAVTFRGLEGHVMEQLKVYDVIFQFIQKSPDDIICKITMIWEKQNDDMPEPSNYMKFVKSLAADMDDHVLKA

SEQ ID NO: 5607 - DNA, 716 bp, Arabidopsis thaliana
gatttctgattcttccatcgtttctctcttgcaaaactctgtgtgtaggcggaactacagaaccaagagcctctttctaatcggagttactttaatccccttgaaccatgtcaaagagaaagactaaagagccaaaggtcgatgttgtgactcttggaccatctgttcgtgagggagagcaagttttcggtgttgtccacatctttgcttcattcaacgacactttcattcatgttactgatttgtctggtcgtgaaactcttgtccgtatcaccggtggaatgaaggtgaaagctgatagagatgagtcctcaccttacgcagctatgcttgcagcacaggatgttgctcagcgatgcaaggaacttggtatcactgccatgcatgtgaagctccgtgccacaggtggaaacaagaccaagacacctggtcctggagcacagtctgcccttagagcccttgctcgttccggcatgaaaataggccgtattgaggatgttactcccatcccaacagacagtacccgcagaaagggtggtagaagaggaagaaggctctgagtttttctcgcattgtgggatgttttctatttagctccatgtgtttcattttgtctgaaccatttttgtttgtgttagattgttgaagagctttggagtttaacactttttgttaatttaatcaacatttttctactttgatatgtgagtttggcc

SEQ ID NO: 5608 - protein, 150 aa, Arabidopsis thaliana
MSKRKTKEPKVDVVTLGPSVREGEQVFGVVHIFASFNDTFIHVTDLSGRETLVRITGGMKVKADRDESSPYAAMLAAQDVAQRCKELGITAMHVKLRATGGNKTKTPGPGAQSALRALARSGMKIGRIEDVTPIPTDSTRRKGGRRGRRL

SEQ ID NO: 5609 - protein, 92 aa, Arabidopsis thaliana
MKVKADRDESSPYAAMLAAQDVAQRCKELGITAMHVKLRATGGNKTKTPGPGAQSALRALARSGMKIGRIEDVTPIPTDSTRRKGGRRGRRL

SEQ ID NO: 5610 - protein, 77 aa, Arabidopsis thaliana
MLAAQDVAQRCKELGITAMHVKLRATGGNKTKTPGPGAQSALRALARSGMKIGRIEDVTPIPTDSTRRKGGRRGRRL

SEQ ID NO: 5611 - DNA, 1726 bp, Arabidopsis thaliana
acaagaagaatattcacagagaagagagagcgataataatggcgtttaagggtttcgcgtgtttttcgattcttttgttgttgtctctattcgtttcctctatacgaagcgaggagacgaaggaatttgtcttgactctcgatcactctaacttcaccgaaaccatctccaagcacgatttcatcgtcgtcgagttctacgccccttggtgtggtcactgccagaagcttgctcctgagtacgagaaggctgcatcagagttgagtagtcataaccctcctcttgctctcgccaagatcgatgctagtgaagaagcaaacaaagaatttgctaatgagtacaagattcagggtttccccactcttaagattttgagaaatggagggaagtcggttcaagattacaacggacctcgtgaagctgagggtattgtcacttatttgaagaagcaaagtggtcctgcttctgttgaaattaagtcagctgattctgccactgaggttgttggtgaaaagaatgttgttgctgttggagtgttccctaaattatccggggatgagtttgattctttcatggcccttgctgagaaattgcgtgctgactatgatttcgcacacactttggatgctaagtttcttcctcgtggagagtctgtggaaggacctgcagtgaggctgttcaagccttttgatgaattgtttgttgactccaaggacttcaatggggaagctctagagaaatttgtcaaagaatcaagtatcccacttgtcaccgtctttgacagtgatccaaacaaccacccttatgttgccaaattctttgaaagccctgccactaaggcgatgatgttcgttaacttcactggagcaacagctgaagctctaaaatcaaagtaccgtgaagtagctacatccaacaaagatcaaagtcttgccttccttgttggtgatgcagagagcagccaaggcgctttccagtactttggactcgaagagagccaagttcccctcatcatcatccagaccccagataacaagaagtatttgaaagtcaacgttgaggttgaccagattgaatcatggttcaaggacttccaggacggaaaagttgctgtccacaaaaaatcccaacctattccagctgagaacaacgaacctgtgaaggttgttgttgccgagagccttgacgacatagttttcaagtctggaaagaatgtcttgattgagttctatgcaccatggtgtggacattgtcaaaaacttgctccaatcttggacgaagtggctttgtcattccagaacgacccaagtgtgatcatagcaaaattggacgcaaccgcaaatgatatcccaagtgataccttcgatgtgaaaggattcccgaccatttacttcaggtcagcgagcggaaatgttgtagtgtacgaaggagacaggacaaaggaagacttcataaacttcgttgagaagaacagtgagaagaagccaacttctcatggagaagagtctaccaagagtgaggaacctaagaagaccgaggaaacggccgcaaaggacgagctgtagaaatctcatgagttttgtttcggaatttgagtaggagcgtttctcttcttcaccatatccaacagaatcttcttttttctttagcagttttacagttttatcttttttgctctcttgttcgaacccaaaattatccccattaataaaaagttaaacctaat

SEQ ID NO: 5612 - protein, 520 aa, Arabidopsis thaliana
KKNIHREERAIIMAFKGFACFSILLLLSLFVSSIRSEETKEFVLTLDHSNFTETISKHDFIVVEFYAPWCGHCQKLAPEYEKAASELSSHNPPLALAKIDASEEANKEFANEYKIQGFPTLKILRNGGKSVQDYNGPREAEGIVTYLKKQSGPASVEIKSADSATEVVGEKNVVAVGVFPKLSGDEFDSFMALAEKLRADYDFAHTLDAKFLPRGESVEGPAVRLFKPFDELFVDSKDFNGEALEKFVKESSIPLVTVFDSDPNNHPYVAKFFESPATKAMMFVNFTGATAEALKSKYREVATSNKDQSLAFLVGDAESSQGAFQYFGLEESQVPLIIIQTPDNKKYLKVNVEVDQIESWFKDFQDGKVAVHKKSQPIPAENNEPVKVVVAESLDDIVFKSGKNVLIEFYAPWCGHCQKLAPILDEVALSFQNDPSVIIAKLDATANDIPSDTFDVKGFPTIYFRSASGNVVVYEGDRTKEDFINFVEKNSEKKPTSHGEESTKSEEPKKTEETAAKDEL

SEQ ID NO: 5613 - protein, 508 aa, Arabidopsis thaliana
MAFKGFACFSILLLLSLFVSSIRSEETKEFVLTLDHSNFTETISKHDFIVVEFYAPWCGHCQKLAPEYEKAASELSSHNPPLALAKIDASEEANKEFANEYKIQGFPTLKILRNGGKSVQDYNGPREAEGIVTYLKKQSGPASVEIKSADSATEVVGEKNVVAVGVFPKLSGDEFDSFMALAEKLRADYDFAHTLDAKFLPRGESVEGPAVRLFKPFDELFVDSKDFNGEALEKFVKESSIPLVTVFDSDPNNHPYVAKFFESPATKAMMFVNFTGATAEALKSKYREVATSNKDQSLAFLVGDAESSQGAFQYFGLEESQVPLIIIQTPDNKKYLKVNVEVDQIESWFKDFQDGKVAVHKKSQPIPAENNEPVKVVVAESLDDIVFKSGKNVLIEFYAPWCGHCQKLAPILDEVALSFQNDPSVIIAKLDATANDIPSDTFDVKGFPTIYFRSASGNVVVYEGDRTKEDFINFVEKNSEKKPTSHGEESTKSEEPKKTEETAAKDEL

SEQ ID NO: 5614 - protein, 330 aa, Arabidopsis thaliana
MALAEKLRADYDFAHTLDAKFLPRGESVEGPAVRLFKPFDELFVDSKDFNGEALEKFVKESSIPLVTVFDSDPNNHPYVAKFFESPATKAMMFVNFTGATAEALKSKYREVATSNKDQSLAFLVGDAESSQGAFQYFGLEESQVPLIIIQTPDNKKYLKVNVEVDQIESWFKDFQDGKVAVHKKSQPIPAENNEPVKVVVAESLDDIVFKSGKNVLIEFYAPWCGHCQKLAPILDEVALSFQNDPSVIIAKLDATANDIPSDTFDVKGFPTIYFRSASGNVVVYEGDRTKEDFINFVEKNSEKKPTSHGEESTKSEEPKKTEETAAKDEL

SEQ ID NO: 5615 - DNA, 1552 bp, Arabidopsis thaliana
gaatcaaaacaaaatcaagggtcttgtctttttttttttttttggtgtgaatcaaaggtcttgtctttgcaagtaaattcgttcctaatgaactgtgtgagtcgtttaaagtgtttgataagcaaagcacgaagctttgcacggcttggtggtgaatccactctctctcaaccgccgtctctcgcctccgccgcgttttcttcatccgccgtcatgaatggtctcgaaactcacaacacaaggctctgtatcgtaggaagtggcccagcggcacacacggcggcgatttacgcagctagggctgaacttaaacctcttctcttcgaaggatggatggctaacgacatcgctcccggtggtcaactaacaaccaccaccgacgtcgagaatttccccggatttccagaaggtattctcggagtagagctcactgacaaattccgtaaacaatcggagcgattcggtactacgatatttacagagacggtgacgaaagtcgatttctcttcgaaaccgtttaagctattcacagattcaaaagccattctcgctgacgctgtgattctcgctactggagctgtggctaagcggcttagcttcgttggatctggtgaagcttctggaggtttctggaaccgtggaatctccgcttgtgctgtttgcgacggagctgctccgatattccgtaacaaacctcttgcggtgatcggtggaggcgattcagcaatggaagaagcaaactttcttacaaaatatggatctaaagtgtatataatccataggagagatgcttttagagcgtctaagattatgcagcagcgagctttgtctaatcctaagattgatgtgatttggaactcgtctgttgtggaagcttatggagatggagaaagagatgtgcttggaggattgaaagtgaagaatgtggttaccggagatgtttctgatttaaaagtttctggattgttctttgctattggtcatgagccagctaccaagtttttggatggtggtgttgagttagattcggatggttatgttgtcacgaagcctggtactacacagactagcgttcccggagttttcgctgcgggtgatgttcaggataagaagtataggcaagccatcactgctgcaggaactgggtgcatggcagctttggatgcagagcattacttacaagagattggatctcagcaaggtaagagtgattgaggaaattgttggaaggctcaggtcattgagttattgttgattgatccctgattcagttagacattgatggaccagaatgagacttgatctttatcatagaacaagttaagatacattgatttgtttattccttaatattgcagttggaattgagtacgggtattgttcaaagttgtagctctaatggtaaaactagctacgacaaaagtcctcttaaaatatgagttttagatgatgccttaacatttcatatattcagtgaacatgatttatccaataatgtattatgtattcttataaattagtataatataaaaatgggtttccagaaatcttt

SEQ ID NO: 5616 - protein, 404 aa, Arabidopsis thaliana
ESKQNQGSCLFFFFWCESKVLSLQVNSFLMNCVSRLKCLISKARSFARLGGESTLSQPPSLASAAFSSSAVMNGLETHNTRLCIVGSGPAAHTAAIYAARAELKPLLFEGWMANDIAPGGQLTTTTDVENFPGFPEGILGVELTDKFRKQSERFGTTIFTETVTKVDFSSKPFKLFTDSKAILADAVILATGAVAKRLSFVGSGEASGGFWNRGISACAVCDGAAPIFRNKPLAVIGGGDSAMEEANFLTKYGSKVYIIHRRDAFRASKIMQQRALSNPKIDVIWNSSVVEAYGDGERDVLGGLKVKNVVTGDVSDLKVSGLFFAIGHEPATKFLDGGVELDSDGYVVTKPGTTQTSVPGVFAAGDVQDKKYRQAITAAGTGCMAALDAEHYLQEIGSQQGKSD

SEQ ID NO: 5617 - protein, 375 aa, Arabidopsis thaliana
MNCVSRLKCLISKARSFARLGGESTLSQPPSLASAAFSSSAVMNGLETHNTRLCIVGSGPAAHTAAIYAARAELKPLLFEGWMANDIAPGGQLTTTTDVENFPGFPEGILGVELTDKFRKQSERFGTTIFTETVTKVDFSSKPFKLFTDSKAILADAVILATGAVAKRLSFVGSGEASGGFWNRGISACAVCDGAAPIFRNKPLAVIGGGDSAMEEANFLTKYGSKVYIIHRRDAFRASKIMQQRALSNPKIDVIWNSSVVEAYGDGERDVLGGLKVKNVVTGDVSDLKVSGLFFAIGHEPATKFLDGGVELDSDGYVVTKPGTTQTSVPGVFAAGDVQDKKYRQAITAAGTGCMAALDAEHYLQEIGSQQGKSD

SEQ ID NO: 5618 - protein, 333 aa, Arabidopsis thaliana
MNGLETHNTRLCIVGSGPAAHTAAIYAARAELKPLLFEGWMANDIAPGGQLTTTTDVENFPGFPEGILGVELTDKFRKQSERFGTTIFTETVTKVDFSSKPFKLFTDSKAILADAVILATGAVAKRLSFVGSGEASGGFWNRGISACAVCDGAAPIFRNKPLAVIGGGDSAMEEANFLTKYGSKVYIIHRRDAFRASKIMQQRALSNPKIDVIWNSSVVEAYGDGERDVLGGLKVKNVVTGDVSDLKVSGLFFAIGHEPATKFLDGGVELDSDGYVVTKPGTTQTSVPGVFAAGDVQDKKYRQAITAAGTGCMAALDAEHYLQEIGSQQGKSD

SEQ ID NO: 5619 - DNA, 1264 bp, Arabidopsis thaliana
aacactttgtcttttaccacttcttcgatacttcccaagttcaccgcaatggccaccgcttcaatcttccccgccgccgtgaccgtcaccagagatgtgacatctcttcttaatccatcttctctgataatcggaaaatcattatctccttcaaagttcagctcaatcaaatcctccgtttcattttcccgcaaaaccctaactccaattcgatactcttcatctcccgccgatcactcacccgccaccgccgtggaagcgatcacgaatcgatccaaaacctccttgaaatctcgtctccgtggaggagaaactctctacggtctctttttactctccttctcgccgacattagccgagatcgctgctcacgccggttacgattacgtcgtcgttgatatggaacatggtcccggaggtataccggaagctttggattgtattcgagctcttaacgccgccggaacatcagccattctccgattaccggaaaactcaccaacctgggctaaaaaagctctagatctaggtccacaaggaatcatgttcccaatgatcgaatctcgtaaagacgctaccaaagcggtgtcgtattgccggtttcctcccgacggtatccgtggatcggcgcacacggtggtgagagcttctaactacggaatcgatgaagggtatttaagtaattacgcagaggagattctgattatgtgccaggtggaatcaggtgaaggagtgaagaaagctgatgaaatcgcagccgttgatggtgttgactgtgtgcaaatgggaccgttggatcttagtgcgagtttagggtatttgtgggatcctggacataagaaagtgagagagatgatgaagaaggctgagaaatctgtgctgaccactgatccggcgaaaggcggggcttacttgtcgggtttcgcgatgccgcacgacggagctggtgagattcggggacgtggttaccatatggtcgccggagctgttgatgttggattgtttaggaatgctgctgttgaagatgtgaggagattcaagatgggtttggtcaatgaatcggacagtgaggattcgtcggaacatgataaagatgttgatgatgagaagtactggagcgaataagcaaaatttcaaatttcgttaatgttgtttccttttaactttccataaagatttacaaaatcatgatgccacaaatgtttcaaaaacgaaagcaacatgaatccaacaaagctgagacatttggctttgttttttttgg

SEQ ID NO: 5620 - protein, 374 aa, Arabidopsis thaliana
NTLSFTTSSILPKFTAMATASIFPAAVTVTRDVTSLLNPSSLIIGKSLSPSKFSSIKSSVSFSRKTLTPIRYSSSPADHSPATAVEAITNRSKTSLKSRLRGGETLYGLFLLSFSPTLAEIAAHAGYDYVVVDMEHGPGGIPEALDCIRALNAAGTSAILRLPENSPTWAKKALDLGPQGIMFPMIESRKDATKAVSYCRFPPDGIRGSAHTVVRASNYGIDEGYLSNYAEEILIMCQVESGEGVKKADEIAAVDGVDCVQMGPLDLSASLGYLWDPGHKKVREMMKKAEKSVLTTDPAKGGAYLSGFAMPHDGAGEIRGRGYHMVAGAVDVGLFRNAAVEDVRRFKMGLVNESDSEDSSEHDKDVDDEKYWSE

SEQ ID NO: 5621 - protein, 358 aa, Arabidopsis thaliana
MATASIFPAAVTVTRDVTSLLNPSSLIIGKSLSPSKFSSIKSSVSFSRKTLTPIRYSSSPADHSPATAVEAITNRSKTSLKSRLRGGETLYGLFLLSFSPTLAEIAAHAGYDYVVVDMEHGPGGIPEALDCIRALNAAGTSAILRLPENSPTWAKKALDLGPQGIMFPMIESRKDATKAVSYCRFPPDGIRGSAHTVVRASNYGIDEGYLSNYAEEILIMCQVESGEGVKKADEIAAVDGVDCVQMGPLDLSASLGYLWDPGHKKVREMMKKAEKSVLTTDPAKGGAYLSGFAMPHDGAGEIRGRGYHMVAGAVDVGLFRNAAVEDVRRFKMGLVNESDSEDSSEHDKDVDDEKYWSE

SEQ ID NO: 5622 - protein, 241 aa, Arabidopsis thaliana
MEHGPGGIPEALDCIRALNAAGTSAILRLPENSPTWAKKALDLGPQGIMFPMIESRKDATKAVSYCRFPPDGIRGSAHTVVRASNYGIDEGYLSNYAEEILIMCQVESGEGVKKADEIAAVDGVDCVQMGPLDLSASLGYLWDPGHKKVREMMKKAEKSVLTTDPAKGGAYLSGFAMPHDGAGEIRGRGYHMVAGAVDVGLFRNAAVEDVRRFKMGLVNESDSEDSSEHDKDVDDEKYWSE

SEQ ID NO: 5623 - DNA, 618 bp, Arabidopsis thaliana
aagtcatcgtcttcaattggcatctgaagaagaagaagaagaagaaaggagccatgacaatgtttagatctatctccatggtaatgctgctcgtcgcactagttacattcatttctatggtttcttctgctgcttcgtccccagaagccgactttgttaagaagactatctcttcccataagatcgtcattttctccaaatcctactgcccctactgcaagaaagctaaatcagtgttcagagagctggatcaagttccttatgttgtcgagcttgatgaaagagaagatggttggagcatccagactgcacttggagagattgttggaaggcgaacagtaccgcaagtcttcattaacggaaaacatctcggaggatcagatgataccgtagatgcgtatgagagcggtgaactcgccaagcttcttggtgtttccgggaacaaagaagctgaactctaggttatatatagttggaagaattgataacactctctgtgatgcttaggtgtaagcaattcaatttccatttgtattgtgttctgcagcttgatcatgaccttgtgacagcttgatcttgccttttaaacgtatcttatcaaagaccacattctgagtt

SEQ ID NO: 5624 - protein, 152 aa, Arabidopsis thaliana
VIVFNWHLKKKKKKKGAMTMFRSISMVMLLVALVTFISMVSSAASSPEADFVKKTISSHKIVIFSKSYCPYCKKAKSVFRELDQVPYVVELDEREDGWSIQTALGEIVGRRTVPQVFINGKHLGGSDDTVDAYESGELAKLLGVSGNKEAEL

SEQ ID NO: 5625 - protein, 135 aa, Arabidopsis thaliana
MTMFRSISMVMLLVALVTFISMVSSAASSPEADFVKKTISSHKIVIFSKSYCPYCKKAKSVFRELDQVPYVVELDEREDGWSIQTALGEIVGRRTVPQVFINGKHLGGSDDTVDAYESGELAKLLGVSGNKEAEL

SEQ ID NO: 5626 - protein, 133 aa, Arabidopsis thaliana
MFRSISMVMLLVALVTFISMVSSAASSPEADFVKKTISSHKIVIFSKSYCPYCKKAKSVFRELDQVPYVVELDEREDGWSIQTALGEIVGRRTVPQVFINGKHLGGSDDTVDAYESGELAKLLGVSGNKEAEL

SEQ ID NO: 5627 - DNA, 1353 bp, Arabidopsis thaliana
ctaacttctctgttcatctttttctctctttatttataaatttatctgcatagtactctctgaatctatatcttcaaaaaaaaaaaacgtccaagatcaaatcaagaaacccattaaaaaaaaaaatcaggttttggtttcagttttaagggtttaaggtttcttggggaagaaacgatggagactttttgtgggtttcaaaaggaggaagagcagatggatttacctcctgggttcaggtttcatccaacagatgaagaactcataactcactatctccataagaaggttcttgacaccagcttctcagctaaagctatcggtgaagttgatttaaacaaatcagagccatgggagttaccatggatggcaaaaatgggtgagaaagaatggtattttttctgtgtgagagacagaaagtatcccaccggtttaagaactaaccgagcaactgaagccggttattggaaggcgaccgggaaggataaagagatataccgaggcaaatcacttgttgggatgaagaagacacttgttttctatagaggaagagctcctaaaggtcagaaaaccaactgggtgatgcatgagtacaggcttgaaggaaaattctctgcccataacttgccgaaaaccgcaaagaatgaatgggtgatatgcagggtgttccaaaagagtgctggagggaagaagatcccgatttcgagtctaatccgaatcggttcactcggaaccgactttaacccttcgcttttgccctctttaaccgattcttcgccttacaacgataaaaccaaaacagaaccggtctacgtgccctgcttctccaaccaaacggatcaaaaccaaggaaccacactcaattgcttcagcagccctgttcttaactcgatccaagccgacatttttcacaggattccactctatcaaactcagtccctccaggtttctatgaatctacagagcccggttctcacgcaagaacactcagttctacatgctatgatcgagaacaacagaagacaaagtctcaaaacgatgagtgtctcacaagaaaccggagtttcaactgacatgaacactgatatctcatcggattttgaatttggtaagagacggtttgattctcaagaagatccgtcttcctctactggaccggttgatcttgaacctttctggaattactgaagatgattcaagattctcatgtccattaatttactgtggtgtgttaaagtttgtataggctattgtcatatactctcatatcaacttccactatatattataacaatttaaagaaacttaaaaatatgatttgatatatgactaaagtattataatacaattttg

SEQ ID NO: 5628 - protein, 336 aa, Arabidopsis thaliana
METFCGFQKEEEQMDLPPGFRFHPTDEELITHYLHKKVLDTSFSAKAIGEVDLNKSEPWELPWMAKMGEKEWYFFCVRDRKYPTGLRTNRATEAGYWKATGKDKEIYRGKSLVGMKKTLVFYRGRAPKGQKTNWVMHEYRLEGKFSAHNLPKTAKNEWVICRVFQKSAGGKKIPISSLIRIGSLGTDFNPSLLPSLTDSSPYNDKTKTEPVYVPCFSNQTDQNQGTTLNCFSSPVLNSIQADIFHRIPLYQTQSLQVSMNLQSPVLTQEHSVLHAMIENNRRQSLKTMSVSQETGVSTDMNTDISSDFEFGKRRFDSQEDPSSSTGPVDLEPFWNY

SEQ ID NO: 5629 - protein, 323 aa, Arabidopsis thaliana
MDLPPGFRFHPTDEELITHYLHKKVLDTSFSAKAIGEVDLNKSEPWELPWMAKMGEKEWYFFCVRDRKYPTGLRTNRATEAGYWKATGKDKEIYRGKSLVGMKKTLVFYRGRAPKGQKTNWVMHEYRLEGKFSAHNLPKTAKNEWVICRVFQKSAGGKKIPISSLIRIGSLGTDFNPSLLPSLTDSSPYNDKTKTEPVYVPCFSNQTDQNQGTTLNCFSSPVLNSIQADIFHRIPLYQTQSLQVSMNLQSPVLTQEHSVLHAMIENNRRQSLKTMSVSQETGVSTDMNTDISSDFEFGKRRFDSQEDPSSSTGPVDLEPFWNY

SEQ ID NO: 5630 - protein, 273 aa, Arabidopsis thaliana
MAKMGEKEWYFFCVRDRKYPTGLRTNRATEAGYWKATGKDKEIYRGKSLVGMKKTLVFYRGRAPKGQKTNWVMHEYRLEGKFSAHNLPKTAKNEWVICRVFQKSAGGKKIPISSLIRIGSLGTDFNPSLLPSLTDSSPYNDKTKTEPVYVPCFSNQTDQNQGTTLNCFSSPVLNSIQADIFHRIPLYQTQSLQVSMNLQSPVLTQEHSVLHAMIENNRRQSLKTMSVSQETGVSTDMNTDISSDFEFGKRRFDSQEDPSSSTGPVDLEPFWNY

SEQ ID NO: 5631 - DNA, 2261 bp, Arabidopsis thaliana
atggattccgggtcgggtttcgatccggatactggtaataataagggtaatggaagtggtggtggtaatggttatggcgagagaaagtttggtgctttcttcaagagagtggaaccctttttacctaaaaaggatttgaatccgagagacttaagatcttgggcgaagaaaactggttttgtatccgattactctggtgaaaccagcacgagtactcgaaccaagtttggtgaaagctctgattttgatttgccaaaaggtagagatcaagtagtcaccgggtcgtctcacaaaaccgagatcgacccgattttgggacgaaatagacccgaaatcgaacacgtaacgggatctgagcctgtgtctagagaagaagaagagaggagactaaaccggaatgaggcaacgccggagactgagaatgaaggcgggaaaatcaataaggatttggaaaatgggttttattatccaggaggtggtggagaatcatcagaagatggacaatggcctaaaccaattttgatgaagtttggtcttagagataatcctggctttgttccacttatctattacggtctgcaacactatctgtcacttgttggttcacttgtgtttattcctctggtcattgtaccagccatggatggttccgataaagatacagcctcagtgatttcaacaatgctgcttcttactggagttacaactatacttcactgttacttcggtactcggcttccgttggttcaaggaagctcttttgtttacttggccccggttttggttgtcatcaactctgaggagttcagaaacctcactgagcataaatttcgggacacaatgagagaactacagggggctataattgttggttcattattccagtgcatattaggattcagtggtctcatgtctctccttcttagatttattaatcctgtggtagtagccccaaccgtagctgcagtaggattagcattctttagctatggatttccacaagccggcacttgtgttgagatcagcgttcccttaatacttttgcttctcattttcacattgtatctccgcggagtttcactctttgggcatcgcttattccgtatttacgcggtgccactgagtgctctgctcatatggacatatgcattctttttaactgttggtggagcatatgactacagaggctgcaacgctgacataccgagctctaacatattgatagatgaatgtaagaagcatgtgtatactatgaagcattgcagaacagatgcttcaaatgcttggagaactgcttcttgggtcagaatcccttatccatttcaatggggtggactcggtatgtacttgttcctctttgctattcctgtttttctcctaaaggttggaacatatcattctgcatctatgatagtgaatgctaagcgcccgacacggggaattgtcagtagaggtattgcattagaaggcttttgcagtttattagcaggaatctggggttcgggtaccggatcaaccactttaactgaaaatattcatacgatcaacatcactaaggtggctagcagaagagctttggtgatcggagctatgttcttaatagtattgtcatttttaggaaaattaggtgcaattctagcttcaataccacaggctttggctgcttcagtattatgctttatatgggcactgacagtgtctctaggtctatcgaatctacggtatacgcaaacagcaagctttaggaacataaccatagttggagtctcattgtttcttggattatccatccctgcttacttccagcaataccagccgctatccagtctaatactaccgagctattatattccctttggagccgcttcaagcggaccattccaaacgggtatcgagcaacttgattttgcgatgaacgcagtgctatctttgaatatggttgtaacctttctactagctttcatactggacaacactgtacctggtagtaaggaagagagaggagtatatgtgtggacaagagccgaggacatgcagatggaccctgagatgcgagctgattactcattgccaagaaaatttgctcagatttttggttgcagatgttgttaagtagatatttaagctccaatttcagtttttcaatagcttccccacttgttcttaatatatagaagaaaaggttctcatggaaaaagagttgcaggtttgtgggataagaatatcaaatctttctggaacaatatcatagtgatagaccc

SEQ ID NO: 5632 - protein, 703 aa, Arabidopsis thaliana
MDSGSGFDPDTGNNKGNGSGGGNGYGERKFGAFFKRVEPFLPKKDLNPRDLRSWAKKTGFVSDYSGETSTSTRTKFGESSDFDLPKGRDQVVTGSSHKTEIDPILGRNRPEIEHVTGSEPVSREEEERRLNRNEATPETENEGGKINKDLENGFYYPGGGGESSEDGQWPKPILMKFGLRDNPGFVPLIYYGLQHYLSLVGSLVFIPLVIVPAMDGSDKDTASVISTMLLLTGVTTILHCYFGTRLPLVQGSSFVYLAPVLVVINSEEFRNLTEHKFRDTMRELQGAIIVGSLFQCILGFSGLMSLLLRFINPVVVAPTVAAVGLAFFSYGFPQAGTCVEISVPLILLLLIFTLYLRGVSLFGHRLFRIYAVPLSALLIWTYAFFLTVGGAYDYRGCNADIPSSNILIDECKKHVYTMKHCRTDASNAWRTASWVRIPYPFQWGGLGMYLFLFAIPVFLLKVGTYHSASMIVNAKRPTRGIVSRGIALEGFCSLLAGIWGSGTGSTTLTENIHTINITKVASRRALVIGAMFLIVLSFLGKLGAILASIPQALAASVLCFIWALTVSLGLSNLRYTQTASFRNITIVGVSLFLGLSIPAYFQQYQPLSSLILPSYYIPFGAASSGPFQTGIEQLDFAMNAVLSLNMVVTFLLAFILDNTVPGSKEERGVYVWTRAEDMQMDPEMRADYSLPRKFAQIFGCRCC

SEQ ID NO: 5633 - protein, 529 aa, Arabidopsis thaliana
MKFGLRDNPGFVPLIYYGLQHYLSLVGSLVFIPLVIVPAMDGSDKDTASVISTMLLLTGVTTILHCYFGTRLPLVQGSSFVYLAPVLVVINSEEFRNLTEHKFRDTMRELQGAIIVGSLFQCILGFSGLMSLLLRFINPVVVAPTVAAVGLAFFSYGFPQAGTCVEISVPLILLLLIFTLYLRGVSLFGHRLFRIYAVPLSALLIWTYAFFLTVGGAYDYRGCNADIPSSNILIDECKKHVYTMKHCRTDASNAWRTASWVRIPYPFQWGGLGMYLFLFAIPVFLLKVGTYHSASMIVNAKRPTRGIVSRGIALEGFCSLLAGIWGSGTGSTTLTENIHTINITKVASRRALVIGAMFLIVLSFLGKLGAILASIPQALAASVLCFIWALTVSLGLSNLRYTQTASFRNITIVGVSLFLGLSIPAYFQQYQPLSSLILPSYYIPFGAASSGPFQTGIEQLDFAMNAVLSLNMVVTFLLAFILDNTVPGSKEERGVYVWTRAEDMQMDPEMRADYSLPRKFAQIFGCRCC

SEQ ID NO: 5634 - protein, 490 aa, Arabidopsis thaliana
MDGSDKDTASVISTMLLLTGVTTILHCYFGTRLPLVQGSSFVYLAPVLVVINSEEFRNLTEHKFRDTMRELQGAIIVGSLFQCILGFSGLMSLLLRFINPVVVAPTVAAVGLAFFSYGFPQAGTCVEISVPLILLLLIFTLYLRGVSLFGHRLFRIYAVPLSALLIWTYAFFLTVGGAYDYRGCNADIPSSNILIDECKKHVYTMKHCRTDASNAWRTASWVRIPYPFQWGGLGMYLFLFAIPVFLLKVGTYHSASMIVNAKRPTRGIVSRGIALEGFCSLLAGIWGSGTGSTTLTENIHTINITKVASRRALVIGAMFLIVLSFLGKLGAILASIPQALAASVLCFIWALTVSLGLSNLRYTQTASFRNITIVGVSLFLGLSIPAYFQQYQPLSSLILPSYYIPFGAASSGPFQTGIEQLDFAMNAVLSLNMVVTFLLAFILDNTVPGSKEERGVYVWTRAEDMQMDPEMRADYSLPRKFAQIFGCRCC

SEQ ID NO: 5635 - DNA, 1677 bp, Arabidopsis thaliana
atgaatgggagtaatggggaggagcgagttgttcacgaggttgcaatggtggttcctaagagggttctggaagaagaagaaggagactgtgttgaggttttggtgactgagctaaggaagaaagggatggttgttgatagagtcgtcggtcttgctcatgagtttctcaaggtagcagctccttcggagatcttgggcaatgcagctgcagagcttcatatacgcaaacctactcgtctcgatatttcctcattttgtgtttgtcttaagtttgatggttatctctcacttcaggaattgatcttccctttgagatgcaagggtctgaggctttcattcggcaacctgatgggttattattcagctggtttgaacgttttcggtgctatcaacatcttatttatggaattatccttgcagtttcttgctctcccaagtttctttgtgggcacaatactctgggctgccttgtttcttcagttctggaaacgtaaaaatgcggccttgttagccagccaaggatatagatttctcggaatggaatggagttcccttccttttccaaaggagcttattaagaatctcggaaatgagagagccaaagagaaggaagcctaccagagatatgaatggtttgcttatcgcaagaggtttaggaatgatgttcttgttatcatgagcattatctgcctccaacttccatttgagctcgcgtatgctcatattttcgagattatcacatctgatataatcaagtacgtattgacagctatctaccttctaatcattcagtacctcactcggctaggagggaaagtatctgtcaagctgataaaccgagaaatcaacgagagtgtggaataccgagctaacagcttgatttacaaaacatatattgggatcttttatcatgttcttttacatcgaaacttcatgacacttcgacaagtattgatccaacggttaataatctcacaggttttctggactttgatggatggttctttaccttatcttaagtacagctaccgaaaatatcgagctaggacgaagaagaaaatggaagatggatcatcaacagggaaaattcaaatagcctcaagagtggagaaggaatatttcaagcctacatattcagcaagcattggggtagaacttgaagatggacttttcgatgattccctcgagctggctttgcagtttggaatgattatgatgtttgcttgtgccttccctcttgcttttgcccttgctgcagtgagcaatgtaatggaaataagaacaaatgctttaaagcttttggtgacacttcgaagacctcttcctcgtgctgctgcaacaattggagcttggttaaacatctggcagtttctagtagttatgtccatatgcacaaactcggcactcttggtatgcttatatgatcaagaaggcaaatggaagattgaaccgggactcgccgcaattctcatcatggaacatgtactcttacttctgaaatttggactctctcgtctcgtccctgaagagcctgcttgggttagagccagtcgtgtgaagaacgtgacacaagcacaagacatgtactgtaaacagctcttaagaagcatttctggtgaatttaattccttgacaaaacctgaacaagaacaacaacaagactcagagcgcttttga

SEQ ID NO: 5636 - protein, 558 aa, Arabidopsis thaliana
MNGSNGEERVVHEVAMVVPKRVLEEEEGDCVEVLVTELRKKGMVVDRVVGLAHEFLKVAAPSEILGNAAAELHIRKPTRLDISSFCVCLKFDGYLSLQELIFPLRCKGLRLSFGNLMGYYSAGLNVFGAINILFMELSLQFLALPSFFVGTILWAALFLQFWKRKNAALLASQGYRFLGMEWSSLPFPKELIKNLGNERAKEKEAYQRYEWFAYRKRFRNDVLVIMSIICLQLPFELAYAHIFEIITSDIIKYVLTAIYLLIIQYLTRLGGKVSVKLINREINESVEYRANSLIYKTYIGIFYHVLLHRNFMTLRQVLIQRLIISQVFWTLMDGSLPYLKYSYRKYRARTKKKMEDGSSTGKIQIASRVEKEYFKPTYSASIGVELEDGLFDDSLELALQFGMIMMFACAFPLAFALAAVSNVMEIRTNALKLLVTLRRPLPRAAATIGAWLNIWQFLVVMSICTNSALLVCLYDQEGKWKIEPGLAAILIMEHVLLLLKFGLSRLVPEEPAWVRASRVKNVTQAQDMYCKQLLRSISGEFNSLTKPEQEQQQDSERF

SEQ ID NO: 5637 - protein, 543 aa, Arabidopsis thaliana
MVVPKRVLEEEEGDCVEVLVTELRKKGMVVDRVVGLAHEFLKVAAPSEILGNAAAELHIRKPTRLDISSFCVCLKFDGYLSLQELIFPLRCKGLRLSFGNLMGYYSAGLNVFGAINILFMELSLQFLALPSFFVGTILWAALFLQFWKRKNAALLASQGYRFLGMEWSSLPFPKELIKNLGNERAKEKEAYQRYEWFAYRKRFRNDVLVIMSIICLQLPFELAYAHIFEIITSDIIKYVLTAIYLLIIQYLTRLGGKVSVKLINREINESVEYRANSLIYKTYIGIFYHVLLHRNFMTLRQVLIQRLIISQVFWTLMDGSLPYLKYSYRKYRARTKKKMEDGSSTGKIQIASRVEKEYFKPTYSASIGVELEDGLFDDSLELALQFGMIMMFACAFPLAFALAAVSNVMEIRTNALKLLVTLRRPLPRAAATIGAWLNIWQFLVVMSICTNSALLVCLYDQEGKWKIEPGLAAILIMEHVLLLLKFGLSRLVPEEPAWVRASRVKNVTQAQDMYCKQLLRSISGEFNSLTKPEQEQQQDSERF

SEQ ID NO: 5638 - protein, 516 aa, Arabidopsis thaliana
MVVDRVVGLAHEFLKVAAPSEILGNAAAELHIRKPTRLDISSFCVCLKFDGYLSLQELIFPLRCKGLRLSFGNLMGYYSAGLNVFGAINILFMELSLQFLALPSFFVGTILWAALFLQFWKRKNAALLASQGYRFLGMEWSSLPFPKELIKNLGNERAKEKEAYQRYEWFAYRKRFRNDVLVIMSIICLQLPFELAYAHIFEIITSDIIKYVLTAIYLLIIQYLTRLGGKVSVKLINREINESVEYRANSLIYKTYIGIFYHVLLHRNFMTLRQVLIQRLIISQVFWTLMDGSLPYLKYSYRKYRARTKKKMEDGSSTGKIQIASRVEKEYFKPTYSASIGVELEDGLFDDSLELALQFGMIMMFACAFPLAFALAAVSNVMEIRTNALKLLVTLRRPLPRAAATIGAWLNIWQFLVVMSICTNSALLVCLYDQEGKWKIEPGLAAILIMEHVLLLLKFGLSRLVPEEPAWVRASRVKNVTQAQDMYCKQLLRSISGEFNSLTKPEQEQQQDSERF

SEQ ID NO: 5639 - DNA, 2013 bp, Arabidopsis thaliana
aaactttttcccacaaagaaactttccacattgaacgagagaattatagatctgcgaatccgatcattggattagggttttcacttttcaccctcctttttccatctctctgctgtatacccttcctttctccaaaaagaccaaaactttgcgattcaattcgaaatctgtgttcttccattgagctggattttcatttttggaatcatttcttctcttctttgatccgatagatggtggcatggtaggaaattttagacctttatatttctatttaaccgtcaaggaaccaatgaatttgtatagcttgttgagttgactttttgattgtgtatgatcgaatttgggatcctcatttcgggttttgggttattgatctgagctcctgttacttctgaaaccgatgtgaatttggtgggggatagatttttttgtggagtcaatggatttggagagtgaaagctctgcacttgagtctgttgatgataatgttttgattcaacaaagtgccagcaacgtttgtgatgatggtaggagtttggataacgggtcttgctctgatgagagtgtgaaactgctttcgacttctaattctgttgaactcggtaaacctatgagttttgattcaccaggtgatggtggtggtgcttattctccggttttgaaaggacaaggcttgagaaaatggaggaggattaggagagatcttgttaaggacacgtctgcgaatatggagaatagtaaagctctgaagagagggttgtcaggtgttgctcattcacatggtaaacagatgcagtttcagtcaccggaagttgaacaagagagtcagggatctgttgggtctgttaatatgttgaaaagtagcggtgatggttttgatatacttgggagtagtggttacgattctaggtttgtggcaggggttggtttttcagctggtatggatttagagatagatgatgatcggagtagtaagtcttccacggttgcaagagctcccaaggttattaggtatgagaagccaatgattagttcaggtcagggaggaaacattcgtgtagagaatagtaagaaacatagaggagaaagtgtcgatttcgagaaggaaaactcttattccagcttggaatctgactcaagaaagcagagtggaagaatgatggactacaatggtgaaaatggggaaacgtcaatgagaaaagatgatgcgggaggagaaggcggagagtcgataaacacggacaatcgttactcagatgaaatggatccattaacagaggccatcaacggtttcttggccttgcaagatgctcttgaaaaagaggttcagcaattccaggagatcgggaatgaaccaatgccacagcatcatgaacaagtcagcgaagcaaattcacctcaccccgagattgtaaccctggtaaacaatgttgaacaactggagaacatgctagaagaaacaaggtccatgcttgaggtgaaagaatcacacatccgtgaccttgaatccaccacgaaccaaagcaaacactcgtggggaggaacagagattgtggttgaagacatcttccggcagaagattgaggccgagattgaatatctgatatattcaagatctatcgataacttaaacagtcagatgaagttaattgatgaacaagagtcattggcagaagagcaaacccatgagacgctgaataagctaggaagagtacaaacgaaggctgcaaattttacaaacagagctcaagacctgcaaaacgattgcatagaaatcaccgggaccatcaagaagagagcatgtaagatcacttcatacgttcttatacagttagtattgctgtcaacagtagttttgttgctcctgtctcaattgttgccggagccagatactgttgtacccacatgacttttgatttttgatgtaaactgagttttgttttggcttttggcttttcttgttaacaattcggctataagttttgcctctggtaataaaattaatcaagc

SEQ ID NO: 5640 - protein, 489 aa, Arabidopsis thaliana
MDLESESSALESVDDNVLIQQSASNVCDDGRSLDNGSCSDESVKLLSTSNSVELGKPMSFDSPGDGGGAYSPVLKGQGLRKWRRIRRDLVKDTSANMENSKALKRGLSGVAHSHGKQMQFQSPEVEQESQGSVGSVNMLKSSGDGFDILGSSGYDSRFVAGVGFSAGMDLEIDDDRSSKSSTVARAPKVIRYEKPMISSGQGGNIRVENSKKHRGESVDFEKENSYSSLESDSRKQSGRMMDYNGENGETSMRKDDAGGEGGESINTDNRYSDEMDPLTEAINGFLALQDALEKEVQQFQEIGNEPMPQHHEQVSEANSPHPEIVTLVNNVEQLENMLEETRSMLEVKESHIRDLESTTNQSKHSWGGTEIVVEDIFRQKIEAEIEYLIYSRSIDNLNSQMKLIDEQESLAEEQTHETLNKLGRVQTKAANFTNRAQDLQNDCIEITGTIKKRACKITSYVLIQLVLLSTVVLLLLSQLLPEPDTVVPT

SEQ ID NO: 5641 - protein, 432 aa, Arabidopsis thaliana
MSFDSPGDGGGAYSPVLKGQGLRKWRRIRRDLVKDTSANMENSKALKRGLSGVAHSHGKQMQFQSPEVEQESQGSVGSVNMLKSSGDGFDILGSSGYDSRFVAGVGFSAGMDLEIDDDRSSKSSTVARAPKVIRYEKPMISSGQGGNIRVENSKKHRGESVDFEKENSYSSLESDSRKQSGRMMDYNGENGETSMRKDDAGGEGGESINTDNRYSDEMDPLTEAINGFLALQDALEKEVQQFQEIGNEPMPQHHEQVSEANSPHPEIVTLVNNVEQLENMLEETRSMLEVKESHIRDLESTTNQSKHSWGGTEIVVEDIFRQKIEAEIEYLIYSRSIDNLNSQMKLIDEQESLAEEQTHETLNKLGRVQTKAANFTNRAQDLQNDCIEITGTIKKRACKITSYVLIQLVLLSTVVLLLLSQLLPEPDTVVPT

SEQ ID NO: 5642 - protein, 393 aa, Arabidopsis thaliana
MENSKALKRGLSGVAHSHGKQMQFQSPEVEQESQGSVGSVNMLKSSGDGFDILGSSGYDSRFVAGVGFSAGMDLEIDDDRSSKSSTVARAPKVIRYEKPMISSGQGGNIRVENSKKHRGESVDFEKENSYSSLESDSRKQSGRMMDYNGENGETSMRKDDAGGEGGESINTDNRYSDEMDPLTEAINGFLALQDALEKEVQQFQEIGNEPMPQHHEQVSEANSPHPEIVTLVNNVEQLENMLEETRSMLEVKESHIRDLESTTNQSKHSWGGTEIVVEDIFRQKIEAEIEYLIYSRSIDNLNSQMKLIDEQESLAEEQTHETLNKLGRVQTKAANFTNRAQDLQNDCIEITGTIKKRACKITSYVLIQLVLLSTVVLLLLSQLLPEPDTVVPT

SEQ ID NO: 5643 - DNA, 600 bp, Arabidopsis thaliana
atagatattgacctcaaacttagggaaaccctaatataagagcaaaccctagcagcgctatctccctcagcctcatctttcacccactactattcgccgttcgcttttccctcgccgtcgaaatcaacatggcgccgaagaaggataaggttccgccaccgtcatcgaagccggcgaaatccggaggtggaaagcagaagaagaagaagtggagcaagggaaagcaaaaggagaaggtgaacaacatggtgctgtttgatcaagctacttatgacaagcttctcactgaagctcccaagttcaagctcatcaccccttccattctctctgaccgtatgaggatcaatgggtcgctagcaaggagagcgattagggagctaatggccaaaggtgtgatcaggatggtcgctgctcactcgagccagcagatctacactcgtgccaccaacacctaagatgtttggtttctttatccacctaagatgtttggcttctttttcttatctcttgttgtttgattcttcaggaacttgttagaatcttttgtttcgtattccgtttttttgagatatatggttatttaaaacgcatcaagacttc

SEQ ID NO: 5644 - protein, 108 aa, Arabidopsis thaliana [sequence omitted]

SEQ ID NO: 5645 - protein, 69 aa, Arabidopsis thaliana; identical to SEQ ID NO: 96

SEQ ID NO: 5646 - DNA, 936 bp, Arabidopsis thaliana
atgaccgacgaacccataaaagaccaccagttcgacaacggcggcgacgaggctgagataacagacgcggcgaagaggtcccttccgattaaaagtcgcaagcattcaacgatggcttccatcacgaattatgtccgatacatggctcacaagctcgagtactctctcactctcagccttaagaaacatactagagagaagctcagtgaccgggaactctttggtgtagtcatgaagaatctattctatggaagaataagctacttacactcggacaaaggaaaagagatggccccaaccatgggaacaaatgaaagcacgctacttgtccgtaagctaccagttgttgatacaaggtacattttcgtaggggatgctgttgtcttgaaggacccgaatgaaacaaataagtatatagtcagaagactagcagctttagagggatctgaaatggtatcaagtgatgagaaagatgagccttttgttctcgaaaaggatcagtgctgggtcgttgctgagaatcaagagatgaaatctaaagaagcatatgatagtcgaacatttggtccaatttcaatggcggacatagtgggaagagctatatattgtctgaggacagcagtggatcatggtccagtaagcaacagtgaatttgccatggacgaggattccccaatcctggcggtagaacttgacgtggatgaattggctaaaggccacaaggcgtcataatgaagaacctttcttgtaccacattttcattcactgtgtcgatgtttcacttataaactccaatttagttgtcattggaggtgtttgtggcaaatgttggcccgttggtacttaagcttaatacgtcggatgctgttgagtgttgacttgaggaaaaggttcttcatgagcttcatcctctctataataaacaaccatttctat

SEQ ID NO: 5647 - protein, 243 aa, Arabidopsis thaliana
MTDEPIKDHQFDNGGDEAEITDAAKRSLPIKSRKHSTMASITNYVRYMAHKLEYSLTLSLKKHTREKLSDRELFGVVMKNLFYGRISYLHSDKGKEMAPTMGTNESTLLVRKLPVVDTRYIFVGDAVVLKDPNETNKYIVRRLAALEGSEMVSSDEKDEPFVLEKDQCWVVAENQEMKSKEAYDSRTFGPISMADIVGRAIYCLRTAVDHGPVSNSEFAMDEDSPILAVELDVDELAKGHKAS

SEQ ID NO: 5648 - protein, 206 aa, Arabidopsis thaliana
MASITNYVRYMAHKLEYSLTLSLKKHTREKLSDRELFGVVMKNLFYGRISYLHSDKGKEMAPTMGTNESTLLVRKLPVVDTRYIFVGDAVVLKDPNETNKYIVRRLAALEGSEMVSSDEKDEPFVLEKDQCWVVAENQEMKSKEAYDSRTFGPISMADIVGRAIYCLRTAVDHGPVSNSEFAMDEDSPILAVELDVDELAKGHKAS

SEQ ID NO: 5649 - protein, 196 aa, Arabidopsis thaliana
MAHKLEYSLTLSLKKHTREKLSDRELFGVVMKNLFYGRISYLHSDKGKEMAPTMGTNESTLLVRKLPVVDTRYIFVGDAVVLKDPNETNKYIVRRLAALEGSEMVSSDEKDEPFVLEKDQCWVVAENQEMKSKEAYDSRTFGPISMADIVGRAIYCLRTAVDHGPVSNSEFAMDEDSPILAVELDVDELAKGHKAS

SEQ ID NO: 5650 - DNA, 582 bp, Arabidopsis thaliana
acaaagcgagaaagaaagacgaactgatcagcaatgggaagcttaagggtgagcacagttgttattgcagtagtggcttgtctctccatcctcctcatatctcctacagaagtagatgggcgtttagtgtgtgacactccagcgggtacatgtacctcgagctctacttgcaatgaccaatgcaatacatggggcggcaattatagtggaggcgaatgtgcagattcaagctttcctggtttaagtatatgttattgctgccattatgtagggagcagtgctgaaatggaaagcatgtgattgcagatgatagaaaacgacgccgctttgtgtgcgtatgtgtgtgttttttgctaatcgcatgtttatgctttcatttcacatcctatgttttgagtgtttgcctttgtactttgttgttgtgcttctgtttgttttgcgttgtcaagtatcaaataaagttggagtgtgtttttaacaaatgatttttttattattcttgttgtatttagctaatttattttatttaagagtgttttatttttatcaataataataatcataattgcggtttgttgtgcg

SEQ ID NO: 5651 - protein, 88 aa, Arabidopsis thaliana
MGSLRVSTVVIAVVACLSILLISPTEVDGRLVCDTPAGTCTSSSTCNDQCNTWGGNYSGGECADSSFPGLSICYCCHYVGSSAEMESM

SEQ ID NO: 5652 - protein, 46 aa, Arabidopsis thaliana
MCVFFANRMFMLSFHILCFECLPLYFVVVLLFVLRCQVSNKVGVCF

SEQ ID NO: 5653 - DNA, 1218 bp, Arabidopsis thaliana
gagatctgagtagaatcttcgattcattattcgttgtcgtcgttcatctgtgagaagcggacaaaccaaagaatccaccggagctagtgatatgggtggttccagagagttccgagctgaggaacattcaaatcaattccactctatcatcgccatggccatctggcttggcgccattcacttcaacgtcgctcttgttctctgttctctcattttccttcctccttctctatctctcatggtcttgggcttgctctctctgtttatctttatcccaatcgatcatcgtagcaaatatggtcgtaagctcgctaggtacatatgcaagcacgcgtgtaattatttccccgtctctctgtacgtcgaggattacgaagctttccagcctaatcgtgcctatgtctttggttatgaaccacattcggtgctaccgattggagttgttgctctttgtgatctcacagggtttatgcctattcctaacattaaagttcttgcaagtagtgctatattctacactccctttctaaggcatatatggacatggttagggctcaccgctgcttctaggaagaatttcacttcccttttggattctggctacagttgtgttcttgtacctggtggtgtgcaggagacttttcatatgcaacatgatgctgagaatgtcttcctttcaaggagaagaggatttgtgcgcatagccatggaacaggggagccctctggttccagtattctgctttggtcaggcacgcgtgtacaaatggtggaagccggattgtgatctctatcttaaactatctagagcaatcagattcaccccgatctgcttctggggagtttttggatcaccattaccgtgtcgacagcctatgcatgtggtcgttggtaaaccaatagaagtcacaaaaactctgaagccaactgacgaagagattgctaagtttcatggccagtatgtggaagcgcttagggatctgtttgagaggcacaagtcccgagtcggctatgatcttgagctgaaaattctttgaacaaaatctccaatggaaataattacttgtgtgtatccttcattaattgttaccttggagctggatttggacttaatataaatgactacatcatgtagtctacatgtattgcatgtctttagcatcgactgttgaagtaatggaatacgtttataaagcctgtaaattacatgtcgtcttgc

SEQ ID NO: 5654 - protein, 314 aa, Arabidopsis thaliana
MGGSREFRAEEHSNQFHSIIAMAIWLGAIHFNVALVLCSLIFLPPSLSLMVLGLLSLFIFIPIDHRSKYGRKLARYICKHACNYFPVSLYVEDYEAFQPNRAYVFGYEPHSVLPIGVVALCDLTGFMPIPNIKVLASSAIFYTPFLRHIWTWLGLTAASRKNFTSLLDSGYSCVLVPGGVQETFHMQHDAENVFLSRRRGFVRIAMEQGSPLVPVFCFGQARVYKWWKPDCDLYLKLSRAIRFTPICFWGVFGSPLPCRQPMHVVVGKPIEVTKTLKPTDEEIAKFHGQYVEALRDLFERHKSRVGYDLELKIL

SEQ ID NO: 5655 - protein, 293 aa, Arabidopsis thaliana
MAIWLGAIHFNVALVLCSLIFLPPSLSLMVLGLLSLFIFIPIDHRSKYGRKLARYICKHACNYFPVSLYVEDYEAFQPNRAYVFGYEPHSVLPIGVVALCDLTGFMPIPNIKVLASSAIFYTPFLRHIWTWLGLTAASRKNFTSLLDSGYSCVLVPGGVQETFHMQHDAENVFLSRRRGFVRIAMEQGSPLVPVFCFGQARVYKWWKPDCDLYLKLSRAIRFTPICFWGVFGSPLPCRQPMHVVVGKPIEVTKTLKPTDEEIAKFHGQYVEALRDLFERHKSRVGYDLELKIL

SEQ ID NO: 5656 - protein, 265 aa, Arabidopsis thaliana
MVLGLLSLFIFIPIDHRSKYGRKLARYICKHACNYFPVSLYVEDYEAFQPNRAYVFGYEPHSVLPIGVVALCDLTGFMPIPNIKVLASSAIFYTPFLRHIWTWLGLTAASRKNFTSLLDSGYSCVLVPGGVQETFHMQHDAENVFLSRRRGFVRIAMEQGSPLVPVFCFGQARVYKWWKPDCDLYLKLSRAIRFTPICFWGVFGSPLPCRQPMHVVVGKPIEVTKTLKPTDEEIAKFHGQYVEALRDLFERHKSRVGYDLELKIL

SEQ ID NO: 5657 - DNA, 2146 bp, Arabidopsis thaliana
atgcttcttcatatctcaccaccactctcgttgacttgacttggctctgctcgtcaatggttatcttcgatctttaaccaaatccagttgataaggtctcttcgttgattagcagagatctctttaatttgtgaatttcaattcatcggaacctgttgatggacaccaccattgatggattcgccgattcttatgaaatcagcagcactagtttcgtcgctaccgataacaccgactcctctattgtttatctggccgccgaacaagtactcaccggacctgatgtatctgctctgcaattgctctccaacagcttcgaatccgtctttgactcgccggatgatttctacagcgacgctaagcttgttctctccgacggccgggaagtttctttccaccggtgcgttttgtcagcgagaagctctttcttcaagagcgctttagccgccgctaagaaggagaaagactccaacaacaccgccgccgtgaagctcgagcttaaggagattgccaaggattacgaagtcggtttcgattcggttgtgactgttttggcttatgtttacagcagcagagtgagaccgccgcctaaaggagtttctgaatgcgcagacgagaattgctgccacgtggcttgccggccggcggtggatttcatgttggaggttctctatttggctttcatcttcaagatccctgaattaattactctctatcagaggcacttattggacgttgtagacaaagttgttatagaggacacattggttatactcaagcttgctaatatatgtggtaaagcttgtatgaagctattggatagatgtaaagagattattgtcaagtctaatgtagatatggttagtcttgaaaagtcattgccggaagagcttgttaaagagataattgatagacgtaaagagcttggtttggaggtacctaaagtaaagaaacatgtctcgaatgtacataaggcacttgactcggatgatattgagttagtcaagttgcttttgaaagaggatcacaccaatctagatgatgcgtgtgctcttcatttcgctgttgcatattgcaatgtgaagaccgcaacagatcttttaaaacttgatcttgccgatgtcaaccataggaatccgaggggatatacggtgcttcatgttgctgcgatgcggaaggagccacaattgatactatctctattggaaaaaggtgcaagtgcatcagaagcaactttggaaggtagaaccgcactcatgatcgcaaaacaagccactatggcggttgaatgtaataatatcccggagcaatgcaagcattctctcaaaggccgactatgtgtagaaatactagagcaagaagacaaacgagaacaaattcctagagatgttcctccctcttttgcagtggcggccgatgaattgaagatgacgctgctcgatcttgaaaatagagttgcacttgctcaacgtctttttccaacggaagcacaagctgcaatggagatcgccgaaatgaagggaacatgtgagttcatagtgactagcctcgagcctgaccgtctcactggtacgaagagaacatcaccgggtgtaaagatagcacctttcagaatcctagaagagcatcaaagtagactaaaagcgctttctaaaaccgtggaactcgggaaacgattcttcccgcgctgttcggcagtgctcgaccagattatgaactgtgaggacttgactcaactggcttgcggagaagacgacactgctgagaaacgactacaaaagaagcaaaggtacatggaaatacaagagacactaaagaaggcctttagtgaggacaatttggaattaggaaattcgtccctgacagattcgacttcttccacatcgaaatcaaccggtggaaagaggtctaaccgtaaactctctcatcgtcgtcggtgagactcttgcctcttagtgtaatttttgctgtaccatataattctgttttcatgatgactgtaactgtttatgtctatcgttggcgtcatatagtttcgctcttcgttttgcatcctgtgtattattgctgcaggtgtgcttcaaacaaatgttgtaacaatttgaaccaatggtatacagatttgtaatatatatttatgtacatc

SEQ ID NO: 5658 - protein, 593 aa, Arabidopsis thaliana
MDTTIDGFADSYEISSTSFVATDNTDSSIVYLAAEQVLTGPDVSALQLLSNSFESVFDSPDDFYSDAKLVLSDGREVSFHRCVLSARSSFFKSALAAAKKEKDSNNTAAVKLELKEIAKDYEVGFDSVVTVLAYVYSSRVRPPPKGVSECADENCCHVACRPAVDFMLEVLYLAFIFKIPELITLYQRHLLDVVDKVVIEDTLVILKLANICGKACMKLLDRCKEIIVKSNVDMVSLEKSLPEELVKEIIDRRKELGLEVPKVKKHVSNVHKALDSDDIELVKLLLKEDHTNLDDACALHFAVAYCNVKTATDLLKLDLADVNHRNPRGYTVLHVAAMRKEPQLILSLLEKGASASEATLEGRTALMIAKQATMAVECNNIPEQCKHSLKGRLCVEILEQEDKREQIPRDVPPSFAVAADELKMTLLDLENRVALAQRLFPTEAQAAMEIAEMKGTCEFIVTSLEPDRLTGTKRTSPGVKIAPFRILEEHQSRLKALSKTVELGKRFFPRCSAVLDQIMNCEDLTQLACGEDDTAEKRLQKKQRYMEIQETLKKAFSEDNLELGNSSLTDSTSSTSKSTGGKRSNRKLSHRRR

SEQ ID NO: 5659 - protein, 427 aa, Arabidopsis thaliana
MLEVLYLAFIFKIPELITLYQRHLLDVVDKVVIEDTLVILKLANICGKACMKLLDRCKEIIVKSNVDMVSLEKSLPEELVKEIIDRRKELGLEVPKVKKHVSNVHKALDSDDIELVKLLLKEDHTNLDDACALHFAVAYCNVKTATDLLKLDLADVNHRNPRGYTVLHVAAMRKEPQLILSLLEKGASASEATLEGRTALMIAKQATMAVECNNIPEQCKHSLKGRLCVEILEQEDKREQIPRDVPPSFAVAADELKMTLLDLENRVALAQRLFPTEAQAAMEIAEMKGTCEFIVTSLEPDRLTGTKRTSPGVKIAPFRILEEHQSRLKALSKTVELGKRFFPRCSAVLDQIMNCEDLTQLACGEDDTAEKRLQKKQRYMEIQETLKKAFSEDNLELGNSSLTDSTSSTSKSTGGKRSNRKLSHRRR

SEQ ID NO: 5660 - protein, 377 aa, Arabidopsis thaliana
MKLLDRCKEIIVKSNVDMVSLEKSLPEELVKEIIDRRKELGLEVPKVKKHVSNVHKALDSDDIELVKLLLKEDHTNLDDACALHFAVAYCNVKTATDLLKLDLADVNHRNPRGYTVLHVAAMRKEPQLILSLLEKGASASEATLEGRTALMIAKQATMAVECNNIPEQCKHSLKGRLCVEILEQEDKREQIPRDVPPSFAVAADELKMTLLDLENRVALAQRLFPTEAQAAMEIAEMKGTCEFIVTSLEPDRLTGTKRTSPGVKIAPFRILEEHQSRLKALSKTVELGKRFFPRCSAVLDQIMNCEDLTQLACGEDDTAEKRLQKKQRYMEIQETLKKAFSEDNLELGNSSLTDSTSSTSKSTGGKRSNRKLSHRRR

SEQ ID NO: 5661 - DNA, 1230 bp, Arabidopsis thaliana
acatatcaatgttaatttgtatataaggagctaagaacaaacccaattaggcaactagcaattgctaaaacacgtaagatctcaaatatgaccacgttattcctccttattgctctattcatcacaaccatcctcaacccaacaagtggagaatcagtaggtgtatgctatggaatgatggggaacaaccttccttctcaatcagacacaatcgctctctttagacaaaacaacatccgacgtgttagactctacgatccaaaccaagccgctttaaacgctcttagaaacacgggtatcgaagtcatcatcggcgttccaaacaccgatcttcgttcactcactaacccttcttccgctagatcatggctccaaaacaacgtcctcaactattaccccgccgttagcttcaagtacatcgccgtaggtaacgaagtatctccgtcgaacggcggtgatgttgtgctccctgccatgcgtaacgtttacgatgctctaagaggtgcaaatcttcaagatcgtattaaagtttctaccgccattgatatgactttgattggaaactctttccctccttcctccggagagtttcgtggtgacgttagatggtatatcgatcccgtcatcgggtttcttacgagtacgaactcagcgttactagccaacatctatccttacttcagctacgttgacaatccacgtgacatatctctctcttacgctctcttcacttctccttccgtcgtcgtatgggacggctctcgtggctaccaaaacctctttgacgctttacttgacgttgtttactctgccgttgaacgctcaggcggtggatctctcccagtggttgtttccgagagcggatggccttctaacggtggaaacgccgcgagtttcgataacgcgcgagctttttacacgaatcttgcgtcgcgtgtgagagagaacagaggaacaccgaagagacctggaagaggagtggaaacgtatttgttcgctatgtttgatgagaatcaaaagagtcctgagatcgagaagaattttggtttgttttttcctaataaacaaccaaaatttccgatcacattctctgccgcgagagacggtacggcggttgagtgatgattttatatgctgagatttatgtgaataattgggagattatcccataaaaggttccaaataaagacaaatttcaaataaaacctgttagtccaagttaaattaagt

SEQ ID NO: 5662 - protein, 344 aa, Arabidopsis thaliana
MTTLFLLIALFITTILNPTSGESVGVCYGMMGNNLPSQSDTIALFRQNNIRRVRLYDPNQAALNALRNTGIEVIIGVPNTDLRSLTNPSSARSWLQNNVLNYYPAVSFKYIAVGNEVSPSNGGDVVLPAMRNVYDALRGANLQDRIKVSTAIDMTLIGNSFPPSSGEFRGDVRWYIDPVIGFLTSTNSALLANIYPYFSYVDNPRDISLSYALFTSPSVVVWDGSRGYQNLFDALLDVVYSAVERSGGGSLPVVVSESGWPSNGGNAASFDNARAFYTNLASRVRENRGTPKRPGRGVETYLFAMFDENQKSPEIEKNFGLFFPNKQPKFPITFSAARDGTAVE

SEQ ID NO: 5663 - protein, 315 aa, Arabidopsis thaliana
MMGNNLPSQSDTIALFRQNNIRRVRLYDPNQAALNALRNTGIEVIIGVPNTDLRSLTNPSSARSWLQNNVLNYYPAVSFKYIAVGNEVSPSNGGDVVLPAMRNVYDALRGANLQDRIKVSTAIDMTLIGNSFPPSSGEFRGDVRWYIDPVIGFLTSTNSALLANIYPYFSYVDNPRDISLSYALFTSPSVVVWDGSRGYQNLFDALLDVVYSAVERSGGGSLPVVVSESGWPSNGGNAASFDNARAFYTNLASRVRENRGTPKRPGRGVETYLFAMFDENQKSPEIEKNFGLFFPNKQPKFPITFSAARDGTAVE

SEQ ID NO: 5664 - protein, 314 aa, Arabidopsis thaliana
MGNNLPSQSDTIALFRQNNIRRVRLYDPNQAALNALRNTGIEVIIGVPNTDLRSLTNPSSARSWLQNNVLNYYPAVSFKYIAVGNEVSPSNGGDVVLPAMRNVYDALRGANLQDRIKVSTAIDMTLIGNSFPPSSGEFRGDVRWYIDPVIGFLTSTNSALLANIYPYFSYVDNPRDISLSYALFTSPSVVVWDGSRGYQNLFDALLDVVYSAVERSGGGSLPVVVSESGWPSNGGNAASFDNARAFYTNLASRVRENRGTPKRPGRGVETYLFAMFDENQKSPEIEKNFGLFFPNKQPKFPITFSAARDGTAVE

SEQ ID NO: 5665 - DNA, 557 bp, Arabidopsis thaliana
aattcactgattattgttttaaggcaaattaagatcatcttcaaaatcttctcagatctcttccaattttctagaaaaaacatgtcttgctgtggtggaagctgtggttgtggatctgcctgcaagtgcggcaatggttgcggaggttgcaaaaggtaccctgacttggagaacaccgccaccgagactcttgtcctcggtgttgctccggcgatgaactctcagtacgaggcttccggcgagactttcgttgccgagaatgatgcttgcaaatgcggatctgactgcaagtgcaacccttgtacctgcaaatgaagaacttcataaaccctaagtctgtaataaccctaatgttatgttaggtttgcttatatgtaataattggctgatttttccggtagttttgccggcgacgttggtcattctcttcttcttcttcttccgtgtgtgtttttatggtttggtcattaagatatctctgcaaagttttatctttgtgactttattaatcctaagactattatgggtttgtattaaagtttgcttctttcttgctc

SEQ ID NO: 5666 - protein, 104 aa, Arabidopsis thaliana
NSLIIVLRQIKIIFKIFSDLFQFSRKNMSCCGGSCGCGSACKCGNGCGGCKRYPDLENTATETLVLGVAPAMNSQYEASGETFVAENDACKCGSDCKCNPCTCK

SEQ ID NO: 5667 - protein, 77 aa, Arabidopsis thaliana
MSCCGGSCGCGSACKCGNGCGGCKRYPDLENTATETLVLGVAPAMNSQYEASGETFVAENDACKCGSDCKCNPCTCK

SEQ ID NO: 5668 - protein, 67 aa, Arabidopsis thaliana
MLGLLICNNWLIFPVVLPATLVILFFFFFRVCFYGLVIKISLQSFIFVTLLILRLLWVCIKVCFFLA

SEQ ID NO: 5669 - DNA, 524 bp, Arabidopsis thaliana
  misc_feature (520)..(520): n is a, c, g, or t
agagatatattgaaatcaaggagacaaaaacttaagaaaaaaaaccaaaaaaaaaagagagaggtgaaattgattttctgctcgcgatcgtcatttcaatttctaattagctttcctggtgtttcttctccggcgtaatcatgacaacctcaaaaagactagcagacaggaagattgagaaattcgacaaaaacattttaaagagaggatttgttcctgagaccaccaccaagaagggcaaggattatcccgttggtcccatccttcttggcttctttgtctttgttgtcattggatcatctctctttcagatcattaggactgcaactagcggaggcatggcataaaccaaaacacagtcaagctagaagaagcagttttcaaaatgtagaatcttcttctgtctcctttctttttctctccttatactgtagaatgtgtcaactttctgtttactatatcatgtaatgaagattatttgagttttttataatccaagtatccaacgcttaagtatgtncttc

SEQ ID NO: 5670 - protein, 68 aa, Arabidopsis thaliana
MTTSKRLADRKIEKFDKNILKRGFVPETTTKKGKDYPVGPILLGFFVFVVIGSSLFQIIRTATSGGMA

SEQ ID NO: 5671 - protein, 45 aa, Arabidopsis thaliana
RDILKSRRQKLKKKNQKKKREVKLIFCSRSSFQFLISFPGVSSPA

SEQ ID NO: 5672 - DNA, 1456 bp, Arabidopsis thaliana
tggaatcactttagttatcaatcgatagaaacgcctttcaattaccaaacatcgaaaccaccatgagggttatctcaaaactgttcgattccgacagaagacgaatacccaaatcgccgaagcatttggattccggcgaaagcgccacgtcatcttcctcactcagcgacgtaaccaccggctcaagcagccttcatagcagtctctctctccaaacgcttccttcagttccctctcttcagaaaatcccatccaccaccgtcaccgtctctcactccgttacctcctcgtttaaactccgtgaacggagtcttcctgtaacttgtctcgccgtcaatggtggttacctcttcgccgtgtctggacacgaagtaagtatctacgatcgcgacatgtgtgctcatctcgacacattcaacggccaagatcctttctcaggaaccgtgaagtccgtcggcttctccggtgagaaaatcttcacggcgcatcaagacggtaaaatcggagtttggaaacttacggcgaaaagcggttataaacagttaacgacgcttcctactttaaacgaccgtttacgacgtttcgctcttcctaaaaactacgttcaagtacgccgtcataagaaacgtctctggatcgaacatgctgacgccgttactgctctcgccgttagtgacggattcatttactctgtttcttgggataagactttgaagatatggagagcctccgatcttcgttgcaaagaatcaatcaaagctcacgatgacgccgttaatgccattgccgtttctactaacggcaccgtttacactggatccgcggatagacgtatccgggtttgggccaaaccgaccggtgagaaacgtcacacgttagttgcgactttagagaagcacaaatcggcggttaacgcattagcattaaacgacgacggatcggttttgttctccggttcgtgtgaccggtctattttggtttgggagagagaggatacttccaattacatggcggtgagaggtgcgttgaggggacatgataaagcaatacttagcttgttcaacgtctctgatttgctactcagtggatcagctgatcggacggtcaggatttggcgacgtggacccgattctagttatagttgtttggaggttctttccggtcataccaagccggttaagtcgttggcggcggttagagaaaaggagttagacgatgtcgtttcgatcattagtggaagtcttgacggagaggttaaatgttggaaggtgtccgtcaccaaaccggataattcattttacacgaatctcgttcaataaattagtggcattaatttgttcttttgtcggtgtgttttatttatttgttagtactttagtattgttcggcgaacaaacaatttggcgtttttcagaagtcatttacacaaaatgagtaagaaataattgagcattat

SEQ ID NO: 5673 - protein, 418 aa, Arabidopsis thaliana
MRVISKLFDSDRRRIPKSPKHLDSGESATSSSSLSDVTTGSSSLHSSLSLQTLPSVPSLQKIPSTTVTVSHSVTSSFKLRERSLPVTCLAVNGGYLFAVSGHEVSIYDRDMCAHLDTFNGQDPFSGTVKSVGFSGEKIFTAHQDGKIGVWKLTAKSGYKQLTTLPTLNDRLRRFALPKNYVQVRRHKKRLWIEHADAVTALAVSDGFIYSVSWDKTLKIWRASDLRCKESIKAHDDAVNAIAVSTNGTVYTGSADRRIRVWAKPTGEKRHTLVATLEKHKSAVNALALNDDGSVLFSGSCDRSILVWEREDTSNYMAVRGALRGHDKAILSLFNVSDLLLSGSADRTVRIWRRGPDSSYSCLEVLSGHTKPVKSLAAVREKELDDVVSIISGSLDGEVKCWKVSVTKPDNSFYTNLVQ

SEQ ID NO: 5674 - protein, 308 aa, Arabidopsis thaliana
MCAHLDTFNGQDPFSGTVKSVGFSGEKIFTAHQDGKIGVWKLTAKSGYKQLTTLPTLNDRLRRFALPKNYVQVRRHKKRLWIEHADAVTALAVSDGFIYSVSWDKTLKIWRASDLRCKESIKAHDDAVNAIAVSTNGTVYTGSADRRIRVWAKPTGEKRHTLVATLEKHKSAVNALALNDDGSVLFSGSCDRSILVWEREDTSNYMAVRGALRGHDKAILSLFNVSDLLLSGSADRTVRIWRRGPDSSYSCLEVLSGHTKPVKSLAAVREKELDDVVSIISGSLDGEVKCWKVSVTKPDNSFYTNLVQ

SEQ ID NO: 5675 - DNA, 935 bp, Arabidopsis thaliana
gtcgtcgttagttttcccatttcctcataattcttcatctctttcctttctcatctctcgattcctttctttctttccatattccattgatttctctcttcttataaaaatacagattctctcttcttagaaccatcaccgattcgaacagatctaataaatcgtttttttcaccagatttttttcgccggagtttgttttgatccattctgttatggcggaagaacacagacttcaagaaccacgattatgtgctaacaattgtggcttcttcggaagcacagctacacaaaatctctgttccaaatgttttcgagatcttcaacatcaagaacaaaactcttccaccgccaaacatgctcttacccaatccttagccgccgttggcgctgctgcgtcttcctccgtgtcgccaccgcctccgcctccagctgattcgaaagaaatcgttgaagcgaaatcagagaaacgagcggcggctgaaccggaggaggcggatggtccgccgcaagatccgaagcggtgtttgacttgtcggcggcgcgtgggaatcacggggtttcggtgtaggtgtggtttcgttttctgcgggacgcataggtacgcggagcaacatgaatgttcgtttgatttcaagcggatggggaaggataagatcgctaaagcgaatccgattgtgaaagctgataagcttgagaagatttgactttgttgtttgttgtttgttgttgttgctttggttttgtgcgtttgaatgaaacacacatgaagaagaaagagcaagaaacaaacatgtcaatgtaaatttaagctttatttgatgatttcttcagtttggttattaaatttgcttattattgatttgattgttccgtttgatgatcttgtagaaggcttaagtcgtattatcaatgtgtagaatttggatttggttg

SEQ ID NO: 5676 - protein, 163 aa, Arabidopsis thaliana
MAEEHRLQEPRLCANNCGFFGSTATQNLCSKCFRDLQHQEQNSSTAKHALTQSLAAVGAAASSSVSPPPPPPADSKEIVEAKSEKRAAAEPEEADGPPQDPKRCLTCRRRVGITGFRCRCGFVFCGTHRYAEQHECSFDFKRMGKDKIAKANPIVKADKLEKI

SEQ ID NO: 5677 - DNA, 1178 bp, Arabidopsis thaliana
tggtgcatcatccgtctatcaataccctgacaaggaaaaccctaattttttttggcccaaagggttttatactttaatctcatactccgattcattgtcgaaaaacgatgatgcataattcaaccgaagaatcggaatgggaggtgagacctggtggtatgctcgtccaacgaagagacgacgccgcttcctccgaccacaaacctctccaggatcccgactctgcttccgccgcttttgctcaaaccatcagaatcactgtttctcatggctcatcgcaccacgatcttcatatttctgctcacgccactttcggggatgtgaagaaagctcttgttcagaaaactggattggaagctagtgaattgaagatcttgttcagaggagttgagagagatgatgctgaacaattgcaagctgctggtgttaaggatgcgtctaagcttgttgttgttgttgaggatacgaataagagagtggaacaacagcctcctgtggtaactaaagagatggaaaaagctattgctgctgttaacgcggttacaggagaggtcgataagctctcggatagagttgttgctttagaagttgctgtgaatggagggacgcaagttgcggtgcgggagtttgacatggctgcagagcttcttatgaggcagctgctcaaattggatggcattgaggctgaaggggacgctaaagtacagcgtaaggctgaggtacgtagaatccaaaacttgcaggaggctgtggataagttgaaggcaagatgttcaaatccgtttgtggatcagagcaaagctgcagctgtaagcactgagtgggaatcgttcggaaacggtgtcggaagcttgaaccctcctccgccagcttcgccttcggccaatgtaactcaagattgggagaaatttgactgacattttagtactgctacgttgccttggaaaaaaatgcttattgaaactgtttatctttttgattattgttaaatattggaaaacgaccatcgtctttatcttctaatgtatagatatattatatatagtatcggaaatctacatctctgtacgaaatgttggaataatccctgggaatagtctttgatgtctctcagtctctgtcgtgcctaattggcttatgtcgtagtactaaagattatggctacgagttttggaggc

SEQ ID NO: 5678 - protein, 269 aa, Arabidopsis thaliana
MMHNSTEESEWEVRPGGMLVQRRDDAASSDHKPLQDPDSASAAFAQTIRITVSHGSSHHDLHISAHATFGDVKKALVQKTGLEASELKILFRGVERDDAEQLQAAGVKDASKLVVVVEDTNKRVEQQPPVVTKEMEKAIAAVNAVTGEVDKLSDRVVALEVAVNGGTQVAVREFDMAAELLMRQLLKLDGIEAEGDAKVQRKAEVRRIQNLQEAVDKLKARCSNPFVDQSKAAAVSTEWESFGNGVGSLNPPPPASPSANVTQDWEKFD

SEQ ID NO: 5679 - protein, 268 aa, Arabidopsis thaliana
MHNSTEESEWEVRPGGMLVQRRDDAASSDHKPLQDPDSASAAFAQTIRITVSHGSSHHDLHISAHATFGDVKKALVQKTGLEASELKILFRGVERDDAEQLQAAGVKDASKLVVVVEDTNKRVEQQPPVVTKEMEKAIAAVNAVTGEVDKLSDRVVALEVAVNGGTQVAVREFDMAAELLMRQLLKLDGIEAEGDAKVQRKAEVRRIQNLQEAVDKLKARCSNPFVDQSKAAAVSTEWESFGNGVGSLNPPPPASPSANVTQDWEKFD

SEQ ID NO: 5680 - protein, 252 aa, Arabidopsis thaliana
MLVQRRDDAASSDHKPLQDPDSASAAFAQTIRITVSHGSSHHDLHISAHATFGDVKKALVQKTGLEASELKILFRGVERDDAEQLQAAGVKDASKLVVVVEDTNKRVEQQPPVVTKEMEKAIAAVNAVTGEVDKLSDRVVALEVAVNGGTQVAVREFDMAAELLMRQLLKLDGIEAEGDAKVQRKAEVRRIQNLQEAVDKLKARCSNPFVDQSKAAAVSTEWESFGNGVGSLNPPPPASPSANVTQDWEKFD

SEQ ID NO: 5681 - DNA, 647 bp, Arabidopsis thaliana
gccaaaaaaaaaacctaaacgcatcttcttcttctcactttcaaggatcaagagatcgcttcttacagttccatcttccaacattttactcagcagcttcagatggtgattccaccagcagtgagaccaccacgtctcttcgactacctaaaaccttacgtgctgaaaatgcatttcacaaacaagtttgtccacgcacaagtcatccactcaccaacagccacagtggcttgctcagcgagctcgcaagagaaagcattgagagaaacaatggacatcacacgcgacgtcgctgctgcttcaaagattggtaaaattcttggagaaagactcttgatgaaagatattcccgctgttactattcagatgaagaaagaacagaggtatcatggtaaagtcaaggctgttatcgattctgtaagagaagctggtgtcaagttgctctgaagattattcaataatctgaatcagtttggcaatgtcgtttctttttccggttaatcggacaaattgagataagattggtgccacatttttaaagccctgcttttaaaatccatgttacaagataatgaatgttataagctttgactatggaagtaaaatagattacataaatttaatgtctttaatactattctgcgatt

SEQ ID NO: 5682 - protein, 114 aa, Arabidopsis thaliana
MVIPPAVRPPRLFDYLKPYVLKMHFTNKFVHAQVIHSPTATVACSASSQEKALRETMDITRDVAAASKIGKILGERLLMKDIPAVTIQMKKEQRYHGKVKAVIDSVREAGVKLL

SEQ ID NO: 5683 - protein, 103 aa, Arabidopsis thaliana
QKKNLNASSSSHFQGSRDRFLQFHLPTFYSAASDGDSTSSETTTSLRLPKTLRAENAFHKQVCPRTSHPLTNSHSGLLSELARESIERNNGHHTRRRCCFKDW

SEQ ID NO: 5684 - protein, 92 aa, Arabidopsis thaliana
MHFTNKFVHAQVIHSPTATVACSASSQEKALRETMDITRDVAAASKIGKILGERLLMKDIPAVTIQMKKEQRYHGKVKAVIDSVREAGVKLL

SEQ ID NO: 5685 - DNA, 1408 bp, Arabidopsis thaliana
tttttttttttttttcttctgctttcgtgactttcaggggacacttttgtttttataacttacgcttaaaatcctatgaattcgccgccggttgacgcaatgattaccggagaatcatcgtcacaaagatctatcccaacgccgtttctcacaaaaacgtttaacctcgttgaagatagttccatcgacgatgttatctcatggaacgaagatggttcctctttcatcgtatggaatccgacagatttcgctaaagatttgcttcctaaacacttcaaacacaacaatttctctagtttcgttcgtcagctcaacacttacggattcaaaaaagttgtaccggatcgatgggagttttcaaacgatttctttaagagaggagaaaaacgtcttctccgtgagatccaacgtcggaaaataacaacgacgcatcaaacagttgttgctccttcgtcggaacaacgaaaccagacgatggttgtatcaccgtcaaattccggggaagataataataataatcaggtgatgtcttcgtctccgtcgtcgtggtattgtcatcaaacgaagacgactgggaatggtggtttatcagtggagttattggaagagaacgagaagcttcggagtcaaaacattcagctaaaccgtgagcttactcagatgaaatctatctgcgataatatctatagtctcatgtcgaattacgtcggatctcagcccactgatcggagttattctcccggaggtagtagtagtcaaccgatggagtttttaccggcgaagcggttttcggagatggagattgaagaagaagaagaagcgagtccgaggttgtttggtgttccgattgggttaaaacggacgagaagtgaaggtgttcaggtgaagacgacggcggtggttggggaaaattccgatgaggagacgccgtggttgagacattataatcgaaccaatcagagagtttgtaattaaaaacgaacggtttagatttgtggtgtagatatgtgcgcgaagtagacgattacagctttttaagacaagcagagcacgtgtcccatctgtttcaagaagtttctgcaatcttgacttcttcttttaacactttgtgttttttattatttaattaataacaataaatgttctttttcagttttgttttcttcaaaaatagttcggctgtttctagactttccttttttgacctttttttattcttcacatctttttgtgtgttttacaaatataataaacgagaaatgaggtagggatttcttattataaggataagaaattaaaatttgtaatgtaatgaagcatctggaatctcccgtttggtgggcgcgattcagggaacgtgttgtggacccagtttcgtcgactatcacaagtacatttttagattttc

SEQ ID NO: 5686 - protein, 299 aa, Arabidopsis thaliana
MNSPPVDAMITGESSSQRSIPTPFLTKTFNLVEDSSIDDVISWNEDGSSFIVWNPTDFAKDLLPKHFKHNNFSSFVRQLNTYGFKKVVPDRWEFSNDFFKRGEKRLLREIQRRKITTTHQTVVAPSSEQRNQTMVVSPSNSGEDNNNNQVMSSSPSSWYCHQTKTTGNGGLSVELLEENEKLRSQNIQLNRELTQMKSICDNIYSLMSNYVGSQPTDRSYSPGGSSSQPMEFLPAKRFSEMEIEEEEEASPRLFGVPIGLKRTRSEGVQVKTTAVVGENSDEETPWLRHYNRTNQRVCN

SEQ ID NO: 5687 - protein, 291 aa, Arabidopsis thaliana
MITGESSSQRSIPTPFLTKTFNLVEDSSIDDVISWNEDGSSFIVWNPTDFAKDLLPKHFKHNNFSSFVRQLNTYGFKKVVPDRWEFSNDFFKRGEKRLLREIQRRKITTTHQTVVAPSSEQRNQTMVVSPSNSGEDNNNNQVMSSSPSSWYCHQTKTTGNGGLSVELLEENEKLRSQNIQLNRELTQMKSICDNIYSLMSNYVGSQPTDRSYSPGGSSSQPMEFLPAKRFSEMEIEEEEEASPRLFGVPIGLKRTRSEGVQVKTTAVVGENSDEETPWLRHYNRTNQRVCN

SEQ ID NO: 5688 - protein, 166 aa, Arabidopsis thaliana
MVVSPSNSGEDNNNNQVMSSSPSSWYCHQTKTTGNGGLSVELLEENEKLRSQNIQLNRELTQMKSICDNIYSLMSNYVGSQPTDRSYSPGGSSSQPMEFLPAKRFSEMEIEEEEEASPRLFGVPIGLKRTRSEGVQVKTTAVVGENSDEETPWLRHYNRTNQRVCN

SEQ ID NO: 5689 - DNA, 984 bp, Arabidopsis thaliana
acttttctcagctccgacaaaaatggctgcaatcaccatttcttcctccttgcacgcctcagcctctccgcgtgttgttcgtccacatgtttctcgaaatacccctgtgatcaccctctattcacgcttcacaccatccttctccttcccatctctctccttcacactccgtgacacagctccgtctcgtcgtcgttccttctttatcgcctccgccgtcaaatctctaacggagacggagctgcttccaatcacagaggctgattcaatcccgtccgcttccggtgtatacgctgtatacgataagagcgacgagcttcagttcgtcggaatttctcggaacatcgctgcgagtgtctctgctcatctcaaatctgtgccggagctttgtggctccgttaaggttggaatagtagaagaaccagataaagcagttttaacacaagcatggaaattatggatagaagaacatataaaagtaactggaaaagttccgccggggaataagtcagggaacaacacatttgtcaaacaaactccgaggaagaaatccgatatccgtctcactccaggtcgccatgttgagctcacggttcctttggaggaactgattgaccgtttagtgaaagagagcaaagtggtagctttcataaaaggatcaaggagtgctcctcaatgtggattctcacagagagttgttgggattcttgaaagccaaggagttgattatgaaactgttgatgttcttgacgatgagtataatcatgggctaagggagacgcttaagaactacagcaattggccaacgtttccacagatatttgtgaaaggagaacttgtaggaggatgtgatattttgacctcaatgtatgaaaatggtgaacttgccaatatcttgaactagtttcatccgattttcttctctatttctagttgtaactccaaacattcattatagagaaaacatgcttggattctcttcct

SEQ ID NO: 5690 - protein, 300 aa, Arabidopsis thaliana
LFSAPTKMAAITISSSLHASASPRVVRPHVSRNTPVITLYSRFTPSFSFPSLSFTLRDTAPSRRRSFFIASAVKSLTETELLPITEADSIPSASGVYAVYDKSDELQFVGISRNIAASVSAHLKSVPELCGSVKVGIVEEPDKAVLTQAWKLWIEEHIKVTGKVPPGNKSGNNTFVKQTPRKKSDIRLTPGRHVELTVPLEELIDRLVKESKVVAFIKGSRSAPQCGFSQRVVGILESQGVDYETVDVLDDEYNHGLRETLKNYSNWPTFPQIFVKGELVGGCDILTSMYENGELANILN

SEQ ID NO: 5691 - protein, 293 aa, Arabidopsis thaliana
MAAITISSSLHASASPRVVRPHVSRNTPVITLYSRFTPSFSFPSLSFTLRDTAPSRRRSFFIASAVKSLTETELLPITEADSIPSASGVYAVYDKSDELQFVGISRNIAASVSAHLKSVPELCGSVKVGIVEEPDKAVLTQAWKLWIEEHIKVTGKVPPGNKSGNNTFVKQTPRKKSDIRLTPGRHVELTVPLEELIDRLVKESKVVAFIKGSRSAPQCGFSQRVVGILESQGVDYETVDVLDDEYNHGLRETLKNYSNWPTFPQIFVKGELVGGCDILTSMYENGELANILN

SEQ ID NO: 5692 - DNA, 1034 bp, Arabidopsis thaliana
atgacaatggagtcatacaaaaccctagaaatcattcgcaagaacactgattcctccgtatttcatctcatcatcaacagaccatcacatctcaacgccttatctctcgatttcttcatcgaattccccaaagctctctcatctctcgaccaaaatccagatgtctccgtcatcatcctctccggcgccggaaaacacttctgctccggtatcgatctcaattccctctcttcaatctcgacacaatcctcctccggtaacgacagaggacgatctagcgagcagctacgccgtaagatcaagtcgatgcaagcggcgattacagcgattgaacaatgccggaaacctgtaatcgccgctattcacggcgcgtgtatcggtggcggtgttgatctgattaccgcttgtgatattaggtattgctctgaggatgcgtttttctcgattaaagaggttgatctagcgattgttgcggatcttggtacacttcagcgattaccgagtatcgttgggtatgctaacgccatggaattggctttaactgctcggagattctctggaagtgaagcaaaggatcttggtttggtttctaaagttttcggatctaaatcggagcttgataatggcgtcactacaatcgccgaaggaataggaggcaagtctcctttagctgtgacagggacaaaggcagtgttattaagaagcagagaggtgagtgtagaacaaggacttgactatgtagcaacttggaactcggctatgcttatatcagatgatctcaacgaagctgtttctgctcagatgatgaaaagaaaacctcggtttgctaaactttgatacagtctctctgttgcttctttatctttcaaagctcttctggtaactaaagtaataagatattacttcaaataagtttagttattgatagttccctaattacggattagggctatagataaaatggtcttctacacatgagaatatgattaatactctgcacaatgcatattggtaaatgctatacctcaatgttt

SEQ ID NO: 5693 - protein, 278 aa, Arabidopsis thaliana
MTMESYKTLEIIRKNTDSSVFHLIINRPSHLNALSLDFFIEFPKALSSLDQNPDVSVIILSGAGKHFCSGIDLNSLSSISTQSSSGNDRGRSSEQLRRKIKSMQAAITAIEQCRKPVIAAIHGACIGGGVDLITACDIRYCSEDAFFSIKEVDLAIVADLGTLQRLPSIVGYANAMELALTARRFSGSEAKDLGLVSKVFGSKSELDNGVTTIAEGIGGKSPLAVTGTKAVLLRSREVSVEQGLDYVATWNSAMLISDDLNEAVSAQMMKRKPRFAKL

SEQ ID NO: 5694 - protein, 276 aa, Arabidopsis thaliana
MESYKTLEIIRKNTDSSVFHLIINRPSHLNALSLDFFIEFPKALSSLDQNPDVSVIILSGAGKHFCSGIDLNSLSSISTQSSSGNDRGRSSEQLRRKIKSMQAAITAIEQCRKPVIAAIHGACIGGGVDLITACDIRYCSEDAFFSIKEVDLAIVADLGTLQRLPSIVGYANAMELALTARRFSGSEAKDLGLVSKVFGSKSELDNGVTTIAEGIGGKSPLAVTGTKAVLLRSREVSVEQGLDYVATWNSAMLISDDLNEAVSAQMMKRKPRFAKL

SEQ ID NO: 5695 - protein, 176 aa, Arabidopsis thaliana
MQAAITAIEQCRKPVIAAIHGACIGGGVDLITACDIRYCSEDAFFSIKEVDLAIVADLGTLQRLPSIVGYANAMELALTARRFSGSEAKDLGLVSKVFGSKSELDNGVTTIAEGIGGKSPLAVTGTKAVLLRSREVSVEQGLDYVATWNSAMLISDDLNEAVSAQMMKRKPRFAKL

SEQ ID NO: 5696 - DNA, 470 bp, Arabidopsis thaliana
agctacacctgtagctggtaaaccactacggattcgtattgttttcaagaaaccgaaagaagctgaagctgtacctcaagaggatcctgtttgttccacttcagggactcagagacctagcgaattaccaagttctgtctctcttccaagtatctgtgatcatgatgtggctgtaccctcaacttctcttgagagtggcaaggtagcaattatttccgaatcaaagaagagaaagaaacataagcctagcaaagaatcccggtacaattcattgtttgatgaattagttcctccctgtatttccttggaggaagatgatagcagcagcgatgactggctttttggaacaagtcggaaagaaaatgtttcttctgccaagtcttcttataagactgatgaagacacgatcatgagcttgcagacgtcaagagattgttcctctttgcctagagctatgttattgtctgaag

SEQ ID NO: 5697 - protein, 156 aa, Arabidopsis thaliana
ATPVAGKPLRIRIVFKKPKEAEAVPQEDPVCSTSGTQRPSELPSSVSLPSICDHDVAVPSTSLESGKVAIISESKKRKKHKPSKESRYNSLFDELVPPCISLEEDDSSSDDWLFGTSRKENVSSAKSSYKTDEDTIMSLQTSRDCSSLPRAMLLSE

SEQ ID NO: 5698 - DNA, 969 bp, Arabidopsis thaliana
atcccaaaattgcagaaccagcttctttcttccgaagagaaaccaaaaacaaaagaaaatggaaatggtgacaagttttgtatatccaccacctccatcaatattgctcaattgtatgagcgtcgttggtgtagctgctctggccaatatcggttggtctgaaatcagaggaaatcatctcaaatactccaaattcggcgtatcatcatcatcaccacaaccacagaaggagcgattcggcagcatctcaagccgaaatggaatgcttttgctatacacacctgcgtttctagcagctgcgtcttctttcttcgtcgtaccttctgatgatctcaggtttcttcttctcaaatccgcacttgccctccatttcttcaagagggtattcgaggttctgttcatacataaatacagtggagggatggctatagactcagctctcaccataagtagcagctatttctcatccacagcattgatgttatacagtcaaaatctcaccttgggacttaccgagccgagtttcgatatgaaactcgccggagttgtgatgtttgtggtgggaattgttgggaatctgtatcaccatgttttgctggctaagctaaggaaagaagatgggaagaaagagtacaagataccaaaaggaggtctctttgatataatcatatgccctcactatctatttgagatccttgtgttttggagcttctttctcatctctcagaccatttattcattttctttcgctatgggaacaatgctctatctcattggtcggagttatgctacaagaacttggtatctttccaagtttgatgacttccccaagcatatcaaggctctcattccctttgtattctagagttttgttgttgttgtttcaagtgtctgaataaaactaagagaccttataggttcatttgtttaagttgaatttaataataaatcattagaaatcattgaatc

SEQ ID NO: 5699 - protein, 287 aa, Arabidopsis thaliana
SQNCRTSFFLPKRNQKQKKMEMVTSFVYPPPPSILLNCMSVVGVAALANIGWSEIRGNHLKYSKFGVSSSSPQPQKERFGSISSRNGMLLLYTPAFLAAASSFFVVPSDDLRFLLLKSALALHFFKRVFEVLFIHKYSGGMAIDSALTISSSYFSSTALMLYSQNLTLGLTEPSFDMKLAGVVMFVVGIVGNLYHHVLLAKLRKEDGKKEYKIPKGGLFDIIICPHYLFEILVFWSFFLISQTIYSFSFAMGTMLYLIGRSYATRTWYLSKFDDFPKHIKALIPFVF

SEQ ID NO: 5700 - protein, 268 aa, Arabidopsis thaliana
MEMVTSFVYPPPPSILLNCMSVVGVAALANIGWSEIRGNHLKYSKFGVSSSSPQPQKERFGSISSRNGMLLLYTPAFLAAASSFFVVPSDDLRFLLLKSALALHFFKRVFEVLFIHKYSGGMAIDSALTISSSYFSSTALMLYSQNLTLGLTEPSFDMKLAGVVMFVVGIVGNLYHHVLLAKLRKEDGKKEYKIPKGGLFDIIICPHYLFEILVFWSFFLISQTIYSFSFAMGTMLYLIGRSYATRTWYLSKFDDFPKHIKALIPFVF

SEQ ID NO: 5701 - protein, 266 aa, Arabidopsis thaliana
MVTSFVYPPPPSILLNCMSVVGVAALANIGWSEIRGNHLKYSKFGVSSSSPQPQKERFGSISSRNGMLLLYTPAFLAAASSFFVVPSDDLRFLLLKSALALHFFKRVFEVLFIHKYSGGMAIDSALTISSSYFSSTALMLYSQNLTLGLTEPSFDMKLAGVVMFVVGIVGNLYHHVLLAKLRKEDGKKEYKIPKGGLFDIIICPHYLFEILVFWSFFLISQTIYSFSFAMGTMLYLIGRSYATRTWYLSKFDDFPKHIKALIPFVF

SEQ ID NO: 5702 - DNA, 902 bp, Arabidopsis thaliana
gtcgacccacgcgtccgaacgaaactcctgagctcagcttcactttgctcgacgttatcttcttcgttcagcgacaatggcgtcgattacgaacctcgcctcttctctctcttcactctcgttctcctcccaagtttctcaaagacctaacaccatttccttcccccgcgcgaattcagtattcgcattaccggcgaaatccgcacgccgcgcttctctatctatcaccgccacggtatctgctccaccggaggaggaggagatagttgaactgaagaaatacgtcaaatcgaggcttcccggaggatttgctgctcagaagattattggcactggacgacgtaagtgcgcaatcgctagagttgttcttcaggaaggtactgggaaggttatcatcaactatcgtgatgccaaggagtaccttcagggaaatccattgtggcttcagtatgttaaagtaccattggtgactttaggatatgagaatagctacgacatatttgtgaaagcccatggaggcggtctctcaggtcaagctcaagcaattaccttgggagtcgcacgtgcactcctgaaggtaagtgcagaccacagatcgcctttgaagaaggaaggtttgctcactagagatgcgagagtggttgaaagaaagaaggccgggctcaagaaggcgcgtaaagccccacaattctccaagcgttaagagttttatatatcattgaatcaactcttcaagtagactcctctgcctccatttttttttaaaacttttcttgtctattatcggtcttttgtttcatgttaatgtttatgtgtagacgaactaatacaatctctgttttgtttgaatggaacgcaaagttgatatgcttttgtaacaaatgcacttatgaattgtgatc

SEQ ID NO: 5703 - protein, 208 aa, Arabidopsis thaliana
MASITNLASSLSSLSFSSQVSQRPNTISFPRANSVFALPAKSARRASLSITATVSAPPEEEEIVELKKYVKSRLPGGFAAQKIIGTGRRKCAIARVVLQEGTGKVIINYRDAKEYLQGNPLWLQYVKVPLVTLGYENSYDIFVKAHGGGLSGQAQAITLGVARALLKVSADHRSPLKKEGLLTRDARVVERKKAGLKKARKAPQFSKR

SEQ ID NO: 5704 - DNA, 1821 bp, Arabidopsis thaliana
tggtcccaaacgattcacttttctcaccatctcaatctccagaccaaaagaaacaaaaaatggattctttttcatattcttcgatgaaatccatgttgattcaagctcgtggctcgttgaactcgcgtttgtcggagtttgagccactggttctgctattggttccgcttgtctctctgtttctcgctcagattatcggatctgtgtttggcgttgttcacgagaaaggcctcaaagcttgtcttattgggtttatcatgggactcctcaaaatgattcctggagttcagaattacattgatgctgagaaacaaaaggttgttgaccaattacaatctggtagcagctctaagaaaaagaataagactgaagtattgccagtaaaaggtctaggagttgaagttttagagaaaatggagaatgagaagaggaatgatgctatttggcaaggaaaatgctctggcactgtatacataggtggagccgagtctgaaggacatttttcattgataaatcaagcatgttcaatgtttgcgcataccaatccgttgcatatagacgtattccagagtgtggtgcggtttgagtcagaagtagtcgcaatgactgctgcgttacttgggagtaaagaaacggcgtcaggaggtcaaatatgcggaaacatgacgtctggaggaacagaaagtatagtgttggctgtgaagtcatctcgtgactatatgaagtacaagaagggaatcacacggccagaaatgattatacctgagtcgggtcattcggcttatgataaggcggcccagtattttaaaatcaagttgtggcgagttccagttgacaaagacttccgagctgatgtgaaggcaacaaggcggcatattaacagaaacaccatcatgattgttggatcagcaccaggattccctcatggcatcattgatcctatcgaggagcttggtcaactggctcttagctatggaatatgctttcatgttgacctttgccttggtggttttgtgttacctttcgctcgtaaacttgggtaccagatcccaccttttgatttttctgtacaaggagttacttcaatttctgtggacgtgcataaatatggtttggctcctaaaggaactagtacagttctatatagaaatcatgagatcagaaagcaccaatttgttgctgtaactgaatggtcaggaggtctatacgtgtctccaactatcgctgggagtaggcctgggtctttggtagccggtgcttgggctgcaatgatgtcgctcggcgaagaaggttacctacaaaacacaagtaagataatggaagcatcaaagagactagaagaaggagtaagagaaatccatgaactattcgtcattggaaagccagatatgacaatcgtggcttttggttctaaagcattggatatatttgaagttaatgacatcatgtcttctaaaggttggcatttgaatgcactacagagacccaacagcattcatatatgtattactcttcaacacgtccctgtagtcgatgacttccttcgggatctgcgtgaagctgtggaaactgtaaaagcaaacccaggaccgatcacgggaggcttggctccaatatatggagcagcagggaagatgccagaccgaggcatggtgaatgagcttctggttagtttcatggacagtcaatattaagtttcttgaaggttaaagcatctagtgggtaaattgatatcacatttcagttggagaagcaaaactttgtatattcacaaccacattgtttcgtttgccctactaataaaatttcattacaatcttc

SEQ ID NO: 5705 - protein, 563 aa, Arabidopsis thaliana
VPNDSLFSPSQSPDQKKQKMDSFSYSSMKSMLIQARGSLNSRLSEFEPLVLLLVPLVSLFLAQIIGSVFGVVHEKGLKACLIGFIMGLLKMIPGVQNYIDAEKQKVVDQLQSGSSSKKKNKTEVLPVKGLGVEVLEKMENEKRNDAIWQGKCSGTVYIGGAESEGHFSLINQACSMFAHTNPLHIDVFQSVVRFESEVVAMTAALLGSKETASGGQICGNMTSGGTESIVLAVKSSRDYMKYKKGITRPEMIIPESGHSAYDKAAQYFKIKLWRVPVDKDFRADVKATRRHINRNTIMIVGSAPGFPHGIIDPIEELGQLALSYGICFHVDLCLGGFVLPFARKLGYQIPPFDFSVQGVTSISVDVHKYGLAPKGTSTVLYRNHEIRKHQFVAVTEWSGGLYVSPTIAGSRPGSLVAGAWAAMMSLGEEGYLQNTSKIMEASKRLEEGVREIHELFVIGKPDMTIVAFGSKALDIFEVNDIMSSKGWHLNALQRPNSIHICITLQHVPVVDDFLRDLREAVETVKANPGPITGGLAPIYGAAGKMPDRGMVNELLVSFMDSQY

SEQ ID NO: 5706 - protein, 544 aa, Arabidopsis thaliana
MDSFSYSSMKSMLIQARGSLNSRLSEFEPLVLLLVPLVSLFLAQIIGSVFGVVHEKGLKACLIGFIMGLLKMIPGVQNYIDAEKQKVVDQLQSGSSSKKKNKTEVLPVKGLGVEVLEKMENEKRNDAIWQGKCSGTVYIGGAESEGHFSLINQACSMFAHTNPLHIDVFQSVVRFESEVVAMTAALLGSKETASGGQICGNMTSGGTESIVLAVKSSRDYMKYKKGITRPEMIIPESGHSAYDKAAQYFKIKLWRVPVDKDFRADVKATRRHINRNTIMIVGSAPGFPHGIIDPIEELGQLALSYGICFHVDLCLGGFVLPFARKLGYQIPPFDFSVQGVTSISVDVHKYGLAPKGTSTVLYRNHEIRKHQFVAVTEWSGGLYVSPTIAGSRPGSLVAGAWAAMMSLGEEGYLQNTSKIMEASKRLEEGVREIHELFVIGKPDMTIVAFGSKALDIFEVNDIMSSKGWHLNALQRPNSIHICITLQHVPVVDDFLRDLREAVETVKANPGPITGGLAPIYGAAGKMPDRGMVNELLVSFMDSQY

SEQ ID NO: 5707 - protein, 536 aa, Arabidopsis thaliana
MKSMLIQARGSLNSRLSEFEPLVLLLVPLVSLFLAQIIGSVFGVVHEKGLKACLIGFIMGLLKMIPGVQNYIDAEKQKVVDQLQSGSSSKKKNKTEVLPVKGLGVEVLEKMENEKRNDAIWQGKCSGTVYIGGAESEGHFSLINQACSMFAHTNPLHIDVFQSVVRFESEVVAMTAALLGSKETASGGQICGNMTSGGTESIVLAVKSSRDYMKYKKGITRPEMIIPESGHSAYDKAAQYFKIKLWRVPVDKDFRADVKATRRHINRNTIMIVGSAPGFPHGIIDPIEELGQLALSYGICFHVDLCLGGFVLPFARKLGYQIPPFDFSVQGVTSISVDVHKYGLAPKGTSTVLYRNHEIRKHQFVAVTEWSGGLYVSPTIAGSRPGSLVAGAWAAMMSLGEEGYLQNTSKIMEASKRLEEGVREIHELFVIGKPDMTIVAFGSKALDIFEVNDIMSSKGWHLNALQRPNSIHICITLQHVPVVDDFLRDLREAVETVKANPGPITGGLAPIYGAAGKMPDRGMVNELLVSFMDSQY

SEQ ID NO: 5708 - DNA, 2346 bp, Arabidopsis thaliana
atgaaatctttcctcctctctagacaagcgatccaccgtatttcactattatcttcaaaaaccccaactttctgcagaaacttctccgccattacatccaccatttctcactctgatcgtcatctaagaagctacgacgaacaaaccccattccaaaatgtcgaaatccctagacccatttcatcattcaatcgatatttccactttactcgcgagtcccgactcagtgaatccagtgccgccattgacgactcaaatgaccaagaggaagatgacgaagatggaacaacaaacgagttcctctcacgattcgtttggataatgcgtgggaaagtctcagaagcttacccagattgtgacaagaagatgattgatggtatgcttctgcttattgttgagaaagtcgtggaagaaatcgaaagaggtggattcaataaagttggatcagctccaccttcaccgtcatcggagtttagcgatgatctatgggctactatctgggaagttagtaatacagtgttgaaagatatggagaaagagaggaagaaggagaagatgaagcaatacgttcaatctcctgaagtgatggagatgtgtaggtttgctggagagattggtattcgtggtgatttgcttagagaacttagatttaaatgggcaagagagaaaatggacgacgctgagttttatgagagtttggaacagcaacgtgatttggataattcgattagggaatctgaaactgtggatggagaagtagaagaagaagggtttgttccttctgatgaagttgaatctaggagtatctcccttcctaaacgaaaggggaagttgaagtacaagatctacgggcttgagttgtcggatccgaaatgggttgaaatggctgataaaattcatgaagctgaggaagaggctgattggagagagcctaaacctgtaactggaaagtgcaaattggttatggagaagcttgagtctttgcaggagggagatgatccttcagggttgcttgctgaatgggctgagttattggagcctaaccgtgtggattggattgctttaattaatcagttgcgagaaggaaacactcatgcatacttaaaggtggcagagggtgtcctggatgaaaaatcgttcaacgctagcatctcggactactcaaaactcatccatatccatgctaaagagaatcacattgaagatgttgagaggattctaaagaaaatgtctcaaaatgggatctttccagacattttaaccgccactgcgttggttcatatgtacagtaaatcaggcaactttgagcgagcaacagaggcatttgaaaacttgaagagctatgggttacggccagacgagaagatctacgaagccatgatcctgggctatgtaaacgctggcaagcctaaactaggtgagaggttgatgaaagagatgcaagcaaaggagttgaaagcctcagaagaagtttacatggctctgcttcgagcttatgcacaaatgggagatgccaatggagctgcggggatttcttcttcaatgcagtatgcatcagacggtccactgagctttgaagcatatagtttatttgtggaagcatatgggaaagcaggtcaggtggataaagcgaaaagtaactttgatgaaatgagaaagcttggccacaaacccgatgacaagtgcattgcaaatttggtccgagcttataagggagagaactcattagataaggcactgagacttttgttgcagctggagaaagatgggattgaaattggtgtgatcacttacaccgttcttgttgattggatggctaatcttgggcttatcgaggaagctgagcagcttctggttaagatctctcagttaggagaagctccaccatttgaactccaggtgagcttgtgctgtatgtattcgggtgtgaggaatgagaagaagactcttcaagctcttggggttttggaagctaagagagatcaaatgggacctaacgagtttgacaaagttataagtgcgttgaaaaggggtgggtttgaaaaagatgcgagaagaatgtacaagtatatggaagctcgaaagtttttaccttcacagagattgcagatggatatggttgcaccacctcgagcttttgggtctggatctggtagagtgagacgatttaactcgtaagtggaaaaatcttttgaaacttattcaccatcgtgtgttcaatgttctgagccaactcacattacgagtttccattgattaaactgtagttgtgttctgtaataatcttgttccttggaattttggaatctatttactgcttctttttagctatgagatttttcttat

SEQ ID NO: 5709 - protein, 725 aa, Arabidopsis thaliana
MKSFLLSRQAIHRISLLSSKTPTFCRNFSAITSTISHSDRHLRSYDEQTPFQNVEIPRPISSFNRYFHFTRESRLSESSAAIDDSNDQEEDDEDGTTNEFLSRFVWIMRGKVSEAYPDCDKKMIDGMLLLIVEKVVEEIERGGFNKVGSAPPSPSSEFSDDLWATIWEVSNTVLKDMEKERKKEKMKQYVQSPEVMEMCRFAGEIGIRGDLLRELRFKWAREKMDDAEFYESLEQQRDLDNSIRESETVDGEVEEEGFVPSDEVESRSISLPKRKGKLKYKIYGLELSDPKWVEMADKIHEAEEEADWREPKPVTGKCKLVMEKLESLQEGDDPSGLLAEWAELLEPNRVDWIALINQLREGNTHAYLKVAEGVLDEKSFNASISDYSKLIHIHAKENHIEDVERILKKMSQNGIFPDILTATALVHMYSKSGNFERATEAFENLKSYGLRPDEKIYEAMILGYVNAGKPKLGERLMKEMQAKELKASEEVYMALLRAYAQMGDANGAAGISSSMQYASDGPLSFEAYSLFVEAYGKAGQVDKAKSNFDEMRKLGHKPDDKCIANLVRAYKGENSLDKALRLLLQLEKDGIEIGVITYTVLVDWMANLGLIEEAEQLLVKISQLGEAPPFELQVSLCCMYSGVRNEKKTLQALGVLEAKRDQMGPNEFDKVISALKRGGFEKDARRMYKYMEARKFLPSQRLQMDMVAPPRAFGSGSGRVRRFNS

SEQ ID NO: 5710 - protein, 618 aa, Arabidopsis thaliana
MRGKVSEAYPDCDKKMIDGMLLLIVEKVVEEIERGGFNKVGSAPPSPSSEFSDDLWATIWEVSNTVLKDMEKERKKEKMKQYVQSPEVMEMCRFAGEIGIRGDLLRELRFKWAREKMDDAEFYESLEQQRDLDNSIRESETVDGEVEEEGFVPSDEVESRSISLPKRKGKLKYKIYGLELSDPKWVEMADKIHEAEEEADWREPKPVTGKCKLVMEKLESLQEGDDPSGLLAEWAELLEPNRVDWIALINQLREGNTHAYLKVAEGVLDEKSFNASISDYSKLIHIHAKENHIEDVERILKKMSQNGIFPDILTATALVHMYSKSGNFERATEAFENLKSYGLRPDEKIYEAMILGYVNAGKPKLGERLMKEMQAKELKASEEVYMALLRAYAQMGDANGAAGISSSMQYASDGPLSFEAYSLFVEAYGKAGQVDKAKSNFDEMRKLGHKPDDKCIANLVRAYKGENSLDKALRLLLQLEKDGIEIGVITYTVLVDWMANLGLIEEAEQLLVKISQLGEAPPFELQVSLCCMYSGVRNEKKTLQALGVLEAKRDQMGPNEFDKVISALKRGGFEKDARRMYKYMEARKFLPSQRLQMDMVAPPRAFGSGSGRVRRFNS

SEQ ID NO: 5711 - protein, 603 aa, Arabidopsis thaliana
MIDGMLLLIVEKVVEEIERGGFNKVGSAPPSPSSEFSDDLWATIWEVSNTVLKDMEKERKKEKMKQYVQSPEVMEMCRFAGEIGIRGDLLRELRFKWAREKMDDAEFYESLEQQRDLDNSIRESETVDGEVEEEGFVPSDEVESRSISLPKRKGKLKYKIYGLELSDPKWVEMADKIHEAEEEADWREPKPVTGKCKLVMEKLESLQEGDDPSGLLAEWAELLEPNRVDWIALINQLREGNTHAYLKVAEGVLDEKSFNASISDYSKLIHIHAKENHIEDVERILKKMSQNGIFPDILTATALVHMYSKSGNFERATEAFENLKSYGLRPDEKIYEAMILGYVNAGKPKLGERLMKEMQAKELKASEEVYMALLRAYAQMGDANGAAGISSSMQYASDGPLSFEAYSLFVEAYGKAGQVDKAKSNFDEMRKLGHKPDDKCIANLVRAYKGENSLDKALRLLLQLEKDGIEIGVITYTVLVDWMANLGLIEEAEQLLVKISQLGEAPPFELQVSLCCMYSGVRNEKKTLQALGVLEAKRDQMGPNEFDKVISALKRGGFEKDARRMYKYMEARKFLPSQRLQMDMVAPPRAFGSGSGRVRRFNS

SEQ ID NO: 5712 - DNA, 547 bp, Arabidopsis thaliana
aaccaatcataacttgcattcaaagagttctacaacacaagttacaatctccttctgctttcggatctacaaaatattttcctgaaaagaatgatgaacacaaaaaagctaatcaagatggccaagaagtggcaacaaagagcagccctccacaggaaaaggatctcatttcaaagatcaagtagtgctactagctcaaccgctgcagagaagggttgttttgtggtttacacgacagacagcacacgctttgcttttccgctaagttacctgagtaactctgttttccaagaactcttgaagatctctgaagaagagtttggcctcccaactggtggacctatcacattgccattcgattcagttttcttggagtatctcatcaaattggtccaaagacgaatggatgcagacacagaaaaggctttgttaatgtcaatctctagtgctagatgttcttcccaatgctctttgaaactacaagaacgtagtactcaacaattgcttgtattttagagaattcgtgtgtagcagtttttgtgtttgc

SEQ ID NO: 5713 - protein, 141 aa, Arabidopsis thaliana
MMNTKKLIKMAKKWQQRAALHRKRISFQRSSSATSSTAAEKGCFVVYTTDSTRFAFPLSYLSNSVFQELLKISEEEFGLPTGGPITLPFDSVFLEYLIKLVQRRMDADTEKALLMSISSARCSSQCSLKLQERSTQQLLVF

SEQ ID NO: 5714 - protein, 140 aa, Arabidopsis thaliana
MNTKKLIKMAKKWQQRAALHRKRISFQRSSSATSSTAAEKGCFVVYTTDSTRFAFPLSYLSNSVFQELLKISEEEFGLPTGGPITLPFDSVFLEYLIKLVQRRMDADTEKALLMSISSARCSSQCSLKLQERSTQQLLVF

SEQ ID NO: 5715 - protein, 132 aa, Arabidopsis thaliana
MAKKWQQRAALHRKRISFQRSSSATSSTAAEKGCFVVYTTDSTRFAFPLSYLSNSVFQELLKISEEEFGLPTGGPITLPFDSVFLEYLIKLVQRRMDADTEKALLMSISSARCSSQCSLKLQERSTQQLLVF

SEQ ID NO: 5716 - DNA, 605 bp, Arabidopsis thaliana
gtgcactgcttcattctctataaccaagtataagcttggagggggttatttttctaaaagggattgagtttttaagatcatgtctatgacagtggagataagagttccaaacttggattgtgaaggatgtgcttctaagcttaggaagactctactcaagcttaaaggagtggaagaagtggaagtagagatggaaacccaaaaagtgacggctcgaggataccggttagaggaaaagaaggtattgaaagcggtacgacgtgccggtaaggcagctgaactgtggccataccggttaggtaatagccattttgcctctttctataaatatccttcttacgtgaccaaccactattactctgatgcacaccgtacggatcccaccggtggtgtccacactttcttccacactcccgcggattactcggttgctgtggctggagatgagatcgcggcttcgatgtttagcgatgataatccccatgcttgtactattatgtagtcttttagtatacaaaaatatgttttcagttcatcttcttcgtccaaatttgatttgatgtgattttttttgtacaactaatgttggaatgagaaagtaaaat

SEQ ID NO: 5717 - protein, 140 aa, Arabidopsis thaliana
MSMTVEIRVPNLDCEGCASKLRKTLLKLKGVEEVEVEMETQKVTARGYRLEEKKVLKAVRRAGKAAELWPYRLGNSHFASFYKYPSYVTNHYYSDAHRTDPTGGVHTFFHTPADYSVAVAGDEIAASMFSDDNPHACTIM

SEQ ID NO: 5718 - protein, 138 aa, Arabidopsis thaliana
MTVEIRVPNLDCEGCASKLRKTLLKLKGVEEVEVEMETQKVTARGYRLEEKKVLKAVRRAGKAAELWPYRLGNSHFASFYKYPSYVTNHYYSDAHRTDPTGGVHTFFHTPADYSVAVAGDEIAASMFSDDNPHACTIM

SEQ ID NO: 5719 - protein, 103 aa, Arabidopsis thaliana
METQKVTARGYRLEEKKVLKAVRRAGKAAELWPYRLGNSHFASFYKYPSYVTNHYYSDAHRTDPTGGVHTFFHTPADYSVAVAGDEIAASMFSDDNPHACTIM

SEQ ID NO: 5720 - DNA, 1076 bp, Arabidopsis thaliana
aatttgccgttgaaggggctcgcaggacttctgtctgcgtctccgaaccaattctcttcttcttctctcgatccgatccgttttctacttctctcaatttcgaaccaattggatcgcatcttacgggggcgaggacgaggaagaagaatttttgctccgggataattgtctcatctgatttatatcggaaaaaaggtcgcttgccggataggacacgatccactttcataaaggagatatttttacagattcagtggacgccatggatgtgcctagctcttgggatgctttacggaaacaggctagaaagattgaagctcagcttgacgagcagatgcattcatatcgtagacttgtttcaactaaggctttatcaaagtcagatggttctgagagtgatattgaagctggaattgacttacttcttaggcaactgcaacaagttaatgctcagatgcaagcatgggtttcttctggtggatcagaaatggtctcccatactttaactcgacatcaagagatccttcaagatctgacacaggagttttatcgacatcgctccagtcttagagcaaaacaagagcatgcttcacttcttgaggactttagagaatttgatcggactagattagatttagaagatggatatgggtctgaacaagccctgatcaaggaacatatgggaatcaaccgcaatacagctcagatggacggtgtcatttcacaagctcaggcaacactcggtacacttgtgtttcaacgttcaacttttggaggcatcaactcaaagcttagcaatgtcgccagccgtctacctacggtgaacactattctggcagcgataaagaggaaaaagtcgatggatacaatcattctttcactcgttgcggctgtatgcacatttctcatattcatttactggataaccaagtagaatttgcccatttctttcgtttcatctttatgttgggccacgtctggttttcccatgatgtcaatttgttctgcaattatcggtgttctagtaaagaatctaaagatcaaaaacataaatattgtgtacagaaaatttcagc

SEQ ID NO: 5721 - protein, 223 aa, Arabidopsis thaliana
MDVPSSWDALRKQARKIEAQLDEQMHSYRRLVSTKALSKSDGSESDIEAGIDLLLRQLQQVNAQMQAWVSSGGSEMVSHTLTRHQEILQDLTQEFYRHRSSLRAKQEHASLLEDFREFDRTRLDLEDGYGSEQALIKEHMGINRNTAQMDGVISQAQATLGTLVFQRSTFGGINSKLSNVASRLPTVNTILAAIKRKKSMDTIILSLVAAVCTFLIFIYWITK

SEQ ID NO: 5722 - protein, 199 aa, Arabidopsis thaliana
MHSYRRLVSTKALSKSDGSESDIEAGIDLLLRQLQQVNAQMQAWVSSGGSEMVSHTLTRHQEILQDLTQEFYRHRSSLRAKQEHASLLEDFREFDRTRLDLEDGYGSEQALIKEHMGINRNTAQMDGVISQAQATLGTLVFQRSTFGGINSKLSNVASRLPTVNTILAAIKRKKSMDTIILSLVAAVCTFLIFIYWITK

SEQ ID NO: 5723 - protein, 167 aa, Arabidopsis thaliana
FAVEGARRTSVCVSEPILFFFSRSDPFSTSLNFEPIGSHLTGARTRKKNFCSGIIVSSDLYRKKGRLPDRTRSTFIKEIFLQIQWTPWMCLALGMLYGNRLERLKLSLTSRCIHIVDLFQLRLYQSQMVLRVILKLELTYFLGNCNKLMLRCKHGFLLVDQKWSPIL

SEQ ID NO: 5724 - DNA, 722 bp, Arabidopsis thaliana
gtaaaatctcccggagacctctctccttctctcgcagccgacgatcccatccaaaaaccaaaactcgctctccggtgatcgtctttcgaaaatgaatttcttaaactcagctgcatccatttgcagaagagttagtctgagggaactcatcactgaggttcctgcttatactggcagcagcatttccgatggttcttcaagtgggttgagtttggtcttgaagcgttgggctactaagaaaaccgctggttctacaaagaacggtcgtgactctaatcccaagtttcttggtgttaagaaattcggaggagagagtgtgatacctggaaacatcatagttcgtcaacgtggaactcggtttcatcctggagactatgtcgggattggtaaggaccatactctgtttgcattgaaggaaggacgagtcaggttcgagaaaagcaagattacaggacgcaaatggattcatgttgatccaataggtggtcatgttcttcaccctatctacacaaaagccgcagctgcaaaatcgactaagttgaacacagcttcatagcaaactcgacaatctaaacgtgtcttcgtttcttcttttagattatatgatctctcgagtaaaagatgatggtatcttagaatatcaacactcatttcaattacagctgctgttttgtttccctctagtctctgtttggattcaacaaaacaaaatttttattcgc

SEQ ID NO: 5725 - protein, 154 aa, Arabidopsis thaliana
MNFLNSAASICRRVSLRELITEVPAYTGSSISDGSSSGLSLVLKRWATKKTAGSTKNGRDSNPKFLGVKKFGGESVIPGNIIVRQRGTRFHPGDYVGIGKDHTLFALKEGRVRFEKSKITGRKWIHVDPIGGHVLHPIYTKAAAAKSTKLNTAS

SEQ ID NO: 5726 - DNA, 509 bp, Arabidopsis thaliana
aaccccagttataagctcaaagttgtacttgacctttttaaagaagcacgaaacgaaaaaccctaaaattcccaagcagagaaagagagacagagcaagtacagatttcaactagctcaagatgatcatccctgttcgttgctttacttgtggaaaggtgattggaaacaaatgggatcagtatcttgatcttctccagctcgactacactgaaggggacgcacttgatgcactccagctagtcagatactgctgcaggcgtatgctaatgactcatgttgatctgattgagaagcttctcaactacaacactctggagaaatcagacaacagttagaagaggatgcaaatctgctgaaaaagttttcctctttagaggcttaaatattagtatgtatgaaaacatttggtgtatgtggtgtagacccttcaactccatctaaaattatatatgtgtgtcagttactttctcgtgtgattcaatctcatgatttcctgaccttgaaaac

SEQ ID NO: 5727 - protein, 71 aa, Arabidopsis thaliana
MIIPVRCFTCGKVIGNKWDQYLDLLQLDYTEGDALDALQLVRYCCRRMLMTHVDLIEKLLNYNTLEKSDNS

SEQ ID NO: 5728 - protein, 37 aa, Arabidopsis thaliana
TPVISSKLYLTFLKKHETKNPKIPKQRKRDRASTDFN

SEQ ID NO: 5729 - protein, 37 aa, Arabidopsis thaliana
MKTFGVCGVDPSTPSKIIYVCQLLSRVIQSHDFLTLK

SEQ ID NO: 5730 - DNA, 714 bp, Arabidopsis thaliana
ggttccggcttcgagattgatctgatttgctttgttgttttctttctgctacaagtagataaaaaatggcatggcgcagtgcagcacgctctttcgtctccgctacagctagagctccgtctctccgatctccgccgccaacgcttccccgcctccgtccttcccaatcctctttgccccgccgccgatttgcctctttcactaatcccaggaatttgggagagctaggatgcacagagtcattcttgcctctgtacaatgttgtggctgcagcgagactcacatctcaccttaatgttaatctgcgagctttctgcgaactctctaacgggaatggaaaagatgggtgatggaagtggattttcagtcgctggcaagagaggtgctactgctttgtacttgaatgcacaaagtggatgcatcagttatcttgaagcagttggagacttgagaaaaggggtgtaccaagaagaactcattggttgttttgtgttccattaggaaccaaaaactatatacattattatcgatcttccttcgcttttgtcaatttccagttttagaatatcactggatttctcttcatatttcttgttgtttagcccaatggctttaaatacttgagggtagattcagcaaattcttgaagaaccattgtttcatcgttgtatttataatgttatgaactcccttcgggtttcctgaaaggaattt

SEQ ID NO: 5731 - protein, 94 aa, Arabidopsis thaliana
MAWRSAARSFVSATARAPSLRSPPPTLPRLRPSQSSLPRRRFASFTNPRNLGELGCTESFLPLYNVVAAARLTSHLNVNLRAFCELSNGNGKDG

SEQ ID NO: 5732 - protein, 80 aa, Arabidopsis thaliana
MLWLQRDSHLTLMLICELSANSLTGMEKMGDGSGFSVAGKRGATALYLNAQSGCISYLEAVGDLRKGVYQEELIGCFVFH

SEQ ID NO: 5733 - protein, 75 aa, Arabidopsis thaliana
GSGFEIDLICFVVFFLLQVDKKWHGAVQHALSSPLQLELRLSDLRRQRFPASVLPNPLCPAADLPLSLIPGIWES

SEQ ID NO: 5734 - DNA, 1489 bp, Arabidopsis thaliana
atatataggaaagggaagaagatctcaataacacaaaaccttttaaactagtaaaatacacagattttaggatgagccaatgtgttccaaactgtcacatcgatgatactccggcagcagccaccaccaccgtccgctccaccacagccgcagacatccccatattagactacgaggtagccgagctgacgtgggagaacgggcaactaggcttgcacggcttaggtccaccgcgagtgacggcttcgtcgaccaagtactccacaggcgccggtggaacgttggagtcgatagtggaccaagctactcgcctccctaaccctaagcccacggatgagctcgtcccgtggttccatcatcgctcctccagggccgcgatggcaatggacgcgcttgtcccttgctccaacctagtacacgagcagcagagcaagcctggtggcgttggctccacccgggtggggtcatgtagcgatggtcgtaccatgggcggtggaaaacgagcaagagtggcaccggagtggagcggcggcgggagtcagcggctgaccatggacacttacgacgtaggtttcacctcaacatcaatgggctcgcacgataacacaatcgacgatcatgactccgtctgccacagccgcccacagatggaggacgaagaagagaagaaagccggaggaaaatcatcagtttcaaccaagagaagcagagctgctgctattcataaccaatccgaacgtaagaggagagataaaatcaatcaaaggatgaagactttgcaaaaactggttcccaattccagcaagacggataaagcatctatgttggatgaagtgatagagtatttgaagcaacttcaagcacaagtgagcatgatgagcagaatgaatatgccttctatgatgcttcctatggccatgcagcaacaacaacaactacaaatgtctctcatgtccaatcccatgggtttagggatgggcatggggatgcccggtctcggtctcctcgaccttaattctatgaaccgagctgctgcaagcgctcctaatatccatgccaacatgatgccaaacccatttttgcccatgaattgtccatcgtgggatgcttcttccaatgactctcgatttcagtctcctctcatccccgatcctatgtctgcctttcttgcatgctctactcagccaacgacgatggaagcgtatagcaggatggctacattatatcagcaaatgcaacaacaacttcctcctccttcgaatccaaaatgattattactcaaacacctctatatagtttacgtctatatatgtgttagtcacatacatacatatatatattccatcataattatttatttatatgtataggcttctcatgaattatgatattatacgtattacgtactttaaaaatatgtggtcgtaattggatagagaaaaataaataatggttatgtttgagtgaattagtaacatcactccacgcc

SEQ ID NO: 5735 - protein, 399 aa, Arabidopsis thaliana
MSQCVPNCHIDDTPAAATTTVRSTTAADIPILDYEVAELTWENGQLGLHGLGPPRVTASSTKYSTGAGGTLESIVDQATRLPNPKPTDELVPWFHHRSSRAAMAMDALVPCSNLVHEQQSKPGGVGSTRVGSCSDGRTMGGGKRARVAPEWSGGGSQRLTMDTYDVGFTSTSMGSHDNTIDDHDSVCHSRPQMEDEEEKKAGGKSSVSTKRSRAAAIHNQSERKRRDKINQRMKTLQKLVPNSSKTDKASMLDEVIEYLKQLQAQVSMMSRMNMPSMMLPMAMQQQQQLQMSLMSNPMGLGMGMGMPGLGLLDLNSMNRAAASAPNIHANMMPNPFLPMNCPSWDASSNDSRFQSPLIPDPMSAFLACSTQPTTMEAYSRMATLYQQMQQQLPPPSNPK

SEQ ID NO: 5736 - protein, 297 aa, Arabidopsis thaliana
MAMDALVPCSNLVHEQQSKPGGVGSTRVGSCSDGRTMGGGKRARVAPEWSGGGSQRLTMDTYDVGFTSTSMGSHDNTIDDHDSVCHSRPQMEDEEEKKAGGKSSVSTKRSRAAAIHNQSERKRRDKINQRMKTLQKLVPNSSKTDKASMLDEVIEYLKQLQAQVSMMSRMNMPSMMLPMAMQQQQQLQMSLMSNPMGLGMGMGMPGLGLLDLNSMNRAAASAPNIHANMMPNPFLPMNCPSWDASSNDSRFQSPLIPDPMSAFLACSTQPTTMEAYSRMATLYQQMQQQLPPPSNPK

SEQ ID NO: 5737 - protein, 295 aa, Arabidopsis thaliana
MDALVPCSNLVHEQQSKPGGVGSTRVGSCSDGRTMGGGKRARVAPEWSGGGSQRLTMDTYDVGFTSTSMGSHDNTIDDHDSVCHSRPQMEDEEEKKAGGKSSVSTKRSRAAAIHNQSERKRRDKINQRMKTLQKLVPNSSKTDKASMLDEVIEYLKQLQAQVSMMSRMNMPSMMLPMAMQQQQQLQMSLMSNPMGLGMGMGMPGLGLLDLNSMNRAAASAPNIHANMMPNPFLPMNCPSWDASSNDSRFQSPLIPDPMSAFLACSTQPTTMEAYSRMATLYQQMQQQLPPPSNPK

SEQ ID NO: 5738 - DNA, 1394 bp, Arabidopsis thaliana
tgagacgagaggcacacaaaaagagatacaaaaccaaaactttcaagcaaagcaattcaatttcaatcaaaaaccaaatcgaagatctttgaaagtttcctttttttccgaaatctgagcttgggtattgttggataagcttctcggagattgagattgaggattttgataggtgaggagattgaaagatttggatttttgggcggcaaaaatggtgatgcagacggaagctagggttggtgtgagctcaggacatggcgtagcttcgtcttctcatcgtttaacgcaggaccagagatcacatatcgaatcggcgtcgcagctcttagccggaggactcgctggtgcttttagcaagacttgtactgctcctctatctcgtctcaccattctcttccaggtgcaaggtatgcacacaaatgctgcagctttaagaaagccaagcatattacacgaggcttcacggatattgaatgaagaaggattgaaagctttttggaaagggaatctagttactattgctcaccggcttccatattcttctgttaatttctacgcatatgaacactacaagaagttcatgtatatggttactgggatggaaaatcacaaggagggtataagttcaaacctttttgtacattttgtagccggtggtttggctggaatcacagctgcttctgccacttatccacttgatcttgttagaactcgtcttgctgctcagacaaaagtaatctactactcgggtatctggcatactctgcgctctattacaaccgatgaaggtatcttgggcctctacaagggactaggaacaacgcttgtgggtgttgggcctagtattgccattagcttttctgtgtatgaatcattgagatcttattggaggtcaactaggccccatgattcccctatcatggtcagtctagcttgtggaagtctttcaggaatagcatcttcaacagctacgtttccattggatctggtgagaagaaggaagcagctggaaggaataggcgggcgagcggtagtgtacaagacaggtttgttaggcacattaaagcgtattgttcaaacggaaggagcgagaggcctgtacagaggaattcttccagagtactacaaagtggtacctggtgtagggatttgcttcatgacctacgagacactcaagctttacttcaaggatctttcttcgaatctataacggtttaaaaggttggtagatttgtttaggtctatttttggtgagaggaaaaaaactgtaaaaaccaaacagcggaaaatgataatgtatacgaaatgtagaattatatatgtagttgttggatgtagcttatacgagattaacatttgtattggtacaatccttttccattgttacatggctt

SEQ ID NO: 5739 - protein, 332 aa, Arabidopsis thaliana
MVMQTEARVGVSSGHGVASSSHRLTQDQRSHIESASQLLAGGLAGAFSKTCTAPLSRLTILFQVQGMHTNAAALRKPSILHEASRILNEEGLKAFWKGNLVTIAHRLPYSSVNFYAYEHYKKFMYMVTGMENHKEGISSNLFVHFVAGGLAGITAASATYPLDLVRTRLAAQTKVIYYSGIWHTLRSITTDEGILGLYKGLGTTLVGVGPSIAISFSVYESLRSYWRSTRPHDSPIMVSLACGSLSGIASSTATFPLDLVRRRKQLEGIGGRAVVYKTGLLGTLKRIVQTEGARGLYRGILPEYYKVVPGVGICFMTYETLKLYFKDLSSNL

SEQ ID NO: 5740 - protein, 330 aa, Arabidopsis thaliana
MQTEARVGVSSGHGVASSSHRLTQDQRSHIESASQLLAGGLAGAFSKTCTAPLSRLTILFQVQGMHTNAAALRKPSILHEASRILNEEGLKAFWKGNLVTIAHRLPYSSVNFYAYEHYKKFMYMVTGMENHKEGISSNLFVHFVAGGLAGITAASATYPLDLVRTRLAAQTKVIYYSGIWHTLRSITTDEGILGLYKGLGTTLVGVGPSIAISFSVYESLRSYWRSTRPHDSPIMVSLACGSLSGIASSTATFPLDLVRRRKQLEGIGGRAVVYKTGLLGTLKRIVQTEGARGLYRGILPEYYKVVPGVGICFMTYETLKLYFKDLSSNL

SEQ ID NO: 5741 - protein, 266 aa, Arabidopsis thaliana
MHTNAAALRKPSILHEASRILNEEGLKAFWKGNLVTIAHRLPYSSVNFYAYEHYKKFMYMVTGMENHKEGISSNLFVHFVAGGLAGITAASATYPLDLVRTRLAAQTKVIYYSGIWHTLRSITTDEGILGLYKGLGTTLVGVGPSIAISFSVYESLRSYWRSTRPHDSPIMVSLACGSLSGIASSTATFPLDLVRRRKQLEGIGGRAVVYKTGLLGTLKRIVQTEGARGLYRGILPEYYKVVPGVGICFMTYETLKLYFKDLSSNL

SEQ ID NO: 5742 - DNA, 1646 bp, Arabidopsis thaliana
ccaccaccaccttcgatcgatttctactaacttgttcttcttcttctttctcaactctcttgtcttttgtctctccaccaattttttcttgttctttctctctccaccacataaaaaaaaaaaacctagctttgtcccctcaactcactgattgaactgcttgattttcgattgatcatctgggtggttttgaatcgaagagtattgttgtattagtggctggtggctctccaaaagagtaaggccggagagagaaatcaatggcctctggcggcggagaggcggataaatcacttgaaatcgggtccgggaccgcggatcccaaaataggcggtactgggagcaggagcgccggagaagaacgatacttcagggcagatacactggatttcagtaaatgggatttgcatatgggtcaaacctctactagcagcgtcctcaccaattccgcttccacgagcgctcccgcaccggcgatgcaggaatgggagattgacctctccaaactcgatatgaagcacgtcctcgctcacggtacttacggcactgtctaccgcggtgtctacgccggccaagaagtcgcagtgaaagtgttagattggggagaagatggttacgccacaccagctgaaactacagctctccgtgcttccttcgagcaagaggtcgccgtctggcagaagctcgatcatcccaacgttaccaagtttataggagcatccatgggaacctctgatctgcggatccctcctgctggtgatactggcggacgtggtaacggtgcacatcctgcgagggcctgttgtgttgtggttgaatatgttgccggaggcacgcttaagaagttcctcatcaagaaatatagggccaaactacccatcaaggatgtcattcagctcgctttggatctcgctagagggcttagttacctccactccaaggcgattgtacatagggacgtgaagtcagagaacatgctgttacagcctaacaagacgctgaagatcgctgatttcggggtagctagagttgaagctcagaaccctcaagacatgacgggtgaaactggaacacttggatacatggcaccagaggttcttgaaggaaagccttacaacaggaaatgcgatgtctatagctttggggtatgcctctgggaaatatactgctgtgacatgccctatgctgactgtagttttgctgagatctctcacgccgttgttcataggaatctgagaccagagattccgaaatgctgcccgcatgcggtggcaaacatcatgaagagatgctgggacccgaatccagacaggcgtccggagatggaggaggtggtgaagctgcttgaagccatagacacaagcaaaggtggtggaatgatagctccggaccagtttcaggggtgcctctgtttcttcaaacctcgaggcccctgaatctctctccctctctttcctttttgctccgtgtctgatatattcttgagagctgcgtgattctttggattttgtatttactttgagctatgggagttggattggtgtgggttttgtcataagaatctttctgcgctctatgtatttatatacttaacacagtcgtgtataattcgattaagctttattttattttttgatgttgattcc

SEQ ID NO: 5743 - protein, 391 aa, Arabidopsis thaliana
MASGGGEADKSLEIGSGTADPKIGGTGSRSAGEERYFRADTLDFSKWDLHMGQTSTSSVLTNSASTSAPAPAMQEWEIDLSKLDMKHVLAHGTYGTVYRGVYAGQEVAVKVLDWGEDGYATPAETTALRASFEQEVAVWQKLDHPNVTKFIGASMGTSDLRIPPAGDTGGRGNGAHPARACCVVVEYVAGGTLKKFLIKKYRAKLPIKDVIQLALDLARGLSYLHSKAIVHRDVKSENMLLQPNKTLKIADFGVARVEAQNPQDMTGETGTLGYMAPEVLEGKPYNRKCDVYSFGVCLWEIYCCDMPYADCSFAEISHAVVHRNLRPEIPKCCPHAVANIMKRCWDPNPDRRPEMEEVVKLLEAIDTSKGGGMIAPDQFQGCLCFFKPRGP

SEQ ID NO: 5744 - protein, 341 aa, Arabidopsis thaliana
MGQTSTSSVLTNSASTSAPAPAMQEWEIDLSKLDMKHVLAHGTYGTVYRGVYAGQEVAVKVLDWGEDGYATPAETTALRASFEQEVAVWQKLDHPNVTKFIGASMGTSDLRIPPAGDTGGRGNGAHPARACCVVVEYVAGGTLKKFLIKKYRAKLPIKDVIQLALDLARGLSYLHSKAIVHRDVKSENMLLQPNKTLKIADFGVARVEAQNPQDMTGETGTLGYMAPEVLEGKPYNRKCDVYSFGVCLWEIYCCDMPYADCSFAEISHAVVHRNLRPEIPKCCPHAVANIMKRCWDPNPDRRPEMEEVVKLLEAIDTSKGGGMIAPDQFQGCLCFFKPRGP

SEQ ID NO: 5745 - protein, 319 aa, Arabidopsis thaliana
MQEWEIDLSKLDMKHVLAHGTYGTVYRGVYAGQEVAVKVLDWGEDGYATPAETTALRASFEQEVAVWQKLDHPNVTKFIGASMGTSDLRIPPAGDTGGRGNGAHPARACCVVVEYVAGGTLKKFLIKKYRAKLPIKDVIQLALDLARGLSYLHSKAIVHRDVKSENMLLQPNKTLKIADFGVARVEAQNPQDMTGETGTLGYMAPEVLEGKPYNRKCDVYSFGVCLWEIYCCDMPYADCSFAEISHAVVHRNLRPEIPKCCPHAVANIMKRCWDPNPDRRPEMEEVVKLLEAIDTSKGGGMIAPDQFQGCLCFFKPRGP

SEQ ID NO: 5746 - DNA, 2165 bp, Arabidopsis thaliana
aaacactaccaaaattagcaaacaaaaaacattcactcgttaactcttctcctccatccaatttcactttctctcactcatttttattcgtcgtcgtcgtctcctctgatttgttcttttttctctaaattcgcttcgcttcttctcagttctacgaatcttcgattctctttggttttctccatccccgtatacgtttaagaacattgcaagaaagtgaagaaaaaaaatgcaggaagggactgatccgtatggtgagattgagataagttttggttatcaatgcaataataagaagataggaatccctgaagataaaattgctgatggtcgtgaggttcttggtgggtttaggctacaaaagactagcagtttctcttgtttatcaggagctgctttaagtggaaaccccactttagccaatactaatatctgcaatggagtcattggttctgagatattgccgtctctggattctccgaaatctttcaggaaagttccgtcttcgcctgcgctttcgaagcttgatatactctctccttctctccatggaagtatggtgagtctaagctgcagctcgtctactagtccgagtcctcctgagcctgaatcttgttacttgacgtcaatgagttctccttcttctgttaatgaagggtttcttctctctgctatggaagttcaagttgcgggtggtgctgcaggggaagatagagttcaagctgtttgctctgaggagaatggttggttgttttgcgctatctatgatggattcaacggaagagatgctgctgatttcttggcatgtactttatatgagtccattgtgtttcatcttcagttgcttgatcgtcaaatgaagcaaacaaagtccgatgatgatggcgaaaagttggaattgttatcaaatataagtaatgtagattactcttccactgatttgttcaggcaaggagtactagattgcttgaaccgtgcgctttttcaggcggaaaccgatttcctaaggatggttgagcaagaaatggaagaaagaccggatttagtatccgttggatcttgtgttttggtcactctcctggttgggaaggatctatacgtccttaatcttggtgatagcagagctgttctagcgacctacaatggtaataagaagctgcaagctgttcagctcacagaggatcatacagttgataacgaagtcgaagaagctagactcttaagtgagcatcttgatgatcctaagatcgttattggtgggaaaatcaaaggaaagcttaaagttactcgtgctctcggagttggttacttgaagaaggagaaactaaatgatgcactcatggggatcctccgcgttcgtaaccttttgagcccgccttatgtttcagtggaaccatcgatgagagttcacaagataacggaatcagatcactttgttatagttgcaagcgatggtttgtttgatttcttcagcaacgaggaagcgattgggctcgtccattccttcgtttctagtaatccttctggtgatccagcaaagtttctgcttgaacgtcttgtagctaaagctgctgctcgtgctggctttaccttggaagaattgacgaatgttccggctggtaggagaaggagatatcatgacgatgtgactataatggtaatcactctaggtaccgatcaacgtacctcaaaagcttctacgttcgtgtgattttgatgatgatggcgacaaatgttggattggtaaaattgtaattagtctcactgatcttcttttagactttggaactgatcatcagtttttcaattctttggaactggtataatattatttcatgtatagtccgtatatatatatcattgtagtagtcttagttgcgagcctagaattcatcagtttgtctcagcctgagtcatatgttctgttttttatttttttgggcttttgggtgtttacttggtttggtttattaccttggattttaagttctaacatagactgaatcggttttgtcaatgggctaactactagtgaaataatgtgggtggcctacgatgatctttaatcatgtgacacactataagcaccttattgttcacaactttatatgtcttacgtatatttgtaaaattgactcaatggttacaaacattttggttagttc

SEQ ID NO: 5747 - protein, 493 aa, Arabidopsis thaliana
MQEGTDPYGEIEISFGYQCNNKKIGIPEDKIADGREVLGGFRLQKTSSFSCLSGAALSGNPTLANTNICNGVIGSEILPSLDSPKSFRKVPSSPALSKLDILSPSLHGSMVSLSCSSSTSPSPPEPESCYLTSMSSPSSVNEGFLLSAMEVQVAGGAAGEDRVQAVCSEENGWLFCAIYDGFNGRDAADFLACTLYESIVFHLQLLDRQMKQTKSDDDGEKLELLSNISNVDYSSTDLFRQGVLDCLNRALFQAETDFLRMVEQEMEERPDLVSVGSCVLVTLLVGKDLYVLNLGDSRAVLATYNGNKKLQAVQLTEDHTVDNEVEEARLLSEHLDDPKIVIGGKIKGKLKVTRALGVGYLKKEKLNDALMGILRVRNLLSPPYVSVEPSMRVHKITESDHFVIVASDGLFDFFSNEEAIGLVHSFVSSNPSGDPAKFLLERLVAKAAARAGFTLEELTNVPAGRRRRYHDDVTIMVITLGTDQRTSKASTFV

SEQ ID NO: 5748 - protein, 384 aa, Arabidopsis thaliana
MVSLSCSSSTSPSPPEPESCYLTSMSSPSSVNEGFLLSAMEVQVAGGAAGEDRVQAVCSEENGWLFCAIYDGFNGRDAADFLACTLYESIVFHLQLLDRQMKQTKSDDDGEKLELLSNISNVDYSSTDLFRQGVLDCLNRALFQAETDFLRMVEQEMEERPDLVSVGSCVLVTLLVGKDLYVLNLGDSRAVLATYNGNKKLQAVQLTEDHTVDNEVEEARLLSEHLDDPKIVIGGKIKGKLKVTRALGVGYLKKEKLNDALMGILRVRNLLSPPYVSVEPSMRVHKITESDHFVIVASDGLFDFFSNEEAIGLVHSFVSSNPSGDPAKFLLERLVAKAAARAGFTLEELTNVPAGRRRRYHDDVTIMVITLGTDQRTSKASTFV

SEQ ID NO: 5749 - protein, 360 aa, Arabidopsis thaliana
MSSPSSVNEGFLLSAMEVQVAGGAAGEDRVQAVCSEENGWLFCAIYDGFNGRDAADFLACTLYESIVFHLQLLDRQMKQTKSDDDGEKLELLSNISNVDYSSTDLFRQGVLDCLNRALFQAETDFLRMVEQEMEERPDLVSVGSCVLVTLLVGKDLYVLNLGDSRAVLATYNGNKKLQAVQLTEDHTVDNEVEEARLLSEHLDDPKIVIGGKIKGKLKVTRALGVGYLKKEKLNDALMGILRVRNLLSPPYVSVEPSMRVHKITESDHFVIVASDGLFDFFSNEEAIGLVHSFVSSNPSGDPAKFLLERLVAKAAARAGFTLEELTNVPAGRRRRYHDDVTIMVITLGTDQRTSKASTFV

SEQ ID NO: 5750 - DNA, 1301 bp, Arabidopsis thaliana
ccatatttgactcgtcaatataaatacaattgtaacaaacagattttgatcaaaagattttacttttctcaattcctttcaactttcaaaatcgaagatctcttaagccatgaacgatcttctctccggctcgtttaaaacctccgtcgcggacggttcatcgccgccgcactcacacaacatcgagatgtcaaaagcgaaagtctccggcggaagttgccacggtggtaacaacctagacacgttcttcctcgacgtggaggttgtaaacgaagaccttaaagagctagatcgtctctgtcacaacctccgatcgagcaacgaacagagcaagacgcttcataacgctaacgcggtgaaggagctgaagaagaagatggacgctgacgtcactgctgcgcttaagacggcgaggcgcttgaaaggaaacctcgaggctttagatcgggctaatgaagtcaaccgaagtttaccggaaagtggaccgggttcgtcgtcggaccggcaaagaacttcggtggttaacgggttgaggaagaagctgaaggatgagatggaaaaatttagtcgagtgagagaaacgatcacgaatgagtacaaagagacggttgggagaatgtgcttcaccgtcaccggcgaatatcccgacgaagctaccctcgagcgtctcatctccacaggtgaaagtgaaacatttttgcagaaagcgattcaagaacaaggtcgtggtaggattttggacactattagcgagatacaggagaggcacgacgcagtgaaagatattgagaagagtttgaatgagttgcaccaagtgtttcttgatatggctgtgttggttgagcatcagggtgcacagcttgatgacattgaaggcaacgtcaaacgagctaactcgcttgttcggtctggtgcggaccggcttgttaaggcacggttttatcagaagaacacacggaagtggacttgctttgccattttgctattgctcattattgtggttttaattgtggtgtttactgttaagccttgggagagtaatggtgggggaggtggaggtgcacctcgtcaagctactccggttcaagctcagccaccgccacctccggctgtgaatcggcggctactacgctaaataattttttttttgaggttccctctgtctatgcatgagcatatctatgttttgaagattgttttttattttacagtattttgtctttaatgtttttgtaatgttttggttggttaaactctgtgtatatataatgcgatcaccacatttctttgttttattatgg

SEQ ID NO: 5751 - protein, 341 aa, Arabidopsis thaliana
MNDLLSGSFKTSVADGSSPPHSHNIEMSKAKVSGGSCHGGNNLDTFFLDVEVVNEDLKELDRLCHNLRSSNEQSKTLHNANAVKELKKKMDADVTAALKTARRLKGNLEALDRANEVNRSLPESGPGSSSDRQRTSVVNGLRKKLKDEMEKFSRVRETITNEYKETVGRMCFTVTGEYPDEATLERLISTGESETFLQKAIQEQGRGRILDTISEIQERHDAVKDIEKSLNELHQVFLDMAVLVEHQGAQLDDIEGNVKRANSLVRSGADRLVKARFYQKNTRKWTCFAILLLLIIVVLIVVFTVKPWESNGGGGGGAPRQATPVQAQPPPPPAVNRRLLR

SEQ ID NO: 5752 - protein, 315 aa, Arabidopsis thaliana
MSKAKVSGGSCHGGNNLDTFFLDVEVVNEDLKELDRLCHNLRSSNEQSKTLHNANAVKELKKKMDADVTAALKTARRLKGNLEALDRANEVNRSLPESGPGSSSDRQRTSVVNGLRKKLKDEMEKFSRVRETITNEYKETVGRMCFTVTGEYPDEATLERLISTGESETFLQKAIQEQGRGRILDTISEIQERHDAVKDIEKSLNELHQVFLDMAVLVEHQGAQLDDIEGNVKRANSLVRSGADRLVKARFYQKNTRKWTCFAILLLLIIVVLIVVFTVKPWESNGGGGGGAPRQATPVQAQPPPPPAVNRRLLR

SEQ ID NO: 5753 - protein, 252 aa, Arabidopsis thaliana
MDADVTAALKTARRLKGNLEALDRANEVNRSLPESGPGSSSDRQRTSVVNGLRKKLKDEMEKFSRVRETITNEYKETVGRMCFTVTGEYPDEATLERLISTGESETFLQKAIQEQGRGRILDTISEIQERHDAVKDIEKSLNELHQVFLDMAVLVEHQGAQLDDIEGNVKRANSLVRSGADRLVKARFYQKNTRKWTCFAILLLLIIVVLIVVFTVKPWESNGGGGGGAPRQATPVQAQPPPPPAVNRRLLR

SEQ ID NO: 5754 - DNA, 1153 bp, Arabidopsis thaliana
agcccctttcccaatatttgatcaatttctaaagaaaaccccttcctctactagtcctcctcctatatatacaaaatcttaagaaatctctctacttgtttcctctgttatcataatctcttctctctatatctcttctcttcttcttttaccctgtttttttttttcattccacagagcccaggttgattgattttgttattcagagatatggggagaggaaggattgagattaagaagattgagaatatcaacagtcgtcaagtcactttctctaagagacgaaacggtttgatcaagaaggctaaagagctttcgattctctgtgacgccgaggttgctcttatcatcttctccagcaccggcaagatttacgatttctccagcgtctgtatggagcaaattctttctagatatggatacactactgcgtccactgagcataaacaacaaagagaacaccaacttctaatttgtgcttcacatggaaatgaagctgtgttgcgaaatgatgattctatgaaggtggaacttgaaagattacagcttgcaattgagagacttaagggtaaggagcttgaaggtatgagtttcccggatcttatttcttttgaaaaccagttgaacgagagcttgcatagtgtcaaggatcaaaagacacaaatcctgctcaaccagattgagagatccaggatacaggagaaaaaagcattggaagaaaaccaaatcttgcgcaaacaggttgagatgttggggagaggttcaggaccaaaagtgttgaatgaaaggcctcaagattctagcccagaagccgatcccgagagctcttcatcagaagaggatgagaatgacaacgaggagcaccattccgacacttccttgcagttggggttgtcgtcgacggggtattgcacaaagagaaagaagccgaagatcgaactggtctgcgataactctgggagtcaagtggcttctgattgatggaatcgattatttttctaattctggttgtttaggggtctctatgtgtcttcttgtttctggctgttcttttgctttatttcatctcaagtagagttttcttaatgtttaggtggaacatttttccataatcaagaagggatttgatcaatcaataacattagattttctt

SEQ ID NO: 5755 - protein, 256 aa, Arabidopsis thaliana
MGRGRIEIKKIENINSRQVTFSKRRNGLIKKAKELSILCDAEVALIIFSSTGKIYDFSSVCMEQILSRYGYTTASTEHKQQREHQLLICASHGNEAVLRNDDSMKVELERLQLAIERLKGKELEGMSFPDLISFENQLNESLHSVKDQKTQILLNQIERSRIQEKKALEENQILRKQVEMLGRGSGPKVLNERPQDSSPEADPESSSSEEDENDNEEHHSDTSLQLGLSSTGYCTKRKKPKIELVCDNSGSQVASD

SEQ ID NO: 5756 - protein, 195 aa, Arabidopsis thaliana
MEQILSRYGYTTASTEHKQQREHQLLICASHGNEAVLRNDDSMKVELERLQLAIERLKGKELEGMSFPDLISFENQLNESLHSVKDQKTQILLNQIERSRIQEKKALEENQILRKQVEMLGRGSGPKVLNERPQDSSPEADPESSSSEEDENDNEEHHSDTSLQLGLSSTGYCTKRKKPKIELVCDNSGSQVASD

SEQ ID NO: 5757 - protein, 153 aa, Arabidopsis thaliana
MKVELERLQLAIERLKGKELEGMSFPDLISFENQLNESLHSVKDQKTQILLNQIERSRIQEKKALEENQILRKQVEMLGRGSGPKVLNERPQDSSPEADPESSSSEEDENDNEEHHSDTSLQLGLSSTGYCTKRKKPKIELVCDNSGSQVASD

SEQ ID NO: 5758 - DNA, 1204 bp, Arabidopsis thaliana
atataaaataaccatatctctcacttcttcttcttcttcttcttatcactattcgctcatttccccttctctgttgttacagaagtcgacggcgagtagcttcaaccaaaaagaaacaccagtatctgtctcagcaatggagtttttccagaaagcaaaagctattcgaatgcgtaacagtcacaacaagtatctaacagcagacgacgatgaagaaaccgtaactcaaaaccgtaacggatctaccaaaaacgttcgatggaccgtcgaaccggttcgtgattctttccatgttattcgtcttaaaagctgttacggtaagtacttaaccgcttctaacgagcggttcttgctcggagctacggggaagaaagtgattcagttgaaactgagtcgggttgattcttctgttgagtgggaaccggttagagaaggatctaagattaagcttaggactagatctggtaactatttacgaggtaatggtggtcttcctccttggagaaactcggtcacacacgacgttcctcatttgtctgctactcaggattcgatttcttgggatgttgatgttgttgagatcttgactgattccgaattccagacggagtctgcgaaagcgccgccaccgaagacgacgtctccaccgccgcatcggagaccgacgagttcgccgttgtcggctgagtctccaaggacttcgtcttctctttcagacagatccgattcagattcggttgagtctccgcctaaatctgatggacgaaccatatattaccatgtcgctgacgaggaaggacacgtggaagatgaaacaaccgttggatatgctttcacgtttaaaggaaatagcgtggcggagctgactcagacattgcgagaagaaacgtgcatggaagacgctgtggtgtgtactcgtagtcctttaaacggcaagctgtttcctcttcgtttgcaacttcctcctaacaacggaacattgcatgtcattttactaccctccagcgcgagcctctagaatcgacccgagacaattagaaatgagtgattgtttggtgaagcatatgttatgagtcattttactaccctccagcgcgagcctctagaatcgacccgagacaattagaaatgagtgattgtgtgattgtttggtgaagcatatgttatgaaccgtataagaagatagtaagagttggtagttggt

SEQ ID NO: 5759 - protein, 338 aa, Arabidopsis thaliana
YKITISLTSSSSSSYHYSLISPSLLLQKSTASSFNQKETPVSVSAMEFFQKAKAIRMRNSHNKYLTADDDEETVTQNRNGSTKNVRWTVEPVRDSFHVIRLKSCYGKYLTASNERFLLGATGKKVIQLKLSRVDSSVEWEPVREGSKIKLRTRSGNYLRGNGGLPPWRNSVTHDVPHLSATQDSISWDVDVVEILTDSEFQTESAKAPPPKTTSPPPHRRPTSSPLSAESPRTSSSLSDRSDSDSVESPPKSDGRTIYYHVADEEGHVEDETTVGYAFTFKGNSVAELTQTLREETCMEDAVVCTRSPLNGKLFPLRLQLPPNNGTLHVILLPSSASL

SEQ ID NO: 5760 - protein, 293 aa, Arabidopsis thaliana
MEFFQKAKAIRMRNSHNKYLTADDDEETVTQNRNGSTKNVRWTVEPVRDSFHVIRLKSCYGKYLTASNERFLLGATGKKVIQLKLSRVDSSVEWEPVREGSKIKLRTRSGNYLRGNGGLPPWRNSVTHDVPHLSATQDSISWDVDVVEILTDSEFQTESAKAPPPKTTSPPPHRRPTSSPLSAESPRTSSSLSDRSDSDSVESPPKSDGRTIYYHVADEEGHVEDETTVGYAFTFKGNSVAELTQTLREETCMEDAVVCTRSPLNGKLFPLRLQLPPNNGTLHVILLPSSASL

SEQ ID NO: 5761 - protein, 282 aa, Arabidopsis thaliana
MRNSHNKYLTADDDEETVTQNRNGSTKNVRWTVEPVRDSFHVIRLKSCYGKYLTASNERFLLGATGKKVIQLKLSRVDSSVEWEPVREGSKIKLRTRSGNYLRGNGGLPPWRNSVTHDVPHLSATQDSISWDVDVVEILTDSEFQTESAKAPPPKTTSPPPHRRPTSSPLSAESPRTSSSLSDRSDSDSVESPPKSDGRTIYYHVADEEGHVEDETTVGYAFTFKGNSVAELTQTLREETCMEDAVVCTRSPLNGKLFPLRLQLPPNNGTLHVILLPSSASL

SEQ ID NO: 5762 - DNA, 1072 bp, Arabidopsis thaliana
acacatctcactgctcactactctcactgtaatcccttagatcttcttttcaaatttcaatggcgtccggtgatgttgagtatcggtgcttcgttggaggtctagcatgggccactgatgacagagctcttgagactgccttcgctcaatacggcgacgttattgattccaaggtctgttacacgccgagatcggactccgagtgatatcgatgatctcatcctcgacggatctgttccgatcttgtgtttctctgttacttgattcgattactctgttactattctcgttctttgttactactactactactactgttacttgtattttcccaaatcggtacgttcatcttcctgcttctgtgagcccggagatcgatcggatttttttgtattttgtatatttgttgtagatctaaatgcttttgttcagttttgttggattgttttgctgatctggtttttgtattatttggataacagatcattaacgatcgtgagactggaagatcaaggggattcggattcgtcaccttcaaggatgagaaagccatgaaggatgcgattgagggaatgaacggacaagatctcgatggccgtagcatcactgttaacgaggctcagtcacgaggaagcggtggcggcggaggccaccgtggaggtggtggcggtggataccgcagcggcggtggtggaggttactccggtggaggtggtagctacggaggtggcggcggtagacgcgagggtggaggaggatacagcggcggcggcggttactcctcaagaggtggtggtggcggaagctacggtggtggaagacgtgagggaggaggaggatacggtggtggtgaaggaggaggttacggaggaagcggtggtggtggaggatggtaattcctttaattaggtttgggattaccaatgaatgttctctctctcgcttgttatgcttctacttggttttgtgtgttctctattttgttctggttctgctttagatttgatgtaacagttcgtgattaggtattttggtatctggaaacgtaatgttaagtcacttgtcattctcc

SEQ ID NO: 5763 - protein, 114 aa, Arabidopsis thaliana
MKDAIEGMNGQDLDGRSITVNEAQSRGSGGGGGHRGGGGGGYRSGGGGGYSGGGGSYGGGGGRREGGGGYSGGGGYSSRGGGGGSYGGGRREGGGGYGGGEGGGYGGSGGGGGW

SEQ ID NO: 5764 - protein, 107 aa, Arabidopsis thaliana
MNGQDLDGRSITVNEAQSRGSGGGGGHRGGGGGGYRSGGGGGYSGGGGSYGGGGGRREGGGGYSGGGGYSSRGGGGGSYGGGRREGGGGYGGGEGGGYGGSGGGGGW

SEQ ID NO: 5765 - protein, 105 aa, Arabidopsis thaliana
MAVASLLTRLSHEEAVAAEATVEVVAVDTAAAVVEVTPVEVVATEVAAVDARVEEDTAAAAVTPQEVVVAEATVVEDVREEEDTVVVKEEVTEEAVVVEDGNSFN

SEQ ID NO: 5766 - DNA, 901 bp, Arabidopsis thaliana
aagcatacactagctatcaagccgcctcacctactctccaatatccattggaataatcatacttacgtgtttataaataagtattacatcaacccatatcttcttcatccacaaataaccattggctataattatgacaaaaactaccaaaaccatgaatcctaagttttacttggttcttgccttaaccgcggttctggcctcaaacgcatatggtgcggttgtagacatcgatggaaacgccatgttccacgaaagttactacgttctccctgtcatccgtggccgaggcggaggcctgactctagcaggccgcggtgggcagccatgtccttacgatatcgtgcaggaatcttcagaagttgatgagggcattcccgtaaaattctcaaactggaggcttaaggttgcgttcgttcccgaatcacagaacctcaacatcgaaacagacgtcggagccacgatctgcatccagtcaacctactggcgggtcggtgagtttgaccacgagaggaagcagtacttcgtggttgctggtccaaagccagaagggttcggacaagattcgttgaagagtttcttcaagatcgagaaatctggagaggatgcttacaagtttgtgttctgtcctcggacttgcgactctggcaatccaaaatgcagcgatgtcgggatattcatagatgaacttggcgttcgtcgtttggctttaagcgataagccgttcttggttatgttcaaaaaagctaatgtgaccgaagtttcgtccaagactatgtgagaggacaactctcgatcttttactttgactactcataataaaacctctatgttttttttttgataaaacacccgctctctgttttcttgaaaactacaaattgaataaaagctagtgaag

SEQ ID NO: 5767 - protein, 215 aa, Arabidopsis thaliana
MTKTTKTMNPKFYLVLALTAVLASNAYGAVVDIDGNAMFHESYYVLPVIRGRGGGLTLAGRGGQPCPYDIVQESSEVDEGIPVKFSNWRLKVAFVPESQNLNIETDVGATICIQSTYWRVGEFDHERKQYFVVAGPKPEGFGQDSLKSFFKIEKSGEDAYKFVFCPRTCDSGNPKCSDVGIFIDELGVRRLALSDKPFLVMFKKANVTEVSSKTM

SEQ ID NO: 5768 - protein, 208 aa, Arabidopsis thaliana
MNPKFYLVLALTAVLASNAYGAVVDIDGNAMFHESYYVLPVIRGRGGGLTLAGRGGQPCPYDIVQESSEVDEGIPVKFSNWRLKVAFVPESQNLNIETDVGATICIQSTYWRVGEFDHERKQYFVVAGPKPEGFGQDSLKSFFKIEKSGEDAYKFVFCPRTCDSGNPKCSDVGIFIDELGVRRLALSDKPFLVMFKKANVTEVSSKTM

SEQ ID NO: 5769 - protein, 178 aa, Arabidopsis thaliana
MFHESYYVLPVIRGRGGGLTLAGRGGQPCPYDIVQESSEVDEGIPVKFSNWRLKVAFVPESQNLNIETDVGATICIQSTYWRVGEFDHERKQYFVVAGPKPEGFGQDSLKSFFKIEKSGEDAYKFVFCPRTCDSGNPKCSDVGIFIDELGVRRLALSDKPFLVMFKKANVTEVSSKTM

SEQ ID NO: 5770 - DNA, 2067 bp, Arabidopsis thaliana
atgaacaaaaacatcctctgtttctctcttttcatatttttctccacatttcctcatctgggtcatctccaaaaatgatttgatgataacccaaattcgcaatttgattaggacaacaacaacaactttatttatctgattccgtctttgattttcagacaagaaaaaaaaaaaaaagatggaatcggatctggggaagctcttcattggtgggatttcgtgggatacagacgaagaaaggttaagagactactttagcaactatggtgatgttgttgaagctgtgatcatgagagatcgtgccacaggtcgtgcacgtggcttcggcttcattgtctttgcagacccctgtgtctcagagagagtgatcatggataaacacatcatcgatggccgcacggttgaggcgaagaaggctgtgcctcgagatgatcagcaggtgctaaagcgacacgctagtcctatccaccttatgtcacctgtccatggtggtggtggaaggacaaagaagatcttcgttggaggtttaccgtctagcattaccgaggaggagttcaagaactactttgatcagtttggtactattgctgatgttgttgtaatgtatgatcataacacgcagaggccaagaggttttggcttcatcacatttgattcagatgatgctgttgatagagttcttcacaagaccttccatgagctcaatgggaaactagttgaggtcaaaagagctgtacctaaggagatttcccctgtttctaatatccgaagcccgcttgctagcggtgttaactatggaggcgggtctaataggatgcctgctaatagctactttaacaactttgctcctggtcctggtttttataacagtctaggtcctgttggtcgtcggtttagtcctgttattggtagtggtagaaatgcggtttctgcttttggcctcgttttgaatcatgacttgagtttgaatttgaatccaagctgcgatgggacaagttctacgtttggttataaccgtattccaagcaacccttacttcaacggtgcttccccgaaccgttacacctctccaatcgggcacaatagaactgagtctccttacaattcgaacaatagagacttatggggaaacagaaccgacactgcaggtcccggttggaacttgaatgtctcgaatggaaacaacagaggaaattggggacttccttcttcttctgctgttagtaatgataacaatggctttggaaggaactatgggacaagttctggactttcctcgtccccatttaatggttttgaaggttctataggggaactgtacagaggcggctcagtctacagcgactcaacgtggcagcaacagcagctaccatctcagtcttctcacgagctagacaatttgtctcgcgcttacggttatgatattgacaatgtaggttcagacccatctgcaaatgacccagaaacttacaatggaagctacaatgttggaaatagacaaactaatagaggtattgctgcataggttatcaaaaaccaagaaaacaaaaaaaaaagttgagagatttgtagattgaaagcaaccaaatttcagttgcagagtttgaacaggttctcatgacaaagaaaccaactttgttgatcacagtgccaaagattatggtttgctttctcttttgttagaccaaaaaaaaaaaaaaaaaagagaaaaacaaagaaccgtttttgtttttcttcttcttacataaagatcagatcgtagcagccagacaaccaaagatactacaaggtggatttagatttgcttctcaaaaaagtttttttttttctttcatagaataaccaaacaaagatcgtagaattttcgatcaaagattcttcagagttctgtgctctgttttgtaattgtactttttttttcttgtttacaaaatgaattgttcatgaaaactttgttttcttaaaaaaaaaattagcgtgggagaaatattgtgtaagagagggatatgactattttgttgcatgtatccctaatgagatatatatatatatatatttttttaaagc

SEQ ID NO: 5771 - protein, 448 aa, Arabidopsis thaliana
MESDLGKLFIGGISWDTDEERLRDYFSNYGDVVEAVIMRDRATGRARGFGFIVFADPCVSERVIMDKHIIDGRTVEAKKAVPRDDQQVLKRHASPIHLMSPVHGGGGRTKKIFVGGLPSSITEEEFKNYFDQFGTIADVVVMYDHNTQRPRGFGFITFDSDDAVDRVLHKTFHELNGKLVEVKRAVPKEISPVSNIRSPLASGVNYGGGSNRMPANSYFNNFAPGPGFYNSLGPVGRRFSPVIGSGRNAVSAFGLVLNHDLSLNLNPSCDGTSSTFGYNRIPSNPYFNGASPNRYTSPIGHNRTESPYNSNNRDLWGNRTDTAGPGWNLNVSNGNNRGNWGLPSSSAVSNDNNGFGRNYGTSSGLSSSPFNGFEGSIGELYRGGSVYSDSTWQQQQLPSQSSHELDNLSRAYGYDIDNVGSDPSANDPETYNGSYNVGNRQTNRGIAA

SEQ ID NO: 5772 - protein, 411 aa, Arabidopsis thaliana
MRDRATGRARGFGFIVFADPCVSERVIMDKHIIDGRTVEAKKAVPRDDQQVLKRHASPIHLMSPVHGGGGRTKKIFVGGLPSSITEEEFKNYFDQFGTIADVVVMYDHNTQRPRGFGFITFDSDDAVDRVLHKTFHELNGKLVEVKRAVPKEISPVSNIRSPLASGVNYGGGSNRMPANSYFNNFAPGPGFYNSLGPVGRRFSPVIGSGRNAVSAFGLVLNHDLSLNLNPSCDGTSSTFGYNRIPSNPYFNGASPNRYTSPIGHNRTESPYNSNNRDLWGNRTDTAGPGWNLNVSNGNNRGNWGLPSSSAVSNDNNGFGRNYGTSSGLSSSPFNGFEGSIGELYRGGSVYSDSTWQQQQLPSQSSHELDNLSRAYGYDIDNVGSDPSANDPETYNGSYNVGNRQTNRGIAA

SEQ ID NO: 5773 - protein, 384 aa, Arabidopsis thaliana
MDKHIIDGRTVEAKKAVPRDDQQVLKRHASPIHLMSPVHGGGGRTKKIFVGGLPSSITEEEFKNYFDQFGTIADVVVMYDHNTQRPRGFGFITFDSDDAVDRVLHKTFHELNGKLVEVKRAVPKEISPVSNIRSPLASGVNYGGGSNRMPANSYFNNFAPGPGFYNSLGPVGRRFSPVIGSGRNAVSAFGLVLNHDLSLNLNPSCDGTSSTFGYNRIPSNPYFNGASPNRYTSPIGHNRTESPYNSNNRDLWGNRTDTAGPGWNLNVSNGNNRGNWGLPSSSAVSNDNNGFGRNYGTSSGLSSSPFNGFEGSIGELYRGGSVYSDSTWQQQQLPSQSSHELDNLSRAYGYDIDNVGSDPSANDPETYNGSYNVGNRQTNRGIAA

SEQ ID NO: 5774 - DNA, 1247 bp, Arabidopsis thaliana
agaaactcctcactttcgaaaaaaacaagatcattacacaaaaatgggacacctaattcctcaaaccggagatgaagagaccgagcttggtttagctgcggttaggctagctaactgtgcagccttcccaatggttttcaaagctgccatcgagctcggtgtcatcgacactctctacttagctgctcgtgatgacgtcaccggatccagttccttcctcacaccttctgagatagctattaggctccccacaaaacctagtaaccctgaagcaccagctctgttggatcgtattcttcgtttacttgctagctactccatggtcaagtgccaaattatcgatggtaacagagtctacaaagcagagccgatttgtcgatatttcttgaaagataatgttgatgaagaattaggaacacttgcttctcaacttattgtcactctcgataccgtcttcctcaatacatggggagaattaaaaaatgtggtactagaaggaggagttgcatttggccgtgccaatggtggtttgaaactctttgactatattagcaaagatgagagattaagcaaactctttaaccggaccggattctctgtcgcggttttgaaaaagatcctacaagtttatagtggtttcgaaggagttaatgtgttggttgatgtaggaggtggagttggtgacacacttggttttgttacttcaaagtatccaaacattaagggtatcaattttgatctaacttgtgctttaacacaagctccttcttatcctaatgtggaacatgtagctggagacatgtttgttgatgtcccaaaaggtgatgctatcctcttgaaacgtatacttcatgactggactgatgaagactgtgaaaagattctcaagaattgttggaaagcattacctgagaatgggaaagtgattgtcatggaagtagttactccagatgaagcagataatcgtgatgtgatatccaacattgcttttgatatggatctgttgatgctcactcaattatctggaggtaaagagaggtcgcgggccgagtatgtagctatggctgctaactcgggttttccgcgttgcaactttgtatgcagtgcatatcatttgtgggtcattgagttaacgaaacaggcttagagttgtaagattatgtttcttcctgtgttctataaagagtgtgaaccgtctcatggtaataaaagttgtatgaataaaatgatgatattgtggtttggtt

SEQ ID NO: 5775 - protein, 381 aa, Arabidopsis thaliana
ETPHFRKKQDHYTKMGHLIPQTGDEETELGLAAVRLANCAAFPMVFKAAIELGVIDTLYLAARDDVTGSSSFLTPSEIAIRLPTKPSNPEAPALLDRILRLLASYSMVKCQIIDGNRVYKAEPICRYFLKDNVDEELGTLASQLIVTLDTVFLNTWGELKNVVLEGGVAFGRANGGLKLFDYISKDERLSKLFNRTGFSVAVLKKILQVYSGFEGVNVLVDVGGGVGDTLGFVTSKYPNIKGINFDLTCALTQAPSYPNVEHVAGDMFVDVPKGDAILLKRILHDWTDEDCEKILKNCWKALPENGKVIVMEVVTPDEADNRDVISNIAFDMDLLMLTQLSGGKERSRAEYVAMAANSGFPRCNFVCSAYHLWVIELTKQA

SEQ ID NO: 5776 - protein, 367 aa, Arabidopsis thaliana
MGHLIPQTGDEETELGLAAVRLANCAAFPMVFKAAIELGVIDTLYLAARDDVTGSSSFLTPSEIAIRLPTKPSNPEAPALLDRILRLLASYSMVKCQIIDGNRVYKAEPICRYFLKDNVDEELGTLASQLIVTLDTVFLNTWGELKNVVLEGGVAFGRANGGLKLFDYISKDERLSKLFNRTGFSVAVLKKILQVYSGFEGVNVLVDVGGGVGDTLGFVTSKYPNIKGINFDLTCALTQAPSYPNVEHVAGDMFVDVPKGDAILLKRILHDWTDEDCEKILKNCWKALPENGKVIVMEVVTPDEADNRDVISNIAFDMDLLMLTQLSGGKERSRAEYVAMAANSGFPRCNFVCSAYHLWVIELTKQA

SEQ ID NO: 5777 - protein, 338 aa, Arabidopsis thaliana
MVFKAAIELGVIDTLYLAARDDVTGSSSFLTPSEIAIRLPTKPSNPEAPALLDRILRLLASYSMVKCQIIDGNRVYKAEPICRYFLKDNVDEELGTLASQLIVTLDTVFLNTWGELKNVVLEGGVAFGRANGGLKLFDYISKDERLSKLFNRTGFSVAVLKKILQVYSGFEGVNVLVDVGGGVGDTLGFVTSKYPNIKGINFDLTCALTQAPSYPNVEHVAGDMFVDVPKGDAILLKRILHDWTDEDCEKILKNCWKALPENGKVIVMEVVTPDEADNRDVISNIAFDMDLLMLTQLSGGKERSRAEYVAMAANSGFPRCNFVCSAYHLWVIELTKQA

SEQ ID NO: 5778 - DNA, 1162 bp, Arabidopsis thaliana
cattacctagaacatcctaatcaaaaaaaatcgaaaaaagctaagatctttgcgttttgaaacgatggcggaagaacataagcatgatgaatctgtgatcgctcctgagccagctgttgaggttgtggagagagaatcgttgatggataagatatcggagaagatccatcacggtggtgattcttcttcgtcttcttcatcttctgatgatgaagacgagaagaagaagactaagaagccctcttctccttcgtcttctatgaaatcgaaagtttaccgcttgttcggacgagagcagcctgttcataaggttctcggcggtggaaagccggctgatatattcatgtggaagaacaagaagatgtctggtggtgtacttggtggtgctacagctgcttgggttgtgtttgaattgatggagtaccatcttctcactctgctttgccacgtgatgattgttgttctcgctgtgctgtttttgtggtctaatgccactatgttcattaacaagtccccaccaaagattcctgaagttcatatccctgaagaacctattcttcagcttgcgtctgggctcaatcgagatcaaccgtggattctcttctctccgtgaaattgcatcaggaagggatctcaagaaattcctcattgctattgccgggttatgggttctctcaatcttgggcggttgcttcaacttcttgacattggcatacatagctcttgtgttgctcttcacggttcctcttgcctacgacaagtatgaagacaaagtcgacccattaggtgagaaagcaatgatcgagctcaagaagcagtatgcagtgttggatgagaaggtgttgagcaagatcccacttgggccgttgaagaacaagaagaaagattaggggtttacacaaggttgtccgtggctagcaaaacgggtgttgtgaaatggtatcgaagtaatgtgttttgggcgtttttttaggtggctctttcggttatgtgaatgaacttggaattttcctgactggtttgttctgttgtttatgtcattgttgatcagcgtcgagggataaaagtagtgatatttcttctctctctaagcctctatataactaagaatttcaagatatttgaattttgcaatctcgtggttaatgttgttctttctctt

SEQ ID NO: 5779 - protein, 182 aa, Arabidopsis thaliana
MAEEHKHDESVIAPEPAVEVVERESLMDKISEKIHHGGDSSSSSSSSDDEDEKKKTKKPSSPSSSMKSKVYRLFGREQPVHKVLGGGKPADIFMWKNKKMSGGVLGGATAAWVVFELMEYHLLTLLCHVMIVVLAVLFLWSNATMFINKSPPKIPEVHIPEEPILQLASGLNRDQPWILFSP

SEQ ID NO: 5780 - protein, 156 aa, Arabidopsis thaliana
MDKISEKIHHGGDSSSSSSSSDDEDEKKKTKKPSSPSSSMKSKVYRLFGREQPVHKVLGGGKPADIFMWKNKKMSGGVLGGATAAWVVFELMEYHLLTLLCHVMIVVLAVLFLWSNATMFINKSPPKIPEVHIPEEPILQLASGLNRDQPWILFSP

SEQ ID NO: 5781 - protein, 133 aa, Arabidopsis thaliana
MPLCSLTSPHQRFLKFISLKNLFFSLRLGSIEINRGFSSLREIASGRDLKKFLIAIAGLWVLSILGGCFNFLTLAYIALVLLFTVPLAYDKYEDKVDPLGEKAMIELKKQYAVLDEKVLSKIPLGPLKNKKKD

SEQ ID NO: 5782 - DNA, 1634 bp, Arabidopsis thaliana
acccatcttatcattattttataaagatcctatgtctatccgtaaatggactaatctttagacacacagagaatataatgagtttgaaaataaagtttctgcttctgcttgtcttgtatcatcatgttgattctgcctctatcgtcaagtttcttcctggttttgaaggccctcttcctttcgaacttgaaaccgggtacattggtattggtgaggacgagaatgtgcaatttttctactatttcatcaaatctgaaaacaatccaaaagaagatcctcttcttatatggttaaatggaggacctggatgttcttgtcttggtggtattatttttgagaacggaccggtgggtttgaagtttgaggtgttcaacggaagtgctccttctttgttctctactacatattcatggacaaagatggcaaacattatattcttggatcagccagtaggatctggcttctcctactcaaaaactccaattgataaaactggtgacataagtgaagtaaagaggacccatgagtttcttcaaaagtggctaagcaggcatccacaatatttctccaaccctttatatgtagttggagattcttattccggtatgattgtcccggccctcgttcaagaaatctcacaaggaaattatatatgttgcgaacctcctataaatctacagggttatatgcttggaaaccctgtaacatatatggactttgaacaaaacttccgcattccatatgcttatggtatgggattaatctccgacgaaatctatgagccaatgaagagaatctgcaacggaaattattacaatgtggatccatctaacacacaatgtttgaaacttactgaagaatatcataagtgcactgccaaaataaatatccatcacatattaacaccagattgcgatgtaaccaatgtaacatctcctgattgttattattatccatatcatctcattgaatgttgggctaacgacgagagcgttcgcgaagctcttcatattgaaaagggtagtaaaggaaaatgggcgcgatgtaatcggactattccatacaatcacgacattgtaagcagcataccatatcacatgaataacagcatcagtggataccgatctcttatttacagtggtgatcacgacatcgcggtcccttttcttgcaactcaagcctggataagatctctcaattactcccccattcataactggaggccatggatgataaacaatcaaatcgctggatacacgagagcttattccaataagatgacatttgctactatcaaagcaagtggacacacggcagagtatagaccaaacgagacctttatcatgttccaaaggtggatcagtggccaacccctgtaacaaaaggcttatgaccttcacctataattatctaccaactaatatccacgttaagcgcagttgtttgtgttgaaatgtttttgttgtttgctttgttgcattcttttgtgctttatgttacaattttatgtgttttatgtactacagttcattattgtgcgttgtgcaattccttttacatttaactagggactaacccgggctagccccggtatatttcctaactatacgtgcaagaaaatgatgttctatttc

SEQ ID NO: 5783 - protein, 458 aa, Arabidopsis thaliana
PSYHYFIKILCLSVNGLIFRHTENIMSLKIKFLLLLVLYHHVDSASIVKFLPGFEGPLPFELETGYIGIGEDENVQFFYYFIKSENNPKEDPLLIWLNGGPGCSCLGGIIFENGPVGLKFEVFNGSAPSLFSTTYSWTKMANIIFLDQPVGSGFSYSKTPIDKTGDISEVKRTHEFLQKWLSRHPQYFSNPLYVVGDSYSGMIVPALVQEISQGNYICCEPPINLQGYMLGNPVTYMDFEQNFRIPYAYGMGLISDEIYEPMKRICNGNYYNVDPSNTQCLKLTEEYHKCTAKINIHHILTPDCDVTNVTSPDCYYYPYHLIECWANDESVREALHIEKGSKGKWARCNRTIPYNHDIVSSIPYHMNNSISGYRSLIYSGDHDIAVPFLATQAWIRSLNYSPIHNWRPWMINNQIAGYTRAYSNKMTFATIKASGHTAEYRPNETFIMFQRWISGQPL

SEQ ID NO: 5784 - protein, 433 aa, Arabidopsis thaliana
MSLKIKFLLLLVLYHHVDSASIVKFLPGFEGPLPFELETGYIGIGEDENVQFFYYFIKSENNPKEDPLLIWLNGGPGCSCLGGIIFENGPVGLKFEVFNGSAPSLFSTTYSWTKMANIIFLDQPVGSGFSYSKTPIDKTGDISEVKRTHEFLQKWLSRHPQYFSNPLYVVGDSYSGMIVPALVQEISQGNYICCEPPINLQGYMLGNPVTYMDFEQNFRIPYAYGMGLISDEIYEPMKRICNGNYYNVDPSNTQCLKLTEEYHKCTAKINIHHILTPDCDVTNVTSPDCYYYPYHLIECWANDESVREALHIEKGSKGKWARCNRTIPYNHDIVSSIPYHMNNSISGYRSLIYSGDHDIAVPFLATQAWIRSLNYSPIHNWRPWMINNQIAGYTRAYSNKMTFATIKASGHTAEYRPNETFIMFQRWISGQPL

SEQ ID NO: 5785 - protein, 319 aa, Arabidopsis thaliana
MANIIFLDQPVGSGFSYSKTPIDKTGDISEVKRTHEFLQKWLSRHPQYFSNPLYVVGDSYSGMIVPALVQEISQGNYICCEPPINLQGYMLGNPVTYMDFEQNFRIPYAYGMGLISDEIYEPMKRICNGNYYNVDPSNTQCLKLTEEYHKCTAKINIHHILTPDCDVTNVTSPDCYYYPYHLIECWANDESVREALHIEKGSKGKWARCNRTIPYNHDIVSSIPYHMNNSISGYRSLIYSGDHDIAVPFLATQAWIRSLNYSPIHNWRPWMINNQIAGYTRAYSNKMTFATIKASGHTAEYRPNETFIMFQRWISGQPL

SEQ ID NO: 5786 - DNA, 1410 bp, Arabidopsis thaliana
attatagtctcgatgaagatgctgagacttagaaagaagcaacatttggtgtttctactatgcgtgtggtgtttggtggtggattggagcaaagcagaaacagaggaaagtgatggaagtcccatggagaaaacagagcaagctgctctatactctaccattcaaggctttgttggtgaatcttggaatggctcttatctttatcctgacccttgtggctggactcctatccagggtgtgacttgtgatatctatgatgagctttggtatgtaactgctctaagctttgggactatgaaagacaactctcttgcttgttctgaaagtccagtgatcagaccacaactctttgagctcaagcacctcaagtctctctctcttttcaactgcttcacaacgcctaaccgatatctagcttcaatctccgatgaaaagtggttggatctctctaaaagcttggagagacttgagatcagatcaaacccgggactgataggtgaactcccttctgtcatcactaacctcaccaaccttcaatctctggtggtgctagaaaacaagttaacaggtccattgccagtgaatttggccaagttaaccagattgagacgtttagtactgtctggaaaccggttcacagggagaatacctgaggtctacgggttaaccggattgttgatattggatgtgagcaggaatttcttatctggggcgttgcctttaagcgttggaggattgtattctctgctgaaacttgatcttagtaacaattacttggaaggaaagttacctagagagctagagtccttgaagaatctcactctattggacttgagaaacaacagattatcaggtgggttgagtaaagagatccaagagatgacttctttggtagaactggttctgtccaataatcgcctagccggggacttgacaggaataaagtggagaaatctgaagaatttagtggttcttgatctctccaacacaggcttaaaaggggagattcctggttcaatcttggagctcaagaaactgaggtttttgggtttgagcaacaacaatctcggaggcaaactcattccacaaatggaaaccgaaatgcctagtctcagcgcgctttacgtgaatggaaataacatcagcggagagttggaattctctaggtacttttatgagagaatgggaaggatacttggtgtttgggggaaccctaatctgtgttacaacggagatgagaccaagaaccttagcgatcatgttcctttcggagttaaccaatgtaagagaattaaggcagataaatattagaaccctcgttctgaatcaaagggtttgtgataacaaaaacttggaatgatacaaagctgtggtcttttcaattttgttattgcatcttatttctatagc

SEQ ID NO: 5787 - protein, 436 aa, Arabidopsis thaliana
IIVSMKMLRLRKKQHLVFLLCVWCLVVDWSKAETEESDGSPMEKTEQAALYSTIQGFVGESWNGSYLYPDPCGWTPIQGVTCDIYDELWYVTALSFGTMKDNSLACSESPVIRPQLFELKHLKSLSLFNCFTTPNRYLASISDEKWLDLSKSLERLEIRSNPGLIGELPSVITNLTNLQSLVVLENKLTGPLPVNLAKLTRLRRLVLSGNRFTGRIPEVYGLTGLLILDVSRNFLSGALPLSVGGLYSLLKLDLSNNYLEGKLPRELESLKNLTLLDLRNNRLSGGLSKEIQEMTSLVELVLSNNRLAGDLTGIKWRNLKNLVVLDLSNTGLKGEIPGSILELKKLRFLGLSNNNLGGKLIPQMETEMPSLSALYVNGNNISGELEFSRYFYERMGRILGVWGNPNLCYNGDETKNLSDHVPFGVNQCKRIKADKY

SEQ ID NO: 5788 - protein, 432 aa, Arabidopsis thaliana
MKMLRLRKKQHLVFLLCVWCLVVDWSKAETEESDGSPMEKTEQAALYSTIQGFVGESWNGSYLYPDPCGWTPIQGVTCDIYDELWYVTALSFGTMKDNSLACSESPVIRPQLFELKHLKSLSLFNCFTTPNRYLASISDEKWLDLSKSLERLEIRSNPGLIGELPSVITNLTNLQSLVVLENKLTGPLPVNLAKLTRLRRLVLSGNRFTGRIPEVYGLTGLLILDVSRNFLSGALPLSVGGLYSLLKLDLSNNYLEGKLPRELESLKNLTLLDLRNNRLSGGLSKEIQEMTSLVELVLSNNRLAGDLTGIKWRNLKNLVVLDLSNTGLKGEIPGSILELKKLRFLGLSNNNLGGKLIPQMETEMPSLSALYVNGNNISGELEFSRYFYERMGRILGVWGNPNLCYNGDETKNLSDHVPFGVNQCKRIKADKY

SEQ ID NO: 5789 - protein, 430 aa, Arabidopsis thaliana
MLRLRKKQHLVFLLCVWCLVVDWSKAETEESDGSPMEKTEQAALYSTIQGFVGESWNGSYLYPDPCGWTPIQGVTCDIYDELWYVTALSFGTMKDNSLACSESPVIRPQLFELKHLKSLSLFNCFTTPNRYLASISDEKWLDLSKSLERLEIRSNPGLIGELPSVITNLTNLQSLVVLENKLTGPLPVNLAKLTRLRRLVLSGNRFTGRIPEVYGLTGLLILDVSRNFLSGALPLSVGGLYSLLKLDLSNNYLEGKLPRELESLKNLTLLDLRNNRLSGGLSKEIQEMTSLVELVLSNNRLAGDLTGIKWRNLKNLVVLDLSNTGLKGEIPGSILELKKLRFLGLSNNNLGGKLIPQMETEMPSLSALYVNGNNISGELEFSRYFYERMGRILGVWGNPNLCYNGDETKNLSDHVPFGVNQCKRIKADKY

SEQ ID NO: 5790 - DNA, 1258 bp, Arabidopsis thaliana
accagaaaaaggaacaaaacaaaaataaagcgcgaaattagttttcaccggcgagattttttatcctctctacgagataacacttagaagaagaggcagttaaaacagagagacgacgtcgtgttatttttccaaattccggtgatctgagaatgacgtcggggactagaacgccgacttggaaagagagagagaacaacaaacggcgagagcggcgaagacgagcgattgcggctaagatcttcgcaggactaaggattcatggaaacttcaagctccctaaacactgcgacaacaatgaagtcctcaaagctttatgcaatgaagctggttggactgtagaagacgacggaactacttaccgcaagggatgcaaaccaatggatcgaatggacctcatgaatggttctacttcagctagtccatgctcatcgtatcaacatagccctcgtgcttcctacaatccaagcccttcgtcttcatcattcccgagtcctacaaacccatttggtgatgctaactcactaatcccatggctcaagaacctctcttcaaactcaccttccaagcttcccttcttccatggaaattcaataagcgctcccgtgactccgccattggctcgaagccctactcgtgatcaagtaaccatccctgactctggatggctctcaggaatgcaaactccgcagagcggaccgtcttctcctactttcagtttagtttcaagaaacccgtttttcgacaaagaggcttttaaaatgggagattgtaattcaccaatgtggactcctggacaaagtggaaactgctctccagctattcctgctggtgttgatcagaactctgatgtgccaatggctgatggaatgacggctgagtttgcgtttggttgtaacgcaatggctgcgaatggaatggtgaagccttgggaaggagaaaggatacatggagaatgtgtttcagatgatttagaacttacacttggaaactcaagaaccagatgatcatttcagagaagaatcaaagtcgtttgctatcattaagtcttcttttttgtctgtcttttttttccagtgtgatgtttaaaggtgactcagaggaaaaaaaggagaatagaaagagaaacaaaaaaagaacattttgagctctgttttcttttttttttttctttttttttttgttggcttttgactaaagttgtagttagaatctattttatatcttgaagcttctttaaaaaaaaagttatttgtgg

SEQ ID NO: 5791 - protein, 284 aa, Arabidopsis thaliana
MTSGTRTPTWKERENNKRRERRRRAIAAKIFAGLRIHGNFKLPKHCDNNEVLKALCNEAGWTVEDDGTTYRKGCKPMDRMDLMNGSTSASPCSSYQHSPRASYNPSPSSSSFPSPTNPFGDANSLIPWLKNLSSNSPSKLPFFHGNSISAPVTPPLARSPTRDQVTIPDSGWLSGMQTPQSGPSSPTFSLVSRNPFFDKEAFKMGDCNSPMWTPGQSGNCSPAIPAGVDQNSDVPMADGMTAEFAFGCNAMAANGMVKPWEGERIHGECVSDDLELTLGNSRTR

SEQ ID NO: 5792 - protein, 208 aa, Arabidopsis thaliana
MDRMDLMNGSTSASPCSSYQHSPRASYNPSPSSSSFPSPTNPFGDANSLIPWLKNLSSNSPSKLPFFHGNSISAPVTPPLARSPTRDQVTIPDSGWLSGMQTPQSGPSSPTFSLVSRNPFFDKEAFKMGDCNSPMWTPGQSGNCSPAIPAGVDQNSDVPMADGMTAEFAFGCNAMAANGMVKPWEGERIHGECVSDDLELTLGNSRTR

SEQ ID NO: 5793 - protein, 205 aa, Arabidopsis thaliana
MDLMNGSTSASPCSSYQHSPRASYNPSPSSSSFPSPTNPFGDANSLIPWLKNLSSNSPSKLPFFHGNSISAPVTPPLARSPTRDQVTIPDSGWLSGMQTPQSGPSSPTFSLVSRNPFFDKEAFKMGDCNSPMWTPGQSGNCSPAIPAGVDQNSDVPMADGMTAEFAFGCNAMAANGMVKPWEGERIHGECVSDDLELTLGNSRTR

SEQ ID NO: 5794 - DNA, 1722 bp, Arabidopsis thaliana
attcaacctctctacttcagtttctctgtccccatttttcatctgagagttaaaactgtaacctcaaaatctgagataaagtcaaaaaaaaaaccccagtttatgattctcattttctctttataatcgaaagcttcgatttttaacaaaacccagaatctgtgttcttgtttttttttttttttggtgagagttatcttttttttttttggaatattgggtgagaatctgagtaatgggatttacataaaatattctatgtaaatactaaaataatctggaaattattaaatttccaaactttgtgttccattttgtggactcaaatttgtttataaagatctcaaatcagagagattgagacgaccaagaacaagcagaagaagaagaagaattgagagaatgtggtggtggtcttcttcaactaaaggtcgttcgaatctggagaggtttcttttaggaatcactcctaagcctccttccttctctcttcatcaggaacagggaaaggaggagattgagtatttcaggcttggtgatctctgggattgttatgatgagatgagtgcgtatggctttggcacacaggttgatttaaacaatggcgaaaccgttatgcagtactacgtcccgtacctatccgctatccaaatccacactaacaaacccgccttgctttccaggaaccagaatgaggtggctgaatctgagagtagcgagggttggagcgatagtgagagtgaaaagttgttgtcaaggtcaatgagcaatgattcaagcaaaacatgggatgctgtctctgaagattcggttttcgatccggatggttcaccgttgctgaaagatagacttggtaaccttgactttaagtacattgaaagagatcctccgcacaagcggattcccttaaccgacaagataaacgtattggtggagaaatatccgggactcatgaccttaaggagtgtcgacatgtctcctgcaagttggatggctgttgcgtggtacccgatataccacatcccaacctgcaggaacgagaaagatttgacgacaggcttcctaacttatcatactctatcttcgtcttttcaagataatgtggtggaaggagatcaaagcaacaacaatgaagaaacagagttttgtgaagattccgtaataaacaagagaatgccattgcctccgtttggtgtaacaacttacaaaatgcaaggagatctttgggggaagacggggtttgaccaggaccggttgctttatcttcaaagcgctgcggattcatggctgaaacagctcaatgttgatcaccatgactataacttcttccttaactcgagcttctaaagatcaatcgggtcgttcgtatgtttatccttctccaaaccttaaacaaaaaaaaaagacctcataaccctttttctttgttgttttcaagctccttttgtttctctgtgttttttgttctttttgtttttgtctggctcgttgtgttgttttaggtagcaaccgccatcgcggagttttttctccttttgcaagccaatcatggaagtttctaagaagaaaacagagcttttttttctttttttttaacggtgttgagaaaacaagaaagttgttttcttttcttgggtgagagatcatgtaaattgaccttgaacagaggactctgttttgtacttttctgtctaaaatatataaaaaaatctgtctttcttg

SEQ ID NO: 5795 - protein, 314 aa, Arabidopsis thaliana
MWWWSSSTKGRSNLERFLLGITPKPPSFSLHQEQGKEEIEYFRLGDLWDCYDEMSAYGFGTQVDLNNGETVMQYYVPYLSAIQIHTNKPALLSRNQNEVAESESSEGWSDSESEKLLSRSMSNDSSKTWDAVSEDSVFDPDGSPLLKDRLGNLDFKYIERDPPHKRIPLTDKINVLVEKYPGLMTLRSVDMSPASWMAVAWYPIYHIPTCRNEKDLTTGFLTYHTLSSSFQDNVVEGDQSNNNEETEFCEDSVINKRMPLPPFGVTTYKMQGDLWGKTGFDQDRLLYLQSAADSWLKQLNVDHHDYNFFLNSSF

SEQ ID NO: 5796 - protein, 261 aa, Arabidopsis thaliana
MSAYGFGTQVDLNNGETVMQYYVPYLSAIQIHTNKPALLSRNQNEVAESESSEGWSDSESEKLLSRSMSNDSSKTWDAVSEDSVFDPDGSPLLKDRLGNLDFKYIERDPPHKRIPLTDKINVLVEKYPGLMTLRSVDMSPASWMAVAWYPIYHIPTCRNEKDLTTGFLTYHTLSSSFQDNVVEGDQSNNNEETEFCEDSVINKRMPLPPFGVTTYKMQGDLWGKTGFDQDRLLYLQSAADSWLKQLNVDHHDYNFFLNSSF

SEQ ID NO: 5797 - protein, 243 aa, Arabidopsis thaliana
MQYYVPYLSAIQIHTNKPALLSRNQNEVAESESSEGWSDSESEKLLSRSMSNDSSKTWDAVSEDSVFDPDGSPLLKDRLGNLDFKYIERDPPHKRIPLTDKINVLVEKYPGLMTLRSVDMSPASWMAVAWYPIYHIPTCRNEKDLTTGFLTYHTLSSSFQDNVVEGDQSNNNEETEFCEDSVINKRMPLPPFGVTTYKMQGDLWGKTGFDQDRLLYLQSAADSWLKQLNVDHHDYNFFLNSSF

SEQ ID NO: 5798 - DNA, 1218 bp, Arabidopsis thaliana
gacgagcgacctcatcgtctacatcgccgtcgcctgttaccgtccggtgctattctccttcacaatctcacatttttcgtaccggttagaagatgagaatcacgcagatcttgttatgtctggtaatagtggcattgtcttcaagctcccatgtctggtccgatcagatcttcccagctcatctagttggaacattcagcagaaacaatcgtgaaccaaagtacaagattgagttccttcctgaagattcaccttttcacccgggtgataatctggaatcaatggttatgttggataagcatggaaatcggtttttatgttacttaccgaaagaggaaaaagcgacgagtggatggacttctagtcagcaaaatattagtactgtgatgatggaaacacagcaactggtgaagctaaagactcctgatgaattgcttcaaccacttagtgaaaaatgtctttttaggcaagagggttggtggtcttatgagttttgtcatcagaagtatgtgcggcagctacacgttgaggatgaaaacaagattgttcaagagttttttttgggtacttttgacccagaggcaactgcggcgtttaatcaaactgtttctgatgcttcaactgatgcatctcagaggtatcactctcatgtatacaccaatgggaccacctgtgatcttacaggatcacctcgcgaagtcgaggtgaggtttgtatgcgcagaaacaagggcaatggtcacttcaatcactgaattatcaacttgcaagtacgcactgactgttcagtgcccaaccttgtgcaagcatccgctgttccagctagagaaaccagtgtcacacacgatccactgcaatgcgatcccagtggaagaagacgcaacaagaaacaaggaagaacaagcagtagacgaatcacctaagatgatagctgattcttgaaaaccgcctaagtgaatcacctaagagtaagagttaacagcgactgtatatacaagaactagcatatctccattttcagtgttacccgctgtagtgatcatggtttcaattgggatcgcttgctggtaggatgatgatactctctctgtaattttttgcatacttaaaatagcatttcaatagaaggtactgataaaccacttgtgaagcaaagactgcaagcttcatgtaacacatatgtttccgtttcactaatgaatttgttccaagtgtaggc

SEQ ID NO: 5799 - protein, 282 aa, Arabidopsis thaliana
MRITQILLCLVIVALSSSSHVWSDQIFPAHLVGTFSRNNREPKYKIEFLPEDSPFHPGDNLESMVMLDKHGNRFLCYLPKEEKATSGWTSSQQNISTVMMETQQLVKLKTPDELLQPLSEKCLFRQEGWWSYEFCHQKYVRQLHVEDENKIVQEFFLGTFDPEATAAFNQTVSDASTDASQRYHSHVYTNGTTCDLTGSPREVEVRFVCAETRAMVTSITELSTCKYALTVQCPTLCKHPLFQLEKPVSHTIHCNAIPVEEDATRNKEEQAVDESPKMIADS

SEQ ID NO: 5800 - protein, 219 aa, Arabidopsis thaliana
MVMLDKHGNRFLCYLPKEEKATSGWTSSQQNISTVMMETQQLVKLKTPDELLQPLSEKCLFRQEGWWSYEFCHQKYVRQLHVEDENKIVQEFFLGTFDPEATAAFNQTVSDASTDASQRYHSHVYTNGTTCDLTGSPREVEVRFVCAETRAMVTSITELSTCKYALTVQCPTLCKHPLFQLEKPVSHTIHCNAIPVEEDATRNKEEQAVDESPKMIADS

SEQ ID NO: 5801 - protein, 217 aa, Arabidopsis thaliana
MLDKHGNRFLCYLPKEEKATSGWTSSQQNISTVMMETQQLVKLKTPDELLQPLSEKCLFRQEGWWSYEFCHQKYVRQLHVEDENKIVQEFFLGTFDPEATAAFNQTVSDASTDASQRYHSHVYTNGTTCDLTGSPREVEVRFVCAETRAMVTSITELSTCKYALTVQCPTLCKHPLFQLEKPVSHTIHCNAIPVEEDATRNKEEQAVDESPKMIADS

SEQ ID NO: 5802 - DNA, 1812 bp, Arabidopsis thaliana
agctatcaatttactggagaagagatggtgggatcagaggttttggaggaatgtggagaaaaaataagcaagaaagagtcaaagaagcgagccgctaaactggagaagttgctccgtaaacaggaacgagaagaagccacatcatcatctctttctctggaggaggaggatgaatcgtgttccagcaactacggtgacgtgactactaacgagttgcagtcggctgttgagggaaaagagctcactgatgtgagcaacttggttgaagagattgtggggtcagaggtttcgatcagaggtcgactgcacaagaatcgcttagtcggtaccaaattgtttgtgatcttgagggaaagtggattcacggttcaatgcgtggtggaggagaccagagttggtgcaaacatgattaaatttgtcaagcagctgagtcgtgaatctgttgttgagcttatcggtgtcgtctctcaccctaagaagcctctcacaggaaccacccagcaggttgaaatacatgtcagaaaaatgtactgcctcagcagatccttgccaaatttaccacttgttgtggaggatgctgctcgtagtgaatcagatattgaaaaatctggcaaggatggcaaacaagctgctcgtgtccttcaggacacacgtttgaataatagggttcttgacatcagaacaccggctaatcaagccatcttccgtattcagtgccaagtccaaattgcgttcagagaatacttacaatccaaggggtttcttgaaatccacacaccgaaattgatcgctggcagtagtgaaggaggttctgctgtgtttaggttggactacaaagggcagcctgcttgtctggctcagtctcctcagcttcataagcagatggcgatatgtggtgacatgcgacgcgtctttgaggttggtcctgttttcagagctgaagactccttcactcatagacacctgtgtgaattcgttggtcttgatgtggagatggagattcgaatgcactactctgagataatggatcttgtgggggagttgtttccgttcatattcacaaaaatagaagaaaggtgcccaaaggaacttgaatctgtcagaaagcaatacccttttcaatctttgaagtttcttccgcaaacattgaggctaacctttgcagaagggattcaaatgcttaaggaagctggcgaggaggttgatcctcttggtgatctaaatacagaatctgagaggaaacttggccagcttgttctggaaaagtacaagacggagttctacatgctgcatcgctatccatcggctgtcagaccgttctacactatgccctatgaaaatgattctaactacagcaactctttcgatgtcttcatcagaggagaggagatcatgtcaggagctcaacgtatccatgacccagaactcttggagaagcgcgcaagagaatgcggcattgatgtcaagacaatatccacgtacattgatgcattcaggtacggtgcaccacctcacggtggattcggagtggggctggagcgtgtggtaatgctcttatgtgccctcaataacatccgcaaaacttcgctattccctcgtgactctcaaaggctcactccctaatatcattgctcttccctggcgactctcaaaggctcgctcccttaatatctatctttgataattgtccccgctcccgatttctaagttatttttttggtgcagttcgttaggtgtttagttatctttaaactatgtatgtgttgtaacctttaaattattaaggagcagtactatttgggctttttcggc

SEQ ID NO: 5803 - protein, 540 aa, Arabidopsis thaliana
SYQFTGEEMVGSEVLEECGEKISKKESKKRAAKLEKLLRKQEREEATSSSLSLEEEDESCSSNYGDVTTNELQSAVEGKELTDVSNLVEEIVGSEVSIRGRLHKNRLVGTKLFVILRESGFTVQCVVEETRVGANMIKFVKQLSRESVVELIGVVSHPKKPLTGTTQQVEIHVRKMYCLSRSLPNLPLVVEDAARSESDIEKSGKDGKQAARVLQDTRLNNRVLDIRTPANQAIFRIQCQVQIAFREYLQSKGFLEIHTPKLIAGSSEGGSAVFRLDYKGQPACLAQSPQLHKQMAICGDMRRVFEVGPVFRAEDSFTHRHLCEFVGLDVEMEIRMHYSEIMDLVGELFPFIFTKIEERCPKELESVRKQYPFQSLKFLPQTLRLTFAEGIQMLKEAGEEVDPLGDLNTESERKLGQLVLEKYKTEFYMLHRYPSAVRPFYTMPYENDSNYSNSFDVFIRGEEIMSGAQRIHDPELLEKRARECGIDVKTISTYIDAFRYGAPPHGGFGVGLERVVMLLCALNNIRKTSLFPRDSQRLTP

SEQ ID NO: 5804 - protein, 532 aa, Arabidopsis thaliana
MVGSEVLEECGEKISKKESKKRAAKLEKLLRKQEREEATSSSLSLEEEDESCSSNYGDVTTNELQSAVEGKELTDVSNLVEEIVGSEVSIRGRLHKNRLVGTKLFVILRESGFTVQCVVEETRVGANMIKFVKQLSRESVVELIGVVSHPKKPLTGTTQQVEIHVRKMYCLSRSLPNLPLVVEDAARSESDIEKSGKDGKQAARVLQDTRLNNRVLDIRTPANQAIFRIQCQVQIAFREYLQSKGFLEIHTPKLIAGSSEGGSAVFRLDYKGQPACLAQSPQLHKQMAICGDMRRVFEVGPVFRAEDSFTHRHLCEFVGLDVEMEIRMHYSEIMDLVGELFPFIFTKIEERCPKELESVRKQYPFQSLKFLPQTLRLTFAEGIQMLKEAGEEVDPLGDLNTESERKLGQLVLEKYKTEFYMLHRYPSAVRPFYTMPYENDSNYSNSFDVFIRGEEIMSGAQRIHDPELLEKRARECGIDVKTISTYIDAFRYGAPPHGGFGVGLERVVMLLCALNNIRKTSLFPRDSQRLTP

SEQ ID NO: 5805 - protein, 405 aa, Arabidopsis thaliana
MIKFVKQLSRESVVELIGVVSHPKKPLTGTTQQVEIHVRKMYCLSRSLPNLPLVVEDAARSESDIEKSGKDGKQAARVLQDTRLNNRVLDIRTPANQAIFRIQCQVQIAFREYLQSKGFLEIHTPKLIAGSSEGGSAVFRLDYKGQPACLAQSPQLHKQMAICGDMRRVFEVGPVFRAEDSFTHRHLCEFVGLDVEMEIRMHYSEIMDLVGELFPFIFTKIEERCPKELESVRKQYPFQSLKFLPQTLRLTFAEGIQMLKEAGEEVDPLGDLNTESERKLGQLVLEKYKTEFYMLHRYPSAVRPFYTMPYENDSNYSNSFDVFIRGEEIMSGAQRIHDPELLEKRARECGIDVKTISTYIDAFRYGAPPHGGFGVGLERVVMLLCALNNIRKTSLFPRDSQRLTP

SEQ ID NO: 5806 - DNA, 1757 bp, Arabidopsis thaliana
gcggctcgtagcagagtttgttcgattctcttaaccacattaggtttggagtattatttgcttctctcgattgaagaagagtacctaaagaatcatgttgtggatcaaaaacctagcaagaatctcgcagaccacttcttcgtctgtcggaaacgtgttcagaaaccccgaatcctacactctctcgtcccgtttctgcaccgctctgcaaaagcaacaagtaaccgacacggttcaagcaaaggaggatgtagttaatgcgttggagccacaacgttacgacggtttggctccgacgaaagagggagagaagccgagagttttggttctcgggtcgggctgggcgggttgtcgggtattaaaagggatcgatactagtatttacgacgtcgtttgtgtctctcctaggaaccacatggtcttcactcctctcttggcttctacttgcgttggtacgcttgagtttaggtctgttgctgaaccaatctctcgtatccaaccggcgatttcacgagaacccggttcttattacttccttgctaattgctccaaacttgatgctgataatcatgaggtgcattgtgagactgtaactgaggggtctagcacattgaagccatggaagttcaagatagcttatgacaaactggtactagcttgtggtgcagaagcatccacatttggaattaatggcgtcttagaaaacgccattttcctccgtgaggttcaccacgctcaggagatccgtaggaagcttcttcttaacctcatgctctctgaagttccaggcataggtgaagatgagaagaagaggctgttgcattgcgttgtggttggaggtgggccaactggtgttgagtttagtggtgaattgagtgatttcatcatgaaagatgttcgtcagagatattctcatgtgaaagacgacattcgtgttactctgattgaggcaagggatatactttcttcttttgacgatcggctaaggcactatgcaatcaagcagttaaacaagtctggagtgaagcttgtgcgtgggattgtgaaagaagtgaagcctcagaagctaatccttgatgatggcactgaagttccttacggtcccttagtctggtcaactggtgttggtccatcttcatttgtgaggtctcttgattttcctaaagatccaggtggaaggattggtattgatgagtggatgcgtgtaccttctgtacaagacgtgtttgcaattggtgactgtagcggttatctcgagagcacagggaaatcaacacttcctgcacttgcacaggtggctgagagagaaggcaaatacttggcgaatctgtttaacgtgatgggaaaagctggaggaggacgggccaatagcgcaaaggaaatggagcttggggaaccatttgtgtataaacatctcggaagtatggctactattgggagatacaaagctctcgttgatctccgtgagagcaaggaagggaaaggaatatcaatggcaggttttctgagctggttcatatggaggtctgcttatctgactcgagtcgtcagctggagaaaccgtttctacgttgctatcaattggctcactacctttgtctttggtcgggacattagccgaatctgatccatatcccctccacttcgccacgtgcttcttcttctctatgtctctatcttgttcactttatgacctctaatcagttgaaatcatatgttgtttacttggaacaattcaatgaaattcagcattttag

SEQ ID NO: 5807 - protein, 510 aa, Arabidopsis thaliana
MLWIKNLARISQTTSSSVGNVFRNPESYTLSSRFCTALQKQQVTDTVQAKEDVVNALEPQRYDGLAPTKEGEKPRVLVLGSGWAGCRVLKGIDTSIYDVVCVSPRNHMVFTPLLASTCVGTLEFRSVAEPISRIQPAISREPGSYYFLANCSKLDADNHEVHCETVTEGSSTLKPWKFKIAYDKLVLACGAEASTFGINGVLENAIFLREVHHAQEIRRKLLLNLMLSEVPGIGEDEKKRLLHCVVVGGGPTGVEFSGELSDFIMKDVRQRYSHVKDDIRVTLIEARDILSSFDDRLRHYAIKQLNKSGVKLVRGIVKEVKPQKLILDDGTEVPYGPLVWSTGVGPSSFVRSLDFPKDPGGRIGIDEWMRVPSVQDVFAIGDCSGYLESTGKSTLPALAQVAEREGKYLANLFNVMGKAGGGRANSAKEMELGEPFVYKHLGSMATIGRYKALVDLRESKEGKGISMAGFLSWFIWRSAYLTRVVSWRNRFYVAINWLTTFVFGRDISRI

SEQ ID NO: 5808 - protein, 403 aa, Arabidopsis thaliana
MVFTPLLASTCVGTLEFRSVAEPISRIQPAISREPGSYYFLANCSKLDADNHEVHCETVTEGSSTLKPWKFKIAYDKLVLACGAEASTFGINGVLENAIFLREVHHAQEIRRKLLLNLMLSEVPGIGEDEKKRLLHCVVVGGGPTGVEFSGELSDFIMKDVRQRYSHVKDDIRVTLIEARDILSSFDDRLRHYAIKQLNKSGVKLVRGIVKEVKPQKLILDDGTEVPYGPLVWSTGVGPSSFVRSLDFPKDPGGRIGIDEWMRVPSVQDVFAIGDCSGYLESTGKSTLPALAQVAEREGKYLANLFNVMGKAGGGRANSAKEMELGEPFVYKHLGSMATIGRYKALVDLRESKEGKGISMAGFLSWFIWRSAYLTRVVSWRNRFYVAINWLTTFVFGRDISRI

SEQ ID NO: 5809 - protein, 285 aa, Arabidopsis thaliana
MLSEVPGIGEDEKKRLLHCVVVGGGPTGVEFSGELSDFIMKDVRQRYSHVKDDIRVTLIEARDILSSFDDRLRHYAIKQLNKSGVKLVRGIVKEVKPQKLILDDGTEVPYGPLVWSTGVGPSSFVRSLDFPKDPGGRIGIDEWMRVPSVQDVFAIGDCSGYLESTGKSTLPALAQVAEREGKYLANLFNVMGKAGGGRANSAKEMELGEPFVYKHLGSMATIGRYKALVDLRESKEGKGISMAGFLSWFIWRSAYLTRVVSWRNRFYVAINWLTTFVFGRDISRI

SEQ ID NO: 5810 - DNA, 1423 bp, Arabidopsis thaliana
aattttctgtctatatatatattaaggatccaaattagggagagaccaaagaggaaattaataaccatcaatccaacaacgaatggagattgaagaagcgagtcgtgaaagtggacatgttgtgtgcggatcatggattcgtcgcccgaagaaagtaaactgggttcttatcgctaaagcttccaaacgccgtggctcatctgtttcttctcctgctctcctcaacatcttctcttttgaccccattactgcttctctttcctcctctcctttggcaacacacacgcttaaggatagtgatggtgatcctgtggctgtttcagtgcaccctggtggggattactttgtttgctcaacctccaaaggtggttgcaagttatttgagcttgtcggaggagcaacaggtattacgatcttagccaaagaactccttcctctccaaaatgctggactacaaaagtgtatggccttcagctttgatgggtctaaattagctgttgggggagtggatggatgtcttagaattatggagtggccaaacctaagtgtaattttggatgagccaaaggcacacaaatccatccgggacatggattttagtcttgactcagagttcttagctacaacatcaactgatggatcagctagaatatggaaagcagaagatggttttcctttgtctactttggaacgtagtggggatgaaaatattgaactgtgccgtttctctaaagacggaacaaaaccttttttgttttgtgctgctcaaagaggtgatacgcctatggtcaatgtttatgacattagtacatggaagaagcttgggttcaagaagctgtcaaggaagactgcatcgacaatggcagtgagcttggacgggaaatatattgctttgggtgggaaagatggagatgtatctgttgctgaagttaagacaatggaaatctaccactacagtaagaggctgcatcttggtcaatccattgcttcacttgagttctgccccagtgaaagggttatgctgacaacttctagcgaatggggagagatggtgaccaaactcactgtaccaaaggagtggaaagagtggcagatatatgcactgctgttttgcttgttcatggcatcagtgatagctgcatacgtattcttcgagaactcagattcgttttggaagttaccaatgggaaaagatcaaaaaagaccaaagattagtctatttggaggttcctcctccacgccttctgaggatcatagtaggtggaacttggacctatagaaagattatgtaactttcctctgctttttcttctttcttccttatcttgttgcagcgtttttttttgtttttttcctttcttctgattttgctctgacaaatacctgttgattaattgatttatttacagacaattactgttgc

SEQ ID NO: 5811 - protein, 398 aa, Arabidopsis thaliana
MEIEEASRESGHVVCGSWIRRPKKVNWVLIAKASKRRGSSVSSPALLNIFSFDPITASLSSSPLATHTLKDSDGDPVAVSVHPGGDYFVCSTSKGGCKLFELVGGATGITILAKELLPLQNAGLQKCMAFSFDGSKLAVGGVDGCLRIMEWPNLSVILDEPKAHKSIRDMDFSLDSEFLATTSTDGSARIWKAEDGFPLSTLERSGDENIELCRFSKDGTKPFLFCAAQRGDTPMVNVYDISTWKKLGFKKLSRKTASTMAVSLDGKYIALGGKDGDVSVAEVKTMEIYHYSKRLHLGQSIASLEFCPSERVMLTTSSEWGEMVTKLTVPKEWKEWQIYALLFCLFMASVIAAYVFFENSDSFWKLPMGKDQKRPKISLFGGSSSTPSEDHSRWNLDL

SEQ ID NO: 5812 - protein, 271 aa, Arabidopsis thaliana
MAFSFDGSKLAVGGVDGCLRIMEWPNLSVILDEPKAHKSIRDMDFSLDSEFLATTSTDGSARIWKAEDGFPLSTLERSGDENIELCRFSKDGTKPFLFCAAQRGDTPMVNVYDISTWKKLGFKKLSRKTASTMAVSLDGKYIALGGKDGDVSVAEVKTMEIYHYSKRLHLGQSIASLEFCPSERVMLTTSSEWGEMVTKLTVPKEWKEWQIYALLFCLFMASVIAAYVFFENSDSFWKLPMGKDQKRPKISLFGGSSSTPSEDHSRWNLDL

SEQ ID NO: 5813 - protein, 250 aa, Arabidopsis thaliana
MEWPNLSVILDEPKAHKSIRDMDFSLDSEFLATTSTDGSARIWKAEDGFPLSTLERSGDENIELCRFSKDGTKPFLFCAAQRGDTPMVNVYDISTWKKLGFKKLSRKTASTMAVSLDGKYIALGGKDGDVSVAEVKTMEIYHYSKRLHLGQSIASLEFCPSERVMLTTSSEWGEMVTKLTVPKEWKEWQIYALLFCLFMASVIAAYVFFENSDSFWKLPMGKDQKRPKISLFGGSSSTPSEDHSRWNLDL

SEQ ID NO: 5814 - DNA, 1404 bp, Arabidopsis thaliana
gggatcgtaagaacagaggatttttctcggccaagttttctctggctcaggttaaaattcgatttgtgagatctgttagttagattgtacatgacggtgcgaatttattgaatctgtttaaatctattgaacgtgaaacgcatttgagtattgtgaggctgaggaaatttctgaaagtggttttgggacgatgatgctggtgttgcggagtttgccataatcagatctgtatgtatgtgggtttcttgataaaagttgtatgaggaaggcattggagatttgtgttgaagaattgatgtatgggagtatgaaggaggtaatgttgttggtgtgtgtggttgatgttggcaggtgtttgatgtgaattttttgagggaggggaatgagttcaatgagcagaagcagaagtcgaagtagaagtcgtagtcgggatcggtttcgtagtcggagtccgagagacaggagaatgagatctgaacgagtttcttaccatgatgctccttctagaagggagagggagccacgtcgtgccttcagccaaggaaatctctgcaacaactgcaagcgacctggtcactttgcaagagactgttctaatgtttccgtctgtaacaactgtggtcttccagggcacattgcagcagaatgcactgcggaatcacgttgttggaactgtagagaaccgggccacgtagcctcaaactgttcaaacgaaggaatctgccactcctgtggtaaatctggacatcgagccagagactgctctaattcggattctcgtgcaggagacttaaggctctgcaacaactgcttcaaacagggacatcttgccgctgactgcacaaatgacaaggcgtgcaagaactgcaggacttcaggtcacatagctcgcgattgcaggaacgatccagtttgtaacatctgcagtatctcggggcatgttgctagacactgcccaaagggtgacagcaattactctgacagaggaagcagggttcgagatggtggtatgcaaagaggtggtttgagcagaatgagcagagacagagaaggcgttagtgctatgataatatgtcacaattgtggtggccgaggacacagggcgtacgagtgtccgtctgctcgagtcgctgaccgtggattccgccggtactgaggctcttaaatttaccaattgaagttccattcatcttcacctttacccttttagcttctgcactcttgtttttgttgagctacattgttgttttctaatctcatggtttttgtctattggagtgaatcaaggatggttttagttttggtttgttttcggaaaatttgagacattgcttgtgttgtatgaagtattgaacagattagtgtgatgcagagttctgagttttcagaactcaatattatatt

SEQ ID NO: 5815 - protein, 257 aa, Arabidopsis thaliana
MSSMSRSRSRSRSRSRDRFRSRSPRDRRMRSERVSYHDAPSRREREPRRAFSQGNLCNNCKRPGHFARDCSNVSVCNNCGLPGHIAAECTAESRCWNCREPGHVASNCSNEGICHSCGKSGHRARDCSNSDSRAGDLRLCNNCFKQGHLAADCTNDKACKNCRTSGHIARDCRNDPVCNICSISGHVARHCPKGDSNYSDRGSRVRDGGMQRGGLSRMSRDREGVSAMIICHNCGGRGHRAYECPSARVADRGFRRY

SEQ ID NO: 5816 - protein, 254 aa, Arabidopsis thaliana
MSRSRSRSRSRSRDRFRSRSPRDRRMRSERVSYHDAPSRREREPRRAFSQGNLCNNCKRPGHFARDCSNVSVCNNCGLPGHIAAECTAESRCWNCREPGHVASNCSNEGICHSCGKSGHRARDCSNSDSRAGDLRLCNNCFKQGHLAADCTNDKACKNCRTSGHIARDCRNDPVCNICSISGHVARHCPKGDSNYSDRGSRVRDGGMQRGGLSRMSRDREGVSAMIICHNCGGRGHRAYECPSARVADRGFRRY

SEQ ID NO: 5817 - protein, 229 aa, Arabidopsis thaliana
MRSERVSYHDAPSRREREPRRAFSQGNLCNNCKRPGHFARDCSNVSVCNNCGLPGHIAAECTAESRCWNCREPGHVASNCSNEGICHSCGKSGHRARDCSNSDSRAGDLRLCNNCFKQGHLAADCTNDKACKNCRTSGHIARDCRNDPVCNICSISGHVARHCPKGDSNYSDRGSRVRDGGMQRGGLSRMSRDREGVSAMIICHNCGGRGHRAYECPSARVADRGFRRY

SEQ ID NO: 5818 - DNA, 1263 bp, Arabidopsis thaliana
aagtctttgcctcaaaatcaataatatctctctcttcatcatcattgtgtttcctcctgatttttattcctcatcttcacaatattggtgtcttgtgagatcaagactgtgaaatttgagattcaagatttgtgttctttttttttttgttagtgttgaggatgagagaagaagattccaattggtttgctaaatgggaagaagagcttccgtcgccggaggaactcatacctttatctcaatctttaatcacgcctgatctcgccatcgccttcgatctccaccgtaacaacaactcaaactccggtcaacctctacctcaaaccacaccgccacaacccaattcctcagccgaaatcgccggagactctaccggagacgaaccagcaagaacgctaaaacgaccgcgtttagtatggacgccacagctacacaaacgtttcgtagacgcggtggctcatctcgggataaaaaacgcggttcctaaaaccatcatgcagcttatgagcgttgatggtttaacaagagaaaacgtcgctagccatttgcaaaaatacagactttacctcaaaagaatgaaatccggcggcggaggaggcggcagcggtgattccgatcatctctttgccagctcacctgttcctccacatttcctccatccgacaagtagacagagctccgaccttttcataccctcttttgtcccaatttcaactcagcagcaacatatcgcagcaccaccgtctcagttcctccaccgacaaatctccgccgttaatttcacttcaccgaccaaagcgaccgaccaagcaatgttcttggctaggcagcagagtgaactacagcaaccagttttcaaaccatcttcattgcatttacatagtcaagtcgctaattacacgcaagatttgaaatcaggagccaaaacggtcttgactctgtttccaactcgagacgattgaatttttattaaacgtcaacaatccgagttctgctttttttttctggtcttgctgttgtgactagatctttaatgtttctaatgtttccacgatcttgaggaacatttggtctccttaaagattgagttttactctgtaatgaaatgcataaaaagaagtgatctttcacttgttgtctagatttgattacacaactactttattgttttttttttttttctattcttgtgggttcagatttgttcttaaaagttgtttgtaactttgcattgaaaatatcataaagcatttgcaggtactg

SEQ ID NO: 5819 - protein, 266 aa, Arabidopsis thaliana
MREEDSNWFAKWEEELPSPEELIPLSQSLITPDLAIAFDLHRNNNSNSGQPLPQTTPPQPNSSAEIAGDSTGDEPARTLKRPRLVWTPQLHKRFVDAVAHLGIKNAVPKTIMQLMSVDGLTRENVASHLQKYRLYLKRMKSGGGGGGSGDSDHLFASSPVPPHFLHPTSRQSSDLFIPSFVPISTQQQHIAAPPSQFLHRQISAVNFTSPTKATDQAMFLARQQSELQQPVFKPSSLHLHSQVANYTQDLKSGAKTVLTLFPTRDD

SEQ ID NO: 5820 - protein, 155 aa, Arabidopsis thaliana
MQLMSVDGLTRENVASHLQKYRLYLKRMKSGGGGGGSGDSDHLFASSPVPPHFLHPTSRQSSDLFIPSFVPISTQQQHIAAPPSQFLHRQISAVNFTSPTKATDQAMFLARQQSELQQPVFKPSSLHLHSQVANYTQDLKSGAKTVLTLFPTRDD

SEQ ID NO: 5821 - protein, 152 aa, Arabidopsis thaliana
MSVDGLTRENVASHLQKYRLYLKRMKSGGGGGGSGDSDHLFASSPVPPHFLHPTSRQSSDLFIPSFVPISTQQQHIAAPPSQFLHRQISAVNFTSPTKATDQAMFLARQQSELQQPVFKPSSLHLHSQVANYTQDLKSGAKTVLTLFPTRDD

SEQ ID NO: 5822 - DNA, 1894 bp, Arabidopsis thaliana
ggggaatgtgacaaagcaatctgggttgtctgattatttccaatgacttccttctctgtctgattcgtttgtttcggcgattcaactcttcttcaacgccctgagagtcacgcacgagaattggattgatggtttttcacacgcaggagaggcgattcgttgtcttcttcttgtcccgttgacctgtttcgatctcagatggtgattatgcagcagctgattctaaattagggcatttaaatccgccttccaggtgaatttttgaaaagtaattaaagggtgttcttgaatggacttgaaaatggataatgttattgggggaaagtttaaacttggtcggaagatcggtggtggctcttttggagaactttttcttgccgtaagtttgcaaaccggagaggaagcagctgttaagctggagcctgcgaaaactaagcatccccaacttcattatgagtcgaagatatacatgcttctacaaggaggaagtggcatccccagccttaagtggtttggggttcagggagactacaatgcgatggtcattgatctgcttgggccgagtttggaagacttgttcaactactgcaataggaggcttactttgaaggcagttttgatgcttgcagatcaactgattagcagagttgaatatatgcattcaagggggtttcttcaccgtgacatcaaacctgacaatttcttgatgggacttggtcgcaaagcaaaccaggtgtatatcattgattttgggcttgcaaagaagtatagggatctccaaacacataggcatatcccctatagagaaaacaagaaccttacgggcacagctcggtatgctagtgtcaacactcacctaggagttgagcaaagtaggagggatgatctggagtctcttggttacgtactcatgtatttcctgagaggaagcttaccgtggcagggactaaaagctggcacaaagaagcaaaagtatgacagaattagcgagaagaaagtatcaactcctatagaggtcttgtgcaagtcatatccacccgaattcgtatcatactttcaatactgcagatctctgcgattcgaagacaaaccagactactcatatctaaagagacttttccgagacttgtttatccgtgaaggttatcagtttgattatgtattcgactggactgcattgaaacaccctcagagtagtgccaggtcccattccagtacacatgaaaggcatcgtaccggtaaaccagggatgggtgcgggaccgtctgctgaaaaacctgaaaggatttcagtagggaacatccgcgataaattctcaggtgcggtcgaagcatttgcgagaaggaacgttagaggacccagtccccatcaaaaccataccagacatcgaactcttgacgaaattccttcaatgaaacctgctgtgaatatggtatctgagaaaggaagaaacacttccagatacggcagtgcttcgaggagagcagtagcctcaggaagtagaccaagctcatcaggtgaacaaagggagagccgggactcgagccgcgtagcctcaagcggtggcggtgtccgaccatcagtcttccaaagaacccaagcagcagctgctgtgagtggatacgagtcaaagacagcatctgcctttaaccgcgaccgagtagccgcttcaagaacagcacgagacgaggctctcagaagcttcgagcttctttcgatccgcaaatgaagccttcatcaattggctctttgctgtaaattggattcttctttacatatgttgtttggtcctttgtttccacgaaactcccaatttttcatgtattatcaaattctctggattttgtatcaatttttacacactttattgtaatcatgacaatttgttgagttt

SEQ ID NO: 5823 - protein, 479 aa, Arabidopsis thaliana
MDLKMDNVIGGKFKLGRKIGGGSFGELFLAVSLQTGEEAAVKLEPAKTKHPQLHYESKIYMLLQGGSGIPSLKWFGVQGDYNAMVIDLLGPSLEDLFNYCNRRLTLKAVLMLADQLISRVEYMHSRGFLHRDIKPDNFLMGLGRKANQVYIIDFGLAKKYRDLQTHRHIPYRENKNLTGTARYASVNTHLGVEQSRRDDLESLGYVLMYFLRGSLPWQGLKAGTKKQKYDRISEKKVSTPIEVLCKSYPPEFVSYFQYCRSLRFEDKPDYSYLKRLFRDLFIREGYQFDYVFDWTALKHPQSSARSHSSTHERHRTGKPGMGAGPSAEKPERISVGNIRDKFSGAVEAFARRNVRGPSPHQNHTRHRTLDEIPSMKPAVNMVSEKGRNTSRYGSASRRAVASGSRPSSSGEQRESRDSSRVASSGGGVRPSVFQRTQAAAAVSGYESKTASAFNRDRVAASRTARDEALRSFELLSIRK

SEQ ID NO: 5824 - protein, 475 aa, Arabidopsis thaliana
MDNVIGGKFKLGRKIGGGSFGELFLAVSLQTGEEAAVKLEPAKTKHPQLHYESKIYMLLQGGSGIPSLKWFGVQGDYNAMVIDLLGPSLEDLFNYCNRRLTLKAVLMLADQLISRVEYMHSRGFLHRDIKPDNFLMGLGRKANQVYIIDFGLAKKYRDLQTHRHIPYRENKNLTGTARYASVNTHLGVEQSRRDDLESLGYVLMYFLRGSLPWQGLKAGTKKQKYDRISEKKVSTPIEVLCKSYPPEFVSYFQYCRSLRFEDKPDYSYLKRLFRDLFIREGYQFDYVFDWTALKHPQSSARSHSSTHERHRTGKPGMGAGPSAEKPERISVGNIRDKFSGAVEAFARRNVRGPSPHQNHTRHRTLDEIPSMKPAVNMVSEKGRNTSRYGSASRRAVASGSRPSSSGEQRESRDSSRVASSGGGVRPSVFQRTQAAAAVSGYESKTASAFNRDRVAASRTARDEALRSFELLSIRK

SEQ ID NO: 5825 - protein, 419 aa, Arabidopsis thaliana
MLLQGGSGIPSLKWFGVQGDYNAMVIDLLGPSLEDLFNYCNRRLTLKAVLMLADQLISRVEYMHSRGFLHRDIKPDNFLMGLGRKANQVYIIDFGLAKKYRDLQTHRHIPYRENKNLTGTARYASVNTHLGVEQSRRDDLESLGYVLMYFLRGSLPWQGLKAGTKKQKYDRISEKKVSTPIEVLCKSYPPEFVSYFQYCRSLRFEDKPDYSYLKRLFRDLFIREGYQFDYVFDWTALKHPQSSARSHSSTHERHRTGKPGMGAGPSAEKPERISVGNIRDKFSGAVEAFARRNVRGPSPHQNHTRHRTLDEIPSMKPAVNMVSEKGRNTSRYGSASRRAVASGSRPSSSGEQRESRDSSRVASSGGGVRPSVFQRTQAAAAVSGYESKTASAFNRDRVAASRTARDEALRSFELLSIRK

SEQ ID NO: 5826 - DNA, 1658 bp, Arabidopsis thaliana
acacagggacgatcggaaaccgaacatccattggagtgctgcctcacaaaaacccgaagaactcaagttaagagatccagccatggataagagctccctcgtctctgatttcctctcctttctcaatgcttctcccaccgcttttcatgccgtcgacgagtcaaagagacggcttttgaaggctgggtatgaacagatttcagagagagatgattggaaactcgaagccggcaaaaaatacttcttcaccagaaattactccactattgttgcttttgccattggtcacaaatacgtagctggaaacgggttccatattattggagctcatactgatagtccgtgcctcaaattgaaacctgtatccaagataactaaaggtggatgcttggaggttggtgttcaaacatatggaggtggactgtggtacacctggtttgatcgtgacttgactgttgcaggacgtgtgattcttaaagaagagaaagcaggttctgtctcgtattctcatcgccttgtcaggattgaggatcctatcatgaggattcctaccttggccattcacttggacaggaatgtgaacactgaaggttttaagccaaacactcagacacacctcgttccagtactggcaacagctattaaggcggagctcaataaaacgccagctgaaagtggtgaacatgacgaaggaaagaagtgtgctgaaactagttctaaatcaaagcatcatccgcttctaatggagatcattgcaaacgcactgggttgtaaacctgaggagatatgcgactttgagctgcaagcatgtgacactcagccaagtatactagctggtgcagctaaagaatttattttctcgggaagactagataatctctgcatgtcattttgctctctgaaggcacttatagatgcaacgtcatctggaagtgacttagaggatgaaagcggaataagaatggtggcactatttgatcatgaagaagttggctccaattcagcgcaaggagctggatcccctgtcatgattgatgctatgtcacacatcacaagttgcttcagctctgacactaaggtgctcaaaaaagcgattcagaaaagtttgcttgtctctgctgacatggcacatgctttacatccaaactttatggacaaacacgaagagaatcatcagccaaagatgcacggaggacttgtcatcaaacacaatgcaaatcaacgttacgccactaatgccgtaacttcctttgtattcagagagatagcagagaagcataatctgcctgttcaggattttgtggtgcgtaatgatatgggttgcggatcgaccattggtccaatcctagcaagcagtgtggggataaggacggttgatgttggagctcctcagctctcaatgcatagcatccgtgagatgtgtgctgcagatgacgtgaagcattcatatgaacactttaaagctttcttccaagagttcactcaccttgacgccaaactcactatcgacgtttgagagattcttaaatcttactgctgtttaagttggaactgaaaagatcctttgttaggaaaaactacattaataaaaggatttatagccatgttatgtgttgcctgcggttaccatcaattcaccctcccgaatattcatcaac

SEQ ID NO: 5827 - protein, 504 aa, Arabidopsis thaliana
HRDDRKPNIHWSAASQKPEELKLRDPAMDKSSLVSDFLSFLNASPTAFHAVDESKRRLLKAGYEQISERDDWKLEAGKKYFFTRNYSTIVAFAIGHKYVAGNGFHIIGAHTDSPCLKLKPVSKITKGGCLEVGVQTYGGGLWYTWFDRDLTVAGRVILKEEKAGSVSYSHRLVRIEDPIMRIPTLAIHLDRNVNTEGFKPNTQTHLVPVLATAIKAELNKTPAESGEHDEGKKCAETSSKSKHHPLLMEIIANALGCKPEEICDFELQACDTQPSILAGAAKEFIFSGRLDNLCMSFCSLKALIDATSSGSDLEDESGIRMVALFDHEEVGSNSAQGAGSPVMIDAMSHITSCFSSDTKVLKKAIQKSLLVSADMAHALHPNFMDKHEENHQPKMHGGLVIKHNANQRYATNAVTSFVFREIAEKHNLPVQDFVVRNDMGCGSTIGPILASSVGIRTVDVGAPQLSMHSIREMCAADDVKHSYEHFKAFFQEFTHLDAKLTIDV

SEQ ID NO: 5828 - protein, 477 aa, Arabidopsis thaliana
MDKSSLVSDFLSFLNASPTAFHAVDESKRRLLKAGYEQISERDDWKLEAGKKYFFTRNYSTIVAFAIGHKYVAGNGFHIIGAHTDSPCLKLKPVSKITKGGCLEVGVQTYGGGLWYTWFDRDLTVAGRVILKEEKAGSVSYSHRLVRIEDPIMRIPTLAIHLDRNVNTEGFKPNTQTHLVPVLATAIKAELNKTPAESGEHDEGKKCAETSSKSKHHPLLMEIIANALGCKPEEICDFELQACDTQPSILAGAAKEFIFSGRLDNLCMSFCSLKALIDATSSGSDLEDESGIRMVALFDHEEVGSNSAQGAGSPVMIDAMSHITSCFSSDTKVLKKAIQKSLLVSADMAHALHPNFMDKHEENHQPKMHGGLVIKHNANQRYATNAVTSFVFREIAEKHNLPVQDFVVRNDMGCGSTIGPILASSVGIRTVDVGAPQLSMHSIREMCAADDVKHSYEHFKAFFQEFTHLDAKLTIDV

SEQ ID NO: 5829 - protein, 325 aa, Arabidopsis thaliana
MRIPTLAIHLDRNVNTEGFKPNTQTHLVPVLATAIKAELNKTPAESGEHDEGKKCAETSSKSKHHPLLMEIIANALGCKPEEICDFELQACDTQPSILAGAAKEFIFSGRLDNLCMSFCSLKALIDATSSGSDLEDESGIRMVALFDHEEVGSNSAQGAGSPVMIDAMSHITSCFSSDTKVLKKAIQKSLLVSADMAHALHPNFMDKHEENHQPKMHGGLVIKHNANQRYATNAVTSFVFREIAEKHNLPVQDFVVRNDMGCGSTIGPILASSVGIRTVDVGAPQLSMHSIREMCAADDVKHSYEHFKAFFQEFTHLDAKLTIDV

SEQ ID NO: 5830 - DNA, 1208 bp, Arabidopsis thaliana
atcatagtttctatctccgatgacacaaaacgaggaagattatttgacattttaagtaagaacagctagctttgccatctccctaaaggcaataaatctcggatccactttcacgatattttgatattttttctatttataatctttctgggttttgagtcttttgaaggctgaattgctctgaaatctcaattgtataatcatctcctgggtcgtcgttatcgtgatcatctagaagaaagcatgactacactagatttgaccagagccgagcttgctcttattgttctctatttgaacaaagctgaggctagagataagatatgcagagctatccaatatggttccaaatttttgagcggtggccaacctggtactgctcaaactgtcgacaaaaacaccagcttggcgagaaaagttttccgtcttttcaagtttgtcaatgattttcacggtcttatcagccccgtgcctaaagggactccacttcctcttgtcttactcgggaagtcgaagaatgcgctcttgtctacctttttgtttcttgatcaaatcgtctggcttggtagatccggcatatacaagaacaaagaacgaactgaattgcttggacgtatatcacttttctgctggctgggatcatccgtttgtacaagtgcagtcgagattggtgagcttggaaggctctcttcatctatgaagaagatggaaaaggaactcaaagctgatgatgagctgtatcgtgctaagcttcagaaatcaaacgacagaactctagctttgattaaatcaagcatggacattattgtagccattggtctccttcagttagctccaaagacgattagtcctcgtgtcactggtgctttcgggtttaccacctcacttatctcttgttatcagttgcttccatcgcgccccaagttgaagacaccttgaagaaggaataagcttgttctctagactttcagaataattgtttcatattcatcagtaaacctattgtgttcaggtattctaaggagtctatgttcctcctttgaatgaatttgctgctcttataacgcgtttgcaagaataatgataagttttagaataagattattatgatacatcttcaagattttttgattagaaatttgtgtttgtttctcattttgaacaagactctgttcctacatagtagagaggaaatcatttgatgttcg

SEQ ID NO: 5831 - protein, 231 aa, Arabidopsis thaliana
MTTLDLTRAELALIVLYLNKAEARDKICRAIQYGSKFLSGGQPGTAQTVDKNTSLARKVFRLFKFVNDFHGLISPVPKGTPLPLVLLGKSKNALLSTFLFLDQIVWLGRSGIYKNKERTELLGRISLFCWLGSSVCTSAVEIGELGRLSSSMKKMEKELKADDELYRAKLQKSNDRTLALIKSSMDIIVAIGLLQLAPKTISPRVTGAFGFTTSLISCYQLLPSRPKLKTP

SEQ ID NO: 5832 - DNA, 3271 bp, Arabidopsis thaliana
ctcttctctatcacgccacaaacgcagattcatcacatcttcttcttgttcatagcatctcctcactattgggctctcttcaaaggtgtatttctggggttacttattccttctttgtattgattagtgttgaaaaggtgtctctgttgcgttcaagagctagctttagggctatatattaagaggtttccagaggttttttttggattataggcatctgtgtttggcttacatggatcctttttttaaggttttctgggcaagactaattgattaggaccaaagtttgtgtttttatttgtttggatctacaaagatcaattaggctgttgttgaattggatcgagtgatggaagctagaattgatgaaggtggggaggctcaacaattctatgggtccgtaggtaaaagaagtgtggagtgggatttgaatgattggaaatgggatggtgatctctttctcgccacccaaactactaggggacgtcagtttttccctctaggaaactcgtccaatagctcctcctcctgctctgatgaaggcaatgacaagaagaggagagctgttgccattcaaggagacactaatggtgctcttactttgaatcttaatggtgaaagtgatggcctttttcctgccaagaagaccaaatccggagccgtttgtcaggtcgaaaactgtgaagctgatcttagtaaagttaaggattatcatagacgccataaggtctgtgagatgcattccaaggctactagtgccactgtcgaaggtatcttgcagcgcttttgtcagcaatgtagtaggttccatcttcttcaggagtttgatgaaggaaagagaagttgtcgtagacgtttggctggccataataaacgtcggaggaaaacaaatcccgaacctggcgctaacgggaatcctagtgatgatcactcaagcaactatctcttgattactctcttgaagatactctccaatatgcataaccataccggtgatcaagatttgatgtctcatcttctgaagagcctcgtaagccatgctggcgaacagttagggaaaaacttagttgaacttcttctacaaggaggaggatctcaaggttccttaaatattggaaactcggctttgcttgggattgagcaagctcctcaagaggagttaaagcaattttcggctcggcaagatgggacagctaccgagaacagatcagaaaaacaagtcaaaatgaatgattttgatttgaatgatatctatatagactcagatgacacagacgtcgaaagatctcctcctccaacgaatccagcgaccagttctcttgattatccttcatggatacatcagtctagtccgcctcagacaagtaggaattcagattcagcatctgaccagtcaccctcaagttctagtgaagatgctcagatgcgcacaggccggattgtgttcaaactatttgggaaagagccaaatgaatttcctattgtcttacgaggacagattcttgactggttatcgcatagtccaactgacatggagagctacataagacctggctgtatcgtattgaccatctatcttcgtcaagctgaaactgcttgggaagaactttcagacgatctgggttttagcttagggaagcttctagatctctccgatgatcccttgtggacaactggatggatttatgttagggtgcagaaccaacttgcatttgtatataacggtcaggttgtcgttgacacttcattgtctctaaaaagtcgtgattatagtcacatcattagcgttaaaccgcttgctatagctgcaacggagaaggctcaatttacagttaaaggcatgaatctccgtcggcgtggcacaaggttactttgttctgttgaaggaaaatacttgattcaggaaacaacacacgattcgacgaccagggaggatgacgatttcaaggacaacagtgagattgttgagtgtgtaaacttctcttgtgatatgcctatattgagtggtcgaggattcatggagattgaagaccaaggactcagtagcagcttcttccctttcttagtggttgaagatgacgatgtttgttctgaaatccgtatacttgaaaccacattagagttcactggaactgattctgctaagcaagctatggatttcatacatgaaatcggttggcttcttcacagaagtaaacttggggaatcagacccaaatccaggcgttttcccattaatacgcttccagtggctaatcgagttctcaatggatcgagagtggtgcgctgtgatcagaaagctattaaacatgttctttgatggagctgttggtgaattttcttcctcctctaatgccacactgtcagaactgtgccttcttcacagagccgtgaggaaaaactctaagcctatggttgaaatgctcttgagatatattcccaagcaacaaagaaacagcttgtttagacccgatgctgctggtccagccggcttaacacctcttcatattgcagctggtaaagacggttcagaagatgtgttggatgcgctaacagaagatcctgcaatggtggggattgaagcgtggaagacatgtcgagacagcacaggcttcacaccagaagactacgcacgcttacgcggtcacttctcatacatccacttgattcaacgcaagatcaataaaaagtcaacaactgaagatcatgttgtggtcaacatcccagtttctttctcagacagagagcagaaagaaccaaaatcaggtccgatggcttcagccttggagatcacacagattccatgcaagctctgtgaccataaactggtgtatgggacaacacgcaggtctgtagcgtacagaccagctatgttgtcaatggtggcgattgctgcggtttgcgtctgtgtggcacttctgtttaagagttgcccggaagtgctctatgtgtttcaaccgttcaggtgggagttattggactatggaacaagctgagtgtaagtctactttgaaagatcttctaagatatatatatgaatgttacttatataaaacccatagaggtgtgatttctatatgtaactatatgagtataagatatagagacatgttggagaagaagattgttgttattattgttgttgttgttgttgtgtaaaagcctctcctatctctctcgaacctaaggattctctctctgattagtatattttttgtttgacagaataatttgttacttatattgtaatttaacaatggagttgttcttgt

SEQ ID NO: 5833 - protein, 881 aa, Arabidopsis thaliana
MEARIDEGGEAQQFYGSVGKRSVEWDLNDWKWDGDLFLATQTTRGRQFFPLGNSSNSSSSCSDEGNDKKRRAVAIQGDTNGALTLNLNGESDGLFPAKKTKSGAVCQVENCEADLSKVKDYHRRHKVCEMHSKATSATVEGILQRFCQQCSRFHLLQEFDEGKRSCRRRLAGHNKRRRKTNPEPGANGNPSDDHSSNYLLITLLKILSNMHNHTGDQDLMSHLLKSLVSHAGEQLGKNLVELLLQGGGSQGSLNIGNSALLGIEQAPQEELKQFSARQDGTATENRSEKQVKMNDFDLNDIYIDSDDTDVERSPPPTNPATSSLDYPSWIHQSSPPQTSRNSDSASDQSPSSSSEDAQMRTGRIVFKLFGKEPNEFPIVLRGQILDWLSHSPTDMESYIRPGCIVLTIYLRQAETAWEELSDDLGFSLGKLLDLSDDPLWTTGWIYVRVQNQLAFVYNGQVVVDTSLSLKSRDYSHIISVKPLAIAATEKAQFTVKGMNLRRRGTRLLCSVEGKYLIQETTHDSTTREDDDFKDNSEIVECVNFSCDMPILSGRGFMEIEDQGLSSSFFPFLVVEDDDVCSEIRILETTLEFTGTDSAKQAMDFIHEIGWLLHRSKLGESDPNPGVFPLIRFQWLIEFSMDREWCAVIRKLLNMFFDGAVGEFSSSSNATLSELCLLHRAVRKNSKPMVEMLLRYIPKQQRNSLFRPDAAGPAGLTPLHIAAGKDGSEDVLDALTEDPAMVGIEAWKTCRDSTGFTPEDYARLRGHFSYIHLIQRKINKKSTTEDHVVVNIPVSFSDREQKEPKSGPMASALEITQIPCKLCDHKLVYGTTRRSVAYRPAMLSMVAIAAVCVCVALLFKSCPEVLYVFQPFRWELLDYGTS

SEQ ID NO: 5834 - protein, 752 aa, Arabidopsis thaliana
MHSKATSATVEGILQRFCQQCSRFHLLQEFDEGKRSCRRRLAGHNKRRRKTNPEPGANGNPSDDHSSNYLLITLLKILSNMHNHTGDQDLMSHLLKSLVSHAGEQLGKNLVELLLQGGGSQGSLNIGNSALLGIEQAPQEELKQFSARQDGTATENRSEKQVKMNDFDLNDIYIDSDDTDVERSPPPTNPATSSLDYPSWIHQSSPPQTSRNSDSASDQSPSSSSEDAQMRTGRIVFKLFGKEPNEFPIVLRGQILDWLSHSPTDMESYIRPGCIVLTIYLRQAETAWEELSDDLGFSLGKLLDLSDDPLWTTGWIYVRVQNQLAFVYNGQVVVDTSLSLKSRDYSHIISVKPLAIAATEKAQFTVKGMNLRRRGTRLLCSVEGKYLIQETTHDSTTREDDDFKDNSEIVECVNFSCDMPILSGRGFMEIEDQGLSSSFFPFLVVEDDDVCSEIRILETTLEFTGTDSAKQAMDFIHEIGWLLHRSKLGESDPNPGVFPLIRFQWLIEFSMDREWCAVIRKLLNMFFDGAVGEFSSSSNATLSELCLLHRAVRKNSKPMVEMLLRYIPKQQRNSLFRPDAAGPAGLTPLHIAAGKDGSEDVLDALTEDPAMVGIEAWKTCRDSTGFTPEDYARLRGHFSYIHLIQRKINKKSTTEDHVVVNIPVSFSDREQKEPKSGPMASALEITQIPCKLCDHKLVYGTTRRSVAYRPAMLSMVAIAAVCVCVALLFKSCPEVLYVFQPFRWELLDYGTS

SEQ ID NO: 5835 - protein, 672 aa, Arabidopsis thaliana
MHNHTGDQDLMSHLLKSLVSHAGEQLGKNLVELLLQGGGSQGSLNIGNSALLGIEQAPQEELKQFSARQDGTATENRSEKQVKMNDFDLNDIYIDSDDTDVERSPPPTNPATSSLDYPSWIHQSSPPQTSRNSDSASDQSPSSSSEDAQMRTGRIVFKLFGKEPNEFPIVLRGQILDWLSHSPTDMESYIRPGCIVLTIYLRQAETAWEELSDDLGFSLGKLLDLSDDPLWTTGWIYVRVQNQLAFVYNGQVVVDTSLSLKSRDYSHIISVKPLAIAATEKAQFTVKGMNLRRRGTRLLCSVEGKYLIQETTHDSTTREDDDFKDNSEIVECVNFSCDMPILSGRGFMEIEDQGLSSSFFPFLVVEDDDVCSEIRILETTLEFTGTDSAKQAMDFIHEIGWLLHRSKLGESDPNPGVFPLIRFQWLIEFSMDREWCAVIRKLLNMFFDGAVGEFSSSSNATLSELCLLHRAVRKNSKPMVEMLLRYIPKQQRNSLFRPDAAGPAGLTPLHIAAGKDGSEDVLDALTEDPAMVGIEAWKTCRDSTGFTPEDYARLRGHFSYIHLIQRKINKKSTTEDHVVVNIPVSFSDREQKEPKSGPMASALEITQIPCKLCDHKLVYGTTRRSVAYRPAMLSMVAIAAVCVCVALLFKSCPEVLYVFQPFRWELLDYGTS

SEQ ID NO: 5836 - DNA, 1184 bp, Arabidopsis thaliana
aaaatctcgaaccagattcggacatctcgtcgaaaatggcgtgctcaattggtaacgctttcaggtgttcttctgatacgctgcgttttgctccccgacaacaatgcagcagccgcctaaaccctaatccttcctctttcctctcctttaattcctccccaattctcgcacagaatttgggtgcttcttcttcgtcactttcccgacggactatacgagctagaacaaaaatggctgcgtcggaggcttccattaacgggagcaacaggatgctggtctttgtgccaccacatcctttgatcaaacactggatctctgttctgagaaatgaacaaactccttgtcctgttttcaggaatgcaatagctgaactagggagattactcatgtatgaagcatcacgagagtggctgccaactgttgtgggtgaaataatgtctccaatgggtcctgcttctgttgaattcattgatcctagagagcctattgcggttgttccgatattaagagctggtcttgctcttgcggaacacgcatcctcagttttacctgctaataaaatttatcatttaggagtaagtagagatgagaaaacacttttaccatcggtgtatcttaacaagttgcctgatgaatttcccaagaattcaagagtatttttggtcgacccagtgcttgccacaggtggtaccataatggcggcgatggatctattgaaggaacgtggtttgtctgttcagcaaatcaaagtgatttgtgcgattgctgcacctcctgcactatcgaagcttaacgagaaattccccgggcttcatgtatatgctggaattattgatcctgaagtcaatgaaaaggggtacataatccctgggcttggagacgctggagaccgcagtttcgggacagaaacacattgggtgaagtgatacttgtatgagttgttaaactttaacagtcacaatcgttagattatatattgtgtctcttgtactttgtttttgatgtgtgatttcaggttcttgagagggtttcgataaagagtcaaaagttcacaaacaagaaaaactgaattcctcattattacaaaacagagaacaaacttgtcatccattttatgtgtatcattctcaattgtctaccacaaaccattttgggaaaaagtatgcaagaaaatctgaaaaatt

SEQ ID NO: 5837 - protein, 307 aa, Arabidopsis thaliana
NLEPDSDISSKMACSIGNAFRCSSDTLRFAPRQQCSSRLNPNPSSFLSFNSSPILAQNLGASSSSLSRRTIRARTKMAASEASINGSNRMLVFVPPHPLIKHWISVLRNEQTPCPVFRNAIAELGRLLMYEASREWLPTVVGEIMSPMGPASVEFIDPREPIAVVPILRAGLALAEHASSVLPANKIYHLGVSRDEKTLLPSVYLNKLPDEFPKNSRVFLVDPVLATGGTIMAAMDLLKERGLSVQQIKVICAIAAPPALSKLNEKFPGLHVYAGIIDPEVNEKGYIIPGLGDAGDRSFGTETHWVK

SEQ ID NO: 5838 - protein, 296 aa, Arabidopsis thaliana
MACSIGNAFRCSSDTLRFAPRQQCSSRLNPNPSSFLSFNSSPILAQNLGASSSSLSRRTIRARTKMAASEASINGSNRMLVFVPPHPLIKHWISVLRNEQTPCPVFRNAIAELGRLLMYEASREWLPTVVGEIMSPMGPASVEFIDPREPIAVVPILRAGLALAEHASSVLPANKIYHLGVSRDEKTLLPSVYLNKLPDEFPKNSRVFLVDPVLATGGTIMAAMDLLKERGLSVQQIKVICAIAAPPALSKLNEKFPGLHVYAGIIDPEVNEKGYIIPGLGDAGDRSFGTETHWVK

SEQ ID NO: 5839 - protein, 231 aa, Arabidopsis thaliana
MAASEASINGSNRMLVFVPPHPLIKHWISVLRNEQTPCPVFRNAIAELGRLLMYEASREWLPTVVGEIMSPMGPASVEFIDPREPIAVVPILRAGLALAEHASSVLPANKIYHLGVSRDEKTLLPSVYLNKLPDEFPKNSRVFLVDPVLATGGTIMAAMDLLKERGLSVQQIKVICAIAAPPALSKLNEKFPGLHVYAGIIDPEVNEKGYIIPGLGDAGDRSFGTETHWVK

SEQ ID NO: 5840 - DNA, 1951 bp, Arabidopsis thaliana
gagccctcacttgacagaactcagaaatttgaaagagaaataaaagagagagaagctcccagagaagaaaagccctaaaagccccactcctctttccagtttcttttgatctctcagcatcgaaaatgtctgtgcgtgtactgaatcctaatgctgaggtgctcaacaaatcggccgcgcttcatatgaccatcaacgccgctaagggtttacaagatgtactcaagtcgaatctcggtcctaagggaactatcaagatgcttgttggtggttccggagatatcaagcttaccaaggatggcaacacgcttttgaaggaaatgcaaattcaaaatccaacagccatcatgattgccaggacagctgttgctcaggatgacataagtggtgatggtactacttctactgtcatcttcattggtgagcttatgaaacagtcggagcgttgcatcgatgaaggaatgcatccacgtgtcttagttgatggtttcgagattgcaaaaagagccactctccagtttctcgacactttcaagacacctgtggttatgggtgatgagcctgataaagagattctgaaaatggttgccaggacaacgctaagaactaagctgtatgaaggcttagctgatcaactgactgatattgttgttaattcggttctctgcattcggaagcctcaggaacctattgatctgtttatggttgagattatgcacatgcgccataaatttgatgttgacacacgattggttgaggggcttgttcttgatcatggttcgagacaccctgacatgaagcgacgtgcggagaattgtcacatcctgacttgcaatgtgtcattagagtacgagaagagtgaaattaatgcaggattcttctactcgaatgcggagcagagggaagccatggttactgctgagcgacgttccgttgatgaaagagttcagaaaattattgagctgaagaacaaggtttgtgctggtaatgataacagctttgttatcctaaatcaaaagggtattgatcccccgtcattggatcttcttgctagagaagggataatcgcccttagaagggcaaagaggaggaacatggaacgtttggttttggcatgtggtggagaagctgtgaactctgtcgatgacttgacccctgattgtcttggttgggctggacttgtatatgagcacgttcttggagaggagaagtacacatttgttgagcaagtgaagaatcctcattcatgtactatcctcataaaagggcctaatgaccacactattgctcaaattaaggacgctgtccgtgatggtttaagatcagttaagaataccctagaagatgagtgtgtcgtattaggagctggagcttttgaagttgcagcaagacaacacttaatcaatgaagtcaagaaaaccgttcaagggcgcgctcaactcggtgttgaagcttttgctaatgcccttctcgtagtgcctaagacgcttgctgaaaatgctgggcttgacactcaagacgttatcatttctctaacgagtgagcatgacaaaggaaacatcgtgggactagacctacaggatggagaacccgtcgaccctcagcttgccggcattttcgacaattactcggtgaaacgccaacttatcaattcagggccggtgattgcttcgcagttgctattagtggatgaagtgattcgtgcaggaagaaatatgaggaagcctacttaaaacaagactatcttttgttttcaattttttcttactttccctttcgtgttttgagtattagcatatgaatactatttattttttactcgttatcctttgttgtcttagataattttgaatgtatcttttttttctatcttttgtatcaaacaaacatgatgaatgttttgattgtggtttctagcgaaaacagaacaagataaagatttcagaatttt

SEQ ID NO: 5841 - protein, 535 aa, Arabidopsis thaliana
MSVRVLNPNAEVLNKSAALHMTINAAKGLQDVLKSNLGPKGTIKMLVGGSGDIKLTKDGNTLLKEMQIQNPTAIMIARTAVAQDDISGDGTTSTVIFIGELMKQSERCIDEGMHPRVLVDGFEIAKRATLQFLDTFKTPVVMGDEPDKEILKMVARTTLRTKLYEGLADQLTDIVVNSVLCIRKPQEPIDLFMVEIMHMRHKFDVDTRLVEGLVLDHGSRHPDMKRRAENCHILTCNVSLEYEKSEINAGFFYSNAEQREAMVTAERRSVDERVQKIIELKNKVCAGNDNSFVILNQKGIDPPSLDLLAREGIIALRRAKRRNMERLVLACGGEAVNSVDDLTPDCLGWAGLVYEHVLGEEKYTFVEQVKNPHSCTILIKGPNDHTIAQIKDAVRDGLRSVKNTLEDECVVLGAGAFEVAARQHLINEVKKTVQGRAQLGVEAFANALLVVPKTLAENAGLDTQDVIISLTSEHDKGNIVGLDLQDGEPVDPQLAGIFDNYSVKRQLINSGPVIASQLLLVDEVIRAGRNMRKPT

SEQ ID NO: 5842 - protein, 515 aa, Arabidopsis thaliana
MTINAAKGLQDVLKSNLGPKGTIKMLVGGSGDIKLTKDGNTLLKEMQIQNPTAIMIARTAVAQDDISGDGTTSTVIFIGELMKQSERCIDEGMHPRVLVDGFEIAKRATLQFLDTFKTPVVMGDEPDKEILKMVARTTLRTKLYEGLADQLTDIVVNSVLCIRKPQEPIDLFMVEIMHMRHKFDVDTRLVEGLVLDHGSRHPDMKRRAENCHILTCNVSLEYEKSEINAGFFYSNAEQREAMVTAERRSVDERVQKIIELKNKVCAGNDNSFVILNQKGIDPPSLDLLAREGIIALRRAKRRNMERLVLACGGEAVNSVDDLTPDCLGWAGLVYEHVLGEEKYTFVEQVKNPHSCTILIKGPNDHTIAQIKDAVRDGLRSVKNTLEDECVVLGAGAFEVAARQHLINEVKKTVQGRAQLGVEAFANALLVVPKTLAENAGLDTQDVIISLTSEHDKGNIVGLDLQDGEPVDPQLAGIFDNYSVKRQLINSGPVIASQLLLVDEVIRAGRNMRKPT

SEQ ID NO: 5843 - protein, 491 aa, Arabidopsis thaliana
MLVGGSGDIKLTKDGNTLLKEMQIQNPTAIMIARTAVAQDDISGDGTTSTVIFIGELMKQSERCIDEGMHPRVLVDGFEIAKRATLQFLDTFKTPVVMGDEPDKEILKMVARTTLRTKLYEGLADQLTDIVVNSVLCIRKPQEPIDLFMVEIMHMRHKFDVDTRLVEGLVLDHGSRHPDMKRRAENCHILTCNVSLEYEKSEINAGFFYSNAEQREAMVTAERRSVDERVQKIIELKNKVCAGNDNSFVILNQKGIDPPSLDLLAREGIIALRRAKRRNMERLVLACGGEAVNSVDDLTPDCLGWAGLVYEHVLGEEKYTFVEQVKNPHSCTILIKGPNDHTIAQIKDAVRDGLRSVKNTLEDECVVLGAGAFEVAARQHLINEVKKTVQGRAQLGVEAFANALLVVPKTLAENAGLDTQDVIISLTSEHDKGNIVGLDLQDGEPVDPQLAGIFDNYSVKRQLINSGPVIASQLLLVDEVIRAGRNMRKPT

SEQ ID NO: 5844 - DNA, 1242 bp, Arabidopsis thaliana
acacatatacattcacattactaatctctcaagatttcacaattttcttgtgattttctctcagtttcttatttcgtttcataacatggatgccatgagtagcgtagacgagagctctacaactacagattccattccggcgagaaagtcatcgtctccggcgagtttactatatagaatgggaagcggaacaagcgtggtacttgattcagagaacggtgtcgaagtcgaagtcgaagccgaatcaagaaagcttccttcttcaagattcaaaggtgttgttcctcaaccaaatggaagatggggagctcagatttacgagaaacatcaacgcgtgtggcttggtactttcaacgaggaagacgaagcagctcgtgcttacgacgtcgcggctcaccgtttccgtggccgcgatgccgttactaatttcaaagacacgacgttcgaagaagaggttgagttcttaaacgcgcattcgaaatcagagatcgtagatatgttgagaaaacacacttacaaagaagagttagaccaaaggaaacgtaaccgtgacggtaacggaaaagagacgacggcgtttgctttggcttcgatggtggttatgacggggtttaaaacggcggagttactgtttgagaaaacggtaacgccaagtgacgtcgggaaactaaaccgtttagttataccaaaacaccaagcggagaaacattttccgttaccgttaggtaataataacgtctccgttaaaggtatgctgttgaatttcgaagacgttaacgggaaagtgtggaggttccgttactcttattggaatagtagtcaaagttatgtgttgaccaaaggttggagtagattcgttaaagagaagagactttgtgctggtgatttgatcagttttaaaagatccaacgatcaagatcaaaaattctttatcgggtggaaatcgaaatccgggttggatctagagacgggtcgggttatgagattgtttggggttgatatttctttaaacgccgtcgttgtagtgaaggaaacaacggaggtgttaatgtcgtcgttaaggtgtaagaatcaacgagttttgtaataacaatttaacaacttgggaaagaaaaaaaaagctttttgattttaatttctcttcaacgttaatcttgctgagattatttatgttgtaagttgtaacaagtggaaaaaattaattaggtgtcaaacaaatcttgtgttaatattctttgtatg

SEQ ID NO: 5845 - protein, 361 aa, Arabidopsis thaliana
HIYIHITNLSRFHNFLVIFSQFLISFHNMDAMSSVDESSTTTDSIPARKSSSPASLLYRMGSGTSVVLDSENGVEVEVEAESRKLPSSRFKGVVPQPNGRWGAQIYEKHQRVWLGTFNEEDEAARAYDVAAHRFRGRDAVTNFKDTTFEEEVEFLNAHSKSEIVDMLRKHTYKEELDQRKRNRDGNGKETTAFALASMVVMTGFKTAELLFEKTVTPSDVGKLNRLVIPKHQAEKHFPLPLGNNNVSVKGMLLNFEDVNGKVWRFRYSYWNSSQSYVLTKGWSRFVKEKRLCAGDLISFKRSNDQDQKFFIGWKSKSGLDLETGRVMRLFGVDISLNAVVVVKETTEVLMSSLRCKNQRVL

SEQ ID NO: 5846 - protein, 333 aa, Arabidopsis thaliana
MDAMSSVDESSTTTDSIPARKSSSPASLLYRMGSGTSVVLDSENGVEVEVEAESRKLPSSRFKGVVPQPNGRWGAQIYEKHQRVWLGTFNEEDEAARAYDVAAHRFRGRDAVTNFKDTTFEEEVEFLNAHSKSEIVDMLRKHTYKEELDQRKRNRDGNGKETTAFALASMVVMTGFKTAELLFEKTVTPSDVGKLNRLVIPKHQAEKHFPLPLGNNNVSVKGMLLNFEDVNGKVWRFRYSYWNSSQSYVLTKGWSRFVKEKRLCAGDLISFKRSNDQDQKFFIGWKSKSGLDLETGRVMRLFGVDISLNAVVVVKETTEVLMSSLRCKNQRVL

SEQ ID NO: 5847 - protein, 330 aa, Arabidopsis thaliana
MSSVDESSTTTDSIPARKSSSPASLLYRMGSGTSVVLDSENGVEVEVEAESRKLPSSRFKGVVPQPNGRWGAQIYEKHQRVWLGTFNEEDEAARAYDVAAHRFRGRDAVTNFKDTTFEEEVEFLNAHSKSEIVDMLRKHTYKEELDQRKRNRDGNGKETTAFALASMVVMTGFKTAELLFEKTVTPSDVGKLNRLVIPKHQAEKHFPLPLGNNNVSVKGMLLNFEDVNGKVWRFRYSYWNSSQSYVLTKGWSRFVKEKRLCAGDLISFKRSNDQDQKFFIGWKSKSGLDLETGRVMRLFGVDISLNAVVVVKETTEVLMSSLRCKNQRVL

SEQ ID NO: 5848 - DNA, 1167 bp, Arabidopsis thaliana
attcatcttttagctcttcagcgaatgttcgtctcgtctatttgctctctctcgacgactgttaattaactccggcgattgatcactccgtcttctttgtaacacagccggagaaaaatcgaaagtttcgtttttttcttctccttcgtagctaattcgcggtcgattttataattcggcagccatgagctcggttttgcagggttttacgaagtcacttgctatgacctttgtatcggagattggtgacaagacgtttttcgctgcagcaattttggctatgcgttatcctaggagacttgtgttggctggttgtttatcggctctgattgttatgactatcctctctgctactcttggatgggctgctcctaatctgatctctcgcaaatggactcatcacataacaacattgttgttctttggttttgggctatggtctttgtgggacggtttcaaagaaggaggagggggttcggaagaattggctgaagtcgaagcagaactggatgctgatttgaaggctaatggtaaatctccaaaagacagtagtaagagagaagatgaaaacaaaaagcagaatagggcgttcctcacgcaatttttctctccaatttttctcaaggctttttcgattaatttctttggagaatggggtgacaagagtcagcttgctacaattggtttagctgcagatgaaaatccatttggggtggtccttggtggagttgtggcacagtttttgtgcaccactgctgctgtaattggaggaaagagcttagcgtctcaaatttccgaaagaatagtggctctttctggtggaatgcttttcatcatttttggcatccaatcgtatcttacttctgttgaggcttaatgctttcttatggtttgtagggagactgatgaagaggaagaacgttactatccatagtttattagacatttaattttgtttattagacatttacacaagtgattacaaaacaaatctgagagtttgattgtctacagtgaaaacattgaaatgtgctgaagcagccatccgacttcaataaagtttttttggtaatcagttttaatcctcttttgttttttggagtcatttggattttgaaatgttttgcaaggatttgactcaatgagatacaaaatgtggttttgttt

SEQ ID NO: 5849 - protein, 230 aa, Arabidopsis thaliana
MSSVLQGFTKSLAMTFVSEIGDKTFFAAAILAMRYPRRLVLAGCLSALIVMTILSATLGWAAPNLISRKWTHHITTLLFFGFGLWSLWDGFKEGGGGSEELAEVEAELDADLKANGKSPKDSSKREDENKKQNRAFLTQFFSPIFLKAFSINFFGEWGDKSQLATIGLAADENPFGVVLGGVVAQFLCTTAAVIGGKSLASQISERIVALSGGMLFIIFGIQSYLTSVEA

SEQ ID NO: 5850 - protein, 217 aa, Arabidopsis thaliana
MTFVSEIGDKTFFAAAILAMRYPRRLVLAGCLSALIVMTILSATLGWAAPNLISRKWTHHITTLLFFGFGLWSLWDGFKEGGGGSEELAEVEAELDADLKANGKSPKDSSKREDENKKQNRAFLTQFFSPIFLKAFSINFFGEWGDKSQLATIGLAADENPFGVVLGGVVAQFLCTTAAVIGGKSLASQISERIVALSGGMLFIIFGIQSYLTSVEA

SEQ ID NO: 5851 - protein, 198 aa, Arabidopsis thaliana
MRYPRRLVLAGCLSALIVMTILSATLGWAAPNLISRKWTHHITTLLFFGFGLWSLWDGFKEGGGGSEELAEVEAELDADLKANGKSPKDSSKREDENKKQNRAFLTQFFSPIFLKAFSINFFGEWGDKSQLATIGLAADENPFGVVLGGVVAQFLCTTAAVIGGKSLASQISERIVALSGGMLFIIFGIQSYLTSVEA

SEQ ID NO: 5852 - DNA, 1211 bp, Arabidopsis thaliana
aaaatttcgcaaactaattttttcactttcttcttcgttgatctctctgaaagcttctcttcttcttctcaccatgtctggttatcctccatcaagccaaggttacggttacggcggtaatccaccacctcctcagccaccgtacggatcaaccggcaataaccctcctccgtacggatcatccggcagcaatcctcctcctccgtacggatcatcagcctcctcaccgtacgcagttccctacggagctcagcccgctccttacggtgcaccaccgtcagcaccgtacgcgtctcttccaggagaccataataagccgcacaaagagaaacctcacggcgcctcctacggatctccatctcccggtggctacggtgctcatccatcgtctggaccttccgactacggtggttacggaggagcgccgcagcagtctggacatggaggaggttacggaggagcgccgcagcagtctggacatggaggaggttacggagctcctcctccgcaagcttcttatggaagtccgtttgcgtctctggttccgtcggcgtttcctcccggaacagatccgaacattgtggcttgtttccaagctgcggatcgggacaatagtggattcatcgatgataaggagcttcaaggagctctatcttcgtataatcagagcttcagcataagaactgttcatctccttatgtatctattcaccaacagcaatgtcaggaagattggaccaaaagagtttacttcacttttctttagtcttcagaattggaggtctatctttgagaggtttgataaggacagaagcggtagaatagatacaaacgagctgagagatgcactcatgagccttgggttttctgtttctcctgtgattttggatctgctggtttcaaagtttgacaaaagcggaggcaggaacagggctatcgaatatgacaatttcatcgagtgttgtttgactgtaaaggggctcaccgagaagttcaaggagaaggatacggcgttatcaggctcagctattttcaattacgagaacttcatgctcactgttttaccattcctcgtcgcttgagtgattgttttttttttttttgttgaccaaagagattgttttctaactctattttctttgtgagcttttggatattttatttgttgtctttttatctttctccggtaagattcagacgtgggtcttcttt

SEQ ID NO: 5853 - protein, 359 aa, Arabidopsis thaliana
KFRKLIFSLSSSLISLKASLLLLTMSGYPPSSQGYGYGGNPPPPQPPYGSTGNNPPPYGSSGSNPPPPYGSSASSPYAVPYGAQPAPYGAPPSAPYASLPGDHNKPHKEKPHGASYGSPSPGGYGAHPSSGPSDYGGYGGAPQQSGHGGGYGGAPQQSGHGGGYGAPPPQASYGSPFASLVPSAFPPGTDPNIVACFQAADRDNSGFIDDKELQGALSSYNQSFSIRTVHLLMYLFTNSNVRKIGPKEFTSLFFSLQNWRSIFERFDKDRSGRIDTNELRDALMSLGFSVSPVILDLLVSKFDKSGGRNRAIEYDNFIECCLTVKGLTEKFKEKDTALSGSAIFNYENFMLTVLPFLVA

SEQ ID NO: 5854 - protein, 335 aa, Arabidopsis thaliana
MSGYPPSSQGYGYGGNPPPPQPPYGSTGNNPPPYGSSGSNPPPPYGSSASSPYAVPYGAQPAPYGAPPSAPYASLPGDHNKPHKEKPHGASYGSPSPGGYGAHPSSGPSDYGGYGGAPQQSGHGGGYGGAPQQSGHGGGYGAPPPQASYGSPFASLVPSAFPPGTDPNIVACFQAADRDNSGFIDDKELQGALSSYNQSFSIRTVHLLMYLFTNSNVRKIGPKEFTSLFFSLQNWRSIFERFDKDRSGRIDTNELRDALMSLGFSVSPVILDLLVSKFDKSGGRNRAIEYDNFIECCLTVKGLTEKFKEKDTALSGSAIFNYENFMLTVLPFLVA

SEQ ID NO: 5855 - DNA, 1630 bp, Arabidopsis thaliana
tgggaccaaaatcgtccattgaagtgaacagtcagcatcgttttgcttgcttgtgcgtttctctcgaactctctccatggctgttgcgctccaattcagccgattatgcgttcgaccggatactttcgtgcgggagaatcatctctctggatccggatctctccgccgccggaaagctttatcagtccggtgctcgtctggcgatgagaacgctccttcgccatcggtggtgatggactccgatttcgacgccaaggtgttccgtaagaacttgacgagaagcgataattacaatcgtaaagggttcggtcataaggaggagacactcaagctcatgaatcgagagtacaccagtgatatattggagacactgaaaacaaatgggtatacttattcttggggagatgttactgtgaaactcgctaaagcatatggtttttgctggggtgttgagcgtgctgttcagattgcatatgaagcacgaaagcagtttccagaggagaggctttggattactaacgaaatcattcataacccgaccgtcaataagaggttggaagatatggatgttaaaattattccggttgaggattcaaagaaacagtttgatgtagtagagaaagatgatgtggttatccttcctgcgtttggagctggtgttgacgagatgtatgttcttaatgataaaaaggtgcaaattgttgacacgacttgtccttgggtgacaaaggtctggaacacggttgagaagcacaagaagggggaatacacatcagtaatccatggtaaatataatcatgaagagacgattgcaactgcgtcttttgcaggaaagtacatcattgtaaagaacatgaaagaggcaaattacgtttgtgattacattctcggtggccaatacgatggatctagctccacaaaagaggagttcatggagaaattcaaatacgcaatttcgaagggtttcgatcccgacaatgaccttgtcaaagttggtattgcaaaccaaacaacgatgctaaagggagaaacagaggagataggaagattactcgagacaacaatgatgcgcaagtatggagtggaaaatgtaagcggacatttcatcagcttcaacacaatatgcgacgctactcaagagcgacaagacgcaatctatgagctagtggaagagaagattgacctcatgctagtggttggcggatggaattcaagtaacacctctcaccttcaggaaatctcagaggcacggggaatcccatcttactggatcgatagtgagaaacggataggacctgggaataaaatagcctataagctccactatggagaactggtcgagaaggaaaactttctcccaaagggaccaataacaatcggtgtgacatcaggtgcatcaaccccggataaggtcgtggaagatgctttggtgaaggtgttcgacattaaacgtgaagagttattgcagctggcttgattcggcattgtgatcgtattcaaatactatttgtcatgtcaagagtgtactaaaatatatgtagttgtatgatttgtctttataacttttgtaagaggttttgtaattcaaagtcaacatcctcgttatcttactccacttaatgttcttacc

SEQ ID NO: 5856 - protein, 466 aa, Arabidopsis thaliana
MAVALQFSRLCVRPDTFVRENHLSGSGSLRRRKALSVRCSSGDENAPSPSVVMDSDFDAKVFRKNLTRSDNYNRKGFGHKEETLKLMNREYTSDILETLKTNGYTYSWGDVTVKLAKAYGFCWGVERAVQIAYEARKQFPEERLWITNEIIHNPTVNKRLEDMDVKIIPVEDSKKQFDVVEKDDVVILPAFGAGVDEMYVLNDKKVQIVDTTCPWVTKVWNTVEKHKKGEYTSVIHGKYNHEETIATASFAGKYIIVKNMKEANYVCDYILGGQYDGSSSTKEEFMEKFKYAISKGFDPDNDLVKVGIANQTTMLKGETEEIGRLLETTMMRKYGVENVSGHFISFNTICDATQERQDAIYELVEEKIDLMLVVGGWNSSNTSHLQEISEARGIPSYWIDSEKRIGPGNKIAYKLHYGELVEKENFLPKGPITIGVTSGASTPDKVVEDALVKVFDIKREELLQLA

SEQ ID NO: 5857 - protein, 414 aa, Arabidopsis thaliana
MDSDFDAKVFRKNLTRSDNYNRKGFGHKEETLKLMNREYTSDILETLKTNGYTYSWGDVTVKLAKAYGFCWGVERAVQIAYEARKQFPEERLWITNEIIHNPTVNKRLEDMDVKIIPVEDSKKQFDVVEKDDVVILPAFGAGVDEMYVLNDKKVQIVDTTCPWVTKVWNTVEKHKKGEYTSVIHGKYNHEETIATASFAGKYIIVKNMKEANYVCDYILGGQYDGSSSTKEEFMEKFKYAISKGFDPDNDLVKVGIANQTTMLKGETEEIGRLLETTMMRKYGVENVSGHFISFNTICDATQERQDAIYELVEEKIDLMLVVGGWNSSNTSHLQEISEARGIPSYWIDSEKRIGPGNKIAYKLHYGELVEKENFLPKGPITIGVTSGASTPDKVVEDALVKVFDIKREELLQLA

SEQ ID NO: 5858 - protein, 380 aa, Arabidopsis thaliana
MNREYTSDILETLKTNGYTYSWGDVTVKLAKAYGFCWGVERAVQIAYEARKQFPEERLWITNEIIHNPTVNKRLEDMDVKIIPVEDSKKQFDVVEKDDVVILPAFGAGVDEMYVLNDKKVQIVDTTCPWVTKVWNTVEKHKKGEYTSVIHGKYNHEETIATASFAGKYIIVKNMKEANYVCDYILGGQYDGSSSTKEEFMEKFKYAISKGFDPDNDLVKVGIANQTTMLKGETEEIGRLLETTMMRKYGVENVSGHFISFNTICDATQERQDAIYELVEEKIDLMLVVGGWNSSNTSHLQEISEARGIPSYWIDSEKRIGPGNKIAYKLHYGELVEKENFLPKGPITIGVTSGASTPDKVVEDALVKVFDIKREELLQLA

SEQ ID NO: 5859 - DNA, 1991 bp, Arabidopsis thaliana
aacctctcgtttcgccattatctcttacactgttactctctctctctcttcttcttcttcttcttcttctgcatctcatcgacatcatcctttcccatggctgatgcatacgagccttatcatgttcttcaacaaggccggcgagacaaacttcgtattccatctctcgattcccacttccactttcaccctcctcctcctccttcctccggcggcggaggtggcgtctttcctctcgctgattccgatttcctcgcagccggtggctttcactccaacaacaacaacaaccacatatctaaccctagctacagtaatttcatgggatttctcggtggcccttcttcttcttcatccaccgcagtcgccgtcgccggagatcattcctttaacgccggactttcttccggagacgttcttgtcttcaaacccgagcctctatctctatctttgtcctctcaccctagactcgcttacgatctagtcgttcccggtgttgttaactccggattctgtagatctgccggtgaagccaacgccgccgccgtcaccatcgcgtctagaagctctggtcctctcggacctttcacgggctacgcgtcgattcttaaaggatcaaggttcttgaaaccagcacagatgcttcttgatgagttttgtaatgtgggtcgtgggatttacaccgacaaagtcatcgacgacgatgattcttctctgctttttgatccgacggttgagaatctctgcggtgtttctgatggcggcggaggagataatggaaagaaaaaatcaaaactcatctccatgctcgacgaggtttacaagaggtataagcaatactatgagcagctacaagctgtgatgggatcattcgaatgcgttgcaggtctcgggcacgctgctccgtacgctaacttagccttgaaagcattgtctaagcatttcaagtgtttgaagaatgctataacggaccagcttcaattcagccacaacaacaagatccaacaacaacaacaatgtggtcatccgatgaactctgagaataagactgattctttaagatttggaggaagtgatagttctagaggcttatgttctgctggtcaaagacatggatttcctgatcatcatgctcctgtttggagaccgcaccgtggcctacccgaacgtgctgttactgttctaagggcttggctcttcgatcatttcttgcatccttatccaacagatacagacaaactcatgctggctaagcagacaggtctctccagaaatcaggtatcgaattggttcataaacgcaagagttagggtttggaagccgatggtggaagagattcacatgctggagactcgacaatctcagagatcttcttcttcctcttggagagacgaacgtactagcaccaccgtcttccctgacaacagcaacaacaacccatcttcgtcctcggcacagcaaagacctaacaactcatctccgcctagacgggcacgaaacgacgacgttcatggcacaaacaacaacaacagctatgtaaacagtgggagcggcggcggtagtgcggttggtttctcgtatggaattgggtcgtcgaatgtgccggtgatgaatagcagcacaaacggaggagtgtctttgacgttagggcttcatcatcagattgggttaccggagccttttccgatgacaactgctcagaggtttgggcttgatggtggtagtggcgatggtggtggtgggtatgaagggcaaaatcgtcagtttgggagagattttattggtggtagtaatcatcagtttctacatgattttgtaggttgagattatttgtgtggaaaggaaaaaatatgtttgacgtttgggtatgtataagaagatatgggggaattgaaatgcatatgatgtgtatattagaatgtttcttcttctttttttgttgtttgcttactttcacaaatgttatctttttaagaaatgaaattggattc

SEQ ID NO: 5860 - protein, 607 aa, Arabidopsis thaliana
NLSFRHYLLHCYSLSLFFFFFFFCISSTSSFPMADAYEPYHVLQQGRRDKLRIPSLDSHFHFHPPPPPSSGGGGGVFPLADSDFLAAGGFHSNNNNNHISNPSYSNFMGFLGGPSSSSSTAVAVAGDHSFNAGLSSGDVLVFKPEPLSLSLSSHPRLAYDLVVPGVVNSGFCRSAGEANAAAVTIASRSSGPLGPFTGYASILKGSRFLKPAQMLLDEFCNVGRGIYTDKVIDDDDSSLLFDPTVENLCGVSDGGGGDNGKKKSKLISMLDEVYKRYKQYYEQLQAVMGSFECVAGLGHAAPYANLALKALSKHFKCLKNAITDQLQFSHNNKIQQQQQCGHPMNSENKTDSLRFGGSDSSRGLCSAGQRHGFPDHHAPVWRPHRGLPERAVTVLRAWLFDHFLHPYPTDTDKLMLAKQTGLSRNQVSNWFINARVRVWKPMVEEIHMLETRQSQRSSSSSWRDERTSTTVFPDNSNNNPSSSSAQQRPNNSSPPRRARNDDVHGTNNNNSYVNSGSGGGSAVGFSYGIGSSNVPVMNSSTNGGVSLTLGLHHQIGLPEPFPMTTAQRFGLDGGSGDGGGGYEGQNRQFGRDFIGGSNHQFLHDFVG

SEQ ID NO: 5861 - protein, 575 aa, Arabidopsis thaliana
MADAYEPYHVLQQGRRDKLRIPSLDSHFHFHPPPPPSSGGGGGVFPLADSDFLAAGGFHSNNNNNHISNPSYSNFMGFLGGPSSSSSTAVAVAGDHSFNAGLSSGDVLVFKPEPLSLSLSSHPRLAYDLVVPGVVNSGFCRSAGEANAAAVTIASRSSGPLGPFTGYASILKGSRFLKPAQMLLDEFCNVGRGIYTDKVIDDDDSSLLFDPTVENLCGVSDGGGGDNGKKKSKLISMLDEVYKRYKQYYEQLQAVMGSFECVAGLGHAAPYANLALKALSKHFKCLKNAITDQLQFSHNNKIQQQQQCGHPMNSENKTDSLRFGGSDSSRGLCSAGQRHGFPDHHAPVWRPHRGLPERAVTVLRAWLFDHFLHPYPTDTDKLMLAKQTGLSRNQVSNWFINARVRVWKPMVEEIHMLETRQSQRSSSSSWRDERTSTTVFPDNSNNNPSSSSAQQRPNNSSPPRRARNDDVHGTNNNNSYVNSGSGGGSAVGFSYGIGSSNVPVMNSSTNGGVSLTLGLHHQIGLPEPFPMTTAQRFGLDGGSGDGGGGYEGQNRQFGRDFIGGSNHQFLHDFVG

SEQ ID NO: 5862 - protein, 500 aa, Arabidopsis thaliana
MGFLGGPSSSSSTAVAVAGDHSFNAGLSSGDVLVFKPEPLSLSLSSHPRLAYDLVVPGVVNSGFCRSAGEANAAAVTIASRSSGPLGPFTGYASILKGSRFLKPAQMLLDEFCNVGRGIYTDKVIDDDDSSLLFDPTVENLCGVSDGGGGDNGKKKSKLISMLDEVYKRYKQYYEQLQAVMGSFECVAGLGHAAPYANLALKALSKHFKCLKNAITDQLQFSHNNKIQQQQQCGHPMNSENKTDSLRFGGSDSSRGLCSAGQRHGFPDHHAPVWRPHRGLPERAVTVLRAWLFDHFLHPYPTDTDKLMLAKQTGLSRNQVSNWFINARVRVWKPMVEEIHMLETRQSQRSSSSSWRDERTSTTVFPDNSNNNPSSSSAQQRPNNSSPPRRARNDDVHGTNNNNSYVNSGSGGGSAVGFSYGIGSSNVPVMNSSTNGGVSLTLGLHHQIGLPEPFPMTTAQRFGLDGGSGDGGGGYEGQNRQFGRDFIGGSNHQFLHDFVG

SEQ ID NO: 5863 - DNA, 829 bp, Arabidopsis thaliana
ccaccatctcagattccccggcgaagattttgttcacagtttccggtgatcttctcctgtccgcccaaatttcagtatatctttgaagtaaagctttgttaatcagcaaaaaaaatatgaagccagtgataggcacagtggtatcgaacaagatgcaaaaatctgtagtggtcgccgtcgatagactcttccacaacaaaatctacaatcgctacgtcaaacgaacttccaaattcatggctcacgacgacaaagacgcctgcaacatcggcgatcgagtgaagttagatccatcaaggcctttgagcaagaataagcattggattgttgcagaaatcatcaaaaaagctcgaatttattctcctaaagctgctgctgctgctgtttctgcttctgcttctgcttcctcagcctccactactgactcttctgctcagtctcagattcctccatcatctacttcttaagttgttttaagagaaacgttgcatagcgaagcgagaaagttgctaggagttgttactatgagcatattgcatcgaagcttttggatcatgtctgtgatatttgatttcctgagatgataatgagttatatgatggtactagattatctggtgaaagtagatgaataacacatgttaagatactctgtcttcttatgttattttggcaaatcatcagtgcattgccttttaagcagaagtgtgagatagtgatgagttgttattacattcgttattttgggtatggaacaatgagtgaaaatgtatctttggctctacgagttgtgacaccagtatgacaaactaaagatcagtaccaacacc

SEQ ID NO: 5864 - protein, 116 aa, Arabidopsis thaliana
MKPVIGTVVSNKMQKSVVVAVDRLFHNKIYNRYVKRTSKFMAHDDKDACNIGDRVKLDPSRPLSKNKHWIVAEIIKKARIYSPKAAAAAVSASASASSASTTDSSAQSQIPPSSTS

SEQ ID NO: 5865 - protein, 104 aa, Arabidopsis thaliana
MQKSVVVAVDRLFHNKIYNRYVKRTSKFMAHDDKDACNIGDRVKLDPSRPLSKNKHWIVAEIIKKARIYSPKAAAAAVSASASASSASTTDSSAQSQIPPSSTS

SEQ ID NO: 5866 - protein, 76 aa, Arabidopsis thaliana
MAHDDKDACNIGDRVKLDPSRPLSKNKHWIVAEIIKKARIYSPKAAAAAVSASASASSASTTDSSAQSQIPPSSTS

SEQ ID NO: 5867 - DNA, 715 bp, Arabidopsis thaliana
aacacatctcactgctcactactctcactgtaatcccttagatcttcttttcaaatttcaatggcgtccggtgatgttgagtatcggtgcttcgttggaggtctagcatgggccactgatgacagagctcttgagactgccttcgctcaatacggcgacgttattgattccaagatcattaacgatcgtgagactggaagatcaaggggattcggattcgtcaccttcaaggatgagaaagccatgaaggatgcgattgagggaatgaacggacaagatctcgatggccgtagcatcactgttaacgaggctcagtcacgaggaagcggtggcggcggaggccaccgtggaggtggtggcggtggtggaggttactccggtggaggtggtagctacggaggtggcggcggtagacgcgagggtggaggaggatacagcggcggcggcggttactcctcaagaggtggtggtggcggaagctacggtggtggaagacgtgagggaggaggaggatacggtggtggtgaaggaggaggttacggaggaagcggtggtggtggaggatggtaattcctttaattaggtttgggattaccaatgaatgttctctctctcgcttgttatgcttctactttgttttgtgtgttctctattttgttctggttctgctttagatttgatgtaacagttcgtgattaggtattttggtatctgg

SEQ ID NO: 5868 - protein, 169 aa, Arabidopsis thaliana
MASGDVEYRCFVGGLAWATDDRALETAFAQYGDVIDSKIINDRETGRSRGFGFVTFKDEKAMKDAIEGMNGQDLDGRSITVNEAQSRGSGGGGGHRGGGGGGGGYSGGGGSYGGGGGRREGGGGYSGGGGYSSRGGGGGSYGGGRREGGGGYGGGEGGGYGGSGGGGGW

SEQ ID NO: 5869 - protein, 108 aa, Arabidopsis thaliana
MKDAIEGMNGQDLDGRSITVNEAQSRGSGGGGGHRGGGGGGGGYSGGGGSYGGGGGRREGGGGYSGGGGYSSRGGGGGSYGGGRREGGGGYGGGEGGGYGGSGGGGGW

SEQ ID NO: 5870 - protein, 101 aa, Arabidopsis thaliana
MNGQDLDGRSITVNEAQSRGSGGGGGHRGGGGGGGGYSGGGGSYGGGGGRREGGGGYSGGGGYSSRGGGGGSYGGGRREGGGGYGGGEGGGYGGSGGGGGW

SEQ ID NO: 5871 - DNA, 1458 bp, Arabidopsis thaliana
gtatttttgagttctcagatttcaaacacaaaagtttcgtctccgatttaatctttctacgtcttggtttatgagctcaaaggagaagcccactctcggaggtacgcggattaagacccgcaaaaggaatattgctgctcctctcgaccctgctgctttttctgatgcactagttcagatttatctggataatgctggtgatctggaacttgttgccagaagtttagagtcatctgatcttaatttctcaagatacggtgatattttctttgaggttgttttcattggaggacgtactcaaactggttcagtgaaatctgatgaaggggaacgccacccttactctataatcgactgtgaaccaaagcgtgaagctattttaccatcagttgtatacatacagaaaattttgcggaggaaagccttccttattaagaaccttgagaatgttacacggagattcttacagtcactggagctttttgaggagaatgagaggaagaagcttgcaatattcacagcacttgcattttcacagaagctctcaggattacctgcagagactgtcttccagccattgcttaaggatactcttgttgccaaagggatagttctcaattttgtaacagacttcttcaatgaatatttggttgagaacagtcttgatgacttgatttctattctgaggcgtggcaagatggatgacaaactcttggagttcctgccacccacaaagcggactacagaaagttttgccgagcatttcactaaggcaggattgacagctctggtagagtacaatgaaaggaaaatatttgaggtgaagctgaaggaaatcaaagcggtccttacgagccaagtgacagaggaaataaacgtagatgaagtgactgaaatggtgaagcaacaggtgaaagatgcaaagctgccagagactgaggttgtgcatgtgatctgggatgggataatgaatgctgttcaatggtctgggaaaaaccagcagcagaattcgaatgctgtattacgccaagtgaaaacatgggcaccccttctgaacacgctgtgtagcaccgggaacatggagatggaactgatgtataaagtacagatgcaatgctatgaggatgcaaagctgatgaaagtgtttcctgaggtagtgagatctctgtatgaactggatgtgcttgcggaagacaccattctgcactggtatcgcaaagggaccaaccctaagggcaggcaaacgtttgtgaagggattggaaccgtttgtgaattggctcgaagaggccgaagaagaggagtgagtgagacgctctgcttcttgttttctctttttactctcttctaataaaagaaagacaatattttacttctcttaacgcaaaattcagatgctctacattgttggtgacttggtgtgatctcttttttgaatgaataagtacttctttagttg

SEQ ID NO: 5872 - protein, 411 aa, Arabidopsis thaliana
MSSKEKPTLGGTRIKTRKRNIAAPLDPAAFSDALVQIYLDNAGDLELVARSLESSDLNFSRYGDIFFEVVFIGGRTQTGSVKSDEGERHPYSIIDCEPKREAILPSVVYIQKILRRKAFLIKNLENVTRRFLQSLELFEENERKKLAIFTALAFSQKLSGLPAETVFQPLLKDTLVAKGIVLNFVTDFFNEYLVENSLDDLISILRRGKMDDKLLEFLPPTKRTTESFAEHFTKAGLTALVEYNERKIFEVKLKEIKAVLTSQVTEEINVDEVTEMVKQQVKDAKLPETEVVHVIWDGIMNAVQWSGKNQQQNSNAVLRQVKTWAPLLNTLCSTGNMEMELMYKVQMQCYEDAKLMKVFPEVVRSLYELDVLAEDTILHWYRKGTNPKGRQTFVKGLEPFVNWLEEAEEEE

SEQ ID NO: 5873 - DNA, 1337 bp, Arabidopsis thaliana
agggcttttaaaatcggcgacggcgagcggagaattcccaaggaagagtcgatgaagttgaaatcggtgttcgatgcttcggaaatcaaatcggaatttgaatcagcgggaataaaccctaaattcgcgattcaaatctggaagtatgtaattcagaatcctgattgcgtttgggacgagattccttcattgccttccgctgcatactctcttctccattccaagttcaagactcttacttcgtctcttcactcgctatttcattcctccgatggcaccacctcaaagcttctcatcaagctccagaatggagcttttgtggaagctgtggtaatgagatacgatactcggttggggatgttaggagggaaaccacgtcctggaggtataagatctacgttatgtatttcatctcaggttggttgtaagatgggttgcacattctgtgctactggtaccatgggatttaaaagcaatttaacatctggagaaattgtggagcagcttgttcacgcctctcgcattgctgatatacgcaacatcgttttcatgggaatgggagaacctttaaataactacaatgctgttgttgaagctgttcgtgtcatgttaaaccaaccatttcagctgtcgcccaaaagaattaccatatcaactgtcggaattgttcacgcaattaacaagctacacaatgatctacccggtgtaagtttagcagtatccctccatgcaccagttcaagaaatccgctgccagatcatgccagcagctagagcctttcctttacaaaagcttatggatgcacttcaaactttccaaaagaacagtcaacaaaagatcttcattgagtacataatgcttgatggagtaaatgatcaagagcagcacgctcatctactaggcgaattgctaaagacatttcaagtggtcataaatttgataccatttaatccaattggatccacaagccaattcgaaacaagcagcatacaaggcgtgtcaagattccagaaaatcctgagggaaacatacaagatccggactacaattcgcaaagaaatgggtcaggatattagcggcgcttgcggtcagctagtggtgaaccaaccagacatcaaaaagactcctggaactgtggaacttagagacatagaagatctgcttctctaactttaggaccagagacatgaaacagacacttggaatggttgtgtagtatctttgaagccactcttcaaaacccttttcttaaacttcacattttgtcctctcatcactttgtggaaaacacttggctcactcttatatgcaagacaaacagagatggtccttggtcc

SEQ ID NO: 5874 - protein, 389 aa, Arabidopsis thaliana
RAFKIGDGERRIPKEESMKLKSVFDASEIKSEFESAGINPKFAIQIWKYVIQNPDCVWDEIPSLPSAAYSLLHSKFKTLTSSLHSLFHSSDGTTSKLLIKLQNGAFVEAVVMRYDTRLGMLGGKPRPGGIRSTLCISSQVGCKMGCTFCATGTMGFKSNLTSGEIVEQLVHASRIADIRNIVFMGMGEPLNNYNAVVEAVRVMLNQPFQLSPKRITISTVGIVHAINKLHNDLPGVSLAVSLHAPVQEIRCQIMPAARAFPLQKLMDALQTFQKNSQQKIFIEYIMLDGVNDQEQHAHLLGELLKTFQVVINLIPFNPIGSTSQFETSSIQGVSRFQKILRETYKIRTTIRKEMGQDISGACGQLVVNQPDIKKTPGTVELRDIEDLLL

SEQ ID NO: 5875 - protein, 372 aa, Arabidopsis thaliana
MKLKSVFDASEIKSEFESAGINPKFAIQIWKYVIQNPDCVWDEIPSLPSAAYSLLHSKFKTLTSSLHSLFHSSDGTTSKLLIKLQNGAFVEAVVMRYDTRLGMLGGKPRPGGIRSTLCISSQVGCKMGCTFCATGTMGFKSNLTSGEIVEQLVHASRIADIRNIVFMGMGEPLNNYNAVVEAVRVMLNQPFQLSPKRITISTVGIVHAINKLHNDLPGVSLAVSLHAPVQEIRCQIMPAARAFPLQKLMDALQTFQKNSQQKIFIEYIMLDGVNDQEQHAHLLGELLKTFQVVINLIPFNPIGSTSQFETSSIQGVSRFQKILRETYKIRTTIRKEMGQDISGACGQLVVNQPDIKKTPGTVELRDIEDLLL

SEQ ID NO: 5876 - protein, 278 aa, Arabidopsis thaliana
MRYDTRLGMLGGKPRPGGIRSTLCISSQVGCKMGCTFCATGTMGFKSNLTSGEIVEQLVHASRIADIRNIVFMGMGEPLNNYNAVVEAVRVMLNQPFQLSPKRITISTVGIVHAINKLHNDLPGVSLAVSLHAPVQEIRCQIMPAARAFPLQKLMDALQTFQKNSQQKIFIEYIMLDGVNDQEQHAHLLGELLKTFQVVINLIPFNPIGSTSQFETSSIQGVSRFQKILRETYKIRTTIRKEMGQDISGACGQLVVNQPDIKKTPGTVELRDIEDLLL

SEQ ID NO: 5877 - DNA, 1578 bp, Arabidopsis thaliana
acggcggtggatattggcccttgccgcaaaagcaaaagctatcgccaccaccgtgtcataaatctcagatctctctctctctctctctctctctctctctctctctctctctctctctctctctctctctcttgcgataacaatggccgaaactatgaaagatattacgatgaagaacgatgaatcacaggaagaagaaatccccgatcaatttctctgctgcgtttgcctggaacttctttacaagccaattgtgttatcttgtggtcatctatcatgtttttggtgcgtacataagtccatgaatggctttcgtgagtctcattgtccgatatgtagagacccgtatgttcactttccctctgtgtgccagaagctttattttctgttaaagaagatgtacccacttgctcataagaagagagaagaacaagttttaaaggaagagcaagaacgagaatgtttttctcctcagattgatcttgttttggatttgtctgtgtgtagtggagattctctcaatgtctctgataaacagaaggtggaagagtgttcgaatgcagcgaacttattatctagttcatcaagtagaggtgacattccatgtatccccaaaaatcaagaacccacagatgcaaaagctcttaatgttcatgaaaatgaattacttaaggataacaaagtcagtaagcagatttcgaaagatgatttgctctgttcagcatgtaaggagctgcttgtacgacccgtagttctcaattgcggacatgtgtattgtgaaggatgtgtagtagatatggctgaagaaagcgaaaagatcaaatgtcaagagtgtaatgtttgtgacccaagaggatttccaaaagtttgtttgattcttgaacagcttttggaggaaaactttcctgaagaatacaattcaagaagcagtaaggttcagaaaacgctcgcccataatagcaaaggaaatattcaaagctatctcaaagaaggcccgtccttatcaaacgacaataacaatgatgatccctggttggcaaaccctggatcaaatgttcactttggagctggttgtgattcttgtggggtgtatccaatcataggggatcgatacagatgcaaagactgcaaggaggaaattgggtatgacctttgcaaagactgttacgagactccttcgaaagttccagggagattcaaccagcaacacactcctgaccacaggcttgagcttgcacggtctcctcaggttctgatcaatttcaattctatcggtatccttctcggacccgttatctcaaatgaaggcatggatacagatgaaggcgaggaagggcctcctggttcttctaatgagtcatcaagcacagaatgaaatagcagtcaagtattaatgcatatgctttcgctttgtgtttgcgtttgttattgtatttatacttcataatatattttctcctgagaagtctatggttttaacattttaaacaaagtttatttcttaacaaagtttgtttgcatttgtggttgttaagtcacctcttttgtttatattacctttaaagtgtgatttatttt

SEQ ID NO: 5878 - protein, 410 aa, Arabidopsis thaliana
MAETMKDITMKNDESQEEEIPDQFLCCVCLELLYKPIVLSCGHLSCFWCVHKSMNGFRESHCPICRDPYVHFPSVCQKLYFLLKKMYPLAHKKREEQVLKEEQERECFSPQIDLVLDLSVCSGDSLNVSDKQKVEECSNAANLLSSSSSRGDIPCIPKNQEPTDAKALNVHENELLKDNKVSKQISKDDLLCSACKELLVRPVVLNCGHVYCEGCVVDMAEESEKIKCQECNVCDPRGFPKVCLILEQLLEENFPEEYNSRSSKVQKTLAHNSKGNIQSYLKEGPSLSNDNNNDDPWLANPGSNVHFGAGCDSCGVYPIIGDRYRCKDCKEEIGYDLCKDCYETPSKVPGRFNQQHTPDHRLELARSPQVLINFNSIGILLGPVISNEGMDTDEGEEGPPGSSNESSSTE

SEQ ID NO: 5879 - protein, 406 aa, Arabidopsis thaliana
MKDITMKNDESQEEEIPDQFLCCVCLELLYKPIVLSCGHLSCFWCVHKSMNGFRESHCPICRDPYVHFPSVCQKLYFLLKKMYPLAHKKREEQVLKEEQERECFSPQIDLVLDLSVCSGDSLNVSDKQKVEECSNAANLLSSSSSRGDIPCIPKNQEPTDAKALNVHENELLKDNKVSKQISKDDLLCSACKELLVRPVVLNCGHVYCEGCVVDMAEESEKIKCQECNVCDPRGFPKVCLILEQLLEENFPEEYNSRSSKVQKTLAHNSKGNIQSYLKEGPSLSNDNNNDDPWLANPGSNVHFGAGCDSCGVYPIIGDRYRCKDCKEEIGYDLCKDCYETPSKVPGRFNQQHTPDHRLELARSPQVLINFNSIGILLGPVISNEGMDTDEGEEGPPGSSNESSSTE

SEQ ID NO: 5880 - protein, 401 aa, Arabidopsis thaliana
MKNDESQEEEIPDQFLCCVCLELLYKPIVLSCGHLSCFWCVHKSMNGFRESHCPICRDPYVHFPSVCQKLYFLLKKMYPLAHKKREEQVLKEEQERECFSPQIDLVLDLSVCSGDSLNVSDKQKVEECSNAANLLSSSSSRGDIPCIPKNQEPTDAKALNVHENELLKDNKVSKQISKDDLLCSACKELLVRPVVLNCGHVYCEGCVVDMAEESEKIKCQECNVCDPRGFPKVCLILEQLLEENFPEEYNSRSSKVQKTLAHNSKGNIQSYLKEGPSLSNDNNNDDPWLANPGSNVHFGAGCDSCGVYPIIGDRYRCKDCKEEIGYDLCKDCYETPSKVPGRFNQQHTPDHRLELARSPQVLINFNSIGILLGPVISNEGMDTDEGEEGPPGSSNESSSTE

SEQ ID NO: 5881 - DNA, 1122 bp, Arabidopsis thaliana
aaatggacaggactcatttgcgatttttaagatttaggcaaaactcttctctgtttcgacgcaaaaggaagcatttttaatggacgcattgggtggttgcggcggcgctggtggtttctggggatggaatggcttcgatcaacggagaaagaagaagtcttccggtgatagaggtaagaaacgtaattctggatcgtcggattccgtcgatgtgagcagagacgccggcggttatcggtttcctttgaagcaagctgtgacggccggagcactcactttcaccggtgacacgattgctcagctatcagggagatggaaaaagagaaccgctcttaaacaatcatcttctgagcttgacgagggggaattgtggaacattttctcagaacatgactggattcgtgcgctgcggatgagttcttacgggtttctcttgtatggtttcttatgcgtggtaccaattccttgatcattctttgcctaaaccaactgcgacaaatctagtgcttaaggttctgcttaaccaagtaatccttggtccatctgtgattgctgttatatttgcttggaacaacttgtggctgggaaagctctctgagcttggaaacaagtatcagaaagatgctcttcctacgcttctttatggatttcgcttctgggttcccgttagcatacttaacttttgggtagtcccgcttcaagctcgagtagcgttcatgtccatgggttctgtgttttggaacttctacttatcttcaactatgagcaagtagttacatttatatttgtattcttcagcctcgctgagtgataatatatcattctgaaaggtttcaaatacaaaattactgtttaccaagagactatggaaggctcttctcatcctcactccttcctttctttgagtatcgcacaactaatgtgttactctgatcaaactcatggaaaactatctcctctaaaaactttagtttgagtgtttttcttgagttcaactacttgtgggtgttgggattattagtttcgagaagttactgtataatttttgaatttttatcattttaactctcagtaacaaattactttaaacttttgaatcttatgacttaaccttttaatttt

SEQ ID NO: 5882 - protein, 129 aa, Arabidopsis thaliana
MDALGGCGGAGGFWGWNGFDQRRKKKSSGDRGKKRNSGSSDSVDVSRDAGGYRFPLKQAVTAGALTFTGDTIAQLSGRWKKRTALKQSSSELDEGELWNIFSEHDWIRALRMSSYGFLLYGFLCVVPIP

SEQ ID NO: 5883 - protein, 111 aa, Arabidopsis thaliana
MVSYAWYQFLDHSLPKPTATNLVLKVLLNQVILGPSVIAVIFAWNNLWLGKLSELGNKYQKDALPTLLYGFRFWVPVSILNFWVVPLQARVAFMSMGSVFWNFYLSSTMSK

SEQ ID NO: 5884 - DNA, 1616 bp, Arabidopsis thaliana
agaattgcttctcttagtatttgctttcaccaacccactcgacggagtctccaacgccttcctcctcattctccactctcacaccaccaacttctgattccagatctcaacgatgcaaagctccgccgtattctccctctctccgtcgcttcctctcctaaaaccacgtcggctctctctccgccaccatcccataaccaccgccgcttcttcaagcgatctaaacgtttctccaaatgttgtctctattccttctttatctcgtcgatcttggcgtctcgcttcgtctgattcgcctctccgtgcttggtccggtgttccttctccgatctctcactccttagacacgaatcgtttcagaaccgccgctactgcagttcctgaaagtgctgaggaaggtgataacagtggtaaattgacgaaggttttggaacttggcttgttgttcgctatgtggtaccttttcaatatctacttcaacatctacaataaacaggttttgaaagctctacatgctccaatgactgtgactttggttcagtttgctgttggtagtgtgctcattactatcatgtgggttcttaacctgtacaagagaccaaagatcagtggtgctcagctagctgccatcttgccgcttgctgttgtgcacacacttggtaatctgtttacgaacatgagtcttgggaaagtttctgtttcctttactcacaccattaaagccatggagcctttcttctctgttttattgtctgctatgtttctcggggagaaacctactccatgggtactcggtgccattgtaccaattgttggtggagttgcacttgcttcaatttcggaggtctcattcaactgggctggattttcgagtgcaatggcatcaaacttgactaaccaatcccgtaatgtgctgagtaagaaagtcatggttaagaaagatgattctcttgacaacatcactctcttctcaattataacattgatgtctctcgttctgatggctcctgtgactttctttacggaaggcatcaagttcactccttcatacattcaatcagctggtgtgaatgttaaacaaatatatacaaagtctcttatcgctgcactctgcttccacgcataccagcaggtgtcgtacatgatattggcgagagtatcaccggttacacattctgtcggaaactgtgtgaaacgtgttgtggttattgtgagctctgtcatcttcttcaagacacccgtctcgcctgttaatgctttcggaactggaatcgcccttgcgggtgtcttcttatactccagagtgaagggtattaagccaaagccaaagactgcttaagcaaatatcggctaatacctaatgtcatatcactcccgcgctttggatttgtatacaatttctcgagctaaagttttcagatagatggttttattcttttgcgggtttttttcacgaagtttcatcatccctttctaagcttttcgctgcagccatcggttctcttagagtttgttataagttctcttctgtgtctagacaaatgctaaactcttaaatttcttacagtttttccaagaataacttgtcaacacattctcattactgcttttagttt

SEQ ID NO: 5885 - protein, 408 aa, Arabidopsis thaliana
MQSSAVFSLSPSLPLLKPRRLSLRHHPITTAASSSDLNVSPNVVSIPSLSRRSWRLASSDSPLRAWSGVPSPISHSLDTNRFRTAATAVPESAEEGDNSGKLTKVLELGLLFAMWYLFNIYFNIYNKQVLKALHAPMTVTLVQFAVGSVLITIMWVLNLYKRPKISGAQLAAILPLAVVHTLGNLFTNMSLGKVSVSFTHTIKAMEPFFSVLLSAMFLGEKPTPWVLGAIVPIVGGVALASISEVSFNWAGFSSAMASNLTNQSRNVLSKKVMVKKDDSLDNITLFSIITLMSLVLMAPVTFFTEGIKFTPSYIQSAGVNVKQIYTKSLIAALCFHAYQQVSYMILARVSPVTHSVGNCVKRVVVIVSSVIFFKTPVSPVNAFGTGIALAGVFLYSRVKGIKPKPKTA

SEQ ID NO: 5886 - protein, 295 aa, Arabidopsis thaliana
MWYLFNIYFNIYNKQVLKALHAPMTVTLVQFAVGSVLITIMWVLNLYKRPKISGAQLAAILPLAVVHTLGNLFTNMSLGKVSVSFTHTIKAMEPFFSVLLSAMFLGEKPTPWVLGAIVPIVGGVALASISEVSFNWAGFSSAMASNLTNQSRNVLSKKVMVKKDDSLDNITLFSIITLMSLVLMAPVTFFTEGIKFTPSYIQSAGVNVKQIYTKSLIAALCFHAYQQVSYMILARVSPVTHSVGNCVKRVVVIVSSVIFFKTPVSPVNAFGTGIALAGVFLYSRVKGIKPKPKTA

SEQ ID NO: 5887 - protein, 272 aa, Arabidopsis thaliana
MTVTLVQFAVGSVLITIMWVLNLYKRPKISGAQLAAILPLAVVHTLGNLFTNMSLGKVSVSFTHTIKAMEPFFSVLLSAMFLGEKPTPWVLGAIVPIVGGVALASISEVSFNWAGFSSAMASNLTNQSRNVLSKKVMVKKDDSLDNITLFSIITLMSLVLMAPVTFFTEGIKFTPSYIQSAGVNVKQIYTKSLIAALCFHAYQQVSYMILARVSPVTHSVGNCVKRVVVIVSSVIFFKTPVSPVNAFGTGIALAGVFLYSRVKGIKPKPKTA

SEQ ID NO: 5888 - DNA, 1238 bp, Arabidopsis thaliana
aaacgatcgtcagagatagagagagagaaaggtcatcacccattctcactcgcagaagatttgttctcatctgattcctccgatctgccatgtctcggcttttctaaccctaagaagtttcacagacgcggcgaaggagagggaggaaggagatagatctctttttccgtcgcgataataataaaaaataaacgtgtctagaggctgttactgaagagttgattcatacggagagaggatagaaatggcagatgggatatcgagcttttggggtcctgtgacttctactatagagtgttgtgagatgaactacgcctactcatcctacattgctgagttctacaacactatatccaatgtccctggaatcctattggctctcattggtcttgtcaatgcattaaggcaacggtttgagaagaggtttagcattcttcacatttcgaatatgatacttgctatcggcagcatgctctaccatgccactttgcaacacgtgcaacaacagagtgatgagaccccaatggtgtgggagatacttctatacatgtacatcctttactcaccagattggcattaccgaagtacaatgcccacttttctcttcctctacggtgctgcctttgccatagtccatgcttacctcaggtttggaattggtttcaaggtccactacgtgatactttgccttctatgcatccctcggatgtacaagtactacattcacacagaggacacagcagccaaaaggattgcgaaatggtatgttgctacgatcttagtgggaagcatatgctggttctgtgaccgtgtcttctgcaagacgatatctcagtggcctgtgaatcctcagggacatgctctgtggcatgtgttcatgagtttcaactcttactgcgcaaacacattcttgatgttctgcagagctcagcaacgtggatggaacccaaaggtaaaatactttctgggagttctcccttatgtcaagatcgagaagccaaaaacacaatgagaagaaaattggggataaaaaagcccagatgaagaagaagaagatcataaatatagtttttgttcatcgttttgtcagaatctcgacatggtttttttcttaattttattttttgaaagtgaaactctctagatacagtctagattttttttttttttttttttttttctcatctctgtattagctattgggaatgctcttaagaagaattgatttttaacttgct

SEQ ID NO: 5889 - protein, 255 aa, Arabidopsis thaliana
MADGISSFWGPVTSTIECCEMNYAYSSYIAEFYNTISNVPGILLALIGLVNALRQRFEKRFSILHISNMILAIGSMLYHATLQHVQQQSDETPMVWEILLYMYILYSPDWHYRSTMPTFLFLYGAAFAIVHAYLRFGIGFKVHYVILCLLCIPRMYKYYIHTEDTAAKRIAKWYVATILVGSICWFCDRVFCKTISQWPVNPQGHALWHVFMSFNSYCANTFLMFCRAQQRGWNPKVKYFLGVLPYVKIEKPKTQ

SEQ ID NO: 5890 - protein, 235 aa, Arabidopsis thaliana
MNYAYSSYIAEFYNTISNVPGILLALIGLVNALRQRFEKRFSILHISNMILAIGSMLYHATLQHVQQQSDETPMVWEILLYMYILYSPDWHYRSTMPTFLFLYGAAFAIVHAYLRFGIGFKVHYVILCLLCIPRMYKYYIHTEDTAAKRIAKWYVATILVGSICWFCDRVFCKTISQWPVNPQGHALWHVFMSFNSYCANTFLMFCRAQQRGWNPKVKYFLGVLPYVKIEKPKTQ

SEQ ID NO: 5891 - protein, 187 aa, Arabidopsis thaliana
MILAIGSMLYHATLQHVQQQSDETPMVWEILLYMYILYSPDWHYRSTMPTFLFLYGAAFAIVHAYLRFGIGFKVHYVILCLLCIPRMYKYYIHTEDTAAKRIAKWYVATILVGSICWFCDRVFCKTISQWPVNPQGHALWHVFMSFNSYCANTFLMFCRAQQRGWNPKVKYFLGVLPYVKIEKPKTQ

SEQ ID NO: 5892 - DNA, 2755 bp, Arabidopsis thaliana
aattgctatttctctgcctccgtgtgctgagaaccagaacgaaaccctagcaaaatatcgccatgggtaaggtcaaaggaaagcatcgtttggataagtactatcgtctcgctaaggaacgtggattccgttctcgagcttcctacaagcttcttcagctcgacgccaagtactctcttctccactcagctcatgccgttctcgatctctgcgccgcccctggtggttggatgcaagtcgccgtcgagaaagttcccgtcggcagcctcgttctcggtatcgatcttgtcccgattctccctgttcgtggctgtgttactatgacgcaagatatcacaaggactgagtgtaaatcgaagatcaagcaagtgatggagcagcatggtgttagtgcttttaatttggttctgcacgatgggtctccaaatgttggtggtgcgtgggcacaagaggctatgagccagaacgctttggttattgattctgttagattagccactgagttcttagctcgcaacgggaatttagtcaccaaggttttcaggtctcgagactacaactctgtgctctactgtcttgggaggctgtttgaaaaagttgaagtgtttaagccgccggctagtcgttcagcatctgcagaaacatatcttgtgggtttgaaatacttagcccctgccaagattgatccccgtcttcttgattatagacatctctttaaggagtcagcagaacccacgagaaaggtggtggatgtgcttggaggatcaaaacaaaagagaaaccgtgatgggtatgaagatggggagtccattttgagaagagttgcatctgctgctgatttcatttggtctgaaaatcctcttgacgttcttggcacgactacttccatatcatttgatgatcaagcctctctacctttaaaggaacatgatttgacgacagaggagattaaaattctatgcgatgatcttcctgtcttggggaagaatgacttcaagcatatcctaaaatggcgaatgcaaatcaggaaagctctgactcctgagaaaaaggaagttgctaaacctgagcctgatgtgggaaaggaagatgaggaaaatgaagatgataaactactcaatgaattggaagagctgacaaacacagttgaccgcaagaagaaacaggcaaagaagattcttgcaaaacgaagggctaaggacaaggcgcggaaggcgactggtccacagatggatgtacttgaagatggtttcgtcgacaatgaattgttctctcttaatgctatcaagggaaagaaagatctaatggcagttgacaatgatgaagatgataatggcaatgccgttgacagtgagaacgaagaccatggcgaaggagcttcagatgactccaaagacagtgacagagattctgatgaagaacgtcagaaatacactgaacaaatggaagagatttttgagcaggcatatgagcggtatatggtgaagaaagaaggaagcgcaaagcaaaggaagcgggctaggcaggcccatgctgaaaagctggaggaaggtgatggagatgaagaaatgaagatcgattacgattcagatatgaatgaagaaaaggatgaggcaaaccctcttgttgtaccacttgatgatggagtggtccaaacaaaggaggaaatatccaaccagtggttcagtcagaatatatttgcagaagccgtggaagaaggagacttgggaaaagatgacagtgaagacgaaatagcaaataagaaaaagagcaaaaatctgtctaaaccagacaagtcaaagcagaaggcttcaaaagcaagtgtgttgtctgatcagagcttgcccaatagctccaagaaggaagatgagtttgaggtagtccctgcaccagccacagattctgactcagattcatcctctgaagatgatgttcataccaaggccgagatactggcatgtgccaaaaaaatgctgaggaagaagcagagagaacagatgcttgatgatgcatataacaaacacatgtttgtagatgaaggtttaccaaaatggtttgtggatgacgagaagcagcacagacaaccaatgaaacctgttacgaaagatgaagttaatgcaatgaaagcacagttcaaagagatcaatgctcgtccagccaagaaggtggcagaggccaaggcacggaagaagcgagctgcccagaaaagattggagaaagtgaggaagaaggcaaacacaatatctgacacagcagatatatcagaccgttcaaaggacaagatgatagacaagctatacaagaaagcagcagagccaagaaagccaaggaaagaactggttgtgtctaagaaaggagttggggttaaagttggtaagggacagaagagagtggataggaggatgaagagtgatgataggaaacgtgggggaggaaagcccggtaggaacgggcagaagggcactggtaaagcaggccagaaaggaaaaaggcctgctgggaaacctcggggaaggaaacccgggtaagacctcaatgtcgaatgaggcgaacaggaagttttgttacgtattttaatttaagttttggcaattcttgacttctggatttacttgtttactctgataatctgtgttcgtggtgtcctaagttaaaacttagtggatctatctatcttgtttatcaaatttaccgtaatcgacaatgttcttgtaccatggaagttcctaatattcacatctggattgagaacagt

SEQ ID NO: 5893 - protein, 821 aa, Arabidopsis thaliana
MGKVKGKHRLDKYYRLAKERGFRSRASYKLLQLDAKYSLLHSAHAVLDLCAAPGGWMQVAVEKVPVGSLVLGIDLVPILPVRGCVTMTQDITRTECKSKIKQVMEQHGVSAFNLVLHDGSPNVGGAWAQEAMSQNALVIDSVRLATEFLARNGNLVTKVFRSRDYNSVLYCLGRLFEKVEVFKPPASRSASAETYLVGLKYLAPAKIDPRLLDYRHLFKESAEPTRKVVDVLGGSKQKRNRDGYEDGESILRRVASAADFIWSENPLDVLGTTTSISFDDQASLPLKEHDLTTEEIKILCDDLPVLGKNDFKHILKWRMQIRKALTPEKKEVAKPEPDVGKEDEENEDDKLLNELEELTNTVDRKKKQAKKILAKRRAKDKARKATGPQMDVLEDGFVDNELFSLNAIKGKKDLMAVDNDEDDNGNAVDSENEDHGEGASDDSKDSDRDSDEERQKYTEQMEEIFEQAYERYMVKKEGSAKQRKRARQAHAEKLEEGDGDEEMKIDYDSDMNEEKDEANPLVVPLDDGVVQTKEEISNQWFSQNIFAEAVEEGDLGKDDSEDEIANKKKSKNLSKPDKSKQKASKASVLSDQSLPNSSKKEDEFEVVPAPATDSDSDSSSEDDVHTKAEILACAKKMLRKKQREQMLDDAYNKHMFVDEGLPKWFVDDEKQHRQPMKPVTKDEVNAMKAQFKEINARPAKKVAEAKARKKRAAQKRLEKVRKKANTISDTADISDRSKDKMIDKLYKKAAEPRKPRKELVVSKKGVGVKVGKGQKRVDRRMKSDDRKRGGGKPGRNGQKGTGKAGQKGKRPAGKPRGRKPG

SEQ ID NO: 5894 - protein, 765 aa, Arabidopsis thaliana
MQVAVEKVPVGSLVLGIDLVPILPVRGCVTMTQDITRTECKSKIKQVMEQHGVSAFNLVLHDGSPNVGGAWAQEAMSQNALVIDSVRLATEFLARNGNLVTKVFRSRDYNSVLYCLGRLFEKVEVFKPPASRSASAETYLVGLKYLAPAKIDPRLLDYRHLFKESAEPTRKVVDVLGGSKQKRNRDGYEDGESILRRVASAADFIWSENPLDVLGTTTSISFDDQASLPLKEHDLTTEEIKILCDDLPVLGKNDFKHILKWRMQIRKALTPEKKEVAKPEPDVGKEDEENEDDKLLNELEELTNTVDRKKKQAKKILAKRRAKDKARKATGPQMDVLEDGFVDNELFSLNAIKGKKDLMAVDNDEDDNGNAVDSENEDHGEGASDDSKDSDRDSDEERQKYTEQMEEIFEQAYERYMVKKEGSAKQRKRARQAHAEKLEEGDGDEEMKIDYDSDMNEEKDEANPLVVPLDDGVVQTKEEISNQWFSQNIFAEAVEEGDLGKDDSEDEIANKKKSKNLSKPDKSKQKASKASVLSDQSLPNSSKKEDEFEVVPAPATDSDSDSSSEDDVHTKAEILACAKKMLRKKQREQMLDDAYNKHMFVDEGLPKWFVDDEKQHRQPMKPVTKDEVNAMKAQFKEINARPAKKVAEAKARKKRAAQKRLEKVRKKANTISDTADISDRSKDKMIDKLYKKAAEPRKPRKELVVSKKGVGVKVGKGQKRVDRRMKSDDRKRGGGKPGRNGQKGTGKAGQKGKRPAGKPRGRKPG

SEQ ID NO: 5895 - protein, 735 aa, Arabidopsis thaliana
MTQDITRTECKSKIKQVMEQHGVSAFNLVLHDGSPNVGGAWAQEAMSQNALVIDSVRLATEFLARNGNLVTKVFRSRDYNSVLYCLGRLFEKVEVFKPPASRSASAETYLVGLKYLAPAKIDPRLLDYRHLFKESAEPTRKVVDVLGGSKQKRNRDGYEDGESILRRVASAADFIWSENPLDVLGTTTSISFDDQASLPLKEHDLTTEEIKILCDDLPVLGKNDFKHILKWRMQIRKALTPEKKEVAKPEPDVGKEDEENEDDKLLNELEELTNTVDRKKKQAKKILAKRRAKDKARKATGPQMDVLEDGFVDNELFSLNAIKGKKDLMAVDNDEDDNGNAVDSENEDHGEGASDDSKDSDRDSDEERQKYTEQMEEIFEQAYERYMVKKEGSAKQRKRARQAHAEKLEEGDGDEEMKIDYDSDMNEEKDEANPLVVPLDDGVVQTKEEISNQWFSQNIFAEAVEEGDLGKDDSEDEIANKKKSKNLSKPDKSKQKASKASVLSDQSLPNSSKKEDEFEVVPAPATDSDSDSSSEDDVHTKAEILACAKKMLRKKQREQMLDDAYNKHMFVDEGLPKWFVDDEKQHRQPMKPVTKDEVNAMKAQFKEINARPAKKVAEAKARKKRAAQKRLEKVRKKANTISDTADISDRSKDKMIDKLYKKAAEPRKPRKELVVSKKGVGVKVGKGQKRVDRRMKSDDRKRGGGKPGRNGQKGTGKAGQKGKRPAGKPRGRKPG

SEQ ID NO: 5896 - DNA, 1771 bp, Arabidopsis thaliana
aaattcaattcgtttaaaaatggagagtcaaaagcaagaagataatgaatacattttccgcagtttgtatccatctgtgcccattcctgacaaacttacactgcctgaatttgtgctccaaggagttgaagaatacacagagaatgtagcgtttgtagaagcggtgaccggaaaagctgtgacgtacggtgatgtagtgagggacacaaagaggctagccaaagcgttgacatctctcggactaaggaaaggtcaagtgatggttgtggtcctaccaaacgtcgccgagtatgggattattgcccttggtattatgtctgccggtggagtcttctccggtgcaaatccgacggctcttgtttccgagatcaagaagcaagttgaagcttccggtgctagaggaatcatcactgatgctactaactatgaaaaggtgaaatcactaggtttaccggtgatagtgttaggtgaagagaagatagaaggagcagtaaactggaaagatcttctagaagcaggagacaaatgcggagataccgacaatgaagagattcttcagacagatctttgtgcacttcctttttcttcaggaacaacaggattacaaaaaggagtaatgctcacacatcgcaatctcatagccaatctttgctctactctcttcggtgtcaggtctgaaatgatcggtcagatcgtgacgcttggtttgatcccattctttcatatttacggtatcgttggcatatgttgtgctacaatgaagaataaaggcaaagttgttgctatgagtcggtacgatctaaggattttcttgaatgctttgattgctcatgaggtttcgtttgcgcctatagttccgccgattatattgaatcttgttaagaatccgatagttgatgagtttgatctttcgaagcttaaacttcagtctgtcatgactgctgctgctcctttagctcctgagcttcttactgccttcgaagccaagtttcctaatgtccaagtccaagaggcttatggattaacggagcatagttgcattacgttaactcacggagatccagagaaaggacaaggaatcgcgaaacgaaactcggttggtttcatacttccgaatctcgaggtaaagttcatagatcctgacaccggtagatcactcccgaagaacacttctggtgagctatgtgtgaggagccaatgtgtaatgcaaggttacttcatgaacaaggaagagactgacaagacaattgatgaacaaggttggcttcacacaggagacataggttacatcgatgatgatggagacatcttcatcgttgatcgtatcaaagaacttattaaatacaaaggttttcaggttgctccggccgagcttgaagctattctactcactcatccatccgttgaagacgttgccgtcgtgccgttaccggacgaggaagccggggagattccggcggcttgcgtggtgataaatccgaaagcgacagaaaaggaagaagacattctcaactttgttgcagcaaatgtggctcattacaagaaggttagagccgtccattttgtggattcaatccctaaatctctctctggtaaaatcatgaggaggcttcttagagacaagatcctcagcatcaacaagaagtagaagaaagaaaactcttacaagcttttaattaatctactttggttaaagaaattgtccttaaacaataaatactctttgtggtttcattattgctccttaattaggaaattctacagttcaatt

SEQ ID NO: 5897 - protein, 548 aa, Arabidopsis thaliana
NSIRLKMESQKQEDNEYIFRSLYPSVPIPDKLTLPEFVLQGVEEYTENVAFVEAVTGKAVTYGDVVRDTKRLAKALTSLGLRKGQVMVVVLPNVAEYGIIALGIMSAGGVFSGANPTALVSEIKKQVEASGARGIITDATNYEKVKSLGLPVIVLGEEKIEGAVNWKDLLEAGDKCGDTDNEEILQTDLCALPFSSGTTGLQKGVMLTHRNLIANLCSTLFGVRSEMIGQIVTLGLIPFFHIYGIVGICCATMKNKGKVVAMSRYDLRIFLNALIAHEVSFAPIVPPIILNLVKNPIVDEFDLSKLKLQSVMTAAAPLAPELLTAFEAKFPNVQVQEAYGLTEHSCITLTHGDPEKGQGIAKRNSVGFILPNLEVKFIDPDTGRSLPKNTSGELCVRSQCVMQGYFMNKEETDKTIDEQGWLHTGDIGYIDDDGDIFIVDRIKELIKYKGFQVAPAELEAILLTHPSVEDVAVVPLPDEEAGEIPAACVVINPKATEKEEDILNFVAANVAHYKKVRAVHFVDSIPKSLSGKIMRRLLRDKILSINKK

SEQ ID NO: 5898 - protein, 542 aa, Arabidopsis thaliana
MESQKQEDNEYIFRSLYPSVPIPDKLTLPEFVLQGVEEYTENVAFVEAVTGKAVTYGDVVRDTKRLAKALTSLGLRKGQVMVVVLPNVAEYGIIALGIMSAGGVFSGANPTALVSEIKKQVEASGARGIITDATNYEKVKSLGLPVIVLGEEKIEGAVNWKDLLEAGDKCGDTDNEEILQTDLCALPFSSGTTGLQKGVMLTHRNLIANLCSTLFGVRSEMIGQIVTLGLIPFFHIYGIVGICCATMKNKGKVVAMSRYDLRIFLNALIAHEVSFAPIVPPIILNLVKNPIVDEFDLSKLKLQSVMTAAAPLAPELLTAFEAKFPNVQVQEAYGLTEHSCITLTHGDPEKGQGIAKRNSVGFILPNLEVKFIDPDTGRSLPKNTSGELCVRSQCVMQGYFMNKEETDKTIDEQGWLHTGDIGYIDDDGDIFIVDRIKELIKYKGFQVAPAELEAILLTHPSVEDVAVVPLPDEEAGEIPAACVVINPKATEKEEDILNFVAANVAHYKKVRAVHFVDSIPKSLSGKIMRRLLRDKILSINKK

SEQ ID NO: 5899 - protein, 462 aa, Arabidopsis thaliana
MVVVLPNVAEYGIIALGIMSAGGVFSGANPTALVSEIKKQVEASGARGIITDATNYEKVKSLGLPVIVLGEEKIEGAVNWKDLLEAGDKCGDTDNEEILQTDLCALPFSSGTTGLQKGVMLTHRNLIANLCSTLFGVRSEMIGQIVTLGLIPFFHIYGIVGICCATMKNKGKVVAMSRYDLRIFLNALIAHEVSFAPIVPPIILNLVKNPIVDEFDLSKLKLQSVMTAAAPLAPELLTAFEAKFPNVQVQEAYGLTEHSCITLTHGDPEKGQGIAKRNSVGFILPNLEVKFIDPDTGRSLPKNTSGELCVRSQCVMQGYFMNKEETDKTIDEQGWLHTGDIGYIDDDGDIFIVDRIKELIKYKGFQVAPAELEAILLTHPSVEDVAVVPLPDEEAGEIPAACVVINPKATEKEEDILNFVAANVAHYKKVRAVHFVDSIPKSLSGKIMRRLLRDKILSINKK

SEQ ID NO: 5900 - DNA, 2411 bp, Arabidopsis thaliana
atcagacaatcacaaatctttctctttctctttctctctctaacacaatttagaacaaaagtttcttctttcttctctcccgagaggcctctcgctgttcattgaagttctcttagaattttctatcaccttggttgtgtaatttgcaaaacagacaacaatggttgagcgtgggaagaggactcacaatcgtttcagagacaacaacaatgacaacaaccggaatcaaaggagaagactttcttacgaatccgaagaaaaaaagatcgataacaaagacgatctcgttgttgtttacagaatcttatgcccaagtggtgtcatgggaagtgttataggcaaaagtggcaaagttattaacttgattaggcaagaaactagagctaggatcaaagttgttgatccttttccaggttgtagcgaaagagtcataacgatcttttgctcggtttcggagaagaaagacattgttgacattgagtatagtgaattggattactctgttcctttgtgttctgctcaagctgctcttcttaaagtccatgatgctattgtggcttctttagctactgctgctgagaacactaagattgatagagatgactttagagaatgtcgtcttttagttccgtctagtcagtgttctattgtcattggtaaatctggttcgattattaagaacattagaggtagaactagagctaacgttaaggttgtctctaaagatgtttctgatccttctcacacttgtgccatggattttgacaacattgttatgatatctggtgagactgaatccgtgaagaaggcacttttcgctgtttctgcaatcatgtacaaagtcagtcctcgagaacagattcctctggatacaactgtccaagaagttcccgctagtattataattccctctgatctgtctatctatccacaagccggtttatacccaagtcaggattctattttccaacatggggctaatgtttcatcgtttatcggtacactacctcagggttatggagaaaatgctgcaaatcctgtgccggttttttctgcttctgctcttcctgttgttcatggttttggtgggtcttccagatcagaaaagttggctataaaagttatttgctcttcttccaaaattggtcgtgttatcgggaaaggaggattaaccattaagggaataagacaagcaagcgggtctcatatcgaagttaatgactcgaggacaaatcatgatgatgactgtgttatcactgtcactgctacagagtctcctgatgatttgaagtctatggcggttgaagctgttcttctacttcaagagaaaattaatgatgaagacgaggacaaagttaaaatgcaactccttgtatcttctaaggtaataggatgcattatagggaaaagtggctcaatcataagtgaaatcaggaaaaggacaaaggccgatattcatatctcgaaaggaaataatacgcctaagtgtgctgatcccaatgatgagctcgttgagatatctggtgaagtaagcaatgtgagagatgctcttattcagatagttctgaggcttcgagatgatgttttaagggatagagagactggttccaggaatcaacctcctgcaagatctgagaataacaatttcttctcttcaagtagtagtaatactggtcttgcacttcctcaatctttcatgtcttctgttccgcaagttgcttctgtagatttcaataggagaccagaaaccgggagcagcatgagcatgcttccttcgagtggtggaatctatggttatggaagttttccggtgggcaatacaagttatggatccaactcctcttactcatccaatctatatggaggattgcctcagtctactactatggaggttcgaatcccagcaaatgcagtgggtaaagttatgggcagaggaggaggcaacttggacaacataagaaggatatcaggagccatgatagaaatttctgattccaaaaattcccatggcggtcgcgttgctctcatttccgggacatctgaacagaagcgtaccgcagagaacttgttccaagcttttatcatgtccacttgaataatttgctctgccccttaatccttttccatggaagtgtgttccatcaatctacctctcagtggatttctttgatcgggtttctcaggctttcctccttccatcaagctcatgtttagatatggttgcatctctcatcaaacatttcggtatctcatctcgactcagttacttttggtttctcgtgctagacattttatagtctttcaggaccattcttttcccctttccttgcgagctgttcgtactataactacttatctccgtgcaataaaacaaaatcgttcttatatcaatcaaactttgcttattctcc

SEQ ID NO: 5901 - protein, 644 aa, Arabidopsis thaliana
MVERGKRTHNRFRDNNNDNNRNQRRRLSYESEEKKIDNKDDLVVVYRILCPSGVMGSVIGKSGKVINLIRQETRARIKVVDPFPGCSERVITIFCSVSEKKDIVDIEYSELDYSVPLCSAQAALLKVHDAIVASLATAAENTKIDRDDFRECRLLVPSSQCSIVIGKSGSIIKNIRGRTRANVKVVSKDVSDPSHTCAMDFDNIVMISGETESVKKALFAVSAIMYKVSPREQIPLDTTVQEVPASIIIPSDLSIYPQAGLYPSQDSIFQHGANVSSFIGTLPQGYGENAANPVPVFSASALPVVHGFGGSSRSEKLAIKVICSSSKIGRVIGKGGLTIKGIRQASGSHIEVNDSRTNHDDDCVITVTATESPDDLKSMAVEAVLLLQEKINDEDEDKVKMQLLVSSKVIGCIIGKSGSIISEIRKRTKADIHISKGNNTPKCADPNDELVEISGEVSNVRDALIQIVLRLRDDVLRDRETGSRNQPPARSENNNFFSSSSSNTGLALPQSFMSSVPQVASVDFNRRPETGSSMSMLPSSGGIYGYGSFPVGNTSYGSNSSYSSNLYGGLPQSTTMEVRIPANAVGKVMGRGGGNLDNIRRISGAMIEISDSKNSHGGRVALISGTSEQKRTAENLFQAFIMST

SEQ ID NO: 5902 - protein, 590 aa, Arabidopsis thaliana
MGSVIGKSGKVINLIRQETRARIKVVDPFPGCSERVITIFCSVSEKKDIVDIEYSELDYSVPLCSAQAALLKVHDAIVASLATAAENTKIDRDDFRECRLLVPSSQCSIVIGKSGSIIKNIRGRTRANVKVVSKDVSDPSHTCAMDFDNIVMISGETESVKKALFAVSAIMYKVSPREQIPLDTTVQEVPASIIIPSDLSIYPQAGLYPSQDSIFQHGANVSSFIGTLPQGYGENAANPVPVFSASALPVVHGFGGSSRSEKLAIKVICSSSKIGRVIGKGGLTIKGIRQASGSHIEVNDSRTNHDDDCVITVTATESPDDLKSMAVEAVLLLQEKINDEDEDKVKMQLLVSSKVIGCIIGKSGSIISEIRKRTKADIHISKGNNTPKCADPNDELVEISGEVSNVRDALIQIVLRLRDDVLRDRETGSRNQPPARSENNNFFSSSSSNTGLALPQSFMSSVPQVASVDFNRRPETGSSMSMLPSSGGIYGYGSFPVGNTSYGSNSSYSSNLYGGLPQSTTMEVRIPANAVGKVMGRGGGNLDNIRRISGAMIEISDSKNSHGGRVALISGTSEQKRTAENLFQAFIMST

SEQ ID NO: 5903 - protein, 446 aa, Arabidopsis thaliana
MDFDNIVMISGETESVKKALFAVSAIMYKVSPREQIPLDTTVQEVPASIIIPSDLSIYPQAGLYPSQDSIFQHGANVSSFIGTLPQGYGENAANPVPVFSASALPVVHGFGGSSRSEKLAIKVICSSSKIGRVIGKGGLTIKGIRQASGSHIEVNDSRTNHDDDCVITVTATESPDDLKSMAVEAVLLLQEKINDEDEDKVKMQLLVSSKVIGCIIGKSGSIISEIRKRTKADIHISKGNNTPKCADPNDELVEISGEVSNVRDALIQIVLRLRDDVLRDRETGSRNQPPARSENNNFFSSSSSNTGLALPQSFMSSVPQVASVDFNRRPETGSSMSMLPSSGGIYGYGSFPVGNTSYGSNSSYSSNLYGGLPQSTTMEVRIPANAVGKVMGRGGGNLDNIRRISGAMIEISDSKNSHGGRVALISGTSEQKRTAENLFQAFIMST

SEQ ID NO: 5904 - DNA, 1233 bp, Arabidopsis thaliana
cacgagattttttattttaatatcacgctcgaatatacaattcggaatgtgcagatgttttttttgaaggcaatttagaaaaatagacaaaaatcgaacaaacatatatagaaatagagatctaaataaaaacatttattttatttcctcttggaaacaaggaaaaaatgaattggggtgggtgacgtggcagtcatacccttgccacacccttcctatacgcatataaacagcagctgcgaggagagagagatttcagagtattttctagggtttcgttttttttaaagatttagagaaaaaagtgagttattaagagattccaatcaaaatgagcggagacaacggcggtggtgagaggcgcaaaggctccgtcaagtggtttgatacccagaagggtttcggcttcatcactcctgacgacggtggcgacgatctcttcgttcaccagtcctccatcagatctgagggtttccgtagcctcgctgccgaagaagccgtagagttcgaggttgagatcgacaacaacaaccgtcccaaggccatcgatgtttctggacccgacggcgctcccgtccaaggaaacagcggtggtggttcatctggcggacgcggcggtttcggtggaggaagaggaggtggacgcggatctggaggtggatacggcggtggcggtggtggatacggaggaagaggaggtggtggtcgaggaggcagcgactgctacaagtgtggtgagcccggtcacatggcgagagactgttctgaaggcggtggaggttacggaggaggcggcggtggctacggaggtggaggcggatacggcggaggaggtggtggttacggaggtggtggccgtggaggtggtggcggcgggggaagctgctacagctgtggcgagtcgggacatttcgccagggattgcaccagcggtggacgttaaaaccaacgccggttacgcggtggagaagagtgagttggttatctcacaagtgatcggttctttctcccgccgccttctatctctctattatccactttttgcttattatgatggatctctatctttgttagttggttttttcttgatggtttcggattaggactcttcttttggttttgctacttatggttggttttatttatggtacttgtgatatgggtgaaatgctctacttgttgctctgtttcaagtgttcataatatgcgaacaaatattctgggttttgtttc

SEQ ID NO: 5905 - protein, 203 aa, Arabidopsis thaliana
MSGDNGGGERRKGSVKWFDTQKGFGFITPDDGGDDLFVHQSSIRSEGFRSLAAEEAVEFEVEIDNNNRPKAIDVSGPDGAPVQGNSGGGSSGGRGGFGGGRGGGRGSGGGYGGGGGGYGGRGGGGRGGSDCYKCGEPGHMARDCSEGGGGYGGGGGGYGGGGGYGGGGGGYGGGGRGGGGGGGSCYSCGESGHFARDCTSGGR

SEQ ID NO: 5906 - protein, 184 aa, Arabidopsis thaliana
MFLDPTALPSKETAVVVHLADAAVSVEEEEVDADLEVDTAVAVVDTEEEEVVVEEAATATSVVSPVTWRETVLKAVEVTEEAAVATEVEADTAEEVVVTEVVAVEVVAAGEAATAVASRDISPGIAPAVDVKTNAGYAVEKSELVISQVIGSFSRRLLSLYYPLFAYYDGSLSLLVGFFLMVSD

SEQ ID NO: 5907 - DNA, 1152 bp, Arabidopsis thaliana
attattttatttatctcaccaaggaaaacaaaacacaaaacaaacaaacaaacaaacccataaatcaagatctctgttttcagacagattattatcggaacaaaatgtcatcatcaggatccgacaaagagagagagacttttgtctatatggctaagctctccgaacaagccgagcgatacgacgagatggtggagacgatgaagaaagtggcgagggttaatagcgagctgactgtggaagagaggaatctgttgtcggttggttacaagaacgtgatcggagcaagaagagcttcgtggaggataatgtcgtccatcgagcagaaagaagagtctaaaggcaatgaatcaaacgtgaaacaaatcaagggttatcgccaaaaggtagaagatgagctcgctaacatttgccaagacattctcaccatcattgatcagcatctcatccctcacgctacctcaggggaagctaccgtcttctactacaagatgaaaggagattattaccgttacttggctgagtttaagaccgagcaagagaggaaggaagctgctgaacagtctctcaaaggctatgaggctgcaacacaagctgcaagcactgagcttccttcgacccatccaattcgtcttggccttgctcttaacttctctgttttctactatgagatcatgaactctcctgaaagagcttgccatttggctaagcaagccttcgatgaggcgattgcagagttagatactctaagtgaggagtcgtacaaggacagcactttgatcatgcagctcctgagagacaacctcaccctctggacttctgatcttcctgaagatggaggagaagacaacatcaagactgaagaatccaagcaagaacaggccaagcctgccgatgccactgagaactgatcaaagggcttggaagttgaatgagatttagattcgatgtccagaagggggaggcaaattcctttaaattccatagcttggtttcatcaggaagatgagatcagagacaattgaattcaatcctatattgtttcttttttgtattacttttcgtcttctttattttgttctcaattttcatgtcatcaagtattttatgttacgcaattttattatgatttgatcagcatatgcttttgcc

SEQ ID NO: 5908 - protein, 302 aa, Arabidopsis thaliana
YFIYLTKENKTQNKQTNKPINQDLCFQTDYYRNKMSSSGSDKERETFVYMAKLSEQAERYDEMVETMKKVARVNSELTVEERNLLSVGYKNVIGARRASWRIMSSIEQKEESKGNESNVKQIKGYRQKVEDELANICQDILTIIDQHLIPHATSGEATVFYYKMKGDYYRYLAEFKTEQERKEAAEQSLKGYEAATQAASTELPSTHPIRLGLALNFSVFYYEIMNSPERACHLAKQAFDEAIAELDTLSEESYKDSTLIMQLLRDNLTLWTSDLPEDGGEDNIKTEESKQEQAKPADATEN

SEQ ID NO: 5909 - protein, 268 aa, Arabidopsis thaliana
MSSSGSDKERETFVYMAKLSEQAERYDEMVETMKKVARVNSELTVEERNLLSVGYKNVIGARRASWRIMSSIEQKEESKGNESNVKQIKGYRQKVEDELANICQDILTIIDQHLIPHATSGEATVFYYKMKGDYYRYLAEFKTEQERKEAAEQSLKGYEAATQAASTELPSTHPIRLGLALNFSVFYYEIMNSPERACHLAKQAFDEAIAELDTLSEESYKDSTLIMQLLRDNLTLWTSDLPEDGGEDNIKTEESKQEQAKPADATEN

SEQ ID NO: 5910 - protein, 253 aa, Arabidopsis thaliana
MAKLSEQAERYDEMVETMKKVARVNSELTVEERNLLSVGYKNVIGARRASWRIMSSIEQKEESKGNESNVKQIKGYRQKVEDELANICQDILTIIDQHLIPHATSGEATVFYYKMKGDYYRYLAEFKTEQERKEAAEQSLKGYEAATQAASTELPSTHPIRLGLALNFSVFYYEIMNSPERACHLAKQAFDEAIAELDTLSEESYKDSTLIMQLLRDNLTLWTSDLPEDGGEDNIKTEESKQEQAKPADATEN

SEQ ID NO: 5911 - DNA, 1429 bp, Arabidopsis thaliana
tggtaataattaaaagctctctctctctatctcccacgatttcctttttccgccggaagaagaagcaaaaaaaaaagaaatcgaatctctctttcaagtgttcgatttaaagcaaaagtgtaattataatcggaagcgagatcttgagaaatggtgggatgacggcggagggagatggcgaggggaggaggagaatggaccggagggatcgccggaaccggagttctctctttcaaaagaatcactctacttgtttgctttttcaacattctcattgctctctttgttcttcgctttctctatgcttcttctctccacatctattccaataacgataatgttgttaagtacacagctgatgagattaggaaaatggaggaatctattcggattcgaagatcgaaggaacctactctgattcttcaattggtgaagaagctcaagcatgaggtttccactgcagaatctagtactgaactatctcctaatgttaaacacaaactagttgatgagatcctccagcgtttgaaaagctttgaggacaaatctaatgttactcagcttagagaagttgtagaaacgtggcgcaatgagaagctggaggaagctaaagagctaattcaagggcaaaatggagtaaattccacccttatagtggaggaagcagggatgcttgtaagagctttggagttggagtgggatgtgctgtctgaagaaatcggtttctggttacctgctgaggttaccaatgtagaacatgatgataaacctgaaggagaggaagagcctgaggaaatattggcaggcagaccagtgccagctgtatgtaatgcagagcttcacacagattatggtggtgctgcagtgagatgggggcttacacatcataaagagagtgcagctgattgttgccaggcttgcttagaccaggcaaagcgtgcgaaacctggagaaacgagatgcaatatttgggtttattgcccatctgagtttggttgtttctctccagatatttatgagcataaacatcaggagtgttggcttaaatacgcagagaagccaaaacagaatttcaaagacagatattctgagacatacagaaacaaccacccaaaagcgccatctatcgttccatgggtttcaggtgttgtaacggcttgagcaaaacccatgtggacagattgatgggagaaataggagatagttttggtttttttttctcagctgtgttaccattttcagagtcttgaaaattggagtaccgtaccaaagatgcaaacatcttttggccagatgtatacgagggaatagaatgttttgttgtttttgttgattggctttaaacacttgtggtcgaagtcgaatatggtgtaaggaatcatgtttttgttcaagcttgttcgattctatagtggatgattaaaaagct

SEQ ID NO: 5912 - protein, 328 aa, Arabidopsis thaliana
MARGGGEWTGGIAGTGVLSFKRITLLVCFFNILIALFVLRFLYASSLHIYSNNDNVVKYTADEIRKMEESIRIRRSKEPTLILQLVKKLKHEVSTAESSTELSPNVKHKLVDEILQRLKSFEDKSNVTQLREVVETWRNEKLEEAKELIQGQNGVNSTLIVEEAGMLVRALELEWDVLSEEIGFWLPAEVTNVEHDDKPEGEEEPEEILAGRPVPAVCNAELHTDYGGAAVRWGLTHHKESAADCCQACLDQAKRAKPGETRCNIWVYCPSEFGCFSPDIYEHKHQECWLKYAEKPKQNFKDRYSETYRNNHPKAPSIVPWVSGVVTA

SEQ ID NO: 5913 - protein, 262 aa, Arabidopsis thaliana
MEESIRIRRSKEPTLILQLVKKLKHEVSTAESSTELSPNVKHKLVDEILQRLKSFEDKSNVTQLREVVETWRNEKLEEAKELIQGQNGVNSTLIVEEAGMLVRALELEWDVLSEEIGFWLPAEVTNVEHDDKPEGEEEPEEILAGRPVPAVCNAELHTDYGGAAVRWGLTHHKESAADCCQACLDQAKRAKPGETRCNIWVYCPSEFGCFSPDIYEHKHQECWLKYAEKPKQNFKDRYSETYRNNHPKAPSIVPWVSGVVTA

SEQ ID NO: 5914 - DNA, 2066 bp, Arabidopsis thaliana
ttccaaattcctctgttttcttcttttaaaagcctcctcttcttcctcttctctctcctcacaactcaaaactctctccatctctcttctaaaatcagacaagaaagatggctcaagaggaagtacagaaatcggctgatgtcgctgctgctccggtggtgaaggagaaacctattaccgataaggaggttactattcctacccctgtggcagagaaagaggaagttgctgctcctgtctctgatgagaaggcggttccagagaaggaggtgactccggagaaggaagccccagcggcggaagcggagaaatctgtttcggtgaaggaggaagagacggttgttgtagctgagaaggttgttgttttaactgctgaggaagttcagaagaaggcacttgaggagtttaaggagcttgtaagggaggctttgaacaaacgtgaattcactgctccggtgacgccggttaaggaagagaaaacagaggagaagaaaacagaggaggaaactaaagaggaagagaaaacagaggagaagaaagaagagacaacgactgaggttaaggttgaagaagagaaaccggcggttccagcggcggaggaggagaaatcatcagaggctgctccggttgagaccaaatctgaggagaaacctgaagagaaagcagaggtaacaaccgagaaagcatccagtgccgaagaagatggaaccaagaccgtggaagcaatcgaagaatctatcgtctctgtttcaccacctgaatccgccgtagcacctgtcgtggtagagactgtcgccgttgctgaggcagagccagtggagccggaagaagtctcgatctggggagttccactactccaagacgagagatctgacgtgatcctcacgaaattcctccgtgcaagagactttaaggtcaaagaagctttaaccatgcttaaaaacaccgtccagtggcgtaaagaaaacaaaatcgacgaactcgttgaatccggagaagaagtgagtgagttcgagaagatggtgtttgctcacggtgttgacaaagaaggacacgtcgtgatctacagttcttacggtgagtttcagaacaaggagcttttctccgacaaggagaagcttaacaagttcctcagctggaggattcagctacaagagaagtgtgtgagagctattgatttcagcaaccctgaagcgaagtcttcgtttgtgttcgtcagcgacttcaggaacgctccaggacttggtaaaagagccttgtggcaattcatcagacgcgctgttaaacaattcgaggacaattatcctgaattcgccgctaaagagctattcatcaatgtcccatggtggtacattccatactacaaaacattcggatctatcatcacatccccaaggactaggagcaagatggtccttgctggtccatccaaatctgccgatactattttcaaatacatagctcctgaacaagttcccgttaaatacggtggacttagcaaagatactcctttgaccgaagaaaccataacggaagccatcgttaaaccggcagcaaactacactattgaattgcctgcttctgaggcttgcacgctttcatgggagcttagggttttgggtgctgatgtgagctacggagctcagtttgagccaaccaccgaaggaagctatgctgtgatcgtctctaagacacggaagattggatcaaccgatgaaccggtgataaccgattcttttaaggtgggtgaaccgggaaagattgtgatcacaatcgacaaccagacttccaagaagaagaaagtgctctacaggttcaaaactcaataaaaggtctgatctttgaaatccaaatccaaggaagaagcaaaaaaaatgttattttgttatttgggggaaacaaattttaattaattaatttagtttgttatttattatgtaattttgaaatctcaagatgtggttgtgtttttgctttgttttggtattgggggttgttttcgtgtgtggagaatatgtgattaaaattcaaaagaaagtaaagaacactttgtttcatgatttctt

SEQ ID NO: 5915 - protein, 573 aa, Arabidopsis thaliana
MAQEEVQKSADVAAAPVVKEKPITDKEVTIPTPVAEKEEVAAPVSDEKAVPEKEVTPEKEAPAAEAEKSVSVKEEETVVVAEKVVVLTAEEVQKKALEEFKELVREALNKREFTAPVTPVKEEKTEEKKTEEETKEEEKTEEKKEETTTEVKVEEEKPAVPAAEEEKSSEAAPVETKSEEKPEEKAEVTTEKASSAEEDGTKTVEAIEESIVSVSPPESAVAPVVVETVAVAEAEPVEPEEVSIWGVPLLQDERSDVILTKFLRARDFKVKEALTMLKNTVQWRKENKIDELVESGEEVSEFEKMVFAHGVDKEGHVVIYSSYGEFQNKELFSDKEKLNKFLSWRIQLQEKCVRAIDFSNPEAKSSFVFVSDFRNAPGLGKRALWQFIRRAVKQFEDNYPEFAAKELFINVPWWYIPYYKTFGSIITSPRTRSKMVLAGPSKSADTIFKYIAPEQVPVKYGGLSKDTPLTEETITEAIVKPAANYTIELPASEACTLSWELRVLGADVSYGAQFEPTTEGSYAVIVSKTRKIGSTDEPVITDSFKVGEPGKIVITIDNQTSKKKKVLYRFKTQ

SEQ ID NO: 5916 - protein, 298 aa, Arabidopsis thaliana
MLKNTVQWRKENKIDELVESGEEVSEFEKMVFAHGVDKEGHVVIYSSYGEFQNKELFSDKEKLNKFLSWRIQLQEKCVRAIDFSNPEAKSSFVFVSDFRNAPGLGKRALWQFIRRAVKQFEDNYPEFAAKELFINVPWWYIPYYKTFGSIITSPRTRSKMVLAGPSKSADTIFKYIAPEQVPVKYGGLSKDTPLTEETITEAIVKPAANYTIELPASEACTLSWELRVLGADVSYGAQFEPTTEGSYAVIVSKTRKIGSTDEPVITDSFKVGEPGKIVITIDNQTSKKKKVLYRFKTQ

SEQ ID NO: 5917 - DNA, 440 bp, Arabidopsis thaliana
accgttaaattcttctggaactggagtccactgtttaagcttcactgtctctgaatcggcaaagctttagaagaaaatggcatcaggaggtaaagccaagtacataatcggtgctctcatcggttcttacggaatctcatacatcttcgacaaagttatctctgataataagatctttggagggactactccaggaactgtctctaacaaagaatggtgggcagcaacggatgagaaattccaagcatggccaagaaccgctggtcctcccgttgttatgaatcccattagccgtcagaatttcatcgtcaagactcgtccggaatgagaaaataataagttcaatgctttgattttcagaataagatgaacgatgacgatgttttctaaatccgagcttgtactaaataacaatacattacaacagggtttgcggaact

SEQ ID NO: 5918 - protein, 83 aa, Arabidopsis thaliana
MASGGKAKYIIGALIGSYGISYIFDKVISDNKIFGGTTPGTVSNKEWWAATDEKFQAWPRTAGPPVVMNPISRQNFIVKTRPE

SEQ ID NO: 5919 - DNA, 2918 bp, Arabidopsis thaliana
atcattcttttgtttactgggtctctctctctctagagaaactatcacaccgttttgattcttccgctaaactctcgccgtcggataaacttttcgccggcgaccctttaaagtagaagaccttatctatactcgatttctttcgtttgagtgtcttagttaaaaagttactccctttctgggaattctctggtttcggttcttgcaattttttcggtggttgtttggtagctgtgaaaatttctgtgtctgggtttgtttgtttctgtttgtgtaattgctaactagatttctgggtttggtttgatttattgaaagttggaagggtaataaaagagacgaaaaaaaaagagagaggaaagtgtttgatgttttgcatctgattctgaatcgattaatctccaaagtcatcatttttattaggaataaagtttggaagattacttgctttccttggagtgagatttttctgggttttctagggttttattttgattgaatttaatgatggcggagtctactggggtggatcgtgggattcagagcttgatagctgctagaaagtctttaaaattgagtcttgagaaatcaaaagccattgggttagctttgggtaaaactggtcctaggtttgatgagattgagcagagattgccgttgcttgaagctgcggttaggccgatacgagctgatggagaagctctcaaggatgttggtggtaacattaaccgagctgttggtcctgcagctgctgtgcttaaggtgttcgatgctgttcatggacttgagaagtctttgttatcagatcccaagaacgatctttcgagttatttatcggtgttgaagcggttagaggaagctttgaagtttctaggggagaattgtggtttagctatccagtggttggaagatatagttgagtatcttgatgatcaccatgtcgctgatgagaagtatctttcgaatttaaagaaatctttgagagggcttagtgaatttcataatgaccgtggaggaggagaagagaaagagagatctcaattgcgtcttgatggcgggcttaggaatgctgctttagataagctggaaaacgagttcaggaggctcttgaaggataacagtgtaccacttccaatggcgtctccatcatcactcggtgatcaggcttgcattgcaccgtctcagttgcctgttactgtaattcataaactgcaagccattcttgggagactcagagctaataacagactcgacaagtgcatttcaatatacgttgaagtgaggagcttgaatgttagagctagtcttcaagcacttgacttagattatctagatatctcggtttctgagttcaacgatgtgcagagcatagaagggtatatagctcagtggggtaatcatttagagtttgcggttaagcatctgttcgaagcagagttcaagctttgcaacgatgtctttgagagacttggtttgaatgtttggatggattgctttttaaagattgctgctcaggccggtatgctcgcgttccttcagtttgggaaaactgtgactgatagcaagaaagatccaatcaagcttctgaagctgttagatatctttacgtcgttgaacaaactgagagcagatttcaaccgcctctttggtggagcagcctgtattgagatccaaaacttcacaagggatctcatcaaaaggataatcgatggtgcagcggaaatcttctgggagcttctggttcaggtagagattcagaaacaaaccccgcctcctagcgatggtggtgttcctagattagtcagttttgtaactgattactgcaataaacttattggagataagtacaagtcaacactaactcaggttctgctcatacataagagctggagatcagaaaggttccaagataatcagcttatggttgaggttttaagaataatcaaagccattgagcagaatctggatgtatggatgaaagcgtatccggatcaaacgcttgcgcatttcttcggtatgaataatcactggcatttatacaagaacttaaagggtacaaatattggggatcatttaggagattcgtggctgaaagaacatgatcagtacaaagagtattacgccactgtcttccttagagacagttggggtaagcttccaagccacttgagccgagaagggctgatacttttctcgggtggacatgccacagctcgtgatcttgtcaagaagagattgaaagcattcaatgatgcgtttgatgagatgtataagaagcaagcatcatgggtcttaccagagaaagatttaagggatagagtttgccagcagatagttcaggctattgtgccggtttacagaagctatatgcaaaactatgggccattggttgagaaagacgcgagttcaagcaagtatgtgagatacactgtggtagctttggaaaagatactcagttctctttacatgcctaagcccatgagatatggaagcttcaaaggaacaccgccaagtgagaaattcaagaatgatgttgaccttaggcgtactacttctgcagttgtctgattgaagccatgttctgttctcgaatgttgtattaaaatgtgtccacattggtatgatctccatctcctggaagcagaggtattgttacacgtatataaatactgtcaatcaggtatagcttttagtcattggtcaagtccctttagctcattagtttcataagacttcatgttagggaccaagcgggtttagattattctatttaatgtattaatctgaagaacaggattataaaatgtgggattcctataatatcgaaagaaaaattgtccctataaatcttcttgttcttagtgttgtgctacatttgtaacttttattaattttaagacaataaaggaaaattcaac

SEQ ID NO: 5920 - protein, 687 aa, Arabidopsis thaliana
MMAESTGVDRGIQSLIAARKSLKLSLEKSKAIGLALGKTGPRFDEIEQRLPLLEAAVRPIRADGEALKDVGGNINRAVGPAAAVLKVFDAVHGLEKSLLSDPKNDLSSYLSVLKRLEEALKFLGENCGLAIQWLEDIVEYLDDHHVADEKYLSNLKKSLRGLSEFHNDRGGGEEKERSQLRLDGGLRNAALDKLENEFRRLLKDNSVPLPMASPSSLGDQACIAPSQLPVTVIHKLQAILGRLRANNRLDKCISIYVEVRSLNVRASLQALDLDYLDISVSEFNDVQSIEGYIAQWGNHLEFAVKHLFEAEFKLCNDVFERLGLNVWMDCFLKIAAQAGMLAFLQFGKTVTDSKKDPIKLLKLLDIFTSLNKLRADFNRLFGGAACIEIQNFTRDLIKRIIDGAAEIFWELLVQVEIQKQTPPPSDGGVPRLVSFVTDYCNKLIGDKYKSTLTQVLLIHKSWRSERFQDNQLMVEVLRIIKAIEQNLDVWMKAYPDQTLAHFFGMNNHWHLYKNLKGTNIGDHLGDSWLKEHDQYKEYYATVFLRDSWGKLPSHLSREGLILFSGGHATARDLVKKRLKAFNDAFDEMYKKQASWVLPEKDLRDRVCQQIVQAIVPVYRSYMQNYGPLVEKDASSSKYVRYTVVALEKILSSLYMPKPMRYGSFKGTPPSEKFKNDVDLRRTTSAVV

SEQ ID NO: 5921 - protein, 686 aa, Arabidopsis thaliana
MAESTGVDRGIQSLIAARKSLKLSLEKSKAIGLALGKTGPRFDEIEQRLPLLEAAVRPIRADGEALKDVGGNINRAVGPAAAVLKVFDAVHGLEKSLLSDPKNDLSSYLSVLKRLEEALKFLGENCGLAIQWLEDIVEYLDDHHVADEKYLSNLKKSLRGLSEFHNDRGGGEEKERSQLRLDGGLRNAALDKLENEFRRLLKDNSVPLPMASPSSLGDQACIAPSQLPVTVIHKLQAILGRLRANNRLDKCISIYVEVRSLNVRASLQALDLDYLDISVSEFNDVQSIEGYIAQWGNHLEFAVKHLFEAEFKLCNDVFERLGLNVWMDCFLKIAAQAGMLAFLQFGKTVTDSKKDPIKLLKLLDIFTSLNKLRADFNRLFGGAACIEIQNFTRDLIKRIIDGAAEIFWELLVQVEIQKQTPPPSDGGVPRLVSFVTDYCNKLIGDKYKSTLTQVLLIHKSWRSERFQDNQLMVEVLRIIKAIEQNLDVWMKAYPDQTLAHFFGMNNHWHLYKNLKGTNIGDHLGDSWLKEHDQYKEYYATVFLRDSWGKLPSHLSREGLILFSGGHATARDLVKKRLKAFNDAFDEMYKKQASWVLPEKDLRDRVCQQIVQAIVPVYRSYMQNYGPLVEKDASSSKYVRYTVVALEKILSSLYMPKPMRYGSFKGTPPSEKFKNDVDLRRTTSAVV

SEQ ID NO: 5922 - protein, 477 aa, Arabidopsis thaliana
MASPSSLGDQACIAPSQLPVTVIHKLQAILGRLRANNRLDKCISIYVEVRSLNVRASLQALDLDYLDISVSEFNDVQSIEGYIAQWGNHLEFAVKHLFEAEFKLCNDVFERLGLNVWMDCFLKIAAQAGMLAFLQFGKTVTDSKKDPIKLLKLLDIFTSLNKLRADFNRLFGGAACIEIQNFTRDLIKRIIDGAAEIFWELLVQVEIQKQTPPPSDGGVPRLVSFVTDYCNKLIGDKYKSTLTQVLLIHKSWRSERFQDNQLMVEVLRIIKAIEQNLDVWMKAYPDQTLAHFFGMNNHWHLYKNLKGTNIGDHLGDSWLKEHDQYKEYYATVFLRDSWGKLPSHLSREGLILFSGGHATARDLVKKRLKAFNDAFDEMYKKQASWVLPEKDLRDRVCQQIVQAIVPVYRSYMQNYGPLVEKDASSSKYVRYTVVALEKILSSLYMPKPMRYGSFKGTPPSEKFKNDVDLRRTTSAVV

SEQ ID NO: 5923 - DNA, 474 bp, Arabidopsis thaliana
aatatagaatataaccatattccggacatgaagatcgtgacattggtactcgtcgtcttcgtcatactttcgacatcattcccggctgccatcaaagccgaagacacgggagatacaggaaatgtgggagtgacatgtgacgcaaggcagcttcagccttgccttgccgcgattacgggaggaggacaaccctcaggtgcatgttgtgcaaagcttacagagcaacagtcatgcctctgtggtttcgctaagaaccctgcgttcgcacagtacattagctctccaaacgctcgcaaagtgctccttgcttgcaatgttgcttatcccacttgttgaaacttatctagagattttataaataaataaacgaaaggaaataaattacattatatcaaacgttatgatacaattcaaccgtttgtgttaatgtactggcttacatggttaaataaagtttattttcttggttgtttt

SEQ ID NO: 5924 - protein, 111 aa, Arabidopsis thaliana
NIEYNHIPDMKIVTLVLVVFVILSTSFPAAIKAEDTGDTGNVGVTCDARQLQPCLAAITGGGQPSGACCAKLTEQQSCLCGFAKNPAFAQYISSPNARKVLLACNVAYPTC

SEQ ID NO: 5925 - protein, 102 aa, Arabidopsis thaliana
MKIVTLVLVVFVILSTSFPAAIKAEDTGDTGNVGVTCDARQLQPCLAAITGGGQPSGACCAKLTEQQSCLCGFAKNPAFAQYISSPNARKVLLACNVAYPTC

SEQ ID NO: 5926 - DNA, 1828 bp, Arabidopsis thaliana
tggcacacacttctctctctctctctctctgcctcctttcggattcaaatctcagatctagctcaaccatggcgttgctcgtcgagaagacctcaagtggccgtgaatacaaggtcaaagacatgtctcaagccgatttcggtcgtctcgaactcgagctcgccgaagttgagatgcctggactcatggcttgtcgtaccgaattcggaccttctcagccattcaaaggcgctagaatcaccggatctcttcacatgaccatccaaaccgccgtactcatcgaaaccctaactgctctcggtgctgaagtcagatggtgttcctgcaacatcttttccactcaagaccacgcgcgccgcagccatcgctcgtgactccgccgctgttttcgcctggaaaggtgagactcttcaggagtactggtggtgtaccgagcgtgctctagattggggtccaggtggtggtcctgatctgattgttgatgatggtggtgacgctactcttttgattcatgagggtgttaaagctgaggagatctttgagaagactggtcaagttcctgatcctacttctactgataaccctgagtttcagatcgtgttgtctattatcaaggaaggtcttcaagttgatcctaagaagtaccacaagatgaaggagagacttgttggtgtctctgaggaaactaccactggtgttaagaggctttaccagatgcagcaaaatggaactcttttgttccctgccattaacgttaacgactctgtcaccaagagcaagttcgacaacttgtatggttgccgtcactcactccctgatggtctcatgagggccactgatgtcatgatcgctggaaaggttgctgttatctgtggatatggtgatgttggaaagggttgtgctgctgccatgaagactgctggtgctagagtcattgtgactgagattgatcccatctgtgcccttcaagctttgatggaaggacttcaggttcttacccttgaggatgttgtctcagaagctgatatctttgtcaccaccaccggtaacaaagacatcatcatggtcgaccacatgaggaagatgaagaacaacgctattgtgtgcaacattggtcactttgacaatgagattgacatgcttggacttgagacttaccctggtgtgaagcgtatcaccatcaagccacagactgacaggtgggtgttcccagagaccaaggctggaatcattgtcttggctgagggtcgtctgatgaacttgggttgtgccactggtcacccaagtttcgtgatgtcttgctctttcaccaaccaggtgattgcccagctcgagctctggaacgagaaagcaagcggaaagtacgagaagaaggtgtacgttcttcccaagcatttggatgagaaggttgcattacttcacttgggcaagcttggagccaggcttacaaagctgtcaaaggaccaatctgactacgtcagcattccaattgagggaccatacaagcctcctcactacaggtactgagagagagagagagagtcgacaaagcggttcaggttcggatctacttgtggttttgtgttgggttgtggtggaagagtggaacagtttgagatattggtcttctgatgaagttgaccaaatatcagtattaataagggttattggcttttgaaggttgtgcttgttttctccatttttcatgaaacttaaattagtttttggtttagtttccctcttgattttattttgtgtgttctgtttagcgttgtactcttcaaacaaatgagaaaccaaaaaaaaaggggaaacttgttttcggcat

SEQ ID NO: 5927 - protein, 291 aa, Arabidopsis thaliana
MKERLVGVSEETTTGVKRLYQMQQNGTLLFPAINVNDSVTKSKFDNLYGCRHSLPDGLMRATDVMIAGKVAVICGYGDVGKGCAAAMKTAGARVIVTEIDPICALQALMEGLQVLTLEDVVSEADIFVTTTGNKDIIMVDHMRKMKNNAIVCNIGHFDNEIDMLGLETYPGVKRITIKPQTDRWVFPETKAGIIVLAEGRLMNLGCATGHPSFVMSCSFTNQVIAQLELWNEKASGKYEKKVYVLPKHLDEKVALLHLGKLGARLTKLSKDQSDYVSIPIEGPYKPPHYRY

SEQ ID NO: 5928 - protein, 270 aa, Arabidopsis thaliana
MQQNGTLLFPAINVNDSVTKSKFDNLYGCRHSLPDGLMRATDVMIAGKVAVICGYGDVGKGCAAAMKTAGARVIVTEIDPICALQALMEGLQVLTLEDVVSEADIFVTTTGNKDIIMVDHMRKMKNNAIVCNIGHFDNEIDMLGLETYPGVKRITIKPQTDRWVFPETKAGIIVLAEGRLMNLGCATGHPSFVMSCSFTNQVIAQLELWNEKASGKYEKKVYVLPKHLDEKVALLHLGKLGARLTKLSKDQSDYVSIPIEGPYKPPHYRY

SEQ ID NO: 5929 - protein, 233 aa, Arabidopsis thaliana
MRATDVMIAGKVAVICGYGDVGKGCAAAMKTAGARVIVTEIDPICALQALMEGLQVLTLEDVVSEADIFVTTTGNKDIIMVDHMRKMKNNAIVCNIGHFDNEIDMLGLETYPGVKRITIKPQTDRWVFPETKAGIIVLAEGRLMNLGCATGHPSFVMSCSFTNQVIAQLELWNEKASGKYEKKVYVLPKHLDEKVALLHLGKLGARLTKLSKDQSDYVSIPIEGPYKPPHYRY

SEQ ID NO: 5930 - DNA, 1499 bp, Arabidopsis thaliana
aggaaagctggtacaaaccaaatttcattttttttcttttaattaattttggccaaaaagaaaaaaaaatcgaaactttttttgtgtaaatggaaggagaaactcatcaatcggagccgttacctttagcatctggagattccgatgaagggatcagtgctgcgattgaggcggagcttgctgagttagctgctggagattcaagcggcggtggtggttgcggcggcggaggaggagggattaggagtaaagtcaaaggaccttggtctacggaggaagacgcggttcttacgaagcttgtgaggaaactaggaccgaggaattggagtttgatcgctcgtggaatccctggtcgttctggtaaatcttgtcgattgcgttggtgtaatcagcttgacccttgtctcaagcgtaaacctttctctgatgaggaagatcgtatgataatttctgctcacgcggttcacggaaacaaatgggcagtgattgcgaaactgttaactggaagaacagataacgctatcaagaaccattggaactcaactcttagacgtaaatacgcagatctatggaataatggtcaatggatggctaattcagttactaccgcttccgtcaaaaacgaaaatgtcgatgaaacaactaatcctccatcctcaaaacaacagttgcctcaaggagatatcaattcctccccgccaaagcctccacaagtgagtgatgttgtaatggaagaggcagctaatgaacctcaagaacctcaagaacaacaagaacaagctccaccggtagtgagtaacgttccaacagaaaataacgtgtttcgccccgtggctcgcgttggtgcattcagtatctataacccaaccagccagaaaaatggttacagagactacaatatagttccatgtgagggaccgttgattcaagcagctaaacccgattcattggctggtaaatttctacaatctctttgtgatgaacctcaaatcccgtcaaaatgtggtcacggctgctctactcttccagctgaaactaagttctcacgtaactcggtgttgggacctgagtttgtggattatgaagagccttctgcggttttcaaccaagaactaatatctatagcaaccgatttgaacaacattgcatggataaagagtggccttgacaatgctgttgtcagagaagcagaacagagtttgaagatggataattacaattataatgatcctcgaatcaagtttactggaatgatgcctagacaagatttcttctgtgcaagaagctgaaactcaaaagtagggcttgagattcatcaaccccttttttttcttttgattctttgcgctttgacgcatatagatgatgaataagtaccagactggtacttatggatgttgttgtttctgacattttgattcggatttggtggaagaaagatagaaaacagagtatgtatcgtgtctcttattatataaaatcctagatcataaatatcg

SEQ ID NO: 5931 - protein, 399 aa, Arabidopsis thaliana
MEGETHQSEPLPLASGDSDEGISAAIEAELAELAAGDSSGGGGCGGGGGGIRSKVKGPWSTEEDAVLTKLVRKLGPRNWSLIARGIPGRSGKSCRLRWCNQLDPCLKRKPFSDEEDRMIISAHAVHGNKWAVIAKLLTGRTDNAIKNHWNSTLRRKYADLWNNGQWMANSVTTASVKNENVDETTNPPSSKQQLPQGDINSSPPKPPQVSDVVMEEAANEPQEPQEQQEQAPPVVSNVPTENNVFRPVARVGAFSIYNPTSQKNGYRDYNIVPCEGPLIQAAKPDSLAGKFLQSLCDEPQIPSKCGHGCSTLPAETKFSRNSVLGPEFVDYEEPSAVFNQELISIATDLNNIAWIKSGLDNAVVREAEQSLKMDNYNYNDPRIKFTGMMPRQDFFCARS

SEQ ID NO: 5932 - protein, 282 aa, Arabidopsis thaliana
MIISAHAVHGNKWAVIAKLLTGRTDNAIKNHWNSTLRRKYADLWNNGQWMANSVTTASVKNENVDETTNPPSSKQQLPQGDINSSPPKPPQVSDVVMEEAANEPQEPQEQQEQAPPVVSNVPTENNVFRPVARVGAFSIYNPTSQKNGYRDYNIVPCEGPLIQAAKPDSLAGKFLQSLCDEPQIPSKCGHGCSTLPAETKFSRNSVLGPEFVDYEEPSAVFNQELISIATDLNNIAWIKSGLDNAVVREAEQSLKMDNYNYNDPRIKFTGMMPRQDFFCARS

SEQ ID NO: 5933 - protein, 233 aa, Arabidopsis thaliana
MANSVTTASVKNENVDETTNPPSSKQQLPQGDINSSPPKPPQVSDVVMEEAANEPQEPQEQQEQAPPVVSNVPTENNVFRPVARVGAFSIYNPTSQKNGYRDYNIVPCEGPLIQAAKPDSLAGKFLQSLCDEPQIPSKCGHGCSTLPAETKFSRNSVLGPEFVDYEEPSAVFNQELISIATDLNNIAWIKSGLDNAVVREAEQSLKMDNYNYNDPRIKFTGMMPRQDFFCARS

SEQ ID NO: 5934 - DNA, 1026 bp, Arabidopsis thaliana
agaaactgatttgataaaaaaaaatatcttcgttgaagtgagggtgacgagaagtttctgctttcatcaattaaaggtttacgcgtgaagcagatcatcagcaatggcggcgtcgcaagataagttggataagatgaaacttaggcaagattaccggaatttatggcactccgatctcatgggcaccgtcaccgccgacactccctattgctgcatctcgtgtctgtgtggaccttgtgtgtcatacatgcttcggagaagagcactttacaatgacatgtcaaggtatacttgctgtgctggatatatgccctgtagtggaaggtgtggagaaagcaaatgtcctcaactttgccttgccactgaggtcttcctttgcttcggaaactctgtggcctctacccgctttcttctgcaggatgaattcaacatccagacaacacaatgcgacaattgcataattggatttatgttctgcctcagccaagttgcttgcatattctctatagttgcttgcattgttggtagtgatgaactttccgaggcttctcagatactctcttgctgtgctgatatggtctactgcacggtctgcgcatgtatgcagacacaacacaaacttgagatggacaaaagagatggagtgtttggatcgcagccaatgggtgtgccaccagctcagcagatgtctcgttttgatcaacctgtccctcctccagtcggataccctcagtcctatccaccgcctgctcaaggctaccctcctgcatcttacccgcctcccggttatcctcagcattaagaaatttaaccagtatcttcattttatgtgtcaaagtgttgttgttacttggtttaggtgtgcagaactattatattgttcagctttgtcctctgcttatttctgcgatttatttattttgaggtattggtactctggttatgtctgaaaagcttttgctatcatcaactggtttgttgactttggtatttaagtaaagaaaaagaacaacatatgtattagct

SEQ ID NO: 5935 - protein, 232 aa, Arabidopsis thaliana
MAASQDKLDKMKLRQDYRNLWHSDLMGTVTADTPYCCISCLCGPCVSYMLRRRALYNDMSRYTCCAGYMPCSGRCGESKCPQLCLATEVFLCFGNSVASTRFLLQDEFNIQTTQCDNCIIGFMFCLSQVACIFSIVACIVGSDELSEASQILSCCADMVYCTVCACMQTQHKLEMDKRDGVFGSQPMGVPPAQQMSRFDQPVPPPVGYPQSYPPPAQGYPPASYPPPGYPQH

SEQ ID NO: 5936 - protein, 222 aa, Arabidopsis thaliana
MKLRQDYRNLWHSDLMGTVTADTPYCCISCLCGPCVSYMLRRRALYNDMSRYTCCAGYMPCSGRCGESKCPQLCLATEVFLCFGNSVASTRFLLQDEFNIQTTQCDNCIIGFMFCLSQVACIFSIVACIVGSDELSEASQILSCCADMVYCTVCACMQTQHKLEMDKRDGVFGSQPMGVPPAQQMSRFDQPVPPPVGYPQSYPPPAQGYPPASYPPPGYPQH

SEQ ID NO: 5937 - protein, 207 aa, Arabidopsis thaliana
MGTVTADTPYCCISCLCGPCVSYMLRRRALYNDMSRYTCCAGYMPCSGRCGESKCPQLCLATEVFLCFGNSVASTRFLLQDEFNIQTTQCDNCIIGFMFCLSQVACIFSIVACIVGSDELSEASQILSCCADMVYCTVCACMQTQHKLEMDKRDGVFGSQPMGVPPAQQMSRFDQPVPPPVGYPQSYPPPAQGYPPASYPPPGYPQH

SEQ ID NO: 5938 - DNA, 1575 bp, Arabidopsis thaliana
gtcaaatcgaaaacaaacacaaaaagcaaacaaatatggctacttcaatcaaatctataaccctagctctcttgatattctcagtgttactaatctccttgtctctcggctccgtcacagcgacggagactacacgaaacgaggcggaggcacgacggatgtatgaaaggtggcttgttgagaatcggaagaactataatggtctcggagagaaagagagacgctttgagatcttcaaagacaacttgaagttcgtcgaagagcacagttccatcccgaatcggacttacgaagtcgggttgacccggttcgctgatttgactaacgatgagtttcgtgcgatttacttgaggagcaagatggagagaactagggttccggtgaagggagagaagtatttgtataaggttggagatagcttacctgatgctatcgattggagagctaaaggtgctgttaatccagtcaaagatcaaggatcctgtggaagttgttgggcgttttccgcgattggagcggttgaaggtataaatcagattaagacaggagagttgatatctttgtctgagcaagaacttgttgattgtgacacaagttacaatgatggatgtggtggaggtcttatggattatgcttttaagttcattattgaaaacggtggtattgatacagaggaagattatccttatattgcaactgatgttaacgtgtgcaattctgataagaagaacactcgtgttgttaccatcgatggttatgaggatgttcctcaaaacgatgagaagtctttgaagaaggctcttgctaatcaacctattagtgttgccattgaagctggtggcagagctttccagctttacacatctggtgtgtttacaggaacatgtggaacatctttggaccatggtgttgtagctgtgggatacggatcagaaggtggtcaagactactggattgttcgtaactcatggggatcaaactggggagaaagcggatactttaagctcgaacgtaacatcaaagagtcatcagggaaatgcggtgtggcgatgatggcttcttaccctaccaaatcatcaggctcaaacccaccaaaaccgccagcgccttcaccggttgtttgtgacaagtctaacacttgtccagctaagtccacttgttgttgcctatatgagtacaatggtaaatgctatagctggggatgttgtccgtatgagtcagccacttgttgcgatgatggttctagctgctgcccccagtcataccctgtctgcgatttaaaggccaatacttgtagaatgaagggaaacagtccgttaagcataaaagctttgacacgaggaccagcgattgcgaccacaaagtctacaaacatgctagtgggcagcgcttgaggagagataatacaaacgaagaaccgatttgttttcagcccacgttatcaagattcagtcttttgtctttagacacttccaagttggatcatagtttgattactcttgtcaaatttaatgttatcttggatttgattttacttgatgtaaatgtttaagaagtaatctgatatttgcttcc

SEQ ID NO: 5939 - protein, 463 aa, Arabidopsis thaliana
QIENKHKKQTNMATSIKSITLALLIFSVLLISLSLGSVTATETTRNEAEARRMYERWLVENRKNYNGLGEKERRFEIFKDNLKFVEEHSSIPNRTYEVGLTRFADLTNDEFRAIYLRSKMERTRVPVKGEKYLYKVGDSLPDAIDWRAKGAVNPVKDQGSCGSCWAFSAIGAVEGINQIKTGELISLSEQELVDCDTSYNDGCGGGLMDYAFKFIIENGGIDTEEDYPYIATDVNVCNSDKKNTRVVTIDGYEDVPQNDEKSLKKALANQPISVAIEAGGRAFQLYTSGVFTGTCGTSLDHGVVAVGYGSEGGQDYWIVRNSWGSNWGESGYFKLERNIKESSGKCGVAMMASYPTKSSGSNPPKPPAPSPVVCDKSNTCPAKSTCCCLYEYNGKCYSWGCCPYESATCCDDGSSCCPQSYPVCDLKANTCRMKGNSPLSIKALTRGPAIATTKSTNMLVGSA

SEQ ID NO: 5940 - protein, 452 aa, Arabidopsis thaliana
MATSIKSITLALLIFSVLLISLSLGSVTATETTRNEAEARRMYERWLVENRKNYNGLGEKERRFEIFKDNLKFVEEHSSIPNRTYEVGLTRFADLTNDEFRAIYLRSKMERTRVPVKGEKYLYKVGDSLPDAIDWRAKGAVNPVKDQGSCGSCWAFSAIGAVEGINQIKTGELISLSEQELVDCDTSYNDGCGGGLMDYAFKFIIENGGIDTEEDYPYIATDVNVCNSDKKNTRVVTIDGYEDVPQNDEKSLKKALANQPISVAIEAGGRAFQLYTSGVFTGTCGTSLDHGVVAVGYGSEGGQDYWIVRNSWGSNWGESGYFKLERNIKESSGKCGVAMMASYPTKSSGSNPPKPPAPSPVVCDKSNTCPAKSTCCCLYEYNGKCYSWGCCPYESATCCDDGSSCCPQSYPVCDLKANTCRMKGNSPLSIKALTRGPAIATTKSTNMLVGSA

SEQ ID NO: 5941 - protein, 411 aa, Arabidopsis thaliana
MYERWLVENRKNYNGLGEKERRFEIFKDNLKFVEEHSSIPNRTYEVGLTRFADLTNDEFRAIYLRSKMERTRVPVKGEKYLYKVGDSLPDAIDWRAKGAVNPVKDQGSCGSCWAFSAIGAVEGINQIKTGELISLSEQELVDCDTSYNDGCGGGLMDYAFKFIIENGGIDTEEDYPYIATDVNVCNSDKKNTRVVTIDGYEDVPQNDEKSLKKALANQPISVAIEAGGRAFQLYTSGVFTGTCGTSLDHGVVAVGYGSEGGQDYWIVRNSWGSNWGESGYFKLERNIKESSGKCGVAMMASYPTKSSGSNPPKPPAPSPVVCDKSNTCPAKSTCCCLYEYNGKCYSWGCCPYESATCCDDGSSCCPQSYPVCDLKANTCRMKGNSPLSIKALTRGPAIATTKSTNMLVGSA

SEQ ID NO: 5942 - DNA, 718 bp, Arabidopsis thaliana
atcctcacatcttataattctctatctctcttctcaggctcccattatctttctctattttgcaaatcagtatgggtaagttcacaaccattttcatcatggctctccttctttgctctacgctaacctacgcagcaaggctgactccgacgacaaccaccgctttgtccagagaaaactccgtcaaggaaattgaaggagacaaggttgaagaagaaagctgcaacggaattggagaagaagaatgtttgataagacgaagccttcttcttcacaccgattacatttatactcagaatcacaagccctaagtttctgtattagagcaattaattaactaattacattatcaaacctatcactgtagtactttctgttttctgttcgtcttttttgttttgttttgtttatgttatcgctattttaaagtttcattgttattttgaaagttcttacaccatcattattgatagtctcttaaaacaactattatgttaagagatatatcttataactaacaaaaatatcttaaagtcttttaaataagagttttttgttaattataagacatgtatctcaacataagacttggcctaagagataatcatttataaagatggtcttattattctcactcgtttgtattattattatggattctaatatagctaaaagtattttatttgtaagctaaggtttatattaactattaagtcac

SEQ ID NO: 5943 - protein, 79 aa, Arabidopsis thaliana
MGKFTTIFIMALLLCSTLTYAARLTPTTTTALSRENSVKEIEGDKVEEESCNGIGEEECLIRRSLLLHTDYIYTQNHKP

SEQ ID NO: 5944 - protein, 70 aa, Arabidopsis thaliana
MALLLCSTLTYAARLTPTTTTALSRENSVKEIEGDKVEEESCNGIGEEECLIRRSLLLHTDYIYTQNHKP

SEQ ID NO: 5945 - protein, 41 aa, Arabidopsis thaliana
ILTSYNSLSLFSGSHYLSLFCKSVWVSSQPFSSWLSFFALR

SEQ ID NO: 5946 - DNA, 963 bp, Arabidopsis thaliana
aatccattcctttccaatccacgtccaaaaaacaaaaccaaaaaaaaaaaaaaaaaaagacaaaaaaaaatgaacactccaataaaactcgcctttctcattctctgcattgccctaaccgcaaccgcatttatagtcccagcaaaacgtgacgccgtttcaccacaccaccaaaaagccgtcgatggaatctgcagcgttgtgcaagacaaacgtctatgcagcattaccttaagaaacgtcccaagcgatgatcccgccgttttggttcgttacttagccacggcagcagaagcgtccgttaaaaagggtttgaagttcctctccggaatcaaaccaaaatacaaaggaaacgccttcgccacaacatgcatcaccggctgcgagaaacagctacacaacgccttggacgactttgcagatttctggaaagccgcaggaaaaaatctaacgagcatggctgagaattacttcacatgtaagaagaagatgacttccatcttcacttaccattccacttgtctcgatgacatttacgacaagacgttgcacaaagtggtcgaaggagggattggccttgggaaaagaatgagtggtgagtctgtggatgtgttcgctggaatgggcaaagtctttaacactttcaacattaagaccaaacttaaccagaaagataccgacacgttgctcccaccacctttgtccttttactactattgattttatttatcaatatatattatatatcataaaacacaacaaaatgtactgcttcggtcgatggtgatgaataattttcatcgattgggttttcagatattttggggatcttgtaaccaaaggttccttttgatgtatgtttgtatttaatatgttatggattataatcatgtatggacctcgtgattggaaaggatatggaataatgtgattatctaataataaaaacgtaattaatatcgc

SEQ ID NO: 5947 - protein, 239 aa, Arabidopsis thaliana
NPFLSNPRPKNKTKKKKKKRQKKMNTPIKLAFLILCIALTATAFIVPAKRDAVSPHHQKAVDGICSVVQDKRLCSITLRNVPSDDPAVLVRYLATAAEASVKKGLKFLSGIKPKYKGNAFATTCITGCEKQLHNALDDFADFWKAAGKNLTSMAENYFTCKKKMTSIFTYHSTCLDDIYDKTLHKVVEGGIGLGKRMSGESVDVFAGMGKVFNTFNIKTKLNQKDTDTLLPPPLSFYYY

SEQ ID NO: 5948 - protein, 216 aa, Arabidopsis thaliana
MNTPIKLAFLILCIALTATAFIVPAKRDAVSPHHQKAVDGICSVVQDKRLCSITLRNVPSDDPAVLVRYLATAAEASVKKGLKFLSGIKPKYKGNAFATTCITGCEKQLHNALDDFADFWKAAGKNLTSMAENYFTCKKKMTSIFTYHSTCLDDIYDKTLHKVVEGGIGLGKRMSGESVDVFAGMGKVFNTFNIKTKLNQKDTDTLLPPPLSFYYY

SEQ ID NO: 5949 - DNA, 1024 bp, Arabidopsis thaliana
gtgaaacctccattaccttcgtctttcttcctcagtcgccctacaatggctttgcctttgtctggcacgcgccacctcacgcgcgctctcctctctaatgtcactcttatggctcctcctcggattccttcctctgttcactacggtggatctcggttaggttgttcgacccggttcttctcaattcgatgtggagctaaccggtcaggttctacttactcgccgcttaactctggctctaactttagtgatcggcctccgacggagatggctcctttgtttccgggatgcgattatgagcactggcttattgttatggataaacctggcggggaaggcgcgactaagcagcagatgattgattgttacattcaaaccctagcgaaagtcgttggaagtgaggaagaggcgaagaagcgaatctacaatgtttcatgtgagaggtatttagggtttggttgtgagattgatgaagagacatccactaagcttgaaggtttaccaggtgttctgtttgtgcttccagattcctatgtggatcctgaaaacaaagattatggagctgagctgtttgttaatggagagatagtccaacgatcaccagagaggcagaggcgggttgagccacagccgcagagagcccaagatagaccgagatacaatgacagaactcgttactctcgccgcagagaaaacacaagatgaactgtaactgaagatggtatacatacacctaagctaagccagtatgaggatgatgatgatgatgatgatgatgataatggtggtgaggatgatgttactgccgccacacgagggctctgtattccagtccgttgcagttaatggaccgggcttactttggatattgttgaaattctaagttttgtttctatgtaacaattttatttaataatgtaaattgaggtttcactgttttaggaaattactttgggtagaagattagttttcttttcaagaacaattcatgtgggaaatggtaaatttattttagtaatctttt

SEQ ID NO: 5950 - protein, 234 aa, Arabidopsis thaliana
VKPPLPSSFFLSRPTMALPLSGTRHLTRALLSNVTLMAPPRIPSSVHYGGSRLGCSTRFFSIRCGANRSGSTYSPLNSGSNFSDRPPTEMAPLFPGCDYEHWLIVMDKPGGEGATKQQMIDCYIQTLAKVVGSEEEAKKRIYNVSCERYLGFGCEIDEETSTKLEGLPGVLFVLPDSYVDPENKDYGAELFVNGEIVQRSPERQRRVEPQPQRAQDRPRYNDRTRYSRRRENTR

SEQ ID NO: 5951 - protein, 219 aa, Arabidopsis thaliana
MALPLSGTRHLTRALLSNVTLMAPPRIPSSVHYGGSRLGCSTRFFSIRCGANRSGSTYSPLNSGSNFSDRPPTEMAPLFPGCDYEHWLIVMDKPGGEGATKQQMIDCYIQTLAKVVGSEEEAKKRIYNVSCERYLGFGCEIDEETSTKLEGLPGVLFVLPDSYVDPENKDYGAELFVNGEIVQRSPERQRRVEPQPQRAQDRPRYNDRTRYSRRRENTR

SEQ ID NO: 5952 - protein, 198 aa, Arabidopsis thaliana
MAPPRIPSSVHYGGSRLGCSTRFFSIRCGANRSGSTYSPLNSGSNFSDRPPTEMAPLFPGCDYEHWLIVMDKPGGEGATKQQMIDCYIQTLAKVVGSEEEAKKRIYNVSCERYLGFGCEIDEETSTKLEGLPGVLFVLPDSYVDPENKDYGAELFVNGEIVQRSPERQRRVEPQPQRAQDRPRYNDRTRYSRRRENTR

SEQ ID NO: 5953 - DNA, 696 bp, Arabidopsis thaliana
atgcaatctgacctcacgcgttttttttttttgacctcacgcggttttactaaaccgaccttcgtttacttcccttacctctctatatatatatctctatcttcatttgcatatttcaattcatttcataatcatacacctctctacatttgttactactttcttctaacttgttttcaaagagaaatcacaatctatctgttccaagatgagtcaatacagccaaaaccaatcttcaggagcttatcctacgccgccagtgtctaccggcccttacgtggcaccgccaccgctaggttacccaacgaacgacacaagtcatgccacggtggcaacggtggagacaaagtccaagggtgatggattcttaaaaggctgtcttgcggccatgtgttgttgttgtgtcctcgacgcatgcttctgaagacttagatggtttattttgattatctttgtattttgctttaccaaaatgattcgactaggtttatgacatttggtacttctatttgttaattcatttctatatcactctttcttttgcattgtgtaattttataaattcttaatatatcgtttgttttctcttagacatcttctaaaccacgctagattcacatttttgactttattaccggttagtcaacgtggacttaaaatcaatttaataacactatataagccaaagttataaac

SEQ ID NO: 5954 - protein, 119 aa, Arabidopsis thaliana
MQSDLTRFFFLTSRGFTKPTFVYFPYLSIYISLSSFAYFNSFHNHTPLYICYYFLLTCFQREITIYLFQDESIQPKPIFRSLSYAASVYRPLRGTATARLPNERHKSCHGGNGGDKVQG

SEQ ID NO: 5955 - protein, 71 aa, Arabidopsis thaliana
MSQYSQNQSSGAYPTPPVSTGPYVAPPPLGYPTNDTSHATVATVETKSKGDGFLKGCLAAMCCCCVLDACF

SEQ ID NO: 5956 - DNA, 1086 bp, Arabidopsis thaliana
aaaaccaccacatccttccctgaaaccctaaccacaacaatcgccgccgtctctagaaatatccatccacctacttcggctttgtttatcagattttgatgaaaccagatcgggtcttcctctagatccgttctaggttttctatttccaccgtcttatcattatcatcatcatcaattcatcatcatcatcaataatccagatgctcaccaaattcgtcattcatagacatgtctctgtttctgaaagacgattcgattcaaattcgcgaagtctggaacgataaccttcaagaagaaatggatctgatccgagatgtcgtcgacgacttcccttacgtcgccatggacactgagttccccggcatcgtcgtccgacctgtcggaactttcaaatccaacgctgattaccactacgaaaccttgaagacgaacgtcaacatcctcaagatgatccagcttggcctcactttctccaatgaacaaggcaacctccctacctgtggcactgacaagtattgcatctggcaattcaatttccgagaattcgatctcgattccgatatcttcgctctcgattccatcgagcttctcaagcaatcaggcatcgaccttgccaaaaacacgctagacgggatcgattccaagagattcgcagagctcttaatgtcctccgggatcgtcttgaacgaaaacgtgcattgggttacattccacagtgggtacgatttcggatacttgctaaagctcttgacttgccaaaacctgccggattcgcaaacagacttcttcaagctcatcaacgtttattttccgaccgtgtacgacattaaacacctgatgaagttctgcaacagccttcacggtggtctcaacaagcttgcggagttgctggaagtggagagagttgggatctgtcaccaagctggttcggatagtttactcacgtcttgtactttcagaaagctcaaggagaatttcttcgttggtccgttgcacaaatattctggtgttttgtatggattaggtgttgaaaatggtcaggttgctatctagcaaaaaattaaataaaaaatttcctgaaaac

SEQ ID NO: 5957 - protein, 274 aa, Arabidopsis thaliana
MSLFLKDDSIQIREVWNDNLQEEMDLIRDVVDDFPYVAMDTEFPGIVVRPVGTFKSNADYHYETLKTNVNILKMIQLGLTFSNEQGNLPTCGTDKYCIWQFNFREFDLDSDIFALDSIELLKQSGIDLAKNTLDGIDSKRFAELLMSSGIVLNENVHWVTFHSGYDFGYLLKLLTCQNLPDSQTDFFKLINVYFPTVYDIKHLMKFCNSLHGGLNKLAELLEVERVGICHQAGSDSLLTSCTFRKLKENFFVGPLHKYSGVLYGLGVENGQVAI

SEQ ID NO: 5958 - protein, 251 aa, Arabidopsis thaliana
MDLIRDVVDDFPYVAMDTEFPGIVVRPVGTFKSNADYHYETLKTNVNILKMIQLGLTFSNEQGNLPTCGTDKYCIWQFNFREFDLDSDIFALDSIELLKQSGIDLAKNTLDGIDSKRFAELLMSSGIVLNENVHWVTFHSGYDFGYLLKLLTCQNLPDSQTDFFKLINVYFPTVYDIKHLMKFCNSLHGGLNKLAELLEVERVGICHQAGSDSLLTSCTFRKLKENFFVGPLHKYSGVLYGLGVENGQVAI

SEQ ID NO: 5959 - protein, 236 aa, Arabidopsis thaliana
MDTEFPGIVVRPVGTFKSNADYHYETLKTNVNILKMIQLGLTFSNEQGNLPTCGTDKYCIWQFNFREFDLDSDIFALDSIELLKQSGIDLAKNTLDGIDSKRFAELLMSSGIVLNENVHWVTFHSGYDFGYLLKLLTCQNLPDSQTDFFKLINVYFPTVYDIKHLMKFCNSLHGGLNKLAELLEVERVGICHQAGSDSLLTSCTFRKLKENFFVGPLHKYSGVLYGLGVENGQVAI

SEQ ID NO: 5960 - DNA, 1272 bp, Arabidopsis thaliana
atgacgatgatgcagtacctaattccagaaccaaaaacaaaagagattttgtacgagaaaacgttacaagctgctggtccaattactctaggagaagttaaagagttaacttctaagcgtaaaattatcgaagaatctgtaaacaaaaccagcaaagtcattgattcaactacaagagagatgaccagaggactaacttctgcttgtgagcaggatcttcataaacttggagaataccttccattactctttaacttggtgcattacactgataagattaaacgggtttcgaatcttaagataagatggagtagtggtttgatctctcagaccttgattcagcgtacatgtccgaaattcttccaagtcgataacataatgttcgagtttggaatggttcttttcatttacgcggttaagctccgcgagagagcaatggaactagtatccacagattctaagaaagcggtagcagtttaccgagaagcatctggagttttccatcatctgtctcatgagattcttcctttattacaaacttgtctgcctccagggaagcttccggaactaactcctccgctttgctctgctttgagtctcctctgtttagctgaaggtcaggctgtaactacagagaaggctgaagaaagcggcaaaagtgcaagccttttgtcgaaactgcactttggaatttttcaatttctttctgaagcctatgctcttttgtcatctagactaacaggagaatataaagacctatcgacccgctttctcgagtatgtaacaacaatgggagctttacacgaactaaagagccaaaaatacttagcggaattgctagaatccgaagatcgagtaggcgatgcggtaggggttctccggcgtgccttagcagcggcgaagaagagtacgccgtccaaagatgacaagtggatagcaatattcaagaaggagagagaggatgtagctaaaaacatggctaagtatgagaagctaaacgattctatgatgttacagaagattccaattgatagagagataccttttccaaaaggtgagaagattgttaatctcattccttatactcccacaagagtggtacgagaacttcgatttaagtcttagaagaagatctaataactgtatgattaattcttttgtttagttcttttgagtttggagaagagatttaaggtgtctgatatgtgatacaattatttgccatcagataaaatttgtctgattgtgcaataatatactctgtttttcccc

SEQ ID NO: 5961 - protein, 374 aa, Arabidopsis thaliana
MTMMQYLIPEPKTKEILYEKTLQAAGPITLGEVKELTSKRKIIEESVNKTSKVIDSTTREMTRGLTSACEQDLHKLGEYLPLLFNLVHYTDKIKRVSNLKIRWSSGLISQTLIQRTCPKFFQVDNIMFEFGMVLFIYAVKLRERAMELVSTDSKKAVAVYREASGVFHHLSHEILPLLQTCLPPGKLPELTPPLCSALSLLCLAEGQAVTTEKAEESGKSASLLSKLHFGIFQFLSEAYALLSSRLTGEYKDLSTRFLEYVTTMGALHELKSQKYLAELLESEDRVGDAVGVLRRALAAAKKSTPSKDDKWIAIFKKEREDVAKNMAKYEKLNDSMMLQKIPIDREIPFPKGEKIVNLIPYTPTRVVRELRFKS

SEQ ID NO: 5962 - protein, 372 aa, Arabidopsis thaliana
MMQYLIPEPKTKEILYEKTLQAAGPITLGEVKELTSKRKIIEESVNKTSKVIDSTTREMTRGLTSACEQDLHKLGEYLPLLFNLVHYTDKIKRVSNLKIRWSSGLISQTLIQRTCPKFFQVDNIMFEFGMVLFIYAVKLRERAMELVSTDSKKAVAVYREASGVFHHLSHEILPLLQTCLPPGKLPELTPPLCSALSLLCLAEGQAVTTEKAEESGKSASLLSKLHFGIFQFLSEAYALLSSRLTGEYKDLSTRFLEYVTTMGALHELKSQKYLAELLESEDRVGDAVGVLRRALAAAKKSTPSKDDKWIAIFKKEREDVAKNMAKYEKLNDSMMLQKIPIDREIPFPKGEKIVNLIPYTPTRVVRELRFKS

SEQ ID NO: 5963 - protein, 371 aa, Arabidopsis thaliana
MQYLIPEPKTKEILYEKTLQAAGPITLGEVKELTSKRKIIEESVNKTSKVIDSTTREMTRGLTSACEQDLHKLGEYLPLLFNLVHYTDKIKRVSNLKIRWSSGLISQTLIQRTCPKFFQVDNIMFEFGMVLFIYAVKLRERAMELVSTDSKKAVAVYREASGVFHHLSHEILPLLQTCLPPGKLPELTPPLCSALSLLCLAEGQAVTTEKAEESGKSASLLSKLHFGIFQFLSEAYALLSSRLTGEYKDLSTRFLEYVTTMGALHELKSQKYLAELLESEDRVGDAVGVLRRALAAAKKSTPSKDDKWIAIFKKEREDVAKNMAKYEKLNDSMMLQKIPIDREIPFPKGEKIVNLIPYTPTRVVRELRFKS

SEQ ID NO: 5964 - DNA, 1813 bp, Arabidopsis thaliana
aagatattttggctctcgctataaaaaaaaaatcgacaacagtgcagacacacgccgatttgcgagatacacacagtctcacctaaaaatcgcaaaagaagaaaaattcggatcaaaattgtcttcaagcatcatggatccatacagggttcgtccttcaagcgctcatgattcccctttcttcactacaaactcgggtgctcctgtctggaacaacaactcttctttgactgtcggaactcgaggtccaatccttctggaggactatcatctgcttgagaaactcgctaactttgacagggagcggattcctgagagggttgttcatgccaggggagccagtgctaagggtttctttgaagtcactcatgacattacccaacttacttctgctgattttcttcgaggacctggtgttcagactcctgttatcgttcgtttctcaactgtcatccatgagcgtggcagtcccgagactctcagagatccccgtggttttgctgttaagttttacaccagagaggggaactttgatcttgttgggaacaacttccctgtattcttcgtccgtgatggaatgaaattccctgacatggtccatgcattgaaaccgaatcccaagtctcacattcaggagaactggaggatactggacttcttctcccaccacccagagagtttgcacatgttttcatttctctttgatgatctcggtatcccacaggactacaggcacatggaaggcgctggggtcaacacttacatgctaatcaacaaagctggaaaagctcactatgtgaaattccactggaagccgacttgtgggatcaaatgcctgtcggatgaggaagctatcagagttggaggagccaatcacagccatgccaccaaagatctctatgactcgatcgcagccgggaactatccgcagtggaatctcttcgttcaggtgatggatcctgcccatgaagacaaatttgacttcgatccgcttgatgtcacaaagatctggcctgaagatatcttgcctttacaacctgttggtcgcttggtcttgaacaaaaacatcgacaacttctttaatgagaacgaacagattgcattctgtcctgctcttgtggttccaggcatccactattcagatgataagctactccagacccggatcttctcctacgctgatagtcagagacaccgtcttggaccaaactatctgcaactacctgttaatgcccctaaatgtgctcaccacaacaatcaccatgatggttttatgaacttcatgcacagggatgaggaggtcaattacttcccttcaaggttggatccggttcgccatgccgaaaaataccctacaactcctattgtctgctctggaaatcgtgagaagtgcttcatcgggaaggagaacaacttcaagcaaccaggggagagataccggtcctgggattcagacaggcaagaacgattcgtgaagcgttttgttgaagcgctttcggagcctcgtgtcacgcacgaaatccgcagcatttggatctcttactggtctcaggcagacaaatctctgggacagaaactagcaactcgtcttaacgtgaggccaaacttctgaatgatatcatctctaaagactaagtgaaatcctataaactcaatatgctcctcttacggtttggtttctaagtaatctcgtttattgacaatgaaacgcttaaagaagggtactagttcctgtttgtaatcttcttttcaaaatattaacgattattttctaaggcaaataaataaaaagctatgactaatatagcttagt

SEQ ID NO: 5965 - protein, 536 aa, Arabidopsis thaliana
RYFGSRYKKKIDNSADTRRFARYTQSHLKIAKEEKFGSKLSSSIMDPYRVRPSSAHDSPFFTTNSGAPVWNNNSSLTVGTRGPILLEDYHLLEKLANFDRERIPERVVHARGASAKGFFEVTHDITQLTSADFLRGPGVQTPVIVRFSTVIHERGSPETLRDPRGFAVKFYTREGNFDLVGNNFPVFFVRDGMKFPDMVHALKPNPKSHIQENWRILDFFSHHPESLHMFSFLFDDLGIPQDYRHMEGAGVNTYMLINKAGKAHYVKFHWKPTCGIKCLSDEEAIRVGGANHSHATKDLYDSIAAGNYPQWNLFVQVMDPAHEDKFDFDPLDVTKIWPEDILPLQPVGRLVLNKNIDNFFNENEQIAFCPALVVPGIHYSDDKLLQTRIFSYADSQRHRLGPNYLQLPVNAPKCAHHNNHHDGFMNFMHRDEEVNYFPSRLDPVRHAEKYPTTPIVCSGNREKCFIGKENNFKQPGERYRSWDSDRQERFVKRFVEALSEPRVTHEIRSIWISYWSQADKSLGQKLATRLNVRPNF

SEQ ID NO: 5966 - protein, 492 aa, Arabidopsis thaliana
MDPYRVRPSSAHDSPFFTTNSGAPVWNNNSSLTVGTRGPILLEDYHLLEKLANFDRERIPERVVHARGASAKGFFEVTHDITQLTSADFLRGPGVQTPVIVRFSTVIHERGSPETLRDPRGFAVKFYTREGNFDLVGNNFPVFFVRDGMKFPDMVHALKPNPKSHIQENWRILDFFSHHPESLHMFSFLFDDLGIPQDYRHMEGAGVNTYMLINKAGKAHYVKFHWKPTCGIKCLSDEEAIRVGGANHSHATKDLYDSIAAGNYPQWNLFVQVMDPAHEDKFDFDPLDVTKIWPEDILPLQPVGRLVLNKNIDNFFNENEQIAFCPALVVPGIHYSDDKLLQTRIFSYADSQRHRLGPNYLQLPVNAPKCAHHNNHHDGFMNFMHRDEEVNYFPSRLDPVRHAEKYPTTPIVCSGNREKCFIGKENNFKQPGERYRSWDSDRQERFVKRFVEALSEPRVTHEIRSIWISYWSQADKSLGQKLATRLNVRPNF

SEQ ID NO: 5967 - protein, 344 aa, Arabidopsis thaliana
MKFPDMVHALKPNPKSHIQENWRILDFFSHHPESLHMFSFLFDDLGIPQDYRHMEGAGVNTYMLINKAGKAHYVKFHWKPTCGIKCLSDEEAIRVGGANHSHATKDLYDSIAAGNYPQWNLFVQVMDPAHEDKFDFDPLDVTKIWPEDILPLQPVGRLVLNKNIDNFFNENEQIAFCPALVVPGIHYSDDKLLQTRIFSYADSQRHRLGPNYLQLPVNAPKCAHHNNHHDGFMNFMHRDEEVNYFPSRLDPVRHAEKYPTTPIVCSGNREKCFIGKENNFKQPGERYRSWDSDRQERFVKRFVEALSEPRVTHEIRSIWISYWSQADKSLGQKLATRLNVRPNF

SEQ ID NO: 5968 - DNA, 365 bp, Arabidopsis thaliana
atactcgtatcttgtagcagccactaaagcaaaattctgagatcgaaaaagctatataaaaaaaaaaaactgcttccgtttcatcgattttgtccagatcttccccttcttccggtaatcgaagcttacgagatagttgagtgaagatgatctatgatgtgaactctggtctattcagatccttcctgagccagaagggtagctcgtccgacaaaaggaaaatggaagataagccaagagaacagaagcccaaagccagcgacaacaaacctgttatgaatgaatgagaacagattacatcttcttgtaatttctctttacctatttcagttgtaaggatcattttaatgaattaagtttctttc

SEQ ID NO: 5969 - protein, 46 aa, Arabidopsis thaliana
MIYDVNSGLFRSFLSQKGSSSDKRKMEDKPREQKPKASDNKPVMNE

SEQ ID NO: 5970 - DNA, 1701 bp, Arabidopsis thaliana
gcgaacattttggattcttcacgtttgtttatattttgggttggctctacacctactctcagaagtcataagccaagcaaagggggttttagggtttttgaccgcgagccagatctctttcttttgtttctcccacttccgaatcaatggccttctcttctctcctcagatctgccgcctcctacacggttgccgctcctcgccctgactttttctcgtcgccggcgtctgatcattctaaggtgttgtcaagtcttggatttagtcgcaacctgaagccatcaagattttcttctgggatatcttcatctctacaaaatggcaatgcaagaagtgtgcaacccatcaaggccacggctacagaagtgccatctgcagttcgaaggtcaagtagcagtggaaagacaaaggttgggatcaacggttttggtcggattggaaggttggtcctccgcattgcaacatcaagggatgatattgaggttgtagcagtgaatgacccattcattgatgccaagtacatggcttacatgttgaagtatgattctactcatggaaatttcaagggaagcatcaatgtcattgatgattctactttggagatcaatgggaagaaggtcaatgttgtcagcaagagagatccatctgagatcccatgggctgatcttggagctgattatgttgttgagtcttccggtgtattcaccaccctgtcaaaggctgcatcccatttgaagggcggtgccaagaaagttataatttctgccccttctgctgacgcacctatgtttgttgttggagtaaacgagcacacataccaaccaaacatggatatagtctccaatgcaagttgtaccaccaattgtcttgcccctcttgccaaggtggtgcatgaggaatttggtattcttgaaggcttgatgacaactgtccacgcaactacagctactcagaaaactgttgatgggccatcaatgaaggactggagaggaggtcggggcgctagtcaaaacatcattcctagctcaaccggcgccgcgaaggctgtaggtaaagttcttccagaactgaatgggaaacttacgggaatggccttccgtgtaccaacatcgaatgtttctgtggtggatttaacttgtcgacttgagaagggtgcctcttacgaagatgttaaggcagccattaagcatgcctcagaaggacctcttaaaggcattctcgggtacacagatgaagatgtcgtctccaatgatttcgtcggtgattcaaggtccagtatctttgacgccaatgctggtattggattgagcaagtcctttgtgaaacttgtctcttggtacgacaacgaatggggttacagcaaccgagttcttgaccttatagagcacatggctttggtagctgccagccactaaatacacacaccagttcttgcagaagcttgagtctttctgctttttgcgtaacctgctctacaaagccggtttggatttgttcggttcaattaggtgccactgtgctaggtgttttgaaatatttggcttgaatctcgagcctttactctatttttgttctgttccagtatcagcaaccatgatttggtccaaaagactgaaaaactgtgcgacttacatctatgaataaggggctaagctagttgtactttaccaaaaatagcttaccagtataagcaacgtttgg

SEQ ID NO: 5971 - protein, 422 aa, Arabidopsis thaliana
MAFSSLLRSAASYTVAAPRPDFFSSPASDHSKVLSSLGFSRNLKPSRFSSGISSSLQNGNARSVQPIKATATEVPSAVRRSSSSGKTKVGINGFGRIGRLVLRIATSRDDIEVVAVNDPFIDAKYMAYMLKYDSTHGNFKGSINVIDDSTLEINGKKVNVVSKRDPSEIPWADLGADYVVESSGVFTTLSKAASHLKGGAKKVIISAPSADAPMFVVGVNEHTYQPNMDIVSNASCTTNCLAPLAKVVHEEFGILEGLMTTVHATTATQKTVDGPSMKDWRGGRGASQNIIPSSTGAAKAVGKVLPELNGKLTGMAFRVPTSNVSVVDLTCRLEKGASYEDVKAAIKHASEGPLKGILGYTDEDVVSNDFVGDSRSSIFDANAGIGLSKSFVKLVSWYDNEWGYSNRVLDLIEHMALVAASH

SEQ ID NO: 5972 - protein, 297 aa, Arabidopsis thaliana
MAYMLKYDSTHGNFKGSINVIDDSTLEINGKKVNVVSKRDPSEIPWADLGADYVVESSGVFTTLSKAASHLKGGAKKVIISAPSADAPMFVVGVNEHTYQPNMDIVSNASCTTNCLAPLAKVVHEEFGILEGLMTTVHATTATQKTVDGPSMKDWRGGRGASQNIIPSSTGAAKAVGKVLPELNGKLTGMAFRVPTSNVSVVDLTCRLEKGASYEDVKAAIKHASEGPLKGILGYTDEDVVSNDFVGDSRSSIFDANAGIGLSKSFVKLVSWYDNEWGYSNRVLDLIEHMALVAASH

SEQ ID NO: 5973 - protein, 294 aa, Arabidopsis thaliana
MLKYDSTHGNFKGSINVIDDSTLEINGKKVNVVSKRDPSEIPWADLGADYVVESSGVFTTLSKAASHLKGGAKKVIISAPSADAPMFVVGVNEHTYQPNMDIVSNASCTTNCLAPLAKVVHEEFGILEGLMTTVHATTATQKTVDGPSMKDWRGGRGASQNIIPSSTGAAKAVGKVLPELNGKLTGMAFRVPTSNVSVVDLTCRLEKGASYEDVKAAIKHASEGPLKGILGYTDEDVVSNDFVGDSRSSIFDANAGIGLSKSFVKLVSWYDNEWGYSNRVLDLIEHMALVAASH

SEQ ID NO: 5974 - DNA, 1275 bp, Arabidopsis thaliana
gaggccgcgaggacacttagagacaaagagcagctcgtcagctcacccgtctgaagtatctcgccagccggcccgtctcaagcagctcgtcagatcacccgtctgaagcatctcgtcagccggtccgtctcaagtagctcatcagctcgcccgtctcaagcagctcgtcagctcacccgtccgaagtatctcgccagccggcccgttaaattttcccgatggagattcttccgattccggcggagagtttcaaggtaggattcatcggagctggtaaaatggcggagagtatagctagaggtgtggttgcttccggtgtgcttcctcctaatcgtatatgcaccgccgttcactcaaatctcaatcgccgtgatgtcttcgaatcctttggcgtcaatgtcttctccactagcgaagaagttgttaaagaaagcgatgttgtcatattctctgtgaaacctcaagttgttaagaaggctgtcacagaattaaagtcgaagctttcaaagaataagattctggtttctgttgcagctggaatcaagttgaatgatttacaggaatggtctggtcaagatcgattcataagggtgatgcctaatacacctgccgctgttggtgaggcagcttcagttatgagccttggcacaggagcaacggaagaggatggagcaattgttgctatgttgtttggcgcggtggggaagatattgaaagctgatgagaaaatgtttgatgctgtcactggtctcagtggaagtggaccagcatacatatttttagcaattgaagctttagccgatggaggagtagctgctggtttaccccgagagcttgcattgagtttagcttcacagaccgttcttggagctgcaacgatggttagcaaaactgggaagcatccaggtgtgttgaaagatgatgttacctcacctggcggcactacaatagccggagttcatgaactagagaaaggctctttccgggcaacacttatgaatgcagttgttgctgcagctaaacgaagccgcgagctctcacagagctaaatgatacatatgtagttgctgctattgtttcacctcacagattaatcaaaataagggttatgggccttatggcattgcttgtttttaggcgagagttttatcccacttgtcttcgatggtagaggtgaagattatttatctagactatgatgtattagttcagacagaactcagatacttttctataattcttaatctaataaaaatcactttcagttttgggttc

SEQ ID NO: 5975 - protein, 276 aa, Arabidopsis thaliana
MEILPIPAESFKVGFIGAGKMAESIARGVVASGVLPPNRICTAVHSNLNRRDVFESFGVNVFSTSEEVVKESDVVIFSVKPQVVKKAVTELKSKLSKNKILVSVAAGIKLNDLQEWSGQDRFIRVMPNTPAAVGEAASVMSLGTGATEEDGAIVAMLFGAVGKILKADEKMFDAVTGLSGSGPAYIFLAIEALADGGVAAGLPRELALSLASQTVLGAATMVSKTGKHPGVLKDDVTSPGGTTIAGVHELEKGSFRATLMNAVVAAAKRSRELSQS

SEQ ID NO: 5976 - protein, 256 aa, Arabidopsis thaliana
MAESIARGVVASGVLPPNRICTAVHSNLNRRDVFESFGVNVFSTSEEVVKESDVVIFSVKPQVVKKAVTELKSKLSKNKILVSVAAGIKLNDLQEWSGQDRFIRVMPNTPAAVGEAASVMSLGTGATEEDGAIVAMLFGAVGKILKADEKMFDAVTGLSGSGPAYIFLAIEALADGGVAAGLPRELALSLASQTVLGAATMVSKTGKHPGVLKDDVTSPGGTTIAGVHELEKGSFRATLMNAVVAAAKRSRELSQS

SEQ ID NO: 5977 - protein, 151 aa, Arabidopsis thaliana
MPNTPAAVGEAASVMSLGTGATEEDGAIVAMLFGAVGKILKADEKMFDAVTGLSGSGPAYIFLAIEALADGGVAAGLPRELALSLASQTVLGAATMVSKTGKHPGVLKDDVTSPGGTTIAGVHELEKGSFRATLMNAVVAAAKRSRELSQS

SEQ ID NO: 5978 - DNA, 1165 bp, Arabidopsis thaliana
atgacccatattctcttgactcgtgaggttaaatgtaaatcactttaaaatataaaaacgtaccttgtcagttttgagactcaaaaggacttgaaatattgaaatccctattctttacgcgtactcgagatttttcgctcttgagagaatcacttcgacaatgtcggtaacggctgctttcattgattcggatcaaactcagcacaacattcttatggattcccaatcaactgtctccggtgtgaaaactgtcaagattagcaatgtttcactaattgtttctaagaaagatgtcaaagagttcttttctttctctggtgacattcaatacgtcgagatgcgaagtgagacacaagagagtcaggtcgcatatgttacttttaaggattcacaaggagctgaaactgcaatgctcttaacgggagctgtcattgcagatcttcgtgttagtataactcctgctgttaactatcagctaccaccagaagcccttgcacttgactcggaacattcgtttaatggtttttctgtcaagaaagctgaagatgtggtgaacatcatggtgggaagaggttatgctcttggaaaagacgccatggagaaagccaaagcatttgatgacagacacaacttgatctcaaacgcttctgcaaccattgcatcgcttgacgataagatgggtctgagcgaaaagctaagcataggaacaactgtggttaatgagaagttgagagatatcgatgagcgatatcaggtgagggagataacgaaatctgctttagcagctgctgaagagacagcaatcagtgcaagaacggctttaatggcaaacccttatgtatcaagtggagcttcgtggttttcaaacgcgtttggcgcagtgacaaaggcggttaaagagaaagttgagaatggaggagaaggaagaaaggagatcatcacacttgatccctcttcacccaaagttcctgctgtagttcctgttaagctcggttgatgcagatctcatcaaaccaatcggatctcgactaaattctttgataggtttgttgttcatatatatgctttcgtatgctaaagagaagataaaaagacataaaccatgaaaggtgttgttacattcaaccagcatttgttcctctcttgaaagagattattaagattc

SEQ ID NO: 5979 - protein, 278 aa, Arabidopsis thaliana
MSVTAAFIDSDQTQHNILMDSQSTVSGVKTVKISNVSLIVSKKDVKEFFSFSGDIQYVEMRSETQESQVAYVTFKDSQGAETAMLLTGAVIADLRVSITPAVNYQLPPEALALDSEHSFNGFSVKKAEDVVNIMVGRGYALGKDAMEKAKAFDDRHNLISNASATIASLDDKMGLSEKLSIGTTVVNEKLRDIDERYQVREITKSALAAAEETAISARTALMANPYVSSGASWFSNAFGAVTKAVKEKVENGGEGRKEIITLDPSSPKVPAVVPVKLG

SEQ ID NO: 5980 - protein, 260 aa, Arabidopsis thaliana
MDSQSTVSGVKTVKISNVSLIVSKKDVKEFFSFSGDIQYVEMRSETQESQVAYVTFKDSQGAETAMLLTGAVIADLRVSITPAVNYQLPPEALALDSEHSFNGFSVKKAEDVVNIMVGRGYALGKDAMEKAKAFDDRHNLISNASATIASLDDKMGLSEKLSIGTTVVNEKLRDIDERYQVREITKSALAAAEETAISARTALMANPYVSSGASWFSNAFGAVTKAVKEKVENGGEGRKEIITLDPSSPKVPAVVPVKLG

SEQ ID NO: 5981 - protein, 219 aa, Arabidopsis thaliana
MRSETQESQVAYVTFKDSQGAETAMLLTGAVIADLRVSITPAVNYQLPPEALALDSEHSFNGFSVKKAEDVVNIMVGRGYALGKDAMEKAKAFDDRHNLISNASATIASLDDKMGLSEKLSIGTTVVNEKLRDIDERYQVREITKSALAAAEETAISARTALMANPYVSSGASWFSNAFGAVTKAVKEKVENGGEGRKEIITLDPSSPKVPAVVPVKLG

SEQ ID NO: 5982 - DNA, 643 bp, Arabidopsis thaliana
attttttaggtttgttcagctgttttacggagtcgcttttgagatatcgatcttacgaagaagcaaaaatggcggtcccgttgcttaccaagaaggttgtgaagaagaggtctactaagttcatcagaccccagagtgaccgtagaatcaccgtcaaggaaagctggaggaggccaaagggtattgattcaaggatgagaagaaagttcaaaggtgtgactttgatgcccaatgttggttacggatctgacaagaagactcgtcactatcttcccaatggattcaagaaattcgttgttcacaacacaagtgagctcgagttgttgatgatgcacaacaggacttactgtgctgagattgctcacaacgtctccactaagaagagaaaggcaattgttgagagagcttctcagctagacgttgttgttaccaacaggcttgctaggctccgtagccaagaagacgagtgaagaagaatcttgccgactacttagttgtttcttctgttttgttgcatttcctttttgttataagacgatttttgattactgctgtgtttgtgtttggagtgaacaaacatgagttttggttttagtatgaaacagatcaagttaagaccttttgttaaagctatttcggattc

SEQ ID NO: 5983 - protein, 155 aa, Arabidopsis thaliana
FLGLFSCFTESLLRYRSYEEAKMAVPLLTKKVVKKRSTKFIRPQSDRRITVKESWRRPKGIDSRMRRKFKGVTLMPNVGYGSDKKTRHYLPNGFKKFVVHNTSELELLMMHNRTYCAEIAHNVSTKKRKAIVERASQLDVVVTNRLARLRSQEDE

SEQ ID NO: 5984 - protein, 133 aa, Arabidopsis thaliana
MAVPLLTKKVVKKRSTKFIRPQSDRRITVKESWRRPKGIDSRMRRKFKGVTLMPNVGYGSDKKTRHYLPNGFKKFVVHNTSELELLMMHNRTYCAEIAHNVSTKKRKAIVERASQLDVVVTNRLARLRSQEDE

SEQ ID NO: 5985 - protein, 91 aa, Arabidopsis thaliana
MRRKFKGVTLMPNVGYGSDKKTRHYLPNGFKKFVVHNTSELELLMMHNRTYCAEIAHNVSTKKRKAIVERASQLDVVVTNRLARLRSQEDE

SEQ ID NO: 5986 - DNA, 696 bp, Arabidopsis thaliana
tctctctctctctctctctctctctttccctccgccatgacaagctcttcatctccttcacgcaaggcgttaagcaagatcgcgtgtaataggttacaaaaggagttatcagagtggcaagtaaatccaccgactgggtttaagcacagagttactgataatcttcaaaaatgggtaattgaggtaacaggagcacctggtacgctttacgctaatgaaacttataatcttcaggttgagtttcctcaacattatcctatggaagctcctcaggtgatttttgttccaccagctccgttacatcctcatatttacagcaatggacatatttgtttagatattctgtatgactcatggtctccagcaatgacagtgagttcagtctgtatcagcattctctcgatgctatcaagttcacccgaaaagcaacgccccactgataatgatcgatatgtgaagaactgcaagaacgggaggtctcctaaagagacaaggtggtggttccatgacgacaaggtttaatgatgacgaccttaagatgtctctcctttcagttacaaaagaggtttatataatttcccaagactgataatactaattgaaattcctcatggcctcccacttttttttctgtaacggatcattatgtataaatgacatctgaaatgtttcagtgtctgaattaacaccttgtgc

SEQ ID NO: 5987 - protein, 173 aa, Arabidopsis thaliana
SLSLSLSLFPSAMTSSSSPSRKALSKIACNRLQKELSEWQVNPPTGFKHRVTDNLQKWVIEVTGAPGTLYANETYNLQVEFPQHYPMEAPQVIFVPPAPLHPHIYSNGHICLDILYDSWSPAMTVSSVCISILSMLSSSPEKQRPTDNDRYVKNCKNGRSPKETRWWFHDDKV

SEQ ID NO: 5988 - protein, 161 aa, Arabidopsis thaliana
MTSSSSPSRKALSKIACNRLQKELSEWQVNPPTGFKHRVTDNLQKWVIEVTGAPGTLYANETYNLQVEFPQHYPMEAPQVIFVPPAPLHPHIYSNGHICLDILYDSWSPAMTVSSVCISILSMLSSSPEKQRPTDNDRYVKNCKNGRSPKETRWWFHDDKV

SEQ ID NO: 5989 - protein, 87 aa, Arabidopsis thaliana
MEAPQVIFVPPAPLHPHIYSNGHICLDILYDSWSPAMTVSSVCISILSMLSSSPEKQRPTDNDRYVKNCKNGRSPKETRWWFHDDKV

SEQ ID NO: 5990 - DNA, 1147 bp, Arabidopsis thaliana
gtgaattcgattcgtgacttatggcctcgcgtttgctatcgacgacgacactcgtcacaccgccggcttatttcaacaaatcgccggcgtttttaacggccagagttggggtgagaagaggaagggctaacgttaaggctgtgagcaatagttcgcaaggagccgtcgatggaaccgtttacaaaggtgtttacggtccttggaccattgaccaagccgatgtcaaagaggttattttgtacagatcaggactagtaactgctgctgcatcttttgtagctgcttcttctgctgcctttttaccaggagactcttggttaagtgaaacaatcaagcaaaaccatgatctgttttactttgttggtgctagtggtttggggctatctctgtttctaatacatatatatgttacggagattaagaggactcttcaagctttatgggcacttggttttgttggttctttcgctacttacgcagcccttgctagaccagctggtgataacttggttcattatgtcgttgatcatccatccgctgtttggtttgttggtcccctattcgcatctctcacaggactcgttttcaaagaaggtctttgttatggaaagctagaagctggccttcttacattcatcataccttcagttcttcttgggcatttgagtggtctgatgaatgatgaggtaaaactggtgttgctaggaacatggatggctctctttctagtatttgctggaagaaagtttactcagcctattaaggatgatatcggagataaatctgttttcacgttcatgtccctttctgatgatgaaaagaaggctatagttgaaaagctcgagcaagaaaagttggggtaagaatctgaatgatagtggaatgttttaagcatcttcaagaacaggtaaatattttgtatccatagattctatttaccactgaggagaaatgctaccataaacacagtttgtagattgtgattagtagcttagaagtgacaatacaaatgccatcaaaatgtccattccctgattgagagttggttgcatctcatattttcttttttgacattcaaaaaaaaaaaaaaaaaaaaaaaatggggcaacctggttcagtcggacccggatttggacccggtttaaag

SEQ ID NO: 5991 - protein, 280 aa, Arabidopsis thaliana
MASRLLSTTTLVTPPAYFNKSPAFLTARVGVRRGRANVKAVSNSSQGAVDGTVYKGVYGPWTIDQADVKEVILYRSGLVTAAASFVAASSAAFLPGDSWLSETIKQNHDLFYFVGASGLGLSLFLIHIYVTEIKRTLQALWALGFVGSFATYAALARPAGDNLVHYVVDHPSAVWFVGPLFASLTGLVFKEGLCYGKLEAGLLTFIIPSVLLGHLSGLMNDEVKLVLLGTWMALFLVFAGRKFTQPIKDDIGDKSVFTFMSLSDDEKKAIVEKLEQEKLG

SEQ ID NO: 5992 - DNA, 733 bp, Arabidopsis thaliana
aaattcaatctcttccaatttctcttcttcttcctcgcgacgcgttaatggcggcttcgttctcactcacgagcttcatctccttcatctcaccattcaaatctcaaaccaaacctacaccaccaccaaatctcactcttccttctccaacaatctcccaaaggcgaagaaatgatctcgctatcgaatcaatggcggtcgaagaatcttcttcaaccgcttcttcactttcctctgagcttgcttctgtgatatgcccctcgcttgcttactccaacacgctcttcttcagttctggatacaatgtgcaagtgtttgttgaagataacgagtcagaggagaggcttgtgaatcgatttaagagagaagtgatgagaactggtgttatacaggaatgtaagaggagaagatactttgagaataaacaagatgagaagaaacgtaggactcgtgatgctgctaagcgtaataagaaaaggcgtcctcaagcaaggtttactcaagaaacaagagaagaagcagcagcagcaactaagagtaagaaaaaagatgaggaagaagacaactgggagatgcctggtggagatgtaccttcttgaaacacgattttagtatataaaatctccggtcttttggttaaatttcgtattatcccgtttttattacttggtacattgtgagttggaaatgtgtttactgcatattataacttgcttctagtattgagttctct

SEQ ID NO: 5993 - protein, 198 aa, Arabidopsis thaliana
IQSLPISLLLPRDALMAASFSLTSFISFISPFKSQTKPTPPPNLTLPSPTISQRRRNDLAIESMAVEESSSTASSLSSELASVICPSLAYSNTLFFSSGYNVQVFVEDNESEERLVNRFKREVMRTGVIQECKRRRYFENKQDEKKRRTRDAAKRNKKRRPQARFTQETREEAAAATKSKKKDEEEDNWEMPGGDVPS

SEQ ID NO: 5994 - protein, 183 aa, Arabidopsis thaliana
MAASFSLTSFISFISPFKSQTKPTPPPNLTLPSPTISQRRRNDLAIESMAVEESSSTASSLSSELASVICPSLAYSNTLFFSSGYNVQVFVEDNESEERLVNRFKREVMRTGVIQECKRRRYFENKQDEKKRRTRDAAKRNKKRRPQARFTQETREEAAAATKSKKKDEEEDNWEMPGGDVPS

SEQ ID NO: 5995 - protein, 135 aa, Arabidopsis thaliana
MAVEESSSTASSLSSELASVICPSLAYSNTLFFSSGYNVQVFVEDNESEERLVNRFKREVMRTGVIQECKRRRYFENKQDEKKRRTRDAAKRNKKRRPQARFTQETREEAAAATKSKKKDEEEDNWEMPGGDVPS

SEQ ID NO: 5996 - DNA, 1313 bp, Arabidopsis thaliana
gagtcacccgaagcacatctctttttatctcttcgccaagaaaacaaaaagcatagcctaacagaacagaatctagtgagccaaatcaagatggtgacgccaactacaattagaaccgtcgatctccgctccgacacggtgactaaaccaacagagtcaatgcgttcagcaatggcaaacgcggaagtagacgacgacgttttgggaaacgatccaacggctctgcgtttggagaaagaggtggctgagatcgctggaaaagaggcggcgatgtttgttccgtcagggacaatggggaatctgataagcgtgttggtccattgtgatgagagagggagtgaagtgattcttggagacgactctcacattcatatatatgaaaacggcggcgtttcaagcctcggtggtgtgcatccgaggacggtgaagaatgaggaagacggtacgatggagattggtgctattgaagctgccgtgaggagtcccaaaggagatctccatcatccggttactaagcttatatgtcttgagaatactcaagcaaattgtggaggtagatgccttcctatagaatatatagacaaagtcggagaattagccaagaaacatggtttgaagcttcacattgacggagctaggattttcaacgcttctgtggcacttggagttcccgtgaagaggattgttcaagcagctgattctgtctcgatctgtttgtcgaaaggtattggtgcaccggtcggttcggtaatcgtgggaagcaagaagttcattactaaagcaaggtggttaaggaaaacattaggcggaggaatgagacagatcggcgtgctctgcgccgccgcattggtggctctccatgaaaacgtcgccaagctcgaagatgaccataagaaagccagggttttggcagaaggactgaaccggattgaacggttaagagtgaacgttgcagctgtggaaaccaacatcatatacgtagacataccagaagatccaaaatttggagcagaagaggcatgtaagagcttggaagatgtcggtgtgcttgtcataccccaagctacattcagaatcaggattgttctacaccaccaaatctcagacgtcgacgtggaatatgtactctcttgctttgagaaaatatttcactcgtgaagagaagagaaggcgttattattttaagtaatttcactcgttggacatgtgtaaggttgtatttgaatcttcattcagaataaggttgtatttgaatcgattttcttggtttacaaatgaaaacctttaaccaagaagtagaaaagtctttcacc

SEQ ID NO: 5997 - protein, 385 aa, Arabidopsis thaliana
ESPEAHLFLSLRQENKKHSLTEQNLVSQIKMVTPTTIRTVDLRSDTVTKPTESMRSAMANAEVDDDVLGNDPTALRLEKEVAEIAGKEAAMFVPSGTMGNLISVLVHCDERGSEVILGDDSHIHIYENGGVSSLGGVHPRTVKNEEDGTMEIGAIEAAVRSPKGDLHHPVTKLICLENTQANCGGRCLPIEYIDKVGELAKKHGLKLHIDGARIFNASVALGVPVKRIVQAADSVSICLSKGIGAPVGSVIVGSKKFITKARWLRKTLGGGMRQIGVLCAAALVALHENVAKLEDDHKKARVLAEGLNRIERLRVNVAAVETNIIYVDIPEDPKFGAEEACKSLEDVGVLVIPQATFRIRIVLHHQISDVDVEYVLSCFEKIFHS

SEQ ID NO: 5998 - protein, 355 aa, Arabidopsis thaliana
MVTPTTIRTVDLRSDTVTKPTESMRSAMANAEVDDDVLGNDPTALRLEKEVAEIAGKEAAMFVPSGTMGNLISVLVHCDERGSEVILGDDSHIHIYENGGVSSLGGVHPRTVKNEEDGTMEIGAIEAAVRSPKGDLHHPVTKLICLENTQANCGGRCLPIEYIDKVGELAKKHGLKLHIDGARIFNASVALGVPVKRIVQAADSVSICLSKGIGAPVGSVIVGSKKFITKARWLRKTLGGGMRQIGVLCAAALVALHENVAKLEDDHKKARVLAEGLNRIERLRVNVAAVETNIIYVDIPEDPKFGAEEACKSLEDVGVLVIPQATFRIRIVLHHQISDVDVEYVLSCFEKIFHS

SEQ ID NO: 5999 - protein, 332 aa, Arabidopsis thaliana
MRSAMANAEVDDDVLGNDPTALRLEKEVAEIAGKEAAMFVPSGTMGNLISVLVHCDERGSEVILGDDSHIHIYENGGVSSLGGVHPRTVKNEEDGTMEIGAIEAAVRSPKGDLHHPVTKLICLENTQANCGGRCLPIEYIDKVGELAKKHGLKLHIDGARIFNASVALGVPVKRIVQAADSVSICLSKGIGAPVGSVIVGSKKFITKARWLRKTLGGGMRQIGVLCAAALVALHENVAKLEDDHKKARVLAEGLNRIERLRVNVAAVETNIIYVDIPEDPKFGAEEACKSLEDVGVLVIPQATFRIRIVLHHQISDVDVEYVLSCFEKIFHS

SEQ ID NO: 6000 - DNA, 1338 bp, Arabidopsis thaliana
aaaagaaaaatcgaaaaaaaaaaactctccgactcggaagaagagggagagagatgaagaagccggtcggagccgagaagaagagggttaaacgatcatcgggatctgcatctacttccgttagagattctggttctgattctcaacctaggaagcaagctgtgaagaaggatagttttcagttgtttgctgagaaagttagagaccacaagggattagaatccagatgggctgttatggagcaagcacgagttgaatactttagagggaaagattttgtgagctttatgaagaataaccctgactttaaagatattctggaagaagataaagaccttgacacagacgatattgccaatgttttgttgggaaagaaccttttggtccgctgtgatcgtgttactaaaactcttcgtcccgggaagaaaaagctctctacttggcctgctcatttggagattttccgtgacgatcaatctttctctgaaaatgatgccttttttgcatggacgttcgaaaaacggcatccgctatggcaaacgcttttgtccttcttctggcctgtattgactcttgcaatttgtttgtttcctgtgtatccacaccgttgcaaactaattgtactctactcatgtgcgggcattcttctgatgattctctccttacttttcgtgagagcagttgctttcggtgctatgtggattcttttgggaaagcgtgtctggttcttccccaacattctagctgaggaagccacattgaaggaactgttccgtttctggccaaagaaagacgaggaagaaccgcccaagtggacatctcgacttttctacacagtagtggctattgttgttgtcatgctgcttaggcgtcatgcccctgatgaagctgctcgggccaggtaccaaagaaggatgtccaacatcattgatgatgtccttgagtggtcaccaaagctagcactttctggtttgatggagaatcagcaacctgtaaacatcacagatgcggcaaacaactcctcagattcagcaggaggtcccgaccagactgaagaggtcgacctagatgaaactcaaggcgaggacctagacgaaacgcaaggcaaggaggaagctgaaggttggactgactctgatcttaaaacataaaaaaaccaaaatatagaaacgaaagttcattgtaacaataagtcaacttaagtgaccaagacgaggtgagttctttataagaaagtcttgaaagattttgtggtactccattactcctttacattttgacacaatctggaatttagctctcaatcacagttttgtattccaaacttcaattccagct

SEQ ID NO: 6001 - protein, 382 aa, Arabidopsis thaliana
KKNRKKKTLRLGRRGREMKKPVGAEKKRVKRSSGSASTSVRDSGSDSQPRKQAVKKDSFQLFAEKVRDHKGLESRWAVMEQARVEYFRGKDFVSFMKNNPDFKDILEEDKDLDTDDIANVLLGKNLLVRCDRVTKTLRPGKKKLSTWPAHLEIFRDDQSFSENDAFFAWTFEKRHPLWQTLLSFFWPVLTLAICLFPVYPHRCKLIVLYSCAGILLMILSLLFVRAVAFGAMWILLGKRVWFFPNILAEEATLKELFRFWPKKDEEEPPKWTSRLFYTVVAIVVVMLLRRHAPDEAARARYQRRMSNIIDDVLEWSPKLALSGLMENQQPVNITDAANNSSDSAGGPDQTEEVDLDETQGEDLDETQGKEEAEGWTDSDLKT

SEQ ID NO: 6002 - protein, 365 aa, Arabidopsis thaliana
MKKPVGAEKKRVKRSSGSASTSVRDSGSDSQPRKQAVKKDSFQLFAEKVRDHKGLESRWAVMEQARVEYFRGKDFVSFMKNNPDFKDILEEDKDLDTDDIANVLLGKNLLVRCDRVTKTLRPGKKKLSTWPAHLEIFRDDQSFSENDAFFAWTFEKRHPLWQTLLSFFWPVLTLAICLFPVYPHRCKLIVLYSCAGILLMILSLLFVRAVAFGAMWILLGKRVWFFPNILAEEATLKELFRFWPKKDEEEPPKWTSRLFYTVVAIVVVMLLRRHAPDEAARARYQRRMSNIIDDVLEWSPKLALSGLMENQQPVNITDAANNSSDSAGGPDQTEEVDLDETQGEDLDETQGKEEAEGWTDSDLKT

SEQ ID NO: 6003 - protein, 304 aa, Arabidopsis thaliana
MEQARVEYFRGKDFVSFMKNNPDFKDILEEDKDLDTDDIANVLLGKNLLVRCDRVTKTLRPGKKKLSTWPAHLEIFRDDQSFSENDAFFAWTFEKRHPLWQTLLSFFWPVLTLAICLFPVYPHRCKLIVLYSCAGILLMILSLLFVRAVAFGAMWILLGKRVWFFPNILAEEATLKELFRFWPKKDEEEPPKWTSRLFYTVVAIVVVMLLRRHAPDEAARARYQRRMSNIIDDVLEWSPKLALSGLMENQQPVNITDAANNSSDSAGGPDQTEEVDLDETQGEDLDETQGKEEAEGWTDSDLKT

SEQ ID NO: 6004 - DNA, 1730 bp, Arabidopsis thaliana
gtgttcgcctttctctcgtacaagtcaaaatggcgtccgttgttcttcgaaaccctagctcgaagcgccttgttccattctcttcccagatctactctcgctgtggtgcttccgttacttcctcttactcgatctctcattctatcggtggagatgatctctcttcctctaccttcggaacctcctccttctggagatccatggccacttttactcgaaataaacctcatgtaaatgttggaactattgggcatgttgatcatggcaagaccactttaactgctgcaatcacaaaggttcttgctgaggagggcaaagctaaagctattgcctttgatgaaattgataaagctcctgaagagaagaagagaggaattactattgccacggctcatgtggagtatgaaactgcaaagcgtcactatgctcatgtggattgccctggacacgcagattatgttaaaaatatgattactggagctgcgcaaatggatggcggaattcttgtggtttcaggaccagatggacccatgccgcagacaaaggaacatattctacttgcacgccaggttggtgttccctcacttgtgtgcttcttgaacaaagttgatgtggtggatgaccctgagctcttggagcttgtcgagatggaactacgtgagctcctcagcttctacaagtttcctggggatgatattcccatcatccgaggatctgctctgtccgcattacagggcaccaatgatgaaattggaaggcaagctatattaaagctgatggatgctgttgatgaatatatacctgaccctgttcgcgtccttgacaagcctttcttgatgccaattgaagatgttttctcaattcaaggacgtggaactgttgcaaccggtcgtatcgaacagggagtcattaaagtgggtgaagaagttgagatattgggtttacgtgaggggggtgttccactgaaatcgactgtaactggggttgagatgttcaagaagattttggataatggacaggctggtgataatgtaggacttcttctgcgtgggctaaagagagaagacattcagcgtggaatggtgattgctaagcctggttcatgcaagacatacaagaagtttgaagcagagatttacgtgctcacaaaggatgaaggtggacgtcacactgcatttttctctaactacaggcctcagttttacttgaggactgcagatatcactggcaaagtggaattacccgaaaacgtgaagatggttatgcctggtgacaatgtcacagctgttttcgagttaatcatgcctgtcccactcgaaacaggtcaaagatttgccttaagggaaggaggtagaacagttggagctggtgttgtatcaaaagtgatgacctaaactactcaaaagcacattcttctccttcgttctctaggaatccatcaatttcgagatttttctttttgtctttttgctgctttgagatttctttgggtagatcaaataaacagagagaaacttaatttatgtttccaatgagaaagattagggcagagggcacgaaacgtctatttctttttgatgcttcctactttgtgaaactttcaaaaagccacttccaattctttctcaccttcgtggtttgtcaagtatttgtttttatttctttaaaccaaaatcatgaattttcgattattaaattaagttgaccagaaatgaaatatttatttcatg

SEQ ID NO: 6005 - protein, 463 aa, Arabidopsis thaliana
VRLSLVQVKMASVVLRNPSSKRLVPFSSQIYSRCGASVTSSYSISHSIGGDDLSSSTFGTSSFWRSMATFTRNKPHVNVGTIGHVDHGKTTLTAAITKVLAEEGKAKAIAFDEIDKAPEEKKRGITIATAHVEYETAKRHYAHVDCPGHADYVKNMITGAAQMDGGILVVSGPDGPMPQTKEHILLARQVGVPSLVCFLNKVDVVDDPELLELVEMELRELLSFYKFPGDDIPIIRGSALSALQGTNDEIGRQAILKLMDAVDEYIPDPVRVLDKPFLMPIEDVFSIQGRGTVATGRIEQGVIKVGEEVEILGLREGGVPLKSTVTGVEMFKKILDNGQAGDNVGLLLRGLKREDIQRGMVIAKPGSCKTYKKFEAEIYVLTKDEGGRHTAFFSNYRPQFYLRTADITGKVELPENVKMVMPGDNVTAVFELIMPVPLETGQRFALREGGRTVGAGVVSKVMT

SEQ ID NO: 6006 - protein, 454 aa, Arabidopsis thaliana
MASVVLRNPSSKRLVPFSSQIYSRCGASVTSSYSISHSIGGDDLSSSTFGTSSFWRSMATFTRNKPHVNVGTIGHVDHGKTTLTAAITKVLAEEGKAKAIAFDEIDKAPEEKKRGITIATAHVEYETAKRHYAHVDCPGHADYVKNMITGAAQMDGGILVVSGPDGPMPQTKEHILLARQVGVPSLVCFLNKVDVVDDPELLELVEMELRELLSFYKFPGDDIPIIRGSALSALQGTNDEIGRQAILKLMDAVDEYIPDPVRVLDKPFLMPIEDVFSIQGRGTVATGRIEQGVIKVGEEVEILGLREGGVPLKSTVTGVEMFKKILDNGQAGDNVGLLLRGLKREDIQRGMVIAKPGSCKTYKKFEAEIYVLTKDEGGRHTAFFSNYRPQFYLRTADITGKVELPENVKMVMPGDNVTAVFELIMPVPLETGQRFALREGGRTVGAGVVSKVMT

SEQ ID NO: 6007 - protein, 397 aa, Arabidopsis thaliana
MATFTRNKPHVNVGTIGHVDHGKTTLTAAITKVLAEEGKAKAIAFDEIDKAPEEKKRGITIATAHVEYETAKRHYAHVDCPGHADYVKNMITGAAQMDGGILVVSGPDGPMPQTKEHILLARQVGVPSLVCFLNKVDVVDDPELLELVEMELRELLSFYKFPGDDIPIIRGSALSALQGTNDEIGRQAILKLMDAVDEYIPDPVRVLDKPFLMPIEDVFSIQGRGTVATGRIEQGVIKVGEEVEILGLREGGVPLKSTVTGVEMFKKILDNGQAGDNVGLLLRGLKREDIQRGMVIAKPGSCKTYKKFEAEIYVLTKDEGGRHTAFFSNYRPQFYLRTADITGKVELPENVKMVMPGDNVTAVFELIMPVPLETGQRFALREGGRTVGAGVVSKVMT

SEQ ID NO: 6008 - DNA, 610 bp, Arabidopsis thaliana
acaactctcattttcttctctctcgattcttgatatatcagtaaccaaaaacacagagaattaaaacatggcttacttctccacagcgacatctcttctcctcctcgtcctctctgtttcctctccttatgttcatggagcctccgactgcgacacccttgtgattaccctgttcccatgtttaccttttatatcgatcgggggtacggccgatacacccacagcttcatgctgctccagtctcaaaaatattctcgatacgaaaccgatatgtctatgcgaagggttgaagaaggcacctttaggaatcaaactcaacgttactaaatctgctactcttcccgttgcttgtaaacttaatgctcctccggtgtcagcttgtgattcattgcctcctgctagtcctcctactgctaatgggcaagctccagtatggggatcaggatgggctccagctccaagcccttctaaaggaaattcattgatcccaatctctggcttttcctttgtaatcgttaccgcattggccatgttccgtatctaaaacccgacagccttctagtcgatgtttcaataatttccattaagacttatcatgcgtctttccact

SEQ ID NO: 6009 - protein, 158 aa, Arabidopsis thaliana
MAYFSTATSLLLLVLSVSSPYVHGASDCDTLVITLFPCLPFISIGGTADTPTASCCSSLKNILDTKPICLCEGLKKAPLGIKLNVTKSATLPVACKLNAPPVSACDSLPPASPPTANGQAPVWGSGWAPAPSPSKGNSLIPISGFSFVIVTALAMFRI

SEQ ID NO: 6010 - DNA, 840 bp, Arabidopsis thaliana
tcttcttcttcttcctcttcgatattcgtcagtgtgtgtattttggggaaaactttgtgagcaaagagcgagaaaatgagcggagccggtaagaaaatcgcggatgtggctttcaaagcttcaaggactatcgattgggatggtatggctaaggtccttgtcacagatgaggctcgtagagagttctctaaccttcgtcgtgctttcgatgaggttaacacacagctccagaccaaatttagtcaggaacctgaacctatagattgggattactataggaagggtattggagctggcattgttgacaagtacaaggaagcttatgacagcattgagattccaaagtacgttgacaaagttactcctgaatacaagccaaagtttgatgctttgttggtggaactgaaagaagcagaacagaaatcgctcaaggagtctgaacggttggagaaagaaattgctgatgtccaagagatcagcaaaaagctcagcaccatgactgcagatgagtactttgagaagcacccggaactcaaaaagaagtttgatgacgaaatccgtaatgacaactggggatactgatcatgtttctccatctccggcttggaaagaaaactctctttctctttctctgttctcttactgtgattttgtgagccaatcataacaataataagtacaccattcacttaagcagtgttgagatcttcattccaaggaagataaacgcatttggttttagttatcaatttcacaaattgtttcgtttcgttcttcagtgaataataagagtcaaaaaaattatcattgtcaaggaatgaagaagactcttgactcgtc

SEQ ID NO: 6011 - protein, 168 aa, Arabidopsis thaliana
MSGAGKKIADVAFKASRTIDWDGMAKVLVTDEARREFSNLRRAFDEVNTQLQTKFSQEPEPIDWDYYRKGIGAGIVDKYKEAYDSIEIPKYVDKVTPEYKPKFDALLVELKEAEQKSLKESERLEKEIADVQEISKKLSTMTADEYFEKHPELKKKFDDEIRNDNWGY

SEQ ID NO: 6012 - protein, 145 aa, Arabidopsis thaliana
MAKVLVTDEARREFSNLRRAFDEVNTQLQTKFSQEPEPIDWDYYRKGIGAGIVDKYKEAYDSIEIPKYVDKVTPEYKPKFDALLVELKEAEQKSLKESERLEKEIADVQEISKKLSTMTADEYFEKHPELKKKFDDEIRNDNWGY

SEQ ID NO: 6013 - DNA, 1158 bp, Arabidopsis thaliana
aaaaaacgcacaacgagaaaataaaaaacgcaccgccggtaacaattttccggcgaatctgaaaactaacgatttttctcgagtttggtagagaaagagaaagagattgattcgttcctggttcgtggatcgaatagagaagaagaaagagtaagtgcaacagaatcaatggtatttcccggtgagatgacgacgacgacaacgagacctgagcaacgatcgaagactcttcacaatttccctctcccgaacttatgggggaatcagagacaactcaagtgcacgaagatcgactctatcagcaacaacaacaacaacggaggaggtcccggcggcgatcaccgactacgacgccgatctccgcctctggaattcgctgattctcccgtttcgatgccgtttcgattcggtaactccgatcatcgccgaccgtttaaatcgggaagcgaagaagggatcgaagagttcagggtgaagcttatgtcggatctgaagacggagacagataagatcacacaatcgatgtttaacaaaggcgtaaccgaagaggaagaggaacaaatcgacggttctggttctggttctggttccggtcaagagaaggagatgattcctccggtgaagccgtggaatctaaggaaaagaagagcagcagcgtgtaaagaaccggaatccaacagtttgatcaataaaggaattgtgattgaggagaaggtagtgaagaatccatctccggtgagaggcggcggcggagtggtcgaagcggagaagaagcgtcctatgttctctatgaagctatcgaagaaggagatggaagaagatttcattgggatggtaggtcaccgagcaccgcgtcggcccaagaaacggtccaaaactgttcagaaaaaactcgatagtttgtttccagggttgtatttgactgaagtgacacatgatgcatataaggttccagaataaaccaagaatctgcagagatgatgatgatgatgatgatgaatttgtgtaattctggaattgagggtcaagttcttgagaagctccttcttcctctgctaatatttttcttgattaattctttcttctaaattgttctgaataaaactatacaaaaacgtttaggtctccagttgattaatacaaattaaagttttcttc

SEQ ID NO: 6014 - protein, 263 aa, Arabidopsis thaliana
MVFPGEMTTTTTRPEQRSKTLHNFPLPNLWGNQRQLKCTKIDSISNNNNNGGGPGGDHRLRRRSPPLEFADSPVSMPFRFGNSDHRRPFKSGSEEGIEEFRVKLMSDLKTETDKITQSMFNKGVTEEEEEQIDGSGSGSGSGQEKEMIPPVKPWNLRKRRAAACKEPESNSLINKGIVIEEKVVKNPSPVRGGGGVVEAEKKRPMFSMKLSKKEMEEDFIGMVGHRAPRRPKKRSKTVQKKLDSLFPGLYLTEVTHDAYKVPE

SEQ ID NO: 6015 - protein, 257 aa, Arabidopsis thaliana
MTTTTTRPEQRSKTLHNFPLPNLWGNQRQLKCTKIDSISNNNNNGGGPGGDHRLRRRSPPLEFADSPVSMPFRFGNSDHRRPFKSGSEEGIEEFRVKLMSDLKTETDKITQSMFNKGVTEEEEEQIDGSGSGSGSGQEKEMIPPVKPWNLRKRRAAACKEPESNSLINKGIVIEEKVVKNPSPVRGGGGVVEAEKKRPMFSMKLSKKEMEEDFIGMVGHRAPRRPKKRSKTVQKKLDSLFPGLYLTEVTHDAYKVPE

SEQ ID NO: 6016 - protein, 188 aa, Arabidopsis thaliana
MPFRFGNSDHRRPFKSGSEEGIEEFRVKLMSDLKTETDKITQSMFNKGVTEEEEEQIDGSGSGSGSGQEKEMIPPVKPWNLRKRRAAACKEPESNSLINKGIVIEEKVVKNPSPVRGGGGVVEAEKKRPMFSMKLSKKEMEEDFIGMVGHRAPRRPKKRSKTVQKKLDSLFPGLYLTEVTHDAYKVPE

SEQ ID NO: 6017 - DNA, 574 bp, Arabidopsis thaliana
agatagaacagtgaagaagaaatgggaaggatattcacggtggagcttgaaggaagatcttacagatgcaggttctgcagaacccatctcgctcttcccgatgatcttgtctctcggtcgtttcattgccgtagaggaaaggcttacctcttcaaccgttcggtgaacataagtatgggtcctctagaggaaagactgatgctttccggtatgcacaccgtagctgacattttctgctgctgttgtggacagaatgttggctggaaatacgaatcagcgcacgagaaagctcagaagtataaagaaggcaaatttgttctggaaagaggaaggatcgtggatgaaatcgatttatcaactgaggtttatatcgatactcatggtagcacaagcgacacagaagattcttaaatgttaccttttttctgtgtgtttgtcaagagcagagcttgttagtgtagaaatctgtagcatgtttatagagatgtgtatcaaacttgttgtgttgtttttatatctcgtagaaattttatgtgacttcgaatctttattttaaatccaataaaaactcatt

SEQ ID NO: 6018 - protein, 129 aa, Arabidopsis thaliana
MGRIFTVELEGRSYRCRFCRTHLALPDDLVSRSFHCRRGKAYLFNRSVNISMGPLEERLMLSGMHTVADIFCCCCGQNVGWKYESAHEKAQKYKEGKFVLERGRIVDEIDLSTEVYIDTHGSTSDTEDS

SEQ ID NO: 6019 - protein, 100 aa, Arabidopsis thaliana
MLAGNTNQRTRKLRSIKKANLFWKEEGSWMKSIYQLRFISILMVAQATQKILKCYLFSVCLSRAELVSVEICSMFIEMCIKLVVLFLYLVEILCDFESLF

SEQ ID NO: 6020 - protein, 78 aa, Arabidopsis thaliana
MGPLEERLMLSGMHTVADIFCCCCGQNVGWKYESAHEKAQKYKEGKFVLERGRIVDEIDLSTEVYIDTHGSTSDTEDS

SEQ ID NO: 6021 - DNA, 2322 bp, Arabidopsis thaliana
atcctatcctattgtttgattgttgatctgattatcctggggatcaaatccggctagctataagaactccggtgaagccgattgttcgatgacgaagtttcgaatttccagagaagcgggtgaggtcttcaattacggcggacgaggcgaaagaggattgattactcaacatcacagaagaaaaaaggcagtcctgcatgcgaagaagaggtgtgatcgcgattttttgttttatcaaattggttacaaaggagagaagatgcgtcaacagagattcggatatcgaaaaacagagattctatcatcagattcgtcaatggagatacctgtttgtcgaggtctggaagctgattttagaggtcagaccctgatttggtttatgttttaatcttcgctaaaaaacacttttacagcaagattatacgatgtttttcagttttttctaatcgcccttttcaggaaaattgtcccaatattatttcttctacttaccaaacgattcattcatcttgtacaaaccattcattcaactccattcaactccctgttctttttcctccgccttctctcttctaactcttctaatcatgcgctcgtttatctggtttatgttacagagtccagttattttgttatttgccatgatttttggtataactatcttagtgttggttgttatatgtcttaggataatatttccatcacttgatgatgttcatcgagttgatgacaacacatatgtacaagttgttgttgactccgatgatgaacatcatcaagaagggctcatacccgttccagtagagaatttcgtatttaggtatcccgaaagggattgtagtatttgtctagacacttttgaaagtaatgttccattggctaatacagtgtgcggacacgcgttccactttcactgtttaagtcaatggaacaagacttgtcctatctgtagggcaattctattctagttagtattagtatttaggaaatttttaactaggtgggtagtgttttagtttgtatttagcaaaatgggtagtttttcttatgcactatcttcaatttcaaatgtaacttatgcactcctgcccgtaccctcatgcactatctacaagtccgactattccctggcacgattgtaaaccgcttagctgcattctcccgtagcttaagtaaggaagatggcgaatgaaacggggttggacttcactgagcagattattactttggagaacaagtatagacaggcaccggaaaaaatctttacagcatctcactctgatacaacgtgtgaacattgggcgtcatcccaaccgacctactttccttgatcatatacataacatcactgacaagtttatggagcttcatggagaccgagcggggtatgatgaccctgcaattgtgacgggtattggaaccattgatgaacgttacatgttcataggtcaccagaaaggtagaaacaccaaagaaaatataatgcggaactttggtatgcctactcctcacggatagaggaaagcacttcggatgatgtattatgcagaccatcacggttttccaatcgtaaaattcatcgacattcctggagcctatgcagaacttaaatccgaggaactcggacagggtgaagcaattgccaacaatctgaggacgatgtttggcctgaaagtgccaattctttctattgtcgttggggaaggtggttctggtggtgccctagccattggctgtgataatgaaatgctgatgctcgaaaatgcagttttctatgttgccagtccagatgcctgtgcagcgctcttgtgaaagacttccaaggctgctcctgaggctgctgaaaagcatagaattacctccaaggagctggtcaagcttaatgtagccgatggaatcattcctgaaccgtttggtggggcccatgctgatccttcatggacgtcgcagcagataaagattgctatcaatgaaaacatgaatgaatttgggaaaatgagtggggaggaggagctcctgaagcataggatggctaagtacagaaagattggagtgttcatagaaggtgaaacaatagagcctagtaggaaagtcaaaaaataataatatatgagattttttcgggtagattgacctatattagcattcgttgatgcactttaagctattaatgggctcaaaaatattagtttattaatgggctcaaaagttttaatattagagttttggtatttacgggttcactagcttaagtaatgtcattgaccaactctagtttttgtggacaagtttcattttattacatggaccaaatttaggtgt

SEQ ID NO: 6022 - protein, 126 aa, Arabidopsis thaliana
MRSFIWFMLQSPVILLFAMIFGITILVLVVICLRIIFPSLDDVHRVDDNTYVQVVVDSDDEHHQEGLIPVPVENFVFRYPERDCSICLDTFESNVPLANTVCGHAFHFHCLSQWNKTCPICRAILF

SEQ ID NO: 6023 - protein, 119 aa, Arabidopsis thaliana
MLQSPVILLFAMIFGITILVLVVICLRIIFPSLDDVHRVDDNTYVQVVVDSDDEHHQEGLIPVPVENFVFRYPERDCSICLDTFESNVPLANTVCGHAFHFHCLSQWNKTCPICRAILF

SEQ ID NO: 6024 - protein, 109 aa, Arabidopsis thaliana
MKRGWTSLSRLLLWRTSIDRHRKKSLQHLTLIQRVNIGRHPNRPTFLDHIHNITDKFMELHGDRAGYDDPAIVTGIGTIDERYMFIGHQKGRNTKENIMRNFGMPTPHG

SEQ ID NO: 6025 - DNA, 988 bp, Arabidopsis thaliana
aagcgtaaaaacctctatcatcaccaagttccgtcgtctgattcgaacccccatacgaatcagacaagacactccttccaatataccatacttcatcctttgattcaaataccaaaaaaatttaaaccctaaaattcatttgagtctcttcctagtcatcaatctcttgaaaccctgattccatggtttctagattttccattgatcttgtttttaaataatgggaagctttcatcgccggactttttcttatgataaacttccgaacgaacccattaggctctccgttctcaaactagatggctcttcctttgatgtttacgtattgacctcggccaccgttggggatctcaaggttgctatagaaactgccttcagccatgtccccaagaagggaccctccaagatctcatggtcacacgtatgggggcatttttgtttgtgtttcggaggtcagaagttaattaccgatacggattgcatcggaaattatgggatgaaggacggtgatgaggttaggttcaaaaaccatgtatccggcaatgcggtattgagcaagggatattctaggaaatccaaacaaaagaatttagagagggtattgccaaaggatggagatgaagtattgaataggattgaagagattgatgactcttgggatgatcttgagagaggaggtttagtgatgtacaaagatgatgacatggaaacttcttcaaatgaaagcaacaggtcttgtctatccactgtacatggttgctgctttgctttcggtttaaaagagcttcttgggtttggtaatgacagagcttattactctttgagagatacttggagagacgattgactttggtccaatttttgttattcgtaagattttgtaatcacacaacaaaatgatccaattatgtaaggatcaagttctattacaaagggtagtaattatgttcagtgaaagctttataatagagagtacaaagttacaatg

SEQ ID NO: 6026 - protein, 208 aa, Arabidopsis thaliana
MGSFHRRTFSYDKLPNEPIRLSVLKLDGSSFDVYVLTSATVGDLKVAIETAFSHVPKKGPSKISWSHVWGHFCLCFGGQKLITDTDCIGNYGMKDGDEVRFKNHVSGNAVLSKGYSRKSKQKNLERVLPKDGDEVLNRIEEIDDSWDDLERGGLVMYKDDDMETSSNESNRSCLSTVHGCCFAFGLKELLGFGNDRAYYSLRDTWRDD

SEQ ID NO: 6027 - protein, 116 aa, Arabidopsis thaliana
MKDGDEVRFKNHVSGNAVLSKGYSRKSKQKNLERVLPKDGDEVLNRIEEIDDSWDDLERGGLVMYKDDDMETSSNESNRSCLSTVHGCCFAFGLKELLGFGNDRAYYSLRDTWRDD

SEQ ID NO: 6028 - DNA, 4626 bp, Arabidopsis thaliana
atgatgatctctagaggtttattcggatggtctccgcctcatatgcaaccattaactccagtctctgaagtctccgagccacctgagtctccttctccttatctcgaccctggtgctgagtctggtggtggcacgggcacggcggcggcgctagcggaggctgatgaagagatggatgatcaagatgagcttgaaccacctcctgctgctgttcctttctctcagctcttcgcttgcgctgaccgctttgattgggtgcttatgattgttggctctgttgctgctgctgctcatggtactgcgcttattgtctacttgcattacttcgccaagattgttgatgttcttgctttctctaatgattctagtcagcagagatctgaacaccagtttgaccgactcgtccagctttcgttgacgatcgtgtacattgctggaggtgttttcatttctggttggattgaggtgtcttgctggatactgactggagaaaggcagactgctgtgatcaggtccaagtatgtccaagtattattgaatcaagatatgagtttctttgatacatatggtaataatggagatattgtgagccaagtgctgagcgatgtcttactcattcagtcagctttaagcgagaaagttggaaattatattcataacatggctacgtttatcagtggacttgttattggatttgtcaactgctgggaaattgcattgattacactagccactggtcctttcatcgttgctgctggaggcatatcaaatatttttctacacagacttgctgagaacatacaggatgcatatgctgaagcagccggcattgctgaacaggcgatctcttacattaggactttatatgcctttacaaatgaaactctagcaaaatattcatatgcaacctcccttcaagcaaccctgagatacggcatattaattagtcttgtgcaaggccttggacttggatttacttatgggcttgctatatgctcgtgtgcgctgcaactttggattggacgattctttgttcacaatggaagggcaaatggtggagaaatcatagcagctctttttgctgttattttaagtggcctggggttaaatcaagctgctacgaacttctactcttttgatcaaggaaggattgctgcgtatagactttttgagatgataactcgttcatcttctgtggctaaccaagaaggagctgtgctggcttctgttcaaggaaatattgagttccggaatgtatatttcagttatttgtcacgacctgaaattccaatcttgagcggattttacctcacggttcctgctaaaaaagcagttgcacttgttggtagaaatggttctggaaaaagcagcatcattcctttaatggaacggttttatgatccgacattaggagaagttcttcttgatggagaaaatattaaaaatctaaaactggagtggctgagaagccaaatagggttggttacccaggagcctgctctgcttagcttgagcataagagagaatattgcatatggtcgtgatgctactcttgatcagatagaggaggcagctaaaaatgcgcatgcgcacacatttatcagctcacttgaaaaaggatatgaaacacaggtcgggagagccggtttagcaatgacagaggagcagaaaattaaactttcgattgctagagctgtgcttttgaatccaacaattcttctgcttgatgaagtaactggaggactagacttcgaagctgaaagaattgtgcaggaagctcttgatcttctgatgttgggacggtcaaccataataatagcccgacgattaagtttgataaaaaatgctgactatattgctgtgatggaggagggtcagctcgttgaaatgggtacacacgatgaattgataaatcttggtgggctgtatgctgagcttctgaagtgtgaagaagcaacaaagcttccaagaaggatgccagttaggaactacaaggagtctgcggtgtttgaggtcgagagagactcttcagctggctgtggcgtccaagaaccatcatcacccaaaatgattaagtctccatctcttcaaagaggtagtggtgtgttccgtccccaggaactgtgttttgatactgaagaatcacctaaagctcatagccctgcatctgagaaaacaggggaagatggcatgtctctggattgtgctgataaagagccaactatcaaaaggcaagatagtttcgagatgaggttgccacaccttcctaaagttgacgttcagtgtccccaacaaaaatcaaacggctcagagccagagtcccctgtttcaccccttttgacatcagatcctaaaaacgagcgttcccattcgcagacgtttagtcgtcctcttagttctcctgatgacactaaagcaaatggtaaggcgtctaaggatgctcaacacaaggagtcaccttcgttttggaggttggcacagcttagtttcccagagtggctttatgctgtattagggagtcttggtgctgccatctttggttctttcaatcctcttctggcttatgtcattgcgttggtagttacggaatattataaaagcaaaggaggccacctgcgcgaggaggttgacaaatggtgtttgatcattgcctgcatggggattgtgacagttgttgccaatttcttgcagcatttctattttggcataatgggagagaaaatgacggagagagttaggaggatgatgttctcagcaatgctgcgtaacgaagttggatggttcgatgatgaagagaacagtccagatacattatccatgcgtttagcaaatgatgctacttttgtccgagctgccttcagcaacaggctttcaatatttattcaagatagttttgctgttattgttgctcttctgattgggttgctgcttggttggcgtttggcccttgttgcattggcaactctgccaattctcactctttctgccattgctcagaaactgtggcttgccggattctcaaaaggcatacaggagatgcacagaaaagcatctttagttctcgaggatgctgttagaaacatctacactgttgttgctttctgtgctggtaacaaagtgatggaactgtacaggatgcaactccagcggatactcagacagagctatctccatgggatggctattggttttgcgtttggtttttcacagtttcttcttttcgcctgcaacgcgctcctcctatggtgcactgcgttatctgttaaccgtggatatatgaaattatcgacagctataacggagtacatggttttctcatttgctacattcgcccttgtggagccatttggattagcaccgtatatcctcaagcgacgtaagtctctgatatcagtgtttgaaatagtcgatcgagtccctacgattgaaccagatgataactctgctctcaaacctcctaatgtctacggaagtattgaattgaaaaacgtagacttctgctacccaactcgacccgagatactagtgctgagcaactttagtctcaaaatcagtggcggacagactgtagctgttgttggcgtttcaggttctggaaagagcacgataatctcactagtagagagatactacgacccagttgctggccaagtcctactagatgggagagacttaaagttatataacttgagatggttgagaagccacatgggtttggttcagcaagaacccataatcttttccacaacaatcagagagaatatcatatatgcaaggcataatgcaagtgaagctgagatgaaggaagcagcaagaattgcaaatgctcaccatttcatcagcagcttacctcacggttacgacacacatattgggatgagaggcgtagaacttacccctggacagaaacagagaatagcaatagcacgcgtagtactgaagaatgctcccatcatcttaatagatgaagccagctcgtctatcgaatctgaatcgagtcgggttgtgcaggaggctcttgatacattgataatggggaacaaaacaacaattctgatagcacatagagcggctatgatgagacatgtggataacattgtggtacttaatggagggaggatagtagaggaaggtacacatgattctttagcagcaaaaaatgggttgtatgtacgtttgatgcaaccacactttggtaaaggtctacgccaacatcgactgatatagagttttgaggctccatcaatgataatgattttggcatctctgatcaatgattctccggaggattacaagatgttcaaaaaaaaccctatacaaccacgggtagttctctagcagatagggcctgtagatgtagatttccatagtcttcgagctgcttattctttttttggagacgaagcatcagaagtaggtcatggtcattgcttcgttctccaaagtatatcgattttgtctattgaatctgaatattttaggaggttggtaaatcattttggaggctgtttatttgcctttcctttatatgtgtctgtgctggtttgttcttgcaaaaacatggatgatgtatgtaaagcttaagaaaatagttgagaatgtgtaaatgtattcatttatcattac

SEQ ID NO: 6029 - protein, 1408 aa, Arabidopsis thaliana
MMISRGLFGWSPPHMQPLTPVSEVSEPPESPSPYLDPGAESGGGTGTAAALAEADEEMDDQDELEPPPAAVPFSQLFACADRFDWVLMIVGSVAAAAHGTALIVYLHYFAKIVDVLAFSNDSSQQRSEHQFDRLVQLSLTIVYIAGGVFISGWIEVSCWILTGERQTAVIRSKYVQVLLNQDMSFFDTYGNNGDIVSQVLSDVLLIQSALSEKVGNYIHNMATFISGLVIGFVNCWEIALITLATGPFIVAAGGISNIFLHRLAENIQDAYAEAAGIAEQAISYIRTLYAFTNETLAKYSYATSLQATLRYGILISLVQGLGLGFTYGLAICSCALQLWIGRFFVHNGRANGGEIIAALFAVILSGLGLNQAATNFYSFDQGRIAAYRLFEMITRSSSVANQEGAVLASVQGNIEFRNVYFSYLSRPEIPILSGFYLTVPAKKAVALVGRNGSGKSSIIPLMERFYDPTLGEVLLDGENIKNLKLEWLRSQIGLVTQEPALLSLSIRENIAYGRDATLDQIEEAAKNAHAHTFISSLEKGYETQVGRAGLAMTEEQKIKLSIARAVLLNPTILLLDEVTGGLDFEAERIVQEALDLLMLGRSTIIIARRLSLIKNADYIAVMEEGQLVEMGTHDELINLGGLYAELLKCEEATKLPRRMPVRNYKESAVFEVERDSSAGCGVQEPSSPKMIKSPSLQRGSGVFRPQELCFDTEESPKAHSPASEKTGEDGMSLDCADKEPTIKRQDSFEMRLPHLPKVDVQCPQQKSNGSEPESPVSPLLTSDPKNERSHSQTFSRPLSSPDDTKANGKASKDAQHKESPSFWRLAQLSFPEWLYAVLGSLGAAIFGSFNPLLAYVIALVVTEYYKSKGGHLREEVDKWCLIIACMGIVTVVANFLQHFYFGIMGEKMTERVRRMMFSAMLRNEVGWFDDEENSPDTLSMRLANDATFVRAAFSNRLSIFIQDSFAVIVALLIGLLLGWRLALVALATLPILTLSAIAQKLWLAGFSKGIQEMHRKASLVLEDAVRNIYTVVAFCAGNKVMELYRMQLQRILRQSYLHGMAIGFAFGFSQFLLFACNALLLWCTALSVNRGYMKLSTAITEYMVFSFATFALVEPFGLAPYILKRRKSLISVFEIVDRVPTIEPDDNSALKPPNVYGSIELKNVDFCYPTRPEILVLSNFSLKISGGQTVAVVGVSGSGKSTIISLVERYYDPVAGQVLLDGRDLKLYNLRWLRSHMGLVQQEPIIFSTTIRENIIYARHNASEAEMKEAARIANAHHFISSLPHGYDTHIGMRGVELTPGQKQRIAIARVVLKNAPIILIDEASSSIESESSRVVQEALDTLIMGNKTTILIAHRAAMMRHVDNIVVLNGGRIVEEGTHDSLAAKNGLYVRLMQPHFGKGLRQHRLI

SEQ ID NO: 6030 - protein, 1407 aa, Arabidopsis thaliana
MISRGLFGWSPPHMQPLTPVSEVSEPPESPSPYLDPGAESGGGTGTAAALAEADEEMDDQDELEPPPAAVPFSQLFACADRFDWVLMIVGSVAAAAHGTALIVYLHYFAKIVDVLAFSNDSSQQRSEHQFDRLVQLSLTIVYIAGGVFISGWIEVSCWILTGERQTAVIRSKYVQVLLNQDMSFFDTYGNNGDIVSQVLSDVLLIQSALSEKVGNYIHNMATFISGLVIGFVNCWEIALITLATGPFIVAAGGISNIFLHRLAENIQDAYAEAAGIAEQAISYIRTLYAFTNETLAKYSYATSLQATLRYGILISLVQGLGLGFTYGLAICSCALQLWIGRFFVHNGRANGGEIIAALFAVILSGLGLNQAATNFYSFDQGRIAAYRLFEMITRSSSVANQEGAVLASVQGNIEFRNVYFSYLSRPEIPILSGFYLTVPAKKAVALVGRNGSGKSSIIPLMERFYDPTLGEVLLDGENIKNLKLEWLRSQIGLVTQEPALLSLSIRENIAYGRDATLDQIEEAAKNAHAHTFISSLEKGYETQVGRAGLAMTEEQKIKLSIARAVLLNPTILLLDEVTGGLDFEAERIVQEALDLLMLGRSTIIIARRLSLIKNADYIAVMEEGQLVEMGTHDELINLGGLYAELLKCEEATKLPRRMPVRNYKESAVFEVERDSSAGCGVQEPSSPKMIKSPSLQRGSGVFRPQELCFDTEESPKAHSPASEKTGEDGMSLDCADKEPTIKRQDSFEMRLPHLPKVDVQCPQQKSNGSEPESPVSPLLTSDPKNERSHSQTFSRPLSSPDDTKANGKASKDAQHKESPSFWRLAQLSFPEWLYAVLGSLGAAIFGSFNPLLAYVIALVVTEYYKSKGGHLREEVDKWCLIIACMGIVTVVANFLQHFYFGIMGEKMTERVRRMMFSAMLRNEVGWFDDEENSPDTLSMRLANDATFVRAAFSNRLSIFIQDSFAVIVALLIGLLLGWRLALVALATLPILTLSAIAQKLWLAGFSKGIQEMHRKASLVLEDAVRNIYTVVAFCAGNKVMELYRMQLQRILRQSYLHGMAIGFAFGFSQFLLFACNALLLWCTALSVNRGYMKLSTAITEYMVFSFATFALVEPFGLAPYILKRRKSLISVFEIVDRVPTIEPDDNSALKPPNVYGSIELKNVDFCYPTRPEILVLSNFSLKISGGQTVAVVGVSGSGKSTIISLVERYYDPVAGQVLLDGRDLKLYNLRWLRSHMGLVQQEPIIFSTTIRENIIYARHNASEAEMKEAARIANAHHFISSLPHGYDTHIGMRGVELTPGQKQRIAIARVVLKNAPIILIDEASSSIESESSRVVQEALDTLIMGNKTTILIAHRAAMMRHVDNIVVLNGGRIVEEGTHDSLAAKNGLYVRLMQPHFGKGLRQHRLI

SEQ ID NO: 6031 - protein, 1394 aa, Arabidopsis thaliana
MQPLTPVSEVSEPPESPSPYLDPGAESGGGTGTAAALAEADEEMDDQDELEPPPAAVPFSQLFACADRFDWVLMIVGSVAAAAHGTALIVYLHYFAKIVDVLAFSNDSSQQRSEHQFDRLVQLSLTIVYIAGGVFISGWIEVSCWILTGERQTAVIRSKYVQVLLNQDMSFFDTYGNNGDIVSQVLSDVLLIQSALSEKVGNYIHNMATFISGLVIGFVNCWEIALITLATGPFIVAAGGISNIFLHRLAENIQDAYAEAAGIAEQAISYIRTLYAFTNETLAKYSYATSLQATLRYGILISLVQGLGLGFTYGLAICSCALQLWIGRFFVHNGRANGGEIIAALFAVILSGLGLNQAATNFYSFDQGRIAAYRLFEMITRSSSVANQEGAVLASVQGNIEFRNVYFSYLSRPEIPILSGFYLTVPAKKAVALVGRNGSGKSSIIPLMERFYDPTLGEVLLDGENIKNLKLEWLRSQIGLVTQEPALLSLSIRENIAYGRDATLDQIEEAAKNAHAHTFISSLEKGYETQVGRAGLAMTEEQKIKLSIARAVLLNPTILLLDEVTGGLDFEAERIVQEALDLLMLGRSTIIIARRLSLIKNADYIAVMEEGQLVEMGTHDELINLGGLYAELLKCEEATKLPRRMPVRNYKESAVFEVERDSSAGCGVQEPSSPKMIKSPSLQRGSGVFRPQELCFDTEESPKAHSPASEKTGEDGMSLDCADKEPTIKRQDSFEMRLPHLPKVDVQCPQQKSNGSEPESPVSPLLTSDPKNERSHSQTFSRPLSSPDDTKANGKASKDAQHKESPSFWRLAQLSFPEWLYAVLGSLGAAIFGSFNPLLAYVIALVVTEYYKSKGGHLREEVDKWCLIIACMGIVTVVANFLQHFYFGIMGEKMTERVRRMMFSAMLRNEVGWFDDEENSPDTLSMRLANDATFVRAAFSNRLSIFIQDSFAVIVALLIGLLLGWRLALVALATLPILTLSAIAQKLWLAGFSKGIQEMHRKASLVLEDAVRNIYTVVAFCAGNKVMELYRMQLQRILRQSYLHGMAIGFAFGFSQFLLFACNALLLWCTALSVNRGYMKLSTAITEYMVFSFATFALVEPFGLAPYILKRRKSLISVFEIVDRVPTIEPDDNSALKPPNVYGSIELKNVDFCYPTRPEILVLSNFSLKISGGQTVAVVGVSGSGKSTIISLVERYYDPVAGQVLLDGRDLKLYNLRWLRSHMGLVQQEPIIFSTTIRENIIYARHNASEAEMKEAARIANAHHFISSLPHGYDTHIGMRGVELTPGQKQRIAIARVVLKNAPIILIDEASSSIESESSRVVQEALDTLIMGNKTTILIAHRAAMMRHVDNIVVLNGGRIVEEGTHDSLAAKNGLYVRLMQPHFGKGLRQHRLI

SEQ ID NO: 6032 - DNA, 1596 bp, Arabidopsis thaliana
atgacctctctctccaccgccggttaccttcttctccttctccttctccctataagctacgacggtggcttcatcggagccgccgatgcagaacatgacctcagagccactgatctccataatcatcgccatcgtcgccaccgtaaccaccatcgcggagaagagtttgagtactcagccatatcatgtagagcttactcagcctcattggacgagtttggcgccgtaggagacggtgtaacttcaaatacagcggcgtttcgcgacgcggtgtcacaacttagccgtttcgcagactacggtggctcattgttatttgttcccgccggacggtggctcaccggaaactttaacctgaccagccattttacgcttttcctccaccgtgatgctgttatcctcgcctctcaagaagagagtgactatgaagtgatagagccactgccttcgtacggaagagggcgagacacagatggtggaaggttcatcagtctactttttggttcaaacttaaccgatgttgttatcaccggtgagaatgggacaattgatggacaaggagaaccatggtgggggaaattcaagagaggagaactaaaatacacaagaccttatttgattgagattatgcattctgatggtatccaaatctccaatctcactttcttgaattctccttcttggcatattcacccggtctacagcagcaatatatatatccaaggtttgacgatattagcaccggtcacggtaccaaacactgacggtatcaacccagattcttgtaccaacacgaggattgaggactgctacattgtctccggcgacgattgtatcgccgttaaaagtggatgggatcaatacggaatcaactacggcatgcctacgaaacagctcttgatccgacggctcacatgcatttctcctgatagtgccgtgatcgctctcggcagtgaaatgtccggtggaattgaagatgttcgagctgaagatattgttgccattaactctgaatctggaatcaggattaaaacagctatcggacgaggaggttacgtgaaggatgtatacgtaagaggaatgacaatgatgacaatgaaatatgtgttttggatgaccggaagttacggttcgcatccggacgatcattatgatccgaaagcgttaccggtgattcagaacattaattatcaagacatggtcgccgagaacgtgacgatgcctgctcagttagctggaatatcgggagatcagtttactggaatttgtatctctaacgtgactatcactctatcgaagaaacctaagaaagtgctttggaattgtactgatgtttcgggttatactagtggtgtgactccgcagccgtgtcagttgttaccggagaagcagccggggacggttgtgccgtgtaatttcccggaagatccgattcctattgatgaagtgaagcttcaacgttgctactccagaagaaggaatatgtgaacatgtaataagatcttcttttttttaacaaatacttttcttgggttataagtaaatgtgttatcaaatggggacatatttgattgaataatagacaaagcttcaagg

SEQ ID NO: 6033 - protein, 495 aa, Arabidopsis thaliana
MTSLSTAGYLLLLLLLPISYDGGFIGAADAEHDLRATDLHNHRHRRHRNHHRGEEFEYSAISCRAYSASLDEFGAVGDGVTSNTAAFRDAVSQLSRFADYGGSLLFVPAGRWLTGNFNLTSHFTLFLHRDAVILASQEESDYEVIEPLPSYGRGRDTDGGRFISLLFGSNLTDVVITGENGTIDGQGEPWWGKFKRGELKYTRPYLIEIMHSDGIQISNLTFLNSPSWHIHPVYSSNIYIQGLTILAPVTVPNTDGINPDSCTNTRIEDCYIVSGDDCIAVKSGWDQYGINYGMPTKQLLIRRLTCISPDSAVIALGSEMSGGIEDVRAEDIVAINSESGIRIKTAIGRGGYVKDVYVRGMTMMTMKYVFWMTGSYGSHPDDHYDPKALPVIQNINYQDMVAENVTMPAQLAGISGDQFTGICISNVTITLSKKPKKVLWNCTDVSGYTSGVTPQPCQLLPEKQPGTVVPCNFPEDPIPIDEVKLQRCYSRRRNM

SEQ ID NO: 6034 - protein, 286 aa, Arabidopsis thaliana
MHSDGIQISNLTFLNSPSWHIHPVYSSNIYIQGLTILAPVTVPNTDGINPDSCTNTRIEDCYIVSGDDCIAVKSGWDQYGINYGMPTKQLLIRRLTCISPDSAVIALGSEMSGGIEDVRAEDIVAINSESGIRIKTAIGRGGYVKDVYVRGMTMMTMKYVFWMTGSYGSHPDDHYDPKALPVIQNINYQDMVAENVTMPAQLAGISGDQFTGICISNVTITLSKKPKKVLWNCTDVSGYTSGVTPQPCQLLPEKQPGTVVPCNFPEDPIPIDEVKLQRCYSRRRNM

SEQ ID NO: 6035 - DNA, 731 bp, Arabidopsis thaliana
acagaagtagaagaaaccaaagcgaaatcaaaaagctcagcaattttccagatttctctaattgacgatggcgctttgtgctactactcaaaggactatccgtatagcggcgacgctccggcgtgttgctcgacctttcgctactgacgcggtggttgagtcggattacaagcgtggtgagatcggtaaggtctccggaatcccagaggagcatctttctcgcaaggtgataatatactcacctgctagaacagctacccagtcaggatctggaaaactcggaaaatggaagattaacttcgtctccaccttaaagtgggagaatccgttgatgggatggacttctacaggtgacccctatgctaatgttggtgactctgctcttgcctttgattctgaagaagctgctaagtcttttgctgagcgtcatggttgggattataaggtcaagaagcccaacacaccattattgaaggtcaagtcttactcggacaacttcaagtggaaaggcaatcctcaaccagaaaactgatgttacaccttcttccaattcttctcgagcaaaagaagaaacctcatttgatattaattctcatgtttctttgttattttagcatctgtgagctttttggttgaaaagaaccattatccatggctatgtttacttattacaataatatgatgatgatgatgaaacacactcctttgatatttcatcaagatttctgatc

SEQ ID NO: 6036 - protein, 154 aa, Arabidopsis thaliana
MALCATTQRTIRIAATLRRVARPFATDAVVESDYKRGEIGKVSGIPEEHLSRKVIIYSPARTATQSGSGKLGKWKINFVSTLKWENPLMGWTSTGDPYANVGDSALAFDSEEAAKSFAERHGWDYKVKKPNTPLLKVKSYSDNFKWKGNPQPEN

SEQ ID NO: 6037 - DNA, 757 bp, Arabidopsis thaliana
gttgaggatcatcgattatcagtttctggatttcgctactacagatttgtcccgtcttgagttacgaaatcatgatacattttgtgcttctagttagccggcaaggaaaggtaaggctcaccaaatggtattctccttatgcacagaaggaaagatctaaggttatacgtgaactcagtggagtgattctgaatcgaggtccaaagctctgcaattttgttgaatggagaggatacaaagttgtttacaaaagatatgcaagtctctacttctgcatgtgcattgatcaggaggataacgagttagaggtccttgagatcattcatcactatgttgagattctcgatcgctattttggaagtgtgtgtgaactcgatttgatttttaacttccacaaggcatattacatattggatgagctcttgattgctggggagcttcaagagtcaagcaagaaaacagtagccaggattatatccgctcaggatcaactggtggaggttgcaaaagaggaggccagttcgataagtaatataatcgctcaggctactaatcgataagtagtcttattcatcatctatgcattcttatgcagttaaagtatgttccctgtctctggctacagtaattgttttgagaaatctttatccatttgatttttcttgcggagggattttcgtcttaaagcgtaacttggagagaagaaatatgttatgatttggttcataaacaagtaaagattatatcgtttgtaatc

SEQ ID NO: 6038 - protein, 162 aa, Arabidopsis thaliana
MIHFVLLVSRQGKVRLTKWYSPYAQKERSKVIRELSGVILNRGPKLCNFVEWRGYKVVYKRYASLYFCMCIDQEDNELEVLEIIHHYVEILDRYFGSVCELDLIFNFHKAYYILDELLIAGELQESSKKTVARIISAQDQLVEVAKEEASSISNIIAQATNR

SEQ ID NO: 6039 - protein, 94 aa, Arabidopsis thaliana
MCIDQEDNELEVLEIIHHYVEILDRYFGSVCELDLIFNFHKAYYILDELLIAGELQESSKKTVARIISAQDQLVEVAKEEASSISNIIAQATNR

SEQ ID NO: 6040 - DNA, 818 bp, Arabidopsis thaliana
attcttcactcaacactcactttttctctaattccttaattctctcaactaattacaaattatgactcgcaatattctcttgacggttacattgatctgcattgttttcatcaccgtcggtggccaatctccggccaccgcaccgatccattctccttctacatctcctcataagcctaaacccacatctcccgccatttctccagctgctccaacgccggaatccacggaggctccggcgaagactccggtagaagcacctgtagaggctcctccttctcctacacctgcttctacacctcagatctctccgcccgctccttcaccggaggctgatactccttcagctccggagattgcaccttcagctgatgttccggctccagctctgacaaaacataagaagaagacaaagaagcataagaccgctccggctcctggaccagcttcggagcttttaagcccgcctgctccgcccggagaagctcctggtcctggaccaagcgatgctttctctcctgccgctgacgatcagagcggagcacaaagaataagtgttgtgatacaaatggtgggagctgcggcaatcgcatggtctctacttgttctagccttctaataaatttttgttcttcttttttttttttttttttttcaattcttaattttatttattttatatcttttttgatcctctcccatttgtctcatgtattacagctcacattttgtattcagcattttgatatattatttgtcttttatgtatacaaataataattttaatacatgctattttctgcaaaattactgttcgc

SEQ ID NO: 6041 - protein, 185 aa, Arabidopsis thaliana
MTRNILLTVTLICIVFITVGGQSPATAPIHSPSTSPHKPKPTSPAISPAAPTPESTEAPAKTPVEAPVEAPPSPTPASTPQISPPAPSPEADTPSAPEIAPSADVPAPALTKHKKKTKKHKTAPAPGPASELLSPPAPPGEAPGPGPSDAFSPAADDQSGAQRISVVIQMVGAAAIAWSLLVLAF

SEQ ID NO: 6042 - DNA, 745 bp, Arabidopsis thaliana
ttggacttcaaataattttaattagtttcttctgtgcgatagagatcgatcgagagatgggtgcttcatcatcatcatctgtgtcggagaaatcaatccatcaattcaccgtcaaggatagctccggcaaggaggttgacctaagcgtgtatcaagggaaagtgctgctcgtcgtcaacgtcgcttctaaatgcggattcacggagtccaattacacccagctgacggaactttaccggaaatataaagatcaaggttttgtggtattggcgtttccttgcaaccagtttctgtcccaagagcctggcaccagcgaagaggctcatcaatttgcttgtactcgctttaaggctgaataccctgttttccaaaaggtgcgtgtaaatggacaaaacgctgcaccagtctacaaattcctcaaatctaagaaaccctcttttcttggaagtcgtatcaaatggaacttcaccaagttcttggtcggcaaagatggtcaagtcattgatcgttatggcacaactgtttcacctctatccatccagaaagacatcgagaaagcccttgcacaagaattgtgaacacgcacagagatatttgactcctttggaagaaacttctctcatactctcggtcatgcagtcaagtttctacatttcccattgcaccttccatatgggccttgtattcatcttatgtgtaactctactagccatttcttttgtgaaatttgatcaaaggtgattcc

SEQ ID NO: 6043 - protein, 191 aa, Arabidopsis thaliana
GLQIILISFFCAIEIDREMGASSSSSVSEKSIHQFTVKDSSGKEVDLSVYQGKVLLVVNVASKCGFTESNYTQLTELYRKYKDQGFVVLAFPCNQFLSQEPGTSEEAHQFACTRFKAEYPVFQKVRVNGQNAAPVYKFLKSKKPSFLGSRIKWNFTKFLVGKDGQVIDRYGTTVSPLSIQKDIEKALAQEL

SEQ ID NO: 6044 - protein, 173 aa, Arabidopsis thaliana
MGASSSSSVSEKSIHQFTVKDSSGKEVDLSVYQGKVLLVVNVASKCGFTESNYTQLTELYRKYKDQGFVVLAFPCNQFLSQEPGTSEEAHQFACTRFKAEYPVFQKVRVNGQNAAPVYKFLKSKKPSFLGSRIKWNFTKFLVGKDGQVIDRYGTTVSPLSIQKDIEKALAQEL

SEQ ID NO: 6045 - protein, 118 aa, Arabidopsis thaliana
MDKTLHQSTNSSNLRNPLFLEVVSNGTSPSSWSAKMVKSLIVMAQLFHLYPSRKTSRKPLHKNCEHAQRYLTPLEETSLILSVMQSSFYISHCTFHMGLVFILCVTLLAISFVKFDQR

SEQ ID NO: 6046 - DNA, 584 bp, Arabidopsis thaliana
aaattaaaacaagaccacacttttgtctgaacaccaaaaaaaaaaaaaaaacttttattttttcctcgagacgtctctcttcttcaatttcttcacgattctacttttgcgttatccccaaaattggcaaccaaaaccaaacctctctctcttattgaaaccaacaatgagtccgatcgtcataacccagttagctacaggactcagcgttttagccggtgcggtgtttatcaaatcggtcatggaccaaaagcctatggctggtcaattccctcgttgtccaacttgtaatggtacgggacgagtcacgtgtttctgttctcgatggtctgatggtgacgttggatgtcgtaggtgttctggttcaggtcgtgcggcttgtagcaattgtggtggttctggaactggtagacctttaccggctcagattacggttcagccaccgaatcgtccttattgatgattctcaagaaatttgtatactttgtaaacgattcttctctcttgaactctctcactctctgtcttgtaagttgattatatatatacacatagatgagaacagatttgatagcttctgtgac

SEQ ID NO: 6047 - protein, 97 aa, Arabidopsis thaliana
MSPIVITQLATGLSVLAGAVFIKSVMDQKPMAGQFPRCPTCNGTGRVTCFCSRWSDGDVGCRRCSGSGRAACSNCGGSGTGRPLPAQITVQPPNRPY

SEQ ID NO: 6048 - protein, 98 aa, Arabidopsis thaliana
MVRDESRVSVLDGLMVTLDVVGVLVQVVRLVAIVVVLELVDLYRLRLRFSHRIVLIDDSQEICILCKRFFSLELSHSLSCKLIIYIHIDENRFDSFCD

SEQ ID NO: 6049 - protein, 84 aa, Arabidopsis thaliana
MVTLDVVGVLVQVVRLVAIVVVLELVDLYRLRLRFSHRIVLIDDSQEICILCKRFFSLELSHSLSCKLIIYIHIDENRFDSFCD

SEQ ID NO: 6050 - DNA, 723 bp, Arabidopsis thaliana
acataatcatcgctattctctctctctctctctcgctctcatatttgcagttgacaattcgttctctttgggaaattagagatgcaggcatcaagagcgcgactgtttaaagaatgacaaagaggtacagcgagagaaagtagcagatcctgatattcaattggtctgtgacgataccaacatattcaaatggaccgctcttatcaaaggaccttcggagactccttacgaaggcggtgtttttcagcttgctttttctgttcctgaaccttatcctttgcaacctcctcaagttcgattcttgaccaaaatattccatcctaatgttcatttcaagacaggagaaatatgtctcgacattttgaagaatgcttggagtcctgcttggacgcttcagtctgtgtgtagagctatcatagcattgatggctcatcctgagccggacagtcctcttaactgcgactcagggaatcttctaagatctggtgatgtgagagggttcaattcaatggcacaaatgtatacacgcctcgccgctatgcctaagaaaggatgatgatgatgatgatcctcttgcttttttttgttttttttttgaaatttgtaacgataatgatttgctagagtgaatacattattaacgtgaagaagatgattcttctttattagttcacaatattacaatctgtaagttgtcatatcttcttgtttaaggaatttgtc

SEQ ID NO: 6051 - protein, 43 aa, Arabidopsis thaliana
MAHPEPDSPLNCDSGNLLRSGDVRGFNSMAQMYTRLAAMPKKG

SEQ ID NO: 6052 - protein, 35 aa, Arabidopsis thaliana
IIIAILSLSLSLSYLQLTIRSLWEIRDAGIKSATV

SEQ ID NO: 6053 - DNA, 1972 bp, Arabidopsis thaliana
tgaattcacacctctctcccttctctctcctatctctcagtcaaaccctaattccgatgacggtacctaattccgacgatggtgaccggagtttaacggaggttatcacctctcttatcgactctatacccaaccttcttagcttcaagtgtaaatggtcatcaattcgcgccaaactcgccgatctcaaaactcagctctccgatttctccgatttcgccggctcttcttcaaacaaactcgccgtagatcttctagtttcagttcgcgagacgctaaacgacgccgttgccgttgcggcgaggtgtgaaggaccagatttagctgaaggtaagcttaaaacgcagagtgaggttgattcagtcatggcgagactcgatcgtcatgtgaaagatgctgaggttttgattaagagtggtcttctgattgataacggaatcgtcgtttctggattttcgatttcgtcgaagaaggaagctgttagattagaagcgaggaatctagtgattagattacagatcggtggtgttgaatcgaagaattcagcgattgattcgttgattgaattacttcaggaagatgataagaacgtgatgatttgtgtagctcaaggagttgttcctgttttagttaggttacttgattcgtgttctttagtgatgaaggagaagactgttgctgtgatttctagaatctctatggttgagagtagtaaacacgtgttaatagctgaaggattgtctctattgaatcatctccttcgtgtattggagtcaggaagtggttttgctaaagagaaagcttgtgttgctttgcaagctttgagtttgtctaaggagaacgcgagagctattggttgtagaggtggaatctcgtctttgttggagatatgtcaaggtgggagtcctggttctcaggcttttgctgctggtgtgttgaggaacttagctttgtttggagagactaaagagaatttcgttgaggaaaacgcgattttcgtgcttattagtatggtttcttcaggtacttctttggctcaagagaatgctgttggttgtttggctaatttaacgagtggtgatgaggatttgatgatatctgttgttagagaaggagggattcagtgtttgaagagtttttgggattctgtttctagtgttaagagtcttgaggttggagttgtgcttctgaagaacttagcgttgtgtcctattgtgagagaagttgttatatccgaagggtttatccctcgtttggttccggttttgggttgtggggttctcggtgtgagaattgcagctgcggaagctgtttcctcgctaggtttcagctcgaaaagccgaaaagaaatgggtgaaagtggatgtatcgttccattgattgatatgttagatggtaaagccattgaagagaaagaagcagcttctaaagctctatcgacgcttttggtgtgcacgagtaacagaaagattttcaagaagagtgacaagggtgtagtcagtctagttcagctcttggacccgaagattaagaaattggataagcggtacacagtctcggcgttggaactgcttgtaacttcaaagaaatgcaggaaacaagtcgtagctgctggtgcttgcttgcatttgcaaaagcttgtggatatggataccgaaggagctaagaaactggcggagaatctttcccggagtaagatttggggcgtctttacaaggccataagagactgcgcaggatacgtttttaacctgtatgtaagaagaatcatatattttccgaacgacgattcttgttttttcgtttcatgttgattgatgatttgattgttcataaagcttggctgattgaagttagggagagtaattgctgattagtctgtagacaagaataatgtctttgtagagtttgtaatcatcttttttttaaaaaatttgcttggtgagctaatcatatcagagtttgatttgatc

SEQ ID NO: 6054 - protein, 573 aa, Arabidopsis thaliana
NSHLSPFSLLSLSQTLIPMTVPNSDDGDRSLTEVITSLIDSIPNLLSFKCKWSSIRAKLADLKTQLSDFSDFAGSSSNKLAVDLLVSVRETLNDAVAVAARCEGPDLAEGKLKTQSEVDSVMARLDRHVKDAEVLIKSGLLIDNGIVVSGFSISSKKEAVRLEARNLVIRLQIGGVESKNSAIDSLIELLQEDDKNVMICVAQGVVPVLVRLLDSCSLVMKEKTVAVISRISMVESSKHVLIAEGLSLLNHLLRVLESGSGFAKEKACVALQALSLSKENARAIGCRGGISSLLEICQGGSPGSQAFAAGVLRNLALFGETKENFVEENAIFVLISMVSSGTSLAQENAVGCLANLTSGDEDLMISVVREGGIQCLKSFWDSVSSVKSLEVGVVLLKNLALCPIVREVVISEGFIPRLVPVLGCGVLGVRIAAAEAVSSLGFSSKSRKEMGESGCIVPLIDMLDGKAIEEKEAASKALSTLLVCTSNRKIFKKSDKGVVSLVQLLDPKIKKLDKRYTVSALELLVTSKKCRKQVVAAGACLHLQKLVDMDTEGAKKLAENLSRSKIWGVFTRP

SEQ ID NO: 6055 - protein, 555 aa, Arabidopsis thaliana
MTVPNSDDGDRSLTEVITSLIDSIPNLLSFKCKWSSIRAKLADLKTQLSDFSDFAGSSSNKLAVDLLVSVRETLNDAVAVAARCEGPDLAEGKLKTQSEVDSVMARLDRHVKDAEVLIKSGLLIDNGIVVSGFSISSKKEAVRLEARNLVIRLQIGGVESKNSAIDSLIELLQEDDKNVMICVAQGVVPVLVRLLDSCSLVMKEKTVAVISRISMVESSKHVLIAEGLSLLNHLLRVLESGSGFAKEKACVALQALSLSKENARAIGCRGGISSLLEICQGGSPGSQAFAAGVLRNLALFGETKENFVEENAIFVLISMVSSGTSLAQENAVGCLANLTSGDEDLMISVVREGGIQCLKSFWDSVSSVKSLEVGVVLLKNLALCPIVREVVISEGFIPRLVPVLGCGVLGVRIAAAEAVSSLGFSSKSRKEMGESGCIVPLIDMLDGKAIEEKEAASKALSTLLVCTSNRKIFKKSDKGVVSLVQLLDPKIKKLDKRYTVSALELLVTSKKCRKQVVAAGACLHLQKLVDMDTEGAKKLAENLSRSKIWGVFTRP

SEQ ID NO: 6056 - protein, 452 aa, Arabidopsis thaliana
MARLDRHVKDAEVLIKSGLLIDNGIVVSGFSISSKKEAVRLEARNLVIRLQIGGVESKNSAIDSLIELLQEDDKNVMICVAQGVVPVLVRLLDSCSLVMKEKTVAVISRISMVESSKHVLIAEGLSLLNHLLRVLESGSGFAKEKACVALQALSLSKENARAIGCRGGISSLLEICQGGSPGSQAFAAGVLRNLALFGETKENFVEENAIFVLISMVSSGTSLAQENAVGCLANLTSGDEDLMISVVREGGIQCLKSFWDSVSSVKSLEVGVVLLKNLALCPIVREVVISEGFIPRLVPVLGCGVLGVRIAAAEAVSSLGFSSKSRKEMGESGCIVPLIDMLDGKAIEEKEAASKALSTLLVCTSNRKIFKKSDKGVVSLVQLLDPKIKKLDKRYTVSALELLVTSKKCRKQVVAAGACLHLQKLVDMDTEGAKKLAENLSRSKIWGVFTRP

SEQ ID NO: 6057 - DNA, 958 bp, Arabidopsis thaliana
taggggttctgtggttcataatcagaaatggctaagacaggggaaagcttgagagacaaacctagatggagtcttgtaggcatgaccgctcttgtcaccggtggctcaaaaggcatcggagaagctgtggttgaggaactagctacgttaggggcaagaatccacacatgtgccagagacgaaactcagcttcaagaaagcttacgtaagtggcaagcaaaagggtttcaggttaccacttctgtctgcgacgtttcttctcgtgataaacgagagaagctcatggaaaccgtttccactatcttcgaaggaaaactcaacatacttgtcaacaatgtgggaacgtgtatagtcaaaccgaccttacaacatacagccgaagatttctcatttacaatggcaacgaatctcgagtcagcttttcatctctcgcagctcgcgcatcctttgttgaaagcttctggttcagggagcatcgtgctcatctcctccgtatctggagttgtacatgtcaatggtgcatccatatatggagtatctaaaggagctatgaatcagctaggaagaaacttagcgtgcgagtgggcaagtgacaacataaggactaactctgtgtgtccatggttcatagaaactcctttagttaccgaaagtcttagtaatgaggagtttagaaaagaagtggagagtagaccaccaatgggacgtgttggagaagtaaatgaagtatcatcgcttgtggcatttctttgtcttcctgcagcttcttatattacaggtcaaaccatttgtgttgatggaggtttcactgttaatggtttctctttcaagcctctgccttaagacgtcgattgttttcattttacgttatttttttaacatttacaatttgtttagatatgtaaacataaacacaattacacaaacaaacaaaaaaaattggcgtttggaatgtaag

SEQ ID NO: 6058 - protein, 271 aa, Arabidopsis thaliana
MAKTGESLRDKPRWSLVGMTALVTGGSKGIGEAVVEELATLGARIHTCARDETQLQESLRKWQAKGFQVTTSVCDVSSRDKREKLMETVSTIFEGKLNILVNNVGTCIVKPTLQHTAEDFSFTMATNLESAFHLSQLAHPLLKASGSGSIVLISSVSGVVHVNGASIYGVSKGAMNQLGRNLACEWASDNIRTNSVCPWFIETPLVTESLSNEEFRKEVESRPPMGRVGEVNEVSSLVAFLCLPAASYITGQTICVDGGFTVNGFSFKPLP

SEQ ID NO: 6059 - protein, 253 aa, Arabidopsis thaliana
MTALVTGGSKGIGEAVVEELATLGARIHTCARDETQLQESLRKWQAKGFQVTTSVCDVSSRDKREKLMETVSTIFEGKLNILVNNVGTCIVKPTLQHTAEDFSFTMATNLESAFHLSQLAHPLLKASGSGSIVLISSVSGVVHVNGASIYGVSKGAMNQLGRNLACEWASDNIRTNSVCPWFIETPLVTESLSNEEFRKEVESRPPMGRVGEVNEVSSLVAFLCLPAASYITGQTICVDGGFTVNGFSFKPLP

SEQ ID NO: 6060 - protein, 186 aa, Arabidopsis thaliana
METVSTIFEGKLNILVNNVGTCIVKPTLQHTAEDFSFTMATNLESAFHLSQLAHPLLKASGSGSIVLISSVSGVVHVNGASIYGVSKGAMNQLGRNLACEWASDNIRTNSVCPWFIETPLVTESLSNEEFRKEVESRPPMGRVGEVNEVSSLVAFLCLPAASYITGQTICVDGGFTVNGFSFKPLP

SEQ ID NO: 6061 - DNA, 519 bp, Arabidopsis thaliana
ttaacacacacaattcaagcaatatataaaaaaaaaatccaatctttgttcctcaatcctctgcttcgcgtttttcttcggcattgactctatcaatcacaactttctccgggatctccgatttatcttcgtttcaaccatgactcgtggaagtcagagagagcgtgaccgtgaaagagctgccgctcgtgctggtggaaagggtaagaatggtgacgatggtttgacgccggagcaacgccgtgaaagagatgggaaagcattgcaagagaaagcggctaagaaagctgctcaagctgcaggtgcgagttctggtggtgcagctggaggaaaaggagctgctgctaagaagtgatgatgatcatttggtttgtcttttgagcatattgtagactttatgtttgaaattgggttgtttagacctgaagctttgactcttgtctgaaatcccattataatgtctttgtgttgaatttgcaatttgatgcttatggtgaaatcttatttggtctttctttg

SEQ ID NO: 6062 - protein, 71 aa, Arabidopsis thaliana
MTRGSQRERDRERAAARAGGKGKNGDDGLTPEQRRERDGKALQEKAAKKAAQAAGASSGGAAGGKGAAAKK

SEQ ID NO: 6063 - protein, 46 aa, Arabidopsis thaliana
MGKHCKRKRLRKLLKLQVRVLVVQLEEKELLLRSDDDHLVCLLSIL

SEQ ID NO: 6064 - DNA, 862 bp, Arabidopsis thaliana
atttgaccacagatttgtgttattttcaaacacaaaatcaaccaattccgatgaatcagaaacctccgccgtacggttatggcggcgctggtggtggaggagtcggtccttctcccacttccaacaccacaatcatcgggacgttgagtgcacgcgccaagcagacgacgcaatcgatgatcacgacgctccgtccatggcgagagattctcgatctgtccgcgctctctctccctcgcgggtatgatgaagccatggcgcatctaaagcacaacatctcttatttccgtggaaattacgctctcgccgttctcgccattgttttcctcggccttatttaccatccgatgtctatgatcgctttcatcgtcgtcttcatcggatggattcttctctatttctctcgagacgcaaacgattcgattgtgatttcggggaaagaagtagatgacaagatcgtgctggttttactcagcttggtaacggttttggcattggtatatacagatgtgggcgaaaacgttctggtttcgctgatcattggtttgctcatcgtcggagctcacggcgcttttcgtaataccgatgatttgtttcttgatgaagaaagtgctcgccgtggtagcctggtgtctgccggttctggtaaccggccaccgtcgagttataccccaatttgagtaaaccggtttggagaattactcgtaatttcttgggtttttgattgaagaagctaagggaatcaatttagggctttgtattttggaattcccaaagattcttgtatttatattttggcgtgtgtgtttcattttgtttgaatgtatacaaattctgggaaaaaacaaattggtgttatggc

SEQ ID NO: 6065 - protein, 225 aa, Arabidopsis thaliana
LTTDLCYFQTQNQPIPMNQKPPPYGYGGAGGGGVGPSPTSNTTIIGTLSARAKQTTQSMITTLRPWREILDLSALSLPRGYDEAMAHLKHNISYFRGNYALAVLAIVFLGLIYHPMSMIAFIVVFIGWILLYFSRDANDSIVISGKEVDDKIVLVLLSLVTVLALVYTDVGENVLVSLIIGLLIVGAHGAFRNTDDLFLDEESARRGSLVSAGSGNRPPSSYTPI

SEQ ID NO: 6066 - protein, 209 aa, Arabidopsis thaliana
MNQKPPPYGYGGAGGGGVGPSPTSNTTIIGTLSARAKQTTQSMITTLRPWREILDLSALSLPRGYDEAMAHLKHNISYFRGNYALAVLAIVFLGLIYHPMSMIAFIVVFIGWILLYFSRDANDSIVISGKEVDDKIVLVLLSLVTVLALVYTDVGENVLVSLIIGLLIVGAHGAFRNTDDLFLDEESARRGSLVSAGSGNRPPSSYTPI

SEQ ID NO: 6067 - protein, 167 aa, Arabidopsis thaliana
MITTLRPWREILDLSALSLPRGYDEAMAHLKHNISYFRGNYALAVLAIVFLGLIYHPMSMIAFIVVFIGWILLYFSRDANDSIVISGKEVDDKIVLVLLSLVTVLALVYTDVGENVLVSLIIGLLIVGAHGAFRNTDDLFLDEESARRGSLVSAGSGNRPPSSYTPI

SEQ ID NO: 6068 - DNA, 817 bp, Arabidopsis thaliana
gactctctacgtttccttcgtcttcttcttcttctctcttccctatatataaaacccttcatgttgtttagatcaggttaagatcattttgagtctctccaaaccctaatatcaaattctcatctcataactaacaaaagcatcccaaaatttctagtaaatggcggaggaattcgatgaatctgaggtagtgttctccgatggtttaagctccgttctccataaagagaacgagaatcgcctgtttggttctgatatggagaggaagaagacgaggcggatcaagaggacgacgacggagaaggcgtcgttgtcgagctcgcttccggtgagtatccctgagaacatctttcggaggtacgttgggaaagaggaggatgaatactcagaggaggaatattccgaaggaggaggagagatgattccgccgcatattatgatcggacggaggatccaaggaggacaaatggcgttttccgtttgttcaggtagtggaaggactcttaagggaagagatctgagccgggttcggaattcggttcttaggttaaccggttttttggaggcttgaaccgttaccggtttgccatacttcatcatcttttcccaactcttttgtttttttgcatattacggaaaattgctagtggatccccgtgttgtttatttaagtaaagggtggggaaaatgtgaaacaaagctttctccttagtttttgtttttccatattcttttgtttttcctaaattgtaataggaaacaaggaaatttcgggttaattatgagaagaataacaataattcttgtgttaggattt

SEQ ID NO: 6069 - protein, 136 aa, Arabidopsis thaliana
MAEEFDESEVVFSDGLSSVLHKENENRLFGSDMERKKTRRIKRTTTEKASLSSSLPVSIPENIFRRYVGKEEDEYSEEEYSEGGGEMIPPHIMIGRRIQGGQMAFSVCSGSGRTLKGRDLSRVRNSVLRLTGFLEA

SEQ ID NO: 6070 - protein, 104 aa, Arabidopsis thaliana
MERKKTRRIKRTTTEKASLSSSLPVSIPENIFRRYVGKEEDEYSEEEYSEGGGEMIPPHIMIGRRIQGGQMAFSVCSGSGRTLKGRDLSRVRNSVLRLTGFLEA

SEQ ID NO: 6071 - DNA, 740 bp, Arabidopsis thaliana
aaaatctgaacccttcgattttcgattcttcctcgagccttccttccttccttcttcttctccaagaggattttgattgtctcctttactctctccatgtcaagttctggtgctccttcacgcaagactctgagtaagatcgcgactaatcgtcttcagaaagagcttgtggaatggcagatgaatccacctactggtttcaaacacaaagtcactgataatctccaaagatggataattgaagttattggagctccaggaactctatatgccaacgatacttatcagcttcaagttgattttccagaacattatcctatggaatcgccacaagtgatttttcttcatccagctcctctgcatcctcacatttacagcaatgggcatatttgtctagatattttgtatgattcgtggtctccagccatgacggtgagttctatctgcattagcatcctctccatgctctcaagctcgactgaaaagcaacgaccaaccgataatgaccgatatgtgaagaattgtaagaacggaagatctccaaaggagacccgatggtggttccacgacgataaagtataaacctcgatcaaccaaaaaaaatgtaaaatagtccaaaacagtctttgaggtttgttgtctatttttaatttaattgggtttaagctgtcccaaacccatttccaaaatccgtgatgtataaaaacaacacaataaatttgactaattttgaatcttct

SEQ ID NO: 6072 - protein, 161 aa, Arabidopsis thaliana
MSSSGAPSRKTLSKIATNRLQKELVEWQMNPPTGFKHKVTDNLQRWIIEVIGAPGTLYANDTYQLQVDFPEHYPMESPQVIFLHPAPLHPHIYSNGHICLDILYDSWSPAMTVSSICISILSMLSSSTEKQRPTDNDRYVKNCKNGRSPKETRWWFHDDKV

SEQ ID NO: 6073 - protein, 133 aa, Arabidopsis thaliana
MNPPTGFKHKVTDNLQRWIIEVIGAPGTLYANDTYQLQVDFPEHYPMESPQVIFLHPAPLHPHIYSNGHICLDILYDSWSPAMTVSSICISILSMLSSSTEKQRPTDNDRYVKNCKNGRSPKETRWWFHDDKV

SEQ ID NO: 6074 - protein, 87 aa, Arabidopsis thaliana
MESPQVIFLHPAPLHPHIYSNGHICLDILYDSWSPAMTVSSICISILSMLSSSTEKQRPTDNDRYVKNCKNGRSPKETRWWFHDDKV

SEQ ID NO: 6075 - DNA, 1871 bp, Arabidopsis thaliana
gttccacttcatacccatttgcttccttgaatggcaagtctcttctcctcacgtctcggctctcaatctctttctctcctcatcaacatcttcttcatctttctcatctttctccatttcgcttcacaaactcctcctccctccggatccatccaaaccttaaattcctttgccggcggtgacagtgacagctgcagcggaggactcgccagccttgacgaccaccgttccaagtgttcttacataagatctcaatcaaaatgtggcccacaaggttacatagactatctcaagattttcttctgcatcttcggacaatcccctgttttgggccatctagttttatccgcctggttgtttgttctgttctacttgctcggagacacggccgcgagttacttctgtccttctttagacagcttatctaaggttttgaagctgtctcctacaatggctggagtcacgcttctctctcttggcaacggtgcgcctgatttgttctcaagtgttgtctccttcacaagatcgaataatggcgattttgggctcaactctattttaggcggtgcgttcttcgtctctagcttcgttgttgggacgatttgtgtgttgattggatctagagatgtcgctatcgacagaaatagctttatccgcgacgtggtttttcttcttgtcgctctttgctgtctcggtttgatcatcttcataggcaaagtaaccatttgggtcgctctctgttatctctccatttatctcctctatgtagggtttttatcggtttcacatttctttgaccgcaagaaacgtatgtccgatcagattcttcgtagcagagaagatttggccgagatgggtgtttcgttgctaggctatatagcagaggagaagctggctttgccagagaaaacaactcaagaattcaagattgtgtttgaagattctccaaaaaggcaccgatcttgcttctcggtgctagtgagcataattggactacctctatatctccccaggcggctcacaattcccgtcgtttgcgaagaaaaatggtcaaagccttgcgctgtggtttccacggccatcgctcctgttctactaaccgaactttactgttctcattacagcgggtcacaaagaaacctaatcttgtacataatatccggatctatcgggctaatcgtcggtatcttagcttacttgacgacagaaaaatcacatccgccgaagaaattctcattagtttggcttctaggaggcttcacgatgagtgtgacatggacatacatgatagcacaagagctagtctcattgttaatatccttaggtaatatctttggtataagcccatccgtgctaggactaaccgtcctagcttggggaaattctctaggcgatcttatcgcgaatgtgaccgtggcgtttcacggaggcaacgatggtgctcagatagcactttccggatgctacgcaggcccgctattcaacacggtaattggactaggtgtgccacttgtcatctcctcgttggccgaataccccggggtctacatcattcctagtgacaattcgttgcttgagacactagggttcttaatggtaggcttgctttgggcacttgtgataatgccaaagaagaagatgagacttgataagcttgtcggtgggggcttactcgctatttacctctgtttcttgtccttgaggttggctagagttttcggagtccttgataccgaccggtgaattttatagtaatgtaaattttgttttatttgtttttgtaatagtagttaattcttaaagaaaaaaattgcaaataggtcaaatttgtgggtcttaatttattccttaaatgaaaagatactttgtgc

SEQ ID NO: 6076 - protein, 570 aa, Arabidopsis thaliana
MASLFSSRLGSQSLSLLINIFFIFLIFLHFASQTPPPSGSIQTLNSFAGGDSDSCSGGLASLDDHRSKCSYIRSQSKCGPQGYIDYLKIFFCIFGQSPVLGHLVLSAWLFVLFYLLGDTAASYFCPSLDSLSKVLKLSPTMAGVTLLSLGNGAPDLFSSVVSFTRSNNGDFGLNSILGGAFFVSSFVVGTICVLIGSRDVAIDRNSFIRDVVFLLVALCCLGLIIFIGKVTIWVALCYLSIYLLYVGFLSVSHFFDRKKRMSDQILRSREDLAEMGVSLLGYIAEEKLALPEKTTQEFKIVFEDSPKRHRSCFSVLVSIIGLPLYLPRRLTIPVVCEEKWSKPCAVVSTAIAPVLLTELYCSHYSGSQRNLILYIISGSIGLIVGILAYLTTEKSHPPKKFSLVWLLGGFTMSVTWTYMIAQELVSLLISLGNIFGISPSVLGLTVLAWGNSLGDLIANVTVAFHGGNDGAQIALSGCYAGPLFNTVIGLGVPLVISSLAEYPGVYIIPSDNSLLETLGFLMVGLLWALVIMPKKKMRLDKLVGGGLLAIYLCFLSLRLARVFGVLDTDR

SEQ ID NO: 6077 - protein, 430 aa, Arabidopsis thaliana
MAGVTLLSLGNGAPDLFSSVVSFTRSNNGDFGLNSILGGAFFVSSFVVGTICVLIGSRDVAIDRNSFIRDVVFLLVALCCLGLIIFIGKVTIWVALCYLSIYLLYVGFLSVSHFFDRKKRMSDQILRSREDLAEMGVSLLGYIAEEKLALPEKTTQEFKIVFEDSPKRHRSCFSVLVSIIGLPLYLPRRLTIPVVCEEKWSKPCAVVSTAIAPVLLTELYCSHYSGSQRNLILYIISGSIGLIVGILAYLTTEKSHPPKKFSLVWLLGGFTMSVTWTYMIAQELVSLLISLGNIFGISPSVLGLTVLAWGNSLGDLIANVTVAFHGGNDGAQIALSGCYAGPLFNTVIGLGVPLVISSLAEYPGVYIIPSDNSLLETLGFLMVGLLWALVIMPKKKMRLDKLVGGGLLAIYLCFLSLRLARVFGVLDTDR

SEQ ID NO: 6078 - protein, 310 aa, Arabidopsis thaliana
MSDQILRSREDLAEMGVSLLGYIAEEKLALPEKTTQEFKIVFEDSPKRHRSCFSVLVSIIGLPLYLPRRLTIPVVCEEKWSKPCAVVSTAIAPVLLTELYCSHYSGSQRNLILYIISGSIGLIVGILAYLTTEKSHPPKKFSLVWLLGGFTMSVTWTYMIAQELVSLLISLGNIFGISPSVLGLTVLAWGNSLGDLIANVTVAFHGGNDGAQIALSGCYAGPLFNTVIGLGVPLVISSLAEYPGVYIIPSDNSLLETLGFLMVGLLWALVIMPKKKMRLDKLVGGGLLAIYLCFLSLRLARVFGVLDTDR

SEQ ID NO: 6079 - DNA, 1008 bp, Arabidopsis thaliana
atatacacatctctgattcaactccaccgaattcagaagatcgaagaagatgagtagaggaagcggcgctggttatgatcgtcacatcactatcttctcaccggaaggtcgtctctttcaagttgaatatgccttcaaggccgtgaaaacagctggtattacttcaatcggagttcgtgggaaagattcggtttgcgtcgttacccagaaggaagttcctgacaagcttttggatcagtctagtgttacacatctgttccctatcaccaagtacattggattggtagctactggcattacagctgatgcaaggtctttggttcaacaagcaaggaatcaagcagctgaatttcggttcacttatggatatgagatgcctgttgacattcttgctaaatggatagcggacaagtcacaggtctacactcaacatgcttacatgagaccccttggagttgtcgctatggtaatgggtgttgatgaagagaatggtcccttactttacaaatgtgacccagctggacatttttacggtcacaaggcaactagtgctggtatgaaggaacaagaagcagtcaatttcttggagaagaaaatgaaagaaaacccatctttcacatttgatgaaaccgtgcagactgccatatcggctttgcaatctgttcttcaagaagacttcaaggctactgagattgaggtaggtgtggtgagagcagagaacccggaattccgtgcattgacaacggaggagattgaggagcatttgacagccattagtgaacgagactgatcaacttagtgaaacaagtgtgagttacgttgcttcgcttctatcagacattcctctaaagtgaccactctccatcgatcttttgtttggtcttccttccataatttaatttacttagtcaacccagcaaacttgaaaaacaaaaatgcactgtaatgcttaaggctgtgagagtttccgagtcttttgactcttcagaaatgacaccaactttactc

SEQ ID NO: 6080 - protein, 246 aa, Arabidopsis thaliana
MSRGSGAGYDRHITIFSPEGRLFQVEYAFKAVKTAGITSIGVRGKDSVCVVTQKEVPDKLLDQSSVTHLFPITKYIGLVATGITADARSLVQQARNQAAEFRFTYGYEMPVDILAKWIADKSQVYTQHAYMRPLGVVAMVMGVDEENGPLLYKCDPAGHFYGHKATSAGMKEQEAVNFLEKKMKENPSFTFDETVQTAISALQSVLQEDFKATEIEVGVVRAENPEFRALTTEEIEEHLTAISERD

SEQ ID NO: 6081 - protein, 138 aa, Arabidopsis thaliana
MPVDILAKWIADKSQVYTQHAYMRPLGVVAMVMGVDEENGPLLYKCDPAGHFYGHKATSAGMKEQEAVNFLEKKMKENPSFTFDETVQTAISALQSVLQEDFKATEIEVGVVRAENPEFRALTTEEIEEHLTAISERD

SEQ ID NO: 6082 - DNA, 1654 bp, Arabidopsis thaliana
atatttaattttcttcagtcagagatttcgaaaccctagtcgatttcgagatccaactaactctgctccttatctcagcttgttgaatttgcgaagtatgggagacgctagagacaacgaagcctacgaggaggagctcttggactatgaagaagaagacgagaaggtcccagattctggaaacaaagttaacggcgaagctgtgaaaaaagggtacgtgggaatacacagttctggattcagagacttccttttgaaaccggagcttctcagagctattgttgactcaggatttgaacatccatctgaagtgcaacacgaatgtatccctcaagctatcttgggtatggatgttatctgccaagcaaagtctggtatggggaagactgctgtgtttgtcctgtctactctacaacagattgaaccatctcctggccaggtttctgcacttgtcttgtgccatacaagagagctagcttaccagatctgcaatgagtttgtgcgattcagtacctatctgcctgatacaaaagtttcggtgttctatggtggagtcaacattaaaattcacaaagacttgctgaagaatgaatgtcctcacattgttgttggtacccctggtcgagtgcttgcacttgccagggagaaagatctctctttgaagaatgtgaggcattttattcttgatgagtgtgataaaatgctcgagtcacttgacatgcgaagggatgtgcaggagattttcaagatgactcctcatgacaaacaagtaatgatgttctcagcaacgctcagcaaagagatacgcccagtctgcaagaagtttatgcaagatccaatggaaatatatgttgatgatgaagccaagttgactcttcatggacttgtccagcactacatcaaactgagcgagatggagaaaaatcgcaagttgaatgaccttcttgatgcgttggacttcaatcaagttgtcatttttgtgaagagcgtgagcagggctgcggagctgaacaagttactggtggaatgcaatttcccctcaatatgcatacactctggcatgtctcaagaagagaggttgactcgatacaaaagtttcaaggaagggcacaagaggatccttgtggcgactgacttggtaggaagagggattgacatagagcgtgtcaacattgttatcaactatgacatgccagattctgcggatacctatcttcatagggttgggagagctggtagatttggaaccaagggtcttgcaatcacatttgttgcatctgcttcagattcagaggtccttaatcaggttcaagagaggtttgaggtcgatataaaggagcttcctgagcagattgatacatcgacttacatgccgtcttaaacaagtagcatcatctctgaggaacgaacctcttcagatttcaaccttttaggtgttcaaaggggtcatggaggtccacaactatctctcacaccgtttgttgcttcgctattttagacttttctatgaggacaagtttttccatatatttagaccgttttgtaactcttgaaaaatgagattgagctactctccaaatcgcgcacagttgagagctctcctgttttttgtactagtgatggttatctttaaaatattaagatttcaggattg

SEQ ID NO: 6083 - protein, 459 aa, Arabidopsis thaliana
YLIFFSQRFRNPSRFRDPTNSAPYLSLLNLRSMGDARDNEAYEEELLDYEEEDEKVPDSGNKVNGEAVKKGYVGIHSSGFRDFLLKPELLRAIVDSGFEHPSEVQHECIPQAILGMDVICQAKSGMGKTAVFVLSTLQQIEPSPGQVSALVLCHTRELAYQICNEFVRFSTYLPDTKVSVFYGGVNIKIHKDLLKNECPHIVVGTPGRVLALAREKDLSLKNVRHFILDECDKMLESLDMRRDVQEIFKMTPHDKQVMMFSATLSKEIRPVCKKFMQDPMEIYVDDEAKLTLHGLVQHYIKLSEMEKNRKLNDLLDALDFNQVVIFVKSVSRAAELNKLLVECNFPSICIHSGMSQEERLTRYKSFKEGHKRILVATDLVGRGIDIERVNIVINYDMPDSADTYLHRVGRAGRFGTKGLAITFVASASDSEVLNQVQERFEVDIKELPEQIDTSTYMPS

SEQ ID NO: 6084 - protein, 427 aa, Arabidopsis thaliana
MGDARDNEAYEEELLDYEEEDEKVPDSGNKVNGEAVKKGYVGIHSSGFRDFLLKPELLRAIVDSGFEHPSEVQHECIPQAILGMDVICQAKSGMGKTAVFVLSTLQQIEPSPGQVSALVLCHTRELAYQICNEFVRFSTYLPDTKVSVFYGGVNIKIHKDLLKNECPHIVVGTPGRVLALAREKDLSLKNVRHFILDECDKMLESLDMRRDVQEIFKMTPHDKQVMMFSATLSKEIRPVCKKFMQDPMEIYVDDEAKLTLHGLVQHYIKLSEMEKNRKLNDLLDALDFNQVVIFVKSVSRAAELNKLLVECNFPSICIHSGMSQEERLTRYKSFKEGHKRILVATDLVGRGIDIERVNIVINYDMPDSADTYLHRVGRAGRFGTKGLAITFVASASDSEVLNQVQERFEVDIKELPEQIDTSTYMPS

SEQ ID NO: 6085 - protein, 344 aa, Arabidopsis thaliana
MDVICQAKSGMGKTAVFVLSTLQQIEPSPGQVSALVLCHTRELAYQICNEFVRFSTYLPDTKVSVFYGGVNIKIHKDLLKNECPHIVVGTPGRVLALAREKDLSLKNVRHFILDECDKMLESLDMRRDVQEIFKMTPHDKQVMMFSATLSKEIRPVCKKFMQDPMEIYVDDEAKLTLHGLVQHYIKLSEMEKNRKLNDLLDALDFNQVVIFVKSVSRAAELNKLLVECNFPSICIHSGMSQEERLTRYKSFKEGHKRILVATDLVGRGIDIERVNIVINYDMPDSADTYLHRVGRAGRFGTKGLAITFVASASDSEVLNQVQERFEVDIKELPEQIDTSTYMPS

SEQ ID NO: 6086 - DNA, 595 bp, Arabidopsis thaliana
aatcatttcatatcactttaaaagcagcaatgtccgaatacatctccaaagtaagcaataagcaaaggaaaatgaagttagtttccgtcttcctcgttctgtttatcttcttcctcgtcgttcttgaggccccggagaagatagaagccaaagacgacaagttcatatgtgtggttgagtatggaggagacgtgggtccaacgttctgtaaccctaaattcttccccacgttgtgccgtcaaaactgccggagcttcaaaggtgccaaaggcggtaaatgcgtgaagcaacccaaacacaaacatatcaagtgcttctgcgactactgtaaagacgactagacttcacagtaaagtaccaaaccgctggtttcagcttcaatcgccaaacgcaaccgtcccctacggccctaagtgtttgtacttccatatgatgtgagtttatgtatgttcttgatgtaataatgtcgacttaatttgttatgttttcatgtgttagattatatcatcttggcaatcaaaagattgcaaaaaagttgggcctaatggtgaagaattgaaaaatactgacgtttttaatcaatgtgatgttcttc

SEQ ID NO: 6087 - protein, 112 aa, Arabidopsis thaliana
SFHITLKAAMSEYISKVSNKQRKMKLVSVFLVLFIFFLVVLEAPEKIEAKDDKFICVVEYGGDVGPTFCNPKFFPTLCRQNCRSFKGAKGGKCVKQPKHKHIKCFCDYCKDD

SEQ ID NO: 6088 - protein, 103 aa, Arabidopsis thaliana
MSEYISKVSNKQRKMKLVSVFLVLFIFFLVVLEAPEKIEAKDDKFICVVEYGGDVGPTFCNPKFFPTLCRQNCRSFKGAKGGKCVKQPKHKHIKCFCDYCKDD

SEQ ID NO: 6089 - protein, 89 aa, Arabidopsis thaliana
MKLVSVFLVLFIFFLVVLEAPEKIEAKDDKFICVVEYGGDVGPTFCNPKFFPTLCRQNCRSFKGAKGGKCVKQPKHKHIKCFCDYCKDD

SEQ ID NO: 6090 - DNA, 641 bp, Arabidopsis thaliana
attacacacaccaacgttgattcttcttcttcttcttcttctctctttctcatctaaaccaaaaaatggcagatcagctcaccgatgatcagatctctgagttcaaggaagcttttagccttttcgacaaagacggagatggttgcatcacaacgaaagagctaggaacagtgatgagatcattaggtcaaaatccaacagaagcagagttacaagatatgataaacgaagtagatgctgatggtaacggaaccatagacttccctgagtttctgaacctaatggctaggaagatgaaggacactgactctgaagaagagctcaaagaagctttcagggttttcgataaggaccagaacggtttcatctcggcagctgagttaagacatgtaatgacaaatcttggtgagaagttaactgatgaagaagttgatgagatgatcaaagaagctgatgttgatggagatggtcagatcaattatgaagagtttgtcaaagttatgatggcaaagtgaggaaactattctcatatcttttctctctttttctttctttctttttttgaattgaacaactctgattattgctttattctatgtttgactgttcattattatgcattcgtcccaaatttcatgttg

SEQ ID NO: 6091 - protein, 149 aa, Arabidopsis thaliana
MADQLTDDQISEFKEAFSLFDKDGDGCITTKELGTVMRSLGQNPTEAELQDMINEVDADGNGTIDFPEFLNLMARKMKDTDSEEELKEAFRVFDKDQNGFISAAELRHVMTNLGEKLTDEEVDEMIKEADVDGDGQINYEEFVKVMMAK

SEQ ID NO: 6092 - protein, 113 aa, Arabidopsis thaliana
MRSLGQNPTEAELQDMINEVDADGNGTIDFPEFLNLMARKMKDTDSEEELKEAFRVFDKDQNGFISAAELRHVMTNLGEKLTDEEVDEMIKEADVDGDGQINYEEFVKVMMAK

SEQ ID NO: 6093 - protein, 98 aa, Arabidopsis thaliana
MINEVDADGNGTIDFPEFLNLMARKMKDTDSEEELKEAFRVFDKDQNGFISAAELRHVMTNLGEKLTDEEVDEMIKEADVDGDGQINYEEFVKVMMAK

SEQ ID NO: 6094 - DNA, 985 bp, Arabidopsis thaliana
gtcacgacctttttgatccaaaaatcaaaatccaaaaccgaccaatggataccaacaaccagcaaccacctccctccgccgccggaatccctcctccaccacctggaaccaccatctccgccgcaggaggaggagcttcttaccaccaccttctccaacaacaacaacaacagctccaactattctggacctaccaacgccaagagatcgaacaagttaacgatttcaaaaaccatcagcttccactagctaggataaaaaagatcatgaaagccgatgaagatgttcgtatgatctccgcagaagcaccgattctcttcgcgaaagcttgtgagcttttcattctcgagctcacgatcagatcttggcttcacgctgaggagaataaacgtcgtacgcttcagaaaaacgatatcgctgctgcgattactaggactgatatcttcgatttccttgttgatattgttcctagagatgagattaaggacgaagccgcagtcctcggtggtggaatggtggtggctcctaccgcgagcggcgtgccttactattatccgccgatgggacaaccagctggtcctggagggatgatgattgggagaccagctatggatccgaatggtgtttatgtccagcctccgtctcaggcgtggcagagtgtttggcagacttcgacggggacgggagatgatgtctcttatggtagtggtggaagttccggtcaagggaatctcgacggccaaggttaagctcagagtattccagatgatgcttgacctgcttgaagatagcagatattagtcgacctcgccttgaattttggatgtgtttgatagattatgcctaaattcaatgaaaaggcttcgttaaagaagagtaaaaaaaactcttgtttctctctgttaacgtatatgttattgtagcaaaaccatcattgctgcgacttagcctaactatatataatctaatgtgcagtttctattgg

SEQ ID NO: 6095 - protein, 248 aa, Arabidopsis thaliana
HDLFDPKIKIQNRPMDTNNQQPPPSAAGIPPPPPGTTISAAGGGASYHHLLQQQQQQLQLFWTYQRQEIEQVNDFKNHQLPLARIKKIMKADEDVRMISAEAPILFAKACELFILELTIRSWLHAEENKRRTLQKNDIAAAITRTDIFDFLVDIVPRDEIKDEAAVLGGGMVVAPTASGVPYYYPPMGQPAGPGGMMIGRPAMDPNGVYVQPPSQAWQSVWQTSTGTGDDVSYGSGGSSGQGNLDGQG

SEQ ID NO: 6096 - protein, 234 aa, Arabidopsis thaliana
MDTNNQQPPPSAAGIPPPPPGTTISAAGGGASYHHLLQQQQQQLQLFWTYQRQEIEQVNDFKNHQLPLARIKKIMKADEDVRMISAEAPILFAKACELFILELTIRSWLHAEENKRRTLQKNDIAAAITRTDIFDFLVDIVPRDEIKDEAAVLGGGMVVAPTASGVPYYYPPMGQPAGPGGMMIGRPAMDPNGVYVQPPSQAWQSVWQTSTGTGDDVSYGSGGSSGQGNLDGQG

SEQ ID NO: 6097 - protein, 160 aa, Arabidopsis thaliana
MKADEDVRMISAEAPILFAKACELFILELTIRSWLHAEENKRRTLQKNDIAAAITRTDIFDFLVDIVPRDEIKDEAAVLGGGMVVAPTASGVPYYYPPMGQPAGPGGMMIGRPAMDPNGVYVQPPSQAWQSVWQTSTGTGDDVSYGSGGSSGQGNLDGQG

SEQ ID NO: 6098 - DNA, 908 bp, Arabidopsis thaliana
gattgattccatgatgaaggcttctttcaagggaaagttcgatgtcgacaagagcggtagcgttgcttcgcttaccttcaacgccggcaatgctaagctacgagccaccatgactgatgcttccttcgtcgccggtcctagctttaatggtctctctctcgccgttgagaagcctggcttcttcatcatcgactacaacgtccctaaaaaggatgttaggtttcagtttatgaacactatcagaattgcagagaagcctttgaatctgacttacattcatatgagaggagataaccggacgattgttgacgggagttttgtgattgatccagcaaacaagttgtctgctaattacatggtgggtacaaagaattgtaagctgaagtatacttatgttcatggagggatagctacatttgagccttgttatgacgtggctaagaatatgtgggactttgcgatttctcataaactttatggtggtgataatctcaaggcaacttatcagacttctagtaagatgcttggtttggaatggtcgaacaactctaaatcaactggatctttcaaggtatgtgcatcaatgaatctagctgaggaattgaagccgccaaaactgaccgcagaaactacatggaacctggaactttagctcccaaaaagtctcaattctttcggttgtttgatgtggattcaaaagtcttgacagaggaatctagaacatttctagtcgtttccttgtttatcattgtgaagactataatgaccacaaaaattgctattctagtattagtgagtccaattagtagtaaaagaatacccaaaaatgtagagtttgtcaacgaaggtgtttttattcaacatttcgagctaatactcacaaatacatgaagaatttgcatttaaag

SEQ ID NO: 6099 - protein, 216 aa, Arabidopsis thaliana
IDSMMKASFKGKFDVDKSGSVASLTFNAGNAKLRATMTDASFVAGPSFNGLSLAVEKPGFFIIDYNVPKKDVRFQFMNTIRIAEKPLNLTYIHMRGDNRTIVDGSFVIDPANKLSANYMVGTKNCKLKYTYVHGGIATFEPCYDVAKNMWDFAISHKLYGGDNLKATYQTSSKMLGLEWSNNSKSTGSFKVCASMNLAEELKPPKLTAETTWNLEL

SEQ ID NO: 6100 - protein, 213 aa, Arabidopsis thaliana
MMKASFKGKFDVDKSGSVASLTFNAGNAKLRATMTDASFVAGPSFNGLSLAVEKPGFFIIDYNVPKKDVRFQFMNTIRIAEKPLNLTYIHMRGDNRTIVDGSFVIDPANKLSANYMVGTKNCKLKYTYVHGGIATFEPCYDVAKNMWDFAISHKLYGGDNLKATYQTSSKMLGLEWSNNSKSTGSFKVCASMNLAEELKPPKLTAETTWNLEL

SEQ ID NO: 6101 - protein, 212 aa, Arabidopsis thaliana
MKASFKGKFDVDKSGSVASLTFNAGNAKLRATMTDASFVAGPSFNGLSLAVEKPGFFIIDYNVPKKDVRFQFMNTIRIAEKPLNLTYIHMRGDNRTIVDGSFVIDPANKLSANYMVGTKNCKLKYTYVHGGIATFEPCYDVAKNMWDFAISHKLYGGDNLKATYQTSSKMLGLEWSNNSKSTGSFKVCASMNLAEELKPPKLTAETTWNLEL

SEQ ID NO: 6102 - DNA, 678 bp, Arabidopsis thaliana
aagagaaaaaatacaaatcgttcaccggaaaaaaacaaaatggctcgtcgcgatgttctcctccctttcctcctccttctcgccaccgtctccgccgtagctttcgccgaagatgatccagactgtgtatacacattctacctcagaaccggatcgatctggaaagccggaaccgattcgatcatcagcgcaagaatctacgataaggacggtgactacatcggaatcaaaaaccttcaagcttgggctggattaatgggacctgattacaattacttcgagaggggtaatctcgacattttcagtggaagagcaccgtgtttacctagtccgatctgtgccttaaacctaacctccgatggctccggcgatcaccatggttggtacgttaattacgttgagatcacgacggctggtgttcacgcacagtgctcgacgcaggattttgagattgagcaatggctcgctactgatacttctccttatgagctcaccgccgtacggaacaattgtccggtcaagcttagggatagtgttagtcgggtcgggtctgagattcggaaaaagctttcttgggtcgtttaagtgatgtgttgtgattcgtgagacttgtctgtattgtttgtattctcgttgttcttgtgagtgtaatgtggcgttaatgaaatatgattcaac

SEQ ID NO: 6103 - protein, 194 aa, Arabidopsis thaliana
KRKNTNRSPEKNKMARRDVLLPFLLLLATVSAVAFAEDDPDCVYTFYLRTGSIWKAGTDSIISARIYDKDGDYIGIKNLQAWAGLMGPDYNYFERGNLDIFSGRAPCLPSPICALNLTSDGSGDHHGWYVNYVEITTAGVHAQCSTQDFEIEQWLATDTSPYELTAVRNNCPVKLRDSVSRVGSEIRKKLSWVV

SEQ ID NO: 6104 - protein, 181 aa, Arabidopsis thaliana
MARRDVLLPFLLLLATVSAVAFAEDDPDCVYTFYLRTGSIWKAGTDSIISARIYDKDGDYIGIKNLQAWAGLMGPDYNYFERGNLDIFSGRAPCLPSPICALNLTSDGSGDHHGWYVNYVEITTAGVHAQCSTQDFEIEQWLATDTSPYELTAVRNNCPVKLRDSVSRVGSEIRKKLSWVV

SEQ ID NO: 6105 - protein, 109 aa, Arabidopsis thaliana
MGPDYNYFERGNLDIFSGRAPCLPSPICALNLTSDGSGDHHGWYVNYVEITTAGVHAQCSTQDFEIEQWLATDTSPYELTAVRNNCPVKLRDSVSRVGSEIRKKLSWVV

SEQ ID NO: 6106 - DNA, 1527 bp, Arabidopsis thaliana
atgtcaaagctaatgaccagaaccagcggatcatcaagccccaacacgattccagaccaaatcgaatcaccaacaagctcaagatcggtgacgcagacgacaaacggatcgcaccaattcgtgatacaaggatacagtttagctaaaggaattggtgtagggaaacacatagcaagtgataatttctccgtaggaggttatcaatggactatcttcgtctaccctgacggtaaaaatccagaggataactcttcttacgtctctgtgttcatcgttttggctagtgaatgtactgaagttagagcgctttttgagctttctcttgttgatcaaagtggtaaagggaagcataaggttcatagccattttaatcgttcacttgatggtggtccttatacgcttaagtacagaggaagtatgtggggatacaagcgtttcttcagacggtccttgcttgagacatctgactatcttaaagacgattgcttgaaaattaattgtacagttggagttgtcgtttcagaaatgcattgcccacggttactctcgattcatgtcccagactcagaacttggatcacattttggaaagttgctggatactttacaaggctcggatgtcacatttgacgttgccggtgagaagtttcaagctcataaattggttttggctgcacgatctcagtttttcagatcaatgttttacaatactctagcagagaacaacagcgacgtagtgatcagcgatttggaacctaaggttttcaaggccttgttacacttcatgtataaagattccctcccaggagatgtggaaccattaacggctcattcatttgacctattaaggccgtccgaaatagatgatacactgattgtaaagcttctggcagctgcggaaatgtacaatctgagtaggctcagattattgtgtgaatctcacatctgcaaaggcatatctatcagctccgtgtccaagatcttagctttatccgacaaatataatgcatccgaactaaaaagcgtttccttaaaattcactgcagaaaacctagcagctgttctgcagacaaaagcatatgaagatctgaaggatgactgtccaaacctccagtctgagctactaaaggcggtcgctggttatgacgacacaagtagcagcggaggaggaaagtctcagagtgtttgggctcaactctctaacggtggtgagaccagtagccgaagggtcaggcagcgaaccacttagaagagcttcttcacatgttgttaacaaactacttttgcttaccactcgtaaacagattaaccggtttatctagtatgtaccgaatgaaagggaagcggagccagaaatcttgtaccacaagagaagagctatgcggctgtgcactagtgattaaccggtgcttcacctttcagttccttcacgtctctgtggatttttgttgttgagtctttttttcaaattcttttcccagcttcaaattactagaaacttatgatgatataatagaaagagttaact

SEQ ID NO: 6107 - protein, 415 aa, Arabidopsis thaliana
MSKLMTRTSGSSSPNTIPDQIESPTSSRSVTQTTNGSHQFVIQGYSLAKGIGVGKHIASDNFSVGGYQWTIFVYPDGKNPEDNSSYVSVFIVLASECTEVRALFELSLVDQSGKGKHKVHSHFNRSLDGGPYTLKYRGSMWGYKRFFRRSLLETSDYLKDDCLKINCTVGVVVSEMHCPRLLSIHVPDSELGSHFGKLLDTLQGSDVTFDVAGEKFQAHKLVLAARSQFFRSMFYNTLAENNSDVVISDLEPKVFKALLHFMYKDSLPGDVEPLTAHSFDLLRPSEIDDTLIVKLLAAAEMYNLSRLRLLCESHICKGISISSVSKILALSDKYNASELKSVSLKFTAENLAAVLQTKAYEDLKDDCPNLQSELLKAVAGYDDTSSSGGGKSQSVWAQLSNGGETSSRRVRQRTT

SEQ ID NO: 6108 - protein, 411 aa, Arabidopsis thaliana
MTRTSGSSSPNTIPDQIESPTSSRSVTQTTNGSHQFVIQGYSLAKGIGVGKHIASDNFSVGGYQWTIFVYPDGKNPEDNSSYVSVFIVLASECTEVRALFELSLVDQSGKGKHKVHSHFNRSLDGGPYTLKYRGSMWGYKRFFRRSLLETSDYLKDDCLKINCTVGVVVSEMHCPRLLSIHVPDSELGSHFGKLLDTLQGSDVTFDVAGEKFQAHKLVLAARSQFFRSMFYNTLAENNSDVVISDLEPKVFKALLHFMYKDSLPGDVEPLTAHSFDLLRPSEIDDTLIVKLLAAAEMYNLSRLRLLCESHICKGISISSVSKILALSDKYNASELKSVSLKFTAENLAAVLQTKAYEDLKDDCPNLQSELLKAVAGYDDTSSSGGGKSQSVWAQLSNGGETSSRRVRQRTT

SEQ ID NO: 6109 - protein, 276 aa, Arabidopsis thaliana
MWGYKRFFRRSLLETSDYLKDDCLKINCTVGVVVSEMHCPRLLSIHVPDSELGSHFGKLLDTLQGSDVTFDVAGEKFQAHKLVLAARSQFFRSMFYNTLAENNSDVVISDLEPKVFKALLHFMYKDSLPGDVEPLTAHSFDLLRPSEIDDTLIVKLLAAAEMYNLSRLRLLCESHICKGISISSVSKILALSDKYNASELKSVSLKFTAENLAAVLQTKAYEDLKDDCPNLQSELLKAVAGYDDTSSSGGGKSQSVWAQLSNGGETSSRRVRQRTT

SEQ ID NO: 6110 - DNA, 715 bp, Arabidopsis thaliana
aacttcataacaaaacaagattttgaagtaaaacataaaagaaaataaaccctaagaatatatcgaaaatgatcaaagggctcttgttggtttttttctttttaatcactgcaaagacttctgtttcacgtccgtttgcatggtcgagaggtaacatgccaggcgaaagtgggtcgggccgtgggccgaattgggagtacaattggggttggggctctgctccaggatctggatggggttacggggcaggctcaggtagatcaccaacaggatggggaagaggatccggatacggttatggatctggatcgggatcaggtaccgggtatggatatggttctggaggtggtggagcacgtggtggtggatatggttacggaagcggaaatggtcggtctggtggcggtggtggtggtggtggtttcaacggtgaagttgccgctttgagccatggtagtaagattcatccgtaaggacgtttgatttggtaatttctcccaactataatattttgggaggagtataagcgtttgcaatattaaaagattattaggtttggactttggtcctctgttaaatgtaacttatcttcctttgccttgtatgctttttatatagattatgcgctcgacgtatcttataatgtctgcatgtctcttaagtgtgatctcttttctttcttttttttggtatcaatattaagtatatttagtgt

SEQ ID NO: 6111 - protein, 134 aa, Arabidopsis thaliana
MIKGLLLVFFFLITAKTSVSRPFAWSRGNMPGESGSGRGPNWEYNWGWGSAPGSGWGYGAGSGRSPTGWGRGSGYGYGSGSGSGTGYGYGSGGGGARGGGYGYGSGNGRSGGGGGGGGFNGEVAALSHGSKIHP

SEQ ID NO: 6112 - protein, 105 aa, Arabidopsis thaliana
MPGESGSGRGPNWEYNWGWGSAPGSGWGYGAGSGRSPTGWGRGSGYGYGSGSGSGTGYGYGSGGGGARGGGYGYGSGNGRSGGGGGGGGFNGEVAALSHGSKIHP

SEQ ID NO: 6113 - DNA, 660 bp, Arabidopsis thaliana
gaaaaatgttgaaaaaagcgtattagcagagggacaaacgctttttagggttttagatttcctctgagagagaattttcgaaagcttgagagagatttccaactacgttagccatggcgagcaccaaagttcaaaggattatgacccaacctatcaacttgatttttaggtttcttcaaagtaaagctaggatccagatttggctatttgagcagaaagatttgaggattgaaggaagaatcactggttttgacgaatacatgaatctagttttggatgaggctgaagaagtgagcatcaagaagaacaccaggaaaccacttggaaggattttactcaaaggagacaacataactctgatgatgaacacgggaaagtgatgtctgtctcaaacaactctcttcgatgaccttcaagcttatgttaaatatctgttgagttcttcctcagcttaattggtacttgacgataccttcttttcttcaatgtcgtataatatattgcaatgtagtgagtgacaaaggagcttgatcgaatctagtggattggttggttaaaacttcaaaaaagagatttggtcccttttggttaaatctagtgttatgtaatttggctgatctttgttgcaactttttaacctctgtttaaatttcaaacctt

SEQ ID NO: 6114 - protein, 88 aa, Arabidopsis thaliana
MASTKVQRIMTQPINLIFRFLQSKARIQIWLFEQKDLRIEGRITGFDEYMNLVLDEAEEVSIKKNTRKPLGRILLKGDNITLMMNTGK

SEQ ID NO: 6115 - protein, 79 aa, Arabidopsis thaliana
MTQPINLIFRFLQSKARIQIWLFEQKDLRIEGRITGFDEYMNLVLDEAEEVSIKKNTRKPLGRILLKGDNITLMMNTGK

SEQ ID NO: 6116 - DNA, 800 bp, Arabidopsis thaliana
taggcatgaagggacaaaattaattcttcttctcttttcttttcttaaaagagctcaaaacacacgaccatctttccgctgtcttcttagcttcttatctaccgtaatcatgccaacatcagcaacagcggtggctccatcaactggatctgtccagaaaaaagatcaagactggcgtgcgattttgtctcccgagcaatttagagttctcagggaaaagggcacagagaaccgaggtaaaggagagtataccaaactgttcgacgacggaatctatagttgtgctggttgtgcaactcctctttataagtccaccactaagttcgactctggttgtggctggccttccttcttcgatgctatccctggtgccattaaacaaacgcccgaggcaggagggagaagaatggagatcacgtgcgcggcatgtgacggacatttaggtcatgttgtcaaaggagaaggttttcccacagcgaccgatgagcgccactgcgtcaacagtgtttctctcaagttctctgaaatttcctcccaataagtctatatagtccacattgatgaccactattgttggaccaagtcctctccttcaagaaaatttgaaaatcaagtcggattgtttgagattgtcatgttatgttccattcctagtcttgtgtgatatgctcgctccagtgattgttgtttgtcccttgtatggatatctttttaataattatattattgttatctttccattgacccttgatatgttcaatgcaagtcctatataataaaaattggcatttgttttctct

SEQ ID NO: 6117 - protein, 179 aa, Arabidopsis thaliana
RHEGTKLILLLFSFLKRAQNTRPSFRCLLSFLSTVIMPTSATAVAPSTGSVQKKDQDWRAILSPEQFRVLREKGTENRGKGEYTKLFDDGIYSCAGCATPLYKSTTKFDSGCGWPSFFDAIPGAIKQTPEAGGRRMEITCAACDGHLGHVVKGEGFPTATDERHCVNSVSLKFSEISSQ

SEQ ID NO: 6118 - protein, 143 aa, Arabidopsis thaliana
MPTSATAVAPSTGSVQKKDQDWRAILSPEQFRVLREKGTENRGKGEYTKLFDDGIYSCAGCATPLYKSTTKFDSGCGWPSFFDAIPGAIKQTPEAGGRRMEITCAACDGHLGHVVKGEGFPTATDERHCVNSVSLKFSEISSQ

SEQ ID NO: 6119 - DNA, 699 bp, Arabidopsis thaliana
ataatttattcatttcaccggaaaaactgagtcaactcagagcgagttaccattaccaagaatcatttaacactactgaatacatatgggtatatgcagctcgagcgagtcgactcaagtcgcgacggcgaagctgatcttacaagatgggaggatgatggagtttgcgaatcccgttaaagtcggatacgttttgctcaagtatccgatgtgttttatctgcaactccgacgatatggactttgacgacgccgttgccgctattagcgctgacgaagagcttcagcttggtcagatatactttgctcttcctctttgttggcttcgtcagccacttaaagctgaggagatggctgcattggccgttaaagctagctctgcgctcatgagaggtggtggaggaggttgtcgccggaaatgtgtcgagcctatcgtttctgataagcttcgaatgagagttggctccggtgatgatacggtgggttcaggatccgggaggaggaaagtgaggaacggtgatggtggtggtagtgttagtagtagccggaggaggaaatgttacgcggcggagttgagtacgatagatgagtgaagggtagttttggaattttgattaaatttgtgggtttaatttgtggatagtgtaaattatgttggggcctattagtcatttaatgaagatgcaatttgcatattggc

SEQ ID NO: 6120 - protein, 168 aa, Arabidopsis thaliana
MGICSSSESTQVATAKLILQDGRMMEFANPVKVGYVLLKYPMCFICNSDDMDFDDAVAAISADEELQLGQIYFALPLCWLRQPLKAEEMAALAVKASSALMRGGGGGCRRKCVEPIVSDKLRMRVGSGDDTVGSGSGRRKVRNGDGGGSVSSSRRRKCYAAELSTIDE

SEQ ID NO: 6121 - protein, 145 aa, Arabidopsis thaliana
MMEFANPVKVGYVLLKYPMCFICNSDDMDFDDAVAAISADEELQLGQIYFALPLCWLRQPLKAEEMAALAVKASSALMRGGGGGCRRKCVEPIVSDKLRMRVGSGDDTVGSGSGRRKVRNGDGGGSVSSSRRRKCYAAELSTIDE

SEQ ID NO: 6122 - protein, 144 aa, Arabidopsis thaliana
MEFANPVKVGYVLLKYPMCFICNSDDMDFDDAVAAISADEELQLGQIYFALPLCWLRQPLKAEEMAALAVKASSALMRGGGGGCRRKCVEPIVSDKLRMRVGSGDDTVGSGSGRRKVRNGDGGGSVSSSRRRKCYAAELSTIDE

SEQ ID NO: 6123 - DNA, 616 bp, Arabidopsis thaliana
atcaaccacaactttcattcaaagagcttttcaaacagaactcacatatcttttctctttctttctccacactttgctttccaatctcaagctttaactctccctgaaaatgatgataaacgcaaagaagcttatgaagatggctaagaaatggcaacaaagagcagccctccacaggaaaagaatctcatttcagagatcaaatgtctttactagcagctcttctactgtagaaaagggttgtttcgtggtctacacggcggataaaatccgctttgcttttccaataagttatctgagcaactctattgtccaagggctcttgaaaatatctgaagaagagttcggtctcccaacggaaggaccaatcacattgccgttcgattcggttttcttggagtatctcatcaaactgatccaaagacgaatggatggagatacagaaaaggctctgttgatgtcaatctctagtgctaagtgttctttacaatgttctttgctacagcaagaacagagtactcaacaattgcttgtattatagggtttcttaaaagaacatatagttttgtaaatattcagatacttttatactttatacaagataaacattaccacc

SEQ ID NO: 6124 - protein, 143 aa, Arabidopsis thaliana
MMINAKKLMKMAKKWQQRAALHRKRISFQRSNVFTSSSSTVEKGCFVVYTADKIRFAFPISYLSNSIVQGLLKISEEEFGLPTEGPITLPFDSVFLEYLIKLIQRRMDGDTEKALLMSISSAKCSLQCSLLQQEQSTQQLLVL

SEQ ID NO: 6125 - protein, 142 aa, Arabidopsis thaliana
MINAKKLMKMAKKWQQRAALHRKRISFQRSNVFTSSSSTVEKGCFVVYTADKIRFAFPISYLSNSIVQGLLKISEEEFGLPTEGPITLPFDSVFLEYLIKLIQRRMDGDTEKALLMSISSAKCSLQCSLLQQEQSTQQLLVL

SEQ ID NO: 6126 - protein, 135 aa, Arabidopsis thaliana
MKMAKKWQQRAALHRKRISFQRSNVFTSSSSTVEKGCFVVYTADKIRFAFPISYLSNSIVQGLLKISEEEFGLPTEGPITLPFDSVFLEYLIKLIQRRMDGDTEKALLMSISSAKCSLQCSLLQQEQSTQQLLVL

SEQ ID NO: 6127 - protein, 133 aa, Arabidopsis thaliana
MAKKWQQRAALHRKRISFQRSNVFTSSSSTVEKGCFVVYTADKIRFAFPISYLSNSIVQGLLKISEEEFGLPTEGPITLPFDSVFLEYLIKLIQRRMDGDTEKALLMSISSAKCSLQCSLLQQEQSTQQLLVL

SEQ ID NO: 6128 - DNA, 615 bp, Arabidopsis thaliana
atggggacatattattcatcacaagttttaagcagtatttgtaagaaaatggcttccaagactttgcttcttttgggtctctttgcatttcttttcatcgtctcagaaatggctgccgcgggcacggtgaagtcagagagtgaggaaactgtgaaacctgaacaacatggtggtggattcggtgacaatggaggaggaagataccaaggaggaggcggccatggtggccacggagggggaggataccaaggaggaggaggacgataccaaggaggcggtgggcgacaaggaggagggggaagttactgccgccacggctgctgctacaaaggttaccatggctgctcaaggtgttgttcatatgccggagaagcggttcagactcagtctggtcactaaatctacataatatatcaaccaccatgagtgtacgatttcatttatatatacacttacgtgtgtatgtgatatgacaatacacttacgtttgtaatgaagtgccttaagtttaagaggagaaactatcggaataaagtttcataatgtaatgcctttgtgtttatttaagttgttatttgcgatgtttgcataataaagttgtttctagttgaagtt

SEQ ID NO: 6129 - protein, 132 aa, Arabidopsis thaliana
MGTYYSSQVLSSICKKMASKTLLLLGLFAFLFIVSEMAAAGTVKSESEETVKPEQHGGGFGDNGGGRYQGGGGHGGHGGGGYQGGGGRYQGGGGRQGGGGSYCRHGCCYKGYHGCSRCCSYAGEAVQTQSGH

SEQ ID NO: 6130 - protein, 116 aa, Arabidopsis thaliana
MASKTLLLLGLFAFLFIVSEMAAAGTVKSESEETVKPEQHGGGFGDNGGGRYQGGGGHGGHGGGGYQGGGGRYQGGGGRQGGGGSYCRHGCCYKGYHGCSRCCSYAGEAVQTQSGH

SEQ ID NO: 6131 - protein, 96 aa, Arabidopsis thaliana
MAAAGTVKSESEETVKPEQHGGGFGDNGGGRYQGGGGHGGHGGGGYQGGGGRYQGGGGRQGGGGSYCRHGCCYKGYHGCSRCCSYAGEAVQTQSGH

SEQ ID NO: 6132 - DNA, 843 bp, Arabidopsis thaliana
attgtgaatttattagtaatttataaattcatcaaaaacaaactcttttcagaaaaaaaataacaacaacaacaataatggcgtcttttgcaacccatcttgttgttgttgttacaatgttgtttgtagccatggcctccgcggagatgcttcaagatgtttgtgttgctgatttgtctaatgcggtcaaggtcaacggatacacttgcaaggactcaacacaaataacaccagaagacttctacttcaaaggcttagccaacattgccgccacaaacacctctaccggctcagtcgtgaccggagccaacgtagaaaagctaccgggactcaacactctcggcctctccatgtcccgcatcgactacgccccaaacggcctaaacccaccccatgtccacccacgtgcctccgagatcattttcgtccttgaaggtcagctctatgttggctttgtaacaaccgctggaaaactcatcgccaagaaccttaacaagggagacgttttcaccttccccaagggactcatccatttccagaagaacattgccaacagtccagcatctgtactcgcagccttcgatagccaattgcccggaacacaatcacttgtcgcctctctctttggagctcttcccgatgacattctggccaagtcattccagctcaaacacaaacaggttaagaagatcaaactgagatacgcacccaagaaatgagtttgtttttgtttatattgtaaacactaagcaaagaagaatgaatcaatataaagtttgcaactttaaaactattatgagatgaaactaaagaactgataaaaagctttgttttcattgtttc

SEQ ID NO: 6133 - protein, 213 aa, Arabidopsis thaliana
MASFATHLVVVVTMLFVAMASAEMLQDVCVADLSNAVKVNGYTCKDSTQITPEDFYFKGLANIAATNTSTGSVVTGANVEKLPGLNTLGLSMSRIDYAPNGLNPPHVHPRASEIIFVLEGQLYVGFVTTAGKLIAKNLNKGDVFTFPKGLIHFQKNIANSPASVLAAFDSQLPGTQSLVASLFGALPDDILAKSFQLKHKQVKKIKLRYAPKK

SEQ ID NO: 6134 - protein, 200 aa, Arabidopsis thaliana
MLFVAMASAEMLQDVCVADLSNAVKVNGYTCKDSTQITPEDFYFKGLANIAATNTSTGSVVTGANVEKLPGLNTLGLSMSRIDYAPNGLNPPHVHPRASEIIFVLEGQLYVGFVTTAGKLIAKNLNKGDVFTFPKGLIHFQKNIANSPASVLAAFDSQLPGTQSLVASLFGALPDDILAKSFQLKHKQVKKIKLRYAPKK

SEQ ID NO: 6135 - protein, 195 aa, Arabidopsis thaliana
MASAEMLQDVCVADLSNAVKVNGYTCKDSTQITPEDFYFKGLANIAATNTSTGSVVTGANVEKLPGLNTLGLSMSRIDYAPNGLNPPHVHPRASEIIFVLEGQLYVGFVTTAGKLIAKNLNKGDVFTFPKGLIHFQKNIANSPASVLAAFDSQLPGTQSLVASLFGALPDDILAKSFQLKHKQVKKIKLRYAPKK

SEQ ID NO: 6136 - DNA, 520 bp, Arabidopsis thaliana
aaaccctagaccctaaatcttagcgaaattaagcagagcaacattttcgtaatccgatctccgtcgtcgtcgtcgaatcagataaaaatggcgaagcgtttgatcccgactctcaaccgtgtattggtggagaagattctcccaccgtcaaagaccgtctccggcattctcctaccggagaaatcatctcagttgaattccgggagagttatagcagttggtcctggagctagagacagagcagggaatctaattccggtttcggttaaggaaggagacaatgttcttttgcctgaatttggcggtactcaagttaagcttggagagaaagagttcctattgtatagggatgaagatatcatggctacacttcacgagtgatgtgttaaagagatagaatttatgattcctctttgttttgttgtctgcaattgtctgacatttggatcaattgttatgattgttcttcactgttggcaacaagttcttataattcaataatctcttttgtttgggaaag

SEQ ID NO: 6137 - protein, 97 aa, Arabidopsis thaliana
MAKRLIPTLNRVLVEKILPPSKTVSGILLPEKSSQLNSGRVIAVGPGARDRAGNLIPVSVKEGDNVLLPEFGGTQVKLGEKEFLLYRDEDIMATLHE

SEQ ID NO: 6138 - DNA, 728 bp, Arabidopsis thaliana
aacgttcccttcgttgttcatcggaatccctagaacactcgatttcagcaaaatcaaatcggattcagtgatcaaaagtcaatttggtcgagaagaaattgagcgttgaagatgacggaggcgatgataagaaataagccaggaatggcgagtgtgaaggatatgccgctgcttcaggatggtccgccaccgggtgggttcgcaccggtccgatatgcccgccggatatccaatacgggtcctagtgcaatggccatgttccttgccgtttctggtgcctttgcttggggaatgtaccaggtcggccagggaaacaaaatccgcagggcattgaaggaagagaaatatgctgctcgtagaacaatacttcccattcttcaagcagaagaagatgaaaggtttgtgtctgagtggaaaaagtatctggaatatgaggctgatgtaatgaaagatgttccgggatggaaagttggcgagaatgtgtacaattctggtcgctggatgcctccggctactggggaactccgtcctgatgtgtggtgatttcctagtttctctcaaatgcatatgatgatgatgaatgatgtttcgctgaggattgatatgttcttgttatatctttttttcttcgggtaataagagaatgattcaacagacagtattcttcttgtattggttttctcttaagtgtttcaatcgtaatatgaggcaaaaacagtttcatgatt

SEQ ID NO: 6139 - protein, 143 aa, Arabidopsis thaliana
MTEAMIRNKPGMASVKDMPLLQDGPPPGGFAPVRYARRISNTGPSAMAMFLAVSGAFAWGMYQVGQGNKIRRALKEEKYAARRTILPILQAEEDERFVSEWKKYLEYEADVMKDVPGWKVGENVYNSGRWMPPATGELRPDVW

SEQ ID NO: 6140 - protein, 139 aa, Arabidopsis thaliana
MIRNKPGMASVKDMPLLQDGPPPGGFAPVRYARRISNTGPSAMAMFLAVSGAFAWGMYQVGQGNKIRRALKEEKYAARRTILPILQAEEDERFVSEWKKYLEYEADVMKDVPGWKVGENVYNSGRWMPPATGELRPDVW

SEQ ID NO: 6141 - protein, 132 aa, Arabidopsis thaliana
MASVKDMPLLQDGPPPGGFAPVRYARRISNTGPSAMAMFLAVSGAFAWGMYQVGQGNKIRRALKEEKYAARRTILPILQAEEDERFVSEWKKYLEYEADVMKDVPGWKVGENVYNSGRWMPPATGELRPDVW

SEQ ID NO: 6142 - DNA, 636 bp, Arabidopsis thaliana
aatcatcactttcacaatcttcttcatcgatttctctcttccaaatctcccaaaagatgtcgaaccctagagttttcttcgacatgagtctcagcggtactcccatcggacggatcgagatggagcttttcgctgatacaaccccaaacacggcggagaatttccgtgctctctgtaccggcgagaaaggaatgggaaagctaagttcaaggacgagaactttatcaagaagcatacaggagctgggattctctcaatggctaactctggtcctaacactaacggatctcagttcttcatctgtaccgataagacgtcgtggttagatggtaagcacgttgtgtttggacaagttgttaaaggcttggacgtcgtgaaggcgattgagaaagttggatctgattctggaaagacttccaaagtcgttaccatcactgattgtggtcagctttcttagatctaagtgagaaagtgagagactttgatctttatgagtaataatggtgtcttttgctttcggttgttcttcctcttaccttaatggattattctgtttagggtttgagttttcgtttcagagtttgtaacaaaacccttttgtgttttctggggtttgaaataattatgagcttactc

SEQ ID NO: 6143 - protein, 107 aa, Arabidopsis thaliana
SSLSQSSSSISLFQISQKMSNPRVFFDMSLSGTPIGRIEMELFADTTPNTAENFRALCTGEKGMGKLSSRTRTLSRSIQELGFSQWLTLVLTLTDLSSSSVPIRRRG

SEQ ID NO: 6144 - protein, 89 aa, Arabidopsis thaliana
MSNPRVFFDMSLSGTPIGRIEMELFADTTPNTAENFRALCTGEKGMGKLSSRTRTLSRSIQELGFSQWLTLVLTLTDLSSSSVPIRRRG

SEQ ID NO: 6145 - protein, 80 aa, Arabidopsis thaliana
MSLSGTPIGRIEMELFADTTPNTAENFRALCTGEKGMGKLSSRTRTLSRSIQELGFSQWLTLVLTLTDLSSSSVPIRRRG

SEQ ID NO: 6146 - DNA, 1252 bp, Arabidopsis thaliana
atgagcaccaacagctactactcatccgcttccagttcaggatttcgtgtctgtcctcctggtgtcccctcgaaatgttggtgtggagaagagatcattacattcacatcgaaaacaaaggagaatccataccggagattctaccgttgtgcgatagcaatgaagagagaaaatgaagagcacttgttcaaatgggttgatgaagctctcttggacgaaattaagatggtaaatgagaagtgtaagagagttgtagagaatattagtgacctcagaatgaacgtgatggctaatatggagctccttaataaaaacgctaagcagatggaggaagagctgattaagaagatggagggtgaactcttgaccatgaaggagaatgtggaagagctaggacatgttatggcaaagtcagctttgaagactgtaggggttgctgttgtgattgttgcatctattgtatggctttggggaagagttaggtttaaagaaacaacagaaatcgttccttacgaattctatggaattagggcccaaaaatccaaaggaaaggccaccttaaaagcccattttaaaaatcttcgagcccaaacccaaaacgcagaacgaagtttattaagaacaacaaaacgccccaattcgcagcgattatctgtcgttgccacacccaacagactctgcgtcgccggagaaatcttgtcgacgggtcttttaaggttttggaagatggatataatctcacagttgcaagaacaagtgaatacgattgctgctatcactttcaatgcttttgggacactgcaaagggatgcaccaccagtccagctttcacctaattatcctgaaccacccgctacaactacggttactgatgatgctacgccttttcctgagcaacctaagcagctcagtgctggcttagttaaggctgctaaacagtttgatgctttggttgctgcacttcctttgtcagaaggtggtgaaggtgctcagctcaaaagaatcgctgaactccaggtggaaaatgatcttgttggtcaagaactccaaaagcaactagaggctgcagagaaggagctaaagcaagtacaagagctgtttggacaagctgctgacaattgcctgaacatgaagaaacctgaatgaaatgcttgtttaccttttgtcgagctgatttagaaactatatgatttggttcagcaacaattatcttttaggttcataaggaatatctattctaagttggttcacc

SEQ ID NO: 6147 - protein, 381 aa, Arabidopsis thaliana
MSTNSYYSSASSSGFRVCPPGVPSKCWCGEEIITFTSKTKENPYRRFYRCAIAMKRENEEHLFKWVDEALLDEIKMVNEKCKRVVENISDLRMNVMANMELLNKNAKQMEEELIKKMEGELLTMKENVEELGHVMAKSALKTVGVAVVIVASIVWLWGRVRFKETTEIVPYEFYGIRAQKSKGKATLKAHFKNLRAQTQNAERSLLRTTKRPNSQRLSVVATPNRLCVAGEILSTGLLRFWKMDIISQLQEQVNTIAAITFNAFGTLQRDAPPVQLSPNYPEPPATTTVTDDATPFPEQPKQLSAGLVKAAKQFDALVAALPLSEGGEGAQLKRIAELQVENDLVGQELQKQLEAAEKELKQVQELFGQAADNCLNMKKPE

SEQ ID NO: 6148 - protein, 328 aa, Arabidopsis thaliana
MKRENEEHLFKWVDEALLDEIKMVNEKCKRVVENISDLRMNVMANMELLNKNAKQMEEELIKKMEGELLTMKENVEELGHVMAKSALKTVGVAVVIVASIVWLWGRVRFKETTEIVPYEFYGIRAQKSKGKATLKAHFKNLRAQTQNAERSLLRTTKRPNSQRLSVVATPNRLCVAGEILSTGLLRFWKMDIISQLQEQVNTIAAITFNAFGTLQRDAPPVQLSPNYPEPPATTTVTDDATPFPEQPKQLSAGLVKAAKQFDALVAALPLSEGGEGAQLKRIAELQVENDLVGQELQKQLEAAEKELKQVQELFGQAADNCLNMKKPE

SEQ ID NO: 6149 - protein, 306 aa, Arabidopsis thaliana
MVNEKCKRVVENISDLRMNVMANMELLNKNAKQMEEELIKKMEGELLTMKENVEELGHVMAKSALKTVGVAVVIVASIVWLWGRVRFKETTEIVPYEFYGIRAQKSKGKATLKAHFKNLRAQTQNAERSLLRTTKRPNSQRLSVVATPNRLCVAGEILSTGLLRFWKMDIISQLQEQVNTIAAITFNAFGTLQRDAPPVQLSPNYPEPPATTTVTDDATPFPEQPKQLSAGLVKAAKQFDALVAALPLSEGGEGAQLKRIAELQVENDLVGQELQKQLEAAEKELKQVQELFGQAADNCLNMKKPE

SEQ ID NO: 6150 - DNA, 738 bp, Arabidopsis thaliana
aaaaacaacacaaatacaaaccataaaatcacatcttctttacaacaatgcagtactacgaaaaccgtgagaaagactactacgaggtggctcaaggccaacgcaatggttatggccagagccagagccacaaccacgagggatatggccagagccagagccgtgggggatatggccagatccataaccgtgagggttataaccaaaaccgtgagggatatagccaaagccagagtcgcccagtatatgggcttagcccgactttgaaccaccgtagccacggtgggtttcttgatgggctcttcaagggtcaaaatggccaaaagggtcagagtgggctaggcacgtttctagggcaacacaagagccaagaggctaaaaagagtcaaggacatgggaagctcttggggcaacatgaccagaagaaaactcatgagacaaacagtggtcttaatggccttggaatgttcattaacaatggtgagaagaaacataggaggaaaagtgagcacaagaagaagaacaaggatgggcatggcagtggtaatgagagtggaagcagcagcggtagcgacagcgactgaatatgatatgcttgctctgaagaaagtaacgcttctaagagtgactaaattaagtacttggatgtaatacttaaaataaaatcacttaggtggttgtctttgtgtgtcctatataacctcgctactacatgaatctacttttatagttttgttg

SEQ ID NO: 6151 - protein, 178 aa, Arabidopsis thaliana
MQYYENREKDYYEVAQGQRNGYGQSQSHNHEGYGQSQSRGGYGQIHNREGYNQNREGYSQSQSRPVYGLSPTLNHRSHGGFLDGLFKGQNGQKGQSGLGTFLGQHKSQEAKKSQGHGKLLGQHDQKKTHETNSGLNGLGMFINNGEKKHRRKSEHKKKNKDGHGSGNESGSSSGSDSD

SEQ ID NO: 6152 - DNA, 847 bp, Arabidopsis thaliana
atgactgcttcactttctctttctcttttgttcaagtagtttgggagagagaagagaagaagaagacaccctttaagcaaaacagaggattttcattctctgttctgtttgaattattactaatctatcatcttgttgttctcttcgtcgacaatgtcgggaaacaaagaagaagaggatcctcgtatccatggaatcaaaactaagatccgtgtcgttccagattttcccaagaaaggaataatgtttcaagacataacaacagtgttgttggatccgaaagccttcaaagacacaattgatctgtttgtggagaggtacagagacaagaacatctcagtggttgcaggaatagaggctcgtggtttcctattcggtccaccgatcgcgctagccattggagcaaaatttgttcctctgcgcaaacccaagaaactacctggtgaaacaatatttgaggaatacgagttggaatatggaaatgaccgcctagagatgcacataggagccgtcgaggctggcgatcgagctttggtcgttgatgatcttatcgcgactggtggtactctctgcgctgccattaacttgctcgagagggttggagcagaagttgtggaatgtgcatgtgtgatcgagttacccgaattaaagggaaggcagagacttaaggggaagccactatgtatgcttgtggagtaccgatgatgattttagctttacttatttggataaaattattcggttaattaatttatgctccgaaaattcggattatgcagacttcttattattggattctacaatattttgatttaaattctagcggattagctggaagaaataatcc

SEQ ID NO: 6153 - protein, 183 aa, Arabidopsis thaliana
MSGNKEEEDPRIHGIKTKIRVVPDFPKKGIMFQDITTVLLDPKAFKDTIDLFVERYRDKNISVVAGIEARGFLFGPPIALAIGAKFVPLRKPKKLPGETIFEEYELEYGNDRLEMHIGAVEAGDRALVVDDLIATGGTLCAAINLLERVGAEVVECACVIELPELKGRQRLKGKPLCMLVEYR

SEQ ID NO: 6154 - protein, 153 aa, Arabidopsis thaliana
MFQDITTVLLDPKAFKDTIDLFVERYRDKNISVVAGIEARGFLFGPPIALAIGAKFVPLRKPKKLPGETIFEEYELEYGNDRLEMHIGAVEAGDRALVVDDLIATGGTLCAAINLLERVGAEVVECACVIELPELKGRQRLKGKPLCMLVEYR

SEQ ID NO: 6155 - DNA, 590 bp, Arabidopsis thaliana
aaagaaaaaaaggtgatcggagattttggcttattctcagatttgggagaaatggcggcagaagagggtcaagtgattggttgtcacacgaacgatgtatggactgtgcaacttgataaagccaaagaatccaacaagctgattgtgattgatttcactgcttcatggtgtccaccatgccgcatgattgctccaattttcaacgatttggccaagaagttcatgtcaagtgccatcttcttcaaggtggatgttgatgaacttcagagtgttgctaaagagtttggtgtggaggcaatgccaacctttgtgttcattaaagccggcgaagttgtggataagctcgttggtgcgaataaagaagatcttcaggcgaaaatagtgaagcatactggtgttacaactgcgtaaatcagtttgaggcataaataataaggtctaatttgtttatcttaaactagctagacataacgggaatagtgcagattggagatgaagtagaagttattgatctctgactgtcataaaaccatgctttttttatatggtctttggcttttgcctaattcatatgtttagatgttctttcc

SEQ ID NO: 6156 - protein, 136 aa, Arabidopsis thaliana
KEKKVIGDFGLFSDLGEMAAEEGQVIGCHTNDVWTVQLDKAKESNKLIVIDFTASWCPPCRMIAPIFNDLAKKFMSSAIFFKVDVDELQSVAKEFGVEAMPTFVFIKAGEVVDKLVGANKEDLQAKIVKHTGVTTA

SEQ ID NO: 6157 - protein, 119 aa, Arabidopsis thaliana
MAAEEGQVIGCHTNDVWTVQLDKAKESNKLIVIDFTASWCPPCRMIAPIFNDLAKKFMSSAIFFKVDVDELQSVAKEFGVEAMPTFVFIKAGEVVDKLVGANKEDLQAKIVKHTGVTTA

SEQ ID NO: 6158 - protein, 75 aa, Arabidopsis thaliana
MIAPIFNDLAKKFMSSAIFFKVDVDELQSVAKEFGVEAMPTFVFIKAGEVVDKLVGANKEDLQAKIVKHTGVTTA

SEQ ID NO: 6159 - DNA, 1497 bp, Arabidopsis thaliana
gcttttgactcacttttttaatctttttggattttggtgaaaaagtttaatttgtctctttctctatttatctccggcgtcaatttcacggcggctacacgacggttatcgatgtcattgactgtaccggagttcgatttcagattgacgccacagtttggtttctcacagtcaccgatcggggagcgtaatttcgcggatgttgataatctggagaactgtattaagtatttgaatcagagcttagtcacctctggattctctgcttcgcttgacctcttcgctaccgatcctgtttcgattgctagaacttgcaattgcgtatacgctttgattcaacagaggcaacgagatgtggaatttagagaatctgctaatgatcagagacaacgacttttatccgatatggcgagactcgaagcaaaagttgaaaggcttgagactcaattgcaagctaaagaaagggaacttggttcggtgacaagaacggaagcaaaaaatacagcggctttaaagacgcagaatgagaagcttcaaaaagagagagatgagtttcaacgaatggtgattgctaaccagcaagtcaagacccaacaattacatgaaacaaaaaagaaagaaaaagagtacataaagttacaggagaggttaaaccaagtgttgatggagaaaaagaaggaaacgagatcaggcatggagattatgaatctactccagaaagaagggagacagcgtggaacatggagtgggaagaaaactgactctgatttctacaaaaaaattgtggatgcatatgaggcgaaaaatcaagaactgatggcagagaacactgatctgagagcgttactacgatcaacgcagggtgacatgcgttctttcttgaatgcttctggtggattaaccaaccaatctttggtagctaatggaagacacggtgcagacccttctcagtctcctttgggcgggaagacggacgtttttgacctaccttttcgtatggcacgaggtcaaatagaagatagtttacgctctaagatggtttccatcaaggaacgtatgggtcagttagtagatgcacaaaaagaagtatccattacttcagaagcgtcagagagggaacttgaacttgaagcacaactcgtcgaggcacgcagcattattcaagaacaggaatctataatgtccaaacatttacctaagacagatcggagaaggaactcagctcctccacattcttctgtcaacggactgcgtggctgactaattagattgtgaatctcaggttcaaaatatcaaatctcttcctgtaatttgatcttgctaaacaaagaaatgttttatgaacttataaaaaaatttaaatgaatgtggattcgtatttgtaacgttgtacagaacacttgcagacagcaagctgcaagctgtagagtattatagatggagagatatgttttatatcataatatagatgcctttctttataaaagaaatcgaatc

SEQ ID NO: 6160 - protein, 382 aa, Arabidopsis thaliana
MSLTVPEFDFRLTPQFGFSQSPIGERNFADVDNLENCIKYLNQSLVTSGFSASLDLFATDPVSIARTCNCVYALIQQRQRDVEFRESANDQRQRLLSDMARLEAKVERLETQLQAKERELGSVTRTEAKNTAALKTQNEKLQKERDEFQRMVIANQQVKTQQLHETKKKEKEYIKLQERLNQVLMEKKKETRSGMEIMNLLQKEGRQRGTWSGKKTDSDFYKKIVDAYEAKNQELMAENTDLRALLRSTQGDMRSFLNASGGLTNQSLVANGRHGADPSQSPLGGKTDVFDLPFRMARGQIEDSLRSKMVSIKERMGQLVDAQKEVSITSEASERELELEAQLVEARSIIQEQESIMSKHLPKTDRRRNSAPPHSSVNGLRG

SEQ ID NO: 6161 - protein, 284 aa, Arabidopsis thaliana
MARLEAKVERLETQLQAKERELGSVTRTEAKNTAALKTQNEKLQKERDEFQRMVIANQQVKTQQLHETKKKEKEYIKLQERLNQVLMEKKKETRSGMEIMNLLQKEGRQRGTWSGKKTDSDFYKKIVDAYEAKNQELMAENTDLRALLRSTQGDMRSFLNASGGLTNQSLVANGRHGADPSQSPLGGKTDVFDLPFRMARGQIEDSLRSKMVSIKERMGQLVDAQKEVSITSEASERELELEAQLVEARSIIQEQESIMSKHLPKTDRRRNSAPPHSSVNGLRG

SEQ ID NO: 6162 - protein, 232 aa, Arabidopsis thaliana
MVIANQQVKTQQLHETKKKEKEYIKLQERLNQVLMEKKKETRSGMEIMNLLQKEGRQRGTWSGKKTDSDFYKKIVDAYEAKNQELMAENTDLRALLRSTQGDMRSFLNASGGLTNQSLVANGRHGADPSQSPLGGKTDVFDLPFRMARGQIEDSLRSKMVSIKERMGQLVDAQKEVSITSEASERELELEAQLVEARSIIQEQESIMSKHLPKTDRRRNSAPPHSSVNGLRG

SEQ ID NO: 6163 - DNA, 646 bp, Arabidopsis thaliana
atccgattttatttgtttgataagttcgtgtcgtcttcgtctctctaacccaattctgtggtgtctgaagaaagcagaatcaaatcctttctttcagaggacttagcaggccaaatgcaatatctggaatgggtgttgcagatgagagcaaaaccacatttctagagcttcaaaggaaaaaaactcatcgctatgtggtcttcaagattgatgaatccaaaaaagaagttgttgttgagaaaactggaaatcctacagagagctacgatgatttcttagcttcacttcctgataatgactgcagatacgctgtttatgactttgatttcgttacttctgagaattgtcaaaagagcaaaatcttcttctttgcttggtctccttcgacctctggaattcgagccaaggtgctttactcgacttctaaagaccagttaagtagggagcttcaagggattcactatgagattcaagctactgatcctactgaggttgatcttgaagtgttacgcgaacgagcgaactgagagcaagcaagattgctatgtctattcaaaacttatggtaatgtaatgaataattcgtattctctgtggattgatttgtgtaaacacagtttcatgttctatgtcaaactgtataaccg

SEQ ID NO: 6164 - protein, 132 aa, Arabidopsis thaliana
MGVADESKTTFLELQRKKTHRYVVFKIDESKKEVVVEKTGNPTESYDDFLASLPDNDCRYAVYDFDFVTSENCQKSKIFFFAWSPSTSGIRAKVLYSTSKDQLSRELQGIHYEIQATDPTEVDLEVLRERAN

SEQ ID NO: 6165 - DNA, 851 bp, Arabidopsis thaliana
gctctcacgttcgaagaccatttcttgttctttggacgaccatcggcgacagtgttaagtctagagtcttcttcttcttcggcgtagttttttccccggcttgaaaaatgggtctatccttcggaaagttgttcagcaagctctttgcaaagaaagagatgcgtatcctcatggtgggtctcgatgcagctggtaagactacgatcttgtacaagctcaagcttggagagatcgtgactacgattccaaccattggtttcaatgtggagactgtggaatacaagaacattagctttaccgtgtgggatgtcgggggtcaagacaagattcgtccattgtggaggcactacttccagaacactcagggacttatctttgtggtggacagcaatgatcgtgaccgtgttgtggaagccagagatgagcttcacagaatgttgaacgaagatgagttgagagatgctgtgcttctcgtttttgctaacaagcaagatcttccaaatgcgatgaacgccgctgagataaccgataagcttggacttcactctctccgtcaacgacactggtacatacagagcacatgtgctacctccggagaagggctttatgagggacttgactggctctctaacaacatcgcaaacaaggcttaggagaacaacgtgtggtttggtttttaatcgaggagagtcttgtcttcttccttctatcttttgttctttcgtctcaaactcttatcatttcatactctttgttcttcgctctaataatttacaagttttttttttttgttgcttttatcctataattcagactcttataaaatggggcccaatttcggcggatattcc

SEQ ID NO: 6166 - protein, 181 aa, Arabidopsis thaliana
MGLSFGKLFSKLFAKKEMRILMVGLDAAGKTTILYKLKLGEIVTTIPTIGFNVETVEYKNISFTVWDVGGQDKIRPLWRHYFQNTQGLIFVVDSNDRDRVVEARDELHRMLNEDELRDAVLLVFANKQDLPNAMNAAEITDKLGLHSLRQRHWYIQSTCATSGEGLYEGLDWLSNNIANKA

SEQ ID NO: 6167 - protein, 164 aa, Arabidopsis thaliana
MRILMVGLDAAGKTTILYKLKLGEIVTTIPTIGFNVETVEYKNISFTVWDVGGQDKIRPLWRHYFQNTQGLIFVVDSNDRDRVVEARDELHRMLNEDELRDAVLLVFANKQDLPNAMNAAEITDKLGLHSLRQRHWYIQSTCATSGEGLYEGLDWLSNNIANKA

SEQ ID NO: 6168 - protein, 160 aa, Arabidopsis thaliana
MVGLDAAGKTTILYKLKLGEIVTTIPTIGFNVETVEYKNISFTVWDVGGQDKIRPLWRHYFQNTQGLIFVVDSNDRDRVVEARDELHRMLNEDELRDAVLLVFANKQDLPNAMNAAEITDKLGLHSLRQRHWYIQSTCATSGEGLYEGLDWLSNNIANKA

SEQ ID NO: 6169 - DNA, 894 bp, Arabidopsis thaliana
aacacgcttggttaaactccatcagtactttaaccatcacttcaaagttcaaactcttttttttttttttgtttgatccaaattttaacaaaattatggatcgcaatttcctcctaacagttacattgatctgcattgtcgtcgccggtgtcggtggccaatctcctatctcttctccgaccaaatctcccaccactccttctgctccaactacttcccctactaaatcccccgccgtttacttctcccactacggctccggcgaaaactccaactgcttcggcttcttcaccggttgagtcaccaaaatctccggctcctgttagcgagtcgtctccaccaccgacacctgttccagagagctctcctccggttcctgcaccaatggtttcttctccagtgagctctccaccggttccagcaccagtagctgattctcctccagctccggtagccgctccggttgctgatgtaccggctcctgctccaagcaagcataagaagactacaaagaaatcgaaaaagcatcaagctgcacctgctccggctccggaacttctcggtccacctgcaccaccgactgaatctcccggacctaactccgacgctttttctcccggtccttccgccgacgatcagagcggagcagcgagcacaagggtgttgaggaatgtagcggtgggagcggttgcaaccgcatgggccgttctcgttatggcattctaaattatttatcatttcacctctgatattttttagtttttatatttttgaccctaccattgtctctttctttacgaatttggtaatgagtattatttaattgattatacagtttgttttcttttattttatttatatggaaataataagaattcatatctgtcagtgatg

SEQ ID NO: 6170 - protein, 113 aa, Arabidopsis thaliana
MVSSPVSSPPVPAPVADSPPAPVAAPVADVPAPAPSKHKKTTKKSKKHQAAPAPAPELLGPPAPPTESPGPNSDAFSPGPSADDQSGAASTRVLRNVAVGAVATAWAVLVMAF

SEQ ID NO: 6171 - protein, 98 aa, Arabidopsis thaliana
HAWLNSISTLTITSKFKLFFFFLFDPNFNKIMDRNFLLTVTLICIVVAGVGGQSPISSPTKSPTTPSAPTTSPTKSPAVYFSHYGSGENSNCFGFFTG

SEQ ID NO: 6172 - protein, 67 aa, Arabidopsis thaliana
MDRNFLLTVTLICIVVAGVGGQSPISSPTKSPTTPSAPTTSPTKSPAVYFSHYGSGENSNCFGFFTG

SEQ ID NO: 6173 - DNA, 1271 bp, Arabidopsis thaliana
aaaaaaactcttaaacagcttcctaacgagaggaaactgaggaacacaacaatggagtttcgtggagatgccaaccagaggattgctaggatttcagctcatctcactcctcagatggaggccaagaactctgtaatcggacgggaaaactgcagagctaaaggtggtaatccaggattcaaagtagcaattcttggagctgcaggtggaattggacaatctttatctttgctgatgaagatgaaccctcttgtctctttacttcatctctacgatgttgtcaatgctcctggcgtcactgctgacgtcagtcatatggacactggagctgttgtccgcgggttcttgggagcgaagcagcttgaggacgcgctaacgggtatggatcttgtgatcataccagccggtataccgaggaaaccagggatgacccgcgatgatctgtttaaaatcaatgctgggattgttaaaacactatgtgaaggtgtagcaaaatgttgtcctaatgctattgtcaacttgatcagcaaccctgtgaactctactgtccccattgccgctgaggttttcaagaaagctggaacttatgatcctaagaagctccttggagttactacactcgatgttgctcgtgccaacacatttgtggcagaagttcttggccttgatccaagagaagtcgatgtgccagtagttgggggacacgccggagtcacaatcttgccactactgtcacaggttaaacctcctagcagcttcacacctcaagaaattgagtacctgacaaaccggattcaaaatggtggaactgaagttgtggaggcaaaagctggagctggttctgcaacactttcaatggcatatgctgcagccaagtttgcagatgcttgccttcgcgggttaagaggagatgcgaatgtcgtagaatgctcttttgttgcttcacaggtgacagaattagctttctttgcaacaaaagtgcgccttggccgtacaggagcagaggaagtgtatcagcttggacccttaaacgaatacgaaaggattggtctggagaaagcaaaagatgaattagccggaagtattcagaaaggtgttgaattcatcagaaaatgaaactgagagataatcagagagatacaataagttatttcctcaactatatgatcatgtactcatcatcacatcatgcctatgtctcctctgcttctgatacaactttgtataaatccttatcagtttgtgtacgatatatgtgaccttttcaacgt

SEQ ID NO: 6174 - protein, 371 aa, Arabidopsis thaliana
KKTLKQLPNERKLRNTTMEFRGDANQRIARISAHLTPQMEAKNSVIGRENCRAKGGNPGFKVAILGAAGGIGQSLSLLMKMNPLVSLLHLYDVVNAPGVTADVSHMDTGAVVRGFLGAKQLEDALTGMDLVIIPAGIPRKPGMTRDDLFKINAGIVKTLCEGVAKCCPNAIVNLISNPVNSTVPIAAEVFKKAGTYDPKKLLGVTTLDVARANTFVAEVLGLDPREVDVPVVGGHAGVTILPLLSQVKPPSSFTPQEIEYLTNRIQNGGTEVVEAKAGAGSATLSMAYAAAKFADACLRGLRGDANVVECSFVASQVTELAFFATKVRLGRTGAEEVYQLGPLNEYERIGLEKAKDELAGSIQKGVEFIRK

SEQ ID NO: 6175 - protein, 354 aa, Arabidopsis thaliana
MEFRGDANQRIARISAHLTPQMEAKNSVIGRENCRAKGGNPGFKVAILGAAGGIGQSLSLLMKMNPLVSLLHLYDVVNAPGVTADVSHMDTGAVVRGFLGAKQLEDALTGMDLVIIPAGIPRKPGMTRDDLFKINAGIVKTLCEGVAKCCPNAIVNLISNPVNSTVPIAAEVFKKAGTYDPKKLLGVTTLDVARANTFVAEVLGLDPREVDVPVVGGHAGVTILPLLSQVKPPSSFTPQEIEYLTNRIQNGGTEVVEAKAGAGSATLSMAYAAAKFADACLRGLRGDANVVECSFVASQVTELAFFATKVRLGRTGAEEVYQLGPLNEYERIGLEKAKDELAGSIQKGVEFIRK

SEQ ID NO: 6176 - protein, 333 aa, Arabidopsis thaliana
MEAKNSVIGRENCRAKGGNPGFKVAILGAAGGIGQSLSLLMKMNPLVSLLHLYDVVNAPGVTADVSHMDTGAVVRGFLGAKQLEDALTGMDLVIIPAGIPRKPGMTRDDLFKINAGIVKTLCEGVAKCCPNAIVNLISNPVNSTVPIAAEVFKKAGTYDPKKLLGVTTLDVARANTFVAEVLGLDPREVDVPVVGGHAGVTILPLLSQVKPPSSFTPQEIEYLTNRIQNGGTEVVEAKAGAGSATLSMAYAAAKFADACLRGLRGDANVVECSFVASQVTELAFFATKVRLGRTGAEEVYQLGPLNEYERIGLEKAKDELAGSIQKGVEFIRK

SEQ ID NO: 6177 - DNA, 836 bp, Arabidopsis thaliana
ctaaaagttatcagaatagaaatctctctctctcaacaagtctaacagtgccatttgtatctctgaactccaaccatggctcctctggttctctaccttctcactctcctcatggctggccataccagtgcctcatggtgtgtgtgcaaaacagggctgagtgactcagtgctacaaaagacattagactatgcttgtggaaatggagctgactgtaacccaactcacccaaaaggctcttgcttcaatcctgacaatgttagggctcattgcaactatgcagtcaatagcttcttccaaaagaaaggtcaagcttctgagtcttgtaacttcactggtactgccactcttaccaccaccgatcccagctatacaggatgtgcattcccttctagtgctagtggttctagtggaagcggtagcaccaccgtgacgccaggcaaaaacagtccaaaaggaagcaacagcatcaccacatttcccggcggaaacagtccatactctggcacaccatccaccggcttattaggaggcaatatcactgatgctactggaaccgggttgaacccggattactcaaccgaaagcagtggatttgcgctctattactccaacaaccttctgttaaccggcttttgttctctcgtgatgatgctctgaactgaagaagaatcactgtcttcttttagtttatgcttagtcaaaaaatatgttatttatatgttcttgttgttttagagataatttaatctggatttcggttcttttttactttccggttttaagaaaacacttatcaatgtaaaaccaaatctactatcgatcggtttggtacg

SEQ ID NO: 6178 - protein, 194 aa, Arabidopsis thaliana
MAPLVLYLLTLLMAGHTSASWCVCKTGLSDSVLQKTLDYACGNGADCNPTHPKGSCFNPDNVRAHCNYAVNSFFQKKGQASESCNFTGTATLTTTDPSYTGCAFPSSASGSSGSGSTTVTPGKNSPKGSNSITTFPGGNSPYSGTPSTGLLGGNITDATGTGLNPDYSTESSGFALYYSNNLLLTGFCSLVMML

SEQ ID NO: 6179 - protein, 182 aa, Arabidopsis thaliana
MAGHTSASWCVCKTGLSDSVLQKTLDYACGNGADCNPTHPKGSCFNPDNVRAHCNYAVNSFFQKKGQASESCNFTGTATLTTTDPSYTGCAFPSSASGSSGSGSTTVTPGKNSPKGSNSITTFPGGNSPYSGTPSTGLLGGNITDATGTGLNPDYSTESSGFALYYSNNLLLTGFCSLVMML

SEQ ID NO: 6180 - DNA, 624 bp, Arabidopsis thaliana
aagaaatatggaggataggaggaggtgtgaggtgttgtttccatgttcatcatcggttgatcctcgcgtgacagagtttcatggggtcgacaagtctgctcagccgacaacatcatccgaagagaagccaaggagtaagaagaagaagaaagagagagaagcgaggtacgcgttccagacaagaagccaggttgatatactggatgatggatataggtggaggaagtacggccaaaaagcagtcaagaacaatccattcccaaggagctattataagtgcacagaagaaggatgcagagtgaagaagcaagtgcagaggcaatggggagacgaaggagtggtggtgacgacataccaaggtgttcatacgcatgccgttgataaaccctctgataatttccaccacatcttgacacaaatgcacatcttccctcccttttcttgaaggtattggattgtaatatttactttccaaaaaaacgttgggctcacaccatcacacccttacttttaaactagcagcaattcacatatctcaaaaacaagtaaaaatctaacaagactaaacactaatccttatctatctgcttcggctgccctgaaatcgaaagtagattcatcatc

SEQ ID NO: 6181 - protein, 147 aa, Arabidopsis thaliana
RNMEDRRRCEVLFPCSSSVDPRVTEFHGVDKSAQPTTSSEEKPRSKKKKKEREARYAFQTRSQVDILDDGYRWRKYGQKAVKNNPFPRSYYKCTEEGCRVKKQVQRQWGDEGVVVTTYQGVHTHAVDKPSDNFHHILTQMHIFPPFS

SEQ ID NO: 6182 - protein, 145 aa, Arabidopsis thaliana
MEDRRRCEVLFPCSSSVDPRVTEFHGVDKSAQPTTSSEEKPRSKKKKKEREARYAFQTRSQVDILDDGYRWRKYGQKAVKNNPFPRSYYKCTEEGCRVKKQVQRQWGDEGVVVTTYQGVHTHAVDKPSDNFHHILTQMHIFPPFS

SEQ ID NO: 6183 - protein, 73 aa, Arabidopsis thaliana
MGSTSLLSRQHHPKRSQGVRRRRKREKRGTRSRQEARLIYWMMDIGGGSTAKKQSRTIHSQGAIISAQKKDAE

SEQ ID NO: 6184 - DNA, 2946 bp, Arabidopsis thaliana
attttctcaccaaaccaaaatcgtgaaagaatattttcccgcttcatgtagatggcagctagactacaacgacctgggcttgtatcctcaagctctacttcaaaaccatgtcttccaaggatgtccattgttactttcatatcctgcaaaaggactgtacacttggagtacttatcaaattgcttgagcaatccgaggagccaattgtttgttagatatggttttctggaaaggagcaacaagaagaaatcacagaggctggtcttggcatctgctgaagatggagtagctattaatggaagtcctcagccaagatctagtagtaatttggaggacatgaggactagtttcaccggatcattacaagacgaaaacaattctaatggacttaaccagtctttgcatgatgctgctagatctattgaattggctgttaaagagaagattactccgtccagattttcgtggtttccttcgacttggcttggtgctgataaatatgcatgggtgaagactctttcgtatcaggcttctctgtactccttactgcaagcagtaaatgagatttcatctagaggcaattacagagacgaggatattaatgtctttgttcaaagaagcttatcacgccaagctgctccccttgagaatatgatgcgagagaatctttcttccaagcatcctaaagcctatgaatggttttggtccgagcaagttccttccgtggtgacatcttttgtgaattatcttgagggggaccaacgttttgttgctgccacttctgtctatgcaaaaggaaagtccgcagctgcaagtaatgagattgaagtgtcacttctcatgcttgtactcaattgcattgcagcaatcacgaaagttggcccagcaaaattttcctgcccacccttcttctctatgattccagatacaactggaagattgatggaaaaacttgtagacttcgttccactccctcaagcgtatcattcaatcaaaagcataggcctacaaagagaatttcttactcattttggtcctcgcgcagcagtgtgcagagttaatggtgacattgatacagatgaagttattttctgggttgatcttatacagaaacaactgcagcgggctatagatagggagaaaatatggtcaaagttaacaacatccgaaagtatagaggttttggagagagatttagcaatttttggattcttcattgctttgggcaggagcacacagtccattttagctgcaaatggttttgattctctggagaatcctttggaagaccttgttaggcatcttattggaggcagcgtcctgtactatcctcaactttcagccatcagttcataccagctgtatgtagaggttgtttgcgaagaactagaatggattcctttctatccaaacaatactggaacacagccaccaaaccaatcacatgggcataagaccaaaccagaaggaccacccaattatgaagttattccccaactgttggatgtttgttcttattggctacagagttttattaaatatagtaaatggccagagaatccatctaatgtcaaggcagcaaaattcttatctaaggggcacaagactttggttcggtgtaaagaagaactggggatattaaagaatgcatcatcaattgttagagagtcgaactcatttgacaaggccctagaaagtgtagatgaggccctcgttagactggaaagcctgctacaggagttgtatgtatcaaactcatcgtctggaaaggaacaaataaaagccgcgtgctctgacctagagaaaatacggaagcttaagaaagaggctgaatttctggaggcaactttcagagccaaagcagcttccttgcaacagggaggtgacaaaaatgattctcaagaatcctacgaggtacaaaaacggtattttaaagggaaagacacaaagaacgcaaatagttctgaggatcaaggcaaaagtataagtcgtggattctggggattctttgtacggccttcaaggaagaagcttgatcctgagttatcgggagatgaatatattgggaaatccagtggaaacttacttagcatagactcggaaccaattgagatcagccgattcgaaattctaaggaacgagctaatagaactcgaaaagcgggtcaaaagaagcactgatcagtcagtagatgaggaggaattaatctctgaggatacacctcaatcaagcagtagaacggaaagtgttcagttggttcagactcccaagaaggaaaacatgatggagaaaactcttcaaaagctaagagaagccaccacggacgtgtggcaaggtactcaacttcttgccattgattcagcagctgcagtgcagctacttcggaggtctctgattggtgatgaattaacaggaaaagaaaagaaagccctgcgcagaaccatgactgacctggcgtcagttattcccatcggtattctaatgcttcttcctgttacagcggttggtcacgctgccatgctggctggaattcagagatatgtaccaggcctgattccttccacatacgggtccgaaaggttgaacctattgagacagcttgagaaaatcaaggaactgcaaacaaatgaaaccgagagcgaagaaggcgtagaggaaatagcattatgagtagaaggaagcaatatagacttgtacctctattcactttgttcggtaattcattgccaaaagctgcgcatagagaatctcgttccatgtgtccggtactccgggtaagcaccagtgactgcagtcttgaggagcatcttcaggagttcccggttctcgataccgcgaaggatgagcatctttcctgaactcggtcagatatgtaatgttcagaaacttaaccttactatgttcatatctcatttcttggattgcttgagaaatataattgttgtg

SEQ ID NO: 6185 - protein, 872 aa, Arabidopsis thaliana
MAARLQRPGLVSSSSTSKPCLPRMSIVTFISCKRTVHLEYLSNCLSNPRSQLFVRYGFLERSNKKKSQRLVLASAEDGVAINGSPQPRSSSNLEDMRTSFTGSLQDENNSNGLNQSLHDAARSIELAVKEKITPSRFSWFPSTWLGADKYAWVKTLSYQASLYSLLQAVNEISSRGNYRDEDINVFVQRSLSRQAAPLENMMRENLSSKHPKAYEWFWSEQVPSVVTSFVNYLEGDQRFVAATSVYAKGKSAAASNEIEVSLLMLVLNCIAAITKVGPAKFSCPPFFSMIPDTTGRLMEKLVDFVPLPQAYHSIKSIGLQREFLTHFGPRAAVCRVNGDIDTDEVIFWVDLIQKQLQRAIDREKIWSKLTTSESIEVLERDLAIFGFFIALGRSTQSILAANGFDSLENPLEDLVRHLIGGSVLYYPQLSAISSYQLYVEVVCEELEWIPFYPNNTGTQPPNQSHGHKTKPEGPPNYEVIPQLLDVCSYWLQSFIKYSKWPENPSNVKAAKFLSKGHKTLVRCKEELGILKNASSIVRESNSFDKALESVDEALVRLESLLQELYVSNSSSGKEQIKAACSDLEKIRKLKKEAEFLEATFRAKAASLQQGGDKNDSQESYEVQKRYFKGKDTKNANSSEDQGKSISRGFWGFFVRPSRKKLDPELSGDEYIGKSSGNLLSIDSEPIEISRFEILRNELIELEKRVKRSTDQSVDEEELISEDTPQSSSRTESVQLVQTPKKENMMEKTLQKLREATTDVWQGTQLLAIDSAAAVQLLRRSLIGDELTGKEKKALRRTMTDLASVIPIGILMLLPVTAVGHAAMLAGIQRYVPGLIPSTYGSERLNLLRQLEKIKELQTNETESEEGVEEIAL

SEQ ID NO: 6186 - protein, 849 aa, Arabidopsis thaliana
MSIVTFISCKRTVHLEYLSNCLSNPRSQLFVRYGFLERSNKKKSQRLVLASAEDGVAINGSPQPRSSSNLEDMRTSFTGSLQDENNSNGLNQSLHDAARSIELAVKEKITPSRFSWFPSTWLGADKYAWVKTLSYQASLYSLLQAVNEISSRGNYRDEDINVFVQRSLSRQAAPLENMMRENLSSKHPKAYEWFWSEQVPSVVTSFVNYLEGDQRFVAATSVYAKGKSAAASNEIEVSLLMLVLNCIAAITKVGPAKFSCPPFFSMIPDTTGRLMEKLVDFVPLPQAYHSIKSIGLQREFLTHFGPRAAVCRVNGDIDTDEVIFWVDLIQKQLQRAIDREKIWSKLTTSESIEVLERDLAIFGFFIALGRSTQSILAANGFDSLENPLEDLVRHLIGGSVLYYPQLSAISSYQLYVEVVCEELEWIPFYPNNTGTQPPNQSHGHKTKPEGPPNYEVIPQLLDVCSYWLQSFIKYSKWPENPSNVKAAKFLSKGHKTLVRCKEELGILKNASSIVRESNSFDKALESVDEALVRLESLLQELYVSNSSSGKEQIKAACSDLEKIRKLKKEAEFLEATFRAKAASLQQGGDKNDSQESYEVQKRYFKGKDTKNANSSEDQGKSISRGFWGFFVRPSRKKLDPELSGDEYIGKSSGNLLSIDSEPIEISRFEILRNELIELEKRVKRSTDQSVDEEELISEDTPQSSSRTESVQLVQTPKKENMMEKTLQKLREATTDVWQGTQLLAIDSAAAVQLLRRSLIGDELTGKEKKALRRTMTDLASVIPIGILMLLPVTAVGHAAMLAGIQRYVPGLIPSTYGSERLNLLRQLEKIKELQTNETESEEGVEEIAL

SEQ ID NO: 6187 - protein, 777 aa, Arabidopsis thaliana
MRTSFTGSLQDENNSNGLNQSLHDAARSIELAVKEKITPSRFSWFPSTWLGADKYAWVKTLSYQASLYSLLQAVNEISSRGNYRDEDINVFVQRSLSRQAAPLENMMRENLSSKHPKAYEWFWSEQVPSVVTSFVNYLEGDQRFVAATSVYAKGKSAAASNEIEVSLLMLVLNCIAAITKVGPAKFSCPPFFSMIPDTTGRLMEKLVDFVPLPQAYHSIKSIGLQREFLTHFGPRAAVCRVNGDIDTDEVIFWVDLIQKQLQRAIDREKIWSKLTTSESIEVLERDLAIFGFFIALGRSTQSILAANGFDSLENPLEDLVRHLIGGSVLYYPQLSAISSYQLYVEVVCEELEWIPFYPNNTGTQPPNQSHGHKTKPEGPPNYEVIPQLLDVCSYWLQSFIKYSKWPENPSNVKAAKFLSKGHKTLVRCKEELGILKNASSIVRESNSFDKALESVDEALVRLESLLQELYVSNSSSGKEQIKAACSDLEKIRKLKKEAEFLEATFRAKAASLQQGGDKNDSQESYEVQKRYFKGKDTKNANSSEDQGKSISRGFWGFFVRPSRKKLDPELSGDEYIGKSSGNLLSIDSEPIEISRFEILRNELIELEKRVKRSTDQSVDEEELISEDTPQSSSRTESVQLVQTPKKENMMEKTLQKLREATTDVWQGTQLLAIDSAAAVQLLRRSLIGDELTGKEKKALRRTMTDLASVIPIGILMLLPVTAVGHAAMLAGIQRYVPGLIPSTYGSERLNLLRQLEKIKELQTNETESEEGVEEIAL

SEQ ID NO: 6188 - DNA, 538 bp, Arabidopsis thaliana
gtccgttctaaaaccctataaaaactctgtggaagaagaagatcgatctcactttttccggcttcattttctagctcttacaatggcttctagattcatgagcagatcctctgtctcgtctttcaaatccgccattagatcttcatttcgaaattctcccattggcactggatcttctccggctgctgcttcatccgccggatttcgtattccgtctaaaccagctgcttctcctcttccccgattctccttctccaggtgtccgtcggagcttggttgtgttcagtctctgttaccgctacacagcacggtggcggctgcgcggttgacgtcatgcttaagcacaacttccagaagcagccgagctctcactcaggagatgggactttcagtcccaaggtgacaagatacattcatgaagagtattactattgagggatgtaagtttcttctctaaacttagagacaagaatttgttttttgtgttatgactccaaacttatgttctttgattcatgaagggaaaaaatgtaatacg

SEQ ID NO: 6189 - protein, 133 aa, Arabidopsis thaliana
SVLKPYKNSVEEEDRSHFFRLHFLALTMASRFMSRSSVSSFKSAIRSSFRNSPIGTGSSPAAASSAGFRIPSKPAASPLPRFSFSRCPSELGCVQSLLPLHSTVAAARLTSCLSTTSRSSRALTQEMGLSVPR

SEQ ID NO: 6190 - protein, 106 aa, Arabidopsis thaliana
MASRFMSRSSVSSFKSAIRSSFRNSPIGTGSSPAAASSAGFRIPSKPAASPLPRFSFSRCPSELGCVQSLLPLHSTVAAARLTSCLSTTSRSSRALTQEMGLSVPR

SEQ ID NO: 6191 - protein, 101 aa, Arabidopsis thaliana
MSRSSVSSFKSAIRSSFRNSPIGTGSSPAAASSAGFRIPSKPAASPLPRFSFSRCPSELGCVQSLLPLHSTVAAARLTSCLSTTSRSSRALTQEMGLSVPR

SEQ ID NO: 6192 - DNA, 634 bp, Arabidopsis thaliana
ctttgtcttcttccactactctgcgccgctttgtctctgtcgcaatctcaaccatatggagaaagacatggcaatgatgggagacaaactgatactgagaggcttgaaattttatggtttccatggagctattcctgaagagaagacgcttggccagatgtttatgcttgacatcgatgcttggatgtgtctcaaaaaggctggtctatcagacaacttagctgattctgtcagctatgtcgacatttacaacgtggcaaaggaagttgtagaagggtcatcaagaaaccttctggagagagttgcaggacttatagcttccaaaactctggaaatatcccctcggataacagctgttcgagtgaagctatggaagccaaatgttgcgcttattcaaagcactatcgattatttaggtgtcgagattttcagagatcgcgcaactgaataacactaaaagaatcatttgtatcccagttctgttgtatacatggaaattttattttttcatatccaaaagcttttgtaacatgtcattgattttgaagaatttttctgttacaaagtttaaataagatgaaagattggggaatattattgtacttgagattctctcaacaaaattcagtatggc

SEQ ID NO: 6193 - protein, 149 aa, Arabidopsis thaliana
FVFFHYSAPLCLCRNLNHMEKDMAMMGDKLILRGLKFYGFHGAIPEEKTLGQMFMLDIDAWMCLKKAGLSDNLADSVSYVDIYNVAKEVVEGSSRNLLERVAGLIASKTLEISPRITAVRVKLWKPNVALIQSTIDYLGVEIFRDRATE

SEQ ID NO: 6194 - protein, 131 aa, Arabidopsis thaliana
MEKDMAMMGDKLILRGLKFYGFHGAIPEEKTLGQMFMLDIDAWMCLKKAGLSDNLADSVSYVDIYNVAKEVVEGSSRNLLERVAGLIASKTLEISPRITAVRVKLWKPNVALIQSTIDYLGVEIFRDRATE

SEQ ID NO: 6195 - protein, 127 aa, Arabidopsis thaliana
MAMMGDKLILRGLKFYGFHGAIPEEKTLGQMFMLDIDAWMCLKKAGLSDNLADSVSYVDIYNVAKEVVEGSSRNLLERVAGLIASKTLEISPRITAVRVKLWKPNVALIQSTIDYLGVEIFRDRATE

SEQ ID NO: 6196 - DNA, 629 bp, Arabidopsis thaliana
catcctgtcccagacagtaacatactaaccgtatacacaacggtattatattggtaacatatcaaagctctctatatgtctctgaagaaaagatcttgctcgaggcttagactcaccgatttgatggagaagtggaggaagtgtaagaaaggacacttcgctgtgtataccagagaaggcaggaggtttgttttacccttggattatctcaaacatccaatctttcaggtcttattggagatggcagaggaagagtttggctccactatttgtggccctttacaggttccttgcgacggaggtttgatggatcacatcctcatgttgttgaggaacaagagtttgtctgaccatgatgatgatggtggtgatgatggtgtgaagaagacgatgaaccaggatgtgtcccccatgagcacgtcgtgcaagggagcttcatcggtttcatatttcttccctctctttcgttgcaacgcagcccatgatcagagcaagctccagtctctagttttttaacagtttatggttgtggagagcgctttttatacacaaaaatcttttctgtttgtatataaatagaaacagagattctctataaaccttcagtttgtatatcattattcattttt

SEQ ID NO: 6197 - protein, 146 aa, Arabidopsis thaliana
MSLKKRSCSRLRLTDLMEKWRKCKKGHFAVYTREGRRFVLPLDYLKHPIFQVLLEMAEEEFGSTICGPLQVPCDGGLMDHILMLLRNKSLSDHDDDGGDDGVKKTMNQDVSPMSTSCKGASSVSYFFPLFRCNAAHDQSKLQSLVF

SEQ ID NO: 6198 - protein, 130 aa, Arabidopsis thaliana
MEKWRKCKKGHFAVYTREGRRFVLPLDYLKHPIFQVLLEMAEEEFGSTICGPLQVPCDGGLMDHILMLLRNKSLSDHDDDGGDDGVKKTMNQDVSPMSTSCKGASSVSYFFPLFRCNAAHDQSKLQSLVF

SEQ ID NO: 6199 - protein, 91 aa, Arabidopsis thaliana
MAEEEFGSTICGPLQVPCDGGLMDHILMLLRNKSLSDHDDDGGDDGVKKTMNQDVSPMSTSCKGASSVSYFFPLFRCNAAHDQSKLQSLVF

SEQ ID NO: 6200 - DNA, 650 bp, Arabidopsis thaliana
ccctttactacacacttcttcttttttcttcagaaagaaagaaagacagagagagagagagaagatggtgttaggaaagcgtcatggatcactgatcaagagaacaactagcatgaagatgatcacactcgatacacccacgatctatgacgcatctcagccgtccgatcatctaacctttcatcaacaccctcacaatccgatggtggtgatggctagtaactacgatgatttcttgaagacttgtagtctctgcaatcgaagtctctgccatcatcgtgacatttacatgtatagagggaacaacgcattttgtagcttagaatgcagggagaagcaaattaagctggacgagaaaaaagcgaaaaccggcttcgtaacatcgaagaaaccaattcgtatttagttgatcatctatgatctaaaatgataacgatagtttttccttatgagtaaaatgaatatgtttttgcgtttcgtgtacaagaatgatgaaaattaagagagaaaaatgagactaaatgagtgtagtgatcatatagtaatgggacttcataagcatgatttgatttgttcgtgtgatttgtttctttgtgatgtgtaatatgtaatgtaatatcaatgttgatgtatattcaggtggtcttctc

SEQ ID NO: 6201 - protein, 134 aa, Arabidopsis thaliana
PLLHTSSFFFRKKERQREREKMVLGKRHGSLIKRTTSMKMITLDTPTIYDASQPSDHLTFHQHPHNPMVVMASNYDDFLKTCSLCNRSLCHHRDIYMYRGNNAFCSLECREKQIKLDEKKAKTGFVTSKKPIRI

SEQ ID NO: 6202 - protein, 113 aa, Arabidopsis thaliana
MVLGKRHGSLIKRTTSMKMITLDTPTIYDASQPSDHLTFHQHPHNPMVVMASNYDDFLKTCSLCNRSLCHHRDIYMYRGNNAFCSLECREKQIKLDEKKAKTGFVTSKKPIRI

SEQ ID NO: 6203 - protein, 97 aa, Arabidopsis thaliana
MKMITLDTPTIYDASQPSDHLTFHQHPHNPMVVMASNYDDFLKTCSLCNRSLCHHRDIYMYRGNNAFCSLECREKQIKLDEKKAKTGFVTSKKPIRI

SEQ ID NO: 6204 - DNA, 676 bp, Arabidopsis thaliana
cctctcctcctcgtcctcaatcatcatcatctgagaattcgcagcttttgcttcttcgatagaaaatctaattatcatcaatcatgtctaagttcacgggattctcatctctcgctatctcttattttctcttggtttcaacgattgttgcagccaccgatgttcactactgcgataataacgaagagtatgaagtaaaagtacaaggagttgatataactccttatcctatagctagaggcgagccagctactttcagaatttctgctaacacagacactgagatctcgagcggcaagttggtgatcgaagtttcctactttggatggcatattcattctgagacacatgatctttgtgatgagacaagttgtcctgtggccattggagatttcttggtagcgcactcgcaagttcttcccggatatacccctcctggttcatactcactaaaaatgaagatgcttgatggacgcaagaaggagttaacttgcatcaagttctcatttgatattggatttggatcctccgtggccgacatgtagagctgatttgctcgacgggatacaccatcttgttctataccatggaaccactctcatttattttgtataaaatacactctcctgctatacataattgttgatcaaaaaccctttgaaaattctcattctgg

SEQ ID NO: 6205 - protein, 153 aa, Arabidopsis thaliana
MSKFTGFSSLAISYFLLVSTIVAATDVHYCDNNEEYEVKVQGVDITPYPIARGEPATFRISANTDTEISSGKLVIEVSYFGWHIHSETHDLCDETSCPVAIGDFLVAHSQVLPGYTPPGSYSLKMKMLDGRKKELTCIKFSFDIGFGSSVADM

SEQ ID NO: 6206 - DNA, 482 bp, Arabidopsis thaliana
tgcggttgccgcacctgcttcgcttctcctctctcgctctctactcaggactcgtttactctttcaaagctaagctttcaagatgcaaaacgaagagggtcaggtcactgagctttacattcctaggaaatgttctgctactaaccggttgatcacatccaaggatcatgcctctgttcagctcaacattggtcatttagatgctaatggcttgtacaccggacagttcacaacctttgctctctgcggttttgtccgtgctcagggagacgctgacagtggtgtcgacaggttgtggcagaagaagaaggttgaagccaaacaaaactaagagcttaatctgtcttgttttttgtcgaatcttgtttttttttttccgaaagattgcctcatactgaagtaatgattttggctttgggtcgtggaacttaacttaaatgcttttgtgcaccatgtcttctaatttttcaccagttcgatat

SEQ ID NO: 6207 - protein, 82 aa, Arabidopsis thaliana
MQNEEGQVTELYIPRKCSATNRLITSKDHASVQLNIGHLDANGLYTGQFTTFALCGFVRAQGDADSGVDRLWQKKKVEAKQN

SEQ ID NO: 6208 - protein, 65 aa, Arabidopsis thaliana
MLMACTPDSSQPLLSAVLSVLRETLTVVSTGCGRRRRLKPNKTKSLICLVFCRILFFFFRKIASY

SEQ ID NO: 6209 - protein, 63 aa, Arabidopsis thaliana
MACTPDSSQPLLSAVLSVLRETLTVVSTGCGRRRRLKPNKTKSLICLVFCRILFFFFRKIASY

SEQ ID NO: 6210 - DNA, 538 bp, Arabidopsis thaliana
cttttggaaaaacctccgtctttcgggtcttcgtcgacattgatccgttttttactcaccgtcgccgttgaaatggcgaagtcttgtaagggccttgctgaagagcttgtcaaatgtctcagtgaatcgatttgtgtcaagggcgagaaacgatcaattagggactgcactggtgaaaaaagcccatgtataccgagtgagtgtgttggcctaagagaaacctacttcaactgtaaaagaggacaggtagacatgagagccaggattcgaggaaacaaaggctactaacagaagggcacctgcatatccgatatcacattttcattttgttgtttttgcgttctttttatcaatcctttgatttctaatagttggagcacaatatgaagggacatgcaacttagttacttgccatgtcaatgtcaagttaggcttgttcctatactatacttgatttcgtttcctccttaaagttgtattacatgtcaatgaaaagatgctattgaatgtcgtgttatttaaagaaagagtaagaatg

SEQ ID NO: 6211 - protein, 95 aa, Arabidopsis thaliana
LLEKPPSFGSSSTLIRFLLTVAVEMAKSCKGLAEELVKCLSESICVKGEKRSIRDCTGEKSPCIPSECVGLRETYFNCKRGQVDMRARIRGNKGY

SEQ ID NO: 6212 - protein, 71 aa, Arabidopsis thaliana
MAKSCKGLAEELVKCLSESICVKGEKRSIRDCTGEKSPCIPSECVGLRETYFNCKRGQVDMRARIRGNKGY

SEQ ID NO: 6213 - DNA, 961 bp, Arabidopsis thaliana
atatttcttcccatcgtcactagtcacgaccacacaaacaaaaaaaatataacatttagagagagagaaaggtacagcagtggcaaactcgtaaataaagaatgtcaaaagattgcggtaaccacggtggtggcaaagaagtagtcgtccggaaactctgcgccgccataatcgccttcatcgtaatagttctaatcaccatcttcctagtttgggtcatactcaggcccactaaaccaagattcgtcctccaagacgccaccgtctacgccttcaacctctcgcaaccaaacctccttacttcaaacttccaagtcacaatcgcatctcgtaaccctaactccaagatcggaatctactacgaccgtctccacgtctacgctacatacatgaaccagcagatcactctacgtacggcgattcctccgacgtatcaaggccacaaagaagtcaacgtttggtctcctttcgtctacgggactgcggttcccatcgcaccttacaactccgtcgctttgggagaggagaaagatcgtggatttgtagggttgatgatacgcgccgatgggaccgtgaggtggaaagtgaggactttgatcaccggaaaatatcatatccatgttcggtgtcaggcgttcatcaatcttggaaacaaagctgctggtgttcttgtcggtgataacgccgttaagtacacgttggctaataaatgcagtgtgaacgtttagaaagtttgacggcgttaagttgctttttttcttgaaattcaccaaacttctttccaccaacaggatactatttctgtttctacatatctttaagatttcactactttttggttgttattaagcttattgttgattatagaattattacaatcacgaaggtcagtggttggatttaactgtaaatccactttataaagttgaaataaaatggaggattgggttttggttctttt

SEQ ID NO: 6214 - protein, 208 aa, Arabidopsis thaliana
MSKDCGNHGGGKEVVVRKLCAAIIAFIVIVLITIFLVWVILRPTKPRFVLQDATVYAFNLSQPNLLTSNFQVTIASRNPNSKIGIYYDRLHVYATYMNQQITLRTAIPPTYQGHKEVNVWSPFVYGTAVPIAPYNSVALGEEKDRGFVGLMIRADGTVRWKVRTLITGKYHIHVRCQAFINLGNKAAGVLVGDNAVKYTLANKCSVNV

SEQ ID NO: 6215 - protein, 112 aa, Arabidopsis thaliana
MNQQITLRTAIPPTYQGHKEVNVWSPFVYGTAVPIAPYNSVALGEEKDRGFVGLMIRADGTVRWKVRTLITGKYHIHVRCQAFINLGNKAAGVLVGDNAVKYTLANKCSVNV

SEQ ID NO: 6216 - DNA, 730 bp, Arabidopsis thaliana
aaaaccctaaggtaaacctgagagaacaagccagagctaatctcttgtcggaaggaagaaggatcaaaaatgccgctctacgactgtatgcttctgttcaagcctataatcaggaaggagggcctcatcgacctcgttgcgcgcattggtaaacacgtttacagcagaaatggcgtcctcaccgagatcaaatcctttggcaaggtcgaattgggttacggtattagaaagctcgacggaagacactatcagggacaattgatgcagataacaatgatgacaactccaaacatgaacaaggagcttcactacctgaacaaggaagacaaactgctgcgctggctcttagttaaacaccgtgacatcaagattggacagtcggaaaaggaagatagtctgactgtgcctaacagactcactagtgggagcttatatgatggatcctcctcggacgaagatgacaacaacattttagggttatcacgatgaggaaatcaatttctttgaaatgtttactcagacaatttcttcatgggagtccccttcaatggttatgaatgtttttggttacatgaagtggtggtatgcgttttgcgtagacaatgaaataaattaattttatgtaataataatttttaggtaaattgaactaaatttcatgtgttttattgttttcgctattttcctagtggatattcaacgtcatcaattgggttgacaaccccgaatg

SEQ ID NO: 6217 - protein, 139 aa, Arabidopsis thaliana
MPLYDCMLLFKPIIRKEGLIDLVARIGKHVYSRNGVLTEIKSFGKVELGYGIRKLDGRHYQGQLMQITMMTTPNMNKELHYLNKEDKLLRWLLVKHRDIKIGQSEKEDSLTVPNRLTSGSLYDGSSSDEDDNNILGLSR

SEQ ID NO: 6218 - protein, 133 aa, Arabidopsis thaliana
MLLFKPIIRKEGLIDLVARIGKHVYSRNGVLTEIKSFGKVELGYGIRKLDGRHYQGQLMQITMMTTPNMNKELHYLNKEDKLLRWLLVKHRDIKIGQSEKEDSLTVPNRLTSGSLYDGSSSDEDDNNILGLSR

SEQ ID NO: 6219 - protein, 75 aa, Arabidopsis thaliana
MQITMMTTPNMNKELHYLNKEDKLLRWLLVKHRDIKIGQSEKEDSLTVPNRLTSGSLYDGSSSDEDDNNILGLSR

SEQ ID NO: 6220 - DNA, 1003 bp, Arabidopsis thaliana
attcgccgtaatctgaagaagacgaagcaaatccttccacaaagaatcatccatgggtcgtgttatcagagcacaacgtaagggagctggttccgtcttcaaatcccacactcaccaccgtaaagggccagcgaaattcagaagcctcgatttcggcgagagaaatggttatctgaaaggtgttgtgacggagatcattcacgatccaggacgtggtgctccgttggctcgtgtagctttccgtcatcctttccgattcaagaagcagaaggagcttttcgttgctgccgaaggtatgtacaccggtcagtttctgtactgtgggaagaaagctactctcgtcgtcggaaatgttcttcctctcagatctattcctgaaggagctgttatttgtaacgttgaacatcatgttggtgatcgtggtgttttcgctagagcttctggtgattacgccattgttatcgctcacaatcctgataacgacactagcaggattaagttgccatcgggttcgaagaagattgtgccaagtggatgcagggccatgattggtcaagttgcaggtggtggaagaacagagaagccgatgctcaaggctggtaacgcataccacaagtaccgtgtgaagagaaactgctggcctaaggttcgcggtgtggctatgaatccagttgagcatcctcacggaggaggtaaccatcaacatattggtcacgctagtactgttcgtcgtgatgcaccacctggaaaaaaggttggtcttattgctgcaaggaggactggtcgtctcagaggtcaagctgctgctcttgcttccaaggcagactaagtggagagggattcaggatgaaattgttcacttttttgggatttttgtttagatcttgtttcgaaactttgagatttattatgttctttgatacctttctctatcgggtagaatccatgtcttctgggttgaacattaacattattatgcattcatgttcctttggtttaactc

SEQ ID NO: 6221 - protein, 258 aa, Arabidopsis thaliana
MGRVIRAQRKGAGSVFKSHTHHRKGPAKFRSLDFGERNGYLKGVVTEIIHDPGRGAPLARVAFRHPFRFKKQKELFVAAEGMYTGQFLYCGKKATLVVGNVLPLRSIPEGAVICNVEHHVGDRGVFARASGDYAIVIAHNPDNDTSRIKLPSGSKKIVPSGCRAMIGQVAGGGRTEKPMLKAGNAYHKYRVKRNCWPKVRGVAMNPVEHPHGGGNHQHIGHASTVRRDAPPGKKVGLIAARRTGRLRGQAAALASKAD

SEQ ID NO: 6222 - protein, 177 aa, Arabidopsis thaliana
MYTGQFLYCGKKATLVVGNVLPLRSIPEGAVICNVEHHVGDRGVFARASGDYAIVIAHNPDNDTSRIKLPSGSKKIVPSGCRAMIGQVAGGGRTEKPMLKAGNAYHKYRVKRNCWPKVRGVAMNPVEHPHGGGNHQHIGHASTVRRDAPPGKKVGLIAARRTGRLRGQAAALASKAD

SEQ ID NO: 6223 - DNA, 1039 bp, Arabidopsis thaliana
actctctctcttttcctctttgcaaatccttgaagaaatccaaaatccatagcaatggcgacttcgatagctcgattgtctcggagaggagtcacttctaacctgatccgtcgttgcttcgctgcggaagcggcgttggcgaggaagacagagttacctaaaccgcaattcacggtgtcgccgtcgacggatcgtgtgaaatgggactacagaggccaacgacagatcattcctttgggacagtggcttccgaaggtagccgttgatgcttacgtggcacccaacgttgtgctggctggtcaggtcacagtctgggacggctcgtctgtttggaacggtgccgttttgcgcggcgatctcaacaaaatcactgttggattctgctcgaatgtacagggacggtgtgttgttcatgccgcctggtcttccccaacaggattaccagcagcgacaataatcgacaggtatgtgacagtaggtgcctacagtcttctgagatcatgtaccatcgaaccagagtgcatcatcggtcaacactcaatactaatggaaggctcactggttgagacccggtcaatcttggaagcgggttcagttgtgccgccaggaagaaggatcccatcaggtgaactatggggaggcaatccagcaagattcattagaaccctaaccaacgaagaaaccctagagatcccaaaactcgctgtagccatcaaccacttaagcggagattacttctctgagttcctaccttactcaactgtctacttagaggtagagaagttcaagaagtcccttgggatcgccgtttagaagcttcatctttttcgtgattcactttcatgtgtttatctatcatatgaggtctttctctctgcatattgcaataagtagctgatgaacatcaaaacaagtccggctctcttttttggttctaaaacgtttgtcatttcgttttttgggttctttgtaaaattccatttaaaactgattttggctgaatattgtctgaatgataatggcgacgacttctggtttt

SEQ ID NO: 6224 - protein, 252 aa, Arabidopsis thaliana
MATSIARLSRRGVTSNLIRRCFAAEAALARKTELPKPQFTVSPSTDRVKWDYRGQRQIIPLGQWLPKVAVDAYVAPNVVLAGQVTVWDGSSVWNGAVLRGDLNKITVGFCSNVQGRCVVHAAWSSPTGLPAATIIDRYVTVGAYSLLRSCTIEPECIIGQHSILMEGSLVETRSILEAGSVVPPGRRIPSGELWGGNPARFIRTLTNEETLEIPKLAVAINHLSGDYFSEFLPYSTVYLEVEKFKKSLGIAV

SEQ ID NO: 6225 - DNA, 861 bp, Arabidopsis thaliana
tgattctagggttttagagtttccgcacgaatcacgaatctctctctctttcacacacttcacactttcaatatacactctcattatgactaccgaagagaaagagatcctcgccgccaaattggaagaacagaagatcgatctcgataagcccgaagttgaggacgatgatgataacgaagacgatgactctgatgacgatgataaggatgatgacgaggctgatggactagatggagaggcaggaggtaagtcaaaacaaagcagaagtgagaagaagagtcgcaaagccatgctcaagcttggcatgaaacccatcactggtgttagccgagtcaccgtcaaaaagagcaagaatatcttgtttgtcatatcaaagcctgatgtgttcaagagtccagcatcagacacatatgtgatctttggagaggcgaagatcgaggatttgagctctcagatccagtcgcaagcagcagagcaattcaaggcaccagatctcagcaatgtgatctcaaagggtgagtcatcgagcgctgcagtggttcaggatgatgaggaggttgacgaggaaggtgttgagccaaaggacattgagttggtgatgactcaagcaggagtgtctaggccaaatgctgtgaaggctctcaaggctgcagatggagatattgtctctgccatcatggagcttaccacctaaaccaaagtcttttctacttagatgtggtttaacctgagttatgtgccagagattgtctaaagaattcggaaatttttggtttcaatgtttttcatgaagtgattttcgatgttgtatcagtataaacctcataagtttttgattttcagtttgattttatattg

SEQ ID NO: 6226 - protein, 231 aa, Arabidopsis thaliana
DSRVLEFPHESRISLSFTHFTLSIYTLIMTTEEKEILAAKLEEQKIDLDKPEVEDDDDNEDDDSDDDDKDDDEADGLDGEAGGKSKQSRSEKKSRKAMLKLGMKPITGVSRVTVKKSKNILFVISKPDVFKSPASDTYVIFGEAKIEDLSSQIQSQAAEQFKAPDLSNVISKGESSSAAVVQDDEEVDEEGVEPKDIELVMTQAGVSRPNAVKALKAADGDIVSAIMELTT

SEQ ID NO: 6227 - protein, 203 aa, Arabidopsis thaliana
MTTEEKEILAAKLEEQKIDLDKPEVEDDDDNEDDDSDDDDKDDDEADGLDGEAGGKSKQSRSEKKSRKAMLKLGMKPITGVSRVTVKKSKNILFVISKPDVFKSPASDTYVIFGEAKIEDLSSQIQSQAAEQFKAPDLSNVISKGESSSAAVVQDDEEVDEEGVEPKDIELVMTQAGVSRPNAVKALKAADGDIVSAIMELTT

SEQ ID NO: 6228 - protein, 134 aa, Arabidopsis thaliana
MLKLGMKPITGVSRVTVKKSKNILFVISKPDVFKSPASDTYVIFGEAKIEDLSSQIQSQAAEQFKAPDLSNVISKGESSSAAVVQDDEEVDEEGVEPKDIELVMTQAGVSRPNAVKALKAADGDIVSAIMELTT

SEQ ID NO: 6229 - DNA, 952 bp, Arabidopsis thaliana
atggataaccctcaagaagaagctgctgaagaagaaacctcatccttcgaacgttaagaggaagaagaataagagaaatcgattcgtggttttgggaaaattcaatggcggtttctactgtatcgtcgtttctattgccatctttcggcattccaagctcttcgccttcttctaccagactcaaagtctctctgctgccttcatcttctacccatggcggccttagttcctgcgtccttacgaaaccatccgtctcgcttacgaaggtcttcgctgttcccgataccctagatccaactccagaaattctcgatgaacccgcctctgaggttccgagctcttcatccatcagtgtagacgcggataagatggcgccaaagcaaaagattaggatcaagcttagatcatactgggtgcctcttattgaggactcatgcaagcagatacttgatgctgcgagaaacaccaatgcaaagacgatgggtcctgttccattgccaaccaagaagcgtatctactgtgttctcaagtctcctcacgttcacaaggatgctaggttccattttgaaatccggacacaccagcgcatgattgatattctctacccgactgctcaaactatcgattctttgatgcaacttgatcttcctgctggtgtcgatgtggaagtgaagctctgaagaagaagcgtaactacaatgatgtgatgggcacttttgcattgaatgaacagactgtttcagatcaactacattgcttagaactggtaagccttgtatcatcttttttgagaacctttgtaacgaaaatgtaagttgtattatctggtccttggaatctatctttagcgatgcttggttcttagttgatgaacatatccttaattaagcaagttcaaaggaatttgtttttgttttactaattgttatgcagtttgcctgtgtccattatg

SEQ ID NO: 6230 - protein, 191 aa, Arabidopsis thaliana
MAVSTVSSFLLPSFGIPSSSPSSTRLKVSLLPSSSTHGGLSSCVLTKPSVSLTKVFAVPDTLDPTPEILDEPASEVPSSSSISVDADKMAPKQKIRIKLRSYWVPLIEDSCKQILDAARNTNAKTMGPVPLPTKKRIYCVLKSPHVHKDARFHFEIRTHQRMIDILYPTAQTIDSLMQLDLPAGVDVEVKL

SEQ ID NO: 6231 - protein, 103 aa, Arabidopsis thaliana
MAPKQKIRIKLRSYWVPLIEDSCKQILDAARNTNAKTMGPVPLPTKKRIYCVLKSPHVHKDARFHFEIRTHQRMIDILYPTAQTIDSLMQLDLPAGVDVEVKL

SEQ ID NO: 6232 - DNA, 819 bp, Arabidopsis thaliana
gtctttttcaataacctctgcttcgccggaaaaacaaacagacgacgactattgagagctaaaatccgagattaagaatggcgaatcaaggagcgaagaaacgaaaggaagagaacgccaaacacatggctaagctccgtcgtatcatcatcgcttccaatgctgtgtatttcgttgtgaggatgttgattttctactcaagctttacttggaaacattggatcggtttagtgataacttcgctggcttacgcgtttccttataagcagcttgatcaaatggctaaacctagtgttactgatgatggtgagcttattgatggtggatttgacatgaccactggtggaatctgcggatatttgcacgatgtcatctatatcacttgctttgttcagctagcttccatcatcactgggaagttttggtacacgtatcttgtgattcctgcgtttggagtgtataaagcttctggtcttattcgaggattcatgtcacaaggttcagagggaggtgtggaagatgaaaagtctcgtaaaaagagagagaagatggagaggaaagcttcgagagggcaagtcgtcaagacgagaacaagatgaatgtgttgttatagaatacaacatgaatttggggatgagtatgttcttcaaaatatacaaatgtgttcaaaaggtaaactctctaagctttctgagtctcttttacatggacatgtctgcgtgtacaatatttactttgatggggaatagtcatcgagttgaacacagtcgattctctggagatagatgtttttttctttgaggtcgtaaccaatattat

SEQ ID NO: 6233 - protein, 173 aa, Arabidopsis thaliana
MANQGAKKRKEENAKHMAKLRRIIIASNAVYFVVRMLIFYSSFTWKHWIGLVITSLAYAFPYKQLDQMAKPSVTDDGELIDGGFDMTTGGICGYLHDVIYITCFVQLASIITGKFWYTYLVIPAFGVYKASGLIRGFMSQGSEGGVEDEKSRKKREKMERKASRGQVVKTRTR

SEQ ID NO: 6234 - protein, 157 aa, Arabidopsis thaliana
MAKLRRIIIASNAVYFVVRMLIFYSSFTWKHWIGLVITSLAYAFPYKQLDQMAKPSVTDDGELIDGGFDMTTGGICGYLHDVIYITCFVQLASIITGKFWYTYLVIPAFGVYKASGLIRGFMSQGSEGGVEDEKSRKKREKMERKASRGQVVKTRTR

SEQ ID NO: 6235 - protein, 138 aa, Arabidopsis thaliana
MLIFYSSFTWKHWIGLVITSLAYAFPYKQLDQMAKPSVTDDGELIDGGFDMTTGGICGYLHDVIYITCFVQLASIITGKFWYTYLVIPAFGVYKASGLIRGFMSQGSEGGVEDEKSRKKREKMERKASRGQVVKTRTR

SEQ ID NO: 6236 - DNA, 681 bp, Arabidopsis thaliana
tgacatgtaagagtttcacatatcacaacagagttgagtgagaaagaataagggattagaaaaagagagaatgggtaaggacaacaccagaatcctcatgcaattttcagctctcgcgatggttttaacagctgcaataatggtgaaagaagctacaagcattcccgtttgcaacattgacacaaacgacttggcgaaatgccgtccagccgtcactggaaacaaccctccaccaccgggaccggactgctgcgcagtggccagagttgctaatctacaatgcctctgcccgtacaagccttatctccccactgtcgggatagacccatctagagtcaggcctcttcttgccaattgtggtgtaaacagtccttcctgtttctaagcatgaagaactgagctgaagtcaggcccagtctcccacagactttgtcttgccctgaagtctctaagctataaatatgtcttttgctgttctgattcgcataaatatcaactttgcagtgatttttcagtcaccttatctattatatagatgaaccatgttctactattaatgaaatgaaataaagtacttgtttttttgctaactccattgtgtactactttcttgagtatttaaaaattgactccttatgtatcttccgtgcaaagaacccaaatcataatattaagagatgc

SEQ ID NO: 6237 - protein, 104 aa, Arabidopsis thaliana
MGKDNTRILMQFSALAMVLTAAIMVKEATSIPVCNIDTNDLAKCRPAVTGNNPPPPGPDCCAVARVANLQCLCPYKPYLPTVGIDPSRVRPLLANCGVNSPSCF

SEQ ID NO: 6238 - protein, 95 aa, Arabidopsis thaliana
MQFSALAMVLTAAIMVKEATSIPVCNIDTNDLAKCRPAVTGNNPPPPGPDCCAVARVANLQCLCPYKPYLPTVGIDPSRVRPLLANCGVNSPSCF

SEQ ID NO: 6239 - protein, 88 aa, Arabidopsis thaliana
MVLTAAIMVKEATSIPVCNIDTNDLAKCRPAVTGNNPPPPGPDCCAVARVANLQCLCPYKPYLPTVGIDPSRVRPLLANCGVNSPSCF

SEQ ID NO: 6240 - DNA, 741 bp, Arabidopsis thaliana
agagaatctgacgaagctcgaagggatttgagaaaaagaagagatgacgacgatacgtagattcagctgcaatgaccttctccgattcacttccgtgaatctggaccacctcactgaaacattcaatatgtccttctacatgacctatttagcgagatggcctgactattttcatgttgctgaaggtcccggcaatcgtgtcatgggttatattatgggtaaagttgaaggacagggtgaatcttggcatggtcatgtgacagccgtcactgtctctccagaataccgcaggcagcaacttgcaaagaaactgatgaaccttctggaagatataagtgataagattgataaagcctactttgtggatctttttgtaagagcttccaacacaccagccatcaagatgtatgaaaagcttggatacataatttataggcgggttttacgctattattcaggagaggaagatggattagatatgaggaaggcattatcaagaaatgtagagaaaaagtctgtgattcctctcaagagacctatcacacctgatgaattagagtatgattaagaccctaacttggttcacaattgttatctgcattaaaaatttctccaagagcctttagatgatgttactattcctgttgtttcgtatttgaactattatgtttcgttttcttccacacaaatttataattagttttgattaaactttaatctatatatacatttttggagggt

SEQ ID NO: 6241 - protein, 174 aa, Arabidopsis thaliana
MTTIRRFSCNDLLRFTSVNLDHLTETFNMSFYMTYLARWPDYFHVAEGPGNRVMGYIMGKVEGQGESWHGHVTAVTVSPEYRRQQLAKKLMNLLEDISDKIDKAYFVDLFVRASNTPAIKMYEKLGYIIYRRVLRYYSGEEDGLDMRKALSRNVEKKSVIPLKRPITPDELEYD

SEQ ID NO: 6242 - protein, 146 aa, Arabidopsis thaliana
MSFYMTYLARWPDYFHVAEGPGNRVMGYIMGKVEGQGESWHGHVTAVTVSPEYRRQQLAKKLMNLLEDISDKIDKAYFVDLFVRASNTPAIKMYEKLGYIIYRRVLRYYSGEEDGLDMRKALSRNVEKKSVIPLKRPITPDELEYD

SEQ ID NO: 6243 - protein, 142 aa, Arabidopsis thaliana
MTYLARWPDYFHVAEGPGNRVMGYIMGKVEGQGESWHGHVTAVTVSPEYRRQQLAKKLMNLLEDISDKIDKAYFVDLFVRASNTPAIKMYEKLGYIIYRRVLRYYSGEEDGLDMRKALSRNVEKKSVIPLKRPITPDELEYD

SEQ ID NO: 6244 - DNA, 2308 bp, Arabidopsis thaliana
acgaatcaaaaacaaaaagcttcgtacatttcgcctagctttcttcgttctagggtttcggatcttacttaattacccaaaacccttgaatccattactctgtgtgagcttaaatctcttaccttttatcactttcaatcgattgggtattaagttgtaaaggaaggaacttggaatcatgaagcttgggcttttcactctctcgtttcttctgatcttgaatctagcaatgggtagattcgttgttgagaagaacaatctcaaagttacatcacctgattcgatcaaaggtatttacgaatgtgccattggtaatttcggagttcctcaatacggtggtactttagtcggcaccgtcgtctatcctaaatccaatcagaaagcttgtaaaagctactccgatttcgatatctccttcaaatccaaacctggacgattaccaacttttgtccttatcgatcgtggagattgttacttcactttgaaagcatggatagctcaacaagctggagcagcagcgatacttgtagctgatagtaaagctgagccattgattacaatggatacacctgaagaagataaatctgatgcggattatcttcagaacattaccattccttctgctctcattactaaaacattgggagacagtataaagtctgctctttccggtggtgatatggttaacatgaagctagattggactgagtcggttccacatcctgatgagcgtgtagagtatgaactgtggactaatagcaatgacgagtgtgggaagaagtgtgatactcagattgagtttctcaagaattttaaaggagctgctcagattcttgagaaaggtgggcatactcagttcacgccacattatattacttggtactgtcctgaagcgtttacgttgagtaaacagtgtaagtctcagtgcatcaaccatggaaggtattgtgcgcctgatcctgagcaggattttacgaaagggtatgatggaaaggatgttgttgttcagaatctacgtcaggcttgtgtctacagagtgatgaatgataccggtaagccgtgggtctggtgggactatgtgactgactttgctatccggtgtccaatgaaggagaagaagtacaccaaggaatgcgcagatggaattattaagtcccttggcattgatctcaaaaaggtggacaagtgtatcggagaccctgaagcagatgtggagaacccagttcttaaagcagagcaggagtcacagataggcaaaggttcccgtggagacgtgactatactcccaactcttgtcgtgaacaacagacaatacagaggtaaattggaaaagggggcagtgcttaaggctatgtgttcgggttttcaagagtcaacggaaccagctatctgtcttactgaagatttggaaactaatgaatgtttggaaaacaacggtggatgctggcaagacaaagctgccaacattactgcatgcagggatacttttaggggaagattgtgtgagtgccctactgttcaaggtgttaaattcgttggtgacggttacactcactgcaaagcctctggagctttgcattgtggtatcaacaatggaggatgctggagagaatcccgaggtggcttcacttactctgcttgcgtagatgatcattcaaaggattgcaaatgcccacttgggttcaagggcgatggagtgaagaactgtgaagatgtggacgagtgcaaagaaaaaacggtgtgccagtgcccagagtgtaaatgtaaaaacacttggggaagttatgaatgcagctgcagcaacggtttgctttacatgcgtgagcacgacacttgcataggttcaggcaaagttggaaccacaaaactcagctggagctttttgtggatccttataatcggggtgggtgttgcaggtctttctggatatgcagtctacaaatacagaatcaggagttacatggatgcggaaattagagggatcatggcacagtacatgccattggaaagtcaaccacccaacacaagtggtcaccatatggatatatgagtgaagttatcaacacaagccaagagactctctctctttctatgagtagctttaagtttccatgtaaatgaatcaatggacttgatacaactctagagaaaagaaaaaagccacaaacagaaataagtgtacctgcactatttgtaagaaatgtggatttgcagatggaatctcctttttgtctgcatattactcttacaatgtaaaatagacataactggatgaataatgagtgttacattatttactgttgaaacc

SEQ ID NO: 6245 - protein, 623 aa, Arabidopsis thaliana
MKLGLFTLSFLLILNLAMGRFVVEKNNLKVTSPDSIKGIYECAIGNFGVPQYGGTLVGTVVYPKSNQKACKSYSDFDISFKSKPGRLPTFVLIDRGDCYFTLKAWIAQQAGAAAILVADSKAEPLITMDTPEEDKSDADYLQNITIPSALITKTLGDSIKSALSGGDMVNMKLDWTESVPHPDERVEYELWTNSNDECGKKCDTQIEFLKNFKGAAQILEKGGHTQFTPHYITWYCPEAFTLSKQCKSQCINHGRYCAPDPEQDFTKGYDGKDVVVQNLRQACVYRVMNDTGKPWVWWDYVTDFAIRCPMKEKKYTKECADGIIKSLGIDLKKVDKCIGDPEADVENPVLKAEQESQIGKGSRGDVTILPTLVVNNRQYRGKLEKGAVLKAMCSGFQESTEPAICLTEDLETNECLENNGGCWQDKAANITACRDTFRGRLCECPTVQGVKFVGDGYTHCKASGALHCGINNGGCWRESRGGFTYSACVDDHSKDCKCPLGFKGDGVKNCEDVDECKEKTVCQCPECKCKNTWGSYECSCSNGLLYMREHDTCIGSGKVGTTKLSWSFLWILIIGVGVAGLSGYAVYKYRIRSYMDAEIRGIMAQYMPLESQPPNTSGHHMDI

SEQ ID NO: 6246 - protein, 606 aa, Arabidopsis thaliana
MGRFVVEKNNLKVTSPDSIKGIYECAIGNFGVPQYGGTLVGTVVYPKSNQKACKSYSDFDISFKSKPGRLPTFVLIDRGDCYFTLKAWIAQQAGAAAILVADSKAEPLITMDTPEEDKSDADYLQNITIPSALITKTLGDSIKSALSGGDMVNMKLDWTESVPHPDERVEYELWTNSNDECGKKCDTQIEFLKNFKGAAQILEKGGHTQFTPHYITWYCPEAFTLSKQCKSQCINHGRYCAPDPEQDFTKGYDGKDVVVQNLRQACVYRVMNDTGKPWVWWDYVTDFAIRCPMKEKKYTKECADGIIKSLGIDLKKVDKCIGDPEADVENPVLKAEQESQIGKGSRGDVTILPTLVVNNRQYRGKLEKGAVLKAMCSGFQESTEPAICLTEDLETNECLENNGGCWQDKAANITACRDTFRGRLCECPTVQGVKFVGDGYTHCKASGALHCGINNGGCWRESRGGFTYSACVDDHSKDCKCPLGFKGDGVKNCEDVDECKEKTVCQCPECKCKNTWGSYECSCSNGLLYMREHDTCIGSGKVGTTKLSWSFLWILIIGVGVAGLSGYAVYKYRIRSYMDAEIRGIMAQYMPLESQPPNTSGHHMDI

SEQ ID NO: 6247 - protein, 496 aa, Arabidopsis thaliana
MDTPEEDKSDADYLQNITIPSALITKTLGDSIKSALSGGDMVNMKLDWTESVPHPDERVEYELWTNSNDECGKKCDTQIEFLKNFKGAAQILEKGGHTQFTPHYITWYCPEAFTLSKQCKSQCINHGRYCAPDPEQDFTKGYDGKDVVVQNLRQACVYRVMNDTGKPWVWWDYVTDFAIRCPMKEKKYTKECADGIIKSLGIDLKKVDKCIGDPEADVENPVLKAEQESQIGKGSRGDVTILPTLVVNNRQYRGKLEKGAVLKAMCSGFQESTEPAICLTEDLETNECLENNGGCWQDKAANITACRDTFRGRLCECPTVQGVKFVGDGYTHCKASGALHCGINNGGCWRESRGGFTYSACVDDHSKDCKCPLGFKGDGVKNCEDVDECKEKTVCQCPECKCKNTWGSYECSCSNGLLYMREHDTCIGSGKVGTTKLSWSFLWILIIGVGVAGLSGYAVYKYRIRSYMDAEIRGIMAQYMPLESQPPNTSGHHMDI

SEQ ID NO: 6248 - DNA, 569 bp, Arabidopsis thaliana
attattcgaggactaaagaaagccaaagaaaacatgaaaataatagtctccatcttagtgttagcctctcttcttctaatcagttcatctcttgcttcggctactatatcagatgcttttggtagtggcgcggtagctccggcaccgcagagcaaagatggaccggcgttagagaaatggtgtggacagaaatgtgaagggagatgcaaagaagcggggatgaaagatcggtgtttgaagtattgtgggatatgttgcaaagactgtcagtgtgttccttcaggcacttatgggaataagcatgaatgtgcttgctatcgtgacaagctcagtagcaaaggcactcctaaatgtccttgattctatttctttccaaccaaaaatttaaataaatgaataagagagatccagtaaactaatataaaactataaatggatcttttgtttatgattttttttttttcatttctatttttacgaatttgtcttggtctttttgaagtaagtttttaaatattgaaaagtgctaaaattatgtggaaatcgataatgttaatgaatgatataat

SEQ ID NO: 6249 - protein, 119 aa, Arabidopsis thaliana
IIRGLKKAKENMKIIVSILVLASLLLISSSLASATISDAFGSGAVAPAPQSKDGPALEKWCGQKCEGRCKEAGMKDRCLKYCGICCKDCQCVPSGTYGNKHECACYRDKLSSKGTPKCP

SEQ ID NO: 6250 - protein, 108 aa, Arabidopsis thaliana
MKIIVSILVLASLLLISSSLASATISDAFGSGAVAPAPQSKDGPALEKWCGQKCEGRCKEAGMKDRCLKYCGICCKDCQCVPSGTYGNKHECACYRDKLSSKGTPKCP

SEQ ID NO: 6251 - DNA, 925 bp, Arabidopsis thaliana
catcgctgtctggaacagcgatgaccgagaaaggcaatggagtcggctaaatcaatcatcggtggccaccaaaatgtcatcctgatgcgtcatggtgatcgactcgacaatttcgagccactctggacttcaacagctgcgagaccgtgggatccaccgcttgctcaagacggtaaggatcgggcctttagaactggtcagagaatccggtctcaacttggggttccgattcaccgtgtcttcgtctcccctttcctccgctgcatccagaccgcttccgaagtcgttgccgccctctcagccgtcgatttcgatcccattgctatgtcatctaaagacgtgctttccatcgacaatactaagatcaaggtggctattgaatttggattgtccgagataccgcacccaatctttattaagagtgaagttgctcccaaagatgggaaatttgatttcaagatttcagatcttgaagctatgtttcctgaaggaacagtggattctaatgtggatatggtttataaagaggtgccagaatggggagaatctgcacaagcctttgaggatcgatattataagacagtgaagattcttgcggagaagtatccttctgagaacttgctcttagtcactcattggggagcagtaagtgttgcattttacaactacttcaaagacgcaactaagtacgtggtagattattgtggtagtgttgaaatgagaaggcagattttgaatggtgatgggtttggtaaatttgaggtagttactagtcatggagtatcttataagtacaccaaaatcccagtccatgatcatgtagttgtaagccgccaatctcccctttaaccggtttatatgtgaatatctggtttaacgggttgcttcaataaaaaaaaatatataagaataatggttcagttag

SEQ ID NO: 6252 - protein, 270 aa, Arabidopsis thaliana
MESAKSIIGGHQNVILMRHGDRLDNFEPLWTSTAARPWDPPLAQDGKDRAFRTGQRIRSQLGVPIHRVFVSPFLRCIQTASEVVAALSAVDFDPIAMSSKDVLSIDNTKIKVAIEFGLSEIPHPIFIKSEVAPKDGKFDFKISDLEAMFPEGTVDSNVDMVYKEVPEWGESAQAFEDRYYKTVKILAEKYPSENLLLVTHWGAVSVAFYNYFKDATKYVVDYCGSVEMRRQILNGDGFGKFEVVTSHGVSYKYTKIPVHDHVVVSRQSPL

SEQ ID NO: 6253 - protein, 254 aa, Arabidopsis thaliana
MRHGDRLDNFEPLWTSTAARPWDPPLAQDGKDRAFRTGQRIRSQLGVPIHRVFVSPFLRCIQTASEVVAALSAVDFDPIAMSSKDVLSIDNTKIKVAIEFGLSEIPHPIFIKSEVAPKDGKFDFKISDLEAMFPEGTVDSNVDMVYKEVPEWGESAQAFEDRYYKTVKILAEKYPSENLLLVTHWGAVSVAFYNYFKDATKYVVDYCGSVEMRRQILNGDGFGKFEVVTSHGVSYKYTKIPVHDHVVVSRQSPL

SEQ ID NO: 6254 - protein, 174 aa, Arabidopsis thaliana
MSSKDVLSIDNTKIKVAIEFGLSEIPHPIFIKSEVAPKDGKFDFKISDLEAMFPEGTVDSNVDMVYKEVPEWGESAQAFEDRYYKTVKILAEKYPSENLLLVTHWGAVSVAFYNYFKDATKYVVDYCGSVEMRRQILNGDGFGKFEVVTSHGVSYKYTKIPVHDHVVVSRQSPL

SEQ ID NO: 6255 - DNA, 800 bp, Arabidopsis thaliana
atttttgttgacatcaaaccggaccattggtgaaaacccccaaatcgaattccagaatcatcgtctccatcgtaatcgactcaaatcaggcaacggttacctccgcgtcgaatttcagcgaccacccatttctgggaagggaaaaagctgcgcaatttgtggatttctttctcagaaaatgtcgttagggcaaaagagttcgacggatcctggtgcgatgctcacttctcttctgaacaagcgagagaagcttcgccaagagttacgaagcatcgagaaacaggtttatgaattggagacaagctatcttcaagaatcgagtcatattggaaatgctttgaaaggctttgaagggtttttgtcttcctccaagagtactgctagtgctaaaaggtcaaggaagtttcagcctgaagacagagtcttctcattgtcctcagttacatcaccagctgctgaagaacttggtgttggaagagaagatggacgagctgaattagggccagggcgatccaagggtggtttgtcgacacagggaaagccgaagaaagggagaggacaatcaataatagcaagagaggcaaagagaagcagaccatctacagaaccagattatgaagatgaagatgatcctgatatgaatatgtatggccatggttcactcatctaaggcattttctgttttggtgccagaaacagtaagaaaacaaataattttgtaaccttttttgtgcatcctagaacaaaactgaatctatctaagtaatctaggaattaatctgccagctttatatcatccg

SEQ ID NO: 6256 - protein, 222 aa, Arabidopsis thaliana
FLLTSNRTIGENPQIEFQNHRLHRNRLKSGNGYLRVEFQRPPISGKGKSCAICGFLSQKMSLGQKSSTDPGAMLTSLLNKREKLRQELRSIEKQVYELETSYLQESSHIGNALKGFEGFLSSSKSTASAKRSRKFQPEDRVFSLSSVTSPAAEELGVGREDGRAELGPGRSKGGLSTQGKPKKGRGQSIIAREAKRSRPSTEPDYEDEDDPDMNMYGHGSLI

SEQ ID NO: 6257 - protein, 163 aa, Arabidopsis thaliana
MSLGQKSSTDPGAMLTSLLNKREKLRQELRSIEKQVYELETSYLQESSHIGNALKGFEGFLSSSKSTASAKRSRKFQPEDRVFSLSSVTSPAAEELGVGREDGRAELGPGRSKGGLSTQGKPKKGRGQSIIAREAKRSRPSTEPDYEDEDDPDMNMYGHGSLI

SEQ ID NO: 6258 - protein, 150 aa, Arabidopsis thaliana
MLTSLLNKREKLRQELRSIEKQVYELETSYLQESSHIGNALKGFEGFLSSSKSTASAKRSRKFQPEDRVFSLSSVTSPAAEELGVGREDGRAELGPGRSKGGLSTQGKPKKGRGQSIIAREAKRSRPSTEPDYEDEDDPDMNMYGHGSLI

SEQ ID NO: 6259 - DNA, 1328 bp, Arabidopsis thaliana
atggttgtcgccaatgatctctcgtccaagattctccccagagttctcatcgtctctcgtcggactctccgcaagaacaagtacgtggacttcgtaggagaataccatctcgatctcatcgtctcctccggtgccgtccctgtcattgtcccacgtgtcaatgggatccattctatgctccagagcttcgagcctattcatggtgtcctcctctgcgaaggagaagatgtcgatccttctctctacgcggacgatgaattatcagacctctcgccagaagacatggaggagattaagaaggcgcatgcagaggacatgaccatcgaccgagagaaagacagcattgagctgactctagctagactctgtctcgaaagaaacattcctttcttaggcatttgtcgtggctctcagattctcaacgttgccgcaggtggaactctttaccaagacatcgacaaagaactcggaactacgatgacaacgacaaatcatatagattatgacaactacgatgggcacagacacgaggctagaatcgtggaggagactccgttacataagttgttcgaggagatggagataatggtgaactcgtatcaccatcaaggtgtgaagagactggctcaacgttttgtgccgatggcttatgctcctgatggtttgattgaaggattttatgatccgaatcgatatgatccaaaggaaggtcagttcttgatgggtctgcagtttcatccagagaggatgaggcttccaggctctgatgagtttgattatccaggctgcgctttagtttatcaggagtttgtaaaagctgtgatcgcatttcagaagaaacaagtaaacgcaacacaggttgagatgaagaggaagaccaccacactcgtcaaaagcttctcccaagctgagtttctagaggctaatacagttctaagcaagcaacaagagaataggctgaagcagatgggagcgacggtgaggaactcatgtgtgtatatgaaaaggatgaaaatgaaagaggaacaagagagagcaatggacaaactttcggcggagcggctgtctgatatgctttccttccaccatatgatggctcgtctttgctccaatgccatcaagagaaaactactagaacccgaacacacagataggaccatagagtcctccttttttctcaactattagcctttattgcaaaaacagttttacacacaataagaaaactagcattctgtgaatttacagaagctaccaaatgaaaaacttttgacagtatcctatatgtaaggtttcctcaagacagtaatcataaagagttccttttt

SEQ ID NO: 6260 - protein, 395 aa, Arabidopsis thaliana
MVVANDLSSKILPRVLIVSRRTLRKNKYVDFVGEYHLDLIVSSGAVPVIVPRVNGIHSMLQSFEPIHGVLLCEGEDVDPSLYADDELSDLSPEDMEEIKKAHAEDMTIDREKDSIELTLARLCLERNIPFLGICRGSQILNVAAGGTLYQDIDKELGTTMTTTNHIDYDNYDGHRHEARIVEETPLHKLFEEMEIMVNSYHHQGVKRLAQRFVPMAYAPDGLIEGFYDPNRYDPKEGQFLMGLQFHPERMRLPGSDEFDYPGCALVYQEFVKAVIAFQKKQVNATQVEMKRKTTTLVKSFSQAEFLEANTVLSKQQENRLKQMGATVRNSCVYMKRMKMKEEQERAMDKLSAERLSDMLSFHHMMARLCSNAIKRKLLEPEHTDRTIESSFFLNY

SEQ ID NO: 6261 - protein, 337 aa, Arabidopsis thaliana
MLQSFEPIHGVLLCEGEDVDPSLYADDELSDLSPEDMEEIKKAHAEDMTIDREKDSIELTLARLCLERNIPFLGICRGSQILNVAAGGTLYQDIDKELGTTMTTTNHIDYDNYDGHRHEARIVEETPLHKLFEEMEIMVNSYHHQGVKRLAQRFVPMAYAPDGLIEGFYDPNRYDPKEGQFLMGLQFHPERMRLPGSDEFDYPGCALVYQEFVKAVIAFQKKQVNATQVEMKRKTTTLVKSFSQAEFLEANTVLSKQQENRLKQMGATVRNSCVYMKRMKMKEEQERAMDKLSAERLSDMLSFHHMMARLCSNAIKRKLLEPEHTDRTIESSFFLNY

SEQ ID NO: 6262 - protein, 301 aa, Arabidopsis thaliana
MEEIKKAHAEDMTIDREKDSIELTLARLCLERNIPFLGICRGSQILNVAAGGTLYQDIDKELGTTMTTTNHIDYDNYDGHRHEARIVEETPLHKLFEEMEIMVNSYHHQGVKRLAQRFVPMAYAPDGLIEGFYDPNRYDPKEGQFLMGLQFHPERMRLPGSDEFDYPGCALVYQEFVKAVIAFQKKQVNATQVEMKRKTTTLVKSFSQAEFLEANTVLSKQQENRLKQMGATVRNSCVYMKRMKMKEEQERAMDKLSAERLSDMLSFHHMMARLCSNAIKRKLLEPEHTDRTIESSFFLNY

SEQ ID NO: 6263 - DNA, 924 bp, Arabidopsis thaliana
acaccaaaagctacacaatggctaaaacctctcttcctctcgccgcctccttcctcctcctcatctccttctcctccgccgtagacacttcccgtctcttcctcaccgtcgtcaacaactgtcccttcactgtctggccagccattcaacccaacgccggccaccccgtcctagagaaaggtggcttcgctctcccaactttcactcaccgctccttcaacgttccaaccacacactggtccggtcgcatctgggccagaacctggtgtgcccactacaacggaaaattctcctgcctcaccggagactgcggaaaccgcctggaatgcaacggtctcggcggggcaccaccagcttctctagctcagttcgacctccaccacggtggtcaccacgacttctcctcttacggtgtctctctcgttgacggttacaatgttccgatgaccgtgactcctcacgaaggccatggtgtctgtcctgtcgttggttgtcgtgaagatctaataaaaacgtgtccggctcatcttcaggtccggtcacacagtggacacgtggtggcttgtaagagtgggtgtgaggctttccatacagacgagctgtgttgtcgtggtcattacaatagccctaacacgtgtaaagcttcgagccattcgctgttctttaagcatgcgtgtccttcgagtttcacttttgctcatgatagtccttcgcttatgcatgactgtgcttctcctagagagctcaaagtcatcttctgccactaatgtttcggccatgttctagggttattgtcgtaacatcggactgatcttctaatgcttttgtttggttagtctgattttgattggtttagtatgcgatttcccggttcagttatgtagtccaactatgaaattatgtattatcttgaaattgctctcg

SEQ ID NO: 6264 - protein, 254 aa, Arabidopsis thaliana
TKSYTMAKTSLPLAASFLLLISFSSAVDTSRLFLTVVNNCPFTVWPAIQPNAGHPVLEKGGFALPTFTHRSFNVPTTHWSGRIWARTWCAHYNGKFSCLTGDCGNRLECNGLGGAPPASLAQFDLHHGGHHDFSSYGVSLVDGYNVPMTVTPHEGHGVCPVVGCREDLIKTCPAHLQVRSHSGHVVACKSGCEAFHTDELCCRGHYNSPNTCKASSHSLFFKHACPSSFTFAHDSPSLMHDCASPRELKVIFCH

SEQ ID NO: 6265 - protein, 249 aa, Arabidopsis thaliana
MAKTSLPLAASFLLLISFSSAVDTSRLFLTVVNNCPFTVWPAIQPNAGHPVLEKGGFALPTFTHRSFNVPTTHWSGRIWARTWCAHYNGKFSCLTGDCGNRLECNGLGGAPPASLAQFDLHHGGHHDFSSYGVSLVDGYNVPMTVTPHEGHGVCPVVGCREDLIKTCPAHLQVRSHSGHVVACKSGCEAFHTDELCCRGHYNSPNTCKASSHSLFFKHACPSSFTFAHDSPSLMHDCASPRELKVIFCH

SEQ ID NO: 6266 - DNA, 689 bp, Arabidopsis thaliana
atagtttttttatacatctttaatgactatataaaccaaacactgatctttttcaggttgcgaataaaccaagaatggctttaacccatcacatcatcttcgtggcacttcttgtcatctccgtcaaagccatctcaccggcggcgaaactgaaacccaaacaaatcgtttccacttctcctccacctcctccaacaatctctgcagcagctaaagctttcaccgatgcgcacaacaaggccagagccatggttggtgttccaccactagtttggagccagacgttggaagctgctgcgagtcggttggctcgttaccagaggaaccaaaagaagtgtgagttcgcgagtctaaaccctggaaaatacggcgcgaaccagctttgggctaagggcttagtagccgtgacaccgtctcttgctgtggagacttgggtgaaggagaaacctttctacaattataagtcagacacgtgtgctgcgaaccacacgtgcggggtttataaacaagtcgtctggagaaactctaaagagctcgggtgtgctcaagccacgtgtacgaaagagtcaacggtgttgaccatttgtttttacaatcctcctggaaatgtaattggccaaaagccttactagcaaattgggattcatcatcaaaagctttaaataaagagagaattatatggttttttt

SEQ ID NO: 6267 - protein, 185 aa, Arabidopsis thaliana
MALTHHIIFVALLVISVKAISPAAKLKPKQIVSTSPPPPPTISAAAKAFTDAHNKARAMVGVPPLVWSQTLEAAASRLARYQRNQKKCEFASLNPGKYGANQLWAKGLVAVTPSLAVETWVKEKPFYNYKSDTCAANHTCGVYKQVVWRNSKELGCAQATCTKESTVLTICFYNPPGNVIGQKPY

SEQ ID NO: 6268 - protein, 127 aa, Arabidopsis thaliana
MVGVPPLVWSQTLEAAASRLARYQRNQKKCEFASLNPGKYGANQLWAKGLVAVTPSLAVETWVKEKPFYNYKSDTCAANHTCGVYKQVVWRNSKELGCAQATCTKESTVLTICFYNPPGNVIGQKPY

SEQ ID NO: 6269 - DNA, 577 bp, Arabidopsis thaliana
ttcccaaaccatcactccttttgcattgtgtgaaaccttcgagttttctcttcatcttctcaaagtaacaaactttctccaaacagattattattaaaacaatctcatcaagaactacgatgaaattcccggctgtaaaagttcttattatctctcttctcatcacatcttctttgttcatactctcaaccgcggattcgtcaccatgcggaggaaaatgcaacgtgagatgttcaaaggcaggaagacaagataggtgtctcaagtattgtaatatatgttgcgagaagtgtaactattgtgttccttcaggcacttatggaaacaaagatgaatgcccttgttaccgcgatatgaagaactccaaaggcacgtccaaatgtccttgatcatgttcttaagattatccttatagacacaatatcttgaaatgttaagattgtgcttgatgcctaaaataatgagcttgagatacttctatgaatgaatatgtgaaagattttgacaataaaatgatttgatgtattaaaatattcttagtgaagttatatatgtataaatgaagtatgaaatatac

SEQ ID NO: 6270 - protein, 89 aa, Arabidopsis thaliana
MKFPAVKVLIISLLITSSLFILSTADSSPCGGKCNVRCSKAGRQDRCLKYCNICCEKCNYCVPSGTYGNKDECPCYRDMKNSKGTSKCP

SEQ ID NO: 6271 - DNA, 1559 bp, Arabidopsis thaliana
gattgaatcttcatcattctcgatcagtggttgttacctgagaaaccctagatttcaattcccaacaccttaattttgttcgacaaacccaagaagattcgatgggtaagaacgattttctaaccccaaaggcgattgcgaatcgaattaaagccaaaggacttcaaaagcttcgatggtattgtcagatgtgtcagaaacaatgccgagacgagaatggattcaagtgtcattgtatgagcgaatctcaccagaggcagatgcaagtttttgggcagaatccgactcgtgttgtcgatggttactctgaagaattcgagcagacgtttctcgatctgatgaggcggagccaccgtttctctcgtatcgctgccactgttgtctacaatgagtatattaacgatagacatcatgttcacatgaattcgacggagtgggcgacgttgacggagtttatcaagcatcttgggaaaactggtaagtgtaaggttgaagaaactcctaaaggttggtttattacttatatagatagagattctgagactttgtttaaggagaggttgaagaataagagagttaagagtgatttagctgaggaggagaagcaagagagggagattcagagacagattgagagagctgctgagaaattgaatggtggtggtggtgaaggtgaaaccagtggtaatgatgaagttgtggatgatggtgatgatgagaggaagaaagatgaagacttgaggttgaagagtggggtcaaggttggatttgctcttggtggaggtgttaaacaggttgctacgggtaaagagagaggggaaagctcgaaacttttgtttggggatgaagagaatgacaaggttgagagaggggagaagaggaagagaagtggggactccgggaggagcgagaaggagaggagatcagctttggatgagttgatgaaggaggaagagaagaagaaggagaggatgaatcggaaagattactggttgttcgaagggatcattgtgaaggtgatgagtaaggctttggcagagaaagggtattataagcaaaaaggtgttgtgaagaaagtgattgataattatgttggggagatcaaaatgcttgattctaaacatgtgttgagagttgatcaaaaggagctagagactgtgcttccacaaattggagggatggtgaagatagtgaatggggcatatcgtggttcgaatgcaaggttgttgggtgtggatacagagaagttctgtgctaaagtgcagatcgagaaaggtgtctatgatggaagagtcatcaagtccattgagtacgaggacatatgcaaacttgcttagttatatcttttagaccatatcgggttttacgatgccttgtatttctgcttgaacctcttttttttatatacaagtgaagcactctgtttcctgatagctagccgcgttaaaaaggtactgcagatgaatctatttcacacatgttattcgatctggtttgtagaacgaattgttttatgtatggctactgtgtagtatcttcgagaaatcttatgatgtttt

SEQ ID NO: 6272 - protein, 411 aa, Arabidopsis thaliana
MGKNDFLTPKAIANRIKAKGLQKLRWYCQMCQKQCRDENGFKCHCMSESHQRQMQVFGQNPTRVVDGYSEEFEQTFLDLMRRSHRFSRIAATVVYNEYINDRHHVHMNSTEWATLTEFIKHLGKTGKCKVEETPKGWFITYIDRDSETLFKERLKNKRVKSDLAEEEKQEREIQRQIERAAEKLNGGGGEGETSGNDEVVDDGDDERKKDEDLRLKSGVKVGFALGGGVKQVATGKERGESSKLLFGDEENDKVERGEKRKRSGDSGRSEKERRSALDELMKEEEKKKERMNRKDYWLFEGIIVKVMSKALAEKGYYKQKGVVKKVIDNYVGEIKMLDSKHVLRVDQKELETVLPQIGGMVKIVNGAYRGSNARLLGVDTEKFCAKVQIEKGVYDGRVIKSIEYEDICKLA

SEQ ID NO: 6273 - protein, 382 aa, Arabidopsis thaliana
MCQKQCRDENGFKCHCMSESHQRQMQVFGQNPTRVVDGYSEEFEQTFLDLMRRSHRFSRIAATVVYNEYINDRHHVHMNSTEWATLTEFIKHLGKTGKCKVEETPKGWFITYIDRDSETLFKERLKNKRVKSDLAEEEKQEREIQRQIERAAEKLNGGGGEGETSGNDEVVDDGDDERKKDEDLRLKSGVKVGFALGGGVKQVATGKERGESSKLLFGDEENDKVERGEKRKRSGDSGRSEKERRSALDELMKEEEKKKERMNRKDYWLFEGIIVKVMSKALAEKGYYKQKGVVKKVIDNYVGEIKMLDSKHVLRVDQKELETVLPQIGGMVKIVNGAYRGSNARLLGVDTEKFCAKVQIEKGVYDGRVIKSIEYEDICKLA

SEQ ID NO: 6274 - protein, 366 aa, Arabidopsis thaliana
MSESHQRQMQVFGQNPTRVVDGYSEEFEQTFLDLMRRSHRFSRIAATVVYNEYINDRHHVHMNSTEWATLTEFIKHLGKTGKCKVEETPKGWFITYIDRDSETLFKERLKNKRVKSDLAEEEKQEREIQRQIERAAEKLNGGGGEGETSGNDEVVDDGDDERKKDEDLRLKSGVKVGFALGGGVKQVATGKERGESSKLLFGDEENDKVERGEKRKRSGDSGRSEKERRSALDELMKEEEKKKERMNRKDYWLFEGIIVKVMSKALAEKGYYKQKGVVKKVIDNYVGEIKMLDSKHVLRVDQKELETVLPQIGGMVKIVNGAYRGSNARLLGVDTEKFCAKVQIEKGVYDGRVIKSIEYEDICKLA

SEQ ID NO: 6275 - DNA, 2393 bp, Arabidopsis thaliana
catcgctgtctggaacagcgatgactcgagaaccggcagaagtatgaagaagactaagacttaccaagtcttctgtattgctgcactctctgtcctaactctgcagcttatcaatggttcatcagcagcaacacctccacctccaaatagtaattcttcaacttcttgtaacagagcctgtggaggagtctcaattccgttcccgttcggaatcgggaaggattgttatctcaatggctggtatgaggttatctgcaacacttccacttccgggtcgtctggcacaacggttccgttcctctcacggatcaatagcgaagtggtgaacatctctcttccagatggtaagaaactatatggagtagttcacatcaaaggtccagtgacatcgttgggttgctctagtagtagtagtagcagtcaagtatccgaaatgtcattgccgaatttgaacgtcacaggcaggggaagtccatatttcctcactgatgagaactgcctcgtgatggttggttgtggtacaaaggctttgatgaaggatatagaatcagagatcttgggttgtgaatcgagctgtgaagatagcaagagtagtgaagaagtaacaaactcgaaatgtgacggttacaaatgctgccaggcgagaataccgttggagcgtcctcaggttattggtatcaatatagaaaacactagtgccacaagagggaaagaagggtgtagtgttgcgttcttgactaacaaaaggtatgcgccgatgaatgttaccgagccagaacaattccatgctggtggctacgcagtggttgagctaggttggtactttgatacatcggattcacgctataggaaccccttaggttgtagaaacatgacgcggtacagttcttacagctcctttgataaatgtagttgtgagtatgattacttttctgggatgagttataggatttgctattgcaactatggctacacagggaacccataccttcgacatggctgcatagacatagacgaatgtgaaggacaccacaattgtggagaagggacttgtgtgaacatgcctggaacacatagctgcgagcccaagataacgaaaccggaaaaagcctctgtgcttcaaggtgttcttataagtctaggagtgctgcttttcgtccttggaatcttggggttgtacaaattcattaagaagcgaacgaggatcatccgcaacaaaaactttttcaaacgtaatggtggcttgctgttgaaacaacaactaattacaaagaacggaaatgttgatatgtcaaggatatttagctcaaaagagttgaagaaagctactgataacttcagcatgaacagggtgcttgggcaagggggtcaaggaactgtgtacaagggaatgttggcggaagggagaatcgttgcggttaaaagatcgaaagttgtgggtgaaggcaagatggaagagttcatcaatgaagtcgtacttctctcacaaattaaccataggaacattgtgaaactcttgggatgttgtctagagactgaagttcctgtcttggtttacgaatatattcctaatggagatctgttcaagcgtcttcatgaaaaatctgaatccaatgattacacgatgacttgggaagtacgtcttcgtatagctatagagatagcgggagctctttcatacatgcactcagctgcatcgattccaatataccacagagatatcaagactaccaatatactattagatgaaaaatatagagccaaagtatctgatttcggaacttcaagatccataaccattgctcaaactcatctaacaacgttagttgcaggcacttttgggtatatggatccggagtactttttatcaagccaatatactgacaagagcgatgtttacagtttcggggtggtcttggtggagctcataaccggagaaaaaccactgtcaaggaagaggattggcaactgatttccttgaggccatgaaagagaacagagtgattgacacaattgatattcggatcaaaggagaaagcaagctgtgccaagtgatggcagtcgcaaaactcgctcgaaagtgtcttagcaggaaagggagaaagcggccaaacatgagagaggtttcatttgagctggagaggatccgttcttcatcacctgaagatttagaggtccatgttagaaatgttgatgcagaggaacaaatcatggaaatcaacagagaacgattttgagggtatgtacatgagtgacaagatccattctttatgttaaactagaagttgcccacaaatatgcctttaattgctttcaaaatacgaattaaatacgatgataacttgtagttaaagtctcaacttgatatgtttatagataataaaattttagtg

SEQ ID NO: 6276 - protein, 656 aa, Arabidopsis thaliana
IAVWNSDDSRTGRSMKKTKTYQVFCIAALSVLTLQLINGSSAATPPPPNSNSSTSCNRACGGVSIPFPFGIGKDCYLNGWYEVICNTSTSGSSGTTVPFLSRINSEVVNISLPDGKKLYGVVHIKGPVTSLGCSSSSSSSQVSEMSLPNLNVTGRGSPYFLTDENCLVMVGCGTKALMKDIESEILGCESSCEDSKSSEEVTNSKCDGYKCCQARIPLERPQVIGINIENTSATRGKEGCSVAFLTNKRYAPMNVTEPEQFHAGGYAVVELGWYFDTSDSRYRNPLGCRNMTRYSSYSSFDKCSCEYDYFSGMSYRICYCNYGYTGNPYLRHGCIDIDECEGHHNCGEGTCVNMPGTHSCEPKITKPEKASVLQGVLISLGVLLFVLGILGLYKFIKKRTRIIRNKNFFKRNGGLLLKQQLITKNGNVDMSRIFSSKELKKATDNFSMNRVLGQGGQGTVYKGMLAEGRIVAVKRSKVVGEGKMEEFINEVVLLSQINHRNIVKLLGCCLETEVPVLVYEYIPNGDLFKRLHEKSESNDYTMTWEVRLRIAIEIAGALSYMHSAASIPIYHRDIKTTNILLDEKYRAKVSDFGTSRSITIAQTHLTTLVAGTFGYMDPEYFLSSQYTDKSDVYSFGVVLVELITGEKPLSRKRIGN

SEQ ID NO: 6277 - protein, 642 aa, Arabidopsis thaliana
MKKTKTYQVFCIAALSVLTLQLINGSSAATPPPPNSNSSTSCNRACGGVSIPFPFGIGKDCYLNGWYEVICNTSTSGSSGTTVPFLSRINSEVVNISLPDGKKLYGVVHIKGPVTSLGCSSSSSSSQVSEMSLPNLNVTGRGSPYFLTDENCLVMVGCGTKALMKDIESEILGCESSCEDSKSSEEVTNSKCDGYKCCQARIPLERPQVIGINIENTSATRGKEGCSVAFLTNKRYAPMNVTEPEQFHAGGYAVVELGWYFDTSDSRYRNPLGCRNMTRYSSYSSFDKCSCEYDYFSGMSYRICYCNYGYTGNPYLRHGCIDIDECEGHHNCGEGTCVNMPGTHSCEPKITKPEKASVLQGVLISLGVLLFVLGILGLYKFIKKRTRIIRNKNFFKRNGGLLLKQQLITKNGNVDMSRIFSSKELKKATDNFSMNRVLGQGGQGTVYKGMLAEGRIVAVKRSKVVGEGKMEEFINEVVLLSQINHRNIVKLLGCCLETEVPVLVYEYIPNGDLFKRLHEKSESNDYTMTWEVRLRIAIEIAGALSYMHSAASIPIYHRDIKTTNILLDEKYRAKVSDFGTSRSITIAQTHLTTLVAGTFGYMDPEYFLSSQYTDKSDVYSFGVVLVELITGEKPLSRKRIGN

SEQ ID NO: 6278 - protein, 512 aa, Arabidopsis thaliana
MSLPNLNVTGRGSPYFLTDENCLVMVGCGTKALMKDIESEILGCESSCEDSKSSEEVTNSKCDGYKCCQARIPLERPQVIGINIENTSATRGKEGCSVAFLTNKRYAPMNVTEPEQFHAGGYAVVELGWYFDTSDSRYRNPLGCRNMTRYSSYSSFDKCSCEYDYFSGMSYRICYCNYGYTGNPYLRHGCIDIDECEGHHNCGEGTCVNMPGTHSCEPKITKPEKASVLQGVLISLGVLLFVLGILGLYKFIKKRTRIIRNKNFFKRNGGLLLKQQLITKNGNVDMSRIFSSKELKKATDNFSMNRVLGQGGQGTVYKGMLAEGRIVAVKRSKVVGEGKMEEFINEVVLLSQINHRNIVKLLGCCLETEVPVLVYEYIPNGDLFKRLHEKSESNDYTMTWEVRLRIAIEIAGALSYMHSAASIPIYHRDIKTTNILLDEKYRAKVSDFGTSRSITIAQTHLTTLVAGTFGYMDPEYFLSSQYTDKSDVYSFGVVLVELITGEKPLSRKRIGN

SEQ ID NO: 6279 - DNA, 1150 bp, Arabidopsis thaliana
acacatcttaaaaagtaaaaacacattcatctatccaacaaaaaaaaaaaaaaaaaggagaaatggaaggaatcgatcatagaatggtgagtgtcaatggcataactatgcacattgccgagaaaggtcccaaagaaggacctgtggtgcttctcctccatggattccctgatctctggtacacgtggcgtcaccagattagtgggttatcatctctaggttaccgcgctgtagctccagacctccgaggctacggagactctgattcgccagagtctttctccgagtacacgtgtcttaacgtcgttggggacctcgtagctcttctggacagtgttgctggaaatcaagagaaggtgtttctggtcggtcatgattggggagccattatcggatggtttctctgtttgtttcgacctgaaaagattaacggctttgtgtgtttgagtgtgccgtatagatcaagaaaccctaaagtcaagcccgttcaagggttcaaggctgtatttggagatgattactacatttgtagatttcaggaaccggggaagattgaaggagagattgcaagtgcagatccaagaatatttctgaggaacctcttcacagggaggacactcggtccgccgattttacctaaggataatccctttggggaaaaacctaaccctaatagcgaaaacattgaattgcctgaatggttttctaagaaagatctcgatttctatgtctccaaattcgagaaggcaggatttaccggtggattgaactactacagagccatggatctgaattgggagctcactgcaccatggaccggagctaagattcaagttccagtgaagttcatgacaggtgacttcgacatggtttacaccacaccagggatgaaagagtacatacggtggtggatttgctgcagatgttccaactcttcaagagatagtggtgattgaagatgctgggcacttcgttaaccaagagaaacctcaagaggtcactgctcacatcaatgacttcttcaccaagcttcgggacaacaacaaaagcttttagagttctcgtttggttctattatgttggctctcaaaacaagttggttcttgcatgtgttgtttcgacaagattttgaataagacttggcattatg

SEQ ID NO: 6280 - protein, 297 aa, Arabidopsis thaliana
MEGIDHRMVSVNGITMHIAEKGPKEGPVVLLLHGFPDLWYTWRHQISGLSSLGYRAVAPDLRGYGDSDSPESFSEYTCLNVVGDLVALLDSVAGNQEKVFLVGHDWGAIIGWFLCLFRPEKINGFVCLSVPYRSRNPKVKPVQGFKAVFGDDYYICRFQEPGKIEGEIASADPRIFLRNLFTGRTLGPPILPKDNPFGEKPNPNSENIELPEWFSKKDLDFYVSKFEKAGFTGGLNYYRAMDLNWELTAPWTGAKIQVPVKFMTGDFDMVYTTPGMKEYIRWWICCRCSNSSRDSGD

SEQ ID NO: 6281 - protein, 290 aa, Arabidopsis thaliana
MVSVNGITMHIAEKGPKEGPVVLLLHGFPDLWYTWRHQISGLSSLGYRAVAPDLRGYGDSDSPESFSEYTCLNVVGDLVALLDSVAGNQEKVFLVGHDWGAIIGWFLCLFRPEKINGFVCLSVPYRSRNPKVKPVQGFKAVFGDDYYICRFQEPGKIEGEIASADPRIFLRNLFTGRTLGPPILPKDNPFGEKPNPNSENIELPEWFSKKDLDFYVSKFEKAGFTGGLNYYRAMDLNWELTAPWTGAKIQVPVKFMTGDFDMVYTTPGMKEYIRWWICCRCSNSSRDSGD

SEQ ID NO: 6282 - protein, 282 aa, Arabidopsis thaliana
MHIAEKGPKEGPVVLLLHGFPDLWYTWRHQISGLSSLGYRAVAPDLRGYGDSDSPESFSEYTCLNVVGDLVALLDSVAGNQEKVFLVGHDWGAIIGWFLCLFRPEKINGFVCLSVPYRSRNPKVKPVQGFKAVFGDDYYICRFQEPGKIEGEIASADPRIFLRNLFTGRTLGPPILPKDNPFGEKPNPNSENIELPEWFSKKDLDFYVSKFEKAGFTGGLNYYRAMDLNWELTAPWTGAKIQVPVKFMTGDFDMVYTTPGMKEYIRWWICCRCSNSSRDSGD

SEQ ID NO: 6283 - DNA, 2020 bp, Arabidopsis thaliana
acactattcgtttacactaaccacttccttatccacaccaatccagaacgttcctcaaaaagctccctccttttctctcaaaatggcgtctgcaaacgctctctcttccgcctccgtcctctgttcttcccgtcagagtaagttgggaggaggaaatcagcagcaaggtcagagagttagctacaacaagaggacaatcagacgttttagtgttagagctaatgtaaaggaaatagcttttgaccagcactctagagctgctctacaagctggtattgataagcttgctgattgtgttggtctcactcttggccctagagggaggaatgttgtgttggatgaatttggaagtcctaaggttgtgaatgatggagtcaccattgctagagctattgagttacctaatgccatggaaaatgctggtgcagcgcttattcgtgaggttgcgagtaagactaatgactctgctggtgatgggacaaccactgcgtctatccttgctcgggagataatcaaacatggattgttgagcgtcacttctggtgcgaatcccgtttcactcaagaggggaattgataagactgttcaaggtctgatcgaagagcttcagaagaaagctaggcccgtgaaaggtcgtgatgacatcagagctgtggcttctatctctgctggaaatgatgaccttatagggtcaatgattgctgatgccatcgacaaagttggacctgatggtgttttgtccattgaatcttcatcttcttttgagaccacggtcgaagttgaagaagggatggagattgacagaggttacatctcgcctcagtttgttacaaaccctgagaaactactagctgagtttgagaatgctagggtattgatcactgatcagaagatcactgcgatcaaagacatcatccctattttggagaagaccactcagcttcgtgctccgttgttgattattgcagaggatgttactggtgaagccttagctacccttgtcgtgaacaagcttcgtggtgtcctcaatgttgttgccgttaaagcgccaggatttggagaaagaagaaaagccatgcttcaagatattgcaatcttgacaggagctgagtacctagccatggacatgagcttactggttgaaaacgcaaccatagatcaattgggtattgcccgaaaagtcacgattagcaaagattcgactaccctcattgcagatgcagcttccaaggacgaattacaagctcggattgctcagctgaagaaagaactattcgagactgattctgtgtatgactcagagaagctcgctgagagaattgcgaagctatctggaggtgttgctgtcattaaagtcggagcagcaactgaaactgagcttgaggaccgtaagcttcgtatcgaggatgcaaagaacgcaacatttgctgctatcgaggaaggcatagttccaggtggtggtgctgctttggtgcatctctccactgttattcccgccattaaggagacttttgaggatgctgatgaacgtttgggagctgacatagtacaaaaggcattgctgtcaccagctgctcttattgctcagaacgctggagttgaaggagaagttgttgtggaaaagattatgttcagcgattgggagaatgggtacaacgcaatgactgatacatatgagaatctgttcgaagctggagtgattgatccggctaaagtgacaagatgtgcgctacagaacgctgcttccgtagcaggaatggtactgaccactcaggccattgttgttgacaaaccgaaacccaaggctcctgctgctgctgctcctgagggtctcatggtgtaatcaaaacacaacatcttatcatcacaatggcatctttgtctttttgcacatttgtcatccccatttatctgcaatgtttttcttttttgggggaatatgagtagtttgttaacagtatcgagaaataattatcatcttttttgtccaatggaaattgcagaaaatggttatgtatga

SEQ ID NO: 6284 - protein, 613 aa, Arabidopsis thaliana
HYSFTLTTSLSTPIQNVPQKAPSFSLKMASANALSSASVLCSSRQSKLGGGNQQQGQRVSYNKRTIRRFSVRANVKEIAFDQHSRAALQAGIDKLADCVGLTLGPRGRNVVLDEFGSPKVVNDGVTIARAIELPNAMENAGAALIREVASKTNDSAGDGTTTASILAREIIKHGLLSVTSGANPVSLKRGIDKTVQGLIEELQKKARPVKGRDDIRAVASISAGNDDLIGSMIADAIDKVGPDGVLSIESSSSFETTVEVEEGMEIDRGYISPQFVTNPEKLLAEFENARVLITDQKITAIKDIIPILEKTTQLRAPLLIIAEDVTGEALATLVVNKLRGVLNVVAVKAPGFGERRKAMLQDIAILTGAEYLAMDMSLLVENATIDQLGIARKVTISKDSTTLIADAASKDELQARIAQLKKELFETDSVYDSEKLAERIAKLSGGVAVIKVGAATETELEDRKLRIEDAKNATFAAIEEGIVPGGGAALVHLSTVIPAIKETFEDADERLGADIVQKALLSPAALIAQNAGVEGEVVVEKIMFSDWENGYNAMTDTYENLFEAGVIDPAKVTRCALQNAASVAGMVLTTQAIVVDKPKPKAPAAAAPEGLMV

SEQ ID NO: 6285 - protein, 586 aa, Arabidopsis thaliana
MASANALSSASVLCSSRQSKLGGGNQQQGQRVSYNKRTIRRFSVRANVKEIAFDQHSRAALQAGIDKLADCVGLTLGPRGRNVVLDEFGSPKVVNDGVTIARAIELPNAMENAGAALIREVASKTNDSAGDGTTTASILAREIIKHGLLSVTSGANPVSLKRGIDKTVQGLIEELQKKARPVKGRDDIRAVASISAGNDDLIGSMIADAIDKVGPDGVLSIESSSSFETTVEVEEGMEIDRGYISPQFVTNPEKLLAEFENARVLITDQKITAIKDIIPILEKTTQLRAPLLIIAEDVTGEALATLVVNKLRGVLNVVAVKAPGFGERRKAMLQDIAILTGAEYLAMDMSLLVENATIDQLGIARKVTISKDSTTLIADAASKDELQARIAQLKKELFETDSVYDSEKLAERIAKLSGGVAVIKVGAATETELEDRKLRIEDAKNATFAAIEEGIVPGGGAALVHLSTVIPAIKETFEDADERLGADIVQKALLSPAALIAQNAGVEGEVVVEKIMFSDWENGYNAMTDTYENLFEAGVIDPAKVTRCALQNAASVAGMVLTTQAIVVDKPKPKAPAAAAPEGLMV

SEQ ID NO: 6286 - protein, 477 aa, Arabidopsis thaliana
MENAGAALIREVASKTNDSAGDGTTTASILAREIIKHGLLSVTSGANPVSLKRGIDKTVQGLIEELQKKARPVKGRDDIRAVASISAGNDDLIGSMIADAIDKVGPDGVLSIESSSSFETTVEVEEGMEIDRGYISPQFVTNPEKLLAEFENARVLITDQKITAIKDIIPILEKTTQLRAPLLIIAEDVTGEALATLVVNKLRGVLNVVAVKAPGFGERRKAMLQDIAILTGAEYLAMDMSLLVENATIDQLGIARKVTISKDSTTLIADAASKDELQARIAQLKKELFETDSVYDSEKLAERIAKLSGGVAVIKVGAATETELEDRKLRIEDAKNATFAAIEEGIVPGGGAALVHLSTVIPAIKETFEDADERLGADIVQKALLSPAALIAQNAGVEGEVVVEKIMFSDWENGYNAMTDTYENLFEAGVIDPAKVTRCALQNAASVAGMVLTTQAIVVDKPKPKAPAAAAPEGLMV

SEQ ID NO: 6287 - DNA, 1148 bp, Arabidopsis thaliana
gcttgctttcacgtttttcattgatggctggctttactcttcttccctcgcggttactcgcgtttccttcacgcgctttacctcgtcgccttcatcaccaccatgcaaagctgattcttcgctgcaaaatgtcttcttcttcttcctctcttactcaatccatcactctcccgagccaacccaacgagcctgtccttgtctctgcaaccgctggaatctcttcttccgatttcagggatgcgattgattcatctctgtttaggaattggctaaggaatttggaatcagagagtggaattttagctgatggttcaatgacattaaagcaagttcttatccagggagttgatatgtttggcaaaagaattggatttctcaaattcaaagcggatattttcgacaaggaaactggtcaaaaggttccaggtattgtatttgcacgaggaccagctgtagctgtgcttattctcttggagtcagatggtgagacttatgcggttctcactgaacaggttcgggttcctactgggaagattgttctggaattacctgctggaatgttggatgatgataaaggtgactttgttggtactgcagttcgcgaggtcgaagaggagattggtataaaactgaaaaaagaagatatggttgatctcactgcttttcttgacccatctactggttaccggatcttcccttctcctggaggctgtgatgaagagatgagcgtgtttctttacagaggacaagtcgaaaaggaaacaattagacagttgcaaggcaaagagacaggactccgtgaacacggtgagttcatcaaagtccgactcatcccatatagagagctctggcgcaaaacagctgacgctaaggttcttatgagcattggtctctatgaaatggctcagcgagagggtcttgtgtccagccagagactgaaacccaactcttgatctcctacaattctctgaaatatacaataactggattcagtcaaccagatgagatagattgagattagacgttcttatgttgtaaaaggagtttttagataaatgttatcgctttataacttggtaccatgacaacttgggaacttatctttagaacaaaagattttgcaaacccaatttagggtttaggtttcc

SEQ ID NO: 6288 - protein, 316 aa, Arabidopsis thaliana
LLSRFSLMAGFTLLPSRLLAFPSRALPRRLHHHHAKLILRCKMSSSSSSLTQSITLPSQPNEPVLVSATAGISSSDFRDAIDSSLFRNWLRNLESESGILADGSMTLKQVLIQGVDMFGKRIGFLKFKADIFDKETGQKVPGIVFARGPAVAVLILLESDGETYAVLTEQVRVPTGKIVLELPAGMLDDDKGDFVGTAVREVEEEIGIKLKKEDMVDLTAFLDPSTGYRIFPSPGGCDEEMSVFLYRGQVEKETIRQLQGKETGLREHGEFIKVRLIPYRELWRKTADAKVLMSIGLYEMAQREGLVSSQRLKPNS

SEQ ID NO: 6289 - protein, 309 aa, Arabidopsis thaliana
MAGFTLLPSRLLAFPSRALPRRLHHHHAKLILRCKMSSSSSSLTQSITLPSQPNEPVLVSATAGISSSDFRDAIDSSLFRNWLRNLESESGILADGSMTLKQVLIQGVDMFGKRIGFLKFKADIFDKETGQKVPGIVFARGPAVAVLILLESDGETYAVLTEQVRVPTGKIVLELPAGMLDDDKGDFVGTAVREVEEEIGIKLKKEDMVDLTAFLDPSTGYRIFPSPGGCDEEMSVFLYRGQVEKETIRQLQGKETGLREHGEFIKVRLIPYRELWRKTADAKVLMSIGLYEMAQREGLVSSQRLKPNS

SEQ ID NO: 6290 - protein, 274 aa, Arabidopsis thaliana
MSSSSSSLTQSITLPSQPNEPVLVSATAGISSSDFRDAIDSSLFRNWLRNLESESGILADGSMTLKQVLIQGVDMFGKRIGFLKFKADIFDKETGQKVPGIVFARGPAVAVLILLESDGETYAVLTEQVRVPTGKIVLELPAGMLDDDKGDFVGTAVREVEEEIGIKLKKEDMVDLTAFLDPSTGYRIFPSPGGCDEEMSVFLYRGQVEKETIRQLQGKETGLREHGEFIKVRLIPYRELWRKTADAKVLMSIGLYEMAQREGLVSSQRLKPNS

SEQ ID NO: 6291 - DNA, 1938 bp, Arabidopsis thaliana
ctatcttcaaacacacacacaaagttcctgcagcttcgatcagatccaacgagccgattcttctctctttgtaggtcaagtagttccagagaactgcattgcatattcaccaacatcttaggttcctaattcaattagcccactgggatatgccagagagaattggacactgtaccatttgaacatatgcgtatgggtcaaatataaaactttcttccttgaaattccgaggcaagagagctgtccattacaggggtactcgtgtttttttaaatacctgttgagtaaagaaaggctggattactagattgcatgctttgtcacagttgtctgtgaatggaagccgaaaaggtttgctggtgagttcagattattgatggagcaaagactgcagctccgtgttggtacaatggaaaccatatccaatgagggagatgtagatagagaacaggttttagagacttttggtattgaaaatgagaccgggaaggagacaaacggctccagaagttttgatgttggttacagttccggtgatacccttgaaacattgcctaaagcgtcaaaagtagatatctctcctgctgacgtgcttaaaacactcttctttatacttgtatggtacactttcagcacatttctgactctgtacaacaaaactctcttaggagatgatttagggaaatttcctgctcccttattaatgaataccattcacttttctattcaagctgttttatcaaagatgataacatggtattggtcggggagatttcagcctgatgttaccatatcatggagagactatttcgttagagttgtaccaacagcgcttggaactgctatggatataaacctaagtaacgagtcacttgtcttcatatcggttacatttgcaacaatgtgcaaatctgcagccccaatatttcttcttctgtttgcttttgccttcaggctggagtctccaagcctgaaactttttggcattatttcagtgatctcagcaggagtgttgttaacagttgcaaaggagacagaatttgagttttggggtttcgtttttgtcatgcttgctgctgtcatgtctggtttccgctggtgtatgacgcaagttcttttgcagaaagaaacatttggactgaaaaatccattcatattcatgagctgtgtggcaccagtgatggctatagcgactggtcttctttctctccttctggatccatggagtgaatttagagacaacaaatactttgatagtggagcacattttgctcgaacttgttttttgatgctttttggcggagcactggctttttgtatggttttgacagagtatgtccttgtttccgtaactagtgctgtaaccgtcacaatagcgggagttgtcaaagaggctgtcaccatagtggttgcagtgttttacttccatgacgaatttacgtggctgaaaggtgtgggtctgatgatcattatggttggtgtcagtttgttcaactggtacaaatatgataaactacaaaaggggcacaaaacagaggaagagaagcagttacaagctccaagtcagactggaaaatatgtgattcttgatgagatggatgatcaagaaaatagtccctaagaattatttttgatacattcacatgatatggtaaacccccttttaggctggtacatccgtaatgtggaagcatgtggaccttccttgagaaaaagactataacatacttttaaggcagatgaattggaaactttgatgtttccctgccttacaaaaatgatagaagaacataaccatttcaacaaattttaaagggaaaaagttagtagtggctgcaaatttggtccaatttcacatgtcttttgtacccatgttattgagagtgtcgtctctgttatcatcttctgaagaaattgaataacagagtctaacattat

SEQ ID NO: 6292 - protein, 414 aa, Arabidopsis thaliana
MEQRLQLRVGTMETISNEGDVDREQVLETFGIENETGKETNGSRSFDVGYSSGDTLETLPKASKVDISPADVLKTLFFILVWYTFSTFLTLYNKTLLGDDLGKFPAPLLMNTIHFSIQAVLSKMITWYWSGRFQPDVTISWRDYFVRVVPTALGTAMDINLSNESLVFISVTFATMCKSAAPIFLLLFAFAFRLESPSLKLFGIISVISAGVLLTVAKETEFEFWGFVFVMLAAVMSGFRWCMTQVLLQKETFGLKNPFIFMSCVAPVMAIATGLLSLLLDPWSEFRDNKYFDSGAHFARTCFLMLFGGALAFCMVLTEYVLVSVTSAVTVTIAGVVKEAVTIVVAVFYFHDEFTWLKGVGLMIIMVGVSLFNWYKYDKLQKGHKTEEEKQLQAPSQTGKYVILDEMDDQENSP

SEQ ID NO: 6293 - protein, 403 aa, Arabidopsis thaliana
METISNEGDVDREQVLETFGIENETGKETNGSRSFDVGYSSGDTLETLPKASKVDISPADVLKTLFFILVWYTFSTFLTLYNKTLLGDDLGKFPAPLLMNTIHFSIQAVLSKMITWYWSGRFQPDVTISWRDYFVRVVPTALGTAMDINLSNESLVFISVTFATMCKSAAPIFLLLFAFAFRLESPSLKLFGIISVISAGVLLTVAKETEFEFWGFVFVMLAAVMSGFRWCMTQVLLQKETFGLKNPFIFMSCVAPVMAIATGLLSLLLDPWSEFRDNKYFDSGAHFARTCFLMLFGGALAFCMVLTEYVLVSVTSAVTVTIAGVVKEAVTIVVAVFYFHDEFTWLKGVGLMIIMVGVSLFNWYKYDKLQKGHKTEEEKQLQAPSQTGKYVILDEMDDQENSP

SEQ ID NO: 6294 - protein, 305 aa, Arabidopsis thaliana
MNTIHFSIQAVLSKMITWYWSGRFQPDVTISWRDYFVRVVPTALGTAMDINLSNESLVFISVTFATMCKSAAPIFLLLFAFAFRLESPSLKLFGIISVISAGVLLTVAKETEFEFWGFVFVMLAAVMSGFRWCMTQVLLQKETFGLKNPFIFMSCVAPVMAIATGLLSLLLDPWSEFRDNKYFDSGAHFARTCFLMLFGGALAFCMVLTEYVLVSVTSAVTVTIAGVVKEAVTIVVAVFYFHDEFTWLKGVGLMIIMVGVSLFNWYKYDKLQKGHKTEEEKQLQAPSQTGKYVILDEMDDQENSP

SEQ ID NO: 6295 - DNA, 2156 bp, Arabidopsis thaliana
ggacctcgagggaatctactgtagctctcacactatccactcttcatcggcagctagatttccgggtcctcagtatcgggtcagatctagatccggatccggagacgctgagaatgaaacacttcagaactgagcgagtccgtgcgactccgaagctcttcacctacgttctcgtcggtttcatcgctctactcggcttgacttgcctctactacggctcttcgttcgctcccggatccagaaagtccgatgagttcgatggatctaataaccgcgttcgcaccggaatcggatccttgaggaatcgagatattgtgcttgcagtgagccgtttcgaagttcctaaaagtgttccgatatgtgattcgagacactcggagttgataccgtgtttggatcggaaccttcattaccagttgaaattgaaactcaatttatcgttaatggagcactatgagcatcattgtcctccatcagaacggcgtttcaattgccttgttccgcctcctgttggttataagatcccgttaaggtggcctgtgagtagagacgaggtgtggaaggcgaatatcccgcacacacaccttgctcaagagaagtctgatcagaattggatggttgttaatggtgataagatcaattttcctggtggaggaacacatttccacaacggagctgacaaatacattgtttccctggctcagatgctgaaattccctggtgacaaactcaacaatgggggaagcattcggaatgttcttgacgttggttgtggggtagctagcttcggagcctatcttctttcacatgacatcatagccatgtctcttgcccctaatgatgtccaccagaaccagatccagtttgctctagaacgagggattccatcaacacttggtgttcttgggacaaagcggcttccatacccaagcagatcatttgaacttgctcactgctctagatgtcggatagattggcttcaaagagatgggatcttgttactggaacttgataggttgctcagacctggtggctactttgtatactcgtcgcctgaagcttatgcacacgacccagagaacagaaagattgggaatgcaatgcatgatctctttaagagaatgtgttggaaggtcgtggccaaacgagaccaatctgttatatggggaaaaccgatatccaacagctgttacttgaagagggatccgggtgtcctgcctccgctttgtccttctggagatgacccagatgcaacttggaatgtctcaatgaaggcttgcatatcaccttactcagtgaggatgcacaaagaaagatggagtggactcgttccctggccacggaggctgacagctcctccaccacgtcttgaagaaattggtgtcactcctgagcaattccgtgaagatacggaaacatggcggcttagagtgatagaatactggaaactgctgaaaccaatggtgcaaaagaactccataagaaacgtgatggacatgagctcaaaccttggcggtttcgcagctgctctaaacgataaagatgtatgggtaatgaatgtcatgcccgttcaatcctctccaagaatgaagatcatttacgaccgtggccttatcggagccactcatgattggtgtgaagcctttgacacatacccacgaacgtttgatcttatccacgcatggaacaccttcacagaaacccaagcacgtggatgcagctttgaagatctgcttatcgagatggatcggatactacgcccagaaggatttgtcataattcgtgacacaactgacaatattagctatatcaagaagtatctgacattattgaaatgggataaatggtccacagagacaactccaaaaggtgatcctctgtcgaccaaagacgagatagttttgatcgccagaaagaaactttggagcttgcccgccatttcagtgtcctgaaatctaacagtcaacaggcgaatgaatgagatttacagcatcagaggcgcgtagctgaggaaaatactcagcaatggagaagtgtaaattacacgacattcatacatagttgttaacttgttatgcatttgttgtaggaaactgcaaaatcttcttattttgcgattttcatgttcctctttataattaaaatctgcttttgtg

SEQ ID NO: 6296 - protein, 649 aa, Arabidopsis thaliana
TSRESTVALTLSTLHRQLDFRVLSIGSDLDPDPETLRMKHFRTERVRATPKLFTYVLVGFIALLGLTCLYYGSSFAPGSRKSDEFDGSNNRVRTGIGSLRNRDIVLAVSRFEVPKSVPICDSRHSELIPCLDRNLHYQLKLKLNLSLMEHYEHHCPPSERRFNCLVPPPVGYKIPLRWPVSRDEVWKANIPHTHLAQEKSDQNWMVVNGDKINFPGGGTHFHNGADKYIVSLAQMLKFPGDKLNNGGSIRNVLDVGCGVASFGAYLLSHDIIAMSLAPNDVHQNQIQFALERGIPSTLGVLGTKRLPYPSRSFELAHCSRCRIDWLQRDGILLLELDRLLRPGGYFVYSSPEAYAHDPENRKIGNAMHDLFKRMCWKVVAKRDQSVIWGKPISNSCYLKRDPGVLPPLCPSGDDPDATWNVSMKACISPYSVRMHKERWSGLVPWPRRLTAPPPRLEEIGVTPEQFREDTETWRLRVIEYWKLLKPMVQKNSIRNVMDMSSNLGGFAAALNDKDVWVMNVMPVQSSPRMKIIYDRGLIGATHDWCEAFDTYPRTFDLIHAWNTFTETQARGCSFEDLLIEMDRILRPEGFVIIRDTTDNISYIKKYLTLLKWDKWSTETTPKGDPLSTKDEIVLIARKKLWSLPAISVS

SEQ ID NO: 6297 - protein, 612 aa, Arabidopsis thaliana
MKHFRTERVRATPKLFTYVLVGFIALLGLTCLYYGSSFAPGSRKSDEFDGSNNRVRTGIGSLRNRDIVLAVSRFEVPKSVPICDSRHSELIPCLDRNLHYQLKLKLNLSLMEHYEHHCPPSERRFNCLVPPPVGYKIPLRWPVSRDEVWKANIPHTHLAQEKSDQNWMVVNGDKINFPGGGTHFHNGADKYIVSLAQMLKFPGDKLNNGGSIRNVLDVGCGVASFGAYLLSHDIIAMSLAPNDVHQNQIQFALERGIPSTLGVLGTKRLPYPSRSFELAHCSRCRIDWLQRDGILLLELDRLLRPGGYFVYSSPEAYAHDPENRKIGNAMHDLFKRMCWKVVAKRDQSVIWGKPISNSCYLKRDPGVLPPLCPSGDDPDATWNVSMKACISPYSVRMHKERWSGLVPWPRRLTAPPPRLEEIGVTPEQFREDTETWRLRVIEYWKLLKPMVQKNSIRNVMDMSSNLGGFAAALNDKDVWVMNVMPVQSSPRMKIIYDRGLIGATHDWCEAFDTYPRTFDLIHAWNTFTETQARGCSFEDLLIEMDRILRPEGFVIIRDTTDNISYIKKYLTLLKWDKWSTETTPKGDPLSTKDEIVLIARKKLWSLPAISVS

SEQ ID NO: 6298 - protein, 502 aa, Arabidopsis thaliana
MEHYEHHCPPSERRFNCLVPPPVGYKIPLRWPVSRDEVWKANIPHTHLAQEKSDQNWMVVNGDKINFPGGGTHFHNGADKYIVSLAQMLKFPGDKLNNGGSIRNVLDVGCGVASFGAYLLSHDIIAMSLAPNDVHQNQIQFALERGIPSTLGVLGTKRLPYPSRSFELAHCSRCRIDWLQRDGILLLELDRLLRPGGYFVYSSPEAYAHDPENRKIGNAMHDLFKRMCWKVVAKRDQSVIWGKPISNSCYLKRDPGVLPPLCPSGDDPDATWNVSMKACISPYSVRMHKERWSGLVPWPRRLTAPPPRLEEIGVTPEQFREDTETWRLRVIEYWKLLKPMVQKNSIRNVMDMSSNLGGFAAALNDKDVWVMNVMPVQSSPRMKIIYDRGLIGATHDWCEAFDTYPRTFDLIHAWNTFTETQARGCSFEDLLIEMDRILRPEGFVIIRDTTDNISYIKKYLTLLKWDKWSTETTPKGDPLSTKDEIVLIARKKLWSLPAISVS

SEQ ID NO: 6299 - DNA, 1326 bp, Arabidopsis thaliana
actcaaagtcgagccttccttcctttatctcttataccctttttgattcttcttcaattttctgacatcaaatggcggcaaagctgatatccaccggtttccgtcatactactttgccggaaaactatgtccggccaatctccgaccgtccacgactctctgaagtctctcaactcgaagatttccctctcatcgatctctcttccactgatcgatcttttctcatccaacaaatccaccaagcttgtgcccgattcggattttttcaggtcataaatcacggagttaacaaacaaataatagatgagatggtgagtgttgcgcgtgagttctttagcatgtctatggaagaaaaaatgaagctatattcagacgatccaacgaagacaacaagattatcgacgagcttcaatgtgaagaaagaagaagtcaacaattggagagactatctaagactccattgttatcctatccacaagtatgtcaatgagtggccgtcaaaccctccttctttcaaggaaatagtaagtaaatacagtagagaagtaagagaagtgggatttaaaatagaggaattaatatcagagagcttaggtttagaaaaagattacatgaagaaagtgcttggtgaacaaggtcaacacatggcagtcaactattatcctccatgtcctgaacctgagctcacttacggtttacctgctcataccgacccaaacgccctaaccattcttcttcaagacactactgtttgcggtctccagatcttgatcgacggtcagtggttcgccgttaatccacatcctgatgcttttgtcatcaacataggtgaccagttacaggcattaagtaatggagtatacaaaagtgtttggcatcgcgctgtaacaaacacagaaaatccgagactatcggtcgcatcgtttctgtgcccagctgactgtgctgtcatgagcccggccaagcccttgtgggaagctgaggacgatgaaacgaaaccagtctacaaagatttcacttatgcagagtattacaagaagttttggagtaggaatctggaccaagaacattgcctcgagaattttctaaacaactaagatacatatatctttggcctttgtgtttgtctagtaggcatatatatacaagtcaataacagcattgatgttcgattctacattcctaccaacattttgttctagacgtatgataatagtaggaatcatgatcatatgtcttgataataactatcatgggcatatttgtttgtgtgttaaataatttcttaccttttatttttctatatgcttcaaaacttttaacttt

SEQ ID NO: 6300 - protein, 341 aa, Arabidopsis thaliana
MAAKLISTGFRHTTLPENYVRPISDRPRLSEVSQLEDFPLIDLSSTDRSFLIQQIHQACARFGFFQVINHGVNKQIIDEMVSVAREFFSMSMEEKMKLYSDDPTKTTRLSTSFNVKKEEVNNWRDYLRLHCYPIHKYVNEWPSNPPSFKEIVSKYSREVREVGFKIEELISESLGLEKDYMKKVLGEQGQHMAVNYYPPCPEPELTYGLPAHTDPNALTILLQDTTVCGLQILIDGQWFAVNPHPDAFVINIGDQLQALSNGVYKSVWHRAVTNTENPRLSVASFLCPADCAVMSPAKPLWEAEDDETKPVYKDFTYAEYYKKFWSRNLDQEHCLENFLNN

SEQ ID NO: 6301 - protein, 262 aa, Arabidopsis thaliana
MVSVAREFFSMSMEEKMKLYSDDPTKTTRLSTSFNVKKEEVNNWRDYLRLHCYPIHKYVNEWPSNPPSFKEIVSKYSREVREVGFKIEELISESLGLEKDYMKKVLGEQGQHMAVNYYPPCPEPELTYGLPAHTDPNALTILLQDTTVCGLQILIDGQWFAVNPHPDAFVINIGDQLQALSNGVYKSVWHRAVTNTENPRLSVASFLCPADCAVMSPAKPLWEAEDDETKPVYKDFTYAEYYKKFWSRNLDQEHCLENFLNN

SEQ ID NO: 6302 - protein, 252 aa, Arabidopsis thaliana
MSMEEKMKLYSDDPTKTTRLSTSFNVKKEEVNNWRDYLRLHCYPIHKYVNEWPSNPPSFKEIVSKYSREVREVGFKIEELISESLGLEKDYMKKVLGEQGQHMAVNYYPPCPEPELTYGLPAHTDPNALTILLQDTTVCGLQILIDGQWFAVNPHPDAFVINIGDQLQALSNGVYKSVWHRAVTNTENPRLSVASFLCPADCAVMSPAKPLWEAEDDETKPVYKDFTYAEYYKKFWSRNLDQEHCLENFLNN

SEQ ID NO: 6303 - DNA, 1993 bp, Arabidopsis thaliana
cataaaactcaaaaatctttggtcttcaaacttcaaacacttgagaaaaaagcttttgatttcacatcttaatctaacaagtcaaacacttttcaaaccacaaaattcgtcaaagctctgaaacaaataaacattttttaatttctccctttttaatggaaatctcttctttcccatttccatacctacaagacgacgagtgttcccatttccttggtctatttcaagacatggactcttctccttctactttcggattagaaggttttaatagcaacgacaataatactaatcaaaagaaacgcccaagaaaagacgacgaaggcggtggtggtggcggcggaggaacagaagttctaggagctgttaatggtaataataaggctgcttttggagatatactcgcgacgcttctgttgttagacgaggaagctaaacagcaacaagaacagtgggattttgaatttattaaagagaagtctttacttgaagctaatcataagaagaaagtgaaaacaatggatggttattacaatcaaatgcaagatcattactctgcagctggtgaaaccgatggttcgcgttcaaaacgcgcacggaaaaccgcggttgcggctgtggtttccgcggtagcttccggggcggacacaaccggtttagctgctccggttccgaccgcggatatcgctagcggttccgggtcaggaccgagtcataggaggttatgggttaaagaacgaaccacggactggtgggacagagtaagccggcctgattttccagaagacgagtttcggcgagagttccgtatgagcaaatcgacgtttaacctaatatgcgaggagctagatacgacggtgacgaagaaaaacacgatgttaagagacgcgattccagctccaaaacgcgtaggcgtttgcgtttggcgtttggcgacaggagctccgcttcgccacgtgtcggagcgtttcggtctgggaatctcaacttgccacaaactagtcatcgaagtctgccgcgcgatctacgacgttctcatgcccaagtatctcctctggccgtcggattcagagataaactcaacgaaagccaaattcgaatcggtccacaaaataccaaacgtcgtcggatcaatctacaccacacatattccgatcatcgctccgaaagtccacgtggcggcgtattttaacaagagacacacggagaggaatcagaagacgtcgtactcgataacagtacaaggagtggtcaacgccgacgggatcttcaccgacgtttgtatcggaaacccaggatctctcaccgacgatcagatcctggagaaatcttcgctttcacggcaaagagcggcgcgtgggatgttacgtgacagctggatagttggaaactctgggtttccgttgactgattatcttcttgtaccgtacacgagacagaatctgacgtggacgcagcacgcgtttaacgagagtatcggagagattcaggggattgcgacggctgcgtttgagaggctcaaaggacggtgggcttgtttgcagaaacggacggaggtgaagcttcaggatctgccgtacgtgcttggagcttgttgtgtgttgcataacatttgtgagatgaggaaggaggagatgttgccggagttgaagtttgaggtttttgatgatgtggcggtgccggagaataatatccgatctgctagtgcggttaatacgagggatcatatctctcacaatctcttgcatcgtggacttgccgggacaagaactctataggctctgtttttcaccttttcttattttgaaactgattttttattgcaaattctttttccaaattaggaataaaaacattttagggattggttggatacagaaagaatagttgaattgagagtagaagtggctgatgatattgtttgtgttacttattagcattgtgtaatctttagttcatgtattttctatacaaattgaatctgaaacctctt

SEQ ID NO: 6304 - protein, 540 aa, Arabidopsis thaliana
MEISSFPFPYLQDDECSHFLGLFQDMDSSPSTFGLEGFNSNDNNTNQKKRPRKDDEGGGGGGGGTEVLGAVNGNNKAAFGDILATLLLLDEEAKQQQEQWDFEFIKEKSLLEANHKKKVKTMDGYYNQMQDHYSAAGETDGSRSKRARKTAVAAVVSAVASGADTTGLAAPVPTADIASGSGSGPSHRRLWVKERTTDWWDRVSRPDFPEDEFRREFRMSKSTFNLICEELDTTVTKKNTMLRDAIPAPKRVGVCVWRLATGAPLRHVSERFGLGISTCHKLVIEVCRAIYDVLMPKYLLWPSDSEINSTKAKFESVHKIPNVVGSIYTTHIPIIAPKVHVAAYFNKRHTERNQKTSYSITVQGVVNADGIFTDVCIGNPGSLTDDQILEKSSLSRQRAARGMLRDSWIVGNSGFPLTDYLLVPYTRQNLTWTQHAFNESIGEIQGIATAAFERLKGRWACLQKRTEVKLQDLPYVLGACCVLHNICEMRKEEMLPELKFEVFDDVAVPENNIRSASAVNTRDHISHNLLHRGLAGTRTL

SEQ ID NO: 6305 - protein, 515 aa, Arabidopsis thaliana
MDSSPSTFGLEGFNSNDNNTNQKKRPRKDDEGGGGGGGGTEVLGAVNGNNKAAFGDILATLLLLDEEAKQQQEQWDFEFIKEKSLLEANHKKKVKTMDGYYNQMQDHYSAAGETDGSRSKRARKTAVAAVVSAVASGADTTGLAAPVPTADIASGSGSGPSHRRLWVKERTTDWWDRVSRPDFPEDEFRREFRMSKSTFNLICEELDTTVTKKNTMLRDAIPAPKRVGVCVWRLATGAPLRHVSERFGLGISTCHKLVIEVCRAIYDVLMPKYLLWPSDSEINSTKAKFESVHKIPNVVGSIYTTHIPIIAPKVHVAAYFNKRHTERNQKTSYSITVQGVVNADGIFTDVCIGNPGSLTDDQILEKSSLSRQRAARGMLRDSWIVGNSGFPLTDYLLVPYTRQNLTWTQHAFNESIGEIQGIATAAFERLKGRWACLQKRTEVKLQDLPYVLGACCVLHNICEMRKEEMLPELKFEVFDDVAVPENNIRSASAVNTRDHISHNLLHRGLAGTRTL

SEQ ID NO: 6306 - protein, 419 aa, Arabidopsis thaliana
MDGYYNQMQDHYSAAGETDGSRSKRARKTAVAAVVSAVASGADTTGLAAPVPTADIASGSGSGPSHRRLWVKERTTDWWDRVSRPDFPEDEFRREFRMSKSTFNLICEELDTTVTKKNTMLRDAIPAPKRVGVCVWRLATGAPLRHVSERFGLGISTCHKLVIEVCRAIYDVLMPKYLLWPSDSEINSTKAKFESVHKIPNVVGSIYTTHIPIIAPKVHVAAYFNKRHTERNQKTSYSITVQGVVNADGIFTDVCIGNPGSLTDDQILEKSSLSRQRAARGMLRDSWIVGNSGFPLTDYLLVPYTRQNLTWTQHAFNESIGEIQGIATAAFERLKGRWACLQKRTEVKLQDLPYVLGACCVLHNICEMRKEEMLPELKFEVFDDVAVPENNIRSASAVNTRDHISHNLLHRGLAGTRTL

SEQ ID NO: 6307 - DNA, 1645 bp, Arabidopsis thaliana
aacaaaaaaaaaaaagaaaaaaggagataataatcacaaactacaaaagtagaaagaagaaaaaagaacaaagtatcagttcttgaatatttgcatcaatggaggaatccaaaacacctcacgttgcgatcataccaagtccgggaatgggtcatctcataccactcgtcgagtttgctaaacgactcgtccatcttcacggcctcaccgttaccttcgtcatcgccggcgaaggtccaccatcaaaagctcagagaaccgtcctcgactctctcccttcttcaatctcctccgtctttctccctcctgttgatctcaccgatctctcttcgtccactcgcatcgaatctcggatctccctcaccgtgactcgttcaaacccggagctccggaaagtcttcgactcgttcgtggagggaggtcgtttgccaacggcgctcgtcgtcgatctcttcggtacggacgctttcgacgtggccgtagaatttcacgtgccaccgtatattttctacccaacaacggccaacgtcttgtcgttttttctccatttgcctaaactatacgaaacggtgtcgtgtgagttcagggaattaaccgaaccgcttatgcttcctggatgtgtaccggttgccgggaaagatttccttgacccggcccaagaccggaaagacgatgcatacaaatggcttctccataacaccaagaggtacaaagaagccgaaggtattcttgtgaataccttctttgagctagagccaaatgctataaaggccttgcaagaaccgggtcttgataaaccaccggtttatccggttggaccgttggttaacattggtaagcaagaggctaagcaaaccgaagagtctgaatgtttaaagtggttggataaccagccgctcggttcggttttatatgtgtcctttggtagtggcggtaccctcacatgtgagcagctcaatgagcttgctcttggtcttgcagatagtgagcaacggtttctttgggtcatacgaagtcctagtgggatcgctaattcgtcgtattttgattcacatagccaaacagatccattgacatttttaccaccgggatttttagagcggactaaaaaaagaggttttgtgatccctttttgggctccacaagcccaagtcttggcgcatccatccacgggaggatttttaactcattgtggatggaattcgactctagagagtgtagtaagcggtattccacttatagcatggccattatacgcagaacagaagatgaatgcggttttgttgagtgaagatattcgtgcggcacttaggccgcgtgccggggacgatgggttagttagaagagaagaggtggctagagtggtaaaaggattgatggaaggtgaagaaggcaaaggagtgaggaacaagatgaaggagttgaaggaagcagcttgtagggtgttgaaggatgatgggacttcgacaaaagcacttagtcttgtggccttaaagtggaaagcccacaaaaaagagttagagcaaaatggcaaccactaaatatttgatgttctaatatgatttgtataatcaacggtgggatttgtgcaaatgtgtttctgtatgtatatgtatgttctacttttctttgcttcgtttgtctc

SEQ ID NO: 6308 - protein, 480 aa, Arabidopsis thaliana
MEESKTPHVAIIPSPGMGHLIPLVEFAKRLVHLHGLTVTFVIAGEGPPSKAQRTVLDSLPSSISSVFLPPVDLTDLSSSTRIESRISLTVTRSNPELRKVFDSFVEGGRLPTALVVDLFGTDAFDVAVEFHVPPYIFYPTTANVLSFFLHLPKLYETVSCEFRELTEPLMLPGCVPVAGKDFLDPAQDRKDDAYKWLLHNTKRYKEAEGILVNTFFELEPNAIKALQEPGLDKPPVYPVGPLVNIGKQEAKQTEESECLKWLDNQPLGSVLYVSFGSGGTLTCEQLNELALGLADSEQRFLWVIRSPSGIANSSYFDSHSQTDPLTFLPPGFLERTKKRGFVIPFWAPQAQVLAHPSTGGFLTHCGWNSTLESVVSGIPLIAWPLYAEQKMNAVLLSEDIRAALRPRAGDDGLVRREEVARVVKGLMEGEEGKGVRNKMKELKEAACRVLKDDGTSTKALSLVALKWKAHKKELEQNGNH

SEQ ID NO: 6309 - protein, 464 aa, Arabidopsis thaliana
MGHLIPLVEFAKRLVHLHGLTVTFVIAGEGPPSKAQRTVLDSLPSSISSVFLPPVDLTDLSSSTRIESRISLTVTRSNPELRKVFDSFVEGGRLPTALVVDLFGTDAFDVAVEFHVPPYIFYPTTANVLSFFLHLPKLYETVSCEFRELTEPLMLPGCVPVAGKDFLDPAQDRKDDAYKWLLHNTKRYKEAEGILVNTFFELEPNAIKALQEPGLDKPPVYPVGPLVNIGKQEAKQTEESECLKWLDNQPLGSVLYVSFGSGGTLTCEQLNELALGLADSEQRFLWVIRSPSGIANSSYFDSHSQTDPLTFLPPGFLERTKKRGFVIPFWAPQAQVLAHPSTGGFLTHCGWNSTLESVVSGIPLIAWPLYAEQKMNAVLLSEDIRAALRPRAGDDGLVRREEVARVVKGLMEGEEGKGVRNKMKELKEAACRVLKDDGTSTKALSLVALKWKAHKKELEQNGNH

SEQ ID NO: 6310 - protein, 311 aa, Arabidopsis thaliana
MLPGCVPVAGKDFLDPAQDRKDDAYKWLLHNTKRYKEAEGILVNTFFELEPNAIKALQEPGLDKPPVYPVGPLVNIGKQEAKQTEESECLKWLDNQPLGSVLYVSFGSGGTLTCEQLNELALGLADSEQRFLWVIRSPSGIANSSYFDSHSQTDPLTFLPPGFLERTKKRGFVIPFWAPQAQVLAHPSTGGFLTHCGWNSTLESVVSGIPLIAWPLYAEQKMNAVLLSEDIRAALRPRAGDDGLVRREEVARVVKGLMEGEEGKGVRNKMKELKEAACRVLKDDGTSTKALSLVALKWKAHKKELEQNGNH

SEQ ID NO: 6311 - DNA, 1566 bp, Arabidopsis thaliana
gtattgtgttgttggagactgaaccatcaacgctttttcgacacttcttcttcttcctcctttctctcttcatgcaaaatcacagttacaagaaataaacaaaagattataaatcaaaacataaagagacaaaaatgagtgatggtcgagttaacgcagatcctcaacaagaagagaacatggttaaaccaccggttaagagatctctcactctcctcatcgtgacttacttttttctcttcttcggctctatcgcttcgagccttctcgcgaagtactatttcgtctacggtggctcgagccggtgggtctccacgtgggttcaatctgctggcttccctctcctcctcatcctaatctacttccctcactacgttctcaaaaccaccactcgccgtcctttcacgcgcttcacgctccgccatctcatcttctccgtgttgatcgggcttgttctcggtttcaacaacttcctcttctcatggggaacctcgtaccttccggtgtccacgtcatcgcttctcctctcgacacaactcgtcttcactctcattttgtctaggatcatagtgaaacagaagatcactttctcaaacctcaactgcgttgtcctgttgacgttaagctctgttttgttggctcttgattcgagtaaagataaaccgtccggtttaaccaaaaccaagtatttcatcgggtatgtatccacgatcggagccggtttactcttcgctctttacctccccgtgacggagaagctataccgtaccgtttattgttacgcgatggtcatggaggtgcaactggtgatggaattcgcagcgacggttttcgcgacaatcggtatggcttgcgaaggcgggtttaaggaaatggttaaggaagcgaaccatgttttcaccaaaggaccaacattttattggacgtttgcgatactagcaaatgtggtgacgtggcagctctctttcgcagccacgtcagggatggtttacttgacgtcaggtatcaccggaggtatctgcatgacggcgttgctcgcgatgaatgtgataggaggtgtggtggcttacggtgacgtgtttggtggagtgaagattgtgtcgacggtgctatgtatttggggattctcatcttacacatacgggatgtatatgaagatgaagaaggaggagaaggagaagggagaatattccggcgtaaagacgacggaagacagcggagagatggaggtggaaatgggaaatgttaaagatgacgtggcggcggcggatgatagggcttgaagatatctgtgtgattgagacggccgttatgattattattaggaaggaagccaacaaaaaaaaaaaaagtagtagtatctttttgtgttctttctttttctcaccttatgtttttttagtaatgcatttgcttttgtttttcttgtttttttaggttgttttgtttttccttttctggttatttttatgaattatcctcttatcatggccacaactaatgatgttgtacactttttaagtgtggattttccaatgtcggttgataagtatgtatttttctgtt

SEQ ID NO: 6312 - protein, 382 aa, Arabidopsis thaliana
MSDGRVNADPQQEENMVKPPVKRSLTLLIVTYFFLFFGSIASSLLAKYYFVYGGSSRWVSTWVQSAGFPLLLILIYFPHYVLKTTTRRPFTRFTLRHLIFSVLIGLVLGFNNFLFSWGTSYLPVSTSSLLLSTQLVFTLILSRIIVKQKITFSNLNCVVLLTLSSVLLALDSSKDKPSGLTKTKYFIGYVSTIGAGLLFALYLPVTEKLYRTVYCYAMVMEVQLVMEFAATVFATIGMACEGGFKEMVKEANHVFTKGPTFYWTFAILANVVTWQLSFAATSGMVYLTSGITGGICMTALLAMNVIGGVVAYGDVFGGVKIVSTVLCIWGFSSYTYGMYMKMKKEEKEKGEYSGVKTTEDSGEMEVEMGNVKDDVAAADDRA

SEQ ID NO: 6313 - protein, 367 aa, Arabidopsis thaliana
MVKPPVKRSLTLLIVTYFFLFFGSIASSLLAKYYFVYGGSSRWVSTWVQSAGFPLLLILIYFPHYVLKTTTRRPFTRFTLRHLIFSVLIGLVLGFNNFLFSWGTSYLPVSTSSLLLSTQLVFTLILSRIIVKQKITFSNLNCVVLLTLSSVLLALDSSKDKPSGLTKTKYFIGYVSTIGAGLLFALYLPVTEKLYRTVYCYAMVMEVQLVMEFAATVFATIGMACEGGFKEMVKEANHVFTKGPTFYWTFAILANVVTWQLSFAATSGMVYLTSGITGGICMTALLAMNVIGGVVAYGDVFGGVKIVSTVLCIWGFSSYTYGMYMKMKKEEKEKGEYSGVKTTEDSGEMEVEMGNVKDDVAAADDRA

SEQ ID NO: 6314 - DNA, 1147 bp, Arabidopsis thaliana
aatcttcatttcttgagagatccaaaaaaagaatcagaaagaagaagaagaagactccaaaaacgatgccgtattacaccaacgacgacaatgacgtcgacgatttcaccgaatacgatccgatgccttatagtggaggctacgacatcaccgtgacatacggccgttcaattccaccgtccgacgagacttgttaccctctctcctctctctccggcgacgcctttgagtatcagcgacctaatttctcttctaaccacgattcttctgcttatgacgaccaagctcttaaaaccgagtacagtagctatgcacgacccggacccgttggatctggatctgattttggccggaaacctaattctggatatggagggagaacggaggttgagtatggccggaaaactgaatcggagcatggatctggctatggtggaagaattgagagcgattacgtgaagcctagctatggcggtcacgaggatgatggtgacgatggtcacaaaaaacatagtggtaaggattatgatgatggagatgagaagagtaagaagaaggagaaggagaagaagaaggataagaagaaagatggtaataactctgaagatgatgagtttaagaagaagaagaagaaagagcagtacaaggagcatcatgatgatgatgattatgatgagaagaagaagaagaagaaagactataatgatgatgatgagaagaagaagaagaagcattataatgatgatgatgatgagaagaagaagaagcataattacaatgatgatgatgatgagaagaagaagaagaaggagtatcatgatgatgaggataagaagaagaagaagcactatgataatgatgatgatgagaagaagaagaagaaggatcatcgtgatgatgatgatgagaagaagaagaagaaggataaccaccacaagggacatgactaaaaaaggtttatgatttgggatttgcattcttatgactaaataagtaacaacaacttaagcacacttctgctctctacgtttatgtcaattgttgttttgtttttgcttcgtgtttttgctgctaacttcaatgagatcttcataagtcatatgtaatatgtttagtgtacgtgttttctagtgatgtcgtttggtct

SEQ ID NO: 6315 - protein, 315 aa, Arabidopsis thaliana
SSFLERSKKRIRKKKKKTPKTMPYYTNDDNDVDDFTEYDPMPYSGGYDITVTYGRSIPPSDETCYPLSSLSGDAFEYQRPNFSSNHDSSAYDDQALKTEYSSYARPGPVGSGSDFGRKPNSGYGGRTEVEYGRKTESEHGSGYGGRIESDYVKPSYGGHEDDGDDGHKKHSGKDYDDGDEKSKKKEKEKKKDKKKDGNNSEDDEFKKKKKKEQYKEHHDDDDYDEKKKKKKDYNDDDEKKKKKHYNDDDDEKKKKHNYNDDDDEKKKKKEYHDDEDKKKKKHYDNDDDEKKKKKDHRDDDDEKKKKKDNHHKGHD

SEQ ID NO: 6316 - protein, 294 aa, Arabidopsis thaliana
MPYYTNDDNDVDDFTEYDPMPYSGGYDITVTYGRSIPPSDETCYPLSSLSGDAFEYQRPNFSSNHDSSAYDDQALKTEYSSYARPGPVGSGSDFGRKPNSGYGGRTEVEYGRKTESEHGSGYGGRIESDYVKPSYGGHEDDGDDGHKKHSGKDYDDGDEKSKKKEKEKKKDKKKDGNNSEDDEFKKKKKKEQYKEHHDDDDYDEKKKKKKDYNDDDEKKKKKHYNDDDDEKKKKHNYNDDDDEKKKKKEYHDDEDKKKKKHYDNDDDEKKKKKDHRDDDDEKKKKKDNHHKGHD

SEQ ID NO: 6317 - protein, 275 aa, Arabidopsis thaliana
MPYSGGYDITVTYGRSIPPSDETCYPLSSLSGDAFEYQRPNFSSNHDSSAYDDQALKTEYSSYARPGPVGSGSDFGRKPNSGYGGRTEVEYGRKTESEHGSGYGGRIESDYVKPSYGGHEDDGDDGHKKHSGKDYDDGDEKSKKKEKEKKKDKKKDGNNSEDDEFKKKKKKEQYKEHHDDDDYDEKKKKKKDYNDDDEKKKKKHYNDDDDEKKKKHNYNDDDDEKKKKKEYHDDEDKKKKKHYDNDDDEKKKKKDHRDDDDEKKKKKDNHHKGHD

SEQ ID NO: 6318 - DNA, 2217 bp, Arabidopsis thaliana
gcaaccccataaacaattcctcaagagccgttgacaaaccaaaaaacttgttaattaaaagtcaatatttgctctagaccctccaattttccgtaaaaatctccataaaagtctctgtccctccttgccaaccaaaaactacaaacacacatcatccttcgactatcttattcatagctatcaccacccaaaaaagaaatcaccctaatcaaaaaaaaaaaggcaaggagagattttatcattattctattttcatattttttgaaaaaactcaagcaattgacttttgtgataaagatttgaagaaagagatgaggaacgaaacgggtggtaccatggtcgttgatctccaaaccgatccatataacaacattcacagtcgccataatctgagctacgaccttagcgagggtcccaaacctaggcctaaatttggtaatatctcgaaaactgaccacgacgagatattccctcccgacgatcccatcattatcaacagcaacgtgactcaccagcggtttagcagcgtctcggcctcgaccatgagcagcggtccggccagcggagaaggttctccttgcgtaatgtcgccttgggcccgcgtgtcgcctccttggggtgcagatttcaacgaagacaatgtcctcgagaccaacggtctcattggatctattgttagaaaagaagggcatatatactcgctagccgcttctggtgaccttctctacacgggctcggattcgaagaacattagggtttggaagaatttgaaggaacacgctgggtttaaatccagtagtgggctaatcaaggccattgtgatattcggagaccgaatctttaccggccatcaagacgggaagatccggatttggaaggtttcgaagagaaaaccaggaaaacataagcgggttggaacattgccaacatttaaatcaatggtcaagagctccgtcaaccctaagcatttcatggaggtacgccgcaacagaaactctgtgaagacgaagcataacgacgcagtgtctagtcttagcttggacgtggagcttggattgttgtactcgagttcttgggacacgacaatcaaagtgtggagaatcgcggattcaaaatgtttggaatcgatacatgcacacgatgacgcgataaactctgtaatgtccggttttgatgacttggtgttcacgggatccgcagatggtactgttaaagtgtggaaacgtgagttgcaaggcaaaggaacaaaacatacgttagctcaagttttgctcaagcaagaaaatgcggtcacggcgttggccgtaaaatcacaatcttccatcgtatattgcggttcttcggacgggctagtgaactattgggagcgttcaaagcggtcattcacaggcggaatactcaaaggccacaaatccgcagtgctttgtctaggtatagcggggaacttgctgttgagtggttccgccgacaagaacatatgcgtatggaggcgggacccgtctgacaagtcccatcagtgtctctctgttttgacgggacacatggggccggtcaagtgcctagccgtggaggaggaacgggcttgtcatcagggagcaaaagcctcagtggccgagggagaccggaagtggattatatacagcggaagtttggacaagtcggtgaaagtgtggcgcgtgtcggagagaatggccacgtggaaggagatggacgagccagcagcatcttcagagcggaagagctcttcgtctccgcatgaaggaagtggcgcgtggagttcacgcaatgtggaaaaataagagtggaggagcatagtgtgattatttacgagagtgtcacgtcgtcacgagagccatattcacgccgggaaagagacagaggattgatttcatttttatgactaagtcaacggagaggtttgtgccacgctagctggtgtgagaatcaaagtcgggttaatggttttcacgtaatgagttttttggttatttttttctttaaaaaaaatgtttgaaacgaaattgaattatttatttattttccataaatttgtaagataacaagaacaaagaccgaatcaaacatatatatttgttttctttagtggtctatgtcgtggttgcaactttataacttgggaattttggatgagtcgttttcctcttcattagaattagtctttctatattattataatataggatgttgatatttttc

SEQ ID NO: 6319 - protein, 495 aa, Arabidopsis thaliana
MRNETGGTMVVDLQTDPYNNIHSRHNLSYDLSEGPKPRPKFGNISKTDHDEIFPPDDPIIINSNVTHQRFSSVSASTMSSGPASGEGSPCVMSPWARVSPPWGADFNEDNVLETNGLIGSIVRKEGHIYSLAASGDLLYTGSDSKNIRVWKNLKEHAGFKSSSGLIKAIVIFGDRIFTGHQDGKIRIWKVSKRKPGKHKRVGTLPTFKSMVKSSVNPKHFMEVRRNRNSVKTKHNDAVSSLSLDVELGLLYSSSWDTTIKVWRIADSKCLESIHAHDDAINSVMSGFDDLVFTGSADGTVKVWKRELQGKGTKHTLAQVLLKQENAVTALAVKSQSSIVYCGSSDGLVNYWERSKRSFTGGILKGHKSAVLCLGIAGNLLLSGSADKNICVWRRDPSDKSHQCLSVLTGHMGPVKCLAVEEERACHQGAKASVAEGDRKWIIYSGSLDKSVKVWRVSERMATWKEMDEPAASSERKSSSSPHEGSGAWSSRNVEK

SEQ ID NO: 6320 - protein, 487 aa, Arabidopsis thaliana
MVVDLQTDPYNNIHSRHNLSYDLSEGPKPRPKFGNISKTDHDEIFPPDDPIIINSNVTHQRFSSVSASTMSSGPASGEGSPCVMSPWARVSPPWGADFNEDNVLETNGLIGSIVRKEGHIYSLAASGDLLYTGSDSKNIRVWKNLKEHAGFKSSSGLIKAIVIFGDRIFTGHQDGKIRIWKVSKRKPGKHKRVGTLPTFKSMVKSSVNPKHFMEVRRNRNSVKTKHNDAVSSLSLDVELGLLYSSSWDTTIKVWRIADSKCLESIHAHDDAINSVMSGFDDLVFTGSADGTVKVWKRELQGKGTKHTLAQVLLKQENAVTALAVKSQSSIVYCGSSDGLVNYWERSKRSFTGGILKGHKSAVLCLGIAGNLLLSGSADKNICVWRRDPSDKSHQCLSVLTGHMGPVKCLAVEEERACHQGAKASVAEGDRKWIIYSGSLDKSVKVWRVSERMATWKEMDEPAASSERKSSSSPHEGSGAWSSRNVEK

SEQ ID NO: 6321 - protein, 418 aa, Arabidopsis thaliana
MSSGPASGEGSPCVMSPWARVSPPWGADFNEDNVLETNGLIGSIVRKEGHIYSLAASGDLLYTGSDSKNIRVWKNLKEHAGFKSSSGLIKAIVIFGDRIFTGHQDGKIRIWKVSKRKPGKHKRVGTLPTFKSMVKSSVNPKHFMEVRRNRNSVKTKHNDAVSSLSLDVELGLLYSSSWDTTIKVWRIADSKCLESIHAHDDAINSVMSGFDDLVFTGSADGTVKVWKRELQGKGTKHTLAQVLLKQENAVTALAVKSQSSIVYCGSSDGLVNYWERSKRSFTGGILKGHKSAVLCLGIAGNLLLSGSADKNICVWRRDPSDKSHQCLSVLTGHMGPVKCLAVEEERACHQGAKASVAEGDRKWIIYSGSLDKSVKVWRVSERMATWKEMDEPAASSERKSSSSPHEGSGAWSSRNVEK

SEQ ID NO: 6322 - DNA, 1341 bp, Arabidopsis thaliana
gttagcggggtcggttacgaagaaaggaagctcttttacattctcgtggcaacgatctcatctacgtgtcacgaaaactcaaatctcttactccggcgaacgatgtaccgaacggcggcgaagcgtcttctcgccggtggtggaatcactaccacccgtctcctccgattaccgaagctcaggtctacaatcatcccttcctcttacacttccggtctctgcacttcgtcgattggtggtaatactgaatcaccaatgggtaagcagtctgtgaaccctaatcaatcgggtccaacggcgtcgtcttctacgggtacaggggaaggacaacgccgacatgagagcagaaagccgagagctgagttccaagaagagcaggctcgtgttctctctgcgtctctccgtcacgtgccgaggttaggttggacggaagaagcgatgatggctggttcaagggatgttggtgtgtctccttcgattgttgggtctttctccaggaaagaagctgctcttgttgagttcttcatggatgaatgccttcaattgcttatggatagaatagactctggattggatttgcaaaatctgattccaagtgaacgtatctccaagctcattagaattcgtctagaatgcaagtcccttacatgtcaaaatggccccaagctcttagcattcaggcgcatcctctgaatgtcccaacgagttttaagcaacgggcaatgttagttgatgagatatggcatgctgttggagatggagcctcggatttagattggtatgtcaagcgtactattcttggaggcgtttactcaactaccgagatttacatgctcaccgatgactccttagaacatcgcgatacatgggcattcttggatgacagagtcaaagatgcttttgatcttaagaagagcatacaagaggccaagtattttgcagaagacataggagctggagttgggaagtcggttcaaggactgatgaatggagttatgcagacaatgtccagaagaagtggtggctctgcgttttgaaaagatcacacctttacacatgattctgcttcacactccttacggattctccaatattttgagttgggatttactataataatgagattagacttatatgagttgaagtgaaggcatatgaactaatatattatcttctacgtttgaataaaccattgagtttgaaatctttaatttgtaaataaggatgaaacctgttctgtgtttggttgttctgtgcgtaaacagagttggaaacttgtaattttggtctacttcaatttggtagggtgtttattgttcgaaaacaaacatatgggcactt

SEQ ID NO: 6323 - protein, 230 aa, Arabidopsis thaliana
VSGVGYEERKLFYILVATISSTCHENSNLLLRRTMYRTAAKRLLAGGGITTTRLLRLPKLRSTIIPSSYTSGLCTSSIGGNTESPMGKQSVNPNQSGPTASSSTGTGEGQRRHESRKPRAEFQEEQARVLSASLRHVPRLGWTEEAMMAGSRDVGVSPSIVGSFSRKEAALVEFFMDECLQLLMDRIDSGLDLQNLIPSERISKLIRIRLECKSLTCQNGPKLLAFRRIL

SEQ ID NO: 6324 - protein, 196 aa, Arabidopsis thaliana
MYRTAAKRLLAGGGITTTRLLRLPKLRSTIIPSSYTSGLCTSSIGGNTESPMGKQSVNPNQSGPTASSSTGTGEGQRRHESRKPRAEFQEEQARVLSASLRHVPRLGWTEEAMMAGSRDVGVSPSIVGSFSRKEAALVEFFMDECLQLLMDRIDSGLDLQNLIPSERISKLIRIRLECKSLTCQNGPKLLAFRRIL

SEQ ID NO: 6325 - protein, 145 aa, Arabidopsis thaliana
MGKQSVNPNQSGPTASSSTGTGEGQRRHESRKPRAEFQEEQARVLSASLRHVPRLGWTEEAMMAGSRDVGVSPSIVGSFSRKEAALVEFFMDECLQLLMDRIDSGLDLQNLIPSERISKLIRIRLECKSLTCQNGPKLLAFRRIL

SEQ ID NO: 6326 - DNA, 1371 bp, Arabidopsis thaliana
aagctcaaagctcaagccgcttctatctctctacatttctctttctgcaatggcgagattagtgcgtgtggctagatcctcctccctctttggctttggtaaccgtttctactctacttcagccgaagctagccacgcgtcgtcgccttcgccgtttcttcacggcggcggagctagcagggttgctccgaaagatagaaatgttcagtgggtgtttttgggatgtcctggtgttggaaaaggaacttacgctagtagactatcaacccttctcggcgttcctcacatcgccaccggcgatctcgtccgtgaagagcttgcatcttctggacctctctctcaaaagctatcggagattgtaaatcagggaaaattggtttctgatgagatcattgtagacttattgtccaaaagacttgaggctggtgaagctagaggtgaatcagggtttatccttgatggctttcctcgtaccatgagacaagctgaaatactgggagatgtaactgacatcgatttggtggtgaatttgaagcttcctgaggaagttttggttgacaaatgccttggaaggagaacatgtagtcaatgtggcaagggttttaatgtagctcacatcaacttaaagggtgagaatggaagacctggaattagtatggatccacttctccctccacatcaatgtatgtcaaagcttgtcactcgagctgatgatactgaagaggtggtgaaagcaaggcttcgtatatacaatgaaacgagccagcctcttgaagaatactaccgtaccaagggaaagcttatggagtttgacttacctggaggcatcccagagtcatggccaaggctattggaagctttaaggcttgacgattacgaggagaaacagtctgtcgcagcataagttcactatcaaatcccggtatttaaaattctttgcatgtcgaatacatatgcgtaatcaattttgtgttggaaataaaagtaaaaagaaaaccttagattgtttttcacctcaatagaaataatcatacacacttgcgcaaactattatttttccaccagccggggattttggctccatgagagaaatatgatgtatcatgattgtttgagattgctagtgacattacaggaatgtatcaatacttctacaccacttgttatgcattgagtttaatcgttatgctcttgtgatatgttttttttggaaaatgtgatgaatgatgatattgcggctggccgagctggctggttaaagaactcaaccagacagtaaagtaaaacagccgcatagattaaacgggaacttataaccagctcttgactgtcctagcattggcggtgcgggatagaatcgttccttacatc

SEQ ID NO: 6327 - protein, 300 aa, Arabidopsis thaliana
SSKLKPLLSLYISLSAMARLVRVARSSSLFGFGNRFYSTSAEASHASSPSPFLHGGGASRVAPKDRNVQWVFLGCPGVGKGTYASRLSTLLGVPHIATGDLVREELASSGPLSQKLSEIVNQGKLVSDEIIVDLLSKRLEAGEARGESGFILDGFPRTMRQAEILGDVTDIDLVVNLKLPEEVLVDKCLGRRTCSQCGKGFNVAHINLKGENGRPGISMDPLLPPHQCMSKLVTRADDTEEVVKARLRIYNETSQPLEEYYRTKGKLMEFDLPGGIPESWPRLLEALRLDDYEEKQSVAA

SEQ ID NO: 6328 - protein, 284 aa, Arabidopsis thaliana
MARLVRVARSSSLFGFGNRFYSTSAEASHASSPSPFLHGGGASRVAPKDRNVQWVFLGCPGVGKGTYASRLSTLLGVPHIATGDLVREELASSGPLSQKLSEIVNQGKLVSDEIIVDLLSKRLEAGEARGESGFILDGFPRTMRQAEILGDVTDIDLVVNLKLPEEVLVDKCLGRRTCSQCGKGFNVAHINLKGENGRPGISMDPLLPPHQCMSKLVTRADDTEEVVKARLRIYNETSQPLEEYYRTKGKLMEFDLPGGIPESWPRLLEALRLDDYEEKQSVAA

SEQ ID NO: 6329 - DNA, 1087 bp, Arabidopsis thaliana
aaaagatactataatagtagagatcaaagacctgagcaaaaactgaaaaaaaaaaaaaaaaaaaaagacttctcctcaaaaatggcgtttacactaggtggaagagctcgtcgtctagtctctgcaacatcaattcatcaaaatggttgcttacacaaactgcaacaaattggatcggatcggtttcagcttggtgaagcaaaagcaataagattactacccaggagaacaaacatggttcaagaattaggaatcagggaagaatttatggatccaaacagagaaacagagacaagttatgattttcttgatgaaatgagacacagatttctgaaattcaagagacaaaagtatctaccggagatagaaaagtttaaagctttggccatagctcaatcaccaaaggtaatggtgataggatgtgcagattcaagggtatgtccatcttatgtactaggatttcaacctggtgaagcttttactatccgaaatgtcgccaatctcgttaccccggttcagaatggaccaacagaaaccaactcggctcttgagtttgcggtcaccactcttcaggttgagaacattatagttatgggtcatagcaattgtggaggaattgcagcacttatgagtcatcaaaaccaccaagggcaacactctagtttagtagaaaggtgggttatgaatgggaaagccgctaagttaagaacacaattagcttcatcacatttatcctttgatgaacaatgcagaaactgtgagaaggaatctataaaggattctgtgatgaatttgataacttattcatggataagagatagagtaaagagaggtgaagtcaagattcatggatgttattacaatttgtcagattgtagtcttgagaagtggagattaagttcagacaagactaactatggattctatatttcagacagagagatatggagttgagtaaatattgaacaatcctcatttctaatattcagatgtatctttgtacatatgaaatgatatttacacaattggaaaaaaagaaagaaaaaaaagtaatattgtaataacggaataaaaggtgaattggtcc

SEQ ID NO: 6330 - protein, 317 aa, Arabidopsis thaliana
KRYYNSRDQRPEQKLKKKKKKKDFSSKMAFTLGGRARRLVSATSIHQNGCLHKLQQIGSDRFQLGEAKAIRLLPRRTNMVQELGIREEFMDPNRETETSYDFLDEMRHRFLKFKRQKYLPEIEKFKALAIAQSPKVMVIGCADSRVCPSYVLGFQPGEAFTIRNVANLVTPVQNGPTETNSALEFAVTTLQVENIIVMGHSNCGGIAALMSHQNHQGQHSSLVERWVMNGKAAKLRTQLASSHLSFDEQCRNCEKESIKDSVMNLITYSWIRDRVKRGEVKIHGCYYNLSDCSLEKWRLSSDKTNYGFYISDREIWS

SEQ ID NO: 6331 - protein, 290 aa, Arabidopsis thaliana
MAFTLGGRARRLVSATSIHQNGCLHKLQQIGSDRFQLGEAKAIRLLPRRTNMVQELGIREEFMDPNRETETSYDFLDEMRHRFLKFKRQKYLPEIEKFKALAIAQSPKVMVIGCADSRVCPSYVLGFQPGEAFTIRNVANLVTPVQNGPTETNSALEFAVTTLQVENIIVMGHSNCGGIAALMSHQNHQGQHSSLVERWVMNGKAAKLRTQLASSHLSFDEQCRNCEKESIKDSVMNLITYSWIRDRVKRGEVKIHGCYYNLSDCSLEKWRLSSDKTNYGFYISDREIWS

SEQ ID NO: 6332 - protein, 239 aa, Arabidopsis thaliana
MVQELGIREEFMDPNRETETSYDFLDEMRHRFLKFKRQKYLPEIEKFKALAIAQSPKVMVIGCADSRVCPSYVLGFQPGEAFTIRNVANLVTPVQNGPTETNSALEFAVTTLQVENIIVMGHSNCGGIAALMSHQNHQGQHSSLVERWVMNGKAAKLRTQLASSHLSFDEQCRNCEKESIKDSVMNLITYSWIRDRVKRGEVKIHGCYYNLSDCSLEKWRLSSDKTNYGFYISDREIWS

SEQ ID NO: 6333 - DNA, 647 bp, Arabidopsis thaliana
aaataacttcttctcttccttcttcattcctttaatctatttttctcgatcttggctaatccatcatgactgtcaagaaagttgagatcaaggtggatataaactgtggaaaatgcaacagcgcaatcatggaagcagtcacagagatagaaggtgtgaatcatatttcattagatgaaggaaatagtatacttaccgtggtggggacaatggatccggtctgcgtagcaacaaggctgaaaaagattaaacagaaacctgtgatcattagcgttggaccaccaccaaaacctcctgagccaccaaagcctccagagcctgaaaaaccaaagcctccaccagcacctgaaccaccaaagcatgtatgcaagccaccttactgcaacagttgtgatgttgtgtctgttactacctatgaaagtggaagcggctgcaccattctttgagtcatatatcgcgtaccatagccttcatgttaagtcctgtatttagccaatactaattcatcatgttctcatgcttttttgtttatttctttttctcaaatatgaatctctgttgtttgtccctcccctgtttataattagtcgcttctttgacacaagaagtctcatgagttcatgctaaagaaaataaaagttcaaatt

SEQ ID NO: 6334 - protein, 105 aa, Arabidopsis thaliana
MEAVTEIEGVNHISLDEGNSILTVVGTMDPVCVATRLKKIKQKPVIISVGPPPKPPEPPKPPEPEKPKPPPAPEPPKHVCKPPYCNSCDVVSVTTYESGSGCTIL

SEQ ID NO: 6335 - protein, 78 aa, Arabidopsis thaliana
MDPVCVATRLKKIKQKPVIISVGPPPKPPEPPKPPEPEKPKPPPAPEPPKHVCKPPYCNSCDVVSVTTYESGSGCTIL

SEQ ID NO: 6336 - protein, 126 aa, Arabidopsis thaliana
MTVKKVEIKVDINCGKCNSAIMEAVTEIEGVNHISLDEGNSILTVVGTMDPVCVATRLKKIKQKPVIISVGPPPKPPEPPKPPEPEKPKPPPAPEPPKHVCKPPYCNSCDVVSVTTYESGSGCTIL

SEQ ID NO: 6337 - DNA, 1190 bp, Arabidopsis thaliana
ctctttagcaaaaaatctcagaactcaaaaaaaaaacatccaacaccaaagacaatggagatgagtttgcgtctcgcttcatcttcaacctcaaacccaatttgtctactaaaccctggaaaaaaccttaatttcccaatccgaaaccatagaatccctaaaacttcgaaacccttttgcgttaggtcttcaatgagcttgtctaaaccacccagacaaaccttatctagtaactgggatgtatctagcttctccattgattccgttgctcaatctccttcaagactcccaagtttcgaagaactcgataccaccaacatgttgctccgtcaaagaatcgtctttttgggttctcaggttgatgatatgacggcggatttggttataagtcagctattgttactagatgctgaggactcagaaagagacattacgctttttatcaattcacccggtggatctattactgctgggatgggaatatatgatgcaatgaaacaatgtaaggcggatgtatctactgtttgcttagggttagctgcatctatgggtgcgtttcttcttgcttctggttcaaaagggaaacggtattgtatgcctaactctaaagttatgatccatcagccacttggtactgctggaggcaaagcaacggaaatgagcatacgtataagagaaatgatgtaccacaagattaaacttaacaaaatcttctctagaatcactgggaagcctgaatcagagatcgaaagtgacacagaccgtgataacttcttgaatccatgggaggcgaaagaatatggtttgatcgacgctgtaatcgatgatgggaaaccgggactaatcgctccaattggagatggtactcctcctcctaaaaccaaagtctgggatctttggaaagtcgaaggaaccaagaaagacaacactaacttgccatctgagcgctccatgacacagaatggttatgccgccattgaatagaactgttgttgcagcgtttacgccttttatatgttattctggtggtacctgtaaccatataacgttgcatttcctgtgtttgtaccatttctctgatagatttttggaataatttgaaggcaaaagatagattatttgttgtagaagaagctacaaaatttaatgattaaattgaatcatcaagccatgagaagctttgtgttttc

SEQ ID NO: 6338 - protein, 327 aa, Arabidopsis thaliana
LFSKKSQNSKKKHPTPKTMEMSLRLASSSTSNPICLLNPGKNLNFPIRNHRIPKTSKPFCVRSSMSLSKPPRQTLSSNWDVSSFSIDSVAQSPSRLPSFEELDTTNMLLRQRIVFLGSQVDDMTADLVISQLLLLDAEDSERDITLFINSPGGSITAGMGIYDAMKQCKADVSTVCLGLAASMGAFLLASGSKGKRYCMPNSKVMIHQPLGTAGGKATEMSIRIREMMYHKIKLNKIFSRITGKPESEIESDTDRDNFLNPWEAKEYGLIDAVIDDGKPGLIAPIGDGTPPPKTKVWDLWKVEGTKKDNTNLPSERSMTQNGYAAIE

SEQ ID NO: 6339 - protein, 309 aa, Arabidopsis thaliana
MEMSLRLASSSTSNPICLLNPGKNLNFPIRNHRIPKTSKPFCVRSSMSLSKPPRQTLSSNWDVSSFSIDSVAQSPSRLPSFEELDTTNMLLRQRIVFLGSQVDDMTADLVISQLLLLDAEDSERDITLFINSPGGSITAGMGIYDAMKQCKADVSTVCLGLAASMGAFLLASGSKGKRYCMPNSKVMIHQPLGTAGGKATEMSIRIREMMYHKIKLNKIFSRITGKPESEIESDTDRDNFLNPWEAKEYGLIDAVIDDGKPGLIAPIGDGTPPPKTKVWDLWKVEGTKKDNTNLPSERSMTQNGYAAIE

SEQ ID NO: 6340 - protein, 307 aa, Arabidopsis thaliana
MSLRLASSSTSNPICLLNPGKNLNFPIRNHRIPKTSKPFCVRSSMSLSKPPRQTLSSNWDVSSFSIDSVAQSPSRLPSFEELDTTNMLLRQRIVFLGSQVDDMTADLVISQLLLLDAEDSERDITLFINSPGGSITAGMGIYDAMKQCKADVSTVCLGLAASMGAFLLASGSKGKRYCMPNSKVMIHQPLGTAGGKATEMSIRIREMMYHKIKLNKIFSRITGKPESEIESDTDRDNFLNPWEAKEYGLIDAVIDDGKPGLIAPIGDGTPPPKTKVWDLWKVEGTKKDNTNLPSERSMTQNGYAAIE

SEQ ID NO: 6341 - DNA, 1578 bp, Arabidopsis thaliana
gcgatttgttaataaaactagaaattgcggtgaattaacttcattccacgttttttcattttctccctcaaaagtctctgttttttttcctttttccggcgaagctctatttagcttgattccggcgtttaacacgcgttttaatcgaaacagacatttgagatcgaattaattttgtagcgggctgtgtctttattatagatggagagagattttctcgggttgggttcgaaaaattctccgatcactgtcaaggaggaaaccagcgaaagctctagagattcagctcccaacagaggaatgaactggtctttctcaaacaaagtatcagcttcttcttctcagtttctatccttcaggccaactcaagaagatagacatagaaagtctggaaattatcatcttcctcactctggttccttcatgccatcatcagtagctgatgtttatgattcaacccgcaaagctccttacagttctgtacagggagtgaggatgttccctaattccaatcaacacgaagaaactaacgcagtttccatgtcgatgccgggtttccagtctcatcattatgcaccaggaggaagaagcttcatgaacaataacaataactcacaacctttggtaggagttcctatcatggcacctccaatttcaatccttcctcctccaggttccattgtagggactactgatattagatcttcttccaagccaataggttcacctgcgcagttgacgatcttttatgccggttcagtttgtgtttacgatgacatatctcctgaaaaggcaaaggcgataatgttgctagctgggaacggttcctctatgcctcaagtcttttcgccgcctcaaactcatcaacaagtggtccatcatactcgtgcctctgtcgattcttcagctatgcctcctagcttcatgcctacaatatcttatcttagccctgaagctggaagtagcacaaacggactcggagccacaaaagcgacaagaggcttgacgtcaacatatcacaacaaccaagctaatggatccaatattaactgcccagtaccagtttcttgttctaccaatgtaatggctccaacagtggcattacctctggctcgcaaagcatccctggctaggtttttagagaaacgcaaagaaagggtcacgagcgtatccccatattgcttagacaagaagtcatcgacagattgtcgcagatcaatgtctgaatgcattagttcttctctcagctctgcaacctaatttcatctacagtaagaaggttgctttagaccactccacatccatatttgcatttcaatggcggtcttttcaatgtctcagttaatttttcctcactcgccacactgagtttctccttagctttatatatacgatagtgtatactttgtttacatgttttttggtggaatggaacttatgagagcatatcagatatgtacttgggaaaattagtagaaactgtttgtttctttttttttaactctgttcttttgtatatatcactgaagctcgcatatgtataattcatgtaatggaattgcatcgcttctgtttccc

SEQ ID NO: 6342 - protein, 352 aa, Arabidopsis thaliana
MERDFLGLGSKNSPITVKEETSESSRDSAPNRGMNWSFSNKVSASSSQFLSFRPTQEDRHRKSGNYHLPHSGSFMPSSVADVYDSTRKAPYSSVQGVRMFPNSNQHEETNAVSMSMPGFQSHHYAPGGRSFMNNNNNSQPLVGVPIMAPPISILPPPGSIVGTTDIRSSSKPIGSPAQLTIFYAGSVCVYDDISPEKAKAIMLLAGNGSSMPQVFSPPQTHQQVVHHTRASVDSSAMPPSFMPTISYLSPEAGSSTNGLGATKATRGLTSTYHNNQANGSNINCPVPVSCSTNVMAPTVALPLARKASLARFLEKRKERVTSVSPYCLDKKSSTDCRRSMSECISSSLSSAT

SEQ ID NO: 6343 - protein, 319 aa, Arabidopsis thaliana
MNWSFSNKVSASSSQFLSFRPTQEDRHRKSGNYHLPHSGSFMPSSVADVYDSTRKAPYSSVQGVRMFPNSNQHEETNAVSMSMPGFQSHHYAPGGRSFMNNNNNSQPLVGVPIMAPPISILPPPGSIVGTTDIRSSSKPIGSPAQLTIFYAGSVCVYDDISPEKAKAIMLLAGNGSSMPQVFSPPQTHQQVVHHTRASVDSSAMPPSFMPTISYLSPEAGSSTNGLGATKATRGLTSTYHNNQANGSNINCPVPVSCSTNVMAPTVALPLARKASLARFLEKRKERVTSVSPYCLDKKSSTDCRRSMSECISSSLSSAT

SEQ ID NO: 6344 - protein, 278 aa, Arabidopsis thaliana
MPSSVADVYDSTRKAPYSSVQGVRMFPNSNQHEETNAVSMSMPGFQSHHYAPGGRSFMNNNNNSQPLVGVPIMAPPISILPPPGSIVGTTDIRSSSKPIGSPAQLTIFYAGSVCVYDDISPEKAKAIMLLAGNGSSMPQVFSPPQTHQQVVHHTRASVDSSAMPPSFMPTISYLSPEAGSSTNGLGATKATRGLTSTYHNNQANGSNINCPVPVSCSTNVMAPTVALPLARKASLARFLEKRKERVTSVSPYCLDKKSSTDCRRSMSECISSSLSSAT

SEQ ID NO: 6345 - DNA, 1373 bp, Arabidopsis thaliana
ctatcacattttgcagtttcaacaaataaatatcccaaaatttagtggcggcgagagggaaaccaaaattcgcgagagagaagtatgtcgaagacgctggtgcaaccggtagggcaaaagaggttgactaatgttgcagtggttcgtctcaaaaagcaaggcaatcgcttcgagatcgcttgttacaagaataaggtcctttcatggcggtctggcgtggagaaggatatagatgaagtgctacagtcgcatactgtttattcaaatgtttcgaaaggagttcttgcaaaatcgaaagacttgatgaagtcgtttggatcagatgatcatacgaaaatatgcatcgatattttggagaaaggagagcttcaagttgctggaaaagaaagagaatcacagttctcaagccagtttcgggatatagcaacgattgttatgcagaaaactatcaaccctgaaacacaacgaccttataccatcagcatggtagagcgcctaatgcatgaaattcattttgctgttgatcctcatagtaattccaagaagcaggcacttgatgtcatccgtgagctgcaaaagcacttccctataaagcgttctccaatgagactgcgtcttactgttcctgttcaaaatttcccctcgcttctggagaagctaaaagaatgggatggtagtgttgtctccaaagacgaatctggaacacagatgtccactgtctgcgagatggaaccgggcctattccgagagtgtgattcccatgtgaggagtatccagggaagactagaaatactcgctgtatcagttcatgcagaaggtgacacaagcatggatcattacgatgagcatgatgatatggcattgcaaacccacaagccgttgttacctgctgagactgagactaaggatttgaccgatcccgtcgttgaacttagcaagaaactgcagaagcaagagataagtactacagataacataaagcaagaaggtggagaagaaaagaaggggaccaagtgcagcacttgcaacacgttcgttggagaggctaagcaatacagagagcactgtaagagtgattggcacaaacacaaccttaagcgtaagactcggaaactccctcctattagtgctgacgaatgcatgtctgagattgacatggacgactctagagcagatttgaaagactactctttctgaaactacaattttctccttttgtgcttttaattttgtcaatgtgttaaatctcgtagtcatatgtgagtatgaatacacaaaacttgtggaatgaaattttgcgcaaactttaagagtaaaaacttgtgtttaagagacaagcttggatatttggtatttgattaataactgtgacc

SEQ ID NO: 6346 - protein, 370 aa, Arabidopsis thaliana
MSKTLVQPVGQKRLTNVAVVRLKKQGNRFEIACYKNKVLSWRSGVEKDIDEVLQSHTVYSNVSKGVLAKSKDLMKSFGSDDHTKICIDILEKGELQVAGKERESQFSSQFRDIATIVMQKTINPETQRPYTISMVERLMHEIHFAVDPHSNSKKQALDVIRELQKHFPIKRSPMRLRLTVPVQNFPSLLEKLKEWDGSVVSKDESGTQMSTVCEMEPGLFRECDSHVRSIQGRLEILAVSVHAEGDTSMDHYDEHDDMALQTHKPLLPAETETKDLTDPVVELSKKLQKQEISTTDNIKQEGGEEKKGTKCSTCNTFVGEAKQYREHCKSDWHKHNLKRKTRKLPPISADECMSEIDMDDSRADLKDYSF

SEQ ID NO: 6347 - protein, 297 aa, Arabidopsis thaliana
MKSFGSDDHTKICIDILEKGELQVAGKERESQFSSQFRDIATIVMQKTINPETQRPYTISMVERLMHEIHFAVDPHSNSKKQALDVIRELQKHFPIKRSPMRLRLTVPVQNFPSLLEKLKEWDGSVVSKDESGTQMSTVCEMEPGLFRECDSHVRSIQGRLEILAVSVHAEGDTSMDHYDEHDDMALQTHKPLLPAETETKDLTDPVVELSKKLQKQEISTTDNIKQEGGEEKKGTKCSTCNTFVGEAKQYREHCKSDWHKHNLKRKTRKLPPISADECMSEIDMDDSRADLKDYSF

SEQ ID NO: 6348 - protein, 253 aa, Arabidopsis thaliana
MQKTINPETQRPYTISMVERLMHEIHFAVDPHSNSKKQALDVIRELQKHFPIKRSPMRLRLTVPVQNFPSLLEKLKEWDGSVVSKDESGTQMSTVCEMEPGLFRECDSHVRSIQGRLEILAVSVHAEGDTSMDHYDEHDDMALQTHKPLLPAETETKDLTDPVVELSKKLQKQEISTTDNIKQEGGEEKKGTKCSTCNTFVGEAKQYREHCKSDWHKHNLKRKTRKLPPISADECMSEIDMDDSRADLKDYSF

SEQ ID NO: 6349 - DNA, 1242 bp, Arabidopsis thaliana
gactacgaaatagaatcaagttgtgttctctgtgatggacattgtgttagtggtaatcaaatccggtgaaaatggagcggagccgagtgaccagagaagcaccgaccggaaccaggatcctgcttgcttcactctctgcgatggttgcagagtcagttacgtttccgattgatctcacaaagactagaatgcagctccatggttcgggatccgcttctggtgcgcatcggattggcgctttcggagtcgtatcggagattgcgagaaaggaaggagtgattggtctctacaaaggtctatctccggcgattatcagacacctgttctacacgcctatcagaatcattggatacgagaatttgaaaggactcatcgtcagatctgaaactaacaatagcgagtctcttcctctcgccacaaaggctctcgtcggaggattttctggtgttatagctcagaaatgcaggtagtggctagtccagctgatttggtcaaagtgagaatgcaagcagatggtagattggtgagccaaggcctgaaaccgaggtactcgggaccaatcgaggcttttaccaaaatcctacaatcagaaggagtaaaagggttatggaaaggtgttcttccaaacatccagagagcatttctagtgaatatgggagaactagcttgctatgatcacgccaaacactttgtcatcgataagaagattgctgaggataacatttttgcgcacactcttgcttctataatgtcgggtcttgcttcgacaagtttgagttgtccagctgatgtggtgaagacgaggatgatgaaccagggtgaaaatgctgtgtacagaaattcttacgactgtttggtgaagacggttaagtttgaaggaataagagctttgtggaaaggtttcttcccgacatgggcaaggcttggaccgtggcagttcgtgttttgggtctcctatgagaagtttagactgctggcaggaatctcttccttctagacctgagaaactggaaaagcaaatttgagatttgtgttctttagttcttacttgttagttgttacacattttgtaagaaccttgagaagtagcatcagtttctgattaacgcgagaagagttatataaatttgggcccaaaagtgtaggcccatagatttatcattttttttttgttgattaaattagattggacatcctaagcaaaaaaatattttaaaaagtaagagattaataaaatattcc

SEQ ID NO: 6350 - protein, 178 aa, Arabidopsis thaliana
MQVVASPADLVKVRMQADGRLVSQGLKPRYSGPIEAFTKILQSEGVKGLWKGVLPNIQRAFLVNMGELACYDHAKHFVIDKKIAEDNIFAHTLASIMSGLASTSLSCPADVVKTRMMNQGENAVYRNSYDCLVKTVKFEGIRALWKGFFPTWARLGPWQFVFWVSYEKFRLLAGISSF

SEQ ID NO: 6351 - protein, 164 aa, Arabidopsis thaliana
MQADGRLVSQGLKPRYSGPIEAFTKILQSEGVKGLWKGVLPNIQRAFLVNMGELACYDHAKHFVIDKKIAEDNIFAHTLASIMSGLASTSLSCPADVVKTRMMNQGENAVYRNSYDCLVKTVKFEGIRALWKGFFPTWARLGPWQFVFWVSYEKFRLLAGISSF

SEQ ID NO: 6352 - protein, 132 aa, Arabidopsis thaliana
MERSRVTREAPTGTRILLASLSAMVAESVTFPIDLTKTRMQLHGSGSASGAHRIGAFGVVSEIARKEGVIGLYKGLSPAIIRHLFYTPIRIIGYENLKGLIVRSETNNSESLPLATKALVGGFSGVIAQKCR

SEQ ID NO: 6353 - DNA, 1220 bp, Arabidopsis thaliana
atttttcttcttctcttcaatttacagttctctgcaccttttactttcccctgttttttgatcctcaatcaccaaaccctagcttgttcttctgttgattatttcgaaaagggggtttgtttgttttctgggaatcagcaaaaatcacgaaatggttggcttaatatttcaatcgggataaaatcgatcgaaaatgagtcagccttctgtgattcttgctacggctagctatgatcacaccatccgattctgggaagccgaaactggtcgctgttaccgtaccattcagtatcctgattcgcatgtaaataggcttgagataaccccagataagcattatctagctgcagcttgcaatcctcatattcgactctttgatgtcaattccaatagtcctcaacctgtgatgacttacgattcacacaccaacaatgttatggcagtaggatttcaatgtgatgcaaaatggatgtattcaggatcagaagatggcacagttaagatctgggacttaagggctccgggttgccaaaaggagtatgaaagtgttgcagcggttaatacagttgttttacacccaaatcagactgaattgatatctggagaccaaaatggaaatatacgtgtatgggatctcagagcaaattcgtgtagctgtgaactggtaccagaagttgatacagctgtacggtctttaactgttatgtgggatgggacaatggtagtcgctgctaacaaccgtggaacatgttatgtatggcgcttgttgcgtggaaaacagacaatgacagagtttgagccccttcataagctgcaagctcataatggccacatccttaaatgtctcctctctcctgcaaacaaatatctagcgactgcatcatctgataaaactgtcaaaatatggaacgtcgatggttttaaactagagaaagttttaacaggacatcaaagatgggtttgggactgcgtcttctcagtggatggagaatttcttgtaacagcatcatcggacatgacggctagattgtggtcgatgccagcaggcaaagaagtgaaagtgtaccaaggtcatcacaaagccactgtgtgctgtgcacttcacgattaaaaccttaataagaatcaaagctaaattatgaacaaactacgattgtgttatttgtgttttagtaaactcttgtacatttcaatcgaattcgttcaaattgctcttatgt

SEQ ID NO: 6354 - protein, 305 aa, Arabidopsis thaliana
MSQPSVILATASYDHTIRFWEAETGRCYRTIQYPDSHVNRLEITPDKHYLAAACNPHIRLFDVNSNSPQPVMTYDSHTNNVMAVGFQCDAKWMYSGSEDGTVKIWDLRAPGCQKEYESVAAVNTVVLHPNQTELISGDQNGNIRVWDLRANSCSCELVPEVDTAVRSLTVMWDGTMVVAANNRGTCYVWRLLRGKQTMTEFEPLHKLQAHNGHILKCLLSPANKYLATASSDKTVKIWNVDGFKLEKVLTGHQRWVWDCVFSVDGEFLVTASSDMTARLWSMPAGKEVKVYQGHHKATVCCALHD

SEQ ID NO: 6355 - protein, 234 aa, Arabidopsis thaliana
MTYDSHTNNVMAVGFQCDAKWMYSGSEDGTVKIWDLRAPGCQKEYESVAAVNTVVLHPNQTELISGDQNGNIRVWDLRANSCSCELVPEVDTAVRSLTVMWDGTMVVAANNRGTCYVWRLLRGKQTMTEFEPLHKLQAHNGHILKCLLSPANKYLATASSDKTVKIWNVDGFKLEKVLTGHQRWVWDCVFSVDGEFLVTASSDMTARLWSMPAGKEVKVYQGHHKATVCCALHD

SEQ ID NO: 6356 - protein, 224 aa, Arabidopsis thaliana
MAVGFQCDAKWMYSGSEDGTVKIWDLRAPGCQKEYESVAAVNTVVLHPNQTELISGDQNGNIRVWDLRANSCSCELVPEVDTAVRSLTVMWDGTMVVAANNRGTCYVWRLLRGKQTMTEFEPLHKLQAHNGHILKCLLSPANKYLATASSDKTVKIWNVDGFKLEKVLTGHQRWVWDCVFSVDGEFLVTASSDMTARLWSMPAGKEVKVYQGHHKATVCCALHD

SEQ ID NO: 6357 - DNA, 1321 bp, Arabidopsis thaliana
accatcctcatctctcaatcaacaaacctaactctttctctatacaagagcgcaagctcgaaggcgctcttgttctttcttcattttctccttaacaatcaccctcatagtaactttaaaactctctgtttctagtaattcacacacaaaatggctattaaactagcaattctatttaccacatttgttctttttagcctcgccgacgctagaatccccggtatttactccggcggcgcatggcaaaacgcacacgccactttttacggtggcagcgacgcctccggcacaatgggaggagcttgtggttacggtaacctatacagccaagggtacgggaccaacacggctgctttgagtacggcgctgtttaacaatggtatgagttgtggagcctgctttgagctaaaatgcgccaacgaccctcaatggtgtcactcaggtagtccttcgatcctcatcaccgcaaccaatttctgcccaccaaacttggctcagcctagcgacaacggaggatggtgcaacccaccacgtgaacactttgacctagccatgcctgtcttccttaagatcgctcaatatcgcgccggcattgtccccgtctcataccgcagggtgccatgtagaaagagaggaggcataaggttcacaatcaacggtcaccgttacttcaacttggttctgatcactaacgtggctggagcaggagacatcgtgagggctagtgtgaaaggatcacggactggttggatgagtttgagcagaaactggggacaaaactggcaatctaatgctgttttggttggtcaagcactctctttccgtgtcacaggcagtgaccgtagaacatctacttcctggaacatggttccttctaactggcagtttggtcaaacctttgtcgggaagaatttcagggtttaaggcgagtttcgagaaactaaaatttggaggaaattcgagaaattaaagtggttcgagacaaaagaaaactctccgctaatttcgctattcctcctcctttttttttactaaattttatatatggaaaggagagaaaaatcaggggaaagtatctttgacttttgtgtgtgttttcacttttttaatgtttttttttttgggtttggtgttttaattgtgagtgataaagggggaaatgagggagaaagagaaagtgagtagctgaagtggctgtgagaacattttgtaacagcccgcagctattaaagtattttacatggtttggttgtaagttacaacttgtaacgtttaatctcgtgtaatcttaaaacatggttgtattattgatacttaatac

SEQ ID NO: 6358 - protein, 257 aa, Arabidopsis thaliana
MAIKLAILFTTFVLFSLADARIPGIYSGGAWQNAHATFYGGSDASGTMGGACGYGNLYSQGYGTNTAALSTALFNNGMSCGACFELKCANDPQWCHSGSPSILITATNFCPPNLAQPSDNGGWCNPPREHFDLAMPVFLKIAQYRAGIVPVSYRRVPCRKRGGIRFTINGHRYFNLVLITNVAGAGDIVRASVKGSRTGWMSLSRNWGQNWQSNAVLVGQALSFRVTGSDRRTSTSWNMVPSNWQFGQTFVGKNFRV

SEQ ID NO: 6359 - protein, 210 aa, Arabidopsis thaliana
MGGACGYGNLYSQGYGTNTAALSTALFNNGMSCGACFELKCANDPQWCHSGSPSILITATNFCPPNLAQPSDNGGWCNPPREHFDLAMPVFLKIAQYRAGIVPVSYRRVPCRKRGGIRFTINGHRYFNLVLITNVAGAGDIVRASVKGSRTGWMSLSRNWGQNWQSNAVLVGQALSFRVTGSDRRTSTSWNMVPSNWQFGQTFVGKNFRV

SEQ ID NO: 6360 - protein, 180 aa, Arabidopsis thaliana
MSCGACFELKCANDPQWCHSGSPSILITATNFCPPNLAQPSDNGGWCNPPREHFDLAMPVFLKIAQYRAGIVPVSYRRVPCRKRGGIRFTINGHRYFNLVLITNVAGAGDIVRASVKGSRTGWMSLSRNWGQNWQSNAVLVGQALSFRVTGSDRRTSTSWNMVPSNWQFGQTFVGKNFRV

SEQ ID NO: 6361 - DNA, 1500 bp, Arabidopsis thaliana
gttgatcaacaattaaacacaaaaacccttaagttgacatggctgtatctcttccaactcttaaaaatcaattactattatacccctcagaaaaatggcagagcgtgtgtctctcacactcaacggaaccctcctttctcctcctcccacaacaacaacaacaacaatgtcttcttctctccgatctaccaccgccgcttctcttctcctccgctcctcctcctcctcctccagatccactctcactctctccgcttcctcctctctctccttcgtcagatctctcgtctcttctccacgtctctcttcttcttcatccctctctcagaagaaatatcgaattgcgtcggtgaatcggagtttcaactccaccaccgccgctactaaatcttcatcttcagatcctgatcagttgaagaacgctagagaagatatcaaagagcttctcagcaccaaattctgccatccgattttggttagattaggttggcatgatgctggtacgtataacaagaacattaaggaatggccacaaagaggtggagctaatggaagtttgagattcgatattgagcttaaacatgctgctaacgctggtcttgtgaatgctttaaacttgattaaggatatcaaagagaaatactctgggatcagttatgctgatttgttccagttagctagtgctactgctatagaggaagctggaggaccgaaaataccgatgaaatatggtagagttgatgcctctggtcctgaggattgtccagaagaaggaaggcttccagatgctggtcctccttcacctgctactcatctcagagaagttttttacagaatgggattagatgacaaggacatagttgcattatctggtgctcacacgttaggaagatctaggccagaacgtagtggttgggggaagcctgagacgaagtacacgaaagaaggacctggagcaccaggaggacagtcatggacaccagagtggctgaagtttgataattcttacttcaaggagatcaaggaaaagagagatgaagatctccttgtcctacccactgatgctgccatcttcgaagattcttctttcaaggtctatgctgaaaagtatgctgcagatcaggatgcatttttcaaggattacgctgtagcccatgcgaagctcagcaatcttggagcagaatttaaccctccggagggtatcgttatctaatgggggcacataatttactcaaccagacttatgattttagagaaacgtagttcaataatgaaagagaagaaaaagttgacggagaacttttcatgcgagtacttttcgagataccttttggacaaatgtttctggctgttcaaaggattttgtttagccgaaagtatttgatcgttttcatggttttgtgctttcatgtttttttcttgtaataaattgcggaagtgattatccaaaatctatacaaattttgtctggaattgaattattttatcgatgttataact

SEQ ID NO: 6362 - protein, 372 aa, Arabidopsis thaliana
MAERVSLTLNGTLLSPPPTTTTTTMSSSLRSTTAASLLLRSSSSSSRSTLTLSASSSLSFVRSLVSSPRLSSSSSLSQKKYRIASVNRSFNSTTAATKSSSSDPDQLKNAREDIKELLSTKFCHPILVRLGWHDAGTYNKNIKEWPQRGGANGSLRFDIELKHAANAGLVNALNLIKDIKEKYSGISYADLFQLASATAIEEAGGPKIPMKYGRVDASGPEDCPEEGRLPDAGPPSPATHLREVFYRMGLDDKDIVALSGAHTLGRSRPERSGWGKPETKYTKEGPGAPGGQSWTPEWLKFDNSYFKEIKEKRDEDLLVLPTDAAIFEDSSFKVYAEKYAADQDAFFKDYAVAHAKLSNLGAEFNPPEGIVI

SEQ ID NO: 6363 - protein, 348 aa, Arabidopsis thaliana
MSSSLRSTTAASLLLRSSSSSSRSTLTLSASSSLSFVRSLVSSPRLSSSSSLSQKKYRIASVNRSFNSTTAATKSSSSDPDQLKNAREDIKELLSTKFCHPILVRLGWHDAGTYNKNIKEWPQRGGANGSLRFDIELKHAANAGLVNALNLIKDIKEKYSGISYADLFQLASATAIEEAGGPKIPMKYGRVDASGPEDCPEEGRLPDAGPPSPATHLREVFYRMGLDDKDIVALSGAHTLGRSRPERSGWGKPETKYTKEGPGAPGGQSWTPEWLKFDNSYFKEIKEKRDEDLLVLPTDAAIFEDSSFKVYAEKYAADQDAFFKDYAVAHAKLSNLGAEFNPPEGIVI

SEQ ID NO: 6364 - DNA, 1247 bp, Arabidopsis thaliana
caattcttcccggataattagggtttcacgagcttccggtggtaaagatcgacacagcaaagtcttgacttctaaaggaccacgtgaccgtcgtgtccggttatcagtctccaccgctcttcaattctatgatcttcaagatcggttaggttatgatcaacctagcaaagctgttgaatggttaatcaaagctgctgaagattcaatctctgagcttccttcactcaacaacactcattttccgaccgatgacgagaatcaccagaatcagacattaacaacagttgctgctaattccttgtctaaatctgcttgtagtagcaattcagacacgagcaagaactcttctggtttgtctttatcaagttcggagcttagagataaagctagagagagagctagagagagaacagctaaagagaccaaggagagagatcataaccacacttcgtttaccgatttgttaaattccggttcagatccggttaactcaaaccggcaatggatggcttctgctccttcttcatctccaatggagtattttagttcgggtttaattctcgggtcgggtcaacaaacccatttcccgatttcgacaaattctcatcctttctcatcaatctccgatcatcatcatcctcatcatcagcaccaagagttttcattcgttcccgaccatttgatatcaccggcagaatccaacggcggagcattcaatcttgattttaatatgtcgacaccctccggcgccggagctgccgtctccgccgcatccggtggtgggttcagtggtttcaacagggggacccttcagtccaattcaacaaatcagcatcagtcatttctcgctaatctacagaggtttccaacatcagaaagtggaggaggtccacagttcttattcggtgcactgcctgcagagaatcaccaccacaatcaccagtttcagctttactatgaaaatggatgcagaaactcatcagaccataagggtaaaggcaagaactgatgatattaattattgcatctttggttttgttcaaatcctcattttgtatgtttatctttggtttatttcaaaacaaatgttaatctcttttgttgtctgatgtgtgttagggttttgttctacatatgtattgagggtctttggaaatctttttgcattgtgcttgtaatgttgtattttgtgataatagcattttgtttgtgagtttataattcaatttttgaatgttatttttgcc

SEQ ID NO: 6365 - protein, 335 aa, Arabidopsis thaliana
NSSRIIRVSRASGGKDRHSKVLTSKGPRDRRVRLSVSTALQFYDLQDRLGYDQPSKAVEWLIKAAEDSISELPSLNNTHFPTDDENHQNQTLTTVAANSLSKSACSSNSDTSKNSSGLSLSSSELRDKARERARERTAKETKERDHNHTSFTDLLNSGSDPVNSNRQWMASAPSSSPMEYFSSGLILGSGQQTHFPISTNSHPFSSISDHHHPHHQHQEFSFVPDHLISPAESNGGAFNLDFNMSTPSGAGAAVSAASGGGFSGFNRGTLQSNSTNQHQSFLANLQRFPTSESGGGPQFLFGALPAENHHHNHQFQLYYENGCRNSSDHKGKGKN

SEQ ID NO: 6366 - protein, 167 aa, Arabidopsis thaliana
MASAPSSSPMEYFSSGLILGSGQQTHFPISTNSHPFSSISDHHHPHHQHQEFSFVPDHLISPAESNGGAFNLDFNMSTPSGAGAAVSAASGGGFSGFNRGTLQSNSTNQHQSFLANLQRFPTSESGGGPQFLFGALPAENHHHNHQFQLYYENGCRNSSDHKGKGKN

SEQ ID NO: 6367 - DNA, 878 bp, Arabidopsis thaliana
gtctctttgacttcatcgtcgattaagggagaaagagagagagagtgagagctgagaaaatcaccagaaagctacttgagagagagagatagagataagtgagctctgagaaaatccagcaatggcttcgaagcttgtagtgataattgtgtttatcctcgatctcatcgccgttgggttagccattgccgccgagcagagaagaagtgtcggcaaggttgaaacagacagagacaagcaatatgattactgtgtgtatggtactgacattgctacaagttatggagctggtgcatttgttcttctctttgtaagccaagtccttattatggctgctagtcgttgcttctgttgtggaaagtctcttaaccctggcggttcaagagcttgtgccattattctcttcctcatttgctgggtgtttttcttgatcgctgagatgtgtttgcttgcggcatcaatcagaaatgcgtaccacacacagtatagaaagatgtggaaagttgaagatccaccaagctgtgaagttataaggaaaggagtttttgcagctggtgctgcattcacactcttcaccgccattgtctctcagttctactacgtttgctactctcgtgctagagatgcgtaccagaatccctcctactaaaaatgtcaacttccacagcaagcaaacgtttaagcatcaagagttggaatttgtctttttgtgtttgtttagtattgtccagtgtttagttatcctatcaggatgtttaggttttatgttgtctcttaagcaaacactgatatgttatattctaagattcgtatattgttatgttctctgttgtaatgtgtgaatgaatactaaagaatagaaaaccatgatttgttgg

SEQ ID NO: 6368 - protein, 175 aa, Arabidopsis thaliana
MASKLVVIIVFILDLIAVGLAIAAEQRRSVGKVETDRDKQYDYCVYGTDIATSYGAGAFVLLFVSQVLIMAASRCFCCGKSLNPGGSRACAIILFLICWVFFLIAEMCLLAASIRNAYHTQYRKMWKVEDPPSCEVIRKGVFAAGAAFTLFTAIVSQFYYVCYSRARDAYQNPSY

SEQ ID NO: 6369 - protein, 106 aa, Arabidopsis thaliana
MAASRCFCCGKSLNPGGSRACAIILFLICWVFFLIAEMCLLAASIRNAYHTQYRKMWKVEDPPSCEVIRKGVFAAGAAFTLFTAIVSQFYYVCYSRARDAYQNPSY

SEQ ID NO: 6370 - DNA, 1589 bp, Arabidopsis thaliana
ctctctctctctctctctcacttcatctatggcttcttcttctctgcagtctctcttctctctgttttgccttgctctgttctctcttcctctcatcgtctcctccatcggcatcaactatgggcaggtcgctaacaaccttcctccccctaaaaacgtcatccctctcctcaagtctgtgggagctacaaaagtcaagctctatgacgccgatccacaagccctacgtgccttcgccggctccggcttcgagctcaccgtggccctcggtaacgagtacctggctcagatgagcgaccctattaaagcccaaggctgggtgaaggagaacgtccaagcttacctcccaaacaccaagatcgtggccatcgtagtgggaaacgaagtcctcacctcaaaccagtcagccctcacggcagccctcttcccggctatgcaaagcatccacggtgctctggtggattgtggcctaaacaagcagatctttgtgacgacggctcactcactagccatcttggatgtatcctaccctccctcggccacttccttccgccgcgacctcctcggctccctcactcccatcttggacttccacgtcaagactggctcaccaatcctcatcaacgcctaccctttcttcgcctacgaagaaaaccccaaacacgtttctctcgacttcgtactcttccaaccaaatcaaggcttcaccgatcctggctctaatttccactacgacaacatgctcttcgctcaggtcgacgcagtctatcacgctcttgacgctgtcggcatcagctacaagaaagttcccattgtcgtctccgagaccggatggccttccaacggtgacccgcaagaagtcggagccacctgcgacaatgctcgcaagtacaatgggaatctgatcaagatgatgatgagcaagaagatgaggacgcctatacgacctgagtgcgatctcaccatcttcgtctttgctctctttaacgagaacatgaagcctggaccaacctccgagaggaactacggtctcttcaaccctgacggaactccggtttactcacttgggatcaagacctcttccactcatagtagtggtagtggtagcagcaactccactggtggtagtagcagtggcggtggcggtaacactggtggctcttccagcggtggtggcatctatcagccagtcacgggtaacccatcaccggattacatgtccatttcctccgccgggggaaaaggcagattcgttgagtgtgtgttgttcttcttcttgctttgcatcatcaagcttcggttgtaaaagcttctccactagatctcgtcggctttgtacttttactcggttgatgacgtgatatagcccccaaatttaatttaattagttttgtgttggtgttttggtcggaggatgatttaggagacataccatctttgttgtgccgacctcctctccaactctttttttttttccttttccattctcctttttcttgtttaagcatagattatttaaataatgaatcttagttgattagatttttctaaagaagatgatgattttcgataattgtataacttgaagg

SEQ ID NO: 6371 - protein, 434 aa, Arabidopsis thaliana
SLSLSLTSSMASSSLQSLFSLFCLALFSLPLIVSSIGINYGQVANNLPPPKNVIPLLKSVGATKVKLYDADPQALRAFAGSGFELTVALGNEYLAQMSDPIKAQGWVKENVQAYLPNTKIVAIVVGNEVLTSNQSALTAALFPAMQSIHGALVDCGLNKQIFVTTAHSLAILDVSYPPSATSFRRDLLGSLTPILDFHVKTGSPILINAYPFFAYEENPKHVSLDFVLFQPNQGFTDPGSNFHYDNMLFAQVDAVYHALDAVGISYKKVPIVVSETGWPSNGDPQEVGATCDNARKYNGNLIKMMMSKKMRTPIRPECDLTIFVFALFNENMKPGPTSERNYGLFNPDGTPVYSLGIKTSSTHSSGSGSSNSTGGSSSGGGGNTGGSSSGGGIYQPVTGNPSPDYMSISSAGGKGRFVECVLFFFLLCIIKLRL

SEQ ID NO: 6372 - protein, 425 aa, Arabidopsis thaliana
MASSSLQSLFSLFCLALFSLPLIVSSIGINYGQVANNLPPPKNVIPLLKSVGATKVKLYDADPQALRAFAGSGFELTVALGNEYLAQMSDPIKAQGWVKENVQAYLPNTKIVAIVVGNEVLTSNQSALTAALFPAMQSIHGALVDCGLNKQIFVTTAHSLAILDVSYPPSATSFRRDLLGSLTPILDFHVKTGSPILINAYPFFAYEENPKHVSLDFVLFQPNQGFTDPGSNFHYDNMLFAQVDAVYHALDAVGISYKKVPIVVSETGWPSNGDPQEVGATCDNARKYNGNLIKMMMSKKMRTPIRPECDLTIFVFALFNENMKPGPTSERNYGLFNPDGTPVYSLGIKTSSTHSSGSGSSNSTGGSSSGGGGNTGGSSSGGGIYQPVTGNPSPDYMSISSAGGKGRFVECVLFFFLLCIIKLRL

SEQ ID NO: 6373 - protein, 338 aa, Arabidopsis thaliana
MSDPIKAQGWVKENVQAYLPNTKIVAIVVGNEVLTSNQSALTAALFPAMQSIHGALVDCGLNKQIFVTTAHSLAILDVSYPPSATSFRRDLLGSLTPILDFHVKTGSPILINAYPFFAYEENPKHVSLDFVLFQPNQGFTDPGSNFHYDNMLFAQVDAVYHALDAVGISYKKVPIVVSETGWPSNGDPQEVGATCDNARKYNGNLIKMMMSKKMRTPIRPECDLTIFVFALFNENMKPGPTSERNYGLFNPDGTPVYSLGIKTSSTHSSGSGSSNSTGGSSSGGGGNTGGSSSGGGIYQPVTGNPSPDYMSISSAGGKGRFVECVLFFFLLCIIKLRL

SEQ ID NO: 6374 - DNA, 1039 bp, Arabidopsis thaliana
ctgccaaaatcttttggccgccatcgatctttccgatcacggaacaaccgtacgaattgaaagtatctctgcggcgaagtagaaatgtggacggaggaatctttggatttagtgcttgtgccgacgggtctggtcgtgatggttgcttaccatgtctggctcgtctacgctattcttcaccgccccaagctcactgttatcgctctcaacgctgagtctcgacgacaatgggtcttctctatgatgactgaaccactgaaaaatggtaccttggctgttcagacaatccggaacaacataatggcatcaacccttttagccacaacagcaatcactttatgttccatcatcggcgtctttgtaagcaactcgtcatcttcaaaatccacggcaacaaatctcatatacgggagcaaaagccctcgcttagcgtcattcaagaactttgcaatcctgatctgtttcctcatggcctttctctgcaacatccagtcaatcaggtattacgctcacgtaagtttcctagtcacagtgcctgtctcaagagggaaaagagagcactgcgagtacgtgtctagaaacctgaaccgagctagctacttctggtctctcggattacgggctttctacttctccttccctctcttcttatggaccttcgggccaatcccgatgtttgtgtgctgttgtatgatgtcctcgattctatatttcttggacacgaccactagttttaccaggcatcttcatagccaatcgttcagagaaacggctgattcaatggacggcgaaatcgaatcagctgttcatactctgtagattcttctctgacttttgttgtgtattaagagttatatgttaaccgtgtcttttgtaatgtgatggaacaactttgtctgcaattatgtatgcgtttgtgttttcatgttacaatgattagaaaacattacaagatgaaaacgcaaacgcctacctaaacgcaaacaaacaatcttaagtatgttcatcactgaagaaagtaatggttttagctttttcc

SEQ ID NO: 6375 - protein, 244 aa, Arabidopsis thaliana
MWTEESLDLVLVPTGLVVMVAYHVWLVYAILHRPKLTVIALNAESRRQWVFSMMTEPLKNGTLAVQTIRNNIMASTLLATTAITLCSIIGVFVSNSSSSKSTATNLIYGSKSPRLASFKNFAILICFLMAFLCNIQSIRYYAHVSFLVTVPVSRGKREHCEYVSRNLNRASYFWSLGLRAFYFSFPLFLWTFGPIPMFVCCCMMSSILYFLDTTTSFTRHLHSQSFRETADSMDGEIESAVHTL

SEQ ID NO: 6376 - protein, 226 aa, Arabidopsis thaliana
MVAYHVWLVYAILHRPKLTVIALNAESRRQWVFSMMTEPLKNGTLAVQTIRNNIMASTLLATTAITLCSIIGVFVSNSSSSKSTATNLIYGSKSPRLASFKNFAILICFLMAFLCNIQSIRYYAHVSFLVTVPVSRGKREHCEYVSRNLNRASYFWSLGLRAFYFSFPLFLWTFGPIPMFVCCCMMSSILYFLDTTTSFTRHLHSQSFRETADSMDGEIESAVHTL

SEQ ID NO: 6377 - protein, 192 aa, Arabidopsis thaliana
MMTEPLKNGTLAVQTIRNNIMASTLLATTAITLCSIIGVFVSNSSSSKSTATNLIYGSKSPRLASFKNFAILICFLMAFLCNIQSIRYYAHVSFLVTVPVSRGKREHCEYVSRNLNRASYFWSLGLRAFYFSFPLFLWTFGPIPMFVCCCMMSSILYFLDTTTSFTRHLHSQSFRETADSMDGEIESAVHTL

SEQ ID NO: 6378 - DNA, 1555 bp, Arabidopsis thaliana
aacaaaaaaccaaatttggttcctttttcttcttcagacgagtaatatcttttgtcttcatcatgctctattcacctaagaagctgttcttgttcttcctctcgtgcattgtgctgtatgtcaactacaacaacagtggcttcgtaaccgcagcaaatagcatcggcttgaactacggactcctcggtgacaacctctcgtctccttccaatgttatcaacctttacaagtccataggcattagtagaatccgaatcttcgacccgaacactgaggtactcaatgccttacgtggtcaccgcgatattgaagtcactgttggcgttaaggaccaagacttggctgctcttgctgcaagcgaagaagctgttaagggctggttcgcggccaacatcgagtcttacttagctgacgtcaacatcacatttattaccgttgctaacgaagtcatccccggaccaatcggtcctcaagtgcttcccgtcatgcagtctctaaccaacctagtcaagtcgaggaatcttccgatctcgataagcaccgtggtggctatgtcgaacctggagcagtcgtatccaccttccgcgggaatgttcacctcccaggcgcgggaacaacttgttcccgtgttgaaactattgtctcaaacaagcacaccaatccttgtcaacatatacccttacttcgcttatgcgtccgacccagccaacatccgtctcgactatgccagctttaacactaagtccatcgtggtccaagatggatcattgggctattcaaacatgtttgatgcaatctttgatgcgttcgtgtgggcaatggagaaggaaggcgttaaaaatttaccaatggtggtgtccgagaccggatggccatccgcggggaacgggaactttaccacgccggctattgcgtccacctacaacagaaattttgtgaagcatatagcaagcggaaaagggacgcctaaaaggcctaacaagagcatgaacgggtttttgtttgcaacgttcaatgaaaatcagaagccggccgggactgaacaaaactttggtttatacaatccaagtgatatgaagcctatctacaagctattctaagtgtgaaagttacttagactttcccgattcactaataataatgctctactagttgttagtgaattaaagtaagattaacaatgatgcacatgctataagcaactggtgactatgagatgatggctctcgtagcgaacttagttgactttttgtaataaaatctgaatgtagtatttaaaaccaatttcctggttttataaacgaatgtactgcctcttcaataaagtaaggaacctttgcctacggcatcgaatttaatttgaagtcaccagttgacaacgaatgtactggtctggtttgtgcctctccacttaaagtaagttgacaagctaagtgctaagtattctcgttgttactgtataaactattcctaaattatagtttagaggtaatgcttagagcatcataatccatggtttcttaaaaagttaagaaaatctcttaaaatattatat

SEQ ID NO: 6379 - protein, 365 aa, Arabidopsis thaliana
QKTKFGSFFFFRRVISFVFIMLYSPKKLFLFFLSCIVLYVNYNNSGFVTAANSIGLNYGLLGDNLSSPSNVINLYKSIGISRIRIFDPNTEVLNALRGHRDIEVTVGVKDQDLAALAASEEAVKGWFAANIESYLADVNITFITVANEVIPGPIGPQVLPVMQSLTNLVKSRNLPISISTVVAMSNLEQSYPPSAGMFTSQAREQLVPVLKLLSQTSTPILVNIYPYFAYASDPANIRLDYASFNTKSIVVQDGSLGYSNMFDAIFDAFVWAMEKEGVKNLPMVVSETGWPSAGNGNFTTPAIASTYNRNFVKHIASGKGTPKRPNKSMNGFLFATFNENQKPAGTEQNFGLYNPSDMKPIYKLF

SEQ ID NO: 6380 - protein, 345 aa, Arabidopsis thaliana
MLYSPKKLFLFFLSCIVLYVNYNNSGFVTAANSIGLNYGLLGDNLSSPSNVINLYKSIGISRIRIFDPNTEVLNALRGHRDIEVTVGVKDQDLAALAASEEAVKGWFAANIESYLADVNITFITVANEVIPGPIGPQVLPVMQSLTNLVKSRNLPISISTVVAMSNLEQSYPPSAGMFTSQAREQLVPVLKLLSQTSTPILVNIYPYFAYASDPANIRLDYASFNTKSIVVQDGSLGYSNMFDAIFDAFVWAMEKEGVKNLPMVVSETGWPSAGNGNFTTPAIASTYNRNFVKHIASGKGTPKRPNKSMNGFLFATFNENQKPAGTEQNFGLYNPSDMKPIYKLF

SEQ ID NO: 6381 - protein, 204 aa, Arabidopsis thaliana
MQSLTNLVKSRNLPISISTVVAMSNLEQSYPPSAGMFTSQAREQLVPVLKLLSQTSTPILVNIYPYFAYASDPANIRLDYASFNTKSIVVQDGSLGYSNMFDAIFDAFVWAMEKEGVKNLPMVVSETGWPSAGNGNFTTPAIASTYNRNFVKHIASGKGTPKRPNKSMNGFLFATFNENQKPAGTEQNFGLYNPSDMKPIYKLF

SEQ ID NO: 6382 - DNA, 1318 bp, Arabidopsis thaliana
aaaaagatagaaaacgattcacaaatctctttgattcatgttctctatcatggtatcagagcattttttgcgtttttccagttgatttcatcttcaatcttcaattcttgctcagtttcttcgattattcactcctcttggtgtcgattgttcttccgcgcattcgattttggtgaaaatggtgaagaaaggtgggaaaatgaagaatctcaatgttactcctgacgatggtggttctgttgctagatctactcgaaactcgatgatcgctgaagatcttgaagttgcgagagctcaacaacaactcaatcgaagattcgaagcttctgaggtccgtggatcgatgttgaagaacactgattcgttcgacaatccattggttctccattcatcggatcatccaggtttaacaattgtatctcatattcttgatggaactaattacaacagttggtcgattgcgatgaagattagcttagatgcaaagaacaagctaggtttagttgatggatcgttattgagaccttctgaggatgatttgagtttccgcatatggagtagatgcaatagtatggtgaaatcgtggattcttaaaccaacaaggattctttgattcatgttctctatcaataaccggtttaatgtatttgaagagttaactacagtattgtttttgtgttatatgcaaataagtaccatgtcttgataaatacgtcgctgaggtcaagcataaagagcgatgcaaaagaacccgagacgtcgtcacttttgttcaagagatatttgcagaccggttcagctgcatataccctctcaacttttccggtttgaccgttctcttctattacagtacggcattttaagaccgaatggctgacgagaaatcgaagcatacggtctagcaaagccggagcttccaggttgcatggtttggttgggagtcttagtgctatttcagaaggtgagagccacaaatcgccacctcctactgtggtgatggtgtcgatcacgccgagctccaaggcggctttgagaaccataggtgatgcggctgcattcgcgagccttctcgctagcaatcttgcctcttcttcaacctcttgttcttctttaactcgatccggtttggttaaggggacttggagatggtttgccattgttcttgtttgaaaaaataatattagaggagtgatgctaaatatgaggataggtttcaactttcatactttgtgccattttatagagtcatatctcaatatagtgttacatacatttgattagctgaccccaagatttgatatacatccaacattaggtc

SEQ ID NO: 6383 - protein, 144 aa, Arabidopsis thaliana
MVKKGGKMKNLNVTPDDGGSVARSTRNSMIAEDLEVARAQQQLNRRFEASEVRGSMLKNTDSFDNPLVLHSSDHPGLTIVSHILDGTNYNSWSIAMKISLDAKNKLGLVDGSLLRPSEDDLSFRIWSRCNSMVKSWILKPTRIL

SEQ ID NO: 6384 - protein, 137 aa, Arabidopsis thaliana
MKNLNVTPDDGGSVARSTRNSMIAEDLEVARAQQQLNRRFEASEVRGSMLKNTDSFDNPLVLHSSDHPGLTIVSHILDGTNYNSWSIAMKISLDAKNKLGLVDGSLLRPSEDDLSFRIWSRCNSMVKSWILKPTRIL

SEQ ID NO: 6385 - protein, 116 aa, Arabidopsis thaliana
MIAEDLEVARAQQQLNRRFEASEVRGSMLKNTDSFDNPLVLHSSDHPGLTIVSHILDGTNYNSWSIAMKISLDAKNKLGLVDGSLLRPSEDDLSFRIWSRCNSMVKSWILKPTRIL

SEQ ID NO: 6386 - DNA, 828 bp, Arabidopsis thaliana
atttctctttagtctctctacggaacctgtcttcttgtcttgtccaaaatcggatttttaagagtacaagtgagtttattttgggggccgaaatctgtcctggaggatacagaagcaagatgaagttaatagatcgaagaatgaggttaacggagctgctcttacggtgctccatcagtgtcttcgctctcctcgcgcttattctagttgtgacagacactgaggtcaagcttatcttcactatcaagaagacggccaagtacacggacatgaaggcggttgtgttcttggtggtggctaatgggatagctgcggtttattctttgttgcaatcagttcgttgcgtggtgggtacgatgaaaggaaaggttttgtttagtaagcctcttgcttgggcctttttctctggtgatcaggcgatggcgtacttgaatgtggcagccattgcagcaacagcagagtctggtgtgattgctagggaaggagaggaagatttgcaatggatgagagtgtgtactatgtatggaaagttctgcaaccaaatggctataggagtctctagcgccttgttagcctccattgctatggttttcgtctcctgcatttctgcttttagtctcttccgcttgtacggtgccaccaaagaccgcagaaccacgccgtggtgaagtgaatgcggctttgtctttagtagtgttgaaaatgttgttgttaaaaaaacatatagtaacaaaagtgtaggctcttgttggttcttcttcttcttcttcttgatgatgttatatgtgacaaacaatatgtaaaactagactattgatgttctgtgcc

SEQ ID NO: 6387 - protein, 221 aa, Arabidopsis thaliana
FSLVSLRNLSSCLVQNRIFKSTSEFILGAEICPGGYRSKMKLIDRRMRLTELLLRCSISVFALLALILVVTDTEVKLIFTIKKTAKYTDMKAVVFLVVANGIAAVYSLLQSVRCVVGTMKGKVLFSKPLAWAFFSGDQAMAYLNVAAIAATAESGVIAREGEEDLQWMRVCTMYGKFCNQMAIGVSSALLASIAMVFVSCISAFSLFRLYGATKDRRTTPW

SEQ ID NO: 6388 - protein, 182 aa, Arabidopsis thaliana
MKLIDRRMRLTELLLRCSISVFALLALILVVTDTEVKLIFTIKKTAKYTDMKAVVFLVVANGIAAVYSLLQSVRCVVGTMKGKVLFSKPLAWAFFSGDQAMAYLNVAAIAATAESGVIAREGEEDLQWMRVCTMYGKFCNQMAIGVSSALLASIAMVFVSCISAFSLFRLYGATKDRRTTPW

SEQ ID NO: 6389 - protein, 175 aa, Arabidopsis thaliana
MRLTELLLRCSISVFALLALILVVTDTEVKLIFTIKKTAKYTDMKAVVFLVVANGIAAVYSLLQSVRCVVGTMKGKVLFSKPLAWAFFSGDQAMAYLNVAAIAATAESGVIAREGEEDLQWMRVCTMYGKFCNQMAIGVSSALLASIAMVFVSCISAFSLFRLYGATKDRRTTPW

SEQ ID NO: 6390 - DNA, 3060 bp, Arabidopsis thaliana
gagaggagtagtactgggtgagagggatcgtaagctacgattcaatgcgagtcaaaaattcgtctacgaatttgcttcttcttcttcttcctaatttctcgaatcgtctctccgattaagattcttgatctggacacagttcaaggctgtttcagcttgtgaattgtgatcttactttgtttggattaagtagaaacttcggaatccgatggctaacttaccgaaatcgtcggttaattacccgggaactctcactcctctagagccaaataggccatcaccacagccagatagaaccccggtccctcattctcctccagtagtagcttcacctatacctcctaggtttcctcaaccaagttttagaccagatcagatgtcttcaccgtcgatgaaatccccaagtttgttgtcacctgcgaatggtatcagaaccggaagtcccattcctcgcttgagtactccgcctggtcctcctgtctttaatactccggttaaaccagctgctgtgcctttccgtacctctccagctactcctcagcctatggcatactcttcagctaattcttctctgcccgtatctacaccttccttttactcaaacgggtcatctgttggatctcagcgtgatcttccagatgttgttagaatggaagaaccaatagctgcagactcaccttatgttttgttttcagcaaataaggttttaaagcagaagaagctagcaaatgttgctagcttggggtttggagcaatagtttctgctgggagggagattagtcctggtcctcagattatccaacgtgatccacatcgctgtttgaactgtggagcatattcaaatccctatagctccatattaattggctcaggccaatggcagtgtgtcatctgcgagaacatgaatggaagtaaaggtgaatatgtggcttcgagcaagaatgagttgcaaaactttccagagctttcattgcctctggttgattatgtacagactggaaacaagagacctgggtttgttcctgcctctgattcgcggacatctgcacctgtcgtccttgttattgatgagtgtttagatgaaccacatcttcagcacttgcagagctctttgcatgcatttgtagactcgcttccacaaactaccaggcttgggattatactgtatggtcgtactgtttcaatatatgatttctctgaagattccgttgcttctgcggatgttatttctggtgcaaaatcaccatctgcagagtcgatgaaagcgctgatttatgggaccggtgtatacttgtcaccaatgcatgcatcactaaaggtagcgcatgagatattctcgtccttaagaccatacacattgaatgtacctgaagcctctagagataggtgccttggaactgccgttgaggctgctctggctataatccaaggaccatcagccgaaatgtctcggggagtggtcagaagagcaggaggtaacagtagaatcatagtttgcgctggtggtcccattacatatggtcctggatcggtacctcattcaatgagtcatccaaattatccatatatggaaaagacagccataaaatggatggaaaatttggggcgtgaagctcacaggcacaatacggtcgtcgacatattgtgcgctggaacttgccctctcagagttcctatcctgcagccacttgcaaaagcttcaggtggtgttttggttcttcacgatgattttggtgaagcctttggtgtggacttgcagagggcagccactagggcagcaggttcacatggtctgcttgaagtacgatgttcagatgatattcttataactcaggtgattggacctggcgaagaagcacattcagaaactcacgagacgtttaagagtgatgcggctctctctattcagatgctgagtgttgaagaaacacaaagcttctctctctcaatggagaataagagggacatcaaaagcgatcatgtatttttccagtttgctttccattattcggatgtttatcaagcagatgtgtctcgggtaattacgttcaaattgccaactgttgatagcatctcagcatatcttcagagtgttgaggacgaagcttctgcggtcctcatctccaagagaactcttttattagcgaaaaatcagaaggacgcagtcgatatgcgtgctacagtagacgaaagaatcaaagacattgctttgaaattcggatcacaagtgccaaaatcaaagctttatagcttccctaaggaactatcatccctcccagaactcctcttccatcttagaaggggtcctttactgggaaacatcattggtcatgaagatgaaagatcggtgctacgaaatttgtttctaaacgcatctttcgatctgtctcttcgtatggtagcaccccgttgcttgatgcaccaagaaggtggtacattcgaggaactaccagcgtatgatctctctatgcaatcagataaggctgttattcttgaccatggcacagatgtatttatttggttgggagccgaactgtcagctgacgaggtgaagagtgctgcagtcttagcagcttgcagaacgttagctgaagagctaactgaattccggtttccagctccacgtattctcgcattcaaggaaggaagttcccaagctagatattttgtttgccggcttataccagcacataaagaccctccttatgagcaggaagcaagatttccacagataagaacattgacgacagagcaaagaatgaaactaaagagtagttttatagagtttgatgaagccagtttctgcgaatggatgaggagtttgaaagtagtgcctcctgagcccaggtagtcatacattttattcttgcttcatcgttttttttccgccttttactgtcagaacattttttttgttctctgtgagtcttttgtttttaggattctctttatatgatctccagttctctcaagtgaattatatactctgtccgttacaagcaaaataatgtgtagagatgatgaccgtgatttttatttttaccattttacagtcgatgc

SEQ ID NO: 6391 - protein, 880 aa, Arabidopsis thaliana
MANLPKSSVNYPGTLTPLEPNRPSPQPDRTPVPHSPPVVASPIPPRFPQPSFRPDQMSSPSMKSPSLLSPANGIRTGSPIPRLSTPPGPPVFNTPVKPAAVPFRTSPATPQPMAYSSANSSLPVSTPSFYSNGSSVGSQRDLPDVVRMEEPIAADSPYVLFSANKVLKQKKLANVASLGFGAIVSAGREISPGPQIIQRDPHRCLNCGAYSNPYSSILIGSGQWQCVICENMNGSKGEYVASSKNELQNFPELSLPLVDYVQTGNKRPGFVPASDSRTSAPVVLVIDECLDEPHLQHLQSSLHAFVDSLPQTTRLGIILYGRTVSIYDFSEDSVASADVISGAKSPSAESMKALIYGTGVYLSPMHASLKVAHEIFSSLRPYTLNVPEASRDRCLGTAVEAALAIIQGPSAEMSRGVVRRAGGNSRIIVCAGGPITYGPGSVPHSMSHPNYPYMEKTAIKWMENLGREAHRHNTVVDILCAGTCPLRVPILQPLAKASGGVLVLHDDFGEAFGVDLQRAATRAAGSHGLLEVRCSDDILITQVIGPGEEAHSETHETFKSDAALSIQMLSVEETQSFSLSMENKRDIKSDHVFFQFAFHYSDVYQADVSRVITFKLPTVDSISAYLQSVEDEASAVLISKRTLLLAKNQKDAVDMRATVDERIKDIALKFGSQVPKSKLYSFPKELSSLPELLFHLRRGPLLGNIIGHEDERSVLRNLFLNASFDLSLRMVAPRCLMHQEGGTFEELPAYDLSMQSDKAVILDHGTDVFIWLGAELSADEVKSAAVLAACRTLAEELTEFRFPAPRILAFKEGSSQARYFVCRLIPAHKDPPYEQEARFPQIRTLTTEQRMKLKSSFIEFDEASFCEWMRSLKVVPPEPR

SEQ ID NO: 6392 - protein, 824 aa, Arabidopsis thaliana
MSSPSMKSPSLLSPANGIRTGSPIPRLSTPPGPPVFNTPVKPAAVPFRTSPATPQPMAYSSANSSLPVSTPSFYSNGSSVGSQRDLPDVVRMEEPIAADSPYVLFSANKVLKQKKLANVASLGFGAIVSAGREISPGPQIIQRDPHRCLNCGAYSNPYSSILIGSGQWQCVICENMNGSKGEYVASSKNELQNFPELSLPLVDYVQTGNKRPGFVPASDSRTSAPVVLVIDECLDEPHLQHLQSSLHAFVDSLPQTTRLGIILYGRTVSIYDFSEDSVASADVISGAKSPSAESMKALIYGTGVYLSPMHASLKVAHEIFSSLRPYTLNVPEASRDRCLGTAVEAALAIIQGPSAEMSRGVVRRAGGNSRIIVCAGGPITYGPGSVPHSMSHPNYPYMEKTAIKWMENLGREAHRHNTVVDILCAGTCPLRVPILQPLAKASGGVLVLHDDFGEAFGVDLQRAATRAAGSHGLLEVRCSDDILITQVIGPGEEAHSETHETFKSDAALSIQMLSVEETQSFSLSMENKRDIKSDHVFFQFAFHYSDVYQADVSRVITFKLPTVDSISAYLQSVEDEASAVLISKRTLLLAKNQKDAVDMRATVDERIKDIALKFGSQVPKSKLYSFPKELSSLPELLFHLRRGPLLGNIIGHEDERSVLRNLFLNASFDLSLRMVAPRCLMHQEGGTFEELPAYDLSMQSDKAVILDHGTDVFIWLGAELSADEVKSAAVLAACRTLAEELTEFRFPAPRILAFKEGSSQARYFVCRLIPAHKDPPYEQEARFPQIRTLTTEQRMKLKSSFIEFDEASFCEWMRSLKVVPPEPR

SEQ ID NO: 6393 - protein, 819 aa, Arabidopsis thaliana
MKSPSLLSPANGIRTGSPIPRLSTPPGPPVFNTPVKPAAVPFRTSPATPQPMAYSSANSSLPVSTPSFYSNGSSVGSQRDLPDVVRMEEPIAADSPYVLFSANKVLKQKKLANVASLGFGAIVSAGREISPGPQIIQRDPHRCLNCGAYSNPYSSILIGSGQWQCVICENMNGSKGEYVASSKNELQNFPELSLPLVDYVQTGNKRPGFVPASDSRTSAPVVLVIDECLDEPHLQHLQSSLHAFVDSLPQTTRLGIILYGRTVSIYDFSEDSVASADVISGAKSPSAESMKALIYGTGVYLSPMHASLKVAHEIFSSLRPYTLNVPEASRDRCLGTAVEAALAIIQGPSAEMSRGVVRRAGGNSRIIVCAGGPITYGPGSVPHSMSHPNYPYMEKTAIKWMENLGREAHRHNTVVDILCAGTCPLRVPILQPLAKASGGVLVLHDDFGEAFGVDLQRAATRAAGSHGLLEVRCSDDILITQVIGPGEEAHSETHETFKSDAALSIQMLSVEETQSFSLSMENKRDIKSDHVFFQFAFHYSDVYQADVSRVITFKLPTVDSISAYLQSVEDEASAVLISKRTLLLAKNQKDAVDMRATVDERIKDIALKFGSQVPKSKLYSFPKELSSLPELLFHLRRGPLLGNIIGHEDERSVLRNLFLNASFDLSLRMVAPRCLMHQEGGTFEELPAYDLSMQSDKAVILDHGTDVFIWLGAELSADEVKSAAVLAACRTLAEELTEFRFPAPRILAFKEGSSQARYFVCRLIPAHKDPPYEQEARFPQIRTLTTEQRMKLKSSFIEFDEASFCEWMRSLKVVPPEPR

SEQ ID NO: 6394 - DNA, 1308 bp, Arabidopsis thaliana
atacaaatagtgagagtgactgagatcaatagaaccaatctcagaatcatcttctttctctttcggaacaaaaatgacgtctcctctctcagatctcctaaaccttgatctatcagacaccaagaaaatcatcgctgaatacatatggatcggtggctctggaatggatattagaagcaaagccaggacattaccgggaccagtaagtaatccaacaaagcttccaaaatggaactacgatggatctagcaccgatcaagctgccggagatgatagtgaagtcattctttatcctcaggcaatatttaaggacccattcaggaaggggaacaacattctggtgatgtgtgatgcttacagaccggccggagatccaattccgaccaacaataggcacaaggccgtaaaaatcttcgatcatcccaatgtgaaggctgaagagccttggtttgggatagagcaagaatacacattacttaaaaaagatgtgaagtggccactaggttggcctcttggtggctttcctggtcctcagggaccgtactattgtgcagtaggtgcagacaaagcttttggtcgtgacattgtcgatgctcactataaagcttgtctatactccggtttgagtattggtggtgccaatggtgaagtcatgcctggacaatgggagtttcaaatcagtcctactgttggtattggtgcaggtgatcaattatgggttgctcgttacattcttgagaggattactgagatatgcggtgtgattgtctcattcgatccaaaaccaatccagggtgattggaatggagcagccgctcatacgaacttcagtacaaaatcgatgaggaaagatggaggactggatttgattaaggaagcaataaagaagcttgaagtgaaacacaaacaacacattgctgcttatggtgaaggcaacgagaggcgtctcactgggaagcatgaaactgcagacatcaacactttctcttggggagtggcggatcgtggagcatcggtgagagtaggaagagatacggagaaagaaggtaaagggtattttgaagatcgaaggccttcgtctaatatggatccttacctagttacctccatgattgctgaaaccaccatcctctaagctttagacttttcttcgttttggttctttgtatgttcttcgaatttcggtttgatatggtttaatttcgcatttagacttttctttcaaataagttacgaaatgttatgtgatttctattgtttgatccggttacggttcacttttaagccaaaaaatctaccgttatgacc

SEQ ID NO: 6395 - protein, 353 aa, Arabidopsis thaliana
MTSPLSDLLNLDLSDTKKIIAEYIWIGGSGMDIRSKARTLPGPVSNPTKLPKWNYDGSSTDQAAGDDSEVILYPQAIFKDPFRKGNNILVMCDAYRPAGDPIPTNNRHKAVKIFDHPNVKAEEPWFGIEQEYTLLKKDVKWPLGWPLGGFPGPQGPYYCAVGADKAFGRDIVDAHYKACLYSGLSIGGANGEVMPGQWEFQISPTVGIGAGDQLWVARYILERITEICGVIVSFDPKPIQGDWNGAAAHTNFSTKSMRKDGGLDLIKEAIKKLEVKHKQHIAAYGEGNERRLTGKHETADINTFSWGVADRGASVRVGRDTEKEGKGYFEDRRPSSNMDPYLVTSMIAETTIL

SEQ ID NO: 6396 - protein, 323 aa, Arabidopsis thaliana
MDIRSKARTLPGPVSNPTKLPKWNYDGSSTDQAAGDDSEVILYPQAIFKDPFRKGNNILVMCDAYRPAGDPIPTNNRHKAVKIFDHPNVKAEEPWFGIEQEYTLLKKDVKWPLGWPLGGFPGPQGPYYCAVGADKAFGRDIVDAHYKACLYSGLSIGGANGEVMPGQWEFQISPTVGIGAGDQLWVARYILERITEICGVIVSFDPKPIQGDWNGAAAHTNFSTKSMRKDGGLDLIKEAIKKLEVKHKQHIAAYGEGNERRLTGKHETADINTFSWGVADRGASVRVGRDTEKEGKGYFEDRRPSSNMDPYLVTSMIAETTIL

SEQ ID NO: 6397 - protein, 263 aa, Arabidopsis thaliana
MCDAYRPAGDPIPTNNRHKAVKIFDHPNVKAEEPWFGIEQEYTLLKKDVKWPLGWPLGGFPGPQGPYYCAVGADKAFGRDIVDAHYKACLYSGLSIGGANGEVMPGQWEFQISPTVGIGAGDQLWVARYILERITEICGVIVSFDPKPIQGDWNGAAAHTNFSTKSMRKDGGLDLIKEAIKKLEVKHKQHIAAYGEGNERRLTGKHETADINTFSWGVADRGASVRVGRDTEKEGKGYFEDRRPSSNMDPYLVTSMIAETTIL

SEQ ID NO: 6398 - DNA, 1618 bp, Arabidopsis thaliana
ctctctcattgtggacatcttttcaccatcgcacaaataacaagcctcccaactccgatcgacttatcctcctccttctccggcgaaatccattaactctccgccgcgaaaaccacctttccagagaagtatcacactaagaactctaatgttgatccgccattattgaagcttctaattctcgttaatatccaaaaacccaagtcgattttcaagtagcgcggtagttagttttaggtggaagaagaatgacaactactgggtctaattctaatcacaaccaccatgaaagcaataataacaacaataaccctagtactaggtcttggggcacggcggtttcaggtcaatctgtgtctactagcagcagtatgggctctccgtcgagccggagtgagcaaaccatcaccgttgttacatctgctagcgacactacttttcaacgcctgaataatttggacattcaaggtgatgatgctggttctcaaggagcttctggtgttaagaagaagaagaggggacagcgtgcggctggtccagataagactggaagaggactacgtcaatttagtatgaaagtttgtgaaaaggtggaaagcaaaggaaggacaacttacaatgaggttgcagacgagcttgttgctgaatttgcacttccaaataacgatggaacatcccctgatcagcaacagtatgatgagaaaaacataagacgaagagtatatgatgctttaaacgtcctcatggctatggatataatatccaaggataaaaaagaaattcaatggagaggtcttcctcggacaagcttaagcgacattgaagaattaaagaacgaacgactctcacttaggaacagaattgagaagaaaactgcatattcccaagaactggaagaacaatatgtaggccttcagaatctgatacagagaaatgagcacttatatagctcaggaaatgctcccagtggcggtgttgctcttccttttatccttgtccagactcgtcctcacgcaacagtagaagtggagatatcagaagatatgcagctcgtgcattttgatttcaacagcactccatttgagctccacgacgacaattttgtcctcaagactatgaagttttgtgatcaaccgccgcaacaaccaaacggtcagaacaacagccagctggtttgtcacaatttcacgccagaaaaccctaacaaaggccccagcacaggtccaacaccgcagctggatatgtacgagactcatcttcaatcgcaacaacatcagcagcattctcagctacaaatcattcctatgcctgagactaacaacgttacttccagcgctgatactgctccagtgaaatccccgtctcttccaaggataatgaactccagcatgaagccggagaattgaaacacgtatgaaggccccttgtacaatttctgtaaaactgtaaagtagctcttgaaaaactttacctggttttttgacgaatagtctgtttagcggtaaatgtaccggtggtttatcgaatctaggatccttgtcgggtttagcgattttaagaatctttgccataggaaaaaaaaaacactttgctctgtggtgtagaaatgaattttatt

SEQ ID NO: 6399 - protein, 385 aa, Arabidopsis thaliana
MTTTGSNSNHNHHESNNNNNNPSTRSWGTAVSGQSVSTSSSMGSPSSRSEQTITVVTSASDTTFQRLNNLDIQGDDAGSQGASGVKKKKRGQRAAGPDKTGRGLRQFSMKVCEKVESKGRTTYNEVADELVAEFALPNNDGTSPDQQQYDEKNIRRRVYDALNVLMAMDIISKDKKEIQWRGLPRTSLSDIEELKNERLSLRNRIEKKTAYSQELEEQYVGLQNLIQRNEHLYSSGNAPSGGVALPFILVQTRPHATVEVEISEDMQLVHFDFNSTPFELHDDNFVLKTMKFCDQPPQQPNGQNNSQLVCHNFTPENPNKGPSTGPTPQLDMYETHLQSQQHQQHSQLQIIPMPETNNVTSSADTAPVKSPSLPRIMNSSMKPEN

SEQ ID NO: 6400 - protein, 344 aa, Arabidopsis thaliana
MGSPSSRSEQTITVVTSASDTTFQRLNNLDIQGDDAGSQGASGVKKKKRGQRAAGPDKTGRGLRQFSMKVCEKVESKGRTTYNEVADELVAEFALPNNDGTSPDQQQYDEKNIRRRVYDALNVLMAMDIISKDKKEIQWRGLPRTSLSDIEELKNERLSLRNRIEKKTAYSQELEEQYVGLQNLIQRNEHLYSSGNAPSGGVALPFILVQTRPHATVEVEISEDMQLVHFDFNSTPFELHDDNFVLKTMKFCDQPPQQPNGQNNSQLVCHNFTPENPNKGPSTGPTPQLDMYETHLQSQQHQQHSQLQIIPMPETNNVTSSADTAPVKSPSLPRIMNSSMKPEN

SEQ ID NO: 6401 - protein, 277 aa, Arabidopsis thaliana
MKVCEKVESKGRTTYNEVADELVAEFALPNNDGTSPDQQQYDEKNIRRRVYDALNVLMAMDIISKDKKEIQWRGLPRTSLSDIEELKNERLSLRNRIEKKTAYSQELEEQYVGLQNLIQRNEHLYSSGNAPSGGVALPFILVQTRPHATVEVEISEDMQLVHFDFNSTPFELHDDNFVLKTMKFCDQPPQQPNGQNNSQLVCHNFTPENPNKGPSTGPTPQLDMYETHLQSQQHQQHSQLQIIPMPETNNVTSSADTAPVKSPSLPRIMNSSMKPEN

SEQ ID NO: 6402 - DNA, 1885 bp, Arabidopsis thaliana
agaagaggaaacaaagagaagtagcgtcctctcttcaatttcaaccggcactttcttctcttcttcttcttcttcccaatcttcctcgtctctttacctacacctatatatatatatatatatatatctccttccctcacacacatacctgcacagctacaataatctacttcccctctttcaataacggaattaatagtaatctaatcggaagattcaagcgagaaatcgatttggttgtctgttaatttgttgggaaataaattgaaataggagattgattggatggtgagaaggcaagaggaggagaagaaggcggagaagggaatgcgtctggggaaatacgagctagggaggacgctcggcgagggtaatttcggtaaagttaaattcgctaaagataccgtctccggtcattccttcgccgttaaaatcatcgacaagtctcgtatcgccgatctcaacttctccttacagataaaaagagagatccggactctgaaaatgttgaaacatccccacattgttagattacatgaggtcttggctagcaaaacgaaaattaatatggtaatggaacttgttaccggaggagaattgttcgacagaattgtttccaacggaaaattaacagaaactgatggaagaaaaatgtttcagcagcttatcgatggaatcagctactgtcatagcaaaggtgttttccacagggatctcaagctagagaatgttcttcttgatgcaaagggacatataaagatcactgattttggcctcagtgctctgcctcagcattttagggatgacggattgttgcatacaacctgtggaagtcctaattacgttgcgcctgaggttttagctaacagaggctacgatggtgcagcatcagacatatggtcctgtggtgtaatcttgtatgtgattctaaccggatgtcttcctttcgacgacagaaaccttgcagttctttaccagaagatatgtaaaggagacccaccaataccaagatggttatccccgggtgcaagaaccatgattaagagaatgcttgatccaaatccagtcacgaggatcacagttgtgggtattaaagccagcgagtggttcaaacttgagtacattccttcaattcccgatgatgatgacgaagaagaagttgacacagacgatgatgctttctcaatccaagaactcggatcagaagaagggaagggcagtgattcaccgaccatcatcaatgcgtttcagttaatcggaatgtcttcctttcttgacctgtccggtttctttgaacaagagaatgtatcagagaggagaataagattcacttcaaatagctcagcaaaagatttactggagaaaatcgaaacagccgttacagaaatgggattcagtgtacaaaagaaacatgccaagttaagagtaaaccaggaggagagaacccagaaaggtcaagttggtttatcagtaacagctgaggttttcgagataaagccgtcactgaacgtggttgagctaagaaaatcttatggcgattcatgtttatatagacagttgtacgagagactattaaaagacgtgggcacatcctcgccggagcaagagatagtaacttaggtgttggtgttttcggctgaagagatatacatagctctaataatttatcatatggaacacaccatccatgttcatataatttattatcttaagtatatataaaaggagctcgatttatatgattagtgcaaatagtaattgcatttaagtataaaccgtggcgtagatctttcctcaagaattagagattttattcactacctttgtatttgtttttattattatttggtgtggcaaatctgcctactagcaaaaaagatcccat

SEQ ID NO: 6403 - protein, 444 aa, Arabidopsis thaliana
MVRRQEEEKKAEKGMRLGKYELGRTLGEGNFGKVKFAKDTVSGHSFAVKIIDKSRIADLNFSLQIKREIRTLKMLKHPHIVRLHEVLASKTKINMVMELVTGGELFDRIVSNGKLTETDGRKMFQQLIDGISYCHSKGVFHRDLKLENVLLDAKGHIKITDFGLSALPQHFRDDGLLHTTCGSPNYVAPEVLANRGYDGAASDIWSCGVILYVILTGCLPFDDRNLAVLYQKICKGDPPIPRWLSPGARTMIKRMLDPNPVTRITVVGIKASEWFKLEYIPSIPDDDDEEEVDTDDDAFSIQELGSEEGKGSDSPTIINAFQLIGMSSFLDLSGFFEQENVSERRIRFTSNSSAKDLLEKIETAVTEMGFSVQKKHAKLRVNQEERTQKGQVGLSVTAEVFEIKPSLNVVELRKSYGDSCLYRQLYERLLKDVGTSSPEQEIVT

SEQ ID NO: 6404 - protein, 430 aa, Arabidopsis thaliana
MRLGKYELGRTLGEGNFGKVKFAKDTVSGHSFAVKIIDKSRIADLNFSLQIKREIRTLKMLKHPHIVRLHEVLASKTKINMVMELVTGGELFDRIVSNGKLTETDGRKMFQQLIDGISYCHSKGVFHRDLKLENVLLDAKGHIKITDFGLSALPQHFRDDGLLHTTCGSPNYVAPEVLANRGYDGAASDIWSCGVILYVILTGCLPFDDRNLAVLYQKICKGDPPIPRWLSPGARTMIKRMLDPNPVTRITVVGIKASEWFKLEYIPSIPDDDDEEEVDTDDDAFSIQELGSEEGKGSDSPTIINAFQLIGMSSFLDLSGFFEQENVSERRIRFTSNSSAKDLLEKIETAVTEMGFSVQKKHAKLRVNQEERTQKGQVGLSVTAEVFEIKPSLNVVELRKSYGDSCLYRQLYERLLKDVGTSSPEQEIVT

SEQ ID NO: 6405 - protein, 371 aa, Arabidopsis thaliana
MLKHPHIVRLHEVLASKTKINMVMELVTGGELFDRIVSNGKLTETDGRKMFQQLIDGISYCHSKGVFHRDLKLENVLLDAKGHIKITDFGLSALPQHFRDDGLLHTTCGSPNYVAPEVLANRGYDGAASDIWSCGVILYVILTGCLPFDDRNLAVLYQKICKGDPPIPRWLSPGARTMIKRMLDPNPVTRITVVGIKASEWFKLEYIPSIPDDDDEEEVDTDDDAFSIQELGSEEGKGSDSPTIINAFQLIGMSSFLDLSGFFEQENVSERRIRFTSNSSAKDLLEKIETAVTEMGFSVQKKHAKLRVNQEERTQKGQVGLSVTAEVFEIKPSLNVVELRKSYGDSCLYRQLYERLLKDVGTSSPEQEIVT

SEQ ID NO: 6406 - DNA, 1085 bp, Arabidopsis thaliana
tgagatggctatgtgcacaaatcttttgcagggccaagcttctgaatgggctctgcttagacgacattcatcggaagatctgtttggtgttcagatttgcggttcttatcctgacacggtgtcgcgcgtagttgaacttatagaccgagaatgcactgttgatttcatagatatcaacatgggttgcccgatagatatggttgtcaacaaaagtgctggttcagctcttctcaacaaaccattacggatgaagaacatcgtggaagtctcttcttccattgttgaaacacctatcactatcaaggtacgaacagcattctttgagggtaagaaccggatagattctttaattgcagatatcggaaactggggagccactgcagtgactattcatgggcggtcaagacagcaacgttatagcaagtctgcagattgggactatatataccagtgtaccaaaaacgctactactaacctacaggttataggaaatggagatgtgtactcatatttagactggaacaaacacaagtctgactgtcctgagttgtctagctgcatgattgctcgtggagcactgatcaagccttggatctttactgaaattaaagagcaacggcattgggacattacctctggagaaagacttaacatcatgaaggacttcgtacgttttggtcttcaacattggggatccgacacgaaaggagttgagacaactaggcatttcttgctggagtggctaagctacacatttaggtacatacctgtcggtttgcttgatgtgatcccgcagcaaatcaactggcgtccgccttcatactttggtcgtgatgatctcgagacactcatgatgtctgaatctgcgggtgactgggtgcggatatcggaaatgctgcttggaaaggttccggagggcttcacatttgcccccaagcacaaatccaacgcatatgacagagctgaaaacggctgattcaaccacattttctgtaatatcaaatctcattttaaaacatgtctgaaacgtcattctgtaatattttttgactgattaaataaaagacaatgcgatgatttctttg

SEQ ID NO: 6407 - protein, 324 aa, Arabidopsis thaliana
EMAMCTNLLQGQASEWALLRRHSSEDLFGVQICGSYPDTVSRVVELIDRECTVDFIDINMGCPIDMVVNKSAGSALLNKPLRMKNIVEVSSSIVETPITIKVRTAFFEGKNRIDSLIADIGNWGATAVTIHGRSRQQRYSKSADWDYIYQCTKNATTNLQVIGNGDVYSYLDWNKHKSDCPELSSCMIARGALIKPWIFTEIKEQRHWDITSGERLNIMKDFVRFGLQHWGSDTKGVETTRHFLLEWLSYTFRYIPVGLLDVIPQQINWRPPSYFGRDDLETLMMSESAGDWVRISEMLLGKVPEGFTFAPKHKSNAYDRAENG

SEQ ID NO: 6408 - protein, 323 aa, Arabidopsis thaliana
MAMCTNLLQGQASEWALLRRHSSEDLFGVQICGSYPDTVSRVVELIDRECTVDFIDINMGCPIDMVVNKSAGSALLNKPLRMKNIVEVSSSIVETPITIKVRTAFFEGKNRIDSLIADIGNWGATAVTIHGRSRQQRYSKSADWDYIYQCTKNATTNLQVIGNGDVYSYLDWNKHKSDCPELSSCMIARGALIKPWIFTEIKEQRHWDITSGERLNIMKDFVRFGLQHWGSDTKGVETTRHFLLEWLSYTFRYIPVGLLDVIPQQINWRPPSYFGRDDLETLMMSESAGDWVRISEMLLGKVPEGFTFAPKHKSNAYDRAENG

SEQ ID NO: 6409 - protein, 321 aa, Arabidopsis thaliana
MCTNLLQGQASEWALLRRHSSEDLFGVQICGSYPDTVSRVVELIDRECTVDFIDINMGCPIDMVVNKSAGSALLNKPLRMKNIVEVSSSIVETPITIKVRTAFFEGKNRIDSLIADIGNWGATAVTIHGRSRQQRYSKSADWDYIYQCTKNATTNLQVIGNGDVYSYLDWNKHKSDCPELSSCMIARGALIKPWIFTEIKEQRHWDITSGERLNIMKDFVRFGLQHWGSDTKGVETTRHFLLEWLSYTFRYIPVGLLDVIPQQINWRPPSYFGRDDLETLMMSESAGDWVRISEMLLGKVPEGFTFAPKHKSNAYDRAENG

SEQ ID NO: 6410 - DNA, 1137 bp, Arabidopsis thaliana
aagataaaaacctaaaatccatcttcgttgtcgtttcgtctgcttcacatcggaaagctacatctttttcgttttttgtggtggcgatttctattctccggctgaaacctaccttcaggattcagcctttctcaggttttcagttggattcagatagcagcttgtacttcttctagataatcggcgacacatatggatgattgggaggccgaggactttcaaccacttccctcaaaagttgaactgaaaagtaactgggatgatgaggatgtggatgagaatgatatcaaggactcgtgggaggaggaagatgtatctgctccgccacctatagtaaagcctgcttctgagaaggctccaaagaaaccagcagtaaaagctgttgaaaagaaggttaaaactgttgaagctccgaaaggaacatcaagggaagaacctctagatcctattgctgagaaacttcgcatgcagaggcttgtagaggaagctgattaccaatcaactgctgaactctttggagtaaagactgaagagaaaagcgtcgatatgttaattccgaagtctgaaagcgatttcttggattatgctgagttgatatctcagagacttgtaccatttgagaaaagctttcactatatcgggctactcaaagcagtgatgagactttctgtggctaatatgaaagcagcagatgttaaagacgttgcttcgtccattacagctatagcaaatgaaaaattgaaggcggagaaagaagctgctgctggcaaaaagaagtcaggtaagaagaaacaacttcatgttgataagcctgatgatgatcttgtttcgggtccttatgatgccatggacgatgatgatttcatgtgagaaaatggcaattttggagattgcattttacctcctataggattgtaactgagaagaggtttaaatcgtcggcggttttttgttttgtatactgaattgcaaaagtgtttttcttctgttttctttgctcggtttgatttaaaaatttgtgtaataagatttgttgtgggcacactatttcctattatatgaattgaacgagtactaagagcacggcctatgattcacttagaatttgaagccacattagtaagataagttttcgat

SEQ ID NO: 6411 - protein, 225 aa, Arabidopsis thaliana
MDDWEAEDFQPLPSKVELKSNWDDEDVDENDIKDSWEEEDVSAPPPIVKPASEKAPKKPAVKAVEKKVKTVEAPKGTSREEPLDPIAEKLRMQRLVEEADYQSTAELFGVKTEEKSVDMLIPKSESDFLDYAELISQRLVPFEKSFHYIGLLKAVMRLSVANMKAADVKDVASSITAIANEKLKAEKEAAAGKKKSGKKKQLHVDKPDDDLVSGPYDAMDDDDFM

SEQ ID NO: 6412 - protein, 134 aa, Arabidopsis thaliana
MQRLVEEADYQSTAELFGVKTEEKSVDMLIPKSESDFLDYAELISQRLVPFEKSFHYIGLLKAVMRLSVANMKAADVKDVASSITAIANEKLKAEKEAAAGKKKSGKKKQLHVDKPDDDLVSGPYDAMDDDDFM

SEQ ID NO: 6413 - DNA, 2014 bp, Arabidopsis thaliana
accataggtcaccaaagactttataaataacccatacattatcatatacatataggcatacaaagtgagagaactctactctagattgtgctaaactcaatttgtattaatgatggatagattttggtcatggagattgtttgttgctctctctctttttctccattctccaatttgttcttctgacaaagctccgaactactccttcatgcgggacgcgacaggaagtcctacaacgtcgtactacgactatatcatcatcggtggtgggactgccgggtgccctctagccgcaacgctgtctcaaaacgccagcgttttgctgctcgaacgcggtgactcaccgtacaataaccccaacatcacgaggctctcggctttcggagccgctctctctgacctgtctgagtcctcaccatctcagcgttttgtatcagaagatggtgtcattaatgcacgtgctcgggttctcggtggcggaagcgctctcaacgccggcttctatacacgtgcgggcactaaatacgttaggaacatgggttgggacggagcgctagcgaacgagtcgtaccagtgggttgaagctaaggtggcgtttcagcctccgatggggcggtggcaaacggccgtgagagacggcttattggaggctgggattgtccctaataatggtttcacctatgatcatatcaatggcaccaaatttggcggtactatttttgaccgcaacggcaatagacacaccgccgccgatttgttagagtatgccgatcctaagggtattaccgtccttttgcatgccaccgtccaccggatcttgtttcgtactcgaggtacgaccaagccaatagccaacggagttgtgtaccgagaccggaccggtcaggctcatagagcttacctaaaggaaggcgccttgagtgagatcatcctatcggccggaaccctagggagcccacaacttcttatgctaagtggtgttggcccatcggctcaattacaggcccaaaacatcacggtggtgatggaccagcctcatgtgggtcaaggcatgtatgacaaccctatgaatgccgtgttcgttccttctccagtccccgttgaggtctcactcattgaggttgttgggattaccggggaaggaacatatgtcgaagccgccggtggtgaaaattttggcggaggtggtggtggttctagtggatcgtcctccactagagactactatgcaatgttttcaccaagggcaacattattagagtcaaattcaatgaccaaattatcatcagcccaaccttttcaaggaggcttccttttagagaaagtaatgggcccattatcaacgggtcatttagagctcaagacccgaaacccaaaagataacccgattgtgactttcaactatttccaacatcctgacgacctaaaacgttgtgttcgaggaatccaaaccatagagagagtcgtgcaatctaaagctttttcgaggtataagtacgcagatgtgtcatttgagtatttacttaacctcacggcgagtactcctgtcaatctaaggccgcctcgcagtggtcctggagcctcgttgcctccatccgcagaggaattttgccaacatacagttacaaccatttggcattaccatggaggatgcgttgtgggcagagtggtcgatggggattataaagttattggtatcgaccagcttagagtcattgatatgtcgaccgttggttattgtcccgggacaaatcctcaagccacggttatgatgcttggcaggtatatgggtgtgaagatcttgagagagagactcaccaagaagtagggttttgaatcggatcaggggttttgggaaaacgttatattaaaaatgaaatgaatcaagatattactaatcgatgttattaatagctgaatatgtattgttcttggtaatttctgtttggtacttattattagaccaaactgagatgtatacggaaatatatgtatagactcattcccaattttc

SEQ ID NO: 6414 - protein, 572 aa, Arabidopsis thaliana
MMDRFWSWRLFVALSLFLHSPICSSDKAPNYSFMRDATGSPTTSYYDYIIIGGGTAGCPLAATLSQNASVLLLERGDSPYNNPNITRLSAFGAALSDLSESSPSQRFVSEDGVINARARVLGGGSALNAGFYTRAGTKYVRNMGWDGALANESYQWVEAKVAFQPPMGRWQTAVRDGLLEAGIVPNNGFTYDHINGTKFGGTIFDRNGNRHTAADLLEYADPKGITVLLHATVHRILFRTRGTTKPIANGVVYRDRTGQAHRAYLKEGALSEIILSAGTLGSPQLLMLSGVGPSAQLQAQNITVVMDQPHVGQGMYDNPMNAVFVPSPVPVEVSLIEVVGITGEGTYVEAAGGENFGGGGGGSSGSSSTRDYYAMFSPRATLLESNSMTKLSSAQPFQGGFLLEKVMGPLSTGHLELKTRNPKDNPIVTFNYFQHPDDLKRCVRGIQTIERVVQSKAFSRYKYADVSFEYLLNLTASTPVNLRPPRSGPGASLPPSAEEFCQHTVTTIWHYHGGCVVGRVVDGDYKVIGIDQLRVIDMSTVGYCPGTNPQATVMMLGRYMGVKILRERLTKK

SEQ ID NO: 6415 - protein, 571 aa, Arabidopsis thaliana
MDRFWSWRLFVALSLFLHSPICSSDKAPNYSFMRDATGSPTTSYYDYIIIGGGTAGCPLAATLSQNASVLLLERGDSPYNNPNITRLSAFGAALSDLSESSPSQRFVSEDGVINARARVLGGGSALNAGFYTRAGTKYVRNMGWDGALANESYQWVEAKVAFQPPMGRWQTAVRDGLLEAGIVPNNGFTYDHINGTKFGGTIFDRNGNRHTAADLLEYADPKGITVLLHATVHRILFRTRGTTKPIANGVVYRDRTGQAHRAYLKEGALSEIILSAGTLGSPQLLMLSGVGPSAQLQAQNITVVMDQPHVGQGMYDNPMNAVFVPSPVPVEVSLIEVVGITGEGTYVEAAGGENFGGGGGGSSGSSSTRDYYAMFSPRATLLESNSMTKLSSAQPFQGGFLLEKVMGPLSTGHLELKTRNPKDNPIVTFNYFQHPDDLKRCVRGIQTIERVVQSKAFSRYKYADVSFEYLLNLTASTPVNLRPPRSGPGASLPPSAEEFCQHTVTTIWHYHGGCVVGRVVDGDYKVIGIDQLRVIDMSTVGYCPGTNPQATVMMLGRYMGVKILRERLTKK

SEQ ID NO: 6416 - protein, 539 aa, Arabidopsis thaliana
MRDATGSPTTSYYDYIIIGGGTAGCPLAATLSQNASVLLLERGDSPYNNPNITRLSAFGAALSDLSESSPSQRFVSEDGVINARARVLGGGSALNAGFYTRAGTKYVRNMGWDGALANESYQWVEAKVAFQPPMGRWQTAVRDGLLEAGIVPNNGFTYDHINGTKFGGTIFDRNGNRHTAADLLEYADPKGITVLLHATVHRILFRTRGTTKPIANGVVYRDRTGQAHRAYLKEGALSEIILSAGTLGSPQLLMLSGVGPSAQLQAQNITVVMDQPHVGQGMYDNPMNAVFVPSPVPVEVSLIEVVGITGEGTYVEAAGGENFGGGGGGSSGSSSTRDYYAMFSPRATLLESNSMTKLSSAQPFQGGFLLEKVMGPLSTGHLELKTRNPKDNPIVTFNYFQHPDDLKRCVRGIQTIERVVQSKAFSRYKYADVSFEYLLNLTASTPVNLRPPRSGPGASLPPSAEEFCQHTVTTIWHYHGGCVVGRVVDGDYKVIGIDQLRVIDMSTVGYCPGTNPQATVMMLGRYMGVKILRERLTKK

SEQ ID NO: 6417 - DNA, 1439 bp, Arabidopsis thaliana
ttacatgaaaatgaggaggtagactcatgtaacataactcttaccaatagaggaagaagaaaaagttagcaagagtcggttacttgtgagaaattccaacaaatgccggaggatttatgcacatcttggagcatctgataagaggaaaaaattatgttcgctctcacatttctaaatccaaatccaagacttccatctccattgttccttgccaagtctactcctgaatcagcgttgagcagaagaagcagagctttttcatcttctaactcttatccttggagaccgaaccttagatttaatggcttcaagctcaagtcagctacagttccggagaatgtggaaggaggagatttggaatctggaagtttggttaaagggttgaagctaggaggcatgtttggagtttggtaccttctcaatatctactacaacattttcaacaaacaggtacttagggtttatccatatccagcgactgtaacagcatttcaattagggtgtggaacgttgatgattgctataatgtggctccttaaactccatccacgccccaaattttctccttctcagtttacggtgatcgtacaactagcagtagctcacacgttagggaacttgttaacaaatgtgagcttaggaagagtaaatgtctctttcacccacactatcaaagcaatggagcctttcttcaccgtcttgctttctgttctcttgctcggtgagtggccgagtctgtggattgtttgttcgttgttacctattgtcgctggagtctctttagcatctttcacagaagcttctttcaattggattggtttctgcagtgcaatggcttctaatgtgacgaatcaatcacgcaatgtcctcagtaaaaaattcatggttggaaaggacgctttggacaacatcaaccttttctctataataaccattatctcctttatcttactggttcctttagcaatcctcatcgatgggttcaaggttactccttcgcatttacaagtagcaacaagccagggtttgtcggtaaaagagttttgcatcatgtctctacttgctggtgtttgcttgcatagctaccaacaggtatcgtatatgatattggagatggtgtctccagtaacacactctgtagggaactgcgtgaagcgtgtggtggttattacatcatccattcttttcttcaaaactccagtctcacctcttaactctataggtaccgcgactgcactagctggagtatatttgtacagcagagccaaacgagtccaagtcaaaccaaatccaaaaatgtcttgaattttgtatatagaagctcttagtttattatttatgcgaaaaatgttgatatttttgttcatccatgtcgtttttacatgacactattaacttttgttaaattcaactaatctcattaaataattctattcttt

SEQ ID NO: 6418 - protein, 383 aa, Arabidopsis thaliana
MFALTFLNPNPRLPSPLFLAKSTPESALSRRSRAFSSSNSYPWRPNLRFNGFKLKSATVPENVEGGDLESGSLVKGLKLGGMFGVWYLLNIYYNIFNKQVLRVYPYPATVTAFQLGCGTLMIAIMWLLKLHPRPKFSPSQFTVIVQLAVAHTLGNLLTNVSLGRVNVSFTHTIKAMEPFFTVLLSVLLLGEWPSLWIVCSLLPIVAGVSLASFTEASFNWIGFCSAMASNVTNQSRNVLSKKFMVGKDALDNINLFSIITIISFILLVPLAILIDGFKVTPSHLQVATSQGLSVKEFCIMSLLAGVCLHSYQQVSYMILEMVSPVTHSVGNCVKRVVVITSSILFFKTPVSPLNSIGTATALAGVYLYSRAKRVQVKPNPKMS

SEQ ID NO: 6419 - protein, 302 aa, Arabidopsis thaliana
MFGVWYLLNIYYNIFNKQVLRVYPYPATVTAFQLGCGTLMIAIMWLLKLHPRPKFSPSQFTVIVQLAVAHTLGNLLTNVSLGRVNVSFTHTIKAMEPFFTVLLSVLLLGEWPSLWIVCSLLPIVAGVSLASFTEASFNWIGFCSAMASNVTNQSRNVLSKKFMVGKDALDNINLFSIITIISFILLVPLAILIDGFKVTPSHLQVATSQGLSVKEFCIMSLLAGVCLHSYQQVSYMILEMVSPVTHSVGNCVKRVVVITSSILFFKTPVSPLNSIGTATALAGVYLYSRAKRVQVKPNPKMS

SEQ ID NO: 6420 - protein, 263 aa, Arabidopsis thaliana
MIAIMWLLKLHPRPKFSPSQFTVIVQLAVAHTLGNLLTNVSLGRVNVSFTHTIKAMEPFFTVLLSVLLLGEWPSLWIVCSLLPIVAGVSLASFTEASFNWIGFCSAMASNVTNQSRNVLSKKFMVGKDALDNINLFSIITIISFILLVPLAILIDGFKVTPSHLQVATSQGLSVKEFCIMSLLAGVCLHSYQQVSYMILEMVSPVTHSVGNCVKRVVVITSSILFFKTPVSPLNSIGTATALAGVYLYSRAKRVQVKPNPKMS

SEQ ID NO: 6421 - DNA, 1307 bp, Arabidopsis thaliana
gaagaagaagaatccaaagacatgaaacttttctttattgttctcatctcttttctttccctcctccaagcatcaaaaggattcgatttcgacgaaaaagaattagaaaccgaagagaacgtatggaagctctatgagaggtggagaggccaccactctgtatccagagcctcccacgaggcaataaagcggttcaacgtttttagacacaatgtccttcatgtccacaggactaacaaaaagaacaagccttacaaactcaagatcaatagattcgccgacataacgcaccacgagtttagaagctcctacgctggctctaatgttaagcatcaccgaatgcttcgtggaccgaagcgcggatctggtggtttcatgtatgagaatgtgaccagagttccgagttctgttgattggcgagagaaaggagctgtcactgaggtcaagaatcaacaagattgtggaagttgctgggcgttttcgacggttgcagcagtggaagggataaacaagatcagaacaaacaaactggtttcattgtctgaacaagagcttgtggattgtgacactgaagagaatcaaggttgtgcaggaggtctcatggaacctgcgtttgaatttataaagaacaatggtggcatcaaaaccgaagagacttatccttacgattccagtgacgttcaattctgtagagctaatagtattggtggagaaactgtaaccatcgatggacacgaacacgtccctgagaatgatgaggaagaacttctcaaagctgttgctcaccagcctgtctctgtagctattgatgctgggagctcagatttccagctttactctgagggtgtgtttatcggagaatgcgggactcagttgaaccacggggtggtgattgttgggtatggagagaccaaaaatggaacaaaatattggatagtaaggaactcatggggacctgaatggggagaaggaggctatgttcggatagaaagaggaatatcggagaatgaaggacgttgcggtatagccatggaggcttcttatcccaccaagctctcttcgactccttctactcatgagtcagtagttcgtgatgatgttaaagacgagctctagagactttaagtcattgaaaactgaatttcgaaccattcttctagtgagcttacactgagtttattattttatggattgaggttcatgggtttcagtttacacatttatcgtgtattcatcttaaattgagacgatttttatctccttgtaatattggccagcatttgctttgcggaaaaatggcgttaaat

SEQ ID NO: 6422 - protein, 371 aa, Arabidopsis thaliana
EEEESKDMKLFFIVLISFLSLLQASKGFDFDEKELETEENVWKLYERWRGHHSVSRASHEAIKRFNVFRHNVLHVHRTNKKNKPYKLKINRFADITHHEFRSSYAGSNVKHHRMLRGPKRGSGGFMYENVTRVPSSVDWREKGAVTEVKNQQDCGSCWAFSTVAAVEGINKIRTNKLVSLSEQELVDCDTEENQGCAGGLMEPAFEFIKNNGGIKTEETYPYDSSDVQFCRANSIGGETVTIDGHEHVPENDEEELLKAVAHQPVSVAIDAGSSDFQLYSEGVFIGECGTQLNHGVVIVGYGETKNGTKYWIVRNSWGPEWGEGGYVRIERGISENEGRCGIAMEASYPTKLSSTPSTHESVVRDDVKDEL

SEQ ID NO: 6423 - protein, 364 aa, Arabidopsis thaliana
MKLFFIVLISFLSLLQASKGFDFDEKELETEENVWKLYERWRGHHSVSRASHEAIKRFNVFRHNVLHVHRTNKKNKPYKLKINRFADITHHEFRSSYAGSNVKHHRMLRGPKRGSGGFMYENVTRVPSSVDWREKGAVTEVKNQQDCGSCWAFSTVAAVEGINKIRTNKLVSLSEQELVDCDTEENQGCAGGLMEPAFEFIKNNGGIKTEETYPYDSSDVQFCRANSIGGETVTIDGHEHVPENDEEELLKAVAHQPVSVAIDAGSSDFQLYSEGVFIGECGTQLNHGVVIVGYGETKNGTKYWIVRNSWGPEWGEGGYVRIERGISENEGRCGIAMEASYPTKLSSTPSTHESVVRDDVKDEL

SEQ ID NO: 6424 - protein, 258 aa, Arabidopsis thaliana
MLRGPKRGSGGFMYENVTRVPSSVDWREKGAVTEVKNQQDCGSCWAFSTVAAVEGINKIRTNKLVSLSEQELVDCDTEENQGCAGGLMEPAFEFIKNNGGIKTEETYPYDSSDVQFCRANSIGGETVTIDGHEHVPENDEEELLKAVAHQPVSVAIDAGSSDFQLYSEGVFIGECGTQLNHGVVIVGYGETKNGTKYWIVRNSWGPEWGEGGYVRIERGISENEGRCGIAMEASYPTKLSSTPSTHESVVRDDVKDEL

SEQ ID NO: 6425 - DNA, 1766 bp, Arabidopsis thaliana
gagacgataatctcccaaatgtcatctccttcatctctcaggtaaaaaaactgagtcgagatttggtgacgtgatgaatcatttggtgataatctctgtgttcttgagctcagtattgttgttatatagaggagaatctggaatcacaagtagttttattcgatctgaatggcctgcggttgatataccacttgatcatcatgttttcaaagtcccaaaaggatataatgcaccacaacaagtacacataactcaaggtgattatgatggtaaagctgttatcatctcttgggttacacctgatgaacctggttctagccaagtacattacggtgcggttcaggggaaatatgagtttgttgctcaagggacttaccataactacacgttttacaagtataagtctggctttattcatcactgccttgtctctgaccttgagcatgatacaaaatactattacaagattgaaagcggtgaatcttctcgagagttttggtttgttacaccaccacatgtacatccagatgcttcctacaagtttggtattataggcgatatgggtcagacattcaactcgttatccacgttggaacattacatggagagtggagctcaggctgttttatttcttggagatctttcttatgctgatagatatcagtataatgacgttggtgtgagatgggatagctggggtcgttttgtggagcgtagtaccgcttatcaaccgtggctttggtctgcaggaaatcatgaagtagattacatgccatacatgggggaggtgacacctttcaggaattaccttcagcgttacactacgccttacttagcctcaaaaagtagcagtcctctttggtacgctgttaggcgtgcatctgctcatatcattgtcctctccagctattcgccttttgtgaagtataccccgcaatggcactggcttagtgaagagcttacaagagttgatagggagaaaacaccttggctaattgttttgatgcacgtcccaatatacaacagtaatgaagcacatttcatggagggtgaaagcatgcgagcagcttttgaggagtggtttgtccaacacaaagttgatgtaatctttgctgggcatgttcatgcctacgagagatcgtaccgaatatcaaatgtgcggtataacgtgtcaagcggagatcgttacccagttccagataagtcagcgcctgtttatatcacagttggagacggaggaaatcaagaaggtctggctggaaggtttacggaaccacagccagattattctgcatttcgggaagctagctatggccactctactctggatataaagaaccgaacacacgctatataccactggaaccgcaatgatgatgggaagaaagtggcaacggatgaatttgtattacacaaccagtactggggaaagaacattcgacggagaaagcttaagaagcattatatcaggagtgttgttggtggctggatcgccacttaattcactaagtctgcctcatgctttgtatcaaagtgtgtgaggatattcttttaactcggaacttattacttaatttgatgttaaatctctttcccgcttaagttttcagcaatctggaatatgaagggaattatgtattcttatcagtcttttgatgaagtgaggtctacttctgggattatggatttggtgaataatgtattccttagaacggtgttaaggaattgtttcacatgggtgtgaattgagaagtccatttgtgttt

SEQ ID NO: 6426 - protein, 475 aa, Arabidopsis thaliana
MNHLVIISVFLSSVLLLYRGESGITSSFIRSEWPAVDIPLDHHVFKVPKGYNAPQQVHITQGDYDGKAVIISWVTPDEPGSSQVHYGAVQGKYEFVAQGTYHNYTFYKYKSGFIHHCLVSDLEHDTKYYYKIESGESSREFWFVTPPHVHPDASYKFGIIGDMGQTFNSLSTLEHYMESGAQAVLFLGDLSYADRYQYNDVGVRWDSWGRFVERSTAYQPWLWSAGNHEVDYMPYMGEVTPFRNYLQRYTTPYLASKSSSPLWYAVRRASAHIIVLSSYSPFVKYTPQWHWLSEELTRVDREKTPWLIVLMHVPIYNSNEAHFMEGESMRAAFEEWFVQHKVDVIFAGHVHAYERSYRISNVRYNVSSGDRYPVPDKSAPVYITVGDGGNQEGLAGRFTEPQPDYSAFREASYGHSTLDIKNRTHAIYHWNRNDDGKKVATDEFVLHNQYWGKNIRRRKLKKHYIRSVVGGWIAT

SEQ ID NO: 6427 - protein, 313 aa, Arabidopsis thaliana
MGQTFNSLSTLEHYMESGAQAVLFLGDLSYADRYQYNDVGVRWDSWGRFVERSTAYQPWLWSAGNHEVDYMPYMGEVTPFRNYLQRYTTPYLASKSSSPLWYAVRRASAHIIVLSSYSPFVKYTPQWHWLSEELTRVDREKTPWLIVLMHVPIYNSNEAHFMEGESMRAAFEEWFVQHKVDVIFAGHVHAYERSYRISNVRYNVSSGDRYPVPDKSAPVYITVGDGGNQEGLAGRFTEPQPDYSAFREASYGHSTLDIKNRTHAIYHWNRNDDGKKVATDEFVLHNQYWGKNIRRRKLKKHYIRSVVGGWIAT

SEQ ID NO: 6428 - protein, 299 aa, Arabidopsis thaliana
MESGAQAVLFLGDLSYADRYQYNDVGVRWDSWGRFVERSTAYQPWLWSAGNHEVDYMPYMGEVTPFRNYLQRYTTPYLASKSSSPLWYAVRRASAHIIVLSSYSPFVKYTPQWHWLSEELTRVDREKTPWLIVLMHVPIYNSNEAHFMEGESMRAAFEEWFVQHKVDVIFAGHVHAYERSYRISNVRYNVSSGDRYPVPDKSAPVYITVGDGGNQEGLAGRFTEPQPDYSAFREASYGHSTLDIKNRTHAIYHWNRNDDGKKVATDEFVLHNQYWGKNIRRRKLKKHYIRSVVGGWIAT

SEQ ID NO: 6429 - DNA, 1779 bp, Arabidopsis thaliana
aaaaaaaaacttccctccttaccataaataataatagtagtataattttagtgtaaaaatcttgaagaaagccctacaatacaaggctacaacaatcccaatttctcctcgtcggagatttctaagtaaaaccctagaactaaccattatatatattataatacaaatatattcatccctccctctccctgtgtcttactctgtcttctcttcgaactgatctgagatttttgattctgcttctcttctcatcttctcccaaggtagagatggcacttgaatcaaatgctccagtggtggacccaaacactattggcaattcttttgttgagaaatactacaacctcttgtataagtcaccatcgcaagtgcatcagttttatctcgacgatagtgttttaggccgtcctggttctgatggagagatggtttctgtcaaatccttgaaagctatcaatgagcagattatgtccttcgattacgaaatctcaaagattcagattttgactgctgattcccaagcatcttacatgaatggagttgtgactctagtcacaggtttactaaccgtgaaagaggggcaaagaatgagattttctcaatcgtttttccttgtgccgctgaatggaagctatttcgttctcaacgatgtctttaggtatgttgctgatgagattgttgaaccagaagctaacaagaaagaagtcgaggaggttattcctcaagtggtccaaccaacagagcaggtagatgaagttgcagagccggttactatccctacccaacaacccgaggcgaaacagacaaccgaaaatacagtgaagaaaccagaaagagctgtagcaaatggacatcccaaaacacaggaggataatgttgtgaacgataaaagcaatggtgttgatgctcccaagaaatcatttgcacatattgtccaagatttggctcaaaacggtgctacattcaatgccaaagcttctcctgcaaagcctaagtctaagcctgttacaaagccgagtgctgctcgtgaatccaaagctcctgctcctgtttctgaacactcttctgctgcaacaatcgaccaacaagctgagggttatacgatatttgttgccaacttgctcatggacgctacaccagagcaactaaatgaaacattcaaaggttttggagctattacgaaagatggtatccaagtgagaagttacaggctcaagggaaactgttttggctttgtgacattcgcatctgctgaagctgtgaaattggtcctccaggctcacaaagaatcagccatcagaatcggaaaccgaagagtttcaatagaagagaaacgaggcaacaacgataatggaagacccgcaatgcgaaacggaggttataggaacgacaacggttacagaaacgatgggtataggcctcgaggcaacggttccaatggaggtcgaggctatggaagaaatggatctgagagacggggtgaatcacgcaatggtgaggctcacaatggtgatggcaaagttcatcagaacggtacggtagaagctagccgttaaaatactcaatccagaggctaaacaagtttgaagtcatttgttaaactctgttgtgttattgttgttcatttgaaattgaggttttataggaagagatagtgagagggagagagagagattagaagttcttttggagtaggtttatctcttaggtgataatcccttctttgagattttgtttgggataacaaaaatttgatgattacttttaccttccattctg

SEQ ID NO: 6430 - protein, 428 aa, Arabidopsis thaliana
MALESNAPVVDPNTIGNSFVEKYYNLLYKSPSQVHQFYLDDSVLGRPGSDGEMVSVKSLKAINEQIMSFDYEISKIQILTADSQASYMNGVVTLVTGLLTVKEGQRMRFSQSFFLVPLNGSYFVLNDVFRYVADEIVEPEANKKEVEEVIPQVVQPTEQVDEVAEPVTIPTQQPEAKQTTENTVKKPERAVANGHPKTQEDNVVNDKSNGVDAPKKSFAHIVQDLAQNGATFNAKASPAKPKSKPVTKPSAARESKAPAPVSEHSSAATIDQQAEGYTIFVANLLMDATPEQLNETFKGFGAITKDGIQVRSYRLKGNCFGFVTFASAEAVKLVLQAHKESAIRIGNRRVSIEEKRGNNDNGRPAMRNGGYRNDNGYRNDGYRPRGNGSNGGRGYGRNGSERRGESRNGEAHNGDGKVHQNGTVEASR

SEQ ID NO: 6431 - protein, 376 aa, Arabidopsis thaliana
MVSVKSLKAINEQIMSFDYEISKIQILTADSQASYMNGVVTLVTGLLTVKEGQRMRFSQSFFLVPLNGSYFVLNDVFRYVADEIVEPEANKKEVEEVIPQVVQPTEQVDEVAEPVTIPTQQPEAKQTTENTVKKPERAVANGHPKTQEDNVVNDKSNGVDAPKKSFAHIVQDLAQNGATFNAKASPAKPKSKPVTKPSAARESKAPAPVSEHSSAATIDQQAEGYTIFVANLLMDATPEQLNETFKGFGAITKDGIQVRSYRLKGNCFGFVTFASAEAVKLVLQAHKESAIRIGNRRVSIEEKRGNNDNGRPAMRNGGYRNDNGYRNDGYRPRGNGSNGGRGYGRNGSERRGESRNGEAHNGDGKVHQNGTVEASR

SEQ ID NO: 6432 - protein, 362 aa, Arabidopsis thaliana
MSFDYEISKIQILTADSQASYMNGVVTLVTGLLTVKEGQRMRFSQSFFLVPLNGSYFVLNDVFRYVADEIVEPEANKKEVEEVIPQVVQPTEQVDEVAEPVTIPTQQPEAKQTTENTVKKPERAVANGHPKTQEDNVVNDKSNGVDAPKKSFAHIVQDLAQNGATFNAKASPAKPKSKPVTKPSAARESKAPAPVSEHSSAATIDQQAEGYTIFVANLLMDATPEQLNETFKGFGAITKDGIQVRSYRLKGNCFGFVTFASAEAVKLVLQAHKESAIRIGNRRVSIEEKRGNNDNGRPAMRNGGYRNDNGYRNDGYRPRGNGSNGGRGYGRNGSERRGESRNGEAHNGDGKVHQNGTVEASR

SEQ ID NO: 6433 - DNA, 1976 bp, Arabidopsis thaliana
gaacctaccatacttcaccacataaccacttctgtctctgcgaatctccataagactctttgagaagctttcctctgtttctccgctgttatgggtagctccggcgacgttaactggaaacttgcggaccaccccaagcttcccaaaggcaaaactatcggtttgattgttctcgatggatggggtgaatctgatcccgatcaatacaattgcatccataaagctccaactcctgccatggattcccttaaagacgggaagcccgacacatggaggttgatcaaagctcatggtaccgccgttggtctccccagcgaagacgacatgggaaacagtgaagttggccacaatgctcttggagctggtcgaatttacgctcaaggtgctaagcttgttgatctcgcccttgcttcagggaaaatctatgaagatgaaggtttcaaatacatctctcaatcttttgagaaaggcactgtgcaccttattggtcttctaagcgatggtggagttcactctcgtttggatcaagtccagttgctgcttaagggttttgcagaacgtggtgctaagagaatccgcgtccatattcttactgatggtcgtgatgttttggatggttctagtgtcggatttgttgaaactcttgaagctgacctagctgctttacgtgcgaaaggtgttgatgctcaggttgcatctggtggaggtcgaatgtatgtcacaatggaccgttatgagaatgattggagtgttgttaaacgaggttgggatgcacaagtccttggggaagctccccacaaatttaaaagcgctcttgaagcagttaagacactgagggcagaacctggtgccaatgaccagtatttgccttcgtttgttattgttgatgataatggaaaggctgtgggtccaattgttgatggtgacgcagttgttacattcaatttccgtgctgatcgaatggtcatgcatgcaaaggccctcgaatacaaagatttcgacaagtttgatcgcgtacgtgtccctgatatacgttatgcaggaatgctccaatatgatggagagcttaagcttcctagccgctatcttgtttctccaccattgattgacagaacttctggtgaatatctggcacacaatggcgttcgtacttttgcttgcagtgagactgtgaagtttggccatgtaaccttcttctggaatggcaaccgctctggatatttcaatgaaaagttagaagagtacgttgagattccaagtgatagtggaatatcattcaatgtccagccaaagatgaaagcactggaaattgccgagaaagcaagggatgctatccttagtggcaagtttgaccaggtgcgtgtaaacctgccaaatggagatatggtggggcatactggtgatattgaagcaactgttgttgcctgtgaagctgctgatcgtgctgtgaggacaatccttgatgccatagaacaggtcggagggatatacgttgtgactgcagatcacggaaatgctgaggacatggttaaaagggacaaatccggcaagcctgctctcgataaggaagggaaccttcagattcttacctctcacacccttaaaccagtgccaattgccataggaggtcctggcttgtcagcaggagttaggtttagacaggatatcgagacacctgggcttgcaaatgtagctgcgacagtgatgaacctccatggatttgtggccccgagtgactatgagacaagtctgatcgaagtcgtcgagaagtgatgattcttgttgttgtagttctttttaaaagtcccacctgagcctctatagactctgattctcttttaagttactattttcaccgctctctaataaggctcgtgattttttgggagccatactgtatactcgccggccctctcacgatgttgttcaattcacagactaaatttgatttatctatttcgccaaaacataacttc

SEQ ID NO: 6434 - protein, 560 aa, Arabidopsis thaliana
MGSSGDVNWKLADHPKLPKGKTIGLIVLDGWGESDPDQYNCIHKAPTPAMDSLKDGKPDTWRLIKAHGTAVGLPSEDDMGNSEVGHNALGAGRIYAQGAKLVDLALASGKIYEDEGFKYISQSFEKGTVHLIGLLSDGGVHSRLDQVQLLLKGFAERGAKRIRVHILTDGRDVLDGSSVGFVETLEADLAALRAKGVDAQVASGGGRMYVTMDRYENDWSVVKRGWDAQVLGEAPHKFKSALEAVKTLRAEPGANDQYLPSFVIVDDNGKAVGPIVDGDAVVTFNFRADRMVMHAKALEYKDFDKFDRVRVPDIRYAGMLQYDGELKLPSRYLVSPPLIDRTSGEYLAHNGVRTFACSETVKFGHVTFFWNGNRSGYFNEKLEEYVEIPSDSGISFNVQPKMKALEIAEKARDAILSGKFDQVRVNLPNGDMVGHTGDIEATVVACEAADRAVRTILDAIEQVGGIYVVTADHGNAEDMVKRDKSGKPALDKEGNLQILTSHTLKPVPIAIGGPGLSAGVRFRQDIETPGLANVAATVMNLHGFVAPSDYETSLIEVVEK

SEQ ID NO: 6435 - protein, 511 aa, Arabidopsis thaliana
MDSLKDGKPDTWRLIKAHGTAVGLPSEDDMGNSEVGHNALGAGRIYAQGAKLVDLALASGKIYEDEGFKYISQSFEKGTVHLIGLLSDGGVHSRLDQVQLLLKGFAERGAKRIRVHILTDGRDVLDGSSVGFVETLEADLAALRAKGVDAQVASGGGRMYVTMDRYENDWSVVKRGWDAQVLGEAPHKFKSALEAVKTLRAEPGANDQYLPSFVIVDDNGKAVGPIVDGDAVVTFNFRADRMVMHAKALEYKDFDKFDRVRVPDIRYAGMLQYDGELKLPSRYLVSPPLIDRTSGEYLAHNGVRTFACSETVKFGHVTFFWNGNRSGYFNEKLEEYVEIPSDSGISFNVQPKMKALEIAEKARDAILSGKFDQVRVNLPNGDMVGHTGDIEATVVACEAADRAVRTILDAIEQVGGIYVVTADHGNAEDMVKRDKSGKPALDKEGNLQILTSHTLKPVPIAIGGPGLSAGVRFRQDIETPGLANVAATVMNLHGFVAPSDYETSLIEVVEK

SEQ ID NO: 6436 - protein, 482 aa, Arabidopsis thaliana
MGNSEVGHNALGAGRIYAQGAKLVDLALASGKIYEDEGFKYISQSFEKGTVHLIGLLSDGGVHSRLDQVQLLLKGFAERGAKRIRVHILTDGRDVLDGSSVGFVETLEADLAALRAKGVDAQVASGGGRMYVTMDRYENDWSVVKRGWDAQVLGEAPHKFKSALEAVKTLRAEPGANDQYLPSFVIVDDNGKAVGPIVDGDAVVTFNFRADRMVMHAKALEYKDFDKFDRVRVPDIRYAGMLQYDGELKLPSRYLVSPPLIDRTSGEYLAHNGVRTFACSETVKFGHVTFFWNGNRSGYFNEKLEEYVEIPSDSGISFNVQPKMKALEIAEKARDAILSGKFDQVRVNLPNGDMVGHTGDIEATVVACEAADRAVRTILDAIEQVGGIYVVTADHGNAEDMVKRDKSGKPALDKEGNLQILTSHTLKPVPIAIGGPGLSAGVRFRQDIETPGLANVAATVMNLHGFVAPSDYETSLIEVVEK

SEQ ID NO: 6437 - DNA, 1894 bp, Arabidopsis thaliana
atctcgccagtgagaaagactccaaggagagagagctcatacagagtattagaaattctcaaatcactagagaagatctcgtcttcttcctgattttaaacgcgatgcgaaggttaggtcaccaccgacttcatgggaagacgggaggagttggaacaaaggggatggtggcgaaactgtctatcggagtcattgttctactgatctgtacgctctcgctgcttttctcggctaacatcggtagcaatcgcgaaccgacccgtccatctaagataaacgtggaagagctctgggagagtgctaaatctggtggttggagaccgtcttctgcaccacgatctgactggcctcctcctacgaaggagacaaatggttatctccgtgttcgatgtaatggtggtttgaatcagcaacgtagtgcgatatgtaatgcagtacttgctgcgcggatcatgaatgctacacttgtgttgcccgaattagatgcaaactcgttttggcatgatgacagtggttttcaaggtatctatgacgttgaacattttattgagacactgaagtatgatgttaagattgtgggaaagatccccgatgttcacaaaaatgggaaaaccaagaagataaaagcttttcagattcgtcctcctcgagatgctcctattgagtggtacctgacaactgctctaaaggcaatgagggaacatagtgctatctatcttacccctttttcacatcgtttagcggaggaaattgacaatcctgaatatcaaaggttaaggtgcagagtgaactaccatgctttgagattcaagccacacatcatgaagttgagtgaatctattgttgataaactccggtcacagggccacttcatgtcgatccatcttcgttttgaaatggatatgttggcatttgcggggtgctttgacatatttaaccctgaggaacagaagatacttaggaagtaccgtaaagaaaattttgcagataaaaggcttatttacaacgaaagacgggctatcgggaagtgtccactgacccctgaggaggtaggtcttatattacgagcaatgagattcgacaactcaacaaggatatacctagcagccggtgaactttttggcggggaacagttcatgaaaccgtttcgaacattattcccacggcttgataaccatagctcggtagacccctctgaggagctgtcagcaacctcacagggattaataggatcagctgtggattacatggtttgtcttctctccgacatttttatgccaacatatgatggaccgagcaatttcgccaacaatctcttaggtcatcgcctttactatggtttccgtaccacaatcagaccagacagaaaagcattagctccaattttcatagctagagagaaggggaaaagggctggcttcgaagaggcagtgagacgagtaatgctgaaaacaaacttcggagggcctcacaagcgtgtatctcctgaatcgttttatacaaattcatggcctgaatgtttctgtcagatgaatccgaagaagtctagtgataaatgcccgccaaataatgttatagagattcttgacagccggttagagagtatcagagatccagattcaacttctcagacgaattccacggtcactggattagaacggtaaggatcttaactggtaagcctttggaacgttttatacctaaaagtgtttcaaacaaagaagagcagaagaagagagatgtgtctccaccattgttcatacaattcaggtagctcaacgtctctgtgtcaaacaattttctttatgaagcatagatttgaatcttgtttcaaaatttgtaacaaaatctaagagaagtgatgagattccactaatagttgttttattgagtt

SEQ ID NO: 6438 - protein, 553 aa, Arabidopsis thaliana
LASEKDSKERELIQSIRNSQITREDLVFFLILNAMRRLGHHRLHGKTGGVGTKGMVAKLSIGVIVLLICTLSLLFSANIGSNREPTRPSKINVEELWESAKSGGWRPSSAPRSDWPPPTKETNGYLRVRCNGGLNQQRSAICNAVLAARIMNATLVLPELDANSFWHDDSGFQGIYDVEHFIETLKYDVKIVGKIPDVHKNGKTKKIKAFQIRPPRDAPIEWYLTTALKAMREHSAIYLTPFSHRLAEEIDNPEYQRLRCRVNYHALRFKPHIMKLSESIVDKLRSQGHFMSIHLRFEMDMLAFAGCFDIFNPEEQKILRKYRKENFADKRLIYNERRAIGKCPLTPEEVGLILRAMRFDNSTRIYLAAGELFGGEQFMKPFRTLFPRLDNHSSVDPSEELSATSQGLIGSAVDYMVCLLSDIFMPTYDGPSNFANNLLGHRLYYGFRTTIRPDRKALAPIFIAREKGKRAGFEEAVRRVMLKTNFGGPHKRVSPESFYTNSWPECFCQMNPKKSSDKCPPNNVIEILDSRLESIRDPDSTSQTNSTVTGLER

SEQ ID NO: 6439 - protein, 519 aa, Arabidopsis thaliana
MRRLGHHRLHGKTGGVGTKGMVAKLSIGVIVLLICTLSLLFSANIGSNREPTRPSKINVEELWESAKSGGWRPSSAPRSDWPPPTKETNGYLRVRCNGGLNQQRSAICNAVLAARIMNATLVLPELDANSFWHDDSGFQGIYDVEHFIETLKYDVKIVGKIPDVHKNGKTKKIKAFQIRPPRDAPIEWYLTTALKAMREHSAIYLTPFSHRLAEEIDNPEYQRLRCRVNYHALRFKPHIMKLSESIVDKLRSQGHFMSIHLRFEMDMLAFAGCFDIFNPEEQKILRKYRKENFADKRLIYNERRAIGKCPLTPEEVGLILRAMRFDNSTRIYLAAGELFGGEQFMKPFRTLFPRLDNHSSVDPSEELSATSQGLIGSAVDYMVCLLSDIFMPTYDGPSNFANNLLGHRLYYGFRTTIRPDRKALAPIFIAREKGKRAGFEEAVRRVMLKTNFGGPHKRVSPESFYTNSWPECFCQMNPKKSSDKCPPNNVIEILDSRLESIRDPDSTSQTNSTVTGLER

SEQ ID NO: 6440 - protein, 499 aa, Arabidopsis thaliana
MVAKLSIGVIVLLICTLSLLFSANIGSNREPTRPSKINVEELWESAKSGGWRPSSAPRSDWPPPTKETNGYLRVRCNGGLNQQRSAICNAVLAARIMNATLVLPELDANSFWHDDSGFQGIYDVEHFIETLKYDVKIVGKIPDVHKNGKTKKIKAFQIRPPRDAPIEWYLTTALKAMREHSAIYLTPFSHRLAEEIDNPEYQRLRCRVNYHALRFKPHIMKLSESIVDKLRSQGHFMSIHLRFEMDMLAFAGCFDIFNPEEQKILRKYRKENFADKRLIYNERRAIGKCPLTPEEVGLILRAMRFDNSTRIYLAAGELFGGEQFMKPFRTLFPRLDNHSSVDPSEELSATSQGLIGSAVDYMVCLLSDIFMPTYDGPSNFANNLLGHRLYYGFRTTIRPDRKALAPIFIAREKGKRAGFEEAVRRVMLKTNFGGPHKRVSPESFYTNSWPECFCQMNPKKSSDKCPPNNVIEILDSRLESIRDPDSTSQTNSTVTGLER

SEQ ID NO: 6441 - DNA, 1214 bp, Arabidopsis thaliana
actaccacccgagaacacacgattattctccaaagagaaagagaaaaatcaataacctcatagtgtcgacatgggttgccaagacgaacaattggtgcaaacaatatgcgatctctacgaaaagatctcaaagcttgagagtctaaaaccatccgaagatgtcaacattctcttcaagcagctcgtttccacatgcataccaccaaaccctaacatcgatgtcaccaagatgtgtgacagagtccaagagattcgacttaatctcatcaagatttgtggtctagccgaaggtcacttagaaaaccatttctcttcgatcttgacctcttaccaagacaacccacttcatcatttaaacattttcccttattacaacaactatttgaaactcggaaagctcgagttcgacctcctcgaacaaaacctaaatggctttgtcccaaagagtgtggctttcattggatctggtcctcttcctctcacttccatcgttcttgcttcattccatctcaaagacacaatctttcacaactttgacatcgacccatcagcgaactcactcgcttctcttctggtttcctctgatccagacatctctcaacgcatgttcttccacaccgttgatataatggacgtgacagagagcttaaagagctttgatgtcgtgtttctagctgctcttgttggaatgaacaaagaggagaaagttaaagtgatcgagcatctgcagaaacacatggctcctggtgctgtgctcatgcttaggagtgctcatggtccgagagcgtttctttatccgatcgttgagccgtgtgatcttcaggggttcgaggttttgtctatttatcacccaacagatgatgttatcaactccgtggtgatctctaaaaagcatccagttgtttcaattgggaatgttggtggtcctaattcatgcttgctcaagccttgcaactgttccaagacccacgcgaaaatgaacaagaacatgatgatcgaggagttcggagctagggaggaacagttgtcttaaggaggacgtttcttgtttcctaattctctatcttatggaagcttcctaattatgatttgtgtctttgtgttgtgtgttggtgtcttttctcaattgttctttgtttgttttatttttctttctatattcctagaaatggatttgtttcgcgcgacactgttgggctgaaacagaacacgat

SEQ ID NO: 6442 - protein, 320 aa, Arabidopsis thaliana
MGCQDEQLVQTICDLYEKISKLESLKPSEDVNILFKQLVSTCIPPNPNIDVTKMCDRVQEIRLNLIKICGLAEGHLENHFSSILTSYQDNPLHHLNIFPYYNNYLKLGKLEFDLLEQNLNGFVPKSVAFIGSGPLPLTSIVLASFHLKDTIFHNFDIDPSANSLASLLVSSDPDISQRMFFHTVDIMDVTESLKSFDVVFLAALVGMNKEEKVKVIEHLQKHMAPGAVLMLRSAHGPRAFLYPIVEPCDLQGFEVLSIYHPTDDVINSVVISKKHPVVSIGNVGGPNSCLLKPCNCSKTHAKMNKNMMIEEFGAREEQLS

SEQ ID NO: 6443 - protein, 267 aa, Arabidopsis thaliana
MCDRVQEIRLNLIKICGLAEGHLENHFSSILTSYQDNPLHHLNIFPYYNNYLKLGKLEFDLLEQNLNGFVPKSVAFIGSGPLPLTSIVLASFHLKDTIFHNFDIDPSANSLASLLVSSDPDISQRMFFHTVDIMDVTESLKSFDVVFLAALVGMNKEEKVKVIEHLQKHMAPGAVLMLRSAHGPRAFLYPIVEPCDLQGFEVLSIYHPTDDVINSVVISKKHPVVSIGNVGGPNSCLLKPCNCSKTHAKMNKNMMIEEFGAREEQLS

SEQ ID NO: 6444 - DNA, 2853 bp, Arabidopsis thaliana
aattcgtcgagaaccgacatatcatctctctttgtttagatctcttcttcccacgattacaaaatcctgtccggtgggtttttccccgatcggggtcggatctgattcctcggaagcaacgaatctcgaggcttctttttggttttggctttcggggaaaggctggaatcatttctctttacggagattaaacataaagttccttacttcagctgattagcttcattcgtgcttggtctgctccttcttgatctgggtttacaaacaaatttccttttttggcaaattatttctgtgtttggggtttcgaatttcgatctgctctcgggtgttttagtgattgaatttcgattcgtactgtcttatatctgttcaaagttgtcggctttactctaggcatttggggattttgcttgggttttgggttttatctccaatttttcagatttgtttactctaatcatatatcggagagttgcaattaggtttttatgaattggaggaaatttgcaatcttttgtgtttcccagttgagagggttttaggttttaagatgatggaacttgagttgtgtttctccttgtgaaagattgagtctttgtaaagcttttgtttgttatatccaacttctgagatatggcaagcagcaccattgatgttaccaagtatggtcacagtcctgttcatcacgctgttgtcacaagggattatgccggtctcaagaaactattatccgctcttccgaagatgcgtgacccgtctgaggttcaaaacgaagcagcttctgtagctgaagagacaaaagcggattcaatcgcagctgttatagacaggcgtgatgtggttaatcgagacacggcacttcatttagctgtaaagctcggtgatgagacctccgcggagatgcttatggctgctggtgctgattggagcttgcagaatgagcatggatggagcgctctacaagaagctatttgtggtagagaagagaggatcgctatgattatcgttaggcattatcagcctctggcttgggctaaatggtgcaggaggctgcctcggcttgtggctacgatgcatagaatgagagatttctacatggagatcactttccatttcgagagttctgttatacctttcatttctagagtggcgccttcggatacttataagatttggaagaggggtgcgaatcttagagcggatatgacactggctgggtttgatggtttcaggattcaaagatcggatcagactatactttttcttggagatgggtcagaggatggtaaagttccttccggttctcttcttatgatatcacataaggataaggagatcatgaatgctctagacggtgctggagctgccgcatcagaagaagaagttcgtcaagaagtggctgcaatgtccaaaacaagcattttcagacccgggatcgatgttactcaggctgttctcttcccgcaattaacatggaggcgtcaagagaagacagaaatggttgggcaatggaaagcaaaagtgtatgatatgcacaatgtagttgttagcataaaatcaagaagagtaccgggtgcaatgactgatgaggagcttttctcaaacactaatcaagaaaacgacacagaaagcgaggatcttggagatatcttgacggaagacgagaagaggcagctggagttagcactcaagttggactcaccggaagaatcttctaacggcgagagctctaggatttctcaaaagcagaatagttgttctttcgaggatcgagaaattccagtaacggatgggaacgggtattgcaaacaggagaagaaaggatggttcagtggttggaggaaacgagaggaagggcacagacgaagtagtgttcctccaagaaactcgctttgtgttgatgagaaagtaagtgatcttcttggggacgatgattctccatctcgtggaggaagacagataaaaccgggaagacactcaacggttgagacagttgtgaggaacgaaaacagggggctaagagattcatcaaaagcttcaacatcagaaggcagcggaagcagcaaacgaaaagaaggaaacaaagagaatgagtacaagaaagggcttagaccagttctttggctttctgagaggttcccattacagacaaaagaacttcttccattgctcgatatccttgcaaacaaagtcaaagcaatccgacgcttgagagagcttatgaccacgaaactaccttcgggaacattcccagtcaaggttgctattcccgtaattcctacaattagagtactcgtcacatttacaaagtttgaagagctagaagctatcgaagatgagtttgttacaccgccatctagtccaacttcttcggtgaagaacagtcctagagaagaaacacagagctcatcaaacccatcctcctcatggtttcaatggatcaaaacaccaagccaacgtccatcaacaagctcgagctctggagggtttaatatcggtaaagccgaaaacgatcaagacccatttgcaattccaagaggatacaattggatcacagctgaagagaagaaaaagaaggtccaagagaagaataaagctaagaagggcaagtcatctcagaacagctgaagaaaaagaaaactcaagtaagaaaagagcttgctctgtctctgagaacataaaatactcaaattaggaaaaatctagcagataaaaaaaaaaacaaatggaaccttttttcctggttcatgtactaataaaccagggaaaaacaaattcaattaaatatagtgggggaaattgaggaatgatgtgggttaatgttgttgtgactttattttatatttgctt

SEQ ID NO: 6445 - protein, 664 aa, Arabidopsis thaliana
MASSTIDVTKYGHSPVHHAVVTRDYAGLKKLLSALPKMRDPSEVQNEAASVAEETKADSIAAVIDRRDVVNRDTALHLAVKLGDETSAEMLMAAGADWSLQNEHGWSALQEAICGREERIAMIIVRHYQPLAWAKWCRRLPRLVATMHRMRDFYMEITFHFESSVIPFISRVAPSDTYKIWKRGANLRADMTLAGFDGFRIQRSDQTILFLGDGSEDGKVPSGSLLMISHKDKEIMNALDGAGAAASEEEVRQEVAAMSKTSIFRPGIDVTQAVLFPQLTWRRQEKTEMVGQWKAKVYDMHNVVVSIKSRRVPGAMTDEELFSNTNQENDTESEDLGDILTEDEKRQLELALKLDSPEESSNGESSRISQKQNSCSFEDREIPVTDGNGYCKQEKKGWFSGWRKREEGHRRSSVPPRNSLCVDEKVSDLLGDDDSPSRGGRQIKPGRHSTVETVVRNENRGLRDSSKASTSEGSGSSKRKEGNKENEYKKGLRPVLWLSERFPLQTKELLPLLDILANKVKAIRRLRELMTTKLPSGTFPVKVAIPVIPTIRVLVTFTKFEELEAIEDEFVTPPSSPTSSVKNSPREETQSSSNPSSSWFQWIKTPSQRPSTSSSSGGFNIGKAENDQDPFAIPRGYNWITAEEKKKKVQEKNKAKKGKSSQNS

SEQ ID NO: 6446 - protein, 627 aa, Arabidopsis thaliana
MRDPSEVQNEAASVAEETKADSIAAVIDRRDVVNRDTALHLAVKLGDETSAEMLMAAGADWSLQNEHGWSALQEAICGREERIAMIIVRHYQPLAWAKWCRRLPRLVATMHRMRDFYMEITFHFESSVIPFISRVAPSDTYKIWKRGANLRADMTLAGFDGFRIQRSDQTILFLGDGSEDGKVPSGSLLMISHKDKEIMNALDGAGAAASEEEVRQEVAAMSKTSIFRPGIDVTQAVLFPQLTWRRQEKTEMVGQWKAKVYDMHNVVVSIKSRRVPGAMTDEELFSNTNQENDTESEDLGDILTEDEKRQLELALKLDSPEESSNGESSRISQKQNSCSFEDREIPVTDGNGYCKQEKKGWFSGWRKREEGHRRSSVPPRNSLCVDEKVSDLLGDDDSPSRGGRQIKPGRHSTVETVVRNENRGLRDSSKASTSEGSGSSKRKEGNKENEYKKGLRPVLWLSERFPLQTKELLPLLDILANKVKAIRRLRELMTTKLPSGTFPVKVAIPVIPTIRVLVTFTKFEELEAIEDEFVTPPSSPTSSVKNSPREETQSSSNPSSSWFQWIKTPSQRPSTSSSSGGFNIGKAENDQDPFAIPRGYNWITAEEKKKKVQEKNKAKKGKSSQNS

SEQ ID NO: 6447 - protein, 575 aa, Arabidopsis thaliana
MLMAAGADWSLQNEHGWSALQEAICGREERIAMIIVRHYQPLAWAKWCRRLPRLVATMHRMRDFYMEITFHFESSVIPFISRVAPSDTYKIWKRGANLRADMTLAGFDGFRIQRSDQTILFLGDGSEDGKVPSGSLLMISHKDKEIMNALDGAGAAASEEEVRQEVAAMSKTSIFRPGIDVTQAVLFPQLTWRRQEKTEMVGQWKAKVYDMHNVVVSIKSRRVPGAMTDEELFSNTNQENDTESEDLGDILTEDEKRQLELALKLDSPEESSNGESSRISQKQNSCSFEDREIPVTDGNGYCKQEKKGWFSGWRKREEGHRRSSVPPRNSLCVDEKVSDLLGDDDSPSRGGRQIKPGRHSTVETVVRNENRGLRDSSKASTSEGSGSSKRKEGNKENEYKKGLRPVLWLSERFPLQTKELLPLLDILANKVKAIRRLRELMTTKLPSGTFPVKVAIPVIPTIRVLVTFTKFEELEAIEDEFVTPPSSPTSSVKNSPREETQSSSNPSSSWFQWIKTPSQRPSTSSSSGGFNIGKAENDQDPFAIPRGYNWITAEEKKKKVQEKNKAKKGKSSQNS

SEQ ID NO: 6448 - DNA, 1266 bp, Arabidopsis thaliana
agtaatctcaatcacaaactatttcccccccttcgttcatcaaatcctcaagagaaaaaaaaaatccccaaaagcttcctcaaaaccctaacacagatctctcgatcttctccgatctgtcttttctcctaatctggtttagtttgattttattggattgaagatgtcagacgctttgaatatgactcttgatgaaattgtgaagaagagtaagagtgaaaggtctgcagctgcaaggtctggaggtaaaggagtttcccgtaagagtggacgtggacgtggtggacctaatggtgttgtaggaggtggaagaggaggtggacctgttcgtagaggtcctcttgctgttaatactcggccatcatcatccttctccataaacaagcttgcccgcaggaagaggagcttgccatggcagaatcagaatgatttgtatgaagaaacccttagagctgttggggtatcaggagtggaagtcggaaccacagtttatattaccaaccttgatcagggagtgacaaatgaagatataagggaactctatgctgaaattggagagctgaaaagatatgcaattcactatgacaaaaatgggcgtccaagtggatcggctgaagttgtgtatatgagaagaagtgatgcaattcaagctatgaggaaatacaataatgtacttttggatggaaggcctatgaaactggagattctgggtggaaatactgaatctgctcctgtcgcagctcgtgttaatgtgactggattgaatggaaggatgaagaggagtgtcttcattggacaaggagttagaggtgggagagtaggaagaggaagaggttcaggtccttctgggagacgccttccactccaacaaaaccaacaaggtggtgtgacagctggtcgaggcgggttccgtggtagaggccggggtaatggtggtggcagagggaataaaagcggtgggcgaggtggaaagaagccagtggagaagtctgctgcggatctcgacaaagatctcgaaagctatcatgctgaagctatgaacatctcttaaacagaagcaagacttcgcatcttgtcatgtacttttgtgttctttattcttagtctctgactaaatatgtggcaaagtctggtttggtttaattacgtttaggatggctctactctgcttttattttcctcttttcttgtttcacactttcacagtcacttttggttattgaagttaaaagagatttagctgtaaatgagaaagctgttcttgtt

SEQ ID NO: 6449 - protein, 295 aa, Arabidopsis thaliana
MSDALNMTLDEIVKKSKSERSAAARSGGKGVSRKSGRGRGGPNGVVGGGRGGGPVRRGPLAVNTRPSSSFSINKLARRKRSLPWQNQNDLYEETLRAVGVSGVEVGTTVYITNLDQGVTNEDIRELYAEIGELKRYAIHYDKNGRPSGSAEVVYMRRSDAIQAMRKYNNVLLDGRPMKLEILGGNTESAPVAARVNVTGLNGRMKRSVFIGQGVRGGRVGRGRGSGPSGRRLPLQQNQQGGVTAGRGGFRGRGRGNGGGRGNKSGGRGGKKPVEKSAADLDKDLESYHAEAMNIS

SEQ ID NO: 6450 - protein, 289 aa, Arabidopsis thaliana
MTLDEIVKKSKSERSAAARSGGKGVSRKSGRGRGGPNGVVGGGRGGGPVRRGPLAVNTRPSSSFSINKLARRKRSLPWQNQNDLYEETLRAVGVSGVEVGTTVYITNLDQGVTNEDIRELYAEIGELKRYAIHYDKNGRPSGSAEVVYMRRSDAIQAMRKYNNVLLDGRPMKLEILGGNTESAPVAARVNVTGLNGRMKRSVFIGQGVRGGRVGRGRGSGPSGRRLPLQQNQQGGVTAGRGGFRGRGRGNGGGRGNKSGGRGGKKPVEKSAADLDKDLESYHAEAMNIS

SEQ ID NO: 6451 - DNA, 1485 bp, Arabidopsis thaliana
gaaattgtcctctcagttcctacgcgaagttttcaacagattcgccggagaatcttcgaatcaacggcggagaaatggctctatcacgcctctcatcacgatccaacatcatcactcgtcccttctccgccgccttcagccgattaatctcaacggacacaactccgatcacaatcgagacttcgcttcctttcacagctcacttatgtgatccaccgtcacgctccgtcgaatcatcgagtcaagagcttctcgatttcttcagaaccatggcgttgatgcgacgtatggaaatcgcagccgattcgctttacaaagcgaagctaatccgagggttttgtcatctctacgacggccaagaagctgtagctataggcatggaagctgcgattacaaagaaagacgcgattattactgcttatcgtgatcactgtattttcttaggtcgtggtggttcgcttcatgaggttttctcagagcttatgggaagacaagctggttgttctaaagggaaaggtggatctatgcacttctataagaaggaatcgtcgttttacggtggtcatgggattgttggtgctcaggttccattaggttgtggtattgcttttgctcagaagtataacaaggaagaggctgtcacatttgctttgtatggtgatggtgctgcgaatcagggacagttgtttgaagctttgaatatttctgctctttgggatttgcctgcaattttggtctgcgagaacaatcactatggaatgggaactgctgaatggagagccgctaagagtccatcttactacaagcgtggtgattatgttcctggactcaaggtagatggtatggatgcatttgctgtcaaacaagcttgcaaatttgctaagcagcatgcgttggagaaggggccaataattcttgagatggacacatacaggtaccacggtcactccatgtctgatcctgggagcacataccgtacccgagatgagatatctggtgtgaggcaggaacgggatccaattgagagaataaagaagctggtactatctcatgacctagcaaccgagaaagagcttaaggatatggagaaggaaattagaaaagaagtagatgacgccattgccaaagctaaggattgcccgatgccagagccttctgagctctttaccaatgtgtatgtgaagggatttggcaccgagtcatttggacctgacagaaaagaagtcaaagcttcccttccatgatcatggagctcttgttcgttaaactgccacgtgtcatgagaaagttggctgatagagaaatctatgaatatgaataaagatctgattgtatactctctctctcccccccccccccccttctgagttttaatctctctgtatctttgtttacaaacataaggagaaacatgttattcttgtgaagctttagtagtctcgtgtttaatattcaagcaatcgagttgagatctcattttgtgct

SEQ ID NO: 6452 - protein, 413 aa, Arabidopsis thaliana
NCPLSSYAKFSTDSPENLRINGGEMALSRLSSRSNIITRPFSAAFSRLISTDTTPITIETSLPFTAHLCDPPSRSVESSSQELLDFFRTMALMRRMEIAADSLYKAKLIRGFCHLYDGQEAVAIGMEAAITKKDAIITAYRDHCIFLGRGGSLHEVFSELMGRQAGCSKGKGGSMHFYKKESSFYGGHGIVGAQVPLGCGIAFAQKYNKEEAVTFALYGDGAANQGQLFEALNISALWDLPAILVCENNHYGMGTAEWRAAKSPSYYKRGDYVPGLKVDGMDAFAVKQACKFAKQHALEKGPIILEMDTYRYHGHSMSDPGSTYRTRDEISGVRQERDPIERIKKLVLSHDLATEKELKDMEKEIRKEVDDAIAKAKDCPMPEPSELFTNVYVKGFGTESFGPDRKEVKASLP

SEQ ID NO: 6453 - protein, 389 aa, Arabidopsis thaliana
MALSRLSSRSNIITRPFSAAFSRLISTDTTPITIETSLPFTAHLCDPPSRSVESSSQELLDFFRTMALMRRMEIAADSLYKAKLIRGFCHLYDGQEAVAIGMEAAITKKDAIITAYRDHCIFLGRGGSLHEVFSELMGRQAGCSKGKGGSMHFYKKESSFYGGHGIVGAQVPLGCGIAFAQKYNKEEAVTFALYGDGAANQGQLFEALNISALWDLPAILVCENNHYGMGTAEWRAAKSPSYYKRGDYVPGLKVDGMDAFAVKQACKFAKQHALEKGPIILEMDTYRYHGHSMSDPGSTYRTRDEISGVRQERDPIERIKKLVLSHDLATEKELKDMEKEIRKEVDDAIAKAKDCPMPEPSELFTNVYVKGFGTESFGPDRKEVKASLP

SEQ ID NO: 6454 - protein, 324 aa, Arabidopsis thaliana
MALMRRMEIAADSLYKAKLIRGFCHLYDGQEAVAIGMEAAITKKDAIITAYRDHCIFLGRGGSLHEVFSELMGRQAGCSKGKGGSMHFYKKESSFYGGHGIVGAQVPLGCGIAFAQKYNKEEAVTFALYGDGAANQGQLFEALNISALWDLPAILVCENNHYGMGTAEWRAAKSPSYYKRGDYVPGLKVDGMDAFAVKQACKFAKQHALEKGPIILEMDTYRYHGHSMSDPGSTYRTRDEISGVRQERDPIERIKKLVLSHDLATEKELKDMEKEIRKEVDDAIAKAKDCPMPEPSELFTNVYVKGFGTESFGPDRKEVKASLP

SEQ ID NO: 6455 - DNA, 1052 bp, Arabidopsis thaliana
gataaaagacctaagagggagaaagagagatcgaagagtgaaatctgaaatggaatcagctccgacgggatgcttcaagtgtggtcgtcccggtcattggtctcgtgattgtccatcatcggctccggtcgccggcaataattccgtttcttcttcttccgctccatctcaaatccctaataatgaatttcagagatcctccagtaaaagtggaacctcaatagctcctgctcctaaagtgacgaagacgagagttcaaaggcccaagctaactcctgaattgttactctctgaggatggtctcggctatgttcttcgctatttccctaaatccttcaagtatcgtggccgaggcaaagaggtgagcgatttggggaatttgatacggttgtacagtgagtggcacactcatttgctaccttactattcctttgatcactttgtgcataaagttcaacaagtcgcttctactaagcgtgttaagaattgtataaatgaactgcgagaaagggttgccagtggagttgatccaaacaagttatacgaaaagcaggaagaaaatactgttccttctgatgatcaagatatggatcagccaagtcatgacgaagagaacataccatcaaagagcgttgatgctgatacaaatgctgatgcttttgaagacagtatgttgaatgagatatttgataatgcttcaaagttaccgagcgatgaacaaaacatggataaaagcagtgaactgacagaagagcaaagagcacgtatggaagctaatagattgaaggcaatggagaaagctcagaacatttccgaggaacagagagtacgtatggaagctaataggctaaaagctctcgaaagagccaaagcaaggctccaaccaaatcaagattagactagagatgttcaatttgaattttggattgaaaaatttgtgcttttgaatgtttcaattagttatctaatagtaacaaatgtgtgtccgaaactagaacatatgtatggatgtctggtcgtgtgttagtttcggttgtggatccatcaaaccc

SEQ ID NO: 6456 - protein, 298 aa, Arabidopsis thaliana
IKDLRGRKRDRRVKSEMESAPTGCFKCGRPGHWSRDCPSSAPVAGNNSVSSSSAPSQIPNNEFQRSSSKSGTSIAPAPKVTKTRVQRPKLTPELLLSEDGLGYVLRYFPKSFKYRGRGKEVSDLGNLIRLYSEWHTHLLPYYSFDHFVHKVQQVASTKRVKNCINELRERVASGVDPNKLYEKQEENTVPSDDQDMDQPSHDEENIPSKSVDADTNADAFEDSMLNEIFDNASKLPSDEQNMDKSSELTEEQRARMEANRLKAMEKAQNISEEQRVRMEANRLKALERAKARLQPNQD

SEQ ID NO: 6457 - protein, 282 aa, Arabidopsis thaliana
MESAPTGCFKCGRPGHWSRDCPSSAPVAGNNSVSSSSAPSQIPNNEFQRSSSKSGTSIAPAPKVTKTRVQRPKLTPELLLSEDGLGYVLRYFPKSFKYRGRGKEVSDLGNLIRLYSEWHTHLLPYYSFDHFVHKVQQVASTKRVKNCINELRERVASGVDPNKLYEKQEENTVPSDDQDMDQPSHDEENIPSKSVDADTNADAFEDSMLNEIFDNASKLPSDEQNMDKSSELTEEQRARMEANRLKAMEKAQNISEEQRVRMEANRLKALERAKARLQPNQD

SEQ ID NO: 6458 - DNA, 2395 bp, Arabidopsis thaliana
atctctctctttcttcttccactcgtgaaagaaagaccagagagttttctcctgatccacacaacaacaacaacacagagatcccaaatccggaagatatcttcttctctcataactcagtttactcagattcactgaaacatacaattaagtgagcagtaaccgtcagtctctcacctgcagcaaaattcactcttctgctaataatgttctccacagagattcatctattgatcattttgactttttcaggaaccagagatgaaaaattatagttaaggttagtagtagtagataggtttaataaatttgtagttaagtaacccaaaaaaataacattaaactaaaatccaacactagaaaccagagagaccctcttaacgacaacaacctctctgtacacaagacaacaaacactctctacaaaaacactactctttccttcttcttctctctactctattctaattctaaagagagagagaaaagctatggatggatatgaagctactaggattgtgctctctagaatccaaagcttagaccctgaaaacgcatcaaagatcatgggtcttctccttcttcaagatcacggtgaaaaagagatgataaggctagcttttggtccagagactcttgttcactctgttatagtgaaagccaagaaagagttaggtctcatgaactgttcaaggtctccgtggagtcatcaagatgagttgattagccctaagaacaaccgtggctcttcactcaatccagcttctttgcccttttacgctaatggaggaagatcttctagggatttaaccaacgatttcgagctcatggatgatatgaactccagaagtactgattttttgggctctgtgcatgcgagaagcggtagctgcgttttggacggtttagggtatggtggtgattctgatttagggtttggaggtgtgccctgttcttacttcgctagaggcttctgcaaaaacggagctagctgcagattcgtccacagtgatggaggagctgatttggttggctccccaagcagaatcgagcttcttaggtctaactcggtacccccaagacttgctcaccacttcatgactcgctcttctctcccttctttttcaactaaaggtgttaacttgcagcaaaacgatgttcaaagagctgctgctgctttgatgataggagatgaattgcagaagcttggaagatggagacctgaaaggattgatctttctgctatggcttgtccagcttcaagacagatctatctgacattccctgccgacagtaggttcagggaggaagatgtgtccaattacttcagtacttttggaccagttcaagatgtgaggataccatatcagcaaaagagaatgtttggttttgtgacatttgtgtaccctgagactgttaagagcattctcgccaaagggaatcctcactttgtgtgtgattccagagttcttgtcaagccttacaaggagaaaggcaaagtccctgacaaatacagaactaaccaaacaacagagcgagaactgtccccaacaggccttgattctagccctagggacgttctaggagggagagggttttataacaacactcaagatgtgttgtggaggagtaagtttgaagaagagattcttgaacttcagagcagaaggctgatgaatctgcagcttcttgacgtcaagaagcatttccaactcaattcccctaccaacattcactctccgaatcctttcagccaatcacttatatctccacgcccattgtccgtgatcaagagagagtatgatggaggagagaaagggaaaggaagttctaaagaaggatctgatgatgatacaatgaatctaccagagaggttggaggatagcttgccagatagtccgtttgcatcgcccgctcatcatttgcttctgtttgctgattctgctgacaataacggatcggatctgtggtcgccttcttctgataatgatgataattctactccttctacactctccgactccttcaactctttcaactaccaaatgccaaggttaccggcgattggaatgttacccggtaggggtggaccaacctgtcgtgttgggatataaacaggaagtgaagtaagaaaagaaaaaaactgataaaatagagagacccttaataaccaaaaagatgcagaggtgtaaaaaataaaaagcaggaaatttgatgtaagagataggagaagagaaagaaggaagattgttgtaccatttctctagttttaatgtgttatgtgatgatggaccacacaagatgatgtaatatgatatgatatgatatatataatataggacaagaagtgtaatctctctaaagatatacaaaagaaaagagagattatcatttg

SEQ ID NO: 6459 - protein, 540 aa, Arabidopsis thaliana
MDGYEATRIVLSRIQSLDPENASKIMGLLLLQDHGEKEMIRLAFGPETLVHSVIVKAKKELGLMNCSRSPWSHQDELISPKNNRGSSLNPASLPFYANGGRSSRDLTNDFELMDDMNSRSTDFLGSVHARSGSCVLDGLGYGGDSDLGFGGVPCSYFARGFCKNGASCRFVHSDGGADLVGSPSRIELLRSNSVPPRLAHHFMTRSSLPSFSTKGVNLQQNDVQRAAAALMIGDELQKLGRWRPERIDLSAMACPASRQIYLTFPADSRFREEDVSNYFSTFGPVQDVRIPYQQKRMFGFVTFVYPETVKSILAKGNPHFVCDSRVLVKPYKEKGKVPDKYRTNQTTERELSPTGLDSSPRDVLGGRGFYNNTQDVLWRSKFEEEILELQSRRLMNLQLLDVKKHFQLNSPTNIHSPNPFSQSLISPRPLSVIKREYDGGEKGKGSSKEGSDDDTMNLPERLEDSLPDSPFASPAHHLLLFADSADNNGSDLWSPSSDNDDNSTPSTLSDSFNSFNYQMPRLPAIGMLPGRGGPTCRVGI

SEQ ID NO: 6460 - protein, 515 aa, Arabidopsis thaliana
MGLLLLQDHGEKEMIRLAFGPETLVHSVIVKAKKELGLMNCSRSPWSHQDELISPKNNRGSSLNPASLPFYANGGRSSRDLTNDFELMDDMNSRSTDFLGSVHARSGSCVLDGLGYGGDSDLGFGGVPCSYFARGFCKNGASCRFVHSDGGADLVGSPSRIELLRSNSVPPRLAHHFMTRSSLPSFSTKGVNLQQNDVQRAAAALMIGDELQKLGRWRPERIDLSAMACPASRQIYLTFPADSRFREEDVSNYFSTFGPVQDVRIPYQQKRMFGFVTFVYPETVKSILAKGNPHFVCDSRVLVKPYKEKGKVPDKYRTNQTTERELSPTGLDSSPRDVLGGRGFYNNTQDVLWRSKFEEEILELQSRRLMNLQLLDVKKHFQLNSPTNIHSPNPFSQSLISPRPLSVIKREYDGGEKGKGSSKEGSDDDTMNLPERLEDSLPDSPFASPAHHLLLFADSADNNGSDLWSPSSDNDDNSTPSTLSDSFNSFNYQMPRLPAIGMLPGRGGPTCRVGI

SEQ ID NO: 6461 - protein, 502 aa, Arabidopsis thaliana
MIRLAFGPETLVHSVIVKAKKELGLMNCSRSPWSHQDELISPKNNRGSSLNPASLPFYANGGRSSRDLTNDFELMDDMNSRSTDFLGSVHARSGSCVLDGLGYGGDSDLGFGGVPCSYFARGFCKNGASCRFVHSDGGADLVGSPSRIELLRSNSVPPRLAHHFMTRSSLPSFSTKGVNLQQNDVQRAAAALMIGDELQKLGRWRPERIDLSAMACPASRQIYLTFPADSRFREEDVSNYFSTFGPVQDVRIPYQQKRMFGFVTFVYPETVKSILAKGNPHFVCDSRVLVKPYKEKGKVPDKYRTNQTTERELSPTGLDSSPRDVLGGRGFYNNTQDVLWRSKFEEEILELQSRRLMNLQLLDVKKHFQLNSPTNIHSPNPFSQSLISPRPLSVIKREYDGGEKGKGSSKEGSDDDTMNLPERLEDSLPDSPFASPAHHLLLFADSADNNGSDLWSPSSDNDDNSTPSTLSDSFNSFNYQMPRLPAIGMLPGRGGPTCRVGI

SEQ ID NO: 6462 - DNA, 1151 bp, Arabidopsis thaliana
atacaaatcataactcaaagaaaaacaacccctcaacggtcgatgtgtgatcccattagagaagatggctctaacaaaagaggcgccgtgagtaaggaaaaaaggccgtatattcatagagaatggtcgtgggccgatataatacgagcgttaaccgttatcaatgtgcactttttgtgtctcttggcaccatttaactacaaatgggaagcattacggttcggtttcgtgctctacgcgttgacttcactcagcatcacattctcataccataggaacttgggctcaccggagctttaagcttccgaaatggcttgaatatcctttagcttattttgctgtttttgctcttcagggtgatccgttggattgggtgagcatacataggttccatcaccagttcacagattctgaccgtgacccacatagccctatcgaaggattttggttcagtcatgtgtggtggatatgtgacactcgttatatcaaatataagtgtggaggacgtaacaacgtgatggacttgaagcagcaatggttctattggtttctacgaatgacaattggtttccacgtcttaatgttttggactgtcctctatctctatggtggtttaccttaccttacatgcggcgggggcgttggaggtgtgattgggtaccacgtgacatggctcgtgaactcggcatgccatatttggggttcgagatcatggaagactaaagacacatctcgtaacgtttggtggctaagcttatttacaatgggagagagttggcacaataatcaccacgcctttgagtcatcggcgaggcaaggattggagtggtggcagatagacataacttggtatcttattcgactatttgaggttctcgggttagccactgacgtgaaattgccctcggaattccagaaacagaaactggctctgactcgttgatcatctgcatgagagatttatcagaattttatatttttagaaaattatcaaagttactataaaagaggataatatagatgagagtttatgattgttatagtcttattgatattttccactataaattgttgttttctgtctttggagtaggatttaaatgcggcaaaaaaaggtatctatttttttttttaataaaaggcttaagttg

SEQ ID NO: 6463 - protein, 141 aa, Arabidopsis thaliana
MDLKQQWFYWFLRMTIGFHVLMFWTVLYLYGGLPYLTCGGGVGGVIGYHVTWLVNSACHIWGSRSWKTKDTSRNVWWLSLFTMGESWHNNHHAFESSARQGLEWWQIDITWYLIRLFEVLGLATDVKLPSEFQKQKLALTR

SEQ ID NO: 6464 - protein, 128 aa, Arabidopsis thaliana
MTIGFHVLMFWTVLYLYGGLPYLTCGGGVGGVIGYHVTWLVNSACHIWGSRSWKTKDTSRNVWWLSLFTMGESWHNNHHAFESSARQGLEWWQIDITWYLIRLFEVLGLATDVKLPSEFQKQKLALTR

SEQ ID NO: 6465 - protein, 120 aa, Arabidopsis thaliana
MFWTVLYLYGGLPYLTCGGGVGGVIGYHVTWLVNSACHIWGSRSWKTKDTSRNVWWLSLFTMGESWHNNHHAFESSARQGLEWWQIDITWYLIRLFEVLGLATDVKLPSEFQKQKLALTR

SEQ ID NO: 6466 - DNA, 1637 bp, Arabidopsis thaliana
atcgataaccaaataaaaaatggcgatctctttcctctgtgtttttctcatcaccttcgtttcgttaatcttttttgccaagaaaatcaaacgatcaaaatggaatcttcctccaagccctcccaagtttccggtcatcgggaacttacatcagattggagaattgcctcacaggtcacttcaacatctcgccgaaagatacggacctgtgatgcttcttcactttgggtttgtccctataactgtggtctcatcgagagaagccgctgaagaagtgcttagaactcatgacctagactgttgcagcaggcctaagcttgtcgggacaaggttactctcgcgggattttaaagatatcggttttacgccatacggtaacgagtggaaggcgcggcgtaagtttgccctgcgtgagcttttctgtttgaaaaaggttcagtcctttaggcatatccgagaggaagaatgtaactttctggtcaagcaactgtcggaatctgcggttgatcgctctccggtcgatttgagcaaatcccttttctggctaaccgctagtatcctttttagagttgccttaggacagaattttcacgagagcgattttatcgataaagaaaagatcgaagagctcgtgttcgaagctgagactgccctagcaagtttcacttgttctgatttcttccctgttgccggacttggatggctcgttgattggttttccggacaacacaagagactcaacgatgttttttacaagctcgatgctctgtttcaacatgtcatagatgatcatttaaatcctggaagatcaaaagagcacgaagacatcatcgattcaatgttggatgtgattcataaacaaggagaggacagttccttagagctcacaatagatcatatcaaggggtttctcgcgaatatatttcttgcagggatagacacaggggccatcaccatgatatgggcagtgacggagctcgttaaaaacccgaaactgataaagaaagttcaaggcgatatccgagaacaacttggcagcaataaggagagaatcaccgaggaagatatcgagaaagttccttacttgaagatggtaatcaaagaaacattcaggttacacccagcagctcctcttatacttccaagggaaacaatggctcacatcaaagttcaagggtatgatattcctcccaagaggaggatcttggtcaatgtttcggcaataggaagagatcccaaactctggacaaacccgaaagagtttgaccctgagaggtttatggatagctttgttgattataggggacaacattacgagctcttaccatttgggtccggtcgaaggatatgtcccgggatgccaatggggattgctgccgtcgaattgggactcttgaacttactttacttcttcgattggaagttgcctgatgggatgacacataaagatatcgatactgaagaagctggtactcttacaatagtcaagaaagtacctctcaagctcgttccagttcgagttcagtgatcagaccaaactccaaaccttttgaataaatatatcatgcaaatcatgtaagcttctctgatgatgtatgaagtatatttttcagtaaaatactaagttgaaatttcat

SEQ ID NO: 6467 - protein, 502 aa, Arabidopsis thaliana
MAISFLCVFLITFVSLIFFAKKIKRSKWNLPPSPPKFPVIGNLHQIGELPHRSLQHLAERYGPVMLLHFGFVPITVVSSREAAEEVLRTHDLDCCSRPKLVGTRLLSRDFKDIGFTPYGNEWKARRKFALRELFCLKKVQSFRHIREEECNFLVKQLSESAVDRSPVDLSKSLFWLTASILFRVALGQNFHESDFIDKEKIEELVFEAETALASFTCSDFFPVAGLGWLVDWFSGQHKRLNDVFYKLDALFQHVIDDHLNPGRSKEHEDIIDSMLDVIHKQGEDSSLELTIDHIKGFLANIFLAGIDTGAITMIWAVTELVKNPKLIKKVQGDIREQLGSNKERITEEDIEKVPYLKMVIKETFRLHPAAPLILPRETMAHIKVQGYDIPPKRRILVNVSAIGRDPKLWTNPKEFDPERFMDSFVDYRGQHYELLPFGSGRRICPGMPMGIAAVELGLLNLLYFFDWKLPDGMTHKDIDTEEAGTLTIVKKVPLKLVPVRVQ

SEQ ID NO: 6468 - protein, 438 aa, Arabidopsis thaliana
MLLHFGFVPITVVSSREAAEEVLRTHDLDCCSRPKLVGTRLLSRDFKDIGFTPYGNEWKARRKFALRELFCLKKVQSFRHIREEECNFLVKQLSESAVDRSPVDLSKSLFWLTASILFRVALGQNFHESDFIDKEKIEELVFEAETALASFTCSDFFPVAGLGWLVDWFSGQHKRLNDVFYKLDALFQHVIDDHLNPGRSKEHEDIIDSMLDVIHKQGEDSSLELTIDHIKGFLANIFLAGIDTGAITMIWAVTELVKNPKLIKKVQGDIREQLGSNKERITEEDIEKVPYLKMVIKETFRLHPAAPLILPRETMAHIKVQGYDIPPKRRILVNVSAIGRDPKLWTNPKEFDPERFMDSFVDYRGQHYELLPFGSGRRICPGMPMGIAAVELGLLNLLYFFDWKLPDGMTHKDIDTEEAGTLTIVKKVPLKLVPVRVQ

SEQ ID NO: 6469 - DNA, 1362 bp, Arabidopsis thaliana
aggcgcaccaaactcacaaatgtctcactgagtccactcggtcaccacatattcgaagcgttctttgcttcctctgtatttcaagcaagcttcttcgatcttcctcctgtgttttcgtctctaatcgtaagtttaattttgctcggtatcgaagatttttgtcaatctcaaagtagatagatcagagttaagcaaagagattgataattaggtttaggaatcgaaatttattgtgatgttaggtaatcggaaccaatggaatcattgcattgagtagaaaccctaattttgggggactgtggagtaagtagatcaggaaaaccagtttcttgtggaagcttcaatggaaacgactgttaaaaactcaagcagtgatggtgagtggaaagtagtcttacctagtaaaggaagacaaggaagaagaagaaaaccgaaacctaaaggtcaagcagaagaagaagagcaaccatggaaatcagatgatcttgaaattgatccacagagacaagcaagactaaagcagaagatggaaatctctctgaagaaaatcgaaagctcgagtttttacacagcattcttggagcagcttaagtctcctgaggtttcgaatcagattcgcctcgtgttagggtctgaaacacagttgcagatggtgatgtacggtataggtagcattgagtcttatgaatctccgaggtttcagctgagcattgcaatcttgatgaagagagagtttgattgggttggtgataacattgaagtgtttgacccagttctctctgcaactgaatctagttacctagaatctttgggatgcagtgttctatctgtgaatgagcaagctcgtagggaagctttaaagcctactcttttcttcatgccacactgtgaggccaatctatacagcaacctattgcaagcaaattggagaatggatcgactgtcgaaaatcgcattgtttgggaacagctttcagatgtatgaggagcaagtttcatttgacgcagaagtcatctgtgctaccaaacgaatcatagctgcacaaagagtcacaagcgagtttgctattgagacggaatcagatgattattttgcagcattccatgattcaagctggcattttttcagttctggtatagattcggagctgccattgttcgtttcagactaattttagatcattgttttcaaaagctttttgattttcacttgtgcaacattttgtttatctgtctttttcctccttgcataatcttagccttcaaggcgggcaaaacaattgaagttattgacttatcaatgcagtcaataaaatttaatgcttgtctgatcataataaagatgcaaaccgtggtttatttc

SEQ ID NO: 6470 - protein, 275 aa, Arabidopsis thaliana
METTVKNSSSDGEWKVVLPSKGRQGRRRKPKPKGQAEEEEQPWKSDDLEIDPQRQARLKQKMEISLKKIESSSFYTAFLEQLKSPEVSNQIRLVLGSETQLQMVMYGIGSIESYESPRFQLSIAILMKREFDWVGDNIEVFDPVLSATESSYLESLGCSVLSVNEQARREALKPTLFFMPHCEANLYSNLLQANWRMDRLSKIALFGNSFQMYEEQVSFDAEVICATKRIIAAQRVTSEFAIETESDDYFAAFHDSSWHFFSSGIDSELPLFVSD

SEQ ID NO: 6471 - protein, 214 aa, Arabidopsis thaliana
MEISLKKIESSSFYTAFLEQLKSPEVSNQIRLVLGSETQLQMVMYGIGSIESYESPRFQLSIAILMKREFDWVGDNIEVFDPVLSATESSYLESLGCSVLSVNEQARREALKPTLFFMPHCEANLYSNLLQANWRMDRLSKIALFGNSFQMYEEQVSFDAEVICATKRIIAAQRVTSEFAIETESDDYFAAFHDSSWHFFSSGIDSELPLFVSD

SEQ ID NO: 6472 - protein, 173 aa, Arabidopsis thaliana
MVMYGIGSIESYESPRFQLSIAILMKREFDWVGDNIEVFDPVLSATESSYLESLGCSVLSVNEQARREALKPTLFFMPHCEANLYSNLLQANWRMDRLSKIALFGNSFQMYEEQVSFDAEVICATKRIIAAQRVTSEFAIETESDDYFAAFHDSSWHFFSSGIDSELPLFVSD

SEQ ID NO: 6473 - DNA, 2758 bp, Arabidopsis thaliana
acagcctcacttccaaacccttcgtttacagcaaaaaatcgaaaatggttgcctcagccgccgcacgacctcttgtcaccgtccaaggacttgacggtgacatgagcaccgatcaatccaccaccgtcactttaccagacgtcatgactgctccagttcgacctgacattgtcaacttcgtccacgcccaaatctccaacaacagccgtcagccttacgcagtctccaaaaaggccggtcaccaaacctccgccgagtcctggggaaccggaagagccgtgtcacgtatccctcgtgttcctggtggtggaactcaccgtgccggtcaagcagcgttcggaaacatgtgtcgtggtggtcgtatgtttgctccgactaagatctggagacgctggcaccgtcgtgtcaatgtcaacatgaagaggcacgcgattgtttctgcaatcgctgctactgctgttccagctcttgtgatggctcgtggtcacaagatcgagaatgttcctgagatgcctcttgttgttagcgactcagctgaagctgtggagaagacatcagctgcgatcaaggtattgaagcagatcggtgcttacgacgatgcggagaaagctaagaacagtattggaattcgtcctggtaaaggtaaaatgaggaatcgtcgttacatttctaggaaaggtcctcttgttgtgtttggaactgaaggagccaagattgtgaaagcttttaggaatcttcctggtgttgagctttgtcacgttgagaggcttaacttgttgaaattagcccctggtggtcaccttggtaggtttgtgatttggactaagtctgcttttgagaagcttgaatctatctatggctcgtttgagaaaccatcagagaagaagaagggttacgtcttgcctcgtgcgaagatggtgaatgctgatcttgctaggattattaactccgatgaggtacagagtgtggtgaacccgattaaggatggttccaagagagcggttctgaagaagaatccattgaagaaccttaatgtgatgttcaagttgaatccttatgctaagaccgcaaagagaatgtctctgttggctgaagcttcaagggttaaggctaagaaggagaagctcgagaagaagaggaaagtcgtcactaaggaggaggcccaagcgatcaaagcagcaggcaaggcttggtatcagactatgatttcagacagtgactacaccgagttcgataacttcaccaagtggcttggcgctagtcagtaatgatgctctcgtcatcgcaaagtctcttatatctaggcaaagattttggttttctgatttatgttcttcgtttgtattggatttatctgggattttatgttgttgagttggtaagacgatttttaagaactatgatggtgtttttcaaactcttttcaatctgtttccaaaaaaaaaaaaaaaactgacttccattgccaccacaacaaccaaaaccatatctcgccgccgccgtcgacgacgacgacacttgcttcaccaccgtatcgctatcaacagaggaaagagataagaagcgtgttaactctttcttctaattccatggatatttgtggcgttgattccgaaggaaaagagtttaatagcgtacaagagatgtggagagaagaaattggagaaggagacgaaactaaaaaaacccaatggtatagagatggtgtttcttattgggaaggtgttgaagcttctgttgatggagtattaggaggatatgggcatgtgaatgatgctgatattataggaagtgaggtttttcttaagactcttttgcaagaaagattagttaacaatgttggagctaatcagcatttagtagctcttgattgtggatctggtattggaagaatcactaaaaatcttctgattcgatactttaacgaggttgatcttcttgagcctgtagcacaatttttggatgcagctcgtgaaaatttggcatctgcaggctctgaaacgcacaaagctactaactttttctgtgtacctcttcaggagtttactccagctgctgggaggtatgatgtaatatgggttcaatggtgcattgggcatctcacggacaatgactttgtttctttctttaaccgcgcaaagggataccttaaacctggtgggtttttcgtcgtgaaagagaatctcgctaaaaatggatttgttttggataaagaggatcatagcatcaccagatcggatccatacttcaaacagctctttcgccaatgtgggttacatctctatagaacaaaggatcagaaaggtcttccacaagagttatttgctgtaaaaatgtatgcgttaacggttgacacaccacccaaaatccaccgaaccaggtcaaaaactcgaagcaacagaccgcagattatcaaatgacaaagcttccgattggtttactacggagtcttaatcgtttggtgtaaagagagaagctaccaaaggtgttgtaagatctggatcaaggcttggctgcttcattgtcacatggtttggttttgtgcatgctcgattctcctctcctccatcaccttaccaagtcataaactctcgtgtactcatgactaaacctgtttctgctccattctgttttttatctgataatttgtccggacttgaagaaattagaattgtgatccttttactgtagccacatattcctatatcatttttgtttaaaatatttaattgtactatatttcgatgttctacaagtc

SEQ ID NO: 6474 - protein, 421 aa, Arabidopsis thaliana
SLTSKPFVYSKKSKMVASAAARPLVTVQGLDGDMSTDQSTTVTLPDVMTAPVRPDIVNFVHAQISNNSRQPYAVSKKAGHQTSAESWGTGRAVSRIPRVPGGGTHRAGQAAFGNMCRGGRMFAPTKIWRRWHRRVNVNMKRHAIVSAIAATAVPALVMARGHKIENVPEMPLVVSDSAEAVEKTSAAIKVLKQIGAYDDAEKAKNSIGIRPGKGKMRNRRYISRKGPLVVFGTEGAKIVKAFRNLPGVELCHVERLNLLKLAPGGHLGRFVIWTKSAFEKLESIYGSFEKPSEKKKGYVLPRAKMVNADLARIINSDEVQSVVNPIKDGSKRAVLKKNPLKNLNVMFKLNPYAKTAKRMSLLAEASRVKAKKEKLEKKRKVVTKEEAQAIKAAGKAWYQTMISDSDYTEFDNFTKWLGASQ

SEQ ID NO: 6475 - protein, 407 aa, Arabidopsis thaliana
MVASAAARPLVTVQGLDGDMSTDQSTTVTLPDVMTAPVRPDIVNFVHAQISNNSRQPYAVSKKAGHQTSAESWGTGRAVSRIPRVPGGGTHRAGQAAFGNMCRGGRMFAPTKIWRRWHRRVNVNMKRHAIVSAIAATAVPALVMARGHKIENVPEMPLVVSDSAEAVEKTSAAIKVLKQIGAYDDAEKAKNSIGIRPGKGKMRNRRYISRKGPLVVFGTEGAKIVKAFRNLPGVELCHVERLNLLKLAPGGHLGRFVIWTKSAFEKLESIYGSFEKPSEKKKGYVLPRAKMVNADLARIINSDEVQSVVNPIKDGSKRAVLKKNPLKNLNVMFKLNPYAKTAKRMSLLAEASRVKAKKEKLEKKRKVVTKEEAQAIKAAGKAWYQTMISDSDYTEFDNFTKWLGASQ

SEQ ID NO: 6476 - protein, 388 aa, Arabidopsis thaliana
MSTDQSTTVTLPDVMTAPVRPDIVNFVHAQISNNSRQPYAVSKKAGHQTSAESWGTGRAVSRIPRVPGGGTHRAGQAAFGNMCRGGRMFAPTKIWRRWHRRVNVNMKRHAIVSAIAATAVPALVMARGHKIENVPEMPLVVSDSAEAVEKTSAAIKVLKQIGAYDDAEKAKNSIGIRPGKGKMRNRRYISRKGPLVVFGTEGAKIVKAFRNLPGVELCHVERLNLLKLAPGGHLGRFVIWTKSAFEKLESIYGSFEKPSEKKKGYVLPRAKMVNADLARIINSDEVQSVVNPIKDGSKRAVLKKNPLKNLNVMFKLNPYAKTAKRMSLLAEASRVKAKKEKLEKKRKVVTKEEAQAIKAAGKAWYQTMISDSDYTEFDNFTKWLGASQ

SEQ ID NO: 6477 - DNA, 1133 bp, Arabidopsis thaliana
aacaaaaatcatttcgttcttttccaaaatccccaaacaatagaaacgcgttttaaacgatttgattagttttaaattaaaaagaagatccgagcgatgtctggttcgacccggaaagaaatggatcggatcaaaggaccatggagtcctgaagaagacgatctgttacaatcgttggttcagaagcacggaccaaggaactggtctctgataagcaaatcaatccctggacgttccggtaaatcttgccgtctccgttggtgtaatcagctttctccggaggtagagcaccgtggattcacggcggaggaagatgatacgattatactagcgcacgctcggtttggtaacaagtgggcgacgattgcacggcttctcaatggtcgcactgataacgcgattaagaatcactggaactcaacgctgaagcggaaatgtagcggcggaggcggcggaggagaggaagggcagagttgtgatttcggtggtaatggagggtatgatggtaatttaactgatgaaaaaccgttaaaacggagggcgagtggtggaggaggagttgttgtggtgacggcgttaagtccaacgggatctgacgtcagcgagcaatcgcaatctagtggatctgttttaccggtttcttcttcttgtcatgtttttaaaccgacggcgagagctggtggagtggtgattgagtcatcatcgtcggaggaggaggagaaagatccgatgacttgtttgaggttgtctttgccttgggtcaatgagtcaacaactccaccggagttgtttccggtgaagagagaagaagaagaagagaaggaaagagagatttctggacttggtggagattttatgacggtggtgcaggagatgattaagacggaggttaggagttacatggcggatttacagctaggaaacggcggaggagctggaggaggagcaagttcgtgtatggtgcaaggaactaatggtcgtaatgtagggtttagagagtttattggattaggtaggatcgagtagtgagtgagaaaagagaagaattgtgtagcaaatgcagagaaagagccaatttcatgatttgagatttgattcattcgaaaaaaaactgaataaatgtattgattttg

SEQ ID NO: 6478 - protein, 309 aa, Arabidopsis thaliana
MSGSTRKEMDRIKGPWSPEEDDLLQSLVQKHGPRNWSLISKSIPGRSGKSCRLRWCNQLSPEVEHRGFTAEEDDTIILAHARFGNKWATIARLLNGRTDNAIKNHWNSTLKRKCSGGGGGGEEGQSCDFGGNGGYDGNLTDEKPLKRRASGGGGVVVVTALSPTGSDVSEQSQSSGSVLPVSSSCHVFKPTARAGGVVIESSSSEEEEKDPMTCLRLSLPWVNESTTPPELFPVKREEEEEKEREISGLGGDFMTVVQEMIKTEVRSYMADLQLGNGGGAGGGASSCMVQGTNGRNVGFREFIGLGRIE

SEQ ID NO: 6479 - protein, 301 aa, Arabidopsis thaliana
MDRIKGPWSPEEDDLLQSLVQKHGPRNWSLISKSIPGRSGKSCRLRWCNQLSPEVEHRGFTAEEDDTIILAHARFGNKWATIARLLNGRTDNAIKNHWNSTLKRKCSGGGGGGEEGQSCDFGGNGGYDGNLTDEKPLKRRASGGGGVVVVTALSPTGSDVSEQSQSSGSVLPVSSSCHVFKPTARAGGVVIESSSSEEEEKDPMTCLRLSLPWVNESTTPPELFPVKREEEEEKEREISGLGGDFMTVVQEMIKTEVRSYMADLQLGNGGGAGGGASSCMVQGTNGRNVGFREFIGLGRIE

SEQ ID NO: 6480 - DNA, 1969 bp, Arabidopsis thaliana
agagaaagacttttttagtgtttctttgtcattttcgttcctcaaaaaaaccttttcgaatttgacccttattgttatcctgattcttctgctcggttctcgccggagagaagacacggagaagagggttttcgaaaaggaggatgagaggttccaataacaccgatctatttgaccctaagacggagatggattccaatttctctcgccatggttcttcctccgaaggtgattttggtttcgctttcaatgacagtaacttctccgatcgtttgctccggatcgagatcttgggtgggccttcggattctaggtctgatgctgaaggatgtacgagtattgccgattgggctcgtcatcgcaagaggagaagagaggacaacaagaaggacaatggtgttgcgatttcagacattgtggcatgtgctgaagaacagattttaaccgataacaaccaacctgatatggatgatgctcctggtggtgataatcttgacgatgaaggagaggcaatggttgaagaggctttatcaggtgatgatgatgcatctagtgagccaaactggggtattgattgttctactgttgttagagttaaagaactgcatattagttctcctatcttggccgcaaaaagcccctttttctacaagctgttttctaatggaatgagggaatcagaacaaagacatgtaacccttagaattagtgcacaagaggaaggtgctttgatggagcttttaaactttatgtatagcaactctctaagtgtcacaacagcacccgctttattagatgttcttatggctgctgacaagtttgaggttgcttcctgtatgaggtattgtagtagactactgcgaaatatgcccatgacccctgattctgctttgctctatcttgagctgccctctagtgttttaatggctgaagcagtgcaacctctaaccgatgcagcaaagcagttccttgcctcgcgctacaaggatattaccaagtttcatgatgaggttatggccttaccattggctggaatagaggcgatactatcgagcgatgatctccaaattgcttctgaggatgctgtttatgattttgtcttgaaatgggcaaggggacagtatagttcattggaagatcgtagagagattctgggttcacgccttgcactctacatccgcttcccatacatgacgtgtcgaaagctgaaaaaggtactaacgtgcagtgattttgagcatgaagtagcatcaaagcaagtattagaagcgctcttcttcaaagcagaagccccacacaggcaacgcatcctcgcagctgaaggatcggactccatgaaccgccgtttcatagagagggcttacaaatacagacccgtaaaagtggtggagtttgagcttcctcgcccgcaatgtgtagtgtacctggacttgaagcgagaggaatgcgcaggactattcccttcaggaagagtctattctcaggctttccacttaggaggtcaaggtttcttcctctcagcacactgcaacatggaccagcaaagctcgttccactgctttgggctattcctcggaatgcaagagaaaggggctgtgagttttggtgtggactacgaatttgcggcaagagataaaagtacaaaggaagaatacgtaagcaaatacaaaggaaactacacattcacaggggggaaagcggttggttacagaaaccttttcgggattccatggacttcgttcatagccgaggacagtcaacatttcatcaatggcattctccatctcagagccgagctcaccattaaacgttcctcagacctgcactgactgttttcttctctctctctctctatgtcgtcacatttaagttgtataatctcgttatgtagcagctctaaccacgagtgtcctttgtacaataattgcctaaggagcaaaagtatggcttaaagagtacctcattctgt

SEQ ID NO: 6481 - protein, 561 aa, Arabidopsis thaliana
MRGSNNTDLFDPKTEMDSNFSRHGSSSEGDFGFAFNDSNFSDRLLRIEILGGPSDSRSDAEGCTSIADWARHRKRRREDNKKDNGVAISDIVACAEEQILTDNNQPDMDDAPGGDNLDDEGEAMVEEALSGDDDASSEPNWGIDCSTVVRVKELHISSPILAAKSPFFYKLFSNGMRESEQRHVTLRISAQEEGALMELLNFMYSNSLSVTTAPALLDVLMAADKFEVASCMRYCSRLLRNMPMTPDSALLYLELPSSVLMAEAVQPLTDAAKQFLASRYKDITKFHDEVMALPLAGIEAILSSDDLQIASEDAVYDFVLKWARGQYSSLEDRREILGSRLALYIRFPYMTCRKLKKVLTCSDFEHEVASKQVLEALFFKAEAPHRQRILAAEGSDSMNRRFIERAYKYRPVKVVEFELPRPQCVVYLDLKREECAGLFPSGRVYSQAFHLGGQGFFLSAHCNMDQQSSFHCFGLFLGMQEKGAVSFGVDYEFAARDKSTKEEYVSKYKGNYTFTGGKAVGYRNLFGIPWTSFIAEDSQHFINGILHLRAELTIKRSSDLH

SEQ ID NO: 6482 - protein, 546 aa, Arabidopsis thaliana
MDSNFSRHGSSSEGDFGFAFNDSNFSDRLLRIEILGGPSDSRSDAEGCTSIADWARHRKRRREDNKKDNGVAISDIVACAEEQILTDNNQPDMDDAPGGDNLDDEGEAMVEEALSGDDDASSEPNWGIDCSTVVRVKELHISSPILAAKSPFFYKLFSNGMRESEQRHVTLRISAQEEGALMELLNFMYSNSLSVTTAPALLDVLMAADKFEVASCMRYCSRLLRNMPMTPDSALLYLELPSSVLMAEAVQPLTDAAKQFLASRYKDITKFHDEVMALPLAGIEAILSSDDLQIASEDAVYDFVLKWARGQYSSLEDRREILGSRLALYIRFPYMTCRKLKKVLTCSDFEHEVASKQVLEALFFKAEAPHRQRILAAEGSDSMNRRFIERAYKYRPVKVVEFELPRPQCVVYLDLKREECAGLFPSGRVYSQAFHLGGQGFFLSAHCNMDQQSSFHCFGLFLGMQEKGAVSFGVDYEFAARDKSTKEEYVSKYKGNYTFTGGKAVGYRNLFGIPWTSFIAEDSQHFINGILHLRAELTIKRSSDLH

SEQ ID NO: 6483 - protein, 454 aa, Arabidopsis thaliana
MDDAPGGDNLDDEGEAMVEEALSGDDDASSEPNWGIDCSTVVRVKELHISSPILAAKSPFFYKLFSNGMRESEQRHVTLRISAQEEGALMELLNFMYSNSLSVTTAPALLDVLMAADKFEVASCMRYCSRLLRNMPMTPDSALLYLELPSSVLMAEAVQPLTDAAKQFLASRYKDITKFHDEVMALPLAGIEAILSSDDLQIASEDAVYDFVLKWARGQYSSLEDRREILGSRLALYIRFPYMTCRKLKKVLTCSDFEHEVASKQVLEALFFKAEAPHRQRILAAEGSDSMNRRFIERAYKYRPVKVVEFELPRPQCVVYLDLKREECAGLFPSGRVYSQAFHLGGQGFFLSAHCNMDQQSSFHCFGLFLGMQEKGAVSFGVDYEFAARDKSTKEEYVSKYKGNYTFTGGKAVGYRNLFGIPWTSFIAEDSQHFINGILHLRAELTIKRSSDLH

SEQ ID NO: 6484 - DNA, 1785 bp, Arabidopsis thaliana
aaaaaaataaaaagttcctcaaggaggtgtaaagattattgtacggagaattaagcttcctttggagatggcgtccatggcgaccggcgtcagtttttcgatgactagcggcataggagaaggaggatacgatgttcatcgagtagcgacggctgcacggacaactctgaagctgaatcagaagaactcactgagcgagagtacatgcatgcttttggggatgaataagtatcggggatccggagctatacgaaccgtctcgaaggctgtcggttacggacaagagatgagtaagagtctgagggtgggactcatttgcggaggtccgtcggcggagcgcgggatttctctcaactctgctagatcagttctcgatcatattcagggtgatggtataaacgtgagctgctattatatagatcctgatctcaaagcctttgcaatttcatccgctcaggtgtactcgaatactccttcagatttcgattttaagctggagagtcttgcacagggattctcgtcattatccgaattggccgagcatcttgtttctgctgtggacattgtttttccagtaattcatggtcgatttggtgaagatgggggcattcaggagctgttggaaagtcacaacattccatttgtggggactggatcccgtgaatgttttcgagcatttgacaagtatgaagcctctttggagctcaaggaacttggtttcatgacagtaccaaactacttggtgcagggaactggagtagacaaaagtgaaatagcactgtggtttacagataaccagctggatctcgagatgggaaaagttgtggtaaaaccagctaaagcaggttcaagcattggtgtcaaggttgcttttggcgtaaatgattcaattaaaaaggctactgaacttattctagagggaattgatgatagagttgttgttgaggtgtttattgaagatgcatatgagttcactgccatcgtcctggatgtgggttctggttctgtttgccatcctgttgttttgatgcctactgaggtgcaacttcagtttcatggcattggtgatccaaaggaaaacgcaatcttcgactatcggaggaagtatctgccgacacagcaggtcacctatcacactcctccacgtttccctatccatgttatcaaaagtattcgtgaagaggcatctcttatatttcaaaagcttggtttacgtgactttgctcgcattgatggatggtatttggctcccaattcaaatttatcatcacctgtaagtgaaacgcttggaggaaccaagtcaggagatattatattcacagacatcaacctgataagtggcatggagcaaactagctttctcttccagcaggcatctaaggttggattttctcattcaaacattctgcgaacaatcgtccaccgtgcttgctcgaggtttccccatcttgattggtataattatgggtatagtcaattactccaaggttcaacaaccctggaagtctctgaggacccccagaaagtgtttgtcatatttggaggagatacttcagagcggcaggtgtccgtcatgagtggaacaaatgtctgggtcaatttgcaaagatatgtagatgtaagttgaaaagaacgcagacatcatttgaggtgtaatcatgtatcttatgaaatcattaattcctgtgtatattgtcattaaacgataatagtgggtgcaataggattgccctgactctgatgatcttgttctttacagcttaatgtaactccctgtttgcttcc

SEQ ID NO: 6485 - protein, 519 aa, Arabidopsis thaliana
MASMATGVSFSMTSGIGEGGYDVHRVATAARTTLKLNQKNSLSESTCMLLGMNKYRGSGAIRTVSKAVGYGQEMSKSLRVGLICGGPSAERGISLNSARSVLDHIQGDGINVSCYYIDPDLKAFAISSAQVYSNTPSDFDFKLESLAQGFSSLSELAEHLVSAVDIVFPVIHGRFGEDGGIQELLESHNIPFVGTGSRECFRAFDKYEASLELKELGFMTVPNYLVQGTGVDKSEIALWFTDNQLDLEMGKVVVKPAKAGSSIGVKVAFGVNDSIKKATELILEGIDDRVVVEVFIEDAYEFTAIVLDVGSGSVCHPVVLMPTEVQLQFHGIGDPKENAIFDYRRKYLPTQQVTYHTPPRFPIHVIKSIREEASLIFQKLGLRDFARIDGWYLAPNSNLSSPVSETLGGTKSGDIIFTDINLISGMEQTSFLFQQASKVGFSHSNILRTIVHRACSRFPHLDWYNYGYSQLLQGSTTLEVSEDPQKVFVIFGGDTSERQVSVMSGTNVWVNLQRYVDVS

SEQ ID NO: 6486 - protein, 516 aa, Arabidopsis thaliana
MATGVSFSMTSGIGEGGYDVHRVATAARTTLKLNQKNSLSESTCMLLGMNKYRGSGAIRTVSKAVGYGQEMSKSLRVGLICGGPSAERGISLNSARSVLDHIQGDGINVSCYYIDPDLKAFAISSAQVYSNTPSDFDFKLESLAQGFSSLSELAEHLVSAVDIVFPVIHGRFGEDGGIQELLESHNIPFVGTGSRECFRAFDKYEASLELKELGFMTVPNYLVQGTGVDKSEIALWFTDNQLDLEMGKVVVKPAKAGSSIGVKVAFGVNDSIKKATELILEGIDDRVVVEVFIEDAYEFTAIVLDVGSGSVCHPVVLMPTEVQLQFHGIGDPKENAIFDYRRKYLPTQQVTYHTPPRFPIHVIKSIREEASLIFQKLGLRDFARIDGWYLAPNSNLSSPVSETLGGTKSGDIIFTDINLISGMEQTSFLFQQASKVGFSHSNILRTIVHRACSRFPHLDWYNYGYSQLLQGSTTLEVSEDPQKVFVIFGGDTSERQVSVMSGTNVWVNLQRYVDVS

SEQ ID NO: 6487 - protein, 508 aa, Arabidopsis thaliana
MTSGIGEGGYDVHRVATAARTTLKLNQKNSLSESTCMLLGMNKYRGSGAIRTVSKAVGYGQEMSKSLRVGLICGGPSAERGISLNSARSVLDHIQGDGINVSCYYIDPDLKAFAISSAQVYSNTPSDFDFKLESLAQGFSSLSELAEHLVSAVDIVFPVIHGRFGEDGGIQELLESHNIPFVGTGSRECFRAFDKYEASLELKELGFMTVPNYLVQGTGVDKSEIALWFTDNQLDLEMGKVVVKPAKAGSSIGVKVAFGVNDSIKKATELILEGIDDRVVVEVFIEDAYEFTAIVLDVGSGSVCHPVVLMPTEVQLQFHGIGDPKENAIFDYRRKYLPTQQVTYHTPPRFPIHVIKSIREEASLIFQKLGLRDFARIDGWYLAPNSNLSSPVSETLGGTKSGDIIFTDINLISGMEQTSFLFQQASKVGFSHSNILRTIVHRACSRFPHLDWYNYGYSQLLQGSTTLEVSEDPQKVFVIFGGDTSERQVSVMSGTNVWVNLQRYVDVS

SEQ ID NO: 6488 - DNA, 2338 bp, Arabidopsis thaliana
agaaaccaccattaaccctaatttttgccgaactcgtcttctgctgaaaaccctagatctacagatctcccgaatctcccagggagataatttgaagatggtgtctgacgctagcaagaagaaggcagctcagaagaaagctgctgccgccgctaaaagaggtggtaaagctgctgctccatccaaatccgccgctacttcttccaacggtgttgatagcttgtcaagcggtgtcgatgctcttcaaatttctgatcggacttgtaccggagttctctgttctcatcctcaatctagagatatccgaatagaatctctgtctgtgacgtttcatggttatgaccttattgttgattcaatgttggagcttaactatggaaggcgttatggtctccttgggttgaatggttgtggaaagtccactcttttaactgcaatcggacgcagagagataccgattccggatcaaatggatatctaccatttgtctcacgagattgaagctactgacatgtcttccctggaggctgttgttagctgtgatgaggagaggttgaggttagagaaagaagttgaaattcttgtacagcaggatgatggaggcggagagcgtcttcaatctatctatgagaggttagacgccatggatgcagaaaccgctgagaaacgtgctgctgaaattctgtttggacttggtttcgacaaggaaatgcaggcgaagaagacaaaagatttctctggtggttggaggatgagaattgcattggcaagagcactcttcattatgccgacaatccttttgcttgatgagccgactaatcatttagatttggaagcttgtgtgtggctagaagagagcctgaagaattttgatcgcatccttgttgtggtatcccactcacaggatttcttgaatggagtgtgtacaaacatcatccacatgcagagcaaacagctcaagtactacactggtaactttgatcagtattgccagactcgttctgaacttgaagagaaccagatgaaacaatacagatgggagcaggagcagatttctcacatgaaggagtacattgctcggtttggtcacggttcagccaaacttgctcgtcaagcacagagtaaggagaaaacattggcaaagatggagagaggtgggctcactgaaaaggttgctagagacagtgttctcgttttccgttttgctgatgttgggaagcttccaccgccagtgcttcagtttgttgaagtgtcttttggttacacaccggactatcttatttacaagaacattgactttggtgtcgacttggactcgagggttgcccttgtgggacctaatggagctggaaagagtacacttttgaagctcatgactggtgaattgcacccaactgaaggaatggtgcgacgtcacaaccacttgaagattgctcagtaccatcagcatctggctgagaagctagacttggaattgcctgcacttctctacatgatgagggagttcccgggtactgaagaggagaaaatgagagctgcgattggtaggtttggtctaactggtaaggctcaagtgatgccaatgaagaatctatctgacggacaaaggagcagagtgatctttgcgtggttagcttataagcagcctaacatgcttcttcttgatgagcctactaaccatttggatatcgagacaatcgactcgcttgctgaggcattgaatgagtgggatggtggtttggttctggttagtcacgacttcaggttgatcaaccaagtggctcatgagatatgggtttgcgagaaacaatgcatcactaaatggaatggtgacattatggacttcaagaggcaccttaaggctaaagccggacttgaagattgaagatagagagtcgagtcttcttctcttgatggaaaatggaaaagactcagattggggtcacatgctaagagagagagagggaaggctttggtttttttgatgggtttgggaatggtttttaacgagttctaaagccacacacttgagagacagagaaaccatactcactaatctctgcatttccttaagaggtcagagattctttctatattagtattatcattatcatgtgcaccttctttttttttcgttattgttgttgaacgtttttttgaaggcgaaacagagagaaaagtaatattttttggtggtattgtaggattttttttttctgtttttttaaagactgagatgttgacgattatggtattatatttaatattaaagtgggaatattctcataattatattcgaatattctcataattatattcgaatattcgttggaaaggc

SEQ ID NO: 6489 - protein, 627 aa, Arabidopsis thaliana
ETTINPNFCRTRLLLKTLDLQISRISQGDNLKMVSDASKKKAAQKKAAAAAKRGGKAAAPSKSAATSSNGVDSLSSGVDALQISDRTCTGVLCSHPQSRDIRIESLSVTFHGYDLIVDSMLELNYGRRYGLLGLNGCGKSTLLTAIGRREIPIPDQMDIYHLSHEIEATDMSSLEAVVSCDEERLRLEKEVEILVQQDDGGGERLQSIYERLDAMDAETAEKRAAEILFGLGFDKEMQAKKTKDFSGGWRMRIALARALFIMPTILLLDEPTNHLDLEACVWLEESLKNFDRILVVVSHSQDFLNGVCTNIIHMQSKQLKYYTGNFDQYCQTRSELEENQMKQYRWEQEQISHMKEYIARFGHGSAKLARQAQSKEKTLAKMERGGLTEKVARDSVLVFRFADVGKLPPPVLQFVEVSFGYTPDYLIYKNIDFGVDLDSRVALVGPNGAGKSTLLKLMTGELHPTEGMVRRHNHLKIAQYHQHLAEKLDLELPALLYMMREFPGTEEEKMRAAIGRFGLTGKAQVMPMKNLSDGQRSRVIFAWLAYKQPNMLLLDEPTNHLDIETIDSLAEALNEWDGGLVLVSHDFRLINQVAHEIWVCEKQCITKWNGDIMDFKRHLKAKAGLED

SEQ ID NO: 6490 - protein, 595 aa, Arabidopsis thaliana
MVSDASKKKAAQKKAAAAAKRGGKAAAPSKSAATSSNGVDSLSSGVDALQISDRTCTGVLCSHPQSRDIRIESLSVTFHGYDLIVDSMLELNYGRRYGLLGLNGCGKSTLLTAIGRREIPIPDQMDIYHLSHEIEATDMSSLEAVVSCDEERLRLEKEVEILVQQDDGGGERLQSIYERLDAMDAETAEKRAAEILFGLGFDKEMQAKKTKDFSGGWRMRIALARALFIMPTILLLDEPTNHLDLEACVWLEESLKNFDRILVVVSHSQDFLNGVCTNIIHMQSKQLKYYTGNFDQYCQTRSELEENQMKQYRWEQEQISHMKEYIARFGHGSAKLARQAQSKEKTLAKMERGGLTEKVARDSVLVFRFADVGKLPPPVLQFVEVSFGYTPDYLIYKNIDFGVDLDSRVALVGPNGAGKSTLLKLMTGELHPTEGMVRRHNHLKIAQYHQHLAEKLDLELPALLYMMREFPGTEEEKMRAAIGRFGLTGKAQVMPMKNLSDGQRSRVIFAWLAYKQPNMLLLDEPTNHLDIETIDSLAEALNEWDGGLVLVSHDFRLINQVAHEIWVCEKQCITKWNGDIMDFKRHLKAKAGLED

SEQ ID NO: 6491 - protein, 508 aa, Arabidopsis thaliana
MLELNYGRRYGLLGLNGCGKSTLLTAIGRREIPIPDQMDIYHLSHEIEATDMSSLEAVVSCDEERLRLEKEVEILVQQDDGGGERLQSIYERLDAMDAETAEKRAAEILFGLGFDKEMQAKKTKDFSGGWRMRIALARALFIMPTILLLDEPTNHLDLEACVWLEESLKNFDRILVVVSHSQDFLNGVCTNIIHMQSKQLKYYTGNFDQYCQTRSELEENQMKQYRWEQEQISHMKEYIARFGHGSAKLARQAQSKEKTLAKMERGGLTEKVARDSVLVFRFADVGKLPPPVLQFVEVSFGYTPDYLIYKNIDFGVDLDSRVALVGPNGAGKSTLLKLMTGELHPTEGMVRRHNHLKIAQYHQHLAEKLDLELPALLYMMREFPGTEEEKMRAAIGRFGLTGKAQVMPMKNLSDGQRSRVIFAWLAYKQPNMLLLDEPTNHLDIETIDSLAEALNEWDGGLVLVSHDFRLINQVAHEIWVCEKQCITKWNGDIMDFKRHLKAKAGLED

SEQ ID NO: 6492 - DNA, 1789 bp, Arabidopsis thaliana
agttatttcatgaaaaaccaatctagggttttgaactctgaattgggggattttgacctttcagttttgtgggatcaaattttgaatttcgagggttatggttcctactgtttcagaccaatggatatggatggttaccacaaacggagcgccggtttaaacccttgtaaacactccggtttctcacattcatcaagacccatggctccaggaatttaccgttacccagaagtgaaatcttcgttgcggagacaagttcatgcgcctgtgcggatactcaatagcggtcgagatcgtagcacacgacaaggttctggtaatgtgttgggaacctttctcacaaggaacaatgacatgtggaaaagaaatgcacttgattcgtctttacgctatagaacggatagagaagtaattgatgttgatgatgagcttggagatgttgaaatgatatctgatgatacaagtagggagggtgtcgaaaacgtggctatggaggtggacgaggtggaagagaaggcggagatgggaaatggattgttttctgaggttgccagtctgaaaaatgggagcttgagggtgggtgaatgttctaaagctaatagtagttcactcgttgtgaatcgccctgtgactgatgtcacaagttttgaagcatacagaaaggttcttgagagtgctgtgaaccggacttctaaactgaaagacagaggctttgttgatttttttaaagagagaggtcgtgctttactacgaagcttgtcttccttttggagacaagatgaagaaccagtagaggttgtacaacgtgaggcatttgtacctctttctagagaggaggagacagcagtcaggcgtgcattctcagctaatgattcaaacatcttggttactcataagaactcaaatattgatattaccgggaaaatcttgaggtgccttaaaccaggcaaatggttgaacgatgaggtcattaatctttatatggtattgctgaaagaaagggaagctagagaaccaaagaagtttcttaaatgtcattttttcaatacatttttcttcactaagttagttaattcggcgactggatacaactatggtgcagtgagaagatggacttcaatgaagaggttgggctaccatctcaaagactgtgacaagatatttatccctatccatatgaacatccactggactttggctgtaattaatataaaggaccagaaattccagtatcttgactctttcaaaggaagggagcctaaaatcctcgatgcactggctagatactttgtcgatgaagtgagggataagagtgaagtagaccttgatgtaagtcgatggagacaagaatttgtccaggaccttccaatgcagagaaatggattcgattgtggaatgtttatggtgaaatacatcgacttctatagcagaggtctggatctttgtttcactcaggaacaaatgccatatttccgggctaggacagcaaaggagattctgcaactgaaagccgagtgatgccagcataataaggaaactcttaaagaatagttttgaagttcttcttcttcttcatgtagatagtatttagcaagttagatgcacactttacgtgtttgataatttgatgtacatagaaaagggtaacaatgtggttctctgatgatcaggcttgatagtgaaattcgaattgttgtttaaagattctagtttcatatcagatactctgattttgaattctggtattatttttgtactttataaatttaaaattaaagaaatttgtgtt

SEQ ID NO: 6493 - protein, 505 aa, Arabidopsis thaliana
SYFMKNQSRVLNSELGDFDLSVLWDQILNFEGYGSYCFRPMDMDGYHKRSAGLNPCKHSGFSHSSRPMAPGIYRYPEVKSSLRRQVHAPVRILNSGRDRSTRQGSGNVLGTFLTRNNDMWKRNALDSSLRYRTDREVIDVDDELGDVEMISDDTSREGVENVAMEVDEVEEKAEMGNGLFSEVASLKNGSLRVGECSKANSSSLVVNRPVTDVTSFEAYRKVLESAVNRTSKLKDRGFVDFFKERGRALLRSLSSFWRQDEEPVEVVQREAFVPLSREEETAVRRAFSANDSNILVTHKNSNIDITGKILRCLKPGKWLNDEVINLYMVLLKEREAREPKKFLKCHFFNTFFFTKLVNSATGYNYGAVRRWTSMKRLGYHLKDCDKIFIPIHMNIHWTLAVINIKDQKFQYLDSFKGREPKILDALARYFVDEVRDKSEVDLDVSRWRQEFVQDLPMQRNGFDCGMFMVKYIDFYSRGLDLCFTQEQMPYFRARTAKEILQLKAE

SEQ ID NO: 6494 - protein, 502 aa, Arabidopsis thaliana
MKNQSRVLNSELGDFDLSVLWDQILNFEGYGSYCFRPMDMDGYHKRSAGLNPCKHSGFSHSSRPMAPGIYRYPEVKSSLRRQVHAPVRILNSGRDRSTRQGSGNVLGTFLTRNNDMWKRNALDSSLRYRTDREVIDVDDELGDVEMISDDTSREGVENVAMEVDEVEEKAEMGNGLFSEVASLKNGSLRVGECSKANSSSLVVNRPVTDVTSFEAYRKVLESAVNRTSKLKDRGFVDFFKERGRALLRSLSSFWRQDEEPVEVVQREAFVPLSREEETAVRRAFSANDSNILVTHKNSNIDITGKILRCLKPGKWLNDEVINLYMVLLKEREAREPKKFLKCHFFNTFFFTKLVNSATGYNYGAVRRWTSMKRLGYHLKDCDKIFIPIHMNIHWTLAVINIKDQKFQYLDSFKGREPKILDALARYFVDEVRDKSEVDLDVSRWRQEFVQDLPMQRNGFDCGMFMVKYIDFYSRGLDLCFTQEQMPYFRARTAKEILQLKAE

SEQ ID NO: 6495 - protein, 465 aa, Arabidopsis thaliana
MDMDGYHKRSAGLNPCKHSGFSHSSRPMAPGIYRYPEVKSSLRRQVHAPVRILNSGRDRSTRQGSGNVLGTFLTRNNDMWKRNALDSSLRYRTDREVIDVDDELGDVEMISDDTSREGVENVAMEVDEVEEKAEMGNGLFSEVASLKNGSLRVGECSKANSSSLVVNRPVTDVTSFEAYRKVLESAVNRTSKLKDRGFVDFFKERGRALLRSLSSFWRQDEEPVEVVQREAFVPLSREEETAVRRAFSANDSNILVTHKNSNIDITGKILRCLKPGKWLNDEVINLYMVLLKEREAREPKKFLKCHFFNTFFFTKLVNSATGYNYGAVRRWTSMKRLGYHLKDCDKIFIPIHMNIHWTLAVINIKDQKFQYLDSFKGREPKILDALARYFVDEVRDKSEVDLDVSRWRQEFVQDLPMQRNGFDCGMFMVKYIDFYSRGLDLCFTQEQMPYFRARTAKEILQLKAE

SEQ ID NO: 6496 - DNA, 1546 bp, Arabidopsis thaliana
ataaagaagtaaagctttgccggagatttagcaaacacaaacacaaaaaacaaaaccaactcagacgaatgtgattttttcttcttgagtgaattgttgtaaaaaaatgatgatcggagaatctcatcgtggttttaatccaacggttcatattcctccatggccactttctgaagatctaacggtgtctgatatttacggaagtccagacggaggaagtagtatgatggaagctttggctgagttacaacgttatcttccgtcaaacgaaccggatccggattcagatccggatctctcgggtccggattcaccaatcgatgcttatacatgcgatcattttcggatgtatgagtttaaagtgagacgttgtgctcgtggccggagccatgattggacggagtgtccttacgctcatcccggagaaaaagctcgccgtcgtgatccgaggaagtttcattactccggtacggcgtgtcctgagtttcgtaaaggttgttgcaagagaggagacgcatgtgagttttctcatggtgtttttgagtgttggcttcacccggcgcgttaccggactcagccgtgtaaagacggtggtaactgtcgccgtcgtgtttgtttctttgctcattcgccggatcagattagggttttgcctaatcaaagccctgatcgtgttgattcgttcgacgttttgtctcctacgattcgtagagcgtttcagttttcgatttctccgtcgtctaactcgccgccggtgagtccacgaggtgactcggactcgtcgtgttcgttactgagtcgttcactcgggtctaatctgggaaacgacgtcgttgcgtctctcaggaatctgcaacttaataaagtgaagtcttctctttcgtcgtcatacaacaatcaaatcggaggatacggatccggattcgggtcgcctcgtggatcggttttgggtcctggtttccgtagcttaccaactacaccgacccgacctggttttatgaacatttgggagaatggcttggaggaagaaccggcgatggaacgggtcgagtcgggtcgtgaactgcgagcgcagctgttcgagaagctgagcaaagagaattgcatgggtcggattgaaccggatccggatcagggagcgggtgatactcctgatgtcgggtgggtctctgacttggttatgtgatttgaaccggattcgtaaaccggagtgtctgaaatttctttgataaagattaattaaaggattattatcggcatgggaggttttttaatggatctcttcttaggaaaagaggagatttctctgcaagttttttttttgtatatttattatttcctaatttcgtataatctctgttccataatcgatgattcgagggagattcctcagtgtataggagttgcttaggatttttcattatgatggattcactaatattgatattgttggttattgttttttttatatattatgatgtaagatgcaagtcgcaatgtaattattaaatatcttatgaatgaaatgagaatgtaaattatttat

SEQ ID NO: 6497 - protein, 359 aa, Arabidopsis thaliana
MMIGESHRGFNPTVHIPPWPLSEDLTVSDIYGSPDGGSSMMEALAELQRYLPSNEPDPDSDPDLSGPDSPIDAYTCDHFRMYEFKVRRCARGRSHDWTECPYAHPGEKARRRDPRKFHYSGTACPEFRKGCCKRGDACEFSHGVFECWLHPARYRTQPCKDGGNCRRRVCFFAHSPDQIRVLPNQSPDRVDSFDVLSPTIRRAFQFSISPSSNSPPVSPRGDSDSSCSLLSRSLGSNLGNDVVASLRNLQLNKVKSSLSSSYNNQIGGYGSGFGSPRGSVLGPGFRSLPTTPTRPGFMNIWENGLEEEPAMERVESGRELRAQLFEKLSKENCMGRIEPDPDQGAGDTPDVGWVSDLVM

SEQ ID NO: 6498 - protein, 358 aa, Arabidopsis thaliana
MIGESHRGFNPTVHIPPWPLSEDLTVSDIYGSPDGGSSMMEALAELQRYLPSNEPDPDSDPDLSGPDSPIDAYTCDHFRMYEFKVRRCARGRSHDWTECPYAHPGEKARRRDPRKFHYSGTACPEFRKGCCKRGDACEFSHGVFECWLHPARYRTQPCKDGGNCRRRVCFFAHSPDQIRVLPNQSPDRVDSFDVLSPTIRRAFQFSISPSSNSPPVSPRGDSDSSCSLLSRSLGSNLGNDVVASLRNLQLNKVKSSLSSSYNNQIGGYGSGFGSPRGSVLGPGFRSLPTTPTRPGFMNIWENGLEEEPAMERVESGRELRAQLFEKLSKENCMGRIEPDPDQGAGDTPDVGWVSDLVM

SEQ ID NO: 6499 - protein, 320 aa, Arabidopsis thaliana
MMEALAELQRYLPSNEPDPDSDPDLSGPDSPIDAYTCDHFRMYEFKVRRCARGRSHDWTECPYAHPGEKARRRDPRKFHYSGTACPEFRKGCCKRGDACEFSHGVFECWLHPARYRTQPCKDGGNCRRRVCFFAHSPDQIRVLPNQSPDRVDSFDVLSPTIRRAFQFSISPSSNSPPVSPRGDSDSSCSLLSRSLGSNLGNDVVASLRNLQLNKVKSSLSSSYNNQIGGYGSGFGSPRGSVLGPGFRSLPTTPTRPGFMNIWENGLEEEPAMERVESGRELRAQLFEKLSKENCMGRIEPDPDQGAGDTPDVGWVSDLVM

SEQ ID NO: 6500 - DNA, 1882 bp, Arabidopsis thaliana
tggcttctgatctcactagtgttcgtcatctttgttcgattgaagtttgggaagtggtgatggtaataggagcagcagcgcgtgtagccatcggcggttgtcgaaagctcatctcgtcacatacctccctcctcctcgtctcttctcagtgtcgccagatgagtatggacgcacaaagcgtttctgaaaagcttaggagttctggtctattacgaactcaaggtctaattggaggcaagtggcttgactcgtatgacaataagacaatcaaggttaacaatccagcaaccggtgaaattatagctgatgttgcatgtatgggaacaaaagagacaaatgatgctattgcttcttcttatgaagcatttacttcttggagcagattgactgctggagagaggagtaaagttttacggagatggtatgacctcctgattgcacacaaggaagaacttggacaacttataactttggagcaaggaaaaccactcaaggaagccatcggagaggtagcatatggggcaagttttattgagtactatgcggaggaggcaaaacgtgtatatggtgatataattcctccgaatctgtctgatcgccgactgttggttctaaaacagcctgtcggtgttgttggtgcaattaccccttggaacttccccttagccatgattactcggaaggtcggccctgctcttgcttctggatgcacggtggttgttaaaccatctgaacttacgcccctaacagcacttgctgcggctgaacttgcacttcaagctggagttcctccgggggcacttaatgtggtcatgggaaatgctcctgaaattggggatgctttgcttacgagtccacaggtgagaaaaatcacgttcacgggatcaacagcagttgggaagaagttgatggcagctgctgcacctaccgtcaagaaggtttctctagaacttggcggcaacgcaccctctatagtatttgatgatgcagacctggatgtagctgtaaaaggaacgcttgcagcgaaatttaggaatagtggtcagacatgtgtttgtgcgaacagagtacttgtgcaagatggtatctatgataaatttgctgaggccttttctgaagcggttcaaaaattagaagtaggagatgggtttagggatgggacaacccagggtccacttataaatgatgcagcagtgcaaaaggtagagacatttgtacaagatgctgtttctaagggagcaaaaatcatcattggtggcaaaaggcacagtctagggatgactttctatgagcctactgttatccgcgatgtttcggataacatgatcatgtctaaggaggagatttttggacctgtagctccccttattcggttcaaaaccgaggaggacgctatcagaattgctaatgacacaattgcaggacttgctgcttatatattcacaaacagtgtccaaagatcttggcgtgtatttgaagcacttgaatatggacttgtaggggtgaacgaaggactcatatcaacagaggtggctccattcgggggagtgaagcagtctggtcttggaagggaaggatccaagtatggtatggacgaataccttgagatcaaatacgtatgcttgggagatatgaatagacactgatttggtttgtttgaaaagctttagaaattgtaagtttttctcctccactcgtatccttctaataaaagcttactgtggaacataataaggattcggaggatacttcttaagaaataaagatttggtctacgaccaattgttagcatgatttttaagtaataatttggggtttccattttatttatctttgtttacgttatttttttctttgttttacgttaatttttgtaattcgg

SEQ ID NO: 6501 - protein, 547 aa, Arabidopsis thaliana
ASDLTSVRHLCSIEVWEVVMVIGAAARVAIGGCRKLISSHTSLLLVSSQCRQMSMDAQSVSEKLRSSGLLRTQGLIGGKWLDSYDNKTIKVNNPATGEIIADVACMGTKETNDAIASSYEAFTSWSRLTAGERSKVLRRWYDLLIAHKEELGQLITLEQGKPLKEAIGEVAYGASFIEYYAEEAKRVYGDIIPPNLSDRRLLVLKQPVGVVGAITPWNFPLAMITRKVGPALASGCTVVVKPSELTPLTALAAAELALQAGVPPGALNVVMGNAPEIGDALLTSPQVRKITFTGSTAVGKKLMAAAAPTVKKVSLELGGNAPSIVFDDADLDVAVKGTLAAKFRNSGQTCVCANRVLVQDGIYDKFAEAFSEAVQKLEVGDGFRDGTTQGPLINDAAVQKVETFVQDAVSKGAKIIIGGKRHSLGMTFYEPTVIRDVSDNMIMSKEEIFGPVAPLIRFKTEEDAIRIANDTIAGLAAYIFTNSVQRSWRVFEALEYGLVGVNEGLISTEVAPFGGVKQSGLGREGSKYGMDEYLEIKYVCLGDMNRH

SEQ ID NO: 6502 - protein, 528 aa, Arabidopsis thaliana
MVIGAAARVAIGGCRKLISSHTSLLLVSSQCRQMSMDAQSVSEKLRSSGLLRTQGLIGGKWLDSYDNKTIKVNNPATGEIIADVACMGTKETNDAIASSYEAFTSWSRLTAGERSKVLRRWYDLLIAHKEELGQLITLEQGKPLKEAIGEVAYGASFIEYYAEEAKRVYGDIIPPNLSDRRLLVLKQPVGVVGAITPWNFPLAMITRKVGPALASGCTVVVKPSELTPLTALAAAELALQAGVPPGALNVVMGNAPEIGDALLTSPQVRKITFTGSTAVGKKLMAAAAPTVKKVSLELGGNAPSIVFDDADLDVAVKGTLAAKFRNSGQTCVCANRVLVQDGIYDKFAEAFSEAVQKLEVGDGFRDGTTQGPLINDAAVQKVETFVQDAVSKGAKIIIGGKRHSLGMTFYEPTVIRDVSDNMIMSKEEIFGPVAPLIRFKTEEDAIRIANDTIAGLAAYIFTNSVQRSWRVFEALEYGLVGVNEGLISTEVAPFGGVKQSGLGREGSKYGMDEYLEIKYVCLGDMNRH

SEQ ID NO: 6503 - protein, 495 aa, Arabidopsis thaliana
MSMDAQSVSEKLRSSGLLRTQGLIGGKWLDSYDNKTIKVNNPATGEIIADVACMGTKETNDAIASSYEAFTSWSRLTAGERSKVLRRWYDLLIAHKEELGQLITLEQGKPLKEAIGEVAYGASFIEYYAEEAKRVYGDIIPPNLSDRRLLVLKQPVGVVGAITPWNFPLAMITRKVGPALASGCTVVVKPSELTPLTALAAAELALQAGVPPGALNVVMGNAPEIGDALLTSPQVRKITFTGSTAVGKKLMAAAAPTVKKVSLELGGNAPSIVFDDADLDVAVKGTLAAKFRNSGQTCVCANRVLVQDGIYDKFAEAFSEAVQKLEVGDGFRDGTTQGPLINDAAVQKVETFVQDAVSKGAKIIIGGKRHSLGMTFYEPTVIRDVSDNMIMSKEEIFGPVAPLIRFKTEEDAIRIANDTIAGLAAYIFTNSVQRSWRVFEALEYGLVGVNEGLISTEVAPFGGVKQSGLGREGSKYGMDEYLEIKYVCLGDMNRH

SEQ ID NO: 6504 - DNA, 1263 bp, Arabidopsis thaliana
aattcgagaagttcccggaaacatccctccgtagaaaattcatcggaggcgacttgaggagaaacacggaagctccgatctcacaatttcgcgacgaactcgcttcagcgattgtttctgttcatccgattaagatgaacggaggtccttccggtttcaataatgctccggtcacgaaagccttcgtcatcgcgactgctcttttcactgtgttcttcgggatccggggaggttcttccaagctcggcttatcttaccaggatatttttgagaagtttcggatttggaagttaattatatcggcttttgccttctcgtccacaactcaattgctttctggcttatatttgctatacttcttccgagtctttgagagacagattggttcaaataagtattcggttttcatcttcttctctggatttgtatcactaatactagagaccattttgttatcattgactaaagatcctactgcaaacctactgacatctggaccatacgccctcgtattcgcttcttttgtacccttcttcttggatattccagttacaaagaggtttggtgtattgggcgtccacttctctgataaatcattcatataccttgcaggtgtccagcttttactatcatcatggaaaaggtccatctttactggaatttgcggtataattgctggttccttgtatcggttgaacatctttggtattcgcaaggcaaagttcccggagttcatggcttcgttattctcccggttttccttaccctccttgagcagccattctcaaccaccaagaaggacatcacccaacttaggtcgccaagcagtgagagcttatcgagctccaatgccgtcaactacagagccatcagaggaagccatagctactttggtatctatgggatttgaccagaatgcagcgagacaggcgcttgtacacgccagaaatgatgtcaacgctgccaccaacatccttcttgaagcacactctcactaaaccttctttactaggaagtttcagaaacattgttgattcgagatgaagacattgtacaacagaggtattcttctgctgcgttctaacaacggaaatggccttgcattgacgataatgtccagtaaatgatctgatttacatcctctttatctttcttttaggttttcttttggcctcttttgtttgccgttgtagttttagaacaaagtgcctaggttatgttatgtaagtacagatttgaaaaaaatatgaagaggcttatccg

SEQ ID NO: 6505 - protein, 331 aa, Arabidopsis thaliana
FEKFPETSLRRKFIGGDLRRNTEAPISQFRDELASAIVSVHPIKMNGGPSGFNNAPVTKAFVIATALFTVFFGIRGGSSKLGLSYQDIFEKFRIWKLIISAFAFSSTTQLLSGLYLLYFFRVFERQIGSNKYSVFIFFSGFVSLILETILLSLTKDPTANLLTSGPYALVFASFVPFFLDIPVTKRFGVLGVHFSDKSFIYLAGVQLLLSSWKRSIFTGICGIIAGSLYRLNIFGIRKAKFPEFMASLFSRFSLPSLSSHSQPPRRTSPNLGRQAVRAYRAPMPSTTEPSEEAIATLVSMGFDQNAARQALVHARNDVNAATNILLEAHSH

SEQ ID NO: 6506 - protein, 287 aa, Arabidopsis thaliana
MNGGPSGFNNAPVTKAFVIATALFTVFFGIRGGSSKLGLSYQDIFEKFRIWKLIISAFAFSSTTQLLSGLYLLYFFRVFERQIGSNKYSVFIFFSGFVSLILETILLSLTKDPTANLLTSGPYALVFASFVPFFLDIPVTKRFGVLGVHFSDKSFIYLAGVQLLLSSWKRSIFTGICGIIAGSLYRLNIFGIRKAKFPEFMASLFSRFSLPSLSSHSQPPRRTSPNLGRQAVRAYRAPMPSTTEPSEEAIATLVSMGFDQNAARQALVHARNDVNAATNILLEAHSH

SEQ ID NO: 6507 - DNA, 1146 bp, Arabidopsis thaliana
aacctttgctttcttgggaaactctctgcaattcctggagaaatcgaccatcatcatcttagctttgattctctctgtgtttcttcactttcaatttctgttttggtttatcgataagagaaagtaaaattcgtctgtgggggtttaagcttttttggggtgagagatgggtcaaacttttcgcaagcttttcgataccttcttcggcaaccaggagatgagggtcgttatgctgggtctggatgcggctggcaaaacaacgatactatacaagctccacataggagaagttctgtctactgttcccacaatcggtttcaatgttgagaaagttcagtacaagaatgtcatcttcacagtttgggatgttggtggccaagagaagctgaggcccttgtggaggcattacttcaataataccgatggacttatatacgtggtagactccttggaccgagagaggattggtaaagcgaagcaagaatttcaggatatcataagggacccattcatgctcaacagtgtcattctagtgtttgcaaacaaacaagacatgagaggagccatgtctcctcgagaagtatgtgaagggcttggcttacttgatctcaagaacaggaaatggcatatacaaggcacatgtgctcttcaaggagatgggctctatgaaggcttagactggttatccgctacactcaaagaggttaaagccgctggttactcatcagttggtccctcgttttagcacccctaccatttgcaaagaaaaaaatccctgactagctaaattgacatacgaaagtaccaaatcaagctcatggtgtctcctgtctactcaccattatatactttacatccatggccacacccttcttcgtggccactgatatggtaatatcacaaaactaatgaaaatctctcaagacttttgtaatggaagtgtttttgtttttctttcgtcttcacatggctctgcttcttaaagctaatgttagtatcaattaggctcctttttgcataatatgactttggagctttattgtaaattctgatggatacaaaatgtataaatctgacaaaaattgcaaaattctcatgagattattaaagtctcccttatagctatgatagatgattgatcttttt

SEQ ID NO: 6508 - protein, 192 aa, Arabidopsis thaliana
MGQTFRKLFDTFFGNQEMRVVMLGLDAAGKTTILYKLHIGEVLSTVPTIGFNVEKVQYKNVIFTVWDVGGQEKLRPLWRHYFNNTDGLIYVVDSLDRERIGKAKQEFQDIIRDPFMLNSVILVFANKQDMRGAMSPREVCEGLGLLDLKNRKWHIQGTCALQGDGLYEGLDWLSATLKEVKAAGYSSVGPSF

SEQ ID NO: 6509 - protein, 175 aa, Arabidopsis thaliana
MRVVMLGLDAAGKTTILYKLHIGEVLSTVPTIGFNVEKVQYKNVIFTVWDVGGQEKLRPLWRHYFNNTDGLIYVVDSLDRERIGKAKQEFQDIIRDPFMLNSVILVFANKQDMRGAMSPREVCEGLGLLDLKNRKWHIQGTCALQGDGLYEGLDWLSATLKEVKAAGYSSVGPSF

SEQ ID NO: 6510 - protein, 171 aa, Arabidopsis thaliana
MLGLDAAGKTTILYKLHIGEVLSTVPTIGFNVEKVQYKNVIFTVWDVGGQEKLRPLWRHYFNNTDGLIYVVDSLDRERIGKAKQEFQDIIRDPFMLNSVILVFANKQDMRGAMSPREVCEGLGLLDLKNRKWHIQGTCALQGDGLYEGLDWLSATLKEVKAAGYSSVGPSF

SEQ ID NO: 6511 - DNA, 1333 bp, Arabidopsis thaliana
ttcgtttattgggaatgtaaagctgggatcggatttatcactttctgagctgcgggatttgtatcatgtggttgtgcttgcatatggtgctgaaagtgacaaagatcttggcattccaggtgagagtttgagtggtatatactctgcaagagaattcgtctggtggtataatgggcatcctgactacagtagtttgaaacctgacttgaaaacgtctgactcagctgtcattcttggccagggtaatgtagctctagatgttgctcggattctcttaagaccgacaacagagttggcgtcaactgatattgctacacatgctttatctgcgctaaaagaaagttctataaggaaggtgtatctcatcggaagacgggggccagttcaagcagcattgactgctaaagagcttcgagaagttctcgggattaagaacttgcacattcgaataaagcagactgacttgagtgtaactcctgctgatgaggaagaaatgaaaactagtagagccaggaagaggatctatgaattattgtccaaggctgcagcagcagcaaaaacatccgaagcagaccctgatcaacgagagctgcactttgttttcttccgccaacctgaccagttcttagagtcagatgaaagaaagggacatgtttccggtgtaaacttgcaaaaaaccattcttgaaagtgttggaaccggaaagcaaattgcagttggtacaggagagttcgaggatcttaactgcagtatggtgctgaaggccattggttacaagtctgttccagtcaatggtttaccatttgatcacaagaaaggtgttgtcccaaatgtaaagggtcgagtggttagtcacacgtcaggagacatatcacagactgaacctggcttatacgtatgtgggtggctcaaaagaggaccagtagggataattgccacaaacctctactgtgctgaagaaacggttggtagcataagcgaggacattgaagaaggtgtttggaagagctcaaaagcaggaagcaaaggactgatgcaattgctggagaagagaaaagtgaagaaggtggagtttagtgggtgggagaagattgatgccaaagaaaaacaaatggggattgagagaaacaagcccagagaaaaattagtcacttgggaggatctattagcagcagcagccaactagggccatattttttttcaattaataaaattaatgatagtcttcttctttttttctttgggtccagagaatcaatgatttagtctagtagacggaaaaaatattactttccatttgttattcttttcaaatacaaatccatattatctt

SEQ ID NO: 6512 - protein, 394 aa, Arabidopsis thaliana
SFIGNVKLGSDLSLSELRDLYHVVVLAYGAESDKDLGIPGESLSGIYSAREFVWWYNGHPDYSSLKPDLKTSDSAVILGQGNVALDVARILLRPTTELASTDIATHALSALKESSIRKVYLIGRRGPVQAALTAKELREVLGIKNLHIRIKQTDLSVTPADEEEMKTSRARKRIYELLSKAAAAAKTSEADPDQRELHFVFFRQPDQFLESDERKGHVSGVNLQKTILESVGTGKQIAVGTGEFEDLNCSMVLKAIGYKSVPVNGLPFDHKKGVVPNVKGRVVSHTSGDISQTEPGLYVCGWLKRGPVGIIATNLYCAEETVGSISEDIEEGVWKSSKAGSKGLMQLLEKRKVKKVEFSGWEKIDAKEKQMGIERNKPREKLVTWEDLLAAAAN

SEQ ID NO: 6513 - protein, 230 aa, Arabidopsis thaliana
MKTSRARKRIYELLSKAAAAAKTSEADPDQRELHFVFFRQPDQFLESDERKGHVSGVNLQKTILESVGTGKQIAVGTGEFEDLNCSMVLKAIGYKSVPVNGLPFDHKKGVVPNVKGRVVSHTSGDISQTEPGLYVCGWLKRGPVGIIATNLYCAEETVGSISEDIEEGVWKSSKAGSKGLMQLLEKRKVKKVEFSGWEKIDAKEKQMGIERNKPREKLVTWEDLLAAAAN

SEQ ID NO: 6514 - DNA, 1781 bp, Arabidopsis thaliana
aagttatattttaaggctatggaagccctcctcctccctccttcgccggaaccccaaaatcaaatcaccaatccggcgaattcaaagccaaatcatcaatctggtgacgtacataaagatgagacgatgatgatgaagaagaagaaggatacgaatccatcgaatttggaaaagagaaaactcaagggaaagaagaaagagattatggacaacgacgaagcttcttcgtcctattgttctacatcttctacctctaattcaaattctactaaaagggttacgagagtggttcatagattacgaaaccctatgcggttaggtatggctcgacgaagcgttggtgaacgacaagctgaaaaattggcgaagcctctgggcttttcacttgccgcttttgctaatatggttattgcgagaaagaatgccgcaggtcagaatgtttatgttgatgatcttgttgagatctttgctactcttgtcgaagaatcattagccaatgtttatggtaataagcttggttcctttgcgaccaactttgagcaaacattcagcagtactctaaagatccttaaattgaccaatgaatgtgcaaatccacatcagtcaaacaataatgatggtgggagttgtaatttagatcgctctaccatagacggatgctcagacaccgagctatttgagagggagacttcatctgctacgtctgcttatgaagtgatgcaaggcagtgcaacagcaacctctttgatgaatgagcttgcccttttcgaagagactctacaactctcttgtgtccctcctagaagttcagcaatggctttgaccacagacgaaaggtttttaaaagagcaaacacgagcaaacgacctaaagaccgtggagattggtcttcaaataagagagttaaggtgcaaagagacggcgctaggattaaaatttgaatcaaacaacctggggaaagcggcgctagagttggatgtttcgaaagctgcattcagagcggagaaattcaaaaccgaattagaagatacaagaaaagaagagatggtcacaagaatcatggattggctcctcgtaagtgtcttcagcatgttggcttctatggtacttggcgtttacaatttttcaataaagagaatcgaggatgctacctcagtatgcgaccaatccgaggagaaaagttcgtcgtggtgggttcctaaacaagtttcatcgattaactcaggcttcaacaccttcatctgccgggttcgagtttgggtgcagatatttttcggtgtgttaatgatcattgtcttcacttactttctaaacaaacgatcatcaggtacgaagcagacaatgccgataagtttcatcgttcttttcctcggtatattttgcggtgtatcgggtaaattgtgtgtggacacattgggcggtgatggcaaactctggctaatagtttgggaagtgttttgccttttgcaattcgttgcaaatgtcttcacattggctttgtatggtctaatgttcggtcctataaacgtgactcaagagaccagatcgaaccgttgtaacagtatgtttccatattgggcaaggcgcagtgtcgtgtatgtggtgattctgtttgttcttccagtcataaacggtcttttgccatttgcaacatttggtgaatggagagacttcgctatgtatcaccttcatggtgggtctgactatgcttgagacgaggaggccatctttgtattgtaatttattgtaacgatttgggttttttaatcttattttatttt

SEQ ID NO: 6515 - protein, 570 aa, Arabidopsis thaliana
KLYFKAMEALLLPPSPEPQNQITNPANSKPNHQSGDVHKDETMMMKKKKDTNPSNLEKRKLKGKKKEIMDNDEASSSYCSTSSTSNSNSTKRVTRVVHRLRNPMRLGMARRSVGERQAEKLAKPLGFSLAAFANMVIARKNAAGQNVYVDDLVEIFATLVEESLANVYGNKLGSFATNFEQTFSSTLKILKLTNECANPHQSNNNDGGSCNLDRSTIDGCSDTELFERETSSATSAYEVMQGSATATSLMNELALFEETLQLSCVPPRSSAMALTTDERFLKEQTRANDLKTVEIGLQIRELRCKETALGLKFESNNLGKAALELDVSKAAFRAEKFKTELEDTRKEEMVTRIMDWLLVSVFSMLASMVLGVYNFSIKRIEDATSVCDQSEEKSSSWWVPKQVSSINSGFNTFICRVRVWVQIFFGVLMIIVFTYFLNKRSSGTKQTMPISFIVLFLGIFCGVSGKLCVDTLGGDGKLWLIVWEVFCLLQFVANVFTLALYGLMFGPINVTQETRSNRCNSMFPYWARRSVVYVVILFVLPVINGLLPFATFGEWRDFAMYHLHGGSDYA

SEQ ID NO: 6516 - protein, 564 aa, Arabidopsis thaliana
MEALLLPPSPEPQNQITNPANSKPNHQSGDVHKDETMMMKKKKDTNPSNLEKRKLKGKKKEIMDNDEASSSYCSTSSTSNSNSTKRVTRVVHRLRNPMRLGMARRSVGERQAEKLAKPLGFSLAAFANMVIARKNAAGQNVYVDDLVEIFATLVEESLANVYGNKLGSFATNFEQTFSSTLKILKLTNECANPHQSNNNDGGSCNLDRSTIDGCSDTELFERETSSATSAYEVMQGSATATSLMNELALFEETLQLSCVPPRSSAMALTTDERFLKEQTRANDLKTVEIGLQIRELRCKETALGLKFESNNLGKAALELDVSKAAFRAEKFKTELEDTRKEEMVTRIMDWLLVSVFSMLASMVLGVYNFSIKRIEDATSVCDQSEEKSSSWWVPKQVSSINSGFNTFICRVRVWVQIFFGVLMIIVFTYFLNKRSSGTKQTMPISFIVLFLGIFCGVSGKLCVDTLGGDGKLWLIVWEVFCLLQFVANVFTLALYGLMFGPINVTQETRSNRCNSMFPYWARRSVVYVVILFVLPVINGLLPFATFGEWRDFAMYHLHGGSDYA

SEQ ID NO: 6517 - protein, 528 aa, Arabidopsis thaliana
MMMKKKKDTNPSNLEKRKLKGKKKEIMDNDEASSSYCSTSSTSNSNSTKRVTRVVHRLRNPMRLGMARRSVGERQAEKLAKPLGFSLAAFANMVIARKNAAGQNVYVDDLVEIFATLVEESLANVYGNKLGSFATNFEQTFSSTLKILKLTNECANPHQSNNNDGGSCNLDRSTIDGCSDTELFERETSSATSAYEVMQGSATATSLMNELALFEETLQLSCVPPRSSAMALTTDERFLKEQTRANDLKTVEIGLQIRELRCKETALGLKFESNNLGKAALELDVSKAAFRAEKFKTELEDTRKEEMVTRIMDWLLVSVFSMLASMVLGVYNFSIKRIEDATSVCDQSEEKSSSWWVPKQVSSINSGFNTFICRVRVWVQIFFGVLMIIVFTYFLNKRSSGTKQTMPISFIVLFLGIFCGVSGKLCVDTLGGDGKLWLIVWEVFCLLQFVANVFTLALYGLMFGPINVTQETRSNRCNSMFPYWARRSVVYVVILFVLPVINGLLPFATFGEWRDFAMYHLHGGSDYA

SEQ ID NO: 6518 - DNA, 1411 bp, Arabidopsis thaliana
actaccatcgtcgtctccgcgagttcttctctgcgtttaagccatagataacaaaccaaactaaaaaaaaaaagtttctccttttatcattccttctcttcccttgtataggtgtgatcctcttcaaggggatttctctggcgggtcatacattcgcaccgatcaaagtcggattggtctttcttaacgcaatcttgacccgattcaaaaaatttctgggtttgttagtgaatagataagaagataaatgggagctccgttagtgtgccacgggcattctcgtcccgtcgtcgatgtggcttatagtccggtgactccagatgggttctttctcattagcgccagcaaagattcgaatccgatgttgaggaatggagagactggtgactggattgggacttttgaaggacataagggagcagtttggagttgcagccttgataaaaatgctattcgtgctgcctcagcttctgctgatttcactgcgaaaatatggaatgcattgacaggagatgaattgcactcctttgaacacaagcacattgttcgtgcatgtgccttttctgaggacactcaccgtttactcactggtggaatggagaaaatacttcggatattcgatttgaatcggccagacgcacctccaaaagaagtcgggaattcccctggttcaattagaactgtcgaatggcttcatagtgataatacaatcttaagctcttgcacagataccggtgacattaggttatgggacataagaagtgacaagattgttcatacattagaaacaaagtccccagttactagtgctgaagtaagtcaggatgggcgatacatcactactgctgatggatctagtgttaagttttgggacgctaaaaattttggattgctgaagagctatgacatgccttgcaatgttgaatcggcatcgttggaaccgaaacacggtaacactttcattgctggaggagaagatatgtgggtgcacaggtttgatttccagactggagaagagattgggtgtaacaagggtcatcacgggccagtgcactgcgtgaggtatgcgccaggaggggagtcatacacctcaggctcagaagacggaacggtcagaatatgggtggtgggttcggtaaaccatcctgaggagagcaatctaagcggccacgtgaagcttgtggcagaggaggttgtgcgtaaagctgaaagtctccgtatcagtgagaaagccgcagaagctaaatgaaacaccatcgttagcttatgatatcacatagattcatagttgtttttgcatcattataagatgtgacaaaggggttttgccttttaaaagtctctcagaccgaataaaacgaaataatcttcaactatacttgagtgaatagtgaatctaatccaaattttg

SEQ ID NO: 6519 - protein, 333 aa, Arabidopsis thaliana
MGAPLVCHGHSRPVVDVAYSPVTPDGFFLISASKDSNPMLRNGETGDWIGTFEGHKGAVWSCSLDKNAIRAASASADFTAKIWNALTGDELHSFEHKHIVRACAFSEDTHRLLTGGMEKILRIFDLNRPDAPPKEVGNSPGSIRTVEWLHSDNTILSSCTDTGDIRLWDIRSDKIVHTLETKSPVTSAEVSQDGRYITTADGSSVKFWDAKNFGLLKSYDMPCNVESASLEPKHGNTFIAGGEDMWVHRFDFQTGEEIGCNKGHHGPVHCVRYAPGGESYTSGSEDGTVRIWVVGSVNHPEESNLSGHVKLVAEEVVRKAESLRISEKAAEAK

SEQ ID NO: 6520 - protein, 295 aa, Arabidopsis thaliana
MLRNGETGDWIGTFEGHKGAVWSCSLDKNAIRAASASADFTAKIWNALTGDELHSFEHKHIVRACAFSEDTHRLLTGGMEKILRIFDLNRPDAPPKEVGNSPGSIRTVEWLHSDNTILSSCTDTGDIRLWDIRSDKIVHTLETKSPVTSAEVSQDGRYITTADGSSVKFWDAKNFGLLKSYDMPCNVESASLEPKHGNTFIAGGEDMWVHRFDFQTGEEIGCNKGHHGPVHCVRYAPGGESYTSGSEDGTVRIWVVGSVNHPEESNLSGHVKLVAEEVVRKAESLRISEKAAEAK

SEQ ID NO: 6521 - protein, 217 aa, Arabidopsis thaliana
MEKILRIFDLNRPDAPPKEVGNSPGSIRTVEWLHSDNTILSSCTDTGDIRLWDIRSDKIVHTLETKSPVTSAEVSQDGRYITTADGSSVKFWDAKNFGLLKSYDMPCNVESASLEPKHGNTFIAGGEDMWVHRFDFQTGEEIGCNKGHHGPVHCVRYAPGGESYTSGSEDGTVRIWVVGSVNHPEESNLSGHVKLVAEEVVRKAESLRISEKAAEAK

SEQ ID NO: 6522 - DNA, 2057 bp, Arabidopsis thaliana
aaacatttcctctcaatttttttttcaatcaaacaaaaaaaaatcatcgctcccaattttacattcttcttctcgccaaaccctaattgtttcgatttctgctacattcttccggaaacttgttctatctctgacggatctcgaatcggtattctcagctgctgaaatctccggggaatgcagagaacgttttgctgcgaggtggagaacggttggaaggaatccctctctcaagggattgttatcgtaggtcctaaagcaagaactagggacaaaccttgggatattctctaatctttcatctttgattaggacagcaaagacttaagaagcagcatgactcggattttggttcaaagaggttcatcaggcagttcttccaactctagccgtccttcttcctcatctagttcttcctcgggatcagaaacacagataaacaataatattccggttcctcctgttactatagatgaagaaattacggatgagaaacaagaagaggttactgtagttgaaaaagcagagtgttctgatgctaaagatgtagctgtggacagtgatgaacctgcggatagagaagatgatgaagggttggtagttgcagaaaatgttcatgttcaaagtgaaggtatagattgtgattctccagttagcggtggcagtaactctgattcaccacccgtaccagctccaccaccaaaaccttcttccactgtcaatcctggtagtaacagatcggttttgggaagttttggcgctttacgaattggaccaacacgaagagctgctgggcctcgctctcttgtttccagtaggagttcgccaactggatcacatccttcttctccaagatcacacagtgagaacgagggctataatagttctgatgagcatatgccatgctatgtgccctctcatcctggctctggcttggaaagagaacaccagtttgaagcagagattagatattcaaaaggatttgaaattaggcggatgttggaagatggaaattgtctttttcgagctgttgcagatcaagtatatggggactcagaggcatatgacttggctagacaaatgtgcatggattacatggaacaagagagggatcacttttctcagttcataaccgaaggttttacctcttacttgaagaggaaaagaagagataaggtctatggaaacaacgtagagatccaagctttagcagaaatgtacaataggccaatccacatttactcatatagcacagagcctatcaacatatttcaaggaaactacagcacggatacacctcccataaggctgagttaccaccacgggaatcattataattctttggtggatccacatcggttgacagttggtgcaggacttggatttagtagccttagtgggagacacgtggacaaggaacaggtgaaagctgctataaaggctcagcaagaacatcaaattgataatgcgctgttagcagaagggagattttactctgaccttgagcttacggaaaaggaaatagagcggtcggtaatggaagcttctcgtgctgagtatcttatggaatggtctaagccacgaattggtccaaaggaatcatccacctcgaatgctgagacatcatcttctggagctacaggaccttcaggcagcgattcgaaaccagcagaggcagtaaaagaaaagacggtgctgagcagcagtatcgagatggtattgtcgatgggatttagctacgcacaggccatggaagcttatagcatttttggggatgacgttgactctatggtctgttatgtactggagacgagctgtggcggcaacaaccgacgcaaaggcaaagccacggaatagagaatgtaacatgaattgctctgtattaatagtatatgatataccaattcgtattcctatcaatggtgggcgattacccttatcagaataatgaaaaataaacttgtgcatccatgacatgatgtatgcaaatgtttgttgtttatgtacttagttgtaaaagttgaataataagagagggaaaaagaacacttcttttg

SEQ ID NO: 6523 - protein, 506 aa, Arabidopsis thaliana
MTRILVQRGSSGSSSNSSRPSSSSSSSSGSETQINNNIPVPPVTIDEEITDEKQEEVTVVEKAECSDAKDVAVDSDEPADREDDEGLVVAENVHVQSEGIDCDSPVSGGSNSDSPPVPAPPPKPSSTVNPGSNRSVLGSFGALRIGPTRRAAGPRSLVSSRSSPTGSHPSSPRSHSENEGYNSSDEHMPCYVPSHPGSGLEREHQFEAEIRYSKGFEIRRMLEDGNCLFRAVADQVYGDSEAYDLARQMCMDYMEQERDHFSQFITEGFTSYLKRKRRDKVYGNNVEIQALAEMYNRPIHIYSYSTEPINIFQGNYSTDTPPIRLSYHHGNHYNSLVDPHRLTVGAGLGFSSLSGRHVDKEQVKAAIKAQQEHQIDNALLAEGRFYSDLELTEKEIERSVMEASRAEYLMEWSKPRIGPKESSTSNAETSSSGATGPSGSDSKPAEAVKEKTVLSSSIEMVLSMGFSYAQAMEAYSIFGDDVDSMVCYVLETSCGGNNRRKGKATE

SEQ ID NO: 6524 - protein, 319 aa, Arabidopsis thaliana
MPCYVPSHPGSGLEREHQFEAEIRYSKGFEIRRMLEDGNCLFRAVADQVYGDSEAYDLARQMCMDYMEQERDHFSQFITEGFTSYLKRKRRDKVYGNNVEIQALAEMYNRPIHIYSYSTEPINIFQGNYSTDTPPIRLSYHHGNHYNSLVDPHRLTVGAGLGFSSLSGRHVDKEQVKAAIKAQQEHQIDNALLAEGRFYSDLELTEKEIERSVMEASRAEYLMEWSKPRIGPKESSTSNAETSSSGATGPSGSDSKPAEAVKEKTVLSSSIEMVLSMGFSYAQAMEAYSIFGDDVDSMVCYVLETSCGGNNRRKGKATE

SEQ ID NO: 6525 - protein, 286 aa, Arabidopsis thaliana
MLEDGNCLFRAVADQVYGDSEAYDLARQMCMDYMEQERDHFSQFITEGFTSYLKRKRRDKVYGNNVEIQALAEMYNRPIHIYSYSTEPINIFQGNYSTDTPPIRLSYHHGNHYNSLVDPHRLTVGAGLGFSSLSGRHVDKEQVKAAIKAQQEHQIDNALLAEGRFYSDLELTEKEIERSVMEASRAEYLMEWSKPRIGPKESSTSNAETSSSGATGPSGSDSKPAEAVKEKTVLSSSIEMVLSMGFSYAQAMEAYSIFGDDVDSMVCYVLETSCGGNNRRKGKATE

SEQ ID NO: 6526 - DNA, 1181 bp, Arabidopsis thaliana
aaaccagaattattaaatttgatttcagtggatataaatttctctcaagaaaacgacattaacgaaggagagccaaagcttcgtcgttgatcattcctccgtagttgcggaattgaacccaacttaggaatcaaatgcccaagatctgctgctctcgttccgctacacaagttgtggtagcacaaaaatcaaactcgggtaaaggaagaaacggtgaaggaggaatcaagtatggatttagtttgataaaagggaaatctaaccattcaatggaggattatcatgttgctaagtttaccaatttcaatggcaatgaattggggctttttgcaatctttgatggtcataaaggtgatcatgttgctgcttatctgcagaaacatctcttctctaatatccttaaagatggagagttcttggttgatcctcgaagagcaattgcgaaagcttatgagaatacagatcaaaagattttagcagataatagaacggatttagagagtggtggttcgactgctgtgactgcgattttgatcaatgggaaagctttgtggatagctaatgttggtgattcacgagctattgtttctagtcgaggtaaagcaaaacagatgagtgttgatcatgatcctgatgatgatactgagaggagtatgattgagagtaaaggtggatttgtgaccaacagaccgtgatgttcctcgagtgaacggtttgttagcggtctctcgtgtctttggagataaaaaccttaaagcatatttgaactcagagcctgagattaaggacgtaaccattgatagtcacacagattttcttattctggctagtgacggtatttcgaaggtgatgtcaaaccaagaagcagttgatgtagctaagaagttgaaagatccaaaggaagcggcgaggcaagtagttgctgaagcattgaaaagaaacagcaaggatgacatatcttgcattgttgtccggtttagatgataaccaagaagactcagcttatattggatttggagcttcctttgcttaccatgattcttttggggtccggtttagtttgattctgggtcttggttacttgtgcatttttaagaacatgagtttgaataggactattatatattactagtttgacaaaccagatattttatcatataaattacatgaaaagaatagcc

SEQ ID NO: 6527 - protein, 186 aa, Arabidopsis thaliana
MPKICCSRSATQVVVAQKSNSGKGRNGEGGIKYGFSLIKGKSNHSMEDYHVAKFTNFNGNELGLFAIFDGHKGDHVAAYLQKHLFSNILKDGEFLVDPRRAIAKAYENTDQKILADNRTDLESGGSTAVTAILINGKALWIANVGDSRAIVSSRGKAKQMSVDHDPDDDTERSMIESKGGFVTNRP

SEQ ID NO: 6528 - protein, 141 aa, Arabidopsis thaliana
MEDYHVAKFTNFNGNELGLFAIFDGHKGDHVAAYLQKHLFSNILKDGEFLVDPRRAIAKAYENTDQKILADNRTDLESGGSTAVTAILINGKALWIANVGDSRAIVSSRGKAKQMSVDHDPDDDTERSMIESKGGFVTNRP

SEQ ID NO: 6529 - DNA, 1153 bp, Arabidopsis thaliana
aaaattgaaattcgaaaacagaacaaaaaaaaaaatctctctcaatctctctcagatctgaatccatccatcaccgatctctaatggcggcaccaccagcatcatcctcggcgagggaagagttcgtgtacctcgcaaagctcgcagagcaagcggaacgttacgaagaaatggttgaattcatggaaaaagtcgctgaagccgttgacaaagacgaactcaccgtcgaagaacgtaatctcctctccgtcgcttacaaaaacgtaatcggcgctcgtcgtgcttcctggagaatcatctcttccattgaacaaaaagaagagagtcgtggtaacgatgaccatgtgaccacgatccgtgattacagaagcaagatcgaatctgagttatcgaaaatctgtgacggtattcttaagcttcttgatactagacttgttcctgcttctgctaatggagattctaaggttttttaccttaagatgaagggagattatcataggtatttggctgagtttaagactggtcaagagaggaaagatgctgctgaacatactctcaccgcttacaaagctgctcaggatattgctaatgctgaattggctccaacgcatccgattcgtcttggtttggctttgaatttctctgtgttttactatgagattcttaattctccagatcgtgcttgtaatctcgctaagcaggcgtttgatgaagccattgctgagttagatactcttggagaggagtcatacaaggatagtaccttgatcatgcagcttcttcgtgacaatcttactctctggacttctgacatgcaggacgaaagtccggaggagattaaagaagcagcagcaccaaagcctgctgaagaacagaaggagatctaagtttgtggtttcttttttcagtattcttaagttatgcaattataattatgtttctgcttggtgtttattttctaatctttcctttgctatccccgaagcttctaaggccgtctaattcttgtcctttgtttgcttttctcaatcgtggatgctactggatttctgttttgttttacttcttctcttgattgattgcatttcccggcttatgccttgtacttgaaactcagttttctctcttattaatgatttgccattcacctggt

SEQ ID NO: 6530 - protein, 267 aa, Arabidopsis thaliana
MAAPPASSSAREEFVYLAKLAEQAERYEEMVEFMEKVAEAVDKDELTVEERNLLSVAYKNVIGARRASWRIISSIEQKEESRGNDDHVTTIRDYRSKIESELSKICDGILKLLDTRLVPASANGDSKVFYLKMKGDYHRYLAEFKTGQERKDAAEHTLTAYKAAQDIANAELAPTHPIRLGLALNFSVFYYEILNSPDRACNLAKQAFDEAIAELDTLGEESYKDSTLIMQLLRDNLTLWTSDMQDESPEEIKEAAAPKPAEEQKEI

SEQ ID NO: 6531 - protein, 238 aa, Arabidopsis thaliana
MVEFMEKVAEAVDKDELTVEERNLLSVAYKNVIGARRASWRIISSIEQKEESRGNDDHVTTIRDYRSKIESELSKICDGILKLLDTRLVPASANGDSKVFYLKMKGDYHRYLAEFKTGQERKDAAEHTLTAYKAAQDIANAELAPTHPIRLGLALNFSVFYYEILNSPDRACNLAKQAFDEAIAELDTLGEESYKDSTLIMQLLRDNLTLWTSDMQDESPEEIKEAAAPKPAEEQKEI

SEQ ID NO: 6532 - protein, 234 aa, Arabidopsis thaliana
MEKVAEAVDKDELTVEERNLLSVAYKNVIGARRASWRIISSIEQKEESRGNDDHVTTIRDYRSKIESELSKICDGILKLLDTRLVPASANGDSKVFYLKMKGDYHRYLAEFKTGQERKDAAEHTLTAYKAAQDIANAELAPTHPIRLGLALNFSVFYYEILNSPDRACNLAKQAFDEAIAELDTLGEESYKDSTLIMQLLRDNLTLWTSDMQDESPEEIKEAAAPKPAEEQKEI

SEQ ID NO: 6533 - DNA, 1121 bp, Arabidopsis thaliana
cccccggttccttccctcccatttgtcatcttatcttctgcgattactggtaaagtgagaaatccgttaatccctagagaaactgtaatcgtcgcggtgattcggagaaattcttctgcttccgcggaaaatgtcactaacccagatcgtgaatccaatcatatatccatctcgcacaattccacggcgtttcacggcgatctcgccttttaaaaccctaagtccccaattttcccgccacccacctcacgcactgtctcgtagactcttccttccttctgtttcctctatatgggatgccataaccggcggcggagattcgaaccctcgtgaggccatcgcagcggttcgacgcggaatgcagctcttcagacagggtgatgttgctggatcggtggcagagttcgatagagcaatcattttggatcccaggcaaaaggcatatctttggcaacgcgggctttctctttactatgtagataggtttgaagaaggtgcagagcagttccggatagatgttgctcagaatcctaatgacacagaggagtccatttggtgctttatctgcgaggcgaggctccatggtgttgatgttgcacgaacacagtttctcgaggttggtagagattctcggcctgtgatgcgagaagcttataatctattcaagaatggtggtgatcctgaaaagttagtaaatgacttctctagcggtcaagcaagcgaatacttctatgcttctctgtacgcagggctctactatgaagctgagggtaaatcagaaaacgcaaagtttcatttaaccgcggcttgtggatctccatatgggcagaggtctgatgattatatggcttcacttgctaaagtccattgcctttgtagaaactggagctccggtattctttgaaccggttcatggttttgtggagccaacatattagttattaaggcccaatttttgaaatatcagcccaattaaaaattggacctgggtttgcgatttccaacctttatttatgggaaataaataaagaaagtaaccattcacaaacattttaacaaataggtaaaattgtgccgttttggagtgtaccattcacaaacatattaaccaaattttgttg

SEQ ID NO: 6534 - protein, 257 aa, Arabidopsis thaliana
MSLTQIVNPIIYPSRTIPRRFTAISPFKTLSPQFSRHPPHALSRRLFLPSVSSIWDAITGGGDSNPREAIAAVRRGMQLFRQGDVAGSVAEFDRAIILDPRQKAYLWQRGLSLYYVDRFEEGAEQFRIDVAQNPNDTEESIWCFICEARLHGVDVARTQFLEVGRDSRPVMREAYNLFKNGGDPEKLVNDFSSGQASEYFYASLYAGLYYEAEGKSENAKFHLTAACGSPYGQRSDDYMASLAKVHCLCRNWSSGIL

SEQ ID NO: 6535 - protein, 181 aa, Arabidopsis thaliana
MQLFRQGDVAGSVAEFDRAIILDPRQKAYLWQRGLSLYYVDRFEEGAEQFRIDVAQNPNDTEESIWCFICEARLHGVDVARTQFLEVGRDSRPVMREAYNLFKNGGDPEKLVNDFSSGQASEYFYASLYAGLYYEAEGKSENAKFHLTAACGSPYGQRSDDYMASLAKVHCLCRNWSSGIL

SEQ ID NO: 6536 - DNA, 1134 bp, Arabidopsis thaliana
gtcgttaaagtatgttaacaactccgacaagattcgttgctctaagaatcccattccgatcttccaataagattccgatctccattgctccctctcccaaagtttttcctcggaaaccagttatcagagttccagcaagtctccgatttgtagcgacgatgtcgacccctgccgccgccgtcaacgccaccgtcacagtcaccgatgccggcagaggatcgatcactcacgtcatattcgacatggatggtctccttctcgacacggagaagttttacacggaggtccaggaaaagatacttgctagatacaataaaacatttgattggtctttgaaagcaaagatgatggggagaaaagccatagaagctgcaaggcttttcgttgacgaaagtggaatcagtgactctctttctgctgaagatttcattgtagaaagagagtcaatgttgcaagacctcttccccacaagtgacctaatgccaggagctagccggcttcttagacatctccatgggaaaggaattccaatatgtatagccacaggtacacatacacgacattttgatcttaaaacacaaagacaccgtgagcttttttcgcttatgcatcacgtagtacggggggatgacccagaggtgaaggaagggaagcccgcgccagacggctttcttgctgcatccaggagatttgaggacggtcctgtagatccacgcaaggttctcgtgtttgaagatgcgccttctggagtccaggcagctaaaaacgccggaatgaatgtaataatggtaccggattcaaggttagataagtcctactgcaatgttgcagaccaagttctggcctctctgctagatttcaaaccagaggaatggggcttaccttccttccaggattcacacaactaaaacaacaaagctttcagggcaacgttatcctcaagctaacgatacttgactcgttaactttgattctttaagcctcttacgctatacgagaaagattattgcaaattatagattcttattggggtaatttaaaacaatatatttatgttcgtgatttgttttcttgattcatgaatttgtaattgttatccagaccgttaagtgtgactttagtgagaatgatatt

SEQ ID NO: 6537 - protein, 298 aa, Arabidopsis thaliana
MLTTPTRFVALRIPFRSSNKIPISIAPSPKVFPRKPVIRVPASLRFVATMSTPAAAVNATVTVTDAGRGSITHVIFDMDGLLLDTEKFYTEVQEKILARYNKTFDWSLKAKMMGRKAIEAARLFVDESGISDSLSAEDFIVERESMLQDLFPTSDLMPGASRLLRHLHGKGIPICIATGTHTRHFDLKTQRHRELFSLMHHVVRGDDPEVKEGKPAPDGFLAASRRFEDGPVDPRKVLVFEDAPSGVQAAKNAGMNVIMVPDSRLDKSYCNVADQVLASLLDFKPEEWGLPSFQDSHN

SEQ ID NO: 6538 - protein, 249 aa, Arabidopsis thaliana
MSTPAAAVNATVTVTDAGRGSITHVIFDMDGLLLDTEKFYTEVQEKILARYNKTFDWSLKAKMMGRKAIEAARLFVDESGISDSLSAEDFIVERESMLQDLFPTSDLMPGASRLLRHLHGKGIPICIATGTHTRHFDLKTQRHRELFSLMHHVVRGDDPEVKEGKPAPDGFLAASRRFEDGPVDPRKVLVFEDAPSGVQAAKNAGMNVIMVPDSRLDKSYCNVADQVLASLLDFKPEEWGLPSFQDSHN

SEQ ID NO: 6539 - protein, 221 aa, Arabidopsis thaliana
MDGLLLDTEKFYTEVQEKILARYNKTFDWSLKAKMMGRKAIEAARLFVDESGISDSLSAEDFIVERESMLQDLFPTSDLMPGASRLLRHLHGKGIPICIATGTHTRHFDLKTQRHRELFSLMHHVVRGDDPEVKEGKPAPDGFLAASRRFEDGPVDPRKVLVFEDAPSGVQAAKNAGMNVIMVPDSRLDKSYCNVADQVLASLLDFKPEEWGLPSFQDSHN

SEQ ID NO: 6540 - DNA, 1191 bp, Arabidopsis thaliana
tgatagaacaatcaacaattacacttattttgctatcgtttgagcatctcaaaaatttctccggggagatttgtttgtatatatactcttccacaaagaagatgctcaaggtccctgaacaccaagttgctggtcacattgctagtgatgggaagctcggtccactcgtagatgaccaaggccggttcttcaagccacttcagggagattctcgtggcgaacacgaggctaagttctatgagtctttcacatcgaacatgaaggttccagatcacatccatagatacttcccggtgtatcacggcactcagctagttgaagcatctgatggatctggcaagcttcctcatcttgttcttgatgatgttgtttcagggtacgcaaacccgtcggtaatggatgttaagattggatctaggacatggtacccggatgtatcagaagaatacttcaagaaatgtattaagaaagatagacagaccaccacggtttcgttggggttcagggtttcaggttttaagatttttgatcaccaagaatcaagtttttggagagctgagaagaagcttgttcttgggtataatgcagatggtgctagattggctctgaggaagtttgtgtcatcgaactctcccgctgactctaacttgacaccaaactgtgcttttgcatcagaggtttatggcggttgtaacgggatcttagcgcagttgttggagcttaaagattggttcgaaacccaaacgctttaccatttcaattcctgctcgattctgatgatttacgagaatgaatcaatcttgatgcaaggaggagatgatgcaccggcaccacgggcacaagtgaagctggtggatttcgcgcatgttcttgatggaaacggtgtcatcgaccataatttcttgggtggactctgctctttcataaagttcatcaaagatattcttcagagcgttgaaaagcacgatgaaaccgatacttccctacttgagaacgggcgctagagaaacgtcgttcttcccggctccatttcaaataatctccaagtttttcctttcttggactagttgggttttggacatgaacgtttgtccctttcaattgtataatttcgttaactaaaccattgtactttctcattagagaaatatatcgagagtttcatgaaagtaagctaaggcagttaagctt

SEQ ID NO: 6541 - protein, 333 aa, Arabidopsis thaliana
IEQSTITLILLSFEHLKNFSGEICLYIYSSTKKMLKVPEHQVAGHIASDGKLGPLVDDQGRFFKPLQGDSRGEHEAKFYESFTSNMKVPDHIHRYFPVYHGTQLVEASDGSGKLPHLVLDDVVSGYANPSVMDVKIGSRTWYPDVSEEYFKKCIKKDRQTTTVSLGFRVSGFKIFDHQESSFWRAEKKLVLGYNADGARLALRKFVSSNSPADSNLTPNCAFASEVYGGCNGILAQLLELKDWFETQTLYHFNSCSILMIYENESILMQGGDDAPAPRAQVKLVDFAHVLDGNGVIDHNFLGGLCSFIKFIKDILQSVEKHDETDTSLLENGR

SEQ ID NO: 6542 - protein, 300 aa, Arabidopsis thaliana
MLKVPEHQVAGHIASDGKLGPLVDDQGRFFKPLQGDSRGEHEAKFYESFTSNMKVPDHIHRYFPVYHGTQLVEASDGSGKLPHLVLDDVVSGYANPSVMDVKIGSRTWYPDVSEEYFKKCIKKDRQTTTVSLGFRVSGFKIFDHQESSFWRAEKKLVLGYNADGARLALRKFVSSNSPADSNLTPNCAFASEVYGGCNGILAQLLELKDWFETQTLYHFNSCSILMIYENESILMQGGDDAPAPRAQVKLVDFAHVLDGNGVIDHNFLGGLCSFIKFIKDILQSVEKHDETDTSLLENGR

SEQ ID NO: 6543 - protein, 248 aa, Arabidopsis thaliana
MKVPDHIHRYFPVYHGTQLVEASDGSGKLPHLVLDDVVSGYANPSVMDVKIGSRTWYPDVSEEYFKKCIKKDRQTTTVSLGFRVSGFKIFDHQESSFWRAEKKLVLGYNADGARLALRKFVSSNSPADSNLTPNCAFASEVYGGCNGILAQLLELKDWFETQTLYHFNSCSILMIYENESILMQGGDDAPAPRAQVKLVDFAHVLDGNGVIDHNFLGGLCSFIKFIKDILQSVEKHDETDTSLLENGR

SEQ ID NO: 6544 - DNA, 1097 bp, Arabidopsis thaliana
gagttttctttatccccaaaaaaccctaaactcttcttctcgccgacttctctactcctttccagaaaccaagtttcaggtcatcggtgaaatttgttgtgttcccggcgacttctacttttcacctttcttctcggcgtcgtctaatttctagggttcccctgtatttcaccgtcaagagcaaatccaacatgtcgtcgctgcgtaatgctattccacggcctgctcataaggagcgatctcaaccggaagcgaggaagaggtttggcatcctcgagaagcataaggattatattatccgagctaatgcttatcacaaaaagcaggaaactttaaagatacttaggcagaaggctgcattcaagaatccagatgaattcaactttaagatgattaatagtaaaacagttgatggacgtcatagaccaaaagatgaggtaaataaatactctgcggaagagcttatgattatgaagactcaagatattggatatgtgttccaaaaatggcagagtgagaaaaacaaaattgacaagctgactgcatcgctgcaatgtactggggatcagtcaagccgtagacatgtttactatgcagaagacagagaggaggctagagaactggaggtacaaggtagaagcaaaagtgatatctctacagtagagattccgaaagatattaaaaagaaaatggataggtcctatagagacctcgaggggcggaagagcagggctaaagatttggagaagttatacacggatatgtcaatgcagaaggagttacagaaaaagggtcgcaaacggaagctgcgtgatgacgagctgctcaatccaaatggtaaagcggtatacaaatggcgcgccgatagaaaacgctgaagagaaaagctttcatggttgtgtagcttgacatcatttttctgatctctattaaagtttatatagcaggcagttttattatagtttttttgatctccagaacctgcagaactttacatacaattttggatgggacaatatctgtttactttaagctctttgttgcgtatctggaaaagttttactaatgtgattgacgaaatataaacacatgaatcc

SEQ ID NO: 6545 - protein, 228 aa, Arabidopsis thaliana
MSSLRNAIPRPAHKERSQPEARKRFGILEKHKDYIIRANAYHKKQETLKILRQKAAFKNPDEFNFKMINSKTVDGRHRPKDEVNKYSAEELMIMKTQDIGYVFQKWQSEKNKIDKLTASLQCTGDQSSRRHVYYAEDREEARELEVQGRSKSDISTVEIPKDIKKKMDRSYRDLEGRKSRAKDLEKLYTDMSMQKELQKKGRKRKLRDDELLNPNGKAVYKWRADRKR

SEQ ID NO: 6546 - protein, 162 aa, Arabidopsis thaliana
MINSKTVDGRHRPKDEVNKYSAEELMIMKTQDIGYVFQKWQSEKNKIDKLTASLQCTGDQSSRRHVYYAEDREEARELEVQGRSKSDISTVEIPKDIKKKMDRSYRDLEGRKSRAKDLEKLYTDMSMQKELQKKGRKRKLRDDELLNPNGKAVYKWRADRKR

SEQ ID NO: 6547 - protein, 137 aa, Arabidopsis thaliana
MIMKTQDIGYVFQKWQSEKNKIDKLTASLQCTGDQSSRRHVYYAEDREEARELEVQGRSKSDISTVEIPKDIKKKMDRSYRDLEGRKSRAKDLEKLYTDMSMQKELQKKGRKRKLRDDELLNPNGKAVYKWRADRKR

SEQ ID NO: 6548 - DNA, 1908 bp, Arabidopsis thaliana
aaaagagcgtggctttatctatcatctggtatccactatccacaactggggtcagcttctggttctctctctcggtaactttctgagctgaagaaccctaattcttatcttcaccggattccgggtatagggctttgtaaagttgttgaatttacaaagaaagatatgctggtttgtctgggttttgtagaagaatctgtgttgttgctttgagattaaagtccgaacaatgttgggtttgattcatgtccttgatgagctcgtcaatggtcttatgccactgcttatcattcagtagtcaaaacccagatcctgaatcatcatcatcttctcttcttcgttataagccttgtgattcgatttcgttgtggggtaagagaaggaagaagctttggagatttgttcccagtgcggagaagaataacagtcatacgggtaataataataagaggagaagaagctggtggcagaggtttttctttgatgatgatgggaattggcttggtttgagagacgacgacattgttgatgagactactgagcttgcaaaggatgatgagatgtctgatgaagagaaattcgagacttggaagagacgagcagaggcgattgtcgagctacgggaaggtcaggaggagattggggatagtggtgttgttgctgatgtgaccaagaaatgggaggattggattgtggattcagatgatagttttgttgagtcttggacccgagactctgctggtagtgacgacaatttagagcttgatgaattgacaattccagatggagggttggttaaaatggtgagggatatggttttaggtgcagaagaggaagatattctttacgaagaccgtatttttcgttacgcttcttcaaaatcggcaaagtttttggcggtcttaattctcattccatgggcattagactttttggctcatgattatctacttatgcccttcttagacagatatgtgaagactgtaccacttgctgcccagacgcttgatgtgagacgaaatcagaagctagaaatggttaaggaacttaatagagaaaaagctaggtaccgtcttgaagttgagattggcaaatctccgccgctttctgacgatgatttatggtgggagatgcggggtaaagctttggaactgcgtgatgagtggagactagagaaccggaaagcatttgccaacatatggtctgatatggtgtttgggatctccttgtttgttcttttgtacgccaatcagggtagagtagccttgttgaaatttacaggatataaaatcataaacaacatttcagacacgggaaaggcatttctcatcatcctgatcaccgacatattcttggggtaccattctgaatctggatgggagacattgttagagataataatggaacattatggtcttgaagttgagcaatctactattaccatttttatctgcctagttcccgttattatggacgcttgtgttaagctctggctgtttaagttccttccaagactgtctccgcgagtttccaacatattccaggagatgaaacgtcactgagtagtacccaccattgaaaccctccacttgagttctgtgtctctatcacacaaaccattcttcagctttatttacgttcagatagacataagagaaacataggctatttttttggtcactcatcttgatcttaaaatatattttttggttgaatttttggtgaacgattgagagagcactaatctgttggctctctcaccagtacttggtcatgtacacaataaacaaacctacaaaagaagccctttcggatatgggctttgggccttggaatttgggctttgggtgtatgtttacttgtgaaatagtagtaatcttctttacgacctctaagcggatcagttag

SEQ ID NO: 6549 - protein, 438 aa, Arabidopsis thaliana
MSLMSSSMVLCHCLSFSSQNPDPESSSSSLLRYKPCDSISLWGKRRKKLWRFVPSAEKNNSHTGNNNKRRRSWWQRFFFDDDGNWLGLRDDDIVDETTELAKDDEMSDEEKFETWKRRAEAIVELREGQEEIGDSGVVADVTKKWEDWIVDSDDSFVESWTRDSAGSDDNLELDELTIPDGGLVKMVRDMVLGAEEEDILYEDRIFRYASSKSAKFLAVLILIPWALDFLAHDYLLMPFLDRYVKTVPLAAQTLDVRRNQKLEMVKELNREKARYRLEVEIGKSPPLSDDDLWWEMRGKALELRDEWRLENRKAFANIWSDMVFGISLFVLLYANQGRVALLKFTGYKIINNISDTGKAFLIILITDIFLGYHSESGWETLLEIIMEHYGLEVEQSTITIFICLVPVIMDACVKLWLFKFLPRLSPRVSNIFQEMKRH

SEQ ID NO: 6550 - protein, 435 aa, Arabidopsis thaliana
MSSSMVLCHCLSFSSQNPDPESSSSSLLRYKPCDSISLWGKRRKKLWRFVPSAEKNNSHTGNNNKRRRSWWQRFFFDDDGNWLGLRDDDIVDETTELAKDDEMSDEEKFETWKRRAEAIVELREGQEEIGDSGVVADVTKKWEDWIVDSDDSFVESWTRDSAGSDDNLELDELTIPDGGLVKMVRDMVLGAEEEDILYEDRIFRYASSKSAKFLAVLILIPWALDFLAHDYLLMPFLDRYVKTVPLAAQTLDVRRNQKLEMVKELNREKARYRLEVEIGKSPPLSDDDLWWEMRGKALELRDEWRLENRKAFANIWSDMVFGISLFVLLYANQGRVALLKFTGYKIINNISDTGKAFLIILITDIFLGYHSESGWETLLEIIMEHYGLEVEQSTITIFICLVPVIMDACVKLWLFKFLPRLSPRVSNIFQEMKRH

SEQ ID NO: 6551 - protein, 431 aa, Arabidopsis thaliana
MVLCHCLSFSSQNPDPESSSSSLLRYKPCDSISLWGKRRKKLWRFVPSAEKNNSHTGNNNKRRRSWWQRFFFDDDGNWLGLRDDDIVDETTELAKDDEMSDEEKFETWKRRAEAIVELREGQEEIGDSGVVADVTKKWEDWIVDSDDSFVESWTRDSAGSDDNLELDELTIPDGGLVKMVRDMVLGAEEEDILYEDRIFRYASSKSAKFLAVLILIPWALDFLAHDYLLMPFLDRYVKTVPLAAQTLDVRRNQKLEMVKELNREKARYRLEVEIGKSPPLSDDDLWWEMRGKALELRDEWRLENRKAFANIWSDMVFGISLFVLLYANQGRVALLKFTGYKIINNISDTGKAFLIILITDIFLGYHSESGWETLLEIIMEHYGLEVEQSTITIFICLVPVIMDACVKLWLFKFLPRLSPRVSNIFQEMKRH

SEQ ID NO: 6552 - DNA, 683 bp, Arabidopsis thaliana
aaaaaacacaaaacttgatctcacgactccatcttctaaaattcagaatctttctttgaaacttttttcgtgtgaagaaaatggcaccaaaggcagagaagaagccggcagagaagaaaccagtggaagagaaatcaaaagccgagaaagctccggcggagaagaaaccaaaagccggcaagaaactcccgaaggaagccggtgccggcggcgataagaagaagaagatgaagaagaagagtgttgagacgtacaagatctacatcttcaaggttctgaaacaagttcatccagatattggtatttcaagcaaagctatggggattatgaacagtttcatcaacgacatcttcgagaaattggcatcggaatcttcgaagcttgctaggtataacaagaagccgacgattacctctagggagattcagactgctgttagacttgttcttcctggtgagcttgcgaaacatgctgtttctgaaggaaccaaggctgtgactaagtttactagctcttgaattgtggatcttgttgaaatcgatgtttgtaaaattagggttttttagatttgatggttgttgttgactcttcgatcgatttctgttttgttatcttgttgcgatgtaatcaaatcggatccgatttctttcttaaatcaaatctatcaagtaaaatcttttgcc

SEQ ID NO: 6553 - protein, 145 aa, Arabidopsis thaliana
MAPKAEKKPAEKKPVEEKSKAEKAPAEKKPKAGKKLPKEAGAGGDKKKKMKKKSVETYKIYIFKVLKQVHPDIGISSKAMGIMNSFINDIFEKLASESSKLARYNKKPTITSREIQTAVRLVLPGELAKHAVSEGTKAVTKFTSS

SEQ ID NO: 6554 - protein, 96 aa, Arabidopsis thaliana
MKKKSVETYKIYIFKVLKQVHPDIGISSKAMGIMNSFINDIFEKLASESSKLARYNKKPTITSREIQTAVRLVLPGELAKHAVSEGTKAVTKFTSS

SEQ ID NO: 6555 - DNA, 1976 bp, Arabidopsis thaliana
ctctcctctcattttctactcttcttcaaaagcacactcaatatttcgagatcctctcggcttgttcgttcttcgtgaacgatcccatctattgtttctcgctagtctcagattcgactaacttggatatctccgatactgaagaagcctccttcttctttttccgctcttcccgatgccgatcgataagatcttcaaagatgatgctagtgaagagaagggagaacgtgcgaggatggcatcatttgttggtgcaatggctatcagtgatctggttaagtctactttagggccaaagggcatggataaaatcttgcaatctactggtagaggtcatgcggtcactgttactaacgatggtgctactattctcaagtcacttcacatagacaaccctgcagctaaagttcttgttgacatctcgaaagttcaagatgatgaggttggtgatggaactacctctgttgttgtcttggccggcgagcttctgagggaagcagaaaagcttgtggcttctaagattcaccctatgaccatcatagcaggttacagaatggcttcggaatgtgctcgtaatgctttactgaaaagagtcattgataacaaggacaatgcagagaagtttaggtcagacttgttgaagattgcgatgactactttatgttccaaaattctctcacaggacaaggaacattttgcagaaatggccgtggatgctgttttcaggctaaagggaagcacaaacttggaagctattcagatcatcaaaaaacctggagggtctctgaaggattcgtttttggatgaagggtttattcttgacaagaaaataggaattgggcagcctaagcgcatagagaatgcaaatatcttagtagctaatactgctatggataccgataaagtgaagatttacggtgcacgtgtccgtgtggattccatgaccaaggttgctgagattgaaggggctgagaaggaaaaaatgaaagacaaggtgaagaagatcataggccacggaatcaactgctttgttaacaggcagttgatctacaatttccctgaggaactctttgctgatgctggtatacttgctattgagcatgctgactttgagggaatagagcgtcttggtttggttactggtggtgaaattgcttcgacctttgacaacccagagtctgttaagcttgggcattgcaagcttatagaagaaatcatgattggtgaagacaagttgattcatttctctggttgtgaaatgggccaggcttgttcaattgtcctaagaggggccagtcaccatgtcctagatgaggctgaaagatcactccatgatgccttatgtgtactctctcaaacagtgaatgatactagagttttgcttggaggtggatggccagagatggtgatggcaaaggaagtagatgagcttgcaaggaaaactgctggcaaaaaatctcatgccattgaagctttctcacgtgctctagttgctataccgacaacaatcgctgacaacgctggtttagacagtgccgaattggttgctcagcttcgtgcagagcaccacactgaagggtgtaacgctgggatcgacgtcatcactggagctgtaggagatatggaagagagaggaatctatgaagcattcaaagtgaagcaagcggttctgctttcagccacagaagcatctgagatgatattgcgagtggatgaaatcattacatgtgctcctaggaggagagaagacaggatgtgaaaaactcaacacaaacacatgaacgtggtgggagcctagagattccatgattgtgttttcgatttggatcagaatacaacttttctaatatgtttaatgttttgctcctccttagaactcatctttttgttttgtttccttttaatcttgttttgagtttgaatttagacgtttgaaaaaagtgttagctccaaagtttttaatttgtttggttgcg

SEQ ID NO: 6556 - protein, 527 aa, Arabidopsis thaliana
MPIDKIFKDDASEEKGERARMASFVGAMAISDLVKSTLGPKGMDKILQSTGRGHAVTVTNDGATILKSLHIDNPAAKVLVDISKVQDDEVGDGTTSVVVLAGELLREAEKLVASKIHPMTIIAGYRMASECARNALLKRVIDNKDNAEKFRSDLLKIAMTTLCSKILSQDKEHFAEMAVDAVFRLKGSTNLEAIQIIKKPGGSLKDSFLDEGFILDKKIGIGQPKRIENANILVANTAMDTDKVKIYGARVRVDSMTKVAEIEGAEKEKMKDKVKKIIGHGINCFVNRQLIYNFPEELFADAGILAIEHADFEGIERLGLVTGGEIASTFDNPESVKLGHCKLIEEIMIGEDKLIHFSGCEMGQACSIVLRGASHHVLDEAERSLHDALCVLSQTVNDTRVLLGGGWPEMVMAKEVDELARKTAGKKSHAIEAFSRALVAIPTTIADNAGLDSAELVAQLRAEHHTEGCNAGIDVITGAVGDMEERGIYEAFKVKQAVLLSATEASEMILRVDEIITCAPRRREDRM

SEQ ID NO: 6557 - protein, 507 aa, Arabidopsis thaliana
MASFVGAMAISDLVKSTLGPKGMDKILQSTGRGHAVTVTNDGATILKSLHIDNPAAKVLVDISKVQDDEVGDGTTSVVVLAGELLREAEKLVASKIHPMTIIAGYRMASECARNALLKRVIDNKDNAEKFRSDLLKIAMTTLCSKILSQDKEHFAEMAVDAVFRLKGSTNLEAIQIIKKPGGSLKDSFLDEGFILDKKIGIGQPKRIENANILVANTAMDTDKVKIYGARVRVDSMTKVAEIEGAEKEKMKDKVKKIIGHGINCFVNRQLIYNFPEELFADAGILAIEHADFEGIERLGLVTGGEIASTFDNPESVKLGHCKLIEEIMIGEDKLIHFSGCEMGQACSIVLRGASHHVLDEAERSLHDALCVLSQTVNDTRVLLGGGWPEMVMAKEVDELARKTAGKKSHAIEAFSRALVAIPTTIADNAGLDSAELVAQLRAEHHTEGCNAGIDVITGAVGDMEERGIYEAFKVKQAVLLSATEASEMILRVDEIITCAPRRREDRM

SEQ ID NO: 6558 - protein, 500 aa, Arabidopsis thaliana
MAISDLVKSTLGPKGMDKILQSTGRGHAVTVTNDGATILKSLHIDNPAAKVLVDISKVQDDEVGDGTTSVVVLAGELLREAEKLVASKIHPMTIIAGYRMASECARNALLKRVIDNKDNAEKFRSDLLKIAMTTLCSKILSQDKEHFAEMAVDAVFRLKGSTNLEAIQIIKKPGGSLKDSFLDEGFILDKKIGIGQPKRIENANILVANTAMDTDKVKIYGARVRVDSMTKVAEIEGAEKEKMKDKVKKIIGHGINCFVNRQLIYNFPEELFADAGILAIEHADFEGIERLGLVTGGEIASTFDNPESVKLGHCKLIEEIMIGEDKLIHFSGCEMGQACSIVLRGASHHVLDEAERSLHDALCVLSQTVNDTRVLLGGGWPEMVMAKEVDELARKTAGKKSHAIEAFSRALVAIPTTIADNAGLDSAELVAQLRAEHHTEGCNAGIDVITGAVGDMEERGIYEAFKVKQAVLLSATEASEMILRVDEIITCAPRRREDRM

SEQ ID NO: 6559 - DNA, 1078 bp, Arabidopsis thaliana
actcacacatccacaaaaagagagttagagattccaaggaggagagtgcgtgagcgtgacaatggaaactgacaaaagatggtctctcgccgggaaaacagctctggtaaccggcgggactcgtggaatcgggagagcagttgtagaggaactagcaaaatttggtgcaaaagttcatacttgttcaaggaaccaggaagagctaaatgcatgcttgaatgattggaaagcgaatggtttagtcgtgtctggttcggtttgtgatgcttcggttagggatcagagggagaagttgattcaggaagcttcttctgccttcagtggcaagctcaacatccttataaacaatgttggaactaatgtcaggaaaccaacagttgaatactcaagcgaggaatatgccaaaatcatgtcgaccaacttagaatccgctttccatttatctcaaattgctcatcctcttctaaaagcatctggtgtcggaagcattgtgttcatctcctctgtagctggcctggtgcatcttagcagtggatctatctatggtgcaactaaaggagcacttaatcagcttacaagaaatctagcttgcgagtgggcaagcgacaacatcagaaccaattgcgtggcgccatggtacatcaagacctcacttgtggaaacgctacttgagaagaaagaatttgtggaggctgtagtttcaaggaccccacttgggcgcgttggagaaccagaggaagtctcatcgttggttgcctttctctgccttcccgcatcatcttatattaccggacaggtcatatccgtcgatggaggattcactgtcaacggttttagctatgctatgaagccttaatctcgaatcgcaacattactaataaagcaagaatcctcgtgatgtgttggtcttgtttgtctttgtttagtttttgtgacttctttaaacatatagtaatatcaaaacgtttgaatttctaatgtagccgttaaataaatcaaggcacagttgtgcaccagtttatgtagacctacaacatttgtcattgatttaggtatatggatgagagtattttgatcg

SEQ ID NO: 6560 - protein, 264 aa, Arabidopsis thaliana
METDKRWSLAGKTALVTGGTRGIGRAVVEELAKFGAKVHTCSRNQEELNACLNDWKANGLVVSGSVCDASVRDQREKLIQEASSAFSGKLNILINNVGTNVRKPTVEYSSEEYAKIMSTNLESAFHLSQIAHPLLKASGVGSIVFISSVAGLVHLSSGSIYGATKGALNQLTRNLACEWASDNIRTNCVAPWYIKTSLVETLLEKKEFVEAVVSRTPLGRVGEPEEVSSLVAFLCLPASSYITGQVISVDGGFTVNGFSYAMKP

SEQ ID NO: 6561 - protein, 148 aa, Arabidopsis thaliana
MSTNLESAFHLSQIAHPLLKASGVGSIVFISSVAGLVHLSSGSIYGATKGALNQLTRNLACEWASDNIRTNCVAPWYIKTSLVETLLEKKEFVEAVVSRTPLGRVGEPEEVSSLVAFLCLPASSYITGQVISVDGGFTVNGFSYAMKP

SEQ ID NO: 6562 - DNA, 1558 bp, Arabidopsis thaliana
ggggaagacaattccgagaaaatagagagtagagagatcctaaagagtcaaaagaggtcaggtgattgattaacccgttgaataatctccttctcccgttgaatcgggtcgaaatagttgaactttaagccaaaccctagcttgaggaggaagaggaatggtcggcgtgatgaacagattgaggaatctggacgcttaccctaaaatcaatgaagatttctacaggcgtactctttctggtggtgttatcaccctcgcctcttctattgtcatgctaattctcttcttctccgagcttcagctgtacattcacccggttactgagactcagcttcgtgttgatacatcaagaggagagaagctacggattaattttgatgttacattccctgcgcttcaatgttcgattattagtcttgattccatggatatcagtggggagaggcaccttgatgtgcgacatgacattattaaaaggagattagactcttctggcaatgtcatcgaggcaaaacaagacggaattggtcatactaagattgaaaaacctttacaaaaacatggtggaaggttggaacacaatgaaacatactgtggttcctgttttggagcagaagcgtcagatgatgcttgttgtaattcatgtgaggaagttcgcgaagcttaccgaaagaaaggttgggccctctcggaccctgaatcaatcgaccagtgtaaaagagaaggctttgtgcaaaaggtaaaagatgaagaaggtgaaggttgtaatgttcacggtttcttggaagttaacaaagttgctgggaactttcatttcattcctgggcaaagctttcatcaatccggttttcaatttcatgatatgttattgttccagcaaggcaactacaatattagccacaaggtcaacaggttggcctttggagactttttccccggtgtagtgaaccctcttgatggtgtgcagtggaatcaggggaaacagagtggcgtctatcaatacttcatcaaggtggtaccaagcatatacaccgatgttcaccagaatacaatacagtcaaaccagttctctgtgacagaacatttccagaacatggaagcaggtcgcatgcaatctccgcctggtgttttcttctactatgatctatcgccaattaaggtgatatttgaggagcaacatgtggagttcttgcacttcctaacaaatgtttgcgctatagtaggaggtatcttcacggtatcgggaatagtagattcgttcatataccatggacaacgagcaattaagaagaaaatggagattggtaaattcaactgagttgtttgatattctccacactttcttgatcagctactggagaatcatctctacgggttttacagttagacattaggtttgaatttgtgacaatgcgatgatttaaagaattttgtagtactgtaagatattccaggatctgaactttgcctttcactattcactatctcttcataggcaacatacaaagtgtaaaatgttgttatcaccgattgaaacgaatgttaatttttcctattc

SEQ ID NO: 6563 - protein, 386 aa, Arabidopsis thaliana
MVGVMNRLRNLDAYPKINEDFYRRTLSGGVITLASSIVMLILFFSELQLYIHPVTETQLRVDTSRGEKLRINFDVTFPALQCSIISLDSMDISGERHLDVRHDIIKRRLDSSGNVIEAKQDGIGHTKIEKPLQKHGGRLEHNETYCGSCFGAEASDDACCNSCEEVREAYRKKGWALSDPESIDQCKREGFVQKVKDEEGEGCNVHGFLEVNKVAGNFHFIPGQSFHQSGFQFHDMLLFQQGNYNISHKVNRLAFGDFFPGVVNPLDGVQWNQGKQSGVYQYFIKVVPSIYTDVHQNTIQSNQFSVTEHFQNMEAGRMQSPPGVFFYYDLSPIKVIFEEQHVEFLHFLTNVCAIVGGIFTVSGIVDSFIYHGQRAIKKKMEIGKFN

SEQ ID NO: 6564 - protein, 382 aa, Arabidopsis thaliana
MNRLRNLDAYPKINEDFYRRTLSGGVITLASSIVMLILFFSELQLYIHPVTETQLRVDTSRGEKLRINFDVTFPALQCSIISLDSMDISGERHLDVRHDIIKRRLDSSGNVIEAKQDGIGHTKIEKPLQKHGGRLEHNETYCGSCFGAEASDDACCNSCEEVREAYRKKGWALSDPESIDQCKREGFVQKVKDEEGEGCNVHGFLEVNKVAGNFHFIPGQSFHQSGFQFHDMLLFQQGNYNISHKVNRLAFGDFFPGVVNPLDGVQWNQGKQSGVYQYFIKVVPSIYTDVHQNTIQSNQFSVTEHFQNMEAGRMQSPPGVFFYYDLSPIKVIFEEQHVEFLHFLTNVCAIVGGIFTVSGIVDSFIYHGQRAIKKKMEIGKFN

SEQ ID NO: 6565 - protein, 348 aa, Arabidopsis thaliana
MLILFFSELQLYIHPVTETQLRVDTSRGEKLRINFDVTFPALQCSIISLDSMDISGERHLDVRHDIIKRRLDSSGNVIEAKQDGIGHTKIEKPLQKHGGRLEHNETYCGSCFGAEASDDACCNSCEEVREAYRKKGWALSDPESIDQCKREGFVQKVKDEEGEGCNVHGFLEVNKVAGNFHFIPGQSFHQSGFQFHDMLLFQQGNYNISHKVNRLAFGDFFPGVVNPLDGVQWNQGKQSGVYQYFIKVVPSIYTDVHQNTIQSNQFSVTEHFQNMEAGRMQSPPGVFFYYDLSPIKVIFEEQHVEFLHFLTNVCAIVGGIFTVSGIVDSFIYHGQRAIKKKMEIGKFN

SEQ ID NO: 6566 - DNA, 1709 bp, Arabidopsis thaliana
atcacaaattacatactaaaaaaaaatagacgcggtcaaaattctctctcaattctatcaatataaagacaatctctttctcattagggtttttaattttcatcatcatcatcactctctctgctcccaaattcagaaaaaaaggaacgatttttatttccggtgaatgagaattttctctcgaatttgatcgatcacatatttcatctgtgtgttttcattttgaggatgccagcaacggaatatcaaagatcattcgggaggtcttttctgaatttacggcgagacacggcggtgaactcggttgagtcaacgacggttacccccgagttgactcagatggaagcagagcttgtttcgtttcagagaaaagttgctgagaggtttatcgatctcaatgcgtctagttgtgaagatctactgtctctcgaatgggttgggaagcttcttgattcgtttctatcttgtcaagaagagtttcgttccatagtcatcaatcatcgttcgatgattactaaaccaccgatggatcgattggtttcagattacttcgagagaagtgttaaagctcttgatgtttgtaacgcgattcgtgatggtgttgaacagatccgtcaatggcagaaacttatcgagattgtaatttgtgctttcaacaacaatggaggaggaagtagtggcaagagacctcttggagaaggtcagtttcgtcgtgcgaggaagactttgattgagttagctattggtatgcttgatgagaaggattcatcttctagctcagtgtcgtctcagcatcgtaaccggtcttttggaaggaacaaggagcagcttcatcaccgaacaatcgggcatttcaggtcgctttcttggagtgtttcgagatcatggtctgcttctaagcaactacaagctattggaaacaacttagctacgcctcgagctagtgacattactgcaactaatggtcttattgttccggtttatacaatgactacggtattgttgtttgtgatgtgggcacttgtagctgcgattccttgtcaagacagaggtttgcaagtacatttcaatgttcctaggaattaccaatggggaggttcgttgatgtcgttgcacgataggatcattgaggaatcgaagaagagagagaggaagaatacatgtgggttgttgaaagagattcatcagtttgagaagacttcaagattgatgaatgagttggttgattctgttcagtttcctttgtctgaagagaaagagatggaagtgagagagagagttgaggaattggggaagcttcaagaggctttgaagaatggtttggatccgtttgagaggaaagtgagggaagtgtttcatcggattgtaagaagcagaacagaaggtcttgatactgttggaaagcatcatggttctgaatgatgtttatcgaaaattcaatggaacatcatcatctgtttaatattctggagagttgaagtatgtttatcaaattgtgggtttgtttgtctggtgaacgtgaagatcatggagacaaattgctagagaacgagagaacattttggttaaaggttgttaatataaaagacaggagatacaaaccactccatttttccaatctttgttgtttatgtataattttctcatcaaagattgttaattatgaataaggttccattttatacggatcggaacttgcattacaattt

SEQ ID NO: 6567 - protein, 397 aa, Arabidopsis thaliana
MPATEYQRSFGRSFLNLRRDTAVNSVESTTVTPELTQMEAELVSFQRKVAERFIDLNASSCEDLLSLEWVGKLLDSFLSCQEEFRSIVINHRSMITKPPMDRLVSDYFERSVKALDVCNAIRDGVEQIRQWQKLIEIVICAFNNNGGGSSGKRPLGEGQFRRARKTLIELAIGMLDEKDSSSSSVSSQHRNRSFGRNKEQLHHRTIGHFRSLSWSVSRSWSASKQLQAIGNNLATPRASDITATNGLIVPVYTMTTVLLFVMWALVAAIPCQDRGLQVHFNVPRNYQWGGSLMSLHDRIIEESKKRERKNTCGLLKEIHQFEKTSRLMNELVDSVQFPLSEEKEMEVRERVEELGKLQEALKNGLDPFERKVREVFHRIVRSRTEGLDTVGKHHGSE

SEQ ID NO: 6568 - protein, 360 aa, Arabidopsis thaliana
MEAELVSFQRKVAERFIDLNASSCEDLLSLEWVGKLLDSFLSCQEEFRSIVINHRSMITKPPMDRLVSDYFERSVKALDVCNAIRDGVEQIRQWQKLIEIVICAFNNNGGGSSGKRPLGEGQFRRARKTLIELAIGMLDEKDSSSSSVSSQHRNRSFGRNKEQLHHRTIGHFRSLSWSVSRSWSASKQLQAIGNNLATPRASDITATNGLIVPVYTMTTVLLFVMWALVAAIPCQDRGLQVHFNVPRNYQWGGSLMSLHDRIIEESKKRERKNTCGLLKEIHQFEKTSRLMNELVDSVQFPLSEEKEMEVRERVEELGKLQEALKNGLDPFERKVREVFHRIVRSRTEGLDTVGKHHGSE

SEQ ID NO: 6569 - protein, 304 aa, Arabidopsis thaliana
MITKPPMDRLVSDYFERSVKALDVCNAIRDGVEQIRQWQKLIEIVICAFNNNGGGSSGKRPLGEGQFRRARKTLIELAIGMLDEKDSSSSSVSSQHRNRSFGRNKEQLHHRTIGHFRSLSWSVSRSWSASKQLQAIGNNLATPRASDITATNGLIVPVYTMTTVLLFVMWALVAAIPCQDRGLQVHFNVPRNYQWGGSLMSLHDRIIEESKKRERKNTCGLLKEIHQFEKTSRLMNELVDSVQFPLSEEKEMEVRERVEELGKLQEALKNGLDPFERKVREVFHRIVRSRTEGLDTVGKHHGSE

SEQ ID NO: 6570 - DNA, 877 bp, Arabidopsis thaliana
taaaagtcagcaaaacacaaggcatattcctcttctcttcctcagccttatttttctgatattcagtttcaaggatatatccatggcgatccagaagatcctctttgcttcacttctcatatgctcactgatccaatccatccacggggcggaaaaactaagactcttcaaagagctggacaaaggtgcacttgatgtcaccactaaacccagccgagaaggaccaggtgttgttttggatgccggcaaggatacgttgaacattacatggacgctaagctcgattgggtctaaaagagaggctgaatttaagatcatcaaagttaagctatgctacgctccacctagccaagttgaccgaccatggcgcaaaacccatgacgagctcttcaaagacaagacctgcccacacaagatcatagccaagccttatgacaaaacacttcaatcaactacttggactcttgagcgtgacatccccaccggaacctacttcgttcgtgcctacgcggttgatgccattggccatgaagttgcctatggacagagcaccgacgatgccaagaaaaccaatctcttcagcgttcaggctatcagtggccgccacgcgtccctagatattgcctccatctgtttcagtgtcttctccgtcgtggctcttgtcgtcttctttgtcaatgagaagaggaaggccaagatagagcaaagcaaatgagtcgtttactttgcgtatttgtgacgttgaacccaaaaaaagttgactttgaactttcttgtttaccaattccttttgtcttgttgcacacttcttctttcttatatgcttttatttatgtgtttgtacaattaagccattgatatggaacaaaactaatcc

SEQ ID NO: 6571 - protein, 237 aa, Arabidopsis thaliana
KSQQNTRHIPLLFLSLIFLIFSFKDISMAIQKILFASLLICSLIQSIHGAEKLRLFKELDKGALDVTTKPSREGPGVVLDAGKDTLNITWTLSSIGSKREAEFKIIKVKLCYAPPSQVDRPWRKTHDELFKDKTCPHKIIAKPYDKTLQSTTWTLERDIPTGTYFVRAYAVDAIGHEVAYGQSTDDAKKTNLFSVQAISGRHASLDIASICFSVFSVVALVVFFVNEKRKAKIEQSK

SEQ ID NO: 6572 - protein, 210 aa, Arabidopsis thaliana
MAIQKILFASLLICSLIQSIHGAEKLRLFKELDKGALDVTTKPSREGPGVVLDAGKDTLNITWTLSSIGSKREAEFKIIKVKLCYAPPSQVDRPWRKTHDELFKDKTCPHKIIAKPYDKTLQSTTWTLERDIPTGTYFVRAYAVDAIGHEVAYGQSTDDAKKTNLFSVQAISGRHASLDIASICFSVFSVVALVVFFVNEKRKAKIEQSK

SEQ ID NO: 6573 - DNA, 2612 bp, Arabidopsis thaliana
aaaatcacacaatcagacaaaataaaaaggttccttctttataacttccgacggtgtccattatctgaatccgacaattcttgatgggttttggcgttttgagttgataaaccattctgagttgtgaatcagggatacaagagagagaggaaagtggttttacggtgaccggagagatgaacggagaagggatctctggtggtttgtcggctgagaggaaagtggaaattagagtgaggaagaatgggagaaaggataaggttatagttgagaaatctgctgctcaaggtttacctgaaggatggatcaagaaacttgaaataacaaatagatcaggccgtaaaaccagaagagatccattcttcattgaccctaaaagtgagtatatctttcaatccttcaaagacgcatcacggtatgttgagactggcaatattggacattatgcacgtaaattgaaagaaagtgatatcgaagatgatgattccggaaatggaaagactgttcttcgtctggagtatgtggacaagagatctgcagatgatgtattggaaaaagagaaaacgatagatgatgtcagaagaagtaaacggagaaacttatcttcttctgatgaacattccaagaattgtaaaatgacttctgacttgagcattgtaacctcacaagttcttgaggatttggggaagaaggaagaggtgaaagatcctatcgaaaagcagctcatagcgaaacgggttactagaagccaaactaaagccagtacgactgaggaagtcgtcgtagatttaaaaagaaatctgtcttcatcaaatgcaaaatcagaaaaagattctgtaaactccagtgtaaggtcacaaaaaccaaagaaggaagctgttatgaaggaagaagaggaacaagattcttctgagaaacggatcacaaggagtaaagttgaagagaagaagaatgagctaagtaatagtgtagcccgacgaacatcaaaacggttagctggtattgagcttgaaccaacgcctgaactgaagacaagagccaaagttcaacgaatagtaccgcttgatgatgaaccgacgcctgaactgaagacaagaaccaaagttcaacgagtagtaccgcctgatgatgaaccgacgcctgaactgaagacaagaaccaaaattcaacgaatagtacctcctgatgatgaaccgacgcttgaactgaagacaagaaccaaagttcaacgaatattacctcctgatgatgaactgacgcccgaactgaagtcaagaaccaaagttcaacgaatagtacctcctgatgatgaactgacgcctgaatttaagacgagaaccaaagtacaacaaagaatacctcctgatgatggcagagccggaaagtgcaagcaacctgtgaatcatgttactaccagcggatcaaaaaagacggaaataccgctcaacaaggaagtagcccaaagctgtaatgaacaatcctctcagaaaccacatgctgctgctgcaacaagcaacaatcgtgtgagtgcagattcggcagtgggaatacaaaatatcggtaaagcagtaggcaggaagccttctaaagacaagaagacgctgaaatcaccactgatagtatatgaactgaatccagtttttcatcttgacggttacaagcagaaggaagaaatgtcacctgtgtcaccgttgtcttgccaaacttctgcaacaaagtgtgagaagacagcagcaggcaaaagagtgggaaggtctagcccaaaggctaaccttactaccagtgtgaaaccaactcagatctcgcctctgagatcaccaaataaaggaaagcaaccacatccttctgacagtggttctgccattcaaaggagaaataaactagctaatgagtattctaactcatccgttgtaagaggcacatgctcagaagtgatggagaagagtaccaacagcttctcctctgcatttgactcgactcttgcagatctttgtaaagatccttgcattgcctttgctatcaaaactctaaccggagaatctctgtgtcttctcaacactccagcgatctcttctaatcccattaacaaccacaccaagcagaaaggagtctcctttaccccagagactccaggaaatgttaacacatgctctgaaaaactggtatttccgagtccacccccgggtgcaaatatctggcaagacccgtgtatcgactttgctataaaaactctaacaggcgcaatcccgatcgggttagatgaaccagatacgaagtcaaagtcacaggggatgacgtctactacagcagcaacacaagaagctaaaggtaggcaaaacaactgtgattatatgacgaacaagactgtaggtaaacctgatgatctaaggtttacacaatctttctctaaggactaacaagaacaaaataaagcctactgtacttttaggtgttttcgtatattagggtttttgataatgccattggtatcgtgtaagatccatgtgcaatgccttagctttattttctttcgggccatgttctgttgtaaatacatatgtattagtgttgtgtatcgacagaaccttgaaaaactcataaaaactcttcct

SEQ ID NO: 6574 - protein, 746 aa, Arabidopsis thaliana
MNGEGISGGLSAERKVEIRVRKNGRKDKVIVEKSAAQGLPEGWIKKLEITNRSGRKTRRDPFFIDPKSEYIFQSFKDASRYVETGNIGHYARKLKESDIEDDDSGNGKTVLRLEYVDKRSADDVLEKEKTIDDVRRSKRRNLSSSDEHSKNCKMTSDLSIVTSQVLEDLGKKEEVKDPIEKQLIAKRVTRSQTKASTTEEVVVDLKRNLSSSNAKSEKDSVNSSVRSQKPKKEAVMKEEEEQDSSEKRITRSKVEEKKNELSNSVARRTSKRLAGIELEPTPELKTRAKVQRIVPLDDEPTPELKTRTKVQRVVPPDDEPTPELKTRTKIQRIVPPDDEPTLELKTRTKVQRILPPDDELTPELKSRTKVQRIVPPDDELTPEFKTRTKVQQRIPPDDGRAGKCKQPVNHVTTSGSKKTEIPLNKEVAQSCNEQSSQKPHAAAATSNNRVSADSAVGIQNIGKAVGRKPSKDKKTLKSPLIVYELNPVFHLDGYKQKEEMSPVSPLSCQTSATKCEKTAAGKRVGRSSPKANLTTSVKPTQISPLRSPNKGKQPHPSDSGSAIQRRNKLANEYSNSSVVRGTCSEVMEKSTNSFSSAFDSTLADLCKDPCIAFAIKTLTGESLCLLNTPAISSNPINNHTKQKGVSFTPETPGNVNTCSEKLVFPSPPPGANIWQDPCIDFAIKTLTGAIPIGLDEPDTKSKSQGMTSTTAATQEAKGRQNNCDYMTNKTVGKPDDLRFTQSFSKD

SEQ ID NO: 6575 - protein, 593 aa, Arabidopsis thaliana
MTSDLSIVTSQVLEDLGKKEEVKDPIEKQLIAKRVTRSQTKASTTEEVVVDLKRNLSSSNAKSEKDSVNSSVRSQKPKKEAVMKEEEEQDSSEKRITRSKVEEKKNELSNSVARRTSKRLAGIELEPTPELKTRAKVQRIVPLDDEPTPELKTRTKVQRVVPPDDEPTPELKTRTKIQRIVPPDDEPTLELKTRTKVQRILPPDDELTPELKSRTKVQRIVPPDDELTPEFKTRTKVQQRIPPDDGRAGKCKQPVNHVTTSGSKKTEIPLNKEVAQSCNEQSSQKPHAAAATSNNRVSADSAVGIQNIGKAVGRKPSKDKKTLKSPLIVYELNPVFHLDGYKQKEEMSPVSPLSCQTSATKCEKTAAGKRVGRSSPKANLTTSVKPTQISPLRSPNKGKQPHPSDSGSAIQRRNKLANEYSNSSVVRGTCSEVMEKSTNSFSSAFDSTLADLCKDPCIAFAIKTLTGESLCLLNTPAISSNPINNHTKQKGVSFTPETPGNVNTCSEKLVFPSPPPGANIWQDPCIDFAIKTLTGAIPIGLDEPDTKSKSQGMTSTTAATQEAKGRQNNCDYMTNKTVGKPDDLRFTQSFSKD

SEQ ID NO: 6576 - protein, 511 aa, Arabidopsis thaliana
MKEEEEQDSSEKRITRSKVEEKKNELSNSVARRTSKRLAGIELEPTPELKTRAKVQRIVPLDDEPTPELKTRTKVQRVVPPDDEPTPELKTRTKIQRIVPPDDEPTLELKTRTKVQRILPPDDELTPELKSRTKVQRIVPPDDELTPEFKTRTKVQQRIPPDDGRAGKCKQPVNHVTTSGSKKTEIPLNKEVAQSCNEQSSQKPHAAAATSNNRVSADSAVGIQNIGKAVGRKPSKDKKTLKSPLIVYELNPVFHLDGYKQKEEMSPVSPLSCQTSATKCEKTAAGKRVGRSSPKANLTTSVKPTQISPLRSPNKGKQPHPSDSGSAIQRRNKLANEYSNSSVVRGTCSEVMEKSTNSFSSAFDSTLADLCKDPCIAFAIKTLTGESLCLLNTPAISSNPINNHTKQKGVSFTPETPGNVNTCSEKLVFPSPPPGANIWQDPCIDFAIKTLTGAIPIGLDEPDTKSKSQGMTSTTAATQEAKGRQNNCDYMTNKTVGKPDDLRFTQSFSKD

SEQ ID NO: 6577 - DNA, 779 bp, Arabidopsis thaliana
aaaacctcacagccacacaaagaagagaagaaatggcttgcaccgtagatttccggtgccttgacgaaggattcggcggcaaaacctacaaacgcaaacgcgaatctcaagaacaagccgccgccgaagcaatcgccgatgaagcttccatggacatcgatggtgctcctcctgccgcgaaacgtagcgccgtcgcttcctctgaaaatccagacaaacctattgctctagctgtcgagagaccaacctacgacggtgtaatcgccgggaaagtctccggacggaactggaaacagccgcgaactcatagatcttcagggaggtttgtgaagaacaggaaaccagatctggaggagatgaagaggcaaagggagattaagaaagcgtataaggagagggtgaatgagctgaaggaagagattaggagtaataaggttgagaagaggaagaagaaggaagagagagagaagcggaagaaggagaatgttttgagaactggtactaagttgcagaagattacaaatcccaagactttgaagaaaatttctatgtctaagaagcagaggaagcagcttaagaaaattcctgacgagatgttgagtggtggtagcaagaagagtatcacgaattagtggttttttgttccttctctttaaaggcaagtgttttcagttttttgtatttcctcatgaggtttattcgatgttgtttagttaacaatctgcagctaagaactaaatgttatgaaagtttaatagtgagaaactgtgttttgcttc

SEQ ID NO: 6578 - protein, 209 aa, Arabidopsis thaliana
NLTATQRREEMACTVDFRCLDEGFGGKTYKRKRESQEQAAAEAIADEASMDIDGAPPAAKRSAVASSENPDKPIALAVERPTYDGVIAGKVSGRNWKQPRTHRSSGRFVKNRKPDLEEMKRQREIKKAYKERVNELKEEIRSNKVEKRKKKEEREKRKKENVLRTGTKLQKITNPKTLKKISMSKKQRKQLKKIPDEMLSGGSKKSITN

SEQ ID NO: 6579 - protein, 199 aa, Arabidopsis thaliana
MACTVDFRCLDEGFGGKTYKRKRESQEQAAAEAIADEASMDIDGAPPAAKRSAVASSENPDKPIALAVERPTYDGVIAGKVSGRNWKQPRTHRSSGRFVKNRKPDLEEMKRQREIKKAYKERVNELKEEIRSNKVEKRKKKEEREKRKKENVLRTGTKLQKITNPKTLKKISMSKKQRKQLKKIPDEMLSGGSKKSITN

SEQ ID NO: 6580 - protein, 160 aa, Arabidopsis thaliana
MDIDGAPPAAKRSAVASSENPDKPIALAVERPTYDGVIAGKVSGRNWKQPRTHRSSGRFVKNRKPDLEEMKRQREIKKAYKERVNELKEEIRSNKVEKRKKKEEREKRKKENVLRTGTKLQKITNPKTLKKISMSKKQRKQLKKIPDEMLSGGSKKSITN

SEQ ID NO: 6581 - DNA, 827 bp, Arabidopsis thaliana
aacaagagaagtgcttgagaaaaaaaaagtatcaaaacttcatatagccaaatttaaacaaaaagaaaaaagagaagaaataaatggcaaaggaaggtctagcactcgagatcacagagcttcgattgggtcttccaggagataattatagcgaaatatcagtatgcggatcgagtaagaagaataagagggtgctctcggatatgatgacctcatcagcgttagatactgagaatgaaaacagcgtcgtttcatcagttgaagatgaatcactgccggttgtgaagagtcaagcggtgggatggccacctgtgtgttcttacaggagaaagaagaacaatgaggaagcatcgaaagctataggctacgtgaaagtgagcatggatggtgtgccatacatgaggaagattgaccttggttcgagcaacagttatattaatctagtcacggttcttgagaatctcttcggctgtcttggcataggagtggcgaaggagggtaagaagtgtgaatacattattatatacgaagacaaggatagagactggatgctcgtcggagatgtaccttggcagatgtttaaagaatcatgcaagaggctgaggatcgtgaagagatcagatgcaactggttttggtctccagcaagattaatcatactagctagtgttgatcatctttaattaaccataaagtttgaaaaccgttgagtaattttttttcattataatcatttttcaaattgtaaaatttatatgataatgatgatatatacgttttcttcaaatgtatttccttactggtcgtatcatactttaatgttttatg

SEQ ID NO: 6582 - protein, 189 aa, Arabidopsis thaliana
MAKEGLALEITELRLGLPGDNYSEISVCGSSKKNKRVLSDMMTSSALDTENENSVVSSVEDESLPVVKSQAVGWPPVCSYRRKKNNEEASKAIGYVKVSMDGVPYMRKIDLGSSNSYINLVTVLENLFGCLGIGVAKEGKKCEYIIIYEDKDRDWMLVGDVPWQMFKESCKRLRIVKRSDATGFGLQQD

SEQ ID NO: 6583 - protein, 149 aa, Arabidopsis thaliana
MMTSSALDTENENSVVSSVEDESLPVVKSQAVGWPPVCSYRRKKNNEEASKAIGYVKVSMDGVPYMRKIDLGSSNSYINLVTVLENLFGCLGIGVAKEGKKCEYIIIYEDKDRDWMLVGDVPWQMFKESCKRLRIVKRSDATGFGLQQD

SEQ ID NO: 6584 - protein, 148 aa, Arabidopsis thaliana
MTSSALDTENENSVVSSVEDESLPVVKSQAVGWPPVCSYRRKKNNEEASKAIGYVKVSMDGVPYMRKIDLGSSNSYINLVTVLENLFGCLGIGVAKEGKKCEYIIIYEDKDRDWMLVGDVPWQMFKESCKRLRIVKRSDATGFGLQQD

SEQ ID NO: 6585 - DNA, 1812 bp, Arabidopsis thaliana
ctctttagctatcttttttgtgttaccggttcaaatggccgccgtcgcagattccgttgagaacaacggttccataaacctccctgagaatgaaaaccttataccggcgggattcagtgccgccgcattgcttgacgaaaactctggcgctttccctgaattgaatcagcccgatagcttagctgctgctgagactaccttccccgatacgaacgattccgcggaggagaggtggccaggttggcctggtgattgcgtgtttcgtatgatcgttccggtgactaaagtcggagctattattggacgcaaaggtgactttataaagaagatgtgtgaggagactcgtgctcgtatcaaagtccttgatggtcctgttaatactcccgatcgcatcgtgttaatatctggtaaggaagaaccagaggcctacatgtcaccggcaatggacgcagtgttgagggtgtttagacgtgtttcagggttgcctgataatgatgatgatgatgttcaaaacgctggaagtgtcttctcttcagtgcgtttattagttgcttcaacgcaggcgattaatttgattggaaaacaaggatctttgattaagtctatagtagagaactctggtgcatcagttcgtattttatcagaagaggaaacaccgttttatgctgcacaggatgagaggatagtggatttgcaaggggaagctttaaagattcttaaagcattagaagccattgttggacaccttaggagatttttagttgaccatactgttgtccctctcttcgagaagcaatatctagctagggtctctcaaactcgccaggaagaaccgttagctgaaagcaagtcatctctgcatactatttcgtcaaatctaatggagcctgatttctccctcttagcacggagggaacctttgtttctggagcgcgattctcgggtggactcacgtgttcagccttcgggagtttctatctacagtcaggatcctgtactgtctgccagacactccccaggtcttgctcgggtttcttctgcttttgtgacacaggtatctcaaacgatgcaaataccattctcctatgcagaggatattattggtgtagaaggagctaatatagcctatatccgtcgaagaagcggagctaccataaccattaaagagagtccgcatcctgatcaaatcacagtggaaatcaaaggcacaacttctcaagtacaaactgctgagcaactaattcaagagttcatcatcaatcacaaggaaccagtttcggtatcagggggatatgccagaatcgactctggatatgtacctgcatatcctcctcagctaagtaaccgtcaagagccgctcccgagcacctacatgggcacagagccggtgcagtacagaccaacagcatactctcagctggggggtccttctacctacacaccgaccctgactgggcaaacttatggttcggaatatagaccagcttctgatgttggtggctacagcagttataatctttgaattggttgctgtgtttaagtttatttgcagattaatttctctttagagaaaggctcatttataatataatagagagggaaaaggaacaagttctagagagccaatgtagttgttggaatgtgtaatgtaaatctaggtgcccttttttttttttttttttcatacctcgatatatgtcacactacgtttctggtcaaataagaacatgttttttctttcttttttgtatgaatttgtttatcagaagtcagaatgattcagttttaagaaatttttagttaacgttttac

SEQ ID NO: 6586 - protein, 506 aa, Arabidopsis thaliana
SLAIFFVLPVQMAAVADSVENNGSINLPENENLIPAGFSAAALLDENSGAFPELNQPDSLAAAETTFPDTNDSAEERWPGWPGDCVFRMIVPVTKVGAIIGRKGDFIKKMCEETRARIKVLDGPVNTPDRIVLISGKEEPEAYMSPAMDAVLRVFRRVSGLPDNDDDDVQNAGSVFSSVRLLVASTQAINLIGKQGSLIKSIVENSGASVRILSEEETPFYAAQDERIVDLQGEALKILKALEAIVGHLRRFLVDHTVVPLFEKQYLARVSQTRQEEPLAESKSSLHTISSNLMEPDFSLLARREPLFLERDSRVDSRVQPSGVSIYSQDPVLSARHSPGLARVSSAFVTQVSQTMQIPFSYAEDIIGVEGANIAYIRRRSGATITIKESPHPDQITVEIKGTTSQVQTAEQLIQEFIINHKEPVSVSGGYARIDSGYVPAYPPQLSNRQEPLPSTYMGTEPVQYRPTAYSQLGGPSTYTPTLTGQTYGSEYRPASDVGGYSSYNL

SEQ ID NO: 6587 - protein, 495 aa, Arabidopsis thaliana
MAAVADSVENNGSINLPENENLIPAGFSAAALLDENSGAFPELNQPDSLAAAETTFPDTNDSAEERWPGWPGDCVFRMIVPVTKVGAIIGRKGDFIKKMCEETRARIKVLDGPVNTPDRIVLISGKEEPEAYMSPAMDAVLRVFRRVSGLPDNDDDDVQNAGSVFSSVRLLVASTQAINLIGKQGSLIKSIVENSGASVRILSEEETPFYAAQDERIVDLQGEALKILKALEAIVGHLRRFLVDHTVVPLFEKQYLARVSQTRQEEPLAESKSSLHTISSNLMEPDFSLLARREPLFLERDSRVDSRVQPSGVSIYSQDPVLSARHSPGLARVSSAFVTQVSQTMQIPFSYAEDIIGVEGANIAYIRRRSGATITIKESPHPDQITVEIKGTTSQVQTAEQLIQEFIINHKEPVSVSGGYARIDSGYVPAYPPQLSNRQEPLPSTYMGTEPVQYRPTAYSQLGGPSTYTPTLTGQTYGSEYRPASDVGGYSSYNL

SEQ ID NO: 6588 - protein, 418 aa, Arabidopsis thaliana
MIVPVTKVGAIIGRKGDFIKKMCEETRARIKVLDGPVNTPDRIVLISGKEEPEAYMSPAMDAVLRVFRRVSGLPDNDDDDVQNAGSVFSSVRLLVASTQAINLIGKQGSLIKSIVENSGASVRILSEEETPFYAAQDERIVDLQGEALKILKALEAIVGHLRRFLVDHTVVPLFEKQYLARVSQTRQEEPLAESKSSLHTISSNLMEPDFSLLARREPLFLERDSRVDSRVQPSGVSIYSQDPVLSARHSPGLARVSSAFVTQVSQTMQIPFSYAEDIIGVEGANIAYIRRRSGATITIKESPHPDQITVEIKGTTSQVQTAEQLIQEFIINHKEPVSVSGGYARIDSGYVPAYPPQLSNRQEPLPSTYMGTEPVQYRPTAYSQLGGPSTYTPTLTGQTYGSEYRPASDVGGYSSYNL

SEQ ID NO: 6589 - DNA, 1685 bp, Arabidopsis thaliana
ctcctatttctctcttctctctctctttaagtgagcttcgccgttaaactttctccggtaccgggaaattaacgaagaaagcgaaaagtcactgttacactaatatcacaaatctctctctgtctctctctctctctttgtcgaagtcgtgcgtgatgctagttacggtggtgaagcagcggttagtgtactctcgccggagaaattggttatgaccggaatctcacctccgtgatcgaagaaactgttttcgtttttttatcgttacgaagaaatggaaaaacaggcgaagctaacgaggacacagtcgtcgttactccggtcatcgtcgaatctccgttcgtcatatcaaagcttatcttcaatcgtcgaaggcgagcaagatctagaagccggagagaaagaagagaaacagagaagaaaaccacctaaaccattcggttcaccaaatcctaaaaccggtttaaccagaatcaatcccggtttagctttcacaatggtatctctctctttcctaagtctctcatcgttcttcttcttcgtcgtcttctcacaaaccgatgagattctcacatcggagaatcttttactagctttaatcttcgtcgctgtagctctcttcttcgcttccaagaacatctctctactaaaccaaaccgtaatcgcaatcaaaaacttagggttccaaaacagagactcgaaatcaaaaccggtacaatggtacatcggagacgattcaaaaccggagaagaaggtaatcaagagattcgttaaagaaggagttcaattctacagtaatggagatttctacgaaggtgaatttaacaaagggaagtgtaacggaagtggtgtgtattactatttcgtgagaggacgttatgaaggagattggctagatgggagatatgatggtcatgggattgagagttgggctagaggaagtagatataaaggtcaatataggcaaggtcttagacatggttttggtgtttatagattctacactggtgattgttatgctggtgagtggtttaatggtcaaagccatggttttggtgttcaatcttgttctgatggtagctcttaccttggtgagtctagatttggtgttaagcatggtcttggttcttaccatttcagaaatggagataagtatgcaggagagtactttggagacaagattcatgggtttggtgtgtatcgatttgctaatggacactgttatgaaggagcatggcatgaaggtcgtaagcaagggtttggtgcttactcgtttagaaatggtgatgctaaatctggtgaatgggattcaggggttcttgtgacttcacttcctcttacgagtgagccagtttcaagagctgttcaggcggctcgagaaacagcgaataaggcagtgaatcggagacgagtagatgagcaggtgagccgagctgtggctgcagctaataaggctgctacggctgcaagagtggctgctgtgagagccgttcagaatcaaatggatggtaaattttgtcaaagttgaaaaaaggaaaatgtaaaaaatcttttttttaccggtttctctgtaaccctgaatcgaaagtttgtttcagaggtttgtaacagagagttaattttcgatctttttactaatgtaacaaaactgtaaatagttgaagaagaagctttgtttttgttgt

SEQ ID NO: 6590 - protein, 417 aa, Arabidopsis thaliana
MEKQAKLTRTQSSLLRSSSNLRSSYQSLSSIVEGEQDLEAGEKEEKQRRKPPKPFGSPNPKTGLTRINPGLAFTMVSLSFLSLSSFFFFVVFSQTDEILTSENLLLALIFVAVALFFASKNISLLNQTVIAIKNLGFQNRDSKSKPVQWYIGDDSKPEKKVIKRFVKEGVQFYSNGDFYEGEFNKGKCNGSGVYYYFVRGRYEGDWLDGRYDGHGIESWARGSRYKGQYRQGLRHGFGVYRFYTGDCYAGEWFNGQSHGFGVQSCSDGSSYLGESRFGVKHGLGSYHFRNGDKYAGEYFGDKIHGFGVYRFANGHCYEGAWHEGRKQGFGAYSFRNGDAKSGEWDSGVLVTSLPLTSEPVSRAVQAARETANKAVNRRRVDEQVSRAVAAANKAATAARVAAVRAVQNQMDGKFCQS

SEQ ID NO: 6591 - protein, 343 aa, Arabidopsis thaliana
MVSLSFLSLSSFFFFVVFSQTDEILTSENLLLALIFVAVALFFASKNISLLNQTVIAIKNLGFQNRDSKSKPVQWYIGDDSKPEKKVIKRFVKEGVQFYSNGDFYEGEFNKGKCNGSGVYYYFVRGRYEGDWLDGRYDGHGIESWARGSRYKGQYRQGLRHGFGVYRFYTGDCYAGEWFNGQSHGFGVQSCSDGSSYLGESRFGVKHGLGSYHFRNGDKYAGEYFGDKIHGFGVYRFANGHCYEGAWHEGRKQGFGAYSFRNGDAKSGEWDSGVLVTSLPLTSEPVSRAVQAARETANKAVNRRRVDEQVSRAVAAANKAATAARVAAVRAVQNQMDGKFCQS

SEQ ID NO: 6592 - DNA, 679 bp, Arabidopsis thaliana
caaccaactctcacacaaattctctcgctctctcactctcttattctctttctctttttctctaagaatacaaaaaaagatgcaatacaaaacagaaactcgagggtcgttgtcctacaacaacaacagtaaggtgatgaacaacatgaatgtgtttccgtcggagacactggcgaagatagagtcgatggcggcagagaatgcggtggttatattcagcgtgagcacttgctgcatgtgccatgccatcaagcgtctcttccgtggaatgggcgtcagccccgccgtccacgagctcgacctcctcccttacggagttgaaatccaccgagctctcctccgtctccttggctgttccagcggtggcgccacatctccgggggcacttccggtggtgttcatcggagggaagatggtaggagcaatggagagagtgatggcttcacatatcaatggctcactcgtccctcttctcaaagatgctggcgctctttggctctgatgagtgctaatctcatcctccaaatatcaacctttggtttatctttggtttttaaggacagaagaaataggttaatcccagtgttgaattagagacagtgagagagaagagtgatgcgtttgttttaagcttagctctttgtctatcttaaatcacactaatatataaatgttaaat

SEQ ID NO: 6593 - protein, 166 aa, Arabidopsis thaliana
NQLSHKFSRSLTLLFSFSFSLRIQKKMQYKTETRGSLSYNNNSKVMNNMNVFPSETLAKIESMAAENAVVIFSVSTCCMCHAIKRLFRGMGVSPAVHELDLLPYGVEIHRALLRLLGCSSGGATSPGALPVVFIGGKMVGAMERVMASHINGSLVPLLKDAGALWL

SEQ ID NO: 6594 - protein, 140 aa, Arabidopsis thaliana
MQYKTETRGSLSYNNNSKVMNNMNVFPSETLAKIESMAAENAVVIFSVSTCCMCHAIKRLFRGMGVSPAVHELDLLPYGVEIHRALLRLLGCSSGGATSPGALPVVFIGGKMVGAMERVMASHINGSLVPLLKDAGALWL

SEQ ID NO: 6595 - protein, 121 aa, Arabidopsis thaliana
MNNMNVFPSETLAKIESMAAENAVVIFSVSTCCMCHAIKRLFRGMGVSPAVHELDLLPYGVEIHRALLRLLGCSSGGATSPGALPVVFIGGKMVGAMERVMASHINGSLVPLLKDAGALWL

SEQ ID NO: 6596 - DNA, 1359 bp, Arabidopsis thaliana
aaaacaaatctttgatttaagaaatccccaactccaaatcttttctcctttatttagttgtcttaattgggttcttattattgaagtacatcaaagagttgcagatagagagaaacattcggtaacaaacatctgaactgttgttatgaaacgaggattctccgattctccttcaagctctgctcctcctccttcttccagattcaaatctaatcccgaaggtgattctcagtttctggaagatgagactacaaagaattttgcccggaaagttgctgatcattacagtaggagaacaaaccaaacattggaagagcgagaagctagtcccatcattcatttgaagaaacttaacaattggattaaaagtgttttgatccagctttatgctcgtcctgacgatgctgttctcgaccttgcctgtgggaagggtggtgatttgatcaagtgggataaggcgagaatcgggtactatgttggaattgatattgctgaagggtcgattgaagattgtcgcacgcgttataacggtgatgcagaccatcatcaacggcgtaaaaagttcagttttccgtctcgattattatgtggggattgttttgaggtagagctagacaagattcttgaagaggatgccccttttgatatctgcagttgccagtttgctatgcattactcatggactactgaggcacgtgcacgacgagctttggcaaatgtttcagctttacttcgtccaggaggtgtctttatcggaacaatgccagatgccaatgttattataaaaaaactcagagaagctgaaggtttggagattggtaatagtgtttactggattcgttttggtgaagagtattcccaaaagaagttcaaatctagcagcccatttggtatcgaatacgtgtttcatctcgaggatgctgttgattgtcctgaatggattgtgccctttaacgtcttcaagtctttagcggaggagtatgatttagagttggtatttgtgaagaactcccacgagtttgtccatgagtatatgaaaaagccagagtttgtcgaactcatgagaaggcttggtgctttgggtgatggtagcaatgatcagagcacattatcagctgatgaatgggaagctgcatatttatacctctcttttgtcttgagaaagaggggagaatcagatggagctcgaaggagcgggcggaggaagaatgggaaaatgaacttgtcgaaagatgatgttttgtatatcgatagctgaagtgtcaaagagtgtttcttttactcttagagtctctgtttttggtctcacttcgttgtcttacgtttttggccatttgaattgagagattgcattacttt

SEQ ID NO: 6597 - protein, 370 aa, Arabidopsis thaliana
MKRGFSDSPSSSAPPPSSRFKSNPEGDSQFLEDETTKNFARKVADHYSRRTNQTLEEREASPIIHLKKLNNWIKSVLIQLYARPDDAVLDLACGKGGDLIKWDKARIGYYVGIDIAEGSIEDCRTRYNGDADHHQRRKKFSFPSRLLCGDCFEVELDKILEEDAPFDICSCQFAMHYSWTTEARARRALANVSALLRPGGVFIGTMPDANVIIKKLREAEGLEIGNSVYWIRFGEEYSQKKFKSSSPFGIEYVFHLEDAVDCPEWIVPFNVFKSLAEEYDLELVFVKNSHEFVHEYMKKPEFVELMRRLGALGDGSNDQSTLSADEWEAAYLYLSFVLRKRGESDGARRSGRRKNGKMNLSKDDVLYIDS

SEQ ID NO: 6598 - protein, 196 aa, Arabidopsis thaliana
MHYSWTTEARARRALANVSALLRPGGVFIGTMPDANVIIKKLREAEGLEIGNSVYWIRFGEEYSQKKFKSSSPFGIEYVFHLEDAVDCPEWIVPFNVFKSLAEEYDLELVFVKNSHEFVHEYMKKPEFVELMRRLGALGDGSNDQSTLSADEWEAAYLYLSFVLRKRGESDGARRSGRRKNGKMNLSKDDVLYIDS

SEQ ID NO: 6599 - DNA, 952 bp, Arabidopsis thaliana
atcaacgcgtcgagatattttccccaaatacagagaaaccctaaagtctctgtttttgagaatttttctaccgatagatccaagcgaattgatctagaggaattgatccaacatgggtaacacagataagctgatgaatcagatattcgatttgaaatttacgtcaaagtctctgcaaaggcaatcaaggaagtgtgagaaggaagagaaagcagagaaattgaaggtgaagaaggctatcgagaagggtaatatggatggtgctcggatctacgctgagaacgccattcgtaagcgtagcgagcagatgaactatctccgtctcgcttctcgccttgacgctgttgttgctcgtcttgatactcaggctaagatgaccaccatcaccaaatccatgaccaatatcgtcaaatcccttgagtcttctcttgccacagggaatctacagaagatgtcagagacaatggattcattcgagaagcagtttgtgaacatggaggtccaagctgagttcatggagaatgctatggctggttcaacttcattgtccactccagaaggcgaagtcaacagccttatgcagcaggtggcagatgactatggtttggaagtctctgtggggcttcctcagcctgctggtcatgccattcctactaagactgaggagaaagtcgatgaggatgatttgtcgaggaggcttgcggagcttaaagccagaggataaatgcgctaaccaacattcatgcttggattacctgccactttgcatgcgatccttatcgaattgttgcttctattatccgcaaacacgggcgtatttgtgtatattgctcactttgaaatatgctttgtttataactttatataaaaaaccttcgtgtgtttttagtttttaccatttgaatgatatgctttccttttgagttgttcattaaagagtgttttgctcagc

SEQ ID NO: 6600 - protein, 203 aa, Arabidopsis thaliana
MGNTDKLMNQIFDLKFTSKSLQRQSRKCEKEEKAEKLKVKKAIEKGNMDGARIYAENAIRKRSEQMNYLRLASRLDAVVARLDTQAKMTTITKSMTNIVKSLESSLATGNLQKMSETMDSFEKQFVNMEVQAEFMENAMAGSTSLSTPEGEVNSLMQQVADDYGLEVSVGLPQPAGHAIPTKTEEKVDEDDLSRRLAELKARG

SEQ ID NO: 6601 - protein, 196 aa, Arabidopsis thaliana
MNQIFDLKFTSKSLQRQSRKCEKEEKAEKLKVKKAIEKGNMDGARIYAENAIRKRSEQMNYLRLASRLDAVVARLDTQAKMTTITKSMTNIVKSLESSLATGNLQKMSETMDSFEKQFVNMEVQAEFMENAMAGSTSLSTPEGEVNSLMQQVADDYGLEVSVGLPQPAGHAIPTKTEEKVDEDDLSRRLAELKARG

SEQ ID NO: 6602 - protein, 156 aa, Arabidopsis thaliana
MDGARIYAENAIRKRSEQMNYLRLASRLDAVVARLDTQAKMTTITKSMTNIVKSLESSLATGNLQKMSETMDSFEKQFVNMEVQAEFMENAMAGSTSLSTPEGEVNSLMQQVADDYGLEVSVGLPQPAGHAIPTKTEEKVDEDDLSRRLAELKARG

SEQ ID NO: 6603 - DNA, 751 bp, Arabidopsis thaliana
attccaccacaaaaaaaaatggctcaattcttagagaaggcaacttcggctctcagcgaagccaaagaatccgttacaagcaccgctgaatccgtcacggcttctctcactgatgctgagaaaaccgttaaccaaaccgccaggagcactctaactgacgccgagacaaccgttgcagcgtctgttgaaacggtcaagaccgaggctgcagccgcaccagacaaagcgtctggtgtgtctacacaggctaaggatgcagtggacaaagctttttctagaggtatagaaggagccaaatctttgcttcaaactttcgaagcgaagagcagcgatatttcctcaaagcttgttggaggtgttaccaatcttgtgagtggagcatcgagcagcaccgtggcaaaccgagaccttccagtatctacagacaaccagcctctgctagcgtctggtgaaaagacgccgtggtggaagaattgttgtggagttcttgatcttttcaagaaagatacttaagttaaaaagataaaaaaaaatgacaaattaacgaatttcacgagatgaagaaacagagcactagaagaagaaagaaccctcatccttttgattatttatttccttcctttttgattttgatttgagattgtgtctatctgtttttgtttgttttttgttttgttgatatcttgattgtttcccaaaaacttgtgtaagaacaaaaaaaaagaccaaataaaaagggttatttctttgt

SEQ ID NO: 6604 - protein, 170 aa, Arabidopsis thaliana
IPPQKKMAQFLEKATSALSEAKESVTSTAESVTASLTDAEKTVNQTARSTLTDAETTVAASVETVKTEAAAAPDKASGVSTQAKDAVDKAFSRGIEGAKSLLQTFEAKSSDISSKLVGGVTNLVSGASSSTVANRDLPVSTDNQPLLASGEKTPWWKNCCGVLDLFKKDT

SEQ ID NO: 6605 - protein, 164 aa, Arabidopsis thaliana
MAQFLEKATSALSEAKESVTSTAESVTASLTDAEKTVNQTARSTLTDAETTVAASVETVKTEAAAAPDKASGVSTQAKDAVDKAFSRGIEGAKSLLQTFEAKSSDISSKLVGGVTNLVSGASSSTVANRDLPVSTDNQPLLASGEKTPWWKNCCGVLDLFKKDT

SEQ ID NO: 6606 - DNA, 1703 bp, Arabidopsis thaliana
  misc_feature (177)..(177): n is a, c, g, or t
aagattcgttttctcttttatcactcccctcggcgatctctcttcttgctccggcagggtttttctgctgctccttgcttgtccggactctagcttgcctgtaactgttaagagattacaatgggggactccgataatgctataccattttccagaaagagaactgctctgaaagantgtctcgtgacaatcctggtcttgatgatgatgatgaagacacttctgcactcgagagtggtaccttcaacactgctagtaaggaggtgttggcaagcagaagaattatcagagttaggcgcacagatcgatctgctactgcaccaccagcttctaatccatttactggaattcgtttggttccttttactgctcctgctccttctactgctgctgcagaaacgactaaacctctgtctgcgggaaaacaagagacactggctgatggaaggtctgatgctaccaaggaaactgatggtgacagtaaagaaaagagtgacgcaattgatgctgtaggaaaacaagagacacagggtgatgaaatatctgctaagaccaaggatattattgatggtggagagaaagagatgagtgaggcagttaatttccgtagagggtggtggagctgtaaacaagaatgaagacgagattaagacaacgatggttactgaagttgctgctggggaagagactgtaaaagatgacaacaacaatagcaacactgttgagggaagtgactgtgttgtcaaggatacaggtggtaatcagactgagaaagaaggaaaagagtgcgatggaaatgaagacacagagaaaaatggagatagtggagccttgagctccttccaccagcactcaagtagcaaaaacgcattcacaggacttgctagcacagggttctctgcttcttcgttctcgttcggtttggttccacaagaaggttcgactgggtctggttctgaacagtcatccttcagttttggccaagcaaacaatggaaactcttccctgtttggtgcatccgttgctacttccattaccacgaagagcacggaaactactactgccttcccatcaaagcaagatgtttcagtggaaacaggagaagagaacgaaaaagcagccttcacagctgactcagtaatgttcgaatatcttgagggaggatggaaagagcgtgggaaaggagaactcaaggtgaatatatcaacgactgaaaacagaaaagccaggttagtagtgagatcaaaaggaaactacaggttgatcttaaacgcaagtctttacccggaaatgaaactggctaaaatggacaagaaaggaatcacatttgcttgtgtgaatagtgtaagtgacgccaaggatggtctctctacattggcactgaagttcaaggacccaacagtggtggaagagttccgagcagttatcgaagaacataaagacagtaaaccttccgttgcagaagcagcagctcctttgaagacacctgagaactcaccgagtgctgaagatgcttgaaggttaaaaactttgaaacaactcgtcgtctagtatccttgtgttctatttgtctatgttgtttgaagttcaaatttggcagagagaatagagagactatatagatcacttgaactccttatgggtctcttatgaatgaatattcgaagttactgtttttaacataatctatcatataactcagc

SEQ ID NO: 6607 - protein, 286 aa, Arabidopsis thaliana
MVTEVAAGEETVKDDNNNSNTVEGSDCVVKDTGGNQTEKEGKECDGNEDTEKNGDSGALSSFHQHSSSKNAFTGLASTGFSASSFSFGLVPQEGSTGSGSEQSSFSFGQANNGNSSLFGASVATSITTKSTETTTAFPSKQDVSVETGEENEKAAFTADSVMFEYLEGGWKERGKGELKVNISTTENRKARLVVRSKGNYRLILNASLYPEMKLAKMDKKGITFACVNSVSDAKDGLSTLALKFKDPTVVEEFRAVIEEHKDSKPSVAEAAAPLKTPENSPSAEDA

SEQ ID NO: 6608 - DNA, 908 bp, Arabidopsis thaliana
ttcagcggttctcgagtcatcgctgtctggaacagcgatacccccaaagcccatccttcaacattgcttcctaaccagaaatccaccatcatcttcccacgaatacaacttaaagctttaccagaaaatggagggtcagagaacacaacgccggggttacttgaaagacaaggctacagtctccaaccttgttgaagaagaaatggagaatggcatggatggagaagaggaggatggaggagacgaagacaaaaggaagaaggtgatggaaagagttagaggtcctagcactgaccgtgttccatcgcgactgtgccaggtcgataggtgcactgttaatttgactgaggccaagcagtattaccgcagacacagagtatgtgaagtacatgcaaaggcatctgctgcgactgttgcaggggtcaggcaacgcttttgtcaacaatgcagcaggtttcatgagctaccagagtttgatgaagctaaaagaagctgcaggaggcgcttagctggacacaatgagaggaggaggaagatctctggtgacagttttggagaagggtcaggccggagagggtttagcggtcaactgatccagactcaagaaagaaacagggtagacaggaaacttcctatgaccaactcatcattcaagcgaccacagatcagataaaccctcccgctctctctcttctgtcatctacatatgctctatctacactcttattagacaaataatggcatctaacaatgtcaagaaaagttggtcatggtattaaatcctacacggatatataactataaacctctagtcccctctatgctgtcctgtaatgaatatctatccggaaatgtattcgcatagtcttgcgtctaataatgtttattgattttgtaggtttgattat

SEQ ID NO: 6609 - protein, 223 aa, Arabidopsis thaliana
SAVLESSLSGTAIPPKPILQHCFLTRNPPSSSHEYNLKLYQKMEGQRTQRRGYLKDKATVSNLVEEEMENGMDGEEEDGGDEDKRKKVMERVRGPSTDRVPSRLCQVDRCTVNLTEAKQYYRRHRVCEVHAKASAATVAGVRQRFCQQCSRFHELPEFDEAKRSCRRRLAGHNERRRKISGDSFGEGSGRRGFSGQLIQTQERNRVDRKLPMTNSSFKRPQIR

SEQ ID NO: 6610 - protein, 181 aa, Arabidopsis thaliana
MEGQRTQRRGYLKDKATVSNLVEEEMENGMDGEEEDGGDEDKRKKVMERVRGPSTDRVPSRLCQVDRCTVNLTEAKQYYRRHRVCEVHAKASAATVAGVRQRFCQQCSRFHELPEFDEAKRSCRRRLAGHNERRRKISGDSFGEGSGRRGFSGQLIQTQERNRVDRKLPMTNSSFKRPQIR

SEQ ID NO: 6611 - protein, 156 aa, Arabidopsis thaliana
MENGMDGEEEDGGDEDKRKKVMERVRGPSTDRVPSRLCQVDRCTVNLTEAKQYYRRHRVCEVHAKASAATVAGVRQRFCQQCSRFHELPEFDEAKRSCRRRLAGHNERRRKISGDSFGEGSGRRGFSGQLIQTQERNRVDRKLPMTNSSFKRPQIR

SEQ ID NO: 6612 - DNA, 1197 bp, Arabidopsis thaliana
gacagcgaacaagatcaaaaagctagctctcttcttttctcatcaaacttatttctctctcgatcgcaatatatacgattccataaattctcccaaaaacaaattaagagatagaggagagatcatgaggtcaccggtgcaactccaacacggctcagacgccactaacggtttccacacgctgcagcctcacgatcagaccgatggtccgatcaagagagtgtgtctcacgcgcggtatgcatgtccctgaacacgttgcgatgcaccacacacacgacgttggtccggaccagtgttgctcctcggtggtgcagatgatccacgcgccgcctgagtccgtgtgggctcttgtgcggcgtttcgataatccgaaggtttacaagaacttcatcagacagtgccgtatcgtccaaggcgatggactacacgtcggcgatctccgggaggtcatggtggtctctggactcccggcggtctcgagcaccgagaggctcgagatcttggacgaggagcgtcacgtgataagctttagtgtcgttggtggggaccacaggctcaagaactaccgatcggtgacgacactacacgcgtcggacgacgaaggtaccgtggtggtggagtcttacatcgttgatgtgccgccgggaaacacggaggaggaaactctaagcttcgttgatactatcgtccggtgcaaccttcagtctctggctcgaagtaccaaccggcaataatctcatctttcttatataaattgcaattatgtatctaattttttttgttgttctatttcttttagatgttcgatcttctttacaaggaagaaaatttcgagtaccttttctttctttttaaatagatatatcggcttagaaagaattgtaatttaatggggatttctttgggagatttatgttggaaatttcgaagtactgttgggggattcacaaaactttggatttggagggtgttagtactggtacataaaacattttaaggtgaatctgttaaatgaattaatccatttgttgttttgtacatggtatcattctttgtgacattgtttaatttcttgtactcttttaaatgttactcttaaccgtttttttcttttgtggtttgtaaatgaatatttgatgcatcggtattgttaatgatagacttattaatttatttcttcatagtatgtaacatt

SEQ ID NO: 6613 - protein, 244 aa, Arabidopsis thaliana
TANKIKKLALFFSHQTYFSLDRNIYDSINSPKNKLRDRGEIMRSPVQLQHGSDATNGFHTLQPHDQTDGPIKRVCLTRGMHVPEHVAMHHTHDVGPDQCCSSVVQMIHAPPESVWALVRRFDNPKVYKNFIRQCRIVQGDGLHVGDLREVMVVSGLPAVSSTERLEILDEERHVISFSVVGGDHRLKNYRSVTTLHASDDEGTVVVESYIVDVPPGNTEEETLSFVDTIVRCNLQSLARSTNRQ

SEQ ID NO: 6614 - protein, 203 aa, Arabidopsis thaliana
MRSPVQLQHGSDATNGFHTLQPHDQTDGPIKRVCLTRGMHVPEHVAMHHTHDVGPDQCCSSVVQMIHAPPESVWALVRRFDNPKVYKNFIRQCRIVQGDGLHVGDLREVMVVSGLPAVSSTERLEILDEERHVISFSVVGGDHRLKNYRSVTTLHASDDEGTVVVESYIVDVPPGNTEEETLSFVDTIVRCNLQSLARSTNRQ

SEQ ID NO: 6615 - protein, 165 aa, Arabidopsis thaliana
MHVPEHVAMHHTHDVGPDQCCSSVVQMIHAPPESVWALVRRFDNPKVYKNFIRQCRIVQGDGLHVGDLREVMVVSGLPAVSSTERLEILDEERHVISFSVVGGDHRLKNYRSVTTLHASDDEGTVVVESYIVDVPPGNTEEETLSFVDTIVRCNLQSLARSTNRQ

SEQ ID NO: 6616 - DNA, 1669 bp, Arabidopsis thaliana
aaaaaaccaacataaaacacaacccaaaaatggagttactaacgacggtcgcgagctttttcactccgacgactcttttcctccttcttaatcttatgatcggtacaatcgtcgtaacctctcgactcgggtcaggttcaagaaaacattaccagcatcacgatggattcgggtcaggtcatgctccggctccgttagctagagctccatcgattatcgaccgagtcaagtccatcaattttcatctctacaaatttcctcatccagaaactgagcttttctcgatgacagctcaccacgacataatcgggtcggatcttcatgtttacccggatccaaatccggctccgttacaacgtgctccttctcttttggatcgggtcaaatctatcaacatgtcttatttcaagttcccacacgacgtaaccgggtcggatcctcactcccactcccactcccactcccacctagatttacacccggatccggctccggcaccgttacaacgagctccttctcttctggatcgggtcaaatccatcaacatgtcatacttcaaattccagcagtataacccggaggagaatgattatgctcatcacacagaaccgacccgattcgaaagtattccgacccggatgggtcgggttgacccgattgatatctcaaaattcagaatcccggaagaagatcaaccaaccggaaccggagtgaacagtcaaattaacccgcccggtttaactcgagctccgtctatcttagaacgggtcaaatccattaagctatcctccttctacagatccgacccggatttggatcaaaaacaaaatccggatccggttcttcacgaggagcacaagcatgtacgaagcagatcggaatcgaaaaaaccggtgaagaagaagaagaaagctttaacgaagatgacaaaatcggctagcgagaaatcaggttttggtttcgcaggaagccatgcggaagcgccggagacggtggaatccctcgaacggagaagaccagatacaacgagagtcgaaagatcgacgtctttcggcgacggcgaagatggcgtcgacgcgaaagcttcagatttcatcaacaaattcaaacagcagctgaaattacagagactcgattcgattctgaggtacaaggagatgcttaaggcccattgaagccgtctccgtcgccggtgattattgtattcctcgccgatgtctggctcgcggttttgtttgccgccgtttttcacgtaggagacaggagtggacattatctgaattaccgataatatccctgtatgtttgaggatatttaagtaatttattaattagttaatgtgaatttgttattgtttagttcataaagagacaagaaagaaaaaaacgtagttgcttagcgaagtatgtgtggcgttaaaattggatctaggacgttgttttgcgtcttaattctaatgatcattcattcacttggcaattttttcgagatgtttggtacacgtttcctattttctgccctattttcaggttggtttattctatttatttaaaattttctaggcaaaattgttcgtgccatgatacagattatattaagagttctatttgaatatttttgtacatatacagatatacttcctattttgtatcatatatacttttagact

SEQ ID NO: 6617 - protein, 390 aa, Arabidopsis thaliana
KTNIKHNPKMELLTTVASFFTPTTLFLLLNLMIGTIVVTSRLGSGSRKHYQHHDGFGSGHAPAPLARAPSIIDRVKSINFHLYKFPHPETELFSMTAHHDIIGSDLHVYPDPNPAPLQRAPSLLDRVKSINMSYFKFPHDVTGSDPHSHSHSHSHLDLHPDPAPAPLQRAPSLLDRVKSINMSYFKFQQYNPEENDYAHHTEPTRFESIPTRMGRVDPIDISKFRIPEEDQPTGTGVNSQINPPGLTRAPSILERVKSIKLSSFYRSDPDLDQKQNPDPVLHEEHKHVRSRSESKKPVKKKKKALTKMTKSASEKSGFGFAGSHAEAPETVESLERRRPDTTRVERSTSFGDGEDGVDAKASDFINKFKQQLKLQRLDSILRYKEMLKAH

SEQ ID NO: 6618 - protein, 381 aa, Arabidopsis thaliana
MELLTTVASFFTPTTLFLLLNLMIGTIVVTSRLGSGSRKHYQHHDGFGSGHAPAPLARAPSIIDRVKSINFHLYKFPHPETELFSMTAHHDIIGSDLHVYPDPNPAPLQRAPSLLDRVKSINMSYFKFPHDVTGSDPHSHSHSHSHLDLHPDPAPAPLQRAPSLLDRVKSINMSYFKFQQYNPEENDYAHHTEPTRFESIPTRMGRVDPIDISKFRIPEEDQPTGTGVNSQINPPGLTRAPSILERVKSIKLSSFYRSDPDLDQKQNPDPVLHEEHKHVRSRSESKKPVKKKKKALTKMTKSASEKSGFGFAGSHAEAPETVESLERRRPDTTRVERSTSFGDGEDGVDAKASDFINKFKQQLKLQRLDSILRYKEMLKAH

SEQ ID NO: 6619 - protein, 359 aa, Arabidopsis thaliana
MIGTIVVTSRLGSGSRKHYQHHDGFGSGHAPAPLARAPSIIDRVKSINFHLYKFPHPETELFSMTAHHDIIGSDLHVYPDPNPAPLQRAPSLLDRVKSINMSYFKFPHDVTGSDPHSHSHSHSHLDLHPDPAPAPLQRAPSLLDRVKSINMSYFKFQQYNPEENDYAHHTEPTRFESIPTRMGRVDPIDISKFRIPEEDQPTGTGVNSQINPPGLTRAPSILERVKSIKLSSFYRSDPDLDQKQNPDPVLHEEHKHVRSRSESKKPVKKKKKALTKMTKSASEKSGFGFAGSHAEAPETVESLERRRPDTTRVERSTSFGDGEDGVDAKASDFINKFKQQLKLQRLDSILRYKEMLKAH

SEQ ID NO: 6620 - DNA, 1192 bp, Arabidopsis thaliana
atttcacatctctctctctctataagaaccctagaagaaggtttctcttgtcctccatacacttagcacaactgataaatcttttgaggtaaaatcagctttagatcaaggtttttctagtcatctctactcataaagatcaaagcttttgctattctcattttctaccaagagacaatatcatgatgatgggtaaagaggatttgggtttaagtcttagcttgggatttgcacaaaaccatcctctccagctaaatcttaaacccacttcttcaccaatgtccaatctccagatgtttccatggaaccaaacccttgtttcttcctcagatcaacaaaagcaacagtttcttaggaaaatcgacgtgaacagcttgccaacaacggtggatttggaagaggagacaggagtttcgtctccaaacagtacgatctcgagcacagtgagtggaaagaggaggagtactgaaagagaaggtacctccggtggtggttgcggagatgaccttgacatcactctagatagatcttcctcacgtggaacctccgatgaagaggaagattacggaggtgagacttgtaggaagaagcttagactatccaaagatcaatccgcagttctcgaagacactttcaaagagcacaatactctcaatcccaaacagaagctggctttggctaagaagctaggtttaacagcaagacaagtggaagtgtggttccaaaacagaagagcaaggacaaagttaaagcagaccgaagtggattgcgagtatttgaaaagatgtgttgagaaattaacggaagagaatcggcggctcgagaaagaggcagcggaactaagagcattaaagctttcaccgcggttgtatggtcagatgagtccaccgaccacacttttgatgtgtccatcgtgtgaacgtgtggccggaccatcctcatctaaccacaaccagcgatctgtctcattgagtccatggctccaaatggcccatgggtcaacctttgatgtgatgcgtcctaggtcttaactttaatgctgcttctatgggttgtgtgtgggtcattgtactttttagattattgactctcagctaatgtatccttaaaagcctttttctacttttaaatttactttaatctaattaaattagttgtccatgtcttcttgataacaaaaaaatttataatt

SEQ ID NO: 6621 - protein, 282 aa, Arabidopsis thaliana
MMMGKEDLGLSLSLGFAQNHPLQLNLKPTSSPMSNLQMFPWNQTLVSSSDQQKQQFLRKIDVNSLPTTVDLEEETGVSSPNSTISSTVSGKRRSTEREGTSGGGCGDDLDITLDRSSSRGTSDEEEDYGGETCRKKLRLSKDQSAVLEDTFKEHNTLNPKQKLALAKKLGLTARQVEVWFQNRRARTKLKQTEVDCEYLKRCVEKLTEENRRLEKEAAELRALKLSPRLYGQMSPPTTLLMCPSCERVAGPSSSNHNQRSVSLSPWLQMAHGSTFDVMRPRS

SEQ ID NO: 6622 - protein, 281 aa, Arabidopsis thaliana
MMGKEDLGLSLSLGFAQNHPLQLNLKPTSSPMSNLQMFPWNQTLVSSSDQQKQQFLRKIDVNSLPTTVDLEEETGVSSPNSTISSTVSGKRRSTEREGTSGGGCGDDLDITLDRSSSRGTSDEEEDYGGETCRKKLRLSKDQSAVLEDTFKEHNTLNPKQKLALAKKLGLTARQVEVWFQNRRARTKLKQTEVDCEYLKRCVEKLTEENRRLEKEAAELRALKLSPRLYGQMSPPTTLLMCPSCERVAGPSSSNHNQRSVSLSPWLQMAHGSTFDVMRPRS

SEQ ID NO: 6623 - protein, 280 aa, Arabidopsis thaliana
MGKEDLGLSLSLGFAQNHPLQLNLKPTSSPMSNLQMFPWNQTLVSSSDQQKQQFLRKIDVNSLPTTVDLEEETGVSSPNSTISSTVSGKRRSTEREGTSGGGCGDDLDITLDRSSSRGTSDEEEDYGGETCRKKLRLSKDQSAVLEDTFKEHNTLNPKQKLALAKKLGLTARQVEVWFQNRRARTKLKQTEVDCEYLKRCVEKLTEENRRLEKEAAELRALKLSPRLYGQMSPPTTLLMCPSCERVAGPSSSNHNQRSVSLSPWLQMAHGSTFDVMRPRS

SEQ ID NO: 6624 - DNA, 2017 bp, Arabidopsis thaliana
atatatccaaacaaatgaatgtgttaaaccttcactcttctctccacacaaaattcaaaaacctcacatttcacttctctcttctcgcttcttctagatctcaccggtttatctagctccggtttgattcatctccggttatggggagagaatgaggagttaccgttttagtgattatctacacatgtctgtttcattctctaacgatatggatttgttttgtggagaagactccggtgtgttttccggtgagtcaacggttgatttctcgtcttccgaggttgattcatggcctggtgattctatcgcttgttttatcgaagacgagcgtcacttcgttcctggacatgattatctctctagatttcaaactcgatctctcgatgcttccgctagagaagattccgtcgcatggattctcaaggtacaagcgtattataactttcagcctttaacggcgtacctcgccgttaactatatggatcggtttctttacgctcgtcgattaccggaaacgagtggttggccaatgcaacttttagcagtggcatgcttgtctttagctgcaaagatggaggaaattctcgttccttctctttttgattttcaggttgcaggagtgaagtatttatttgaagcaaaaactataaaaagaatggaacttcttgttctaagtgtgttagattggagactaagatcggttacaccgtttgatttcattagcttctttgcttacaagatcgatccttcgggtacctttctcgggttctttatctcccatgctacagagattatactctccaacataaaagaagcgagctttcttgagtactggccatcgagtatagctgcagccgcgattctctgtgtagcgaacgagttaccttctctatcctctgttgtcaatccccacgagagccctgagacttggtgtgacggattgagcaaagagaagatagtgagatgctatagactgatgaaagcgatggccatcgagaataaccggttaaatacaccaaaagtgatagcaaagcttcgagtgagtgtaagggcatcatcgacgttaacaaggccaagtgatgaatcctctttctcatcctcttctccttgtaaaaggagaaaattaagtggctattcatgggtaggtgatgaaacatctacctctaattaaaatttggggagtgaaagtagaggaccaaggaaacaaaacctagaagaaaaaaaaccctcttctgtttaagtagagtatattttttaacaagtacatagtaataagggagtgatgaagaaaagtaaaagtgtttattggctgagttaaagtaattaagagttttccaaccaaggggaaggaataagagttttggttacaatttcttttatggaaagggtaaaaattgggttttggggttggttggttggttgggagagacgaagctcatcattaatggctttgcagattcccaagaaagcaaaatgagtaagtgagtgtaacacacacgtgttagagaaaagatatgatcatgtgagtgtgtgtgtgtgagagagagagagaagagtatttgcattagagtcctcatcacacaggtactgatggataagacaggggagcgtttgcaaaagatttgtgagtggagatttttctgagctctttgtcttaatggatcgcagcagttcatgggacccttcctcagcttcatcatcaaacaaaaaaaaaatcaagttgcgaagtatatataatttgtttttttgtttggatttttaagatttttgattccttgtgtgtgacttcacgtgacggaggcgtgtgtctcacgtgtttgttttctcttcaaatcttttattttggcgggaaattttgtgtttttgatttctacgtattcgtggactccaaatgagttttgtcacggtgcgttttagtagcgtttgcatgcgtgtaaggtgtcacgtatgtgtatatatatgatttttttttggtttcttgaaaggttgaattttataaataaaacgtttctattat

SEQ ID NO: 6625 - protein, 339 aa, Arabidopsis thaliana
MRSYRFSDYLHMSVSFSNDMDLFCGEDSGVFSGESTVDFSSSEVDSWPGDSIACFIEDERHFVPGHDYLSRFQTRSLDASAREDSVAWILKVQAYYNFQPLTAYLAVNYMDRFLYARRLPETSGWPMQLLAVACLSLAAKMEEILVPSLFDFQVAGVKYLFEAKTIKRMELLVLSVLDWRLRSVTPFDFISFFAYKIDPSGTFLGFFISHATEIILSNIKEASFLEYWPSSIAAAAILCVANELPSLSSVVNPHESPETWCDGLSKEKIVRCYRLMKAMAIENNRLNTPKVIAKLRVSVRASSTLTRPSDESSFSSSSPCKRRKLSGYSWVGDETSTSN

SEQ ID NO: 6626 - protein, 328 aa, Arabidopsis thaliana
MSVSFSNDMDLFCGEDSGVFSGESTVDFSSSEVDSWPGDSIACFIEDERHFVPGHDYLSRFQTRSLDASAREDSVAWILKVQAYYNFQPLTAYLAVNYMDRFLYARRLPETSGWPMQLLAVACLSLAAKMEEILVPSLFDFQVAGVKYLFEAKTIKRMELLVLSVLDWRLRSVTPFDFISFFAYKIDPSGTFLGFFISHATEIILSNIKEASFLEYWPSSIAAAAILCVANELPSLSSVVNPHESPETWCDGLSKEKIVRCYRLMKAMAIENNRLNTPKVIAKLRVSVRASSTLTRPSDESSFSSSSPCKRRKLSGYSWVGDETSTSN

SEQ ID NO: 6627 - protein, 320 aa, Arabidopsis thaliana
MDLFCGEDSGVFSGESTVDFSSSEVDSWPGDSIACFIEDERHFVPGHDYLSRFQTRSLDASAREDSVAWILKVQAYYNFQPLTAYLAVNYMDRFLYARRLPETSGWPMQLLAVACLSLAAKMEEILVPSLFDFQVAGVKYLFEAKTIKRMELLVLSVLDWRLRSVTPFDFISFFAYKIDPSGTFLGFFISHATEIILSNIKEASFLEYWPSSIAAAAILCVANELPSLSSVVNPHESPETWCDGLSKEKIVRCYRLMKAMAIENNRLNTPKVIAKLRVSVRASSTLTRPSDESSFSSSSPCKRRKLSGYSWVGDETSTSN

SEQ ID NO: 6628 - DNA, 1172 bp, Arabidopsis thaliana
gtcttcaacgttcggctaatccttggtccgtgctaagatcttagatcgatttctaaagtcttcgtcttcttcttcttctgataactagatttttcaatcttctgaagctttaattttttcatagccatggctaatcgttatgatccaaatcctttcgctgaggaagaagaagtcaatcctttcgctaatgctagaggagttccacctgcgtcgaattcgagactttcgcctttgcctccagagcctgttggtttcgattatggtcgaaccgtagacattcctcttgacagagctggtacacaggatttgaagaagaaagagaaggaactccaagccaaagaagctgagctaaaacgacgagagcaggacctcaaacggaaagaagatgctgctgcacgagctggaatcgttatcgaagtgaaaaactggccgcctttcttcccgcttatccaccatgatattgcaaatgaaattccggttcatctccaaagactacagtatgttacctttgcaacgtatttggggttggttctttgtcttttctggaatatcatcgccgttactacagcttggatcaaaggagaaggagtgacgatatggcttcttgccttaatttacttcatagcgggtgttccaggaggctatgtgttatggtatcgaccactctaccgtgccttcagaactgatagtgcattgagctttggatggtttttcttgttctatatgctccacattgctttctgcgtctttgctgcagttgctccacctgtcgtcttcaaaggaaaatctcttgctgggatcttacctgcaatagatgtcttaagcggtcaagcaattgttgggatattctacttcattgggtttgcatttttctgcctcgaatcagtggttagcatctgggttatacagcaagtgtatatgtacttccgaggcagcgggaaacaagatcaaatgagacgggaagcagcgagaggagccttgagagccgctgtttgagagttctccttgtaacattctggtttgtgtatgcactgtttcttttttcagattttcttgaagtctctctctctctctctctctctgctctataaacaaaaaaaaaaaaatttaatttttcctttgtacctttatgtcatgtaaatttgtttgttcaaaaatcagagttcagattc

SEQ ID NO: 6629 - protein, 289 aa, Arabidopsis thaliana
MANRYDPNPFAEEEEVNPFANARGVPPASNSRLSPLPPEPVGFDYGRTVDIPLDRAGTQDLKKKEKELQAKEAELKRREQDLKRKEDAAARAGIVIEVKNWPPFFPLIHHDIANEIPVHLQRLQYVTFATYLGLVLCLFWNIIAVTTAWIKGEGVTIWLLALIYFIAGVPGGYVLWYRPLYRAFRTDSALSFGWFFLFYMLHIAFCVFAAVAPPVVFKGKSLAGILPAIDVLSGQAIVGIFYFIGFAFFCLESVVSIWVIQQVYMYFRGSGKQDQMRREAARGALRAAV

SEQ ID NO: 6630 - DNA, 1066 bp, Arabidopsis thaliana
aacgtctgatctctgatcttccgttttaaaacgacatcaaggtgttactgtccaatttcagattgggttagaacatcttgtaatatctacaaacttgagggtgttttacacgaatatttcttaattaagaggcttaacgttggcgtttttgacgaaaatggagcaaccaatgtcgccgggaacgaagtcggtggatctccgagaatgcatggaatcacttctccgttttagtctgagatctcatttaaacgaatctgttccaagtttcgatcttgacctgaccagagatttttgtcttcatctccttggggaagctacagattcaacagaaaaatctgcggtgtacaagcttctagcaacggctttgtctgaatgtctagcttccgagggtgataaaaattctaacttggaaaaatacagcaaactgattcatggcttgggatatgacttaataaatatgttgaaggaggtgaactttgagcttcatgtccaagagccttacttcacccaattgaaagatggtttgaaaactgttgaaggaagatgcgcagtgggagactacatgagaattagttcaggagattttcttttgttcaataaatgcttgctgcttgaagttcaggacgttcaccgttatacttcattctcagaaatgctgaaagtggagggtcttgccaaagttcttcctggagttgaaagtatagaagaaggtgttcaagtttaccgaaacttttattctgaagagaaggaaagaatgaacggtgttgtagctattcgtgttgcaaaaccagctaatcagccttctgcagctttggcaggagtattgtctgaactgaagtccagtgggatcaaaagcctgttggatgaatacacagctggggttacctcgtagctgcatctgaaaacctttgtgcgcagagaaactactcaatttgaagggttttgatttctctacactcggatgatgttaaatttgtgtttgtttgtgtgtacgagtagctaaatcacagaagatcacatcttttcttacttattgagcacctcacaaggcaacaaaacatttttc

SEQ ID NO: 6631 - protein, 244 aa, Arabidopsis thaliana
MEQPMSPGTKSVDLRECMESLLRFSLRSHLNESVPSFDLDLTRDFCLHLLGEATDSTEKSAVYKLLATALSECLASEGDKNSNLEKYSKLIHGLGYDLINMLKEVNFELHVQEPYFTQLKDGLKTVEGRCAVGDYMRISSGDFLLFNKCLLLEVQDVHRYTSFSEMLKVEGLAKVLPGVESIEEGVQVYRNFYSEEKERMNGVVAIRVAKPANQPSAALAGVLSELKSSGIKSLLDEYTAGVTS

SEQ ID NO: 6632 - protein, 240 aa, Arabidopsis thaliana
MSPGTKSVDLRECMESLLRFSLRSHLNESVPSFDLDLTRDFCLHLLGEATDSTEKSAVYKLLATALSECLASEGDKNSNLEKYSKLIHGLGYDLINMLKEVNFELHVQEPYFTQLKDGLKTVEGRCAVGDYMRISSGDFLLFNKCLLLEVQDVHRYTSFSEMLKVEGLAKVLPGVESIEEGVQVYRNFYSEEKERMNGVVAIRVAKPANQPSAALAGVLSELKSSGIKSLLDEYTAGVTS

SEQ ID NO: 6633 - protein, 227 aa, Arabidopsis thaliana
MESLLRFSLRSHLNESVPSFDLDLTRDFCLHLLGEATDSTEKSAVYKLLATALSECLASEGDKNSNLEKYSKLIHGLGYDLINMLKEVNFELHVQEPYFTQLKDGLKTVEGRCAVGDYMRISSGDFLLFNKCLLLEVQDVHRYTSFSEMLKVEGLAKVLPGVESIEEGVQVYRNFYSEEKERMNGVVAIRVAKPANQPSAALAGVLSELKSSGIKSLLDEYTAGVTS

SEQ ID NO: 6634 - DNA, 1571 bp, Arabidopsis thaliana
tgatcatctctctcacttccacaaaactcaaaaaaatgtctcccattccaaaaccactcttcttcttcttcttcctcaactatgtgtctctctcaacctcactctctcttcacctcccactcacatctctccctatctccaccaccacaaactctcaccgcttcaccacctccctcctctcccggaaaaacccatctccgtcgtctccaccatacaacttccgatcaagattcaaatactcaatggctctaatcatctcactccccataggaacaccaccacaagctcaacaaatggttcttgacactggaagccaactttcttggatccaatgtcatcgtaaaaagcttcctccaaaaccaaaaacatcatttgatccatctctttcttcttctttctcaactttgccttgctcacatcctctttgtaaaccgagaattcccgattttacccttcctacttcttgtgactccaacaggttatgtcactactcttacttctacgctgatggaaccttcgctgagggtaatctcgttaaagaaaaaatcactttctcaaataccgaaattacccctcctttgattcttggttgtgctactgagtcttctgatgataggggcattttgggaatgaaccgtggtcgtctctcttttgtttctcaagctaagatttcgaagttctcttattgcatccctcccaaatcaaaccggcccggttttactccaaccggttcgttttaccttggtgataacccgaattcacacggtttcaaatacgtttctttgttgacttttcctgaaagtcaacgaatgccgaatcttgatcctcttgcttacactgttcctatgattgggattagatttggtttgaagaagcttaacatttccggttcggttttcagacccgatgcaggcgggtcgggtcaaacaatggttgattcgggatccgagtttactcatttagtagacgcagcttacgataaagtaagagcagagataatgacacgtgtaggacgaagattaaagaagggttacgtctacggtggaacagctgacatgtgtttcgatggaaacgtggcgatgatcccacggttgataggagatcttgtgtttgtgttcactagaggagttgagatacttgttccgaaagagagggttttggttaacgtaggaggtgggattcattgcgttggaatcggacggtcgagtatgcttggagctgctagtaatataatcgggaacgttcatcagcaaaatctttgggttgagttcgatgtgaccaatagaagagtgggtttcgctaaagctgattgtagcagagtagtgtgaggaaaagggttctgctacggttacaaacaagggtcttatggtggactcggttaaagatcgtcgttcgatgatgttaatcggacggtacatattaaaatagcagttttgtatgaaggaacttttattaggggctctgaacaatgtcctacaaataattaaaagtgttcacgttagatttttatgttgtaccgtttgtatattatatggttcatattaacttgttacataaaaatatcttttatt

SEQ ID NO: 6635 - protein, 441 aa, Arabidopsis thaliana
IISLTSTKLKKMSPIPKPLFFFFFLNYVSLSTSLSLHLPLTSLPISTTTNSHRFTTSLLSRKNPSPSSPPYNFRSRFKYSMALIISLPIGTPPQAQQMVLDTGSQLSWIQCHRKKLPPKPKTSFDPSLSSSFSTLPCSHPLCKPRIPDFTLPTSCDSNRLCHYSYFYADGTFAEGNLVKEKITFSNTEITPPLILGCATESSDDRGILGMNRGRLSFVSQAKISKFSYCIPPKSNRPGFTPTGSFYLGDNPNSHGFKYVSLLTFPESQRMPNLDPLAYTVPMIGIRFGLKKLNISGSVFRPDAGGSGQTMVDSGSEFTHLVDAAYDKVRAEIMTRVGRRLKKGYVYGGTADMCFDGNVAMIPRLIGDLVFVFTRGVEILVPKERVLVNVGGGIHCVGIGRSSMLGAASNIIGNVHQQNLWVEFDVTNRRVGFAKADCSRVV

SEQ ID NO: 6636 - protein, 430 aa, Arabidopsis thaliana
MSPIPKPLFFFFFLNYVSLSTSLSLHLPLTSLPISTTTNSHRFTTSLLSRKNPSPSSPPYNFRSRFKYSMALIISLPIGTPPQAQQMVLDTGSQLSWIQCHRKKLPPKPKTSFDPSLSSSFSTLPCSHPLCKPRIPDFTLPTSCDSNRLCHYSYFYADGTFAEGNLVKEKITFSNTEITPPLILGCATESSDDRGILGMNRGRLSFVSQAKISKFSYCIPPKSNRPGFTPTGSFYLGDNPNSHGFKYVSLLTFPESQRMPNLDPLAYTVPMIGIRFGLKKLNISGSVFRPDAGGSGQTMVDSGSEFTHLVDAAYDKVRAEIMTRVGRRLKKGYVYGGTADMCFDGNVAMIPRLIGDLVFVFTRGVEILVPKERVLVNVGGGIHCVGIGRSSMLGAASNIIGNVHQQNLWVEFDVTNRRVGFAKADCSRVV

SEQ ID NO: 6637 - protein, 361 aa, Arabidopsis thaliana
MALIISLPIGTPPQAQQMVLDTGSQLSWIQCHRKKLPPKPKTSFDPSLSSSFSTLPCSHPLCKPRIPDFTLPTSCDSNRLCHYSYFYADGTFAEGNLVKEKITFSNTEITPPLILGCATESSDDRGILGMNRGRLSFVSQAKISKFSYCIPPKSNRPGFTPTGSFYLGDNPNSHGFKYVSLLTFPESQRMPNLDPLAYTVPMIGIRFGLKKLNISGSVFRPDAGGSGQTMVDSGSEFTHLVDAAYDKVRAEIMTRVGRRLKKGYVYGGTADMCFDGNVAMIPRLIGDLVFVFTRGVEILVPKERVLVNVGGGIHCVGIGRSSMLGAASNIIGNVHQQNLWVEFDVTNRRVGFAKADCSRVV

SEQ ID NO: 6638 - DNA, 1167 bp, Arabidopsis thaliana
atacttgtaaaagctagagtcaacgccgttcagtctcagaccagacgaaacaacgatgcttaactctatcactttaacccgggaaccaccactcccgttcaactctgttgggttttcaggtaatcgctcttcgtcttttggtcgaagaactataacggaaggtagttcgagcaaggctctttcgtttgggtacaaaaatgttggttcactgaagtgtggtcggagcaattggccggggcgttctgggactgcgtttgggcatctagtccgggtctctgcggtcccaggtgggaattcaggtggctctggcgggttaggtggttcaggcggtggtggtggtggttccggcggcggtggtggtgatggaagcgacggaaaaggaaagaagtggtcacttctctcatggtaccaggctcttctctcaaactctcctgttttgaccaaagctgtgaccgcagcacttttgaacctcgttggagatttgatctgtcagcttactatcaacaagacctcatcgctggacaagaagaggacactcacctttaccttcttgggcttagggctagtcggtccaacattgcatttctggtatttgtatttgagcaaagtggtgacagcttctggattatcaggcgcagttatacgacttctactggatcagtttgtttttgctcctatttttgttggagttttcttatcagcagttgtgacacttgaaggaaaaccatcaaatgtcataccgaagctacaacaggagtggactggtgcaatgatagcaaattggcagctatggataccatttcagtttcttaacttcagatttgttccacagaactaccaggtacttgcttcaaacgtagtggctttggcttggaatgtgattttatcattcaaagctcacaaagaagttgttgcaaagtagacatgtttcttacctggagcctagaggtggttgctggattgttatcggcagagttttggggaaacggtcttgtctgctgatgcaaatgtttggtgtttcgaaacaattatttgggaaccctgcacttgacattttcttagagttgaaacaagcttttcttcaagcacttcaaatatttccccatcatcaatgtttcatatatttattgtttcctcattcagagaatttttttagttcgtatgaag

SEQ ID NO: 6639 - protein, 288 aa, Arabidopsis thaliana
MLNSITLTREPPLPFNSVGFSGNRSSSFGRRTITEGSSSKALSFGYKNVGSLKCGRSNWPGRSGTAFGHLVRVSAVPGGNSGGSGGLGGSGGGGGGSGGGGGDGSDGKGKKWSLLSWYQALLSNSPVLTKAVTAALLNLVGDLICQLTINKTSSLDKKRTLTFTFLGLGLVGPTLHFWYLYLSKVVTASGLSGAVIRLLLDQFVFAPIFVGVFLSAVVTLEGKPSNVIPKLQQEWTGAMIANWQLWIPFQFLNFRFVPQNYQVLASNVVALAWNVILSFKAHKEVVAK

SEQ ID NO: 6640 - DNA, 1490 bp, Arabidopsis thaliana
agaaacatcatgatatgatatttttctcaagtcttttggtgttggagaagaagagagaagaagaacttggtttctctctctaaaagtttattgcttggctccataaaaagtgcacctttttctctcttttctttctctctctctctctctctctctctctctctcacttctcctcggatgcactattgtccgtgagatcagagattcaccctctttagattttgcgcagaaacttttgcccacaattttgtattcgtcaaatctgagctgagatctctagagtgagaaaatgagcatcactaatgaagaagcagtgaagcaattgcgtgctttaatggaagatgttgatgattcactcagagagtcgtatcggaacattcatcaagggtatccgacagagaatttgttacgctttcttaaagccagggatgggaatgtccagaaagctcataaaatgttgctcgagtgtttggaatggaggactcaaaacgagattgacaagatactaactaaacccattgttcctgttgacctgtacagaggaatcagagacacacaacttgtcggtgtgtctggttactctaaagagggtctccctgtcattgccattggtgtggggcttagcacatatgataaagcctccgttcactactatgtacagtctcacattcaaatgaatgagtaccgggatcgtgttgtattgccatctgcttcaaagaaacagggacgaccaatttgcacttgtttgaaaattttggatatgtctggtttaaagctttcagctttaagtcaaattaagttaatgactgctataacaacaatagatgatttgaactatccagagaagacagagacatactatgttgtcaatgtcccgtacatattctctgcttgttggaaaaccataaagcctctgttgcaagagagaacaaagaagaagattcaagttctgaaaggttgcgggaaagatgagttgctaaagataatggactatgagtctctcccacatttctgtagaagagaagggtctggatctggtaggcatatctcaaatggaacagtagacaattgtttctctctggatcactctttccaccaagacctttatgattatgtcaagcagcaggctctggttaaaggatcaggtgcaccgatcagacatggttcagtccacgttaagttccctgagccagacaccgaaggcaacaagatcttcgataccttagaaaatgagttccagaagcttggaaatgaccagaagatctgagtgatctacaacccttataacacgaattgcccataagaaaccggaatttgtctctggttgatgagcagtatttaagataagaatcaatcacctttacttgtattactagtttcgcttgcatcagctcgatgcaggttttgtttaaaaagaagatggaacacaatttcctcggaatggatcttttgatctagtaccattatatatatagaactcatttctattt

SEQ ID NO: 6641 - protein, 325 aa, Arabidopsis thaliana
MSITNEEAVKQLRALMEDVDDSLRESYRNIHQGYPTENLLRFLKARDGNVQKAHKMLLECLEWRTQNEIDKILTKPIVPVDLYRGIRDTQLVGVSGYSKEGLPVIAIGVGLSTYDKASVHYYVQSHIQMNEYRDRVVLPSASKKQGRPICTCLKILDMSGLKLSALSQIKLMTAITTIDDLNYPEKTETYYVVNVPYIFSACWKTIKPLLQERTKKKIQVLKGCGKDELLKIMDYESLPHFCRREGSGSGRHISNGTVDNCFSLDHSFHQDLYDYVKQQALVKGSGAPIRHGSVHVKFPEPDTEGNKIFDTLENEFQKLGNDQKI

SEQ ID NO: 6642 - protein, 310 aa, Arabidopsis thaliana
MEDVDDSLRESYRNIHQGYPTENLLRFLKARDGNVQKAHKMLLECLEWRTQNEIDKILTKPIVPVDLYRGIRDTQLVGVSGYSKEGLPVIAIGVGLSTYDKASVHYYVQSHIQMNEYRDRVVLPSASKKQGRPICTCLKILDMSGLKLSALSQIKLMTAITTIDDLNYPEKTETYYVVNVPYIFSACWKTIKPLLQERTKKKIQVLKGCGKDELLKIMDYESLPHFCRREGSGSGRHISNGTVDNCFSLDHSFHQDLYDYVKQQALVKGSGAPIRHGSVHVKFPEPDTEGNKIFDTLENEFQKLGNDQKI

SEQ ID NO: 6643 - protein, 270 aa, Arabidopsis thaliana
MLLECLEWRTQNEIDKILTKPIVPVDLYRGIRDTQLVGVSGYSKEGLPVIAIGVGLSTYDKASVHYYVQSHIQMNEYRDRVVLPSASKKQGRPICTCLKILDMSGLKLSALSQIKLMTAITTIDDLNYPEKTETYYVVNVPYIFSACWKTIKPLLQERTKKKIQVLKGCGKDELLKIMDYESLPHFCRREGSGSGRHISNGTVDNCFSLDHSFHQDLYDYVKQQALVKGSGAPIRHGSVHVKFPEPDTEGNKIFDTLENEFQKLGNDQKI

SEQ ID NO: 6644 - DNA, 980 bp, Arabidopsis thaliana
aagctttgaacgttagcaaaattatgttacctaccaccagtccctggcttattatatagagagagatattcacatttacaatttcgatattgtttctctaagatcgtaaaatagtacaccaagccatttataaatttcttcactctcagattcaaaataatataaattagaaatgggaacagagatggtcatggttcacgaggttccttttcctccacagatcatcacttccaagccactctctcttctgggccaagggatcacagacattgagatccactttcttcaagtgaagttcactgcgatcggagtttacttagatccttcagatgttaaaacacatcttgataactggaaaggcaaaaccggaaaagaactcgccggcgatgatgacttcttcgacgcccttgcctccgcggagatggagaaggttataagagtggtggtgataaaggagataaaaggagctcagtacggagtgcagctagagaatacggtgagagatcgtttggctgaggaggataagtacgaggaagaagaagaaactgagctcgagaaggtcgttggctttttccagtccaagtacttcaaagctaactccgttatcacttaccatttctcagccaaagatggcatttgcgagatcgggtttgagacggaaggtaaagaagaggagaaactgaaggtggagaatgcgaatgtggtgggaatgatgcagagatggtatttgtccggaagtcgtggagtctcaccgtcgactattgtctccatcgctgattcaatctccgcagttttaacctaagaaccatggccccttacataaaaatttgtatgtgtgtgtgttttatgtagtattttttttttcctcttgtcaagttcctgcttttgtatcatcaaacttttactttggagtttgatatggccgaacaatatggtaattccttaatctcaatttaaatcagctttgctcgtttggattc

SEQ ID NO: 6645 - protein, 209 aa, Arabidopsis thaliana
MGTEMVMVHEVPFPPQIITSKPLSLLGQGITDIEIHFLQVKFTAIGVYLDPSDVKTHLDNWKGKTGKELAGDDDFFDALASAEMEKVIRVVVIKEIKGAQYGVQLENTVRDRLAEEDKYEEEEETELEKVVGFFQSKYFKANSVITYHFSAKDGICEIGFETEGKEEEKLKVENANVVGMMQRWYLSGSRGVSPSTIVSIADSISAVLT

SEQ ID NO: 6646 - protein, 205 aa, Arabidopsis thaliana
MVMVHEVPFPPQIITSKPLSLLGQGITDIEIHFLQVKFTAIGVYLDPSDVKTHLDNWKGKTGKELAGDDDFFDALASAEMEKVIRVVVIKEIKGAQYGVQLENTVRDRLAEEDKYEEEEETELEKVVGFFQSKYFKANSVITYHFSAKDGICEIGFETEGKEEEKLKVENANVVGMMQRWYLSGSRGVSPSTIVSIADSISAVLT

SEQ ID NO: 6647 - protein, 203 aa, Arabidopsis thaliana
MVHEVPFPPQIITSKPLSLLGQGITDIEIHFLQVKFTAIGVYLDPSDVKTHLDNWKGKTGKELAGDDDFFDALASAEMEKVIRVVVIKEIKGAQYGVQLENTVRDRLAEEDKYEEEEETELEKVVGFFQSKYFKANSVITYHFSAKDGICEIGFETEGKEEEKLKVENANVVGMMQRWYLSGSRGVSPSTIVSIADSISAVLT

SEQ ID NO: 6648 - DNA, 1466 bp, Arabidopsis thaliana
atttgtcagcaaagattcgtttgaagatagttcatctttattccttcccctagaaccctagaactcccaaaaccctctactactacactttcagatccaaggaaatcaattttgtcattcgagcaacatggaggatgatcgtgttttctcttcggttcactcaacagttttcaaagaatccgaatcattggaaggaaagtgtgataaaatcgaaggatacgatttcaatcaaggagtagattacccaaagcttatgcgatccatgctcaccaccggatttcaagcctcgaatctcggcgaagctattgatgtcgtcaatcaaatgctagattggagactggctgatgaaactacagtagctgaagactgtagtgaagaggagaagaatccatcgtttagagagtctgtcaagtgtaaaatctttctaggtttcacttcaaatcttgtttcatctggtgttagagatactattcgttatcttgttcagcatcatatggttgatgttatagtcacgacaactggtggtgttgaggaagatctcataaaatgccttgcacctacatttaaaggtgatttctctctacctggagcttatttaaggtcaaagggattgaaccgaattgggaatttgctggttcctaatgataactactgcaagtttgaggattggatcattcccatctttgacgagatgttgaaggaacagaaagaagagaatgtgttgtggactccttctaaactgttagcacggctgggaaaagaaatcaacaatgagagttcatacctttattgggcatacaagatgaatattccagtattctgcccagggttaacagatggctctcttggggatatgctgtattttcactcttttcgtacctctggcctcatcatcgatgtagtacaagatatcagagctatgaacggcgaagctgtccatgcaaatcctaaaaagacagggatgataatccttggagggggcttgccaaagcaccacatatgtaatgccaatatgatgcgcaatggtgcagattacgctgtatttataaacaccgggcaagaatttgatgggagcgactcgggtgcacgccctgatgaagccgtgtcttggggtaaaattaggggttctgctaaaaccgttaaggtatactgtgatgctaccatagccttcccattgttggttgcagaaacatttgccacaaagagagaccaaacctgtgagtctaagacttaagaactgactggtcgttttggccatggattcttaaagatcgttgctttttgattttacactggagtgaccatataacactccacattgatgtggctgtgacgcgaattgtcttcttgcgaattgtactttagtttctctcaacctaaaatgatttgcagattgtgttttcgtttaaaacacaagagtcttgtagtcaataatcctttgccttataaaattattcagttccagc

SEQ ID NO: 6649 - protein, 368 aa, Arabidopsis thaliana
MEDDRVFSSVHSTVFKESESLEGKCDKIEGYDFNQGVDYPKLMRSMLTTGFQASNLGEAIDVVNQMLDWRLADETTVAEDCSEEEKNPSFRESVKCKIFLGFTSNLVSSGVRDTIRYLVQHHMVDVIVTTTGGVEEDLIKCLAPTFKGDFSLPGAYLRSKGLNRIGNLLVPNDNYCKFEDWIIPIFDEMLKEQKEENVLWTPSKLLARLGKEINNESSYLYWAYKMNIPVFCPGLTDGSLGDMLYFHSFRTSGLIIDVVQDIRAMNGEAVHANPKKTGMIILGGGLPKHHICNANMMRNGADYAVFINTGQEFDGSDSGARPDEAVSWGKIRGSAKTVKVYCDATIAFPLLVAETFATKRDQTCESKT

SEQ ID NO: 6650 - protein, 326 aa, Arabidopsis thaliana
MRSMLTTGFQASNLGEAIDVVNQMLDWRLADETTVAEDCSEEEKNPSFRESVKCKIFLGFTSNLVSSGVRDTIRYLVQHHMVDVIVTTTGGVEEDLIKCLAPTFKGDFSLPGAYLRSKGLNRIGNLLVPNDNYCKFEDWIIPIFDEMLKEQKEENVLWTPSKLLARLGKEINNESSYLYWAYKMNIPVFCPGLTDGSLGDMLYFHSFRTSGLIIDVVQDIRAMNGEAVHANPKKTGMIILGGGLPKHHICNANMMRNGADYAVFINTGQEFDGSDSGARPDEAVSWGKIRGSAKTVKVYCDATIAFPLLVAETFATKRDQTCESKT

SEQ ID NO: 6651 - protein, 323 aa, Arabidopsis thaliana
MLTTGFQASNLGEAIDVVNQMLDWRLADETTVAEDCSEEEKNPSFRESVKCKIFLGFTSNLVSSGVRDTIRYLVQHHMVDVIVTTTGGVEEDLIKCLAPTFKGDFSLPGAYLRSKGLNRIGNLLVPNDNYCKFEDWIIPIFDEMLKEQKEENVLWTPSKLLARLGKEINNESSYLYWAYKMNIPVFCPGLTDGSLGDMLYFHSFRTSGLIIDVVQDIRAMNGEAVHANPKKTGMIILGGGLPKHHICNANMMRNGADYAVFINTGQEFDGSDSGARPDEAVSWGKIRGSAKTVKVYCDATIAFPLLVAETFATKRDQTCESKT

SEQ ID NO: 6652 - DNA, 1188 bp, Arabidopsis thaliana
gtcgcctcttcgtgtgatttactgagtgaaaaaagcttatcgcggcgattagttcccggcgaagaagaagaagagagataagaaaatggcgactaatggatctgctagctcagcgcagctctctcagaaggaagctgatgtcaggatgatgtgtgccgctgaggttcatcttggaaccaagaattgcaattaccagatggagcgttacgtcttcaagagacgcaacgatggtatttacatcttcaaccttggcaaaacatgggaaaagctccagatggctgctagagttattgttgccattgagaacccacaggacatcatcgtccagtcagctaggccctatggacagagagctgtgttgaagtttgctcagtacactggagccaatgccattgctggaagacacactcctggtaccttcaccaatcagatgcagacatccttcagtgaaccaaggctgttgattcttactgacccaagaactgaccaccagcctatcaaggaaggtgctttgggaaacattccaatcattgctttctgtgacacagactctccaatgagatttgttgacattggtatcccagccaacaacaagggaaagcacagcattgggtgccttttctggcttctggctcgcatggtccttcagatgcgtggaaccattgctgctggacagaagtgggatgtcatggttgacctgttcttttacagggaacctgaggagactaagccagaggatgaagatgaagctggccctcaggcagaatatggtgcacttcctgctccagaatatggaatggtaggtggagaccaatggaccaccgctcagatccctgatgctgcatggccaggagaaggtcaggcaccaatctctgctgcacctgctgctgcttcttggagtgattccgctgctgcaccggcagatggtggatgggaagctgccgcgccaccctcaggggcaccagctgctggttgggagtaaagttgatagcctttactcaatggtttaatggttatagacatgcttttttgttacttttgggattgaagagttatcgaaccgtaactgttttttcttctcacttgtttctcttaagacccttagatgttttgcacctttttgtttgaatcgaatctatattttgcgtttatcacaaatatgaatcgagctttgttcttcccaaaagg

SEQ ID NO: 6653 - protein, 298 aa, Arabidopsis thaliana [sequence omitted]

SEQ ID NO: 6654 - protein, 278 aa, Arabidopsis thaliana
MMCAAEVHLGTKNCNYQMERYVFKRRNDGIYIFNLGKTWEKLQMAARVIVAIENPQDIIVQSARPYGQRAVLKFAQYTGANAIAGRHTPGTFTNQMQTSFSEPRLLILTDPRTDHQPIKEGALGNIPIIAFCDTDSPMRFVDIGIPANNKGKHSIGCLFWLLARMVLQMRGTIAAGQKWDVMVDLFFYREPEETKPEDEDEAGPQAEYGALPAPEYGMVGGDQWTTAQIPDAAWPGEGQAPISAAPAAASWSDSAAAPADGGWEAAAPPSGAPAAGWE

SEQ ID NO: 6655 - protein, 277 aa, Arabidopsis thaliana
MCAAEVHLGTKNCNYQMERYVFKRRNDGIYIFNLGKTWEKLQMAARVIVAIENPQDIIVQSARPYGQRAVLKFAQYTGANAIAGRHTPGTFTNQMQTSFSEPRLLILTDPRTDHQPIKEGALGNIPIIAFCDTDSPMRFVDIGIPANNKGKHSIGCLFWLLARMVLQMRGTIAAGQKWDVMVDLFFYREPEETKPEDEDEAGPQAEYGALPAPEYGMVGGDQWTTAQIPDAAWPGEGQAPISAAPAAASWSDSAAAPADGGWEAAAPPSGAPAAGWE

SEQ ID NO: 6656 - DNA, 1446 bp, Arabidopsis thaliana
atatgaaaatttgcacagaacctataggactcgacaaatagaagaagcagattcgttgctaacgaagtaaaggatcttacttttttggtctttgctttagaaataacttataactacaagtcagagaggggccgagtaaatcggaaagatgacggcgccgatgatcctgaccggaagtggatcggcggcggagagagacgctcggatggcgcacactgctatggcgtttgttcagctctttaatggtggataccatgtgattactaaagtagctcttaatgttggagtcaaccagcttgtcttctgtgtatgccgtgatcttcttgctctctctattctcgctcctcttgcttacttccgcgaaagaaagatcagaactccaatgaataaaagccttctcttgtcattcttctttctgggcttagcaggggtatttgggaaccagttgttatttcttatcggtcttacatacacaaatcccacttatgctgctgccattcaaccatccatcccggtcttcacctttctcttggctgtcatgatgggtacagaaagagtgaatttgttgagaatcgaaggtcaaactaaggttggaggcacacttgtgtgtgttatgggtgctgtcttcatggttgtatttcgaggtccggccttgttaggagataaagatgcagactttgcgatgaacaatgaaatcagtgctaaaggtcaacctgagcctactggttggttagtctctggttttctcgatcttggatttgagcaatggcacattggagttttatgcttgattggaaactgcatgtgtatggctacttttcttgccattcaggcgccacttttgaagaagtatccggcaaatctttctgttgctgcattatcatacttctttggcacagtactaatgtgcacaacagctttctttatggtaaaggagccattggattggaagctaacacaatctgaggttcttgcagttatatatgcaggagttatcgcatcagcactaaactatggactcttgacttggtccaataagattattggtcctgccttggttgctctctacaatcctcttcaacccgctgcatcagctttcctatcgagaatctttctcggtagccccatttatctcggaagcgttgtgggtggattcttcatcattctaggactctatatggtcacttgggcatcgtttagagagcgaaaaacagcggtttccgggattgggattgcgccccatggtctaaaaacctcagagcctctgatatttaatgggacagttaacagactaggacagttgttttctggattacccagttcctctgtgaaatctgcagactaaaaagataccaaaaagttaagattcagacgagatcccattttacaacagctataactttttgttaactttcatctcttattaatatcttcttcgattactac

SEQ ID NO: 6657 - protein, 398 aa, Arabidopsis thaliana
MTAPMILTGSGSAAERDARMAHTAMAFVQLFNGGYHVITKVALNVGVNQLVFCVCRDLLALSILAPLAYFRERKIRTPMNKSLLLSFFFLGLAGVFGNQLLFLIGLTYTNPTYAAAIQPSIPVFTFLLAVMMGTERVNLLRIEGQTKVGGTLVCVMGAVFMVVFRGPALLGDKDADFAMNNEISAKGQPEPTGWLVSGFLDLGFEQWHIGVLCLIGNCMCMATFLAIQAPLLKKYPANLSVAALSYFFGTVLMCTTAFFMVKEPLDWKLTQSEVLAVIYAGVIASALNYGLLTWSNKIIGPALVALYNPLQPAASAFLSRIFLGSPIYLGSVVGGFFIILGLYMVTWASFRERKTAVSGIGIAPHGLKTSEPLIFNGTVNRLGQLFSGLPSSSVKSAD

SEQ ID NO: 6658 - protein, 394 aa, Arabidopsis thaliana
MILTGSGSAAERDARMAHTAMAFVQLFNGGYHVITKVALNVGVNQLVFCVCRDLLALSILAPLAYFRERKIRTPMNKSLLLSFFFLGLAGVFGNQLLFLIGLTYTNPTYAAAIQPSIPVFTFLLAVMMGTERVNLLRIEGQTKVGGTLVCVMGAVFMVVFRGPALLGDKDADFAMNNEISAKGQPEPTGWLVSGFLDLGFEQWHIGVLCLIGNCMCMATFLAIQAPLLKKYPANLSVAALSYFFGTVLMCTTAFFMVKEPLDWKLTQSEVLAVIYAGVIASALNYGLLTWSNKIIGPALVALYNPLQPAASAFLSRIFLGSPIYLGSVVGGFFIILGLYMVTWASFRERKTAVSGIGIAPHGLKTSEPLIFNGTVNRLGQLFSGLPSSSVKSAD

SEQ ID NO: 6659 - protein, 379 aa, Arabidopsis thaliana
MAHTAMAFVQLFNGGYHVITKVALNVGVNQLVFCVCRDLLALSILAPLAYFRERKIRTPMNKSLLLSFFFLGLAGVFGNQLLFLIGLTYTNPTYAAAIQPSIPVFTFLLAVMMGTERVNLLRIEGQTKVGGTLVCVMGAVFMVVFRGPALLGDKDADFAMNNEISAKGQPEPTGWLVSGFLDLGFEQWHIGVLCLIGNCMCMATFLAIQAPLLKKYPANLSVAALSYFFGTVLMCTTAFFMVKEPLDWKLTQSEVLAVIYAGVIASALNYGLLTWSNKIIGPALVALYNPLQPAASAFLSRIFLGSPIYLGSVVGGFFIILGLYMVTWASFRERKTAVSGIGIAPHGLKTSEPLIFNGTVNRLGQLFSGLPSSSVKSAD

SEQ ID NO: 6660 - DNA, 1588 bp, Arabidopsis thaliana
gttttttgcactcagaaaagaaacttgtactaaaacctaggagaggaggagctggcaccaccgcctaactcgccattgacacaacaccaaaaactcttctttactttttgttattctacacacatcgataaagattaagaacataattaatagaattccataaataattagatgcactaacttttcaacatcaattcaacggtttaaattcgtgaaaaagcgtttttattttattttaaaggttacaactttgtagtttttaccctaaatctctctctgattactgatactctgtctcaatctcttctttcttctaatcctttatttcttgtaagctacttctcctgaatttcgtatttgatccgtttaatccaagtttcgattttatataacaaacacatagatcctgaggttttgtgataagaaacagagagagagagaaacagagtaatggcgaacagagatgtggagagagtagggaagaaaaacagaggagctaataacaattatttctacgaggagtcttctggtgaaactcattggacttcatggctgattccggcgattgtagtggcaaatctcgctgtctttatcgctgttatgttcgttaatgattgtcctaagaaaatcaccggacctaacaaagagtgtgttgctagattcctcggaagattctcgtttcaaccacttaaagagaatcctctctttggtccttcttcttcaacattggagaaaatgggagcattggaatggaggaaagtagtacatgaacatcaaggatggagacttctctcttgtatgtggcttcacgctggtatcattcatcttcttacaaacatgttgagtttgatcttcattggtatccgccttgagcagcaatttggcttcataagagtcgggttgatatacttaatatcgggtctcggtggaagcatactttcgtcgcttttccttcaagaaagtatctctgttggtgcttcgggtgctctctttggacttcttggagcaatgttatctgaacttcttaccaattggactatctatgccaacaaggcggctgctctgatcacacttctgttcatcatcgcaatcaacttagcattaggcatgcttcctcgggttgacaactttgcacacattggagggtttttaaccggattctgcctcgggtttgtcctccttgtccgacctcagtacggttgggaagcttcgcgcaccaacacttcgcgaaccaaacgaaagtatagcatgtaccagtacgtgctgtttgtagtttcagtggtgctacttgtggttgggctaacggttgcattagtgatgcttttcaaaggagagaatgggaacaaacattgcaaatggtgtcattaccttagctgtttcccaacttctaaatggacctgctaatcatcatcatcatcatcataatcatatagtaaaagcttttatatgtgttcatgttaacatttaatctctttgatctctctagcctttgattacttatatatgtgtacattacaaaattcgtcttgtgtaaaaggggatagaaataaaagagtgtataatttggtttatagtacacactttatat

SEQ ID NO: 6661 - protein, 317 aa, Arabidopsis thaliana
MANRDVERVGKKNRGANNNYFYEESSGETHWTSWLIPAIVVANLAVFIAVMFVNDCPKKITGPNKECVARFLGRFSFQPLKENPLFGPSSSTLEKMGALEWRKVVHEHQGWRLLSCMWLHAGIIHLLTNMLSLIFIGIRLEQQFGFIRVGLIYLISGLGGSILSSLFLQESISVGASGALFGLLGAMLSELLTNWTIYANKAAALITLLFIIAINLALGMLPRVDNFAHIGGFLTGFCLGFVLLVRPQYGWEASRTNTSRTKRKYSMYQYVLFVVSVVLLVVGLTVALVMLFKGENGNKHCKWCHYLSCFPTSKWTC

SEQ ID NO: 6662 - protein, 267 aa, Arabidopsis thaliana
MFVNDCPKKITGPNKECVARFLGRFSFQPLKENPLFGPSSSTLEKMGALEWRKVVHEHQGWRLLSCMWLHAGIIHLLTNMLSLIFIGIRLEQQFGFIRVGLIYLISGLGGSILSSLFLQESISVGASGALFGLLGAMLSELLTNWTIYANKAAALITLLFIIAINLALGMLPRVDNFAHIGGFLTGFCLGFVLLVRPQYGWEASRTNTSRTKRKYSMYQYVLFVVSVVLLVVGLTVALVMLFKGENGNKHCKWCHYLSCFPTSKWTC

SEQ ID NO: 6663 - protein, 222 aa, Arabidopsis thaliana
MGALEWRKVVHEHQGWRLLSCMWLHAGIIHLLTNMLSLIFIGIRLEQQFGFIRVGLIYLISGLGGSILSSLFLQESISVGASGALFGLLGAMLSELLTNWTIYANKAAALITLLFIIAINLALGMLPRVDNFAHIGGFLTGFCLGFVLLVRPQYGWEASRTNTSRTKRKYSMYQYVLFVVSVVLLVVGLTVALVMLFKGENGNKHCKWCHYLSCFPTSKWTC

SEQ ID NO: 6664 - DNA, 1060 bp, Arabidopsis thaliana
atcaccattgctttgttttgttcgtcaaatataatcaattttaaatttcttctcttctcttcaaacgaatcgcctttttcgataatctctttgcatcgatttcatcatggctactcaaacggatctcgctcagcccaagcttgatatgaccaaggaggagaaagagaggttgaagtatttgcaattcgtgcaagctgctgctgtggaagctctgcttcgctttgctcttatttacgctaaggcaaaggacaagtctggtcctttgaaacctggtgttgaatctgttgaaggagctgtcaagactgtcgttggtcctgtctacgagaaataccacgacgtccctgttgaggtccttaaatacatggaccagaaggttgatatgtctgtgactgagcttgaccgtcgtgtcccaccagtcgtcaagcaagtgtctgcccaagccatctccgctgctcagatagcacccattgtggcacgtgcgttggcctctgaggttcgacgtgctggtgttgttgaaaccgcttctggaatggctaaatccgtctactccaagtacgagcctgctgctaaggagttgtatgcaaactatgagccaaaagcagagcagtgtgccgtttcagcttggaagaagcttaaccagcttcctctattcccaaggctggctcaagttgctgtaccaacagctgctttctgctctgagaagtacaatgatactgtggttaaggctgcagagaaagggtacagagtcacatcgtacatgccattggttccaacagagaggatctcaaaaatcttcgctgaggagaaagctgagaccgagcctttggagttccatccacttgattgatatgggtgttttgttagtgtgattttttgttttgttgggattaaggtgaaccggatcttggttagcgattgatctctggttctcgttcttttttttctttgtcatgaacttttgttgtttcgtttaataatcaaaagttgtataatctaagtttgggattaccaccctattgagtattgagtgataaaaaaaaagttgcgtgaattatcgccc

SEQ ID NO: 6665 - protein, 246 aa, Arabidopsis thaliana
MATQTDLAQPKLDMTKEEKERLKYLQFVQAAAVEALLRFALIYAKAKDKSGPLKPGVESVEGAVKTVVGPVYEKYHDVPVEVLKYMDQKVDMSVTELDRRVPPVVKQVSAQAISAAQIAPIVARALASEVRRAGVVETASGMAKSVYSKYEPAAKELYANYEPKAEQCAVSAWKKLNQLPLFPRLAQVAVPTAAFCSEKYNDTVVKAAEKGYRVTSYMPLVPTERISKIFAEEKAETEPLEFHPLD

SEQ ID NO: 6666 - protein, 233 aa, Arabidopsis thaliana
MTKEEKERLKYLQFVQAAAVEALLRFALIYAKAKDKSGPLKPGVESVEGAVKTVVGPVYEKYHDVPVEVLKYMDQKVDMSVTELDRRVPPVVKQVSAQAISAAQIAPIVARALASEVRRAGVVETASGMAKSVYSKYEPAAKELYANYEPKAEQCAVSAWKKLNQLPLFPRLAQVAVPTAAFCSEKYNDTVVKAAEKGYRVTSYMPLVPTERISKIFAEEKAETEPLEFHPLD

SEQ ID NO: 6667 - protein, 161 aa, Arabidopsis thaliana
MDQKVDMSVTELDRRVPPVVKQVSAQAISAAQIAPIVARALASEVRRAGVVETASGMAKSVYSKYEPAAKELYANYEPKAEQCAVSAWKKLNQLPLFPRLAQVAVPTAAFCSEKYNDTVVKAAEKGYRVTSYMPLVPTERISKIFAEEKAETEPLEFHPLD

SEQ ID NO: 6668 - DNA, 1155 bp, Arabidopsis thaliana
aaatttctctcgccattttatagattaaggtgttctctctgacttcggaggagaaagaaagaaaaaaaatattcttgtttcaaacttcaatggcgttctcgagttccatcttctctgttactcagttttcttcttcgttagcttcgcgtccttcttctgcaatcagtaggcagactcgttttcccgctcaaattgcttctccagatctatcgcctgctttgttcgatgatcgccggaagttcgtcggaggtgtaatgtctctcttgacgaagagtattaaaaaccgtgtatatgcttcgattaacagcattgattcggccgctactccatcgtatccgaaatcggaagacgatgacgacgttgttccaatgccaatggttatgatagaccaggatgctgaccctgaagctactattgtacaactcagttttggaaatcgtcttggggctcttattgacacaatgcgggcgctgaaagatttgggattggatgtaataaaaggaactgtctcaactgaaggatccattaagcagaccaaattttctataacgaaacgagacactggccggaaagtggaagatcctgacttgttggaacaaatccgattaacaatcatcaacaatctcttgaaataccatccggaatgcagtgagcaacttgcaatgggtgagacttttggaataaaggctcccgaaaagaagattgatgtcgatatcgcaactcatatacatgtgaaagaagatggaccaaagaggagcctgcttgtcatagagacagcggacaggccaggtcttgtcgtagagatgatcaaagtgatggctgatgtcaacatagacgtggaatccgcagagatagatacagagggactggttgcgaaagacaagtttcacgtaagctaccaagggcaagctctaaacagatctttgtcacaggttttggtgaactgtctgcgttacttcctgagaaggcctgaaactgacattgacagctactaaatgagcttttgtttgctctaaaacaaaactgctctttatcctttaaagcaatcatatctgtgcttgcgaaactttcagacttctgtatggaagattatgtggaaattcgtgatactataattgaaccactgtggctaaaaaataaatgggttcttgacac

SEQ ID NO: 6669 - protein, 301 aa, Arabidopsis thaliana
MAFSSSIFSVTQFSSSLASRPSSAISRQTRFPAQIASPDLSPALFDDRRKFVGGVMSLLTKSIKNRVYASINSIDSAATPSYPKSEDDDDVVPMPMVMIDQDADPEATIVQLSFGNRLGALIDTMRALKDLGLDVIKGTVSTEGSIKQTKFSITKRDTGRKVEDPDLLEQIRLTIINNLLKYHPECSEQLAMGETFGIKAPEKKIDVDIATHIHVKEDGPKRSLLVIETADRPGLVVEMIKVMADVNIDVESAEIDTEGLVAKDKFHVSYQGQALNRSLSQVLVNCLRYFLRRPETDIDSY

SEQ ID NO: 6670 - protein, 246 aa, Arabidopsis thaliana
MSLLTKSIKNRVYASINSIDSAATPSYPKSEDDDDVVPMPMVMIDQDADPEATIVQLSFGNRLGALIDTMRALKDLGLDVIKGTVSTEGSIKQTKFSITKRDTGRKVEDPDLLEQIRLTIINNLLKYHPECSEQLAMGETFGIKAPEKKIDVDIATHIHVKEDGPKRSLLVIETADRPGLVVEMIKVMADVNIDVESAEIDTEGLVAKDKFHVSYQGQALNRSLSQVLVNCLRYFLRRPETDIDSY

SEQ ID NO: 6671 - protein, 208 aa, Arabidopsis thaliana
MPMVMIDQDADPEATIVQLSFGNRLGALIDTMRALKDLGLDVIKGTVSTEGSIKQTKFSITKRDTGRKVEDPDLLEQIRLTIINNLLKYHPECSEQLAMGETFGIKAPEKKIDVDIATHIHVKEDGPKRSLLVIETADRPGLVVEMIKVMADVNIDVESAEIDTEGLVAKDKFHVSYQGQALNRSLSQVLVNCLRYFLRRPETDIDSY

SEQ ID NO: 6672 - DNA, 1155 bp, Arabidopsis thaliana
gaagacactcctccaatggcgcctcagcttctctcctccagtaacttcaaatctctctttgactctgtcgatacgttcctcttcgactgcgatggtgttatatggaagggtgaaacgctcatcgatggcgtctcccaaactctcgaccttatccgttctaagggtaaaaatgttgtctttgtgaccaacaattccgtaaaatcgaggaggcaatacgctgaaaagttccgatctttgggtgtcacttctattactcaggatgagatcttctcttcgtcatttgcggcagctatgtatctcaaagtcaataactttcctaaggacaagaaggtttatgtgattggtggagagggtgttcttgaggagctgcagattgccggttttacaggtcttggtggtcctgaagatggtgaaaagaaggcacaatggaaatcaaactctctctttgaacatgataaaagtgtgggagcagttgtagttggactagaccccaacattaactactataagcttcagtacgggactctctgtgtacgcgagaatccgggatgtctcttcattgcgaccaaccgtgatgcagtaggacatatgacggatctgcaagagtggcctggtgctgggtgtatggttgctgccatgtgtggatcgactgaaagagaaccaatagttgttgggaaaccatctactttcatgatggactttctgctacaaaaatttgggacggaaacgtcaagaatgtgcatggtaggtgataggctagatactgatatcttgtttgggcagaatgctggctgcaaaactctcctcgtcctaacaggggtgacaagtgaatctaatctactagataagggcaacaagatagaaccagactattacacaagcacagtctctgatatcataaaactgatggagtccccctagtaagtaagggcatcatcattcatcatcttgctttacactttggaacagtgatttacgtcctgttgcaagatgaaatttttctgattctttgtcttggttagtaatctgatgaagcatcagaaaacatgatttcattttgttatgttgctgaataaaggatttgagaagtcgatgaagagttgaaagattggtaataagcaaatagtaagattatcatggggaaagtccaaaagc

SEQ ID NO: 6673 - protein, 306 aa, Arabidopsis thaliana
EDTPPMAPQLLSSSNFKSLFDSVDTFLFDCDGVIWKGETLIDGVSQTLDLIRSKGKNVVFVTNNSVKSRRQYAEKFRSLGVTSITQDEIFSSSFAAAMYLKVNNFPKDKKVYVIGGEGVLEELQIAGFTGLGGPEDGEKKAQWKSNSLFEHDKSVGAVVVGLDPNINYYKLQYGTLCVRENPGCLFIATNRDAVGHMTDLQEWPGAGCMVAAMCGSTEREPIVVGKPSTFMMDFLLQKFGTETSRMCMVGDRLDTDILFGQNAGCKTLLVLTGVTSESNLLDKGNKIEPDYYTSTVSDIIKLMESP

SEQ ID NO: 6674 - protein, 301 aa, Arabidopsis thaliana
MAPQLLSSSNFKSLFDSVDTFLFDCDGVIWKGETLIDGVSQTLDLIRSKGKNVVFVTNNSVKSRRQYAEKFRSLGVTSITQDEIFSSSFAAAMYLKVNNFPKDKKVYVIGGEGVLEELQIAGFTGLGGPEDGEKKAQWKSNSLFEHDKSVGAVVVGLDPNINYYKLQYGTLCVRENPGCLFIATNRDAVGHMTDLQEWPGAGCMVAAMCGSTEREPIVVGKPSTFMMDFLLQKFGTETSRMCMVGDRLDTDILFGQNAGCKTLLVLTGVTSESNLLDKGNKIEPDYYTSTVSDIIKLMESP

SEQ ID NO: 6675 - protein, 209 aa, Arabidopsis thaliana
MYLKVNNFPKDKKVYVIGGEGVLEELQIAGFTGLGGPEDGEKKAQWKSNSLFEHDKSVGAVVVGLDPNINYYKLQYGTLCVRENPGCLFIATNRDAVGHMTDLQEWPGAGCMVAAMCGSTEREPIVVGKPSTFMMDFLLQKFGTETSRMCMVGDRLDTDILFGQNAGCKTLLVLTGVTSESNLLDKGNKIEPDYYTSTVSDIIKLMESP

SEQ ID NO: 6676 - DNA, 1847 bp, Arabidopsis thaliana
aaagaacaacaaaacagaggaagaagaagaagaagatgaagcttctggctctgtttccatttctagcgatcgtgatccaactcagctgttgggagctaggaacagatgcattaccgagcggtgggttcgtgaggacgaaaggtgttcagtttagtctcaatggctatccatattacgctaatggcttcaatgcctactggctcatgtacgtagcctccgatccatcccaacggtctaagatctccaccgctttccaagatgcttctcgccatggattgaccgttgctcgaacctgggctttcagcgatggcggttacagggctcttcagtattcccctggctcctacaacgaggatatgtttcagggtttggattttgcgttagctgaggcaagaaggcatggtataaagataatactcagctttgccaataactacgagagcttcggagggaggaagcaatatgtggattgggctcgaagcagaggccgtcccgtttcttctgaagacgacttcttcactgactctcttgttaaagatttctacaagaaccatatcaaggctgtgctgaacagattcaatacctttaccaaagttcattacaaagatgacccaaccattatggcttgggagctcatgaacgagccccgttgcccctctgatccttccggaagagccattcaggcttggattactgaaatggctgctcatgtgaaatcactagacagaaaccatctgcttgaagctggcctcgaaggtttctatggtcagtcttcacctcaaagcaagactcttaacccacctggccagtttggaaccgatttcatcgccaataaccgcattcccggcattgatttcgtcacggttcactcttaccctgatgaatggtttccagactcaagcgagcaatcccaaatggatttcttgaacaaatggctagacgcacacatccaagacgcacagaacgttcttcacaaaccaataatattagcagagtttggtaaatcaatgaagaaaccaggttataccccagcgcagagagacatcgtcttcaacaccgtgtacagcaagatttacgggtctgcaaaacgaggaggtgcagcagcaggaggattgttctggcaacttctggtaaacggaattgataattttcaagatgggtatgggatcatacttagccaaagctcgtcgaccgttaacgtcatttcacagcaatcgcggaagttgactttgattaggaaaatcttcgctaggatgatcaatgtggagaaatggaagagagcgagaggtcagggacaagttgggaaacgaggtcacaaaatcaataactgaaatgatactaattaaaccacttttttatagcgaatggaacgatctcagctcgtccacgaaagttatagtgatagatttcataatatatagttttttggccggaatgaatgaactttattagtgcgacgaaaattattagtaataacccgtcaaaactcaaaaggttggttatttagtaatgggctttacttattaggcccactatgaaatacaagggcctagaatttctccagccacatgtgagttataacatgggcaaaaccattcaacaatgtttgttttggattctgtgaaagagatgactatcgttgataatttgaaggatgaagaagattcagaacaataaaacgtcgtcggcgtttgatttcagacatcgccggagagaacaagactctccatttgttacttccatggcttatgtgggtaggtcttggcgtaaacttgtattttatattctcgatttgtacggtttaatgattaaagaagaaaatagacaaaaaaaaattatttagctcc

SEQ ID NO: 6677 - protein, 442 aa, Arabidopsis thaliana
RTTKQRKKKKKMKLLALFPFLAIVIQLSCWELGTDALPSGGFVRTKGVQFSLNGYPYYANGFNAYWLMYVASDPSQRSKISTAFQDASRHGLTVARTWAFSDGGYRALQYSPGSYNEDMFQGLDFALAEARRHGIKIILSFANNYESFGGRKQYVDWARSRGRPVSSEDDFFTDSLVKDFYKNHIKAVLNRFNTFTKVHYKDDPTIMAWELMNEPRCPSDPSGRAIQAWITEMAAHVKSLDRNHLLEAGLEGFYGQSSPQSKTLNPPGQFGTDFIANNRIPGIDFVTVHSYPDEWFPDSSEQSQMDFLNKWLDAHIQDAQNVLHKPIILAEFGKSMKKPGYTPAQRDIVFNTVYSKIYGSAKRGGAAAGGLFWQLLVNGIDNFQDGYGIILSQSSSTVNVISQQSRKLTLIRKIFARMINVEKWKRARGQGQVGKRGHKINN

SEQ ID NO: 6678 - protein, 431 aa, Arabidopsis thaliana
MKLLALFPFLAIVIQLSCWELGTDALPSGGFVRTKGVQFSLNGYPYYANGFNAYWLMYVASDPSQRSKISTAFQDASRHGLTVARTWAFSDGGYRALQYSPGSYNEDMFQGLDFALAEARRHGIKIILSFANNYESFGGRKQYVDWARSRGRPVSSEDDFFTDSLVKDFYKNHIKAVLNRFNTFTKVHYKDDPTIMAWELMNEPRCPSDPSGRAIQAWITEMAAHVKSLDRNHLLEAGLEGFYGQSSPQSKTLNPPGQFGTDFIANNRIPGIDFVTVHSYPDEWFPDSSEQSQMDFLNKWLDAHIQDAQNVLHKPIILAEFGKSMKKPGYTPAQRDIVFNTVYSKIYGSAKRGGAAAGGLFWQLLVNGIDNFQDGYGIILSQSSSTVNVISQQSRKLTLIRKIFARMINVEKWKRARGQGQVGKRGHKINN

SEQ ID NO: 6679 - protein, 375 aa, Arabidopsis thaliana
MYVASDPSQRSKISTAFQDASRHGLTVARTWAFSDGGYRALQYSPGSYNEDMFQGLDFALAEARRHGIKIILSFANNYESFGGRKQYVDWARSRGRPVSSEDDFFTDSLVKDFYKNHIKAVLNRFNTFTKVHYKDDPTIMAWELMNEPRCPSDPSGRAIQAWITEMAAHVKSLDRNHLLEAGLEGFYGQSSPQSKTLNPPGQFGTDFIANNRIPGIDFVTVHSYPDEWFPDSSEQSQMDFLNKWLDAHIQDAQNVLHKPIILAEFGKSMKKPGYTPAQRDIVFNTVYSKIYGSAKRGGAAAGGLFWQLLVNGIDNFQDGYGIILSQSSSTVNVISQQSRKLTLIRKIFARMINVEKWKRARGQGQVGKRGHKINN

SEQ ID NO: 6680 - DNA, 1650 bp, Arabidopsis thaliana
aaccaagtcaatcattcttcattgatcttctccgatttgaaatcgccggcgaaaatggaatcctccggcgacaagcaaacttcttctctttaccctactgttgacacatccaatcccgaagctcctataaaccctagctcatcatcttctactaacaatctctatccttctctcgatatgaatgatctcgctcgtaatctcttccctgaacaaccagagacgagttctattccggtttcagctcctcccgctgcgacggaggaagtaattttgaaaatctccggcgcgattcttcatttaatcgacaaatcttacagcgtcgagctcgcttgcggtgatcttgagatcatccgtattgttcaaggagagaatgttgtcgctgttctcgctagtgtctccgatgagattcaatggccgttgactaaggatgagaactctgtcaaggtcgatgagtctcattacttcttcacgcttcgtcctaccaaagagatctcacatgattcaagcgacgaagaagacggagatggagggaaaaacactaacgagatgttgaactacggacttacaattgcttctaaaggtcaagagcatttactggtggagcttgagaagatcttggaggattatagtagtttctctgtgcaggaggtgtcagaggaagcgaaggaagcaggtgaaaaggttttggatgtgacggtggcgagagagacgtctccggtggagcttactggggaaaggaaagagattgtggagaggcaatgttctgcttattggactactttggctccgaatgtggaggattatagcgggaaggcggcgaagctgattgcaactggctcaggacatttgataaaagggattctttggtgtggagatgtgactatggataggcttatttggggaaatggtttcatgaaaaggaggttgtcaaaggctgagaaggagagtgaagttcaccctgacaccttgaaaagaatcagaagagtgaagaggatgaccaaaatgacagagagtgtagcaaacagcatactgtctggagtccttaaagtttctggattcttcacaagttcagtggcaaacaccaaagtaggaaagaaattcttcagccttcttcctggagaagtcatccttgcatctcttgacggattcaataaggtctgtgacgctgttgaagtagctgggaggaatgtaatgtcaacctcttccactgttacaaccgaactcgttgatcacaagtatggtggtaaagcggctgaggcgacaaacgaagggctcgatgcagcaggatatgcgcttggcacagcctgggttgctttcaaaataagaaaggctattaacccgaagagtgtactcaagccttcgacgcttgcaaaaaccgccattagatctgcagcttcacaaaaaaaagcctagtaaggctgcctgatgaagcaaaacagactcattggtcctgtttgtttgtatcgtcttgttgtcttttgataaataagttaaactaaaaagaggtgtggattagtagttgttgtgaagtgtttatgtttctctatgagaatcatgtaatgtctctgatttgattcggaatatgtgctgtatgtgtaagtggtcaaatcaagattccttgaaattagttttcatgtttttttaacgtgc

SEQ ID NO: 6681 - protein, 470 aa, Arabidopsis thaliana
NQVNHSSLIFSDLKSPAKMESSGDKQTSSLYPTVDTSNPEAPINPSSSSSTNNLYPSLDMNDLARNLFPEQPETSSIPVSAPPAATEEVILKISGAILHLIDKSYSVELACGDLEIIRIVQGENVVAVLASVSDEIQWPLTKDENSVKVDESHYFFTLRPTKEISHDSSDEEDGDGGKNTNEMLNYGLTIASKGQEHLLVELEKILEDYSSFSVQEVSEEAKEAGEKVLDVTVARETSPVELTGERKEIVERQCSAYWTTLAPNVEDYSGKAAKLIATGSGHLIKGILWCGDVTMDRLIWGNGFMKRRLSKAEKESEVHPDTLKRIRRVKRMTKMTESVANSILSGVLKVSGFFTSSVANTKVGKKFFSLLPGEVILASLDGFNKVCDAVEVAGRNVMSTSSTVTTELVDHKYGGKAAEATNEGLDAAGYALGTAWVAFKIRKAINPKSVLKPSTLAKTAIRSAASQKKA

SEQ ID NO: 6682 - protein, 452 aa, Arabidopsis thaliana
MESSGDKQTSSLYPTVDTSNPEAPINPSSSSSTNNLYPSLDMNDLARNLFPEQPETSSIPVSAPPAATEEVILKISGAILHLIDKSYSVELACGDLEIIRIVQGENVVAVLASVSDEIQWPLTKDENSVKVDESHYFFTLRPTKEISHDSSDEEDGDGGKNTNEMLNYGLTIASKGQEHLLVELEKILEDYSSFSVQEVSEEAKEAGEKVLDVTVARETSPVELTGERKEIVERQCSAYWTTLAPNVEDYSGKAAKLIATGSGHLIKGILWCGDVTMDRLIWGNGFMKRRLSKAEKESEVHPDTLKRIRRVKRMTKMTESVANSILSGVLKVSGFFTSSVANTKVGKKFFSLLPGEVILASLDGFNKVCDAVEVAGRNVMSTSSTVTTELVDHKYGGKAAEATNEGLDAAGYALGTAWVAFKIRKAINPKSVLKPSTLAKTAIRSAASQKKA

SEQ ID NO: 6683 - protein, 411 aa, Arabidopsis thaliana
MNDLARNLFPEQPETSSIPVSAPPAATEEVILKISGAILHLIDKSYSVELACGDLEIIRIVQGENVVAVLASVSDEIQWPLTKDENSVKVDESHYFFTLRPTKEISHDSSDEEDGDGGKNTNEMLNYGLTIASKGQEHLLVELEKILEDYSSFSVQEVSEEAKEAGEKVLDVTVARETSPVELTGERKEIVERQCSAYWTTLAPNVEDYSGKAAKLIATGSGHLIKGILWCGDVTMDRLIWGNGFMKRRLSKAEKESEVHPDTLKRIRRVKRMTKMTESVANSILSGVLKVSGFFTSSVANTKVGKKFFSLLPGEVILASLDGFNKVCDAVEVAGRNVMSTSSTVTTELVDHKYGGKAAEATNEGLDAAGYALGTAWVAFKIRKAINPKSVLKPSTLAKTAIRSAASQKKA

SEQ ID NO: 6684 - DNA, 1476 bp, Arabidopsis thaliana
gtactcagtacttacatcttcttcatctgacgatagcaaaaatgacaagcaatccctaatttcgcctcaaaaaatcccaaaaagcttcgttcttttttagtcatcatcatcttcttcttttcttcttcttcggttgctaaatcgaagatggcgactgctctggtttctcctcttacttcacaactcaaccatgaagctgtctgttccaagtttgtgttacccaaatcgccgttcatgtcgggatctaagctcttttcatcgaacatgccttgctctactgttcctagacgcacaagaagatcacactgctttgcttctgctaaagatatgagctttgaccatatccctaaacaatttcgtggagacaatctcaaagacggagtgatgcagaacttcaagaacgtaccacaatatttttacgggcttaattcagctcaaatggatatgttcatgacagaagatagccctgtccgtaggcaagcggaaaaagttacagaggaaagcatctcgtctagaaataactatttgaacaatggaggaatatggagtatgtccggtatgaatgcagcagatgctagaagatatagcatgagtgtccagatgtacagaggtggaggtggcggcggaggatctgaaagaccaagaactgctcctccagatttgccttctttgctattggatgctcgcatatgctaccttggcatgccaatcgtacctgcagttactgagttactcgttgctcaatttatgtggttagactatgataacccaacaaagcccatctacttatatataaattcacccgggacccagaatgagaagatggaaactgttggatcagaaacagaggcttatgccatagccgatactatttcttattgcaaatcagatgtatacactatcaattgtggcatggcttttggtcaagcagcaatgcttctttctctcgggaaaaaaggttatcgtgccgtacaaccacattcatcaacaaaattatatctgccaaaagtaaacagatcgagtggagctgccatagacatgtggataaaggccaaggaacttgatgcaaataccgagtactacatcgagctgttagctaagggaacagggaaatccaaagagcagatcaacgaggacatcaagcgacctaaatatctccaagctcaagcagccattgactatggaattgcagacaagatagctgactcgcaggacagttctttcgagaaacgggattacgatgggacccttgcccagagagctatgagacctggaggaggcagtccagcagctccagccggactaagatgatcaattcccaccagaaagaaagaggttgaatcctaatttcctagtcactctggaatatgtagctcttacaatctataagcaaacacatgtggtagtaacatacaaaaaagtgttggcaaaagggaaataacatcaaagttatctaggtggaaagttatttgtatt

SEQ ID NO: 6685 - protein, 387 aa, Arabidopsis thaliana
MATALVSPLTSQLNHEAVCSKFVLPKSPFMSGSKLFSSNMPCSTVPRRTRRSHCFASAKDMSFDHIPKQFRGDNLKDGVMQNFKNVPQYFYGLNSAQMDMFMTEDSPVRRQAEKVTEESISSRNNYLNNGGIWSMSGMNAADARRYSMSVQMYRGGGGGGGSERPRTAPPDLPSLLLDARICYLGMPIVPAVTELLVAQFMWLDYDNPTKPIYLYINSPGTQNEKMETVGSETEAYAIADTISYCKSDVYTINCGMAFGQAAMLLSLGKKGYRAVQPHSSTKLYLPKVNRSSGAAIDMWIKAKELDANTEYYIELLAKGTGKSKEQINEDIKRPKYLQAQAAIDYGIADKIADSQDSSFEKRDYDGTLAQRAMRPGGGSPAAPAGLR

SEQ ID NO: 6686 - protein, 358 aa, Arabidopsis thaliana
MSGSKLFSSNMPCSTVPRRTRRSHCFASAKDMSFDHIPKQFRGDNLKDGVMQNFKNVPQYFYGLNSAQMDMFMTEDSPVRRQAEKVTEESISSRNNYLNNGGIWSMSGMNAADARRYSMSVQMYRGGGGGGGSERPRTAPPDLPSLLLDARICYLGMPIVPAVTELLVAQFMWLDYDNPTKPIYLYINSPGTQNEKMETVGSETEAYAIADTISYCKSDVYTINCGMAFGQAAMLLSLGKKGYRAVQPHSSTKLYLPKVNRSSGAAIDMWIKAKELDANTEYYIELLAKGTGKSKEQINEDIKRPKYLQAQAAIDYGIADKIADSQDSSFEKRDYDGTLAQRAMRPGGGSPAAPAGLR

SEQ ID NO: 6687 - protein, 348 aa, Arabidopsis thaliana
MPCSTVPRRTRRSHCFASAKDMSFDHIPKQFRGDNLKDGVMQNFKNVPQYFYGLNSAQMDMFMTEDSPVRRQAEKVTEESISSRNNYLNNGGIWSMSGMNAADARRYSMSVQMYRGGGGGGGSERPRTAPPDLPSLLLDARICYLGMPIVPAVTELLVAQFMWLDYDNPTKPIYLYINSPGTQNEKMETVGSETEAYAIADTISYCKSDVYTINCGMAFGQAAMLLSLGKKGYRAVQPHSSTKLYLPKVNRSSGAAIDMWIKAKELDANTEYYIELLAKGTGKSKEQINEDIKRPKYLQAQAAIDYGIADKIADSQDSSFEKRDYDGTLAQRAMRPGGGSPAAPAGLR

SEQ ID NO: 6688 - DNA, 1025 bp, Arabidopsis thaliana
cctaaaagctgagccgcgtcgagagcattttatatcttcaatcatcttacgcaggctgttgtagcagcagtgtctatcggagacgatgaagttcaacgtcgccaatccgaccaccgggtgtcaaaagaaactcgagatcgatgacgatcaaaaactccgcgcctttttcgacaagaggctctctcaggaagttagcggagatgctctaggcgaggaattcaagggatacgtattcaagatcatgggaggatgtgacaagcaaggtttcccaatgaaacaaggagttctcactccagggcgtgtccgtcttttgcttcaccgaggtactccttgttttagaggacacggaaggaggactggagagaggagacgaaagtctgtccgtggttgcattgtgagccctgacctgtctgttcttaacttggtcattgtgaagaagggtgtaagtgatcttcccgggcttaccgacactgagaagccaagaatgagaggtcccaagagggcatcaaagatccgcaagttgtttaaccttggaaaagaggatgatgtgaggaagtacgttaacacttaccgccgtaccttcacaaacaagaagggcaagaaggttagcaaggctcctaagatccagaggcttgtgactccattgaccctccagaggaagagagctagaattgctgacaagaagaagagaatcgccaaggctaactctgatgcagctgattaccagaagcttcttgcctccagactaaaggagcagcgtgatcgccgtagtgaaagtttggccaagaagaggtctagactctcttctgctcctgctaaacccgttgctgcttaaactgcctcaagattaagaaatttctttctctctagtttgtttctggtcgtatttaagttgctccacagacatgagaacgccattttgaacactatttttggtttctgttttgtgtcaacttttcaagccttttattatatcaaagttttgaacctcttagtagtacgtttgttatatttagttattattt

SEQ ID NO: 6689 - protein, 249 aa, Arabidopsis thaliana
MKFNVANPTTGCQKKLEIDDDQKLRAFFDKRLSQEVSGDALGEEFKGYVFKIMGGCDKQGFPMKQGVLTPGRVRLLLHRGTPCFRGHGRRTGERRRKSVRGCIVSPDLSVLNLVIVKKGVSDLPGLTDTEKPRMRGPKRASKIRKLFNLGKEDDVRKYVNTYRRTFTNKKGKKVSKAPKIQRLVTPLTLQRKRARIADKKKRIAKANSDAADYQKLLASRLKEQRDRRSESLAKKRSRLSSAPAKPVAA

SEQ ID NO: 6690 - protein, 197 aa, Arabidopsis thaliana
MGGCDKQGFPMKQGVLTPGRVRLLLHRGTPCFRGHGRRTGERRRKSVRGCIVSPDLSVLNLVIVKKGVSDLPGLTDTEKPRMRGPKRASKIRKLFNLGKEDDVRKYVNTYRRTFTNKKGKKVSKAPKIQRLVTPLTLQRKRARIADKKKRIAKANSDAADYQKLLASRLKEQRDRRSESLAKKRSRLSSAPAKPVAA

SEQ ID NO: 6691 - protein, 187 aa, Arabidopsis thaliana
MKQGVLTPGRVRLLLHRGTPCFRGHGRRTGERRRKSVRGCIVSPDLSVLNLVIVKKGVSDLPGLTDTEKPRMRGPKRASKIRKLFNLGKEDDVRKYVNTYRRTFTNKKGKKVSKAPKIQRLVTPLTLQRKRARIADKKKRIAKANSDAADYQKLLASRLKEQRDRRSESLAKKRSRLSSAPAKPVAA

SEQ ID NO: 6692 - DNA, 1242 bp, Arabidopsis thaliana
acttagaggttttatttctttgtctggtcagatttattgttcttccttctcacaaaacattattacccaaactccattatcagctcaagttcttagctttcttcgtgattattcctctagcagaagctggaactcaatctacaagtgatttcataatctcaagatgttaccaactgagtcaaagaaagccttttcattcaaaaggtgtattgaagatggggacttagttattgtttacgaaagacatgatgtgatgaaaccagttaaagtaagtaaagacggtgtgcttcagaaccgttttggtgtgtataagcactcggattggattgggaaaccattagggacgaaagtattcagcaacaagggtaaatttgtgtacctgttggctcctactcctgaactatggacattggttttaagccacaggactcaaattctttacattgcggatattagctttgtggttatgtatctagaagtcgtgcctggctgtgttgttcttgagtcaggcacaggtagtggttcgctttcgacctcacttgctcgagctgtggctccaactggacacgtttattcatttgatttccatgagcagcgagctgtctctgcaagggaagattttgagaagacgggcataagtagtttagtaaccgtagaggttagagacattcaaggagagggttttcctgagaaactgtcaggtttggctgattctgtgtttctagaccttccacagccttggcttgcggttccttctgcagcaaagatgttaaagcaggatggagttctatgctctttctcaccttgcatcgagcaagtacaacggacttgtgaagtcctcagatcagatttcattgagataagaacgtttgaggtgcttctcagaacatatgaagtgaaggaagtgaaaatggataccagtagcatggttggtgagagccacgaggaggacaatgaaggaatgaggccttgcaagagaaagcaccgttcaaacgaaaacgacactgtttcacaggacaactcttctaatgcttcttcagtcgtcatggctcggccttgtagtgaagcaagaggtcacaccggttacttaacgtttgcaagactccaatgtctagcttagtccaaattctccaactacattatgatattcatgtattagatattttcatgatttgtcttattacgctttctctttgttaaaaaaaataattgctgtgaatttgtttctagaatacaaaattc

SEQ ID NO: 6693 - protein, 318 aa, Arabidopsis thaliana
MLPTESKKAFSFKRCIEDGDLVIVYERHDVMKPVKVSKDGVLQNRFGVYKHSDWIGKPLGTKVFSNKGKFVYLLAPTPELWTLVLSHRTQILYIADISFVVMYLEVVPGCVVLESGTGSGSLSTSLARAVAPTGHVYSFDFHEQRAVSAREDFEKTGISSLVTVEVRDIQGEGFPEKLSGLADSVFLDLPQPWLAVPSAAKMLKQDGVLCSFSPCIEQVQRTCEVLRSDFIEIRTFEVLLRTYEVKEVKMDTSSMVGESHEEDNEGMRPCKRKHRSNENDTVSQDNSSNASSVVMARPCSEARGHTGYLTFARLQCLA

SEQ ID NO: 6694 - protein, 288 aa, Arabidopsis thaliana
MKPVKVSKDGVLQNRFGVYKHSDWIGKPLGTKVFSNKGKFVYLLAPTPELWTLVLSHRTQILYIADISFVVMYLEVVPGCVVLESGTGSGSLSTSLARAVAPTGHVYSFDFHEQRAVSAREDFEKTGISSLVTVEVRDIQGEGFPEKLSGLADSVFLDLPQPWLAVPSAAKMLKQDGVLCSFSPCIEQVQRTCEVLRSDFIEIRTFEVLLRTYEVKEVKMDTSSMVGESHEEDNEGMRPCKRKHRSNENDTVSQDNSSNASSVVMARPCSEARGHTGYLTFARLQCLA

SEQ ID NO: 6695 - protein, 217 aa, Arabidopsis thaliana
MYLEVVPGCVVLESGTGSGSLSTSLARAVAPTGHVYSFDFHEQRAVSAREDFEKTGISSLVTVEVRDIQGEGFPEKLSGLADSVFLDLPQPWLAVPSAAKMLKQDGVLCSFSPCIEQVQRTCEVLRSDFIEIRTFEVLLRTYEVKEVKMDTSSMVGESHEEDNEGMRPCKRKHRSNENDTVSQDNSSNASSVVMARPCSEARGHTGYLTFARLQCLA

SEQ ID NO: 6696 - DNA, 1148 bp, Arabidopsis thaliana
actatctatttcttctttcatcatcatcatcatcatcatcatcactctctcttcttcttctctctattccatggctttagtacgtgaacgtcgtcagctaaatctccgtcttcctcttcctccaatctccgaccgccgcttctccacctcttcctcctcagccaccaccaccaccgtcgctggctgtaacggaatctccgcttgtgatctcgagaaactcaacgttctcggatgcggaaacggcgggattgtttacaaagtccgtcataaaaccacatcggagatctacgctttgaaaacagttaacggcgacatggatccgattttcacaagacagttgatgcgagagatggagattctccgacgtacagattcaccgtacgtcgttaaatgtcacggaatcttcgagaaacctgtcgtcggtgaagtatcgattctaatggagtatatggacggcggaaccctagaatcactacgcggcggtgtaacggagcaaaaactcgccggattcgctaaacagatcttaaaaggattaagctatttacacgctcttaagatcgttcatcgtgatataaaacccgcgaatcttcttctcaattcgaaaaacgaagttaaaatcgccgatttcggagttagtaagatattagtccgatcattagattcgtgtaattcgtatgttggtacttgtgcttatatgagtccggagaggtttgattcggaatcttccggtggaagctctgatatctacgccggagatatctggagttttggattgatgatgcttgagcttctcgttggtcattttccgttgcttccgccgggacagagacctgattgggcaacgttgatgtgcgcggtgtgttttggagaaccgccgcgagcgccggagggttgttctgaagagtttaggagcttcgttgagtgttgtctccgtaaagattcgagtaagcgatggacggcgccgcagcttcttgctcatccttttctccgggaagatctttgattcgattccttttgtaacagaatctggaatcttaaaagttggaatattagatttgaaattattttaatttttgtagagttttctggagatatttatgatcgtgatttttgtacatactgtataatatactccagaatgttagggc

SEQ ID NO: 6697 - protein, 333 aa, Arabidopsis thaliana
LSISSFIIIIIIIITLSSSSLYSMALVRERRQLNLRLPLPPISDRRFSTSSSSATTTTVAGCNGISACDLEKLNVLGCGNGGIVYKVRHKTTSEIYALKTVNGDMDPIFTRQLMREMEILRRTDSPYVVKCHGIFEKPVVGEVSILMEYMDGGTLESLRGGVTEQKLAGFAKQILKGLSYLHALKIVHRDIKPANLLLNSKNEVKIADFGVSKILVRSLDSCNSYVGTCAYMSPERFDSESSGGSSDIYAGDIWSFGLMMLELLVGHFPLLPPGQRPDWATLMCAVCFGEPPRAPEGCSEEFRSFVECCLRKDSSKRWTAPQLLAHPFLREDL

SEQ ID NO: 6698 - protein, 310 aa, Arabidopsis thaliana; identical to SEQ ID NO: 1983

SEQ ID NO: 6699 - protein, 229 aa, Arabidopsis thaliana; identical to SEQ ID NO: 1984

SEQ ID NO: 6700 - DNA, 1232 bp, Arabidopsis thaliana
aaatagaaatttgtggtgcttcattggatcgacgaaaggcgtcccgatattgaggttcgttacgccggcgaagattttcatcggaaacttatctgatcgtttacgccggcgaagatttccatcggaaacttaatctgatcggaaggaagaaggctcgatgaagagcagattgaagagctacaggaggaagaagctagggttagccacagttatcgtcttctgttctctctgtttcctcttcggtttctatggctccactctactttctcagaatgtgcctcgtgttaaacccaggttgagaatgttggatatggttgagaatggggaagaagaagctagctcgatgcctcatggtgttactggagaagaatctattggatcgattccttttcaggtacttagttggagacctagggctatatattttccgaattttgcaactgcagaacaatgccaagctattattgagagagcaaaggttaatctgaaaccttctgctttggctctccggaaaggagaaactgctgagaacactaagggcactagaacaagctcaggaacttttatcagtgcttcagaagagagtactggtgctctggattttgttgaaaggaaaatcgcaagagctacgatgatcccaaggtcccatggagagtcattcaatattttacggtatgaacttggccaaaagtatgattcccactatgatgttttcaacccaacagaatatggaccacaatcaagccaaaggattgcctccttcctgttgtacttatctgatgttgaagaaggcggtgaaaccatgttcccatttgagaacggttctaatatgggcatcggatacgattacaagcaatgtattgggttgaaagtaaagcctcggaaaggagatggtcttcttttttattccgtgtttccaaatggaacgattgatcagacttcgcttcacgggagctgcccggtgaccaaaggagagaaatgggtggcaaccaaatggatcagagaccaagaccaggaagaataagttaggtttttttccatatatctatctcagtctcacagcttctatcttttgactaaaaatctgctgctggatccctcgtgtacagttcttcgctgaaacagtgtaactatttagctttcttataatgcgaatgatacaaaaattaaaacctgataatgaaaacttggttcgaaatatcatttgaacaatagaagtttcttgttgtttg

SEQ ID NO: 6701 - protein, 288 aa, Arabidopsis thaliana
MKSRLKSYRRKKLGLATVIVFCSLCFLFGFYGSTLLSQNVPRVKPRLRMLDMVENGEEEASSMPHGVTGEESIGSIPFQVLSWRPRAIYFPNFATAEQCQAIIERAKVNLKPSALALRKGETAENTKGTRTSSGTFISASEESTGALDFVERKIARATMIPRSHGESFNILRYELGQKYDSHYDVFNPTEYGPQSSQRIASFLLYLSDVEEGGETMFPFENGSNMGIGYDYKQCIGLKVKPRKGDGLLFYSVFPNGTIDQTSLHGSCPVTKGEKWVATKWIRDQDQEE

SEQ ID NO: 6702 - protein, 240 aa, Arabidopsis thaliana
MLDMVENGEEEASSMPHGVTGEESIGSIPFQVLSWRPRAIYFPNFATAEQCQAIIERAKVNLKPSALALRKGETAENTKGTRTSSGTFISASEESTGALDFVERKIARATMIPRSHGESFNILRYELGQKYDSHYDVFNPTEYGPQSSQRIASFLLYLSDVEEGGETMFPFENGSNMGIGYDYKQCIGLKVKPRKGDGLLFYSVFPNGTIDQTSLHGSCPVTKGEKWVATKWIRDQDQEE

SEQ ID NO: 6703 - protein, 237 aa, Arabidopsis thaliana
MVENGEEEASSMPHGVTGEESIGSIPFQVLSWRPRAIYFPNFATAEQCQAIIERAKVNLKPSALALRKGETAENTKGTRTSSGTFISASEESTGALDFVERKIARATMIPRSHGESFNILRYELGQKYDSHYDVFNPTEYGPQSSQRIASFLLYLSDVEEGGETMFPFENGSNMGIGYDYKQCIGLKVKPRKGDGLLFYSVFPNGTIDQTSLHGSCPVTKGEKWVATKWIRDQDQEE

SEQ ID NO: 6704 - DNA, 1755 bp, Arabidopsis thaliana
acgattcagattttcaaaattgaattttgtagtgatctctctcctatataaacttcctcactcttcttccatttcaaatctctctctctgtagtcaaaattagggtttatttattcataaggaagagcatttcgaattctgtagttcaaaattgaagatcatgtcggcgtcaacggtgtcaatcaccgctagtcctaggacaataaggcggacgccggttctctccggtgagaagaaatctaattttgatttcccgccgagcgaatctcatgccaatgcggcaattggagagtcgtctgctggtacgaacaaggatctgattcgcgccgaggctgccggtgagagatccaacacctacgacgtaggtccggtgacaaggaaatcaggatccaccgcgacggggactaatacaaccaccacgcagcgtcggacgcggaagtctcaggggaataagatagatagagggaaatggaagacagtggttagggtattcgcgaagcaatttggggctcttttgttacttgttggattgattcagttgattaggaaattgactttgaaggattcgtctctgtcttcttcgaatttcccaattgaaacggaaatggtgctttcggaattggagagtcggatttctgcagttgatggtttggtgaagactacgacgaagatgatgcaggttcaagttgagtttcttgataagaagatggatagtgaatcaagagcattgaggcagacgatagattccacatcttctgtgttacatagtgagttgaagaaggtagagtctaagacagagaggttacaggtttctgtagatgagttaaatgctaaacctttggtgtctagagaggagttagagagagtttacgaggagttgaagaagggtaaggtcggtgattctgatgttaacattgataaactgagggcttatgctcgtgacatagtggagaaagagatagggaaacatgttgcagatggccttggtcgagtagattatgcgttagcgtctggtggagcttttgtaatggggcattcggatccgtttcttgttggaaatgggcgtaattggtttgggacaagcaggagacgggttcatagcaaagcggttaagatgttaactccgagtttcggggagcctggacagtgttttcctctgaaaggaagcaatggatatgttctagtcaggctaagagcaccaataattccagaagctgttactttggaacatgtctctaaggctgtagcatatgacagatcgagcgccccaaaggattgccgtgtatcaggatggctaggtgacatagatatggagactgagacaatgccccttcttacagaattcagttacgacttagacaggtccaatgcacagacattcgacattgcagactctgctcactcaggacttgtcaacactgtcaggctagacttcaattccaaccatggaagctcttcacacacttgcatctaccgcttcagggttcatggccgtgaactagactcagtctctgttgctcatgcttgatctgaaagtccacgtcaaacttttcttctctttgtaacattccctctaatagatatctctcttctttttttgtgttagtttatgtggtgggaaagcttctcttagtctgtaatcagaatcatttggttgtattcgtgattattagcttcaaatctgttttggttcggtttatttggtcagggtatgtatcctccgaattgaataatatagatcttagtttgatgtcc

SEQ ID NO: 6705 - protein, 455 aa, Arabidopsis thaliana
MSASTVSITASPRTIRRTPVLSGEKKSNFDFPPSESHANAAIGESSAGTNKDLIRAEAAGERSNTYDVGPVTRKSGSTATGTNTTTTQRRTRKSQGNKIDRGKWKTVVRVFAKQFGALLLLVGLIQLIRKLTLKDSSLSSSNFPIETEMVLSELESRISAVDGLVKTTTKMMQVQVEFLDKKMDSESRALRQTIDSTSSVLHSELKKVESKTERLQVSVDELNAKPLVSREELERVYEELKKGKVGDSDVNIDKLRAYARDIVEKEIGKHVADGLGRVDYALASGGAFVMGHSDPFLVGNGRNWFGTSRRRVHSKAVKMLTPSFGEPGQCFPLKGSNGYVLVRLRAPIIPEAVTLEHVSKAVAYDRSSAPKDCRVSGWLGDIDMETETMPLLTEFSYDLDRSNAQTFDIADSAHSGLVNTVRLDFNSNHGSSSHTCIYRFRVHGRELDSVSVAHA

SEQ ID NO: 6706 - protein, 307 aa, Arabidopsis thaliana
MVLSELESRISAVDGLVKTTTKMMQVQVEFLDKKMDSESRALRQTIDSTSSVLHSELKKVESKTERLQVSVDELNAKPLVSREELERVYEELKKGKVGDSDVNIDKLRAYARDIVEKEIGKHVADGLGRVDYALASGGAFVMGHSDPFLVGNGRNWFGTSRRRVHSKAVKMLTPSFGEPGQCFPLKGSNGYVLVRLRAPIIPEAVTLEHVSKAVAYDRSSAPKDCRVSGWLGDIDMETETMPLLTEFSYDLDRSNAQTFDIADSAHSGLVNTVRLDFNSNHGSSSHTCIYRFRVHGRELDSVSVAHA

SEQ ID NO: 6707 - protein, 285 aa, Arabidopsis thaliana
MMQVQVEFLDKKMDSESRALRQTIDSTSSVLHSELKKVESKTERLQVSVDELNAKPLVSREELERVYEELKKGKVGDSDVNIDKLRAYARDIVEKEIGKHVADGLGRVDYALASGGAFVMGHSDPFLVGNGRNWFGTSRRRVHSKAVKMLTPSFGEPGQCFPLKGSNGYVLVRLRAPIIPEAVTLEHVSKAVAYDRSSAPKDCRVSGWLGDIDMETETMPLLTEFSYDLDRSNAQTFDIADSAHSGLVNTVRLDFNSNHGSSSHTCIYRFRVHGRELDSVSVAHA

SEQ ID NO: 6708 - DNA, 1559 bp, Arabidopsis thaliana
ctttttttcattttgttctgagggggcttttgtgttgacggtggtgggaacaaaggaacatcgtatccattctgtccgggaaacacagcaatgttcatttccgacaaatctcgtcctactgatttctacaaagacgatcatcacaattcctccaccaccagcaccacacgcgatatgatgatcgatgtactcaccactaccaacgaatcagtagatctacaatctcaccaccaccacaatcacaatcaccacaatcatcatctccaccaatctcagccacaacaacagattctcctcggagaaagcagtggagaagatcacgaagttaaagcaccaaagaaacgagcggagacatgggttcaagacgaaactcgtagcttaatcatgttccgtagaggtatggatggtttattcaatacatccaaatctaataaacatctctgggaacagatttcgtctaagatgagagaaaaagggtttgatcgatctccgactatgtgtactgataaatggaggaatctgttgaaagagtttaagaaagctaagcatcatgatagaggaaatggatcggcgaagatgtcgtattacaaagagattgaagatattcttagagagaggagcaaaaaagtgacaccaccacagtataataagagccctaatacaccacctacatcagccaaagttgattcctttatgcaatttactgataaaggttttgatgatacgagcatttcttttggatccgttgaagctaatggcaggccagccttaaaccttgaaaggcgtcttgatcatgatggtcatcctcttgcaatcactacagcagttgatgctgttgcagcaaatggagttactccttggaattggagagagactcctggaaacggtgatgatagtcatggtcagccttttggtggtagggtcataacagtgaaatttggtgactatacaagaagaatcggtgttgatggtagtgcagaagcaatcaaagaggtaatcagatctgcttttgggttaagaactcgaagggctttttggttagaagatgaagatcagattattcgctgtcttgaccgagacatgcccttagggaactatctactccgtctggatgatggactggccattagggtttgccattatgatgaatccaaccaattaccagtccattcagaagagaaaatcttctacactgaagaagactaccgcgagtttctggctctacagggatggtcaagcctgcaagttgatggttttaggaacatagaaaacatggatgatcttcaacctggtgctgtgtatcgaggtgtgagatgaggaaatgagatcacaaaacttcttctccaattctatcaacagttatctgaacagaaaacagtcccctgtagatatgatctcattctctttatacatttcttctttttttcatgtacttgctcaaatatgaaatatcataactggcatttaccgtacagaccaagaagacctcaaaatagatttttggtctgttacatttgtaagaacagaacataagagaagtgaataaattgttcacaatc

SEQ ID NO: 6709 - protein, 408 aa, Arabidopsis thaliana
MFISDKSRPTDFYKDDHHNSSTTSTTRDMMIDVLTTTNESVDLQSHHHHNHNHHNHHLHQSQPQQQILLGESSGEDHEVKAPKKRAETWVQDETRSLIMFRRGMDGLFNTSKSNKHLWEQISSKMREKGFDRSPTMCTDKWRNLLKEFKKAKHHDRGNGSAKMSYYKEIEDILRERSKKVTPPQYNKSPNTPPTSAKVDSFMQFTDKGFDDTSISFGSVEANGRPALNLERRLDHDGHPLAITTAVDAVAANGVTPWNWRETPGNGDDSHGQPFGGRVITVKFGDYTRRIGVDGSAEAIKEVIRSAFGLRTRRAFWLEDEDQIIRCLDRDMPLGNYLLRLDDGLAIRVCHYDESNQLPVHSEEKIFYTEEDYREFLALQGWSSLQVDGFRNIENMDDLQPGAVYRGVR

SEQ ID NO: 6710 - protein, 380 aa, Arabidopsis thaliana
MMIDVLTTTNESVDLQSHHHHNHNHHNHHLHQSQPQQQILLGESSGEDHEVKAPKKRAETWVQDETRSLIMFRRGMDGLFNTSKSNKHLWEQISSKMREKGFDRSPTMCTDKWRNLLKEFKKAKHHDRGNGSAKMSYYKEIEDILRERSKKVTPPQYNKSPNTPPTSAKVDSFMQFTDKGFDDTSISFGSVEANGRPALNLERRLDHDGHPLAITTAVDAVAANGVTPWNWRETPGNGDDSHGQPFGGRVITVKFGDYTRRIGVDGSAEAIKEVIRSAFGLRTRRAFWLEDEDQIIRCLDRDMPLGNYLLRLDDGLAIRVCHYDESNQLPVHSEEKIFYTEEDYREFLALQGWSSLQVDGFRNIENMDDLQPGAVYRGVR

SEQ ID NO: 6711 - protein, 379 aa, Arabidopsis thaliana
MIDVLTTTNESVDLQSHHHHNHNHHNHHLHQSQPQQQILLGESSGEDHEVKAPKKRAETWVQDETRSLIMFRRGMDGLFNTSKSNKHLWEQISSKMREKGFDRSPTMCTDKWRNLLKEFKKAKHHDRGNGSAKMSYYKEIEDILRERSKKVTPPQYNKSPNTPPTSAKVDSFMQFTDKGFDDTSISFGSVEANGRPALNLERRLDHDGHPLAITTAVDAVAANGVTPWNWRETPGNGDDSHGQPFGGRVITVKFGDYTRRIGVDGSAEAIKEVIRSAFGLRTRRAFWLEDEDQIIRCLDRDMPLGNYLLRLDDGLAIRVCHYDESNQLPVHSEEKIFYTEEDYREFLALQGWSSLQVDGFRNIENMDDLQPGAVYRGVR

SEQ ID NO: 6712 - DNA, 1261 bp, Arabidopsis thaliana
gacaaagaacccatcggagaagaggaataagatcagtgtagagctatcgggaaatttatctgaagaggaaattgaaatttagggtttagggtaaaaaatggtaggaggagtagaagaattgagtattgaacagttagcttcgagtatctctacctacaaagaacaactcgaacaggttaggcagcttttgtcagaggatcctaggaactcggaatatgcagacatggaaaaggagcttaaagaggtgattgcattgacagaggaagttcttgcaactgcaaagcaaaatgagatttctctatcagatgccggagttagtgctgaagcaactcctggctcacccgatttagagggtgcttgggaaaagacgggtttaaggaatgacccaatccatgagggtaagttccctgttggaactaaagttcaagctgtctttagtgacgatggcgagtggtatgatgcgaccattgaggcacatactgcaaatggctattttgttgcttatgatgagtggggaaacaaggaagaggtggatccagataatgtgaggccaatcgagcaaaatgctattgtcgaagctgagagattagctcaagctaccaaaaatgctctcaaaagaaagattgagaaagctgcgagttctgattatcagacaaaaactctaccagcaaagctcaaaatcgatcctaatgatcccgaggatgtaaaaatagctaagcgtaagaagatacatgctttcaaatccaaggcaaggtttgagcaactcgaggttgtgcagaacaagaaacagaatgattggcaacagtttcagacgactaaagccaaaactaaaaaggtagggttcttcacagggaggaagaaagagagtatatttaaatcacctgaggatccatttggaaaagtgggtgtgactggaagtgggaaaggtttgacagatttccaaaagcgagagaagcatcttcatctcaagtctggtaatgctgagggcactgatgaatgaacgagagatttttatgcttttgtaaggattttcagtgactatgatgaatagagccacagccaaaacggcattaccgttaacattgttgttgtttcttcttcggatggtaagttgtctattgatgaatcactctcactgtctcatattgaactgtgccgcatcatacggtttatgtttaaaatactaattcagaaaaactttagacccaccaatttaatgtatttgtatcaagtttcataatgaaaaatggtattaactgtc

SEQ ID NO: 6713 - protein, 300 aa, Arabidopsis thaliana
MVGGVEELSIEQLASSISTYKEQLEQVRQLLSEDPRNSEYADMEKELKEVIALTEEVLATAKQNEISLSDAGVSAEATPGSPDLEGAWEKTGLRNDPIHEGKFPVGTKVQAVFSDDGEWYDATIEAHTANGYFVAYDEWGNKEEVDPDNVRPIEQNAIVEAERLAQATKNALKRKIEKAASSDYQTKTLPAKLKIDPNDPEDVKIAKRKKIHAFKSKARFEQLEVVQNKKQNDWQQFQTTKAKTKKVGFFTGRKKESIFKSPEDPFGKVGVTGSGKGLTDFQKREKHLHLKSGNAEGTDE

SEQ ID NO: 6714 - protein, 258 aa, Arabidopsis thaliana
MEKELKEVIALTEEVLATAKQNEISLSDAGVSAEATPGSPDLEGAWEKTGLRNDPIHEGKFPVGTKVQAVFSDDGEWYDATIEAHTANGYFVAYDEWGNKEEVDPDNVRPIEQNAIVEAERLAQATKNALKRKIEKAASSDYQTKTLPAKLKIDPNDPEDVKIAKRKKIHAFKSKARFEQLEVVQNKKQNDWQQFQTTKAKTKKVGFFTGRKKESIFKSPEDPFGKVGVTGSGKGLTDFQKREKHLHLKSGNAEGTDE

SEQ ID NO: 6715 - DNA, 937 bp, Arabidopsis thaliana
aattcctcttgttttgtttctctttcataatctccaatcttcttcggattcgacgaatccgtcatcgccgacggaatcgtggccgtgtaatattaacagatggggaagaagagaaaatcaacagccacaagcctcgatgaggtagatcggactgtttacgcttcttttcgcaccgccgctaactctttatctcagctttatactcagtctatgaatcatcagaagttatcttttcaagccggtgaacgccatggtttggaaaaactgtaccaatggatatggagacaacaagaaggagggtcaagagtgacacctatggatattgtcaattatattcagaacgagctcgaatgctgcatagacgagcctccaatatccccaagagcgccaccaccgcaaccaacaatgcatgtcacgaatcccgggctcatgaccacttcaggcacctctttcccaacagctgttccagtggttaggtccgagcagtgtgagaaccaggccaagaactcggttttctcaaacgcactttcaagcccaatacggcgtagtcttcagaactaccaaattccgcagggaggctacacatccggcggaaccaccagaagcagtgaagtgaacaggggatctaactctccaggttctattgattcttcaatggacatgcatgcagaataagaagtgtgatcgtaaacacaactcttgtttaatgatgtttgatctatatacaaaaaccggtttgattcctcataatgtatcaattgattcttatcttggaggtttgtttgttggtaattttgttagagtttctaaaaggtcacatgtaaatcattgtgtgtctgattattattatcacttgtttaactcttttaacttttcatcttttaaactacttgatgaccaagagttttcacatctacttgaatactcttttaaccct

SEQ ID NO: 6716 - protein, 191 aa, Arabidopsis thaliana
MGKKRKSTATSLDEVDRTVYASFRTAANSLSQLYTQSMNHQKLSFQAGERHGLEKLYQWIWRQQEGGSRVTPMDIVNYIQNELECCIDEPPISPRAPPPQPTMHVTNPGLMTTSGTSFPTAVPVVRSEQCENQAKNSVFSNALSSPIRRSLQNYQIPQGGYTSGGTTRSSEVNRGSNSPGSIDSSMDMHAE

SEQ ID NO: 6717 - protein, 154 aa, Arabidopsis thaliana
MNHQKLSFQAGERHGLEKLYQWIWRQQEGGSRVTPMDIVNYIQNELECCIDEPPISPRAPPPQPTMHVTNPGLMTTSGTSFPTAVPVVRSEQCENQAKNSVFSNALSSPIRRSLQNYQIPQGGYTSGGTTRSSEVNRGSNSPGSIDSSMDMHAE

SEQ ID NO: 6718 - protein, 119 aa, Arabidopsis thaliana
MDIVNYIQNELECCIDEPPISPRAPPPQPTMHVTNPGLMTTSGTSFPTAVPVVRSEQCENQAKNSVFSNALSSPIRRSLQNYQIPQGGYTSGGTTRSSEVNRGSNSPGSIDSSMDMHAE

SEQ ID NO: 6719 - DNA, 951 bp, Arabidopsis thaliana
acccatatctcacgcttaattacagtattgccactcattaaaaccgtaccatcttaaccaaagcgataacccgtaccaccggttcagctatggaggatttattggaggagaggctaactcggactgactctgtcgggaataaacgagtcagagacgggttagacctcgactcgccggacgtgaagcggttaagagatgatttgttcgatgactcggggcttgacccagtgagtcaagatcttgactcggtgatgaagagtttcgagaatgagttatcgacaacgacggcggcgctaagctccggtgaaactcagccggatcttggataccttttcgaagcttctgatgacgagctgggtttgccaccgccgcttacgccaccgcaaacgcttcttcctccgtcgtgtgaggaaacggtgacggaattggtacgagcctcgtcggattcatcagaggttggagagttatgtgggtttgaggatcatgttacggagttcggaccttgcgatcttggtgatgatgggcttttcgaatatttcgatgggtgtttagattccggcgatttgttttcatggcggccggagtttttaccggcggagtaacaacataccggacctttttaaaaaagcgggctacgaacggtgacgttttgttaagcgttttgcctcgctttttcttttttcttttttttccctctattattggataataggtattaggatctatatattttgttaagttattaggattagaaaaatcaaaatgtttttagtaggagtaagtggtttagattagtttgtaagaacttttttctcttcaggaactgttaatctttaatcgcctttatcatttcgttagcttttgtgttaatgttacaatcttatatgatcatggatgtattcggtattccagagatcagaattattaaaaagattttcatatcagaatctg

SEQ ID NO: 6720 - protein, 170 aa, Arabidopsis thaliana
MEDLLEERLTRTDSVGNKRVRDGLDLDSPDVKRLRDDLFDDSGLDPVSQDLDSVMKSFENELSTTTAALSSGETQPDLGYLFEASDDELGLPPPLTPPQTLLPPSCEETVTELVRASSDSSEVGELCGFEDHVTEFGPCDLGDDGLFEYFDGCLDSGDLFSWRPEFLPAE

SEQ ID NO: 6721 - protein, 116 aa, Arabidopsis thaliana
MKSFENELSTTTAALSSGETQPDLGYLFEASDDELGLPPPLTPPQTLLPPSCEETVTELVRASSDSSEVGELCGFEDHVTEFGPCDLGDDGLFEYFDGCLDSGDLFSWRPEFLPAE

SEQ ID NO: 6722 - DNA, 954 bp, Arabidopsis thaliana
aaaaaagataaaacaaaagctgaaaggaggaaaccagaggaaggagacgacgaccaccaccacaacgcatctcagctcttccttaatccatggcagacaagggccgcccgttgccgaagtttggaagagctgagatgcgttgtggtggtggtcgtcgcctccttcttcaatctcatcgcaatcatgatcatatccgagactaatcgccgtgagatctccaagtacctcttcaaagagggtgttttgtttgccaaaaaggatttcaatttaccacaacatcctttgattgagagtgttccaaatctgcaagttatcaagttgatgcagagtttcaaatctaaggaatatgtgagagagacctttgcttggatgcattactactggttcctcacaaatgaaggtattgactttcttaggacttaccttaatctcccatctgagattgttcctgctactctgaagaagcaacagaagcctcttggtcgaccttttggaggtggtggtgaccgtccccgtggccctcctcgtggtgatggagagaggaggtttggtgacagagatggataccgtggaggtcctaaatcaggtggagagtatggtgacaaggctggagcacctgctgattaccagcctggcttcaggggtggagctagtggagcaaggcaagggtttggtcgtggagctggtggttttggtggtggtgctggtccagctgctggatctgatctaccttgaaaaggactttcttgtttctttttggtcttatttaaggttacatagcaccttattgagaacgaatgtgtcttttggaactttgtttctttctcttaaaccatttcacaatatgattgtttttttacgttagaattttatgaagaaatgttggatcgttacatgaatctttttacactgtcctcctttttaaattctcctatttagtttttttcgaagctt

SEQ ID NO: 6723 - protein, 244 aa, Arabidopsis thaliana
KKDKTKAERRKPEEGDDDHHHNASQLFLNPWQTRAARCRSLEELRCVVVVVVASFFNLIAIMIISETNRREISKYLFKEGVLFAKKDFNLPQHPLIESVPNLQVIKLMQSFKSKEYVRETFAWMHYYWFLTNEGIDFLRTYLNLPSEIVPATLKKQQKPLGRPFGGGGDRPRGPPRGDGERRFGDRDGYRGGPKSGGEYGDKAGAPADYQPGFRGGASGARQGFGRGAGGFGGGAGPAAGSDLP

SEQ ID NO: 6724 - protein, 183 aa, Arabidopsis thaliana
MIISETNRREISKYLFKEGVLFAKKDFNLPQHPLIESVPNLQVIKLMQSFKSKEYVRETFAWMHYYWFLTNEGIDFLRTYLNLPSEIVPATLKKQQKPLGRPFGGGGDRPRGPPRGDGERRFGDRDGYRGGPKSGGEYGDKAGAPADYQPGFRGGASGARQGFGRGAGGFGGGAGPAAGSDLP

SEQ ID NO: 6725 - protein, 137 aa, Arabidopsis thaliana
MQSFKSKEYVRETFAWMHYYWFLTNEGIDFLRTYLNLPSEIVPATLKKQQKPLGRPFGGGGDRPRGPPRGDGERRFGDRDGYRGGPKSGGEYGDKAGAPADYQPGFRGGASGARQGFGRGAGGFGGGAGPAAGSDLP

SEQ ID NO: 6726 - DNA, 930 bp, Arabidopsis thaliana
atctccgatttagatagaaacaacaatcctccggtggtcactcgctaatctccgtttgatctcgccgacactcgagccttttaccgatgaaggatggagattccttaccaataagcacttcttccgtcgcggcgacgacggtgaccggaaagaaggaaaccggttattccgctctcttctcgaaaggccggtacaagttttgggccttagctgcgattctgttactcgctttctggtcaatgctcactggcacggtcaatctccgttggtctgccggtaacattaaccatttcaccgacgatctcgtctttcccatccacgaggatctcgatgttcttgaaatggaggagagggagaaagtggtgaagcacatgtgggatgtgtataacaatggccgtcgtatcagattacctaggttttggcaagaggccttcgaggctgcttacgaggagcttaccagtgatgtacctgatgtggttgaggctgccatttccgagatcgctaggatgtctattcgctccattgttatagatccgcctccgcttcattccacgaatgtacgagaattgacaaagactctaaaacttgcggacaaaggaagagcaactcaaatatcaaaaccaagcagccgtcgattgaaatagctatggaggctttacgaaaaaggtagtgtagcagtcagccgtcgtggcgtgaccatacatatacttgatgtcagaaagatcaatcaacctcatccctagaatatatgtccatcattagtgttattttttcttccactaggggcattaatcctttcactatcatcatcatctcttctataaacaaaattttgaggaagctttttatccacaccttattagctctgaacggtaatgtcttttattttggatttatgaaatatttcatatgtagttagcccatacattt

SEQ ID NO: 6727 - protein, 185 aa, Arabidopsis thaliana
MKDGDSLPISTSSVAATTVTGKKETGYSALFSKGRYKFWALAAILLLAFWSMLTGTVNLRWSAGNINHFTDDLVFPIHEDLDVLEMEEREKVVKHMWDVYNNGRRIRLPRFWQEAFEAAYEELTSDVPDVVEAAISEIARMSIRSIVIDPPPLHSTNVRELTKTLKLADKGRATQISKPSSRRLK

SEQ ID NO: 6728 - protein, 134 aa, Arabidopsis thaliana
MLTGTVNLRWSAGNINHFTDDLVFPIHEDLDVLEMEEREKVVKHMWDVYNNGRRIRLPRFWQEAFEAAYEELTSDVPDVVEAAISEIARMSIRSIVIDPPPLHSTNVRELTKTLKLADKGRATQISKPSSRRLK

SEQ ID NO: 6729 - protein, 100 aa, Arabidopsis thaliana
MEEREKVVKHMWDVYNNGRRIRLPRFWQEAFEAAYEELTSDVPDVVEAAISEIARMSIRSIVIDPPPLHSTNVRELTKTLKLADKGRATQISKPSSRRLK

SEQ ID NO: 6730 - DNA, 1635 bp, Arabidopsis thaliana
aaacgaaaaccctcgggattcctctgcttctgtctcgtccgtcgtcgtcaatttctctgcatcagagattccggtgtccttcttcctttcactcgcgtataacctcttttccttgacgttgtctccgtgagctctctgtgctttgactgcaaccatgtcgactattatgcagaagatcaaagaaattgaagatgagatggctaaaacacagaagaataaagctacttctcatcatctgggtttgttaaaggccaagcttgctaagcttcggagggaccttcttgcaccgcctaccaaaggtggcggtggtggtgctggagaaggttttgatgtgactaaaagtggagattctagagttggactggtcggatttccttcggttggaaaatctacgctattaaacaagctgactgggacattttccgaggttgcttcttatgagttcacgactttgacatgcattcctggtgttatcacatatcgtggagctaaaatccagttattagatcttcctggtattattgagggtgctaaagatggaaaaggtagaggaagacaggttataagtacggctaggacatgcaactgcatcttaatagttcttgatgccataaaaccaattactcacaagcgtctcattgaaaaagagctcgaaggattcggaataaggttgaacaaggagccaccaaatttaacatttaggaaaaaagacaaaggtggtatcaatctaacttctacagtcgctgtcacacaccttgaccttgacaccgtcaaggcgatttgcggtgagtacaggatgcacaatgctgacatcaccctgcgctacgatgcaaccgctgatgacctcattgatgtcatcgagggcagtcggatttatatgccctgtatctatgctgtcaacaagatcgattcaatcacacttgaggaacttgaaattttggacaaacttcctcattactgtcctgtcagtgcgcatctggagtggaatcttgatggacttctggacaagatatgggaatacttggatctaactcgaatctacacaaaaccaaaggcaatgaatccggattatgatgatcccgtaatcttatcatccaagaagagaacagtagaggacttctgcatccggattcacaaagacatgcttaaacaattcaagtacgctctggtttggggttcaagtgccaaacacaagccacaaagagttggaaaggaacacgagcttgaggacgaggatgttgttcagatcgttaaaaagatatgatttttgcagataatggagagcagtcaagagaccaaccaaagtagccataatgagatctcctataggaaggtcaggatttcttttggtttctcagctttatctttcttttgtaattgtattattatatccagacgaaatctgtgtctacacccttttttatgtcttattagatacttttgtcttcttccaataatactattaagcatgtgattgatgttgtcggaacacctcctattatctccagtatgggtttgcctagattttctcctcccttgtttttatgtatgcaactagacttttttggattttatttactaaacatatgattcagtttttcttcatgtaataaagaaaaactgttaaaacggcct

SEQ ID NO: 6731 - protein, 369 aa, Arabidopsis thaliana
MSTIMQKIKEIEDEMAKTQKNKATSHHLGLLKAKLAKLRRDLLAPPTKGGGGGAGEGFDVTKSGDSRVGLVGFPSVGKSTLLNKLTGTFSEVASYEFTTLTCIPGVITYRGAKIQLLDLPGIIEGAKDGKGRGRQVISTARTCNCILIVLDAIKPITHKRLIEKELEGFGIRLNKEPPNLTFRKKDKGGINLTSTVAVTHLDLDTVKAICGEYRMHNADITLRYDATADDLIDVIEGSRIYMPCIYAVNKIDSITLEELEILDKLPHYCPVSAHLEWNLDGLLDKIWEYLDLTRIYTKPKAMNPDYDDPVILSSKKRTVEDFCIRIHKDMLKQFKYALVWGSSAKHKPQRVGKEHELEDEDVVQIVKKI

SEQ ID NO: 6732 - protein, 365 aa, Arabidopsis thaliana
MQKIKEIEDEMAKTQKNKATSHHLGLLKAKLAKLRRDLLAPPTKGGGGGAGEGFDVTKSGDSRVGLVGFPSVGKSTLLNKLTGTFSEVASYEFTTLTCIPGVITYRGAKIQLLDLPGIIEGAKDGKGRGRQVISTARTCNCILIVLDAIKPITHKRLIEKELEGFGIRLNKEPPNLTFRKKDKGGINLTSTVAVTHLDLDTVKAICGEYRMHNADITLRYDATADDLIDVIEGSRIYMPCIYAVNKIDSITLEELEILDKLPHYCPVSAHLEWNLDGLLDKIWEYLDLTRIYTKPKAMNPDYDDPVILSSKKRTVEDFCIRIHKDMLKQFKYALVWGSSAKHKPQRVGKEHELEDEDVVQIVKKI

SEQ ID NO: 6733 - protein, 355 aa, Arabidopsis thaliana
MAKTQKNKATSHHLGLLKAKLAKLRRDLLAPPTKGGGGGAGEGFDVTKSGDSRVGLVGFPSVGKSTLLNKLTGTFSEVASYEFTTLTCIPGVITYRGAKIQLLDLPGIIEGAKDGKGRGRQVISTARTCNCILIVLDAIKPITHKRLIEKELEGFGIRLNKEPPNLTFRKKDKGGINLTSTVAVTHLDLDTVKAICGEYRMHNADITLRYDATADDLIDVIEGSRIYMPCIYAVNKIDSITLEELEILDKLPHYCPVSAHLEWNLDGLLDKIWEYLDLTRIYTKPKAMNPDYDDPVILSSKKRTVEDFCIRIHKDMLKQFKYALVWGSSAKHKPQRVGKEHELEDEDVVQIVKKI

SEQ ID NO: 6734 - DNA, 854 bp, Arabidopsis thaliana
  misc_feature (790)..(790): n is a, c, g, or t
  misc_feature (825)..(825): n is a, c, g, or t
tcgattggccaaatcggccctcgagttaattaaattaatccccccccccccccgatcttcttgtctctctctcatttcttgttattatccacgaacgaagaaaaacctagaaaacagttgaagaaagaaaatcacaagagaagccatggccggaattggaccgattactcaggattgggaaccagttgtgatccgcaagagagctcctaacgctgcagctaagcgcgacgagaagactgtcaacgccgctcgtcgaagcggcgccgatattgagaccgttcgaaaattcaatgctggatcgaacaaggctgcatcaagcggcacctccttgaacacaaagaagctagatgatgatactgagaacttatctcatgatcgtgtgcccactgaattgaagaaagccatcatgcaagctagaggggagaagaagctgactcagtcccaacttgcccatctgatcaatgagaagccacaagtgatccaagaatacgagtctgggaaagcaattccgaatcaacagatcctttcaaagctggagagggcacttggtgctaaactccgtggaaagaagtagaagtgtagaacaaagctcttaaaggtaacaacaaaagctgatcgcagtttctctccagtccacatgctttaccatatcctaaaaactatatctatgtatggtttggtttaatggcgtagtagtttgttgcgaggaatctttcatgatgtaagaaaaacaaagctgtttggaaccttttgtcattataaataatctcttctctttctttttcgtcangtctcgtaaactttatctgccacggatgtatgttnttaaagaaattgaagattgaaattggtcc

SEQ ID NO: 6735 - protein, 142 aa, Arabidopsis thaliana
MAGIGPITQDWEPVVIRKRAPNAAAKRDEKTVNAARRSGADIETVRKFNAGSNKAASSGTSLNTKKLDDDTENLSHDRVPTELKKAIMQARGEKKLTQSQLAHLINEKPQVIQEYESGKAIPNQQILSKLERALGAKLRGKK

SEQ ID NO: 6736 - DNA, 1311 bp, Arabidopsis thaliana
acttttgccctcactcacttgtcttcttcaatttcgccgacgacgaatccgacgtcagtaacttccgaccgcagtttccgaaactcgtgatcgctttctctttcgaaaatgttggcgtcggtacgggtgaatcagctgcaaagacttcttctctctgctcgtcgattatcttcttcaccaataatacctccgtcgcgtttacttcaccagcggctattctcgacttcagacactgatgcttcggctgcatctttttcttcttcgcatccgaaaatacaaacgcttgaaggcaaagcttctaataaaagccgaagcacatcgtcaacaacatctttgaatgaagatgaacttgccaaattctctgccattgctgatacctggtggcattctgaaggaccctttaaaccgttgcatcaaatgaatccaactcggttggctttcatccgctcgaccttatgcaggcacttcagtaaggatccgagttctgctaagccttttgaaggactgaaatttatcgatataggttgcggtggcggactactttctgagcctctagcacggatgggagcaactgtcacaggagttgatgctgttgataagaatgtcaaaattgctcgtcttcacgctgatatggatccagtgacttcaacgattgaatacttatgtactacagcagaaaagctagcggatgaaggcaggaagtttgatgctgttctttctttagaggtcatcgagcatgtagcaaaccctgcagagttctgtaagtcgttgtcagcattgactatccccaacggggctacagtactttctacaatcaatcgcactatgcgagcatatgcatcaaccattgttggagcagagtacattctacgttggcttcctaaaggcacacaccagtggtcaagttttgtaactcctgaagaaatgagtatgatattacaacgtgcttcagtcgatgtgaaagagatagctggatttgtgtacaacccaataacaggaagatggttattgtcagatgatattagtgtcaactatattgcttatgggacgaaaaggaaggatcttggagacatataatcaatcgttccaagtcgtgtttctctgcatatctgcttctgagttacaactctagttcatgctttaaaaactaggtactctggaagttgcttaggacgaggacagtagttgttttgcaataagtgagaaacattcaaagaatatttggtcttctgaatcacacttctgtcatctgatagaagattaatgtttgtcgatatctcgttttgtggtaaatatggcatagttcggagg

SEQ ID NO: 6737 - protein, 322 aa, Arabidopsis thaliana
MLASVRVNQLQRLLLSARRLSSSPIIPPSRLLHQRLFSTSDTDASAASFSSSHPKIQTLEGKASNKSRSTSSTTSLNEDELAKFSAIADTWWHSEGPFKPLHQMNPTRLAFIRSTLCRHFSKDPSSAKPFEGLKFIDIGCGGGLLSEPLARMGATVTGVDAVDKNVKIARLHADMDPVTSTIEYLCTTAEKLADEGRKFDAVLSLEVIEHVANPAEFCKSLSALTIPNGATVLSTINRTMRAYASTIVGAEYILRWLPKGTHQWSSFVTPEEMSMILQRASVDVKEIAGFVYNPITGRWLLSDDISVNYIAYGTKRKDLGDI

SEQ ID NO: 6738 - protein, 219 aa, Arabidopsis thaliana
MNPTRLAFIRSTLCRHFSKDPSSAKPFEGLKFIDIGCGGGLLSEPLARMGATVTGVDAVDKNVKIARLHADMDPVTSTIEYLCTTAEKLADEGRKFDAVLSLEVIEHVANPAEFCKSLSALTIPNGATVLSTINRTMRAYASTIVGAEYILRWLPKGTHQWSSFVTPEEMSMILQRASVDVKEIAGFVYNPITGRWLLSDDISVNYIAYGTKRKDLGDI

SEQ ID NO: 6739 - protein, 171 aa, Arabidopsis thaliana
MGATVTGVDAVDKNVKIARLHADMDPVTSTIEYLCTTAEKLADEGRKFDAVLSLEVIEHVANPAEFCKSLSALTIPNGATVLSTINRTMRAYASTIVGAEYILRWLPKGTHQWSSFVTPEEMSMILQRASVDVKEIAGFVYNPITGRWLLSDDISVNYIAYGTKRKDLGDI

SEQ ID NO: 6740 - DNA, 1025 bp, Arabidopsis thaliana
cacttggaaagaatccttcactcactttccctttaagaagcaagtctcctccacttgtacgataccaacatcatcagcatcacaaaaagtatcattatcatcttcatcgaattagatggcaccggtgaagaggagggtgttcaagacaaataatgaaatggcagtggagctggccaaatacacggctgatctttcctccaaattttgcaaagaaagaggagttttcaccgttgttctctccggcggcgacctcatagcctggctctggaaattgttagaagctccttatattgattcaattgagtggtctaagtggcacatcttttgggtcgacgagagggtttgtgcttgggatcatgcggatagcaactataaactcgcttacgatggttttctctccaaggttccagttccagctgaaaacatctacgctatcgataacggactcggggcagaaggcaacgccgagctagcagctgaaaggtacgaggagtgcctcaaacaaaaagtgaaccaaaacataatccgaacgtacaaatcttctggttttccacagttcgatcttcagcttctaggtatgggaccggacggtcacatggcgtctctattccctggacatgctcagatcaatgagaaggtgaaatgggtcacatctataaccgattcacctaagccaccgtcaaaaaggatcacattgactttaccggttatcaattgtgcttcctataatgttatggccgtatgtgataaagagcaggctgattcggttgcggctgctcttaatcataccaaagacttaccagctggtagactaaccgcggatgttgaagtggtttggttccttgaccaagctgctgcgtctaaactccctcatggctggtgctccatcctttgatttaaacgtttatgtttttgtctcactaagtcgtatggtttggtgttttgtaaaccgtgtattgcttaattacttgttatgttgtgtagcaacaccatattgtgatattgatcttggtgactttggtttt

SEQ ID NO: 6741 - protein, 259 aa, Arabidopsis thaliana
MAPVKRRVFKTNNEMAVELAKYTADLSSKFCKERGVFTVVLSGGDLIAWLWKLLEAPYIDSIEWSKWHIFWVDERVCAWDHADSNYKLAYDGFLSKVPVPAENIYAIDNGLGAEGNAELAAERYEECLKQKVNQNIIRTYKSSGFPQFDLQLLGMGPDGHMASLFPGHAQINEKVKWVTSITDSPKPPSKRITLTLPVINCASYNVMAVCDKEQADSVAAALNHTKDLPAGRLTADVEVVWFLDQAAASKLPHGWCSIL

SEQ ID NO: 6742 - protein, 245 aa, Arabidopsis thaliana
MAVELAKYTADLSSKFCKERGVFTVVLSGGDLIAWLWKLLEAPYIDSIEWSKWHIFWVDERVCAWDHADSNYKLAYDGFLSKVPVPAENIYAIDNGLGAEGNAELAAERYEECLKQKVNQNIIRTYKSSGFPQFDLQLLGMGPDGHMASLFPGHAQINEKVKWVTSITDSPKPPSKRITLTLPVINCASYNVMAVCDKEQADSVAAALNHTKDLPAGRLTADVEVVWFLDQAAASKLPHGWCSIL

SEQ ID NO: 6743 - DNA, 2250 bp, Arabidopsis thaliana
gtatcttgctctgtctccgataccaaaaggtttttgtattctattgaagattataaactaaagggaggagctttgagaatttgattgttgatatccaaggatttgcaagctagtttttttttttacgacgttatacttttcgattatgagtgcatcatgggctgatgtagctgactcagagaacacgggttctgggtcttctaatcagaattctcatccttcacgacctgcttatgttcctccacatctaaggaacaggccagcagcttctgagcctgttgctccattgccagctaatgatcgtgtaggttatggtggtccaccttctggctctcgatgggctcctggtggtagtggtgttggtgttggaggtggtggtggttatagggctgatgcaggtcgtcctggctctggctctggctatggtggacgaggaggtggtggttggaacaacagaagcggagggtgggaccgtagggaacgtgaagtaaacccctttgaaaatgatgattccgaaccagaaccagcttttactgagcaggataatacggttattaattttgatgcctatgaagatattccgattgagaccagtggggataatgtgcctcctcctgttaacacattcgcagagatagatctcggggaggcattgaatctaaatatccgtagatgcaaatatgttaagccaacacctgttcagcgtcatgcgattccgatattgcttgaagggagggatttgatggcctgtgctcagacagggtcggggaagacagctgctttttgctttccaatcattagtggaataatgaaagatcagcatgtacagagaccccgtggttcacgaacagtctaccctcttgcagttattctctcaccaacaagagagttggcaagtcagatacatgatgaggctaaaaggttctcttaccaaactggtgtgaaggtggttgttgcatatggaggaacacctattaaccagcagctccgggaacttgagaggggagtcgatattcttgtggcaacgcctggtcgattaaatgatttgctcgagagagctagagtctcaatgcagatgattagatttttagctcttgatgaggccgataggatgcttgacatgggttttgaaccacaaattagaaagattgtcgaacaaatggacatgcctccacgtggagttagacagacactgttgtttagtgctacatttccaagagaaattcagagactcgcagctgacttcctagcaaattatatatttttggctgtgggtagagtgggttcaagtaccgatttaattgtccaaagggttgagtttgtccttgactctgacaaaagaagtcatctcatggacctgcttcacgctcagagagagaatggcatccaaggcaagcaagccctgaccttagtttttgtggagacaaagagaggagctgactctttggaaaattggttgtgcatcaatgggtttccagcaacctccattcacggtgacagaacacagcaggaaagagaagtggcattgaaagccttcaagagtgggagaacaccgattttggttgcaactgatgtagcagcacgtggccttgacattccccacgtggctcatgtggtcaacttcgatctgccaaatgacattgatgactatgtccaccgtattggacgaacaggacgtgctggcaaatcaggactagcaactgccttcttcaacgatggcaacacctcactggccagaccgctcgctgagctgatgcaagaagctaaccaagaagtccctgagtggctcactcggtatgcgtcacggtcctcttttggtggtggtaagaaccggcggtctggtggtcgatttggtggccgtgactttagaagggaagggtctttcggtagcggtagaggaggctatggcggtggaggaggagggtatggcggcggaggaggctatggtggtggaggaggctatggcggcggaggaggctatggtggtggatatggtggtgcttcaagtggtggatatggtggagaacctccaagtgcttgggactaagcttccaatgttctttttgttttggttacaacttttgacaaaaaaaatatttcttctacattcacaaagagagtatgtattgccccttacacctatgagatttcactcaggagatggatatataacaattgttgatgttttaggtgttttgatctttttaggctattattaggggttgtcataaaaacagtcatcagtttcgc

SEQ ID NO: 6744 - protein, 633 aa, Arabidopsis thaliana
MSASWADVADSENTGSGSSNQNSHPSRPAYVPPHLRNRPAASEPVAPLPANDRVGYGGPPSGSRWAPGGSGVGVGGGGGYRADAGRPGSGSGYGGRGGGGWNNRSGGWDRREREVNPFENDDSEPEPAFTEQDNTVINFDAYEDIPIETSGDNVPPPVNTFAEIDLGEALNLNIRRCKYVKPTPVQRHAIPILLEGRDLMACAQTGSGKTAAFCFPIISGIMKDQHVQRPRGSRTVYPLAVILSPTRELASQIHDEAKRFSYQTGVKVVVAYGGTPINQQLRELERGVDILVATPGRLNDLLERARVSMQMIRFLALDEADRMLDMGFEPQIRKIVEQMDMPPRGVRQTLLFSATFPREIQRLAADFLANYIFLAVGRVGSSTDLIVQRVEFVLDSDKRSHLMDLLHAQRENGIQGKQALTLVFVETKRGADSLENWLCINGFPATSIHGDRTQQEREVALKAFKSGRTPILVATDVAARGLDIPHVAHVVNFDLPNDIDDYVHRIGRTGRAGKSGLATAFFNDGNTSLARPLAELMQEANQEVPEWLTRYASRSSFGGGKNRRSGGRFGGRDFRREGSFGSGRGGYGGGGGGYGGGGGYGGGGGYGGGGGYGGGYGGASSGGYGGEPPSAWD

SEQ ID NO: 6745 - protein, 434 aa, Arabidopsis thaliana
MACAQTGSGKTAAFCFPIISGIMKDQHVQRPRGSRTVYPLAVILSPTRELASQIHDEAKRFSYQTGVKVVVAYGGTPINQQLRELERGVDILVATPGRLNDLLERARVSMQMIRFLALDEADRMLDMGFEPQIRKIVEQMDMPPRGVRQTLLFSATFPREIQRLAADFLANYIFLAVGRVGSSTDLIVQRVEFVLDSDKRSHLMDLLHAQRENGIQGKQALTLVFVETKRGADSLENWLCINGFPATSIHGDRTQQEREVALKAFKSGRTPILVATDVAARGLDIPHVAHVVNFDLPNDIDDYVHRIGRTGRAGKSGLATAFFNDGNTSLARPLAELMQEANQEVPEWLTRYASRSSFGGGKNRRSGGRFGGRDFRREGSFGSGRGGYGGGGGGYGGGGGYGGGGGYGGGGGYGGGYGGASSGGYGGEPPSAWD

SEQ ID NO: 6746 - protein, 412 aa, Arabidopsis thaliana
MKDQHVQRPRGSRTVYPLAVILSPTRELASQIHDEAKRFSYQTGVKVVVAYGGTPINQQLRELERGVDILVATPGRLNDLLERARVSMQMIRFLALDEADRMLDMGFEPQIRKIVEQMDMPPRGVRQTLLFSATFPREIQRLAADFLANYIFLAVGRVGSSTDLIVQRVEFVLDSDKRSHLMDLLHAQRENGIQGKQALTLVFVETKRGADSLENWLCINGFPATSIHGDRTQQEREVALKAFKSGRTPILVATDVAARGLDIPHVAHVVNFDLPNDIDDYVHRIGRTGRAGKSGLATAFFNDGNTSLARPLAELMQEANQEVPEWLTRYASRSSFGGGKNRRSGGRFGGRDFRREGSFGSGRGGYGGGGGGYGGGGGYGGGGGYGGGGGYGGGYGGASSGGYGGEPPSAWD

SEQ ID NO: 6747 - DNA, 894 bp, Arabidopsis thaliana
atttgtgtatagaatatagtaaactcaagtaatcaagcaagtaaacgaaacataaaaagaaaagtattgcaagaaacagaggagttagataccaaaaagtgagagatatcgaatggcggagaaagaagagagtgtgaagcttctagggttttgggcaagcccttttagtcgtcgagtcgagatggctctcaaactcaaaggcgtgccatacgaatacttggaagaagatttgcccaacaagacccctttgcttctggagctaaacccgcttcacaagaaagttccggttcttgtccacaatgacaaaatattactcgagtcacatctgattctcgaatacaccatcagacgtggaagaacaatccaattcttcctcaagatccttacgagaaggccatggctcgattttgggcaaagttcatcgatgaccagatcctaacactagggtttaggtcccttgtaaaagcagagaaaggaagagaggttgctattgaagagactcgggaactgcttacgtttcttgagaaagaattgactggaaaagatttcttcggtggcaagacaatcggattcttggacatgatcgcaggaagtattatcccattttgtctagctagactttgggaaggtataggaattgatatgattccagaggagaagtttccggaattaaatagatggatcaagaatttggaagaagttgagatcgtgagagaatgtattcctccaagagagaaacaaattgagcgcatgaccaaaattgcagaaacaattaagtctgcctaaattaaagatacttcttgcctccgaaaatatttgatttatatgcttgcattgttttttatttttatttttttaagtttttcgaaaaatagaatgacctaatatttaagc

SEQ ID NO: 6748 - protein, 129 aa, Arabidopsis thaliana
MARFWAKFIDDQILTLGFRSLVKAEKGREVAIEETRELLTFLEKELTGKDFFGGKTIGFLDMIAGSIIPFCLARLWEGIGIDMIPEEKFPELNRWIKNLEEVEIVRECIPPREKQIERMTKIAETIKSA

SEQ ID NO: 6749 - protein, 108 aa, Arabidopsis thaliana
MAEKEESVKLLGFWASPFSRRVEMALKLKGVPYEYLEEDLPNKTPLLLELNPLHKKVPVLVHNDKILLESHLILEYTIRRGRTIQFFLKILTRRPWLDFGQSSSMTRS

SEQ ID NO: 6750 - protein, 85 aa, Arabidopsis thaliana
MALKLKGVPYEYLEEDLPNKTPLLLELNPLHKKVPVLVHNDKILLESHLILEYTIRRGRTIQFFLKILTRRPWLDFGQSSSMTRS

SEQ ID NO: 6751 - DNA, 1189 bp, Arabidopsis thaliana
cattagctcaaggagaatcaaagcgtcgtctcttgttccttccgctgccaacaaaatggagctgtcgtctgcgtccgccatattaagccactcctcctccgccgctcagcttctcagacctaagctcgggtttattgatttgcttcctcgtcgagcgatgatcgtttcttctccttcttcttcgcttcctcgatttttgcggatggaatctcaatctcagcttcgccaatctatctcttgctctgcttcttcttcttcttctatggcattaggtagaattggagaagtaaagagagtaacaaaggaaacgaatgtttcagtgaagattaatttggatggtactggagttgcagatagttctagtggaattcctttccttgaccatatgttagatcaacttgcttcgcatggcttgtttgatgtgcacgttagagctactggtgatgttcacattgatgatcatcacactaatgaagatatagctcttgccattggaactgctctattaaaggctcttggtgagcgtaaagggattaaccggtttggtgacttcacagctcctctagatgaagcgcttatacatgtttccttggacttgtctggtcgaccatatcttggttacaacttggagataccaactcagagagttggaacatatgatactcagttggtggagcactttttccagtcgttggtgaatacttctggtatgactcttcacatccggcagctcgctggtgaaaactctcatcacataatagaggcgacgtttaaggcgtttgccagagctctacgacaagcaacagagactgatccacgccgtggtgggacaataccaagttcaaaaggagtcttatcacggtcttgaaagctaatcaaacacacaagacagttcccagattcacacttcatcgtcgagttcatgagccatcgtcaattctcttatggtaccaaatgccaagcctgttggatcttgctgttccattccattacagaagcacaaagagcaaaatgtgaaaatagattagagatcacacagttcagaagatcataggctcatctttatattaatctgttgttgcagagtgtattaaacctcttaccattgctgtatcatcatcaactgagaacttactgtgagttgaagtgactgtaatttgctttaaatagtcaacactccaatcttgac

SEQ ID NO: 6752 - protein, 288 aa, Arabidopsis thaliana
ISSRRIKASSLVPSAANKMELSSASAILSHSSSAAQLLRPKLGFIDLLPRRAMIVSSPSSSLPRFLRMESQSQLRQSISCSASSSSSMALGRIGEVKRVTKETNVSVKINLDGTGVADSSSGIPFLDHMLDQLASHGLFDVHVRATGDVHIDDHHTNEDIALAIGTALLKALGERKGINRFGDFTAPLDEALIHVSLDLSGRPYLGYNLEIPTQRVGTYDTQLVEHFFQSLVNTSGMTLHIRQLAGENSHHIIEATFKAFARALRQATETDPRRGGTIPSSKGVLSRS

SEQ ID NO: 6753 - protein, 270 aa, Arabidopsis thaliana
MELSSASAILSHSSSAAQLLRPKLGFIDLLPRRAMIVSSPSSSLPRFLRMESQSQLRQSISCSASSSSSMALGRIGEVKRVTKETNVSVKINLDGTGVADSSSGIPFLDHMLDQLASHGLFDVHVRATGDVHIDDHHTNEDIALAIGTALLKALGERKGINRFGDFTAPLDEALIHVSLDLSGRPYLGYNLEIPTQRVGTYDTQLVEHFFQSLVNTSGMTLHIRQLAGENSHHIIEATFKAFARALRQATETDPRRGGTIPSSKGVLSRS

SEQ ID NO: 6754 - protein, 236 aa, Arabidopsis thaliana
MIVSSPSSSLPRFLRMESQSQLRQSISCSASSSSSMALGRIGEVKRVTKETNVSVKINLDGTGVADSSSGIPFLDHMLDQLASHGLFDVHVRATGDVHIDDHHTNEDIALAIGTALLKALGERKGINRFGDFTAPLDEALIHVSLDLSGRPYLGYNLEIPTQRVGTYDTQLVEHFFQSLVNTSGMTLHIRQLAGENSHHIIEATFKAFARALRQATETDPRRGGTIPSSKGVLSRS

SEQ ID NO: 6755 - DNA, 1380 bp, Arabidopsis thaliana
gacatatatttatcttcttgaaaagcgaatgatgtctataaattgttttcgaacagcgaaggctccgcttcaatcatttgtagcagtaagaacgaattcgagacctagaaattcatcgaaccgtctcgtttctgtattcggacgcaagtcttcttctccttcatttgttactctcagagttgtttcatcgaaggcttacgagaaagagcttgatgctgctaagaaagctgcttcactcgctgctcgtctctgtcagaaagttcaaaaggctttgttgcaatcagatgtgcaatcaaaatctgataaaagtccagtgaccgttgctgattatggttcacaagcagttgttagtttagtcttagaaaaagagctcagttctgaacccttttcattggtggctgaagaggactcaggcgatctacgcaaggatggttctcaggatactctggagcgcatcacaaaactcgtgaacgacactttggctaccgaggaatcgtttaatggctctactttgtctactgatgatctacttagagccattgactgtggaacatctgaaggtggtccaaatggtcgacactgggtcttggatccaattgatggcactaaaggatttctgaggggagatcaatacgcagtagcactaggattgctcgaggaagggaaagtagttttaggtgtgcttgcttgtccaaacttgccgttagcatccatagcaggaaacaacaagaacaaatcttcgtcagacgaaattggatgcctcttctttgctacaattggttcagggacatatatgcagctcctagattcaaaatcttctcctgtaaaagtgcaagtctctagtgttgagaatcctgaagaggcatcgttcttcgagtcattcgaaggagctcactctctacatgacttatccagcaccattgccaataaactcggtgtcaaagctccaccagtccgtattgatagccaagcaaagtatggagctttatcaagaggagatggagctatatacttacggtttcctcataaaggataccgcgaaaagatttgggaccatgtcgctggtgctatagttgttacagaggcgggtggaatagtgacagatgcagcaggaaagccactggatttctcgaaagggaagtatcttgatttggacacaggcattatcgttgctaacgagaagctaatgcctctgcttttgaaagcagttcgtgactccatagctgagcaagagaaagcttcagctctctgatttgtttttttctctcgtacgttctttgtttctctgtaactgttgtttcattttctttcaccgaatttcaccagtgagaatttcttccattttcgaaaaagaaataaaaatgaaattctgttttgggc

SEQ ID NO: 6756 - protein, 416 aa, Arabidopsis thaliana
TYIYLLEKRMMSINCFRTAKAPLQSFVAVRTNSRPRNSSNRLVSVFGRKSSSPSFVTLRVVSSKAYEKELDAAKKAASLAARLCQKVQKALLQSDVQSKSDKSPVTVADYGSQAVVSLVLEKELSSEPFSLVAEEDSGDLRKDGSQDTLERITKLVNDTLATEESFNGSTLSTDDLLRAIDCGTSEGGPNGRHWVLDPIDGTKGFLRGDQYAVALGLLEEGKVVLGVLACPNLPLASIAGNNKNKSSSDEIGCLFFATIGSGTYMQLLDSKSSPVKVQVSSVENPEEASFFESFEGAHSLHDLSSTIANKLGVKAPPVRIDSQAKYGALSRGDGAIYLRFPHKGYREKIWDHVAGAIVVTEAGGIVTDAAGKPLDFSKGKYLDLDTGIIVANEKLMPLLLKAVRDSIAEQEKASAL

SEQ ID NO: 6757 - protein, 407 aa, Arabidopsis thaliana
MMSINCFRTAKAPLQSFVAVRTNSRPRNSSNRLVSVFGRKSSSPSFVTLRVVSSKAYEKELDAAKKAASLAARLCQKVQKALLQSDVQSKSDKSPVTVADYGSQAVVSLVLEKELSSEPFSLVAEEDSGDLRKDGSQDTLERITKLVNDTLATEESFNGSTLSTDDLLRAIDCGTSEGGPNGRHWVLDPIDGTKGFLRGDQYAVALGLLEEGKVVLGVLACPNLPLASIAGNNKNKSSSDEIGCLFFATIGSGTYMQLLDSKSSPVKVQVSSVENPEEASFFESFEGAHSLHDLSSTIANKLGVKAPPVRIDSQAKYGALSRGDGAIYLRFPHKGYREKIWDHVAGAIVVTEAGGIVTDAAGKPLDFSKGKYLDLDTGIIVANEKLMPLLLKAVRDSIAEQEKASAL

SEQ ID NO: 6758 - protein, 406 aa, Arabidopsis thaliana
MSINCFRTAKAPLQSFVAVRTNSRPRNSSNRLVSVFGRKSSSPSFVTLRVVSSKAYEKELDAAKKAASLAARLCQKVQKALLQSDVQSKSDKSPVTVADYGSQAVVSLVLEKELSSEPFSLVAEEDSGDLRKDGSQDTLERITKLVNDTLATEESFNGSTLSTDDLLRAIDCGTSEGGPNGRHWVLDPIDGTKGFLRGDQYAVALGLLEEGKVVLGVLACPNLPLASIAGNNKNKSSSDEIGCLFFATIGSGTYMQLLDSKSSPVKVQVSSVENPEEASFFESFEGAHSLHDLSSTIANKLGVKAPPVRIDSQAKYGALSRGDGAIYLRFPHKGYREKIWDHVAGAIVVTEAGGIVTDAAGKPLDFSKGKYLDLDTGIIVANEKLMPLLLKAVRDSIAEQEKASAL

SEQ ID NO: 6759 - DNA, 1437 bp, Arabidopsis thaliana
aaaaccctaatttctcaaagagtctaaagagacggagagtgagagaagagagaaacatttcgagacaaatggccgccgccgctgctcgtcctctcgtcaccatccaaaccttggatggtgacatgtccaccgatcaatcctccaccgtcgtacttcccgacgtcatgacggcgccagttcgaccagacatcgttaacttcgttcacgcccaaatctccaacaacagccgtcagccatacgccgtatcgaagaaggccggtcaccagacctccgccgagtcctggggaaccggacgtgccgtgtctcgtatccctcgtgttcccggtggtggtactcaccgtgctggtcaagctgcgttcggtaacatgtgtcgtggtggtcgtatgttcgctccaaccaagatctggcgccgctggcaccgtcgtgtcaatgtcaacatgaagcgtcacgcaatcgtctcagctatcgctgcaactgctgttcctgcgcttgtgatggctcgtggtcacaagatcgagaatgttcctgagatgcctcttgttgtgagtgactccgccgaagctgtggagaagacctcagctgcgatcaaggttttgaaacagatcggtgcttatgatgatgctgagaaggcaaagaacagcattggaatccgtcctggtaaaggtaaaatgaggaaccgtcgttacatttctaggaaaggtcctctggtggtttatggaactgaaggatctaagatagttaaggcgtttagaaaccttcctggtgttgagctttgtcatgtggagaggcttaatttgttgaagcttgctcctggtggtcaccttggtcggtttgtgatctggaccaagtctgcctttgagaagcttgagtctatctatggttcgtttgagaagccatcagagaagaagaaggggtatgtgcttcctcgtgcaaagatggtgaatgctgatcttgccaggattatcaattcagatgagattcagagtgttgtgaatccgatcaagaaggatgcgaagagggctgttcttaagaagaatccattgaagaatctcaatgtgatgttgaagttgaatccttatgctaagaccgcgaagaggatgtcactgttagctgaagcacagagagttaaggctaagaaggagaagctcgccaagaagaggaaaaccgttaccaaggaggaggcgttggcaatcaaagcagcaggcaagtcgtggtacaagactatgatctccgacagtgattacaccgagtttgataacttcaccaaatggctcggtgctagccagtaataatctcgtctgctttggaacactttccatattttagtcaaaagattttggtttttttaatctgttttgtctttgggtgtctggatatcaagttgaattatgaacaagtttcacttttttacatctccatttcttacttcgcctttat

SEQ ID NO: 6760 - protein, 428 aa, Arabidopsis thaliana
NPNFSKSLKRRRVREERNISRQMAAAAARPLVTIQTLDGDMSTDQSSTVVLPDVMTAPVRPDIVNFVHAQISNNSRQPYAVSKKAGHQTSAESWGTGRAVSRIPRVPGGGTHRAGQAAFGNMCRGGRMFAPTKIWRRWHRRVNVNMKRHAIVSAIAATAVPALVMARGHKIENVPEMPLVVSDSAEAVEKTSAAIKVLKQIGAYDDAEKAKNSIGIRPGKGKMRNRRYISRKGPLVVYGTEGSKIVKAFRNLPGVELCHVERLNLLKLAPGGHLGRFVIWTKSAFEKLESIYGSFEKPSEKKKGYVLPRAKMVNADLARIINSDEIQSVVNPIKKDAKRAVLKKNPLKNLNVMLKLNPYAKTAKRMSLLAEAQRVKAKKEKLAKKRKTVTKEEALAIKAAGKSWYKTMISDSDYTEFDNFTKWLGASQ

SEQ ID NO: 6761 - protein, 406 aa, Arabidopsis thaliana
MAAAAARPLVTIQTLDGDMSTDQSSTVVLPDVMTAPVRPDIVNFVHAQISNNSRQPYAVSKKAGHQTSAESWGTGRAVSRIPRVPGGGTHRAGQAAFGNMCRGGRMFAPTKIWRRWHRRVNVNMKRHAIVSAIAATAVPALVMARGHKIENVPEMPLVVSDSAEAVEKTSAAIKVLKQIGAYDDAEKAKNSIGIRPGKGKMRNRRYISRKGPLVVYGTEGSKIVKAFRNLPGVELCHVERLNLLKLAPGGHLGRFVIWTKSAFEKLESIYGSFEKPSEKKKGYVLPRAKMVNADLARIINSDEIQSVVNPIKKDAKRAVLKKNPLKNLNVMLKLNPYAKTAKRMSLLAEAQRVKAKKEKLAKKRKTVTKEEALAIKAAGKSWYKTMISDSDYTEFDNFTKWLGASQ

SEQ ID NO: 6762 - protein, 388 aa, Arabidopsis thaliana
MSTDQSSTVVLPDVMTAPVRPDIVNFVHAQISNNSRQPYAVSKKAGHQTSAESWGTGRAVSRIPRVPGGGTHRAGQAAFGNMCRGGRMFAPTKIWRRWHRRVNVNMKRHAIVSAIAATAVPALVMARGHKIENVPEMPLVVSDSAEAVEKTSAAIKVLKQIGAYDDAEKAKNSIGIRPGKGKMRNRRYISRKGPLVVYGTEGSKIVKAFRNLPGVELCHVERLNLLKLAPGGHLGRFVIWTKSAFEKLESIYGSFEKPSEKKKGYVLPRAKMVNADLARIINSDEIQSVVNPIKKDAKRAVLKKNPLKNLNVMLKLNPYAKTAKRMSLLAEAQRVKAKKEKLAKKRKTVTKEEALAIKAAGKSWYKTMISDSDYTEFDNFTKWLGASQ

SEQ ID NO: 6763 - DNA, 877 bp, Arabidopsis thaliana
ggcttgtaaagagaatcggcggcggcaccgagagagaaccttaaaacccttaaaaagagacatctttttctcctcctgaatcctccaatttccataagatccgatctcactctctcctgagagaaaaatgggaattacatcatccacagatccaaaaacagagactttttccgaccccaaatctcaaaacaacgaagaagctcctccagctaaatctgagaaactcggagatgcgtctccgtcgactccagctccatctgaggaactcggagattcatcaactgtttggagagacccagaagattccgaatcggatgaaaaaccagaagaaggaggaggaggagacgcagatggtgaagaggaaggagagtgtgggttttgcttgtttatgaaaggaggtggttgcaaagattcgtttgttgcttgggaagagtgtgttgaagcagctgagaagaacaaggaagatattgttactaattgtatggaagtcacttcgatgttgaagaagtgtatggatgaacattccgattactatcagcccattctcgctgcggagaaagctgctgaagcagaggttaagaaggagcttgaagctgagaagaagaaggaagaagaagagaagatctcggaagaggaggtagctgcgaagaagcaagctcaagggtaattttgttatggtttcttgtttatgggaatatcaaaagattggaatttggggataaaaattgttctctaggaacagaggaaagttcgttgttagaatcataacttataagatcccattgatgatcatgtttcttctctaattaataagttgattgattgaggtcatctgaattcatactcctttttatatgattcgagagagaatttgctc

SEQ ID NO: 6764 - protein, 179 aa, Arabidopsis thaliana
MGITSSTDPKTETFSDPKSQNNEEAPPAKSEKLGDASPSTPAPSEELGDSSTVWRDPEDSESDEKPEEGGGGDADGEEEGECGFCLFMKGGGCKDSFVAWEECVEAAEKNKEDIVTNCMEVTSMLKKCMDEHSDYYQPILAAEKAAEAEVKKELEAEKKKEEEEKISEEEVAAKKQAQG

SEQ ID NO: 6765 - protein, 92 aa, Arabidopsis thaliana
MKGGGCKDSFVAWEECVEAAEKNKEDIVTNCMEVTSMLKKCMDEHSDYYQPILAAEKAAEAEVKKELEAEKKKEEEEKISEEEVAAKKQAQG

SEQ ID NO: 6766 - DNA, 1301 bp, Arabidopsis thaliana
cggaaatcttctccgcatgagctccggtgaaaaatggaggccaagaacaagaaagcagtagcctcccgtctctgctgcttatgcaacctgagacgtcccgtcctcaaaagacctaaaacccttcaacagatatgcagagagtgcttttatgaggtttttgaggaggagattcatcaagtcattgttcagaatcgtttattcaaatctggtgaacgtgttgctataggtgcctctggtggaaaagattctactgttctggcatatgtgttatcagaactaaacagacgccacaattatgggctagacctctttctcttgtccatagatgaagggattacgggttatcgtgatgattctcttgagactgttaaacggaacgaagtccaatatggtttgcctcttaagattgtttcatataaagatctgtatggatggacaatggatgagattgtgaaaatgattggtttgaagaacaattgcaccttttgtggtgtattccgtcgacaggcacttgaccgaggagctgcgttattgaaagtagagaagctagtcactggacataatgcagatgatatagcagaaaccgttctcttgaacatattgcgaggggatattgctagattaagtaggtgcacatcgattactactggtgaagatggtcccattccaagatgtaaacctttcaagtatacatacgaaaaggagattgtcatgtatgcttatttcaagaagctggattacttctccactgaatgcatttactctcctaatgcatatcgtgggtttgcccgtgagttcatcaaagatttggaaagaataaggccaagggcgattctggacatcataaagtctggtgaagattttagaattgcaacaaccacaaagatgcctgagcaagggacgtgtgagcgatgcgggtatatttctagccagaaatggtgtaaagcttgtgttttgctggaaggactgaaccgtggtttgcctaagatgggtattggaagacctcgaggcgtaaatggtgatcataataaggaaacaaagaagcctggatctgtagcaaaatctatagagagcaaacaatgtggatctctggatttctaaaattttgagaaaaaagctacaaaatcgtatgagtcatagtgaatgatttgattatatagaaaaagaaaagattttttttttcctttcataaacttcttgtagaacttaattgtacttttggttttcttttttggcttatgattgtatctgaagggtttaattatgaatttatgaaacaaatctgttcataagtttccaat

SEQ ID NO: 6767 - protein, 355 aa, Arabidopsis thaliana
MEAKNKKAVASRLCCLCNLRRPVLKRPKTLQQICRECFYEVFEEEIHQVIVQNRLFKSGERVAIGASGGKDSTVLAYVLSELNRRHNYGLDLFLLSIDEGITGYRDDSLETVKRNEVQYGLPLKIVSYKDLYGWTMDEIVKMIGLKNNCTFCGVFRRQALDRGAALLKVEKLVTGHNADDIAETVLLNILRGDIARLSRCTSITTGEDGPIPRCKPFKYTYEKEIVMYAYFKKLDYFSTECIYSPNAYRGFAREFIKDLERIRPRAILDIIKSGEDFRIATTTKMPEQGTCERCGYISSQKWCKACVLLEGLNRGLPKMGIGRPRGVNGDHNKETKKPGSVAKSIESKQCGSLDF

SEQ ID NO: 6768 - protein, 220 aa, Arabidopsis thaliana
MDEIVKMIGLKNNCTFCGVFRRQALDRGAALLKVEKLVTGHNADDIAETVLLNILRGDIARLSRCTSITTGEDGPIPRCKPFKYTYEKEIVMYAYFKKLDYFSTECIYSPNAYRGFAREFIKDLERIRPRAILDIIKSGEDFRIATTTKMPEQGTCERCGYISSQKWCKACVLLEGLNRGLPKMGIGRPRGVNGDHNKETKKPGSVAKSIESKQCGSLDF

SEQ ID NO: 6769 - protein, 214 aa, Arabidopsis thaliana
MIGLKNNCTFCGVFRRQALDRGAALLKVEKLVTGHNADDIAETVLLNILRGDIARLSRCTSITTGEDGPIPRCKPFKYTYEKEIVMYAYFKKLDYFSTECIYSPNAYRGFAREFIKDLERIRPRAILDIIKSGEDFRIATTTKMPEQGTCERCGYISSQKWCKACVLLEGLNRGLPKMGIGRPRGVNGDHNKETKKPGSVAKSIESKQCGSLDF

SEQ ID NO: 6770 - DNA, 969 bp, Arabidopsis thaliana
aacgagaaacagaacatcactaccaaacatctccagctcagtttcttcaaataaaaacagttaatctctctaaaacaattttttgtttctctctctcttaaataaccagagagttcagaatcattttgattctctttgtaatctttagttgttgtacctaacatcatggctgaagaggaaccgaagaaggtgacagagaccgtgtcggaaccaactccaacaccggaagttccggtggagaaacctgctgctgctgcagatgttgctcctcaggagaagcctgtggctccacctcccgttcttccatctccggcaccggcagaggagaagcaagaagactctaaggctattgttcccgtcgtccctaaagaagtagaggaagagaagaaagaaggatcagttaatcgagatgctgttctggctagagttgagacagagaagaggatgtcacttatcaaagcttgggaagaggctgagaaatgcaaagtggagaacaaagctgagaagaagctttcttcaattggatcatgggagaacaacaagaaagcagctgtggaagctgagctcaagaaaatggaggagcaattggagaagaagaaggcagagtatgtggagcagatgaagaacaaaatagctcaaattcacaaggaagcagaagagaagagagcgatgattgaagctaagcgtggagaagaaattctcaaagcagaggaattagcagccaagtaccgtgccactggaaccgctcccaaaaagcttttcggatgcatgtgatctctaatcatctcgatggggaaacaaatgaaatatggtatttgatgtaatgacgttctttagtttgcttaatgtgggtttaatatggcaacatagaaagttataaggtcaacatcttatattgattgggctgcgtttgttaatttgatttgtatttgtacatcttttcattgaaaggctttctcttagctttat

SEQ ID NO: 6771 - protein, 202 aa, Arabidopsis thaliana
MAEEEPKKVTETVSEPTPTPEVPVEKPAAAADVAPQEKPVAPPPVLPSPAPAEEKQEDSKAIVPVVPKEVEEEKKEGSVNRDAVLARVETEKRMSLIKAWEEAEKCKVENKAEKKLSSIGSWENNKKAAVEAELKKMEEQLEKKKAEYVEQMKNKIAQIHKEAEEKRAMIEAKRGEEILKAEELAAKYRATGTAPKKLFGCM

SEQ ID NO: 6772 - protein, 109 aa, Arabidopsis thaliana
MSLIKAWEEAEKCKVENKAEKKLSSIGSWENNKKAAVEAELKKMEEQLEKKKAEYVEQMKNKIAQIHKEAEEKRAMIEAKRGEEILKAEELAAKYRATGTAPKKLFGCM

SEQ ID NO: 6773 - DNA, 1164 bp, Arabidopsis thaliana
catcgctgtctggaagagctcggttcgagtcatcgctgtctggaacagcgatgactcgagaaccgatctcctccctctctctcttaaccactaagcaaaaatcccatctttctatataaacctctctcccaactctgctacttcccaccgtaaatcgtttctgggttcttaagaataacatggcctcgtcatcatcatcatcttatagattccaatctgggtcttaccctctttcgtcaagtccttctcttgggaatttcgtcgaacgcattaaagacgcttgtcatttccttgtctctgctgttttgggtaccattatctccgcgatcttgaccttcttcttcgcactagtgggcacattgctaggggcacttacaggagctttgataggtcaagaaactgagagtggtttcattagaggagcagcaattggagccatttcgggagctgttttctctatcgaggtctttgaatcatctctggatctctggaaatccgatgagtcgggtttcggatgttttctctacttgattgatgtcattgttagtcttctaagcgggagacttgtacgagagcgcattggtcctgcaatgctaagtgcagtgcaaagtcaaatgggagctgtggatacagcttttgatgatcacacaagcctttttgatacaggaggctcaaaaggattgacaggagaccttgttgagaaaatcccaaagatgacaatcactggcaacaataacactgatgcttctgagaacacagactcatgttctgtttgtcttcaggatttccagctcggtgaaacagttagaagcttgcctcattgtcatcacatgtttcacttaccttgcatagacaattggctccttagacacggttcttgcccgatgtgtagacgtgatatttaatctcttcatctctccatcgtccgtctctcataatgcagtttaacctcgcagttcagatatttctacagctcgtacatcaagagtctgctctgctcttcttccctcctccttgagtttcatgtaaattccagttcttttggctgtttacaattacgatacctctcttactctttcagagtcattgtaggactcctagttctctaatgtacaaagaaacacaaaaatagagtttttgttttatctaattctttactctggc

SEQ ID NO: 6774 - protein, 241 aa, Arabidopsis thaliana
MASSSSSSYRFQSGSYPLSSSPSLGNFVERIKDACHFLVSAVLGTIISAILTFFFALVGTLLGALTGALIGQETESGFIRGAAIGAISGAVFSIEVFESSLDLWKSDESGFGCFLYLIDVIVSLLSGRLVRERIGPAMLSAVQSQMGAVDTAFDDHTSLFDTGGSKGLTGDLVEKIPKMTITGNNNTDASENTDSCSVCLQDFQLGETVRSLPHCHHMFHLPCIDNWLLRHGSCPMCRRDI

SEQ ID NO: 6775 - DNA, 1968 bp, Arabidopsis thaliana
cctcttcttcttcgttgatatttttctctcattttattgactttccgaatctccaaaaatctaacccaaaaaataaacaatagttttttttttctccgcaaaggaaaaatcttttcttcaccaaataatttgtctctttcgcaaatctcagctctctctcgaagtgcctttcaacgataaatttgtgggctttattcatttatagtgttgttttgatgatgacagattctattaccagaaattgatcaaagagaaaaacgttgctctctcttgatttcttttctgtttttttttttatataattaatttgttccggtgaatgatcgtcgtcttatggaaggttgtagctaatttctaatctagagagagagagatgggaggttgcgtgtcgacgccgaagagctgtgttggagcaaaactgaggtcaagtaaacgaaggaagagtcgtagacgacgaaaaattcaaaggaagagagccgccgtctcttctcgtctctctgacggatctttcgacaatctcgatcatcatcatcgcaacttctctaatcccagttctcgagcaactggcgaagacgcatggtttgagtccaatgtcgcatttgaaacagactgtgatgatgatttccacagtgttcatgaagatgcattgtctttaaacggatctgagcgtgtatcactctcgagtacgacaaccacatcatcaacacgagacactgattcaaatgaagtgatgtctcaatcgaaatcagacggtgacttaaacgacacaaaccagcctgatttgattgattcatctgcagatgaaggtctcttggaaaactgcaggatcttaccgagtaattgtttgccttgtctgaatacaacaactgttccttctattgacaagagaaggtctcttagctctagccctcccagttccaggaaaaaatcatctcttagactttcttataaatggagagaaggtcatgcttcaggagccttgtttttgtcgaaaatgcagctgaagagaccgatagcgggttctcaggttcctttctgtccaattgataagaaaatgctcgattgttggtcaaccattgatccaaatagttttcgggttcgtggcaaaacatatctcagggagaagaagaaagagtttgcacctagccatgctgcgtacaatccttttggtgtcgatgttttcctatcggaacacaaaatacaccatgttgcacaatatgtcaaacttcctgttactaccacatccacaaaactcccatctatccttgttgtaaatgttcagattccgttatatccaactgcaatctttcaaggtgaatctgatggagaaggaatgaatattgtattatacttcaaactctcggataattattcaaaggaacttccgctccattttcaagaaagcattcggagattaatagatgatgaggttgagaaagttaaaggcttccctttggatacaacggcaccttttagagagcggcttaagatattgggacgtgttgcaaacgtggatgatctccatttgagtggtccggagaaaaaactgatgcaggcttataacgagaaacctgtactttcacgtccgcagcacgaattctacttgggtgacaattactttgagattgatatcgatatgcatagattcggttatatatcgcggaaagggtttgaaacattcatagacagactcaagatctgtgttcttgatgttggcctcacaattcaggggaacaaaccagaggagctaccggagcagattctgtgttgcgtcaggctaaatgggattgatttcatgaactatcatcaattaactcaagaactcctatgactaacaacattgttttctcctctgtttttccttgtgaaaagaaacacaaaatccaaaagagcatcccgttagaaccccaagaacacaaaacaaagggtgatgatttacaagtgaatatatgaaaatttcgaatcttt

SEQ ID NO: 6776 - protein, 485 aa, Arabidopsis thaliana
MGGCVSTPKSCVGAKLRSSKRRKSRRRRKIQRKRAAVSSRLSDGSFDNLDHHHRNFSNPSSRATGEDAWFESNVAFETDCDDDFHSVHEDALSLNGSERVSLSSTTTTSSTRDTDSNEVMSQSKSDGDLNDTNQPDLIDSSADEGLLENCRILPSNCLPCLNTTTVPSIDKRRSLSSSPPSSRKKSSLRLSYKWREGHASGALFLSKMQLKRPIAGSQVPFCPIDKKMLDCWSTIDPNSFRVRGKTYLREKKKEFAPSHAAYNPFGVDVFLSEHKIHHVAQYVKLPVTTTSTKLPSILVVNVQIPLYPTAIFQGESDGEGMNIVLYFKLSDNYSKELPLHFQESIRRLIDDEVEKVKGFPLDTTAPFRERLKILGRVANVDDLHLSGPEKKLMQAYNEKPVLSRPQHEFYLGDNYFEIDIDMHRFGYISRKGFETFIDRLKICVLDVGLTIQGNKPEELPEQILCCVRLNGIDFMNYHQLTQELL

SEQ ID NO: 6777 - protein, 366 aa, Arabidopsis thaliana
MSQSKSDGDLNDTNQPDLIDSSADEGLLENCRILPSNCLPCLNTTTVPSIDKRRSLSSSPPSSRKKSSLRLSYKWREGHASGALFLSKMQLKRPIAGSQVPFCPIDKKMLDCWSTIDPNSFRVRGKTYLREKKKEFAPSHAAYNPFGVDVFLSEHKIHHVAQYVKLPVTTTSTKLPSILVVNVQIPLYPTAIFQGESDGEGMNIVLYFKLSDNYSKELPLHFQESIRRLIDDEVEKVKGFPLDTTAPFRERLKILGRVANVDDLHLSGPEKKLMQAYNEKPVLSRPQHEFYLGDNYFEIDIDMHRFGYISRKGFETFIDRLKICVLDVGLTIQGNKPEELPEQILCCVRLNGIDFMNYHQLTQELL

SEQ ID NO: 6778 - protein, 278 aa, Arabidopsis thaliana
MQLKRPIAGSQVPFCPIDKKMLDCWSTIDPNSFRVRGKTYLREKKKEFAPSHAAYNPFGVDVFLSEHKIHHVAQYVKLPVTTTSTKLPSILVVNVQIPLYPTAIFQGESDGEGMNIVLYFKLSDNYSKELPLHFQESIRRLIDDEVEKVKGFPLDTTAPFRERLKILGRVANVDDLHLSGPEKKLMQAYNEKPVLSRPQHEFYLGDNYFEIDIDMHRFGYISRKGFETFIDRLKICVLDVGLTIQGNKPEELPEQILCCVRLNGIDFMNYHQLTQELL

SEQ ID NO: 6779 - DNA, 528 bp, Arabidopsis thaliana
aacttctagacaatatgggtagttcaatgggctttctcggaaaaggggtaccaccgacgcagatgatgaatatggtaatgggttcactctacaaacaatttacccaaaaagctatcaacaacttcgacgatttccacgttgctgttttagacatctttaacaacttcaactcggctttaccaggcaggcacttcgatttcccaaccccggaccaaataaaggtttgtttcgcgcggtggaaggaagcgaaagacgaagaagagaagaaaaaattgttcattgagttcatgtcaaagagcgtgaagccaagtaaactcgatgatgtcactatgatcaccggaatagtatctccaccggcggcaatggcggctaagagagcaggagagaatgtttctcagttaaaattaatcaaacttatacctgatgttatattcgtccctacggtcaccattttagccattgtctctgccaaactctctagacgaatgtatttgaaatagtgttttaactaagctttctttcttttcc

SEQ ID NO: 6780 - protein, 165 aa, Arabidopsis thaliana
LLDNMGSSMGFLGKGVPPTQMMNMVMGSLYKQFTQKAINNFDDFHVAVLDIFNNFNSALPGRHFDFPTPDQIKVCFARWKEAKDEEEKKKLFIEFMSKSVKPSKLDDVTMITGIVSPPAAMAAKRAGENVSQLKLIKLIPDVIFVPTVTILAIVSAKLSRRMYLK

SEQ ID NO: 6781 - protein, 161 aa, Arabidopsis thaliana
MGSSMGFLGKGVPPTQMMNMVMGSLYKQFTQKAINNFDDFHVAVLDIFNNFNSALPGRHFDFPTPDQIKVCFARWKEAKDEEEKKKLFIEFMSKSVKPSKLDDVTMITGIVSPPAAMAAKRAGENVSQLKLIKLIPDVIFVPTVTILAIVSAKLSRRMYLK

SEQ ID NO: 6782 - protein, 157 aa, Arabidopsis thaliana
MGFLGKGVPPTQMMNMVMGSLYKQFTQKAINNFDDFHVAVLDIFNNFNSALPGRHFDFPTPDQIKVCFARWKEAKDEEEKKKLFIEFMSKSVKPSKLDDVTMITGIVSPPAAMAAKRAGENVSQLKLIKLIPDVIFVPTVTILAIVSAKLSRRMYLK

SEQ ID NO: 6783 - DNA, 750 bp, Arabidopsis thaliana
aaacacaaaacctctcgtcttctcaaatccactctcatacacagtcacaacaatggctctttcttctggaatcttctctactacttttctctgcgtcgatacggcgccgttgcgcagctcaatgttgtctccatcttcgctccgtttgtcccctaatcatccgactaacctgcgcatggttcgagctgtaacttccgcggcggcggcttcctccgacccgacaaccacgaccaagactcgggagccacgtggcatcatgaagcctcgtccagtgtcccaggcgatgcaggatgtcgttggcgttcctgaaatccctcgtactcaagctctcaaacgcatttgggcttacatcaaggaacatgaccttcaagacccacaaaacaagagggatatactctgcgacgagaagctgaagaagatatttgaaggcaaagaacgtgttgggttcttggagattgcaaaactcattggtcctcactttctctgaatgaattttggctgagagaagacaatcattggcctatgttttcctgagctactaaaggccatgaaagatcagattacatattagtaaatttagggtttaagaagtttttatgcaaccaagtagtttataagcctttggaggatatcttatgtcggttatgtgctcatttgctttcccaatgcagttaaaatattcctctctttttttttttttttttgtcttaggacttgaaatctctctaatgcatgaagtaatgcttttat

SEQ ID NO: 6784 - protein, 161 aa, Arabidopsis thaliana
NTKPLVFSNPLSYTVTTMALSSGIFSTTFLCVDTAPLRSSMLSPSSLRLSPNHPTNLRMVRAVTSAAAASSDPTTTTKTREPRGIMKPRPVSQAMQDVVGVPEIPRTQALKRIWAYIKEHDLQDPQNKRDILCDEKLKKIFEGKERVGFLEIAKLIGPHFL

SEQ ID NO: 6785 - protein, 144 aa, Arabidopsis thaliana
MALSSGIFSTTFLCVDTAPLRSSMLSPSSLRLSPNHPTNLRMVRAVTSAAAASSDPTTTTKTREPRGIMKPRPVSQAMQDVVGVPEIPRTQALKRIWAYIKEHDLQDPQNKRDILCDEKLKKIFEGKERVGFLEIAKLIGPHFL

SEQ ID NO: 6786 - protein, 121 aa, Arabidopsis thaliana
MLSPSSLRLSPNHPTNLRMVRAVTSAAAASSDPTTTTKTREPRGIMKPRPVSQAMQDVVGVPEIPRTQALKRIWAYIKEHDLQDPQNKRDILCDEKLKKIFEGKERVGFLEIAKLIGPHFL

SEQ ID NO: 6787 - DNA, 2028 bp, Arabidopsis thaliana
tgaggcatcacaacaatcaatataagcctgggatccaattttcttatttccccaaccaaaacaggggaagaaaaaaaaagaaaacaaaaaaatcaaaaaaaattagaaaatgaaagcctcaacaagagtcatatggacaatatctgtccttatgctcgctgctgtgtccgaggccatcttccctctaccgtttctaccgttcctccctgggttcaacaacggctttagggacaatgaggctgtcaaggttgcgaaaccacagcctgcaggagcagttggtggaaaagccgcaagaaggcagcgtggcggcggtttagacgctcagacaacctggggtggtaagtgggagctcttcttggaaaactcgggtgtgtcagggatgcatgcgatccttatgccagttatcaacaaggtccagtactatgacgccaccatttggagaatttcaaagattaagttgcctccaggcgtaccatgccatgtcgtggacgctaagactaacaaggtcgattgttgggctcattcgattctcatggatgtcaacaccggcgcccttaagcctctagggctttccaccgatacatggtgctcatccggaggtctgaccgtaaatggtacattggtgagcactggaggatacggaggaggagccaacaccgcgaggtacctatccagctgtgaaaactgcaagtgggaagaataccctcaggcattggccgcgaagagatggtactcaacgcaagcaactctccctgacggaaagttcttcgtgattggtggaagagacgccttgaactacgaatacattcctgaggagggacaaaacaacaggaagctctttgactcattgctcctcaggcaaacagacgacccgaaagaaaacaacctttaccctttcgtctggcttaacaccgacggtaacctcttcattttcgctaacaaccgatccatccttctaagccccaaaacaaaccaagtcatcaaggagttccctcagctcccaggtggtgcccgtaactacccgggatcaggttcttccgcactcctccccatccaactttacgtgaaaaaccccaaggtcatcccagccgaggttctcgtctgtggtggttccaaacaagacgcgtattacaaggctggtaaaaaaatatacgaaccagcactacaagactgcgccaggataaggatcaacagcgcaaagccacgatggaagacggagatgatgccaaccccacgaatcatgagtgatactgtcatcctccctaacggagacatccttctagtcaacggagctaaacgtggttgttcaggctggggatatggtaaagaccctgcctttgctcccctcttgtacaagccccatgctgcacgtggcaagcgtttcagacagctcaagcccaccaccatcccacgtatgtaccactccagcgccatcattcttccagacggtaaggttcttgtcggtggcagcaacaccaacgacggttacaagtacaacgttgagttcccaacggagcttcgcgttgagaaattctccccaccttacctcgacccggctctagccaacataaggccaaagatcgtcaccaccggcaccccaaaacaggtcaaatacggacaattcttcaacgtgaaggtcgaccttaaagaaaagggagcaaccaagggaaatctcaaggttaccatgttagcccctgccttcacaacacacagtatctcaatgaacatgaggatgctcatcttgggtgtcaataatgtcaaacctgctggtgccggttacgatatccaggccgttgcaccaccaaatggaaacatcgctccaccgggttactatcttatctttgccatctacaaaggtgttcccagcactggagaatggattcaggtcgtctaatgacgataatttttacccattttgtcttatgaccgtaacatcttaatataaaacaatcacataatatcagtttttttttccttctatatatattgtttatgccaccattaatggatccaaattacttgtgttct

SEQ ID NO: 6788 - protein, 594 aa, Arabidopsis thaliana
MKASTRVIWTISVLMLAAVSEAIFPLPFLPFLPGFNNGFRDNEAVKVAKPQPAGAVGGKAARRQRGGGLDAQTTWGGKWELFLENSGVSGMHAILMPVINKVQYYDATIWRISKIKLPPGVPCHVVDAKTNKVDCWAHSILMDVNTGALKPLGLSTDTWCSSGGLTVNGTLVSTGGYGGGANTARYLSSCENCKWEEYPQALAAKRWYSTQATLPDGKFFVIGGRDALNYEYIPEEGQNNRKLFDSLLLRQTDDPKENNLYPFVWLNTDGNLFIFANNRSILLSPKTNQVIKEFPQLPGGARNYPGSGSSALLPIQLYVKNPKVIPAEVLVCGGSKQDAYYKAGKKIYEPALQDCARIRINSAKPRWKTEMMPTPRIMSDTVILPNGDILLVNGAKRGCSGWGYGKDPAFAPLLYKPHAARGKRFRQLKPTTIPRMYHSSAIILPDGKVLVGGSNTNDGYKYNVEFPTELRVEKFSPPYLDPALANIRPKIVTTGTPKQVKYGQFFNVKVDLKEKGATKGNLKVTMLAPAFTTHSISMNMRMLILGVNNVKPAGAGYDIQAVAPPNGNIAPPGYYLIFAIYKGVPSTGEWIQVV

SEQ ID NO: 6789 - protein, 580 aa, Arabidopsis thaliana
MLAAVSEAIFPLPFLPFLPGFNNGFRDNEAVKVAKPQPAGAVGGKAARRQRGGGLDAQTTWGGKWELFLENSGVSGMHAILMPVINKVQYYDATIWRISKIKLPPGVPCHVVDAKTNKVDCWAHSILMDVNTGALKPLGLSTDTWCSSGGLTVNGTLVSTGGYGGGANTARYLSSCENCKWEEYPQALAAKRWYSTQATLPDGKFFVIGGRDALNYEYIPEEGQNNRKLFDSLLLRQTDDPKENNLYPFVWLNTDGNLFIFANNRSILLSPKTNQVIKEFPQLPGGARNYPGSGSSALLPIQLYVKNPKVIPAEVLVCGGSKQDAYYKAGKKIYEPALQDCARIRINSAKPRWKTEMMPTPRIMSDTVILPNGDILLVNGAKRGCSGWGYGKDPAFAPLLYKPHAARGKRFRQLKPTTIPRMYHSSAIILPDGKVLVGGSNTNDGYKYNVEFPTELRVEKFSPPYLDPALANIRPKIVTTGTPKQVKYGQFFNVKVDLKEKGATKGNLKVTMLAPAFTTHSISMNMRMLILGVNNVKPAGAGYDIQAVAPPNGNIAPPGYYLIFAIYKGVPSTGEWIQVV

SEQ ID NO: 6790 - protein, 504 aa, Arabidopsis thaliana
MHAILMPVINKVQYYDATIWRISKIKLPPGVPCHVVDAKTNKVDCWAHSILMDVNTGALKPLGLSTDTWCSSGGLTVNGTLVSTGGYGGGANTARYLSSCENCKWEEYPQALAAKRWYSTQATLPDGKFFVIGGRDALNYEYIPEEGQNNRKLFDSLLLRQTDDPKENNLYPFVWLNTDGNLFIFANNRSILLSPKTNQVIKEFPQLPGGARNYPGSGSSALLPIQLYVKNPKVIPAEVLVCGGSKQDAYYKAGKKIYEPALQDCARIRINSAKPRWKTEMMPTPRIMSDTVILPNGDILLVNGAKRGCSGWGYGKDPAFAPLLYKPHAARGKRFRQLKPTTIPRMYHSSAIILPDGKVLVGGSNTNDGYKYNVEFPTELRVEKFSPPYLDPALANIRPKIVTTGTPKQVKYGQFFNVKVDLKEKGATKGNLKVTMLAPAFTTHSISMNMRMLILGVNNVKPAGAGYDIQAVAPPNGNIAPPGYYLIFAIYKGVPSTGEWIQVV

SEQ ID NO: 6791 - DNA, 1257 bp, Arabidopsis thaliana
ggcttcttgtctctctttctctctctgtatctcactaattcatttactctgcttctctcaacacaaaccaaactaagaagacacatttttcatgaaccgaactaatcatgtatcatcttcccacttcttgtctagttatattcttcctcctctccttatttcaccctcttccttgtgattcaagtaatcaaggacttggctggtgtgagactttgtttcagtgcggaaacatcaccgctggtttccccttctcgggtgggaatcgtcataaagaatgcggtcatccatcgctggagcttcactgcaacaaaaacaacatcacctctttattcatctcaaaccaaaagtactctgttctccgtatagatcaaacatctaacactcttacacttgccaaacagaaccttctaggttctttttgctcctctgtattcacaaacacaaccttgcctcccgaaactttcgagctttcacggacctacaagagcgtcactatattctaccaatgctcctctgtgcttcctaacctttctagctatacatgtcctgagataggtcccatctcagtgtctgaaagccctgaaaaatatcctgagagctgtcgttccagtttcaccgtgaaggttcccacgagtttcgatacaaaagagaaagagttgaatgtgaccaatttggaaagtgttttaagaaaaggatttgaggtgacggtggtgatcaatgagaatacatgtcaggaatgtttatcctctcttggaagatgtcatgtcttcaacgaaaacttaacaccaggagttaaatgtcgtccaccaagtgactctgagggttcttgtggatataatcagacctcaagtacgttcctctgctattgtaaggatccgtatagcctatcatgcagttcgggcaaatctaatattagatggataataggtggtgtgttgatcttgatactcatagtatcaggtattattgtttccttggtgtttctttgcctatgttgccgagccaagattgtcagaaagaaaaaatcatcagatgctcttgaagtccctcctagacctattaaagaatcaccaacactttcagaggatattaaagcacggacttgatctaagaagccgccgtggaacttttgaattgtgttcttgtatactgatacttgttctctatttgttatgcaaataatatttacagacattaactttataggatcatttctctagagtctagagtatgactttcaagacaatattttttcac

SEQ ID NO: 6792 - protein, 332 aa, Arabidopsis thaliana
MYHLPTSCLVIFFLLSLFHPLPCDSSNQGLGWCETLFQCGNITAGFPFSGGNRHKECGHPSLELHCNKNNITSLFISNQKYSVLRIDQTSNTLTLAKQNLLGSFCSSVFTNTTLPPETFELSRTYKSVTIFYQCSSVLPNLSSYTCPEIGPISVSESPEKYPESCRSSFTVKVPTSFDTKEKELNVTNLESVLRKGFEVTVVINENTCQECLSSLGRCHVFNENLTPGVKCRPPSDSEGSCGYNQTSSTFLCYCKDPYSLSCSSGKSNIRWIIGGVLILILIVSGIIVSLVFLCLCCRAKIVRKKKSSDALEVPPRPIKESPTLSEDIKART

SEQ ID NO: 6793 - DNA, 1700 bp, Arabidopsis thaliana
attcgggtcgggtcgaagttgcagaatgagatttgatttgccatactttttgtcgcctgaacgcaaaaaccttgcttaaaccctagagagatagagatgtttcgggcggttggatcggctctgaagaggaacaaagaagcgtttaatggaattgctcgaggattcaccacttcgtctcatcgagttttcacttctaacattacagctgcttctgtaacctctgcttcgtcttctcctttagctggaaactccttctatggcttgcgatctctgctcaagggtcaaaatgcttcaatgtttaggaggatgtcaactgtagcgtcgataagctcagagagtaaagagggtttgaagcttcttgtcactggaggacctcaagctcagaaatgggttggaatttggctttttggttcggctgcttgggttttcagcatggttgtacttggcggtgtaacccgattaactcgatctggtttatcgatgactgattggaaatttactggtgaattccctcctctgtcagatgaagcttgggctaaggagtttgagaaatataagcagtcacctgaatataagcgtgtgaacaaagggatgaaccttgaagattttaagttcatatattggatggagtatgctcatcgaatgtggggaagaggattgggaatcatgtttgctttgccgttttcttattttctgcgtaaagggtatattactctacgtcttggagttcagctctctggtttatttgcgcttggtgctggacaaggtttcattggttggtggatggttaaaagtggtttagaggagccaccgtctgagtattctcaaccgagggtaagcccataccgtcttgcagctcacctgacctcagcttttgccatttattgtggacttttctggaccgctctctctgttgttatgcctgaaccaccagctgagtcactggcttgggttcgcggagcagctaaagtgaagaagcttgcattaccagtaagcttgattgttggtatcactgcaatttcaggagcatttgttgctggaaatgatgctggtcgtgcattcaacacatttcccaaaatgggtgacacatggatcccagataatatatttgagatgaaaccacttttacgcaactttttcgagaacacagcaactgttcagcttgatcatcgccttctggcaaccacaacattaatcgcaatcggaacaatgtggtggttcacaaggaagctagacatacatccagctgttaaagctttgatcggaagtactgttggaatgactgctgttcaggtgacattaggtgtatcaacgcttctgagttatgttccggtttcactaggaagtgcacaccaagcaggagctttaacacttctcactttgatgctacttctcaatcacactcttcggaggccatcaccttctcttctcaaatctcttccacaagttgctaaatcaaatttcagctaagccctcttcaccaaaatctttcctttttcattatttactaaaaaaacaattctttggctcactatgctactagcaagctttcatcgaatcttgtgtcaatgatgttgtatggttcgaaaaataaagtacaaaaacaattaacaaaagtttcatatgaatcccagaactctgataactttcattgatagcttcgtgttgtttgtttcattgccaatagaaaatcattggat

SEQ ID NO: 6794 - protein, 457 aa, Arabidopsis thaliana
MFRAVGSALKRNKEAFNGIARGFTTSSHRVFTSNITAASVTSASSSPLAGNSFYGLRSLLKGQNASMFRRMSTVASISSESKEGLKLLVTGGPQAQKWVGIWLFGSAAWVFSMVVLGGVTRLTRSGLSMTDWKFTGEFPPLSDEAWAKEFEKYKQSPEYKRVNKGMNLEDFKFIYWMEYAHRMWGRGLGIMFALPFSYFLRKGYITLRLGVQLSGLFALGAGQGFIGWWMVKSGLEEPPSEYSQPRVSPYRLAAHLTSAFAIYCGLFWTALSVVMPEPPAESLAWVRGAAKVKKLALPVSLIVGITAISGAFVAGNDAGRAFNTFPKMGDTWIPDNIFEMKPLLRNFFENTATVQLDHRLLATTTLIAIGTMWWFTRKLDIHPAVKALIGSTVGMTAVQVTLGVSTLLSYVPVSLGSAHQAGALTLLTLMLLLNHTLRRPSPSLLKSLPQVAKSNFS

SEQ ID NO: 6795 - protein, 391 aa, Arabidopsis thaliana
MFRRMSTVASISSESKEGLKLLVTGGPQAQKWVGIWLFGSAAWVFSMVVLGGVTRLTRSGLSMTDWKFTGEFPPLSDEAWAKEFEKYKQSPEYKRVNKGMNLEDFKFIYWMEYAHRMWGRGLGIMFALPFSYFLRKGYITLRLGVQLSGLFALGAGQGFIGWWMVKSGLEEPPSEYSQPRVSPYRLAAHLTSAFAIYCGLFWTALSVVMPEPPAESLAWVRGAAKVKKLALPVSLIVGITAISGAFVAGNDAGRAFNTFPKMGDTWIPDNIFEMKPLLRNFFENTATVQLDHRLLATTTLIAIGTMWWFTRKLDIHPAVKALIGSTVGMTAVQVTLGVSTLLSYVPVSLGSAHQAGALTLLTLMLLLNHTLRRPSPSLLKSLPQVAKSNFS

SEQ ID NO: 6796 - protein, 387 aa, Arabidopsis thaliana
MSTVASISSESKEGLKLLVTGGPQAQKWVGIWLFGSAAWVFSMVVLGGVTRLTRSGLSMTDWKFTGEFPPLSDEAWAKEFEKYKQSPEYKRVNKGMNLEDFKFIYWMEYAHRMWGRGLGIMFALPFSYFLRKGYITLRLGVQLSGLFALGAGQGFIGWWMVKSGLEEPPSEYSQPRVSPYRLAAHLTSAFAIYCGLFWTALSVVMPEPPAESLAWVRGAAKVKKLALPVSLIVGITAISGAFVAGNDAGRAFNTFPKMGDTWIPDNIFEMKPLLRNFFENTATVQLDHRLLATTTLIAIGTMWWFTRKLDIHPAVKALIGSTVGMTAVQVTLGVSTLLSYVPVSLGSAHQAGALTLLTLMLLLNHTLRRPSPSLLKSLPQVAKSNFS

SEQ ID NO: 6797 - DNA, 512 bp, Arabidopsis thaliana
ataaacatcgcatcactcttcttctcctccgtcgtctctcatcgcttttcgctgaaatcaaaatttctccagttttccgatcactcgcaagaaaaccctaaaaatggatggtcatgattctgaggatactaagcagagcactgctgatatgactgcttttgtccaaaatcttctccagcagatgcaaaccaggttccagacaatgtcggactccatcatcacaaagattgatgacatgggaggcagaatcaatgagctggagcaaagcatcaatgatctaagagccgagatgggagtagaaggcactcctcctccagcctccaaatcaggcgatgaacccaaaacaccggctagttcctcttaaaaaggaatgtggtgttcattgacatgtccgaaggaaaaagaaaaactatgaaatatgttaagagcagtattacttttaaaattcctgttttaagaaacgagtttgttgtttattaaagttcatcaaatagattgatgatgtggtgcac

SEQ ID NO: 6798 - protein, 86 aa, Arabidopsis thaliana
MDGHDSEDTKQSTADMTAFVQNLLQQMQTRFQTMSDSIITKIDDMGGRINELEQSINDLRAEMGVEGTPPPASKSGDEPKTPASSS

SEQ ID NO: 6799 - protein, 71 aa, Arabidopsis thaliana
MTAFVQNLLQQMQTRFQTMSDSIITKIDDMGGRINELEQSINDLRAEMGVEGTPPPASKSGDEPKTPASSS

SEQ ID NO: 6800 - protein, 60 aa, Arabidopsis thaliana
MQTRFQTMSDSIITKIDDMGGRINELEQSINDLRAEMGVEGTPPPASKSGDEPKTPASSS

SEQ ID NO: 6801 - DNA, 1050 bp, Arabidopsis thaliana
aatctttatgattctctctctctcacacagtcctttctcactcataattaaattaagccttaatgaaaaatctatctatctcctcctttaattttctctctgtgttctttcttgtatataaaggcctaagctcaagcaatccaaccaccagtggtaataagagagaagactcttctttttttttggtagaagaagactcttctttgtgatacaagtaaccagtctttgagatcacagaaaacctccttctcaaaccgtaggtttcaagatgagtcgaagaagtccaaagctggaactgaagttgaatctctcgccgcctacgtcaagccagaggaggatggttcgatctccaagccgctcagcgacgacttcaccgacctcacctccaagctcatgcgtctcgtcggagatgaaccaggacgagccatctgtgagatactcgacaagtccagagactacctcgatggttcttgtcggatgtcctcgttgtctcatgtacgttatgctctcagaagacgaccctaaatgccctaaatgcaaaagcaccgttcttcttgatttcctccatgaaaacgccacaaacgccaacgcaaacgcagccgctgcttcctctggtcgcaagactcgaaggaactgatgaaggaccagtaaaatcaaaatcctgttccttctttatgttatttatttttctttcgttttttttgcgaatgtagctgttgtttttatgagagtagtgctaatcacgctccactctaaaacccggagaagaaggtaggagaaggaaattagggtttccctattcaagaaaattttcaaaaagagtggagcgcgaatagcactaacttttctttttcttttctctcaacatttttctaccatttgagttctctaatggaagaagaatttttaaatatatgtgaaaacatgtgtcattgtcttcgtattcctctactctatctaatttctcatactctgtttcggatgctctgtttctagggcatctctgttttttggatgtgtttgtaaaaagaaaatagaggttttgtgtgg

SEQ ID NO: 6802 - protein, 122 aa, Arabidopsis thaliana
MSRRSPKLELKLNLSPPTSSQRRMVRSPSRSATTSPTSPPSSCVSSEMNQDEPSVRYSTSPETTSMVLVGCPRCLMYVMLSEDDPKCPKCKSTVLLDFLHENATNANANAAAASSGRKTRRN

SEQ ID NO: 6803 - protein, 99 aa, Arabidopsis thaliana
MVRSPSRSATTSPTSPPSSCVSSEMNQDEPSVRYSTSPETTSMVLVGCPRCLMYVMLSEDDPKCPKCKSTVLLDFLHENATNANANAAAASSGRKTRRN

SEQ ID NO: 6804 - protein, 75 aa, Arabidopsis thaliana
MNQDEPSVRYSTSPETTSMVLVGCPRCLMYVMLSEDDPKCPKCKSTVLLDFLHENATNANANAAAASSGRKTRRN

SEQ ID NO: 6805 - DNA, 981 bp, Arabidopsis thaliana
tcttgcgacgggccctgctacccggtgcgtgacaggttgaatcattctcctccgattcacggtgattccggcgactacagactcaacatttaataagccgatctcttacatggtacgagctcggacaaattgaagaatacaaaggtccgagaaataatttggaataatggcgtcttcatcggattcatggatgagagcatacaacgaggctttaaaactctctgaggagattaatggaatgatatcagaaagaagttcatcggctgtcacagggcctgatgctcagcgtcgtgcttcagctatacgaaggaagatcaccattttcggtaacaaattagatagtctgcagtctcttcttgctgaaattcatggaaaacctatttcagagaaagagatgaatcggcgaaaggatatggtagggaatctgaggtcaaaagcaaaccagatggcgaatgctttgaacatgtcaaactttgccaatagagacagcttgctcgggccagatatcaagccggatgattccatgagcagagttactggcatggataaccaaggaattgttggatatcaacgacaagttatgagagaacaagacgaaggacttgagcaattggagggaacagtcatgagcacaaaacacattgctctggctgttagtgaagagcttgacttgcagactaggcttattgatgacttagattaccatgtggatgttactgactctcgcttaaggagagtgcagaagagccttgctgtcatgaacaagaatatgagaagtggttgctcttgcatgtcaatgctcttgtcagtgctggggatcgtcggtcttgctgttgtaatatggatgttggttaagtatatgtaataccaacatcagacaacttataagttcctctgtaggtccactggcctctactctctatgtgaatggttgcaatgtatttcctcattccacatttgtggctgagcttttcatttctc

SEQ ID NO: 6806 - protein, 232 aa, Arabidopsis thaliana
MASSSDSWMRAYNEALKLSEEINGMISERSSSAVTGPDAQRRASAIRRKITIFGNKLDSLQSLLAEIHGKPISEKEMNRRKDMVGNLRSKANQMANALNMSNFANRDSLLGPDIKPDDSMSRVTGMDNQGIVGYQRQVMREQDEGLEQLEGTVMSTKHIALAVSEELDLQTRLIDDLDYHVDVTDSRLRRVQKSLAVMNKNMRSGCSCMSMLLSVLGIVGLAVVIWMLVKYM

SEQ ID NO: 6807 - protein, 224 aa, Arabidopsis thaliana
MRAYNEALKLSEEINGMISERSSSAVTGPDAQRRASAIRRKITIFGNKLDSLQSLLAEIHGKPISEKEMNRRKDMVGNLRSKANQMANALNMSNFANRDSLLGPDIKPDDSMSRVTGMDNQGIVGYQRQVMREQDEGLEQLEGTVMSTKHIALAVSEELDLQTRLIDDLDYHVDVTDSRLRRVQKSLAVMNKNMRSGCSCMSMLLSVLGIVGLAVVIWMLVKYM

SEQ ID NO: 6808 - protein, 208 aa, Arabidopsis thaliana
MISERSSSAVTGPDAQRRASAIRRKITIFGNKLDSLQSLLAEIHGKPISEKEMNRRKDMVGNLRSKANQMANALNMSNFANRDSLLGPDIKPDDSMSRVTGMDNQGIVGYQRQVMREQDEGLEQLEGTVMSTKHIALAVSEELDLQTRLIDDLDYHVDVTDSRLRRVQKSLAVMNKNMRSGCSCMSMLLSVLGIVGLAVVIWMLVKYM

SEQ ID NO: 6809 - DNA, 961 bp, Arabidopsis thaliana
gattttcctcttctcttcttcttcctcctcctcctctcggattcttccttaaagtttccacctttcgccaccgagaaaacattccggcaaaccctcgtcggaatacttaatctctttgataatctttctctctggtgacgttttgtgaatggtggaaactaatctgattggtgataatcataggctcaccctttcaactaaaagggcgagctttctcatcatccctctctctcaagactctgttttctcattcggttcttgcaaagaaggctggtacttccgttgcattggccttgacccgtgaaccaatcaatcatcatctccgatcatattttcaataataatttctgtgttttgattttttgagaattttgaaaaaaagatgttgctttacaagaaaaagaatcagattgttaaaggaaacagaatcttgatcagcgtaacgtttcttggtagtgctggtccgatccggttcgttgctaatgaaggtgatcttgttgcatctgtgattgatactgctttgaaatgttatgctcgtgaaggtcgtcttcctattcttggatctgatttcaacgattttgttttttattgtccaatggttggacctggagctttgagtccatgggaagcaattgggtcggtgggagtgaggaactttatgttgtgtaagaagaaaccagaggagaagaaggttgaggaagataagggaagatcgaattttccgattaatggagctagaaaaggagctggtggaagttttaaggcttggattaataaatctttaagacttaaagtgactacccattagagagactacttatatgttgtcttctctgtttctttgaatgctcatgtttggtttgtgtctttgttcttttgatcttcttattttatgaacttttgatttgttttttttgtttcttatgatggtttcaggaaataaaagtttcaagttcatttg

SEQ ID NO: 6810 - protein, 141 aa, Arabidopsis thaliana
MLLYKKKNQIVKGNRILISVTFLGSAGPIRFVANEGDLVASVIDTALKCYAREGRLPILGSDFNDFVFYCPMVGPGALSPWEAIGSVGVRNFMLCKKKPEEKKVEEDKGRSNFPINGARKGAGGSFKAWINKSLRLKVTTH

SEQ ID NO: 6811 - protein, 70 aa, Arabidopsis thaliana
MVGPGALSPWEAIGSVGVRNFMLCKKKPEEKKVEEDKGRSNFPINGARKGAGGSFKAWINKSLRLKVTTH

SEQ ID NO: 6812 - DNA, 1102 bp, Arabidopsis thaliana
gtcgtcacttaaccgagaaagcaaaagagaagaagaagaaggaatcgaaaaatgaggactccgatccacgcggtttcgacatgggtgaggaggcagcctccaaaggtgaaagctttccttgccgtcgtatctggcatggcggctcttgttctcctcaaactcatcgttcacgatcacgacaatctcttcgttgccgccgaagctgttcattctattggaatctctgttcttatctataaactcatgaaggagaagacttgtgctggattgtcattgaaatctcaggagcttacggcgatatttctagctgtgaggctttattgcagttttgtaatggaatatgatatacataccattctggacttggctactttgggaacaactctctgggttatatatatgatccgttttaacctcaaaactacttacatggaggaaaaagacaacttcgctctctattatgtgctggcgccctgtgttgtgctagctgtatggattcatccatcaacgtcacacaatatattgaatagaatatcctggggattctgtgtttacctcgaagctgtttcagtactgccacagttgagagtgatgcagaacacaaagattgtcgaacccttcacggctcattatgtttttgcacttggagtagcaagattttttagctgtgcacactgggttttacagatgatggacacgcacggacgactgcttgtagtgctgggttatggactatggccatcgatggttataatctcagaaatagtccaaacattcatattggcagatttctgttactactacgttaaaagtgttttcggtggccagcttgttctaaggcttccatctggggttgtgtaagttataaaggaaaaaagataagacacattatgacgaaatttgttacacgaagatagatctcagcttggtgtaatctgagtagcctctggttactctcaagttactccctcaggccaagtcctaattctattaactgtgttgtatatttttgtgtgggtcatcatcatagacagtcccttggatattattgacatgattttttccactgcatttgtgctaaattatccttggttcccacggc

SEQ ID NO: 6813 - protein, 269 aa, Arabidopsis thaliana
MRTPIHAVSTWVRRQPPKVKAFLAVVSGMAALVLLKLIVHDHDNLFVAAEAVHSIGISVLIYKLMKEKTCAGLSLKSQELTAIFLAVRLYCSFVMEYDIHTILDLATLGTTLWVIYMIRFNLKTTYMEEKDNFALYYVLAPCVVLAVWIHPSTSHNILNRISWGFCVYLEAVSVLPQLRVMQNTKIVEPFTAHYVFALGVARFFSCAHWVLQMMDTHGRLLVVLGYGLWPSMVIISEIVQTFILADFCYYYVKSVFGGQLVLRLPSGVV

SEQ ID NO: 6814 - protein, 241 aa, Arabidopsis thaliana
MAALVLLKLIVHDHDNLFVAAEAVHSIGISVLIYKLMKEKTCAGLSLKSQELTAIFLAVRLYCSFVMEYDIHTILDLATLGTTLWVIYMIRFNLKTTYMEEKDNFALYYVLAPCVVLAVWIHPSTSHNILNRISWGFCVYLEAVSVLPQLRVMQNTKIVEPFTAHYVFALGVARFFSCAHWVLQMMDTHGRLLVVLGYGLWPSMVIISEIVQTFILADFCYYYVKSVFGGQLVLRLPSGVV

SEQ ID NO: 6815 - protein, 205 aa, Arabidopsis thaliana
MKEKTCAGLSLKSQELTAIFLAVRLYCSFVMEYDIHTILDLATLGTTLWVIYMIRFNLKTTYMEEKDNFALYYVLAPCVVLAVWIHPSTSHNILNRISWGFCVYLEAVSVLPQLRVMQNTKIVEPFTAHYVFALGVARFFSCAHWVLQMMDTHGRLLVVLGYGLWPSMVIISEIVQTFILADFCYYYVKSVFGGQLVLRLPSGVV

SEQ ID NO: 6816 - DNA, 578 bp, Arabidopsis thaliana
accagtttcacaattccgactattttttagagttttctctattcgtaaaaaggtagagaaagaaacacagaagaaggagaaggaaaaagaaaaaacacaaatggaagggaaagaggaagaagcaaagaggaggatgatgatgaagatcaaacttaaggagacagaagcagacgtaagccaagacgacattaaaagacaagaagcttacaacatgtctccacgcgtacgtcgtggtggtggtggtggcggtggctcggtaggtatgagcaagtcatcgagcgtgaggcaaaactgtttatgcgcaccaactacacaccctggctccttcaggtgccgttaccaccgtcgtaacgctggactcgggatgtctcgtggcacatccgttccctctaacctttccatgttggctggtggagactctaattctcccaagtgatgattaatatatattatgtgtttcttctcatcaatttaaaattctcgtatgtgtctgtgtatatacaaaaatgcataagtcgagaaatctctggatattcactttgctgtttgcacaaatgaaataaattcaaatgatcgcg

SEQ ID NO: 6817 - protein, 144 aa, Arabidopsis thaliana
PVSQFRLFFRVFSIRKKVEKETQKKEKEKEKTQMEGKEEEAKRRMMMKIKLKETEADVSQDDIKRQEAYNMSPRVRRGGGGGGGSVGMSKSSSVRQNCLCAPTTHPGSFRCRYHRRNAGLGMSRGTSVPSNLSMLAGGDSNSPK

SEQ ID NO: 6818 - protein, 111 aa, Arabidopsis thaliana
MEGKEEEAKRRMMMKIKLKETEADVSQDDIKRQEAYNMSPRVRRGGGGGGGSVGMSKSSSVRQNCLCAPTTHPGSFRCRYHRRNAGLGMSRGTSVPSNLSMLAGGDSNSPK

SEQ ID NO: 6819 - protein, 100 aa, Arabidopsis thaliana
MMMKIKLKETEADVSQDDIKRQEAYNMSPRVRRGGGGGGGSVGMSKSSSVRQNCLCAPTTHPGSFRCRYHRRNAGLGMSRGTSVPSNLSMLAGGDSNSPK

SEQ ID NO: 6820 - DNA, 1266 bp, Arabidopsis thaliana
ctgtgaataaatttatgtgtgaaaaaaaattgtacgttggaatagtgaaaaccctaactgacaaaatcagtaacattacacaagctgtgttccattaaagtctgtgtttatatacaaagaacttgctcattcctcaaagcatccacacataatcacgatgaagctctttgttcatctctctatcttcttctccatcctcttcatcactctcccatcttcttacagctgcaccgaaaatgacaagaatgccctccttcaaatcaagaaagcacttggcaatcctccccttctatcctcctggaacccccgaaccgactgttgtaccggctggaccggcgtcgaatgcactaaccgtcgcgttaccggtctcagcgttacctccggcgaagtctccggtcagatctcgtaccagatcggcgacctcgttgacctccgtacactagatttcagctacctgccacacctcaccggaaacatcccacgcaccatcaccaaactcaagaacctcaacactctctacttgaagcacactagtctctccggtccgattcctgattacatcagcgagctcaagagcctcacgttcttggacctttcttttaaccaatttaccggtccaattcccggttcgctatctcagatgccgaagcttgaagccattcaaatcaacgataataagctaaccggttctataccaaactctttcggttcttttgttggcaacgtccctaatctctacttgtctaacaataagctgtcaggaaaaataccggaatcgttgtctaaatacgacttcaacgcagtggatttgtcgggaaatggtttcgaaggagatgcctttatgttcttcggacggaacaaaacaacagtacgagtggatttgtcgagaaacatgtttaatttcgatctcgtcaaggttaagttcgctagaagcatagtttcgttggatctgagccagaaccatatctacgggaagataccaccagcactgactaaactacacctcgagcatttcaacgtgagcgacaaccatctctgcggaaaaatcccaagtggcggtctacttcagacctttgaaccatctgccttcgctcacaacatctgtctttgtggaactccccttaaggcttgttaatttggtttaatcttggcggaagaataaaaataatgttgaatatgttatgatgatgtgttcattatcaccgccaaaccaagtttattgtttctttgttatgaatttaatttaatggcaagaattggttacgt

SEQ ID NO: 6821 - protein, 325 aa, Arabidopsis thaliana
MKLFVHLSIFFSILFITLPSSYSCTENDKNALLQIKKALGNPPLLSSWNPRTDCCTGWTGVECTNRRVTGLSVTSGEVSGQISYQIGDLVDLRTLDFSYLPHLTGNIPRTITKLKNLNTLYLKHTSLSGPIPDYISELKSLTFLDLSFNQFTGPIPGSLSQMPKLEAIQINDNKLTGSIPNSFGSFVGNVPNLYLSNNKLSGKIPESLSKYDFNAVDLSGNGFEGDAFMFFGRNKTTVRVDLSRNMFNFDLVKVKFARSIVSLDLSQNHIYGKIPPALTKLHLEHFNVSDNHLCGKIPSGGLLQTFEPSAFAHNICLCGTPLKAC

SEQ ID NO: 6822 - protein, 164 aa, Arabidopsis thaliana
MPKLEAIQINDNKLTGSIPNSFGSFVGNVPNLYLSNNKLSGKIPESLSKYDFNAVDLSGNGFEGDAFMFFGRNKTTVRVDLSRNMFNFDLVKVKFARSIVSLDLSQNHIYGKIPPALTKLHLEHFNVSDNHLCGKIPSGGLLQTFEPSAFAHNICLCGTPLKAC

SEQ ID NO: 6823 - DNA, 469 bp, Arabidopsis thaliana
aaaaaatagagaaatattaaaattcgtgcgttgagagaaaaacgttgaacgatgggagccggtaatggagaaacgccaaaacctacacagatttcaatttctaaagatcaattcctcgcttggaaacgccaaaaggatgctgagttattagccaaacaagctgaagcagcaaggaaacgacaagaggacatagcttcaggtcgtgttccaatgaatggtcgtgagcttttcttgcatgagccttgggttttcgacgatactcatcattgattctggtctattcactacttcttcataggtgatttaagacatttcctcgatgatttgtgatccaactctgtttctcttttgttgttgtactctcatgttcccacttttgtctcaagtgttaaatcagaaatttagtcctcagtaattgtgacttaatcgttggctctgattatttggaaatttggtggttgaatgttac

SEQ ID NO: 6824 - protein, 72 aa, Arabidopsis thaliana
MGAGNGETPKPTQISISKDQFLAWKRQKDAELLAKQAEAARKRQEDIASGRVPMNGRELFLHEPWVFDDTHH

SEQ ID NO: 6825 - DNA, 1828 bp, Arabidopsis thaliana
gtggagaaggagaagaaggataaggatgataacggtaagcgaagtttcctcttactcttcttcttcttcaaacttcgcgtctctgtctcgtctcaatcacaaatcatcttcgagattgcgaagctcttctctttacaaaggaagcttcttctctgtttcgacaaagaccaggaggaacacttgtaaagccaaatcatggaatctcggtcttgttatcaactctagaagctctgaggcttcggtttttgatccgttggggatcaatccagatgaaacttctggtttaagtagcatttgggaaagctttgtgagtcttttgtcaccatcatttgaaagctcttccggtaacaggcgagataagccgtcttctggtagaggcgtggcagctgctattgaggacagttccattgattttggagatttcttcaaagggccattgccagggaagtttctgaagcttcttgggtttttagctctctctcggcttggaatttacataccactcggcggggttaatcgagaagcttttgttggaaatttggatcagaatagcattttgagcactttggatacattttctggtggaggcataggtagacttggtatatgttctctcgggattgttcctttcatcaacgctcagattgtgtttcagcttcttgctcaagtctatccaaagttgcaagatcttcagaaaaaagaaggtgaagctggtagaaaaaagattcttcagtatactagatatgcttcagttggttttgcgatagtacaagcaatcggacaagtgttttaccttcgtccttacgttaatgacttcagcacggaatgggttgtttcttctgttacgttgttaacgcttggttctgttctcactacatatattggagagagaatctctgatctgaaacttggaaatggcacttccctattgattttcacaagtatcatctcttacttgcctgcatcattcggtagaacaacagcagaggccttacaggaaggaaactatactggtcttggaaccatcgttgtttcatttctcctcttggtactcgggatagtatatgttcaggaagcagagaggaaaattccgctcaattatgcctcgcgatacaccagcaaagctggtgggcttcagaaatctgcttatcttccattcaaggtcaatagtgcgggagtaatgcctatcatattctccacatcatctcttgctcttcctgctactttagcacgatttaccggcatatctgctttgaagaatgttgcttttgctttaacccctggaggttctttctatcttccaaccaatatacttctcatagctttcttcaactactactacactttcttgcaacttgacccggacgacgtgagtgaacaattaaaacgccaaggtgcatcaatccctctagtccgacctggtaaaagcactgctctcttcatcaaaaccgtccttggccggatatcggttcttggttctgcatttctggctgttctagctgctggtcctgctgtagtcgaacagatcactcacttgacagcattcagaggatttgcaggcacttctgttctgatccttgtcgggtgtgcgacagatactgcaagaaaggttcaagcagagataatctcgcaaaagtacaagaacattgagttttacgagcttgacaagtatgatccatgaactggaccttctgttttacatataatacccatcaaaccaagttactgtgttctcttgtcatagattgtaacaaatgttttaaactttgattagtatataatgcacttttgtcatgagcttgccaaaggaaagtgaaacctagtatat

SEQ ID NO: 6826 - protein, 559 aa, Arabidopsis thaliana
WRRRRRIRMITVSEVSSYSSSSSNFASLSRLNHKSSSRLRSSSLYKGSFFSVSTKTRRNTCKAKSWNLGLVINSRSSEASVFDPLGINPDETSGLSSIWESFVSLLSPSFESSSGNRRDKPSSGRGVAAAIEDSSIDFGDFFKGPLPGKFLKLLGFLALSRLGIYIPLGGVNREAFVGNLDQNSILSTLDTFSGGGIGRLGICSLGIVPFINAQIVFQLLAQVYPKLQDLQKKEGEAGRKKILQYTRYASVGFAIVQAIGQVFYLRPYVNDFSTEWVVSSVTLLTLGSVLTTYIGERISDLKLGNGTSLLIFTSIISYLPASFGRTTAEALQEGNYTGLGTIVVSFLLLVLGIVYVQEAERKIPLNYASRYTSKAGGLQKSAYLPFKVNSAGVMPIIFSTSSLALPATLARFTGISALKNVAFALTPGGSFYLPTNILLIAFFNYYYTFLQLDPDDVSEQLKRQGASIPLVRPGKSTALFIKTVLGRISVLGSAFLAVLAAGPAVVEQITHLTAFRGFAGTSVLILVGCATDTARKVQAEIISQKYKNIEFYELDKYDP

SEQ ID NO: 6827 - protein, 551 aa, Arabidopsis thaliana
MITVSEVSSYSSSSSNFASLSRLNHKSSSRLRSSSLYKGSFFSVSTKTRRNTCKAKSWNLGLVINSRSSEASVFDPLGINPDETSGLSSIWESFVSLLSPSFESSSGNRRDKPSSGRGVAAAIEDSSIDFGDFFKGPLPGKFLKLLGFLALSRLGIYIPLGGVNREAFVGNLDQNSILSTLDTFSGGGIGRLGICSLGIVPFINAQIVFQLLAQVYPKLQDLQKKEGEAGRKKILQYTRYASVGFAIVQAIGQVFYLRPYVNDFSTEWVVSSVTLLTLGSVLTTYIGERISDLKLGNGTSLLIFTSIISYLPASFGRTTAEALQEGNYTGLGTIVVSFLLLVLGIVYVQEAERKIPLNYASRYTSKAGGLQKSAYLPFKVNSAGVMPIIFSTSSLALPATLARFTGISALKNVAFALTPGGSFYLPTNILLIAFFNYYYTFLQLDPDDVSEQLKRQGASIPLVRPGKSTALFIKTVLGRISVLGSAFLAVLAAGPAVVEQITHLTAFRGFAGTSVLILVGCATDTARKVQAEIISQKYKNIEFYELDKYDP

SEQ ID NO: 6828 - DNA, 1684 bp, Arabidopsis thaliana
atttatgaggggtgagttgattcattaattcttggatctttgggtgtctaggtttacttagagaagtgacttgtgtctttaatgggtttgttgaaagatgtgtcagtgacatgaagaagacgaacaacaacaataagcttgcaataaatgttttgccttcatcttcatcacacatcaacaccacacaaaaagtgtttttcatactcttcagaaaagtcaataccgtgaaaaagaggagactcctgactcctcagtcattgcaatgtcttcttcttcttcttgcttgttcttcactttcattctcttactcagtctcttctcctcctatgcttctccatcgaattcgacatccgaaactgtgcctctccggcctcaaagagagattcagaagatgaaactcatcagaaaacaactccaaaagattaataaaccagccatcaagaccattcatagctcagatggagatacgatagattgtgttccatctcatcaccagcctgcttttgatcatcctttgttacagggacaacgaccaatggatccaccggagatgcctatagggtatagccaagaaaatgaatcccacgaaaatttccagctttggagtttatacggtgagtcttgcccggaaggtacgattccgatcagaagaacaacggagcaagacatgttaagagcaaattctgtccgtagatttggtcggaaaatcaggcgcgtgagaagggattcgagcagtaatggccacgagcatgcggttggatacgtatcgggaagtcaatactacggagcaaaagcaagtataaacgtgtggacgccacgtgtcataagccaatacgagtttagtctatctcagatttggatcatcgccggttctttcgccggcgatcttaataccatcgaagctggttggcagattagcccggagctatacggagacactaacccaagattcttcacctattggacgtcggatgcttaccaagcaacaggatgctataacctactatgttctggttttgttcaaacaaacaatcgaatcgcaattggagcggcgatttcgcccgtttcgtcgtataaaggtggacaattcgatataagcttattgatatggaaggacccaaagcatggacattggtggctccaattcgggtcgggtacactagtcggatattggcccgtatctctgttcacacacctgagggagcatggaaacatggtccagtttggtggcgagatcgtgaacacacgacctggtggttcacatacttcgactcaaatgggcagtggccattttgccggtgaaggttttggaaaagcgtcttactttaggaatcttcaaatggtagattgggacaatactcttattccgatatctaatcttaaagttcttgcagatcatcctaattgttatgatataagaggaggggtaaaccgtgtttggggtaactttttttattacggaggaccgggtaaaaactcgaaatgtccatagagaaaaaaaagaagtggatagtgttgttttgagcttaagtaaatgagattttttgggatttagagctcaggacaatgatgaaagatccatagtttttttttttgtttgtaagaaaagaaatgtatcgattgattgatatgttatcaaatgtgtaaatgtagaatatggtgttaagtggaagtaggcgtttat

SEQ ID NO: 6829 - protein, 409 aa, Arabidopsis thaliana
MSSSSSCLFFTFILLLSLFSSYASPSNSTSETVPLRPQREIQKMKLIRKQLQKINKPAIKTIHSSDGDTIDCVPSHHQPAFDHPLLQGQRPMDPPEMPIGYSQENESHENFQLWSLYGESCPEGTIPIRRTTEQDMLRANSVRRFGRKIRRVRRDSSSNGHEHAVGYVSGSQYYGAKASINVWTPRVISQYEFSLSQIWIIAGSFAGDLNTIEAGWQISPELYGDTNPRFFTYWTSDAYQATGCYNLLCSGFVQTNNRIAIGAAISPVSSYKGGQFDISLLIWKDPKHGHWWLQFGSGTLVGYWPVSLFTHLREHGNMVQFGGEIVNTRPGGSHTSTQMGSGHFAGEGFGKASYFRNLQMVDWDNTLIPISNLKVLADHPNCYDIRGGVNRVWGNFFYYGGPGKNSKCP

SEQ ID NO: 6830 - protein, 366 aa, Arabidopsis thaliana
MKLIRKQLQKINKPAIKTIHSSDGDTIDCVPSHHQPAFDHPLLQGQRPMDPPEMPIGYSQENESHENFQLWSLYGESCPEGTIPIRRTTEQDMLRANSVRRFGRKIRRVRRDSSSNGHEHAVGYVSGSQYYGAKASINVWTPRVISQYEFSLSQIWIIAGSFAGDLNTIEAGWQISPELYGDTNPRFFTYWTSDAYQATGCYNLLCSGFVQTNNRIAIGAAISPVSSYKGGQFDISLLIWKDPKHGHWWLQFGSGTLVGYWPVSLFTHLREHGNMVQFGGEIVNTRPGGSHTSTQMGSGHFAGEGFGKASYFRNLQMVDWDNTLIPISNLKVLADHPNCYDIRGGVNRVWGNFFYYGGPGKNSKCP

SEQ ID NO: 6831 - protein, 318 aa, Arabidopsis thaliana
MDPPEMPIGYSQENESHENFQLWSLYGESCPEGTIPIRRTTEQDMLRANSVRRFGRKIRRVRRDSSSNGHEHAVGYVSGSQYYGAKASINVWTPRVISQYEFSLSQIWIIAGSFAGDLNTIEAGWQISPELYGDTNPRFFTYWTSDAYQATGCYNLLCSGFVQTNNRIAIGAAISPVSSYKGGQFDISLLIWKDPKHGHWWLQFGSGTLVGYWPVSLFTHLREHGNMVQFGGEIVNTRPGGSHTSTQMGSGHFAGEGFGKASYFRNLQMVDWDNTLIPISNLKVLADHPNCYDIRGGVNRVWGNFFYYGGPGKNSKCP

SEQ ID NO: 6832 - DNA, 1287 bp, Arabidopsis thaliana
atgtataaaaacacttgcgagcgcagcttcatcgccatcgccattctctctctcatcaaaagcttttctccttgattttcgcattctttagagtcttaacgcaaagatgagacctcctctaactggaagtggtggtgggttcagtggtggaagagggcgtggtggatacagtggtggtagaggtgacggtggattcagtggtggtcgaggtggcggtggtagaggaggaggaagaggtttcagcgaccgtggtggtcgcggcagaggaagaggaccaccacgtggtggtgctcgcggcggcagaggaccagctggccgtggaggcatgaaaggaggaagcaaagtgattgtggaacctcacagacacgcaggagtgttcattgcaaagggtaaagaagatgcccttgttaccaagaatttggttcctggtgaagctgtctacaacgagaagagaatctctgttcagaacgaagatggaaccaagactgaatacagagtttggaatcctttccgttcgaagttggctgctgctattcttggtggtgttgataacatctggattaaacctggtgctaaagttctataccttggtgctgcttctggaaccacagtctctcatgtgtctgatcttgttggccctgaggggtgtgtgtacgcggttgagttttctcatagaagtggtagagatttggtgaacatggcaaagaagagaaccaatgttattccaatcatcgaggatgctagacacccagctaaatacagaatgcttgtaggcatggttgatgttatcttctctgatgttgctcagccagatcaggctaggatcttggctttgaatgcatcatacttcctcaagtcaggaggacactttgtgatctcaataaaggcaaactgtatcgactccaccgttccagcagaagctgtgttccagactgaagtgaagaagcttcaacaggagcaattcaaaccagctgagcaagtgacgcttgagccatttgagcgtgaccatgcatgtgtcgttggtggctaccgtatgcctaagaagccaaaggctgctactgctgcttagaagttttctactctacgctcttcccagtacctcagattttgctttgtctcggtctctttagaatctgtatggttttagggtttatcttaaattttgagctttgtaatcattttgaaccctggttatgttcacttggcttccagcgctaactttttcgacaagtttttgatatatggaacaattataatagaattttgtcgactgaggttgatttcttt

SEQ ID NO: 6833 - protein, 320 aa, Arabidopsis thaliana
MRPPLTGSGGGFSGGRGRGGYSGGRGDGGFSGGRGGGGRGGGRGFSDRGGRGRGRGPPRGGARGGRGPAGRGGMKGGSKVIVEPHRHAGVFIAKGKEDALVTKNLVPGEAVYNEKRISVQNEDGTKTEYRVWNPFRSKLAAAILGGVDNIWIKPGAKVLYLGAASGTTVSHVSDLVGPEGCVYAVEFSHRSGRDLVNMAKKRTNVIPIIEDARHPAKYRMLVGMVDVIFSDVAQPDQARILALNASYFLKSGGHFVISIKANCIDSTVPAEAVFQTEVKKLQQEQFKPAEQVTLEPFERDHACVVGGYRMPKKPKAATAA

SEQ ID NO: 6834 - protein, 247 aa, Arabidopsis thaliana
MKGGSKVIVEPHRHAGVFIAKGKEDALVTKNLVPGEAVYNEKRISVQNEDGTKTEYRVWNPFRSKLAAAILGGVDNIWIKPGAKVLYLGAASGTTVSHVSDLVGPEGCVYAVEFSHRSGRDLVNMAKKRTNVIPIIEDARHPAKYRMLVGMVDVIFSDVAQPDQARILALNASYFLKSGGHFVISIKANCIDSTVPAEAVFQTEVKKLQQEQFKPAEQVTLEPFERDHACVVGGYRMPKKPKAATAA

SEQ ID NO: 6835 - DNA, 1493 bp, Arabidopsis thaliana
atataccaaaaacgaaactgagaaagaagttttatttattaattaatggcggaagagaaaagctacaagtacgtgatcattggaggtggtgtagccggcggttacgcggcgagagagtttagtaatcagggcctgaagcctggtgaactcgcaatcatttccaaggaaccagtgcctccttttgagcgtcctgaactaaccaaggtatatattgacctcgaagtcaatccgacccttgcaaatatctatgtttgtgctggaactggagaagcgaagcagtaccctaactggtacaaagagaaagggattgatctaattgtgggcacagagatagtcaaagcagatcttgcttcaaagacacttgttagtgatgatggcaaaatttacaagtaccaaactttgctaattgcaaccggttctactaacataagattgtcagaaattggcgtccaagaagcagatgttaagaatatattctacctaagagaaatcgaggatagtgatgagcttgccttggctatggaactatatgtgcaaaggggaaaggccgtcatcattggcggcggtttcttagggcttgagataagttctgctctaagggctaataatcatgaagtgaccatggtttttccagaaccttggcttgtacaccggtttttcaccgctgagatagcttcattctatgagagttactatgccaacaagggaatcaaaatcatcaagggaactgtagcaactggatttagcaccaactcagatggagaggtcactgaggtgaaactagaggatggaagaaccctagaagctaacatagttgtcgctggtgtcggtgctagaccggccacctcactcttcaaaggccaacttgaagaggagaagggtggaataaagactgatgggttcttcaaaacaagtgtgcctgatgtatacgcacttggagatgtagccacattcccaatgaaaatgtatggcgggacgaggcgtgttgaacacgccgacaatgctcgcaaatctgctgcacaagcagtcaaagcaatcaaagcgggtgaagaagggaaaacgatcccagattacgattatcttccctatttctactctcgatttttcaaactatcgtgggaattctatggggaaaacgttggagaatctgtactgtttggagataatgacccgaaatctccaaagccaaagtttgggacgtattgggttaaagatgggaaagtagtaggagtgttcctagaaggaggtactcaagaggaacacaaggctattgctaaagtggcacgagcacaaccttccgttgagagtcttgacgtgttatccgaggaaggcctttctttcgccaccaagttctatagcacctctctttgagacattgggtcttgtttagtcacattgatgtaataatctcctttgtctttgatttcatatcgagcccctattgtatttcgaaaaataaattaaatataataatgcattttgtttggattacc

SEQ ID NO: 6836 - protein, 441 aa, Arabidopsis thaliana
MAEEKSYKYVIIGGGVAGGYAAREFSNQGLKPGELAIISKEPVPPFERPELTKVYIDLEVNPTLANIYVCAGTGEAKQYPNWYKEKGIDLIVGTEIVKADLASKTLVSDDGKIYKYQTLLIATGSTNIRLSEIGVQEADVKNIFYLREIEDSDELALAMELYVQRGKAVIIGGGFLGLEISSALRANNHEVTMVFPEPWLVHRFFTAEIASFYESYYANKGIKIIKGTVATGFSTNSDGEVTEVKLEDGRTLEANIVVAGVGARPATSLFKGQLEEEKGGIKTDGFFKTSVPDVYALGDVATFPMKMYGGTRRVEHADNARKSAAQAVKAIKAGEEGKTIPDYDYLPYFYSRFFKLSWEFYGENVGESVLFGDNDPKSPKPKFGTYWVKDGKVVGVFLEGGTQEEHKAIAKVARAQPSVESLDVLSEEGLSFATKFYSTSL

SEQ ID NO: 6837 - protein, 283 aa, Arabidopsis thaliana
MELYVQRGKAVIIGGGFLGLEISSALRANNHEVTMVFPEPWLVHRFFTAEIASFYESYYANKGIKIIKGTVATGFSTNSDGEVTEVKLEDGRTLEANIVVAGVGARPATSLFKGQLEEEKGGIKTDGFFKTSVPDVYALGDVATFPMKMYGGTRRVEHADNARKSAAQAVKAIKAGEEGKTIPDYDYLPYFYSRFFKLSWEFYGENVGESVLFGDNDPKSPKPKFGTYWVKDGKVVGVFLEGGTQEEHKAIAKVARAQPSVESLDVLSEEGLSFATKFYSTSL

SEQ ID NO: 6838 - protein, 249 aa, Arabidopsis thaliana
MVFPEPWLVHRFFTAEIASFYESYYANKGIKIIKGTVATGFSTNSDGEVTEVKLEDGRTLEANIVVAGVGARPATSLFKGQLEEEKGGIKTDGFFKTSVPDVYALGDVATFPMKMYGGTRRVEHADNARKSAAQAVKAIKAGEEGKTIPDYDYLPYFYSRFFKLSWEFYGENVGESVLFGDNDPKSPKPKFGTYWVKDGKVVGVFLEGGTQEEHKAIAKVARAQPSVESLDVLSEEGLSFATKFYSTSL

SEQ ID NO: 6839 - DNA, 498 bp, Arabidopsis thaliana
aatcaatctctaactcatagatcttaagacaacaacaacaacaaaaaagtcaacgtaccgataattcttgtctgaatctttaaaacatcaatggaaggaagctttgaaggcatgttaatgaaagtgagcatttttgctctgattcaagggcttgtgtatctcatactcagcaaatcttcgagcgttttctctacgtcaaagacgatgaagagagcttacagtttccggtcagcgagatccatcagtatccgcaggattctagctgttcttcaagacatgccagcaggcggcgagatgtctccttctgccatgggaccttctcttgcttcttctctatcctcaccatcggaaatcatttgattcactaatttttagtgagtccggtggatgaagctagtttttgctttttagataatgttcaaatacttttatgtgtaatttcatagctaaatagcctaaattgattatcataattaacataatagtatatttgaaaat

SEQ ID NO: 6840 - protein, 89 aa, Arabidopsis thaliana
MEGSFEGMLMKVSIFALIQGLVYLILSKSSSVFSTSKTMKRAYSFRSARSISIRRILAVLQDMPAGGEMSPSAMGPSLASSLSSPSEII

SEQ ID NO: 6841 - protein, 82 aa, Arabidopsis thaliana
MLMKVSIFALIQGLVYLILSKSSSVFSTSKTMKRAYSFRSARSISIRRILAVLQDMPAGGEMSPSAMGPSLASSLSSPSEII

SEQ ID NO: 6842 - protein, 80 aa, Arabidopsis thaliana
MKVSIFALIQGLVYLILSKSSSVFSTSKTMKRAYSFRSARSISIRRILAVLQDMPAGGEMSPSAMGPSLASSLSSPSEII

SEQ ID NO: 6843 - DNA, 921 bp, Arabidopsis thaliana
aaaagaaaatttgcgatcaagcaattactctctctctctctctttcttctgccatcgccaaaaacttgtcttttgcttctgggttttgcttcttatttttgaatatagtcattggagatggctccggttggtcctcgatccggtgatgcgatcttctctagcattgatcgtgtgaatgcggagttgttcacgttgacgtatggtgctattgtgcgtcaattgcttactgacctggaagaagtagaggaagttaacaaacagcttgatcaaatgggatacaacattggaatccgacttatcgatgagtttctagctaaatctggtgtttccagatgcgttgactttaaggaaactgctgaaatgattgccaaggtgggtttcaagatgttcttaggagtcactgcatcagtgacaagctgggactcggacgggacttgctgcagtataatcttagaggacaatcccctagttgatttcgtcgagcttcccgatacttgccaaggtctttactactgcaatgtcttaagtggagtcattagaggagctttggaaatggtctcaatgaagacagaagtgacatggacgcgtgatgttcttcgaggagatgatgcttatgagttgcaagtaaagctactgaaacaagtcgctgaggaatatccttacaaggatgatgaataaatatcaatctcttatcttccctcttcctcaaagagaaactaattactgttttgtagtctctttctctgcattcttagctttgttttttttctccgcaaacacaaaactataagctatgaaactaaatactgtttaaatccatttcttagtgttctgatgtgacaagagttaatcgtatcatgatgtctcaaatcgtgtaataaatagatcaattcagtgagatcagagtgtttttttctttcg

SEQ ID NO: 6844 - protein, 186 aa, Arabidopsis thaliana; identical to SEQ ID NO: 4251

SEQ ID NO: 6845 - protein, 135 aa, Arabidopsis thaliana; identical to SEQ ID NO: 4252

SEQ ID NO: 6846 - protein, 105 aa, Arabidopsis thaliana; identical to SEQ ID NO: 4253

SEQ ID NO: 6847 - DNA, 2566 bp, Arabidopsis thaliana
atatatatatatatataactccaaaacaatcatttaatccaaacccaacatatccttttaacagaatcttctttatctgaaaatatctaaagaaaatggtattgaactttagagataagtcctgcatttttctggcaattctttgttgtttatcattgagttgtatagtaaaagcatcagtctcttatgatcgtaaagctgtgatcatcaatggacaaagaagaatccttctctccggttccattcactatccacgaagcacccctgagatgtggcctggcctaatacagaaagccaaagaaggaggcttggatgttattgagacttatgttttttggaatggccatgaaccttctcctggacaatattattttggagacaggtatgatttggttaagttcatcaagttggtgcaccaagctggtctctatgttaatctcagaattggcccttatgtttgtgctgaatggaattttgggggatttccggtttggctcaaatttgttcccggtatggcttttaggacggataatgaacctttcaaggctgcaatgaagaaattcactgaaaagattgtatggatgatgaaagcagaaaagttgtttcaaactcaaggaggacccatcattcttgcacagattgagaatgaatatggaccagtggaatgggaaataggagcaccgggaaaggcttatacaaaatgggtagctcaaatggcattaggactctcaactggtgttccatggattatgtgcaagcaagaagatgctcctggtcctatcatagacacatgcaatggttattactgtgaagatttcaaaccgaactcaatcaacaagccaaagatgtggacagagaattggactggttggtacacagattttggaggtgcggtaccatacagaccagtcgaagatattgcatactccgttgcacgatttatccaaaaaggaggttccctcatcaattactatatgtatcatggaggaacaaatttcgacagaacagccggtgagttcatggcttcaagctatgactatgacgctcctctcgatgaatacggcttaccaagagaaccaaagtatagtcacttgaaagcattgcataaagccatcaaacttagtgagccagctttgctttctgctgatgctaccgttacatcgcttggagctaagcaagaagcttatgtgttctggtctaaatcatcttgtgctgcgtttttatcgaacaaagatgagaactctgcagcgagagttctgttccgtggattcccatatgatttgcctccttggtcagtcagtattttacctgattgcaaaacagaggtttacaacactgcaaaggtcaatgcaccaagcgtacacaggaatatggttcctactggtactaaattctcttggggatcattcaacgaagcgactcctacagcgaatgaagctggtacgtttgcaagaaacgggcttgtggaacaaataagcatgacttgggacaaatctgactatttttggtatataacagacattacaatcggttccggtgagacatttttgaagactggtgattcacctcttcttacagttatgtcagctggacatgctcttcatgtgtttgtcaatggtcagctttcaggaactgcttatggaggacttgaccacccaaaactaacctttagccagaagatcaaactacatgcaggtgtcaacaagattgctcttctgagtgttgcagtgggtctcccgaacgttggtacacattttgaacagtggaataaaggagttcttggtccggtcacattgaagggagtaaactcaggaacatgggacatgtcgaaatggaaatggtcctataagattggtgtaaagggtgaggctttgagtcttcataccaacacagagagttccggtgtgagatggactcaaggatcatttgtggcgaagaagcaaccattaacctggtacaagtctacgtttgctacaccagcaggaaatgaaccattggctttagacatgaacacaatgggaaaaggtcaagtttggataaacggtagaaatattggacgtcattggcctgcatataaagctcaaggatcttgtggacgttgtaactacgctggaactttcgacgcaaagaaatgcttaagtaattgtggtgaagcttcacaaagatggtaccatgtacctcgttcatggcttaagtctcaaaaccttatagttgtgttcgaagagttaggtggtgatcctaacggaatctctttggttaaaagaacatgaaaagcttcttctgattccgagttttcaggacagaagcaagctgtttgattcgtttgtctatatctttctctggctttgctttgaagatagagacagagctggaattttttttcttttatggctttgtgcagtgattacaaaaattatacaacatgtatatgtataactgtatcctactactagtcatcatctatggctaaataaaattcacagaataaaggagtgtttctatttaccataacattttcgtttgttcaagcaaataactgtttcaatcatctcttgaagttggaacc

SEQ ID NO: 6848 - protein, 724 aa, Arabidopsis thaliana
MVLNFRDKSCIFLAILCCLSLSCIVKASVSYDRKAVIINGQRRILLSGSIHYPRSTPEMWPGLIQKAKEGGLDVIETYVFWNGHEPSPGQYYFGDRYDLVKFIKLVHQAGLYVNLRIGPYVCAEWNFGGFPVWLKFVPGMAFRTDNEPFKAAMKKFTEKIVWMMKAEKLFQTQGGPIILAQIENEYGPVEWEIGAPGKAYTKWVAQMALGLSTGVPWIMCKQEDAPGPIIDTCNGYYCEDFKPNSINKPKMWTENWTGWYTDFGGAVPYRPVEDIAYSVARFIQKGGSLINYYMYHGGTNFDRTAGEFMASSYDYDAPLDEYGLPREPKYSHLKALHKAIKLSEPALLSADATVTSLGAKQEAYVFWSKSSCAAFLSNKDENSAARVLFRGFPYDLPPWSVSILPDCKTEVYNTAKVNAPSVHRNMVPTGTKFSWGSFNEATPTANEAGTFARNGLVEQISMTWDKSDYFWYITDITIGSGETFLKTGDSPLLTVMSAGHALHVFVNGQLSGTAYGGLDHPKLTFSQKIKLHAGVNKIALLSVAVGLPNVGTHFEQWNKGVLGPVTLKGVNSGTWDMSKWKWSYKIGVKGEALSLHTNTESSGVRWTQGSFVAKKQPLTWYKSTFATPAGNEPLALDMNTMGKGQVWINGRNIGRHWPAYKAQGSCGRCNYAGTFDAKKCLSNCGEASQRWYHVPRSWLKSQNLIVVFEELGGDPNGISLVKRT

SEQ ID NO: 6849 - protein, 666 aa, Arabidopsis thaliana
MWPGLIQKAKEGGLDVIETYVFWNGHEPSPGQYYFGDRYDLVKFIKLVHQAGLYVNLRIGPYVCAEWNFGGFPVWLKFVPGMAFRTDNEPFKAAMKKFTEKIVWMMKAEKLFQTQGGPIILAQIENEYGPVEWEIGAPGKAYTKWVAQMALGLSTGVPWIMCKQEDAPGPIIDTCNGYYCEDFKPNSINKPKMWTENWTGWYTDFGGAVPYRPVEDIAYSVARFIQKGGSLINYYMYHGGTNFDRTAGEFMASSYDYDAPLDEYGLPREPKYSHLKALHKAIKLSEPALLSADATVTSLGAKQEAYVFWSKSSCAAFLSNKDENSAARVLFRGFPYDLPPWSVSILPDCKTEVYNTAKVNAPSVHRNMVPTGTKFSWGSFNEATPTANEAGTFARNGLVEQISMTWDKSDYFWYITDITIGSGETFLKTGDSPLLTVMSAGHALHVFVNGQLSGTAYGGLDHPKLTFSQKIKLHAGVNKIALLSVAVGLPNVGTHFEQWNKGVLGPVTLKGVNSGTWDMSKWKWSYKIGVKGEALSLHTNTESSGVRWTQGSFVAKKQPLTWYKSTFATPAGNEPLALDMNTMGKGQVWINGRNIGRHWPAYKAQGSCGRCNYAGTFDAKKCLSNCGEASQRWYHVPRSWLKSQNLIVVFEELGGDPNGISLVKRT

SEQ ID NO: 6850 - protein, 585 aa, Arabidopsis thaliana
MAFRTDNEPFKAAMKKFTEKIVWMMKAEKLFQTQGGPIILAQIENEYGPVEWEIGAPGKAYTKWVAQMALGLSTGVPWIMCKQEDAPGPIIDTCNGYYCEDFKPNSINKPKMWTENWTGWYTDFGGAVPYRPVEDIAYSVARFIQKGGSLINYYMYHGGTNFDRTAGEFMASSYDYDAPLDEYGLPREPKYSHLKALHKAIKLSEPALLSADATVTSLGAKQEAYVFWSKSSCAAFLSNKDENSAARVLFRGFPYDLPPWSVSILPDCKTEVYNTAKVNAPSVHRNMVPTGTKFSWGSFNEATPTANEAGTFARNGLVEQISMTWDKSDYFWYITDITIGSGETFLKTGDSPLLTVMSAGHALHVFVNGQLSGTAYGGLDHPKLTFSQKIKLHAGVNKIALLSVAVGLPNVGTHFEQWNKGVLGPVTLKGVNSGTWDMSKWKWSYKIGVKGEALSLHTNTESSGVRWTQGSFVAKKQPLTWYKSTFATPAGNEPLALDMNTMGKGQVWINGRNIGRHWPAYKAQGSCGRCNYAGTFDAKKCLSNCGEASQRWYHVPRSWLKSQNLIVVFEELGGDPNGISLVKRT

SEQ ID NO: 6851 - DNA, 767 bp, Arabidopsis thaliana
aaaccaactccatctcacttctcaagtcttataatttattcatttctctcttcttcatcgatctttggcttttagaaaacctaatcagaaatggcaacggcgtcgtttaacatgcagtcagtgttcgctgctccttccggtgtattgactacacgcaacatcagaaacacaaaccaactcttcttcaagaggaatgctccggtaggagtcagatgcatggctcagggcgatcctatcaaggaagatccttctgtgccctcgacctcgacttcggccactcaaccacaaatgccacagtctcctcctccaccagttagcaagcctaaggtgagtacgaagtttggagatttgctagcgtttagcggtccagcacccgagaggatcaacgggagactagcaatggttggattcgtggcggccatcgccgtggagttatcaaagggagaaaacgtgtttgctcagatctctgacggtggtgtcgggtggtttctaggaacaaccgcgttgttgacgttggcatcgatggttccgttgttcaagggaataagggcagaggcaaagtcaaaagggttcatgacttcagacgccgagctatggaacggtcggtttgcgatgctcggtctcgttgcgttggccttcaccgagtacgtcactggtgggactctagtctaaggctaaagctttttgtttgctagtttaaggacaaatttggagaatgattatgtaacgcatagtttgatttaatactatgagttttaaacagtgtg

SEQ ID NO: 6852 - protein, 193 aa, Arabidopsis thaliana
MATASFNMQSVFAAPSGVLTTRNIRNTNQLFFKRNAPVGVRCMAQGDPIKEDPSVPSTSTSATQPQMPQSPPPPVSKPKVSTKFGDLLAFSGPAPERINGRLAMVGFVAAIAVELSKGENVFAQISDGGVGWFLGTTALLTLASMVPLFKGIRAEAKSKGFMTSDAELWNGRFAMLGLVALAFTEYVTGGTLV

SEQ ID NO: 6853 - protein, 186 aa, Arabidopsis thaliana
MQSVFAAPSGVLTTRNIRNTNQLFFKRNAPVGVRCMAQGDPIKEDPSVPSTSTSATQPQMPQSPPPPVSKPKVSTKFGDLLAFSGPAPERINGRLAMVGFVAAIAVELSKGENVFAQISDGGVGWFLGTTALLTLASMVPLFKGIRAEAKSKGFMTSDAELWNGRFAMLGLVALAFTEYVTGGTLV

SEQ ID NO: 6854 - protein, 151 aa, Arabidopsis thaliana
MAQGDPIKEDPSVPSTSTSATQPQMPQSPPPPVSKPKVSTKFGDLLAFSGPAPERINGRLAMVGFVAAIAVELSKGENVFAQISDGGVGWFLGTTALLTLASMVPLFKGIRAEAKSKGFMTSDAELWNGRFAMLGLVALAFTEYVTGGTLV

SEQ ID NO: 6855 - DNA, 544 bp, Arabidopsis thaliana
actatattataatttttgctttataaaaaaaaatatcaaactctatattttctcgatctcttctcttcctcttatttctccaagatcccagacgaaatggctcagaaagtggtgctgaaggttttaaccatgactgatgataagacgaagcagaaagccatagaagctgcagctgatatcttcggagttgattccatagcagcggatatgaaggatcaaaaattgacggtgatcggtttgatggatgcggctgcggtggtgaagaagttgaagaaggttggtaaagtcgatttgatatcggttggaccggcaaaagaagagaagaaagaagagaagaaggaagagaagaaagaggaaaagaaagaggagaagaaggaagagcagaaagaagaagaacctaagaaataagtgactcgaattgctattaaaaccctaaatttttgtcatattgatttcacaattagaacgctgaatcattgaataatttaagatgtaaaattaattgttcaatacagattgtaataaaagcgaagtatttgaaact

SEQ ID NO: 6856 - protein, 103 aa, Arabidopsis thaliana
MAQKVVLKVLTMTDDKTKQKAIEAAADIFGVDSIAADMKDQKLTVIGLMDAAAVVKKLKKVGKVDLISVGPAKEEKKEEKKEEKKEEKKEEKKEEQKEEEPKK

SEQ ID NO: 6857 - protein, 92 aa, Arabidopsis thaliana
MTDDKTKQKAIEAAADIFGVDSIAADMKDQKLTVIGLMDAAAVVKKLKKVGKVDLISVGPAKEEKKEEKKEEKKEEKKEEKKEEQKEEEPKK

SEQ ID NO: 6858 - protein, 66 aa, Arabidopsis thaliana
MKDQKLTVIGLMDAAAVVKKLKKVGKVDLISVGPAKEEKKEEKKEEKKEEKKEEKKEEQKEEEPKK

SEQ ID NO: 6859 - DNA, 967 bp, Arabidopsis thaliana
atttacaactgtggataagccttttagtctgactcagctttctcaagatccgaaaacacactgacccaacccggttcgattttgcttaaccggacaagatacattaatctgcctaatcttcaattatttaaaagctaactaaacgttatacgtactaatcacttcttcccctataaataaacctttctaatttctcatctcaaatcacactgcatcacaaaacccaaatcggaacttaaaccaaaagacaaacaaaaacgccgtcgtttcacgatgctttcttcttccccaaccttcttcgctactccatttctctcttcttcttcttcttcttctccgtcgttctcttctacttcaccaccgtcacgcatttcccggatctcgccgtcgctttctacaaccaccgcgtcctacacctgcgccgaagatctaccgagattacgccaaatcccgcagcgattttcagcaaccgcgtctctctacgagatccttgaaattcccgtcggctcgacgagtcaagagatcaaatcagcttaccggcgactagccaggatctgtcatcccgatgtagcgagaaatagtcgggataactcgtcggcggacgatttcatgaagatccacgcagcgtattgcacgctttcggatcccgagaaacgcgccgtttatgatcggaggactcttcttcggagccggccgttaacggctggatacggcagttacggtggacggaattgggaaaccgatcagtgctggtagcgagttgactcgatgtgtcgagttggtccaaaaccattgaattggttgtaattagagcaaacccagagattctgggtggttgtgccacgtaggatcaacacggtttatcgtgccacgtaggatctgtcgcgttgttagcctttgtatccataattagtaagtagtctgtatttagtatttaccatctaataaagaaaataaaaatttatgt

SEQ ID NO: 6860 - protein, 160 aa, Arabidopsis thaliana
MLSSSPTFFATPFLSSSSSSSPSFSSTSPPSRISRISPSLSTTTASYTCAEDLPRLRQIPQRFSATASLYEILEIPVGSTSQEIKSAYRRLARICHPDVARNSRDNSSADDFMKIHAAYCTLSDPEKRAVYDRRTLLRSRPLTAGYGSYGGRNWETDQCW

SEQ ID NO: 6861 - DNA, 1165 bp, Arabidopsis thaliana
aacgcaaaacaacttttgtggaggagagaaagcgagataacacacacacagagatacacatcttcaatagttaagagttttctatatacagaagcatagaggaaagagagagagacagatacaaaagttaatatctctctctctcacttggtgagacttctctttttcctctgggttttgtggtgggggttgtctctataaaaacttatatatataaaatatataaataaataagaaggaattatcaggttttatataaaatagcaaaagaaatgcaacagcacctgatgcagatgcagcccatgatggctggttactaccccagcaatgttacctctgatcatatccaacagtacttggacgaaaacaaatcgttgattctgaagattgttgagtctcaaaactctggaaagcttagcgaatgcgccgagaatcaagcaaggcttcaacgcaacctaatgtacctagctgcaatagcagattctcagcctcagccaccaagtgtgcatagccagtatggatctgctggtggtgggatgattcagggagaaggagggtcacactatttgcagcagcaacaagcgactcaacagcaacagatgactcagcagtctctaatggcggctcgatcttcaatgttgtatgctcagcaacagcagcagcagcagccttacgcgacgcttcagcatcagcaattgcaccatagccagcttggaatgagctcgagcagcggaggaggaggaagcagtggtctccatatccttcagggagaggctggtgggtttcatgattttggccgtgggaagccggaaatgggaagtggtggtggcggtgaaggcagaggaggaagttcaggggatggtggagaaaccctttacttgaaatcatcagatgatgggaattgaaagagtgtggcacaaggaatcttaatgatgaagcagcagcagcagcagaagaagtagtagtaataataggagtcttgaagttagtgtgttttggttttagttgcttgttgaagaagcaaagaactctttatttacttctttttagttttgttattctctctatgtttgttccctaaaacagtgaacctctttcgtggtagtgtaccatgtaaatctgctggctccaagttgtgtcgtaatcttaatatgttatttctctg

SEQ ID NO: 6862 - protein, 210 aa, Arabidopsis thaliana
MQQHLMQMQPMMAGYYPSNVTSDHIQQYLDENKSLILKIVESQNSGKLSECAENQARLQRNLMYLAAIADSQPQPPSVHSQYGSAGGGMIQGEGGSHYLQQQQATQQQQMTQQSLMAARSSMLYAQQQQQQQPYATLQHQQLHHSQLGMSSSSGGGGSSGLHILQGEAGGFHDFGRGKPEMGSGGGGEGRGGSSGDGGETLYLKSSDDGN

SEQ ID NO: 6863 - protein, 205 aa, Arabidopsis thaliana
MQMQPMMAGYYPSNVTSDHIQQYLDENKSLILKIVESQNSGKLSECAENQARLQRNLMYLAAIADSQPQPPSVHSQYGSAGGGMIQGEGGSHYLQQQQATQQQQMTQQSLMAARSSMLYAQQQQQQQPYATLQHQQLHHSQLGMSSSSGGGGSSGLHILQGEAGGFHDFGRGKPEMGSGGGGEGRGGSSGDGGETLYLKSSDDGN

SEQ ID NO: 6864 - protein, 203 aa, Arabidopsis thaliana
MQPMMAGYYPSNVTSDHIQQYLDENKSLILKIVESQNSGKLSECAENQARLQRNLMYLAAIADSQPQPPSVHSQYGSAGGGMIQGEGGSHYLQQQQATQQQQMTQQSLMAARSSMLYAQQQQQQQPYATLQHQQLHHSQLGMSSSSGGGGSSGLHILQGEAGGFHDFGRGKPEMGSGGGGEGRGGSSGDGGETLYLKSSDDGN

SEQ ID NO: 6865 - DNA, 640 bp, Arabidopsis thaliana
attgctctttttgcttcgtcgtcgatcttggcgctctggaaatttctcgtcgcaacgttcttctctattggctcaagttagatctccctttacttgtatcaaacactgttccagtgagccatggcgaagcatcaccctgatttgatcatgtgccggaaacaacccggaattgctattggacgactgtgtgagaaatgcgatgggaaatgcgtgatttgtgattcttatgtgcgtccgtgtactctagtacgtatttgtgatgaatgcaactacgggtcattccaaggtcggtgtgttatatgcggtggcgttggaatctcagatgcttattactgcaaagagtgtacacagcaggagaaagacagagatggttgccccaagattgttaaccttggcagtgcgaaaaccgatctcttctatgaacgcaagaaatacggattcaaaaaacgatgatagttcggtatttcgtgatttgtacggtcctttgattacttgatttggatctcttatgctatgtgtaaacttgtttgttgacccccgttgcataaaacatatattccaataaaacctgaagatattggatacaaaacctaagttatgctttgttttatgattttcttaagttacacatgtttctccc

SEQ ID NO: 6866 - protein, 110 aa, Arabidopsis thaliana
MAKHHPDLIMCRKQPGIAIGRLCEKCDGKCVICDSYVRPCTLVRICDECNYGSFQGRCVICGGVGISDAYYCKECTQQEKDRDGCPKIVNLGSAKTDLFYERKKYGFKKR

SEQ ID NO: 6867 - protein, 101 aa, Arabidopsis thaliana
MCRKQPGIAIGRLCEKCDGKCVICDSYVRPCTLVRICDECNYGSFQGRCVICGGVGISDAYYCKECTQQEKDRDGCPKIVNLGSAKTDLFYERKKYGFKKR

SEQ ID NO: 6868 - protein, 78 aa, Arabidopsis thaliana
MNATTGHSKVGVLYAVALESQMLITAKSVHSRRKTEMVAPRLLTLAVRKPISSMNARNTDSKNDDSSVFRDLYGPLIT

SEQ ID NO: 6869 - DNA, 755 bp, Arabidopsis thaliana
aaaaaccctaaactcaaaatccgtctcggtggaggaaaaatggctgaagaagctcaagtagatcgttctaatggctctgattcatcatctcctcccataaagttacctcctttcatcaccaacctattcgcctttcttcaacctaagcctcctcctgctactattgatgccaatgctcctaaacctaccggcgagaaggaacctctgaaatcgacctacgagactgtcactttcccttacaatccacccaaaagcgcagagccaatcaagtttgaggctgagcccagctctggcaggacttccaactctgtcatcctttggcaggtatatgcacttggagggtttcttgtcctgaagtgggcctgggcaagatggaatgaaaggaacgagagaagtgacaaaaaggaggcgacgggtgatgatgatcagaaagatgatgatgaggatgatcaatcatctgatgggcatgaagactagtcatattacttgaacacgatgaaaatgttacccactttggttctgtatagcaaaaacaccataaacttcaaaatgaagatttcttattttccattgtatgtacttgaatcttgagtctcatctccttatctaaggggactcgaaatctcttctcatgctggcaagaagttttttttttcttactggacaaatctcttgttgttgctgtgcagtgtctctttagttcgtgacttgtagttagatcattgctagttaagtttcaagagatttgtcatgtt

SEQ ID NO: 6870 - protein, 158 aa, Arabidopsis thaliana
KNPKLKIRLGGGKMAEEAQVDRSNGSDSSSPPIKLPPFITNLFAFLQPKPPPATIDANAPKPTGEKEPLKSTYETVTFPYNPPKSAEPIKFEAEPSSGRTSNSVILWQVYALGGFLVLKWAWARWNERNERSDKKEATGDDDQKDDDEDDQSSDGHED

SEQ ID NO: 6871 - protein, 145 aa, Arabidopsis thaliana
MAEEAQVDRSNGSDSSSPPIKLPPFITNLFAFLQPKPPPATIDANAPKPTGEKEPLKSTYETVTFPYNPPKSAEPIKFEAEPSSGRTSNSVILWQVYALGGFLVLKWAWARWNERNERSDKKEATGDDDQKDDDEDDQSSDGHED

SEQ ID NO: 6872 - DNA, 1036 bp, Arabidopsis thaliana
atatagatttacaaagtaaagtaaaaaaaagttgaatctctgtttttcgtctggtcccatagtgaatcgtggctcagatggcttcctagggtttgtggaaatcggagaggggaatacagatttgagatgcaaagtagctccagctccggtggtgacgaccttgaaaagcagcagcagcagcagcagaaggacaagtctccccagaagcagagcgagtcagccaatgaatcgaaccacctcacaatcgttgtctgcaatggagattctagtcgggaagaattggtgggtcagatcccaccggaaaaggaggttagcttatccagaaacggaagctcgcacgagcagtgcagggtttgtctacaagacaaagaagaggttttgattgaactaggttgtcaatgtcgtggtggtcttgctaaagctcacaggtcttgtatagatgcttggtttcgtactaaaggctctaaccagtgtgagatctgtcaagttgttgctgttaatgtcacacctcctgagactcagccaactacaaactattgggtttggaggattgatcctagctatagacaagaagagcgtgagagaggatgctttagtccgctttgggttgcattttcgattctgatcggtggtttaatgcttgatgtgttgatatctatcacacttggggtctctgcgcttccggtgaacatcattattggagtcatagttgtgcttgggctaggaacagctctaaggctgactttggagttctgttatgagtggagcttgagaagagcggttcacagggcggtgcagagggcggaagcgaacaacttcagtaatattgcgtacccacctgccttgtaggggggaaactatgtcaagttaaaaactcgtgtgtgtgtaaaagttgtgtgagacgtgtagaactacaatgctggatttgttgggaaagaaccaaaaaagagcaaaaaagattattacgagttttttcaatgcatagttaaaagaagtaacttcgaaacaaaattgctatgaataaatgaatttatat

SEQ ID NO: 6873 - protein, 240 aa, Arabidopsis thaliana
MQSSSSSGGDDLEKQQQQQQKDKSPQKQSESANESNHLTIVVCNGDSSREELVGQIPPEKEVSLSRNGSSHEQCRVCLQDKEEVLIELGCQCRGGLAKAHRSCIDAWFRTKGSNQCEICQVVAVNVTPPETQPTTNYWVWRIDPSYRQEERERGCFSPLWVAFSILIGGLMLDVLISITLGVSALPVNIIIGVIVVLGLGTALRLTLEFCYEWSLRRAVHRAVQRAEANNFSNIAYPPAL

SEQ ID NO: 6874 - DNA, 1474 bp, Arabidopsis thaliana
atgtcggtcacagcgggagtgagtgaatctgcaattgctgtaagggagaaactaaaaggtggtattggacagactaaagtgcgaaggtattggccaggaaaagctccggagtgggctgaggaagctgaagaagatgatgatgttaggatgcagaaggtttctgttttggatagagcttttccaaagaatgatgatttgggtgttgctaggaaggatgatccaaggctgcgccgtttagctaagactaaagttgaaaaccgtgacgaagttagagctgatcatcggcggataagacaggctgagattatttatacggaagaagaagaatcgaggaatcaagagaatagagacgaggacgatgatgaagatgccttggaagagagaagaagaagaattagagagaaaaatcttagaagagcgcaagaggaggctgctttacttcctttagaagaagaagatgagatacaagaggaagaagaggaggaggaggagtctgagtacgagactgattcggaagatgatatgcctggtattgccatgattaagcctgtttttgtaccgaaagctgagagagatacaattgcagagcgagagaggcttgaggctgaagaagaagctcttgaagaattagcaaagagaaaattggagcaaagaaaattagagacaaagcaaatagtggttgaggaagttaggaaagatgaagagatacggaagaacattctattggaggaagcaaatattggagatgtggaaactgatgatgaactcaatgaagctgaggagtatgaagtttggaagacaagagagattggtaggatcaagagagaaagagatgcaagggaagctatgctgagagagagggaagaaatagagaagttgaggaatatgacagagcaggagaggagagattgggagaggaagaatccgaaacctttgtcagctcaaccgaaaaagaaatggaactttatgcagaaatattaccacaagggtgccttcttccaggcagatcctgatgatgaggcaggttctgctggaaccgatggtatatttcagcgcgacttctctgctccaactggagaagataggttggacaaatcgattctccccaaagttatgcaagtcaagcactttggtcgtagtggaagaactaaatggactcaccttgtcaatgaggacacaacagattggagtaacccgtggacttccaatgatcctctacgtgaaaaatacaacaagaaaatggcaggcatggatgctcctatcgcaaaaccaaaagggagcaagaagatgaaagattgggagtcttaaaccgcaccaacatttagtttgtttgtttttaaaatccaatgatgcagcagtggtatgtggtagtaaaaaaacatcgtaacatcttactcagttatgtctctgagtcctctaaatcctagtaattaaaaatattgctcaaaagaatgaagacctaacataattcatt

SEQ ID NO: 6875 - protein, 435 aa, Arabidopsis thaliana
MSVTAGVSESAIAVREKLKGGIGQTKVRRYWPGKAPEWAEEAEEDDDVRMQKVSVLDRAFPKNDDLGVARKDDPRLRRLAKTKVENRDEVRADHRRIRQAEIIYTEEEESRNQENRDEDDDEDALEERRRRIREKNLRRAQEEAALLPLEEEDEIQEEEEEEEESEYETDSEDDMPGIAMIKPVFVPKAERDTIAERERLEAEEEALEELAKRKLEQRKLETKQIVVEEVRKDEEIRKNILLEEANIGDVETDDELNEAEEYEVWKTREIGRIKRERDAREAMLREREEIEKLRNMTEQERRDWERKNPKPLSAQPKKKWNFMQKYYHKGAFFQADPDDEAGSAGTDGIFQRDFSAPTGEDRLDKSILPKVMQVKHFGRSGRTKWTHLVNEDTTDWSNPWTSNDPLREKYNKKMAGMDAPIAKPKGSKKMKDWES

SEQ ID NO: 6876 - protein, 386 aa, Arabidopsis thaliana
MQKVSVLDRAFPKNDDLGVARKDDPRLRRLAKTKVENRDEVRADHRRIRQAEIIYTEEEESRNQENRDEDDDEDALEERRRRIREKNLRRAQEEAALLPLEEEDEIQEEEEEEEESEYETDSEDDMPGIAMIKPVFVPKAERDTIAERERLEAEEEALEELAKRKLEQRKLETKQIVVEEVRKDEEIRKNILLEEANIGDVETDDELNEAEEYEVWKTREIGRIKRERDAREAMLREREEIEKLRNMTEQERRDWERKNPKPLSAQPKKKWNFMQKYYHKGAFFQADPDDEAGSAGTDGIFQRDFSAPTGEDRLDKSILPKVMQVKHFGRSGRTKWTHLVNEDTTDWSNPWTSNDPLREKYNKKMAGMDAPIAKPKGSKKMKDWES

SEQ ID NO: 6877 - protein, 261 aa, Arabidopsis thaliana
MPGIAMIKPVFVPKAERDTIAERERLEAEEEALEELAKRKLEQRKLETKQIVVEEVRKDEEIRKNILLEEANIGDVETDDELNEAEEYEVWKTREIGRIKRERDAREAMLREREEIEKLRNMTEQERRDWERKNPKPLSAQPKKKWNFMQKYYHKGAFFQADPDDEAGSAGTDGIFQRDFSAPTGEDRLDKSILPKVMQVKHFGRSGRTKWTHLVNEDTTDWSNPWTSNDPLREKYNKKMAGMDAPIAKPKGSKKMKDWES

SEQ ID NO: 6878 - DNA, 618 bp, Arabidopsis thaliana
ccacgtccgatccatcacatctcctcttgcaaaccaacgtaaaacactaactaagagatcaatatggctggagtgatgaagttggcatgcatggtcttggcttgcatgattgtggccggtccaatcacagcgaacgcgcttatgagttgtggcaccgtcaacggcaacctggcagggtgcattgcctacttgacccgaggtgctccacttacccaagggtgctgcaacggcgttactaaccttaaaaacatggccagtacaaccccagaccgtcagcaagcttgccgttgccttcaatctgccgctaaagccgttggtcccggtctcaacactgcccgtgcagctggacttcctagcgcatgcaaagtcaatattccttacaaaatcagcgccagcaccaactgcaacaccgtgaggtgatgagcgacggtcaaatgaagctactagcggatgtttcgaatattatataatcgatgagataatattaaataaagatgttcgaatggctgtactcttttcaatttcctgtctttttttatcgtggcgtttctattatgtgatcgtctgtactatgttcgcaaacaacgttctttgaatttcagacttgaagtttaagtt

SEQ ID NO: 6879 - protein, 118 aa, Arabidopsis thaliana
MAGVMKLACMVLACMIVAGPITANALMSCGTVNGNLAGCIAYLTRGAPLTQGCCNGVTNLKNMASTTPDRQQACRCLQSAAKAVGPGLNTARAAGLPSACKVNIPYKISASTNCNTVR

SEQ ID NO: 6880 - protein, 114 aa, Arabidopsis thaliana
MKLACMVLACMIVAGPITANALMSCGTVNGNLAGCIAYLTRGAPLTQGCCNGVTNLKNMASTTPDRQQACRCLQSAAKAVGPGLNTARAAGLPSACKVNIPYKISASTNCNTVR

SEQ ID NO: 6881 - protein, 109 aa, Arabidopsis thaliana
MVLACMIVAGPITANALMSCGTVNGNLAGCIAYLTRGAPLTQGCCNGVTNLKNMASTTPDRQQACRCLQSAAKAVGPGLNTARAAGLPSACKVNIPYKISASTNCNTVR

SEQ ID NO: 6882 - DNA, 854 bp, Arabidopsis thaliana
acaaaaacaatttgaccattttcatcttcaaacaatggcggtttcaaagcttacattggctgctacgagcggtaagagctgcaaaatactcttagggctgagattacttgccttctcagccacgttatctgcagctattgtaatgggactcaacaaagagacaaagacttttattgtgggcaaagttggaaatactccaattcaagctacttttactgctaagttcgaccacacaccagcttttgtgtttttcgtagtagctaatgcaatggtgagcttccacaacttgttgatgattgctcttcagatatttggagggaaaatggagttcactggttttcggcttctctcagtcgccattcttgacatgctaaatgtgactctaatttcggcggcagcaaacgcggcggcgttcatggcggaggtaggaaagaacgggaacaaacacgcgagatgggacaaaatctgtgatagattcgccacttactgtgatcacggcgccggagcattaatcgccgcattcgccggcgtaatccttatgctcatcatctccgccgcgtcaatctctcgtctcgtccaacctaataaatgctgctccaccaccgcatctccctcggtcgtcccctgaaaacatacacacgtgtctcgttcccctgttgttttctttttcttttcttacttctttgtttcttcttgagtgtgtggtgtgtatctcgagtgaatgtgattgatcagattgtgtaggcatttggctcgtctcttctttgtaaaaccttcttcttatggtttattcttaaaccaattctccgactagggttaggttactaaaatatccattacctatactcgttatc

SEQ ID NO: 6883 - protein, 208 aa, Arabidopsis thaliana
QKQFDHFHLQTMAVSKLTLAATSGKSCKILLGLRLLAFSATLSAAIVMGLNKETKTFIVGKVGNTPIQATFTAKFDHTPAFVFFVVANAMVSFHNLLMIALQIFGGKMEFTGFRLLSVAILDMLNVTLISAAANAAAFMAEVGKNGNKHARWDKICDRFATYCDHGAGALIAAFAGVILMLIISAASISRLVQPNKCCSTTASPSVVP

SEQ ID NO: 6884 - protein, 197 aa, Arabidopsis thaliana
MAVSKLTLAATSGKSCKILLGLRLLAFSATLSAAIVMGLNKETKTFIVGKVGNTPIQATFTAKFDHTPAFVFFVVANAMVSFHNLLMIALQIFGGKMEFTGFRLLSVAILDMLNVTLISAAANAAAFMAEVGKNGNKHARWDKICDRFATYCDHGAGALIAAFAGVILMLIISAASISRLVQPNKCCSTTASPSVVP

SEQ ID NO: 6885 - protein, 161 aa, Arabidopsis thaliana
MGLNKETKTFIVGKVGNTPIQATFTAKFDHTPAFVFFVVANAMVSFHNLLMIALQIFGGKMEFTGFRLLSVAILDMLNVTLISAAANAAAFMAEVGKNGNKHARWDKICDRFATYCDHGAGALIAAFAGVILMLIISAASISRLVQPNKCCSTTASPSVVP

SEQ ID NO: 6886 - DNA, 722 bp, Arabidopsis thaliana
gaatttattctcatgtttgtttgtttctcactttaccaatctcacttacagatcttccttcttcttcctcttcctcttcttcttccttaaaccctacaagcttctactctattgacaatttgattccgagtttacatcgataatggcggaccaaacctccgattcaacatctcccgtggctcctctctccgtatcttctcctactgctactaagaaagataataccaatcctgttgattcgaagctcacggaattgaatgaatcaagggctgagttactaaacaggatccagaatctgaaacaggacttgcaaagttggagaggtaaattggacactcaagttaaagtctaccgtgaggagctctctgggctaaagaagactctgaatcttgaagttgagcagcttcgtgaggaattcaaagatctgaaaactaccttgaatcaacagcaagatgatgtttccgctagcctgaaaagcttaggcctacaagattcaaaagagcaaattgataagagaagtgaggtgacagaagagaaagtggaagctctatcgactgatgataatgccaaagaagcagaacattagataatatgaaattgtttgttcttatgatattctcgccactactgttaccactaccttgagattgtactagtatgcttaatatgtagttccgcggtttagttgattctaatgatgcaccatgacacaatggtttgct

SEQ ID NO: 6887 - protein, 147 aa, Arabidopsis thaliana
MADQTSDSTSPVAPLSVSSPTATKKDNTNPVDSKLTELNESRAELLNRIQNLKQDLQSWRGKLDTQVKVYREELSGLKKTLNLEVEQLREEFKDLKTTLNQQQDDVSASLKSLGLQDSKEQIDKRSEVTEEKVEALSTDDNAKEAEH

SEQ ID NO: 6888 - DNA, 873 bp, Arabidopsis thaliana
attataacttggatcagattcttcttctcctctaaacaacaacaaagtctctcttccttctgtctttcacatttcctcttcccctaaaaacagaactcaaaaccaaaacaaaatgactcgctcctctagattccttggtacggcgtcgcctccaccaccggaagaaatcctcgccgccgaaaccgacatggttgtgattctctcagcacttctctgcgctctcgtatgcgtagccggtttagccgccgtagctcgctgcgcttggctccgccgtctcaccggagttaatcccgccgccgtcggagaagctccaccgcctaacaaaggcctcaagaaaaaagcacttcaagctctccctaaatcaacttacaccgcctctgcctctaccgccgccgccgctgacgatctaccgtgctcttcagtcggagacggagattcatccaccgagtgtgcaatatgcataacggaattttcggagggcgaagaaatcagaatcttaccgctgtgtagtcacgccttccacgtggcgtgtatagacaagtggttgacttcacggtcgtcgtgtccgtcttgtcgtcggatattggtgccggtgaagtgtgataggtgtgggcaccatgcttcgacggcggagactcaggtcaaagatcaacctcctcatcaccaacatccttcacagttcacttccgccattattcctgcttttcttccttgaaatgttttcactttattaaatttttataatttgctaaaaatatcggcatgattaaaagtaaagtattaattaattaggaattagtaatctttagttaagtacttttatatttctcctctgtaatcctctgttctgaattaatcagatgaaatttcgat

SEQ ID NO: 6889 - protein, 200 aa, Arabidopsis thaliana
MTRSSRFLGTASPPPPEEILAAETDMVVILSALLCALVCVAGLAAVARCAWLRRLTGVNPAAVGEAPPPNKGLKKKALQALPKSTYTASASTAAAADDLPCSSVGDGDSSTECAICITEFSEGEEIRILPLCSHAFHVACIDKWLTSRSSCPSCRRILVPVKCDRCGHHASTAETQVKDQPPHHQHPSQFTSAIIPAFLP

SEQ ID NO: 6890 - protein, 175 aa, Arabidopsis thaliana
MVVILSALLCALVCVAGLAAVARCAWLRRLTGVNPAAVGEAPPPNKGLKKKALQALPKSTYTASASTAAAADDLPCSSVGDGDSSTECAICITEFSEGEEIRILPLCSHAFHVACIDKWLTSRSSCPSCRRILVPVKCDRCGHHASTAETQVKDQPPHHQHPSQFTSAIIPAFLP

SEQ ID NO: 6891 - DNA, 1063 bp, Arabidopsis thaliana
aaaagttggccactaagtggtgtaagaataataaattgtcaatatcaattgactgattcttattgttcatatacggacacaaatcttttcgttaagtgagtgttttgatcaaaaaaagttgaaaactttaaagccatgccatcactttggtctaacgaatccgatggatcattacgagagcatcttgtggatgttgttgtgtctggttcagaaccaaagattcgggtacatgatctgacccgagtcgccgatgatggatctcggatcttgaaaggagttacgatagatataccaaaaggtatgatcgttggtgtgattggacctagtggaagtggaaagtcaacgtttttgagatctctgaatcgtctttgggaaccaccggagtcaactgtgttcttggacggtgaagatataaccaacgttgatgttattgctcttcgtcgtagagttggaatgctttttcagcttcctgttctttttcaagggactgttgcggataatgtgagatatggtccgaatttgagaggggagaaactaagtgacgaagaggtttataagctgctaagtcttgcagaccttgatgcttcctttgctaagaagactggtgcagagttatctgtgggtcaagctcaacgagtagcacttgcaaggactctagccaacgagcctgaggtgttgctgctcgatgaaccaacaagtgctcttgatccgatatcgacagagaacattgaggatgttatagtgaaactgaagaagcagagagggattactactgtgattgtttctcacagtatcaagcagattcagaaagttgctgatatcgtttgccttgttgtcgacggagagattgttgaagttcttaaaccaagtgagctttcgcacgctacgcatccaatggcacagaggtttcttcaactcagttcttgagaccattttctcattgatggttcctgcaagttatttgctattttgcttgaatcttaataatctctttcaagagaggaacaaatgctggttgaatgtaacaacacctttcatggtttatgtctttttatcttctctt

SEQ ID NO: 6892 - protein, 263 aa, Arabidopsis thaliana
MPSLWSNESDGSLREHLVDVVVSGSEPKIRVHDLTRVADDGSRILKGVTIDIPKGMIVGVIGPSGSGKSTFLRSLNRLWEPPESTVFLDGEDITNVDVIALRRRVGMLFQLPVLFQGTVADNVRYGPNLRGEKLSDEEVYKLLSLADLDASFAKKTGAELSVGQAQRVALARTLANEPEVLLLDEPTSALDPISTENIEDVIVKLKKQRGITTVIVSHSIKQIQKVADIVCLVVDGEIVEVLKPSELSHATHPMAQRFLQLSS

SEQ ID NO: 6893 - protein, 208 aa, Arabidopsis thaliana
MIVGVIGPSGSGKSTFLRSLNRLWEPPESTVFLDGEDITNVDVIALRRRVGMLFQLPVLFQGTVADNVRYGPNLRGEKLSDEEVYKLLSLADLDASFAKKTGAELSVGQAQRVALARTLANEPEVLLLDEPTSALDPISTENIEDVIVKLKKQRGITTVIVSHSIKQIQKVADIVCLVVDGEIVEVLKPSELSHATHPMAQRFLQLSS

SEQ ID NO: 6894 - protein, 157 aa, Arabidopsis thaliana
MLFQLPVLFQGTVADNVRYGPNLRGEKLSDEEVYKLLSLADLDASFAKKTGAELSVGQAQRVALARTLANEPEVLLLDEPTSALDPISTENIEDVIVKLKKQRGITTVIVSHSIKQIQKVADIVCLVVDGEIVEVLKPSELSHATHPMAQRFLQLSS

SEQ ID NO: 6895 - DNA, 529 bp, Arabidopsis thaliana
agcagcctttggatattcggcggaatcgaaaatggtcaagggacgccaaggagaacgagtcagactctacgtgaggggaaccatcctcggatacaaaaggtcgaagtccaaccagtatccaaacacgtccctcgtccagatcgaaggagttaacactcaggaggaggtaaactggtacaagggaaagaggatggcttacatctacaaggctaagacaaagaagaacggtagccactaccgctgtatctggggaaaggttaccaggcctcacggtaacagcggtgttgtccgtgccaaattcacatccaaccttcctcccaagtccatgggaagcagagtgagagtcttcatgtatccgagtaacatatgaagcaatgcaaaaatggcttaaacttataatttagccgccttggttttgttcactagtttgttattttgtattttgatattgaaagcatttcctttctttgtttgaagtgtttggagattctctaaattgactttgatcatggatccggtttttcatccc

SEQ ID NO: 6896 - protein, 122 aa, Arabidopsis thaliana
AAFGYSAESKMVKGRQGERVRLYVRGTILGYKRSKSNQYPNTSLVQIEGVNTQEEVNWYKGKRMAYIYKAKTKKNGSHYRCIWGKVTRPHGNSGVVRAKFTSNLPPKSMGSRVRVFMYPSNI

SEQ ID NO: 6897 - protein, 112 aa, Arabidopsis thaliana
MVKGRQGERVRLYVRGTILGYKRSKSNQYPNTSLVQIEGVNTQEEVNWYKGKRMAYIYKAKTKKNGSHYRCIWGKVTRPHGNSGVVRAKFTSNLPPKSMGSRVRVFMYPSNI

SEQ ID NO: 6898 - DNA, 914 bp, Arabidopsis thaliana
aataaaatcccatatcttgtttctctctctctctcaaagttagtatctcagtacctttacgctttgtttgtctctatcttcttcctgatattcagagaatggtttcatcagatgattggacgaagtgtgcgatgagagatggagaagtggtggcagagcttttggtgaagcttaaagaagccaaagtaatcaagaatccgattgtaacagcgctccggtggggaatccaacagccaaggtctcggtgtccaagaaaagaatctgaatctagatgtagtccaagtacaccactatcttggagtggtggttgtggtggttcttcttcttctccatctggttatgtcgatggttacgaagctactagtcgtcaaatcagtgccgttggatctagatccaagaacatttcatcacttagatcaccattcagcgagcgaggcatcgagaataataacttgaagagaatgaagatgaatcatattcagaatttggcaaaggatgagaattgcaagacagatggcaatttcttgctaccagatttgaatatagtgccatgtgacgaaaatagtgaccactatacgtctttaggtgtggaaacaacactatatgggataaggattataaggtgaaagaagctcacttaatccatgagaaagtggttttgagaatgtttaagctgatctgatcatctttgactcggctttttaaaagggttcgcgccacgcatgagctcgaaaagacaaagagtataaattcctcaaggaagtttcctttgtgtggtgattctatatatgaagatcatcagcaaatgtgtaagatagataaaacaaagagaagaatataatttctggttgtttctttgtagcaataacaaaaacagatattttgtattgattgtctatatttgcacaagtggt

SEQ ID NO: 6899 - protein, 175 aa, Arabidopsis thaliana
MVSSDDWTKCAMRDGEVVAELLVKLKEAKVIKNPIVTALRWGIQQPRSRCPRKESESRCSPSTPLSWSGGCGGSSSSPSGYVDGYEATSRQISAVGSRSKNISSLRSPFSERGIENNNLKRMKMNHIQNLAKDENCKTDGNFLLPDLNIVPCDENSDHYTSLGVETTLYGIRIIR

SEQ ID NO: 6900 - protein, 164 aa, Arabidopsis thaliana
MRDGEVVAELLVKLKEAKVIKNPIVTALRWGIQQPRSRCPRKESESRCSPSTPLSWSGGCGGSSSSPSGYVDGYEATSRQISAVGSRSKNISSLRSPFSERGIENNNLKRMKMNHIQNLAKDENCKTDGNFLLPDLNIVPCDENSDHYTSLGVETTLYGIRIIR

SEQ ID NO: 6901 - DNA, 2101 bp, Arabidopsis thaliana
gtatcttcttctccttcctcagccacagaacaagctttgattcatcatttctgcgaaaagaacagagctttggcttggtttcgtgtcttaggtactggttcttacgtagcttatgttctttgtttaaggaaatttaggggttgtttgcttagacttgaagtgggtattactaaagttgtcaactttttgttgaataggaaatggtttctcagatttcgtctgaattatgctaaaagatcaagttctctctgctcggtgttgaaattggaggtgttagagattgctgcgtttagctcttcactgtattatcatgggagctgtctggttgagtcatgtctctcaattggtttgtggatgttatttaattgagcagagctcttgtgttttgagaacttttcattggtctttgagtcactcattgaactttacattgaccatgaagcctaaacgaaggcgtctaggtgtaaaaatggagtctttttctttggcaacaccaaacatgtgtttcaggaaggtgagtagtgaattagacagttctttcaacggtgaaaatgtggtttgtggtttggaactggaggagaagactgcaggggataggaataggatacattttctagaggagcggaacgaagaaactttatcgaagaggcttcggaaacttagcaggttggataaagtcagaagcgcattggagttgtttgattctatgagattcttgggtttacaacctaatgctcatgcctgtaactcttttctctcgtgcctcttgaggaatggagatattcagaaagcttttaccgtctttgagttcatgaggaaaaaggagaatgttacagggcacacgtatagtttgatgttgaaagctgttgcagaagttaagggttgcgagtctgcattaagaatgtttagagaactagaaagggagccgaaacgtaggagttgttttgatgtggttctatataatactgcgatttctctatgtggacggataaataatgtgtatgagacagagagaatatggagagttatgaaaggtgatggtcatattggaacagagattacatattctctgcttgttagcatttttgttcggtgtgggagaagtgaattggcccttgatgtgtatgatgagatggttaacaacaagatatctctgagagaggatgcaatgtatgcgatgataagtgcgtgtacaaaggaggaaaaatgggatttggccttaaagatatttcagagtatgttaaagaaagggatgaagcctaatcttgtagcttgcaatactttgataaactcgctgggaaaggcgggtaaagtcggattggtgtttaaggtttacagtgttttaaaatccttggggcataaaccagacgagtacacgtggaatgcgctgctcacggctttatacaaagcaaaccgatatgaagatgttcttcagctgtttgatatgataagaagcgaaaacctgtgttgtctaaatgaatatttgtacaacacagctatggtgtcatgccaaaagcttggttattgggagaaagctgtgaagcttttgtatgaaatggaaggttcgggtttaacagtttcaacttcatcatataatctagtgataagcgcttgcgaaaaatcaagaaaatcgaaagttgcattgctagtatatgagcacatggctcaaagggattgtaagccaaacacgtttacttatctttcgcttgtaaggagttgtatttggggttccctttgggacgaggttgaagatatccttaagaaagtggaacccgatgtatcgctttacaatgcagctatacatgggatgtgtttgagacgcgagttcaagtttgcaaaagagctgtatgtcaaaatgagagagatgggtttagaaccggatggcaaaacccgagctatgatgttacagaatttgaagaaacaccaaaaataaggttataattgtacgttatctactcatacttatttgcatttgccaactgccaagtatcataagtcaaaattcactaaaacaattggtctgtaattaggcattgtatgcatactcactgtgatgaatgttctggtgatggtgatgtttgtttgataaatgaggttgtgg

SEQ ID NO: 6902 - protein, 540 aa, Arabidopsis thaliana
MGAVWLSHVSQLVCGCYLIEQSSCVLRTFHWSLSHSLNFTLTMKPKRRRLGVKMESFSLATPNMCFRKVSSELDSSFNGENVVCGLELEEKTAGDRNRIHFLEERNEETLSKRLRKLSRLDKVRSALELFDSMRFLGLQPNAHACNSFLSCLLRNGDIQKAFTVFEFMRKKENVTGHTYSLMLKAVAEVKGCESALRMFRELEREPKRRSCFDVVLYNTAISLCGRINNVYETERIWRVMKGDGHIGTEITYSLLVSIFVRCGRSELALDVYDEMVNNKISLREDAMYAMISACTKEEKWDLALKIFQSMLKKGMKPNLVACNTLINSLGKAGKVGLVFKVYSVLKSLGHKPDEYTWNALLTALYKANRYEDVLQLFDMIRSENLCCLNEYLYNTAMVSCQKLGYWEKAVKLLYEMEGSGLTVSTSSYNLVISACEKSRKSKVALLVYEHMAQRDCKPNTFTYLSLVRSCIWGSLWDEVEDILKKVEPDVSLYNAAIHGMCLRREFKFAKELYVKMREMGLEPDGKTRAMMLQNLKKHQK

SEQ ID NO: 6903 - protein, 498 aa, Arabidopsis thaliana
MKPKRRRLGVKMESFSLATPNMCFRKVSSELDSSFNGENVVCGLELEEKTAGDRNRIHFLEERNEETLSKRLRKLSRLDKVRSALELFDSMRFLGLQPNAHACNSFLSCLLRNGDIQKAFTVFEFMRKKENVTGHTYSLMLKAVAEVKGCESALRMFRELEREPKRRSCFDVVLYNTAISLCGRINNVYETERIWRVMKGDGHIGTEITYSLLVSIFVRCGRSELALDVYDEMVNNKISLREDAMYAMISACTKEEKWDLALKIFQSMLKKGMKPNLVACNTLINSLGKAGKVGLVFKVYSVLKSLGHKPDEYTWNALLTALYKANRYEDVLQLFDMIRSENLCCLNEYLYNTAMVSCQKLGYWEKAVKLLYEMEGSGLTVSTSSYNLVISACEKSRKSKVALLVYEHMAQRDCKPNTFTYLSLVRSCIWGSLWDEVEDILKKVEPDVSLYNAAIHGMCLRREFKFAKELYVKMREMGLEPDGKTRAMMLQNLKKHQK

SEQ ID NO: 6904 - protein, 487 aa, Arabidopsis thaliana
MESFSLATPNMCFRKVSSELDSSFNGENVVCGLELEEKTAGDRNRIHFLEERNEETLSKRLRKLSRLDKVRSALELFDSMRFLGLQPNAHACNSFLSCLLRNGDIQKAFTVFEFMRKKENVTGHTYSLMLKAVAEVKGCESALRMFRELEREPKRRSCFDVVLYNTAISLCGRINNVYETERIWRVMKGDGHIGTEITYSLLVSIFVRCGRSELALDVYDEMVNNKISLREDAMYAMISACTKEEKWDLALKIFQSMLKKGMKPNLVACNTLINSLGKAGKVGLVFKVYSVLKSLGHKPDEYTWNALLTALYKANRYEDVLQLFDMIRSENLCCLNEYLYNTAMVSCQKLGYWEKAVKLLYEMEGSGLTVSTSSYNLVISACEKSRKSKVALLVYEHMAQRDCKPNTFTYLSLVRSCIWGSLWDEVEDILKKVEPDVSLYNAAIHGMCLRREFKFAKELYVKMREMGLEPDGKTRAMMLQNLKKHQK

SEQ ID NO: 6905 - DNA, 674 bp, Arabidopsis thaliana
aactcagtcgtctcaatccgtgtaacaacttcatcgtctttttcagttcaacaacttcatcgtctttttcagttcaacctccgacatctctcgtctccaggtgattgatcccatcgaagggtctatggaagagaacaacaacgccgggagcgattccgactctaattccgtcgaagattcacaagactattacgaaccgatctcagccgtcgatttatataactccaacgacgatgaagaagacagttatcttccgatcggtggagatggtctctctaacggccattgtatgattccggatgcagaggtaggaatctcttctattagtataaacgataacacagacagcgaagaagagacagagacggagactggaccggagatccgtagagcgtttgaggaggacgaacggcggagaagatcgccgttagtggaggagaatgccgttagggttatggaggcaatgcgagccatctcattccctggaacggctcctgattgggcctccgatgttaatgaggatcgttggattgatcagcttcgaagattgagaaccacttctcaataagctttctccaatctcgatagttgttttcgtttaagatctttctcaatgttgttcaatgtgacttcttttaaacattcaatataaaaaccagagaatttcaccactc

SEQ ID NO: 6906 - protein, 147 aa, Arabidopsis thaliana
MEENNNAGSDSDSNSVEDSQDYYEPISAVDLYNSNDDEEDSYLPIGGDGLSNGHCMIPDAEVGISSISINDNTDSEEETETETGPEIRRAFEEDERRRRSPLVEENAVRVMEAMRAISFPGTAPDWASDVNEDRWIDQLRRLRTTSQ

SEQ ID NO: 6907 - protein, 92 aa, Arabidopsis thaliana
MIPDAEVGISSISINDNTDSEEETETETGPEIRRAFEEDERRRRSPLVEENAVRVMEAMRAISFPGTAPDWASDVNEDRWIDQLRRLRTTSQ

SEQ ID NO: 6908 - DNA, 2136 bp, Arabidopsis thaliana
actgtcccaatccatcagttttatatggcaaactctcccgctgctcctgcacccaccaccacaaccggtggtgactcccggcgacgcctctccgcgtccatagaagcaatatgcaagaggagattccggagaaatagcaaaggaggtggcagatcggatatggtgaaaccgtttaatatcataaatttttcgacacaagacaaaaacagtagttgttgttgtttcaccaagtttcagatcgtgaagcttctcttgtttatccttctctctgccactctcttcaccattatctattctcctgaagcttatcatcattctctttcccactcatcttctcgaagacaagatccacgttacttctcggatctggatataaactgggacgatgtgactaaaacccttgagaacatcgaagaaggccgtacgatcggtgtcttgaattttgattcgaacgagatccaacgatggagagaagtatccaagagcaaggacaatggggatgaagaaaaagttgttgtattgaatctagattacgcagacaagaatgtgacttgggacgcactatatccagagtggatcgatgaggagcaagaaacagaggtccctgtttgtcctaatatcccgaacattaaggtacctacaagaagactcgatctgatcgtcgtgaaacttccttgtcggaaagaagggaattggtcgagagacgtcgggagattgcatctacagctagcggctgcaactgtggcggcttcggccaaagggtttttcaggggacatgtgttttttgtatctagatgctttccgattccgaatcttttccggtgtaaagatcttgtgtctcggagaggcgatgtttggttgtacaaacctaatcttgataccttgagagacaagcttcagctgcctgtagggtcttgtgagctatctcttcctcttggcatccaagataggccaagcttaggaaaccctaaaagagaagcttacgcaacaattcttcactcagctcacgtttacgtctgcggtgcaatcgccgcggctcagagcataagacagtctggttcgacgagagaccttgttatccttgttgatgacaacatcagcggttaccaccggagtggactagaagccgcgggttggcaaatccggacgatacagaggattcgaaaccctaaggcagagaaagatgcttacaacgaatggaactacagcaagttccggctatggcagctgactgattacgacaaaatcattttcatcgacgcggatctcttaatcttgagaaacatcgatttcttgttctcgatgcctgagatctcagctacaggaaacaatggaactctgtttaattcaggagttatggtgatcgagccttgcaactgtacgtttcagcttctgatggaacatataaacgagattgagtcttataacggtggagatcaaggttacttaaacgaggtattcacatggtggcaccggattccaaaacatatgaatttcttgaagcatttttggattggcgatgaagatgacgcgaaacgcaagaaaacagagctttttggagcagagcctcctgttctttatgttcttcattaccttgggatgaagccgtggttatgttaccgtgactacgactgtaacttcaactccgacatattcgttgagtttgctaccgatatcgctcatcgaaaatggtggatggtccacgacgccatgccacaggaacttcaccaattctgttacttgcgatccaagcaaaaggcacagctggaatatgatcgccggcaagcagaggccgcaaattatgccgacggtcattggaaaataagagtaaaggacccgagattcaaaatttgcatcgacaaattatgtaattggaaaagtatgctgcggcattggggcgaatcaaattggactgactacgagtcttttgttcccaccccaccagccattaccgtagaccggagatcatcacttcccggccataacttgtgacgcaataattatacatacttattaatggatttcatgagttttttggtttgaattgttgctgcgagattaggtgaatatcagttgtgtaactatatctttttcctatagtttgttcaaattgaataaaacatttttttgcagtct

SEQ ID NO: 6909 - protein, 663 aa, Arabidopsis thaliana
TVPIHQFYMANSPAAPAPTTTTGGDSRRRLSASIEAICKRRFRRNSKGGGRSDMVKPFNIINFSTQDKNSSCCCFTKFQIVKLLLFILLSATLFTIIYSPEAYHHSLSHSSSRRQDPRYFSDLDINWDDVTKTLENIEEGRTIGVLNFDSNEIQRWREVSKSKDNGDEEKVVVLNLDYADKNVTWDALYPEWIDEEQETEVPVCPNIPNIKVPTRRLDLIVVKLPCRKEGNWSRDVGRLHLQLAAATVAASAKGFFRGHVFFVSRCFPIPNLFRCKDLVSRRGDVWLYKPNLDTLRDKLQLPVGSCELSLPLGIQDRPSLGNPKREAYATILHSAHVYVCGAIAAAQSIRQSGSTRDLVILVDDNISGYHRSGLEAAGWQIRTIQRIRNPKAEKDAYNEWNYSKFRLWQLTDYDKIIFIDADLLILRNIDFLFSMPEISATGNNGTLFNSGVMVIEPCNCTFQLLMEHINEIESYNGGDQGYLNEVFTWWHRIPKHMNFLKHFWIGDEDDAKRKKTELFGAEPPVLYVLHYLGMKPWLCYRDYDCNFNSDIFVEFATDIAHRKWWMVHDAMPQELHQFCYLRSKQKAQLEYDRRQAEAANYADGHWKIRVKDPRFKICIDKLCNWKSMLRHWGESNWTDYESFVPTPPAITVDRRSSLPGHNL

SEQ ID NO: 6910 - protein, 655 aa, Arabidopsis thaliana
MANSPAAPAPTTTTGGDSRRRLSASIEAICKRRFRRNSKGGGRSDMVKPFNIINFSTQDKNSSCCCFTKFQIVKLLLFILLSATLFTIIYSPEAYHHSLSHSSSRRQDPRYFSDLDINWDDVTKTLENIEEGRTIGVLNFDSNEIQRWREVSKSKDNGDEEKVVVLNLDYADKNVTWDALYPEWIDEEQETEVPVCPNIPNIKVPTRRLDLIVVKLPCRKEGNWSRDVGRLHLQLAAATVAASAKGFFRGHVFFVSRCFPIPNLFRCKDLVSRRGDVWLYKPNLDTLRDKLQLPVGSCELSLPLGIQDRPSLGNPKREAYATILHSAHVYVCGAIAAAQSIRQSGSTRDLVILVDDNISGYHRSGLEAAGWQIRTIQRIRNPKAEKDAYNEWNYSKFRLWQLTDYDKIIFIDADLLILRNIDFLFSMPEISATGNNGTLFNSGVMVIEPCNCTFQLLMEHINEIESYNGGDQGYLNEVFTWWHRIPKHMNFLKHFWIGDEDDAKRKKTELFGAEPPVLYVLHYLGMKPWLCYRDYDCNFNSDIFVEFATDIAHRKWWMVHDAMPQELHQFCYLRSKQKAQLEYDRRQAEAANYADGHWKIRVKDPRFKICIDKLCNWKSMLRHWGESNWTDYESFVPTPPAITVDRRSSLPGHNL

SEQ ID NO: 6911 - protein, 610 aa, Arabidopsis thaliana
MVKPFNIINFSTQDKNSSCCCFTKFQIVKLLLFILLSATLFTIIYSPEAYHHSLSHSSSRRQDPRYFSDLDINWDDVTKTLENIEEGRTIGVLNFDSNEIQRWREVSKSKDNGDEEKVVVLNLDYADKNVTWDALYPEWIDEEQETEVPVCPNIPNIKVPTRRLDLIVVKLPCRKEGNWSRDVGRLHLQLAAATVAASAKGFFRGHVFFVSRCFPIPNLFRCKDLVSRRGDVWLYKPNLDTLRDKLQLPVGSCELSLPLGIQDRPSLGNPKREAYATILHSAHVYVCGAIAAAQSIRQSGSTRDLVILVDDNISGYHRSGLEAAGWQIRTIQRIRNPKAEKDAYNEWNYSKFRLWQLTDYDKIIFIDADLLILRNIDFLFSMPEISATGNNGTLFNSGVMVIEPCNCTFQLLMEHINEIESYNGGDQGYLNEVFTWWHRIPKHMNFLKHFWIGDEDDAKRKKTELFGAEPPVLYVLHYLGMKPWLCYRDYDCNFNSDIFVEFATDIAHRKWWMVHDAMPQELHQFCYLRSKQKAQLEYDRRQAEAANYADGHWKIRVKDPRFKICIDKLCNWKSMLRHWGESNWTDYESFVPTPPAITVDRRSSLPGHNL

SEQ ID NO: 6912 - DNA, 825 bp, Arabidopsis thaliana
aactactaaacactaaattatcaatccgctctcttctcaaaaaaaaaaaatcgactctaaaatcaaactctctcaaagctccccaaaaaaaccctagttctgaatggaatcggcggattccggacgatccgatccggtaaaaggagacgacccgggtccatctttcgtctcttcaccaccagctacacctagcaggtatgagtcacagaagcgacgcgactggaacacgttcttgcagtacctcaagaaccacaagccgcctctcgcgttgtcacggtgtagcggagcgcatgtgatcgagtttctcaagtacctcgaccagttcggtaagaccaaagtccacgtggcggcttgtccttacttcggccatcagcaacctccgtctccttgctcatgccctctcaagcaagcttggggatctctcgatgctttgatcggacggttgagagctgcctacgaggagaacggtggacggccggattctaacccgttcgccgcacgtgcggttcggatttacttgagggaagtcagagagagtcaggcaaaggctcgtgggattccttacgagaaaaagaaacggaaacggccgccaactgtcaccaccgttagagttgacgtcgcttcttcgagacaaagtgacggagacccttgtaacgtcggtgctccatctgttgccgaggccgtaccgccttagatcgaattatatataatattatagttttcttgattaatgatatatatatacttatctctatgtatgtatggaactcacttcatcttttgttccttagtacctaattattaaattttgttccttttgagtcg

SEQ ID NO: 6913 - protein, 196 aa, Arabidopsis thaliana
MESADSGRSDPVKGDDPGPSFVSSPPATPSRYESQKRRDWNTFLQYLKNHKPPLALSRCSGAHVIEFLKYLDQFGKTKVHVAACPYFGHQQPPSPCSCPLKQAWGSLDALIGRLRAAYEENGGRPDSNPFAARAVRIYLREVRESQAKARGIPYEKKKRKRPPTVTTVRVDVASSRQSDGDPCNVGAPSVAEAVPP

SEQ ID NO: 6914 - DNA, 881 bp, Arabidopsis thaliana
aaaatgatcgctgcgacagcgagtgtgtgacgttaaaccctaaatctggtgtctttgtgcaatcgcaagattcattcactctctgcgacactaaagatcgaaacttttgaattgcagaaatggcgacagctttagcttccaagctctccaaaggacgttcattgcttggaggtctttgcaatgctttctctggtttgatgaattcctcctccaatggaatgatgaatggaagcatcctctctcagcaacaacataggacattcattcaaatggggacgattctcaaatgcgtggataactcgtgtgctaaagaggtgatgtgcattcaatccctgagaggtaagaaaggagcaagacttggcgatatcattgttggttcagtgaaagaagctaacccaattgttcaaaaaaaagtaaagaaagacgctatcccaaaaggtaaagtgaagaaagggatggtcgtgtacggtgtggttgtgcgtgctgcgatgcctaaaggacgtgctgatggaagccaagtcaagtttgatgacaatgccattgtagttgttggcattaaggaaaagaaagggcagaataattcacatggttccaagaggaaaatggagtacaaccaaccgactggtacccgagtgtttggtcctgtcccgcacgagatgcgcctcaggaaacagctcaagatcctttctttggctcagcacattgtttgagacaatacaccacactaaaacatcagttatgatctcctttatgtgactctctttgatccattcatcacttgggtttctgttgattcttcaactatccaactcattatttttgttaattctaatgaattatgaaaccttaacgtaccaattatgatctcttatttaggtttc

SEQ ID NO: 6915 - protein, 196 aa, Arabidopsis thaliana
MATALASKLSKGRSLLGGLCNAFSGLMNSSSNGMMNGSILSQQQHRTFIQMGTILKCVDNSCAKEVMCIQSLRGKKGARLGDIIVGSVKEANPIVQKKVKKDAIPKGKVKKGMVVYGVVVRAAMPKGRADGSQVKFDDNAIVVVGIKEKKGQNNSHGSKRKMEYNQPTGTRVFGPVPHEMRLRKQLKILSLAQHIV

SEQ ID NO: 6916 - protein, 170 aa, Arabidopsis thaliana
MNSSSNGMMNGSILSQQQHRTFIQMGTILKCVDNSCAKEVMCIQSLRGKKGARLGDIIVGSVKEANPIVQKKVKKDAIPKGKVKKGMVVYGVVVRAAMPKGRADGSQVKFDDNAIVVVGIKEKKGQNNSHGSKRKMEYNQPTGTRVFGPVPHEMRLRKQLKILSLAQHIV

SEQ ID NO: 6917 - protein, 163 aa, Arabidopsis thaliana
MMNGSILSQQQHRTFIQMGTILKCVDNSCAKEVMCIQSLRGKKGARLGDIIVGSVKEANPIVQKKVKKDAIPKGKVKKGMVVYGVVVRAAMPKGRADGSQVKFDDNAIVVVGIKEKKGQNNSHGSKRKMEYNQPTGTRVFGPVPHEMRLRKQLKILSLAQHIV

SEQ ID NO: 6918 - DNA, 614 bp, Arabidopsis thaliana
gtcccgaaagtcgcagagcgagctacaagaagaagcgaaacacacccagaagaagaagaagaacaacaacgaagtaaacaatggagtctgagaaaaagatagctcatgagatcggtggtgtcaaaaacgacgctcttcgatttggtcttcacggcgttaagagcaacatcatcggatctcacccactcgaatcgtcatacgaatctgaaaagaaatcgaaagaggcgttgaagaggacggtcattgcgcatgcctacgggactgcacttccgttgaagatggatatggataggcaaattctctcaaggtttcagagacctcctggaccaattccgtcgtcgatgctcggtttagaagtctacacgggagctgtggatgactttggttttgaggattacttgaatgatcctcgtgattccgagacattcaagccggtagacttccaccacgggatggaagttcgtcttggcatctcaaagggaccgatttacccaagtttcatgtaacccttcatgggtggttttttttatcggttgtttttggatcatgactcatcgtgtatgaacttatttcaaccttagacttgtactctctcttgagttaagtttgaaatc

SEQ ID NO: 6919 - protein, 141 aa, Arabidopsis thaliana
MESEKKIAHEIGGVKNDALRFGLHGVKSNIIGSHPLESSYESEKKSKEALKRTVIAHAYGTALPLKMDMDRQILSRFQRPPGPIPSSMLGLEVYTGAVDDFGFEDYLNDPRDSETFKPVDFHHGMEVRLGISKGPIYPSFM

SEQ ID NO: 6920 - protein, 75 aa, Arabidopsis thaliana
MDMDRQILSRFQRPPGPIPSSMLGLEVYTGAVDDFGFEDYLNDPRDSETFKPVDFHHGMEVRLGISKGPIYPSFM

SEQ ID NO: 6921 - protein, 73 aa, Arabidopsis thaliana
MDRQILSRFQRPPGPIPSSMLGLEVYTGAVDDFGFEDYLNDPRDSETFKPVDFHHGMEVRLGISKGPIYPSFM

SEQ ID NO: 6922 - DNA, 1073 bp, Arabidopsis thaliana
ctctctctgttgctaaaaacatttagatcgcttacctggttcgtgcacctgattagctgctgttatttctttttcttcccagagttcaggtcgttaaaaatctaatcttttttggtgggtgaagactcttctttatcaaatcaacctaatttctcagattctcagatctcaagagttttgtttttttagcaacaatgaataaaaatccacggctcgatttttcctcaccgtcgtcgttagccactatctccgactctgcagacggtgagctgaatgaagacgacatctttgcaatcgacatatctcacgcgccgcctcaagctcgtcattctcctgtatcatctccggcgaagcaacaaactcctgctcgtcagcttcagaggagcaaaagcggtttgaagaatgtggaagcgtctggtatcctcgcggctcttcctgaatcatctgggagtagtagttacttaagtcatgtctttcaccacaaacctgcggctgctctctctacttctgtctcctccacagcttcttcatcgtcttcttcaggtggtggtgcatcagctggttcttcgtcttcagctcgagctatcccgaccgcgcctaaaccgcctcaagagaggcttccgttttcagcttcttttgtaggtggtgggaagtatcctcaatcagctccggttcaagtgccgttagtgtcgtctgcgatgatgaatcgtcataataaggaattcaagctgactgatgtggtggatgatgatgaggaagaagaggaaggcgaaatgcttccgcctcacgagattgtagctcggtctttggctcagtcgtcgttgttatcttgctctgtgcttgaaggagcaggaaggacacttaaagggagagatctccggcaggtaaggaatgctgttttcagaagaaccggtttcatagattgagtgtttttttttttactctcttcttcagaaagacgattctttaatttgttatcccaattgatgaactactttatcccttatttggccacagaaacttgtcaatgtgtatgttcatatgttgtctacgttagacgatttgtttacttc

SEQ ID NO: 6923 - protein, 243 aa, Arabidopsis thaliana
MNKNPRLDFSSPSSLATISDSADGELNEDDIFAIDISHAPPQARHSPVSSPAKQQTPARQLQRSKSGLKNVEASGILAALPESSGSSSYLSHVFHHKPAAALSTSVSSTASSSSSSGGGASAGSSSSARAIPTAPKPPQERLPFSASFVGGGKYPQSAPVQVPLVSSAMMNRHNKEFKLTDVVDDDEEEEEGEMLPPHEIVARSLAQSSLLSCSVLEGAGRTLKGRDLRQVRNAVFRRTGFID

SEQ ID NO: 6924 - DNA, 910 bp, Arabidopsis thaliana
gacctgcaaaaacaacatctctcacattctctctaaactctcttcactgttactcgacaatggctactacttctaactcggtacttttcctaagttctgactcactgattcatcatcatcatcatcaacctctccatctatcttcctccagatctcactctgtttctctcccacccaacaagcgatccaattctctcacgcttcgttgttcaacaaatggcgatagcacctcaaccgaaaaggaaacaccaatcgaactcaaattcccagcatttccaacggtaatggacattaaccaaatcagagagatattgcctcacaggtttccgtttctgctggtagatagagtgatagagtatacgcctggtgtttcagctgtagctattaagaatgtcaccatcaatgacaatttcttccctggccatttccctgaacgaccaatcatgcctggtgttctcatgattgaggcaatggcgcaagtcggaggtatagtaatgctgcagccggaagtaggaggctctcaagataacttcttctttgctggtattgataaagtgagatttcgcaaaccagtgattgcaggagacacgctagtcatgaggatgactcttctcaagttccagaagcggttcgggctcgctaaaatggaaggtaaagcttatgtgggtggtgctctggtgtgtgaaggcgagttcatgatggtttctgctggtagttcttgatctcacccattaatggtctcacttcccacatgtggactcttcttatgcttcttctgttattcgaaaatctagacaagacagctttatgttttcgacatttatatgagctacttttgcccttcgtgtctttattgctgtctccaatttatgaacattcataagatacaaatacagagattttgattttg

SEQ ID NO: 6925 - protein, 239 aa, Arabidopsis thaliana
PAKTTSLTFSLNSLHCYSTMATTSNSVLFLSSDSLIHHHHHQPLHLSSSRSHSVSLPPNKRSNSLTLRCSTNGDSTSTEKETPIELKFPAFPTVMDINQIREILPHRFPFLLVDRVIEYTPGVSAVAIKNVTINDNFFPGHFPERPIMPGVLMIEAMAQVGGIVMLQPEVGGSQDNFFFAGIDKVRFRKPVIAGDTLVMRMTLLKFQKRFGLAKMEGKAYVGGALVCEGEFMMVSAGSS

SEQ ID NO: 6926 - protein, 220 aa, Arabidopsis thaliana
MATTSNSVLFLSSDSLIHHHHHQPLHLSSSRSHSVSLPPNKRSNSLTLRCSTNGDSTSTEKETPIELKFPAFPTVMDINQIREILPHRFPFLLVDRVIEYTPGVSAVAIKNVTINDNFFPGHFPERPIMPGVLMIEAMAQVGGIVMLQPEVGGSQDNFFFAGIDKVRFRKPVIAGDTLVMRMTLLKFQKRFGLAKMEGKAYVGGALVCEGEFMMVSAGSS

SEQ ID NO: 6927 - protein, 145 aa, Arabidopsis thaliana
MDINQIREILPHRFPFLLVDRVIEYTPGVSAVAIKNVTINDNFFPGHFPERPIMPGVLMIEAMAQVGGIVMLQPEVGGSQDNFFFAGIDKVRFRKPVIAGDTLVMRMTLLKFQKRFGLAKMEGKAYVGGALVCEGEFMMVSAGSS

SEQ ID NO: 6928 - DNA, 1706 bp, Arabidopsis thaliana
atctatactcataaatccttttgtctaaaaatggcgatgctaggtttttacgtaacgttcattttctttcttgtatgcctatttacttatttcttcctccaaaagaaacctcaaggtcagcctattctcaagaactggccgttcctcaggatgcttccaggaatgctccaccaaatccctcgtatctacgactggaccgtcgaggtgcttgaggcgaccaatctaactttttatttcaaagggccatggcttagtggaacggacatgttgttcaccgccgatccaaggaatattcatcacatactaagctcaaactttgggaattaccctaaaggacctgagttcaagaagatctttgatgttttgggagaaggaatcttaaccgttgattttgagttgtgggaggagatgaggaagtcaaatcacgccctattccacaatcaagatttcatcgagctctcagtaagtagcaataaaagtaagttaaaagaaggtcttgttccttttcttgataatgctgctcagaaaaacattatcatagaattacaagatgtgttccagagattcatgtttgatacttcttcaattttgatgactggttacgatccaatgtcactatccatcgaaatgctggaagttgagttcggtgaagctgcggatattggcgaagaagcaatctattatagacatttcaaaccggtgatcttgtggaggcttcaaaactggattggtattgggcttgagaggaagatgagaacagctttggccactgtcaatcgtatgtttgcgaagatcatatcttcaagaagaaaagaggagataagtcgcgccaaaacggagccatattccaaggacgcgttgacgtattatatgaatgtggacacgagcaaatataagctcttgaaacctaataaagataagtttataagagatgttatttttagtctagtgttagcaggaagggacaccacaagctcagttctcacttggttcttttggcttctttctaagcatcctcaagttatggccaagctcagacatgagatcaacacaaagtttgataatgaagatctagagaagctcgtgtatctgcatgctgcattgtccgaatcaatgagactctacccgccacttcccttcaaccacaagtctcctgcgaagccagatgtacttccaagcgggcacaaagttgatgcaaattcaaagatcgtgatatgtatctatgcattggggaggatgagatctgtatggggagaagacgcattggatttcaaaccagagagatggatttcagacaatggaggtctaagacatgaaccttcatacaagttcatggcttttaattctggtccgagaacttgcttgggtaaaaatctagctctcttgcagatgaagatggtagctctggagatcatacgaaactatgactttaaggtcattgaaggtcacaaggtcgaaccaattccttctatccttctccgtatgaaacatggtcttaaagtcacagtcacaaagaagatatgattattatgcttgcttggcttctacggcaactattactatttccttatttaaatgtgttacttactagtttgttcccacgttataactacttgtattacgtactaagtacggtgtttgtcccacgtcatgctcataaattaattaatatcgtcaataaagtattagagcatcctcgtccatat

SEQ ID NO: 6929 - protein, 507 aa, Arabidopsis thaliana
IYTHKSFCLKMAMLGFYVTFIFFLVCLFTYFFLQKKPQGQPILKNWPFLRMLPGMLHQIPRIYDWTVEVLEATNLTFYFKGPWLSGTDMLFTADPRNIHHILSSNFGNYPKGPEFKKIFDVLGEGILTVDFELWEEMRKSNHALFHNQDFIELSVSSNKSKLKEGLVPFLDNAAQKNIIIELQDVFQRFMFDTSSILMTGYDPMSLSIEMLEVEFGEAADIGEEAIYYRHFKPVILWRLQNWIGIGLERKMRTALATVNRMFAKIISSRRKEEISRAKTEPYSKDALTYYMNVDTSKYKLLKPNKDKFIRDVIFSLVLAGRDTTSSVLTWFFWLLSKHPQVMAKLRHEINTKFDNEDLEKLVYLHAALSESMRLYPPLPFNHKSPAKPDVLPSGHKVDANSKIVICIYALGRMRSVWGEDALDFKPERWISDNGGLRHEPSYKFMAFNSGPRTCLGKNLALLQMKMVALEIIRNYDFKVIEGHKVEPIPSILLRMKHGLKVTVTKKI

SEQ ID NO: 6930 - protein, 497 aa, Arabidopsis thaliana
MAMLGFYVTFIFFLVCLFTYFFLQKKPQGQPILKNWPFLRMLPGMLHQIPRIYDWTVEVLEATNLTFYFKGPWLSGTDMLFTADPRNIHHILSSNFGNYPKGPEFKKIFDVLGEGILTVDFELWEEMRKSNHALFHNQDFIELSVSSNKSKLKEGLVPFLDNAAQKNIIIELQDVFQRFMFDTSSILMTGYDPMSLSIEMLEVEFGEAADIGEEAIYYRHFKPVILWRLQNWIGIGLERKMRTALATVNRMFAKIISSRRKEEISRAKTEPYSKDALTYYMNVDTSKYKLLKPNKDKFIRDVIFSLVLAGRDTTSSVLTWFFWLLSKHPQVMAKLRHEINTKFDNEDLEKLVYLHAALSESMRLYPPLPFNHKSPAKPDVLPSGHKVDANSKIVICIYALGRMRSVWGEDALDFKPERWISDNGGLRHEPSYKFMAFNSGPRTCLGKNLALLQMKMVALEIIRNYDFKVIEGHKVEPIPSILLRMKHGLKVTVTKKI

SEQ ID NO: 6931 - protein, 495 aa, Arabidopsis thaliana
MLGFYVTFIFFLVCLFTYFFLQKKPQGQPILKNWPFLRMLPGMLHQIPRIYDWTVEVLEATNLTFYFKGPWLSGTDMLFTADPRNIHHILSSNFGNYPKGPEFKKIFDVLGEGILTVDFELWEEMRKSNHALFHNQDFIELSVSSNKSKLKEGLVPFLDNAAQKNIIIELQDVFQRFMFDTSSILMTGYDPMSLSIEMLEVEFGEAADIGEEAIYYRHFKPVILWRLQNWIGIGLERKMRTALATVNRMFAKIISSRRKEEISRAKTEPYSKDALTYYMNVDTSKYKLLKPNKDKFIRDVIFSLVLAGRDTTSSVLTWFFWLLSKHPQVMAKLRHEINTKFDNEDLEKLVYLHAALSESMRLYPPLPFNHKSPAKPDVLPSGHKVDANSKIVICIYALGRMRSVWGEDALDFKPERWISDNGGLRHEPSYKFMAFNSGPRTCLGKNLALLQMKMVALEIIRNYDFKVIEGHKVEPIPSILLRMKHGLKVTVTKKI

SEQ ID NO: 6932 - DNA, 574 bp, Arabidopsis thaliana
ttctgattctcggagctaaaagaagagcaagcagcggcgcagaagttgaacacaagtgaagctcacaatggcgaggattaaggttcacgaattgagggagaagtcgaagagcgatcttcaaaaccagctgaaggaactcaaagctgagctcgctctcctccgtgtcgctaaagtcaccggaggtgctccaaacaagctctctaaaatcaaggtcgtgcgtaaatccatagctcaggttttgacagtgtcttctcagaagcagaagtctgctctaagagaagcatacaagaacaagaagttgcttcctcttgatctccgtcccaagaagacccgtgctattcgtagacgcctcaccaaacaccaggcctcgttgaagacagagcgtgagaagaagaaggagatgtatttcccaataaggaagtacgctatcaaagtttaagttttagctgctagaaacactgtttcagcttttgtttttgatggaaacttgttcttgttcttcacttgtgttatcgtctcaaacagtttcagatacttggattttggttctcattgatgatcttttgcttctatc

SEQ ID NO: 6933 - protein, 123 aa, Arabidopsis thaliana
MARIKVHELREKSKSDLQNQLKELKAELALLRVAKVTGGAPNKLSKIKVVRKSIAQVLTVSSQKQKSALREAYKNKKLLPLDLRPKKTRAIRRRLTKHQASLKTEREKKKEMYFPIRKYAIKV

SEQ ID NO: 6934 - DNA, 906 bp, Arabidopsis thaliana
cttttacaaagacaagccttttcaacacactactgatcttgagaatcctctcttcaaagccatggcgttagaactatggcaaactctcaaagaagcaatccatgcttacacaggtctttctcctgttgtcttcttcactgctctagctctcgccttcgccatttaccaagtcatctcaggctggtttgcctcgccgttcgatgatgttaaccgacatcagagagctagatccttggctcaagaggaggagccaccgattcctcagcctgttcaagtcggtgagatcacggaggaggagcttaaacagtacgatggctctgatcctcaaaagccccttcttatggctatcaaacatcagatctatgatgttacacaaagcaggatgttctacggaccaggaggaccatatgctttgtttgcagggaaagacgctagccgagctcttgcaaagatgtcatttgaggagaaagacttgacttgggatgtctctggtcttggtccctttgagctagatgctcttcaagattgggagtacaagttcatgagcaagtatgctaaggttggtactgtcaaagtggctggttcagaacctgaaaccgcatctgtctctgaacccacagagaatgttgagcaagatgctcatgtaaccacaacgcctgggaagaccgttgttgataagagtgatgatgctcctgctgagactgtgttgaagaaggaggagtagagcccatttccaagatttgctctgatttgtcatagagaccagttttatgaaaaggattgtagaatctctaatgttgaagtgtcaatgataatcttgttttactttcccaaaaaataaagattgctgattaatgataagaaaaaaatgttttataaactgcatatcagaaggcgttgcattgc

SEQ ID NO: 6935 - protein, 240 aa, Arabidopsis thaliana
FYKDKPFQHTTDLENPLFKAMALELWQTLKEAIHAYTGLSPVVFFTALALAFAIYQVISGWFASPFDDVNRHQRARSLAQEEEPPIPQPVQVGEITEEELKQYDGSDPQKPLLMAIKHQIYDVTQSRMFYGPGGPYALFAGKDASRALAKMSFEEKDLTWDVSGLGPFELDALQDWEYKFMSKYAKVGTVKVAGSEPETASVSEPTENVEQDAHVTTTPGKTVVDKSDDAPAETVLKKEE

SEQ ID NO: 6936 - protein, 220 aa, Arabidopsis thaliana
MALELWQTLKEAIHAYTGLSPVVFFTALALAFAIYQVISGWFASPFDDVNRHQRARSLAQEEEPPIPQPVQVGEITEEELKQYDGSDPQKPLLMAIKHQIYDVTQSRMFYGPGGPYALFAGKDASRALAKMSFEEKDLTWDVSGLGPFELDALQDWEYKFMSKYAKVGTVKVAGSEPETASVSEPTENVEQDAHVTTTPGKTVVDKSDDAPAETVLKKEE

SEQ ID NO: 6937 - protein, 127 aa, Arabidopsis thaliana
MAIKHQIYDVTQSRMFYGPGGPYALFAGKDASRALAKMSFEEKDLTWDVSGLGPFELDALQDWEYKFMSKYAKVGTVKVAGSEPETASVSEPTENVEQDAHVTTTPGKTVVDKSDDAPAETVLKKEE

SEQ ID NO: 6938 - DNA, 980 bp, Arabidopsis thaliana
gaagaaggtttcggaagtaaatatgtcttccttggggagcagcaaatccctgagggatgagatggaggtaacaaccgccgatgtttttccggaggttaacgccgccgctgtgacggaaaatcttgatcggaacgagcttgtgcttgctgacggagtcgtgtcggctgaggaaaggaatattgagccagacaatcgtggagagaggaagatagagagcgagtcgcctccagaggatgatgtttgcccgatctgtttcggctcctttacggttccgtgtcgtggaaattgtggtcattggtattgcggaaattgcatcttgcagtactggaactatgctgcaatatctaggccttgcaagtgtcccatgtgtgttaggcacatcacgaagctgtcaccagaaccatctttgcaagagcgtcaggagcaagaggtgaaggaggttcttgataaagtccgtaggtataaccgtctctttgttggaggtctaactggctttgttcagaaggtgcatgagcttccgtttctagtgaagagaatggtgtggcatatgatggatacagatgtgaacaatctgtattttcacgaagtgcgcatctttgcaatgttcatgagtaccctttacactgccgcagagtttaacttcattccaacgggcgggttcagaatagtgacagtttttgactacgctgcgattgctatgatcctgattctacgcttagtagggatatatcggaggagacgcctagctcagcaggttagacatctagcagctgcagcaattgagccggaattagagcaaagggaattgtaacagacacgtgaatctattaagtcttgtgcagtttgatccttgtggataagtttggtagtagatcatagaaacctcgagagtcgtgtgcagttttacagacaatgatattgcagactttaaaagtatatacatatctccttttctaacagtggaaataaaatattgattg

SEQ ID NO: 6939 - protein, 269 aa, Arabidopsis thaliana
KKVSEVNMSSLGSSKSLRDEMEVTTADVFPEVNAAAVTENLDRNELVLADGVVSAEERNIEPDNRGERKIESESPPEDDVCPICFGSFTVPCRGNCGHWYCGNCILQYWNYAAISRPCKCPMCVRHITKLSPEPSLQERQEQEVKEVLDKVRRYNRLFVGGLTGFVQKVHELPFLVKRMVWHMMDTDVNNLYFHEVRIFAMFMSTLYTAAEFNFIPTGGFRIVTVFDYAAIAMILILRLVGIYRRRRLAQQVRHLAAAAIEPELEQREL

SEQ ID NO: 6940 - protein, 262 aa, Arabidopsis thaliana
MSSLGSSKSLRDEMEVTTADVFPEVNAAAVTENLDRNELVLADGVVSAEERNIEPDNRGERKIESESPPEDDVCPICFGSFTVPCRGNCGHWYCGNCILQYWNYAAISRPCKCPMCVRHITKLSPEPSLQERQEQEVKEVLDKVRRYNRLFVGGLTGFVQKVHELPFLVKRMVWHMMDTDVNNLYFHEVRIFAMFMSTLYTAAEFNFIPTGGFRIVTVFDYAAIAMILILRLVGIYRRRRLAQQVRHLAAAAIEPELEQREL

SEQ ID NO: 6941 - protein, 249 aa, Arabidopsis thaliana
MEVTTADVFPEVNAAAVTENLDRNELVLADGVVSAEERNIEPDNRGERKIESESPPEDDVCPICFGSFTVPCRGNCGHWYCGNCILQYWNYAAISRPCKCPMCVRHITKLSPEPSLQERQEQEVKEVLDKVRRYNRLFVGGLTGFVQKVHELPFLVKRMVWHMMDTDVNNLYFHEVRIFAMFMSTLYTAAEFNFIPTGGFRIVTVFDYAAIAMILILRLVGIYRRRRLAQQVRHLAAAAIEPELEQREL

SEQ ID NO: 6942 - DNA, 1367 bp, Arabidopsis thaliana
gacgggtcaattcacatacttgtttaacggcaacaaaaacctaccgataaatgctaaactaacgaaatcggatcatagctcgacgaagtctcgatcttttctattctctctttctgggtattcgtgggttttacccagatttcgaaattgaatggcggacgaactggaattgtcgccgttggttccaccgtcgccgatggtcgagccttccgagatcgatctcgaagctggaggacctggtgaacaaattcagtgccgaatctgccttgaaactgatggtagggatttcattgccccatgcaaatgcaaaggaacatcaaagtatgtacatcgtgattgcttggatcattggagagctataaaggaaggtttcgcgtttgcgcactgcacaacttgcaaggctccatattatctgagagttcacagtgctggagataggaaatggcggacattgaagtttcgcttctttgttactcgagacattttatccatatttcttgctgttcagcttgtgattgctgcattggcctacatggtctatttcatagatagttaccagcaatcatggcttcgtcatatatggggttttgacagtgaggtcacgttttattacatgtgtggagctttattattctttgctctgctgggtctatctggatgcgtcataacctgctatgatcgaagggttcgcaatgacttagcacagccttgccgtgaattgtgtctctgttgttgccagcctgggatatgcacagactgccatctaccaggaactatttgtatgtgggcagattgcaccgcatgtactgaaggctgtgcaagtgcagttagtgagtgtggaggttgccttggaggtgcaggggaagccggattgccattactcttcataacggcattagtaattctcggtctatttacagttatcggtatattctatagcgtattggttgcaaccatggttggacagcgcatttggcagcgccattaccacattctcgccaaaagaatgctaacaaaggagtatgtggtcgaggatgtagatggcgaaatgacggggtcagaatggtctcccccggctttaccaactgagcatgtccagcagctgaagacgcttggccttctgtgaaactatatggcttttgattaaaactatgggagatttttaactgcacgcagggaaatgcatttgacaagtggtgagagagagaactcacagaacgatgaaatctaatagatcttttgtatttgtaaagaaaagactccaacttattaaagagtccgtgatctctcccattgagtcagagacctctccaattcacgaactgagcttgtgttgaatgtttgtttctaatataggtaaatatccg

SEQ ID NO: 6943 - protein, 324 aa, Arabidopsis thaliana
MADELELSPLVPPSPMVEPSEIDLEAGGPGEQIQCRICLETDGRDFIAPCKCKGTSKYVHRDCLDHWRAIKEGFAFAHCTTCKAPYYLRVHSAGDRKWRTLKFRFFVTRDILSIFLAVQLVIAALAYMVYFIDSYQQSWLRHIWGFDSEVTFYYMCGALLFFALLGLSGCVITCYDRRVRNDLAQPCRELCLCCCQPGICTDCHLPGTICMWADCTACTEGCASAVSECGGCLGGAGEAGLPLLFITALVILGLFTVIGIFYSVLVATMVGQRIWQRHYHILAKRMLTKEYVVEDVDGEMTGSEWSPPALPTEHVQQLKTLGLL

SEQ ID NO: 6944 - protein, 309 aa, Arabidopsis thaliana
MVEPSEIDLEAGGPGEQIQCRICLETDGRDFIAPCKCKGTSKYVHRDCLDHWRAIKEGFAFAHCTTCKAPYYLRVHSAGDRKWRTLKFRFFVTRDILSIFLAVQLVIAALAYMVYFIDSYQQSWLRHIWGFDSEVTFYYMCGALLFFALLGLSGCVITCYDRRVRNDLAQPCRELCLCCCQPGICTDCHLPGTICMWADCTACTEGCASAVSECGGCLGGAGEAGLPLLFITALVILGLFTVIGIFYSVLVATMVGQRIWQRHYHILAKRMLTKEYVVEDVDGEMTGSEWSPPALPTEHVQQLKTLGLL

SEQ ID NO: 6945 - protein, 197 aa, Arabidopsis thaliana
MVYFIDSYQQSWLRHIWGFDSEVTFYYMCGALLFFALLGLSGCVITCYDRRVRNDLAQPCRELCLCCCQPGICTDCHLPGTICMWADCTACTEGCASAVSECGGCLGGAGEAGLPLLFITALVILGLFTVIGIFYSVLVATMVGQRIWQRHYHILAKRMLTKEYVVEDVDGEMTGSEWSPPALPTEHVQQLKTLGLL

SEQ ID NO: 6946 - DNA, 753 bp, Arabidopsis thaliana
atctaaaagaaaaacaacctacgataaaattcagaaactttttctctgagacaccaaaaaaggaaggtgaccctccttctctaatcgattgcttaatcatttctgccgttggattgaatcgaaaaagggcgaattatttaaaaagcttcagaatttgaaatcgaaatctgtgagtactgttgtgtttgtggaagagagagttttggggtttaataatggcgaaagctggagggatcacgaacgcagtaaacgtaggaatcgctgttcaagcagattgggagaatcgagaatttatctcacatatctctcttaatgttcgtcgtctcttcgaattccttgttcaatttgaatcaaccacaaagagcaagttggcttctttgaatgagaagttggatctgttggaacgtcgcttggaaatgctggaggtgcaagtaagtaccgcgacagcaaatccttctctgtttgcgacgtgaaacaccgtagacgatatcgaaatcgaaaccgagcctgatcctttggctttaacagaagaagtctgttgttgaatgtgtaccattgaatgattctttctttcttcacatagctgtggtagtaagtaaactagtagcttaaaatatgaatctattcataaatatgtgtatcttttttctgtccattaagatctcttttgaatgacaagtcatttcgttgaactcttgaagtttttgctttcttctgctgttgatttataaactttgcagaggtacccttttc

SEQ ID NO: 6947 - protein, 85 aa, Arabidopsis thaliana
MAKAGGITNAVNVGIAVQADWENREFISHISLNVRRLFEFLVQFESTTKSKLASLNEKLDLLERRLEMLEVQVSTATANPSLFAT

SEQ ID NO: 6948 - protein, 51 aa, Arabidopsis thaliana
LKEKQPTIKFRNFFSETPKKEGDPPSLIDCLIISAVGLNRKRANYLKSFRI

SEQ ID NO: 6949 - DNA, 754 bp, Arabidopsis thaliana
gaaaaaagctctccacgcctaaaaaaaaagaaaaaagagacagaagaagaaaaagataaagaagaatcaaactttgtaaccctttagcagcaatggcgatggctttcaagatggcgacgacggggatgcgtgtgacggatgagtgtacgagttcattcatggacatgaaatggaagaaagttcatagatacatcgttttcaagatcgaagagaagtcacgtaaagtcaccgtcgataaagtcggcggcgccggtgaaagctaccacgatctcgaagattctttaccggtggatgattgtcgctacgctgtctttgatttcgactttgtcaccgtcgataactgccgcaagagcaagatcttcttcattgcatggtcaccggaggcatcaaagataagggcaaagatattgtacgcaacgtcgaaagatgggctgaggagagtgttggaagggattcactatgaacttcaagctactgatccgacggagatgggtttcgatattatccaagaccgtgccaaatagattgatcacttaagagaatatgatttgactcactttgtcaataattaacattaattaggtcatcggttaatgtttaattattgctggttagtgcttactcttttttgagtttattatccttgatcagtcttaccggcactatcctttaattatgacgtttgtgttttgattgtgttgttaaaatatttttttgtcggttaagcaaacataaaaagctacgaatttgtcct

SEQ ID NO: 6950 - protein, 143 aa, Arabidopsis thaliana
MAMAFKMATTGMRVTDECTSSFMDMKWKKVHRYIVFKIEEKSRKVTVDKVGGAGESYHDLEDSLPVDDCRYAVFDFDFVTVDNCRKSKIFFIAWSPEASKIRAKILYATSKDGLRRVLEGIHYELQATDPTEMGFDIIQDRAK

SEQ ID NO: 6951 - protein, 141 aa, Arabidopsis thaliana
MAFKMATTGMRVTDECTSSFMDMKWKKVHRYIVFKIEEKSRKVTVDKVGGAGESYHDLEDSLPVDDCRYAVFDFDFVTVDNCRKSKIFFIAWSPEASKIRAKILYATSKDGLRRVLEGIHYELQATDPTEMGFDIIQDRAK

SEQ ID NO: 6952 - protein, 137 aa, Arabidopsis thaliana
MATTGMRVTDECTSSFMDMKWKKVHRYIVFKIEEKSRKVTVDKVGGAGESYHDLEDSLPVDDCRYAVFDFDFVTVDNCRKSKIFFIAWSPEASKIRAKILYATSKDGLRRVLEGIHYELQATDPTEMGFDIIQDRAK

SEQ ID NO: 6953 - DNA, 756 bp, Arabidopsis thaliana
ctttcccctaagtcttggttcttcttctctctaatacgagaagaaaaaggcgaaaacctcgccaatccgattacgcgaaaaatcaaaggtttttggatatggcgtcgaagcggatcttgaaggaattgaaggatctccagaaggatccacctacatcatgtagcgcaggtcctgttgctgaagacatgtttcactggcaggcaacgataatgggtccttcagagagtccttatgctggaggtgttttccttgtaaccatccatttccctccggattacccattcaagcctcctaaggtggcctttaggaccaaggtgttccatcccaacattaacagcaacggtagcatttgcctcgacatcttgaaggagcagtggagtcctgcgctcaccatttccaaggtgctgctatcgatctgttctttgttaaccgatccaaacccggatgatcctttggtgcccgagatagctcacatgtacaagactgacaagaacaagtacgagtccactgcacgaagctggactcagaagtatgccatgggctaaatggaaaatcccacctactaaattatctctttatgaagaaaaaaatctgccttaatttctatgtatgattcgatagacatctctttgtgtccttttaactttctgaagacaggaccaaatgaagtgggtcttgttttaaacgaaacaaaaaaaaacatcatctttgtgaaaactagaatctgatcatcttctgttgtttcttcttgtggtg

SEQ ID NO: 6954 - protein, 148 aa, Arabidopsis thaliana
MASKRILKELKDLQKDPPTSCSAGPVAEDMFHWQATIMGPSESPYAGGVFLVTIHFPPDYPFKPPKVAFRTKVFHPNINSNGSICLDILKEQWSPALTISKVLLSICSLLTDPNPDDPLVPEIAHMYKTDKNKYESTARSWTQKYAMG

SEQ ID NO: 6955 - protein, 119 aa, Arabidopsis thaliana
MFHWQATIMGPSESPYAGGVFLVTIHFPPDYPFKPPKVAFRTKVFHPNINSNGSICLDILKEQWSPALTISKVLLSICSLLTDPNPDDPLVPEIAHMYKTDKNKYESTARSWTQKYAMG

SEQ ID NO: 6956 - protein, 111 aa, Arabidopsis thaliana
MGPSESPYAGGVFLVTIHFPPDYPFKPPKVAFRTKVFHPNINSNGSICLDILKEQWSPALTISKVLLSICSLLTDPNPDDPLVPEIAHMYKTDKNKYESTARSWTQKYAMG

SEQ ID NO: 6957 - DNA, 847 bp, Arabidopsis thaliana
gaaattggagttctctcgaagttccgtggcgtcaaaaatggcgttggatgatcggaaatccccagaacaaacaaatcaggcgttatctcctccgacgcctattgtgcaggaaaatggaactccgacgaagcgtgtgttgatcacttcccttttagcaggagtaattggtggaggagctggtttagtgtctaaacaccggatagctcatcccaatattcctactgtttacgctgctaattttgctattgtcgccggttgctattgcggagctcgtgaatctgtgagaataactcgaagatcagaacacgatgatttaatgaactcagctattggaggactttttagtggtgctttgcttgcacgacttcaaggaggtcctaagggtgcgattcgctactctctagtttttgctgctgtaggcacagcatttgattatgctacccttaaaggaaaaccaatgttagagagctaccgtaacatggagtcattcaagttacctgaatggtctcctattaaagtcctcgacgaagaagccttagcaaagaagaaagctcatgaagagaagatattccctgaaagagtcctcggcaaattgaacaaagaatagtcttaaccaacttaagattatttctcttttgcccccataaatttcttaagttggaattttgtttatcggtgatgtttcgtgaaagactgaaagtaattccagaccttgtagatgagacttgaggaggattttggttttttgttgtttcctcaaggtaaaaattttcttgagacataagaaaacatctttgtatgctgacctacccataaagcgtatatattcatggttaattatgggctt

SEQ ID NO: 6958 - protein, 201 aa, Arabidopsis thaliana
KLEFSRSSVASKMALDDRKSPEQTNQALSPPTPIVQENGTPTKRVLITSLLAGVIGGGAGLVSKHRIAHPNIPTVYAANFAIVAGCYCGARESVRITRRSEHDDLMNSAIGGLFSGALLARLQGGPKGAIRYSLVFAAVGTAFDYATLKGKPMLESYRNMESFKLPEWSPIKVLDEEALAKKKAHEEKIFPERVLGKLNKE

SEQ ID NO: 6959 - protein, 189 aa, Arabidopsis thaliana
MALDDRKSPEQTNQALSPPTPIVQENGTPTKRVLITSLLAGVIGGGAGLVSKHRIAHPNIPTVYAANFAIVAGCYCGARESVRITRRSEHDDLMNSAIGGLFSGALLARLQGGPKGAIRYSLVFAAVGTAFDYATLKGKPMLESYRNMESFKLPEWSPIKVLDEEALAKKKAHEEKIFPERVLGKLNKE

SEQ ID NO: 6960 - DNA, 950 bp, Arabidopsis thaliana
actacacccaaaagaacatctttccttcgaattttctttcaattaacatttcttttacttgtctccttgtgtcttcacttcacatcacaacatggctttgaagacagttttcgtagcttttatgattctccttgccatctattcgcaaacgacgtttggggacgatgtgaagtgcgagaatctggatgaaaacacgtgtgccttcgcggtctcgtccactggaaaacgttgcgttttggagaagagcatgaagaggagcgggatcgaggtgtacacatgtcgatcatcggagatagaagctaacaaggtcacaaacattattgaatcggacgagtgcattaaagcgtgtggtctagaccggaaagctttaggtatatcttcggacgcattgttggaatctcagttcacacataaactctgctcggttaaatgcttaaaccaatgtcctaacgtagtcgatctctacttcaaccttgctgctggtgaaggagtgtatttaccaaagctatgtgaatcacaagaagggaagtcaagaagagcaatgtcggaaattaggagctcgggaattgcaatggacactcttgcaccggttggaccagtcatgttgggcgagatagcacctgagccggctacttcaatggacaacatgccttacgtgccggcaccttcaccgtattaattaaggcaagggaaaatggagaggacacgtatgatatcatgagttttcgacgagaataattaagagatttatgtttagttcgacggttttagtattacatcgtttattgcgtccttatatatatgtacttcataaaaacacaccacgacacattaagagatggtgaaagtaggctgcgttctggtgtaacttttacacaagtaacgtcttataatatatatgattcgaataaaatgttgagttttggtgaaaatatataatatgtttctgc

SEQ ID NO: 6961 - protein, 195 aa, Arabidopsis thaliana
MALKTVFVAFMILLAIYSQTTFGDDVKCENLDENTCAFAVSSTGKRCVLEKSMKRSGIEVYTCRSSEIEANKVTNIIESDECIKACGLDRKALGISSDALLESQFTHKLCSVKCLNQCPNVVDLYFNLAAGEGVYLPKLCESQEGKSRRAMSEIRSSGIAMDTLAPVGPVMLGEIAPEPATSMDNMPYVPAPSPY

SEQ ID NO: 6962 - protein, 185 aa, Arabidopsis thaliana
MILLAIYSQTTFGDDVKCENLDENTCAFAVSSTGKRCVLEKSMKRSGIEVYTCRSSEIEANKVTNIIESDECIKACGLDRKALGISSDALLESQFTHKLCSVKCLNQCPNVVDLYFNLAAGEGVYLPKLCESQEGKSRRAMSEIRSSGIAMDTLAPVGPVMLGEIAPEPATSMDNMPYVPAPSPY

SEQ ID NO: 6963 - protein, 143 aa, Arabidopsis thaliana
MKRSGIEVYTCRSSEIEANKVTNIIESDECIKACGLDRKALGISSDALLESQFTHKLCSVKCLNQCPNVVDLYFNLAAGEGVYLPKLCESQEGKSRRAMSEIRSSGIAMDTLAPVGPVMLGEIAPEPATSMDNMPYVPAPSPY

SEQ ID NO: 6964 - DNA, 716 bp, Arabidopsis thaliana
ctctgcaagtttgcgcaacaatggcgactacgattccactcttcgcctctttcaaatacgccgatagcttaacggtcgtaggaatctccttctgcaccgcgttggtctgcgaagccatctcatggatcttaatctaccgtaccagctcatacaaatccttgaaatactccattgacaaggccacgaagaaactcgagacaatgaagacagagaatccatcgtcaaagctatccataaagaaatcaaagacgaagaagatcgatcgcgttgaaaccagcttaaaggaatcgagccgagatctgtcactcttcaagttcaaatccggcgccgttgtggcactggttctcttcgtcgtcttcggattgctcaattcactattcgaaggtaaagtcgtcgcgaagcttcctttccatccgatcacgatagtgaagaagatgagtcacaggggactgaaaggtgatgatccgacggattgttccatggcttttctctatctgctgtgttcaattagtatcagaaccaatctacagaaatttctagggttttctccgccgcgaggagctgctggtgctggtggtttgttccccatgcctgatcctaagaccaactgatcactcctttgaggtttttttttttttgtttttgttgagatttttggaacaattttcatataaacacacagttacaagtttttgcaatcatctgatgattttggc

SEQ ID NO: 6965 - protein, 202 aa, Arabidopsis thaliana
LQVCATMATTIPLFASFKYADSLTVVGISFCTALVCEAISWILIYRTSSYKSLKYSIDKATKKLETMKTENPSSKLSIKKSKTKKIDRVETSLKESSRDLSLFKFKSGAVVALVLFVVFGLLNSLFEGKVVAKLPFHPITIVKKMSHRGLKGDDPTDCSMAFLYLLCSISIRTNLQKFLGFSPPRGAAGAGGLFPMPDPKTN

SEQ ID NO: 6966 - protein, 196 aa, Arabidopsis thaliana
MATTIPLFASFKYADSLTVVGISFCTALVCEAISWILIYRTSSYKSLKYSIDKATKKLETMKTENPSSKLSIKKSKTKKIDRVETSLKESSRDLSLFKFKSGAVVALVLFVVFGLLNSLFEGKVVAKLPFHPITIVKKMSHRGLKGDDPTDCSMAFLYLLCSISIRTNLQKFLGFSPPRGAAGAGGLFPMPDPKTN

SEQ ID NO: 6967 - protein, 136 aa, Arabidopsis thaliana
MKTENPSSKLSIKKSKTKKIDRVETSLKESSRDLSLFKFKSGAVVALVLFVVFGLLNSLFEGKVVAKLPFHPITIVKKMSHRGLKGDDPTDCSMAFLYLLCSISIRTNLQKFLGFSPPRGAAGAGGLFPMPDPKTN

SEQ ID NO: 6968 - DNA, 633 bp, Arabidopsis thaliana
acaattgagatctccgtaaatttctggaactatcagcccacattccaaagcaaaaccaaatctacaagtcttgtctatataataaacaccagagaccattaaacacacgaaaattaaaaaaggttaaggaaacgaaaatatgatgatgaagtcgttgatctgtctctctctcatcctcctcccacttgtctccgtcgtggaaggtctcggtggtggtggtggtcttggtagccggaagccgatcaagaatgtatctgatccggatgttgttgcggtcgccaagtatgccatcgaggaacataacaaggagtcgaaggagaagttggttttcgtcaaggttgtggagggaacgacgcaagtggtctccggtacaaagtacgatctgaaaattgcggcgaaggatggtggtggtaagatcaagaactatgaggctgttgttgttgaaaagctttggcttcattctaagagccttgagtctttcaaggcgttatagatctttaattggatttttgtagatcgatctctctctcgggtatatctatctagcttttgatgatttgagactctgacgtttgtgttgttgttggtaatatctgtggaattaaaaataaaatcaaacttatgttttatggg

SEQ ID NO: 6969 - protein, 117 aa, Arabidopsis thaliana
MMMKSLICLSLILLPLVSVVEGLGGGGGLGSRKPIKNVSDPDVVAVAKYAIEEHNKESKEKLVFVKVVEGTTQVVSGTKYDLKIAAKDGGGKIKNYEAVVVEKLWLHSKSLESFKAL

SEQ ID NO: 6970 - protein, 116 aa, Arabidopsis thaliana
MMKSLICLSLILLPLVSVVEGLGGGGGLGSRKPIKNVSDPDVVAVAKYAIEEHNKESKEKLVFVKVVEGTTQVVSGTKYDLKIAAKDGGGKIKNYEAVVVEKLWLHSKSLESFKAL

SEQ ID NO: 6971 - protein, 115 aa, Arabidopsis thaliana
MKSLICLSLILLPLVSVVEGLGGGGGLGSRKPIKNVSDPDVVAVAKYAIEEHNKESKEKLVFVKVVEGTTQVVSGTKYDLKIAAKDGGGKIKNYEAVVVEKLWLHSKSLESFKAL

SEQ ID NO: 6972 - DNA, 758 bp, Arabidopsis thaliana
agatccttccccacttttgtttggggctcctttatatctcttccaatggttacttttacttcctcttcttctcttcttgttccatctttcatgtgagagagagagttgaattttgcagatgagtatgagaagaagcaaagcggaagggaagaggagcttacgagaactgagtgaggaagaggaagaagaagaagaaactgaagatgaagatacttttgaagaagaagaggctttggagaagaagcagaaaggtaaagctacaagtagtagtggagtttgtcaggtcgagagttgtaccgcggatatgagcaaagccaaacagtaccacaaacgacacaaagtctgccagtttcatgccaaagctcctcatgttcggatctctggtcttcaccaacgtttctgccaacaatgcagcaggtttcacgcgctcagtgagtttgatgaagccaagcggagttgcaggagacgcttagctggacacaacgagagaaggcggaaaagcacaactgactaaagacggtgaaacgtgtgagatcccggtttgaaggttaatgaaacaggctttgcttactctcttctgtcagtctcttttagctccttgtaatcctctgtgtctctgtctgtttctccatattacctgtaatcaaagctatctgctaaacctacgacatggttaaataaatgcattgagacttagtaaatgcttgaagaaattatgtgtaataactctttaaacttgtcaaatgttatttcaagcc

SEQ ID NO: 6973 - protein, 131 aa, Arabidopsis thaliana
MSMRRSKAEGKRSLRELSEEEEEEEETEDEDTFEEEEALEKKQKGKATSSSGVCQVESCTADMSKAKQYHKRHKVCQFHAKAPHVRISGLHQRFCQQCSRFHALSEFDEAKRSCRRRLAGHNERRRKSTTD

SEQ ID NO: 6974 - protein, 129 aa, Arabidopsis thaliana
MRRSKAEGKRSLRELSEEEEEEEETEDEDTFEEEEALEKKQKGKATSSSGVCQVESCTADMSKAKQYHKRHKVCQFHAKAPHVRISGLHQRFCQQCSRFHALSEFDEAKRSCRRRLAGHNERRRKSTTD

SEQ ID NO: 6975 - protein, 69 aa, Arabidopsis thaliana
MSKAKQYHKRHKVCQFHAKAPHVRISGLHQRFCQQCSRFHALSEFDEAKRSCRRRLAGHNERRRKSTTD

SEQ ID NO: 6976 - DNA, 719 bp, Arabidopsis thaliana
agccagaattagggtttctctttgtcttcagcagtcagtgcgcatccgtaggagaaaagtgtgagaatctgccaccatgggtcgtatgcacagtcgaggaaagggtatttcagcctctgcgttgccttacaagagatcgtctccgagctggctcaagaccacctctcaggatgttgatgaatcaatctgcaaatttgccaaaaagggattgaccccttcccagattggtgtgattctccgtgactctcacggtatccctcaggtcaagagtgttactggaagcaagatcttgaggatactcaaagctcatggccttgctcctgagatccctgaggatctgtaccatctaattaagaaggctgttgccatccgtaaacatctcgagaggaacaggaaggacaaggattccaagttcaggctcatcttggttgagagcaggattcaccgcctcgctcgctattacaagaagaccaagaagctccctcccgtctggaagtacgaatccactaccgcgagcacccttgtggcttaagctggagtctggaggaggattctactagtctgttgcttcccttttgttttgatgaattctcaactttagtcttaatgtgtcagcaggatttttgtgtttgcctctcttttttttccggaatcttatgctcccttgtttaagagaatcgtatgatcttgaatttactattgaatatgcttttgcatct

SEQ ID NO: 6977 - protein, 151 aa, Arabidopsis thaliana [sequence omitted]

SEQ ID NO: 6978 - protein, 148 aa, Arabidopsis thaliana
MHSRGKGISASALPYKRSSPSWLKTTSQDVDESICKFAKKGLTPSQIGVILRDSHGIPQVKSVTGSKILRILKAHGLAPEIPEDLYHLIKKAVAIRKHLERNRKDKDSKFRLILVESRIHRLARYYKKTKKLPPVWKYESTTASTLVA

SEQ ID NO: 6979 - DNA, 1292 bp, Arabidopsis thaliana
gttttgttcattttgttgtttaactaaaatcgtcgaagaagatctgagagaccatctcgcttcagctaattcgccgccgcttcctccttctccggtaaggttcaggaatggccaccgtcacatccaatgcttcacctaaatccttctccttcactgtttccaatcctttcaaaaccctaatccccaacaaatcaccatctctctgttatccaactcgcaacaagaaccatcaccgtctaggtttctcgataaaagccaccgtatcaacaccaccttcaatcgcaaccggaaatgcaccttcaccggattacagagtcgagattctctccgaatctctaccatttatccaaaaattccgaggtaaaaccatagttgtcaaatacggcggcgcagcaatgacttcgccggaacttaaatcctccgtcgtaagcgatctcgtgctcctcgcgtgtgtcggtcttcgtccgatcctcgttcacggtggtggtcctgacatcaaccgttacctgaaacaactcaacatcccagctgagtttcgtgacggactacgtgtcaccgacgcaacgacgatggagatcgtctctatggttttagtcggaaaggtcaataagaatctggtttctcttattaacgccgccggagccaccgctgtggggttatcaggacacgacggtcgtcttctcacagcacgacctgttcccaattcagctcagttaggtttcgttggtgaagttgcaagagttgatccatctgtgttacgtccgctcgttgattatggttacattccagtgattgcctctgttgctgctgatgattctggtcaagcttacaatatcaatgcagatacagttgctggagagcttgcggccgcgcttggagctgagaaactgattctgctgactgatgtggctggaatcttggagaataaagaggatccaagtagtttgataaaggagattgatataaaaggagtgaagaagatgattgaagatgggaaagttgctggtgggatgattcctaaagtgaagtgttgtataaggtctctagctcaaggagttaagactgctagtattattgatggaaggagacaacattctttgcttcatgagattatgtctgatgaaggagctggaactatgattactggataagtttgctgtaatgggtgatcatcaaagttgagttttttgtatttgagaatgccaatgtttcttcattaggatgtcaaatatgtgctttaaacttatgatcatttcttatattagtctttaaaagacagtttttttcggttg

SEQ ID NO: 6980 - protein, 347 aa, Arabidopsis thaliana
MATVTSNASPKSFSFTVSNPFKTLIPNKSPSLCYPTRNKNHHRLGFSIKATVSTPPSIATGNAPSPDYRVEILSESLPFIQKFRGKTIVVKYGGAAMTSPELKSSVVSDLVLLACVGLRPILVHGGGPDINRYLKQLNIPAEFRDGLRVTDATTMEIVSMVLVGKVNKNLVSLINAAGATAVGLSGHDGRLLTARPVPNSAQLGFVGEVARVDPSVLRPLVDYGYIPVIASVAADDSGQAYNINADTVAGELAAALGAEKLILLTDVAGILENKEDPSSLIKEIDIKGVKKMIEDGKVAGGMIPKVKCCIRSLAQGVKTASIIDGRRQHSLLHEIMSDEGAGTMITG

SEQ ID NO: 6981 - protein, 251 aa, Arabidopsis thaliana
MTSPELKSSVVSDLVLLACVGLRPILVHGGGPDINRYLKQLNIPAEFRDGLRVTDATTMEIVSMVLVGKVNKNLVSLINAAGATAVGLSGHDGRLLTARPVPNSAQLGFVGEVARVDPSVLRPLVDYGYIPVIASVAADDSGQAYNINADTVAGELAAALGAEKLILLTDVAGILENKEDPSSLIKEIDIKGVKKMIEDGKVAGGMIPKVKCCIRSLAQGVKTASIIDGRRQHSLLHEIMSDEGAGTMITG

SEQ ID NO: 6982 - protein, 193 aa, Arabidopsis thaliana
MEIVSMVLVGKVNKNLVSLINAAGATAVGLSGHDGRLLTARPVPNSAQLGFVGEVARVDPSVLRPLVDYGYIPVIASVAADDSGQAYNINADTVAGELAAALGAEKLILLTDVAGILENKEDPSSLIKEIDIKGVKKMIEDGKVAGGMIPKVKCCIRSLAQGVKTASIIDGRRQHSLLHEIMSDEGAGTMITG

SEQ ID NO: 6983 - DNA, 796 bp, Arabidopsis thaliana
aatgattaatgtctgaaaaatttgatatttgaagcgaatcaacaacaacagtcgggttcgtgaaaaaaaaagatttgatcggctaaacttggtcggacttgtcaatggcagacgtacctggatacctgcgcacttgtttggatatggggaagatagctttcttagcaatccttgtatctacagggattgtgttgcagattctggcttgtgctctgttcaataactggtggccaatgctaagtgttataatgtatgtgctcctcccaatgcctttgctcttctttggtggatcagacagtacatctctattcaacgagtcagataatagttggatcaatgcagccaagttcttgactggtgcgtcagcagttggaagcgtcgcgataccatcgattctaaaacacgccggactcatcggttggggcgcattagcccttgatctctcatcctaccttgtcttcctcgtggctattttgggttacatttgcataggagatgccagtgagaactattacagctacatttaaaaagacacacacaaattcatcatcatttgtttaaacctcaacaaagtctcagccttttatcacttccccgttcgattgatgcttcgaaacgaaaacatcttgtttctatggaatgactcgctgattggattttcacaagtttaagagtttgtgtgtcaagtgtatgtatgaatgattttttttttgggtggttttgttacgttttgatgtatagaacatatttattatttggtggaatatatataaattttctttacaaaagcatattg

SEQ ID NO: 6984 - protein, 140 aa, Arabidopsis thaliana
MADVPGYLRTCLDMGKIAFLAILVSTGIVLQILACALFNNWWPMLSVIMYVLLPMPLLFFGGSDSTSLFNESDNSWINAAKFLTGASAVGSVAIPSILKHAGLIGWGALALDLSSYLVFLVAILGYICIGDASENYYSYI

SEQ ID NO: 6985 - protein, 127 aa, Arabidopsis thaliana
MGKIAFLAILVSTGIVLQILACALFNNWWPMLSVIMYVLLPMPLLFFGGSDSTSLFNESDNSWINAAKFLTGASAVGSVAIPSILKHAGLIGWGALALDLSSYLVFLVAILGYICIGDASENYYSYI

SEQ ID NO: 6986 - protein, 97 aa, Arabidopsis thaliana
MLSVIMYVLLPMPLLFFGGSDSTSLFNESDNSWINAAKFLTGASAVGSVAIPSILKHAGLIGWGALALDLSSYLVFLVAILGYICIGDASENYYSYI

SEQ ID NO: 6987 - DNA, 1623 bp, Arabidopsis thaliana
aaaagcttgtctgatttcggattctcgcagttcttacagatagttctcgttgggctcgcgctaacctttgactctcagcagatattcatcaccgtcttcacagatgcatatcccacgtggcactgtcttgaccacacgatctgcaatccggcaactaccgatatctgtaagattccccggtcagcttgggattgggacggtggtttcaaaggtaaatcagtcatttcagagttcgatctcgagtgctccagctccttcctcagaagtctacctagttcaactttttatgtgggttctatcgttggtggagtcgttttggctatgatccctgacggttccttgggacggaagcaacttctttttttctcgagtttcgcaatgtcactcactggaatctctattttcttatcctccaacatatggatctactccttcttaaagtttgtgatcggattcgcgcgttctcagaccgggacatacgcgttagttctgataagtgagcgaatttccaccaaatggagaccgcgagctactatggttccgtttactctgtttgtgttagggttcatgtcgttgtctggaatcgcttaccttgtccgacacgcttcttggaaagttctctatctatgcacatccattcctgcaggaatccacagtattttcatctatttctttgccctagagtcaccgcgttggctccatttggaagggaagaacaaagaagccattgaagtgctcaaacggatttcacctgcaaatagaggttacttggaatccgtatcttcgaggttacgtccaaaagaaacactagagcaaacttcaagctactcaatcaaagacttgttcattataaaatgggcttttcgaagagtcacacttgttatgatcataatgtttgggttgggaatgtcgtattatggagttccattagcggttagagacataaaagtgaacatttatatgagcgaagccctaaacgccatggtggagttaccaacatttgttgttacaccgatcttgctcgagcaattcagcaggagaagctctgtgcttgtaaattgcttaattggaggagcatcaggagtgctctgtttcgtaatgagcctttacggaagaacaaaaatcgcttttgctctcgaactcggttctttcttctgcgctaggattggattcaatttaatggcgatttatttggttgagttatttcctacatgcgtgaggaatagtgcaacaatgatgcttagacaagcgcttgtggttggaggagcttgttgcccactcattgcttcgcttggaagaaatgtgccgtcactctcttttgcagttttcggatttgcaatgtcgggtctcgggttattcgctttgcttcttcctgagaccaaagggttaagtctttgtgatacaatggaagagcaagagcaaagagaccaagccttgaagactagccatagttgctgaaagcagagttttttgaaaaacctctgttcttttattgaactttcgtataaaacctctgtttagctccggttaatcaagccatatgttgattttccgagtaattaatatgcgaaacctacaatggcatgtattttttataaactgaaccatttcattttcttgatt

SEQ ID NO: 6988 - protein, 485 aa, Arabidopsis thaliana
KSLSDFGFSQFLQIVLVGLALTFDSQQIFITVFTDAYPTWHCLDHTICNPATTDICKIPRSAWDWDGGFKGKSVISEFDLECSSSFLRSLPSSTFYVGSIVGGVVLAMIPDGSLGRKQLLFFSSFAMSLTGISIFLSSNIWIYSFLKFVIGFARSQTGTYALVLISERISTKWRPRATMVPFTLFVLGFMSLSGIAYLVRHASWKVLYLCTSIPAGIHSIFIYFFALESPRWLHLEGKNKEAIEVLKRISPANRGYLESVSSRLRPKETLEQTSSYSIKDLFIIKWAFRRVTLVMIIMFGLGMSYYGVPLAVRDIKVNIYMSEALNAMVELPTFVVTPILLEQFSRRSSVLVNCLIGGASGVLCFVMSLYGRTKIAFALELGSFFCARIGFNLMAIYLVELFPTCVRNSATMMLRQALVVGGACCPLIASLGRNVPSLSFAVFGFAMSGLGLFALLLPETKGLSLCDTMEEQEQRDQALKTSHSC

SEQ ID NO: 6989 - protein, 378 aa, Arabidopsis thaliana
MIPDGSLGRKQLLFFSSFAMSLTGISIFLSSNIWIYSFLKFVIGFARSQTGTYALVLISERISTKWRPRATMVPFTLFVLGFMSLSGIAYLVRHASWKVLYLCTSIPAGIHSIFIYFFALESPRWLHLEGKNKEAIEVLKRISPANRGYLESVSSRLRPKETLEQTSSYSIKDLFIIKWAFRRVTLVMIIMFGLGMSYYGVPLAVRDIKVNIYMSEALNAMVELPTFVVTPILLEQFSRRSSVLVNCLIGGASGVLCFVMSLYGRTKIAFALELGSFFCARIGFNLMAIYLVELFPTCVRNSATMMLRQALVVGGACCPLIASLGRNVPSLSFAVFGFAMSGLGLFALLLPETKGLSLCDTMEEQEQRDQALKTSHSC

SEQ ID NO: 6990 - protein, 359 aa, Arabidopsis thaliana
MSLTGISIFLSSNIWIYSFLKFVIGFARSQTGTYALVLISERISTKWRPRATMVPFTLFVLGFMSLSGIAYLVRHASWKVLYLCTSIPAGIHSIFIYFFALESPRWLHLEGKNKEAIEVLKRISPANRGYLESVSSRLRPKETLEQTSSYSIKDLFIIKWAFRRVTLVMIIMFGLGMSYYGVPLAVRDIKVNIYMSEALNAMVELPTFVVTPILLEQFSRRSSVLVNCLIGGASGVLCFVMSLYGRTKIAFALELGSFFCARIGFNLMAIYLVELFPTCVRNSATMMLRQALVVGGACCPLIASLGRNVPSLSFAVFGFAMSGLGLFALLLPETKGLSLCDTMEEQEQRDQALKTSHSC

SEQ ID NO: 6991 - DNA, 704 bp, Arabidopsis thaliana
gtggttcgaagcttttctccttcacaaaaaaaaaatgaagatttctctcttcctcctctctatcctcattctcttacccatctccctacaagatcctactcctgaagtcaagaaaccaactcgtgcacacgcagagctcacgaatcatggattcccaattggactcctacctttatctgtcaaagattacttcctcaaccaaacctccggcgacttctctcttttcctcaacggagcatgcaaaatcacgcttccacctgataactacatcgctacttattctaacaaagtaacgggtcggatctctcagggtaagatcgcggagctccaagggattcgggttcgggcgtttttcaagtcgtggtctattactgggattcgatcttctggagataatcttgtctttgaggttgctgggataactgctaaatacccttcgaagaatttcgatgagagtcttgattgtgaagggaaacgatcttcttcttgatttcaatttgaattaaaggcagatctgtgaaggcagggatcgacaagtgaagaatggtttgtaatatattgtatctccattagataaatcaaagcttgtaatgtaaaaccgcaataaccacgactgtgttctctgcaaactaagggtttcaatgtttcatggaggcttgtaagttgtcaatcaaatatgggttaaaatgtgatattattggact

SEQ ID NO: 6992 - protein, 162 aa, Arabidopsis thaliana
WFEAFLLHKKKMKISLFLLSILILLPISLQDPTPEVKKPTRAHAELTNHGFPIGLLPLSVKDYFLNQTSGDFSLFLNGACKITLPPDNYIATYSNKVTGRISQGKIAELQGIRVRAFFKSWSITGIRSSGDNLVFEVAGITAKYPSKNFDESLDCEGKRSSS

SEQ ID NO: 6993 - protein, 151 aa, Arabidopsis thaliana
MKISLFLLSILILLPISLQDPTPEVKKPTRAHAELTNHGFPIGLLPLSVKDYFLNQTSGDFSLFLNGACKITLPPDNYIATYSNKVTGRISQGKIAELQGIRVRAFFKSWSITGIRSSGDNLVFEVAGITAKYPSKNFDESLDCEGKRSSS

SEQ ID NO: 6994 - DNA, 796 bp, Arabidopsis thaliana
actttctctattcaatctcacacgcgctaaaccataacccgatattactaatgacgaactacggtgcgattccgacgtcgtctcatgcatctccgttggtggatgtcgagtctctctcacgcgctaaacaccgtatcaaagccgggctagccacgcgccgtgcttggagagtgatgttcgatttccactccatgggactgcctcacggtgtctccgatgcgttcacaagaatcaagaccaatcttgcttacttccgtatgaactacgcaatcgttgtcttgatcgttatcttcttcagcttgatctggcatccgacatcgctcatcgtcttcaccgtcttggtcgttgtttggatctttctgtattttctccgtgatgagcctatcaagctgttccggtttcagatcgatgatcggacggtcttgattgttttatcggtgttaaccgtcgttttactcctgttgaccaacgcgacgtttaatattgttggagcgcttgtgaccggagctgtgttggttttgatccattcggtggttaggaagacggaggatcttttcttggatgaagaagcggcgacgactgagacttctgggctgacgtcatacccgtcgacttaaatcgtttcatctcgaaatttgtgtatcttttctatttttgtatattatcttgtttttttaattatgcgtaatcaatttttattggtgtgagtttggtttgagactttctctctctcttttgttttctgagttttgagctctgtctgaagtttgaacaattctaatttgttataattttt

SEQ ID NO: 6995 - protein, 204 aa, Arabidopsis thaliana
FLYSISHALNHNPILLMTNYGAIPTSSHASPLVDVESLSRAKHRIKAGLATRRAWRVMFDFHSMGLPHGVSDAFTRIKTNLAYFRMNYAIVVLIVIFFSLIWHPTSLIVFTVLVVVWIFLYFLRDEPIKLFRFQIDDRTVLIVLSVLTVVLLLLTNATFNIVGALVTGAVLVLIHSVVRKTEDLFLDEEAATTETSGLTSYPST

SEQ ID NO: 6996 - protein, 188 aa, Arabidopsis thaliana
MTNYGAIPTSSHASPLVDVESLSRAKHRIKAGLATRRAWRVMFDFHSMGLPHGVSDAFTRIKTNLAYFRMNYAIVVLIVIFFSLIWHPTSLIVFTVLVVVWIFLYFLRDEPIKLFRFQIDDRTVLIVLSVLTVVLLLLTNATFNIVGALVTGAVLVLIHSVVRKTEDLFLDEEAATTETSGLTSYPST

SEQ ID NO: 6997 - protein, 147 aa, Arabidopsis thaliana
MFDFHSMGLPHGVSDAFTRIKTNLAYFRMNYAIVVLIVIFFSLIWHPTSLIVFTVLVVVWIFLYFLRDEPIKLFRFQIDDRTVLIVLSVLTVVLLLLTNATFNIVGALVTGAVLVLIHSVVRKTEDLFLDEEAATTETSGLTSYPST

SEQ ID NO: 6998 - DNA, 662 bp, Arabidopsis thaliana
ttgtttcttcatcttcctcactctctgcgccgcgtttgcttccatctttctctcgattgtttcctctcaagcgaagcttcttcttcttcgatcttcttcctcgtgtgtggattcgtttctgaaataggatcgaagtaatggccagcaaatctggaagcggtggcctaagagaaccgccgaatgagcaagctgttttgaacatgtatgaaggcaagagatcagagctaagccaaatctactccaacataaccgacctcgagatgcaagtgagcgaacattctctggtcattaacgccattcagcctctcgaccaatcgaggaaatgcttccgcatgataggaggcgttcttgtcgaaagaaccatcaaagaggtactaccagctgtccaacgtaacaaggacggacttgaagaggttgtgaggaagctatacgagacattggagaaaaagaagaaagatcttacagagtttgaagctaagtataagatcaggataacgaaacaagaagataacaaggaaggaggtaacaagaaggaaggtaatgctcaaggtgttcttgttggagctgccagttcaagccagtaaaactctatatttggcagtttgttttactgttgtatctcttttttggatcttatggttaaaagccgtaaactttgctgt

SEQ ID NO: 6999 - protein, 148 aa, Arabidopsis thaliana
MASKSGSGGLREPPNEQAVLNMYEGKRSELSQIYSNITDLEMQVSEHSLVINAIQPLDQSRKCFRMIGGVLVERTIKEVLPAVQRNKDGLEEVVRKLYETLEKKKKDLTEFEAKYKIRITKQEDNKEGGNKKEGNAQGVLVGAASSSQ

SEQ ID NO: 7000 - protein, 127 aa, Arabidopsis thaliana
MYEGKRSELSQIYSNITDLEMQVSEHSLVINAIQPLDQSRKCFRMIGGVLVERTIKEVLPAVQRNKDGLEEVVRKLYETLEKKKKDLTEFEAKYKIRITKQEDNKEGGNKKEGNAQGVLVGAASSSQ

SEQ ID NO: 7001 - protein, 107 aa, Arabidopsis thaliana
MQVSEHSLVINAIQPLDQSRKCFRMIGGVLVERTIKEVLPAVQRNKDGLEEVVRKLYETLEKKKKDLTEFEAKYKIRITKQEDNKEGGNKKEGNAQGVLVGAASSSQ

SEQ ID NO: 7002 - DNA, 820 bp, Arabidopsis thaliana
gtttggtgtgtaaaccttggagctatggcttccttatcgacgataactcaaccatctttagtccacattcccggtgaatcagtcctccatcacgtaccaagcacgtgctctttcccatggaagccaactatcaacacgaagcggattatctgttcgccggctaggaactccagcgaagtatcggcggaggcagaaaccgaaggtggatctagcaccgccgttgatgaagcaccgaaagagtctccatctttaatatccgctctcaacgtcgaacgcgcgctacgtggccttccaattacagatgttgatcattatggacggcttgggattttcagaaattgttcttatgatcaggttacaattggttacaaagaaagagttaaagagttgaaggaacaaggactagatgaagaacaactcaagaccaagatggatcttatcaaagagtcatatacgatattgtcgaccgtggaagagagaagaatgtacgattggagtctagcaagaagcgaaaaagcagaacggtacgtgtggccatttgaggttgacatcatggaaccatccagggaagagccacctcctcaggaaccggaagatgtaggaccaacgaggattttgggatacttcattggagcatggcttgtccttggtgttgctctttcggttgcgttcaatcgttagccaaatttcgtttctttatagctcttcttttcatatcttcttcctcacttcaaatccgatgtttatttacccgattagatttgatgatgatgttcaagctacaacaatataacgtatctttgtatgtgggtatttacgc

SEQ ID NO: 7003 - protein, 226 aa, Arabidopsis thaliana
VWCVNLGAMASLSTITQPSLVHIPGESVLHHVPSTCSFPWKPTINTKRIICSPARNSSEVSAEAETEGGSSTAVDEAPKESPSLISALNVERALRGLPITDVDHYGRLGIFRNCSYDQVTIGYKERVKELKEQGLDEEQLKTKMDLIKESYTILSTVEERRMYDWSLARSEKAERYVWPFEVDIMEPSREEPPPQEPEDVGPTRILGYFIGAWLVLGVALSVAFNR

SEQ ID NO: 7004 - protein, 218 aa, Arabidopsis thaliana
MASLSTITQPSLVHIPGESVLHHVPSTCSFPWKPTINTKRIICSPARNSSEVSAEAETEGGSSTAVDEAPKESPSLISALNVERALRGLPITDVDHYGRLGIFRNCSYDQVTIGYKERVKELKEQGLDEEQLKTKMDLIKESYTILSTVEERRMYDWSLARSEKAERYVWPFEVDIMEPSREEPPPQEPEDVGPTRILGYFIGAWLVLGVALSVAFNR

SEQ ID NO: 7005 - DNA, 2273 bp, Arabidopsis thaliana
aacactagcaagcaaaaattcttcatcgactcaaattcaaaaactcatctctctctatctctatttctctggttccatagctcaccgtcgcatcgcagatctactccttccgcaataaattttaccggcggaggtatcagatctcgccgatctgttgtagcagctactgtattttgggcttctcatttgatattggggaaacgaggagtagaggacgatggaaaatctgatctctctggttaacaagatacagagagcttgcacggctttaggagaccatggagactccagcgctttacctactctttgggattccttgcctgcgatcgccgtcgttggtggtcagagctcagggaagtcttcagtcctggagagcatcgtgggaaaggactttttaccccgtggatctggcattgttactcgaaggccccttgtcttacagttgcaaaagatcgatgatggaacccgggagtatgcagagtttcttcacctcccgaggaaaaagtttactgattttgctgctgtgaggaaggagattcaagatgagactgacagagagactggacgcagcaaggctatttctagtgttcccattcaccttagcatatactctcccaatgttgtcaacttgacactgatagatcttccagggcttacaaaagttgctgttgatggacaatctgatagtatagtgaaggacattgaaaacatggttcggtcctacattgaaaagcccaactgcatcattttggcaatctcacctgcaaaccaagatcttgctacctcagatgcaattaaaatttcccgtgaggttgatccatcgggggacagaacatttggtgtcttgacaaagattgatcttatggacaaggggacggatgcagtggaaattctggaagggagatcttttaaacttaaatatccgtgggttggtgtcgtcaaccgttcccaagcagatattaacaagaatgtcgacatgattgcggctcggaaaagagagagggagtacttttccaatactactgagtataggcaccttgctaataaaatgggttccgagcatttggcaaagatgctctccaagcatctagaacgtgtgatcaagtcgagaattcctggcattcagtcacttattaacaaaacagtattagagctggaaactgaactaagtcgccttggaaagcctattgcagctgatgcaggggggaagttgtactcaataatggagatatgtcggctttttgatcaaatattcaaagagcatcttgatggagtgcgtgctggtggtgaaaaagtgtacaacgtgtttgataaccagcttcctgcggctctgaagagactccaatttgacaagcagctagcgatggacaacatccggaagctggtcactgaggctgatggttaccagcctcacttgattgctcctgagcaaggttaccgtcgtctcattgagtcttctattgtctccatcagaggccctgctgaagcatctgttgacaccgttcatgctatcttaaaggatctggttcacaagtctgtgaatgaaactgtggaactaaaacaatacccagctctgagagtggaggtgacaaatgcggcgatagagtcgctggataaaatgcgggaaggaagtaagaaagcaacactgcagctggttgacatggagtgcagttacctcactgttgatttcttcaggaaacttccccaggatgttgagaagggtggtaaccccacacactccattttcgaccgctacaacgattcctatctcagacgaatcggatccaatgttttgtcttacgtgaacatggtctgtgctggcctgcggaattcaatccccaagtccatcgtatactgccaagtccgagaagcgaagcgcagtctcctcgaccatttctttgcggagctcggtaccatggatatgaagaggctctctcgtcgctattgaacgaagatccagcaatcatggagagacgcagtgccatctcaaagcggctagaattgtatcgagcagcccaatccgagatcgatgctgttgcttggtccaagtgataccggcatgtcatgtccactgttttgctcggttctggtcggtgtggctcagactcggagcagagatttagggtctgtaatttgtataagatgatcttcccgataccatgcagtatcgttttatataacatccacattgtttgtcctacctctatgttttttgtccatcacccgatatgttacgtatcgttttataacatccacattgtttgtcctgcctc

SEQ ID NO: 7006 - protein, 576 aa, Arabidopsis thaliana
MENLISLVNKIQRACTALGDHGDSSALPTLWDSLPAIAVVGGQSSGKSSVLESIVGKDFLPRGSGIVTRRPLVLQLQKIDDGTREYAEFLHLPRKKFTDFAAVRKEIQDETDRETGRSKAISSVPIHLSIYSPNVVNLTLIDLPGLTKVAVDGQSDSIVKDIENMVRSYIEKPNCIILAISPANQDLATSDAIKISREVDPSGDRTFGVLTKIDLMDKGTDAVEILEGRSFKLKYPWVGVVNRSQADINKNVDMIAARKREREYFSNTTEYRHLANKMGSEHLAKMLSKHLERVIKSRIPGIQSLINKTVLELETELSRLGKPIAADAGGKLYSIMEICRLFDQIFKEHLDGVRAGGEKVYNVFDNQLPAALKRLQFDKQLAMDNIRKLVTEADGYQPHLIAPEQGYRRLIESSIVSIRGPAEASVDTVHAILKDLVHKSVNETVELKQYPALRVEVTNAAIESLDKMREGSKKATLQLVDMECSYLTVDFFRKLPQDVEKGGNPTHSIFDRYNDSYLRRIGSNVLSYVNMVCAGLRNSIPKSIVYCQVREAKRSLLDHFFAELGTMDMKRLSRRY

SEQ ID NO: 7007 - protein, 412 aa, Arabidopsis thaliana
MVRSYIEKPNCIILAISPANQDLATSDAIKISREVDPSGDRTFGVLTKIDLMDKGTDAVEILEGRSFKLKYPWVGVVNRSQADINKNVDMIAARKREREYFSNTTEYRHLANKMGSEHLAKMLSKHLERVIKSRIPGIQSLINKTVLELETELSRLGKPIAADAGGKLYSIMEICRLFDQIFKEHLDGVRAGGEKVYNVFDNQLPAALKRLQFDKQLAMDNIRKLVTEADGYQPHLIAPEQGYRRLIESSIVSIRGPAEASVDTVHAILKDLVHKSVNETVELKQYPALRVEVTNAAIESLDKMREGSKKATLQLVDMECSYLTVDFFRKLPQDVEKGGNPTHSIFDRYNDSYLRRIGSNVLSYVNMVCAGLRNSIPKSIVYCQVREAKRSLLDHFFAELGTMDMKRLSRRY

SEQ ID NO: 7008 - protein, 361 aa, Arabidopsis thaliana
MDKGTDAVEILEGRSFKLKYPWVGVVNRSQADINKNVDMIAARKREREYFSNTTEYRHLANKMGSEHLAKMLSKHLERVIKSRIPGIQSLINKTVLELETELSRLGKPIAADAGGKLYSIMEICRLFDQIFKEHLDGVRAGGEKVYNVFDNQLPAALKRLQFDKQLAMDNIRKLVTEADGYQPHLIAPEQGYRRLIESSIVSIRGPAEASVDTVHAILKDLVHKSVNETVELKQYPALRVEVTNAAIESLDKMREGSKKATLQLVDMECSYLTVDFFRKLPQDVEKGGNPTHSIFDRYNDSYLRRIGSNVLSYVNMVCAGLRNSIPKSIVYCQVREAKRSLLDHFFAELGTMDMKRLSRRY

SEQ ID NO: 7009 - DNA, 1129 bp, Arabidopsis thaliana
gagcccaactcctctctcttcacgcatttctcgttgtcaaagacaaagttctctccttttataaacacccatctccacctcctctctcttattcaaacttctttgagaaaattcgagctaagtgtttttataatatatacattctctgatatgggtttctctagagcaaaacgtgtcactgatccacttgcagaagaggttagggctcgtctcgttggatgcagctttagcagcggcagcgaacataccggcgacggaattgaagactacgaagacgacgactcgccttgtctctctgatctagtacaagggttcttggaagatgaagttgatacagttgatgatgagtcatgctggtgtgatcaagattctggttccgactcggattctgactcggaacttggcgagctccctgactttgccgacgatatcgccaagcttctgaggaactctctcagggaagattcatacggacgaacggtgctggtacatgtggcgagagcgatggaaatgttgtcgtctctcggatctcagcccgaacagcgtgccgttttccagcgtaaggtcatgtctcttcttagagaactcggccacaatgcggccatctgcaaaactaaatggaaatcctccggcggactcaccgccggtaaccatgagttcatcgacgtcgtgtatacaccttccgcctcgtctcagtccgtccgtttcatcgtcgatttagatttctcgtcgcggtttcaaatcgcgaggccaacttcacagtacgcgcgtgtgcttcaatcgcttccggcggttttcgtcggaaagggggatgatctgaagcggatcttgcgtctcgtgtgtgacgccgcgaggatttctcttaggaaccgcgggctgacgcttccgccgtggaggaagaatcgttatatgcagacgcggtggcttggtccttacaaacgcaccaccaacttaacgccgtcaacttccggtgtagacaccgtcatgtgtcgtgccatcggtttcgataatgccgtcggaggccgtctatttgtgcgaacacgataaaaactagaccaaaaagaccacgtgtcatttttaacttgattttttccatatacgttctagagaataataattcattatttgc

SEQ ID NO: 7010 - protein, 348 aa, Arabidopsis thaliana
EPNSSLFTHFSLSKTKFSPFINTHLHLLSLIQTSLRKFELSVFIIYTFSDMGFSRAKRVTDPLAEEVRARLVGCSFSSGSEHTGDGIEDYEDDDSPCLSDLVQGFLEDEVDTVDDESCWCDQDSGSDSDSDSELGELPDFADDIAKLLRNSLREDSYGRTVLVHVARAMEMLSSLGSQPEQRAVFQRKVMSLLRELGHNAAICKTKWKSSGGLTAGNHEFIDVVYTPSASSQSVRFIVDLDFSSRFQIARPTSQYARVLQSLPAVFVGKGDDLKRILRLVCDAARISLRNRGLTLPPWRKNRYMQTRWLGPYKRTTNLTPSTSGVDTVMCRAIGFDNAVGGRLFVRTR

SEQ ID NO: 7011 - protein, 298 aa, Arabidopsis thaliana
MGFSRAKRVTDPLAEEVRARLVGCSFSSGSEHTGDGIEDYEDDDSPCLSDLVQGFLEDEVDTVDDESCWCDQDSGSDSDSDSELGELPDFADDIAKLLRNSLREDSYGRTVLVHVARAMEMLSSLGSQPEQRAVFQRKVMSLLRELGHNAAICKTKWKSSGGLTAGNHEFIDVVYTPSASSQSVRFIVDLDFSSRFQIARPTSQYARVLQSLPAVFVGKGDDLKRILRLVCDAARISLRNRGLTLPPWRKNRYMQTRWLGPYKRTTNLTPSTSGVDTVMCRAIGFDNAVGGRLFVRTR

SEQ ID NO: 7012 - protein, 180 aa, Arabidopsis thaliana
MEMLSSLGSQPEQRAVFQRKVMSLLRELGHNAAICKTKWKSSGGLTAGNHEFIDVVYTPSASSQSVRFIVDLDFSSRFQIARPTSQYARVLQSLPAVFVGKGDDLKRILRLVCDAARISLRNRGLTLPPWRKNRYMQTRWLGPYKRTTNLTPSTSGVDTVMCRAIGFDNAVGGRLFVRTR

SEQ ID NO: 7013 - DNA, 1430 bp, Arabidopsis thaliana
agggttttcgattgtcaccaccaccaccacttctggtaacgcagtgtctctgattttcacttggttaaagacctctagcttcacggtcaaacatcataaaccttttgccgccgtcactaataggaattaactgatctcgtcaatggcggaggtggaggagattgcgcacgaggagcagaatatcgagaagagggagaagaagaaaggtaaacacgagaagccgaagccatgggatgatgacccaaacatcgaccgttggacaatcgagaagtttgatccggcatggaaccccactggtatgactgaaaccagcacgttctcaacactctttcctcaatacagagagaagtatcttcaggagtgttggcctagagttgaatctgctcttaaggagtacggtgtcgcctgcaagctcaacttggttgaaggttctatgactgtttcgacgacgaggaagacaagagatccatacatcattgtcaaagctagggatttgattaagcttctttccagaagtgtccctgctcctcaggcaattaagattctcgaagatgaggtgcaatgtgatatcatcaagatcggtaacttggttagaaataaggaaagatttgttaaaagaaggcagcggcttgtgggtcctaattcttctaccttgaaggcgctggaaatattaaccaactgttacattctagttcagggaagtactgtagccgctatgggtccatttaaaggtctcaaacagctcagaaggattgtggaagactgcgtacagaatataatgcatcctgtataccatataaagactctcatgatgaaaaaagaactggagaaggatccagctcttgcaaatgaaagctgggataggtttcttcccacattcaggaagaaaaatgttaagcaaaagaaacccaaaagcaaggagaagaagccatacacacctttcccacctcctcaaccacctagcaagattgatatgcagttggagtctggagaatacttcatgagtgataaaaagaagtcagagaaaaaatggcaggagaagcaagagaaacagtcagagaagagcacagagaacaaaagaaagagagatgcctcattcctcccacctgaggagcctatgaacaacaatagcaacgcaaacaaatcagaggatggaaagaatgatataaccgagttaacaaattccttgaagagcaagacgaaggagttgaaaaagcagaaaaagacacacgagagagtgaatgcggaggagtatattgctggtccatcttcttctgctgataaatcttccaagaagtccaaaaagattagagattaattctaaatcctgtttttttttaaaaaaaaaaaagagagaaaagattgaaacttatctatgctcaaaactgtaaaaacaagttaaatctttatttcagccgtcaagttacttc

SEQ ID NO: 7014 - protein, 391 aa, Arabidopsis thaliana
MAEVEEIAHEEQNIEKREKKKGKHEKPKPWDDDPNIDRWTIEKFDPAWNPTGMTETSTFSTLFPQYREKYLQECWPRVESALKEYGVACKLNLVEGSMTVSTTRKTRDPYIIVKARDLIKLLSRSVPAPQAIKILEDEVQCDIIKIGNLVRNKERFVKRRQRLVGPNSSTLKALEILTNCYILVQGSTVAAMGPFKGLKQLRRIVEDCVQNIMHPVYHIKTLMMKKELEKDPALANESWDRFLPTFRKKNVKQKKPKSKEKKPYTPFPPPQPPSKIDMQLESGEYFMSDKKKSEKKWQEKQEKQSEKSTENKRKRDASFLPPEEPMNNNSNANKSEDGKNDITELTNSLKSKTKELKKQKKTHERVNAEEYIAGPSSSADKSSKKSKKIRD

SEQ ID NO: 7015 - protein, 339 aa, Arabidopsis thaliana
MTETSTFSTLFPQYREKYLQECWPRVESALKEYGVACKLNLVEGSMTVSTTRKTRDPYIIVKARDLIKLLSRSVPAPQAIKILEDEVQCDIIKIGNLVRNKERFVKRRQRLVGPNSSTLKALEILTNCYILVQGSTVAAMGPFKGLKQLRRIVEDCVQNIMHPVYHIKTLMMKKELEKDPALANESWDRFLPTFRKKNVKQKKPKSKEKKPYTPFPPPQPPSKIDMQLESGEYFMSDKKKSEKKWQEKQEKQSEKSTENKRKRDASFLPPEEPMNNNSNANKSEDGKNDITELTNSLKSKTKELKKQKKTHERVNAEEYIAGPSSSADKSSKKSKKIRD

SEQ ID NO: 7016 - protein, 294 aa, Arabidopsis thaliana
MTVSTTRKTRDPYIIVKARDLIKLLSRSVPAPQAIKILEDEVQCDIIKIGNLVRNKERFVKRRQRLVGPNSSTLKALEILTNCYILVQGSTVAAMGPFKGLKQLRRIVEDCVQNIMHPVYHIKTLMMKKELEKDPALANESWDRFLPTFRKKNVKQKKPKSKEKKPYTPFPPPQPPSKIDMQLESGEYFMSDKKKSEKKWQEKQEKQSEKSTENKRKRDASFLPPEEPMNNNSNANKSEDGKNDITELTNSLKSKTKELKKQKKTHERVNAEEYIAGPSSSADKSSKKSKKIRD

SEQ ID NO: 7017 - DNA, 687 bp, Arabidopsis thaliana
accaatctcaaagcaaattaaatacactactacttcttgagcttttaaactacacaaacaaatggctccaagaaccccccttgcactcttcgtttctctcaacctcctcttcttcacttacacctctgcaaccacagggacttgtcctaaaaattccatagagatcggtacttgtgtcactgtgctcaatctagtggacctaacattgggaaacccacctgtaaagccatgttgctcgctcatccaaggcttggctgaccttgaggctgcggcctgcctctgcactgcgctcaaagctagcattcttggaattgtcaatattaaccttcctatcaatctcagcgtactcctcaatgtttgtagtaggaatgctccaaagagtttccagtgcgcgtaagttgaatacctatgacatacctatgaaacaaacgaatcataccgatgcttgaacatgttttcttacctacttgttgttgttctaagatgtttgttttttctttctttcttggattgttaataatgaacgtacgacgttctgatgcaaaataatggaaaatggggttgtgtgtacaatcgacaagtttgtatatactcctttactttgttgttcctttgttttgttgttcctcttctttgtaactgtgtatttcaaatttgcttaataaaaatataaattgatgttgtagt

SEQ ID NO: 7018 - protein, 111 aa, Arabidopsis thaliana
MAPRTPLALFVSLNLLFFTYTSATTGTCPKNSIEIGTCVTVLNLVDLTLGNPPVKPCCSLIQGLADLEAAACLCTALKASILGIVNINLPINLSVLLNVCSRNAPKSFQCA

SEQ ID NO: 7019 - DNA, 547 bp, Arabidopsis thaliana
  misc_feature (59)..(59): n is a, c, g, or t
ttttctttgagtcgcttcacttctcttgcatccttcaaactcatccacaggaatggcgncagcagccagcaccagcagtgatttcatggacaagatcaggcattgtgtccaaatccggacaaacccagaagaaatctgagatgaaagtttcttacataactggacttaactcatatggtggtctcaaggcacagaacaacaaggttgtctcaatgggatcaccactctgcacagaacagtgttttgctaacgttgtgatgtctctcaaaggaagaagaggtaatggaggagccttatccaccacgtgtaacgctgtcggagagattttcaagattgcagcaatcatgaacgctcttactcttgttggtgttgcagttggattcgttcttcttcgaatcgaaacttctgttgaagaagctgaagcagagtaaatagagtaaattgctgctcttataattatatatttttggttattgttgttgtcaagctttggtaaaacttgatggatacatgttacatttgtttatgaagaagctcttttcttggc

SEQ ID NO: 7020 - protein, 142 aa, Arabidopsis thaliana
  misc_feature (19)..(19): Xaa can be any naturally occurring amino acid
FFESLHFSCILQTHPQEWXQQPAPAVISWTRSGIVSKSGQTQKKSEMKVSYITGLNSYGGLKAQNNKVVSMGSPLCTEQCFANVVMSLKGRRGNGGALSTTCNAVGEIFKIAAIMNALTLVGVAVGFVLLRIETSVEEAEAE

SEQ ID NO: 7021 - protein, 96 aa, Arabidopsis thaliana
MKVSYITGLNSYGGLKAQNNKVVSMGSPLCTEQCFANVVMSLKGRRGNGGALSTTCNAVGEIFKIAAIMNALTLVGVAVGFVLLRIETSVEEAEAE

SEQ ID NO: 7022 - protein, 72 aa, Arabidopsis thaliana
MGSPLCTEQCFANVVMSLKGRRGNGGALSTTCNAVGEIFKIAAIMNALTLVGVAVGFVLLRIETSVEEAEAE

SEQ ID NO: 7023 - DNA, 859 bp, Arabidopsis thaliana
ctctttcggcggttgaaaacctttgaaaattgaaaatggagaaatcgacctctccggcgactcgagtcaccgaacctcctcctgctgctacttcatctcttccagcacaagctcctccgcttcctacatctgcagatcagagatcagctgagttaccttcgcctgctcagccagctcagatgactgcgcctccgtcgacagttaccacagatccgtcgtccaggggaagaaagcgagcgctggaagcgaatcttcagatcgagagctccaactactacaagatgcgtctccttgtcaaagatcttcgccctcacgttctcgaggttttacgaactccagacttgaggaactctaaggcagttatcgggattcaagagaagatgaagcttatgcttcaactgtacgaagagatgattggagagtctcccaaacgtgagaaaacagctaagagcgactctttatccaacggaaaggcgactactactactactactactactagtgtactgagatcatctgaaactgagaagcacagctctgatggagatggcgacaaggtggttggagggtcggcatttggctggaacttcataacctctggagggccaggcactgaacctgtttattctggaatgtcaaaggaagaatacagaagctctcacccaattatgcaagtggaggcagagcttgagttgcccaacacattctaagctttgttagtggtgtttgtataatattattcactttggtatccgttcatcccaatgttttatatgtatcaactgaaacaatggattagcttctacccatgaagccttaattagtacacaatatgcttaacatctaaaccttttttttt

SEQ ID NO: 7024 - protein, 224 aa, Arabidopsis thaliana
MEKSTSPATRVTEPPPAATSSLPAQAPPLPTSADQRSAELPSPAQPAQMTAPPSTVTTDPSSRGRKRALEANLQIESSNYYKMRLLVKDLRPHVLEVLRTPDLRNSKAVIGIQEKMKLMLQLYEEMIGESPKREKTAKSDSLSNGKATTTTTTTTSVLRSSETEKHSSDGDGDKVVGGSAFGWNFITSGGPGTEPVYSGMSKEEYRSSHPIMQVEAELELPNTF

SEQ ID NO: 7025 - protein, 176 aa, Arabidopsis thaliana
MTAPPSTVTTDPSSRGRKRALEANLQIESSNYYKMRLLVKDLRPHVLEVLRTPDLRNSKAVIGIQEKMKLMLQLYEEMIGESPKREKTAKSDSLSNGKATTTTTTTTSVLRSSETEKHSSDGDGDKVVGGSAFGWNFITSGGPGTEPVYSGMSKEEYRSSHPIMQVEAELELPNTF

SEQ ID NO: 7026 - protein, 142 aa, Arabidopsis thaliana
MRLLVKDLRPHVLEVLRTPDLRNSKAVIGIQEKMKLMLQLYEEMIGESPKREKTAKSDSLSNGKATTTTTTTTSVLRSSETEKHSSDGDGDKVVGGSAFGWNFITSGGPGTEPVYSGMSKEEYRSSHPIMQVEAELELPNTF

SEQ ID NO: 7027 - DNA, 943 bp, Arabidopsis thaliana
aattgtcttctattacctctctctcattcacctctcgctaagtgtgcgttagccgttagggttccgatctaatcatggcggactctgttttgaaggaggttaactgtggccggcctgaaaagatcccgaagttggacaaagcttgcgaaggatcgaaatcgtcctggaaacatctcaagctaggaaacgtggaagatgatgagtatcttcgacagtattgtttgtttcactacgaattccataaatccgagggtttcacggttgattgggagaaatatgactacatgttccatataaggccgttggaaaattcaccacctatcagcgatatacgaaccaatgctgatgtgatccgtgatgtgacactctttgccattgagaaacacaatgaagctcatggatctaaacttgtgtttgtcgagcatgtctcagctaatttcaaatttgccaatggtctcctctgctggttaacattctgggctaccgatatggcctcatccgctcctacatcgcagatctatcaagtcgaactttggcgtcgcggaaaacagtttgaaattcccatcttcagggtcaagcctaaggacgaagagatggatgatgttgaagtgaaaccaccctctcccatgccttatgatgactatgataaaccaccggttgtctttgttcgagctgctcctgaagatggtgtccctttcgtctttgatcgaactggagctctttatgatctctatcggtctggtttgtaaggaaaaagtatatataccattcctttggtgacaaagagatatgatgttagtcactgactgaaaaatcaaattaggcttgtattaatattataccctctgaattttcaacttcttctatctctctaaatgtactagcttctcttctagagatctatgaacacaaatagaattgatattcaaaaatccatttgttt

SEQ ID NO: 7028 - protein, 224 aa, Arabidopsis thaliana
MADSVLKEVNCGRPEKIPKLDKACEGSKSSWKHLKLGNVEDDEYLRQYCLFHYEFHKSEGFTVDWEKYDYMFHIRPLENSPPISDIRTNADVIRDVTLFAIEKHNEAHGSKLVFVEHVSANFKFANGLLCWLTFWATDMASSAPTSQIYQVELWRRGKQFEIPIFRVKPKDEEMDDVEVKPPSPMPYDDYDKPPVVFVRAAPEDGVPFVFDRTGALYDLYRSGL

SEQ ID NO: 7029 - protein, 154 aa, Arabidopsis thaliana
MFHIRPLENSPPISDIRTNADVIRDVTLFAIEKHNEAHGSKLVFVEHVSANFKFANGLLCWLTFWATDMASSAPTSQIYQVELWRRGKQFEIPIFRVKPKDEEMDDVEVKPPSPMPYDDYDKPPVVFVRAAPEDGVPFVFDRTGALYDLYRSGL

SEQ ID NO: 7030 - DNA, 916 bp, Arabidopsis thaliana
aatcaagaaaagctctgtaacattattatcaatcgaaattccaaccgactcaacaatgtcttcatccaacgcctgcgcctctccgtcaccgttccccgccgtcacgaagcttcatgtagactccgtcacgtttgtaccgtccgtcaagtcaccggcctcctccaatccattattcctcggcggcgccggtgtccgaggccttgatatccaaggtaaattcgtgatcttcaccgtcattggagtatacctagagggtaacgccgttccttctctatctgtcaagtggaagggaaaaactacggaggagctaacagaatctatcccgttcttccgtgaaatagtcaccggtgcgtttgagaagtttatcaaggtgacaatgaaactgccgttaacgggacaacaatattcggagaaagtgacggagaattgtgtggctatatggaaacaattagggctttatacggactgtgaagctaaagctgtggagaagttcttggagatcttcaaggaagaaacattccctcccggttcatcgatcctcttcgctctctcccctaccggctctcttacggttgcgttttcgaaagatgatagtatccctgaaaccgggatcgctgtgatcgagaacaaattgttggcggaggcggttctggaatctatcatcgggaagaacggtgtgtcacctggcactaggttaagtgttgcagaaagattatctcagctaatgatgaagaacaaggacgaaaaggaagttagtgatcactctgttgaggaaaaactagccaaagagaactgagaatgatagatttttcttgtgtttttgtcattttctatttcttatgttttctatatctaatttcttatgcggtactcaagtggagaataaagaacatgcatttacattataataaagttt

SEQ ID NO: 7031 - protein, 264 aa, Arabidopsis thaliana
IKKSSVTLLSIEIPTDSTMSSSNACASPSPFPAVTKLHVDSVTFVPSVKSPASSNPLFLGGAGVRGLDIQGKFVIFTVIGVYLEGNAVPSLSVKWKGKTTEELTESIPFFREIVTGAFEKFIKVTMKLPLTGQQYSEKVTENCVAIWKQLGLYTDCEAKAVEKFLEIFKEETFPPGSSILFALSPTGSLTVAFSKDDSIPETGIAVIENKLLAEAVLESIIGKNGVSPGTRLSVAERLSQLMMKNKDEKEVSDHSVEEKLAKEN

SEQ ID NO: 7032 - protein, 246 aa, Arabidopsis thaliana
MSSSNACASPSPFPAVTKLHVDSVTFVPSVKSPASSNPLFLGGAGVRGLDIQGKFVIFTVIGVYLEGNAVPSLSVKWKGKTTEELTESIPFFREIVTGAFEKFIKVTMKLPLTGQQYSEKVTENCVAIWKQLGLYTDCEAKAVEKFLEIFKEETFPPGSSILFALSPTGSLTVAFSKDDSIPETGIAVIENKLLAEAVLESIIGKNGVSPGTRLSVAERLSQLMMKNKDEKEVSDHSVEEKLAKEN

SEQ ID NO: 7033 - protein, 139 aa, Arabidopsis thaliana
MKLPLTGQQYSEKVTENCVAIWKQLGLYTDCEAKAVEKFLEIFKEETFPPGSSILFALSPTGSLTVAFSKDDSIPETGIAVIENKLLAEAVLESIIGKNGVSPGTRLSVAERLSQLMMKNKDEKEVSDHSVEEKLAKEN

SEQ ID NO: 7034 - DNA, 430 bp, Arabidopsis thaliana
aaaaacgcaacgaagaacaaaatgggttcaaagtcaccaaatattgtcgcacttgtgttaccactacttcttatactttacactctttcctctcaagttgaagtcgtggaatctacagggcgcaaacttgcgttttggggaaatcctatcgtgtggactccacactcaaattcatgtggaggttctccagcatcagtatttgcttcttccaagtggacgacaggccgaccatgcagacgtagtcgtcctccaggaactaatattcctgtttctgatcaatctccatagtactttaatttgagtttgagttactctgtgttcgaattttaaagtatatgtggttttctgttttagtttcgtgtctcaactctcaagtgtagaggaatgttataaactactatgcaatgaaggaactaatacttatgatggt

SEQ ID NO: 7035 - protein, 99 aa, Arabidopsis thaliana
KTQRRTKWVQSHQILSHLCYHYFLYFTLFPLKLKSWNLQGANLRFGEILSCGLHTQIHVEVLQHQYLLLPSGRQADHADVVVLQELIFLFLINLHSTLI

SEQ ID NO: 7036 - protein, 95 aa, Arabidopsis thaliana
KNATKNKMGSKSPNIVALVLPLLLILYTLSSQVEVVESTGRKLAFWGNPIVWTPHSNSCGGSPASVFASSKWTTGRPCRRSRPPGTNIPVSDQSP

SEQ ID NO: 7037 - protein, 88 aa, Arabidopsis thaliana
MGSKSPNIVALVLPLLLILYTLSSQVEVVESTGRKLAFWGNPIVWTPHSNSCGGSPASVFASSKWTTGRPCRRSRPPGTNIPVSDQSP

SEQ ID NO: 7038 - DNA, 1540 bp, Arabidopsis thaliana
aatacataaaatcgattttgttgtttgtgcttttgtggcggctttttttcacgaactgctttaaaccctaaaaactccaacctttgttctctgtgtaacaacaacaacaacaatgcaggaagaatctcacatcgaagaagttgaaatccaaaacaaactcgaagttgctcctgcattgatttccgttcatccatctcagaaatctgtcgctgtcgctgtcggctcggatcttcgtattttcgatcttatagagaattgcccagttagtttggtggatgaatctgatgggcctatccgtaaggaatccattagagctattcggtacagtacaagtggcaagctctttgtgtccgcaggcgatgacaagcttgtcaagatttggtccgcagattcttggcgctgtcttaacacagtatgttctgagaaaagagttagcgcagttgctataagtagtgatgactcacatgtttgctatgcggacaagtttggtgttgtatgggtgattgagctggatgggatcaatgacggtaaaactttacctagtaagaagggtgcgctgctgctttcccattattgtagtattattactagcctggagttttccccagatggtagatatattcttagtgcagaccgggactttaagataagggtgactgtttttcccaagaagcctctagaaggggctcatgaaatacagagtttttgtcttggacattcagagttcattacctgcacagcatttgtcagcactccagagcttactcagggatacctcatgtctggaagtggagattcaactgttcgactgtgggacattacatctgggtctcttctcgacacatgtgaagttagtacagtggcaggacatgcagagtctaatgaaaatgagtcgccgacccaagtcacagttactgacatatgcgctatcccgaattcgtctcttgcagcagtggcaattcaaagctttcaaggaatattcttgttaagctgtgatttgacagcacatactctctctatcacaaaggtgataaaaatccctggagaaagtttcattcctacaagtatagctgtaagtgcatcttcaagattactatggatggtatcaggagcctcaaacctgcctggttcgaaccatcctggtttttcaagggttcgggtcatctcttgccttgagaccgaatcatcttcaatacttgaagacgagcagattccaggagggaccaaactattggagcaattacaaggtaaagttacaatagaagagagtgtaatgagtgctgcggcagaagctgtgagagcggcaatgtccagccttttgatgaagaagcaatactctgaagagaagagagagttcagaaaaagaaccagaaatgataagaaaaccacacgatgattgcattttgccaaattgttttttttttaggcttattatcttctgtttttctgtgactctctcgttgtatcttgatcattatgttaccgttataatttctctgttactatttcaaaatttttatttattcaagcatgtactagt

SEQ ID NO: 7039 - protein, 427 aa, Arabidopsis thaliana
MQEESHIEEVEIQNKLEVAPALISVHPSQKSVAVAVGSDLRIFDLIENCPVSLVDESDGPIRKESIRAIRYSTSGKLFVSAGDDKLVKIWSADSWRCLNTVCSEKRVSAVAISSDDSHVCYADKFGVVWVIELDGINDGKTLPSKKGALLLSHYCSIITSLEFSPDGRYILSADRDFKIRVTVFPKKPLEGAHEIQSFCLGHSEFITCTAFVSTPELTQGYLMSGSGDSTVRLWDITSGSLLDTCEVSTVAGHAESNENESPTQVTVTDICAIPNSSLAAVAIQSFQGIFLLSCDLTAHTLSITKVIKIPGESFIPTSIAVSASSRLLWMVSGASNLPGSNHPGFSRVRVISCLETESSSILEDEQIPGGTKLLEQLQGKVTIEESVMSAAAEAVRAAMSSLLMKKQYSEEKREFRKRTRNDKKTTR

SEQ ID NO: 7040 - DNA, 1279 bp, Arabidopsis thaliana
aaaaaaaacccaaaaacaaatcagcatggccatggctacgcacttcaccttccctttcaactatgttgtttccgaaggctctcatggaagaagaagtttcgtccggaagctggtcagagctgtagcctccggagattccgtggctccggcgatttcggaagaatcaaaagtgaaattgggtggctcggatttgaaagtgacgaagcttgggatcggagtctggtcttggggtgataacagctattggaatgatttccagtgggatgacagaaaattgaaggcggctaaaggtgctttcgacaccagtcttgacaacggtattgattttttcgataccgcagaagtttatggttccaagttttccctgggtgctataagctctgaaactcttttaggaagattcatccgtgagagaaaagagagatatcccggagctgaggtttcggttgcaaccaagtttgctgcattgccatggcgatttggtcgtgaaagtgttgtcactgcccttaaagattccctttcccggcttgagctttcatctgttgatctctatcaactgcattggccaggactatggggaaatgaaggatatcttgatggtcttggggatgctgttgaacaaggacttgtcaaggctgttggtgtttctaactacagcgagaagcggcttcgtgatgcttatgaaagactcaaaaagagaggaattcctctggcctcaaatcaagtcaactacagtctgatatacagagctccagagcagactggtgttaaggctgcttgtgatgagcttggagttactttaattgcatattcccccatcgctcaaggtgctctaactggtaaatacaccccagagaacccaccctcaggtcctcggggtcgcatttatacgcgtgagttcttaacaaagcttcaacccctgttgaatagaatcaaacaaattggggaaaactacagcaaaactcccacacagatagcattgaactggttggtggcacaagggaacgtgatacccatcccaggagccaagaacgcagaacaagccaaagagtttgctggagcgataggttggagtctgacagacaatgaagtgagtgagctacggtccctggcctctgagataaaacccgtcgttggtttccctgttgagtatctctaaactcttaacactctgtttgtagcatttgtaaagctcaaaagttacaatatgaactaaaagtagtatatagatgatggtaaagtgttgtaatacatatgcaaataaaatctttttgcctct

SEQ ID NO: 7041 - protein, 385 aa, Arabidopsis thaliana
KKTQKQISMAMATHFTFPFNYVVSEGSHGRRSFVRKLVRAVASGDSVAPAISEESKVKLGGSDLKVTKLGIGVWSWGDNSYWNDFQWDDRKLKAAKGAFDTSLDNGIDFFDTAEVYGSKFSLGAISSETLLGRFIRERKERYPGAEVSVATKFAALPWRFGRESVVTALKDSLSRLELSSVDLYQLHWPGLWGNEGYLDGLGDAVEQGLVKAVGVSNYSEKRLRDAYERLKKRGIPLASNQVNYSLIYRAPEQTGVKAACDELGVTLIAYSPIAQGALTGKYTPENPPSGPRGRIYTREFLTKLQPLLNRIKQIGENYSKTPTQIALNWLVAQGNVIPIPGAKNAEQAKEFAGAIGWSLTDNEVSELRSLASEIKPVVGFPVEYL

SEQ ID NO: 7042 - protein, 377 aa, Arabidopsis thaliana
MAMATHFTFPFNYVVSEGSHGRRSFVRKLVRAVASGDSVAPAISEESKVKLGGSDLKVTKLGIGVWSWGDNSYWNDFQWDDRKLKAAKGAFDTSLDNGIDFFDTAEVYGSKFSLGAISSETLLGRFIRERKERYPGAEVSVATKFAALPWRFGRESVVTALKDSLSRLELSSVDLYQLHWPGLWGNEGYLDGLGDAVEQGLVKAVGVSNYSEKRLRDAYERLKKRGIPLASNQVNYSLIYRAPEQTGVKAACDELGVTLIAYSPIAQGALTGKYTPENPPSGPRGRIYTREFLTKLQPLLNRIKQIGENYSKTPTQIALNWLVAQGNVIPIPGAKNAEQAKEFAGAIGWSLTDNEVSELRSLASEIKPVVGFPVEYL

SEQ ID NO: 7043 - protein, 375 aa, Arabidopsis thaliana
MATHFTFPFNYVVSEGSHGRRSFVRKLVRAVASGDSVAPAISEESKVKLGGSDLKVTKLGIGVWSWGDNSYWNDFQWDDRKLKAAKGAFDTSLDNGIDFFDTAEVYGSKFSLGAISSETLLGRFIRERKERYPGAEVSVATKFAALPWRFGRESVVTALKDSLSRLELSSVDLYQLHWPGLWGNEGYLDGLGDAVEQGLVKAVGVSNYSEKRLRDAYERLKKRGIPLASNQVNYSLIYRAPEQTGVKAACDELGVTLIAYSPIAQGALTGKYTPENPPSGPRGRIYTREFLTKLQPLLNRIKQIGENYSKTPTQIALNWLVAQGNVIPIPGAKNAEQAKEFAGAIGWSLTDNEVSELRSLASEIKPVVGFPVEYL

SEQ ID NO: 7044 - DNA, 1440 bp, Arabidopsis thaliana
gaacctctcattctctctttcatctcctcctcttacgtaaccctaacgaagtcgaagattctctggtagatctatctcgattcgattcgattcctcttttttcccagaaaagtcgctattgaaatcgaacgaaagtgttgaagattttaccagtcagaggtatatatatatagagagagagttatggatttggatcaatggatttccaaggttaaagatggtcagcatctctccgaagacgagcttcagcttctctgcgaatacgtgaaagagattctgattgaggagtcaaacgtacagcctgtaaacagtccagtcaccgtatgtggtgatatccatggccagtttcatgatcttatgaagctttttcagaccggaggtcatgttcccgacaccaattacatttttatgggggacttcgtggatagaggttacaacagccttgaagtcttcactattcttttacttcttaaagctagatatccagccaatattacacttttgcgcggaaatcatgaaagtaggcagctaacgcaggtgtatggtttctatgacgaatgccagaggaagtatggtaacgctaatgcgtggcgatattgcacagatgtttttgactatcttaccctgtcagctattatagatggcacagttctatgtgttcacggtggcctttccccggatgtccggacaattgatcagataagactgatcgagcgaaattgcgaaattcctcatgaagggcccttttgcgatcttatgtggagtgatcctgaagatattgaaacatgggcggttagtccacgtggagctggttggcttttcggatccagggttaccactgagtttaaccatatcaacaagctggatctagtatgccgcgcgcaccaacttgtacaagaaggtcttaagtacatgttccaagataaaggccttgtaactgtatggtctgcacctaattactgttaccgctgtgggaatgtcgcttctatattgagtttcaatgacaacatggaaagggaagtgaagttcttcacagagacagaagagaacaatcaaatgagagggccaaggactggagttccgtatttcctatgaagaatcacacttattatatttgctgtgatgatgaagccattgctgccattggcaatatgttcagttcaatgtggaaaaggttaatatatgattatatatattatctactgatgggtttcgcttactatcattatttttgtcctttaggttacatttcccttgtgaaagttacaagtcaaacactttggtaatagtcttagtcattttgattctctgctctcttttctttcccccaatctttcttctgtaatgttatttttttcattgttcacttgtactgtttcctctgtttttgttgttgttgttgtgaagatgacattaattctaaaataatcaaacatcgtt

SEQ ID NO: 7045 - protein, 303 aa, Arabidopsis thaliana
MDLDQWISKVKDGQHLSEDELQLLCEYVKEILIEESNVQPVNSPVTVCGDIHGQFHDLMKLFQTGGHVPDTNYIFMGDFVDRGYNSLEVFTILLLLKARYPANITLLRGNHESRQLTQVYGFYDECQRKYGNANAWRYCTDVFDYLTLSAIIDGTVLCVHGGLSPDVRTIDQIRLIERNCEIPHEGPFCDLMWSDPEDIETWAVSPRGAGWLFGSRVTTEFNHINKLDLVCRAHQLVQEGLKYMFQDKGLVTVWSAPNYCYRCGNVASILSFNDNMEREVKFFTETEENNQMRGPRTGVPYFL

SEQ ID NO: 7046 - protein, 245 aa, Arabidopsis thaliana
MKLFQTGGHVPDTNYIFMGDFVDRGYNSLEVFTILLLLKARYPANITLLRGNHESRQLTQVYGFYDECQRKYGNANAWRYCTDVFDYLTLSAIIDGTVLCVHGGLSPDVRTIDQIRLIERNCEIPHEGPFCDLMWSDPEDIETWAVSPRGAGWLFGSRVTTEFNHINKLDLVCRAHQLVQEGLKYMFQDKGLVTVWSAPNYCYRCGNVASILSFNDNMEREVKFFTETEENNQMRGPRTGVPYFL

SEQ ID NO: 7047 - protein, 228 aa, Arabidopsis thaliana
MGDFVDRGYNSLEVFTILLLLKARYPANITLLRGNHESRQLTQVYGFYDECQRKYGNANAWRYCTDVFDYLTLSAIIDGTVLCVHGGLSPDVRTIDQIRLIERNCEIPHEGPFCDLMWSDPEDIETWAVSPRGAGWLFGSRVTTEFNHINKLDLVCRAHQLVQEGLKYMFQDKGLVTVWSAPNYCYRCGNVASILSFNDNMEREVKFFTETEENNQMRGPRTGVPYFL

SEQ ID NO: 7048 - DNA, 1374 bp, Arabidopsis thaliana
ctctctcacactcaccatgcaatttttctttccttgtgaccaagacttctctccaactctaaaccaaaaaacacccagattttttctctctgatttcaagattccccaaaactttttctccaagaccctctacaactttcttgatggcggtaggaatctttggattgatcccaagctcatcaccagacgagctaaggaagattcttcaagcgctttcgacgaaatggggaggtagttgaggattttgagagtcttgaagtgaagccaatgaaaggagcgatgactaacgaagtgttcatggttagttggcctagaaaagaaacgaatcttcgatgtaggaagcttcttgttcgtgtttatggtgaaggtgttgagcttttcttcaatagagacgatgagattcgtacttttgagtatgttgctcgtcatggtcacggtcctacacttcttggtcgcttcgccggcggtagagtcgaagagtttatccatgcccggacactatcggcaaccgatcttcgtgatccgaacatatcagctcttgttgcatctaagctaagaagatttcacagcatacacattcctggagatagaattatgctcatctgggacaggatgaggacttgggtaggacaagccaagaatctatgttcaaatgaacattcaacagagtttggtctagacgacattgaagatgaaatcaacctgctggagcaagaagtgaacaatgaacaagagattggcttctgtcacaatgacttgcagtatggtaacatcatgattgatgaagaaaccaatgcaattactatcattgattatgagtatgcaagttataatccgatcgcttacgacatagcaaatcatttctgtgaaatggcggcagattatcattcaaacactcctcatatcttggactacactctatatccaggggaagaagaaaggaggagattcatatgtaactacttaacctcttcaggtgaagaagcaagagaagaagacatagaacaacttttggatgatattgagaagtatacattggcaagccatctcttctggggtttatggggaatcatatctggttatgtgaacaagattgagtttgattatatcgagtattcgaggcagagattcaaacagtattggcttcgcaagccaaagcttttatctttcttcccatcctaataagtaaattctctgtttacttatgtttactctttgcgaataacgcggtaaaaacccgatgatggatccatgatatagctatgccaaagctaaaactatgtgtaattcttctgttctgaacttctgatactatgtaataagtaaaagatataaatattccatactataatatttccacaataatgagaaaag

SEQ ID NO: 7049 - protein, 304 aa, Arabidopsis thaliana
MKGAMTNEVFMVSWPRKETNLRCRKLLVRVYGEGVELFFNRDDEIRTFEYVARHGHGPTLLGRFAGGRVEEFIHARTLSATDLRDPNISALVASKLRRFHSIHIPGDRIMLIWDRMRTWVGQAKNLCSNEHSTEFGLDDIEDEINLLEQEVNNEQEIGFCHNDLQYGNIMIDEETNAITIIDYEYASYNPIAYDIANHFCEMAADYHSNTPHILDYTLYPGEEERRRFICNYLTSSGEEAREEDIEQLLDDIEKYTLASHLFWGLWGIISGYVNKIEFDYIEYSRQRFKQYWLRKPKLLSFFPS

SEQ ID NO: 7050 - protein, 300 aa, Arabidopsis thaliana
MTNEVFMVSWPRKETNLRCRKLLVRVYGEGVELFFNRDDEIRTFEYVARHGHGPTLLGRFAGGRVEEFIHARTLSATDLRDPNISALVASKLRRFHSIHIPGDRIMLIWDRMRTWVGQAKNLCSNEHSTEFGLDDIEDEINLLEQEVNNEQEIGFCHNDLQYGNIMIDEETNAITIIDYEYASYNPIAYDIANHFCEMAADYHSNTPHILDYTLYPGEEERRRFICNYLTSSGEEAREEDIEQLLDDIEKYTLASHLFWGLWGIISGYVNKIEFDYIEYSRQRFKQYWLRKPKLLSFFPS

SEQ ID NO: 7051 - protein, 294 aa, Arabidopsis thaliana
MVSWPRKETNLRCRKLLVRVYGEGVELFFNRDDEIRTFEYVARHGHGPTLLGRFAGGRVEEFIHARTLSATDLRDPNISALVASKLRRFHSIHIPGDRIMLIWDRMRTWVGQAKNLCSNEHSTEFGLDDIEDEINLLEQEVNNEQEIGFCHNDLQYGNIMIDEETNAITIIDYEYASYNPIAYDIANHFCEMAADYHSNTPHILDYTLYPGEEERRRFICNYLTSSGEEAREEDIEQLLDDIEKYTLASHLFWGLWGIISGYVNKIEFDYIEYSRQRFKQYWLRKPKLLSFFPS

SEQ ID NO: 7052 - DNA, 1546 bp, Arabidopsis thaliana
agagcttccacttccatcgtcgtcttctattttttcttctttcttcgatttcataccaaaacaagaactctctgttttcgacaaaaacgaaaccttgagatctattttgattgacttttaagaaagagagagatctttcttagaagattttgtctcgtcggcattgaagatccagggtttgtctttcgaaattcagagagaaaatgggtgatgaggcagagatcaaggaacatttaaagccacaagcttcatctgaaacaatggacaagaaacataatgtgaaagggaagaggttatggcagaaagtcaagtatcaattggtggagtttcattcattgcctgcttatttaagagacaatgagtacatcattggtcattaccgatccgaatggccgatcaaacagattcttctcagcatctttaccattcataatgagactttgaatgtttggacgcacttgattgggtttttcctgtttttggcgctcactatatacactgcaacgaaagtaccgagtgtcgtggatcttcattcgcttcaacaccgtttacccgatttgttgaggaaaacagatctccacaaacttcattctgagctcatggctcgccttccttctagtccatctagttggcatgtgatggaccttctttataactgtttgcctgaaagattttctcatggcaactacactgacatgtgtgttctgcattctgtgagggaagatcttgcaaacttgatagctcctttgatcttcaggccaattactcgatggccgttttatgcatttctaggtggtgctatgttctgtctattagcaagcagcacgtgccacctcctctcatgtcactccgagcgagtctcctacataatgcttaggcttgattacgccggcatcgcagctctaatagcgacttccttctaccctccggtttattactccttcatgtgtgatcctttcttctgcaacctctacttaggattcataaccatcttaggaatcgccactgtgcttgtttctctcctcccggttttccaaagcccggagtttcgggtggtgagggcgtctctgttctttggaatgggattctctggcttagctccgattcttcacaagctgataatcttttgggaccaacctgaagcccttcacacgacaggttatgagattttgatgggtttgctttatgggttaggagctctggtttatgcaactaggatcccagagagatggatgccgggtaaattcgatatagcaggacatagccatcagttgtttcatgttctggttgttgctggtgcgttcacgcactatagagctgggctagtgtatcttaagtggagagatattgaaggatgttgaagatgaagattgaagattagatggaatctttgaatcttgtttgtagtagcttcatataaaagttggattatgtaaagtcttatatgtaatcaaacgtttaattgtttcctttattcaacaaaggatttatattgttaatccacatatgtattactggttaaagaagctgaaggattcatattttt

SEQ ID NO: 7053 - protein, 385 aa, Arabidopsis thaliana
MGDEAEIKEHLKPQASSETMDKKHNVKGKRLWQKVKYQLVEFHSLPAYLRDNEYIIGHYRSEWPIKQILLSIFTIHNETLNVWTHLIGFFLFLALTIYTATKVPSVVDLHSLQHRLPDLLRKTDLHKLHSELMARLPSSPSSWHVMDLLYNCLPERFSHGNYTDMCVLHSVREDLANLIAPLIFRPITRWPFYAFLGGAMFCLLASSTCHLLSCHSERVSYIMLRLDYAGIAALIATSFYPPVYYSFMCDPFFCNLYLGFITILGIATVLVSLLPVFQSPEFRVVRASLFFGMGFSGLAPILHKLIIFWDQPEALHTTGYEILMGLLYGLGALVYATRIPERWMPGKFDIAGHSHQLFHVLVVAGAFTHYRAGLVYLKWRDIEGC

SEQ ID NO: 7054 - protein, 366 aa, Arabidopsis thaliana
MDKKHNVKGKRLWQKVKYQLVEFHSLPAYLRDNEYIIGHYRSEWPIKQILLSIFTIHNETLNVWTHLIGFFLFLALTIYTATKVPSVVDLHSLQHRLPDLLRKTDLHKLHSELMARLPSSPSSWHVMDLLYNCLPERFSHGNYTDMCVLHSVREDLANLIAPLIFRPITRWPFYAFLGGAMFCLLASSTCHLLSCHSERVSYIMLRLDYAGIAALIATSFYPPVYYSFMCDPFFCNLYLGFITILGIATVLVSLLPVFQSPEFRVVRASLFFGMGFSGLAPILHKLIIFWDQPEALHTTGYEILMGLLYGLGALVYATRIPERWMPGKFDIAGHSHQLFHVLVVAGAFTHYRAGLVYLKWRDIEGC

SEQ ID NO: 7055 - protein, 253 aa, Arabidopsis thaliana
MARLPSSPSSWHVMDLLYNCLPERFSHGNYTDMCVLHSVREDLANLIAPLIFRPITRWPFYAFLGGAMFCLLASSTCHLLSCHSERVSYIMLRLDYAGIAALIATSFYPPVYYSFMCDPFFCNLYLGFITILGIATVLVSLLPVFQSPEFRVVRASLFFGMGFSGLAPILHKLIIFWDQPEALHTTGYEILMGLLYGLGALVYATRIPERWMPGKFDIAGHSHQLFHVLVVAGAFTHYRAGLVYLKWRDIEGC

SEQ ID NO: 7056 - DNA, 1793 bp, Arabidopsis thaliana
gagacagagacagattgagagaaagtttggattttgatatgtgtggttggatttttgttacaaggcaaaaccagacccaccttcaaacttgtccccacgaactacattatcattgttttgttcgaacttcttcttcttctcgttagggttttctttcattggctctgagctactctttattgcttaggccttagtgtgtgtgtgtgaatcttctcagcgaaagccaagttcttttctttgttggtgtttctgggtttattgcgacaatgggagctgagcattttagcctggtgaagttcaatagaggtttctttgtgtgtttatgggtgatgctctcgctatcttgcgcagcagcgagctatggctcttcaaggcaaaagtttgaggtgaagaagcatttgaataggctcaacaaacctcctgttaagactattcagagtccagatggagatataatcgactgtattcctatttcaaagcagccagcttttgaccaccccttcctcaaagaccacaagattcagatgaggcctagttaccacccagaagggctctttgatgacaataaggtatctgctgaaccaaaggggaaagaaactcatatccctcagttgtggcaccggtatggcaaatgtactgaaggaaccattcccatgaggaggacaagggaggatgatgtgttgagagcaagttcagttaaaagatatggcaagaagaagcataggtctgttcctattcctaaatctgcggaacccgacctcatcaaccaaaatggtcatcaacacgccatagcttatgtggaaggagataagtactacggagctaaggcgactttgaatgtgtgggagccaaagatacagaacacaaacgaattcagcttgtcgcagatatggcttttggggggttcctttggacaagatcttaacagtattgaagctggctggcaggtgagtccggatctatatggagacaataacacaagactcttcacttactggactagtgatgcctatcaagctaccggttgctacaatcttctttgctcaggtttcattcaaatcaacagtgacatagcaatgggagcaagcatctcaccagtctctggataccgcaattcccagtatgatatcagtattctaatctggaaggatccaaaggagggacattggtggatgcaatttgggaatgggtatgttttggggtactggccatcatttctgttctcctacctaacagaaagtgcatcgatgatcgaatggggaggagaagttgtgaactcacagtcagaaggccaccacacttggacacagatgggaagtggtcactttccagaagaaggtttcagtaaagcaagttactttcggaacattcaagtcgtagatggatccaacaacctcaaagcaccaaaaggacttggtacattcaccgagaagtccaactgttatgatgttcaaacgggaagcaatgatgactggggacattacttctactacggtggtcccggtaagaacaagaactgcccataaacccgggcatgtgtagtgtttactcagcttgtatctctctttcagtcttgtgaatttcctccttcttgggtagtattaggctgtagtaagaaagtgaagtagtgatatgtatgtgtaagctctctcagtgatgggaagttttgtaggtttgtgtggttttaacttaatgataaggtgtttgtttgtagtagtagtctccatgtaactagatgggggaaaagtaggtgtgactttaagtttcttaaaagctcaaagaaactttagccc

SEQ ID NO: 7057 - protein, 419 aa, Arabidopsis thaliana
MGAEHFSLVKFNRGFFVCLWVMLSLSCAAASYGSSRQKFEVKKHLNRLNKPPVKTIQSPDGDIIDCIPISKQPAFDHPFLKDHKIQMRPSYHPEGLFDDNKVSAEPKGKETHIPQLWHRYGKCTEGTIPMRRTREDDVLRASSVKRYGKKKHRSVPIPKSAEPDLINQNGHQHAIAYVEGDKYYGAKATLNVWEPKIQNTNEFSLSQIWLLGGSFGQDLNSIEAGWQVSPDLYGDNNTRLFTYWTSDAYQATGCYNLLCSGFIQINSDIAMGASISPVSGYRNSQYDISILIWKDPKEGHWWMQFGNGYVLGYWPSFLFSYLTESASMIEWGGEVVNSQSEGHHTWTQMGSGHFPEEGFSKASYFRNIQVVDGSNNLKAPKGLGTFTEKSNCYDVQTGSNDDWGHYFYYGGPGKNKNCP

SEQ ID NO: 7058 - protein, 398 aa, Arabidopsis thaliana
MLSLSCAAASYGSSRQKFEVKKHLNRLNKPPVKTIQSPDGDIIDCIPISKQPAFDHPFLKDHKIQMRPSYHPEGLFDDNKVSAEPKGKETHIPQLWHRYGKCTEGTIPMRRTREDDVLRASSVKRYGKKKHRSVPIPKSAEPDLINQNGHQHAIAYVEGDKYYGAKATLNVWEPKIQNTNEFSLSQIWLLGGSFGQDLNSIEAGWQVSPDLYGDNNTRLFTYWTSDAYQATGCYNLLCSGFIQINSDIAMGASISPVSGYRNSQYDISILIWKDPKEGHWWMQFGNGYVLGYWPSFLFSYLTESASMIEWGGEVVNSQSEGHHTWTQMGSGHFPEEGFSKASYFRNIQVVDGSNNLKAPKGLGTFTEKSNCYDVQTGSNDDWGHYFYYGGPGKNKNCP

SEQ ID NO: 7059 - protein, 333 aa, Arabidopsis thaliana
MRPSYHPEGLFDDNKVSAEPKGKETHIPQLWHRYGKCTEGTIPMRRTREDDVLRASSVKRYGKKKHRSVPIPKSAEPDLINQNGHQHAIAYVEGDKYYGAKATLNVWEPKIQNTNEFSLSQIWLLGGSFGQDLNSIEAGWQVSPDLYGDNNTRLFTYWTSDAYQATGCYNLLCSGFIQINSDIAMGASISPVSGYRNSQYDISILIWKDPKEGHWWMQFGNGYVLGYWPSFLFSYLTESASMIEWGGEVVNSQSEGHHTWTQMGSGHFPEEGFSKASYFRNIQVVDGSNNLKAPKGLGTFTEKSNCYDVQTGSNDDWGHYFYYGGPGKNKNCP

SEQ ID NO: 7060 - DNA, 1688 bp, Arabidopsis thaliana
ctctttttaaacctattcaaagccaaggacaagaaaaaaaaaaaagagtcgcccattttcttctcattttttttttgctcttgacgaagaaaccaaaaaaaaaaaaaatgagagagatccttcatatccaaggcggtcaatgtggaaaccagatcggagcaaagttctgggaagtgatctgcgacgaacacggcattgatcacaccggtcaatacgtcggcgattctccgttacagcttgaacgtatcgatgtctatttcaacgaagctagcggtggaaagtacgttcctcgcgctgttcttatggatctggagcctggtaccatggattctctcagatctggtccgttcggtcagattttccgtcctgataacttcgtctttggtcaatctggtgccggaaataactgggcgaaaggtcattacaccgaaggtgctgagttgattgattctgttctcgatgttgtgaggaaggaagctgagaacagcgattgtcttcaaggtttccaagtgtgtcattcattgggaggaggaactggatctggaatgggaactctattgatttctaagataagagaagagtatccagatcgtatgatgatgactttctcagtgtttccttctcctaaggtctctgacactgttgttgagccatacaatgcaactctctctgtgcatcagcttgtcgaaaacgctgacgagtgtatggttttggacaatgaggctctctacgatatctgtttccgtaccctcaagctcgctaatcctacctttggtgatcttaaccatctcatctctgctacaatgagtggtgtcacttgctgtcttcgtttccctggccagcttaactctgaccttaggaaactcgctgtgaaccttatcccattcccaaggcttcacttcttcatggttggtttcgcaccattgacatcgagaggatcacagcaatacagtgccttgagtgttcctgaactgacccagcagatgtgggatgcaaagaacatgatgtgtgctgctgaccctcgtcatggacgttacttgactgcatccgctgtgttccgtggaaagctgagcaccaaagaggttgacgagcagatgatgaacattcagaacaagaactcatcctactttgtggaatggatcccaaacaacgtcaagtccagtgtctgtgatattgcaccaaagggtttgaaaatggcgtctactttcattggtaactcaacctcaatccaggagatgtttaggcgtgtgagcgaacagttcacagctatgttcaggagaaaggctttccttcattggtacacaggagaaggcatggacgagatggagttcactgaagcagagagtaacatgaatgatcttgtcgcagagtaccagcagtaccaagatgctacagccggagaggaagagtacgaggaggaagaagaggagtacgagacttaagatgttgtcaatggctccctcggattcgtaagctgtgtaagcaagcagcattcactttcttctttccccttatcctgaattttttcttcgtaatatctcttttattgtttcgttcatgtgtgttcgtttttgttattgaaaccctatatcggttctggatttgttaaacttttgcgtgtattgcttattgtttttgtcggtgaaaaaaatattgcttttgttctcttaagttttgtgttgcatttc

SEQ ID NO: 7061 - protein, 479 aa, Arabidopsis thaliana
LFKPIQSQGQEKKKRVAHFLLIFFLLLTKKPKKKKMREILHIQGGQCGNQIGAKFWEVICDEHGIDHTGQYVGDSPLQLERIDVYFNEASGGKYVPRAVLMDLEPGTMDSLRSGPFGQIFRPDNFVFGQSGAGNNWAKGHYTEGAELIDSVLDVVRKEAENSDCLQGFQVCHSLGGGTGSGMGTLLISKIREEYPDRMMMTFSVFPSPKVSDTVVEPYNATLSVHQLVENADECMVLDNEALYDICFRTLKLANPTFGDLNHLISATMSGVTCCLRFPGQLNSDLRKLAVNLIPFPRLHFFMVGFAPLTSRGSQQYSALSVPELTQQMWDAKNMMCAADPRHGRYLTASAVFRGKLSTKEVDEQMMNIQNKNSSYFVEWIPNNVKSSVCDIAPKGLKMASTFIGNSTSIQEMFRRVSEQFTAMFRRKAFLHWYTGEGMDEMEFTEAESNMNDLVAEYQQYQDATAGEEEYEEEEEEYET

SEQ ID NO: 7062 - protein, 444 aa, Arabidopsis thaliana
MREILHIQGGQCGNQIGAKFWEVICDEHGIDHTGQYVGDSPLQLERIDVYFNEASGGKYVPRAVLMDLEPGTMDSLRSGPFGQIFRPDNFVFGQSGAGNNWAKGHYTEGAELIDSVLDVVRKEAENSDCLQGFQVCHSLGGGTGSGMGTLLISKIREEYPDRMMMTFSVFPSPKVSDTVVEPYNATLSVHQLVENADECMVLDNEALYDICFRTLKLANPTFGDLNHLISATMSGVTCCLRFPGQLNSDLRKLAVNLIPFPRLHFFMVGFAPLTSRGSQQYSALSVPELTQQMWDAKNMMCAADPRHGRYLTASAVFRGKLSTKEVDEQMMNIQNKNSSYFVEWIPNNVKSSVCDIAPKGLKMASTFIGNSTSIQEMFRRVSEQFTAMFRRKAFLHWYTGEGMDEMEFTEAESNMNDLVAEYQQYQDATAGEEEYEEEEEEYET

SEQ ID NO: 7063 - protein, 379 aa, Arabidopsis thaliana
MDLEPGTMDSLRSGPFGQIFRPDNFVFGQSGAGNNWAKGHYTEGAELIDSVLDVVRKEAENSDCLQGFQVCHSLGGGTGSGMGTLLISKIREEYPDRMMMTFSVFPSPKVSDTVVEPYNATLSVHQLVENADECMVLDNEALYDICFRTLKLANPTFGDLNHLISATMSGVTCCLRFPGQLNSDLRKLAVNLIPFPRLHFFMVGFAPLTSRGSQQYSALSVPELTQQMWDAKNMMCAADPRHGRYLTASAVFRGKLSTKEVDEQMMNIQNKNSSYFVEWIPNNVKSSVCDIAPKGLKMASTFIGNSTSIQEMFRRVSEQFTAMFRRKAFLHWYTGEGMDEMEFTEAESNMNDLVAEYQQYQDATAGEEEYEEEEEEYET

SEQ ID NO: 7064 - DNA, 1829 bp, Arabidopsis thaliana
ataattttatttttgttgtttgccctatctttctttctccctctgctcttgtgcaacttgatccgtcgtcttctctcagctctccatctccgtcttccaagttttactgtcaggtagaagaatccatgtcgatttacgtcgcgtcgcgacggctctccggcggaacaactgtgacggcgctgcgttatgccacctctctgagatcttattcgacctcgtttagggaggagagggacaccttcgggccgattcaagttccttccgataaattgtggggagcccagacgcagagatcgctgcagaacttcgaaatcggtggtgagcgcgagcgaatgcctgaaccaattgtccgcgcttttggcgtcttgaagaaatgcgctgccaaggttaacatggaatacggtcttgatccgacgattgggaaagcaattatgcaagctgctcaggaagtagctgagggaaagctcaatgatcatttcccccttgttgtctggcaaactggtagtgggactcagagtaatatgaatgctaatgaggtcattgctaatagagcagctgagattcttggtcgcaaacgtggtgagaaatgtgtgcacccaaatgaccatgtgaacagatcacaatcttctaacgacacttttcctaccgtcatgcacattgcagctgcaaccgagattaattcgaggctcatccctagtttaaaaactttgcatagcactttggaatctaagtccttcgagttcaaagatattgtgaaaattggaagaactcacactcaagatgctacacctttgacactaggacaagaatttggtggctatgctactcaagttaagtatggactaaatagagtcacctgcactcttcctcgcctctatcagcttgcacaaggtggaactgcggttgggacaggattaaacactaagaaagggtttgatgtaaagatagctgctgcagtagctgaagaaacaaacttgccatttgtcactgcagaaaacaagtttgaagctctggctgcacacgatgcttgtgttgaaaccagtgggtcacttaacacaatcgccacatcgctgatgaagatcgccaatgatatacgttttcttggaagtggcccaagatgtggtcttggtgaacttgtactacctgaaaatgagccaggaagcagtatcatgcctgggaaggtaaatcctacacagtgtgaggccttgactatggtttgtgcacaggttatgggaaaccatgtagctgtgacagttggtgggtcaaatggtcatttcgaattgaatgtattcaagccggtgatcgcgagtgctcttttacattccgtcagattaatagcagatgcttcagcttcgttcgagaaaaactgtgtgaggggcattgaggccaacagagaaagaatctcaaagctattgcacgagtctcttatgcttgtgacatcattgaatccgaaaatcgggtatgacaatgctgcagcagttgccaagaaagctcacaaagaaggatgtacattgaaggaagcggctctgaatttaggcgtgcttactgcggaagagtttgatacacttgttgttcctgagaagatgattggtccctccgattgatagttgtttttggagccaaagcttcaagtaccattattcttctgatgcttttatttaggttataataaaaatgagcaaatccagaaacaattcaaattttcttgggagggcaacattgttcttcatcttacggctaaactatgatcttctttatgtatcaattttttttttgtgttgaataagagagtgagtactcagcgagaagaatttctgagtttcgttagt

SEQ ID NO: 7065 - protein, 533 aa, Arabidopsis thaliana
NFIFVVCPIFLSPSALVQLDPSSSLSSPSPSSKFYCQVEESMSIYVASRRLSGGTTVTALRYATSLRSYSTSFREERDTFGPIQVPSDKLWGAQTQRSLQNFEIGGERERMPEPIVRAFGVLKKCAAKVNMEYGLDPTIGKAIMQAAQEVAEGKLNDHFPLVVWQTGSGTQSNMNANEVIANRAAEILGRKRGEKCVHPNDHVNRSQSSNDTFPTVMHIAAATEINSRLIPSLKTLHSTLESKSFEFKDIVKIGRTHTQDATPLTLGQEFGGYATQVKYGLNRVTCTLPRLYQLAQGGTAVGTGLNTKKGFDVKIAAAVAEETNLPFVTAENKFEALAAHDACVETSGSLNTIATSLMKIANDIRFLGSGPRCGLGELVLPENEPGSSIMPGKVNPTQCEALTMVCAQVMGNHVAVTVGGSNGHFELNVFKPVIASALLHSVRLIADASASFEKNCVRGIEANRERISKLLHESLMLVTSLNPKIGYDNAAAVAKKAHKEGCTLKEAALNLGVLTAEEFDTLVVPEKMIGPSD

SEQ ID NO: 7066 - protein, 492 aa, Arabidopsis thaliana
MSIYVASRRLSGGTTVTALRYATSLRSYSTSFREERDTFGPIQVPSDKLWGAQTQRSLQNFEIGGERERMPEPIVRAFGVLKKCAAKVNMEYGLDPTIGKAIMQAAQEVAEGKLNDHFPLVVWQTGSGTQSNMNANEVIANRAAEILGRKRGEKCVHPNDHVNRSQSSNDTFPTVMHIAAATEINSRLIPSLKTLHSTLESKSFEFKDIVKIGRTHTQDATPLTLGQEFGGYATQVKYGLNRVTCTLPRLYQLAQGGTAVGTGLNTKKGFDVKIAAAVAEETNLPFVTAENKFEALAAHDACVETSGSLNTIATSLMKIANDIRFLGSGPRCGLGELVLPENEPGSSIMPGKVNPTQCEALTMVCAQVMGNHVAVTVGGSNGHFELNVFKPVIASALLHSVRLIADASASFEKNCVRGIEANRERISKLLHESLMLVTSLNPKIGYDNAAAVAKKAHKEGCTLKEAALNLGVLTAEEFDTLVVPEKMIGPSD

SEQ ID NO: 7067 - protein, 423 aa, Arabidopsis thaliana
MPEPIVRAFGVLKKCAAKVNMEYGLDPTIGKAIMQAAQEVAEGKLNDHFPLVVWQTGSGTQSNMNANEVIANRAAEILGRKRGEKCVHPNDHVNRSQSSNDTFPTVMHIAAATEINSRLIPSLKTLHSTLESKSFEFKDIVKIGRTHTQDATPLTLGQEFGGYATQVKYGLNRVTCTLPRLYQLAQGGTAVGTGLNTKKGFDVKIAAAVAEETNLPFVTAENKFEALAAHDACVETSGSLNTIATSLMKIANDIRFLGSGPRCGLGELVLPENEPGSSIMPGKVNPTQCEALTMVCAQVMGNHVAVTVGGSNGHFELNVFKPVIASALLHSVRLIADASASFEKNCVRGIEANRERISKLLHESLMLVTSLNPKIGYDNAAAVAKKAHKEGCTLKEAALNLGVLTAEEFDTLVVPEKMIGPSD

SEQ ID NO: 7068 - DNA, 1689 bp, Arabidopsis thaliana
accccactcaaccaatttcttctcaggtaatactcgtaagatttatcaacacaagcaaaaaagatggcccaaaagctagaagcaaagggtggtgagatgggagatgtatgggatgatggtgtttacgaaaatgttagaaaggtatatgtagggcaagcacaatacggtatagccttcgtcaagtttgagtatgtcaatggttctcaagtggttgttggagatgaacatggaaagaagacagagctaggagttgaagagtttgagattgatgcggatgactacatcgtatacgtggaaggttaccgtgagaaagttaacgatatgacgtcagaaatgatcacgtttctttctattaagacttttaaaggcaaaacctctcatcctatcgaaaaaagacctggggttaagtttgtgctacatggtggaaaaatcgttgggtttcacggacgttcaacagatgttttacactcccttggggcctatgtttctttgtcatccactatcaaattgcttgggaagtggattaaggtggagcaaaaaggagaaggtccagggctaagatgctcacatggcatagcacaagtaggcaacaagatttactcctttggtggcgagttcacaccaaatcagcccatcgacaaacacctttacgtctttgacctcgagacccggacttggtccatttctccagccaccggagacgttccacacctctcttgtttaggtgtccggatggtgtcagtaggatcgaccctctatgtctttggaggccgagacgcttcacgccaatacaacggtttctactcgtttgacacgaccactaacgagtggaaactgctaactccggtcgaagaaggacccactcctcgtagtttccactcaatggcagccgatgaggaaaacgtttacgttttcggtggagtgagtgctacggcacgactcaatacactagactcttacaacatcgttgataagaagtggtttcattgttcgactccaggagattcccttaccgcaagaggaggagcagggctcgaagtggtgcaagggaaggtatgggttgtgtatgggtttaacggatgtgaagtagatgatgttcattactacgatcctgttcaagacaagtggacacaagtggaaacattcggtgtgaggccttccgaaagaagtgtattcgctagtgcggctattgggaaacacattgtgatttttggaggtgaaattgcgatggacccgctagctcacgtgggtccaggtcaattgaccgatggaacttttgcattggacacagagacgttgcaatgggagaggctggataagtttggtggagaggaagagactccgagtagcagaggatggaccgcgtccacgactgctaccattgatggtaagaaaggacttgtgatgcatggtggtaaagctccaaccaatgaccggtttgatgatctcttcttttacgggattgactctgcctaattaaggcagatttggtgatcatgaacgtttgtgaatgtgtgtgtgtgtgtgtgggtctgtgtttgtgtgtgtaataagggaggggtataccaccatatgatccttccccagcttgaccattgttttttttttaatatgtttttctttctacatgtttgtttcacgtttcatgttgtatccaataaattgtgtactttcctagtagtaatcgcc

SEQ ID NO: 7069 - protein, 470 aa, Arabidopsis thaliana
MAQKLEAKGGEMGDVWDDGVYENVRKVYVGQAQYGIAFVKFEYVNGSQVVVGDEHGKKTELGVEEFEIDADDYIVYVEGYREKVNDMTSEMITFLSIKTFKGKTSHPIEKRPGVKFVLHGGKIVGFHGRSTDVLHSLGAYVSLSSTIKLLGKWIKVEQKGEGPGLRCSHGIAQVGNKIYSFGGEFTPNQPIDKHLYVFDLETRTWSISPATGDVPHLSCLGVRMVSVGSTLYVFGGRDASRQYNGFYSFDTTTNEWKLLTPVEEGPTPRSFHSMAADEENVYVFGGVSATARLNTLDSYNIVDKKWFHCSTPGDSLTARGGAGLEVVQGKVWVVYGFNGCEVDDVHYYDPVQDKWTQVETFGVRPSERSVFASAAIGKHIVIFGGEIAMDPLAHVGPGQLTDGTFALDTETLQWERLDKFGGEEETPSSRGWTASTTATIDGKKGLVMHGGKAPTNDRFDDLFFYGIDSA

SEQ ID NO: 7070 - protein, 459 aa, Arabidopsis thaliana
MGDVWDDGVYENVRKVYVGQAQYGIAFVKFEYVNGSQVVVGDEHGKKTELGVEEFEIDADDYIVYVEGYREKVNDMTSEMITFLSIKTFKGKTSHPIEKRPGVKFVLHGGKIVGFHGRSTDVLHSLGAYVSLSSTIKLLGKWIKVEQKGEGPGLRCSHGIAQVGNKIYSFGGEFTPNQPIDKHLYVFDLETRTWSISPATGDVPHLSCLGVRMVSVGSTLYVFGGRDASRQYNGFYSFDTTTNEWKLLTPVEEGPTPRSFHSMAADEENVYVFGGVSATARLNTLDSYNIVDKKWFHCSTPGDSLTARGGAGLEVVQGKVWVVYGFNGCEVDDVHYYDPVQDKWTQVETFGVRPSERSVFASAAIGKHIVIFGGEIAMDPLAHVGPGQLTDGTFALDTETLQWERLDKFGGEEETPSSRGWTASTTATIDGKKGLVMHGGKAPTNDRFDDLFFYGIDSA

SEQ ID NO: 7071 - protein, 384 aa, Arabidopsis thaliana
MTSEMITFLSIKTFKGKTSHPIEKRPGVKFVLHGGKIVGFHGRSTDVLHSLGAYVSLSSTIKLLGKWIKVEQKGEGPGLRCSHGIAQVGNKIYSFGGEFTPNQPIDKHLYVFDLETRTWSISPATGDVPHLSCLGVRMVSVGSTLYVFGGRDASRQYNGFYSFDTTTNEWKLLTPVEEGPTPRSFHSMAADEENVYVFGGVSATARLNTLDSYNIVDKKWFHCSTPGDSLTARGGAGLEVVQGKVWVVYGFNGCEVDDVHYYDPVQDKWTQVETFGVRPSERSVFASAAIGKHIVIFGGEIAMDPLAHVGPGQLTDGTFALDTETLQWERLDKFGGEEETPSSRGWTASTTATIDGKKGLVMHGGKAPTNDRFDDLFFYGIDSA

SEQ ID NO: 7072 - DNA, 1078 bp, Arabidopsis thaliana
attaaataaagtctttttgcaaacaacaaaatctggttaaccaaaatagctctctcttttactgaagaagtgatcgaattttattcaacgatggcggatataatctcaaatccgaccatggaacaattgttcttctctgtagatccgatgtctcttatattctctcaaaaccccgacacgcatcaacttaaactcttgttagacggtttctccggattcgaaagaggtccaagatacgatgaatactcgagattacgtgaatcgaagcttcgcatgaaacgtgattttcagaaattcctcgaggaagaagacgaagtagaagagccgaggatcaaaaaacaagtcagattcgagggtaattctgtaaattcgcaagaaggtgataagttttctccggagaagaagaaacagagtcggttcgagggtatttcagtaatttcacaagaagataggttttcgccggagaaggtgaagaaacagagtcgatttgggttttctccgctgaaaaaagctgttccgtcttcgttggcacaatcagttcctgatttctctgctgtgatacgtaaagagaatcgtcgtccggttaatatcaacactattactccgccaccaccgacttcgaagagtagaaacggcggcgttttgacgggatcggcttcaagagggagcaagtcggcgagtgctggagagaagaagagtaaagggatgatgatgatgggaatggcacgtaagagttacgctaatgttgaagatcttaagaagatttcaatggcggctgcttctgctattaatggcggtggcggtggaggaggaggagggagaaaagttggtgactgtggtggtggtcgtcggactattcttggttacagacaaatttactgatttcgtttatcaaaagctttgatttttacacgattttattagttttttgtgggattttgattgatgagaaacaattcttggatttgattgttgatttgggtttttgtggctttttttggtgtgttggtgattttgatttgtttgtaaaaaataaagcataaattcttgatattatataactcgtgtgattctttct

SEQ ID NO: 7073 - protein, 263 aa, Arabidopsis thaliana
MADIISNPTMEQLFFSVDPMSLIFSQNPDTHQLKLLLDGFSGFERGPRYDEYSRLRESKLRMKRDFQKFLEEEDEVEEPRIKKQVRFEGNSVNSQEGDKFSPEKKKQSRFEGISVISQEDRFSPEKVKKQSRFGFSPLKKAVPSSLAQSVPDFSAVIRKENRRPVNINTITPPPPTSKSRNGGVLTGSASRGSKSASAGEKKSKGMMMMGMARKSYANVEDLKKISMAAASAINGGGGGGGGGRKVGDCGGGRRTILGYRQIY

SEQ ID NO: 7074 - protein, 254 aa, Arabidopsis thaliana
MEQLFFSVDPMSLIFSQNPDTHQLKLLLDGFSGFERGPRYDEYSRLRESKLRMKRDFQKFLEEEDEVEEPRIKKQVRFEGNSVNSQEGDKFSPEKKKQSRFEGISVISQEDRFSPEKVKKQSRFGFSPLKKAVPSSLAQSVPDFSAVIRKENRRPVNINTITPPPPTSKSRNGGVLTGSASRGSKSASAGEKKSKGMMMMGMARKSYANVEDLKKISMAAASAINGGGGGGGGGRKVGDCGGGRRTILGYRQIY

SEQ ID NO: 7075 - protein, 244 aa, Arabidopsis thaliana
MSLIFSQNPDTHQLKLLLDGFSGFERGPRYDEYSRLRESKLRMKRDFQKFLEEEDEVEEPRIKKQVRFEGNSVNSQEGDKFSPEKKKQSRFEGISVISQEDRFSPEKVKKQSRFGFSPLKKAVPSSLAQSVPDFSAVIRKENRRPVNINTITPPPPTSKSRNGGVLTGSASRGSKSASAGEKKSKGMMMMGMARKSYANVEDLKKISMAAASAINGGGGGGGGGRKVGDCGGGRRTILGYRQIY

SEQ ID NO: 7076 - DNA, 918 bp, Arabidopsis thaliana
ggtgcggaggttgacagagctttagttccgtacaaatggcgagtaagaaggttgacggagaaggaaaagggaaagctatagcgaatacgaggatgcttcgaagcatggatcgaaagactcgaagcgatactaagcgagatggttcttcttctaagctcatgaagatcgaatctccggagaagaagaaacggaagacgacgaaagcgaagaatgttggagctgcgaagaagaaggtaaagaaagaagaggtagctgtgaaaatcgagaaagaggaggaggaagatgatgatgctgcagagaaagaagaagatgacgactccgataagaagaagattgtgatcgagcattgcaaacaatgcaaatcattcaaggagagggctaatgaggtgaaggaaggtctagaggaagctgttcctggcatcattgtcactgtgaatcctgataagccaaggcgtggttgctttgagattcgagaggaaggcggcgagacattcatcagtcttttggctatgaagcgcccatttacaccgatgaaggaacttaacatggaagaggtcattgcggacatcgtagagaagattaagtaacacagctagtaggttctaccaatgccgagtctttcgtttcctccttggccctcggctaataggcttcaatatctgactatctagagcaactgcaggattttttaggcttaattttgatatattggtgaaaaccatttgagcacggtttcgtcgtttggtagtgcttgatcggctttgtgcagtttctttatgctaaaacttcctgatatatatgggattaagtctgtcttcgtaatgctagtttgaagcaattcgtttcgtttcatttattgttggattgtgtttggcgttcaattacgttacggattggatgaatgaagataaaacattt

SEQ ID NO: 7077 - protein, 183 aa, Arabidopsis thaliana
MASKKVDGEGKGKAIANTRMLRSMDRKTRSDTKRDGSSSKLMKIESPEKKKRKTTKAKNVGAAKKKVKKEEVAVKIEKEEEEDDDAAEKEEDDDSDKKKIVIEHCKQCKSFKERANEVKEGLEEAVPGIIVTVNPDKPRRGCFEIREEGGETFISLLAMKRPFTPMKELNMEEVIADIVEKIK

SEQ ID NO: 7078 - protein, 164 aa, Arabidopsis thaliana
MLRSMDRKTRSDTKRDGSSSKLMKIESPEKKKRKTTKAKNVGAAKKKVKKEEVAVKIEKEEEEDDDAAEKEEDDDSDKKKIVIEHCKQCKSFKERANEVKEGLEEAVPGIIVTVNPDKPRRGCFEIREEGGETFISLLAMKRPFTPMKELNMEEVIADIVEKIK

SEQ ID NO: 7079 - protein, 160 aa, Arabidopsis thaliana
MDRKTRSDTKRDGSSSKLMKIESPEKKKRKTTKAKNVGAAKKKVKKEEVAVKIEKEEEEDDDAAEKEEDDDSDKKKIVIEHCKQCKSFKERANEVKEGLEEAVPGIIVTVNPDKPRRGCFEIREEGGETFISLLAMKRPFTPMKELNMEEVIADIVEKIK

SEQ ID NO: 7080 - DNA, 2051 bp, Arabidopsis thaliana
aactccgccaccaacaatatttttctctactcaattcactcacactccaaaagcggtagcaatgtcagccaccgccgccgcctcctcctcgatcgccgttgccaccaactctctcaggaacgtgactctgtcttccagatcgccccttccatcagccatctccgtggctttcccttcccgtggacgcaatactcttcagcgacgcctcgttctcgtttcctgcagtactggagacggatctaagcctacgattctcgtggcggagaagctcggtgacgctggtattaagcttttggaggatgtcgcgaatgtcgactgttcgtataacatgactcctgaggagctcaacattaagatctcgctctgtgacgccttgatcgtgaggagtgggactaaggttggccgtgaggtgttcgaatcgtctcacggacggctcaaggttgttggtcgcgctggtgttgggatcgacaacgtggatctgagtgcagcgacggagtttgggtgtttggttgtcaacgctccgacggcgaacacgatcgctgccgctgagcacggaatcgctcttatggccgccatggctaggaacgtagctcaagctgatgcgtctgttaaggctggagagtggaagaggaacaagtatgtaggtgtttcacttgtgggaaagacccttgcagtgttgggattcgggaaagttgggacggaagttgctcgtcgtgctaagggtcttggtatgcgtgtcattgctcatgatccctatgccccagcagaccgtgcacacgccattggtgttgacttagtgagctttgatgaagcccttgccaccgcggatttcatttctcttcatatgcctcttacgccaacaacatcgaagatactaaacgacgaaacctttgccaaaatgaagaagggagttcgaattgttaatgttgctcgtggaggtgtcatagacgaagatgcgttagtgagagctctggatgctggtattgttgcgcaggctgcacttgatgttttcaccaaagagcctccggctaaagatagcaagctcgtgcagcacgagagggtcactgtgacacctcatcttggagctagtaccatggaggctcaggaaggagttgccatcgaaattgctgaagctgttgttggagctctgaatggagagcttgctgctactgcagtcaatgcacctatggtttctgctgaggttctgaccgagctgaaaccatatgtggtgctagccgagaaactaggaagactggcagtgcaactggtggccggaggaagcggtgtgaaaaacgcgaaaatcacatacgcctcagcaagagccactgatgatcttgacaccagacttctccgagccatgatcaccaagggaatcatcgagccaatctctgacgtatatgtcaatttggtcaacgctgatttcacagccaagcagagaggtctcagactctcagaggaacgtgtgcttttggatggttcaccagagagcccattggagacaataactgttcagctaagcaatgtggagtccaaattcgccagttccctgtctgaatcaggagaggttaaagtggaaggaaaggttaaagacggagtcccgcatttgacaaaggttggatcttttgaggtcgatgtaactcttgaaggtagtatcatactgtgcaggcaggtggatcaacctggtatgatcgggactgtcggaagcatccttggagagtctaatgtcaatgttaacttcatgagcgttgggagaattgcaccgaggaagcaagcgattatggcgattggagtagatgacataccaagcaaagagacactgaagaagattggggaaattccagcggttgaggagttcgttttcctcaagctctagtttggtgtgttgttgattcttgaatcttaaatctcaccggtgaagatttgatgttgtttgttggtttaggcaataatgttattttggctttcatacagttttggtaacgttgagagtagtgtctctttgatgtttcaactttatggtttctattacttgagtgcttctttcttctctg

SEQ ID NO: 7081 - protein, 623 aa, Arabidopsis thaliana
TPPPTIFFSTQFTHTPKAVAMSATAAASSSIAVATNSLRNVTLSSRSPLPSAISVAFPSRGRNTLQRRLVLVSCSTGDGSKPTILVAEKLGDAGIKLLEDVANVDCSYNMTPEELNIKISLCDALIVRSGTKVGREVFESSHGRLKVVGRAGVGIDNVDLSAATEFGCLVVNAPTANTIAAAEHGIALMAAMARNVAQADASVKAGEWKRNKYVGVSLVGKTLAVLGFGKVGTEVARRAKGLGMRVIAHDPYAPADRAHAIGVDLVSFDEALATADFISLHMPLTPTTSKILNDETFAKMKKGVRIVNVARGGVIDEDALVRALDAGIVAQAALDVFTKEPPAKDSKLVQHERVTVTPHLGASTMEAQEGVAIEIAEAVVGALNGELAATAVNAPMVSAEVLTELKPYVVLAEKLGRLAVQLVAGGSGVKNAKITYASARATDDLDTRLLRAMITKGIIEPISDVYVNLVNADFTAKQRGLRLSEERVLLDGSPESPLETITVQLSNVESKFASSLSESGEVKVEGKVKDGVPHLTKVGSFEVDVTLEGSIILCRQVDQPGMIGTVGSILGESNVNVNFMSVGRIAPRKQAIMAIGVDDIPSKETLKKIGEIPAVEEFVFLKL

SEQ ID NO: 7082 - protein, 603 aa, Arabidopsis thaliana [sequence omitted]

SEQ ID NO: 7083 - protein, 514 aa, Arabidopsis thaliana
MTPEELNIKISLCDALIVRSGTKVGREVFESSHGRLKVVGRAGVGIDNVDLSAATEFGCLVVNAPTANTIAAAEHGIALMAAMARNVAQADASVKAGEWKRNKYVGVSLVGKTLAVLGFGKVGTEVARRAKGLGMRVIAHDPYAPADRAHAIGVDLVSFDEALATADFISLHMPLTPTTSKILNDETFAKMKKGVRIVNVARGGVIDEDALVRALDAGIVAQAALDVFTKEPPAKDSKLVQHERVTVTPHLGASTMEAQEGVAIEIAEAVVGALNGELAATAVNAPMVSAEVLTELKPYVVLAEKLGRLAVQLVAGGSGVKNAKITYASARATDDLDTRLLRAMITKGIIEPISDVYVNLVNADFTAKQRGLRLSEERVLLDGSPESPLETITVQLSNVESKFASSLSESGEVKVEGKVKDGVPHLTKVGSFEVDVTLEGSIILCRQVDQPGMIGTVGSILGESNVNVNFMSVGRIAPRKQAIMAIGVDDIPSKETLKKIGEIPAVEEFVFLKL

SEQ ID NO: 7084 - DNA, 1226 bp, Arabidopsis thaliana
gacccacgcgtccgaattcatcaaaggagaagagatcgacaatggcaccttcgtcatcaagcggtttaaccttcaagctacatcctttggtaatcgtcaacatatcggatcactacactagggtcaaaactcagctcaatcctcctgcttcaatctgcgcaagcggccatggctcaaacaacggcgaagcaatgttccagcaaaaccctagggtttacggatgtgtgatcggtgtccagagaggtcgtactgttgagatattcaacagtttcgagcttttatatgatccttctactcaaacccttgatagatctttcctcgagaagaagcaagagctctataagaaggtgttccctgatttctatattctgggatggtactctacgggaagtgatgctgaggaatctgatatgcatatccataaagctttgatggatatcaatgaatctcctgtttatgtgcttttaaaccctgctatcaatcacacacagaaggatcttccagtgactatttatgaaagtgaattgcatgtcattgatggaatcccgcagctaattttcgctcatacaagctacacaatcgagacagttgaagctgaacggatatcagttgatcatgttgcacatcttaaaccatctgacggaggctcagcagcaacccagttggctgctcatcttactggtatacatagtgccatcaagatgcttaatagcagaatcagagtgctttaccaaaatcttgctgcaatgcagaaaggtgataaatcttgtgacaactcagttctgagacaagtatctagcctgctaagaagattgcctgccatggaatcagagagatttcaagataatttcttgatggagtacaacgacaaattactaataacttacctagcgatgattacaaattgttccagcaacatgaacgagatggtcgacaaattcaacaccgcatatgacagaaacactcgaagaggtggaagaactgcattcatgtaaaagatcctttccagcgattctagttctaaagatcttctcttggttcctgaaaccatttttaacattgcctctgtgagaatctataactcagacggcaagactttatcctcttcattgtttctatatctataagaacatctgcttatctatcaaagctcttgtttgatcttgaacaagtttctattgttagtaaaaagattttaaggtttgattctatcagtctctctagtt

SEQ ID NO: 7085 - protein, 330 aa, Arabidopsis thaliana
PTRPNSSKEKRSTMAPSSSSGLTFKLHPLVIVNISDHYTRVKTQLNPPASICASGHGSNNGEAMFQQNPRVYGCVIGVQRGRTVEIFNSFELLYDPSTQTLDRSFLEKKQELYKKVFPDFYILGWYSTGSDAEESDMHIHKALMDINESPVYVLLNPAINHTQKDLPVTIYESELHVIDGIPQLIFAHTSYTIETVEAERISVDHVAHLKPSDGGSAATQLAAHLTGIHSAIKMLNSRIRVLYQNLAAMQKGDKSCDNSVLRQVSSLLRRLPAMESERFQDNFLMEYNDKLLITYLAMITNCSSNMNEMVDKFNTAYDRNTRRGGRTAFM

SEQ ID NO: 7086 - protein, 317 aa, Arabidopsis thaliana
MAPSSSSGLTFKLHPLVIVNISDHYTRVKTQLNPPASICASGHGSNNGEAMFQQNPRVYGCVIGVQRGRTVEIFNSFELLYDPSTQTLDRSFLEKKQELYKKVFPDFYILGWYSTGSDAEESDMHIHKALMDINESPVYVLLNPAINHTQKDLPVTIYESELHVIDGIPQLIFAHTSYTIETVEAERISVDHVAHLKPSDGGSAATQLAAHLTGIHSAIKMLNSRIRVLYQNLAAMQKGDKSCDNSVLRQVSSLLRRLPAMESERFQDNFLMEYNDKLLITYLAMITNCSSNMNEMVDKFNTAYDRNTRRGGRTAFM

SEQ ID NO: 7087 - protein, 267 aa, Arabidopsis thaliana
MFQQNPRVYGCVIGVQRGRTVEIFNSFELLYDPSTQTLDRSFLEKKQELYKKVFPDFYILGWYSTGSDAEESDMHIHKALMDINESPVYVLLNPAINHTQKDLPVTIYESELHVIDGIPQLIFAHTSYTIETVEAERISVDHVAHLKPSDGGSAATQLAAHLTGIHSAIKMLNSRIRVLYQNLAAMQKGDKSCDNSVLRQVSSLLRRLPAMESERFQDNFLMEYNDKLLITYLAMITNCSSNMNEMVDKFNTAYDRNTRRGGRTAFM

SEQ ID NO: 7088 - DNA, 1611 bp, Arabidopsis thaliana
aaattaaaagtcaatcatatcaaatcccaaatcctcccagatgtttttatcatcttcttcttcctgaagatttgatttcattttcctctctttcagatccctattctcatggcttctggatcttactggtgctatagttgtagccgattcgtttgggtttccgattcaatctcttgccctgattgcgacggtggtttcctcgaactcatccaagagcctctcgatttcacaccttccgattccttcaccaccaccaccaccactcaacatcgcagccccactcgcttccctcctccttcttcttcttcctccaccccatccgcttctatgcacgccgataacagtcccactcctaccatcgttactcgtacacgaagcaatcgatctcctaatccagttattgttctccgtggatctgctgctgctccttcttctgatgttgtttccgaaggtttagatcgatctgcttttcagatgtattacgatgatggtactgattctggtcttagacctttaccaccgagtatgactgagtttttgttaggttctggatttgatcgtttgttagatcagatctctcagatcgagcttaacaccaatcggaatcttcgttcttgtgaacatccaccggcttctaaatcggccattgaagctttgcctctgattgaaatcgatccgactcatctcttatcggattctcaatctcattgcgctgtttgcaaagagaatttcgttttgaaatcatctgctcgcgagatgccttgtaatcacatctatcatcctgattgtattcttccttggcttgcgattcgtaactcttgtccggtttgccgtcatgagctaccggcggaggatctcaccgacggaaccggtgctgctttgactgctgttaccgctactgcagaggaagaggaagactcagctgcggggttaacgatttggaggttaccaggtggaggattcgctgtagggagaatccctggtggttggagaggtggagatagaatgatgccggtggtttacacggaggttgatggtggtagactcggtgatgagagacttccgagaagagtagcttggggttcgagaagaggtggaagagatggtggaggtagtagagagagaggtggtggctttgcgggtcggatcatgaggcttttcggatgttttagtggatcatctggatccattgctgctgctgctgctgcatcatccgggtccgggtccagaattcgggttactcgtagaaccaggtcgttctctatgttcagtacggcgtcgtcttcgtcaaggagacgaaattggctagcgtgattactagaattaccaagctctcttctcaggtgaaaactaaacacgaaagaacacactcttcttctgtttaaatttttcctatgttccttattaagtttttgtctatttcagtgtaatgattatattcattcctaaaatttgaatctatgcgagtaaattgatacaaaattaggtgacatagtgtcttcagtggcaaatttaggaggatatgttactgtgagtctgtgactagataagtgagagtgtagatgaattgaagaatgtactctgaaggagattcatagttgttctatttgt

SEQ ID NO: 7089 - protein, 401 aa, Arabidopsis thaliana
MASGSYWCYSCSRFVWVSDSISCPDCDGGFLELIQEPLDFTPSDSFTTTTTTQHRSPTRFPPPSSSSSTPSASMHADNSPTPTIVTRTRSNRSPNPVIVLRGSAAAPSSDVVSEGLDRSAFQMYYDDGTDSGLRPLPPSMTEFLLGSGFDRLLDQISQIELNTNRNLRSCEHPPASKSAIEALPLIEIDPTHLLSDSQSHCAVCKENFVLKSSAREMPCNHIYHPDCILPWLAIRNSCPVCRHELPAEDLTDGTGAALTAVTATAEEEEDSAAGLTIWRLPGGGFAVGRIPGGWRGGDRMMPVVYTEVDGGRLGDERLPRRVAWGSRRGGRDGGGSRERGGGFAGRIMRLFGCFSGSSGSIAAAAAASSGSGSRIRVTRRTRSFSMFSTASSSSRRRNWLA

SEQ ID NO: 7090 - protein, 328 aa, Arabidopsis thaliana
MHADNSPTPTIVTRTRSNRSPNPVIVLRGSAAAPSSDVVSEGLDRSAFQMYYDDGTDSGLRPLPPSMTEFLLGSGFDRLLDQISQIELNTNRNLRSCEHPPASKSAIEALPLIEIDPTHLLSDSQSHCAVCKENFVLKSSAREMPCNHIYHPDCILPWLAIRNSCPVCRHELPAEDLTDGTGAALTAVTATAEEEEDSAAGLTIWRLPGGGFAVGRIPGGWRGGDRMMPVVYTEVDGGRLGDERLPRRVAWGSRRGGRDGGGSRERGGGFAGRIMRLFGCFSGSSGSIAAAAAASSGSGSRIRVTRRTRSFSMFSTASSSSRRRNWLA

SEQ ID NO: 7091 - protein, 279 aa, Arabidopsis thaliana
MYYDDGTDSGLRPLPPSMTEFLLGSGFDRLLDQISQIELNTNRNLRSCEHPPASKSAIEALPLIEIDPTHLLSDSQSHCAVCKENFVLKSSAREMPCNHIYHPDCILPWLAIRNSCPVCRHELPAEDLTDGTGAALTAVTATAEEEEDSAAGLTIWRLPGGGFAVGRIPGGWRGGDRMMPVVYTEVDGGRLGDERLPRRVAWGSRRGGRDGGGSRERGGGFAGRIMRLFGCFSGSSGSIAAAAAASSGSGSRIRVTRRTRSFSMFSTASSSSRRRNWLA

SEQ ID NO: 7092 - DNA, 1420 bp, Arabidopsis thaliana
aaagattcttggtctccgatccagtcacctgaagattctcggagcttcttttgaccacacactttcaatggcggatgctgtgaacgctcaaactccatcgctctccgagcaatatcatttggagaaagaagtgaagcaagacacaagtgcaaagcctgttgaagtgaaagaggtggcaccagaagttactacacaagctgaagaggttaagacggagcaagctaaggaagaatctcctgttgaggaagcggtttctgtagttgaagagaagtctgaatctgctcctgaatcaacggaagtggcttctgaggctcctgctgcagcggaagacaatgctgaagagactcctgctgctgctgaagaaaataatgacgaaaacgctagtgaagaagttgctgaagaaacccctgatgagatcaagcttgagacagctcctgcttgatctcatcaggggtttcttttttttttttttttttgaattttttcaccaagtgttcgttcacggcattgcttgtcctccagtatgagtatctccggtgctgcagttggttcaggcagaaatttaagaagagcggtagagtttgggaaaactcatgtggttaggcctaaagggaaacatcaagcaactattgtctggttacatgggcttggggacaatggctcgagctggtcccagcttttggagacccttccccttccaaatatcaaatggatttgcccgactgctccttctcaaccaataagtttatttggtggttttccctccacagcttggtttgatgttgtggacatcaatgaagatggacctgatgatatggaaggattggatgtggctgctgcacatgttgcaaatctgttgtcgaatgagcctgctgacattaaattaggtgttggaggattcagcatgggtgcggcgacatctctatattctgcaacttgttttgctctcggtaaatatggaaatggcaatccataccctatcaatttaagcgcaatcataggcttaagcggctggcttccttgtgcaaagacattggctggcaaactagaagaggaacagatcaagaaccgagctgcatcgttgcccattgttgtctgtcatggaaaagctgatgatgtggtaccgttcaagtttggggagaaatcttcacaggctttgctttcaaatgggtttaagaaggtgaccttcaaaccttacagtgcacttggtcaccacacaatcccacaggagttggatgagttgtgcgcatggttgacatccacgctcagcctcgaaggttgatacttcctatgatgtagctttctgatgaaaacccttcaactcttgagagtttgattgaattggatgtttcaggatttcacaatgttttcattggaatatttgtgtaagacacattcgtctagtagcaaatcttctcct

SEQ ID NO: 7093 - protein, 252 aa, Arabidopsis thaliana
MSISGAAVGSGRNLRRAVEFGKTHVVRPKGKHQATIVWLHGLGDNGSSWSQLLETLPLPNIKWICPTAPSQPISLFGGFPSTAWFDVVDINEDGPDDMEGLDVAAAHVANLLSNEPADIKLGVGGFSMGAATSLYSATCFALGKYGNGNPYPINLSAIIGLSGWLPCAKTLAGKLEEEQIKNRAASLPIVVCHGKADDVVPFKFGEKSSQALLSNGFKKVTFKPYSALGHHTIPQELDELCAWLTSTLSLEG

SEQ ID NO: 7094 - protein, 155 aa, Arabidopsis thaliana
MEGLDVAAAHVANLLSNEPADIKLGVGGFSMGAATSLYSATCFALGKYGNGNPYPINLSAIIGLSGWLPCAKTLAGKLEEEQIKNRAASLPIVVCHGKADDVVPFKFGEKSSQALLSNGFKKVTFKPYSALGHHTIPQELDELCAWLTSTLSLEG

SEQ ID NO: 7095 - protein, 146 aa, Arabidopsis thaliana
KILGLRSSHLKILGASFDHTLSMADAVNAQTPSLSEQYHLEKEVKQDTSAKPVEVKEVAPEVTTQAEEVKTEQAKEESPVEEAVSVVEEKSESAPESTEVASEAPAAAEDNAEETPAAAEENNDENASEEVAEETPDEIKLETAPA

SEQ ID NO: 7096 - DNA, 2043 bp, Arabidopsis thaliana
acccatttctcttccgtaatcgttaaattatgacataacgtctttgttttggtcgtatcgttcacgcaaaacttcacgattcagatctgtgtgtggcagtatttgaatcgaagcataggatcaatccggtaagcagccgtaacttgcaatcgatcgccgatctggatccgttaaaggatccctcgcagtccttgaagatatcggcgtcctccgccaccgggaacaggatccgttaccgttcaccttccgcttctgagctattggagtctggactagccaccggattatccggtaaccattctcctacttccgactctcatcagggacttgtgtctatcgacggaggaaaaatgacggcgaagcgagcgatcggacggcacgaatcccttgctgacaaggtccatcgacatcgtggtcttctacttgtgatttcgatccccattgtgttgatagctcttgtgcttctgttaatgccggggacgtcgacgtccgtctctgtcatcgagtacacgatgaaaaaccacgagggaggttccaattcgaggggtccgaagaattacgctgtgatttttgatgctggaagttctggaagccgtgtgcatgtttactgtttcgatcagaatttggatcttgttcctttggagaatgagctcgagctcttcttacagctaaaaccgggtttaagtgcatatcctaatgatcctcggcaatcagcaaactctttagtaactcttctggacaaagcagaagcttccgttccccgtgagttgcgtccaaagactcctgtcagagttggggcaactgcaggtttgagagctttgggtcaccaagcctctgaaaacattttgcaagcggttagggagctcctcaaaggtagaagtaggctgaagactgaggcaaatgcagtgactgttctggatggtactcaggaaggatcttatcagtgggtgacaattaattacttgctaaggactttgggaaagccgtactcggacacagttggagtggttgatcttggaggggggtcggttcaaatggcatatgctataccagaggaagatgcggcaactgcaccaaaaccagtagaaggcgaggattcttatgtcagagaaatgtatttgaagggacgaaagtatttcctctatgttcatagctacctacattacgggttactggctgctcgggctgagattttgaaagtttctgaggactctaacaacccctgtatcgcgactggatatgctggtacctacaaatatggaggaaaagcgtttaaagctgcagcttctccatccggtgcaagtctagatgagtgccggcgagtagctattaacgcactcaaagtcaataattcattgtgtacacacatgaaatgcacttttggtggagtatggaatggtggaggcggtggtggccagaagaaaatgtttgttgcatcatttttcttcgatcgagccgcagaggctggttttgttgacccaaaccaacctgtggctgaggttcgaccacttgactttgagaaagcggccaacaaagcttgtaacatgagaatggaagaagggaaatcgaagttcccacgtgtggaggaagataatcttccttacttgtgcttggatcttgtttaccaatatacacttctcgtcgatggattcggattgaagccatcacagacaataacgttagtgaagaaggtgaaatacggagattacgccgtggaagctgcgtggccactaggaagcgcaatagaagcagtatcctcaccatgaggaaggcaattttgggtatttgcactaaacctcttattcttttagtttctcccaaaatcaccccaagctttttttgccttacctcaaattttttttaccgtcaacatcttccttactatcaatttttgttacaataatcatctagagaaaagagtttcaattcttaatatacctatacttttatttttcttgttaatctaaactgcttaccgcatacgtaacctctgtttctttcttataaaatatttccttgcgtttttttttcttttgacgactg

SEQ ID NO: 7097 - protein, 471 aa, Arabidopsis thaliana
MTAKRAIGRHESLADKVHRHRGLLLVISIPIVLIALVLLLMPGTSTSVSVIEYTMKNHEGGSNSRGPKNYAVIFDAGSSGSRVHVYCFDQNLDLVPLENELELFLQLKPGLSAYPNDPRQSANSLVTLLDKAEASVPRELRPKTPVRVGATAGLRALGHQASENILQAVRELLKGRSRLKTEANAVTVLDGTQEGSYQWVTINYLLRTLGKPYSDTVGVVDLGGGSVQMAYAIPEEDAATAPKPVEGEDSYVREMYLKGRKYFLYVHSYLHYGLLAARAEILKVSEDSNNPCIATGYAGTYKYGGKAFKAAASPSGASLDECRRVAINALKVNNSLCTHMKCTFGGVWNGGGGGGQKKMFVASFFFDRAAEAGFVDPNQPVAEVRPLDFEKAANKACNMRMEEGKSKFPRVEEDNLPYLCLDLVYQYTLLVDGFGLKPSQTITLVKKVKYGDYAVEAAWPLGSAIEAVSSP

SEQ ID NO: 7098 - protein, 431 aa, Arabidopsis thaliana
MPGTSTSVSVIEYTMKNHEGGSNSRGPKNYAVIFDAGSSGSRVHVYCFDQNLDLVPLENELELFLQLKPGLSAYPNDPRQSANSLVTLLDKAEASVPRELRPKTPVRVGATAGLRALGHQASENILQAVRELLKGRSRLKTEANAVTVLDGTQEGSYQWVTINYLLRTLGKPYSDTVGVVDLGGGSVQMAYAIPEEDAATAPKPVEGEDSYVREMYLKGRKYFLYVHSYLHYGLLAARAEILKVSEDSNNPCIATGYAGTYKYGGKAFKAAASPSGASLDECRRVAINALKVNNSLCTHMKCTFGGVWNGGGGGGQKKMFVASFFFDRAAEAGFVDPNQPVAEVRPLDFEKAANKACNMRMEEGKSKFPRVEEDNLPYLCLDLVYQYTLLVDGFGLKPSQTITLVKKVKYGDYAVEAAWPLGSAIEAVSSP

SEQ ID NO: 7099 - protein, 417 aa, Arabidopsis thaliana
MKNHEGGSNSRGPKNYAVIFDAGSSGSRVHVYCFDQNLDLVPLENELELFLQLKPGLSAYPNDPRQSANSLVTLLDKAEASVPRELRPKTPVRVGATAGLRALGHQASENILQAVRELLKGRSRLKTEANAVTVLDGTQEGSYQWVTINYLLRTLGKPYSDTVGVVDLGGGSVQMAYAIPEEDAATAPKPVEGEDSYVREMYLKGRKYFLYVHSYLHYGLLAARAEILKVSEDSNNPCIATGYAGTYKYGGKAFKAAASPSGASLDECRRVAINALKVNNSLCTHMKCTFGGVWNGGGGGGQKKMFVASFFFDRAAEAGFVDPNQPVAEVRPLDFEKAANKACNMRMEEGKSKFPRVEEDNLPYLCLDLVYQYTLLVDGFGLKPSQTITLVKKVKYGDYAVEAAWPLGSAIEAVSSP

SEQ ID NO: 7100 - DNA, 1936 bp, Arabidopsis thaliana
gagactgaagatattttaactttttgatttttgaagcacagagtgctgatgatcggtgaagcctaaggaaggattttagaaagcaactgagaacaaaccttatccgttacagtggcaatggaggacaaatcgccgacgttaccgatttctgaagatttatcccggaaaataatctctcttgccgccggtgaagctcatacgatcgctctgaccggcgatggatgtgtgtactcatggggaagaggaatgtttgggcgtcttggtacgggtaaggaatcggacgagcttgttccagttcgagtcgagttcgagttcccaaatcaagcggaaggagaacggattcgaatcattggtgttgctgctggtgcttatcacagtctcgctgtctcagatgatggctcggtttggtgttggggttataacatttatggtcaacttggttttgatggggaaaactccttggcaccatgtttggtcaaaaatttgtttgaacaagaagcatctagttcttctctaaatgattcaggtagagaagctagatcagatttaaaggttggtactgttaaggccggctccatgatgtctcttgccattgataatgtcggaggtctttggatgtggggcaatgttcctccacaagacagtgaacctgaccctcgtttgtcttttactagcatcccgattccatttcctatactcgacttccatggccggacggttttgaaggtagcatgtggggatgaacacgttgttgccctcgttggtcccggggatatccacaaagacaacagttatgatgtatccgtgctttattcttggggaaataaccatcatggccagttagggcttggagatagcgagagccgagcaaggcctcagattgtggagacatttaaccagaactcgggttttacagtctacaacatagcttgtggtgctcatcacacagctcttctcacctacaggaaggagacaccgaaaggaccaagcatttgctggacgttcggctttggagaaaatggtcagcttgggcatagaagtaacaagagctcatcgcttccagagccagtttcagatctcccagaacacgcttacttagtttctgtagactgtggattattccacacaagcgtggtgtcctctgagggatatgtgtggtcgtggggaatggaaagaggattaggattatgccccgatgtcaacttcacagaggtggaagcaggagatgatagtgtaccaagaaagatttcaggtgggtcgtcaagattccgtgacccggttcaggtttcttgcggggcagcacatacagttcttgtggcagatggcggttacaagctgtggtcttggggaagaggaagaaatagagtgctcggaactgggagtgttagcgactgttatgtccctactctcgtcttctggccgaatgagctgaaacctgagaaagaagaagtacccgatgatggaaaaagcgcatcaactgaggagattaaacggctagaatcaaaactaatggtgatggaaagatatgcaagcatacttcatggatccatatttggaaaaccttttaatgaagaggaagatatcccatattcattacgggtttctgggtattttgatatgggaaaagagtggggagagatgctggagagtgctgataagagtcagctgatgaggcttcaagctttctatgaagacatgattggtagagttaaggacaaggtgttgcagagaaggattcaggagattatgaaagattgtcttcagtcttcagcccctaaatactagtatcacttgttgtgtgctaatagcaataccttcacttgagctgacaatagtttcgtcttcaaatcttgtgttttgtgcaaatgatgagataaaggatttggttttggtgttaaatgtattaatggccaagtattatgtcgttttttctttc

SEQ ID NO: 7101 - protein, 555 aa, Arabidopsis thaliana
MEDKSPTLPISEDLSRKIISLAAGEAHTIALTGDGCVYSWGRGMFGRLGTGKESDELVPVRVEFEFPNQAEGERIRIIGVAAGAYHSLAVSDDGSVWCWGYNIYGQLGFDGENSLAPCLVKNLFEQEASSSSLNDSGREARSDLKVGTVKAGSMMSLAIDNVGGLWMWGNVPPQDSEPDPRLSFTSIPIPFPILDFHGRTVLKVACGDEHVVALVGPGDIHKDNSYDVSVLYSWGNNHHGQLGLGDSESRARPQIVETFNQNSGFTVYNIACGAHHTALLTYRKETPKGPSICWTFGFGENGQLGHRSNKSSSLPEPVSDLPEHAYLVSVDCGLFHTSVVSSEGYVWSWGMERGLGLCPDVNFTEVEAGDDSVPRKISGGSSRFRDPVQVSCGAAHTVLVADGGYKLWSWGRGRNRVLGTGSVSDCYVPTLVFWPNELKPEKEEVPDDGKSASTEEIKRLESKLMVMERYASILHGSIFGKPFNEEEDIPYSLRVSGYFDMGKEWGEMLESADKSQLMRLQAFYEDMIGRVKDKVLQRRIQEIMKDCLQSSAPKY

SEQ ID NO: 7102 - protein, 512 aa, Arabidopsis thaliana
MFGRLGTGKESDELVPVRVEFEFPNQAEGERIRIIGVAAGAYHSLAVSDDGSVWCWGYNIYGQLGFDGENSLAPCLVKNLFEQEASSSSLNDSGREARSDLKVGTVKAGSMMSLAIDNVGGLWMWGNVPPQDSEPDPRLSFTSIPIPFPILDFHGRTVLKVACGDEHVVALVGPGDIHKDNSYDVSVLYSWGNNHHGQLGLGDSESRARPQIVETFNQNSGFTVYNIACGAHHTALLTYRKETPKGPSICWTFGFGENGQLGHRSNKSSSLPEPVSDLPEHAYLVSVDCGLFHTSVVSSEGYVWSWGMERGLGLCPDVNFTEVEAGDDSVPRKISGGSSRFRDPVQVSCGAAHTVLVADGGYKLWSWGRGRNRVLGTGSVSDCYVPTLVFWPNELKPEKEEVPDDGKSASTEEIKRLESKLMVMERYASILHGSIFGKPFNEEEDIPYSLRVSGYFDMGKEWGEMLESADKSQLMRLQAFYEDMIGRVKDKVLQRRIQEIMKDCLQSSAPKY

SEQ ID NO: 7103 - protein, 402 aa, Arabidopsis thaliana
MMSLAIDNVGGLWMWGNVPPQDSEPDPRLSFTSIPIPFPILDFHGRTVLKVACGDEHVVALVGPGDIHKDNSYDVSVLYSWGNNHHGQLGLGDSESRARPQIVETFNQNSGFTVYNIACGAHHTALLTYRKETPKGPSICWTFGFGENGQLGHRSNKSSSLPEPVSDLPEHAYLVSVDCGLFHTSVVSSEGYVWSWGMERGLGLCPDVNFTEVEAGDDSVPRKISGGSSRFRDPVQVSCGAAHTVLVADGGYKLWSWGRGRNRVLGTGSVSDCYVPTLVFWPNELKPEKEEVPDDGKSASTEEIKRLESKLMVMERYASILHGSIFGKPFNEEEDIPYSLRVSGYFDMGKEWGEMLESADKSQLMRLQAFYEDMIGRVKDKVLQRRIQEIMKDCLQSSAPKY

SEQ ID NO: 7104 - DNA, 1393 bp, Arabidopsis thaliana
  misc_feature (1389)..(1390): n is a, c, g, or t
cccaaatacaaaactcccgaaaatctctctcttttattctttctttcttcttcttcttccccaacttgaaaaaaaaaagtaaacacgaaaatgtctccgtcttggctccgcccaaccgccgatcacaatcatcctccaccgcaaccgccgtcgcaatcaccgtcccctctatcttccggtgatccgaatctcacaacatgtctctaccaaacagatcacggcgtcttctatctaacatggtcccgaactttcttaggaggccactctgtgaatctcttcctccattcacaagattactacaaccactcttcgccactctctttctcctccgctgatctctctctttcctccgccgtctctttccatctcaacttaaacacattagctttctggaaaaaacgtggatccagattcgtttctcccaaaatccaagtcttctgggacttaagcaaagccaaattcgactctggatccgaacctagatccggattctacatcgctgtagttgttgacggagagatgggactattagtcggagattcagtcaaagaagcttacgctcgtgctaaatcggcgaaacctccgacgaatccgcaagctcttctgttgaggaaagagcacgtgtttggagctagggttttcacaacgaaagcgagatttggagggaagaacagagagatttctattgattgtcgtgttgatgaagacgctaagctctgttttagcgttgattcgaaacaggttctgcagatcaagagacttagatggaaatttagaggaaatgagaaagttgaaatcgatggagttcatgttcagatctcttgggatgtatacaattggttgtttcagagtaaaagttccggtgacggcggaggaggaggaggacacgccgtgtttatgtttagattcgagagtgatccagaagcagaggaggtttgtgaaacgaagaggaaagaagaagaagatgagaaaaatcgaaacggtatcgttttatggaagccgaagaagcaatgtggaaatagttttgggattaaagggattgttgagtggaggaagatgaggaagagatttgttaagagtaagagaagttcttcgtcgtcttcgatttcgatgtcgtcggcttcttcggcgtgtagctcgtcggttatggaatgggctagtagtgctgatgaggcggagtacggcggaggaggttgttctggttccggttccggcaatggtcttggattctcattactggtttacgcttggattaagtgaaaatattctttttcgagggaaataagaagttactgttttcggttaatttttttttttaatatgttcttctttcttttttatattaattttccctctgaaatcacgtacggacgagaagatataaaaatnntgg

SEQ ID NO: 7105 - protein, 389 aa, Arabidopsis thaliana
MSPSWLRPTADHNHPPPQPPSQSPSPLSSGDPNLTTCLYQTDHGVFYLTWSRTFLGGHSVNLFLHSQDYYNHSSPLSFSSADLSLSSAVSFHLNLNTLAFWKKRGSRFVSPKIQVFWDLSKAKFDSGSEPRSGFYIAVVVDGEMGLLVGDSVKEAYARAKSAKPPTNPQALLLRKEHVFGARVFTTKARFGGKNREISIDCRVDEDAKLCFSVDSKQVLQIKRLRWKFRGNEKVEIDGVHVQISWDVYNWLFQSKSSGDGGGGGGHAVFMFRFESDPEAEEVCETKRKEEEDEKNRNGIVLWKPKKQCGNSFGIKGIVEWRKMRKRFVKSKRSSSSSSISMSSASSACSSSVMEWASSADEAEYGGGGCSGSGSGNGLGFSLLVYAWIK

SEQ ID NO: 7106 - protein, 246 aa, Arabidopsis thaliana
MGLLVGDSVKEAYARAKSAKPPTNPQALLLRKEHVFGARVFTTKARFGGKNREISIDCRVDEDAKLCFSVDSKQVLQIKRLRWKFRGNEKVEIDGVHVQISWDVYNWLFQSKSSGDGGGGGGHAVFMFRFESDPEAEEVCETKRKEEEDEKNRNGIVLWKPKKQCGNSFGIKGIVEWRKMRKRFVKSKRSSSSSSISMSSASSACSSSVMEWASSADEAEYGGGGCSGSGSGNGLGFSLLVYAWIK

SEQ ID NO: 7107 - DNA, 853 bp, Arabidopsis thaliana
aaaatctgaaacacacttccatggcttcgcttcctgttcaattcacgaggaatcaaatctcttcaccgtttttctctgtaaacctccgccgtgagcctagatctttagtaacagtacactgctccgcaggagaaaacagagaaaatggtgaaggtgtaaagaagagtctctttcctcttaaggagcttggatctatcgcttgcgcagctctctgtgcttgcactcttacaatagcttctcctgttattgctgctaaccagagacttcctccgttatcaacagaaccagaccggtgtgaaaaagcatttgttggtaacacgataggtcaagcaaatggtgtctatgacaaaccactggatcttaggttctgtgattacacaaatgatcaaactaatctcaaaggcaagactctctctgcagccttgatggttggggctaagtttgatggtgcagatatgactgaagttgttatgtcaaaagcttatgctgtagaagcaagctttaaaggggtgaatttcactaatgctgttatcgatcgggtgaatttcgggaaatcgaatctgaaaggtgcggtgtttaggaacacggtattatccggttcgacatttgaggaggcaaatttggaggatgtggtctttgaggacactatcattggttacatagaccttcagaaaatatgtaggaatgagtccataaacgaagaaggaagacttgtgttgggatgccgatagagaagagagaaggttttgatttgaatgtattatatatgtaagatttaagatttgttgacacaaagatgtatgaaactaagtaaaggttgaaggataggagtcaagagagttatgagaggttg

SEQ ID NO: 7108 - protein, 242 aa, Arabidopsis thaliana
NLKHTSMASLPVQFTRNQISSPFFSVNLRREPRSLVTVHCSAGENRENGEGVKKSLFPLKELGSIACAALCACTLTIASPVIAANQRLPPLSTEPDRCEKAFVGNTIGQANGVYDKPLDLRFCDYTNDQTNLKGKTLSAALMVGAKFDGADMTEVVMSKAYAVEASFKGVNFTNAVIDRVNFGKSNLKGAVFRNTVLSGSTFEEANLEDVVFEDTIIGYIDLQKICRNESINEEGRLVLGCR

SEQ ID NO: 7109 - protein, 236 aa, Arabidopsis thaliana
MASLPVQFTRNQISSPFFSVNLRREPRSLVTVHCSAGENRENGEGVKKSLFPLKELGSIACAALCACTLTIASPVIAANQRLPPLSTEPDRCEKAFVGNTIGQANGVYDKPLDLRFCDYTNDQTNLKGKTLSAALMVGAKFDGADMTEVVMSKAYAVEASFKGVNFTNAVIDRVNFGKSNLKGAVFRNTVLSGSTFEEANLEDVVFEDTIIGYIDLQKICRNESINEEGRLVLGCR

SEQ ID NO: 7110 - DNA, 946 bp, Arabidopsis thaliana
gaagaagaacagaagccgaaaccctcaccggcgatggctcttatcagcacacggcgaacattatcgacactcctaaacaaaaccctctcttcctctacttcatattcttcttcatttcctacgctctcttctcgttctcgattcgccatgcctctaattgaaaaggtttcctcttcccgaaccagcctgggcccgtgttacatctcgacccgacccaagacatccgggtccggatactcgccgctgaatgatccttcgccgaattggagcaaccgtccgccgaaggagacgattcttcttgatgggtgcgattatgagcactggctcatcgtcatggagttcactgatcctaaacctactgaagaagagatgatcaattcttatgtcaaaaccttaacttccgtccttggctgtgaggaagaggccaagaagaagatttactctgtttgtacttcgacctacactggctttggtgctttgatctctgaagagctctcttgcaaagtcaaagcattgcctggtgttctctgggtgctgccggattcctatctcgatgtaccaaacaaagactacggaggtgacttgtacgttgaaggaaaggtcatacccagaccacagtacaggttcacggaacagcgtcatactagaccccgtcctaggccaaggtatgataggcgccgtgagacaatgcaggttgagaggagagagccatccatgggtcttcattctccagtaaatccgggagagttcaacaagcccagtgcttaatattaaacatgaacaatgcattatgtaatggatggagtttattaggattatggtatttacatgcttgtcttaaacactcatgtgagagacttttcagtttttatccacttaatcaaacaaatcaatcatcattcatgtctctaatgatgactaaacactactctaaacagaacaaatt

SEQ ID NO: 7111 - protein, 255 aa, Arabidopsis thaliana
EEEQKPKPSPAMALISTRRTLSTLLNKTLSSSTSYSSSFPTLSSRSRFAMPLIEKVSSSRTSLGPCYISTRPKTSGSGYSPLNDPSPNWSNRPPKETILLDGCDYEHWLIVMEFTDPKPTEEEMINSYVKTLTSVLGCEEEAKKKIYSVCTSTYTGFGALISEELSCKVKALPGVLWVLPDSYLDVPNKDYGGDLYVEGKVIPRPQYRFTEQRHTRPRPRPRYDRRRETMQVERREPSMGLHSPVNPGEFNKPSA

SEQ ID NO: 7112 - protein, 244 aa, Arabidopsis thaliana
MALISTRRTLSTLLNKTLSSSTSYSSSFPTLSSRSRFAMPLIEKVSSSRTSLGPCYISTRPKTSGSGYSPLNDPSPNWSNRPPKETILLDGCDYEHWLIVMEFTDPKPTEEEMINSYVKTLTSVLGCEEEAKKKIYSVCTSTYTGFGALISEELSCKVKALPGVLWVLPDSYLDVPNKDYGGDLYVEGKVIPRPQYRFTEQRHTRPRPRPRYDRRRETMQVERREPSMGLHSPVNPGEFNKPSA

SEQ ID NO: 7113 - protein, 206 aa, Arabidopsis thaliana
MPLIEKVSSSRTSLGPCYISTRPKTSGSGYSPLNDPSPNWSNRPPKETILLDGCDYEHWLIVMEFTDPKPTEEEMINSYVKTLTSVLGCEEEAKKKIYSVCTSTYTGFGALISEELSCKVKALPGVLWVLPDSYLDVPNKDYGGDLYVEGKVIPRPQYRFTEQRHTRPRPRPRYDRRRETMQVERREPSMGLHSPVNPGEFNKPSA

SEQ ID NO: 7114 - DNA, 1110 bp, Arabidopsis thaliana
atccatctttctcagttctcactatctggacactttcgatttctgaagttgagagacgactatggcgacgaacaatggtgatgtcttgatgttggaggcgacgccggaggctgcgaggccctgggctagtgcggcgaatgcagaagttatcgatgcgcttccttatatagacgacgactatggcaatccattgattaagtcggaggtagaccgtttggtggaggaagagatgcgtcggagctctaagaagccagctgactttctaaaggacttgcctcctcttccgaagttcgattttaagaactgccctgttcttggcaaagagtatgagcgtgttagagctgggaagcctcctgtgcggatagatttcgaatcccgatacaaacttgaaatgccacctgccaataagaggaatgatgatgctgcctggaagcagtatcttcagaagaatcaacggtcattgcaacagaagctgattgagcttgagaatttggaattgatgtcaaaacttggccccgagctttggagacagaacaaccatcgccttgaagtatttttgaccagaatgcaaagactagcacaggagcagaatgaggaaattgaaaaagtaaatcgggaaaggaagtatcatcagcaaaccacatcatacgagctcaatgctctatctcaagaatggagacagctctgtgttaagaatatggagattcagtctgcttgtgccatgcttgagacacagatcgattcgttcaagaaagaagctgctgaaaggggttggaacttagaagagaaactagagaacgtcgagccacttcaaatgcaatgaggcgcctcccttgctcttaagtaacataggttcagagcaaaacaactgttggtcagtttggtttgagttgtgggttaagagaatcaaagacgagacagtttcagttatttgccagttttgtgaaatcctctgctctcctgtcaagtggtgtgtgggacaagtaattgcttttgaaagtatcgaaactctttaatttatcgagcataacgtttacgatttgaaatacaatataaatttttgtatttagaaacatatattctctctctatattaagatgttgcatcccc

SEQ ID NO: 7115 - protein, 253 aa, Arabidopsis thaliana
MATNNGDVLMLEATPEAARPWASAANAEVIDALPYIDDDYGNPLIKSEVDRLVEEEMRRSSKKPADFLKDLPPLPKFDFKNCPVLGKEYERVRAGKPPVRIDFESRYKLEMPPANKRNDDAAWKQYLQKNQRSLQQKLIELENLELMSKLGPELWRQNNHRLEVFLTRMQRLAQEQNEEIEKVNRERKYHQQTTSYELNALSQEWRQLCVKNMEIQSACAMLETQIDSFKKEAAERGWNLEEKLENVEPLQMQ

SEQ ID NO: 7116 - protein, 244 aa, Arabidopsis thaliana
MLEATPEAARPWASAANAEVIDALPYIDDDYGNPLIKSEVDRLVEEEMRRSSKKPADFLKDLPPLPKFDFKNCPVLGKEYERVRAGKPPVRIDFESRYKLEMPPANKRNDDAAWKQYLQKNQRSLQQKLIELENLELMSKLGPELWRQNNHRLEVFLTRMQRLAQEQNEEIEKVNRERKYHQQTTSYELNALSQEWRQLCVKNMEIQSACAMLETQIDSFKKEAAERGWNLEEKLENVEPLQMQ

SEQ ID NO: 7117 - protein, 197 aa, Arabidopsis thaliana
MRRSSKKPADFLKDLPPLPKFDFKNCPVLGKEYERVRAGKPPVRIDFESRYKLEMPPANKRNDDAAWKQYLQKNQRSLQQKLIELENLELMSKLGPELWRQNNHRLEVFLTRMQRLAQEQNEEIEKVNRERKYHQQTTSYELNALSQEWRQLCVKNMEIQSACAMLETQIDSFKKEAAERGWNLEEKLENVEPLQMQ

SEQ ID NO: 7118 - DNA, 1398 bp, Arabidopsis thaliana
tccccccgctcttcttagtaacctcctaagccatgaaatagtcgcaaaggccctttcttcgtcttcgtttctaattgctttcgacgacaatcgatcgtagagaagtctacctcgtagacatctctctcacaaatccaattcaattaccattgtttgttattatctgatgtcgaatatgcaattctctcgtggttttaatccctttgttatcctcttctgtctcgccgtggttgcaccaattatatcggctgatgtcgctatcttgagaacggactattaccaaaaaacatgtcctgatttccacaaaattgtgcgtgaagccgttacaaccaaacaagtccaacaaccaacaactgcggccgggaccctccgtctctttttccatgattgtttccttgaaggttgtgatgcatctgtcttgatcgcgaccaactcgttcaacaaagcggaacgcgatgatgatctcaatgattccctcccgggagatgcttttgacatcgtcacccgcatcaagacagctctcgagttgtcttgtcctggtgtagtatcatgcgcggatattctagcgcaggctacacgtgaccttgtcacaatggtaggaggaccttactttgacgtaaagcttggtcgtaaagacggattcgaatccaaagctcataaagtcagaggaaatgtcccaatggcaaaccagactgttcctgacatccacgggatattcaagaaaaacggttttagtcttcgcgagatggtagcattaagcggggctcacaccattggattctctcactgcaaagagttttccgacagactctacggatcccgtgctgataaagaaatcaacccgcgattcgcagccgctctcaaagatctttgcaaaaaccacaccgtggatgatacaatcgccgcgtttaacgacgtgatgactccaggaaagttcgacaacatgtacttcaagaacctaaagcgagggctagggcttttagcgtctgaccacatccttattaaagacaacagcaccaagccgtttgtggatctatacgcaactaacgagacagcattctttgaggatttcgctcgtgcgatggagaaacttggcacggtcggcgtcaagggcgataaagatggagaagtgagacgtaggtgcgaccacttcaacaatctcaacgtttaagaagaaaaagaaaacacaaaaccatataaatataatattatttctgttttatttgcggaggagttgaggagaagaaaggtttggttggtatatatgtttaataactacctattataagcaagatcttgtaacaattcaagttgggatgtttaatttttccatgaaaattcaaactgttgtattgaaagtatatagataaaataacatattatatatcgaacaattgt

SEQ ID NO: 7119 - protein, 334 aa, Arabidopsis thaliana
MSNMQFSRGFNPFVILFCLAVVAPIISADVAILRTDYYQKTCPDFHKIVREAVTTKQVQQPTTAAGTLRLFFHDCFLEGCDASVLIATNSFNKAERDDDLNDSLPGDAFDIVTRIKTALELSCPGVVSCADILAQATRDLVTMVGGPYFDVKLGRKDGFESKAHKVRGNVPMANQTVPDIHGIFKKNGFSLREMVALSGAHTIGFSHCKEFSDRLYGSRADKEINPRFAAALKDLCKNHTVDDTIAAFNDVMTPGKFDNMYFKNLKRGLGLLASDHILIKDNSTKPFVDLYATNETAFFEDFARAMEKLGTVGVKGDKDGEVRRRCDHFNNLNV

SEQ ID NO: 7120 - protein, 331 aa, Arabidopsis thaliana
MQFSRGFNPFVILFCLAVVAPIISADVAILRTDYYQKTCPDFHKIVREAVTTKQVQQPTTAAGTLRLFFHDCFLEGCDASVLIATNSFNKAERDDDLNDSLPGDAFDIVTRIKTALELSCPGVVSCADILAQATRDLVTMVGGPYFDVKLGRKDGFESKAHKVRGNVPMANQTVPDIHGIFKKNGFSLREMVALSGAHTIGFSHCKEFSDRLYGSRADKEINPRFAAALKDLCKNHTVDDTIAAFNDVMTPGKFDNMYFKNLKRGLGLLASDHILIKDNSTKPFVDLYATNETAFFEDFARAMEKLGTVGVKGDKDGEVRRRCDHFNNLNV

SEQ ID NO: 7121 - protein, 192 aa, Arabidopsis thaliana
MVGGPYFDVKLGRKDGFESKAHKVRGNVPMANQTVPDIHGIFKKNGFSLREMVALSGAHTIGFSHCKEFSDRLYGSRADKEINPRFAAALKDLCKNHTVDDTIAAFNDVMTPGKFDNMYFKNLKRGLGLLASDHILIKDNSTKPFVDLYATNETAFFEDFARAMEKLGTVGVKGDKDGEVRRRCDHFNNLNV

SEQ ID NO: 7122 - DNA, 927 bp, Arabidopsis thaliana
agtcctatcataaccctttctttatctctgagcaattttatcattacaaatatcttcgtaatgtattaatcaatagaaagagaagcagccatgaattttgtcgaagctattacaaaggatatgaaaatgattccatggctggactgttgagaaagttggaaactttcgcatcttaatccttgaaagttgaaagctttagtgtcaaaagacaagtttcatatctcaaacgtcgtcacgtggcagagtcaaaggtcaaacctttttctcccaaaaactttcctaaattctccaaaatcacactctcagcgaaggagaagaaaaaactagattggcgagaaaatgtcttccgttgcagctatggttttcagaggagctagatcgcttctagctcctgcttctcgagccacctcttctttggtttcagctggatccactaagaaacccgcggcgaaaccaaaggccaaggctaagcctaagccaaaggcgaaatcagactctccggcaaagaagacaccgaggtctaccggaatctttaaggtgactcctgtgtctccagttctcgctcagttccttggtaccggtgaaacatcacgtaccgacgccatcaaggggatttggacctacatcaagtcccacgatcttcagaacccagctgacaagagggagattttctgcgatgagacactgaagctaatctttgaagggaaagacaaagttgggtttctggagatttcaaaactcttgtccccgcactttgtgaagactgcttgaccaaataactagcttagtttggaaactcctgacgatttggttttttagttagctctttcaagtgatcttatcttgttaatgttgtcaatatcttttaactcttctcgttcctgttaccaaacatggtttttgactaatgaagaaatgttttggcat

SEQ ID NO: 7123 - protein, 143 aa, Arabidopsis thaliana
MSSVAAMVFRGARSLLAPASRATSSLVSAGSTKKPAAKPKAKAKPKPKAKSDSPAKKTPRSTGIFKVTPVSPVLAQFLGTGETSRTDAIKGIWTYIKSHDLQNPADKREIFCDETLKLIFEGKDKVGFLEISKLLSPHFVKTA

SEQ ID NO: 7124 - protein, 137 aa, Arabidopsis thaliana
MVFRGARSLLAPASRATSSLVSAGSTKKPAAKPKAKAKPKPKAKSDSPAKKTPRSTGIFKVTPVSPVLAQFLGTGETSRTDAIKGIWTYIKSHDLQNPADKREIFCDETLKLIFEGKDKVGFLEISKLLSPHFVKTA

SEQ ID NO: 7125 - DNA, 1634 bp, Arabidopsis thaliana
aaaattttcgaaaatgattgggtggctaagatttcttatccactagaaaatccagtgagtcccgttaactctcttctcttctctagtcttgtcttctattatgcaaaaggtcttcttggccatggatacttgtgctctagtaatccatcagtctctgtctcgcatcaaactttctcctcccaaatcttcttcttcttcttcttctgctttctcccctgaatccttaccgatcagacggatcgagctgtgtttccgaggagctatatgtgccgccgtacaaagaaactacgaagaaacgacctcctccgtggaagaggtagaggaagatgatgagtcatcatcatcgtacggagaagtgaacaagatcattggaagccgaacggcgggggaaggagccatggagtaccttatcgagtggaaggacggccattctccgtcgtgggttccatcgagctacatcgcagcagacgtagtgtcggagtacgagacaccctggtggacggcagctagaaaagccgacgagcaggccctgtcacagctcctggaggaccgagacgtcgatgccgtggacgaaaacggccggacggctctgcttttcgtggcaggtctggggtcggacaagtgcgtaaggcttctggcggaggctggagccgatctcgaccaccgagacatgaggggaggcttgacggcgctgcacatggcggctggttacgtgaggccggaggtggtggaggcgctggtggagctgggagctgatattgaagtggaagacgagagagggttaacggcgttggaactagcgagggagattctgaagacgacgccgaaggggaatccgatgcagttcgggaggagaattgggttagagaaagtgatcaacgtcctggaaggacaagtgttcgagtacgccgaggtggatgagatcgtagagaaacgagggaaaggcaaagacgttgaatatctggtcagatggaaggacggtggagattgcgagtgggtgaaaggtgtacacgtggcggaagatgtggctaaggactacgaggatgggctggagtacgctgtagcggagagtgtgatcgggaagagggtgggagacgatgggaagaccatcgagtatcttgtcaaatggactgatatgtctgatgccacttgggagcctcaggacaatgtcgactctactcttgttctactctaccaacaacaacaaccaatgaatgaatgattgattttgatgattacattcttctcaatttgcttctttctcatatgtgttggttcatctgaccggttcggttggtacgtaccggtacattttcattttcttttaagatgtgatcttgatggtttttggccttttggggacactatttgattttatatccatgctttgaattttgcttccctttttggggagattcatgatgctggctgacttgctctttatcgtcccaggtttagagaatacatcgtcttaggcttttctttatctcaaaacccatttacatttaattgggcctatatatttcatataggaagagagtacatgtaaacccaatacacaacttttatttatgggtccgtttcttgtaacatttgttggtgataaaaacaacttctgaagagtgataatgtac

SEQ ID NO: 7126 - protein, 373 aa, Arabidopsis thaliana
MQKVFLAMDTCALVIHQSLSRIKLSPPKSSSSSSSAFSPESLPIRRIELCFRGAICAAVQRNYEETTSSVEEVEEDDESSSSYGEVNKIIGSRTAGEGAMEYLIEWKDGHSPSWVPSSYIAADVVSEYETPWWTAARKADEQALSQLLEDRDVDAVDENGRTALLFVAGLGSDKCVRLLAEAGADLDHRDMRGGLTALHMAAGYVRPEVVEALVELGADIEVEDERGLTALELAREILKTTPKGNPMQFGRRIGLEKVINVLEGQVFEYAEVDEIVEKRGKGKDVEYLVRWKDGGDCEWVKGVHVAEDVAKDYEDGLEYAVAESVIGKRVGDDGKTIEYLVKWTDMSDATWEPQDNVDSTLVLLYQQQQPMNE

SEQ ID NO: 7127 - protein, 366 aa, Arabidopsis thaliana
MDTCALVIHQSLSRIKLSPPKSSSSSSSAFSPESLPIRRIELCFRGAICAAVQRNYEETTSSVEEVEEDDESSSSYGEVNKIIGSRTAGEGAMEYLIEWKDGHSPSWVPSSYIAADVVSEYETPWWTAARKADEQALSQLLEDRDVDAVDENGRTALLFVAGLGSDKCVRLLAEAGADLDHRDMRGGLTALHMAAGYVRPEVVEALVELGADIEVEDERGLTALELAREILKTTPKGNPMQFGRRIGLEKVINVLEGQVFEYAEVDEIVEKRGKGKDVEYLVRWKDGGDCEWVKGVHVAEDVAKDYEDGLEYAVAESVIGKRVGDDGKTIEYLVKWTDMSDATWEPQDNVDSTLVLLYQQQQPMNE

SEQ ID NO: 7128 - protein, 274 aa, Arabidopsis thaliana
MEYLIEWKDGHSPSWVPSSYIAADVVSEYETPWWTAARKADEQALSQLLEDRDVDAVDENGRTALLFVAGLGSDKCVRLLAEAGADLDHRDMRGGLTALHMAAGYVRPEVVEALVELGADIEVEDERGLTALELAREILKTTPKGNPMQFGRRIGLEKVINVLEGQVFEYAEVDEIVEKRGKGKDVEYLVRWKDGGDCEWVKGVHVAEDVAKDYEDGLEYAVAESVIGKRVGDDGKTIEYLVKWTDMSDATWEPQDNVDSTLVLLYQQQQPMNE

SEQ ID NO: 7129 - DNA, 1283 bp, Arabidopsis thaliana
attcaccacttaaagccctcaaaatctcagagaacgctcgctgatcaaatccgtcgtccttcaaccgtcgcctcctccgtcatgacaattgagtgcgttaatcccgaaggtcttcgattcaaccaaatgaaaagctcctctcatcaaaccctagaaacgaggatgaggccgattttgatgaagggacatgaacgtccattgacgttcctgaggtacaacagaaatggtgatctgcttttctcctgcgccaaagaccacactcccacagtctggtttgccgataacggcgagcgtcttggcacttaccgtggccacagtggtgctgtttggtgctgtgatatctccagagactcgtctagattgatcactggtagtgctgatcagactgcaaagctgtgggatgtgaaatctggcaaagaattgttcactttcaagtttggtgcccctgcaaggtctgtggatttctctgttgatgatcatcttgcagtgattaccactgatcacttcgtgggaacttcctctgctattcatgtcaaacgcattgcagaagatcccgaagaccaggttggtgattctgtgcttgtccttcaaagtcctgatggaaagaagaagatcaatagagctgtttggggtcccctgaaccaaaccattgttagtggtggtgaagatgctgctatcagaatctgggatgcagagactggaaaattgcttaagcaatcagatgaggaagtgggtcacaaggaggccattacatccctctgcaaagcagctgatgactctcacttccttacaggttcacatgacaaaactgcaaagctttgggacatgagaacgctgactcttattaagacttacaccactgtggtgcctgtaaatgctgtcgccatgtctccacttctcaaccatgttgtgcttggaggtggtcaagatgcatcagctgtgactaccactgatcatcgtgctgggaagtttgaagctaagttttacgacacgattctgcaagaggaaattggtggcgtgaaaggtcattttggacctattaatgctttggcattcagtcctgatgggaagagtttctctagtggaggtgaagacggctacgtgagactgcatcattttgactccaattacttcaacatcaagatttagattctttgaacatgtctttccattttttcatcattccacataatattttctctctttttaacattttcagaattgatgtactaccaaattaccaatatactactttgatgataaagcttgttgtttgtcttttc

SEQ ID NO: 7130 - protein, 382 aa, Arabidopsis thaliana
IHHLKPSKSQRTLADQIRRPSTVASSVMTIECVNPEGLRFNQMKSSSHQTLETRMRPILMKGHERPLTFLRYNRNGDLLFSCAKDHTPTVWFADNGERLGTYRGHSGAVWCCDISRDSSRLITGSADQTAKLWDVKSGKELFTFKFGAPARSVDFSVDDHLAVITTDHFVGTSSAIHVKRIAEDPEDQVGDSVLVLQSPDGKKKINRAVWGPLNQTIVSGGEDAAIRIWDAETGKLLKQSDEEVGHKEAITSLCKAADDSHFLTGSHDKTAKLWDMRTLTLIKTYTTVVPVNAVAMSPLLNHVVLGGGQDASAVTTTDHRAGKFEAKFYDTILQEEIGGVKGHFGPINALAFSPDGKSFSSGGEDGYVRLHHFDSNYFNIKI

SEQ ID NO: 7131 - protein, 355 aa, Arabidopsis thaliana
MTIECVNPEGLRFNQMKSSSHQTLETRMRPILMKGHERPLTFLRYNRNGDLLFSCAKDHTPTVWFADNGERLGTYRGHSGAVWCCDISRDSSRLITGSADQTAKLWDVKSGKELFTFKFGAPARSVDFSVDDHLAVITTDHFVGTSSAIHVKRIAEDPEDQVGDSVLVLQSPDGKKKINRAVWGPLNQTIVSGGEDAAIRIWDAETGKLLKQSDEEVGHKEAITSLCKAADDSHFLTGSHDKTAKLWDMRTLTLIKTYTTVVPVNAVAMSPLLNHVVLGGGQDASAVTTTDHRAGKFEAKFYDTILQEEIGGVKGHFGPINALAFSPDGKSFSSGGEDGYVRLHHFDSNYFNIKI

SEQ ID NO: 7132 - protein, 340 aa, Arabidopsis thaliana
MKSSSHQTLETRMRPILMKGHERPLTFLRYNRNGDLLFSCAKDHTPTVWFADNGERLGTYRGHSGAVWCCDISRDSSRLITGSADQTAKLWDVKSGKELFTFKFGAPARSVDFSVDDHLAVITTDHFVGTSSAIHVKRIAEDPEDQVGDSVLVLQSPDGKKKINRAVWGPLNQTIVSGGEDAAIRIWDAETGKLLKQSDEEVGHKEAITSLCKAADDSHFLTGSHDKTAKLWDMRTLTLIKTYTTVVPVNAVAMSPLLNHVVLGGGQDASAVTTTDHRAGKFEAKFYDTILQEEIGGVKGHFGPINALAFSPDGKSFSSGGEDGYVRLHHFDSNYFNIKI

SEQ ID NO: 7133 - DNA, 1055 bp, Arabidopsis thaliana
ataaaggcatttcagctccaccgtaggaaactttctcttgaaagaaacccacagcaacaaacagagaaaatgtgtggcggtgctattatttccgattatgcccctctcgtcaccaaggccaagggccgtaaactcacggctgaggaactctggtcagagctcgatgcttccgccgccgacgacttctggggtttctattccacctccaaactccatcccaccaaccaagttaacgtgaaagaggaggcagtgaagaaggagcaggcaacagagccggggaaacggaggaagaggaagaatgtttatagagggatacgtaagcgtccatggggaaaatgggcggctgagattcgagatccacgaaaaggtgttagagtttggcttggtacgttcaacacggcggaggaagctgccatggcttatgatgttgcggccaagcagatccgtggtgataaagccaagctcaacttcccagatctgcaccatcctcctcctcctaattatactcctccgccgtcatcgccacgatcaaccgatcagcctccggcgaagaaggtctgcgttgtctctcagagtgagagcgagttaagtcagccgagtttcccggtggagtgtataggatttggaaatggggacgagtttcagaacctgagttacggatttgagccggattatgatctgaaacagcagatatcgagcttggaatcgttccttgagctggacggtaacacggcggagcaaccgagtcagcttgatgagtccgtttccgaggtggatatgtggatgcttgatgatgtcattgcgtcgtatgagtaaaagaaaaaaaataagtttaaaaaaagttaaataaagtctgtaatatatatgtaaccgccgttacttttaaaaggtttttaccgtcgcattggactgctgatgatgtctgttgtgtaatgtgtagaatgtgaccaaatggacgttatattacggtttgtggtattattagtttcttagatggaaaaacttacatgtgtaaataagatttgtaatgtaagacgaagtacttataacttctt

SEQ ID NO: 7134 - protein, 271 aa, Arabidopsis thaliana
IKAFQLHRRKLSLERNPQQQTEKMCGGAIISDYAPLVTKAKGRKLTAEELWSELDASAADDFWGFYSTSKLHPTNQVNVKEEAVKKEQATEPGKRRKRKNVYRGIRKRPWGKWAAEIRDPRKGVRVWLGTFNTAEEAAMAYDVAAKQIRGDKAKLNFPDLHHPPPPNYTPPPSSPRSTDQPPAKKVCVVSQSESELSQPSFPVECIGFGNGDEFQNLSYGFEPDYDLKQQISSLESFLELDGNTAEQPSQLDESVSEVDMWMLDDVIASYE

SEQ ID NO: 7135 - protein, 248 aa, Arabidopsis thaliana
MCGGAIISDYAPLVTKAKGRKLTAEELWSELDASAADDFWGFYSTSKLHPTNQVNVKEEAVKKEQATEPGKRRKRKNVYRGIRKRPWGKWAAEIRDPRKGVRVWLGTFNTAEEAAMAYDVAAKQIRGDKAKLNFPDLHHPPPPNYTPPPSSPRSTDQPPAKKVCVVSQSESELSQPSFPVECIGFGNGDEFQNLSYGFEPDYDLKQQISSLESFLELDGNTAEQPSQLDESVSEVDMWMLDDVIASYE

SEQ ID NO: 7136 - DNA, 1486 bp, Arabidopsis thaliana
tgaacatcgtcatctctaacaatggcgccttctccgatcatcttctccgttcttcttctcttcatcttctcactctcatcatctgctcaaacacctttccgtcccaaagctctccttctcccagtaacaaaagaccaatctaccctccagtacacaaccgtcatcaaccaacgcacacctctcgtccccgcttccgtcgtcttcgacctcggtggtcgagaactctgggtcgactgcgacaaaggctacgtctcctccacttaccagtctcctcgctgcaactccgccgtctgctcacgtgccggctccacaagctgcggcacatgcttctcccctccgagacctggctgtagtaacaacacttgcggcggcattccggataacaccgttaccggtaccgcaacttccggcgaatttgctttagacgttgtgtctatccagtccactaacggatccaatccgggcagggtcgttaaaatcccaaatttgatcttcgattgtggagcaacgtttcttcttaaaggactcgctaaaggaaccgttggtatggcgggaatgggacgtcacaacatcggtttaccgtcgcaattcgccgccgcgtttagcttccaccgtaaattcgccgtctgtctaacttccggtaaaggcgtcgccttcttcggcaacggaccttacgttttccttcccggaatccagatctcaagtctccaaacgacgccccttctcatcaatccggtcagcactgcttctgcgttttcacaaggtgagaaatcctcagagtactttatcggcgtgacggcgattcaaatcgtcgagaaaacagttccgatcaatccaacgctattgaagattaacgcaagtaccggtatcggaggaaccaaaatcagctccgtcaatccttacacggtgttggagtcatcgatctacaatgcttttacgtcggagttcgttaaacaagcagcggcgaggagcatcaagagagtagcgtcggtgaaaccgttcggcgcgtgtttcagcacgaagaacgtcggcgtgacgcgcctaggatacgccgtgccggagattgagcttgtgcttcatagcaaagacgtcgtttggaggatatttggagccaactcgatggtgagtgtcagtgatgacgtcatctgtttgggtttcgttgacggaggagtcaacgcaagaacctctgttgtgattggagggtttcagttggaggataatttgatcgaatttgatttggcgagtaacaaatttgggtttagttccacgttattgggccgtcaaactaactgcgccaacttcaatttcacttccactgcttgattaaattagttgatccgttttctttttttaaaactgttttttagtggttattatattatgtttgatgtgattaataaagagccaatggaatcattatttggcatttttttaatcaatttatttgaataaattatgtaatgagtgaattttatttgatacatct

SEQ ID NO: 7137 - protein, 433 aa, Arabidopsis thaliana
MAPSPIIFSVLLLFIFSLSSSAQTPFRPKALLLPVTKDQSTLQYTTVINQRTPLVPASVVFDLGGRELWVDCDKGYVSSTYQSPRCNSAVCSRAGSTSCGTCFSPPRPGCSNNTCGGIPDNTVTGTATSGEFALDVVSIQSTNGSNPGRVVKIPNLIFDCGATFLLKGLAKGTVGMAGMGRHNIGLPSQFAAAFSFHRKFAVCLTSGKGVAFFGNGPYVFLPGIQISSLQTTPLLINPVSTASAFSQGEKSSEYFIGVTAIQIVEKTVPINPTLLKINASTGIGGTKISSVNPYTVLESSIYNAFTSEFVKQAAARSIKRVASVKPFGACFSTKNVGVTRLGYAVPEIELVLHSKDVVWRIFGANSMVSVSDDVICLGFVDGGVNARTSVVIGGFQLEDNLIEFDLASNKFGFSSTLLGRQTNCANFNFTSTA

SEQ ID NO: 7138 - protein, 258 aa, Arabidopsis thaliana
MAGMGRHNIGLPSQFAAAFSFHRKFAVCLTSGKGVAFFGNGPYVFLPGIQISSLQTTPLLINPVSTASAFSQGEKSSEYFIGVTAIQIVEKTVPINPTLLKINASTGIGGTKISSVNPYTVLESSIYNAFTSEFVKQAAARSIKRVASVKPFGACFSTKNVGVTRLGYAVPEIELVLHSKDVVWRIFGANSMVSVSDDVICLGFVDGGVNARTSVVIGGFQLEDNLIEFDLASNKFGFSSTLLGRQTNCANFNFTSTA

SEQ ID NO: 7139 - protein, 255 aa, Arabidopsis thaliana
MGRHNIGLPSQFAAAFSFHRKFAVCLTSGKGVAFFGNGPYVFLPGIQISSLQTTPLLINPVSTASAFSQGEKSSEYFIGVTAIQIVEKTVPINPTLLKINASTGIGGTKISSVNPYTVLESSIYNAFTSEFVKQAAARSIKRVASVKPFGACFSTKNVGVTRLGYAVPEIELVLHSKDVVWRIFGANSMVSVSDDVICLGFVDGGVNARTSVVIGGFQLEDNLIEFDLASNKFGFSSTLLGRQTNCANFNFTSTA

SEQ ID NO: 7140 - DNA, 1358 bp, Arabidopsis thaliana
cattattacaccaccgttggcctccgacgacggctcaagcctatcttcgtcgccggcttctccgatggttaccaatcgcgtagacgtcttctggcacgaaggaatgctccgacacgacgccgtagaaggcgtcttcgacactggatacgaccctggattcctcgacgtattggagaagcacccggagaacgccgatcgcgtcaggaacatgctttcgattctccgacgcggtcccatcgctcctcatgtcaattggtttaccggtcttccagcaatcgtttcggagcttctaatgtttcacacttcagagtacattgagaagctagtggaggcagataaatcaggagaaaggtgtgaaattgccgcaggtactttcatgagcccaggctcgtgggaagctgctcttcttgcagctggaacaactctttcagcaatgcaacatattcttgattgccatgggaaaattgcatatgctctggtacgcccaccaggtcaccactcacagcctactcaggctgatgggtattgcttcctcaacaacgctgctcttgctgtcaagctggcattgaattcgggttcttgttcccgagttgcggttattgacatcgatgtacattatggaaatggcacagctgaagggttttatacatctgataaggttcttacggtgtcactccatatgaaccatggatcatggggatcgtcccacccgcagaaagggtcgattgatgaacttggtgaagacgtgggattgggttacaatctgaatgtccctttaccgaatggcacgggtgaccggggatatgaatatgccatgaatgagctggtggttcctgcagttagaaggtttggacccgatatggttgttctcgttgttggtcaagactctagcgcttttgatccaaacgggagacaaagcctgacaatgaatggatacagaaggattgggcagataatgaggggagttgcagaggagcacagccatggaaggttgcttatggtgcaagaaggcgggtatcatgtaacatatgcagcttactgcctccacgccatgctcgaaggggtgctgaagattccagaaccgcatctatctgatccgatcgcttattatcccgaagaagaagctaatgctgttgctgctgtggagtcaatcaaaacatatcacaccgaatttgttccatttctcagaggaacttgaaaatgggacgtatgaatgagtttatgttattcctcgttgtcttgtgaccttttggaacacagatccaaatcaatcaggtcaaaccgtatatatcaaaatacttgttgatcaaactatcttttgtatgaaaacttattcacacgatccgactttgtttttc

SEQ ID NO: 7141 - protein, 398 aa, Arabidopsis thaliana
IITPPLASDDGSSLSSSPASPMVTNRVDVFWHEGMLRHDAVEGVFDTGYDPGFLDVLEKHPENADRVRNMLSILRRGPIAPHVNWFTGLPAIVSELLMFHTSEYIEKLVEADKSGERCEIAAGTFMSPGSWEAALLAAGTTLSAMQHILDCHGKIAYALVRPPGHHSQPTQADGYCFLNNAALAVKLALNSGSCSRVAVIDIDVHYGNGTAEGFYTSDKVLTVSLHMNHGSWGSSHPQKGSIDELGEDVGLGYNLNVPLPNGTGDRGYEYAMNELVVPAVRRFGPDMVVLVVGQDSSAFDPNGRQSLTMNGYRRIGQIMRGVAEEHSHGRLLMVQEGGYHVTYAAYCLHAMLEGVLKIPEPHLSDPIAYYPEEEANAVAAVESIKTYHTEFVPFLRGT

SEQ ID NO: 7142 - protein, 377 aa, Arabidopsis thaliana
MVTNRVDVFWHEGMLRHDAVEGVFDTGYDPGFLDVLEKHPENADRVRNMLSILRRGPIAPHVNWFTGLPAIVSELLMFHTSEYIEKLVEADKSGERCEIAAGTFMSPGSWEAALLAAGTTLSAMQHILDCHGKIAYALVRPPGHHSQPTQADGYCFLNNAALAVKLALNSGSCSRVAVIDIDVHYGNGTAEGFYTSDKVLTVSLHMNHGSWGSSHPQKGSIDELGEDVGLGYNLNVPLPNGTGDRGYEYAMNELVVPAVRRFGPDMVVLVVGQDSSAFDPNGRQSLTMNGYRRIGQIMRGVAEEHSHGRLLMVQEGGYHVTYAAYCLHAMLEGVLKIPEPHLSDPIAYYPEEEANAVAAVESIKTYHTEFVPFLRGT

SEQ ID NO: 7143 - protein, 364 aa, Arabidopsis thaliana
MLRHDAVEGVFDTGYDPGFLDVLEKHPENADRVRNMLSILRRGPIAPHVNWFTGLPAIVSELLMFHTSEYIEKLVEADKSGERCEIAAGTFMSPGSWEAALLAAGTTLSAMQHILDCHGKIAYALVRPPGHHSQPTQADGYCFLNNAALAVKLALNSGSCSRVAVIDIDVHYGNGTAEGFYTSDKVLTVSLHMNHGSWGSSHPQKGSIDELGEDVGLGYNLNVPLPNGTGDRGYEYAMNELVVPAVRRFGPDMVVLVVGQDSSAFDPNGRQSLTMNGYRRIGQIMRGVAEEHSHGRLLMVQEGGYHVTYAAYCLHAMLEGVLKIPEPHLSDPIAYYPEEEANAVAAVESIKTYHTEFVPFLRGT

SEQ ID NO: 7144 - DNA, 816 bp, Arabidopsis thaliana
aatcttttcatcgttttcgtgtgaagtttaaagaagtttgggacccgtaaattctagaagctctggagatttcttgttcaccactataaatacatcatccgagtcaccagctttgctcagaagtagaaatcgaactcgccggaaaatcgtaattagctatctcagcattccaaacatctctttcgctttcgaaatcaaatcgagaatgtcgcttattccaagcttcttcggcaacaacaggcgaagcaacagcatcttcgacccgttctcactcgacgtttgggatccattcaaggaactgcaattcccgtcgtcgctctccggagaaacatcggcgataacgaacgcacgtgtggactggaaagagacggcggaggcgcacgtgttcaaggccgatctgccggggatgaagaaagaggaggttaaagtggagatagaggacgacagtgtgctcaagatcagtggagagagacacgtggagaaagaggagaagcaggacacgtggcatcgtgtggagaggtcgagcgggcaattctcgaggaagtttaagctgccggagaatgtgaagatggatcaagtcaaggcttccatggagaacggagttctgactgtgacggtgcctaaagtggaagaggctaagaagaaggctcaagttaagtctattgatatctctggctaaagccaattagcttatgggtttcatgtttatgcgtaaagactcttctgattatggctcttgatttgaatatggctctgtgttttggtaatgatgtattataactgttaatcctaataattaagcaaggcctttatatt

SEQ ID NO: 7145 - protein, 157 aa, Arabidopsis thaliana
MSLIPSFFGNNRRSNSIFDPFSLDVWDPFKELQFPSSLSGETSAITNARVDWKETAEAHVFKADLPGMKKEEVKVEIEDDSVLKISGERHVEKEEKQDTWHRVERSSGQFSRKFKLPENVKMDQVKASMENGVLTVTVPKVEEAKKKAQVKSIDISG

SEQ ID NO: 7146 - protein, 90 aa, Arabidopsis thaliana
MKKEEVKVEIEDDSVLKISGERHVEKEEKQDTWHRVERSSGQFSRKFKLPENVKMDQVKASMENGVLTVTVPKVEEAKKKAQVKSIDISG

SEQ ID NO: 7147 - DNA, 1076 bp, Arabidopsis thaliana
gaggggaaatcttcgcgacgactgtgagagtttgtttcgcgaacattctctgagtttctctcgacgcgacggcgattgcgaatgtcttctccttctgattctcgtctctctgtgtctccgggataagtaatcgaagatgaatatgattcagcgattcatgcaatctatggcaaagacgcgtggcctctgtcatccagattgcgtaaaagcaagtagtgagcaagaagattacgatgcgtctcagctcagtatttggtggataatgctgggaaggaagacgaccagggagaaatggatgaaccaagctctcagttcactatcgaaaacttgcatcagtatatggtggaaaatgtctggaataagaggtaagatgtgcagggagagggagcaaccactcactgtcaaagactgccttgaatgtgctttcaagaaagggctaccgagaagagaacattgggcacatgtgggatgtacattcaaggctcccccatttgcttgtcacataccccgcgtgcccatgaaaggagaagtgattgagactaagagtttggatgaagcgtttaagctgttgattaaacaaccggtgggtgcaagactccatgtgttcagtccagaccttgataatgttggagagggagtttacgagggcctgtctagcctgtctcgtaaggaatcacgctatgttggacttagggatgtcatcatagttgcagtgaataagtccgagggaaaaactgttgctactgtgaagatatgttacaagaagaagacttcatttgtcaaagtgtgtttgagccgtatgtttgtccagcttggtggtggcgaggagtctcaggtgaaagagccaacaggtctgcttgttgacttctgtatcccacgcttatctatcaactaaacaagagctgagatcttggaaagtatctcctagttgtggaacctctctatgttggtctcattttaagaatgttttatcagacttattttctgttttatgtattttgaaaaccgtatgcttgttgtgaaactctgtttgtggtctcaagttaagtttgttttatgagactttaatctgtgcc

SEQ ID NO: 7148 - protein, 252 aa, Arabidopsis thaliana
MNMIQRFMQSMAKTRGLCHPDCVKASSEQEDYDASQLSIWWIMLGRKTTREKWMNQALSSLSKTCISIWWKMSGIRGKMCREREQPLTVKDCLECAFKKGLPRREHWAHVGCTFKAPPFACHIPRVPMKGEVIETKSLDEAFKLLIKQPVGARLHVFSPDLDNVGEGVYEGLSSLSRKESRYVGLRDVIIVAVNKSEGKTVATVKICYKKKTSFVKVCLSRMFVQLGGGEESQVKEPTGLLVDFCIPRLSIN

SEQ ID NO: 7149 - protein, 250 aa, Arabidopsis thaliana
MIQRFMQSMAKTRGLCHPDCVKASSEQEDYDASQLSIWWIMLGRKTTREKWMNQALSSLSKTCISIWWKMSGIRGKMCREREQPLTVKDCLECAFKKGLPRREHWAHVGCTFKAPPFACHIPRVPMKGEVIETKSLDEAFKLLIKQPVGARLHVFSPDLDNVGEGVYEGLSSLSRKESRYVGLRDVIIVAVNKSEGKTVATVKICYKKKTSFVKVCLSRMFVQLGGGEESQVKEPTGLLVDFCIPRLSIN

SEQ ID NO: 7150 - protein, 245 aa, Arabidopsis thaliana
MQSMAKTRGLCHPDCVKASSEQEDYDASQLSIWWIMLGRKTTREKWMNQALSSLSKTCISIWWKMSGIRGKMCREREQPLTVKDCLECAFKKGLPRREHWAHVGCTFKAPPFACHIPRVPMKGEVIETKSLDEAFKLLIKQPVGARLHVFSPDLDNVGEGVYEGLSSLSRKESRYVGLRDVIIVAVNKSEGKTVATVKICYKKKTSFVKVCLSRMFVQLGGGEESQVKEPTGLLVDFCIPRLSIN

SEQ ID NO: 7151 - DNA, 800 bp, Arabidopsis thaliana
gctcacactcctaatccctcccatttttcaaaccactctctctttctctttctctaagtctttaacaatggcgcgccttctcttccgtcttctccaagaagccaattctacatctccggctgaagcttctccgcctttcaactccgacctcgtcctcatccttgcggttcttctttgtgcactgacatgtatcatcggcttaatagccgtctctcgatgcgcttggctccgccgtatcgcctcaagaaacagatcggatcaaactcatccaccgccggtagctgcagccaacaaaggattgaaaaagaaagtcctccggtcgttaccgaaactcacctactcgccggattctccgccggcggagaaactcgtggagtgtgctatctgtttaacggaattcgccgccggagacgagcttagggtgttgccgcagtgtggacatggtttccacgtatcgtgtatcgacacgtggcttggatcacactcttcttgtccttcttgccgtcaaatcttggtggttaccaggtgtcataaatgtggcgggttacccggtagctcaagttcaggacccgaacccgatacccgaatcaaacaacgtgaagatggtcctgataacttgccttgattcttttctttagacatatcccattttattttttataaagggaattcgattaaacaaagatataatattaattaaaaagtgttctttatcattttaaaggataatgttactctgtcatgtatatatttaattatctattgtaaatctatcatggaatggaaactttatgtcattc

SEQ ID NO: 7152 - protein, 207 aa, Arabidopsis thaliana
LTLLIPPIFQTTLSFSFSKSLTMARLLFRLLQEANSTSPAEASPPFNSDLVLILAVLLCALTCIIGLIAVSRCAWLRRIASRNRSDQTHPPPVAAANKGLKKKVLRSLPKLTYSPDSPPAEKLVECAICLTEFAAGDELRVLPQCGHGFHVSCIDTWLGSHSSCPSCRQILVVTRCHKCGGLPGSSSSGPEPDTRIKQREDGPDNLP

SEQ ID NO: 7153 - protein, 185 aa, Arabidopsis thaliana
MARLLFRLLQEANSTSPAEASPPFNSDLVLILAVLLCALTCIIGLIAVSRCAWLRRIASRNRSDQTHPPPVAAANKGLKKKVLRSLPKLTYSPDSPPAEKLVECAICLTEFAAGDELRVLPQCGHGFHVSCIDTWLGSHSSCPSCRQILVVTRCHKCGGLPGSSSSGPEPDTRIKQREDGPDNLP

SEQ ID NO: 7154 - DNA, 1068 bp, Arabidopsis thaliana
aatctaatcactttctgcttcttcgcctacttcattcacatcttctttcctcttcctcctttgggttacttcttcgaatctcctgttgtttgcagaaatggagactggtgctggtataggtttgtaccctttgcatcgctgcaaaaccatttacctagtgagacatgctcaggggattcacaatgtggatggggagaagaattataaggcttacatgtctcatgactactttgatgctgagttgacccagcttggctggaaacaggtagatagtttgcgtaagcatgttcattccagtggacttcacaagaagatcgaactggtcatttcgtctccactgatgagaaccttgcaaactgctgttggtgtttttggtggagagggctacacggatatgagtgatgtactacctctaatggtagcaaatgcaggaaatagcagccgtgcagctatatcgagtttaaactgcccaccagttattacagaggagtcctgcagagagcatttgggagtgcatccatgtgatcagaggagaagtatcagcgactatcagtttcttttccctgcagttgacttttcactgatagaaagcgaggaagacaagttatggaaggctgatgttagagaaacgattgaagaacttgcagctagaggaaaaaagttcctgaactggctatggacacggaaagaaaaagagatagctattgtgacacacagtggtttcttgtttcacacattgaatgcactacaaaacgagtgtcatccagatgttaagaaggaaatttgcggccactttgctaattgtgagctacgttcaatggtcatcgtcgatagaagtatgttgggatcggacagttcggtgactgattatccaggaaagattccaaaggggattgatcttccaagtgatgctgttgtagatgataacaacatcaaagttgagtgattctttatgatggacactgcattgtcttcaacttttctatttatctatacacaaacaccttctttgctgtatgcaactctcttattagtattactattgactatcgagttaaagatcttact

SEQ ID NO: 7155 - protein, 282 aa, Arabidopsis thaliana
METGAGIGLYPLHRCKTIYLVRHAQGIHNVDGEKNYKAYMSHDYFDAELTQLGWKQVDSLRKHVHSSGLHKKIELVISSPLMRTLQTAVGVFGGEGYTDMSDVLPLMVANAGNSSRAAISSLNCPPVITEESCREHLGVHPCDQRRSISDYQFLFPAVDFSLIESEEDKLWKADVRETIEELAARGKKFLNWLWTRKEKEIAIVTHSGFLFHTLNALQNECHPDVKKEICGHFANCELRSMVIVDRSMLGSDSSVTDYPGKIPKGIDLPSDAVVDDNNIKVE

SEQ ID NO: 7156 - protein, 243 aa, Arabidopsis thaliana
MSHDYFDAELTQLGWKQVDSLRKHVHSSGLHKKIELVISSPLMRTLQTAVGVFGGEGYTDMSDVLPLMVANAGNSSRAAISSLNCPPVITEESCREHLGVHPCDQRRSISDYQFLFPAVDFSLIESEEDKLWKADVRETIEELAARGKKFLNWLWTRKEKEIAIVTHSGFLFHTLNALQNECHPDVKKEICGHFANCELRSMVIVDRSMLGSDSSVTDYPGKIPKGIDLPSDAVVDDNNIKVE

SEQ ID NO: 7157 - protein, 201 aa, Arabidopsis thaliana
MRTLQTAVGVFGGEGYTDMSDVLPLMVANAGNSSRAAISSLNCPPVITEESCREHLGVHPCDQRRSISDYQFLFPAVDFSLIESEEDKLWKADVRETIEELAARGKKFLNWLWTRKEKEIAIVTHSGFLFHTLNALQNECHPDVKKEICGHFANCELRSMVIVDRSMLGSDSSVTDYPGKIPKGIDLPSDAVVDDNNIKVE

SEQ ID NO: 7158 - DNA, 1854 bp, Arabidopsis thaliana
ggtggcgttaagtcgttaactgcgtctgatctactcgtagcttcttcgttcttcagcatttgatcggagtagtgacctttttgattgacagatggaagctctgtcttctcttacgttcaagggttctcttccagaagccatatttgaagccaaagggaagaagaagctttttgttgtctacatttctggagaggatgaagagtcggataagttgaacagattgacttggactgatgcatcggtggcagattcgttgtcgaagtattgtattttagtgcatatccaagctggaagtgttgacgccacaaacttctctgcaatatacccatattcatctgttccttgtatagctgccattggattcagtggtacacaagtttggagaaccgaaggatttatcactgctgaagaccttgcatccagtttagagaaagcgtggttaggacttcatatccaggaaacaactgcaagtatcttttcagcagcacttgcatcacagaactcagagacacctgtttctagtgcttcgagtgttgtcttgcctcccggaagtgttcctttagatgcagcggttgcatctccatcgacggcttctagtgttcaaccctcagagacaaagtcaacggtaacatctgcatcaacaacagaaaacaatgatggcacagttgcagttaagggcaaagaatctgctgaacccagtaatttgtgtgatactactaaaaaccagccagcaccctctgttgatggaactaaggccaatgttgaacatgaagcgacagagacccctttgcgtgttcaggcagaaaaggagccaattcgtcctacagccccaggaacaaatgataatacatccagggttcgatcttctgttgatagaaaaaggaaacagggaactgtgataaatgaagaggatagtggtgtaggtgttagtggaagggacattaatctaacaaaatctgtcgatacaaaagagaccatgaagccaaaggatgaaggaggagaggaagaggatggagaaaaatccaaaaaagcatctgacgttcatttaaacattcgattacctgatggtagtagccttcaggagaagttttctgtgacaagtatattgagaatggtcaaggattatgtgaacagtaatcaaacaatcggactgggtgcttatgatcttgcggttccttacccacgtaaggtgtatactgaccaagatctggataagtctctatccgagttgagattgttcgatagacaagcacttgtagtagttccgcgaaaaagagcaaccgtctatcaaagaggaacatcttactcggagtctaacaacaacacagaccctaatagtggcggttactttgcttatgttagaagagtactgtcttatgcaaacccgttttcatattttggcggtggtactgccaacgcatcaagctctgttccagaacgtcaaacaagaccaaatacggaggtgagaaacaatctggggcaagtagggacgtcctttcaagatccatcagaaggtaggagcaacgttaggaataggagaccaaccacttctcggattggaagtaacatccatacgttgaatcacaatgaagatgaggctccgtttggtgatggaaacgctttttggaacggaaactccacacagtacggtggtggaagcggtggagacagtaatgatagacgatgaaataagagaagttgaaatctgtgtggatagatacagaaacagctcgggtgtttactttttatacttgactctttatgaaccatttaagagaccagctgcaaaatgtatcctgatgcgtttccgttttttcggttgctcgtattaaatttaaatctaaaaaaactacc

SEQ ID NO: 7159 - protein, 531 aa, Arabidopsis thaliana
MEALSSLTFKGSLPEAIFEAKGKKKLFVVYISGEDEESDKLNRLTWTDASVADSLSKYCILVHIQAGSVDATNFSAIYPYSSVPCIAAIGFSGTQVWRTEGFITAEDLASSLEKAWLGLHIQETTASIFSAALASQNSETPVSSASSVVLPPGSVPLDAAVASPSTASSVQPSETKSTVTSASTTENNDGTVAVKGKESAEPSNLCDTTKNQPAPSVDGTKANVEHEATETPLRVQAEKEPIRPTAPGTNDNTSRVRSSVDRKRKQGTVINEEDSGVGVSGRDINLTKSVDTKETMKPKDEGGEEEDGEKSKKASDVHLNIRLPDGSSLQEKFSVTSILRMVKDYVNSNQTIGLGAYDLAVPYPRKVYTDQDLDKSLSELRLFDRQALVVVPRKRATVYQRGTSYSESNNNTDPNSGGYFAYVRRVLSYANPFSYFGGGTANASSSVPERQTRPNTEVRNNLGQVGTSFQDPSEGRSNVRNRRPTTSRIGSNIHTLNHNEDEAPFGDGNAFWNGNSTQYGGGSGGDSNDRR

SEQ ID NO: 7160 - DNA, 1479 bp, Arabidopsis thaliana
gttttcccccaaattctcataattttcacaaacaacctctcgtcttctaggttaatccaatttcgtcgattcatgaagttcacaattctcccatcggaaaattcttcgtaatcgacgacgaagagatcatgagtaccgtcggaggtatagagcagttgatacctgattccgtttcaacgtcgttcatcgaaacggtgaacggttcgcaccagttcacgattcaaggttactctctagccaaaggcatgagccctgggaagtttatacagagcgatatcttctccgttggtggatacgattgggcgatttacttctatcctgatgggaagaacccggaggaccagtcctcgtatatctctttgttcatcgctttagcgagtgattctaatgatattagggctttgtttgagcttacgcttatggatcagagtgggaaagggaaacataaggtgcatagtcactttgatcgggcgcttgaaggtggtccttatacacttaagtataaaggaagcatgtggggttacaaacgctttttcaaacgatcagctttagaaacctctgactacttaaaggatgattgtcttgtcatcaattgtactgttggcgttgttagagcccgactcgagggtccaaaacagtatggcattgtgctacccctgtcgaatatgggtcagggattgaaagacttgttagattctgaagttggttgtgacatagctttccaagtcggagatgaaacatacaaagctcacaaactgattctcgcggcacgctccccagtttttagagctcagttttttggaccaattgggaataacaatgtggatagaatagtgatagacgacatcgaaccttctatcttcaaggctatgcttagcttcatttacaccgatgtacttcctaatgtgcatgaaattaccgggtcaacttctgccagttcgtttacaaacatgatacaacatctcttggcagctgctgacctctatgaccttgcaaggttaaagatattatgtgaagttttgctatgcgaaaaacttgatgttgataatgtggcaacaacacttgcgttggctgaacagcaccaattcttacagctcaaagcgttctgcttagaatttgttgcatctccagcaaacttgggagctgtaatgaagtccgaagggttcaagcacttgaaacagagctgtcccactttgttatctgagttgctgaacactgttgcagcagcagataagagctcgacgagtggacaatcaaacaagaaaagaagtgcgagcagtgtattagggtgtgacactacaaatgtgaggcaattgaggaggagaacacgaaaagaagtgcgagcagtgtcttaggatcattacataccgtatgcaaaattctagaattatgcattgtgtttcaagcagagtttatgaattccaagtcatcccgtgaacttttttaccagtgagaattatagaggcctgaactctgaac

SEQ ID NO: 7161 - protein, 408 aa, Arabidopsis thaliana
MSTVGGIEQLIPDSVSTSFIETVNGSHQFTIQGYSLAKGMSPGKFIQSDIFSVGGYDWAIYFYPDGKNPEDQSSYISLFIALASDSNDIRALFELTLMDQSGKGKHKVHSHFDRALEGGPYTLKYKGSMWGYKRFFKRSALETSDYLKDDCLVINCTVGVVRARLEGPKQYGIVLPLSNMGQGLKDLLDSEVGCDIAFQVGDETYKAHKLILAARSPVFRAQFFGPIGNNNVDRIVIDDIEPSIFKAMLSFIYTDVLPNVHEITGSTSASSFTNMIQHLLAAADLYDLARLKILCEVLLCEKLDVDNVATTLALAEQHQFLQLKAFCLEFVASPANLGAVMKSEGFKHLKQSCPTLLSELLNTVAAADKSSTSGQSNKKRSASSVLGCDTTNVRQLRRRTRKEVRAVS

SEQ ID NO: 7162 - protein, 369 aa, Arabidopsis thaliana
MSPGKFIQSDIFSVGGYDWAIYFYPDGKNPEDQSSYISLFIALASDSNDIRALFELTLMDQSGKGKHKVHSHFDRALEGGPYTLKYKGSMWGYKRFFKRSALETSDYLKDDCLVINCTVGVVRARLEGPKQYGIVLPLSNMGQGLKDLLDSEVGCDIAFQVGDETYKAHKLILAARSPVFRAQFFGPIGNNNVDRIVIDDIEPSIFKAMLSFIYTDVLPNVHEITGSTSASSFTNMIQHLLAAADLYDLARLKILCEVLLCEKLDVDNVATTLALAEQHQFLQLKAFCLEFVASPANLGAVMKSEGFKHLKQSCPTLLSELLNTVAAADKSSTSGQSNKKRSASSVLGCDTTNVRQLRRRTRKEVRAVS

SEQ ID NO: 7163 - protein, 311 aa, Arabidopsis thaliana
MDQSGKGKHKVHSHFDRALEGGPYTLKYKGSMWGYKRFFKRSALETSDYLKDDCLVINCTVGVVRARLEGPKQYGIVLPLSNMGQGLKDLLDSEVGCDIAFQVGDETYKAHKLILAARSPVFRAQFFGPIGNNNVDRIVIDDIEPSIFKAMLSFIYTDVLPNVHEITGSTSASSFTNMIQHLLAAADLYDLARLKILCEVLLCEKLDVDNVATTLALAEQHQFLQLKAFCLEFVASPANLGAVMKSEGFKHLKQSCPTLLSELLNTVAAADKSSTSGQSNKKRSASSVLGCDTTNVRQLRRRTRKEVRAVS

SEQ ID NO: 7164 - DNA, 1193 bp, Arabidopsis thaliana
acaacgaaggtttcgtttcgtggggaagaagatgaagtcgcttgtggctcatttctcaacgcctttaatcaccgctagattagttcctagatgtatcatccatcgagcttcaatctccgccgtctctttttccaccgtccgccgtcgattttctcctctcaccatggcctcagcagctcagtcttcttctcaggctgtgtcttacgggagtggcaacagtgatacagatgtttttaaattgattcaagctcacgaggagaaggctgctcgtctttccccagtcgaagaaatccgaactgtgcttaatggtagcatatgcggtatgctttccactttttctcagaagtatgagggttatccttcagggtcaatggttgattttgcatgtgatgctgatggttctccgattctggcagttgtagcttggcagttcatacaaaggatctcttagctaatccaaaatgctcattactaattgctagagacccagaggataggactggtttgaggatcaccttacatggtgatgcagtgttggtttctgaaaaagatcaagcagctgttcgatctgcctatttagccaagcatcccaaagctttctgggttgattttggggacttcagctttatgcgaattgaaccgaaagtggtcagatatgtttcaggggttgcaactgcttttcttggatctggagaatttagcaaagaggagtaccaagcagccaaagtcgatcctatagctcagtatgcaaaacctgtaacgtctcacatgaataaagaccatgaagaggataccaaagccattgtacataatataacatccatacctgtggaaagcgccttgatgctggatttggatagccttggtttcaatgttaaggctactcttcaagggaacaccttcaaactccgagttccgtttccaagacgcgcacaagacagaaaggatgtaaagacattgattgtggaaatgcttcaagctgccaagtccaattagttgctaaaataaagatggaaaagctcttccatctgaatcctgctacaacaagaaaagcttcctccaatacacattttatcttatctatcagttgcaaaaagaacactcatttagtcctgtatatatctcaacaagactagaactagatgtatacatgaaaaaaagttatcaataaagatttctgaagttgtattggc

SEQ ID NO: 7165 - protein, 149 aa, Arabidopsis thaliana
QRRFRFVGKKMKSLVAHFSTPLITARLVPRCIIHRASISAVSFSTVRRRFSPLTMASAAQSSSQAVSYGSGNSDTDVFKLIQAHEEKAARLSPVEEIRTVLNGSICGMLSTFSQKYEGYPSGSMVDFACDADGSPILAVVAWQFIQRIS

SEQ ID NO: 7166 - protein, 139 aa, Arabidopsis thaliana
MKSLVAHFSTPLITARLVPRCIIHRASISAVSFSTVRRRFSPLTMASAAQSSSQAVSYGSGNSDTDVFKLIQAHEEKAARLSPVEEIRTVLNGSICGMLSTFSQKYEGYPSGSMVDFACDADGSPILAVVAWQFIQRIS

SEQ ID NO: 7167 - protein, 122 aa, Arabidopsis thaliana
MRIEPKVVRYVSGVATAFLGSGEFSKEEYQAAKVDPIAQYAKPVTSHMNKDHEEDTKAIVHNITSIPVESALMLDLDSLGFNVKATLQGNTFKLRVPFPRRAQDRKDVKTLIVEMLQAAKSN

SEQ ID NO: 7168 - DNA, 1780 bp, Arabidopsis thaliana
agatgtctttgacagagtatttcatattacacgtggtggtatcagcaaggcctctcgggtcatcaatattagtgaagatatatttgctggtttcaacacaactctacgtcaagggaatgttactcatcatgagtatattcaggtgggcaaagggcgagatgttgggctcaatcaaatagctctgtttgaagggaaggttgctggtgggaatggtgaacaggttcttagtcgagatgtatacagacttggccagctccttgatttcttccgtatgatgtcattcttctttacaaccgttggcttctatctatgtacaatgttgacggtgcttactgtgtatattttcttatatgggagggcatatctggcactttctggagttggagctactattcgagaaagagctattcttctggacgatactgcacttagcgccgccttgaatgctcagtttctgtttcagattggtgtcttcactgctgtgccaatggttttgggatttattttggaacagggttttctccaggccatcgtcagtttcataacaatgcaatttcagctatgtactgtcttcttcacattttcccttggtacaagaacccattattttggacggacaattctccatggtggtgcaaggtaccaagccactggaagaggcttcgtcgtgaagcatatcaaattttctgaaaactaccgtctttattccagaagtcattttgtcaaagcaatggaagttattcttttattggttgtgtaccttgcgtatggcaatgatgaagctggtgcggtttcctacatcctgctgacagttagcagctggtttttggctgtttcttggctgtttgctccgtacctattcaaccctgccggatttgagtggcagaaagtcgtggaggacttcaaagaatggacaaattggctcttttacagaggtggaattggtgtgaaaggagctgaaagctgggaagcatggtgggaagaagaactgtctcacattcggaccttgagcgggaggataatggagactattttaagtctacgattctttatcttccagtatggtattgtctacaaactgaagctacaaggatcagatacatcatttgcggtgtacggttggtcatgggttgcatttgcaatgattatagttcttttcaaggtctttaccttcagccagaagatttctgtcaatttccagcttttactgaggtttatacaaggtctatccttattgatggctctagctggcataatcgtagcagttgtgctcacacccttgtcagtgacagacatatttgcatgcgtattggcttttataccgacaggatggggaattctttctattgcgtgtgcttggaagccagtcctaaagcgaatggggatgtggaaatcgattcgttccctagcaaggctatatgatgcgttaatgggaatgctcatatttcttcccgttgctctctgctcctggttcccttttgtgtcgaccttccagacacgtatgatgtttaaccaagccttcagccgcggtctcgagatctctcttattcttgcaggagacaatcccaattctggtctttaaacttttggaagctgttatgtttatgtttttcatacatttatttgtgtttagttttccgagtgtagcagtagtaaatgatgggagcctctctgtagctttaggcattttaagacttctgtaacatttgtccccaaaaaagaaaagacttttgtaaaacataacctagaatctttaagatattacgtagaaatgcctttc

SEQ ID NO: 7169 - protein, 526 aa, Arabidopsis thaliana
DVFDRVFHITRGGISKASRVINISEDIFAGFNTTLRQGNVTHHEYIQVGKGRDVGLNQIALFEGKVAGGNGEQVLSRDVYRLGQLLDFFRMMSFFFTTVGFYLCTMLTVLTVYIFLYGRAYLALSGVGATIRERAILLDDTALSAALNAQFLFQIGVFTAVPMVLGFILEQGFLQAIVSFITMQFQLCTVFFTFSLGTRTHYFGRTILHGGARYQATGRGFVVKHIKFSENYRLYSRSHFVKAMEVILLLVVYLAYGNDEAGAVSYILLTVSSWFLAVSWLFAPYLFNPAGFEWQKVVEDFKEWTNWLFYRGGIGVKGAESWEAWWEEELSHIRTLSGRIMETILSLRFFIFQYGIVYKLKLQGSDTSFAVYGWSWVAFAMIIVLFKVFTFSQKISVNFQLLLRFIQGLSLLMALAGIIVAVVLTPLSVTDIFACVLAFIPTGWGILSIACAWKPVLKRMGMWKSIRSLARLYDALMGMLIFLPVALCSWFPFVSTFQTRMMFNQAFSRGLEISLILAGDNPNSGL

SEQ ID NO: 7170 - protein, 436 aa, Arabidopsis thaliana
MMSFFFTTVGFYLCTMLTVLTVYIFLYGRAYLALSGVGATIRERAILLDDTALSAALNAQFLFQIGVFTAVPMVLGFILEQGFLQAIVSFITMQFQLCTVFFTFSLGTRTHYFGRTILHGGARYQATGRGFVVKHIKFSENYRLYSRSHFVKAMEVILLLVVYLAYGNDEAGAVSYILLTVSSWFLAVSWLFAPYLFNPAGFEWQKVVEDFKEWTNWLFYRGGIGVKGAESWEAWWEEELSHIRTLSGRIMETILSLRFFIFQYGIVYKLKLQGSDTSFAVYGWSWVAFAMIIVLFKVFTFSQKISVNFQLLLRFIQGLSLLMALAGIIVAVVLTPLSVTDIFACVLAFIPTGWGILSIACAWKPVLKRMGMWKSIRSLARLYDALMGMLIFLPVALCSWFPFVSTFQTRMMFNQAFSRGLEISLILAGDNPNSGL

SEQ ID NO: 7171 - protein, 435 aa, Arabidopsis thaliana
MSFFFTTVGFYLCTMLTVLTVYIFLYGRAYLALSGVGATIRERAILLDDTALSAALNAQFLFQIGVFTAVPMVLGFILEQGFLQAIVSFITMQFQLCTVFFTFSLGTRTHYFGRTILHGGARYQATGRGFVVKHIKFSENYRLYSRSHFVKAMEVILLLVVYLAYGNDEAGAVSYILLTVSSWFLAVSWLFAPYLFNPAGFEWQKVVEDFKEWTNWLFYRGGIGVKGAESWEAWWEEELSHIRTLSGRIMETILSLRFFIFQYGIVYKLKLQGSDTSFAVYGWSWVAFAMIIVLFKVFTFSQKISVNFQLLLRFIQGLSLLMALAGIIVAVVLTPLSVTDIFACVLAFIPTGWGILSIACAWKPVLKRMGMWKSIRSLARLYDALMGMLIFLPVALCSWFPFVSTFQTRMMFNQAFSRGLEISLILAGDNPNSGL

SEQ ID NO: 7172 - DNA, 1520 bp, Arabidopsis thaliana
aagaaacaagaggtaggctcttctagcgaactcctttcatacgttttctctctactctcatcgcttttcttatctctctcggagctcttccgtcgtccaccattgattacgggagtgtattgagctaaatatggctataatacaacttggaagtacatgtgttgctcaatggagtattcgtcctcaatttgcagtcagagcttattatcccagcagaatcgaatcaactcgccatcaaaattccagtagccaagtaaattgtttgggagcttcaaagtcgagtatgttctcacatgggtcattgcccttcttgtccatgacgggaatgtccagaaatatgcatcctcctcgcagaggatctcgcttcactgttagagctgatgcagattactattcggtactcggagtttcgaaaaatgcaaccaaagctgagattaaaagcgcttatcggaagctggctaggaattaccatccggatgtgaacaaggatcctggcgcagaagagaaattcaaagaaataagtaacgcatatgaggttttatcagatgatgaaaagaaatctctttacgataggtatggtgaggccggacttaaaggcgctgctggatttggcaatggggattttagtaatccgttcgatctattcgactcattattcgaaggcttcggtggtgggatgggtagaggttcaagaagcagagctgtggatggtcaagacgagtattacacgctaatcttaaacttcaaagaagcggttttcggaatggagaaagaaatagagatatcccggctcgagagctgtgggacatgtgaaggttcaggtgcaaaacctggaaccaaaccgaccaaatgcaccacgtgtggcggacaaggccaagtggtttcagcagctagaactcctctgggcgtgttccaacaagtcatgacttgctcgtcctgtaatggcactggagagatctcgacgccgtgtggtacttgctctggagacggacgcgtgaggaagacaaaacggataagtctcaaagtaccagccggggttgattcaggtagccggttgagagtgagaggagaaggcaatgccgggaagagaggcggatcaccgggcgatctgtttgttgttatagaagttatcccagacccgattttgaaacgagacgatacaaatattctctacacttgcaagatatcgtatatcgatgcgattttagggacgacactgaaagtaccaacagtggatgggacagtagatttgaaagttccagctgggacacaacctagcacgacgcttgtgatggcgaaaaaaggagttccggtattgaacaagagtaatatgagaggagatcagttggtgagagtacaagtggagatacctaagagattgagcaaagaggagaaaaaacttattgaagagcttgctgatatgagcaagaacaggactgctaatagcaccagtagatgattagaaacacgaaaattttgacattgaaattatgaatctctctatacatatacatttttct

SEQ ID NO: 7173 - protein, 442 aa, Arabidopsis thaliana
MAIIQLGSTCVAQWSIRPQFAVRAYYPSRIESTRHQNSSSQVNCLGASKSSMFSHGSLPFLSMTGMSRNMHPPRRGSRFTVRADADYYSVLGVSKNATKAEIKSAYRKLARNYHPDVNKDPGAEEKFKEISNAYEVLSDDEKKSLYDRYGEAGLKGAAGFGNGDFSNPFDLFDSLFEGFGGGMGRGSRSRAVDGQDEYYTLILNFKEAVFGMEKEIEISRLESCGTCEGSGAKPGTKPTKCTTCGGQGQVVSAARTPLGVFQQVMTCSSCNGTGEISTPCGTCSGDGRVRKTKRISLKVPAGVDSGSRLRVRGEGNAGKRGGSPGDLFVVIEVIPDPILKRDDTNILYTCKISYIDAILGTTLKVPTVDGTVDLKVPAGTQPSTTLVMAKKGVPVLNKSNMRGDQLVRVQVEIPKRLSKEEKKLIEELADMSKNRTANSTSR

SEQ ID NO: 7174 - protein, 391 aa, Arabidopsis thaliana
MFSHGSLPFLSMTGMSRNMHPPRRGSRFTVRADADYYSVLGVSKNATKAEIKSAYRKLARNYHPDVNKDPGAEEKFKEISNAYEVLSDDEKKSLYDRYGEAGLKGAAGFGNGDFSNPFDLFDSLFEGFGGGMGRGSRSRAVDGQDEYYTLILNFKEAVFGMEKEIEISRLESCGTCEGSGAKPGTKPTKCTTCGGQGQVVSAARTPLGVFQQVMTCSSCNGTGEISTPCGTCSGDGRVRKTKRISLKVPAGVDSGSRLRVRGEGNAGKRGGSPGDLFVVIEVIPDPILKRDDTNILYTCKISYIDAILGTTLKVPTVDGTVDLKVPAGTQPSTTLVMAKKGVPVLNKSNMRGDQLVRVQVEIPKRLSKEEKKLIEELADMSKNRTANSTSR

SEQ ID NO: 7175 - protein, 380 aa, Arabidopsis thaliana
MTGMSRNMHPPRRGSRFTVRADADYYSVLGVSKNATKAEIKSAYRKLARNYHPDVNKDPGAEEKFKEISNAYEVLSDDEKKSLYDRYGEAGLKGAAGFGNGDFSNPFDLFDSLFEGFGGGMGRGSRSRAVDGQDEYYTLILNFKEAVFGMEKEIEISRLESCGTCEGSGAKPGTKPTKCTTCGGQGQVVSAARTPLGVFQQVMTCSSCNGTGEISTPCGTCSGDGRVRKTKRISLKVPAGVDSGSRLRVRGEGNAGKRGGSPGDLFVVIEVIPDPILKRDDTNILYTCKISYIDAILGTTLKVPTVDGTVDLKVPAGTQPSTTLVMAKKGVPVLNKSNMRGDQLVRVQVEIPKRLSKEEKKLIEELADMSKNRTANSTSR

SEQ ID NO: 7176 - DNA, 738 bp, Arabidopsis thaliana
cattctccccaaagcaaaaaagacgccgctcgtctcttcagagaatttcaccttctagggtttgttcaagagaagtcttgggaaaatgagtcgtggaggtgcagctgttgccaagggaaagaagaagggagtttccttcaccattgattgttcaaagcctgtcgatgacaagatcatggagattgcttcccttgagaagtttcttcaggagaggatcaaggtcggtggcaaagctggtgcacttggtgattctgtcacaatcacacgtgagaagagcaagatcactgtcactgcagatggccaattctccaagaggtatttgaagtacttgacaaagaagtacctgaagaagcacaatgtaagggattggctcagagtgattgcagcaaacaaggaccgtaacctctatgagttgaggtacttcaacattgctgagaacgaaggagaggaggaagactaaacctcagaatccagtttggtttagaagtatactctattccatgtttctgttttttggtttctactcggtattcaatacaatttgtcttttcccttctgtcatttttgtcagatgttatttagttttgttccagttaactcttgttggttatcttactttaagagctcatatggatctcgttctttcagattgtcgttaaaaaagttggataatgatggaatgattggtttatgaggattaaagaactcgaacgtgaatcgaagataatctttcaattt

SEQ ID NO: 7177 - protein, 124 aa, Arabidopsis thaliana [sequence omitted]

SEQ ID NO: 7178 - protein, 94 aa, Arabidopsis thaliana
MEIASLEKFLQERIKVGGKAGALGDSVTITREKSKITVTADGQFSKRYLKYLTKKYLKKHNVRDWLRVIAANKDRNLYELRYFNIAENEGEEED

SEQ ID NO: 7179 - DNA, 1267 bp, Arabidopsis thaliana
acaaaactgatcgggagataagagcggtaaaaaccaccgagtcacgactcagtgactcaaatcgttcttcccacacaaaaaaaatggttactgcgacagcatcaactccattttcactctcgtcgtccgtggttttcacgcgccgtcgtaatttcaaacgttttccagtttgcgccagtctttctccggaggtttctcctcttctcagagcagctcatcacactgtggataattatgtaaagagtgggatgattattggtttaggatctggagaagcttcagattttgctatacgttatttgggtcaacaacttggttctggttctttacataatgttgttggtgtaccaatgtctgctcgaagtgcgagtgaagcagcaaagtatggaatccccttggaatattaccgggatggtgttcagattgattttgcatttcatgatgctgatgctgtagaagagaatacgcttattgcagttattggacggcggagaagttcacaggaagatgactatattctgaaacaaaagtctattgtaaaagtagctgatgaggcagtcttcatgataaaggaagaacaatacaaagccggtcttgaaggttctatccctgttttagttcaatctcttaattggttggccatagctgaggagatagatgacttgtatctaggcgatgcagaggtgtggagaagagcttctgttgaaaatgaaggccctcttggaggagactttcctatagttaccagtgatggtcacaacattcttgatgttatatttacaactccgattcgaagcctcgctgacttggctacaagccttgataagattgatggggttgtggaccatggactaattatcaaaactcgatgcacggtggtgattgcagaagaaactgttgtaagaagtgttaccttgcagaccagtgcattggagggtggtgtacgaacctatggacagactttgcaaaagtagttcgtctcacacattaccgaaaacggtgatccattttgccagtcaatttataagtcagttcatagagcaatgccgtaacttctacaagttctttttctataatcagttcattccaaacaacaatcaaggtataaattgattgtactcattatataattctgtcgtcatcttatatgttggaaaaattcttaagattatattatagcctacgttacagggtcagtgatgtagtataccacaaattttccatgaaaatatcattaaataattatatttggtggtaggaaacatcc

SEQ ID NO: 7180 - protein, 323 aa, Arabidopsis thaliana
KTDREIRAVKTTESRLSDSNRSSHTKKMVTATASTPFSLSSSVVFTRRRNFKRFPVCASLSPEVSPLLRAAHHTVDNYVKSGMIIGLGSGEASDFAIRYLGQQLGSGSLHNVVGVPMSARSASEAAKYGIPLEYYRDGVQIDFAFHDADAVEENTLIAVIGRRRSSQEDDYILKQKSIVKVADEAVFMIKEEQYKAGLEGSIPVLVQSLNWLAIAEEIDDLYLGDAEVWRRASVENEGPLGGDFPIVTSDGHNILDVIFTTPIRSLADLATSLDKIDGVVDHGLIIKTRCTVVIAEETVVRSVTLQTSALEGGVRTYGQTLQK

SEQ ID NO: 7181 - protein, 296 aa, Arabidopsis thaliana
MVTATASTPFSLSSSVVFTRRRNFKRFPVCASLSPEVSPLLRAAHHTVDNYVKSGMIIGLGSGEASDFAIRYLGQQLGSGSLHNVVGVPMSARSASEAAKYGIPLEYYRDGVQIDFAFHDADAVEENTLIAVIGRRRSSQEDDYILKQKSIVKVADEAVFMIKEEQYKAGLEGSIPVLVQSLNWLAIAEEIDDLYLGDAEVWRRASVENEGPLGGDFPIVTSDGHNILDVIFTTPIRSLADLATSLDKIDGVVDHGLIIKTRCTVVIAEETVVRSVTLQTSALEGGVRTYGQTLQK

SEQ ID NO: 7182 - protein, 241 aa, Arabidopsis thaliana
MIIGLGSGEASDFAIRYLGQQLGSGSLHNVVGVPMSARSASEAAKYGIPLEYYRDGVQIDFAFHDADAVEENTLIAVIGRRRSSQEDDYILKQKSIVKVADEAVFMIKEEQYKAGLEGSIPVLVQSLNWLAIAEEIDDLYLGDAEVWRRASVENEGPLGGDFPIVTSDGHNILDVIFTTPIRSLADLATSLDKIDGVVDHGLIIKTRCTVVIAEETVVRSVTLQTSALEGGVRTYGQTLQK

SEQ ID NO: 7183 - DNA, 1027 bp, Arabidopsis thaliana
ctactgcttcactatttagcttcccttcatttcatctcagatccctccttccttctctctcttcttcttcttcttcttcctcttcccgatttgcccctccccgtctttctccgatccgatctccggcgccgaggactcagctgtctgttcgcgctttctcagccgtcaccatgaccgattctaacgatgctggaatggatgctgttcagagacgactcatgtttgaagacgaatgcattctcgttgatgaaaatgatcgtgtggtgggacatgacactaagtataactgtcatctgatggaaaagattgaagctgagaatttacttcacagagctttcagtgtgtttttattcaactccaagtatgagttgcttctccagcaacggtcaaaaacaaaggttactttcccacttgtgtggacaaacacttgttgcagccatcctctttaccgtgaatccgagcttattgaagagaatgtgcttggtgtaagaaatgccgcacaaaggaagcttttcgatgagctcggtattgtagcagaagatgtaccagtcgatgagttcactcccttgggacgcatgctttacaaggcaccttctgatgggaaatggggagagcacgaagttgactatctactcttcatcgtgcgggatgtgaagcttcaaccaaacccagatgaagtggctgagatcaagtacgtgagcagggaagagcttaaggagctggtgaagaaagcagatgctggcgatgaagctgtgaaactatctccatggttcagattggtggtggataatttcttgatgaagtggtgggatcatgttgagaaaggaactatcactgaagctgcagacatgaaaaccattcacaagctctgaactttccataagttttggatcttccccttcccataataaaattaagagatgagacttttattgattacagacaaaactggcaacaaaatctattcctaggatttttttttgctttttatttacttttgattcatctctagtttagttttcatctt

SEQ ID NO: 7184 - protein, 289 aa, Arabidopsis thaliana
TASLFSFPSFHLRSLLPSLSSSSSSSSSRFAPPRLSPIRSPAPRTQLSVRAFSAVTMTDSNDAGMDAVQRRLMFEDECILVDENDRVVGHDTKYNCHLMEKIEAENLLHRAFSVFLFNSKYELLLQQRSKTKVTFPLVWTNTCCSHPLYRESELIEENVLGVRNAAQRKLFDELGIVAEDVPVDEFTPLGRMLYKAPSDGKWGEHEVDYLLFIVRDVKLQPNPDEVAEIKYVSREELKELVKKADAGDEAVKLSPWFRLVVDNFLMKWWDHVEKGTITEAADMKTIHKL

SEQ ID NO: 7185 - protein, 233 aa, Arabidopsis thaliana
MTDSNDAGMDAVQRRLMFEDECILVDENDRVVGHDTKYNCHLMEKIEAENLLHRAFSVFLFNSKYELLLQQRSKTKVTFPLVWTNTCCSHPLYRESELIEENVLGVRNAAQRKLFDELGIVAEDVPVDEFTPLGRMLYKAPSDGKWGEHEVDYLLFIVRDVKLQPNPDEVAEIKYVSREELKELVKKADAGDEAVKLSPWFRLVVDNFLMKWWDHVEKGTITEAADMKTIHKL

SEQ ID NO: 7186 - protein, 225 aa, Arabidopsis thaliana
MDAVQRRLMFEDECILVDENDRVVGHDTKYNCHLMEKIEAENLLHRAFSVFLFNSKYELLLQQRSKTKVTFPLVWTNTCCSHPLYRESELIEENVLGVRNAAQRKLFDELGIVAEDVPVDEFTPLGRMLYKAPSDGKWGEHEVDYLLFIVRDVKLQPNPDEVAEIKYVSREELKELVKKADAGDEAVKLSPWFRLVVDNFLMKWWDHVEKGTITEAADMKTIHKL

SEQ ID NO: 7187 - DNA, 1325 bp, Arabidopsis thaliana
tcaagcaaaatcccctctaaccatcagacttacaaatctagtccatataatacaataagcccacttttcttcttctctcatcaagctttttcttctctcctcatttttcgtataattcgatttgcgaaaaatggtcgagggagagtccaaggcattgtggattattttggccaccgtgtttgcagtcgcggcggtggcaccagcggtgcatggacagcaaacgccgtgttacttcgtgtttggagactctgtcttcgacaacggtaacaacaatgccttgaacaccaaggccaaggtcaactatttaccttatggtatagattactttcaaggtccaaccggtcggtttagcaacggtcggaatattccagacgttatcgctgaactagcgggtttcaataacccaattccaccatttgccggagcatcacaggcacaagctaacatcggactcaactatgcttccggtgccggcggtatccgcgaagaaaccagcgaaaatatgggtgagagaatcagtttgagacagcaagtaaacaaccacttttccgctatcataaccgcggcggtgccactgagtcggttaaggcaatgtctatacacaatcaacatcggaagcaacgattacctcaacaactacttcttgtcgcctcctactctagctcgtcgtctatttaatcctgaccagtacgctcgatctctcataagcctctaccgtatctatctgacgcaattgtacgtactaggagcgaggaatgtagcgttgttcggtatcggtaagatcggatgtacaccacggattgttgctaccctcggtggcggcactggctgcgcagaagaagtgaaccaagccgtgatcatcttcaacactaaactcaaagccctagtcacagatttcaacaacaaaccgggagctatgttcacttatgttgatctcttctctggaaatgctgaagatttcgccgctctagggattacggttggtgataggagttgctgtacggttaatccgggtgaagaactttgtgcggcgaacggaccggtttgtccagacagaaacaaattcatattctgggataacgtgcatactacggaagtgataaatactgtggtggctaacgcagcgtttaacggacctatagctagtccgttcaacatatcccagttagtgaattaaaattagggctctattccattgttaaaatggcatagtccctttatttaaaacttggtttcgtctagattgaaaccatatatcagacacatatgtaataatgatggaataatatatcagatagactgaataatgaataaaacggattgac

SEQ ID NO: 7188 - protein, 348 aa, Arabidopsis thaliana
MVEGESKALWIILATVFAVAAVAPAVHGQQTPCYFVFGDSVFDNGNNNALNTKAKVNYLPYGIDYFQGPTGRFSNGRNIPDVIAELAGFNNPIPPFAGASQAQANIGLNYASGAGGIREETSENMGERISLRQQVNNHFSAIITAAVPLSRLRQCLYTINIGSNDYLNNYFLSPPTLARRLFNPDQYARSLISLYRIYLTQLYVLGARNVALFGIGKIGCTPRIVATLGGGTGCAEEVNQAVIIFNTKLKALVTDFNNKPGAMFTYVDLFSGNAEDFAALGITVGDRSCCTVNPGEELCAANGPVCPDRNKFIFWDNVHTTEVINTVVANAAFNGPIASPFNISQLVN

SEQ ID NO: 7189 - protein, 224 aa, Arabidopsis thaliana
MGERISLRQQVNNHFSAIITAAVPLSRLRQCLYTINIGSNDYLNNYFLSPPTLARRLFNPDQYARSLISLYRIYLTQLYVLGARNVALFGIGKIGCTPRIVATLGGGTGCAEEVNQAVIIFNTKLKALVTDFNNKPGAMFTYVDLFSGNAEDFAALGITVGDRSCCTVNPGEELCAANGPVCPDRNKFIFWDNVHTTEVINTVVANAAFNGPIASPFNISQLVN

SEQ ID NO: 7190 - DNA, 755 bp, Arabidopsis thaliana
aaagaccagggtgttttttttctgacaaaacaaattgtaacactcactaggcatagcattctagttagttctgcagaaatttatagcgacactggtccaaattaggaggagcgagagcgaaggtacgagtgaggatttacaattgtcgatcgttttcacctagaaaccctaatttcgggggctcgcacgccctctctgattagaagcgacttcattatcggtcactagaatctgctgcttcttttctgaaactagcattgtcaggaacatggacactaagaagaaatctaaggaacatggcctataccgtatagtcaatgctatcggttatgcatttggagcgggagctgttggaggttctgtatatcatttcgtgagaggggcatacaattccccaataggtgctcgatatgttggaggaacacaagcggctagcatgaatgctcctcgcttgggaggcacttttgctgtatttggaggattgctctcaacatttgactatgcattggtgcgcatcaggaagaaggaagatccatggaactccatcgtagcgggtgctgctacaggtggagttctgtctatccgaaaaggggttgttgcagcttcaacatcagcggttatgtttggtttttttttggctgtactcaaccctccgttcgggagcaagtaagctttttgggttgtctttgatgagaatgtcatttagactttcatgataattgccttttcgttatcaattcttcaaaattactgtt

SEQ ID NO: 7191 - protein, 133 aa, Arabidopsis thaliana
MDTKKKSKEHGLYRIVNAIGYAFGAGAVGGSVYHFVRGAYNSPIGARYVGGTQAASMNAPRLGGTFAVFGGLLSTFDYALVRIRKKEDPWNSIVAGAATGGVLSIRKGVVAASTSAVMFGFFLAVLNPPFGSK

SEQ ID NO: 7192 - protein, 77 aa, Arabidopsis thaliana
MNAPRLGGTFAVFGGLLSTFDYALVRIRKKEDPWNSIVAGAATGGVLSIRKGVVAASTSAVMFGFFLAVLNPPFGSK

SEQ ID NO: 7193 - DNA, 1417 bp, Arabidopsis thaliana
aatctagtaatcgttaaaaaagccactttgttagtattgcttaatactctctctctctctctgttcccaaggagatgaaaagcttcaatctcaaaacatagcagctctctcaataaaccaaacccaaatgcaagctgtgtagagagaaacggagtgaggaaggaaggagatgggaggggtgacgtcatcggtggcggcgaagtttgccttcttcccgccgagtccaccgtcttacaaggtggtgaccgacgagctcaccggactgttgcttctcagccctttcccccaccgcgaaaacgtagaaatcgtaaagcttcggaccaggagaggcacagagatcgtgggcatgtacgtgaggcatccgatggctacctccacgctcctctactcccatggcaacgccgccgatctgggacagatgtatgagctcttcattgagcttagcatccatctcaaggttaatcttatgggatacgattactccgggtatggacaatctactggaaagccgagtgagcataacacgtatgctgatatcgaagctgtttataagtgtcttgaagaaacctttggctctaagcaggaaggtgtcatcctctacggccaatctgtaggcagcggacctacgttagatcttgcttcccggttgcctcaacttagagccgtcgtccttcacagccccattctctccggtttaagagttatgtattccgtcaagaaaacctactggttcgacatctacaagaatatcgacaaaatcccatatgtcgattgcccggttctcatcattcatggaacttcggatgaggtagtggattgttctcatgggaaacaactatgggaactctgcaaagacaagtacgagccgctctgggtgaaaggagggaaccactgtgatcttgaacactaccctgaatacattagacacctcaagaagttcatagcaacagtagagagattaccatgtccgaggatgagcagcgaccaatcagagagagtgagagatgcgcccccgaggagaagtatggacaggagagtgaagccgaggcagagcacagagcgtagagagaaagagaagccaccaaagagtcagtcgaagatgagtagcagcagcagcaagctcaagatctcgtttgatcaacttgatcgctcgcggaggagcgttgactgccatgaaaagactcggaagagcgttgaccagattgagagggggaggaagagtgtggataggttggatagagttcgctccgagtaaaaaccacacactcacactcacacacgtataatacgtatgtagatgaaaagagtacataactgtttctatttaccgaacaaaataacatgtggatgtcgctcctcatattattgatttgtaatcttttatgcaatttgggatctctctcgccatctccttttg

SEQ ID NO: 7194 - protein, 361 aa, Arabidopsis thaliana
MGGVTSSVAAKFAFFPPSPPSYKVVTDELTGLLLLSPFPHRENVEIVKLRTRRGTEIVGMYVRHPMATSTLLYSHGNAADLGQMYELFIELSIHLKVNLMGYDYSGYGQSTGKPSEHNTYADIEAVYKCLEETFGSKQEGVILYGQSVGSGPTLDLASRLPQLRAVVLHSPILSGLRVMYSVKKTYWFDIYKNIDKIPYVDCPVLIIHGTSDEVVDCSHGKQLWELCKDKYEPLWVKGGNHCDLEHYPEYIRHLKKFIATVERLPCPRMSSDQSERVRDAPPRRSMDRRVKPRQSTERREKEKPPKSQSKMSSSSSKLKISFDQLDRSRRSVDCHEKTRKSVDQIERGRKSVDRLDRVRSE

SEQ ID NO: 7195 - protein, 302 aa, Arabidopsis thaliana
MYVRHPMATSTLLYSHGNAADLGQMYELFIELSIHLKVNLMGYDYSGYGQSTGKPSEHNTYADIEAVYKCLEETFGSKQEGVILYGQSVGSGPTLDLASRLPQLRAVVLHSPILSGLRVMYSVKKTYWFDIYKNIDKIPYVDCPVLIIHGTSDEVVDCSHGKQLWELCKDKYEPLWVKGGNHCDLEHYPEYIRHLKKFIATVERLPCPRMSSDQSERVRDAPPRRSMDRRVKPRQSTERREKEKPPKSQSKMSSSSSKLKISFDQLDRSRRSVDCHEKTRKSVDQIERGRKSVDRLDRVRSE

SEQ ID NO: 7196 - protein, 296 aa, Arabidopsis thaliana
MATSTLLYSHGNAADLGQMYELFIELSIHLKVNLMGYDYSGYGQSTGKPSEHNTYADIEAVYKCLEETFGSKQEGVILYGQSVGSGPTLDLASRLPQLRAVVLHSPILSGLRVMYSVKKTYWFDIYKNIDKIPYVDCPVLIIHGTSDEVVDCSHGKQLWELCKDKYEPLWVKGGNHCDLEHYPEYIRHLKKFIATVERLPCPRMSSDQSERVRDAPPRRSMDRRVKPRQSTERREKEKPPKSQSKMSSSSSKLKISFDQLDRSRRSVDCHEKTRKSVDQIERGRKSVDRLDRVRSE

SEQ ID NO: 7197 - DNA, 1382 bp, Arabidopsis thaliana
  misc_feature (672)..(672): n is a, c, g, or t
  misc_feature (684)..(684): n is a, c, g, or t
  misc_feature (688)..(690): n is a, c, g, or t
  misc_feature (723)..(723): n is a, c, g, or t
  misc_feature (726)..(726): n is a, c, g, or t
  misc_feature (732)..(733): n is a, c, g, or t
  misc_feature (738)..(738): n is a, c, g, or t
acaattcagattccaattttctcgaactcttaaatcaatctctcaaatctctcaaccgtgatcaagatgcagatcttcgttaagactctcaccggaaagactatcaccctcgaggtggaaagctctgacaccatcgacaacgttaaggccaagatccaggataaggaaggcattcctccggatcagcagagattgatcttcgccggaaaacagctagaggatggccgtacgttggctgattacaatatccagaaggaatccaccctccatttggttctcaggctccgtggtggtatgcagattttcgttaaaaccctaacgggaaagacgattactcttgaggtggagagttctgacaccatcgacaacgtcaaggccaagatccaagataaggagggtattcctccggaccagcagaggttgatcttcgccggaaagcagttggaggatggcagaactcttgctgactacaacatccagaaagagtccacacttcacttggtcttgcgtctgcgtggaggtatgcagatcttcgtgaagactctcaccggaaagactatcactttggaggtagagagctctgacaccatcgacaacgttaaggccaagatccaggataaggaaggcattcctccggatcagcagaggttgatcttcgccggaaagcagttngaggatggcagnactnnngctgattacaacatccagaaagagtccaccctncanttggtnntgagnctgcgtggaggtatgcagatcttcgttaagactctcaccggaaagactatcactttggaggtagagagctctgacaccattgacaacgtcaaggccaagatccaggataaggaaggtatccctccggaccagcagaggttgatcttcgccggtaaacagttggaggatggtcgtaccttggctgattacaacattcagaaggagtcgacccttcacttggttttgcgtctgcgtggaggtatgcagatcttcgttaagactttgaccggcaagactatcactcttgaagtggagagctccgacaccattgacaacgtgaaggccaagatccaggacaaggaaggtatccctccggaccagcagcgtctcatcttcgctggaaagcagcttgaggatggacgtactttggccgactacaacatccagaaggagtctactcttcacttggtcctccgtctccgtggtggtttctaaaccttgtctctctcttatggttactgaaccaagttcatgtctcgtttcatctagtactttggtggtttatgttttggggccatgtaagcctctgataaataattgatcgactatgtttccgtttctttcatctctcttttctttcaaacaacaaatcgaacttattctct

SEQ ID NO: 7198 - protein, 381 aa, Arabidopsis thaliana
  misc_feature (202)..(202): Xaa can be any naturally occurring amino acid
  misc_feature (206)..(206): Xaa can be any naturally occurring amino acid
  misc_feature (208)..(208): Xaa can be any naturally occurring amino acid
  misc_feature (219)..(220): Xaa can be any naturally occurring amino acid
  misc_feature (222)..(224): Xaa can be any naturally occurring amino acid
MQIFVKTLTGKTITLEVESSDTIDNVKAKIQDKEGIPPDQQRLIFAGKQLEDGRTLADYNIQKESTLHLVLRLRGGMQIFVKTLTGKTITLEVESSDTIDNVKAKIQDKEGIPPDQQRLIFAGKQLEDGRTLADYNIQKESTLHLVLRLRGGMQIFVKTLTGKTITLEVESSDTIDNVKAKIQDKEGIPPDQQRLIFAGKQXEDGXTXADYNIQKESTXXLXXXLRGGMQIFVKTLTGKTITLEVESSDTIDNVKAKIQDKEGIPPDQQRLIFAGKQLEDGRTLADYNIQKESTLHLVLRLRGGMQIFVKTLTGKTITLEVESSDTIDNVKAKIQDKEGIPPDQQRLIFAGKQLEDGRTLADYNIQKESTLHLVLRLRGGF

SEQ ID NO: 7199 - protein, 305 aa, Arabidopsis thaliana
  misc_feature (126)..(126): Xaa can be any naturally occurring amino acid
  misc_feature (130)..(130): Xaa can be any naturally occurring amino acid
  misc_feature (132)..(132): Xaa can be any naturally occurring amino acid
  misc_feature (143)..(144): Xaa can be any naturally occurring amino acid
  misc_feature (146)..(148): Xaa can be any naturally occurring amino acid
MQIFVKTLTGKTITLEVESSDTIDNVKAKIQDKEGIPPDQQRLIFAGKQLEDGRTLADYNIQKESTLHLVLRLRGGMQIFVKTLTGKTITLEVESSDTIDNVKAKIQDKEGIPPDQQRLIFAGKQXEDGXTXADYNIQKESTXXLXXXLRGGMQIFVKTLTGKTITLEVESSDTIDNVKAKIQDKEGIPPDQQRLIFAGKQLEDGRTLADYNIQKESTLHLVLRLRGGMQIFVKTLTGKTITLEVESSDTIDNVKAKIQDKEGIPPDQQRLIFAGKQLEDGRTLADYNIQKESTLHLVLRLRGGF

SEQ ID NO: 7200 - protein, 229 aa, Arabidopsis thaliana
  misc_feature (50)..(50): Xaa can be any naturally occurring amino acid
  misc_feature (54)..(54): Xaa can be any naturally occurring amino acid
  misc_feature (56)..(56): Xaa can be any naturally occurring amino acid
  misc_feature (67)..(68): Xaa can be any naturally occurring amino acid
  misc_feature (70)..(72): Xaa can be any naturally occurring amino acid
MQIFVKTLTGKTITLEVESSDTIDNVKAKIQDKEGIPPDQQRLIFAGKQXEDGXTXADYNIQKESTXXLXXXLRGGMQIFVKTLTGKTITLEVESSDTIDNVKAKIQDKEGIPPDQQRLIFAGKQLEDGRTLADYNIQKESTLHLVLRLRGGMQIFVKTLTGKTITLEVESSDTIDNVKAKIQDKEGIPPDQQRLIFAGKQLEDGRTLADYNIQKESTLHLVLRLRGGF

SEQ ID NO: 7201 - DNA, 1508 bp, Arabidopsis thaliana
aggttacttccacaatgttcacggagtcatctccagcaatggatccggatttacccgaatccgaaacccgacccgaattcaatccctcctccactgattccaccgccatggcagagtcaaccgatgcaggggaaccgacggcattcgaattagcctcatcccaagtcacatccgtcgccgatctaccaccggaacgattcaattcgctcgacgaattaacacacgatctcggctcgctccacgagctttcgacccgtggctcatggcaagcgatcctcgagaagatatctcaagccagagctctcttcctcctcacaaagcctcacgagcatctcacttatctcacttaccaagttatggctctcgcgaagcttcgtcgctccgatgaagcttctcatgagcttaattccttgcacgatttcgacgggacgcattacaggtacgaatcgttccctgagatttaccctaatcggagaggatctatggttcctttctctttacgatggctctacgctttgatcccgactaagcttggtaatcgtcaggaagggttagatcgtttatatgttttgcttgactttgttcgagatcgaatcagagagaaagaatctcagagtttagagagttctgtggaattgtggaagaaaagagagacatttgtgatgaattgcttgctagggtttcatttaggtcacaaggaatttggggtgtctttggatttgatgaaggaattgatcaatcgtgatccgttagacccggttttgatttcgaaactagggtctgttcagatgcagtttggtgatgtagaaggagctaaaactacgtttgatagagttgagaagatgttgaatgaaggaaagagcaatggtttattgaacgagatacagttcaacaatcttgttggtaggaataaggctttggtttatgttgtggcaaaggactatgtttctgctgtgagagagtatgacaaatgcattgaaagggataactctgatattatcgctgtcaacaataaggctctttgtttgatgtacttgagagatctatcggatgcgattaaggtgatggaaagtgcattggagagagtgccaaccgcggctttgaacgagagcttggtggtgaatttgtgtagtatgtatgagttggcttatgttaatcatactgatgttaagcggacgttaaacaattggattgcacgtgttgctcctgatgactttgattcatcttgtaccagagtttgaggttttcattccaaacaaaggtaattagtcaaagagtttatgtcttcaatgatgaaacaaatcttggtgggtttggcctcagctggagactctgttgttgcaattaccggcttcaaattcgttgtagttttctgttgtgtaagctagcaaatggtttgttgcccccaaacacttggtaacttcctgcattcgttttctcatattcatcttcttataacgtttttttgcatttgccgttaaccactaatgaagaatgtgtgttcttgc

SEQ ID NO: 7202 - protein, 412 aa, Arabidopsis thaliana
VTSTMFTESSPAMDPDLPESETRPEFNPSSTDSTAMAESTDAGEPTAFELASSQVTSVADLPPERFNSLDELTHDLGSLHELSTRGSWQAILEKISQARALFLLTKPHEHLTYLTYQVMALAKLRRSDEASHELNSLHDFDGTHYRYESFPEIYPNRRGSMVPFSLRWLYALIPTKLGNRQEGLDRLYVLLDFVRDRIREKESQSLESSVELWKKRETFVMNCLLGFHLGHKEFGVSLDLMKELINRDPLDPVLISKLGSVQMQFGDVEGAKTTFDRVEKMLNEGKSNGLLNEIQFNNLVGRNKALVYVVAKDYVSAVREYDKCIERDNSDIIAVNNKALCLMYLRDLSDAIKVMESALERVPTAALNESLVVNLCSMYELAYVNHTDVKRTLNNWIARVAPDDFDSSCTRV

SEQ ID NO: 7203 - protein, 408 aa, Arabidopsis thaliana
MFTESSPAMDPDLPESETRPEFNPSSTDSTAMAESTDAGEPTAFELASSQVTSVADLPPERFNSLDELTHDLGSLHELSTRGSWQAILEKISQARALFLLTKPHEHLTYLTYQVMALAKLRRSDEASHELNSLHDFDGTHYRYESFPEIYPNRRGSMVPFSLRWLYALIPTKLGNRQEGLDRLYVLLDFVRDRIREKESQSLESSVELWKKRETFVMNCLLGFHLGHKEFGVSLDLMKELINRDPLDPVLISKLGSVQMQFGDVEGAKTTFDRVEKMLNEGKSNGLLNEIQFNNLVGRNKALVYVVAKDYVSAVREYDKCIERDNSDIIAVNNKALCLMYLRDLSDAIKVMESALERVPTAALNESLVVNLCSMYELAYVNHTDVKRTLNNWIARVAPDDFDSSCTRV

SEQ ID NO: 7204 - protein, 400 aa, Arabidopsis thaliana
MDPDLPESETRPEFNPSSTDSTAMAESTDAGEPTAFELASSQVTSVADLPPERFNSLDELTHDLGSLHELSTRGSWQAILEKISQARALFLLTKPHEHLTYLTYQVMALAKLRRSDEASHELNSLHDFDGTHYRYESFPEIYPNRRGSMVPFSLRWLYALIPTKLGNRQEGLDRLYVLLDFVRDRIREKESQSLESSVELWKKRETFVMNCLLGFHLGHKEFGVSLDLMKELINRDPLDPVLISKLGSVQMQFGDVEGAKTTFDRVEKMLNEGKSNGLLNEIQFNNLVGRNKALVYVVAKDYVSAVREYDKCIERDNSDIIAVNNKALCLMYLRDLSDAIKVMESALERVPTAALNESLVVNLCSMYELAYVNHTDVKRTLNNWIARVAPDDFDSSCTRV

SEQ ID NO: 7205 - DNA, 779 bp, Arabidopsis thaliana
ctggtgataatttcttctcaattcaaatacataaataaatatcaataaaatggcgggccgcgacacattccagctgcgttttgcagcagtcgcggcatccgccgccgtattgatctttctcatggctggtcaagtcgcggagtcgcgtatgatcaatatctgctctcacaccgcgtatccatctttgtgccgacctctggtgaagcgtgtcacaagccctagaaaagccacgcacagaaccatccaagctttggaggctaagacgaaactagctctagccgaaacagctaggttcaaaaacggtaaccaagcggtcagcacgtgttacgagacattgggcgacgcggtttacaatttggcaagcgcgagaaagagcataaggaaacgtgatgtgccggcgatgaacacgtatctaactgcggctgtgtctgattacggtgcatgtgtggacgggttcattgaaacacaacaggttaatgcgatccaaaatgcagtggttgacttgagaaaaattagcagcaattgcttggcgttgtctacattgattagatgatcgatttaagagaacaattgatttaatttttctcaaaacaaaaactaattaattgaagaaataaaaaatctcaagcaattaaaatttgggtttctttttgttgtttttgttttgagagagatgtttgttgttgatccatcattcgtatgtaacgcgactgggtgtaactaattatatttgaatttcgtgtaattaataatcgctagtagattttttcatattcaac

SEQ ID NO: 7206 - protein, 167 aa, Arabidopsis thaliana
MAGRDTFQLRFAAVAASAAVLIFLMAGQVAESRMINICSHTAYPSLCRPLVKRVTSPRKATHRTIQALEAKTKLALAETARFKNGNQAVSTCYETLGDAVYNLASARKSIRKRDVPAMNTYLTAAVSDYGACVDGFIETQQVNAIQNAVVDLRKISSNCLALSTLIR

SEQ ID NO: 7207 - protein, 143 aa, Arabidopsis thaliana
MAGQVAESRMINICSHTAYPSLCRPLVKRVTSPRKATHRTIQALEAKTKLALAETARFKNGNQAVSTCYETLGDAVYNLASARKSIRKRDVPAMNTYLTAAVSDYGACVDGFIETQQVNAIQNAVVDLRKISSNCLALSTLIR

SEQ ID NO: 7208 - protein, 134 aa, Arabidopsis thaliana
MINICSHTAYPSLCRPLVKRVTSPRKATHRTIQALEAKTKLALAETARFKNGNQAVSTCYETLGDAVYNLASARKSIRKRDVPAMNTYLTAAVSDYGACVDGFIETQQVNAIQNAVVDLRKISSNCLALSTLIR

SEQ ID NO: 7209 - DNA, 1024 bp, Arabidopsis thaliana
ccgagagtgaagaaggtatgtctggaagtgaaggaggtatgtctggtggtggaggaagtaaatccaaaagtaaaaaaagtaaactcaaagctaaattgggaaagaaaaaaggtatgtccggaggcatgtcaggaagtgaagaaggtatgtttggaagtgaaggaggtatgtccagtggtggaggaagtaaatccaaaagtaaaaaaagtaaactcaaagctaaattgggaaagaaaaaaggtatgtccggaggcatgtcaggaagtgaagaaggtatgtctggaagtgaaggaggtatgtccggaggtggaggaggtaaatccaaaagtagaaaaagtaaactcaaagctaaattgggaaagaaaaaatgtatgtacggaggcatgtcaggaagtgaaggaggtatgtctggaagtgaaggaggtatatccggaggtggtatgtctgggggcagtggaagtaaacacaaaattggaggaggtaaacacggaggtcttggaggtaaattcggaaagaaaagaggcatgtccggaagtggaggaggcatgtcaggaagtgaaggaggtgtgtctggaagtgaaggaagtatgtccggaggtggtatgtctgggggtagcggaagtaaacacaaaattggaggaggtaaacacggaggtcttagaggtaaattcggaaagaaaagaggtatgtcaggaagtgaaggaggtatgtctggaagtgaaggaggtgtgtcggaaagtggtatgtccgggagtggagggggtaaacacaaaatcggaggaggtaaacacaaatttggaggaggtaaacacggaggtggaggtggccacatggcggagtaaagaacaatggtcaagttgttccaacattaagcagatcattgtgcattagttcaagattgtatgattgggaaagtaaaagaaagaaaaaatattttctaataagttttatgtttatatgtaatgttgaatctgattattatgataaaaagacataaatgtgatacaatgtttattttaagagc

SEQ ID NO: 7210 - protein, 296 aa, Arabidopsis thaliana
PRVKKVCLEVKEVCLVVEEVNPKVKKVNSKLNWERKKVCPEACQEVKKVCLEVKEVCPVVEEVNPKVKKVNSKLNWERKKVCPEACQEVKKVCLEVKEVCPEVEEVNPKVEKVNSKLNWERKNVCTEACQEVKEVCLEVKEVYPEVVCLGAVEVNTKLEEVNTEVLEVNSERKEACPEVEEACQEVKEVCLEVKEVCPEVVCLGVAEVNTKLEEVNTEVLEVNSERKEVCQEVKEVCLEVKEVCRKVVCPGVEGVNTKSEEVNTNLEEVNTEVEVATWRSKEQWSSCSNIKQIIVH

SEQ ID NO: 7211 - protein, 279 aa, Arabidopsis thaliana
ESEEGMSGSEGGMSGGGGSKSKSKKSKLKAKLGKKKGMSGGMSGSEEGMFGSEGGMSSGGGSKSKSKKSKLKAKLGKKKGMSGGMSGSEEGMSGSEGGMSGGGGGKSKSRKSKLKAKLGKKKCMYGGMSGSEGGMSGSEGGISGGGMSGGSGSKHKIGGGKHGGLGGKFGKKRGMSGSGGGMSGSEGGVSGSEGSMSGGGMSGGSGSKHKIGGGKHGGLRGKFGKKRGMSGSEGGMSGSEGGVSESGMSGSGGGKHKIGGGKHKFGGGKHGGGGGHMAE

SEQ ID NO: 7212 - protein, 274 aa, Arabidopsis thaliana
MSGSEGGMSGGGGSKSKSKKSKLKAKLGKKKGMSGGMSGSEEGMFGSEGGMSSGGGSKSKSKKSKLKAKLGKKKGMSGGMSGSEEGMSGSEGGMSGGGGGKSKSRKSKLKAKLGKKKCMYGGMSGSEGGMSGSEGGISGGGMSGGSGSKHKIGGGKHGGLGGKFGKKRGMSGSGGGMSGSEGGVSGSEGSMSGGGMSGGSGSKHKIGGGKHGGLRGKFGKKRGMSGSEGGMSGSEGGVSESGMSGSGGGKHKIGGGKHKFGGGKHGGGGGHMAE

SEQ ID NO: 7213 - DNA, 714 bp, Arabidopsis thaliana
ttgaaccaaaaaatatctaaaatcactaaacctatcttcttaaccaaaagatcaatagattacaaaaatgcagggagctctgtttatcaaaccaactattcttcttcctcttccttcttcagtttcttctccaaaactcacttttcttcttcctcacgcaaccaaagcttcaagactctcatctctcagatcaaacaactcatcatcatcatcatccttaacgtctgaccctaacaccgtcgactataactcctccatcctttctgtttttccagctgaagcatgcgaagtaatcagtggatacgcttgttctgctgatatttaccctgaagtcaagctcgatacaaagcccgtctcacgtcccgtggcttcagagcccgttgacagagaatacgaagagtataacagccccaaaacggttttccgtgaagaggcctgcgatgatcttggaggagaattctgtgaacctgactttcaaaaagatgccaactagaagaaacaagattttatgtcatgtgaatatgtgtttgtatttctacaagtctttgtaaccactccttaatttatgatatctagcttcactacttaatcaagattgatgttatggattagacccgagttcccaaagttaatactctctctgttccaagttatttgatgttttgggttttacacaagaattaagaaaaattaacttttatatttttaattaac

SEQ ID NO: 7214 - protein, 141 aa, Arabidopsis thaliana
MQGALFIKPTILLPLPSSVSSPKLTFLLPHATKASRLSSLRSNNSSSSSSLTSDPNTVDYNSSILSVFPAEACEVISGYACSADIYPEVKLDTKPVSRPVASEPVDREYEEYNSPKTVFREEACDDLGGEFCEPDFQKDAN

SEQ ID NO: 7215 - protein, 75 aa, Arabidopsis thaliana
LNQKISKITKPIFLTKRSIDYKNAGSSVYQTNYSSSSSFFSFFSKTHFSSSSRNQSFKTLISQIKQLIIIIILNV

SEQ ID NO: 7216 - DNA, 1133 bp, Arabidopsis thaliana
cacattcacgcacgcgcatccatcttcaccgtttcatacgaaactctttacgaggagtctctctttacttttctctctctctcaaagaaagaaagaaaagcctcttttaattttctccggccagagtgtgtgggatgcacaaggaaagagggaaaatgccggtttctagcaacagaaatagagtatcgccatacccgcttcgctcttgcaggaacaagaaacaaaaagaagtcgaggcgtcgtcgtcacctgttgagttagagagtgttagtgaatgggaggatgtgaggtgtgtgatttgtatggagcctcctcacaatgctgtcctcttgcaatgctcttctttctccaaaggatgtcgtgcttacatgtgtgatacaagcgctcgtcactccaattgtttcaagcagtaccgcagaagcaacagctcaagccgttgtagtggcaagactctacattgtccctactgcagaggagaggttcaggggactatgaagtcgacttgtgctcggagattcatgaatgctagaccgaggtgttgtactgttgacaagtgcgatttctcagggacctatgcgcagctgaaaaatcacttgaaaactgagcatcctggttttacaccgccaaagttagacccttgggagcaacacatgtgggagcagttggagagagaggcggagtacattgaaatgctcaacgctcgtcagagatgggatgcagaacagagattgttggcgacttctctccatcagcttccatatcgtcatcccatgattgatctcaactttgatgcgttggtgcataatctgtttcttggtgcgtccatggagagccgtgcaagcaccgacaattacccggctcacataccccgtctggagttccatgcccccatgtatcccagatggacgccatgaagattctgagtgccagagtctatgaggaattcttccaaaagttttgatgtctcttgatttttatcataatgtaatgttcttgtagcgacatcagttcttgttctaggcataaatttaatattgtttgtatgttagcttctgttagtgaagtcttcatagctaggatcatcttttgcctattcaaaaatctctgcttaaatcaaattattcacattcttc

SEQ ID NO: 7217 - protein, 259 aa, Arabidopsis thaliana
MHKERGKMPVSSNRNRVSPYPLRSCRNKKQKEVEASSSPVELESVSEWEDVRCVICMEPPHNAVLLQCSSFSKGCRAYMCDTSARHSNCFKQYRRSNSSSRCSGKTLHCPYCRGEVQGTMKSTCARRFMNARPRCCTVDKCDFSGTYAQLKNHLKTEHPGFTPPKLDPWEQHMWEQLEREAEYIEMLNARQRWDAEQRLLATSLHQLPYRHPMIDLNFDALVHNLFLGASMESRASTDNYPAHIPRLEFHAPMYPRWTP

SEQ ID NO: 7218 - protein, 252 aa, Arabidopsis thaliana
MPVSSNRNRVSPYPLRSCRNKKQKEVEASSSPVELESVSEWEDVRCVICMEPPHNAVLLQCSSFSKGCRAYMCDTSARHSNCFKQYRRSNSSSRCSGKTLHCPYCRGEVQGTMKSTCARRFMNARPRCCTVDKCDFSGTYAQLKNHLKTEHPGFTPPKLDPWEQHMWEQLEREAEYIEMLNARQRWDAEQRLLATSLHQLPYRHPMIDLNFDALVHNLFLGASMESRASTDNYPAHIPRLEFHAPMYPRWTP

SEQ ID NO: 7219 - protein, 203 aa, Arabidopsis thaliana
MEPPHNAVLLQCSSFSKGCRAYMCDTSARHSNCFKQYRRSNSSSRCSGKTLHCPYCRGEVQGTMKSTCARRFMNARPRCCTVDKCDFSGTYAQLKNHLKTEHPGFTPPKLDPWEQHMWEQLEREAEYIEMLNARQRWDAEQRLLATSLHQLPYRHPMIDLNFDALVHNLFLGASMESRASTDNYPAHIPRLEFHAPMYPRWTP

SEQ ID NO: 7220 - DNA, 1441 bp, Arabidopsis thaliana
gaagaacgtaaaccagtcaagtctgtaaatggcgaaaaaagaaggttcaaagatgaacatcgccattatacatccagatcttggaataggcggagcagagagattgattgttgatgcggccgttgagcttgcctcgcacggtcataaagttcatatcttcacctctcaccacgacaaatccagatgcttcgaggaaactctttccggtatctttcaagttacggtgtatggatctttcctgccacggcatattttctaccgactacacgcagtgtgtgcatatttgcggtgcttgtttgttgctctctgtgttcttttgggttggtcttcattcgatgttgtactagcagaccaagtttcagtcgtagtcccattgctgaaactcaaaaggtcatctaaggttgttttctactgccatttcccggatctcttgctagctaagcatacaacaacacttagacggatgtatcggaaacccattgatttcattgaagaacaaacaacagggatagctgatatgatccttgttaacagtaacttcacggcatcaacatttgccaatacatttaaaaggctaaatgcacaagggagtcgcccagctgtactttaccccgcagtcaatattgatcagttcattgaaccccacacttataagttgaatttcctctccataaaccgctttgagaggaaaaagaacatcgatctagctgtttcagcttttgctatcctatgcaaacataagcaaaatctgagtgatgttacccttaccgttgcaggtggatatgacgagcgattgaaggagaatgttgagtacttggaggagctcagaagtttagccgagaaagaaggagtttctgatcgagttaactttatcacatcttgttcaaccgctgaaagaaatgaacttctctcaagctgcttgtgcgttctctacacccccacggatgaacattttggtattgttccattagaagcaatggctgcatacaaacccgtgatagcctgcaacagtggtggccccgtggagacggtaaagaatggagtaacaggctatctttgtgaaccaactccagaagatttcagttcggcgatggctagattcatcgagaatcctgagttggcgaatagaatgggagctgaagccaggaaccatgtcgttgaatcattctctgtgaagacgtttggacagaagttgaatcagtatctcgttgatgtcgtatcaagtcctaaagaagattgagattcctctgtttagtaatcatagatcgttcgtgaaacagcatactttaggcttagttctgaaactacaggagctttattctcggatcactcatcttgaccgtgaagattggttaaatctaggtgaacagttttttgtttgaggataaatttgacgaaataaaatcgaatcagtggtcggatatgggccaagtcaatgaag

SEQ ID NO: 7221 - protein, 403 aa, Arabidopsis thaliana
MAKKEGSKMNIAIIHPDLGIGGAERLIVDAAVELASHGHKVHIFTSHHDKSRCFEETLSGIFQVTVYGSFLPRHIFYRLHAVCAYLRCLFVALCVLLGWSSFDVVLADQVSVVVPLLKLKRSSKVVFYCHFPDLLLAKHTTTLRRMYRKPIDFIEEQTTGIADMILVNSNFTASTFANTFKRLNAQGSRPAVLYPAVNIDQFIEPHTYKLNFLSINRFERKKNIDLAVSAFAILCKHKQNLSDVTLTVAGGYDERLKENVEYLEELRSLAEKEGVSDRVNFITSCSTAERNELLSSCLCVLYTPTDEHFGIVPLEAMAAYKPVIACNSGGPVETVKNGVTGYLCEPTPEDFSSAMARFIENPELANRMGAEARNHVVESFSVKTFGQKLNQYLVDVVSSPKED

SEQ ID NO: 7222 - protein, 395 aa, Arabidopsis thaliana
MNIAIIHPDLGIGGAERLIVDAAVELASHGHKVHIFTSHHDKSRCFEETLSGIFQVTVYGSFLPRHIFYRLHAVCAYLRCLFVALCVLLGWSSFDVVLADQVSVVVPLLKLKRSSKVVFYCHFPDLLLAKHTTTLRRMYRKPIDFIEEQTTGIADMILVNSNFTASTFANTFKRLNAQGSRPAVLYPAVNIDQFIEPHTYKLNFLSINRFERKKNIDLAVSAFAILCKHKQNLSDVTLTVAGGYDERLKENVEYLEELRSLAEKEGVSDRVNFITSCSTAERNELLSSCLCVLYTPTDEHFGIVPLEAMAAYKPVIACNSGGPVETVKNGVTGYLCEPTPEDFSSAMARFIENPELANRMGAEARNHVVESFSVKTFGQKLNQYLVDVVSSPKED

SEQ ID NO: 7223 - protein, 258 aa, Arabidopsis thaliana
MYRKPIDFIEEQTTGIADMILVNSNFTASTFANTFKRLNAQGSRPAVLYPAVNIDQFIEPHTYKLNFLSINRFERKKNIDLAVSAFAILCKHKQNLSDVTLTVAGGYDERLKENVEYLEELRSLAEKEGVSDRVNFITSCSTAERNELLSSCLCVLYTPTDEHFGIVPLEAMAAYKPVIACNSGGPVETVKNGVTGYLCEPTPEDFSSAMARFIENPELANRMGAEARNHVVESFSVKTFGQKLNQYLVDVVSSPKED

SEQ ID NO: 7224 - DNA, 1956 bp, Arabidopsis thaliana
atgaactggcagctgtatgcaaaaaagtgtttaatttatctttcctttgggtttctcacggagtcacggttcctcgttcgtcctctcccgtcgtctctccgcactaaattgatgggcacatcatctgggtccaatcttcctcaccagatgctacctccacgtcagcaactacaaacatctctttcgcttgtatcttcagatccccacttgtcacggtctaattctggcattgtgcgtgaatcaccagctgaaagtgctagctctcaagaaacttggccaacctcaaaatctattatgggaaggaagacagatagcggaaagacagggcctgactctcatgatcaacatgtgatccgccatgtttccattgctgataaggtatcgctacgggacatagctagagagagacttgacatagtcgctgagagaatgcatcgattaccagaagaatatctcgaggagttaaagaatggtcttaaggctatccttgaaggaaatggtgcgcagcctatagatgagtttatgtttctgcagaagtttgtccagacgagatctgatttaacttcaaagacacttgtcagggctcaccgagtgcagcttgaagttcttgtggttataaacactggtatccaagcattcttgcacccaaacatcaatctctctcagtcatcactcatcgagatctttgtgtacaagagatgcagaaacatagcttgccaaaacgaactcccggctgatggttgtccctgtgagatatgcgctaataggaaaggcttctgcaacctgtgcatgtgtgtgatatgtaacaagtttgactttgcagtcaacacatgccgctggattggctgcgacgtgtgttctcattggactcatacggattgtgctattagggatggggagatttcgatgggagtttctcccaagagcgtatctgggatgggagaaatgctgttcaagtgtcgagcgtgcaaccatacttctgaattgctggggtgggtgaaagatgtgtttcagcactgtgcaccaaactgggatagggaatctttaatgaaggaacttgacttcgttagtaggattttccgtggaagcgaagatacaagaggccggaaactcttctggaagtgtgaggagcttatggagaagattaaaggtggactggctgaagcaacagcggccaagttgatactcatgtttttccaagaaattgaattggactctccaaagagccttgaaagcggagaaggtgggggtacgatagcacctcaagatgcatgcaaccgaattgctgaagttgtaaaggaaacactgaggaaaatggagatagtgggtgaggaaaagacgaggatgtacaagaaagcgcgaatggggcttgaggaatgcgagagagaggtagaagagaaagcaaagcaagtggcggaactgcagatggagaggcagaagaagaaacaacagatagaagaggtggagaggatagtgaggctgaagcaagcagaggcagagatgtttcagttaaaagcaaacgaggcaaaagtggaagcagagagattggaaaggattgtgaaagcgaaaaaggagaaaacagaagaggaatacgcaagtaactatttgaaactgaggctgagcgaggcggaggcagagaaagagtatctgtttgaaaagataaaagagcaggaaagtggtgggaatggtggtgaagcgtcacaagcagtgatgtactcaaagatcagagaaatgctgcatggatacaatgcatcgtcgccaagggtagatccaagatcaaaccagcgaaatcctttcagatccaatccttagatgtttgtattgtctctctttgtttgtattaaaaaaaaaatccgaatcaattaaggttggatttgtgtgtgaagtattgtggtctttgtattcaaattttgcacatgatcgtctatgttgggccataatgttatgcaagctttg

SEQ ID NO: 7225 - protein, 603 aa, Arabidopsis thaliana
MNWQLYAKKCLIYLSFGFLTESRFLVRPLPSSLRTKLMGTSSGSNLPHQMLPPRQQLQTSLSLVSSDPHLSRSNSGIVRESPAESASSQETWPTSKSIMGRKTDSGKTGPDSHDQHVIRHVSIADKVSLRDIARERLDIVAERMHRLPEEYLEELKNGLKAILEGNGAQPIDEFMFLQKFVQTRSDLTSKTLVRAHRVQLEVLVVINTGIQAFLHPNINLSQSSLIEIFVYKRCRNIACQNELPADGCPCEICANRKGFCNLCMCVICNKFDFAVNTCRWIGCDVCSHWTHTDCAIRDGEISMGVSPKSVSGMGEMLFKCRACNHTSELLGWVKDVFQHCAPNWDRESLMKELDFVSRIFRGSEDTRGRKLFWKCEELMEKIKGGLAEATAAKLILMFFQEIELDSPKSLESGEGGGTIAPQDACNRIAEVVKETLRKMEIVGEEKTRMYKKARMGLEECEREVEEKAKQVAELQMERQKKKQQIEEVERIVRLKQAEAEMFQLKANEAKVEAERLERIVKAKKEKTEEEYASNYLKLRLSEAEAEKEYLFEKIKEQESGGNGGEASQAVMYSKIREMLHGYNASSPRVDPRSNQRNPFRSNP

SEQ ID NO: 7226 - protein, 566 aa, Arabidopsis thaliana
MGTSSGSNLPHQMLPPRQQLQTSLSLVSSDPHLSRSNSGIVRESPAESASSQETWPTSKSIMGRKTDSGKTGPDSHDQHVIRHVSIADKVSLRDIARERLDIVAERMHRLPEEYLEELKNGLKAILEGNGAQPIDEFMFLQKFVQTRSDLTSKTLVRAHRVQLEVLVVINTGIQAFLHPNINLSQSSLIEIFVYKRCRNIACQNELPADGCPCEICANRKGFCNLCMCVICNKFDFAVNTCRWIGCDVCSHWTHTDCAIRDGEISMGVSPKSVSGMGEMLFKCRACNHTSELLGWVKDVFQHCAPNWDRESLMKELDFVSRIFRGSEDTRGRKLFWKCEELMEKIKGGLAEATAAKLILMFFQEIELDSPKSLESGEGGGTIAPQDACNRIAEVVKETLRKMEIVGEEKTRMYKKARMGLEECEREVEEKAKQVAELQMERQKKKQQIEEVERIVRLKQAEAEMFQLKANEAKVEAERLERIVKAKKEKTEEEYASNYLKLRLSEAEAEKEYLFEKIKEQESGGNGGEASQAVMYSKIREMLHGYNASSPRVDPRSNQRNPFRSNP

SEQ ID NO: 7227 - protein, 554 aa, Arabidopsis thaliana
MLPPRQQLQTSLSLVSSDPHLSRSNSGIVRESPAESASSQETWPTSKSIMGRKTDSGKTGPDSHDQHVIRHVSIADKVSLRDIARERLDIVAERMHRLPEEYLEELKNGLKAILEGNGAQPIDEFMFLQKFVQTRSDLTSKTLVRAHRVQLEVLVVINTGIQAFLHPNINLSQSSLIEIFVYKRCRNIACQNELPADGCPCEICANRKGFCNLCMCVICNKFDFAVNTCRWIGCDVCSHWTHTDCAIRDGEISMGVSPKSVSGMGEMLFKCRACNHTSELLGWVKDVFQHCAPNWDRESLMKELDFVSRIFRGSEDTRGRKLFWKCEELMEKIKGGLAEATAAKLILMFFQEIELDSPKSLESGEGGGTIAPQDACNRIAEVVKETLRKMEIVGEEKTRMYKKARMGLEECEREVEEKAKQVAELQMERQKKKQQIEEVERIVRLKQAEAEMFQLKANEAKVEAERLERIVKAKKEKTEEEYASNYLKLRLSEAEAEKEYLFEKIKEQESGGNGGEASQAVMYSKIREMLHGYNASSPRVDPRSNQRNPFRSNP

SEQ ID NO: 7228 - DNA, 1889 bp, Arabidopsis thaliana
gacgacgctacaaccatggcgtctctcgctctctccggctcctgctctctcgctttccctctcaaatctcgatctctctctctccctcgtcctccttcttcctctctcaatttgacgaaacctctccgatctctcgattctcgcttctccttactcaaatctccacttcccgtctctttacgccggagatcatcaactctcgttaaagcctcttccaccgtcgcttcagcttcctcttctccaactcctcctttggttccagctccggttccatggcaaggagctgccattaagcctcttctcgcttcgatcgctactggtttgattctatggttcgttccagtccccgaaggtgtcactcgcaacgcgtggcaattactcgcgatcttcctcgccaccatcgtcgggatcatcactcagccgcttcctctcggtgctgttgctctaatgggattaggagcttccgttctcaccaaaaccctaacgttcgccgccgcgttctccgctttcggagatccaatcccgtggctcatcgctcttgccttcttcttcgctcgcggtttcatcaaaaccggtctcggtaaccgtgtagcttaccagttcgttagactcttcggtagctcctcccttggtctcggttacagtctcgtcttcagtgaagctcttttagctccggcgattccttctgtctcggctcgtgccggtggaatctttctcccgttggtgaaatctctctgtgttgcttgtgggagtaacgttggggatggaacagagcaccgtcttggctcgtggttgatgcttacttgtttccagacttctgtgatctcttcttctatgttcttgacggctatggctgcgaatcctttgagtgctaatttggcgtttaacacgattaagcagacgattggatggactgattgggctaaagctgcgattgtaccaggacttgtgtctttgattgttgttccgtttcttttgtatctcatctatcctcctacggtgaagagcagtcctgatgctcctaagctggctcaggaaaagcttgacaagatgggacctatgtctaagaacgaattgattatggctgccactttattcctcacggttggtctctggatctttggagctaagttgggtgtagatgctgtgactgcagccattcttggattatcagtccttcttgtgacaggtgttgtgacatggaaagagtgcttagctgagtcggtcgcatgggacacactcacctggttcgctgctctcattgcgatggctggttatcttaacaaatatggtctcattgagtggttcagccagaccgtagtcaagtttgtgggaggattgggtttgtcatggcagctatcttttggaatcctcgtcctcttgtatttctacactcactacttctttgctagtggagctgcccacattggtgctatgttcactgcctttttatcggtttcaaccgctctaggcactccaccttactttgcagccttggttcttgcgttcctttccaacctgatgggaggattgacccattatggtatcgggtctgcgcctatcttctacggagctaactacgtgccgctggctaaatggtggggctatggattcctgatttcaatagtcaacattctcatctggcttggtgtaggtggtgcctggtggaagttcattggcttgtggtgaggaccaccatacaccaatcttcccattcttttccttacttatatatataatctcttagaacggctttgagattcagatttgagaaggattgaaatcagggttataaggattgagcagagtttttctgcaatttttattctcactcacacacattttgaagtgtaagcaatcttaacttgcgtcaattttgtttgatttct

SEQ ID NO: 7229 - protein, 562 aa, Arabidopsis thaliana
DDATTMASLALSGSCSLAFPLKSRSLSLPRPPSSSLNLTKPLRSLDSRFSLLKSPLPVSLRRRSSTLVKASSTVASASSSPTPPLVPAPVPWQGAAIKPLLASIATGLILWFVPVPEGVTRNAWQLLAIFLATIVGIITQPLPLGAVALMGLGASVLTKTLTFAAAFSAFGDPIPWLIALAFFFARGFIKTGLGNRVAYQFVRLFGSSSLGLGYSLVFSEALLAPAIPSVSARAGGIFLPLVKSLCVACGSNVGDGTEHRLGSWLMLTCFQTSVISSSMFLTAMAANPLSANLAFNTIKQTIGWTDWAKAAIVPGLVSLIVVPFLLYLIYPPTVKSSPDAPKLAQEKLDKMGPMSKNELIMAATLFLTVGLWIFGAKLGVDAVTAAILGLSVLLVTGVVTWKECLAESVAWDTLTWFAALIAMAGYLNKYGLIEWFSQTVVKFVGGLGLSWQLSFGILVLLYFYTHYFFASGAAHIGAMFTAFLSVSTALGTPPYFAALVLAFLSNLMGGLTHYGIGSAPIFYGANYVPLAKWWGYGFLISIVNILIWLGVGGAWWKFIGLW

SEQ ID NO: 7230 - protein, 557 aa, Arabidopsis thaliana
MASLALSGSCSLAFPLKSRSLSLPRPPSSSLNLTKPLRSLDSRFSLLKSPLPVSLRRRSSTLVKASSTVASASSSPTPPLVPAPVPWQGAAIKPLLASIATGLILWFVPVPEGVTRNAWQLLAIFLATIVGIITQPLPLGAVALMGLGASVLTKTLTFAAAFSAFGDPIPWLIALAFFFARGFIKTGLGNRVAYQFVRLFGSSSLGLGYSLVFSEALLAPAIPSVSARAGGIFLPLVKSLCVACGSNVGDGTEHRLGSWLMLTCFQTSVISSSMFLTAMAANPLSANLAFNTIKQTIGWTDWAKAAIVPGLVSLIVVPFLLYLIYPPTVKSSPDAPKLAQEKLDKMGPMSKNELIMAATLFLTVGLWIFGAKLGVDAVTAAILGLSVLLVTGVVTWKECLAESVAWDTLTWFAALIAMAGYLNKYGLIEWFSQTVVKFVGGLGLSWQLSFGILVLLYFYTHYFFASGAAHIGAMFTAFLSVSTALGTPPYFAALVLAFLSNLMGGLTHYGIGSAPIFYGANYVPLAKWWGYGFLISIVNILIWLGVGGAWWKFIGLW

SEQ ID NO: 7231 - protein, 413 aa, Arabidopsis thaliana
MGLGASVLTKTLTFAAAFSAFGDPIPWLIALAFFFARGFIKTGLGNRVAYQFVRLFGSSSLGLGYSLVFSEALLAPAIPSVSARAGGIFLPLVKSLCVACGSNVGDGTEHRLGSWLMLTCFQTSVISSSMFLTAMAANPLSANLAFNTIKQTIGWTDWAKAAIVPGLVSLIVVPFLLYLIYPPTVKSSPDAPKLAQEKLDKMGPMSKNELIMAATLFLTVGLWIFGAKLGVDAVTAAILGLSVLLVTGVVTWKECLAESVAWDTLTWFAALIAMAGYLNKYGLIEWFSQTVVKFVGGLGLSWQLSFGILVLLYFYTHYFFASGAAHIGAMFTAFLSVSTALGTPPYFAALVLAFLSNLMGGLTHYGIGSAPIFYGANYVPLAKWWGYGFLISIVNILIWLGVGGAWWKFIGLW

SEQ ID NO: 7232 - DNA, 1168 bp, Arabidopsis thaliana
aacttgagatttgagaataagaaaagttgaaatttgtaaaagatatgagaaattagtaaattccagaaacttattagaagcggcggatcgaattcgcgacgagcgttccattagggtttcgaatcaacatcaacaaacgacgagagaaaactttttaaaacatgtacggaggcgattttgacggcaacgctgctttcgccggcggcggcttcatgccttctcaggcgactacgcaagcccatgaatcctcatcttccctcaagaaccgcgatgtacgtaccttgcttcccctgacactgaagcagttgagcagcgcatcaaccactggcgaatcaaatttctctattgatggcgttgatattaaaactgttgtaatcgttggacggatttctagaatggagaacagaatcactcaggtcgattttgttgttgatgacggtacaggctgggttgattgtgtcagatggtgtcacgctcggcaagaaactgaagaaatggaagcagtcaagctgggaatgtatgttcgcttacatggacacctgaaaatttttcaagggaaacgatctgtgaatgttttttcagtcaggcctgtcactgacttcaatgagattgtacaccactttaccgagtgtatgtatgtccacatgtacaacaccaagttacggggtggttctattactcaagatactgctactcctaggccccaaatgccatattcaacaatgccaacccctgcaaagccctaccaaaccggtccatctaatcagttcccgaaccaattcaatgattcaatgcatggtgtaaagcagacggtcttgaattacctgaatcaacctatgcacattgtatctgaagctggagttcactgtgatataattgcccgtgaactcaggattccgctgcttcaagtcaaggaagcgttagaacagctctcaaacgatggttgcatatactcgactttggacgagacatgcttcaaatcgactgctaacgcttgatgaaaattgatttatatgtcaacacatatcaatcctcctctcatgttcaaaagtcttttgtataggccctaaggtagaacaatatgtagttttaagactaaaaatctttcttatggcttttggatttttttaaagggaactaaactcaaaagttcaaaatcattttcgcc

SEQ ID NO: 7233 - protein, 278 aa, Arabidopsis thaliana
MYGGDFDGNAAFAGGGFMPSQATTQAHESSSSLKNRDVRTLLPLTLKQLSSASTTGESNFSIDGVDIKTVVIVGRISRMENRITQVDFVVDDGTGWVDCVRWCHARQETEEMEAVKLGMYVRLHGHLKIFQGKRSVNVFSVRPVTDFNEIVHHFTECMYVHMYNTKLRGGSITQDTATPRPQMPYSTMPTPAKPYQTGPSNQFPNQFNDSMHGVKQTVLNYLNQPMHIVSEAGVHCDIIARELRIPLLQVKEALEQLSNDGCIYSTLDETCFKSTANA

SEQ ID NO: 7234 - protein, 261 aa, Arabidopsis thaliana
MPSQATTQAHESSSSLKNRDVRTLLPLTLKQLSSASTTGESNFSIDGVDIKTVVIVGRISRMENRITQVDFVVDDGTGWVDCVRWCHARQETEEMEAVKLGMYVRLHGHLKIFQGKRSVNVFSVRPVTDFNEIVHHFTECMYVHMYNTKLRGGSITQDTATPRPQMPYSTMPTPAKPYQTGPSNQFPNQFNDSMHGVKQTVLNYLNQPMHIVSEAGVHCDIIARELRIPLLQVKEALEQLSNDGCIYSTLDETCFKSTANA

SEQ ID NO: 7235 - protein, 200 aa, Arabidopsis thaliana
MENRITQVDFVVDDGTGWVDCVRWCHARQETEEMEAVKLGMYVRLHGHLKIFQGKRSVNVFSVRPVTDFNEIVHHFTECMYVHMYNTKLRGGSITQDTATPRPQMPYSTMPTPAKPYQTGPSNQFPNQFNDSMHGVKQTVLNYLNQPMHIVSEAGVHCDIIARELRIPLLQVKEALEQLSNDGCIYSTLDETCFKSTANA

SEQ ID NO: 7236 - DNA, 1090 bp, Arabidopsis thaliana
ggagtctagctccttggtttctctgcttctccttctctctcagatcaaaaaaaaccttcgtgtgcgtctctcgtcctctaaattgtcgaaaatgctggctaggctcgctgcgaagcgtcttctcgagatccgtcaagttttccgtcaaccaacctctcaggtgactcgtagcttatcgacggccttaaactaccatctggattctcctgataacaaacccgatcttccatgggagttttcagaggctaaccaatctaaggttaaggagattctctcttactatccatccaattacaagcagtccgcagttattcctctcctagatcttgcacaacagcagaatggaggctggctccctgtttcagcaatgaatgcggttgctaaagttatagaagttgcccctatccgtgtttatgaggttgcaacattttactcaatgttcaacagagcaaaggttggaaagtatcaccttctagtttgtggcacaacaccttgcatgatccgtggttcacgagacatcgaatcagctttgctagaccatttgggagtgaaacgcggtgaggtcacaaaggatggtttgttctctgttggagagatggagtgcatgggatgttgtgttaatgcacccatgatcactgtggctgactattccaatggatcagaaggatatacatataactatttcgaagatgttacacctgagaaagtcgtagaaattgttgaaaagctgagaaaaggagaaaagccaccgcatggaactcagaacccgaagaggatcaagtgtggaccagaaggagggaataagacactgcttggtgagcctaagccaccacaattccgtgatcttgatgcatgctaaagctaagttctgtttgccgcagttttatgtggttcaataacgcaaaggctatagcgatgtatgtttgacgcctgtaccgcatcaaattgagtttgcatactctttgtagtcttcttggttttggaatttagacccattttaaacaaattgccaaatcatcttcgtttattattatctcactctaagattcatgtgaaattgtaataaaaacaaaacttttatctgttactt

SEQ ID NO: 7237 - protein, 285 aa, Arabidopsis thaliana
ESSSLVSLLLLLSQIKKNLRVRLSSSKLSKMLARLAAKRLLEIRQVFRQPTSQVTRSLSTALNYHLDSPDNKPDLPWEFSEANQSKVKEILSYYPSNYKQSAVIPLLDLAQQQNGGWLPVSAMNAVAKVIEVAPIRVYEVATFYSMFNRAKVGKYHLLVCGTTPCMIRGSRDIESALLDHLGVKRGEVTKDGLFSVGEMECMGCCVNAPMITVADYSNGSEGYTYNYFEDVTPEKVVEIVEKLRKGEKPPHGTQNPKRIKCGPEGGNKTLLGEPKPPQFRDLDAC

SEQ ID NO: 7238 - protein, 255 aa, Arabidopsis thaliana
MLARLAAKRLLEIRQVFRQPTSQVTRSLSTALNYHLDSPDNKPDLPWEFSEANQSKVKEILSYYPSNYKQSAVIPLLDLAQQQNGGWLPVSAMNAVAKVIEVAPIRVYEVATFYSMFNRAKVGKYHLLVCGTTPCMIRGSRDIESALLDHLGVKRGEVTKDGLFSVGEMECMGCCVNAPMITVADYSNGSEGYTYNYFEDVTPEKVVEIVEKLRKGEKPPHGTQNPKRIKCGPEGGNKTLLGEPKPPQFRDLDAC

SEQ ID NO: 7239 - protein, 163 aa, Arabidopsis thaliana
MNAVAKVIEVAPIRVYEVATFYSMFNRAKVGKYHLLVCGTTPCMIRGSRDIESALLDHLGVKRGEVTKDGLFSVGEMECMGCCVNAPMITVADYSNGSEGYTYNYFEDVTPEKVVEIVEKLRKGEKPPHGTQNPKRIKCGPEGGNKTLLGEPKPPQFRDLDAC

SEQ ID NO: 7240 - DNA, 1999 bp, Arabidopsis thaliana
gtggatttgagatgatccctgcttcaatggaggaagctcaccagctggagtcgagatccgatgacctaagtcaacggagaagctactggagatggaggaagcaggattttttcccggaattctcttttcagagcttctctacctacaaatcagctctctccgccacttgtccacgcctcgccgatcgtcttctctctcgctcttccgatgcgtacgagctcgatgcagcccgccgcgaaagcgagaaccctatgcgtcgttgtctcacttggtgggacttgctctggcttagctttggttctgttgttggttcgggtgtgttcgtgatcacgggtcaggaggctcgagttggagctggtcctgctgttgttctctcctacgctatctctggtgtctctgcattgctctcagttctctgttatgctgagtttggagttgagattcctgtcgctggaggttctttctcttatcttagggttgaattgggggattttattgcctttattgctgctgggaatattcttcttgaggctatggttggtgctgctggattagggaggtcatggtcttcgtatctagctagtttggtcaagaatgattctgattattttcggattaaagtcgattcctttgctaaagggtttgatcttttggatccggttgctgttgcagtgcttttagttgctaatggtattgccatgactggaacaaagaggacttcttggttgaatttgattacttccatggtcactgtttgtattattgtgtttatcgtcgttgtggggtttactcattcaaaaacctcaaatttggttccttttttcccttatggagcgaaaggtgtggtgcaatctgctgcagttgtctactggtcatacactggttttgatatggtggctaacatggctgaagaaaccgagaaaccttccagagatattccaattggtttggttggttcgatgtctatgatcactgtggtttactgtttgatggctctggccttgactatgatggtgaaatacactgaaattgatgcgaatgcagcttattctgttgcttttgctcagattgggatgaaatgggcgaagtacttggttggtatatgcgctttaaagggaatgaccacaagcctgcttgttggctctctaggccaagctcggtacaccactcagattgctcggtctcatatgattcctccatggtttgctttggttcatccaaaaacaggaacccctatttatgctactctccttgtaaccatactcagttcaataatatccttcttcaccagcttagaggttttatcaagcgttttctcctttgctaccctcttcattttcatgctcgtggcagtagcattgcttgtgagacgttactacgtgaaggatgtcactcctgaggccggtttgttgaagtttcttggttttctgtttttgataattgcttcctccattggagtatcagcgctttggaactcaggcgttaaaggttggatcgcttacacagtgactggagttatttggtttataggcactttagggttggcattgcttccgaaatatcgtgttcctaaggtatggggagtcccactagttccgtggttgccatcgttttcaatcgccatgaatctattccttatcggatcactcggttatgtagcattcttgagattcattatctgcaccatggtgatgcttttgtactacctattcgttggtcttcatgcaacctatgatgtagctcatcagcctttggaggaagcaaagtttgagggagagagataaaagaatcgatcgtaacacttcactacgtttggtaaattgtataaattcccttgttttctgatgtgatttcaatattcttctattaaaatgtacaataatactatcgatcttgttttcgtgttttctcattcttttcatttttcaatgttgaaacttattaacttgttgaactctgttgtatttgtttctatcttggaaatttaaaattggagttg

SEQ ID NO: 7241 - protein, 593 aa, Arabidopsis thaliana
GFEMIPASMEEAHQLESRSDDLSQRRSYWRWRKQDFFPEFSFQSFSTYKSALSATCPRLADRLLSRSSDAYELDAARRESENPMRRCLTWWDLLWLSFGSVVGSGVFVITGQEARVGAGPAVVLSYAISGVSALLSVLCYAEFGVEIPVAGGSFSYLRVELGDFIAFIAAGNILLEAMVGAAGLGRSWSSYLASLVKNDSDYFRIKVDSFAKGFDLLDPVAVAVLLVANGIAMTGTKRTSWLNLITSMVTVCIIVFIVVVGFTHSKTSNLVPFFPYGAKGVVQSAAVVYWSYTGFDMVANMAEETEKPSRDIPIGLVGSMSMITVVYCLMALALTMMVKYTEIDANAAYSVAFAQIGMKWAKYLVGICALKGMTTSLLVGSLGQARYTTQIARSHMIPPWFALVHPKTGTPIYATLLVTILSSIISFFTSLEVLSSVFSFATLFIFMLVAVALLVRRYYVKDVTPEAGLLKFLGFLFLIIASSIGVSALWNSGVKGWIAYTVTGVIWFIGTLGLALLPKYRVPKVWGVPLVPWLPSFSIAMNLFLIGSLGYVAFLRFIICTMVMLLYYLFVGLHATYDVAHQPLEEAKFEGER

SEQ ID NO: 7242 - protein, 590 aa, Arabidopsis thaliana
MIPASMEEAHQLESRSDDLSQRRSYWRWRKQDFFPEFSFQSFSTYKSALSATCPRLADRLLSRSSDAYELDAARRESENPMRRCLTWWDLLWLSFGSVVGSGVFVITGQEARVGAGPAVVLSYAISGVSALLSVLCYAEFGVEIPVAGGSFSYLRVELGDFIAFIAAGNILLEAMVGAAGLGRSWSSYLASLVKNDSDYFRIKVDSFAKGFDLLDPVAVAVLLVANGIAMTGTKRTSWLNLITSMVTVCIIVFIVVVGFTHSKTSNLVPFFPYGAKGVVQSAAVVYWSYTGFDMVANMAEETEKPSRDIPIGLVGSMSMITVVYCLMALALTMMVKYTEIDANAAYSVAFAQIGMKWAKYLVGICALKGMTTSLLVGSLGQARYTTQIARSHMIPPWFALVHPKTGTPIYATLLVTILSSIISFFTSLEVLSSVFSFATLFIFMLVAVALLVRRYYVKDVTPEAGLLKFLGFLFLIIASSIGVSALWNSGVKGWIAYTVTGVIWFIGTLGLALLPKYRVPKVWGVPLVPWLPSFSIAMNLFLIGSLGYVAFLRFIICTMVMLLYYLFVGLHATYDVAHQPLEEAKFEGER

SEQ ID NO: 7243 - protein, 585 aa, Arabidopsis thaliana
MEEAHQLESRSDDLSQRRSYWRWRKQDFFPEFSFQSFSTYKSALSATCPRLADRLLSRSSDAYELDAARRESENPMRRCLTWWDLLWLSFGSVVGSGVFVITGQEARVGAGPAVVLSYAISGVSALLSVLCYAEFGVEIPVAGGSFSYLRVELGDFIAFIAAGNILLEAMVGAAGLGRSWSSYLASLVKNDSDYFRIKVDSFAKGFDLLDPVAVAVLLVANGIAMTGTKRTSWLNLITSMVTVCIIVFIVVVGFTHSKTSNLVPFFPYGAKGVVQSAAVVYWSYTGFDMVANMAEETEKPSRDIPIGLVGSMSMITVVYCLMALALTMMVKYTEIDANAAYSVAFAQIGMKWAKYLVGICALKGMTTSLLVGSLGQARYTTQIARSHMIPPWFALVHPKTGTPIYATLLVTILSSIISFFTSLEVLSSVFSFATLFIFMLVAVALLVRRYYVKDVTPEAGLLKFLGFLFLIIASSIGVSALWNSGVKGWIAYTVTGVIWFIGTLGLALLPKYRVPKVWGVPLVPWLPSFSIAMNLFLIGSLGYVAFLRFIICTMVMLLYYLFVGLHATYDVAHQPLEEAKFEGER

SEQ ID NO: 7244 - DNA, 1547 bp, Arabidopsis thaliana
atggactcaggaagtgcagtggacatcatttcgacgctttcagacttcctgctcgtcctgatcatttcgaacctttccttcaaggaggctttgagcaccagtcgcctttccacccgctggagacacatatgtcgcgaaacgagaaacatctctttcagagaggacgagatcgtgacattcgctgatgattccgttgctcgctattaccaaagggctgcattagttgcctatatggttggttgggttaacaattttaccggtggagttgttgaaagcttcgagcttcgtctctctaattcgtatgcttttgaagaaggggtcaccacactgatcgaattcgctgtctccaagaatgtcaagcatctttttcttgacctctcagaacctcgttgggttaccaataacgacgctgcacaattagaaccgggtttgatcaaattaccggagagtttttacaagattaccagtctcgtgacgttgaagttattcggttgccggtttgaaccatcgaggctcgcgaaaccgggtatggtgaaaaccatgttcttccgctggatccgtctcgagatgttatcggctttgatagcaaagacacctcttctcgagatcttgaacatcaaaaactgttgggagattggtcttgatgcgataaccggatataacgaccggttaatgaagttggttttcaagtattgttccttctccgcgcagcaaaccacactggacgtgcccaatattcagatcttcaagtactttgggaaagtctatcgctttgagttcgcgagtgcgaacaagttaatggaggaggcatatctggactaccgtgaagagagccgttacaacgtgagtgcaggagcaataatcagtggatttctctacagtatgttgtctgctaagacattcacaatctgtccgtatgtccttcaattgatccaagagtgtgaagacccggtgcgactgaaagcaccgatggagacaagacagttggttctgaagacaaattttgaacctaatgagtttgttggaatcagattcatgcttaacagttctccgtatctggagacactctcattccagatggtgggtcctcggcccatcgaagagatggtgcctcagatcgatccagaggcttattgggggcagaataccagtcatgaatgtttgaagaaaacacttaagaaagtggaggtgtggagcttttatggtggtacgcacgagttacgtgttctcgagtatctgattcgttatggtcgtatgttggagagggtggatctgtatcagccaattggattggatgatattcaactgcttccgatacgtgctgcagctgatagggtgggagagttcgaggctcgttcggagaatttggtcgttactttttactaagaaacctttaagggatctaaggatggataaatttgggtgtgttacccatcttatgttgtttttcagttataaacttccgaataaattgtggtgcctggatttgtaatcacacatttatatttcccttttaaaacttaataataaaaagtaacctttacttt

SEQ ID NO: 7245 - protein, 461 aa, Arabidopsis thaliana
MDSGSAVDIISTLSDFLLVLIISNLSFKEALSTSRLSTRWRHICRETRNISFREDEIVTFADDSVARYYQRAALVAYMVGWVNNFTGGVVESFELRLSNSYAFEEGVTTLIEFAVSKNVKHLFLDLSEPRWVTNNDAAQLEPGLIKLPESFYKITSLVTLKLFGCRFEPSRLAKPGMVKTMFFRWIRLEMLSALIAKTPLLEILNIKNCWEIGLDAITGYNDRLMKLVFKYCSFSAQQTTLDVPNIQIFKYFGKVYRFEFASANKLMEEAYLDYREESRYNVSAGAIISGFLYSMLSAKTFTICPYVLQLIQECEDPVRLKAPMETRQLVLKTNFEPNEFVGIRFMLNSSPYLETLSFQMVGPRPIEEMVPQIDPEAYWGQNTSHECLKKTLKKVEVWSFYGGTHELRVLEYLIRYGRMLERVDLYQPIGLDDIQLLPIRAAADRVGEFEARSENLVVTFY

SEQ ID NO: 7246 - protein, 384 aa, Arabidopsis thaliana
MVGWVNNFTGGVVESFELRLSNSYAFEEGVTTLIEFAVSKNVKHLFLDLSEPRWVTNNDAAQLEPGLIKLPESFYKITSLVTLKLFGCRFEPSRLAKPGMVKTMFFRWIRLEMLSALIAKTPLLEILNIKNCWEIGLDAITGYNDRLMKLVFKYCSFSAQQTTLDVPNIQIFKYFGKVYRFEFASANKLMEEAYLDYREESRYNVSAGAIISGFLYSMLSAKTFTICPYVLQLIQECEDPVRLKAPMETRQLVLKTNFEPNEFVGIRFMLNSSPYLETLSFQMVGPRPIEEMVPQIDPEAYWGQNTSHECLKKTLKKVEVWSFYGGTHELRVLEYLIRYGRMLERVDLYQPIGLDDIQLLPIRAAADRVGEFEARSENLVVTFY

SEQ ID NO: 7247 - protein, 285 aa, Arabidopsis thaliana
MVKTMFFRWIRLEMLSALIAKTPLLEILNIKNCWEIGLDAITGYNDRLMKLVFKYCSFSAQQTTLDVPNIQIFKYFGKVYRFEFASANKLMEEAYLDYREESRYNVSAGAIISGFLYSMLSAKTFTICPYVLQLIQECEDPVRLKAPMETRQLVLKTNFEPNEFVGIRFMLNSSPYLETLSFQMVGPRPIEEMVPQIDPEAYWGQNTSHECLKKTLKKVEVWSFYGGTHELRVLEYLIRYGRMLERVDLYQPIGLDDIQLLPIRAAADRVGEFEARSENLVVTFY

SEQ ID NO: 7248 - DNA, 795 bp, Arabidopsis thaliana
atcgaaaaactaatcaatctctcacattcacattcatcttcttcttcaatctctctcaacacaaagaagaacaaagaagttatgagctcaatgatggagactctccagattcgtaaacccacttccctccccgtttctcaacgccctaatgcagcagccaccgccgacgatgagcctggtctcatccgccgtcgtctctcttctctatcactcaacctctcaaaccaaccagcagcgatcgcagctagattcccgagatccaaatctgtttccgccatgggagaacaagcaggaagctctgtgaaagaatggtgggaatggggttggtcatggatcctttcaagaaaacctatattcatcagagatcttgagcttaacaaagacgaagctaaatcgattggttcacaaaacagaggaagtataatgcacgttttcttcaaactccgatctcagatccgtaatttcatgggaccttcttcagaagattctcttcctctttcttgcaaatacaagcgtcaacgataaaatgattcatataaggttgagattttgtgatttgtctgttctttttttacttttgtgcaatggagtataatgaatgtataattcgtctttttttttttaaacttgatgttgtattttgctataattaatttgcctagattattattaatcaatttatttattttatttgtggttacgagtttgtggctgtgcagttgtatttttgtattttaataaccatgcaaattatatagaaaaatccgttattttcgttttaatcttttacgcgcc

SEQ ID NO: 7249 - protein, 174 aa, Arabidopsis thaliana
IEKLINLSHSHSSSSSISLNTKKNKEVMSSMMETLQIRKPTSLPVSQRPNAAATADDEPGLIRRRLSSLSLNLSNQPAAIAARFPRSKSVSAMGEQAGSSVKEWWEWGWSWILSRKPIFIRDLELNKDEAKSIGSQNRGSIMHVFFKLRSQIRNFMGPSSEDSLPLSCKYKRQR

SEQ ID NO: 7250 - protein, 147 aa, Arabidopsis thaliana
MSSMMETLQIRKPTSLPVSQRPNAAATADDEPGLIRRRLSSLSLNLSNQPAAIAARFPRSKSVSAMGEQAGSSVKEWWEWGWSWILSRKPIFIRDLELNKDEAKSIGSQNRGSIMHVFFKLRSQIRNFMGPSSEDSLPLSCKYKRQR

SEQ ID NO: 7251 - protein, 144 aa, Arabidopsis thaliana
MMETLQIRKPTSLPVSQRPNAAATADDEPGLIRRRLSSLSLNLSNQPAAIAARFPRSKSVSAMGEQAGSSVKEWWEWGWSWILSRKPIFIRDLELNKDEAKSIGSQNRGSIMHVFFKLRSQIRNFMGPSSEDSLPLSCKYKRQR

SEQ ID NO: 7252 - DNA, 1704 bp, Arabidopsis thaliana
attccttgcttcatttttcgtcaccctagccgctttactctcttgcgatatctctgagatttgtttgacagtctctaaccatgggtaaagagaagtttcacatcaacattgtggtcattggccacgtcgattctggaaagtcgaccaccactggacacttgatctacaagttgggtggtattgacaagcgtgtcattgagaggttcgagaaggaggctgctgagatgaacaagaggtccttcaagtacgcatgggttttggacaaacttaaggctgagcgtgagcgtggtatcaccattgacattgctctctggaagttcgagaccaccaagtactactgcactgtcattgatgctcctggccatcgtgatttcatcaagaacatgatcactggtacctcccaggctgattgtgctgtccttatcattgactccaccactggtggttttgaggctggtatctccaaggatggtcagacccgtgagcacgctctacttgctttcacccttggtgtcaagcagatgatctgctgttgtaacaagatggatgccactacccccaagtactccaaggccaggtacgatgaaatcatcaaggaggtgtcttcctacttgaagaaggttggttacaaccccgacaaaatcccatttgtgcccatctctggatttgagggtgacaacatgattgagaggtccaccaaccttgactggtacaagggaccaactctccttgaggctcttgaccagatcaacgagcccaagaggccgtcagacaagccccttcgtctcccacttcaggatgtctacaagattggtggtattggaacggtgccagtgggacgtgttgagactggtatgatcaagcctggtatggttgtgacctttgctcccacaggattgaccactgaggtcaagtctgttgagatgcaccacgagtctcttcttgaggcacttccaggtgacaacgttgggttcaatgttaagaatgttgctgtcaaggatcttaagagagggtacgtcgcatccaactccaaggatgaccctgccaagggtgctgctaacttcacctcccaggtcatcatcatgaaccaccctggtcagattggtaacggttacgccccagtcctggattgccacacctctcacattgcagtcaagttctctgagatcttgaccaagattgacaggcgttctggtaaggagattgagaaggagcccaagttcttgaagaatggtgatgctggtatggtgaagatgactccaaccaagcccatggttgtggagaccttctctgagtacccaccacttggacgtttcgctgtgagggacatgaggcagactgttgcagtcggtgttatcaagagtgttgacaagaaggacccaaccggagccaaggttaccaaggctgccgtcaagaagggtgcgaagtgaaccatcctcaaaactctatctgccgcaggtgaatcaaaggacagtgttagttttattacaatagtttggtatttggtcgcgtgtctgtgttcttgtttcgttttctccccgtcagagcgttgttctcgtaattgggttcttgatcggaggtggcggatctacacacacattcttcctgttttttgctttttatttgttttctcattttgaactgttttaaaatttctgttatatgaatgaatgttttccctgcggttattatcttctttactct

SEQ ID NO: 7253 - protein, 449 aa, Arabidopsis thaliana
MGKEKFHINIVVIGHVDSGKSTTTGHLIYKLGGIDKRVIERFEKEAAEMNKRSFKYAWVLDKLKAERERGITIDIALWKFETTKYYCTVIDAPGHRDFIKNMITGTSQADCAVLIIDSTTGGFEAGISKDGQTREHALLAFTLGVKQMICCCNKMDATTPKYSKARYDEIIKEVSSYLKKVGYNPDKIPFVPISGFEGDNMIERSTNLDWYKGPTLLEALDQINEPKRPSDKPLRLPLQDVYKIGGIGTVPVGRVETGMIKPGMVVTFAPTGLTTEVKSVEMHHESLLEALPGDNVGFNVKNVAVKDLKRGYVASNSKDDPAKGAANFTSQVIIMNHPGQIGNGYAPVLDCHTSHIAVKFSEILTKIDRRSGKEIEKEPKFLKNGDAGMVKMTPTKPMVVETFSEYPPLGRFAVRDMRQTVAVGVIKSVDKKDPTGAKVTKAAVKKGAK

SEQ ID NO: 7254 - protein, 401 aa, Arabidopsis thaliana
MNKRSFKYAWVLDKLKAERERGITIDIALWKFETTKYYCTVIDAPGHRDFIKNMITGTSQADCAVLIIDSTTGGFEAGISKDGQTREHALLAFTLGVKQMICCCNKMDATTPKYSKARYDEIIKEVSSYLKKVGYNPDKIPFVPISGFEGDNMIERSTNLDWYKGPTLLEALDQINEPKRPSDKPLRLPLQDVYKIGGIGTVPVGRVETGMIKPGMVVTFAPTGLTTEVKSVEMHHESLLEALPGDNVGFNVKNVAVKDLKRGYVASNSKDDPAKGAANFTSQVIIMNHPGQIGNGYAPVLDCHTSHIAVKFSEILTKIDRRSGKEIEKEPKFLKNGDAGMVKMTPTKPMVVETFSEYPPLGRFAVRDMRQTVAVGVIKSVDKKDPTGAKVTKAAVKKGAK

SEQ ID NO: 7255 - protein, 348 aa, Arabidopsis thaliana
MITGTSQADCAVLIIDSTTGGFEAGISKDGQTREHALLAFTLGVKQMICCCNKMDATTPKYSKARYDEIIKEVSSYLKKVGYNPDKIPFVPISGFEGDNMIERSTNLDWYKGPTLLEALDQINEPKRPSDKPLRLPLQDVYKIGGIGTVPVGRVETGMIKPGMVVTFAPTGLTTEVKSVEMHHESLLEALPGDNVGFNVKNVAVKDLKRGYVASNSKDDPAKGAANFTSQVIIMNHPGQIGNGYAPVLDCHTSHIAVKFSEILTKIDRRSGKEIEKEPKFLKNGDAGMVKMTPTKPMVVETFSEYPPLGRFAVRDMRQTVAVGVIKSVDKKDPTGAKVTKAAVKKGAK

SEQ ID NO: 7256 - DNA, 1801 bp, Arabidopsis thaliana
ccgctttctctctctgtctttccttgttcaaccctcgagagattacggatagtgaaagagaagctacaaaatttcccaatttatcaaaaaatagaaatttcttacttttttcaaaattcatttctccccaaaaaaaatatcttgtgaaaactgcaactgtgatccatggcggaggatatggctgccgacgaagttacggctcctcctcgtaaggttcttatcatctccgctggtgctagccactccgtcgctcttctctctggtgacattgtttgttcttggggtcgaggagaggatggacagttaggtcatggcgatgcagaggatcgaccttctccgactcagcttagcgctttagatggccaccaaattgtttccgttacctgtggtgctgatcacactgttgcttattcacaatcaggcatggaagtctacagttggggatggggtgattttgggagattaggccatggtaactcaagcgacttgtttactccgctaccaatcaaagcattgcacggtattcggatcaagcagattgcttgtggggatagtcattgtttggctgtcactatggaaggagaggtccagagttggggccgcaaccagaatggtcaacttggtctgggggacaccgaagattctctagtgcctcagaagattcaagcctttgagggaataccaatcaaaatggttgctgctggtgcagaacacactgctgcagttacagaagatggtgacctctatggatggggctggggaagatacggaaatttgggattaggtgaccggactgaccgcttagttcctgaaagagttacctctactggtggtgagaaaatgtcaatggttgcttgtggatggcggcacacaatatcagtttcctactctggagcattgtatacttatggatggagcaaatatggacagctaggacatggagacttggaggatcaccttattcctcacaaactggaagcactgagcaacagttttatctcccagatttcgggaggttggagacatacaatggcattgacttcagatggaaaactatatggatggggttggaataagtttggacaagtaggagtcggcaataatttagatcagtgttctcctgtgcaagtgcgatttcccgatgatcagaaagtagttcaagtctcatgtggatggagacataccttggctgtcactgaaagaaataacgtgtttgcttggggtagaggtacaaatggacagctcggcattggagagtcggttgacaggaactttcccaagattatagaggcactgagcgtcgatggagcaagtggacaacatatagaatcttctaatatcgatccatcttcagggaaaagctgggtgtcgcctgcagagagatatgcagttgttcctgatgaaacgggcctaacggatggttcaagcaaaggtaatggaggtgatatcagtgttccacaaactgatgtcaagcgtgtacgaatttgagcctgagtcaattccgttttttttttacttccggttcttccgttggattcgaaggtttttcagtgatctcttttgggttgaggtttgtactaagagtacgtctgtctagtttgggattgtactttttgttgttgttgttagtttgtaacttgtgatgcttccctccccctagctctcttattacatgggcgttgtaaactgtgtgtactactactactagtctctagggtatgtactttttttttcctcaccataataataccttctggttctatatctttcatttcttaaaaagttttctgttttttccttc

SEQ ID NO: 7257 - protein, 440 aa, Arabidopsis thaliana
MAEDMAADEVTAPPRKVLIISAGASHSVALLSGDIVCSWGRGEDGQLGHGDAEDRPSPTQLSALDGHQIVSVTCGADHTVAYSQSGMEVYSWGWGDFGRLGHGNSSDLFTPLPIKALHGIRIKQIACGDSHCLAVTMEGEVQSWGRNQNGQLGLGDTEDSLVPQKIQAFEGIPIKMVAAGAEHTAAVTEDGDLYGWGWGRYGNLGLGDRTDRLVPERVTSTGGEKMSMVACGWRHTISVSYSGALYTYGWSKYGQLGHGDLEDHLIPHKLEALSNSFISQISGGWRHTMALTSDGKLYGWGWNKFGQVGVGNNLDQCSPVQVRFPDDQKVVQVSCGWRHTLAVTERNNVFAWGRGTNGQLGIGESVDRNFPKIIEALSVDGASGQHIESSNIDPSSGKSWVSPAERYAVVPDETGLTDGSSKGNGGDISVPQTDVKRVRI

SEQ ID NO: 7258 - protein, 436 aa, Arabidopsis thaliana
MAADEVTAPPRKVLIISAGASHSVALLSGDIVCSWGRGEDGQLGHGDAEDRPSPTQLSALDGHQIVSVTCGADHTVAYSQSGMEVYSWGWGDFGRLGHGNSSDLFTPLPIKALHGIRIKQIACGDSHCLAVTMEGEVQSWGRNQNGQLGLGDTEDSLVPQKIQAFEGIPIKMVAAGAEHTAAVTEDGDLYGWGWGRYGNLGLGDRTDRLVPERVTSTGGEKMSMVACGWRHTISVSYSGALYTYGWSKYGQLGHGDLEDHLIPHKLEALSNSFISQISGGWRHTMALTSDGKLYGWGWNKFGQVGVGNNLDQCSPVQVRFPDDQKVVQVSCGWRHTLAVTERNNVFAWGRGTNGQLGIGESVDRNFPKIIEALSVDGASGQHIESSNIDPSSGKSWVSPAERYAVVPDETGLTDGSSKGNGGDISVPQTDVKRVRI

SEQ ID NO: 7259 - protein, 354 aa, Arabidopsis thaliana
MEVYSWGWGDFGRLGHGNSSDLFTPLPIKALHGIRIKQIACGDSHCLAVTMEGEVQSWGRNQNGQLGLGDTEDSLVPQKIQAFEGIPIKMVAAGAEHTAAVTEDGDLYGWGWGRYGNLGLGDRTDRLVPERVTSTGGEKMSMVACGWRHTISVSYSGALYTYGWSKYGQLGHGDLEDHLIPHKLEALSNSFISQISGGWRHTMALTSDGKLYGWGWNKFGQVGVGNNLDQCSPVQVRFPDDQKVVQVSCGWRHTLAVTERNNVFAWGRGTNGQLGIGESVDRNFPKIIEALSVDGASGQHIESSNIDPSSGKSWVSPAERYAVVPDETGLTDGSSKGNGGDISVPQTDVKRVRI

SEQ ID NO: 7260 - DNA, 1254 bp, Arabidopsis thaliana
aacttcgtggtactcttttgctttacccatttttcaatgtcttacgatgagatgctttctgctgcgaagaaagctgtttctctcgctgctcgtctcagcaacgaagtgaggaaatctctgttggtaactgacgtttggaacaaatcagatgatagtcctgttactgttgctgattatggttcgcaggcggtggttagccttgtactggaaagggaactccagaatgaacctgtgtctttagtggctgaagaggattctggtgagttaaggaagattgctgctgagaccgttttggctcgtattacagagcttgtcaaagatactcttgcaagtgatgaatcatatgctattgcttctcctttgacttcggatgatgtgctcaacgctatagatcgtggtaaatcagaaggaggtcctaagggtcgccactggatcttggatcctattggtggcactagaggatttataagaggagaacaatatgcaataggattagcattgttggtggaaggcaaagtagtactaggtgtaatggcttgtcctaagcttccattggcatcaactgctggtaatgcactcaagtctttacctgaaaaagttggttgccttttctatggttcggttggcaatgggacttatgtccagtctctcagtgtcgactctcttcctgcgaaggtggaggttagcagcatagatgatcctgcgaaagcgagtttcttcgagtcataccacacacctgtccccatccataacaccattgctacgaaattggggataaaagaatctccaatcaagatcaacagccagactaagtatgcagctttatctagaggagatggagaggtttacttgaggtttactcgcaaagcaagacccgaatcaatatggaatcacgctgctggctcaatcattgtttcagaagcaggagggaaagtgactgatgcagcagggaatccattggacttttcgaaagggaagtatcttgattacaagagaggaatcgtcgttacgacgcagaaactgttgccaaggcttttaacagcagtaagagaatcaattaaagaagaagaagaggaagaagaaaaagctgcttctctaaaacttcactaacacgcaactgtaatatacttattattgttgtctttgggtatactctgttgtctctgtgtttttcacagtctatttattgaaaaccagaaacaaaaaaaaaactcacctttgatatatataagaaacactaattctcttttgaat

SEQ ID NO: 7261 - protein, 369 aa, Arabidopsis thaliana
NFVVLFCFTHFSMSYDEMLSAAKKAVSLAARLSNEVRKSLLVTDVWNKSDDSPVTVADYGSQAVVSLVLERELQNEPVSLVAEEDSGELRKIAAETVLARITELVKDTLASDESYAIASPLTSDDVLNAIDRGKSEGGPKGRHWILDPIGGTRGFIRGEQYAIGLALLVEGKVVLGVMACPKLPLASTAGNALKSLPEKVGCLFYGSVGNGTYVQSLSVDSLPAKVEVSSIDDPAKASFFESYHTPVPIHNTIATKLGIKESPIKINSQTKYAALSRGDGEVYLRFTRKARPESIWNHAAGSIIVSEAGGKVTDAAGNPLDFSKGKYLDYKRGIVVTTQKLLPRLLTAVRESIKEEEEEEEKAASLKLH

SEQ ID NO: 7262 - protein, 357 aa, Arabidopsis thaliana
MSYDEMLSAAKKAVSLAARLSNEVRKSLLVTDVWNKSDDSPVTVADYGSQAVVSLVLERELQNEPVSLVAEEDSGELRKIAAETVLARITELVKDTLASDESYAIASPLTSDDVLNAIDRGKSEGGPKGRHWILDPIGGTRGFIRGEQYAIGLALLVEGKVVLGVMACPKLPLASTAGNALKSLPEKVGCLFYGSVGNGTYVQSLSVDSLPAKVEVSSIDDPAKASFFESYHTPVPIHNTIATKLGIKESPIKINSQTKYAALSRGDGEVYLRFTRKARPESIWNHAAGSIIVSEAGGKVTDAAGNPLDFSKGKYLDYKRGIVVTTQKLLPRLLTAVRESIKEEEEEEEKAASLKLH

SEQ ID NO: 7263 - protein, 352 aa, Arabidopsis thaliana
MLSAAKKAVSLAARLSNEVRKSLLVTDVWNKSDDSPVTVADYGSQAVVSLVLERELQNEPVSLVAEEDSGELRKIAAETVLARITELVKDTLASDESYAIASPLTSDDVLNAIDRGKSEGGPKGRHWILDPIGGTRGFIRGEQYAIGLALLVEGKVVLGVMACPKLPLASTAGNALKSLPEKVGCLFYGSVGNGTYVQSLSVDSLPAKVEVSSIDDPAKASFFESYHTPVPIHNTIATKLGIKESPIKINSQTKYAALSRGDGEVYLRFTRKARPESIWNHAAGSIIVSEAGGKVTDAAGNPLDFSKGKYLDYKRGIVVTTQKLLPRLLTAVRESIKEEEEEEEKAASLKLH

SEQ ID NO: 7264 - DNA, 973 bp, Arabidopsis thaliana
ccctgtttgcacatcactcttctcagtcctcacgcatcgtatcagagaaaatgagctcccaaatctgcagatctgcttctagagcagccaggtctcttctttcttcagccaagaatgctcgtttcttctccgaaggccgagccattggtgcagcaagtgtggtgcatgcgactggaaaagtccctcagtatgcatccaactttggaaaatcgggttctggcttcgtctctaatagctggatcaccggactccttgctcttcctgctgcagccttcatgctccaagatcaggaagcacttgctgcagagatggaacgcactttcatcgctatcaaacctgatggagtgcagcgaggactgatatcagaaatcattacacggttcgaacgcaaaggatacaagcttgttggcattaaagtcatggttccttcaaagggtttcgcgcagaagcattaccatgatctaaaggagagacctttcttcaacggcttgtgtaacttccttagctcaggccctgttgttgccatggtatgggaaggtgaaggagtgattagatacggacgtaaactgattggagccactgatcctcagaaatcagaacctggaactatccgaggcgatctcgctgttgttgttggaaggaacattatacatggaagcgatggaccagagacagctaaagacgagatcagcttgtggtttaagcctgaagaactcgtttcttacactagtaacgctgagaagtggatctacggccagaactgaactattccctctttctcccttattttcaaccgttagatcagacataaataattacttcttttgttttttcttttacccaaacactgaaaacgtaccgggaataacaaatttactgcatttgttatcaagtttgttctaatagacccaatgaaattaggccacgtgtgcgatcatgtaaccggtttaccgtaatgtggacttgaaatccc

SEQ ID NO: 7265 - protein, 253 aa, Arabidopsis thaliana
LFAHHSSQSSRIVSEKMSSQICRSASRAARSLLSSAKNARFFSEGRAIGAASVVHATGKVPQYASNFGKSGSGFVSNSWITGLLALPAAAFMLQDQEALAAEMERTFIAIKPDGVQRGLISEIITRFERKGYKLVGIKVMVPSKGFAQKHYHDLKERPFFNGLCNFLSSGPVVAMVWEGEGVIRYGRKLIGATDPQKSEPGTIRGDLAVVVGRNIIHGSDGPETAKDEISLWFKPEELVSYTSNAEKWIYGQN

SEQ ID NO: 7266 - protein, 237 aa, Arabidopsis thaliana
MSSQICRSASRAARSLLSSAKNARFFSEGRAIGAASVVHATGKVPQYASNFGKSGSGFVSNSWITGLLALPAAAFMLQDQEALAAEMERTFIAIKPDGVQRGLISEIITRFERKGYKLVGIKVMVPSKGFAQKHYHDLKERPFFNGLCNFLSSGPVVAMVWEGEGVIRYGRKLIGATDPQKSEPGTIRGDLAVVVGRNIIHGSDGPETAKDEISLWFKPEELVSYTSNAEKWIYGQN

SEQ ID NO: 7267 - protein, 162 aa, Arabidopsis thaliana
MLQDQEALAAEMERTFIAIKPDGVQRGLISEIITRFERKGYKLVGIKVMVPSKGFAQKHYHDLKERPFFNGLCNFLSSGPVVAMVWEGEGVIRYGRKLIGATDPQKSEPGTIRGDLAVVVGRNIIHGSDGPETAKDEISLWFKPEELVSYTSNAEKWIYGQN

SEQ ID NO: 7268 - DNA, 930 bp, Arabidopsis thaliana
ctgagaaaccccaatctctaatcttcttttcaattcaatacttttttttctcaatctctcctctcaaatcaaacaactttgattgatcttcgcaatcgattccacatgaagcgcagtactaccgactctgatttggccggtgatgctcacaacgagacaaacaagaagatgaagagtacagaggaagaagaaatcggattctccaatttagacgagaatctagtgtacgaggtgttgaaacacgtcgacgcaaagaccttagctatgtcatcttgcgtgagcaagatctggcacaaaacggcacaagacgagcggctttgggagctgatctgtactcgtcactggactaacatcggctgcgggcagaaccagctcagatctgttgtgttggcgcttggtggcttccgaagactccactctctttacctctggcctctctctaaacccaatccgcgtgctaggttcggtaaggacgagcttaaactcactctttctcttctctcaattcgatactacgagaagatgagtttcactaagagacctcttccagaatccaaataattgactacaaattattagagtttggttttggagtttgtgtatttggagtttgttgattggtaagtcagatgtgatgttcaatgctggcaataaaatttgttggtatccataagccagactgttagcaacagttgtgttctgtaataatagagggtgatgagaatttttaattactgtaatcggagctgattaaaagtagatttaatatcaaatgtgattcgattttgttgtaatggttctgtcttgaagttaagttggtccgtagttggacaatgattgtaacaaaatagattcgtgatccagtttggtaagattaagaactgttagtgacgattctgttttattattcaatgaaaaacaatgttcacc

SEQ ID NO: 7269 - protein, 151 aa, Arabidopsis thaliana
MKRSTTDSDLAGDAHNETNKKMKSTEEEEIGFSNLDENLVYEVLKHVDAKTLAMSSCVSKIWHKTAQDERLWELICTRHWTNIGCGQNQLRSVVLALGGFRRLHSLYLWPLSKPNPRARFGKDELKLTLSLLSIRYYEKMSFTKRPLPESK

SEQ ID NO: 7270 - protein, 130 aa, Arabidopsis thaliana
MKSTEEEEIGFSNLDENLVYEVLKHVDAKTLAMSSCVSKIWHKTAQDERLWELICTRHWTNIGCGQNQLRSVVLALGGFRRLHSLYLWPLSKPNPRARFGKDELKLTLSLLSIRYYEKMSFTKRPLPESK

SEQ ID NO: 7271 - protein, 98 aa, Arabidopsis thaliana
MSSCVSKIWHKTAQDERLWELICTRHWTNIGCGQNQLRSVVLALGGFRRLHSLYLWPLSKPNPRARFGKDELKLTLSLLSIRYYEKMSFTKRPLPESK

SEQ ID NO: 7272 - DNA, 1468 bp, Arabidopsis thaliana
atacgcaaacaaagtctcttcctttacccgtctacacgttcgaattttttctccgggtcgggtcaatgtcaagaacgacgagaattgtatataatcgtcgattcacgtggccgggtttatcatttactgctggatctcgttttcaattttgagtcagattccccccaattgagagattctagggttttaagatgattgaacatgggaactctacctttgattaccggagtattagagaagtcgctgcaaacgccggcgccggagccaccgcaggggctatcgcggcgacttttgtttgtccattagatgtgatcaaaacaaggttacaggttcttggtctccctgaagctccagcctctggtcaaagaggtggtgtaatcattacaagtctgaagaatataattaaggaagaaggttataggggaatgtatcgagggctttcaccaaccatcatagctctccttccaaattgggctgtctacttctcagtttatgggaagctaaaggatgtgctgcagtcaagtgatggcaagcttagtattgggtcaaacatgatagctgcagctggtgctggagctgccacatctattgcaactaatccgctttgggttgtcaagacaagattaatgacgcaaggaattaggcctggtgtggtaccttacaaaagtgtaatgtctgcatttagtaggatttgtcatgaagaaggagtgcgagggttgtacagtggcatattgccttctttggcgggagtaagccatgtcgcgatccagtttccagcttatgaaaaaattaagcaatacatggcaaagatggataatacatccgtggagaatctgagtcctgggaatgttgctattgcctcctccatcgcgaaagtgatcgcctctattttgacttacccacacgaggtaattagggcgaagcttcaagaacaagggcagattagaaatgctgagactaagtattcaggagtcattgattgcatcacaaaggtgttcagaagcgaagggattcctgggttgtaccgtggatgtgccactaatctactgaggacaactccatcagcagttattacatttacaacctatgagatgatgcttaggtttttccgacaagttgtgccaccagagactaataggtcggatgatcgcagaagagaagaagaaagaaagaatttagttagccgacgaggagaagaagaagataaagatttgggtttgagagaatcacaaactcaatctaataagatcagcactccccatatccctcttggaagcaaataaaactttttcagactcaagccatgcttcataggttttctttttttcgatgccatgttccaactacgtaatttttccccatgcggtgattgagttgtaaccttttctcgtggttctaacaaatgtgtaaactatcaataaactactttttggcccttttgatgatcagtgagtatttgaagatcgtg

SEQ ID NO: 7273 - protein, 363 aa, Arabidopsis thaliana
MIEHGNSTFDYRSIREVAANAGAGATAGAIAATFVCPLDVIKTRLQVLGLPEAPASGQRGGVIITSLKNIIKEEGYRGMYRGLSPTIIALLPNWAVYFSVYGKLKDVLQSSDGKLSIGSNMIAAAGAGAATSIATNPLWVVKTRLMTQGIRPGVVPYKSVMSAFSRICHEEGVRGLYSGILPSLAGVSHVAIQFPAYEKIKQYMAKMDNTSVENLSPGNVAIASSIAKVIASILTYPHEVIRAKLQEQGQIRNAETKYSGVIDCITKVFRSEGIPGLYRGCATNLLRTTPSAVITFTTYEMMLRFFRQVVPPETNRSDDRRREEERKNLVSRRGEEEDKDLGLRESQTQSNKISTPHIPLGSK

SEQ ID NO: 7274 - protein, 285 aa, Arabidopsis thaliana
MYRGLSPTIIALLPNWAVYFSVYGKLKDVLQSSDGKLSIGSNMIAAAGAGAATSIATNPLWVVKTRLMTQGIRPGVVPYKSVMSAFSRICHEEGVRGLYSGILPSLAGVSHVAIQFPAYEKIKQYMAKMDNTSVENLSPGNVAIASSIAKVIASILTYPHEVIRAKLQEQGQIRNAETKYSGVIDCITKVFRSEGIPGLYRGCATNLLRTTPSAVITFTTYEMMLRFFRQVVPPETNRSDDRRREEERKNLVSRRGEEEDKDLGLRESQTQSNKISTPHIPLGSK

SEQ ID NO: 7275 - protein, 243 aa, Arabidopsis thaliana
MIAAAGAGAATSIATNPLWVVKTRLMTQGIRPGVVPYKSVMSAFSRICHEEGVRGLYSGILPSLAGVSHVAIQFPAYEKIKQYMAKMDNTSVENLSPGNVAIASSIAKVIASILTYPHEVIRAKLQEQGQIRNAETKYSGVIDCITKVFRSEGIPGLYRGCATNLLRTTPSAVITFTTYEMMLRFFRQVVPPETNRSDDRRREEERKNLVSRRGEEEDKDLGLRESQTQSNKISTPHIPLGSK

SEQ ID NO: 7276 - DNA, 892 bp, Arabidopsis thaliana
caaccattgttgcgtgtttggttatctcttctttcttctctctcacctaaatcaagggatttgttctgatcaactttgaacagaatttacaacaaatccctagaaaaatctgacccttccttcttcctctggaagatttaagatacttgttgataaggatattcggaagaagcttttgaaatttttggcaaaagtctcatttgatccgacttttctgttgaaggtgaaatagatacaaaaaaaaatgggctcagaggaaaacaacagcacaagctttccaccaacagagccaaagctctgtgataacggatgtggattcttcgggtcaccatccaacatgaatctctgctcgaaatgttacagaagcttaagagccgaggaagatcaaaccgcggtagcgaaagctgcggtgaagaactctttaaagcttccatcttgcagtatcattgcacctggacaaaaacatcctctggaaattaaaccagctcatttggaaaccgttgttgtaaccgctgagccgtcttcggtgcctgtagccgcggaacaggacgaggctgagccgtcgagacctgttagaccgaacaacaggtgtttcagctgtaacaagaaggttggtgtaatggggtttaagtgcaaatgcggtagcacgttttgcgggagtcataggtacccggagaagcatgagtgtagcttcgatttcaaagaagttggacgtgatgcaatcgcaaaggcgaatcctttggttaaggctgataaagttcagaggatttgaagaaaacaaactttgttatttttaagtatttctttgtcttctgcatttgatcagtttctgcctgggatgttcgatgtttggtttccatgaataaaaatgaaaattgctgctcttgctttc

SEQ ID NO: 7277 - protein, 175 aa, Arabidopsis thaliana
MGSEENNSTSFPPTEPKLCDNGCGFFGSPSNMNLCSKCYRSLRAEEDQTAVAKAAVKNSLKLPSCSIIAPGQKHPLEIKPAHLETVVVTAEPSSVPVAAEQDEAEPSRPVRPNNRCFSCNKKVGVMGFKCKCGSTFCGSHRYPEKHECSFDFKEVGRDAIAKANPLVKADKVQRI

SEQ ID NO: 7278 - protein, 144 aa, Arabidopsis thaliana
MNLCSKCYRSLRAEEDQTAVAKAAVKNSLKLPSCSIIAPGQKHPLEIKPAHLETVVVTAEPSSVPVAAEQDEAEPSRPVRPNNRCFSCNKKVGVMGFKCKCGSTFCGSHRYPEKHECSFDFKEVGRDAIAKANPLVKADKVQRI

SEQ ID NO: 7279 - DNA, 1124 bp, Arabidopsis thaliana
aaaacaacaacatcaacaacaaaactctttaaaaagcaagaaaactttcactagtagttgaagaatttctctcttcctctacttattattattatcaactggtgatttgatttctctctctctctctcacaatggattcattaggatcaagaagaaggacacataatagccgtagggttccttcaatgggaatagaaggggacgaagagtttcaagaagaagatgtgtggtcagttttacgagaaggagaaacttcaagtcctgaaatgaaaatacccaaaagtcatttctcttcctcatcatcttcttcctcttcaccatggaacattcgtagaagcaaggaggtctcaggagtgaaacaatcatcagcacctatgaatgtccctgattggtccaaggtttatggtgactcaaagagcaacagaaggagtagccatttgcattctcatgctgctgacgatgatgatgaagatgatgatggttgcatggttcctccacatgaatgggttgcaagaaagctagcaagaacacagatctcttctttctctatgtgtgaaggagttggaagaacacttaaaggaagagatctaagcaaagtgagaaatgctgtcttgtcaaaaactggtttcttggagtaagtaggataaaatatctcatcatcatcatcaccataattatcatccatgtgcatggaatatgaatcccataactcttgtttaacattatcatcatgaaaaactcaactttatggtatccacatcatcatcattatcaatgtcattgtcgtcatcatcatgtggggatcactataccaagagtctttttgttaagttttttttttctttattgttgttattatttttcaatgtgttatttagagtagataagtatcatagtgatgatgatgacttgtcagccccatgcatgggtcccgttttatgttcttctgttgtttttggtttctctttgaaggtttttttatgatcttaaattagagcctagagaggggcatctcctttagaacctttaattggagttgagttctttaccatgttttggtgaaagattttgtcgtttgctatcgacaatgttatatataaattagatatctttctttctttgtt

SEQ ID NO: 7280 - protein, 168 aa, Arabidopsis thaliana
MDSLGSRRRTHNSRRVPSMGIEGDEEFQEEDVWSVLREGETSSPEMKIPKSHFSSSSSSSSSPWNIRRSKEVSGVKQSSAPMNVPDWSKVYGDSKSNRRSSHLHSHAADDDDEDDDGCMVPPHEWVARKLARTQISSFSMCEGVGRTLKGRDLSKVRNAVLSKTGFLE

SEQ ID NO: 7281 - protein, 150 aa, Arabidopsis thaliana
MGIEGDEEFQEEDVWSVLREGETSSPEMKIPKSHFSSSSSSSSSPWNIRRSKEVSGVKQSSAPMNVPDWSKVYGDSKSNRRSSHLHSHAADDDDEDDDGCMVPPHEWVARKLARTQISSFSMCEGVGRTLKGRDLSKVRNAVLSKTGFLE

SEQ ID NO: 7282 - protein, 123 aa, Arabidopsis thaliana
MKIPKSHFSSSSSSSSSPWNIRRSKEVSGVKQSSAPMNVPDWSKVYGDSKSNRRSSHLHSHAADDDDEDDDGCMVPPHEWVARKLARTQISSFSMCEGVGRTLKGRDLSKVRNAVLSKTGFLE

SEQ ID NO: 7283 - DNA, 1491 bp, Arabidopsis thaliana
atctccagtcgcaaaaccaccgccgtatatccacggccgtcttatcaccggcaacaaccgtaggtttttgttttccgtcgcgatggaggtggataagaaggacgagagagaggctgaatcttcggagcaagtggtgaatccatgggaagtgtccgccaaagacggcgggaagatcgattacgacaagcttattgacaaatttggatgtcaaaggcttgacgagtcactgattgatcgtgttcagagactgacttctcgtcaaccacacgtgttcctccgccgtagtgtcttcttcgcccaccgggatttcaatgagattttggacgcttatgagagaggagacaagttctatctctacactggaagaggaccttcatcagaagcattgcatttggggcatttgattcctttcatgtttaccaaatacttgcaagaagctttcaaggttccccttgttatacagctcacggatgatgaaaaaagtatatggaagaacttatcggtggaggaaagtcaaagacttgccagagaaaatgcgaaagatattattgcttgtggattcgatgtaacaaagaccttcattttctcggacttcgactatgttggcggtgctttctataaaaatatggtgaaggttggcaagtgcgttacacttaataaggctatgggaatctttggcttttccggtgaagatcctatcgcgaaactcagtttccctcctgtgcaggcagttccatcttttcctagctcattcccacatttgttccctggcaaggacaatctccgctgcttgattccttgtgctattgaccaggatccttattttagaatgactcgtgatgtcgcaccccggttaggctatagcaagcccgccctgattgagtcaacattttttcctgcgttgcagggagagaatggaaaaatgtctgctagtgatccaaattctgctatctatgtgactgattccgcaaaggacattaaaaacaagataaacagatatgcgtttagtggtgggcaagactccattgagaagcaccgagaacttggagcaaatctcgaggttgacatacccgtcaagtatctgagtttcttcctcgaagacgattctgaactagaacacattaaaaaggaatatggagaaggaagaatgctaacaggagaagtaaagaagagacttacggaagtgttgacagaaattgtggagagacaccgcagggctcgagctgctgttactgatgagatggttgatgcgttcatggcggtgagacctctcccaagcatgttcgaatagaaaaagtcagaaaccctttttggctcctcagcaacttcacatcactccgtttgatttggattcagacatctttgggtgtctattgatagatttgatccttgaaattgaaccatacttgttagttacaattttcatatttacatttatttatgaatcacattctaaaatgatttgcattgttaattgaataaagtgaaact

SEQ ID NO: 7284 - protein, 429 aa, Arabidopsis thaliana
SPVAKPPPYIHGRLITGNNRRFLFSVAMEVDKKDEREAESSEQVVNPWEVSAKDGGKIDYDKLIDKFGCQRLDESLIDRVQRLTSRQPHVFLRRSVFFAHRDFNEILDAYERGDKFYLYTGRGPSSEALHLGHLIPFMFTKYLQEAFKVPLVIQLTDDEKSIWKNLSVEESQRLARENAKDIIACGFDVTKTFIFSDFDYVGGAFYKNMVKVGKCVTLNKAMGIFGFSGEDPIAKLSFPPVQAVPSFPSSFPHLFPGKDNLRCLIPCAIDQDPYFRMTRDVAPRLGYSKPALIESTFFPALQGENGKMSASDPNSAIYVTDSAKDIKNKINRYAFSGGQDSIEKHRELGANLEVDIPVKYLSFFLEDDSELEHIKKEYGEGRMLTGEVKKRLTEVLTEIVERHRRARAAVTDEMVDAFMAVRPLPSMFE

SEQ ID NO: 7285 - protein, 402 aa, Arabidopsis thaliana
MEVDKKDEREAESSEQVVNPWEVSAKDGGKIDYDKLIDKFGCQRLDESLIDRVQRLTSRQPHVFLRRSVFFAHRDFNEILDAYERGDKFYLYTGRGPSSEALHLGHLIPFMFTKYLQEAFKVPLVIQLTDDEKSIWKNLSVEESQRLARENAKDIIACGFDVTKTFIFSDFDYVGGAFYKNMVKVGKCVTLNKAMGIFGFSGEDPIAKLSFPPVQAVPSFPSSFPHLFPGKDNLRCLIPCAIDQDPYFRMTRDVAPRLGYSKPALIESTFFPALQGENGKMSASDPNSAIYVTDSAKDIKNKINRYAFSGGQDSIEKHRELGANLEVDIPVKYLSFFLEDDSELEHIKKEYGEGRMLTGEVKKRLTEVLTEIVERHRRARAAVTDEMVDAFMAVRPLPSMFE

SEQ ID NO: 7286 - protein, 292 aa, Arabidopsis thaliana
MFTKYLQEAFKVPLVIQLTDDEKSIWKNLSVEESQRLARENAKDIIACGFDVTKTFIFSDFDYVGGAFYKNMVKVGKCVTLNKAMGIFGFSGEDPIAKLSFPPVQAVPSFPSSFPHLFPGKDNLRCLIPCAIDQDPYFRMTRDVAPRLGYSKPALIESTFFPALQGENGKMSASDPNSAIYVTDSAKDIKNKINRYAFSGGQDSIEKHRELGANLEVDIPVKYLSFFLEDDSELEHIKKEYGEGRMLTGEVKKRLTEVLTEIVERHRRARAAVTDEMVDAFMAVRPLPSMFE

SEQ ID NO: 7287 - DNA, 883 bp, Arabidopsis thaliana
atggctcccagaggaagaagaaagaaggctggattgatgcgagaggatgcagcacgagatcgcatgagaggatttgggtttcatgagcatgttatcagtgagagtattaaggaactgttagaggtctacgaagaccaatggtttttgattgaagatgatagctatggtcccctccttgctatctgccttgaaaagcaagaggaaaaagagaaacaattggctgaagtacaagccaaccaattgcctgagaatcacaatgaagagatggctgaggaagaacaacccaatcaattggctgtggaaatacacgaagaagagaaggagcaggagcaggacatgcatattgagtatggaagagaccaagctgatgagttatcaatcaatagcgaagcagtcaatgacccatcaccagcagctattcatttgggagaagcatcatcagattatgcacaaagttctgttcgaggtgtggagaatcttcattgtggatggctaattgatgaggaggagacggatcctgaggaggaaacggatccagaggagaaggagaccgagccagaggatccaaaggagaaggagacggagccagaggaggatagtgatggtgatgatgatgagatcattcagcttactccagaacctctttgtgaagaacttcaagagcttctcagggaagtacgtggacagaagaggaggaagaaagagatgaggtgggacaagtaaaggagctatggagctcctgtaagtagcaaattgatatatatgttaggaagccaaatagtagtagtaagctatagtattgtggtgaaaaaaggtaaaacgacccatcttaacatctcttgagatattggtttttaataatttgtgatggagtagagaaagc

SEQ ID NO: 7288 - protein, 240 aa, Arabidopsis thaliana
MAPRGRRKKAGLMREDAARDRMRGFGFHEHVISESIKELLEVYEDQWFLIEDDSYGPLLAICLEKQEEKEKQLAEVQANQLPENHNEEMAEEEQPNQLAVEIHEEEKEQEQDMHIEYGRDQADELSINSEAVNDPSPAAIHLGEASSDYAQSSVRGVENLHCGWLIDEEETDPEEETDPEEKETEPEDPKEKETEPEEDSDGDDDEIIQLTPEPLCEELQELLREVRGQKRRKKEMRWDK

SEQ ID NO: 7289 - protein, 228 aa, Arabidopsis thaliana
MREDAARDRMRGFGFHEHVISESIKELLEVYEDQWFLIEDDSYGPLLAICLEKQEEKEKQLAEVQANQLPENHNEEMAEEEQPNQLAVEIHEEEKEQEQDMHIEYGRDQADELSINSEAVNDPSPAAIHLGEASSDYAQSSVRGVENLHCGWLIDEEETDPEEETDPEEKETEPEDPKEKETEPEEDSDGDDDEIIQLTPEPLCEELQELLREVRGQKRRKKEMRWDK

SEQ ID NO: 7290 - protein, 219 aa, Arabidopsis thaliana
MRGFGFHEHVISESIKELLEVYEDQWFLIEDDSYGPLLAICLEKQEEKEKQLAEVQANQLPENHNEEMAEEEQPNQLAVEIHEEEKEQEQDMHIEYGRDQADELSINSEAVNDPSPAAIHLGEASSDYAQSSVRGVENLHCGWLIDEEETDPEEETDPEEKETEPEDPKEKETEPEEDSDGDDDEIIQLTPEPLCEELQELLREVRGQKRRKKEMRWDK

SEQ ID NO: 7291 - DNA, 1812 bp, Arabidopsis thaliana
tccccccccccccaaaattgagaatcacttgaaatttttttaaaatcatggattgtgcgctaggcggggaatttttacgaaatctcaagcttcttcggcacaccaaggcgccaattccatgtctttgaagtctcttcatctcctagtccaaaccctaaattcattctcatggattcgattgagccaccatcgttttcgctagggtttgatcttgatgctgcatcggatctccaatcggaaatccatcaaaaccctagctccaccggcgaccaattaatcggggacggcgataacgagccagagttgggacttactgtctcagattccgatcgggagcttgaaccagattttacaagcccggttctcaagcggttgcgacgagggattaatcccaacaagtgttctgtgaaagatgatagaagcgtagctgtagaggatcgggatgatgacattgaagagttctcttctcctgaggattttcctacggacgcaccggcctcaacaagaagtcatttttctagttgcagctcaagggtgccacttcatggttctggggttttatctaatcaaccttctatctctcggggaaaaagaaagcagtcggatgttcaagcatctgctgcctctgggattagttctgttgcatcgttgtttcagatgtcaagtcgtagtcctctacgaaggttccagctactagattcagattctgaagatgaccatccatccaccagcagagatttaagcggagcaactaaaaaacatgattcattctcaaagaatcaaccatctattgcaagtaaaccgaagagaaaggaacctggatctatcccctgtattaaagatctgtggaaagatttttccccggcaagttccaagattcagacaccagctttcgatgatgtttgtcaggactattttatctccatcaagacgactagcacagctcagaaacaaagcagtgctgtggcaagtagtagcaatagcggaaatcataacttgactggctttcagcaaactgagctattccacgatttttcccacccttctcctccatctcatcgtttcttcttgcatagtgatccaaggatccggaatctagctcgacagcggttaccaaacttctttcctctgggaattgtcaatgatagggagagccagcgagaggtgttccttgttgattatatgaatcaatttggcagcaaagggagttctaaagctggagactctagcagcaaaagctgcagaagagggaaaacaaagtcaaaggtttcaaagagccaagagagcgcacacaattctgaaggctggttaaatcctaaaacgagagctgcagctccaaaggatgctgggaaaaggcgtgtatctgctgacagtggctctgcaggtcattggttcacatccccagaaggaagaaaggtatatatctctaaaagcggacaggagttttcaggtcaaagtgcttatagatgttacaaaaaggagaacggagtcgggtttaagaagtccagaaagaaacgacaaccaaagaaaaaggcgaagaattgaagaaaggaagccattgtttccttgtaagaactcagctgtttcgcaaaggactcctctggatctggagattacacctgcgacgctggtgtttgtgttctaagaagctccaagacaaccccgaaacttcaaaatggttaaatacatttacgtagctcttgaagcttcgcaatcgtttccttgcgataatttgtatttcttttatcagttgtgtaaaaatgcatattgaaagagatcttggttcacgggtttgcacagatttttatatcc

SEQ ID NO: 7292 - protein, 458 aa, Arabidopsis thaliana
MDSIEPPSFSLGFDLDAASDLQSEIHQNPSSTGDQLIGDGDNEPELGLTVSDSDRELEPDFTSPVLKRLRRGINPNKCSVKDDRSVAVEDRDDDIEEFSSPEDFPTDAPASTRSHFSSCSSRVPLHGSGVLSNQPSISRGKRKQSDVQASAASGISSVASLFQMSSRSPLRRFQLLDSDSEDDHPSTSRDLSGATKKHDSFSKNQPSIASKPKRKEPGSIPCIKDLWKDFSPASSKIQTPAFDDVCQDYFISIKTTSTAQKQSSAVASSSNSGNHNLTGFQQTELFHDFSHPSPPSHRFFLHSDPRIRNLARQRLPNFFPLGIVNDRESQREVFLVDYMNQFGSKGSSKAGDSSSKSCRRGKTKSKVSKSQESAHNSEGWLNPKTRAAAPKDAGKRRVSADSGSAGHWFTSPEGRKVYISKSGQEFSGQSAYRCYKKENGVGFKKSRKKRQPKKKAKN

SEQ ID NO: 7293 - protein, 295 aa, Arabidopsis thaliana
MSSRSPLRRFQLLDSDSEDDHPSTSRDLSGATKKHDSFSKNQPSIASKPKRKEPGSIPCIKDLWKDFSPASSKIQTPAFDDVCQDYFISIKTTSTAQKQSSAVASSSNSGNHNLTGFQQTELFHDFSHPSPPSHRFFLHSDPRIRNLARQRLPNFFPLGIVNDRESQREVFLVDYMNQFGSKGSSKAGDSSSKSCRRGKTKSKVSKSQESAHNSEGWLNPKTRAAAPKDAGKRRVSADSGSAGHWFTSPEGRKVYISKSGQEFSGQSAYRCYKKENGVGFKKSRKKRQPKKKAKN

SEQ ID NO: 7294 - DNA, 1619 bp, Arabidopsis thaliana
aatgcgcttcatgcgggtcatcctcttaatctcaaactctctaggactacactaaatctaactttttgcagagagcaaaagattcaataattgagattgatctcaaaaccaaagctctcgtgctcttgtcgttgatgttggttgtgtagactttgtatacaatgatgaaaagtttggcgaatgctgttggagcgaagacggcgagggcttgcgacagctgcgtgaagagacgtgcacggtggtactgcgcggccgacgatgcttttctttgccagtcttgcgacagtttggtccattcagcaaaccctcttgctcgccgccacgagagagtccgtttgaagacggctagcccggcggtcgtaaagcatagcaaccactcatcagcttctcctccacatgaggtcgccacgtggcatcacgggtttactcgtaaagctcgaacgccacgtggctctggtaagaaaaacaattcgtcgatatttcatgacttggttcctgatattagtattgaggatcagacagacaactatgagcttgaagagcagctgatctgtcaagtgccggttctagatccgttgttgtctgagcagttcttgaacgatgtcgttgagcccaagatcgagtttcctatgatcagaagtggtttgatgatcgaggaggaggaagacaacgctgaaagttgtcttaatggatttttcccgaccgacatggagcttgaggagtttgctgctgacgtggagactctgctcggtcgcgggttagacacggagtcgtatgccatggaggagctagagttatctaattcagagatgttcaaaatcgaaaaagatgagattgaagaagaagtagaagagataaaagccatgagcatggatatatttgatgatgatcgaaaagacgtggatggaacagtaccgtttgagctaagctttgattacgagtcgtcacacaagacgtccgaagaagaggtaatgaagaacgttgaaagtagtggtgaatgtgttgttaaggtgaaagaggaagaacataagaatgttctgatgctaagattaaactatgactcggtgatatccacttggggaggtcaaggtccaccgtggagttcaggagagccaccggaacgagacatggacatcagcggttggccagccttttccatggtggagaatggaggagaaagtactcatcagaagcaatacgttggtggatgtttaccatcaagtgggtttggagatggaggtagagaagctagagtttcgagatacagagagaagaggaggacaaggttgttttctaagaagatacggtacgaggtacgtaaattgaatgcagagaaaagaccacgaatgaaaggaagattcgtgaagagagcctcgctcgctgctgctgcttcaccattaggtgttaattactgaatagttaatatctattcatgttatctcactttacaaatttcggtgaatcttttttcttctgaaacaacagaagttattttggcacttaattgtgctttgaggacttgtatgtacatagaagtaaccaataataatgtgacttttacttgtattgatagtactgatgtatatatctggtaataagaatgtgcaaactgcaaaggc

SEQ ID NO: 7295 - protein, 417 aa, Arabidopsis thaliana
MMKSLANAVGAKTARACDSCVKRRARWYCAADDAFLCQSCDSLVHSANPLARRHERVRLKTASPAVVKHSNHSSASPPHEVATWHHGFTRKARTPRGSGKKNNSSIFHDLVPDISIEDQTDNYELEEQLICQVPVLDPLLSEQFLNDVVEPKIEFPMIRSGLMIEEEEDNAESCLNGFFPTDMELEEFAADVETLLGRGLDTESYAMEELELSNSEMFKIEKDEIEEEVEEIKAMSMDIFDDDRKDVDGTVPFELSFDYESSHKTSEEEVMKNVESSGECVVKVKEEEHKNVLMLRLNYDSVISTWGGQGPPWSSGEPPERDMDISGWPAFSMVENGGESTHQKQYVGGCLPSSGFGDGGREARVSRYREKRRTRLFSKKIRYEVRKLNAEKRPRMKGRFVKRASLAAAASPLGVNY

SEQ ID NO: 7296 - protein, 416 aa, Arabidopsis thaliana
MKSLANAVGAKTARACDSCVKRRARWYCAADDAFLCQSCDSLVHSANPLARRHERVRLKTASPAVVKHSNHSSASPPHEVATWHHGFTRKARTPRGSGKKNNSSIFHDLVPDISIEDQTDNYELEEQLICQVPVLDPLLSEQFLNDVVEPKIEFPMIRSGLMIEEEEDNAESCLNGFFPTDMELEEFAADVETLLGRGLDTESYAMEELELSNSEMFKIEKDEIEEEVEEIKAMSMDIFDDDRKDVDGTVPFELSFDYESSHKTSEEEVMKNVESSGECVVKVKEEEHKNVLMLRLNYDSVISTWGGQGPPWSSGEPPERDMDISGWPAFSMVENGGESTHQKQYVGGCLPSSGFGDGGREARVSRYREKRRTRLFSKKIRYEVRKLNAEKRPRMKGRFVKRASLAAAASPLGVNY

SEQ ID NO: 7297 - protein, 261 aa, Arabidopsis thaliana
MIRSGLMIEEEEDNAESCLNGFFPTDMELEEFAADVETLLGRGLDTESYAMEELELSNSEMFKIEKDEIEEEVEEIKAMSMDIFDDDRKDVDGTVPFELSFDYESSHKTSEEEVMKNVESSGECVVKVKEEEHKNVLMLRLNYDSVISTWGGQGPPWSSGEPPERDMDISGWPAFSMVENGGESTHQKQYVGGCLPSSGFGDGGREARVSRYREKRRTRLFSKKIRYEVRKLNAEKRPRMKGRFVKRASLAAAASPLGVNY

SEQ ID NO: 7298 - DNA, 2250 bp, Arabidopsis thaliana
atacatcttcatcagtgatttttgggtttgaaatttctctagatcgattttggatttagatctctttgtttctactgcttttcatcgttggatctgcgttttgcaaagggagatacagaaaggaatagctttgaattgacaaggtttctctctaatccaaccgaatctcaagcttccatggctctcaatctccgtcagaaacagactgaatgtgtaatccggatgttgaatctgaaccaacctttgaatccaagtggaactgcgaacgaagaagtttacaagatcttgatttacgataggttttgtcagaacattctatctccattgacccatgtcaaggatctgcgtaagcatggagttacactcttctttctcatagacaaagatcgacaacctgttcatgatgttcccgctgtctactttgttcaaccaactgaatccaacctccagaggatcatagccgatgcttctagatctctctacgatacctttcatctgaatttctcgtcttcgatccctcgtaagtttcttgaagagctagcttctgggactcttaaatctggttctgttgagaaagtctcgaaagtgcatgatcagtatctggagtttgtgactttggaagataacttgttctcgctggctcagcaatctacctatgttcaaatgaatgacccatcagcaggggagaaagagattaatgagattatcgaaagggtcgctagtggtttgttttgtgtgttggtaacgcttggtgtggttcctgttatccgatgccctagtggtggacctgcagagatggtggcgtctttgttggatcagaaactgagggatcatcttttgtccaagaacaatctgtttactgaaggtggcggtttcatgagctcgtttcagcgtcccctcttgtgcatatttgataggaactttgagctctcggttgggattcagcatgatttcagataccggcctctcgttcacgatgttctcgggttaaagctcaaccaattgaaagtgcagggagagaaaggaccaccgaaatcgtttgagctggacagttcggacccattctggtcagcaaacagtactctggagtttccagatgtcgctgtggagatcgaaacacagttgaacaagtacaagagagacgttgaagaggttaacaagaaaaccggaggtgggagcggcgctgagtttgatgggacagatctgattggaaacatccacaccgagcatctcatgaacactgtgaaatcgctcccggagttaactgagcgaaagaaagtgattgacaaacacaccaatatcgcaacagcgctcttaggacagatcaaggagagatctattgacgctttcactaagaaagaaagcgacatgatgatgaggggcggaatcgacagaactgaacttatggctgctctgaaaggcaaagggacaaagatggacaagctccggtttgcaatcatgtacctgatctccacagaaaccataaaccaatcggaagttgaagcagtggaggcagcattgaatgaagctgaggctgatacaagtgcgtttcagtatgtaaagaaaatcaaatcgttaaacgcatcttttgcagctacatcagcgaattcagctagcagaagcaacattgtagactgggccgagaagctttacggacagtctataagcgcagtgactgcaggagtcaagaatctgttatctagtgatcaacaattggcagtgactcgaacagtcgaagctttaacagaaggaaaaccaaacccggagatcgattcttaccgcttcctggacccaagagctccaaagtcgtctagctccggtggtagccatgtaaaaggaccgttcagagaagctatagtgttcatgatcggtggaggtaactatgttgagtatggaagtttgcaggagttgactcagagacagttaaccgttaaaaacgttatttatggagccactgagattcttaacggaggtgagttggtggagcagcttggacttttgggaaagaagatgggattaggaggtccggtcgcttcaacgtcattgtctggtggtcactgagtgttactcactgttactttcttttttcttttggcttttgagagtttttttttattaatctataaaatataaatccccagtggtgaattatttaacaaacagtttacagtctcgttataacattttctacagaacattttaaggtgtgtttataactccattagttaagattgttaaatggtttttgcc

SEQ ID NO: 7299 - protein, 627 aa, Arabidopsis thaliana
MALNLRQKQTECVIRMLNLNQPLNPSGTANEEVYKILIYDRFCQNILSPLTHVKDLRKHGVTLFFLIDKDRQPVHDVPAVYFVQPTESNLQRIIADASRSLYDTFHLNFSSSIPRKFLEELASGTLKSGSVEKVSKVHDQYLEFVTLEDNLFSLAQQSTYVQMNDPSAGEKEINEIIERVASGLFCVLVTLGVVPVIRCPSGGPAEMVASLLDQKLRDHLLSKNNLFTEGGGFMSSFQRPLLCIFDRNFELSVGIQHDFRYRPLVHDVLGLKLNQLKVQGEKGPPKSFELDSSDPFWSANSTLEFPDVAVEIETQLNKYKRDVEEVNKKTGGGSGAEFDGTDLIGNIHTEHLMNTVKSLPELTERKKVIDKHTNIATALLGQIKERSIDAFTKKESDMMMRGGIDRTELMAALKGKGTKMDKLRFAIMYLISTETINQSEVEAVEAALNEAEADTSAFQYVKKIKSLNASFAATSANSASRSNIVDWAEKLYGQSISAVTAGVKNLLSSDQQLAVTRTVEALTEGKPNPEIDSYRFLDPRAPKSSSSGGSHVKGPFREAIVFMIGGGNYVEYGSLQELTQRQLTVKNVIYGATEILNGGELVEQLGLLGKKMGLGGPVASTSLSGGH

SEQ ID NO: 7300 - protein, 612 aa, Arabidopsis thaliana
MLNLNQPLNPSGTANEEVYKILIYDRFCQNILSPLTHVKDLRKHGVTLFFLIDKDRQPVHDVPAVYFVQPTESNLQRIIADASRSLYDTFHLNFSSSIPRKFLEELASGTLKSGSVEKVSKVHDQYLEFVTLEDNLFSLAQQSTYVQMNDPSAGEKEINEIIERVASGLFCVLVTLGVVPVIRCPSGGPAEMVASLLDQKLRDHLLSKNNLFTEGGGFMSSFQRPLLCIFDRNFELSVGIQHDFRYRPLVHDVLGLKLNQLKVQGEKGPPKSFELDSSDPFWSANSTLEFPDVAVEIETQLNKYKRDVEEVNKKTGGGSGAEFDGTDLIGNIHTEHLMNTVKSLPELTERKKVIDKHTNIATALLGQIKERSIDAFTKKESDMMMRGGIDRTELMAALKGKGTKMDKLRFAIMYLISTETINQSEVEAVEAALNEAEADTSAFQYVKKIKSLNASFAATSANSASRSNIVDWAEKLYGQSISAVTAGVKNLLSSDQQLAVTRTVEALTEGKPNPEIDSYRFLDPRAPKSSSSGGSHVKGPFREAIVFMIGGGNYVEYGSLQELTQRQLTVKNVIYGATEILNGGELVEQLGLLGKKMGLGGPVASTSLSGGH

SEQ ID NO: 7301 - protein, 465 aa, Arabidopsis thaliana
MNDPSAGEKEINEIIERVASGLFCVLVTLGVVPVIRCPSGGPAEMVASLLDQKLRDHLLSKNNLFTEGGGFMSSFQRPLLCIFDRNFELSVGIQHDFRYRPLVHDVLGLKLNQLKVQGEKGPPKSFELDSSDPFWSANSTLEFPDVAVEIETQLNKYKRDVEEVNKKTGGGSGAEFDGTDLIGNIHTEHLMNTVKSLPELTERKKVIDKHTNIATALLGQIKERSIDAFTKKESDMMMRGGIDRTELMAALKGKGTKMDKLRFAIMYLISTETINQSEVEAVEAALNEAEADTSAFQYVKKIKSLNASFAATSANSASRSNIVDWAEKLYGQSISAVTAGVKNLLSSDQQLAVTRTVEALTEGKPNPEIDSYRFLDPRAPKSSSSGGSHVKGPFREAIVFMIGGGNYVEYGSLQELTQRQLTVKNVIYGATEILNGGELVEQLGLLGKKMGLGGPVASTSLSGGH

SEQ ID NO: 7302 - DNA, 1336 bp, Arabidopsis thaliana
aaaaagcattattaactaagcatgtatctcccactaaggcacaaattactaaccatataagtctcagtactctctgttctgcaaacttcatacacaaaaccaacattaagagatggcgagccactacagaaacacaagcgctattgcttatctattgctttgtctcttcattacatctgccactgcacattccttcatacgacaaatcactgatgacctcaaaacaaatctgcagcaggaggtaggagcagaaccaatccaaaacctggacgtaggacattacttacaagaaaataaggagatctcatcacgtgattataaagtatcagcttcaaacgcagtgaaaggtttgagagatcgtcctccatcgtcttactctctcaagatggagtctttcaacacgctccttaagtcaacttacacggagaaatatgtatctcgtcccttttcagttggtggatacaactggacacttgttgtgttcccaaatggtaacaagaaggatagtggttcagggtacctttctctttacgtagccatagacaactcaactctcggacagcaagagatttacgcagatctaaggttttacatctttaacaagaatgagaggaagtacttcactatccaagataccgatgtgtggaagtttagtgtcttcaaaacgatgtggggattctctcaggtcctccccattgatacattcaaagatccgacaaaaggatatctctacgatggagatcactgcgagtttggtgttgatgtaaccatgccttctctctacgaaaaatcggaacttttctctgtcacagagaattttctaaatccgagattcacctggaccattcggggattctctacgctgctaaaaaacagttacctatcagaagtgttctccatcggaggaagaagttggaatatacaaatcaatccaagtggtcttggtacgggagagggaaaagctttgtcgatgtatcttggccttaatgtgaatgagatattcagaccatatgagaagatttatgttcgagccaagcttcgagctcttaaccaactcaatctcagtaacatcgaaagggaactcgatatttggtacaatggtccgggatatggagaatatagctggggtttccctgagtttatctatttcccttatctcacagattcatcaaagggtttcgttaagaacgatgtgttgatggttcaagttgaaatggaggccatttcttcaaccaagtacttcccgagttagattttctctaagcaaagaacttgtacctacctccatgtgtttgatttgttatcaaatactaataagaatttgattatgcatttc

SEQ ID NO: 7303 - protein, 379 aa, Arabidopsis thaliana
MASHYRNTSAIAYLLLCLFITSATAHSFIRQITDDLKTNLQQEVGAEPIQNLDVGHYLQENKEISSRDYKVSASNAVKGLRDRPPSSYSLKMESFNTLLKSTYTEKYVSRPFSVGGYNWTLVVFPNGNKKDSGSGYLSLYVAIDNSTLGQQEIYADLRFYIFNKNERKYFTIQDTDVWKFSVFKTMWGFSQVLPIDTFKDPTKGYLYDGDHCEFGVDVTMPSLYEKSELFSVTENFLNPRFTWTIRGFSTLLKNSYLSEVFSIGGRSWNIQINPSGLGTGEGKALSMYLGLNVNEIFRPYEKIYVRAKLRALNQLNLSNIERELDIWYNGPGYGEYSWGFPEFIYFPYLTDSSKGFVKNDVLMVQVEMEAISSTKYFPS

SEQ ID NO: 7304 - protein, 288 aa, Arabidopsis thaliana
MESFNTLLKSTYTEKYVSRPFSVGGYNWTLVVFPNGNKKDSGSGYLSLYVAIDNSTLGQQEIYADLRFYIFNKNERKYFTIQDTDVWKFSVFKTMWGFSQVLPIDTFKDPTKGYLYDGDHCEFGVDVTMPSLYEKSELFSVTENFLNPRFTWTIRGFSTLLKNSYLSEVFSIGGRSWNIQINPSGLGTGEGKALSMYLGLNVNEIFRPYEKIYVRAKLRALNQLNLSNIERELDIWYNGPGYGEYSWGFPEFIYFPYLTDSSKGFVKNDVLMVQVEMEAISSTKYFPS

SEQ ID NO: 7305 - protein, 194 aa, Arabidopsis thaliana
MWGFSQVLPIDTFKDPTKGYLYDGDHCEFGVDVTMPSLYEKSELFSVTENFLNPRFTWTIRGFSTLLKNSYLSEVFSIGGRSWNIQINPSGLGTGEGKALSMYLGLNVNEIFRPYEKIYVRAKLRALNQLNLSNIERELDIWYNGPGYGEYSWGFPEFIYFPYLTDSSKGFVKNDVLMVQVEMEAISSTKYFPS

SEQ ID NO: 7306 - DNA, 1515 bp, Arabidopsis thaliana
aagatcacggaaccacgccaggatccttccgccgtcggcgacgtcgctcctgacgtcacctcaacacgtaaaccacacaattaagtttattcctctctctctccgtcaacttaaaccggtgtttgtatataaatctgattgatatagaaatcgaaactcaaattggagaacattcgagaagctttggatttttgaatcacgaagacatggaaaaaacagaatctgtatcaggaaaggggaagagagtgattgttatcggcggcggaatcgccggctctctcgcttcgaaatttcttcaattcgattccgatctcaccctcattgatccgaaggagtattttgagattatttgggcaagtttaaggtcaatggtagagccagcttttgctgaaagatcggtgataaaccacaagaagtatttacaaaatggtcgtgttgtgacttctccagcggttaatatcacagacaccgatgttttgaccgcggatggtcttgtctttgggtatgattatcttgttattgctactggtcacaatgatgtgcttcctaaaactaggcaagagaagttatctcaataccaaacagaacatgagaagatcaagtcatctgagtcgattctgattgttggtggaggtccgtcgggtgtggagctcgctgcggagatagctgtcgatttccctgagaaaaaggttactatagtacacaatggaccgagattgctggaatttgttggtcagaaagctgcagacaaggcattagactggatgaagtccaagagagttgaagtgatattgaaccaaagggttgatttgagttcagcttcagatgggagtaaaacgtaccgaacatcgggtggagagacgatacacgcggattgtcacttcctctgtactggaaaacctttgtcttcagaatggctaaaaggaactgttctgaaagataacttggatggcaaaggaaggcttatggtcgatgagtacttgagagttaagggtcgcaagaatgtattcgctattggtgatattactgatgtcccggagatgaaacaaggctacattgctgagaaacacgcctctgtagctacaaagaacataaagttgttgatgtctggtgggaacgagaagaagatgtcgacttacaagcctggtccggacattgccataatatctttaggaagaaaggactcggttgctcagttcccattcatgacagtctcgggttgcatacctggtttgatcaaatctaaggatctgtttgtcgggaagacgaggaaggcaagaggtctggatcctaaccttgtggagccttgagtgattgtgcttatcttcatgatgagattcttcttgtgcaggcgcatttcgtcgtttatttcatcacacgtttgttgtatgttgatttggtccactctcctgtttgtggattctcagagtggagtgttgtttgcttttgttgtaacatgatttgtaaagaatctgttcgatttctctaaaaggaaccaaagttgttcaataagcc

SEQ ID NO: 7307 - protein, 367 aa, Arabidopsis thaliana
MEKTESVSGKGKRVIVIGGGIAGSLASKFLQFDSDLTLIDPKEYFEIIWASLRSMVEPAFAERSVINHKKYLQNGRVVTSPAVNITDTDVLTADGLVFGYDYLVIATGHNDVLPKTRQEKLSQYQTEHEKIKSSESILIVGGGPSGVELAAEIAVDFPEKKVTIVHNGPRLLEFVGQKAADKALDWMKSKRVEVILNQRVDLSSASDGSKTYRTSGGETIHADCHFLCTGKPLSSEWLKGTVLKDNLDGKGRLMVDEYLRVKGRKNVFAIGDITDVPEMKQGYIAEKHASVATKNIKLLMSGGNEKKMSTYKPGPDIAIISLGRKDSVAQFPFMTVSGCIPGLIKSKDLFVGKTRKARGLDPNLVEP

SEQ ID NO: 7308 - protein, 313 aa, Arabidopsis thaliana
MVEPAFAERSVINHKKYLQNGRVVTSPAVNITDTDVLTADGLVFGYDYLVIATGHNDVLPKTRQEKLSQYQTEHEKIKSSESILIVGGGPSGVELAAEIAVDFPEKKVTIVHNGPRLLEFVGQKAADKALDWMKSKRVEVILNQRVDLSSASDGSKTYRTSGGETIHADCHFLCTGKPLSSEWLKGTVLKDNLDGKGRLMVDEYLRVKGRKNVFAIGDITDVPEMKQGYIAEKHASVATKNIKLLMSGGNEKKMSTYKPGPDIAIISLGRKDSVAQFPFMTVSGCIPGLIKSKDLFVGKTRKARGLDPNLVEP

SEQ ID NO: 7309 - DNA, 1248 bp, Arabidopsis thaliana
ctctctctctctttttttctaatcatacgaacacaatctgcttcaagaattagggttttgatcagacacaaaaaagtatctctctccgtagttttgtgtcaaggttttgcaagaagcggcactaggtatgatgggagccaccgtaggcggagacggagacaccgcggtcgtggcggagcagaatagacagttgaaaggtgagatagcgacacatccgatgtatgagcaattattagccgcacacgtggcgtgtttaagagtagctactccaatagatcaacttccgatcattgaagctcagctttctcaatctcatcatcttctccgttcttacgcttccacggccgttggataccatcatgatcgtcacgagctcgataatttcttggcacaatatgtaatggtgttgtgtagcttcaaagaacagctgcaacagcacgtgagggttcatgccgtcgaagctgttatggcttgccgtgaaattgagaacaaccttcattctcttacaggagcaactttaggagaagggtcgggtgcgactatgtcggaggatgaggatgatcttccgatggatttctcgtcagataattccggcgttgattttagcggcggccacgatatgacgggatttggtccgttgctaccgactgaatcggaaagatcccttatggaaagagtcagacaagaactcaaactagaactcaaacagggttttaaatcgagaatcgaagatgtaagagaagagataatgaggaagagaagggctgggaaattgccaggagacacaactactgtcttgaagaattggtggcaacaacattgcaaatggccttaccctacggaagatgacaaggcaaaattggtggaggagacaggattgcagttgaagcaaatcaacaattggttcattaaccaacgcaagaggaattggcacaacaactctcactccctcacttccttgaagtccaagcgcaaacactaatctcttcttactatattagttactacctctacatatattcatactaattacactgctaagacatgcatgatacatacgtaattcatgttactgataataacgaggtgtgatcattcattaatatcatgtacttacttagcttattagatccaccgactactatatgatttgtgcgttgcgtgattactggttgttactagattgtaattcattttgtttgtattgtgcattcaaatttatctttttggtaagaacactgattttgt

SEQ ID NO: 7310 - protein, 284 aa, Arabidopsis thaliana
MMGATVGGDGDTAVVAEQNRQLKGEIATHPMYEQLLAAHVACLRVATPIDQLPIIEAQLSQSHHLLRSYASTAVGYHHDRHELDNFLAQYVMVLCSFKEQLQQHVRVHAVEAVMACREIENNLHSLTGATLGEGSGATMSEDEDDLPMDFSSDNSGVDFSGGHDMTGFGPLLPTESERSLMERVRQELKLELKQGFKSRIEDVREEIMRKRRAGKLPGDTTTVLKNWWQQHCKWPYPTEDDKAKLVEETGLQLKQINNWFINQRKRNWHNNSHSLTSLKSKRKH

SEQ ID NO: 7311 - protein, 283 aa, Arabidopsis thaliana
MGATVGGDGDTAVVAEQNRQLKGEIATHPMYEQLLAAHVACLRVATPIDQLPIIEAQLSQSHHLLRSYASTAVGYHHDRHELDNFLAQYVMVLCSFKEQLQQHVRVHAVEAVMACREIENNLHSLTGATLGEGSGATMSEDEDDLPMDFSSDNSGVDFSGGHDMTGFGPLLPTESERSLMERVRQELKLELKQGFKSRIEDVREEIMRKRRAGKLPGDTTTVLKNWWQQHCKWPYPTEDDKAKLVEETGLQLKQINNWFINQRKRNWHNNSHSLTSLKSKRKH

SEQ ID NO: 7312 - protein, 254 aa, Arabidopsis thaliana
MYEQLLAAHVACLRVATPIDQLPIIEAQLSQSHHLLRSYASTAVGYHHDRHELDNFLAQYVMVLCSFKEQLQQHVRVHAVEAVMACREIENNLHSLTGATLGEGSGATMSEDEDDLPMDFSSDNSGVDFSGGHDMTGFGPLLPTESERSLMERVRQELKLELKQGFKSRIEDVREEIMRKRRAGKLPGDTTTVLKNWWQQHCKWPYPTEDDKAKLVEETGLQLKQINNWFINQRKRNWHNNSHSLTSLKSKRKH

SEQ ID NO: 7313 - DNA, 1260 bp, Arabidopsis thaliana
acactgagaagaaaaatccttcaggttatcgaaaattcccggattttactctttgggcggtggccgatttcttacgcgctctttttgtggcgactgttgtatacgcgcgagccttcatggacacgaaggcggttggagtttctaaggatacggcggcgtcgatggaagcgtcgacggtgtttcctgggtttaaattctcgccgacggatgtggagttgatttcgtattacctgaagcggaagatggatggcttggagaggtccgttgaggttataccggaccttgagatttacaatttcgagccttgggatttacccgataagtcgattgtgaaatctgatagcgagtggttcttcttctgtgcgcgtgggaaaaagtatccacatggttcacagaacaggagagcaacgaagatgggatactggaaagcaactgggaaagagcgtgatgtgaagtctggttctgaggtcattggaacaaagaggacgcttgttttccatattggtcgtgcaccaaaaggcgaaagaactgactggattatgcacgagtactgcgtgaaaggagtatctctggatgatgctatggttgtttgccgggttaggaggaacaaagaatacaatagtggtacaagtcagaaggcaccaaagccaaattcatcagccgagaagcatgcgaaagtccaaaatggcgctacgagttcagggagcccgtctgattgggacaacttggttgatttttacctagcaggtgaatcaggggagaaactactcgctgagatggcagagtcatcagaaaatctacaggtggataatgacgaggatttctttgcggatatcctaagagacgaaatcatcaatctcgatgaagcggtgatgacagggaacacaccaaacgaagtgccaacactagaatcagcatcaatggagataagggtacttcctttaccaaacatgatagacaaacaaatgtcatcactgttagaggaaagaccatcgcagaagaagaaaggaaaagacgccacggaatcattgtcgagctgcttcgtgggtttatactcgatcaaatcagtgaacaaggcacgatgggatgttattataggtgtagtggctctgatagcaatgttgttttatctagaataagaggcttatggaagtagcgaaaaacagtgtcctagctatgtttgtatcatcttttctcggacattgacaaggattatatgatgtttttgtgtaaacggtttatgttttacacttctacttc

SEQ ID NO: 7314 - protein, 378 aa, Arabidopsis thaliana
TEKKNPSGYRKFPDFTLWAVADFLRALFVATVVYARAFMDTKAVGVSKDTAASMEASTVFPGFKFSPTDVELISYYLKRKMDGLERSVEVIPDLEIYNFEPWDLPDKSIVKSDSEWFFFCARGKKYPHGSQNRRATKMGYWKATGKERDVKSGSEVIGTKRTLVFHIGRAPKGERTDWIMHEYCVKGVSLDDAMVVCRVRRNKEYNSGTSQKAPKPNSSAEKHAKVQNGATSSGSPSDWDNLVDFYLAGESGEKLLAEMAESSENLQVDNDEDFFADILRDEIINLDEAVMTGNTPNEVPTLESASMEIRVLPLPNMIDKQMSSLLEERPSQKKKGKDATESLSSCFVGLYSIKSVNKARWDVIIGVVALIAMLFYLE

SEQ ID NO: 7315 - protein, 340 aa, Arabidopsis thaliana
MDTKAVGVSKDTAASMEASTVFPGFKFSPTDVELISYYLKRKMDGLERSVEVIPDLEIYNFEPWDLPDKSIVKSDSEWFFFCARGKKYPHGSQNRRATKMGYWKATGKERDVKSGSEVIGTKRTLVFHIGRAPKGERTDWIMHEYCVKGVSLDDAMVVCRVRRNKEYNSGTSQKAPKPNSSAEKHAKVQNGATSSGSPSDWDNLVDFYLAGESGEKLLAEMAESSENLQVDNDEDFFADILRDEIINLDEAVMTGNTPNEVPTLESASMEIRVLPLPNMIDKQMSSLLEERPSQKKKGKDATESLSSCFVGLYSIKSVNKARWDVIIGVVALIAMLFYLE

SEQ ID NO: 7316 - protein, 325 aa, Arabidopsis thaliana
MEASTVFPGFKFSPTDVELISYYLKRKMDGLERSVEVIPDLEIYNFEPWDLPDKSIVKSDSEWFFFCARGKKYPHGSQNRRATKMGYWKATGKERDVKSGSEVIGTKRTLVFHIGRAPKGERTDWIMHEYCVKGVSLDDAMVVCRVRRNKEYNSGTSQKAPKPNSSAEKHAKVQNGATSSGSPSDWDNLVDFYLAGESGEKLLAEMAESSENLQVDNDEDFFADILRDEIINLDEAVMTGNTPNEVPTLESASMEIRVLPLPNMIDKQMSSLLEERPSQKKKGKDATESLSSCFVGLYSIKSVNKARWDVIIGVVALIAMLFYLE

SEQ ID NO: 7317 - DNA, 1350 bp, Arabidopsis thaliana
atgaagaaaaaaaacgaagaagatcaatggtcaatatttaatcagaagcatccacgtccacttcatcagattctatctctctctctctgtaagattccttgctctcgcgcttttctctctctctctcgcgttcgttcttatccacgagctctgcaccgtcgcaatctccgtcttctccatttagatccaacacagagccttttctacatgaaattcggcaaagagtttcgtactcacctcgaagaaactttaccagagtggagagacaagttcctttgctataaacctttaaaaaagcttctcaaatattatccttattactccgccgattttggacccgccaattccgatcacaacgattcgcgtccagtatttgctgatactactaacatctcttccgccgccgacgacggcggtgtggttcccggcgtcaggccatcggaagatctccagggttcgtttgtgaggatacttaacgatgaacttgagaagtttaacgatttttacgttgataaggaagaagatttcgttatcagattacaggagctcaaggaaagaatcgagcaagttaaagaaaagaatggggaatttgcatcagaaagtgagttcagcgaagaaatgatggatattcggagagaccttgttaccattcatggcgagatggtgctcctgaaaaactacagctcccttaattttgcaggacttgtcaagattttgaagaagtacgataaaagaacaggtggacttttacgtttgcctttcacacagcttgttctccatcaacccttctttactacagagccacttactaggttagtccgtgaatgtgaggccaatcttgagcttctttttccttcagaagcggaagttgtagagtcttctagcgcagtgcaagcacactcaagctcacatcagcacaactccccaagaatctcagctgagacttcctcaactctcggcaatgaaaatcttgatatatataagagtacactcgctgcaatgagagctataagagggttacaaaaggctagctcgacgtacaaccctttatcattctcatcgcttcttcagaacgaggatgatgagacggtaacagctgaaaactctccaaactctgggaacaaagatgattcagagaaggaagatactggaccttcccactgatcagaagagaatgatgctctttttgatcaagattttgagaatttgcttcttgatttcaccctaacttttcataaaattaacacattttactttacttcttcaccttttgcaggacacaacttctgtatgcatttgaattgtagtacagtcgtttatagattttcaatgaaattttcctccattgtc

SEQ ID NO: 7318 - protein, 387 aa, Arabidopsis thaliana
MKKKNEEDQWSIFNQKHPRPLHQILSLSLCKIPCSRAFLSLSRVRSYPRALHRRNLRLLHLDPTQSLFYMKFGKEFRTHLEETLPEWRDKFLCYKPLKKLLKYYPYYSADFGPANSDHNDSRPVFADTTNISSAADDGGVVPGVRPSEDLQGSFVRILNDELEKFNDFYVDKEEDFVIRLQELKERIEQVKEKNGEFASESEFSEEMMDIRRDLVTIHGEMVLLKNYSSLNFAGLVKILKKYDKRTGGLLRLPFTQLVLHQPFFTTEPLTRLVRECEANLELLFPSEAEVVESSSAVQAHSSSHQHNSPRISAETSSTLGNENLDIYKSTLAAMRAIRGLQKASSTYNPLSFSSLLQNEDDETVTAENSPNSGNKDDSEKEDTGPSH

SEQ ID NO: 7319 - protein, 318 aa, Arabidopsis thaliana
MKFGKEFRTHLEETLPEWRDKFLCYKPLKKLLKYYPYYSADFGPANSDHNDSRPVFADTTNISSAADDGGVVPGVRPSEDLQGSFVRILNDELEKFNDFYVDKEEDFVIRLQELKERIEQVKEKNGEFASESEFSEEMMDIRRDLVTIHGEMVLLKNYSSLNFAGLVKILKKYDKRTGGLLRLPFTQLVLHQPFFTTEPLTRLVRECEANLELLFPSEAEVVESSSAVQAHSSSHQHNSPRISAETSSTLGNENLDIYKSTLAAMRAIRGLQKASSTYNPLSFSSLLQNEDDETVTAENSPNSGNKDDSEKEDTGPSH

SEQ ID NO: 7320 - DNA, 1851 bp, Arabidopsis thaliana
aagtctctttttttgtttaaagatgaacaaatttttgtgttcacattaataaaaactaaaaagaggattcccatgcacacgaaccaacaccaagagcctttttattgtattttaatttctttatttgagccaacaactatttattttcgttcttctttcacactagctctaaaaaccggtttaactaaaccagtcaaaaaccggacgtatgaaagcgttcactgtcttctctgacttacgcgttgaccaatgactacagtattttgaaaaaaccttcgtgtgatataaccggttactggaagtctgtaaccatccgtactgtatatttaacctgctattgccggtcaataaaaaaaaaatcaaggaccaccatttaacacagtgcggtgacaaatatcaaatccttgagtcattattatctctttcctctcttacgccatacatttcatctttcttctctctctatctctcctctttgaaccctaaaaactctttctttacaaggattgatctttttgtatttttgattttgacatttgctttgtgttcgatctctgttttgatgcgatttctctgtttttaaagccatttgatagattgtttccggtaaagctcagcgagagaagaagaagaacaacaatggagtttacagatttctcaaagacgagtttttactacccgtcgtcacaaagcgtttgggatttcggagatttagcggcggcggagaggcattctttagggttcatggagttattaagttctcagcagcatcaagactttgctactgtttctcctcattccttccttctccaaacgtctcaaccgcaaacgcaaacgcaaccatcggcgaagctgtcttcaagtatcattcaagctccaccgtcagagcaattagtgacgtcaaaggtggagtctttgtgttcggatcatttgttgataaacccaccggcgactcctaactcgtcatcgatttcgtctgcttcaagcgaggctctaaatgaagagaaaccgaaaacagaagacaatgaagaagaaggaggtgaagatcaacaagagaagagtcatactaagaaacagttgaaagcaaagaagaataatcagaagagacagagagaggcaagagtcgcattcatgacaaagagtgaagttgatcatctcgaagatggttatcgctggcgaaaatatggtcaaaaagctgtcaaaaacagtccttttcccaggagttactaccgttgcacaacggcttcatgtaacgtgaagaagagagtggagagatcattcagagatccaagcactgtggttacaacctacgaaggtcaacacactcacattagtccactcacgtctcgtcctatttccactggaggtttcttcggatcgtcaggagctgcttcgagtctcggtaatggttgctttgggtttcctattgatggctccacgttaatctctcctcagttccaacagcttgtccaataccatcaccaacagcagcaacaagaactcatgtcttgttttggaggagtcaacgagtaccttaatagccacgctaatgagtatggtgatgataatcgtgtgaagaagagtcgagttttggttaaagataatggacttctgcaagatgttgttccgtctcatatgttgaaggaagagtagtagtatatatatagtcttatagttttaatctagtttttttttgtataattgtctaaaagaaacggatcttttgttctgatgaagaagatgttttcttatggttctgaaatcgtaaggtaatgatgattgtaccaagccgagaaagtacttgtgattttcaccattgaatcactataaatgtaatttttatttactgcg

SEQ ID NO: 7321 - protein, 337 aa, Arabidopsis thaliana
MEFTDFSKTSFYYPSSQSVWDFGDLAAAERHSLGFMELLSSQQHQDFATVSPHSFLLQTSQPQTQTQPSAKLSSSIIQAPPSEQLVTSKVESLCSDHLLINPPATPNSSSISSASSEALNEEKPKTEDNEEEGGEDQQEKSHTKKQLKAKKNNQKRQREARVAFMTKSEVDHLEDGYRWRKYGQKAVKNSPFPRSYYRCTTASCNVKKRVERSFRDPSTVVTTYEGQHTHISPLTSRPISTGGFFGSSGAASSLGNGCFGFPIDGSTLISPQFQQLVQYHHQQQQQELMSCFGGVNEYLNSHANEYGDDNRVKKSRVLVKDNGLLQDVVPSHMLKEE

SEQ ID NO: 7322 - protein, 302 aa, Arabidopsis thaliana
MELLSSQQHQDFATVSPHSFLLQTSQPQTQTQPSAKLSSSIIQAPPSEQLVTSKVESLCSDHLLINPPATPNSSSISSASSEALNEEKPKTEDNEEEGGEDQQEKSHTKKQLKAKKNNQKRQREARVAFMTKSEVDHLEDGYRWRKYGQKAVKNSPFPRSYYRCTTASCNVKKRVERSFRDPSTVVTTYEGQHTHISPLTSRPISTGGFFGSSGAASSLGNGCFGFPIDGSTLISPQFQQLVQYHHQQQQQELMSCFGGVNEYLNSHANEYGDDNRVKKSRVLVKDNGLLQDVVPSHMLKEE

SEQ ID NO: 7323 - protein, 173 aa, Arabidopsis thaliana
MTKSEVDHLEDGYRWRKYGQKAVKNSPFPRSYYRCTTASCNVKKRVERSFRDPSTVVTTYEGQHTHISPLTSRPISTGGFFGSSGAASSLGNGCFGFPIDGSTLISPQFQQLVQYHHQQQQQELMSCFGGVNEYLNSHANEYGDDNRVKKSRVLVKDNGLLQDVVPSHMLKEE

SEQ ID NO: 7324 - DNA, 1133 bp, Arabidopsis thaliana
acacaaacccactgaacattcaaatgtctcgttctcttgtcttcttcttcctctttcttgtcttggtcgtcccttgtctctcccatggaaccggaggagaccacgacgacgatgaggctccgcacgttaagagttccgatctcaaatccaaatccttaatctccgtcaagatcgcatgtcttgtcatcatctttgtcctcacgttcataagcggtgtatctccttatttcttgaaatggagccaagggtttttggttcttggtacacaattcgccggaggcgtgtttcttgcaaccgccttgatgcatttcttgtcggacgctgatgagacgtttcgtgatttgttgacggcggaaggagagtcggagccatctccggcttacccatttgcttatatgttggcttgtgctggttttatgttgaccatgcttgctgattcggtcatcgctcatatctactcaaagacccaaaacgatttggagcttcaaggagaagacaaatcgaatcagaggtcagcaacaactgaaacttcgattggagatagcattctattgatcgtagctctctgttttcactctgtcttcgaaggcatagctattggtatttcagagactaaatcagatgcttggagagctctctggacaataacactccataagatatttgcagcgattgcaatgggaatagctcttctccgtatgatccctgaccgtcctttattctcctcaatcacttattctttcgcattcgccatctcgagcccaattggtgttgccatcgggatagtcatcgatgcaacgactcaagggtccatcgcggattggatattcgcattgtcgatgagcttggcgtgtggggtatttgtgtatgtatctgtgaaccatttgttggcaaaagggtatcgaccaaacaagaaagttcatgttgatgagcctcgttataagtttttggctgtgttgtttggagttgttgtcattgccattgttatgatatgggacacttgaaaaacactacaattgtcccaaaatactgattagatttttctggtttgcaaagaaagcttgttgatttttgtatgtttatagcatgtagcaatcctcgttttgtaatgtactttgtacttttgtagcatc

SEQ ID NO: 7325 - protein, 333 aa, Arabidopsis thaliana
TNPLNIQMSRSLVFFFLFLVLVVPCLSHGTGGDHDDDEAPHVKSSDLKSKSLISVKIACLVIIFVLTFISGVSPYFLKWSQGFLVLGTQFAGGVFLATALMHFLSDADETFRDLLTAEGESEPSPAYPFAYMLACAGFMLTMLADSVIAHIYSKTQNDLELQGEDKSNQRSATTETSIGDSILLIVALCFHSVFEGIAIGISETKSDAWRALWTITLHKIFAAIAMGIALLRMIPDRPLFSSITYSFAFAISSPIGVAIGIVIDATTQGSIADWIFALSMSLACGVFVYVSVNHLLAKGYRPNKKVHVDEPRYKFLAVLFGVVVIAIVMIWDT

SEQ ID NO: 7326 - protein, 326 aa, Arabidopsis thaliana
MSRSLVFFFLFLVLVVPCLSHGTGGDHDDDEAPHVKSSDLKSKSLISVKIACLVIIFVLTFISGVSPYFLKWSQGFLVLGTQFAGGVFLATALMHFLSDADETFRDLLTAEGESEPSPAYPFAYMLACAGFMLTMLADSVIAHIYSKTQNDLELQGEDKSNQRSATTETSIGDSILLIVALCFHSVFEGIAIGISETKSDAWRALWTITLHKIFAAIAMGIALLRMIPDRPLFSSITYSFAFAISSPIGVAIGIVIDATTQGSIADWIFALSMSLACGVFVYVSVNHLLAKGYRPNKKVHVDEPRYKFLAVLFGVVVIAIVMIWDT

SEQ ID NO: 7327 - protein, 233 aa, Arabidopsis thaliana
MHFLSDADETFRDLLTAEGESEPSPAYPFAYMLACAGFMLTMLADSVIAHIYSKTQNDLELQGEDKSNQRSATTETSIGDSILLIVALCFHSVFEGIAIGISETKSDAWRALWTITLHKIFAAIAMGIALLRMIPDRPLFSSITYSFAFAISSPIGVAIGIVIDATTQGSIADWIFALSMSLACGVFVYVSVNHLLAKGYRPNKKVHVDEPRYKFLAVLFGVVVIAIVMIWDT

SEQ ID NO: 7328 - DNA, 2861 bp, Arabidopsis thaliana
gattctgtcttctccttcttccaaccgcgtcatcaatttatatttagacaacaaaaaaaaaaaaagccagagcctctccggtaatttctcattttcccgagcgatcgtccatggcggacatcgacatcggaaccgcagcaacaacaggaggaaacgaaggaagaggaggcacacgagaacgtctaataaaccgagaaaacaagttcacacgtagcgtatctcacgcacaagacgagctccacagtttccggaaatatctccgatggatgtgcgtagatcagtcgagtccttggacggcggttctatcatggtctatgttcgttgttttcacgctcgttgttcctgccacgtctcacttcatgctcgcttgctctgactgcgatagccatcactctaggccgtacgattccgttgttcagctttctcttagcagtttcgctgctctttcgtttctttgtctctccagattcgttagcaagtatggtctccgacggttcctattctttgataagctttgggatgagagcgagaccgttcgtctaggctacaccaatcagctcaatagatcgcttaagattctctcctacttcgtgtctccttgtttcttagcgatgagctcttataagatatggtggtatgcttcaggagcttctcagattcctttccttggtaatgttatcttgagtgatacagttgcttgtttgatggagctctgctcgtggttgtaccgtactaccgtgatctttctggtttgtgtcctcttccgtctcatctgccatctccagattcttaggctgcaagactttgcccaggttttccagatggattcagatgttggttctatcttgtctgaacatctccgtatcagacgtcatctgagaatcatcagccaccgataccgaacctttatattgttgtccttgatattagtcactggaagtcagttttactctctgcttattaccactaaggcctacgctgaattgaatatctacagagctggagaactagcactatgttcaatgacgctggtcactgcactgctcattttactacgaagtgcatcaaagatcacacacaaggctcaggcggtgacttgtcttgcagccaagtggcatgtatgtgcgacgatagaatcctttgagactgtggatggagagactccaaggttagttgatagagcaagcggacacggatactatccaacagatgatgataatggagaatcagatagtgaagattatggagacgaagaagatgatttcgataacaacaatctcattcctgcttatgcttatagcaccatatcattccaaaaacggcaagctctagtgaattactttgagaacaatagatcaggaatcacggtgtttgggtttacacttgatagaagcactctccatacaatcttcggtatcgaaatgtcgcttgttctctggttacttggtaagaccattggaatttcttgaatcattctttggatcattaaagttctcaaagttttggctcccttgttggatgatgttggtatatgcatgtatgtatacacagaggctctatgtaaaataacgttttctcgtttttttatcactgtaaatcatcttattttttctttaacatgtcgatttgtaatagaattcatgtgttcaacaaaaaaaaaaaaaaaaaaaaaaaaaaaaaaaaaaaaaaaaaaaaaaaaaaaaaaaaaaaaaaaaaaaaaaaaaaaaaaaaaaaaaaaataaaaaaaaaaaaaaaagagctcttggatccatgagaacaaagatgagattgaatatttcaggcttagtgatctttgggactgttttgatgagccaagcgcgtatggacttggatcaaaggtcgacttaaacaatggtgaatccgttatgcagtactatgtcccgtatctatccgccattcaaatctatactaacaaatctacagccatttctaggattcatagtgatgtggttgattgtgagagtgaatgttggagtgatgatagtgagattgagaagttgtctaggtcaatgagcagtggttctagcaaaatatgggattctgtttctgatgattcgggttatgagatcgatggtacttcttcattgatgcgagataagctcggttctattgattttcagtactttgagtccgttaaaccgcacttgcgtgttcctcttaccgctaaggtaaatgaattggctgagaagtatccgggactttcgactctaaggagtgttgatttgtctccagcaagttggttggccattgcttggtatccaatttaccacattccctctcggaagaccgataaagatttatcgacatgtttcttgagttatcatactttatcttcggctttccaaggtaacttgatagagggagacgatgagattaacgaaaccatgaaagaagaaacattgtgttttgatgaaggaccggtgaccaagagtatacctttggctccttttggtttagttagttacaaattgcaaggagatttgtggaggaatcaagaatgtggtgaccaaggacgtatagtttatcttcgcagtgcagctgattcgtggctgaaacagcttaatgttcaagatcaccatgaccatagcttcttctccatgaacatgagcttgtagatccaaaaaaagagagccaagactctgtttttttgctctgtttttagttgttttcttagccaagactctgtttttttgctctgtttttagttgttttaagaatcttaggtatatagcaactcgaaatgtagaggtttcgtttccttctgcttgaacccgtggaaaataaagagaattaggcttgtttttggctttatgagaaggaagttttttttgttttgtgag

SEQ ID NO: 7329 - protein, 452 aa, Arabidopsis thaliana
MADIDIGTAATTGGNEGRGGTRERLINRENKFTRSVSHAQDELHSFRKYLRWMCVDQSSPWTAVLSWSMFVVFTLVVPATSHFMLACSDCDSHHSRPYDSVVQLSLSSFAALSFLCLSRFVSKYGLRRFLFFDKLWDESETVRLGYTNQLNRSLKILSYFVSPCFLAMSSYKIWWYASGASQIPFLGNVILSDTVACLMELCSWLYRTTVIFLVCVLFRLICHLQILRLQDFAQVFQMDSDVGSILSEHLRIRRHLRIISHRYRTFILLSLILVTGSQFYSLLITTKAYAELNIYRAGELALCSMTLVTALLILLRSASKITHKAQAVTCLAAKWHVCATIESFETVDGETPRLVDRASGHGYYPTDDDNGESDSEDYGDEEDDFDNNNLIPAYAYSTISFQKRQALVNYFENNRSGITVFGFTLDRSTLHTIFGIEMSLVLWLLGKTIGIS

SEQ ID NO: 7330 - protein, 400 aa, Arabidopsis thaliana
MCVDQSSPWTAVLSWSMFVVFTLVVPATSHFMLACSDCDSHHSRPYDSVVQLSLSSFAALSFLCLSRFVSKYGLRRFLFFDKLWDESETVRLGYTNQLNRSLKILSYFVSPCFLAMSSYKIWWYASGASQIPFLGNVILSDTVACLMELCSWLYRTTVIFLVCVLFRLICHLQILRLQDFAQVFQMDSDVGSILSEHLRIRRHLRIISHRYRTFILLSLILVTGSQFYSLLITTKAYAELNIYRAGELALCSMTLVTALLILLRSASKITHKAQAVTCLAAKWHVCATIESFETVDGETPRLVDRASGHGYYPTDDDNGESDSEDYGDEEDDFDNNNLIPAYAYSTISFQKRQALVNYFENNRSGITVFGFTLDRSTLHTIFGIEMSLVLWLLGKTIGIS

SEQ ID NO: 7331 - protein, 384 aa, Arabidopsis thaliana
MFVVFTLVVPATSHFMLACSDCDSHHSRPYDSVVQLSLSSFAALSFLCLSRFVSKYGLRRFLFFDKLWDESETVRLGYTNQLNRSLKILSYFVSPCFLAMSSYKIWWYASGASQIPFLGNVILSDTVACLMELCSWLYRTTVIFLVCVLFRLICHLQILRLQDFAQVFQMDSDVGSILSEHLRIRRHLRIISHRYRTFILLSLILVTGSQFYSLLITTKAYAELNIYRAGELALCSMTLVTALLILLRSASKITHKAQAVTCLAAKWHVCATIESFETVDGETPRLVDRASGHGYYPTDDDNGESDSEDYGDEEDDFDNNNLIPAYAYSTISFQKRQALVNYFENNRSGITVFGFTLDRSTLHTIFGIEMSLVLWLLGKTIGIS

SEQ ID NO: 7332 - DNA, 1718 bp, Arabidopsis thaliana
agtgaaaaaaccaaaaccccacaaagcttggaaagagccacaaataggtcaaagaatgggtgaagacaagaagacggcaagggagacggtggaggaggaaccacttagcccatgttcacggctgttcaattcgccggattttaactgtgcaataatcgttacaatgggatctaaagttaaaggagacacaccagccatcatccacggccttgaacacaccctcgtaaaccaccctcgcttctctagcattttagagatgaacaatgggaagaagccgcgttgggttcggacaaaagttaaagtagaagagcatgtgattgttcctgatgtggatcccgacattgaaaatccggatcagtatcttgaagactatatctctaagttaacgaccattcctatggatttgtctaaaccattatgggaaatgcacttactaggcgtcaaaacatcgagcgctgaatcctatgctattctcaagatccatcattctttgggtgatggaatgtctctcatgtctcttttactggcttgtacccgcaaaacatcagaccccgaggctttgcctaccgttgcggttcataaaaaacgctttggaccgagctgcaacagcgggtttttcaacaagatttggtggttatttgtagggctctggttcatcctaagattgctattcaacacttttgttgatatcttaatgtttgctcttacaatatttgtcttgagggatacggagactcctctcttggccaaacccggtagtgaacttatccctaagaggttcgtccaccggattatcagttttgacgatgttaagctggtgaaaaacgcaatgaaaatgacggtgaacgatgttcttcttggagtaacgcaagccggactttcgcgttaccttagtcgaaaatatgatcaagaagcaacaccgaaatcgaaagagtccatgaggagaatccgacttcgttcagccattatgattaacttgagaccaaacgcaggaattgaggctctagcggatatgatggccaagaaatcaaaatgcagatggggaaatctcttcggctacattctcctaccgttctccgttgggctagagaccgatcctctagaatacgtgcgccaagctaaagccacgattgaccgcaagaaacactctctagaagccgtattctccatggcattctttaaattgatactaaaagttcttgggctcaaggcaagtgtagttcttgtaaggaaagtgatccatagcacaacgttatcattttcaaatgtggtcggtccaaaggaagaaattacattccatggtcacccactgaattatatctccccatgtgtttttggccacccacatgctcttactctacatttccagacctacgcgaacaaggtcataatatcggtaacggctgatccaacggtcattcctgaccctcacaagatgtgtgatgatttggtggagtctctcaagatgattaaagccgctgttcttgaaagagggttatatgagattgaggtctaactaaagctcttttgttgtggatcacaatgtggattcgcccgtttcttctttgtctacggctcctcaatgattactctaaattgataccttaggaagttattattataataactagacatattgatataaaaaagttgtaagacatcaagttaaaattttaagcatgtagtgtatcattttaatagatactaattcacttccg

SEQ ID NO: 7333 - protein, 504 aa, Arabidopsis thaliana
VKKPKPHKAWKEPQIGQRMGEDKKTARETVEEEPLSPCSRLFNSPDFNCAIIVTMGSKVKGDTPAIIHGLEHTLVNHPRFSSILEMNNGKKPRWVRTKVKVEEHVIVPDVDPDIENPDQYLEDYISKLTTIPMDLSKPLWEMHLLGVKTSSAESYAILKIHHSLGDGMSLMSLLLACTRKTSDPEALPTVAVHKKRFGPSCNSGFFNKIWWLFVGLWFILRLLFNTFVDILMFALTIFVLRDTETPLLAKPGSELIPKRFVHRIISFDDVKLVKNAMKMTVNDVLLGVTQAGLSRYLSRKYDQEATPKSKESMRRIRLRSAIMINLRPNAGIEALADMMAKKSKCRWGNLFGYILLPFSVGLETDPLEYVRQAKATIDRKKHSLEAVFSMAFFKLILKVLGLKASVVLVRKVIHSTTLSFSNVVGPKEEITFHGHPLNYISPCVFGHPHALTLHFQTYANKVIISVTADPTVIPDPHKMCDDLVESLKMIKAAVLERGLYEIEV

SEQ ID NO: 7334 - protein, 486 aa, Arabidopsis thaliana
MGEDKKTARETVEEEPLSPCSRLFNSPDFNCAIIVTMGSKVKGDTPAIIHGLEHTLVNHPRFSSILEMNNGKKPRWVRTKVKVEEHVIVPDVDPDIENPDQYLEDYISKLTTIPMDLSKPLWEMHLLGVKTSSAESYAILKIHHSLGDGMSLMSLLLACTRKTSDPEALPTVAVHKKRFGPSCNSGFFNKIWWLFVGLWFILRLLFNTFVDILMFALTIFVLRDTETPLLAKPGSELIPKRFVHRIISFDDVKLVKNAMKMTVNDVLLGVTQAGLSRYLSRKYDQEATPKSKESMRRIRLRSAIMINLRPNAGIEALADMMAKKSKCRWGNLFGYILLPFSVGLETDPLEYVRQAKATIDRKKHSLEAVFSMAFFKLILKVLGLKASVVLVRKVIHSTTLSFSNVVGPKEEITFHGHPLNYISPCVFGHPHALTLHFQTYANKVIISVTADPTVIPDPHKMCDDLVESLKMIKAAVLERGLYEIEV

SEQ ID NO: 7335 - protein, 450 aa, Arabidopsis thaliana
MGSKVKGDTPAIIHGLEHTLVNHPRFSSILEMNNGKKPRWVRTKVKVEEHVIVPDVDPDIENPDQYLEDYISKLTTIPMDLSKPLWEMHLLGVKTSSAESYAILKIHHSLGDGMSLMSLLLACTRKTSDPEALPTVAVHKKRFGPSCNSGFFNKIWWLFVGLWFILRLLFNTFVDILMFALTIFVLRDTETPLLAKPGSELIPKRFVHRIISFDDVKLVKNAMKMTVNDVLLGVTQAGLSRYLSRKYDQEATPKSKESMRRIRLRSAIMINLRPNAGIEALADMMAKKSKCRWGNLFGYILLPFSVGLETDPLEYVRQAKATIDRKKHSLEAVFSMAFFKLILKVLGLKASVVLVRKVIHSTTLSFSNVVGPKEEITFHGHPLNYISPCVFGHPHALTLHFQTYANKVIISVTADPTVIPDPHKMCDDLVESLKMIKAAVLERGLYEIEV

SEQ ID NO: 7336 - DNA, 1273 bp, Arabidopsis thaliana
cttgaaaagtcccattaacaaacaaacgagaaaaccaactctggagaatggcgaatctaccttcttctctctccatgggcacacctttcggtggtcctagcacctccgcacaaaatcctaccggagctccggccaacaaagatcgcaatttggcctctgctgaacagttggtactcgatctcagcaatcctgaactcagagaaaatgctcttctcgagctttccaagaaaagagaattgtttcaggatctggcgcctttgttgtggaactcttttggtaccattgctgccttgttacaggagattgtatcaatctactctgttcttgcacctccaaatctgactcctgctcagtccaaccgtgtttgcaactcgctcgctcttcttcagtgcgtagcatctcattctgacacgagaatgttatttctcaaggctcatatcccgttgtacctttatcccttccttaatacaacgagtaagtccagacctttcgaatacttgcggcttactagcctaggtgtcatcggtgcacttgtgaaggttgatgatacagaggtcattagcttccttctttcaactgaaattattcctctgtgcctccgtaccatggaaatggggagtgagctgtcaaaaacagtggcaacatttattgttcaaaagatactgttggatgatgtggggatggattacatctgcacaacagcagagcggttttttgcagttggtcgagtgttgggaaatatggttcagtcacttgtggagcagccttctccgcgccttttgaagcatatcattcgttgctatctccgtttatcagacaacccaagggcttgtgctgcactcgcaagctgtctccctgactcgctacgagatggatcctttagcaattgtcttcgcgaggatccaactgcaagaaggtggctgcaacagttggtgcacaatgttggagttggtcgcgtcccaacacatcaaggtggaggatttgagcacatgctttgagctgaatccatctcaaacccatccatggagtgtgtttcttctgtttttgtttctaattatacatgtgctttttaatgccttaacttagatgatgggttataggctttttagtctgtttgaaattcttattgtaattatttttaagctctagaaccaatcccccagaatgcataagtcttgggataataaaagattggttacaaaagaaatattatagagtttgtattatcatgttgaacggtaacaatttttattccagcaaaagctttagcggt

SEQ ID NO: 7337 - protein, 316 aa, Arabidopsis thaliana
MANLPSSLSMGTPFGGPSTSAQNPTGAPANKDRNLASAEQLVLDLSNPELRENALLELSKKRELFQDLAPLLWNSFGTIAALLQEIVSIYSVLAPPNLTPAQSNRVCNSLALLQCVASHSDTRMLFLKAHIPLYLYPFLNTTSKSRPFEYLRLTSLGVIGALVKVDDTEVISFLLSTEIIPLCLRTMEMGSELSKTVATFIVQKILLDDVGMDYICTTAERFFAVGRVLGNMVQSLVEQPSPRLLKHIIRCYLRLSDNPRACAALASCLPDSLRDGSFSNCLREDPTARRWLQQLVHNVGVGRVPTHQGGGFEHML

SEQ ID NO: 7338 - protein, 307 aa, Arabidopsis thaliana
MGTPFGGPSTSAQNPTGAPANKDRNLASAEQLVLDLSNPELRENALLELSKKRELFQDLAPLLWNSFGTIAALLQEIVSIYSVLAPPNLTPAQSNRVCNSLALLQCVASHSDTRMLFLKAHIPLYLYPFLNTTSKSRPFEYLRLTSLGVIGALVKVDDTEVISFLLSTEIIPLCLRTMEMGSELSKTVATFIVQKILLDDVGMDYICTTAERFFAVGRVLGNMVQSLVEQPSPRLLKHIIRCYLRLSDNPRACAALASCLPDSLRDGSFSNCLREDPTARRWLQQLVHNVGVGRVPTHQGGGFEHML

SEQ ID NO: 7339 - protein, 193 aa, Arabidopsis thaliana
MLFLKAHIPLYLYPFLNTTSKSRPFEYLRLTSLGVIGALVKVDDTEVISFLLSTEIIPLCLRTMEMGSELSKTVATFIVQKILLDDVGMDYICTTAERFFAVGRVLGNMVQSLVEQPSPRLLKHIIRCYLRLSDNPRACAALASCLPDSLRDGSFSNCLREDPTARRWLQQLVHNVGVGRVPTHQGGGFEHML

SEQ ID NO: 7340 - DNA, 1477 bp, Arabidopsis thaliana
aattttccttttctccgatcaattccaaaaccctacttcaaccctgcgattcattcatcattcacagagtttgaagaaaacgccgaaatcggaaatggcgtctattgttcttcgatctcgcctgttgccaagattagcaaagctcagatctcgtaatctgagatgtttctctgcggaagcatcttcgacgaattctacatctaggtattcgggagtcacctctacccagtcgatgttttctgattttccaccgccaaatcagccgccacctcctcctcctcctcaagtggaagctgctgccgcggctgcgacgggaaaggagaggaaaggtcttaagtatcttggttacgcactcctctgggcactcactggtgctaccgctgctactggttacgcaagttttgcttacacgatagatgaagtgaatgaaaagactaaggcgttccgagaatcagctacgaagacaccagttattaaatcttctggcattgatgtgattgataaatatcagactaagttgtactctgctgcaatgacaggttctgctagagccattgataagtatttagagcttagggaaattgtggaggaacaagtgaaaggcttcacggaacctctctcggaaaagcttcttccggatctgcaccccgcagaacagcatgtcttcactctagttcttgatttaaatgagacactgctttacactgactggaagcgggaaagagggtggaggacattcaaaagaccaggtgtcgatgcattcttggagcatcttgggaaattctatgagattgtcgtgtattctgaccagatggagatgtatgtactcccggtctgtgagaaattagacccaaatggctacatacgttataagctagcaagaggcgctactaaatatgaaaatggaaagcactatagggatctgtcaaagctgaacagagatccgaagaagattctgtttgttagcgcaaatgcctttgaatcaacccttcagccagaaaatagcgtgccaatcaagccttacaaactagaagctgatgacacagccctagttgacctgatacccttccttgaatatgttgcacgtaacagtccagcagacatcagaccggttctggcctcttttgagagaaaagatattgccaaagagttcattgacaggtccatagagtatcaaaagcgaaagcaaggacaactgggacaaggtcgattctggaggcgttaaaggatctaagatttatgtatagagcgagagacaattatatcatcattgatggtgcacaccataaaataggaacatgagctaccgttcttcgctatggatttattaggtaaaatccgaattaaaatactgtctttgtcatcaaagagtttttatgttacccaattttcctcgtctttctctctgctttacatagaaaatttctatgagaacgaaaaagaaattatcatatggaaggttcatttttcgttgact

SEQ ID NO: 7341 - protein, 407 aa, Arabidopsis thaliana
IFLFSDQFQNPTSTLRFIHHSQSLKKTPKSEMASIVLRSRLLPRLAKLRSRNLRCFSAEASSTNSTSRYSGVTSTQSMFSDFPPPNQPPPPPPPQVEAAAAAATGKERKGLKYLGYALLWALTGATAATGYASFAYTIDEVNEKTKAFRESATKTPVIKSSGIDVIDKYQTKLYSAAMTGSARAIDKYLELREIVEEQVKGFTEPLSEKLLPDLHPAEQHVFTLVLDLNETLLYTDWKRERGWRTFKRPGVDAFLEHLGKFYEIVVYSDQMEMYVLPVCEKLDPNGYIRYKLARGATKYENGKHYRDLSKLNRDPKKILFVSANAFESTLQPENSVPIKPYKLEADDTALVDLIPFLEYVARNSPADIRPVLASFERKDIAKEFIDRSIEYQKRKQGQLGQGRFWRR

SEQ ID NO: 7342 - protein, 376 aa, Arabidopsis thaliana
MASIVLRSRLLPRLAKLRSRNLRCFSAEASSTNSTSRYSGVTSTQSMFSDFPPPNQPPPPPPPQVEAAAAAATGKERKGLKYLGYALLWALTGATAATGYASFAYTIDEVNEKTKAFRESATKTPVIKSSGIDVIDKYQTKLYSAAMTGSARAIDKYLELREIVEEQVKGFTEPLSEKLLPDLHPAEQHVFTLVLDLNETLLYTDWKRERGWRTFKRPGVDAFLEHLGKFYEIVVYSDQMEMYVLPVCEKLDPNGYIRYKLARGATKYENGKHYRDLSKLNRDPKKILFVSANAFESTLQPENSVPIKPYKLEADDTALVDLIPFLEYVARNSPADIRPVLASFERKDIAKEFIDRSIEYQKRKQGQLGQGRFWRR

SEQ ID NO: 7343 - protein, 330 aa, Arabidopsis thaliana
MFSDFPPPNQPPPPPPPQVEAAAAAATGKERKGLKYLGYALLWALTGATAATGYASFAYTIDEVNEKTKAFRESATKTPVIKSSGIDVIDKYQTKLYSAAMTGSARAIDKYLELREIVEEQVKGFTEPLSEKLLPDLHPAEQHVFTLVLDLNETLLYTDWKRERGWRTFKRPGVDAFLEHLGKFYEIVVYSDQMEMYVLPVCEKLDPNGYIRYKLARGATKYENGKHYRDLSKLNRDPKKILFVSANAFESTLQPENSVPIKPYKLEADDTALVDLIPFLEYVARNSPADIRPVLASFERKDIAKEFIDRSIEYQKRKQGQLGQGRFWRR

SEQ ID NO: 7344 - DNA, 2114 bp, Arabidopsis thaliana
atacttctttcattttcggaatcagattgaaatataaagctttggtttttgtgcggtcacatggcttctttagattactggctggcttgatcaaatcacgtactagctagtggatcactttttcccagaaggtttttgttcgttgcttggtattacctcttcttcttcttcttgatgaaggccgcgtgaatagagcgcacacaaagtgttcgtcgaaatgctccaaccatggtctctatcaactccggccccatttcatcttttgtttctcgctattcgatgattgattccgatacccttttgcatctttcttcttttggttcaacttttaatcccaattataaggccaaagcttgcatacgttttgcaagaaaagtttgtgggtctactgttctagggtttcttgaggtgaagccgaggaagaaaagttgttgttctcgttgtaatggggtttcgaggatgtgtaataagcgtaatttgggttgggatagcgagggaagtaaggatcttgaaaccgagattttggagtttatgaagaattcggagaaacctgggatgtttccgagtaagaaggatttgattcgttctggaagatttgatcttgtggagagaattgtaaaccaaggtggatggctttctatgggatgggatttggatgaacaagaagagaaggtccgagtaaatgagaacgtgacgccacaggatttacatatcgagaaacagcttcctaattgtaattctccagaaatggataaaactttgaatcatggagatcttgatctttcctcaaatctttcatcttcgacagaacaagtggaatctagaaacgatagtggaattgaaggcattttgaccagattggagaaagaaaggaatttgagtctagggattagcgtgagggagaatgggaaaagcaatggtgccatgcatgatatctccccaaatggttcagttccttggtcttccaggattgtgacagctagtgaaattcaagaagtcgacggcagtagaggctcaggtgaatatgcacaaagtaggtatcaaggagccaagtcggtttcaggaaagccaggcttaagcgattcacctacgtcagaaacatggaggacgtggagtatgagaagagctggatttactgatgaagattttgaagctgctgaaatttcctccagtggtttgactggtgtgaagaaagatgatacgaagaaggattctggtgatagcatgaatgggaaagatagaattgcatcttcctcagaagatgtaaataaaactcatatcaaacaccgtcttcaacagctccagtcagaactttcttctgttcttcactcccttagatctcctcctgataaagttgtgacaagtaaggatagtgagacaactgctgggaacttggagaacctctctgatgattgggagtacaaagagaatgagatcatacatgcccaaaataagttgcggtctacacgagcaaagttggctgttcttgaaggaaaaatggctatggctataatagatgcacagaggattgtacgggagaaacagagaagaatagatcatgctagtagagctttacgattacttcgaactgcatccatagtgtggcctaattcagcctcagaagttctattaacgggttcatttgacggttggtctacccagaggaagatgaagaaagctgagaacggagtcttctctttgtctctaaagctatatcctggaaaatatgagataaagtttatagttgatggccagtggaaagttgacccgcttcgacccattgttactagtggtggatatgaaaacaatctgctaatcatctcttgaggtcaaaggcaacaatatttctgaactaatcccaccatcgatgtagcatgagctgaatcagtagggttttagtttttctttaggaatttcactttcatgtagggtaaggtaggcaagtaagcagtagtactaggttttatcttgacaaaacaagaaagtaagaatgatctgtatattgtactatacgaccactgtggtcctctgacaagagtcacaagaggcatgtaaacaattggcttattgcattgtacaattttacacattaagatggctatgacgaggttggc

SEQ ID NO: 7345 - protein, 532 aa, Arabidopsis thaliana
MVSINSGPISSFVSRYSMIDSDTLLHLSSFGSTFNPNYKAKACIRFARKVCGSTVLGFLEVKPRKKSCCSRCNGVSRMCNKRNLGWDSEGSKDLETEILEFMKNSEKPGMFPSKKDLIRSGRFDLVERIVNQGGWLSMGWDLDEQEEKVRVNENVTPQDLHIEKQLPNCNSPEMDKTLNHGDLDLSSNLSSSTEQVESRNDSGIEGILTRLEKERNLSLGISVRENGKSNGAMHDISPNGSVPWSSRIVTASEIQEVDGSRGSGEYAQSRYQGAKSVSGKPGLSDSPTSETWRTWSMRRAGFTDEDFEAAEISSSGLTGVKKDDTKKDSGDSMNGKDRIASSSEDVNKTHIKHRLQQLQSELSSVLHSLRSPPDKVVTSKDSETTAGNLENLSDDWEYKENEIIHAQNKLRSTRAKLAVLEGKMAMAIIDAQRIVREKQRRIDHASRALRLLRTASIVWPNSASEVLLTGSFDGWSTQRKMKKAENGVFSLSLKLYPGKYEIKFIVDGQWKVDPLRPIVTSGGYENNLLIIS

SEQ ID NO: 7346 - protein, 515 aa, Arabidopsis thaliana
MIDSDTLLHLSSFGSTFNPNYKAKACIRFARKVCGSTVLGFLEVKPRKKSCCSRCNGVSRMCNKRNLGWDSEGSKDLETEILEFMKNSEKPGMFPSKKDLIRSGRFDLVERIVNQGGWLSMGWDLDEQEEKVRVNENVTPQDLHIEKQLPNCNSPEMDKTLNHGDLDLSSNLSSSTEQVESRNDSGIEGILTRLEKERNLSLGISVRENGKSNGAMHDISPNGSVPWSSRIVTASEIQEVDGSRGSGEYAQSRYQGAKSVSGKPGLSDSPTSETWRTWSMRRAGFTDEDFEAAEISSSGLTGVKKDDTKKDSGDSMNGKDRIASSSEDVNKTHIKHRLQQLQSELSSVLHSLRSPPDKVVTSKDSETTAGNLENLSDDWEYKENEIIHAQNKLRSTRAKLAVLEGKMAMAIIDAQRIVREKQRRIDHASRALRLLRTASIVWPNSASEVLLTGSFDGWSTQRKMKKAENGVFSLSLKLYPGKYEIKFIVDGQWKVDPLRPIVTSGGYENNLLIIS

SEQ ID NO: 7347 - protein, 455 aa, Arabidopsis thaliana
MCNKRNLGWDSEGSKDLETEILEFMKNSEKPGMFPSKKDLIRSGRFDLVERIVNQGGWLSMGWDLDEQEEKVRVNENVTPQDLHIEKQLPNCNSPEMDKTLNHGDLDLSSNLSSSTEQVESRNDSGIEGILTRLEKERNLSLGISVRENGKSNGAMHDISPNGSVPWSSRIVTASEIQEVDGSRGSGEYAQSRYQGAKSVSGKPGLSDSPTSETWRTWSMRRAGFTDEDFEAAEISSSGLTGVKKDDTKKDSGDSMNGKDRIASSSEDVNKTHIKHRLQQLQSELSSVLHSLRSPPDKVVTSKDSETTAGNLENLSDDWEYKENEIIHAQNKLRSTRAKLAVLEGKMAMAIIDAQRIVREKQRRIDHASRALRLLRTASIVWPNSASEVLLTGSFDGWSTQRKMKKAENGVFSLSLKLYPGKYEIKFIVDGQWKVDPLRPIVTSGGYENNLLIIS

SEQ ID NO: 7348 - DNA, 1660 bp, Arabidopsis thaliana
aaacctagaaacaaatacggtcttttttttttctttttatgggtcgcgaatctctggctgttgtgtcctcgccgccatcggcgactgcgcccagtactgctgtgtcggctacctcgcttgctcctggctttcgatttcatccgactgatgaggaactcgtgagctattacttgaagaggaaggttctgggtaaacctgtacgcttcgatgcgattggagaggtagatatctacaagcatgagccctgggatttagcagtgttttcgaagttgaaaactcgggaccaagaatggtacttcttcagtgcgttagataagaagtacggtaatggtgctaggatgaatcgagcaactaacaaagggtactggaaagcaactggaaaagacagagaaatccgccgggatattcagttgctcggtatgaaaaagacgcttgttttccacagcgggcgtgctccagacggccttcggactaattgggtcatgcacgagtatcgccttgtggaatatgaaactgaaactaacggaagcctgctgcaggatgcatatgtgttgtgcagagtgtttcacaagaataacattgggccaccaagtgggaacagatatgcgccattcatggaagaagaatgggctgatggtggaggagctctgattccaggaatagacgttagggtcagggtagaggctctaccacaagccaatggaaacaaccagatggaccaggaaatgcattcagcaagcaaggatctcattaacatcaacgagctaccgagagatgctactccaatggacatcgaacctaaccaacagaatcatcatgagagtgccttcaagccacaggagagtaacaaccatagtggttatgaagaggatgaggacacactcaaacgcgagcacgcagaagaagatgagcgtcctccttctctatgcattctcaacaaagaagctccactacctctcctgcaatacaaacgtagacgccaaaacgagtccaacaacaactcaagcaggaacacacaggaccattgttcgtccacaataacaaccgtcgacaatacaaccaccttaatctcatcatctgctgctgctgctaccaacactgccatctctgcattgcttgagttctcacttatgggtatctccgacaagaaagaaaaccagcagaaagaggaaacttctcctcctagtccaattgcatctcctgaagagaaggttaatgatctccagaaggaggttcaccagatgtctgttgaaagagaaactttcaagcttgagatgatgagtgcagaggctatgatcagcattctccagtcaagaatcgatgcgctgcgtcaggagaacgaggaacttaagaagaagaacgccagtggacaagctagttaaaccaccgcaacatctctccaggtgtcttcttcttcttcttcttcttctttgcctcttagctgtaatcttcttaatagtatgagctatggatgtagcttcttcagacggatcagaaaccttatgaatctctgttgtaaaattaggataaaacggaacggagccaaccaactaggtctttttattttatccttttttactttggatgtttctgcatcttttgggaacattttcaggctgatccattgtcgtatattatcatctatctatctagtcttttc

SEQ ID NO: 7349 - protein, 447 aa, Arabidopsis thaliana
MGRESLAVVSSPPSATAPSTAVSATSLAPGFRFHPTDEELVSYYLKRKVLGKPVRFDAIGEVDIYKHEPWDLAVFSKLKTRDQEWYFFSALDKKYGNGARMNRATNKGYWKATGKDREIRRDIQLLGMKKTLVFHSGRAPDGLRTNWVMHEYRLVEYETETNGSLLQDAYVLCRVFHKNNIGPPSGNRYAPFMEEEWADGGGALIPGIDVRVRVEALPQANGNNQMDQEMHSASKDLININELPRDATPMDIEPNQQNHHESAFKPQESNNHSGYEEDEDTLKREHAEEDERPPSLCILNKEAPLPLLQYKRRRQNESNNNSSRNTQDHCSSTITTVDNTTTLISSSAAAATNTAISALLEFSLMGISDKKENQQKEETSPPSPIASPEEKVNDLQKEVHQMSVERETFKLEMMSAEAMISILQSRIDALRQENEELKKKNASGQAS

SEQ ID NO: 7350 - protein, 347 aa, Arabidopsis thaliana
MNRATNKGYWKATGKDREIRRDIQLLGMKKTLVFHSGRAPDGLRTNWVMHEYRLVEYETETNGSLLQDAYVLCRVFHKNNIGPPSGNRYAPFMEEEWADGGGALIPGIDVRVRVEALPQANGNNQMDQEMHSASKDLININELPRDATPMDIEPNQQNHHESAFKPQESNNHSGYEEDEDTLKREHAEEDERPPSLCILNKEAPLPLLQYKRRRQNESNNNSSRNTQDHCSSTITTVDNTTTLISSSAAAATNTAISALLEFSLMGISDKKENQQKEETSPPSPIASPEEKVNDLQKEVHQMSVERETFKLEMMSAEAMISILQSRIDALRQENEELKKKNASGQAS

SEQ ID NO: 7351 - protein, 320 aa, Arabidopsis thaliana
MKKTLVFHSGRAPDGLRTNWVMHEYRLVEYETETNGSLLQDAYVLCRVFHKNNIGPPSGNRYAPFMEEEWADGGGALIPGIDVRVRVEALPQANGNNQMDQEMHSASKDLININELPRDATPMDIEPNQQNHHESAFKPQESNNHSGYEEDEDTLKREHAEEDERPPSLCILNKEAPLPLLQYKRRRQNESNNNSSRNTQDHCSSTITTVDNTTTLISSSAAAATNTAISALLEFSLMGISDKKENQQKEETSPPSPIASPEEKVNDLQKEVHQMSVERETFKLEMMSAEAMISILQSRIDALRQENEELKKKNASGQAS

SEQ ID NO: 7352 - DNA, 1823 bp, Arabidopsis thaliana
ggataacaaagttttttgttggatgataaaagagacagagagagacgacgcattttcctttattttctcggggaaattcaaagttttcgaattttcttcctttctgggttttcgtcaaaggagcatcttctttatgttcttttgaaagaaggctctcttctctatttctctcccctcttccggggagtttttgattttttaggataaaggagattcctttacctcgattttttgcttttcattttattaaatctccgatttttgatttttgggggaagaagtagaagaagaagatgattaagttgtggatgatgacttctctccaactcgcggagctcttcgtgagctctattgtgcatttgctttatgggttttatatatttagctccgccgttgccggagatatctctcagacgttgaatgattacttgtttaagtccaatgtcgctttcggagaaaccggtcaaaatcaaaccaatgttgagggtttgcctcctattgtattggttcatggcatctttggatttggcaaagggagattaggaggcttatcttactttggcggtgctgagaagaaagatgagagggttcttgttcctgatttgggttccttaacaagcatctatgacagggcaagggaattgttctattatttgaaaggaggggtagttgattttggcgaagagcatagcgaggcttgtggacattctcggtttggaagaagatacgaacaagggcaataccctgaatgggatgaggatcatcctattcattttgtggggcattcagcgggtgcgcaagttgtgcgtgtattgcagcaaatgcttgcagatcaggcatttgaagggtttgaagaaacgaatgagaattgggttctgagtgtgacatcgttatccggggcattcaatggaactaccaggacctacttagatggcatgcggacagatgatggagtgagcatgaaaccgatatgtttgttgcagctgtgtcgtataggcgtgataatgtacgattggttggacatttcatggctaaagacttattacaatttcgggttcgatcacttcaacatttcttggaagaagaccggtgtgagaggtctcgttgattgcctaatgggaaacgcaggtccttttgcttctggcgattggatcttacctgatctcacaatccaaggctcaacaagtattaactccaatctccagacgttcccaaacacttactacttcagctacgcgactaaacgcacccgcagagtcatgggtatgacaatcccttcaggtgttcttggaatccacccgatgctcttcctccgcgtctttcagatgagccaatggaaattcccacaagatgtctctcctccttataaaggctacagggatgaggactggcaagagaacgacggggcattgaacacaatatcaatgacacatccgaggctacctgttgagcatccgagccggttcataaggagcgattcggaatgtcaaacattacaacccgggatctggtattataagatagtggaagcagatcacataatgttcatagtgaacagagagagagctggtgttcagtttgatctgatatacgacagcatcttccaacgttgcaggaaacatgtttttagaaagattcctcagactctccccaatcaatctccttcttctcctcgttcatcatcatcacccagaataaacaactttgtacattgatcacatgcaaaaaaaaaatgttttagggttgttacgttgagggcttaagtttttgtttaggctatttactactaatacagattattcattgttcttcttgttctcctc

SEQ ID NO: 7353 - protein, 473 aa, Arabidopsis thaliana
MIKLWMMTSLQLAELFVSSIVHLLYGFYIFSSAVAGDISQTLNDYLFKSNVAFGETGQNQTNVEGLPPIVLVHGIFGFGKGRLGGLSYFGGAEKKDERVLVPDLGSLTSIYDRARELFYYLKGGVVDFGEEHSEACGHSRFGRRYEQGQYPEWDEDHPIHFVGHSAGAQVVRVLQQMLADQAFEGFEETNENWVLSVTSLSGAFNGTTRTYLDGMRTDDGVSMKPICLLQLCRIGVIMYDWLDISWLKTYYNFGFDHFNISWKKTGVRGLVDCLMGNAGPFASGDWILPDLTIQGSTSINSNLQTFPNTYYFSYATKRTRRVMGMTIPSGVLGIHPMLFLRVFQMSQWKFPQDVSPPYKGYRDEDWQENDGALNTISMTHPRLPVEHPSRFIRSDSECQTLQPGIWYYKIVEADHIMFIVNRERAGVQFDLIYDSIFQRCRKHVFRKIPQTLPNQSPSSPRSSSSPRINNFVH

SEQ ID NO: 7354 - protein, 468 aa, Arabidopsis thaliana
MMTSLQLAELFVSSIVHLLYGFYIFSSAVAGDISQTLNDYLFKSNVAFGETGQNQTNVEGLPPIVLVHGIFGFGKGRLGGLSYFGGAEKKDERVLVPDLGSLTSIYDRARELFYYLKGGVVDFGEEHSEACGHSRFGRRYEQGQYPEWDEDHPIHFVGHSAGAQVVRVLQQMLADQAFEGFEETNENWVLSVTSLSGAFNGTTRTYLDGMRTDDGVSMKPICLLQLCRIGVIMYDWLDISWLKTYYNFGFDHFNISWKKTGVRGLVDCLMGNAGPFASGDWILPDLTIQGSTSINSNLQTFPNTYYFSYATKRTRRVMGMTIPSGVLGIHPMLFLRVFQMSQWKFPQDVSPPYKGYRDEDWQENDGALNTISMTHPRLPVEHPSRFIRSDSECQTLQPGIWYYKIVEADHIMFIVNRERAGVQFDLIYDSIFQRCRKHVFRKIPQTLPNQSPSSPRSSSSPRINNFVH

SEQ ID NO: 7355 - protein, 467 aa, Arabidopsis thaliana
MTSLQLAELFVSSIVHLLYGFYIFSSAVAGDISQTLNDYLFKSNVAFGETGQNQTNVEGLPPIVLVHGIFGFGKGRLGGLSYFGGAEKKDERVLVPDLGSLTSIYDRARELFYYLKGGVVDFGEEHSEACGHSRFGRRYEQGQYPEWDEDHPIHFVGHSAGAQVVRVLQQMLADQAFEGFEETNENWVLSVTSLSGAFNGTTRTYLDGMRTDDGVSMKPICLLQLCRIGVIMYDWLDISWLKTYYNFGFDHFNISWKKTGVRGLVDCLMGNAGPFASGDWILPDLTIQGSTSINSNLQTFPNTYYFSYATKRTRRVMGMTIPSGVLGIHPMLFLRVFQMSQWKFPQDVSPPYKGYRDEDWQENDGALNTISMTHPRLPVEHPSRFIRSDSECQTLQPGIWYYKIVEADHIMFIVNRERAGVQFDLIYDSIFQRCRKHVFRKIPQTLPNQSPSSPRSSSSPRINNFVH

SEQ ID NO: 7356 - DNA, 1341 bp, Arabidopsis thaliana
aaatcaatagtaacgaaacgtgtctcgtcaatttttgtcaatggactaaagagaaacttttttttcagttcttgtgaaaatattggattattatggatcgtggcataaaaatctgattactgtttcataagcttccagtattcttttttgttaatggcggaagcaaacgagagaagtaaagaaatggcgagaagtaatagttgtgtgtttccaagagatctgcttcagagatttatctctaactctgttgaaggtgaagatgatgatgaagaagaagatgatgatgagatcgagttaaatcttggcttatctcttggtggaagatttggtgttgataagagtaataagcttgtgagatcttcttccgttgttgtaacgatgcctctgtttcgtgaagatcatcatcatcatcaagcggcggcgatgataacaactaaggtttcgacggagacggtggcgggagcgactcggggtacgggtttgatgagaacgacgtcgttgccggcagagtcggaggaagagtggaggaagaggaaagagatgcagactttgagaagaatggcagccaagagacggagaagcgagaagcttcgtactggcgtcggcggaggaaacagtaataatccggaagaagctgctactgccaccgcttcgagacggcgaggtagaccatcgtcaggacttccacggtggtcagcgactgctaacaaaagcgggcttttgcggcagcacagtgctggtctcgattcactacaagtttccggtgaatctctaggcggaggaagagccgccggaagttcttcgagcgtctccgagttggaaactaaagcgtccagtgacgaagcaagaagcttaccatcaactacacagccacaacaagaaacaacgacaaagccaacaaatcgtttgagaagattgagttcagtggacatgaacatgaagatggagccacaagggaaaggaaaaagtgagatgccatgtgtgtttaccaaaggagatggaccaaatgggaagagagttgatgggattctttatagatacggcagtggagaagaagttaggatcatgtgtgtttgccatggcgatttcttgtctccggcggatttcgttaaacatgccggtggtcctcatgtagatcatcctcttagacacattgttgtcaacacttcttctccttctaatctcttataatagaccaaaaaccctctaaccaacccttgtttagagaagatgtttttaagagtctctggtcatttctcaatttttaagtcatatatgtattttttacctgctttatacagagagaattaaggagaaagaaacatcatttatatcagtttc

SEQ ID NO: 7357 - protein, 345 aa, Arabidopsis thaliana
MAEANERSKEMARSNSCVFPRDLLQRFISNSVEGEDDDEEEDDDEIELNLGLSLGGRFGVDKSNKLVRSSSVVVTMPLFREDHHHHQAAAMITTKVSTETVAGATRGTGLMRTTSLPAESEEEWRKRKEMQTLRRMAAKRRRSEKLRTGVGGGNSNNPEEAATATASRRRGRPSSGLPRWSATANKSGLLRQHSAGLDSLQVSGESLGGGRAAGSSSSVSELETKASSDEARSLPSTTQPQQETTTKPTNRLRRLSSVDMNMKMEPQGKGKSEMPCVFTKGDGPNGKRVDGILYRYGSGEEVRIMCVCHGDFLSPADFVKHAGGPHVDHPLRHIVVNTSSPSNLL

SEQ ID NO: 7358 - protein, 335 aa, Arabidopsis thaliana
MARSNSCVFPRDLLQRFISNSVEGEDDDEEEDDDEIELNLGLSLGGRFGVDKSNKLVRSSSVVVTMPLFREDHHHHQAAAMITTKVSTETVAGATRGTGLMRTTSLPAESEEEWRKRKEMQTLRRMAAKRRRSEKLRTGVGGGNSNNPEEAATATASRRRGRPSSGLPRWSATANKSGLLRQHSAGLDSLQVSGESLGGGRAAGSSSSVSELETKASSDEARSLPSTTQPQQETTTKPTNRLRRLSSVDMNMKMEPQGKGKSEMPCVFTKGDGPNGKRVDGILYRYGSGEEVRIMCVCHGDFLSPADFVKHAGGPHVDHPLRHIVVNTSSPSNLL

SEQ ID NO: 7359 - protein, 270 aa, Arabidopsis thaliana
MPLFREDHHHHQAAAMITTKVSTETVAGATRGTGLMRTTSLPAESEEEWRKRKEMQTLRRMAAKRRRSEKLRTGVGGGNSNNPEEAATATASRRRGRPSSGLPRWSATANKSGLLRQHSAGLDSLQVSGESLGGGRAAGSSSSVSELETKASSDEARSLPSTTQPQQETTTKPTNRLRRLSSVDMNMKMEPQGKGKSEMPCVFTKGDGPNGKRVDGILYRYGSGEEVRIMCVCHGDFLSPADFVKHAGGPHVDHPLRHIVVNTSSPSNLL

SEQ ID NO: 7360 - DNA, 1127 bp, Arabidopsis thaliana
ggaattcggcacgaggatgaggtcgtttgtctcgttgatttctcttctccttcttctctcattttcttcatctgttctctcaaccaaaaagtcatcatttcaaaaacttccggtgccaggaaacagaacaggccctgaagctttcgcttttgattccaccggaaaaggatttctacccggagtcaccggcggtaaaatcctcaaatatcttccaaagaaaggttatgtcgactttgcccagatcacaaactcttcgaagtcttcgttgtgcgacggagcacttggaaccactaacgtcgaaaaatgtggtcgaccagccggaatagccttcaacacgaaaacaggtgatctttacgtcgcagatgctgcattgggtctccacgtcatccctcgccgtgggggtttggctaagaagatcgccgacagtgtcggcggcaagccctttttgtttcttgacgggcttgacgtagatcccaataccggcgtcgtctatttcacttccttcagctcaacatttggccctagggatgtgttgaaagcagtggcaacaaaagactcgaccggtaagttcttcaaatacgatccatcaaaaaaggtcgtgactgtattgatggacggtcttagcggctcagccggatgtgccgttagctcagatggttcattcgtgctggttggtcagttcacaaaaagtaacatcaagaggtattggatcaaaggatccaaagctggtacttctgaagacttcaccaactcggtctcgaaccctgacaacatcaagaggatcggttctactggaaacttttgggttgcttcggtcgtgaactcagccaccggaccgacaaacccttcggcggttaaagtcagttctgccggtaaagtgcttcagaccattcccctaaaagacaagtttggggatactttggttagtgaagttaacgatcaaaggacagctttatatcggagctctttttgggcctttcgccggaattccttaagctttaaagtgaacatggtattagtatgggttagaattaaagtgattgaatcgaaataaatatggttacaaagtcttgacggatcaatgtacgctcatgttgattctgttcaaataaatatgaatttttttt

SEQ ID NO: 7361 - protein, 350 aa, Arabidopsis thaliana
EFGTRMRSFVSLISLLLLLSFSSSVLSTKKSSFQKLPVPGNRTGPEAFAFDSTGKGFLPGVTGGKILKYLPKKGYVDFAQITNSSKSSLCDGALGTTNVEKCGRPAGIAFNTKTGDLYVADAALGLHVIPRRGGLAKKIADSVGGKPFLFLDGLDVDPNTGVVYFTSFSSTFGPRDVLKAVATKDSTGKFFKYDPSKKVVTVLMDGLSGSAGCAVSSDGSFVLVGQFTKSNIKRYWIKGSKAGTSEDFTNSVSNPDNIKRIGSTGNFWVASVVNSATGPTNPSAVKVSSAGKVLQTIPLKDKFGDTLVSEVNDQRTALYRSSFWAFRRNSLSFKVNMVLVWVRIKVIESK

SEQ ID NO: 7362 - protein, 345 aa, Arabidopsis thaliana
MRSFVSLISLLLLLSFSSSVLSTKKSSFQKLPVPGNRTGPEAFAFDSTGKGFLPGVTGGKILKYLPKKGYVDFAQITNSSKSSLCDGALGTTNVEKCGRPAGIAFNTKTGDLYVADAALGLHVIPRRGGLAKKIADSVGGKPFLFLDGLDVDPNTGVVYFTSFSSTFGPRDVLKAVATKDSTGKFFKYDPSKKVVTVLMDGLSGSAGCAVSSDGSFVLVGQFTKSNIKRYWIKGSKAGTSEDFTNSVSNPDNIKRIGSTGNFWVASVVNSATGPTNPSAVKVSSAGKVLQTIPLKDKFGDTLVSEVNDQRTALYRSSFWAFRRNSLSFKVNMVLVWVRIKVIESK

SEQ ID NO: 7363 - DNA, 1285 bp, Arabidopsis thaliana
aaaagatccctctcgcctctcggtgtccttgtatacagtacttcagttttccgatctctttcagattctgttgccaaacttcatataaacttagtgagcggaactggatttggggagaatggcttcttctttagctcaatctagaatctcgaatctccagaatcatctttcacctcttgaagcaaacaacaagctcaggagtctggtcaagatttctccccaagtatctgaagccttgtctaatggacgtgctgttgtcgctcttgagtcaaccattatctcccatgggatgccttaccctcaaaatctgcaaacagcaaaagaggtggagtcaattgtgagagaaaatggagcaatccctgcaacaattgctatccttaatggagtaccttgcataggtctgagcgaggaagaactagaacgtcttgcatctctcggaaaaagtgtccaaaagacagcgggaagggacatagcaaatgttgtggctacaagaggaaacggtgcaactacagtctctgcaacgttgtttttcgcttcaatggttggcatccaagtttttgtgacgggcgggataggtggtgtccatagacatgccaaccattcgatggacatatcatctgatcttactgcacttgggaggactccaatagcagtgatatcagcaggcgttaaatcaatacttgatattccaaagactcttgaatatttggaaactcaagaagtgtatgttgctgcatacaagagcgatgagtttccagcatttttcacagaaaaaagtggctgtaaggcaccttcccgtgtaaatagccctgaagactgtgctagagtaatagatgcaaacatgaagctaaaccgtcaggcggggattctatttgccattccaattccgaaacaccattcagccgctggaaatcttatcgaatcagcaacacagcgtgctcttacagaagcaagggaacaaaacgttactggaaatgcagaaactccattcttacttgcacgggtaaatgagttaaccggaggcacatcacttgcagcaaacattgcgcttgtgaaaaacaatgcccttatcggttctcagattgcagtagccctttctcagctgatgtgagcttccttatcaatcccagactcaagctcaagcgcaagttattcaggttcatgattcaggacagatcaaagatgttttggattggtagttatcaatttatattggttatcaaagatttttctttagctaaagaaactcgttaacttattataacatgttatatattagatttat

SEQ ID NO: 7364 - protein, 330 aa, Arabidopsis thaliana
MASSLAQSRISNLQNHLSPLEANNKLRSLVKISPQVSEALSNGRAVVALESTIISHGMPYPQNLQTAKEVESIVRENGAIPATIAILNGVPCIGLSEEELERLASLGKSVQKTAGRDIANVVATRGNGATTVSATLFFASMVGIQVFVTGGIGGVHRHANHSMDISSDLTALGRTPIAVISAGVKSILDIPKTLEYLETQEVYVAAYKSDEFPAFFTEKSGCKAPSRVNSPEDCARVIDANMKLNRQAGILFAIPIPKHHSAAGNLIESATQRALTEAREQNVTGNAETPFLLARVNELTGGTSLAANIALVKNNALIGSQIAVALSQLM

SEQ ID NO: 7365 - protein, 273 aa, Arabidopsis thaliana
MPYPQNLQTAKEVESIVRENGAIPATIAILNGVPCIGLSEEELERLASLGKSVQKTAGRDIANVVATRGNGATTVSATLFFASMVGIQVFVTGGIGGVHRHANHSMDISSDLTALGRTPIAVISAGVKSILDIPKTLEYLETQEVYVAAYKSDEFPAFFTEKSGCKAPSRVNSPEDCARVIDANMKLNRQAGILFAIPIPKHHSAAGNLIESATQRALTEAREQNVTGNAETPFLLARVNELTGGTSLAANIALVKNNALIGSQIAVALSQLM

SEQ ID NO: 7366 - protein, 190 aa, Arabidopsis thaliana
MVGIQVFVTGGIGGVHRHANHSMDISSDLTALGRTPIAVISAGVKSILDIPKTLEYLETQEVYVAAYKSDEFPAFFTEKSGCKAPSRVNSPEDCARVIDANMKLNRQAGILFAIPIPKHHSAAGNLIESATQRALTEAREQNVTGNAETPFLLARVNELTGGTSLAANIALVKNNALIGSQIAVALSQLM

SEQ ID NO: 7367 - DNA, 2154 bp, Arabidopsis thaliana
gagacaaaaaggaaaaaaacaaaattaaaattaggaaagttaaaataattttcctgcaaatttcttctttctcagaaatctaaaaaaaaacaatgaagaaaacaccgtaacgaatcataaaatttctcaaaatccaaactctgttttttgttcttcctcttccagatttggtttctttttttgaaaaactctctagcttcagttttttttttctctctctctctctctctaggaatgtttttgttcgtggatactggaatcatgagaataagattttgaaggagaaagcaagatccatgttctttgtcggagaatttagggctaatatgtggatttgagcttctttgattcccaatttgtgaaagttttgaaatttttgggaaagagagaatgtttaagcagtttctgagtaaacttccgaggaagtcttcaaaatctgattcaggagagctgaatcgttcgagttcgggtccggtatcgtctccggttcagagatccggtactagtggtggtggttcgggtccggttcgatctaactcagggaagcgtatgtcatctgctgtgttcccagctagtgttgttgctggtattgagcctttggtaccgtttaaggatgtaccaagctctgagaagttgaatctctttgtgagtaaagttagtctctgttgtgtgacatttgatttctctgaccctggtaaaaactctatagagaaagatgttaaaaggcagacattgttggagcttttggattttgtagcttcagggtctgttaagttcactgagccagctattcttgcaatgtgtagaatgtgtgctgttaatctctttagggtctttcctccgaattatcggtctagttctggtggcgaaaacgatgatgatgaaccgatgtttgaccctgcttggcctcatttgcagattgtgtatgatttgttgcttaagtttatcacttctccgtgtcttgatgctaaagtggcaaaaaagtatttagatcatgctttcattgtgaggttgcttgacttgtttgattcggaggatcctagagaacgggagtgtttgaagacgattctgcatcgggtatatgggaagttcatggttcataggccatttgtacgcaagtccatgagcaatatattctaccggtttgtgtttgagacagagaagcatagcggaatcgctgagcttttggagattttcgggagtatagtgagtggatttgcgttgcctttgaaagaagagcataagatcttcttgtggagagtgttgattccattgcacaagcctaaatctgttggaaactactttcagcagctttcttattgtatcactcagttcatagataaagagccgaaactaggcagtgttgtgataaagggtttgttgaagttctggcctatcacgaatagtcagaaggaagtgatgtttctcggggaggtcgaagaaattgtagaagcaatgagtgtgatggagtttcaaaagatcatggtccctttgttcttgcggattgcttgttgtgtcaccagttcccactttcaggtttctgaaagagctttattcttgtggaacaacgatcaaattgtaaacttgattggacataaccggcaagccatcctaccaatcatgttcactgctttagaaaagaatgctcagaaccactggaaccaatccgtgctaaacttaaccttaaacgtacgaaaaatgttctgcgaaatggacgaggctctgttcatgtcttgccacgcccgctttaaggaggacgaagcaaagcaatgttctgctgcggaaaagaggaaagaagtatgggcaaggctagagaatgcagcaagtatgaagccgataacaggaaagactgctgttctggtaactcctcgagcaacctccatcgcctgctaaatagcgtttaaaccaattcacagacagtttatccaaagcaacaacatcgagaagatgatggagtggctgttgcttaagctatagtcttgggaacttttcatcgaggttgatctctgtaatattatataactttgatgttgttagctgtgtgggttttaatgctaattctattgctttcttttaaagcaatgaaaccatgctgcagatttttatcaaactctttgtatcaatcaattaagtttatatatcctttttctttcg

SEQ ID NO: 7368 - protein, 500 aa, Arabidopsis thaliana
MFKQFLSKLPRKSSKSDSGELNRSSSGPVSSPVQRSGTSGGGSGPVRSNSGKRMSSAVFPASVVAGIEPLVPFKDVPSSEKLNLFVSKVSLCCVTFDFSDPGKNSIEKDVKRQTLLELLDFVASGSVKFTEPAILAMCRMCAVNLFRVFPPNYRSSSGGENDDDEPMFDPAWPHLQIVYDLLLKFITSPCLDAKVAKKYLDHAFIVRLLDLFDSEDPRERECLKTILHRVYGKFMVHRPFVRKSMSNIFYRFVFETEKHSGIAELLEIFGSIVSGFALPLKEEHKIFLWRVLIPLHKPKSVGNYFQQLSYCITQFIDKEPKLGSVVIKGLLKFWPITNSQKEVMFLGEVEEIVEAMSVMEFQKIMVPLFLRIACCVTSSHFQVSERALFLWNNDQIVNLIGHNRQAILPIMFTALEKNAQNHWNQSVLNLTLNVRKMFCEMDEALFMSCHARFKEDEAKQCSAAEKRKEVWARLENAASMKPITGKTAVLVTPRATSIAC

SEQ ID NO: 7369 - protein, 447 aa, Arabidopsis thaliana
MSSAVFPASVVAGIEPLVPFKDVPSSEKLNLFVSKVSLCCVTFDFSDPGKNSIEKDVKRQTLLELLDFVASGSVKFTEPAILAMCRMCAVNLFRVFPPNYRSSSGGENDDDEPMFDPAWPHLQIVYDLLLKFITSPCLDAKVAKKYLDHAFIVRLLDLFDSEDPRERECLKTILHRVYGKFMVHRPFVRKSMSNIFYRFVFETEKHSGIAELLEIFGSIVSGFALPLKEEHKIFLWRVLIPLHKPKSVGNYFQQLSYCITQFIDKEPKLGSVVIKGLLKFWPITNSQKEVMFLGEVEEIVEAMSVMEFQKIMVPLFLRIACCVTSSHFQVSERALFLWNNDQIVNLIGHNRQAILPIMFTALEKNAQNHWNQSVLNLTLNVRKMFCEMDEALFMSCHARFKEDEAKQCSAAEKRKEVWARLENAASMKPITGKTAVLVTPRATSIAC

SEQ ID NO: 7370 - protein, 364 aa, Arabidopsis thaliana
MCRMCAVNLFRVFPPNYRSSSGGENDDDEPMFDPAWPHLQIVYDLLLKFITSPCLDAKVAKKYLDHAFIVRLLDLFDSEDPRERECLKTILHRVYGKFMVHRPFVRKSMSNIFYRFVFETEKHSGIAELLEIFGSIVSGFALPLKEEHKIFLWRVLIPLHKPKSVGNYFQQLSYCITQFIDKEPKLGSVVIKGLLKFWPITNSQKEVMFLGEVEEIVEAMSVMEFQKIMVPLFLRIACCVTSSHFQVSERALFLWNNDQIVNLIGHNRQAILPIMFTALEKNAQNHWNQSVLNLTLNVRKMFCEMDEALFMSCHARFKEDEAKQCSAAEKRKEVWARLENAASMKPITGKTAVLVTPRATSIAC

SEQ ID NO: 7371 - DNA, 1699 bp, Arabidopsis thaliana
tggattttctctatagacgcaatcaccgccgattctctctctctctctctcgagtctctcgacggtcgcatatcaaaagtccatttctttcttctctttggaggatcagcaactatggatgaagagtacgaagtcatagttctgggtactggtctcaaggagtgcatccttagtggtcttctctccgtcgatggtcttaaggtacttcacatggacaggaatgactactacggtggagagtcaacttctcttaatctcaatcagctgtggaagaagttcaggggagaagagaaggctcctgctcatttaggttctagcagagactacaatgttgacatgatgccaaagtttatgatggctaacggaaagcttgttcgtgtccttattcatacggatgtgaccaagtacttgtcttttaaagctgttgatggaagctatgtttttgtccaaggcaaggtccaaaaagtgccagcaactcccatggaggccctcaaatctcctcttatgggtatttttgagaaacgtcgagctggaaagtttttcagctatgttcaagaatacgacgagaaggacccaaaaacacatgatggaatggatttgaggagagttacaactaaggatttgattgcgaaattcggtcttaaagaagatactattgactttattggtcatgcagtggcacttcactgtaatgacaatcatctccatcaacctgcctatgatactgtaatgagaatgaagctctacgcagagtcccttgcacgttttcaaggaggttcaccatatatctatcctctctatgggttgggagaattgcctcaggcatttgcacgacttagtgctgtctatggtgggacgtatatgttgaacaaacctgagtgcaaggtagagtttgacgaggagggtaaggtttctggtgttacatctgagggagagactgccaaatgcaagaaagttgtctgcgatccttcttacctaaccaacaaggtcaggaagattggcagggttgctcgggcgattgccattatgagccaccctattccaaacaccaatgattctcagtcggtgcaagtcattctaccccaaaaacaattgggccgcaaatcagacatgtatgtcttctgttgttcatattcacacaacgttgctcccaagggaaagttcatagcatttgtgtcaacagacgctgaaactgataaccctcaaaccgagctccagcctggaatcgaccttcttggtcctgttgatgagctgttcttcgacatctatgatagatatgagcctgtcaacgaacccactttggacaactgcttcatatcaacgagttatgatgctacaacacactttgacacaactgttgttgatgtgttgaacatgtataaattgatcaccggaaaggaactggatctaagtgtggatcttaacgcagctagtgctgcagaggaggaatgatggaaaatattgcaagctctgtctctctctgttagtcaccaaatgatgtaaccggttctctttctccctcttcttaaaagttgtctcaccaaatgttctgttaaaatactaaatcaaaccgatctcatcatgcgtacctattcccggttatcgcagtctgtttttttcttctcaaaaaactaaaatgttggatttcgtggtttttgtttggagtgtctaatatatcatcatgctcttccgtttgaac

SEQ ID NO: 7372 - protein, 483 aa, Arabidopsis thaliana
WIFSIDAITADSLSLSLESLDGRISKVHFFLLFGGSATMDEEYEVIVLGTGLKECILSGLLSVDGLKVLHMDRNDYYGGESTSLNLNQLWKKFRGEEKAPAHLGSSRDYNVDMMPKFMMANGKLVRVLIHTDVTKYLSFKAVDGSYVFVQGKVQKVPATPMEALKSPLMGIFEKRRAGKFFSYVQEYDEKDPKTHDGMDLRRVTTKDLIAKFGLKEDTIDFIGHAVALHCNDNHLHQPAYDTVMRMKLYAESLARFQGGSPYIYPLYGLGELPQAFARLSAVYGGTYMLNKPECKVEFDEEGKVSGVTSEGETAKCKKVVCDPSYLTNKVRKIGRVARAIAIMSHPIPNTNDSQSVQVILPQKQLGRKSDMYVFCCSYSHNVAPKGKFIAFVSTDAETDNPQTELQPGIDLLGPVDELFFDIYDRYEPVNEPTLDNCFISTSYDATTHFDTTVVDVLNMYKLITGKELDLSVDLNAASAAEEE

SEQ ID NO: 7373 - protein, 445 aa, Arabidopsis thaliana
MDEEYEVIVLGTGLKECILSGLLSVDGLKVLHMDRNDYYGGESTSLNLNQLWKKFRGEEKAPAHLGSSRDYNVDMMPKFMMANGKLVRVLIHTDVTKYLSFKAVDGSYVFVQGKVQKVPATPMEALKSPLMGIFEKRRAGKFFSYVQEYDEKDPKTHDGMDLRRVTTKDLIAKFGLKEDTIDFIGHAVALHCNDNHLHQPAYDTVMRMKLYAESLARFQGGSPYIYPLYGLGELPQAFARLSAVYGGTYMLNKPECKVEFDEEGKVSGVTSEGETAKCKKVVCDPSYLTNKVRKIGRVARAIAIMSHPIPNTNDSQSVQVILPQKQLGRKSDMYVFCCSYSHNVAPKGKFIAFVSTDAETDNPQTELQPGIDLLGPVDELFFDIYDRYEPVNEPTLDNCFISTSYDATTHFDTTVVDVLNMYKLITGKELDLSVDLNAASAAEEE

SEQ ID NO: 7374 - protein, 413 aa, Arabidopsis thaliana
MDRNDYYGGESTSLNLNQLWKKFRGEEKAPAHLGSSRDYNVDMMPKFMMANGKLVRVLIHTDVTKYLSFKAVDGSYVFVQGKVQKVPATPMEALKSPLMGIFEKRRAGKFFSYVQEYDEKDPKTHDGMDLRRVTTKDLIAKFGLKEDTIDFIGHAVALHCNDNHLHQPAYDTVMRMKLYAESLARFQGGSPYIYPLYGLGELPQAFARLSAVYGGTYMLNKPECKVEFDEEGKVSGVTSEGETAKCKKVVCDPSYLTNKVRKIGRVARAIAIMSHPIPNTNDSQSVQVILPQKQLGRKSDMYVFCCSYSHNVAPKGKFIAFVSTDAETDNPQTELQPGIDLLGPVDELFFDIYDRYEPVNEPTLDNCFISTSYDATTHFDTTVVDVLNMYKLITGKELDLSVDLNAASAAEEE

SEQ ID NO: 7375 - DNA, 1012 bp, Arabidopsis thaliana
actattattctaaaatccaaaaaaactatatgttataacattggaatcatcagtctctaagcagtatcacaccaactcaatatggctaccaccactgcagcagcagcctcaggtatttttgggatccggattcaagatcctagacctggaaccggtagggtccaagcccggttcgggttcagtttcggaaaaaagaaaccggctccaccgccaaagaaatcaaggcaggtccaagacgatggagacagactagtttggttccccggcgcaaacccgccggaatggttggacggatcgatgatcggagaccgtggatttgatccgtttggtttaggtaaaccggctgagtatcttcagtacgatttcgatggacttgaccaaaaccttgccaagaacgtggcgggtgacatcatcgggatcatccaagaatcttcggagatcaaaccgacgccgtttcagccgtacactgaagtctttgggatccaacggttcagagaatgtgagctgatccatggaaggtgggccatgcttggcactctaggcgccatcgccgtagaggctcttacaggaattgcatggcaagacgccggaaaggtggaattggtggaaggatcatcgtatttgggacaaccattgccgttctcgttgacgacgttgatatggatagaagtgttagtggtcggatacattgagttccaacgtaactctgaactggatccagagaaacggatttacccgggtgggtattttgacccgttgggactcgcggctgatccagagaagttggatactttgaagctggctgagataaagcactctcgtctcgctatggtcgcatttctcatctttgctcttcaggcggcctttaccggcaaaggccctgtcagcttccttgccacctttaacaattagttaatgaacctttctatctttattttatcaaaataaaattatacttcaaaaactgtataatgcatgttacgctatacttataaagaagtcttttattgtt

SEQ ID NO: 7376 - protein, 276 aa, Arabidopsis thaliana
MATTTAAAASGIFGIRIQDPRPGTGRVQARFGFSFGKKKPAPPPKKSRQVQDDGDRLVWFPGANPPEWLDGSMIGDRGFDPFGLGKPAEYLQYDFDGLDQNLAKNVAGDIIGIIQESSEIKPTPFQPYTEVFGIQRFRECELIHGRWAMLGTLGAIAVEALTGIAWQDAGKVELVEGSSYLGQPLPFSLTTLIWIEVLVVGYIEFQRNSELDPEKRIYPGGYFDPLGLAADPEKLDTLKLAEIKHSRLAMVAFLIFALQAAFTGKGPVSFLATFNN

SEQ ID NO: 7377 - protein, 204 aa, Arabidopsis thaliana
MIGDRGFDPFGLGKPAEYLQYDFDGLDQNLAKNVAGDIIGIIQESSEIKPTPFQPYTEVFGIQRFRECELIHGRWAMLGTLGAIAVEALTGIAWQDAGKVELVEGSSYLGQPLPFSLTTLIWIEVLVVGYIEFQRNSELDPEKRIYPGGYFDPLGLAADPEKLDTLKLAEIKHSRLAMVAFLIFALQAAFTGKGPVSFLATFNN

SEQ ID NO: 7378 - DNA, 1146 bp, Arabidopsis thaliana
ggggaagaagaaaactctccttctttttgtaacttttgcttcacctctctcttcttctcttgttctattttttttcccgattcaagcaaaattcatcaagacttgtcaatttgaaaaaatgtcgcaatcaaccgtagatgttccgccaaagggtgggtttagcttcgatctgtgtaagagaaatgatatgcttacacaaaagggtcttaaagctccgtcttttttgaagactggaacaaccattgttggtttgattttcaaggatggtgtgatactaggggcagatacccgagcaactgaggggccaattgttgctgataagaactgtgagaagattcactatatggcaccaaacatatattgctgtggtgcaggaactgcggctgatactgaagcagtcactgatatggtcagctcacagctgcgattgcatcgttaccagactggtcgagactctcgggtcattactgctttgacccttctcaaaaaacatcttttcagctaccaaggtcatgtctctgctgctcttgtactcggtggagttgatatcactggtccacatctgcatactatatacccacacggttcaactgacactcttccattcgccacaatgggttcgggttctcttgctgctatgtctgtgtttgaggcaaagtataaagaaggcctaactagggatgaaggaattaagctggtcgctgaatccatatgctcgggtatattcaatgacctgggtagtggtagcaacgtggacatctgcgtgatcacaaaggggaacaaggaatatctcaggaactacatggaaccaaacccaagaacctatgtcagcagcaaaggctattccttcaccaagaaaactgaggttcttctcaccaaaatcaccccattgctggagcgagtcgaaatcacagaagttggtgaagctatggaggaataattcaatcaatctcatatatcttcttttgcattgatctacatcaaggctctgtgtactctcatgatctcatcttcccagtcttgtcttcttcccatgtttaaggatcattcaaatcttgttactcctctctctccatcttagatttcaatagagagggtaagactcgagagacttcgtcctttcgaaataaaaaaacaactttccct

SEQ ID NO: 7379 - protein, 312 aa, Arabidopsis thaliana
GKKKTLLLFVTFASPLSSSLVLFFFPIQAKFIKTCQFEKMSQSTVDVPPKGGFSFDLCKRNDMLTQKGLKAPSFLKTGTTIVGLIFKDGVILGADTRATEGPIVADKNCEKIHYMAPNIYCCGAGTAADTEAVTDMVSSQLRLHRYQTGRDSRVITALTLLKKHLFSYQGHVSAALVLGGVDITGPHLHTIYPHGSTDTLPFATMGSGSLAAMSVFEAKYKEGLTRDEGIKLVAESICSGIFNDLGSGSNVDICVITKGNKEYLRNYMEPNPRTYVSSKGYSFTKKTEVLLTKITPLLERVEITEVGEAMEE

SEQ ID NO: 7380 - protein, 273 aa, Arabidopsis thaliana
MSQSTVDVPPKGGFSFDLCKRNDMLTQKGLKAPSFLKTGTTIVGLIFKDGVILGADTRATEGPIVADKNCEKIHYMAPNIYCCGAGTAADTEAVTDMVSSQLRLHRYQTGRDSRVITALTLLKKHLFSYQGHVSAALVLGGVDITGPHLHTIYPHGSTDTLPFATMGSGSLAAMSVFEAKYKEGLTRDEGIKLVAESICSGIFNDLGSGSNVDICVITKGNKEYLRNYMEPNPRTYVSSKGYSFTKKTEVLLTKITPLLERVEITEVGEAMEE

SEQ ID NO: 7381 - protein, 250 aa, Arabidopsis thaliana
MLTQKGLKAPSFLKTGTTIVGLIFKDGVILGADTRATEGPIVADKNCEKIHYMAPNIYCCGAGTAADTEAVTDMVSSQLRLHRYQTGRDSRVITALTLLKKHLFSYQGHVSAALVLGGVDITGPHLHTIYPHGSTDTLPFATMGSGSLAAMSVFEAKYKEGLTRDEGIKLVAESICSGIFNDLGSGSNVDICVITKGNKEYLRNYMEPNPRTYVSSKGYSFTKKTEVLLTKITPLLERVEITEVGEAMEE

SEQ ID NO: 7382 - DNA, 1723 bp, Arabidopsis thaliana
ctcttcccacttctcactctctgatctcagatctctccctccctcttttcacagatccattcaacaatctccaaagaagatggaaccagtctcttcatggggtaacacctctctcgtctccgtagatccagagatccacgacctaatcgagaaggagaaacgtcggcaatgtcgaggaatcgaacttatcgcttccgagaatttcacttccttcgccgtcatcgaagctctcggaagtgccttaaccaacaaatactccgaaggtattcctggtaatcgttattacggaggtaacgaattcatcgatgagatcgagaatctttgccgttcacgtgctctcgaagctttccattgtgatccagcagcgtggggcgttaatgttcagccgtattctggatctccggcgaatttcgctgcttacacggctttgcttcagcctcacgatcgtatcatggggcttgatttgccttcaggtggtcatttgactcatggttactatacatctggtggtaagaagacctctgcgacttcgatctactttgagagtcttccgtataaggtgaatttcaccactggttacattgattacgataagcttgaagagaaggcgttggatttcaggcctaagttgcttatctgtggtggtagtgcgtatcctagggattgggattacgctagatttagagctattgctgataaggttggagctcttttgctttgtgacatggctcacatcagtggtctcgttgctgctcaggaagctgcaaacccatttgagtactgtgacgttgtgacaaccacaacccacaagagtttgaggggtccaagggctggtatgattttctacaggaagggtccaaaaccaccaaagaagggtcaacccgagggtgcagtctatgattttgaggacaaaatcaactttgctgtattccctgcgcttcaaggtggtcctcacaatcaccagattggtgctttagctgttgcgttgaagcaggctaatactcctgggttcaaggtctacgcaaaacaagtgaaagccaatgctgttgcccttggaaactacctaatgagcaagggttaccagattgtgaccaatggaactgagaaccaccttgttctctgggatcttcgccctcttggattgaccggaaacaaggttgagaagctctgcgatctgtgcagcattacattgaacaagaacgcagtatttggagacagtagtgctcttgctcctggaggtgtaagaatcggtgcacccgcgatgacatcgagaggattggtggagaaggactttgagcagataggagaattcctgagccgtgcagtgacactgacgttggacatccaaaagacatacggtaagttgttgaaggacttcaacaagggtttggtgaacaacaaagatctcgaccagctcaaggctgacgtcgagaagttctctgcgtcttatgaaatgcctggattcctcatgtctgagatgaagtaccaggattagagatctttctctatatgcaagagtaatcttctattatctaccatatatataaaatatgcttttgtaggatcgccttaaaggcgaagagatgaagatgcaaacagtaaaaaagggttttcttttcagctatttcttcttgaatgtttttttttctttttattttggtttcttattgaaattgttgtatttttgttggctttttttctaataatatcagcgagttttttc

SEQ ID NO: 7383 - protein, 497 aa, Arabidopsis thaliana
SSHFSLSDLRSLPPSFHRSIQQSPKKMEPVSSWGNTSLVSVDPEIHDLIEKEKRRQCRGIELIASENFTSFAVIEALGSALTNKYSEGIPGNRYYGGNEFIDEIENLCRSRALEAFHCDPAAWGVNVQPYSGSPANFAAYTALLQPHDRIMGLDLPSGGHLTHGYYTSGGKKTSATSIYFESLPYKVNFTTGYIDYDKLEEKALDFRPKLLICGGSAYPRDWDYARFRAIADKVGALLLCDMAHISGLVAAQEAANPFEYCDVVTTTTHKSLRGPRAGMIFYRKGPKPPKKGQPEGAVYDFEDKINFAVFPALQGGPHNHQIGALAVALKQANTPGFKVYAKQVKANAVALGNYLMSKGYQIVTNGTENHLVLWDLRPLGLTGNKVEKLCDLCSITLNKNAVFGDSSALAPGGVRIGAPAMTSRGLVEKDFEQIGEFLSRAVTLTLDIQKTYGKLLKDFNKGLVNNKDLDQLKADVEKFSASYEMPGFLMSEMKYQD

SEQ ID NO: 7384 - protein, 471 aa, Arabidopsis thaliana
MEPVSSWGNTSLVSVDPEIHDLIEKEKRRQCRGIELIASENFTSFAVIEALGSALTNKYSEGIPGNRYYGGNEFIDEIENLCRSRALEAFHCDPAAWGVNVQPYSGSPANFAAYTALLQPHDRIMGLDLPSGGHLTHGYYTSGGKKTSATSIYFESLPYKVNFTTGYIDYDKLEEKALDFRPKLLICGGSAYPRDWDYARFRAIADKVGALLLCDMAHISGLVAAQEAANPFEYCDVVTTTTHKSLRGPRAGMIFYRKGPKPPKKGQPEGAVYDFEDKINFAVFPALQGGPHNHQIGALAVALKQANTPGFKVYAKQVKANAVALGNYLMSKGYQIVTNGTENHLVLWDLRPLGLTGNKVEKLCDLCSITLNKNAVFGDSSALAPGGVRIGAPAMTSRGLVEKDFEQIGEFLSRAVTLTLDIQKTYGKLLKDFNKGLVNNKDLDQLKADVEKFSASYEMPGFLMSEMKYQD

SEQ ID NO: 7385 - protein, 347 aa, Arabidopsis thaliana
MGLDLPSGGHLTHGYYTSGGKKTSATSIYFESLPYKVNFTTGYIDYDKLEEKALDFRPKLLICGGSAYPRDWDYARFRAIADKVGALLLCDMAHISGLVAAQEAANPFEYCDVVTTTTHKSLRGPRAGMIFYRKGPKPPKKGQPEGAVYDFEDKINFAVFPALQGGPHNHQIGALAVALKQANTPGFKVYAKQVKANAVALGNYLMSKGYQIVTNGTENHLVLWDLRPLGLTGNKVEKLCDLCSITLNKNAVFGDSSALAPGGVRIGAPAMTSRGLVEKDFEQIGEFLSRAVTLTLDIQKTYGKLLKDFNKGLVNNKDLDQLKADVEKFSASYEMPGFLMSEMKYQD

SEQ ID NO: 7386 - DNA, 1226 bp, Arabidopsis thaliana
atcaagttaaaaaaaaaacagaaggagaaatggcaataagttttagaactctagctcttttgaccctctcggtgttactaatttccatatctctcggcgtcgtcacagcaacagagtcgcagaggaatgaaggggaggtgcttacaatgtacgagcaatggcttgtagagaatgggaagaactataacggtcttggagagaaggagagacggttcaagatcttcaaagacaacttgaagcgcatcgaagaacacaattcagatccaaaccggagttatgaacgcgggttgaacaagttttcggatctaacggctgatgagtttcaagctagttacttaggtgggaagatggaaaagaaaagcctatcagatgtagcggagaggtatcagtacaaagaaggagatgttttacctgatgaagttgattggagggagagaggagcagttgttccaagagtcaaaagacaaggagagtgtggaagttgttgggcgtttgccgcgactggagcggtggaaggtataaaccagatcacaaccggagaattagtatctttatcggaacaagaactcattgactgcgatagagggaacgacaactttggatgtgctggtggtggagcagtatgggcctttgagttcattaaggagaacggtggtattgtatccgatgaagtttatggttataccggtgaagatactgccgcatgcaaggccattgagatgaaaaccactcgggttgttaccattaatggtcatgaggttgttcctgtaaacgatgagatgtctttgaagaaagctgttgcttatcaacctattagtgttatgatatcagctgcaaacatgagcgactacaaatctggtgtgtataaaggagcatgtagtaatttgtggggagatcacaatgtgctaattgtggggtatggaacatcatcagatgaaggagactactggcttattcgtaattcttggggaccagagtggggagaaggcgggtaccttaggcttcaacgtaacttccatgaaccaaccgggaaatgtgcagtcgctgtagctcctgtatacccaatcaagtcgaactcttcatctcatttgttgtctccaagtgtgtttaaattggttgttttatttgtttttcagttgattagtttggccttgctttgaaatatacttttatcggtgttcaagttcgttggtttttggtttaataaaggaaacaagattcgtcac

SEQ ID NO: 7387 - protein, 385 aa, Arabidopsis thaliana
QVKKKTEGEMAISFRTLALLTLSVLLISISLGVVTATESQRNEGEVLTMYEQWLVENGKNYNGLGEKERRFKIFKDNLKRIEEHNSDPNRSYERGLNKFSDLTADEFQASYLGGKMEKKSLSDVAERYQYKEGDVLPDEVDWRERGAVVPRVKRQGECGSCWAFAATGAVEGINQITTGELVSLSEQELIDCDRGNDNFGCAGGGAVWAFEFIKENGGIVSDEVYGYTGEDTAACKAIEMKTTRVVTINGHEVVPVNDEMSLKKAVAYQPISVMISAANMSDYKSGVYKGACSNLWGDHNVLIVGYGTSSDEGDYWLIRNSWGPEWGEGGYLRLQRNFHEPTGKCAVAVAPVYPIKSNSSSHLLSPSVFKLVVLFVFQLISLALL

SEQ ID NO: 7388 - protein, 376 aa, Arabidopsis thaliana
MAISFRTLALLTLSVLLISISLGVVTATESQRNEGEVLTMYEQWLVENGKNYNGLGEKERRFKIFKDNLKRIEEHNSDPNRSYERGLNKFSDLTADEFQASYLGGKMEKKSLSDVAERYQYKEGDVLPDEVDWRERGAVVPRVKRQGECGSCWAFAATGAVEGINQITTGELVSLSEQELIDCDRGNDNFGCAGGGAVWAFEFIKENGGIVSDEVYGYTGEDTAACKAIEMKTTRVVTINGHEVVPVNDEMSLKKAVAYQPISVMISAANMSDYKSGVYKGACSNLWGDHNVLIVGYGTSSDEGDYWLIRNSWGPEWGEGGYLRLQRNFHEPTGKCAVAVAPVYPIKSNSSSHLLSPSVFKLVVLFVFQLISLALL

SEQ ID NO: 7389 - protein, 337 aa, Arabidopsis thaliana
MYEQWLVENGKNYNGLGEKERRFKIFKDNLKRIEEHNSDPNRSYERGLNKFSDLTADEFQASYLGGKMEKKSLSDVAERYQYKEGDVLPDEVDWRERGAVVPRVKRQGECGSCWAFAATGAVEGINQITTGELVSLSEQELIDCDRGNDNFGCAGGGAVWAFEFIKENGGIVSDEVYGYTGEDTAACKAIEMKTTRVVTINGHEVVPVNDEMSLKKAVAYQPISVMISAANMSDYKSGVYKGACSNLWGDHNVLIVGYGTSSDEGDYWLIRNSWGPEWGEGGYLRLQRNFHEPTGKCAVAVAPVYPIKSNSSSHLLSPSVFKLVVLFVFQLISLALL

SEQ ID NO: 7390 - DNA, 1097 bp, Arabidopsis thaliana
aaaggactaatggagtttcccaggaaacaaaacaaaaggagaaatggcgacatcgacaacgtctgcgattagggcaccgaattggagaaccgctgtgttgttctggaccatctctctcactatcttctactctcttttccaaatgggtattcgaaattcgccatccacttcatctccttcatcagattcctttgtctcctatgcggagcaaagtactaggttgtacaataagatggaacaggattaagaaaacggacccgtgtttcttaaacaaggtgaaacgtctcagtcattgtcactttcagatctcttcacactgaaagatggaaagatagcacctgtccttaaggttgcgaatccccctgtgcgagctaatgtattacatctcagcacagaatactctgtcccagtctcggaagtcgtaaaaaatgtgttcagtccttacttcgaaaatacaatttggtttcaggactctaagatgtaccacttcagcatgtttcatgcatcgaatcacattttctctgttccagctactgaagttgaggttgaagcagaagcagctgctgttaaagcagttgctaaagagctttgccctttggagattatcttggatagagttctattaacctcgactggtgttcttcttggatgctggaaggttaattctggagatgaccccataacaatccgcttgaaactgagatctgttcttccacgtgcaccggagaagcaactttatgatgctgcaattcttcatacatcattggcaagactgcttggtccaccaatatctccaactgaggctggttctgacgaccatctccagcttctccatgagttggtcacaagactaaacaaccaaatccgaggattcaaggcaatagtatcagaactgtggtatgtagaagagttcgatctgctggcgctcgccttgggaggaagaatgaatgttcgatcattcccactcggctgtgcaaagagctaatacttatttcatctttaagatcatcaaaaccctaatgtcatcttcatgtatattttcttcaacttcatagtcaagaaaaatatcttattcaagtcaagacaaaagttctttt

SEQ ID NO: 7391 - protein, 168 aa, Arabidopsis thaliana
MYHFSMFHASNHIFSVPATEVEVEAEAAAVKAVAKELCPLEIILDRVLLTSTGVLLGCWKVNSGDDPITIRLKLRSVLPRAPEKQLYDAAILHTSLARLLGPPISPTEAGSDDHLQLLHELVTRLNNQIRGFKAIVSELWYVEEFDLLALALGGRMNVRSFPLGCAKS

SEQ ID NO: 7392 - protein, 163 aa, Arabidopsis thaliana
MFHASNHIFSVPATEVEVEAEAAAVKAVAKELCPLEIILDRVLLTSTGVLLGCWKVNSGDDPITIRLKLRSVLPRAPEKQLYDAAILHTSLARLLGPPISPTEAGSDDHLQLLHELVTRLNNQIRGFKAIVSELWYVEEFDLLALALGGRMNVRSFPLGCAKS

SEQ ID NO: 7393 - protein, 105 aa, Arabidopsis thaliana
RTNGVSQETKQKEKWRHRQRLRLGHRIGEPLCCSGPSLSLSSTLFSKWVFEIRHPLHLLHQIPLSPMRSKVLGCTIRWNRIKKTDPCFLNKVKRLSHCHFQISSH

SEQ ID NO: 7394 - DNA, 1274 bp, Arabidopsis thaliana
aatcgaatcacacaatattaaacactaaattattcacagttttcttggagaaaagattcaagtacaagtacaagcagagaaagtgagagagagagaaatgatgggtagcttgaaaataatatctccaccacctccggcgacaagattccggcaacgagtaacggcgaacggagatgggtttccgacatttcttccgaaggagatacaaaacataaaagatccattcgcaagagctttagctcaaaggattgtacgaattcctgttcctcttcagatgggaaactttagaggcagtgtaatgagtagctgtatcaaaccacttgttcaattacacgacaaaagtcccgttgttcttctccattgtttcgacagttcttgtcttgaatggagacgtacttatcctctgcttgaacaagcttgtcttgagacttgggctattgatgttcttggttggggattctcagatcttgagaaacttccaccatgtgatgcagcatctaagcgacatcatttattcgagctttggaaaacatatatcaaacgaccaatgattttagttggaccaagcttaggagcaaccgtagctgttgatttcactgctacttacccggaagctgttgataaattggttcttattaatgccaatgcgtattcagaaggaaccggtcggcttaaagagttaccaaaatccatcgcttacgctggggttaagttgttaaagtcattccctctgcgccttttggccaatgtcctagccttttgttcctcgcccttatccgagaacatagattggactaatattggtcggttacattgtcaaatgccgtggtgggaggatgctatggtcgattttatgattagcgggggctataacgtcgcgtcacacatcaaacatattgaccataagacgctcgtggtatgcagtgagaacgatcagatagttagcaaccagctctcagttaaattgttgtgtgagctagcaaatgcggttttgcgggaagtaccagattccggtcatcttccacatgttgagaatcctaaacacattgtgaagctgatatcagatttcgccagtggaaagctctattgattccatatactgtaaactctgcttaaagctcattgattggctacagaggaaggagttataacttatatattattaataaaaaaatactaattaatagataagtccatgatgagcctgggatggctatatatatatgtattttgtttatgaacaaatgaagaaatagaaacatctactttttttt

SEQ ID NO: 7395 - protein, 330 aa, Arabidopsis thaliana
MMGSLKIISPPPPATRFRQRVTANGDGFPTFLPKEIQNIKDPFARALAQRIVRIPVPLQMGNFRGSVMSSCIKPLVQLHDKSPVVLLHCFDSSCLEWRRTYPLLEQACLETWAIDVLGWGFSDLEKLPPCDAASKRHHLFELWKTYIKRPMILVGPSLGATVAVDFTATYPEAVDKLVLINANAYSEGTGRLKELPKSIAYAGVKLLKSFPLRLLANVLAFCSSPLSENIDWTNIGRLHCQMPWWEDAMVDFMISGGYNVASHIKHIDHKTLVVCSENDQIVSNQLSVKLLCELANAVLREVPDSGHLPHVENPKHIVKLISDFASGKLY

SEQ ID NO: 7396 - protein, 329 aa, Arabidopsis thaliana
MGSLKIISPPPPATRFRQRVTANGDGFPTFLPKEIQNIKDPFARALAQRIVRIPVPLQMGNFRGSVMSSCIKPLVQLHDKSPVVLLHCFDSSCLEWRRTYPLLEQACLETWAIDVLGWGFSDLEKLPPCDAASKRHHLFELWKTYIKRPMILVGPSLGATVAVDFTATYPEAVDKLVLINANAYSEGTGRLKELPKSIAYAGVKLLKSFPLRLLANVLAFCSSPLSENIDWTNIGRLHCQMPWWEDAMVDFMISGGYNVASHIKHIDHKTLVVCSENDQIVSNQLSVKLLCELANAVLREVPDSGHLPHVENPKHIVKLISDFASGKLY

SEQ ID NO: 7397 - protein, 271 aa, Arabidopsis thaliana
MGNFRGSVMSSCIKPLVQLHDKSPVVLLHCFDSSCLEWRRTYPLLEQACLETWAIDVLGWGFSDLEKLPPCDAASKRHHLFELWKTYIKRPMILVGPSLGATVAVDFTATYPEAVDKLVLINANAYSEGTGRLKELPKSIAYAGVKLLKSFPLRLLANVLAFCSSPLSENIDWTNIGRLHCQMPWWEDAMVDFMISGGYNVASHIKHIDHKTLVVCSENDQIVSNQLSVKLLCELANAVLREVPDSGHLPHVENPKHIVKLISDFASGKLY

SEQ ID NO: 7398 - DNA, 799 bp, Arabidopsis thaliana
tttcccaactccttacgcgctctctctctatctctttagctttctctttctagcggcgaagccatgggttatccggtggggtacactgagctcctcctcccaagaatcttccttcacttactctctctcttaggcttaatacgaacactcatagacacgggttttcggatattgggtctacccgactttctcgaatccgacccggtttcatcgtcatcgtcatggctggaaccaccgtatatgtccacggcggcgcatcatcaccaagaaagctcatttttcttcccagtggcggcgaggctagctggagaaatcttgcccgtcatcagattctcggagctaactcgacccggattcggatccggatccgattgctgcgcggtgtgcctccacgagttcgagaacgatgacgagatccgacggctgacgaattgtcaacacatatttcaccggagctgtttagaccgttggatgatgggttataatcagatgacgtgtccactttgtagaacgccgtttatttctgatgagttacaagttgcttttaaccaacgagtttggtctgaatctgaacttctcgcagaatcaaattagaatctttcttgtttgggtggaattagtttctactaatgagaaaattaatttctatcttttttttttttttttttgtttaatctttagctgagtggttgatatatgtaaatataaaattataggtggtgatgcttagtaaattagaagaatgaaatttgtattatccgttgaggaaaaaaaagaaatgaatggaaatcttaatttt

SEQ ID NO: 7399 - protein, 176 aa, Arabidopsis thaliana
MGYPVGYTELLLPRIFLHLLSLLGLIRTLIDTGFRILGLPDFLESDPVSSSSSWLEPPYMSTAAHHHQESSFFFPVAARLAGEILPVIRFSELTRPGFGSGSDCCAVCLHEFENDDEIRRLTNCQHIFHRSCLDRWMMGYNQMTCPLCRTPFISDELQVAFNQRVWSESELLAESN

SEQ ID NO: 7400 - protein, 117 aa, Arabidopsis thaliana
MSTAAHHHQESSFFFPVAARLAGEILPVIRFSELTRPGFGSGSDCCAVCLHEFENDDEIRRLTNCQHIFHRSCLDRWMMGYNQMTCPLCRTPFISDELQVAFNQRVWSESELLAESN

SEQ ID NO: 7401 - DNA, 529 bp, Arabidopsis thaliana
gtaacacaaatacaccaaaaaaaaaaaaacagaaagtaacatgagatctctcttattagccgtgtgcctggttcttgctttacactgcggtgaagcagccgtgtcttgcaacacggtgattgcggatctttacccttgcttatcctacgtgactcagggcggaccggtcccaaccctctgctgcaacggtctcacaacactcaagagtcaggctcaaacttctgtggaccgtcagggggtctgtcgttgcatcaaatctgctattggaggactcactctctctcctagaaccatccaaaatgctttggaattgccttctaaatgtggtgtcgatctcccttacaagttcagcccttccactgactgcgacagtatccagtgagacaagcagaaaatcttaaaggaagctactacaagaactataataacctaataattaataaatgagggcattggtttgctagttgctaattgatcagtgatgtattgtcattttgaatgttctaatatcagcaggcacttatctctg

SEQ ID NO: 7402 - protein, 113 aa, Arabidopsis thaliana; identical to SEQ ID NO: 4526

SEQ ID NO: 7403 - DNA, 982 bp, Arabidopsis thaliana
aactaaaatccattgttatcgtcgactcgaagcttaacaatggtttctgacgaatagagctaaaaccattcacaatgttattctcgccttcgaaattgcaatcaccccaatctctaatctcttggaatccgattctccataacggattcatcgataaaaatctctcctttcgccgacgggtcactctccggctagcttcaccgatttcacgattgaccaagggttcagactcaatcgcatcttctactccctctgcattgtactcgaatcctcaggagccatcgatctcttcccaattaacatcgtccgtgggacagcctcctctccaactctctcaatggacattcacacagaagcacttcgtcttgctcaatgtcgtcgcttgcgtgacagcaatttcagcatcgtggctcttctttgctgcgattcctactcttctggctttcaagaaagcagctgagtctcttgaaaagcttttggatgtaactagagaagagctaccagatacaatggctgctgttcgtttatcgggaatggagatcagtgacttaactatggagctcagtgatttaggccaaggtatcactcaaggtgttaaaagctcgacacgggctattcgtgtagctgaagatagactaagacggttaacaaacatgaatccaggaggtgatgcgtcaaaccaagacagatgaaacagaaccaatgttggctaaacaagcgaggagctttagagaaggtgttgttaagggacgctctttatggcaattgttctccacaatcactcgtttctctaaaatcactacaagttatcttgcaaagcgtgctaagcagtagaagcctagaaggtgatcaatcagatgccacttttctctttaccctttttcagagtccgcttgagtctttctagcttaagagtgtaatttgattgatttgaaattatgatattaatatcaatatatcatgatgattcatgagatgcaat

SEQ ID NO: 7404 - protein, 205 aa, Arabidopsis thaliana
MLFSPSKLQSPQSLISWNPILHNGFIDKNLSFRRRVTLRLASPISRLTKGSDSIASSTPSALYSNPQEPSISSQLTSSVGQPPLQLSQWTFTQKHFVLLNVVACVTAISASWLFFAAIPTLLAFKKAAESLEKLLDVTREELPDTMAAVRLSGMEISDLTMELSDLGQGITQGVKSSTRAIRVAEDRLRRLTNMNPGGDASNQDR

SEQ ID NO: 7405 - DNA, 1394 bp, Arabidopsis thaliana
aaacaaaaaagttcctgttcgattcctcctctcattcattctctgcttgttcctcaaatccttcaattttctcatcaaatccagatttgcgaatttaggttttcttgaatctaatcgttctcgatgatttcgaaagatcaccttcatcatctggatcctctgggtacaaccaaatcgtaccacatgaatacctccaccgtatcgccgccgtctccggcatcatcaatttcgttgtcgcaatcggcgtggctggaggttcgtttgttctacgtccgtatcgctccttgcgtcgttgagaacgtccctgacttcctcaccctccgtcaccctcgtcgcgaaaccggtgcttctcttgaggttaacggcgttcgcgttccttcgtcgcagacggcgtcgcttaaactccgccgtgacagagtcgaccgggaatcgtcggaggtgacttacgtgagcactgagaccgttcgcgttaccggatgcgttgatttcgaggtttatgataacgaggatatggtcttgtgtgggaacctagatagaatcgaaggtgcttggaacaatggaactgtgagtgatcccaagactggatggggcatggattgttacattgctatgggaaacggacacgtgtcaggtccttctgcctctgtgtttttccagccaaagtttggagtctcgtctccgtccgtcgaggtttatatagctggttgttgtggtggtgtcccggtgatattgaccaagacgattcaggcgagtccgaggaggaaggtggctaggcacgtgacactcgacgctatccctgaggatgaggaagttggcaaagagcaagacattggtaccattggtgatgaattggcccgtcaaagcaaagtacagatgatggaatcagaagttgatgaatacgatgactcagatatgaaaatggcacagagatattaccctgaaggaatgtacgttgatgaggatggtcagctctcatggttcaatgcaggagtcagagtcggagttgggataggccttgggatgtgtcttggtgtaggcattggagttggattactcatgcgttcgtatcaagcaacaactagtaaccttcgtaggaggtttctctgatcatcacctaccataaactaaaaacccacttagacatttcgagatctactaagaatgtcggtaacgtagtgggttataaaagagatagaattttggtagatagatgtatagagcttttggttttcacctgtttgtgtccttttgaatatatatatatattcggctctgttcatatactttagtagcacaaaagagagttcccatcttgctccagtcatgttcttttgttctttcttttctcaagtctgtctatgtcgttgctcttgtgtagaaagagatttcgtgtt

SEQ ID NO: 7406 - protein, 327 aa, Arabidopsis thaliana
MISKDHLHHLDPLGTTKSYHMNTSTVSPPSPASSISLSQSAWLEVRLFYVRIAPCVVENVPDFLTLRHPRRETGASLEVNGVRVPSSQTASLKLRRDRVDRESSEVTYVSTETVRVTGCVDFEVYDNEDMVLCGNLDRIEGAWNNGTVSDPKTGWGMDCYIAMGNGHVSGPSASVFFQPKFGVSSPSVEVYIAGCCGGVPVILTKTIQASPRRKVARHVTLDAIPEDEEVGKEQDIGTIGDELARQSKVQMMESEVDEYDDSDMKMAQRYYPEGMYVDEDGQLSWFNAGVRVGVGIGLGMCLGVGIGVGLLMRSYQATTSNLRRRFL

SEQ ID NO: 7407 - protein, 307 aa, Arabidopsis thaliana
MNTSTVSPPSPASSISLSQSAWLEVRLFYVRIAPCVVENVPDFLTLRHPRRETGASLEVNGVRVPSSQTASLKLRRDRVDRESSEVTYVSTETVRVTGCVDFEVYDNEDMVLCGNLDRIEGAWNNGTVSDPKTGWGMDCYIAMGNGHVSGPSASVFFQPKFGVSSPSVEVYIAGCCGGVPVILTKTIQASPRRKVARHVTLDAIPEDEEVGKEQDIGTIGDELARQSKVQMMESEVDEYDDSDMKMAQRYYPEGMYVDEDGQLSWFNAGVRVGVGIGLGMCLGVGIGVGLLMRSYQATTSNLRRRFL

SEQ ID NO: 7408 - protein, 198 aa, Arabidopsis thaliana
MVLCGNLDRIEGAWNNGTVSDPKTGWGMDCYIAMGNGHVSGPSASVFFQPKFGVSSPSVEVYIAGCCGGVPVILTKTIQASPRRKVARHVTLDAIPEDEEVGKEQDIGTIGDELARQSKVQMMESEVDEYDDSDMKMAQRYYPEGMYVDEDGQLSWFNAGVRVGVGIGLGMCLGVGIGVGLLMRSYQATTSNLRRRFL

SEQ ID NO: 7409 - DNA, 994 bp, Arabidopsis thaliana
ataaagagaaaatctccaaaagcaatgaccaatgagaaatgtgaagttgctcttccactaaagttgaaatcagaaaaaccatcaatggcttcttcatcatctctctttctcctccctctccttcttcttgtctcccaagcttcagcttcaacggttatattttacaacaagtgcacgtacactgtctggcctgggatccaacctagctccggtcagtcattactcgccggcggcggatttaaactgtcgccgaacagagcttacactctccaacttccaccgctctggtccggtcgcttctggggccgccacggttgctcctttgacagatctggccgtggtcgctgcgccaccggagactgtggtggttctttcctctgtaacggagctggcggtgtacctccggctactcttgccgagatcaccctcggtcatgacatggacttttatgacgtcagcctcgttgatggatataacttggcgatgtcgataatgccggtgaagggtacgggaaagtgtacctacgctggttgcgtaagcgacctgaaccggatgtgcccggttggtctacaagtccgttcacgtgacgggacacaggtagtagcctgtaaaagcgcatgctctgcgtttaactcaccacgctattgctgtaccggcttgttcggtaacccacagtcatgcaagccaacggcttactctaagatcttcaaggtagcttgccctaaggcttactcatacgcctacgatgacccaactagcattgcgacatgttctaaagctaattatgtcgtcactttttgccctcaccgcggccgttgattaaagggattgacatctatgaataattttgcttgactatttagtacgagatcttctttttgagttatcgacccgtttttttgttttggaatttagtgatttcatcgatttgttacaaagaacatgcattatttatgcgtcttttaaaaaattagtgatgtctaattcgtttgct

SEQ ID NO: 7410 - protein, 272 aa, Arabidopsis thaliana
IKRKSPKAMTNEKCEVALPLKLKSEKPSMASSSSLFLLPLLLLVSQASASTVIFYNKCTYTVWPGIQPSSGQSLLAGGGFKLSPNRAYTLQLPPLWSGRFWGRHGCSFDRSGRGRCATGDCGGSFLCNGAGGVPPATLAEITLGHDMDFYDVSLVDGYNLAMSIMPVKGTGKCTYAGCVSDLNRMCPVGLQVRSRDGTQVVACKSACSAFNSPRYCCTGLFGNPQSCKPTAYSKIFKVACPKAYSYAYDDPTSIATCSKANYVVTFCPHRGR

SEQ ID NO: 7411 - protein, 264 aa, Arabidopsis thaliana
MTNEKCEVALPLKLKSEKPSMASSSSLFLLPLLLLVSQASASTVIFYNKCTYTVWPGIQPSSGQSLLAGGGFKLSPNRAYTLQLPPLWSGRFWGRHGCSFDRSGRGRCATGDCGGSFLCNGAGGVPPATLAEITLGHDMDFYDVSLVDGYNLAMSIMPVKGTGKCTYAGCVSDLNRMCPVGLQVRSRDGTQVVACKSACSAFNSPRYCCTGLFGNPQSCKPTAYSKIFKVACPKAYSYAYDDPTSIATCSKANYVVTFCPHRGR

SEQ ID NO: 7412 - protein, 244 aa, Arabidopsis thaliana
MASSSSLFLLPLLLLVSQASASTVIFYNKCTYTVWPGIQPSSGQSLLAGGGFKLSPNRAYTLQLPPLWSGRFWGRHGCSFDRSGRGRCATGDCGGSFLCNGAGGVPPATLAEITLGHDMDFYDVSLVDGYNLAMSIMPVKGTGKCTYAGCVSDLNRMCPVGLQVRSRDGTQVVACKSACSAFNSPRYCCTGLFGNPQSCKPTAYSKIFKVACPKAYSYAYDDPTSIATCSKANYVVTFCPHRGR

SEQ ID NO: 7413 - DNA, 1066 bp, Arabidopsis thaliana
ggtattcattgtcggggagtttctcctctctgcaccagatttcaaatccttgtttacaatctcttctctggctatcttagagggatttttgattgagattttaaaattttctgagttggattagttggttggtaaagagatggatccggatacggtgaagtcgaccctctcgaatctggcattcgggaatgtattggcggcagctgctagagattataaaaaggaagttcttgcaaatgaaaaggcacaaggatcaagacctgtcaacgaggaagttgatcttgacgaattgatggatgatccagagctagaaaagttgcacgcagataggattgcagcactcaggagagaagtggaaaagagagaagcattcaaaagacaaggacatggtgaataccgagaagttagcgaaggcgacttcttgggagaagtcacaaggagtgaaaaagttatatgtcacttctaccacaaggagttctatcgctgcaagataatggacaagcatttgaagacccttgctcctagacatgtggacacaaagttcattaagatggacgctgagaacgctcccttcttcgtcaccaagcttgcaatcaagactttgccgtgtgttatcctttttagcaagggaatcgcgatggataggcttgtcgggtttcaagatctaggtgccaaggacgatttctccacgacgaagctggagaatcttctggtcaagaaaggaatgcttagtgaaaagagaaaagaggaagatgaggaagattacgagtatcaagaaagcatacgtcggtccgttaggtcttcagcgaatgtcgactctgattcagattgatctcgaagcttttctcatagtagacctccgagcctttttgtattttgttttcaccgctgctctgtttgaattgtttggtctatgaatcttatgcttctataagtctttatagtgggaaatttcgttccacaatgtttttgtttatttgaaaactgcaaattatggtgtctaaccatataaacaaaagtcattaggtgaatgacaagatttgaaaagaaatgataagagttgagc

SEQ ID NO: 7414 - protein, 230 aa, Arabidopsis thaliana
MDPDTVKSTLSNLAFGNVLAAAARDYKKEVLANEKAQGSRPVNEEVDLDELMDDPELEKLHADRIAALRREVEKREAFKRQGHGEYREVSEGDFLGEVTRSEKVICHFYHKEFYRCKIMDKHLKTLAPRHVDTKFIKMDAENAPFFVTKLAIKTLPCVILFSKGIAMDRLVGFQDLGAKDDFSTTKLENLLVKKGMLSEKRKEEDEEDYEYQESIRRSVRSSANVDSDSD

SEQ ID NO: 7415 - protein, 179 aa, Arabidopsis thaliana
MDDPELEKLHADRIAALRREVEKREAFKRQGHGEYREVSEGDFLGEVTRSEKVICHFYHKEFYRCKIMDKHLKTLAPRHVDTKFIKMDAENAPFFVTKLAIKTLPCVILFSKGIAMDRLVGFQDLGAKDDFSTTKLENLLVKKGMLSEKRKEEDEEDYEYQESIRRSVRSSANVDSDSD

SEQ ID NO: 7416 - DNA, 3566 bp, Arabidopsis thaliana
aaacacagagagagagagagagcaaaaatggctatggcgattgcgatgttaccggcgctcttctcttctccttcgattctaaccagcagaatcagatgcggagccaccgcaaacagcggcggcgcaatctcatctacttcttctaattccgatcctaggagaggtgttcccttgtataagcccaaatcatacgaggttctagccactgacgccgccaattctctagctttcgctctccaggattcaaaatctcgtttggaaatcgattttccacctttacccagtagcatttcttcttacaagggttcttcagacgactttattgatgctaatatacaactggccgtgactgttgttcgcaaacttcaggagaaaatcgagaccagagcatgcattgtttttcctgacaagcctgagaagcgcagggcttcgcaacgcttcaaagcggcatttgattcggttgatggcataagtattggctctctagatgatatacctggtacttctgtcaccaatttctttaggtccataaggagtaccctggactttgattttgaagatgaaaacgaaggaacttgggagcccaaggagccaccgaccctttatatatttatcaattgcagcactcgggaactctctttcatagagaagtttgtggaaacctttgccagttcaaccccagctcttctgttcaatcttgagctagatactttgcgtgcagtgctgacctagggcttcttggctttccccctaaagatctgcactaccggtttctttctcaatttattcccgtcttttatatccgaaccagagagtattcaaagacagtggcagtggcaccatttgtgttgaactacaacggagcactttttcgacaatatcctgggccatggcaggtgatgcttaagcaaactgatggttcatttgcgtgtgttgcagaaagccctactcgtttcacgctgggtgaaacgaaggaagagctgttacaggttctgggactacaagaagagaaaggaagctcactcgagttcctgcgcaggggatacaagtcggcaacttggtgggaagaggatgtggagctcgaggcatcatctaattggcgtaactgaacgatggccaagtcatggattcacacttttggtaagtttgttaagtctctcaagattgagatatttacacttgtatatgtgcaaagttggtagagagagtttgggagatgttaatgggaatgattaaggatagtttcaatatgttttctatatataactcagtccaattatgatagtgtctgctccacccaaacacaaacgcagactatgaaaaatcataggaaatgacaaagaaactattttaggaatatttacaatttaggtagaatatcaaagatctcctcaatttgctgtataatggtcatctaatttccaacttatcaacttccttgttaacaatttaggtagaatatctaagatcttctttctattattggcgtcaatcagatcgattataatctgtcaatatccttcaaggtgtcaatcaagttctattttgtttccctctttcctctctcctcttgcccttgtctctttataacatgcgagctccatttgtacatttttcttgattttcaagtctcagatggagaatcttgggttgttccaaattcttttgctattctgtctctttgtctcggtccgcatagtttctgtttcttgtttaaattcagatgggttaactttactctcgcttcggaagcatttggacaaagtaccaccagaattaacttcgacatggaagactaacgcatctgaagccactccatgtaactggtttggtattatctgtgatgattctaagaaggttacgtctctcaacttcaccggttcaggtgtttcaggccaattgggtcctgaaatagggcaactcaaaagcttagagatattggatatgagttctaacaatttctctgggattataccttccagtttagggaactgtagctcacttgtgtacattgatttgtctgaaaatagtttctctggtaaggtccccgatactctcggtagcttgaagagcttggccgatttgtatctttacagcaactctcttactggggaattgcctaaatccttgtttcgcattccggtgttgaattatctgcatgttgagcataacaacctaaccgggttaatccctcaaaatgttggtgaagctaaggaacttcttcatctgcgtttgtttgacaatcagtttactggtacaatccctgagtctattggaaactgcagcaagctggagattctgtatctgcacaagaataagttagttggttcattgcctgcaagtctcaatcttttggagagtctcactgatctgtttgttgcaaacaacagcctaagaggaacagttcagtttggctcaaccaaatgcaggaatctggtgactttagatttgtcatacaatgaattcgaaggtggtgtccctcctgaactgggaaattgcagtagccttgacgctttagtcattgtgagtggtaacttgtcaggtacaatcccttcctcattgggtatgttgaagaatctcacaattcttaacctttccgagaatcgtctttctgggagtatccccgcggagctcgggaactgcagtagcttgaacttgttgaagctgaacgataaccagcttgtaggtggaataccaagtgcattaggtaagctgaggaagctagaaagtctggagcttttcgaaaaccggttttcgggcgagattcctatcgagatatggaagattcagagtcttacgcagttgctagtttatcggaacaatctcacaggaaaattaccagaggaaataaccaagctcaagaatctcaagatcgttactctcttcaacaatagcttttatggagtgataccacccaatttaggtctgaacagcaacttggagattatcgatttcattggtaacaattttacaggtgagataccacgaaatctctgccatggaaagatgttgacagtgtttaacttaggatctaaccggcttcacggcaaaataccggcatccgttagtcagtgcaagactctaagcagattcatcctcagagaaaacaacctttcaggctttcttcctaagttttcgaagaatcaagatctttcgtttctcgacctcaatagcaacagcttcgaaggaccaatccctcgtagtctcggaagctgtaggaatctcacgaccatcaatctgtctcggaacaagctcacgaggaatattcctagagaacttgagaatctacaaaaccttagtcacctgaatcttgggtctaacttattaaacggtacggttccttcaaagtttagtaactggaaagagttgaccactttggttctctccggaaaccggttttcaggattcgttccgcccgatcgccactcttagagagaaggaaaacaaccatgtattccagtgacatcatatcaaacatttttactatacaacatactctcttttttttctttgcttaaatcgttgtataccttttcaccattcttattgccgcttagtacattttt

SEQ ID NO: 7417 - protein, 598 aa, Arabidopsis thaliana
MENLGLFQILLLFCLFVSVRIVSVSCLNSDGLTLLSLRKHLDKVPPELTSTWKTNASEATPCNWFGIICDDSKKVTSLNFTGSGVSGQLGPEIGQLKSLEILDMSSNNFSGIIPSSLGNCSSLVYIDLSENSFSGKVPDTLGSLKSLADLYLYSNSLTGELPKSLFRIPVLNYLHVEHNNLTGLIPQNVGEAKELLHLRLFDNQFTGTIPESIGNCSKLEILYLHKNKLVGSLPASLNLLESLTDLFVANNSLRGTVQFGSTKCRNLVTLDLSYNEFEGGVPPELGNCSSLDALVIVSGNLSGTIPSSLGMLKNLTILNLSENRLSGSIPAELGNCSSLNLLKLNDNQLVGGIPSALGKLRKLESLELFENRFSGEIPIEIWKIQSLTQLLVYRNNLTGKLPEEITKLKNLKIVTLFNNSFYGVIPPNLGLNSNLEIIDFIGNNFTGEIPRNLCHGKMLTVFNLGSNRLHGKIPASVSQCKTLSRFILRENNLSGFLPKFSKNQDLSFLDLNSNSFEGPIPRSLGSCRNLTTINLSRNKLTRNIPRELENLQNLSHLNLGSNLLNGTVPSKFSNWKELTTLVLSGNRFSGFVPPDRHS

SEQ ID NO: 7418 - protein, 495 aa, Arabidopsis thaliana
MSSNNFSGIIPSSLGNCSSLVYIDLSENSFSGKVPDTLGSLKSLADLYLYSNSLTGELPKSLFRIPVLNYLHVEHNNLTGLIPQNVGEAKELLHLRLFDNQFTGTIPESIGNCSKLEILYLHKNKLVGSLPASLNLLESLTDLFVANNSLRGTVQFGSTKCRNLVTLDLSYNEFEGGVPPELGNCSSLDALVIVSGNLSGTIPSSLGMLKNLTILNLSENRLSGSIPAELGNCSSLNLLKLNDNQLVGGIPSALGKLRKLESLELFENRFSGEIPIEIWKIQSLTQLLVYRNNLTGKLPEEITKLKNLKIVTLFNNSFYGVIPPNLGLNSNLEIIDFIGNNFTGEIPRNLCHGKMLTVFNLGSNRLHGKIPASVSQCKTLSRFILRENNLSGFLPKFSKNQDLSFLDLNSNSFEGPIPRSLGSCRNLTTINLSRNKLTRNIPRELENLQNLSHLNLGSNLLNGTVPSKFSNWKELTTLVLSGNRFSGFVPPDRHS

SEQ ID NO: 7419 - DNA, 1529 bp, Arabidopsis thaliana
atcaaaaacccaaatctctctgttcgcagagaggatcaattcgtgattcagagaatcaaacttactgtgagagagagataacgaagatggacgctatgaggaagcaactcgatgtgctcatgggagctaacagaaacggcgatgtcactgaggtcaatcgcaaatactacgaccgcgatgtttgccgtctttacctctctggtctctgccctcacgagcttttccaattgacgaaaatggatatgggtccttgcccaaaggtgcactctttgcagctgaggaaagaatataaagatgcaaaggcaaaaggtgttgacaactatgatagggaattggaagatgcgatagataggcttattgttgagtgtgataggaagattggtagggctcttaatcgtcttcaagaagaggatgccaaagctgccattgcaatttctgtcacagaatttactcagtcacctgaaattcttgaattatcgaagcaaatcaaagaaaagatgaaggaagcagacctgcacgatcttgaaggcaaaacagatctgaagattagagctcttgagttagttgaagagatgaggacgaagagagctgacctacaggctgtgctactgttggatgcctttaacaaagataggacatccttgcaacaggcagttccagctcagcaaccagctgcaactttacctccgcccgatcctcgtactcaagaaatgatcaatgaaaaactaaagaaagcagaagagcttggtgaacaagggatggttgatgaagcgcagaaagcactagaagaggcggaagctcttaagaagcttactgctagacaagaacctgtagtggattcaaccaagtacactgctgctgacgtgcgcattacagaccagaagctgcgtctatgtgacatatgcggagcatttttgagcgtctatgacagtgatcgtcggttagctgatcattttggagggaagcttcacttgggttacatgctgatccgcgacaaattggcagagcttcaggaggagaagaacaaagttcacaaggaacgggtcgaagaaaggagatcaaaggagaggagtagagagcgagaatcaagtaaagacagagacggaggagataaccgtgaccgaggaagagatgttgaccgcaggagtagagatcgtgacaggcaccatgaccaccgagaacatgacagaaactataatcagtcacgtggctatgactcaagaagccggcgcagttcacggtcccggtctagggaaagaccgagggatcatgatcgccgcagacgccatgaccgctactaaaaccctgccaaagatggttgcacctggtttaagaggttcttacagatgcgtttaggatctatttggagttacaaacactttcttttttctttgctcaagtgttttaaggatttttgagattgtaacttactttaagtttgtaagaggagcttcttcagatatctttaatttgttttttatgttgttgacatcaaagacttgcgagtagaaagaagattttgttgatcc

SEQ ID NO: 7420 - protein, 432 aa, Arabidopsis thaliana
QKPKSLCSQRGSIRDSENQTYCEREITKMDAMRKQLDVLMGANRNGDVTEVNRKYYDRDVCRLYLSGLCPHELFQLTKMDMGPCPKVHSLQLRKEYKDAKAKGVDNYDRELEDAIDRLIVECDRKIGRALNRLQEEDAKAAIAISVTEFTQSPEILELSKQIKEKMKEADLHDLEGKTDLKIRALELVEEMRTKRADLQAVLLLDAFNKDRTSLQQAVPAQQPAATLPPPDPRTQEMINEKLKKAEELGEQGMVDEAQKALEEAEALKKLTARQEPVVDSTKYTAADVRITDQKLRLCDICGAFLSVYDSDRRLADHFGGKLHLGYMLIRDKLAELQEEKNKVHKERVEERRSKERSRERESSKDRDGGDNRDRGRDVDRRSRDRDRHHDHREHDRNYNQSRGYDSRSRRSSRSRSRERPRDHDRRRRHDRY

SEQ ID NO: 7421 - protein, 404 aa, Arabidopsis thaliana
MDAMRKQLDVLMGANRNGDVTEVNRKYYDRDVCRLYLSGLCPHELFQLTKMDMGPCPKVHSLQLRKEYKDAKAKGVDNYDRELEDAIDRLIVECDRKIGRALNRLQEEDAKAAIAISVTEFTQSPEILELSKQIKEKMKEADLHDLEGKTDLKIRALELVEEMRTKRADLQAVLLLDAFNKDRTSLQQAVPAQQPAATLPPPDPRTQEMINEKLKKAEELGEQGMVDEAQKALEEAEALKKLTARQEPVVDSTKYTAADVRITDQKLRLCDICGAFLSVYDSDRRLADHFGGKLHLGYMLIRDKLAELQEEKNKVHKERVEERRSKERSRERESSKDRDGGDNRDRGRDVDRRSRDRDRHHDHREHDRNYNQSRGYDSRSRRSSRSRSRERPRDHDRRRRHDRY

SEQ ID NO: 7422 - protein, 401 aa, Arabidopsis thaliana
MRKQLDVLMGANRNGDVTEVNRKYYDRDVCRLYLSGLCPHELFQLTKMDMGPCPKVHSLQLRKEYKDAKAKGVDNYDRELEDAIDRLIVECDRKIGRALNRLQEEDAKAAIAISVTEFTQSPEILELSKQIKEKMKEADLHDLEGKTDLKIRALELVEEMRTKRADLQAVLLLDAFNKDRTSLQQAVPAQQPAATLPPPDPRTQEMINEKLKKAEELGEQGMVDEAQKALEEAEALKKLTARQEPVVDSTKYTAADVRITDQKLRLCDICGAFLSVYDSDRRLADHFGGKLHLGYMLIRDKLAELQEEKNKVHKERVEERRSKERSRERESSKDRDGGDNRDRGRDVDRRSRDRDRHHDHREHDRNYNQSRGYDSRSRRSSRSRSRERPRDHDRRRRHDRY

SEQ ID NO: 7423 - DNA, 1482 bp, Arabidopsis thaliana
gaagacgttaaccccatctcgttgaaagagagaagatgctaagatctcaaaacagagtataacaacaccttgacctcgttgaagaagcctttgagattgtctcggggatctgaaaaatgtcaatccttcaagtctctacttcgtctctttcttcttctactcttctctccatatctcccagaaaatctctctcatctaccaagtcatgccggatagttcgatgttccgtcgagggaactactgtaaccgagagaaaagtctcggcaaccagcgagccacttcttctgagagctgttaaaggtgaagttgttgatagacctccggtttggcttatgaggcaagctgggaggtacatgaagagttatcaaactctctgtgagaagtatccttctttcagagatagatcagagaatgcagatcttgtggtggaaatttctttgcagccatggaaggtgtttaagccagatggggtgattctgttctcagacattctcactccattgtctggaatgaacatacctttcgacattgttaaaggaaaaggtcctatcatctttaacccgcctcaatcagctgccgacgttgctcaagttagagaattcgtaccagaggaatctgttccttatgttggagaagcactcagaagattaagaaatgaggtgaacaatgaagccgctgttctgggatttgttggagctccatttacactttcttcgtatgtaatcgaaggtggctcatctaagaacttcacacagataaaaagattagctttttctcaacccaaggttctacatgccttactccagaagttcacaacctcgatgataacgtacatacgctatcaagcagatagcggagctcaagctgtgcaaatattcgactcttgggcaaccgagcttagcccggtggattttgaggagtttagcttaccttatctcaaacagattgtggaagctgtgaaacaaactcacccaaacctacctctcatactttatgctagtggatcaggaggtttgctagagagactggctcggaccggtgtggatgttgtgagcttggactggactgtggacatggctgaaggaagagaccggctaggaagagacatagcagttcaaggaaacgttgatccgggagttctatttggatcgaaagaatttatcacaagccggattcatgatactgtgaagaaagctgggagagataaacacattctcaacttggggcatggtattaaagttggaacccctgaagagaatgtagcacacttctttgaggttgctcaagaaattagatattaagagaaagaatgaatgtgatgattattatgctttgttgttaatttcggccttccatctttttttctttttccatttgagatgtgtaattttatttttatattttaactgtaatttttttttgtagactacttggaagaaagtaatgattaacgtgcaatggatattcatatatgtaggctct

SEQ ID NO: 7424 - protein, 394 aa, Arabidopsis thaliana
MSILQVSTSSLSSSTLLSISPRKSLSSTKSCRIVRCSVEGTTVTERKVSATSEPLLLRAVKGEVVDRPPVWLMRQAGRYMKSYQTLCEKYPSFRDRSENADLVVEISLQPWKVFKPDGVILFSDILTPLSGMNIPFDIVKGKGPIIFNPPQSAADVAQVREFVPEESVPYVGEALRRLRNEVNNEAAVLGFVGAPFTLSSYVIEGGSSKNFTQIKRLAFSQPKVLHALLQKFTTSMITYIRYQADSGAQAVQIFDSWATELSPVDFEEFSLPYLKQIVEAVKQTHPNLPLILYASGSGGLLERLARTGVDVVSLDWTVDMAEGRDRLGRDIAVQGNVDPGVLFGSKEFITSRIHDTVKKAGRDKHILNLGHGIKVGTPEENVAHFFEVAQEIRY

SEQ ID NO: 7425 - protein, 322 aa, Arabidopsis thaliana
MRQAGRYMKSYQTLCEKYPSFRDRSENADLVVEISLQPWKVFKPDGVILFSDILTPLSGMNIPFDIVKGKGPIIFNPPQSAADVAQVREFVPEESVPYVGEALRRLRNEVNNEAAVLGFVGAPFTLSSYVIEGGSSKNFTQIKRLAFSQPKVLHALLQKFTTSMITYIRYQADSGAQAVQIFDSWATELSPVDFEEFSLPYLKQIVEAVKQTHPNLPLILYASGSGGLLERLARTGVDVVSLDWTVDMAEGRDRLGRDIAVQGNVDPGVLFGSKEFITSRIHDTVKKAGRDKHILNLGHGIKVGTPEENVAHFFEVAQEIRY

SEQ ID NO: 7426 - protein, 315 aa, Arabidopsis thaliana
MKSYQTLCEKYPSFRDRSENADLVVEISLQPWKVFKPDGVILFSDILTPLSGMNIPFDIVKGKGPIIFNPPQSAADVAQVREFVPEESVPYVGEALRRLRNEVNNEAAVLGFVGAPFTLSSYVIEGGSSKNFTQIKRLAFSQPKVLHALLQKFTTSMITYIRYQADSGAQAVQIFDSWATELSPVDFEEFSLPYLKQIVEAVKQTHPNLPLILYASGSGGLLERLARTGVDVVSLDWTVDMAEGRDRLGRDIAVQGNVDPGVLFGSKEFITSRIHDTVKKAGRDKHILNLGHGIKVGTPEENVAHFFEVAQEIRY

SEQ ID NO: 7427 - DNA, 912 bp, Arabidopsis thaliana
tgaaaatccttcaagaatcgcttcatcttcttcttcttcaacaaatcgagtcctttttctgataactcatttcgatttcagaaactcgccaagaactggatactctggcggaatcagagattaagaaccgagacgtggttctgaaactgtatgaagccctgagatctcgcgacgtcaaatctgtgcaccagatcttaaccccagatctggagtattggttccacggtcctccgccgcaccagtttttgatgcgcgtactcaccggaggtgtctctccgtcttcttcctccttcgaattcgtacctctctccgtcgtttccttcggatctaccgtaatcgcggaaggctgcgacgccgcgacatcgatttcttggatccacgcttggactgtagcgaatgggataatcacacaggtgagggagtactctaacacttctctcaccgtcacacggatcggtaacgttgttgctggacgacgctccgctgagattgcgcctccgtcgcattgttcctccgtgtgggaaagccaattctcgggtcgggctggtaaacccgtacccggtttggttctggcgatttgaaagagtttggtaaagtaagtaacagccacgtcaggagaataactaaataaaggctgcttacgtgtctgtgtgtggttggtttgtttgttgtatgggttaaaaaggattttgttgctgttttaaacgcggtgtgggcttctggggctacggtcgcgtttggctgtcgctagttttttttttttttttaagttgtttgtctgaaaattcgtgtgggtttgtgttttttagtgggagcaagtatggggaaacccaaatcgacttgttgtcccgttgcgtttgatgtaacgtttgcttatgttataattgaaataaaaaagtgcttttgggatcc

SEQ ID NO: 7428 - protein, 110 aa, Arabidopsis thaliana
MRVLTGGVSPSSSSFEFVPLSVVSFGSTVIAEGCDAATSISWIHAWTVANGIITQVREYSNTSLTVTRIGNVVAGRRSAEIAPPSHCSSVWESQFSGRAGKPVPGLVLAI

SEQ ID NO: 7429 - DNA, 791 bp, Arabidopsis thaliana
gcatcagaaatccatttcccaaatcttctagattcatattcaaatcaagaaatgactctcgctaagaaccaaaaatcatcattgtcacgactatacaagaaagtttcctcgaagagatcagaatcgtcaagaaaccttgaagacgaatcaagaacgagcagtaatagtagcggaagcagctcgttaaacgttaacgagctaagaaccgtttttgactatatggatgcaaactcagacgggaaaatctccggtgaagagctacaaagctgcgttagtctcttaggcggcgcgttatcgtcacgtgaggtggaggaagtggtgaagacatcagacgttgacggagacgggtttatagattttgaggagtttttgaagcttatggaaggggaagatggtagtgatgaagaaaggaggaaggagttgaaagaagcgtttgggatgtatgttatggagggggaagagtttattacggcggcgagtttacggaggacgttgagtcgactcggcgagtcgtgtacggttgatgcttgtaaggttatgattcgtgggtttgatcagaatgacgatggagttctcagctttgacgagtttgttttgatgatgcgttgagatgatatatatgggattgggacatcttccttccctcctcaaaattttattcattcaattattatttttgtgagagattcttattcctttgtatatttgtgtctcatctaatctatttgtattatttaacacacttcataataaacgtgtcttgttttgatattctgaatttgtcaaaacat

SEQ ID NO: 7430 - protein, 202 aa, Arabidopsis thaliana
ASEIHFPNLLDSYSNQEMTLAKNQKSSLSRLYKKVSSKRSESSRNLEDESRTSSNSSGSSSLNVNELRTVFDYMDANSDGKISGEELQSCVSLLGGALSSREVEEVVKTSDVDGDGFIDFEEFLKLMEGEDGSDEERRKELKEAFGMYVMEGEEFITAASLRRTLSRLGESCTVDACKVMIRGFDQNDDGVLSFDEFVLMMR

SEQ ID NO: 7431 - protein, 185 aa, Arabidopsis thaliana
MTLAKNQKSSLSRLYKKVSSKRSESSRNLEDESRTSSNSSGSSSLNVNELRTVFDYMDANSDGKISGEELQSCVSLLGGALSSREVEEVVKTSDVDGDGFIDFEEFLKLMEGEDGSDEERRKELKEAFGMYVMEGEEFITAASLRRTLSRLGESCTVDACKVMIRGFDQNDDGVLSFDEFVLMMR

SEQ ID NO: 7432 - protein, 129 aa, Arabidopsis thaliana
MDANSDGKISGEELQSCVSLLGGALSSREVEEVVKTSDVDGDGFIDFEEFLKLMEGEDGSDEERRKELKEAFGMYVMEGEEFITAASLRRTLSRLGESCTVDACKVMIRGFDQNDDGVLSFDEFVLMMR

SEQ ID NO: 7433 - DNA, 1359 bp, Arabidopsis thaliana
aaaaacgctcgaaagagtttaaaaattgtgaacatattgtgatgaatcatcatgagcagtgacttcatacttgatattacgagtgagaggccactataaaaagcaggcgcgtcctcgaagaagaagaagaagtaacaaattggtggaaatcagaagttgaatcggagaataacaacgatgacgacgaacaagcaggtcatattcaaagaccacgtgagtggtttccctaaggaatccgatttcaatttcaccaccaccaccgtcgaacttagggttccggaaggttctaaatcggttcttgtgaagaatctctacctgtcatgcgatccttatatgcggtctcgcatggggaaacctgatccctcctctgctcttgctcaagcttacgctcccggcaagccaatctatgggtatggagtgtctagagtgatagaatctgggcatccagattacaagaaaggtgatttactctggggaatagttggatgggaggagtatagtgttattacaccaatggctcacatgcatttcaagatccaacatacagatgttccattatcctactatactggacttctcggtatgcctggtatgactgcctatgctgggttttatgaagtttgttctccaaagaaaggagagacagtttatgtgtcagctgcatctggtgcggttggtcagcttgtgggacaatttgctaagatgatgggctgttatgttgttggaagcgctggaagtaaagaaaaggttgatctcctgaagaccaagtttgggtttgatgatgcatttaactacaaggaagaatctgaccttagtgctgccctcaaaaggtgttttcccaagggcatcgacatgtactttgagaacgtaggaggcaaaatgctagatgcagtgctcttaaacatgaacccacacgggcgtatcgctgtctgtggaatgatctcacagtacaatcttgaaaatcaagaaggtgtacacaacctatccaatatcatctacaaacgaatacgcattcaaggctttgtagtggctgatttctacgacaaatacccaaagttcttggagttggtgcttccgcgcattaaagaagggaagataacgtatgtggaagatgtagctgatgggctcgagaaagctcctgaagctcttgtggggcttttccatggtaagaacgttgggaaacaagttgttgttattgctcgtgagtgaagaatacttatttgggagtaatgtcttattgcgcgtgagtgaagaatacttatttgggagaaatgttatatttatccaacaagagttggtatgtctgttgaacccaaccgtgagtttttggtttatgaataatactagtaactataatat

SEQ ID NO: 7434 - protein, 343 aa, Arabidopsis thaliana
MTTNKQVIFKDHVSGFPKESDFNFTTTTVELRVPEGSKSVLVKNLYLSCDPYMRSRMGKPDPSSALAQAYAPGKPIYGYGVSRVIESGHPDYKKGDLLWGIVGWEEYSVITPMAHMHFKIQHTDVPLSYYTGLLGMPGMTAYAGFYEVCSPKKGETVYVSAASGAVGQLVGQFAKMMGCYVVGSAGSKEKVDLLKTKFGFDDAFNYKEESDLSAALKRCFPKGIDMYFENVGGKMLDAVLLNMNPHGRIAVCGMISQYNLENQEGVHNLSNIIYKRIRIQGFVVADFYDKYPKFLELVLPRIKEGKITYVEDVADGLEKAPEALVGLFHGKNVGKQVVVIARE

SEQ ID NO: 7435 - protein, 291 aa, Arabidopsis thaliana
MRSRMGKPDPSSALAQAYAPGKPIYGYGVSRVIESGHPDYKKGDLLWGIVGWEEYSVITPMAHMHFKIQHTDVPLSYYTGLLGMPGMTAYAGFYEVCSPKKGETVYVSAASGAVGQLVGQFAKMMGCYVVGSAGSKEKVDLLKTKFGFDDAFNYKEESDLSAALKRCFPKGIDMYFENVGGKMLDAVLLNMNPHGRIAVCGMISQYNLENQEGVHNLSNIIYKRIRIQGFVVADFYDKYPKFLELVLPRIKEGKITYVEDVADGLEKAPEALVGLFHGKNVGKQVVVIARE

SEQ ID NO: 7436 - protein, 287 aa, Arabidopsis thaliana
MGKPDPSSALAQAYAPGKPIYGYGVSRVIESGHPDYKKGDLLWGIVGWEEYSVITPMAHMHFKIQHTDVPLSYYTGLLGMPGMTAYAGFYEVCSPKKGETVYVSAASGAVGQLVGQFAKMMGCYVVGSAGSKEKVDLLKTKFGFDDAFNYKEESDLSAALKRCFPKGIDMYFENVGGKMLDAVLLNMNPHGRIAVCGMISQYNLENQEGVHNLSNIIYKRIRIQGFVVADFYDKYPKFLELVLPRIKEGKITYVEDVADGLEKAPEALVGLFHGKNVGKQVVVIARE

SEQ ID NO: 7437 - DNA, 1321 bp, Arabidopsis thaliana
tctgcaatttgaattcaaaatttaaaccactctacttttgaatctctctctcactaaacctagaaagtagaaaaccctagcatttgtgatcttcaacgggaaaaatgacgactgtgactccgtccgccggtcgtgagctctcgaatccgccgtccgacggcatttctaatctccgattttctaataacagtgatcatctcctcgtttcttcatgggataagcgtgtgagattgtatgatgtgagcaccaattcgttgaaaggagagttcttacatggcggagcagtactcgattgctgttttcacgatgacttctccggcttcagtgttggcgctgattacaaagtccgacggattgtattcaatgtcggcaaagaggacattttggggacacatgacaaagcagtgcgatgtgttgagtattcttacgctgcgggacaagtgatcactggatcttgggataaaacagttaaatgttgggatccaagaggcgctagtgggcctgaacgcacccaagtgggaacatatttgcaaccagaacgtgtttactctatgtctcttgttggacatcgtttggtagtggctacagcaggaaggcatgtaaacatctatgatctcagaaatatgtctcagcctgagcaaagaagggagtcttcactgaaataccagacgagatgtgtgcgttgttatcctaatggaacaggctatgctcttagctctgttgaaggaagggttgcaatggagttttttgatctgtcagaggctgctcaagctaaaaaatatgctttcaaatgtcatcggaaatcagaggctggaagggacattgtttaccctgtaaattccattgccttccatccaatctatggcacctttgcaactggaggctgtgatggtttcgtcaacatttgggatggtaacaacaagaagaggctatatcagtactcaaagtatccaacgagtatctcggcactgtcattcagtcgagatggtcagctgctggctgttgcttcaagttacacatttgaagagggagagaaatcgcaagaaccggaggccatctttgtaagaagcgtgaatgaaatcgaagtgaaaccaaaaccgaaagtatacccgaatcctgcggcgtagaaaggaagaaacacaagttatttcctatgttggttgtttttgtatttgctaggagtgttccaaagattgaatcaacgtatgtttgagcttttaaataactagtgaaatatccacattcaccgtatatgtttaaatttctgtagtcaaactctcttgtcaaacatataatataagatgacaaatttccagtgttt

SEQ ID NO: 7438 - protein, 340 aa, Arabidopsis thaliana
MTTVTPSAGRELSNPPSDGISNLRFSNNSDHLLVSSWDKRVRLYDVSTNSLKGEFLHGGAVLDCCFHDDFSGFSVGADYKVRRIVFNVGKEDILGTHDKAVRCVEYSYAAGQVITGSWDKTVKCWDPRGASGPERTQVGTYLQPERVYSMSLVGHRLVVATAGRHVNIYDLRNMSQPEQRRESSLKYQTRCVRCYPNGTGYALSSVEGRVAMEFFDLSEAAQAKKYAFKCHRKSEAGRDIVYPVNSIAFHPIYGTFATGGCDGFVNIWDGNNKKRLYQYSKYPTSISALSFSRDGQLLAVASSYTFEEGEKSQEPEAIFVRSVNEIEVKPKPKVYPNPAA

SEQ ID NO: 7439 - protein, 191 aa, Arabidopsis thaliana
MSLVGHRLVVATAGRHVNIYDLRNMSQPEQRRESSLKYQTRCVRCYPNGTGYALSSVEGRVAMEFFDLSEAAQAKKYAFKCHRKSEAGRDIVYPVNSIAFHPIYGTFATGGCDGFVNIWDGNNKKRLYQYSKYPTSISALSFSRDGQLLAVASSYTFEEGEKSQEPEAIFVRSVNEIEVKPKPKVYPNPAA

SEQ ID NO: 7440 - DNA, 1174 bp, Arabidopsis thaliana
ggaattcctcgagctacgtcagggctcatttccatcatcttcgtcttcgtttgttcccctgagatagagataagagaatttcgagagattcgagagaagagacgatgagtttccaagatctcgaagctggtactcgatctccggcgccgaatcgttttaccggtgggagacaacagagaccttcgtctcgtggggatccatctcaggaggtcgccgccgggattttcaggatcagcacggctgtcaattccttcttccgcctcgttaattcgatcggaacacctaaagatactcttgaattacgagataagctgcaaaagacaaggttacagatatccgaattggtgaagaatacttcagctaaacttaaggaagctagcgaagccgaccttcatggatcagctagtcaaattaagaagatagctgatgctaaactggcaaaagatttccaatcagttctcaaagagtttcagaaagctcagagacttgcagctgaaagagaaataacatatactcctgtggtcacaaaagaaatacctaccagttataatgcacctgaactggatactgaatctttaaggatctcccagcagcaagctcttcttctacaatcaagaaggcaagaagtggtgtttttagataacgagataacattcaatgaagcaattattgaggaaagagagcaagggattcgagaaattgaagaccagattcgtgatgtgaatggcatgttcaaagatctagctcttatggtgaaccatcaaggaaatattgtcgatgacatcagctctaaccttgacaactcacatgctgcaactacacaagccactgttcaactcagaaaagcagctaaaactcaaagatcaaactcctctttgacatgcctacttattctcatttttgggattgttctactcattgtcatcatcgttgtcttggtctaagcatcaaacatataactccaagcttcaatcttcaagcatcaagcgaatctatggaaactatacaaagacccattaaagatatatatctaatgtacagattctttatactccatcttccccattcaaccaaattgatcttaacttctcatcgtgtgaatgtttaatcaatgtattactccatcataaggatcttcatgatcaaaagaaataaacataagaaaataatctag

SEQ ID NO: 7441 - protein, 279 aa, Arabidopsis thaliana
MSFQDLEAGTRSPAPNRFTGGRQQRPSSRGDPSQEVAAGIFRISTAVNSFFRLVNSIGTPKDTLELRDKLQKTRLQISELVKNTSAKLKEASEADLHGSASQIKKIADAKLAKDFQSVLKEFQKAQRLAAEREITYTPVVTKEIPTSYNAPELDTESLRISQQQALLLQSRRQEVVFLDNEITFNEAIIEEREQGIREIEDQIRDVNGMFKDLALMVNHQGNIVDDISSNLDNSHAATTQATVQLRKAAKTQRSNSSLTCLLILIFGIVLLIVIIVVLV

SEQ ID NO: 7442 - DNA, 1605 bp, Arabidopsis thaliana
aatccttctcgcgtgactaaaaccctccccttcttctctctccgtcaaaatctgcaaaaccctaacttttcgaatcagcggcagataacgatggtgccttcctccaaagccgtcgtttttgcaaggcagatggcgaagcagattcgtgttacgacgccgtcgatgtccgcaacacgctttctctcaacgggcgacaatggtcaagtagacgagcagcagaaccctccagagcccttacccaacagacccttgcgaggggagagatcttccaactctcacagagaaccacccgctagacaagcccacaaccttggaaagagtgatactactctgtctgacgatggcttcctcgaacagttcaagcttggagtcaatcaggattcacgggaaacccccaaaccggaacaatacccgcaggagcccttaccgccgcctgaggattccgatgagatcttcaagaagatgaaggaaggaggtctcatccctaacgccgtcgccatgcttgacggcctctgcaaagatgggcttgtacaagaggccatgaagcttttcggattgatgcgtgacaagggtacaatccctgaggtcgttatctacactgctgtcgttgaggccttttgcaaggctcataaaattgaagacgctaagaggattttcaggaaaatgcagaacaatgggattgcccctaatgccttcagctacggtgtgttggttcagggattgtataattgcaacatgcttgacgatgctgttgctttctgtagtgagatgcttgagtctggtcactctcctaacgtccccactttcgttgaattggttgatgccttgtgcagagtaaagggggttgaacaagcccagtccgctattgataccttaaaccaaaaaggatttgccgttaatgttaaggctgtcaaggagttcatggataaaagggctccatttccgtctttggcttgggaagccatcttcaagaagaaaccaaccgagaaacccttctgatttacttacgcagtgctgttaagtatgccgtctcagtaagatgttttcttgacttgtaataacaaccttgaaagtgaaaatcaatatgagtcttcctttttctgcttggagtcaggtatcgagtttttttttttttcctatgtcctttaaaaatgtgtagttgtagatgtagttccctgttttcatgcattctaatattgattgcaagttcaatgaatagcgttgtgttggcggtatagggtgtcaaattatgcttgacgcttatcagtcattaccaatgatgtatgtgactgtctattgcaaatgtggccgacttcatgaacaaatatgaacaatagtatcattggttacatacaccaggcataaaactacatcatcctccaaaggcactgctgatctcagggacgtggaggtctgttctgtagaagctggcgctatattgaatacaaaatgcgtgcagtcaacattaaaatagtttttatgattcactcggagatctttacttgatttggtcggctgtattatattcgtgaactcggaagtcaaggcctgtcttgatggaagaatgactccttacttttaatatatatataaataatacactgg

SEQ ID NO: 7443 - protein, 332 aa, Arabidopsis thaliana
NPSRVTKTLPFFSLRQNLQNPNFSNQRQITMVPSSKAVVFARQMAKQIRVTTPSMSATRFLSTGDNGQVDEQQNPPEPLPNRPLRGERSSNSHREPPARQAHNLGKSDTTLSDDGFLEQFKLGVNQDSRETPKPEQYPQEPLPPPEDSDEIFKKMKEGGLIPNAVAMLDGLCKDGLVQEAMKLFGLMRDKGTIPEVVIYTAVVEAFCKAHKIEDAKRIFRKMQNNGIAPNAFSYGVLVQGLYNCNMLDDAVAFCSEMLESGHSPNVPTFVELVDALCRVKGVEQAQSAIDTLNQKGFAVNVKAVKEFMDKRAPFPSLAWEAIFKKKPTEKPF

SEQ ID NO: 7444 - protein, 302 aa, Arabidopsis thaliana
MVPSSKAVVFARQMAKQIRVTTPSMSATRFLSTGDNGQVDEQQNPPEPLPNRPLRGERSSNSHREPPARQAHNLGKSDTTLSDDGFLEQFKLGVNQDSRETPKPEQYPQEPLPPPEDSDEIFKKMKEGGLIPNAVAMLDGLCKDGLVQEAMKLFGLMRDKGTIPEVVIYTAVVEAFCKAHKIEDAKRIFRKMQNNGIAPNAFSYGVLVQGLYNCNMLDDAVAFCSEMLESGHSPNVPTFVELVDALCRVKGVEQAQSAIDTLNQKGFAVNVKAVKEFMDKRAPFPSLAWEAIFKKKPTEKPF

SEQ ID NO: 7445 - protein, 289 aa, Arabidopsis thaliana
MAKQIRVTTPSMSATRFLSTGDNGQVDEQQNPPEPLPNRPLRGERSSNSHREPPARQAHNLGKSDTTLSDDGFLEQFKLGVNQDSRETPKPEQYPQEPLPPPEDSDEIFKKMKEGGLIPNAVAMLDGLCKDGLVQEAMKLFGLMRDKGTIPEVVIYTAVVEAFCKAHKIEDAKRIFRKMQNNGIAPNAFSYGVLVQGLYNCNMLDDAVAFCSEMLESGHSPNVPTFVELVDALCRVKGVEQAQSAIDTLNQKGFAVNVKAVKEFMDKRAPFPSLAWEAIFKKKPTEKPF

SEQ ID NO: 7446 - DNA, 1224 bp, Arabidopsis thaliana
aaaagagcaaagggaacgataccattagtcccaataccaatccttgcaaaattcaaactcaaacaaaccgtttatctcacgcgccgccgtactcgccacgatccgtctttggagaccaatttatggagccgccgaagggagataccgtagtgaagactgaggtcccggtgaaggatccatcgctaagcgtcgtcgattcgaaaacgaagggagtcgaggatgcgaacactgagatagccttgtccgatgaggttgaaatcgagacgaagggaagcgattcgacaccggtgaaagctccgagtcgaacatcgtctggatcgaagaaatctgtacattggagccccgaattggtgtctggatctcaggaaccggatcagaaagctgcatcgtcttcttcggctggatctaatccgtatattgctcgttctccagctgagacttcagatgcttcgttgaaagatacgatggagactgtgaaaggagtgcttggtagatggggaaagagggttgcagaagcagcaaagaagacggagagccttgccgggaacacatggcaacacctgagaactgctccgagttttgcggatgctgcaatgggaagaattgcacagagtacaaaggtctttgcagaaggaggatatgagaagatattccgacaaacctttgagacagatcccgaagaacagttgctaaattcttttgcatgttacttgtcaacatcagctggcctagttatgggagttctatatatatccagtgccaaacttgcttactgtagtgacaaccctctctcctataaaaacggtgatcaaaccgaatggagctattacaaggtagtaattccattacatcaacttaaagcagtgaatccatcagcgagcatagtcaatcctgcagagaagtacatacaggtgatttcggtagacaatcatgagttttggttcatgggttttttaaactacgacggcgctgtcacgtctctgcaagattctttgcaagccggtgctttaaggtcggtgtgatacataactggatgactgatgaccataaaagcatgttgatctccacctcttcttgcttagtcatatcagaagactcaaatttttacattattttgcatttaatctcaatatcctatttactacagaaactagctgaattttacaaatttactttaaaatgttttatcttttgatatttttatgagaagacagcttaattgcg

SEQ ID NO: 7447 - protein, 339 aa, Arabidopsis thaliana
KSKGNDTISPNTNPCKIQTQTNRLSHAPPYSPRSVFGDQFMEPPKGDTVVKTEVPVKDPSLSVVDSKTKGVEDANTEIALSDEVEIETKGSDSTPVKAPSRTSSGSKKSVHWSPELVSGSQEPDQKAASSSSAGSNPYIARSPAETSDASLKDTMETVKGVLGRWGKRVAEAAKKTESLAGNTWQHLRTAPSFADAAMGRIAQSTKVFAEGGYEKIFRQTFETDPEEQLLNSFACYLSTSAGLVMGVLYISSAKLAYCSDNPLSYKNGDQTEWSYYKVVIPLHQLKAVNPSASIVNPAEKYIQVISVDNHEFWFMGFLNYDGAVTSLQDSLQAGALRSV

SEQ ID NO: 7448 - protein, 299 aa, Arabidopsis thaliana
MEPPKGDTVVKTEVPVKDPSLSVVDSKTKGVEDANTEIALSDEVEIETKGSDSTPVKAPSRTSSGSKKSVHWSPELVSGSQEPDQKAASSSSAGSNPYIARSPAETSDASLKDTMETVKGVLGRWGKRVAEAAKKTESLAGNTWQHLRTAPSFADAAMGRIAQSTKVFAEGGYEKIFRQTFETDPEEQLLNSFACYLSTSAGLVMGVLYISSAKLAYCSDNPLSYKNGDQTEWSYYKVVIPLHQLKAVNPSASIVNPAEKYIQVISVDNHEFWFMGFLNYDGAVTSLQDSLQAGALRSV

SEQ ID NO: 7449 - protein, 185 aa, Arabidopsis thaliana
METVKGVLGRWGKRVAEAAKKTESLAGNTWQHLRTAPSFADAAMGRIAQSTKVFAEGGYEKIFRQTFETDPEEQLLNSFACYLSTSAGLVMGVLYISSAKLAYCSDNPLSYKNGDQTEWSYYKVVIPLHQLKAVNPSASIVNPAEKYIQVISVDNHEFWFMGFLNYDGAVTSLQDSLQAGALRSV

SEQ ID NO: 7450 - DNA, 1435 bp, Arabidopsis thaliana
gccctttcattattatgtcaacaaccctcctctattgaagatttcttcaatcatcttctccacaacaaaaaaataaccctaatttacacagaaaatatgtggggaattggaggaaattactactggcgaaagaaaaacaacaacggaggagaaagcgaagcgatcgttgtggtattcgcttggatgtctagcgaagaacgcaatctaaagaaccatgtcgatctctattcttctcttctttgggattctctcgtttgccattctcaatttctcaacatgtttcttccagataaagctgcagatttagcttctaatgttgtttctgaacttgtcaaggagctcaaagcaaagccagttcctttagtgtttgcttctttctctggtggtcctaatgcttgtatgtataaagttcttcaaatacttgaaggaacatgcgaaacgggactaaatccggatgattgtagattggttagaaactgcatctcagggtttatttatgactcatgtcctgtggatttcactagcgacttgggagctcgattagcggttcatccaactacgcttaaaatgtctagtccacctaaaccgtttgtatgggcagcgaatggtattgcttcgagtctcgattatgtttttctcaacaggtttgaatcacagcgagccgagtactggcagactctttactctactataatcatgagagtaccttatctcattctatgctctgaaaacgatgaccttgctccttatcaaactatacacaatttcgctacacgtctccaagaactaggaggaaatgtaaaacttgtaaaatggaatgattcccctcattgtggtcattatcgttataaccaggtcgactataaagctgctgtatctgagttcttgtcaaaagcagcgtcggtttattcgcagaagacgagaagtcttgacagagaagctatgaaaggaacatgtcatgatgagataacagagccaattcagagcttggggcaatcaacctctggtcttaaccgaagcttcaacggaactccacttgtcacaaccgatcatttcttcgtacctagcaccgtaggttactacgtgggcagagacggcggatatgtgcaagatgaacacaaacaagatttgatttgtttgtccaatactcaaaccaatgaatcggttaagcccaatggagttctaggccaaatcttatttgatgtttatattccgaagaatgttgaggattgggatataaagctatcagaaaccgggcggtctaggcggagaccggggaagagatttatacgtagatcgagattgtaacatctgagttatatattatatataccatgagtacccatttgttttcttcagatactgttgcagaggtattccatttggttttccctcgcaaagattaataaattaataaaataagatcttttttgct

SEQ ID NO: 7451 - protein, 435 aa, Arabidopsis thaliana
ALSLLCQQPSSIEDFFNHLLHNKKITLIYTENMWGIGGNYYWRKKNNNGGESEAIVVVFAWMSSEERNLKNHVDLYSSLLWDSLVCHSQFLNMFLPDKAADLASNVVSELVKELKAKPVPLVFASFSGGPNACMYKVLQILEGTCETGLNPDDCRLVRNCISGFIYDSCPVDFTSDLGARLAVHPTTLKMSSPPKPFVWAANGIASSLDYVFLNRFESQRAEYWQTLYSTIIMRVPYLILCSENDDLAPYQTIHNFATRLQELGGNVKLVKWNDSPHCGHYRYNQVDYKAAVSEFLSKAASVYSQKTRSLDREAMKGTCHDEITEPIQSLGQSTSGLNRSFNGTPLVTTDHFFVPSTVGYYVGRDGGYVQDEHKQDLICLSNTQTNESVKPNGVLGQILFDVYIPKNVEDWDIKLSETGRSRRRPGKRFIRRSRL

SEQ ID NO: 7452 - protein, 403 aa, Arabidopsis thaliana
MWGIGGNYYWRKKNNNGGESEAIVVVFAWMSSEERNLKNHVDLYSSLLWDSLVCHSQFLNMFLPDKAADLASNVVSELVKELKAKPVPLVFASFSGGPNACMYKVLQILEGTCETGLNPDDCRLVRNCISGFIYDSCPVDFTSDLGARLAVHPTTLKMSSPPKPFVWAANGIASSLDYVFLNRFESQRAEYWQTLYSTIIMRVPYLILCSENDDLAPYQTIHNFATRLQELGGNVKLVKWNDSPHCGHYRYNQVDYKAAVSEFLSKAASVYSQKTRSLDREAMKGTCHDEITEPIQSLGQSTSGLNRSFNGTPLVTTDHFFVPSTVGYYVGRDGGYVQDEHKQDLICLSNTQTNESVKPNGVLGQILFDVYIPKNVEDWDIKLSETGRSRRRPGKRFIRRSRL

SEQ ID NO: 7453 - protein, 374 aa, Arabidopsis thaliana
MSSEERNLKNHVDLYSSLLWDSLVCHSQFLNMFLPDKAADLASNVVSELVKELKAKPVPLVFASFSGGPNACMYKVLQILEGTCETGLNPDDCRLVRNCISGFIYDSCPVDFTSDLGARLAVHPTTLKMSSPPKPFVWAANGIASSLDYVFLNRFESQRAEYWQTLYSTIIMRVPYLILCSENDDLAPYQTIHNFATRLQELGGNVKLVKWNDSPHCGHYRYNQVDYKAAVSEFLSKAASVYSQKTRSLDREAMKGTCHDEITEPIQSLGQSTSGLNRSFNGTPLVTTDHFFVPSTVGYYVGRDGGYVQDEHKQDLICLSNTQTNESVKPNGVLGQILFDVYIPKNVEDWDIKLSETGRSRRRPGKRFIRRSRL

SEQ ID NO: 7454 - DNA, 1244 bp, Arabidopsis thaliana
aacaagagaacaacacggagaacaaagctgagatttttcgaaaacacacaccctgaattgattgtgttcgtggatctaccaatgataagattatcacctggatttgcaatcaatcctcgttttcgatccgattcctttgtcaattcccagaaaccgccttttctctccgtccaaatcgggtcacagcggaggaatctctctagaatcggatcggagaacggcgacggcgtcgctttcgatgctgtagcttatgaggctgatcggttgagcctcgacgcggcggcgatggaggatatggcggagactgcaaagaaggaactagaatcggatccagatagtgacccgagagcgtggaaatgggttatccgaaagaagatgtgggatctcatggaagctcggtactacgctatgagccctagacctgttcatcatcgaatccctaatttcgtcggtgcatcggctgctgcaagaaaattagccgagcttgatgcttttcgtatggctatggtcgtgaaggttaatcccgattcgcctcaaaagcaaatcaggtttcttacactttctggtgaaaagaagctgttgactcctcaaccgaggctaagaacaggattcttctctgtactagaatctgatttgttgaaacccgaaacgatcatggaggcttgcacttctgtaggagtagccaaatatggaagagcgattggccttgatgagaaaatcaaagtggatctcattgtcattggctctgttgcggttaacccacaaacgggtgttcgattagggaaaggagagggttttgcggaactcgaatatggaatgttgcgttacatgggagccattgatgattccacacccgttgttacaactgtacatgattgtcagcttgtagatgatatacctctcgagaaactggcgattcacgatgttcctgtggatatcatatgcactcctactcgagtcattttcacaaacacaccaataccaaaaccacaaggaatttattgggacaaactgtcgccggagaagctacgacagattcgaatactaagagagctaaagaatcgactggaaaagaagactggccgtaaacttccgactggaccatctgagaaattacctcctacggctgagcgaaaacgccggtaacttaaccgcctgttttttaccggtttgttttcggttactgtattatacgagaaaacaaaagatatgtatattaagcaaataaataattggtgatttcg

SEQ ID NO: 7455 - protein, 381 aa, Arabidopsis thaliana
NKRTTRRTKLRFFENTHPELIVFVDLPMIRLSPGFAINPRFRSDSFVNSQKPPFLSVQIGSQRRNLSRIGSENGDGVAFDAVAYEADRLSLDAAAMEDMAETAKKELESDPDSDPRAWKWVIRKKMWDLMEARYYAMSPRPVHHRIPNFVGASAAARKLAELDAFRMAMVVKVNPDSPQKQIRFLTLSGEKKLLTPQPRLRTGFFSVLESDLLKPETIMEACTSVGVAKYGRAIGLDEKIKVDLIVIGSVAVNPQTGVRLGKGEGFAELEYGMLRYMGAIDDSTPVVTTVHDCQLVDDIPLEKLAIHDVPVDIICTPTRVIFTNTPIPKPQGIYWDKLSPEKLRQIRILRELKNRLEKKTGRKLPTGPSEKLPPTAERKRR

SEQ ID NO: 7456 - protein, 354 aa, Arabidopsis thaliana
MIRLSPGFAINPRFRSDSFVNSQKPPFLSVQIGSQRRNLSRIGSENGDGVAFDAVAYEADRLSLDAAAMEDMAETAKKELESDPDSDPRAWKWVIRKKMWDLMEARYYAMSPRPVHHRIPNFVGASAAARKLAELDAFRMAMVVKVNPDSPQKQIRFLTLSGEKKLLTPQPRLRTGFFSVLESDLLKPETIMEACTSVGVAKYGRAIGLDEKIKVDLIVIGSVAVNPQTGVRLGKGEGFAELEYGMLRYMGAIDDSTPVVTTVHDCQLVDDIPLEKLAIHDVPVDIICTPTRVIFTNTPIPKPQGIYWDKLSPEKLRQIRILRELKNRLEKKTGRKLPTGPSEKLPPTAERKRR

SEQ ID NO: 7457 - protein, 286 aa, Arabidopsis thaliana
MEDMAETAKKELESDPDSDPRAWKWVIRKKMWDLMEARYYAMSPRPVHHRIPNFVGASAAARKLAELDAFRMAMVVKVNPDSPQKQIRFLTLSGEKKLLTPQPRLRTGFFSVLESDLLKPETIMEACTSVGVAKYGRAIGLDEKIKVDLIVIGSVAVNPQTGVRLGKGEGFAELEYGMLRYMGAIDDSTPVVTTVHDCQLVDDIPLEKLAIHDVPVDIICTPTRVIFTNTPIPKPQGIYWDKLSPEKLRQIRILRELKNRLEKKTGRKLPTGPSEKLPPTAERKRR

SEQ ID NO: 7458 - DNA, 1441 bp, Arabidopsis thaliana
aaaacctagtcaggcccgtgtaagatggagatttgttctaaagatttatcaaatcaataactactaacctaagcaagtaagcgaagccgtggctctcacaaattagcccaaatcctcaattttcaccgaaagtcttcgaatttattctccagtatcagtttctctgggaaaaagttctacttttgcggactcttgaggaaatcttttttatctgtatatcattcatgggttaatccgattaaacccgtgttgctccgttaggatttaagagaattgctgtcttcaccggtcatggctgcaaaacttgtgtcctcctcgacttcttcttctttggttccatccattttctcaccgtttcaacctcggagttcttttcagtttcgttcaccgagggttcagcctgctcatctccattgttacccttctctgcaccttcaaactgataaaattggctctcttcacatttcctcaagaggccaaaaaccaagcgaagtctcccgaaagagaacttatttgcctcttgctacttcagaagaaaagttccactacactgaagatacaactaatgatccagacacagtaagtccccaaattggcaccgaagctacacctcgagatgatgattcaactatccaatacaatagaaatgacgggaaaccgggtttcatttcgttttacaatcctcggaataaaactgaggatatcattatcccccctgaaactcaaagtccatggggacgcctgctctggctcattggtcctgcagtcttagtctcctctttcattttacctccagtttacttacgaagaatagtctcagcagtttttgaagattctttgctcacagacttcctcatcctgttcttcaccgaggctctcttctactgcggagtcgctgcatttcttctgataatagaccgctcaagaaaaggatccggaaaagttccccagaaccgaatcaatccttctcagttaggacaaagaatctcctctgtagcaacattagtgctgagtctcatgattccaatggtgacaatgggattcgtctggccatggactggacctgcagcatcagctactcttgcaccatacctcgttggtatcgttgttcagtttgcattcgaacagtacgcaagatatcgtaactctccatcatctcctatcatccccatcatctttcaggtatacagacttcatcagctgaaccgagcggcgcaactagtaacagcattgtcatttacggttaaaggagcagaggcaacagttaataatctggcaatcaagaaatcactgggcacacttttgaatgtgatacaggttttgggtgtgatttcaatctggtctatatctagcttcctcatgtggttatcatcaccttcccaaaaccagtcttgatgtatgaaaacatctttcttattattattacagagaagagaataac

SEQ ID NO: 7459 - protein, 367 aa, Arabidopsis thaliana
MAAKLVSSSTSSSLVPSIFSPFQPRSSFQFRSPRVQPAHLHCYPSLHLQTDKIGSLHISSRGQKPSEVSRKRTYLPLATSEEKFHYTEDTTNDPDTVSPQIGTEATPRDDDSTIQYNRNDGKPGFISFYNPRNKTEDIIIPPETQSPWGRLLWLIGPAVLVSSFILPPVYLRRIVSAVFEDSLLTDFLILFFTEALFYCGVAAFLLIIDRSRKGSGKVPQNRINPSQLGQRISSVATLVLSLMIPMVTMGFVWPWTGPAASATLAPYLVGIVVQFAFEQYARYRNSPSSPIIPIIFQVYRLHQLNRAAQLVTALSFTVKGAEATVNNLAIKKSLGTLLNVIQVLGVISIWSISSFLMWLSSPSQNQS

SEQ ID NO: 7460 - DNA, 1636 bp, Arabidopsis thaliana
ataattacttgtgattcttatttgtcttcttcaatatggcgagaagttctgttttgctatgtttaattctattggttacgttaggagttgtgataagtgtcacatttgccgacaacgttgaattgaaatcaaaagatctagagagcagtaagaaagataagaaggttgatcatgatagtacacacaaagagaagggaggtgaaaaggtagatggtgccggttctgatgatgaagacaacgataaaaaagaaaaaaagaaagagcatgatgtgcaaaaaaaggataaacaacatgaaaacaaagacaaggatgacgagaagaagcatgttgataagaagaagagcggtggtcatgataaagatgatgatgatgaaaagaagcacaaggataaaaagaaggatggacacaatgatgatgatgatagtgatgatgatacggatgatgacgatgacgatgatgatgatgatgatgatgatgatgaagttgatggagatgataatgagaaggagaaaattgggttatacgagctcaagaagggaaatctaactgtcaaattcacaaattggggtgcttcaatcatatctctccatttcccagacaaaaatggtaaaatggacgatattgttcttggctatgatagcgtcaaaacctacaagaccgacaaggtttatttcggagcaaccgttggccgagtagcaaatagaataggaaagggcaaattcaagttgaatggtaaagagtacaagacaagtgtcaacgatggaaaaaacacactccatggtggcaagaaagggtttggggatgttgtgtgggcagttgcaaaacaccagtacgatggcaagaaaccacacattgtcttcactcacacaagtcctgacggcgatcaagggtttccgggagaactcagtgtcacggtgacatataaacttgtcaaagacaatgaattgagtgtggtgatggaggcaaagcctaaggataaagcaactccggtgaacttagctcatcatagttattggaatcttggtggtcataattccggagatattttgtctgaagaaattcaaatcctcggctcgggttatacccccgtcgacggtgagctcattcccaccgggaaaatcaatccggtgaaaggaacagcatacgattttctccaactccgtcctattaaagataatatgaaggatcttaaaacaggatatgatataaattattgcttagatggtaaggcaaaaaagatgagaaaaatagttgaactcgtagataagaaatcagggaggaaaatggagttatccggaaaccaagcgggtttgcaattctataccggagggatgttaaaggatgtcaaagggaagaatggggcagtttaccaagctttcgggggattatgtttagaaacacaaagttatccagacgcattgaaccatcccaaatttccttcacagattgtcgagccagggaaaaaatacaaacacactatgctcttcaagttttctattgtttcatagattgttttagatgttgttacatgaacacccttggaaccatgtccaatgttcatgaacaagaaactaaatacattgtaatattttgtaacaatgcttaaattatcaaattatataaacctaacgtgaac

SEQ ID NO: 7461 - protein, 490 aa, Arabidopsis thaliana
MARSSVLLCLILLVTLGVVISVTFADNVELKSKDLESSKKDKKVDHDSTHKEKGGEKVDGAGSDDEDNDKKEKKKEHDVQKKDKQHENKDKDDEKKHVDKKKSGGHDKDDDDEKKHKDKKKDGHNDDDDSDDDTDDDDDDDDDDDDDDEVDGDDNEKEKIGLYELKKGNLTVKFTNWGASIISLHFPDKNGKMDDIVLGYDSVKTYKTDKVYFGATVGRVANRIGKGKFKLNGKEYKTSVNDGKNTLHGGKKGFGDVVWAVAKHQYDGKKPHIVFTHTSPDGDQGFPGELSVTVTYKLVKDNELSVVMEAKPKDKATPVNLAHHSYWNLGGHNSGDILSEEIQILGSGYTPVDGELIPTGKINPVKGTAYDFLQLRPIKDNMKDLKTGYDINYCLDGKAKKMRKIVELVDKKSGRKMELSGNQAGLQFYTGGMLKDVKGKNGAVYQAFGGLCLETQSYPDALNHPKFPSQIVEPGKKYKHTMLFKFSIVS

SEQ ID NO: 7462 - protein, 298 aa, Arabidopsis thaliana
MDDIVLGYDSVKTYKTDKVYFGATVGRVANRIGKGKFKLNGKEYKTSVNDGKNTLHGGKKGFGDVVWAVAKHQYDGKKPHIVFTHTSPDGDQGFPGELSVTVTYKLVKDNELSVVMEAKPKDKATPVNLAHHSYWNLGGHNSGDILSEEIQILGSGYTPVDGELIPTGKINPVKGTAYDFLQLRPIKDNMKDLKTGYDINYCLDGKAKKMRKIVELVDKKSGRKMELSGNQAGLQFYTGGMLKDVKGKNGAVYQAFGGLCLETQSYPDALNHPKFPSQIVEPGKKYKHTMLFKFSIVS

SEQ ID NO: 7463 - DNA, 1576 bp, Arabidopsis thaliana
aaaaaaaacgaactgagaagcgaagaagaaaatggcggcagcggccatggccgttcatctcccgaaacattcttcgtttcttccgaaacccaaacttccattggataaaaaaaccaactttctcggtgggtcatttaatttaggtcgacccatgtccgtaaaccgggaatttaacagtccggtgatggtctccgcttcttcgacgagcaagaccgtccttaccgatgacgtagacggcgatcaaagtaaacgcttttatattaacttcactggctttccttttcctcttggtcctttccttaaccggcgcaccatcagaaccgaggcggttaaaggttgcatatggatgtttgaacaagaacaagctttagggtttagcagcgtgtccactaatatacgaatgactgtcatcaaactaaaatctggaggtttatgggttcatgctcctattgctcccaccaaagagtgtgtccagcttattaaggagttgggagctccggttgagtacattgtcctgccaacgtttgcttatgagcacaagatttttgtcggtcctttttctagaaagttccccaaggctcaagtatgggttgcaccaagacaatggagctggccattgaacttaccacttgagtttttcggtatctttcgtgctaaaatcatcaaagacagggacttatctacgccatgggctgaggagatcgaacagaaagtcctaagctccccagaagttggaattggaccatatgtcgaagtagcgttctaccataagcggtcaagaacccttttagtcactgatgctgtgatcttcgtcccgcggaaacctccctcgagtatcagcaacgaatccttgttggcctcggctaagaatggactagctgtgaagatacttagcaaaggaaaagacattcctaatgatcctgtggttgataatcctaacacccgccaaaaaggatgggaaagaatggttctgcaaatcctatttcttggtccctcgaatctcttggaaccaaacgcaagcttcgcacgaatgtcacagaagctgatcgtttctcccattgtaaagactttggtctttagcaaagtccctgagaaggtgagggattggatcgatgagatagcccgtgactggagatttaaaaggattatcccagctcatttcgaagctccaataaacgcaggaagatcagattttctagctgcgtttgggttcctagaggatcttctaggggaaagatatgtaactcgtccttcgctctctcttctcttcacttcactaatgggaaaagctgcgagctattttcctccagacgatatgagaactctctcttcacttgatcagttcttagtctctgttggggctgtgaaaaagacagtatccggtagaaaacgaagatgatggcaaaacagaaaaatggaagatacagctttaatagtcttaaagaatatcgaaaggccttgtaatgaaggatatatatagccagaaacaagtaaaagcttccatgttggataaagcattgtatttactaaagttttgcagacattgcctccaaccagaggcgatcgcattgatgat

SEQ ID NO: 7464 - protein, 455 aa, Arabidopsis thaliana
MAAAAMAVHLPKHSSFLPKPKLPLDKKTNFLGGSFNLGRPMSVNREFNSPVMVSASSTSKTVLTDDVDGDQSKRFYINFTGFPFPLGPFLNRRTIRTEAVKGCIWMFEQEQALGFSSVSTNIRMTVIKLKSGGLWVHAPIAPTKECVQLIKELGAPVEYIVLPTFAYEHKIFVGPFSRKFPKAQVWVAPRQWSWPLNLPLEFFGIFRAKIIKDRDLSTPWAEEIEQKVLSSPEVGIGPYVEVAFYHKRSRTLLVTDAVIFVPRKPPSSISNESLLASAKNGLAVKILSKGKDIPNDPVVDNPNTRQKGWERMVLQILFLGPSNLLEPNASFARMSQKLIVSPIVKTLVFSKVPEKVRDWIDEIARDWRFKRIIPAHFEAPINAGRSDFLAAFGFLEDLLGERYVTRPSLSLLFTSLMGKAASYFPPDDMRTLSSLDQFLVSVGAVKKTVSGRKRR

SEQ ID NO: 7465 - protein, 450 aa, Arabidopsis thaliana
MAVHLPKHSSFLPKPKLPLDKKTNFLGGSFNLGRPMSVNREFNSPVMVSASSTSKTVLTDDVDGDQSKRFYINFTGFPFPLGPFLNRRTIRTEAVKGCIWMFEQEQALGFSSVSTNIRMTVIKLKSGGLWVHAPIAPTKECVQLIKELGAPVEYIVLPTFAYEHKIFVGPFSRKFPKAQVWVAPRQWSWPLNLPLEFFGIFRAKIIKDRDLSTPWAEEIEQKVLSSPEVGIGPYVEVAFYHKRSRTLLVTDAVIFVPRKPPSSISNESLLASAKNGLAVKILSKGKDIPNDPVVDNPNTRQKGWERMVLQILFLGPSNLLEPNASFARMSQKLIVSPIVKTLVFSKVPEKVRDWIDEIARDWRFKRIIPAHFEAPINAGRSDFLAAFGFLEDLLGERYVTRPSLSLLFTSLMGKAASYFPPDDMRTLSSLDQFLVSVGAVKKTVSGRKRR

SEQ ID NO: 7466 - protein, 415 aa, Arabidopsis thaliana
MSVNREFNSPVMVSASSTSKTVLTDDVDGDQSKRFYINFTGFPFPLGPFLNRRTIRTEAVKGCIWMFEQEQALGFSSVSTNIRMTVIKLKSGGLWVHAPIAPTKECVQLIKELGAPVEYIVLPTFAYEHKIFVGPFSRKFPKAQVWVAPRQWSWPLNLPLEFFGIFRAKIIKDRDLSTPWAEEIEQKVLSSPEVGIGPYVEVAFYHKRSRTLLVTDAVIFVPRKPPSSISNESLLASAKNGLAVKILSKGKDIPNDPVVDNPNTRQKGWERMVLQILFLGPSNLLEPNASFARMSQKLIVSPIVKTLVFSKVPEKVRDWIDEIARDWRFKRIIPAHFEAPINAGRSDFLAAFGFLEDLLGERYVTRPSLSLLFTSLMGKAASYFPPDDMRTLSSLDQFLVSVGAVKKTVSGRKRR

SEQ ID NO: 7467 - DNA, 1272 bp, Arabidopsis thaliana
aatttatatatgagtatcgaattccaattgcggaagaaaggagaaaataatctccggtttgagctgcgtcgacgagatctatcgtcaggatctcagatttgttgttacactcttgctcaagtctggagacatgagttctccgggaacgagtatgttcaccaatttcactaagctctgcaaaggacttgccctggtacttgtggtgggacacctcgtggttcagttcattcccgctaccgtcccataccttgctctgattccggcgaggactattccttttgcctggaatctgataacaagcggctattttgaactctcagtatatggggttgtcttcagcaccgtttctctcctttttatgggaaagttcctggaacctgtctggggttccacggagttccttaagttcatctttgtggtgaacttccttacgtatctctgtgttttcgttacagccattgccttatactacataacgaggctggaagtttacctatatatgccctttgctggttttcatggtgtcttggcaggccttcttgtagggataaagcagataatacctgaccaggagatattgctgttaaagataaaagcaaagtggttgccctcaattatgctaattttgtcaatagcctcaagcttcttcacactagattcagcagcatatcttcccactttgatatttggtacatatatgggctggttatacctcaggtacctacagaggagaccagaaacaaagctcagaggtgatccaagtgatgactttgccttctctactttctttcctgaacttctcaggccagtaattgaccccattgccttaatctttcaccggatgctttgtggaagatcaaatgccaccagtgaagaccatgattattctaccagtggtgcaccattgccaggttctgattctgctgaagcatccaggaggagagaaagaggggcaagagctctagaggagagactaggaacggaaagattggttcctgcaaggaacaaagatgaattgcagagtgatggtttagataacgtataagtggagattgcgataagcattttgaagaagctgttgttggttcttacttgtgttcatgtggacagtttttttttgttttttttttttgttaatgaaattggcgtttatacagaatcagcttcgtaaattcctttgacagctcagaaaggtagtacatttccttggacaaaccaccaattagaaacaattttcttggacgagaggatataaaagtagttatacatgtt

SEQ ID NO: 7468 - protein, 304 aa, Arabidopsis thaliana
MSSPGTSMFTNFTKLCKGLALVLVVGHLVVQFIPATVPYLALIPARTIPFAWNLITSGYFELSVYGVVFSTVSLLFMGKFLEPVWGSTEFLKFIFVVNFLTYLCVFVTAIALYYITRLEVYLYMPFAGFHGVLAGLLVGIKQIIPDQEILLLKIKAKWLPSIMLILSIASSFFTLDSAAYLPTLIFGTYMGWLYLRYLQRRPETKLRGDPSDDFAFSTFFPELLRPVIDPIALIFHRMLCGRSNATSEDHDYSTSGAPLPGSDSAEASRRRERGARALEERLGTERLVPARNKDELQSDGLDNV

SEQ ID NO: 7469 - protein, 297 aa, Arabidopsis thaliana
MFTNFTKLCKGLALVLVVGHLVVQFIPATVPYLALIPARTIPFAWNLITSGYFELSVYGVVFSTVSLLFMGKFLEPVWGSTEFLKFIFVVNFLTYLCVFVTAIALYYITRLEVYLYMPFAGFHGVLAGLLVGIKQIIPDQEILLLKIKAKWLPSIMLILSIASSFFTLDSAAYLPTLIFGTYMGWLYLRYLQRRPETKLRGDPSDDFAFSTFFPELLRPVIDPIALIFHRMLCGRSNATSEDHDYSTSGAPLPGSDSAEASRRRERGARALEERLGTERLVPARNKDELQSDGLDNV

SEQ ID NO: 7470 - protein, 228 aa, Arabidopsis thaliana
MGKFLEPVWGSTEFLKFIFVVNFLTYLCVFVTAIALYYITRLEVYLYMPFAGFHGVLAGLLVGIKQIIPDQEILLLKIKAKWLPSIMLILSIASSFFTLDSAAYLPTLIFGTYMGWLYLRYLQRRPETKLRGDPSDDFAFSTFFPELLRPVIDPIALIFHRMLCGRSNATSEDHDYSTSGAPLPGSDSAEASRRRERGARALEERLGTERLVPARNKDELQSDGLDNV

SEQ ID NO: 7471 - DNA, 1414 bp, Arabidopsis thaliana
aaaaaaaaaaaaaaaaataagatagaaactcactcctgacctctcgcatggcgtctctagactctctagtcatctttcttttttctactctttttgtcactatcgtgagctcggaaacgccgtgcccgaatttcaagtcgatcatcagtttcggcgattcgattgcggacacgggaaacttggttggtctctctgatcgtaaccagcttcctgtgactgcgtttccaccgtacggagaaaccttcttccaccacccaaccggtcgttcctgcgatggccgcatcatcatggactttatcgctgaatttgtggggcttccttatgtgcctccgtactttggatctaaaaatagaaactttgataagggtgttaatttcgcggtagccggagcaacggcactgaaaagttcctttcttaagaagagaggaattcaaccacacaccaacgttagtttaggagttcagctaaagagcttcaaaaagagtttaccaaatttatgcggctcaccatcagactgtagagatatgattggaaatgctttgattctcatgggagagattggagggaatgattataatttcccattcttcaaccgcaaacccgttaaggaagttgaagagctggttccatttgtaatcgcttctatttcttctacaataacggagttgattggtatggggggtaaaacctttctagtgcccggagagttccctatcggatgctcagtagtctatttgacattatacaaaacatcaaacaaggacgaatacgatccttcaacaggatgtttgaaatggttgaacaagtttggcgaataccatagcgagaaacttaaggtggaactcaacagacttaggaagctctaccctcatgtcaacatcatatacgctgactactacaactctctcttgcgcatttttaaagaaccagccaaattcgggttcatggaaagacccttccctgcttgttgcggtataggaggaccgtacaacttcaacttcactaggaaatgtgggagtgtaggagtgaaatcttgtaaggatccttcaaagtatgtgggctgggatggcgttcatatgactgaggctgcatacaaatggatagctgatggaatactcaatggaccatatgcgaatcctccttttgatcggtcctgcctcagatctgagattaagaaggagtcattgtacaatcaaagtactctgacacaagcttgtgtgaaactttgacagacaaaagtgatgataagaatattccctctattccttattaatccaaattcaagcaaacaaatttgttgcaaaaaagatatgtttctaggtttctatgtatttttttattacttattgatgatgaattgtagaccttaattttctttttcttttttacttttattggtttaaatttgttaacc

SEQ ID NO: 7472 - protein, 393 aa, Arabidopsis thaliana
MASLDSLVIFLFSTLFVTIVSSETPCPNFKSIISFGDSIADTGNLVGLSDRNQLPVTAFPPYGETFFHHPTGRSCDGRIIMDFIAEFVGLPYVPPYFGSKNRNFDKGVNFAVAGATALKSSFLKKRGIQPHTNVSLGVQLKSFKKSLPNLCGSPSDCRDMIGNALILMGEIGGNDYNFPFFNRKPVKEVEELVPFVIASISSTITELIGMGGKTFLVPGEFPIGCSVVYLTLYKTSNKDEYDPSTGCLKWLNKFGEYHSEKLKVELNRLRKLYPHVNIIYADYYNSLLRIFKEPAKFGFMERPFPACCGIGGPYNFNFTRKCGSVGVKSCKDPSKYVGWDGVHMTEAAYKWIADGILNGPYANPPFDRSCLRSEIKKESLYNQSTLTQACVKL

SEQ ID NO: 7473 - protein, 313 aa, Arabidopsis thaliana
MDFIAEFVGLPYVPPYFGSKNRNFDKGVNFAVAGATALKSSFLKKRGIQPHTNVSLGVQLKSFKKSLPNLCGSPSDCRDMIGNALILMGEIGGNDYNFPFFNRKPVKEVEELVPFVIASISSTITELIGMGGKTFLVPGEFPIGCSVVYLTLYKTSNKDEYDPSTGCLKWLNKFGEYHSEKLKVELNRLRKLYPHVNIIYADYYNSLLRIFKEPAKFGFMERPFPACCGIGGPYNFNFTRKCGSVGVKSCKDPSKYVGWDGVHMTEAAYKWIADGILNGPYANPPFDRSCLRSEIKKESLYNQSTLTQACVKL

SEQ ID NO: 7474 - protein, 234 aa, Arabidopsis thaliana
MIGNALILMGEIGGNDYNFPFFNRKPVKEVEELVPFVIASISSTITELIGMGGKTFLVPGEFPIGCSVVYLTLYKTSNKDEYDPSTGCLKWLNKFGEYHSEKLKVELNRLRKLYPHVNIIYADYYNSLLRIFKEPAKFGFMERPFPACCGIGGPYNFNFTRKCGSVGVKSCKDPSKYVGWDGVHMTEAAYKWIADGILNGPYANPPFDRSCLRSEIKKESLYNQSTLTQACVKL

SEQ ID NO: 7475 - DNA, 1326 bp, Arabidopsis thaliana
atcatcatcatcatcatcatcctttctttatccaactttcttcaccaaatcgattcttcttcaaccatgtcttccttcacctccaaattcgccgatgagctgattgctaacgctgcttacatcggaacacctggaaaaggtatccttgcggcagatgaatcaactggtactattgggaaacgtctcgctagcatcaacgttgagaacgttgaatccaacagacgtgctcttcgtgagcttctcttcactactcctggagctcttccttgcctcagtggtgttatcctctttgaagaaactctttaccagaagagctctgatggtacgccttttgttgatatgttgaagagtgcaggagttttgcctggtattaaggttgataagggtaccgttgagcttgctggaaccaatggtgagactactactcaaggtcttgatggtcttggtgaccgttgcaagaaatactacgaggctggtgctcgtttcgccaagtggcgtgcggttcttaagattggtgttaatgagccatctcagttagctatccatgagaacgcttatggattggctaggtatgctgtcatttgtcaggagaacggtcttgtgccgattgtggagcctgagattcttgttgatggctctcatgacattcagaagtgtgccgcggtgacagagcgtgttcttgcagcttgctacaaggctctgagtgatcaccatgtcttgctagaaggaacactcttgaaacctaacatggttactccaggatcagagagtgcgaaggttgcaccagaggtgattgctgagcacactgtccgtgctcttcagaggacagttccagctgctgttccagccatagtgttcttgtctggtggacagagcgaggaagaggcgacaagaaaccttaacgcgatgaaccagttgaagacaaagaagccttggtcgttgtctttctcctttggaagggcgttgcagcagagcactttgaagacttggggaggaaaagaggagaatgtgaagaaggctcaagaagcgttcttggtcagatgcaaagctaactctgaagcaacacttggtgcttacaagggtgatgctaagctcggtgaaggtgcagctgagagccttcacgttaaggattacaagtactgaagaaagaggctgaggatcgtagtttttatatcatcgtttatgttcttgctttcactttctctgttttttgtttggtgttttgtttagaagagtggtggcaccaaagaaccccgtttatacttttttatgaggtctttgtgttcttatgaagcctttttaaaaatgaatattagcttgttgggc

SEQ ID NO: 7476 - protein, 380 aa, Arabidopsis thaliana
IIIIIIILSLSNFLHQIDSSSTMSSFTSKFADELIANAAYIGTPGKGILAADESTGTIGKRLASINVENVESNRRALRELLFTTPGALPCLSGVILFEETLYQKSSDGTPFVDMLKSAGVLPGIKVDKGTVELAGTNGETTTQGLDGLGDRCKKYYEAGARFAKWRAVLKIGVNEPSQLAIHENAYGLARYAVICQENGLVPIVEPEILVDGSHDIQKCAAVTERVLAACYKALSDHHVLLEGTLLKPNMVTPGSESAKVAPEVIAEHTVRALQRTVPAAVPAIVFLSGGQSEEEATRNLNAMNQLKTKKPWSLSFSFGRALQQSTLKTWGGKEENVKKAQEAFLVRCKANSEATLGAYKGDAKLGEGAAESLHVKDYKY

SEQ ID NO: 7477 - protein, 358 aa, Arabidopsis thaliana
MSSFTSKFADELIANAAYIGTPGKGILAADESTGTIGKRLASINVENVESNRRALRELLFTTPGALPCLSGVILFEETLYQKSSDGTPFVDMLKSAGVLPGIKVDKGTVELAGTNGETTTQGLDGLGDRCKKYYEAGARFAKWRAVLKIGVNEPSQLAIHENAYGLARYAVICQENGLVPIVEPEILVDGSHDIQKCAAVTERVLAACYKALSDHHVLLEGTLLKPNMVTPGSESAKVAPEVIAEHTVRALQRTVPAAVPAIVFLSGGQSEEEATRNLNAMNQLKTKKPWSLSFSFGRALQQSTLKTWGGKEENVKKAQEAFLVRCKANSEATLGAYKGDAKLGEGAAESLHVKDYKY

SEQ ID NO: 7478 - protein, 267 aa, Arabidopsis thaliana
MLKSAGVLPGIKVDKGTVELAGTNGETTTQGLDGLGDRCKKYYEAGARFAKWRAVLKIGVNEPSQLAIHENAYGLARYAVICQENGLVPIVEPEILVDGSHDIQKCAAVTERVLAACYKALSDHHVLLEGTLLKPNMVTPGSESAKVAPEVIAEHTVRALQRTVPAAVPAIVFLSGGQSEEEATRNLNAMNQLKTKKPWSLSFSFGRALQQSTLKTWGGKEENVKKAQEAFLVRCKANSEATLGAYKGDAKLGEGAAESLHVKDYKY

SEQ ID NO: 7479 - DNA, 1742 bp, Arabidopsis thaliana
agagagagaactagtctgtgtcttttttttttttttttggtgataattgaaacatatgaaacaatcgtcgtcatagaagcagcagagattcaccttctttctttatctttccctctcagaaacaggaaacaaaattcaaaaagaacaaaaaaaaaaggtcaaaccaaaaacgatggcgtttcatcacaatcatctctctcaagacctctccttcaatcatttcaccgaccaacaccaacctccacctccgcaaccgcctcctcctcctccgcaacagcaacaacatttccaagaagcaccgcctcctaattggttaaacacagcgcttcttcgttcctcagataacaacaataacttcctcaacctccacacagccaccgctaacaccacaaccgcaagcagctccgattctccttcctccgccgccgccgccgccgctgctaaccagtggctatctcgctcctcctctttcctccaacgaaacaacaacaacaacgcttccatagtcggagatgggatcgatgatgtcaccggaggagcagacactatgattcagggagagatgaaaaccggcggtggagaaaacaaaaacgacggcggaggagctacggcggcggatggagtagtgagctggcagaatgcgagacacaaggcggagatcctttcgcatcctctttacgagcagcttttgtcggcgcacgttgcttgtttgagaatcgcgactccggttgatcagcttccgagaatcgatgctcagcttgctcagtctcaacacgtcgtcgctaaatactcagctttaggcgccgccgctcaaggtctcgtcggcgacgataaagaacttgaccagttcatgacacattatgtgttgctactgtgttcatttaaagagcaattgcaacaacatgtgcgtgttcatgcaatggaagctgtgatggcttgttgggagattgagcagtctcttcaaagcttaacaggagtgtctcctggagaagggatgggagcaacaatgtctgacgatgaagatgaacaagtagagagtgatgctaatatgttcgatgggggattagatgtgttgggttttggtcctttgattcctactgagagtgagaggtcgttgatggaaagagttagacaagaacttaaacatgaactcaaacagggttacaaggagaagatagtagacataagagaggagatattaaggaagagaagagctgggaagttaccaggagataccacctctgttctcaaagcttggtggcaatctcattccaaatggccttaccctactgaggaagataaggcgaggttggtgcaagagacaggtttgcagctaaaacagataaacaattggttcatcaatcagagaaagaggaactggcatagcaatccatcttcttccactgtattgaagaacaaacgcaaaagcaatgcaggtgacaatagcggaagagagcggttcgcgtagaaacaacaaacatatgatgtgaattggggaggtggaagatgggatttgaaagcagggttttagggatttaaagttgagaattttatggaggagtttggattatacagagagaggggacagtattagaaagtaactttttgtgcaattacatagtaacgtagtttggttatgtgattatgcccatatattttattaagtagcacacaaaccaaaaagaaaatatgaaaactgaagatgcaggcttttgtttaatgttttttgtttgtttgtctgc

SEQ ID NO: 7480 - protein, 431 aa, Arabidopsis thaliana
MAFHHNHLSQDLSFNHFTDQHQPPPPQPPPPPPQQQQHFQEAPPPNWLNTALLRSSDNNNNFLNLHTATANTTTASSSDSPSSAAAAAAANQWLSRSSSFLQRNNNNNASIVGDGIDDVTGGADTMIQGEMKTGGGENKNDGGGATAADGVVSWQNARHKAEILSHPLYEQLLSAHVACLRIATPVDQLPRIDAQLAQSQHVVAKYSALGAAAQGLVGDDKELDQFMTHYVLLLCSFKEQLQQHVRVHAMEAVMACWEIEQSLQSLTGVSPGEGMGATMSDDEDEQVESDANMFDGGLDVLGFGPLIPTESERSLMERVRQELKHELKQGYKEKIVDIREEILRKRRAGKLPGDTTSVLKAWWQSHSKWPYPTEEDKARLVQETGLQLKQINNWFINQRKRNWHSNPSSSTVLKNKRKSNAGDNSGRERFA

SEQ ID NO: 7481 - protein, 306 aa, Arabidopsis thaliana
MIQGEMKTGGGENKNDGGGATAADGVVSWQNARHKAEILSHPLYEQLLSAHVACLRIATPVDQLPRIDAQLAQSQHVVAKYSALGAAAQGLVGDDKELDQFMTHYVLLLCSFKEQLQQHVRVHAMEAVMACWEIEQSLQSLTGVSPGEGMGATMSDDEDEQVESDANMFDGGLDVLGFGPLIPTESERSLMERVRQELKHELKQGYKEKIVDIREEILRKRRAGKLPGDTTSVLKAWWQSHSKWPYPTEEDKARLVQETGLQLKQINNWFINQRKRNWHSNPSSSTVLKNKRKSNAGDNSGRERFA

SEQ ID NO: 7482 - protein, 301 aa, Arabidopsis thaliana
MKTGGGENKNDGGGATAADGVVSWQNARHKAEILSHPLYEQLLSAHVACLRIATPVDQLPRIDAQLAQSQHVVAKYSALGAAAQGLVGDDKELDQFMTHYVLLLCSFKEQLQQHVRVHAMEAVMACWEIEQSLQSLTGVSPGEGMGATMSDDEDEQVESDANMFDGGLDVLGFGPLIPTESERSLMERVRQELKHELKQGYKEKIVDIREEILRKRRAGKLPGDTTSVLKAWWQSHSKWPYPTEEDKARLVQETGLQLKQINNWFINQRKRNWHSNPSSSTVLKNKRKSNAGDNSGRERFA

SEQ ID NO: 7483 - DNA, 1787 bp, Arabidopsis thaliana
atttgctcacctttcgccgattgattttgtacatcacacgcagacgcagcttttagtatttttttcaacaatcgcttttttttttttctcgatctccgtgaagctctcgaatctctggttttgagttttggagaatggtgtttttccgcagcgtatcggcctttactaggctgaggtctcgcgtcggccaacaatcttcactcagcaattctgtcagatggattcagatgcagagctctaccgacctggacctgaagtcgcagctgcaagagttaattccggaacagcaggaccgtctgaagaaactgaagtcagaacatgggaaggtccaactgggaaacatcactgttgatatggttattggtggaatgagagggatgactggattgctttgggaaacctcattgcttgacccggaagagggtattcgctttaggggattgtcgattcctgagtgccagaaagtattacctactgcccagtctggagctgaaccattaccggagggtcttttgtggcttctcttaactggaaaggtacctagcaaagagcaagttgaagcactgtcgaaagacttggcgaaccgtgctgctgtgccagattatgtgtacaatgccatcgatgctctgccttccacagctcatccaatgactcaatttgctagcggtgttatggccctccaggtgcaaagtgagtttcaaaaggcatatgagaatggaattcataagtcaaagttctgggagccaacatatgaggattgcctcaacctgattgctcgtgttcctgttgtagctgcatatgtttatcgaaggatgtataagaatggtgattccattccctcagataaatctttggattatggtgcaaatttttcccacatgttgggatttgatgatgaaaaggtgaaagagctcatgaggctttacatcaccatccacagtgatcatgaaggtggaaatgttagtgctcacactggtcacctggttggtagtgcactttcagacccatatctgtcatttgcagctgcattaaatggtttagctgggccactccatggtttggctaatcaggaagttttgctttggatcaaatcagtcgtagaggaatgtggagaagatatatcaaaagaacagttgaaagaatatgtttggaaaacattaaacagtggcaaggttattccgggatatggtcacggtgttctgcgcaatactgatccaagatatgtatgccaaagagaatttgccttgaagcatctacctgacgaccctcttttccagctggtgtcaaagctttatgaagttgtgcctcctgttctcactgagcttggaaaggtgaagaacccgtggccaaatgttgatgctcacagtggggtcttgctgaaccactatggtctaaccgaagcaaggtactacaccgtgctctttggtgtttcaaggagtcttggcatctgctctcagcttatatgggaccgagctcttggacttgcacttgagaggccaaagagtgttaccatggactggcttgaagcccattgtaagaaagcttcatctgcttaagtcaccaccgagtcctgagttgtcgcactctctcgtgtttcaacaaaagtcattctcttccacactggatagctttttttgtttttaccttctattgacagaagaaacatttgttcatgtagaaattgttcctgagaaacacatgcttggtgcaaatttgcatttccgggaaactcgtgataataaataaacagttgtattcagtttgcgtaaaaatcaaacatcaatatc

SEQ ID NO: 7484 - protein, 473 aa, Arabidopsis thaliana
MVFFRSVSAFTRLRSRVGQQSSLSNSVRWIQMQSSTDLDLKSQLQELIPEQQDRLKKLKSEHGKVQLGNITVDMVIGGMRGMTGLLWETSLLDPEEGIRFRGLSIPECQKVLPTAQSGAEPLPEGLLWLLLTGKVPSKEQVEALSKDLANRAAVPDYVYNAIDALPSTAHPMTQFASGVMALQVQSEFQKAYENGIHKSKFWEPTYEDCLNLIARVPVVAAYVYRRMYKNGDSIPSDKSLDYGANFSHMLGFDDEKVKELMRLYITIHSDHEGGNVSAHTGHLVGSALSDPYLSFAAALNGLAGPLHGLANQEVLLWIKSVVEECGEDISKEQLKEYVWKTLNSGKVIPGYGHGVLRNTDPRYVCQREFALKHLPDDPLFQLVSKLYEVVPPVLTELGKVKNPWPNVDAHSGVLLNHYGLTEARYYTVLFGVSRSLGICSQLIWDRALGLALERPKSVTMDWLEAHCKKASSA

SEQ ID NO: 7485 - protein, 442 aa, Arabidopsis thaliana
MQSSTDLDLKSQLQELIPEQQDRLKKLKSEHGKVQLGNITVDMVIGGMRGMTGLLWETSLLDPEEGIRFRGLSIPECQKVLPTAQSGAEPLPEGLLWLLLTGKVPSKEQVEALSKDLANRAAVPDYVYNAIDALPSTAHPMTQFASGVMALQVQSEFQKAYENGIHKSKFWEPTYEDCLNLIARVPVVAAYVYRRMYKNGDSIPSDKSLDYGANFSHMLGFDDEKVKELMRLYITIHSDHEGGNVSAHTGHLVGSALSDPYLSFAAALNGLAGPLHGLANQEVLLWIKSVVEECGEDISKEQLKEYVWKTLNSGKVIPGYGHGVLRNTDPRYVCQREFALKHLPDDPLFQLVSKLYEVVPPVLTELGKVKNPWPNVDAHSGVLLNHYGLTEARYYTVLFGVSRSLGICSQLIWDRALGLALERPKSVTMDWLEAHCKKASSA

SEQ ID NO: 7486 - protein, 400 aa, Arabidopsis thaliana
MVIGGMRGMTGLLWETSLLDPEEGIRFRGLSIPECQKVLPTAQSGAEPLPEGLLWLLLTGKVPSKEQVEALSKDLANRAAVPDYVYNAIDALPSTAHPMTQFASGVMALQVQSEFQKAYENGIHKSKFWEPTYEDCLNLIARVPVVAAYVYRRMYKNGDSIPSDKSLDYGANFSHMLGFDDEKVKELMRLYITIHSDHEGGNVSAHTGHLVGSALSDPYLSFAAALNGLAGPLHGLANQEVLLWIKSVVEECGEDISKEQLKEYVWKTLNSGKVIPGYGHGVLRNTDPRYVCQREFALKHLPDDPLFQLVSKLYEVVPPVLTELGKVKNPWPNVDAHSGVLLNHYGLTEARYYTVLFGVSRSLGICSQLIWDRALGLALERPKSVTMDWLEAHCKKASSA

SEQ ID NO: 7487 - DNA, 1325 bp, Arabidopsis thaliana
accttattattttatatatatatatgtgcatatacacccacatagagatcattcgtgtactaattttaccttcatagacttaattaagatacgatcatggcgtcgtttgtctttgtgatttctcttcttcttctctctttttcgtcggctgttttctccgatgatgcttcttttcagaaacttccggtgcctgacaagaggtcaggccctgaatctttcgcctttgactctaccggcggattctacaccggagtctccggtggtaaaatcctcaagtacgttcctgggaagggttatgtcgattttgcccagatcacagattcctcgaactcggcatggtgcaacggagcattaggaaccgctttcgccggaaagtgtggtcgaccagcgggaatagccttaaacagcaaaacaggtgatctctatgtcgccgatgctccgttgggtcttcacgttatctctcccgcaggaggtttggccacaaagctggccgacagtgttgacggaaagcctttcaagtttcttgacggtcttgatgttgatcccaccaccggcgtcgtctacttcacttccttcagttccaagtttggaccccgggaagtgttaatcgcagtgggattaaaagacgcgagcggaaagctgttcaaatacgacccagcgaccaaagccgtgactgagttaatggaaggtctaagtggtgctgctggttgtgcagtgagctcagatggttcattcgtgctagttagcgagttcataaagagtaacatcaagaaatattggattaaagggcccaaagctggaactattgaagacttctcaagtcttgtctcgaaccccgacaacatcaggagggtaggttctaccggaaatttctgggtcgcctctgtcgtgaacaaggttgttatgcctaccgaccctagggcggtcaaactagacgctaatggaaaagtgctccagaccattttcctcaagaatgagtttgggaatactttgcttagtgaagtcaacgagttcaacggccatctttacatcggaactcttactggacctttcgccggagtcatgaaactttaaattggtatcaactatatggttctttggtgattaccatttttgatatcattttgaaaggtctgtttacagttattttaaccataataatatcccctcaaatgtcctgcttgttacgtgggtgacacaattgttcggtgattccttgaataggctactactacttattgtttcatattttcgaagagattatctctagttcttaaggctttggttttctttgttttcaccctttgttttacttcataaagacg

SEQ ID NO: 7488 - protein, 325 aa, Arabidopsis thaliana
MASFVFVISLLLLSFSSAVFSDDASFQKLPVPDKRSGPESFAFDSTGGFYTGVSGGKILKYVPGKGYVDFAQITDSSNSAWCNGALGTAFAGKCGRPAGIALNSKTGDLYVADAPLGLHVISPAGGLATKLADSVDGKPFKFLDGLDVDPTTGVVYFTSFSSKFGPREVLIAVGLKDASGKLFKYDPATKAVTELMEGLSGAAGCAVSSDGSFVLVSEFIKSNIKKYWIKGPKAGTIEDFSSLVSNPDNIRRVGSTGNFWVASVVNKVVMPTDPRAVKLDANGKVLQTIFLKNEFGNTLLSEVNEFNGHLYIGTLTGPFAGVMKL

SEQ ID NO: 7489 - DNA, 1466 bp, Arabidopsis thaliana
gaaaccaagtctcgcgagtgggagattgtagccatggcaggagtatcgctcaagtgtggcgattgtgggacgctgctgaagtccgtggaggaggctcaggagcacgctgagctcacctctcactccaatttcgccgagtccactgaggccgtgctcaatctcgtttgtactacttgcaccaagccttgtcgctcaaaaatcgaaagcgatttgcacacgaaaagaacagggcatactgagtttgtagataagacattggagacaatcaaacccatcagcttggaagctcctaaggttgccatggagattgatgataatgctagtggtagtggagaggctgcagaagagatggttgttccagacgttgacaataacattctcgaggaacttgaagcgatgggcttccctaaagctcgtgctacccgagcactccattactctggtaatgccagtcttgaggctgcagttaattgggtggtggagcatgagaatgatcctgacgtagatgaaatgccaaaggtgccttccaactccaatgttgggcctgccaaacctgctcttacgccagaagaagtgaagctaaaagcacaagaattaagggaacgtgcacggaagaagaaagaagaggaagaaaaacggatggaacgtgaaagagagaaggagcgaattaggattggcaaggaactcttagaagcaaagcggatggaagaagtaaacgaaagaaaacgtcttatgtttttgcgtaaagctgagaaagaagaagaaaaacgggctagggaaaagatccgtcaaaagcttgaagaagacaaggctgaaagaaggcgaaaactcggattgcctccggaagatcctgcaactgcagctgcaaaaccctcagtgccagttgtggaggagaagaaggttacattgccaattagaccggccacaaagactgaacaaatgagagaatgcttgaggtcccttaagcaagcccacaaggaggatgatgctaaagtgaagagagcgttccagactctgctgacttacatgggaaatgtcgctaagaatccagatgaggaaaaattccggaaaattagactcaccaaccaaacatttcaggaaagggttggttcgctaagagggggcatagagttcatggagctatgtggatttgagaaaattgaaggaggagagttcttgttcttacctagagacaagatcgattcagccatcataaactcagctggaacagaactcaactccgccatcaacaaccctttctttggagttctttaaatccatgcctcttcttatgaaactaaaaaaaaaattcggatatctctatgaataatactggctagtgacattctttttgttttgcttaaataagtggaaaatttggagagcagaactaaaagcttccattactgtttaatccgtcttgttgtttgcattgtaacttttaaggtaaaaaaaatgacatttcc

SEQ ID NO: 7490 - protein, 424 aa, Arabidopsis thaliana
ETKSREWEIVAMAGVSLKCGDCGTLLKSVEEAQEHAELTSHSNFAESTEAVLNLVCTTCTKPCRSKIESDLHTKRTGHTEFVDKTLETIKPISLEAPKVAMEIDDNASGSGEAAEEMVVPDVDNNILEELEAMGFPKARATRALHYSGNASLEAAVNWVVEHENDPDVDEMPKVPSNSNVGPAKPALTPEEVKLKAQELRERARKKKEEEEKRMEREREKERIRIGKELLEAKRMEEVNERKRLMFLRKAEKEEEKRAREKIRQKLEEDKAERRRKLGLPPEDPATAAAKPSVPVVEEKKVTLPIRPATKTEQMRECLRSLKQAHKEDDAKVKRAFQTLLTYMGNVAKNPDEEKFRKIRLTNQTFQERVGSLRGGIEFMELCGFEKIEGGEFLFLPRDKIDSAIINSAGTELNSAINNPFFGVL

SEQ ID NO: 7491 - protein, 413 aa, Arabidopsis thaliana
MAGVSLKCGDCGTLLKSVEEAQEHAELTSHSNFAESTEAVLNLVCTTCTKPCRSKIESDLHTKRTGHTEFVDKTLETIKPISLEAPKVAMEIDDNASGSGEAAEEMVVPDVDNNILEELEAMGFPKARATRALHYSGNASLEAAVNWVVEHENDPDVDEMPKVPSNSNVGPAKPALTPEEVKLKAQELRERARKKKEEEEKRMEREREKERIRIGKELLEAKRMEEVNERKRLMFLRKAEKEEEKRAREKIRQKLEEDKAERRRKLGLPPEDPATAAAKPSVPVVEEKKVTLPIRPATKTEQMRECLRSLKQAHKEDDAKVKRAFQTLLTYMGNVAKNPDEEKFRKIRLTNQTFQERVGSLRGGIEFMELCGFEKIEGGEFLFLPRDKIDSAIINSAGTELNSAINNPFFGVL

SEQ ID NO: 7492 - protein, 324 aa, Arabidopsis thaliana
MEIDDNASGSGEAAEEMVVPDVDNNILEELEAMGFPKARATRALHYSGNASLEAAVNWVVEHENDPDVDEMPKVPSNSNVGPAKPALTPEEVKLKAQELRERARKKKEEEEKRMEREREKERIRIGKELLEAKRMEEVNERKRLMFLRKAEKEEEKRAREKIRQKLEEDKAERRRKLGLPPEDPATAAAKPSVPVVEEKKVTLPIRPATKTEQMRECLRSLKQAHKEDDAKVKRAFQTLLTYMGNVAKNPDEEKFRKIRLTNQTFQERVGSLRGGIEFMELCGFEKIEGGEFLFLPRDKIDSAIINSAGTELNSAINNPFFGVL

SEQ ID NO: 7493 - DNA, 785 bp, Arabidopsis thaliana
actgccgactaaacagcgaaaatcccaaacaaaaaaataaaagaatggcgtctctgtgcctttctctccaccaaaccctaactaatcccctgtcggctcccagatgcagaccactcagcctctccttccccggatcctcaaccttctcgatccgcccctctagcagacgcgcaaccgccttgacgacccgcgcctcctacaccccgacgccggcgactgagcgcgtgatttcgatagcgtcgtacgcgctgccgttcttcaattctctgcagtacgggcggttcctgttcgcgcagtacccaaggctgggattgctgttcgagccaatcttcccaatcctgaacctgtacagatcggtgccgtacgcgagcttcgtggcattcttcgggctgtacctgggagtggtgaggaacacgagtttcagtaggtacgtgaggttcaacgcgatgcaggcggtgacgctggatgtgctcctggcggttccggtgctgctgacccgaatactggatccgggtcaaggaggcgggtttggaatgaaggcgatgatgtgggggcacacgggggttttcgtcttcagctttatgtgttttgtgtatggagtcgtcagctccttactcggcaaaactccatacattccatttgtcgctgatgccgccggtagacaactctaattccggccaatatctacctcactcagtgttcgggttttcgattctagaatcggttatttctggtttataagagagaccaaatcaatcagtgttgttaattaaccattaccgttt

SEQ ID NO: 7494 - protein, 222 aa, Arabidopsis thaliana
CRLNSENPKQKNKRMASLCLSLHQTLTNPLSAPRCRPLSLSFPGSSTFSIRPSSRRATALTTRASYTPTPATERVISIASYALPFFNSLQYGRFLFAQYPRLGLLFEPIFPILNLYRSVPYASFVAFFGLYLGVVRNTSFSRYVRFNAMQAVTLDVLLAVPVLLTRILDPGQGGGFGMKAMMWGHTGVFVFSFMCFVYGVVSSLLGKTPYIPFVADAAGRQL

SEQ ID NO: 7495 - protein, 208 aa, Arabidopsis thaliana
MASLCLSLHQTLTNPLSAPRCRPLSLSFPGSSTFSIRPSSRRATALTTRASYTPTPATERVISIASYALPFFNSLQYGRFLFAQYPRLGLLFEPIFPILNLYRSVPYASFVAFFGLYLGVVRNTSFSRYVRFNAMQAVTLDVLLAVPVLLTRILDPGQGGGFGMKAMMWGHTGVFVFSFMCFVYGVVSSLLGKTPYIPFVADAAGRQL

SEQ ID NO: 7496 - DNA, 1548 bp, Arabidopsis thaliana
aaaattagggctttatcttatcttcgcgattctctcatctcctccctctaaaattccccggcgacacagttcaccggaaatcgtagaataaatcagattctttctctttagtatgaaacaatgaatttgatctcaagaacattgacaagagcagtgtcttcgtcactataccactcaaaagcagcgaagctccccactcaaaaatggataatctcgcagcaaatccgtgttttctccgccacagtcatcagcggtggaggaaagaaacctctggcaaaagtatctgtgaaaccaccgctaaatgtagcgacggagaaagaatcgactccgccaaagaaaattgagtacaaaccggaaatttcaaactggatcaacctaatcggattcgttgaacaaccagttcaattcggtccttgctccgatggaaaattctgggctggaacagttatttctcagcgttctggttcaaaatcatctaatttctggattccgattatattcgaaggagatttagctaaaattgcagttcaacatgtaaagaaagaagatcggattcatgtttccgggaagctgtttattgattcgcctcctccaaatgtgacatattctcaatccaatgttcaggttatggttcagaatcttaacttcgtacaagctgctacttctacgactaagacgatctcaccacctgaaaaagaagttaccagcatcaagaaaaagcccgcaagatccaaaaaggttaaagtcatagatgaagaaacctctaattcttggaagcatcttattgaaaatcctaaagagtggttggatcaccgtgggaataaagctaacggattggtaaagccaggacatcccgatttcaagatgaaggttggtggtttgtccctgtggctcagcacagctcctgattgggctttgctaaaactcgaagagcttaagtttgatgtcttagtccctaaaggaaacatcaaactgaatcaacttaaaggagaggaatcttggaaggatttggttcagaacccagacaaatggttagacaacagatcagataagacaaacgtgaaataccctgacttcaagcataaagagactggtgaagcactgtggatgaccaattctcctatttgggtactgtcaaagttaccacctctaaagaagaaccaagaaagacctttcatgtctaataaagtctcgcagcttgagcttgacgttgaagtacctaaaggaaatctgaaacagcttaaaagagaggaaatttggaagaacttggttgagaaccccagtaaatggtgggataacagattagacaagagaaaccctaaaggccctgactttaagcacaaggagaccggtgaagcactgtggataggtgattctccgacttgggcgctgtcaaagttaccacctctaaagaaaaaccaagaaagacctgtcatggcctaagcttctctagcagccttatgttaattttggcccccactatgtaaaaaggccctatgactttattatccagtcttatacaaagagaattgctatagtatcagtgcc

SEQ ID NO: 7497 - protein, 440 aa, Arabidopsis thaliana
MNLISRTLTRAVSSSLYHSKAAKLPTQKWIISQQIRVFSATVISGGGKKPLAKVSVKPPLNVATEKESTPPKKIEYKPEISNWINLIGFVEQPVQFGPCSDGKFWAGTVISQRSGSKSSNFWIPIIFEGDLAKIAVQHVKKEDRIHVSGKLFIDSPPPNVTYSQSNVQVMVQNLNFVQAATSTTKTISPPEKEVTSIKKKPARSKKVKVIDEETSNSWKHLIENPKEWLDHRGNKANGLVKPGHPDFKMKVGGLSLWLSTAPDWALLKLEELKFDVLVPKGNIKLNQLKGEESWKDLVQNPDKWLDNRSDKTNVKYPDFKHKETGEALWMTNSPIWVLSKLPPLKKNQERPFMSNKVSQLELDVEVPKGNLKQLKREEIWKNLVENPSKWWDNRLDKRNPKGPDFKHKETGEALWIGDSPTWALSKLPPLKKNQERPVMA

SEQ ID NO: 7498 - protein, 271 aa, Arabidopsis thaliana
MVQNLNFVQAATSTTKTISPPEKEVTSIKKKPARSKKVKVIDEETSNSWKHLIENPKEWLDHRGNKANGLVKPGHPDFKMKVGGLSLWLSTAPDWALLKLEELKFDVLVPKGNIKLNQLKGEESWKDLVQNPDKWLDNRSDKTNVKYPDFKHKETGEALWMTNSPIWVLSKLPPLKKNQERPFMSNKVSQLELDVEVPKGNLKQLKREEIWKNLVENPSKWWDNRLDKRNPKGPDFKHKETGEALWIGDSPTWALSKLPPLKKNQERPVMA

SEQ ID NO: 7499 - DNA, 984 bp, Arabidopsis thaliana
agattcgcgagttcttcgttcttcgttctgccttttttttttttattttttttgtgtgtttgagagatgtctgcctttgaagacgattccttcgtcatactcaacgatgatgcgtctgagtctgttccagtctcaggctcttttgacgccactgattctttctcagctttcgacggctcactccaagtcgaggactccgtcgacgatgtttttgcagcgccgtcttctgactacggtgcttactccaacggtgacggcatcttcggatccaacggggatcacgacggtcctatcttgccaccaccgtcggagatggaatcagatgagggatttgctcttagagaatggagaagacaaaatgcaattcaacttgaggagaaggagaagagagaaaaggaattgttgaagcaaattattgaggaagctgatcaatacaaagaagagtttcataagaagattgaagtaacttgtgaaaacaacaaagcagctaacagagagaaggaaaagctgtatctggagaaccaagagaagttctacgcggaatccagcaagaattactggaaggcaatagcagagctagttcctaaagaagttccaacaatagagaaaaggagaggaaaaaaagagcaacaagatcctaagaagccaacagtctctgtgattcaaggtccaaagcccggtaagccaaccgatctaacaagaatgagacaaatattggtgaagctcaaacacaacccaccttctcacctgaaactcacttctcaacctccatcggaggaggcggctgctcctccaaagaatgttcccgaaaccaagcccactgaggcagttactgctgcttaaaaacctcctttgttttcttattcgttgcttacatctgtgtgaattcagtctttgcatttcattatgtgttataaacagctgagagattttatggttcatgtgtgttattaacataattatgtcatattggaatgataactt

SEQ ID NO: 7500 - protein, 258 aa, Arabidopsis thaliana
MSAFEDDSFVILNDDASESVPVSGSFDATDSFSAFDGSLQVEDSVDDVFAAPSSDYGAYSNGDGIFGSNGDHDGPILPPPSEMESDEGFALREWRRQNAIQLEEKEKREKELLKQIIEEADQYKEEFHKKIEVTCENNKAANREKEKLYLENQEKFYAESSKNYWKAIAELVPKEVPTIEKRRGKKEQQDPKKPTVSVIQGPKPGKPTDLTRMRQILVKLKHNPPSHLKLTSQPPSEEAAAPPKNVPETKPTEAVTAA

SEQ ID NO: 7501 - protein, 176 aa, Arabidopsis thaliana
MESDEGFALREWRRQNAIQLEEKEKREKELLKQIIEEADQYKEEFHKKIEVTCENNKAANREKEKLYLENQEKFYAESSKNYWKAIAELVPKEVPTIEKRRGKKEQQDPKKPTVSVIQGPKPGKPTDLTRMRQILVKLKHNPPSHLKLTSQPPSEEAAAPPKNVPETKPTEAVTAA

SEQ ID NO: 7502 - protein, 134 aa, Arabidopsis thaliana
DSRVLRSSFCLFFFYFFCVFERCLPLKTIPSSYSTMMRLSLFQSQALLTPLILSQLSTAHSKSRTPSTMFLQRRLLTTVLTPTVTASSDPTGITTVLSCHHRRRWNQMRDLLLENGEDKMQFNLRRRRREKRNC

SEQ ID NO: 7503 - DNA, 1252 bp, Arabidopsis thaliana
cacgcaggcaaatgtctcgtaatttaatctatagaagaaacagagctctctgttttgttttaatcttgttctgcttcccttaccggtttggcgctagaatcacgccggaggcggaacaatccacagcaaaagcaactcaaataatacacgtcagcaattccacgtggcatgatttctctcgtcttgtagatgtccaaataggtagccacgtcagcggcgtatcagagctcaaaagatacctccaccgattcggttacgtcaatgatggctccgaaatattttccgacgtgttcgatggtcctctggaatcggcaatctctctgtatcaagaaaatctcggtttaccaataaccggaagactcgacacgagtacagttactctcatgtcgttaccgcgatgtggcgttagcgatacgcacatgaccatcaacaacgatttcctccacacaacggcgcattatacgtatttcaacggtaaaccgaaatggaaccgtgatacgctaacctacgctatctccaaaactcacaaactcgattacttgacgtcagaagacgtcaaaaccgttttccggcgagctttttcacagtggtcaagcgtgattccggtgagtttcgaggaagtcgacgatttcacgacggctgatttaaagatcggattctacgctggtgatcacggtgacgggcttccgtttgacggtgtacttggaactttagcacacgcttttgcgccggagaacgggaggcttcacctcgacgcggcggagacgtggatcgtcgacgatgacttgaaaggatcttcagaggtggccgttgacttggagtctgtggcgactcacgagatcggtcacttgttgggattaggacatagctcgcaggagtcggcggttatgtatccgagtctccgaccgaggaccaagaaagttgaccttacggttgatgacgtggcaggtgtacttaagctatatggtccgaatcctaaactacggttggattcactaacgcagtcggaagattctattaaaaacggcaccgtatcacatagattcttgtcggggaattttatcggttatgttctgttggttgttggtttgattcttttcctataggtttataggcataaaaaatactgtttttattcatttatttttaattaaatgtacatatatttttcaactatgtaaatgtaaatatatagttgaacaaaaaaagatgtacatatatagttaggcttataattaggtttatggtcttg

SEQ ID NO: 7504 - protein, 367 aa, Arabidopsis thaliana
RRQMSRNLIYRRNRALCFVLILFCFPYRFGARITPEAEQSTAKATQIIHVSNSTWHDFSRLVDVQIGSHVSGVSELKRYLHRFGYVNDGSEIFSDVFDGPLESAISLYQENLGLPITGRLDTSTVTLMSLPRCGVSDTHMTINNDFLHTTAHYTYFNGKPKWNRDTLTYAISKTHKLDYLTSEDVKTVFRRAFSQWSSVIPVSFEEVDDFTTADLKIGFYAGDHGDGLPFDGVLGTLAHAFAPENGRLHLDAAETWIVDDDLKGSSEVAVDLESVATHEIGHLLGLGHSSQESAVMYPSLRPRTKKVDLTVDDVAGVLKLYGPNPKLRLDSLTQSEDSIKNGTVSHRFLSGNFIGYVLLVVGLILFL

SEQ ID NO: 7505 - protein, 364 aa, Arabidopsis thaliana
MSRNLIYRRNRALCFVLILFCFPYRFGARITPEAEQSTAKATQIIHVSNSTWHDFSRLVDVQIGSHVSGVSELKRYLHRFGYVNDGSEIFSDVFDGPLESAISLYQENLGLPITGRLDTSTVTLMSLPRCGVSDTHMTINNDFLHTTAHYTYFNGKPKWNRDTLTYAISKTHKLDYLTSEDVKTVFRRAFSQWSSVIPVSFEEVDDFTTADLKIGFYAGDHGDGLPFDGVLGTLAHAFAPENGRLHLDAAETWIVDDDLKGSSEVAVDLESVATHEIGHLLGLGHSSQESAVMYPSLRPRTKKVDLTVDDVAGVLKLYGPNPKLRLDSLTQSEDSIKNGTVSHRFLSGNFIGYVLLVVGLILFL

SEQ ID NO: 7506 - protein, 240 aa, Arabidopsis thaliana
MSLPRCGVSDTHMTINNDFLHTTAHYTYFNGKPKWNRDTLTYAISKTHKLDYLTSEDVKTVFRRAFSQWSSVIPVSFEEVDDFTTADLKIGFYAGDHGDGLPFDGVLGTLAHAFAPENGRLHLDAAETWIVDDDLKGSSEVAVDLESVATHEIGHLLGLGHSSQESAVMYPSLRPRTKKVDLTVDDVAGVLKLYGPNPKLRLDSLTQSEDSIKNGTVSHRFLSGNFIGYVLLVVGLILFL

SEQ ID NO: 7507 - DNA, 770 bp, Arabidopsis thaliana
aaaaaactcattctcataacaattcccttaactctatctctaggtgacttaagagtaaaaaatggtagaggcagaggttgaagtagatgtggaaatcaaatctacggctgataagtttttcatgttctctagaagatcacaacatgcctccaaagccactcgctatgtacagggatgtgatctgctcgaaggcgagtggggcgaagttggaagcatactcttgtggaaattaactgttgatggagagccaaaagtgtcaaaggatatgattgaggcgattgatatgaagatgaatatgatccagtggagggtgttagagggacctctgaaggaagagtacaatattttctcgaaaacgatgaaagtaagccctaagcaaggagggtctggaagtgtggtgaagtggaacttgaagtatgagagaattgatgagaaggtggctcacctagagaggctccttcagttcttcgtcgaatgtgttaacgagattgaccaatacctattgtctgagggttaggggacttttctccctggcttatgtgtgggagagttattgtatgcgtacgtgtaaggactcttcttgtgttttatatgtctttctcaataatgtgatatcttgagatttagaagagaggtatccaagtgtgctatacctcatgtcttcaagttggaagttgtataacattttaagttgcttatgagtttctcatatatgtagtgtgtttgttggttgaaaaatcatattataatgcaacgataccatgtttttt

SEQ ID NO: 7508 - protein, 151 aa, Arabidopsis thaliana
MVEAEVEVDVEIKSTADKFFMFSRRSQHASKATRYVQGCDLLEGEWGEVGSILLWKLTVDGEPKVSKDMIEAIDMKMNMIQWRVLEGPLKEEYNIFSKTMKVSPKQGGSGSVVKWNLKYERIDEKVAHLERLLQFFVECVNEIDQYLLSEG

SEQ ID NO: 7509 - protein, 131 aa, Arabidopsis thaliana
MFSRRSQHASKATRYVQGCDLLEGEWGEVGSILLWKLTVDGEPKVSKDMIEAIDMKMNMIQWRVLEGPLKEEYNIFSKTMKVSPKQGGSGSVVKWNLKYERIDEKVAHLERLLQFFVECVNEIDQYLLSEG

SEQ ID NO: 7510 - protein, 83 aa, Arabidopsis thaliana
MIEAIDMKMNMIQWRVLEGPLKEEYNIFSKTMKVSPKQGGSGSVVKWNLKYERIDEKVAHLERLLQFFVECVNEIDQYLLSEG

SEQ ID NO: 7511 - DNA, 1065 bp, Arabidopsis thaliana
aaacaaattatatattttcttacttacttgttctcttgtaatggatttctctccgatcaactgcctcattttcgatttggatgacacattataccctctaaaaactggaatagcgccagctgtcaagaagaatattgacgattttctagtggagaaatttggattctcagaaagtaaagcttcaagcttaagagttgaactcttcaagacttatggaagtactctcgctggtcttagggcgttaggtcatgatgttcatcctgatgaatatcacagtttcgtgcacggaaggttaccgtatgggtcgatcgaaccaaacaacaagctacgtaaccttctcaacaaaatcaaacagagaaaaattatatttacgaattcggacaagaatcatgcggtgaaggtcctcaagaaacttggtttagaagattgtttcgaagagatgatttgttttgagacaatgaacccaaatttattcgggtcaacaacccgacccgatgaatacccggttgttctcaagccttcgttgaccgcaatggatatttgcattcgtgtagccaacgttgatcctcgccgaacagtatttttggatgataatatccacaatattaccgcgggtaaatctgtcgggcttcgcacaatcctggtgggaagagcagaaaagacgaaagatgcggattatgcggtggagacggttactgagatagctacggcggtgccagagatttgggctacggcgacggcgacaggcggatttgacgttggtggtgagaggatcagacggagcaagagtgagctggagggtatggcttcaatagcagccgtcggtgcgtgacgtgatcgagtgggcggatcgtggccgttggataattttaacgtctagtggttgggattgtacaggtggcgttaaaatgttgataatgcatatgtgaatataaataatagtggtggtggacaatattcatcccatgtggacaccaaatgtgaatacgcaatcagataatattatgtatgatgattatgatttcaatatgtgtacatttttattcaactgatttttttaaagtt

SEQ ID NO: 7512 - protein, 276 aa, Arabidopsis thaliana
NKLYIFLLTCSLVMDFSPINCLIFDLDDTLYPLKTGIAPAVKKNIDDFLVEKFGFSESKASSLRVELFKTYGSTLAGLRALGHDVHPDEYHSFVHGRLPYGSIEPNNKLRNLLNKIKQRKIIFTNSDKNHAVKVLKKLGLEDCFEEMICFETMNPNLFGSTTRPDEYPVVLKPSLTAMDICIRVANVDPRRTVFLDDNIHNITAGKSVGLRTILVGRAEKTKDADYAVETVTEIATAVPEIWATATATGGFDVGGERIRRSKSELEGMASIAAVGA

SEQ ID NO: 7513 - protein, 263 aa, Arabidopsis thaliana
MDFSPINCLIFDLDDTLYPLKTGIAPAVKKNIDDFLVEKFGFSESKASSLRVELFKTYGSTLAGLRALGHDVHPDEYHSFVHGRLPYGSIEPNNKLRNLLNKIKQRKIIFTNSDKNHAVKVLKKLGLEDCFEEMICFETMNPNLFGSTTRPDEYPVVLKPSLTAMDICIRVANVDPRRTVFLDDNIHNITAGKSVGLRTILVGRAEKTKDADYAVETVTEIATAVPEIWATATATGGFDVGGERIRRSKSELEGMASIAAVGA

SEQ ID NO: 7514 - DNA, 1862 bp, Arabidopsis thaliana
atgaaatctgcaaatttaggtcttttaatagaaatctgaatttcatgttgctgaaagaatttacaacgaagttgtaaatactctgagaaacatgtaagtcaggagagagtcccttctatggtttatatttggcggcttttaagaagcatacgcatatcaagtgtttgatgaaattcctcagagaagatgatgtccaccacagtcagattaaacaggtttacgtatctaacgagtactgcaaaactgacacgttacttttgctctcaccatttagttgaccgatcggaaacggcgttgcatgaagttattcggatagtttcttctccagttggtggtctagatgaccttgaagaaaacttgaaccaggtttctgtttctccatcatcaaaccttgttacccaagtgattgagtcttgcaagaacgagacttcaccgagaaggctgttgaggtttttctcctggtcgtgtaaaagcttgggatctagtttacacgacaaggaattcaactatgtcctaagagttttggctgagaagaaggatcacacagctatgcagatactcttatcagatctcaggaaggagaatcgggcgatggacaagcaaacgtttagcattgtcgctgaaactctggttaaggttggtaaggaagaagatgcaataggtatcttcaagatcttggacaaattttcttgcccacaagatggtttcactgtgacggctattataagcgctctttgttccagaggacatgtgaagagagcattgggagttatgcatcatcacaaggatgtaatatccgggaatgaattgtctgtgtatagaagtcttttattcgggtggtcggtacaaagaaacgtgaaggaagcaagaagagttatacaagatatgaaatcagcagggattacaccggatttgttctgtttcaactcgttgctgacctgcctttgcgaaagaaacgtgaatcgaaacccgtctgggcttgttcctgaagctttgaatattatgttggagatgaggtcttacaaaatccaacctacgtctatgagttacaacattttgctctcttgtttgggaaggactaggagggtgagagagtcctgccagattttagaacagatgaaaagatcgggatgtgatccggatacagggagctattacttcgttgtgagggtcctgtatttgacaggaaggtttggtaaaggcaaccaaattgtggatgagatgatcgagagaggatttagacccgaacgcaaattctattatgatctgatcggggttctttgtggggtcgagcgggttaactttgctcttcaattgtttgagaagatgaagagaagctcagtgggtggttatggtcaggtttatgatctgctcataccaaaactatgtaaaggaggaaactttgagaaaggaagagagctttgggaagaggcattgtcaattgatgttacacttagttgctccattagtttgcttgatccatctgtcacagaggttttcaaacctatgaagatgaaagaagaagctgcaatggtggatcgtcgtgctcttaacttgaagattcacgctagaatgaacaaaacaaagccaaaactgaaactaaaaccgaaacgcaggagcaagacaaagaagaagaatctgcaacattgattgatttcttctacccattgttaagaacatctgatatagcaggcaatgtatcacaagaaactcaagtaagatgttctgctttttatgtattagtagtaatgcagaagcaaaggacatgagattcttttgttgttctctttgtcccattgattcttattacgaaaaatatgggttctgaagaatacaaaacaagagacaagaatattgtgatc

SEQ ID NO: 7515 - protein, 487 aa, Arabidopsis thaliana
MMSTTVRLNRFTYLTSTAKLTRYFCSHHLVDRSETALHEVIRIVSSPVGGLDDLEENLNQVSVSPSSNLVTQVIESCKNETSPRRLLRFFSWSCKSLGSSLHDKEFNYVLRVLAEKKDHTAMQILLSDLRKENRAMDKQTFSIVAETLVKVGKEEDAIGIFKILDKFSCPQDGFTVTAIISALCSRGHVKRALGVMHHHKDVISGNELSVYRSLLFGWSVQRNVKEARRVIQDMKSAGITPDLFCFNSLLTCLCERNVNRNPSGLVPEALNIMLEMRSYKIQPTSMSYNILLSCLGRTRRVRESCQILEQMKRSGCDPDTGSYYFVVRVLYLTGRFGKGNQIVDEMIERGFRPERKFYYDLIGVLCGVERVNFALQLFEKMKRSSVGGYGQVYDLLIPKLCKGGNFEKGRELWEEALSIDVTLSCSISLLDPSVTEVFKPMKMKEEAAMVDRRALNLKIHARMNKTKPKLKLKPKRRSKTKKKNLQH

SEQ ID NO: 7516 - protein, 486 aa, Arabidopsis thaliana
MSTTVRLNRFTYLTSTAKLTRYFCSHHLVDRSETALHEVIRIVSSPVGGLDDLEENLNQVSVSPSSNLVTQVIESCKNETSPRRLLRFFSWSCKSLGSSLHDKEFNYVLRVLAEKKDHTAMQILLSDLRKENRAMDKQTFSIVAETLVKVGKEEDAIGIFKILDKFSCPQDGFTVTAIISALCSRGHVKRALGVMHHHKDVISGNELSVYRSLLFGWSVQRNVKEARRVIQDMKSAGITPDLFCFNSLLTCLCERNVNRNPSGLVPEALNIMLEMRSYKIQPTSMSYNILLSCLGRTRRVRESCQILEQMKRSGCDPDTGSYYFVVRVLYLTGRFGKGNQIVDEMIERGFRPERKFYYDLIGVLCGVERVNFALQLFEKMKRSSVGGYGQVYDLLIPKLCKGGNFEKGRELWEEALSIDVTLSCSISLLDPSVTEVFKPMKMKEEAAMVDRRALNLKIHARMNKTKPKLKLKPKRRSKTKKKNLQH

SEQ ID NO: 7517 - protein, 366 aa, Arabidopsis thaliana
MQILLSDLRKENRAMDKQTFSIVAETLVKVGKEEDAIGIFKILDKFSCPQDGFTVTAIISALCSRGHVKRALGVMHHHKDVISGNELSVYRSLLFGWSVQRNVKEARRVIQDMKSAGITPDLFCFNSLLTCLCERNVNRNPSGLVPEALNIMLEMRSYKIQPTSMSYNILLSCLGRTRRVRESCQILEQMKRSGCDPDTGSYYFVVRVLYLTGRFGKGNQIVDEMIERGFRPERKFYYDLIGVLCGVERVNFALQLFEKMKRSSVGGYGQVYDLLIPKLCKGGNFEKGRELWEEALSIDVTLSCSISLLDPSVTEVFKPMKMKEEAAMVDRRALNLKIHARMNKTKPKLKLKPKRRSKTKKKNLQH

SEQ ID NO: 7518 - DNA, 1410 bp, Arabidopsis thaliana
gaacttgtaaaccttactctcgaagagtcctctgttactcatttttacattgtaaaaaaaaacttcttttcttctctacgtgaataagaatctgaagagtcattttctcaagaatgacgtggctaaaacaaatgtggtcaagcattttagtgctagccgtggtggtgatcggagccagagctgtgcccatcacgtatcttgaatctgcagtggctaaaggagctgtgtgtttggatggtagcgcgccagcataccatttcgataagggatcgggctcaggagtgaacaattggatcgttcatatggaaggaggaggatggtgcactgatatagctacatgcgttcaacgtaaaagtacaatgaagggttcttctaagcttatgaacaaagactttggtttctccggtatcttgggtggcaagcaaagcaccaatccagacttttacaattggaatagaatcaaagttcggtattgcgatggttcatctttcaccggtgatatagaagctgttgatccgacgcacaagctgttctttcgcggtgctagggtttggcgtgcggtgatcgatgatcttatggctaagggaatgagcaacgctcaaaacgctatactctccggttgttcagctggagcattggctgcgattctacattgcgaccagttcaagtccactctccctaaaacggctaaggtcaaatgtgtttctgacgctggttacttcatccacggtaaggatatcactggaggatcttacatccaatcctactacgccaaagtcgtagcgacccacggatctgcaaagagtctacctgcttcttgcacctcaagtatgaagcctgatttgtgtttcttccctcaatacgttgctaagaccttacaaacaccgcttttcgtcatcaatgccgccttcgattcttggcagatcaagaatgtattggcaccaacctctgttgataaaagcaaagcatggaagacttgtaagcttgatcttaagaagtgtacggccgctcagcttcaaaccgttcaaggatatagagaccaagtgttggctgcgttggcgcctgttcgatccgcgacgacgaacggattgttcttggactcgtgccatgctcattgccaaggtggaagcgctgccacttggtccggcgacaaaggtcccacagtcgcgaatacgaaaatggctaaggcggttggagattggttctttgagaggagtacgtttcagaacgtagattgttcatcgcttaattgcaaccctacttgccctgcagtatctactgaagactaaaatttattcattgatgtcttaaaatttattcatctttggaatattgttcttgaaatttaaaagtaaaataatataattgatacaatttcattcgaataaataaaatcctttgcccttctgc

SEQ ID NO: 7519 - protein, 391 aa, Arabidopsis thaliana
MTWLKQMWSSILVLAVVVIGARAVPITYLESAVAKGAVCLDGSAPAYHFDKGSGSGVNNWIVHMEGGGWCTDIATCVQRKSTMKGSSKLMNKDFGFSGILGGKQSTNPDFYNWNRIKVRYCDGSSFTGDIEAVDPTHKLFFRGARVWRAVIDDLMAKGMSNAQNAILSGCSAGALAAILHCDQFKSTLPKTAKVKCVSDAGYFIHGKDITGGSYIQSYYAKVVATHGSAKSLPASCTSSMKPDLCFFPQYVAKTLQTPLFVINAAFDSWQIKNVLAPTSVDKSKAWKTCKLDLKKCTAAQLQTVQGYRDQVLAALAPVRSATTNGLFLDSCHAHCQGGSAATWSGDKGPTVANTKMAKAVGDWFFERSTFQNVDCSSLNCNPTCPAVSTED

SEQ ID NO: 7520 - protein, 385 aa, Arabidopsis thaliana
MWSSILVLAVVVIGARAVPITYLESAVAKGAVCLDGSAPAYHFDKGSGSGVNNWIVHMEGGGWCTDIATCVQRKSTMKGSSKLMNKDFGFSGILGGKQSTNPDFYNWNRIKVRYCDGSSFTGDIEAVDPTHKLFFRGARVWRAVIDDLMAKGMSNAQNAILSGCSAGALAAILHCDQFKSTLPKTAKVKCVSDAGYFIHGKDITGGSYIQSYYAKVVATHGSAKSLPASCTSSMKPDLCFFPQYVAKTLQTPLFVINAAFDSWQIKNVLAPTSVDKSKAWKTCKLDLKKCTAAQLQTVQGYRDQVLAALAPVRSATTNGLFLDSCHAHCQGGSAATWSGDKGPTVANTKMAKAVGDWFFERSTFQNVDCSSLNCNPTCPAVSTED

SEQ ID NO: 7521 - protein, 328 aa, Arabidopsis thaliana
MEGGGWCTDIATCVQRKSTMKGSSKLMNKDFGFSGILGGKQSTNPDFYNWNRIKVRYCDGSSFTGDIEAVDPTHKLFFRGARVWRAVIDDLMAKGMSNAQNAILSGCSAGALAAILHCDQFKSTLPKTAKVKCVSDAGYFIHGKDITGGSYIQSYYAKVVATHGSAKSLPASCTSSMKPDLCFFPQYVAKTLQTPLFVINAAFDSWQIKNVLAPTSVDKSKAWKTCKLDLKKCTAAQLQTVQGYRDQVLAALAPVRSATTNGLFLDSCHAHCQGGSAATWSGDKGPTVANTKMAKAVGDWFFERSTFQNVDCSSLNCNPTCPAVSTED

SEQ ID NO: 7522 - DNA, 1085 bp, Arabidopsis thaliana
atatgtcaggaccggtccgcaggacaagcatgtaataaaactgtgtgttttctacattttctatgaaatgggtgtaattgaaagatactaaatgttagggcttttcagaaacttccgttacgttttaggcgtttaacacaattattattttctaaaacgagagccgtttaacgagaaagagaaatttctaactccagagagcgaagaacacaatcccagagtagcagaatctgatccatcccacctttttcaattctcaggcaaagataagtcaaagttgaaaatggaagggactgtgttcacgccttgtttggaaggaatgaagcatgtcaaatctgatcaaggcgagatgcttactaagccatttttagagctttgcaagaccatcttgcctgttatagataaatttggagctgctatgactctcgtcaaatctgacattggtggcaacataacgaggttggagaagaactacttgtctgatcccgacaagttcaagtacttgtacacctttgttcaagtcgaaattgagtctaagatagcaaaaggatcgtctagctgtacaaacggtcttctctggttaaccagagcaatggatttcttagtggagctgttccgaaacttggtagcacatcaagactggtcaatgccacaagcttgtgctgactcataccaaaaaacactcaagaaatggcacggatggctcgccagctctaccttctctatggctttaaagctagctccggacaggaagaagttcatggatgtcatatctggttctggtaacatccaagccgacatggaaaggttttgtgctgagtttggtccgtttcttcatgataatcataagtttctggctagcgtcggtatggatgacatgaaagcttcttaagtcatcatatgattatcgccggtatcaaatcttctttgccggaatctttgtctgttttaacttttctccttccaattatagaacctccaaaaagaaacagaataatgtgttggtttctatctgaatgttcactttatattacaagttataacatacgaatcaatcttatcaactcttcttgttaatgtttgtt

SEQ ID NO: 7523 - protein, 202 aa, Arabidopsis thaliana; identical to SEQ ID NO: 4653

SEQ ID NO: 7524 - protein, 190 aa, Arabidopsis thaliana; identical to SEQ ID NO: 4654

SEQ ID NO: 7525 - protein, 180 aa, Arabidopsis thaliana; identical to SEQ ID NO: 4655

SEQ ID NO: 7526 - DNA, 1272 bp, Arabidopsis thaliana
cacatcttttccttttggtgttcttctcgtcgccatggacgatctctctctagagaaaatcgagatttcgggtccaacattggcgtcactgattcaacgagcttcatcttctcccagtgacgtcgatggcttgatcttcggccaaatccaccgaatcgtctcttctaatctatccgacgattctccggcggatatcgcctcgagttcctcctcatctgatcaaattgtcgccaccgttacaagctttatctgctctggtaaaactgtctccttctacgatccgcttggccgagttgactcgcgtcgaatcgattccctccgagtcgactcaccggaccacctaattgggtggttctccgcccgcaggaaaaccgctaaccgtccatcaatgagagagttagccgtcacgtcgtctctctcgtctcaatttcacttaccaatcgaggatttgcaaaaccctagatcgatgaacatggcttcatccgtgttctttcttcttactatgccattgacggatcagtgcattcacacgcacgagtaccgtgcgtaccagttccgatcctcgaaacaacggctcgaacctagatccgttggtatagtcaacattggaccagcgtttcgaggccattacggttcgtttagtccgaaatcgggatttccaccgttgatctgcgagttgagtagctcagccatgagcgtggattgcgatgagagttccttgagtgcgaagaaacaatcagcgaaagatcagaaggagatcgatgcgttagcagaggggtttcaagttggagagttgaaacgtttggttggagctgaagctgcgaattacacaggcgggattgaagaaatgtatgagagaatgctggcgaagatcgagagcttggcttctgatgttgagaagagctcggctagggtatttcaacaggaaaagcataataggaagttgagaaaccgagtagccagaatcgggagatgaggcttcttttgaatttctttaaggttttttatcgagtctatatacttggaattcaatccaagagaacactggctagtagtggctagcgcaatcggaactatatgcgggaaacgatttgtattatagtttagcgatttcctagttaaacctttcctggctagattgatttgtcacaagagatcccttttccttgtatggctagtttttgtttgaagagaaacaatcaagaatgggattgattcatgtcaagagtttctataattgggcgtataatatatgtttatgaagtttaatac

SEQ ID NO: 7527 - protein, 324 aa, Arabidopsis thaliana
TSFPFGVLLVAMDDLSLEKIEISGPTLASLIQRASSSPSDVDGLIFGQIHRIVSSNLSDDSPADIASSSSSSDQIVATVTSFICSGKTVSFYDPLGRVDSRRIDSLRVDSPDHLIGWFSARRKTANRPSMRELAVTSSLSSQFHLPIEDLQNPRSMNMASSVFFLLTMPLTDQCIHTHEYRAYQFRSSKQRLEPRSVGIVNIGPAFRGHYGSFSPKSGFPPLICELSSSAMSVDCDESSLSAKKQSAKDQKEIDALAEGFQVGELKRLVGAEAANYTGGIEEMYERMLAKIESLASDVEKSSARVFQQEKHNRKLRNRVARIGR

SEQ ID NO: 7528 - protein, 313 aa, Arabidopsis thaliana
MDDLSLEKIEISGPTLASLIQRASSSPSDVDGLIFGQIHRIVSSNLSDDSPADIASSSSSSDQIVATVTSFICSGKTVSFYDPLGRVDSRRIDSLRVDSPDHLIGWFSARRKTANRPSMRELAVTSSLSSQFHLPIEDLQNPRSMNMASSVFFLLTMPLTDQCIHTHEYRAYQFRSSKQRLEPRSVGIVNIGPAFRGHYGSFSPKSGFPPLICELSSSAMSVDCDESSLSAKKQSAKDQKEIDALAEGFQVGELKRLVGAEAANYTGGIEEMYERMLAKIESLASDVEKSSARVFQQEKHNRKLRNRVARIGR

SEQ ID NO: 7529 - protein, 195 aa, Arabidopsis thaliana
MRELAVTSSLSSQFHLPIEDLQNPRSMNMASSVFFLLTMPLTDQCIHTHEYRAYQFRSSKQRLEPRSVGIVNIGPAFRGHYGSFSPKSGFPPLICELSSSAMSVDCDESSLSAKKQSAKDQKEIDALAEGFQVGELKRLVGAEAANYTGGIEEMYERMLAKIESLASDVEKSSARVFQQEKHNRKLRNRVARIGR

SEQ ID NO: 7530 - DNA, 1114 bp, Arabidopsis thaliana
accagtcttcttcttcttcctccaaactctctctttctctctcgagaaccttaagaaaacgttacaaatggctgttgaagcaagacacatgaatctcttctcttctcaatacattaccaacagagaatgtgttaaatctcaaacgaatatgaacaacggacaacaaatcgccggcggtggttttccgttaacaatcggtgatcggaatttacagtacatagatccgattaacagcttcaacaaatcagaaagcgagctcacagctatttcaaaacgtcagagagattcaacgtttgattcagacgctttaatcgcatctcagaaacgcagagcaatcgcgttttctccggcgtcattaatcgacgcagagttagtttcacagatccaacagcaaaactcagaaatcgatagattcgtagcgcaacaaacggaaacgttgagaatcgaattagaagcgagacaaagaacgcaaacgcggatgttagcgtcagcggtacaaaacgcgatattgaaaaagctgaaagcgaaagacgaagagattataagaatggggaaattaaactgggttttacaagaacgtgtgaagaatctctacgtagagaatcagatctggcgtgatttagcacaaactaatgaagctactgctaataatctcagatcaaatctcgaacaagttttagctcaagtcgatgatttagatgcgtttcgtcgtcctttggttgaagaagctgatgatgcagaatctagctgtggaagctgtgacggaggtgatgtaacggcggttgttaacggaggatgtaaacggtgcggtcaattaacggcgagtgtgttggtgttgccttgtcgtcatttgtgtttgtgtacggtttgtggatcgtcggctttgttacggacgtgtcctgtatgtgatatggtcatgactgctagtgtacatgttaacatgtcatcatgaccattttatttatttttttcaagttaaaaagtttagttttattgttttgatttgaggattaaagagtaaaattaggtgaaaaacaaaagaagaagaaatgtgactcttttttgactttttttggagacttttaaagatggaattgattcattatttgtttgc

SEQ ID NO: 7531 - protein, 316 aa, Arabidopsis thaliana
PVFFFFLQTLSFSLENLKKTLQMAVEARHMNLFSSQYITNRECVKSQTNMNNGQQIAGGGFPLTIGDRNLQYIDPINSFNKSESELTAISKRQRDSTFDSDALIASQKRRAIAFSPASLIDAELVSQIQQQNSEIDRFVAQQTETLRIELEARQRTQTRMLASAVQNAILKKLKAKDEEIIRMGKLNWVLQERVKNLYVENQIWRDLAQTNEATANNLRSNLEQVLAQVDDLDAFRRPLVEEADDAESSCGSCDGGDVTAVVNGGCKRCGQLTASVLVLPCRHLCLCTVCGSSALLRTCPVCDMVMTASVHVNMSS

SEQ ID NO: 7532 - protein, 294 aa, Arabidopsis thaliana
MAVEARHMNLFSSQYITNRECVKSQTNMNNGQQIAGGGFPLTIGDRNLQYIDPINSFNKSESELTAISKRQRDSTFDSDALIASQKRRAIAFSPASLIDAELVSQIQQQNSEIDRFVAQQTETLRIELEARQRTQTRMLASAVQNAILKKLKAKDEEIIRMGKLNWVLQERVKNLYVENQIWRDLAQTNEATANNLRSNLEQVLAQVDDLDAFRRPLVEEADDAESSCGSCDGGDVTAVVNGGCKRCGQLTASVLVLPCRHLCLCTVCGSSALLRTCPVCDMVMTASVHVNMSS

SEQ ID NO: 7533 - protein, 287 aa, Arabidopsis thaliana
MNLFSSQYITNRECVKSQTNMNNGQQIAGGGFPLTIGDRNLQYIDPINSFNKSESELTAISKRQRDSTFDSDALIASQKRRAIAFSPASLIDAELVSQIQQQNSEIDRFVAQQTETLRIELEARQRTQTRMLASAVQNAILKKLKAKDEEIIRMGKLNWVLQERVKNLYVENQIWRDLAQTNEATANNLRSNLEQVLAQVDDLDAFRRPLVEEADDAESSCGSCDGGDVTAVVNGGCKRCGQLTASVLVLPCRHLCLCTVCGSSALLRTCPVCDMVMTASVHVNMSS

SEQ ID NO: 7534 - DNA, 653 bp, Arabidopsis thaliana
tccgacaacaaaatcagcgacagctcaaacgttgatatttttctccggcttttctagggtttaaattttctttccgatcagagattaatggcgactctagactccgacgttaccatgattcctgccggagaagcctccagcagcgtagccgcgtcgtcttccaacaagaaagctaagcgattcgaaattaagaagtggagcgccgttgctctctgggcttgggatatcgttgttgacaactgtgcgatctgcagaaaccacatcatggatctttgtatcgagtgtcaggctaatcaggccagtgccacaagtgaagagtgcactgtagcttggggggtttgcaatcacgccttccactttcactgcatcagcagatggctaaagactcgtcaagtttgtccattggataacagtgagtgggagtttcagaaatatggtcactaaatcaacaaatggttccagcaagcatgtgtctaatcgtgaagacatcaggttcatttggttaccaccgcatatgataactaaagattgttcaagtttttgccctttttttggtactgtattttacaatttgtggaaacagagatttactgttcagtgttcactaaacctattatggttgtgctttgggtgacgtctttgatttcaaaatt

SEQ ID NO: 7535 - protein, 118 aa, Arabidopsis thaliana
MATLDSDVTMIPAGEASSSVAASSSNKKAKRFEIKKWSAVALWAWDIVVDNCAICRNHIMDLCIECQANQASATSEECTVAWGVCNHAFHFHCISRWLKTRQVCPLDNSEWEFQKYGH

SEQ ID NO: 7536 - protein, 109 aa, Arabidopsis thaliana
MIPAGEASSSVAASSSNKKAKRFEIKKWSAVALWAWDIVVDNCAICRNHIMDLCIECQANQASATSEECTVAWGVCNHAFHFHCISRWLKTRQVCPLDNSEWEFQKYGH

SEQ ID NO: 7537 - protein, 66 aa, Arabidopsis thaliana
MVTKSTNGSSKHVSNREDIRFIWLPPHMITKDCSSFCPFFGTVFYNLWKQRFTVQCSLNLLWLCFG

SEQ ID NO: 7538 - DNA, 1041 bp, Arabidopsis thaliana
gatatatctctagtctagacattatttgtctacaaacgttttgtattgacttggccatctcattccaacaagatacaactcatcactccaaacattcaacttccatataaaccattcccttccgatctcactttccaaatcactcttcacactttaactaagcaaaccaataatggctaccactcgtctaactctagctcctctcctcctcatcgcagccgtactactcgcaaccaaggcaacggctcagccggcagcccccactccagagcctgctggtcccatcaacctcactgcgatcctcgaaaaaggtggtcaattcactactttcatccatcttctaaacatcactcaagtcggtagtcaagtgaacattcaagtcaatagttcatccgaaggtatgacggtgttcgcaccaacagacaatgcttttcaaaaccttaaacccggaaccctaaaccagttaagccctgacgatcaagttaaactcattctctaccacgttagccccaaatattacagtatggatgatctcctctccgtgagtaacccggttaggactcaagcttctggccgagacaacggtgtttacgggcttaacttcaccggccaaacaaaccaaatcaatgtctctactggttatgtggagacacgtattagcaattcgttgaggcaacaacgtcctctcgcagtttatgttgtcgacatggttttgttgcccggtgagatgttcggagagcacaagctttcgccgattgctcctgcccctaaatctaaatccggtggggttaccgatgactccggctccactaagaaggcagcgtcaccgtcggataagtcaggctccggtgagaagaaagtcggactagggtttggtcttggacttattgtcttatgtttgaaatttctcttttgaaaatttaatagcaaagatttgttttgctttctattgattttatcctgcgatgtgaggtataaatatgaaatttgttgattaagttccgtgaaataaaatgtgagatttttaataaaaaaaaaaaa

SEQ ID NO: 7539 - protein, 247 aa, Arabidopsis thaliana
MATTRLTLAPLLLIAAVLLATKATAQPAAPTPEPAGPINLTAILEKGGQFTTFIHLLNITQVGSQVNIQVNSSSEGMTVFAPTDNAFQNLKPGTLNQLSPDDQVKLILYHVSPKYYSMDDLLSVSNPVRTQASGRDNGVYGLNFTGQTNQINVSTGYVETRISNSLRQQRPLAVYVVDMVLLPGEMFGEHKLSPIAPAPKSKSGGVTDDSGSTKKAASPSDKSGSGEKKVGLGFGLGLIVLCLKFLF

SEQ ID NO: 7540 - protein, 171 aa, Arabidopsis thaliana
MTVFAPTDNAFQNLKPGTLNQLSPDDQVKLILYHVSPKYYSMDDLLSVSNPVRTQASGRDNGVYGLNFTGQTNQINVSTGYVETRISNSLRQQRPLAVYVVDMVLLPGEMFGEHKLSPIAPAPKSKSGGVTDDSGSTKKAASPSDKSGSGEKKVGLGFGLGLIVLCLKFLF

SEQ ID NO: 7541 - protein, 130 aa, Arabidopsis thaliana
MDDLLSVSNPVRTQASGRDNGVYGLNFTGQTNQINVSTGYVETRISNSLRQQRPLAVYVVDMVLLPGEMFGEHKLSPIAPAPKSKSGGVTDDSGSTKKAASPSDKSGSGEKKVGLGFGLGLIVLCLKFLF

SEQ ID NO: 7542 - DNA, 2034 bp, Arabidopsis thaliana
aatctctctgatgactataaagcagggagtagaagaacctgaaagaactcgcctttgtctctcattcttcttctccatttcgaaaagaagatgaaggtgatagataagatccagtcattagccgacgaaggcaaaacagcgttttccttcgaattcttcccaccaaagacagaagatggagtcgacaatctctttgagagaatggatcgaatggttgcttatggtccaacgttttgcgatatcacttggggagctggtggatctaccgcagatctaacgcttgatatagcttcgaggatgcaaaacgttgtttgtgttgagagtatgatgcatcttacgtgtactaacatgcctgttgagaagattgatcatgctcttgagactattagatctaatgggattcagaatgtgcttgctcttagaggtgatcctcctcatggtcaagataagtttgttcaggttgaaggtggttttgattgtgctttggatcttgttaatcacattcgtagcaagtatggtgattactttggtatcactgtcgctggttatcctgaggcgcatcctgatgttattggtgagaatggtcttgcgtctaatgaagcttatcagagtgatcttgagtatctgaagaaaaagattgatgctggagctgatctgattgttactcagcttttctatgatactgatatattcctcaagtttgtgaatgattgtcggcaaattgggattagttgtcccattgttcctggaattatgcctattaataactacagaggctttttgcgtatgactggtttctgcaagactaagataccagttgaggtgatggctgccttggagcctatcaaggataacgaagaagctgtgaaagcctatggtattcaccttggaacagagatgtgtaaaaagatgttggctcatggagtcaagtctcttcatctctacacattgaacatggagaaatctgctcttgcaatattgatgaatcttggtatgattgatgagtccaaaatttctcgttctttaccctggagacgccctgcaaatgttttccgtactaaggaagatgtgcgccccattttctgggcaaaccgtccaaagagctacatttctagaaccaagggctgggaagatttcccacaaggccggtggggtgattcacgcagtgcttcatatggtgcactctcggatcatcagttctcacgtccgcgagcacgtgacaagaagcttcaacaagaatgggttgtcccactgaaaagtgttgaagatattcaggagaaattcaaggagctctgccttggaaaccttaaaagcagtccctggtctgaattagatggactccagccagagacaaggataataaacgagcaactgataaaagtcaactccaaaggcttcttgaccatcaatagccaaccatcagtcaacgccgagagatctgattccccaactgttggatggggaggtcctgttggatatgtataccaaaaggcttatctagagttcttctgctcaaaggagaaattagatgcagtggtggagaaatgcaaagctttgccatcgattacttacatggctgtgaacaaaggagaacagtgggtatcgaacactgcccaagctgatgtgaatgctgtaacttggggagttttcccggctaaggaaatcattcaaccaaccattgtcgatcccgctagcttcaacgtctggaaggatgaagcatttgagacttggtcaagaagctgggctaacttgtacccagaagccgacccttccagaaacttgctcgaggaggtgaagaacagctactatttggtaagcttggtggagaacgattacatcaatggtgacatattcgcggtgtttgctgatctttgagaaaatcaagagacaactacagtatatcggtttcctactgctttcaagatttgcttttgtactttctctaaaatattgggattttgttttttacatctgtctaccataacagtattgatgtgcaagtaatgttattgataaaaaggcatcagtttcact

SEQ ID NO: 7543 - protein, 594 aa, Arabidopsis thaliana
MKVIDKIQSLADEGKTAFSFEFFPPKTEDGVDNLFERMDRMVAYGPTFCDITWGAGGSTADLTLDIASRMQNVVCVESMMHLTCTNMPVEKIDHALETIRSNGIQNVLALRGDPPHGQDKFVQVEGGFDCALDLVNHIRSKYGDYFGITVAGYPEAHPDVIGENGLASNEAYQSDLEYLKKKIDAGADLIVTQLFYDTDIFLKFVNDCRQIGISCPIVPGIMPINNYRGFLRMTGFCKTKIPVEVMAALEPIKDNEEAVKAYGIHLGTEMCKKMLAHGVKSLHLYTLNMEKSALAILMNLGMIDESKISRSLPWRRPANVFRTKEDVRPIFWANRPKSYISRTKGWEDFPQGRWGDSRSASYGALSDHQFSRPRARDKKLQQEWVVPLKSVEDIQEKFKELCLGNLKSSPWSELDGLQPETRIINEQLIKVNSKGFLTINSQPSVNAERSDSPTVGWGGPVGYVYQKAYLEFFCSKEKLDAVVEKCKALPSITYMAVNKGEQWVSNTAQADVNAVTWGVFPAKEIIQPTIVDPASFNVWKDEAFETWSRSWANLYPEADPSRNLLEEVKNSYYLVSLVENDYINGDIFAVFADL

SEQ ID NO: 7544 - protein, 557 aa, Arabidopsis thaliana
MDRMVAYGPTFCDITWGAGGSTADLTLDIASRMQNVVCVESMMHLTCTNMPVEKIDHALETIRSNGIQNVLALRGDPPHGQDKFVQVEGGFDCALDLVNHIRSKYGDYFGITVAGYPEAHPDVIGENGLASNEAYQSDLEYLKKKIDAGADLIVTQLFYDTDIFLKFVNDCRQIGISCPIVPGIMPINNYRGFLRMTGFCKTKIPVEVMAALEPIKDNEEAVKAYGIHLGTEMCKKMLAHGVKSLHLYTLNMEKSALAILMNLGMIDESKISRSLPWRRPANVFRTKEDVRPIFWANRPKSYISRTKGWEDFPQGRWGDSRSASYGALSDHQFSRPRARDKKLQQEWVVPLKSVEDIQEKFKELCLGNLKSSPWSELDGLQPETRIINEQLIKVNSKGFLTINSQPSVNAERSDSPTVGWGGPVGYVYQKAYLEFFCSKEKLDAVVEKCKALPSITYMAVNKGEQWVSNTAQADVNAVTWGVFPAKEIIQPTIVDPASFNVWKDEAFETWSRSWANLYPEADPSRNLLEEVKNSYYLVSLVENDYINGDIFAVFADL

SEQ ID NO: 7545 - protein, 554 aa, Arabidopsis thaliana
MVAYGPTFCDITWGAGGSTADLTLDIASRMQNVVCVESMMHLTCTNMPVEKIDHALETIRSNGIQNVLALRGDPPHGQDKFVQVEGGFDCALDLVNHIRSKYGDYFGITVAGYPEAHPDVIGENGLASNEAYQSDLEYLKKKIDAGADLIVTQLFYDTDIFLKFVNDCRQIGISCPIVPGIMPINNYRGFLRMTGFCKTKIPVEVMAALEPIKDNEEAVKAYGIHLGTEMCKKMLAHGVKSLHLYTLNMEKSALAILMNLGMIDESKISRSLPWRRPANVFRTKEDVRPIFWANRPKSYISRTKGWEDFPQGRWGDSRSASYGALSDHQFSRPRARDKKLQQEWVVPLKSVEDIQEKFKELCLGNLKSSPWSELDGLQPETRIINEQLIKVNSKGFLTINSQPSVNAERSDSPTVGWGGPVGYVYQKAYLEFFCSKEKLDAVVEKCKALPSITYMAVNKGEQWVSNTAQADVNAVTWGVFPAKEIIQPTIVDPASFNVWKDEAFETWSRSWANLYPEADPSRNLLEEVKNSYYLVSLVENDYINGDIFAVFADL

SEQ ID NO: 7546 - DNA, 2354 bp, Arabidopsis thaliana
attttttggtaatcgtttctaagaaatctctcctcccgttgcctgtggactgcctgaatcaaaagacaatggcaacatgttcttcaagcttattggtgttaccaaatttgagattgagttctaaccaaagacgcaatttcaaggtaagagctcaaatctctggtgaaaacaagaaggcgacatcattggaaccagtgaacaacaacggttcggtctctttgtctactactgttcaaaaccaaaaaggggcaaatgaagtgaatgggaaagggaaatccaagagaaagatagtgagtgatgaaattgagttgttatgggatgatgggtatggctccaaatctgttaaagattactttgctgcggctaaagagattttgaaggctgatggtggtcctccacggtggtttagtcccgttgattgtggtcgacctgttgaagatgctcctacgttactcttcttacctgggatggatggcacagggatgggccttgttccacatcacaaagctcttggcaaggcttttcatgtctcgtgcctgcatattcctgtacttgatcgaactccatttgaagggcttctgaaagtagtcgaagatgttttgaggcaggagcaggctacacgtcctaataagccgatatatctcgtgggcgattcctttggaggatgcctggctcttgctgttgctgctagaaaccgttcgttagacttggtgttgatactagtcaacccagctacatcatttgataggtcaccgctacagccgttgctgcctatattagagatggtgccagaggagcttcattttactgttccatatgctctaagctttattatgggtgatccgataaagatggcgacacttggtatcgacaaccaacttccaacaggagtaaaaattgaaaagttgagacaaaggcttactaaaacaatgctcccgcttctctctgagctcggtggaattattccacgggaaaccttactttggaagcttaagttactgagatctggctgtgcttatgccaattcccgcatccatgctgttcaagctgaagtcttggtccttgctagtggaaaggacatgatgcttcctagccaagaagaagcaaagcggcttcacgggttacttaaaaactgttcagttcgatgcttcaaggacaatgggcatacccttttattggaagatagcatcagtttgctcacagttataaaaggtacaggcaagtaccggcggtcctggagatatgatttggtttctgatttcttgcctccaagtaagggagaacttgcttacgcccttgatgaagtgcttggattcttgcgaaatgctgttggttctgtgtttttttcaactatggaagacgggaaaatagtgaagggacttgctggtgttccagataaaggtccggtgctacttgttggttaccacatgttgatgggtcttgaacttggtccaatgtccgaggcgtttataaaagagaagaacattctctttcgtggaatggcccatccggttctgtattctgataatgatccagctaaggcgtttgattatggtgactggattaaagtatttggtgcctatcctgtcaccgcaaccaatctatttaagctgttagattctaaatctcatgtccttctcttccctggtggtgcacgagaggctctccataaccggggtgaacaatacaaactaatttggcctgaacagcaagagtttgtaagaatggcagcacggtttggtgcaacaatagtgccgtttggaacagttggtgaagacgacatagctgaattggttcttgattacaacgacctgatgaagatccctattcttaatgactatatcacggaagttactcgcgataccaaacaatttaaattgagggaagagtcagagggagaggtggcaaaccagccactctacctaccaggactcataccgaaagtcccgggtaggttctattacctgtttgggaaaccgatagagacaaagggaagaccagagcttgtaaaagacaaagaagaagcaaatcaagtttacttggaggtaaaggcggaggtagagaatagtatagcctacctgttgaagaaacgagaggaagatccatacagaagtgtcttagacagattaaactacagtttgacgcacactaccgcaactcatgttccatctttcgagccatgattcgaacaaaaaaaaaagggtaagtttagtcttgttacatacacaaaagaaaacaaaaaaattgttgtgtcataatgtctcgtatagaattttttatgtatattccatttcttatatagatgaaaacattatttactcgagtgaaagaacttcataaatttacatttgctt

SEQ ID NO: 7547 - protein, 726 aa, Arabidopsis thaliana
FLVIVSKKSLLPLPVDCLNQKTMATCSSSLLVLPNLRLSSNQRRNFKVRAQISGENKKATSLEPVNNNGSVSLSTTVQNQKGANEVNGKGKSKRKIVSDEIELLWDDGYGSKSVKDYFAAAKEILKADGGPPRWFSPVDCGRPVEDAPTLLFLPGMDGTGMGLVPHHKALGKAFHVSCLHIPVLDRTPFEGLLKVVEDVLRQEQATRPNKPIYLVGDSFGGCLALAVAARNRSLDLVLILVNPATSFDRSPLQPLLPILEMVPEELHFTVPYALSFIMGDPIKMATLGIDNQLPTGVKIEKLRQRLTKTMLPLLSELGGIIPRETLLWKLKLLRSGCAYANSRIHAVQAEVLVLASGKDMMLPSQEEAKRLHGLLKNCSVRCFKDNGHTLLLEDSISLLTVIKGTGKYRRSWRYDLVSDFLPPSKGELAYALDEVLGFLRNAVGSVFFSTMEDGKIVKGLAGVPDKGPVLLVGYHMLMGLELGPMSEAFIKEKNILFRGMAHPVLYSDNDPAKAFDYGDWIKVFGAYPVTATNLFKLLDSKSHVLLFPGGAREALHNRGEQYKLIWPEQQEFVRMAARFGATIVPFGTVGEDDIAELVLDYNDLMKIPILNDYITEVTRDTKQFKLREESEGEVANQPLYLPGLIPKVPGRFYYLFGKPIETKGRPELVKDKEEANQVYLEVKAEVENSIAYLLKKREEDPYRSVLDRLNYSLTHTTATHVPSFEP

SEQ ID NO: 7548 - protein, 704 aa, Arabidopsis thaliana
MATCSSSLLVLPNLRLSSNQRRNFKVRAQISGENKKATSLEPVNNNGSVSLSTTVQNQKGANEVNGKGKSKRKIVSDEIELLWDDGYGSKSVKDYFAAAKEILKADGGPPRWFSPVDCGRPVEDAPTLLFLPGMDGTGMGLVPHHKALGKAFHVSCLHIPVLDRTPFEGLLKVVEDVLRQEQATRPNKPIYLVGDSFGGCLALAVAARNRSLDLVLILVNPATSFDRSPLQPLLPILEMVPEELHFTVPYALSFIMGDPIKMATLGIDNQLPTGVKIEKLRQRLTKTMLPLLSELGGIIPRETLLWKLKLLRSGCAYANSRIHAVQAEVLVLASGKDMMLPSQEEAKRLHGLLKNCSVRCFKDNGHTLLLEDSISLLTVIKGTGKYRRSWRYDLVSDFLPPSKGELAYALDEVLGFLRNAVGSVFFSTMEDGKIVKGLAGVPDKGPVLLVGYHMLMGLELGPMSEAFIKEKNILFRGMAHPVLYSDNDPAKAFDYGDWIKVFGAYPVTATNLFKLLDSKSHVLLFPGGAREALHNRGEQYKLIWPEQQEFVRMAARFGATIVPFGTVGEDDIAELVLDYNDLMKIPILNDYITEVTRDTKQFKLREESEGEVANQPLYLPGLIPKVPGRFYYLFGKPIETKGRPELVKDKEEANQVYLEVKAEVENSIAYLLKKREEDPYRSVLDRLNYSLTHTTATHVPSFEP

SEQ ID NO: 7549 - protein, 571 aa, Arabidopsis thaliana
MDGTGMGLVPHHKALGKAFHVSCLHIPVLDRTPFEGLLKVVEDVLRQEQATRPNKPIYLVGDSFGGCLALAVAARNRSLDLVLILVNPATSFDRSPLQPLLPILEMVPEELHFTVPYALSFIMGDPIKMATLGIDNQLPTGVKIEKLRQRLTKTMLPLLSELGGIIPRETLLWKLKLLRSGCAYANSRIHAVQAEVLVLASGKDMMLPSQEEAKRLHGLLKNCSVRCFKDNGHTLLLEDSISLLTVIKGTGKYRRSWRYDLVSDFLPPSKGELAYALDEVLGFLRNAVGSVFFSTMEDGKIVKGLAGVPDKGPVLLVGYHMLMGLELGPMSEAFIKEKNILFRGMAHPVLYSDNDPAKAFDYGDWIKVFGAYPVTATNLFKLLDSKSHVLLFPGGAREALHNRGEQYKLIWPEQQEFVRMAARFGATIVPFGTVGEDDIAELVLDYNDLMKIPILNDYITEVTRDTKQFKLREESEGEVANQPLYLPGLIPKVPGRFYYLFGKPIETKGRPELVKDKEEANQVYLEVKAEVENSIAYLLKKREEDPYRSVLDRLNYSLTHTTATHVPSFEP

SEQ ID NO: 7550 - DNA, 1817 bp, Arabidopsis thaliana
accggaattttctcgcttttgtctactctcctccatctccgaggttctccaagctcagctcctcttcccatcattcatccgaccgccttatccggagaactacaaagaggaaaccaagattgttttgttttgttagactctaccccttttccgattcacatggtaaggacattgaggtagagaataatactaaaaagcaatgggagatgggagttccagtagatccaacagctcaaacagcactagtgagaaaccagagtggctgcaacagtacaatctcgttggtaagattggtgaaggcacttatggtcttgttttcttggctagaaccaagactccgcctaaaagacctattgctatcaagaagtttaagcagtccaaagatggagatggagtttccccgactgctatccgcgagatcatgttgcttagagagatttcccatgagaacgtcgtgaagcttgtgaatgtccacatcaattttgcagacatgtctctgtatcttgcctttgattatgccgagtacgatctctatgaaatcatcaggcaccacagagacaaagtcggccattcgttaaacacatacacagttaagtctttgctctggcagcttctcaacggattgaactatcttcacagtaattggattatacacagagatttgaaaccgtcgaatatcttggttatgggtgatgcagaagagcacggaatagtgaaaatagctgatttcgggctcgcaaggatatatcaagctccgttgaaaccactatcggataacggagttgtggtcacaatctggtaccgagcaccagagctgcttcttggttcgaagcactacacgagcgctgttgatatgtgggcagttgggtgtatattcgcggagttactaactcttaaaccgttgtttcaaggagcagaagcgaaatcgtctcaaaaccctttccagttagatcaacttgacaagatattcaagatcttaggccacccgacgatggataaatggccaacactagttaaccttccacactggcaaaatgatgttcaacacattcaagctcacaaatacgacagtgtgggtctccacaacgtggttcacctgaatcagaaaagtcctgcgtatgatctgttatccaaaatgctggaatatgatcctctaaagcggatcacggcttcacaagcactagaacacgagtatttccgaatggatcctctcccaggacggaacgcatttgtagccagccaaccgatggagaagaatgtgaattacccaactcgtccagtagatacaaacaccgatttcgaaggcacgacaagcatcaatccgcctcaagcagtagcagcaggaaacgtagcagggaacatggcaggagctcatggaatgggcagtagatcgatgccaagaccaatggttgcacataacatgcagaggatgcagcaatctcaaggcatgatggcttataatttcccggcacaggcagggcttaacccgagtgttccgctgcagcagcagcgcgggatggctcaaccgcaccagcagcaacagctaagaagggaagatcccggaatgggtatgtcaggttacgcacctcctaacaaatccagacgcctctaaaggtaaaatcgagatcatcagtctcgggttagaatctgtgtgtttgccgcagaagaaagcgttgcgatttgctttatagagtagagttagattgtaatgcagcatgtggaatgttgctattcatatggatggattggattctctgtagtttttgtataaacatcctctcaagtatttgttaattatattagatcatcatttctcc

SEQ ID NO: 7551 - protein, 470 aa, Arabidopsis thaliana
MGDGSSSRSNSSNSTSEKPEWLQQYNLVGKIGEGTYGLVFLARTKTPPKRPIAIKKFKQSKDGDGVSPTAIREIMLLREISHENVVKLVNVHINFADMSLYLAFDYAEYDLYEIIRHHRDKVGHSLNTYTVKSLLWQLLNGLNYLHSNWIIHRDLKPSNILVMGDAEEHGIVKIADFGLARIYQAPLKPLSDNGVVVTIWYRAPELLLGSKHYTSAVDMWAVGCIFAELLTLKPLFQGAEAKSSQNPFQLDQLDKIFKILGHPTMDKWPTLVNLPHWQNDVQHIQAHKYDSVGLHNVVHLNQKSPAYDLLSKMLEYDPLKRITASQALEHEYFRMDPLPGRNAFVASQPMEKNVNYPTRPVDTNTDFEGTTSINPPQAVAAGNVAGNMAGAHGMGSRSMPRPMVAHNMQRMQQSQGMMAYNFPAQAGLNPSVPLQQQRGMAQPHQQQQLRREDPGMGMSGYAPPNKSRRL

SEQ ID NO: 7552 - protein, 396 aa, Arabidopsis thaliana
MLLREISHENVVKLVNVHINFADMSLYLAFDYAEYDLYEIIRHHRDKVGHSLNTYTVKSLLWQLLNGLNYLHSNWIIHRDLKPSNILVMGDAEEHGIVKIADFGLARIYQAPLKPLSDNGVVVTIWYRAPELLLGSKHYTSAVDMWAVGCIFAELLTLKPLFQGAEAKSSQNPFQLDQLDKIFKILGHPTMDKWPTLVNLPHWQNDVQHIQAHKYDSVGLHNVVHLNQKSPAYDLLSKMLEYDPLKRITASQALEHEYFRMDPLPGRNAFVASQPMEKNVNYPTRPVDTNTDFEGTTSINPPQAVAAGNVAGNMAGAHGMGSRSMPRPMVAHNMQRMQQSQGMMAYNFPAQAGLNPSVPLQQQRGMAQPHQQQQLRREDPGMGMSGYAPPNKSRRL

SEQ ID NO: 7553 - protein, 373 aa, Arabidopsis thaliana
MSLYLAFDYAEYDLYEIIRHHRDKVGHSLNTYTVKSLLWQLLNGLNYLHSNWIIHRDLKPSNILVMGDAEEHGIVKIADFGLARIYQAPLKPLSDNGVVVTIWYRAPELLLGSKHYTSAVDMWAVGCIFAELLTLKPLFQGAEAKSSQNPFQLDQLDKIFKILGHPTMDKWPTLVNLPHWQNDVQHIQAHKYDSVGLHNVVHLNQKSPAYDLLSKMLEYDPLKRITASQALEHEYFRMDPLPGRNAFVASQPMEKNVNYPTRPVDTNTDFEGTTSINPPQAVAAGNVAGNMAGAHGMGSRSMPRPMVAHNMQRMQQSQGMMAYNFPAQAGLNPSVPLQQQRGMAQPHQQQQLRREDPGMGMSGYAPPNKSRRL

SEQ ID NO: 7554 - DNA, 2291 bp, Arabidopsis thaliana
aagatttttagtcatccaaaaggtcgattcgccgatctagaagacgacgacgacgactaccaaacactccgatcaacggtcctccgattctctctcgctttcgtggcgacctcaaaaatgtcgcagcaaatcagcggtaataataatatcccgctgagtgaagtttactggtctctcgttaacaaagccgataagaaattctccaagatcagagacttgcccttctatgaacgctccaggtatgagaactatttcttcaaggtattcaaagtatacacacaactatggaagtttcagcaagagaataggcagaagcttgttgaagctggacttaagagatgggagattggagagatcgcttctcgcattgcccagctttactatggacattatatgcgaacaagtgatgctggttacttatccgagtcctatgtattctacgaagcaatactcactagggagtacttcaaagatggattgtttcaggatctcaatattgcaaacaagcagcttcggtttcttgcaaggtttcttatggtgtgtttggttcttggccgccgtgagatggtgcatcaactcgttgatcagtttaaacggttgattgatgaatgcaagaggacattccaggaaaccgattttaaggaatggaaggtggtggcgcaggaaatagttagatttctgaaatcggacactgcattcatgaacattagacctctaagatacagtcttgtattggatcctaatctggatgctggtactccgcgtgcaagtaggtctttaaggttgacggatgctatcttgagcagttattactgtaacgaggtcaagtattcggagctcacgctcgattcttttaggatgcttcaatgcttagagtgggaaccgagtggttcactatatcaatcaactggtgctaaaatgggtcagaatgctcccgttggagttgctcgtattaactcccagagcatgaatgatcctactttgccacctaaccctcgcaaagctgtcctttatcgtccatccataacacattttttggctgttttggccaccatttgtgaggagcttccttctcatggcattcttttattatatctgtctgcttctggtaatgcaagattggacagatttcatcatctcccttgagtgctagaagtgcaaccagtgttgaggagaatatcttgagagactttgaatctcacacaatcaaacaagagacagaaccatcacttcaaattacgccatctggtcagtctttgaggcaaatcagtgaggacgcagtcagtaccccatgtggtttgtcttttggcagtcatgggctcacaggatcaagctacatatatccctctgatttagttccatttacaaggaaacctcttttcataatcattgacagtgatagcagcacagtttttaaaaatatttgtggagcggagaaaggagaaccagccgcgttacttctgtctccatcacatactcctccgcttatctctgctgatttctctcgtcaacctagtggtagccttttcaccatttttctcacgtcaccagtccaagcgttttgcttgttaagtgagatttccgcctctgatatggaaacggatatttttactaaggccgagaagcttctttcctcgtctatgaacgaatgggcttcgacattggcaacatcagatacccttcaccctgtttggtcacagatactaaaagatcccttcttgagacgactactcctaagattcatattctgccgggctgtcttggcactgtacactccagtcttcaataacaaacaaaatcagccagagtgctgtccgtctctcccagaatcgctattaccaactgctcctgctgttcaatccgctgtgtttcagatggccaatgtatttggtgctacaagtaaatttactatacctcaagatatcacaatgctcgaaagcttctaagaagcttacctctgcgacgataagagcttcggtctgaaatattcttgttcaaatcgggaatctcgatttggtttcccggtaaggtatactattattagatttggagaatgcttcttccatgtcattggagcattatgactgaacatcttttgagattaatggtgcaagatcattttggtgtgaacaaagtaagtgtttgatgcagaacatgtcatcgactctgatgtatcttcattttgaaaaaggattcgttttgggttttgtatattgatcaacttttacagtctaatggaaattcaccatcttctgtaattcgatcgagaaaataagaggttcaccactgtt

SEQ ID NO: 7555 - protein, 381 aa, Arabidopsis thaliana
KIFSHPKGRFADLEDDDDDYQTLRSTVLRFSLAFVATSKMSQQISGNNNIPLSEVYWSLVNKADKKFSKIRDLPFYERSRYENYFFKVFKVYTQLWKFQQENRQKLVEAGLKRWEIGEIASRIAQLYYGHYMRTSDAGYLSESYVFYEAILTREYFKDGLFQDLNIANKQLRFLARFLMVCLVLGRREMVHQLVDQFKRLIDECKRTFQETDFKEWKVVAQEIVRFLKSDTAFMNIRPLRYSLVLDPNLDAGTPRASRSLRLTDAILSSYYCNEVKYSELTLDSFRMLQCLEWEPSGSLYQSTGAKMGQNAPVGVARINSQSMNDPTLPPNPRKAVLYRPSITHFLAVLATICEELPSHGILLLYLSASGNARLDRFHHLP

SEQ ID NO: 7556 - protein, 342 aa, Arabidopsis thaliana
MSQQISGNNNIPLSEVYWSLVNKADKKFSKIRDLPFYERSRYENYFFKVFKVYTQLWKFQQENRQKLVEAGLKRWEIGEIASRIAQLYYGHYMRTSDAGYLSESYVFYEAILTREYFKDGLFQDLNIANKQLRFLARFLMVCLVLGRREMVHQLVDQFKRLIDECKRTFQETDFKEWKVVAQEIVRFLKSDTAFMNIRPLRYSLVLDPNLDAGTPRASRSLRLTDAILSSYYCNEVKYSELTLDSFRMLQCLEWEPSGSLYQSTGAKMGQNAPVGVARINSQSMNDPTLPPNPRKAVLYRPSITHFLAVLATICEELPSHGILLLYLSASGNARLDRFHHLP

SEQ ID NO: 7557 - protein, 250 aa, Arabidopsis thaliana
MRTSDAGYLSESYVFYEAILTREYFKDGLFQDLNIANKQLRFLARFLMVCLVLGRREMVHQLVDQFKRLIDECKRTFQETDFKEWKVVAQEIVRFLKSDTAFMNIRPLRYSLVLDPNLDAGTPRASRSLRLTDAILSSYYCNEVKYSELTLDSFRMLQCLEWEPSGSLYQSTGAKMGQNAPVGVARINSQSMNDPTLPPNPRKAVLYRPSITHFLAVLATICEELPSHGILLLYLSASGNARLDRFHHLP

SEQ ID NO: 7558 - DNA, 1401 bp, Arabidopsis thaliana
gtgtcggttccagaaatcagaaagtaaatcatacagtcaaaaccgcttcttctataaaaccctttttagctcaatcccaaaacgcaataaaaaacaaaacgctctccagaatttcgaaacttctaagatattttgttttctctcttaacgatggcgaagagtgttttggttaccggcggcgctggctatatcggaagtcatactgttcttcaactgcttgaaggtggttactccgccgtcgttgttgacaattacgacaattcctctgctgcttcgcttcagcgcgtgaagaaactcgccggcgaaaacggaaaccgcctctccttccaccaggtggatctccgagacaggcctgcgcttgagaagatattctcagaaacaaagtttgatgcagtgatacactttgctggacttaaagcagtaggtgagagtgtggagaagcctttgctctattataataataacattgttggcactgttactcttttggaggttatggctcaatacggctgcaaaaatcttgtattttcatcatcagctactgtctatggctggcctaaggaggttccttgcactgaggagtcaccaatttctgccactaacccatatggccgtacaaagctttttatcgaagagatttgccgggatgtacatcgttctgactcggaatggaagatcatattgcttagatacttcaaccctgttggtgcacatcctagtggttacattggtgaagatcctcttggagttcccaacaatctcatgccttatgtccaacaagttgcagttggccggagacctcaccttactgtctttggaaccgactacaagacaaaggatggtacaggggttagagattacattcatgtcatggatttagcagatggacacatagctgctctgcgtaagctagatgatctcaaaatcagttgtgaggtatacaatcttggaacgggtaatggaacatcggtcctagaaatggtcgctgcctttgaaaaagcatccggaaagaaaatccctttggtgatggctggacgacgtcctggagacgctgaagttgtttacgcctcaacggaaaaagcagagcgcgaactaaattggaaggctaagaatgggatagaggagatgtgtagggatctatggaattgggcaagcaataacccttacggctacaattcctcctccaacggctcctcttcataattctccttttttaatttttattttgccttttttgcttacttatattcatataaacaaacacataaaaaaaaagaagagaaaggctgacaagtacccaaactttagaagaaattgaggaaaattcttgtactatcaatttatcatagaaactatatttattaaatcgttagttttcaatcgttgggagttttttttctt

SEQ ID NO: 7559 - protein, 350 aa, Arabidopsis thaliana
MAKSVLVTGGAGYIGSHTVLQLLEGGYSAVVVDNYDNSSAASLQRVKKLAGENGNRLSFHQVDLRDRPALEKIFSETKFDAVIHFAGLKAVGESVEKPLLYYNNNIVGTVTLLEVMAQYGCKNLVFSSSATVYGWPKEVPCTEESPISATNPYGRTKLFIEEICRDVHRSDSEWKIILLRYFNPVGAHPSGYIGEDPLGVPNNLMPYVQQVAVGRRPHLTVFGTDYKTKDGTGVRDYIHVMDLADGHIAALRKLDDLKISCEVYNLGTGNGTSVLEMVAAFEKASGKKIPLVMAGRRPGDAEVVYASTEKAERELNWKAKNGIEEMCRDLWNWASNNPYGYNSSSNGSSS

SEQ ID NO: 7560 - protein, 235 aa, Arabidopsis thaliana
MAQYGCKNLVFSSSATVYGWPKEVPCTEESPISATNPYGRTKLFIEEICRDVHRSDSEWKIILLRYFNPVGAHPSGYIGEDPLGVPNNLMPYVQQVAVGRRPHLTVFGTDYKTKDGTGVRDYIHVMDLADGHIAALRKLDDLKISCEVYNLGTGNGTSVLEMVAAFEKASGKKIPLVMAGRRPGDAEVVYASTEKAERELNWKAKNGIEEMCRDLWNWASNNPYGYNSSSNGSSS

SEQ ID NO: 7561 - DNA, 2290 bp, Arabidopsis thaliana
atctttctctctttcggatcattctctcctctgattccgaatcgggtaaattattatggattcttcttcttcgtcttcctccgccgccgcacgccgccgcatcaacgctatccactctcacctcgtcacctcttctcgctcttcccctctcctccgctccaatcccaccgccggcgagttctgtcttgataatggctatagtgttgttcttcccgagaaattgaatactggcaattggaacgtctacagatctgcaaaatctccgttcaagctcgttagtagattcccagatcatcctgacatcgctactctccatgacaattttgagcatgctgttcatgattttcgagattacaagtatttaggaactcgtgttcgtgtcgacggaactgttggagactacaaatggatgacatatggagaagctggtacagcaagaactgctttaggttctggtttggttcatcacggaatccccatgggatcttctgttggaatttacttcatcaatcgcccagagtggctcattgttgatcatgcttgttcttcttattcttatgtgtctgttcctttgtatgatactcttggtcctgatgctgtgaaatttattgtcaatcatgcaactgtgcaagccatattttgtgtggcagagactttaaactctttacttagctgtttgtctgagatgccaagtgtacgcctggtggtggttgttggagggttaaatgaatctttaccctcgcttccctcatcatcaggagtgaaagttgtatcctattcggtgttactgaatcagggtcgtagtaaccctcagcgattttttccaccaaaacccgatgatgttgcaaccatatgctatacaagcggaacaactgggacacccaagggagtcgtattaactcatgcaaacttgattgccaatgttgctggctctagctttagtgtgaagtttttctcttcagatgtttacatttcgtatcttccacttgctcacatttacgaacgagctaatcagatcctaacagtgtactttggagttgctgttggattctaccaaggggacaatatgaaactactggatgatttggctgctctgagacctactgtatttagcagtgtccctcgattatacaatagaatatatgctggtatcattaatgcagtaaaaacctctggtggtctgaaagagagactcttcaatgctgcctataatgcaaagaagcaggctctcttgaatggaaagagtgcttctcccatatgggacaggttggtatttaataaaataaaggacagacttggagggcgggttcgttttatgacgtctggtgcttcacctctctctcctgaagtgatggaatttttgaaagtatgctttggaggaagggtaacagagggatatggaatgactgaaacatcttgtgttataagtggaatggacgagggtgataacctcactggacatgttggctctcctaatccagcttgtgaagtaaagcttgtggatgtcccagaaatgaactatacatcagcggatcagccccatccccgtggcgaaatatgtgttaggggtcctatcatttttacaggctattacaaagatgaagttcaaacgaaagaggtgattgatgaagatggatggcttcacactggagatataggtctgtggctgccgggaggacgtctaaaaattattgacagaaagaagaacatcttcaaattggcgcagggggagtacatagctccagagaaaattgaaaacgtctatgccaaatgcaaatttgtgggccagtgcttcatatatggtgatagctttaattcatcattggtagctgttgtatcggttgatccagatgtgctgaaaagctgggctgcttcagaaggcattaagggaggagatctgagagaattgtgtaataatccgagagtgaaagcagcagtactatctgacatggacactgttggaagagaagctcagttgagaggctttgagtttgcaaaggctgtgacattggtgctggaaccatttactctggaaaatggcttgttgactccgacgttcaagattaagagaccacaagcaaaggaatatttcgcagaagcaataacaaacatgtacaaggagcttggtgcttctgatccctctgctaatagaggtttgtgatgatggtataatcgtgtgattaataaaaagcctacgcaaaagttgtttctcccacaaattgtattcttttttgttttcttgctacatatttattgaatagtaaaggtaataaaggtgctacattacatt

SEQ ID NO: 7562 - protein, 701 aa, Arabidopsis thaliana
MDSSSSSSSAAARRRINAIHSHLVTSSRSSPLLRSNPTAGEFCLDNGYSVVLPEKLNTGNWNVYRSAKSPFKLVSRFPDHPDIATLHDNFEHAVHDFRDYKYLGTRVRVDGTVGDYKWMTYGEAGTARTALGSGLVHHGIPMGSSVGIYFINRPEWLIVDHACSSYSYVSVPLYDTLGPDAVKFIVNHATVQAIFCVAETLNSLLSCLSEMPSVRLVVVVGGLNESLPSLPSSSGVKVVSYSVLLNQGRSNPQRFFPPKPDDVATICYTSGTTGTPKGVVLTHANLIANVAGSSFSVKFFSSDVYISYLPLAHIYERANQILTVYFGVAVGFYQGDNMKLLDDLAALRPTVFSSVPRLYNRIYAGIINAVKTSGGLKERLFNAAYNAKKQALLNGKSASPIWDRLVFNKIKDRLGGRVRFMTSGASPLSPEVMEFLKVCFGGRVTEGYGMTETSCVISGMDEGDNLTGHVGSPNPACEVKLVDVPEMNYTSADQPHPRGEICVRGPIIFTGYYKDEVQTKEVIDEDGWLHTGDIGLWLPGGRLKIIDRKKNIFKLAQGEYIAPEKIENVYAKCKFVGQCFIYGDSFNSSLVAVVSVDPDVLKSWAASEGIKGGDLRELCNNPRVKAAVLSDMDTVGREAQLRGFEFAKAVTLVLEPFTLENGLLTPTFKIKRPQAKEYFAEAITNMYKELGASDPSANRGL

SEQ ID NO: 7563 - protein, 583 aa, Arabidopsis thaliana
MTYGEAGTARTALGSGLVHHGIPMGSSVGIYFINRPEWLIVDHACSSYSYVSVPLYDTLGPDAVKFIVNHATVQAIFCVAETLNSLLSCLSEMPSVRLVVVVGGLNESLPSLPSSSGVKVVSYSVLLNQGRSNPQRFFPPKPDDVATICYTSGTTGTPKGVVLTHANLIANVAGSSFSVKFFSSDVYISYLPLAHIYERANQILTVYFGVAVGFYQGDNMKLLDDLAALRPTVFSSVPRLYNRIYAGIINAVKTSGGLKERLFNAAYNAKKQALLNGKSASPIWDRLVFNKIKDRLGGRVRFMTSGASPLSPEVMEFLKVCFGGRVTEGYGMTETSCVISGMDEGDNLTGHVGSPNPACEVKLVDVPEMNYTSADQPHPRGEICVRGPIIFTGYYKDEVQTKEVIDEDGWLHTGDIGLWLPGGRLKIIDRKKNIFKLAQGEYIAPEKIENVYAKCKFVGQCFIYGDSFNSSLVAVVSVDPDVLKSWAASEGIKGGDLRELCNNPRVKAAVLSDMDTVGREAQLRGFEFAKAVTLVLEPFTLENGLLTPTFKIKRPQAKEYFAEAITNMYKELGASDPSANRGL

SEQ ID NO: 7564 - protein, 560 aa, Arabidopsis thaliana
MGSSVGIYFINRPEWLIVDHACSSYSYVSVPLYDTLGPDAVKFIVNHATVQAIFCVAETLNSLLSCLSEMPSVRLVVVVGGLNESLPSLPSSSGVKVVSYSVLLNQGRSNPQRFFPPKPDDVATICYTSGTTGTPKGVVLTHANLIANVAGSSFSVKFFSSDVYISYLPLAHIYERANQILTVYFGVAVGFYQGDNMKLLDDLAALRPTVFSSVPRLYNRIYAGIINAVKTSGGLKERLFNAAYNAKKQALLNGKSASPIWDRLVFNKIKDRLGGRVRFMTSGASPLSPEVMEFLKVCFGGRVTEGYGMTETSCVISGMDEGDNLTGHVGSPNPACEVKLVDVPEMNYTSADQPHPRGEICVRGPIIFTGYYKDEVQTKEVIDEDGWLHTGDIGLWLPGGRLKIIDRKKNIFKLAQGEYIAPEKIENVYAKCKFVGQCFIYGDSFNSSLVAVVSVDPDVLKSWAASEGIKGGDLRELCNNPRVKAAVLSDMDTVGREAQLRGFEFAKAVTLVLEPFTLENGLLTPTFKIKRPQAKEYFAEAITNMYKELGASDPSANRGL

SEQ ID NO: 7565 - DNA, 690 bp, Arabidopsis thaliana
actaatcaatctctcacattcacattcatcttcttcttcaatctctctcaacacaaagaagaacaaagaagttatgagctcaatgatggagactctccagattcgtaaacccacttccctccccgtttctcaacgccctaatgcagcagccaccgccgacgatgagcctggtctcatccgccgtcgtctctcttctctatcactcaacctctcaaaccaaccagcagcgatcgcagctagattcccgagatccaaatctgtttccgccatgggagaacaagcaggaagctctgtgaaagaatggtgggaatggggttggtcatggatcctttcaagaaaacctatattcatcagagatcttgagcttaacaaagacgaagctaaatcgattggttcacaaaacagaggaagtataatgcacgttttcttcaaactccgatctcagatccgtaatttcatgggaccttcttcagaagattctcttcctctttcttgcaaatacaagcgtcaacgataaaatgattcatataaggttgagattttgtgatttgtctgttctttttttacttttgtgcaatggagtataatgaatgtataattcgtctttttttttttaaacttgatgttgtattttgctataattaatttgcctagattattattaatcaatttatttattttatttgtggc

SEQ ID NO: 7566 - protein, 171 aa, Arabidopsis thaliana
LINLSHSHSSSSSISLNTKKNKEVMSSMMETLQIRKPTSLPVSQRPNAAATADDEPGLIRRRLSSLSLNLSNQPAAIAARFPRSKSVSAMGEQAGSSVKEWWEWGWSWILSRKPIFIRDLELNKDEAKSIGSQNRGSIMHVFFKLRSQIRNFMGPSSEDSLPLSCKYKRQR

SEQ ID NO: 7567 - protein, 147 aa, Arabidopsis thaliana; identical to SEQ ID NO: 7250

SEQ ID NO: 7568 - protein, 144 aa, Arabidopsis thaliana; identical to SEQ ID NO: 7251

SEQ ID NO: 7569 - DNA, 577 bp, Arabidopsis thaliana
gtaaagggcatgaatgatgaacaaaggcggtggttccggtggaggaagcggaccaacagctgctgcggcagccgctgcgttacagaagcaaaaggcgttgttgcagagagttgatactgacatcacatctgtcgtcgataacttcaatcaaatcgtcaatgtcgcaagggtgagtgatccgccaatgaagaactctcaggaagcatacatgatggagatgcgagcatcaagattggttcaagcagctgattctcttttgaaacttgtatcagagctgaagcaaaccgcgattttttcaggatttgcatcattaaacgatcatgtagaacaaagaattgcagagtttgatcaagaggccgagaagacgaatcgattgttggctagaattgctgatgatgcatctgctagtcttaaagagcttgagtctcactattactcttctgctcagagatcgactctagactaaatccaagaatctagcatttgtaggtttttcttctaattcctatagccaaatattttaggctactttgtctgtgaacaaaatttgatatgaatgagcatttaattttgaagc

SEQ ID NO: 7570 - protein, 150 aa, Arabidopsis thaliana
MMNKGGGSGGGSGPTAAAAAAALQKQKALLQRVDTDITSVVDNFNQIVNVARVSDPPMKNSQEAYMMEMRASRLVQAADSLLKLVSELKQTAIFSGFASLNDHVEQRIAEFDQEAEKTNRLLARIADDASASLKELESHYYSSAQRSTLD

SEQ ID NO: 7571 - protein, 149 aa, Arabidopsis thaliana
MNKGGGSGGGSGPTAAAAAAALQKQKALLQRVDTDITSVVDNFNQIVNVARVSDPPMKNSQEAYMMEMRASRLVQAADSLLKLVSELKQTAIFSGFASLNDHVEQRIAEFDQEAEKTNRLLARIADDASASLKELESHYYSSAQRSTLD

SEQ ID NO: 7572 - protein, 93 aa, Arabidopsis thaliana
MKNSQEAYMMEMRASRLVQAADSLLKLVSELKQTAIFSGFASLNDHVEQRIAEFDQEAEKTNRLLARIADDASASLKELESHYYSSAQRSTLD

SEQ ID NO: 7573 - DNA, 513 bp, Arabidopsis thaliana
tcaacttccaaacaccatttaaatcccctctcatttggtttcttgagattcttgcaaacaaagcttaacgggcgttagtattcacggtgagaaaatgccttgtctttacattacaacaaacgtcaattttgacggcgttaacaccgatccgttctactccgaagtcaccaaagccgtcgcttccatcgtcggacgacctcaaaacttagtgatggtggtgttgaagggatcagtagagatagtatttggagggaacaaagaagcagctgcatatgcagagattgtgtcaatgggaggcatcaccaaacaagttaagagagaactcatagcgaccgttggttctattcttcacactcatttttctattcatcccactcgttttatctttaaagtttttgatattaattctttgcctcttccttctaaactttagtgttatgatctttgtattgttcatcaaacacaaattatatacagactcacatgttattcttttctttatgagtcttctcg

SEQ ID NO: 7574 - protein, 112 aa, Arabidopsis thaliana
MPCLYITTNVNFDGVNTDPFYSEVTKAVASIVGRPQNLVMVVLKGSVEIVFGGNKEAAAYAEIVSMGGITKQVKRELIATVGSILHTHFSIHPTRFIFKVFDINSLPLPSKL

SEQ ID NO: 7575 - protein, 73 aa, Arabidopsis thaliana
MVVLKGSVEIVFGGNKEAAAYAEIVSMGGITKQVKRELIATVGSILHTHFSIHPTRFIFKVFDINSLPLPSKL

SEQ ID NO: 7576 - DNA, 709 bp, Arabidopsis thaliana
aaacagttgagctgttgaggcattgtctaatttctcgagtgatttctccgagaaacaaaaaaagatgggtgagaagccatggcagccactactccagagcttcgagaaactatcaaattgcgtccaaactcatctttccaatttcatcggcatcaagaatactcctcctagttctcaatccacaatccaaaacccaatcatctccttggactcttctccgccaatcgcaacaaacagttccagtcttcagaaacttcctctcaaggacaagtctactggtcctgtgactaaagaggatctcgggagagctacatggacgtttcttcacactcttgctgcgcagtatccagaaaaaccaacaaggcagcaaaaaaaggatgttaaagagctgatgacgatactttcccgaatgtatccttgtagagaatgtgcggatcacttcaaagaaatcctaagatcgaatcccgcacaagctggatctcaggaggaattctcacagtggctttgccatgtacacaacaccgtaaatagaagtttggggaaattggtgttcccttgcgagagagtggatgcaagatggggcaagttagagtgtgagcagaaaagttgtgatctccatggaacttctatggacttttagacccatttattaactacacttatacttgtatggataatatctcatttatgaaatttatatcaaaagaag

SEQ ID NO: 7577 - protein, 191 aa, Arabidopsis thaliana
MGEKPWQPLLQSFEKLSNCVQTHLSNFIGIKNTPPSSQSTIQNPIISLDSSPPIATNSSSLQKLPLKDKSTGPVTKEDLGRATWTFLHTLAAQYPEKPTRQQKKDVKELMTILSRMYPCRECADHFKEILRSNPAQAGSQEEFSQWLCHVHNTVNRSLGKLVFPCERVDARWGKLECEQKSCDLHGTSMDF

SEQ ID NO: 7578 - DNA, 1273 bp, Arabidopsis thaliana
ggagatctttaatctcagaatacaaaaaagaaaatcaaagaagatagttttgtgattgttttctataaaaagtgcagatattttctttgtcctagagaaagaggtgataggaaaaatgggtctccaagagcttgacccgttagcccaattgagcttaccgccgggttttcggttttatccgactgacgaagagctgatggttgaatatctctgtagaaaagccgccggtcacgacttctctctccagctcatagctgaaatcgatctctacaagtttgatccatgggttttaccaagtaaggcgttattcggtgaaaaagaatggtattttttcagcccgagggataggaagtatccaaacgggtcaagacctaatcgggttgccgggtcgggttattggtaagccaccggtacggataaagttatctcgacggagggaagaagagttggtatcaagaaagctttggtgttttacattggaaaagctccaaaaggaaccaaaaccaattggattatgcatgagtaccgtctcatcgaaccctctcgtcgaaatggaagcaccaagcttgatgattgggttttatgtcgaatatacaaaaagcaaacaagcgcacaaaaacaagcttacaataatctaatgacgagtggtcgtgaatacagcaacaatggttcgtcgacatcttcttcgtctcatcaatacgacgacgttctcgagtcgttgcatgagattgacaacagaagtttggggtttgccgccggttcatcaaacgcgctgcctcatagtcatagaccggttttaaccaatcataaaaccgggtttcagggtttagccagggagccaagttttgattgggcgaatttgattggacagaactcggtcccggaactcggactgagtcataacgttccgagtattcgttacggtgacggtggaacgcagcaacaaactgaggggattcctcggtttaataataactcggacgtctcggctaatcagggttttagtgttgacccggttaacggatttgggtactcgggtcaacaatctagtgggttcgggtttatttgattgtgtaatggtaacgtaataagaaaaacatatttttattttttgtccgtgtcagattagttaattaatatagcgtagaattcgaactctagggttagatttaggttctacgacttgtattgtatattcgtcgtcatttgtcctgacatttacatttttgtaaacttttatagctggaacttttgtattgatcaattatttatt

SEQ ID NO: 7579 - protein, 184 aa, Arabidopsis thaliana
MHEYRLIEPSRRNGSTKLDDWVLCRIYKKQTSAQKQAYNNLMTSGREYSNNGSSTSSSSHQYDDVLESLHEIDNRSLGFAAGSSNALPHSHRPVLTNHKTGFQGLAREPSFDWANLIGQNSVPELGLSHNVPSIRYGDGGTQQQTEGIPRFNNNSDVSANQGFSVDPVNGFGYSGQQSSGFGFI

SEQ ID NO: 7580 - protein, 143 aa, Arabidopsis thaliana
MTSGREYSNNGSSTSSSSHQYDDVLESLHEIDNRSLGFAAGSSNALPHSHRPVLTNHKTGFQGLAREPSFDWANLIGQNSVPELGLSHNVPSIRYGDGGTQQQTEGIPRFNNNSDVSANQGFSVDPVNGFGYSGQQSSGFGFI

SEQ ID NO: 7581 - protein, 95 aa, Arabidopsis thaliana
MGLQELDPLAQLSLPPGFRFYPTDEELMVEYLCRKAAGHDFSLQLIAEIDLYKFDPWVLPSKALFGEKEWYFFSPRDRKYPNGSRPNRVAGSGYW

SEQ ID NO: 7582 - DNA, 1314 bp, Arabidopsis thaliana
atttgcactttttctttttttaaaaagaaaaaaaactaggctctacgaattttccggtcaccttctccgatctctgatccgatatttttccacatgttgttgagctttaaaggatttgaaaccgttatgaaagttatgaaaacgaagagtgtgtgaaacatggggaaggaagttatggtgagcgattacggtgacgacgacggagaagacgccggcggcggcgatgaatataggattccggaatgggaaattggtttacccaacggagatgatttgactccgttatctcaatatctagtcccgtcgattctcgcgttagctttcagcatgatcccagaacgaagccgtacaattcacgacgtcaatcgcgcgtcgcaaatcacgctctcttcgttgagaagcagtaccaatgcttcgtctgtgatggaggaggtcgtggatcgagttgaatcgagtgttccaggatcagatccgaagaaacagaagaaatcggatggtggtgaagcagcggcggtggaggattccacggcggaggaaggagactccgggcctgaagacgcgtctgggaagacatcgaaacgaccgcgtttagtgtggacaccgcagctacacaagagatttgtggacgttgtggctcatctagggattaaaaacgcagtgccgaagacgattatgcagctgatgaacgtggaaggacttactcgtgagaacgttgcgtctcatttgcagaaatataggctttaccttaaacggattcaaggattgacgacggaagaagatccttattcgtcgtcggatcagctcttctcttcaacgccggttcctccacagagctttcaagacggcggaggaagtaacggaaagttgggggttccggttccggttccgtcgatggtgcctattccaggctatgggaatcaaatgggtatgcaaggatattatcaacagtatagtaaccatggcaatgaatcaaaccaatatatgatgcagcagaataagtttggaacaatggtgacatatccttctgttggtggtggtgacgtgaatgacaagtaaatggatcttaaaggtctataatttgctctacagagagatactggttcttggcttatggtttattttcccacttcatgaggttgttgtgacttttaattctccatgttttccacacaagtctttattgcctttgtatagaaaatgatttcgagaaaatcactgggaagcttggtattgttggaggatgaagccttctatgaatgatttagtttcctactgtctccattctttatgaggtaataaagccttcttttgctc

SEQ ID NO: 7583 - protein, 298 aa, Arabidopsis thaliana
MGKEVMVSDYGDDDGEDAGGGDEYRIPEWEIGLPNGDDLTPLSQYLVPSILALAFSMIPERSRTIHDVNRASQITLSSLRSSTNASSVMEEVVDRVESSVPGSDPKKQKKSDGGEAAAVEDSTAEEGDSGPEDASGKTSKRPRLVWTPQLHKRFVDVVAHLGIKNAVPKTIMQLMNVEGLTRENVASHLQKYRLYLKRIQGLTTEEDPYSSSDQLFSSTPVPPQSFQDGGGSNGKLGVPVPVPSMVPIPGYGNQMGMQGYYQQYSNHGNESNQYMMQQNKFGTMVTYPSVGGGDVNDK

SEQ ID NO: 7584 - protein, 293 aa, Arabidopsis thaliana
MVSDYGDDDGEDAGGGDEYRIPEWEIGLPNGDDLTPLSQYLVPSILALAFSMIPERSRTIHDVNRASQITLSSLRSSTNASSVMEEVVDRVESSVPGSDPKKQKKSDGGEAAAVEDSTAEEGDSGPEDASGKTSKRPRLVWTPQLHKRFVDVVAHLGIKNAVPKTIMQLMNVEGLTRENVASHLQKYRLYLKRIQGLTTEEDPYSSSDQLFSSTPVPPQSFQDGGGSNGKLGVPVPVPSMVPIPGYGNQMGMQGYYQQYSNHGNESNQYMMQQNKFGTMVTYPSVGGGDVNDK

SEQ ID NO: 7585 - protein, 242 aa, Arabidopsis thaliana
MIPERSRTIHDVNRASQITLSSLRSSTNASSVMEEVVDRVESSVPGSDPKKQKKSDGGEAAAVEDSTAEEGDSGPEDASGKTSKRPRLVWTPQLHKRFVDVVAHLGIKNAVPKTIMQLMNVEGLTRENVASHLQKYRLYLKRIQGLTTEEDPYSSSDQLFSSTPVPPQSFQDGGGSNGKLGVPVPVPSMVPIPGYGNQMGMQGYYQQYSNHGNESNQYMMQQNKFGTMVTYPSVGGGDVNDK

SEQ ID NO: 7586 - DNA, 1532 bp, Arabidopsis thaliana
actgcttctctttcatcaaaagttctttaaggaaaaaaaaaaacgtcaatggcgtcgtcgtcgttgtgtcatcgctattttaacaaaatcactgtcactcccttttttaacactaaaaaactccatcactattctccgagacgaatctctcttcgtgtaaatcgacgatccttctctatctctgcaactatgtcttcatctactaagaaggttttgattcctgttgctcatggtacggagccgtttgaagcggtggttatgatcgatgtgctacggcgaggcggagcggatgttacggtggcttccgttgagaatcaggtcggcgttgatgcttgccatggaatcaaaatggtcgctgatactcttctctctgatatcaccgactcggttttcgaccttattatgctccctggaggacttcctggtggtgagactcttaagaattgtaaacctttagagaagatggtgaagaagcaagacactgatggacgacttaacgctgctatctgttgtgcgccggcgttggcgtttggtacttggggactactagagggtaaaaaagctacatgttacccggtttttatggagaaactagcggcttgtgcgacagctgttgagtcaagagtggaaattgatgggaagatagtgaccagtagagggcctggaactaccatggaattctctgtcacgcttgtggagcaacttcttgggaaagagaaagctgttgaagtctctggccccttggtgatgcgtcccaaccctggtgatgagtatactattactgagcttaaccaagtcagctggtcattcgagggtaccccacagattcttgtacccattgcagatggctcggaggaaatggaagctgttgctatcattgatgtcctgaagcgggcaaaagcaaatgttgtcgtagctgcgcttggtaacagtttggaagtggtagcatctcggaaagtcaagctggtggcagatgtgcttctcgacgaggctgaaaagaattcgtacgatctgattgtgttgcctggtggtctcggcggtgctgaagcatttgcaagttcggagaagctagtgaatatgttaaagaagcaggcggaatcaaacaaaccatatggagcaatttgtgcctctcctgctctggtgtttgagccacatggtttactcaagggtaagaaggcaacagcgtttccagcaatgtgcagcaaactgacggaccagagtcacatcgagcatcgagtcttggtggacggcaatctcataacgagcaggggtccaggaacctcattggagtttgcacttgcaattgtagagaagttttacgggcgcgagaaaggacttcagctctcaaaggcaacacttgtgtaaactcatgagtatcttaggtaagagtgactttaataagaaaaaggctttagtatcaaacgatcaatgagtgtaccgttgttgtggtgagctttgtactaagtgtgatgcttaaaactgtcttataaataaacgagtttactctgtttttatcagaaagtttttttgtt

SEQ ID NO: 7587 - protein, 438 aa, Arabidopsis thaliana
MASSSLCHRYFNKITVTPFFNTKKLHHYSPRRISLRVNRRSFSISATMSSSTKKVLIPVAHGTEPFEAVVMIDVLRRGGADVTVASVENQVGVDACHGIKMVADTLLSDITDSVFDLIMLPGGLPGGETLKNCKPLEKMVKKQDTDGRLNAAICCAPALAFGTWGLLEGKKATCYPVFMEKLAACATAVESRVEIDGKIVTSRGPGTTMEFSVTLVEQLLGKEKAVEVSGPLVMRPNPGDEYTITELNQVSWSFEGTPQILVPIADGSEEMEAVAIIDVLKRAKANVVVAALGNSLEVVASRKVKLVADVLLDEAEKNSYDLIVLPGGLGGAEAFASSEKLVNMLKKQAESNKPYGAICASPALVFEPHGLLKGKKATAFPAMCSKLTDQSHIEHRVLVDGNLITSRGPGTSLEFALAIVEKFYGREKGLQLSKATLV

SEQ ID NO: 7588 - protein, 391 aa, Arabidopsis thaliana
MSSSTKKVLIPVAHGTEPFEAVVMIDVLRRGGADVTVASVENQVGVDACHGIKMVADTLLSDITDSVFDLIMLPGGLPGGETLKNCKPLEKMVKKQDTDGRLNAAICCAPALAFGTWGLLEGKKATCYPVFMEKLAACATAVESRVEIDGKIVTSRGPGTTMEFSVTLVEQLLGKEKAVEVSGPLVMRPNPGDEYTITELNQVSWSFEGTPQILVPIADGSEEMEAVAIIDVLKRAKANVVVAALGNSLEVVASRKVKLVADVLLDEAEKNSYDLIVLPGGLGGAEAFASSEKLVNMLKKQAESNKPYGAICASPALVFEPHGLLKGKKATAFPAMCSKLTDQSHIEHRVLVDGNLITSRGPGTSLEFALAIVEKFYGREKGLQLSKATLV

SEQ ID NO: 7589 - protein, 368 aa, Arabidopsis thaliana
MIDVLRRGGADVTVASVENQVGVDACHGIKMVADTLLSDITDSVFDLIMLPGGLPGGETLKNCKPLEKMVKKQDTDGRLNAAICCAPALAFGTWGLLEGKKATCYPVFMEKLAACATAVESRVEIDGKIVTSRGPGTTMEFSVTLVEQLLGKEKAVEVSGPLVMRPNPGDEYTITELNQVSWSFEGTPQILVPIADGSEEMEAVAIIDVLKRAKANVVVAALGNSLEVVASRKVKLVADVLLDEAEKNSYDLIVLPGGLGGAEAFASSEKLVNMLKKQAESNKPYGAICASPALVFEPHGLLKGKKATAFPAMCSKLTDQSHIEHRVLVDGNLITSRGPGTSLEFALAIVEKFYGREKGLQLSKATLV

SEQ ID NO: 7590 - DNA, 2668 bp, Arabidopsis thaliana
atccttttagattactttcctcttttttttttttttttttttctttcgcgtgtgattattaactcgaggtaatttctctaatcccagttaatatcacacgcggaatatcaaagatctgattttttgtaaacattgtaccaaaatcatcagaagattataagtggagtctttcgaagaagaacaaatttgtaacacgcgtctccatcaatcttctagctggcaatgagatccattctttagcttctttcttctctgttttttcttttttgaagaaaaaaaaaatggcaccaaagtttgaatggtgggctaaaggaaacaacaacaacactcgtaaaggaacaccagtcgttgtcaaaatggaaaaccctaataactggtcaatggtggaacttgaatcaccttctcatgacgatttcctcgtaagaactcatgagaaatctcgtaacaagaacgcaagacagctcacttgggttctacttctcaaagctcatcgtgccgcaggttgtctcacttctctcggttctgcattattcgctctcggcaccgccgtgcgccgccgtatcgccgccggccgtacagacattgaaatctcctcctcgggagtgggttcattacagaagcaaaaccatacgaagaaatcgaaacttttctactcttgcttaaaggtgtttctatggctttctttaatccttttgggttttgagattgctgcttatttcaaaggttggagctttggaacttctaagcttcagcttcagtttatcttcaataaagggttctttgattgggtttacacgagatgggttttgcttcgtgttgagtatcttgctcctcctcttcagtttcttgctaatggctgcattgttctgtttcttgttcagagtcttgatagactcattctttgtcttggttgtttttggatccggtttaagaagattaaaccggttcctaaaccggattctatctctgatcttgaatctggtgataatggtgctttcctccctatggttcttgttcaaatccctatgtgtaatgagaaagaggtttatcagcaatctattgcagctgtgtgtaacttagactggcctaaagggaagattttgattcaaattctcgatgattcggatgatccgataacgcagagtttgattaaagaagaggttcataaatggcagaagctaggtgcacgcattgtgtatcgtcaccgtgttaatagagaaggttacaaagctggtaatcttaagtctgctatgaactgtagttatgttaaagactacgaattcgttgcgattttcgacgcagattttcaacctctacctgatttcctcaagaagaccattcctcattttaaggacaatgaggaaataggattggttcaagctaggtggtcttttgtgaataaggaagagaacttgttgacaagattacagaatattaacttggcttttcactttgaggttgagcaacaagtgaatagtgtcttcttgaatttcttcgggtttaacgggacagccggtgtgtggaggatcaaagctttggaagattccggtggttggctcgagagaactaccgtcgaggatatggacattgcggttcgtgctcaccttcacggatggaaattcgttttcctaaatgacgttgagtgccaatgtgaattaccggaatcgtatgaagcttatagaaaacagcaacatagatggcattcaggtcctatgcaactatttcgtctttgtttgcccgcggtcattaaatcaaagataagcataggaaagaaattcaatttgatattcctcttctttctcctgaggaagctaatcttgccattctactcattcactctcttttgtattatcctgccaatgactatgtttgtacccgaagctgagcttcccgcttgggttgtttgctacatacctgccacaatgtctttcctcaacatccttcccgccccgaagtcgtttccgtttatcgtcccgtaccttctctttgagaacacaatgtctgtgactaagttcaacgcaatggtctcgggtttgtttcagctaggaagtgcttatgaatgggttgttacaaaaaaatcaggacggtcatcagaaggagatcttgctgcgttagtcgaaaaagacgaaaagacaactaaacatcagagaggtgtgtctgcacccgaaaccgaagccgagaaaaaggcggaaaagactaagaggaagaagaagaagcacaataggatttatatgaaggagctatctctagcgtttctgttactgaccgcggcaactcgaagtcttttatcggcgcaaggaatccatttctacttccttttgtttcaaggaatatctttcttacttgtgggtctagatcttattggagaacaagttgaatgacactcaaagagattgaagtagtgcttgtagaagagacgttgtagaagacgggaaacatgaagagaaaaaggaagagggtctggacccaaaaaaatacaatacaacattgaacatagatcggtttcattgaggaaggacatggattaactctgttggtagtgaatgtgtaaggttttaacttttctctcttttgggtttgcccacagttgtttattctttcgattaaatggggacaactcttttgtaagaaagttttgttcaattatgaaagcaaattgttttagctc

SEQ ID NO: 7591 - protein, 699 aa, Arabidopsis thaliana
MAPKFEWWAKGNNNNTRKGTPVVVKMENPNNWSMVELESPSHDDFLVRTHEKSRNKNARQLTWVLLLKAHRAAGCLTSLGSALFALGTAVRRRIAAGRTDIEISSSGVGSLQKQNHTKKSKLFYSCLKVFLWLSLILLGFEIAAYFKGWSFGTSKLQLQFIFNKGFFDWVYTRWVLLRVEYLAPPLQFLANGCIVLFLVQSLDRLILCLGCFWIRFKKIKPVPKPDSISDLESGDNGAFLPMVLVQIPMCNEKEVYQQSIAAVCNLDWPKGKILIQILDDSDDPITQSLIKEEVHKWQKLGARIVYRHRVNREGYKAGNLKSAMNCSYVKDYEFVAIFDADFQPLPDFLKKTIPHFKDNEEIGLVQARWSFVNKEENLLTRLQNINLAFHFEVEQQVNSVFLNFFGFNGTAGVWRIKALEDSGGWLERTTVEDMDIAVRAHLHGWKFVFLNDVECQCELPESYEAYRKQQHRWHSGPMQLFRLCLPAVIKSKISIGKKFNLIFLFFLLRKLILPFYSFTLFCIILPMTMFVPEAELPAWVVCYIPATMSFLNILPAPKSFPFIVPYLLFENTMSVTKFNAMVSGLFQLGSAYEWVVTKKSGRSSEGDLAALVEKDEKTTKHQRGVSAPETEAEKKAEKTKRKKKKHNRIYMKELSLAFLLLTAATRSLLSAQGIHFYFLLFQGISFLLVGLDLIGEQVE

SEQ ID NO: 7592 - protein, 674 aa, Arabidopsis thaliana
MENPNNWSMVELESPSHDDFLVRTHEKSRNKNARQLTWVLLLKAHRAAGCLTSLGSALFALGTAVRRRIAAGRTDIEISSSGVGSLQKQNHTKKSKLFYSCLKVFLWLSLILLGFEIAAYFKGWSFGTSKLQLQFIFNKGFFDWVYTRWVLLRVEYLAPPLQFLANGCIVLFLVQSLDRLILCLGCFWIRFKKIKPVPKPDSISDLESGDNGAFLPMVLVQIPMCNEKEVYQQSIAAVCNLDWPKGKILIQILDDSDDPITQSLIKEEVHKWQKLGARIVYRHRVNREGYKAGNLKSAMNCSYVKDYEFVAIFDADFQPLPDFLKKTIPHFKDNEEIGLVQARWSFVNKEENLLTRLQNINLAFHFEVEQQVNSVFLNFFGFNGTAGVWRIKALEDSGGWLERTTVEDMDIAVRAHLHGWKFVFLNDVECQCELPESYEAYRKQQHRWHSGPMQLFRLCLPAVIKSKISIGKKFNLIFLFFLLRKLILPFYSFTLFCIILPMTMFVPEAELPAWVVCYIPATMSFLNILPAPKSFPFIVPYLLFENTMSVTKFNAMVSGLFQLGSAYEWVVTKKSGRSSEGDLAALVEKDEKTTKHQRGVSAPETEAEKKAEKTKRKKKKHNRIYMKELSLAFLLLTAATRSLLSAQGIHFYFLLFQGISFLLVGLDLIGEQVE

SEQ ID NO: 7593 - protein, 666 aa, Arabidopsis thaliana
MVELESPSHDDFLVRTHEKSRNKNARQLTWVLLLKAHRAAGCLTSLGSALFALGTAVRRRIAAGRTDIEISSSGVGSLQKQNHTKKSKLFYSCLKVFLWLSLILLGFEIAAYFKGWSFGTSKLQLQFIFNKGFFDWVYTRWVLLRVEYLAPPLQFLANGCIVLFLVQSLDRLILCLGCFWIRFKKIKPVPKPDSISDLESGDNGAFLPMVLVQIPMCNEKEVYQQSIAAVCNLDWPKGKILIQILDDSDDPITQSLIKEEVHKWQKLGARIVYRHRVNREGYKAGNLKSAMNCSYVKDYEFVAIFDADFQPLPDFLKKTIPHFKDNEEIGLVQARWSFVNKEENLLTRLQNINLAFHFEVEQQVNSVFLNFFGFNGTAGVWRIKALEDSGGWLERTTVEDMDIAVRAHLHGWKFVFLNDVECQCELPESYEAYRKQQHRWHSGPMQLFRLCLPAVIKSKISIGKKFNLIFLFFLLRKLILPFYSFTLFCIILPMTMFVPEAELPAWVVCYIPATMSFLNILPAPKSFPFIVPYLLFENTMSVTKFNAMVSGLFQLGSAYEWVVTKKSGRSSEGDLAALVEKDEKTTKHQRGVSAPETEAEKKAEKTKRKKKKHNRIYMKELSLAFLLLTAATRSLLSAQGIHFYFLLFQGISFLLVGLDLIGEQVE

SEQ ID NO: 7594 - DNA, 1187 bp, Arabidopsis thaliana
cactttcgcttttcccaatacgaacaagcggtgacgcatatctcctgtatcatcactcttttacttccggcgatctctctccgacggccaatggacgccgtcctttactctgttccactctccttcactcccctacgcgcatcatcctctccttcctcgccgtatcttcttctgccgaggtttctctccgttcagccatgtcacaaattcaccttctctcgaagcttcccttccaaatcccggattccctcagcttcttccgccgccggttccacgttgatgacgaattcctcttcgccaagaagtggagtgtacactgttggtgagttcatgacaaagaaagaggacttgcacgtggtgaaacctacgactactgtggatgaagctctggaactccttgtggagaatagaatcactggatttcctgtaattgacgaagactggaaattggttgggcttgtttcagattatgacttgttggctttggactccatatctggtagtggaagaacagaaaattccatgttccctgaggttgacagcacctggaaaactttcaatgctgtgcaaaagctactcagcaaaaccaatgggaagcttgttggagatttaatgacaccagctccactagttgttgaggaaaaaaccaacctggaagatgctgctaaaatattgcttgagacaaaatatcgccggctccctgtggtagattctgatggcaaattggttggtatcatcacaagaggaaacgtggttagagccgcgcttcaaataaagcgctctggtgataggaatgcttgattaaggtagtatatataccaaacaagaaaatggctttgtagaggaaagcaatgatcaaacattctccagagaataaaagtgagaaaccgcgacaattgtaccatgtattagaataagagccataacttatacgacattttgcaacgaagttaaacctggtaaactctagaagcatcaaaggtaagtgcacatctaactttttgctattttagcagaatcagcttctctgtttgtttgataagttaggttatcagatgctttgggtatttgactctcatccaatatgctttcatttcgagaaaaaaaaaaattgtttcacactttctacatttggttaaccaccaaagtaacaaacctttttaaggtattttaattgattttggttc

SEQ ID NO: 7595 - protein, 266 aa, Arabidopsis thaliana
HFRFSQYEQAVTHISCIITLLLPAISLRRPMDAVLYSVPLSFTPLRASSSPSSPYLLLPRFLSVQPCHKFTFSRSFPSKSRIPSASSAAGSTLMTNSSSPRSGVYTVGEFMTKKEDLHVVKPTTTVDEALELLVENRITGFPVIDEDWKLVGLVSDYDLLALDSISGSGRTENSMFPEVDSTWKTFNAVQKLLSKTNGKLVGDLMTPAPLVVEEKTNLEDAAKILLETKYRRLPVVDSDGKLVGIITRGNVVRAALQIKRSGDRNA

SEQ ID NO: 7596 - protein, 236 aa, Arabidopsis thaliana
MDAVLYSVPLSFTPLRASSSPSSPYLLLPRFLSVQPCHKFTFSRSFPSKSRIPSASSAAGSTLMTNSSSPRSGVYTVGEFMTKKEDLHVVKPTTTVDEALELLVENRITGFPVIDEDWKLVGLVSDYDLLALDSISGSGRTENSMFPEVDSTWKTFNAVQKLLSKTNGKLVGDLMTPAPLVVEEKTNLEDAAKILLETKYRRLPVVDSDGKLVGIITRGNVVRAALQIKRSGDRNA

SEQ ID NO: 7597 - protein, 173 aa, Arabidopsis thaliana
MTNSSSPRSGVYTVGEFMTKKEDLHVVKPTTTVDEALELLVENRITGFPVIDEDWKLVGLVSDYDLLALDSISGSGRTENSMFPEVDSTWKTFNAVQKLLSKTNGKLVGDLMTPAPLVVEEKTNLEDAAKILLETKYRRLPVVDSDGKLVGIITRGNVVRAALQIKRSGDRNA

SEQ ID NO: 7598 - DNA, 1001 bp, Arabidopsis thaliana
aatttggggtttttcagatttccttcaatctctcgtcgtcatttcttcgtctcaccgttgaatctgaaaatgatcgccggagtattgcgccgatcttcactcccgtcgaggcagactctctccgccgcgttagcctccttcaattcgtgtatttcgcacaatctcactccagccaccaccggagcttccgtcagctctcgattcactctcgcgtcgtctcctaactcgtttggcatcagagcgaggaacatccacattagatctgagccgtcgatgattgttcccgcaggaatcgcgtcacaaggttacgccactgtcacaaaggatcgcaaaaacgagattaagaaagctaagattaaaatttctccagacaatgtcagaccattgagtaggaaggagatcgctctccagaaagaggcagcagaagaaagcacatcaaagataaaaggaacaaagatttgtatagcgattcggtcttttgttaacccggaaaagcaagcttggtgtcttcctcctcacactcgtaaagtcgcaatgcccgatacacgaactctgtacacggtgctaagatcgcctcacgtcgataagaagtctagagaacagtttgagatgaggttcaagaaacggtttcttgtcatcaaagctcagagtcatgagttgagcaagaagctgttttggttaaaacgttatcgtattcttggagctcaatatgaactccagttccattgcaagacccgtttggatatgactcaagtgttaggcaacatcaatggctccaccaccaatgcttactgagatggctaaagacatcattttgtagaagtttcaagacccaaccgggtactatgcaataatttcgaaccttacggatccatgaaaccagctttgcttcacatcagatcaagtagttattttcttgcttagtataaacatgtgtttttggacgattttgaaagatacaattgagtttcagttacagtgctttccatttattcattagc

SEQ ID NO: 7599 - protein, 264 aa, Arabidopsis thaliana
NLGFFRFPSISRRHFFVSPLNLKMIAGVLRRSSLPSRQTLSAALASFNSCISHNLTPATTGASVSSRFTLASSPNSFGIRARNIHIRSEPSMIVPAGIASQGYATVTKDRKNEIKKAKIKISPDNVRPLSRKEIALQKEAAEESTSKIKGTKICIAIRSFVNPEKQAWCLPPHTRKVAMPDTRTLYTVLRSPHVDKKSREQFEMRFKKRFLVIKAQSHELSKKLFWLKRYRILGAQYELQFHCKTRLDMTQVLGNINGSTTNAY

SEQ ID NO: 7600 - protein, 241 aa, Arabidopsis thaliana
MIAGVLRRSSLPSRQTLSAALASFNSCISHNLTPATTGASVSSRFTLASSPNSFGIRARNIHIRSEPSMIVPAGIASQGYATVTKDRKNEIKKAKIKISPDNVRPLSRKEIALQKEAAEESTSKIKGTKICIAIRSFVNPEKQAWCLPPHTRKVAMPDTRTLYTVLRSPHVDKKSREQFEMRFKKRFLVIKAQSHELSKKLFWLKRYRILGAQYELQFHCKTRLDMTQVLGNINGSTTNAY

SEQ ID NO: 7601 - protein, 173 aa, Arabidopsis thaliana
MIVPAGIASQGYATVTKDRKNEIKKAKIKISPDNVRPLSRKEIALQKEAAEESTSKIKGTKICIAIRSFVNPEKQAWCLPPHTRKVAMPDTRTLYTVLRSPHVDKKSREQFEMRFKKRFLVIKAQSHELSKKLFWLKRYRILGAQYELQFHCKTRLDMTQVLGNINGSTTNAY

SEQ ID NO: 7602 - DNA, 1153 bp, Arabidopsis thaliana
cccagagagacataagaaagaaagagagagagagatactttggtcatttcagggttgtcgtttctctctcttgttcttgagattttgaagagagagagatatgggaagaggtagggttcagctgaagaggatagagaacaagatcaataggcaagttactttctcaaagagaaggtctggtttgctcaagaaagctcatgagatctctgttctctgcgatgctgaggttgctctcatcgtcttctcttccaaaggcaaactcttcgaatattccaccgactcttgcatggagaggatacttgaacgctatgatcgctatttatattcagacaaacaacttgttggccgagacgtttcacaaagtgaaaattgggttctagaacatgctaagctcaaggcaagagttgaggtacttgagaagaacaaaaggaattttatgggggaagatcttgattcgttgagcttgaaggagctccaaagcttggagcatcagctcgatgcagctatcaagagcattaggtcaagaaagaaccaagctatgttcgaatccatatctgcgctccagaagaaggataaagccttgcaagatcacaacaattcgcttctcaaaaagattaaggagagggagaagaaaacgggtcagcaagaaggacaattagtccaatgctccaactcttcttcagttcttctgcctcaatactgcgtaacctcctccagagatggctttgtggagagagttgggggagagaacggtggtgcatcgtcgttgacggaaccaaactctctgcttccggcttggatgttacgtcctaccactacgaacgagtagaactatctcactctttataatataatgataatataattaatgtttaatattttcataacattcagcatttttttggtgacttatactcattattaataccgatatgttttagctagtcatattatatgtatgatggaactccgttgtcgagacgtatgtacgtaagctatcattagattcactgcgtcttaagaacaaagattcatatcttggtaatgatttctcatgaataattaatgtaacttttactttttaaactgtggtgaacgcaatatatcaatattctatcatttgtaaatgcgatcactatgttgtttatgactg

SEQ ID NO: 7603 - protein, 242 aa, Arabidopsis thaliana
MGRGRVQLKRIENKINRQVTFSKRRSGLLKKAHEISVLCDAEVALIVFSSKGKLFEYSTDSCMERILERYDRYLYSDKQLVGRDVSQSENWVLEHAKLKARVEVLEKNKRNFMGEDLDSLSLKELQSLEHQLDAAIKSIRSRKNQAMFESISALQKKDKALQDHNNSLLKKIKEREKKTGQQEGQLVQCSNSSSVLLPQYCVTSSRDGFVERVGGENGGASSLTEPNSLLPAWMLRPTTTNE

SEQ ID NO: 7604 - protein, 180 aa, Arabidopsis thaliana
MERILERYDRYLYSDKQLVGRDVSQSENWVLEHAKLKARVEVLEKNKRNFMGEDLDSLSLKELQSLEHQLDAAIKSIRSRKNQAMFESISALQKKDKALQDHNNSLLKKIKEREKKTGQQEGQLVQCSNSSSVLLPQYCVTSSRDGFVERVGGENGGASSLTEPNSLLPAWMLRPTTTNE

SEQ ID NO: 7605 - protein, 130 aa, Arabidopsis thaliana
MGEDLDSLSLKELQSLEHQLDAAIKSIRSRKNQAMFESISALQKKDKALQDHNNSLLKKIKEREKKTGQQEGQLVQCSNSSSVLLPQYCVTSSRDGFVERVGGENGGASSLTEPNSLLPAWMLRPTTTNE

SEQ ID NO: 7606 - DNA, 945 bp, Arabidopsis thaliana
ctcagagtttcttctcctctgtgaatctccgacaatggcgatagcaatggcggttgtttctttcccatctctactcaacaagtcaaccttatcctcttcactctttactcccactttcctcccggcgaaatcctcttcacttctcatcaaatcatcacccaaaaccagattcgttgtttcatcatccatggaagctggaatcggagtaatggggtcaaaactcggaatgatgagtttcttcgaagaagacggcacagtagttccagtaacagtcgtcggattccgcgaaggtaacatcgtaactcaaatcaaaaccctagccaccgacggttacgacgcggttcaaatcggttaccgtcgtgtacgcgacaaaaagctaactaaaccggaaaccggtcatctccaaaaagccggtacaatcccaatgagacatctccaagagttcagattaacaaacatcgaaggattcgaaccgaaccagaagcttgtgttcgatgagatattcaaagaaggtgatctcgttgatgtagctggaaccacaattggtaaagggtttcaaggaggaatcaaaaggcatcatttcaagagaggtcaaatgactcatggttccaagagtcatcgagctttgggttcgattggtgctggtactactccgggaagagtttataaagggaagaagatgcctggaagaatgggagggacgaggacaaagattaggaagcttaagattgttaaagttgataaggagcttaatgttgtcatgatcaaaggtgctttgcctggtaagcctgggaatcttcttcgtattactcccgctaaaatcgtcggagttaacattcccaagaactagtagagaagagactctgttttgttttgtaatgttgacttgtgtttatccattccttgaaaatttgtatcgaattgctaaatcacagtttctctgtc

SEQ ID NO: 7607 - protein, 282 aa, Arabidopsis thaliana
SEFLLLCESPTMAIAMAVVSFPSLLNKSTLSSSLFTPTFLPAKSSSLLIKSSPKTRFVVSSSMEAGIGVMGSKLGMMSFFEEDGTVVPVTVVGFREGNIVTQIKTLATDGYDAVQIGYRRVRDKKLTKPETGHLQKAGTIPMRHLQEFRLTNIEGFEPNQKLVFDEIFKEGDLVDVAGTTIGKGFQGGIKRHHFKRGQMTHGSKSHRALGSIGAGTTPGRVYKGKKMPGRMGGTRTKIRKLKIVKVDKELNVVMIKGALPGKPGNLLRITPAKIVGVNIPKN

SEQ ID NO: 7608 - protein, 271 aa, Arabidopsis thaliana
MAIAMAVVSFPSLLNKSTLSSSLFTPTFLPAKSSSLLIKSSPKTRFVVSSSMEAGIGVMGSKLGMMSFFEEDGTVVPVTVVGFREGNIVTQIKTLATDGYDAVQIGYRRVRDKKLTKPETGHLQKAGTIPMRHLQEFRLTNIEGFEPNQKLVFDEIFKEGDLVDVAGTTIGKGFQGGIKRHHFKRGQMTHGSKSHRALGSIGAGTTPGRVYKGKKMPGRMGGTRTKIRKLKIVKVDKELNVVMIKGALPGKPGNLLRITPAKIVGVNIPKN

SEQ ID NO: 7609 - protein, 267 aa, Arabidopsis thaliana
MAVVSFPSLLNKSTLSSSLFTPTFLPAKSSSLLIKSSPKTRFVVSSSMEAGIGVMGSKLGMMSFFEEDGTVVPVTVVGFREGNIVTQIKTLATDGYDAVQIGYRRVRDKKLTKPETGHLQKAGTIPMRHLQEFRLTNIEGFEPNQKLVFDEIFKEGDLVDVAGTTIGKGFQGGIKRHHFKRGQMTHGSKSHRALGSIGAGTTPGRVYKGKKMPGRMGGTRTKIRKLKIVKVDKELNVVMIKGALPGKPGNLLRITPAKIVGVNIPKN

SEQ ID NO: 7610 - DNA, 1861 bp, Arabidopsis thaliana
gaacaatccgatcagaaaatatgagcgaagaactaagtcaaaagccatcatcagctcagtctctgtcactgagagagggcagaaataggtttccttttctgtccctgtcacagagagagggcagattttttccttctctatctctttcagagagagatggaagaaagttttcttttctcagtatgttctcttttctcatgccactgttggaggttattaagattattattgcttctgtggcctccgtaatcttcgtcggtttcgcctgtgtaaccctcgctggttctgccgcagcattagtcgtaagcaccccggttttcatcatatttagtcctgttctcgtaccagctacgatagccacggttgtcttggcgacaggattcacggccggtggctcttttggagcgacggcacttggtctcatcatgtggcttgttaaacgtaggatgggagtaaagccgaaggataatccacctccggcaggacttccaccgaattcgggagcaggagcaggaggagctcaaagtctgatcaaaaagtcaaaggcaaagtctaaaggtgggcttaaggcttggtgtaagaagatgttaaaaagtaaattcggtggtaaaaaaggcaagtccgggggtggaaaaagtaaatttggaggtaaaggcggtaagtccgaaggtgaagaaggtatgtcgtctggggatgaaggtatgtctggaagtgaaggaggtatgtccggaggtgaaggaggtaaatccaaaagtggaaaaggtaaactcaaagctaaactcgaaaagaaaaaaggtatgtccggagggtccgagagtgaagaaggtatgtctggaagtgaaggaggtatgtctggtggtggaggaagtaaatccaaaagtaaaaaaagtaaactcaaagctaaattgggaaagaaaaaaggtatgtccggaggcatgtcaggaagtgaagaaggtatgtctggaagtgaaggaggtatgtccagtggtggaggaagtaaatccaaaagtaaaaaaagtaaactcaaagctaaattgggaaagaaaaaaggtatgtccggaggcatgtcaggaagtgaagaaggtatgtctggaagtgaaggaggtatgtccggaggtggaggaggtaaatccaaaagtagaaaaagtaaactcaaagctaaattgggaaagaaaaaatgtatgtccggaggcatgtcaggaagtgaaggaggtatgtctggaagtgaaggaggtatatccggaggtggtatgtctgggggcagtggaagtaaacacaaaattggaggaggtaaacacggaggtcttggaggtaaattcggaaagaaaagaggcatgtccggaagtggaggaggcatgtcaggaagtgaaggaggtgtgtctggaagtgaaggaagtatgtctggaggtggtatgtctgggggtagcggaagtaaacacaaaattggaggaggtaaacacggaggtcttagaggtaaattcggaaagaaaagaggtatgtcaggaagtgaaggaggtatgtctggaagtgaaggaggtatgtcggaaagtggtatgtccgggagtggagggggtaaacacaaaatcggaggaggtaaacacaaatttggaggaggtaaacacggaggtggaggtggccacatggcggagtaaagaacaatggtcaagttgttccaacattaagcagatcattgtgcattagttcaagattgtatgattgggaaagtaaaagaaagaaaaaatattttctaataagttttatgtttatatgtaatgttgaatctgattattatgataaaaagacataaatgtgatacaatgtttattttaagaacaataataatgtggcaacagttttagtc

SEQ ID NO: 7611 - protein, 549 aa, Arabidopsis thaliana
TIRSENMSEELSQKPSSAQSLSLREGRNRFPFLSLSQREGRFFPSLSLSERDGRKFSFLSMFSFLMPLLEVIKIIIASVASVIFVGFACVTLAGSAAALVVSTPVFIIFSPVLVPATIATVVLATGFTAGGSFGATALGLIMWLVKRRMGVKPKDNPPPAGLPPNSGAGAGGAQSLIKKSKAKSKGGLKAWCKKMLKSKFGGKKGKSGGGKSKFGGKGGKSEGEEGMSSGDEGMSGSEGGMSGGEGGKSKSGKGKLKAKLEKKKGMSGGSESEEGMSGSEGGMSGGGGSKSKSKKSKLKAKLGKKKGMSGGMSGSEEGMSGSEGGMSSGGGSKSKSKKSKLKAKLGKKKGMSGGMSGSEEGMSGSEGGMSGGGGGKSKSRKSKLKAKLGKKKCMSGGMSGSEGGMSGSEGGISGGGMSGGSGSKHKIGGGKHGGLGGKFGKKRGMSGSGGGMSGSEGGVSGSEGSMSGGGMSGGSGSKHKIGGGKHGGLRGKFGKKRGMSGSEGGMSGSEGGMSESGMSGSGGGKHKIGGGKHKFGGGKHGGGGGHMAE

SEQ ID NO: 7612 - protein, 543 aa, Arabidopsis thaliana
MSEELSQKPSSAQSLSLREGRNRFPFLSLSQREGRFFPSLSLSERDGRKFSFLSMFSFLMPLLEVIKIIIASVASVIFVGFACVTLAGSAAALVVSTPVFIIFSPVLVPATIATVVLATGFTAGGSFGATALGLIMWLVKRRMGVKPKDNPPPAGLPPNSGAGAGGAQSLIKKSKAKSKGGLKAWCKKMLKSKFGGKKGKSGGGKSKFGGKGGKSEGEEGMSSGDEGMSGSEGGMSGGEGGKSKSGKGKLKAKLEKKKGMSGGSESEEGMSGSEGGMSGGGGSKSKSKKSKLKAKLGKKKGMSGGMSGSEEGMSGSEGGMSSGGGSKSKSKKSKLKAKLGKKKGMSGGMSGSEEGMSGSEGGMSGGGGGKSKSRKSKLKAKLGKKKCMSGGMSGSEGGMSGSEGGISGGGMSGGSGSKHKIGGGKHGGLGGKFGKKRGMSGSGGGMSGSEGGVSGSEGSMSGGGMSGGSGSKHKIGGGKHGGLRGKFGKKRGMSGSEGGMSGSEGGMSESGMSGSGGGKHKIGGGKHKFGGGKHGGGGGHMAE

SEQ ID NO: 7613 - protein, 489 aa, Arabidopsis thaliana
MFSFLMPLLEVIKIIIASVASVIFVGFACVTLAGSAAALVVSTPVFIIFSPVLVPATIATVVLATGFTAGGSFGATALGLIMWLVKRRMGVKPKDNPPPAGLPPNSGAGAGGAQSLIKKSKAKSKGGLKAWCKKMLKSKFGGKKGKSGGGKSKFGGKGGKSEGEEGMSSGDEGMSGSEGGMSGGEGGKSKSGKGKLKAKLEKKKGMSGGSESEEGMSGSEGGMSGGGGSKSKSKKSKLKAKLGKKKGMSGGMSGSEEGMSGSEGGMSSGGGSKSKSKKSKLKAKLGKKKGMSGGMSGSEEGMSGSEGGMSGGGGGKSKSRKSKLKAKLGKKKCMSGGMSGSEGGMSGSEGGISGGGMSGGSGSKHKIGGGKHGGLGGKFGKKRGMSGSGGGMSGSEGGVSGSEGSMSGGGMSGGSGSKHKIGGGKHGGLRGKFGKKRGMSGSEGGMSGSEGGMSESGMSGSGGGKHKIGGGKHKFGGGKHGGGGGHMAE

SEQ ID NO: 7614 - DNA, 2186 bp, Arabidopsis thaliana
atcacctctctcttctcctgaaatcaccatgagtatggaagcaacggagctacaagatctctctgacgacgccgattacgccgcttctcaacaacaaggatcggctagtatgatgcgtagcgatagcggaaagagaagtttacaaagtgaacacgaagacgctgtattgatttatttgaaagataacgttgcaattcatcctacacagttcgcatctgagaggattagtggtagattgaagttgactaagcaagattctgttctctttctgtcgtggattccgtacaagggacaaacatcaaatgcaaagctatcagagaaagacaggagtctttataccatcaccgcggttccgtttactgaagtgaggtccattaggagacacactcctgctctcggatggcagtatgtaattgttgtcctgtcttctggacttgcatttccacctctgtacttctacaatggaggagtcagggagtttctggccatggtgaagcagcatgtttttcttgcaaggtcgtcagaagatcaaaatgtgttcattgtgaatgattttcagagtcccttgcagagaactttgtcttcattggagctgccaagttcactgcctgtagcaagtggacaatccgtatacccattagacggaggttcttctagtgaaaatcaaaggagaacaagttcagatgttggtaatagagtatctagtgtttcccagtctggcttcagaaagcaaaagagtcatgatccaactcgggatctttcaatccatctactagagaagttttctctggttaccaaatttgctcgagatacaactactcagctgttttcggaaaacaatggctttggttccattgacaagagatggaataaccaacccgtacatagttatcctgaaaagttgtcgaacattgctgaggaaaagcatcatgaaatccgtcatagttattctgaaaatgaccttctcaaggatgacgaaatttcttatattgatgtccctgctgatcccttagagtttgataaattaagtttgatgtggggaaaaccaaggcaaccaccaatggggcataaagagttcacagcattgttggattctgaagggcgagttgtggaatcaaaagctcttcgggagagagttttctatggaggcattgagcaccagttgcgtagagaggtatggccctttctcttgggatattatgcatatgactcgacatatgcagagagagaatatcttcgatctgtcaaacggatggaatatgcaacattgaaacagcagtggcagagcatttcccctgaacaagcaaaaaggttcacaaaatatcgggagagaaaaggattgatagataaagatgtggtaagaactgatagggcatttgaatactatgaaggggatgacaatctacatgtcaatagcatgcgtgatattctgttgacctactccttctacaattttgacctgggttactgccagggaatgagtgattatctgtctcctatcttgttcgtgatggaggatgaatcagaatctttttggtgtttcgtggcactgatggaacgacttggacccaactttaaccgtgaccagaatgggatgcatactcagctctttgcactctcaaagctggtagagttgctcgatagcccgctacataattactttaaggagaatgactgcttgaattacttcttctgtttccgctggattctgattcagtttaaaagggaatttgagtatgagaagacaatgcagctgtgggaggtgatgtggacccactacctctcggaacattttcacctatatgtttgtgtggcggtcttgaagcgatgccgcagcaagataatgggagaacagatggattttgacactctcttaaagttcatcaatgagctgtctgggcatattgatctcgattcaacagtcagagatgccgaagcactttgcatagaagctggtgaaaatggtgctgctagcattcctccaggaacccctccttctctaccccttgatgacggtaccttatatcctcaggaagatgatgttttgtaagtaatacgacttttcttttttcttctggacatgttaccaaaatttggattgcttttactagaaatcccatacaatgattaaggcaaaggacataagctttttttctttttcccacttaataattactctggttcgc

SEQ ID NO: 7615 - protein, 682 aa, Arabidopsis thaliana
SPLSSPEITMSMEATELQDLSDDADYAASQQQGSASMMRSDSGKRSLQSEHEDAVLIYLKDNVAIHPTQFASERISGRLKLTKQDSVLFLSWIPYKGQTSNAKLSEKDRSLYTITAVPFTEVRSIRRHTPALGWQYVIVVLSSGLAFPPLYFYNGGVREFLAMVKQHVFLARSSEDQNVFIVNDFQSPLQRTLSSLELPSSLPVASGQSVYPLDGGSSSENQRRTSSDVGNRVSSVSQSGFRKQKSHDPTRDLSIHLLEKFSLVTKFARDTTTQLFSENNGFGSIDKRWNNQPVHSYPEKLSNIAEEKHHEIRHSYSENDLLKDDEISYIDVPADPLEFDKLSLMWGKPRQPPMGHKEFTALLDSEGRVVESKALRERVFYGGIEHQLRREVWPFLLGYYAYDSTYAEREYLRSVKRMEYATLKQQWQSISPEQAKRFTKYRERKGLIDKDVVRTDRAFEYYEGDDNLHVNSMRDILLTYSFYNFDLGYCQGMSDYLSPILFVMEDESESFWCFVALMERLGPNFNRDQNGMHTQLFALSKLVELLDSPLHNYFKENDCLNYFFCFRWILIQFKREFEYEKTMQLWEVMWTHYLSEHFHLYVCVAVLKRCRSKIMGEQMDFDTLLKFINELSGHIDLDSTVRDAEALCIEAGENGAASIPPGTPPSLPLDDGTLYPQEDDVL

SEQ ID NO: 7616 - protein, 673 aa, Arabidopsis thaliana
MSMEATELQDLSDDADYAASQQQGSASMMRSDSGKRSLQSEHEDAVLIYLKDNVAIHPTQFASERISGRLKLTKQDSVLFLSWIPYKGQTSNAKLSEKDRSLYTITAVPFTEVRSIRRHTPALGWQYVIVVLSSGLAFPPLYFYNGGVREFLAMVKQHVFLARSSEDQNVFIVNDFQSPLQRTLSSLELPSSLPVASGQSVYPLDGGSSSENQRRTSSDVGNRVSSVSQSGFRKQKSHDPTRDLSIHLLEKFSLVTKFARDTTTQLFSENNGFGSIDKRWNNQPVHSYPEKLSNIAEEKHHEIRHSYSENDLLKDDEISYIDVPADPLEFDKLSLMWGKPRQPPMGHKEFTALLDSEGRVVESKALRERVFYGGIEHQLRREVWPFLLGYYAYDSTYAEREYLRSVKRMEYATLKQQWQSISPEQAKRFTKYRERKGLIDKDVVRTDRAFEYYEGDDNLHVNSMRDILLTYSFYNFDLGYCQGMSDYLSPILFVMEDESESFWCFVALMERLGPNFNRDQNGMHTQLFALSKLVELLDSPLHNYFKENDCLNYFFCFRWILIQFKREFEYEKTMQLWEVMWTHYLSEHFHLYVCVAVLKRCRSKIMGEQMDFDTLLKFINELSGHIDLDSTVRDAEALCIEAGENGAASIPPGTPPSLPLDDGTLYPQEDDVL

SEQ ID NO: 7617 - protein, 671 aa, Arabidopsis thaliana
MEATELQDLSDDADYAASQQQGSASMMRSDSGKRSLQSEHEDAVLIYLKDNVAIHPTQFASERISGRLKLTKQDSVLFLSWIPYKGQTSNAKLSEKDRSLYTITAVPFTEVRSIRRHTPALGWQYVIVVLSSGLAFPPLYFYNGGVREFLAMVKQHVFLARSSEDQNVFIVNDFQSPLQRTLSSLELPSSLPVASGQSVYPLDGGSSSENQRRTSSDVGNRVSSVSQSGFRKQKSHDPTRDLSIHLLEKFSLVTKFARDTTTQLFSENNGFGSIDKRWNNQPVHSYPEKLSNIAEEKHHEIRHSYSENDLLKDDEISYIDVPADPLEFDKLSLMWGKPRQPPMGHKEFTALLDSEGRVVESKALRERVFYGGIEHQLRREVWPFLLGYYAYDSTYAEREYLRSVKRMEYATLKQQWQSISPEQAKRFTKYRERKGLIDKDVVRTDRAFEYYEGDDNLHVNSMRDILLTYSFYNFDLGYCQGMSDYLSPILFVMEDESESFWCFVALMERLGPNFNRDQNGMHTQLFALSKLVELLDSPLHNYFKENDCLNYFFCFRWILIQFKREFEYEKTMQLWEVMWTHYLSEHFHLYVCVAVLKRCRSKIMGEQMDFDTLLKFINELSGHIDLDSTVRDAEALCIEAGENGAASIPPGTPPSLPLDDGTLYPQEDDVL

SEQ ID NO: 7618 - DNA, 728 bp, Arabidopsis thaliana
gtcgagaaccgatctgaccacaaagttttctactttgcaatttagataaatctttctatccactttgagaataaattaagggctctcaatttcgaattctgcttctccaacgaaaaaaacgaaatctttaatggcgaagaaaggaggagcgacgctagctgaggatgcaccatggcgagtttcgtcaggaagaccagtgcctaagatcagtcgctctccggttttatctatctctcaaaacccagaaaccgattacgccatttccgtcatgaagcatccgaatcctgtgggaggtgggtttgcgatggaagctgtacttgaatccgcaggacctgaatgcgttgttcctggccaagtaacacctcttcggttacttggtgttaaggtgtggcctgttgaagttgatcttaaattcttggaaccagtgggaaaggagctgaaaatgcttgggaagttcatggacaacgctgtcgagctgatgaataagtccttcattgaccgctaagcacagtggataaccggtcatatacttgtcaaggttctacacctggagttttgggattgcgggatatctgtctagtcgccagaacttgttagtggcagagagatctgatatgagcaaagttgaatacggtgtgcgtgtgtttgtatagaggatttttacagacagaatctatatactatcaaataattggttttaatgacagttttaaaaatgtctttaaagg

SEQ ID NO: 7619 - protein, 124 aa, Arabidopsis thaliana
MAKKGGATLAEDAPWRVSSGRPVPKISRSPVLSISQNPETDYAISVMKHPNPVGGGFAMEAVLESAGPECVVPGQVTPLRLLGVKVWPVEVDLKFLEPVGKELKMLGKFMDNAVELMNKSFIDR

SEQ ID NO: 7620 - protein, 78 aa, Arabidopsis thaliana
MKHPNPVGGGFAMEAVLESAGPECVVPGQVTPLRLLGVKVWPVEVDLKFLEPVGKELKMLGKFMDNAVELMNKSFIDR

SEQ ID NO: 7621 - protein, 66 aa, Arabidopsis thaliana
MEAVLESAGPECVVPGQVTPLRLLGVKVWPVEVDLKFLEPVGKELKMLGKFMDNAVELMNKSFIDR

SEQ ID NO: 7622 - DNA, 852 bp, Arabidopsis thaliana
ctcttaagtctgaggtaagaaccctagcatttctcatttcgaatctcgctcgagctcacagtttcttcgttggggatcgaaatcgtgccatttgagttagcctctgtatagatcgatggctagcctgagaagagctctgctcgtagcagggaagacgaagatcaacctagaaaactgccatttcatcaccggaatcaactacaacggtctcagcgtgaagcaactacaagagctccgtggaatcctccgtgaaaacacaaacacgaagctcctcgtcgccaagaacactttagtctacaaagccttggaaggaaccaaatgggagtctctgaagccatgtatgaagggtatgaacgcttggctattcgttcaatctgaagatatacctgctgctttgaagactttcatcaattttcagaaagagaagaagctctacgataacaatttaggcggtgctgtttttgaggagaaattgtatgctcctcaggattacaaggttattgagacgatgccttctcgcgctgatgtttatggtatgatgcttggttctttgcattggccggcgttagatctcgtcaatgcgttgcaggccccaccggcggcgtcggaaaatgagacagttgttgcatagaaggaaggaattttccaatttcttgctctaaaaacgcttcaatttatgtctccttttgtgtttgtgcttccggattaaacatatagtgtcctatcaaaaataatttgttggaattctcttagaaattgctattatggatttactctttgattttgagcttcgatttcggaaccagtgttactggattttgttgtagtgtattgagcttggcttatcttctg

SEQ ID NO: 7623 - protein, 171 aa, Arabidopsis thaliana
MASLRRALLVAGKTKINLENCHFITGINYNGLSVKQLQELRGILRENTNTKLLVAKNTLVYKALEGTKWESLKPCMKGMNAWLFVQSEDIPAALKTFINFQKEKKLYDNNLGGAVFEEKLYAPQDYKVIETMPSRADVYGMMLGSLHWPALDLVNALQAPPAASENETVVA

SEQ ID NO: 7624 - protein, 96 aa, Arabidopsis thaliana
MKGMNAWLFVQSEDIPAALKTFINFQKEKKLYDNNLGGAVFEEKLYAPQDYKVIETMPSRADVYGMMLGSLHWPALDLVNALQAPPAASENETVVA

SEQ ID NO: 7625 - protein, 93 aa, Arabidopsis thaliana
MNAWLFVQSEDIPAALKTFINFQKEKKLYDNNLGGAVFEEKLYAPQDYKVIETMPSRADVYGMMLGSLHWPALDLVNALQAPPAASENETVVA

SEQ ID NO: 7626 - DNA, 1594 bp, Arabidopsis thaliana
gaggagcggttgagttgaaatttgctggcgcgtactcgtcaacgtaacgcgcgtggagtgttttcgtgtccctcctcctcctcctcctcctcactaagacaaatattttgaggttctctttctcgtttgtgtgatctgtctgacaagctagaagaatcgtagatcgtgatcggattgatttgataattatggtgaaggagacggagttttacgatgtcctcggcgttagccccaccgctacggaggctgagattaagaaagcttattacatcaaggcacgccaagtgcatccagataaaaaccctaatgatcctcaggctgctcataatttccaggtattgggagaggcctaccaagtgctaagtgatccagggcaacgtcaggcctatgacacatctgggaagtcagggatttcaactgagatcattgatcctgcggctatatttgctatgctttttgggagtgaactctttgaagaatacatagggcagcttgctatggcatcaatggcttcacttgatatcttcactgaaggggatcagattgatactaaaaagattatagaaaaaatgagggctgttcagaaagaaagagaagacaaacttgctcagattcttaaggaccgcctcaacctatatatgacgaacaaagatgaatttactagcaatgctgaagctgaagtaacaagactctcaaatgcagcatacggggtggaaatgttgaacacaatcggatatatatatgtcagacaagcggcaaaagagcttgggaagaaagctatttatctcggtgtgccattcgtagctgaatggtttaggacgaaaggtcacttcatcaaatcccaagtaacagctgcaacaggtgcatacgctttattccagctgcaagaggaaatgaaaaggcaactaagtgctgaaggcaattataccgagaaggaacttgaagagtacatgaagacccataagaaagtaatgattgattctctgtggaagctcaatgttgctgatatcgaaagcactatctcccgtgtttgtgagcaggtacttcaagatcccactgccaagagagaggagcttcgtgcaagggccaaggggttaaaaactctgggaaagatcttccagaagaacaagatagccagtgagagtgatcctttagtaagagccgaacttcacaaactaaacggaaatggtcaagaacatgatcattcatccacatcaccaaaatctgatgaagcatctcgctctaccgttggacctcaggaaccgcaaagcccttatgtggaagcaccgaaacttggagaagagcaaatcaactattacttcccaaggcctgcgccgcctccaggagcacagagacactcttaaactggcaatggattgattcacagatgaacgaaaaggttattttttcctttttttgctatataatataagtctttatgcatatttgatatatttgcaggcgttggtattaccattatgtaatttttattattgttagaagaagaaattattggatctttgaaaaaagcacatgttatctcatcttagacaatgtataatgtttttattctatttatatatttgatgtttgg

SEQ ID NO: 7627 - protein, 391 aa, Arabidopsis thaliana
MVKETEFYDVLGVSPTATEAEIKKAYYIKARQVHPDKNPNDPQAAHNFQVLGEAYQVLSDPGQRQAYDTSGKSGISTEIIDPAAIFAMLFGSELFEEYIGQLAMASMASLDIFTEGDQIDTKKIIEKMRAVQKEREDKLAQILKDRLNLYMTNKDEFTSNAEAEVTRLSNAAYGVEMLNTIGYIYVRQAAKELGKKAIYLGVPFVAEWFRTKGHFIKSQVTAATGAYALFQLQEEMKRQLSAEGNYTEKELEEYMKTHKKVMIDSLWKLNVADIESTISRVCEQVLQDPTAKREELRARAKGLKTLGKIFQKNKIASESDPLVRAELHKLNGNGQEHDHSSTSPKSDEASRSTVGPQEPQSPYVEAPKLGEEQINYYFPRPAPPPGAQRHS

SEQ ID NO: 7628 - protein, 304 aa, Arabidopsis thaliana
MLFGSELFEEYIGQLAMASMASLDIFTEGDQIDTKKIIEKMRAVQKEREDKLAQILKDRLNLYMTNKDEFTSNAEAEVTRLSNAAYGVEMLNTIGYIYVRQAAKELGKKAIYLGVPFVAEWFRTKGHFIKSQVTAATGAYALFQLQEEMKRQLSAEGNYTEKELEEYMKTHKKVMIDSLWKLNVADIESTISRVCEQVLQDPTAKREELRARAKGLKTLGKIFQKNKIASESDPLVRAELHKLNGNGQEHDHSSTSPKSDEASRSTVGPQEPQSPYVEAPKLGEEQINYYFPRPAPPPGAQRHS

SEQ ID NO: 7629 - protein, 288 aa, Arabidopsis thaliana
MASMASLDIFTEGDQIDTKKIIEKMRAVQKEREDKLAQILKDRLNLYMTNKDEFTSNAEAEVTRLSNAAYGVEMLNTIGYIYVRQAAKELGKKAIYLGVPFVAEWFRTKGHFIKSQVTAATGAYALFQLQEEMKRQLSAEGNYTEKELEEYMKTHKKVMIDSLWKLNVADIESTISRVCEQVLQDPTAKREELRARAKGLKTLGKIFQKNKIASESDPLVRAELHKLNGNGQEHDHSSTSPKSDEASRSTVGPQEPQSPYVEAPKLGEEQINYYFPRPAPPPGAQRHS

SEQ ID NO: 7630 - DNA, 1990 bp, Arabidopsis thaliana
gcaggaaaacaaatcacagaaacattttgatgttaagtttttgaaaaaatcgcgagtttctggatctgtatactttcttagaggagattttgatagcatcgtttacaggagtaagatccgggaatggcaatggaggttggggagatgtctcagccggaggcgacggcgagtcttctctctctcgcttccgccactcagcaaccgtacgtctccgagctcctctctttcactcttgatcgtctccacaaggaaccggagctgcttcgagtggatgcggagcggattcagaggcaaatgcaagaggtggctgttggaaattaccgcgcgtttatcaccgctgctgatgctttgcttgcgatccgtcaggaagtttcttccattgataagcatctcgagtctctgattggcgaagtcccaaaactaacgtctggttgcactgaatttatcgattctgctgagaatattttggagaagaggaagatgaaccaagcattgctggcaaatcacagcactcttcttgacttgcttgagattcctcagcttatggacacatgcgtgaggaatggaaattttgatgaggctcttgacctggaagcatttgtatcgaaacttgctaccctgcatcccaaattgccagttatccaagcacttgcagcggaggttagacaaacaactcagtcacttctctcacagcttctccagaaactacgctcaaatatacagttaccagaatgtctccgcattattggatacttacgccgaataggtgtctttggcgagtatgaaatgcgattacagttcttaagatgccgagaggcatggctcactggaattcttgaggatttagatcagaaaaatgcctatgagtatttaaaaggcatgataaactgtcacagaatgcacctatttgacgtggttaaccaatatcgagctatattttctgatgatacatctgggagcgaagaaaattatgatggtggacttttgtttagctgggccatgcatcaaataacatcacacctgaagactctaaaaatcatgcttccaaagattactgaaggaggatctctatcaaatattttggatcagtgcatgtactgtgcgatggggcttggtggggttgggctagacttccggggtctgcttcctccactttttgaagaggcggttctaaacttattctccaagaacatgagtacagcagttgagaattttcagttagttttggattcacatcgatgggttccattaccatctgttggctttccttcaagtggtattaatgaagatagcaaggatgacgtcacacctccatcatacttgatggagcacccgccacttgcagttttcataaatggggtatcttctgctttgaacgaattacgtccttgtgccccgctaagtctaaagaatgttgttgctcatgaactgatcaaaggactccaggccgtgtctgactccttactaagatacaatacaactcggatgcttcgactcagtgaatccaatctattcctttcactttgccgagcttttgtcgaggtggtttttccacattgcgccacatgctttggccgatgttatccaggtggtgccacaatcgttatggatgccaagagtgcatacgaaggtctgggtcgcatcttagctgcatcgtcctctcaagaaccatccaacaaatctccaaaggtcatcagcacggacacaaaggatgcatcagagaatggtgtagcctcccaacctgaagaaaaacaagccgagaatccaaacgcgaaagaagaagataacagtcccattcctttgcagactcctgagataacacccgagtcttgagaaatttttcataaatttgtcttttgttgtaagaattatatgctaatacacacatagagagagagagacaacaaaagctttaaaattaagtgaagagtatcaatgcattatggtataaatttgatgggattatgtcgaattgagactgcatccaatt

SEQ ID NO: 7631 - protein, 569 aa, Arabidopsis thaliana
MAMEVGEMSQPEATASLLSLASATQQPYVSELLSFTLDRLHKEPELLRVDAERIQRQMQEVAVGNYRAFITAADALLAIRQEVSSIDKHLESLIGEVPKLTSGCTEFIDSAENILEKRKMNQALLANHSTLLDLLEIPQLMDTCVRNGNFDEALDLEAFVSKLATLHPKLPVIQALAAEVRQTTQSLLSQLLQKLRSNIQLPECLRIIGYLRRIGVFGEYEMRLQFLRCREAWLTGILEDLDQKNAYEYLKGMINCHRMHLFDVVNQYRAIFSDDTSGSEENYDGGLLFSWAMHQITSHLKTLKIMLPKITEGGSLSNILDQCMYCAMGLGGVGLDFRGLLPPLFEEAVLNLFSKNMSTAVENFQLVLDSHRWVPLPSVGFPSSGINEDSKDDVTPPSYLMEHPPLAVFINGVSSALNELRPCAPLSLKNVVAHELIKGLQAVSDSLLRYNTTRMLRLSESNLFLSLCRAFVEVVFPHCATCFGRCYPGGATIVMDAKSAYEGLGRILAASSSQEPSNKSPKVISTDTKDASENGVASQPEEKQAENPNAKEEDNSPIPLQTPEITPES

SEQ ID NO: 7632 - protein, 567 aa, Arabidopsis thaliana
MEVGEMSQPEATASLLSLASATQQPYVSELLSFTLDRLHKEPELLRVDAERIQRQMQEVAVGNYRAFITAADALLAIRQEVSSIDKHLESLIGEVPKLTSGCTEFIDSAENILEKRKMNQALLANHSTLLDLLEIPQLMDTCVRNGNFDEALDLEAFVSKLATLHPKLPVIQALAAEVRQTTQSLLSQLLQKLRSNIQLPECLRIIGYLRRIGVFGEYEMRLQFLRCREAWLTGILEDLDQKNAYEYLKGMINCHRMHLFDVVNQYRAIFSDDTSGSEENYDGGLLFSWAMHQITSHLKTLKIMLPKITEGGSLSNILDQCMYCAMGLGGVGLDFRGLLPPLFEEAVLNLFSKNMSTAVENFQLVLDSHRWVPLPSVGFPSSGINEDSKDDVTPPSYLMEHPPLAVFINGVSSALNELRPCAPLSLKNVVAHELIKGLQAVSDSLLRYNTTRMLRLSESNLFLSLCRAFVEVVFPHCATCFGRCYPGGATIVMDAKSAYEGLGRILAASSSQEPSNKSPKVISTDTKDASENGVASQPEEKQAENPNAKEEDNSPIPLQTPEITPES

SEQ ID NO: 7633 - protein, 562 aa, Arabidopsis thaliana
MSQPEATASLLSLASATQQPYVSELLSFTLDRLHKEPELLRVDAERIQRQMQEVAVGNYRAFITAADALLAIRQEVSSIDKHLESLIGEVPKLTSGCTEFIDSAENILEKRKMNQALLANHSTLLDLLEIPQLMDTCVRNGNFDEALDLEAFVSKLATLHPKLPVIQALAAEVRQTTQSLLSQLLQKLRSNIQLPECLRIIGYLRRIGVFGEYEMRLQFLRCREAWLTGILEDLDQKNAYEYLKGMINCHRMHLFDVVNQYRAIFSDDTSGSEENYDGGLLFSWAMHQITSHLKTLKIMLPKITEGGSLSNILDQCMYCAMGLGGVGLDFRGLLPPLFEEAVLNLFSKNMSTAVENFQLVLDSHRWVPLPSVGFPSSGINEDSKDDVTPPSYLMEHPPLAVFINGVSSALNELRPCAPLSLKNVVAHELIKGLQAVSDSLLRYNTTRMLRLSESNLFLSLCRAFVEVVFPHCATCFGRCYPGGATIVMDAKSAYEGLGRILAASSSQEPSNKSPKVISTDTKDASENGVASQPEEKQAENPNAKEEDNSPIPLQTPEITPES

SEQ ID NO: 7634 - DNA, 1142 bp, Arabidopsis thaliana
attttattcgtaagaatgagatctagtgtagaagataacaaaggatggataggaccagcgacaccggagatatcgaacggttttgagtttcagaaaggttcgaaccggacaccaaaccatcaccggtctactatggggaagccagcgccgtcaaaatgggacgatgctcagaaatggctttctggtgtagggtttgctcgtggaggtggtggaggtgctgacaagagtagtcatcactcaagaagtaataagccgagaaactcgaacgcggatgatcttagacttatagcttcagcttcacagagagaacgtgaaggagaagatcagtacgttgagtatgatgatgaagagatggcggcgggaagaccggaggttgagacgaagaatgttgattgtggtgaatctgtttggaggaaagaaagtagtattaatccaacggctgtgattagatccgtttgtgtgagagatatggggactgagatgactcctattggtagtcaagagccttctagaacagctacaccggtgcgagctactacaccggttgggaggagtcctgtgacttcaccggtgagggcttcacaacgtggtgaggcggtgggggttgtgatggagacggtgacggaggttaggagggtagagagtaataatagtgagaaggttaatggttttgtggagagtaagaaggctatgagtgctatggaagctcgagccatggcttgggatgaagcagaacgtgctaaattcatggctaggtataagagagaggaagtgaagatacaagcttgggagaatcacgagaagagaaaggctgagatggagatgaagaaaatggaggtgaaggcggagaggatgaaagcaagggcagaggagaagttggccaacaagctagctgcgacgaaaaggatagcggaagagaggagggcgaatgcggaggctaagttaaacgaaaaggcggtgaagacatcggagaaagctgattatataaggaggagtggtcacttgccttcttctttttctttctcctttaagcttccctctcgttgttggtgtcaataattgtctattttcattagaatgtaatcgtatggatttagtgatattcaataactaacgcaaaaaaaaaaaaaagttttgtttgg

SEQ ID NO: 7635 - protein, 352 aa, Arabidopsis thaliana
ILFVRMRSSVEDNKGWIGPATPEISNGFEFQKGSNRTPNHHRSTMGKPAPSKWDDAQKWLSGVGFARGGGGGADKSSHHSRSNKPRNSNADDLRLIASASQREREGEDQYVEYDDEEMAAGRPEVETKNVDCGESVWRKESSINPTAVIRSVCVRDMGTEMTPIGSQEPSRTATPVRATTPVGRSPVTSPVRASQRGEAVGVVMETVTEVRRVESNNSEKVNGFVESKKAMSAMEARAMAWDEAERAKFMARYKREEVKIQAWENHEKRKAEMEMKKMEVKAERMKARAEEKLANKLAATKRIAEERRANAEAKLNEKAVKTSEKADYIRRSGHLPSSFSFSFKLPSRCWCQ

SEQ ID NO: 7636 - protein, 347 aa, Arabidopsis thaliana
MRSSVEDNKGWIGPATPEISNGFEFQKGSNRTPNHHRSTMGKPAPSKWDDAQKWLSGVGFARGGGGGADKSSHHSRSNKPRNSNADDLRLIASASQREREGEDQYVEYDDEEMAAGRPEVETKNVDCGESVWRKESSINPTAVIRSVCVRDMGTEMTPIGSQEPSRTATPVRATTPVGRSPVTSPVRASQRGEAVGVVMETVTEVRRVESNNSEKVNGFVESKKAMSAMEARAMAWDEAERAKFMARYKREEVKIQAWENHEKRKAEMEMKKMEVKAERMKARAEEKLANKLAATKRIAEERRANAEAKLNEKAVKTSEKADYIRRSGHLPSSFSFSFKLPSRCWCQ

SEQ ID NO: 7637 - protein, 308 aa, Arabidopsis thaliana
MGKPAPSKWDDAQKWLSGVGFARGGGGGADKSSHHSRSNKPRNSNADDLRLIASASQREREGEDQYVEYDDEEMAAGRPEVETKNVDCGESVWRKESSINPTAVIRSVCVRDMGTEMTPIGSQEPSRTATPVRATTPVGRSPVTSPVRASQRGEAVGVVMETVTEVRRVESNNSEKVNGFVESKKAMSAMEARAMAWDEAERAKFMARYKREEVKIQAWENHEKRKAEMEMKKMEVKAERMKARAEEKLANKLAATKRIAEERRANAEAKLNEKAVKTSEKADYIRRSGHLPSSFSFSFKLPSRCWCQ

SEQ ID NO: 7638 - DNA, 850 bp, Arabidopsis thaliana
aaaaaaggaaccgttttttctttctatggctccaaaactctgagacagagcaagaaaaagataaagtgagtgaaaaaatggcaacggtcacgattctctcacccaaatcgattccaaaggtcactgattccaaattcggagctagggtttctgatcagatcgtcaatgtcgtaaaatgcggcaaatccggccggagattgaagttagcgaagctggtctcagcggctggattgtcacagatcgaaccagacatcaacgaagacccgattggtcaattcgagactaatagcattgaaatggaagatttcaagtatggatattacgatggagctcatacttactatgaaggagaagttcaaaagggaacattttggggagcaattgctgatgacattgctgctgtggatcaaactaatgggtttcaaggtttgatctcttgtatgtttcttcctgctatagctcttgggatgtattttgatgctccgggtgagtacttgttcataggtgcagcgttattcacggtagtgttctgtataatagagatggataaacctgaccagccacacaacttcgagcctcagatatacaaattggagagaggagctcgtgacaagctcattaatgactacaacacaatgagcatttgggactttaatgacaaatatggtgatgtatgggatttcaccattgagaaagatgatatcgccacacgataagataatggattgtgatctcgttataatcatgacttttgatgtaaactgttttataaaattgatgaatgaacggggtacaatgtgtataatattgattgttcattctcttatttttctttagtaccataaaacct

SEQ ID NO: 7639 - protein, 237 aa, Arabidopsis thaliana
KRNRFFFLWLQNSETEQEKDKVSEKMATVTILSPKSIPKVTDSKFGARVSDQIVNVVKCGKSGRRLKLAKLVSAAGLSQIEPDINEDPIGQFETNSIEMEDFKYGYYDGAHTYYEGEVQKGTFWGAIADDIAAVDQTNGFQGLISCMFLPAIALGMYFDAPGEYLFIGAALFTVVFCIIEMDKPDQPHNFEPQIYKLERGARDKLINDYNTMSIWDFNDKYGDVWDFTIEKDDIATR

SEQ ID NO: 7640 - protein, 212 aa, Arabidopsis thaliana
MATVTILSPKSIPKVTDSKFGARVSDQIVNVVKCGKSGRRLKLAKLVSAAGLSQIEPDINEDPIGQFETNSIEMEDFKYGYYDGAHTYYEGEVQKGTFWGAIADDIAAVDQTNGFQGLISCMFLPAIALGMYFDAPGEYLFIGAALFTVVFCIIEMDKPDQPHNFEPQIYKLERGARDKLINDYNTMSIWDFNDKYGDVWDFTIEKDDIATR

SEQ ID NO: 7641 - protein, 139 aa, Arabidopsis thaliana
MEDFKYGYYDGAHTYYEGEVQKGTFWGAIADDIAAVDQTNGFQGLISCMFLPAIALGMYFDAPGEYLFIGAALFTVVFCIIEMDKPDQPHNFEPQIYKLERGARDKLINDYNTMSIWDFNDKYGDVWDFTIEKDDIATR

SEQ ID NO: 7642 - DNA, 615 bp, Arabidopsis thaliana
agtcatcactctcacttgacacaaaaactcttttgtctccgtctctctgtctctcatggcgactcttcctctcccgactcaaacttctacaatctctctccctaaaccttatctctccaattccttctccttcccactccgtaacgcaacactctcaacaacaacaaaccgccggaactttctcaccaccggaaggatcatagctcgggcatataaagtggtggtagagcacgacggaaagacgactgaattggaagtcgaaccagacgagacgattctatctaaggctcttgactctggccttgacgttccctacgactgcaatctcggtgtttgtatgacttgtccagcgaaactcgtgaccggaacggtggatcaaagtggtgggatgctaagtgatgatgtggttgaacgtggctacacgcttctatgtgcttcgtatccaacttctgattgtcacattaagatgatccctgaggaagaactcttgtctctccagctcgccactgccaacgactaatcatcttcttgatttagactaaagaagtcttttttttggtgtaatacgaacactttgtaacgaatcttgctatgagacttcgaaatcttgatttc

SEQ ID NO: 7643 - protein, 154 aa, Arabidopsis thaliana
MATLPLPTQTSTISLPKPYLSNSFSFPLRNATLSTTTNRRNFLTTGRIIARAYKVVVEHDGKTTELEVEPDETILSKALDSGLDVPYDCNLGVCMTCPAKLVTGTVDQSGGMLSDDVVERGYTLLCASYPTSDCHIKMIPEEELLSLQLATAND

SEQ ID NO: 7644 - DNA, 800 bp, Arabidopsis thaliana
aaaacaacactcaaaagtctcttcttcttcttcttcacatcgatcatcatacaacaacaaaaaatggattacagagaatccaccggtgaaagtcagtcaaagtacaaaggaatccgtcgtcggaaatggggcaaatgggtatcagagattagagttccgggaactcgtgaccgtctctggttaggttcattctcaacagcagaaggcgccgccgtagcacacgacgttgctttcttctgtttacaccaacctgattctttagaatctctcaatttccctcatttgcttaatccttcactcgtttccagaacttctccgagatctatccagcaagctgcttctaacgccggcatggccattgacgccggaatcgtccacagtaccagcgtgaactctggatgcggcgatacgacgacgtattacgagaatggagctgatcaagtggagccgttgaatatttcagtgtatgattatctgggcggccacgatcacgtttgatttatctcgacggtcatgatcacgtttgatcttcttttgagtaagattttgtaccataatcaaaacaggtgtggtgctaaaatcttactcaaaacaagattaggtaccacagagaaacaatcaaatggttgtgaatatacattataaggttgattaatgtttgtttcactgatttagtgaagtttggtccattgtatacaaatctattcaagaaacctagcgcgagatcatgtttcgtgattgaagattgagatttttaagtattcgtaatatttttgtaaaatacaaatatgtttctgatc

SEQ ID NO: 7645 - protein, 165 aa, Arabidopsis thaliana
KTTLKSLFFFFFTSIIIQQQKMDYRESTGESQSKYKGIRRRKWGKWVSEIRVPGTRDRLWLGSFSTAEGAAVAHDVAFFCLHQPDSLESLNFPHLLNPSLVSRTSPRSIQQAASNAGMAIDAGIVHSTSVNSGCGDTTTYYENGADQVEPLNISVYDYLGGHDHV

SEQ ID NO: 7646 - protein, 144 aa, Arabidopsis thaliana
MDYRESTGESQSKYKGIRRRKWGKWVSEIRVPGTRDRLWLGSFSTAEGAAVAHDVAFFCLHQPDSLESLNFPHLLNPSLVSRTSPRSIQQAASNAGMAIDAGIVHSTSVNSGCGDTTTYYENGADQVEPLNISVYDYLGGHDHV

SEQ ID NO: 7647 - DNA, 1155 bp, Arabidopsis thaliana
tcactcactcacactactcaagtcaacgtttctaagattctccggcggagcgattatgtcaggatcttcttcaccgagcttgtggctggcaccgaatccgagcaagagatggggagagctcttcttcctcttctacactcctttttggctcactctctgtttaggcatcgttgttccttacaagctttacgagacattcacggagttggagtatctgcttctagctttggtttcagctgttcctgctttcgttatacccatgttactcgttggaaaggccgacagaagtttatgttggaaggaccgctattgggttaaggcaaatctctggataattgttttcagctatgtcggaaactacttttggactcactatttctttaaagttcttggagcgtcctatacttttccatcatggaaaatgaataatgtgcctcacacaacattcttcctaacacatgtttgcttcctcttttaccacgttgcatcgaacattactcttcggaggctacgccattccactgctgatttaccagattctctgaaatggtgttttgaggctgcatggatacttgcgctttcttatttcattgcatacttggagactattgctatcgcaaattttccttactatgagtttgtggaccgaagtgccatgtacagagttggatgtcttttctatgccatttacttcattgtgagcttcccaatgttcttcaggatggatgagaaatcaactgatgaatgggatttatctcgagtggctgttgatgctttgggtgctgctatgttggtaacaatcattcttgatctatggcgtctcttcttgggacctatagttcccttaccggagggacaaaactgccttcagtctggattaccatggttctccaattgaagattgaaagatcggttacttccaccaattcagggaattgacatgggactgagagagaaacctgcaaaggaatttccattaacactttacggaattgggaagcagttaatgcagggcatgtttctaaggcttttcttctccaactgctgatttgtttgttagttgtttttggttttcagtttctcttgatgaactttcccaatgtaacctttcaagttatcctttatagaacagaatggaacttcgttttttgttgt

SEQ ID NO: 7648 - protein, 298 aa, Arabidopsis thaliana
HSLTLLKSTFLRFSGGAIMSGSSSPSLWLAPNPSKRWGELFFLFYTPFWLTLCLGIVVPYKLYETFTELEYLLLALVSAVPAFVIPMLLVGKADRSLCWKDRYWVKANLWIIVFSYVGNYFWTHYFFKVLGASYTFPSWKMNNVPHTTFFLTHVCFLFYHVASNITLRRLRHSTADLPDSLKWCFEAAWILALSYFIAYLETIAIANFPYYEFVDRSAMYRVGCLFYAIYFIVSFPMFFRMDEKSTDEWDLSRVAVDALGAAMLVTIILDLWRLFLGPIVPLPEGQNCLQSGLPWFSN

SEQ ID NO: 7649 - protein, 280 aa, Arabidopsis thaliana
MSGSSSPSLWLAPNPSKRWGELFFLFYTPFWLTLCLGIVVPYKLYETFTELEYLLLALVSAVPAFVIPMLLVGKADRSLCWKDRYWVKANLWIIVFSYVGNYFWTHYFFKVLGASYTFPSWKMNNVPHTTFFLTHVCFLFYHVASNITLRRLRHSTADLPDSLKWCFEAAWILALSYFIAYLETIAIANFPYYEFVDRSAMYRVGCLFYAIYFIVSFPMFFRMDEKSTDEWDLSRVAVDALGAAMLVTIILDLWRLFLGPIVPLPEGQNCLQSGLPWFSN

SEQ ID NO: 7650 - protein, 212 aa, Arabidopsis thaliana
MLLVGKADRSLCWKDRYWVKANLWIIVFSYVGNYFWTHYFFKVLGASYTFPSWKMNNVPHTTFFLTHVCFLFYHVASNITLRRLRHSTADLPDSLKWCFEAAWILALSYFIAYLETIAIANFPYYEFVDRSAMYRVGCLFYAIYFIVSFPMFFRMDEKSTDEWDLSRVAVDALGAAMLVTIILDLWRLFLGPIVPLPEGQNCLQSGLPWFSN

SEQ ID NO: 7651 - DNA, 619 bp, Arabidopsis thaliana
aaaaagacatcctttcacattgcggcggaggaagctctaatcaccgaagaggagtaaaaatggcggttccgttgcttacgaagaaggtggtgaagaagaggtctgccaaattcatcagaccccagagtgatcgcagaatcaccgtcaaggaaagctggaggaggcctaagggtattgactcccgggtgagaagaaagttcaagggtgtcaccttgatgcccaatgttggttacggatctgataagaagacccgccactacctcccaaatggattcaagaagttcattgttcacaacacctctgagctcgagctactcatgatgcacaacaggacttactgtgcagagattgctcacaatatctcaacaaagaagagaaaggccatagtggagagagcttctcagctagacgttgttgtttccaacaagcttggtaggttgcgtagccaggaagacgagtgaaagccctaaaagatatcatctagggtttttcttttatctgtcgttaactattccgaattatcttctttttttttttttttttttgcgttttggagagtggctgaatgatattacaacttgggttctcgtttttatgatattaattcagaatcagacac

SEQ ID NO: 7652 - protein, 152 aa, Arabidopsis thaliana
KDILSHCGGGSSNHRRGVKMAVPLLTKKVVKKRSAKFIRPQSDRRITVKESWRRPKGIDSRVRRKFKGVTLMPNVGYGSDKKTRHYLPNGFKKFIVHNTSELELLMMHNRTYCAEIAHNISTKKRKAIVERASQLDVVVSNKLGRLRSQEDE

SEQ ID NO: 7653 - protein, 133 aa, Arabidopsis thaliana
MAVPLLTKKVVKKRSAKFIRPQSDRRITVKESWRRPKGIDSRVRRKFKGVTLMPNVGYGSDKKTRHYLPNGFKKFIVHNTSELELLMMHNRTYCAEIAHNISTKKRKAIVERASQLDVVVSNKLGRLRSQEDE

SEQ ID NO: 7654 - protein, 81 aa, Arabidopsis thaliana
MPNVGYGSDKKTRHYLPNGFKKFIVHNTSELELLMMHNRTYCAEIAHNISTKKRKAIVERASQLDVVVSNKLGRLRSQEDE

SEQ ID NO: 7655 - DNA, 864 bp, Arabidopsis thaliana
aacggtgtgggctaatctcacgcgctttcatcatcttcttcctagattcgctcctccactgtcttaaatttcactatcttcttcttcattttccttccttctcacttcaaatccataatctctctacttctctctctctctaaattcaaaaatggcgaaactggtgatgttgttggttctttgtatcttaccggcgatagccatggcggcaaggaggagtaatattggaaagaatacaatggtggttcaaggtagcacttactgtgacatttgcaaattcggcttcgagactcctgaatcctcctacttcatccccggtgcaacggtgaagctatcatgcaaagacaggaagacaatggaagaggtttacacagacaaagctgtttcggacaaagaaggaaagtataagttcattgtccacgacgatcacagagaccagatgtgcgatgttttgcttgtgaaaagctcggataaaacctgctctaaaatctccgttggacgtgagaagtctcgtgtgatcttgaaccattacagtggcattgcctcgcagatcagacatgctaacaacatgggattcgagaaagaagtgagtgatgtgttctgctctgctttgtttcagaagtatatggttgatgaagatgaggatgatattaaaaaccatctctaatctctctgtttaatcttatgatctgctgttttcttcattaatgagtttcgagttatggaagagatatatttgtatttgtttgattacttatttgttgtctttagagatgttgactctggtgatcggataactatctgtttgtgtaagcttcttatatattgatatgtcatttccttgcttaggaagtgtcttttatt

SEQ ID NO: 7656 - protein, 171 aa, Arabidopsis thaliana
MAKLVMLLVLCILPAIAMAARRSNIGKNTMVVQGSTYCDICKFGFETPESSYFIPGATVKLSCKDRKTMEEVYTDKAVSDKEGKYKFIVHDDHRDQMCDVLLVKSSDKTCSKISVGREKSRVILNHYSGIASQIRHANNMGFEKEVSDVFCSALFQKYMVDEDEDDIKNHL

SEQ ID NO: 7657 - protein, 166 aa, Arabidopsis thaliana
MLLVLCILPAIAMAARRSNIGKNTMVVQGSTYCDICKFGFETPESSYFIPGATVKLSCKDRKTMEEVYTDKAVSDKEGKYKFIVHDDHRDQMCDVLLVKSSDKTCSKISVGREKSRVILNHYSGIASQIRHANNMGFEKEVSDVFCSALFQKYMVDEDEDDIKNHL

SEQ ID NO: 7658 - protein, 154 aa, Arabidopsis thaliana
MAARRSNIGKNTMVVQGSTYCDICKFGFETPESSYFIPGATVKLSCKDRKTMEEVYTDKAVSDKEGKYKFIVHDDHRDQMCDVLLVKSSDKTCSKISVGREKSRVILNHYSGIASQIRHANNMGFEKEVSDVFCSALFQKYMVDEDEDDIKNHL

SEQ ID NO: 7659 - DNA, 2520 bp, Arabidopsis thaliana
atgtggaagttgaagataggagagggaaatggagaagatccttacttgttcagcagcaacaacttcgtcggacgtcaaacatgggagtttgatcccaaagccggcacacctgaggaacgagccgccgtcgaagatgctcgccggaactatttagacaaccgtccccgtgttaaaggttgcagtgatctcttgtggcgaatgcaagcgaaattcgagcaagtgatcccgccggtgaagatcgacgacggcgaaggcataacttacaaaaacgcgacggatgcgttacggagagcagtttctttctactcggctttgcagtcctccgatggccactggccggcggaaatcaccggaactctcttcttccttcctccattggtattttgtttctatatcacaggacacctcgagaagatatttgatgcagaacatcgcaaagagatgcttcggcatatctattgccaccagaacgaagacggtggatggggtttacatattgagggaaagagcgttatgttctgcaccgtactgaattacatatgcttgcgtatgctcggagaaggtcccaatggagggcgcaataacgcctgcaaacgggccaggcaatggattcttgaccatggtggtgtgacttatattccttcttggggaaaaatttggctctcgatactcggaatctatgattggtctggaaccaacccaatgcctcccgagatttggttgctgccttctttctttccaatacacttaggaaaaactttgtgttatacccggatggtttatatgcccatgtcttatctatatgggaaacgatttgttggtcctcttacacctcttattatgctattgcgcaaagaactgcacttgcaaccttatgaggaaatcaattggaacaaagcgcgccgtctatgtgcaaaagaagacatgatttatcctcatcctctggttcaagatttgttatgggacactcttcacaattttgtggagcctatccttacaaattggccgttaaaaaaacttgtacgggaaaaggctcttcgagtggcaatggaacacatacattatgaggacgaaaatagccattatattaccatcggatgtgttgagaaggttctgtgcatgcttgcttgctggatcgagaatcctaatggagatcactttaagaaacatctcgctagaattccggacttcatgtgggttgctgaagacggactgaaaatgcagagctttggaagtcaactctgggacacagtttttgcgattcaagctttacttgcttgtgacctttctgacgaaactgatgatgtactcaggaaaggacacagtttcatcaaaaaatcccaggttagagaaaacccttcaggtgactttaagagcatgtatcgccatatttccaaaggagcctggactctgtccgatcgagatcatggatggcaagtctcagattgtacagctgaagctttgaagtgttgcatgctgctctccatgatgccagctgaggtcgttggccagaaaatagatcctgaacaattatatgattctgttaatctcttgctatcgttgcagggtgaaaaaggaggtttgactgcatgggagcctgtccgtgcacaagaatggctggaattgctcaatcccacagatttctttacttgtgttatggctgaacgcgagtatgtagaatgtacctcagctgttatacaagctttggtactgttcaaacaactttatccggatcacaggacaaaagagatcatcaagtcgattgagaaaggggtgcaattcattgaaagcaaacaaacgcctgatggttcatggcatggaaactggggtatctgtttcatctacgctacttggtttgctctgagcggcctagcagccgctggtaaaacttacaaaagttgcctggctgtgcgcaaaggtgtagatttcctgcttgcgatacaggaagaagatggaggttggggcgaaagccatctgtcatgccctgagcagagatacataccattagaagggaacagatcaaacctagtgcaaaccgcatgggctatgatgggtttgattcatgccggacaggccgagagagatcctacacctcttcaccgtgctgcgaaacttatcatcacttcacaacttgaaaatggggactttccgcaacaggaaatattaggagtgttcatgaatacatgcatgctacactatgctacgtacagaaacatcttcccactatgggcactcgcggaatatcggaaagctgccttcgcaactcatcaagatctttagctctttcttaatagtcaatctttaaaagagatttggctcttctttaataatattatacacaattctgtagatatgaaagacaaaataatattattaggagacttgatgttcttaatctgagagactggggttgagatttgcgttaagcaaaatgtcaggagatttgatgttcttttgcattaaagtcggtgaacagttatgatcacaagaaaggtaatgaaagactgttttgttttcgtc

SEQ ID NO: 7660 - protein, 759 aa, Arabidopsis thaliana
MWKLKIGEGNGEDPYLFSSNNFVGRQTWEFDPKAGTPEERAAVEDARRNYLDNRPRVKGCSDLLWRMQAKFEQVIPPVKIDDGEGITYKNATDALRRAVSFYSALQSSDGHWPAEITGTLFFLPPLVFCFYITGHLEKIFDAEHRKEMLRHIYCHQNEDGGWGLHIEGKSVMFCTVLNYICLRMLGEGPNGGRNNACKRARQWILDHGGVTYIPSWGKIWLSILGIYDWSGTNPMPPEIWLLPSFFPIHLGKTLCYTRMVYMPMSYLYGKRFVGPLTPLIMLLRKELHLQPYEEINWNKARRLCAKEDMIYPHPLVQDLLWDTLHNFVEPILTNWPLKKLVREKALRVAMEHIHYEDENSHYITIGCVEKVLCMLACWIENPNGDHFKKHLARIPDFMWVAEDGLKMQSFGSQLWDTVFAIQALLACDLSDETDDVLRKGHSFIKKSQVRENPSGDFKSMYRHISKGAWTLSDRDHGWQVSDCTAEALKCCMLLSMMPAEVVGQKIDPEQLYDSVNLLLSLQGEKGGLTAWEPVRAQEWLELLNPTDFFTCVMAEREYVECTSAVIQALVLFKQLYPDHRTKEIIKSIEKGVQFIESKQTPDGSWHGNWGICFIYATWFALSGLAAAGKTYKSCLAVRKGVDFLLAIQEEDGGWGESHLSCPEQRYIPLEGNRSNLVQTAWAMMGLIHAGQAERDPTPLHRAAKLIITSQLENGDFPQQEILGVFMNTCMLHYATYRNIFPLWALAEYRKAAFATHQDL

SEQ ID NO: 7661 - protein, 693 aa, Arabidopsis thaliana
MQAKFEQVIPPVKIDDGEGITYKNATDALRRAVSFYSALQSSDGHWPAEITGTLFFLPPLVFCFYITGHLEKIFDAEHRKEMLRHIYCHQNEDGGWGLHIEGKSVMFCTVLNYICLRMLGEGPNGGRNNACKRARQWILDHGGVTYIPSWGKIWLSILGIYDWSGTNPMPPEIWLLPSFFPIHLGKTLCYTRMVYMPMSYLYGKRFVGPLTPLIMLLRKELHLQPYEEINWNKARRLCAKEDMIYPHPLVQDLLWDTLHNFVEPILTNWPLKKLVREKALRVAMEHIHYEDENSHYITIGCVEKVLCMLACWIENPNGDHFKKHLARIPDFMWVAEDGLKMQSFGSQLWDTVFAIQALLACDLSDETDDVLRKGHSFIKKSQVRENPSGDFKSMYRHISKGAWTLSDRDHGWQVSDCTAEALKCCMLLSMMPAEVVGQKIDPEQLYDSVNLLLSLQGEKGGLTAWEPVRAQEWLELLNPTDFFTCVMAEREYVECTSAVIQALVLFKQLYPDHRTKEIIKSIEKGVQFIESKQTPDGSWHGNWGICFIYATWFALSGLAAAGKTYKSCLAVRKGVDFLLAIQEEDGGWGESHLSCPEQRYIPLEGNRSNLVQTAWAMMGLIHAGQAERDPTPLHRAAKLIITSQLENGDFPQQEILGVFMNTCMLHYATYRNIFPLWALAEYRKAAFATHQDL

SEQ ID NO: 7662 - protein, 612 aa, Arabidopsis thaliana
MLRHIYCHQNEDGGWGLHIEGKSVMFCTVLNYICLRMLGEGPNGGRNNACKRARQWILDHGGVTYIPSWGKIWLSILGIYDWSGTNPMPPEIWLLPSFFPIHLGKTLCYTRMVYMPMSYLYGKRFVGPLTPLIMLLRKELHLQPYEEINWNKARRLCAKEDMIYPHPLVQDLLWDTLHNFVEPILTNWPLKKLVREKALRVAMEHIHYEDENSHYITIGCVEKVLCMLACWIENPNGDHFKKHLARIPDFMWVAEDGLKMQSFGSQLWDTVFAIQALLACDLSDETDDVLRKGHSFIKKSQVRENPSGDFKSMYRHISKGAWTLSDRDHGWQVSDCTAEALKCCMLLSMMPAEVVGQKIDPEQLYDSVNLLLSLQGEKGGLTAWEPVRAQEWLELLNPTDFFTCVMAEREYVECTSAVIQALVLFKQLYPDHRTKEIIKSIEKGVQFIESKQTPDGSWHGNWGICFIYATWFALSGLAAAGKTYKSCLAVRKGVDFLLAIQEEDGGWGESHLSCPEQRYIPLEGNRSNLVQTAWAMMGLIHAGQAERDPTPLHRAAKLIITSQLENGDFPQQEILGVFMNTCMLHYATYRNIFPLWALAEYRKAAFATHQDL

SEQ ID NO: 7663 - DNA, 1082 bp, Arabidopsis thaliana
gatgaagaagaaggtggtgaacttgtatttggaggtgttgatccaaatcatttcaagggcaaacatacatatgttcctgtgacacaaaagggctactggcagtttgacatgggtgatgttcttattggcggtgcacccactgggttctgtgaaagtggctgttctgcgatagcagattctggtacatctttgcttgccggtccaacgactataatcaccatgataaaccatgctattggagcagctggagttgttagccagcagtgcaagactgttgtggatcaatacgggcagaccattttggatttacttttgtctgagacccaaccgaagaaaatctgctcgcagattggtctgtgtacttttgatggtacccgtggtgtcagtatgggcattgagtcggtggtggacaaggaaaacgccaaattgtctaatggtgttggagatgctgcgtgttctgcatgtgagatggctgttgtgtggatccagagccagttgaggcaaaacatgactcaagagcgcatattgaactacgtcaacgagctatgtgaacgcctccccagcccaatgggagagtctgcagttgactgtgcacaactgtcaacaatgcccactgtttcacttaccattggaggcaaagtatttgatcttgctccagaagagtatgttctgaaagttggtgagggacctgtggcacagtgcatcagtggttttattgctcttgacgttgctccacctcgtggacctctctggatcttgggagatgtgttcatgggcaaataccacaccgtatttgactttggtaacgaacaggtcgggtttgcagaggcagcctaaacacgatctggttggtgtcgcgtatggttttagtatgaacaatctgcgtctcaagtgttgtttgtatgttttctggagttgaggactttgagtcgtagtagaaatggtggcgcagttccttttaagttgtttcctaacgaaaaaaggcctttgtagttttgaaggcattggctttgtaaataccttctaagtaagttcgatggtgaaaaaactgaaaactttaataaagcctgcctcttttgttt

SEQ ID NO: 7664 - protein, 278 aa, Arabidopsis thaliana
DEEEGGELVFGGVDPNHFKGKHTYVPVTQKGYWQFDMGDVLIGGAPTGFCESGCSAIADSGTSLLAGPTTIITMINHAIGAAGVVSQQCKTVVDQYGQTILDLLLSETQPKKICSQIGLCTFDGTRGVSMGIESVVDKENAKLSNGVGDAACSACEMAVVWIQSQLRQNMTQERILNYVNELCERLPSPMGESAVDCAQLSTMPTVSLTIGGKVFDLAPEEYVLKVGEGPVAQCISGFIALDVAPPRGPLWILGDVFMGKYHTVFDFGNEQVGFAEAA

SEQ ID NO: 7665 - protein, 242 aa, Arabidopsis thaliana
MGDVLIGGAPTGFCESGCSAIADSGTSLLAGPTTIITMINHAIGAAGVVSQQCKTVVDQYGQTILDLLLSETQPKKICSQIGLCTFDGTRGVSMGIESVVDKENAKLSNGVGDAACSACEMAVVWIQSQLRQNMTQERILNYVNELCERLPSPMGESAVDCAQLSTMPTVSLTIGGKVFDLAPEEYVLKVGEGPVAQCISGFIALDVAPPRGPLWILGDVFMGKYHTVFDFGNEQVGFAEAA

SEQ ID NO: 7666 - protein, 205 aa, Arabidopsis thaliana
MINHAIGAAGVVSQQCKTVVDQYGQTILDLLLSETQPKKICSQIGLCTFDGTRGVSMGIESVVDKENAKLSNGVGDAACSACEMAVVWIQSQLRQNMTQERILNYVNELCERLPSPMGESAVDCAQLSTMPTVSLTIGGKVFDLAPEEYVLKVGEGPVAQCISGFIALDVAPPRGPLWILGDVFMGKYHTVFDFGNEQVGFAEAA

SEQ ID NO: 7667 - DNA, 854 bp, Arabidopsis thaliana
tgagcactaacttcagtgggagaagtagcaggagtagtagtagcagcagtggcttttgctctggtaatataacagaagaggaaaatgtagacgatgatgatgatgggtgtgtggatgattgggaagctgttgctgatgcgttagcggctgaggaagagattgagaaaaagagtcgtcctcttgagtctgtgaaagagcaagtgagtgttggacaatcagcttctaatgtgtgtgattcgtcgattagtgatgcatcagatgttgtgggtgttgaagatccaaagcaggaatgcttgagagtgtcatcaaggaagcagactagtaatagagcttggaggctagatgatgaccttcgcccacaggggttacctaatttggcgaagcagcttagttttccggagttagacaagcgttttagctctgtggcgattccgtcttcatgtcccatatgctacgaagacttggacttgacggattcgaatttcctcccctgtccttgtggatttcggctctgtctgttctgccacaagaccatttgcgatggagatgggcgttgtccaggctgcaggaaaccctatgaacggaatatggtcaaggctgagactagtattcaaggtggtggtctaacaattcggttggctcgttcgtctagcatgttttgcaagttttaaaaggagaggtgcggttttctcaaccatgttgtcttttggaactcgagaacttaagctctgttttctatgtcatctatggttctaagtctgaaacactgtggtgatgatgtagaatgtgatgtgtgaatacataaaaggtggtacagaaaatgattcaaatacatttagatagtttcaataacg

SEQ ID NO: 7668 - protein, 222 aa, Arabidopsis thaliana
STNFSGRSSRSSSSSSGFCSGNITEEENVDDDDDGCVDDWEAVADALAAEEEIEKKSRPLESVKEQVSVGQSASNVCDSSISDASDVVGVEDPKQECLRVSSRKQTSNRAWRLDDDLRPQGLPNLAKQLSFPELDKRFSSVAIPSSCPICYEDLDLTDSNFLPCPCGFRLCLFCHKTICDGDGRCPGCRKPYERNMVKAETSIQGGGLTIRLARSSSMFCKF

SEQ ID NO: 7669 - DNA, 943 bp, Arabidopsis thaliana
gaaaatcacaaagcaagtcgcgtacaatgggttctgcattcgatccccttgtcacggccactgaggatctcgccgccgtcaactcggcgccgccactctcaaacctcacgcaagaagaactcaagaaaatcgccgcttataaagccgtcgaattcgtcgaatctggaatggttatcggtctcggcactggctccaccgcgaaacacgccgtggctcgtatcagcgagcttctccgagaaggaaaactcaaggatataatcggaatccctacttcaaccacaacgcatgagcaagcggtgtctctagggataccattatccgatctagattcgcatccggtggtggatctatcaatcgatggcgccgacgaagtcgatccggctcttaatctggtgaaaggacgcggcggatcgttattgagagagaagatgattgaaggagcatctaagaagttcgttgtgattgttgatgaatcgaagcttgtcaagtatatcggaggaagcggactcgctgttccggtggaggttgttccgttctgctgcgatttcacaagggggaaactggaagagctatttagagattcgggatgtgttgcgaagctgaggatgaaaatcggatctaacggcgaagaggcggcgccggctgtgacggataataggaattatgtggtggatttgtatttggagagagatattggagatttagaggtggcgagtgaggcgatattgaggtttcctggagtagtggagcatgggatgtttctgggaatggcgactacgttgatcgtcgccggcaaatttggtgttaccgtcaaggataggtttggataaaagtgtcatttgaaaaccattagggtttatggtttgattttgattttcgatggattctctctggttctgtaaaccctttcctcctattggtttaaaactttgacttatttttc

SEQ ID NO: 7670 - protein, 275 aa, Arabidopsis thaliana
KSQSKSRTMGSAFDPLVTATEDLAAVNSAPPLSNLTQEELKKIAAYKAVEFVESGMVIGLGTGSTAKHAVARISELLREGKLKDIIGIPTSTTTHEQAVSLGIPLSDLDSHPVVDLSIDGADEVDPALNLVKGRGGSLLREKMIEGASKKFVVIVDESKLVKYIGGSGLAVPVEVVPFCCDFTRGKLEELFRDSGCVAKLRMKIGSNGEEAAPAVTDNRNYVVDLYLERDIGDLEVASEAILRFPGVVEHGMFLGMATTLIVAGKFGVTVKDRFG

SEQ ID NO: 7671 - protein, 267 aa, Arabidopsis thaliana
MGSAFDPLVTATEDLAAVNSAPPLSNLTQEELKKIAAYKAVEFVESGMVIGLGTGSTAKHAVARISELLREGKLKDIIGIPTSTTTHEQAVSLGIPLSDLDSHPVVDLSIDGADEVDPALNLVKGRGGSLLREKMIEGASKKFVVIVDESKLVKYIGGSGLAVPVEVVPFCCDFTRGKLEELFRDSGCVAKLRMKIGSNGEEAAPAVTDNRNYVVDLYLERDIGDLEVASEAILRFPGVVEHGMFLGMATTLIVAGKFGVTVKDRFG

SEQ ID NO: 7672 - protein, 220 aa, Arabidopsis thaliana
MVIGLGTGSTAKHAVARISELLREGKLKDIIGIPTSTTTHEQAVSLGIPLSDLDSHPVVDLSIDGADEVDPALNLVKGRGGSLLREKMIEGASKKFVVIVDESKLVKYIGGSGLAVPVEVVPFCCDFTRGKLEELFRDSGCVAKLRMKIGSNGEEAAPAVTDNRNYVVDLYLERDIGDLEVASEAILRFPGVVEHGMFLGMATTLIVAGKFGVTVKDRFG

SEQ ID NO: 7673 - DNA, 788 bp, Arabidopsis thaliana
atcgtttctctcgaaaacccagaaatgtttcttcaggttaccggcacggcgactccggctatgcctgcggtagtgtttctcaattcatggagacgaccacttagtattcctctccggagcgtaaaaaccttcaagcctctagcattcttcgatctcaaaggaggcaaaggaatgagtgagttccatgaggttgaactcaaagttcgtgattatgaattggatcagtttggtgttgtgaacaatgctgtttacgcaaactactgtcaacacggtcgacatgagtttctagagagtatcggtatcaactgcgacgaagtagcacgttctggggaagccttagcaatttcagagttgacaatgaagttcctttcacctttacgtagcggagacaaattcgtggtgaaagcgaggatatcggggacatctgctgcgcgtatttacttcgatcatttcatctttaaacttccaaatcaagagcctatattggaggcaaaaggaatagctgtgtggctcgacaacaagtaccgtcctgttcgcatcccatcttctatacgttctaaatttgttcacttcctacgccaagacgacgccgtttgattcacctcatcagcccaattgaatctacttaataagcctcattagcccatatatattataaatataaattatgtatattcggatcaaatgcaaatgcaacattgaatttctcacgccgttataagccaactagtaaaatcattcaaggatccatgtttatactattttatcaagagttagtgaaatctttc

SEQ ID NO: 7674 - protein, 198 aa, Arabidopsis thaliana
IVSLENPEMFLQVTGTATPAMPAVVFLNSWRRPLSIPLRSVKTFKPLAFFDLKGGKGMSEFHEVELKVRDYELDQFGVVNNAVYANYCQHGRHEFLESIGINCDEVARSGEALAISELTMKFLSPLRSGDKFVVKARISGTSAARIYFDHFIFKLPNQEPILEAKGIAVWLDNKYRPVRIPSSIRSKFVHFLRQDDAV

SEQ ID NO: 7675 - protein, 190 aa, Arabidopsis thaliana
MFLQVTGTATPAMPAVVFLNSWRRPLSIPLRSVKTFKPLAFFDLKGGKGMSEFHEVELKVRDYELDQFGVVNNAVYANYCQHGRHEFLESIGINCDEVARSGEALAISELTMKFLSPLRSGDKFVVKARISGTSAARIYFDHFIFKLPNQEPILEAKGIAVWLDNKYRPVRIPSSIRSKFVHFLRQDDAV

SEQ ID NO: 7676 - protein, 178 aa, Arabidopsis thaliana
MPAVVFLNSWRRPLSIPLRSVKTFKPLAFFDLKGGKGMSEFHEVELKVRDYELDQFGVVNNAVYANYCQHGRHEFLESIGINCDEVARSGEALAISELTMKFLSPLRSGDKFVVKARISGTSAARIYFDHFIFKLPNQEPILEAKGIAVWLDNKYRPVRIPSSIRSKFVHFLRQDDAV

SEQ ID NO: 7677 - DNA, 1231 bp, Arabidopsis thaliana
aaccaaaagaatcacgacattgaatcttctttcatttctctcctcaagacatagtagcataagaaaatgaagatatcatcactaggatgggtcttagtccttatcttcatctctattaccattgtttcgagtgcaccagcacctaaacctcctaaacctaagcctgcaccagcacctacacctcctaaacctaagcccacaccagcacctacacctcctaaacctaagcccaaaccagcacctacacctcctaaacctaagcccacaccagcacctacacctcctaaacctaagcctgcaccagcaccagcaccagcaccaacaccagcaccgaaacctaaacctgcacctaaaccagcaccaggtggagaagttgaggacgaaaccgagtttagctacgagacgaaaggaaacaaggggccagcgaaatggggaacactacatgcagagtggaaaatgtgtggaataggcaaaatgcaatctcctattgatcttcgggacaaaaatgtggtagttagtaataaatttggattgcttcgtagccagtatctgccttctaataccaccattaagaacagaggtcatgatatcatgttgaaattcaaaggaggcaataaaggtattggtgtcactatccgtggtactagatatcaacttcaacaacttcattggcactctccttccgaacatacaatcaatggcaaaaggtttgcgctagaggaacacttggttcatgagagtaaagataaacgctacgctgttgtcgctttcttatacaatctcggagcatctgacccttttctcttttcgttggaaaaacaattgaagaagataactgatacacatgcgtccgaggaacatgtcggaatcattgatcccaaaaaactcagttttgaatcaaaacattattatagatattccggatcacttactgctcctccatgttctgaaaatgttatttggtccgtttccaaagagattcgcactgtgtcaagtaaacaagtgaagcttctccgtgtggctgtacacgatgcttcagattcaaatgccaggccgcttcaagcagtcaataagcgcaaggtatatttatacaaaccaaaggttaagttaatgaagaaatactgtaatataagttcttactagtaatctttaattctttatatatgtacattatgaattgtacactaaaatgatgtttttagggataaactgatgacttggttttgttatt

SEQ ID NO: 7678 - protein, 358 aa, Arabidopsis thaliana
MKISSLGWVLVLIFISITIVSSAPAPKPPKPKPAPAPTPPKPKPTPAPTPPKPKPKPAPTPPKPKPTPAPTPPKPKPAPAPAPAPTPAPKPKPAPKPAPGGEVEDETEFSYETKGNKGPAKWGTLHAEWKMCGIGKMQSPIDLRDKNVVVSNKFGLLRSQYLPSNTTIKNRGHDIMLKFKGGNKGIGVTIRGTRYQLQQLHWHSPSEHTINGKRFALEEHLVHESKDKRYAVVAFLYNLGASDPFLFSLEKQLKKITDTHASEEHVGIIDPKKLSFESKHYYRYSGSLTAPPCSENVIWSVSKEIRTVSSKQVKLLRVAVHDASDSNARPLQAVNKRKVYLYKPKVKLMKKYCNISSY

SEQ ID NO: 7679 - protein, 228 aa, Arabidopsis thaliana
MCGIGKMQSPIDLRDKNVVVSNKFGLLRSQYLPSNTTIKNRGHDIMLKFKGGNKGIGVTIRGTRYQLQQLHWHSPSEHTINGKRFALEEHLVHESKDKRYAVVAFLYNLGASDPFLFSLEKQLKKITDTHASEEHVGIIDPKKLSFESKHYYRYSGSLTAPPCSENVIWSVSKEIRTVSSKQVKLLRVAVHDASDSNARPLQAVNKRKVYLYKPKVKLMKKYCNISSY

SEQ ID NO: 7680 - protein, 222 aa, Arabidopsis thaliana
MQSPIDLRDKNVVVSNKFGLLRSQYLPSNTTIKNRGHDIMLKFKGGNKGIGVTIRGTRYQLQQLHWHSPSEHTINGKRFALEEHLVHESKDKRYAVVAFLYNLGASDPFLFSLEKQLKKITDTHASEEHVGIIDPKKLSFESKHYYRYSGSLTAPPCSENVIWSVSKEIRTVSSKQVKLLRVAVHDASDSNARPLQAVNKRKVYLYKPKVKLMKKYCNISSY

SEQ ID NO: 7681 - DNA, 791 bp, Arabidopsis thaliana
gtaaaaattacacaaaggatagtgtctgcaaatatctaaatgaaaacacttaattccaaaatgagaaatcaagtgggttttgcctagctaattgtataaatagtaacacaatcataatctcttcttccatcaggtcttcttcataatatatttcttctctaataattgaaagcaaaagaaaacagtttttttttttagaaaggtaaagaaatggaggaaacaaaggagagaaagatagtagtagcagtagacgaaagcgaagagagcatggaagctctgtcatggagtcttgacaatctttttccatatggttccaataatacactcatcctcctctacgtcaagccccctcttcccgtttactcttccctcgatgccgcagggtttatagtgacaggagacccggttgcagctttgaagaagtatgaatacgagctcgtggaatcggtcatggctcggtctcgaaccgtgtaccaagattatgagtctgatattaatatagagagacgagttggaagaggagatgctaaggaagttatatgcaacgcagttcagaaacttagagttgatatgttagtaatgggcactcatgactatggcttcttcaaaagggctttgctagggagtgtgagcgagtattgcgccaaacgagtcaagtgtcctgtggttatcgtcaagaagcaagctcaagataattaagctcatatgattgcattgtgtatatgtttcgaaagaactggtgtaacacttgaatcaatcttcgtatgcgataataaaatacataacggttt

SEQ ID NO: 7682 - protein, 162 aa, Arabidopsis thaliana
MEETKERKIVVAVDESEESMEALSWSLDNLFPYGSNNTLILLYVKPPLPVYSSLDAAGFIVTGDPVAALKKYEYELVESVMARSRTVYQDYESDINIERRVGRGDAKEVICNAVQKLRVDMLVMGTHDYGFFKRALLGSVSEYCAKRVKCPVVIVKKQAQDN

SEQ ID NO: 7683 - protein, 143 aa, Arabidopsis thaliana
MEALSWSLDNLFPYGSNNTLILLYVKPPLPVYSSLDAAGFIVTGDPVAALKKYEYELVESVMARSRTVYQDYESDINIERRVGRGDAKEVICNAVQKLRVDMLVMGTHDYGFFKRALLGSVSEYCAKRVKCPVVIVKKQAQDN

SEQ ID NO: 7684 - protein, 82 aa, Arabidopsis thaliana
MARSRTVYQDYESDINIERRVGRGDAKEVICNAVQKLRVDMLVMGTHDYGFFKRALLGSVSEYCAKRVKCPVVIVKKQAQDN

SEQ ID NO: 7685 - DNA, 580 bp, Arabidopsis thaliana
ataccttttttttttatctcaccgtcttttatttcgtcttcctcatctttctcgtctctgaacctcttctctaagaacgaagaagaaaattgacaagtgcaaaaatggcgacggattgcaatagagtcaacgatttcttgttttctcagcagcaagagtctacttctggtgcaaataaatacggaggacttgtgccaaagaaaaagcctctcatctctaaggattccaaacgtgctttctttgattcagcagattgggctttactcaagcaaggagcaagtatagatcagagaacaatagcggcaatagaaaaactaagacccaaattgcagagaacgcctcgcaagcaactttctcctaggagacccacatgtgcgacgggaaatgagaatctgacagagtcgagcttttagggtacaatgaaaagggtttgacgtggaaatggaacgtgattggtttggtagcctactcacgtgtttcatgtttccattaaaaaacttgtatgcagttattgacagttgttcggttattttcactattggttcctaaaatgcttgtcgtttcaataagttgcgcagac

SEQ ID NO: 7686 - protein, 102 aa, Arabidopsis thaliana
MATDCNRVNDFLFSQQQESTSGANKYGGLVPKKKPLISKDSKRAFFDSADWALLKQGASIDQRTIAAIEKLRPKLQRTPRKQLSPRRPTCATGNENLTESSF

SEQ ID NO: 7687 - DNA, 988 bp, Arabidopsis thaliana
agggttctaaatctgagatttccagagaactgtgcatatcttcatagtttctttgaatttcaccgtattcataccataaaaatgagaagaatcgtcggttcaatttcgagtcttgctaaagataagctctcttcatcttcttattcttcgtctagacaaattttcactgcgcgttcatcttcttggcaacgagatgcatcaagtaagctctcagaagcttctttacctggaaaccacataaaatgggcttcgcttggttcagtcagaaattcgagattcgcatctggttttacaccattgcagcaaaaacctttggattcaatcatggatttggccagagccaagactaaatcccctgaagaactcacttcgatctgggacgattatcatttgggacgaggtcatattgggttaacgatgaaagctcagctttatcgattgttggagcaacgagcctccgagtgccgatactttgtcattccattgtggagaggaaatggttacataacaatgtttgctcaagttgaagcgcctcacatgatttttactggtctcgaagactacaaagcaagaggaactcaagcggctccttacctgactacaaccttctacactgagctttcagagacaaaagacttggtctttatccgaggcgatgttgtgttcacaagcaaactcactgacgaggaggctaaatggatcatggagacagctcaatcgttttatttgaacgactctcgctacaagctgcttgagcggttcaataaacatactcatgactttgagttcaaggatgtgttacaagctctggatatgcctcttctgtgattatcaggagaaaaaacttttctggcttttgagttcttgagacaacaacaccttgtattagaattttttttgtatggtaataagactatttcatgaccaaactaggtttggttggatacttactgtgttttgcttttataaataaacaattttgagtaag

SEQ ID NO: 7688 - protein, 275 aa, Arabidopsis thaliana
RVLNLRFPENCAYLHSFFEFHRIHTIKMRRIVGSISSLAKDKLSSSSYSSSRQIFTARSSSWQRDASSKLSEASLPGNHIKWASLGSVRNSRFASGFTPLQQKPLDSIMDLARAKTKSPEELTSIWDDYHLGRGHIGLTMKAQLYRLLEQRASECRYFVIPLWRGNGYITMFAQVEAPHMIFTGLEDYKARGTQAAPYLTTTFYTELSETKDLVFIRGDVVFTSKLTDEEAKWIMETAQSFYLNDSRYKLLERFNKHTHDFEFKDVLQALDMPLL

SEQ ID NO: 7689 - protein, 248 aa, Arabidopsis thaliana
MRRIVGSISSLAKDKLSSSSYSSSRQIFTARSSSWQRDASSKLSEASLPGNHIKWASLGSVRNSRFASGFTPLQQKPLDSIMDLARAKTKSPEELTSIWDDYHLGRGHIGLTMKAQLYRLLEQRASECRYFVIPLWRGNGYITMFAQVEAPHMIFTGLEDYKARGTQAAPYLTTTFYTELSETKDLVFIRGDVVFTSKLTDEEAKWIMETAQSFYLNDSRYKLLERFNKHTHDFEFKDVLQALDMPLL

SEQ ID NO: 7690 - protein, 167 aa, Arabidopsis thaliana
MDLARAKTKSPEELTSIWDDYHLGRGHIGLTMKAQLYRLLEQRASECRYFVIPLWRGNGYITMFAQVEAPHMIFTGLEDYKARGTQAAPYLTTTFYTELSETKDLVFIRGDVVFTSKLTDEEAKWIMETAQSFYLNDSRYKLLERFNKHTHDFEFKDVLQALDMPLL

SEQ ID NO: 7691 - DNA, 645 bp, Arabidopsis thaliana
aaaaaccctagcagcggacacacacttaagtccatcgacatctggagagtgagaagagaggaatagccaaagatgactttcaagcgaaggaacggtgggaggaacaagcacaacagaggacacgtcaacccaatcagatgctccaactgcggcaaatgctgccctaaggacaaggccattaagaggttcattgtgaggaacattgtggagcaggctgctattagagatgttcaggaagctagcgtctatgagggatacacattgccgaagctatatgcaaagacgcaatactgtgtctcctgtgctatccactctcacgtcgttagagtccgttcccgcaccaaccgtagggttcgtactcctcctccacgtttcaccagacgcaaggaggatactcccaagcctggacagccaggacaggcccctcgtccagctgggcctggagctgcagctgcaccgcgtgtctgaagcctgcaatcagcttaaattgtagtttcatttttcaagatttttgtttttcttatgttggcttcagattttgtttccttgtgaatatccttatgttttttttttttttttcaaataaatgtctcgactttgttattattatatataaacctcatagttttgcaatttgcttaagtt

SEQ ID NO: 7692 - protein, 131 aa, Arabidopsis thaliana
MTFKRRNGGRNKHNRGHVNPIRCSNCGKCCPKDKAIKRFIVRNIVEQAAIRDVQEASVYEGYTLPKLYAKTQYCVSCAIHSHVVRVRSRTNRRVRTPPPRFTRRKEDTPKPGQPGQAPRPAGPGAAAAPRV

SEQ ID NO: 7693 - protein, 88 aa, Arabidopsis thaliana
MFRKLASMRDTHCRSYMQRRNTVSPVLSTLTSLESVPAPTVGFVLLLHVSPDARRILPSLDSQDRPLVQLGLELQLHRVSEACNQLKL

SEQ ID NO: 7694 - protein, 81 aa, Arabidopsis thaliana
MRDTHCRSYMQRRNTVSPVLSTLTSLESVPAPTVGFVLLLHVSPDARRILPSLDSQDRPLVQLGLELQLHRVSEACNQLKL

SEQ ID NO: 7695 - DNA, 927 bp, Arabidopsis thaliana
aatcttcatctccgtcgatctccattgatctctaacactaaaattctactactcttcactttctacagcttaggaagagttctcgacaagctgattcttcgagttctcgacaagtttcagtgtttttgtttccgggtcacagagaacaaaggcaatttacaataatggcagagactaaacaaccactgatcggtcttaaatgggaaccaaagcttccaggcttatccttagacttgaaaactggttcaaccagaagcaaaacagctgagagttctaagtcagagcttgttgatggtctttgtcttccacctaatgatccaaggaagattaacaagatgattagaaaacaactcaaagacactactggttctaactggtttgatatgcctgctccaacaatgactcctgagttgaaaagagatcttcagttgcttaagttgagaactgtaatggatcctgctctacactacaagaaatctgtgtcacggtctaaactagctgaaaaatatttccagattggtacagtaattgaaccagctgaagagttttatgggagattgacaaagaagaatagaaaagcaactcttgctgatgagttggtttcagatcctaaaactgctctctacaggaagcgtaaagttagggagattgaggagaagagtagagctgttacgaataagaaatggaataaaaagggaaaccagtctaagaacacaaagccaagaaggaactgaattatttttgttaagagtatgatcatagttttgggacacattttttctatttttaatagaatatggtcatagtattggatacactttcttgcggtgatataggttgtaatgactcttgttgtttatggcctttgtttaaaggattttgtgttattggttacacctttgataactgtaataactcttgttgttt

SEQ ID NO: 7696 - protein, 189 aa, Arabidopsis thaliana
MAETKQPLIGLKWEPKLPGLSLDLKTGSTRSKTAESSKSELVDGLCLPPNDPRKINKMIRKQLKDTTGSNWFDMPAPTMTPELKRDLQLLKLRTVMDPALHYKKSVSRSKLAEKYFQIGTVIEPAEEFYGRLTKKNRKATLADELVSDPKTALYRKRKVREIEEKSRAVTNKKWNKKGNQSKNTKPRRN

SEQ ID NO: 7697 - protein, 132 aa, Arabidopsis thaliana
MIRKQLKDTTGSNWFDMPAPTMTPELKRDLQLLKLRTVMDPALHYKKSVSRSKLAEKYFQIGTVIEPAEEFYGRLTKKNRKATLADELVSDPKTALYRKRKVREIEEKSRAVTNKKWNKKGNQSKNTKPRRN

SEQ ID NO: 7698 - protein, 116 aa, Arabidopsis thaliana
MPAPTMTPELKRDLQLLKLRTVMDPALHYKKSVSRSKLAEKYFQIGTVIEPAEEFYGRLTKKNRKATLADELVSDPKTALYRKRKVREIEEKSRAVTNKKWNKKGNQSKNTKPRRN

SEQ ID NO: 7699 - DNA, 441 bp, Arabidopsis thaliana
catcgctgtctggaacagtgactgctctctctcgagccgcacatatttcgtcttcttgatctaatcgctttgagctgttagcagagagcagtcgacaatcatgggtcactccaacgtctggaattctcatcctaagaaatacggtcctggttctcgcttatgccgtgtgtgtggaaactcccatgggctaatcaggaagtatggtctcaactgctgcagacagtgtttccgtagcaacgccaaggaaatcggattcattaagtaccgttgatgatcgatgttgttcacacaggagcatcatgtcttttgagttttaaactttgcgttgaacttgtaatcgatttatcgacattgaactaatttgattatgtttttgtgctgttgaatctacaagttactttgttctactattgcttataagtttatcagatatatttgctt

SEQ ID NO: 7700 - protein, 56 aa, Arabidopsis thaliana [sequence omitted]

SEQ ID NO: 7701 - protein, 38 aa, Arabidopsis thaliana
MVSTAADSVSVATPRKSDSLSTVDDRCCSHRSIMSFEF

SEQ ID NO: 7702 - DNA, 1539 bp, Arabidopsis thaliana
atgacaagttggttttttttttttttttttaattttttcatcttcttgggtttggttgggtcactcttcaggtcaggtgtgtaaaaaagaaagaaagaaaagagagattgttgtgttgtaacccctttgactaaaatctaatgaacttttttaacacaacaaaactccttcagatctgaaagggttcttcttctctcttagtctctttgtccttttattctccgtcgtcgtttcatgatctgactctctggtcttctcttcttcttcttcttcttctattttttcttacttcgtcactgttgtgtctgaacatgccacgccctttcttccataagttgattttctcatccactatccaagaaaaacgtctgagggtcccagataagtttgtgagtaaattcaaggatgagctttcggttgctgttgcactcacagtacctgatggtcatgtttggcgtgtaggactaaggaaagctgacaacaaaatttggtttcaagatggttggcaagagtttgttgaccgttactccattcgcattggttatcttttgatttttagatatgaaggaaactctgccttcagcgtctacattttcaatttatcccactctgagatcaattaccattccaccggtctcatggattccgctcacaaccacttcaaacgcgcccgtttgtttgaagaccttgaagatgaagatgccgaggtcatctttccttcttctgtgtacccatcaccacttcctgagtctacagtaccagccaacaaagggtatgctagttcagccatccaaaccttgttcactggaccagttaaagctgaagagccaacgccaaccccaaaaatacctaaaaagagagggaggaagaagaaaaatgctgatcctgaggaaataaactcatcagctccgcgagatgatgatccagagaaccgttcaaagttctacgagagtgcttctgcgagaaagagaaccgtgactgcagaagaaagagagagagccatcaatgcagccaaaacgttcgaaccaacaaaccctttcttcagagtggttctgcgaccatcctatctatacagaggttgcatcatgtatcttccttctgggtttgctgagaagtacctaagtgggatctccgggttcatcaaagtccagcttgcggagaaacaatggcctgttcgatgtctctacaaagccgggagagccaaattcagtcaaggatggtacgaattcactctagagaacaacttaggagaaggagacgtctgtgtgtttgagctgctcagaaccagagatttcgttttgaaagtgacagcctttcgagtcaacgagtacgtctgaacaaagcattatggtgtgatcattctggatttgcaagtacaatgtcgtgtaggagtatcttaatttaaaaacaactaaaaaactctcttctggtctgtgtcattattgcgtcagtgtctcgttttttctctcgggtttactttgtgttatcgatgtggataagttgtttttacctcattatatataacctcttgagtggaac

SEQ ID NO: 7703 - protein, 341 aa, Arabidopsis thaliana
MPRPFFHKLIFSSTIQEKRLRVPDKFVSKFKDELSVAVALTVPDGHVWRVGLRKADNKIWFQDGWQEFVDRYSIRIGYLLIFRYEGNSAFSVYIFNLSHSEINYHSTGLMDSAHNHFKRARLFEDLEDEDAEVIFPSSVYPSPLPESTVPANKGYASSAIQTLFTGPVKAEEPTPTPKIPKKRGRKKKNADPEEINSSAPRDDDPENRSKFYESASARKRTVTAEERERAINAAKTFEPTNPFFRVVLRPSYLYRGCIMYLPSGFAEKYLSGISGFIKVQLAEKQWPVRCLYKAGRAKFSQGWYEFTLENNLGEGDVCVFELLRTRDFVLKVTAFRVNEYV

SEQ ID NO: 7704 - protein, 232 aa, Arabidopsis thaliana
MDSAHNHFKRARLFEDLEDEDAEVIFPSSVYPSPLPESTVPANKGYASSAIQTLFTGPVKAEEPTPTPKIPKKRGRKKKNADPEEINSSAPRDDDPENRSKFYESASARKRTVTAEERERAINAAKTFEPTNPFFRVVLRPSYLYRGCIMYLPSGFAEKYLSGISGFIKVQLAEKQWPVRCLYKAGRAKFSQGWYEFTLENNLGEGDVCVFELLRTRDFVLKVTAFRVNEYV

SEQ ID NO: 7705 - DNA, 1239 bp, Arabidopsis thaliana
ctcagacaatgtggatctcagatgtttgctgtatttttggttggctcgctgtagcgtttgcacatgatattatactgcttaatattggacgactcttcttggggtttggggttggtctcattagttatgtggttcctgtgtatatagcagaaattacacctaaaacatttcgtggaggattttcttattccaatcagcttctacaatgtcttgggatttcactcatgttcttcaccggaaactttttccattggcgaacattagctcttttaagtgcaatcccaagtgctttccaagtgatatgtttattttttattcctgaatctcctagatggctggcgatgtatggtcaagatcaagagcttgaagtttcgttgaaaaatttaaggggagaaaatagtgatattctaaaggaagctgctgaaatcagagaaacagtggaaatatccagaaaagagtctcaaagtggaataagagacttgttccatataggaaacgcacattccttaatcattggattgggattaatgctcttgcaacaattttgtgggagcgcggcgataagtgcttatgctgctcgtatattcgacaaagcaggttttccaagcgacataggaacaaccatcctcgcagtgattctgataccgcaatctatagttgtcatgttaaccgttgaccgatggggacgccgaccacttcttatgatttcttctatcggaatgtgcatatgctcattttttattggcctttcatactaccttcagaagaatggtgaatttcagaagttatgttccgttatgttaatcgtcggtttagtgggttatgtctcatcctttggcattgggctaggtggactaccatgggttataatgtctgaggtatttccggtgaatgtgaaaatcaccgccggtagccttgtaacgatgtcaaattggttttttaattggattatcatctatagttttaatttcatgatacagtggagcgcttccgtaacatatttcatattttctggagtttctctggtgacgatcgtattcatatggacattggtgcctgagacgaaaggccgaacactcgaagagattcaaacatcattagtccgactttcgtaaaatctatgtatggattatacatataagtctcttgaatagtctttttaaccgtacattaatattttgttaaataagagttttctctcactttgattaaaaattaataatggctatgattttatct

SEQ ID NO: 7706 - protein, 370 aa, Arabidopsis thaliana
QTMWISDVCCIFGWLAVAFAHDIILLNIGRLFLGFGVGLISYVVPVYIAEITPKTFRGGFSYSNQLLQCLGISLMFFTGNFFHWRTLALLSAIPSAFQVICLFFIPESPRWLAMYGQDQELEVSLKNLRGENSDILKEAAEIRETVEISRKESQSGIRDLFHIGNAHSLIIGLGLMLLQQFCGSAAISAYAARIFDKAGFPSDIGTTILAVILIPQSIVVMLTVDRWGRRPLLMISSIGMCICSFFIGLSYYLQKNGEFQKLCSVMLIVGLVGYVSSFGIGLGGLPWVIMSEVFPVNVKITAGSLVTMSNWFFNWIIIYSFNFMIQWSASVTYFIFSGVSLVTIVFIWTLVPETKGRTLEEIQTSLVRLS

SEQ ID NO: 7707 - protein, 368 aa, Arabidopsis thaliana
MWISDVCCIFGWLAVAFAHDIILLNIGRLFLGFGVGLISYVVPVYIAEITPKTFRGGFSYSNQLLQCLGISLMFFTGNFFHWRTLALLSAIPSAFQVICLFFIPESPRWLAMYGQDQELEVSLKNLRGENSDILKEAAEIRETVEISRKESQSGIRDLFHIGNAHSLIIGLGLMLLQQFCGSAAISAYAARIFDKAGFPSDIGTTILAVILIPQSIVVMLTVDRWGRRPLLMISSIGMCICSFFIGLSYYLQKNGEFQKLCSVMLIVGLVGYVSSFGIGLGGLPWVIMSEVFPVNVKITAGSLVTMSNWFFNWIIIYSFNFMIQWSASVTYFIFSGVSLVTIVFIWTLVPETKGRTLEEIQTSLVRLS

SEQ ID NO: 7708 - protein, 296 aa, Arabidopsis thaliana
MFFTGNFFHWRTLALLSAIPSAFQVICLFFIPESPRWLAMYGQDQELEVSLKNLRGENSDILKEAAEIRETVEISRKESQSGIRDLFHIGNAHSLIIGLGLMLLQQFCGSAAISAYAARIFDKAGFPSDIGTTILAVILIPQSIVVMLTVDRWGRRPLLMISSIGMCICSFFIGLSYYLQKNGEFQKLCSVMLIVGLVGYVSSFGIGLGGLPWVIMSEVFPVNVKITAGSLVTMSNWFFNWIIIYSFNFMIQWSASVTYFIFSGVSLVTIVFIWTLVPETKGRTLEEIQTSLVRLS

SEQ ID NO: 7709 - DNA, 1309 bp, Arabidopsis thaliana
aaatatttaaggaaacaaataaaaaacaaaaagattcatcttccaatacccaacgcatattacgcagccaccacacagcggagagagagagagaagaaacagaaacagaaacagagctcgagctcgagacgctcaatattaatggcggccgcatcagcacgagctttcttcatgctctctcgtgtaactgacctttcaaagaaaaagctaatccttcaccaaccaccaccgtcgtcatctcctcaccggctaccttatgctccgaatcgtgcggtgtcttcctccgctgtaatcagctgtctcagcggtggtggtgtttcctccgacgattcgtatgtatctactcgtcggtctaagttagatcgaggtttcgctgtgatcgcgaatttggtgaatcggatccagccgcttgatacgtctgttatctctaaaggcttatctgattcagctaaggattcgatgaaacagacgatttcttctatgcttggtcttcttccttccgatcaattttccgtttccgttactatctccgaacagcctctttatcgtctccttatttcttccatcatcaccgggtatacattgtggaatgcggagtatcgtgtatcactgaggaggaattttgatataccgattgatcctagaaaggaggaggaggatcaatcttcgaaagacaatgttagatttggttcagagaagggaatgagtgaggatttagggaattgtgttgaggaatttgagagactgagtcctcaggtgtttggagacttgtcacctgaagcgttgagttatattcagcttttgcagtctgagctatcttccatgaaagaggagctagattcacaaaagaagaaagctttgaggatagaatgtgagaaaggaaacaggaatgatttgttggattatttgcgttctttagatcccgagatggtgactgagttatctcaactgtcttcaccggaagtggaagagattgtgaaccagcttgtccaaaacgtattagagaggctcttcgaagaccagactacttcaaatttcatgcaaaatcctggcataaggactacagaaggtggtgatggaactggtagaaaggtggacacatccagggattaccttgcaaagctccttttctggtgcatgctattgggacatcatttaagaggtttggagaatagattacatctcagctgtgttgttgggttgctgtaatatcagagaatcataaaaaggagacaagataaaaaagaaacacaaatgtatattcttctcccccattttgatttctttaatctaagcgttaagttattat

SEQ ID NO: 7710 - protein, 402 aa, Arabidopsis thaliana
KYLRKQIKNKKIHLPIPNAYYAATTQRREREKKQKQKQSSSSRRSILMAAASARAFFMLSRVTDLSKKKLILHQPPPSSSPHRLPYAPNRAVSSSAVISCLSGGGVSSDDSYVSTRRSKLDRGFAVIANLVNRIQPLDTSVISKGLSDSAKDSMKQTISSMLGLLPSDQFSVSVTISEQPLYRLLISSIITGYTLWNAEYRVSLRRNFDIPIDPRKEEEDQSSKDNVRFGSEKGMSEDLGNCVEEFERLSPQVFGDLSPEALSYIQLLQSELSSMKEELDSQKKKALRIECEKGNRNDLLDYLRSLDPEMVTELSQLSSPEVEEIVNQLVQNVLERLFEDQTTSNFMQNPGIRTTEGGDGTGRKVDTSRDYLAKLLFWCMLLGHHLRGLENRLHLSCVVGLL

SEQ ID NO: 7711 - protein, 355 aa, Arabidopsis thaliana
MAAASARAFFMLSRVTDLSKKKLILHQPPPSSSPHRLPYAPNRAVSSSAVISCLSGGGVSSDDSYVSTRRSKLDRGFAVIANLVNRIQPLDTSVISKGLSDSAKDSMKQTISSMLGLLPSDQFSVSVTISEQPLYRLLISSIITGYTLWNAEYRVSLRRNFDIPIDPRKEEEDQSSKDNVRFGSEKGMSEDLGNCVEEFERLSPQVFGDLSPEALSYIQLLQSELSSMKEELDSQKKKALRIECEKGNRNDLLDYLRSLDPEMVTELSQLSSPEVEEIVNQLVQNVLERLFEDQTTSNFMQNPGIRTTEGGDGTGRKVDTSRDYLAKLLFWCMLLGHHLRGLENRLHLSCVVGLL

SEQ ID NO: 7712 - protein, 345 aa, Arabidopsis thaliana
MLSRVTDLSKKKLILHQPPPSSSPHRLPYAPNRAVSSSAVISCLSGGGVSSDDSYVSTRRSKLDRGFAVIANLVNRIQPLDTSVISKGLSDSAKDSMKQTISSMLGLLPSDQFSVSVTISEQPLYRLLISSIITGYTLWNAEYRVSLRRNFDIPIDPRKEEEDQSSKDNVRFGSEKGMSEDLGNCVEEFERLSPQVFGDLSPEALSYIQLLQSELSSMKEELDSQKKKALRIECEKGNRNDLLDYLRSLDPEMVTELSQLSSPEVEEIVNQLVQNVLERLFEDQTTSNFMQNPGIRTTEGGDGTGRKVDTSRDYLAKLLFWCMLLGHHLRGLENRLHLSCVVGLL

SEQ ID NO: 7713 - DNA, 1215 bp, Arabidopsis thaliana
atattttcacacttgcagcgcaatcgaggcggtttttggttgcaatcgtctcatcacaatcacatcatcatcgtcttcgtcttcttcttcgtcggcacatactttgtcttctcatctcctccattattttgatcttatcgcaacagatctctcatctccttcacttgttgactgtgacaatggctgacaaagatgaagcagcgacgcgtggaaatgattgggaagttgtttctcttactgcttcagcttacgctgctgctcctggtcctaaaccagtagtggactcgaaagatgatgatcacaaggaagttactccttgttacgaagctgagacatctcatcccttatacatgtctcgccactttgttttcccaccaactggtcagcttgagaatactagtgaccttaccgaggctagcttaacggggtctcattgcaaggaagggagtgatttgagtctgaaagggttggatttatcagatgatttcggaggacttgagttttccgaggataaaggcaagaaagaagaaaacatttacacgacagctatgagttctctggacgatgaaagagctatcggtggctcacacgtgtatgaacctgttgaagaaccgaccgagcctgtttctccttctgatgttacacttgatctgaatcctattaaagatgatgaggtagcaaactcgccacctagcgaagaagcttggtggaaaagaagcgttgcctctttgattgcccaagcgaaagaaactaatacagtttggtccatctgcatagccgcagctgtaatgggaattgtgattcttggccaacattggcaacaggagaggtggcagattttgcagcaaaagtgggaatcaagcattggaaacgagaaagctggaagattgatggggccaatctctcgactaaaacaagcatttgtcgggggacagcggcgggattcattcatccgagccagcgcccaaaacgaccgttaaatcaaaacaaaaaggtgaattactttgatgatgacgataagaacaagagtagcttctttggggtcgaaaaacatggatgtctggtgtgtgaatgtgtttggtacttctcttcaggtcatggtttttgtacatatttctttggtgtgaaacaatcatttacccatttcattatctcaatgccctattactctctttctctgtttatatcataatcagatactcagtgtctcctgtc

SEQ ID NO: 7714 - protein, 325 aa, Arabidopsis thaliana
IFTLAAQSRRFLVAIVSSQSHHHRLRLLLRRHILCLLISSIILILSQQISHLLHLLTVTMADKDEAATRGNDWEVVSLTASAYAAAPGPKPVVDSKDDDHKEVTPCYEAETSHPLYMSRHFVFPPTGQLENTSDLTEASLTGSHCKEGSDLSLKGLDLSDDFGGLEFSEDKGKKEENIYTTAMSSLDDERAIGGSHVYEPVEEPTEPVSPSDVTLDLNPIKDDEVANSPPSEEAWWKRSVASLIAQAKETNTVWSICIAAAVMGIVILGQHWQQERWQILQQKWESSIGNEKAGRLMGPISRLKQAFVGGQRRDSFIRASAQNDR

SEQ ID NO: 7715 - protein, 266 aa, Arabidopsis thaliana
MADKDEAATRGNDWEVVSLTASAYAAAPGPKPVVDSKDDDHKEVTPCYEAETSHPLYMSRHFVFPPTGQLENTSDLTEASLTGSHCKEGSDLSLKGLDLSDDFGGLEFSEDKGKKEENIYTTAMSSLDDERAIGGSHVYEPVEEPTEPVSPSDVTLDLNPIKDDEVANSPPSEEAWWKRSVASLIAQAKETNTVWSICIAAAVMGIVILGQHWQQERWQILQQKWESSIGNEKAGRLMGPISRLKQAFVGGQRRDSFIRASAQNDR

SEQ ID NO: 7716 - protein, 209 aa, Arabidopsis thaliana
MSRHFVFPPTGQLENTSDLTEASLTGSHCKEGSDLSLKGLDLSDDFGGLEFSEDKGKKEENIYTTAMSSLDDERAIGGSHVYEPVEEPTEPVSPSDVTLDLNPIKDDEVANSPPSEEAWWKRSVASLIAQAKETNTVWSICIAAAVMGIVILGQHWQQERWQILQQKWESSIGNEKAGRLMGPISRLKQAFVGGQRRDSFIRASAQNDR

SEQ ID NO: 7717 - DNA, 1980 bp, Arabidopsis thaliana
tgaaagaaaatatccagttgactccaaatagactagaaagagaaagaaagagagagagagagagagagagaaccagagattatcgaacacgaagcagaagacgattcgtggaagagacttggagagaatatttctcaatgtctcctctcccaatcttccatcgtcttcctcacgccacgttctcttcctttctcctctcactgtctcaagctggaagttctaaaacatcagtggcattcctcaatgccttcaaatcagaagatatcattgctcgaattggactatggtggcagcttataagggctgttgtagttgtacctgtcttcaagttcctggtgcttctatgtttggtcatgtctgtcatgttcttcgttgaggttatgtacatgggaatcgttgttttgtatgtcaagctgttcaagagaaagccagagaaattttacaaatgggaagccatggaggatgatgttgagtgtggcagtgcaagctaccctatggttcttgtgcagatacctatgtacaatgaaaaagaggtttgtgagcaatctattgcagctgcttgcaaaatctcatggccatcgaatcgtataataattcaagtgcttgatgattccacggatccagccagtaaggagttggtgaaaaaggagtgtgacagatggtctaaagaaggtgtcaacataacgtttgagataagggacaacaggaacggatacaaagctggtgcgttgagagaaggaatgaggcatagctatgtgaagcagtgtgattatgttgctatctttgatgctgatttccagcctgatcctgacttcctccaccgcactgttccattcttaattcacaatcccaagttagcacttgtacaaggccggtgggagtttgtgaacgcgggtcaatgcatgatgacgagattacaggagatgtctctaagttaccactttacaatagagcagcaagttggatcttcaacatttgccttctttgggttcaacggaactgctggcgtctggagaatctcagcattgaatgagtccgggggatggaatgaccagacaacagtagaagacatggatttagctgtacgagctacactgagaggctggaagtttctatatatcgatgatctcaaggtaaaaagtgagttaccttgttccttcaaagctctgcgtagccagcagcatcgatggacttgcggccctgccaatcttttaaggaaaatggctggacaaataataagaagcgagaatgtatctctatggaagaagtggtatatgttgtacagcttcttcttcatgcgcaagatcgtggctcacatcctcacattctgcttctactgtgttatcttgccagcaactgtattgttcccagaagtcacagttccgaaatgggctgcattttatctcccttctttgatcactctcttaatcgcaattggtagactaagatcaatccaccttttggctttctgggttctatttgagaatgcaatgtccctgctaagagcaaaggctctggtcatgggcttgttcgaaacaggaagagtacaagaatgggttgtgacggagaagttaggtgatactctcaagacgaagctgattccacaagttcctaacgtcagattcagagagagggtgcatttgctggagctattggttggagcgtacctgttattctgcggaatctacgacatcgtctatgggaagaacacactctatgtgtaccttctgtttcagtcagtggccttcttcgttgttggttttggatttgtaggaaaatatgttcctgcttcctcttacttagcataggatagatcatagagtctcaatatgtttcagaaggttttttgtttgatgtcatattgagaacaatgcctatatactactctccatttgtattaacacttgagtatctgtaaccaacgaagctcagatgtgatcgatattattttttttaacagtataaaaccacttaacactg

SEQ ID NO: 7718 - protein, 601 aa, Arabidopsis thaliana
KENIQLTPNRLERERKRERERERTRDYRTRSRRRFVEETWREYFSMSPLPIFHRLPHATFSSFLLSLSQAGSSKTSVAFLNAFKSEDIIARIGLWWQLIRAVVVVPVFKFLVLLCLVMSVMFFVEVMYMGIVVLYVKLFKRKPEKFYKWEAMEDDVECGSASYPMVLVQIPMYNEKEVCEQSIAAACKISWPSNRIIIQVLDDSTDPASKELVKKECDRWSKEGVNITFEIRDNRNGYKAGALREGMRHSYVKQCDYVAIFDADFQPDPDFLHRTVPFLIHNPKLALVQGRWEFVNAGQCMMTRLQEMSLSYHFTIEQQVGSSTFAFFGFNGTAGVWRISALNESGGWNDQTTVEDMDLAVRATLRGWKFLYIDDLKVKSELPCSFKALRSQQHRWTCGPANLLRKMAGQIIRSENVSLWKKWYMLYSFFFMRKIVAHILTFCFYCVILPATVLFPEVTVPKWAAFYLPSLITLLIAIGRLRSIHLLAFWVLFENAMSLLRAKALVMGLFETGRVQEWVVTEKLGDTLKTKLIPQVPNVRFRERVHLLELLVGAYLLFCGIYDIVYGKNTLYVYLLFQSVAFFVVGFGFVGKYVPASSYLA

SEQ ID NO: 7719 - protein, 556 aa, Arabidopsis thaliana
MSPLPIFHRLPHATFSSFLLSLSQAGSSKTSVAFLNAFKSEDIIARIGLWWQLIRAVVVVPVFKFLVLLCLVMSVMFFVEVMYMGIVVLYVKLFKRKPEKFYKWEAMEDDVECGSASYPMVLVQIPMYNEKEVCEQSIAAACKISWPSNRIIIQVLDDSTDPASKELVKKECDRWSKEGVNITFEIRDNRNGYKAGALREGMRHSYVKQCDYVAIFDADFQPDPDFLHRTVPFLIHNPKLALVQGRWEFVNAGQCMMTRLQEMSLSYHFTIEQQVGSSTFAFFGFNGTAGVWRISALNESGGWNDQTTVEDMDLAVRATLRGWKFLYIDDLKVKSELPCSFKALRSQQHRWTCGPANLLRKMAGQIIRSENVSLWKKWYMLYSFFFMRKIVAHILTFCFYCVILPATVLFPEVTVPKWAAFYLPSLITLLIAIGRLRSIHLLAFWVLFENAMSLLRAKALVMGLFETGRVQEWVVTEKLGDTLKTKLIPQVPNVRFRERVHLLELLVGAYLLFCGIYDIVYGKNTLYVYLLFQSVAFFVVGFGFVGKYVPASSYLA

SEQ ID NO: 7720 - protein, 484 aa, Arabidopsis thaliana
MSVMFFVEVMYMGIVVLYVKLFKRKPEKFYKWEAMEDDVECGSASYPMVLVQIPMYNEKEVCEQSIAAACKISWPSNRIIIQVLDDSTDPASKELVKKECDRWSKEGVNITFEIRDNRNGYKAGALREGMRHSYVKQCDYVAIFDADFQPDPDFLHRTVPFLIHNPKLALVQGRWEFVNAGQCMMTRLQEMSLSYHFTIEQQVGSSTFAFFGFNGTAGVWRISALNESGGWNDQTTVEDMDLAVRATLRGWKFLYIDDLKVKSELPCSFKALRSQQHRWTCGPANLLRKMAGQIIRSENVSLWKKWYMLYSFFFMRKIVAHILTFCFYCVILPATVLFPEVTVPKWAAFYLPSLITLLIAIGRLRSIHLLAFWVLFENAMSLLRAKALVMGLFETGRVQEWVVTEKLGDTLKTKLIPQVPNVRFRERVHLLELLVGAYLLFCGIYDIVYGKNTLYVYLLFQSVAFFVVGFGFVGKYVPASSYLA

SEQ ID NO: 7721 - DNA, 1605 bp, Arabidopsis thaliana
acgagacaaccaaacacagatctgcttccttcttcacctttttttttttttttttgtaattttggtttccctttttttttattaaataagatttattcctccatcgttacctaatccccttcttcgtcttcttcagcttcactgagtcttacgaacatagcaaaatccaaatcaaattcctgaagaaacctctttcgctctcgtcttcgttttcagatcaacaagaaatggcaacagcaacatcagcttctctgttttcaactgtttcttcatcttactccaaagctagctccataccacattcaagactccaatctgtgaaatttaactcagtccctagcttcaccggtctcaaatcaacctctctcatctccggatctgattcctcttccttaaccaagactctccgcggttccgtaacgaatgcacaaacatctgacaagaagccttacggattcaaaatcaacgcttcgtacaaagtagctgttcttggtgctgctggtggtataggtcagcctttatcacttctcatcaagatgtctccgttagtctctacgcttcatctttacgatatcgccaatgttaaaggagttgctgctgatctaagtcattgtaacactccttctcaagttcgtgatttcactggtccttctgagttagctgattgtttgaaagatgttaacgttgttgtcatccctgctggtgtgccgaggaaacccggtatgactcgtgacgatcttttcaacatcaatgccaatattgtcaagactcttgttgaagctgttgctgagaattgccctaatgctttcattcatattattagtaacccggttaactctacggtacctattgctgctgaagtgttgaagaagaaaggtgtttatgatcctaagaagctgtttggtgtcactactttggatgttgtgagggctaacacttttgtttctcagaagaagaatcttaagcttattgatgttgatgttccggttattggtggacatgctggaatcaccattttgcctctcctctcgaagacaaaaccgtctgttaactttactgatgaagagatccaagagctcactgttaggattcagaacgctggtactgaggttgttgatgctaaggcaggtgcaggttcagctactttgtcaatggcttatgctgctgctagatttgtggagtcatctcttcgtgctcttgatggagacggagatgtctacgagtgctcgtttgtggagtcgactctgactgatcttcctttctttgcatcacgggttaagatagggaagaacggtcttgaagctgtgattgagtcagaccttcagggattgactgagtatgagcagaaagcactagaagctcttaaggtagaattgaaagctagcattgacaagggtgtcgcatttgcaaacaaaccagctgctgcagcagctaactagatcgcaagctgataacatttttcttctgatcatttcgagttttgttttatttttcatatttgttgcatcggcgagacattttcgtgttgtagaataaagaatgtatttgcttcagtttgaagattttggaacatggcattgaagcagaatttataaatcatcaccg

SEQ ID NO: 7722 - protein, 403 aa, Arabidopsis thaliana
MATATSASLFSTVSSSYSKASSIPHSRLQSVKFNSVPSFTGLKSTSLISGSDSSSLTKTLRGSVTNAQTSDKKPYGFKINASYKVAVLGAAGGIGQPLSLLIKMSPLVSTLHLYDIANVKGVAADLSHCNTPSQVRDFTGPSELADCLKDVNVVVIPAGVPRKPGMTRDDLFNINANIVKTLVEAVAENCPNAFIHIISNPVNSTVPIAAEVLKKKGVYDPKKLFGVTTLDVVRANTFVSQKKNLKLIDVDVPVIGGHAGITILPLLSKTKPSVNFTDEEIQELTVRIQNAGTEVVDAKAGAGSATLSMAYAAARFVESSLRALDGDGDVYECSFVESTLTDLPFFASRVKIGKNGLEAVIESDLQGLTEYEQKALEALKVELKASIDKGVAFANKPAAAAAN

SEQ ID NO: 7723 - protein, 300 aa, Arabidopsis thaliana
MSPLVSTLHLYDIANVKGVAADLSHCNTPSQVRDFTGPSELADCLKDVNVVVIPAGVPRKPGMTRDDLFNINANIVKTLVEAVAENCPNAFIHIISNPVNSTVPIAAEVLKKKGVYDPKKLFGVTTLDVVRANTFVSQKKNLKLIDVDVPVIGGHAGITILPLLSKTKPSVNFTDEEIQELTVRIQNAGTEVVDAKAGAGSATLSMAYAAARFVESSLRALDGDGDVYECSFVESTLTDLPFFASRVKIGKNGLEAVIESDLQGLTEYEQKALEALKVELKASIDKGVAFANKPAAAAAN

SEQ ID NO: 7724 - protein, 238 aa, Arabidopsis thaliana
MTRDDLFNINANIVKTLVEAVAENCPNAFIHIISNPVNSTVPIAAEVLKKKGVYDPKKLFGVTTLDVVRANTFVSQKKNLKLIDVDVPVIGGHAGITILPLLSKTKPSVNFTDEEIQELTVRIQNAGTEVVDAKAGAGSATLSMAYAAARFVESSLRALDGDGDVYECSFVESTLTDLPFFASRVKIGKNGLEAVIESDLQGLTEYEQKALEALKVELKASIDKGVAFANKPAAAAAN

SEQ ID NO: 7725 - DNA, 2520 bp, Arabidopsis thaliana
aacacagtgtattttgatctttgtgataacaatcttccaccatgggaacaaagtttttagctctgggtttgtctctgtgtcttgttctctcaagcttctatcaagtttcttgccaggatgaaggaactggaagtttgagtactttagatctaattgagcatgaatatcaaactagtgtcaattctctccaaggcaatgaagcagtagatcaaactgagaccagtggtcagaaaaacagtacagtgtctgataacaacactatttctttgtctctatctgaagaacctgcattggaaactcttaaagaatctgttgatacatcagctgagttaggagctgttactgatgaagtcgataaaccttcaagtatgttggaccatattgaacttgagttcgaagcacatatcaatgaacttaaagaagctggatctgatggtatcaacaaagttgaggaatctaaagatgatgaagaagctgcaaggagacataaaatgttggaagccattgaacgtgaatttgaagctgctcatgctggatttgaacaactaaagactgatgattccgcccaaggattagatgatgaacaatctgcaaagagacaaagcatgttggacgagattgaacgtgattttgaagctgctacaaaaggtcttgagcaactaaaggctgatgatttaactggaatcaacgatgaagaacacgctgcaaagagacaaaagatgcttgaagagatcgaaagagagtttgaagaagctacaaaaggtcttgaagaactaaggcattctacctcaagcacagatgatgaagcacaatctgcaaagagacagaatatgctagatgagatcgaacgggagtttgaagctgctacaagtggtcttaaagagctaaagattaatgctcacactgtcaaagatgatgttgatgataaagaacaagatgccaaaagacaaagtatgctagatgcaattgaacgtgagtttgaagccgttaccgagagttttaaacaacttgaagatatcgccgataacaaagctgaaggagacgacgaatctgcaaagaggcaaagtatgttggatgagattgaacgtgaatttgaagctgctacaaatagtcttaagcaactaaaccttgacgatttcagtgaaggagatgacagtgcagaatctgcaaggagaaatagtatgcttgaagctatcgaacgcgagtttgaagctgctacaaaaggtcttgaagagctaaaggctaatgattcaaccggcgacaaggatgatgatgaacacgttgcaaggagaaaaattatgcttgaagctattgaacgcgagtttgaagccgcgacaaaaggccttgaagagttaaagaatgaatcagaacaagctgaaaacaagagaaacagtatgttggaagcattcgaacgcgaatttgaagctgctacaaatgcaaaggctaatggagaaaactctgcaaagaatccatcaaccataagtactacagtgcagaaatcttctggcggatacaatgctggtttagaaggtcttctaaagcctgcagatggtgtatgtggttgtttcaacaaggataaagatggtcttcaggcagacactgattcttcgattaacatagcggagatactcgcagaagaatccaaattacagggctcagggacctctcggctcaccacatcattgaacaatcttgttgatactcatagaaaagaaacgtcctcaaaggtaggctcagtccttggctcatcttcatcagttacttctaccacaagcgaatcagcggctacatcagagagcatagagagcttaaagcaaacactaaggaagctacgcggtctaagcgcacgtgatctcgtaaaccacccgaatttcgatgcgattatagcagccggtacacgttacgaggtactcagctcagcttctattggttacatctctttgctagccaaatacaaaaccgtcattaaagaaggactcgaggcttctcagagagtccagattgctcaaacccgagccaaactgctaaaagaaaccgcaatggagaagcagagaaccgtagactcggttttcgcagcagcaaagaccactgctcaaagaggagacgcgttgcacatcagaatcgtagcgatcaagaaactgttggcaaagctagaagcagagaaagtggacgttgattcaaagttcacctctttaacgacgagtctgtcagagcttctcaaggaggcgtcacaggcttacgaagagtatcacgaggcggtgcataaggcaaaggacgagcaagcggctgaggaatttgcggtggagacgacaaagagagcagaacatatttgggttgagtttcttagttcacttaattgaactaatgagattcttgattgtggttaaagcacatgttcaattagttgtggttcttgtgttttattttcttgtgttgttttgtttgagactttgtttgttgcttatatcaggggagagaggttgaaaaacctttgagagagatagataaatgagagatttg

SEQ ID NO: 7726 - protein, 772 aa, Arabidopsis thaliana
MGTKFLALGLSLCLVLSSFYQVSCQDEGTGSLSTLDLIEHEYQTSVNSLQGNEAVDQTETSGQKNSTVSDNNTISLSLSEEPALETLKESVDTSAELGAVTDEVDKPSSMLDHIELEFEAHINELKEAGSDGINKVEESKDDEEAARRHKMLEAIEREFEAAHAGFEQLKTDDSAQGLDDEQSAKRQSMLDEIERDFEAATKGLEQLKADDLTGINDEEHAAKRQKMLEEIEREFEEATKGLEELRHSTSSTDDEAQSAKRQNMLDEIEREFEAATSGLKELKINAHTVKDDVDDKEQDAKRQSMLDAIEREFEAVTESFKQLEDIADNKAEGDDESAKRQSMLDEIEREFEAATNSLKQLNLDDFSEGDDSAESARRNSMLEAIEREFEAATKGLEELKANDSTGDKDDDEHVARRKIMLEAIEREFEAATKGLEELKNESEQAENKRNSMLEAFEREFEAATNAKANGENSAKNPSTISTTVQKSSGGYNAGLEGLLKPADGVCGCFNKDKDGLQADTDSSINIAEILAEESKLQGSGTSRLTTSLNNLVDTHRKETSSKVGSVLGSSSSVTSTTSESAATSESIESLKQTLRKLRGLSARDLVNHPNFDAIIAAGTRYEVLSSASIGYISLLAKYKTVIKEGLEASQRVQIAQTRAKLLKETAMEKQRTVDSVFAAAKTTAQRGDALHIRIVAIKKLLAKLEAEKVDVDSKFTSLTTSLSELLKEASQAYEEYHEAVHKAKDEQAAEEFAVETTKRAEHIWVEFLSSLN

SEQ ID NO: 7727 - protein, 663 aa, Arabidopsis thaliana
MLDHIELEFEAHINELKEAGSDGINKVEESKDDEEAARRHKMLEAIEREFEAAHAGFEQLKTDDSAQGLDDEQSAKRQSMLDEIERDFEAATKGLEQLKADDLTGINDEEHAAKRQKMLEEIEREFEEATKGLEELRHSTSSTDDEAQSAKRQNMLDEIEREFEAATSGLKELKINAHTVKDDVDDKEQDAKRQSMLDAIEREFEAVTESFKQLEDIADNKAEGDDESAKRQSMLDEIEREFEAATNSLKQLNLDDFSEGDDSAESARRNSMLEAIEREFEAATKGLEELKANDSTGDKDDDEHVARRKIMLEAIEREFEAATKGLEELKNESEQAENKRNSMLEAFEREFEAATNAKANGENSAKNPSTISTTVQKSSGGYNAGLEGLLKPADGVCGCFNKDKDGLQADTDSSINIAEILAEESKLQGSGTSRLTTSLNNLVDTHRKETSSKVGSVLGSSSSVTSTTSESAATSESIESLKQTLRKLRGLSARDLVNHPNFDAIIAAGTRYEVLSSASIGYISLLAKYKTVIKEGLEASQRVQIAQTRAKLLKETAMEKQRTVDSVFAAAKTTAQRGDALHIRIVAIKKLLAKLEAEKVDVDSKFTSLTTSLSELLKEASQAYEEYHEAVHKAKDEQAAEEFAVETTKRAEHIWVEFLSSLN

SEQ ID NO: 7728 - protein, 622 aa, Arabidopsis thaliana
MLEAIEREFEAAHAGFEQLKTDDSAQGLDDEQSAKRQSMLDEIERDFEAATKGLEQLKADDLTGINDEEHAAKRQKMLEEIEREFEEATKGLEELRHSTSSTDDEAQSAKRQNMLDEIEREFEAATSGLKELKINAHTVKDDVDDKEQDAKRQSMLDAIEREFEAVTESFKQLEDIADNKAEGDDESAKRQSMLDEIEREFEAATNSLKQLNLDDFSEGDDSAESARRNSMLEAIEREFEAATKGLEELKANDSTGDKDDDEHVARRKIMLEAIEREFEAATKGLEELKNESEQAENKRNSMLEAFEREFEAATNAKANGENSAKNPSTISTTVQKSSGGYNAGLEGLLKPADGVCGCFNKDKDGLQADTDSSINIAEILAEESKLQGSGTSRLTTSLNNLVDTHRKETSSKVGSVLGSSSSVTSTTSESAATSESIESLKQTLRKLRGLSARDLVNHPNFDAIIAAGTRYEVLSSASIGYISLLAKYKTVIKEGLEASQRVQIAQTRAKLLKETAMEKQRTVDSVFAAAKTTAQRGDALHIRIVAIKKLLAKLEAEKVDVDSKFTSLTTSLSELLKEASQAYEEYHEAVHKAKDEQAAEEFAVETTKRAEHIWVEFLSSLN

SEQ ID NO: 7729 - DNA, 1408 bp, Arabidopsis thaliana
caatggggggaaagggggggggatataataaaggggggggaaagggggggggaatccatattaataaaacgaaatttgggtctctctccctctctctacttaacgctctctgtatcttcttctccgtcaacgatacgaacccagagacgtcggcggttaaaacaatcgtcggatctctctggattcgttagacgagaagtttccggtatctaatttctgtgcgttagagagaaattagggttgttgctacgatggatgagactttacttgacgatataatacgacggcttttggcgacgaataatggaaggacggtgaagcaagcacagattactgagacggagatacgtcagctatgtttagcttcaaaagaggtttttctcagtcagcctaatctcctcgagctcgaggctcctatcaagatttgcggagatgttcatggtcagtttccagacctcttgcggttgtttgagtatggtggttatccaccagctgcgaactacttgtttcttggggattatgttgatcgtggtaagcagagcatagagacgatatgccttcttcttgcctataaggtcaaatacaagttcaacttctttcttctcagaggcaatcacgaatgtgcttcaatcaaccgtgtatatggattctacgatgaatgcaaaagaagatataatgttcgcttatggaaaacattcaccgagtgcttcaactgtctgcctgtttctgctctcattgatgataagatcctctgcatgcatggtggactatcgcctgatattaagagcttagatgacatcaggagaattcctcgtcctattgacgttcctgatcagggcattctttgtgatttgttgtgggctgatcctgacagagagattcaaggctggggggagaatgacagaggtgtctcttatacatttggggctgacaaagtagctgagttccttcaaactcatgaccttgatcttatatgccgagctcatcaggttgtagaagatggatacgagttctttgcaaagagacaactagtgacaatattctctgcacccaattactgtggcgagtttgacaatgctggtgcattgatgagtgttgatgatagcttaacatgttcattccaaatccttaaggcatctgagaagaaaggaagatttggattcaacaacaatgttcctagaccaggaaccccacctcataagggtggaaaaggtcgttaactcgtcgtcgatgggttcaagaaacgagtgaaaccgacgggttcgaattttgtaaggcaaacagtttgttttgttagattgttatctgttttcttatggttgaggcaacattatgttttgtttagattttttttgtaaaaattgtggaagatgttcacagcattttcaactgaagaaagttgggtttt

SEQ ID NO: 7730 - protein, 322 aa, Arabidopsis thaliana
MDETLLDDIIRRLLATNNGRTVKQAQITETEIRQLCLASKEVFLSQPNLLELEAPIKICGDVHGQFPDLLRLFEYGGYPPAANYLFLGDYVDRGKQSIETICLLLAYKVKYKFNFFLLRGNHECASINRVYGFYDECKRRYNVRLWKTFTECFNCLPVSALIDDKILCMHGGLSPDIKSLDDIRRIPRPIDVPDQGILCDLLWADPDREIQGWGENDRGVSYTFGADKVAEFLQTHDLDLICRAHQVVEDGYEFFAKRQLVTIFSAPNYCGEFDNAGALMSVDDSLTCSFQILKASEKKGRFGFNNNVPRPGTPPHKGGKGR

SEQ ID NO: 7731 - DNA, 1326 bp, Arabidopsis thaliana
agtctctctttcgagtctgcagctagcgtgaagacgatgaaatcgatgggaggagatagataagcgcgaatttgagagtgaaaattctaaattcagacccattttcaccggcgcgagtcatcgttgaaccatgtcttggcttcctgtagaatctgatcctggtattttcactgagattatacaacaaatgcaagtgaaaggtgtgcaggttgaggaattgtattccttggacttcaactctctggatgaaataagacctgtctatggattgatattgctttacaagtggcgtccagaagaaaaggagaatcgtgttgtcatcacagagccaaacccgaatttcttctttgcaagccagataatcaacaatgcttgtgcgacccaagcgatattatcagtcctcatgaactcttcgagtattgatattggctcagaactatcagaactgaaacaattcgccaaagaatttcctcctgaactgaaaggtttagccatcaacaacaatgaggcaatacgtgcagctcacaacacatttgccaggcctgacccgtcttccatcatggaagatgaagaattagctgctgcgaaaaatctagacgaagatgatgatgtgtatcattacatcagctacttacctgttgatggtatcttatatgagctcgatggtcttaaagaaggacccattagtcttggacagtgtctgggtgagccagaaggaatcgagtggctcagaatggtccaacctgtggtacaagagcagattgaccggtattcgcagaatgagattcggtttagtctcttagctgtagttaagaacaggaaagagatgtatgtagctgaactgaaagagtatcaaagaaagcgagagagggttttgcagcagttaggtgctttgcaagctgataaatacgctgagaaaagcagttacgaggctcttgatagagagctttcggaagtcaatatcgggatagagactgtttcacaaaagattgtaatggaggaggagaaatctaagaactggaagaaagagaacatgagaaggaaacacaactatgtccctttcctcttcaacttcctcaagattcttgctgacaagaagaagctgaaacctctcattgctaagcaccatccctaaatctgctttaccgggatgttaacttgatagaaatcagatgttttagtgatctgaatactgtggtggcgtggttatatgtagccaaactttaacttgatggaagtcagatgttttagcgatccttgattgtaattggtctgaggattatgttgaaccaaatctttttttttttttacttaattacatgttcc

SEQ ID NO: 7732 - protein, 334 aa, Arabidopsis thaliana
MSWLPVESDPGIFTEIIQQMQVKGVQVEELYSLDFNSLDEIRPVYGLILLYKWRPEEKENRVVITEPNPNFFFASQIINNACATQAILSVLMNSSSIDIGSELSELKQFAKEFPPELKGLAINNNEAIRAAHNTFARPDPSSIMEDEELAAAKNLDEDDDVYHYISYLPVDGILYELDGLKEGPISLGQCLGEPEGIEWLRMVQPVVQEQIDRYSQNEIRFSLLAVVKNRKEMYVAELKEYQRKRERVLQQLGALQADKYAEKSSYEALDRELSEVNIGIETVSQKIVMEEEKSKNWKKENMRRKHNYVPFLFNFLKILADKKKLKPLIAKHHP

SEQ ID NO: 7733 - protein, 315 aa, Arabidopsis thaliana
MQVKGVQVEELYSLDFNSLDEIRPVYGLILLYKWRPEEKENRVVITEPNPNFFFASQIINNACATQAILSVLMNSSSIDIGSELSELKQFAKEFPPELKGLAINNNEAIRAAHNTFARPDPSSIMEDEELAAAKNLDEDDDVYHYISYLPVDGILYELDGLKEGPISLGQCLGEPEGIEWLRMVQPVVQEQIDRYSQNEIRFSLLAVVKNRKEMYVAELKEYQRKRERVLQQLGALQADKYAEKSSYEALDRELSEVNIGIETVSQKIVMEEEKSKNWKKENMRRKHNYVPFLFNFLKILADKKKLKPLIAKHHP

SEQ ID NO: 7734 - protein, 243 aa, Arabidopsis thaliana
MNSSSIDIGSELSELKQFAKEFPPELKGLAINNNEAIRAAHNTFARPDPSSIMEDEELAAAKNLDEDDDVYHYISYLPVDGILYELDGLKEGPISLGQCLGEPEGIEWLRMVQPVVQEQIDRYSQNEIRFSLLAVVKNRKEMYVAELKEYQRKRERVLQQLGALQADKYAEKSSYEALDRELSEVNIGIETVSQKIVMEEEKSKNWKKENMRRKHNYVPFLFNFLKILADKKKLKPLIAKHHP

SEQ ID NO: 7735 - DNA, 1192 bp, Arabidopsis thaliana
aataagtccatttcacgacaaagtcaccaatgcttcttttacatgtatatatacttctttccactccctcttctctactcaaatcaaatcttcttccttctctgttttcttaagctttttgaaaattttatcaatggcgactcctaacgaagtatctgcactttggttcatcgagaaacatctactcgacgaggcttctcctgtggctacagatccatggatgaagcacgaatcatcatcagcaacagaatctagctctgactcttcttctatcatcttcggatcatcgtcctcttctttcgccccaattgatttctctgaatccgtatgcaaacctgaaatcatcgatctcgatactcccagatctatggaatttctatcgattccatttgaatttgactcagaagtttctgtttctgatttcgattttaaaccttctaatcaaaatcaaaatcagtttgaaccggagcttaaatctcaaattcgtaaaccgccattgaagatttcgcttccagctaaaacagagtggattcaattcgcagctgaaaacaccaaaccggaagttactaaaccggtttcggaagaagagaagaagcattacagaggagtaagacaaagaccgtgggggaaattcgcggcggagattcgtgacccgaataaacgcggatctcgcgtttggcttgggacgtttgatacagcgattgaagcggctagagcttatgacgaagcagcgtttagactacgaggatcgaaagcgattttgaatttccctcttgaagttgggaagtggaaaccacgcgccgatgaaggtgagaagaaacggaagagagacgatgatgagaaagtgactgtggttgagaaagtgttgaagacggaacagagcgttgacgttaacggtggagagacgtttccgtttgtaacgtcgaatttaacggaattatgtgactgggatttaacggggtttcttaactttccgcttctgtcgccgttatctcctcatccaccgtttggttattcccagttgaccgttgtttgattagttttttttgagtttttgaacgatgtgtatgctgacgtggacgtacacgtaggtgcatgcgatgaaaaaaacatctatttgttcatatttttgcgtttttctatttgttcattctttttcacaattcacaatacattatttcagttaatgatc

SEQ ID NO: 7736 - protein, 344 aa, Arabidopsis thaliana
ISPFHDKVTNASFTCIYTSFHSLFSTQIKSSSFSVFLSFLKILSMATPNEVSALWFIEKHLLDEASPVATDPWMKHESSSATESSSDSSSIIFGSSSSSFAPIDFSESVCKPEIIDLDTPRSMEFLSIPFEFDSEVSVSDFDFKPSNQNQNQFEPELKSQIRKPPLKISLPAKTEWIQFAAENTKPEVTKPVSEEEKKHYRGVRQRPWGKFAAEIRDPNKRGSRVWLGTFDTAIEAARAYDEAAFRLRGSKAILNFPLEVGKWKPRADEGEKKRKRDDDEKVTVVEKVLKTEQSVDVNGGETFPFVTSNLTELCDWDLTGFLNFPLLSPLSPHPPFGYSQLTVV

SEQ ID NO: 7737 - protein, 300 aa, Arabidopsis thaliana
MATPNEVSALWFIEKHLLDEASPVATDPWMKHESSSATESSSDSSSIIFGSSSSSFAPIDFSESVCKPEIIDLDTPRSMEFLSIPFEFDSEVSVSDFDFKPSNQNQNQFEPELKSQIRKPPLKISLPAKTEWIQFAAENTKPEVTKPVSEEEKKHYRGVRQRPWGKFAAEIRDPNKRGSRVWLGTFDTAIEAARAYDEAAFRLRGSKAILNFPLEVGKWKPRADEGEKKRKRDDDEKVTVVEKVLKTEQSVDVNGGETFPFVTSNLTELCDWDLTGFLNFPLLSPLSPHPPFGYSQLTVV

SEQ ID NO: 7738 - protein, 271 aa, Arabidopsis thaliana
MKHESSSATESSSDSSSIIFGSSSSSFAPIDFSESVCKPEIIDLDTPRSMEFLSIPFEFDSEVSVSDFDFKPSNQNQNQFEPELKSQIRKPPLKISLPAKTEWIQFAAENTKPEVTKPVSEEEKKHYRGVRQRPWGKFAAEIRDPNKRGSRVWLGTFDTAIEAARAYDEAAFRLRGSKAILNFPLEVGKWKPRADEGEKKRKRDDDEKVTVVEKVLKTEQSVDVNGGETFPFVTSNLTELCDWDLTGFLNFPLLSPLSPHPPFGYSQLTVV

SEQ ID NO: 7739 - DNA, 1040 bp, Arabidopsis thaliana
attccgcaatttattgattcttctttatcgtgcttctgattgttttggttaacggatcaaattatcgaacgatgatggcttctctcgcgacttccataagtggaagcttcagaattctggttaaatcatcttcgacgaggaatgggtttcctgtaatctctgatcaaaacccgagtttcgtcttgtttgcgaataaacgcagacatatctctagaacggcgatttttcaccgatctgcgataagtggttcgagtcaaggagaaaagatatcacctttagcatctggtgtatcttcaggtttatattcagctcagacttttgatttgacgcctcaaaacgttgatttggtgcttgaggatgttagaccgttcttgatctctgatggtggaaacgtcgacgttgtctccgttgaagatggggtagtctctcttaagctccaaggagcatgtaccagctgtccaagttcttcaacaactatgacaatgggaatagagagggtactcaaggaaaagtttggagatgcattgaaagatattcgacaagtttttgatgaagaagtaaaacagataaccgtggaggcagtgaatgctcatctagatatactgaggccagctatcaagaactatggcggaagtgttgaagttttatcggttgaaggcgaggactgcgttgtaaaatatgttggaccggagtcgattggaatgggaatacaggcagcgattaaagaaaagtttaaggacatatctaatgtaacctttacaagctagaaagcatgaagaaagccactatattatgtaaaaacattattgctctttgtttgagctaatgtccacttcaatagtcgtcctctccataactgtccttagccatcttgccaggttgatcaagaacggtgtgtagacaaagtagcaagttgttgtccacgtaaccagtcccttcaccagcaaacaaaacaagaaagaaacagagtcatgtgtatgtttttgtttgatgatgtctgtataaacacttattacctggccaaagatttctatgtttgc

SEQ ID NO: 7740 - protein, 231 aa, Arabidopsis thaliana
MMASLATSISGSFRILVKSSSTRNGFPVISDQNPSFVLFANKRRHISRTAIFHRSAISGSSQGEKISPLASGVSSGLYSAQTFDLTPQNVDLVLEDVRPFLISDGGNVDVVSVEDGVVSLKLQGACTSCPSSSTTMTMGIERVLKEKFGDALKDIRQVFDEEVKQITVEAVNAHLDILRPAIKNYGGSVEVLSVEGEDCVVKYVGPESIGMGIQAAIKEKFKDISNVTFTS

SEQ ID NO: 7741 - protein, 230 aa, Arabidopsis thaliana
MASLATSISGSFRILVKSSSTRNGFPVISDQNPSFVLFANKRRHISRTAIFHRSAISGSSQGEKISPLASGVSSGLYSAQTFDLTPQNVDLVLEDVRPFLISDGGNVDVVSVEDGVVSLKLQGACTSCPSSSTTMTMGIERVLKEKFGDALKDIRQVFDEEVKQITVEAVNAHLDILRPAIKNYGGSVEVLSVEGEDCVVKYVGPESIGMGIQAAIKEKFKDISNVTFTS

SEQ ID NO: 7742 - DNA, 1121 bp, Arabidopsis thaliana
accaatccttcacttcctttcacgatccaaaacaaaacacaagaaaatgcaacaaaatcttctccatctctgaactcaaaaactcattcactgagaaaaatggagacccttctctcccctcgtgcgctctctcctcctctcaatcccaaacctttgtcccttcaccagaccaaacccacttcacattcattgtctctctcaaaacccaccaccttctccggtcctaaacacctctccacccggttcactaaaccggaatcaagaaactggttaatagatgcaaagcaaggactagctgctttagctttatctctaactctcactttctcacctgttggcactgctttagcctctgagttcaatatcctcaacgatggtccacctaaagaaacttacgtagtcgatgacgctggtgttcttagtcgagtgacgaagtcagatcttaagaagcttttgtctgatcttgaatacagaaagaaactgagactcaatttcatcactgtccgaaagctcaccagtaaagcagatgcgtttgagtatgcagaccaggttttggaaaaatggtatccttctattgaagaaggtaacaataagggtattgttgttttgataacaagtcagaaggaaggagctattactggtggtcctgcttttattgaagctgttggtgaaaacattcttgatgctaccgtctccgaaaatcttcccgtactagcaacggacgaaaaatacaacgaggcggtatatagcagtgcgaaaaggttggttgcagctatagacggtcaaccagatcccgggggtccaaccgtaaaggatagcaagagagaatcaaatttcaagacgaaagaagaaaccgatgagaagcgaggacagttcagtcttgtcgttggaggattacttgtaattgcctttgtagttcccatggcacaatactttgcttatgtctccaggaagtaagtaagtaaactcggttcactctcgtaaaccaaaccgatcaggtcagaactttgatttacctcggttatttggttatggtttcttggtaaattggtttatttgaacaatataagtaaataataacagaaaactaaagaatgaatgaaaccatccgattgtaacgg

SEQ ID NO: 7743 - protein, 318 aa, Arabidopsis thaliana
TNPSLPFTIQNKTQENATKSSPSLNSKTHSLRKMETLLSPRALSPPLNPKPLSLHQTKPTSHSLSLSKPTTFSGPKHLSTRFTKPESRNWLIDAKQGLAALALSLTLTFSPVGTALASEFNILNDGPPKETYVVDDAGVLSRVTKSDLKKLLSDLEYRKKLRLNFITVRKLTSKADAFEYADQVLEKWYPSIEEGNNKGIVVLITSQKEGAITGGPAFIEAVGENILDATVSENLPVLATDEKYNEAVYSSAKRLVAAIDGQPDPGGPTVKDSKRESNFKTKEETDEKRGQFSLVVGGLLVIAFVVPMAQYFAYVSRK

SEQ ID NO: 7744 - protein, 285 aa, Arabidopsis thaliana
METLLSPRALSPPLNPKPLSLHQTKPTSHSLSLSKPTTFSGPKHLSTRFTKPESRNWLIDAKQGLAALALSLTLTFSPVGTALASEFNILNDGPPKETYVVDDAGVLSRVTKSDLKKLLSDLEYRKKLRLNFITVRKLTSKADAFEYADQVLEKWYPSIEEGNNKGIVVLITSQKEGAITGGPAFIEAVGENILDATVSENLPVLATDEKYNEAVYSSAKRLVAAIDGQPDPGGPTVKDSKRESNFKTKEETDEKRGQFSLVVGGLLVIAFVVPMAQYFAYVSRK

SEQ ID NO: 7745 - DNA, 1916 bp, Arabidopsis thaliana
ctttgtgtgtttcaattagtgagaaattagtaactctctttctcactctctctctctctctgtttcaactgtctgtgaatcaactgttcttgatctccagaaacctctacacaaacaaaaggtcatagtccatcgttgaccaagatttgaatccaaggctttcccggagagtatatactagttaacaaaacactcataaaaagctctggcttgaccaaattttctacttaagcataacggtggagatctgtttttttgtgtgtggctatataacaaccttattgtctaggctgggattaaacaatggggggttgtgtgtcgactagtagtaagagtacgtgtagcagctggagcaatggagagaagcctgtgcgtcgaccatatctcgggattggttgttgtgtgagcaaaagggcgaagagaacgttttcagaccacattgtctcgttgcagaacttgacttctataccaaatcggatcaccagcagcagcaagagcaggagctcttgcattttcactcaacaaggacgcaagggtattaatcaggacgccatgattgtgtgggaagattttatgtctgaagatgtgacattttgtggtgtatttgatggtcatggtccttatggccatcttgttgctcgtaaagtgagagatacattgcctgtgaagttacagtttttctttcagacgcttcagtcgaagcaaaactgttctaaaggaactcgattcagaagaaattcaagcaaatcagctgtccaagaagctgttaaagaaggatctgacgaggataaacttaaaggcttatggggagaagctttcttgaaatcttttaaagccatggataaggaactgcggtctcatcctaatctggactgtttttgtagtggcagcactggcgtaacaattcttaaacaggggtctaatctcttcatgggaaacatcggggattctcgggccatccttggatcaaaagacagtaacgattctatggtggcaactcaactgacagttgatctgaagccggatttacctagggaagctgagaggatcaaacggtgtaaaggtcgagtatttgcgatggaagacgagccagaggtgccgcgagtctggctaccttatgatgatgcacctggattagccatggccagggcgtttggtgacttctgtctaaaagagtatggagtcatttcagtacctgagttcactcaccgtgttcttacagacagagatcaattcattgttcttgcctctgacggagtatgggatgtgttaagcaacgaagaagtggttgacattgtagcttcagctacaagccgggcatcagcggctaggaccttggtgaactcggctgcgcgtgaatggaaactgaagtacccgacttccaaaatggatgattgtgcagtggtatgtttgtttctggatgggaaaatggattctgagtcggattatgatgaacaaggcttctcttcagccacaaatgctgtagaatcagatgatggccaaagatcagagccatgtctccaaagaaacttcacagttagatcatcatcagatcaagaaaacgagacttatggtaacgtgaatacagagactgatgcagaggatgagaaaacggtaggagatcaaaactggttgggtctacaaggcgtcacacgcgtgaactcacttgtccagcttccgagattctctgaagagaaatcgaagacttgagattagcttttaatgttatttctgaggactgatcttgaagaatgttgtcatttttcgttgttatgcttgagcattgtgcgcagcttgatctgtatttgttttgctggtgtttcgtgtttgatgtatctgtattgcacaatggatttgcctcatcgattctctcttggaatccatgaatcaaatgtgtatatacattgcttttaggt

SEQ ID NO: 7746 - protein, 468 aa, Arabidopsis thaliana
MGGCVSTSSKSTCSSWSNGEKPVRRPYLGIGCCVSKRAKRTFSDHIVSLQNLTSIPNRITSSSKSRSSCIFTQQGRKGINQDAMIVWEDFMSEDVTFCGVFDGHGPYGHLVARKVRDTLPVKLQFFFQTLQSKQNCSKGTRFRRNSSKSAVQEAVKEGSDEDKLKGLWGEAFLKSFKAMDKELRSHPNLDCFCSGSTGVTILKQGSNLFMGNIGDSRAILGSKDSNDSMVATQLTVDLKPDLPREAERIKRCKGRVFAMEDEPEVPRVWLPYDDAPGLAMARAFGDFCLKEYGVISVPEFTHRVLTDRDQFIVLASDGVWDVLSNEEVVDIVASATSRASAARTLVNSAAREWKLKYPTSKMDDCAVVCLFLDGKMDSESDYDEQGFSSATNAVESDDGQRSEPCLQRNFTVRSSSDQENETYGNVNTETDAEDEKTVGDQNWLGLQGVTRVNSLVQLPRFSEEKSKT

SEQ ID NO: 7747 - protein, 385 aa, Arabidopsis thaliana
MIVWEDFMSEDVTFCGVFDGHGPYGHLVARKVRDTLPVKLQFFFQTLQSKQNCSKGTRFRRNSSKSAVQEAVKEGSDEDKLKGLWGEAFLKSFKAMDKELRSHPNLDCFCSGSTGVTILKQGSNLFMGNIGDSRAILGSKDSNDSMVATQLTVDLKPDLPREAERIKRCKGRVFAMEDEPEVPRVWLPYDDAPGLAMARAFGDFCLKEYGVISVPEFTHRVLTDRDQFIVLASDGVWDVLSNEEVVDIVASATSRASAARTLVNSAAREWKLKYPTSKMDDCAVVCLFLDGKMDSESDYDEQGFSSATNAVESDDGQRSEPCLQRNFTVRSSSDQENETYGNVNTETDAEDEKTVGDQNWLGLQGVTRVNSLVQLPRFSEEKSKT

SEQ ID NO: 7748 - protein, 378 aa, Arabidopsis thaliana
MSEDVTFCGVFDGHGPYGHLVARKVRDTLPVKLQFFFQTLQSKQNCSKGTRFRRNSSKSAVQEAVKEGSDEDKLKGLWGEAFLKSFKAMDKELRSHPNLDCFCSGSTGVTILKQGSNLFMGNIGDSRAILGSKDSNDSMVATQLTVDLKPDLPREAERIKRCKGRVFAMEDEPEVPRVWLPYDDAPGLAMARAFGDFCLKEYGVISVPEFTHRVLTDRDQFIVLASDGVWDVLSNEEVVDIVASATSRASAARTLVNSAAREWKLKYPTSKMDDCAVVCLFLDGKMDSESDYDEQGFSSATNAVESDDGQRSEPCLQRNFTVRSSSDQENETYGNVNTETDAEDEKTVGDQNWLGLQGVTRVNSLVQLPRFSEEKSKT

SEQ ID NO: 7749 - DNA, 2021 bp, Arabidopsis thaliana
atcctctctcttcactcagcatccttttataaccaaaacaaactttatctccctctctctctctcacagacaagaacacaaagttatggacaatctccggaaacttaatcttctctctgtctctctaaccataatctttgtctctcttaccatagccaccaacttacctttctttgaagtgaaatatcccaacaacaacccttttgggatgttactacggccgacaccgatcaagaaccaatccttgggtctaccggctcatgtcgggtcagatgagtgtcgggtttggaccaaagcatgttctgatgagattcttaggctgacttatcagccggataacgttgcgtggcttaaacgcgttaggaggacgatccatgagaacccggagctagcgtttgaggagtatgagactagtaggcttattaggtcggagctggaccgtatgggtatcatgtatagatatccgttagcgaaaacgggtattcgggcttggatcggatccggtggaccgccttttgttgcggttcgggctgatatggacgcactacctattcaggaagcagttgaatgggaacatataagcaaagttgcaggcaaaatgcatgcatgtggtcatgacgcacatgtgactatgcttcttggtgctgcccatattcttaaggctcgtgaacatcttctcaagggaacagtggttctgttattccaaccggctgaagaagctggaaatggtgcaaagaatatgatcgaagacggagctttggatgacgtggaggctatcttcgcggtccatgtgtcccatatccatccaacgggtgtgattggatcaagaagtggtcctttgctcgcgggatgtggaattttccgggcggttatcacttcggaagatagccgtggcgccgctaatctccttcttgcagcttcttccgcggtcattagtcttcaaggcattgtatcccgtgaagctagtcctcttgactctcaggttgtgtcggttacttcatttgatggcggtcatagtctcgatgtggcgccggacacggtggtcctcggtggtactttcagagctttttctaactcaagcttctactacctcaagaaacgtattcaagaggtactcatggatcaggtcggggttttcggttgccaagcgacagtgaacttctttgagaagcagaatgcgatatacccgccaactacgaacaatgatgcaacatacaatcacttgaagaaagtcaccatagatttgctcggagatagccatttcaccttggctccacagatgatgggagccgaagatttcgccttctactcagaaatcatcccagccgctttctacttcattggcataagaaatgaagaactcggatcagtccacattgctcattcaccacatttcatgatcgatgaagatagtttacccgttggagccgcggttcatgccgccgtggctgagagatacttaaatgataaacattcataagagtaaaaacaatctccccggcttttttttgggtggttatatttctaggcgttacggaaattatattgttcttaatctatctttgcttggaaatgtttgtgaagagtagtttttttttttttaaacgtgtaaaccgcatattgcatatggtgtatggattttagctaaagaggttagagtaaaagatagctagcggtacaaaatcttagacaactattttcttgatatcatgaaatatttggacgtttgagtatttgctacgaaattgtattaccatgtgattattaaggtttatattgacaacagaggtttcatatgtgattattagcttgtaagtgaaacaaagaaaagtaacgtcaattgaagataactgcaaggttgacaatttccaaagtccaagaagaaaattacggaatccgaaagcatacaaacgaggaagattttcaagattttaggtcataattttcttggttcgtgtgggatattaatttttgggtactttctaaggattgataaactataatatctctttttagcatct

SEQ ID NO: 7750 - protein, 492 aa, Arabidopsis thaliana
SSLFTQHPFITKTNFISLSLSHRQEHKVMDNLRKLNLLSVSLTIIFVSLTIATNLPFFEVKYPNNNPFGMLLRPTPIKNQSLGLPAHVGSDECRVWTKACSDEILRLTYQPDNVAWLKRVRRTIHENPELAFEEYETSRLIRSELDRMGIMYRYPLAKTGIRAWIGSGGPPFVAVRADMDALPIQEAVEWEHISKVAGKMHACGHDAHVTMLLGAAHILKAREHLLKGTVVLLFQPAEEAGNGAKNMIEDGALDDVEAIFAVHVSHIHPTGVIGSRSGPLLAGCGIFRAVITSEDSRGAANLLLAASSAVISLQGIVSREASPLDSQVVSVTSFDGGHSLDVAPDTVVLGGTFRAFSNSSFYYLKKRIQEVLMDQVGVFGCQATVNFFEKQNAIYPPTTNNDATYNHLKKVTIDLLGDSHFTLAPQMMGAEDFAFYSEIIPAAFYFIGIRNEELGSVHIAHSPHFMIDEDSLPVGAAVHAAVAERYLNDKHS

SEQ ID NO: 7751 - protein, 464 aa, Arabidopsis thaliana
MDNLRKLNLLSVSLTIIFVSLTIATNLPFFEVKYPNNNPFGMLLRPTPIKNQSLGLPAHVGSDECRVWTKACSDEILRLTYQPDNVAWLKRVRRTIHENPELAFEEYETSRLIRSELDRMGIMYRYPLAKTGIRAWIGSGGPPFVAVRADMDALPIQEAVEWEHISKVAGKMHACGHDAHVTMLLGAAHILKAREHLLKGTVVLLFQPAEEAGNGAKNMIEDGALDDVEAIFAVHVSHIHPTGVIGSRSGPLLAGCGIFRAVITSEDSRGAANLLLAASSAVISLQGIVSREASPLDSQVVSVTSFDGGHSLDVAPDTVVLGGTFRAFSNSSFYYLKKRIQEVLMDQVGVFGCQATVNFFEKQNAIYPPTTNNDATYNHLKKVTIDLLGDSHFTLAPQMMGAEDFAFYSEIIPAAFYFIGIRNEELGSVHIAHSPHFMIDEDSLPVGAAVHAAVAERYLNDKHS

SEQ ID NO: 7752 - protein, 423 aa, Arabidopsis thaliana
MLLRPTPIKNQSLGLPAHVGSDECRVWTKACSDEILRLTYQPDNVAWLKRVRRTIHENPELAFEEYETSRLIRSELDRMGIMYRYPLAKTGIRAWIGSGGPPFVAVRADMDALPIQEAVEWEHISKVAGKMHACGHDAHVTMLLGAAHILKAREHLLKGTVVLLFQPAEEAGNGAKNMIEDGALDDVEAIFAVHVSHIHPTGVIGSRSGPLLAGCGIFRAVITSEDSRGAANLLLAASSAVISLQGIVSREASPLDSQVVSVTSFDGGHSLDVAPDTVVLGGTFRAFSNSSFYYLKKRIQEVLMDQVGVFGCQATVNFFEKQNAIYPPTTNNDATYNHLKKVTIDLLGDSHFTLAPQMMGAEDFAFYSEIIPAAFYFIGIRNEELGSVHIAHSPHFMIDEDSLPVGAAVHAAVAERYLNDKHS

SEQ ID NO: 7753 - DNA, 1132 bp, Arabidopsis thaliana
atccactctactcaacatggactcctccaaactctcatctctctctctttgcctcttcctcatttgcattatctatctcccccaacattctctcgcatgcggctcttgcaacccacggaagggcggaaagcactcccctaaagcccctaagctaccggttcctccggtgaccgtccctaagctacccgttcctcctgtgaccatccctaagctacccgttcctccagtgactgtacccaagctacccgttcctccagtgaccgtccccaagctacccgttcctccagtgacagtcccaaagctacccgttcccccagtaactgtccctaagctacccgttcctccggtaaccgtccctaagctacccgttcctccagtaaccgtccctaagctaccccttcctccgatttcagggctacccatacctccagtggtaggtcccaatctgccattgccacctttgccaattgtaggtcctattcttccaccgggaacaaccccaccagccacaggagggaaggactgtcctccaccgccagggagcgtaaagccaccatcagggggcgggaaggcgacatgtccaatagacacgctgaagttaggtgcttgcgtcgacttgttgggaggtttagtaaagatagggcttggggatccagcagttaacaaatgttgtccgttacttaaaggcctcgttgaaatcgaagccgcggcttgtctctgcactaccctcaagctcaaagctcttgacctcaatctttatgtccctgttgctcttcagcttctccttacctgtggcaaaaatccacctccgggctacacttgttccatatgataaactcactccacttataaaggatgctttggagaaaaaagtgagaagagaatggcagagctccaatctttcctgtcttggtttaccaaatacatcatatcaaatcctatccctttgattctttcctctatcgttcccttatgcttgtatcattaattaatgtgtgctttttagattaatgattcttctcttgtattaaagtatgatttgaaatcctttttttttctctatctctttttattgaattgattgaactgcgttcatgatactgtcaaaaagagagaaaaagagtacaatttt

SEQ ID NO: 7754 - protein, 276 aa, Arabidopsis thaliana
STLLNMDSSKLSSLSLCLFLICIIYLPQHSLACGSCNPRKGGKHSPKAPKLPVPPVTVPKLPVPPVTIPKLPVPPVTVPKLPVPPVTVPKLPVPPVTVPKLPVPPVTVPKLPVPPVTVPKLPVPPVTVPKLPLPPISGLPIPPVVGPNLPLPPLPIVGPILPPGTTPPATGGKDCPPPPGSVKPPSGGGKATCPIDTLKLGACVDLLGGLVKIGLGDPAVNKCCPLLKGLVEIEAAACLCTTLKLKALDLNLYVPVALQLLLTCGKNPPPGYTCSI

SEQ ID NO: 7755 - protein, 271 aa, Arabidopsis thaliana
MDSSKLSSLSLCLFLICIIYLPQHSLACGSCNPRKGGKHSPKAPKLPVPPVTVPKLPVPPVTIPKLPVPPVTVPKLPVPPVTVPKLPVPPVTVPKLPVPPVTVPKLPVPPVTVPKLPVPPVTVPKLPLPPISGLPIPPVVGPNLPLPPLPIVGPILPPGTTPPATGGKDCPPPPGSVKPPSGGGKATCPIDTLKLGACVDLLGGLVKIGLGDPAVNKCCPLLKGLVEIEAAACLCTTLKLKALDLNLYVPVALQLLLTCGKNPPPGYTCSI

SEQ ID NO: 7756 - DNA, 1950 bp, Arabidopsis thaliana
atcccaaaaggagaaaaacaaacaaaaaacaaaacaaaacaaaaaccaaaaaaacaaaaaaataaatggcaagaatttcactagggatatgtctgatgttagtagtagcatcaagtgtgatctatgaagcgcaaggaacgttcttactaaaccattacttgaagaagaattttccaaaaaaatgcaacgagtttacgccttacgctaacaagggtatgataacgttggtgaccgatctcgaaggtagcagtccggccactacagagttcaagactttctttacacagttcaagtcttacatgtctttcatcgagacaacatcggcctcaacaaaaaatgttgatgccgagatgacagctaaatgtgacggtcttttcaaggccatgtctgcattgagtgctagtaaaggcgtcaaatcagcggatgctggggagtatgaagatgaccatgttgtcgatgggaaagactttggttgagcagaagaagaatacaaagataatgacattgaaggaaaagaaagagttggtcatagatatggtgaaatggactaaaatggtcgctacatttgtgaagtcggcctccgagcagaaaggaaagtctatcaatatagcatcttatggtcttgatgtcgatgttaacgatagttctattgtcggtggagctgcaagtagtgaatcatcctccactaaatctggatctgtttccagtagcggaagtgtttctaccaagtcgaaagaatcgagtagtagtggaagttctgccagtggaagtgttgctaccaaatccaaagaatccagcggtggaagtgctgctaccaaatccaaagaatctagcggtggaagtgctgctaccaaatccaaagaatctagtggtggaagtgctactacaggtaaaacttcgggcagtccgagcggaagtcctaaggccagcccatctggttcagttagtggcaaatcatcttcaaaaggaagcgcaagtgctcaaggaagcgcaagtgctcaaggaagtgcaagtgctcaaggaagcgcaagtgctcaaggaagtgcaagtgctcaaagaagagaaagtggggcaatggctatgtccaagagcagagaaacaaagacatcgagccaaagacaatccaaatcatcgagtgaaagttcatcttctagcacaaccaccacaacagtgaaacaagtcgagagtgagacttccaaagaagtaatgtcattcataatgcaactcgagaagaagtatgcagcaaaggcggaactcaaggtcttcttcgagtctctaaagtcttccatgcaagcttccgcaagcgttggttccaaaaccgcgaaagactatgtttctgcctcaaaagcagccactggtaaactctccgaagccatggcttcagtgagttccaaaaatgtcaaatcagcaaagatgaagagcaacttggacactagcaaagatgaaatgctgaagtgtgtcaaacaaattcaagatatcaacggtaaaatggtgagtggcaagaccgtgtcatcaacacaacagtcagagctcaagcagacaatcaccaagtgggaaaaggtcaccacccaatttgttgagaccgctgcttcttcaagttcatcgtcatcctcatcctcatcctcatcctcatcttctgctgcttctcagcagcagggcaatgcagcaatggtcaagactaattgagtttaaaggtgaagttactttattgcgcaaaagatcaccaagaaagacacaaccagtaatgccaaatattataataagtagttaactattagataatttttcttgtaaataaaactaagatcggtataggtaagcattgcatgcttataaaccgatgtatgcaagtaataactctgtaaaaaaacgttacagatagattgtaaccgctttgtatgttaacatacaaaagtgagtgatacctatgaaagggatttttgaataccc

SEQ ID NO: 7757 - protein, 420 aa, Arabidopsis thaliana
MLGSMKMTMLSMGKTLVEQKKNTKIMTLKEKKELVIDMVKWTKMVATFVKSASEQKGKSINIASYGLDVDVNDSSIVGGAASSESSSTKSGSVSSSGSVSTKSKESSSSGSSASGSVATKSKESSGGSAATKSKESSGGSAATKSKESSGGSATTGKTSGSPSGSPKASPSGSVSGKSSSKGSASAQGSASAQGSASAQGSASAQGSASAQRRESGAMAMSKSRETKTSSQRQSKSSSESSSSSTTTTTVKQVESETSKEVMSFIMQLEKKYAAKAELKVFFESLKSSMQASASVGSKTAKDYVSASKAATGKLSEAMASVSSKNVKSAKMKSNLDTSKDEMLKCVKQIQDINGKMVSGKTVSSTQQSELKQTITKWEKVTTQFVETAASSSSSSSSSSSSSSSSAASQQQGNAAMVKTN

SEQ ID NO: 7758 - protein, 416 aa, Arabidopsis thaliana
MKMTMLSMGKTLVEQKKNTKIMTLKEKKELVIDMVKWTKMVATFVKSASEQKGKSINIASYGLDVDVNDSSIVGGAASSESSSTKSGSVSSSGSVSTKSKESSSSGSSASGSVATKSKESSGGSAATKSKESSGGSAATKSKESSGGSATTGKTSGSPSGSPKASPSGSVSGKSSSKGSASAQGSASAQGSASAQGSASAQGSASAQRRESGAMAMSKSRETKTSSQRQSKSSSESSSSSTTTTTVKQVESETSKEVMSFIMQLEKKYAAKAELKVFFESLKSSMQASASVGSKTAKDYVSASKAATGKLSEAMASVSSKNVKSAKMKSNLDTSKDEMLKCVKQIQDINGKMVSGKTVSSTQQSELKQTITKWEKVTTQFVETAASSSSSSSSSSSSSSSSAASQQQGNAAMVKTN

SEQ ID NO: 7759 - protein, 414 aa, Arabidopsis thaliana
MTMLSMGKTLVEQKKNTKIMTLKEKKELVIDMVKWTKMVATFVKSASEQKGKSINIASYGLDVDVNDSSIVGGAASSESSSTKSGSVSSSGSVSTKSKESSSSGSSASGSVATKSKESSGGSAATKSKESSGGSAATKSKESSGGSATTGKTSGSPSGSPKASPSGSVSGKSSSKGSASAQGSASAQGSASAQGSASAQGSASAQRRESGAMAMSKSRETKTSSQRQSKSSSESSSSSTTTTTVKQVESETSKEVMSFIMQLEKKYAAKAELKVFFESLKSSMQASASVGSKTAKDYVSASKAATGKLSEAMASVSSKNVKSAKMKSNLDTSKDEMLKCVKQIQDINGKMVSGKTVSSTQQSELKQTITKWEKVTTQFVETAASSSSSSSSSSSSSSSSAASQQQGNAAMVKTN

SEQ ID NO: 7760 - DNA, 1509 bp, Arabidopsis thaliana
atgaatgctaaagatgtaatcagccgtctaccagatgaggttcttgggcgtattctgtctcttatctccacaaaagaagctgtttcaacctcagtactctctaagaggtggaagaacatgtttgttttggtttccaatcttgatattgatgatcgtcaatctgtgcctaagactaagcaaaaccggattgagattcacagaaattacatggctttcgttgacaaattgctagatacgcaacgtggttcttctataaagaagctcactctaaagagtcatgttggtgttcgaggtggcactgattcatctcgcattcaaagttggatttgcaacgttcttgaccatggtgttatggatcttgatgtgttcattactttaaaaggaaaatctccaccagtgcctgcaatgatctttaagagcaagacattggttaagctgagagtaggacgtggttttacaatcaagctttctcaagatgtttctcttcctttgcttaggacattatgtcttgactcagttaattttgttggaggtcataatgttgttggaactcttatatctcgctgtcctgttctcgaagaactggttgttgaggagcggcgatgtgtagattggacttgttccgtgtcttctccatctctaaagagactacacatccgatttgatcgcaagtttactagtatttcattagatgctcctaatcttatctactacaaacactctggttatgttttgggtaagtatcctaatgttaagttggattccctcatcgaagctagactcaatcttcggatggatgaaacaagaatggtgggagtaagaaatggatctctcggttccattcccgctgatatgagaaatctcatcaatggaatcagaaatgttagaatccttcacttatctagccacactctagagctgctttatttctcatgtaaagaaatgccattgttcgacagccttgttagtctatctattgggaatgacaaggcaagaggatggcaaatgctgccacttctgatcaagaactctccaaacctagaaaccctcatcttcatgggtctcgatcactacataacaaacagatgtggggatgtatgtgtttgctatgataccgacgagagcataacctcttgcctatcatcatctcaagtgaaggtgctggagatattgagctatcaaggaacgacaagagagctgaatcaaatgaagcatttcttggagaagttaccgtgtcttgagctagtgaaaatttgcgtggtaaacaacagtaataacttgcaaaccaccatggaaatgaggaatcttatgatgcttccaagagcgtcatcaaagtgtaagatccaagtcaaggttttaacaaaaaataactgatccaagtgatgtgattagtagcaaaacattgtcatattattgtgagtttaaccaactatagtacttaagtaagctttattatttatggatttgaaatgagtgtgacttcattgaatcaagaagaaagcttttgtc

SEQ ID NO: 7761 - protein, 457 aa, Arabidopsis thaliana
MNAKDVISRLPDEVLGRILSLISTKEAVSTSVLSKRWKNMFVLVSNLDIDDRQSVPKTKQNRIEIHRNYMAFVDKLLDTQRGSSIKKLTLKSHVGVRGGTDSSRIQSWICNVLDHGVMDLDVFITLKGKSPPVPAMIFKSKTLVKLRVGRGFTIKLSQDVSLPLLRTLCLDSVNFVGGHNVVGTLISRCPVLEELVVEERRCVDWTCSVSSPSLKRLHIRFDRKFTSISLDAPNLIYYKHSGYVLGKYPNVKLDSLIEARLNLRMDETRMVGVRNGSLGSIPADMRNLINGIRNVRILHLSSHTLELLYFSCKEMPLFDSLVSLSIGNDKARGWQMLPLLIKNSPNLETLIFMGLDHYITNRCGDVCVCYDTDESITSCLSSSQVKVLEILSYQGTTRELNQMKHFLEKLPCLELVKICVVNNSNNLQTTMEMRNLMMLPRASSKCKIQVKVLTKNN

SEQ ID NO: 7762 - protein, 418 aa, Arabidopsis thaliana
MFVLVSNLDIDDRQSVPKTKQNRIEIHRNYMAFVDKLLDTQRGSSIKKLTLKSHVGVRGGTDSSRIQSWICNVLDHGVMDLDVFITLKGKSPPVPAMIFKSKTLVKLRVGRGFTIKLSQDVSLPLLRTLCLDSVNFVGGHNVVGTLISRCPVLEELVVEERRCVDWTCSVSSPSLKRLHIRFDRKFTSISLDAPNLIYYKHSGYVLGKYPNVKLDSLIEARLNLRMDETRMVGVRNGSLGSIPADMRNLINGIRNVRILHLSSHTLELLYFSCKEMPLFDSLVSLSIGNDKARGWQMLPLLIKNSPNLETLIFMGLDHYITNRCGDVCVCYDTDESITSCLSSSQVKVLEILSYQGTTRELNQMKHFLEKLPCLELVKICVVNNSNNLQTTMEMRNLMMLPRASSKCKIQVKVLTKNN

SEQ ID NO: 7763 - protein, 388 aa, Arabidopsis thaliana
MAFVDKLLDTQRGSSIKKLTLKSHVGVRGGTDSSRIQSWICNVLDHGVMDLDVFITLKGKSPPVPAMIFKSKTLVKLRVGRGFTIKLSQDVSLPLLRTLCLDSVNFVGGHNVVGTLISRCPVLEELVVEERRCVDWTCSVSSPSLKRLHIRFDRKFTSISLDAPNLIYYKHSGYVLGKYPNVKLDSLIEARLNLRMDETRMVGVRNGSLGSIPADMRNLINGIRNVRILHLSSHTLELLYFSCKEMPLFDSLVSLSIGNDKARGWQMLPLLIKNSPNLETLIFMGLDHYITNRCGDVCVCYDTDESITSCLSSSQVKVLEILSYQGTTRELNQMKHFLEKLPCLELVKICVVNNSNNLQTTMEMRNLMMLPRASSKCKIQVKVLTKNN

SEQ ID NO: 7764 - DNA, 639 bp, Arabidopsis thaliana
aaaacaatcaagaaccactctttcgtgtcgcaataacaataagaaagaaagaaaaagaaaaccagagatggcgatgacgacagcatctacggtatttgttctaccggccaatgtcacctcggtcgccggcgcttcgtcgtccaggagctccgtgtctttcttgccgatgagaaacgccggttctaggctcgtagtcagggcagccgaagatcctgctccggcttcctcttcttcaaaagattctccggcagctgccgctgctccggatggagctactgccaccaaacccaagccaccaccgattggtcctaagagagggtctaaggtcaagattctaaggagagaatcctattggttcaagaacgttggatcagttgttgccgttgatcaggaccctaagactcgatacccggttgtggtccggttcgcaaaagtcaattacgccaacatatcgaccaacaactatgcattggatgaggtcgaagaagttgcagcttaaatgggagaattcaaaaactctgtgtattctataccggtttatccgtttgtaacttgacccaaaccgtatgtaccgcaaaagtttaccaattatttctcctcaaaaaaaaaaaaaaaaaaaactcgagggggggcccggta

SEQ ID NO: 7765 - protein, 165 aa, Arabidopsis thaliana
KQSRTTLSCRNNNKKERKRKPEMAMTTASTVFVLPANVTSVAGASSSRSSVSFLPMRNAGSRLVVRAAEDPAPASSSSKDSPAAAAAPDGATATKPKPPPIGPKRGSKVKILRRESYWFKNVGSVVAVDQDPKTRYPVVVRFAKVNYANISTNNYALDEVEEVAA

SEQ ID NO: 7766 - protein, 143 aa, Arabidopsis thaliana
MAMTTASTVFVLPANVTSVAGASSSRSSVSFLPMRNAGSRLVVRAAEDPAPASSSSKDSPAAAAAPDGATATKPKPPPIGPKRGSKVKILRRESYWFKNVGSVVAVDQDPKTRYPVVVRFAKVNYANISTNNYALDEVEEVAA

SEQ ID NO: 7767 - protein, 141 aa, Arabidopsis thaliana
MTTASTVFVLPANVTSVAGASSSRSSVSFLPMRNAGSRLVVRAAEDPAPASSSSKDSPAAAAAPDGATATKPKPPPIGPKRGSKVKILRRESYWFKNVGSVVAVDQDPKTRYPVVVRFAKVNYANISTNNYALDEVEEVAA

SEQ ID NO: 7768 - DNA, 845 bp, Arabidopsis thaliana
aataagaaaatcaaaatctttactcgtttgaaatttgtaatccattacctgtcatcgttgacttgtcaagaagaaacaaatcaactctaaaaagaaaaatgttgttcatcgaaatcgaagcttgacagtattcaaaatcagattcgagatgagctgcgacggaggcaaaccggcgccggcgaaactaggcgacgaacaactagcggagctccgggagatattccgatcatttgaccagaacaaggatggaagtttgacggagctcgagttaggctcacttctaagatctctcggtctaaagccgagtcaagaccaactcgacacattgatccagaaagcagatcggaataacaacggactggtcgagttctccgagttcgtcgccctcgtcgagccagatctggtcaagtgtccttacacggatgatcagcttaaagccatctttagaatgtttgaccgcgatggaaacggttacataacggcggcggagttagcccattcgatggcgaagctaggtcacgcgttgacggcggaggagttaacgggaatgatcaaagaagctgatcgagacggcgatggttgtattgatttccaagagtttgttcaagcgattacttcagctgcgtttgataatgcttggggttgaagaaagaaaggtatatatatacatagtttgaaatacttgtgttttgtttttttggcttcatcctcaaatcaaagacatttggaagtatatgtgtgtaggtgcgattccatggaaaatgtgtgttatttattgtttcatattattctttgatgaaattttgatagcttgaagagaaagctatcattgttggttttagggc

SEQ ID NO: 7769 - protein, 165 aa, Arabidopsis thaliana
MSCDGGKPAPAKLGDEQLAELREIFRSFDQNKDGSLTELELGSLLRSLGLKPSQDQLDTLIQKADRNNNGLVEFSEFVALVEPDLVKCPYTDDQLKAIFRMFDRDGNGYITAAELAHSMAKLGHALTAEELTGMIKEADRDGDGCIDFQEFVQAITSAAFDNAWG

SEQ ID NO: 7770 - DNA, 2240 bp, Arabidopsis thaliana
atgttgttaactacgggaagaaaggagaaactctctgtttctaaaggttctgaaattgaaatctcgtctcaagagtatgagtatggtagtggaaatgtctggtattgtgtcattctcgaagaaaatctagctaaatcgaagcggaagaagctctctgtccgtcacttggatcctctgctcaagtatgattattctcctccgttaatcaaaaccaccgtgcatcgtttcatgcgtccagttccgccgccggatccatttccagaggtcgattttgaggaaggtgacgtggttgacgctgcttataaaggtggttggtgttctggctcggtggttaaagttttgggaaatcggcgtttcttagtgtatcttagattccaacctgatgtcattgagcttctacgaaaggatctgcgtccccatttcgtttggaaagatgaagagtggtttcgatgcgagaaacaacaattgattgagtcagattttagtgctggaaagtctgttgaagtcagaaccaaggtagacaaattgggcgatgtttgggctccggctatggtcattaaggaggatgaggatgggacaatgttggtgaagttgaagactttgaaggaggaagaggttaattgcacaaagataagcgtttcttattccgaaatccgaccttcgccattgcctattggtttaagagattacaaattgatggaaaacgtggatgcgctagtagagtctggttggtgtcctggtgttgttagtaaagttcttgctgggaagagatacgcagtggatttggggccaaacagggagagtaaggagtttagccgcttgcagttaagaccttctatagagtggaaagatggaatttggcatagaaaagaaaaggtttcaggtagcgaggaaagttcgcatgcagttgaagaaacagctgcttcaacccgcataaggatcactgttcgaactgccttgaaagagaaaaaagctttgggtactggaatcaatgtgaggacgacacgctcttctagtggagctatgcataaccctcttcctgcctctttcaatggaggagatgttgcagaggctggtagagtatctgtcactgtgaatgaaacaccgctcttcgaaactgcagctttatctggagaactagggaatagtttggctgatgttgtgatgaatgagagcgctccagtcacaagccaaccggagatagcagcaccagtcaaaacacaaggaaaaacaactccgaagaagaaacttcaagcgatgaagaatcaaaagagctctacaaatgattctgttggagagaaggtgagtgttaacaagaggaaaagaggacagccacgcaagttcatagtcgcagagcctaagcagaagattggtgtgtctggtaataattcaaaggctgccactattgaacatgccgatatgactgatgatgataggcctctcgcttcatgggtccacactggaaattcatcatcggggcaatctgtttctcggactcctgatatagggcttaatacagttgtggaaaagcatgtcgatattgtggaaactcccccagggagagagtcgacaatggttctgccatttgtaaagaagtcacagctttggaaagtccttgaatcaatggaggtcttcaaagtcgtgccacagagtccacatttcagccctctgctagagagcgaagaagagtgccgtgaaggagacgccattggtagaatggtgatgtttagttcgctgttagagaaagtcaacaatctacaagtcgacgatccaataagctcgattaacaggatcgacgagtgtttcctcaagcttgagaaacacgggttcaatgttacaacacctcgatctaggatagccaagatactgtccattaaagaaaggcagacatgcgcattggaggaattaaaagctgttgaggaaaagatcacagagaatgacaataaaagaaggaagtatgaagaagatattgttgaattgcagaggcaagaagtgttgatgaaggaagcaaaagtcacactagacaatgagatagctcggatgcagtctcaagcagctgttcttgaccaagaggttcagaatgtagatcacgaatttcaggcaattctcgctgccccatggaaataagcaagtcgttgatcaaacctttgtgtttaagaataattgagatctctgtacgttgttggtagaaaacataactttgactaatatatcaagtaatgtctctgttcgccttgcgt

SEQ ID NO: 7771 - protein, 708 aa, Arabidopsis thaliana
MLLTTGRKEKLSVSKGSEIEISSQEYEYGSGNVWYCVILEENLAKSKRKKLSVRHLDPLLKYDYSPPLIKTTVHRFMRPVPPPDPFPEVDFEEGDVVDAAYKGGWCSGSVVKVLGNRRFLVYLRFQPDVIELLRKDLRPHFVWKDEEWFRCEKQQLIESDFSAGKSVEVRTKVDKLGDVWAPAMVIKEDEDGTMLVKLKTLKEEEVNCTKISVSYSEIRPSPLPIGLRDYKLMENVDALVESGWCPGVVSKVLAGKRYAVDLGPNRESKEFSRLQLRPSIEWKDGIWHRKEKVSGSEESSHAVEETAASTRIRITVRTALKEKKALGTGINVRTTRSSSGAMHNPLPASFNGGDVAEAGRVSVTVNETPLFETAALSGELGNSLADVVMNESAPVTSQPEIAAPVKTQGKTTPKKKLQAMKNQKSSTNDSVGEKVSVNKRKRGQPRKFIVAEPKQKIGVSGNNSKAATIEHADMTDDDRPLASWVHTGNSSSGQSVSRTPDIGLNTVVEKHVDIVETPPGRESTMVLPFVKKSQLWKVLESMEVFKVVPQSPHFSPLLESEEECREGDAIGRMVMFSSLLEKVNNLQVDDPISSINRIDECFLKLEKHGFNVTTPRSRIAKILSIKERQTCALEELKAVEEKITENDNKRRKYEEDIVELQRQEVLMKEAKVTLDNEIARMQSQAAVLDQEVQNVDHEFQAILAAPWK

SEQ ID NO: 7772 - protein, 632 aa, Arabidopsis thaliana
MRPVPPPDPFPEVDFEEGDVVDAAYKGGWCSGSVVKVLGNRRFLVYLRFQPDVIELLRKDLRPHFVWKDEEWFRCEKQQLIESDFSAGKSVEVRTKVDKLGDVWAPAMVIKEDEDGTMLVKLKTLKEEEVNCTKISVSYSEIRPSPLPIGLRDYKLMENVDALVESGWCPGVVSKVLAGKRYAVDLGPNRESKEFSRLQLRPSIEWKDGIWHRKEKVSGSEESSHAVEETAASTRIRITVRTALKEKKALGTGINVRTTRSSSGAMHNPLPASFNGGDVAEAGRVSVTVNETPLFETAALSGELGNSLADVVMNESAPVTSQPEIAAPVKTQGKTTPKKKLQAMKNQKSSTNDSVGEKVSVNKRKRGQPRKFIVAEPKQKIGVSGNNSKAATIEHADMTDDDRPLASWVHTGNSSSGQSVSRTPDIGLNTVVEKHVDIVETPPGRESTMVLPFVKKSQLWKVLESMEVFKVVPQSPHFSPLLESEEECREGDAIGRMVMFSSLLEKVNNLQVDDPISSINRIDECFLKLEKHGFNVTTPRSRIAKILSIKERQTCALEELKAVEEKITENDNKRRKYEEDIVELQRQEVLMKEAKVTLDNEIARMQSQAAVLDQEVQNVDHEFQAILAAPWK

SEQ ID NO: 7773 - protein, 525 aa, Arabidopsis thaliana
MVIKEDEDGTMLVKLKTLKEEEVNCTKISVSYSEIRPSPLPIGLRDYKLMENVDALVESGWCPGVVSKVLAGKRYAVDLGPNRESKEFSRLQLRPSIEWKDGIWHRKEKVSGSEESSHAVEETAASTRIRITVRTALKEKKALGTGINVRTTRSSSGAMHNPLPASFNGGDVAEAGRVSVTVNETPLFETAALSGELGNSLADVVMNESAPVTSQPEIAAPVKTQGKTTPKKKLQAMKNQKSSTNDSVGEKVSVNKRKRGQPRKFIVAEPKQKIGVSGNNSKAATIEHADMTDDDRPLASWVHTGNSSSGQSVSRTPDIGLNTVVEKHVDIVETPPGRESTMVLPFVKKSQLWKVLESMEVFKVVPQSPHFSPLLESEEECREGDAIGRMVMFSSLLEKVNNLQVDDPISSINRIDECFLKLEKHGFNVTTPRSRIAKILSIKERQTCALEELKAVEEKITENDNKRRKYEEDIVELQRQEVLMKEAKVTLDNEIARMQSQAAVLDQEVQNVDHEFQAILAAPWK

SEQ ID NO: 7774 - DNA, 771 bp, Arabidopsis thaliana
agtactttgaacattctctctctctcttttatctctgagattgcttcttcgctattgctcaattctctctctcacctaaccctaattattcattattcctgagattcatcggcgatgagttcggaggaagccaaggtcgttgttccgaggaactttagattgttggaagagcttgaaagaggtgagaaaggtattggagatggtactgttagctatggaatggatgatgctgatgatatttatatgcaatcttggactggcaccattcttggtcctcctaatactgcatatgaagggaaaatctttcagctgaagcttttctgtggtaaggagtaccctgaaagtccaccgactgtgaggttccagacccggataaacatggcttgtgttaacccagaaactggagtggttgaaccgagtctcttccctatgctcactaactggcggcgagaatatacaatggaggacatactggttaagctgaaaaaagaaatgatgacttcgcataaccggaagttagctcaacccccggaaggtaacgaggaagctagggcagatccaaaaggaccagctaaatgttgtgtgatgtgaagagaggttggtgggaatcagctatttgtattaatagaaggaacagtgtatataaaacatcatttgaagctttgaaattccctacaacttcctaatgttatagtcttgtttgagaatatatatatgtccgccaaaaacagttgatgattattttaataaacctcatctctactttctctc

SEQ ID NO: 7775 - protein, 158 aa, Arabidopsis thaliana
MSSEEAKVVVPRNFRLLEELERGEKGIGDGTVSYGMDDADDIYMQSWTGTILGPPNTAYEGKIFQLKLFCGKEYPESPPTVRFQTRINMACVNPETGVVEPSLFPMLTNWRREYTMEDILVKLKKEMMTSHNRKLAQPPEGNEEARADPKGPAKCCVM

SEQ ID NO: 7776 - protein, 123 aa, Arabidopsis thaliana
MDDADDIYMQSWTGTILGPPNTAYEGKIFQLKLFCGKEYPESPPTVRFQTRINMACVNPETGVVEPSLFPMLTNWRREYTMEDILVKLKKEMMTSHNRKLAQPPEGNEEARADPKGPAKCCVM

SEQ ID NO: 7777 - protein, 115 aa, Arabidopsis thaliana
MQSWTGTILGPPNTAYEGKIFQLKLFCGKEYPESPPTVRFQTRINMACVNPETGVVEPSLFPMLTNWRREYTMEDILVKLKKEMMTSHNRKLAQPPEGNEEARADPKGPAKCCVM

SEQ ID NO: 7778 - DNA, 1420 bp, Arabidopsis thaliana
tgccactcatttttcctatttttcgctttgcgtgccttcttatcaacttgtaaacaaagctacaaatatctttaaataaggacccaactctttttcaattcctcccatcaatcttcttcatttgttcttctgttggtggtggtgatctagttttcaaagaatcgattttgccaagtgggttcttcttgataacctttcttcttctttgaaatgggttcttctgtggagcagaacattcttgttactggtggtgctggctttatcgggacgcatactgttgttcaacttctcaaagatggttttaaggtttcgatcatcgataattttgataactctgttatcgaagctgttgatagagttagggagcttgttggtcctgatctctccaagaagctcgacttcaatctgggtgatctaagaaacaaaggggacattgagaaactattctccaagcagagatttgatgctgtgattcattttgcgggtcttaaagctgtgggtgagagtgttgaaaaccctcgccgctactttgacaataacttggttggaacaatcaatctatatgagaccatggcaaagtacaactgcaaaatgatggtgttttcatcttctgccactgtttatggacaacctgaaaagattccatgcatggaagactttgaattaaaggctatgaatccttatggtcgtactaagctctttcttgaagaaatagctagagatattcaaaaggcagaaccggaatggagaattattctgctgaggtacttcaatcctgtaggagcacatgagagtggcagtattggtgaggatccaaaaggcatccccaataacctcatgccttacatccaacaagtggccgttggacgtttaccggaactcaatgtctatggacatgactatcccaccgaggatggtagtgcggtaagagactacatccatgtgatggatttagcagatggccatatcgctgcgctcaggaagctatttgctgatccaaagattggttgtactgcttacaatctagggactggtcaaggaacgtctgtgttagaaatggttgcagcttttgaaaaagcttccggcaagaaaatcccgattaagctctgtccgagaaggtcaggagatgcaacagcagtttatgcttcaacagagaaggctgagaaagaacttggctggaaggcaaaatatggagtggatgagatgtgcagagatcagtggaaatgggcaaacaataatccatggggttaccagaataagctttgaatttacttcttttgtttggagttaccatttctaattactcaaatctaaaagaaagaaatatacatacatatgatgatatagttgtgctttatattccacatgtatcgaactgatctcttacttcgatgaataaaatggaaagttgatttgattg

SEQ ID NO: 7779 - protein, 351 aa, Arabidopsis thaliana
MGSSVEQNILVTGGAGFIGTHTVVQLLKDGFKVSIIDNFDNSVIEAVDRVRELVGPDLSKKLDFNLGDLRNKGDIEKLFSKQRFDAVIHFAGLKAVGESVENPRRYFDNNLVGTINLYETMAKYNCKMMVFSSSATVYGQPEKIPCMEDFELKAMNPYGRTKLFLEEIARDIQKAEPEWRIILLRYFNPVGAHESGSIGEDPKGIPNNLMPYIQQVAVGRLPELNVYGHDYPTEDGSAVRDYIHVMDLADGHIAALRKLFADPKIGCTAYNLGTGQGTSVLEMVAAFEKASGKKIPIKLCPRRSGDATAVYASTEKAEKELGWKAKYGVDEMCRDQWKWANNNPWGYQNKL

SEQ ID NO: 7780 - protein, 231 aa, Arabidopsis thaliana
MAKYNCKMMVFSSSATVYGQPEKIPCMEDFELKAMNPYGRTKLFLEEIARDIQKAEPEWRIILLRYFNPVGAHESGSIGEDPKGIPNNLMPYIQQVAVGRLPELNVYGHDYPTEDGSAVRDYIHVMDLADGHIAALRKLFADPKIGCTAYNLGTGQGTSVLEMVAAFEKASGKKIPIKLCPRRSGDATAVYASTEKAEKELGWKAKYGVDEMCRDQWKWANNNPWGYQNKL

SEQ ID NO: 7781 - protein, 224 aa, Arabidopsis thaliana
MMVFSSSATVYGQPEKIPCMEDFELKAMNPYGRTKLFLEEIARDIQKAEPEWRIILLRYFNPVGAHESGSIGEDPKGIPNNLMPYIQQVAVGRLPELNVYGHDYPTEDGSAVRDYIHVMDLADGHIAALRKLFADPKIGCTAYNLGTGQGTSVLEMVAAFEKASGKKIPIKLCPRRSGDATAVYASTEKAEKELGWKAKYGVDEMCRDQWKWANNNPWGYQNKL

SEQ ID NO: 7782 - DNA, 750 bp, Arabidopsis thaliana
attctaccaaacaagaaatctaagccaaaacattcaaagcgatttctcaagcaaaactagaagatgaagcaaaagatcttgataagagtgactatgaccgatgacaaaacccgagcaaaagcaataacaaaagcagttcagtttaaaggcgtgtcagccgtggaaataaaaggcgatcacaggaaccagatagaggtaaccggcgttgaagttgatatgatccctcttatccaaatactcagaaagaaggtagcgttcgcagagcttgtgagcgtgaccaaagttgaaccaccaaagaaagaagacgagaagaaaggaggggacggaaagggtgcagagggaaaaggcggtgaccaaaaaggtggcgataagaaagggccagatgacaaggaacctccggagccaaaacctgtgccgtgttatccatggcctctgcagggatacggtgtaccttcctcctttcctcatcaaggatacggtgtgccttccacctttccccagggagacggtgtaccttcctcgtttccatacccgtgccatccggcacatccctacaatgatataggggaacccgtttacaatcacgaacccaattgcaaaatcatgtgaaatgagttttacagaggaagattgatagagagagcatgatgaccaatgtttttttttttattgtaaagaactaaagaagcactatgtttactatttagtcatatgaataaagctctgaggccaccaaatcaatttactgct

SEQ ID NO: 7783 - protein, 181 aa, Arabidopsis thaliana
MKQKILIRVTMTDDKTRAKAITKAVQFKGVSAVEIKGDHRNQIEVTGVEVDMIPLIQILRKKVAFAELVSVTKVEPPKKEDEKKGGDGKGAEGKGGDQKGGDKKGPDDKEPPEPKPVPCYPWPLQGYGVPSSFPHQGYGVPSTFPQGDGVPSSFPYPCHPAHPYNDIGEPVYNHEPNCKIM

SEQ ID NO: 7784 - protein, 171 aa, Arabidopsis thaliana
MTDDKTRAKAITKAVQFKGVSAVEIKGDHRNQIEVTGVEVDMIPLIQILRKKVAFAELVSVTKVEPPKKEDEKKGGDGKGAEGKGGDQKGGDKKGPDDKEPPEPKPVPCYPWPLQGYGVPSSFPHQGYGVPSTFPQGDGVPSSFPYPCHPAHPYNDIGEPVYNHEPNCKIM

SEQ ID NO: 7785 - protein, 130 aa, Arabidopsis thaliana
MIPLIQILRKKVAFAELVSVTKVEPPKKEDEKKGGDGKGAEGKGGDQKGGDKKGPDDKEPPEPKPVPCYPWPLQGYGVPSSFPHQGYGVPSTFPQGDGVPSSFPYPCHPAHPYNDIGEPVYNHEPNCKIM

SEQ ID NO: 7786 - DNA, 930 bp, Arabidopsis thaliana
atcttcacggcataataagaccaagaagaaaaagaaaacattaatttcaaccaaagcaaaacagagagaaaaaaatagagagagtgaatcaatttcggtggagaaagagaagaatggagcagccgtacgtgtacgcatacccgcaaggtagtggcccctcgggagctccgactccacaagccggaggagtggtagtggatccaaagtactgcgctccttaccctatagatatggcgatcgtacggaagatgatgtcgttaacggacggcaatttcgtgataacggacgtcaacggaaacctgctgttcaaggtgaaggaaccggtgtttggtctccacgacaagagggtcttgctggatggttctggtactccggtcgtcactttgagagaaaagatggtgagcatgcatgacaggtggcaagtgtttagaggagggagtacggatcagcgtgatctgctgtacacggtgaaaagatcgtcgatgcttcagctaaagaccaaactcgatgtgtttttgggacacaacaaagatgagaagagatgtgatttcagagtcaaagggagttggctcgagcgttcttgtgttgtttacgccggcgaatctgacgccattgttgcccaaatgcacaggaagcacacggtgcagagcgtattcttgggaaaagacaacttctcggtgactgtttatccaaacgtcgattatgccttcatcgcctctctcgtcgtcattctcgatgacgtcaaccgcgaagaccgcgccgcctgagagaagaagatatcaccttctcttcttcttaattatccatccatcaataatgtgctattcatcaaccgttaaaactttgtgtgatcatctcagttgtaaaataatcaaatcattgtgcctgtccttgttgtttaatgactacatttataactgttttttcatt

SEQ ID NO: 7787 - protein, 217 aa, Arabidopsis thaliana
MEQPYVYAYPQGSGPSGAPTPQAGGVVVDPKYCAPYPIDMAIVRKMMSLTDGNFVITDVNGNLLFKVKEPVFGLHDKRVLLDGSGTPVVTLREKMVSMHDRWQVFRGGSTDQRDLLYTVKRSSMLQLKTKLDVFLGHNKDEKRCDFRVKGSWLERSCVVYAGESDAIVAQMHRKHTVQSVFLGKDNFSVTVYPNVDYAFIASLVVILDDVNREDRAA

SEQ ID NO: 7788 - protein, 178 aa, Arabidopsis thaliana
MAIVRKMMSLTDGNFVITDVNGNLLFKVKEPVFGLHDKRVLLDGSGTPVVTLREKMVSMHDRWQVFRGGSTDQRDLLYTVKRSSMLQLKTKLDVFLGHNKDEKRCDFRVKGSWLERSCVVYAGESDAIVAQMHRKHTVQSVFLGKDNFSVTVYPNVDYAFIASLVVILDDVNREDRAA

SEQ ID NO: 7789 - protein, 172 aa, Arabidopsis thaliana
MMSLTDGNFVITDVNGNLLFKVKEPVFGLHDKRVLLDGSGTPVVTLREKMVSMHDRWQVFRGGSTDQRDLLYTVKRSSMLQLKTKLDVFLGHNKDEKRCDFRVKGSWLERSCVVYAGESDAIVAQMHRKHTVQSVFLGKDNFSVTVYPNVDYAFIASLVVILDDVNREDRAA

SEQ ID NO: 7790 - DNA, 585 bp, Arabidopsis thaliana
gtgtatcaatggcttccttcacctgttcttctccatcttcgattttacctattattgatacgagaagtgggaatttgcgatgcacatttcagtctcaggtttcttgtgggattcagagagatgataatggacgccgtgtttggcggaggagaacattgacgaagaaggacgatatgttgcgttacaaaatgcaaagagttccatttgtggaagaacaagtaaggaagataagagaagttgggaaggtaatgacaatggacatagagcagcttcttttgagggaagacaatcggtttgaatttgtcaatagcgtagcagctgaagcaacagagtacgtggacaagaacagagacgaatatggaggttccaaaaaagccatctttcatgttctaagcaaccgtgtgaacgatctcggctttgatcgccctgaggcttatgtagaagctgatccttacaaacccggtcctggctatttgttggagtactacacttgatatattataacaaaaagtgtcaatgtactttacagcttttgttcttgtattaccaaaaccaaatcaatgcattcacagctttgttgttttc

SEQ ID NO: 7791 - protein, 163 aa, Arabidopsis thaliana
VSMASFTCSSPSSILPIIDTRSGNLRCTFQSQVSCGIQRDDNGRRVWRRRTLTKKDDMLRYKMQRVPFVEEQVRKIREVGKVMTMDIEQLLLREDNRFEFVNSVAAEATEYVDKNRDEYGGSKKAIFHVLSNRVNDLGFDRPEAYVEADPYKPGPGYLLEYYT

SEQ ID NO: 7792 - protein, 161 aa, Arabidopsis thaliana
MASFTCSSPSSILPIIDTRSGNLRCTFQSQVSCGIQRDDNGRRVWRRRTLTKKDDMLRYKMQRVPFVEEQVRKIREVGKVMTMDIEQLLLREDNRFEFVNSVAAEATEYVDKNRDEYGGSKKAIFHVLSNRVNDLGFDRPEAYVEADPYKPGPGYLLEYYT

SEQ ID NO: 7793 - protein, 106 aa, Arabidopsis thaliana
MLRYKMQRVPFVEEQVRKIREVGKVMTMDIEQLLLREDNRFEFVNSVAAEATEYVDKNRDEYGGSKKAIFHVLSNRVNDLGFDRPEAYVEADPYKPGPGYLLEYYT

SEQ ID NO: 7794 - DNA, 2500 bp, Arabidopsis thaliana
acagtcacggagatagatagtaagagagagctatggcggaggagcacttcgacgttctgactaaatccggtgagaagaccggtgtgtccaaacccaggggagaggttcacagagatggagattaccatcgtgctgttcatgtctggatttttgtggagactactcaacagctacttctccaacttcgatctgatgataaagattcttggcctggtcaatgggacatctctagtgctggccatatatcagctggtgatacatcgcttctatctgcacagcgggagcttgaggaagagcttggcgtaaaactcccaaaggatgcatttgaaaagatcttcgtttttctgcaggaatgtgtcacaaacgatggcaaattcataaataatgagttcaatgatgtgtatcttgttactattctgcatccaatcccattagaagcctttactcttcaaaaagaggaagtctctgctgtaaagtacgtaccttacgaagaatacagaaactttctgtctaaggaagatcctgcttatgtgccatatgatgttaatggagagtatggaaaactatttgacataatcagacagaggtgccaagtgaacactgaggcccgtagtttatctctgcagaagcaactccagagatattctccagtcaccctcgaagccaagttgacagaactttctgaagcagatcagaaagcgttgggtctaattgtgaaggctgcaaaaattatggacgatatattctatgagcaggtttggaacagcaatccagccctaagagattggctgaaggatcatgccaatgcatcaaaactggacaaactaaaatgggattacttcacgatcaacaaaagtccatggtcgtctcttgatgaaaatgaagcattcttgagtactgcggattcagctgtaaagttgcttcctggagcaacaaaagccatagctggctggaagggtcttgaatatagagcagcctttccagtgactaaaccacctggtgccaatttctatcctcccgatatggataaaatggagttcaccttatggctcaatggccttacggaagagcaaaagcatgctgcaacaggatttttcagtgttataaaaaggcgaagtgaagctaatttagatgcttctgatcatcttgccagcagcacaaagaagttaccagactctaattccgatctgtatagtattccttattcagagatatatcgacctttcctcaagaaagcttctgaattcttgcagaaagctggggacttggtcagttcgccaagtttgaagaagctactgcacagcaaagctgaagccttcctttcaaatgagtattatgagtcagacatcgcatggatggacttggattcaaagttagatattaccattggtccatatgagacgtacgaggatgaaatctttgggtataaggctacatttgaaaccttcatcggtattcgagatgataaagccacagctgatctgaaactctttggtgacaatctaaagctattggaagataatctcccgcttgagagtgtatacaaatcgacagatgtatctgctgctcctattcgggtcatccagttaatttacaattccggggatgtgaagggtcctcagactgttgcttacaatttgccaaacgatgaaaaaatcgtgaaggatagaggaacatcaatggttatgctcaagaacgtccaagaggcaaagtttgaacatattttaaagcctatagctgaaatcaccatcagcaaggaacagagaggattagttgattttgattctttcttcactcacaccatttgccatgaatgttgccatggcattggtccccataccataacccttcctggtggtcaaacctcaacagtgagaaaggaactacaagaagtccattctgcaatggaagaagcaaaggcagatatagttggtctttgggcactgaagtttctcatcactaaggggttgctttcaaagagtatggtggagagtatgtatgtttcgttcctagctggttgctttagatcgatccggtttggtctcacagaagctcatgggaaagggcaagccttgcaattcaactatttatatgaaaaaggagccttcgtgttccacgaggactctacattctcggttgatttcgctaagatcgaaggtgcagttgagagcctgagccatgagatactaactattcaaggaaaaggtgacaaaaacgcagcaacattgcttctaaataagtactgcactatcaccggaccattgaaaaccgctctggagaatctcgaacgcgttaaggtaccggtggatatatctccgacatttccattagcagaagcattgatgaactgaggaaagtttcagtttcagcaagactctggttttaacttttaataaataaataaaactcagatgatccatcatcataaaccaaatttgggatttaaaagagttatctgaatggtgttgtgttcttatcataataaagttgctacctttac

SEQ ID NO: 7795 - protein, 772 aa, Arabidopsis thaliana
MAEEHFDVLTKSGEKTGVSKPRGEVHRDGDYHRAVHVWIFVETTQQLLLQLRSDDKDSWPGQWDISSAGHISAGDTSLLSAQRELEEELGVKLPKDAFEKIFVFLQECVTNDGKFINNEFNDVYLVTILHPIPLEAFTLQKEEVSAVKYVPYEEYRNFLSKEDPAYVPYDVNGEYGKLFDIIRQRCQVNTEARSLSLQKQLQRYSPVTLEAKLTELSEADQKALGLIVKAAKIMDDIFYEQVWNSNPALRDWLKDHANASKLDKLKWDYFTINKSPWSSLDENEAFLSTADSAVKLLPGATKAIAGWKGLEYRAAFPVTKPPGANFYPPDMDKMEFTLWLNGLTEEQKHAATGFFSVIKRRSEANLDASDHLASSTKKLPDSNSDLYSIPYSEIYRPFLKKASEFLQKAGDLVSSPSLKKLLHSKAEAFLSNEYYESDIAWMDLDSKLDITIGPYETYEDEIFGYKATFETFIGIRDDKATADLKLFGDNLKLLEDNLPLESVYKSTDVSAAPIRVIQLIYNSGDVKGPQTVAYNLPNDEKIVKDRGTSMVMLKNVQEAKFEHILKPIAEITISKEQRGLVDFDSFFTHTICHECCHGIGPHTITLPGGQTSTVRKELQEVHSAMEEAKADIVGLWALKFLITKGLLSKSMVESMYVSFLAGCFRSIRFGLTEAHGKGQALQFNYLYEKGAFVFHEDSTFSVDFAKIEGAVESLSHEILTIQGKGDKNAATLLLNKYCTITGPLKTALENLERVKVPVDISPTFPLAEALMN

SEQ ID NO: 7796 - protein, 539 aa, Arabidopsis thaliana
MDDIFYEQVWNSNPALRDWLKDHANASKLDKLKWDYFTINKSPWSSLDENEAFLSTADSAVKLLPGATKAIAGWKGLEYRAAFPVTKPPGANFYPPDMDKMEFTLWLNGLTEEQKHAATGFFSVIKRRSEANLDASDHLASSTKKLPDSNSDLYSIPYSEIYRPFLKKASEFLQKAGDLVSSPSLKKLLHSKAEAFLSNEYYESDIAWMDLDSKLDITIGPYETYEDEIFGYKATFETFIGIRDDKATADLKLFGDNLKLLEDNLPLESVYKSTDVSAAPIRVIQLIYNSGDVKGPQTVAYNLPNDEKIVKDRGTSMVMLKNVQEAKFEHILKPIAEITISKEQRGLVDFDSFFTHTICHECCHGIGPHTITLPGGQTSTVRKELQEVHSAMEEAKADIVGLWALKFLITKGLLSKSMVESMYVSFLAGCFRSIRFGLTEAHGKGQALQFNYLYEKGAFVFHEDSTFSVDFAKIEGAVESLSHEILTIQGKGDKNAATLLLNKYCTITGPLKTALENLERVKVPVDISPTFPLAEALMN

SEQ ID NO: 7797 - protein, 442 aa, Arabidopsis thaliana
MDKMEFTLWLNGLTEEQKHAATGFFSVIKRRSEANLDASDHLASSTKKLPDSNSDLYSIPYSEIYRPFLKKASEFLQKAGDLVSSPSLKKLLHSKAEAFLSNEYYESDIAWMDLDSKLDITIGPYETYEDEIFGYKATFETFIGIRDDKATADLKLFGDNLKLLEDNLPLESVYKSTDVSAAPIRVIQLIYNSGDVKGPQTVAYNLPNDEKIVKDRGTSMVMLKNVQEAKFEHILKPIAEITISKEQRGLVDFDSFFTHTICHECCHGIGPHTITLPGGQTSTVRKELQEVHSAMEEAKADIVGLWALKFLITKGLLSKSMVESMYVSFLAGCFRSIRFGLTEAHGKGQALQFNYLYEKGAFVFHEDSTFSVDFAKIEGAVESLSHEILTIQGKGDKNAATLLLNKYCTITGPLKTALENLERVKVPVDISPTFPLAEALMN

SEQ ID NO: 7798 - DNA, 629 bp, Arabidopsis thaliana
ctcaaccaaaaactcctctctcagtacacttcttttcatacctcaagagactaaaactagtttgaggagatttagaggagtgtttggttctttggataacaatatcccaaactgaaaatggctaagtcatatggagctatcttcctcttgaccctcattgtcctcttcatgcttcaaaccatggttatggcctcaagtggatctaatgtgaagtggagccagaaacgttatggaccaggaagcctgaaacgtacccaatgcccatcggaatgtgataggaggtgtaaaaagacacagtaccacaaggcttgcattacgttctgcaacaaatgctgcaggaagtgtctctgtgtgcctccgggttactatgggaacaaacaagtttgctcctgctacaacaactggaaaactcaagagggtggaccaaaatgcccttgaaaaaatctcccttcgttccctttttataataaaaattttcaactataactaaatttcctttgatcaatgttttatctactttattcctaatgttgtaatgttatgtcactccttttcggattttgttctaaatcctaaaaaaaatgagagtggccctatgaatgatatttttcatgaatacttgtgtttct

SEQ ID NO: 7799 - protein, 106 aa, Arabidopsis thaliana
MAKSYGAIFLLTLIVLFMLQTMVMASSGSNVKWSQKRYGPGSLKRTQCPSECDRRCKKTQYHKACITFCNKCCRKCLCVPPGYYGNKQVCSCYNNWKTQEGGPKCP

SEQ ID NO: 7800 - protein, 89 aa, Arabidopsis thaliana
MLQTMVMASSGSNVKWSQKRYGPGSLKRTQCPSECDRRCKKTQYHKACITFCNKCCRKCLCVPPGYYGNKQVCSCYNNWKTQEGGPKCP

SEQ ID NO: 7801 - protein, 85 aa, Arabidopsis thaliana
MVMASSGSNVKWSQKRYGPGSLKRTQCPSECDRRCKKTQYHKACITFCNKCCRKCLCVPPGYYGNKQVCSCYNNWKTQEGGPKCP

SEQ ID NO: 7802 - DNA, 2147 bp, Arabidopsis thaliana
ggctctcaaacccaaacaagcccaccaatctcttcttctctgctcttctctctctgtagacactagaagaagaacaaaaatgctcaaacagtttcttcttctccaatccttctccttcttcctcttcaatgtagttatcgtcggaggaagaacattcggcggcggtttctcagcggaggagaatccatttactccaaaagcatctctagttcgttactggaacaaagagattcgtggccaatctcccagatcggagtttttaatctcaaaagcttcaccactcaacgccgtagactcagcaactttctcaaaactcgccgccgcgaactcgctgccgactcgttttcccgatttctgctccgccgcgaatctcttctgttttcctgatttaggagcgagtctcgagaaacacgacgacgacgttaaattctccgtttatgaccagaagaacttcactaactacggcaatgctcgtgccggaggagcagattcgttcaaaaactactcgaaagacggtaatgtcgtaaccgattcgttccggagatacagccgtaacgcggcgggtcacgacgataaattcactgtctacggtgaaaacagtaacgtggtagaggaaggattcaattcatacggaacattcggaaccggcggcgccggagatttcactaactaccaaaacaacgtgaacaatccaacgagtcgattcacggcgtattccgacggaggtaacggtcgatctcaaacattcaaaacctacacacacgaagctaacgccggtaacggtcaatcattcacaagctacggcaaaaacggaaacggagttcctaacgagttcacttcttacggcgtctcctccaatgtaatcggctccggtttctctaactacggcgagagtggaaacgcggcgaacgataccttcacaagctacggaagcgacggtaatgtacctcagaacaattttaataactacggtgcttccggtaacgccgccgtggataccttcgcgaattacagagacaaggccaacgtcggagacgattcgttctcatcctatgcgaaagattcgaattcggagaaggttaatttcgtaaattacggtcaatctttcaatcccggttcagaaactttcaccggttatggcaaaggagctgaaggaagcaaactcagcttcaaaacctatacaccaaactctactttcaaggactacgccaaaaagggcgtcgcttttgctaaatacaacgtttcaacaaccaccgcgaacaccgtcggcgatggcaaaaccgtaaataaatggatcgaaccgggtaaattctttagagaatcgtcgcttaaagaaggtacagtgattcctatgcctgatattaaagataaaatgcctaaaaggtcgtttttaccccggagtataattacgaaactacccttctctacttctaaactcggtgagattaagagaatcttccacgccgttgagaattcgacgatgggaggtataatcaccgacgcagtgacggagtgcgagaggccaccgagcgtcggagagacgaaacggtgcgtaggatcagcggaggatatgatcgatttcgcgacgtcggtgttaggtcgtagcgtggtgcttagaacaacggagaacgtagccgggtcaaaggaaaaggtagtgatcgggaaagtcaacggaatcaacggtgggaaattaacgaaagctgtgtcgtgtcatcagagtttgtacccgtatctattgtattactgccactccgtaccaaaggttcgggtatacgaagctgatcttctagagttgaatagtaagaagaagattaaccacgggattgccatctgtcacatggacacgtcatcatggggtccgagtcatggagctttcttagctctcgggtcaaaaccgggtcggatcgaagtttgtcactggatatttgagaacgacatgaactgggctatcgctgattagaccggtggttatggacttatcaaatagtatgattattactatcttatcgccgagttttaattacatagaggaatgttaattttctattatcattactataatattttgaagttttttcagtaacatgtaaagaatgcttgttactgatttggggtggtgcaaaataatttttatgaagattttagtg

SEQ ID NO: 7803 - protein, 652 aa, Arabidopsis thaliana
ALKPKQAHQSLLLCSSLSVDTRRRTKMLKQFLLLQSFSFFLFNVVIVGGRTFGGGFSAEENPFTPKASLVRYWNKEIRGQSPRSEFLISKASPLNAVDSATFSKLAAANSLPTRFPDFCSAANLFCFPDLGASLEKHDDDVKFSVYDQKNFTNYGNARAGGADSFKNYSKDGNVVTDSFRRYSRNAAGHDDKFTVYGENSNVVEEGFNSYGTFGTGGAGDFTNYQNNVNNPTSRFTAYSDGGNGRSQTFKTYTHEANAGNGQSFTSYGKNGNGVPNEFTSYGVSSNVIGSGFSNYGESGNAANDTFTSYGSDGNVPQNNFNNYGASGNAAVDTFANYRDKANVGDDSFSSYAKDSNSEKVNFVNYGQSFNPGSETFTGYGKGAEGSKLSFKTYTPNSTFKDYAKKGVAFAKYNVSTTTANTVGDGKTVNKWIEPGKFFRESSLKEGTVIPMPDIKDKMPKRSFLPRSIITKLPFSTSKLGEIKRIFHAVENSTMGGIITDAVTECERPPSVGETKRCVGSAEDMIDFATSVLGRSVVLRTTENVAGSKEKVVIGKVNGINGGKLTKAVSCHQSLYPYLLYYCHSVPKVRVYEADLLELNSKKKINHGIAICHMDTSSWGPSHGAFLALGSKPGRIEVCHWIFENDMNWAIAD

SEQ ID NO: 7804 - protein, 626 aa, Arabidopsis thaliana
MLKQFLLLQSFSFFLFNVVIVGGRTFGGGFSAEENPFTPKASLVRYWNKEIRGQSPRSEFLISKASPLNAVDSATFSKLAAANSLPTRFPDFCSAANLFCFPDLGASLEKHDDDVKFSVYDQKNFTNYGNARAGGADSFKNYSKDGNVVTDSFRRYSRNAAGHDDKFTVYGENSNVVEEGFNSYGTFGTGGAGDFTNYQNNVNNPTSRFTAYSDGGNGRSQTFKTYTHEANAGNGQSFTSYGKNGNGVPNEFTSYGVSSNVIGSGFSNYGESGNAANDTFTSYGSDGNVPQNNFNNYGASGNAAVDTFANYRDKANVGDDSFSSYAKDSNSEKVNFVNYGQSFNPGSETFTGYGKGAEGSKLSFKTYTPNSTFKDYAKKGVAFAKYNVSTTTANTVGDGKTVNKWIEPGKFFRESSLKEGTVIPMPDIKDKMPKRSFLPRSIITKLPFSTSKLGEIKRIFHAVENSTMGGIITDAVTECERPPSVGETKRCVGSAEDMIDFATSVLGRSVVLRTTENVAGSKEKVVIGKVNGINGGKLTKAVSCHQSLYPYLLYYCHSVPKVRVYEADLLELNSKKKINHGIAICHMDTSSWGPSHGAFLALGSKPGRIEVCHWIFENDMNWAIAD

SEQ ID NO: 7805 - DNA, 790 bp, Arabidopsis thaliana
aaaaattaaaccagaacttgggaattggaaattggagaaaaatctcagccatggcgattgcttcaacagccaccgttcttttctgctgcgccaaacccaatttccggcgaattcattctgagagccgtccagcttcttctctcaccacctctaacgaacctgtaattcggatccgaagccgcagtttaattcatgacccggttgcgctgtcgggtcttatcggaaccagtttggttgcggctgctttcatcacggcgggaccagatgctactgctttggcggcggtggtggattctcttcagctaagcgaaccgtccaatgcgttgtctttacccacttgggccgttcatgtttccagcgttgtcgaatggattacggcgatggcattggtatggaagtatggagaaagaaagggttatgagtcttggaaaggtctctcatggggaatggtacctttgcttggtggagctctctgtgcatgcacatggcatttcttctacaacgatgaatctcttgaggtgttggtcgctcttcaggcagcactaacggtgtttggtaatatcactctctgcattgctgcctttcggatcaacaagttgtcatccaaaattgaagtctctgaaaagccatgatggctaaaccgatcaatatgagcaaagtataattgaattattaattggaggatcactaagattcttttcccctttgaaaagttctatgagattctatgtcaacgatttaagtatattatatagtctttatatgaggaagatccatgtgcattcaacct

SEQ ID NO: 7806 - protein, 209 aa, Arabidopsis thaliana
KLNQNLGIGNWRKISAMAIASTATVLFCCAKPNFRRIHSESRPASSLTTSNEPVIRIRSRSLIHDPVALSGLIGTSLVAAAFITAGPDATALAAVVDSLQLSEPSNALSLPTWAVHVSSVVEWITAMALVWKYGERKGYESWKGLSWGMVPLLGGALCACTWHFFYNDESLEVLVALQAALTVFGNITLCIAAFRINKLSSKIEVSEKP

SEQ ID NO: 7807 - protein, 193 aa, Arabidopsis thaliana
MAIASTATVLFCCAKPNFRRIHSESRPASSLTTSNEPVIRIRSRSLIHDPVALSGLIGTSLVAAAFITAGPDATALAAVVDSLQLSEPSNALSLPTWAVHVSSVVEWITAMALVWKYGERKGYESWKGLSWGMVPLLGGALCACTWHFFYNDESLEVLVALQAALTVFGNITLCIAAFRINKLSSKIEVSEKP

SEQ ID NO: 7808 - DNA, 650 bp, Arabidopsis thaliana
taagagacagagagatcttaacacaaaacaaagcaaacaccaaaaaaaacagagatgggtttggttacagatgaagtgagagctagggcagagaaatacacaggagatgagatatgccgtgagaagacaaaggagtttctcaaggaagtttctatgcctaatggtttattgccattgaaggacattgaagaagttggttacgacagagagacaggtattgtctggctgaagcagaagaagagcatcacccacaagtttgaagccattggtaaacttgtctcttacgccaccgaggtcattgcacaggtggaggtcggaaagatcaagaagcttaccggtgttaaggccaaggagcttcttatttgggtcactctcaatgagcttgtcttggagcagccgacaagttcagggaagatcaatttcaggacaccaactggtctgtccaggactttcccagtgtctgctttcgttgttcctgaagttgagaagcctgcaacggagaagaacaatggaaccactgaggtcaaagaagctgttgcagtcacagatgcttagtctctctaatcttattaatcttatccttccaatcatgaattactttctgctatttgctgcttaatttccttttatcaataagatgatacaatttc

SEQ ID NO: 7809 - protein, 166 aa, Arabidopsis thaliana
MGLVTDEVRARAEKYTGDEICREKTKEFLKEVSMPNGLLPLKDIEEVGYDRETGIVWLKQKKSITHKFEAIGKLVSYATEVIAQVEVGKIKKLTGVKAKELLIWVTLNELVLEQPTSSGKINFRTPTGLSRTFPVSAFVVPEVEKPATEKNNGTTEVKEAVAVTDA

SEQ ID NO: 7810 - protein, 133 aa, Arabidopsis thaliana
MPNGLLPLKDIEEVGYDRETGIVWLKQKKSITHKFEAIGKLVSYATEVIAQVEVGKIKKLTGVKAKELLIWVTLNELVLEQPTSSGKINFRTPTGLSRTFPVSAFVVPEVEKPATEKNNGTTEVKEAVAVTDA

SEQ ID NO: 7811 - DNA, 937 bp, Arabidopsis thaliana
tctccgacagagagagagagaagcagatcgtatcatcacgagacgaccatcggaataacagagaaagagagaaaaagagagagagagagagagagagagagagagagaggatgtctggtgtggttgctcttggtcatgcgagctcgtggggcgcagcgctggtaaggatctcgccgtatactttctccgcaatcggaatcgccatctcgatcggtgtctcagtcctcggtgccgcctggggaatttacattacgggaagtagtttgatcggtgcggctatagaagctcctcgtattacttcgaagaatctcatcagtgtcatcttttgcgaagctgttgctatatatggagttattgttgcaatcatactgcaaacaaagttggagagtgtcccatcttcaaagatgtatgatgctgagtctcttagagctggatatgcaatctttgcatctggaattatagttggattcgccaaccttgtatgcgggttatgtgtaggaatcattggaagcagttgtgcattgtccgatgctcagaactccacactttttgtaaagattcttgtgatcgagatattcgggagtgctctcgggttgtttggagttattgtgggaattattatgtctgcacaagcgacatggccaacgaaatagatatatatatatccggtctgtatatgttgtggtctacttgcaaatctggaaaaacatggcttcttgattatcttcattgttatatcgttccaatgtctagacgaaaatcttgtgtgaaaactgagaaccacttttggatccccaattttttgtatttgtttaaaacttttgaataagtccttttggagaacatcttcatgtttgtattctcttataatcaaagacaaagagtttgtatatgatttgttaaaactgaactagtcattttatcaagtctgtttcct

SEQ ID NO: 7812 - protein, 216 aa, Arabidopsis thaliana
SDREREKQIVSSRDDHRNNREREKKRERERERERERMSGVVALGHASSWGAALVRISPYTFSAIGIAISIGVSVLGAAWGIYITGSSLIGAAIEAPRITSKNLISVIFCEAVAIYGVIVAIILQTKLESVPSSKMYDAESLRAGYAIFASGIIVGFANLVCGLCVGIIGSSCALSDAQNSTLFVKILVIEIFGSALGLFGVIVGIIMSAQATWPTK

SEQ ID NO: 7813 - protein, 180 aa, Arabidopsis thaliana
MSGVVALGHASSWGAALVRISPYTFSAIGIAISIGVSVLGAAWGIYITGSSLIGAAIEAPRITSKNLISVIFCEAVAIYGVIVAIILQTKLESVPSSKMYDAESLRAGYAIFASGIIVGFANLVCGLCVGIIGSSCALSDAQNSTLFVKILVIEIFGSALGLFGVIVGIIMSAQATWPTK

SEQ ID NO: 7814 - protein, 115 aa, Arabidopsis thaliana
MRVMCRNHWKQLCIVRCSELHTFCKDSCDRDIRECSRVVWSYCGNYYVCTSDMANEIDIYISGLYMLWSTCKSGKTWLLDYLHCYIVPMSRRKSCVKTENHFWIPNFLYLFKTFE

SEQ ID NO: 7815 - DNA, 955 bp, Arabidopsis thaliana
agaaattttactttttctttttgggaacccgtgatcaaatgataggaggaacaaatcaggagagacacaattctttattgacagagaaattgataatcgaagaaccctattaccaccgattctcctcttttctctctgtttcgtcgtcatctagggtttcctaatgcatgagttctctactgttgatggttttgcggagataaacgagagcttagcggagatgataaagtacattgcaaatgaaccctcagtggggctttactacattcaacagcacatccgaaacgcagcaccgaatgttattaatctcaacaacaacgttttggagaagtcccgtgaaacaggcttgcataccgaagacttggaagattctatagccatggtgaaatctatgaaagactgtggttcacctattgctgatgagatgataggagacattaagaactctttagcgataatgtcttcgaaacaaccgaggagaggggtcatcctcaactccacaagtccttggagcagatccagcagtataacaacaagaacgcgtggttctgataacagccaggataatagtgaaagcagcaactatttcacatcagtcttcatgacggctaaggagaaggcaagcaacatcaaatggccacaacttgatttcaaagaacaaaagtcagaggctgaccccaatgtgcaaagcaatgagttaaaagaagaagaagaagaggactcagggaaaggtgaacatattgtggagacaacaaagtttgaggagttcaaggcaggtaaagaagcgagtctcaaggcatggcttggagatatggatgggaatgtggatgttggtggtcgtgttgccgagagaatttagatgttttttcattaatgtcgctgtggttacgggagactgcttatttatgtaaatcattcacttacacagagaaaaaagagttaaaattttgacttt

SEQ ID NO: 7816 - protein, 231 aa, Arabidopsis thaliana
MHEFSTVDGFAEINESLAEMIKYIANEPSVGLYYIQQHIRNAAPNVINLNNNVLEKSRETGLHTEDLEDSIAMVKSMKDCGSPIADEMIGDIKNSLAIMSSKQPRRGVILNSTSPWSRSSSITTRTRGSDNSQDNSESSNYFTSVFMTAKEKASNIKWPQLDFKEQKSEADPNVQSNELKEEEEEDSGKGEHIVETTKFEEFKAGKEASLKAWLGDMDGNVDVGGRVAERI

SEQ ID NO: 7817 - protein, 212 aa, Arabidopsis thaliana
MIKYIANEPSVGLYYIQQHIRNAAPNVINLNNNVLEKSRETGLHTEDLEDSIAMVKSMKDCGSPIADEMIGDIKNSLAIMSSKQPRRGVILNSTSPWSRSSSITTRTRGSDNSQDNSESSNYFTSVFMTAKEKASNIKWPQLDFKEQKSEADPNVQSNELKEEEEEDSGKGEHIVETTKFEEFKAGKEASLKAWLGDMDGNVDVGGRVAERI

SEQ ID NO: 7818 - protein, 159 aa, Arabidopsis thaliana
MVKSMKDCGSPIADEMIGDIKNSLAIMSSKQPRRGVILNSTSPWSRSSSITTRTRGSDNSQDNSESSNYFTSVFMTAKEKASNIKWPQLDFKEQKSEADPNVQSNELKEEEEEDSGKGEHIVETTKFEEFKAGKEASLKAWLGDMDGNVDVGGRVAERI

SEQ ID NO: 7819 - DNA, 531 bp, Arabidopsis thaliana
atacacactacatcactcttcttacgttgctttatattcatgatgccggaacaaacgtacatgtacgcctatgtaacgctgccgcaccatgaccagagagaacgctacactcagaaatgttatcgggacggaagacggattgtgttggcaagctacgacttgatgggatcagagagattcagtttcaaagagaagcttcggaagtcaatgaaaggaatgaacgagtcggccgaacgatgggtttcggaagtgcgtcaaggtacgaccaagagacgatttgcgattagagtcttaaggacaaaacttggcttctgttcttgcttcattcgtagtgttggatgttttacttcttgtgtggggcacaaagataatttcatgaagtaattaatctaaacctaaagtattcactgatgttgcttttcttacacatacatgtaaatattttatttcatatatacacgcacacacacgtgacacgtgcgtgttttctttggagagttttgtgtgaatatttcagtatcccacattgag

SEQ ID NO: 7820 - protein, 127 aa, Arabidopsis thaliana
IHTTSLFLRCFIFMMPEQTYMYAYVTLPHHDQRERYTQKCYRDGRRIVLASYDLMGSERFSFKEKLRKSMKGMNESAERWVSEVRQGTTKRRFAIRVLRTKLGFCSCFIRSVGCFTSCVGHKDNFMK

SEQ ID NO: 7821 - protein, 114 aa, Arabidopsis thaliana
MMPEQTYMYAYVTLPHHDQRERYTQKCYRDGRRIVLASYDLMGSERFSFKEKLRKSMKGMNESAERWVSEVRQGTTKRRFAIRVLRTKLGFCSCFIRSVGCFTSCVGHKDNFMK

SEQ ID NO: 7822 - protein, 113 aa, Arabidopsis thaliana
MPEQTYMYAYVTLPHHDQRERYTQKCYRDGRRIVLASYDLMGSERFSFKEKLRKSMKGMNESAERWVSEVRQGTTKRRFAIRVLRTKLGFCSCFIRSVGCFTSCVGHKDNFMK

SEQ ID NO: 7823 - DNA, 518 bp, Arabidopsis thaliana
atttcgcgaactttctccttagaatcggaacggacgaagaaggaagacaaggaagaagatcggagatggcatcgaatgcggcggttccgttctggagagcggcggggatgacatatatatcgtattcaaacatctgtgcgaatatcgtgaggaactgtctcaaggagccacacaaagctgaagctcttactcgcgagaaggttcacttctctctctccaaatgggctgatggaaagccccagaaacctgttttgcggtcagacacacctgaagtttgaagtcaactttgagcttatgttcttaagggattcaaaagtaactgagttaccaagatttgttttctttttattgtcaacaatggagcttgagtgaaaaactcatttccgatcataataatgacacactgagtcttgtgtatctcttttcttcttttgctattctgtttcactttttgtatgcgaacaatgaaaaaaagcctttaaagactcttctggctaaagacaagttcttttgattgt

SEQ ID NO: 7824 - protein, 91 aa, Arabidopsis thaliana
FANFLLRIGTDEEGRQGRRSEMASNAAVPFWRAAGMTYISYSNICANIVRNCLKEPHKAEALTREKVHFSLSKWADGKPQKPVLRSDTPEV

SEQ ID NO: 7825 - protein, 70 aa, Arabidopsis thaliana
MASNAAVPFWRAAGMTYISYSNICANIVRNCLKEPHKAEALTREKVHFSLSKWADGKPQKPVLRSDTPEV

SEQ ID NO: 7826 - protein, 56 aa, Arabidopsis thaliana
MTYISYSNICANIVRNCLKEPHKAEALTREKVHFSLSKWADGKPQKPVLRSDTPEV

SEQ ID NO: 7827 - DNA, 605 bp, Arabidopsis thaliana
gactcttctgtgtctctctcatcaaatcaaatccctaattctcgagctcgaagaaagagacgaaaatggcactgagaaatgcaattcttcgtcacctgagggttccggtgcaaaccctaggattgaatcagtctaaaattgggttccttggtacgatccggtcattttcttcgcacgatgatcatcttagcagagaagctgtcgtcgatagagtactcgatgttgtcaagagcttccccaaagtcgattcctctaaggtgactcctgaggttcatttccaaaacgatttgggattagatagtttggacacagtggagatagtgatggctattgaagaggaattcaagctggaaattccagacaaagaagctgacaagatcgattcttgctctctcgccattgaatacgtttacaatcatccaatgtctagctaatcgctgtgtgctctctcatggtttctccttcctttttcttgtatgaggttcttctctctttgataatgccataatgggatttgcaaaaaaatcacttttatttggagagcattgttattgactcttttaacggttccagtttcttaaaaagaaaacctttttgcttgaaag

SEQ ID NO: 7828 - protein, 122 aa, Arabidopsis thaliana
MALRNAILRHLRVPVQTLGLNQSKIGFLGTIRSFSSHDDHLSREAVVDRVLDVVKSFPKVDSSKVTPEVHFQNDLGLDSLDTVEIVMAIEEEFKLEIPDKEADKIDSCSLAIEYVYNHPMSS

SEQ ID NO: 7829 - DNA, 970 bp, Arabidopsis thaliana
accattgcataattatcggatgttgagggattcgtatcttggagccgaagtgttgttttcttatagaaggattttgatttcttctgcaaaattcgatcgatagtgacgagaaagatcctaagatggcgaccgcaagcgagagttcttcatctaagagatggcttccacttgaatctaacccagatgttatgaatcagtatctctggggacttggtcttgcccctgatgaagcagagtgcaatgatgtgtatgggttagacgatgaacttctagagatggttccaaagcctgttcttgctgttctcttcctttacccaatcaccaaaaagagtgaagaagagagaatcgagcaagacaaggaaattaaggaaaaggtgcatagcgataaagtttactttatgaaacaaactgttggtaatgcttgtggaaccattggtcttcttcatgctattgggaatattacctctgaaatcaaactctccgacggatcgttcttggatagattcttcaaatccactgccaacatgactcctatggagcgtgccaagtttctcgagaatgacagtcaaatagaagatgctcattctgtagctgttatagctggtgatacacctgcttcagaagacgcagacacgcatttcatttgtttagcttgtgtagaaggtgagctctatgaacttgatggaagaaaggcaggaccgatttcacacggtgcttcctctccagctaccctcctgaaggacgcaacaaaagtgataaagaagatgatcgagaagaatccgggctctctcaacttcaacctgatagccatctctaagagaacctgagggtcttttaaataaccgaaactcctaagtcttgtttttgagtttgtgactattttatatcttcggattctgtttttcaatgttctgaacaaattacagttgatgatcatggtttagagaatgcattcctagatcagtaacac

SEQ ID NO: 7830 - protein, 234 aa, Arabidopsis thaliana
MATASESSSSKRWLPLESNPDVMNQYLWGLGLAPDEAECNDVYGLDDELLEMVPKPVLAVLFLYPITKKSEEERIEQDKEIKEKVHSDKVYFMKQTVGNACGTIGLLHAIGNITSEIKLSDGSFLDRFFKSTANMTPMERAKFLENDSQIEDAHSVAVIAGDTPASEDADTHFICLACVEGELYELDGRKAGPISHGASSPATLLKDATKVIKKMIEKNPGSLNFNLIAISKRT

SEQ ID NO: 7831 - protein, 212 aa, Arabidopsis thaliana
MNQYLWGLGLAPDEAECNDVYGLDDELLEMVPKPVLAVLFLYPITKKSEEERIEQDKEIKEKVHSDKVYFMKQTVGNACGTIGLLHAIGNITSEIKLSDGSFLDRFFKSTANMTPMERAKFLENDSQIEDAHSVAVIAGDTPASEDADTHFICLACVEGELYELDGRKAGPISHGASSPATLLKDATKVIKKMIEKNPGSLNFNLIAISKRT

SEQ ID NO: 7832 - protein, 183 aa, Arabidopsis thaliana
MVPKPVLAVLFLYPITKKSEEERIEQDKEIKEKVHSDKVYFMKQTVGNACGTIGLLHAIGNITSEIKLSDGSFLDRFFKSTANMTPMERAKFLENDSQIEDAHSVAVIAGDTPASEDADTHFICLACVEGELYELDGRKAGPISHGASSPATLLKDATKVIKKMIEKNPGSLNFNLIAISKRT

SEQ ID NO: 7833 - DNA, 943 bp, Arabidopsis thaliana
atctgcgtcattcctaagctcactatactctctgtttaaaaaaacctatctctctctctctctctcgccgccttcctctcaccctcttcgcatagcttcactttcgccgatggctctacctaaccagcaaaccgtggattaccctagcttcaagctcgttatcgttggcgatggaggcacagggaagaccacatttgtaaagagacatcttactggagagtttgagaagaagtatgaacccactattggtgttgaggttcatcctcttgatttcttcactaactgtggcaagatccgtttctactgttgggatactgctggccaagagaaatttggtggtcttagggatggttactacatccatggacaatgtgctatcatcatgtttgatgtcacagcacgactgacatacaagaatgttccaacatggcaccgtgatctttgcagggtttgtgaaaacatcccaattgttctttgtgggaataaagttgatgtgaagaacaggcaagtcaaggccaagcaggtaacattccacaggaagaagaacctccagtattacgagatatctgccaagagcaactacaacttcgagaagccattcttgtaccttgctagaaagctcgccggggacgctaatcttcactttgtggaatcacctgcccttgctcccccggaagttcaaatcgacttggctgctcagcagcagcatgaggcggagcttgcagcagcagcaagtcagccacttcctgatgacgatgatgacaccttcgagtagagaaagagagatgtgatctgtcactgattacccgttagggcttgtctgaacttttttttgttcatggtgctatttttatgtgtccgtactttgaaatgaatcgatgacattagtaattttcatttttaagtttttaactgtcgctatgaaagtgaaaaccttttgatt

SEQ ID NO: 7834 - protein, 257 aa, Arabidopsis thaliana
SASFLSSLYSLFKKTYLSLSLSPPSSHPLRIASLSPMALPNQQTVDYPSFKLVIVGDGGTGKTTFVKRHLTGEFEKKYEPTIGVEVHPLDFFTNCGKIRFYCWDTAGQEKFGGLRDGYYIHGQCAIIMFDVTARLTYKNVPTWHRDLCRVCENIPIVLCGNKVDVKNRQVKAKQVTFHRKKNLQYYEISAKSNYNFEKPFLYLARKLAGDANLHFVESPALAPPEVQIDLAAQQQHEAELAAAASQPLPDDDDDTFE

SEQ ID NO: 7835 - protein, 221 aa, Arabidopsis thaliana
MALPNQQTVDYPSFKLVIVGDGGTGKTTFVKRHLTGEFEKKYEPTIGVEVHPLDFFTNCGKIRFYCWDTAGQEKFGGLRDGYYIHGQCAIIMFDVTARLTYKNVPTWHRDLCRVCENIPIVLCGNKVDVKNRQVKAKQVTFHRKKNLQYYEISAKSNYNFEKPFLYLARKLAGDANLHFVESPALAPPEVQIDLAAQQQHEAELAAAASQPLPDDDDDTFE

SEQ ID NO: 7836 - protein, 130 aa, Arabidopsis thaliana
MFDVTARLTYKNVPTWHRDLCRVCENIPIVLCGNKVDVKNRQVKAKQVTFHRKKNLQYYEISAKSNYNFEKPFLYLARKLAGDANLHFVESPALAPPEVQIDLAAQQQHEAELAAAASQPLPDDDDDTFE

SEQ ID NO: 7837 - DNA, 3856 bp, Arabidopsis thaliana
atgtcttctacttatagccccggtcaaagccccggaagctcccggttgctgcagctaggcgctgccggctctgcctcgcgtcttagatcttcttcctccaagaagccgcctgagccacttcgtcgagccgttgcggactgcctctcatcctctcctcctccggttaattcgcaccatggcgcgatcccttccatggctccctctgaagctctcaggaatctccgggattatctatcagcctctgccacgactgacctggcctacaacatgctgttagagcatactatagcagagagagatcgcagcccagctgtggttacgaggtgtgtggctctactgaaacggtatatcttaagatataagcctggcgaggagacacttctgcaggtcgataaattttgcgtgaacctgattgctgagtgcgatgctagcttgaagcaaaaatcattgcctgttttatcagcaccagcgggtgcttctcctttaccagtgtccagttttgcttctgcagctctggtgaaatcattgcattatgtgcgttcccttgtggctttacatatcccaaggcgatcctttcaacctgcagcatttgcaggagctactcttgcgtcaagacagttattgccatctctatcttctttgttgagcaaatcattcaattctcaattaagtccagcaaatgccgcagaatctccacagaaaaaggatgctgcaaatctgtctgtttcaaacttgtcaaatatacaagaaattaatgctatggaagacactgaatacatatcgtcagacttgctgaattggcgttgggttggggagctacagttatcatcagcttcttctgaaagcgaacgccctgttaatctccaagacatgaacaattgtaatcttctggaagttggtgctgctggcctgcttgtaggagatatggaagccaaaatgaagggtcagcactggaaatattttggtaccgcagagatgccttatttagaacaactgctgcagccagcttcagtcacgatgataacaaactcagcctcagctcgctcccacttgagagcaattacagcttccaaacgcaccagggctggccctcagcagatctgtgaacaacaaccactgcgcctaaaccctgccgaggtaggtgaagtgatcgctgctgtttgttctgaggcatcatccaccccttcaaatcaaatgactgtatcaccccaattaacgagcaagactggaaagccgtcgatggatgtggctgtgagcgtcctaattaagcttgttatcgacatgtatgtattggacgctagaattgctgctcctcttactttatccatgctcgaggaaatgctatgctccacaaaagcaccttgtaggattcgtgtatttgatttaattcttaatttaggagttcatgcacaattgttagagccaatgataagtgataatgcgactaccattgaagaagattatgcccaagaaacatatatcgacaatgaaaataggcttctgctacaagggacaagaacaaaagacttgcctaagatgtcaagcacttcttcggctattgagaactttgagtcttggatattaaaaatcttatttgaaatacttcttctcctagttcaggaaaaggaagaatgtgtttgggcctctgccctcagctgcttgctctattttatctgtgatagaggcaaaatacggagaaaccagctaaatggtcttgacataaggaccttcgtaactatgatttctgtttccagctgcatgttaccatttctcagccaagttgtacttgctgatgagccagttactttccttgaatcagaaccagaaggctctaacaaagcaatttcaagtgcctcaaattttcttatcgaccaggtcgatctgattggtggtgtagaatacattttctttgagggattcattttattggtacagtactctttggcaaccactagagaggaaagaagaaatctctactcggttttatttgactatgtgctgcatcaaattaatgaggcatgctcatctgctggtctttctgagtacactgatgatgagattcaacctttggctgttcggcttgctcttgctgatgcacctgaagctttctacatttctgttaagcttggtgttgaaggcataggagaaatcctgcgaagatcaattgctgcagcattgtctgggttcagcaacagcgaacgacttaaccagcttttggcaaatataacagaaaagtttgacacaataataggttcgtttactcacctggacaaagagttcctgcatctcaaacagattaccaaatcttccaagttcatggaaagcattttagatttaagaaacgatataagcatgtccgtgaatctagcttgggctactttgcactctcttcttcattcagaaaggaccacataccgtcaaaatgggtatatctggttgggggatcttctgattgcagaaattagtgaagagagcggtggaagtatatggctgagcataaaagatctgcaacaaaagattgcccattgtggtacctcagactctctggttacttctgatgtacctatttccatacatctcctatgtggactcttgaagtcaaggaacagtgttatcagatggggtttcctatttattctggagaggctacttatgcgctccaagttcttactagacgagaatgagacccaacgatcaactggtggagttgctactcaggaccataaagacaaacgactagagaaagcaaatgctgttatagacataatgagcagtgctttgtctttgatggcacaaataaatgaaactgaccggattaacatcttaaagatgtgtgacattcttttctcgcaattgtgcttgaaagttttgtctactgacgaggatgcagtccccaattctgcggataggaatagcaaatttgatacttctcatcgtaacagctataaagaaagtgtggatgaaggtgacaccaagcctcggtacaataacgtctctgtttcaacgtgtgagacagcgtcaatggcagcgatgcttcttcgtggacaggccattgttcctatgcagctggttgcgcgtgtgccagcagctttgttttattggccactgattcaactagcaggtgcagcaactgacaacattgcacttggtgtcgccgttggaagcaaaggtagaggaaatattccaggggcaacctctgatattcgagccaccctgctattacttctgattggtaaatgcaccgccgatacagttgcttttcaagaagttggcggagaggagttctttagggaactcctggatgatactgattcaaggaggatgatgacggaggaaccagagaaataccaaaacatgcttcagaagcttgtctttaaggctcagcaggcctgcaaaataaagaccctcagacatcgaaaccctgagagtgagatccaatacttgttctgttctgcaaatcgcttctggtccctggagtctggagatctcatcctttcccaccgattccgtcccgataaaacgatgatcgatgatcaggacttggggtttattgccaactttcttggcatcttcatcttcgcattggtaattgcttatcactacgtaactgctgatcccaaatacgaagccacttgagtgatgatattttagaatgatgtaaggctttttagtttatactagtattatctgtgtttcaaactgagaagagataataacagtctttgttgagatgataatgttttcaagatgttcctaatccatttcacatcttctcaattttatatgcatgtgcatatatatgttccctccaattatgttgttcgaatgtttgatgaaactttgaatttttttcttt

SEQ ID NO: 7838 - protein, 1211 aa, Arabidopsis thaliana
MSSTYSPGQSPGSSRLLQLGAAGSASRLRSSSSKKPPEPLRRAVADCLSSSPPPVNSHHGAIPSMAPSEALRNLRDYLSASATTDLAYNMLLEHTIAERDRSPAVVTRCVALLKRYILRYKPGEETLLQVDKFCVNLIAECDASLKQKSLPVLSAPAGASPLPVSSFASAALVKSLHYVRSLVALHIPRRSFQPAAFAGATLASRQLLPSLSSLLSKSFNSQLSPANAAESPQKKDAANLSVSNLSNIQEINAMEDTEYISSDLLNWRWVGELQLSSASSESERPVNLQDMNNCNLLEVGAAGLLVGDMEAKMKGQHWKYFGTAEMPYLEQLLQPASVTMITNSASARSHLRAITASKRTRAGPQQICEQQPLRLNPAEVGEVIAAVCSEASSTPSNQMTVSPQLTSKTGKPSMDVAVSVLIKLVIDMYVLDARIAAPLTLSMLEEMLCSTKAPCRIRVFDLILNLGVHAQLLEPMISDNATTIEEDYAQETYIDNENRLLLQGTRTKDLPKMSSTSSAIENFESWILKILFEILLLLVQEKEECVWASALSCLLYFICDRGKIRRNQLNGLDIRTFVTMISVSSCMLPFLSQVVLADEPVTFLESEPEGSNKAISSASNFLIDQVDLIGGVEYIFFEGFILLVQYSLATTREERRNLYSVLFDYVLHQINEACSSAGLSEYTDDEIQPLAVRLALADAPEAFYISVKLGVEGIGEILRRSIAAALSGFSNSERLNQLLANITEKFDTIIGSFTHLDKEFLHLKQITKSSKFMESILDLRNDISMSVNLAWATLHSLLHSERTTYRQNGYIWLGDLLIAEISEESGGSIWLSIKDLQQKIAHCGTSDSLVTSDVPISIHLLCGLLKSRNSVIRWGFLFILERLLMRSKFLLDENETQRSTGGVATQDHKDKRLEKANAVIDIMSSALSLMAQINETDRINILKMCDILFSQLCLKVLSTDEDAVPNSADRNSKFDTSHRNSYKESVDEGDTKPRYNNVSVSTCETASMAAMLLRGQAIVPMQLVARVPAALFYWPLIQLAGAATDNIALGVAVGSKGRGNIPGATSDIRATLLLLLIGKCTADTVAFQEVGGEEFFRELLDDTDSRRMMTEEPEKYQNMLQKLVFKAQQACKIKTLRHRNPESEIQYLFCSANRFWSLESGDLILSHRFRPDKTMIDDQDLGFIANFLGIFIFALVIAYHYVTADPKYEAT

SEQ ID NO: 7839 - protein, 1147 aa, Arabidopsis thaliana
MAPSEALRNLRDYLSASATTDLAYNMLLEHTIAERDRSPAVVTRCVALLKRYILRYKPGEETLLQVDKFCVNLIAECDASLKQKSLPVLSAPAGASPLPVSSFASAALVKSLHYVRSLVALHIPRRSFQPAAFAGATLASRQLLPSLSSLLSKSFNSQLSPANAAESPQKKDAANLSVSNLSNIQEINAMEDTEYISSDLLNWRWVGELQLSSASSESERPVNLQDMNNCNLLEVGAAGLLVGDMEAKMKGQHWKYFGTAEMPYLEQLLQPASVTMITNSASARSHLRAITASKRTRAGPQQICEQQPLRLNPAEVGEVIAAVCSEASSTPSNQMTVSPQLTSKTGKPSMDVAVSVLIKLVIDMYVLDARIAAPLTLSMLEEMLCSTKAPCRIRVFDLILNLGVHAQLLEPMISDNATTIEEDYAQETYIDNENRLLLQGTRTKDLPKMSSTSSAIENFESWILKILFEILLLLVQEKEECVWASALSCLLYFICDRGKIRRNQLNGLDIRTFVTMISVSSCMLPFLSQVVLADEPVTFLESEPEGSNKAISSASNFLIDQVDLIGGVEYIFFEGFILLVQYSLATTREERRNLYSVLFDYVLHQINEACSSAGLSEYTDDEIQPLAVRLALADAPEAFYISVKLGVEGIGEILRRSIAAALSGFSNSERLNQLLANITEKFDTIIGSFTHLDKEFLHLKQITKSSKFMESILDLRNDISMSVNLAWATLHSLLHSERTTYRQNGYIWLGDLLIAEISEESGGSIWLSIKDLQQKIAHCGTSDSLVTSDVPISIHLLCGLLKSRNSVIRWGFLFILERLLMRSKFLLDENETQRSTGGVATQDHKDKRLEKANAVIDIMSSALSLMAQINETDRINILKMCDILFSQLCLKVLSTDEDAVPNSADRNSKFDTSHRNSYKESVDEGDTKPRYNNVSVSTCETASMAAMLLRGQAIVPMQLVARVPAALFYWPLIQLAGAATDNIALGVAVGSKGRGNIPGATSDIRATLLLLLIGKCTADTVAFQEVGGEEFFRELLDDTDSRRMMTEEPEKYQNMLQKLVFKAQQACKIKTLRHRNPESEIQYLFCSANRFWSLESGDLILSHRFRPDKTMIDDQDLGFIANFLGIFIFALVIAYHYVTADPKYEAT

SEQ ID NO: 7840 - protein, 1122 aa, Arabidopsis thaliana
MLLEHTIAERDRSPAVVTRCVALLKRYILRYKPGEETLLQVDKFCVNLIAECDASLKQKSLPVLSAPAGASPLPVSSFASAALVKSLHYVRSLVALHIPRRSFQPAAFAGATLASRQLLPSLSSLLSKSFNSQLSPANAAESPQKKDAANLSVSNLSNIQEINAMEDTEYISSDLLNWRWVGELQLSSASSESERPVNLQDMNNCNLLEVGAAGLLVGDMEAKMKGQHWKYFGTAEMPYLEQLLQPASVTMITNSASARSHLRAITASKRTRAGPQQICEQQPLRLNPAEVGEVIAAVCSEASSTPSNQMTVSPQLTSKTGKPSMDVAVSVLIKLVIDMYVLDARIAAPLTLSMLEEMLCSTKAPCRIRVFDLILNLGVHAQLLEPMISDNATTIEEDYAQETYIDNENRLLLQGTRTKDLPKMSSTSSAIENFESWILKILFEILLLLVQEKEECVWASALSCLLYFICDRGKIRRNQLNGLDIRTFVTMISVSSCMLPFLSQVVLADEPVTFLESEPEGSNKAISSASNFLIDQVDLIGGVEYIFFEGFILLVQYSLATTREERRNLYSVLFDYVLHQINEACSSAGLSEYTDDEIQPLAVRLALADAPEAFYISVKLGVEGIGEILRRSIAAALSGFSNSERLNQLLANITEKFDTIIGSFTHLDKEFLHLKQITKSSKFMESILDLRNDISMSVNLAWATLHSLLHSERTTYRQNGYIWLGDLLIAEISEESGGSIWLSIKDLQQKIAHCGTSDSLVTSDVPISIHLLCGLLKSRNSVIRWGFLFILERLLMRSKFLLDENETQRSTGGVATQDHKDKRLEKANAVIDIMSSALSLMAQINETDRINILKMCDILFSQLCLKVLSTDEDAVPNSADRNSKFDTSHRNSYKESVDEGDTKPRYNNVSVSTCETASMAAMLLRGQAIVPMQLVARVPAALFYWPLIQLAGAATDNIALGVAVGSKGRGNIPGATSDIRATLLLLLIGKCTADTVAFQEVGGEEFFRELLDDTDSRRMMTEEPEKYQNMLQKLVFKAQQACKIKTLRHRNPESEIQYLFCSANRFWSLESGDLILSHRFRPDKTMIDDQDLGFIANFLGIFIFALVIAYHYVTADPKYEAT

SEQ ID NO: 7841 - DNA, 597 bp, Arabidopsis thaliana
agtatatatattcatatcggctctcgcgtcctaaatcagaagagtagagcacaaattagggttagggttagggcttctcccttcctggcaaattcatcccttttagccgccattgaagatgactggtaaggccaagccaaagaagcatacagcgaaggagattcaagcgaagatcgatgctgcgttgactaatcgaggcggaggaaaagctggaatcgctgatcggaccggaaaagagaaaggaggccacgctaagtacgagtgtcctcattgcaaaattacggctccaggtcttaagacgatgcagatccatcacgaatcgaagcatcctaatatcatttatgaggaatcaaagctcgtgaatctccatgctgttttagcaccagtagctgaatcgaaacctaaacctggtatcaggggaagcttgaagaagtaactctatgtttgaattttataaaatttgttatcttttgatgttaaagagtgtaatgtgctacttcttaccccaaaatctatcatgttgttgatgtcatctggtttagcgaatcttaaatagctttgtagtcatgttaaatcaacaacctctatttctttttt

SEQ ID NO: 7842 - protein, 105 aa, Arabidopsis thaliana
MTGKAKPKKHTAKEIQAKIDAALTNRGGGKAGIADRTGKEKGGHAKYECPHCKITAPGLKTMQIHHESKHPNIIYEESKLVNLHAVLAPVAESKPKPGIRGSLKK

SEQ ID NO: 7843 - DNA, 1055 bp, Arabidopsis thaliana
agcactataccatatctcttttttcttccgtttttccacacattgtctctacctttccctttttcagatttgaccctttgttttcaaaagaaacgatttttagtagccgccggggaatcaggagaatggtgtctccggagaatacgaactggcttagtgattaccctttgattgaaggtgctttctctgatcagaaccccactttcccttggcagatagatggctcagctactgtcagtgttgaagtggatggcttcctttgtgatgcagatgtgatcaaagaaccaagttcaaggaagaggatcaaaactgaatcttgcactggttctaactcgaaagcttgtagggagaaacaaagacgtgatagactaaatgacaagtttacggagttgagttccgtattggaacctgggagaactccaaaaacagacaaggttgctattatcaatgatgcaattcgcatggtgaatcaagcaagagatgaagcgcagaaactaaaggacttgaactcaagcctccaggagaaaatcaaggagttgaaggatgagaagaacgagctgcgtgatgagaaacagaagcttaaggtcgagaaggagagaatcgatcagcaactgaaagctattaagacacagcctcagcctcaaccttgtttcttaccaaatccgcaaacactctctcaagctcaagctcctggaagcaagcttgtccctttcacaacttatcccggctttgcaatgtggcaattcatgcctcctgctgctgttgatacctcacaggaccatgtccttcgtcctccagttgcttaaagctgctgcttctctctactactattaacggttctgtaagattacttcttacgcgcttttttctgatgtaatgattctcacattctgtgattggtgacatagtccactgcaacttaaaatgtaaaattgaaataagcttgcactaaaaatcaaatctcattgtgcaaaaagttggataatttggaaatcattgttttacagattgtggattcagaggaatatgtaaatgtgtaggaagtttctttgaat

SEQ ID NO: 7844 - protein, 267 aa, Arabidopsis thaliana
HYTISLFSSVFPHIVSTFPFFRFDPLFSKETIFSSRRGIRRMVSPENTNWLSDYPLIEGAFSDQNPTFPWQIDGSATVSVEVDGFLCDADVIKEPSSRKRIKTESCTGSNSKACREKQRRDRLNDKFTELSSVLEPGRTPKTDKVAIINDAIRMVNQARDEAQKLKDLNSSLQEKIKELKDEKNELRDEKQKLKVEKERIDQQLKAIKTQPQPQPCFLPNPQTLSQAQAPGSKLVPFTTYPGFAMWQFMPPAAVDTSQDHVLRPPVA

SEQ ID NO: 7845 - protein, 226 aa, Arabidopsis thaliana
MVSPENTNWLSDYPLIEGAFSDQNPTFPWQIDGSATVSVEVDGFLCDADVIKEPSSRKRIKTESCTGSNSKACREKQRRDRLNDKFTELSSVLEPGRTPKTDKVAIINDAIRMVNQARDEAQKLKDLNSSLQEKIKELKDEKNELRDEKQKLKVEKERIDQQLKAIKTQPQPQPCFLPNPQTLSQAQAPGSKLVPFTTYPGFAMWQFMPPAAVDTSQDHVLRPPVA

SEQ ID NO: 7846 - DNA, 2375 bp, Arabidopsis thaliana
atcttccttaaaacaaccacaacgtcactttcttcccggataattgaaatcggtgatcggaatccctagaaatgtcggataatcgtgcactccgacgagctcatgttctcgccaatcacatactccaatcaaatcctccatcttcgaacccgtccctgtcgcgcgagttatgtttgcagtactctccaccggagctcaacgagagctatggattcgatgtcaaggagatgagaaaattacttgacggacacaacgtggtggatcgggactggatttatggactcatgatgcagagcaatctgtttaatcggaaggagagaggaggtaagattttcgtgtcgccggattacaatcagacgatggagcagcagcgtgagatcacaatgaaacggatctggtacttgcttgagaatggggttttcaaaggatggttgacggagacaggtcctgaggccgagctcaggaaattagctctgcttgaggtttgcgggatttatgatcactccgtctccatcaaagttggtgtgcatttcttcctgtggggtaatgctgtaaagttttttggaacaaagcgtcaccatgaaaagtggctgaagaacaccgaagattatgttgtcaagggctgttttgctatgactgagctaggccatggaagtaatgtacggggaattgaaacagtgacaacttatgacccaaaaactgaagagtttgtgataaatactccttgtgaatctgctcagaagtattggattggtggggcagctaatcatgcaacccacacaattgtgttttcacagcttcatatcaacggaaccaaccagggggtccatgcctttatcgcccaaatcagggatcaagatggcagcatatgtccaaatatccgcattgctgactgtggacacaaaattggtctaaatggtgttgacaatggccggatctggtttgataatcttcgaattccaagagagaatttgttgaatgcagttgctgatgtttcgtctgatgggaagtatgttagctcaattaaagatcctgatcagagatttggagcattcatggcccctttgacttctggccgagtcacaattgcatcaagtgcaatttattctgcaaaggtcggattatctattgctataaggtactcattatcgagaagagccttctctgttacagctaatggtcctgaagtcctcctccttgattacccaagccatcaaaggcgactgctaccactcctagcaaagacatatgctatgagttttgctgcaaatgaattgaagatgatttacgtgaagagaacaccggagaccaacaaagccatccacgttgtttcaagtgggttcaaagctgttctcacctggcacaatatgcacacacttcaggaatgtcgagaagctgtcggagggcaaggtgtgaaaacagaaaatctagttggtcagttgaaaggtgaatttgatgtgcagactacatttgagggtgacaataatgtattgatgcagcaggtgagcaaggcgcttttcgctgaatatgtatcgtgtaagaagagaaacaaacctttcaagggactgggattggagcacatgaacagtccacgtcctgtattaccgactcaactcacatcatcaaccctcagatgcagccaattccagacaaatgtgttctgcttaagagagcgagatcttctggagcaatttacttctgaagttgcacagcttcaagggagaggagaaagtcgagaattctctttcctcctgagtcatcaacttgctgaagacttaggtaaagctttcacagagaaagcaatacttcaaaccattttggatgctgaggcaaaactacctactggctcagtaaaggatgtgttgggtcttgtaagatcaatgtacgcattgatcagcttggaagaagatccatcgttgctgcgatatggttacctatctcaggataatgttggagatgtgaggagagaagtttcaaagctctgtggagagcttagaccacacgcgcttgcactcgtcacttcattcggcattccagactccttcttgagtccaattgcattcaactgggtcgaagccaatgcttggtcttcagtttagttacctgctagtaacaatctcttccataattcccatatatctcttataaaagttatgtttccacaatatctacagaaactgttgtaagctcgtcataataaaagggtatatatgatatgtatccagggtttattctttacttaaactggtccaaacaaaaatgtttggtaataatttcaaattcttataataattgttattattatgattcttgattggtttgagttgtggataaatttttttgagtacttaatttgtaattcattcaattttcac

SEQ ID NO: 7847 - protein, 675 aa, Arabidopsis thaliana
MSDNRALRRAHVLANHILQSNPPSSNPSLSRELCLQYSPPELNESYGFDVKEMRKLLDGHNVVDRDWIYGLMMQSNLFNRKERGGKIFVSPDYNQTMEQQREITMKRIWYLLENGVFKGWLTETGPEAELRKLALLEVCGIYDHSVSIKVGVHFFLWGNAVKFFGTKRHHEKWLKNTEDYVVKGCFAMTELGHGSNVRGIETVTTYDPKTEEFVINTPCESAQKYWIGGAANHATHTIVFSQLHINGTNQGVHAFIAQIRDQDGSICPNIRIADCGHKIGLNGVDNGRIWFDNLRIPRENLLNAVADVSSDGKYVSSIKDPDQRFGAFMAPLTSGRVTIASSAIYSAKVGLSIAIRYSLSRRAFSVTANGPEVLLLDYPSHQRRLLPLLAKTYAMSFAANELKMIYVKRTPETNKAIHVVSSGFKAVLTWHNMHTLQECREAVGGQGVKTENLVGQLKGEFDVQTTFEGDNNVLMQQVSKALFAEYVSCKKRNKPFKGLGLEHMNSPRPVLPTQLTSSTLRCSQFQTNVFCLRERDLLEQFTSEVAQLQGRGESREFSFLLSHQLAEDLGKAFTEKAILQTILDAEAKLPTGSVKDVLGLVRSMYALISLEEDPSLLRYGYLSQDNVGDVRREVSKLCGELRPHALALVTSFGIPDSFLSPIAFNWVEANAWSSV

SEQ ID NO: 7848 - protein, 623 aa, Arabidopsis thaliana
MRKLLDGHNVVDRDWIYGLMMQSNLFNRKERGGKIFVSPDYNQTMEQQREITMKRIWYLLENGVFKGWLTETGPEAELRKLALLEVCGIYDHSVSIKVGVHFFLWGNAVKFFGTKRHHEKWLKNTEDYVVKGCFAMTELGHGSNVRGIETVTTYDPKTEEFVINTPCESAQKYWIGGAANHATHTIVFSQLHINGTNQGVHAFIAQIRDQDGSICPNIRIADCGHKIGLNGVDNGRIWFDNLRIPRENLLNAVADVSSDGKYVSSIKDPDQRFGAFMAPLTSGRVTIASSAIYSAKVGLSIAIRYSLSRRAFSVTANGPEVLLLDYPSHQRRLLPLLAKTYAMSFAANELKMIYVKRTPETNKAIHVVSSGFKAVLTWHNMHTLQECREAVGGQGVKTENLVGQLKGEFDVQTTFEGDNNVLMQQVSKALFAEYVSCKKRNKPFKGLGLEHMNSPRPVLPTQLTSSTLRCSQFQTNVFCLRERDLLEQFTSEVAQLQGRGESREFSFLLSHQLAEDLGKAFTEKAILQTILDAEAKLPTGSVKDVLGLVRSMYALISLEEDPSLLRYGYLSQDNVGDVRREVSKLCGELRPHALALVTSFGIPDSFLSPIAFNWVEANAWSSV

SEQ ID NO: 7849 - protein, 604 aa, Arabidopsis thaliana
MMQSNLFNRKERGGKIFVSPDYNQTMEQQREITMKRIWYLLENGVFKGWLTETGPEAELRKLALLEVCGIYDHSVSIKVGVHFFLWGNAVKFFGTKRHHEKWLKNTEDYVVKGCFAMTELGHGSNVRGIETVTTYDPKTEEFVINTPCESAQKYWIGGAANHATHTIVFSQLHINGTNQGVHAFIAQIRDQDGSICPNIRIADCGHKIGLNGVDNGRIWFDNLRIPRENLLNAVADVSSDGKYVSSIKDPDQRFGAFMAPLTSGRVTIASSAIYSAKVGLSIAIRYSLSRRAFSVTANGPEVLLLDYPSHQRRLLPLLAKTYAMSFAANELKMIYVKRTPETNKAIHVVSSGFKAVLTWHNMHTLQECREAVGGQGVKTENLVGQLKGEFDVQTTFEGDNNVLMQQVSKALFAEYVSCKKRNKPFKGLGLEHMNSPRPVLPTQLTSSTLRCSQFQTNVFCLRERDLLEQFTSEVAQLQGRGESREFSFLLSHQLAEDLGKAFTEKAILQTILDAEAKLPTGSVKDVLGLVRSMYALISLEEDPSLLRYGYLSQDNVGDVRREVSKLCGELRPHALALVTSFGIPDSFLSPIAFNWVEANAWSSV

SEQ ID NO: 7850 - DNA, 576 bp, Arabidopsis thaliana
aaggattcgcttattaggtttttttgagttttcgtctccgttttctgaaggcaactgctaatttcttccaccggacgattcgacaaaaatggtgaaaggacgccaaggagaacgtgtcagactctatgtcaggggaaccatacttggctacaaaaggtcgaagtcaaaccagtatcccaacacgtcactagtccaagtcgagggagttaacaccactgaggaagtgtcatggtacaaaggtaaaaggatggcttacatctacaaagccaagaccaagaagaacggtagtcactaccgatgcatttggggcaaagtcacaaggcctcacggtaacagtggcgttgttcgagccaaattcacatcaaacttgcctcctaaatcaatgggatctcgagttcgagtgtttatgtatccgagtaacatttaaagcagtgtgtactcgtcatcaagtggtttattatctgcaagcctttgtttatggaccttgtttattatttgactctttatcctgaaccttttttggagttaacaattttggttaaaatgagcctttttgataagtcgagttcacaagtc

SEQ ID NO: 7851 - protein, 112 aa, Arabidopsis thaliana
MVKGRQGERVRLYVRGTILGYKRSKSNQYPNTSLVQVEGVNTTEEVSWYKGKRMAYIYKAKTKKNGSHYRCIWGKVTRPHGNSGVVRAKFTSNLPPKSMGSRVRVFMYPSNI

SEQ ID NO: 7852 - protein, 59 aa, Arabidopsis thaliana
MAYIYKAKTKKNGSHYRCIWGKVTRPHGNSGVVRAKFTSNLPPKSMGSRVRVFMYPSNI

SEQ ID NO: 7853 - DNA, 1488 bp, Arabidopsis thaliana
atgaagcaaagtgagataaataataacacagttccagggaatgatacagagaccactggttcaaagcttgatcagctatctcgtgctgttccgcttggccttgatgagttcaagagcagagcgtccaattctagagacaaatctttgtcaggccaagtaactggcgttattcataggatggagcctggtgggaaagagtacaattatgcagctgcttcaaaaggtgcaaaggtcttatcttctaacaaggaagcaaaaggagcttcaagcatcatatgccgggacaaagacaagtatctccgaaacccgtgttctactgaagggaagttcgttgtcatagaactttcagaagaaacgttggtgaacacaatcaagattgcaaatttcgagcattactcttccaatctgaaggattttgagattttggggaccttggtttacccaactgatacgtgggttcatctagggaatttcacggctttaaacatgaagcacgagcagaactttacatttgcagatcccaaatgggtgagatatctaaagctaaacttgctaagccattacggttcagaattctactgcaccttgagtttactagaagtctatggagtggacgctgtggagcgaatgctggaggatttgatatctatccaagacaagaacatattgaaactccaagaaggagacactgagcagaaagagaagaagacaatgcaagcaaaagagtccttcgaaagcgatgaagacaagagtaaacagaaggagaaggaacaagaagcctcaccagagaatgcggttgtgaaagatgaagtatcacttgagaaaagaaagctgccagatccggtggaagagataaaacatcaaccaggaagcagaatgccgggggacactgtcttgaagatactgatgcagaagataaggtcgctggacgtgagcttatcagttcttgagagttacttggaggaacggagcttgaaatacgggatgatattcaaggagatggacctggaggcgagcaagagagagaaggaggtggagactatgagactagaggtagaaggaatgaaggagagggaagagaatacgaagaaagaggcgatggagatgagaaagtggcggatgagagtggagacagagcttgagaaggctgagaatgagaaagagaaagtgaaggagaggttagagcaagtgttggaaagactggagtggatggagaagaaaggtgtggttgtgttcacaatctgtgtcgggtttgggactatagcagttgtagccgtggtttttggtatggggatagttcgagcagagaagcaaggtggcttggcttggcttctgttattgataagctccacattcgttatgttcattttgtcactttgatgagagaagagttctcagttttggtctttctttttgttttctagtttttttcttactgtagagttagctgagtcttctttatacccaataaaactatagaagttacct

SEQ ID NO: 7854 - protein, 459 aa, Arabidopsis thaliana
MKQSEINNNTVPGNDTETTGSKLDQLSRAVPLGLDEFKSRASNSRDKSLSGQVTGVIHRMEPGGKEYNYAAASKGAKVLSSNKEAKGASSIICRDKDKYLRNPCSTEGKFVVIELSEETLVNTIKIANFEHYSSNLKDFEILGTLVYPTDTWVHLGNFTALNMKHEQNFTFADPKWVRYLKLNLLSHYGSEFYCTLSLLEVYGVDAVERMLEDLISIQDKNILKLQEGDTEQKEKKTMQAKESFESDEDKSKQKEKEQEASPENAVVKDEVSLEKRKLPDPVEEIKHQPGSRMPGDTVLKILMQKIRSLDVSLSVLESYLEERSLKYGMIFKEMDLEASKREKEVETMRLEVEGMKEREENTKKEAMEMRKWRMRVETELEKAENEKEKVKERLEQVLERLEWMEKKGVVVFTICVGFGTIAVVAVVFGMGIVRAEKQGGLAWLLLLISSTFVMFILSL

SEQ ID NO: 7855 - protein, 400 aa, Arabidopsis thaliana
MEPGGKEYNYAAASKGAKVLSSNKEAKGASSIICRDKDKYLRNPCSTEGKFVVIELSEETLVNTIKIANFEHYSSNLKDFEILGTLVYPTDTWVHLGNFTALNMKHEQNFTFADPKWVRYLKLNLLSHYGSEFYCTLSLLEVYGVDAVERMLEDLISIQDKNILKLQEGDTEQKEKKTMQAKESFESDEDKSKQKEKEQEASPENAVVKDEVSLEKRKLPDPVEEIKHQPGSRMPGDTVLKILMQKIRSLDVSLSVLESYLEERSLKYGMIFKEMDLEASKREKEVETMRLEVEGMKEREENTKKEAMEMRKWRMRVETELEKAENEKEKVKERLEQVLERLEWMEKKGVVVFTICVGFGTIAVVAVVFGMGIVRAEKQGGLAWLLLLISSTFVMFILSL

SEQ ID NO: 7856 - protein, 297 aa, Arabidopsis thaliana
MKHEQNFTFADPKWVRYLKLNLLSHYGSEFYCTLSLLEVYGVDAVERMLEDLISIQDKNILKLQEGDTEQKEKKTMQAKESFESDEDKSKQKEKEQEASPENAVVKDEVSLEKRKLPDPVEEIKHQPGSRMPGDTVLKILMQKIRSLDVSLSVLESYLEERSLKYGMIFKEMDLEASKREKEVETMRLEVEGMKEREENTKKEAMEMRKWRMRVETELEKAENEKEKVKERLEQVLERLEWMEKKGVVVFTICVGFGTIAVVAVVFGMGIVRAEKQGGLAWLLLLISSTFVMFILSL

SEQ ID NO: 7857 - DNA, 511 bp, Arabidopsis thaliana
aacattccttcgatttacgtttattgacaaatgacgaacacggcggcgacaacggaggcgaagatggcgacagagccaccaaagatagtgtggaacgaaggcaaaaggcgattcgagacggaggatcacgaagctttcatagaatacaagatgagaaacaacggtaaagtgatggatctggttcatacttacgttccttcattcaaacgaggattaggtttagcttctcatctctgcgtcgccgctttcgaacacgcctcttctcactccatctccatcatcccttcttgctcctacgtttcggatacgtttcttcctcgaaacccatcatggaagcctctgattcattcagaggtattcaagtctagcatttgaataacacttgtttctcattgtgctctgtaataagtaaatgtcgtttgatgattgtaatcaaaatgagagtaaatgaatattttatgaatcctactgctttcgatagcaatgaatcgaaattgggatttactagctc

SEQ ID NO: 7858 - protein, 114 aa, Arabidopsis thaliana
MTNTAATTEAKMATEPPKIVWNEGKRRFETEDHEAFIEYKMRNNGKVMDLVHTYVPSFKRGLGLASHLCVAAFEHASSHSISIIPSCSYVSDTFLPRNPSWKPLIHSEVFKSSI

SEQ ID NO: 7859 - protein, 103 aa, Arabidopsis thaliana
MATEPPKIVWNEGKRRFETEDHEAFIEYKMRNNGKVMDLVHTYVPSFKRGLGLASHLCVAAFEHASSHSISIIPSCSYVSDTFLPRNPSWKPLIHSEVFKSSI

SEQ ID NO: 7860 - protein, 74 aa, Arabidopsis thaliana
MRNNGKVMDLVHTYVPSFKRGLGLASHLCVAAFEHASSHSISIIPSCSYVSDTFLPRNPSWKPLIHSEVFKSSI

SEQ ID NO: 7861 - DNA, 1539 bp, Arabidopsis thaliana
aaaattcctaaatttcgaacgaatcaaaaaccctaaaaagcttaccgaatttttcttgtggtaatgcagagtcaatgtacctggacataaatggtgtgatgatcaaacagtttagcttcaaagcctctcttctcccattctcttctaatttccgacaaagctccgccaaaatccatcgtcctatcggagccaccatgaccacagtttcgactcagaacgagtctactcaaaaacccgtccaggtggcgaagagattagagaagttcaagactactattttcactcaaatgagcatattggcagttaaacatggagcgatcaatttaggccaaggctttcccaatttcgacggtcctgattttgttaaagaagctgcgatccaagctattaaagatggtaaaaaccagtatgctcgtggatacggcattcctcagctcaactctgctatagctgcgcggtttcgtgaagatacgggtcttgttgttgatcctgagaaagaagttactgttacatctggttgcacagaagccatagctgcagctatgttgggtttaataaaccctggtgatgaagtcattctctttgcaccgttttatgattcctatgaagcaacactctctatggctggtgctaaagtaaaaggaatcactttacgtccaccggacttctccatccctttggaagagcttaaagctgcggtaactaacaagactcgagccatccttatgaacactccgcacaacccgaccgggaagatgttcactagggaggagcttgaaaccattgcatctctctgcattgaaaacgatgtgcttgtgttctcggatgaagtatacgataagcttgcgtttgaaatggatcacatttctatagcttctcttcccggtatgtatgaaagaactgtgaccatgaattccctgggaaagactttctctttaaccggatggaagatcggctgggcgattgcgccgcctcatctgacttggggagttcgacaagcacactcttacctcacattcgccacatcaacaccagcacaatgggcagccgttgcagctctcaaggcaccagagtcttacttcaaagagctgaaaagagattacaatgtgaaaaaggagactctggttaagggtttgaaggaagtcggatttacagtgttcccatcgagcgggacttactttgtggttgctgatcacactccatttggaatggagaacgatgttgctttctgtgagtatcttattgaagaagttggggtcgttgcgatcccaacgagcgtcttttatctgaatccagaagaagggaagaatttggttaggtttgcgttctgtaaagacgaagagacgttgcgtggtgcaattgagaggatgaagcagaagcttaagagaaaagtctgaagtttgaattagaaagataccttatttttatctagttgtgtaacttcttcttcggttccatttcgggagagactttgatttagcaaagcaaatcaataaagtaaagtttacgttatcaaatgcaataatagtctttagagtc

SEQ ID NO: 7862 - protein, 440 aa, Arabidopsis thaliana
MYLDINGVMIKQFSFKASLLPFSSNFRQSSAKIHRPIGATMTTVSTQNESTQKPVQVAKRLEKFKTTIFTQMSILAVKHGAINLGQGFPNFDGPDFVKEAAIQAIKDGKNQYARGYGIPQLNSAIAARFREDTGLVVDPEKEVTVTSGCTEAIAAAMLGLINPGDEVILFAPFYDSYEATLSMAGAKVKGITLRPPDFSIPLEELKAAVTNKTRAILMNTPHNPTGKMFTREELETIASLCIENDVLVFSDEVYDKLAFEMDHISIASLPGMYERTVTMNSLGKTFSLTGWKIGWAIAPPHLTWGVRQAHSYLTFATSTPAQWAAVAALKAPESYFKELKRDYNVKKETLVKGLKEVGFTVFPSSGTYFVVADHTPFGMENDVAFCEYLIEEVGVVAIPTSVFYLNPEEGKNLVRFAFCKDEETLRGAIERMKQKLKRKV

SEQ ID NO: 7863 - protein, 432 aa, Arabidopsis thaliana
MIKQFSFKASLLPFSSNFRQSSAKIHRPIGATMTTVSTQNESTQKPVQVAKRLEKFKTTIFTQMSILAVKHGAINLGQGFPNFDGPDFVKEAAIQAIKDGKNQYARGYGIPQLNSAIAARFREDTGLVVDPEKEVTVTSGCTEAIAAAMLGLINPGDEVILFAPFYDSYEATLSMAGAKVKGITLRPPDFSIPLEELKAAVTNKTRAILMNTPHNPTGKMFTREELETIASLCIENDVLVFSDEVYDKLAFEMDHISIASLPGMYERTVTMNSLGKTFSLTGWKIGWAIAPPHLTWGVRQAHSYLTFATSTPAQWAAVAALKAPESYFKELKRDYNVKKETLVKGLKEVGFTVFPSSGTYFVVADHTPFGMENDVAFCEYLIEEVGVVAIPTSVFYLNPEEGKNLVRFAFCKDEETLRGAIERMKQKLKRKV

SEQ ID NO: 7864 - protein, 400 aa, Arabidopsis thaliana
MTTVSTQNESTQKPVQVAKRLEKFKTTIFTQMSILAVKHGAINLGQGFPNFDGPDFVKEAAIQAIKDGKNQYARGYGIPQLNSAIAARFREDTGLVVDPEKEVTVTSGCTEAIAAAMLGLINPGDEVILFAPFYDSYEATLSMAGAKVKGITLRPPDFSIPLEELKAAVTNKTRAILMNTPHNPTGKMFTREELETIASLCIENDVLVFSDEVYDKLAFEMDHISIASLPGMYERTVTMNSLGKTFSLTGWKIGWAIAPPHLTWGVRQAHSYLTFATSTPAQWAAVAALKAPESYFKELKRDYNVKKETLVKGLKEVGFTVFPSSGTYFVVADHTPFGMENDVAFCEYLIEEVGVVAIPTSVFYLNPEEGKNLVRFAFCKDEETLRGAIERMKQKLKRKV

SEQ ID NO: 7865 - DNA, 604 bp, Arabidopsis thaliana
gtcttcaaactataatcattttctcctatctctcgctcaagtcttcttcatcgatcttctatgaagagtgagaacgttaacaaacgtgatgagtatcaacgagtctttagctgctttgacaagagccaccaaggcaaggtatctgtttctacaatcgaaagatgcgtcgacgctattaagtctggcaaacgtgcagtagttgatcaagaagatactacaaatccaaatccagaggagtcgactgatgataaatcgttggagctcgaggacttcgtgaagttggtggaagaaggagaggaggcagacaaggagaaggatttgaaggaagctttcaagttgtatgaagagagtgaaggcatcacaccaaaaagtttgaagaggatgcttagtttgttgggtgagtccaaaagtctcaaggactgcgaggttatgatttcccaattcgatattaatagggatggaattatcaactttgatgagtttagggccatgatgcaataacatattcattagttacaaatatcatttttaatctattatactactcttctttaccaaaggcttgtatgaactctctgaaattaaggtactctctctatctatt

SEQ ID NO: 7866 - protein, 146 aa, Arabidopsis thaliana
MKSENVNKRDEYQRVFSCFDKSHQGKVSVSTIERCVDAIKSGKRAVVDQEDTTNPNPEESTDDKSLELEDFVKLVEEGEEADKEKDLKEAFKLYEESEGITPKSLKRMLSLLGESKSLKDCEVMISQFDINRDGIINFDEFRAMMQ

SEQ ID NO: 7867 - DNA, 970 bp, Arabidopsis thaliana
ataatccccaaagagattttaagaaaaaggtgtaagaaataaacaaccgagttttgagatatggaggagaagaagagcaaagtgatattacatgggacgtggataagcacatactcaaagagggtcgaaatcgctcttaaactcaagggtgtactctacgagtacctcgaagaagatcttcagaacaaaagtgaatcgctgattcaactcaacccggtgcacaagaagattcctgttcttgtccatgatgggaaaccagtggctgaatcacttgtgattcttgaatatatcgatgagacgtggacaaactctcctcgtttcttcccagaggatccttatgaaagggcccaggtccggttctgggtcagctacatcaaccaacaggtgtttgaggtcatgggtcaagtcatgtcccaggagggtgaagctcaagcaaagtctgtagaagaggcaagaaaaagattcaaagttcttgatgagggactcaagaagcatttcccgaataaaaacatcagaaggaatgatgatgttgggcttttggaaatcaccatcattgctactctcggaggctacaaagctcatcgtgaagcaatcggtgtagacataattggtccagtgaacactccgactttatacaactggatagagcgcctgcaagatctaagtgtgataaaagaagtcgaagtgcctcatgatacgttggtgacatttatccagaagtatagacaaaagtgtctccagcaggctgcaaatgcataattagatcaagatgctggtctagtgatgaatcatctggatttaatattgtctcagaggataatagaataagagttagataactatttaaagtaagaaataattccctgagagttgtgtatgaacttatcgtagctattactgtatgataatgaactaaagaaaaccgtttgcggtatctccatgctctatagttgatacgctttgttgttat

SEQ ID NO: 7868 - protein, 232 aa, Arabidopsis thaliana
MEEKKSKVILHGTWISTYSKRVEIALKLKGVLYEYLEEDLQNKSESLIQLNPVHKKIPVLVHDGKPVAESLVILEYIDETWTNSPRFFPEDPYERAQVRFWVSYINQQVFEVMGQVMSQEGEAQAKSVEEARKRFKVLDEGLKKHFPNKNIRRNDDVGLLEITIIATLGGYKAHREAIGVDIIGPVNTPTLYNWIERLQDLSVIKEVEVPHDTLVTFIQKYRQKCLQQAANA

SEQ ID NO: 7869 - protein, 120 aa, Arabidopsis thaliana
MGQVMSQEGEAQAKSVEEARKRFKVLDEGLKKHFPNKNIRRNDDVGLLEITIIATLGGYKAHREAIGVDIIGPVNTPTLYNWIERLQDLSVIKEVEVPHDTLVTFIQKYRQKCLQQAANA

SEQ ID NO: 7870 - protein, 116 aa, Arabidopsis thaliana
MSQEGEAQAKSVEEARKRFKVLDEGLKKHFPNKNIRRNDDVGLLEITIIATLGGYKAHREAIGVDIIGPVNTPTLYNWIERLQDLSVIKEVEVPHDTLVTFIQKYRQKCLQQAANA

SEQ ID NO: 7871 - DNA, 533 bp, Arabidopsis thaliana
tggctttcaccaaccaaacccagaagaaagctcgagatcaatatcgaataaggatcacaaaattagggttttaatttgatagagaagatgaatttcagaagctttgaggagttctggcctttctacatgatgcaacactcgaatccatcgacgcgaaggttgcacttcataggtatcatcgcgagcatcgttgctttgatatgttcgattttgatcaactggtggttcttagctctggtgcctctgcttgggtacggattcgcgtggtatagccacttcttcgtggaagggaatgttccggcgagctttgggcatccgctttggtcgtttctctgcgatctcaagatgtttagtctgatgctcacaggaagcatggagagagagatgaagagacttggtaagaggccattgttgcagctctcttgaagcagcagcagatatctctatagaattgttcttgattcttcttattgcgttctgcgattggattttagactccagtttgtaattacttcatggaatcgttgtttgcg

SEQ ID NO: 7872 - protein, 112 aa, Arabidopsis thaliana
MNFRSFEEFWPFYMMQHSNPSTRRLHFIGIIASIVALICSILINWWFLALVPLLGYGFAWYSHFFVEGNVPASFGHPLWSFLCDLKMFSLMLTGSMEREMKRLGKRPLLQLS

SEQ ID NO: 7873 - protein, 99 aa, Arabidopsis thaliana
MMQHSNPSTRRLHFIGIIASIVALICSILINWWFLALVPLLGYGFAWYSHFFVEGNVPASFGHPLWSFLCDLKMFSLMLTGSMEREMKRLGKRPLLQLS

SEQ ID NO: 7874 - protein, 98 aa, Arabidopsis thaliana
MQHSNPSTRRLHFIGIIASIVALICSILINWWFLALVPLLGYGFAWYSHFFVEGNVPASFGHPLWSFLCDLKMFSLMLTGSMEREMKRLGKRPLLQLS

SEQ ID NO: 7875 - DNA, 704 bp, Arabidopsis thaliana
gttgtcttcagctgtgtacagaatcaagtttccaagagagaaagagagtaaaagcaaattaacaaaggaagactctgattcaccgagaaggttttggcttaaagatgacgaacactcgcgcgatctacgccgtcatcgcgatcctggcgatagtaatctcagccgtggaatcaaccggagacttcggagattcgctagatttcgtgagagccggatcttcatcgctcttctctggatgcacaggatcgatcgcagagtgtatagcggaagaagaagagatggagttcgattcagacataagccggcgtatattagcacagaagaagtacattagctacggtgctatgaggaggaacagtgtgccttgttcacggcgtggtgcgtcgtactacaactgccagcgtggagctcaggcgaatccttacagccgtggatgcagcaccatcactaggtgcaggcgttgaagaagatgagtcacttgaatttcctattttgcccctttctttttgtgtctctgtctctcttctcgattttcatttttttaattatttttattttccgggatatatgggtttgattttacacattgaaaaaaaaacttctactatagtctttgatttgaaaggaaaaaaaacgaaattgcttctttgttttttttttctggttgttgtctatatacataaataaaaaattcaaagttgcgt

SEQ ID NO: 7876 - protein, 119 aa, Arabidopsis thaliana
MTNTRAIYAVIAILAIVISAVESTGDFGDSLDFVRAGSSSLFSGCTGSIAECIAEEEEMEFDSDISRRILAQKKYISYGAMRRNSVPCSRRGASYYNCQRGAQANPYSRGCSTITRCRR

SEQ ID NO: 7877 - protein, 110 aa, Arabidopsis thaliana
LSSAVYRIKFPREKESKSKLTKEDSDSPRRFWLKDDEHSRDLRRHRDPGDSNLSRGINRRLRRFARFRESRIFIALLWMHRIDRRVYSGRRRDGVRFRHKPAYISTEEVH

SEQ ID NO: 7878 - protein, 61 aa, Arabidopsis thaliana
MEFDSDISRRILAQKKYISYGAMRRNSVPCSRRGASYYNCQRGAQANPYSRGCSTITRCRR

SEQ ID NO: 7879 - DNA, 1635 bp, Arabidopsis thaliana
ataaacaaactcgagtgattacaaagaacttataaaccacttatgtggcatactaaaatttaacaaaaaaaaatgttttgcgaaaaataagaagattttgttcatcttttttggtaagatgccagtttagctaaagatatttttcatatataaaaatgacaataaacacattacaaaagacaaaccccacacggctctctctagccaaattacttggccacgaccataaacacaaaacaccgcttagcttctaaaatctgaacatcgagaaaaaatgagttggtggtgggctggcgccatcggagctgccaagaagaaactcgacgaagatgaaccatcacaaagcttcgagagcgtcgctctcatcatcggcgttactggaatcgtcggaaacagcttggcggagattctccctctttccgacacacccggtggtccatggaaagtctacggcgtcgctcgtcgtcctcgtcctacctggaacgccgatcatccgatcgattacatccagtgcgatgtctccgacgccgaagacacaagatccaagctttcccctttaaccgatgtcacacatgtcttctacgtcacctggaccaatcgtgaatcggaaagtgaaaactgtgaagcaaatggctcaatgctccgtaacgttctccaagcgattatcccatacgcgccaaatctccgacatgtttgtctccagacagggacaaagcactaccttggccctttcaccaacgttgacggacctcgtcacgatccaccgttcactgaggatatgccgagattacagatccagaatttctattatacccaagaggatattctgtttgaagagatcaagaagatagaaaccgtgacgtggtctatccacagaccaaacatgatctttgggttctctccttatagtttgatgaacattgttgggactctctgtgtctatgcagcgatatgtaagcatgaagggtctccgttgttgtttcctgggagcaagaaagcttgggaagggttcatgacggcttctgacgcggatttgattgcggagcagcagatttgggcggcggttgatccgtatgcgaagaacgaggcgtttaactgcaacaatgctgatatcttcaagtggaagcatctgtggaagattctagctgagcagtttgggattgaggagtatggatttgaggaagggaagaatttggggttggtggagatgatgaaagggaaagagagagtgtgggaggagatggttaaggagaatcaattgcaagagaagaagcttgaggaagttggtgtgtggtggtttgctgatgttatacttggagttgaaggaatgattgatagtatgaacaagagtaaggaatatggcttccttggtttcaggaactccaacaactcttttatctcttggattgacaagtacaaggcgttcaagatcgtaccttgattccaaaacatacttggatgtttgtttactctggtttcatgtttatgtttctcccaaaatctcagttctttgttgtctaaatgaaataaaagcggtaccatctttttctgttcttttttttaattccatctttagtcttgtaaactctactcttttgggaatagttttcaatttttaaatatcgttacaagttg

SEQ ID NO: 7880 - protein, 388 aa, Arabidopsis thaliana
MSWWWAGAIGAAKKKLDEDEPSQSFESVALIIGVTGIVGNSLAEILPLSDTPGGPWKVYGVARRPRPTWNADHPIDYIQCDVSDAEDTRSKLSPLTDVTHVFYVTWTNRESESENCEANGSMLRNVLQAIIPYAPNLRHVCLQTGTKHYLGPFTNVDGPRHDPPFTEDMPRLQIQNFYYTQEDILFEEIKKIETVTWSIHRPNMIFGFSPYSLMNIVGTLCVYAAICKHEGSPLLFPGSKKAWEGFMTASDADLIAEQQIWAAVDPYAKNEAFNCNNADIFKWKHLWKILAEQFGIEEYGFEEGKNLGLVEMMKGKERVWEEMVKENQLQEKKLEEVGVWWFADVILGVEGMIDSMNKSKEYGFLGFRNSNNSFISWIDKYKAFKIVP

SEQ ID NO: 7881 - protein, 267 aa, Arabidopsis thaliana
MLRNVLQAIIPYAPNLRHVCLQTGTKHYLGPFTNVDGPRHDPPFTEDMPRLQIQNFYYTQEDILFEEIKKIETVTWSIHRPNMIFGFSPYSLMNIVGTLCVYAAICKHEGSPLLFPGSKKAWEGFMTASDADLIAEQQIWAAVDPYAKNEAFNCNNADIFKWKHLWKILAEQFGIEEYGFEEGKNLGLVEMMKGKERVWEEMVKENQLQEKKLEEVGVWWFADVILGVEGMIDSMNKSKEYGFLGFRNSNNSFISWIDKYKAFKIVP

SEQ ID NO: 7882 - protein, 220 aa, Arabidopsis thaliana
MPRLQIQNFYYTQEDILFEEIKKIETVTWSIHRPNMIFGFSPYSLMNIVGTLCVYAAICKHEGSPLLFPGSKKAWEGFMTASDADLIAEQQIWAAVDPYAKNEAFNCNNADIFKWKHLWKILAEQFGIEEYGFEEGKNLGLVEMMKGKERVWEEMVKENQLQEKKLEEVGVWWFADVILGVEGMIDSMNKSKEYGFLGFRNSNNSFISWIDKYKAFKIVP

SEQ ID NO: 7883 - DNA, 1048 bp, Arabidopsis thaliana
atcaacaatacatttgagatatcaatacacctccaaaatatatacaaaaatgaagctttcttgtggtacaagttttgcgttcttgattatgtttctctttgcggcacaatctatgcatgtctatgcgggtagcttccacaaagatgttcagatacattggggtgacggccgtggaaaggtgcgcgacagagatggaaagcttctatctctctcgctcgacaaatcctctggatccggttttcagtccaaccaggagtttctctatggcaaagccgaggttcaaatgaaacttgtccctggtaactcagctggaacagtaacaacattctatcttaagtctccgggaactacgtgggatgagattgatttcgagttcttaggaaacctaagtggtcatccgtatactctccatactaatgtttacacaaaaggctcaggagacaaagaacaacaatttcatctatggttcgacccaactgttaactttcacacttattgcatcacatggaatccccaaaggattatttttacagttgatggaattcctattagagagttcaagaactccgagtcaattggagttccgttcccaacgaagcaaccaatgaggctttacgcgagtctctgggaagccgagcattgggctacaaggggagggttagagaaaacagattggtcaaaggctcctttcaccgctttctacagaaactacaatgttgaaggatgtgtatgggctaatggaaaatcatcttgtcccgcaaattcctcatggttcactcaacaactcgattcaaacggccagacaagaatgaaaggggtacagagtaagtacatggtctacaactattgtaacgacaaaagaaggtttcctcgaggtgttcctgtagagtgcagttaaattgttgattctttgatacatgaataagttacttggcattgccttagtaactcaattgagttcttacatatttttatcattcatttgttgctcatatgtatgcggtgtttgtgtaagatgattttaagaagtaataaaaataaattatgg

SEQ ID NO: 7884 - protein, 298 aa, Arabidopsis thaliana
STIHLRYQYTSKIYTKMKLSCGTSFAFLIMFLFAAQSMHVYAGSFHKDVQIHWGDGRGKVRDRDGKLLSLSLDKSSGSGFQSNQEFLYGKAEVQMKLVPGNSAGTVTTFYLKSPGTTWDEIDFEFLGNLSGHPYTLHTNVYTKGSGDKEQQFHLWFDPTVNFHTYCITWNPQRIIFTVDGIPIREFKNSESIGVPFPTKQPMRLYASLWEAEHWATRGGLEKTDWSKAPFTAFYRNYNVEGCVWANGKSSCPANSSWFTQQLDSNGQTRMKGVQSKYMVYNYCNDKRRFPRGVPVECS

SEQ ID NO: 7885 - protein, 282 aa, Arabidopsis thaliana
MKLSCGTSFAFLIMFLFAAQSMHVYAGSFHKDVQIHWGDGRGKVRDRDGKLLSLSLDKSSGSGFQSNQEFLYGKAEVQMKLVPGNSAGTVTTFYLKSPGTTWDEIDFEFLGNLSGHPYTLHTNVYTKGSGDKEQQFHLWFDPTVNFHTYCITWNPQRIIFTVDGIPIREFKNSESIGVPFPTKQPMRLYASLWEAEHWATRGGLEKTDWSKAPFTAFYRNYNVEGCVWANGKSSCPANSSWFTQQLDSNGQTRMKGVQSKYMVYNYCNDKRRFPRGVPVECS

SEQ ID NO: 7886 - protein, 269 aa, Arabidopsis thaliana
MFLFAAQSMHVYAGSFHKDVQIHWGDGRGKVRDRDGKLLSLSLDKSSGSGFQSNQEFLYGKAEVQMKLVPGNSAGTVTTFYLKSPGTTWDEIDFEFLGNLSGHPYTLHTNVYTKGSGDKEQQFHLWFDPTVNFHTYCITWNPQRIIFTVDGIPIREFKNSESIGVPFPTKQPMRLYASLWEAEHWATRGGLEKTDWSKAPFTAFYRNYNVEGCVWANGKSSCPANSSWFTQQLDSNGQTRMKGVQSKYMVYNYCNDKRRFPRGVPVECS

SEQ ID NO: 7887 - DNA, 920 bp, Arabidopsis thaliana
atctctcttgtcatcacaacaaaattttgccttggcttgcgaaaaaaggagatcaagtgatcatatggaggaagaacaagtaagagcaattaagataatagtatttggagtcatctcatggggtgtggccttcattctcacccggagaatcttctcaagctactcattcagcttcagcaaccgtcttctctccacggctcacgcgactatcgctgtcactttagcaacactctctgttcaagatttgtcttgccctgtttgtccccttgcttctaagccatctcataaacagatggacgtgatggcgttttcgttgtcgtacatgatctacgatctaatatgttgtcatttcgatcaagtgtttagcattgataacgcggttcatcatttcgttagcattcttggttttatagctggacttgcataccaaaagtctggatctgagatcgtggctacactgtgggtagcagagatatcaagtccttttttccaccttagggagattctcaaagagattggatacaaagacaccaaactcaatctagctgccgatgtgtgttttgccactatattcacattggcgagaattgtgtgtggacctttcctcgtttacgtcagtctatcagctgataatcccatcttcatcaaggcaatgggatcaggattacaactcgtgagcatcttttggttctataaaattttcgggatgatgagatataaactttttaagaagccaaagtcaaacaaaaagtctacttagcttagttagagatatacaaaagctgattcaatccaaatatttttttcttatttttatttatggtcatttatctattttattaaaatgtattaataaaataacgaaaacaaaaaggaaagagacatacatgtgagacaaccgactttgaaatgtcttgttt

SEQ ID NO: 7888 - protein, 252 aa, Arabidopsis thaliana
SLLSSQQNFALACEKRRSSDHMEEEQVRAIKIIVFGVISWGVAFILTRRIFSSYSFSFSNRLLSTAHATIAVTLATLSVQDLSCPVCPLASKPSHKQMDVMAFSLSYMIYDLICCHFDQVFSIDNAVHHFVSILGFIAGLAYQKSGSEIVATLWVAEISSPFFHLREILKEIGYKDTKLNLAADVCFATIFTLARIVCGPFLVYVSLSADNPIFIKAMGSGLQLVSIFWFYKIFGMMRYKLFKKPKSNKKST

SEQ ID NO: 7889 - protein, 231 aa, Arabidopsis thaliana
MEEEQVRAIKIIVFGVISWGVAFILTRRIFSSYSFSFSNRLLSTAHATIAVTLATLSVQDLSCPVCPLASKPSHKQMDVMAFSLSYMIYDLICCHFDQVFSIDNAVHHFVSILGFIAGLAYQKSGSEIVATLWVAEISSPFFHLREILKEIGYKDTKLNLAADVCFATIFTLARIVCGPFLVYVSLSADNPIFIKAMGSGLQLVSIFWFYKIFGMMRYKLFKKPKSNKKST

SEQ ID NO: 7890 - protein, 155 aa, Arabidopsis thaliana
MDVMAFSLSYMIYDLICCHFDQVFSIDNAVHHFVSILGFIAGLAYQKSGSEIVATLWVAEISSPFFHLREILKEIGYKDTKLNLAADVCFATIFTLARIVCGPFLVYVSLSADNPIFIKAMGSGLQLVSIFWFYKIFGMMRYKLFKKPKSNKKST

SEQ ID NO: 7891 - DNA, 779 bp, Arabidopsis thaliana
atccgaaacacgatttcggaggaagcttcgattctacctattttcagatctgaaatagttgtgtttgagaagcgggattggtgatcggagctggaatttggttggtaatcggaggtcagagagaagtcaacggatatgccggaggaagaatcgatagatatcaaattcaggttgtacgatggctccgatatcgggccttttcggtattctgcggcttctactgttgactttttgaagcagagggtcgtctctgattggcccaaaggcaaaacagttgttccaaaggggataaacgaagtgaagctgataacgtcgggtaagatcttggagaacaacaagactgttgggcagtgtaagacaccatttggagatattgctggtggagtcattgtgatgcatgttgttgtacagccttctctagctaaatccaaaacagagaagaaggttgataaagcaccaaaggcagtaatctgcacatgcaccattttgtgaagggaggaagaccaatgtatctatcatacacatcgtttcaattcttccggtacagaagaaaacaaaatcaaaaaaagaaagctaaaagtaaagtaaagcttccctttcagctgtggagttatttatcatctttgaatgtgtagaaaatgaactataaattcttttcaagtaactctttgtcccttatttgttttttcttcttactttcccaatgtatggaagctgtataggttactaggtccattacgttacgtgtgatgaagataattatatatctatctattttt

SEQ ID NO: 7892 - protein, 118 aa, Arabidopsis thaliana
MPEEESIDIKFRLYDGSDIGPFRYSAASTVDFLKQRVVSDWPKGKTVVPKGINEVKLITSGKILENNKTVGQCKTPFGDIAGGVIVMHVVVQPSLAKSKTEKKVDKAPKAVICTCTIL

SEQ ID NO: 7893 - DNA, 2956 bp, Arabidopsis thaliana
gagcttatccgcctgaaacttatttctcagtatccaaaacgatggcgaagaagacacttcgctgaagcttttttttccaaaaaaatttcttagtgtcgtcaatggctttggctccacttaattttacggaaatgccactgagaagctctcttcctctgacctctagctctcgctattgttcctctccttcgcttcacgcattgctcttctattcgttgggtgtgaaaccctcgcgtcaacaaattgttcggccattctcttcgctgcgtacaagcgagcgtagcaacaacaggagcaataacaatcgtcgattagatcaacgtaatcataaacctactcctccttggatagataagtggcctccgtcatcctccggagctggcggtgatcatgccgggaagaaaggtggtgaaaacaacggcggagatagaattcggtctgcggaggaggaagcggaagcgaaacttcggtatttggagaaggataaaggacaaaacgcgattgagaggattgttcttcggctacggaatttaggattaggttcggatgatgaggacgatgtggaagatgacgagggaggtggaattaacggcggagatgtgaagccggtgactggagaagagagattgggggatttgttgaagagagagtgggtgagacctgatatgatgcttgctgagggagaagagagtgaggaagaggatgaggtattattgccatgggagaaaaatgaggaagagcaggcggcggagagagtagtaggagaaggaggagtggcggtgatgcagaagaggagagctagagctccatcactggcggagctcaccgttgaggattctgagttacggcggttaaggagggatggaatgtatctgagggttaggatcaatataccaaaagctgggctaacgcaggcagtgatggagaagatttatgatacttggaggaaagaagagcttgtgaggctaaagttccacgaagtgcttgctcgtgacatgaagacggcccatgagattgttgagcgtcgaactggtggaatggtgatatggagggccggaagtgtaatggtggtttatcgtggacttgactataaaggacctcctgtgatctctaatcaaatggccggtcctaaagagactctttttgtcccagatgtatcttctgctggcgatgaagcaacaaatgccaaagataaccaaagtgcacctttggtaatcaaagatccgatcatcaagaaccctattcgcaaagagaatatgacagaagaagaagttgaatttaacagtctattagacagcttaggtccacgttttcaagagtggtggggtactggggtactacctgtggacgctgacttactacctcctacaattcctggttataaaacacctttcaggcttcttcctactgggatgagatcaaatttgaccaatgccgaaatgacaaatctcaggaagattggtaaaactctcccatgccattttgctcttggtaggaacagaaatcaccaaggattggcagctgcaatactccagatctgggagaaaagtctaattgcaaagatcgctgtgaagcgaggtatccagaatacaaataacaaactaatggcggatgaagtgaagacattgacagggggtgtcttgctgctcagaaataagtattacattgtaatatatcgtgggaaggacttccttccttcaagtgtggcagctactttagcagaaagacaagaattaacgaaagagattcaagatgtcgaagagagggtaagaaatcgtgagattgaggctgttcagcctgttggtgacaaagtaccagcagaagctggcactctggccgagttttatgaggctcaagcccgatgggggaaggaaataactccagaccatcgtgaaaagatgattgaagaagcttcaagggttgcaaatgctagagttgttaaacgaatacaacacaaactaaaccttgcccaatcgaagtttcaaagagcagagaaactgttgtccaaaatagaagcctctatgattccaaatggacctgattatgatcaagaggtcatctccgaggaagaaagagctatgttccggaaagtgggactgaaaatgaaggcatacttacccataggtatccgtggtgtatttgatggagtcattgagaacatgcatctgcattggaaacacagagaattggtgaagcttatatcaaaacagaagaaccaagcatttgttgaggagacagcccggttactagaatacgagagtggtggagttcttgtggcaatagaaaaggttcctaaaggatttgcgcttatttattaccgtgggaagaattacaggagacccattagcttgagaccaaggaatcttctgacaaaagcaaaagcattgaaacgttccattgcaatgcaacgccacgaggcacttagtcagcatatttctgaactggagagaacaatagagcaaatgcaaagccaactcacttcgaaaaacccgtcatacagtgaatcagaatgggagaacgatgaggatgatgatgatgatgaagaagaagagaaagatgatgtggaggataatgagagtgattgggatgaaactgatggcgaatctgcaatttctagtatcgaagaagctgatatgtcatcgcgctaagctgataaagtttttaacacagagattgtcctatctcaggaggttgaagctgacaatgatgtcagaggaatggttctggttctggttctgtctatccagtggtggtaaaagaaaagcaagtgatgattcatcatcaacgtgggtaaggtttaagtttcctgtcgcagagattacagaatctacgagctcagaaagcagaacctatctgtatttcaggggagaaaaaaataagcatctatagtttatatacattgtaagttttgccaatgtatcattattaaaaaatatatatatatcaattaacattc

SEQ ID NO: 7894 - protein, 848 aa, Arabidopsis thaliana
MALAPLNFTEMPLRSSLPLTSSSRYCSSPSLHALLFYSLGVKPSRQQIVRPFSSLRTSERSNNRSNNNRRLDQRNHKPTPPWIDKWPPSSSGAGGDHAGKKGGENNGGDRIRSAEEEAEAKLRYLEKDKGQNAIERIVLRLRNLGLGSDDEDDVEDDEGGGINGGDVKPVTGEERLGDLLKREWVRPDMMLAEGEESEEEDEVLLPWEKNEEEQAAERVVGEGGVAVMQKRRARAPSLAELTVEDSELRRLRRDGMYLRVRINIPKAGLTQAVMEKIYDTWRKEELVRLKFHEVLARDMKTAHEIVERRTGGMVIWRAGSVMVVYRGLDYKGPPVISNQMAGPKETLFVPDVSSAGDEATNAKDNQSAPLVIKDPIIKNPIRKENMTEEEVEFNSLLDSLGPRFQEWWGTGVLPVDADLLPPTIPGYKTPFRLLPTGMRSNLTNAEMTNLRKIGKTLPCHFALGRNRNHQGLAAAILQIWEKSLIAKIAVKRGIQNTNNKLMADEVKTLTGGVLLLRNKYYIVIYRGKDFLPSSVAATLAERQELTKEIQDVEERVRNREIEAVQPVGDKVPAEAGTLAEFYEAQARWGKEITPDHREKMIEEASRVANARVVKRIQHKLNLAQSKFQRAEKLLSKIEASMIPNGPDYDQEVISEEERAMFRKVGLKMKAYLPIGIRGVFDGVIENMHLHWKHRELVKLISKQKNQAFVEETARLLEYESGGVLVAIEKVPKGFALIYYRGKNYRRPISLRPRNLLTKAKALKRSIAMQRHEALSQHISELERTIEQMQSQLTSKNPSYSESEWENDEDDDDDEEEEKDDVEDNESDWDETDGESAISSIEEADMSSR

SEQ ID NO: 7895 - protein, 838 aa, Arabidopsis thaliana
MPLRSSLPLTSSSRYCSSPSLHALLFYSLGVKPSRQQIVRPFSSLRTSERSNNRSNNNRRLDQRNHKPTPPWIDKWPPSSSGAGGDHAGKKGGENNGGDRIRSAEEEAEAKLRYLEKDKGQNAIERIVLRLRNLGLGSDDEDDVEDDEGGGINGGDVKPVTGEERLGDLLKREWVRPDMMLAEGEESEEEDEVLLPWEKNEEEQAAERVVGEGGVAVMQKRRARAPSLAELTVEDSELRRLRRDGMYLRVRINIPKAGLTQAVMEKIYDTWRKEELVRLKFHEVLARDMKTAHEIVERRTGGMVIWRAGSVMVVYRGLDYKGPPVISNQMAGPKETLFVPDVSSAGDEATNAKDNQSAPLVIKDPIIKNPIRKENMTEEEVEFNSLLDSLGPRFQEWWGTGVLPVDADLLPPTIPGYKTPFRLLPTGMRSNLTNAEMTNLRKIGKTLPCHFALGRNRNHQGLAAAILQIWEKSLIAKIAVKRGIQNTNNKLMADEVKTLTGGVLLLRNKYYIVIYRGKDFLPSSVAATLAERQELTKEIQDVEERVRNREIEAVQPVGDKVPAEAGTLAEFYEAQARWGKEITPDHREKMIEEASRVANARVVKRIQHKLNLAQSKFQRAEKLLSKIEASMIPNGPDYDQEVISEEERAMFRKVGLKMKAYLPIGIRGVFDGVIENMHLHWKHRELVKLISKQKNQAFVEETARLLEYESGGVLVAIEKVPKGFALIYYRGKNYRRPISLRPRNLLTKAKALKRSIAMQRHEALSQHISELERTIEQMQSQLTSKNPSYSESEWENDEDDDDDEEEEKDDVEDNESDWDETDGESAISSIEEADMSSR

SEQ ID NO: 7896 - protein, 660 aa, Arabidopsis thaliana
MMLAEGEESEEEDEVLLPWEKNEEEQAAERVVGEGGVAVMQKRRARAPSLAELTVEDSELRRLRRDGMYLRVRINIPKAGLTQAVMEKIYDTWRKEELVRLKFHEVLARDMKTAHEIVERRTGGMVIWRAGSVMVVYRGLDYKGPPVISNQMAGPKETLFVPDVSSAGDEATNAKDNQSAPLVIKDPIIKNPIRKENMTEEEVEFNSLLDSLGPRFQEWWGTGVLPVDADLLPPTIPGYKTPFRLLPTGMRSNLTNAEMTNLRKIGKTLPCHFALGRNRNHQGLAAAILQIWEKSLIAKIAVKRGIQNTNNKLMADEVKTLTGGVLLLRNKYYIVIYRGKDFLPSSVAATLAERQELTKEIQDVEERVRNREIEAVQPVGDKVPAEAGTLAEFYEAQARWGKEITPDHREKMIEEASRVANARVVKRIQHKLNLAQSKFQRAEKLLSKIEASMIPNGPDYDQEVISEEERAMFRKVGLKMKAYLPIGIRGVFDGVIENMHLHWKHRELVKLISKQKNQAFVEETARLLEYESGGVLVAIEKVPKGFALIYYRGKNYRRPISLRPRNLLTKAKALKRSIAMQRHEALSQHISELERTIEQMQSQLTSKNPSYSESEWENDEDDDDDEEEEKDDVEDNESDWDETDGESAISSIEEADMSSR

SEQ ID NO: 7897 - DNA, 1333 bp, Arabidopsis thaliana
acactatcaatctacgatcatatatctttcatttcatcatcatggaccacaaaatgtcaatgtatttgtttgtgtcttacctagcaatctttactcttttcttcaaaggctttgtctcctcgtttccttcgggatataacaatggttacaacaatggtcacggacatggactaactagcaatctcaactatcgattctatgaccggtcttgtccgcgtcttcaaacgattgttaagtccggagtttggagagcttttaaagatgattctcgaatcgctgcatctcttcttcgactccatttccacgattgttttgtcaatggatgtgatggatctatacttctgaacgattcagaggatttcaaaggagagaagaacgctcagccaaaccgaaactcagtccgtggattcgaagtcattgaagacattaaatctgatatcgaaagttcttgtcccttaacagtttcatgcgctgacatagttgctctcgcggctagagaagctgtcgtcctcactggaggaccgttttggcccgtgcctttgggacgaagggactcattaacggcgagtgagcaagcggcgaatacaaatctgccatctccgtttgaggcgttggagaatataacagccaagttcgtgacccttggactcgacctcaaggacgttgttgtcctctcaggagcacatactataggatttgctcaatgtttcgtgatcaagcatagactcttcaacttcaagggctcaggccagcctgacccaaacctagccgcttcctcagcacttctctctaagctaaaggacacgtgtcctaacgtggactcctcagactctaagctcgctgctcttgacgcagctagctcagtcaagtttgacaatgcttactacgtgaacttaatgaacaacataggactgttggattctgatcaaaccctaatgacagatcctacggctgccgccttggtgaagtcgtacagcgagaatccgtacttgttctcgagggatttcgcagtttcaatggttaaaatggggaatatcggagttatgaccggaagtgatggagtaattcgaggaaaatgtggatttccaggttaagttatatatagactcttcacaaaatccaaatcagtctattatatatctagagctaatctagctttaatgaggaatcaaataaaccaaagtctatgaataaaatatgttttatatatatggtgtaaaagcgtccttatgtatcaatatatatatatatggatcccataaacaaaaatacttggacttgtatgtgtgttacgtttgtgtgtaatggaaaatgtatttgtctttgtattttt

SEQ ID NO: 7898 - protein, 363 aa, Arabidopsis thaliana
TINLRSYIFHFIIMDHKMSMYLFVSYLAIFTLFFKGFVSSFPSGYNNGYNNGHGHGLTSNLNYRFYDRSCPRLQTIVKSGVWRAFKDDSRIAASLLRLHFHDCFVNGCDGSILLNDSEDFKGEKNAQPNRNSVRGFEVIEDIKSDIESSCPLTVSCADIVALAAREAVVLTGGPFWPVPLGRRDSLTASEQAANTNLPSPFEALENITAKFVTLGLDLKDVVVLSGAHTIGFAQCFVIKHRLFNFKGSGQPDPNLAASSALLSKLKDTCPNVDSSDSKLAALDAASSVKFDNAYYVNLMNNIGLLDSDQTLMTDPTAAALVKSYSENPYLFSRDFAVSMVKMGNIGVMTGSDGVIRGKCGFPG

SEQ ID NO: 7899 - protein, 350 aa, Arabidopsis thaliana
MDHKMSMYLFVSYLAIFTLFFKGFVSSFPSGYNNGYNNGHGHGLTSNLNYRFYDRSCPRLQTIVKSGVWRAFKDDSRIAASLLRLHFHDCFVNGCDGSILLNDSEDFKGEKNAQPNRNSVRGFEVIEDIKSDIESSCPLTVSCADIVALAAREAVVLTGGPFWPVPLGRRDSLTASEQAANTNLPSPFEALENITAKFVTLGLDLKDVVVLSGAHTIGFAQCFVIKHRLFNFKGSGQPDPNLAASSALLSKLKDTCPNVDSSDSKLAALDAASSVKFDNAYYVNLMNNIGLLDSDQTLMTDPTAAALVKSYSENPYLFSRDFAVSMVKMGNIGVMTGSDGVIRGKCGFPG

SEQ ID NO: 7900 - protein, 346 aa, Arabidopsis thaliana
MSMYLFVSYLAIFTLFFKGFVSSFPSGYNNGYNNGHGHGLTSNLNYRFYDRSCPRLQTIVKSGVWRAFKDDSRIAASLLRLHFHDCFVNGCDGSILLNDSEDFKGEKNAQPNRNSVRGFEVIEDIKSDIESSCPLTVSCADIVALAAREAVVLTGGPFWPVPLGRRDSLTASEQAANTNLPSPFEALENITAKFVTLGLDLKDVVVLSGAHTIGFAQCFVIKHRLFNFKGSGQPDPNLAASSALLSKLKDTCPNVDSSDSKLAALDAASSVKFDNAYYVNLMNNIGLLDSDQTLMTDPTAAALVKSYSENPYLFSRDFAVSMVKMGNIGVMTGSDGVIRGKCGFPG

SEQ ID NO: 7901 - DNA, 630 bp, Arabidopsis thaliana
acacatccaacaacaaaacacaagcgtagaaaacaaaactcaactaattgtgttatcacccaaaagagaagagcaaacacaatggctttcgctttgaggttcttcacatgctttgttttgacagtgttcatcgttgcatcagtggatgcagcaataacatgtggcacagtggcaagtagcttgagtccatgtctaggctacctatcaaagggtggggtggtgccacctccgtgctgtgcaggagtcaaaaagttgaacggtatggctcaaaccacacccgaccgccaacaagcatgcagatgcttacagtccgctgcaaaaggggttaatccaagtctagcctctggccttcctggaaagtgcggtgttagcatcccctatcccatctccacgagcaccaactgcgccaccatcaagtgaagtggggaataacgacatcatttgcctgaagagtatggtttcgtatacgtaaaataagacggctatctaagctgatatttaccttgtctttgtttgtcttgatggctttgtaatcttttgctttgttatgttgtatacttgtgtcttaacatgtttaagatatgataatatatagtatcggtaccttattaatcaccttctctttatagt

SEQ ID NO: 7902 - protein, 139 aa, Arabidopsis thaliana
THPTTKHKRRKQNSTNCVITQKRRANTMAFALRFFTCFVLTVFIVASVDAAITCGTVASSLSPCLGYLSKGGVVPPPCCAGVKKLNGMAQTTPDRQQACRCLQSAAKGVNPSLASGLPGKCGVSIPYPISTSTNCATIK

SEQ ID NO: 7903 - protein, 112 aa, Arabidopsis thaliana
MAFALRFFTCFVLTVFIVASVDAAITCGTVASSLSPCLGYLSKGGVVPPPCCAGVKKLNGMAQTTPDRQQACRCLQSAAKGVNPSLASGLPGKCGVSIPYPISTSTNCATIK

SEQ ID NO: 7904 - DNA, 1024 bp, Arabidopsis thaliana
acaactcgattaccaaaaagcagagccatccaaccataaaactcaaaacacacagattccactggcgtgtgctctcctcacttcactcgtccttgaaacttgagcttcaattacaaagaatggctgcttcaagtgctgtcaccgcaaactacgtcctcaagccacctccattcgcactggatgctttggagccgcatatgagcaaacaaactctggagtttcactggggaaaacatcacagagcttacgtggacaacctcaagaaacaggttcttggaaccgagcttgaaggcaagcccttagagcacattatccacagcacttacaacaatggtgatctcctccctgctttcaacaacgctgctcaggcgtggaaccacgagttcttctgggagtcaatgaaaccaggtggtggaggaaaaccatcaggagagcttcttgctttgcttgaaagagatttcacttcttatgagaagttctatgaagagttcaatgctgctgcagccactcagtttggagctggctgggcctggcttgcttattcaaatgaaaaactcaaagtagtgaaaactcccaatgctgtgaatccccttgtgctcggctctttcccattgcttaccattgatgtctgggagcatgcttactaccttgacttccagaaccgaagaccagattacataaagacattcatgaccaatcttgtgtcttgggaagctgtaagtgccagacttgaggccgccaaggctgcttctgcttaagcaaatttctgaacaatttgacttcagtgacagtgagttctgcatcaccgaagtctcttataaaatattggtcgctgtaataaggacacagctctcttgttgtgtatgtgtcacagagttcttcattttgcttgtgtaatgaacaattaaacatgctcttttctgagtgtgtgtgcgttttgtgtgtgtcaagtttttcatcgtctcctttattaaactcaaattggcacctaccatcagtaattcatagtttggcatggcccatt

SEQ ID NO: 7905 - protein, 251 aa, Arabidopsis thaliana
NSITKKQSHPTIKLKTHRFHWRVLSSLHSSLKLELQLQRMAASSAVTANYVLKPPPFALDALEPHMSKQTLEFHWGKHHRAYVDNLKKQVLGTELEGKPLEHIIHSTYNNGDLLPAFNNAAQAWNHEFFWESMKPGGGGKPSGELLALLERDFTSYEKFYEEFNAAAATQFGAGWAWLAYSNEKLKVVKTPNAVNPLVLGSFPLLTIDVWEHAYYLDFQNRRPDYIKTFMTNLVSWEAVSARLEAAKAASA

SEQ ID NO: 7906 - protein, 212 aa, Arabidopsis thaliana
MAASSAVTANYVLKPPPFALDALEPHMSKQTLEFHWGKHHRAYVDNLKKQVLGTELEGKPLEHIIHSTYNNGDLLPAFNNAAQAWNHEFFWESMKPGGGGKPSGELLALLERDFTSYEKFYEEFNAAAATQFGAGWAWLAYSNEKLKVVKTPNAVNPLVLGSFPLLTIDVWEHAYYLDFQNRRPDYIKTFMTNLVSWEAVSARLEAAKAASA

SEQ ID NO: 7907 - protein, 186 aa, Arabidopsis thaliana
MSKQTLEFHWGKHHRAYVDNLKKQVLGTELEGKPLEHIIHSTYNNGDLLPAFNNAAQAWNHEFFWESMKPGGGGKPSGELLALLERDFTSYEKFYEEFNAAAATQFGAGWAWLAYSNEKLKVVKTPNAVNPLVLGSFPLLTIDVWEHAYYLDFQNRRPDYIKTFMTNLVSWEAVSARLEAAKAASA

SEQ ID NO: 7908 - DNA, 1314 bp, Arabidopsis thaliana
ctgcttggtttctctcgttctcggtctgatcattgcatcatcatgtctggagaatcaagctctggttctaccgaacattgcatcaaagttgtaccgacacacggtggccgctatgttcagtacaacgtttatggacaactctttgaagtttccagaaagtatgtccctcctattcgtcccattggtagaggcgcttgcggtattgtctgtgctgcggtgaactcagtgactggagagaaagtggctattaagaagatcggtaatgcttttgataacatcatcgatgctaagagaacgctacgtgaaattaaacttctcaggcatatggatcatgagaacgttataaccatcaaagatattgtaagacctccgcaacgagatatcttcaatgatgtctacattgtctatgagttaatggacactgatcttcagcgaatcctccgttctaaccaaacactgaccagtgatcaatgccgtttcctagtataccagctcttaagagggctcaaatacgtgcactcggccaacatattacatcgtgatctaaggccaagcaacgtgctacttaactcgaaaaacgagctaaagattggtgattttgggcttgcaagaacaacttccgacacagacttcatgactgaatatgtcgttacccgttggtacagggctcctgagttgcttcttaactgctcagagtacaccgcagctattgatatttggtctgttggctgcatactcggcgaaatcatgacgggacaaccgttgtttccaggcaaagattatgttcatcagcttaggcttataacagagcttgtaggctctccagacaattccagcctcggcttccttcgcagtgacaacgcaagaagatacgtcaggcaacttccgcgatacccgaaacaacagtttgctgctagattcccgaaaatgcccactacggctatcgatttgcttgagagaatgctcgtctttgatcctaaccggcgcatctcagtcgatgaagcccttggccatgcttacctatcaccgcaccatgatgtggccaaagaaccggtctgttcgactcctttcagctttgatttcgaacatccttcttgcacagaagaacacataaaggagcttatctacaaggagtctgtcaaattcaatcctgaccactgagagagaaacatgtttgaatgatttgattcctttttaaaagtctgctccgtttggtttgatctaagattcctttatattgaatctaaactcattttatctttgattgaataattgctatgatgatacacacatatttatccatatcgtaagccc

SEQ ID NO: 7909 - protein, 386 aa, Arabidopsis thaliana
LLGFSRSRSDHCIIMSGESSSGSTEHCIKVVPTHGGRYVQYNVYGQLFEVSRKYVPPIRPIGRGACGIVCAAVNSVTGEKVAIKKIGNAFDNIIDAKRTLREIKLLRHMDHENVITIKDIVRPPQRDIFNDVYIVYELMDTDLQRILRSNQTLTSDQCRFLVYQLLRGLKYVHSANILHRDLRPSNVLLNSKNELKIGDFGLARTTSDTDFMTEYVVTRWYRAPELLLNCSEYTAAIDIWSVGCILGEIMTGQPLFPGKDYVHQLRLITELVGSPDNSSLGFLRSDNARRYVRQLPRYPKQQFAARFPKMPTTAIDLLERMLVFDPNRRISVDEALGHAYLSPHHDVAKEPVCSTPFSFDFEHPSCTEEHIKELIYKESVKFNPDH

SEQ ID NO: 7910 - protein, 372 aa, Arabidopsis thaliana
MSGESSSGSTEHCIKVVPTHGGRYVQYNVYGQLFEVSRKYVPPIRPIGRGACGIVCAAVNSVTGEKVAIKKIGNAFDNIIDAKRTLREIKLLRHMDHENVITIKDIVRPPQRDIFNDVYIVYELMDTDLQRILRSNQTLTSDQCRFLVYQLLRGLKYVHSANILHRDLRPSNVLLNSKNELKIGDFGLARTTSDTDFMTEYVVTRWYRAPELLLNCSEYTAAIDIWSVGCILGEIMTGQPLFPGKDYVHQLRLITELVGSPDNSSLGFLRSDNARRYVRQLPRYPKQQFAARFPKMPTTAIDLLERMLVFDPNRRISVDEALGHAYLSPHHDVAKEPVCSTPFSFDFEHPSCTEEHIKELIYKESVKFNPDH

SEQ ID NO: 7911 - protein, 278 aa, Arabidopsis thaliana
MDHENVITIKDIVRPPQRDIFNDVYIVYELMDTDLQRILRSNQTLTSDQCRFLVYQLLRGLKYVHSANILHRDLRPSNVLLNSKNELKIGDFGLARTTSDTDFMTEYVVTRWYRAPELLLNCSEYTAAIDIWSVGCILGEIMTGQPLFPGKDYVHQLRLITELVGSPDNSSLGFLRSDNARRYVRQLPRYPKQQFAARFPKMPTTAIDLLERMLVFDPNRRISVDEALGHAYLSPHHDVAKEPVCSTPFSFDFEHPSCTEEHIKELIYKESVKFNPDH

SEQ ID NO: 7912 - DNA, 1630 bp, Arabidopsis thaliana
ggcaaatacaacgcatctatgcctacaccaacaagcaacggtcatgcctctcgcgtgcagattcaagaaccaagaataatgtctcctcttcctccttcttcttctccaatcgccttcaaggaacaacaaggtagaccacctccaacaacacaacaaaccatagcaggaaaactctttagaactcttttcaagggtcttctcttctcacaactaaccttaatctcacttttggtgatcgttctcaccattcgcggtctcatctcagcaagtacacaccatttccacctcaagaaatggtaccctcctttactagcatctgttgctgtctcaggaattgcatctttagcatggcaatgcatctttatctacaatccatcaagagcagtcaaagcaacgttctggcttagtccaatactcacctgctcggtaggaatcttgcttgttttgattggctcagcggtagatgcaggtataggtgcagtgtttgtccttttcgccattactcagtccctctatggttgctggattactccgaggcttgagtacaccgataaaatattatcacttgccacagcatttccacctgcaagaaccagagaagtagtctgcttatcaatcatagtcagtgtcgtttactctggtttcttggtgactggaattggaggagcaacttccactagaacaaatcttgatatcttgttcatatccgtaatcataataagcttagcatggacgatgcaagttatcaagaatgttcaacaagttgcgatttcacgggcgagatatgtaaactttgcacatggagaagatatggacgcttggaatgctttccgcatcactatgaaacacttgactgggagcatctgcgttggctcgacgcttgttccaatcatcgtattcataagaggatcaataagaagtgttaatctaatgtcagggagcagcgatgaggtcatgtattcaggtgctgattgcttctctaccattgctaacaaactcattacacttggaaacagatggggctttgtacatgttggaacctatgataaaggattcatggaggcttcgagtgatacctggaagaagttcagaagcacaacagggttggagaaactgattgactcggatctcactagctccttctgttttctcagtgctgtttctgttggagctgtctcttcattaactgctgggatatggatgttgttaatacacaaggactatgccctggaagtgactctctatgctttcataattggatattttgtgggaagggtaggtttggcgtggctacaggcatgtgtattggcttactatgtagcttattctgaagatcctcagagcatgagatttgatggaacaattccacaacgtattcagcgtcttcaaatgttaagtgctcaccgagataacagggagcttgaggtgggtagagacagagaagaagatagttataacaattgttgagtcatgaaggagtctcgctacatacatgtaaagaaaaacaaggattactactttatttcttcaaacttatagattcttctattgataggcaaaaatcttagcttcaatgtgtttatatgtatgccaaaactccaactaaagaaagaatgcacatactttttct

SEQ ID NO: 7913 - protein, 488 aa, Arabidopsis thaliana
GKYNASMPTPTSNGHASRVQIQEPRIMSPLPPSSSPIAFKEQQGRPPPTTQQTIAGKLFRTLFKGLLFSQLTLISLLVIVLTIRGLISASTHHFHLKKWYPPLLASVAVSGIASLAWQCIFIYNPSRAVKATFWLSPILTCSVGILLVLIGSAVDAGIGAVFVLFAITQSLYGCWITPRLEYTDKILSLATAFPPARTREVVCLSIIVSVVYSGFLVTGIGGATSTRTNLDILFISVIIISLAWTMQVIKNVQQVAISRARYVNFAHGEDMDAWNAFRITMKHLTGSICVGSTLVPIIVFIRGSIRSVNLMSGSSDEVMYSGADCFSTIANKLITLGNRWGFVHVGTYDKGFMEASSDTWKKFRSTTGLEKLIDSDLTSSFCFLSAVSVGAVSSLTAGIWMLLIHKDYALEVTLYAFIIGYFVGRVGLAWLQACVLAYYVAYSEDPQSMRFDGTIPQRIQRLQMLSAHRDNRELEVGRDREEDSYNNC

SEQ ID NO: 7914 - protein, 482 aa, Arabidopsis thaliana
MPTPTSNGHASRVQIQEPRIMSPLPPSSSPIAFKEQQGRPPPTTQQTIAGKLFRTLFKGLLFSQLTLISLLVIVLTIRGLISASTHHFHLKKWYPPLLASVAVSGIASLAWQCIFIYNPSRAVKATFWLSPILTCSVGILLVLIGSAVDAGIGAVFVLFAITQSLYGCWITPRLEYTDKILSLATAFPPARTREVVCLSIIVSVVYSGFLVTGIGGATSTRTNLDILFISVIIISLAWTMQVIKNVQQVAISRARYVNFAHGEDMDAWNAFRITMKHLTGSICVGSTLVPIIVFIRGSIRSVNLMSGSSDEVMYSGADCFSTIANKLITLGNRWGFVHVGTYDKGFMEASSDTWKKFRSTTGLEKLIDSDLTSSFCFLSAVSVGAVSSLTAGIWMLLIHKDYALEVTLYAFIIGYFVGRVGLAWLQACVLAYYVAYSEDPQSMRFDGTIPQRIQRLQMLSAHRDNRELEVGRDREEDSYNNC

SEQ ID NO: 7915 - protein, 462 aa, Arabidopsis thaliana
MSPLPPSSSPIAFKEQQGRPPPTTQQTIAGKLFRTLFKGLLFSQLTLISLLVIVLTIRGLISASTHHFHLKKWYPPLLASVAVSGIASLAWQCIFIYNPSRAVKATFWLSPILTCSVGILLVLIGSAVDAGIGAVFVLFAITQSLYGCWITPRLEYTDKILSLATAFPPARTREVVCLSIIVSVVYSGFLVTGIGGATSTRTNLDILFISVIIISLAWTMQVIKNVQQVAISRARYVNFAHGEDMDAWNAFRITMKHLTGSICVGSTLVPIIVFIRGSIRSVNLMSGSSDEVMYSGADCFSTIANKLITLGNRWGFVHVGTYDKGFMEASSDTWKKFRSTTGLEKLIDSDLTSSFCFLSAVSVGAVSSLTAGIWMLLIHKDYALEVTLYAFIIGYFVGRVGLAWLQACVLAYYVAYSEDPQSMRFDGTIPQRIQRLQMLSAHRDNRELEVGRDREEDSYNNC

SEQ ID NO: 7916 - DNA, 1180 bp, Arabidopsis thaliana
tgacgtcaaactctctctatacacagagttaaattgagtttgtgtctcgtaacttatcctgtgagcgaaaatggtgaaagcaactaaggcagagaagaagatcgcctacgataccaagctatgtcagcttatcgatgagtacacccagatcttggtcgttgcggccgataacgtcggatcaactcagcttcagaacatcagaaagggtcttcgtggagactccgtcgtgcttatggggaagaacactatgatgaagcgttccgttaggattcactctgagaacaccggaaacactgcaatcctgaatctgcttcctctccttcagggaaacgttggtttgatctttaccaaaggtgacctcaaggaagtgagcgaggaggttgctaagtacaaggttggtgcccctgctcgtgtgggtttggtggctccaattgatgtggttgtccaacctggcaacactggtctcgacccatcccaaacatctttcttccaggtgcttaacatcccaaccaagattaacaagggtaccgtcgaaatcatcaccccagttgagcttatcaagcaaggtgacaaggtcgggtcttctgaggctgcgcttctagccaagcttggcatcaggccgttctcatatggtcttgttgtccagtctgtctatgacaatggctcagtcttcagcccagaggttcttgatcttactgaagaccaacttgtggagaagtttgcttctggtatctccatggtcacttccttggctcttgctgtgtcgtaccctacccttgctgctgcaccgcatatgttcatcaatgcgtacaagaatgccttggctattgctgttgccactgagtacaccttccctcaagcagagaaggtcaaggaatacttgaaggatccaagcaagtttgctgttgcttcagtagctgcggtgtctgctgatgcaggtggtggtgccccagctgctgctaaggtagaggagaaggaagagtccgacgaagaagactatggaggtgatttcggtttgttcgatgaagagtagattttgtcggttaagatcttacctttttgtcgtggattataagtgttgctttgtttttagtatgttggacctcaattttcttggttttagccaatccagttttatgttactactgtcttttattttttggaaagatttcgttttcct

SEQ ID NO: 7917 - protein, 320 aa, Arabidopsis thaliana
MVKATKAEKKIAYDTKLCQLIDEYTQILVVAADNVGSTQLQNIRKGLRGDSVVLMGKNTMMKRSVRIHSENTGNTAILNLLPLLQGNVGLIFTKGDLKEVSEEVAKYKVGAPARVGLVAPIDVVVQPGNTGLDPSQTSFFQVLNIPTKINKGTVEIITPVELIKQGDKVGSSEAALLAKLGIRPFSYGLVVQSVYDNGSVFSPEVLDLTEDQLVEKFASGISMVTSLALAVSYPTLAAAPHMFINAYKNALAIAVATEYTFPQAEKVKEYLKDPSKFAVASVAAVSADAGGGAPAAAKVEEKEESDEEDYGGDFGLFDEE

SEQ ID NO: 7918 - protein, 266 aa, Arabidopsis thaliana
MGKNTMMKRSVRIHSENTGNTAILNLLPLLQGNVGLIFTKGDLKEVSEEVAKYKVGAPARVGLVAPIDVVVQPGNTGLDPSQTSFFQVLNIPTKINKGTVEIITPVELIKQGDKVGSSEAALLAKLGIRPFSYGLVVQSVYDNGSVFSPEVLDLTEDQLVEKFASGISMVTSLALAVSYPTLAAAPHMFINAYKNALAIAVATEYTFPQAEKVKEYLKDPSKFAVASVAAVSADAGGGAPAAAKVEEKEESDEEDYGGDFGLFDEE

SEQ ID NO: 7919 - protein, 261 aa, Arabidopsis thaliana
MMKRSVRIHSENTGNTAILNLLPLLQGNVGLIFTKGDLKEVSEEVAKYKVGAPARVGLVAPIDVVVQPGNTGLDPSQTSFFQVLNIPTKINKGTVEIITPVELIKQGDKVGSSEAALLAKLGIRPFSYGLVVQSVYDNGSVFSPEVLDLTEDQLVEKFASGISMVTSLALAVSYPTLAAAPHMFINAYKNALAIAVATEYTFPQAEKVKEYLKDPSKFAVASVAAVSADAGGGAPAAAKVEEKEESDEEDYGGDFGLFDEE

SEQ ID NO: 7920 - DNA, 2451 bp, Arabidopsis thaliana
atgagattactggtatttgttaatccgggccggaccgggccgtatctgaattatgaacactttcctaatgtcatagaatcgttcgtgccgtcgtcgctgcgatctgaccaaaatcaaaagtgttacgattcggtatcatcgtctctctcatttgtgattttgtcaaaccctgctctcttttctccaagtgctctcatggtgcttccgctcttccggcgcgctgcgatcgcccggacttcctcgcttctcagagctcgtcttttcgctcctgcctccgaattccattctcgcttttctaatggactataccacttggacgacaaaattagtagcagtaatggtgtgaggtctgcctctatagacttgattacaagaatggatgatagttctccaaagcccattctgcgatttggcgtgcaaaacttttcatctacaggacccatatcacagacggttcttgcaatgccagccttgtctcctactatgagtcatggaaatgttgtaaaatggatgaagaaagaaggtgacaaggtagaggtgggtgatgtactatgtgagatagagacagacaaagccactgtagaatttgagagtcaagaggaaggatttctggccaagattttagtcactgaaggatcaaaggatatccctgttaatgaaccgattgcaataatggttgaggaggaagacgacattaaaaacgttcctgctaccatagagggtggacgagatggtaaagaggaaacatcagctcatcaagtgatgaaacctgacgaaagcacacaacaaaaaagttccattcagcccgatgcatcagatcttcccccacatgtcgtcttagaaatgccagcactttctcctacaatgaaccaaggtaatattgccaaatggtggaaaaaagagggtgacaagattgaagtgggtgatgtcataggtgagatcgagactgacaaagccactctggaatttgaaagccttgaagaggggtacttagctaagattctaattcctgaaggttccaaggatgtggcggtgggaaagccgattgccctaatagttgaagatgctgaaagtattgaagccatcaagtcttcttccgcaggtagttctgaggttgatacagttaaagaagtccctgacagtgttgtagataaacctacagagaggaaagcaggcttcacaaagatcagtcctgctgcaaagctattgattttagaacatggattggaggcatcatcaattgaggcatcgggtccctatggtacattattgaaatcagacgttgtggccgcaattgcttctggaaaagcttctaaatcatctgcgtctacgaagaagaagcaaccatcaaaggagaccccgtctaaatcctcctccacatcgaagccttctgtgacacagtcagataataattatgaagattttccaaatagtcaaattcgcaagattatagcaaaacgtttattggaatcaaaacagaagataccccatttgtatttacaatcagatgttgtattggatcctcttcttgcatttagaaaagaacttcaagaaaaccatggcgttaaagtgtctgtcaatgacatagttattaaagcagtggcagtcgcactgaggaatgtacgacaagctaatgctttctgggatgctgagaaaggagatatcgttatgtgtgacagtgttgacatatcaattgcagttgcaactgagaagggcttaatgactccaattatcaagaatgcagaccagaaatctatttctgctatttccttagaggttaaggagctggcacaaaaggctcgatctggaaagcttgctcctcatgagtttcaaggagggacattcagcatatcaaatctaggaatgtatcctgtggataatttctgcgcaatcattaacccccctcaggctgggattctagcagttggtagaggaaacaaagtggttgagccagttattggactagatggaattgagaagccttctgttgtgacaaaaatgaatgtaacgttatccgctgatcatcggatctttgatggacaagttggagcttcgtttatgtctgaattgcgttcaaactttgaggatgttcgaagacttcttctgtgagaaagatccaactgtttaccaaatgaatcttggattactacataataaacctcggaccaacccacgtgcacatccagaaccagaactgctggtctacattgttaactctgatcacatgtttcatttttttccatttggttcatatacttaccaaaatttgttttggtctttaacaattcgtcttatagattggtaacttcctgaggtattttttgtctggtctgtcctctgcaaaataaataatttcagctgtcaatccgcaactggtgaaataatttaaaaagtattttaccctcaaaaaaaaaaaaaaaaacccgaattcctgcagcccgggggatccac

SEQ ID NO: 7921 - protein, 702 aa, Arabidopsis thaliana
MRLLVFVNPGRTGPYLNYEHFPNVIESFVPSSLRSDQNQKCYDSVSSSLSFVILSNPALFSPSALMVLPLFRRAAIARTSSLLRARLFAPASEFHSRFSNGLYHLDDKISSSNGVRSASIDLITRMDDSSPKPILRFGVQNFSSTGPISQTVLAMPALSPTMSHGNVVKWMKKEGDKVEVGDVLCEIETDKATVEFESQEEGFLAKILVTEGSKDIPVNEPIAIMVEEEDDIKNVPATIEGGRDGKEETSAHQVMKPDESTQQKSSIQPDASDLPPHVVLEMPALSPTMNQGNIAKWWKKEGDKIEVGDVIGEIETDKATLEFESLEEGYLAKILIPEGSKDVAVGKPIALIVEDAESIEAIKSSSAGSSEVDTVKEVPDSVVDKPTERKAGFTKISPAAKLLILEHGLEASSIEASGPYGTLLKSDVVAAIASGKASKSSASTKKKQPSKETPSKSSSTSKPSVTQSDNNYEDFPNSQIRKIIAKRLLESKQKIPHLYLQSDVVLDPLLAFRKELQENHGVKVSVNDIVIKAVAVALRNVRQANAFWDAEKGDIVMCDSVDISIAVATEKGLMTPIIKNADQKSISAISLEVKELAQKARSGKLAPHEFQGGTFSISNLGMYPVDNFCAIINPPQAGILAVGRGNKVVEPVIGLDGIEKPSVVTKMNVTLSADHRIFDGQVGASFMSELRSNFEDVRRLLL

SEQ ID NO: 7922 - protein, 637 aa, Arabidopsis thaliana
MVLPLFRRAAIARTSSLLRARLFAPASEFHSRFSNGLYHLDDKISSSNGVRSASIDLITRMDDSSPKPILRFGVQNFSSTGPISQTVLAMPALSPTMSHGNVVKWMKKEGDKVEVGDVLCEIETDKATVEFESQEEGFLAKILVTEGSKDIPVNEPIAIMVEEEDDIKNVPATIEGGRDGKEETSAHQVMKPDESTQQKSSIQPDASDLPPHVVLEMPALSPTMNQGNIAKWWKKEGDKIEVGDVIGEIETDKATLEFESLEEGYLAKILIPEGSKDVAVGKPIALIVEDAESIEAIKSSSAGSSEVDTVKEVPDSVVDKPTERKAGFTKISPAAKLLILEHGLEASSIEASGPYGTLLKSDVVAAIASGKASKSSASTKKKQPSKETPSKSSSTSKPSVTQSDNNYEDFPNSQIRKIIAKRLLESKQKIPHLYLQSDVVLDPLLAFRKELQENHGVKVSVNDIVIKAVAVALRNVRQANAFWDAEKGDIVMCDSVDISIAVATEKGLMTPIIKNADQKSISAISLEVKELAQKARSGKLAPHEFQGGTFSISNLGMYPVDNFCAIINPPQAGILAVGRGNKVVEPVIGLDGIEKPSVVTKMNVTLSADHRIFDGQVGASFMSELRSNFEDVRRLLL

SEQ ID NO: 7923 - protein, 577 aa, Arabidopsis thaliana
MDDSSPKPILRFGVQNFSSTGPISQTVLAMPALSPTMSHGNVVKWMKKEGDKVEVGDVLCEIETDKATVEFESQEEGFLAKILVTEGSKDIPVNEPIAIMVEEEDDIKNVPATIEGGRDGKEETSAHQVMKPDESTQQKSSIQPDASDLPPHVVLEMPALSPTMNQGNIAKWWKKEGDKIEVGDVIGEIETDKATLEFESLEEGYLAKILIPEGSKDVAVGKPIALIVEDAESIEAIKSSSAGSSEVDTVKEVPDSVVDKPTERKAGFTKISPAAKLLILEHGLEASSIEASGPYGTLLKSDVVAAIASGKASKSSASTKKKQPSKETPSKSSSTSKPSVTQSDNNYEDFPNSQIRKIIAKRLLESKQKIPHLYLQSDVVLDPLLAFRKELQENHGVKVSVNDIVIKAVAVALRNVRQANAFWDAEKGDIVMCDSVDISIAVATEKGLMTPIIKNADQKSISAISLEVKELAQKARSGKLAPHEFQGGTFSISNLGMYPVDNFCAIINPPQAGILAVGRGNKVVEPVIGLDGIEKPSVVTKMNVTLSADHRIFDGQVGASFMSELRSNFEDVRRLLL

SEQ ID NO: 7924 - DNA, 2045 bp, Arabidopsis thaliana
cggagaaaaagaaagagagagagagaagaagaatcgtggagatggcttcgaccccgaagcttaccagtacaatttcatcatcttctccatctcttcaattcctctgcaaaaaactcccaatcgcaattcatctaccatcatcttcttcctctagctttctctcgcttcctaaaaccctaacctctctctattctctccgtccccgtatcgccctactctcaaaccaccgctattaccactctcgccggttttctgtttgtgccagtaccgataatggagctgaatcagaccgccactacgattttgatctcttcactatcggtgccggaagcggcggcgtccgcgcctctcgcttcgccactagcttcggtgcatccgccgccgtttgcgagcttcctttttccactatctcttccgatactgctggaggcgttggaggaacgtgtgtattgagaggatgtgtaccaaagaagttacttgtgtatgcatccaaatacagtcatgagtttgaagacagtcatggatttggttggaagtatgagactgagccttctcatgattggactactttgattgctaacaagaatgctgagttacagcggttgactggtatttataagaatatactgagcaaagctaatgtcaagttgattgaaggtcgtggaaaggttatagacccacacactgttgatgtagatgggaaaatctatactacgaggaatattctgattgcagttggtggacgtcctttcattcctgacattccaggaaaagagtttgctattgattctgatgccgcgcttgatttgccttccaagcctaagaaaattgcaatagttggtggtggctacatagccctggagtttgcggggatcttcaatggtcttaactgtgaagttcatgtatttataaggcaaaagaaggtgctgaggggatttgatgaagatgtcagggatttcgttggagagcagatgtctttaagaggtattgagtttcacactgaagaatcccctgaagccatcatcaaagctggagatggctcgttctctctgaagaccagcaagggaactgttgagggattttcgcatgttatgtttgcaactggtcgcaagcccaacacaaagaacttagggttggagaatgttggcgttaaaatggcgaaaaatggagcaatagaggttgacgaatattcacagacatctgttccatccatctgggctgttggggatgttactgaccgaatcaatttgactccagttgctttgatggagggaggtgcattggctaaaactttgtttcaaaatgagccaacaaagcctgattatagagctgttccctgcgccgttttctcccagccacctattggaacagttggtctaactgaagagcaggccatagaacaatatggtgatgtggatgtttacacatcgaactttaggccattaaaggctaccctttcaggacttccagaccgagtatttatgaaactcattgtctgtgcaaacaccaataaagttctcggtgttcacatgtgtggagaagattcaccagaaatcatccagggatttggggttgcagttaaagctggtttaactaaggccgactttgatgctacagtgggtgttcaccccacagcagctgaggagtttgtcactatgagggctccaaccaggaaattccgcaaagactcctctgagggaaaggcaagtcctgaagctaaaacagctgctggggtgtagagaaggttgcaaaaaagattgtatttacggcattggagccccctgataaggagaacattgtgtctgtgaagaagaagcttttcttttggcagagaatattttttcataatgtcgtgtgaagatatgatcgctgtcctgcaatacttttgatcgtttgacacacgaccaaattcctcgagagagagaggttgtaactattccgaaagagctctaaaactgaagctttcagttcttgtgacatcataatgaaggctgtatagatataacagtttcgagttttatttggatttgtagtatttttgtttt

SEQ ID NO: 7925 - protein, 578 aa, Arabidopsis thaliana
EKKKERERRRIVEMASTPKLTSTISSSSPSLQFLCKKLPIAIHLPSSSSSSFLSLPKTLTSLYSLRPRIALLSNHRYYHSRRFSVCASTDNGAESDRHYDFDLFTIGAGSGGVRASRFATSFGASAAVCELPFSTISSDTAGGVGGTCVLRGCVPKKLLVYASKYSHEFEDSHGFGWKYETEPSHDWTTLIANKNAELQRLTGIYKNILSKANVKLIEGRGKVIDPHTVDVDGKIYTTRNILIAVGGRPFIPDIPGKEFAIDSDAALDLPSKPKKIAIVGGGYIALEFAGIFNGLNCEVHVFIRQKKVLRGFDEDVRDFVGEQMSLRGIEFHTEESPEAIIKAGDGSFSLKTSKGTVEGFSHVMFATGRKPNTKNLGLENVGVKMAKNGAIEVDEYSQTSVPSIWAVGDVTDRINLTPVALMEGGALAKTLFQNEPTKPDYRAVPCAVFSQPPIGTVGLTEEQAIEQYGDVDVYTSNFRPLKATLSGLPDRVFMKLIVCANTNKVLGVHMCGEDSPEIIQGFGVAVKAGLTKADFDATVGVHPTAAEEFVTMRAPTRKFRKDSSEGKASPEAKTAAGV

SEQ ID NO: 7926 - protein, 565 aa, Arabidopsis thaliana
MASTPKLTSTISSSSPSLQFLCKKLPIAIHLPSSSSSSFLSLPKTLTSLYSLRPRIALLSNHRYYHSRRFSVCASTDNGAESDRHYDFDLFTIGAGSGGVRASRFATSFGASAAVCELPFSTISSDTAGGVGGTCVLRGCVPKKLLVYASKYSHEFEDSHGFGWKYETEPSHDWTTLIANKNAELQRLTGIYKNILSKANVKLIEGRGKVIDPHTVDVDGKIYTTRNILIAVGGRPFIPDIPGKEFAIDSDAALDLPSKPKKIAIVGGGYIALEFAGIFNGLNCEVHVFIRQKKVLRGFDEDVRDFVGEQMSLRGIEFHTEESPEAIIKAGDGSFSLKTSKGTVEGFSHVMFATGRKPNTKNLGLENVGVKMAKNGAIEVDEYSQTSVPSIWAVGDVTDRINLTPVALMEGGALAKTLFQNEPTKPDYRAVPCAVFSQPPIGTVGLTEEQAIEQYGDVDVYTSNFRPLKATLSGLPDRVFMKLIVCANTNKVLGVHMCGEDSPEIIQGFGVAVKAGLTKADFDATVGVHPTAAEEFVTMRAPTRKFRKDSSEGKASPEAKTAAGV

SEQ ID NO: 7927 - DNA, 1896 bp, Arabidopsis thaliana
gcacacacactttctcatcttctttctacaaatgggtttccaaagatctatctcttcttcttctgcattaaaatggcttggatttgtaacagcggtttgggttcaatccatctccggcaacaactacactttttcaaactactccggtgctcttaagtctctcatgaatctcaaccagctcgagctcaacaacctctctgtcgctaaagacgtcggaaaagcctttgggatcctggctggccttgcctctgaccgtcttcccactccggtcatcctccttattggttgctttgaaggtcttcttggttatggtgtacaatggctcgttgttagccgcaccatccaaccaatcccttattggcagatgtgtatattcctctgtatgggagggaacagcacaacgtggatgaacacggcggttctagtgacttgcatacgcaattttcgacgaaaccgtggtccggtctccgggatattgaaaggatatgtcggtttaagcacagctatattcactgatctctgtactgctctgttctcaaacgatccggcgtcgtttttggttttactagccgtggtgccttttgccgtatgtctcacggcggttttcttcctccgtgagatcccaccagcatcttccgcagctgaggagaacgaagagactcgttactttaccatattcaacattgtggccgttgttgtcgccgtgtatcttcagtcttacgacatcattggaatcaaaactggagtgttctctgtcgctttcgcttctatacttctcttcctcttggcttctccaatagccattcctttccactccttcatcaagagcttgaactacggtgaacaagatgacttagaaggacggattcaagaaccgttgcttagatccgagatagcggcagcggagaaagaagtaatagttgtagctgcggtggcagcggaagaggaggagaagaagaggaagaaaccggttttgggagaagaccacactataatggaagcagtgttgaccgttgacttttgggtgctttttgtgtccttcttgtgtggtgtaggaactggtttagctgtgatgaacaatatgggtcagataggtcttgcccttggatacacaaatgtctcaatctttgtctccatgactagtatttggggattcttcggtcgcattctctccggtactctctccgaatactttctcaagaaagctggaacaccaagaccactatggaatgcagcctctcaaatccttatggccgtaggatatatactaatggctttagccgtgcctaattcactctacatcggttcaatggtggttggagtatgttacggtgtccgtctagccataactgtaccaacagcttccgaactctttggtctcaaatactacggtctcatctacaacatcttagtacttaacttgccacttggctcgtttctcttctcgggtctcctcgctggcttcctctacgatgcagaggcaacaccaactcctggtgggggcaacacgtgcgtaggagctcattgctaccgtctcatcttcatagtcatggcattagcttctgttatcggagtcggtttggatcttgtgttggcttataggactaaggagatttacgctaagattcacgctagcaagaagtcaaagaaatctggtggtagccttagttaagacactgtatatctagttccggtgcactacattgttttcagatgctgattttgtatacatgatacaatatcggattcaagatattgttgaacaaaatttcaagtaccagagatcattgttgtagtagcatcgccaatgtatttttttgtctttccgagatttgttcaaaattatataaatgtatgacattttgatagtccaattccaattattttctaagattt

SEQ ID NO: 7928 - protein, 556 aa, Arabidopsis thaliana
HTHFLIFFLQMGFQRSISSSSALKWLGFVTAVWVQSISGNNYTFSNYSGALKSLMNLNQLELNNLSVAKDVGKAFGILAGLASDRLPTPVILLIGCFEGLLGYGVQWLVVSRTIQPIPYWQMCIFLCMGGNSTTWMNTAVLVTCIRNFRRNRGPVSGILKGYVGLSTAIFTDLCTALFSNDPASFLVLLAVVPFAVCLTAVFFLREIPPASSAAEENEETRYFTIFNIVAVVVAVYLQSYDIIGIKTGVFSVAFASILLFLLASPIAIPFHSFIKSLNYGEQDDLEGRIQEPLLRSEIAAAEKEVIVVAAVAAEEEEKKRKKPVLGEDHTIMEAVLTVDFWVLFVSFLCGVGTGLAVMNNMGQIGLALGYTNVSIFVSMTSIWGFFGRILSGTLSEYFLKKAGTPRPLWNAASQILMAVGYILMALAVPNSLYIGSMVVGVCYGVRLAITVPTASELFGLKYYGLIYNILVLNLPLGSFLFSGLLAGFLYDAEATPTPGGGNTCVGAHCYRLIFIVMALASVIGVGLDLVLAYRTKEIYAKIHASKKSKKSGGSLS

SEQ ID NO: 7929 - protein, 546 aa, Arabidopsis thaliana
MGFQRSISSSSALKWLGFVTAVWVQSISGNNYTFSNYSGALKSLMNLNQLELNNLSVAKDVGKAFGILAGLASDRLPTPVILLIGCFEGLLGYGVQWLVVSRTIQPIPYWQMCIFLCMGGNSTTWMNTAVLVTCIRNFRRNRGPVSGILKGYVGLSTAIFTDLCTALFSNDPASFLVLLAVVPFAVCLTAVFFLREIPPASSAAEENEETRYFTIFNIVAVVVAVYLQSYDIIGIKTGVFSVAFASILLFLLASPIAIPFHSFIKSLNYGEQDDLEGRIQEPLLRSEIAAAEKEVIVVAAVAAEEEEKKRKKPVLGEDHTIMEAVLTVDFWVLFVSFLCGVGTGLAVMNNMGQIGLALGYTNVSIFVSMTSIWGFFGRILSGTLSEYFLKKAGTPRPLWNAASQILMAVGYILMALAVPNSLYIGSMVVGVCYGVRLAITVPTASELFGLKYYGLIYNILVLNLPLGSFLFSGLLAGFLYDAEATPTPGGGNTCVGAHCYRLIFIVMALASVIGVGLDLVLAYRTKEIYAKIHASKKSKKSGGSLS

SEQ ID NO: 7930 - protein, 502 aa, Arabidopsis thaliana
MNLNQLELNNLSVAKDVGKAFGILAGLASDRLPTPVILLIGCFEGLLGYGVQWLVVSRTIQPIPYWQMCIFLCMGGNSTTWMNTAVLVTCIRNFRRNRGPVSGILKGYVGLSTAIFTDLCTALFSNDPASFLVLLAVVPFAVCLTAVFFLREIPPASSAAEENEETRYFTIFNIVAVVVAVYLQSYDIIGIKTGVFSVAFASILLFLLASPIAIPFHSFIKSLNYGEQDDLEGRIQEPLLRSEIAAAEKEVIVVAAVAAEEEEKKRKKPVLGEDHTIMEAVLTVDFWVLFVSFLCGVGTGLAVMNNMGQIGLALGYTNVSIFVSMTSIWGFFGRILSGTLSEYFLKKAGTPRPLWNAASQILMAVGYILMALAVPNSLYIGSMVVGVCYGVRLAITVPTASELFGLKYYGLIYNILVLNLPLGSFLFSGLLAGFLYDAEATPTPGGGNTCVGAHCYRLIFIVMALASVIGVGLDLVLAYRTKEIYAKIHASKKSKKSGGSLS

SEQ ID NO: 7931 - DNA, 1134 bp, Arabidopsis thaliana
ataaaaattcaataattgaacctcctctctctctctctcttctctcccttcttcttctccgatttcgactttgaatcatttcttcgagagaggtagcgagaaagggatcgccttttctcactctctgcggattctcaattttgggcaagaagagtttttatcgcaattgagtcttgaagaccacaaggatttgatcacattggtgcttctgcctgtttatctgagtttgaggacaagaacttctggggcgtttataatttgccatggctagtaatgagaatctaccacccaatgttatcaatcagcttgccaaggagctgaagagtcttgacgaatcccctccagatggcatcaaggttgtggtaaatgacgaggatttctcacaaatatgtgctgatattgaaggaccagttggtactccttatgagaacggacttttccgtatgaagttggccttgtcacatgattttccacattcgcctcccaaaggctacttcatgacaaagattttccatcctaatgttgcttctaatggagagatatgtgttaacacgcttaaaaaagattggaaccctagtcttggattaagacatgttctctctgttgtaaggtgcttattaatcgagccatttccagaatctgcattaaatgaacaagctggcaagatgctacttgaaaactatgacgagtatgcgaggaatgctaggctttacacaggtatccatgctaaaccaaaacccaagttcaagacaggagcaatctcagagtcaacaaccgctctaaatgttggccagacgaacaacgagacgcctggtgctgctactgcaataccctcttcaatgacagacataaagagagtaacaacgagtgcccaagaccaacaacacgtagctaatgtcgttgtagcagcctctgcaagtgtggtcactacgacgcaaaaaagggaagcaggtttggccaaggttcaggcagataagaagaaggtagacgctagaaagaaaagcttgaagagactatgatgatgctatcactcagtgtcttacgctctttgaacctaaactgttgtttcctttttacttgtaagagatctgttgtttgaggatttttcatttctgggaaataataatgtttgcc

SEQ ID NO: 7932 - protein, 251 aa, Arabidopsis thaliana
MASNENLPPNVINQLAKELKSLDESPPDGIKVVVNDEDFSQICADIEGPVGTPYENGLFRMKLALSHDFPHSPPKGYFMTKIFHPNVASNGEICVNTLKKDWNPSLGLRHVLSVVRCLLIEPFPESALNEQAGKMLLENYDEYARNARLYTGIHAKPKPKFKTGAISESTTALNVGQTNNETPGAATAIPSSMTDIKRVTTSAQDQQHVANVVVAASASVVTTTQKREAGLAKVQADKKKVDARKKSLKRL

SEQ ID NO: 7933 - protein, 191 aa, Arabidopsis thaliana
MKLALSHDFPHSPPKGYFMTKIFHPNVASNGEICVNTLKKDWNPSLGLRHVLSVVRCLLIEPFPESALNEQAGKMLLENYDEYARNARLYTGIHAKPKPKFKTGAISESTTALNVGQTNNETPGAATAIPSSMTDIKRVTTSAQDQQHVANVVVAASASVVTTTQKREAGLAKVQADKKKVDARKKSLKRL

SEQ ID NO: 7934 - protein, 173 aa, Arabidopsis thaliana
MTKIFHPNVASNGEICVNTLKKDWNPSLGLRHVLSVVRCLLIEPFPESALNEQAGKMLLENYDEYARNARLYTGIHAKPKPKFKTGAISESTTALNVGQTNNETPGAATAIPSSMTDIKRVTTSAQDQQHVANVVVAASASVVTTTQKREAGLAKVQADKKKVDARKKSLKRL

SEQ ID NO: 7935 - DNA, 1160 bp, Arabidopsis thaliana
gtagcgattctctctgcggcgcgtgtaaacggtgacggggctctaatggctaatcttcctcctccgctctccatgaaatctgtcgccctctcaggagcttcttctccttcttcttcctccaacaacgatcggaagctatcatcggcggagcagttaattctcgatctcagcaatcccgaactcagagaaaatgcacttcacgagttgtctaagaagagagagatctttcaagatttggctccgcttttatggcattctgttggtaccattcctgctcttctacaggagattatcgcagtttaccctgccctatctcctccaaccatgactcctgctcaatctaacagggtgtgcaatgcacttgctcttcttcagtgtgttgcttctcatactgatacgagaatgttgttcctaaaagcccatctgccattgtacctgtatgctttcttgaatacatcaagcaagtcaagaccgtttgagtacctgcggctgactagcttgggggttattggtgcacttgttaaggttgatgatactgaagtgatcagattccttcttcaaactgagattgtcccattgtgcctccggacaatggagaatggcagcgagttatcaaagactgttgctactttcattgttcagaaagttttgctggacgatgttgggcttgagtacatgtgcacgacagcggagagattctttgctctgggtcgggttttgggaaatatggttacttcacttgcagaaggaccgtccgctaggctactaaagcacatcatacgctgctatcttcgcttgacagataaccccagagcatgcgatgcacttggaagttgccttccagatcttctgagggatgctactttcagtggttgtctctatgatgacccacctgcaatgcaatggctgcagcaactgctccacaacgttaacgttggcgggagagcacctcaagggttggctcatatgtttgtgaattaaatcgaacccttatagtctgggcagaaactgttattcattggacaaaaaaagttagttggaaacagaattacagatgagaaacagaaacccaaccaaagattttgagtttgatggatatatgtatttggatttcttgaccgtcttatgatgttgcaatcaatataactaaaattccattg

SEQ ID NO: 7936 - protein, 326 aa, Arabidopsis thaliana
VAILSAARVNGDGALMANLPPPLSMKSVALSGASSPSSSSNNDRKLSSAEQLILDLSNPELRENALHELSKKREIFQDLAPLLWHSVGTIPALLQEIIAVYPALSPPTMTPAQSNRVCNALALLQCVASHTDTRMLFLKAHLPLYLYAFLNTSSKSRPFEYLRLTSLGVIGALVKVDDTEVIRFLLQTEIVPLCLRTMENGSELSKTVATFIVQKVLLDDVGLEYMCTTAERFFALGRVLGNMVTSLAEGPSARLLKHIIRCYLRLTDNPRACDALGSCLPDLLRDATFSGCLYDDPPAMQWLQQLLHNVNVGGRAPQGLAHMFVN

SEQ ID NO: 7937 - protein, 311 aa, Arabidopsis thaliana
MANLPPPLSMKSVALSGASSPSSSSNNDRKLSSAEQLILDLSNPELRENALHELSKKREIFQDLAPLLWHSVGTIPALLQEIIAVYPALSPPTMTPAQSNRVCNALALLQCVASHTDTRMLFLKAHLPLYLYAFLNTSSKSRPFEYLRLTSLGVIGALVKVDDTEVIRFLLQTEIVPLCLRTMENGSELSKTVATFIVQKVLLDDVGLEYMCTTAERFFALGRVLGNMVTSLAEGPSARLLKHIIRCYLRLTDNPRACDALGSCLPDLLRDATFSGCLYDDPPAMQWLQQLLHNVNVGGRAPQGLAHMFVN

SEQ ID NO: 7938 - protein, 302 aa, Arabidopsis thaliana
MKSVALSGASSPSSSSNNDRKLSSAEQLILDLSNPELRENALHELSKKREIFQDLAPLLWHSVGTIPALLQEIIAVYPALSPPTMTPAQSNRVCNALALLQCVASHTDTRMLFLKAHLPLYLYAFLNTSSKSRPFEYLRLTSLGVIGALVKVDDTEVIRFLLQTEIVPLCLRTMENGSELSKTVATFIVQKVLLDDVGLEYMCTTAERFFALGRVLGNMVTSLAEGPSARLLKHIIRCYLRLTDNPRACDALGSCLPDLLRDATFSGCLYDDPPAMQWLQQLLHNVNVGGRAPQGLAHMFVN

SEQ ID NO: 7939 - DNA, 728 bp, Arabidopsis thaliana
ggctgcaatttattctcaaaccttatgagtgagatctctcttaatcattctctctttcttctctcctctgtgatgtgaggtttcgaagatccttctctgattcctcatcaaactcagatcagtagcggacccaagtcattcctttagagagatatatggcagaggtgaaggatcaattagagattaagttccggcttaacgatggttctgatatcggtcctaaattgtttcctgatgctactaccgttgctacattgaaagaaaccgttgttgctcagtggccaagagataaggagaacgggccaaagacagtgaaagatgttaaactgataagcgcgggtagaatattggagaacaacaaaacggttggagattgcaggagtcccgtcggcaatttctcaggtgctgtcaccacaatgcatgttataattcaacatcaagttactgaaaaagaaaagaagaagaagaagcctaaaggtgatctgaaacagaacaaatgtgtctgtttatgttttggagctcgttgttaacaattgtgcaagacaagtagagagagttaaaaaagcttgggagattcacattctgttcttgagccttcttcaataccttttgctcttgttccttgtaattcttttttctgacatgacatgacatgattggctttttgatcgcttgaggtttggtttctattgtatttcggattcgcaacaccgtggaaattattaggt

SEQ ID NO: 7940 - protein, 124 aa, Arabidopsis thaliana
MAEVKDQLEIKFRLNDGSDIGPKLFPDATTVATLKETVVAQWPRDKENGPKTVKDVKLISAGRILENNKTVGDCRSPVGNFSGAVTTMHVIIQHQVTEKEKKKKKPKGDLKQNKCVCLCFGARC

SEQ ID NO: 7941 - DNA, 807 bp, Arabidopsis thaliana
atgaacaaaaaaaggcccttccatcctaatcgcgcttccgtcgccgacgccattttactcgccgtcgtcatctccggccacgcttgtcatcgttcgcaattaatcgaaatcgaaattttccgattcctgaaaaaaatgaatttcttaaactcagcagcatccatttgcagaagagttagtttgagggaactgatcactgaggttcctgcttatagtggcagtagcatttccgatggttcttcaagtggcttgagtttggtcttcaagcgttgggctactaagaaaactgctggttctacaaagaacggtcgtgactctaatcccaagtttctcggtgttaagaaattcggaggagagagtgtgataccaggaaacatcatagttcgtcaacggggaactcggtttcatcctggagactatgtggggattggtaaggaccatactctgtttgcattgaaggaaggacgagtcaggttcgagaaaagcaagattacaggacgcaaatggattcatgttgatccaacaggtggtcatgttcttcaccctatctacacaaaagctgcagctgctcaatcgactaagttgaagacagcttcatagtcgtgaatactgattgcaacaatctaaacgtggttttcatttcctttagatcatgtgatctctcgagtaaaagatgatgctatcttagagcagaaccactcaattcaataacatctgctgttttgtttccctctagtctttgtctggattttgatgaagggctttgtttggattcaacaaatcaagttttattcggaaatagatgtt

SEQ ID NO: 7942 - protein, 199 aa, Arabidopsis thaliana
MNKKRPFHPNRASVADAILLAVVISGHACHRSQLIEIEIFRFLKKMNFLNSAASICRRVSLRELITEVPAYSGSSISDGSSSGLSLVFKRWATKKTAGSTKNGRDSNPKFLGVKKFGGESVIPGNIIVRQRGTRFHPGDYVGIGKDHTLFALKEGRVRFEKSKITGRKWIHVDPTGGHVLHPIYTKAAAAQSTKLKTAS

SEQ ID NO: 7943 - protein, 154 aa, Arabidopsis thaliana
MNFLNSAASICRRVSLRELITEVPAYSGSSISDGSSSGLSLVFKRWATKKTAGSTKNGRDSNPKFLGVKKFGGESVIPGNIIVRQRGTRFHPGDYVGIGKDHTLFALKEGRVRFEKSKITGRKWIHVDPTGGHVLHPIYTKAAAAQSTKLKTAS

SEQ ID NO: 7944 - DNA, 1219 bp, Arabidopsis thaliana
ctttctctcttctctttctcggtttccccattttctatctagacaaagagtgttgtctgaattggctctgtctcaaaaaatgaaattctcaaattaaccacaacgatctttagagccttcttcgctcaccgatctctgaaaccctggtagtttctatgagtatgtcgcagtctcgagctgtccaaagatcgtcttcacctaatgaggatagaggtgagaatcagttagtggtttatgacttgaaaggaaatgatgatactgaagaagaagttctaccggttcaatctcagcctttgtcatctagaacacagtgtccctctatcggggcatttacggttcagtgtgcaagttgtttcaaatggagactcatgccttcaatgcagaagtatgaagagattagggaacagcttcttgaaaacccgtttttctgcgatacagcgcgtgagtggaagccggatatttcttgtgatgttcctgctgatatctatcaagatggaactcgtctttgggctattgataaaccgaatatctctcgtccacccgctggctggcaacgtttactgcggattagaggtgaaggaggtaccagatttgctgatgtttattatgttgctccgtctggaaagaagcttcgatcaactgtggaggtccaaaagtacttgaatgacaactccgaatacattggagaaggggtgaaactttcacagttctcgtttcaaatcccgaaaccgctgcaggatgactacgtgaggaagcgcccagctcgactactggattccatcgataatacaaacacccctgtagctaaagaagctaatccactggcatggatatctccagatgatcatatatcgttgcagctaggtacgccaaccgagtctggacttaacaattcacattaccaaccatcgaaaaagaaaaaaacatcgacgctatcaatctttggctccaacgacgaacttgctgatagataatctagctagacgagagtgaacttatctcgtcttctctggtatataacccgtcttctttcttcgttttttgggtttgtcttatcgaagaaactgaaagcatgtggttagcttgttttttgtgtataccatctattttgttttgcagtgtaacatactttctatgaagaagatgggtccttttggtttttgcttccaaataactggattttcatgctgaaagtttttaaacctaaagtttgattatt

SEQ ID NO: 7945 - protein, 272 aa, Arabidopsis thaliana
MSMSQSRAVQRSSSPNEDRGENQLVVYDLKGNDDTEEEVLPVQSQPLSSRTQCPSIGAFTVQCASCFKWRLMPSMQKYEEIREQLLENPFFCDTAREWKPDISCDVPADIYQDGTRLWAIDKPNISRPPAGWQRLLRIRGEGGTRFADVYYVAPSGKKLRSTVEVQKYLNDNSEYIGEGVKLSQFSFQIPKPLQDDYVRKRPARLLDSIDNTNTPVAKEANPLAWISPDDHISLQLGTPTESGLNNSHYQPSKKKKTSTLSIFGSNDELADR

SEQ ID NO: 7946 - protein, 270 aa, Arabidopsis thaliana
MSQSRAVQRSSSPNEDRGENQLVVYDLKGNDDTEEEVLPVQSQPLSSRTQCPSIGAFTVQCASCFKWRLMPSMQKYEEIREQLLENPFFCDTAREWKPDISCDVPADIYQDGTRLWAIDKPNISRPPAGWQRLLRIRGEGGTRFADVYYVAPSGKKLRSTVEVQKYLNDNSEYIGEGVKLSQFSFQIPKPLQDDYVRKRPARLLDSIDNTNTPVAKEANPLAWISPDDHISLQLGTPTESGLNNSHYQPSKKKKTSTLSIFGSNDELADR

SEQ ID NO: 7947 - protein, 201 aa, Arabidopsis thaliana
MPSMQKYEEIREQLLENPFFCDTAREWKPDISCDVPADIYQDGTRLWAIDKPNISRPPAGWQRLLRIRGEGGTRFADVYYVAPSGKKLRSTVEVQKYLNDNSEYIGEGVKLSQFSFQIPKPLQDDYVRKRPARLLDSIDNTNTPVAKEANPLAWISPDDHISLQLGTPTESGLNNSHYQPSKKKKTSTLSIFGSNDELADR

SEQ ID NO: 7948 - DNA, 1827 bp, Arabidopsis thaliana
attaactcatcttcaaaaataccctaatcacattttgtaacaataatacaattatacattaaaactctccgacgatgcctcaggcaccgatgccagagttctctagctcggtgaagctcaagtacgtgaaacttggttaccaatatttggttaaccatttcttgagttttcttttgatcccgatcatggctattgtcgccgttgagcttcttcggatgggtcctgaagagatccttaatgtttggaattcactccagtttgacctagttcaggttctatgttcttccttctttgtcatcttcatctccactgtttacttcatgtccaagccacgcaccatctacctcgttgactattcttgttacaagccacctgtcacgtgtcgtgtccccttcgcaactttcatggaacactctcgtttgatcctcaaggacaagcctaagagcgtcgagttccaaatgagaatccttgaacgttctggcctcggtgaggagacttgtctccctccggctattcattatattcctcccacaccaaccatggacgcggctagaagcgaggctcagatggttatcttcgaggctatggacgatcttttcaagaaaaccggtcttaaacctaaagacgtcgacatccttatcgtcaactgctctcttttctctcccacaccatcgctctcagctatggtcatcaacaaatataagcttaggagtaatatcaagagcttcaatctttcggggatgggctgcagcgcgggcctgatctcagttgatctagcccgcgacttgctccaagttcatcccaattcaaatgcaatcatcgtcagcacggagatcataacgccaaattactatcaaggcaacgagagagccatgttgttacccaattgtctcttccgcatgggtgcggcagccatacacatgtcaaaccgccggtctgaccggtggcgagccaaatacaagctttcccacctcgtccggacacaccgtggcgctgacgacaagtctttctactgtgtctacgaacaggaagacaaagaaggacacgttggcatcaacttgtccaaagatctcatggccatcgccggtgaagccctcaaggcaaacatcaccacaataggtcctttggtcctaccggcgtcagaacaacttctcttcctcacgtccctaatcggacgtaaaatcttcaacccgaaatggaaaccatacataccggatttcaagctggccttcgaacacttttgcattcacgcaggaggcagagcggtgatcgacgagctccaaaagaatctacaactatcaggagaacacgttgaggcctcaagaatgacactacatcgttttggtaacacgtcatcttcatcgttatggtacgagcttagctacatcgagtctaaagggagaatgaggagaggcgatcgcgtttggcaaatcgcgtttgggagtggtttcaagtgtaactctgccgtgtggaagtgtaaccgtacgattaagacacctaaggacggaccatggtccgattgtatcgaccgttaccctgtctttattcccgaagttgtcaaactctaaactgaaaacgtctttgaacggtttagtaacggtttgattttgtgttacggtttaggtttatttggtctcgggatttggtttaaaggggattgagaaatgggaagttagagagaagaaaaagcaaagcataaatgtttgtatttaattgctctgcatatacttaaatctctgcttttcatttggggtattttttagtttctcgtgctgtaattaataacttgtggtgtactcaaataagaatatttctctctgttttatt

SEQ ID NO: 7949 - protein, 497 aa, Arabidopsis thaliana
MPQAPMPEFSSSVKLKYVKLGYQYLVNHFLSFLLIPIMAIVAVELLRMGPEEILNVWNSLQFDLVQVLCSSFFVIFISTVYFMSKPRTIYLVDYSCYKPPVTCRVPFATFMEHSRLILKDKPKSVEFQMRILERSGLGEETCLPPAIHYIPPTPTMDAARSEAQMVIFEAMDDLFKKTGLKPKDVDILIVNCSLFSPTPSLSAMVINKYKLRSNIKSFNLSGMGCSAGLISVDLARDLLQVHPNSNAIIVSTEIITPNYYQGNERAMLLPNCLFRMGAAAIHMSNRRSDRWRAKYKLSHLVRTHRGADDKSFYCVYEQEDKEGHVGINLSKDLMAIAGEALKANITTIGPLVLPASEQLLFLTSLIGRKIFNPKWKPYIPDFKLAFEHFCIHAGGRAVIDELQKNLQLSGEHVEASRMTLHRFGNTSSSSLWYELSYIESKGRMRRGDRVWQIAFGSGFKCNSAVWKCNRTIKTPKDGPWSDCIDRYPVFIPEVVKL

SEQ ID NO: 7950 - protein, 492 aa, Arabidopsis thaliana
MPEFSSSVKLKYVKLGYQYLVNHFLSFLLIPIMAIVAVELLRMGPEEILNVWNSLQFDLVQVLCSSFFVIFISTVYFMSKPRTIYLVDYSCYKPPVTCRVPFATFMEHSRLILKDKPKSVEFQMRILERSGLGEETCLPPAIHYIPPTPTMDAARSEAQMVIFEAMDDLFKKTGLKPKDVDILIVNCSLFSPTPSLSAMVINKYKLRSNIKSFNLSGMGCSAGLISVDLARDLLQVHPNSNAIIVSTEIITPNYYQGNERAMLLPNCLFRMGAAAIHMSNRRSDRWRAKYKLSHLVRTHRGADDKSFYCVYEQEDKEGHVGINLSKDLMAIAGEALKANITTIGPLVLPASEQLLFLTSLIGRKIFNPKWKPYIPDFKLAFEHFCIHAGGRAVIDELQKNLQLSGEHVEASRMTLHRFGNTSSSSLWYELSYIESKGRMRRGDRVWQIAFGSGFKCNSAVWKCNRTIKTPKDGPWSDCIDRYPVFIPEVVKL

SEQ ID NO: 7951 - protein, 460 aa, Arabidopsis thaliana
MAIVAVELLRMGPEEILNVWNSLQFDLVQVLCSSFFVIFISTVYFMSKPRTIYLVDYSCYKPPVTCRVPFATFMEHSRLILKDKPKSVEFQMRILERSGLGEETCLPPAIHYIPPTPTMDAARSEAQMVIFEAMDDLFKKTGLKPKDVDILIVNCSLFSPTPSLSAMVINKYKLRSNIKSFNLSGMGCSAGLISVDLARDLLQVHPNSNAIIVSTEIITPNYYQGNERAMLLPNCLFRMGAAAIHMSNRRSDRWRAKYKLSHLVRTHRGADDKSFYCVYEQEDKEGHVGINLSKDLMAIAGEALKANITTIGPLVLPASEQLLFLTSLIGRKIFNPKWKPYIPDFKLAFEHFCIHAGGRAVIDELQKNLQLSGEHVEASRMTLHRFGNTSSSSLWYELSYIESKGRMRRGDRVWQIAFGSGFKCNSAVWKCNRTIKTPKDGPWSDCIDRYPVFIPEVVKL

SEQ ID NO: 7952 - DNA, 1205 bp, Arabidopsis thaliana
aattgaaaaactttaactcttttttttttcgtttttgggatttgccaacttcgatttctttggttgggatttgtttatacgtttccttcgatttcgctcgagcttcgatctgaaaagcttcgagcttttagacaaatccatggattcttcgccagtttctgctcgattcgatatattcgagatttatcgtagattctgtgctattcgatcaggacaacaattgtgtaataagaaaccctgtgatggcgaagaatctcaaagatttaacttgtctaaagaagcaataactcagctcttatatctagtagagaataagtttcaagctaggaactcgatttttgatgaattgtttaagttgatgtcacggctagacttaatggtggactttacggagtttacttgcttttacgattttgttttctttatgtgccgcgagaatgggcaaaagaatataactataagtagagctattactgcatggaaacttgttttggctgggagatttaggttacttaaccgctggtgtgactttatcgagaaaaatcaacggcacaatatttcagaagatacttggcaacaagtcttggcgtttagtcgttgtgtacatgagaatctagaaggatatgactctgaaggtgcatggcctgtcctaatagatgactttgtcgagcatatgtacagtattttaggaccgaataaggacactagcttgttctgcaaatgtggtgacacagaatctgaatcatgcctctatcaagaagatgagcatcacaaagattatcgccgcccacacacgggtttaagaaacattccaggtttaaagagaaaaacatcgaagaagaatgacgaagaagaagaagatgaagatgaagaagtgttagaaacccaaaactcttcttctttgctaaacttcaaacgaatcaaaaccagcaacagtccaaggtgttcatcaaagtccccttgttcaatcgagcgaagtctttcacaaggttttgcgagtcttttatcgactggagataaaccatgaaacactggaacatcgtcgcacatatatatagattatacaaagcaaaagaattctcaaggtgttgtctcattttttcctacctaaatacctcacttctttaaatgacagttgagttcttctttgttgtaagctatagaataatttgttccttcaatcattcataatttgatcttattcc

SEQ ID NO: 7953 - protein, 295 aa, Arabidopsis thaliana
MDSSPVSARFDIFEIYRRFCAIRSGQQLCNKKPCDGEESQRFNLSKEAITQLLYLVENKFQARNSIFDELFKLMSRLDLMVDFTEFTCFYDFVFFMCRENGQKNITISRAITAWKLVLAGRFRLLNRWCDFIEKNQRHNISEDTWQQVLAFSRCVHENLEGYDSEGAWPVLIDDFVEHMYSILGPNKDTSLFCKCGDTESESCLYQEDEHHKDYRRPHTGLRNIPGLKRKTSKKNDEEEEDEDEEVLETQNSSSLLNFKRIKTSNSPRCSSKSPCSIERSLSQGFASLLSTGDKP

SEQ ID NO: 7954 - protein, 222 aa, Arabidopsis thaliana
MSRLDLMVDFTEFTCFYDFVFFMCRENGQKNITISRAITAWKLVLAGRFRLLNRWCDFIEKNQRHNISEDTWQQVLAFSRCVHENLEGYDSEGAWPVLIDDFVEHMYSILGPNKDTSLFCKCGDTESESCLYQEDEHHKDYRRPHTGLRNIPGLKRKTSKKNDEEEEDEDEEVLETQNSSSLLNFKRIKTSNSPRCSSKSPCSIERSLSQGFASLLSTGDKP

SEQ ID NO: 7955 - protein, 216 aa, Arabidopsis thaliana
MVDFTEFTCFYDFVFFMCRENGQKNITISRAITAWKLVLAGRFRLLNRWCDFIEKNQRHNISEDTWQQVLAFSRCVHENLEGYDSEGAWPVLIDDFVEHMYSILGPNKDTSLFCKCGDTESESCLYQEDEHHKDYRRPHTGLRNIPGLKRKTSKKNDEEEEDEDEEVLETQNSSSLLNFKRIKTSNSPRCSSKSPCSIERSLSQGFASLLSTGDKP

SEQ ID NO: 7956 - DNA, 1668 bp, Arabidopsis thaliana
acctatagtttcttcttctgaaaatcagcaacaaactacaaatcatccaatgatagaatttcagctttaattatcaaacaaattaaagataaccccattgataatatcgccacgtctcatcggatgaaatagtactatctgacacgacacgaatctcttatgagagaaacagaagagcacggaatctccataaatcaaaatacatgatcggagctttctcactatcaaaagctttccggcgacaaaaccaaccatctcctccttatctccaccatgatctcactccactcatcagccattaaagcctctctctacggctctttcccttcttcgttacgatcaacactctctgtttccttctctgctggatctcttattcggcttccttccgtcggcaagcgcaatctctccgtcgtcgtttcctctggaagagactcctcgatgtcatcaaacaatgtttctcgcggatcgtcttcaaaggttgctgctgaatctttcttcaggagtgtcttagggcagatggaaactgtttacctaaatcgaaacccgacgcctaaatccgtcttggagcttgttcgatctgttgatgaccagcaactttgctatgatcatctcgctttcagaacgtttgggattggtggttatgggattgactcgcttgcaagctttttccttgactatggatatacaccgatggatgagctaaaatttccggccaaaaagcttagagctttgtggtttgcacctcctaatgcttctgctgttcctggtggcagcggcgttaacggtcctttaccgagagtttttatctcagagctcctggtggaccagatgagttcacagactcaggatgtaatcagaaaatacacggaagcatcacctaatgggaaaaagtatgctggactttctagtgctttgggtactttaacttgggaaaagcctctatcttctgagtttgagcaattggctagggaaagtgaatacgcagcatggacccttgtcaatggatatgcacttaaccacgtcacgatttctgttcatcggcttaaatctcatctaaacaaaatcaagaagctcaatcagttcctcgaagaaaaaggtatcaaattgaactcagaaggaggagtccttaaagttagccctgatggtggtttgcagcaaagctcaactgtagcagattcgatatctttcaagttcgctgatggtgttaccaaatctatcccttgttcatacattgagtttgctgaacgccttgtacttccgcagtaccaaaatatacccgaaagcgagatacaagagtctcatcgacgtgatggatttgaggtcggaaatgctgacaagatcttcgagagcacatttcaggagcagctttcccgacgaaccgggtgatagcaaatagtagccacggctttggatatatgtcaatcatgcctcgtacatgtgtaacgagtaaaaagctcaaaactgcttgtaatcttgatcagtaaagatgctaatccaagaactcttaatcaaatatatttatgtgtatatttccgactactttcctagtggtgagaaggaggtaaacaaagataacaggaatagttacaaaacataaaacgataatgatgttgtatggttttgttcttgttctgcatttgagcttgttttaccgattggtaactt

SEQ ID NO: 7957 - protein, 371 aa, Arabidopsis thaliana
MISLHSSAIKASLYGSFPSSLRSTLSVSFSAGSLIRLPSVGKRNLSVVVSSGRDSSMSSNNVSRGSSSKVAAESFFRSVLGQMETVYLNRNPTPKSVLELVRSVDDQQLCYDHLAFRTFGIGGYGIDSLASFFLDYGYTPMDELKFPAKKLRALWFAPPNASAVPGGSGVNGPLPRVFISELLVDQMSSQTQDVIRKYTEASPNGKKYAGLSSALGTLTWEKPLSSEFEQLARESEYAAWTLVNGYALNHVTISVHRLKSHLNKIKKLNQFLEEKGIKLNSEGGVLKVSPDGGLQQSSTVADSISFKFADGVTKSIPCSYIEFAERLVLPQYQNIPESEIQESHRRDGFEVGNADKIFESTFQEQLSRRTG

SEQ ID NO: 7958 - protein, 315 aa, Arabidopsis thaliana
MSSNNVSRGSSSKVAAESFFRSVLGQMETVYLNRNPTPKSVLELVRSVDDQQLCYDHLAFRTFGIGGYGIDSLASFFLDYGYTPMDELKFPAKKLRALWFAPPNASAVPGGSGVNGPLPRVFISELLVDQMSSQTQDVIRKYTEASPNGKKYAGLSSALGTLTWEKPLSSEFEQLARESEYAAWTLVNGYALNHVTISVHRLKSHLNKIKKLNQFLEEKGIKLNSEGGVLKVSPDGGLQQSSTVADSISFKFADGVTKSIPCSYIEFAERLVLPQYQNIPESEIQESHRRDGFEVGNADKIFESTFQEQLSRRTG

SEQ ID NO: 7959 - protein, 289 aa, Arabidopsis thaliana
METVYLNRNPTPKSVLELVRSVDDQQLCYDHLAFRTFGIGGYGIDSLASFFLDYGYTPMDELKFPAKKLRALWFAPPNASAVPGGSGVNGPLPRVFISELLVDQMSSQTQDVIRKYTEASPNGKKYAGLSSALGTLTWEKPLSSEFEQLARESEYAAWTLVNGYALNHVTISVHRLKSHLNKIKKLNQFLEEKGIKLNSEGGVLKVSPDGGLQQSSTVADSISFKFADGVTKSIPCSYIEFAERLVLPQYQNIPESEIQESHRRDGFEVGNADKIFESTFQEQLSRRTG

SEQ ID NO: 7960 - DNA, 1403 bp, Arabidopsis thaliana
aaagaaacaaaacccatacaaaaaaagtcgaatccaaatctctctctccggcgatctcatccatggcggaaggcggcgaagattcccagcggttgaagaaaattgcggcggctgccttcgactacgaaaacgacgctcgatgggccgattactggtccaatatcctcatccctcctcacatggcttctcgtcccgaggtcgtcgaccatttcaagcgcaaattctaccaacgctacatcgatcctgatcttgttgtggagcctatgtcgacttcatcttcgtcttcacaatctgccaggccaactgctacatctgcatcttcaactgcatcttctaatgcaaatgaacaagttcgttcacggaactcaggatcggttcctcgaacctctgggccatctgctacgactggtgcaaccccaagttcaatgcgctgggatgagcagacgattcagttttcagtcaatgcttgggtttttgttatagctgtgctggcagtgctacctctaataccaaagaacctctcaaatagggcttatcgtctatctttcatgggaactgcatgctcatctctatattccttatactccttatacgggaggccaagggcatggaatatgcaagggctgcaagtttattttcaatcaattgtggcagcaaaggatttcatctacttcatctactgccttacattcgtcacttcacatctctgtctcaagtttgctttgattcccatcttgtgccgggcacttgaacaagtagccaagttcttgaggcgtaactttggtcggtccactatatacagaaagtacttggaagacccttgtgtgtgggtggagtcaaacactactaccctcaacatcttgtcatcgcaggctgagatagccattggcttccttctgattatctctctgctctcatggcaacgtaacattatacagacgttcatgtactggcagctattgaagctgatgtatcaagcaccggtaacagctggttaccaccagagcacgtggagcagaatagggaggacggtgactccgattatccaacgttacgctcctttcttgaatactccggtcagtgccgttcagagatggtggttcaggtgataaaaagaaacaaaatgcagaggtgacttttgaaacccttttgaaaaaccagaagattgattaaatagctttcaacaatccatgttaatttcatattcagcgtaaagtagattcttcttctcttttaacgttttcctttggctatcgctgaaataaaaatctcttattacttttggtttctagtttagttatatgtgactaattgcctttccagtttccaccttgccattttcattggtgagatacttcaaaagtttctaaaaaaataataataataatattttattatgattt

SEQ ID NO: 7961 - protein, 368 aa, Arabidopsis thaliana
RNKTHTKKVESKSLSPAISSMAEGGEDSQRLKKIAAAAFDYENDARWADYWSNILIPPHMASRPEVVDHFKRKFYQRYIDPDLVVEPMSTSSSSSQSARPTATSASSTASSNANEQVRSRNSGSVPRTSGPSATTGATPSSMRWDEQTIQFSVNAWVFVIAVLAVLPLIPKNLSNRAYRLSFMGTACSSLYSLYSLYGRPRAWNMQGLQVYFQSIVAAKDFIYFIYCLTFVTSHLCLKFALIPILCRALEQVAKFLRRNFGRSTIYRKYLEDPCVWVESNTTTLNILSSQAEIAIGFLLIISLLSWQRNIIQTFMYWQLLKLMYQAPVTAGYHQSTWSRIGRTVTPIIQRYAPFLNTPVSAVQRWWFR

SEQ ID NO: 7962 - protein, 348 aa, Arabidopsis thaliana
MAEGGEDSQRLKKIAAAAFDYENDARWADYWSNILIPPHMASRPEVVDHFKRKFYQRYIDPDLVVEPMSTSSSSSQSARPTATSASSTASSNANEQVRSRNSGSVPRTSGPSATTGATPSSMRWDEQTIQFSVNAWVFVIAVLAVLPLIPKNLSNRAYRLSFMGTACSSLYSLYSLYGRPRAWNMQGLQVYFQSIVAAKDFIYFIYCLTFVTSHLCLKFALIPILCRALEQVAKFLRRNFGRSTIYRKYLEDPCVWVESNTTTLNILSSQAEIAIGFLLIISLLSWQRNIIQTFMYWQLLKLMYQAPVTAGYHQSTWSRIGRTVTPIIQRYAPFLNTPVSAVQRWWFR

SEQ ID NO: 7963 - protein, 309 aa, Arabidopsis thaliana
MASRPEVVDHFKRKFYQRYIDPDLVVEPMSTSSSSSQSARPTATSASSTASSNANEQVRSRNSGSVPRTSGPSATTGATPSSMRWDEQTIQFSVNAWVFVIAVLAVLPLIPKNLSNRAYRLSFMGTACSSLYSLYSLYGRPRAWNMQGLQVYFQSIVAAKDFIYFIYCLTFVTSHLCLKFALIPILCRALEQVAKFLRRNFGRSTIYRKYLEDPCVWVESNTTTLNILSSQAEIAIGFLLIISLLSWQRNIIQTFMYWQLLKLMYQAPVTAGYHQSTWSRIGRTVTPIIQRYAPFLNTPVSAVQRWWFR

SEQ ID NO: 7964 - DNA, 835 bp, Arabidopsis thaliana
aagatactataaacaaatagagtacaggaccaacaaaattacattctctttgcctttgcctatcgcttaattctgcttttattaccagagaaagcaagaatatataagaatcagaaattgggtgaagaagaatggtcttgattactaagatgtctctctctttctacatcattcatcttctcattttctccttgatttccacttgtgttgtctccaaccaggccgaggataatcttcttcaaggcctaaacagctaccgaactgctcaaagagttcctccatttgccaagaatgagaaggctgattgtgtggctgatgagatcgccgacaagctcgaagatcagccatgcacaaaccacaccacagcgagcacggttactcctggctcggtacctccacggctgacgaactaccaggacattctctctgaatgcaaaatcgacccaaacactacccgtgacggattgatcttacctgtctgtatccctaaccggatcccgactttggctttaactaattacacccaaactggttatgctcggtatcttaatgattcgaggtatgtcggggctggtgttgggtcggagaaagagtggatggtggttgtattgacgacaagtactccaggtggaagctttacagctggtgttgctgctggcaaggcgacgtctgtgagagtaatggctggtttagggctaatggggttgttgtttagttgccttgtgctcttctgagctagtgattgttgtgtttttgtgtgaagactcttttgtatcttttaccctttgtttttaacgaatagtaaaaaaaacacatcataactaaattaagaagt

SEQ ID NO: 7965 - protein, 200 aa, Arabidopsis thaliana
MVLITKMSLSFYIIHLLIFSLISTCVVSNQAEDNLLQGLNSYRTAQRVPPFAKNEKADCVADEIADKLEDQPCTNHTTASTVTPGSVPPRLTNYQDILSECKIDPNTTRDGLILPVCIPNRIPTLALTNYTQTGYARYLNDSRYVGAGVGSEKEWMVVVLTTSTPGGSFTAGVAAGKATSVRVMAGLGLMGLLFSCLVLF

SEQ ID NO: 7966 - protein, 194 aa, Arabidopsis thaliana
MSLSFYIIHLLIFSLISTCVVSNQAEDNLLQGLNSYRTAQRVPPFAKNEKADCVADEIADKLEDQPCTNHTTASTVTPGSVPPRLTNYQDILSECKIDPNTTRDGLILPVCIPNRIPTLALTNYTQTGYARYLNDSRYVGAGVGSEKEWMVVVLTTSTPGGSFTAGVAAGKATSVRVMAGLGLMGLLFSCLVLF

SEQ ID NO: 7967 - DNA, 834 bp, Arabidopsis thaliana
agtgaaaacttaaatcagaacaaacaaaatggagtcacggaagattaaagtaatggcgacagcaatagctttaataatggtggctatggtggtggatgccgccggagctgataaagggaaagacaaggaagagtgtacggcgcagctggtcggtatggccacatgtcttccttacgtgcaaggaaaggcaaaatctccgacgccagactgttgctccggcctcaaacaagttattaattccgacatgaagtgtctttgtatgatcatccaagagaggaatgatcctgatttgggtctccaggtcaacgtctctctcgctctcgctcttccttctgtttgccacgccactgctgacatcactaagtgccctgctttgcttcatttggacccaaattctccggatgcccaagtgttctatcagctagctaaaggtctgaacgaaacagtctcagcctctgctcccactggctcggcctctgagcccactagtatgtcttcgaccccaggatccagtgctggtaacaacagtggtcggacgacctctgtgccaggcacgaaccacgctcaaagcttctccaaacaatggctagggctcgaagttgttgcccatttcttcgtaattttttatattttcatcctcgtttagataagtgaaaaggatgtgacgttggttttgtgcaactgtggacatttgcggtgacgttgattttgagttttgagtcttttgactgatgaatgtagtttcacttcgtgacaactcttctcagctttttattttttgtatggcgcaacataagacacgagcaatagttattctatggctcgtttgctttt

SEQ ID NO: 7968 - protein, 205 aa, Arabidopsis thaliana
MESRKIKVMATAIALIMVAMVVDAAGADKGKDKEECTAQLVGMATCLPYVQGKAKSPTPDCCSGLKQVINSDMKCLCMIIQERNDPDLGLQVNVSLALALPSVCHATADITKCPALLHLDPNSPDAQVFYQLAKGLNETVSASAPTGSASEPTSMSSTPGSSAGNNSGRTTSVPGTNHAQSFSKQWLGLEVVAHFFVIFYIFILV
